United States Patent Application Publication US 2026/0258423 A1 - sequence listing, part 3

SEQ ID NO: 61345 - DNA, 20 bp, synthetic construct
  source 1..20: mol_type = other DNA
cattgaaaccatccaagaca

SEQ ID NO: 61346 - DNA, 20 bp, synthetic construct
  source 1..20: mol_type = other DNA
ccattgaaaccatccaagac

SEQ ID NO: 61347 - DNA, 20 bp, synthetic construct
  source 1..20: mol_type = other DNA
tccattgaaaccatccaaga

SEQ ID NO: 61348 - DNA, 20 bp, synthetic construct
  source 1..20: mol_type = other DNA
ctccattgaaaccatccaag

SEQ ID NO: 61349 - DNA, 20 bp, synthetic construct
  source 1..20: mol_type = other DNA
actccattgaaaccatccaa

SEQ ID NO: 61350 - DNA, 20 bp, synthetic construct
  source 1..20: mol_type = other DNA
gactccattgaaaccatcca

SEQ ID NO: 61351 - DNA, 20 bp, synthetic construct
  source 1..20: mol_type = other DNA
agactccattgaaaccatcc

SEQ ID NO: 61352 - DNA, 20 bp, synthetic construct
  source 1..20: mol_type = other DNA
aagactccattgaaaccatc

SEQ ID NO: 61353 - DNA, 20 bp, synthetic construct
  source 1..20: mol_type = other DNA
taagactccattgaaaccat

SEQ ID NO: 61354 - DNA, 20 bp, synthetic construct
  source 1..20: mol_type = other DNA
ataagactccattgaaacca

SEQ ID NO: 61355 - DNA, 20 bp, synthetic construct
  source 1..20: mol_type = other DNA
cataagactccattgaaacc

SEQ ID NO: 61356 - DNA, 20 bp, synthetic construct
  source 1..20: mol_type = other DNA
gcataagactccattgaaac

SEQ ID NO: 61357 - DNA, 20 bp, synthetic construct
  source 1..20: mol_type = other DNA
tgcataagactccattgaaa

SEQ ID NO: 61358 - DNA, 20 bp, synthetic construct
  source 1..20: mol_type = other DNA
atgcataagactccattgaa

SEQ ID NO: 61359 - DNA, 20 bp, synthetic construct
  source 1..20: mol_type = other DNA
catgcataagactccattga

SEQ ID NO: 61360 - DNA, 20 bp, synthetic construct
  source 1..20: mol_type = other DNA
gcatgcataagactccattg

SEQ ID NO: 61361 - DNA, 20 bp, synthetic construct
  source 1..20: mol_type = other DNA
tgcatgcataagactccatt

SEQ ID NO: 61362 - DNA, 20 bp, synthetic construct
  source 1..20: mol_type = other DNA
ctgcatgcataagactccat

SEQ ID NO: 61363 - DNA, 20 bp, synthetic construct
  source 1..20: mol_type = other DNA
tctgcatgcataagactcca

SEQ ID NO: 61364 - DNA, 20 bp, synthetic construct
  source 1..20: mol_type = other DNA
atctgcatgcataagactcc

SEQ ID NO: 61365 - DNA, 20 bp, synthetic construct
  source 1..20: mol_type = other DNA
tatctgcatgcataagactc

SEQ ID NO: 61366 - DNA, 20 bp, synthetic construct
  source 1..20: mol_type = other DNA
atatctgcatgcataagact

SEQ ID NO: 61367 - DNA, 20 bp, synthetic construct
  source 1..20: mol_type = other DNA
tatatctgcatgcataagac

SEQ ID NO: 61368 - DNA, 20 bp, synthetic construct
  source 1..20: mol_type = other DNA
atatatctgcatgcataaga

SEQ ID NO: 61369 - DNA, 20 bp, synthetic construct
  source 1..20: mol_type = other DNA
aatatatctgcatgcataag

SEQ ID NO: 61370 - DNA, 20 bp, synthetic construct
  source 1..20: mol_type = other DNA
taatatatctgcatgcataa

SEQ ID NO: 61371 - DNA, 20 bp, synthetic construct
  source 1..20: mol_type = other DNA
ttaatatatctgcatgcata

SEQ ID NO: 61372 - DNA, 20 bp, synthetic construct
  source 1..20: mol_type = other DNA
tttaatatatctgcatgcat

SEQ ID NO: 61373 - DNA, 20 bp, synthetic construct
  source 1..20: mol_type = other DNA
ttttaatatatctgcatgca

SEQ ID NO: 61374 - DNA, 20 bp, synthetic construct
  source 1..20: mol_type = other DNA
gttttaatatatctgcatgc

SEQ ID NO: 61375 - DNA, 20 bp, synthetic construct
  source 1..20: mol_type = other DNA
agttttaatatatctgcatg

SEQ ID NO: 61376 - DNA, 20 bp, synthetic construct
  source 1..20: mol_type = other DNA
tagttttaatatatctgcat

SEQ ID NO: 61377 - DNA, 20 bp, synthetic construct
  source 1..20: mol_type = other DNA
ctagttttaatatatctgca

SEQ ID NO: 61378 - DNA, 20 bp, synthetic construct
  source 1..20: mol_type = other DNA
actagttttaatatatctgc

SEQ ID NO: 61379 - DNA, 20 bp, synthetic construct
  source 1..20: mol_type = other DNA
tactagttttaatatatctg

SEQ ID NO: 61380 - DNA, 20 bp, synthetic construct
  source 1..20: mol_type = other DNA
ttactagttttaatatatct

SEQ ID NO: 61381 - DNA, 20 bp, synthetic construct
  source 1..20: mol_type = other DNA
attactagttttaatatatc

SEQ ID NO: 61382 - DNA, 20 bp, synthetic construct
  source 1..20: mol_type = other DNA
tattactagttttaatatat

SEQ ID NO: 61383 - DNA, 20 bp, synthetic construct
  source 1..20: mol_type = other DNA
ttattactagttttaatata

SEQ ID NO: 61384 - DNA, 20 bp, synthetic construct
  source 1..20: mol_type = other DNA
tttattactagttttaatat

SEQ ID NO: 61385 - DNA, 20 bp, synthetic construct
  source 1..20: mol_type = other DNA
ctttattactagttttaata

SEQ ID NO: 61386 - DNA, 20 bp, synthetic construct
  source 1..20: mol_type = other DNA
gctttattactagttttaat

SEQ ID NO: 61387 - DNA, 20 bp, synthetic construct
  source 1..20: mol_type = other DNA
tgctttattactagttttaa

SEQ ID NO: 61388 - DNA, 20 bp, synthetic construct
  source 1..20: mol_type = other DNA
ttgctttattactagtttta

SEQ ID NO: 61389 - DNA, 20 bp, synthetic construct
  source 1..20: mol_type = other DNA
cttgctttattactagtttt

SEQ ID NO: 61390 - DNA, 20 bp, synthetic construct
  source 1..20: mol_type = other DNA
tcttgctttattactagttt

SEQ ID NO: 61391 - DNA, 20 bp, synthetic construct
  source 1..20: mol_type = other DNA
ctcttgctttattactagtt

SEQ ID NO: 61392 - DNA, 20 bp, synthetic construct
  source 1..20: mol_type = other DNA
tctcttgctttattactagt

SEQ ID NO: 61393 - DNA, 20 bp, synthetic construct
  source 1..20: mol_type = other DNA
ttctcttgctttattactag

SEQ ID NO: 61394 - DNA, 20 bp, synthetic construct
  source 1..20: mol_type = other DNA
cttctcttgctttattacta

SEQ ID NO: 61395 - DNA, 20 bp, synthetic construct
  source 1..20: mol_type = other DNA
ccttctcttgctttattact

SEQ ID NO: 61396 - DNA, 20 bp, synthetic construct
  source 1..20: mol_type = other DNA
tccttctcttgctttattac

SEQ ID NO: 61397 - DNA, 20 bp, synthetic construct
  source 1..20: mol_type = other DNA
ttccttctcttgctttatta

SEQ ID NO: 61398 - DNA, 20 bp, synthetic construct
  source 1..20: mol_type = other DNA
attccttctcttgctttatt

SEQ ID NO: 61399 - DNA, 20 bp, synthetic construct
  source 1..20: mol_type = other DNA
cattccttctcttgctttat

SEQ ID NO: 61400 - DNA, 20 bp, synthetic construct
  source 1..20: mol_type = other DNA
acattccttctcttgcttta

SEQ ID NO: 61401 - DNA, 20 bp, synthetic construct
  source 1..20: mol_type = other DNA
cacattccttctcttgcttt

SEQ ID NO: 61402 - DNA, 20 bp, synthetic construct
  source 1..20: mol_type = other DNA
ccacattccttctcttgctt

SEQ ID NO: 61403 - DNA, 20 bp, synthetic construct
  source 1..20: mol_type = other DNA
tccacattccttctcttgct

SEQ ID NO: 61404 - DNA, 20 bp, synthetic construct
  source 1..20: mol_type = other DNA
atccacattccttctcttgc

SEQ ID NO: 61405 - DNA, 20 bp, synthetic construct
  source 1..20: mol_type = other DNA
tatccacattccttctcttg

SEQ ID NO: 61406 - DNA, 20 bp, synthetic construct
  source 1..20: mol_type = other DNA
ttatccacattccttctctt

SEQ ID NO: 61407 - DNA, 20 bp, synthetic construct
  source 1..20: mol_type = other DNA
tttatccacattccttctct

SEQ ID NO: 61408 - DNA, 20 bp, synthetic construct
  source 1..20: mol_type = other DNA
atttatccacattccttctc

SEQ ID NO: 61409 - DNA, 20 bp, synthetic construct
  source 1..20: mol_type = other DNA
aatttatccacattccttct

SEQ ID NO: 61410 - DNA, 20 bp, synthetic construct
  source 1..20: mol_type = other DNA
taatttatccacattccttc

SEQ ID NO: 61411 - DNA, 20 bp, synthetic construct
  source 1..20: mol_type = other DNA
ataatttatccacattcctt

SEQ ID NO: 61412 - DNA, 20 bp, synthetic construct
  source 1..20: mol_type = other DNA
gataatttatccacattcct

SEQ ID NO: 61413 - DNA, 20 bp, synthetic construct
  source 1..20: mol_type = other DNA
agataatttatccacattcc

SEQ ID NO: 61414 - DNA, 20 bp, synthetic construct
  source 1..20: mol_type = other DNA
gagataatttatccacattc

SEQ ID NO: 61415 - DNA, 20 bp, synthetic construct
  source 1..20: mol_type = other DNA
agagataatttatccacatt

SEQ ID NO: 61416 - DNA, 20 bp, synthetic construct
  source 1..20: mol_type = other DNA
tagagataatttatccacat

SEQ ID NO: 61417 - DNA, 20 bp, synthetic construct
  source 1..20: mol_type = other DNA
ttagagataatttatccaca

SEQ ID NO: 61418 - DNA, 20 bp, synthetic construct
  source 1..20: mol_type = other DNA
attagagataatttatccac

SEQ ID NO: 61419 - DNA, 20 bp, synthetic construct
  source 1..20: mol_type = other DNA
aattagagataatttatcca

SEQ ID NO: 61420 - DNA, 20 bp, synthetic construct
  source 1..20: mol_type = other DNA
aaattagagataatttatcc

SEQ ID NO: 61421 - DNA, 20 bp, synthetic construct
  source 1..20: mol_type = other DNA
gaaattagagataatttatc

SEQ ID NO: 61422 - DNA, 20 bp, synthetic construct
  source 1..20: mol_type = other DNA
agaaattagagataatttat

SEQ ID NO: 61423 - DNA, 20 bp, synthetic construct
  source 1..20: mol_type = other DNA
tagaaattagagataattta

SEQ ID NO: 61424 - DNA, 20 bp, synthetic construct
  source 1..20: mol_type = other DNA
atagaaattagagataattt

SEQ ID NO: 61425 - DNA, 20 bp, synthetic construct
  source 1..20: mol_type = other DNA
aatagaaattagagataatt

SEQ ID NO: 61426 - DNA, 20 bp, synthetic construct
  source 1..20: mol_type = other DNA
aaatagaaattagagataat

SEQ ID NO: 61427 - DNA, 20 bp, synthetic construct
  source 1..20: mol_type = other DNA
aaaatagaaattagagataa

SEQ ID NO: 61428 - DNA, 20 bp, synthetic construct
  source 1..20: mol_type = other DNA
caaaatagaaattagagata

SEQ ID NO: 61429 - DNA, 20 bp, synthetic construct
  source 1..20: mol_type = other DNA
acaaaatagaaattagagat

SEQ ID NO: 61430 - DNA, 20 bp, synthetic construct
  source 1..20: mol_type = other DNA
aacaaaatagaaattagaga

SEQ ID NO: 61431 - DNA, 20 bp, synthetic construct
  source 1..20: mol_type = other DNA
gaacaaaatagaaattagag

SEQ ID NO: 61432 - DNA, 20 bp, synthetic construct
  source 1..20: mol_type = other DNA
agaacaaaatagaaattaga

SEQ ID NO: 61433 - DNA, 20 bp, synthetic construct
  source 1..20: mol_type = other DNA
tagaacaaaatagaaattag

SEQ ID NO: 61434 - DNA, 20 bp, synthetic construct
  source 1..20: mol_type = other DNA
atagaacaaaatagaaatta

SEQ ID NO: 61435 - DNA, 20 bp, synthetic construct
  source 1..20: mol_type = other DNA
aatagaacaaaatagaaatt

SEQ ID NO: 61436 - DNA, 20 bp, synthetic construct
  source 1..20: mol_type = other DNA
aaatagaacaaaatagaaat

SEQ ID NO: 61437 - DNA, 20 bp, synthetic construct
  source 1..20: mol_type = other DNA
gaaatagaacaaaatagaaa

SEQ ID NO: 61438 - DNA, 20 bp, synthetic construct
  source 1..20: mol_type = other DNA
agaaatagaacaaaatagaa

SEQ ID NO: 61439 - DNA, 20 bp, synthetic construct
  source 1..20: mol_type = other DNA
tagaaatagaacaaaataga

SEQ ID NO: 61440 - DNA, 20 bp, synthetic construct
  source 1..20: mol_type = other DNA
atagaaatagaacaaaatag

SEQ ID NO: 61441 - DNA, 20 bp, synthetic construct
  source 1..20: mol_type = other DNA
aatagaaatagaacaaaata

SEQ ID NO: 61442 - DNA, 20 bp, synthetic construct
  source 1..20: mol_type = other DNA
aaatagaaatagaacaaaat

SEQ ID NO: 61443 - DNA, 20 bp, synthetic construct
  source 1..20: mol_type = other DNA
gaaatagaaatagaacaaaa

SEQ ID NO: 61444 - DNA, 20 bp, synthetic construct
  source 1..20: mol_type = other DNA
tgaaatagaaatagaacaaa

SEQ ID NO: 61445 - DNA, 20 bp, synthetic construct
  source 1..20: mol_type = other DNA
atgaaatagaaatagaacaa

SEQ ID NO: 61446 - DNA, 20 bp, synthetic construct
  source 1..20: mol_type = other DNA
tatgaaatagaaatagaaca

SEQ ID NO: 61447 - DNA, 20 bp, synthetic construct
  source 1..20: mol_type = other DNA
gtatgaaatagaaatagaac

SEQ ID NO: 61448 - DNA, 20 bp, synthetic construct
  source 1..20: mol_type = other DNA
agtatgaaatagaaatagaa

SEQ ID NO: 61449 - DNA, 20 bp, synthetic construct
  source 1..20: mol_type = other DNA
gagtatgaaatagaaataga

SEQ ID NO: 61450 - DNA, 20 bp, synthetic construct
  source 1..20: mol_type = other DNA
ggagtatgaaatagaaatag

SEQ ID NO: 61451 - DNA, 20 bp, synthetic construct
  source 1..20: mol_type = other DNA
aggagtatgaaatagaaata

SEQ ID NO: 61452 - DNA, 20 bp, synthetic construct
  source 1..20: mol_type = other DNA
caggagtatgaaatagaaat

SEQ ID NO: 61453 - DNA, 20 bp, synthetic construct
  source 1..20: mol_type = other DNA
ccaggagtatgaaatagaaa

SEQ ID NO: 61454 - DNA, 20 bp, synthetic construct
  source 1..20: mol_type = other DNA
cccaggagtatgaaatagaa

SEQ ID NO: 61455 - DNA, 20 bp, synthetic construct
  source 1..20: mol_type = other DNA
tcccaggagtatgaaataga

SEQ ID NO: 61456 - DNA, 20 bp, synthetic construct
  source 1..20: mol_type = other DNA
ttcccaggagtatgaaatag

SEQ ID NO: 61457 - DNA, 20 bp, synthetic construct
  source 1..20: mol_type = other DNA
tttcccaggagtatgaaata

SEQ ID NO: 61458 - DNA, 20 bp, synthetic construct
  source 1..20: mol_type = other DNA
ctttcccaggagtatgaaat

SEQ ID NO: 61459 - DNA, 20 bp, synthetic construct
  source 1..20: mol_type = other DNA
tctttcccaggagtatgaaa

SEQ ID NO: 61460 - DNA, 20 bp, synthetic construct
  source 1..20: mol_type = other DNA
ttctttcccaggagtatgaa

SEQ ID NO: 61461 - DNA, 20 bp, synthetic construct
  source 1..20: mol_type = other DNA
attctttcccaggagtatga

SEQ ID NO: 61462 - DNA, 20 bp, synthetic construct
  source 1..20: mol_type = other DNA
tattctttcccaggagtatg

SEQ ID NO: 61463 - DNA, 20 bp, synthetic construct
  source 1..20: mol_type = other DNA
atattctttcccaggagtat

SEQ ID NO: 61464 - DNA, 20 bp, synthetic construct
  source 1..20: mol_type = other DNA
aatattctttcccaggagta

SEQ ID NO: 61465 - DNA, 20 bp, synthetic construct
  source 1..20: mol_type = other DNA
taatattctttcccaggagt

SEQ ID NO: 61466 - DNA, 20 bp, synthetic construct
  source 1..20: mol_type = other DNA
ttaatattctttcccaggag

SEQ ID NO: 61467 - DNA, 20 bp, synthetic construct
  source 1..20: mol_type = other DNA
cttaatattctttcccagga

SEQ ID NO: 61468 - DNA, 20 bp, synthetic construct
  source 1..20: mol_type = other DNA
acttaatattctttcccagg

SEQ ID NO: 61469 - DNA, 20 bp, synthetic construct
  source 1..20: mol_type = other DNA
cacttaatattctttcccag

SEQ ID NO: 61470 - DNA, 20 bp, synthetic construct
  source 1..20: mol_type = other DNA
ccacttaatattctttccca

SEQ ID NO: 61471 - DNA, 20 bp, synthetic construct
  source 1..20: mol_type = other DNA
cccacttaatattctttccc

SEQ ID NO: 61472 - DNA, 20 bp, synthetic construct
  source 1..20: mol_type = other DNA
gcccacttaatattctttcc

SEQ ID NO: 61473 - DNA, 20 bp, synthetic construct
  source 1..20: mol_type = other DNA
tgcccacttaatattctttc

SEQ ID NO: 61474 - DNA, 20 bp, synthetic construct
  source 1..20: mol_type = other DNA
atgcccacttaatattcttt

SEQ ID NO: 61475 - DNA, 20 bp, synthetic construct
  source 1..20: mol_type = other DNA
catgcccacttaatattctt

SEQ ID NO: 61476 - DNA, 20 bp, synthetic construct
  source 1..20: mol_type = other DNA
acatgcccacttaatattct

SEQ ID NO: 61477 - DNA, 20 bp, synthetic construct
  source 1..20: mol_type = other DNA
cacatgcccacttaatattc

SEQ ID NO: 61478 - DNA, 20 bp, synthetic construct
  source 1..20: mol_type = other DNA
acacatgcccacttaatatt

SEQ ID NO: 61479 - DNA, 20 bp, synthetic construct
  source 1..20: mol_type = other DNA
tacacatgcccacttaatat

SEQ ID NO: 61480 - DNA, 20 bp, synthetic construct
  source 1..20: mol_type = other DNA
gtacacatgcccacttaata

SEQ ID NO: 61481 - DNA, 20 bp, synthetic construct
  source 1..20: mol_type = other DNA
agtacacatgcccacttaat

SEQ ID NO: 61482 - DNA, 20 bp, synthetic construct
  source 1..20: mol_type = other DNA
aagtacacatgcccacttaa

SEQ ID NO: 61483 - DNA, 20 bp, synthetic construct
  source 1..20: mol_type = other DNA
caagtacacatgcccactta

SEQ ID NO: 61484 - DNA, 20 bp, synthetic construct
  source 1..20: mol_type = other DNA
tcaagtacacatgcccactt

SEQ ID NO: 61485 - DNA, 20 bp, synthetic construct
  source 1..20: mol_type = other DNA
ttcaagtacacatgcccact

SEQ ID NO: 61486 - DNA, 20 bp, synthetic construct
  source 1..20: mol_type = other DNA
gttcaagtacacatgcccac

SEQ ID NO: 61487 - DNA, 20 bp, synthetic construct
  source 1..20: mol_type = other DNA
tgttcaagtacacatgccca

SEQ ID NO: 61488 - DNA, 20 bp, synthetic construct
  source 1..20: mol_type = other DNA
ctgttcaagtacacatgccc

SEQ ID NO: 61489 - DNA, 20 bp, synthetic construct
  source 1..20: mol_type = other DNA
actgttcaagtacacatgcc

SEQ ID NO: 61490 - DNA, 20 bp, synthetic construct
  source 1..20: mol_type = other DNA
aactgttcaagtacacatgc

SEQ ID NO: 61491 - DNA, 20 bp, synthetic construct
  source 1..20: mol_type = other DNA
caactgttcaagtacacatg

SEQ ID NO: 61492 - DNA, 20 bp, synthetic construct
  source 1..20: mol_type = other DNA
acaactgttcaagtacacat

SEQ ID NO: 61493 - DNA, 20 bp, synthetic construct
  source 1..20: mol_type = other DNA
aacaactgttcaagtacaca

SEQ ID NO: 61494 - DNA, 20 bp, synthetic construct
  source 1..20: mol_type = other DNA
gaacaactgttcaagtacac

SEQ ID NO: 61495 - DNA, 20 bp, synthetic construct
  source 1..20: mol_type = other DNA
agaacaactgttcaagtaca

SEQ ID NO: 61496 - DNA, 20 bp, synthetic construct
  source 1..20: mol_type = other DNA
cagaacaactgttcaagtac

SEQ ID NO: 61497 - DNA, 20 bp, synthetic construct
  source 1..20: mol_type = other DNA
acagaacaactgttcaagta

SEQ ID NO: 61498 - DNA, 20 bp, synthetic construct
  source 1..20: mol_type = other DNA
aacagaacaactgttcaagt

SEQ ID NO: 61499 - DNA, 20 bp, synthetic construct
  source 1..20: mol_type = other DNA
aaacagaacaactgttcaag

SEQ ID NO: 61500 - DNA, 20 bp, synthetic construct
  source 1..20: mol_type = other DNA
aaaacagaacaactgttcaa

SEQ ID NO: 61501 - DNA, 20 bp, synthetic construct
  source 1..20: mol_type = other DNA
aaaaacagaacaactgttca

SEQ ID NO: 61502 - DNA, 20 bp, synthetic construct
  source 1..20: mol_type = other DNA
aaaaaacagaacaactgttc

SEQ ID NO: 61503 - DNA, 20 bp, synthetic construct
  source 1..20: mol_type = other DNA
taaaaaacagaacaactgtt

SEQ ID NO: 61504 - DNA, 20 bp, synthetic construct
  source 1..20: mol_type = other DNA
ataaaaaacagaacaactgt

SEQ ID NO: 61505 - DNA, 20 bp, synthetic construct
  source 1..20: mol_type = other DNA
aataaaaaacagaacaactg

SEQ ID NO: 61506 - DNA, 20 bp, synthetic construct
  source 1..20: mol_type = other DNA
taataaaaaacagaacaact

SEQ ID NO: 61507 - DNA, 20 bp, synthetic construct
  source 1..20: mol_type = other DNA
ctaataaaaaacagaacaac

SEQ ID NO: 61508 - DNA, 20 bp, synthetic construct
  source 1..20: mol_type = other DNA
tctaataaaaaacagaacaa

SEQ ID NO: 61509 - DNA, 20 bp, synthetic construct
  source 1..20: mol_type = other DNA
ttctaataaaaaacagaaca

SEQ ID NO: 61510 - DNA, 20 bp, synthetic construct
  source 1..20: mol_type = other DNA
tttctaataaaaaacagaac

SEQ ID NO: 61511 - DNA, 20 bp, synthetic construct
  source 1..20: mol_type = other DNA
ttttctaataaaaaacagaa

SEQ ID NO: 61512 - DNA, 20 bp, synthetic construct
  source 1..20: mol_type = other DNA
cttttctaataaaaaacaga

SEQ ID NO: 61513 - DNA, 20 bp, synthetic construct
  source 1..20: mol_type = other DNA
tcttttctaataaaaaacag

SEQ ID NO: 61514 - DNA, 20 bp, synthetic construct
  source 1..20: mol_type = other DNA
ttcttttctaataaaaaaca

SEQ ID NO: 61515 - DNA, 20 bp, synthetic construct
  source 1..20: mol_type = other DNA
attcttttctaataaaaaac

SEQ ID NO: 61516 - DNA, 20 bp, synthetic construct
  source 1..20: mol_type = other DNA
gattcttttctaataaaaaa

SEQ ID NO: 61517 - DNA, 20 bp, synthetic construct
  source 1..20: mol_type = other DNA
ggattcttttctaataaaaa

SEQ ID NO: 61518 - DNA, 20 bp, synthetic construct
  source 1..20: mol_type = other DNA
cggattcttttctaataaaa

SEQ ID NO: 61519 - DNA, 20 bp, synthetic construct
  source 1..20: mol_type = other DNA
tcggattcttttctaataaa

SEQ ID NO: 61520 - DNA, 20 bp, synthetic construct
  source 1..20: mol_type = other DNA
ttcggattcttttctaataa

SEQ ID NO: 61521 - DNA, 20 bp, synthetic construct
  source 1..20: mol_type = other DNA
attcggattcttttctaata

SEQ ID NO: 61522 - DNA, 20 bp, synthetic construct
  source 1..20: mol_type = other DNA
gattcggattcttttctaat

SEQ ID NO: 61523 - DNA, 20 bp, synthetic construct
  source 1..20: mol_type = other DNA
agattcggattcttttctaa

SEQ ID NO: 61524 - DNA, 20 bp, synthetic construct
  source 1..20: mol_type = other DNA
tagattcggattcttttcta

SEQ ID NO: 61525 - DNA, 20 bp, synthetic construct
  source 1..20: mol_type = other DNA
atagattcggattcttttct

SEQ ID NO: 61526 - DNA, 20 bp, synthetic construct
  source 1..20: mol_type = other DNA
tatagattcggattcttttc

SEQ ID NO: 61527 - DNA, 20 bp, synthetic construct
  source 1..20: mol_type = other DNA
ttatagattcggattctttt

SEQ ID NO: 61528 - DNA, 20 bp, synthetic construct
  source 1..20: mol_type = other DNA
tttatagattcggattcttt

SEQ ID NO: 61529 - DNA, 20 bp, synthetic construct
  source 1..20: mol_type = other DNA
ttttatagattcggattctt

SEQ ID NO: 61530 - DNA, 20 bp, synthetic construct
  source 1..20: mol_type = other DNA
attttatagattcggattct

SEQ ID NO: 61531 - DNA, 20 bp, synthetic construct
  source 1..20: mol_type = other DNA
cattttatagattcggattc

SEQ ID NO: 61532 - DNA, 20 bp, synthetic construct
  source 1..20: mol_type = other DNA
acattttatagattcggatt

SEQ ID NO: 61533 - DNA, 20 bp, synthetic construct
  source 1..20: mol_type = other DNA
aacattttatagattcggat

SEQ ID NO: 61534 - DNA, 20 bp, synthetic construct
  source 1..20: mol_type = other DNA
aaacattttatagattcgga

SEQ ID NO: 61535 - DNA, 20 bp, synthetic construct
  source 1..20: mol_type = other DNA
aaaacattttatagattcgg

SEQ ID NO: 61536 - DNA, 20 bp, synthetic construct
  source 1..20: mol_type = other DNA
taaaacattttatagattcg

SEQ ID NO: 61537 - DNA, 20 bp, synthetic construct
  source 1..20: mol_type = other DNA
gtaaaacattttatagattc

SEQ ID NO: 61538 - DNA, 20 bp, synthetic construct
  source 1..20: mol_type = other DNA
tgtaaaacattttatagatt

SEQ ID NO: 61539 - DNA, 20 bp, synthetic construct
  source 1..20: mol_type = other DNA
atgtaaaacattttatagat

SEQ ID NO: 61540 - DNA, 20 bp, synthetic construct
  source 1..20: mol_type = other DNA
tatgtaaaacattttataga

SEQ ID NO: 61541 - DNA, 20 bp, synthetic construct
  source 1..20: mol_type = other DNA
atatgtaaaacattttatag

SEQ ID NO: 61542 - DNA, 20 bp, synthetic construct
  source 1..20: mol_type = other DNA
aatatgtaaaacattttata

SEQ ID NO: 61543 - DNA, 20 bp, synthetic construct
  source 1..20: mol_type = other DNA
aaatatgtaaaacattttat

SEQ ID NO: 61544 - DNA, 20 bp, synthetic construct
  source 1..20: mol_type = other DNA
caaatatgtaaaacatttta

SEQ ID NO: 61545 - DNA, 20 bp, synthetic construct
  source 1..20: mol_type = other DNA
gcaaatatgtaaaacatttt

SEQ ID NO: 61546 - DNA, 20 bp, synthetic construct
  source 1..20: mol_type = other DNA
ggcaaatatgtaaaacattt

SEQ ID NO: 61547 - DNA, 20 bp, synthetic construct
  source 1..20: mol_type = other DNA
tggcaaatatgtaaaacatt

SEQ ID NO: 61548 - DNA, 20 bp, synthetic construct
  source 1..20: mol_type = other DNA
ctggcaaatatgtaaaacat

SEQ ID NO: 61549 - DNA, 20 bp, synthetic construct
  source 1..20: mol_type = other DNA
cctggcaaatatgtaaaaca

SEQ ID NO: 61550 - DNA, 20 bp, synthetic construct
  source 1..20: mol_type = other DNA
ccctggcaaatatgtaaaac

SEQ ID NO: 61551 - DNA, 20 bp, synthetic construct
  source 1..20: mol_type = other DNA
tccctggcaaatatgtaaaa

SEQ ID NO: 61552 - DNA, 20 bp, synthetic construct
  source 1..20: mol_type = other DNA
ttccctggcaaatatgtaaa

SEQ ID NO: 61553 - DNA, 20 bp, synthetic construct
  source 1..20: mol_type = other DNA
tttccctggcaaatatgtaa

SEQ ID NO: 61554 - DNA, 20 bp, synthetic construct
  source 1..20: mol_type = other DNA
gtttccctggcaaatatgta

SEQ ID NO: 61555 - DNA, 20 bp, synthetic construct
  source 1..20: mol_type = other DNA
tgtttccctggcaaatatgt

SEQ ID NO: 61556 - DNA, 20 bp, synthetic construct
  source 1..20: mol_type = other DNA
ctgtttccctggcaaatatg

SEQ ID NO: 61557 - DNA, 20 bp, synthetic construct
  source 1..20: mol_type = other DNA
tctgtttccctggcaaatat

SEQ ID NO: 61558 - DNA, 20 bp, synthetic construct
  source 1..20: mol_type = other DNA
ttctgtttccctggcaaata

SEQ ID NO: 61559 - DNA, 20 bp, synthetic construct
  source 1..20: mol_type = other DNA
tttctgtttccctggcaaat

SEQ ID NO: 61560 - DNA, 20 bp, synthetic construct
  source 1..20: mol_type = other DNA
ttttctgtttccctggcaaa

SEQ ID NO: 61561 - DNA, 20 bp, synthetic construct
  source 1..20: mol_type = other DNA
cttttctgtttccctggcaa

SEQ ID NO: 61562 - DNA, 20 bp, synthetic construct
  source 1..20: mol_type = other DNA
tcttttctgtttccctggca

SEQ ID NO: 61563 - DNA, 20 bp, synthetic construct
  source 1..20: mol_type = other DNA
atcttttctgtttccctggc

SEQ ID NO: 61564 - DNA, 20 bp, synthetic construct
  source 1..20: mol_type = other DNA
tatcttttctgtttccctgg

SEQ ID NO: 61565 - DNA, 20 bp, synthetic construct
  source 1..20: mol_type = other DNA
atatcttttctgtttccctg

SEQ ID NO: 61566 - DNA, 20 bp, synthetic construct
  source 1..20: mol_type = other DNA
aatatcttttctgtttccct

SEQ ID NO: 61567 - DNA, 20 bp, synthetic construct
  source 1..20: mol_type = other DNA
aaatatcttttctgtttccc

SEQ ID NO: 61568 - DNA, 20 bp, synthetic construct
  source 1..20: mol_type = other DNA
caaatatcttttctgtttcc

SEQ ID NO: 61569 - DNA, 20 bp, synthetic construct
  source 1..20: mol_type = other DNA
acaaatatcttttctgtttc

SEQ ID NO: 61570 - DNA, 20 bp, synthetic construct
  source 1..20: mol_type = other DNA
tacaaatatcttttctgttt

SEQ ID NO: 61571 - DNA, 20 bp, synthetic construct
  source 1..20: mol_type = other DNA
gtacaaatatcttttctgtt

SEQ ID NO: 61572 - DNA, 20 bp, synthetic construct
  source 1..20: mol_type = other DNA
tgtacaaatatcttttctgt

SEQ ID NO: 61573 - DNA, 20 bp, synthetic construct
  source 1..20: mol_type = other DNA
ctgtacaaatatcttttctg

SEQ ID NO: 61574 - DNA, 20 bp, synthetic construct
  source 1..20: mol_type = other DNA
gctgtacaaatatcttttct

SEQ ID NO: 61575 - DNA, 20 bp, synthetic construct
  source 1..20: mol_type = other DNA
agctgtacaaatatcttttc

SEQ ID NO: 61576 - DNA, 20 bp, synthetic construct
  source 1..20: mol_type = other DNA
cagctgtacaaatatctttt

SEQ ID NO: 61577 - DNA, 20 bp, synthetic construct
  source 1..20: mol_type = other DNA
acagctgtacaaatatcttt

SEQ ID NO: 61578 - DNA, 20 bp, synthetic construct
  source 1..20: mol_type = other DNA
tacagctgtacaaatatctt

SEQ ID NO: 61579 - DNA, 20 bp, synthetic construct
  source 1..20: mol_type = other DNA
ttacagctgtacaaatatct

SEQ ID NO: 61580 - DNA, 20 bp, synthetic construct
  source 1..20: mol_type = other DNA
cttacagctgtacaaatatc

SEQ ID NO: 61581 - DNA, 20 bp, synthetic construct
  source 1..20: mol_type = other DNA
tcttacagctgtacaaatat

SEQ ID NO: 61582 - DNA, 20 bp, synthetic construct
  source 1..20: mol_type = other DNA
ttcttacagctgtacaaata

SEQ ID NO: 61583 - DNA, 20 bp, synthetic construct
  source 1..20: mol_type = other DNA
attcttacagctgtacaaat

SEQ ID NO: 61584 - DNA, 20 bp, synthetic construct
  source 1..20: mol_type = other DNA
aattcttacagctgtacaaa

SEQ ID NO: 61585 - DNA, 20 bp, synthetic construct
  source 1..20: mol_type = other DNA
caattcttacagctgtacaa

SEQ ID NO: 61586 - DNA, 20 bp, synthetic construct
  source 1..20: mol_type = other DNA
ccaattcttacagctgtaca

SEQ ID NO: 61587 - DNA, 20 bp, synthetic construct
  source 1..20: mol_type = other DNA
tccaattcttacagctgtac

SEQ ID NO: 61588 - DNA, 20 bp, synthetic construct
  source 1..20: mol_type = other DNA
ttccaattcttacagctgta

SEQ ID NO: 61589 - DNA, 20 bp, synthetic construct
  source 1..20: mol_type = other DNA
attccaattcttacagctgt

SEQ ID NO: 61590 - DNA, 20 bp, synthetic construct
  source 1..20: mol_type = other DNA
aattccaattcttacagctg

SEQ ID NO: 61591 - DNA, 20 bp, synthetic construct
  source 1..20: mol_type = other DNA
taattccaattcttacagct

SEQ ID NO: 61592 - DNA, 20 bp, synthetic construct
  source 1..20: mol_type = other DNA
ttaattccaattcttacagc

SEQ ID NO: 61593 - DNA, 20 bp, synthetic construct
  source 1..20: mol_type = other DNA
attaattccaattcttacag

SEQ ID NO: 61594 - DNA, 20 bp, synthetic construct
  source 1..20: mol_type = other DNA
aattaattccaattcttaca

SEQ ID NO: 61595 - DNA, 20 bp, synthetic construct
  source 1..20: mol_type = other DNA
aaattaattccaattcttac

SEQ ID NO: 61596 - DNA, 20 bp, synthetic construct
  source 1..20: mol_type = other DNA
gaaattaattccaattctta

SEQ ID NO: 61597 - DNA, 20 bp, synthetic construct
  source 1..20: mol_type = other DNA
tgaaattaattccaattctt

SEQ ID NO: 61598 - DNA, 20 bp, synthetic construct
  source 1..20: mol_type = other DNA
atgaaattaattccaattct

SEQ ID NO: 61599 - DNA, 20 bp, synthetic construct
  source 1..20: mol_type = other DNA
aatgaaattaattccaattc

SEQ ID NO: 61600 - DNA, 20 bp, synthetic construct
  source 1..20: mol_type = other DNA
aaatgaaattaattccaatt

SEQ ID NO: 61601 - DNA, 20 bp, synthetic construct
  source 1..20: mol_type = other DNA
aaaatgaaattaattccaat

SEQ ID NO: 61602 - DNA, 20 bp, synthetic construct
  source 1..20: mol_type = other DNA
taaaatgaaattaattccaa

SEQ ID NO: 61603 - DNA, 20 bp, synthetic construct
  source 1..20: mol_type = other DNA
gtaaaatgaaattaattcca

SEQ ID NO: 61604 - DNA, 20 bp, synthetic construct
  source 1..20: mol_type = other DNA
agtaaaatgaaattaattcc

SEQ ID NO: 61605 - DNA, 20 bp, synthetic construct
  source 1..20: mol_type = other DNA
cagtaaaatgaaattaattc

SEQ ID NO: 61606 - DNA, 20 bp, synthetic construct
  source 1..20: mol_type = other DNA
tcagtaaaatgaaattaatt

SEQ ID NO: 61607 - DNA, 20 bp, synthetic construct
  source 1..20: mol_type = other DNA
gtcagtaaaatgaaattaat

SEQ ID NO: 61608 - DNA, 20 bp, synthetic construct
  source 1..20: mol_type = other DNA
agtcagtaaaatgaaattaa

SEQ ID NO: 61609 - DNA, 20 bp, synthetic construct
  source 1..20: mol_type = other DNA
aagtcagtaaaatgaaatta

SEQ ID NO: 61610 - DNA, 20 bp, synthetic construct
  source 1..20: mol_type = other DNA
aaagtcagtaaaatgaaatt

SEQ ID NO: 61611 - DNA, 20 bp, synthetic construct
  source 1..20: mol_type = other DNA
aaaagtcagtaaaatgaaat

SEQ ID NO: 61612 - DNA, 20 bp, synthetic construct
  source 1..20: mol_type = other DNA
gaaaagtcagtaaaatgaaa

SEQ ID NO: 61613 - DNA, 20 bp, synthetic construct
  source 1..20: mol_type = other DNA
ggaaaagtcagtaaaatgaa

SEQ ID NO: 61614 - DNA, 20 bp, synthetic construct
  source 1..20: mol_type = other DNA
aggaaaagtcagtaaaatga

SEQ ID NO: 61615 - DNA, 20 bp, synthetic construct
  source 1..20: mol_type = other DNA
aaggaaaagtcagtaaaatg

SEQ ID NO: 61616 - DNA, 20 bp, synthetic construct
  source 1..20: mol_type = other DNA
taaggaaaagtcagtaaaat

SEQ ID NO: 61617 - DNA, 20 bp, synthetic construct
  source 1..20: mol_type = other DNA
ttaaggaaaagtcagtaaaa

SEQ ID NO: 61618 - DNA, 20 bp, synthetic construct
  source 1..20: mol_type = other DNA
gttaaggaaaagtcagtaaa

SEQ ID NO: 61619 - DNA, 20 bp, synthetic construct
  source 1..20: mol_type = other DNA
ggttaaggaaaagtcagtaa

SEQ ID NO: 61620 - DNA, 20 bp, synthetic construct
  source 1..20: mol_type = other DNA
aggttaaggaaaagtcagta

SEQ ID NO: 61621 - DNA, 20 bp, synthetic construct
  source 1..20: mol_type = other DNA
taggttaaggaaaagtcagt

SEQ ID NO: 61622 - DNA, 20 bp, synthetic construct
  source 1..20: mol_type = other DNA
ttaggttaaggaaaagtcag

SEQ ID NO: 61623 - DNA, 20 bp, synthetic construct
  source 1..20: mol_type = other DNA
attaggttaaggaaaagtca

SEQ ID NO: 61624 - DNA, 20 bp, synthetic construct
  source 1..20: mol_type = other DNA
aattaggttaaggaaaagtc

SEQ ID NO: 61625 - DNA, 20 bp, synthetic construct
  source 1..20: mol_type = other DNA
gaattaggttaaggaaaagt

SEQ ID NO: 61626 - DNA, 20 bp, synthetic construct
  source 1..20: mol_type = other DNA
agaattaggttaaggaaaag

SEQ ID NO: 61627 - DNA, 20 bp, synthetic construct
  source 1..20: mol_type = other DNA
cagaattaggttaaggaaaa

SEQ ID NO: 61628 - DNA, 20 bp, synthetic construct
  source 1..20: mol_type = other DNA
tcagaattaggttaaggaaa

SEQ ID NO: 61629 - DNA, 20 bp, synthetic construct
  source 1..20: mol_type = other DNA
ttcagaattaggttaaggaa

SEQ ID NO: 61630 - DNA, 20 bp, synthetic construct
  source 1..20: mol_type = other DNA
gttcagaattaggttaagga

SEQ ID NO: 61631 - DNA, 20 bp, synthetic construct
  source 1..20: mol_type = other DNA
tgttcagaattaggttaagg

SEQ ID NO: 61632 - DNA, 20 bp, synthetic construct
  source 1..20: mol_type = other DNA
gtgttcagaattaggttaag

SEQ ID NO: 61633 - DNA, 20 bp, synthetic construct
  source 1..20: mol_type = other DNA
agtgttcagaattaggttaa

SEQ ID NO: 61634 - DNA, 20 bp, synthetic construct
  source 1..20: mol_type = other DNA
aagtgttcagaattaggtta

SEQ ID NO: 61635 - DNA, 20 bp, synthetic construct
  source 1..20: mol_type = other DNA
aaagtgttcagaattaggtt

SEQ ID NO: 61636 - DNA, 20 bp, synthetic construct
  source 1..20: mol_type = other DNA
aaaagtgttcagaattaggt

SEQ ID NO: 61637 - DNA, 20 bp, synthetic construct
  source 1..20: mol_type = other DNA
caaaagtgttcagaattagg

SEQ ID NO: 61638 - DNA, 20 bp, synthetic construct
  source 1..20: mol_type = other DNA
gcaaaagtgttcagaattag

SEQ ID NO: 61639 - DNA, 20 bp, synthetic construct
  source 1..20: mol_type = other DNA
ggcaaaagtgttcagaatta

SEQ ID NO: 61640 - DNA, 20 bp, synthetic construct
  source 1..20: mol_type = other DNA
tggcaaaagtgttcagaatt

SEQ ID NO: 61641 - DNA, 20 bp, synthetic construct
  source 1..20: mol_type = other DNA
atggcaaaagtgttcagaat

SEQ ID NO: 61642 - DNA, 20 bp, synthetic construct
  source 1..20: mol_type = other DNA
tatggcaaaagtgttcagaa

SEQ ID NO: 61643 - DNA, 20 bp, synthetic construct
  source 1..20: mol_type = other DNA
ctatggcaaaagtgttcaga

SEQ ID NO: 61644 - DNA, 20 bp, synthetic construct
  source 1..20: mol_type = other DNA
cctatggcaaaagtgttcag

SEQ ID NO: 61645 - DNA, 20 bp, synthetic construct
  source 1..20: mol_type = other DNA
acctatggcaaaagtgttca

SEQ ID NO: 61646 - DNA, 20 bp, synthetic construct
  source 1..20: mol_type = other DNA
aacctatggcaaaagtgttc

SEQ ID NO: 61647 - DNA, 20 bp, synthetic construct
  source 1..20: mol_type = other DNA
aaacctatggcaaaagtgtt

SEQ ID NO: 61648 - DNA, 20 bp, synthetic construct
  source 1..20: mol_type = other DNA
caaacctatggcaaaagtgt

SEQ ID NO: 61649 - DNA, 20 bp, synthetic construct
  source 1..20: mol_type = other DNA
tcaaacctatggcaaaagtg

SEQ ID NO: 61650 - DNA, 20 bp, synthetic construct
  source 1..20: mol_type = other DNA
ctcaaacctatggcaaaagt

SEQ ID NO: 61651 - DNA, 20 bp, synthetic construct
  source 1..20: mol_type = other DNA
tctcaaacctatggcaaaag

SEQ ID NO: 61652 - DNA, 20 bp, synthetic construct
  source 1..20: mol_type = other DNA
ttctcaaacctatggcaaaa

SEQ ID NO: 61653 - DNA, 20 bp, synthetic construct
  source 1..20: mol_type = other DNA
attctcaaacctatggcaaa

SEQ ID NO: 61654 - DNA, 20 bp, synthetic construct
  source 1..20: mol_type = other DNA
tattctcaaacctatggcaa

SEQ ID NO: 61655 - DNA, 20 bp, synthetic construct
  source 1..20: mol_type = other DNA
ttattctcaaacctatggca

SEQ ID NO: 61656 - DNA, 20 bp, synthetic construct
  source 1..20: mol_type = other DNA
cttattctcaaacctatggc

SEQ ID NO: 61657 - DNA, 20 bp, synthetic construct
  source 1..20: mol_type = other DNA
acttattctcaaacctatgg

SEQ ID NO: 61658 - DNA, 20 bp, synthetic construct
  source 1..20: mol_type = other DNA
aacttattctcaaacctatg

SEQ ID NO: 61659 - DNA, 20 bp, synthetic construct
  source 1..20: mol_type = other DNA
caacttattctcaaacctat

SEQ ID NO: 61660 - DNA, 20 bp, synthetic construct
  source 1..20: mol_type = other DNA
acaacttattctcaaaccta

SEQ ID NO: 61661 - DNA, 20 bp, synthetic construct
  source 1..20: mol_type = other DNA
aacaacttattctcaaacct

SEQ ID NO: 61662 - DNA, 20 bp, synthetic construct
  source 1..20: mol_type = other DNA
taacaacttattctcaaacc

SEQ ID NO: 61663 - DNA, 20 bp, synthetic construct
  source 1..20: mol_type = other DNA
ataacaacttattctcaaac

SEQ ID NO: 61664 - DNA, 20 bp, synthetic construct
  source 1..20: mol_type = other DNA
tataacaacttattctcaaa

SEQ ID NO: 61665 - DNA, 20 bp, synthetic construct
  source 1..20: mol_type = other DNA
ttataacaacttattctcaa

SEQ ID NO: 61666 - DNA, 20 bp, synthetic construct
  source 1..20: mol_type = other DNA
tttataacaacttattctca

SEQ ID NO: 61667 - DNA, 20 bp, synthetic construct
  source 1..20: mol_type = other DNA
ttttataacaacttattctc

SEQ ID NO: 61668 - DNA, 20 bp, synthetic construct
  source 1..20: mol_type = other DNA
attttataacaacttattct

SEQ ID NO: 61669 - DNA, 20 bp, synthetic construct
  source 1..20: mol_type = other DNA
cattttataacaacttattc

SEQ ID NO: 61670 - DNA, 20 bp, synthetic construct
  source 1..20: mol_type = other DNA
tcattttataacaacttatt

SEQ ID NO: 61671 - DNA, 20 bp, synthetic construct
  source 1..20: mol_type = other DNA
gtcattttataacaacttat

SEQ ID NO: 61672 - DNA, 20 bp, synthetic construct
  source 1..20: mol_type = other DNA
agtcattttataacaactta

SEQ ID NO: 61673 - DNA, 20 bp, synthetic construct
  source 1..20: mol_type = other DNA
tagtcattttataacaactt

SEQ ID NO: 61674 - DNA, 20 bp, synthetic construct
  source 1..20: mol_type = other DNA
gtagtcattttataacaact

SEQ ID NO: 61675 - DNA, 20 bp, synthetic construct
  source 1..20: mol_type = other DNA
agtagtcattttataacaac

SEQ ID NO: 61676 - DNA, 20 bp, synthetic construct
  source 1..20: mol_type = other DNA
tagtagtcattttataacaa

SEQ ID NO: 61677 - DNA, 20 bp, synthetic construct
  source 1..20: mol_type = other DNA
atagtagtcattttataaca

SEQ ID NO: 61678 - DNA, 20 bp, synthetic construct
  source 1..20: mol_type = other DNA
aatagtagtcattttataac

SEQ ID NO: 61679 - DNA, 20 bp, synthetic construct
  source 1..20: mol_type = other DNA
gaatagtagtcattttataa

SEQ ID NO: 61680 - DNA, 20 bp, synthetic construct
  source 1..20: mol_type = other DNA
agaatagtagtcattttata

SEQ ID NO: 61681 - DNA, 20 bp, synthetic construct
  source 1..20: mol_type = other DNA
aagaatagtagtcattttat

SEQ ID NO: 61682 - DNA, 20 bp, synthetic construct
  source 1..20: mol_type = other DNA
gaagaatagtagtcatttta

SEQ ID NO: 61683 - DNA, 20 bp, synthetic construct
  source 1..20: mol_type = other DNA
tgaagaatagtagtcatttt

SEQ ID NO: 61684 - DNA, 20 bp, synthetic construct
  source 1..20: mol_type = other DNA
gtgaagaatagtagtcattt

SEQ ID NO: 61685 - DNA, 20 bp, synthetic construct
  source 1..20: mol_type = other DNA
agtgaagaatagtagtcatt

SEQ ID NO: 61686 - DNA, 20 bp, synthetic construct
  source 1..20: mol_type = other DNA
tagtgaagaatagtagtcat

SEQ ID NO: 61687 - DNA, 20 bp, synthetic construct
  source 1..20: mol_type = other DNA
ttagtgaagaatagtagtca

SEQ ID NO: 61688 - DNA, 20 bp, synthetic construct
  source 1..20: mol_type = other DNA
attagtgaagaatagtagtc

SEQ ID NO: 61689 - DNA, 20 bp, synthetic construct
  source 1..20: mol_type = other DNA
tattagtgaagaatagtagt

SEQ ID NO: 61690 - DNA, 20 bp, synthetic construct
  source 1..20: mol_type = other DNA
ctattagtgaagaatagtag

SEQ ID NO: 61691 - DNA, 20 bp, synthetic construct
  source 1..20: mol_type = other DNA
actattagtgaagaatagta

SEQ ID NO: 61692 - DNA, 20 bp, synthetic construct
  source 1..20: mol_type = other DNA
tactattagtgaagaatagt

SEQ ID NO: 61693 - DNA, 20 bp, synthetic construct
  source 1..20: mol_type = other DNA
atactattagtgaagaatag

SEQ ID NO: 61694 - DNA, 20 bp, synthetic construct
  source 1..20: mol_type = other DNA
aatactattagtgaagaata

SEQ ID NO: 61695 - DNA, 20 bp, synthetic construct
  source 1..20: mol_type = other DNA
caatactattagtgaagaat

SEQ ID NO: 61696 - DNA, 20 bp, synthetic construct
  source 1..20: mol_type = other DNA
ccaatactattagtgaagaa

SEQ ID NO: 61697 - DNA, 20 bp, synthetic construct
  source 1..20: mol_type = other DNA
gccaatactattagtgaaga

SEQ ID NO: 61698 - DNA, 20 bp, synthetic construct
  source 1..20: mol_type = other DNA
tgccaatactattagtgaag

SEQ ID NO: 61699 - DNA, 20 bp, synthetic construct
  source 1..20: mol_type = other DNA
atgccaatactattagtgaa

SEQ ID NO: 61700 - DNA, 20 bp, synthetic construct
  source 1..20: mol_type = other DNA
aatgccaatactattagtga

SEQ ID NO: 61701 - DNA, 20 bp, synthetic construct
  source 1..20: mol_type = other DNA
aaatgccaatactattagtg

SEQ ID NO: 61702 - DNA, 20 bp, synthetic construct
  source 1..20: mol_type = other DNA
gaaatgccaatactattagt

SEQ ID NO: 61703 - DNA, 20 bp, synthetic construct
  source 1..20: mol_type = other DNA
tgaaatgccaatactattag

SEQ ID NO: 61704 - DNA, 20 bp, synthetic construct
  source 1..20: mol_type = other DNA
ttgaaatgccaatactatta

SEQ ID NO: 61705 - DNA, 20 bp, synthetic construct
  source 1..20: mol_type = other DNA
attgaaatgccaatactatt

SEQ ID NO: 61706 - DNA, 20 bp, synthetic construct
  source 1..20: mol_type = other DNA
aattgaaatgccaatactat

SEQ ID NO: 61707 - DNA, 20 bp, synthetic construct
  source 1..20: mol_type = other DNA
gaattgaaatgccaatacta

SEQ ID NO: 61708 - DNA, 20 bp, synthetic construct
  source 1..20: mol_type = other DNA
ggaattgaaatgccaatact

SEQ ID NO: 61709 - DNA, 20 bp, synthetic construct
  source 1..20: mol_type = other DNA
aggaattgaaatgccaatac

SEQ ID NO: 61710 - DNA, 20 bp, synthetic construct
  source 1..20: mol_type = other DNA
taggaattgaaatgccaata

SEQ ID NO: 61711 - DNA, 20 bp, synthetic construct
  source 1..20: mol_type = other DNA
ttaggaattgaaatgccaat

SEQ ID NO: 61712 - DNA, 20 bp, synthetic construct
  source 1..20: mol_type = other DNA
tttaggaattgaaatgccaa

SEQ ID NO: 61713 - DNA, 20 bp, synthetic construct
  source 1..20: mol_type = other DNA
atttaggaattgaaatgcca

SEQ ID NO: 61714 - DNA, 20 bp, synthetic construct
  source 1..20: mol_type = other DNA
aatttaggaattgaaatgcc

SEQ ID NO: 61715 - DNA, 20 bp, synthetic construct
  source 1..20: mol_type = other DNA
gaatttaggaattgaaatgc

SEQ ID NO: 61716 - DNA, 20 bp, synthetic construct
  source 1..20: mol_type = other DNA
agaatttaggaattgaaatg

SEQ ID NO: 61717 - DNA, 20 bp, synthetic construct
  source 1..20: mol_type = other DNA
cagaatttaggaattgaaat

SEQ ID NO: 61718 - DNA, 20 bp, synthetic construct
  source 1..20: mol_type = other DNA
acagaatttaggaattgaaa

SEQ ID NO: 61719 - DNA, 20 bp, synthetic construct
  source 1..20: mol_type = other DNA
aacagaatttaggaattgaa

SEQ ID NO: 61720 - DNA, 20 bp, synthetic construct
  source 1..20: mol_type = other DNA
aaacagaatttaggaattga

SEQ ID NO: 61721 - DNA, 20 bp, synthetic construct
  source 1..20: mol_type = other DNA
aaaacagaatttaggaattg

SEQ ID NO: 61722 - DNA, 20 bp, synthetic construct
  source 1..20: mol_type = other DNA
aaaaacagaatttaggaatt

SEQ ID NO: 61723 - DNA, 20 bp, synthetic construct
  source 1..20: mol_type = other DNA
aaaaaacagaatttaggaat

SEQ ID NO: 61724 - DNA, 20 bp, synthetic construct
  source 1..20: mol_type = other DNA
caaaaaacagaatttaggaa

SEQ ID NO: 61725 - DNA, 20 bp, synthetic construct
  source 1..20: mol_type = other DNA
tcaaaaaacagaatttagga

SEQ ID NO: 61726 - DNA, 20 bp, synthetic construct
  source 1..20: mol_type = other DNA
atcaaaaaacagaatttagg

SEQ ID NO: 61727 - DNA, 20 bp, synthetic construct
  source 1..20: mol_type = other DNA
aatcaaaaaacagaatttag

SEQ ID NO: 61728 - DNA, 20 bp, synthetic construct
  source 1..20: mol_type = other DNA
gaatcaaaaaacagaattta

SEQ ID NO: 61729 - DNA, 20 bp, synthetic construct
  source 1..20: mol_type = other DNA
agaatcaaaaaacagaattt

SEQ ID NO: 61730 - DNA, 20 bp, synthetic construct
  source 1..20: mol_type = other DNA
aagaatcaaaaaacagaatt

SEQ ID NO: 61731 - DNA, 20 bp, synthetic construct
  source 1..20: mol_type = other DNA
caagaatcaaaaaacagaat

SEQ ID NO: 61732 - DNA, 20 bp, synthetic construct
  source 1..20: mol_type = other DNA
tcaagaatcaaaaaacagaa

SEQ ID NO: 61733 - DNA, 20 bp, synthetic construct
  source 1..20: mol_type = other DNA
ttcaagaatcaaaaaacaga

SEQ ID NO: 61734 - DNA, 20 bp, synthetic construct
  source 1..20: mol_type = other DNA
gttcaagaatcaaaaaacag

SEQ ID NO: 61735 - DNA, 20 bp, synthetic construct
  source 1..20: mol_type = other DNA
tgttcaagaatcaaaaaaca

SEQ ID NO: 61736 - DNA, 20 bp, synthetic construct
  source 1..20: mol_type = other DNA
atgttcaagaatcaaaaaac

SEQ ID NO: 61737 - DNA, 20 bp, synthetic construct
  source 1..20: mol_type = other DNA
aatgttcaagaatcaaaaaa

SEQ ID NO: 61738 - DNA, 20 bp, synthetic construct
  source 1..20: mol_type = other DNA
aaatgttcaagaatcaaaaa

SEQ ID NO: 61739 - DNA, 20 bp, synthetic construct
  source 1..20: mol_type = other DNA
gaaatgttcaagaatcaaaa

SEQ ID NO: 61740 - DNA, 20 bp, synthetic construct
  source 1..20: mol_type = other DNA
agaaatgttcaagaatcaaa

SEQ ID NO: 61741 - DNA, 20 bp, synthetic construct
  source 1..20: mol_type = other DNA
cagaaatgttcaagaatcaa

SEQ ID NO: 61742 - DNA, 20 bp, synthetic construct
  source 1..20: mol_type = other DNA
tcagaaatgttcaagaatca

SEQ ID NO: 61743 - DNA, 20 bp, synthetic construct
  source 1..20: mol_type = other DNA
ttcagaaatgttcaagaatc

SEQ ID NO: 61744 - DNA, 20 bp, synthetic construct
  source 1..20: mol_type = other DNA
attcagaaatgttcaagaat

SEQ ID NO: 61745 - DNA, 20 bp, synthetic construct
  source 1..20: mol_type = other DNA
aattcagaaatgttcaagaa

SEQ ID NO: 61746 - DNA, 20 bp, synthetic construct
  source 1..20: mol_type = other DNA
aaattcagaaatgttcaaga

SEQ ID NO: 61747 - DNA, 20 bp, synthetic construct
  source 1..20: mol_type = other DNA
taaattcagaaatgttcaag

SEQ ID NO: 61748 - DNA, 20 bp, synthetic construct
  source 1..20: mol_type = other DNA
gtaaattcagaaatgttcaa

SEQ ID NO: 61749 - DNA, 20 bp, synthetic construct
  source 1..20: mol_type = other DNA
agtaaattcagaaatgttca

SEQ ID NO: 61750 - DNA, 20 bp, synthetic construct
  source 1..20: mol_type = other DNA
aagtaaattcagaaatgttc

SEQ ID NO: 61751 - DNA, 20 bp, synthetic construct
  source 1..20: mol_type = other DNA
aaagtaaattcagaaatgtt

SEQ ID NO: 61752 - DNA, 20 bp, synthetic construct
  source 1..20: mol_type = other DNA
aaaagtaaattcagaaatgt

SEQ ID NO: 61753 - DNA, 20 bp, synthetic construct
  source 1..20: mol_type = other DNA
aaaaagtaaattcagaaatg

SEQ ID NO: 61754 - DNA, 20 bp, synthetic construct
  source 1..20: mol_type = other DNA
aaaaaagtaaattcagaaat

SEQ ID NO: 61755 - DNA, 20 bp, synthetic construct
  source 1..20: mol_type = other DNA
aaaaaaagtaaattcagaaa

SEQ ID NO: 61756 - DNA, 20 bp, synthetic construct
  source 1..20: mol_type = other DNA
caaaaaaagtaaattcagaa

SEQ ID NO: 61757 - DNA, 20 bp, synthetic construct
  source 1..20: mol_type = other DNA
acaaaaaaagtaaattcaga

SEQ ID NO: 61758 - DNA, 20 bp, synthetic construct
  source 1..20: mol_type = other DNA
gacaaaaaaagtaaattcag

SEQ ID NO: 61759 - DNA, 20 bp, synthetic construct
  source 1..20: mol_type = other DNA
agacaaaaaaagtaaattca

SEQ ID NO: 61760 - DNA, 20 bp, synthetic construct
  source 1..20: mol_type = other DNA
aagacaaaaaaagtaaattc

SEQ ID NO: 61761 - DNA, 20 bp, synthetic construct
  source 1..20: mol_type = other DNA
taagacaaaaaaagtaaatt

SEQ ID NO: 61762 - DNA, 20 bp, synthetic construct
  source 1..20: mol_type = other DNA
ctaagacaaaaaaagtaaat

SEQ ID NO: 61763 - DNA, 20 bp, synthetic construct
  source 1..20: mol_type = other DNA
actaagacaaaaaaagtaaa

SEQ ID NO: 61764 - DNA, 20 bp, synthetic construct
  source 1..20: mol_type = other DNA
aactaagacaaaaaaagtaa

SEQ ID NO: 61765 - DNA, 20 bp, synthetic construct
  source 1..20: mol_type = other DNA
gaactaagacaaaaaaagta

SEQ ID NO: 61766 - DNA, 20 bp, synthetic construct
  source 1..20: mol_type = other DNA
agaactaagacaaaaaaagt

SEQ ID NO: 61767 - DNA, 20 bp, synthetic construct
  source 1..20: mol_type = other DNA
aagaactaagacaaaaaaag

SEQ ID NO: 61768 - DNA, 20 bp, synthetic construct
  source 1..20: mol_type = other DNA
gaagaactaagacaaaaaaa

SEQ ID NO: 61769 - DNA, 20 bp, synthetic construct
  source 1..20: mol_type = other DNA
agaagaactaagacaaaaaa

SEQ ID NO: 61770 - DNA, 20 bp, synthetic construct
  source 1..20: mol_type = other DNA
tagaagaactaagacaaaaa

SEQ ID NO: 61771 - DNA, 20 bp, synthetic construct
  source 1..20: mol_type = other DNA
gtagaagaactaagacaaaa

SEQ ID NO: 61772 - DNA, 20 bp, synthetic construct
  source 1..20: mol_type = other DNA
tgtagaagaactaagacaaa

SEQ ID NO: 61773 - DNA, 20 bp, synthetic construct
  source 1..20: mol_type = other DNA
ctgtagaagaactaagacaa

SEQ ID NO: 61774 - DNA, 20 bp, synthetic construct
  source 1..20: mol_type = other DNA
tctgtagaagaactaagaca

SEQ ID NO: 61775 - DNA, 20 bp, synthetic construct
  source 1..20: mol_type = other DNA
ttctgtagaagaactaagac

SEQ ID NO: 61776 - DNA, 20 bp, synthetic construct
  source 1..20: mol_type = other DNA
attctgtagaagaactaaga

SEQ ID NO: 61777 - DNA, 20 bp, synthetic construct
  source 1..20: mol_type = other DNA
gattctgtagaagaactaag

SEQ ID NO: 61778 - DNA, 20 bp, synthetic construct
  source 1..20: mol_type = other DNA
tgattctgtagaagaactaa

SEQ ID NO: 61779 - DNA, 20 bp, synthetic construct
  source 1..20: mol_type = other DNA
atgattctgtagaagaacta

SEQ ID NO: 61780 - DNA, 20 bp, synthetic construct
  source 1..20: mol_type = other DNA
aatgattctgtagaagaact

SEQ ID NO: 61781 - DNA, 20 bp, synthetic construct
  source 1..20: mol_type = other DNA
aaatgattctgtagaagaac

SEQ ID NO: 61782 - DNA, 20 bp, synthetic construct
  source 1..20: mol_type = other DNA
aaaatgattctgtagaagaa

SEQ ID NO: 61783 - DNA, 20 bp, synthetic construct
  source 1..20: mol_type = other DNA
gaaaatgattctgtagaaga

SEQ ID NO: 61784 - DNA, 20 bp, synthetic construct
  source 1..20: mol_type = other DNA
agaaaatgattctgtagaag

SEQ ID NO: 61785 - DNA, 20 bp, synthetic construct
  source 1..20: mol_type = other DNA
aagaaaatgattctgtagaa

SEQ ID NO: 61786 - DNA, 20 bp, synthetic construct
  source 1..20: mol_type = other DNA
gaagaaaatgattctgtaga

SEQ ID NO: 61787 - DNA, 20 bp, synthetic construct
  source 1..20: mol_type = other DNA
agaagaaaatgattctgtag

SEQ ID NO: 61788 - DNA, 20 bp, synthetic construct
  source 1..20: mol_type = other DNA
aagaagaaaatgattctgta

SEQ ID NO: 61789 - DNA, 20 bp, synthetic construct
  source 1..20: mol_type = other DNA
aaagaagaaaatgattctgt

SEQ ID NO: 61790 - DNA, 20 bp, synthetic construct
  source 1..20: mol_type = other DNA
aaaagaagaaaatgattctg

SEQ ID NO: 61791 - DNA, 20 bp, synthetic construct
  source 1..20: mol_type = other DNA
aaaaagaagaaaatgattct

SEQ ID NO: 61792 - DNA, 20 bp, synthetic construct
  source 1..20: mol_type = other DNA
aaaaaagaagaaaatgattc

SEQ ID NO: 61793 - DNA, 20 bp, synthetic construct
  source 1..20: mol_type = other DNA
gaaaaaagaagaaaatgatt

SEQ ID NO: 61794 - DNA, 20 bp, synthetic construct
  source 1..20: mol_type = other DNA
agaaaaaagaagaaaatgat

SEQ ID NO: 61795 - DNA, 20 bp, synthetic construct
  source 1..20: mol_type = other DNA
aagaaaaaagaagaaaatga

SEQ ID NO: 61796 - DNA, 20 bp, synthetic construct
  source 1..20: mol_type = other DNA
aaagaaaaaagaagaaaatg

SEQ ID NO: 61797 - DNA, 20 bp, synthetic construct
  source 1..20: mol_type = other DNA
aaaagaaaaaagaagaaaat

SEQ ID NO: 61798 - DNA, 20 bp, synthetic construct
  source 1..20: mol_type = other DNA
aaaaagaaaaaagaagaaaa

SEQ ID NO: 61799 - DNA, 20 bp, synthetic construct
  source 1..20: mol_type = other DNA
aaaaaagaaaaaagaagaaa

SEQ ID NO: 61800 - DNA, 20 bp, synthetic construct
  source 1..20: mol_type = other DNA
aaaaaaagaaaaaagaagaa

SEQ ID NO: 61801 - DNA, 20 bp, synthetic construct
  source 1..20: mol_type = other DNA
taaaaaaagaaaaaagaaga

SEQ ID NO: 61802 - DNA, 20 bp, synthetic construct
  source 1..20: mol_type = other DNA
ataaaaaaagaaaaaagaag

SEQ ID NO: 61803 - DNA, 20 bp, synthetic construct
  source 1..20: mol_type = other DNA
aataaaaaaagaaaaaagaa

SEQ ID NO: 61804 - DNA, 20 bp, synthetic construct
  source 1..20: mol_type = other DNA
aaataaaaaaagaaaaaaga

SEQ ID NO: 61805 - DNA, 20 bp, synthetic construct
  source 1..20: mol_type = other DNA
aaaataaaaaaagaaaaaag

SEQ ID NO: 61806 - DNA, 20 bp, synthetic construct
  source 1..20: mol_type = other DNA
aaaaataaaaaaagaaaaaa

SEQ ID NO: 61807 - DNA, 20 bp, synthetic construct
  source 1..20: mol_type = other DNA
taaaaataaaaaaagaaaaa

SEQ ID NO: 61808 - DNA, 20 bp, synthetic construct
  source 1..20: mol_type = other DNA
ataaaaataaaaaaagaaaa

SEQ ID NO: 61809 - DNA, 20 bp, synthetic construct
  source 1..20: mol_type = other DNA
aataaaaataaaaaaagaaa

SEQ ID NO: 61810 - DNA, 20 bp, synthetic construct
  source 1..20: mol_type = other DNA
aaataaaaataaaaaaagaa

SEQ ID NO: 61811 - DNA, 20 bp, synthetic construct
  source 1..20: mol_type = other DNA
aaaataaaaataaaaaaaga

SEQ ID NO: 61812 - DNA, 20 bp, synthetic construct
  source 1..20: mol_type = other DNA
aaaaataaaaataaaaaaag

SEQ ID NO: 61813 - DNA, 20 bp, synthetic construct
  source 1..20: mol_type = other DNA
aaaaaataaaaataaaaaaa

SEQ ID NO: 61814 - DNA, 20 bp, synthetic construct
  source 1..20: mol_type = other DNA
taaaaaataaaaataaaaaa

SEQ ID NO: 61815 - DNA, 20 bp, synthetic construct
  source 1..20: mol_type = other DNA
ataaaaaataaaaataaaaa

SEQ ID NO: 61816 - DNA, 20 bp, synthetic construct
  source 1..20: mol_type = other DNA
aataaaaaataaaaataaaa

SEQ ID NO: 61817 - DNA, 20 bp, synthetic construct
  source 1..20: mol_type = other DNA
aaataaaaaataaaaataaa

SEQ ID NO: 61818 - DNA, 20 bp, synthetic construct
  source 1..20: mol_type = other DNA
aaaataaaaaataaaaataa

SEQ ID NO: 61819 - DNA, 20 bp, synthetic construct
  source 1..20: mol_type = other DNA
aaaaataaaaaataaaaata

SEQ ID NO: 61820 - DNA, 20 bp, synthetic construct
  source 1..20: mol_type = other DNA
caaaaataaaaaataaaaat

SEQ ID NO: 61821 - DNA, 20 bp, synthetic construct
  source 1..20: mol_type = other DNA
tcaaaaataaaaaataaaaa

SEQ ID NO: 61822 - DNA, 20 bp, synthetic construct
  source 1..20: mol_type = other DNA
ctcaaaaataaaaaataaaa

SEQ ID NO: 61823 - DNA, 20 bp, synthetic construct
  source 1..20: mol_type = other DNA
tctcaaaaataaaaaataaa

SEQ ID NO: 61824 - DNA, 20 bp, synthetic construct
  source 1..20: mol_type = other DNA
gtctcaaaaataaaaaataa

SEQ ID NO: 61825 - DNA, 20 bp, synthetic construct
  source 1..20: mol_type = other DNA
tgtctcaaaaataaaaaata

SEQ ID NO: 61826 - DNA, 20 bp, synthetic construct
  source 1..20: mol_type = other DNA
ctgtctcaaaaataaaaaat

SEQ ID NO: 61827 - DNA, 20 bp, synthetic construct
  source 1..20: mol_type = other DNA
tctgtctcaaaaataaaaaa

SEQ ID NO: 61828 - DNA, 20 bp, synthetic construct
  source 1..20: mol_type = other DNA
ctctgtctcaaaaataaaaa

SEQ ID NO: 61829 - DNA, 20 bp, synthetic construct
  source 1..20: mol_type = other DNA
actctgtctcaaaaataaaa

SEQ ID NO: 61830 - DNA, 20 bp, synthetic construct
  source 1..20: mol_type = other DNA
gactctgtctcaaaaataaa

SEQ ID NO: 61831 - DNA, 20 bp, synthetic construct
  source 1..20: mol_type = other DNA
agactctgtctcaaaaataa

SEQ ID NO: 61832 - DNA, 20 bp, synthetic construct
  source 1..20: mol_type = other DNA
aagactctgtctcaaaaata

SEQ ID NO: 61833 - DNA, 20 bp, synthetic construct
  source 1..20: mol_type = other DNA
caagactctgtctcaaaaat

SEQ ID NO: 61834 - DNA, 20 bp, synthetic construct
  source 1..20: mol_type = other DNA
gcaagactctgtctcaaaaa

SEQ ID NO: 61835 - DNA, 20 bp, synthetic construct
  source 1..20: mol_type = other DNA
agcaagactctgtctcaaaa

SEQ ID NO: 61836 - DNA, 20 bp, synthetic construct
  source 1..20: mol_type = other DNA
gagcaagactctgtctcaaa

SEQ ID NO: 61837 - DNA, 20 bp, synthetic construct
  source 1..20: mol_type = other DNA
agagcaagactctgtctcaa

SEQ ID NO: 61838 - DNA, 20 bp, synthetic construct
  source 1..20: mol_type = other DNA
cagagcaagactctgtctca

SEQ ID NO: 61839 - DNA, 20 bp, synthetic construct
  source 1..20: mol_type = other DNA
acagagcaagactctgtctc

SEQ ID NO: 61840 - DNA, 20 bp, synthetic construct
  source 1..20: mol_type = other DNA
aacagagcaagactctgtct

SEQ ID NO: 61841 - DNA, 20 bp, synthetic construct
  source 1..20: mol_type = other DNA
caacagagcaagactctgtc

SEQ ID NO: 61842 - DNA, 20 bp, synthetic construct
  source 1..20: mol_type = other DNA
gcaacagagcaagactctgt

SEQ ID NO: 61843 - DNA, 20 bp, synthetic construct
  source 1..20: mol_type = other DNA
ggcaacagagcaagactctg

SEQ ID NO: 61844 - DNA, 20 bp, synthetic construct
  source 1..20: mol_type = other DNA
gggcaacagagcaagactct

SEQ ID NO: 61845 - DNA, 20 bp, synthetic construct
  source 1..20: mol_type = other DNA
tgggcaacagagcaagactc

SEQ ID NO: 61846 - DNA, 20 bp, synthetic construct
  source 1..20: mol_type = other DNA
ctgggcaacagagcaagact

SEQ ID NO: 61847 - DNA, 20 bp, synthetic construct
  source 1..20: mol_type = other DNA
cctgggcaacagagcaagac

SEQ ID NO: 61848 - DNA, 20 bp, synthetic construct
  source 1..20: mol_type = other DNA
gcctgggcaacagagcaaga

SEQ ID NO: 61849 - DNA, 20 bp, synthetic construct
  source 1..20: mol_type = other DNA
agcctgggcaacagagcaag

SEQ ID NO: 61850 - DNA, 20 bp, synthetic construct
  source 1..20: mol_type = other DNA
cagcctgggcaacagagcaa

SEQ ID NO: 61851 - DNA, 20 bp, synthetic construct
  source 1..20: mol_type = other DNA
ccagcctgggcaacagagca

SEQ ID NO: 61852 - DNA, 20 bp, synthetic construct
  source 1..20: mol_type = other DNA
tccagcctgggcaacagagc

SEQ ID NO: 61853 - DNA, 20 bp, synthetic construct
  source 1..20: mol_type = other DNA
ctccagcctgggcaacagag

SEQ ID NO: 61854 - DNA, 20 bp, synthetic construct
  source 1..20: mol_type = other DNA
actccagcctgggcaacaga

SEQ ID NO: 61855 - DNA, 20 bp, synthetic construct
  source 1..20: mol_type = other DNA
cactccagcctgggcaacag

SEQ ID NO: 61856 - DNA, 20 bp, synthetic construct
  source 1..20: mol_type = other DNA
gcactccagcctgggcaaca

SEQ ID NO: 61857 - DNA, 20 bp, synthetic construct
  source 1..20: mol_type = other DNA
tgcactccagcctgggcaac

SEQ ID NO: 61858 - DNA, 20 bp, synthetic construct
  source 1..20: mol_type = other DNA
ctgcactccagcctgggcaa

SEQ ID NO: 61859 - DNA, 20 bp, synthetic construct
  source 1..20: mol_type = other DNA
actgcactccagcctgggca

SEQ ID NO: 61860 - DNA, 20 bp, synthetic construct
  source 1..20: mol_type = other DNA
tactgcactccagcctgggc

SEQ ID NO: 61861 - DNA, 20 bp, synthetic construct
  source 1..20: mol_type = other DNA
ctactgcactccagcctggg

SEQ ID NO: 61862 - DNA, 20 bp, synthetic construct
  source 1..20: mol_type = other DNA
gctactgcactccagcctgg

SEQ ID NO: 61863 - DNA, 20 bp, synthetic construct
  source 1..20: mol_type = other DNA
cgctactgcactccagcctg

SEQ ID NO: 61864 - DNA, 20 bp, synthetic construct
  source 1..20: mol_type = other DNA
gcgctactgcactccagcct

SEQ ID NO: 61865 - DNA, 20 bp, synthetic construct
  source 1..20: mol_type = other DNA
cgcgctactgcactccagcc

SEQ ID NO: 61866 - DNA, 20 bp, synthetic construct
  source 1..20: mol_type = other DNA
tcgcgctactgcactccagc

SEQ ID NO: 61867 - DNA, 20 bp, synthetic construct
  source 1..20: mol_type = other DNA
atcgcgctactgcactccag

SEQ ID NO: 61868 - DNA, 20 bp, synthetic construct
  source 1..20: mol_type = other DNA
gatcgcgctactgcactcca

SEQ ID NO: 61869 - DNA, 20 bp, synthetic construct
  source 1..20: mol_type = other DNA
agatcgcgctactgcactcc

SEQ ID NO: 61870 - DNA, 20 bp, synthetic construct
  source 1..20: mol_type = other DNA
gagatcgcgctactgcactc

SEQ ID NO: 61871 - DNA, 20 bp, synthetic construct
  source 1..20: mol_type = other DNA
cgagatcgcgctactgcact

SEQ ID NO: 61872 - DNA, 20 bp, synthetic construct
  source 1..20: mol_type = other DNA
ccgagatcgcgctactgcac

SEQ ID NO: 61873 - DNA, 20 bp, synthetic construct
  source 1..20: mol_type = other DNA
gccgagatcgcgctactgca

SEQ ID NO: 61874 - DNA, 20 bp, synthetic construct
  source 1..20: mol_type = other DNA
agccgagatcgcgctactgc

SEQ ID NO: 61875 - DNA, 20 bp, synthetic construct
  source 1..20: mol_type = other DNA
gagccgagatcgcgctactg

SEQ ID NO: 61876 - DNA, 20 bp, synthetic construct
  source 1..20: mol_type = other DNA
tgagccgagatcgcgctact

SEQ ID NO: 61877 - DNA, 20 bp, synthetic construct
  source 1..20: mol_type = other DNA
gtgagccgagatcgcgctac

SEQ ID NO: 61878 - DNA, 20 bp, synthetic construct
  source 1..20: mol_type = other DNA
agtgagccgagatcgcgcta

SEQ ID NO: 61879 - DNA, 20 bp, synthetic construct
  source 1..20: mol_type = other DNA
cagtgagccgagatcgcgct

SEQ ID NO: 61880 - DNA, 20 bp, synthetic construct
  source 1..20: mol_type = other DNA
gcagtgagccgagatcgcgc

SEQ ID NO: 61881 - DNA, 20 bp, synthetic construct
  source 1..20: mol_type = other DNA
tgcagtgagccgagatcgcg

SEQ ID NO: 61882 - DNA, 20 bp, synthetic construct
  source 1..20: mol_type = other DNA
ttgcagtgagccgagatcgc

SEQ ID NO: 61883 - DNA, 20 bp, synthetic construct
  source 1..20: mol_type = other DNA
cttgcagtgagccgagatcg

SEQ ID NO: 61884 - DNA, 20 bp, synthetic construct
  source 1..20: mol_type = other DNA
gcttgcagtgagccgagatc

SEQ ID NO: 61885 - DNA, 20 bp, synthetic construct
  source 1..20: mol_type = other DNA
agcttgcagtgagccgagat

SEQ ID NO: 61886 - DNA, 20 bp, synthetic construct
  source 1..20: mol_type = other DNA
gagcttgcagtgagccgaga

SEQ ID NO: 61887 - DNA, 20 bp, synthetic construct
  source 1..20: mol_type = other DNA
ggagcttgcagtgagccgag

SEQ ID NO: 61888 - DNA, 20 bp, synthetic construct
  source 1..20: mol_type = other DNA
cggagcttgcagtgagccga

SEQ ID NO: 61889 - DNA, 20 bp, synthetic construct
  source 1..20: mol_type = other DNA
gcggagcttgcagtgagccg

SEQ ID NO: 61890 - DNA, 20 bp, synthetic construct
  source 1..20: mol_type = other DNA
ggcggagcttgcagtgagcc

SEQ ID NO: 61891 - DNA, 20 bp, synthetic construct
  source 1..20: mol_type = other DNA
aggcggagcttgcagtgagc

SEQ ID NO: 61892 - DNA, 20 bp, synthetic construct
  source 1..20: mol_type = other DNA
gaggcggagcttgcagtgag

SEQ ID NO: 61893 - DNA, 20 bp, synthetic construct
  source 1..20: mol_type = other DNA
ggaggcggagcttgcagtga

SEQ ID NO: 61894 - DNA, 20 bp, synthetic construct
  source 1..20: mol_type = other DNA
gggaggcggagcttgcagtg

SEQ ID NO: 61895 - DNA, 20 bp, synthetic construct
  source 1..20: mol_type = other DNA
cgggaggcggagcttgcagt

SEQ ID NO: 61896 - DNA, 20 bp, synthetic construct
  source 1..20: mol_type = other DNA
ccgggaggcggagcttgcag

SEQ ID NO: 61897 - DNA, 20 bp, synthetic construct
  source 1..20: mol_type = other DNA
cccgggaggcggagcttgca

SEQ ID NO: 61898 - DNA, 20 bp, synthetic construct
  source 1..20: mol_type = other DNA
acccgggaggcggagcttgc

SEQ ID NO: 61899 - DNA, 20 bp, synthetic construct
  source 1..20: mol_type = other DNA
aacccgggaggcggagcttg

SEQ ID NO: 61900 - DNA, 20 bp, synthetic construct
  source 1..20: mol_type = other DNA
gaacccgggaggcggagctt

SEQ ID NO: 61901 - DNA, 20 bp, synthetic construct
  source 1..20: mol_type = other DNA
tgaacccgggaggcggagct

SEQ ID NO: 61902 - DNA, 20 bp, synthetic construct
  source 1..20: mol_type = other DNA
atgaacccgggaggcggagc

SEQ ID NO: 61903 - DNA, 20 bp, synthetic construct
  source 1..20: mol_type = other DNA
catgaacccgggaggcggag

SEQ ID NO: 61904 - DNA, 20 bp, synthetic construct
  source 1..20: mol_type = other DNA
gcatgaacccgggaggcgga

SEQ ID NO: 61905 - DNA, 20 bp, synthetic construct
  source 1..20: mol_type = other DNA
ggcatgaacccgggaggcgg

SEQ ID NO: 61906 - DNA, 20 bp, synthetic construct
  source 1..20: mol_type = other DNA
tggcatgaacccgggaggcg

SEQ ID NO: 61907 - DNA, 20 bp, synthetic construct
  source 1..20: mol_type = other DNA
atggcatgaacccgggaggc

SEQ ID NO: 61908 - DNA, 20 bp, synthetic construct
  source 1..20: mol_type = other DNA
aatggcatgaacccgggagg

SEQ ID NO: 61909 - DNA, 20 bp, synthetic construct
  source 1..20: mol_type = other DNA
aaatggcatgaacccgggag

SEQ ID NO: 61910 - DNA, 20 bp, synthetic construct
  source 1..20: mol_type = other DNA
aaaatggcatgaacccggga

SEQ ID NO: 61911 - DNA, 20 bp, synthetic construct
  source 1..20: mol_type = other DNA
gaaaatggcatgaacccggg

SEQ ID NO: 61912 - DNA, 20 bp, synthetic construct
  source 1..20: mol_type = other DNA
agaaaatggcatgaacccgg

SEQ ID NO: 61913 - DNA, 20 bp, synthetic construct
  source 1..20: mol_type = other DNA
gagaaaatggcatgaacccg

SEQ ID NO: 61914 - DNA, 20 bp, synthetic construct
  source 1..20: mol_type = other DNA
ggagaaaatggcatgaaccc

SEQ ID NO: 61915 - DNA, 20 bp, synthetic construct
  source 1..20: mol_type = other DNA
aggagaaaatggcatgaacc

SEQ ID NO: 61916 - DNA, 20 bp, synthetic construct
  source 1..20: mol_type = other DNA
caggagaaaatggcatgaac

SEQ ID NO: 61917 - DNA, 20 bp, synthetic construct
  source 1..20: mol_type = other DNA
gcaggagaaaatggcatgaa

SEQ ID NO: 61918 - DNA, 20 bp, synthetic construct
  source 1..20: mol_type = other DNA
ggcaggagaaaatggcatga

SEQ ID NO: 61919 - DNA, 20 bp, synthetic construct
  source 1..20: mol_type = other DNA
aggcaggagaaaatggcatg

SEQ ID NO: 61920 - DNA, 20 bp, synthetic construct
  source 1..20: mol_type = other DNA
gaggcaggagaaaatggcat

SEQ ID NO: 61921 - DNA, 20 bp, synthetic construct
  source 1..20: mol_type = other DNA
tgaggcaggagaaaatggca

SEQ ID NO: 61922 - DNA, 20 bp, synthetic construct
  source 1..20: mol_type = other DNA
ctgaggcaggagaaaatggc

SEQ ID NO: 61923 - DNA, 20 bp, synthetic construct
  source 1..20: mol_type = other DNA
gctgaggcaggagaaaatgg

SEQ ID NO: 61924 - DNA, 20 bp, synthetic construct
  source 1..20: mol_type = other DNA
ggctgaggcaggagaaaatg

SEQ ID NO: 61925 - DNA, 20 bp, synthetic construct
  source 1..20: mol_type = other DNA
aggctgaggcaggagaaaat

SEQ ID NO: 61926 - DNA, 20 bp, synthetic construct
  source 1..20: mol_type = other DNA
gaggctgaggcaggagaaaa

SEQ ID NO: 61927 - DNA, 20 bp, synthetic construct
  source 1..20: mol_type = other DNA
ggaggctgaggcaggagaaa

SEQ ID NO: 61928 - DNA, 20 bp, synthetic construct
  source 1..20: mol_type = other DNA
gggaggctgaggcaggagaa

SEQ ID NO: 61929 - DNA, 20 bp, synthetic construct
  source 1..20: mol_type = other DNA
cgggaggctgaggcaggaga

SEQ ID NO: 61930 - DNA, 20 bp, synthetic construct
  source 1..20: mol_type = other DNA
ccgggaggctgaggcaggag

SEQ ID NO: 61931 - DNA, 20 bp, synthetic construct
  source 1..20: mol_type = other DNA
cccgggaggctgaggcagga

SEQ ID NO: 61932 - DNA, 20 bp, synthetic construct
  source 1..20: mol_type = other DNA
acccgggaggctgaggcagg

SEQ ID NO: 61933 - DNA, 20 bp, synthetic construct
  source 1..20: mol_type = other DNA
tacccgggaggctgaggcag

SEQ ID NO: 61934 - DNA, 20 bp, synthetic construct
  source 1..20: mol_type = other DNA
ctacccgggaggctgaggca

SEQ ID NO: 61935 - DNA, 20 bp, synthetic construct
  source 1..20: mol_type = other DNA
gctacccgggaggctgaggc

SEQ ID NO: 61936 - DNA, 20 bp, synthetic construct
  source 1..20: mol_type = other DNA
agctacccgggaggctgagg

SEQ ID NO: 61937 - DNA, 20 bp, synthetic construct
  source 1..20: mol_type = other DNA
cagctacccgggaggctgag

SEQ ID NO: 61938 - DNA, 20 bp, synthetic construct
  source 1..20: mol_type = other DNA
ccagctacccgggaggctga

SEQ ID NO: 61939 - DNA, 20 bp, synthetic construct
  source 1..20: mol_type = other DNA
cccagctacccgggaggctg

SEQ ID NO: 61940 - DNA, 20 bp, synthetic construct
  source 1..20: mol_type = other DNA
tcccagctacccgggaggct

SEQ ID NO: 61941 - DNA, 20 bp, synthetic construct
  source 1..20: mol_type = other DNA
gtcccagctacccgggaggc

SEQ ID NO: 61942 - DNA, 20 bp, synthetic construct
  source 1..20: mol_type = other DNA
agtcccagctacccgggagg

SEQ ID NO: 61943 - DNA, 20 bp, synthetic construct
  source 1..20: mol_type = other DNA
tagtcccagctacccgggag

SEQ ID NO: 61944 - DNA, 20 bp, synthetic construct
  source 1..20: mol_type = other DNA
ctagtcccagctacccggga

SEQ ID NO: 61945 - DNA, 20 bp, synthetic construct
  source 1..20: mol_type = other DNA
tctagtcccagctacccggg

SEQ ID NO: 61946 - DNA, 20 bp, synthetic construct
  source 1..20: mol_type = other DNA
ctctagtcccagctacccgg

SEQ ID NO: 61947 - DNA, 20 bp, synthetic construct
  source 1..20: mol_type = other DNA
cctctagtcccagctacccg

SEQ ID NO: 61948 - DNA, 20 bp, synthetic construct
  source 1..20: mol_type = other DNA
acctctagtcccagctaccc

SEQ ID NO: 61949 - DNA, 20 bp, synthetic construct
  source 1..20: mol_type = other DNA
tacctctagtcccagctacc

SEQ ID NO: 61950 - DNA, 20 bp, synthetic construct
  source 1..20: mol_type = other DNA
gtacctctagtcccagctac

SEQ ID NO: 61951 - DNA, 20 bp, synthetic construct
  source 1..20: mol_type = other DNA
ggtacctctagtcccagcta

SEQ ID NO: 61952 - DNA, 20 bp, synthetic construct
  source 1..20: mol_type = other DNA
gggtacctctagtcccagct

SEQ ID NO: 61953 - DNA, 20 bp, synthetic construct
  source 1..20: mol_type = other DNA
cgggtacctctagtcccagc

SEQ ID NO: 61954 - DNA, 20 bp, synthetic construct
  source 1..20: mol_type = other DNA
gcgggtacctctagtcccag

SEQ ID NO: 61955 - DNA, 20 bp, synthetic construct
  source 1..20: mol_type = other DNA
ggcgggtacctctagtccca

SEQ ID NO: 61956 - DNA, 20 bp, synthetic construct
  source 1..20: mol_type = other DNA
tggcgggtacctctagtccc

SEQ ID NO: 61957 - DNA, 20 bp, synthetic construct
  source 1..20: mol_type = other DNA
gtggcgggtacctctagtcc

SEQ ID NO: 61958 - DNA, 20 bp, synthetic construct
  source 1..20: mol_type = other DNA
tgtggcgggtacctctagtc

SEQ ID NO: 61959 - DNA, 20 bp, synthetic construct
  source 1..20: mol_type = other DNA
ctgtggcgggtacctctagt

SEQ ID NO: 61960 - DNA, 20 bp, synthetic construct
  source 1..20: mol_type = other DNA
gctgtggcgggtacctctag

SEQ ID NO: 61961 - DNA, 20 bp, synthetic construct
  source 1..20: mol_type = other DNA
cgctgtggcgggtacctcta

SEQ ID NO: 61962 - DNA, 20 bp, synthetic construct
  source 1..20: mol_type = other DNA
gcgctgtggcgggtacctct

SEQ ID NO: 61963 - DNA, 20 bp, synthetic construct
  source 1..20: mol_type = other DNA
ggcgctgtggcgggtacctc

SEQ ID NO: 61964 - DNA, 20 bp, synthetic construct
  source 1..20: mol_type = other DNA
gggcgctgtggcgggtacct

SEQ ID NO: 61965 - DNA, 20 bp, synthetic construct
  source 1..20: mol_type = other DNA
cgggcgctgtggcgggtacc

SEQ ID NO: 61966 - DNA, 20 bp, synthetic construct
  source 1..20: mol_type = other DNA
ccgggcgctgtggcgggtac

SEQ ID NO: 61967 - DNA, 20 bp, synthetic construct
  source 1..20: mol_type = other DNA
gccgggcgctgtggcgggta

SEQ ID NO: 61968 - DNA, 20 bp, synthetic construct
  source 1..20: mol_type = other DNA
agccgggcgctgtggcgggt

SEQ ID NO: 61969 - DNA, 20 bp, synthetic construct
  source 1..20: mol_type = other DNA
tagccgggcgctgtggcggg

SEQ ID NO: 61970 - DNA, 20 bp, synthetic construct
  source 1..20: mol_type = other DNA
ttagccgggcgctgtggcgg

SEQ ID NO: 61971 - DNA, 20 bp, synthetic construct
  source 1..20: mol_type = other DNA
attagccgggcgctgtggcg

SEQ ID NO: 61972 - DNA, 20 bp, synthetic construct
  source 1..20: mol_type = other DNA
aattagccgggcgctgtggc

SEQ ID NO: 61973 - DNA, 20 bp, synthetic construct
  source 1..20: mol_type = other DNA
aaattagccgggcgctgtgg

SEQ ID NO: 61974 - DNA, 20 bp, synthetic construct
  source 1..20: mol_type = other DNA
aaaattagccgggcgctgtg

SEQ ID NO: 61975 - DNA, 20 bp, synthetic construct
  source 1..20: mol_type = other DNA
aaaaattagccgggcgctgt

SEQ ID NO: 61976 - DNA, 20 bp, synthetic construct
  source 1..20: mol_type = other DNA
aaaaaattagccgggcgctg

SEQ ID NO: 61977 - DNA, 20 bp, synthetic construct
  source 1..20: mol_type = other DNA
caaaaaattagccgggcgct

SEQ ID NO: 61978 - DNA, 20 bp, synthetic construct
  source 1..20: mol_type = other DNA
acaaaaaattagccgggcgc

SEQ ID NO: 61979 - DNA, 20 bp, synthetic construct
  source 1..20: mol_type = other DNA
tacaaaaaattagccgggcg

SEQ ID NO: 61980 - DNA, 20 bp, synthetic construct
  source 1..20: mol_type = other DNA
atacaaaaaattagccgggc

SEQ ID NO: 61981 - DNA, 20 bp, synthetic construct
  source 1..20: mol_type = other DNA
aatacaaaaaattagccggg

SEQ ID NO: 61982 - DNA, 20 bp, synthetic construct
  source 1..20: mol_type = other DNA
aaatacaaaaaattagccgg

SEQ ID NO: 61983 - DNA, 20 bp, synthetic construct
  source 1..20: mol_type = other DNA
aaaatacaaaaaattagccg

SEQ ID NO: 61984 - DNA, 20 bp, synthetic construct
  source 1..20: mol_type = other DNA
aaaaatacaaaaaattagcc

SEQ ID NO: 61985 - DNA, 20 bp, synthetic construct
  source 1..20: mol_type = other DNA
taaaaatacaaaaaattagc

SEQ ID NO: 61986 - DNA, 20 bp, synthetic construct
  source 1..20: mol_type = other DNA
ctaaaaatacaaaaaattag

SEQ ID NO: 61987 - DNA, 20 bp, synthetic construct
  source 1..20: mol_type = other DNA
actaaaaatacaaaaaatta

SEQ ID NO: 61988 - DNA, 20 bp, synthetic construct
  source 1..20: mol_type = other DNA
tactaaaaatacaaaaaatt

SEQ ID NO: 61989 - DNA, 20 bp, synthetic construct
  source 1..20: mol_type = other DNA
ctactaaaaatacaaaaaat

SEQ ID NO: 61990 - DNA, 20 bp, synthetic construct
  source 1..20: mol_type = other DNA
tctactaaaaatacaaaaaa

SEQ ID NO: 61991 - DNA, 20 bp, synthetic construct
  source 1..20: mol_type = other DNA
ctctactaaaaatacaaaaa

SEQ ID NO: 61992 - DNA, 20 bp, synthetic construct
  source 1..20: mol_type = other DNA
tctctactaaaaatacaaaa

SEQ ID NO: 61993 - DNA, 20 bp, synthetic construct
  source 1..20: mol_type = other DNA
gtctctactaaaaatacaaa

SEQ ID NO: 61994 - DNA, 20 bp, synthetic construct
  source 1..20: mol_type = other DNA
cgtctctactaaaaatacaa

SEQ ID NO: 61995 - DNA, 20 bp, synthetic construct
  source 1..20: mol_type = other DNA
ccgtctctactaaaaataca

SEQ ID NO: 61996 - DNA, 20 bp, synthetic construct
  source 1..20: mol_type = other DNA
cccgtctctactaaaaatac

SEQ ID NO: 61997 - DNA, 20 bp, synthetic construct
  source 1..20: mol_type = other DNA
ccccgtctctactaaaaata

SEQ ID NO: 61998 - DNA, 20 bp, synthetic construct
  source 1..20: mol_type = other DNA
accccgtctctactaaaaat

SEQ ID NO: 61999 - DNA, 20 bp, synthetic construct
  source 1..20: mol_type = other DNA
aaccccgtctctactaaaaa

SEQ ID NO: 62000 - DNA, 20 bp, synthetic construct
  source 1..20: mol_type = other DNA
aaaccccgtctctactaaaa

SEQ ID NO: 62001 - DNA, 20 bp, synthetic construct
  source 1..20: mol_type = other DNA
gaaaccccgtctctactaaa

SEQ ID NO: 62002 - DNA, 20 bp, synthetic construct
  source 1..20: mol_type = other DNA
tgaaaccccgtctctactaa

SEQ ID NO: 62003 - DNA, 20 bp, synthetic construct
  source 1..20: mol_type = other DNA
gtgaaaccccgtctctacta

SEQ ID NO: 62004 - DNA, 20 bp, synthetic construct
  source 1..20: mol_type = other DNA
ggtgaaaccccgtctctact

SEQ ID NO: 62005 - DNA, 20 bp, synthetic construct
  source 1..20: mol_type = other DNA
cggtgaaaccccgtctctac

SEQ ID NO: 62006 - DNA, 20 bp, synthetic construct
  source 1..20: mol_type = other DNA
acggtgaaaccccgtctcta

SEQ ID NO: 62007 - DNA, 20 bp, synthetic construct
  source 1..20: mol_type = other DNA
cacggtgaaaccccgtctct

SEQ ID NO: 62008 - DNA, 20 bp, synthetic construct
  source 1..20: mol_type = other DNA
acacggtgaaaccccgtctc

SEQ ID NO: 62009 - DNA, 20 bp, synthetic construct
  source 1..20: mol_type = other DNA
aacacggtgaaaccccgtct

SEQ ID NO: 62010 - DNA, 20 bp, synthetic construct
  source 1..20: mol_type = other DNA
taacacggtgaaaccccgtc

SEQ ID NO: 62011 - DNA, 20 bp, synthetic construct
  source 1..20: mol_type = other DNA
ctaacacggtgaaaccccgt

SEQ ID NO: 62012 - DNA, 20 bp, synthetic construct
  source 1..20: mol_type = other DNA
gctaacacggtgaaaccccg

SEQ ID NO: 62013 - DNA, 20 bp, synthetic construct
  source 1..20: mol_type = other DNA
ggctaacacggtgaaacccc

SEQ ID NO: 62014 - DNA, 20 bp, synthetic construct
  source 1..20: mol_type = other DNA
tggctaacacggtgaaaccc

SEQ ID NO: 62015 - DNA, 20 bp, synthetic construct
  source 1..20: mol_type = other DNA
ttggctaacacggtgaaacc

SEQ ID NO: 62016 - DNA, 20 bp, synthetic construct
  source 1..20: mol_type = other DNA
cttggctaacacggtgaaac

SEQ ID NO: 62017 - DNA, 20 bp, synthetic construct
  source 1..20: mol_type = other DNA
ccttggctaacacggtgaaa

SEQ ID NO: 62018 - DNA, 20 bp, synthetic construct
  source 1..20: mol_type = other DNA
accttggctaacacggtgaa

SEQ ID NO: 62019 - DNA, 20 bp, synthetic construct
  source 1..20: mol_type = other DNA
caccttggctaacacggtga

SEQ ID NO: 62020 - DNA, 20 bp, synthetic construct
  source 1..20: mol_type = other DNA
ccaccttggctaacacggtg

SEQ ID NO: 62021 - DNA, 20 bp, synthetic construct
  source 1..20: mol_type = other DNA
accaccttggctaacacggt

SEQ ID NO: 62022 - DNA, 20 bp, synthetic construct
  source 1..20: mol_type = other DNA
gaccaccttggctaacacgg

SEQ ID NO: 62023 - DNA, 20 bp, synthetic construct
  source 1..20: mol_type = other DNA
agaccaccttggctaacacg

SEQ ID NO: 62024 - DNA, 20 bp, synthetic construct
  source 1..20: mol_type = other DNA
gagaccaccttggctaacac

SEQ ID NO: 62025 - DNA, 20 bp, synthetic construct
  source 1..20: mol_type = other DNA
tgagaccaccttggctaaca

SEQ ID NO: 62026 - DNA, 20 bp, synthetic construct
  source 1..20: mol_type = other DNA
ttgagaccaccttggctaac

SEQ ID NO: 62027 - DNA, 20 bp, synthetic construct
  source 1..20: mol_type = other DNA
attgagaccaccttggctaa

SEQ ID NO: 62028 - DNA, 20 bp, synthetic construct
  source 1..20: mol_type = other DNA
gattgagaccaccttggcta

SEQ ID NO: 62029 - DNA, 20 bp, synthetic construct
  source 1..20: mol_type = other DNA
agattgagaccaccttggct

SEQ ID NO: 62030 - DNA, 20 bp, synthetic construct
  source 1..20: mol_type = other DNA
gagattgagaccaccttggc

SEQ ID NO: 62031 - DNA, 20 bp, synthetic construct
  source 1..20: mol_type = other DNA
ggagattgagaccaccttgg

SEQ ID NO: 62032 - DNA, 20 bp, synthetic construct
  source 1..20: mol_type = other DNA
aggagattgagaccaccttg

SEQ ID NO: 62033 - DNA, 20 bp, synthetic construct
  source 1..20: mol_type = other DNA
caggagattgagaccacctt

SEQ ID NO: 62034 - DNA, 20 bp, synthetic construct
  source 1..20: mol_type = other DNA
tcaggagattgagaccacct

SEQ ID NO: 62035 - DNA, 20 bp, synthetic construct
  source 1..20: mol_type = other DNA
gtcaggagattgagaccacc

SEQ ID NO: 62036 - DNA, 20 bp, synthetic construct
  source 1..20: mol_type = other DNA
ggtcaggagattgagaccac

SEQ ID NO: 62037 - DNA, 20 bp, synthetic construct
  source 1..20: mol_type = other DNA
aggtcaggagattgagacca

SEQ ID NO: 62038 - DNA, 20 bp, synthetic construct
  source 1..20: mol_type = other DNA
gaggtcaggagattgagacc

SEQ ID NO: 62039 - DNA, 20 bp, synthetic construct
  source 1..20: mol_type = other DNA
cgaggtcaggagattgagac

SEQ ID NO: 62040 - DNA, 20 bp, synthetic construct
  source 1..20: mol_type = other DNA
acgaggtcaggagattgaga

SEQ ID NO: 62041 - DNA, 20 bp, synthetic construct
  source 1..20: mol_type = other DNA
cacgaggtcaggagattgag

SEQ ID NO: 62042 - DNA, 20 bp, synthetic construct
  source 1..20: mol_type = other DNA
tcacgaggtcaggagattga

SEQ ID NO: 62043 - DNA, 20 bp, synthetic construct
  source 1..20: mol_type = other DNA
atcacgaggtcaggagattg

SEQ ID NO: 62044 - DNA, 20 bp, synthetic construct
  source 1..20: mol_type = other DNA
gatcacgaggtcaggagatt

SEQ ID NO: 62045 - DNA, 20 bp, synthetic construct
  source 1..20: mol_type = other DNA
ggatcacgaggtcaggagat

SEQ ID NO: 62046 - DNA, 20 bp, synthetic construct
  source 1..20: mol_type = other DNA
tggatcacgaggtcaggaga

SEQ ID NO: 62047 - DNA, 20 bp, synthetic construct
  source 1..20: mol_type = other DNA
atggatcacgaggtcaggag

SEQ ID NO: 62048 - DNA, 20 bp, synthetic construct
  source 1..20: mol_type = other DNA
gatggatcacgaggtcagga

SEQ ID NO: 62049 - DNA, 20 bp, synthetic construct
  source 1..20: mol_type = other DNA
ggatggatcacgaggtcagg

SEQ ID NO: 62050 - DNA, 20 bp, synthetic construct
  source 1..20: mol_type = other DNA
cggatggatcacgaggtcag

SEQ ID NO: 62051 - DNA, 20 bp, synthetic construct
  source 1..20: mol_type = other DNA
gcggatggatcacgaggtca

SEQ ID NO: 62052 - DNA, 20 bp, synthetic construct
  source 1..20: mol_type = other DNA
ggcggatggatcacgaggtc

SEQ ID NO: 62053 - DNA, 20 bp, synthetic construct
  source 1..20: mol_type = other DNA
aggcggatggatcacgaggt

SEQ ID NO: 62054 - DNA, 20 bp, synthetic construct
  source 1..20: mol_type = other DNA
gaggcggatggatcacgagg

SEQ ID NO: 62055 - DNA, 20 bp, synthetic construct
  source 1..20: mol_type = other DNA
cgaggcggatggatcacgag

SEQ ID NO: 62056 - DNA, 20 bp, synthetic construct
  source 1..20: mol_type = other DNA
ccgaggcggatggatcacga

SEQ ID NO: 62057 - DNA, 20 bp, synthetic construct
  source 1..20: mol_type = other DNA
gccgaggcggatggatcacg

SEQ ID NO: 62058 - DNA, 20 bp, synthetic construct
  source 1..20: mol_type = other DNA
ggccgaggcggatggatcac

SEQ ID NO: 62059 - DNA, 20 bp, synthetic construct
  source 1..20: mol_type = other DNA
aggccgaggcggatggatca

SEQ ID NO: 62060 - DNA, 20 bp, synthetic construct
  source 1..20: mol_type = other DNA
gaggccgaggcggatggatc

SEQ ID NO: 62061 - DNA, 20 bp, synthetic construct
  source 1..20: mol_type = other DNA
ggaggccgaggcggatggat

SEQ ID NO: 62062 - DNA, 20 bp, synthetic construct
  source 1..20: mol_type = other DNA
gggaggccgaggcggatgga

SEQ ID NO: 62063 - DNA, 20 bp, synthetic construct
  source 1..20: mol_type = other DNA
tgggaggccgaggcggatgg

SEQ ID NO: 62064 - DNA, 20 bp, synthetic construct
  source 1..20: mol_type = other DNA
ttgggaggccgaggcggatg

SEQ ID NO: 62065 - DNA, 20 bp, synthetic construct
  source 1..20: mol_type = other DNA
tttgggaggccgaggcggat

SEQ ID NO: 62066 - DNA, 20 bp, synthetic construct
  source 1..20: mol_type = other DNA
ctttgggaggccgaggcgga

SEQ ID NO: 62067 - DNA, 20 bp, synthetic construct
  source 1..20: mol_type = other DNA
actttgggaggccgaggcgg

SEQ ID NO: 62068 - DNA, 20 bp, synthetic construct
  source 1..20: mol_type = other DNA
cactttgggaggccgaggcg

SEQ ID NO: 62069 - DNA, 20 bp, synthetic construct
  source 1..20: mol_type = other DNA
gcactttgggaggccgaggc

SEQ ID NO: 62070 - DNA, 20 bp, synthetic construct
  source 1..20: mol_type = other DNA
agcactttgggaggccgagg

SEQ ID NO: 62071 - DNA, 20 bp, synthetic construct
  source 1..20: mol_type = other DNA
cagcactttgggaggccgag

SEQ ID NO: 62072 - DNA, 20 bp, synthetic construct
  source 1..20: mol_type = other DNA
ccagcactttgggaggccga

SEQ ID NO: 62073 - DNA, 20 bp, synthetic construct
  source 1..20: mol_type = other DNA
cccagcactttgggaggccg

SEQ ID NO: 62074 - DNA, 20 bp, synthetic construct
  source 1..20: mol_type = other DNA
tcccagcactttgggaggcc

SEQ ID NO: 62075 - DNA, 20 bp, synthetic construct
  source 1..20: mol_type = other DNA
atcccagcactttgggaggc

SEQ ID NO: 62076 - DNA, 20 bp, synthetic construct
  source 1..20: mol_type = other DNA
aatcccagcactttgggagg

SEQ ID NO: 62077 - DNA, 20 bp, synthetic construct
  source 1..20: mol_type = other DNA
taatcccagcactttgggag

SEQ ID NO: 62078 - DNA, 20 bp, synthetic construct
  source 1..20: mol_type = other DNA
gtaatcccagcactttggga

SEQ ID NO: 62079 - DNA, 20 bp, synthetic construct
  source 1..20: mol_type = other DNA
tgtaatcccagcactttggg

SEQ ID NO: 62080 - DNA, 20 bp, synthetic construct
  source 1..20: mol_type = other DNA
ctgtaatcccagcactttgg

SEQ ID NO: 62081 - DNA, 20 bp, synthetic construct
  source 1..20: mol_type = other DNA
cctgtaatcccagcactttg

SEQ ID NO: 62082 - DNA, 20 bp, synthetic construct
  source 1..20: mol_type = other DNA
gcctgtaatcccagcacttt

SEQ ID NO: 62083 - DNA, 20 bp, synthetic construct
  source 1..20: mol_type = other DNA
tgcctgtaatcccagcactt

SEQ ID NO: 62084 - DNA, 20 bp, synthetic construct
  source 1..20: mol_type = other DNA
atgcctgtaatcccagcact

SEQ ID NO: 62085 - DNA, 20 bp, synthetic construct
  source 1..20: mol_type = other DNA
catgcctgtaatcccagcac

SEQ ID NO: 62086 - DNA, 20 bp, synthetic construct
  source 1..20: mol_type = other DNA
tcatgcctgtaatcccagca

SEQ ID NO: 62087 - DNA, 20 bp, synthetic construct
  source 1..20: mol_type = other DNA
ctcatgcctgtaatcccagc

SEQ ID NO: 62088 - DNA, 20 bp, synthetic construct
  source 1..20: mol_type = other DNA
gctcatgcctgtaatcccag

SEQ ID NO: 62089 - DNA, 20 bp, synthetic construct
  source 1..20: mol_type = other DNA
ggctcatgcctgtaatccca

SEQ ID NO: 62090 - DNA, 20 bp, synthetic construct
  source 1..20: mol_type = other DNA
tggctcatgcctgtaatccc

SEQ ID NO: 62091 - DNA, 20 bp, synthetic construct
  source 1..20: mol_type = other DNA
atggctcatgcctgtaatcc

SEQ ID NO: 62092 - DNA, 20 bp, synthetic construct
  source 1..20: mol_type = other DNA
gatggctcatgcctgtaatc

SEQ ID NO: 62093 - DNA, 20 bp, synthetic construct
  source 1..20: mol_type = other DNA
cgatggctcatgcctgtaat

SEQ ID NO: 62094 - DNA, 20 bp, synthetic construct
  source 1..20: mol_type = other DNA
gcgatggctcatgcctgtaa

SEQ ID NO: 62095 - DNA, 20 bp, synthetic construct
  source 1..20: mol_type = other DNA
tgcgatggctcatgcctgta

SEQ ID NO: 62096 - DNA, 20 bp, synthetic construct
  source 1..20: mol_type = other DNA
gtgcgatggctcatgcctgt

SEQ ID NO: 62097 - DNA, 20 bp, synthetic construct
  source 1..20: mol_type = other DNA
ggtgcgatggctcatgcctg

SEQ ID NO: 62098 - DNA, 20 bp, synthetic construct
  source 1..20: mol_type = other DNA
gggtgcgatggctcatgcct

SEQ ID NO: 62099 - DNA, 20 bp, synthetic construct
  source 1..20: mol_type = other DNA
cgggtgcgatggctcatgcc

SEQ ID NO: 62100 - DNA, 20 bp, synthetic construct
  source 1..20: mol_type = other DNA
ccgggtgcgatggctcatgc

SEQ ID NO: 62101 - DNA, 20 bp, synthetic construct
  source 1..20: mol_type = other DNA
gccgggtgcgatggctcatg

SEQ ID NO: 62102 - DNA, 20 bp, synthetic construct
  source 1..20: mol_type = other DNA
ggccgggtgcgatggctcat

SEQ ID NO: 62103 - DNA, 20 bp, synthetic construct
  source 1..20: mol_type = other DNA
aggccgggtgcgatggctca

SEQ ID NO: 62104 - DNA, 20 bp, synthetic construct
  source 1..20: mol_type = other DNA
aaggccgggtgcgatggctc

SEQ ID NO: 62105 - DNA, 20 bp, synthetic construct
  source 1..20: mol_type = other DNA
gaaggccgggtgcgatggct

SEQ ID NO: 62106 - DNA, 20 bp, synthetic construct
  source 1..20: mol_type = other DNA
agaaggccgggtgcgatggc

SEQ ID NO: 62107 - DNA, 20 bp, synthetic construct
  source 1..20: mol_type = other DNA
aagaaggccgggtgcgatgg

SEQ ID NO: 62108 - DNA, 20 bp, synthetic construct
  source 1..20: mol_type = other DNA
aaagaaggccgggtgcgatg

SEQ ID NO: 62109 - DNA, 20 bp, synthetic construct
  source 1..20: mol_type = other DNA
aaaagaaggccgggtgcgat

SEQ ID NO: 62110 - DNA, 20 bp, synthetic construct
  source 1..20: mol_type = other DNA
aaaaagaaggccgggtgcga

SEQ ID NO: 62111 - DNA, 20 bp, synthetic construct
  source 1..20: mol_type = other DNA
aaaaaagaaggccgggtgcg

SEQ ID NO: 62112 - DNA, 20 bp, synthetic construct
  source 1..20: mol_type = other DNA
aaaaaaagaaggccgggtgc

SEQ ID NO: 62113 - DNA, 20 bp, synthetic construct
  source 1..20: mol_type = other DNA
gaaaaaaagaaggccgggtg

SEQ ID NO: 62114 - DNA, 20 bp, synthetic construct
  source 1..20: mol_type = other DNA
agaaaaaaagaaggccgggt

SEQ ID NO: 62115 - DNA, 20 bp, synthetic construct
  source 1..20: mol_type = other DNA
aagaaaaaaagaaggccggg

SEQ ID NO: 62116 - DNA, 20 bp, synthetic construct
  source 1..20: mol_type = other DNA
aaagaaaaaaagaaggccgg

SEQ ID NO: 62117 - DNA, 20 bp, synthetic construct
  source 1..20: mol_type = other DNA
gaaagaaaaaaagaaggccg

SEQ ID NO: 62118 - DNA, 20 bp, synthetic construct
  source 1..20: mol_type = other DNA
agaaagaaaaaaagaaggcc

SEQ ID NO: 62119 - DNA, 20 bp, synthetic construct
  source 1..20: mol_type = other DNA
gagaaagaaaaaaagaaggc

SEQ ID NO: 62120 - DNA, 20 bp, synthetic construct
  source 1..20: mol_type = other DNA
agagaaagaaaaaaagaagg

SEQ ID NO: 62121 - DNA, 20 bp, synthetic construct
  source 1..20: mol_type = other DNA
aagagaaagaaaaaaagaag

SEQ ID NO: 62122 - DNA, 20 bp, synthetic construct
  source 1..20: mol_type = other DNA
aaagagaaagaaaaaaagaa

SEQ ID NO: 62123 - DNA, 20 bp, synthetic construct
  source 1..20: mol_type = other DNA
taaagagaaagaaaaaaaga

SEQ ID NO: 62124 - DNA, 20 bp, synthetic construct
  source 1..20: mol_type = other DNA
ttaaagagaaagaaaaaaag

SEQ ID NO: 62125 - DNA, 20 bp, synthetic construct
  source 1..20: mol_type = other DNA
gttaaagagaaagaaaaaaa

SEQ ID NO: 62126 - DNA, 20 bp, synthetic construct
  source 1..20: mol_type = other DNA
agttaaagagaaagaaaaaa

SEQ ID NO: 62127 - DNA, 20 bp, synthetic construct
  source 1..20: mol_type = other DNA
aagttaaagagaaagaaaaa

SEQ ID NO: 62128 - DNA, 20 bp, synthetic construct
  source 1..20: mol_type = other DNA
gaagttaaagagaaagaaaa

SEQ ID NO: 62129 - DNA, 20 bp, synthetic construct
  source 1..20: mol_type = other DNA
agaagttaaagagaaagaaa

SEQ ID NO: 62130 - DNA, 20 bp, synthetic construct
  source 1..20: mol_type = other DNA
cagaagttaaagagaaagaa

SEQ ID NO: 62131 - DNA, 20 bp, synthetic construct
  source 1..20: mol_type = other DNA
tcagaagttaaagagaaaga

SEQ ID NO: 62132 - DNA, 20 bp, synthetic construct
  source 1..20: mol_type = other DNA
ctcagaagttaaagagaaag

SEQ ID NO: 62133 - DNA, 20 bp, synthetic construct
  source 1..20: mol_type = other DNA
gctcagaagttaaagagaaa

SEQ ID NO: 62134 - DNA, 20 bp, synthetic construct
  source 1..20: mol_type = other DNA
agctcagaagttaaagagaa

SEQ ID NO: 62135 - DNA, 20 bp, synthetic construct
  source 1..20: mol_type = other DNA
cagctcagaagttaaagaga

SEQ ID NO: 62136 - DNA, 20 bp, synthetic construct
  source 1..20: mol_type = other DNA
tcagctcagaagttaaagag

SEQ ID NO: 62137 - DNA, 20 bp, synthetic construct
  source 1..20: mol_type = other DNA
ttcagctcagaagttaaaga

SEQ ID NO: 62138 - DNA, 20 bp, synthetic construct
  source 1..20: mol_type = other DNA
tttcagctcagaagttaaag

SEQ ID NO: 62139 - DNA, 20 bp, synthetic construct
  source 1..20: mol_type = other DNA
ttttcagctcagaagttaaa

SEQ ID NO: 62140 - DNA, 20 bp, synthetic construct
  source 1..20: mol_type = other DNA
attttcagctcagaagttaa

SEQ ID NO: 62141 - DNA, 20 bp, synthetic construct
  source 1..20: mol_type = other DNA
tattttcagctcagaagtta

SEQ ID NO: 62142 - DNA, 20 bp, synthetic construct
  source 1..20: mol_type = other DNA
ctattttcagctcagaagtt

SEQ ID NO: 62143 - DNA, 20 bp, synthetic construct
  source 1..20: mol_type = other DNA
actattttcagctcagaagt

SEQ ID NO: 62144 - DNA, 20 bp, synthetic construct
  source 1..20: mol_type = other DNA
tactattttcagctcagaag

SEQ ID NO: 62145 - DNA, 20 bp, synthetic construct
  source 1..20: mol_type = other DNA
gtactattttcagctcagaa

SEQ ID NO: 62146 - DNA, 20 bp, synthetic construct
  source 1..20: mol_type = other DNA
ggtactattttcagctcaga

SEQ ID NO: 62147 - DNA, 20 bp, synthetic construct
  source 1..20: mol_type = other DNA
aggtactattttcagctcag

SEQ ID NO: 62148 - DNA, 20 bp, synthetic construct
  source 1..20: mol_type = other DNA
aaggtactattttcagctca

SEQ ID NO: 62149 - DNA, 20 bp, synthetic construct
  source 1..20: mol_type = other DNA
aaaggtactattttcagctc

SEQ ID NO: 62150 - DNA, 20 bp, synthetic construct
  source 1..20: mol_type = other DNA
aaaaggtactattttcagct

SEQ ID NO: 62151 - DNA, 20 bp, synthetic construct
  source 1..20: mol_type = other DNA
taaaaggtactattttcagc

SEQ ID NO: 62152 - DNA, 20 bp, synthetic construct
  source 1..20: mol_type = other DNA
ataaaaggtactattttcag

SEQ ID NO: 62153 - DNA, 20 bp, synthetic construct
  source 1..20: mol_type = other DNA
tataaaaggtactattttca

SEQ ID NO: 62154 - DNA, 20 bp, synthetic construct
  source 1..20: mol_type = other DNA
ttataaaaggtactattttc

SEQ ID NO: 62155 - DNA, 20 bp, synthetic construct
  source 1..20: mol_type = other DNA
tttataaaaggtactatttt

SEQ ID NO: 62156 - DNA, 20 bp, synthetic construct
  source 1..20: mol_type = other DNA
ctttataaaaggtactattt

SEQ ID NO: 62157 - DNA, 20 bp, synthetic construct
  source 1..20: mol_type = other DNA
tctttataaaaggtactatt

SEQ ID NO: 62158 - DNA, 20 bp, synthetic construct
  source 1..20: mol_type = other DNA
ttctttataaaaggtactat

SEQ ID NO: 62159 - DNA, 20 bp, synthetic construct
  source 1..20: mol_type = other DNA
cttctttataaaaggtacta

SEQ ID NO: 62160 - DNA, 20 bp, synthetic construct
  source 1..20: mol_type = other DNA
acttctttataaaaggtact

SEQ ID NO: 62161 - DNA, 20 bp, synthetic construct
  source 1..20: mol_type = other DNA
cacttctttataaaaggtac

SEQ ID NO: 62162 - DNA, 20 bp, synthetic construct
  source 1..20: mol_type = other DNA
gcacttctttataaaaggta

SEQ ID NO: 62163 - DNA, 20 bp, synthetic construct
  source 1..20: mol_type = other DNA
agcacttctttataaaaggt

SEQ ID NO: 62164 - DNA, 20 bp, synthetic construct
  source 1..20: mol_type = other DNA
gagcacttctttataaaagg

SEQ ID NO: 62165 - DNA, 20 bp, synthetic construct
  source 1..20: mol_type = other DNA
tgagcacttctttataaaag

SEQ ID NO: 62166 - DNA, 20 bp, synthetic construct
  source 1..20: mol_type = other DNA
ttgagcacttctttataaaa

SEQ ID NO: 62167 - DNA, 20 bp, synthetic construct
  source 1..20: mol_type = other DNA
tttgagcacttctttataaa

SEQ ID NO: 62168 - DNA, 20 bp, synthetic construct
  source 1..20: mol_type = other DNA
gtttgagcacttctttataa

SEQ ID NO: 62169 - DNA, 20 bp, synthetic construct
  source 1..20: mol_type = other DNA
cgtttgagcacttctttata

SEQ ID NO: 62170 - DNA, 20 bp, synthetic construct
  source 1..20: mol_type = other DNA
tcgtttgagcacttctttat

SEQ ID NO: 62171 - DNA, 20 bp, synthetic construct
  source 1..20: mol_type = other DNA
atcgtttgagcacttcttta

SEQ ID NO: 62172 - DNA, 20 bp, synthetic construct
  source 1..20: mol_type = other DNA
catcgtttgagcacttcttt

SEQ ID NO: 62173 - DNA, 20 bp, synthetic construct
  source 1..20: mol_type = other DNA
tcatcgtttgagcacttctt

SEQ ID NO: 62174 - DNA, 20 bp, synthetic construct
  source 1..20: mol_type = other DNA
atcatcgtttgagcacttct

SEQ ID NO: 62175 - DNA, 20 bp, synthetic construct
  source 1..20: mol_type = other DNA
aatcatcgtttgagcacttc

SEQ ID NO: 62176 - DNA, 20 bp, synthetic construct
  source 1..20: mol_type = other DNA
caatcatcgtttgagcactt

SEQ ID NO: 62177 - DNA, 20 bp, synthetic construct
  source 1..20: mol_type = other DNA
ccaatcatcgtttgagcact

SEQ ID NO: 62178 - DNA, 20 bp, synthetic construct
  source 1..20: mol_type = other DNA
tccaatcatcgtttgagcac

SEQ ID NO: 62179 - DNA, 20 bp, synthetic construct
  source 1..20: mol_type = other DNA
gtccaatcatcgtttgagca

SEQ ID NO: 62180 - DNA, 20 bp, synthetic construct
  source 1..20: mol_type = other DNA
agtccaatcatcgtttgagc

SEQ ID NO: 62181 - DNA, 20 bp, synthetic construct
  source 1..20: mol_type = other DNA
cagtccaatcatcgtttgag

SEQ ID NO: 62182 - DNA, 20 bp, synthetic construct
  source 1..20: mol_type = other DNA
tcagtccaatcatcgtttga

SEQ ID NO: 62183 - DNA, 20 bp, synthetic construct
  source 1..20: mol_type = other DNA
atcagtccaatcatcgtttg

SEQ ID NO: 62184 - DNA, 20 bp, synthetic construct
  source 1..20: mol_type = other DNA
aatcagtccaatcatcgttt

SEQ ID NO: 62185 - DNA, 20 bp, synthetic construct
  source 1..20: mol_type = other DNA
aaatcagtccaatcatcgtt

SEQ ID NO: 62186 - DNA, 20 bp, synthetic construct
  source 1..20: mol_type = other DNA
gaaatcagtccaatcatcgt

SEQ ID NO: 62187 - DNA, 20 bp, synthetic construct
  source 1..20: mol_type = other DNA
agaaatcagtccaatcatcg

SEQ ID NO: 62188 - DNA, 20 bp, synthetic construct
  source 1..20: mol_type = other DNA
gagaaatcagtccaatcatc

SEQ ID NO: 62189 - DNA, 20 bp, synthetic construct
  source 1..20: mol_type = other DNA
ggagaaatcagtccaatcat

SEQ ID NO: 62190 - DNA, 20 bp, synthetic construct
  source 1..20: mol_type = other DNA
aggagaaatcagtccaatca

SEQ ID NO: 62191 - DNA, 20 bp, synthetic construct
  source 1..20: mol_type = other DNA
aaggagaaatcagtccaatc

SEQ ID NO: 62192 - DNA, 20 bp, synthetic construct
  source 1..20: mol_type = other DNA
taaggagaaatcagtccaat

SEQ ID NO: 62193 - DNA, 20 bp, synthetic construct
  source 1..20: mol_type = other DNA
ataaggagaaatcagtccaa

SEQ ID NO: 62194 - DNA, 20 bp, synthetic construct
  source 1..20: mol_type = other DNA
aataaggagaaatcagtcca

SEQ ID NO: 62195 - DNA, 20 bp, synthetic construct
  source 1..20: mol_type = other DNA
aaataaggagaaatcagtcc

SEQ ID NO: 62196 - DNA, 20 bp, synthetic construct
  source 1..20: mol_type = other DNA
gaaataaggagaaatcagtc

SEQ ID NO: 62197 - DNA, 20 bp, synthetic construct
  source 1..20: mol_type = other DNA
agaaataaggagaaatcagt

SEQ ID NO: 62198 - DNA, 20 bp, synthetic construct
  source 1..20: mol_type = other DNA
gagaaataaggagaaatcag

SEQ ID NO: 62199 - DNA, 20 bp, synthetic construct
  source 1..20: mol_type = other DNA
agagaaataaggagaaatca

SEQ ID NO: 62200 - DNA, 20 bp, synthetic construct
  source 1..20: mol_type = other DNA
gagagaaataaggagaaatc

SEQ ID NO: 62201 - DNA, 20 bp, synthetic construct
  source 1..20: mol_type = other DNA
agagagaaataaggagaaat

SEQ ID NO: 62202 - DNA, 20 bp, synthetic construct
  source 1..20: mol_type = other DNA
aagagagaaataaggagaaa

SEQ ID NO: 62203 - DNA, 20 bp, synthetic construct
  source 1..20: mol_type = other DNA
aaagagagaaataaggagaa

SEQ ID NO: 62204 - DNA, 20 bp, synthetic construct
  source 1..20: mol_type = other DNA
gaaagagagaaataaggaga

SEQ ID NO: 62205 - DNA, 20 bp, synthetic construct
  source 1..20: mol_type = other DNA
agaaagagagaaataaggag

SEQ ID NO: 62206 - DNA, 20 bp, synthetic construct
  source 1..20: mol_type = other DNA
gagaaagagagaaataagga

SEQ ID NO: 62207 - DNA, 20 bp, synthetic construct
  source 1..20: mol_type = other DNA
agagaaagagagaaataagg

SEQ ID NO: 62208 - DNA, 20 bp, synthetic construct
  source 1..20: mol_type = other DNA
gagagaaagagagaaataag

SEQ ID NO: 62209 - DNA, 20 bp, synthetic construct
  source 1..20: mol_type = other DNA
agagagaaagagagaaataa

SEQ ID NO: 62210 - DNA, 20 bp, synthetic construct
  source 1..20: mol_type = other DNA
cagagagaaagagagaaata

SEQ ID NO: 62211 - DNA, 20 bp, synthetic construct
  source 1..20: mol_type = other DNA
acagagagaaagagagaaat

SEQ ID NO: 62212 - DNA, 20 bp, synthetic construct
  source 1..20: mol_type = other DNA
gacagagagaaagagagaaa

SEQ ID NO: 62213 - DNA, 20 bp, synthetic construct
  source 1..20: mol_type = other DNA
agacagagagaaagagagaa

SEQ ID NO: 62214 - DNA, 20 bp, synthetic construct
  source 1..20: mol_type = other DNA
gagacagagagaaagagaga

SEQ ID NO: 62215 - DNA, 20 bp, synthetic construct
  source 1..20: mol_type = other DNA
agagacagagagaaagagag

SEQ ID NO: 62216 - DNA, 20 bp, synthetic construct
  source 1..20: mol_type = other DNA
aagagacagagagaaagaga

SEQ ID NO: 62217 - DNA, 20 bp, synthetic construct
  source 1..20: mol_type = other DNA
aaagagacagagagaaagag

SEQ ID NO: 62218 - DNA, 20 bp, synthetic construct
  source 1..20: mol_type = other DNA
gaaagagacagagagaaaga

SEQ ID NO: 62219 - DNA, 20 bp, synthetic construct
  source 1..20: mol_type = other DNA
tgaaagagacagagagaaag

SEQ ID NO: 62220 - DNA, 20 bp, synthetic construct
  source 1..20: mol_type = other DNA
gtgaaagagacagagagaaa

SEQ ID NO: 62221 - DNA, 20 bp, synthetic construct
  source 1..20: mol_type = other DNA
agtgaaagagacagagagaa

SEQ ID NO: 62222 - DNA, 20 bp, synthetic construct
  source 1..20: mol_type = other DNA
gagtgaaagagacagagaga

SEQ ID NO: 62223 - DNA, 20 bp, synthetic construct
  source 1..20: mol_type = other DNA
agagtgaaagagacagagag

SEQ ID NO: 62224 - DNA, 20 bp, synthetic construct
  source 1..20: mol_type = other DNA
gagagtgaaagagacagaga

SEQ ID NO: 62225 - DNA, 20 bp, synthetic construct
  source 1..20: mol_type = other DNA
agagagtgaaagagacagag

SEQ ID NO: 62226 - DNA, 20 bp, synthetic construct
  source 1..20: mol_type = other DNA
aagagagtgaaagagacaga

SEQ ID NO: 62227 - DNA, 20 bp, synthetic construct
  source 1..20: mol_type = other DNA
aaagagagtgaaagagacag

SEQ ID NO: 62228 - DNA, 20 bp, synthetic construct
  source 1..20: mol_type = other DNA
aaaagagagtgaaagagaca

SEQ ID NO: 62229 - DNA, 20 bp, synthetic construct
  source 1..20: mol_type = other DNA
aaaaagagagtgaaagagac

SEQ ID NO: 62230 - DNA, 20 bp, synthetic construct
  source 1..20: mol_type = other DNA
taaaaagagagtgaaagaga

SEQ ID NO: 62231 - DNA, 20 bp, synthetic construct
  source 1..20: mol_type = other DNA
ctaaaaagagagtgaaagag

SEQ ID NO: 62232 - DNA, 20 bp, synthetic construct
  source 1..20: mol_type = other DNA
tctaaaaagagagtgaaaga

SEQ ID NO: 62233 - DNA, 20 bp, synthetic construct
  source 1..20: mol_type = other DNA
ttctaaaaagagagtgaaag

SEQ ID NO: 62234 - DNA, 20 bp, synthetic construct
  source 1..20: mol_type = other DNA
attctaaaaagagagtgaaa

SEQ ID NO: 62235 - DNA, 20 bp, synthetic construct
  source 1..20: mol_type = other DNA
aattctaaaaagagagtgaa

SEQ ID NO: 62236 - DNA, 20 bp, synthetic construct
  source 1..20: mol_type = other DNA
aaattctaaaaagagagtga

SEQ ID NO: 62237 - DNA, 20 bp, synthetic construct
  source 1..20: mol_type = other DNA
aaaattctaaaaagagagtg

SEQ ID NO: 62238 - DNA, 20 bp, synthetic construct
  source 1..20: mol_type = other DNA
aaaaattctaaaaagagagt

SEQ ID NO: 62239 - DNA, 20 bp, synthetic construct
  source 1..20: mol_type = other DNA
gaaaaattctaaaaagagag

SEQ ID NO: 62240 - DNA, 20 bp, synthetic construct
  source 1..20: mol_type = other DNA
agaaaaattctaaaaagaga

SEQ ID NO: 62241 - DNA, 20 bp, synthetic construct
  source 1..20: mol_type = other DNA
aagaaaaattctaaaaagag

SEQ ID NO: 62242 - DNA, 20 bp, synthetic construct
  source 1..20: mol_type = other DNA
aaagaaaaattctaaaaaga

SEQ ID NO: 62243 - DNA, 20 bp, synthetic construct
  source 1..20: mol_type = other DNA
aaaagaaaaattctaaaaag

SEQ ID NO: 62244 - DNA, 20 bp, synthetic construct
  source 1..20: mol_type = other DNA
aaaaagaaaaattctaaaaa

SEQ ID NO: 62245 - DNA, 20 bp, synthetic construct
  source 1..20: mol_type = other DNA
aaaaaagaaaaattctaaaa

SEQ ID NO: 62246 - DNA, 20 bp, synthetic construct
  source 1..20: mol_type = other DNA
taaaaaagaaaaattctaaa

SEQ ID NO: 62247 - DNA, 20 bp, synthetic construct
  source 1..20: mol_type = other DNA
ttaaaaaagaaaaattctaa

SEQ ID NO: 62248 - DNA, 20 bp, synthetic construct
  source 1..20: mol_type = other DNA
cttaaaaaagaaaaattcta

SEQ ID NO: 62249 - DNA, 20 bp, synthetic construct
  source 1..20: mol_type = other DNA
acttaaaaaagaaaaattct

SEQ ID NO: 62250 - DNA, 20 bp, synthetic construct
  source 1..20: mol_type = other DNA
tacttaaaaaagaaaaattc

SEQ ID NO: 62251 - DNA, 20 bp, synthetic construct
  source 1..20: mol_type = other DNA
ctacttaaaaaagaaaaatt

SEQ ID NO: 62252 - DNA, 20 bp, synthetic construct
  source 1..20: mol_type = other DNA
tctacttaaaaaagaaaaat

SEQ ID NO: 62253 - DNA, 20 bp, synthetic construct
  source 1..20: mol_type = other DNA
ctctacttaaaaaagaaaaa

SEQ ID NO: 62254 - DNA, 20 bp, synthetic construct
  source 1..20: mol_type = other DNA
tctctacttaaaaaagaaaa

SEQ ID NO: 62255 - DNA, 20 bp, synthetic construct
  source 1..20: mol_type = other DNA
gtctctacttaaaaaagaaa

SEQ ID NO: 62256 - DNA, 20 bp, synthetic construct
  source 1..20: mol_type = other DNA
cgtctctacttaaaaaagaa

SEQ ID NO: 62257 - DNA, 20 bp, synthetic construct
  source 1..20: mol_type = other DNA
tcgtctctacttaaaaaaga

SEQ ID NO: 62258 - DNA, 20 bp, synthetic construct
  source 1..20: mol_type = other DNA
ctcgtctctacttaaaaaag

SEQ ID NO: 62259 - DNA, 20 bp, synthetic construct
  source 1..20: mol_type = other DNA
cctcgtctctacttaaaaaa

SEQ ID NO: 62260 - DNA, 20 bp, synthetic construct
  source 1..20: mol_type = other DNA
acctcgtctctacttaaaaa

SEQ ID NO: 62261 - DNA, 20 bp, synthetic construct
  source 1..20: mol_type = other DNA
gacctcgtctctacttaaaa

SEQ ID NO: 62262 - DNA, 20 bp, synthetic construct
  source 1..20: mol_type = other DNA
ggacctcgtctctacttaaa

SEQ ID NO: 62263 - DNA, 20 bp, synthetic construct
  source 1..20: mol_type = other DNA
gggacctcgtctctacttaa

SEQ ID NO: 62264 - DNA, 20 bp, synthetic construct
  source 1..20: mol_type = other DNA
tgggacctcgtctctactta

SEQ ID NO: 62265 - DNA, 20 bp, synthetic construct
  source 1..20: mol_type = other DNA
gtgggacctcgtctctactt

SEQ ID NO: 62266 - DNA, 20 bp, synthetic construct
  source 1..20: mol_type = other DNA
agtgggacctcgtctctact

SEQ ID NO: 62267 - DNA, 20 bp, synthetic construct
  source 1..20: mol_type = other DNA
tagtgggacctcgtctctac

SEQ ID NO: 62268 - DNA, 20 bp, synthetic construct
  source 1..20: mol_type = other DNA
atagtgggacctcgtctcta

SEQ ID NO: 62269 - DNA, 20 bp, synthetic construct
  source 1..20: mol_type = other DNA
catagtgggacctcgtctct

SEQ ID NO: 62270 - DNA, 20 bp, synthetic construct
  source 1..20: mol_type = other DNA
acatagtgggacctcgtctc

SEQ ID NO: 62271 - DNA, 20 bp, synthetic construct
  source 1..20: mol_type = other DNA
aacatagtgggacctcgtct

SEQ ID NO: 62272 - DNA, 20 bp, synthetic construct
  source 1..20: mol_type = other DNA
caacatagtgggacctcgtc

SEQ ID NO: 62273 - DNA, 20 bp, synthetic construct
  source 1..20: mol_type = other DNA
gcaacatagtgggacctcgt

SEQ ID NO: 62274 - DNA, 20 bp, synthetic construct
  source 1..20: mol_type = other DNA
ggcaacatagtgggacctcg

SEQ ID NO: 62275 - DNA, 20 bp, synthetic construct
  source 1..20: mol_type = other DNA
gggcaacatagtgggacctc

SEQ ID NO: 62276 - DNA, 20 bp, synthetic construct
  source 1..20: mol_type = other DNA
tgggcaacatagtgggacct

SEQ ID NO: 62277 - DNA, 20 bp, synthetic construct
  source 1..20: mol_type = other DNA
ctgggcaacatagtgggacc

SEQ ID NO: 62278 - DNA, 20 bp, synthetic construct
  source 1..20: mol_type = other DNA
cctgggcaacatagtgggac

SEQ ID NO: 62279 - DNA, 20 bp, synthetic construct
  source 1..20: mol_type = other DNA
gcctgggcaacatagtggga

SEQ ID NO: 62280 - DNA, 20 bp, synthetic construct
  source 1..20: mol_type = other DNA
agcctgggcaacatagtggg

SEQ ID NO: 62281 - DNA, 20 bp, synthetic construct
  source 1..20: mol_type = other DNA
cagcctgggcaacatagtgg

SEQ ID NO: 62282 - DNA, 20 bp, synthetic construct
  source 1..20: mol_type = other DNA
acagcctgggcaacatagtg

SEQ ID NO: 62283 - DNA, 20 bp, synthetic construct
  source 1..20: mol_type = other DNA
gacagcctgggcaacatagt

SEQ ID NO: 62284 - DNA, 20 bp, synthetic construct
  source 1..20: mol_type = other DNA
agacagcctgggcaacatag

SEQ ID NO: 62285 - DNA, 20 bp, synthetic construct
  source 1..20: mol_type = other DNA
aagacagcctgggcaacata

SEQ ID NO: 62286 - DNA, 20 bp, synthetic construct
  source 1..20: mol_type = other DNA
caagacagcctgggcaacat

SEQ ID NO: 62287 - DNA, 20 bp, synthetic construct
  source 1..20: mol_type = other DNA
tcaagacagcctgggcaaca

SEQ ID NO: 62288 - DNA, 20 bp, synthetic construct
  source 1..20: mol_type = other DNA
ttcaagacagcctgggcaac

SEQ ID NO: 62289 - DNA, 20 bp, synthetic construct
  source 1..20: mol_type = other DNA
gttcaagacagcctgggcaa

SEQ ID NO: 62290 - DNA, 20 bp, synthetic construct
  source 1..20: mol_type = other DNA
agttcaagacagcctgggca

SEQ ID NO: 62291 - DNA, 20 bp, synthetic construct
  source 1..20: mol_type = other DNA
gagttcaagacagcctgggc

SEQ ID NO: 62292 - DNA, 20 bp, synthetic construct
  source 1..20: mol_type = other DNA
ggagttcaagacagcctggg

SEQ ID NO: 62293 - DNA, 20 bp, synthetic construct
  source 1..20: mol_type = other DNA
aggagttcaagacagcctgg

SEQ ID NO: 62294 - DNA, 20 bp, synthetic construct
  source 1..20: mol_type = other DNA
caggagttcaagacagcctg

SEQ ID NO: 62295 - DNA, 20 bp, synthetic construct
  source 1..20: mol_type = other DNA
tcaggagttcaagacagcct

SEQ ID NO: 62296 - DNA, 20 bp, synthetic construct
  source 1..20: mol_type = other DNA
ctcaggagttcaagacagcc

SEQ ID NO: 62297 - DNA, 20 bp, synthetic construct
  source 1..20: mol_type = other DNA
gctcaggagttcaagacagc

SEQ ID NO: 62298 - DNA, 20 bp, synthetic construct
  source 1..20: mol_type = other DNA
ggctcaggagttcaagacag

SEQ ID NO: 62299 - DNA, 20 bp, synthetic construct
  source 1..20: mol_type = other DNA
gggctcaggagttcaagaca

SEQ ID NO: 62300 - DNA, 20 bp, synthetic construct
  source 1..20: mol_type = other DNA
tgggctcaggagttcaagac

SEQ ID NO: 62301 - DNA, 20 bp, synthetic construct
  source 1..20: mol_type = other DNA
ttgggctcaggagttcaaga

SEQ ID NO: 62302 - DNA, 20 bp, synthetic construct
  source 1..20: mol_type = other DNA
cttgggctcaggagttcaag

SEQ ID NO: 62303 - DNA, 20 bp, synthetic construct
  source 1..20: mol_type = other DNA
gcttgggctcaggagttcaa

SEQ ID NO: 62304 - DNA, 20 bp, synthetic construct
  source 1..20: mol_type = other DNA
tgcttgggctcaggagttca

SEQ ID NO: 62305 - DNA, 20 bp, synthetic construct
  source 1..20: mol_type = other DNA
ttgcttgggctcaggagttc

SEQ ID NO: 62306 - DNA, 20 bp, synthetic construct
  source 1..20: mol_type = other DNA
attgcttgggctcaggagtt

SEQ ID NO: 62307 - DNA, 20 bp, synthetic construct
  source 1..20: mol_type = other DNA
gattgcttgggctcaggagt

SEQ ID NO: 62308 - DNA, 20 bp, synthetic construct
  source 1..20: mol_type = other DNA
ggattgcttgggctcaggag

SEQ ID NO: 62309 - DNA, 20 bp, synthetic construct
  source 1..20: mol_type = other DNA
aggattgcttgggctcagga

SEQ ID NO: 62310 - DNA, 20 bp, synthetic construct
  source 1..20: mol_type = other DNA
gaggattgcttgggctcagg

SEQ ID NO: 62311 - DNA, 20 bp, synthetic construct
  source 1..20: mol_type = other DNA
agaggattgcttgggctcag

SEQ ID NO: 62312 - DNA, 20 bp, synthetic construct
  source 1..20: mol_type = other DNA
aagaggattgcttgggctca

SEQ ID NO: 62313 - DNA, 20 bp, synthetic construct
  source 1..20: mol_type = other DNA
aaagaggattgcttgggctc

SEQ ID NO: 62314 - DNA, 20 bp, synthetic construct
  source 1..20: mol_type = other DNA
caaagaggattgcttgggct

SEQ ID NO: 62315 - DNA, 20 bp, synthetic construct
  source 1..20: mol_type = other DNA
gcaaagaggattgcttgggc

SEQ ID NO: 62316 - DNA, 20 bp, synthetic construct
  source 1..20: mol_type = other DNA
ggcaaagaggattgcttggg

SEQ ID NO: 62317 - DNA, 20 bp, synthetic construct
  source 1..20: mol_type = other DNA
aggcaaagaggattgcttgg

SEQ ID NO: 62318 - DNA, 20 bp, synthetic construct
  source 1..20: mol_type = other DNA
gaggcaaagaggattgcttg

SEQ ID NO: 62319 - DNA, 20 bp, synthetic construct
  source 1..20: mol_type = other DNA
tgaggcaaagaggattgctt

SEQ ID NO: 62320 - DNA, 20 bp, synthetic construct
  source 1..20: mol_type = other DNA
ctgaggcaaagaggattgct

SEQ ID NO: 62321 - DNA, 20 bp, synthetic construct
  source 1..20: mol_type = other DNA
gctgaggcaaagaggattgc

SEQ ID NO: 62322 - DNA, 20 bp, synthetic construct
  source 1..20: mol_type = other DNA
ggctgaggcaaagaggattg

SEQ ID NO: 62323 - DNA, 20 bp, synthetic construct
  source 1..20: mol_type = other DNA
aggctgaggcaaagaggatt

SEQ ID NO: 62324 - DNA, 20 bp, synthetic construct
  source 1..20: mol_type = other DNA
gaggctgaggcaaagaggat

SEQ ID NO: 62325 - DNA, 20 bp, synthetic construct
  source 1..20: mol_type = other DNA
ggaggctgaggcaaagagga

SEQ ID NO: 62326 - DNA, 20 bp, synthetic construct
  source 1..20: mol_type = other DNA
gggaggctgaggcaaagagg

SEQ ID NO: 62327 - DNA, 20 bp, synthetic construct
  source 1..20: mol_type = other DNA
tgggaggctgaggcaaagag

SEQ ID NO: 62328 - DNA, 20 bp, synthetic construct
  source 1..20: mol_type = other DNA
ttgggaggctgaggcaaaga

SEQ ID NO: 62329 - DNA, 20 bp, synthetic construct
  source 1..20: mol_type = other DNA
tttgggaggctgaggcaaag

SEQ ID NO: 62330 - DNA, 20 bp, synthetic construct
  source 1..20: mol_type = other DNA
ctttgggaggctgaggcaaa

SEQ ID NO: 62331 - DNA, 20 bp, synthetic construct
  source 1..20: mol_type = other DNA
actttgggaggctgaggcaa

SEQ ID NO: 62332 - DNA, 20 bp, synthetic construct
  source 1..20: mol_type = other DNA
cactttgggaggctgaggca

SEQ ID NO: 62333 - DNA, 20 bp, synthetic construct
  source 1..20: mol_type = other DNA
gcactttgggaggctgaggc

SEQ ID NO: 62334 - DNA, 20 bp, synthetic construct
  source 1..20: mol_type = other DNA
agcactttgggaggctgagg

SEQ ID NO: 62335 - DNA, 20 bp, synthetic construct
  source 1..20: mol_type = other DNA
gagcactttgggaggctgag

SEQ ID NO: 62336 - DNA, 20 bp, synthetic construct
  source 1..20: mol_type = other DNA
cgagcactttgggaggctga

SEQ ID NO: 62337 - DNA, 20 bp, synthetic construct
  source 1..20: mol_type = other DNA
ccgagcactttgggaggctg

SEQ ID NO: 62338 - DNA, 20 bp, synthetic construct
  source 1..20: mol_type = other DNA
tccgagcactttgggaggct

SEQ ID NO: 62339 - DNA, 20 bp, synthetic construct
  source 1..20: mol_type = other DNA
atccgagcactttgggaggc

SEQ ID NO: 62340 - DNA, 20 bp, synthetic construct
  source 1..20: mol_type = other DNA
aatccgagcactttgggagg

SEQ ID NO: 62341 - DNA, 20 bp, synthetic construct
  source 1..20: mol_type = other DNA
taatccgagcactttgggag

SEQ ID NO: 62342 - DNA, 20 bp, synthetic construct
  source 1..20: mol_type = other DNA
gtaatccgagcactttggga

SEQ ID NO: 62343 - DNA, 20 bp, synthetic construct
  source 1..20: mol_type = other DNA
tgtaatccgagcactttggg

SEQ ID NO: 62344 - DNA, 20 bp, synthetic construct
  source 1..20: mol_type = other DNA
ctgtaatccgagcactttgg

SEQ ID NO: 62345 - DNA, 20 bp, synthetic construct
  source 1..20: mol_type = other DNA
cctgtaatccgagcactttg

SEQ ID NO: 62346 - DNA, 20 bp, synthetic construct
  source 1..20: mol_type = other DNA
gcctgtaatccgagcacttt

SEQ ID NO: 62347 - DNA, 20 bp, synthetic construct
  source 1..20: mol_type = other DNA
agcctgtaatccgagcactt

SEQ ID NO: 62348 - DNA, 20 bp, synthetic construct
  source 1..20: mol_type = other DNA
aagcctgtaatccgagcact

SEQ ID NO: 62349 - DNA, 20 bp, synthetic construct
  source 1..20: mol_type = other DNA
taagcctgtaatccgagcac

SEQ ID NO: 62350 - DNA, 20 bp, synthetic construct
  source 1..20: mol_type = other DNA
ttaagcctgtaatccgagca

SEQ ID NO: 62351 - DNA, 20 bp, synthetic construct
  source 1..20: mol_type = other DNA
cttaagcctgtaatccgagc

SEQ ID NO: 62352 - DNA, 20 bp, synthetic construct
  source 1..20: mol_type = other DNA
gcttaagcctgtaatccgag

SEQ ID NO: 62353 - DNA, 20 bp, synthetic construct
  source 1..20: mol_type = other DNA
agcttaagcctgtaatccga

SEQ ID NO: 62354 - DNA, 20 bp, synthetic construct
  source 1..20: mol_type = other DNA
tagcttaagcctgtaatccg

SEQ ID NO: 62355 - DNA, 20 bp, synthetic construct
  source 1..20: mol_type = other DNA
atagcttaagcctgtaatcc

SEQ ID NO: 62356 - DNA, 20 bp, synthetic construct
  source 1..20: mol_type = other DNA
gatagcttaagcctgtaatc

SEQ ID NO: 62357 - DNA, 20 bp, synthetic construct
  source 1..20: mol_type = other DNA
tgatagcttaagcctgtaat

SEQ ID NO: 62358 - DNA, 20 bp, synthetic construct
  source 1..20: mol_type = other DNA
gtgatagcttaagcctgtaa

SEQ ID NO: 62359 - DNA, 20 bp, synthetic construct
  source 1..20: mol_type = other DNA
tgtgatagcttaagcctgta

SEQ ID NO: 62360 - DNA, 20 bp, synthetic construct
  source 1..20: mol_type = other DNA
gtgtgatagcttaagcctgt

SEQ ID NO: 62361 - DNA, 20 bp, synthetic construct
  source 1..20: mol_type = other DNA
ggtgtgatagcttaagcctg

SEQ ID NO: 62362 - DNA, 20 bp, synthetic construct
  source 1..20: mol_type = other DNA
tggtgtgatagcttaagcct

SEQ ID NO: 62363 - DNA, 20 bp, synthetic construct
  source 1..20: mol_type = other DNA
ctggtgtgatagcttaagcc

SEQ ID NO: 62364 - DNA, 20 bp, synthetic construct
  source 1..20: mol_type = other DNA
cctggtgtgatagcttaagc

SEQ ID NO: 62365 - DNA, 20 bp, synthetic construct
  source 1..20: mol_type = other DNA
gcctggtgtgatagcttaag

SEQ ID NO: 62366 - DNA, 20 bp, synthetic construct
  source 1..20: mol_type = other DNA
ggcctggtgtgatagcttaa

SEQ ID NO: 62367 - DNA, 20 bp, synthetic construct
  source 1..20: mol_type = other DNA
aggcctggtgtgatagctta

SEQ ID NO: 62368 - DNA, 20 bp, synthetic construct
  source 1..20: mol_type = other DNA
taggcctggtgtgatagctt

SEQ ID NO: 62369 - DNA, 20 bp, synthetic construct
  source 1..20: mol_type = other DNA
ctaggcctggtgtgatagct

SEQ ID NO: 62370 - DNA, 20 bp, synthetic construct
  source 1..20: mol_type = other DNA
cctaggcctggtgtgatagc

SEQ ID NO: 62371 - DNA, 20 bp, synthetic construct
  source 1..20: mol_type = other DNA
gcctaggcctggtgtgatag

SEQ ID NO: 62372 - DNA, 20 bp, synthetic construct
  source 1..20: mol_type = other DNA
agcctaggcctggtgtgata

SEQ ID NO: 62373 - DNA, 20 bp, synthetic construct
  source 1..20: mol_type = other DNA
tagcctaggcctggtgtgat

SEQ ID NO: 62374 - DNA, 20 bp, synthetic construct
  source 1..20: mol_type = other DNA
ttagcctaggcctggtgtga

SEQ ID NO: 62375 - DNA, 20 bp, synthetic construct
  source 1..20: mol_type = other DNA
attagcctaggcctggtgtg

SEQ ID NO: 62376 - DNA, 20 bp, synthetic construct
  source 1..20: mol_type = other DNA
aattagcctaggcctggtgt

SEQ ID NO: 62377 - DNA, 20 bp, synthetic construct
  source 1..20: mol_type = other DNA
aaattagcctaggcctggtg

SEQ ID NO: 62378 - DNA, 20 bp, synthetic construct
  source 1..20: mol_type = other DNA
gaaattagcctaggcctggt

SEQ ID NO: 62379 - DNA, 20 bp, synthetic construct
  source 1..20: mol_type = other DNA
tgaaattagcctaggcctgg

SEQ ID NO: 62380 - DNA, 20 bp, synthetic construct
  source 1..20: mol_type = other DNA
atgaaattagcctaggcctg

SEQ ID NO: 62381 - DNA, 20 bp, synthetic construct
  source 1..20: mol_type = other DNA
tatgaaattagcctaggcct

SEQ ID NO: 62382 - DNA, 20 bp, synthetic construct
  source 1..20: mol_type = other DNA
atatgaaattagcctaggcc

SEQ ID NO: 62383 - DNA, 20 bp, synthetic construct
  source 1..20: mol_type = other DNA
aatatgaaattagcctaggc

SEQ ID NO: 62384 - DNA, 20 bp, synthetic construct
  source 1..20: mol_type = other DNA
aaatatgaaattagcctagg

SEQ ID NO: 62385 - DNA, 20 bp, synthetic construct
  source 1..20: mol_type = other DNA
aaaatatgaaattagcctag

SEQ ID NO: 62386 - DNA, 20 bp, synthetic construct
  source 1..20: mol_type = other DNA
caaaatatgaaattagccta

SEQ ID NO: 62387 - DNA, 20 bp, synthetic construct
  source 1..20: mol_type = other DNA
tcaaaatatgaaattagcct

SEQ ID NO: 62388 - DNA, 20 bp, synthetic construct
  source 1..20: mol_type = other DNA
ctcaaaatatgaaattagcc

SEQ ID NO: 62389 - DNA, 20 bp, synthetic construct
  source 1..20: mol_type = other DNA
tctcaaaatatgaaattagc

SEQ ID NO: 62390 - DNA, 20 bp, synthetic construct
  source 1..20: mol_type = other DNA
atctcaaaatatgaaattag

SEQ ID NO: 62391 - DNA, 20 bp, synthetic construct
  source 1..20: mol_type = other DNA
catctcaaaatatgaaatta

SEQ ID NO: 62392 - DNA, 20 bp, synthetic construct
  source 1..20: mol_type = other DNA
ccatctcaaaatatgaaatt

SEQ ID NO: 62393 - DNA, 20 bp, synthetic construct
  source 1..20: mol_type = other DNA
gccatctcaaaatatgaaat

SEQ ID NO: 62394 - DNA, 20 bp, synthetic construct
  source 1..20: mol_type = other DNA
tgccatctcaaaatatgaaa

SEQ ID NO: 62395 - DNA, 20 bp, synthetic construct
  source 1..20: mol_type = other DNA
gtgccatctcaaaatatgaa

SEQ ID NO: 62396 - DNA, 20 bp, synthetic construct
  source 1..20: mol_type = other DNA
tgtgccatctcaaaatatga

SEQ ID NO: 62397 - DNA, 20 bp, synthetic construct
  source 1..20: mol_type = other DNA
ttgtgccatctcaaaatatg

SEQ ID NO: 62398 - DNA, 20 bp, synthetic construct
  source 1..20: mol_type = other DNA
tttgtgccatctcaaaatat

SEQ ID NO: 62399 - DNA, 20 bp, synthetic construct
  source 1..20: mol_type = other DNA
atttgtgccatctcaaaata

SEQ ID NO: 62400 - DNA, 20 bp, synthetic construct
  source 1..20: mol_type = other DNA
aatttgtgccatctcaaaat

SEQ ID NO: 62401 - DNA, 20 bp, synthetic construct
  source 1..20: mol_type = other DNA
aaatttgtgccatctcaaaa

SEQ ID NO: 62402 - DNA, 20 bp, synthetic construct
  source 1..20: mol_type = other DNA
gaaatttgtgccatctcaaa

SEQ ID NO: 62403 - DNA, 20 bp, synthetic construct
  source 1..20: mol_type = other DNA
agaaatttgtgccatctcaa

SEQ ID NO: 62404 - DNA, 20 bp, synthetic construct
  source 1..20: mol_type = other DNA
aagaaatttgtgccatctca

SEQ ID NO: 62405 - DNA, 20 bp, synthetic construct
  source 1..20: mol_type = other DNA
aaagaaatttgtgccatctc

SEQ ID NO: 62406 - DNA, 20 bp, synthetic construct
  source 1..20: mol_type = other DNA
gaaagaaatttgtgccatct

SEQ ID NO: 62407 - DNA, 20 bp, synthetic construct
  source 1..20: mol_type = other DNA
tgaaagaaatttgtgccatc

SEQ ID NO: 62408 - DNA, 20 bp, synthetic construct
  source 1..20: mol_type = other DNA
ctgaaagaaatttgtgccat

SEQ ID NO: 62409 - DNA, 20 bp, synthetic construct
  source 1..20: mol_type = other DNA
cctgaaagaaatttgtgcca

SEQ ID NO: 62410 - DNA, 20 bp, synthetic construct
  source 1..20: mol_type = other DNA
acctgaaagaaatttgtgcc

SEQ ID NO: 62411 - DNA, 20 bp, synthetic construct
  source 1..20: mol_type = other DNA
tacctgaaagaaatttgtgc

SEQ ID NO: 62412 - DNA, 20 bp, synthetic construct
  source 1..20: mol_type = other DNA
ctacctgaaagaaatttgtg

SEQ ID NO: 62413 - DNA, 20 bp, synthetic construct
  source 1..20: mol_type = other DNA
gctacctgaaagaaatttgt

SEQ ID NO: 62414 - DNA, 20 bp, synthetic construct
  source 1..20: mol_type = other DNA
agctacctgaaagaaatttg

SEQ ID NO: 62415 - DNA, 20 bp, synthetic construct
  source 1..20: mol_type = other DNA
tagctacctgaaagaaattt

SEQ ID NO: 62416 - DNA, 20 bp, synthetic construct
  source 1..20: mol_type = other DNA
ctagctacctgaaagaaatt

SEQ ID NO: 62417 - DNA, 20 bp, synthetic construct
  source 1..20: mol_type = other DNA
gctagctacctgaaagaaat

SEQ ID NO: 62418 - DNA, 20 bp, synthetic construct
  source 1..20: mol_type = other DNA
agctagctacctgaaagaaa

SEQ ID NO: 62419 - DNA, 20 bp, synthetic construct
  source 1..20: mol_type = other DNA
aagctagctacctgaaagaa

SEQ ID NO: 62420 - DNA, 20 bp, synthetic construct
  source 1..20: mol_type = other DNA
aaagctagctacctgaaaga

SEQ ID NO: 62421 - DNA, 20 bp, synthetic construct
  source 1..20: mol_type = other DNA
aaaagctagctacctgaaag

SEQ ID NO: 62422 - DNA, 20 bp, synthetic construct
  source 1..20: mol_type = other DNA
gaaaagctagctacctgaaa

SEQ ID NO: 62423 - DNA, 20 bp, synthetic construct
  source 1..20: mol_type = other DNA
ggaaaagctagctacctgaa

SEQ ID NO: 62424 - DNA, 20 bp, synthetic construct
  source 1..20: mol_type = other DNA
aggaaaagctagctacctga

SEQ ID NO: 62425 - DNA, 20 bp, synthetic construct
  source 1..20: mol_type = other DNA
gaggaaaagctagctacctg

SEQ ID NO: 62426 - DNA, 20 bp, synthetic construct
  source 1..20: mol_type = other DNA
ggaggaaaagctagctacct

SEQ ID NO: 62427 - DNA, 20 bp, synthetic construct
  source 1..20: mol_type = other DNA
aggaggaaaagctagctacc

SEQ ID NO: 62428 - DNA, 20 bp, synthetic construct
  source 1..20: mol_type = other DNA
gaggaggaaaagctagctac

SEQ ID NO: 62429 - DNA, 20 bp, synthetic construct
  source 1..20: mol_type = other DNA
ggaggaggaaaagctagcta

SEQ ID NO: 62430 - DNA, 20 bp, synthetic construct
  source 1..20: mol_type = other DNA
aggaggaggaaaagctagct

SEQ ID NO: 62431 - DNA, 20 bp, synthetic construct
  source 1..20: mol_type = other DNA
gaggaggaggaaaagctagc

SEQ ID NO: 62432 - DNA, 20 bp, synthetic construct
  source 1..20: mol_type = other DNA
ggaggaggaggaaaagctag

SEQ ID NO: 62433 - DNA, 20 bp, synthetic construct
  source 1..20: mol_type = other DNA
gggaggaggaggaaaagcta

SEQ ID NO: 62434 - DNA, 20 bp, synthetic construct
  source 1..20: mol_type = other DNA
ggggaggaggaggaaaagct

SEQ ID NO: 62435 - DNA, 20 bp, synthetic construct
  source 1..20: mol_type = other DNA
tggggaggaggaggaaaagc

SEQ ID NO: 62436 - DNA, 20 bp, synthetic construct
  source 1..20: mol_type = other DNA
gtggggaggaggaggaaaag

SEQ ID NO: 62437 - DNA, 20 bp, synthetic construct
  source 1..20: mol_type = other DNA
agtggggaggaggaggaaaa

SEQ ID NO: 62438 - DNA, 20 bp, synthetic construct
  source 1..20: mol_type = other DNA
aagtggggaggaggaggaaa

SEQ ID NO: 62439 - DNA, 20 bp, synthetic construct
  source 1..20: mol_type = other DNA
taagtggggaggaggaggaa

SEQ ID NO: 62440 - DNA, 20 bp, synthetic construct
  source 1..20: mol_type = other DNA
ttaagtggggaggaggagga

SEQ ID NO: 62441 - DNA, 20 bp, synthetic construct
  source 1..20: mol_type = other DNA
tttaagtggggaggaggagg

SEQ ID NO: 62442 - DNA, 20 bp, synthetic construct
  source 1..20: mol_type = other DNA
ttttaagtggggaggaggag

SEQ ID NO: 62443 - DNA, 20 bp, synthetic construct
  source 1..20: mol_type = other DNA
attttaagtggggaggagga

SEQ ID NO: 62444 - DNA, 20 bp, synthetic construct
  source 1..20: mol_type = other DNA
tattttaagtggggaggagg

SEQ ID NO: 62445 - DNA, 20 bp, synthetic construct
  source 1..20: mol_type = other DNA
ctattttaagtggggaggag

SEQ ID NO: 62446 - DNA, 20 bp, synthetic construct
  source 1..20: mol_type = other DNA
tctattttaagtggggagga

SEQ ID NO: 62447 - DNA, 20 bp, synthetic construct
  source 1..20: mol_type = other DNA
atctattttaagtggggagg

SEQ ID NO: 62448 - DNA, 20 bp, synthetic construct
  source 1..20: mol_type = other DNA
gatctattttaagtggggag

SEQ ID NO: 62449 - DNA, 20 bp, synthetic construct
  source 1..20: mol_type = other DNA
ggatctattttaagtgggga

SEQ ID NO: 62450 - DNA, 20 bp, synthetic construct
  source 1..20: mol_type = other DNA
aggatctattttaagtgggg

SEQ ID NO: 62451 - DNA, 20 bp, synthetic construct
  source 1..20: mol_type = other DNA
caggatctattttaagtggg

SEQ ID NO: 62452 - DNA, 20 bp, synthetic construct
  source 1..20: mol_type = other DNA
tcaggatctattttaagtgg

SEQ ID NO: 62453 - DNA, 20 bp, synthetic construct
  source 1..20: mol_type = other DNA
atcaggatctattttaagtg

SEQ ID NO: 62454 - DNA, 20 bp, synthetic construct
  source 1..20: mol_type = other DNA
gatcaggatctattttaagt

SEQ ID NO: 62455 - DNA, 20 bp, synthetic construct
  source 1..20: mol_type = other DNA
ggatcaggatctattttaag

SEQ ID NO: 62456 - DNA, 20 bp, synthetic construct
  source 1..20: mol_type = other DNA
tggatcaggatctattttaa

SEQ ID NO: 62457 - DNA, 20 bp, synthetic construct
  source 1..20: mol_type = other DNA
ctggatcaggatctatttta

SEQ ID NO: 62458 - DNA, 20 bp, synthetic construct
  source 1..20: mol_type = other DNA
tctggatcaggatctatttt

SEQ ID NO: 62459 - DNA, 20 bp, synthetic construct
  source 1..20: mol_type = other DNA
ttctggatcaggatctattt

SEQ ID NO: 62460 - DNA, 20 bp, synthetic construct
  source 1..20: mol_type = other DNA
cttctggatcaggatctatt

SEQ ID NO: 62461 - DNA, 20 bp, synthetic construct
  source 1..20: mol_type = other DNA
gcttctggatcaggatctat

SEQ ID NO: 62462 - DNA, 20 bp, synthetic construct
  source 1..20: mol_type = other DNA
ggcttctggatcaggatcta

SEQ ID NO: 62463 - DNA, 20 bp, synthetic construct
  source 1..20: mol_type = other DNA
aggcttctggatcaggatct

SEQ ID NO: 62464 - DNA, 20 bp, synthetic construct
  source 1..20: mol_type = other DNA
taggcttctggatcaggatc

SEQ ID NO: 62465 - DNA, 20 bp, synthetic construct
  source 1..20: mol_type = other DNA
ttaggcttctggatcaggat

SEQ ID NO: 62466 - DNA, 20 bp, synthetic construct
  source 1..20: mol_type = other DNA
attaggcttctggatcagga

SEQ ID NO: 62467 - DNA, 20 bp, synthetic construct
  source 1..20: mol_type = other DNA
cattaggcttctggatcagg

SEQ ID NO: 62468 - DNA, 20 bp, synthetic construct
  source 1..20: mol_type = other DNA
ccattaggcttctggatcag

SEQ ID NO: 62469 - DNA, 20 bp, synthetic construct
  source 1..20: mol_type = other DNA
tccattaggcttctggatca

SEQ ID NO: 62470 - DNA, 20 bp, synthetic construct
  source 1..20: mol_type = other DNA
ctccattaggcttctggatc

SEQ ID NO: 62471 - DNA, 20 bp, synthetic construct
  source 1..20: mol_type = other DNA
tctccattaggcttctggat

SEQ ID NO: 62472 - DNA, 20 bp, synthetic construct
  source 1..20: mol_type = other DNA
ttctccattaggcttctgga

SEQ ID NO: 62473 - DNA, 20 bp, synthetic construct
  source 1..20: mol_type = other DNA
tttctccattaggcttctgg

SEQ ID NO: 62474 - DNA, 20 bp, synthetic construct
  source 1..20: mol_type = other DNA
ttttctccattaggcttctg

SEQ ID NO: 62475 - DNA, 20 bp, synthetic construct
  source 1..20: mol_type = other DNA
attttctccattaggcttct

SEQ ID NO: 62476 - DNA, 20 bp, synthetic construct
  source 1..20: mol_type = other DNA
cattttctccattaggcttc

SEQ ID NO: 62477 - DNA, 20 bp, synthetic construct
  source 1..20: mol_type = other DNA
tcattttctccattaggctt

SEQ ID NO: 62478 - DNA, 20 bp, synthetic construct
  source 1..20: mol_type = other DNA
ttcattttctccattaggct

SEQ ID NO: 62479 - DNA, 20 bp, synthetic construct
  source 1..20: mol_type = other DNA
tttcattttctccattaggc

SEQ ID NO: 62480 - DNA, 20 bp, synthetic construct
  source 1..20: mol_type = other DNA
ttttcattttctccattagg

SEQ ID NO: 62481 - DNA, 20 bp, synthetic construct
  source 1..20: mol_type = other DNA
gttttcattttctccattag

SEQ ID NO: 62482 - DNA, 20 bp, synthetic construct
  source 1..20: mol_type = other DNA
tgttttcattttctccatta

SEQ ID NO: 62483 - DNA, 20 bp, synthetic construct
  source 1..20: mol_type = other DNA
ctgttttcattttctccatt

SEQ ID NO: 62484 - DNA, 20 bp, synthetic construct
  source 1..20: mol_type = other DNA
tctgttttcattttctccat

SEQ ID NO: 62485 - DNA, 20 bp, synthetic construct
  source 1..20: mol_type = other DNA
ttctgttttcattttctcca

SEQ ID NO: 62486 - DNA, 20 bp, synthetic construct
  source 1..20: mol_type = other DNA
attctgttttcattttctcc

SEQ ID NO: 62487 - DNA, 20 bp, synthetic construct
  source 1..20: mol_type = other DNA
cattctgttttcattttctc

SEQ ID NO: 62488 - DNA, 20 bp, synthetic construct
  source 1..20: mol_type = other DNA
acattctgttttcattttct

SEQ ID NO: 62489 - DNA, 20 bp, synthetic construct
  source 1..20: mol_type = other DNA
aacattctgttttcattttc

SEQ ID NO: 62490 - DNA, 20 bp, synthetic construct
  source 1..20: mol_type = other DNA
gaacattctgttttcatttt

SEQ ID NO: 62491 - DNA, 20 bp, synthetic construct
  source 1..20: mol_type = other DNA
tgaacattctgttttcattt

SEQ ID NO: 62492 - DNA, 20 bp, synthetic construct
  source 1..20: mol_type = other DNA
gtgaacattctgttttcatt

SEQ ID NO: 62493 - DNA, 20 bp, synthetic construct
  source 1..20: mol_type = other DNA
ggtgaacattctgttttcat

SEQ ID NO: 62494 - DNA, 20 bp, synthetic construct
  source 1..20: mol_type = other DNA
gggtgaacattctgttttca

SEQ ID NO: 62495 - DNA, 20 bp, synthetic construct
  source 1..20: mol_type = other DNA
tgggtgaacattctgttttc

SEQ ID NO: 62496 - DNA, 20 bp, synthetic construct
  source 1..20: mol_type = other DNA
atgggtgaacattctgtttt

SEQ ID NO: 62497 - DNA, 20 bp, synthetic construct
  source 1..20: mol_type = other DNA
tatgggtgaacattctgttt

SEQ ID NO: 62498 - DNA, 20 bp, synthetic construct
  source 1..20: mol_type = other DNA
ttatgggtgaacattctgtt

SEQ ID NO: 62499 - DNA, 20 bp, synthetic construct
  source 1..20: mol_type = other DNA
tttatgggtgaacattctgt

SEQ ID NO: 62500 - DNA, 20 bp, synthetic construct
  source 1..20: mol_type = other DNA
gtttatgggtgaacattctg

SEQ ID NO: 62501 - DNA, 20 bp, synthetic construct
  source 1..20: mol_type = other DNA
tgtttatgggtgaacattct

SEQ ID NO: 62502 - DNA, 20 bp, synthetic construct
  source 1..20: mol_type = other DNA
ctgtttatgggtgaacattc

SEQ ID NO: 62503 - DNA, 20 bp, synthetic construct
  source 1..20: mol_type = other DNA
actgtttatgggtgaacatt

SEQ ID NO: 62504 - DNA, 20 bp, synthetic construct
  source 1..20: mol_type = other DNA
tactgtttatgggtgaacat

SEQ ID NO: 62505 - DNA, 20 bp, synthetic construct
  source 1..20: mol_type = other DNA
atactgtttatgggtgaaca

SEQ ID NO: 62506 - DNA, 20 bp, synthetic construct
  source 1..20: mol_type = other DNA
gatactgtttatgggtgaac

SEQ ID NO: 62507 - DNA, 20 bp, synthetic construct
  source 1..20: mol_type = other DNA
agatactgtttatgggtgaa

SEQ ID NO: 62508 - DNA, 20 bp, synthetic construct
  source 1..20: mol_type = other DNA
aagatactgtttatgggtga

SEQ ID NO: 62509 - DNA, 20 bp, synthetic construct
  source 1..20: mol_type = other DNA
aaagatactgtttatgggtg

SEQ ID NO: 62510 - DNA, 20 bp, synthetic construct
  source 1..20: mol_type = other DNA
caaagatactgtttatgggt

SEQ ID NO: 62511 - DNA, 20 bp, synthetic construct
  source 1..20: mol_type = other DNA
acaaagatactgtttatggg

SEQ ID NO: 62512 - DNA, 20 bp, synthetic construct
  source 1..20: mol_type = other DNA
tacaaagatactgtttatgg

SEQ ID NO: 62513 - DNA, 20 bp, synthetic construct
  source 1..20: mol_type = other DNA
atacaaagatactgtttatg

SEQ ID NO: 62514 - DNA, 20 bp, synthetic construct
  source 1..20: mol_type = other DNA
aatacaaagatactgtttat

SEQ ID NO: 62515 - DNA, 20 bp, synthetic construct
  source 1..20: mol_type = other DNA
caatacaaagatactgttta

SEQ ID NO: 62516 - DNA, 20 bp, synthetic construct
  source 1..20: mol_type = other DNA
ccaatacaaagatactgttt

SEQ ID NO: 62517 - DNA, 20 bp, synthetic construct
  source 1..20: mol_type = other DNA
tccaatacaaagatactgtt

SEQ ID NO: 62518 - DNA, 20 bp, synthetic construct
  source 1..20: mol_type = other DNA
ttccaatacaaagatactgt

SEQ ID NO: 62519 - DNA, 20 bp, synthetic construct
  source 1..20: mol_type = other DNA
attccaatacaaagatactg

SEQ ID NO: 62520 - DNA, 20 bp, synthetic construct
  source 1..20: mol_type = other DNA
gattccaatacaaagatact

SEQ ID NO: 62521 - DNA, 20 bp, synthetic construct
  source 1..20: mol_type = other DNA
agattccaatacaaagatac

SEQ ID NO: 62522 - DNA, 20 bp, synthetic construct
  source 1..20: mol_type = other DNA
aagattccaatacaaagata

SEQ ID NO: 62523 - DNA, 20 bp, synthetic construct
  source 1..20: mol_type = other DNA
aaagattccaatacaaagat

SEQ ID NO: 62524 - DNA, 20 bp, synthetic construct
  source 1..20: mol_type = other DNA
aaaagattccaatacaaaga

SEQ ID NO: 62525 - DNA, 20 bp, synthetic construct
  source 1..20: mol_type = other DNA
gaaaagattccaatacaaag

SEQ ID NO: 62526 - DNA, 20 bp, synthetic construct
  source 1..20: mol_type = other DNA
agaaaagattccaatacaaa

SEQ ID NO: 62527 - DNA, 20 bp, synthetic construct
  source 1..20: mol_type = other DNA
tagaaaagattccaatacaa

SEQ ID NO: 62528 - DNA, 20 bp, synthetic construct
  source 1..20: mol_type = other DNA
ttagaaaagattccaataca

SEQ ID NO: 62529 - DNA, 20 bp, synthetic construct
  source 1..20: mol_type = other DNA
tttagaaaagattccaatac

SEQ ID NO: 62530 - DNA, 20 bp, synthetic construct
  source 1..20: mol_type = other DNA
ttttagaaaagattccaata

SEQ ID NO: 62531 - DNA, 20 bp, synthetic construct
  source 1..20: mol_type = other DNA
gttttagaaaagattccaat

SEQ ID NO: 62532 - DNA, 20 bp, synthetic construct
  source 1..20: mol_type = other DNA
agttttagaaaagattccaa

SEQ ID NO: 62533 - DNA, 20 bp, synthetic construct
  source 1..20: mol_type = other DNA
aagttttagaaaagattcca

SEQ ID NO: 62534 - DNA, 20 bp, synthetic construct
  source 1..20: mol_type = other DNA
gaagttttagaaaagattcc

SEQ ID NO: 62535 - DNA, 20 bp, synthetic construct
  source 1..20: mol_type = other DNA
agaagttttagaaaagattc

SEQ ID NO: 62536 - DNA, 20 bp, synthetic construct
  source 1..20: mol_type = other DNA
aagaagttttagaaaagatt

SEQ ID NO: 62537 - DNA, 20 bp, synthetic construct
  source 1..20: mol_type = other DNA
aaagaagttttagaaaagat

SEQ ID NO: 62538 - DNA, 20 bp, synthetic construct
  source 1..20: mol_type = other DNA
aaaagaagttttagaaaaga

SEQ ID NO: 62539 - DNA, 20 bp, synthetic construct
  source 1..20: mol_type = other DNA
caaaagaagttttagaaaag

SEQ ID NO: 62540 - DNA, 20 bp, synthetic construct
  source 1..20: mol_type = other DNA
tcaaaagaagttttagaaaa

SEQ ID NO: 62541 - DNA, 20 bp, synthetic construct
  source 1..20: mol_type = other DNA
atcaaaagaagttttagaaa

SEQ ID NO: 62542 - DNA, 20 bp, synthetic construct
  source 1..20: mol_type = other DNA
gatcaaaagaagttttagaa

SEQ ID NO: 62543 - DNA, 20 bp, synthetic construct
  source 1..20: mol_type = other DNA
agatcaaaagaagttttaga

SEQ ID NO: 62544 - DNA, 20 bp, synthetic construct
  source 1..20: mol_type = other DNA
aagatcaaaagaagttttag

SEQ ID NO: 62545 - DNA, 20 bp, synthetic construct
  source 1..20: mol_type = other DNA
aaagatcaaaagaagtttta

SEQ ID NO: 62546 - DNA, 20 bp, synthetic construct
  source 1..20: mol_type = other DNA
aaaagatcaaaagaagtttt

SEQ ID NO: 62547 - DNA, 20 bp, synthetic construct
  source 1..20: mol_type = other DNA
aaaaagatcaaaagaagttt

SEQ ID NO: 62548 - DNA, 20 bp, synthetic construct
  source 1..20: mol_type = other DNA
taaaaagatcaaaagaagtt

SEQ ID NO: 62549 - DNA, 20 bp, synthetic construct
  source 1..20: mol_type = other DNA
ctaaaaagatcaaaagaagt

SEQ ID NO: 62550 - DNA, 20 bp, synthetic construct
  source 1..20: mol_type = other DNA
cctaaaaagatcaaaagaag

SEQ ID NO: 62551 - DNA, 20 bp, synthetic construct
  source 1..20: mol_type = other DNA
tcctaaaaagatcaaaagaa

SEQ ID NO: 62552 - DNA, 20 bp, synthetic construct
  source 1..20: mol_type = other DNA
ctcctaaaaagatcaaaaga

SEQ ID NO: 62553 - DNA, 20 bp, synthetic construct
  source 1..20: mol_type = other DNA
tctcctaaaaagatcaaaag

SEQ ID NO: 62554 - DNA, 20 bp, synthetic construct
  source 1..20: mol_type = other DNA
atctcctaaaaagatcaaaa

SEQ ID NO: 62555 - DNA, 20 bp, synthetic construct
  source 1..20: mol_type = other DNA
tatctcctaaaaagatcaaa

SEQ ID NO: 62556 - DNA, 20 bp, synthetic construct
  source 1..20: mol_type = other DNA
ctatctcctaaaaagatcaa

SEQ ID NO: 62557 - DNA, 20 bp, synthetic construct
  source 1..20: mol_type = other DNA
actatctcctaaaaagatca

SEQ ID NO: 62558 - DNA, 20 bp, synthetic construct
  source 1..20: mol_type = other DNA
cactatctcctaaaaagatc

SEQ ID NO: 62559 - DNA, 20 bp, synthetic construct
  source 1..20: mol_type = other DNA
acactatctcctaaaaagat

SEQ ID NO: 62560 - DNA, 20 bp, synthetic construct
  source 1..20: mol_type = other DNA
cacactatctcctaaaaaga

SEQ ID NO: 62561 - DNA, 20 bp, synthetic construct
  source 1..20: mol_type = other DNA
ccacactatctcctaaaaag

SEQ ID NO: 62562 - DNA, 20 bp, synthetic construct
  source 1..20: mol_type = other DNA
cccacactatctcctaaaaa

SEQ ID NO: 62563 - DNA, 20 bp, synthetic construct
  source 1..20: mol_type = other DNA
tcccacactatctcctaaaa

SEQ ID NO: 62564 - DNA, 20 bp, synthetic construct
  source 1..20: mol_type = other DNA
ttcccacactatctcctaaa

SEQ ID NO: 62565 - DNA, 20 bp, synthetic construct
  source 1..20: mol_type = other DNA
attcccacactatctcctaa

SEQ ID NO: 62566 - DNA, 20 bp, synthetic construct
  source 1..20: mol_type = other DNA
gattcccacactatctccta

SEQ ID NO: 62567 - DNA, 20 bp, synthetic construct
  source 1..20: mol_type = other DNA
tgattcccacactatctcct

SEQ ID NO: 62568 - DNA, 20 bp, synthetic construct
  source 1..20: mol_type = other DNA
ctgattcccacactatctcc

SEQ ID NO: 62569 - DNA, 20 bp, synthetic construct
  source 1..20: mol_type = other DNA
gctgattcccacactatctc

SEQ ID NO: 62570 - DNA, 20 bp, synthetic construct
  source 1..20: mol_type = other DNA
tgctgattcccacactatct

SEQ ID NO: 62571 - DNA, 20 bp, synthetic construct
  source 1..20: mol_type = other DNA
ttgctgattcccacactatc

SEQ ID NO: 62572 - DNA, 20 bp, synthetic construct
  source 1..20: mol_type = other DNA
attgctgattcccacactat

SEQ ID NO: 62573 - DNA, 20 bp, synthetic construct
  source 1..20: mol_type = other DNA
gattgctgattcccacacta

SEQ ID NO: 62574 - DNA, 20 bp, synthetic construct
  source 1..20: mol_type = other DNA
agattgctgattcccacact

SEQ ID NO: 62575 - DNA, 20 bp, synthetic construct
  source 1..20: mol_type = other DNA
tagattgctgattcccacac

SEQ ID NO: 62576 - DNA, 20 bp, synthetic construct
  source 1..20: mol_type = other DNA
ctagattgctgattcccaca

SEQ ID NO: 62577 - DNA, 20 bp, synthetic construct
  source 1..20: mol_type = other DNA
actagattgctgattcccac

SEQ ID NO: 62578 - DNA, 20 bp, synthetic construct
  source 1..20: mol_type = other DNA
tactagattgctgattccca

SEQ ID NO: 62579 - DNA, 20 bp, synthetic construct
  source 1..20: mol_type = other DNA
atactagattgctgattccc

SEQ ID NO: 62580 - DNA, 20 bp, synthetic construct
  source 1..20: mol_type = other DNA
aatactagattgctgattcc

SEQ ID NO: 62581 - DNA, 20 bp, synthetic construct
  source 1..20: mol_type = other DNA
taatactagattgctgattc

SEQ ID NO: 62582 - DNA, 20 bp, synthetic construct
  source 1..20: mol_type = other DNA
gtaatactagattgctgatt

SEQ ID NO: 62583 - DNA, 20 bp, synthetic construct
  source 1..20: mol_type = other DNA
cgtaatactagattgctgat

SEQ ID NO: 62584 - DNA, 20 bp, synthetic construct
  source 1..20: mol_type = other DNA
acgtaatactagattgctga

SEQ ID NO: 62585 - DNA, 20 bp, synthetic construct
  source 1..20: mol_type = other DNA
tacgtaatactagattgctg

SEQ ID NO: 62586 - DNA, 20 bp, synthetic construct
  source 1..20: mol_type = other DNA
gtacgtaatactagattgct

SEQ ID NO: 62587 - DNA, 20 bp, synthetic construct
  source 1..20: mol_type = other DNA
cgtacgtaatactagattgc

SEQ ID NO: 62588 - DNA, 20 bp, synthetic construct
  source 1..20: mol_type = other DNA
acgtacgtaatactagattg

SEQ ID NO: 62589 - DNA, 20 bp, synthetic construct
  source 1..20: mol_type = other DNA
cacgtacgtaatactagatt

SEQ ID NO: 62590 - DNA, 20 bp, synthetic construct
  source 1..20: mol_type = other DNA
ccacgtacgtaatactagat

SEQ ID NO: 62591 - DNA, 20 bp, synthetic construct
  source 1..20: mol_type = other DNA
tccacgtacgtaatactaga

SEQ ID NO: 62592 - DNA, 20 bp, synthetic construct
  source 1..20: mol_type = other DNA
ttccacgtacgtaatactag

SEQ ID NO: 62593 - DNA, 20 bp, synthetic construct
  source 1..20: mol_type = other DNA
attccacgtacgtaatacta

SEQ ID NO: 62594 - DNA, 20 bp, synthetic construct
  source 1..20: mol_type = other DNA
gattccacgtacgtaatact

SEQ ID NO: 62595 - DNA, 20 bp, synthetic construct
  source 1..20: mol_type = other DNA
agattccacgtacgtaatac

SEQ ID NO: 62596 - DNA, 20 bp, synthetic construct
  source 1..20: mol_type = other DNA
cagattccacgtacgtaata

SEQ ID NO: 62597 - DNA, 20 bp, synthetic construct
  source 1..20: mol_type = other DNA
acagattccacgtacgtaat

SEQ ID NO: 62598 - DNA, 20 bp, synthetic construct
  source 1..20: mol_type = other DNA
gacagattccacgtacgtaa

SEQ ID NO: 62599 - DNA, 20 bp, synthetic construct
  source 1..20: mol_type = other DNA
tgacagattccacgtacgta

SEQ ID NO: 62600 - DNA, 20 bp, synthetic construct
  source 1..20: mol_type = other DNA
gtgacagattccacgtacgt

SEQ ID NO: 62601 - DNA, 20 bp, synthetic construct
  source 1..20: mol_type = other DNA
ggtgacagattccacgtacg

SEQ ID NO: 62602 - DNA, 20 bp, synthetic construct
  source 1..20: mol_type = other DNA
aggtgacagattccacgtac

SEQ ID NO: 62603 - DNA, 20 bp, synthetic construct
  source 1..20: mol_type = other DNA
aaggtgacagattccacgta

SEQ ID NO: 62604 - DNA, 20 bp, synthetic construct
  source 1..20: mol_type = other DNA
caaggtgacagattccacgt

SEQ ID NO: 62605 - DNA, 20 bp, synthetic construct
  source 1..20: mol_type = other DNA
acaaggtgacagattccacg

SEQ ID NO: 62606 - DNA, 20 bp, synthetic construct
  source 1..20: mol_type = other DNA
aacaaggtgacagattccac

SEQ ID NO: 62607 - DNA, 20 bp, synthetic construct
  source 1..20: mol_type = other DNA
aaacaaggtgacagattcca

SEQ ID NO: 62608 - DNA, 20 bp, synthetic construct
  source 1..20: mol_type = other DNA
aaaacaaggtgacagattcc

SEQ ID NO: 62609 - DNA, 20 bp, synthetic construct
  source 1..20: mol_type = other DNA
aaaaacaaggtgacagattc

SEQ ID NO: 62610 - DNA, 20 bp, synthetic construct
  source 1..20: mol_type = other DNA
aaaaaacaaggtgacagatt

SEQ ID NO: 62611 - DNA, 20 bp, synthetic construct
  source 1..20: mol_type = other DNA
aaaaaaacaaggtgacagat

SEQ ID NO: 62612 - DNA, 20 bp, synthetic construct
  source 1..20: mol_type = other DNA
taaaaaaacaaggtgacaga

SEQ ID NO: 62613 - DNA, 20 bp, synthetic construct
  source 1..20: mol_type = other DNA
ttaaaaaaacaaggtgacag

SEQ ID NO: 62614 - DNA, 20 bp, synthetic construct
  source 1..20: mol_type = other DNA
tttaaaaaaacaaggtgaca

SEQ ID NO: 62615 - DNA, 20 bp, synthetic construct
  source 1..20: mol_type = other DNA
atttaaaaaaacaaggtgac

SEQ ID NO: 62616 - DNA, 20 bp, synthetic construct
  source 1..20: mol_type = other DNA
tatttaaaaaaacaaggtga

SEQ ID NO: 62617 - DNA, 20 bp, synthetic construct
  source 1..20: mol_type = other DNA
gtatttaaaaaaacaaggtg

SEQ ID NO: 62618 - DNA, 20 bp, synthetic construct
  source 1..20: mol_type = other DNA
tgtatttaaaaaaacaaggt

SEQ ID NO: 62619 - DNA, 20 bp, synthetic construct
  source 1..20: mol_type = other DNA
ctgtatttaaaaaaacaagg

SEQ ID NO: 62620 - DNA, 20 bp, synthetic construct
  source 1..20: mol_type = other DNA
gctgtatttaaaaaaacaag

SEQ ID NO: 62621 - DNA, 20 bp, synthetic construct
  source 1..20: mol_type = other DNA
tgctgtatttaaaaaaacaa

SEQ ID NO: 62622 - DNA, 20 bp, synthetic construct
  source 1..20: mol_type = other DNA
ttgctgtatttaaaaaaaca

SEQ ID NO: 62623 - DNA, 20 bp, synthetic construct
  source 1..20: mol_type = other DNA
tttgctgtatttaaaaaaac

SEQ ID NO: 62624 - DNA, 20 bp, synthetic construct
  source 1..20: mol_type = other DNA
gtttgctgtatttaaaaaaa

SEQ ID NO: 62625 - DNA, 20 bp, synthetic construct
  source 1..20: mol_type = other DNA
ggtttgctgtatttaaaaaa

SEQ ID NO: 62626 - DNA, 20 bp, synthetic construct
  source 1..20: mol_type = other DNA
aggtttgctgtatttaaaaa

SEQ ID NO: 62627 - DNA, 20 bp, synthetic construct
  source 1..20: mol_type = other DNA
gaggtttgctgtatttaaaa

SEQ ID NO: 62628 - DNA, 20 bp, synthetic construct
  source 1..20: mol_type = other DNA
tgaggtttgctgtatttaaa

SEQ ID NO: 62629 - DNA, 20 bp, synthetic construct
  source 1..20: mol_type = other DNA
atgaggtttgctgtatttaa

SEQ ID NO: 62630 - DNA, 20 bp, synthetic construct
  source 1..20: mol_type = other DNA
catgaggtttgctgtattta

SEQ ID NO: 62631 - DNA, 20 bp, synthetic construct
  source 1..20: mol_type = other DNA
tcatgaggtttgctgtattt

SEQ ID NO: 62632 - DNA, 20 bp, synthetic construct
  source 1..20: mol_type = other DNA
ttcatgaggtttgctgtatt

SEQ ID NO: 62633 - DNA, 20 bp, synthetic construct
  source 1..20: mol_type = other DNA
cttcatgaggtttgctgtat

SEQ ID NO: 62634 - DNA, 20 bp, synthetic construct
  source 1..20: mol_type = other DNA
acttcatgaggtttgctgta

SEQ ID NO: 62635 - DNA, 20 bp, synthetic construct
  source 1..20: mol_type = other DNA
cacttcatgaggtttgctgt

SEQ ID NO: 62636 - DNA, 20 bp, synthetic construct
  source 1..20: mol_type = other DNA
tcacttcatgaggtttgctg

SEQ ID NO: 62637 - DNA, 20 bp, synthetic construct
  source 1..20: mol_type = other DNA
ttcacttcatgaggtttgct

SEQ ID NO: 62638 - DNA, 20 bp, synthetic construct
  source 1..20: mol_type = other DNA
attcacttcatgaggtttgc

SEQ ID NO: 62639 - DNA, 20 bp, synthetic construct
  source 1..20: mol_type = other DNA
aattcacttcatgaggtttg

SEQ ID NO: 62640 - DNA, 20 bp, synthetic construct
  source 1..20: mol_type = other DNA
aaattcacttcatgaggttt

SEQ ID NO: 62641 - DNA, 20 bp, synthetic construct
  source 1..20: mol_type = other DNA
gaaattcacttcatgaggtt

SEQ ID NO: 62642 - DNA, 20 bp, synthetic construct
  source 1..20: mol_type = other DNA
ggaaattcacttcatgaggt

SEQ ID NO: 62643 - DNA, 20 bp, synthetic construct
  source 1..20: mol_type = other DNA
tggaaattcacttcatgagg

SEQ ID NO: 62644 - DNA, 20 bp, synthetic construct
  source 1..20: mol_type = other DNA
atggaaattcacttcatgag

SEQ ID NO: 62645 - DNA, 20 bp, synthetic construct
  source 1..20: mol_type = other DNA
tatggaaattcacttcatga

SEQ ID NO: 62646 - DNA, 20 bp, synthetic construct
  source 1..20: mol_type = other DNA
atatggaaattcacttcatg

SEQ ID NO: 62647 - DNA, 20 bp, synthetic construct
  source 1..20: mol_type = other DNA
aatatggaaattcacttcat

SEQ ID NO: 62648 - DNA, 20 bp, synthetic construct
  source 1..20: mol_type = other DNA
aaatatggaaattcacttca

SEQ ID NO: 62649 - DNA, 20 bp, synthetic construct
  source 1..20: mol_type = other DNA
aaaatatggaaattcacttc

SEQ ID NO: 62650 - DNA, 20 bp, synthetic construct
  source 1..20: mol_type = other DNA
aaaaatatggaaattcactt

SEQ ID NO: 62651 - DNA, 20 bp, synthetic construct
  source 1..20: mol_type = other DNA
aaaaaatatggaaattcact

SEQ ID NO: 62652 - DNA, 20 bp, synthetic construct
  source 1..20: mol_type = other DNA
gaaaaaatatggaaattcac

SEQ ID NO: 62653 - DNA, 20 bp, synthetic construct
  source 1..20: mol_type = other DNA
agaaaaaatatggaaattca

SEQ ID NO: 62654 - DNA, 20 bp, synthetic construct
  source 1..20: mol_type = other DNA
aagaaaaaatatggaaattc

SEQ ID NO: 62655 - DNA, 20 bp, synthetic construct
  source 1..20: mol_type = other DNA
caagaaaaaatatggaaatt

SEQ ID NO: 62656 - DNA, 20 bp, synthetic construct
  source 1..20: mol_type = other DNA
acaagaaaaaatatggaaat

SEQ ID NO: 62657 - DNA, 20 bp, synthetic construct
  source 1..20: mol_type = other DNA
aacaagaaaaaatatggaaa

SEQ ID NO: 62658 - DNA, 20 bp, synthetic construct
  source 1..20: mol_type = other DNA
gaacaagaaaaaatatggaa

SEQ ID NO: 62659 - DNA, 20 bp, synthetic construct
  source 1..20: mol_type = other DNA
agaacaagaaaaaatatgga

SEQ ID NO: 62660 - DNA, 20 bp, synthetic construct
  source 1..20: mol_type = other DNA
aagaacaagaaaaaatatgg

SEQ ID NO: 62661 - DNA, 20 bp, synthetic construct
  source 1..20: mol_type = other DNA
caagaacaagaaaaaatatg

SEQ ID NO: 62662 - DNA, 20 bp, synthetic construct
  source 1..20: mol_type = other DNA
acaagaacaagaaaaaatat

SEQ ID NO: 62663 - DNA, 20 bp, synthetic construct
  source 1..20: mol_type = other DNA
aacaagaacaagaaaaaata

SEQ ID NO: 62664 - DNA, 20 bp, synthetic construct
  source 1..20: mol_type = other DNA
taacaagaacaagaaaaaat

SEQ ID NO: 62665 - DNA, 20 bp, synthetic construct
  source 1..20: mol_type = other DNA
ctaacaagaacaagaaaaaa

SEQ ID NO: 62666 - DNA, 20 bp, synthetic construct
  source 1..20: mol_type = other DNA
actaacaagaacaagaaaaa

SEQ ID NO: 62667 - DNA, 20 bp, synthetic construct
  source 1..20: mol_type = other DNA
aactaacaagaacaagaaaa

SEQ ID NO: 62668 - DNA, 20 bp, synthetic construct
  source 1..20: mol_type = other DNA
aaactaacaagaacaagaaa

SEQ ID NO: 62669 - DNA, 20 bp, synthetic construct
  source 1..20: mol_type = other DNA
aaaactaacaagaacaagaa

SEQ ID NO: 62670 - DNA, 20 bp, synthetic construct
  source 1..20: mol_type = other DNA
caaaactaacaagaacaaga

SEQ ID NO: 62671 - DNA, 20 bp, synthetic construct
  source 1..20: mol_type = other DNA
gcaaaactaacaagaacaag

SEQ ID NO: 62672 - DNA, 20 bp, synthetic construct
  source 1..20: mol_type = other DNA
tgcaaaactaacaagaacaa

SEQ ID NO: 62673 - DNA, 20 bp, synthetic construct
  source 1..20: mol_type = other DNA
gtgcaaaactaacaagaaca

SEQ ID NO: 62674 - DNA, 20 bp, synthetic construct
  source 1..20: mol_type = other DNA
ggtgcaaaactaacaagaac

SEQ ID NO: 62675 - DNA, 20 bp, synthetic construct
  source 1..20: mol_type = other DNA
tggtgcaaaactaacaagaa

SEQ ID NO: 62676 - DNA, 20 bp, synthetic construct
  source 1..20: mol_type = other DNA
gtggtgcaaaactaacaaga

SEQ ID NO: 62677 - DNA, 20 bp, synthetic construct
  source 1..20: mol_type = other DNA
agtggtgcaaaactaacaag

SEQ ID NO: 62678 - DNA, 20 bp, synthetic construct
  source 1..20: mol_type = other DNA
gagtggtgcaaaactaacaa

SEQ ID NO: 62679 - DNA, 20 bp, synthetic construct
  source 1..20: mol_type = other DNA
tgagtggtgcaaaactaaca

SEQ ID NO: 62680 - DNA, 20 bp, synthetic construct
  source 1..20: mol_type = other DNA
ctgagtggtgcaaaactaac

SEQ ID NO: 62681 - DNA, 20 bp, synthetic construct
  source 1..20: mol_type = other DNA
cctgagtggtgcaaaactaa

SEQ ID NO: 62682 - DNA, 20 bp, synthetic construct
  source 1..20: mol_type = other DNA
gcctgagtggtgcaaaacta

SEQ ID NO: 62683 - DNA, 20 bp, synthetic construct
  source 1..20: mol_type = other DNA
agcctgagtggtgcaaaact

SEQ ID NO: 62684 - DNA, 20 bp, synthetic construct
  source 1..20: mol_type = other DNA
aagcctgagtggtgcaaaac

SEQ ID NO: 62685 - DNA, 20 bp, synthetic construct
  source 1..20: mol_type = other DNA
aaagcctgagtggtgcaaaa

SEQ ID NO: 62686 - DNA, 20 bp, synthetic construct
  source 1..20: mol_type = other DNA
caaagcctgagtggtgcaaa

SEQ ID NO: 62687 - DNA, 20 bp, synthetic construct
  source 1..20: mol_type = other DNA
gcaaagcctgagtggtgcaa

SEQ ID NO: 62688 - DNA, 20 bp, synthetic construct
  source 1..20: mol_type = other DNA
agcaaagcctgagtggtgca

SEQ ID NO: 62689 - DNA, 20 bp, synthetic construct
  source 1..20: mol_type = other DNA
cagcaaagcctgagtggtgc

SEQ ID NO: 62690 - DNA, 20 bp, synthetic construct
  source 1..20: mol_type = other DNA
acagcaaagcctgagtggtg

SEQ ID NO: 62691 - DNA, 20 bp, synthetic construct
  source 1..20: mol_type = other DNA
tacagcaaagcctgagtggt

SEQ ID NO: 62692 - DNA, 20 bp, synthetic construct
  source 1..20: mol_type = other DNA
ctacagcaaagcctgagtgg

SEQ ID NO: 62693 - DNA, 20 bp, synthetic construct
  source 1..20: mol_type = other DNA
tctacagcaaagcctgagtg

SEQ ID NO: 62694 - DNA, 20 bp, synthetic construct
  source 1..20: mol_type = other DNA
ttctacagcaaagcctgagt

SEQ ID NO: 62695 - DNA, 20 bp, synthetic construct
  source 1..20: mol_type = other DNA
attctacagcaaagcctgag

SEQ ID NO: 62696 - DNA, 20 bp, synthetic construct
  source 1..20: mol_type = other DNA
aattctacagcaaagcctga

SEQ ID NO: 62697 - DNA, 20 bp, synthetic construct
  source 1..20: mol_type = other DNA
aaattctacagcaaagcctg

SEQ ID NO: 62698 - DNA, 20 bp, synthetic construct
  source 1..20: mol_type = other DNA
caaattctacagcaaagcct

SEQ ID NO: 62699 - DNA, 20 bp, synthetic construct
  source 1..20: mol_type = other DNA
tcaaattctacagcaaagcc

SEQ ID NO: 62700 - DNA, 20 bp, synthetic construct
  source 1..20: mol_type = other DNA
atcaaattctacagcaaagc

SEQ ID NO: 62701 - DNA, 20 bp, synthetic construct
  source 1..20: mol_type = other DNA
catcaaattctacagcaaag

SEQ ID NO: 62702 - DNA, 20 bp, synthetic construct
  source 1..20: mol_type = other DNA
acatcaaattctacagcaaa

SEQ ID NO: 62703 - DNA, 20 bp, synthetic construct
  source 1..20: mol_type = other DNA
tacatcaaattctacagcaa

SEQ ID NO: 62704 - DNA, 20 bp, synthetic construct
  source 1..20: mol_type = other DNA
atacatcaaattctacagca

SEQ ID NO: 62705 - DNA, 20 bp, synthetic construct
  source 1..20: mol_type = other DNA
tatacatcaaattctacagc

SEQ ID NO: 62706 - DNA, 20 bp, synthetic construct
  source 1..20: mol_type = other DNA
atatacatcaaattctacag

SEQ ID NO: 62707 - DNA, 20 bp, synthetic construct
  source 1..20: mol_type = other DNA
aatatacatcaaattctaca

SEQ ID NO: 62708 - DNA, 20 bp, synthetic construct
  source 1..20: mol_type = other DNA
aaatatacatcaaattctac

SEQ ID NO: 62709 - DNA, 20 bp, synthetic construct
  source 1..20: mol_type = other DNA
caaatatacatcaaattcta

SEQ ID NO: 62710 - DNA, 20 bp, synthetic construct
  source 1..20: mol_type = other DNA
tcaaatatacatcaaattct

SEQ ID NO: 62711 - DNA, 20 bp, synthetic construct
  source 1..20: mol_type = other DNA
atcaaatatacatcaaattc

SEQ ID NO: 62712 - DNA, 20 bp, synthetic construct
  source 1..20: mol_type = other DNA
aatcaaatatacatcaaatt

SEQ ID NO: 62713 - DNA, 20 bp, synthetic construct
  source 1..20: mol_type = other DNA
gaatcaaatatacatcaaat

SEQ ID NO: 62714 - DNA, 20 bp, synthetic construct
  source 1..20: mol_type = other DNA
agaatcaaatatacatcaaa

SEQ ID NO: 62715 - DNA, 20 bp, synthetic construct
  source 1..20: mol_type = other DNA
cagaatcaaatatacatcaa

SEQ ID NO: 62716 - DNA, 20 bp, synthetic construct
  source 1..20: mol_type = other DNA
acagaatcaaatatacatca

SEQ ID NO: 62717 - DNA, 20 bp, synthetic construct
  source 1..20: mol_type = other DNA
tacagaatcaaatatacatc

SEQ ID NO: 62718 - DNA, 20 bp, synthetic construct
  source 1..20: mol_type = other DNA
ctacagaatcaaatatacat

SEQ ID NO: 62719 - DNA, 20 bp, synthetic construct
  source 1..20: mol_type = other DNA
tctacagaatcaaatataca

SEQ ID NO: 62720 - DNA, 20 bp, synthetic construct
  source 1..20: mol_type = other DNA
ctctacagaatcaaatatac

SEQ ID NO: 62721 - DNA, 20 bp, synthetic construct
  source 1..20: mol_type = other DNA
gctctacagaatcaaatata

SEQ ID NO: 62722 - DNA, 20 bp, synthetic construct
  source 1..20: mol_type = other DNA
tgctctacagaatcaaatat

SEQ ID NO: 62723 - DNA, 20 bp, synthetic construct
  source 1..20: mol_type = other DNA
atgctctacagaatcaaata

SEQ ID NO: 62724 - DNA, 20 bp, synthetic construct
  source 1..20: mol_type = other DNA
catgctctacagaatcaaat

SEQ ID NO: 62725 - DNA, 20 bp, synthetic construct
  source 1..20: mol_type = other DNA
ccatgctctacagaatcaaa

SEQ ID NO: 62726 - DNA, 20 bp, synthetic construct
  source 1..20: mol_type = other DNA
cccatgctctacagaatcaa

SEQ ID NO: 62727 - DNA, 20 bp, synthetic construct
  source 1..20: mol_type = other DNA
gcccatgctctacagaatca

SEQ ID NO: 62728 - DNA, 20 bp, synthetic construct
  source 1..20: mol_type = other DNA
agcccatgctctacagaatc

SEQ ID NO: 62729 - DNA, 20 bp, synthetic construct
  source 1..20: mol_type = other DNA
tagcccatgctctacagaat

SEQ ID NO: 62730 - DNA, 20 bp, synthetic construct
  source 1..20: mol_type = other DNA
atagcccatgctctacagaa

SEQ ID NO: 62731 - DNA, 20 bp, synthetic construct
  source 1..20: mol_type = other DNA
aatagcccatgctctacaga

SEQ ID NO: 62732 - DNA, 20 bp, synthetic construct
  source 1..20: mol_type = other DNA
caatagcccatgctctacag

SEQ ID NO: 62733 - DNA, 20 bp, synthetic construct
  source 1..20: mol_type = other DNA
tcaatagcccatgctctaca

SEQ ID NO: 62734 - DNA, 20 bp, synthetic construct
  source 1..20: mol_type = other DNA
atcaatagcccatgctctac

SEQ ID NO: 62735 - DNA, 20 bp, synthetic construct
  source 1..20: mol_type = other DNA
gatcaatagcccatgctcta

SEQ ID NO: 62736 - DNA, 20 bp, synthetic construct
  source 1..20: mol_type = other DNA
agatcaatagcccatgctct

SEQ ID NO: 62737 - DNA, 20 bp, synthetic construct
  source 1..20: mol_type = other DNA
aagatcaatagcccatgctc

SEQ ID NO: 62738 - DNA, 20 bp, synthetic construct
  source 1..20: mol_type = other DNA
gaagatcaatagcccatgct

SEQ ID NO: 62739 - DNA, 20 bp, synthetic construct
  source 1..20: mol_type = other DNA
tgaagatcaatagcccatgc

SEQ ID NO: 62740 - DNA, 20 bp, synthetic construct
  source 1..20: mol_type = other DNA
gtgaagatcaatagcccatg

SEQ ID NO: 62741 - DNA, 20 bp, synthetic construct
  source 1..20: mol_type = other DNA
agtgaagatcaatagcccat

SEQ ID NO: 62742 - DNA, 20 bp, synthetic construct
  source 1..20: mol_type = other DNA
gagtgaagatcaatagccca

SEQ ID NO: 62743 - DNA, 20 bp, synthetic construct
  source 1..20: mol_type = other DNA
tgagtgaagatcaatagccc

SEQ ID NO: 62744 - DNA, 20 bp, synthetic construct
  source 1..20: mol_type = other DNA
ctgagtgaagatcaatagcc

SEQ ID NO: 62745 - DNA, 20 bp, synthetic construct
  source 1..20: mol_type = other DNA
gctgagtgaagatcaatagc

SEQ ID NO: 62746 - DNA, 20 bp, synthetic construct
  source 1..20: mol_type = other DNA
agctgagtgaagatcaatag

SEQ ID NO: 62747 - DNA, 20 bp, synthetic construct
  source 1..20: mol_type = other DNA
aagctgagtgaagatcaata

SEQ ID NO: 62748 - DNA, 20 bp, synthetic construct
  source 1..20: mol_type = other DNA
aaagctgagtgaagatcaat

SEQ ID NO: 62749 - DNA, 20 bp, synthetic construct
  source 1..20: mol_type = other DNA
gaaagctgagtgaagatcaa

SEQ ID NO: 62750 - DNA, 20 bp, synthetic construct
  source 1..20: mol_type = other DNA
tgaaagctgagtgaagatca

SEQ ID NO: 62751 - DNA, 20 bp, synthetic construct
  source 1..20: mol_type = other DNA
ctgaaagctgagtgaagatc

SEQ ID NO: 62752 - DNA, 20 bp, synthetic construct
  source 1..20: mol_type = other DNA
tctgaaagctgagtgaagat

SEQ ID NO: 62753 - DNA, 20 bp, synthetic construct
  source 1..20: mol_type = other DNA
ctctgaaagctgagtgaaga

SEQ ID NO: 62754 - DNA, 20 bp, synthetic construct
  source 1..20: mol_type = other DNA
cctctgaaagctgagtgaag

SEQ ID NO: 62755 - DNA, 20 bp, synthetic construct
  source 1..20: mol_type = other DNA
tcctctgaaagctgagtgaa

SEQ ID NO: 62756 - DNA, 20 bp, synthetic construct
  source 1..20: mol_type = other DNA
ttcctctgaaagctgagtga

SEQ ID NO: 62757 - DNA, 20 bp, synthetic construct
  source 1..20: mol_type = other DNA
attcctctgaaagctgagtg

SEQ ID NO: 62758 - DNA, 20 bp, synthetic construct
  source 1..20: mol_type = other DNA
gattcctctgaaagctgagt

SEQ ID NO: 62759 - DNA, 20 bp, synthetic construct
  source 1..20: mol_type = other DNA
agattcctctgaaagctgag

SEQ ID NO: 62760 - DNA, 20 bp, synthetic construct
  source 1..20: mol_type = other DNA
cagattcctctgaaagctga

SEQ ID NO: 62761 - DNA, 20 bp, synthetic construct
  source 1..20: mol_type = other DNA
tcagattcctctgaaagctg

SEQ ID NO: 62762 - DNA, 20 bp, synthetic construct
  source 1..20: mol_type = other DNA
atcagattcctctgaaagct

SEQ ID NO: 62763 - DNA, 20 bp, synthetic construct
  source 1..20: mol_type = other DNA
aatcagattcctctgaaagc

SEQ ID NO: 62764 - DNA, 20 bp, synthetic construct
  source 1..20: mol_type = other DNA
taatcagattcctctgaaag

SEQ ID NO: 62765 - DNA, 20 bp, synthetic construct
  source 1..20: mol_type = other DNA
ctaatcagattcctctgaaa

SEQ ID NO: 62766 - DNA, 20 bp, synthetic construct
  source 1..20: mol_type = other DNA
actaatcagattcctctgaa

SEQ ID NO: 62767 - DNA, 20 bp, synthetic construct
  source 1..20: mol_type = other DNA
tactaatcagattcctctga

SEQ ID NO: 62768 - DNA, 20 bp, synthetic construct
  source 1..20: mol_type = other DNA
ttactaatcagattcctctg

SEQ ID NO: 62769 - DNA, 20 bp, synthetic construct
  source 1..20: mol_type = other DNA
cttactaatcagattcctct

SEQ ID NO: 62770 - DNA, 20 bp, synthetic construct
  source 1..20: mol_type = other DNA
acttactaatcagattcctc

SEQ ID NO: 62771 - DNA, 20 bp, synthetic construct
  source 1..20: mol_type = other DNA
aacttactaatcagattcct

SEQ ID NO: 62772 - DNA, 20 bp, synthetic construct
  source 1..20: mol_type = other DNA
aaacttactaatcagattcc

SEQ ID NO: 62773 - DNA, 20 bp, synthetic construct
  source 1..20: mol_type = other DNA
caaacttactaatcagattc

SEQ ID NO: 62774 - DNA, 20 bp, synthetic construct
  source 1..20: mol_type = other DNA
tcaaacttactaatcagatt

SEQ ID NO: 62775 - DNA, 20 bp, synthetic construct
  source 1..20: mol_type = other DNA
ctcaaacttactaatcagat

SEQ ID NO: 62776 - DNA, 20 bp, synthetic construct
  source 1..20: mol_type = other DNA
actcaaacttactaatcaga

SEQ ID NO: 62777 - DNA, 20 bp, synthetic construct
  source 1..20: mol_type = other DNA
aactcaaacttactaatcag

SEQ ID NO: 62778 - DNA, 20 bp, synthetic construct
  source 1..20: mol_type = other DNA
aaactcaaacttactaatca

SEQ ID NO: 62779 - DNA, 20 bp, synthetic construct
  source 1..20: mol_type = other DNA
aaaactcaaacttactaatc

SEQ ID NO: 62780 - DNA, 20 bp, synthetic construct
  source 1..20: mol_type = other DNA
aaaaactcaaacttactaat

SEQ ID NO: 62781 - DNA, 20 bp, synthetic construct
  source 1..20: mol_type = other DNA
aaaaaactcaaacttactaa

SEQ ID NO: 62782 - DNA, 20 bp, synthetic construct
  source 1..20: mol_type = other DNA
taaaaaactcaaacttacta

SEQ ID NO: 62783 - DNA, 20 bp, synthetic construct
  source 1..20: mol_type = other DNA
ataaaaaactcaaacttact

SEQ ID NO: 62784 - DNA, 20 bp, synthetic construct
  source 1..20: mol_type = other DNA
aataaaaaactcaaacttac

SEQ ID NO: 62785 - DNA, 20 bp, synthetic construct
  source 1..20: mol_type = other DNA
taataaaaaactcaaactta

SEQ ID NO: 62786 - DNA, 20 bp, synthetic construct
  source 1..20: mol_type = other DNA
ataataaaaaactcaaactt

SEQ ID NO: 62787 - DNA, 20 bp, synthetic construct
  source 1..20: mol_type = other DNA
aataataaaaaactcaaact

SEQ ID NO: 62788 - DNA, 20 bp, synthetic construct
  source 1..20: mol_type = other DNA
aaataataaaaaactcaaac

SEQ ID NO: 62789 - DNA, 20 bp, synthetic construct
  source 1..20: mol_type = other DNA
aaaataataaaaaactcaaa

SEQ ID NO: 62790 - DNA, 20 bp, synthetic construct
  source 1..20: mol_type = other DNA
aaaaataataaaaaactcaa

SEQ ID NO: 62791 - DNA, 20 bp, synthetic construct
  source 1..20: mol_type = other DNA
aaaaaataataaaaaactca

SEQ ID NO: 62792 - DNA, 20 bp, synthetic construct
  source 1..20: mol_type = other DNA
taaaaaataataaaaaactc

SEQ ID NO: 62793 - DNA, 20 bp, synthetic construct
  source 1..20: mol_type = other DNA
ctaaaaaataataaaaaact

SEQ ID NO: 62794 - DNA, 20 bp, synthetic construct
  source 1..20: mol_type = other DNA
actaaaaaataataaaaaac

SEQ ID NO: 62795 - DNA, 20 bp, synthetic construct
  source 1..20: mol_type = other DNA
aactaaaaaataataaaaaa

SEQ ID NO: 62796 - DNA, 20 bp, synthetic construct
  source 1..20: mol_type = other DNA
caactaaaaaataataaaaa

SEQ ID NO: 62797 - DNA, 20 bp, synthetic construct
  source 1..20: mol_type = other DNA
tcaactaaaaaataataaaa

SEQ ID NO: 62798 - DNA, 20 bp, synthetic construct
  source 1..20: mol_type = other DNA
atcaactaaaaaataataaa

SEQ ID NO: 62799 - DNA, 20 bp, synthetic construct
  source 1..20: mol_type = other DNA
aatcaactaaaaaataataa

SEQ ID NO: 62800 - DNA, 20 bp, synthetic construct
  source 1..20: mol_type = other DNA
aaatcaactaaaaaataata

SEQ ID NO: 62801 - DNA, 20 bp, synthetic construct
  source 1..20: mol_type = other DNA
aaaatcaactaaaaaataat

SEQ ID NO: 62802 - DNA, 20 bp, synthetic construct
  source 1..20: mol_type = other DNA
caaaatcaactaaaaaataa

SEQ ID NO: 62803 - DNA, 20 bp, synthetic construct
  source 1..20: mol_type = other DNA
tcaaaatcaactaaaaaata

SEQ ID NO: 62804 - DNA, 20 bp, synthetic construct
  source 1..20: mol_type = other DNA
ttcaaaatcaactaaaaaat

SEQ ID NO: 62805 - DNA, 20 bp, synthetic construct
  source 1..20: mol_type = other DNA
cttcaaaatcaactaaaaaa

SEQ ID NO: 62806 - DNA, 20 bp, synthetic construct
  source 1..20: mol_type = other DNA
acttcaaaatcaactaaaaa

SEQ ID NO: 62807 - DNA, 20 bp, synthetic construct
  source 1..20: mol_type = other DNA
tacttcaaaatcaactaaaa

SEQ ID NO: 62808 - DNA, 20 bp, synthetic construct
  source 1..20: mol_type = other DNA
ttacttcaaaatcaactaaa

SEQ ID NO: 62809 - DNA, 20 bp, synthetic construct
  source 1..20: mol_type = other DNA
tttacttcaaaatcaactaa

SEQ ID NO: 62810 - DNA, 20 bp, synthetic construct
  source 1..20: mol_type = other DNA
ttttacttcaaaatcaacta

SEQ ID NO: 62811 - DNA, 20 bp, synthetic construct
  source 1..20: mol_type = other DNA
attttacttcaaaatcaact

SEQ ID NO: 62812 - DNA, 20 bp, synthetic construct
  source 1..20: mol_type = other DNA
tattttacttcaaaatcaac

SEQ ID NO: 62813 - DNA, 20 bp, synthetic construct
  source 1..20: mol_type = other DNA
gtattttacttcaaaatcaa

SEQ ID NO: 62814 - DNA, 20 bp, synthetic construct
  source 1..20: mol_type = other DNA
tgtattttacttcaaaatca

SEQ ID NO: 62815 - DNA, 20 bp, synthetic construct
  source 1..20: mol_type = other DNA
ctgtattttacttcaaaatc

SEQ ID NO: 62816 - DNA, 20 bp, synthetic construct
  source 1..20: mol_type = other DNA
gctgtattttacttcaaaat

SEQ ID NO: 62817 - DNA, 20 bp, synthetic construct
  source 1..20: mol_type = other DNA
tgctgtattttacttcaaaa

SEQ ID NO: 62818 - DNA, 20 bp, synthetic construct
  source 1..20: mol_type = other DNA
gtgctgtattttacttcaaa

SEQ ID NO: 62819 - DNA, 20 bp, synthetic construct
  source 1..20: mol_type = other DNA
ggtgctgtattttacttcaa

SEQ ID NO: 62820 - DNA, 20 bp, synthetic construct
  source 1..20: mol_type = other DNA
tggtgctgtattttacttca

SEQ ID NO: 62821 - DNA, 20 bp, synthetic construct
  source 1..20: mol_type = other DNA
atggtgctgtattttacttc

SEQ ID NO: 62822 - DNA, 20 bp, synthetic construct
  source 1..20: mol_type = other DNA
aatggtgctgtattttactt

SEQ ID NO: 62823 - DNA, 20 bp, synthetic construct
  source 1..20: mol_type = other DNA
aaatggtgctgtattttact

SEQ ID NO: 62824 - DNA, 20 bp, synthetic construct
  source 1..20: mol_type = other DNA
aaaatggtgctgtattttac

SEQ ID NO: 62825 - DNA, 20 bp, synthetic construct
  source 1..20: mol_type = other DNA
taaaatggtgctgtatttta

SEQ ID NO: 62826 - DNA, 20 bp, synthetic construct
  source 1..20: mol_type = other DNA
ttaaaatggtgctgtatttt

SEQ ID NO: 62827 - DNA, 20 bp, synthetic construct
  source 1..20: mol_type = other DNA
gttaaaatggtgctgtattt

SEQ ID NO: 62828 - DNA, 20 bp, synthetic construct
  source 1..20: mol_type = other DNA
agttaaaatggtgctgtatt

SEQ ID NO: 62829 - DNA, 20 bp, synthetic construct
  source 1..20: mol_type = other DNA
cagttaaaatggtgctgtat

SEQ ID NO: 62830 - DNA, 20 bp, synthetic construct
  source 1..20: mol_type = other DNA
tcagttaaaatggtgctgta

SEQ ID NO: 62831 - DNA, 20 bp, synthetic construct
  source 1..20: mol_type = other DNA
atcagttaaaatggtgctgt

SEQ ID NO: 62832 - DNA, 20 bp, synthetic construct
  source 1..20: mol_type = other DNA
tatcagttaaaatggtgctg

SEQ ID NO: 62833 - DNA, 20 bp, synthetic construct
  source 1..20: mol_type = other DNA
gtatcagttaaaatggtgct

SEQ ID NO: 62834 - DNA, 20 bp, synthetic construct
  source 1..20: mol_type = other DNA
ggtatcagttaaaatggtgc

SEQ ID NO: 62835 - DNA, 20 bp, synthetic construct
  source 1..20: mol_type = other DNA
tggtatcagttaaaatggtg

SEQ ID NO: 62836 - DNA, 20 bp, synthetic construct
  source 1..20: mol_type = other DNA
atggtatcagttaaaatggt

SEQ ID NO: 62837 - DNA, 20 bp, synthetic construct
  source 1..20: mol_type = other DNA
aatggtatcagttaaaatgg

SEQ ID NO: 62838 - DNA, 20 bp, synthetic construct
  source 1..20: mol_type = other DNA
aaatggtatcagttaaaatg

SEQ ID NO: 62839 - DNA, 20 bp, synthetic construct
  source 1..20: mol_type = other DNA
gaaatggtatcagttaaaat

SEQ ID NO: 62840 - DNA, 20 bp, synthetic construct
  source 1..20: mol_type = other DNA
agaaatggtatcagttaaaa

SEQ ID NO: 62841 - DNA, 20 bp, synthetic construct
  source 1..20: mol_type = other DNA
tagaaatggtatcagttaaa

SEQ ID NO: 62842 - DNA, 20 bp, synthetic construct
  source 1..20: mol_type = other DNA
ttagaaatggtatcagttaa

SEQ ID NO: 62843 - DNA, 20 bp, synthetic construct
  source 1..20: mol_type = other DNA
tttagaaatggtatcagtta

SEQ ID NO: 62844 - DNA, 20 bp, synthetic construct
  source 1..20: mol_type = other DNA
gtttagaaatggtatcagtt

SEQ ID NO: 62845 - DNA, 20 bp, synthetic construct
  source 1..20: mol_type = other DNA
tgtttagaaatggtatcagt

SEQ ID NO: 62846 - DNA, 20 bp, synthetic construct
  source 1..20: mol_type = other DNA
ttgtttagaaatggtatcag

SEQ ID NO: 62847 - DNA, 20 bp, synthetic construct
  source 1..20: mol_type = other DNA
attgtttagaaatggtatca

SEQ ID NO: 62848 - DNA, 20 bp, synthetic construct
  source 1..20: mol_type = other DNA
aattgtttagaaatggtatc

SEQ ID NO: 62849 - DNA, 20 bp, synthetic construct
  source 1..20: mol_type = other DNA
aaattgtttagaaatggtat

SEQ ID NO: 62850 - DNA, 20 bp, synthetic construct
  source 1..20: mol_type = other DNA
aaaattgtttagaaatggta

SEQ ID NO: 62851 - DNA, 20 bp, synthetic construct
  source 1..20: mol_type = other DNA
gaaaattgtttagaaatggt

SEQ ID NO: 62852 - DNA, 20 bp, synthetic construct
  source 1..20: mol_type = other DNA
tgaaaattgtttagaaatgg

SEQ ID NO: 62853 - DNA, 20 bp, synthetic construct
  source 1..20: mol_type = other DNA
ctgaaaattgtttagaaatg

SEQ ID NO: 62854 - DNA, 20 bp, synthetic construct
  source 1..20: mol_type = other DNA
actgaaaattgtttagaaat

SEQ ID NO: 62855 - DNA, 20 bp, synthetic construct
  source 1..20: mol_type = other DNA
aactgaaaattgtttagaaa

SEQ ID NO: 62856 - DNA, 20 bp, synthetic construct
  source 1..20: mol_type = other DNA
gaactgaaaattgtttagaa

SEQ ID NO: 62857 - DNA, 20 bp, synthetic construct
  source 1..20: mol_type = other DNA
tgaactgaaaattgtttaga

SEQ ID NO: 62858 - DNA, 20 bp, synthetic construct
  source 1..20: mol_type = other DNA
ttgaactgaaaattgtttag

SEQ ID NO: 62859 - DNA, 20 bp, synthetic construct
  source 1..20: mol_type = other DNA
tttgaactgaaaattgttta

SEQ ID NO: 62860 - DNA, 20 bp, synthetic construct
  source 1..20: mol_type = other DNA
atttgaactgaaaattgttt

SEQ ID NO: 62861 - DNA, 20 bp, synthetic construct
  source 1..20: mol_type = other DNA
aatttgaactgaaaattgtt

SEQ ID NO: 62862 - DNA, 20 bp, synthetic construct
  source 1..20: mol_type = other DNA
aaatttgaactgaaaattgt

SEQ ID NO: 62863 - DNA, 20 bp, synthetic construct
  source 1..20: mol_type = other DNA
aaaatttgaactgaaaattg

SEQ ID NO: 62864 - DNA, 20 bp, synthetic construct
  source 1..20: mol_type = other DNA
taaaatttgaactgaaaatt

SEQ ID NO: 62865 - DNA, 20 bp, synthetic construct
  source 1..20: mol_type = other DNA
ttaaaatttgaactgaaaat

SEQ ID NO: 62866 - DNA, 20 bp, synthetic construct
  source 1..20: mol_type = other DNA
cttaaaatttgaactgaaaa

SEQ ID NO: 62867 - DNA, 20 bp, synthetic construct
  source 1..20: mol_type = other DNA
acttaaaatttgaactgaaa

SEQ ID NO: 62868 - DNA, 20 bp, synthetic construct
  source 1..20: mol_type = other DNA
aacttaaaatttgaactgaa

SEQ ID NO: 62869 - DNA, 20 bp, synthetic construct
  source 1..20: mol_type = other DNA
taacttaaaatttgaactga

SEQ ID NO: 62870 - DNA, 20 bp, synthetic construct
  source 1..20: mol_type = other DNA
ctaacttaaaatttgaactg

SEQ ID NO: 62871 - DNA, 20 bp, synthetic construct
  source 1..20: mol_type = other DNA
gctaacttaaaatttgaact

SEQ ID NO: 62872 - DNA, 20 bp, synthetic construct
  source 1..20: mol_type = other DNA
agctaacttaaaatttgaac

SEQ ID NO: 62873 - DNA, 20 bp, synthetic construct
  source 1..20: mol_type = other DNA
tagctaacttaaaatttgaa

SEQ ID NO: 62874 - DNA, 20 bp, synthetic construct
  source 1..20: mol_type = other DNA
ttagctaacttaaaatttga

SEQ ID NO: 62875 - DNA, 20 bp, synthetic construct
  source 1..20: mol_type = other DNA
attagctaacttaaaatttg

SEQ ID NO: 62876 - DNA, 20 bp, synthetic construct
  source 1..20: mol_type = other DNA
aattagctaacttaaaattt

SEQ ID NO: 62877 - DNA, 20 bp, synthetic construct
  source 1..20: mol_type = other DNA
aaattagctaacttaaaatt

SEQ ID NO: 62878 - DNA, 20 bp, synthetic construct
  source 1..20: mol_type = other DNA
taaattagctaacttaaaat

SEQ ID NO: 62879 - DNA, 20 bp, synthetic construct
  source 1..20: mol_type = other DNA
ctaaattagctaacttaaaa

SEQ ID NO: 62880 - DNA, 20 bp, synthetic construct
  source 1..20: mol_type = other DNA
tctaaattagctaacttaaa

SEQ ID NO: 62881 - DNA, 20 bp, synthetic construct
  source 1..20: mol_type = other DNA
ctctaaattagctaacttaa

SEQ ID NO: 62882 - DNA, 20 bp, synthetic construct
  source 1..20: mol_type = other DNA
gctctaaattagctaactta

SEQ ID NO: 62883 - DNA, 20 bp, synthetic construct
  source 1..20: mol_type = other DNA
agctctaaattagctaactt

SEQ ID NO: 62884 - DNA, 20 bp, synthetic construct
  source 1..20: mol_type = other DNA
aagctctaaattagctaact

SEQ ID NO: 62885 - DNA, 20 bp, synthetic construct
  source 1..20: mol_type = other DNA
taagctctaaattagctaac

SEQ ID NO: 62886 - DNA, 20 bp, synthetic construct
  source 1..20: mol_type = other DNA
ttaagctctaaattagctaa

SEQ ID NO: 62887 - DNA, 20 bp, synthetic construct
  source 1..20: mol_type = other DNA
cttaagctctaaattagcta

SEQ ID NO: 62888 - DNA, 20 bp, synthetic construct
  source 1..20: mol_type = other DNA
tcttaagctctaaattagct

SEQ ID NO: 62889 - DNA, 20 bp, synthetic construct
  source 1..20: mol_type = other DNA
ttcttaagctctaaattagc

SEQ ID NO: 62890 - DNA, 20 bp, synthetic construct
  source 1..20: mol_type = other DNA
tttcttaagctctaaattag

SEQ ID NO: 62891 - DNA, 20 bp, synthetic construct
  source 1..20: mol_type = other DNA
ttttcttaagctctaaatta

SEQ ID NO: 62892 - DNA, 20 bp, synthetic construct
  source 1..20: mol_type = other DNA
attttcttaagctctaaatt

SEQ ID NO: 62893 - DNA, 20 bp, synthetic construct
  source 1..20: mol_type = other DNA
aattttcttaagctctaaat

SEQ ID NO: 62894 - DNA, 20 bp, synthetic construct
  source 1..20: mol_type = other DNA
caattttcttaagctctaaa

SEQ ID NO: 62895 - DNA, 20 bp, synthetic construct
  source 1..20: mol_type = other DNA
gcaattttcttaagctctaa

SEQ ID NO: 62896 - DNA, 20 bp, synthetic construct
  source 1..20: mol_type = other DNA
agcaattttcttaagctcta

SEQ ID NO: 62897 - DNA, 20 bp, synthetic construct
  source 1..20: mol_type = other DNA
aagcaattttcttaagctct

SEQ ID NO: 62898 - DNA, 20 bp, synthetic construct
  source 1..20: mol_type = other DNA
aaagcaattttcttaagctc

SEQ ID NO: 62899 - DNA, 20 bp, synthetic construct
  source 1..20: mol_type = other DNA
taaagcaattttcttaagct

SEQ ID NO: 62900 - DNA, 20 bp, synthetic construct
  source 1..20: mol_type = other DNA
ttaaagcaattttcttaagc

SEQ ID NO: 62901 - DNA, 20 bp, synthetic construct
  source 1..20: mol_type = other DNA
tttaaagcaattttcttaag

SEQ ID NO: 62902 - DNA, 20 bp, synthetic construct
  source 1..20: mol_type = other DNA
ttttaaagcaattttcttaa

SEQ ID NO: 62903 - DNA, 20 bp, synthetic construct
  source 1..20: mol_type = other DNA
tttttaaagcaattttctta

SEQ ID NO: 62904 - DNA, 20 bp, synthetic construct
  source 1..20: mol_type = other DNA
gtttttaaagcaattttctt

SEQ ID NO: 62905 - DNA, 20 bp, synthetic construct
  source 1..20: mol_type = other DNA
tgtttttaaagcaattttct

SEQ ID NO: 62906 - DNA, 20 bp, synthetic construct
  source 1..20: mol_type = other DNA
atgtttttaaagcaattttc

SEQ ID NO: 62907 - DNA, 20 bp, synthetic construct
  source 1..20: mol_type = other DNA
tatgtttttaaagcaatttt

SEQ ID NO: 62908 - DNA, 20 bp, synthetic construct
  source 1..20: mol_type = other DNA
ttatgtttttaaagcaattt

SEQ ID NO: 62909 - DNA, 20 bp, synthetic construct
  source 1..20: mol_type = other DNA
tttatgtttttaaagcaatt

SEQ ID NO: 62910 - DNA, 20 bp, synthetic construct
  source 1..20: mol_type = other DNA
ttttatgtttttaaagcaat

SEQ ID NO: 62911 - DNA, 20 bp, synthetic construct
  source 1..20: mol_type = other DNA
attttatgtttttaaagcaa

SEQ ID NO: 62912 - DNA, 20 bp, synthetic construct
  source 1..20: mol_type = other DNA
aattttatgtttttaaagca

SEQ ID NO: 62913 - DNA, 20 bp, synthetic construct
  source 1..20: mol_type = other DNA
taattttatgtttttaaagc

SEQ ID NO: 62914 - DNA, 20 bp, synthetic construct
  source 1..20: mol_type = other DNA
gtaattttatgtttttaaag

SEQ ID NO: 62915 - DNA, 20 bp, synthetic construct
  source 1..20: mol_type = other DNA
agtaattttatgtttttaaa

SEQ ID NO: 62916 - DNA, 20 bp, synthetic construct
  source 1..20: mol_type = other DNA
cagtaattttatgtttttaa

SEQ ID NO: 62917 - DNA, 20 bp, synthetic construct
  source 1..20: mol_type = other DNA
ccagtaattttatgttttta

SEQ ID NO: 62918 - DNA, 20 bp, synthetic construct
  source 1..20: mol_type = other DNA
gccagtaattttatgttttt

SEQ ID NO: 62919 - DNA, 20 bp, synthetic construct
  source 1..20: mol_type = other DNA
agccagtaattttatgtttt

SEQ ID NO: 62920 - DNA, 20 bp, synthetic construct
  source 1..20: mol_type = other DNA
cagccagtaattttatgttt

SEQ ID NO: 62921 - DNA, 20 bp, synthetic construct
  source 1..20: mol_type = other DNA
ccagccagtaattttatgtt

SEQ ID NO: 62922 - DNA, 20 bp, synthetic construct
  source 1..20: mol_type = other DNA
cccagccagtaattttatgt

SEQ ID NO: 62923 - DNA, 20 bp, synthetic construct
  source 1..20: mol_type = other DNA
acccagccagtaattttatg

SEQ ID NO: 62924 - DNA, 20 bp, synthetic construct
  source 1..20: mol_type = other DNA
tacccagccagtaattttat

SEQ ID NO: 62925 - DNA, 20 bp, synthetic construct
  source 1..20: mol_type = other DNA
gtacccagccagtaatttta

SEQ ID NO: 62926 - DNA, 20 bp, synthetic construct
  source 1..20: mol_type = other DNA
tgtacccagccagtaatttt

SEQ ID NO: 62927 - DNA, 20 bp, synthetic construct
  source 1..20: mol_type = other DNA
ctgtacccagccagtaattt

SEQ ID NO: 62928 - DNA, 20 bp, synthetic construct
  source 1..20: mol_type = other DNA
actgtacccagccagtaatt

SEQ ID NO: 62929 - DNA, 20 bp, synthetic construct
  source 1..20: mol_type = other DNA
cactgtacccagccagtaat

SEQ ID NO: 62930 - DNA, 20 bp, synthetic construct
  source 1..20: mol_type = other DNA
ccactgtacccagccagtaa

SEQ ID NO: 62931 - DNA, 20 bp, synthetic construct
  source 1..20: mol_type = other DNA
gccactgtacccagccagta

SEQ ID NO: 62932 - DNA, 20 bp, synthetic construct
  source 1..20: mol_type = other DNA
agccactgtacccagccagt

SEQ ID NO: 62933 - DNA, 20 bp, synthetic construct
  source 1..20: mol_type = other DNA
gagccactgtacccagccag

SEQ ID NO: 62934 - DNA, 20 bp, synthetic construct
  source 1..20: mol_type = other DNA
tgagccactgtacccagcca

SEQ ID NO: 62935 - DNA, 20 bp, synthetic construct
  source 1..20: mol_type = other DNA
atgagccactgtacccagcc

SEQ ID NO: 62936 - DNA, 20 bp, synthetic construct
  source 1..20: mol_type = other DNA
aatgagccactgtacccagc

SEQ ID NO: 62937 - DNA, 20 bp, synthetic construct
  source 1..20: mol_type = other DNA
gaatgagccactgtacccag

SEQ ID NO: 62938 - DNA, 20 bp, synthetic construct
  source 1..20: mol_type = other DNA
ggaatgagccactgtaccca

SEQ ID NO: 62939 - DNA, 20 bp, synthetic construct
  source 1..20: mol_type = other DNA
aggaatgagccactgtaccc

SEQ ID NO: 62940 - DNA, 20 bp, synthetic construct
  source 1..20: mol_type = other DNA
caggaatgagccactgtacc

SEQ ID NO: 62941 - DNA, 20 bp, synthetic construct
  source 1..20: mol_type = other DNA
acaggaatgagccactgtac

SEQ ID NO: 62942 - DNA, 20 bp, synthetic construct
  source 1..20: mol_type = other DNA
tacaggaatgagccactgta

SEQ ID NO: 62943 - DNA, 20 bp, synthetic construct
  source 1..20: mol_type = other DNA
ttacaggaatgagccactgt

SEQ ID NO: 62944 - DNA, 20 bp, synthetic construct
  source 1..20: mol_type = other DNA
attacaggaatgagccactg

SEQ ID NO: 62945 - DNA, 20 bp, synthetic construct
  source 1..20: mol_type = other DNA
gattacaggaatgagccact

SEQ ID NO: 62946 - DNA, 20 bp, synthetic construct
  source 1..20: mol_type = other DNA
agattacaggaatgagccac

SEQ ID NO: 62947 - DNA, 20 bp, synthetic construct
  source 1..20: mol_type = other DNA
gagattacaggaatgagcca

SEQ ID NO: 62948 - DNA, 20 bp, synthetic construct
  source 1..20: mol_type = other DNA
tgagattacaggaatgagcc

SEQ ID NO: 62949 - DNA, 20 bp, synthetic construct
  source 1..20: mol_type = other DNA
ctgagattacaggaatgagc

SEQ ID NO: 62950 - DNA, 20 bp, synthetic construct
  source 1..20: mol_type = other DNA
gctgagattacaggaatgag

SEQ ID NO: 62951 - DNA, 20 bp, synthetic construct
  source 1..20: mol_type = other DNA
tgctgagattacaggaatga

SEQ ID NO: 62952 - DNA, 20 bp, synthetic construct
  source 1..20: mol_type = other DNA
gtgctgagattacaggaatg

SEQ ID NO: 62953 - DNA, 20 bp, synthetic construct
  source 1..20: mol_type = other DNA
agtgctgagattacaggaat

SEQ ID NO: 62954 - DNA, 20 bp, synthetic construct
  source 1..20: mol_type = other DNA
aagtgctgagattacaggaa

SEQ ID NO: 62955 - DNA, 20 bp, synthetic construct
  source 1..20: mol_type = other DNA
aaagtgctgagattacagga

SEQ ID NO: 62956 - DNA, 20 bp, synthetic construct
  source 1..20: mol_type = other DNA
caaagtgctgagattacagg

SEQ ID NO: 62957 - DNA, 20 bp, synthetic construct
  source 1..20: mol_type = other DNA
ccaaagtgctgagattacag

SEQ ID NO: 62958 - DNA, 20 bp, synthetic construct
  source 1..20: mol_type = other DNA
cccaaagtgctgagattaca

SEQ ID NO: 62959 - DNA, 20 bp, synthetic construct
  source 1..20: mol_type = other DNA
tcccaaagtgctgagattac

SEQ ID NO: 62960 - DNA, 20 bp, synthetic construct
  source 1..20: mol_type = other DNA
ctcccaaagtgctgagatta

SEQ ID NO: 62961 - DNA, 20 bp, synthetic construct
  source 1..20: mol_type = other DNA
cctcccaaagtgctgagatt

SEQ ID NO: 62962 - DNA, 20 bp, synthetic construct
  source 1..20: mol_type = other DNA
gcctcccaaagtgctgagat

SEQ ID NO: 62963 - DNA, 20 bp, synthetic construct
  source 1..20: mol_type = other DNA
ggcctcccaaagtgctgaga

SEQ ID NO: 62964 - DNA, 20 bp, synthetic construct
  source 1..20: mol_type = other DNA
tggcctcccaaagtgctgag

SEQ ID NO: 62965 - DNA, 20 bp, synthetic construct
  source 1..20: mol_type = other DNA
ttggcctcccaaagtgctga

SEQ ID NO: 62966 - DNA, 20 bp, synthetic construct
  source 1..20: mol_type = other DNA
cttggcctcccaaagtgctg

SEQ ID NO: 62967 - DNA, 20 bp, synthetic construct
  source 1..20: mol_type = other DNA
ccttggcctcccaaagtgct

SEQ ID NO: 62968 - DNA, 20 bp, synthetic construct
  source 1..20: mol_type = other DNA
gccttggcctcccaaagtgc

SEQ ID NO: 62969 - DNA, 20 bp, synthetic construct
  source 1..20: mol_type = other DNA
tgccttggcctcccaaagtg

SEQ ID NO: 62970 - DNA, 20 bp, synthetic construct
  source 1..20: mol_type = other DNA
ctgccttggcctcccaaagt

SEQ ID NO: 62971 - DNA, 20 bp, synthetic construct
  source 1..20: mol_type = other DNA
tctgccttggcctcccaaag

SEQ ID NO: 62972 - DNA, 20 bp, synthetic construct
  source 1..20: mol_type = other DNA
atctgccttggcctcccaaa

SEQ ID NO: 62973 - DNA, 20 bp, synthetic construct
  source 1..20: mol_type = other DNA
catctgccttggcctcccaa

SEQ ID NO: 62974 - DNA, 20 bp, synthetic construct
  source 1..20: mol_type = other DNA
tcatctgccttggcctccca

SEQ ID NO: 62975 - DNA, 20 bp, synthetic construct
  source 1..20: mol_type = other DNA
ttcatctgccttggcctccc

SEQ ID NO: 62976 - DNA, 20 bp, synthetic construct
  source 1..20: mol_type = other DNA
attcatctgccttggcctcc

SEQ ID NO: 62977 - DNA, 20 bp, synthetic construct
  source 1..20: mol_type = other DNA
aattcatctgccttggcctc

SEQ ID NO: 62978 - DNA, 20 bp, synthetic construct
  source 1..20: mol_type = other DNA
caattcatctgccttggcct

SEQ ID NO: 62979 - DNA, 20 bp, synthetic construct
  source 1..20: mol_type = other DNA
gcaattcatctgccttggcc

SEQ ID NO: 62980 - DNA, 20 bp, synthetic construct
  source 1..20: mol_type = other DNA
agcaattcatctgccttggc

SEQ ID NO: 62981 - DNA, 20 bp, synthetic construct
  source 1..20: mol_type = other DNA
aagcaattcatctgccttgg

SEQ ID NO: 62982 - DNA, 20 bp, synthetic construct
  source 1..20: mol_type = other DNA
caagcaattcatctgccttg

SEQ ID NO: 62983 - DNA, 20 bp, synthetic construct
  source 1..20: mol_type = other DNA
tcaagcaattcatctgcctt

SEQ ID NO: 62984 - DNA, 20 bp, synthetic construct
  source 1..20: mol_type = other DNA
ctcaagcaattcatctgcct

SEQ ID NO: 62985 - DNA, 20 bp, synthetic construct
  source 1..20: mol_type = other DNA
gctcaagcaattcatctgcc

SEQ ID NO: 62986 - DNA, 20 bp, synthetic construct
  source 1..20: mol_type = other DNA
ggctcaagcaattcatctgc

SEQ ID NO: 62987 - DNA, 20 bp, synthetic construct
  source 1..20: mol_type = other DNA
gggctcaagcaattcatctg

SEQ ID NO: 62988 - DNA, 20 bp, synthetic construct
  source 1..20: mol_type = other DNA
tgggctcaagcaattcatct

SEQ ID NO: 62989 - DNA, 20 bp, synthetic construct
  source 1..20: mol_type = other DNA
ctgggctcaagcaattcatc

SEQ ID NO: 62990 - DNA, 20 bp, synthetic construct
  source 1..20: mol_type = other DNA
actgggctcaagcaattcat

SEQ ID NO: 62991 - DNA, 20 bp, synthetic construct
  source 1..20: mol_type = other DNA
tactgggctcaagcaattca

SEQ ID NO: 62992 - DNA, 20 bp, synthetic construct
  source 1..20: mol_type = other DNA
ctactgggctcaagcaattc

SEQ ID NO: 62993 - DNA, 20 bp, synthetic construct
  source 1..20: mol_type = other DNA
actactgggctcaagcaatt

SEQ ID NO: 62994 - DNA, 20 bp, synthetic construct
  source 1..20: mol_type = other DNA
aactactgggctcaagcaat

SEQ ID NO: 62995 - DNA, 20 bp, synthetic construct
  source 1..20: mol_type = other DNA
gaactactgggctcaagcaa

SEQ ID NO: 62996 - DNA, 20 bp, synthetic construct
  source 1..20: mol_type = other DNA
tgaactactgggctcaagca

SEQ ID NO: 62997 - DNA, 20 bp, synthetic construct
  source 1..20: mol_type = other DNA
ttgaactactgggctcaagc

SEQ ID NO: 62998 - DNA, 20 bp, synthetic construct
  source 1..20: mol_type = other DNA
cttgaactactgggctcaag

SEQ ID NO: 62999 - DNA, 20 bp, synthetic construct
  source 1..20: mol_type = other DNA
tcttgaactactgggctcaa

SEQ ID NO: 63000 - DNA, 20 bp, synthetic construct
  source 1..20: mol_type = other DNA
gtcttgaactactgggctca

SEQ ID NO: 63001 - DNA, 20 bp, synthetic construct
  source 1..20: mol_type = other DNA
ggtcttgaactactgggctc

SEQ ID NO: 63002 - DNA, 20 bp, synthetic construct
  source 1..20: mol_type = other DNA
tggtcttgaactactgggct

SEQ ID NO: 63003 - DNA, 20 bp, synthetic construct
  source 1..20: mol_type = other DNA
ctggtcttgaactactgggc

SEQ ID NO: 63004 - DNA, 20 bp, synthetic construct
  source 1..20: mol_type = other DNA
gctggtcttgaactactggg

SEQ ID NO: 63005 - DNA, 20 bp, synthetic construct
  source 1..20: mol_type = other DNA
ggctggtcttgaactactgg

SEQ ID NO: 63006 - DNA, 20 bp, synthetic construct
  source 1..20: mol_type = other DNA
aggctggtcttgaactactg

SEQ ID NO: 63007 - DNA, 20 bp, synthetic construct
  source 1..20: mol_type = other DNA
caggctggtcttgaactact

SEQ ID NO: 63008 - DNA, 20 bp, synthetic construct
  source 1..20: mol_type = other DNA
ccaggctggtcttgaactac

SEQ ID NO: 63009 - DNA, 20 bp, synthetic construct
  source 1..20: mol_type = other DNA
cccaggctggtcttgaacta

SEQ ID NO: 63010 - DNA, 20 bp, synthetic construct
  source 1..20: mol_type = other DNA
gcccaggctggtcttgaact

SEQ ID NO: 63011 - DNA, 20 bp, synthetic construct
  source 1..20: mol_type = other DNA
tgcccaggctggtcttgaac

SEQ ID NO: 63012 - DNA, 20 bp, synthetic construct
  source 1..20: mol_type = other DNA
ttgcccaggctggtcttgaa

SEQ ID NO: 63013 - DNA, 20 bp, synthetic construct
  source 1..20: mol_type = other DNA
attgcccaggctggtcttga

SEQ ID NO: 63014 - DNA, 20 bp, synthetic construct
  source 1..20: mol_type = other DNA
tattgcccaggctggtcttg

SEQ ID NO: 63015 - DNA, 20 bp, synthetic construct
  source 1..20: mol_type = other DNA
atattgcccaggctggtctt

SEQ ID NO: 63016 - DNA, 20 bp, synthetic construct
  source 1..20: mol_type = other DNA
catattgcccaggctggtct

SEQ ID NO: 63017 - DNA, 20 bp, synthetic construct
  source 1..20: mol_type = other DNA
ccatattgcccaggctggtc

SEQ ID NO: 63018 - DNA, 20 bp, synthetic construct
  source 1..20: mol_type = other DNA
accatattgcccaggctggt

SEQ ID NO: 63019 - DNA, 20 bp, synthetic construct
  source 1..20: mol_type = other DNA
caccatattgcccaggctgg

SEQ ID NO: 63020 - DNA, 20 bp, synthetic construct
  source 1..20: mol_type = other DNA
ccaccatattgcccaggctg

SEQ ID NO: 63021 - DNA, 20 bp, synthetic construct
  source 1..20: mol_type = other DNA
tccaccatattgcccaggct

SEQ ID NO: 63022 - DNA, 20 bp, synthetic construct
  source 1..20: mol_type = other DNA
ttccaccatattgcccaggc

SEQ ID NO: 63023 - DNA, 20 bp, synthetic construct
  source 1..20: mol_type = other DNA
gttccaccatattgcccagg

SEQ ID NO: 63024 - DNA, 20 bp, synthetic construct
  source 1..20: mol_type = other DNA
ggttccaccatattgcccag

SEQ ID NO: 63025 - DNA, 20 bp, synthetic construct
  source 1..20: mol_type = other DNA
gggttccaccatattgccca

SEQ ID NO: 63026 - DNA, 20 bp, synthetic construct
  source 1..20: mol_type = other DNA
ggggttccaccatattgccc

SEQ ID NO: 63027 - DNA, 20 bp, synthetic construct
  source 1..20: mol_type = other DNA
cggggttccaccatattgcc

SEQ ID NO: 63028 - DNA, 20 bp, synthetic construct
  source 1..20: mol_type = other DNA
acggggttccaccatattgc

SEQ ID NO: 63029 - DNA, 20 bp, synthetic construct
  source 1..20: mol_type = other DNA
aacggggttccaccatattg

SEQ ID NO: 63030 - DNA, 20 bp, synthetic construct
  source 1..20: mol_type = other DNA
aaacggggttccaccatatt

SEQ ID NO: 63031 - DNA, 20 bp, synthetic construct
  source 1..20: mol_type = other DNA
gaaacggggttccaccatat

SEQ ID NO: 63032 - DNA, 20 bp, synthetic construct
  source 1..20: mol_type = other DNA
agaaacggggttccaccata

SEQ ID NO: 63033 - DNA, 20 bp, synthetic construct
  source 1..20: mol_type = other DNA
tagaaacggggttccaccat

SEQ ID NO: 63034 - DNA, 20 bp, synthetic construct
  source 1..20: mol_type = other DNA
gtagaaacggggttccacca

SEQ ID NO: 63035 - DNA, 20 bp, synthetic construct
  source 1..20: mol_type = other DNA
tgtagaaacggggttccacc

SEQ ID NO: 63036 - DNA, 20 bp, synthetic construct
  source 1..20: mol_type = other DNA
ttgtagaaacggggttccac

SEQ ID NO: 63037 - DNA, 20 bp, synthetic construct
  source 1..20: mol_type = other DNA
tttgtagaaacggggttcca

SEQ ID NO: 63038 - DNA, 20 bp, synthetic construct
  source 1..20: mol_type = other DNA
ttttgtagaaacggggttcc

SEQ ID NO: 63039 - DNA, 20 bp, synthetic construct
  source 1..20: mol_type = other DNA
tttttgtagaaacggggttc

SEQ ID NO: 63040 - DNA, 20 bp, synthetic construct
  source 1..20: mol_type = other DNA
ttttttgtagaaacggggtt

SEQ ID NO: 63041 - DNA, 20 bp, synthetic construct
  source 1..20: mol_type = other DNA
tttttttgtagaaacggggt

SEQ ID NO: 63042 - DNA, 20 bp, synthetic construct
  source 1..20: mol_type = other DNA
ttttttttgtagaaacgggg

SEQ ID NO: 63043 - DNA, 20 bp, synthetic construct
  source 1..20: mol_type = other DNA
attttttttgtagaaacggg

SEQ ID NO: 63044 - DNA, 20 bp, synthetic construct
  source 1..20: mol_type = other DNA
tattttttttgtagaaacgg

SEQ ID NO: 63045 - DNA, 20 bp, synthetic construct
  source 1..20: mol_type = other DNA
gtattttttttgtagaaacg

SEQ ID NO: 63046 - DNA, 20 bp, synthetic construct
  source 1..20: mol_type = other DNA
tgtattttttttgtagaaac

SEQ ID NO: 63047 - DNA, 20 bp, synthetic construct
  source 1..20: mol_type = other DNA
ttgtattttttttgtagaaa

SEQ ID NO: 63048 - DNA, 20 bp, synthetic construct
  source 1..20: mol_type = other DNA
tttgtattttttttgtagaa

SEQ ID NO: 63049 - DNA, 20 bp, synthetic construct
  source 1..20: mol_type = other DNA
ttttgtattttttttgtaga

SEQ ID NO: 63050 - DNA, 20 bp, synthetic construct
  source 1..20: mol_type = other DNA
tttttgtattttttttgtag

SEQ ID NO: 63051 - DNA, 20 bp, synthetic construct
  source 1..20: mol_type = other DNA
ctttttgtattttttttgta

SEQ ID NO: 63052 - DNA, 20 bp, synthetic construct
  source 1..20: mol_type = other DNA
actttttgtattttttttgt

SEQ ID NO: 63053 - DNA, 20 bp, synthetic construct
  source 1..20: mol_type = other DNA
tactttttgtattttttttg

SEQ ID NO: 63054 - DNA, 20 bp, synthetic construct
  source 1..20: mol_type = other DNA
ctactttttgtatttttttt

SEQ ID NO: 63055 - DNA, 20 bp, synthetic construct
  source 1..20: mol_type = other DNA
gctactttttgtattttttt

SEQ ID NO: 63056 - DNA, 20 bp, synthetic construct
  source 1..20: mol_type = other DNA
ggctactttttgtatttttt

SEQ ID NO: 63057 - DNA, 20 bp, synthetic construct
  source 1..20: mol_type = other DNA
tggctactttttgtattttt

SEQ ID NO: 63058 - DNA, 20 bp, synthetic construct
  source 1..20: mol_type = other DNA
ctggctactttttgtatttt

SEQ ID NO: 63059 - DNA, 20 bp, synthetic construct
  source 1..20: mol_type = other DNA
tctggctactttttgtattt

SEQ ID NO: 63060 - DNA, 20 bp, synthetic construct
  source 1..20: mol_type = other DNA
gtctggctactttttgtatt

SEQ ID NO: 63061 - DNA, 20 bp, synthetic construct
  source 1..20: mol_type = other DNA
tgtctggctactttttgtat

SEQ ID NO: 63062 - DNA, 20 bp, synthetic construct
  source 1..20: mol_type = other DNA
gtgtctggctactttttgta

SEQ ID NO: 63063 - DNA, 20 bp, synthetic construct
  source 1..20: mol_type = other DNA
cgtgtctggctactttttgt

SEQ ID NO: 63064 - DNA, 20 bp, synthetic construct
  source 1..20: mol_type = other DNA
ccgtgtctggctactttttg

SEQ ID NO: 63065 - DNA, 20 bp, synthetic construct
  source 1..20: mol_type = other DNA
accgtgtctggctacttttt

SEQ ID NO: 63066 - DNA, 20 bp, synthetic construct
  source 1..20: mol_type = other DNA
caccgtgtctggctactttt

SEQ ID NO: 63067 - DNA, 20 bp, synthetic construct
  source 1..20: mol_type = other DNA
ccaccgtgtctggctacttt

SEQ ID NO: 63068 - DNA, 20 bp, synthetic construct
  source 1..20: mol_type = other DNA
accaccgtgtctggctactt

SEQ ID NO: 63069 - DNA, 20 bp, synthetic construct
  source 1..20: mol_type = other DNA
taccaccgtgtctggctact

SEQ ID NO: 63070 - DNA, 20 bp, synthetic construct
  source 1..20: mol_type = other DNA
ataccaccgtgtctggctac

SEQ ID NO: 63071 - DNA, 20 bp, synthetic construct
  source 1..20: mol_type = other DNA
cataccaccgtgtctggcta

SEQ ID NO: 63072 - DNA, 20 bp, synthetic construct
  source 1..20: mol_type = other DNA
acataccaccgtgtctggct

SEQ ID NO: 63073 - DNA, 20 bp, synthetic construct
  source 1..20: mol_type = other DNA
tacataccaccgtgtctggc

SEQ ID NO: 63074 - DNA, 20 bp, synthetic construct
  source 1..20: mol_type = other DNA
gtacataccaccgtgtctgg

SEQ ID NO: 63075 - DNA, 20 bp, synthetic construct
  source 1..20: mol_type = other DNA
ggtacataccaccgtgtctg

SEQ ID NO: 63076 - DNA, 20 bp, synthetic construct
  source 1..20: mol_type = other DNA
aggtacataccaccgtgtct

SEQ ID NO: 63077 - DNA, 20 bp, synthetic construct
  source 1..20: mol_type = other DNA
caggtacataccaccgtgtc

SEQ ID NO: 63078 - DNA, 20 bp, synthetic construct
  source 1..20: mol_type = other DNA
acaggtacataccaccgtgt

SEQ ID NO: 63079 - DNA, 20 bp, synthetic construct
  source 1..20: mol_type = other DNA
tacaggtacataccaccgtg

SEQ ID NO: 63080 - DNA, 20 bp, synthetic construct
  source 1..20: mol_type = other DNA
ctacaggtacataccaccgt

SEQ ID NO: 63081 - DNA, 20 bp, synthetic construct
  source 1..20: mol_type = other DNA
actacaggtacataccaccg

SEQ ID NO: 63082 - DNA, 20 bp, synthetic construct
  source 1..20: mol_type = other DNA
gactacaggtacataccacc

SEQ ID NO: 63083 - DNA, 20 bp, synthetic construct
  source 1..20: mol_type = other DNA
ggactacaggtacataccac

SEQ ID NO: 63084 - DNA, 20 bp, synthetic construct
  source 1..20: mol_type = other DNA
gggactacaggtacatacca

SEQ ID NO: 63085 - DNA, 20 bp, synthetic construct
  source 1..20: mol_type = other DNA
tgggactacaggtacatacc

SEQ ID NO: 63086 - DNA, 20 bp, synthetic construct
  source 1..20: mol_type = other DNA
ctgggactacaggtacatac

SEQ ID NO: 63087 - DNA, 20 bp, synthetic construct
  source 1..20: mol_type = other DNA
gctgggactacaggtacata

SEQ ID NO: 63088 - DNA, 20 bp, synthetic construct
  source 1..20: mol_type = other DNA
agctgggactacaggtacat

SEQ ID NO: 63089 - DNA, 20 bp, synthetic construct
  source 1..20: mol_type = other DNA
tagctgggactacaggtaca

SEQ ID NO: 63090 - DNA, 20 bp, synthetic construct
  source 1..20: mol_type = other DNA
atagctgggactacaggtac

SEQ ID NO: 63091 - DNA, 20 bp, synthetic construct
  source 1..20: mol_type = other DNA
aatagctgggactacaggta

SEQ ID NO: 63092 - DNA, 20 bp, synthetic construct
  source 1..20: mol_type = other DNA
gaatagctgggactacaggt

SEQ ID NO: 63093 - DNA, 20 bp, synthetic construct
  source 1..20: mol_type = other DNA
cgaatagctgggactacagg

SEQ ID NO: 63094 - DNA, 20 bp, synthetic construct
  source 1..20: mol_type = other DNA
ccgaatagctgggactacag

SEQ ID NO: 63095 - DNA, 20 bp, synthetic construct
  source 1..20: mol_type = other DNA
cccgaatagctgggactaca

SEQ ID NO: 63096 - DNA, 20 bp, synthetic construct
  source 1..20: mol_type = other DNA
acccgaatagctgggactac

SEQ ID NO: 63097 - DNA, 20 bp, synthetic construct
  source 1..20: mol_type = other DNA
cacccgaatagctgggacta

SEQ ID NO: 63098 - DNA, 20 bp, synthetic construct
  source 1..20: mol_type = other DNA
ccacccgaatagctgggact

SEQ ID NO: 63099 - DNA, 20 bp, synthetic construct
  source 1..20: mol_type = other DNA
gccacccgaatagctgggac

SEQ ID NO: 63100 - DNA, 20 bp, synthetic construct
  source 1..20: mol_type = other DNA
tgccacccgaatagctggga

SEQ ID NO: 63101 - DNA, 20 bp, synthetic construct
  source 1..20: mol_type = other DNA
ctgccacccgaatagctggg

SEQ ID NO: 63102 - DNA, 20 bp, synthetic construct
  source 1..20: mol_type = other DNA
tctgccacccgaatagctgg

SEQ ID NO: 63103 - DNA, 20 bp, synthetic construct
  source 1..20: mol_type = other DNA
ctctgccacccgaatagctg

SEQ ID NO: 63104 - DNA, 20 bp, synthetic construct
  source 1..20: mol_type = other DNA
cctctgccacccgaatagct

SEQ ID NO: 63105 - DNA, 20 bp, synthetic construct
  source 1..20: mol_type = other DNA
acctctgccacccgaatagc

SEQ ID NO: 63106 - DNA, 20 bp, synthetic construct
  source 1..20: mol_type = other DNA
cacctctgccacccgaatag

SEQ ID NO: 63107 - DNA, 20 bp, synthetic construct
  source 1..20: mol_type = other DNA
tcacctctgccacccgaata

SEQ ID NO: 63108 - DNA, 20 bp, synthetic construct
  source 1..20: mol_type = other DNA
ctcacctctgccacccgaat

SEQ ID NO: 63109 - DNA, 20 bp, synthetic construct
  source 1..20: mol_type = other DNA
tctcacctctgccacccgaa

SEQ ID NO: 63110 - DNA, 20 bp, synthetic construct
  source 1..20: mol_type = other DNA
ctctcacctctgccacccga

SEQ ID NO: 63111 - DNA, 20 bp, synthetic construct
  source 1..20: mol_type = other DNA
cctctcacctctgccacccg

SEQ ID NO: 63112 - DNA, 20 bp, synthetic construct
  source 1..20: mol_type = other DNA
tcctctcacctctgccaccc

SEQ ID NO: 63113 - DNA, 20 bp, synthetic construct
  source 1..20: mol_type = other DNA
atcctctcacctctgccacc

SEQ ID NO: 63114 - DNA, 20 bp, synthetic construct
  source 1..20: mol_type = other DNA
gatcctctcacctctgccac

SEQ ID NO: 63115 - DNA, 20 bp, synthetic construct
  source 1..20: mol_type = other DNA
tgatcctctcacctctgcca

SEQ ID NO: 63116 - DNA, 20 bp, synthetic construct
  source 1..20: mol_type = other DNA
atgatcctctcacctctgcc

SEQ ID NO: 63117 - DNA, 20 bp, synthetic construct
  source 1..20: mol_type = other DNA
gatgatcctctcacctctgc

SEQ ID NO: 63118 - DNA, 20 bp, synthetic construct
  source 1..20: mol_type = other DNA
agatgatcctctcacctctg

SEQ ID NO: 63119 - DNA, 20 bp, synthetic construct
  source 1..20: mol_type = other DNA
cagatgatcctctcacctct

SEQ ID NO: 63120 - DNA, 20 bp, synthetic construct
  source 1..20: mol_type = other DNA
tcagatgatcctctcacctc

SEQ ID NO: 63121 - DNA, 20 bp, synthetic construct
  source 1..20: mol_type = other DNA
ctcagatgatcctctcacct

SEQ ID NO: 63122 - DNA, 20 bp, synthetic construct
  source 1..20: mol_type = other DNA
gctcagatgatcctctcacc

SEQ ID NO: 63123 - DNA, 20 bp, synthetic construct
  source 1..20: mol_type = other DNA
cgctcagatgatcctctcac

SEQ ID NO: 63124 - DNA, 20 bp, synthetic construct
  source 1..20: mol_type = other DNA
gcgctcagatgatcctctca

SEQ ID NO: 63125 - DNA, 20 bp, synthetic construct
  source 1..20: mol_type = other DNA
tgcgctcagatgatcctctc

SEQ ID NO: 63126 - DNA, 20 bp, synthetic construct
  source 1..20: mol_type = other DNA
ctgcgctcagatgatcctct

SEQ ID NO: 63127 - DNA, 20 bp, synthetic construct
  source 1..20: mol_type = other DNA
cctgcgctcagatgatcctc

SEQ ID NO: 63128 - DNA, 20 bp, synthetic construct
  source 1..20: mol_type = other DNA
ccctgcgctcagatgatcct

SEQ ID NO: 63129 - DNA, 20 bp, synthetic construct
  source 1..20: mol_type = other DNA
tccctgcgctcagatgatcc

SEQ ID NO: 63130 - DNA, 20 bp, synthetic construct
  source 1..20: mol_type = other DNA
ctccctgcgctcagatgatc

SEQ ID NO: 63131 - DNA, 20 bp, synthetic construct
  source 1..20: mol_type = other DNA
tctccctgcgctcagatgat

SEQ ID NO: 63132 - DNA, 20 bp, synthetic construct
  source 1..20: mol_type = other DNA
atctccctgcgctcagatga

SEQ ID NO: 63133 - DNA, 20 bp, synthetic construct
  source 1..20: mol_type = other DNA
aatctccctgcgctcagatg

SEQ ID NO: 63134 - DNA, 20 bp, synthetic construct
  source 1..20: mol_type = other DNA
caatctccctgcgctcagat

SEQ ID NO: 63135 - DNA, 20 bp, synthetic construct
  source 1..20: mol_type = other DNA
tcaatctccctgcgctcaga

SEQ ID NO: 63136 - DNA, 20 bp, synthetic construct
  source 1..20: mol_type = other DNA
ctcaatctccctgcgctcag

SEQ ID NO: 63137 - DNA, 20 bp, synthetic construct
  source 1..20: mol_type = other DNA
cctcaatctccctgcgctca

SEQ ID NO: 63138 - DNA, 20 bp, synthetic construct
  source 1..20: mol_type = other DNA
gcctcaatctccctgcgctc

SEQ ID NO: 63139 - DNA, 20 bp, synthetic construct
  source 1..20: mol_type = other DNA
agcctcaatctccctgcgct

SEQ ID NO: 63140 - DNA, 20 bp, synthetic construct
  source 1..20: mol_type = other DNA
cagcctcaatctccctgcgc

SEQ ID NO: 63141 - DNA, 20 bp, synthetic construct
  source 1..20: mol_type = other DNA
gcagcctcaatctccctgcg

SEQ ID NO: 63142 - DNA, 20 bp, synthetic construct
  source 1..20: mol_type = other DNA
tgcagcctcaatctccctgc

SEQ ID NO: 63143 - DNA, 20 bp, synthetic construct
  source 1..20: mol_type = other DNA
ctgcagcctcaatctccctg

SEQ ID NO: 63144 - DNA, 20 bp, synthetic construct
  source 1..20: mol_type = other DNA
actgcagcctcaatctccct

SEQ ID NO: 63145 - DNA, 20 bp, synthetic construct
  source 1..20: mol_type = other DNA
cactgcagcctcaatctccc

SEQ ID NO: 63146 - DNA, 20 bp, synthetic construct
  source 1..20: mol_type = other DNA
tcactgcagcctcaatctcc

SEQ ID NO: 63147 - DNA, 20 bp, synthetic construct
  source 1..20: mol_type = other DNA
ctcactgcagcctcaatctc

SEQ ID NO: 63148 - DNA, 20 bp, synthetic construct
  source 1..20: mol_type = other DNA
gctcactgcagcctcaatct

SEQ ID NO: 63149 - DNA, 20 bp, synthetic construct
  source 1..20: mol_type = other DNA
ggctcactgcagcctcaatc

SEQ ID NO: 63150 - DNA, 20 bp, synthetic construct
  source 1..20: mol_type = other DNA
tggctcactgcagcctcaat

SEQ ID NO: 63151 - DNA, 20 bp, synthetic construct
  source 1..20: mol_type = other DNA
ttggctcactgcagcctcaa

SEQ ID NO: 63152 - DNA, 20 bp, synthetic construct
  source 1..20: mol_type = other DNA
cttggctcactgcagcctca

SEQ ID NO: 63153 - DNA, 20 bp, synthetic construct
  source 1..20: mol_type = other DNA
acttggctcactgcagcctc

SEQ ID NO: 63154 - DNA, 20 bp, synthetic construct
  source 1..20: mol_type = other DNA
cacttggctcactgcagcct

SEQ ID NO: 63155 - DNA, 20 bp, synthetic construct
  source 1..20: mol_type = other DNA
tcacttggctcactgcagcc

SEQ ID NO: 63156 - DNA, 20 bp, synthetic construct
  source 1..20: mol_type = other DNA
ctcacttggctcactgcagc

SEQ ID NO: 63157 - DNA, 20 bp, synthetic construct
  source 1..20: mol_type = other DNA
tctcacttggctcactgcag

SEQ ID NO: 63158 - DNA, 20 bp, synthetic construct
  source 1..20: mol_type = other DNA
gtctcacttggctcactgca

SEQ ID NO: 63159 - DNA, 20 bp, synthetic construct
  source 1..20: mol_type = other DNA
ggtctcacttggctcactgc

SEQ ID NO: 63160 - DNA, 20 bp, synthetic construct
  source 1..20: mol_type = other DNA
gggtctcacttggctcactg

SEQ ID NO: 63161 - DNA, 20 bp, synthetic construct
  source 1..20: mol_type = other DNA
agggtctcacttggctcact

SEQ ID NO: 63162 - DNA, 20 bp, synthetic construct
  source 1..20: mol_type = other DNA
cagggtctcacttggctcac

SEQ ID NO: 63163 - DNA, 20 bp, synthetic construct
  source 1..20: mol_type = other DNA
ccagggtctcacttggctca

SEQ ID NO: 63164 - DNA, 20 bp, synthetic construct
  source 1..20: mol_type = other DNA
accagggtctcacttggctc

SEQ ID NO: 63165 - DNA, 20 bp, synthetic construct
  source 1..20: mol_type = other DNA
aaccagggtctcacttggct

SEQ ID NO: 63166 - DNA, 20 bp, synthetic construct
  source 1..20: mol_type = other DNA
aaaccagggtctcacttggc

SEQ ID NO: 63167 - DNA, 20 bp, synthetic construct
  source 1..20: mol_type = other DNA
gaaaccagggtctcacttgg

SEQ ID NO: 63168 - DNA, 20 bp, synthetic construct
  source 1..20: mol_type = other DNA
tgaaaccagggtctcacttg

SEQ ID NO: 63169 - DNA, 20 bp, synthetic construct
  source 1..20: mol_type = other DNA
ttgaaaccagggtctcactt

SEQ ID NO: 63170 - DNA, 20 bp, synthetic construct
  source 1..20: mol_type = other DNA
tttgaaaccagggtctcact

SEQ ID NO: 63171 - DNA, 20 bp, synthetic construct
  source 1..20: mol_type = other DNA
ttttgaaaccagggtctcac

SEQ ID NO: 63172 - DNA, 20 bp, synthetic construct
  source 1..20: mol_type = other DNA
tttttgaaaccagggtctca

SEQ ID NO: 63173 - DNA, 20 bp, synthetic construct
  source 1..20: mol_type = other DNA
ttttttgaaaccagggtctc

SEQ ID NO: 63174 - DNA, 20 bp, synthetic construct
  source 1..20: mol_type = other DNA
tttttttgaaaccagggtct

SEQ ID NO: 63175 - DNA, 20 bp, synthetic construct
  source 1..20: mol_type = other DNA
ttttttttgaaaccagggtc

SEQ ID NO: 63176 - DNA, 20 bp, synthetic construct
  source 1..20: mol_type = other DNA
tttttttttgaaaccagggt

SEQ ID NO: 63177 - DNA, 20 bp, synthetic construct
  source 1..20: mol_type = other DNA
ttttttttttgaaaccaggg

SEQ ID NO: 63178 - DNA, 20 bp, synthetic construct
  source 1..20: mol_type = other DNA
tttttttttttgaaaccagg

SEQ ID NO: 63179 - DNA, 20 bp, synthetic construct
  source 1..20: mol_type = other DNA
ctttttttttttgaaaccag

SEQ ID NO: 63180 - DNA, 20 bp, synthetic construct
  source 1..20: mol_type = other DNA
cctttttttttttgaaacca

SEQ ID NO: 63181 - DNA, 20 bp, synthetic construct
  source 1..20: mol_type = other DNA
acctttttttttttgaaacc

SEQ ID NO: 63182 - DNA, 20 bp, synthetic construct
  source 1..20: mol_type = other DNA
aacctttttttttttgaaac

SEQ ID NO: 63183 - DNA, 20 bp, synthetic construct
  source 1..20: mol_type = other DNA
taacctttttttttttgaaa

SEQ ID NO: 63184 - DNA, 20 bp, synthetic construct
  source 1..20: mol_type = other DNA
gtaacctttttttttttgaa

SEQ ID NO: 63185 - DNA, 20 bp, synthetic construct
  source 1..20: mol_type = other DNA
agtaacctttttttttttga

SEQ ID NO: 63186 - DNA, 20 bp, synthetic construct
  source 1..20: mol_type = other DNA
tagtaacctttttttttttg

SEQ ID NO: 63187 - DNA, 20 bp, synthetic construct
  source 1..20: mol_type = other DNA
ttagtaaccttttttttttt

SEQ ID NO: 63188 - DNA, 20 bp, synthetic construct
  source 1..20: mol_type = other DNA
attagtaacctttttttttt

SEQ ID NO: 63189 - DNA, 20 bp, synthetic construct
  source 1..20: mol_type = other DNA
aattagtaaccttttttttt

SEQ ID NO: 63190 - DNA, 20 bp, synthetic construct
  source 1..20: mol_type = other DNA
caattagtaacctttttttt

SEQ ID NO: 63191 - DNA, 20 bp, synthetic construct
  source 1..20: mol_type = other DNA
gcaattagtaaccttttttt

SEQ ID NO: 63192 - DNA, 20 bp, synthetic construct
  source 1..20: mol_type = other DNA
tgcaattagtaacctttttt

SEQ ID NO: 63193 - DNA, 20 bp, synthetic construct
  source 1..20: mol_type = other DNA
ctgcaattagtaaccttttt

SEQ ID NO: 63194 - DNA, 20 bp, synthetic construct
  source 1..20: mol_type = other DNA
actgcaattagtaacctttt

SEQ ID NO: 63195 - DNA, 20 bp, synthetic construct
  source 1..20: mol_type = other DNA
cactgcaattagtaaccttt

SEQ ID NO: 63196 - DNA, 20 bp, synthetic construct
  source 1..20: mol_type = other DNA
gcactgcaattagtaacctt

SEQ ID NO: 63197 - DNA, 20 bp, synthetic construct
  source 1..20: mol_type = other DNA
ggcactgcaattagtaacct

SEQ ID NO: 63198 - DNA, 20 bp, synthetic construct
  source 1..20: mol_type = other DNA
aggcactgcaattagtaacc

SEQ ID NO: 63199 - DNA, 20 bp, synthetic construct
  source 1..20: mol_type = other DNA
aaggcactgcaattagtaac

SEQ ID NO: 63200 - DNA, 20 bp, synthetic construct
  source 1..20: mol_type = other DNA
aaaggcactgcaattagtaa

SEQ ID NO: 63201 - DNA, 20 bp, synthetic construct
  source 1..20: mol_type = other DNA
aaaaggcactgcaattagta

SEQ ID NO: 63202 - DNA, 20 bp, synthetic construct
  source 1..20: mol_type = other DNA
taaaaggcactgcaattagt

SEQ ID NO: 63203 - DNA, 20 bp, synthetic construct
  source 1..20: mol_type = other DNA
ataaaaggcactgcaattag

SEQ ID NO: 63204 - DNA, 20 bp, synthetic construct
  source 1..20: mol_type = other DNA
gataaaaggcactgcaatta

SEQ ID NO: 63205 - DNA, 20 bp, synthetic construct
  source 1..20: mol_type = other DNA
agataaaaggcactgcaatt

SEQ ID NO: 63206 - DNA, 20 bp, synthetic construct
  source 1..20: mol_type = other DNA
aagataaaaggcactgcaat

SEQ ID NO: 63207 - DNA, 20 bp, synthetic construct
  source 1..20: mol_type = other DNA
taagataaaaggcactgcaa

SEQ ID NO: 63208 - DNA, 20 bp, synthetic construct
  source 1..20: mol_type = other DNA
ataagataaaaggcactgca

SEQ ID NO: 63209 - DNA, 20 bp, synthetic construct
  source 1..20: mol_type = other DNA
aataagataaaaggcactgc

SEQ ID NO: 63210 - DNA, 20 bp, synthetic construct
  source 1..20: mol_type = other DNA
aaataagataaaaggcactg

SEQ ID NO: 63211 - DNA, 20 bp, synthetic construct
  source 1..20: mol_type = other DNA
taaataagataaaaggcact

SEQ ID NO: 63212 - DNA, 20 bp, synthetic construct
  source 1..20: mol_type = other DNA
ttaaataagataaaaggcac

SEQ ID NO: 63213 - DNA, 20 bp, synthetic construct
  source 1..20: mol_type = other DNA
attaaataagataaaaggca

SEQ ID NO: 63214 - DNA, 20 bp, synthetic construct
  source 1..20: mol_type = other DNA
cattaaataagataaaaggc

SEQ ID NO: 63215 - DNA, 20 bp, synthetic construct
  source 1..20: mol_type = other DNA
ccattaaataagataaaagg

SEQ ID NO: 63216 - DNA, 20 bp, synthetic construct
  source 1..20: mol_type = other DNA
cccattaaataagataaaag

SEQ ID NO: 63217 - DNA, 20 bp, synthetic construct
  source 1..20: mol_type = other DNA
gcccattaaataagataaaa

SEQ ID NO: 63218 - DNA, 20 bp, synthetic construct
  source 1..20: mol_type = other DNA
agcccattaaataagataaa

SEQ ID NO: 63219 - DNA, 20 bp, synthetic construct
  source 1..20: mol_type = other DNA
aagcccattaaataagataa

SEQ ID NO: 63220 - DNA, 20 bp, synthetic construct
  source 1..20: mol_type = other DNA
taagcccattaaataagata

SEQ ID NO: 63221 - DNA, 20 bp, synthetic construct
  source 1..20: mol_type = other DNA
ctaagcccattaaataagat

SEQ ID NO: 63222 - DNA, 20 bp, synthetic construct
  source 1..20: mol_type = other DNA
actaagcccattaaataaga

SEQ ID NO: 63223 - DNA, 20 bp, synthetic construct
  source 1..20: mol_type = other DNA
gactaagcccattaaataag

SEQ ID NO: 63224 - DNA, 20 bp, synthetic construct
  source 1..20: mol_type = other DNA
tgactaagcccattaaataa

SEQ ID NO: 63225 - DNA, 20 bp, synthetic construct
  source 1..20: mol_type = other DNA
ttgactaagcccattaaata

SEQ ID NO: 63226 - DNA, 20 bp, synthetic construct
  source 1..20: mol_type = other DNA
tttgactaagcccattaaat

SEQ ID NO: 63227 - DNA, 20 bp, synthetic construct
  source 1..20: mol_type = other DNA
gtttgactaagcccattaaa

SEQ ID NO: 63228 - DNA, 20 bp, synthetic construct
  source 1..20: mol_type = other DNA
agtttgactaagcccattaa

SEQ ID NO: 63229 - DNA, 20 bp, synthetic construct
  source 1..20: mol_type = other DNA
tagtttgactaagcccatta

SEQ ID NO: 63230 - DNA, 20 bp, synthetic construct
  source 1..20: mol_type = other DNA
ttagtttgactaagcccatt

SEQ ID NO: 63231 - DNA, 20 bp, synthetic construct
  source 1..20: mol_type = other DNA
cttagtttgactaagcccat

SEQ ID NO: 63232 - DNA, 20 bp, synthetic construct
  source 1..20: mol_type = other DNA
tcttagtttgactaagccca

SEQ ID NO: 63233 - DNA, 20 bp, synthetic construct
  source 1..20: mol_type = other DNA
atcttagtttgactaagccc

SEQ ID NO: 63234 - DNA, 20 bp, synthetic construct
  source 1..20: mol_type = other DNA
catcttagtttgactaagcc

SEQ ID NO: 63235 - DNA, 20 bp, synthetic construct
  source 1..20: mol_type = other DNA
tcatcttagtttgactaagc

SEQ ID NO: 63236 - DNA, 20 bp, synthetic construct
  source 1..20: mol_type = other DNA
atcatcttagtttgactaag

SEQ ID NO: 63237 - DNA, 20 bp, synthetic construct
  source 1..20: mol_type = other DNA
catcatcttagtttgactaa

SEQ ID NO: 63238 - DNA, 20 bp, synthetic construct
  source 1..20: mol_type = other DNA
acatcatcttagtttgacta

SEQ ID NO: 63239 - DNA, 20 bp, synthetic construct
  source 1..20: mol_type = other DNA
tacatcatcttagtttgact

SEQ ID NO: 63240 - DNA, 20 bp, synthetic construct
  source 1..20: mol_type = other DNA
atacatcatcttagtttgac

SEQ ID NO: 63241 - DNA, 20 bp, synthetic construct
  source 1..20: mol_type = other DNA
aatacatcatcttagtttga

SEQ ID NO: 63242 - DNA, 20 bp, synthetic construct
  source 1..20: mol_type = other DNA
aaatacatcatcttagtttg

SEQ ID NO: 63243 - DNA, 20 bp, synthetic construct
  source 1..20: mol_type = other DNA
aaaatacatcatcttagttt

SEQ ID NO: 63244 - DNA, 20 bp, synthetic construct
  source 1..20: mol_type = other DNA
taaaatacatcatcttagtt

SEQ ID NO: 63245 - DNA, 20 bp, synthetic construct
  source 1..20: mol_type = other DNA
ataaaatacatcatcttagt

SEQ ID NO: 63246 - DNA, 20 bp, synthetic construct
  source 1..20: mol_type = other DNA
gataaaatacatcatcttag

SEQ ID NO: 63247 - DNA, 20 bp, synthetic construct
  source 1..20: mol_type = other DNA
agataaaatacatcatctta

SEQ ID NO: 63248 - DNA, 20 bp, synthetic construct
  source 1..20: mol_type = other DNA
aagataaaatacatcatctt

SEQ ID NO: 63249 - DNA, 20 bp, synthetic construct
  source 1..20: mol_type = other DNA
taagataaaatacatcatct

SEQ ID NO: 63250 - DNA, 20 bp, synthetic construct
  source 1..20: mol_type = other DNA
ataagataaaatacatcatc

SEQ ID NO: 63251 - DNA, 20 bp, synthetic construct
  source 1..20: mol_type = other DNA
tataagataaaatacatcat

SEQ ID NO: 63252 - DNA, 20 bp, synthetic construct
  source 1..20: mol_type = other DNA
ttataagataaaatacatca

SEQ ID NO: 63253 - DNA, 20 bp, synthetic construct
  source 1..20: mol_type = other DNA
tttataagataaaatacatc

SEQ ID NO: 63254 - DNA, 20 bp, synthetic construct
  source 1..20: mol_type = other DNA
atttataagataaaatacat

SEQ ID NO: 63255 - DNA, 20 bp, synthetic construct
  source 1..20: mol_type = other DNA
catttataagataaaataca

SEQ ID NO: 63256 - DNA, 20 bp, synthetic construct
  source 1..20: mol_type = other DNA
acatttataagataaaatac

SEQ ID NO: 63257 - DNA, 20 bp, synthetic construct
  source 1..20: mol_type = other DNA
aacatttataagataaaata

SEQ ID NO: 63258 - DNA, 20 bp, synthetic construct
  source 1..20: mol_type = other DNA
aaacatttataagataaaat

SEQ ID NO: 63259 - DNA, 20 bp, synthetic construct
  source 1..20: mol_type = other DNA
aaaacatttataagataaaa

SEQ ID NO: 63260 - DNA, 20 bp, synthetic construct
  source 1..20: mol_type = other DNA
gaaaacatttataagataaa

SEQ ID NO: 63261 - DNA, 20 bp, synthetic construct
  source 1..20: mol_type = other DNA
ggaaaacatttataagataa

SEQ ID NO: 63262 - DNA, 20 bp, synthetic construct
  source 1..20: mol_type = other DNA
gggaaaacatttataagata

SEQ ID NO: 63263 - DNA, 20 bp, synthetic construct
  source 1..20: mol_type = other DNA
agggaaaacatttataagat

SEQ ID NO: 63264 - DNA, 20 bp, synthetic construct
  source 1..20: mol_type = other DNA
aagggaaaacatttataaga

SEQ ID NO: 63265 - DNA, 20 bp, synthetic construct
  source 1..20: mol_type = other DNA
caagggaaaacatttataag

SEQ ID NO: 63266 - DNA, 20 bp, synthetic construct
  source 1..20: mol_type = other DNA
tcaagggaaaacatttataa

SEQ ID NO: 63267 - DNA, 20 bp, synthetic construct
  source 1..20: mol_type = other DNA
ttcaagggaaaacatttata

SEQ ID NO: 63268 - DNA, 20 bp, synthetic construct
  source 1..20: mol_type = other DNA
attcaagggaaaacatttat

SEQ ID NO: 63269 - DNA, 20 bp, synthetic construct
  source 1..20: mol_type = other DNA
aattcaagggaaaacattta

SEQ ID NO: 63270 - DNA, 20 bp, synthetic construct
  source 1..20: mol_type = other DNA
aaattcaagggaaaacattt

SEQ ID NO: 63271 - DNA, 20 bp, synthetic construct
  source 1..20: mol_type = other DNA
aaaattcaagggaaaacatt

SEQ ID NO: 63272 - DNA, 20 bp, synthetic construct
  source 1..20: mol_type = other DNA
taaaattcaagggaaaacat

SEQ ID NO: 63273 - DNA, 20 bp, synthetic construct
  source 1..20: mol_type = other DNA
ttaaaattcaagggaaaaca

SEQ ID NO: 63274 - DNA, 20 bp, synthetic construct
  source 1..20: mol_type = other DNA
gttaaaattcaagggaaaac

SEQ ID NO: 63275 - DNA, 20 bp, synthetic construct
  source 1..20: mol_type = other DNA
agttaaaattcaagggaaaa

SEQ ID NO: 63276 - DNA, 20 bp, synthetic construct
  source 1..20: mol_type = other DNA
cagttaaaattcaagggaaa

SEQ ID NO: 63277 - DNA, 20 bp, synthetic construct
  source 1..20: mol_type = other DNA
tcagttaaaattcaagggaa

SEQ ID NO: 63278 - DNA, 20 bp, synthetic construct
  source 1..20: mol_type = other DNA
ttcagttaaaattcaaggga

SEQ ID NO: 63279 - DNA, 20 bp, synthetic construct
  source 1..20: mol_type = other DNA
cttcagttaaaattcaaggg

SEQ ID NO: 63280 - DNA, 20 bp, synthetic construct
  source 1..20: mol_type = other DNA
tcttcagttaaaattcaagg

SEQ ID NO: 63281 - DNA, 20 bp, synthetic construct
  source 1..20: mol_type = other DNA
ttcttcagttaaaattcaag

SEQ ID NO: 63282 - DNA, 20 bp, synthetic construct
  source 1..20: mol_type = other DNA
attcttcagttaaaattcaa

SEQ ID NO: 63283 - DNA, 20 bp, synthetic construct
  source 1..20: mol_type = other DNA
gattcttcagttaaaattca

SEQ ID NO: 63284 - DNA, 20 bp, synthetic construct
  source 1..20: mol_type = other DNA
ggattcttcagttaaaattc

SEQ ID NO: 63285 - DNA, 20 bp, synthetic construct
  source 1..20: mol_type = other DNA
tggattcttcagttaaaatt

SEQ ID NO: 63286 - DNA, 20 bp, synthetic construct
  source 1..20: mol_type = other DNA
ttggattcttcagttaaaat

SEQ ID NO: 63287 - DNA, 20 bp, synthetic construct
  source 1..20: mol_type = other DNA
attggattcttcagttaaaa

SEQ ID NO: 63288 - DNA, 20 bp, synthetic construct
  source 1..20: mol_type = other DNA
aattggattcttcagttaaa

SEQ ID NO: 63289 - DNA, 20 bp, synthetic construct
  source 1..20: mol_type = other DNA
aaattggattcttcagttaa

SEQ ID NO: 63290 - DNA, 20 bp, synthetic construct
  source 1..20: mol_type = other DNA
caaattggattcttcagtta

SEQ ID NO: 63291 - DNA, 20 bp, synthetic construct
  source 1..20: mol_type = other DNA
acaaattggattcttcagtt

SEQ ID NO: 63292 - DNA, 20 bp, synthetic construct
  source 1..20: mol_type = other DNA
tacaaattggattcttcagt

SEQ ID NO: 63293 - DNA, 20 bp, synthetic construct
  source 1..20: mol_type = other DNA
gtacaaattggattcttcag

SEQ ID NO: 63294 - DNA, 20 bp, synthetic construct
  source 1..20: mol_type = other DNA
ggtacaaattggattcttca

SEQ ID NO: 63295 - DNA, 20 bp, synthetic construct
  source 1..20: mol_type = other DNA
aggtacaaattggattcttc

SEQ ID NO: 63296 - DNA, 20 bp, synthetic construct
  source 1..20: mol_type = other DNA
gaggtacaaattggattctt

SEQ ID NO: 63297 - DNA, 20 bp, synthetic construct
  source 1..20: mol_type = other DNA
agaggtacaaattggattct

SEQ ID NO: 63298 - DNA, 20 bp, synthetic construct
  source 1..20: mol_type = other DNA
gagaggtacaaattggattc

SEQ ID NO: 63299 - DNA, 20 bp, synthetic construct
  source 1..20: mol_type = other DNA
tgagaggtacaaattggatt

SEQ ID NO: 63300 - DNA, 20 bp, synthetic construct
  source 1..20: mol_type = other DNA
gtgagaggtacaaattggat

SEQ ID NO: 63301 - DNA, 20 bp, synthetic construct
  source 1..20: mol_type = other DNA
tgtgagaggtacaaattgga

SEQ ID NO: 63302 - DNA, 20 bp, synthetic construct
  source 1..20: mol_type = other DNA
ttgtgagaggtacaaattgg

SEQ ID NO: 63303 - DNA, 20 bp, synthetic construct
  source 1..20: mol_type = other DNA
tttgtgagaggtacaaattg

SEQ ID NO: 63304 - DNA, 20 bp, synthetic construct
  source 1..20: mol_type = other DNA
gtttgtgagaggtacaaatt

SEQ ID NO: 63305 - DNA, 20 bp, synthetic construct
  source 1..20: mol_type = other DNA
tgtttgtgagaggtacaaat

SEQ ID NO: 63306 - DNA, 20 bp, synthetic construct
  source 1..20: mol_type = other DNA
ctgtttgtgagaggtacaaa

SEQ ID NO: 63307 - DNA, 20 bp, synthetic construct
  source 1..20: mol_type = other DNA
tctgtttgtgagaggtacaa

SEQ ID NO: 63308 - DNA, 20 bp, synthetic construct
  source 1..20: mol_type = other DNA
ttctgtttgtgagaggtaca

SEQ ID NO: 63309 - DNA, 20 bp, synthetic construct
  source 1..20: mol_type = other DNA
attctgtttgtgagaggtac

SEQ ID NO: 63310 - DNA, 20 bp, synthetic construct
  source 1..20: mol_type = other DNA
cattctgtttgtgagaggta

SEQ ID NO: 63311 - DNA, 20 bp, synthetic construct
  source 1..20: mol_type = other DNA
acattctgtttgtgagaggt

SEQ ID NO: 63312 - DNA, 20 bp, synthetic construct
  source 1..20: mol_type = other DNA
tacattctgtttgtgagagg

SEQ ID NO: 63313 - DNA, 20 bp, synthetic construct
  source 1..20: mol_type = other DNA
atacattctgtttgtgagag

SEQ ID NO: 63314 - DNA, 20 bp, synthetic construct
  source 1..20: mol_type = other DNA
aatacattctgtttgtgaga

SEQ ID NO: 63315 - DNA, 20 bp, synthetic construct
  source 1..20: mol_type = other DNA
taatacattctgtttgtgag

SEQ ID NO: 63316 - DNA, 20 bp, synthetic construct
  source 1..20: mol_type = other DNA
ctaatacattctgtttgtga

SEQ ID NO: 63317 - DNA, 20 bp, synthetic construct
  source 1..20: mol_type = other DNA
actaatacattctgtttgtg

SEQ ID NO: 63318 - DNA, 20 bp, synthetic construct
  source 1..20: mol_type = other DNA
tactaatacattctgtttgt

SEQ ID NO: 63319 - DNA, 20 bp, synthetic construct
  source 1..20: mol_type = other DNA
ttactaatacattctgtttg

SEQ ID NO: 63320 - DNA, 20 bp, synthetic construct
  source 1..20: mol_type = other DNA
cttactaatacattctgttt

SEQ ID NO: 63321 - DNA, 20 bp, synthetic construct
  source 1..20: mol_type = other DNA
ccttactaatacattctgtt

SEQ ID NO: 63322 - DNA, 20 bp, synthetic construct
  source 1..20: mol_type = other DNA
tccttactaatacattctgt

SEQ ID NO: 63323 - DNA, 20 bp, synthetic construct
  source 1..20: mol_type = other DNA
ttccttactaatacattctg

SEQ ID NO: 63324 - DNA, 20 bp, synthetic construct
  source 1..20: mol_type = other DNA
tttccttactaatacattct

SEQ ID NO: 63325 - DNA, 20 bp, synthetic construct
  source 1..20: mol_type = other DNA
ttttccttactaatacattc

SEQ ID NO: 63326 - DNA, 20 bp, synthetic construct
  source 1..20: mol_type = other DNA
attttccttactaatacatt

SEQ ID NO: 63327 - DNA, 20 bp, synthetic construct
  source 1..20: mol_type = other DNA
tattttccttactaatacat

SEQ ID NO: 63328 - DNA, 20 bp, synthetic construct
  source 1..20: mol_type = other DNA
ttattttccttactaataca

SEQ ID NO: 63329 - DNA, 20 bp, synthetic construct
  source 1..20: mol_type = other DNA
tttattttccttactaatac

SEQ ID NO: 63330 - DNA, 20 bp, synthetic construct
  source 1..20: mol_type = other DNA
atttattttccttactaata

SEQ ID NO: 63331 - DNA, 20 bp, synthetic construct
  source 1..20: mol_type = other DNA
tatttattttccttactaat

SEQ ID NO: 63332 - DNA, 20 bp, synthetic construct
  source 1..20: mol_type = other DNA
gtatttattttccttactaa

SEQ ID NO: 63333 - DNA, 20 bp, synthetic construct
  source 1..20: mol_type = other DNA
agtatttattttccttacta

SEQ ID NO: 63334 - DNA, 20 bp, synthetic construct
  source 1..20: mol_type = other DNA
cagtatttattttccttact

SEQ ID NO: 63335 - DNA, 20 bp, synthetic construct
  source 1..20: mol_type = other DNA
gcagtatttattttccttac

SEQ ID NO: 63336 - DNA, 20 bp, synthetic construct
  source 1..20: mol_type = other DNA
agcagtatttattttcctta

SEQ ID NO: 63337 - DNA, 20 bp, synthetic construct
  source 1..20: mol_type = other DNA
aagcagtatttattttcctt

SEQ ID NO: 63338 - DNA, 20 bp, synthetic construct
  source 1..20: mol_type = other DNA
aaagcagtatttattttcct

SEQ ID NO: 63339 - DNA, 20 bp, synthetic construct
  source 1..20: mol_type = other DNA
aaaagcagtatttattttcc

SEQ ID NO: 63340 - DNA, 20 bp, synthetic construct
  source 1..20: mol_type = other DNA
aaaaagcagtatttattttc

SEQ ID NO: 63341 - DNA, 20 bp, synthetic construct
  source 1..20: mol_type = other DNA
taaaaagcagtatttatttt

SEQ ID NO: 63342 - DNA, 20 bp, synthetic construct
  source 1..20: mol_type = other DNA
ataaaaagcagtatttattt

SEQ ID NO: 63343 - DNA, 20 bp, synthetic construct
  source 1..20: mol_type = other DNA
aataaaaagcagtatttatt

SEQ ID NO: 63344 - DNA, 20 bp, synthetic construct
  source 1..20: mol_type = other DNA
taataaaaagcagtatttat

SEQ ID NO: 63345 - DNA, 20 bp, synthetic construct
  source 1..20: mol_type = other DNA
gtaataaaaagcagtattta

SEQ ID NO: 63346 - DNA, 20 bp, synthetic construct
  source 1..20: mol_type = other DNA
agtaataaaaagcagtattt

SEQ ID NO: 63347 - DNA, 20 bp, synthetic construct
  source 1..20: mol_type = other DNA
aagtaataaaaagcagtatt

SEQ ID NO: 63348 - DNA, 20 bp, synthetic construct
  source 1..20: mol_type = other DNA
taagtaataaaaagcagtat

SEQ ID NO: 63349 - DNA, 20 bp, synthetic construct
  source 1..20: mol_type = other DNA
ttaagtaataaaaagcagta

SEQ ID NO: 63350 - DNA, 20 bp, synthetic construct
  source 1..20: mol_type = other DNA
tttaagtaataaaaagcagt

SEQ ID NO: 63351 - DNA, 20 bp, synthetic construct
  source 1..20: mol_type = other DNA
atttaagtaataaaaagcag

SEQ ID NO: 63352 - DNA, 20 bp, synthetic construct
  source 1..20: mol_type = other DNA
tatttaagtaataaaaagca

SEQ ID NO: 63353 - DNA, 20 bp, synthetic construct
  source 1..20: mol_type = other DNA
ctatttaagtaataaaaagc

SEQ ID NO: 63354 - DNA, 20 bp, synthetic construct
  source 1..20: mol_type = other DNA
cctatttaagtaataaaaag

SEQ ID NO: 63355 - DNA, 20 bp, synthetic construct
  source 1..20: mol_type = other DNA
tcctatttaagtaataaaaa

SEQ ID NO: 63356 - DNA, 20 bp, synthetic construct
  source 1..20: mol_type = other DNA
atcctatttaagtaataaaa

SEQ ID NO: 63357 - DNA, 20 bp, synthetic construct
  source 1..20: mol_type = other DNA
tatcctatttaagtaataaa

SEQ ID NO: 63358 - DNA, 20 bp, synthetic construct
  source 1..20: mol_type = other DNA
atatcctatttaagtaataa

SEQ ID NO: 63359 - DNA, 20 bp, synthetic construct
  source 1..20: mol_type = other DNA
tatatcctatttaagtaata

SEQ ID NO: 63360 - DNA, 20 bp, synthetic construct
  source 1..20: mol_type = other DNA
atatatcctatttaagtaat

SEQ ID NO: 63361 - DNA, 20 bp, synthetic construct
  source 1..20: mol_type = other DNA
aatatatcctatttaagtaa

SEQ ID NO: 63362 - DNA, 20 bp, synthetic construct
  source 1..20: mol_type = other DNA
aaatatatcctatttaagta

SEQ ID NO: 63363 - DNA, 20 bp, synthetic construct
  source 1..20: mol_type = other DNA
aaaatatatcctatttaagt

SEQ ID NO: 63364 - DNA, 20 bp, synthetic construct
  source 1..20: mol_type = other DNA
aaaaatatatcctatttaag

SEQ ID NO: 63365 - DNA, 20 bp, synthetic construct
  source 1..20: mol_type = other DNA
gaaaaatatatcctatttaa

SEQ ID NO: 63366 - DNA, 20 bp, synthetic construct
  source 1..20: mol_type = other DNA
agaaaaatatatcctattta

SEQ ID NO: 63367 - DNA, 20 bp, synthetic construct
  source 1..20: mol_type = other DNA
gagaaaaatatatcctattt

SEQ ID NO: 63368 - DNA, 20 bp, synthetic construct
  source 1..20: mol_type = other DNA
agagaaaaatatatcctatt

SEQ ID NO: 63369 - DNA, 20 bp, synthetic construct
  source 1..20: mol_type = other DNA
aagagaaaaatatatcctat

SEQ ID NO: 63370 - DNA, 20 bp, synthetic construct
  source 1..20: mol_type = other DNA
taagagaaaaatatatccta

SEQ ID NO: 63371 - DNA, 20 bp, synthetic construct
  source 1..20: mol_type = other DNA
ctaagagaaaaatatatcct

SEQ ID NO: 63372 - DNA, 20 bp, synthetic construct
  source 1..20: mol_type = other DNA
cctaagagaaaaatatatcc

SEQ ID NO: 63373 - DNA, 20 bp, synthetic construct
  source 1..20: mol_type = other DNA
ccctaagagaaaaatatatc

SEQ ID NO: 63374 - DNA, 20 bp, synthetic construct
  source 1..20: mol_type = other DNA
tccctaagagaaaaatatat

SEQ ID NO: 63375 - DNA, 20 bp, synthetic construct
  source 1..20: mol_type = other DNA
atccctaagagaaaaatata

SEQ ID NO: 63376 - DNA, 20 bp, synthetic construct
  source 1..20: mol_type = other DNA
aatccctaagagaaaaatat

SEQ ID NO: 63377 - DNA, 20 bp, synthetic construct
  source 1..20: mol_type = other DNA
aaatccctaagagaaaaata

SEQ ID NO: 63378 - DNA, 20 bp, synthetic construct
  source 1..20: mol_type = other DNA
aaaatccctaagagaaaaat

SEQ ID NO: 63379 - DNA, 20 bp, synthetic construct
  source 1..20: mol_type = other DNA
aaaaatccctaagagaaaaa

SEQ ID NO: 63380 - DNA, 20 bp, synthetic construct
  source 1..20: mol_type = other DNA
aaaaaatccctaagagaaaa

SEQ ID NO: 63381 - DNA, 20 bp, synthetic construct
  source 1..20: mol_type = other DNA
aaaaaaatccctaagagaaa

SEQ ID NO: 63382 - DNA, 20 bp, synthetic construct
  source 1..20: mol_type = other DNA
aaaaaaaatccctaagagaa

SEQ ID NO: 63383 - DNA, 20 bp, synthetic construct
  source 1..20: mol_type = other DNA
gaaaaaaaatccctaagaga

SEQ ID NO: 63384 - DNA, 20 bp, synthetic construct
  source 1..20: mol_type = other DNA
agaaaaaaaatccctaagag

SEQ ID NO: 63385 - DNA, 20 bp, synthetic construct
  source 1..20: mol_type = other DNA
tagaaaaaaaatccctaaga

SEQ ID NO: 63386 - DNA, 20 bp, synthetic construct
  source 1..20: mol_type = other DNA
atagaaaaaaaatccctaag

SEQ ID NO: 63387 - DNA, 20 bp, synthetic construct
  source 1..20: mol_type = other DNA
aatagaaaaaaaatccctaa

SEQ ID NO: 63388 - DNA, 20 bp, synthetic construct
  source 1..20: mol_type = other DNA
aaatagaaaaaaaatcccta

SEQ ID NO: 63389 - DNA, 20 bp, synthetic construct
  source 1..20: mol_type = other DNA
aaaatagaaaaaaaatccct

SEQ ID NO: 63390 - DNA, 20 bp, synthetic construct
  source 1..20: mol_type = other DNA
taaaatagaaaaaaaatccc

SEQ ID NO: 63391 - DNA, 20 bp, synthetic construct
  source 1..20: mol_type = other DNA
ataaaatagaaaaaaaatcc

SEQ ID NO: 63392 - DNA, 20 bp, synthetic construct
  source 1..20: mol_type = other DNA
gataaaatagaaaaaaaatc

SEQ ID NO: 63393 - DNA, 20 bp, synthetic construct
  source 1..20: mol_type = other DNA
agataaaatagaaaaaaaat

SEQ ID NO: 63394 - DNA, 20 bp, synthetic construct
  source 1..20: mol_type = other DNA
gagataaaatagaaaaaaaa

SEQ ID NO: 63395 - DNA, 20 bp, synthetic construct
  source 1..20: mol_type = other DNA
tgagataaaatagaaaaaaa

SEQ ID NO: 63396 - DNA, 20 bp, synthetic construct
  source 1..20: mol_type = other DNA
gtgagataaaatagaaaaaa

SEQ ID NO: 63397 - DNA, 20 bp, synthetic construct
  source 1..20: mol_type = other DNA
agtgagataaaatagaaaaa

SEQ ID NO: 63398 - DNA, 20 bp, synthetic construct
  source 1..20: mol_type = other DNA
aagtgagataaaatagaaaa

SEQ ID NO: 63399 - DNA, 20 bp, synthetic construct
  source 1..20: mol_type = other DNA
aaagtgagataaaatagaaa

SEQ ID NO: 63400 - DNA, 20 bp, synthetic construct
  source 1..20: mol_type = other DNA
taaagtgagataaaatagaa

SEQ ID NO: 63401 - DNA, 20 bp, synthetic construct
  source 1..20: mol_type = other DNA
ataaagtgagataaaataga

SEQ ID NO: 63402 - DNA, 20 bp, synthetic construct
  source 1..20: mol_type = other DNA
gataaagtgagataaaatag

SEQ ID NO: 63403 - DNA, 20 bp, synthetic construct
  source 1..20: mol_type = other DNA
cgataaagtgagataaaata

SEQ ID NO: 63404 - DNA, 20 bp, synthetic construct
  source 1..20: mol_type = other DNA
acgataaagtgagataaaat

SEQ ID NO: 63405 - DNA, 20 bp, synthetic construct
  source 1..20: mol_type = other DNA
tacgataaagtgagataaaa

SEQ ID NO: 63406 - DNA, 20 bp, synthetic construct
  source 1..20: mol_type = other DNA
ctacgataaagtgagataaa

SEQ ID NO: 63407 - DNA, 20 bp, synthetic construct
  source 1..20: mol_type = other DNA
actacgataaagtgagataa

SEQ ID NO: 63408 - DNA, 20 bp, synthetic construct
  source 1..20: mol_type = other DNA
cactacgataaagtgagata

SEQ ID NO: 63409 - DNA, 20 bp, synthetic construct
  source 1..20: mol_type = other DNA
gcactacgataaagtgagat

SEQ ID NO: 63410 - DNA, 20 bp, synthetic construct
  source 1..20: mol_type = other DNA
agcactacgataaagtgaga

SEQ ID NO: 63411 - DNA, 20 bp, synthetic construct
  source 1..20: mol_type = other DNA
tagcactacgataaagtgag

SEQ ID NO: 63412 - DNA, 20 bp, synthetic construct
  source 1..20: mol_type = other DNA
ctagcactacgataaagtga

SEQ ID NO: 63413 - DNA, 20 bp, synthetic construct
  source 1..20: mol_type = other DNA
tctagcactacgataaagtg

SEQ ID NO: 63414 - DNA, 20 bp, synthetic construct
  source 1..20: mol_type = other DNA
ttctagcactacgataaagt

SEQ ID NO: 63415 - DNA, 20 bp, synthetic construct
  source 1..20: mol_type = other DNA
tttctagcactacgataaag

SEQ ID NO: 63416 - DNA, 20 bp, synthetic construct
  source 1..20: mol_type = other DNA
ttttctagcactacgataaa

SEQ ID NO: 63417 - DNA, 20 bp, synthetic construct
  source 1..20: mol_type = other DNA
attttctagcactacgataa

SEQ ID NO: 63418 - DNA, 20 bp, synthetic construct
  source 1..20: mol_type = other DNA
aattttctagcactacgata

SEQ ID NO: 63419 - DNA, 20 bp, synthetic construct
  source 1..20: mol_type = other DNA
aaattttctagcactacgat

SEQ ID NO: 63420 - DNA, 20 bp, synthetic construct
  source 1..20: mol_type = other DNA
taaattttctagcactacga

SEQ ID NO: 63421 - DNA, 20 bp, synthetic construct
  source 1..20: mol_type = other DNA
ttaaattttctagcactacg

SEQ ID NO: 63422 - DNA, 20 bp, synthetic construct
  source 1..20: mol_type = other DNA
attaaattttctagcactac

SEQ ID NO: 63423 - DNA, 20 bp, synthetic construct
  source 1..20: mol_type = other DNA
gattaaattttctagcacta

SEQ ID NO: 63424 - DNA, 20 bp, synthetic construct
  source 1..20: mol_type = other DNA
tgattaaattttctagcact

SEQ ID NO: 63425 - DNA, 20 bp, synthetic construct
  source 1..20: mol_type = other DNA
atgattaaattttctagcac

SEQ ID NO: 63426 - DNA, 20 bp, synthetic construct
  source 1..20: mol_type = other DNA
aatgattaaattttctagca

SEQ ID NO: 63427 - DNA, 20 bp, synthetic construct
  source 1..20: mol_type = other DNA
gaatgattaaattttctagc

SEQ ID NO: 63428 - DNA, 20 bp, synthetic construct
  source 1..20: mol_type = other DNA
tgaatgattaaattttctag

SEQ ID NO: 63429 - DNA, 20 bp, synthetic construct
  source 1..20: mol_type = other DNA
atgaatgattaaattttcta

SEQ ID NO: 63430 - DNA, 20 bp, synthetic construct
  source 1..20: mol_type = other DNA
aatgaatgattaaattttct

SEQ ID NO: 63431 - DNA, 20 bp, synthetic construct
  source 1..20: mol_type = other DNA
aaatgaatgattaaattttc

SEQ ID NO: 63432 - DNA, 20 bp, synthetic construct
  source 1..20: mol_type = other DNA
caaatgaatgattaaatttt

SEQ ID NO: 63433 - DNA, 20 bp, synthetic construct
  source 1..20: mol_type = other DNA
tcaaatgaatgattaaattt

SEQ ID NO: 63434 - DNA, 20 bp, synthetic construct
  source 1..20: mol_type = other DNA
ctcaaatgaatgattaaatt

SEQ ID NO: 63435 - DNA, 20 bp, synthetic construct
  source 1..20: mol_type = other DNA
tctcaaatgaatgattaaat

SEQ ID NO: 63436 - DNA, 20 bp, synthetic construct
  source 1..20: mol_type = other DNA
atctcaaatgaatgattaaa

SEQ ID NO: 63437 - DNA, 20 bp, synthetic construct
  source 1..20: mol_type = other DNA
tatctcaaatgaatgattaa

SEQ ID NO: 63438 - DNA, 20 bp, synthetic construct
  source 1..20: mol_type = other DNA
ctatctcaaatgaatgatta

SEQ ID NO: 63439 - DNA, 20 bp, synthetic construct
  source 1..20: mol_type = other DNA
cctatctcaaatgaatgatt

SEQ ID NO: 63440 - DNA, 20 bp, synthetic construct
  source 1..20: mol_type = other DNA
ccctatctcaaatgaatgat

SEQ ID NO: 63441 - DNA, 20 bp, synthetic construct
  source 1..20: mol_type = other DNA
tccctatctcaaatgaatga

SEQ ID NO: 63442 - DNA, 20 bp, synthetic construct
  source 1..20: mol_type = other DNA
ctccctatctcaaatgaatg

SEQ ID NO: 63443 - DNA, 20 bp, synthetic construct
  source 1..20: mol_type = other DNA
tctccctatctcaaatgaat

SEQ ID NO: 63444 - DNA, 20 bp, synthetic construct
  source 1..20: mol_type = other DNA
ttctccctatctcaaatgaa

SEQ ID NO: 63445 - DNA, 20 bp, synthetic construct
  source 1..20: mol_type = other DNA
tttctccctatctcaaatga

SEQ ID NO: 63446 - DNA, 20 bp, synthetic construct
  source 1..20: mol_type = other DNA
ttttctccctatctcaaatg

SEQ ID NO: 63447 - DNA, 20 bp, synthetic construct
  source 1..20: mol_type = other DNA
attttctccctatctcaaat

SEQ ID NO: 63448 - DNA, 20 bp, synthetic construct
  source 1..20: mol_type = other DNA
aattttctccctatctcaaa

SEQ ID NO: 63449 - DNA, 20 bp, synthetic construct
  source 1..20: mol_type = other DNA
taattttctccctatctcaa

SEQ ID NO: 63450 - DNA, 20 bp, synthetic construct
  source 1..20: mol_type = other DNA
ctaattttctccctatctca

SEQ ID NO: 63451 - DNA, 20 bp, synthetic construct
  source 1..20: mol_type = other DNA
cctaattttctccctatctc

SEQ ID NO: 63452 - DNA, 20 bp, synthetic construct
  source 1..20: mol_type = other DNA
acctaattttctccctatct

SEQ ID NO: 63453 - DNA, 20 bp, synthetic construct
  source 1..20: mol_type = other DNA
aacctaattttctccctatc

SEQ ID NO: 63454 - DNA, 20 bp, synthetic construct
  source 1..20: mol_type = other DNA
aaacctaattttctccctat

SEQ ID NO: 63455 - DNA, 20 bp, synthetic construct
  source 1..20: mol_type = other DNA
aaaacctaattttctcccta

SEQ ID NO: 63456 - DNA, 20 bp, synthetic construct
  source 1..20: mol_type = other DNA
aaaaacctaattttctccct

SEQ ID NO: 63457 - DNA, 20 bp, synthetic construct
  source 1..20: mol_type = other DNA
aaaaaacctaattttctccc

SEQ ID NO: 63458 - DNA, 20 bp, synthetic construct
  source 1..20: mol_type = other DNA
aaaaaaacctaattttctcc

SEQ ID NO: 63459 - DNA, 20 bp, synthetic construct
  source 1..20: mol_type = other DNA
aaaaaaaacctaattttctc

SEQ ID NO: 63460 - DNA, 20 bp, synthetic construct
  source 1..20: mol_type = other DNA
aaaaaaaaacctaattttct

SEQ ID NO: 63461 - DNA, 20 bp, synthetic construct
  source 1..20: mol_type = other DNA
aaaaaaaaaacctaattttc

SEQ ID NO: 63462 - DNA, 20 bp, synthetic construct
  source 1..20: mol_type = other DNA
aaaaaaaaaaacctaatttt

SEQ ID NO: 63463 - DNA, 20 bp, synthetic construct
  source 1..20: mol_type = other DNA
gaaaaaaaaaaacctaattt

SEQ ID NO: 63464 - DNA, 20 bp, synthetic construct
  source 1..20: mol_type = other DNA
agaaaaaaaaaaacctaatt

SEQ ID NO: 63465 - DNA, 20 bp, synthetic construct
  source 1..20: mol_type = other DNA
aagaaaaaaaaaaacctaat

SEQ ID NO: 63466 - DNA, 20 bp, synthetic construct
  source 1..20: mol_type = other DNA
gaagaaaaaaaaaaacctaa

SEQ ID NO: 63467 - DNA, 20 bp, synthetic construct
  source 1..20: mol_type = other DNA
agaagaaaaaaaaaaaccta

SEQ ID NO: 63468 - DNA, 20 bp, synthetic construct
  source 1..20: mol_type = other DNA
tagaagaaaaaaaaaaacct

SEQ ID NO: 63469 - DNA, 20 bp, synthetic construct
  source 1..20: mol_type = other DNA
atagaagaaaaaaaaaaacc

SEQ ID NO: 63470 - DNA, 20 bp, synthetic construct
  source 1..20: mol_type = other DNA
aatagaagaaaaaaaaaaac

SEQ ID NO: 63471 - DNA, 20 bp, synthetic construct
  source 1..20: mol_type = other DNA
aaatagaagaaaaaaaaaaa

SEQ ID NO: 63472 - DNA, 20 bp, synthetic construct
  source 1..20: mol_type = other DNA
aaaatagaagaaaaaaaaaa

SEQ ID NO: 63473 - DNA, 20 bp, synthetic construct
  source 1..20: mol_type = other DNA
caaaatagaagaaaaaaaaa

SEQ ID NO: 63474 - DNA, 20 bp, synthetic construct
  source 1..20: mol_type = other DNA
tcaaaatagaagaaaaaaaa

SEQ ID NO: 63475 - DNA, 20 bp, synthetic construct
  source 1..20: mol_type = other DNA
ctcaaaatagaagaaaaaaa

SEQ ID NO: 63476 - DNA, 20 bp, synthetic construct
  source 1..20: mol_type = other DNA
tctcaaaatagaagaaaaaa

SEQ ID NO: 63477 - DNA, 20 bp, synthetic construct
  source 1..20: mol_type = other DNA
gtctcaaaatagaagaaaaa

SEQ ID NO: 63478 - DNA, 20 bp, synthetic construct
  source 1..20: mol_type = other DNA
tgtctcaaaatagaagaaaa

SEQ ID NO: 63479 - DNA, 20 bp, synthetic construct
  source 1..20: mol_type = other DNA
ctgtctcaaaatagaagaaa

SEQ ID NO: 63480 - DNA, 20 bp, synthetic construct
  source 1..20: mol_type = other DNA
cctgtctcaaaatagaagaa

SEQ ID NO: 63481 - DNA, 20 bp, synthetic construct
  source 1..20: mol_type = other DNA
ccctgtctcaaaatagaaga

SEQ ID NO: 63482 - DNA, 20 bp, synthetic construct
  source 1..20: mol_type = other DNA
accctgtctcaaaatagaag

SEQ ID NO: 63483 - DNA, 20 bp, synthetic construct
  source 1..20: mol_type = other DNA
gaccctgtctcaaaatagaa

SEQ ID NO: 63484 - DNA, 20 bp, synthetic construct
  source 1..20: mol_type = other DNA
agaccctgtctcaaaataga

SEQ ID NO: 63485 - DNA, 20 bp, synthetic construct
  source 1..20: mol_type = other DNA
gagaccctgtctcaaaatag

SEQ ID NO: 63486 - DNA, 20 bp, synthetic construct
  source 1..20: mol_type = other DNA
tgagaccctgtctcaaaata

SEQ ID NO: 63487 - DNA, 20 bp, synthetic construct
  source 1..20: mol_type = other DNA
atgagaccctgtctcaaaat

SEQ ID NO: 63488 - DNA, 20 bp, synthetic construct
  source 1..20: mol_type = other DNA
aatgagaccctgtctcaaaa

SEQ ID NO: 63489 - DNA, 20 bp, synthetic construct
  source 1..20: mol_type = other DNA
aaatgagaccctgtctcaaa

SEQ ID NO: 63490 - DNA, 20 bp, synthetic construct
  source 1..20: mol_type = other DNA
aaaatgagaccctgtctcaa

SEQ ID NO: 63491 - DNA, 20 bp, synthetic construct
  source 1..20: mol_type = other DNA
caaaatgagaccctgtctca

SEQ ID NO: 63492 - DNA, 20 bp, synthetic construct
  source 1..20: mol_type = other DNA
acaaaatgagaccctgtctc

SEQ ID NO: 63493 - DNA, 20 bp, synthetic construct
  source 1..20: mol_type = other DNA
aacaaaatgagaccctgtct

SEQ ID NO: 63494 - DNA, 20 bp, synthetic construct
  source 1..20: mol_type = other DNA
caacaaaatgagaccctgtc

SEQ ID NO: 63495 - DNA, 20 bp, synthetic construct
  source 1..20: mol_type = other DNA
acaacaaaatgagaccctgt

SEQ ID NO: 63496 - DNA, 20 bp, synthetic construct
  source 1..20: mol_type = other DNA
gacaacaaaatgagaccctg

SEQ ID NO: 63497 - DNA, 20 bp, synthetic construct
  source 1..20: mol_type = other DNA
ggacaacaaaatgagaccct

SEQ ID NO: 63498 - DNA, 20 bp, synthetic construct
  source 1..20: mol_type = other DNA
tggacaacaaaatgagaccc

SEQ ID NO: 63499 - DNA, 20 bp, synthetic construct
  source 1..20: mol_type = other DNA
ctggacaacaaaatgagacc

SEQ ID NO: 63500 - DNA, 20 bp, synthetic construct
  source 1..20: mol_type = other DNA
cctggacaacaaaatgagac

SEQ ID NO: 63501 - DNA, 20 bp, synthetic construct
  source 1..20: mol_type = other DNA
gcctggacaacaaaatgaga

SEQ ID NO: 63502 - DNA, 20 bp, synthetic construct
  source 1..20: mol_type = other DNA
agcctggacaacaaaatgag

SEQ ID NO: 63503 - DNA, 20 bp, synthetic construct
  source 1..20: mol_type = other DNA
cagcctggacaacaaaatga

SEQ ID NO: 63504 - DNA, 20 bp, synthetic construct
  source 1..20: mol_type = other DNA
ccagcctggacaacaaaatg

SEQ ID NO: 63505 - DNA, 20 bp, synthetic construct
  source 1..20: mol_type = other DNA
tccagcctggacaacaaaat

SEQ ID NO: 63506 - DNA, 20 bp, synthetic construct
  source 1..20: mol_type = other DNA
ctccagcctggacaacaaaa

SEQ ID NO: 63507 - DNA, 20 bp, synthetic construct
  source 1..20: mol_type = other DNA
actccagcctggacaacaaa

SEQ ID NO: 63508 - DNA, 20 bp, synthetic construct
  source 1..20: mol_type = other DNA
cactccagcctggacaacaa

SEQ ID NO: 63509 - DNA, 20 bp, synthetic construct
  source 1..20: mol_type = other DNA
gcactccagcctggacaaca

SEQ ID NO: 63510 - DNA, 20 bp, synthetic construct
  source 1..20: mol_type = other DNA
tgcactccagcctggacaac

SEQ ID NO: 63511 - DNA, 20 bp, synthetic construct
  source 1..20: mol_type = other DNA
ctgcactccagcctggacaa

SEQ ID NO: 63512 - DNA, 20 bp, synthetic construct
  source 1..20: mol_type = other DNA
actgcactccagcctggaca

SEQ ID NO: 63513 - DNA, 20 bp, synthetic construct
  source 1..20: mol_type = other DNA
cactgcactccagcctggac

SEQ ID NO: 63514 - DNA, 20 bp, synthetic construct
  source 1..20: mol_type = other DNA
ccactgcactccagcctgga

SEQ ID NO: 63515 - DNA, 20 bp, synthetic construct
  source 1..20: mol_type = other DNA
gccactgcactccagcctgg

SEQ ID NO: 63516 - DNA, 20 bp, synthetic construct
  source 1..20: mol_type = other DNA
cgccactgcactccagcctg

SEQ ID NO: 63517 - DNA, 20 bp, synthetic construct
  source 1..20: mol_type = other DNA
gcgccactgcactccagcct

SEQ ID NO: 63518 - DNA, 20 bp, synthetic construct
  source 1..20: mol_type = other DNA
ggcgccactgcactccagcc

SEQ ID NO: 63519 - DNA, 20 bp, synthetic construct
  source 1..20: mol_type = other DNA
tggcgccactgcactccagc

SEQ ID NO: 63520 - DNA, 20 bp, synthetic construct
  source 1..20: mol_type = other DNA
atggcgccactgcactccag

SEQ ID NO: 63521 - DNA, 20 bp, synthetic construct
  source 1..20: mol_type = other DNA
gatggcgccactgcactcca

SEQ ID NO: 63522 - DNA, 20 bp, synthetic construct
  source 1..20: mol_type = other DNA
cgatggcgccactgcactcc

SEQ ID NO: 63523 - DNA, 20 bp, synthetic construct
  source 1..20: mol_type = other DNA
acgatggcgccactgcactc

SEQ ID NO: 63524 - DNA, 20 bp, synthetic construct
  source 1..20: mol_type = other DNA
tacgatggcgccactgcact

SEQ ID NO: 63525 - DNA, 20 bp, synthetic construct
  source 1..20: mol_type = other DNA
ctacgatggcgccactgcac

SEQ ID NO: 63526 - DNA, 20 bp, synthetic construct
  source 1..20: mol_type = other DNA
gctacgatggcgccactgca

SEQ ID NO: 63527 - DNA, 20 bp, synthetic construct
  source 1..20: mol_type = other DNA
agctacgatggcgccactgc

SEQ ID NO: 63528 - DNA, 20 bp, synthetic construct
  source 1..20: mol_type = other DNA
gagctacgatggcgccactg

SEQ ID NO: 63529 - DNA, 20 bp, synthetic construct
  source 1..20: mol_type = other DNA
tgagctacgatggcgccact

SEQ ID NO: 63530 - DNA, 20 bp, synthetic construct
  source 1..20: mol_type = other DNA
gtgagctacgatggcgccac

SEQ ID NO: 63531 - DNA, 20 bp, synthetic construct
  source 1..20: mol_type = other DNA
ggtgagctacgatggcgcca

SEQ ID NO: 63532 - DNA, 20 bp, synthetic construct
  source 1..20: mol_type = other DNA
tggtgagctacgatggcgcc

SEQ ID NO: 63533 - DNA, 20 bp, synthetic construct
  source 1..20: mol_type = other DNA
atggtgagctacgatggcgc

SEQ ID NO: 63534 - DNA, 20 bp, synthetic construct
  source 1..20: mol_type = other DNA
tatggtgagctacgatggcg

SEQ ID NO: 63535 - DNA, 20 bp, synthetic construct
  source 1..20: mol_type = other DNA
ttatggtgagctacgatggc

SEQ ID NO: 63536 - DNA, 20 bp, synthetic construct
  source 1..20: mol_type = other DNA
gttatggtgagctacgatgg

SEQ ID NO: 63537 - DNA, 20 bp, synthetic construct
  source 1..20: mol_type = other DNA
ggttatggtgagctacgatg

SEQ ID NO: 63538 - DNA, 20 bp, synthetic construct
  source 1..20: mol_type = other DNA
aggttatggtgagctacgat

SEQ ID NO: 63539 - DNA, 20 bp, synthetic construct
  source 1..20: mol_type = other DNA
gaggttatggtgagctacga

SEQ ID NO: 63540 - DNA, 20 bp, synthetic construct
  source 1..20: mol_type = other DNA
tgaggttatggtgagctacg

SEQ ID NO: 63541 - DNA, 20 bp, synthetic construct
  source 1..20: mol_type = other DNA
ttgaggttatggtgagctac

SEQ ID NO: 63542 - DNA, 20 bp, synthetic construct
  source 1..20: mol_type = other DNA
tttgaggttatggtgagcta

SEQ ID NO: 63543 - DNA, 20 bp, synthetic construct
  source 1..20: mol_type = other DNA
gtttgaggttatggtgagct

SEQ ID NO: 63544 - DNA, 20 bp, synthetic construct
  source 1..20: mol_type = other DNA
agtttgaggttatggtgagc

SEQ ID NO: 63545 - DNA, 20 bp, synthetic construct
  source 1..20: mol_type = other DNA
gagtttgaggttatggtgag

SEQ ID NO: 63546 - DNA, 20 bp, synthetic construct
  source 1..20: mol_type = other DNA
tgagtttgaggttatggtga

SEQ ID NO: 63547 - DNA, 20 bp, synthetic construct
  source 1..20: mol_type = other DNA
atgagtttgaggttatggtg

SEQ ID NO: 63548 - DNA, 20 bp, synthetic construct
  source 1..20: mol_type = other DNA
catgagtttgaggttatggt

SEQ ID NO: 63549 - DNA, 20 bp, synthetic construct
  source 1..20: mol_type = other DNA
ccatgagtttgaggttatgg

SEQ ID NO: 63550 - DNA, 20 bp, synthetic construct
  source 1..20: mol_type = other DNA
cccatgagtttgaggttatg

SEQ ID NO: 63551 - DNA, 20 bp, synthetic construct
  source 1..20: mol_type = other DNA
acccatgagtttgaggttat

SEQ ID NO: 63552 - DNA, 20 bp, synthetic construct
  source 1..20: mol_type = other DNA
aacccatgagtttgaggtta

SEQ ID NO: 63553 - DNA, 20 bp, synthetic construct
  source 1..20: mol_type = other DNA
gaacccatgagtttgaggtt

SEQ ID NO: 63554 - DNA, 20 bp, synthetic construct
  source 1..20: mol_type = other DNA
tgaacccatgagtttgaggt

SEQ ID NO: 63555 - DNA, 20 bp, synthetic construct
  source 1..20: mol_type = other DNA
ctgaacccatgagtttgagg

SEQ ID NO: 63556 - DNA, 20 bp, synthetic construct
  source 1..20: mol_type = other DNA
cctgaacccatgagtttgag

SEQ ID NO: 63557 - DNA, 20 bp, synthetic construct
  source 1..20: mol_type = other DNA
acctgaacccatgagtttga

SEQ ID NO: 63558 - DNA, 20 bp, synthetic construct
  source 1..20: mol_type = other DNA
cacctgaacccatgagtttg

SEQ ID NO: 63559 - DNA, 20 bp, synthetic construct
  source 1..20: mol_type = other DNA
tcacctgaacccatgagttt

SEQ ID NO: 63560 - DNA, 20 bp, synthetic construct
  source 1..20: mol_type = other DNA
atcacctgaacccatgagtt

SEQ ID NO: 63561 - DNA, 20 bp, synthetic construct
  source 1..20: mol_type = other DNA
aatcacctgaacccatgagt

SEQ ID NO: 63562 - DNA, 20 bp, synthetic construct
  source 1..20: mol_type = other DNA
gaatcacctgaacccatgag

SEQ ID NO: 63563 - DNA, 20 bp, synthetic construct
  source 1..20: mol_type = other DNA
tgaatcacctgaacccatga

SEQ ID NO: 63564 - DNA, 20 bp, synthetic construct
  source 1..20: mol_type = other DNA
gtgaatcacctgaacccatg

SEQ ID NO: 63565 - DNA, 20 bp, synthetic construct
  source 1..20: mol_type = other DNA
ggtgaatcacctgaacccat

SEQ ID NO: 63566 - DNA, 20 bp, synthetic construct
  source 1..20: mol_type = other DNA
aggtgaatcacctgaaccca

SEQ ID NO: 63567 - DNA, 20 bp, synthetic construct
  source 1..20: mol_type = other DNA
aaggtgaatcacctgaaccc

SEQ ID NO: 63568 - DNA, 20 bp, synthetic construct
  source 1..20: mol_type = other DNA
taaggtgaatcacctgaacc

SEQ ID NO: 63569 - DNA, 20 bp, synthetic construct
  source 1..20: mol_type = other DNA
ctaaggtgaatcacctgaac

SEQ ID NO: 63570 - DNA, 20 bp, synthetic construct
  source 1..20: mol_type = other DNA
gctaaggtgaatcacctgaa

SEQ ID NO: 63571 - DNA, 20 bp, synthetic construct
  source 1..20: mol_type = other DNA
ggctaaggtgaatcacctga

SEQ ID NO: 63572 - DNA, 20 bp, synthetic construct
  source 1..20: mol_type = other DNA
aggctaaggtgaatcacctg

SEQ ID NO: 63573 - DNA, 20 bp, synthetic construct
  source 1..20: mol_type = other DNA
gaggctaaggtgaatcacct

SEQ ID NO: 63574 - DNA, 20 bp, synthetic construct
  source 1..20: mol_type = other DNA
ggaggctaaggtgaatcacc

SEQ ID NO: 63575 - DNA, 20 bp, synthetic construct
  source 1..20: mol_type = other DNA
aggaggctaaggtgaatcac

SEQ ID NO: 63576 - DNA, 20 bp, synthetic construct
  source 1..20: mol_type = other DNA
caggaggctaaggtgaatca

SEQ ID NO: 63577 - DNA, 20 bp, synthetic construct
  source 1..20: mol_type = other DNA
tcaggaggctaaggtgaatc

SEQ ID NO: 63578 - DNA, 20 bp, synthetic construct
  source 1..20: mol_type = other DNA
atcaggaggctaaggtgaat

SEQ ID NO: 63579 - DNA, 20 bp, synthetic construct
  source 1..20: mol_type = other DNA
aatcaggaggctaaggtgaa

SEQ ID NO: 63580 - DNA, 20 bp, synthetic construct
  source 1..20: mol_type = other DNA
taatcaggaggctaaggtga

SEQ ID NO: 63581 - DNA, 20 bp, synthetic construct
  source 1..20: mol_type = other DNA
ttaatcaggaggctaaggtg

SEQ ID NO: 63582 - DNA, 20 bp, synthetic construct
  source 1..20: mol_type = other DNA
cttaatcaggaggctaaggt

SEQ ID NO: 63583 - DNA, 20 bp, synthetic construct
  source 1..20: mol_type = other DNA
gcttaatcaggaggctaagg

SEQ ID NO: 63584 - DNA, 20 bp, synthetic construct
  source 1..20: mol_type = other DNA
agcttaatcaggaggctaag

SEQ ID NO: 63585 - DNA, 20 bp, synthetic construct
  source 1..20: mol_type = other DNA
cagcttaatcaggaggctaa

SEQ ID NO: 63586 - DNA, 20 bp, synthetic construct
  source 1..20: mol_type = other DNA
ccagcttaatcaggaggcta

SEQ ID NO: 63587 - DNA, 20 bp, synthetic construct
  source 1..20: mol_type = other DNA
cccagcttaatcaggaggct

SEQ ID NO: 63588 - DNA, 20 bp, synthetic construct
  source 1..20: mol_type = other DNA
tcccagcttaatcaggaggc

SEQ ID NO: 63589 - DNA, 20 bp, synthetic construct
  source 1..20: mol_type = other DNA
gtcccagcttaatcaggagg

SEQ ID NO: 63590 - DNA, 20 bp, synthetic construct
  source 1..20: mol_type = other DNA
agtcccagcttaatcaggag

SEQ ID NO: 63591 - DNA, 20 bp, synthetic construct
  source 1..20: mol_type = other DNA
cagtcccagcttaatcagga

SEQ ID NO: 63592 - DNA, 20 bp, synthetic construct
  source 1..20: mol_type = other DNA
gcagtcccagcttaatcagg

SEQ ID NO: 63593 - DNA, 20 bp, synthetic construct
  source 1..20: mol_type = other DNA
tgcagtcccagcttaatcag

SEQ ID NO: 63594 - DNA, 20 bp, synthetic construct
  source 1..20: mol_type = other DNA
ctgcagtcccagcttaatca

SEQ ID NO: 63595 - DNA, 20 bp, synthetic construct
  source 1..20: mol_type = other DNA
tctgcagtcccagcttaatc

SEQ ID NO: 63596 - DNA, 20 bp, synthetic construct
  source 1..20: mol_type = other DNA
atctgcagtcccagcttaat

SEQ ID NO: 63597 - DNA, 20 bp, synthetic construct
  source 1..20: mol_type = other DNA
catctgcagtcccagcttaa

SEQ ID NO: 63598 - DNA, 20 bp, synthetic construct
  source 1..20: mol_type = other DNA
acatctgcagtcccagctta

SEQ ID NO: 63599 - DNA, 20 bp, synthetic construct
  source 1..20: mol_type = other DNA
cacatctgcagtcccagctt

SEQ ID NO: 63600 - DNA, 20 bp, synthetic construct
  source 1..20: mol_type = other DNA
acacatctgcagtcccagct

SEQ ID NO: 63601 - DNA, 20 bp, synthetic construct
  source 1..20: mol_type = other DNA
tacacatctgcagtcccagc

SEQ ID NO: 63602 - DNA, 20 bp, synthetic construct
  source 1..20: mol_type = other DNA
atacacatctgcagtcccag

SEQ ID NO: 63603 - DNA, 20 bp, synthetic construct
  source 1..20: mol_type = other DNA
gatacacatctgcagtccca

SEQ ID NO: 63604 - DNA, 20 bp, synthetic construct
  source 1..20: mol_type = other DNA
tgatacacatctgcagtccc

SEQ ID NO: 63605 - DNA, 20 bp, synthetic construct
  source 1..20: mol_type = other DNA
gtgatacacatctgcagtcc

SEQ ID NO: 63606 - DNA, 20 bp, synthetic construct
  source 1..20: mol_type = other DNA
ggtgatacacatctgcagtc

SEQ ID NO: 63607 - DNA, 20 bp, synthetic construct
  source 1..20: mol_type = other DNA
tggtgatacacatctgcagt

SEQ ID NO: 63608 - DNA, 20 bp, synthetic construct
  source 1..20: mol_type = other DNA
gtggtgatacacatctgcag

SEQ ID NO: 63609 - DNA, 20 bp, synthetic construct
  source 1..20: mol_type = other DNA
agtggtgatacacatctgca

SEQ ID NO: 63610 - DNA, 20 bp, synthetic construct
  source 1..20: mol_type = other DNA
gagtggtgatacacatctgc

SEQ ID NO: 63611 - DNA, 20 bp, synthetic construct
  source 1..20: mol_type = other DNA
ggagtggtgatacacatctg

SEQ ID NO: 63612 - DNA, 20 bp, synthetic construct
  source 1..20: mol_type = other DNA
aggagtggtgatacacatct

SEQ ID NO: 63613 - DNA, 20 bp, synthetic construct
  source 1..20: mol_type = other DNA
caggagtggtgatacacatc

SEQ ID NO: 63614 - DNA, 20 bp, synthetic construct
  source 1..20: mol_type = other DNA
ccaggagtggtgatacacat

SEQ ID NO: 63615 - DNA, 20 bp, synthetic construct
  source 1..20: mol_type = other DNA
gccaggagtggtgatacaca

SEQ ID NO: 63616 - DNA, 20 bp, synthetic construct
  source 1..20: mol_type = other DNA
agccaggagtggtgatacac

SEQ ID NO: 63617 - DNA, 20 bp, synthetic construct
  source 1..20: mol_type = other DNA
tagccaggagtggtgataca

SEQ ID NO: 63618 - DNA, 20 bp, synthetic construct
  source 1..20: mol_type = other DNA
ttagccaggagtggtgatac

SEQ ID NO: 63619 - DNA, 20 bp, synthetic construct
  source 1..20: mol_type = other DNA
attagccaggagtggtgata

SEQ ID NO: 63620 - DNA, 20 bp, synthetic construct
  source 1..20: mol_type = other DNA
aattagccaggagtggtgat

SEQ ID NO: 63621 - DNA, 20 bp, synthetic construct
  source 1..20: mol_type = other DNA
aaattagccaggagtggtga

SEQ ID NO: 63622 - DNA, 20 bp, synthetic construct
  source 1..20: mol_type = other DNA
aaaattagccaggagtggtg

SEQ ID NO: 63623 - DNA, 20 bp, synthetic construct
  source 1..20: mol_type = other DNA
aaaaattagccaggagtggt

SEQ ID NO: 63624 - DNA, 20 bp, synthetic construct
  source 1..20: mol_type = other DNA
caaaaattagccaggagtgg

SEQ ID NO: 63625 - DNA, 20 bp, synthetic construct
  source 1..20: mol_type = other DNA
acaaaaattagccaggagtg

SEQ ID NO: 63626 - DNA, 20 bp, synthetic construct
  source 1..20: mol_type = other DNA
aacaaaaattagccaggagt

SEQ ID NO: 63627 - DNA, 20 bp, synthetic construct
  source 1..20: mol_type = other DNA
caacaaaaattagccaggag

SEQ ID NO: 63628 - DNA, 20 bp, synthetic construct
  source 1..20: mol_type = other DNA
acaacaaaaattagccagga

SEQ ID NO: 63629 - DNA, 20 bp, synthetic construct
  source 1..20: mol_type = other DNA
aacaacaaaaattagccagg

SEQ ID NO: 63630 - DNA, 20 bp, synthetic construct
  source 1..20: mol_type = other DNA
taacaacaaaaattagccag

SEQ ID NO: 63631 - DNA, 20 bp, synthetic construct
  source 1..20: mol_type = other DNA
ataacaacaaaaattagcca

SEQ ID NO: 63632 - DNA, 20 bp, synthetic construct
  source 1..20: mol_type = other DNA
aataacaacaaaaattagcc

SEQ ID NO: 63633 - DNA, 20 bp, synthetic construct
  source 1..20: mol_type = other DNA
aaataacaacaaaaattagc

SEQ ID NO: 63634 - DNA, 20 bp, synthetic construct
  source 1..20: mol_type = other DNA
aaaataacaacaaaaattag

SEQ ID NO: 63635 - DNA, 20 bp, synthetic construct
  source 1..20: mol_type = other DNA
aaaaataacaacaaaaatta

SEQ ID NO: 63636 - DNA, 20 bp, synthetic construct
  source 1..20: mol_type = other DNA
aaaaaataacaacaaaaatt

SEQ ID NO: 63637 - DNA, 20 bp, synthetic construct
  source 1..20: mol_type = other DNA
caaaaaataacaacaaaaat

SEQ ID NO: 63638 - DNA, 20 bp, synthetic construct
  source 1..20: mol_type = other DNA
acaaaaaataacaacaaaaa

SEQ ID NO: 63639 - DNA, 20 bp, synthetic construct
  source 1..20: mol_type = other DNA
aacaaaaaataacaacaaaa

SEQ ID NO: 63640 - DNA, 20 bp, synthetic construct
  source 1..20: mol_type = other DNA
aaacaaaaaataacaacaaa

SEQ ID NO: 63641 - DNA, 20 bp, synthetic construct
  source 1..20: mol_type = other DNA
caaacaaaaaataacaacaa

SEQ ID NO: 63642 - DNA, 20 bp, synthetic construct
  source 1..20: mol_type = other DNA
tcaaacaaaaaataacaaca

SEQ ID NO: 63643 - DNA, 20 bp, synthetic construct
  source 1..20: mol_type = other DNA
atcaaacaaaaaataacaac

SEQ ID NO: 63644 - DNA, 20 bp, synthetic construct
  source 1..20: mol_type = other DNA
catcaaacaaaaaataacaa

SEQ ID NO: 63645 - DNA, 20 bp, synthetic construct
  source 1..20: mol_type = other DNA
tcatcaaacaaaaaataaca

SEQ ID NO: 63646 - DNA, 20 bp, synthetic construct
  source 1..20: mol_type = other DNA
ctcatcaaacaaaaaataac

SEQ ID NO: 63647 - DNA, 20 bp, synthetic construct
  source 1..20: mol_type = other DNA
cctcatcaaacaaaaaataa

SEQ ID NO: 63648 - DNA, 20 bp, synthetic construct
  source 1..20: mol_type = other DNA
acctcatcaaacaaaaaata

SEQ ID NO: 63649 - DNA, 20 bp, synthetic construct
  source 1..20: mol_type = other DNA
gacctcatcaaacaaaaaat

SEQ ID NO: 63650 - DNA, 20 bp, synthetic construct
  source 1..20: mol_type = other DNA
agacctcatcaaacaaaaaa

SEQ ID NO: 63651 - DNA, 20 bp, synthetic construct
  source 1..20: mol_type = other DNA
gagacctcatcaaacaaaaa

SEQ ID NO: 63652 - DNA, 20 bp, synthetic construct
  source 1..20: mol_type = other DNA
tgagacctcatcaaacaaaa

SEQ ID NO: 63653 - DNA, 20 bp, synthetic construct
  source 1..20: mol_type = other DNA
atgagacctcatcaaacaaa

SEQ ID NO: 63654 - DNA, 20 bp, synthetic construct
  source 1..20: mol_type = other DNA
aatgagacctcatcaaacaa

SEQ ID NO: 63655 - DNA, 20 bp, synthetic construct
  source 1..20: mol_type = other DNA
taatgagacctcatcaaaca

SEQ ID NO: 63656 - DNA, 20 bp, synthetic construct
  source 1..20: mol_type = other DNA
ataatgagacctcatcaaac

SEQ ID NO: 63657 - DNA, 20 bp, synthetic construct
  source 1..20: mol_type = other DNA
cataatgagacctcatcaaa

SEQ ID NO: 63658 - DNA, 20 bp, synthetic construct
  source 1..20: mol_type = other DNA
acataatgagacctcatcaa

SEQ ID NO: 63659 - DNA, 20 bp, synthetic construct
  source 1..20: mol_type = other DNA
aacataatgagacctcatca

SEQ ID NO: 63660 - DNA, 20 bp, synthetic construct
  source 1..20: mol_type = other DNA
caacataatgagacctcatc

SEQ ID NO: 63661 - DNA, 20 bp, synthetic construct
  source 1..20: mol_type = other DNA
gcaacataatgagacctcat

SEQ ID NO: 63662 - DNA, 20 bp, synthetic construct
  source 1..20: mol_type = other DNA
ggcaacataatgagacctca

SEQ ID NO: 63663 - DNA, 20 bp, synthetic construct
  source 1..20: mol_type = other DNA
gggcaacataatgagacctc

SEQ ID NO: 63664 - DNA, 20 bp, synthetic construct
  source 1..20: mol_type = other DNA
tgggcaacataatgagacct

SEQ ID NO: 63665 - DNA, 20 bp, synthetic construct
  source 1..20: mol_type = other DNA
ctgggcaacataatgagacc

SEQ ID NO: 63666 - DNA, 20 bp, synthetic construct
  source 1..20: mol_type = other DNA
cctgggcaacataatgagac

SEQ ID NO: 63667 - DNA, 20 bp, synthetic construct
  source 1..20: mol_type = other DNA
gcctgggcaacataatgaga

SEQ ID NO: 63668 - DNA, 20 bp, synthetic construct
  source 1..20: mol_type = other DNA
agcctgggcaacataatgag

SEQ ID NO: 63669 - DNA, 20 bp, synthetic construct
  source 1..20: mol_type = other DNA
cagcctgggcaacataatga

SEQ ID NO: 63670 - DNA, 20 bp, synthetic construct
  source 1..20: mol_type = other DNA
ccagcctgggcaacataatg

SEQ ID NO: 63671 - DNA, 20 bp, synthetic construct
  source 1..20: mol_type = other DNA
accagcctgggcaacataat

SEQ ID NO: 63672 - DNA, 20 bp, synthetic construct
  source 1..20: mol_type = other DNA
gaccagcctgggcaacataa

SEQ ID NO: 63673 - DNA, 20 bp, synthetic construct
  source 1..20: mol_type = other DNA
agaccagcctgggcaacata

SEQ ID NO: 63674 - DNA, 20 bp, synthetic construct
  source 1..20: mol_type = other DNA
gagaccagcctgggcaacat

SEQ ID NO: 63675 - DNA, 20 bp, synthetic construct
  source 1..20: mol_type = other DNA
tgagaccagcctgggcaaca

SEQ ID NO: 63676 - DNA, 20 bp, synthetic construct
  source 1..20: mol_type = other DNA
ttgagaccagcctgggcaac

SEQ ID NO: 63677 - DNA, 20 bp, synthetic construct
  source 1..20: mol_type = other DNA
tttgagaccagcctgggcaa

SEQ ID NO: 63678 - DNA, 20 bp, synthetic construct
  source 1..20: mol_type = other DNA
gtttgagaccagcctgggca

SEQ ID NO: 63679 - DNA, 20 bp, synthetic construct
  source 1..20: mol_type = other DNA
agtttgagaccagcctgggc

SEQ ID NO: 63680 - DNA, 20 bp, synthetic construct
  source 1..20: mol_type = other DNA
gagtttgagaccagcctggg

SEQ ID NO: 63681 - DNA, 20 bp, synthetic construct
  source 1..20: mol_type = other DNA
agagtttgagaccagcctgg

SEQ ID NO: 63682 - DNA, 20 bp, synthetic construct
  source 1..20: mol_type = other DNA
cagagtttgagaccagcctg

SEQ ID NO: 63683 - DNA, 20 bp, synthetic construct
  source 1..20: mol_type = other DNA
ccagagtttgagaccagcct

SEQ ID NO: 63684 - DNA, 20 bp, synthetic construct
  source 1..20: mol_type = other DNA
cccagagtttgagaccagcc

SEQ ID NO: 63685 - DNA, 20 bp, synthetic construct
  source 1..20: mol_type = other DNA
gcccagagtttgagaccagc

SEQ ID NO: 63686 - DNA, 20 bp, synthetic construct
  source 1..20: mol_type = other DNA
ggcccagagtttgagaccag

SEQ ID NO: 63687 - DNA, 20 bp, synthetic construct
  source 1..20: mol_type = other DNA
aggcccagagtttgagacca

SEQ ID NO: 63688 - DNA, 20 bp, synthetic construct
  source 1..20: mol_type = other DNA
gaggcccagagtttgagacc

SEQ ID NO: 63689 - DNA, 20 bp, synthetic construct
  source 1..20: mol_type = other DNA
tgaggcccagagtttgagac

SEQ ID NO: 63690 - DNA, 20 bp, synthetic construct
  source 1..20: mol_type = other DNA
ttgaggcccagagtttgaga

SEQ ID NO: 63691 - DNA, 20 bp, synthetic construct
  source 1..20: mol_type = other DNA
tttgaggcccagagtttgag

SEQ ID NO: 63692 - DNA, 20 bp, synthetic construct
  source 1..20: mol_type = other DNA
atttgaggcccagagtttga

SEQ ID NO: 63693 - DNA, 20 bp, synthetic construct
  source 1..20: mol_type = other DNA
catttgaggcccagagtttg

SEQ ID NO: 63694 - DNA, 20 bp, synthetic construct
  source 1..20: mol_type = other DNA
tcatttgaggcccagagttt

SEQ ID NO: 63695 - DNA, 20 bp, synthetic construct
  source 1..20: mol_type = other DNA
atcatttgaggcccagagtt

SEQ ID NO: 63696 - DNA, 20 bp, synthetic construct
  source 1..20: mol_type = other DNA
gatcatttgaggcccagagt

SEQ ID NO: 63697 - DNA, 20 bp, synthetic construct
  source 1..20: mol_type = other DNA
ggatcatttgaggcccagag

SEQ ID NO: 63698 - DNA, 20 bp, synthetic construct
  source 1..20: mol_type = other DNA
aggatcatttgaggcccaga

SEQ ID NO: 63699 - DNA, 20 bp, synthetic construct
  source 1..20: mol_type = other DNA
gaggatcatttgaggcccag

SEQ ID NO: 63700 - DNA, 20 bp, synthetic construct
  source 1..20: mol_type = other DNA
ggaggatcatttgaggccca

SEQ ID NO: 63701 - DNA, 20 bp, synthetic construct
  source 1..20: mol_type = other DNA
aggaggatcatttgaggccc

SEQ ID NO: 63702 - DNA, 20 bp, synthetic construct
  source 1..20: mol_type = other DNA
caggaggatcatttgaggcc

SEQ ID NO: 63703 - DNA, 20 bp, synthetic construct
  source 1..20: mol_type = other DNA
gcaggaggatcatttgaggc

SEQ ID NO: 63704 - DNA, 20 bp, synthetic construct
  source 1..20: mol_type = other DNA
ggcaggaggatcatttgagg

SEQ ID NO: 63705 - DNA, 20 bp, synthetic construct
  source 1..20: mol_type = other DNA
gggcaggaggatcatttgag

SEQ ID NO: 63706 - DNA, 20 bp, synthetic construct
  source 1..20: mol_type = other DNA
ggggcaggaggatcatttga

SEQ ID NO: 63707 - DNA, 20 bp, synthetic construct
  source 1..20: mol_type = other DNA
tggggcaggaggatcatttg

SEQ ID NO: 63708 - DNA, 20 bp, synthetic construct
  source 1..20: mol_type = other DNA
ctggggcaggaggatcattt

SEQ ID NO: 63709 - DNA, 20 bp, synthetic construct
  source 1..20: mol_type = other DNA
gctggggcaggaggatcatt

SEQ ID NO: 63710 - DNA, 20 bp, synthetic construct
  source 1..20: mol_type = other DNA
ggctggggcaggaggatcat

SEQ ID NO: 63711 - DNA, 20 bp, synthetic construct
  source 1..20: mol_type = other DNA
aggctggggcaggaggatca

SEQ ID NO: 63712 - DNA, 20 bp, synthetic construct
  source 1..20: mol_type = other DNA
gaggctggggcaggaggatc

SEQ ID NO: 63713 - DNA, 20 bp, synthetic construct
  source 1..20: mol_type = other DNA
ggaggctggggcaggaggat

SEQ ID NO: 63714 - DNA, 20 bp, synthetic construct
  source 1..20: mol_type = other DNA
gggaggctggggcaggagga

SEQ ID NO: 63715 - DNA, 20 bp, synthetic construct
  source 1..20: mol_type = other DNA
tgggaggctggggcaggagg

SEQ ID NO: 63716 - DNA, 20 bp, synthetic construct
  source 1..20: mol_type = other DNA
ttgggaggctggggcaggag

SEQ ID NO: 63717 - DNA, 20 bp, synthetic construct
  source 1..20: mol_type = other DNA
tttgggaggctggggcagga

SEQ ID NO: 63718 - DNA, 20 bp, synthetic construct
  source 1..20: mol_type = other DNA
ctttgggaggctggggcagg

SEQ ID NO: 63719 - DNA, 20 bp, synthetic construct
  source 1..20: mol_type = other DNA
actttgggaggctggggcag

SEQ ID NO: 63720 - DNA, 20 bp, synthetic construct
  source 1..20: mol_type = other DNA
cactttgggaggctggggca

SEQ ID NO: 63721 - DNA, 20 bp, synthetic construct
  source 1..20: mol_type = other DNA
gcactttgggaggctggggc

SEQ ID NO: 63722 - DNA, 20 bp, synthetic construct
  source 1..20: mol_type = other DNA
agcactttgggaggctgggg

SEQ ID NO: 63723 - DNA, 20 bp, synthetic construct
  source 1..20: mol_type = other DNA
cagcactttgggaggctggg

SEQ ID NO: 63724 - DNA, 20 bp, synthetic construct
  source 1..20: mol_type = other DNA
ccagcactttgggaggctgg

SEQ ID NO: 63725 - DNA, 20 bp, synthetic construct
  source 1..20: mol_type = other DNA
cccagcactttgggaggctg

SEQ ID NO: 63726 - DNA, 20 bp, synthetic construct
  source 1..20: mol_type = other DNA
tcccagcactttgggaggct

SEQ ID NO: 63727 - DNA, 20 bp, synthetic construct
  source 1..20: mol_type = other DNA
atcccagcactttgggaggc

SEQ ID NO: 63728 - DNA, 20 bp, synthetic construct
  source 1..20: mol_type = other DNA
aatcccagcactttgggagg

SEQ ID NO: 63729 - DNA, 20 bp, synthetic construct
  source 1..20: mol_type = other DNA
taatcccagcactttgggag

SEQ ID NO: 63730 - DNA, 20 bp, synthetic construct
  source 1..20: mol_type = other DNA
gtaatcccagcactttggga

SEQ ID NO: 63731 - DNA, 20 bp, synthetic construct
  source 1..20: mol_type = other DNA
tgtaatcccagcactttggg

SEQ ID NO: 63732 - DNA, 20 bp, synthetic construct
  source 1..20: mol_type = other DNA
ctgtaatcccagcactttgg

SEQ ID NO: 63733 - DNA, 20 bp, synthetic construct
  source 1..20: mol_type = other DNA
cctgtaatcccagcactttg

SEQ ID NO: 63734 - DNA, 20 bp, synthetic construct
  source 1..20: mol_type = other DNA
gcctgtaatcccagcacttt

SEQ ID NO: 63735 - DNA, 20 bp, synthetic construct
  source 1..20: mol_type = other DNA
tgcctgtaatcccagcactt

SEQ ID NO: 63736 - DNA, 20 bp, synthetic construct
  source 1..20: mol_type = other DNA
atgcctgtaatcccagcact

SEQ ID NO: 63737 - DNA, 20 bp, synthetic construct
  source 1..20: mol_type = other DNA
catgcctgtaatcccagcac

SEQ ID NO: 63738 - DNA, 20 bp, synthetic construct
  source 1..20: mol_type = other DNA
tcatgcctgtaatcccagca

SEQ ID NO: 63739 - DNA, 20 bp, synthetic construct
  source 1..20: mol_type = other DNA
ttcatgcctgtaatcccagc

SEQ ID NO: 63740 - DNA, 20 bp, synthetic construct
  source 1..20: mol_type = other DNA
gttcatgcctgtaatcccag

SEQ ID NO: 63741 - DNA, 20 bp, synthetic construct
  source 1..20: mol_type = other DNA
ggttcatgcctgtaatccca

SEQ ID NO: 63742 - DNA, 20 bp, synthetic construct
  source 1..20: mol_type = other DNA
aggttcatgcctgtaatccc

SEQ ID NO: 63743 - DNA, 20 bp, synthetic construct
  source 1..20: mol_type = other DNA
gaggttcatgcctgtaatcc

SEQ ID NO: 63744 - DNA, 20 bp, synthetic construct
  source 1..20: mol_type = other DNA
agaggttcatgcctgtaatc

SEQ ID NO: 63745 - DNA, 20 bp, synthetic construct
  source 1..20: mol_type = other DNA
cagaggttcatgcctgtaat

SEQ ID NO: 63746 - DNA, 20 bp, synthetic construct
  source 1..20: mol_type = other DNA
gcagaggttcatgcctgtaa

SEQ ID NO: 63747 - DNA, 20 bp, synthetic construct
  source 1..20: mol_type = other DNA
agcagaggttcatgcctgta

SEQ ID NO: 63748 - DNA, 20 bp, synthetic construct
  source 1..20: mol_type = other DNA
gagcagaggttcatgcctgt

SEQ ID NO: 63749 - DNA, 20 bp, synthetic construct
  source 1..20: mol_type = other DNA
ggagcagaggttcatgcctg

SEQ ID NO: 63750 - DNA, 20 bp, synthetic construct
  source 1..20: mol_type = other DNA
gggagcagaggttcatgcct

SEQ ID NO: 63751 - DNA, 20 bp, synthetic construct
  source 1..20: mol_type = other DNA
tgggagcagaggttcatgcc

SEQ ID NO: 63752 - DNA, 20 bp, synthetic construct
  source 1..20: mol_type = other DNA
ctgggagcagaggttcatgc

SEQ ID NO: 63753 - DNA, 20 bp, synthetic construct
  source 1..20: mol_type = other DNA
gctgggagcagaggttcatg

SEQ ID NO: 63754 - DNA, 20 bp, synthetic construct
  source 1..20: mol_type = other DNA
ggctgggagcagaggttcat

SEQ ID NO: 63755 - DNA, 20 bp, synthetic construct
  source 1..20: mol_type = other DNA
gggctgggagcagaggttca

SEQ ID NO: 63756 - DNA, 20 bp, synthetic construct
  source 1..20: mol_type = other DNA
tgggctgggagcagaggttc

SEQ ID NO: 63757 - DNA, 20 bp, synthetic construct
  source 1..20: mol_type = other DNA
atgggctgggagcagaggtt

SEQ ID NO: 63758 - DNA, 20 bp, synthetic construct
  source 1..20: mol_type = other DNA
aatgggctgggagcagaggt

SEQ ID NO: 63759 - DNA, 20 bp, synthetic construct
  source 1..20: mol_type = other DNA
aaatgggctgggagcagagg

SEQ ID NO: 63760 - DNA, 20 bp, synthetic construct
  source 1..20: mol_type = other DNA
aaaatgggctgggagcagag

SEQ ID NO: 63761 - DNA, 20 bp, synthetic construct
  source 1..20: mol_type = other DNA
aaaaatgggctgggagcaga

SEQ ID NO: 63762 - DNA, 20 bp, synthetic construct
  source 1..20: mol_type = other DNA
aaaaaatgggctgggagcag

SEQ ID NO: 63763 - DNA, 20 bp, synthetic construct
  source 1..20: mol_type = other DNA
taaaaaatgggctgggagca

SEQ ID NO: 63764 - DNA, 20 bp, synthetic construct
  source 1..20: mol_type = other DNA
ttaaaaaatgggctgggagc

SEQ ID NO: 63765 - DNA, 20 bp, synthetic construct
  source 1..20: mol_type = other DNA
tttaaaaaatgggctgggag

SEQ ID NO: 63766 - DNA, 20 bp, synthetic construct
  source 1..20: mol_type = other DNA
ttttaaaaaatgggctggga

SEQ ID NO: 63767 - DNA, 20 bp, synthetic construct
  source 1..20: mol_type = other DNA
attttaaaaaatgggctggg

SEQ ID NO: 63768 - DNA, 20 bp, synthetic construct
  source 1..20: mol_type = other DNA
tattttaaaaaatgggctgg

SEQ ID NO: 63769 - DNA, 20 bp, synthetic construct
  source 1..20: mol_type = other DNA
atattttaaaaaatgggctg

SEQ ID NO: 63770 - DNA, 20 bp, synthetic construct
  source 1..20: mol_type = other DNA
tatattttaaaaaatgggct

SEQ ID NO: 63771 - DNA, 20 bp, synthetic construct
  source 1..20: mol_type = other DNA
atatattttaaaaaatgggc

SEQ ID NO: 63772 - DNA, 20 bp, synthetic construct
  source 1..20: mol_type = other DNA
aatatattttaaaaaatggg

SEQ ID NO: 63773 - DNA, 20 bp, synthetic construct
  source 1..20: mol_type = other DNA
gaatatattttaaaaaatgg

SEQ ID NO: 63774 - DNA, 20 bp, synthetic construct
  source 1..20: mol_type = other DNA
tgaatatattttaaaaaatg

SEQ ID NO: 63775 - DNA, 20 bp, synthetic construct
  source 1..20: mol_type = other DNA
gtgaatatattttaaaaaat

SEQ ID NO: 63776 - DNA, 20 bp, synthetic construct
  source 1..20: mol_type = other DNA
tgtgaatatattttaaaaaa

SEQ ID NO: 63777 - DNA, 20 bp, synthetic construct
  source 1..20: mol_type = other DNA
ctgtgaatatattttaaaaa

SEQ ID NO: 63778 - DNA, 20 bp, synthetic construct
  source 1..20: mol_type = other DNA
gctgtgaatatattttaaaa

SEQ ID NO: 63779 - DNA, 20 bp, synthetic construct
  source 1..20: mol_type = other DNA
tgctgtgaatatattttaaa

SEQ ID NO: 63780 - DNA, 20 bp, synthetic construct
  source 1..20: mol_type = other DNA
atgctgtgaatatattttaa

SEQ ID NO: 63781 - DNA, 20 bp, synthetic construct
  source 1..20: mol_type = other DNA
aatgctgtgaatatatttta

SEQ ID NO: 63782 - DNA, 20 bp, synthetic construct
  source 1..20: mol_type = other DNA
caatgctgtgaatatatttt

SEQ ID NO: 63783 - DNA, 20 bp, synthetic construct
  source 1..20: mol_type = other DNA
acaatgctgtgaatatattt

SEQ ID NO: 63784 - DNA, 20 bp, synthetic construct
  source 1..20: mol_type = other DNA
cacaatgctgtgaatatatt

SEQ ID NO: 63785 - DNA, 20 bp, synthetic construct
  source 1..20: mol_type = other DNA
gcacaatgctgtgaatatat

SEQ ID NO: 63786 - DNA, 20 bp, synthetic construct
  source 1..20: mol_type = other DNA
tgcacaatgctgtgaatata

SEQ ID NO: 63787 - DNA, 20 bp, synthetic construct
  source 1..20: mol_type = other DNA
ttgcacaatgctgtgaatat

SEQ ID NO: 63788 - DNA, 20 bp, synthetic construct
  source 1..20: mol_type = other DNA
gttgcacaatgctgtgaata

SEQ ID NO: 63789 - DNA, 20 bp, synthetic construct
  source 1..20: mol_type = other DNA
ggttgcacaatgctgtgaat

SEQ ID NO: 63790 - DNA, 20 bp, synthetic construct
  source 1..20: mol_type = other DNA
tggttgcacaatgctgtgaa

SEQ ID NO: 63791 - DNA, 20 bp, synthetic construct
  source 1..20: mol_type = other DNA
atggttgcacaatgctgtga

SEQ ID NO: 63792 - DNA, 20 bp, synthetic construct
  source 1..20: mol_type = other DNA
gatggttgcacaatgctgtg

SEQ ID NO: 63793 - DNA, 20 bp, synthetic construct
  source 1..20: mol_type = other DNA
tgatggttgcacaatgctgt

SEQ ID NO: 63794 - DNA, 20 bp, synthetic construct
  source 1..20: mol_type = other DNA
gtgatggttgcacaatgctg

SEQ ID NO: 63795 - DNA, 20 bp, synthetic construct
  source 1..20: mol_type = other DNA
agtgatggttgcacaatgct

SEQ ID NO: 63796 - DNA, 20 bp, synthetic construct
  source 1..20: mol_type = other DNA
tagtgatggttgcacaatgc

SEQ ID NO: 63797 - DNA, 20 bp, synthetic construct
  source 1..20: mol_type = other DNA
gtagtgatggttgcacaatg

SEQ ID NO: 63798 - DNA, 20 bp, synthetic construct
  source 1..20: mol_type = other DNA
tgtagtgatggttgcacaat

SEQ ID NO: 63799 - DNA, 20 bp, synthetic construct
  source 1..20: mol_type = other DNA
ttgtagtgatggttgcacaa

SEQ ID NO: 63800 - DNA, 20 bp, synthetic construct
  source 1..20: mol_type = other DNA
attgtagtgatggttgcaca

SEQ ID NO: 63801 - DNA, 20 bp, synthetic construct
  source 1..20: mol_type = other DNA
gattgtagtgatggttgcac

SEQ ID NO: 63802 - DNA, 20 bp, synthetic construct
  source 1..20: mol_type = other DNA
tgattgtagtgatggttgca

SEQ ID NO: 63803 - DNA, 20 bp, synthetic construct
  source 1..20: mol_type = other DNA
ttgattgtagtgatggttgc

SEQ ID NO: 63804 - DNA, 20 bp, synthetic construct
  source 1..20: mol_type = other DNA
attgattgtagtgatggttg

SEQ ID NO: 63805 - DNA, 20 bp, synthetic construct
  source 1..20: mol_type = other DNA
aattgattgtagtgatggtt

SEQ ID NO: 63806 - DNA, 20 bp, synthetic construct
  source 1..20: mol_type = other DNA
aaattgattgtagtgatggt

SEQ ID NO: 63807 - DNA, 20 bp, synthetic construct
  source 1..20: mol_type = other DNA
taaattgattgtagtgatgg

SEQ ID NO: 63808 - DNA, 20 bp, synthetic construct
  source 1..20: mol_type = other DNA
gtaaattgattgtagtgatg

SEQ ID NO: 63809 - DNA, 20 bp, synthetic construct
  source 1..20: mol_type = other DNA
tgtaaattgattgtagtgat

SEQ ID NO: 63810 - DNA, 20 bp, synthetic construct
  source 1..20: mol_type = other DNA
atgtaaattgattgtagtga

SEQ ID NO: 63811 - DNA, 20 bp, synthetic construct
  source 1..20: mol_type = other DNA
aatgtaaattgattgtagtg

SEQ ID NO: 63812 - DNA, 20 bp, synthetic construct
  source 1..20: mol_type = other DNA
aaatgtaaattgattgtagt

SEQ ID NO: 63813 - DNA, 20 bp, synthetic construct
  source 1..20: mol_type = other DNA
aaaatgtaaattgattgtag

SEQ ID NO: 63814 - DNA, 20 bp, synthetic construct
  source 1..20: mol_type = other DNA
gaaaatgtaaattgattgta

SEQ ID NO: 63815 - DNA, 20 bp, synthetic construct
  source 1..20: mol_type = other DNA
tgaaaatgtaaattgattgt

SEQ ID NO: 63816 - DNA, 20 bp, synthetic construct
  source 1..20: mol_type = other DNA
atgaaaatgtaaattgattg

SEQ ID NO: 63817 - DNA, 20 bp, synthetic construct
  source 1..20: mol_type = other DNA
gatgaaaatgtaaattgatt

SEQ ID NO: 63818 - DNA, 20 bp, synthetic construct
  source 1..20: mol_type = other DNA
tgatgaaaatgtaaattgat

SEQ ID NO: 63819 - DNA, 20 bp, synthetic construct
  source 1..20: mol_type = other DNA
gtgatgaaaatgtaaattga

SEQ ID NO: 63820 - DNA, 20 bp, synthetic construct
  source 1..20: mol_type = other DNA
ggtgatgaaaatgtaaattg

SEQ ID NO: 63821 - DNA, 20 bp, synthetic construct
  source 1..20: mol_type = other DNA
gggtgatgaaaatgtaaatt

SEQ ID NO: 63822 - DNA, 20 bp, synthetic construct
  source 1..20: mol_type = other DNA
agggtgatgaaaatgtaaat

SEQ ID NO: 63823 - DNA, 20 bp, synthetic construct
  source 1..20: mol_type = other DNA
cagggtgatgaaaatgtaaa

SEQ ID NO: 63824 - DNA, 20 bp, synthetic construct
  source 1..20: mol_type = other DNA
tcagggtgatgaaaatgtaa

SEQ ID NO: 63825 - DNA, 20 bp, synthetic construct
  source 1..20: mol_type = other DNA
ttcagggtgatgaaaatgta

SEQ ID NO: 63826 - DNA, 20 bp, synthetic construct
  source 1..20: mol_type = other DNA
tttcagggtgatgaaaatgt

SEQ ID NO: 63827 - DNA, 20 bp, synthetic construct
  source 1..20: mol_type = other DNA
ttttcagggtgatgaaaatg

SEQ ID NO: 63828 - DNA, 20 bp, synthetic construct
  source 1..20: mol_type = other DNA
cttttcagggtgatgaaaat

SEQ ID NO: 63829 - DNA, 20 bp, synthetic construct
  source 1..20: mol_type = other DNA
tcttttcagggtgatgaaaa

SEQ ID NO: 63830 - DNA, 20 bp, synthetic construct
  source 1..20: mol_type = other DNA
ttcttttcagggtgatgaaa

SEQ ID NO: 63831 - DNA, 20 bp, synthetic construct
  source 1..20: mol_type = other DNA
tttcttttcagggtgatgaa

SEQ ID NO: 63832 - DNA, 20 bp, synthetic construct
  source 1..20: mol_type = other DNA
gtttcttttcagggtgatga

SEQ ID NO: 63833 - DNA, 20 bp, synthetic construct
  source 1..20: mol_type = other DNA
agtttcttttcagggtgatg

SEQ ID NO: 63834 - DNA, 20 bp, synthetic construct
  source 1..20: mol_type = other DNA
gagtttcttttcagggtgat

SEQ ID NO: 63835 - DNA, 20 bp, synthetic construct
  source 1..20: mol_type = other DNA
agagtttcttttcagggtga

SEQ ID NO: 63836 - DNA, 20 bp, synthetic construct
  source 1..20: mol_type = other DNA
cagagtttcttttcagggtg

SEQ ID NO: 63837 - DNA, 20 bp, synthetic construct
  source 1..20: mol_type = other DNA
tcagagtttcttttcagggt

SEQ ID NO: 63838 - DNA, 20 bp, synthetic construct
  source 1..20: mol_type = other DNA
ttcagagtttcttttcaggg

SEQ ID NO: 63839 - DNA, 20 bp, synthetic construct
  source 1..20: mol_type = other DNA
gttcagagtttcttttcagg

SEQ ID NO: 63840 - DNA, 20 bp, synthetic construct
  source 1..20: mol_type = other DNA
ggttcagagtttcttttcag

SEQ ID NO: 63841 - DNA, 20 bp, synthetic construct
  source 1..20: mol_type = other DNA
gggttcagagtttcttttca

SEQ ID NO: 63842 - DNA, 20 bp, synthetic construct
  source 1..20: mol_type = other DNA
ggggttcagagtttcttttc

SEQ ID NO: 63843 - DNA, 20 bp, synthetic construct
  source 1..20: mol_type = other DNA
aggggttcagagtttctttt

SEQ ID NO: 63844 - DNA, 20 bp, synthetic construct
  source 1..20: mol_type = other DNA
aaggggttcagagtttcttt

SEQ ID NO: 63845 - DNA, 20 bp, synthetic construct
  source 1..20: mol_type = other DNA
taaggggttcagagtttctt

SEQ ID NO: 63846 - DNA, 20 bp, synthetic construct
  source 1..20: mol_type = other DNA
ctaaggggttcagagtttct

SEQ ID NO: 63847 - DNA, 20 bp, synthetic construct
  source 1..20: mol_type = other DNA
gctaaggggttcagagtttc

SEQ ID NO: 63848 - DNA, 20 bp, synthetic construct
  source 1..20: mol_type = other DNA
tgctaaggggttcagagttt

SEQ ID NO: 63849 - DNA, 20 bp, synthetic construct
  source 1..20: mol_type = other DNA
ctgctaaggggttcagagtt

SEQ ID NO: 63850 - DNA, 20 bp, synthetic construct
  source 1..20: mol_type = other DNA
actgctaaggggttcagagt

SEQ ID NO: 63851 - DNA, 20 bp, synthetic construct
  source 1..20: mol_type = other DNA
aactgctaaggggttcagag

SEQ ID NO: 63852 - DNA, 20 bp, synthetic construct
  source 1..20: mol_type = other DNA
gaactgctaaggggttcaga

SEQ ID NO: 63853 - DNA, 20 bp, synthetic construct
  source 1..20: mol_type = other DNA
ggaactgctaaggggttcag

SEQ ID NO: 63854 - DNA, 20 bp, synthetic construct
  source 1..20: mol_type = other DNA
aggaactgctaaggggttca

SEQ ID NO: 63855 - DNA, 20 bp, synthetic construct
  source 1..20: mol_type = other DNA
gaggaactgctaaggggttc

SEQ ID NO: 63856 - DNA, 20 bp, synthetic construct
  source 1..20: mol_type = other DNA
agaggaactgctaaggggtt

SEQ ID NO: 63857 - DNA, 20 bp, synthetic construct
  source 1..20: mol_type = other DNA
gagaggaactgctaaggggt

SEQ ID NO: 63858 - DNA, 20 bp, synthetic construct
  source 1..20: mol_type = other DNA
agagaggaactgctaagggg

SEQ ID NO: 63859 - DNA, 20 bp, synthetic construct
  source 1..20: mol_type = other DNA
cagagaggaactgctaaggg

SEQ ID NO: 63860 - DNA, 20 bp, synthetic construct
  source 1..20: mol_type = other DNA
acagagaggaactgctaagg

SEQ ID NO: 63861 - DNA, 20 bp, synthetic construct
  source 1..20: mol_type = other DNA
aacagagaggaactgctaag

SEQ ID NO: 63862 - DNA, 20 bp, synthetic construct
  source 1..20: mol_type = other DNA
aaacagagaggaactgctaa

SEQ ID NO: 63863 - DNA, 20 bp, synthetic construct
  source 1..20: mol_type = other DNA
caaacagagaggaactgcta

SEQ ID NO: 63864 - DNA, 20 bp, synthetic construct
  source 1..20: mol_type = other DNA
acaaacagagaggaactgct

SEQ ID NO: 63865 - DNA, 20 bp, synthetic construct
  source 1..20: mol_type = other DNA
aacaaacagagaggaactgc

SEQ ID NO: 63866 - DNA, 20 bp, synthetic construct
  source 1..20: mol_type = other DNA
aaacaaacagagaggaactg

SEQ ID NO: 63867 - DNA, 20 bp, synthetic construct
  source 1..20: mol_type = other DNA
gaaacaaacagagaggaact

SEQ ID NO: 63868 - DNA, 20 bp, synthetic construct
  source 1..20: mol_type = other DNA
tgaaacaaacagagaggaac

SEQ ID NO: 63869 - DNA, 20 bp, synthetic construct
  source 1..20: mol_type = other DNA
ttgaaacaaacagagaggaa

SEQ ID NO: 63870 - DNA, 20 bp, synthetic construct
  source 1..20: mol_type = other DNA
attgaaacaaacagagagga

SEQ ID NO: 63871 - DNA, 20 bp, synthetic construct
  source 1..20: mol_type = other DNA
aattgaaacaaacagagagg

SEQ ID NO: 63872 - DNA, 20 bp, synthetic construct
  source 1..20: mol_type = other DNA
aaattgaaacaaacagagag

SEQ ID NO: 63873 - DNA, 20 bp, synthetic construct
  source 1..20: mol_type = other DNA
aaaattgaaacaaacagaga

SEQ ID NO: 63874 - DNA, 20 bp, synthetic construct
  source 1..20: mol_type = other DNA
gaaaattgaaacaaacagag

SEQ ID NO: 63875 - DNA, 20 bp, synthetic construct
  source 1..20: mol_type = other DNA
ggaaaattgaaacaaacaga

SEQ ID NO: 63876 - DNA, 20 bp, synthetic construct
  source 1..20: mol_type = other DNA
gggaaaattgaaacaaacag

SEQ ID NO: 63877 - DNA, 20 bp, synthetic construct
  source 1..20: mol_type = other DNA
ggggaaaattgaaacaaaca

SEQ ID NO: 63878 - DNA, 20 bp, synthetic construct
  source 1..20: mol_type = other DNA
tggggaaaattgaaacaaac

SEQ ID NO: 63879 - DNA, 20 bp, synthetic construct
  source 1..20: mol_type = other DNA
ctggggaaaattgaaacaaa

SEQ ID NO: 63880 - DNA, 20 bp, synthetic construct
  source 1..20: mol_type = other DNA
gctggggaaaattgaaacaa

SEQ ID NO: 63881 - DNA, 20 bp, synthetic construct
  source 1..20: mol_type = other DNA
agctggggaaaattgaaaca

SEQ ID NO: 63882 - DNA, 20 bp, synthetic construct
  source 1..20: mol_type = other DNA
gagctggggaaaattgaaac

SEQ ID NO: 63883 - DNA, 20 bp, synthetic construct
  source 1..20: mol_type = other DNA
ggagctggggaaaattgaaa

SEQ ID NO: 63884 - DNA, 20 bp, synthetic construct
  source 1..20: mol_type = other DNA
tggagctggggaaaattgaa

SEQ ID NO: 63885 - DNA, 20 bp, synthetic construct
  source 1..20: mol_type = other DNA
ctggagctggggaaaattga

SEQ ID NO: 63886 - DNA, 20 bp, synthetic construct
  source 1..20: mol_type = other DNA
cctggagctggggaaaattg

SEQ ID NO: 63887 - DNA, 20 bp, synthetic construct
  source 1..20: mol_type = other DNA
gcctggagctggggaaaatt

SEQ ID NO: 63888 - DNA, 20 bp, synthetic construct
  source 1..20: mol_type = other DNA
tgcctggagctggggaaaat

SEQ ID NO: 63889 - DNA, 20 bp, synthetic construct
  source 1..20: mol_type = other DNA
ttgcctggagctggggaaaa

SEQ ID NO: 63890 - DNA, 20 bp, synthetic construct
  source 1..20: mol_type = other DNA
gttgcctggagctggggaaa

SEQ ID NO: 63891 - DNA, 20 bp, synthetic construct
  source 1..20: mol_type = other DNA
agttgcctggagctggggaa

SEQ ID NO: 63892 - DNA, 20 bp, synthetic construct
  source 1..20: mol_type = other DNA
tagttgcctggagctgggga

SEQ ID NO: 63893 - DNA, 20 bp, synthetic construct
  source 1..20: mol_type = other DNA
atagttgcctggagctgggg

SEQ ID NO: 63894 - DNA, 20 bp, synthetic construct
  source 1..20: mol_type = other DNA
aatagttgcctggagctggg

SEQ ID NO: 63895 - DNA, 20 bp, synthetic construct
  source 1..20: mol_type = other DNA
caatagttgcctggagctgg

SEQ ID NO: 63896 - DNA, 20 bp, synthetic construct
  source 1..20: mol_type = other DNA
tcaatagttgcctggagctg

SEQ ID NO: 63897 - DNA, 20 bp, synthetic construct
  source 1..20: mol_type = other DNA
atcaatagttgcctggagct

SEQ ID NO: 63898 - DNA, 20 bp, synthetic construct
  source 1..20: mol_type = other DNA
aatcaatagttgcctggagc

SEQ ID NO: 63899 - DNA, 20 bp, synthetic construct
  source 1..20: mol_type = other DNA
aaatcaatagttgcctggag

SEQ ID NO: 63900 - DNA, 20 bp, synthetic construct
  source 1..20: mol_type = other DNA
taaatcaatagttgcctgga

SEQ ID NO: 63901 - DNA, 20 bp, synthetic construct
  source 1..20: mol_type = other DNA
ataaatcaatagttgcctgg

SEQ ID NO: 63902 - DNA, 20 bp, synthetic construct
  source 1..20: mol_type = other DNA
aataaatcaatagttgcctg

SEQ ID NO: 63903 - DNA, 20 bp, synthetic construct
  source 1..20: mol_type = other DNA
caataaatcaatagttgcct

SEQ ID NO: 63904 - DNA, 20 bp, synthetic construct
  source 1..20: mol_type = other DNA
acaataaatcaatagttgcc

SEQ ID NO: 63905 - DNA, 20 bp, synthetic construct
  source 1..20: mol_type = other DNA
gacaataaatcaatagttgc

SEQ ID NO: 63906 - DNA, 20 bp, synthetic construct
  source 1..20: mol_type = other DNA
agacaataaatcaatagttg

SEQ ID NO: 63907 - DNA, 20 bp, synthetic construct
  source 1..20: mol_type = other DNA
aagacaataaatcaatagtt

SEQ ID NO: 63908 - DNA, 20 bp, synthetic construct
  source 1..20: mol_type = other DNA
gaagacaataaatcaatagt

SEQ ID NO: 63909 - DNA, 20 bp, synthetic construct
  source 1..20: mol_type = other DNA
tgaagacaataaatcaatag

SEQ ID NO: 63910 - DNA, 20 bp, synthetic construct
  source 1..20: mol_type = other DNA
atgaagacaataaatcaata

SEQ ID NO: 63911 - DNA, 20 bp, synthetic construct
  source 1..20: mol_type = other DNA
tatgaagacaataaatcaat

SEQ ID NO: 63912 - DNA, 20 bp, synthetic construct
  source 1..20: mol_type = other DNA
ctatgaagacaataaatcaa

SEQ ID NO: 63913 - DNA, 20 bp, synthetic construct
  source 1..20: mol_type = other DNA
cctatgaagacaataaatca

SEQ ID NO: 63914 - DNA, 20 bp, synthetic construct
  source 1..20: mol_type = other DNA
acctatgaagacaataaatc

SEQ ID NO: 63915 - DNA, 20 bp, synthetic construct
  source 1..20: mol_type = other DNA
aacctatgaagacaataaat

SEQ ID NO: 63916 - DNA, 20 bp, synthetic construct
  source 1..20: mol_type = other DNA
aaacctatgaagacaataaa

SEQ ID NO: 63917 - DNA, 20 bp, synthetic construct
  source 1..20: mol_type = other DNA
caaacctatgaagacaataa

SEQ ID NO: 63918 - DNA, 20 bp, synthetic construct
  source 1..20: mol_type = other DNA
gcaaacctatgaagacaata

SEQ ID NO: 63919 - DNA, 20 bp, synthetic construct
  source 1..20: mol_type = other DNA
ggcaaacctatgaagacaat

SEQ ID NO: 63920 - DNA, 20 bp, synthetic construct
  source 1..20: mol_type = other DNA
gggcaaacctatgaagacaa

SEQ ID NO: 63921 - DNA, 20 bp, synthetic construct
  source 1..20: mol_type = other DNA
tgggcaaacctatgaagaca

SEQ ID NO: 63922 - DNA, 20 bp, synthetic construct
  source 1..20: mol_type = other DNA
atgggcaaacctatgaagac

SEQ ID NO: 63923 - DNA, 20 bp, synthetic construct
  source 1..20: mol_type = other DNA
aatgggcaaacctatgaaga

SEQ ID NO: 63924 - DNA, 20 bp, synthetic construct
  source 1..20: mol_type = other DNA
gaatgggcaaacctatgaag

SEQ ID NO: 63925 - DNA, 20 bp, synthetic construct
  source 1..20: mol_type = other DNA
agaatgggcaaacctatgaa

SEQ ID NO: 63926 - DNA, 20 bp, synthetic construct
  source 1..20: mol_type = other DNA
cagaatgggcaaacctatga

SEQ ID NO: 63927 - DNA, 20 bp, synthetic construct
  source 1..20: mol_type = other DNA
ccagaatgggcaaacctatg

SEQ ID NO: 63928 - DNA, 20 bp, synthetic construct
  source 1..20: mol_type = other DNA
tccagaatgggcaaacctat

SEQ ID NO: 63929 - DNA, 20 bp, synthetic construct
  source 1..20: mol_type = other DNA
gtccagaatgggcaaaccta

SEQ ID NO: 63930 - DNA, 20 bp, synthetic construct
  source 1..20: mol_type = other DNA
tgtccagaatgggcaaacct

SEQ ID NO: 63931 - DNA, 20 bp, synthetic construct
  source 1..20: mol_type = other DNA
atgtccagaatgggcaaacc

SEQ ID NO: 63932 - DNA, 20 bp, synthetic construct
  source 1..20: mol_type = other DNA
aatgtccagaatgggcaaac

SEQ ID NO: 63933 - DNA, 20 bp, synthetic construct
  source 1..20: mol_type = other DNA
caatgtccagaatgggcaaa

SEQ ID NO: 63934 - DNA, 20 bp, synthetic construct
  source 1..20: mol_type = other DNA
gcaatgtccagaatgggcaa

SEQ ID NO: 63935 - DNA, 20 bp, synthetic construct
  source 1..20: mol_type = other DNA
cgcaatgtccagaatgggca

SEQ ID NO: 63936 - DNA, 20 bp, synthetic construct
  source 1..20: mol_type = other DNA
acgcaatgtccagaatgggc

SEQ ID NO: 63937 - DNA, 20 bp, synthetic construct
  source 1..20: mol_type = other DNA
tacgcaatgtccagaatggg

SEQ ID NO: 63938 - DNA, 20 bp, synthetic construct
  source 1..20: mol_type = other DNA
atacgcaatgtccagaatgg

SEQ ID NO: 63939 - DNA, 20 bp, synthetic construct
  source 1..20: mol_type = other DNA
aatacgcaatgtccagaatg

SEQ ID NO: 63940 - DNA, 20 bp, synthetic construct
  source 1..20: mol_type = other DNA
taatacgcaatgtccagaat

SEQ ID NO: 63941 - DNA, 20 bp, synthetic construct
  source 1..20: mol_type = other DNA
ttaatacgcaatgtccagaa

SEQ ID NO: 63942 - DNA, 20 bp, synthetic construct
  source 1..20: mol_type = other DNA
attaatacgcaatgtccaga

SEQ ID NO: 63943 - DNA, 20 bp, synthetic construct
  source 1..20: mol_type = other DNA
cattaatacgcaatgtccag

SEQ ID NO: 63944 - DNA, 20 bp, synthetic construct
  source 1..20: mol_type = other DNA
ccattaatacgcaatgtcca

SEQ ID NO: 63945 - DNA, 20 bp, synthetic construct
  source 1..20: mol_type = other DNA
tccattaatacgcaatgtcc

SEQ ID NO: 63946 - DNA, 20 bp, synthetic construct
  source 1..20: mol_type = other DNA
ttccattaatacgcaatgtc

SEQ ID NO: 63947 - DNA, 20 bp, synthetic construct
  source 1..20: mol_type = other DNA
attccattaatacgcaatgt

SEQ ID NO: 63948 - DNA, 20 bp, synthetic construct
  source 1..20: mol_type = other DNA
gattccattaatacgcaatg

SEQ ID NO: 63949 - DNA, 20 bp, synthetic construct
  source 1..20: mol_type = other DNA
tgattccattaatacgcaat

SEQ ID NO: 63950 - DNA, 20 bp, synthetic construct
  source 1..20: mol_type = other DNA
atgattccattaatacgcaa

SEQ ID NO: 63951 - DNA, 20 bp, synthetic construct
  source 1..20: mol_type = other DNA
tatgattccattaatacgca

SEQ ID NO: 63952 - DNA, 20 bp, synthetic construct
  source 1..20: mol_type = other DNA
atatgattccattaatacgc

SEQ ID NO: 63953 - DNA, 20 bp, synthetic construct
  source 1..20: mol_type = other DNA
tatatgattccattaatacg

SEQ ID NO: 63954 - DNA, 20 bp, synthetic construct
  source 1..20: mol_type = other DNA
ttatatgattccattaatac

SEQ ID NO: 63955 - DNA, 20 bp, synthetic construct
  source 1..20: mol_type = other DNA
attatatgattccattaata

SEQ ID NO: 63956 - DNA, 20 bp, synthetic construct
  source 1..20: mol_type = other DNA
tattatatgattccattaat

SEQ ID NO: 63957 - DNA, 20 bp, synthetic construct
  source 1..20: mol_type = other DNA
atattatatgattccattaa

SEQ ID NO: 63958 - DNA, 20 bp, synthetic construct
  source 1..20: mol_type = other DNA
tatattatatgattccatta

SEQ ID NO: 63959 - DNA, 20 bp, synthetic construct
  source 1..20: mol_type = other DNA
atatattatatgattccatt

SEQ ID NO: 63960 - DNA, 20 bp, synthetic construct
  source 1..20: mol_type = other DNA
tatatattatatgattccat

SEQ ID NO: 63961 - DNA, 20 bp, synthetic construct
  source 1..20: mol_type = other DNA
ctatatattatatgattcca

SEQ ID NO: 63962 - DNA, 20 bp, synthetic construct
  source 1..20: mol_type = other DNA
gctatatattatatgattcc

SEQ ID NO: 63963 - DNA, 20 bp, synthetic construct
  source 1..20: mol_type = other DNA
ggctatatattatatgattc

SEQ ID NO: 63964 - DNA, 20 bp, synthetic construct
  source 1..20: mol_type = other DNA
aggctatatattatatgatt

SEQ ID NO: 63965 - DNA, 20 bp, synthetic construct
  source 1..20: mol_type = other DNA
aaggctatatattatatgat

SEQ ID NO: 63966 - DNA, 20 bp, synthetic construct
  source 1..20: mol_type = other DNA
aaaggctatatattatatga

SEQ ID NO: 63967 - DNA, 20 bp, synthetic construct
  source 1..20: mol_type = other DNA
aaaaggctatatattatatg

SEQ ID NO: 63968 - DNA, 20 bp, synthetic construct
  source 1..20: mol_type = other DNA
aaaaaggctatatattatat

SEQ ID NO: 63969 - DNA, 20 bp, synthetic construct
  source 1..20: mol_type = other DNA
aaaaaaggctatatattata

SEQ ID NO: 63970 - DNA, 20 bp, synthetic construct
  source 1..20: mol_type = other DNA
aaaaaaaggctatatattat

SEQ ID NO: 63971 - DNA, 20 bp, synthetic construct
  source 1..20: mol_type = other DNA
aaaaaaaaggctatatatta

SEQ ID NO: 63972 - DNA, 20 bp, synthetic construct
  source 1..20: mol_type = other DNA
aaaaaaaaaggctatatatt

SEQ ID NO: 63973 - DNA, 20 bp, synthetic construct
  source 1..20: mol_type = other DNA
gaaaaaaaaaggctatatat

SEQ ID NO: 63974 - DNA, 20 bp, synthetic construct
  source 1..20: mol_type = other DNA
agaaaaaaaaaggctatata

SEQ ID NO: 63975 - DNA, 20 bp, synthetic construct
  source 1..20: mol_type = other DNA
aagaaaaaaaaaggctatat

SEQ ID NO: 63976 - DNA, 20 bp, synthetic construct
  source 1..20: mol_type = other DNA
aaagaaaaaaaaaggctata

SEQ ID NO: 63977 - DNA, 20 bp, synthetic construct
  source 1..20: mol_type = other DNA
aaaagaaaaaaaaaggctat

SEQ ID NO: 63978 - DNA, 20 bp, synthetic construct
  source 1..20: mol_type = other DNA
aaaaagaaaaaaaaaggcta

SEQ ID NO: 63979 - DNA, 20 bp, synthetic construct
  source 1..20: mol_type = other DNA
aaaaaagaaaaaaaaaggct

SEQ ID NO: 63980 - DNA, 20 bp, synthetic construct
  source 1..20: mol_type = other DNA
aaaaaaagaaaaaaaaaggc

SEQ ID NO: 63981 - DNA, 20 bp, synthetic construct
  source 1..20: mol_type = other DNA
aaaaaaaagaaaaaaaaagg

SEQ ID NO: 63982 - DNA, 20 bp, synthetic construct
  source 1..20: mol_type = other DNA
aaaaaaaaagaaaaaaaaag

SEQ ID NO: 63983 - DNA, 20 bp, synthetic construct
  source 1..20: mol_type = other DNA
aaaaaaaaaagaaaaaaaaa

SEQ ID NO: 63984 - DNA, 20 bp, synthetic construct
  source 1..20: mol_type = other DNA
aaaaaaaaaaagaaaaaaaa

SEQ ID NO: 63985 - DNA, 20 bp, synthetic construct
  source 1..20: mol_type = other DNA
aaaaaaaaaaaagaaaaaaa

SEQ ID NO: 63986 - DNA, 20 bp, synthetic construct
  source 1..20: mol_type = other DNA
caaaaaaaaaaaagaaaaaa

SEQ ID NO: 63987 - DNA, 20 bp, synthetic construct
  source 1..20: mol_type = other DNA
tcaaaaaaaaaaaagaaaaa

SEQ ID NO: 63988 - DNA, 20 bp, synthetic construct
  source 1..20: mol_type = other DNA
ttcaaaaaaaaaaaagaaaa

SEQ ID NO: 63989 - DNA, 20 bp, synthetic construct
  source 1..20: mol_type = other DNA
tttcaaaaaaaaaaaagaaa

SEQ ID NO: 63990 - DNA, 20 bp, synthetic construct
  source 1..20: mol_type = other DNA
gtttcaaaaaaaaaaaagaa

SEQ ID NO: 63991 - DNA, 20 bp, synthetic construct
  source 1..20: mol_type = other DNA
tgtttcaaaaaaaaaaaaga

SEQ ID NO: 63992 - DNA, 20 bp, synthetic construct
  source 1..20: mol_type = other DNA
ctgtttcaaaaaaaaaaaag

SEQ ID NO: 63993 - DNA, 20 bp, synthetic construct
  source 1..20: mol_type = other DNA
tctgtttcaaaaaaaaaaaa

SEQ ID NO: 63994 - DNA, 20 bp, synthetic construct
  source 1..20: mol_type = other DNA
ctctgtttcaaaaaaaaaaa

SEQ ID NO: 63995 - DNA, 20 bp, synthetic construct
  source 1..20: mol_type = other DNA
actctgtttcaaaaaaaaaa

SEQ ID NO: 63996 - DNA, 20 bp, synthetic construct
  source 1..20: mol_type = other DNA
gactctgtttcaaaaaaaaa

SEQ ID NO: 63997 - DNA, 20 bp, synthetic construct
  source 1..20: mol_type = other DNA
agactctgtttcaaaaaaaa

SEQ ID NO: 63998 - DNA, 20 bp, synthetic construct
  source 1..20: mol_type = other DNA
gagactctgtttcaaaaaaa

SEQ ID NO: 63999 - DNA, 20 bp, synthetic construct
  source 1..20: mol_type = other DNA
tgagactctgtttcaaaaaa

SEQ ID NO: 64000 - DNA, 20 bp, synthetic construct
  source 1..20: mol_type = other DNA
gtgagactctgtttcaaaaa

SEQ ID NO: 64001 - DNA, 20 bp, synthetic construct
  source 1..20: mol_type = other DNA
agtgagactctgtttcaaaa

SEQ ID NO: 64002 - DNA, 20 bp, synthetic construct
  source 1..20: mol_type = other DNA
cagtgagactctgtttcaaa

SEQ ID NO: 64003 - DNA, 20 bp, synthetic construct
  source 1..20: mol_type = other DNA
acagtgagactctgtttcaa

SEQ ID NO: 64004 - DNA, 20 bp, synthetic construct
  source 1..20: mol_type = other DNA
cacagtgagactctgtttca

SEQ ID NO: 64005 - DNA, 20 bp, synthetic construct
  source 1..20: mol_type = other DNA
acacagtgagactctgtttc

SEQ ID NO: 64006 - DNA, 20 bp, synthetic construct
  source 1..20: mol_type = other DNA
gacacagtgagactctgttt

SEQ ID NO: 64007 - DNA, 20 bp, synthetic construct
  source 1..20: mol_type = other DNA
cgacacagtgagactctgtt

SEQ ID NO: 64008 - DNA, 20 bp, synthetic construct
  source 1..20: mol_type = other DNA
gcgacacagtgagactctgt

SEQ ID NO: 64009 - DNA, 20 bp, synthetic construct
  source 1..20: mol_type = other DNA
ggcgacacagtgagactctg

SEQ ID NO: 64010 - DNA, 20 bp, synthetic construct
  source 1..20: mol_type = other DNA
gggcgacacagtgagactct

SEQ ID NO: 64011 - DNA, 20 bp, synthetic construct
  source 1..20: mol_type = other DNA
tgggcgacacagtgagactc

SEQ ID NO: 64012 - DNA, 20 bp, synthetic construct
  source 1..20: mol_type = other DNA
ctgggcgacacagtgagact

SEQ ID NO: 64013 - DNA, 20 bp, synthetic construct
  source 1..20: mol_type = other DNA
cctgggcgacacagtgagac

SEQ ID NO: 64014 - DNA, 20 bp, synthetic construct
  source 1..20: mol_type = other DNA
gcctgggcgacacagtgaga

SEQ ID NO: 64015 - DNA, 20 bp, synthetic construct
  source 1..20: mol_type = other DNA
agcctgggcgacacagtgag

SEQ ID NO: 64016 - DNA, 20 bp, synthetic construct
  source 1..20: mol_type = other DNA
cagcctgggcgacacagtga

SEQ ID NO: 64017 - DNA, 20 bp, synthetic construct
  source 1..20: mol_type = other DNA
ccagcctgggcgacacagtg

SEQ ID NO: 64018 - DNA, 20 bp, synthetic construct
  source 1..20: mol_type = other DNA
tccagcctgggcgacacagt

SEQ ID NO: 64019 - DNA, 20 bp, synthetic construct
  source 1..20: mol_type = other DNA
ctccagcctgggcgacacag

SEQ ID NO: 64020 - DNA, 20 bp, synthetic construct
  source 1..20: mol_type = other DNA
gctccagcctgggcgacaca

SEQ ID NO: 64021 - DNA, 20 bp, synthetic construct
  source 1..20: mol_type = other DNA
cgctccagcctgggcgacac

SEQ ID NO: 64022 - DNA, 20 bp, synthetic construct
  source 1..20: mol_type = other DNA
gcgctccagcctgggcgaca

SEQ ID NO: 64023 - DNA, 20 bp, synthetic construct
  source 1..20: mol_type = other DNA
tgcgctccagcctgggcgac

SEQ ID NO: 64024 - DNA, 20 bp, synthetic construct
  source 1..20: mol_type = other DNA
ctgcgctccagcctgggcga

SEQ ID NO: 64025 - DNA, 20 bp, synthetic construct
  source 1..20: mol_type = other DNA
actgcgctccagcctgggcg

SEQ ID NO: 64026 - DNA, 20 bp, synthetic construct
  source 1..20: mol_type = other DNA
cactgcgctccagcctgggc

SEQ ID NO: 64027 - DNA, 20 bp, synthetic construct
  source 1..20: mol_type = other DNA
ccactgcgctccagcctggg

SEQ ID NO: 64028 - DNA, 20 bp, synthetic construct
  source 1..20: mol_type = other DNA
gccactgcgctccagcctgg

SEQ ID NO: 64029 - DNA, 20 bp, synthetic construct
  source 1..20: mol_type = other DNA
tgccactgcgctccagcctg

SEQ ID NO: 64030 - DNA, 20 bp, synthetic construct
  source 1..20: mol_type = other DNA
atgccactgcgctccagcct

SEQ ID NO: 64031 - DNA, 20 bp, synthetic construct
  source 1..20: mol_type = other DNA
catgccactgcgctccagcc

SEQ ID NO: 64032 - DNA, 20 bp, synthetic construct
  source 1..20: mol_type = other DNA
tcatgccactgcgctccagc

SEQ ID NO: 64033 - DNA, 20 bp, synthetic construct
  source 1..20: mol_type = other DNA
atcatgccactgcgctccag

SEQ ID NO: 64034 - DNA, 20 bp, synthetic construct
  source 1..20: mol_type = other DNA
aatcatgccactgcgctcca

SEQ ID NO: 64035 - DNA, 20 bp, synthetic construct
  source 1..20: mol_type = other DNA
caatcatgccactgcgctcc

SEQ ID NO: 64036 - DNA, 20 bp, synthetic construct
  source 1..20: mol_type = other DNA
gcaatcatgccactgcgctc

SEQ ID NO: 64037 - DNA, 20 bp, synthetic construct
  source 1..20: mol_type = other DNA
tgcaatcatgccactgcgct

SEQ ID NO: 64038 - DNA, 20 bp, synthetic construct
  source 1..20: mol_type = other DNA
ctgcaatcatgccactgcgc

SEQ ID NO: 64039 - DNA, 20 bp, synthetic construct
  source 1..20: mol_type = other DNA
gctgcaatcatgccactgcg

SEQ ID NO: 64040 - DNA, 20 bp, synthetic construct
  source 1..20: mol_type = other DNA
agctgcaatcatgccactgc

SEQ ID NO: 64041 - DNA, 20 bp, synthetic construct
  source 1..20: mol_type = other DNA
gagctgcaatcatgccactg

SEQ ID NO: 64042 - DNA, 20 bp, synthetic construct
  source 1..20: mol_type = other DNA
tgagctgcaatcatgccact

SEQ ID NO: 64043 - DNA, 20 bp, synthetic construct
  source 1..20: mol_type = other DNA
gtgagctgcaatcatgccac

SEQ ID NO: 64044 - DNA, 20 bp, synthetic construct
  source 1..20: mol_type = other DNA
agtgagctgcaatcatgcca

SEQ ID NO: 64045 - DNA, 20 bp, synthetic construct
  source 1..20: mol_type = other DNA
cagtgagctgcaatcatgcc

SEQ ID NO: 64046 - DNA, 20 bp, synthetic construct
  source 1..20: mol_type = other DNA
gcagtgagctgcaatcatgc

SEQ ID NO: 64047 - DNA, 20 bp, synthetic construct
  source 1..20: mol_type = other DNA
tgcagtgagctgcaatcatg

SEQ ID NO: 64048 - DNA, 20 bp, synthetic construct
  source 1..20: mol_type = other DNA
atgcagtgagctgcaatcat

SEQ ID NO: 64049 - DNA, 20 bp, synthetic construct
  source 1..20: mol_type = other DNA
gatgcagtgagctgcaatca

SEQ ID NO: 64050 - DNA, 20 bp, synthetic construct
  source 1..20: mol_type = other DNA
ggatgcagtgagctgcaatc

SEQ ID NO: 64051 - DNA, 20 bp, synthetic construct
  source 1..20: mol_type = other DNA
aggatgcagtgagctgcaat

SEQ ID NO: 64052 - DNA, 20 bp, synthetic construct
  source 1..20: mol_type = other DNA
gaggatgcagtgagctgcaa

SEQ ID NO: 64053 - DNA, 20 bp, synthetic construct
  source 1..20: mol_type = other DNA
agaggatgcagtgagctgca

SEQ ID NO: 64054 - DNA, 20 bp, synthetic construct
  source 1..20: mol_type = other DNA
cagaggatgcagtgagctgc

SEQ ID NO: 64055 - DNA, 20 bp, synthetic construct
  source 1..20: mol_type = other DNA
gcagaggatgcagtgagctg

SEQ ID NO: 64056 - DNA, 20 bp, synthetic construct
  source 1..20: mol_type = other DNA
ggcagaggatgcagtgagct

SEQ ID NO: 64057 - DNA, 20 bp, synthetic construct
  source 1..20: mol_type = other DNA
aggcagaggatgcagtgagc

SEQ ID NO: 64058 - DNA, 20 bp, synthetic construct
  source 1..20: mol_type = other DNA
gaggcagaggatgcagtgag

SEQ ID NO: 64059 - DNA, 20 bp, synthetic construct
  source 1..20: mol_type = other DNA
ggaggcagaggatgcagtga

SEQ ID NO: 64060 - DNA, 20 bp, synthetic construct
  source 1..20: mol_type = other DNA
gggaggcagaggatgcagtg

SEQ ID NO: 64061 - DNA, 20 bp, synthetic construct
  source 1..20: mol_type = other DNA
tgggaggcagaggatgcagt

SEQ ID NO: 64062 - DNA, 20 bp, synthetic construct
  source 1..20: mol_type = other DNA
ctgggaggcagaggatgcag

SEQ ID NO: 64063 - DNA, 20 bp, synthetic construct
  source 1..20: mol_type = other DNA
cctgggaggcagaggatgca

SEQ ID NO: 64064 - DNA, 20 bp, synthetic construct
  source 1..20: mol_type = other DNA
acctgggaggcagaggatgc

SEQ ID NO: 64065 - DNA, 20 bp, synthetic construct
  source 1..20: mol_type = other DNA
aacctgggaggcagaggatg

SEQ ID NO: 64066 - DNA, 20 bp, synthetic construct
  source 1..20: mol_type = other DNA
caacctgggaggcagaggat

SEQ ID NO: 64067 - DNA, 20 bp, synthetic construct
  source 1..20: mol_type = other DNA
tcaacctgggaggcagagga

SEQ ID NO: 64068 - DNA, 20 bp, synthetic construct
  source 1..20: mol_type = other DNA
ttcaacctgggaggcagagg

SEQ ID NO: 64069 - DNA, 20 bp, synthetic construct
  source 1..20: mol_type = other DNA
cttcaacctgggaggcagag

SEQ ID NO: 64070 - DNA, 20 bp, synthetic construct
  source 1..20: mol_type = other DNA
gcttcaacctgggaggcaga

SEQ ID NO: 64071 - DNA, 20 bp, synthetic construct
  source 1..20: mol_type = other DNA
cgcttcaacctgggaggcag

SEQ ID NO: 64072 - DNA, 20 bp, synthetic construct
  source 1..20: mol_type = other DNA
tcgcttcaacctgggaggca

SEQ ID NO: 64073 - DNA, 20 bp, synthetic construct
  source 1..20: mol_type = other DNA
atcgcttcaacctgggaggc

SEQ ID NO: 64074 - DNA, 20 bp, synthetic construct
  source 1..20: mol_type = other DNA
aatcgcttcaacctgggagg

SEQ ID NO: 64075 - DNA, 20 bp, synthetic construct
  source 1..20: mol_type = other DNA
gaatcgcttcaacctgggag

SEQ ID NO: 64076 - DNA, 20 bp, synthetic construct
  source 1..20: mol_type = other DNA
agaatcgcttcaacctggga

SEQ ID NO: 64077 - DNA, 20 bp, synthetic construct
  source 1..20: mol_type = other DNA
gagaatcgcttcaacctggg

SEQ ID NO: 64078 - DNA, 20 bp, synthetic construct
  source 1..20: mol_type = other DNA
ggagaatcgcttcaacctgg

SEQ ID NO: 64079 - DNA, 20 bp, synthetic construct
  source 1..20: mol_type = other DNA
aggagaatcgcttcaacctg

SEQ ID NO: 64080 - DNA, 20 bp, synthetic construct
  source 1..20: mol_type = other DNA
caggagaatcgcttcaacct

SEQ ID NO: 64081 - DNA, 20 bp, synthetic construct
  source 1..20: mol_type = other DNA
gcaggagaatcgcttcaacc

SEQ ID NO: 64082 - DNA, 20 bp, synthetic construct
  source 1..20: mol_type = other DNA
ggcaggagaatcgcttcaac

SEQ ID NO: 64083 - DNA, 20 bp, synthetic construct
  source 1..20: mol_type = other DNA
aggcaggagaatcgcttcaa

SEQ ID NO: 64084 - DNA, 20 bp, synthetic construct
  source 1..20: mol_type = other DNA
gaggcaggagaatcgcttca

SEQ ID NO: 64085 - DNA, 20 bp, synthetic construct
  source 1..20: mol_type = other DNA
tgaggcaggagaatcgcttc

SEQ ID NO: 64086 - DNA, 20 bp, synthetic construct
  source 1..20: mol_type = other DNA
ctgaggcaggagaatcgctt

SEQ ID NO: 64087 - DNA, 20 bp, synthetic construct
  source 1..20: mol_type = other DNA
gctgaggcaggagaatcgct

SEQ ID NO: 64088 - DNA, 20 bp, synthetic construct
  source 1..20: mol_type = other DNA
ggctgaggcaggagaatcgc

SEQ ID NO: 64089 - DNA, 20 bp, synthetic construct
  source 1..20: mol_type = other DNA
aggctgaggcaggagaatcg

SEQ ID NO: 64090 - DNA, 20 bp, synthetic construct
  source 1..20: mol_type = other DNA
gaggctgaggcaggagaatc

SEQ ID NO: 64091 - DNA, 20 bp, synthetic construct
  source 1..20: mol_type = other DNA
agaggctgaggcaggagaat

SEQ ID NO: 64092 - DNA, 20 bp, synthetic construct
  source 1..20: mol_type = other DNA
aagaggctgaggcaggagaa

SEQ ID NO: 64093 - DNA, 20 bp, synthetic construct
  source 1..20: mol_type = other DNA
caagaggctgaggcaggaga

SEQ ID NO: 64094 - DNA, 20 bp, synthetic construct
  source 1..20: mol_type = other DNA
tcaagaggctgaggcaggag

SEQ ID NO: 64095 - DNA, 20 bp, synthetic construct
  source 1..20: mol_type = other DNA
ctcaagaggctgaggcagga

SEQ ID NO: 64096 - DNA, 20 bp, synthetic construct
  source 1..20: mol_type = other DNA
actcaagaggctgaggcagg

SEQ ID NO: 64097 - DNA, 20 bp, synthetic construct
  source 1..20: mol_type = other DNA
tactcaagaggctgaggcag

SEQ ID NO: 64098 - DNA, 20 bp, synthetic construct
  source 1..20: mol_type = other DNA
ctactcaagaggctgaggca

SEQ ID NO: 64099 - DNA, 20 bp, synthetic construct
  source 1..20: mol_type = other DNA
gctactcaagaggctgaggc

SEQ ID NO: 64100 - DNA, 20 bp, synthetic construct
  source 1..20: mol_type = other DNA
agctactcaagaggctgagg

SEQ ID NO: 64101 - DNA, 20 bp, synthetic construct
  source 1..20: mol_type = other DNA
cagctactcaagaggctgag

SEQ ID NO: 64102 - DNA, 20 bp, synthetic construct
  source 1..20: mol_type = other DNA
ccagctactcaagaggctga

SEQ ID NO: 64103 - DNA, 20 bp, synthetic construct
  source 1..20: mol_type = other DNA
cccagctactcaagaggctg

SEQ ID NO: 64104 - DNA, 20 bp, synthetic construct
  source 1..20: mol_type = other DNA
tcccagctactcaagaggct

SEQ ID NO: 64105 - DNA, 20 bp, synthetic construct
  source 1..20: mol_type = other DNA
gtcccagctactcaagaggc

SEQ ID NO: 64106 - DNA, 20 bp, synthetic construct
  source 1..20: mol_type = other DNA
agtcccagctactcaagagg

SEQ ID NO: 64107 - DNA, 20 bp, synthetic construct
  source 1..20: mol_type = other DNA
tagtcccagctactcaagag

SEQ ID NO: 64108 - DNA, 20 bp, synthetic construct
  source 1..20: mol_type = other DNA
atagtcccagctactcaaga

SEQ ID NO: 64109 - DNA, 20 bp, synthetic construct
  source 1..20: mol_type = other DNA
tatagtcccagctactcaag

SEQ ID NO: 64110 - DNA, 20 bp, synthetic construct
  source 1..20: mol_type = other DNA
ctatagtcccagctactcaa

SEQ ID NO: 64111 - DNA, 20 bp, synthetic construct
  source 1..20: mol_type = other DNA
cctatagtcccagctactca

SEQ ID NO: 64112 - DNA, 20 bp, synthetic construct
  source 1..20: mol_type = other DNA
gcctatagtcccagctactc

SEQ ID NO: 64113 - DNA, 20 bp, synthetic construct
  source 1..20: mol_type = other DNA
cgcctatagtcccagctact

SEQ ID NO: 64114 - DNA, 20 bp, synthetic construct
  source 1..20: mol_type = other DNA
gcgcctatagtcccagctac

SEQ ID NO: 64115 - DNA, 20 bp, synthetic construct
  source 1..20: mol_type = other DNA
ggcgcctatagtcccagcta

SEQ ID NO: 64116 - DNA, 20 bp, synthetic construct
  source 1..20: mol_type = other DNA
aggcgcctatagtcccagct

SEQ ID NO: 64117 - DNA, 20 bp, synthetic construct
  source 1..20: mol_type = other DNA
caggcgcctatagtcccagc

SEQ ID NO: 64118 - DNA, 20 bp, synthetic construct
  source 1..20: mol_type = other DNA
gcaggcgcctatagtcccag

SEQ ID NO: 64119 - DNA, 20 bp, synthetic construct
  source 1..20: mol_type = other DNA
ggcaggcgcctatagtccca

SEQ ID NO: 64120 - DNA, 20 bp, synthetic construct
  source 1..20: mol_type = other DNA
tggcaggcgcctatagtccc

SEQ ID NO: 64121 - DNA, 20 bp, synthetic construct
  source 1..20: mol_type = other DNA
gtggcaggcgcctatagtcc

SEQ ID NO: 64122 - DNA, 20 bp, synthetic construct
  source 1..20: mol_type = other DNA
ggtggcaggcgcctatagtc

SEQ ID NO: 64123 - DNA, 20 bp, synthetic construct
  source 1..20: mol_type = other DNA
tggtggcaggcgcctatagt

SEQ ID NO: 64124 - DNA, 20 bp, synthetic construct
  source 1..20: mol_type = other DNA
gtggtggcaggcgcctatag

SEQ ID NO: 64125 - DNA, 20 bp, synthetic construct
  source 1..20: mol_type = other DNA
tgtggtggcaggcgcctata

SEQ ID NO: 64126 - DNA, 20 bp, synthetic construct
  source 1..20: mol_type = other DNA
gtgtggtggcaggcgcctat

SEQ ID NO: 64127 - DNA, 20 bp, synthetic construct
  source 1..20: mol_type = other DNA
ggtgtggtggcaggcgccta

SEQ ID NO: 64128 - DNA, 20 bp, synthetic construct
  source 1..20: mol_type = other DNA
aggtgtggtggcaggcgcct

SEQ ID NO: 64129 - DNA, 20 bp, synthetic construct
  source 1..20: mol_type = other DNA
taggtgtggtggcaggcgcc

SEQ ID NO: 64130 - DNA, 20 bp, synthetic construct
  source 1..20: mol_type = other DNA
gtaggtgtggtggcaggcgc

SEQ ID NO: 64131 - DNA, 20 bp, synthetic construct
  source 1..20: mol_type = other DNA
agtaggtgtggtggcaggcg

SEQ ID NO: 64132 - DNA, 20 bp, synthetic construct
  source 1..20: mol_type = other DNA
tagtaggtgtggtggcaggc

SEQ ID NO: 64133 - DNA, 20 bp, synthetic construct
  source 1..20: mol_type = other DNA
ttagtaggtgtggtggcagg

SEQ ID NO: 64134 - DNA, 20 bp, synthetic construct
  source 1..20: mol_type = other DNA
attagtaggtgtggtggcag

SEQ ID NO: 64135 - DNA, 20 bp, synthetic construct
  source 1..20: mol_type = other DNA
aattagtaggtgtggtggca

SEQ ID NO: 64136 - DNA, 20 bp, synthetic construct
  source 1..20: mol_type = other DNA
aaattagtaggtgtggtggc

SEQ ID NO: 64137 - DNA, 20 bp, synthetic construct
  source 1..20: mol_type = other DNA
aaaattagtaggtgtggtgg

SEQ ID NO: 64138 - DNA, 20 bp, synthetic construct
  source 1..20: mol_type = other DNA
taaaattagtaggtgtggtg

SEQ ID NO: 64139 - DNA, 20 bp, synthetic construct
  source 1..20: mol_type = other DNA
ataaaattagtaggtgtggt

SEQ ID NO: 64140 - DNA, 20 bp, synthetic construct
  source 1..20: mol_type = other DNA
tataaaattagtaggtgtgg

SEQ ID NO: 64141 - DNA, 20 bp, synthetic construct
  source 1..20: mol_type = other DNA
atataaaattagtaggtgtg

SEQ ID NO: 64142 - DNA, 20 bp, synthetic construct
  source 1..20: mol_type = other DNA
aatataaaattagtaggtgt

SEQ ID NO: 64143 - DNA, 20 bp, synthetic construct
  source 1..20: mol_type = other DNA
aaatataaaattagtaggtg

SEQ ID NO: 64144 - DNA, 20 bp, synthetic construct
  source 1..20: mol_type = other DNA
aaaatataaaattagtaggt

SEQ ID NO: 64145 - DNA, 20 bp, synthetic construct
  source 1..20: mol_type = other DNA
aaaaatataaaattagtagg

SEQ ID NO: 64146 - DNA, 20 bp, synthetic construct
  source 1..20: mol_type = other DNA
taaaaatataaaattagtag

SEQ ID NO: 64147 - DNA, 20 bp, synthetic construct
  source 1..20: mol_type = other DNA
ctaaaaatataaaattagta

SEQ ID NO: 64148 - DNA, 20 bp, synthetic construct
  source 1..20: mol_type = other DNA
actaaaaatataaaattagt

SEQ ID NO: 64149 - DNA, 20 bp, synthetic construct
  source 1..20: mol_type = other DNA
tactaaaaatataaaattag

SEQ ID NO: 64150 - DNA, 20 bp, synthetic construct
  source 1..20: mol_type = other DNA
ttactaaaaatataaaatta

SEQ ID NO: 64151 - DNA, 20 bp, synthetic construct
  source 1..20: mol_type = other DNA
tttactaaaaatataaaatt

SEQ ID NO: 64152 - DNA, 20 bp, synthetic construct
  source 1..20: mol_type = other DNA
ctttactaaaaatataaaat

SEQ ID NO: 64153 - DNA, 20 bp, synthetic construct
  source 1..20: mol_type = other DNA
tctttactaaaaatataaaa

SEQ ID NO: 64154 - DNA, 20 bp, synthetic construct
  source 1..20: mol_type = other DNA
gtctttactaaaaatataaa

SEQ ID NO: 64155 - DNA, 20 bp, synthetic construct
  source 1..20: mol_type = other DNA
cgtctttactaaaaatataa

SEQ ID NO: 64156 - DNA, 20 bp, synthetic construct
  source 1..20: mol_type = other DNA
ccgtctttactaaaaatata

SEQ ID NO: 64157 - DNA, 20 bp, synthetic construct
  source 1..20: mol_type = other DNA
cccgtctttactaaaaatat

SEQ ID NO: 64158 - DNA, 20 bp, synthetic construct
  source 1..20: mol_type = other DNA
ccccgtctttactaaaaata

SEQ ID NO: 64159 - DNA, 20 bp, synthetic construct
  source 1..20: mol_type = other DNA
accccgtctttactaaaaat

SEQ ID NO: 64160 - DNA, 20 bp, synthetic construct
  source 1..20: mol_type = other DNA
aaccccgtctttactaaaaa

SEQ ID NO: 64161 - DNA, 20 bp, synthetic construct
  source 1..20: mol_type = other DNA
caaccccgtctttactaaaa

SEQ ID NO: 64162 - DNA, 20 bp, synthetic construct
  source 1..20: mol_type = other DNA
gcaaccccgtctttactaaa

SEQ ID NO: 64163 - DNA, 20 bp, synthetic construct
  source 1..20: mol_type = other DNA
tgcaaccccgtctttactaa

SEQ ID NO: 64164 - DNA, 20 bp, synthetic construct
  source 1..20: mol_type = other DNA
gtgcaaccccgtctttacta

SEQ ID NO: 64165 - DNA, 20 bp, synthetic construct
  source 1..20: mol_type = other DNA
ggtgcaaccccgtctttact

SEQ ID NO: 64166 - DNA, 20 bp, synthetic construct
  source 1..20: mol_type = other DNA
tggtgcaaccccgtctttac

SEQ ID NO: 64167 - DNA, 20 bp, synthetic construct
  source 1..20: mol_type = other DNA
atggtgcaaccccgtcttta

SEQ ID NO: 64168 - DNA, 20 bp, synthetic construct
  source 1..20: mol_type = other DNA
catggtgcaaccccgtcttt

SEQ ID NO: 64169 - DNA, 20 bp, synthetic construct
  source 1..20: mol_type = other DNA
acatggtgcaaccccgtctt

SEQ ID NO: 64170 - DNA, 20 bp, synthetic construct
  source 1..20: mol_type = other DNA
aacatggtgcaaccccgtct

SEQ ID NO: 64171 - DNA, 20 bp, synthetic construct
  source 1..20: mol_type = other DNA
caacatggtgcaaccccgtc

SEQ ID NO: 64172 - DNA, 20 bp, synthetic construct
  source 1..20: mol_type = other DNA
ccaacatggtgcaaccccgt

SEQ ID NO: 64173 - DNA, 20 bp, synthetic construct
  source 1..20: mol_type = other DNA
gccaacatggtgcaaccccg

SEQ ID NO: 64174 - DNA, 20 bp, synthetic construct
  source 1..20: mol_type = other DNA
ggccaacatggtgcaacccc

SEQ ID NO: 64175 - DNA, 20 bp, synthetic construct
  source 1..20: mol_type = other DNA
tggccaacatggtgcaaccc

SEQ ID NO: 64176 - DNA, 20 bp, synthetic construct
  source 1..20: mol_type = other DNA
ctggccaacatggtgcaacc

SEQ ID NO: 64177 - DNA, 20 bp, synthetic construct
  source 1..20: mol_type = other DNA
cctggccaacatggtgcaac

SEQ ID NO: 64178 - DNA, 20 bp, synthetic construct
  source 1..20: mol_type = other DNA
gcctggccaacatggtgcaa

SEQ ID NO: 64179 - DNA, 20 bp, synthetic construct
  source 1..20: mol_type = other DNA
agcctggccaacatggtgca

SEQ ID NO: 64180 - DNA, 20 bp, synthetic construct
  source 1..20: mol_type = other DNA
cagcctggccaacatggtgc

SEQ ID NO: 64181 - DNA, 20 bp, synthetic construct
  source 1..20: mol_type = other DNA
ccagcctggccaacatggtg

SEQ ID NO: 64182 - DNA, 20 bp, synthetic construct
  source 1..20: mol_type = other DNA
accagcctggccaacatggt

SEQ ID NO: 64183 - DNA, 20 bp, synthetic construct
  source 1..20: mol_type = other DNA
gaccagcctggccaacatgg

SEQ ID NO: 64184 - DNA, 20 bp, synthetic construct
  source 1..20: mol_type = other DNA
agaccagcctggccaacatg

SEQ ID NO: 64185 - DNA, 20 bp, synthetic construct
  source 1..20: mol_type = other DNA
gagaccagcctggccaacat

SEQ ID NO: 64186 - DNA, 20 bp, synthetic construct
  source 1..20: mol_type = other DNA
cgagaccagcctggccaaca

SEQ ID NO: 64187 - DNA, 20 bp, synthetic construct
  source 1..20: mol_type = other DNA
tcgagaccagcctggccaac

SEQ ID NO: 64188 - DNA, 20 bp, synthetic construct
  source 1..20: mol_type = other DNA
ttcgagaccagcctggccaa

SEQ ID NO: 64189 - DNA, 20 bp, synthetic construct
  source 1..20: mol_type = other DNA
attcgagaccagcctggcca

SEQ ID NO: 64190 - DNA, 20 bp, synthetic construct
  source 1..20: mol_type = other DNA
aattcgagaccagcctggcc

SEQ ID NO: 64191 - DNA, 20 bp, synthetic construct
  source 1..20: mol_type = other DNA
gaattcgagaccagcctggc

SEQ ID NO: 64192 - DNA, 20 bp, synthetic construct
  source 1..20: mol_type = other DNA
ggaattcgagaccagcctgg

SEQ ID NO: 64193 - DNA, 20 bp, synthetic construct
  source 1..20: mol_type = other DNA
aggaattcgagaccagcctg

SEQ ID NO: 64194 - DNA, 20 bp, synthetic construct
  source 1..20: mol_type = other DNA
caggaattcgagaccagcct

SEQ ID NO: 64195 - DNA, 20 bp, synthetic construct
  source 1..20: mol_type = other DNA
tcaggaattcgagaccagcc

SEQ ID NO: 64196 - DNA, 20 bp, synthetic construct
  source 1..20: mol_type = other DNA
gtcaggaattcgagaccagc

SEQ ID NO: 64197 - DNA, 20 bp, synthetic construct
  source 1..20: mol_type = other DNA
ggtcaggaattcgagaccag

SEQ ID NO: 64198 - DNA, 20 bp, synthetic construct
  source 1..20: mol_type = other DNA
aggtcaggaattcgagacca

SEQ ID NO: 64199 - DNA, 20 bp, synthetic construct
  source 1..20: mol_type = other DNA
gaggtcaggaattcgagacc

SEQ ID NO: 64200 - DNA, 20 bp, synthetic construct
  source 1..20: mol_type = other DNA
tgaggtcaggaattcgagac

SEQ ID NO: 64201 - DNA, 20 bp, synthetic construct
  source 1..20: mol_type = other DNA
ttgaggtcaggaattcgaga

SEQ ID NO: 64202 - DNA, 20 bp, synthetic construct
  source 1..20: mol_type = other DNA
cttgaggtcaggaattcgag

SEQ ID NO: 64203 - DNA, 20 bp, synthetic construct
  source 1..20: mol_type = other DNA
acttgaggtcaggaattcga

SEQ ID NO: 64204 - DNA, 20 bp, synthetic construct
  source 1..20: mol_type = other DNA
cacttgaggtcaggaattcg

SEQ ID NO: 64205 - DNA, 20 bp, synthetic construct
  source 1..20: mol_type = other DNA
tcacttgaggtcaggaattc

SEQ ID NO: 64206 - DNA, 20 bp, synthetic construct
  source 1..20: mol_type = other DNA
atcacttgaggtcaggaatt

SEQ ID NO: 64207 - DNA, 20 bp, synthetic construct
  source 1..20: mol_type = other DNA
gatcacttgaggtcaggaat

SEQ ID NO: 64208 - DNA, 20 bp, synthetic construct
  source 1..20: mol_type = other DNA
agatcacttgaggtcaggaa

SEQ ID NO: 64209 - DNA, 20 bp, synthetic construct
  source 1..20: mol_type = other DNA
cagatcacttgaggtcagga

SEQ ID NO: 64210 - DNA, 20 bp, synthetic construct
  source 1..20: mol_type = other DNA
gcagatcacttgaggtcagg

SEQ ID NO: 64211 - DNA, 20 bp, synthetic construct
  source 1..20: mol_type = other DNA
ggcagatcacttgaggtcag

SEQ ID NO: 64212 - DNA, 20 bp, synthetic construct
  source 1..20: mol_type = other DNA
gggcagatcacttgaggtca

SEQ ID NO: 64213 - DNA, 20 bp, synthetic construct
  source 1..20: mol_type = other DNA
tgggcagatcacttgaggtc

SEQ ID NO: 64214 - DNA, 20 bp, synthetic construct
  source 1..20: mol_type = other DNA
gtgggcagatcacttgaggt

SEQ ID NO: 64215 - DNA, 20 bp, synthetic construct
  source 1..20: mol_type = other DNA
ggtgggcagatcacttgagg

SEQ ID NO: 64216 - DNA, 20 bp, synthetic construct
  source 1..20: mol_type = other DNA
aggtgggcagatcacttgag

SEQ ID NO: 64217 - DNA, 20 bp, synthetic construct
  source 1..20: mol_type = other DNA
gaggtgggcagatcacttga

SEQ ID NO: 64218 - DNA, 20 bp, synthetic construct
  source 1..20: mol_type = other DNA
cgaggtgggcagatcacttg

SEQ ID NO: 64219 - DNA, 20 bp, synthetic construct
  source 1..20: mol_type = other DNA
ccgaggtgggcagatcactt

SEQ ID NO: 64220 - DNA, 20 bp, synthetic construct
  source 1..20: mol_type = other DNA
tccgaggtgggcagatcact

SEQ ID NO: 64221 - DNA, 20 bp, synthetic construct
  source 1..20: mol_type = other DNA
gtccgaggtgggcagatcac

SEQ ID NO: 64222 - DNA, 20 bp, synthetic construct
  source 1..20: mol_type = other DNA
agtccgaggtgggcagatca

SEQ ID NO: 64223 - DNA, 20 bp, synthetic construct
  source 1..20: mol_type = other DNA
gagtccgaggtgggcagatc

SEQ ID NO: 64224 - DNA, 20 bp, synthetic construct
  source 1..20: mol_type = other DNA
ggagtccgaggtgggcagat

SEQ ID NO: 64225 - DNA, 20 bp, synthetic construct
  source 1..20: mol_type = other DNA
gggagtccgaggtgggcaga

SEQ ID NO: 64226 - DNA, 20 bp, synthetic construct
  source 1..20: mol_type = other DNA
tgggagtccgaggtgggcag

SEQ ID NO: 64227 - DNA, 20 bp, synthetic construct
  source 1..20: mol_type = other DNA
ttgggagtccgaggtgggca

SEQ ID NO: 64228 - DNA, 20 bp, synthetic construct
  source 1..20: mol_type = other DNA
tttgggagtccgaggtgggc

SEQ ID NO: 64229 - DNA, 20 bp, synthetic construct
  source 1..20: mol_type = other DNA
ctttgggagtccgaggtggg

SEQ ID NO: 64230 - DNA, 20 bp, synthetic construct
  source 1..20: mol_type = other DNA
actttgggagtccgaggtgg

SEQ ID NO: 64231 - DNA, 20 bp, synthetic construct
  source 1..20: mol_type = other DNA
cactttgggagtccgaggtg

SEQ ID NO: 64232 - DNA, 20 bp, synthetic construct
  source 1..20: mol_type = other DNA
gcactttgggagtccgaggt

SEQ ID NO: 64233 - DNA, 20 bp, synthetic construct
  source 1..20: mol_type = other DNA
agcactttgggagtccgagg

SEQ ID NO: 64234 - DNA, 20 bp, synthetic construct
  source 1..20: mol_type = other DNA
cagcactttgggagtccgag

SEQ ID NO: 64235 - DNA, 20 bp, synthetic construct
  source 1..20: mol_type = other DNA
ccagcactttgggagtccga

SEQ ID NO: 64236 - DNA, 20 bp, synthetic construct
  source 1..20: mol_type = other DNA
cccagcactttgggagtccg

SEQ ID NO: 64237 - DNA, 20 bp, synthetic construct
  source 1..20: mol_type = other DNA
tcccagcactttgggagtcc

SEQ ID NO: 64238 - DNA, 20 bp, synthetic construct
  source 1..20: mol_type = other DNA
atcccagcactttgggagtc

SEQ ID NO: 64239 - DNA, 20 bp, synthetic construct
  source 1..20: mol_type = other DNA
aatcccagcactttgggagt

SEQ ID NO: 64240 - DNA, 20 bp, synthetic construct
  source 1..20: mol_type = other DNA
caatcccagcactttgggag

SEQ ID NO: 64241 - DNA, 20 bp, synthetic construct
  source 1..20: mol_type = other DNA
gcaatcccagcactttggga

SEQ ID NO: 64242 - DNA, 20 bp, synthetic construct
  source 1..20: mol_type = other DNA
tgcaatcccagcactttggg

SEQ ID NO: 64243 - DNA, 20 bp, synthetic construct
  source 1..20: mol_type = other DNA
ctgcaatcccagcactttgg

SEQ ID NO: 64244 - DNA, 20 bp, synthetic construct
  source 1..20: mol_type = other DNA
gctgcaatcccagcactttg

SEQ ID NO: 64245 - DNA, 20 bp, synthetic construct
  source 1..20: mol_type = other DNA
ggctgcaatcccagcacttt

SEQ ID NO: 64246 - DNA, 20 bp, synthetic construct
  source 1..20: mol_type = other DNA
tggctgcaatcccagcactt

SEQ ID NO: 64247 - DNA, 20 bp, synthetic construct
  source 1..20: mol_type = other DNA
atggctgcaatcccagcact

SEQ ID NO: 64248 - DNA, 20 bp, synthetic construct
  source 1..20: mol_type = other DNA
catggctgcaatcccagcac

SEQ ID NO: 64249 - DNA, 20 bp, synthetic construct
  source 1..20: mol_type = other DNA
tcatggctgcaatcccagca

SEQ ID NO: 64250 - DNA, 20 bp, synthetic construct
  source 1..20: mol_type = other DNA
ctcatggctgcaatcccagc

SEQ ID NO: 64251 - DNA, 20 bp, synthetic construct
  source 1..20: mol_type = other DNA
gctcatggctgcaatcccag

SEQ ID NO: 64252 - DNA, 20 bp, synthetic construct
  source 1..20: mol_type = other DNA
ggctcatggctgcaatccca

SEQ ID NO: 64253 - DNA, 20 bp, synthetic construct
  source 1..20: mol_type = other DNA
tggctcatggctgcaatccc

SEQ ID NO: 64254 - DNA, 20 bp, synthetic construct
  source 1..20: mol_type = other DNA
gtggctcatggctgcaatcc

SEQ ID NO: 64255 - DNA, 20 bp, synthetic construct
  source 1..20: mol_type = other DNA
ggtggctcatggctgcaatc

SEQ ID NO: 64256 - DNA, 20 bp, synthetic construct
  source 1..20: mol_type = other DNA
cggtggctcatggctgcaat

SEQ ID NO: 64257 - DNA, 20 bp, synthetic construct
  source 1..20: mol_type = other DNA
gcggtggctcatggctgcaa

SEQ ID NO: 64258 - DNA, 20 bp, synthetic construct
  source 1..20: mol_type = other DNA
tgcggtggctcatggctgca

SEQ ID NO: 64259 - DNA, 20 bp, synthetic construct
  source 1..20: mol_type = other DNA
atgcggtggctcatggctgc

SEQ ID NO: 64260 - DNA, 20 bp, synthetic construct
  source 1..20: mol_type = other DNA
gatgcggtggctcatggctg

SEQ ID NO: 64261 - DNA, 20 bp, synthetic construct
  source 1..20: mol_type = other DNA
agatgcggtggctcatggct

SEQ ID NO: 64262 - DNA, 20 bp, synthetic construct
  source 1..20: mol_type = other DNA
cagatgcggtggctcatggc

SEQ ID NO: 64263 - DNA, 20 bp, synthetic construct
  source 1..20: mol_type = other DNA
ccagatgcggtggctcatgg

SEQ ID NO: 64264 - DNA, 20 bp, synthetic construct
  source 1..20: mol_type = other DNA
gccagatgcggtggctcatg

SEQ ID NO: 64265 - DNA, 20 bp, synthetic construct
  source 1..20: mol_type = other DNA
ggccagatgcggtggctcat

SEQ ID NO: 64266 - DNA, 20 bp, synthetic construct
  source 1..20: mol_type = other DNA
tggccagatgcggtggctca

SEQ ID NO: 64267 - DNA, 20 bp, synthetic construct
  source 1..20: mol_type = other DNA
atggccagatgcggtggctc

SEQ ID NO: 64268 - DNA, 20 bp, synthetic construct
  source 1..20: mol_type = other DNA
tatggccagatgcggtggct

SEQ ID NO: 64269 - DNA, 20 bp, synthetic construct
  source 1..20: mol_type = other DNA
atatggccagatgcggtggc

SEQ ID NO: 64270 - DNA, 20 bp, synthetic construct
  source 1..20: mol_type = other DNA
tatatggccagatgcggtgg

SEQ ID NO: 64271 - DNA, 20 bp, synthetic construct
  source 1..20: mol_type = other DNA
atatatggccagatgcggtg

SEQ ID NO: 64272 - DNA, 20 bp, synthetic construct
  source 1..20: mol_type = other DNA
tatatatggccagatgcggt

SEQ ID NO: 64273 - DNA, 20 bp, synthetic construct
  source 1..20: mol_type = other DNA
atatatatggccagatgcgg

SEQ ID NO: 64274 - DNA, 20 bp, synthetic construct
  source 1..20: mol_type = other DNA
aatatatatggccagatgcg

SEQ ID NO: 64275 - DNA, 20 bp, synthetic construct
  source 1..20: mol_type = other DNA
taatatatatggccagatgc

SEQ ID NO: 64276 - DNA, 20 bp, synthetic construct
  source 1..20: mol_type = other DNA
ataatatatatggccagatg

SEQ ID NO: 64277 - DNA, 20 bp, synthetic construct
  source 1..20: mol_type = other DNA
cataatatatatggccagat

SEQ ID NO: 64278 - DNA, 20 bp, synthetic construct
  source 1..20: mol_type = other DNA
tcataatatatatggccaga

SEQ ID NO: 64279 - DNA, 20 bp, synthetic construct
  source 1..20: mol_type = other DNA
atcataatatatatggccag

SEQ ID NO: 64280 - DNA, 20 bp, synthetic construct
  source 1..20: mol_type = other DNA
tatcataatatatatggcca

SEQ ID NO: 64281 - DNA, 20 bp, synthetic construct
  source 1..20: mol_type = other DNA
ctatcataatatatatggcc

SEQ ID NO: 64282 - DNA, 20 bp, synthetic construct
  source 1..20: mol_type = other DNA
cctatcataatatatatggc

SEQ ID NO: 64283 - DNA, 20 bp, synthetic construct
  source 1..20: mol_type = other DNA
gcctatcataatatatatgg

SEQ ID NO: 64284 - DNA, 20 bp, synthetic construct
  source 1..20: mol_type = other DNA
agcctatcataatatatatg

SEQ ID NO: 64285 - DNA, 20 bp, synthetic construct
  source 1..20: mol_type = other DNA
aagcctatcataatatatat

SEQ ID NO: 64286 - DNA, 20 bp, synthetic construct
  source 1..20: mol_type = other DNA
caagcctatcataatatata

SEQ ID NO: 64287 - DNA, 20 bp, synthetic construct
  source 1..20: mol_type = other DNA
acaagcctatcataatatat

SEQ ID NO: 64288 - DNA, 20 bp, synthetic construct
  source 1..20: mol_type = other DNA
aacaagcctatcataatata

SEQ ID NO: 64289 - DNA, 20 bp, synthetic construct
  source 1..20: mol_type = other DNA
aaacaagcctatcataatat

SEQ ID NO: 64290 - DNA, 20 bp, synthetic construct
  source 1..20: mol_type = other DNA
gaaacaagcctatcataata

SEQ ID NO: 64291 - DNA, 20 bp, synthetic construct
  source 1..20: mol_type = other DNA
tgaaacaagcctatcataat

SEQ ID NO: 64292 - DNA, 20 bp, synthetic construct
  source 1..20: mol_type = other DNA
gtgaaacaagcctatcataa

SEQ ID NO: 64293 - DNA, 20 bp, synthetic construct
  source 1..20: mol_type = other DNA
agtgaaacaagcctatcata

SEQ ID NO: 64294 - DNA, 20 bp, synthetic construct
  source 1..20: mol_type = other DNA
aagtgaaacaagcctatcat

SEQ ID NO: 64295 - DNA, 20 bp, synthetic construct
  source 1..20: mol_type = other DNA
taagtgaaacaagcctatca

SEQ ID NO: 64296 - DNA, 20 bp, synthetic construct
  source 1..20: mol_type = other DNA
ctaagtgaaacaagcctatc

SEQ ID NO: 64297 - DNA, 20 bp, synthetic construct
  source 1..20: mol_type = other DNA
actaagtgaaacaagcctat

SEQ ID NO: 64298 - DNA, 20 bp, synthetic construct
  source 1..20: mol_type = other DNA
tactaagtgaaacaagccta

SEQ ID NO: 64299 - DNA, 20 bp, synthetic construct
  source 1..20: mol_type = other DNA
atactaagtgaaacaagcct

SEQ ID NO: 64300 - DNA, 20 bp, synthetic construct
  source 1..20: mol_type = other DNA
catactaagtgaaacaagcc

SEQ ID NO: 64301 - DNA, 20 bp, synthetic construct
  source 1..20: mol_type = other DNA
acatactaagtgaaacaagc

SEQ ID NO: 64302 - DNA, 20 bp, synthetic construct
  source 1..20: mol_type = other DNA
aacatactaagtgaaacaag

SEQ ID NO: 64303 - DNA, 20 bp, synthetic construct
  source 1..20: mol_type = other DNA
aaacatactaagtgaaacaa

SEQ ID NO: 64304 - DNA, 20 bp, synthetic construct
  source 1..20: mol_type = other DNA
gaaacatactaagtgaaaca

SEQ ID NO: 64305 - DNA, 20 bp, synthetic construct
  source 1..20: mol_type = other DNA
agaaacatactaagtgaaac

SEQ ID NO: 64306 - DNA, 20 bp, synthetic construct
  source 1..20: mol_type = other DNA
aagaaacatactaagtgaaa

SEQ ID NO: 64307 - DNA, 20 bp, synthetic construct
  source 1..20: mol_type = other DNA
gaagaaacatactaagtgaa

SEQ ID NO: 64308 - DNA, 20 bp, synthetic construct
  source 1..20: mol_type = other DNA
ggaagaaacatactaagtga

SEQ ID NO: 64309 - DNA, 20 bp, synthetic construct
  source 1..20: mol_type = other DNA
tggaagaaacatactaagtg

SEQ ID NO: 64310 - DNA, 20 bp, synthetic construct
  source 1..20: mol_type = other DNA
atggaagaaacatactaagt

SEQ ID NO: 64311 - DNA, 20 bp, synthetic construct
  source 1..20: mol_type = other DNA
catggaagaaacatactaag

SEQ ID NO: 64312 - DNA, 20 bp, synthetic construct
  source 1..20: mol_type = other DNA
gcatggaagaaacatactaa

SEQ ID NO: 64313 - DNA, 20 bp, synthetic construct
  source 1..20: mol_type = other DNA
agcatggaagaaacatacta

SEQ ID NO: 64314 - DNA, 20 bp, synthetic construct
  source 1..20: mol_type = other DNA
cagcatggaagaaacatact

SEQ ID NO: 64315 - DNA, 20 bp, synthetic construct
  source 1..20: mol_type = other DNA
acagcatggaagaaacatac

SEQ ID NO: 64316 - DNA, 20 bp, synthetic construct
  source 1..20: mol_type = other DNA
tacagcatggaagaaacata

SEQ ID NO: 64317 - DNA, 20 bp, synthetic construct
  source 1..20: mol_type = other DNA
ctacagcatggaagaaacat

SEQ ID NO: 64318 - DNA, 20 bp, synthetic construct
  source 1..20: mol_type = other DNA
gctacagcatggaagaaaca

SEQ ID NO: 64319 - DNA, 20 bp, synthetic construct
  source 1..20: mol_type = other DNA
tgctacagcatggaagaaac

SEQ ID NO: 64320 - DNA, 20 bp, synthetic construct
  source 1..20: mol_type = other DNA
atgctacagcatggaagaaa

SEQ ID NO: 64321 - DNA, 20 bp, synthetic construct
  source 1..20: mol_type = other DNA
catgctacagcatggaagaa

SEQ ID NO: 64322 - DNA, 20 bp, synthetic construct
  source 1..20: mol_type = other DNA
acatgctacagcatggaaga

SEQ ID NO: 64323 - DNA, 20 bp, synthetic construct
  source 1..20: mol_type = other DNA
tacatgctacagcatggaag

SEQ ID NO: 64324 - DNA, 20 bp, synthetic construct
  source 1..20: mol_type = other DNA
atacatgctacagcatggaa

SEQ ID NO: 64325 - DNA, 20 bp, synthetic construct
  source 1..20: mol_type = other DNA
aatacatgctacagcatgga

SEQ ID NO: 64326 - DNA, 20 bp, synthetic construct
  source 1..20: mol_type = other DNA
taatacatgctacagcatgg

SEQ ID NO: 64327 - DNA, 20 bp, synthetic construct
  source 1..20: mol_type = other DNA
ctaatacatgctacagcatg

SEQ ID NO: 64328 - DNA, 20 bp, synthetic construct
  source 1..20: mol_type = other DNA
actaatacatgctacagcat

SEQ ID NO: 64329 - DNA, 20 bp, synthetic construct
  source 1..20: mol_type = other DNA
tactaatacatgctacagca

SEQ ID NO: 64330 - DNA, 20 bp, synthetic construct
  source 1..20: mol_type = other DNA
gtactaatacatgctacagc

SEQ ID NO: 64331 - DNA, 20 bp, synthetic construct
  source 1..20: mol_type = other DNA
agtactaatacatgctacag

SEQ ID NO: 64332 - DNA, 20 bp, synthetic construct
  source 1..20: mol_type = other DNA
aagtactaatacatgctaca

SEQ ID NO: 64333 - DNA, 20 bp, synthetic construct
  source 1..20: mol_type = other DNA
gaagtactaatacatgctac

SEQ ID NO: 64334 - DNA, 20 bp, synthetic construct
  source 1..20: mol_type = other DNA
agaagtactaatacatgcta

SEQ ID NO: 64335 - DNA, 20 bp, synthetic construct
  source 1..20: mol_type = other DNA
aagaagtactaatacatgct

SEQ ID NO: 64336 - DNA, 20 bp, synthetic construct
  source 1..20: mol_type = other DNA
aaagaagtactaatacatgc

SEQ ID NO: 64337 - DNA, 20 bp, synthetic construct
  source 1..20: mol_type = other DNA
gaaagaagtactaatacatg

SEQ ID NO: 64338 - DNA, 20 bp, synthetic construct
  source 1..20: mol_type = other DNA
agaaagaagtactaatacat

SEQ ID NO: 64339 - DNA, 20 bp, synthetic construct
  source 1..20: mol_type = other DNA
aagaaagaagtactaataca

SEQ ID NO: 64340 - DNA, 20 bp, synthetic construct
  source 1..20: mol_type = other DNA
aaagaaagaagtactaatac

SEQ ID NO: 64341 - DNA, 20 bp, synthetic construct
  source 1..20: mol_type = other DNA
aaaagaaagaagtactaata

SEQ ID NO: 64342 - DNA, 20 bp, synthetic construct
  source 1..20: mol_type = other DNA
aaaaagaaagaagtactaat

SEQ ID NO: 64343 - DNA, 20 bp, synthetic construct
  source 1..20: mol_type = other DNA
gaaaaagaaagaagtactaa

SEQ ID NO: 64344 - DNA, 20 bp, synthetic construct
  source 1..20: mol_type = other DNA
tgaaaaagaaagaagtacta

SEQ ID NO: 64345 - DNA, 20 bp, synthetic construct
  source 1..20: mol_type = other DNA
atgaaaaagaaagaagtact

SEQ ID NO: 64346 - DNA, 20 bp, synthetic construct
  source 1..20: mol_type = other DNA
catgaaaaagaaagaagtac

SEQ ID NO: 64347 - DNA, 20 bp, synthetic construct
  source 1..20: mol_type = other DNA
ccatgaaaaagaaagaagta

SEQ ID NO: 64348 - DNA, 20 bp, synthetic construct
  source 1..20: mol_type = other DNA
gccatgaaaaagaaagaagt

SEQ ID NO: 64349 - DNA, 20 bp, synthetic construct
  source 1..20: mol_type = other DNA
ggccatgaaaaagaaagaag

SEQ ID NO: 64350 - DNA, 20 bp, synthetic construct
  source 1..20: mol_type = other DNA
tggccatgaaaaagaaagaa

SEQ ID NO: 64351 - DNA, 20 bp, synthetic construct
  source 1..20: mol_type = other DNA
ttggccatgaaaaagaaaga

SEQ ID NO: 64352 - DNA, 20 bp, synthetic construct
  source 1..20: mol_type = other DNA
tttggccatgaaaaagaaag

SEQ ID NO: 64353 - DNA, 20 bp, synthetic construct
  source 1..20: mol_type = other DNA
atttggccatgaaaaagaaa

SEQ ID NO: 64354 - DNA, 20 bp, synthetic construct
  source 1..20: mol_type = other DNA
tatttggccatgaaaaagaa

SEQ ID NO: 64355 - DNA, 20 bp, synthetic construct
  source 1..20: mol_type = other DNA
atatttggccatgaaaaaga

SEQ ID NO: 64356 - DNA, 20 bp, synthetic construct
  source 1..20: mol_type = other DNA
aatatttggccatgaaaaag

SEQ ID NO: 64357 - DNA, 20 bp, synthetic construct
  source 1..20: mol_type = other DNA
gaatatttggccatgaaaaa

SEQ ID NO: 64358 - DNA, 20 bp, synthetic construct
  source 1..20: mol_type = other DNA
ggaatatttggccatgaaaa

SEQ ID NO: 64359 - DNA, 20 bp, synthetic construct
  source 1..20: mol_type = other DNA
tggaatatttggccatgaaa

SEQ ID NO: 64360 - DNA, 20 bp, synthetic construct
  source 1..20: mol_type = other DNA
atggaatatttggccatgaa

SEQ ID NO: 64361 - DNA, 20 bp, synthetic construct
  source 1..20: mol_type = other DNA
aatggaatatttggccatga

SEQ ID NO: 64362 - DNA, 20 bp, synthetic construct
  source 1..20: mol_type = other DNA
taatggaatatttggccatg

SEQ ID NO: 64363 - DNA, 20 bp, synthetic construct
  source 1..20: mol_type = other DNA
ataatggaatatttggccat

SEQ ID NO: 64364 - DNA, 20 bp, synthetic construct
  source 1..20: mol_type = other DNA
tataatggaatatttggcca

SEQ ID NO: 64365 - DNA, 20 bp, synthetic construct
  source 1..20: mol_type = other DNA
gtataatggaatatttggcc

SEQ ID NO: 64366 - DNA, 20 bp, synthetic construct
  source 1..20: mol_type = other DNA
tgtataatggaatatttggc

SEQ ID NO: 64367 - DNA, 20 bp, synthetic construct
  source 1..20: mol_type = other DNA
ctgtataatggaatatttgg

SEQ ID NO: 64368 - DNA, 20 bp, synthetic construct
  source 1..20: mol_type = other DNA
actgtataatggaatatttg

SEQ ID NO: 64369 - DNA, 20 bp, synthetic construct
  source 1..20: mol_type = other DNA
aactgtataatggaatattt

SEQ ID NO: 64370 - DNA, 20 bp, synthetic construct
  source 1..20: mol_type = other DNA
taactgtataatggaatatt

SEQ ID NO: 64371 - DNA, 20 bp, synthetic construct
  source 1..20: mol_type = other DNA
gtaactgtataatggaatat

SEQ ID NO: 64372 - DNA, 20 bp, synthetic construct
  source 1..20: mol_type = other DNA
tgtaactgtataatggaata

SEQ ID NO: 64373 - DNA, 20 bp, synthetic construct
  source 1..20: mol_type = other DNA
gtgtaactgtataatggaat

SEQ ID NO: 64374 - DNA, 20 bp, synthetic construct
  source 1..20: mol_type = other DNA
tgtgtaactgtataatggaa

SEQ ID NO: 64375 - DNA, 20 bp, synthetic construct
  source 1..20: mol_type = other DNA
ctgtgtaactgtataatgga

SEQ ID NO: 64376 - DNA, 20 bp, synthetic construct
  source 1..20: mol_type = other DNA
cctgtgtaactgtataatgg

SEQ ID NO: 64377 - DNA, 20 bp, synthetic construct
  source 1..20: mol_type = other DNA
acctgtgtaactgtataatg

SEQ ID NO: 64378 - DNA, 20 bp, synthetic construct
  source 1..20: mol_type = other DNA
tacctgtgtaactgtataat

SEQ ID NO: 64379 - DNA, 20 bp, synthetic construct
  source 1..20: mol_type = other DNA
gtacctgtgtaactgtataa

SEQ ID NO: 64380 - DNA, 20 bp, synthetic construct
  source 1..20: mol_type = other DNA
tgtacctgtgtaactgtata

SEQ ID NO: 64381 - DNA, 20 bp, synthetic construct
  source 1..20: mol_type = other DNA
gtgtacctgtgtaactgtat

SEQ ID NO: 64382 - DNA, 20 bp, synthetic construct
  source 1..20: mol_type = other DNA
agtgtacctgtgtaactgta

SEQ ID NO: 64383 - DNA, 20 bp, synthetic construct
  source 1..20: mol_type = other DNA
tagtgtacctgtgtaactgt

SEQ ID NO: 64384 - DNA, 20 bp, synthetic construct
  source 1..20: mol_type = other DNA
gtagtgtacctgtgtaactg

SEQ ID NO: 64385 - DNA, 20 bp, synthetic construct
  source 1..20: mol_type = other DNA
tgtagtgtacctgtgtaact

SEQ ID NO: 64386 - DNA, 20 bp, synthetic construct
  source 1..20: mol_type = other DNA
atgtagtgtacctgtgtaac

SEQ ID NO: 64387 - DNA, 20 bp, synthetic construct
  source 1..20: mol_type = other DNA
aatgtagtgtacctgtgtaa

SEQ ID NO: 64388 - DNA, 20 bp, synthetic construct
  source 1..20: mol_type = other DNA
aaatgtagtgtacctgtgta

SEQ ID NO: 64389 - DNA, 20 bp, synthetic construct
  source 1..20: mol_type = other DNA
aaaatgtagtgtacctgtgt

SEQ ID NO: 64390 - DNA, 20 bp, synthetic construct
  source 1..20: mol_type = other DNA
caaaatgtagtgtacctgtg

SEQ ID NO: 64391 - DNA, 20 bp, synthetic construct
  source 1..20: mol_type = other DNA
acaaaatgtagtgtacctgt

SEQ ID NO: 64392 - DNA, 20 bp, synthetic construct
  source 1..20: mol_type = other DNA
aacaaaatgtagtgtacctg

SEQ ID NO: 64393 - DNA, 20 bp, synthetic construct
  source 1..20: mol_type = other DNA
aaacaaaatgtagtgtacct

SEQ ID NO: 64394 - DNA, 20 bp, synthetic construct
  source 1..20: mol_type = other DNA
taaacaaaatgtagtgtacc

SEQ ID NO: 64395 - DNA, 20 bp, synthetic construct
  source 1..20: mol_type = other DNA
ataaacaaaatgtagtgtac

SEQ ID NO: 64396 - DNA, 20 bp, synthetic construct
  source 1..20: mol_type = other DNA
aataaacaaaatgtagtgta

SEQ ID NO: 64397 - DNA, 20 bp, synthetic construct
  source 1..20: mol_type = other DNA
gaataaacaaaatgtagtgt

SEQ ID NO: 64398 - DNA, 20 bp, synthetic construct
  source 1..20: mol_type = other DNA
tgaataaacaaaatgtagtg

SEQ ID NO: 64399 - DNA, 20 bp, synthetic construct
  source 1..20: mol_type = other DNA
atgaataaacaaaatgtagt

SEQ ID NO: 64400 - DNA, 20 bp, synthetic construct
  source 1..20: mol_type = other DNA
gatgaataaacaaaatgtag

SEQ ID NO: 64401 - DNA, 20 bp, synthetic construct
  source 1..20: mol_type = other DNA
tgatgaataaacaaaatgta

SEQ ID NO: 64402 - DNA, 20 bp, synthetic construct
  source 1..20: mol_type = other DNA
ctgatgaataaacaaaatgt

SEQ ID NO: 64403 - DNA, 20 bp, synthetic construct
  source 1..20: mol_type = other DNA
actgatgaataaacaaaatg

SEQ ID NO: 64404 - DNA, 20 bp, synthetic construct
  source 1..20: mol_type = other DNA
aactgatgaataaacaaaat

SEQ ID NO: 64405 - DNA, 20 bp, synthetic construct
  source 1..20: mol_type = other DNA
caactgatgaataaacaaaa

SEQ ID NO: 64406 - DNA, 20 bp, synthetic construct
  source 1..20: mol_type = other DNA
ccaactgatgaataaacaaa

SEQ ID NO: 64407 - DNA, 20 bp, synthetic construct
  source 1..20: mol_type = other DNA
accaactgatgaataaacaa

SEQ ID NO: 64408 - DNA, 20 bp, synthetic construct
  source 1..20: mol_type = other DNA
caccaactgatgaataaaca

SEQ ID NO: 64409 - DNA, 20 bp, synthetic construct
  source 1..20: mol_type = other DNA
ccaccaactgatgaataaac

SEQ ID NO: 64410 - DNA, 20 bp, synthetic construct
  source 1..20: mol_type = other DNA
tccaccaactgatgaataaa

SEQ ID NO: 64411 - DNA, 20 bp, synthetic construct
  source 1..20: mol_type = other DNA
gtccaccaactgatgaataa

SEQ ID NO: 64412 - DNA, 20 bp, synthetic construct
  source 1..20: mol_type = other DNA
tgtccaccaactgatgaata

SEQ ID NO: 64413 - DNA, 20 bp, synthetic construct
  source 1..20: mol_type = other DNA
atgtccaccaactgatgaat

SEQ ID NO: 64414 - DNA, 20 bp, synthetic construct
  source 1..20: mol_type = other DNA
aatgtccaccaactgatgaa

SEQ ID NO: 64415 - DNA, 20 bp, synthetic construct
  source 1..20: mol_type = other DNA
aaatgtccaccaactgatga

SEQ ID NO: 64416 - DNA, 20 bp, synthetic construct
  source 1..20: mol_type = other DNA
aaaatgtccaccaactgatg

SEQ ID NO: 64417 - DNA, 20 bp, synthetic construct
  source 1..20: mol_type = other DNA
gaaaatgtccaccaactgat

SEQ ID NO: 64418 - DNA, 20 bp, synthetic construct
  source 1..20: mol_type = other DNA
tgaaaatgtccaccaactga

SEQ ID NO: 64419 - DNA, 20 bp, synthetic construct
  source 1..20: mol_type = other DNA
atgaaaatgtccaccaactg

SEQ ID NO: 64420 - DNA, 20 bp, synthetic construct
  source 1..20: mol_type = other DNA
aatgaaaatgtccaccaact

SEQ ID NO: 64421 - DNA, 20 bp, synthetic construct
  source 1..20: mol_type = other DNA
caatgaaaatgtccaccaac

SEQ ID NO: 64422 - DNA, 20 bp, synthetic construct
  source 1..20: mol_type = other DNA
acaatgaaaatgtccaccaa

SEQ ID NO: 64423 - DNA, 20 bp, synthetic construct
  source 1..20: mol_type = other DNA
aacaatgaaaatgtccacca

SEQ ID NO: 64424 - DNA, 20 bp, synthetic construct
  source 1..20: mol_type = other DNA
aaacaatgaaaatgtccacc

SEQ ID NO: 64425 - DNA, 20 bp, synthetic construct
  source 1..20: mol_type = other DNA
gaaacaatgaaaatgtccac

SEQ ID NO: 64426 - DNA, 20 bp, synthetic construct
  source 1..20: mol_type = other DNA
ggaaacaatgaaaatgtcca

SEQ ID NO: 64427 - DNA, 20 bp, synthetic construct
  source 1..20: mol_type = other DNA
tggaaacaatgaaaatgtcc

SEQ ID NO: 64428 - DNA, 20 bp, synthetic construct
  source 1..20: mol_type = other DNA
gtggaaacaatgaaaatgtc

SEQ ID NO: 64429 - DNA, 20 bp, synthetic construct
  source 1..20: mol_type = other DNA
ggtggaaacaatgaaaatgt

SEQ ID NO: 64430 - DNA, 20 bp, synthetic construct
  source 1..20: mol_type = other DNA
aggtggaaacaatgaaaatg

SEQ ID NO: 64431 - DNA, 20 bp, synthetic construct
  source 1..20: mol_type = other DNA
aaggtggaaacaatgaaaat

SEQ ID NO: 64432 - DNA, 20 bp, synthetic construct
  source 1..20: mol_type = other DNA
aaaggtggaaacaatgaaaa

SEQ ID NO: 64433 - DNA, 20 bp, synthetic construct
  source 1..20: mol_type = other DNA
aaaaggtggaaacaatgaaa

SEQ ID NO: 64434 - DNA, 20 bp, synthetic construct
  source 1..20: mol_type = other DNA
caaaaggtggaaacaatgaa

SEQ ID NO: 64435 - DNA, 20 bp, synthetic construct
  source 1..20: mol_type = other DNA
tcaaaaggtggaaacaatga

SEQ ID NO: 64436 - DNA, 20 bp, synthetic construct
  source 1..20: mol_type = other DNA
atcaaaaggtggaaacaatg

SEQ ID NO: 64437 - DNA, 20 bp, synthetic construct
  source 1..20: mol_type = other DNA
aatcaaaaggtggaaacaat

SEQ ID NO: 64438 - DNA, 20 bp, synthetic construct
  source 1..20: mol_type = other DNA
aaatcaaaaggtggaaacaa

SEQ ID NO: 64439 - DNA, 20 bp, synthetic construct
  source 1..20: mol_type = other DNA
taaatcaaaaggtggaaaca

SEQ ID NO: 64440 - DNA, 20 bp, synthetic construct
  source 1..20: mol_type = other DNA
ataaatcaaaaggtggaaac

SEQ ID NO: 64441 - DNA, 20 bp, synthetic construct
  source 1..20: mol_type = other DNA
tataaatcaaaaggtggaaa

SEQ ID NO: 64442 - DNA, 20 bp, synthetic construct
  source 1..20: mol_type = other DNA
gtataaatcaaaaggtggaa

SEQ ID NO: 64443 - DNA, 20 bp, synthetic construct
  source 1..20: mol_type = other DNA
tgtataaatcaaaaggtgga

SEQ ID NO: 64444 - DNA, 20 bp, synthetic construct
  source 1..20: mol_type = other DNA
atgtataaatcaaaaggtgg

SEQ ID NO: 64445 - DNA, 20 bp, synthetic construct
  source 1..20: mol_type = other DNA
tatgtataaatcaaaaggtg

SEQ ID NO: 64446 - DNA, 20 bp, synthetic construct
  source 1..20: mol_type = other DNA
ttatgtataaatcaaaaggt

SEQ ID NO: 64447 - DNA, 20 bp, synthetic construct
  source 1..20: mol_type = other DNA
attatgtataaatcaaaagg

SEQ ID NO: 64448 - DNA, 20 bp, synthetic construct
  source 1..20: mol_type = other DNA
gattatgtataaatcaaaag

SEQ ID NO: 64449 - DNA, 20 bp, synthetic construct
  source 1..20: mol_type = other DNA
ggattatgtataaatcaaaa

SEQ ID NO: 64450 - DNA, 20 bp, synthetic construct
  source 1..20: mol_type = other DNA
aggattatgtataaatcaaa

SEQ ID NO: 64451 - DNA, 20 bp, synthetic construct
  source 1..20: mol_type = other DNA
caggattatgtataaatcaa

SEQ ID NO: 64452 - DNA, 20 bp, synthetic construct
  source 1..20: mol_type = other DNA
gcaggattatgtataaatca

SEQ ID NO: 64453 - DNA, 20 bp, synthetic construct
  source 1..20: mol_type = other DNA
agcaggattatgtataaatc

SEQ ID NO: 64454 - DNA, 20 bp, synthetic construct
  source 1..20: mol_type = other DNA
cagcaggattatgtataaat

SEQ ID NO: 64455 - DNA, 20 bp, synthetic construct
  source 1..20: mol_type = other DNA
gcagcaggattatgtataaa

SEQ ID NO: 64456 - DNA, 20 bp, synthetic construct
  source 1..20: mol_type = other DNA
cgcagcaggattatgtataa

SEQ ID NO: 64457 - DNA, 20 bp, synthetic construct
  source 1..20: mol_type = other DNA
tcgcagcaggattatgtata

SEQ ID NO: 64458 - DNA, 20 bp, synthetic construct
  source 1..20: mol_type = other DNA
ttcgcagcaggattatgtat

SEQ ID NO: 64459 - DNA, 20 bp, synthetic construct
  source 1..20: mol_type = other DNA
gttcgcagcaggattatgta

SEQ ID NO: 64460 - DNA, 20 bp, synthetic construct
  source 1..20: mol_type = other DNA
tgttcgcagcaggattatgt

SEQ ID NO: 64461 - DNA, 20 bp, synthetic construct
  source 1..20: mol_type = other DNA
ctgttcgcagcaggattatg

SEQ ID NO: 64462 - DNA, 20 bp, synthetic construct
  source 1..20: mol_type = other DNA
actgttcgcagcaggattat

SEQ ID NO: 64463 - DNA, 20 bp, synthetic construct
  source 1..20: mol_type = other DNA
cactgttcgcagcaggatta

SEQ ID NO: 64464 - DNA, 20 bp, synthetic construct
  source 1..20: mol_type = other DNA
tcactgttcgcagcaggatt

SEQ ID NO: 64465 - DNA, 20 bp, synthetic construct
  source 1..20: mol_type = other DNA
gtcactgttcgcagcaggat

SEQ ID NO: 64466 - DNA, 20 bp, synthetic construct
  source 1..20: mol_type = other DNA
agtcactgttcgcagcagga

SEQ ID NO: 64467 - DNA, 20 bp, synthetic construct
  source 1..20: mol_type = other DNA
aagtcactgttcgcagcagg

SEQ ID NO: 64468 - DNA, 20 bp, synthetic construct
  source 1..20: mol_type = other DNA
aaagtcactgttcgcagcag

SEQ ID NO: 64469 - DNA, 20 bp, synthetic construct
  source 1..20: mol_type = other DNA
aaaagtcactgttcgcagca

SEQ ID NO: 64470 - DNA, 20 bp, synthetic construct
  source 1..20: mol_type = other DNA
taaaagtcactgttcgcagc

SEQ ID NO: 64471 - DNA, 20 bp, synthetic construct
  source 1..20: mol_type = other DNA
ttaaaagtcactgttcgcag

SEQ ID NO: 64472 - DNA, 20 bp, synthetic construct
  source 1..20: mol_type = other DNA
tttaaaagtcactgttcgca

SEQ ID NO: 64473 - DNA, 20 bp, synthetic construct
  source 1..20: mol_type = other DNA
ctttaaaagtcactgttcgc

SEQ ID NO: 64474 - DNA, 20 bp, synthetic construct
  source 1..20: mol_type = other DNA
actttaaaagtcactgttcg

SEQ ID NO: 64475 - DNA, 20 bp, synthetic construct
  source 1..20: mol_type = other DNA
aactttaaaagtcactgttc

SEQ ID NO: 64476 - DNA, 20 bp, synthetic construct
  source 1..20: mol_type = other DNA
aaactttaaaagtcactgtt

SEQ ID NO: 64477 - DNA, 20 bp, synthetic construct
  source 1..20: mol_type = other DNA
aaaactttaaaagtcactgt

SEQ ID NO: 64478 - DNA, 20 bp, synthetic construct
  source 1..20: mol_type = other DNA
aaaaactttaaaagtcactg

SEQ ID NO: 64479 - DNA, 20 bp, synthetic construct
  source 1..20: mol_type = other DNA
caaaaactttaaaagtcact

SEQ ID NO: 64480 - DNA, 20 bp, synthetic construct
  source 1..20: mol_type = other DNA
acaaaaactttaaaagtcac

SEQ ID NO: 64481 - DNA, 20 bp, synthetic construct
  source 1..20: mol_type = other DNA
cacaaaaactttaaaagtca

SEQ ID NO: 64482 - DNA, 20 bp, synthetic construct
  source 1..20: mol_type = other DNA
acacaaaaactttaaaagtc

SEQ ID NO: 64483 - DNA, 20 bp, synthetic construct
  source 1..20: mol_type = other DNA
cacacaaaaactttaaaagt

SEQ ID NO: 64484 - DNA, 20 bp, synthetic construct
  source 1..20: mol_type = other DNA
ccacacaaaaactttaaaag

SEQ ID NO: 64485 - DNA, 20 bp, synthetic construct
  source 1..20: mol_type = other DNA
cccacacaaaaactttaaaa

SEQ ID NO: 64486 - DNA, 20 bp, synthetic construct
  source 1..20: mol_type = other DNA
gcccacacaaaaactttaaa

SEQ ID NO: 64487 - DNA, 20 bp, synthetic construct
  source 1..20: mol_type = other DNA
ggcccacacaaaaactttaa

SEQ ID NO: 64488 - DNA, 20 bp, synthetic construct
  source 1..20: mol_type = other DNA
cggcccacacaaaaacttta

SEQ ID NO: 64489 - DNA, 20 bp, synthetic construct
  source 1..20: mol_type = other DNA
ccggcccacacaaaaacttt

SEQ ID NO: 64490 - DNA, 20 bp, synthetic construct
  source 1..20: mol_type = other DNA
cccggcccacacaaaaactt

SEQ ID NO: 64491 - DNA, 20 bp, synthetic construct
  source 1..20: mol_type = other DNA
acccggcccacacaaaaact

SEQ ID NO: 64492 - DNA, 20 bp, synthetic construct
  source 1..20: mol_type = other DNA
cacccggcccacacaaaaac

SEQ ID NO: 64493 - DNA, 20 bp, synthetic construct
  source 1..20: mol_type = other DNA
acacccggcccacacaaaaa

SEQ ID NO: 64494 - DNA, 20 bp, synthetic construct
  source 1..20: mol_type = other DNA
cacacccggcccacacaaaa

SEQ ID NO: 64495 - DNA, 20 bp, synthetic construct
  source 1..20: mol_type = other DNA
ccacacccggcccacacaaa

SEQ ID NO: 64496 - DNA, 20 bp, synthetic construct
  source 1..20: mol_type = other DNA
accacacccggcccacacaa

SEQ ID NO: 64497 - DNA, 20 bp, synthetic construct
  source 1..20: mol_type = other DNA
caccacacccggcccacaca

SEQ ID NO: 64498 - DNA, 20 bp, synthetic construct
  source 1..20: mol_type = other DNA
ccaccacacccggcccacac

SEQ ID NO: 64499 - DNA, 20 bp, synthetic construct
  source 1..20: mol_type = other DNA
gccaccacacccggcccaca

SEQ ID NO: 64500 - DNA, 20 bp, synthetic construct
  source 1..20: mol_type = other DNA
agccaccacacccggcccac

SEQ ID NO: 64501 - DNA, 20 bp, synthetic construct
  source 1..20: mol_type = other DNA
gagccaccacacccggccca

SEQ ID NO: 64502 - DNA, 20 bp, synthetic construct
  source 1..20: mol_type = other DNA
tgagccaccacacccggccc

SEQ ID NO: 64503 - DNA, 20 bp, synthetic construct
  source 1..20: mol_type = other DNA
atgagccaccacacccggcc

SEQ ID NO: 64504 - DNA, 20 bp, synthetic construct
  source 1..20: mol_type = other DNA
catgagccaccacacccggc

SEQ ID NO: 64505 - DNA, 20 bp, synthetic construct
  source 1..20: mol_type = other DNA
gcatgagccaccacacccgg

SEQ ID NO: 64506 - DNA, 20 bp, synthetic construct
  source 1..20: mol_type = other DNA
ggcatgagccaccacacccg

SEQ ID NO: 64507 - DNA, 20 bp, synthetic construct
  source 1..20: mol_type = other DNA
aggcatgagccaccacaccc

SEQ ID NO: 64508 - DNA, 20 bp, synthetic construct
  source 1..20: mol_type = other DNA
gaggcatgagccaccacacc

SEQ ID NO: 64509 - DNA, 20 bp, synthetic construct
  source 1..20: mol_type = other DNA
agaggcatgagccaccacac

SEQ ID NO: 64510 - DNA, 20 bp, synthetic construct
  source 1..20: mol_type = other DNA
cagaggcatgagccaccaca

SEQ ID NO: 64511 - DNA, 20 bp, synthetic construct
  source 1..20: mol_type = other DNA
acagaggcatgagccaccac

SEQ ID NO: 64512 - DNA, 20 bp, synthetic construct
  source 1..20: mol_type = other DNA
tacagaggcatgagccacca

SEQ ID NO: 64513 - DNA, 20 bp, synthetic construct
  source 1..20: mol_type = other DNA
ttacagaggcatgagccacc

SEQ ID NO: 64514 - DNA, 20 bp, synthetic construct
  source 1..20: mol_type = other DNA
attacagaggcatgagccac

SEQ ID NO: 64515 - DNA, 20 bp, synthetic construct
  source 1..20: mol_type = other DNA
gattacagaggcatgagcca

SEQ ID NO: 64516 - DNA, 20 bp, synthetic construct
  source 1..20: mol_type = other DNA
ggattacagaggcatgagcc

SEQ ID NO: 64517 - DNA, 20 bp, synthetic construct
  source 1..20: mol_type = other DNA
gggattacagaggcatgagc

SEQ ID NO: 64518 - DNA, 20 bp, synthetic construct
  source 1..20: mol_type = other DNA
tgggattacagaggcatgag

SEQ ID NO: 64519 - DNA, 20 bp, synthetic construct
  source 1..20: mol_type = other DNA
ctgggattacagaggcatga

SEQ ID NO: 64520 - DNA, 20 bp, synthetic construct
  source 1..20: mol_type = other DNA
gctgggattacagaggcatg

SEQ ID NO: 64521 - DNA, 20 bp, synthetic construct
  source 1..20: mol_type = other DNA
tgctgggattacagaggcat

SEQ ID NO: 64522 - DNA, 20 bp, synthetic construct
  source 1..20: mol_type = other DNA
gtgctgggattacagaggca

SEQ ID NO: 64523 - DNA, 20 bp, synthetic construct
  source 1..20: mol_type = other DNA
agtgctgggattacagaggc

SEQ ID NO: 64524 - DNA, 20 bp, synthetic construct
  source 1..20: mol_type = other DNA
aagtgctgggattacagagg

SEQ ID NO: 64525 - DNA, 20 bp, synthetic construct
  source 1..20: mol_type = other DNA
aaagtgctgggattacagag

SEQ ID NO: 64526 - DNA, 20 bp, synthetic construct
  source 1..20: mol_type = other DNA
caaagtgctgggattacaga

SEQ ID NO: 64527 - DNA, 20 bp, synthetic construct
  source 1..20: mol_type = other DNA
ccaaagtgctgggattacag

SEQ ID NO: 64528 - DNA, 20 bp, synthetic construct
  source 1..20: mol_type = other DNA
cccaaagtgctgggattaca

SEQ ID NO: 64529 - DNA, 20 bp, synthetic construct
  source 1..20: mol_type = other DNA
tcccaaagtgctgggattac

SEQ ID NO: 64530 - DNA, 20 bp, synthetic construct
  source 1..20: mol_type = other DNA
ctcccaaagtgctgggatta

SEQ ID NO: 64531 - DNA, 20 bp, synthetic construct
  source 1..20: mol_type = other DNA
cctcccaaagtgctgggatt

SEQ ID NO: 64532 - DNA, 20 bp, synthetic construct
  source 1..20: mol_type = other DNA
gcctcccaaagtgctgggat

SEQ ID NO: 64533 - DNA, 20 bp, synthetic construct
  source 1..20: mol_type = other DNA
agcctcccaaagtgctggga

SEQ ID NO: 64534 - DNA, 20 bp, synthetic construct
  source 1..20: mol_type = other DNA
cagcctcccaaagtgctggg

SEQ ID NO: 64535 - DNA, 20 bp, synthetic construct
  source 1..20: mol_type = other DNA
ccagcctcccaaagtgctgg

SEQ ID NO: 64536 - DNA, 20 bp, synthetic construct
  source 1..20: mol_type = other DNA
cccagcctcccaaagtgctg

SEQ ID NO: 64537 - DNA, 20 bp, synthetic construct
  source 1..20: mol_type = other DNA
ccccagcctcccaaagtgct

SEQ ID NO: 64538 - DNA, 20 bp, synthetic construct
  source 1..20: mol_type = other DNA
gccccagcctcccaaagtgc

SEQ ID NO: 64539 - DNA, 20 bp, synthetic construct
  source 1..20: mol_type = other DNA
agccccagcctcccaaagtg

SEQ ID NO: 64540 - DNA, 20 bp, synthetic construct
  source 1..20: mol_type = other DNA
cagccccagcctcccaaagt

SEQ ID NO: 64541 - DNA, 20 bp, synthetic construct
  source 1..20: mol_type = other DNA
ccagccccagcctcccaaag

SEQ ID NO: 64542 - DNA, 20 bp, synthetic construct
  source 1..20: mol_type = other DNA
gccagccccagcctcccaaa

SEQ ID NO: 64543 - DNA, 20 bp, synthetic construct
  source 1..20: mol_type = other DNA
tgccagccccagcctcccaa

SEQ ID NO: 64544 - DNA, 20 bp, synthetic construct
  source 1..20: mol_type = other DNA
ctgccagccccagcctccca

SEQ ID NO: 64545 - DNA, 20 bp, synthetic construct
  source 1..20: mol_type = other DNA
tctgccagccccagcctccc

SEQ ID NO: 64546 - DNA, 20 bp, synthetic construct
  source 1..20: mol_type = other DNA
atctgccagccccagcctcc

SEQ ID NO: 64547 - DNA, 20 bp, synthetic construct
  source 1..20: mol_type = other DNA
gatctgccagccccagcctc

SEQ ID NO: 64548 - DNA, 20 bp, synthetic construct
  source 1..20: mol_type = other DNA
tgatctgccagccccagcct

SEQ ID NO: 64549 - DNA, 20 bp, synthetic construct
  source 1..20: mol_type = other DNA
atgatctgccagccccagcc

SEQ ID NO: 64550 - DNA, 20 bp, synthetic construct
  source 1..20: mol_type = other DNA
aatgatctgccagccccagc

SEQ ID NO: 64551 - DNA, 20 bp, synthetic construct
  source 1..20: mol_type = other DNA
aaatgatctgccagccccag

SEQ ID NO: 64552 - DNA, 20 bp, synthetic construct
  source 1..20: mol_type = other DNA
caaatgatctgccagcccca

SEQ ID NO: 64553 - DNA, 20 bp, synthetic construct
  source 1..20: mol_type = other DNA
tcaaatgatctgccagcccc

SEQ ID NO: 64554 - DNA, 20 bp, synthetic construct
  source 1..20: mol_type = other DNA
ctcaaatgatctgccagccc

SEQ ID NO: 64555 - DNA, 20 bp, synthetic construct
  source 1..20: mol_type = other DNA
cctcaaatgatctgccagcc

SEQ ID NO: 64556 - DNA, 20 bp, synthetic construct
  source 1..20: mol_type = other DNA
gcctcaaatgatctgccagc

SEQ ID NO: 64557 - DNA, 20 bp, synthetic construct
  source 1..20: mol_type = other DNA
ggcctcaaatgatctgccag

SEQ ID NO: 64558 - DNA, 20 bp, synthetic construct
  source 1..20: mol_type = other DNA
cggcctcaaatgatctgcca

SEQ ID NO: 64559 - DNA, 20 bp, synthetic construct
  source 1..20: mol_type = other DNA
ccggcctcaaatgatctgcc

SEQ ID NO: 64560 - DNA, 20 bp, synthetic construct
  source 1..20: mol_type = other DNA
cccggcctcaaatgatctgc

SEQ ID NO: 64561 - DNA, 20 bp, synthetic construct
  source 1..20: mol_type = other DNA
tcccggcctcaaatgatctg

SEQ ID NO: 64562 - DNA, 20 bp, synthetic construct
  source 1..20: mol_type = other DNA
ctcccggcctcaaatgatct

SEQ ID NO: 64563 - DNA, 20 bp, synthetic construct
  source 1..20: mol_type = other DNA
actcccggcctcaaatgatc

SEQ ID NO: 64564 - DNA, 20 bp, synthetic construct
  source 1..20: mol_type = other DNA
aactcccggcctcaaatgat

SEQ ID NO: 64565 - DNA, 20 bp, synthetic construct
  source 1..20: mol_type = other DNA
gaactcccggcctcaaatga

SEQ ID NO: 64566 - DNA, 20 bp, synthetic construct
  source 1..20: mol_type = other DNA
cgaactcccggcctcaaatg

SEQ ID NO: 64567 - DNA, 20 bp, synthetic construct
  source 1..20: mol_type = other DNA
tcgaactcccggcctcaaat

SEQ ID NO: 64568 - DNA, 20 bp, synthetic construct
  source 1..20: mol_type = other DNA
ctcgaactcccggcctcaaa

SEQ ID NO: 64569 - DNA, 20 bp, synthetic construct
  source 1..20: mol_type = other DNA
tctcgaactcccggcctcaa

SEQ ID NO: 64570 - DNA, 20 bp, synthetic construct
  source 1..20: mol_type = other DNA
gtctcgaactcccggcctca

SEQ ID NO: 64571 - DNA, 20 bp, synthetic construct
  source 1..20: mol_type = other DNA
ggtctcgaactcccggcctc

SEQ ID NO: 64572 - DNA, 20 bp, synthetic construct
  source 1..20: mol_type = other DNA
tggtctcgaactcccggcct

SEQ ID NO: 64573 - DNA, 20 bp, synthetic construct
  source 1..20: mol_type = other DNA
ctggtctcgaactcccggcc

SEQ ID NO: 64574 - DNA, 20 bp, synthetic construct
  source 1..20: mol_type = other DNA
gctggtctcgaactcccggc

SEQ ID NO: 64575 - DNA, 20 bp, synthetic construct
  source 1..20: mol_type = other DNA
ggctggtctcgaactcccgg

SEQ ID NO: 64576 - DNA, 20 bp, synthetic construct
  source 1..20: mol_type = other DNA
aggctggtctcgaactcccg

SEQ ID NO: 64577 - DNA, 20 bp, synthetic construct
  source 1..20: mol_type = other DNA
caggctggtctcgaactccc

SEQ ID NO: 64578 - DNA, 20 bp, synthetic construct
  source 1..20: mol_type = other DNA
gcaggctggtctcgaactcc

SEQ ID NO: 64579 - DNA, 20 bp, synthetic construct
  source 1..20: mol_type = other DNA
ggcaggctggtctcgaactc

SEQ ID NO: 64580 - DNA, 20 bp, synthetic construct
  source 1..20: mol_type = other DNA
gggcaggctggtctcgaact

SEQ ID NO: 64581 - DNA, 20 bp, synthetic construct
  source 1..20: mol_type = other DNA
tgggcaggctggtctcgaac

SEQ ID NO: 64582 - DNA, 20 bp, synthetic construct
  source 1..20: mol_type = other DNA
ttgggcaggctggtctcgaa

SEQ ID NO: 64583 - DNA, 20 bp, synthetic construct
  source 1..20: mol_type = other DNA
gttgggcaggctggtctcga

SEQ ID NO: 64584 - DNA, 20 bp, synthetic construct
  source 1..20: mol_type = other DNA
tgttgggcaggctggtctcg

SEQ ID NO: 64585 - DNA, 20 bp, synthetic construct
  source 1..20: mol_type = other DNA
atgttgggcaggctggtctc

SEQ ID NO: 64586 - DNA, 20 bp, synthetic construct
  source 1..20: mol_type = other DNA
catgttgggcaggctggtct

SEQ ID NO: 64587 - DNA, 20 bp, synthetic construct
  source 1..20: mol_type = other DNA
ccatgttgggcaggctggtc

SEQ ID NO: 64588 - DNA, 20 bp, synthetic construct
  source 1..20: mol_type = other DNA
accatgttgggcaggctggt

SEQ ID NO: 64589 - DNA, 20 bp, synthetic construct
  source 1..20: mol_type = other DNA
caccatgttgggcaggctgg

SEQ ID NO: 64590 - DNA, 20 bp, synthetic construct
  source 1..20: mol_type = other DNA
tcaccatgttgggcaggctg

SEQ ID NO: 64591 - DNA, 20 bp, synthetic construct
  source 1..20: mol_type = other DNA
ttcaccatgttgggcaggct

SEQ ID NO: 64592 - DNA, 20 bp, synthetic construct
  source 1..20: mol_type = other DNA
tttcaccatgttgggcaggc

SEQ ID NO: 64593 - DNA, 20 bp, synthetic construct
  source 1..20: mol_type = other DNA
gtttcaccatgttgggcagg

SEQ ID NO: 64594 - DNA, 20 bp, synthetic construct
  source 1..20: mol_type = other DNA
ggtttcaccatgttgggcag

SEQ ID NO: 64595 - DNA, 20 bp, synthetic construct
  source 1..20: mol_type = other DNA
gggtttcaccatgttgggca

SEQ ID NO: 64596 - DNA, 20 bp, synthetic construct
  source 1..20: mol_type = other DNA
agggtttcaccatgttgggc

SEQ ID NO: 64597 - DNA, 20 bp, synthetic construct
  source 1..20: mol_type = other DNA
cagggtttcaccatgttggg

SEQ ID NO: 64598 - DNA, 20 bp, synthetic construct
  source 1..20: mol_type = other DNA
acagggtttcaccatgttgg

SEQ ID NO: 64599 - DNA, 20 bp, synthetic construct
  source 1..20: mol_type = other DNA
gacagggtttcaccatgttg

SEQ ID NO: 64600 - DNA, 20 bp, synthetic construct
  source 1..20: mol_type = other DNA
agacagggtttcaccatgtt

SEQ ID NO: 64601 - DNA, 20 bp, synthetic construct
  source 1..20: mol_type = other DNA
gagacagggtttcaccatgt

SEQ ID NO: 64602 - DNA, 20 bp, synthetic construct
  source 1..20: mol_type = other DNA
agagacagggtttcaccatg

SEQ ID NO: 64603 - DNA, 20 bp, synthetic construct
  source 1..20: mol_type = other DNA
tagagacagggtttcaccat

SEQ ID NO: 64604 - DNA, 20 bp, synthetic construct
  source 1..20: mol_type = other DNA
gtagagacagggtttcacca

SEQ ID NO: 64605 - DNA, 20 bp, synthetic construct
  source 1..20: mol_type = other DNA
agtagagacagggtttcacc

SEQ ID NO: 64606 - DNA, 20 bp, synthetic construct
  source 1..20: mol_type = other DNA
tagtagagacagggtttcac

SEQ ID NO: 64607 - DNA, 20 bp, synthetic construct
  source 1..20: mol_type = other DNA
ttagtagagacagggtttca

SEQ ID NO: 64608 - DNA, 20 bp, synthetic construct
  source 1..20: mol_type = other DNA
tttagtagagacagggtttc

SEQ ID NO: 64609 - DNA, 20 bp, synthetic construct
  source 1..20: mol_type = other DNA
ttttagtagagacagggttt

SEQ ID NO: 64610 - DNA, 20 bp, synthetic construct
  source 1..20: mol_type = other DNA
tttttagtagagacagggtt

SEQ ID NO: 64611 - DNA, 20 bp, synthetic construct
  source 1..20: mol_type = other DNA
atttttagtagagacagggt

SEQ ID NO: 64612 - DNA, 20 bp, synthetic construct
  source 1..20: mol_type = other DNA
tatttttagtagagacaggg

SEQ ID NO: 64613 - DNA, 20 bp, synthetic construct
  source 1..20: mol_type = other DNA
gtatttttagtagagacagg

SEQ ID NO: 64614 - DNA, 20 bp, synthetic construct
  source 1..20: mol_type = other DNA
tgtatttttagtagagacag

SEQ ID NO: 64615 - DNA, 20 bp, synthetic construct
  source 1..20: mol_type = other DNA
ttgtatttttagtagagaca

SEQ ID NO: 64616 - DNA, 20 bp, synthetic construct
  source 1..20: mol_type = other DNA
tttgtatttttagtagagac

SEQ ID NO: 64617 - DNA, 20 bp, synthetic construct
  source 1..20: mol_type = other DNA
ttttgtatttttagtagaga

SEQ ID NO: 64618 - DNA, 20 bp, synthetic construct
  source 1..20: mol_type = other DNA
tttttgtatttttagtagag

SEQ ID NO: 64619 - DNA, 20 bp, synthetic construct
  source 1..20: mol_type = other DNA
atttttgtatttttagtaga

SEQ ID NO: 64620 - DNA, 20 bp, synthetic construct
  source 1..20: mol_type = other DNA
catttttgtatttttagtag

SEQ ID NO: 64621 - DNA, 20 bp, synthetic construct
  source 1..20: mol_type = other DNA
tcatttttgtatttttagta

SEQ ID NO: 64622 - DNA, 20 bp, synthetic construct
  source 1..20: mol_type = other DNA
ctcatttttgtatttttagt

SEQ ID NO: 64623 - DNA, 20 bp, synthetic construct
  source 1..20: mol_type = other DNA
gctcatttttgtatttttag

SEQ ID NO: 64624 - DNA, 20 bp, synthetic construct
  source 1..20: mol_type = other DNA
agctcatttttgtattttta

SEQ ID NO: 64625 - DNA, 20 bp, synthetic construct
  source 1..20: mol_type = other DNA
cagctcatttttgtattttt

SEQ ID NO: 64626 - DNA, 20 bp, synthetic construct
  source 1..20: mol_type = other DNA
ccagctcatttttgtatttt

SEQ ID NO: 64627 - DNA, 20 bp, synthetic construct
  source 1..20: mol_type = other DNA
cccagctcatttttgtattt

SEQ ID NO: 64628 - DNA, 20 bp, synthetic construct
  source 1..20: mol_type = other DNA
acccagctcatttttgtatt

SEQ ID NO: 64629 - DNA, 20 bp, synthetic construct
  source 1..20: mol_type = other DNA
cacccagctcatttttgtat

SEQ ID NO: 64630 - DNA, 20 bp, synthetic construct
  source 1..20: mol_type = other DNA
acacccagctcatttttgta

SEQ ID NO: 64631 - DNA, 20 bp, synthetic construct
  source 1..20: mol_type = other DNA
cacacccagctcatttttgt

SEQ ID NO: 64632 - DNA, 20 bp, synthetic construct
  source 1..20: mol_type = other DNA
ccacacccagctcatttttg

SEQ ID NO: 64633 - DNA, 20 bp, synthetic construct
  source 1..20: mol_type = other DNA
accacacccagctcattttt

SEQ ID NO: 64634 - DNA, 20 bp, synthetic construct
  source 1..20: mol_type = other DNA
caccacacccagctcatttt

SEQ ID NO: 64635 - DNA, 20 bp, synthetic construct
  source 1..20: mol_type = other DNA
ccaccacacccagctcattt

SEQ ID NO: 64636 - DNA, 20 bp, synthetic construct
  source 1..20: mol_type = other DNA
gccaccacacccagctcatt

SEQ ID NO: 64637 - DNA, 20 bp, synthetic construct
  source 1..20: mol_type = other DNA
cgccaccacacccagctcat

SEQ ID NO: 64638 - DNA, 20 bp, synthetic construct
  source 1..20: mol_type = other DNA
acgccaccacacccagctca

SEQ ID NO: 64639 - DNA, 20 bp, synthetic construct
  source 1..20: mol_type = other DNA
cacgccaccacacccagctc

SEQ ID NO: 64640 - DNA, 20 bp, synthetic construct
  source 1..20: mol_type = other DNA
gcacgccaccacacccagct

SEQ ID NO: 64641 - DNA, 20 bp, synthetic construct
  source 1..20: mol_type = other DNA
tgcacgccaccacacccagc

SEQ ID NO: 64642 - DNA, 20 bp, synthetic construct
  source 1..20: mol_type = other DNA
gtgcacgccaccacacccag

SEQ ID NO: 64643 - DNA, 20 bp, synthetic construct
  source 1..20: mol_type = other DNA
ggtgcacgccaccacaccca

SEQ ID NO: 64644 - DNA, 20 bp, synthetic construct
  source 1..20: mol_type = other DNA
aggtgcacgccaccacaccc

SEQ ID NO: 64645 - DNA, 20 bp, synthetic construct
  source 1..20: mol_type = other DNA
caggtgcacgccaccacacc

SEQ ID NO: 64646 - DNA, 20 bp, synthetic construct
  source 1..20: mol_type = other DNA
acaggtgcacgccaccacac

SEQ ID NO: 64647 - DNA, 20 bp, synthetic construct
  source 1..20: mol_type = other DNA
tacaggtgcacgccaccaca

SEQ ID NO: 64648 - DNA, 20 bp, synthetic construct
  source 1..20: mol_type = other DNA
ttacaggtgcacgccaccac

SEQ ID NO: 64649 - DNA, 20 bp, synthetic construct
  source 1..20: mol_type = other DNA
attacaggtgcacgccacca

SEQ ID NO: 64650 - DNA, 20 bp, synthetic construct
  source 1..20: mol_type = other DNA
gattacaggtgcacgccacc

SEQ ID NO: 64651 - DNA, 20 bp, synthetic construct
  source 1..20: mol_type = other DNA
agattacaggtgcacgccac

SEQ ID NO: 64652 - DNA, 20 bp, synthetic construct
  source 1..20: mol_type = other DNA
gagattacaggtgcacgcca

SEQ ID NO: 64653 - DNA, 20 bp, synthetic construct
  source 1..20: mol_type = other DNA
tgagattacaggtgcacgcc

SEQ ID NO: 64654 - DNA, 20 bp, synthetic construct
  source 1..20: mol_type = other DNA
ctgagattacaggtgcacgc

SEQ ID NO: 64655 - DNA, 20 bp, synthetic construct
  source 1..20: mol_type = other DNA
gctgagattacaggtgcacg

SEQ ID NO: 64656 - DNA, 20 bp, synthetic construct
  source 1..20: mol_type = other DNA
agctgagattacaggtgcac

SEQ ID NO: 64657 - DNA, 20 bp, synthetic construct
  source 1..20: mol_type = other DNA
tagctgagattacaggtgca

SEQ ID NO: 64658 - DNA, 20 bp, synthetic construct
  source 1..20: mol_type = other DNA
gtagctgagattacaggtgc

SEQ ID NO: 64659 - DNA, 20 bp, synthetic construct
  source 1..20: mol_type = other DNA
agtagctgagattacaggtg

SEQ ID NO: 64660 - DNA, 20 bp, synthetic construct
  source 1..20: mol_type = other DNA
tagtagctgagattacaggt

SEQ ID NO: 64661 - DNA, 20 bp, synthetic construct
  source 1..20: mol_type = other DNA
ctagtagctgagattacagg

SEQ ID NO: 64662 - DNA, 20 bp, synthetic construct
  source 1..20: mol_type = other DNA
cctagtagctgagattacag

SEQ ID NO: 64663 - DNA, 20 bp, synthetic construct
  source 1..20: mol_type = other DNA
ccctagtagctgagattaca

SEQ ID NO: 64664 - DNA, 20 bp, synthetic construct
  source 1..20: mol_type = other DNA
tccctagtagctgagattac

SEQ ID NO: 64665 - DNA, 20 bp, synthetic construct
  source 1..20: mol_type = other DNA
ctccctagtagctgagatta

SEQ ID NO: 64666 - DNA, 20 bp, synthetic construct
  source 1..20: mol_type = other DNA
cctccctagtagctgagatt

SEQ ID NO: 64667 - DNA, 20 bp, synthetic construct
  source 1..20: mol_type = other DNA
gcctccctagtagctgagat

SEQ ID NO: 64668 - DNA, 20 bp, synthetic construct
  source 1..20: mol_type = other DNA
agcctccctagtagctgaga

SEQ ID NO: 64669 - DNA, 20 bp, synthetic construct
  source 1..20: mol_type = other DNA
cagcctccctagtagctgag

SEQ ID NO: 64670 - DNA, 20 bp, synthetic construct
  source 1..20: mol_type = other DNA
tcagcctccctagtagctga

SEQ ID NO: 64671 - DNA, 20 bp, synthetic construct
  source 1..20: mol_type = other DNA
ctcagcctccctagtagctg

SEQ ID NO: 64672 - DNA, 20 bp, synthetic construct
  source 1..20: mol_type = other DNA
cctcagcctccctagtagct

SEQ ID NO: 64673 - DNA, 20 bp, synthetic construct
  source 1..20: mol_type = other DNA
gcctcagcctccctagtagc

SEQ ID NO: 64674 - DNA, 20 bp, synthetic construct
  source 1..20: mol_type = other DNA
tgcctcagcctccctagtag

SEQ ID NO: 64675 - DNA, 20 bp, synthetic construct
  source 1..20: mol_type = other DNA
ctgcctcagcctccctagta

SEQ ID NO: 64676 - DNA, 20 bp, synthetic construct
  source 1..20: mol_type = other DNA
tctgcctcagcctccctagt

SEQ ID NO: 64677 - DNA, 20 bp, synthetic construct
  source 1..20: mol_type = other DNA
ctctgcctcagcctccctag

SEQ ID NO: 64678 - DNA, 20 bp, synthetic construct
  source 1..20: mol_type = other DNA
tctctgcctcagcctcccta

SEQ ID NO: 64679 - DNA, 20 bp, synthetic construct
  source 1..20: mol_type = other DNA
ttctctgcctcagcctccct

SEQ ID NO: 64680 - DNA, 20 bp, synthetic construct
  source 1..20: mol_type = other DNA
attctctgcctcagcctccc

SEQ ID NO: 64681 - DNA, 20 bp, synthetic construct
  source 1..20: mol_type = other DNA
gattctctgcctcagcctcc

SEQ ID NO: 64682 - DNA, 20 bp, synthetic construct
  source 1..20: mol_type = other DNA
tgattctctgcctcagcctc

SEQ ID NO: 64683 - DNA, 20 bp, synthetic construct
  source 1..20: mol_type = other DNA
gtgattctctgcctcagcct

SEQ ID NO: 64684 - DNA, 20 bp, synthetic construct
  source 1..20: mol_type = other DNA
agtgattctctgcctcagcc

SEQ ID NO: 64685 - DNA, 20 bp, synthetic construct
  source 1..20: mol_type = other DNA
aagtgattctctgcctcagc

SEQ ID NO: 64686 - DNA, 20 bp, synthetic construct
  source 1..20: mol_type = other DNA
caagtgattctctgcctcag

SEQ ID NO: 64687 - DNA, 20 bp, synthetic construct
  source 1..20: mol_type = other DNA
tcaagtgattctctgcctca

SEQ ID NO: 64688 - DNA, 20 bp, synthetic construct
  source 1..20: mol_type = other DNA
ttcaagtgattctctgcctc

SEQ ID NO: 64689 - DNA, 20 bp, synthetic construct
  source 1..20: mol_type = other DNA
cttcaagtgattctctgcct

SEQ ID NO: 64690 - DNA, 20 bp, synthetic construct
  source 1..20: mol_type = other DNA
gcttcaagtgattctctgcc

SEQ ID NO: 64691 - DNA, 20 bp, synthetic construct
  source 1..20: mol_type = other DNA
agcttcaagtgattctctgc

SEQ ID NO: 64692 - DNA, 20 bp, synthetic construct
  source 1..20: mol_type = other DNA
cagcttcaagtgattctctg

SEQ ID NO: 64693 - DNA, 20 bp, synthetic construct
  source 1..20: mol_type = other DNA
ccagcttcaagtgattctct

SEQ ID NO: 64694 - DNA, 20 bp, synthetic construct
  source 1..20: mol_type = other DNA
cccagcttcaagtgattctc

SEQ ID NO: 64695 - DNA, 20 bp, synthetic construct
  source 1..20: mol_type = other DNA
tcccagcttcaagtgattct

SEQ ID NO: 64696 - DNA, 20 bp, synthetic construct
  source 1..20: mol_type = other DNA
ttcccagcttcaagtgattc

SEQ ID NO: 64697 - DNA, 20 bp, synthetic construct
  source 1..20: mol_type = other DNA
cttcccagcttcaagtgatt

SEQ ID NO: 64698 - DNA, 20 bp, synthetic construct
  source 1..20: mol_type = other DNA
gcttcccagcttcaagtgat

SEQ ID NO: 64699 - DNA, 20 bp, synthetic construct
  source 1..20: mol_type = other DNA
ggcttcccagcttcaagtga

SEQ ID NO: 64700 - DNA, 20 bp, synthetic construct
  source 1..20: mol_type = other DNA
cggcttcccagcttcaagtg

SEQ ID NO: 64701 - DNA, 20 bp, synthetic construct
  source 1..20: mol_type = other DNA
tcggcttcccagcttcaagt

SEQ ID NO: 64702 - DNA, 20 bp, synthetic construct
  source 1..20: mol_type = other DNA
ctcggcttcccagcttcaag

SEQ ID NO: 64703 - DNA, 20 bp, synthetic construct
  source 1..20: mol_type = other DNA
cctcggcttcccagcttcaa

SEQ ID NO: 64704 - DNA, 20 bp, synthetic construct
  source 1..20: mol_type = other DNA
gcctcggcttcccagcttca

SEQ ID NO: 64705 - DNA, 20 bp, synthetic construct
  source 1..20: mol_type = other DNA
agcctcggcttcccagcttc

SEQ ID NO: 64706 - DNA, 20 bp, synthetic construct
  source 1..20: mol_type = other DNA
tagcctcggcttcccagctt

SEQ ID NO: 64707 - DNA, 20 bp, synthetic construct
  source 1..20: mol_type = other DNA
gtagcctcggcttcccagct

SEQ ID NO: 64708 - DNA, 20 bp, synthetic construct
  source 1..20: mol_type = other DNA
tgtagcctcggcttcccagc

SEQ ID NO: 64709 - DNA, 20 bp, synthetic construct
  source 1..20: mol_type = other DNA
ctgtagcctcggcttcccag

SEQ ID NO: 64710 - DNA, 20 bp, synthetic construct
  source 1..20: mol_type = other DNA
actgtagcctcggcttccca

SEQ ID NO: 64711 - DNA, 20 bp, synthetic construct
  source 1..20: mol_type = other DNA
cactgtagcctcggcttccc

SEQ ID NO: 64712 - DNA, 20 bp, synthetic construct
  source 1..20: mol_type = other DNA
tcactgtagcctcggcttcc

SEQ ID NO: 64713 - DNA, 20 bp, synthetic construct
  source 1..20: mol_type = other DNA
ctcactgtagcctcggcttc

SEQ ID NO: 64714 - DNA, 20 bp, synthetic construct
  source 1..20: mol_type = other DNA
gctcactgtagcctcggctt

SEQ ID NO: 64715 - DNA, 20 bp, synthetic construct
  source 1..20: mol_type = other DNA
ggctcactgtagcctcggct

SEQ ID NO: 64716 - DNA, 20 bp, synthetic construct
  source 1..20: mol_type = other DNA
cggctcactgtagcctcggc

SEQ ID NO: 64717 - DNA, 20 bp, synthetic construct
  source 1..20: mol_type = other DNA
tcggctcactgtagcctcgg

SEQ ID NO: 64718 - DNA, 20 bp, synthetic construct
  source 1..20: mol_type = other DNA
ctcggctcactgtagcctcg

SEQ ID NO: 64719 - DNA, 20 bp, synthetic construct
  source 1..20: mol_type = other DNA
tctcggctcactgtagcctc

SEQ ID NO: 64720 - DNA, 20 bp, synthetic construct
  source 1..20: mol_type = other DNA
atctcggctcactgtagcct

SEQ ID NO: 64721 - DNA, 20 bp, synthetic construct
  source 1..20: mol_type = other DNA
gatctcggctcactgtagcc

SEQ ID NO: 64722 - DNA, 20 bp, synthetic construct
  source 1..20: mol_type = other DNA
tgatctcggctcactgtagc

SEQ ID NO: 64723 - DNA, 20 bp, synthetic construct
  source 1..20: mol_type = other DNA
gtgatctcggctcactgtag

SEQ ID NO: 64724 - DNA, 20 bp, synthetic construct
  source 1..20: mol_type = other DNA
cgtgatctcggctcactgta

SEQ ID NO: 64725 - DNA, 20 bp, synthetic construct
  source 1..20: mol_type = other DNA
gcgtgatctcggctcactgt

SEQ ID NO: 64726 - DNA, 20 bp, synthetic construct
  source 1..20: mol_type = other DNA
ggcgtgatctcggctcactg

SEQ ID NO: 64727 - DNA, 20 bp, synthetic construct
  source 1..20: mol_type = other DNA
tggcgtgatctcggctcact

SEQ ID NO: 64728 - DNA, 20 bp, synthetic construct
  source 1..20: mol_type = other DNA
gtggcgtgatctcggctcac

SEQ ID NO: 64729 - DNA, 20 bp, synthetic construct
  source 1..20: mol_type = other DNA
agtggcgtgatctcggctca

SEQ ID NO: 64730 - DNA, 20 bp, synthetic construct
  source 1..20: mol_type = other DNA
cagtggcgtgatctcggctc

SEQ ID NO: 64731 - DNA, 20 bp, synthetic construct
  source 1..20: mol_type = other DNA
gcagtggcgtgatctcggct

SEQ ID NO: 64732 - DNA, 20 bp, synthetic construct
  source 1..20: mol_type = other DNA
tgcagtggcgtgatctcggc

SEQ ID NO: 64733 - DNA, 20 bp, synthetic construct
  source 1..20: mol_type = other DNA
gtgcagtggcgtgatctcgg

SEQ ID NO: 64734 - DNA, 20 bp, synthetic construct
  source 1..20: mol_type = other DNA
agtgcagtggcgtgatctcg

SEQ ID NO: 64735 - DNA, 20 bp, synthetic construct
  source 1..20: mol_type = other DNA
gagtgcagtggcgtgatctc

SEQ ID NO: 64736 - DNA, 20 bp, synthetic construct
  source 1..20: mol_type = other DNA
ggagtgcagtggcgtgatct

SEQ ID NO: 64737 - DNA, 20 bp, synthetic construct
  source 1..20: mol_type = other DNA
tggagtgcagtggcgtgatc

SEQ ID NO: 64738 - DNA, 20 bp, synthetic construct
  source 1..20: mol_type = other DNA
ctggagtgcagtggcgtgat

SEQ ID NO: 64739 - DNA, 20 bp, synthetic construct
  source 1..20: mol_type = other DNA
gctggagtgcagtggcgtga

SEQ ID NO: 64740 - DNA, 20 bp, synthetic construct
  source 1..20: mol_type = other DNA
ggctggagtgcagtggcgtg

SEQ ID NO: 64741 - DNA, 20 bp, synthetic construct
  source 1..20: mol_type = other DNA
aggctggagtgcagtggcgt

SEQ ID NO: 64742 - DNA, 20 bp, synthetic construct
  source 1..20: mol_type = other DNA
caggctggagtgcagtggcg

SEQ ID NO: 64743 - DNA, 20 bp, synthetic construct
  source 1..20: mol_type = other DNA
ccaggctggagtgcagtggc

SEQ ID NO: 64744 - DNA, 20 bp, synthetic construct
  source 1..20: mol_type = other DNA
cccaggctggagtgcagtgg

SEQ ID NO: 64745 - DNA, 20 bp, synthetic construct
  source 1..20: mol_type = other DNA
acccaggctggagtgcagtg

SEQ ID NO: 64746 - DNA, 20 bp, synthetic construct
  source 1..20: mol_type = other DNA
cacccaggctggagtgcagt

SEQ ID NO: 64747 - DNA, 20 bp, synthetic construct
  source 1..20: mol_type = other DNA
tcacccaggctggagtgcag

SEQ ID NO: 64748 - DNA, 20 bp, synthetic construct
  source 1..20: mol_type = other DNA
gtcacccaggctggagtgca

SEQ ID NO: 64749 - DNA, 20 bp, synthetic construct
  source 1..20: mol_type = other DNA
tgtcacccaggctggagtgc

SEQ ID NO: 64750 - DNA, 20 bp, synthetic construct
  source 1..20: mol_type = other DNA
ctgtcacccaggctggagtg

SEQ ID NO: 64751 - DNA, 20 bp, synthetic construct
  source 1..20: mol_type = other DNA
tctgtcacccaggctggagt

SEQ ID NO: 64752 - DNA, 20 bp, synthetic construct
  source 1..20: mol_type = other DNA
ctctgtcacccaggctggag

SEQ ID NO: 64753 - DNA, 20 bp, synthetic construct
  source 1..20: mol_type = other DNA
actctgtcacccaggctgga

SEQ ID NO: 64754 - DNA, 20 bp, synthetic construct
  source 1..20: mol_type = other DNA
cactctgtcacccaggctgg

SEQ ID NO: 64755 - DNA, 20 bp, synthetic construct
  source 1..20: mol_type = other DNA
tcactctgtcacccaggctg

SEQ ID NO: 64756 - DNA, 20 bp, synthetic construct
  source 1..20: mol_type = other DNA
ttcactctgtcacccaggct

SEQ ID NO: 64757 - DNA, 20 bp, synthetic construct
  source 1..20: mol_type = other DNA
tttcactctgtcacccaggc

SEQ ID NO: 64758 - DNA, 20 bp, synthetic construct
  source 1..20: mol_type = other DNA
gtttcactctgtcacccagg

SEQ ID NO: 64759 - DNA, 20 bp, synthetic construct
  source 1..20: mol_type = other DNA
agtttcactctgtcacccag

SEQ ID NO: 64760 - DNA, 20 bp, synthetic construct
  source 1..20: mol_type = other DNA
aagtttcactctgtcaccca

SEQ ID NO: 64761 - DNA, 20 bp, synthetic construct
  source 1..20: mol_type = other DNA
gaagtttcactctgtcaccc

SEQ ID NO: 64762 - DNA, 20 bp, synthetic construct
  source 1..20: mol_type = other DNA
tgaagtttcactctgtcacc

SEQ ID NO: 64763 - DNA, 20 bp, synthetic construct
  source 1..20: mol_type = other DNA
atgaagtttcactctgtcac

SEQ ID NO: 64764 - DNA, 20 bp, synthetic construct
  source 1..20: mol_type = other DNA
gatgaagtttcactctgtca

SEQ ID NO: 64765 - DNA, 20 bp, synthetic construct
  source 1..20: mol_type = other DNA
agatgaagtttcactctgtc

SEQ ID NO: 64766 - DNA, 20 bp, synthetic construct
  source 1..20: mol_type = other DNA
gagatgaagtttcactctgt

SEQ ID NO: 64767 - DNA, 20 bp, synthetic construct
  source 1..20: mol_type = other DNA
tgagatgaagtttcactctg

SEQ ID NO: 64768 - DNA, 20 bp, synthetic construct
  source 1..20: mol_type = other DNA
ttgagatgaagtttcactct

SEQ ID NO: 64769 - DNA, 20 bp, synthetic construct
  source 1..20: mol_type = other DNA
tttgagatgaagtttcactc

SEQ ID NO: 64770 - DNA, 20 bp, synthetic construct
  source 1..20: mol_type = other DNA
ttttgagatgaagtttcact

SEQ ID NO: 64771 - DNA, 20 bp, synthetic construct
  source 1..20: mol_type = other DNA
tttttgagatgaagtttcac

SEQ ID NO: 64772 - DNA, 20 bp, synthetic construct
  source 1..20: mol_type = other DNA
ttttttgagatgaagtttca

SEQ ID NO: 64773 - DNA, 20 bp, synthetic construct
  source 1..20: mol_type = other DNA
tttttttgagatgaagtttc

SEQ ID NO: 64774 - DNA, 20 bp, synthetic construct
  source 1..20: mol_type = other DNA
ttttttttgagatgaagttt

SEQ ID NO: 64775 - DNA, 20 bp, synthetic construct
  source 1..20: mol_type = other DNA
tttttttttgagatgaagtt

SEQ ID NO: 64776 - DNA, 20 bp, synthetic construct
  source 1..20: mol_type = other DNA
ttttttttttgagatgaagt

SEQ ID NO: 64777 - DNA, 20 bp, synthetic construct
  source 1..20: mol_type = other DNA
tttttttttttgagatgaag

SEQ ID NO: 64778 - DNA, 20 bp, synthetic construct
  source 1..20: mol_type = other DNA
ttttttttttttgagatgaa

SEQ ID NO: 64779 - DNA, 20 bp, synthetic construct
  source 1..20: mol_type = other DNA
tttttttttttttgagatga

SEQ ID NO: 64780 - DNA, 20 bp, synthetic construct
  source 1..20: mol_type = other DNA
ttttttttttttttgagatg

SEQ ID NO: 64781 - DNA, 20 bp, synthetic construct
  source 1..20: mol_type = other DNA
tttttttttttttttgagat

SEQ ID NO: 64782 - DNA, 20 bp, synthetic construct
  source 1..20: mol_type = other DNA
ttttttttttttttttgaga

SEQ ID NO: 64783 - DNA, 20 bp, synthetic construct
  source 1..20: mol_type = other DNA
tttttttttttttttttgag

SEQ ID NO: 64784 - DNA, 20 bp, synthetic construct
  source 1..20: mol_type = other DNA
ttttttttttttttttttga

SEQ ID NO: 64785 - DNA, 20 bp, synthetic construct
  source 1..20: mol_type = other DNA
tttttttttttttttttttg

SEQ ID NO: 64786 - DNA, 20 bp, synthetic construct
  source 1..20: mol_type = other DNA
tttttttttttttttttttt

SEQ ID NO: 64787 - DNA, 20 bp, synthetic construct
  source 1..20: mol_type = other DNA
tttttttttttttttttttt

SEQ ID NO: 64788 - DNA, 20 bp, synthetic construct
  source 1..20: mol_type = other DNA
tttttttttttttttttttt

SEQ ID NO: 64789 - DNA, 20 bp, synthetic construct
  source 1..20: mol_type = other DNA
tttttttttttttttttttt

SEQ ID NO: 64790 - DNA, 20 bp, synthetic construct
  source 1..20: mol_type = other DNA
tttttttttttttttttttt

SEQ ID NO: 64791 - DNA, 20 bp, synthetic construct
  source 1..20: mol_type = other DNA
gttttttttttttttttttt

SEQ ID NO: 64792 - DNA, 20 bp, synthetic construct
  source 1..20: mol_type = other DNA
agtttttttttttttttttt

SEQ ID NO: 64793 - DNA, 20 bp, synthetic construct
  source 1..20: mol_type = other DNA
cagttttttttttttttttt

SEQ ID NO: 64794 - DNA, 20 bp, synthetic construct
  source 1..20: mol_type = other DNA
gcagtttttttttttttttt

SEQ ID NO: 64795 - DNA, 20 bp, synthetic construct
  source 1..20: mol_type = other DNA
cgcagttttttttttttttt

SEQ ID NO: 64796 - DNA, 20 bp, synthetic construct
  source 1..20: mol_type = other DNA
acgcagtttttttttttttt

SEQ ID NO: 64797 - DNA, 20 bp, synthetic construct
  source 1..20: mol_type = other DNA
cacgcagttttttttttttt

SEQ ID NO: 64798 - DNA, 20 bp, synthetic construct
  source 1..20: mol_type = other DNA
acacgcagtttttttttttt

SEQ ID NO: 64799 - DNA, 20 bp, synthetic construct
  source 1..20: mol_type = other DNA
cacacgcagttttttttttt

SEQ ID NO: 64800 - DNA, 20 bp, synthetic construct
  source 1..20: mol_type = other DNA
ccacacgcagtttttttttt

SEQ ID NO: 64801 - DNA, 20 bp, synthetic construct
  source 1..20: mol_type = other DNA
tccacacgcagttttttttt

SEQ ID NO: 64802 - DNA, 20 bp, synthetic construct
  source 1..20: mol_type = other DNA
gtccacacgcagtttttttt

SEQ ID NO: 64803 - DNA, 20 bp, synthetic construct
  source 1..20: mol_type = other DNA
tgtccacacgcagttttttt

SEQ ID NO: 64804 - DNA, 20 bp, synthetic construct
  source 1..20: mol_type = other DNA
atgtccacacgcagtttttt

SEQ ID NO: 64805 - DNA, 20 bp, synthetic construct
  source 1..20: mol_type = other DNA
tatgtccacacgcagttttt

SEQ ID NO: 64806 - DNA, 20 bp, synthetic construct
  source 1..20: mol_type = other DNA
ctatgtccacacgcagtttt

SEQ ID NO: 64807 - DNA, 20 bp, synthetic construct
  source 1..20: mol_type = other DNA
cctatgtccacacgcagttt

SEQ ID NO: 64808 - DNA, 20 bp, synthetic construct
  source 1..20: mol_type = other DNA
acctatgtccacacgcagtt

SEQ ID NO: 64809 - DNA, 20 bp, synthetic construct
  source 1..20: mol_type = other DNA
aacctatgtccacacgcagt

SEQ ID NO: 64810 - DNA, 20 bp, synthetic construct
  source 1..20: mol_type = other DNA
aaacctatgtccacacgcag

SEQ ID NO: 64811 - DNA, 20 bp, synthetic construct
  source 1..20: mol_type = other DNA
aaaacctatgtccacacgca

SEQ ID NO: 64812 - DNA, 20 bp, synthetic construct
  source 1..20: mol_type = other DNA
gaaaacctatgtccacacgc

SEQ ID NO: 64813 - DNA, 20 bp, synthetic construct
  source 1..20: mol_type = other DNA
tgaaaacctatgtccacacg

SEQ ID NO: 64814 - DNA, 20 bp, synthetic construct
  source 1..20: mol_type = other DNA
ttgaaaacctatgtccacac

SEQ ID NO: 64815 - DNA, 20 bp, synthetic construct
  source 1..20: mol_type = other DNA
attgaaaacctatgtccaca

SEQ ID NO: 64816 - DNA, 20 bp, synthetic construct
  source 1..20: mol_type = other DNA
aattgaaaacctatgtccac

SEQ ID NO: 64817 - DNA, 20 bp, synthetic construct
  source 1..20: mol_type = other DNA
gaattgaaaacctatgtcca

SEQ ID NO: 64818 - DNA, 20 bp, synthetic construct
  source 1..20: mol_type = other DNA
agaattgaaaacctatgtcc

SEQ ID NO: 64819 - DNA, 20 bp, synthetic construct
  source 1..20: mol_type = other DNA
gagaattgaaaacctatgtc

SEQ ID NO: 64820 - DNA, 20 bp, synthetic construct
  source 1..20: mol_type = other DNA
tgagaattgaaaacctatgt

SEQ ID NO: 64821 - DNA, 20 bp, synthetic construct
  source 1..20: mol_type = other DNA
atgagaattgaaaacctatg

SEQ ID NO: 64822 - DNA, 20 bp, synthetic construct
  source 1..20: mol_type = other DNA
catgagaattgaaaacctat

SEQ ID NO: 64823 - DNA, 20 bp, synthetic construct
  source 1..20: mol_type = other DNA
ccatgagaattgaaaaccta

SEQ ID NO: 64824 - DNA, 20 bp, synthetic construct
  source 1..20: mol_type = other DNA
cccatgagaattgaaaacct

SEQ ID NO: 64825 - DNA, 20 bp, synthetic construct
  source 1..20: mol_type = other DNA
ccccatgagaattgaaaacc

SEQ ID NO: 64826 - DNA, 20 bp, synthetic construct
  source 1..20: mol_type = other DNA
cccccatgagaattgaaaac

SEQ ID NO: 64827 - DNA, 20 bp, synthetic construct
  source 1..20: mol_type = other DNA
acccccatgagaattgaaaa

SEQ ID NO: 64828 - DNA, 20 bp, synthetic construct
  source 1..20: mol_type = other DNA
cacccccatgagaattgaaa

SEQ ID NO: 64829 - DNA, 20 bp, synthetic construct
  source 1..20: mol_type = other DNA
acacccccatgagaattgaa

SEQ ID NO: 64830 - DNA, 20 bp, synthetic construct
  source 1..20: mol_type = other DNA
cacacccccatgagaattga

SEQ ID NO: 64831 - DNA, 20 bp, synthetic construct
  source 1..20: mol_type = other DNA
acacacccccatgagaattg

SEQ ID NO: 64832 - DNA, 20 bp, synthetic construct
  source 1..20: mol_type = other DNA
cacacacccccatgagaatt

SEQ ID NO: 64833 - DNA, 20 bp, synthetic construct
  source 1..20: mol_type = other DNA
acacacacccccatgagaat

SEQ ID NO: 64834 - DNA, 20 bp, synthetic construct
  source 1..20: mol_type = other DNA
cacacacacccccatgagaa

SEQ ID NO: 64835 - DNA, 20 bp, synthetic construct
  source 1..20: mol_type = other DNA
acacacacacccccatgaga

SEQ ID NO: 64836 - DNA, 20 bp, synthetic construct
  source 1..20: mol_type = other DNA
tacacacacacccccatgag

SEQ ID NO: 64837 - DNA, 20 bp, synthetic construct
  source 1..20: mol_type = other DNA
atacacacacacccccatga

SEQ ID NO: 64838 - DNA, 20 bp, synthetic construct
  source 1..20: mol_type = other DNA
catacacacacacccccatg

SEQ ID NO: 64839 - DNA, 20 bp, synthetic construct
  source 1..20: mol_type = other DNA
gcatacacacacacccccat

SEQ ID NO: 64840 - DNA, 20 bp, synthetic construct
  source 1..20: mol_type = other DNA
tgcatacacacacaccccca

SEQ ID NO: 64841 - DNA, 20 bp, synthetic construct
  source 1..20: mol_type = other DNA
atgcatacacacacaccccc

SEQ ID NO: 64842 - DNA, 20 bp, synthetic construct
  source 1..20: mol_type = other DNA
tatgcatacacacacacccc

SEQ ID NO: 64843 - DNA, 20 bp, synthetic construct
  source 1..20: mol_type = other DNA
gtatgcatacacacacaccc

SEQ ID NO: 64844 - DNA, 20 bp, synthetic construct
  source 1..20: mol_type = other DNA
agtatgcatacacacacacc

SEQ ID NO: 64845 - DNA, 20 bp, synthetic construct
  source 1..20: mol_type = other DNA
gagtatgcatacacacacac

SEQ ID NO: 64846 - DNA, 20 bp, synthetic construct
  source 1..20: mol_type = other DNA
tgagtatgcatacacacaca

SEQ ID NO: 64847 - DNA, 20 bp, synthetic construct
  source 1..20: mol_type = other DNA
atgagtatgcatacacacac

SEQ ID NO: 64848 - DNA, 20 bp, synthetic construct
  source 1..20: mol_type = other DNA
tatgagtatgcatacacaca

SEQ ID NO: 64849 - DNA, 20 bp, synthetic construct
  source 1..20: mol_type = other DNA
gtatgagtatgcatacacac

SEQ ID NO: 64850 - DNA, 20 bp, synthetic construct
  source 1..20: mol_type = other DNA
tgtatgagtatgcatacaca

SEQ ID NO: 64851 - DNA, 20 bp, synthetic construct
  source 1..20: mol_type = other DNA
atgtatgagtatgcatacac

SEQ ID NO: 64852 - DNA, 20 bp, synthetic construct
  source 1..20: mol_type = other DNA
tatgtatgagtatgcataca

SEQ ID NO: 64853 - DNA, 20 bp, synthetic construct
  source 1..20: mol_type = other DNA
gtatgtatgagtatgcatac

SEQ ID NO: 64854 - DNA, 20 bp, synthetic construct
  source 1..20: mol_type = other DNA
tgtatgtatgagtatgcata

SEQ ID NO: 64855 - DNA, 20 bp, synthetic construct
  source 1..20: mol_type = other DNA
atgtatgtatgagtatgcat

SEQ ID NO: 64856 - DNA, 20 bp, synthetic construct
  source 1..20: mol_type = other DNA
tatgtatgtatgagtatgca

SEQ ID NO: 64857 - DNA, 20 bp, synthetic construct
  source 1..20: mol_type = other DNA
gtatgtatgtatgagtatgc

SEQ ID NO: 64858 - DNA, 20 bp, synthetic construct
  source 1..20: mol_type = other DNA
tgtatgtatgtatgagtatg

SEQ ID NO: 64859 - DNA, 20 bp, synthetic construct
  source 1..20: mol_type = other DNA
gtgtatgtatgtatgagtat

SEQ ID NO: 64860 - DNA, 20 bp, synthetic construct
  source 1..20: mol_type = other DNA
tgtgtatgtatgtatgagta

SEQ ID NO: 64861 - DNA, 20 bp, synthetic construct
  source 1..20: mol_type = other DNA
atgtgtatgtatgtatgagt

SEQ ID NO: 64862 - DNA, 20 bp, synthetic construct
  source 1..20: mol_type = other DNA
tatgtgtatgtatgtatgag

SEQ ID NO: 64863 - DNA, 20 bp, synthetic construct
  source 1..20: mol_type = other DNA
gtatgtgtatgtatgtatga

SEQ ID NO: 64864 - DNA, 20 bp, synthetic construct
  source 1..20: mol_type = other DNA
ggtatgtgtatgtatgtatg

SEQ ID NO: 64865 - DNA, 20 bp, synthetic construct
  source 1..20: mol_type = other DNA
aggtatgtgtatgtatgtat

SEQ ID NO: 64866 - DNA, 20 bp, synthetic construct
  source 1..20: mol_type = other DNA
caggtatgtgtatgtatgta

SEQ ID NO: 64867 - DNA, 20 bp, synthetic construct
  source 1..20: mol_type = other DNA
gcaggtatgtgtatgtatgt

SEQ ID NO: 64868 - DNA, 20 bp, synthetic construct
  source 1..20: mol_type = other DNA
tgcaggtatgtgtatgtatg

SEQ ID NO: 64869 - DNA, 20 bp, synthetic construct
  source 1..20: mol_type = other DNA
ttgcaggtatgtgtatgtat

SEQ ID NO: 64870 - DNA, 20 bp, synthetic construct
  source 1..20: mol_type = other DNA
cttgcaggtatgtgtatgta

SEQ ID NO: 64871 - DNA, 20 bp, synthetic construct
  source 1..20: mol_type = other DNA
tcttgcaggtatgtgtatgt

SEQ ID NO: 64872 - DNA, 20 bp, synthetic construct
  source 1..20: mol_type = other DNA
atcttgcaggtatgtgtatg

SEQ ID NO: 64873 - DNA, 20 bp, synthetic construct
  source 1..20: mol_type = other DNA
tatcttgcaggtatgtgtat

SEQ ID NO: 64874 - DNA, 20 bp, synthetic construct
  source 1..20: mol_type = other DNA
ttatcttgcaggtatgtgta

SEQ ID NO: 64875 - DNA, 20 bp, synthetic construct
  source 1..20: mol_type = other DNA
attatcttgcaggtatgtgt

SEQ ID NO: 64876 - DNA, 20 bp, synthetic construct
  source 1..20: mol_type = other DNA
aattatcttgcaggtatgtg

SEQ ID NO: 64877 - DNA, 20 bp, synthetic construct
  source 1..20: mol_type = other DNA
caattatcttgcaggtatgt

SEQ ID NO: 64878 - DNA, 20 bp, synthetic construct
  source 1..20: mol_type = other DNA
gcaattatcttgcaggtatg

SEQ ID NO: 64879 - DNA, 20 bp, synthetic construct
  source 1..20: mol_type = other DNA
agcaattatcttgcaggtat

SEQ ID NO: 64880 - DNA, 20 bp, synthetic construct
  source 1..20: mol_type = other DNA
cagcaattatcttgcaggta

SEQ ID NO: 64881 - DNA, 20 bp, synthetic construct
  source 1..20: mol_type = other DNA
ccagcaattatcttgcaggt

SEQ ID NO: 64882 - DNA, 20 bp, synthetic construct
  source 1..20: mol_type = other DNA
gccagcaattatcttgcagg

SEQ ID NO: 64883 - DNA, 20 bp, synthetic construct
  source 1..20: mol_type = other DNA
agccagcaattatcttgcag

SEQ ID NO: 64884 - DNA, 20 bp, synthetic construct
  source 1..20: mol_type = other DNA
gagccagcaattatcttgca

SEQ ID NO: 64885 - DNA, 20 bp, synthetic construct
  source 1..20: mol_type = other DNA
cgagccagcaattatcttgc

SEQ ID NO: 64886 - DNA, 20 bp, synthetic construct
  source 1..20: mol_type = other DNA
acgagccagcaattatcttg

SEQ ID NO: 64887 - DNA, 20 bp, synthetic construct
  source 1..20: mol_type = other DNA
tacgagccagcaattatctt

SEQ ID NO: 64888 - DNA, 20 bp, synthetic construct
  source 1..20: mol_type = other DNA
atacgagccagcaattatct

SEQ ID NO: 64889 - DNA, 20 bp, synthetic construct
  source 1..20: mol_type = other DNA
catacgagccagcaattatc

SEQ ID NO: 64890 - DNA, 20 bp, synthetic construct
  source 1..20: mol_type = other DNA
gcatacgagccagcaattat

SEQ ID NO: 64891 - DNA, 20 bp, synthetic construct
  source 1..20: mol_type = other DNA
agcatacgagccagcaatta

SEQ ID NO: 64892 - DNA, 20 bp, synthetic construct
  source 1..20: mol_type = other DNA
tagcatacgagccagcaatt

SEQ ID NO: 64893 - DNA, 20 bp, synthetic construct
  source 1..20: mol_type = other DNA
ttagcatacgagccagcaat

SEQ ID NO: 64894 - DNA, 20 bp, synthetic construct
  source 1..20: mol_type = other DNA
tttagcatacgagccagcaa

SEQ ID NO: 64895 - DNA, 20 bp, synthetic construct
  source 1..20: mol_type = other DNA
atttagcatacgagccagca

SEQ ID NO: 64896 - DNA, 20 bp, synthetic construct
  source 1..20: mol_type = other DNA
gatttagcatacgagccagc

SEQ ID NO: 64897 - DNA, 20 bp, synthetic construct
  source 1..20: mol_type = other DNA
agatttagcatacgagccag

SEQ ID NO: 64898 - DNA, 20 bp, synthetic construct
  source 1..20: mol_type = other DNA
tagatttagcatacgagcca

SEQ ID NO: 64899 - DNA, 20 bp, synthetic construct
  source 1..20: mol_type = other DNA
atagatttagcatacgagcc

SEQ ID NO: 64900 - DNA, 20 bp, synthetic construct
  source 1..20: mol_type = other DNA
catagatttagcatacgagc

SEQ ID NO: 64901 - DNA, 20 bp, synthetic construct
  source 1..20: mol_type = other DNA
acatagatttagcatacgag

SEQ ID NO: 64902 - DNA, 20 bp, synthetic construct
  source 1..20: mol_type = other DNA
aacatagatttagcatacga

SEQ ID NO: 64903 - DNA, 20 bp, synthetic construct
  source 1..20: mol_type = other DNA
caacatagatttagcatacg

SEQ ID NO: 64904 - DNA, 20 bp, synthetic construct
  source 1..20: mol_type = other DNA
tcaacatagatttagcatac

SEQ ID NO: 64905 - DNA, 20 bp, synthetic construct
  source 1..20: mol_type = other DNA
ttcaacatagatttagcata

SEQ ID NO: 64906 - DNA, 20 bp, synthetic construct
  source 1..20: mol_type = other DNA
gttcaacatagatttagcat

SEQ ID NO: 64907 - DNA, 20 bp, synthetic construct
  source 1..20: mol_type = other DNA
ggttcaacatagatttagca

SEQ ID NO: 64908 - DNA, 20 bp, synthetic construct
  source 1..20: mol_type = other DNA
aggttcaacatagatttagc

SEQ ID NO: 64909 - DNA, 20 bp, synthetic construct
  source 1..20: mol_type = other DNA
aaggttcaacatagatttag

SEQ ID NO: 64910 - DNA, 20 bp, synthetic construct
  source 1..20: mol_type = other DNA
aaaggttcaacatagattta

SEQ ID NO: 64911 - DNA, 20 bp, synthetic construct
  source 1..20: mol_type = other DNA
aaaaggttcaacatagattt

SEQ ID NO: 64912 - DNA, 20 bp, synthetic construct
  source 1..20: mol_type = other DNA
taaaaggttcaacatagatt

SEQ ID NO: 64913 - DNA, 20 bp, synthetic construct
  source 1..20: mol_type = other DNA
gtaaaaggttcaacatagat

SEQ ID NO: 64914 - DNA, 20 bp, synthetic construct
  source 1..20: mol_type = other DNA
tgtaaaaggttcaacataga

SEQ ID NO: 64915 - DNA, 20 bp, synthetic construct
  source 1..20: mol_type = other DNA
atgtaaaaggttcaacatag

SEQ ID NO: 64916 - DNA, 20 bp, synthetic construct
  source 1..20: mol_type = other DNA
tatgtaaaaggttcaacata

SEQ ID NO: 64917 - DNA, 20 bp, synthetic construct
  source 1..20: mol_type = other DNA
ttatgtaaaaggttcaacat

SEQ ID NO: 64918 - DNA, 20 bp, synthetic construct
  source 1..20: mol_type = other DNA
gttatgtaaaaggttcaaca

SEQ ID NO: 64919 - DNA, 20 bp, synthetic construct
  source 1..20: mol_type = other DNA
agttatgtaaaaggttcaac

SEQ ID NO: 64920 - DNA, 20 bp, synthetic construct
  source 1..20: mol_type = other DNA
cagttatgtaaaaggttcaa

SEQ ID NO: 64921 - DNA, 20 bp, synthetic construct
  source 1..20: mol_type = other DNA
acagttatgtaaaaggttca

SEQ ID NO: 64922 - DNA, 20 bp, synthetic construct
  source 1..20: mol_type = other DNA
aacagttatgtaaaaggttc

SEQ ID NO: 64923 - DNA, 20 bp, synthetic construct
  source 1..20: mol_type = other DNA
caacagttatgtaaaaggtt

SEQ ID NO: 64924 - DNA, 20 bp, synthetic construct
  source 1..20: mol_type = other DNA
ccaacagttatgtaaaaggt

SEQ ID NO: 64925 - DNA, 20 bp, synthetic construct
  source 1..20: mol_type = other DNA
cccaacagttatgtaaaagg

SEQ ID NO: 64926 - DNA, 20 bp, synthetic construct
  source 1..20: mol_type = other DNA
gcccaacagttatgtaaaag

SEQ ID NO: 64927 - DNA, 20 bp, synthetic construct
  source 1..20: mol_type = other DNA
agcccaacagttatgtaaaa

SEQ ID NO: 64928 - DNA, 20 bp, synthetic construct
  source 1..20: mol_type = other DNA
cagcccaacagttatgtaaa

SEQ ID NO: 64929 - DNA, 20 bp, synthetic construct
  source 1..20: mol_type = other DNA
acagcccaacagttatgtaa

SEQ ID NO: 64930 - DNA, 20 bp, synthetic construct
  source 1..20: mol_type = other DNA
aacagcccaacagttatgta

SEQ ID NO: 64931 - DNA, 20 bp, synthetic construct
  source 1..20: mol_type = other DNA
aaacagcccaacagttatgt

SEQ ID NO: 64932 - DNA, 20 bp, synthetic construct
  source 1..20: mol_type = other DNA
aaaacagcccaacagttatg

SEQ ID NO: 64933 - DNA, 20 bp, synthetic construct
  source 1..20: mol_type = other DNA
caaaacagcccaacagttat

SEQ ID NO: 64934 - DNA, 20 bp, synthetic construct
  source 1..20: mol_type = other DNA
acaaaacagcccaacagtta

SEQ ID NO: 64935 - DNA, 20 bp, synthetic construct
  source 1..20: mol_type = other DNA
aacaaaacagcccaacagtt

SEQ ID NO: 64936 - DNA, 20 bp, synthetic construct
  source 1..20: mol_type = other DNA
aaacaaaacagcccaacagt

SEQ ID NO: 64937 - DNA, 20 bp, synthetic construct
  source 1..20: mol_type = other DNA
aaaacaaaacagcccaacag

SEQ ID NO: 64938 - DNA, 20 bp, synthetic construct
  source 1..20: mol_type = other DNA
gaaaacaaaacagcccaaca

SEQ ID NO: 64939 - DNA, 20 bp, synthetic construct
  source 1..20: mol_type = other DNA
agaaaacaaaacagcccaac

SEQ ID NO: 64940 - DNA, 20 bp, synthetic construct
  source 1..20: mol_type = other DNA
aagaaaacaaaacagcccaa

SEQ ID NO: 64941 - DNA, 20 bp, synthetic construct
  source 1..20: mol_type = other DNA
aaagaaaacaaaacagccca

SEQ ID NO: 64942 - DNA, 20 bp, synthetic construct
  source 1..20: mol_type = other DNA
aaaagaaaacaaaacagccc

SEQ ID NO: 64943 - DNA, 20 bp, synthetic construct
  source 1..20: mol_type = other DNA
aaaaagaaaacaaaacagcc

SEQ ID NO: 64944 - DNA, 20 bp, synthetic construct
  source 1..20: mol_type = other DNA
taaaaagaaaacaaaacagc

SEQ ID NO: 64945 - DNA, 20 bp, synthetic construct
  source 1..20: mol_type = other DNA
ataaaaagaaaacaaaacag

SEQ ID NO: 64946 - DNA, 20 bp, synthetic construct
  source 1..20: mol_type = other DNA
aataaaaagaaaacaaaaca

SEQ ID NO: 64947 - DNA, 20 bp, synthetic construct
  source 1..20: mol_type = other DNA
taataaaaagaaaacaaaac

SEQ ID NO: 64948 - DNA, 20 bp, synthetic construct
  source 1..20: mol_type = other DNA
ataataaaaagaaaacaaaa

SEQ ID NO: 64949 - DNA, 20 bp, synthetic construct
  source 1..20: mol_type = other DNA
aataataaaaagaaaacaaa

SEQ ID NO: 64950 - DNA, 20 bp, synthetic construct
  source 1..20: mol_type = other DNA
aaataataaaaagaaaacaa

SEQ ID NO: 64951 - DNA, 20 bp, synthetic construct
  source 1..20: mol_type = other DNA
aaaataataaaaagaaaaca

SEQ ID NO: 64952 - DNA, 20 bp, synthetic construct
  source 1..20: mol_type = other DNA
aaaaataataaaaagaaaac

SEQ ID NO: 64953 - DNA, 20 bp, synthetic construct
  source 1..20: mol_type = other DNA
aaaaaataataaaaagaaaa

SEQ ID NO: 64954 - DNA, 20 bp, synthetic construct
  source 1..20: mol_type = other DNA
caaaaaataataaaaagaaa

SEQ ID NO: 64955 - DNA, 20 bp, synthetic construct
  source 1..20: mol_type = other DNA
tcaaaaaataataaaaagaa

SEQ ID NO: 64956 - DNA, 20 bp, synthetic construct
  source 1..20: mol_type = other DNA
ttcaaaaaataataaaaaga

SEQ ID NO: 64957 - DNA, 20 bp, synthetic construct
  source 1..20: mol_type = other DNA
tttcaaaaaataataaaaag

SEQ ID NO: 64958 - DNA, 20 bp, synthetic construct
  source 1..20: mol_type = other DNA
ttttcaaaaaataataaaaa

SEQ ID NO: 64959 - DNA, 20 bp, synthetic construct
  source 1..20: mol_type = other DNA
attttcaaaaaataataaaa

SEQ ID NO: 64960 - DNA, 20 bp, synthetic construct
  source 1..20: mol_type = other DNA
tattttcaaaaaataataaa

SEQ ID NO: 64961 - DNA, 20 bp, synthetic construct
  source 1..20: mol_type = other DNA
ctattttcaaaaaataataa

SEQ ID NO: 64962 - DNA, 20 bp, synthetic construct
  source 1..20: mol_type = other DNA
tctattttcaaaaaataata

SEQ ID NO: 64963 - DNA, 20 bp, synthetic construct
  source 1..20: mol_type = other DNA
ctctattttcaaaaaataat

SEQ ID NO: 64964 - DNA, 20 bp, synthetic construct
  source 1..20: mol_type = other DNA
actctattttcaaaaaataa

SEQ ID NO: 64965 - DNA, 20 bp, synthetic construct
  source 1..20: mol_type = other DNA
aactctattttcaaaaaata

SEQ ID NO: 64966 - DNA, 20 bp, synthetic construct
  source 1..20: mol_type = other DNA
caactctattttcaaaaaat

SEQ ID NO: 64967 - DNA, 20 bp, synthetic construct
  source 1..20: mol_type = other DNA
ccaactctattttcaaaaaa

SEQ ID NO: 64968 - DNA, 20 bp, synthetic construct
  source 1..20: mol_type = other DNA
cccaactctattttcaaaaa

SEQ ID NO: 64969 - DNA, 20 bp, synthetic construct
  source 1..20: mol_type = other DNA
ccccaactctattttcaaaa

SEQ ID NO: 64970 - DNA, 20 bp, synthetic construct
  source 1..20: mol_type = other DNA
accccaactctattttcaaa

SEQ ID NO: 64971 - DNA, 20 bp, synthetic construct
  source 1..20: mol_type = other DNA
gaccccaactctattttcaa

SEQ ID NO: 64972 - DNA, 20 bp, synthetic construct
  source 1..20: mol_type = other DNA
agaccccaactctattttca

SEQ ID NO: 64973 - DNA, 20 bp, synthetic construct
  source 1..20: mol_type = other DNA
gagaccccaactctattttc

SEQ ID NO: 64974 - DNA, 20 bp, synthetic construct
  source 1..20: mol_type = other DNA
tgagaccccaactctatttt

SEQ ID NO: 64975 - DNA, 20 bp, synthetic construct
  source 1..20: mol_type = other DNA
gtgagaccccaactctattt

SEQ ID NO: 64976 - DNA, 20 bp, synthetic construct
  source 1..20: mol_type = other DNA
agtgagaccccaactctatt

SEQ ID NO: 64977 - DNA, 20 bp, synthetic construct
  source 1..20: mol_type = other DNA
cagtgagaccccaactctat

SEQ ID NO: 64978 - DNA, 20 bp, synthetic construct
  source 1..20: mol_type = other DNA
acagtgagaccccaactcta

SEQ ID NO: 64979 - DNA, 20 bp, synthetic construct
  source 1..20: mol_type = other DNA
aacagtgagaccccaactct

SEQ ID NO: 64980 - DNA, 20 bp, synthetic construct
  source 1..20: mol_type = other DNA
caacagtgagaccccaactc

SEQ ID NO: 64981 - DNA, 20 bp, synthetic construct
  source 1..20: mol_type = other DNA
gcaacagtgagaccccaact

SEQ ID NO: 64982 - DNA, 20 bp, synthetic construct
  source 1..20: mol_type = other DNA
tgcaacagtgagaccccaac

SEQ ID NO: 64983 - DNA, 20 bp, synthetic construct
  source 1..20: mol_type = other DNA
gtgcaacagtgagaccccaa

SEQ ID NO: 64984 - DNA, 20 bp, synthetic construct
  source 1..20: mol_type = other DNA
tgtgcaacagtgagacccca

SEQ ID NO: 64985 - DNA, 20 bp, synthetic construct
  source 1..20: mol_type = other DNA
ctgtgcaacagtgagacccc

SEQ ID NO: 64986 - DNA, 20 bp, synthetic construct
  source 1..20: mol_type = other DNA
cctgtgcaacagtgagaccc

SEQ ID NO: 64987 - DNA, 20 bp, synthetic construct
  source 1..20: mol_type = other DNA
gcctgtgcaacagtgagacc

SEQ ID NO: 64988 - DNA, 20 bp, synthetic construct
  source 1..20: mol_type = other DNA
agcctgtgcaacagtgagac

SEQ ID NO: 64989 - DNA, 20 bp, synthetic construct
  source 1..20: mol_type = other DNA
cagcctgtgcaacagtgaga

SEQ ID NO: 64990 - DNA, 20 bp, synthetic construct
  source 1..20: mol_type = other DNA
tcagcctgtgcaacagtgag

SEQ ID NO: 64991 - DNA, 20 bp, synthetic construct
  source 1..20: mol_type = other DNA
atcagcctgtgcaacagtga

SEQ ID NO: 64992 - DNA, 20 bp, synthetic construct
  source 1..20: mol_type = other DNA
aatcagcctgtgcaacagtg

SEQ ID NO: 64993 - DNA, 20 bp, synthetic construct
  source 1..20: mol_type = other DNA
aaatcagcctgtgcaacagt

SEQ ID NO: 64994 - DNA, 20 bp, synthetic construct
  source 1..20: mol_type = other DNA
gaaatcagcctgtgcaacag

SEQ ID NO: 64995 - DNA, 20 bp, synthetic construct
  source 1..20: mol_type = other DNA
ggaaatcagcctgtgcaaca

SEQ ID NO: 64996 - DNA, 20 bp, synthetic construct
  source 1..20: mol_type = other DNA
aggaaatcagcctgtgcaac

SEQ ID NO: 64997 - DNA, 20 bp, synthetic construct
  source 1..20: mol_type = other DNA
caggaaatcagcctgtgcaa

SEQ ID NO: 64998 - DNA, 20 bp, synthetic construct
  source 1..20: mol_type = other DNA
ccaggaaatcagcctgtgca

SEQ ID NO: 64999 - DNA, 20 bp, synthetic construct
  source 1..20: mol_type = other DNA
cccaggaaatcagcctgtgc

SEQ ID NO: 65000 - DNA, 20 bp, synthetic construct
  source 1..20: mol_type = other DNA
gcccaggaaatcagcctgtg

SEQ ID NO: 65001 - DNA, 20 bp, synthetic construct
  source 1..20: mol_type = other DNA
tgcccaggaaatcagcctgt

SEQ ID NO: 65002 - DNA, 20 bp, synthetic construct
  source 1..20: mol_type = other DNA
atgcccaggaaatcagcctg

SEQ ID NO: 65003 - DNA, 20 bp, synthetic construct
  source 1..20: mol_type = other DNA
tatgcccaggaaatcagcct

SEQ ID NO: 65004 - DNA, 20 bp, synthetic construct
  source 1..20: mol_type = other DNA
ctatgcccaggaaatcagcc

SEQ ID NO: 65005 - DNA, 20 bp, synthetic construct
  source 1..20: mol_type = other DNA
actatgcccaggaaatcagc

SEQ ID NO: 65006 - DNA, 20 bp, synthetic construct
  source 1..20: mol_type = other DNA
cactatgcccaggaaatcag

SEQ ID NO: 65007 - DNA, 20 bp, synthetic construct
  source 1..20: mol_type = other DNA
ccactatgcccaggaaatca

SEQ ID NO: 65008 - DNA, 20 bp, synthetic construct
  source 1..20: mol_type = other DNA
gccactatgcccaggaaatc

SEQ ID NO: 65009 - DNA, 20 bp, synthetic construct
  source 1..20: mol_type = other DNA
agccactatgcccaggaaat

SEQ ID NO: 65010 - DNA, 20 bp, synthetic construct
  source 1..20: mol_type = other DNA
cagccactatgcccaggaaa

SEQ ID NO: 65011 - DNA, 20 bp, synthetic construct
  source 1..20: mol_type = other DNA
acagccactatgcccaggaa

SEQ ID NO: 65012 - DNA, 20 bp, synthetic construct
  source 1..20: mol_type = other DNA
tacagccactatgcccagga

SEQ ID NO: 65013 - DNA, 20 bp, synthetic construct
  source 1..20: mol_type = other DNA
atacagccactatgcccagg

SEQ ID NO: 65014 - DNA, 20 bp, synthetic construct
  source 1..20: mol_type = other DNA
gatacagccactatgcccag

SEQ ID NO: 65015 - DNA, 20 bp, synthetic construct
  source 1..20: mol_type = other DNA
tgatacagccactatgccca

SEQ ID NO: 65016 - DNA, 20 bp, synthetic construct
  source 1..20: mol_type = other DNA
atgatacagccactatgccc

SEQ ID NO: 65017 - DNA, 20 bp, synthetic construct
  source 1..20: mol_type = other DNA
aatgatacagccactatgcc

SEQ ID NO: 65018 - DNA, 20 bp, synthetic construct
  source 1..20: mol_type = other DNA
aaatgatacagccactatgc

SEQ ID NO: 65019 - DNA, 20 bp, synthetic construct
  source 1..20: mol_type = other DNA
aaaatgatacagccactatg

SEQ ID NO: 65020 - DNA, 20 bp, synthetic construct
  source 1..20: mol_type = other DNA
taaaatgatacagccactat

SEQ ID NO: 65021 - DNA, 20 bp, synthetic construct
  source 1..20: mol_type = other DNA
gtaaaatgatacagccacta

SEQ ID NO: 65022 - DNA, 20 bp, synthetic construct
  source 1..20: mol_type = other DNA
tgtaaaatgatacagccact

SEQ ID NO: 65023 - DNA, 20 bp, synthetic construct
  source 1..20: mol_type = other DNA
ttgtaaaatgatacagccac

SEQ ID NO: 65024 - DNA, 20 bp, synthetic construct
  source 1..20: mol_type = other DNA
attgtaaaatgatacagcca

SEQ ID NO: 65025 - DNA, 20 bp, synthetic construct
  source 1..20: mol_type = other DNA
gattgtaaaatgatacagcc

SEQ ID NO: 65026 - DNA, 20 bp, synthetic construct
  source 1..20: mol_type = other DNA
ggattgtaaaatgatacagc

SEQ ID NO: 65027 - DNA, 20 bp, synthetic construct
  source 1..20: mol_type = other DNA
aggattgtaaaatgatacag

SEQ ID NO: 65028 - DNA, 20 bp, synthetic construct
  source 1..20: mol_type = other DNA
taggattgtaaaatgataca

SEQ ID NO: 65029 - DNA, 20 bp, synthetic construct
  source 1..20: mol_type = other DNA
gtaggattgtaaaatgatac

SEQ ID NO: 65030 - DNA, 20 bp, synthetic construct
  source 1..20: mol_type = other DNA
tgtaggattgtaaaatgata

SEQ ID NO: 65031 - DNA, 20 bp, synthetic construct
  source 1..20: mol_type = other DNA
atgtaggattgtaaaatgat

SEQ ID NO: 65032 - DNA, 20 bp, synthetic construct
  source 1..20: mol_type = other DNA
tatgtaggattgtaaaatga

SEQ ID NO: 65033 - DNA, 20 bp, synthetic construct
  source 1..20: mol_type = other DNA
ctatgtaggattgtaaaatg

SEQ ID NO: 65034 - DNA, 20 bp, synthetic construct
  source 1..20: mol_type = other DNA
gctatgtaggattgtaaaat

SEQ ID NO: 65035 - DNA, 20 bp, synthetic construct
  source 1..20: mol_type = other DNA
agctatgtaggattgtaaaa

SEQ ID NO: 65036 - DNA, 20 bp, synthetic construct
  source 1..20: mol_type = other DNA
cagctatgtaggattgtaaa

SEQ ID NO: 65037 - DNA, 20 bp, synthetic construct
  source 1..20: mol_type = other DNA
acagctatgtaggattgtaa

SEQ ID NO: 65038 - DNA, 20 bp, synthetic construct
  source 1..20: mol_type = other DNA
aacagctatgtaggattgta

SEQ ID NO: 65039 - DNA, 20 bp, synthetic construct
  source 1..20: mol_type = other DNA
aaacagctatgtaggattgt

SEQ ID NO: 65040 - DNA, 20 bp, synthetic construct
  source 1..20: mol_type = other DNA
gaaacagctatgtaggattg

SEQ ID NO: 65041 - DNA, 20 bp, synthetic construct
  source 1..20: mol_type = other DNA
ggaaacagctatgtaggatt

SEQ ID NO: 65042 - DNA, 20 bp, synthetic construct
  source 1..20: mol_type = other DNA
tggaaacagctatgtaggat

SEQ ID NO: 65043 - DNA, 20 bp, synthetic construct
  source 1..20: mol_type = other DNA
ttggaaacagctatgtagga

SEQ ID NO: 65044 - DNA, 20 bp, synthetic construct
  source 1..20: mol_type = other DNA
gttggaaacagctatgtagg

SEQ ID NO: 65045 - DNA, 20 bp, synthetic construct
  source 1..20: mol_type = other DNA
cgttggaaacagctatgtag

SEQ ID NO: 65046 - DNA, 20 bp, synthetic construct
  source 1..20: mol_type = other DNA
acgttggaaacagctatgta

SEQ ID NO: 65047 - DNA, 20 bp, synthetic construct
  source 1..20: mol_type = other DNA
tacgttggaaacagctatgt

SEQ ID NO: 65048 - DNA, 20 bp, synthetic construct
  source 1..20: mol_type = other DNA
ctacgttggaaacagctatg

SEQ ID NO: 65049 - DNA, 20 bp, synthetic construct
  source 1..20: mol_type = other DNA
gctacgttggaaacagctat

SEQ ID NO: 65050 - DNA, 20 bp, synthetic construct
  source 1..20: mol_type = other DNA
agctacgttggaaacagcta

SEQ ID NO: 65051 - DNA, 20 bp, synthetic construct
  source 1..20: mol_type = other DNA
cagctacgttggaaacagct

SEQ ID NO: 65052 - DNA, 20 bp, synthetic construct
  source 1..20: mol_type = other DNA
acagctacgttggaaacagc

SEQ ID NO: 65053 - DNA, 20 bp, synthetic construct
  source 1..20: mol_type = other DNA
tacagctacgttggaaacag

SEQ ID NO: 65054 - DNA, 20 bp, synthetic construct
  source 1..20: mol_type = other DNA
atacagctacgttggaaaca

SEQ ID NO: 65055 - DNA, 20 bp, synthetic construct
  source 1..20: mol_type = other DNA
gatacagctacgttggaaac

SEQ ID NO: 65056 - DNA, 20 bp, synthetic construct
  source 1..20: mol_type = other DNA
tgatacagctacgttggaaa

SEQ ID NO: 65057 - DNA, 20 bp, synthetic construct
  source 1..20: mol_type = other DNA
atgatacagctacgttggaa

SEQ ID NO: 65058 - DNA, 20 bp, synthetic construct
  source 1..20: mol_type = other DNA
aatgatacagctacgttgga

SEQ ID NO: 65059 - DNA, 20 bp, synthetic construct
  source 1..20: mol_type = other DNA
aaatgatacagctacgttgg

SEQ ID NO: 65060 - DNA, 20 bp, synthetic construct
  source 1..20: mol_type = other DNA
aaaatgatacagctacgttg

SEQ ID NO: 65061 - DNA, 20 bp, synthetic construct
  source 1..20: mol_type = other DNA
taaaatgatacagctacgtt

SEQ ID NO: 65062 - DNA, 20 bp, synthetic construct
  source 1..20: mol_type = other DNA
gtaaaatgatacagctacgt

SEQ ID NO: 65063 - DNA, 20 bp, synthetic construct
  source 1..20: mol_type = other DNA
tgtaaaatgatacagctacg

SEQ ID NO: 65064 - DNA, 20 bp, synthetic construct
  source 1..20: mol_type = other DNA
ttgtaaaatgatacagctac

SEQ ID NO: 65065 - DNA, 20 bp, synthetic construct
  source 1..20: mol_type = other DNA
attgtaaaatgatacagcta

SEQ ID NO: 65066 - DNA, 20 bp, synthetic construct
  source 1..20: mol_type = other DNA
gattgtaaaatgatacagct

SEQ ID NO: 65067 - DNA, 20 bp, synthetic construct
  source 1..20: mol_type = other DNA
ggattgtaaaatgatacagc

SEQ ID NO: 65068 - DNA, 20 bp, synthetic construct
  source 1..20: mol_type = other DNA
aggattgtaaaatgatacag

SEQ ID NO: 65069 - DNA, 20 bp, synthetic construct
  source 1..20: mol_type = other DNA
taggattgtaaaatgataca

SEQ ID NO: 65070 - DNA, 20 bp, synthetic construct
  source 1..20: mol_type = other DNA
gtaggattgtaaaatgatac

SEQ ID NO: 65071 - DNA, 20 bp, synthetic construct
  source 1..20: mol_type = other DNA
agtaggattgtaaaatgata

SEQ ID NO: 65072 - DNA, 20 bp, synthetic construct
  source 1..20: mol_type = other DNA
tagtaggattgtaaaatgat

SEQ ID NO: 65073 - DNA, 20 bp, synthetic construct
  source 1..20: mol_type = other DNA
ctagtaggattgtaaaatga

SEQ ID NO: 65074 - DNA, 20 bp, synthetic construct
  source 1..20: mol_type = other DNA
gctagtaggattgtaaaatg

SEQ ID NO: 65075 - DNA, 20 bp, synthetic construct
  source 1..20: mol_type = other DNA
tgctagtaggattgtaaaat

SEQ ID NO: 65076 - DNA, 20 bp, synthetic construct
  source 1..20: mol_type = other DNA
ctgctagtaggattgtaaaa

SEQ ID NO: 65077 - DNA, 20 bp, synthetic construct
  source 1..20: mol_type = other DNA
actgctagtaggattgtaaa

SEQ ID NO: 65078 - DNA, 20 bp, synthetic construct
  source 1..20: mol_type = other DNA
cactgctagtaggattgtaa

SEQ ID NO: 65079 - DNA, 20 bp, synthetic construct
  source 1..20: mol_type = other DNA
acactgctagtaggattgta

SEQ ID NO: 65080 - DNA, 20 bp, synthetic construct
  source 1..20: mol_type = other DNA
gacactgctagtaggattgt

SEQ ID NO: 65081 - DNA, 20 bp, synthetic construct
  source 1..20: mol_type = other DNA
agacactgctagtaggattg

SEQ ID NO: 65082 - DNA, 20 bp, synthetic construct
  source 1..20: mol_type = other DNA
cagacactgctagtaggatt

SEQ ID NO: 65083 - DNA, 20 bp, synthetic construct
  source 1..20: mol_type = other DNA
tcagacactgctagtaggat

SEQ ID NO: 65084 - DNA, 20 bp, synthetic construct
  source 1..20: mol_type = other DNA
ctcagacactgctagtagga

SEQ ID NO: 65085 - DNA, 20 bp, synthetic construct
  source 1..20: mol_type = other DNA
cctcagacactgctagtagg

SEQ ID NO: 65086 - DNA, 20 bp, synthetic construct
  source 1..20: mol_type = other DNA
acctcagacactgctagtag

SEQ ID NO: 65087 - DNA, 20 bp, synthetic construct
  source 1..20: mol_type = other DNA
aacctcagacactgctagta

SEQ ID NO: 65088 - DNA, 20 bp, synthetic construct
  source 1..20: mol_type = other DNA
aaacctcagacactgctagt

SEQ ID NO: 65089 - DNA, 20 bp, synthetic construct
  source 1..20: mol_type = other DNA
gaaacctcagacactgctag

SEQ ID NO: 65090 - DNA, 20 bp, synthetic construct
  source 1..20: mol_type = other DNA
agaaacctcagacactgcta

SEQ ID NO: 65091 - DNA, 20 bp, synthetic construct
  source 1..20: mol_type = other DNA
aagaaacctcagacactgct

SEQ ID NO: 65092 - DNA, 20 bp, synthetic construct
  source 1..20: mol_type = other DNA
taagaaacctcagacactgc

SEQ ID NO: 65093 - DNA, 20 bp, synthetic construct
  source 1..20: mol_type = other DNA
ataagaaacctcagacactg

SEQ ID NO: 65094 - DNA, 20 bp, synthetic construct
  source 1..20: mol_type = other DNA
cataagaaacctcagacact

SEQ ID NO: 65095 - DNA, 20 bp, synthetic construct
  source 1..20: mol_type = other DNA
acataagaaacctcagacac

SEQ ID NO: 65096 - DNA, 20 bp, synthetic construct
  source 1..20: mol_type = other DNA
aacataagaaacctcagaca

SEQ ID NO: 65097 - DNA, 20 bp, synthetic construct
  source 1..20: mol_type = other DNA
aaacataagaaacctcagac

SEQ ID NO: 65098 - DNA, 20 bp, synthetic construct
  source 1..20: mol_type = other DNA
aaaacataagaaacctcaga

SEQ ID NO: 65099 - DNA, 20 bp, synthetic construct
  source 1..20: mol_type = other DNA
aaaaacataagaaacctcag

SEQ ID NO: 65100 - DNA, 20 bp, synthetic construct
  source 1..20: mol_type = other DNA
gaaaaacataagaaacctca

SEQ ID NO: 65101 - DNA, 20 bp, synthetic construct
  source 1..20: mol_type = other DNA
tgaaaaacataagaaacctc

SEQ ID NO: 65102 - DNA, 20 bp, synthetic construct
  source 1..20: mol_type = other DNA
gtgaaaaacataagaaacct

SEQ ID NO: 65103 - DNA, 20 bp, synthetic construct
  source 1..20: mol_type = other DNA
tgtgaaaaacataagaaacc

SEQ ID NO: 65104 - DNA, 20 bp, synthetic construct
  source 1..20: mol_type = other DNA
atgtgaaaaacataagaaac

SEQ ID NO: 65105 - DNA, 20 bp, synthetic construct
  source 1..20: mol_type = other DNA
gatgtgaaaaacataagaaa

SEQ ID NO: 65106 - DNA, 20 bp, synthetic construct
  source 1..20: mol_type = other DNA
ggatgtgaaaaacataagaa

SEQ ID NO: 65107 - DNA, 20 bp, synthetic construct
  source 1..20: mol_type = other DNA
aggatgtgaaaaacataaga

SEQ ID NO: 65108 - DNA, 20 bp, synthetic construct
  source 1..20: mol_type = other DNA
gaggatgtgaaaaacataag

SEQ ID NO: 65109 - DNA, 20 bp, synthetic construct
  source 1..20: mol_type = other DNA
tgaggatgtgaaaaacataa

SEQ ID NO: 65110 - DNA, 20 bp, synthetic construct
  source 1..20: mol_type = other DNA
gtgaggatgtgaaaaacata

SEQ ID NO: 65111 - DNA, 20 bp, synthetic construct
  source 1..20: mol_type = other DNA
ggtgaggatgtgaaaaacat

SEQ ID NO: 65112 - DNA, 20 bp, synthetic construct
  source 1..20: mol_type = other DNA
tggtgaggatgtgaaaaaca

SEQ ID NO: 65113 - DNA, 20 bp, synthetic construct
  source 1..20: mol_type = other DNA
ctggtgaggatgtgaaaaac

SEQ ID NO: 65114 - DNA, 20 bp, synthetic construct
  source 1..20: mol_type = other DNA
gctggtgaggatgtgaaaaa

SEQ ID NO: 65115 - DNA, 20 bp, synthetic construct
  source 1..20: mol_type = other DNA
tgctggtgaggatgtgaaaa

SEQ ID NO: 65116 - DNA, 20 bp, synthetic construct
  source 1..20: mol_type = other DNA
atgctggtgaggatgtgaaa

SEQ ID NO: 65117 - DNA, 20 bp, synthetic construct
  source 1..20: mol_type = other DNA
aatgctggtgaggatgtgaa

SEQ ID NO: 65118 - DNA, 20 bp, synthetic construct
  source 1..20: mol_type = other DNA
aaatgctggtgaggatgtga

SEQ ID NO: 65119 - DNA, 20 bp, synthetic construct
  source 1..20: mol_type = other DNA
caaatgctggtgaggatgtg

SEQ ID NO: 65120 - DNA, 20 bp, synthetic construct
  source 1..20: mol_type = other DNA
acaaatgctggtgaggatgt

SEQ ID NO: 65121 - DNA, 20 bp, synthetic construct
  source 1..20: mol_type = other DNA
aacaaatgctggtgaggatg

SEQ ID NO: 65122 - DNA, 20 bp, synthetic construct
  source 1..20: mol_type = other DNA
taacaaatgctggtgaggat

SEQ ID NO: 65123 - DNA, 20 bp, synthetic construct
  source 1..20: mol_type = other DNA
ataacaaatgctggtgagga

SEQ ID NO: 65124 - DNA, 20 bp, synthetic construct
  source 1..20: mol_type = other DNA
aataacaaatgctggtgagg

SEQ ID NO: 65125 - DNA, 20 bp, synthetic construct
  source 1..20: mol_type = other DNA
caataacaaatgctggtgag

SEQ ID NO: 65126 - DNA, 20 bp, synthetic construct
  source 1..20: mol_type = other DNA
acaataacaaatgctggtga

SEQ ID NO: 65127 - DNA, 20 bp, synthetic construct
  source 1..20: mol_type = other DNA
gacaataacaaatgctggtg

SEQ ID NO: 65128 - DNA, 20 bp, synthetic construct
  source 1..20: mol_type = other DNA
agacaataacaaatgctggt

SEQ ID NO: 65129 - DNA, 20 bp, synthetic construct
  source 1..20: mol_type = other DNA
cagacaataacaaatgctgg

SEQ ID NO: 65130 - DNA, 20 bp, synthetic construct
  source 1..20: mol_type = other DNA
acagacaataacaaatgctg

SEQ ID NO: 65131 - DNA, 20 bp, synthetic construct
  source 1..20: mol_type = other DNA
gacagacaataacaaatgct

SEQ ID NO: 65132 - DNA, 20 bp, synthetic construct
  source 1..20: mol_type = other DNA
agacagacaataacaaatgc

SEQ ID NO: 65133 - DNA, 20 bp, synthetic construct
  source 1..20: mol_type = other DNA
gagacagacaataacaaatg

SEQ ID NO: 65134 - DNA, 20 bp, synthetic construct
  source 1..20: mol_type = other DNA
agagacagacaataacaaat

SEQ ID NO: 65135 - DNA, 20 bp, synthetic construct
  source 1..20: mol_type = other DNA
aagagacagacaataacaaa

SEQ ID NO: 65136 - DNA, 20 bp, synthetic construct
  source 1..20: mol_type = other DNA
aaagagacagacaataacaa

SEQ ID NO: 65137 - DNA, 20 bp, synthetic construct
  source 1..20: mol_type = other DNA
caaagagacagacaataaca

SEQ ID NO: 65138 - DNA, 20 bp, synthetic construct
  source 1..20: mol_type = other DNA
tcaaagagacagacaataac

SEQ ID NO: 65139 - DNA, 20 bp, synthetic construct
  source 1..20: mol_type = other DNA
atcaaagagacagacaataa

SEQ ID NO: 65140 - DNA, 20 bp, synthetic construct
  source 1..20: mol_type = other DNA
aatcaaagagacagacaata

SEQ ID NO: 65141 - DNA, 20 bp, synthetic construct
  source 1..20: mol_type = other DNA
taatcaaagagacagacaat

SEQ ID NO: 65142 - DNA, 20 bp, synthetic construct
  source 1..20: mol_type = other DNA
ataatcaaagagacagacaa

SEQ ID NO: 65143 - DNA, 20 bp, synthetic construct
  source 1..20: mol_type = other DNA
tataatcaaagagacagaca

SEQ ID NO: 65144 - DNA, 20 bp, synthetic construct
  source 1..20: mol_type = other DNA
gtataatcaaagagacagac

SEQ ID NO: 65145 - DNA, 20 bp, synthetic construct
  source 1..20: mol_type = other DNA
ggtataatcaaagagacaga

SEQ ID NO: 65146 - DNA, 20 bp, synthetic construct
  source 1..20: mol_type = other DNA
gggtataatcaaagagacag

SEQ ID NO: 65147 - DNA, 20 bp, synthetic construct
  source 1..20: mol_type = other DNA
tgggtataatcaaagagaca

SEQ ID NO: 65148 - DNA, 20 bp, synthetic construct
  source 1..20: mol_type = other DNA
atgggtataatcaaagagac

SEQ ID NO: 65149 - DNA, 20 bp, synthetic construct
  source 1..20: mol_type = other DNA
gatgggtataatcaaagaga

SEQ ID NO: 65150 - DNA, 20 bp, synthetic construct
  source 1..20: mol_type = other DNA
ggatgggtataatcaaagag

SEQ ID NO: 65151 - DNA, 20 bp, synthetic construct
  source 1..20: mol_type = other DNA
aggatgggtataatcaaaga

SEQ ID NO: 65152 - DNA, 20 bp, synthetic construct
  source 1..20: mol_type = other DNA
taggatgggtataatcaaag

SEQ ID NO: 65153 - DNA, 20 bp, synthetic construct
  source 1..20: mol_type = other DNA
ctaggatgggtataatcaaa

SEQ ID NO: 65154 - DNA, 20 bp, synthetic construct
  source 1..20: mol_type = other DNA
actaggatgggtataatcaa

SEQ ID NO: 65155 - DNA, 20 bp, synthetic construct
  source 1..20: mol_type = other DNA
cactaggatgggtataatca

SEQ ID NO: 65156 - DNA, 20 bp, synthetic construct
  source 1..20: mol_type = other DNA
ccactaggatgggtataatc

SEQ ID NO: 65157 - DNA, 20 bp, synthetic construct
  source 1..20: mol_type = other DNA
cccactaggatgggtataat

SEQ ID NO: 65158 - DNA, 20 bp, synthetic construct
  source 1..20: mol_type = other DNA
tcccactaggatgggtataa

SEQ ID NO: 65159 - DNA, 20 bp, synthetic construct
  source 1..20: mol_type = other DNA
ctcccactaggatgggtata

SEQ ID NO: 65160 - DNA, 20 bp, synthetic construct
  source 1..20: mol_type = other DNA
tctcccactaggatgggtat

SEQ ID NO: 65161 - DNA, 20 bp, synthetic construct
  source 1..20: mol_type = other DNA
ctctcccactaggatgggta

SEQ ID NO: 65162 - DNA, 20 bp, synthetic construct
  source 1..20: mol_type = other DNA
actctcccactaggatgggt

SEQ ID NO: 65163 - DNA, 20 bp, synthetic construct
  source 1..20: mol_type = other DNA
tactctcccactaggatggg

SEQ ID NO: 65164 - DNA, 20 bp, synthetic construct
  source 1..20: mol_type = other DNA
ttactctcccactaggatgg

SEQ ID NO: 65165 - DNA, 20 bp, synthetic construct
  source 1..20: mol_type = other DNA
cttactctcccactaggatg

SEQ ID NO: 65166 - DNA, 20 bp, synthetic construct
  source 1..20: mol_type = other DNA
tcttactctcccactaggat

SEQ ID NO: 65167 - DNA, 20 bp, synthetic construct
  source 1..20: mol_type = other DNA
ttcttactctcccactagga

SEQ ID NO: 65168 - DNA, 20 bp, synthetic construct
  source 1..20: mol_type = other DNA
cttcttactctcccactagg

SEQ ID NO: 65169 - DNA, 20 bp, synthetic construct
  source 1..20: mol_type = other DNA
acttcttactctcccactag

SEQ ID NO: 65170 - DNA, 20 bp, synthetic construct
  source 1..20: mol_type = other DNA
tacttcttactctcccacta

SEQ ID NO: 65171 - DNA, 20 bp, synthetic construct
  source 1..20: mol_type = other DNA
ctacttcttactctcccact

SEQ ID NO: 65172 - DNA, 20 bp, synthetic construct
  source 1..20: mol_type = other DNA
actacttcttactctcccac

SEQ ID NO: 65173 - DNA, 20 bp, synthetic construct
  source 1..20: mol_type = other DNA
tactacttcttactctccca

SEQ ID NO: 65174 - DNA, 20 bp, synthetic construct
  source 1..20: mol_type = other DNA
atactacttcttactctccc

SEQ ID NO: 65175 - DNA, 20 bp, synthetic construct
  source 1..20: mol_type = other DNA
gatactacttcttactctcc

SEQ ID NO: 65176 - DNA, 20 bp, synthetic construct
  source 1..20: mol_type = other DNA
agatactacttcttactctc

SEQ ID NO: 65177 - DNA, 20 bp, synthetic construct
  source 1..20: mol_type = other DNA
gagatactacttcttactct

SEQ ID NO: 65178 - DNA, 20 bp, synthetic construct
  source 1..20: mol_type = other DNA
tgagatactacttcttactc

SEQ ID NO: 65179 - DNA, 20 bp, synthetic construct
  source 1..20: mol_type = other DNA
gtgagatactacttcttact

SEQ ID NO: 65180 - DNA, 20 bp, synthetic construct
  source 1..20: mol_type = other DNA
agtgagatactacttcttac

SEQ ID NO: 65181 - DNA, 20 bp, synthetic construct
  source 1..20: mol_type = other DNA
cagtgagatactacttctta

SEQ ID NO: 65182 - DNA, 20 bp, synthetic construct
  source 1..20: mol_type = other DNA
acagtgagatactacttctt

SEQ ID NO: 65183 - DNA, 20 bp, synthetic construct
  source 1..20: mol_type = other DNA
tacagtgagatactacttct

SEQ ID NO: 65184 - DNA, 20 bp, synthetic construct
  source 1..20: mol_type = other DNA
ctacagtgagatactacttc

SEQ ID NO: 65185 - DNA, 20 bp, synthetic construct
  source 1..20: mol_type = other DNA
tctacagtgagatactactt

SEQ ID NO: 65186 - DNA, 20 bp, synthetic construct
  source 1..20: mol_type = other DNA
atctacagtgagatactact

SEQ ID NO: 65187 - DNA, 20 bp, synthetic construct
  source 1..20: mol_type = other DNA
aatctacagtgagatactac

SEQ ID NO: 65188 - DNA, 20 bp, synthetic construct
  source 1..20: mol_type = other DNA
aaatctacagtgagatacta

SEQ ID NO: 65189 - DNA, 20 bp, synthetic construct
  source 1..20: mol_type = other DNA
aaaatctacagtgagatact

SEQ ID NO: 65190 - DNA, 20 bp, synthetic construct
  source 1..20: mol_type = other DNA
aaaaatctacagtgagatac

SEQ ID NO: 65191 - DNA, 20 bp, synthetic construct
  source 1..20: mol_type = other DNA
aaaaaatctacagtgagata

SEQ ID NO: 65192 - DNA, 20 bp, synthetic construct
  source 1..20: mol_type = other DNA
aaaaaaatctacagtgagat

SEQ ID NO: 65193 - DNA, 20 bp, synthetic construct
  source 1..20: mol_type = other DNA
aaaaaaaatctacagtgaga

SEQ ID NO: 65194 - DNA, 20 bp, synthetic construct
  source 1..20: mol_type = other DNA
aaaaaaaaatctacagtgag

SEQ ID NO: 65195 - DNA, 20 bp, synthetic construct
  source 1..20: mol_type = other DNA
aaaaaaaaaatctacagtga

SEQ ID NO: 65196 - DNA, 20 bp, synthetic construct
  source 1..20: mol_type = other DNA
gaaaaaaaaaatctacagtg

SEQ ID NO: 65197 - DNA, 20 bp, synthetic construct
  source 1..20: mol_type = other DNA
agaaaaaaaaaatctacagt

SEQ ID NO: 65198 - DNA, 20 bp, synthetic construct
  source 1..20: mol_type = other DNA
cagaaaaaaaaaatctacag

SEQ ID NO: 65199 - DNA, 20 bp, synthetic construct
  source 1..20: mol_type = other DNA
acagaaaaaaaaaatctaca

SEQ ID NO: 65200 - DNA, 20 bp, synthetic construct
  source 1..20: mol_type = other DNA
aacagaaaaaaaaaatctac

SEQ ID NO: 65201 - DNA, 20 bp, synthetic construct
  source 1..20: mol_type = other DNA
aaacagaaaaaaaaaatcta

SEQ ID NO: 65202 - DNA, 20 bp, synthetic construct
  source 1..20: mol_type = other DNA
taaacagaaaaaaaaaatct

SEQ ID NO: 65203 - DNA, 20 bp, synthetic construct
  source 1..20: mol_type = other DNA
gtaaacagaaaaaaaaaatc

SEQ ID NO: 65204 - DNA, 20 bp, synthetic construct
  source 1..20: mol_type = other DNA
tgtaaacagaaaaaaaaaat

SEQ ID NO: 65205 - DNA, 20 bp, synthetic construct
  source 1..20: mol_type = other DNA
ttgtaaacagaaaaaaaaaa

SEQ ID NO: 65206 - DNA, 20 bp, synthetic construct
  source 1..20: mol_type = other DNA
gttgtaaacagaaaaaaaaa

SEQ ID NO: 65207 - DNA, 20 bp, synthetic construct
  source 1..20: mol_type = other DNA
agttgtaaacagaaaaaaaa

SEQ ID NO: 65208 - DNA, 20 bp, synthetic construct
  source 1..20: mol_type = other DNA
aagttgtaaacagaaaaaaa

SEQ ID NO: 65209 - DNA, 20 bp, synthetic construct
  source 1..20: mol_type = other DNA
aaagttgtaaacagaaaaaa

SEQ ID NO: 65210 - DNA, 20 bp, synthetic construct
  source 1..20: mol_type = other DNA
taaagttgtaaacagaaaaa

SEQ ID NO: 65211 - DNA, 20 bp, synthetic construct
  source 1..20: mol_type = other DNA
gtaaagttgtaaacagaaaa

SEQ ID NO: 65212 - DNA, 20 bp, synthetic construct
  source 1..20: mol_type = other DNA
agtaaagttgtaaacagaaa

SEQ ID NO: 65213 - DNA, 20 bp, synthetic construct
  source 1..20: mol_type = other DNA
aagtaaagttgtaaacagaa

SEQ ID NO: 65214 - DNA, 20 bp, synthetic construct
  source 1..20: mol_type = other DNA
aaagtaaagttgtaaacaga

SEQ ID NO: 65215 - DNA, 20 bp, synthetic construct
  source 1..20: mol_type = other DNA
taaagtaaagttgtaaacag

SEQ ID NO: 65216 - DNA, 20 bp, synthetic construct
  source 1..20: mol_type = other DNA
ttaaagtaaagttgtaaaca

SEQ ID NO: 65217 - DNA, 20 bp, synthetic construct
  source 1..20: mol_type = other DNA
tttaaagtaaagttgtaaac

SEQ ID NO: 65218 - DNA, 20 bp, synthetic construct
  source 1..20: mol_type = other DNA
ttttaaagtaaagttgtaaa

SEQ ID NO: 65219 - DNA, 20 bp, synthetic construct
  source 1..20: mol_type = other DNA
tttttaaagtaaagttgtaa

SEQ ID NO: 65220 - DNA, 20 bp, synthetic construct
  source 1..20: mol_type = other DNA
atttttaaagtaaagttgta

SEQ ID NO: 65221 - DNA, 20 bp, synthetic construct
  source 1..20: mol_type = other DNA
aatttttaaagtaaagttgt

SEQ ID NO: 65222 - DNA, 20 bp, synthetic construct
  source 1..20: mol_type = other DNA
taatttttaaagtaaagttg

SEQ ID NO: 65223 - DNA, 20 bp, synthetic construct
  source 1..20: mol_type = other DNA
ataatttttaaagtaaagtt

SEQ ID NO: 65224 - DNA, 20 bp, synthetic construct
  source 1..20: mol_type = other DNA
tataatttttaaagtaaagt

SEQ ID NO: 65225 - DNA, 20 bp, synthetic construct
  source 1..20: mol_type = other DNA
atataatttttaaagtaaag

SEQ ID NO: 65226 - DNA, 20 bp, synthetic construct
  source 1..20: mol_type = other DNA
tatataatttttaaagtaaa

SEQ ID NO: 65227 - DNA, 20 bp, synthetic construct
  source 1..20: mol_type = other DNA
atatataatttttaaagtaa

SEQ ID NO: 65228 - DNA, 20 bp, synthetic construct
  source 1..20: mol_type = other DNA
catatataatttttaaagta

SEQ ID NO: 65229 - DNA, 20 bp, synthetic construct
  source 1..20: mol_type = other DNA
gcatatataatttttaaagt

SEQ ID NO: 65230 - DNA, 20 bp, synthetic construct
  source 1..20: mol_type = other DNA
tgcatatataatttttaaag

SEQ ID NO: 65231 - DNA, 20 bp, synthetic construct
  source 1..20: mol_type = other DNA
gtgcatatataatttttaaa

SEQ ID NO: 65232 - DNA, 20 bp, synthetic construct
  source 1..20: mol_type = other DNA
tgtgcatatataatttttaa

SEQ ID NO: 65233 - DNA, 20 bp, synthetic construct
  source 1..20: mol_type = other DNA
gtgtgcatatataattttta

SEQ ID NO: 65234 - DNA, 20 bp, synthetic construct
  source 1..20: mol_type = other DNA
tgtgtgcatatataattttt

SEQ ID NO: 65235 - DNA, 20 bp, synthetic construct
  source 1..20: mol_type = other DNA
atgtgtgcatatataatttt

SEQ ID NO: 65236 - DNA, 20 bp, synthetic construct
  source 1..20: mol_type = other DNA
catgtgtgcatatataattt

SEQ ID NO: 65237 - DNA, 20 bp, synthetic construct
  source 1..20: mol_type = other DNA
ccatgtgtgcatatataatt

SEQ ID NO: 65238 - DNA, 20 bp, synthetic construct
  source 1..20: mol_type = other DNA
accatgtgtgcatatataat

SEQ ID NO: 65239 - DNA, 20 bp, synthetic construct
  source 1..20: mol_type = other DNA
taccatgtgtgcatatataa

SEQ ID NO: 65240 - DNA, 20 bp, synthetic construct
  source 1..20: mol_type = other DNA
ttaccatgtgtgcatatata

SEQ ID NO: 65241 - DNA, 20 bp, synthetic construct
  source 1..20: mol_type = other DNA
tttaccatgtgtgcatatat

SEQ ID NO: 65242 - DNA, 20 bp, synthetic construct
  source 1..20: mol_type = other DNA
ttttaccatgtgtgcatata

SEQ ID NO: 65243 - DNA, 20 bp, synthetic construct
  source 1..20: mol_type = other DNA
tttttaccatgtgtgcatat

SEQ ID NO: 65244 - DNA, 20 bp, synthetic construct
  source 1..20: mol_type = other DNA
ctttttaccatgtgtgcata

SEQ ID NO: 65245 - DNA, 20 bp, synthetic construct
  source 1..20: mol_type = other DNA
actttttaccatgtgtgcat

SEQ ID NO: 65246 - DNA, 20 bp, synthetic construct
  source 1..20: mol_type = other DNA
aactttttaccatgtgtgca

SEQ ID NO: 65247 - DNA, 20 bp, synthetic construct
  source 1..20: mol_type = other DNA
gaactttttaccatgtgtgc

SEQ ID NO: 65248 - DNA, 20 bp, synthetic construct
  source 1..20: mol_type = other DNA
tgaactttttaccatgtgtg

SEQ ID NO: 65249 - DNA, 20 bp, synthetic construct
  source 1..20: mol_type = other DNA
ttgaactttttaccatgtgt

SEQ ID NO: 65250 - DNA, 20 bp, synthetic construct
  source 1..20: mol_type = other DNA
tttgaactttttaccatgtg

SEQ ID NO: 65251 - DNA, 20 bp, synthetic construct
  source 1..20: mol_type = other DNA
ttttgaactttttaccatgt

SEQ ID NO: 65252 - DNA, 20 bp, synthetic construct
  source 1..20: mol_type = other DNA
gttttgaactttttaccatg

SEQ ID NO: 65253 - DNA, 20 bp, synthetic construct
  source 1..20: mol_type = other DNA
cgttttgaactttttaccat

SEQ ID NO: 65254 - DNA, 20 bp, synthetic construct
  source 1..20: mol_type = other DNA
acgttttgaactttttacca

SEQ ID NO: 65255 - DNA, 20 bp, synthetic construct
  source 1..20: mol_type = other DNA
cacgttttgaactttttacc

SEQ ID NO: 65256 - DNA, 20 bp, synthetic construct
  source 1..20: mol_type = other DNA
acacgttttgaactttttac

SEQ ID NO: 65257 - DNA, 20 bp, synthetic construct
  source 1..20: mol_type = other DNA
cacacgttttgaacttttta

SEQ ID NO: 65258 - DNA, 20 bp, synthetic construct
  source 1..20: mol_type = other DNA
acacacgttttgaacttttt

SEQ ID NO: 65259 - DNA, 20 bp, synthetic construct
  source 1..20: mol_type = other DNA
tacacacgttttgaactttt

SEQ ID NO: 65260 - DNA, 20 bp, synthetic construct
  source 1..20: mol_type = other DNA
gtacacacgttttgaacttt

SEQ ID NO: 65261 - DNA, 20 bp, synthetic construct
  source 1..20: mol_type = other DNA
ggtacacacgttttgaactt

SEQ ID NO: 65262 - DNA, 20 bp, synthetic construct
  source 1..20: mol_type = other DNA
tggtacacacgttttgaact

SEQ ID NO: 65263 - DNA, 20 bp, synthetic construct
  source 1..20: mol_type = other DNA
ttggtacacacgttttgaac

SEQ ID NO: 65264 - DNA, 20 bp, synthetic construct
  source 1..20: mol_type = other DNA
tttggtacacacgttttgaa

SEQ ID NO: 65265 - DNA, 20 bp, synthetic construct
  source 1..20: mol_type = other DNA
ttttggtacacacgttttga

SEQ ID NO: 65266 - DNA, 20 bp, synthetic construct
  source 1..20: mol_type = other DNA
cttttggtacacacgttttg

SEQ ID NO: 65267 - DNA, 20 bp, synthetic construct
  source 1..20: mol_type = other DNA
tcttttggtacacacgtttt

SEQ ID NO: 65268 - DNA, 20 bp, synthetic construct
  source 1..20: mol_type = other DNA
atcttttggtacacacgttt

SEQ ID NO: 65269 - DNA, 20 bp, synthetic construct
  source 1..20: mol_type = other DNA
aatcttttggtacacacgtt

SEQ ID NO: 65270 - DNA, 20 bp, synthetic construct
  source 1..20: mol_type = other DNA
aaatcttttggtacacacgt

SEQ ID NO: 65271 - DNA, 20 bp, synthetic construct
  source 1..20: mol_type = other DNA
taaatcttttggtacacacg

SEQ ID NO: 65272 - DNA, 20 bp, synthetic construct
  source 1..20: mol_type = other DNA
ttaaatcttttggtacacac

SEQ ID NO: 65273 - DNA, 20 bp, synthetic construct
  source 1..20: mol_type = other DNA
gttaaatcttttggtacaca

SEQ ID NO: 65274 - DNA, 20 bp, synthetic construct
  source 1..20: mol_type = other DNA
tgttaaatcttttggtacac

SEQ ID NO: 65275 - DNA, 20 bp, synthetic construct
  source 1..20: mol_type = other DNA
ctgttaaatcttttggtaca

SEQ ID NO: 65276 - DNA, 20 bp, synthetic construct
  source 1..20: mol_type = other DNA
actgttaaatcttttggtac

SEQ ID NO: 65277 - DNA, 20 bp, synthetic construct
  source 1..20: mol_type = other DNA
cactgttaaatcttttggta

SEQ ID NO: 65278 - DNA, 20 bp, synthetic construct
  source 1..20: mol_type = other DNA
tcactgttaaatcttttggt

SEQ ID NO: 65279 - DNA, 20 bp, synthetic construct
  source 1..20: mol_type = other DNA
ttcactgttaaatcttttgg

SEQ ID NO: 65280 - DNA, 20 bp, synthetic construct
  source 1..20: mol_type = other DNA
tttcactgttaaatcttttg

SEQ ID NO: 65281 - DNA, 20 bp, synthetic construct
  source 1..20: mol_type = other DNA
ttttcactgttaaatctttt

SEQ ID NO: 65282 - DNA, 20 bp, synthetic construct
  source 1..20: mol_type = other DNA
attttcactgttaaatcttt

SEQ ID NO: 65283 - DNA, 20 bp, synthetic construct
  source 1..20: mol_type = other DNA
tattttcactgttaaatctt

SEQ ID NO: 65284 - DNA, 20 bp, synthetic construct
  source 1..20: mol_type = other DNA
ctattttcactgttaaatct

SEQ ID NO: 65285 - DNA, 20 bp, synthetic construct
  source 1..20: mol_type = other DNA
tctattttcactgttaaatc

SEQ ID NO: 65286 - DNA, 20 bp, synthetic construct
  source 1..20: mol_type = other DNA
ttctattttcactgttaaat

SEQ ID NO: 65287 - DNA, 20 bp, synthetic construct
  source 1..20: mol_type = other DNA
tttctattttcactgttaaa

SEQ ID NO: 65288 - DNA, 20 bp, synthetic construct
  source 1..20: mol_type = other DNA
ttttctattttcactgttaa

SEQ ID NO: 65289 - DNA, 20 bp, synthetic construct
  source 1..20: mol_type = other DNA
attttctattttcactgtta

SEQ ID NO: 65290 - DNA, 20 bp, synthetic construct
  source 1..20: mol_type = other DNA
tattttctattttcactgtt

SEQ ID NO: 65291 - DNA, 20 bp, synthetic construct
  source 1..20: mol_type = other DNA
ttattttctattttcactgt

SEQ ID NO: 65292 - DNA, 20 bp, synthetic construct
  source 1..20: mol_type = other DNA
cttattttctattttcactg

SEQ ID NO: 65293 - DNA, 20 bp, synthetic construct
  source 1..20: mol_type = other DNA
acttattttctattttcact

SEQ ID NO: 65294 - DNA, 20 bp, synthetic construct
  source 1..20: mol_type = other DNA
cacttattttctattttcac

SEQ ID NO: 65295 - DNA, 20 bp, synthetic construct
  source 1..20: mol_type = other DNA
acacttattttctattttca

SEQ ID NO: 65296 - DNA, 20 bp, synthetic construct
  source 1..20: mol_type = other DNA
cacacttattttctattttc

SEQ ID NO: 65297 - DNA, 20 bp, synthetic construct
  source 1..20: mol_type = other DNA
ccacacttattttctatttt

SEQ ID NO: 65298 - DNA, 20 bp, synthetic construct
  source 1..20: mol_type = other DNA
accacacttattttctattt

SEQ ID NO: 65299 - DNA, 20 bp, synthetic construct
  source 1..20: mol_type = other DNA
gaccacacttattttctatt

SEQ ID NO: 65300 - DNA, 20 bp, synthetic construct
  source 1..20: mol_type = other DNA
ggaccacacttattttctat

SEQ ID NO: 65301 - DNA, 20 bp, synthetic construct
  source 1..20: mol_type = other DNA
aggaccacacttattttcta

SEQ ID NO: 65302 - DNA, 20 bp, synthetic construct
  source 1..20: mol_type = other DNA
aaggaccacacttattttct

SEQ ID NO: 65303 - DNA, 20 bp, synthetic construct
  source 1..20: mol_type = other DNA
caaggaccacacttattttc

SEQ ID NO: 65304 - DNA, 20 bp, synthetic construct
  source 1..20: mol_type = other DNA
acaaggaccacacttatttt

SEQ ID NO: 65305 - DNA, 20 bp, synthetic construct
  source 1..20: mol_type = other DNA
aacaaggaccacacttattt

SEQ ID NO: 65306 - DNA, 20 bp, synthetic construct
  source 1..20: mol_type = other DNA
aaacaaggaccacacttatt

SEQ ID NO: 65307 - DNA, 20 bp, synthetic construct
  source 1..20: mol_type = other DNA
aaaacaaggaccacacttat

SEQ ID NO: 65308 - DNA, 20 bp, synthetic construct
  source 1..20: mol_type = other DNA
gaaaacaaggaccacactta

SEQ ID NO: 65309 - DNA, 20 bp, synthetic construct
  source 1..20: mol_type = other DNA
agaaaacaaggaccacactt

SEQ ID NO: 65310 - DNA, 20 bp, synthetic construct
  source 1..20: mol_type = other DNA
aagaaaacaaggaccacact

SEQ ID NO: 65311 - DNA, 20 bp, synthetic construct
  source 1..20: mol_type = other DNA
gaagaaaacaaggaccacac

SEQ ID NO: 65312 - DNA, 20 bp, synthetic construct
  source 1..20: mol_type = other DNA
ggaagaaaacaaggaccaca

SEQ ID NO: 65313 - DNA, 20 bp, synthetic construct
  source 1..20: mol_type = other DNA
tggaagaaaacaaggaccac

SEQ ID NO: 65314 - DNA, 20 bp, synthetic construct
  source 1..20: mol_type = other DNA
gtggaagaaaacaaggacca

SEQ ID NO: 65315 - DNA, 20 bp, synthetic construct
  source 1..20: mol_type = other DNA
ggtggaagaaaacaaggacc

SEQ ID NO: 65316 - DNA, 20 bp, synthetic construct
  source 1..20: mol_type = other DNA
tggtggaagaaaacaaggac

SEQ ID NO: 65317 - DNA, 20 bp, synthetic construct
  source 1..20: mol_type = other DNA
ttggtggaagaaaacaagga

SEQ ID NO: 65318 - DNA, 20 bp, synthetic construct
  source 1..20: mol_type = other DNA
cttggtggaagaaaacaagg

SEQ ID NO: 65319 - DNA, 20 bp, synthetic construct
  source 1..20: mol_type = other DNA
ccttggtggaagaaaacaag

SEQ ID NO: 65320 - DNA, 20 bp, synthetic construct
  source 1..20: mol_type = other DNA
gccttggtggaagaaaacaa

SEQ ID NO: 65321 - DNA, 20 bp, synthetic construct
  source 1..20: mol_type = other DNA
tgccttggtggaagaaaaca

SEQ ID NO: 65322 - DNA, 20 bp, synthetic construct
  source 1..20: mol_type = other DNA
ttgccttggtggaagaaaac

SEQ ID NO: 65323 - DNA, 20 bp, synthetic construct
  source 1..20: mol_type = other DNA
tttgccttggtggaagaaaa

SEQ ID NO: 65324 - DNA, 20 bp, synthetic construct
  source 1..20: mol_type = other DNA
atttgccttggtggaagaaa

SEQ ID NO: 65325 - DNA, 20 bp, synthetic construct
  source 1..20: mol_type = other DNA
tatttgccttggtggaagaa

SEQ ID NO: 65326 - DNA, 20 bp, synthetic construct
  source 1..20: mol_type = other DNA
atatttgccttggtggaaga

SEQ ID NO: 65327 - DNA, 20 bp, synthetic construct
  source 1..20: mol_type = other DNA
aatatttgccttggtggaag

SEQ ID NO: 65328 - DNA, 20 bp, synthetic construct
  source 1..20: mol_type = other DNA
caatatttgccttggtggaa

SEQ ID NO: 65329 - DNA, 20 bp, synthetic construct
  source 1..20: mol_type = other DNA
acaatatttgccttggtgga

SEQ ID NO: 65330 - DNA, 20 bp, synthetic construct
  source 1..20: mol_type = other DNA
aacaatatttgccttggtgg

SEQ ID NO: 65331 - DNA, 20 bp, synthetic construct
  source 1..20: mol_type = other DNA
taacaatatttgccttggtg

SEQ ID NO: 65332 - DNA, 20 bp, synthetic construct
  source 1..20: mol_type = other DNA
ataacaatatttgccttggt

SEQ ID NO: 65333 - DNA, 20 bp, synthetic construct
  source 1..20: mol_type = other DNA
tataacaatatttgccttgg

SEQ ID NO: 65334 - DNA, 20 bp, synthetic construct
  source 1..20: mol_type = other DNA
ttataacaatatttgccttg

SEQ ID NO: 65335 - DNA, 20 bp, synthetic construct
  source 1..20: mol_type = other DNA
attataacaatatttgcctt

SEQ ID NO: 65336 - DNA, 20 bp, synthetic construct
  source 1..20: mol_type = other DNA
gattataacaatatttgcct

SEQ ID NO: 65337 - DNA, 20 bp, synthetic construct
  source 1..20: mol_type = other DNA
agattataacaatatttgcc

SEQ ID NO: 65338 - DNA, 20 bp, synthetic construct
  source 1..20: mol_type = other DNA
gagattataacaatatttgc

SEQ ID NO: 65339 - DNA, 20 bp, synthetic construct
  source 1..20: mol_type = other DNA
ggagattataacaatatttg

SEQ ID NO: 65340 - DNA, 20 bp, synthetic construct
  source 1..20: mol_type = other DNA
aggagattataacaatattt

SEQ ID NO: 65341 - DNA, 20 bp, synthetic construct
  source 1..20: mol_type = other DNA
taggagattataacaatatt

SEQ ID NO: 65342 - DNA, 20 bp, synthetic construct
  source 1..20: mol_type = other DNA
ttaggagattataacaatat

SEQ ID NO: 65343 - DNA, 20 bp, synthetic construct
  source 1..20: mol_type = other DNA
tttaggagattataacaata

SEQ ID NO: 65344 - DNA, 20 bp, synthetic construct
  source 1..20: mol_type = other DNA
gtttaggagattataacaat

SEQ ID NO: 65345 - DNA, 20 bp, synthetic construct
  source 1..20: mol_type = other DNA
tgtttaggagattataacaa

SEQ ID NO: 65346 - DNA, 20 bp, synthetic construct
  source 1..20: mol_type = other DNA
ttgtttaggagattataaca

SEQ ID NO: 65347 - DNA, 20 bp, synthetic construct
  source 1..20: mol_type = other DNA
gttgtttaggagattataac

SEQ ID NO: 65348 - DNA, 20 bp, synthetic construct
  source 1..20: mol_type = other DNA
agttgtttaggagattataa

SEQ ID NO: 65349 - DNA, 20 bp, synthetic construct
  source 1..20: mol_type = other DNA
aagttgtttaggagattata

SEQ ID NO: 65350 - DNA, 20 bp, synthetic construct
  source 1..20: mol_type = other DNA
caagttgtttaggagattat

SEQ ID NO: 65351 - DNA, 20 bp, synthetic construct
  source 1..20: mol_type = other DNA
acaagttgtttaggagatta

SEQ ID NO: 65352 - DNA, 20 bp, synthetic construct
  source 1..20: mol_type = other DNA
gacaagttgtttaggagatt

SEQ ID NO: 65353 - DNA, 20 bp, synthetic construct
  source 1..20: mol_type = other DNA
agacaagttgtttaggagat

SEQ ID NO: 65354 - DNA, 20 bp, synthetic construct
  source 1..20: mol_type = other DNA
aagacaagttgtttaggaga

SEQ ID NO: 65355 - DNA, 20 bp, synthetic construct
  source 1..20: mol_type = other DNA
gaagacaagttgtttaggag

SEQ ID NO: 65356 - DNA, 20 bp, synthetic construct
  source 1..20: mol_type = other DNA
ggaagacaagttgtttagga

SEQ ID NO: 65357 - DNA, 20 bp, synthetic construct
  source 1..20: mol_type = other DNA
tggaagacaagttgtttagg

SEQ ID NO: 65358 - DNA, 20 bp, synthetic construct
  source 1..20: mol_type = other DNA
ctggaagacaagttgtttag

SEQ ID NO: 65359 - DNA, 20 bp, synthetic construct
  source 1..20: mol_type = other DNA
tctggaagacaagttgttta

SEQ ID NO: 65360 - DNA, 20 bp, synthetic construct
  source 1..20: mol_type = other DNA
atctggaagacaagttgttt

SEQ ID NO: 65361 - DNA, 20 bp, synthetic construct
  source 1..20: mol_type = other DNA
aatctggaagacaagttgtt

SEQ ID NO: 65362 - DNA, 20 bp, synthetic construct
  source 1..20: mol_type = other DNA
aaatctggaagacaagttgt

SEQ ID NO: 65363 - DNA, 20 bp, synthetic construct
  source 1..20: mol_type = other DNA
gaaatctggaagacaagttg

SEQ ID NO: 65364 - DNA, 20 bp, synthetic construct
  source 1..20: mol_type = other DNA
agaaatctggaagacaagtt

SEQ ID NO: 65365 - DNA, 20 bp, synthetic construct
  source 1..20: mol_type = other DNA
gagaaatctggaagacaagt

SEQ ID NO: 65366 - DNA, 20 bp, synthetic construct
  source 1..20: mol_type = other DNA
tgagaaatctggaagacaag

SEQ ID NO: 65367 - DNA, 20 bp, synthetic construct
  source 1..20: mol_type = other DNA
atgagaaatctggaagacaa

SEQ ID NO: 65368 - DNA, 20 bp, synthetic construct
  source 1..20: mol_type = other DNA
aatgagaaatctggaagaca

SEQ ID NO: 65369 - DNA, 20 bp, synthetic construct
  source 1..20: mol_type = other DNA
aaatgagaaatctggaagac

SEQ ID NO: 65370 - DNA, 20 bp, synthetic construct
  source 1..20: mol_type = other DNA
aaaatgagaaatctggaaga

SEQ ID NO: 65371 - DNA, 20 bp, synthetic construct
  source 1..20: mol_type = other DNA
gaaaatgagaaatctggaag

SEQ ID NO: 65372 - DNA, 20 bp, synthetic construct
  source 1..20: mol_type = other DNA
tgaaaatgagaaatctggaa

SEQ ID NO: 65373 - DNA, 20 bp, synthetic construct
  source 1..20: mol_type = other DNA
ctgaaaatgagaaatctgga

SEQ ID NO: 65374 - DNA, 20 bp, synthetic construct
  source 1..20: mol_type = other DNA
actgaaaatgagaaatctgg

SEQ ID NO: 65375 - DNA, 20 bp, synthetic construct
  source 1..20: mol_type = other DNA
gactgaaaatgagaaatctg

SEQ ID NO: 65376 - DNA, 20 bp, synthetic construct
  source 1..20: mol_type = other DNA
tgactgaaaatgagaaatct

SEQ ID NO: 65377 - DNA, 20 bp, synthetic construct
  source 1..20: mol_type = other DNA
ttgactgaaaatgagaaatc

SEQ ID NO: 65378 - DNA, 20 bp, synthetic construct
  source 1..20: mol_type = other DNA
attgactgaaaatgagaaat

SEQ ID NO: 65379 - DNA, 20 bp, synthetic construct
  source 1..20: mol_type = other DNA
gattgactgaaaatgagaaa

SEQ ID NO: 65380 - DNA, 20 bp, synthetic construct
  source 1..20: mol_type = other DNA
agattgactgaaaatgagaa

SEQ ID NO: 65381 - DNA, 20 bp, synthetic construct
  source 1..20: mol_type = other DNA
aagattgactgaaaatgaga

SEQ ID NO: 65382 - DNA, 20 bp, synthetic construct
  source 1..20: mol_type = other DNA
caagattgactgaaaatgag

SEQ ID NO: 65383 - DNA, 20 bp, synthetic construct
  source 1..20: mol_type = other DNA
ccaagattgactgaaaatga

SEQ ID NO: 65384 - DNA, 20 bp, synthetic construct
  source 1..20: mol_type = other DNA
cccaagattgactgaaaatg

SEQ ID NO: 65385 - DNA, 20 bp, synthetic construct
  source 1..20: mol_type = other DNA
gcccaagattgactgaaaat

SEQ ID NO: 65386 - DNA, 20 bp, synthetic construct
  source 1..20: mol_type = other DNA
tgcccaagattgactgaaaa

SEQ ID NO: 65387 - DNA, 20 bp, synthetic construct
  source 1..20: mol_type = other DNA
atgcccaagattgactgaaa

SEQ ID NO: 65388 - DNA, 20 bp, synthetic construct
  source 1..20: mol_type = other DNA
aatgcccaagattgactgaa

SEQ ID NO: 65389 - DNA, 20 bp, synthetic construct
  source 1..20: mol_type = other DNA
caatgcccaagattgactga

SEQ ID NO: 65390 - DNA, 20 bp, synthetic construct
  source 1..20: mol_type = other DNA
tcaatgcccaagattgactg

SEQ ID NO: 65391 - DNA, 20 bp, synthetic construct
  source 1..20: mol_type = other DNA
gtcaatgcccaagattgact

SEQ ID NO: 65392 - DNA, 20 bp, synthetic construct
  source 1..20: mol_type = other DNA
tgtcaatgcccaagattgac

SEQ ID NO: 65393 - DNA, 20 bp, synthetic construct
  source 1..20: mol_type = other DNA
atgtcaatgcccaagattga

SEQ ID NO: 65394 - DNA, 20 bp, synthetic construct
  source 1..20: mol_type = other DNA
tatgtcaatgcccaagattg

SEQ ID NO: 65395 - DNA, 20 bp, synthetic construct
  source 1..20: mol_type = other DNA
ttatgtcaatgcccaagatt

SEQ ID NO: 65396 - DNA, 20 bp, synthetic construct
  source 1..20: mol_type = other DNA
tttatgtcaatgcccaagat

SEQ ID NO: 65397 - DNA, 20 bp, synthetic construct
  source 1..20: mol_type = other DNA
ctttatgtcaatgcccaaga

SEQ ID NO: 65398 - DNA, 20 bp, synthetic construct
  source 1..20: mol_type = other DNA
tctttatgtcaatgcccaag

SEQ ID NO: 65399 - DNA, 20 bp, synthetic construct
  source 1..20: mol_type = other DNA
ttctttatgtcaatgcccaa

SEQ ID NO: 65400 - DNA, 20 bp, synthetic construct
  source 1..20: mol_type = other DNA
tttctttatgtcaatgccca

SEQ ID NO: 65401 - DNA, 20 bp, synthetic construct
  source 1..20: mol_type = other DNA
atttctttatgtcaatgccc

SEQ ID NO: 65402 - DNA, 20 bp, synthetic construct
  source 1..20: mol_type = other DNA
aatttctttatgtcaatgcc

SEQ ID NO: 65403 - DNA, 20 bp, synthetic construct
  source 1..20: mol_type = other DNA
gaatttctttatgtcaatgc

SEQ ID NO: 65404 - DNA, 20 bp, synthetic construct
  source 1..20: mol_type = other DNA
agaatttctttatgtcaatg

SEQ ID NO: 65405 - DNA, 20 bp, synthetic construct
  source 1..20: mol_type = other DNA
aagaatttctttatgtcaat

SEQ ID NO: 65406 - DNA, 20 bp, synthetic construct
  source 1..20: mol_type = other DNA
taagaatttctttatgtcaa

SEQ ID NO: 65407 - DNA, 20 bp, synthetic construct
  source 1..20: mol_type = other DNA
ctaagaatttctttatgtca

SEQ ID NO: 65408 - DNA, 20 bp, synthetic construct
  source 1..20: mol_type = other DNA
tctaagaatttctttatgtc

SEQ ID NO: 65409 - DNA, 20 bp, synthetic construct
  source 1..20: mol_type = other DNA
gtctaagaatttctttatgt

SEQ ID NO: 65410 - DNA, 20 bp, synthetic construct
  source 1..20: mol_type = other DNA
tgtctaagaatttctttatg

SEQ ID NO: 65411 - DNA, 20 bp, synthetic construct
  source 1..20: mol_type = other DNA
atgtctaagaatttctttat

SEQ ID NO: 65412 - DNA, 20 bp, synthetic construct
  source 1..20: mol_type = other DNA
aatgtctaagaatttcttta

SEQ ID NO: 65413 - DNA, 20 bp, synthetic construct
  source 1..20: mol_type = other DNA
caatgtctaagaatttcttt

SEQ ID NO: 65414 - DNA, 20 bp, synthetic construct
  source 1..20: mol_type = other DNA
gcaatgtctaagaatttctt

SEQ ID NO: 65415 - DNA, 20 bp, synthetic construct
  source 1..20: mol_type = other DNA
agcaatgtctaagaatttct

SEQ ID NO: 65416 - DNA, 20 bp, synthetic construct
  source 1..20: mol_type = other DNA
aagcaatgtctaagaatttc

SEQ ID NO: 65417 - DNA, 20 bp, synthetic construct
  source 1..20: mol_type = other DNA
aaagcaatgtctaagaattt

SEQ ID NO: 65418 - DNA, 20 bp, synthetic construct
  source 1..20: mol_type = other DNA
aaaagcaatgtctaagaatt

SEQ ID NO: 65419 - DNA, 20 bp, synthetic construct
  source 1..20: mol_type = other DNA
taaaagcaatgtctaagaat

SEQ ID NO: 65420 - DNA, 20 bp, synthetic construct
  source 1..20: mol_type = other DNA
ataaaagcaatgtctaagaa

SEQ ID NO: 65421 - DNA, 20 bp, synthetic construct
  source 1..20: mol_type = other DNA
aataaaagcaatgtctaaga

SEQ ID NO: 65422 - DNA, 20 bp, synthetic construct
  source 1..20: mol_type = other DNA
taataaaagcaatgtctaag

SEQ ID NO: 65423 - DNA, 20 bp, synthetic construct
  source 1..20: mol_type = other DNA
ctaataaaagcaatgtctaa

SEQ ID NO: 65424 - DNA, 20 bp, synthetic construct
  source 1..20: mol_type = other DNA
tctaataaaagcaatgtcta

SEQ ID NO: 65425 - DNA, 20 bp, synthetic construct
  source 1..20: mol_type = other DNA
atctaataaaagcaatgtct

SEQ ID NO: 65426 - DNA, 20 bp, synthetic construct
  source 1..20: mol_type = other DNA
gatctaataaaagcaatgtc

SEQ ID NO: 65427 - DNA, 20 bp, synthetic construct
  source 1..20: mol_type = other DNA
tgatctaataaaagcaatgt

SEQ ID NO: 65428 - DNA, 20 bp, synthetic construct
  source 1..20: mol_type = other DNA
atgatctaataaaagcaatg

SEQ ID NO: 65429 - DNA, 20 bp, synthetic construct
  source 1..20: mol_type = other DNA
gatgatctaataaaagcaat

SEQ ID NO: 65430 - DNA, 20 bp, synthetic construct
  source 1..20: mol_type = other DNA
agatgatctaataaaagcaa

SEQ ID NO: 65431 - DNA, 20 bp, synthetic construct
  source 1..20: mol_type = other DNA
gagatgatctaataaaagca

SEQ ID NO: 65432 - DNA, 20 bp, synthetic construct
  source 1..20: mol_type = other DNA
tgagatgatctaataaaagc

SEQ ID NO: 65433 - DNA, 20 bp, synthetic construct
  source 1..20: mol_type = other DNA
atgagatgatctaataaaag

SEQ ID NO: 65434 - DNA, 20 bp, synthetic construct
  source 1..20: mol_type = other DNA
gatgagatgatctaataaaa

SEQ ID NO: 65435 - DNA, 20 bp, synthetic construct
  source 1..20: mol_type = other DNA
ggatgagatgatctaataaa

SEQ ID NO: 65436 - DNA, 20 bp, synthetic construct
  source 1..20: mol_type = other DNA
gggatgagatgatctaataa

SEQ ID NO: 65437 - DNA, 20 bp, synthetic construct
  source 1..20: mol_type = other DNA
agggatgagatgatctaata

SEQ ID NO: 65438 - DNA, 20 bp, synthetic construct
  source 1..20: mol_type = other DNA
aagggatgagatgatctaat

SEQ ID NO: 65439 - DNA, 20 bp, synthetic construct
  source 1..20: mol_type = other DNA
caagggatgagatgatctaa

SEQ ID NO: 65440 - DNA, 20 bp, synthetic construct
  source 1..20: mol_type = other DNA
gcaagggatgagatgatcta

SEQ ID NO: 65441 - DNA, 20 bp, synthetic construct
  source 1..20: mol_type = other DNA
agcaagggatgagatgatct

SEQ ID NO: 65442 - DNA, 20 bp, synthetic construct
  source 1..20: mol_type = other DNA
gagcaagggatgagatgatc

SEQ ID NO: 65443 - DNA, 20 bp, synthetic construct
  source 1..20: mol_type = other DNA
tgagcaagggatgagatgat

SEQ ID NO: 65444 - DNA, 20 bp, synthetic construct
  source 1..20: mol_type = other DNA
ttgagcaagggatgagatga

SEQ ID NO: 65445 - DNA, 20 bp, synthetic construct
  source 1..20: mol_type = other DNA
tttgagcaagggatgagatg

SEQ ID NO: 65446 - DNA, 20 bp, synthetic construct
  source 1..20: mol_type = other DNA
ttttgagcaagggatgagat

SEQ ID NO: 65447 - DNA, 20 bp, synthetic construct
  source 1..20: mol_type = other DNA
attttgagcaagggatgaga

SEQ ID NO: 65448 - DNA, 20 bp, synthetic construct
  source 1..20: mol_type = other DNA
gattttgagcaagggatgag

SEQ ID NO: 65449 - DNA, 20 bp, synthetic construct
  source 1..20: mol_type = other DNA
agattttgagcaagggatga

SEQ ID NO: 65450 - DNA, 20 bp, synthetic construct
  source 1..20: mol_type = other DNA
aagattttgagcaagggatg

SEQ ID NO: 65451 - DNA, 20 bp, synthetic construct
  source 1..20: mol_type = other DNA
gaagattttgagcaagggat

SEQ ID NO: 65452 - DNA, 20 bp, synthetic construct
  source 1..20: mol_type = other DNA
tgaagattttgagcaaggga

SEQ ID NO: 65453 - DNA, 20 bp, synthetic construct
  source 1..20: mol_type = other DNA
ctgaagattttgagcaaggg

SEQ ID NO: 65454 - DNA, 20 bp, synthetic construct
  source 1..20: mol_type = other DNA
actgaagattttgagcaagg

SEQ ID NO: 65455 - DNA, 20 bp, synthetic construct
  source 1..20: mol_type = other DNA
cactgaagattttgagcaag

SEQ ID NO: 65456 - DNA, 20 bp, synthetic construct
  source 1..20: mol_type = other DNA
ccactgaagattttgagcaa

SEQ ID NO: 65457 - DNA, 20 bp, synthetic construct
  source 1..20: mol_type = other DNA
gccactgaagattttgagca

SEQ ID NO: 65458 - DNA, 20 bp, synthetic construct
  source 1..20: mol_type = other DNA
ggccactgaagattttgagc

SEQ ID NO: 65459 - DNA, 20 bp, synthetic construct
  source 1..20: mol_type = other DNA
tggccactgaagattttgag

SEQ ID NO: 65460 - DNA, 20 bp, synthetic construct
  source 1..20: mol_type = other DNA
gtggccactgaagattttga

SEQ ID NO: 65461 - DNA, 20 bp, synthetic construct
  source 1..20: mol_type = other DNA
agtggccactgaagattttg

SEQ ID NO: 65462 - DNA, 20 bp, synthetic construct
  source 1..20: mol_type = other DNA
cagtggccactgaagatttt

SEQ ID NO: 65463 - DNA, 20 bp, synthetic construct
  source 1..20: mol_type = other DNA
acagtggccactgaagattt

SEQ ID NO: 65464 - DNA, 20 bp, synthetic construct
  source 1..20: mol_type = other DNA
aacagtggccactgaagatt

SEQ ID NO: 65465 - DNA, 20 bp, synthetic construct
  source 1..20: mol_type = other DNA
caacagtggccactgaagat

SEQ ID NO: 65466 - DNA, 20 bp, synthetic construct
  source 1..20: mol_type = other DNA
acaacagtggccactgaaga

SEQ ID NO: 65467 - DNA, 20 bp, synthetic construct
  source 1..20: mol_type = other DNA
aacaacagtggccactgaag

SEQ ID NO: 65468 - DNA, 20 bp, synthetic construct
  source 1..20: mol_type = other DNA
aaacaacagtggccactgaa

SEQ ID NO: 65469 - DNA, 20 bp, synthetic construct
  source 1..20: mol_type = other DNA
taaacaacagtggccactga

SEQ ID NO: 65470 - DNA, 20 bp, synthetic construct
  source 1..20: mol_type = other DNA
gtaaacaacagtggccactg

SEQ ID NO: 65471 - DNA, 20 bp, synthetic construct
  source 1..20: mol_type = other DNA
tgtaaacaacagtggccact

SEQ ID NO: 65472 - DNA, 20 bp, synthetic construct
  source 1..20: mol_type = other DNA
ctgtaaacaacagtggccac

SEQ ID NO: 65473 - DNA, 20 bp, synthetic construct
  source 1..20: mol_type = other DNA
tctgtaaacaacagtggcca

SEQ ID NO: 65474 - DNA, 20 bp, synthetic construct
  source 1..20: mol_type = other DNA
ttctgtaaacaacagtggcc

SEQ ID NO: 65475 - DNA, 20 bp, synthetic construct
  source 1..20: mol_type = other DNA
attctgtaaacaacagtggc

SEQ ID NO: 65476 - DNA, 20 bp, synthetic construct
  source 1..20: mol_type = other DNA
tattctgtaaacaacagtgg

SEQ ID NO: 65477 - DNA, 20 bp, synthetic construct
  source 1..20: mol_type = other DNA
ttattctgtaaacaacagtg

SEQ ID NO: 65478 - DNA, 20 bp, synthetic construct
  source 1..20: mol_type = other DNA
tttattctgtaaacaacagt

SEQ ID NO: 65479 - DNA, 20 bp, synthetic construct
  source 1..20: mol_type = other DNA
ctttattctgtaaacaacag

SEQ ID NO: 65480 - DNA, 20 bp, synthetic construct
  source 1..20: mol_type = other DNA
actttattctgtaaacaaca

SEQ ID NO: 65481 - DNA, 20 bp, synthetic construct
  source 1..20: mol_type = other DNA
aactttattctgtaaacaac

SEQ ID NO: 65482 - DNA, 20 bp, synthetic construct
  source 1..20: mol_type = other DNA
caactttattctgtaaacaa

SEQ ID NO: 65483 - DNA, 20 bp, synthetic construct
  source 1..20: mol_type = other DNA
ccaactttattctgtaaaca

SEQ ID NO: 65484 - DNA, 20 bp, synthetic construct
  source 1..20: mol_type = other DNA
cccaactttattctgtaaac

SEQ ID NO: 65485 - DNA, 20 bp, synthetic construct
  source 1..20: mol_type = other DNA
tcccaactttattctgtaaa

SEQ ID NO: 65486 - DNA, 20 bp, synthetic construct
  source 1..20: mol_type = other DNA
atcccaactttattctgtaa

SEQ ID NO: 65487 - DNA, 20 bp, synthetic construct
  source 1..20: mol_type = other DNA
catcccaactttattctgta

SEQ ID NO: 65488 - DNA, 20 bp, synthetic construct
  source 1..20: mol_type = other DNA
gcatcccaactttattctgt

SEQ ID NO: 65489 - DNA, 20 bp, synthetic construct
  source 1..20: mol_type = other DNA
agcatcccaactttattctg

SEQ ID NO: 65490 - DNA, 20 bp, synthetic construct
  source 1..20: mol_type = other DNA
tagcatcccaactttattct

SEQ ID NO: 65491 - DNA, 20 bp, synthetic construct
  source 1..20: mol_type = other DNA
atagcatcccaactttattc

SEQ ID NO: 65492 - DNA, 20 bp, synthetic construct
  source 1..20: mol_type = other DNA
tatagcatcccaactttatt

SEQ ID NO: 65493 - DNA, 20 bp, synthetic construct
  source 1..20: mol_type = other DNA
gtatagcatcccaactttat

SEQ ID NO: 65494 - DNA, 20 bp, synthetic construct
  source 1..20: mol_type = other DNA
tgtatagcatcccaacttta

SEQ ID NO: 65495 - DNA, 20 bp, synthetic construct
  source 1..20: mol_type = other DNA
ctgtatagcatcccaacttt

SEQ ID NO: 65496 - DNA, 20 bp, synthetic construct
  source 1..20: mol_type = other DNA
cctgtatagcatcccaactt

SEQ ID NO: 65497 - DNA, 20 bp, synthetic construct
  source 1..20: mol_type = other DNA
ccctgtatagcatcccaact

SEQ ID NO: 65498 - DNA, 20 bp, synthetic construct
  source 1..20: mol_type = other DNA
gccctgtatagcatcccaac

SEQ ID NO: 65499 - DNA, 20 bp, synthetic construct
  source 1..20: mol_type = other DNA
ggccctgtatagcatcccaa

SEQ ID NO: 65500 - DNA, 20 bp, synthetic construct
  source 1..20: mol_type = other DNA
gggccctgtatagcatccca

SEQ ID NO: 65501 - DNA, 20 bp, synthetic construct
  source 1..20: mol_type = other DNA
agggccctgtatagcatccc

SEQ ID NO: 65502 - DNA, 20 bp, synthetic construct
  source 1..20: mol_type = other DNA
aagggccctgtatagcatcc

SEQ ID NO: 65503 - DNA, 20 bp, synthetic construct
  source 1..20: mol_type = other DNA
gaagggccctgtatagcatc

SEQ ID NO: 65504 - DNA, 20 bp, synthetic construct
  source 1..20: mol_type = other DNA
ggaagggccctgtatagcat

SEQ ID NO: 65505 - DNA, 20 bp, synthetic construct
  source 1..20: mol_type = other DNA
gggaagggccctgtatagca

SEQ ID NO: 65506 - DNA, 20 bp, synthetic construct
  source 1..20: mol_type = other DNA
tgggaagggccctgtatagc

SEQ ID NO: 65507 - DNA, 20 bp, synthetic construct
  source 1..20: mol_type = other DNA
ctgggaagggccctgtatag

SEQ ID NO: 65508 - DNA, 20 bp, synthetic construct
  source 1..20: mol_type = other DNA
actgggaagggccctgtata

SEQ ID NO: 65509 - DNA, 20 bp, synthetic construct
  source 1..20: mol_type = other DNA
cactgggaagggccctgtat

SEQ ID NO: 65510 - DNA, 20 bp, synthetic construct
  source 1..20: mol_type = other DNA
ccactgggaagggccctgta

SEQ ID NO: 65511 - DNA, 20 bp, synthetic construct
  source 1..20: mol_type = other DNA
tccactgggaagggccctgt

SEQ ID NO: 65512 - DNA, 20 bp, synthetic construct
  source 1..20: mol_type = other DNA
ttccactgggaagggccctg

SEQ ID NO: 65513 - DNA, 20 bp, synthetic construct
  source 1..20: mol_type = other DNA
gttccactgggaagggccct

SEQ ID NO: 65514 - DNA, 20 bp, synthetic construct
  source 1..20: mol_type = other DNA
agttccactgggaagggccc

SEQ ID NO: 65515 - DNA, 20 bp, synthetic construct
  source 1..20: mol_type = other DNA
aagttccactgggaagggcc

SEQ ID NO: 65516 - DNA, 20 bp, synthetic construct
  source 1..20: mol_type = other DNA
gaagttccactgggaagggc

SEQ ID NO: 65517 - DNA, 20 bp, synthetic construct
  source 1..20: mol_type = other DNA
agaagttccactgggaaggg

SEQ ID NO: 65518 - DNA, 20 bp, synthetic construct
  source 1..20: mol_type = other DNA
gagaagttccactgggaagg

SEQ ID NO: 65519 - DNA, 20 bp, synthetic construct
  source 1..20: mol_type = other DNA
agagaagttccactgggaag

SEQ ID NO: 65520 - DNA, 20 bp, synthetic construct
  source 1..20: mol_type = other DNA
aagagaagttccactgggaa

SEQ ID NO: 65521 - DNA, 20 bp, synthetic construct
  source 1..20: mol_type = other DNA
aaagagaagttccactggga

SEQ ID NO: 65522 - DNA, 20 bp, synthetic construct
  source 1..20: mol_type = other DNA
aaaagagaagttccactggg

SEQ ID NO: 65523 - DNA, 20 bp, synthetic construct
  source 1..20: mol_type = other DNA
aaaaagagaagttccactgg

SEQ ID NO: 65524 - DNA, 20 bp, synthetic construct
  source 1..20: mol_type = other DNA
gaaaaagagaagttccactg

SEQ ID NO: 65525 - DNA, 20 bp, synthetic construct
  source 1..20: mol_type = other DNA
tgaaaaagagaagttccact

SEQ ID NO: 65526 - DNA, 20 bp, synthetic construct
  source 1..20: mol_type = other DNA
ttgaaaaagagaagttccac

SEQ ID NO: 65527 - DNA, 20 bp, synthetic construct
  source 1..20: mol_type = other DNA
gttgaaaaagagaagttcca

SEQ ID NO: 65528 - DNA, 20 bp, synthetic construct
  source 1..20: mol_type = other DNA
ggttgaaaaagagaagttcc

SEQ ID NO: 65529 - DNA, 20 bp, synthetic construct
  source 1..20: mol_type = other DNA
aggttgaaaaagagaagttc

SEQ ID NO: 65530 - DNA, 20 bp, synthetic construct
  source 1..20: mol_type = other DNA
aaggttgaaaaagagaagtt

SEQ ID NO: 65531 - DNA, 20 bp, synthetic construct
  source 1..20: mol_type = other DNA
taaggttgaaaaagagaagt

SEQ ID NO: 65532 - DNA, 20 bp, synthetic construct
  source 1..20: mol_type = other DNA
ataaggttgaaaaagagaag

SEQ ID NO: 65533 - DNA, 20 bp, synthetic construct
  source 1..20: mol_type = other DNA
gataaggttgaaaaagagaa

SEQ ID NO: 65534 - DNA, 20 bp, synthetic construct
  source 1..20: mol_type = other DNA
agataaggttgaaaaagaga

SEQ ID NO: 65535 - DNA, 20 bp, synthetic construct
  source 1..20: mol_type = other DNA
gagataaggttgaaaaagag

SEQ ID NO: 65536 - DNA, 20 bp, synthetic construct
  source 1..20: mol_type = other DNA
agagataaggttgaaaaaga

SEQ ID NO: 65537 - DNA, 20 bp, synthetic construct
  source 1..20: mol_type = other DNA
gagagataaggttgaaaaag

SEQ ID NO: 65538 - DNA, 20 bp, synthetic construct
  source 1..20: mol_type = other DNA
tgagagataaggttgaaaaa

SEQ ID NO: 65539 - DNA, 20 bp, synthetic construct
  source 1..20: mol_type = other DNA
atgagagataaggttgaaaa

SEQ ID NO: 65540 - DNA, 20 bp, synthetic construct
  source 1..20: mol_type = other DNA
aatgagagataaggttgaaa

SEQ ID NO: 65541 - DNA, 20 bp, synthetic construct
  source 1..20: mol_type = other DNA
taatgagagataaggttgaa

SEQ ID NO: 65542 - DNA, 20 bp, synthetic construct
  source 1..20: mol_type = other DNA
ataatgagagataaggttga

SEQ ID NO: 65543 - DNA, 20 bp, synthetic construct
  source 1..20: mol_type = other DNA
aataatgagagataaggttg

SEQ ID NO: 65544 - DNA, 20 bp, synthetic construct
  source 1..20: mol_type = other DNA
aaataatgagagataaggtt

SEQ ID NO: 65545 - DNA, 20 bp, synthetic construct
  source 1..20: mol_type = other DNA
gaaataatgagagataaggt

SEQ ID NO: 65546 - DNA, 20 bp, synthetic construct
  source 1..20: mol_type = other DNA
ggaaataatgagagataagg

SEQ ID NO: 65547 - DNA, 20 bp, synthetic construct
  source 1..20: mol_type = other DNA
gggaaataatgagagataag

SEQ ID NO: 65548 - DNA, 20 bp, synthetic construct
  source 1..20: mol_type = other DNA
tgggaaataatgagagataa

SEQ ID NO: 65549 - DNA, 20 bp, synthetic construct
  source 1..20: mol_type = other DNA
ttgggaaataatgagagata

SEQ ID NO: 65550 - DNA, 20 bp, synthetic construct
  source 1..20: mol_type = other DNA
attgggaaataatgagagat

SEQ ID NO: 65551 - DNA, 20 bp, synthetic construct
  source 1..20: mol_type = other DNA
cattgggaaataatgagaga

SEQ ID NO: 65552 - DNA, 20 bp, synthetic construct
  source 1..20: mol_type = other DNA
acattgggaaataatgagag

SEQ ID NO: 65553 - DNA, 20 bp, synthetic construct
  source 1..20: mol_type = other DNA
aacattgggaaataatgaga

SEQ ID NO: 65554 - DNA, 20 bp, synthetic construct
  source 1..20: mol_type = other DNA
aaacattgggaaataatgag

SEQ ID NO: 65555 - DNA, 20 bp, synthetic construct
  source 1..20: mol_type = other DNA
aaaacattgggaaataatga

SEQ ID NO: 65556 - DNA, 20 bp, synthetic construct
  source 1..20: mol_type = other DNA
aaaaacattgggaaataatg

SEQ ID NO: 65557 - DNA, 20 bp, synthetic construct
  source 1..20: mol_type = other DNA
aaaaaacattgggaaataat

SEQ ID NO: 65558 - DNA, 20 bp, synthetic construct
  source 1..20: mol_type = other DNA
aaaaaaacattgggaaataa

SEQ ID NO: 65559 - DNA, 20 bp, synthetic construct
  source 1..20: mol_type = other DNA
aaaaaaaacattgggaaata

SEQ ID NO: 65560 - DNA, 20 bp, synthetic construct
  source 1..20: mol_type = other DNA
aaaaaaaaacattgggaaat

SEQ ID NO: 65561 - DNA, 20 bp, synthetic construct
  source 1..20: mol_type = other DNA
aaaaaaaaaacattgggaaa

SEQ ID NO: 65562 - DNA, 20 bp, synthetic construct
  source 1..20: mol_type = other DNA
aaaaaaaaaaacattgggaa

SEQ ID NO: 65563 - DNA, 20 bp, synthetic construct
  source 1..20: mol_type = other DNA
aaaaaaaaaaaacattggga

SEQ ID NO: 65564 - DNA, 20 bp, synthetic construct
  source 1..20: mol_type = other DNA
aaaaaaaaaaaaacattggg

SEQ ID NO: 65565 - DNA, 20 bp, synthetic construct
  source 1..20: mol_type = other DNA
aaaaaaaaaaaaaacattgg

SEQ ID NO: 65566 - DNA, 20 bp, synthetic construct
  source 1..20: mol_type = other DNA
aaaaaaaaaaaaaaacattg

SEQ ID NO: 65567 - DNA, 20 bp, synthetic construct
  source 1..20: mol_type = other DNA
aaaaaaaaaaaaaaaacatt

SEQ ID NO: 65568 - DNA, 20 bp, synthetic construct
  source 1..20: mol_type = other DNA
aaaaaaaaaaaaaaaaacat

SEQ ID NO: 65569 - DNA, 20 bp, synthetic construct
  source 1..20: mol_type = other DNA
caaaaaaaaaaaaaaaaaca

SEQ ID NO: 65570 - DNA, 20 bp, synthetic construct
  source 1..20: mol_type = other DNA
tcaaaaaaaaaaaaaaaaac

SEQ ID NO: 65571 - DNA, 20 bp, synthetic construct
  source 1..20: mol_type = other DNA
ctcaaaaaaaaaaaaaaaaa

SEQ ID NO: 65572 - DNA, 20 bp, synthetic construct
  source 1..20: mol_type = other DNA
tctcaaaaaaaaaaaaaaaa

SEQ ID NO: 65573 - DNA, 20 bp, synthetic construct
  source 1..20: mol_type = other DNA
gtctcaaaaaaaaaaaaaaa

SEQ ID NO: 65574 - DNA, 20 bp, synthetic construct
  source 1..20: mol_type = other DNA
cgtctcaaaaaaaaaaaaaa

SEQ ID NO: 65575 - DNA, 20 bp, synthetic construct
  source 1..20: mol_type = other DNA
ccgtctcaaaaaaaaaaaaa

SEQ ID NO: 65576 - DNA, 20 bp, synthetic construct
  source 1..20: mol_type = other DNA
tccgtctcaaaaaaaaaaaa

SEQ ID NO: 65577 - DNA, 20 bp, synthetic construct
  source 1..20: mol_type = other DNA
ctccgtctcaaaaaaaaaaa

SEQ ID NO: 65578 - DNA, 20 bp, synthetic construct
  source 1..20: mol_type = other DNA
actccgtctcaaaaaaaaaa

SEQ ID NO: 65579 - DNA, 20 bp, synthetic construct
  source 1..20: mol_type = other DNA
gactccgtctcaaaaaaaaa

SEQ ID NO: 65580 - DNA, 20 bp, synthetic construct
  source 1..20: mol_type = other DNA
agactccgtctcaaaaaaaa

SEQ ID NO: 65581 - DNA, 20 bp, synthetic construct
  source 1..20: mol_type = other DNA
gagactccgtctcaaaaaaa

SEQ ID NO: 65582 - DNA, 20 bp, synthetic construct
  source 1..20: mol_type = other DNA
cgagactccgtctcaaaaaa

SEQ ID NO: 65583 - DNA, 20 bp, synthetic construct
  source 1..20: mol_type = other DNA
gcgagactccgtctcaaaaa

SEQ ID NO: 65584 - DNA, 20 bp, synthetic construct
  source 1..20: mol_type = other DNA
agcgagactccgtctcaaaa

SEQ ID NO: 65585 - DNA, 20 bp, synthetic construct
  source 1..20: mol_type = other DNA
gagcgagactccgtctcaaa

SEQ ID NO: 65586 - DNA, 20 bp, synthetic construct
  source 1..20: mol_type = other DNA
agagcgagactccgtctcaa

SEQ ID NO: 65587 - DNA, 20 bp, synthetic construct
  source 1..20: mol_type = other DNA
cagagcgagactccgtctca

SEQ ID NO: 65588 - DNA, 20 bp, synthetic construct
  source 1..20: mol_type = other DNA
acagagcgagactccgtctc

SEQ ID NO: 65589 - DNA, 20 bp, synthetic construct
  source 1..20: mol_type = other DNA
gacagagcgagactccgtct

SEQ ID NO: 65590 - DNA, 20 bp, synthetic construct
  source 1..20: mol_type = other DNA
cgacagagcgagactccgtc

SEQ ID NO: 65591 - DNA, 20 bp, synthetic construct
  source 1..20: mol_type = other DNA
gcgacagagcgagactccgt

SEQ ID NO: 65592 - DNA, 20 bp, synthetic construct
  source 1..20: mol_type = other DNA
ggcgacagagcgagactccg

SEQ ID NO: 65593 - DNA, 20 bp, synthetic construct
  source 1..20: mol_type = other DNA
gggcgacagagcgagactcc

SEQ ID NO: 65594 - DNA, 20 bp, synthetic construct
  source 1..20: mol_type = other DNA
tgggcgacagagcgagactc

SEQ ID NO: 65595 - DNA, 20 bp, synthetic construct
  source 1..20: mol_type = other DNA
ctgggcgacagagcgagact

SEQ ID NO: 65596 - DNA, 20 bp, synthetic construct
  source 1..20: mol_type = other DNA
cctgggcgacagagcgagac

SEQ ID NO: 65597 - DNA, 20 bp, synthetic construct
  source 1..20: mol_type = other DNA
gcctgggcgacagagcgaga

SEQ ID NO: 65598 - DNA, 20 bp, synthetic construct
  source 1..20: mol_type = other DNA
agcctgggcgacagagcgag

SEQ ID NO: 65599 - DNA, 20 bp, synthetic construct
  source 1..20: mol_type = other DNA
cagcctgggcgacagagcga

SEQ ID NO: 65600 - DNA, 20 bp, synthetic construct
  source 1..20: mol_type = other DNA
ccagcctgggcgacagagcg

SEQ ID NO: 65601 - DNA, 20 bp, synthetic construct
  source 1..20: mol_type = other DNA
tccagcctgggcgacagagc

SEQ ID NO: 65602 - DNA, 20 bp, synthetic construct
  source 1..20: mol_type = other DNA
ctccagcctgggcgacagag

SEQ ID NO: 65603 - DNA, 20 bp, synthetic construct
  source 1..20: mol_type = other DNA
actccagcctgggcgacaga

SEQ ID NO: 65604 - DNA, 20 bp, synthetic construct
  source 1..20: mol_type = other DNA
cactccagcctgggcgacag

SEQ ID NO: 65605 - DNA, 20 bp, synthetic construct
  source 1..20: mol_type = other DNA
gcactccagcctgggcgaca

SEQ ID NO: 65606 - DNA, 20 bp, synthetic construct
  source 1..20: mol_type = other DNA
tgcactccagcctgggcgac

SEQ ID NO: 65607 - DNA, 20 bp, synthetic construct
  source 1..20: mol_type = other DNA
ctgcactccagcctgggcga

SEQ ID NO: 65608 - DNA, 20 bp, synthetic construct
  source 1..20: mol_type = other DNA
actgcactccagcctgggcg

SEQ ID NO: 65609 - DNA, 20 bp, synthetic construct
  source 1..20: mol_type = other DNA
cactgcactccagcctgggc

SEQ ID NO: 65610 - DNA, 20 bp, synthetic construct
  source 1..20: mol_type = other DNA
ccactgcactccagcctggg

SEQ ID NO: 65611 - DNA, 20 bp, synthetic construct
  source 1..20: mol_type = other DNA
gccactgcactccagcctgg

SEQ ID NO: 65612 - DNA, 20 bp, synthetic construct
  source 1..20: mol_type = other DNA
cgccactgcactccagcctg

SEQ ID NO: 65613 - DNA, 20 bp, synthetic construct
  source 1..20: mol_type = other DNA
ccgccactgcactccagcct

SEQ ID NO: 65614 - DNA, 20 bp, synthetic construct
  source 1..20: mol_type = other DNA
cccgccactgcactccagcc

SEQ ID NO: 65615 - DNA, 20 bp, synthetic construct
  source 1..20: mol_type = other DNA
tcccgccactgcactccagc

SEQ ID NO: 65616 - DNA, 20 bp, synthetic construct
  source 1..20: mol_type = other DNA
atcccgccactgcactccag

SEQ ID NO: 65617 - DNA, 20 bp, synthetic construct
  source 1..20: mol_type = other DNA
gatcccgccactgcactcca

SEQ ID NO: 65618 - DNA, 20 bp, synthetic construct
  source 1..20: mol_type = other DNA
agatcccgccactgcactcc

SEQ ID NO: 65619 - DNA, 20 bp, synthetic construct
  source 1..20: mol_type = other DNA
gagatcccgccactgcactc

SEQ ID NO: 65620 - DNA, 20 bp, synthetic construct
  source 1..20: mol_type = other DNA
cgagatcccgccactgcact

SEQ ID NO: 65621 - DNA, 20 bp, synthetic construct
  source 1..20: mol_type = other DNA
ccgagatcccgccactgcac

SEQ ID NO: 65622 - DNA, 20 bp, synthetic construct
  source 1..20: mol_type = other DNA
gccgagatcccgccactgca

SEQ ID NO: 65623 - DNA, 20 bp, synthetic construct
  source 1..20: mol_type = other DNA
agccgagatcccgccactgc

SEQ ID NO: 65624 - DNA, 20 bp, synthetic construct
  source 1..20: mol_type = other DNA
gagccgagatcccgccactg

SEQ ID NO: 65625 - DNA, 20 bp, synthetic construct
  source 1..20: mol_type = other DNA
tgagccgagatcccgccact

SEQ ID NO: 65626 - DNA, 20 bp, synthetic construct
  source 1..20: mol_type = other DNA
gtgagccgagatcccgccac

SEQ ID NO: 65627 - DNA, 20 bp, synthetic construct
  source 1..20: mol_type = other DNA
agtgagccgagatcccgcca

SEQ ID NO: 65628 - DNA, 20 bp, synthetic construct
  source 1..20: mol_type = other DNA
cagtgagccgagatcccgcc

SEQ ID NO: 65629 - DNA, 20 bp, synthetic construct
  source 1..20: mol_type = other DNA
gcagtgagccgagatcccgc

SEQ ID NO: 65630 - DNA, 20 bp, synthetic construct
  source 1..20: mol_type = other DNA
tgcagtgagccgagatcccg

SEQ ID NO: 65631 - DNA, 20 bp, synthetic construct
  source 1..20: mol_type = other DNA
ttgcagtgagccgagatccc

SEQ ID NO: 65632 - DNA, 20 bp, synthetic construct
  source 1..20: mol_type = other DNA
cttgcagtgagccgagatcc

SEQ ID NO: 65633 - DNA, 20 bp, synthetic construct
  source 1..20: mol_type = other DNA
gcttgcagtgagccgagatc

SEQ ID NO: 65634 - DNA, 20 bp, synthetic construct
  source 1..20: mol_type = other DNA
agcttgcagtgagccgagat

SEQ ID NO: 65635 - DNA, 20 bp, synthetic construct
  source 1..20: mol_type = other DNA
gagcttgcagtgagccgaga

SEQ ID NO: 65636 - DNA, 20 bp, synthetic construct
  source 1..20: mol_type = other DNA
ggagcttgcagtgagccgag

SEQ ID NO: 65637 - DNA, 20 bp, synthetic construct
  source 1..20: mol_type = other DNA
cggagcttgcagtgagccga

SEQ ID NO: 65638 - DNA, 20 bp, synthetic construct
  source 1..20: mol_type = other DNA
gcggagcttgcagtgagccg

SEQ ID NO: 65639 - DNA, 20 bp, synthetic construct
  source 1..20: mol_type = other DNA
ggcggagcttgcagtgagcc

SEQ ID NO: 65640 - DNA, 20 bp, synthetic construct
  source 1..20: mol_type = other DNA
aggcggagcttgcagtgagc

SEQ ID NO: 65641 - DNA, 20 bp, synthetic construct
  source 1..20: mol_type = other DNA
gaggcggagcttgcagtgag

SEQ ID NO: 65642 - DNA, 20 bp, synthetic construct
  source 1..20: mol_type = other DNA
ggaggcggagcttgcagtga

SEQ ID NO: 65643 - DNA, 20 bp, synthetic construct
  source 1..20: mol_type = other DNA
aggaggcggagcttgcagtg

SEQ ID NO: 65644 - DNA, 20 bp, synthetic construct
  source 1..20: mol_type = other DNA
caggaggcggagcttgcagt

SEQ ID NO: 65645 - DNA, 20 bp, synthetic construct
  source 1..20: mol_type = other DNA
ccaggaggcggagcttgcag

SEQ ID NO: 65646 - DNA, 20 bp, synthetic construct
  source 1..20: mol_type = other DNA
cccaggaggcggagcttgca

SEQ ID NO: 65647 - DNA, 20 bp, synthetic construct
  source 1..20: mol_type = other DNA
acccaggaggcggagcttgc

SEQ ID NO: 65648 - DNA, 20 bp, synthetic construct
  source 1..20: mol_type = other DNA
aacccaggaggcggagcttg

SEQ ID NO: 65649 - DNA, 20 bp, synthetic construct
  source 1..20: mol_type = other DNA
gaacccaggaggcggagctt

SEQ ID NO: 65650 - DNA, 20 bp, synthetic construct
  source 1..20: mol_type = other DNA
tgaacccaggaggcggagct

SEQ ID NO: 65651 - DNA, 20 bp, synthetic construct
  source 1..20: mol_type = other DNA
gtgaacccaggaggcggagc

SEQ ID NO: 65652 - DNA, 20 bp, synthetic construct
  source 1..20: mol_type = other DNA
cgtgaacccaggaggcggag

SEQ ID NO: 65653 - DNA, 20 bp, synthetic construct
  source 1..20: mol_type = other DNA
gcgtgaacccaggaggcgga

SEQ ID NO: 65654 - DNA, 20 bp, synthetic construct
  source 1..20: mol_type = other DNA
ggcgtgaacccaggaggcgg

SEQ ID NO: 65655 - DNA, 20 bp, synthetic construct
  source 1..20: mol_type = other DNA
tggcgtgaacccaggaggcg

SEQ ID NO: 65656 - DNA, 20 bp, synthetic construct
  source 1..20: mol_type = other DNA
atggcgtgaacccaggaggc

SEQ ID NO: 65657 - DNA, 20 bp, synthetic construct
  source 1..20: mol_type = other DNA
aatggcgtgaacccaggagg

SEQ ID NO: 65658 - DNA, 20 bp, synthetic construct
  source 1..20: mol_type = other DNA
gaatggcgtgaacccaggag

SEQ ID NO: 65659 - DNA, 20 bp, synthetic construct
  source 1..20: mol_type = other DNA
agaatggcgtgaacccagga

SEQ ID NO: 65660 - DNA, 20 bp, synthetic construct
  source 1..20: mol_type = other DNA
gagaatggcgtgaacccagg

SEQ ID NO: 65661 - DNA, 20 bp, synthetic construct
  source 1..20: mol_type = other DNA
ggagaatggcgtgaacccag

SEQ ID NO: 65662 - DNA, 20 bp, synthetic construct
  source 1..20: mol_type = other DNA
aggagaatggcgtgaaccca

SEQ ID NO: 65663 - DNA, 20 bp, synthetic construct
  source 1..20: mol_type = other DNA
caggagaatggcgtgaaccc

SEQ ID NO: 65664 - DNA, 20 bp, synthetic construct
  source 1..20: mol_type = other DNA
gcaggagaatggcgtgaacc

SEQ ID NO: 65665 - DNA, 20 bp, synthetic construct
  source 1..20: mol_type = other DNA
ggcaggagaatggcgtgaac

SEQ ID NO: 65666 - DNA, 20 bp, synthetic construct
  source 1..20: mol_type = other DNA
aggcaggagaatggcgtgaa

SEQ ID NO: 65667 - DNA, 20 bp, synthetic construct
  source 1..20: mol_type = other DNA
gaggcaggagaatggcgtga

SEQ ID NO: 65668 - DNA, 20 bp, synthetic construct
  source 1..20: mol_type = other DNA
tgaggcaggagaatggcgtg

SEQ ID NO: 65669 - DNA, 20 bp, synthetic construct
  source 1..20: mol_type = other DNA
ctgaggcaggagaatggcgt

SEQ ID NO: 65670 - DNA, 20 bp, synthetic construct
  source 1..20: mol_type = other DNA
gctgaggcaggagaatggcg

SEQ ID NO: 65671 - DNA, 20 bp, synthetic construct
  source 1..20: mol_type = other DNA
ggctgaggcaggagaatggc

SEQ ID NO: 65672 - DNA, 20 bp, synthetic construct
  source 1..20: mol_type = other DNA
aggctgaggcaggagaatgg

SEQ ID NO: 65673 - DNA, 20 bp, synthetic construct
  source 1..20: mol_type = other DNA
gaggctgaggcaggagaatg

SEQ ID NO: 65674 - DNA, 20 bp, synthetic construct
  source 1..20: mol_type = other DNA
ggaggctgaggcaggagaat

SEQ ID NO: 65675 - DNA, 20 bp, synthetic construct
  source 1..20: mol_type = other DNA
gggaggctgaggcaggagaa

SEQ ID NO: 65676 - DNA, 20 bp, synthetic construct
  source 1..20: mol_type = other DNA
tgggaggctgaggcaggaga

SEQ ID NO: 65677 - DNA, 20 bp, synthetic construct
  source 1..20: mol_type = other DNA
ttgggaggctgaggcaggag

SEQ ID NO: 65678 - DNA, 20 bp, synthetic construct
  source 1..20: mol_type = other DNA
cttgggaggctgaggcagga

SEQ ID NO: 65679 - DNA, 20 bp, synthetic construct
  source 1..20: mol_type = other DNA
acttgggaggctgaggcagg

SEQ ID NO: 65680 - DNA, 20 bp, synthetic construct
  source 1..20: mol_type = other DNA
tacttgggaggctgaggcag

SEQ ID NO: 65681 - DNA, 20 bp, synthetic construct
  source 1..20: mol_type = other DNA
ctacttgggaggctgaggca

SEQ ID NO: 65682 - DNA, 20 bp, synthetic construct
  source 1..20: mol_type = other DNA
gctacttgggaggctgaggc

SEQ ID NO: 65683 - DNA, 20 bp, synthetic construct
  source 1..20: mol_type = other DNA
agctacttgggaggctgagg

SEQ ID NO: 65684 - DNA, 20 bp, synthetic construct
  source 1..20: mol_type = other DNA
cagctacttgggaggctgag

SEQ ID NO: 65685 - DNA, 20 bp, synthetic construct
  source 1..20: mol_type = other DNA
ccagctacttgggaggctga

SEQ ID NO: 65686 - DNA, 20 bp, synthetic construct
  source 1..20: mol_type = other DNA
cccagctacttgggaggctg

SEQ ID NO: 65687 - DNA, 20 bp, synthetic construct
  source 1..20: mol_type = other DNA
tcccagctacttgggaggct

SEQ ID NO: 65688 - DNA, 20 bp, synthetic construct
  source 1..20: mol_type = other DNA
gtcccagctacttgggaggc

SEQ ID NO: 65689 - DNA, 20 bp, synthetic construct
  source 1..20: mol_type = other DNA
agtcccagctacttgggagg

SEQ ID NO: 65690 - DNA, 20 bp, synthetic construct
  source 1..20: mol_type = other DNA
tagtcccagctacttgggag

SEQ ID NO: 65691 - DNA, 20 bp, synthetic construct
  source 1..20: mol_type = other DNA
gtagtcccagctacttggga

SEQ ID NO: 65692 - DNA, 20 bp, synthetic construct
  source 1..20: mol_type = other DNA
tgtagtcccagctacttggg

SEQ ID NO: 65693 - DNA, 20 bp, synthetic construct
  source 1..20: mol_type = other DNA
ctgtagtcccagctacttgg

SEQ ID NO: 65694 - DNA, 20 bp, synthetic construct
  source 1..20: mol_type = other DNA
cctgtagtcccagctacttg

SEQ ID NO: 65695 - DNA, 20 bp, synthetic construct
  source 1..20: mol_type = other DNA
gcctgtagtcccagctactt

SEQ ID NO: 65696 - DNA, 20 bp, synthetic construct
  source 1..20: mol_type = other DNA
cgcctgtagtcccagctact

SEQ ID NO: 65697 - DNA, 20 bp, synthetic construct
  source 1..20: mol_type = other DNA
gcgcctgtagtcccagctac

SEQ ID NO: 65698 - DNA, 20 bp, synthetic construct
  source 1..20: mol_type = other DNA
ggcgcctgtagtcccagcta

SEQ ID NO: 65699 - DNA, 20 bp, synthetic construct
  source 1..20: mol_type = other DNA
gggcgcctgtagtcccagct

SEQ ID NO: 65700 - DNA, 20 bp, synthetic construct
  source 1..20: mol_type = other DNA
cgggcgcctgtagtcccagc

SEQ ID NO: 65701 - DNA, 20 bp, synthetic construct
  source 1..20: mol_type = other DNA
gcgggcgcctgtagtcccag

SEQ ID NO: 65702 - DNA, 20 bp, synthetic construct
  source 1..20: mol_type = other DNA
ggcgggcgcctgtagtccca

SEQ ID NO: 65703 - DNA, 20 bp, synthetic construct
  source 1..20: mol_type = other DNA
tggcgggcgcctgtagtccc

SEQ ID NO: 65704 - DNA, 20 bp, synthetic construct
  source 1..20: mol_type = other DNA
gtggcgggcgcctgtagtcc

SEQ ID NO: 65705 - DNA, 20 bp, synthetic construct
  source 1..20: mol_type = other DNA
agtggcgggcgcctgtagtc

SEQ ID NO: 65706 - DNA, 20 bp, synthetic construct
  source 1..20: mol_type = other DNA
tagtggcgggcgcctgtagt

SEQ ID NO: 65707 - DNA, 20 bp, synthetic construct
  source 1..20: mol_type = other DNA
gtagtggcgggcgcctgtag

SEQ ID NO: 65708 - DNA, 20 bp, synthetic construct
  source 1..20: mol_type = other DNA
cgtagtggcgggcgcctgta

SEQ ID NO: 65709 - DNA, 20 bp, synthetic construct
  source 1..20: mol_type = other DNA
gcgtagtggcgggcgcctgt

SEQ ID NO: 65710 - DNA, 20 bp, synthetic construct
  source 1..20: mol_type = other DNA
ggcgtagtggcgggcgcctg

SEQ ID NO: 65711 - DNA, 20 bp, synthetic construct
  source 1..20: mol_type = other DNA
gggcgtagtggcgggcgcct

SEQ ID NO: 65712 - DNA, 20 bp, synthetic construct
  source 1..20: mol_type = other DNA
cgggcgtagtggcgggcgcc

SEQ ID NO: 65713 - DNA, 20 bp, synthetic construct
  source 1..20: mol_type = other DNA
ccgggcgtagtggcgggcgc

SEQ ID NO: 65714 - DNA, 20 bp, synthetic construct
  source 1..20: mol_type = other DNA
gccgggcgtagtggcgggcg

SEQ ID NO: 65715 - DNA, 20 bp, synthetic construct
  source 1..20: mol_type = other DNA
agccgggcgtagtggcgggc

SEQ ID NO: 65716 - DNA, 20 bp, synthetic construct
  source 1..20: mol_type = other DNA
tagccgggcgtagtggcggg

SEQ ID NO: 65717 - DNA, 20 bp, synthetic construct
  source 1..20: mol_type = other DNA
ttagccgggcgtagtggcgg

SEQ ID NO: 65718 - DNA, 20 bp, synthetic construct
  source 1..20: mol_type = other DNA
attagccgggcgtagtggcg

SEQ ID NO: 65719 - DNA, 20 bp, synthetic construct
  source 1..20: mol_type = other DNA
aattagccgggcgtagtggc

SEQ ID NO: 65720 - DNA, 20 bp, synthetic construct
  source 1..20: mol_type = other DNA
aaattagccgggcgtagtgg

SEQ ID NO: 65721 - DNA, 20 bp, synthetic construct
  source 1..20: mol_type = other DNA
aaaattagccgggcgtagtg

SEQ ID NO: 65722 - DNA, 20 bp, synthetic construct
  source 1..20: mol_type = other DNA
aaaaattagccgggcgtagt

SEQ ID NO: 65723 - DNA, 20 bp, synthetic construct
  source 1..20: mol_type = other DNA
aaaaaattagccgggcgtag

SEQ ID NO: 65724 - DNA, 20 bp, synthetic construct
  source 1..20: mol_type = other DNA
caaaaaattagccgggcgta

SEQ ID NO: 65725 - DNA, 20 bp, synthetic construct
  source 1..20: mol_type = other DNA
acaaaaaattagccgggcgt

SEQ ID NO: 65726 - DNA, 20 bp, synthetic construct
  source 1..20: mol_type = other DNA
tacaaaaaattagccgggcg

SEQ ID NO: 65727 - DNA, 20 bp, synthetic construct
  source 1..20: mol_type = other DNA
atacaaaaaattagccgggc

SEQ ID NO: 65728 - DNA, 20 bp, synthetic construct
  source 1..20: mol_type = other DNA
aatacaaaaaattagccggg

SEQ ID NO: 65729 - DNA, 20 bp, synthetic construct
  source 1..20: mol_type = other DNA
aaatacaaaaaattagccgg

SEQ ID NO: 65730 - DNA, 20 bp, synthetic construct
  source 1..20: mol_type = other DNA
aaaatacaaaaaattagccg

SEQ ID NO: 65731 - DNA, 20 bp, synthetic construct
  source 1..20: mol_type = other DNA
aaaaatacaaaaaattagcc

SEQ ID NO: 65732 - DNA, 20 bp, synthetic construct
  source 1..20: mol_type = other DNA
taaaaatacaaaaaattagc

SEQ ID NO: 65733 - DNA, 20 bp, synthetic construct
  source 1..20: mol_type = other DNA
ctaaaaatacaaaaaattag

SEQ ID NO: 65734 - DNA, 20 bp, synthetic construct
  source 1..20: mol_type = other DNA
actaaaaatacaaaaaatta

SEQ ID NO: 65735 - DNA, 20 bp, synthetic construct
  source 1..20: mol_type = other DNA
tactaaaaatacaaaaaatt

SEQ ID NO: 65736 - DNA, 20 bp, synthetic construct
  source 1..20: mol_type = other DNA
ctactaaaaatacaaaaaat

SEQ ID NO: 65737 - DNA, 20 bp, synthetic construct
  source 1..20: mol_type = other DNA
tctactaaaaatacaaaaaa

SEQ ID NO: 65738 - DNA, 20 bp, synthetic construct
  source 1..20: mol_type = other DNA
ctctactaaaaatacaaaaa

SEQ ID NO: 65739 - DNA, 20 bp, synthetic construct
  source 1..20: mol_type = other DNA
tctctactaaaaatacaaaa

SEQ ID NO: 65740 - DNA, 20 bp, synthetic construct
  source 1..20: mol_type = other DNA
gtctctactaaaaatacaaa

SEQ ID NO: 65741 - DNA, 20 bp, synthetic construct
  source 1..20: mol_type = other DNA
cgtctctactaaaaatacaa

SEQ ID NO: 65742 - DNA, 20 bp, synthetic construct
  source 1..20: mol_type = other DNA
ccgtctctactaaaaataca

SEQ ID NO: 65743 - DNA, 20 bp, synthetic construct
  source 1..20: mol_type = other DNA
cccgtctctactaaaaatac

SEQ ID NO: 65744 - DNA, 20 bp, synthetic construct
  source 1..20: mol_type = other DNA
ccccgtctctactaaaaata

SEQ ID NO: 65745 - DNA, 20 bp, synthetic construct
  source 1..20: mol_type = other DNA
accccgtctctactaaaaat

SEQ ID NO: 65746 - DNA, 20 bp, synthetic construct
  source 1..20: mol_type = other DNA
aaccccgtctctactaaaaa

SEQ ID NO: 65747 - DNA, 20 bp, synthetic construct
  source 1..20: mol_type = other DNA
aaaccccgtctctactaaaa

SEQ ID NO: 65748 - DNA, 20 bp, synthetic construct
  source 1..20: mol_type = other DNA
gaaaccccgtctctactaaa

SEQ ID NO: 65749 - DNA, 20 bp, synthetic construct
  source 1..20: mol_type = other DNA
tgaaaccccgtctctactaa

SEQ ID NO: 65750 - DNA, 20 bp, synthetic construct
  source 1..20: mol_type = other DNA
gtgaaaccccgtctctacta

SEQ ID NO: 65751 - DNA, 20 bp, synthetic construct
  source 1..20: mol_type = other DNA
ggtgaaaccccgtctctact

SEQ ID NO: 65752 - DNA, 20 bp, synthetic construct
  source 1..20: mol_type = other DNA
cggtgaaaccccgtctctac

SEQ ID NO: 65753 - DNA, 20 bp, synthetic construct
  source 1..20: mol_type = other DNA
acggtgaaaccccgtctcta

SEQ ID NO: 65754 - DNA, 20 bp, synthetic construct
  source 1..20: mol_type = other DNA
aacggtgaaaccccgtctct

SEQ ID NO: 65755 - DNA, 20 bp, synthetic construct
  source 1..20: mol_type = other DNA
aaacggtgaaaccccgtctc

SEQ ID NO: 65756 - DNA, 20 bp, synthetic construct
  source 1..20: mol_type = other DNA
aaaacggtgaaaccccgtct

SEQ ID NO: 65757 - DNA, 20 bp, synthetic construct
  source 1..20: mol_type = other DNA
taaaacggtgaaaccccgtc

SEQ ID NO: 65758 - DNA, 20 bp, synthetic construct
  source 1..20: mol_type = other DNA
ctaaaacggtgaaaccccgt

SEQ ID NO: 65759 - DNA, 20 bp, synthetic construct
  source 1..20: mol_type = other DNA
gctaaaacggtgaaaccccg

SEQ ID NO: 65760 - DNA, 20 bp, synthetic construct
  source 1..20: mol_type = other DNA
ggctaaaacggtgaaacccc

SEQ ID NO: 65761 - DNA, 20 bp, synthetic construct
  source 1..20: mol_type = other DNA
cggctaaaacggtgaaaccc

SEQ ID NO: 65762 - DNA, 20 bp, synthetic construct
  source 1..20: mol_type = other DNA
ccggctaaaacggtgaaacc

SEQ ID NO: 65763 - DNA, 20 bp, synthetic construct
  source 1..20: mol_type = other DNA
cccggctaaaacggtgaaac

SEQ ID NO: 65764 - DNA, 20 bp, synthetic construct
  source 1..20: mol_type = other DNA
tcccggctaaaacggtgaaa

SEQ ID NO: 65765 - DNA, 20 bp, synthetic construct
  source 1..20: mol_type = other DNA
atcccggctaaaacggtgaa

SEQ ID NO: 65766 - DNA, 20 bp, synthetic construct
  source 1..20: mol_type = other DNA
catcccggctaaaacggtga

SEQ ID NO: 65767 - DNA, 20 bp, synthetic construct
  source 1..20: mol_type = other DNA
ccatcccggctaaaacggtg

SEQ ID NO: 65768 - DNA, 20 bp, synthetic construct
  source 1..20: mol_type = other DNA
accatcccggctaaaacggt

SEQ ID NO: 65769 - DNA, 20 bp, synthetic construct
  source 1..20: mol_type = other DNA
gaccatcccggctaaaacgg

SEQ ID NO: 65770 - DNA, 20 bp, synthetic construct
  source 1..20: mol_type = other DNA
agaccatcccggctaaaacg

SEQ ID NO: 65771 - DNA, 20 bp, synthetic construct
  source 1..20: mol_type = other DNA
gagaccatcccggctaaaac

SEQ ID NO: 65772 - DNA, 20 bp, synthetic construct
  source 1..20: mol_type = other DNA
cgagaccatcccggctaaaa

SEQ ID NO: 65773 - DNA, 20 bp, synthetic construct
  source 1..20: mol_type = other DNA
tcgagaccatcccggctaaa

SEQ ID NO: 65774 - DNA, 20 bp, synthetic construct
  source 1..20: mol_type = other DNA
atcgagaccatcccggctaa

SEQ ID NO: 65775 - DNA, 20 bp, synthetic construct
  source 1..20: mol_type = other DNA
gatcgagaccatcccggcta

SEQ ID NO: 65776 - DNA, 20 bp, synthetic construct
  source 1..20: mol_type = other DNA
agatcgagaccatcccggct

SEQ ID NO: 65777 - DNA, 20 bp, synthetic construct
  source 1..20: mol_type = other DNA
gagatcgagaccatcccggc

SEQ ID NO: 65778 - DNA, 20 bp, synthetic construct
  source 1..20: mol_type = other DNA
ggagatcgagaccatcccgg

SEQ ID NO: 65779 - DNA, 20 bp, synthetic construct
  source 1..20: mol_type = other DNA
aggagatcgagaccatcccg

SEQ ID NO: 65780 - DNA, 20 bp, synthetic construct
  source 1..20: mol_type = other DNA
caggagatcgagaccatccc

SEQ ID NO: 65781 - DNA, 20 bp, synthetic construct
  source 1..20: mol_type = other DNA
tcaggagatcgagaccatcc

SEQ ID NO: 65782 - DNA, 20 bp, synthetic construct
  source 1..20: mol_type = other DNA
gtcaggagatcgagaccatc

SEQ ID NO: 65783 - DNA, 20 bp, synthetic construct
  source 1..20: mol_type = other DNA
ggtcaggagatcgagaccat

SEQ ID NO: 65784 - DNA, 20 bp, synthetic construct
  source 1..20: mol_type = other DNA
aggtcaggagatcgagacca

SEQ ID NO: 65785 - DNA, 20 bp, synthetic construct
  source 1..20: mol_type = other DNA
gaggtcaggagatcgagacc

SEQ ID NO: 65786 - DNA, 20 bp, synthetic construct
  source 1..20: mol_type = other DNA
cgaggtcaggagatcgagac

SEQ ID NO: 65787 - DNA, 20 bp, synthetic construct
  source 1..20: mol_type = other DNA
acgaggtcaggagatcgaga

SEQ ID NO: 65788 - DNA, 20 bp, synthetic construct
  source 1..20: mol_type = other DNA
cacgaggtcaggagatcgag

SEQ ID NO: 65789 - DNA, 20 bp, synthetic construct
  source 1..20: mol_type = other DNA
tcacgaggtcaggagatcga

SEQ ID NO: 65790 - DNA, 20 bp, synthetic construct
  source 1..20: mol_type = other DNA
atcacgaggtcaggagatcg

SEQ ID NO: 65791 - DNA, 20 bp, synthetic construct
  source 1..20: mol_type = other DNA
gatcacgaggtcaggagatc

SEQ ID NO: 65792 - DNA, 20 bp, synthetic construct
  source 1..20: mol_type = other DNA
ggatcacgaggtcaggagat

SEQ ID NO: 65793 - DNA, 20 bp, synthetic construct
  source 1..20: mol_type = other DNA
cggatcacgaggtcaggaga

SEQ ID NO: 65794 - DNA, 20 bp, synthetic construct
  source 1..20: mol_type = other DNA
gcggatcacgaggtcaggag

SEQ ID NO: 65795 - DNA, 20 bp, synthetic construct
  source 1..20: mol_type = other DNA
ggcggatcacgaggtcagga

SEQ ID NO: 65796 - DNA, 20 bp, synthetic construct
  source 1..20: mol_type = other DNA
gggcggatcacgaggtcagg

SEQ ID NO: 65797 - DNA, 20 bp, synthetic construct
  source 1..20: mol_type = other DNA
tgggcggatcacgaggtcag

SEQ ID NO: 65798 - DNA, 20 bp, synthetic construct
  source 1..20: mol_type = other DNA
gtgggcggatcacgaggtca

SEQ ID NO: 65799 - DNA, 20 bp, synthetic construct
  source 1..20: mol_type = other DNA
ggtgggcggatcacgaggtc

SEQ ID NO: 65800 - DNA, 20 bp, synthetic construct
  source 1..20: mol_type = other DNA
aggtgggcggatcacgaggt

SEQ ID NO: 65801 - DNA, 20 bp, synthetic construct
  source 1..20: mol_type = other DNA
gaggtgggcggatcacgagg

SEQ ID NO: 65802 - DNA, 20 bp, synthetic construct
  source 1..20: mol_type = other DNA
cgaggtgggcggatcacgag

SEQ ID NO: 65803 - DNA, 20 bp, synthetic construct
  source 1..20: mol_type = other DNA
ccgaggtgggcggatcacga

SEQ ID NO: 65804 - DNA, 20 bp, synthetic construct
  source 1..20: mol_type = other DNA
gccgaggtgggcggatcacg

SEQ ID NO: 65805 - DNA, 20 bp, synthetic construct
  source 1..20: mol_type = other DNA
ggccgaggtgggcggatcac

SEQ ID NO: 65806 - DNA, 20 bp, synthetic construct
  source 1..20: mol_type = other DNA
aggccgaggtgggcggatca

SEQ ID NO: 65807 - DNA, 20 bp, synthetic construct
  source 1..20: mol_type = other DNA
gaggccgaggtgggcggatc

SEQ ID NO: 65808 - DNA, 20 bp, synthetic construct
  source 1..20: mol_type = other DNA
ggaggccgaggtgggcggat

SEQ ID NO: 65809 - DNA, 20 bp, synthetic construct
  source 1..20: mol_type = other DNA
gggaggccgaggtgggcgga

SEQ ID NO: 65810 - DNA, 20 bp, synthetic construct
  source 1..20: mol_type = other DNA
tgggaggccgaggtgggcgg

SEQ ID NO: 65811 - DNA, 20 bp, synthetic construct
  source 1..20: mol_type = other DNA
ttgggaggccgaggtgggcg

SEQ ID NO: 65812 - DNA, 20 bp, synthetic construct
  source 1..20: mol_type = other DNA
tttgggaggccgaggtgggc

SEQ ID NO: 65813 - DNA, 20 bp, synthetic construct
  source 1..20: mol_type = other DNA
ctttgggaggccgaggtggg

SEQ ID NO: 65814 - DNA, 20 bp, synthetic construct
  source 1..20: mol_type = other DNA
actttgggaggccgaggtgg

SEQ ID NO: 65815 - DNA, 20 bp, synthetic construct
  source 1..20: mol_type = other DNA
cactttgggaggccgaggtg

SEQ ID NO: 65816 - DNA, 20 bp, synthetic construct
  source 1..20: mol_type = other DNA
gcactttgggaggccgaggt

SEQ ID NO: 65817 - DNA, 20 bp, synthetic construct
  source 1..20: mol_type = other DNA
agcactttgggaggccgagg

SEQ ID NO: 65818 - DNA, 20 bp, synthetic construct
  source 1..20: mol_type = other DNA
cagcactttgggaggccgag

SEQ ID NO: 65819 - DNA, 20 bp, synthetic construct
  source 1..20: mol_type = other DNA
ccagcactttgggaggccga

SEQ ID NO: 65820 - DNA, 20 bp, synthetic construct
  source 1..20: mol_type = other DNA
cccagcactttgggaggccg

SEQ ID NO: 65821 - DNA, 20 bp, synthetic construct
  source 1..20: mol_type = other DNA
tcccagcactttgggaggcc

SEQ ID NO: 65822 - DNA, 20 bp, synthetic construct
  source 1..20: mol_type = other DNA
atcccagcactttgggaggc

SEQ ID NO: 65823 - DNA, 20 bp, synthetic construct
  source 1..20: mol_type = other DNA
aatcccagcactttgggagg

SEQ ID NO: 65824 - DNA, 20 bp, synthetic construct
  source 1..20: mol_type = other DNA
taatcccagcactttgggag

SEQ ID NO: 65825 - DNA, 20 bp, synthetic construct
  source 1..20: mol_type = other DNA
gtaatcccagcactttggga

SEQ ID NO: 65826 - DNA, 20 bp, synthetic construct
  source 1..20: mol_type = other DNA
tgtaatcccagcactttggg

SEQ ID NO: 65827 - DNA, 20 bp, synthetic construct
  source 1..20: mol_type = other DNA
ctgtaatcccagcactttgg

SEQ ID NO: 65828 - DNA, 20 bp, synthetic construct
  source 1..20: mol_type = other DNA
cctgtaatcccagcactttg

SEQ ID NO: 65829 - DNA, 20 bp, synthetic construct
  source 1..20: mol_type = other DNA
gcctgtaatcccagcacttt

SEQ ID NO: 65830 - DNA, 20 bp, synthetic construct
  source 1..20: mol_type = other DNA
cgcctgtaatcccagcactt

SEQ ID NO: 65831 - DNA, 20 bp, synthetic construct
  source 1..20: mol_type = other DNA
acgcctgtaatcccagcact

SEQ ID NO: 65832 - DNA, 20 bp, synthetic construct
  source 1..20: mol_type = other DNA
cacgcctgtaatcccagcac

SEQ ID NO: 65833 - DNA, 20 bp, synthetic construct
  source 1..20: mol_type = other DNA
tcacgcctgtaatcccagca

SEQ ID NO: 65834 - DNA, 20 bp, synthetic construct
  source 1..20: mol_type = other DNA
ctcacgcctgtaatcccagc

SEQ ID NO: 65835 - DNA, 20 bp, synthetic construct
  source 1..20: mol_type = other DNA
gctcacgcctgtaatcccag

SEQ ID NO: 65836 - DNA, 20 bp, synthetic construct
  source 1..20: mol_type = other DNA
ggctcacgcctgtaatccca

SEQ ID NO: 65837 - DNA, 20 bp, synthetic construct
  source 1..20: mol_type = other DNA
tggctcacgcctgtaatccc

SEQ ID NO: 65838 - DNA, 20 bp, synthetic construct
  source 1..20: mol_type = other DNA
gtggctcacgcctgtaatcc

SEQ ID NO: 65839 - DNA, 20 bp, synthetic construct
  source 1..20: mol_type = other DNA
ggtggctcacgcctgtaatc

SEQ ID NO: 65840 - DNA, 20 bp, synthetic construct
  source 1..20: mol_type = other DNA
cggtggctcacgcctgtaat

SEQ ID NO: 65841 - DNA, 20 bp, synthetic construct
  source 1..20: mol_type = other DNA
gcggtggctcacgcctgtaa

SEQ ID NO: 65842 - DNA, 20 bp, synthetic construct
  source 1..20: mol_type = other DNA
cgcggtggctcacgcctgta

SEQ ID NO: 65843 - DNA, 20 bp, synthetic construct
  source 1..20: mol_type = other DNA
gcgcggtggctcacgcctgt

SEQ ID NO: 65844 - DNA, 20 bp, synthetic construct
  source 1..20: mol_type = other DNA
ggcgcggtggctcacgcctg

SEQ ID NO: 65845 - DNA, 20 bp, synthetic construct
  source 1..20: mol_type = other DNA
gggcgcggtggctcacgcct

SEQ ID NO: 65846 - DNA, 20 bp, synthetic construct
  source 1..20: mol_type = other DNA
cgggcgcggtggctcacgcc

SEQ ID NO: 65847 - DNA, 20 bp, synthetic construct
  source 1..20: mol_type = other DNA
ccgggcgcggtggctcacgc

SEQ ID NO: 65848 - DNA, 20 bp, synthetic construct
  source 1..20: mol_type = other DNA
gccgggcgcggtggctcacg

SEQ ID NO: 65849 - DNA, 20 bp, synthetic construct
  source 1..20: mol_type = other DNA
ggccgggcgcggtggctcac

SEQ ID NO: 65850 - DNA, 20 bp, synthetic construct
  source 1..20: mol_type = other DNA
aggccgggcgcggtggctca

SEQ ID NO: 65851 - DNA, 20 bp, synthetic construct
  source 1..20: mol_type = other DNA
taggccgggcgcggtggctc

SEQ ID NO: 65852 - DNA, 20 bp, synthetic construct
  source 1..20: mol_type = other DNA
ataggccgggcgcggtggct

SEQ ID NO: 65853 - DNA, 20 bp, synthetic construct
  source 1..20: mol_type = other DNA
aataggccgggcgcggtggc

SEQ ID NO: 65854 - DNA, 20 bp, synthetic construct
  source 1..20: mol_type = other DNA
aaataggccgggcgcggtgg

SEQ ID NO: 65855 - DNA, 20 bp, synthetic construct
  source 1..20: mol_type = other DNA
gaaataggccgggcgcggtg

SEQ ID NO: 65856 - DNA, 20 bp, synthetic construct
  source 1..20: mol_type = other DNA
ggaaataggccgggcgcggt

SEQ ID NO: 65857 - DNA, 20 bp, synthetic construct
  source 1..20: mol_type = other DNA
gggaaataggccgggcgcgg

SEQ ID NO: 65858 - DNA, 20 bp, synthetic construct
  source 1..20: mol_type = other DNA
tgggaaataggccgggcgcg

SEQ ID NO: 65859 - DNA, 20 bp, synthetic construct
  source 1..20: mol_type = other DNA
ttgggaaataggccgggcgc

SEQ ID NO: 65860 - DNA, 20 bp, synthetic construct
  source 1..20: mol_type = other DNA
attgggaaataggccgggcg

SEQ ID NO: 65861 - DNA, 20 bp, synthetic construct
  source 1..20: mol_type = other DNA
cattgggaaataggccgggc

SEQ ID NO: 65862 - DNA, 20 bp, synthetic construct
  source 1..20: mol_type = other DNA
acattgggaaataggccggg

SEQ ID NO: 65863 - DNA, 20 bp, synthetic construct
  source 1..20: mol_type = other DNA
aacattgggaaataggccgg

SEQ ID NO: 65864 - DNA, 20 bp, synthetic construct
  source 1..20: mol_type = other DNA
taacattgggaaataggccg

SEQ ID NO: 65865 - DNA, 20 bp, synthetic construct
  source 1..20: mol_type = other DNA
ttaacattgggaaataggcc

SEQ ID NO: 65866 - DNA, 20 bp, synthetic construct
  source 1..20: mol_type = other DNA
attaacattgggaaataggc

SEQ ID NO: 65867 - DNA, 20 bp, synthetic construct
  source 1..20: mol_type = other DNA
gattaacattgggaaatagg

SEQ ID NO: 65868 - DNA, 20 bp, synthetic construct
  source 1..20: mol_type = other DNA
agattaacattgggaaatag

SEQ ID NO: 65869 - DNA, 20 bp, synthetic construct
  source 1..20: mol_type = other DNA
tagattaacattgggaaata

SEQ ID NO: 65870 - DNA, 20 bp, synthetic construct
  source 1..20: mol_type = other DNA
gtagattaacattgggaaat

SEQ ID NO: 65871 - DNA, 20 bp, synthetic construct
  source 1..20: mol_type = other DNA
agtagattaacattgggaaa

SEQ ID NO: 65872 - DNA, 20 bp, synthetic construct
  source 1..20: mol_type = other DNA
aagtagattaacattgggaa

SEQ ID NO: 65873 - DNA, 20 bp, synthetic construct
  source 1..20: mol_type = other DNA
taagtagattaacattggga

SEQ ID NO: 65874 - DNA, 20 bp, synthetic construct
  source 1..20: mol_type = other DNA
ataagtagattaacattggg

SEQ ID NO: 65875 - DNA, 20 bp, synthetic construct
  source 1..20: mol_type = other DNA
aataagtagattaacattgg

SEQ ID NO: 65876 - DNA, 20 bp, synthetic construct
  source 1..20: mol_type = other DNA
caataagtagattaacattg

SEQ ID NO: 65877 - DNA, 20 bp, synthetic construct
  source 1..20: mol_type = other DNA
tcaataagtagattaacatt

SEQ ID NO: 65878 - DNA, 20 bp, synthetic construct
  source 1..20: mol_type = other DNA
gtcaataagtagattaacat

SEQ ID NO: 65879 - DNA, 20 bp, synthetic construct
  source 1..20: mol_type = other DNA
ggtcaataagtagattaaca

SEQ ID NO: 65880 - DNA, 20 bp, synthetic construct
  source 1..20: mol_type = other DNA
aggtcaataagtagattaac

SEQ ID NO: 65881 - DNA, 20 bp, synthetic construct
  source 1..20: mol_type = other DNA
taggtcaataagtagattaa

SEQ ID NO: 65882 - DNA, 20 bp, synthetic construct
  source 1..20: mol_type = other DNA
gtaggtcaataagtagatta

SEQ ID NO: 65883 - DNA, 20 bp, synthetic construct
  source 1..20: mol_type = other DNA
agtaggtcaataagtagatt

SEQ ID NO: 65884 - DNA, 20 bp, synthetic construct
  source 1..20: mol_type = other DNA
tagtaggtcaataagtagat

SEQ ID NO: 65885 - DNA, 20 bp, synthetic construct
  source 1..20: mol_type = other DNA
ttagtaggtcaataagtaga

SEQ ID NO: 65886 - DNA, 20 bp, synthetic construct
  source 1..20: mol_type = other DNA
cttagtaggtcaataagtag

SEQ ID NO: 65887 - DNA, 20 bp, synthetic construct
  source 1..20: mol_type = other DNA
gcttagtaggtcaataagta

SEQ ID NO: 65888 - DNA, 20 bp, synthetic construct
  source 1..20: mol_type = other DNA
agcttagtaggtcaataagt

SEQ ID NO: 65889 - DNA, 20 bp, synthetic construct
  source 1..20: mol_type = other DNA
cagcttagtaggtcaataag

SEQ ID NO: 65890 - DNA, 20 bp, synthetic construct
  source 1..20: mol_type = other DNA
ccagcttagtaggtcaataa

SEQ ID NO: 65891 - DNA, 20 bp, synthetic construct
  source 1..20: mol_type = other DNA
gccagcttagtaggtcaata

SEQ ID NO: 65892 - DNA, 20 bp, synthetic construct
  source 1..20: mol_type = other DNA
tgccagcttagtaggtcaat

SEQ ID NO: 65893 - DNA, 20 bp, synthetic construct
  source 1..20: mol_type = other DNA
atgccagcttagtaggtcaa

SEQ ID NO: 65894 - DNA, 20 bp, synthetic construct
  source 1..20: mol_type = other DNA
catgccagcttagtaggtca

SEQ ID NO: 65895 - DNA, 20 bp, synthetic construct
  source 1..20: mol_type = other DNA
acatgccagcttagtaggtc

SEQ ID NO: 65896 - DNA, 20 bp, synthetic construct
  source 1..20: mol_type = other DNA
aacatgccagcttagtaggt

SEQ ID NO: 65897 - DNA, 20 bp, synthetic construct
  source 1..20: mol_type = other DNA
gaacatgccagcttagtagg

SEQ ID NO: 65898 - DNA, 20 bp, synthetic construct
  source 1..20: mol_type = other DNA
agaacatgccagcttagtag

SEQ ID NO: 65899 - DNA, 20 bp, synthetic construct
  source 1..20: mol_type = other DNA
cagaacatgccagcttagta

SEQ ID NO: 65900 - DNA, 20 bp, synthetic construct
  source 1..20: mol_type = other DNA
acagaacatgccagcttagt

SEQ ID NO: 65901 - DNA, 20 bp, synthetic construct
  source 1..20: mol_type = other DNA
cacagaacatgccagcttag

SEQ ID NO: 65902 - DNA, 20 bp, synthetic construct
  source 1..20: mol_type = other DNA
acacagaacatgccagctta

SEQ ID NO: 65903 - DNA, 20 bp, synthetic construct
  source 1..20: mol_type = other DNA
cacacagaacatgccagctt

SEQ ID NO: 65904 - DNA, 20 bp, synthetic construct
  source 1..20: mol_type = other DNA
acacacagaacatgccagct

SEQ ID NO: 65905 - DNA, 20 bp, synthetic construct
  source 1..20: mol_type = other DNA
aacacacagaacatgccagc

SEQ ID NO: 65906 - DNA, 20 bp, synthetic construct
  source 1..20: mol_type = other DNA
taacacacagaacatgccag

SEQ ID NO: 65907 - DNA, 20 bp, synthetic construct
  source 1..20: mol_type = other DNA
ctaacacacagaacatgcca

SEQ ID NO: 65908 - DNA, 20 bp, synthetic construct
  source 1..20: mol_type = other DNA
tctaacacacagaacatgcc

SEQ ID NO: 65909 - DNA, 20 bp, synthetic construct
  source 1..20: mol_type = other DNA
gtctaacacacagaacatgc

SEQ ID NO: 65910 - DNA, 20 bp, synthetic construct
  source 1..20: mol_type = other DNA
tgtctaacacacagaacatg

SEQ ID NO: 65911 - DNA, 20 bp, synthetic construct
  source 1..20: mol_type = other DNA
atgtctaacacacagaacat

SEQ ID NO: 65912 - DNA, 20 bp, synthetic construct
  source 1..20: mol_type = other DNA
gatgtctaacacacagaaca

SEQ ID NO: 65913 - DNA, 20 bp, synthetic construct
  source 1..20: mol_type = other DNA
tgatgtctaacacacagaac

SEQ ID NO: 65914 - DNA, 20 bp, synthetic construct
  source 1..20: mol_type = other DNA
gtgatgtctaacacacagaa

SEQ ID NO: 65915 - DNA, 20 bp, synthetic construct
  source 1..20: mol_type = other DNA
ggtgatgtctaacacacaga

SEQ ID NO: 65916 - DNA, 20 bp, synthetic construct
  source 1..20: mol_type = other DNA
tggtgatgtctaacacacag

SEQ ID NO: 65917 - DNA, 20 bp, synthetic construct
  source 1..20: mol_type = other DNA
ttggtgatgtctaacacaca

SEQ ID NO: 65918 - DNA, 20 bp, synthetic construct
  source 1..20: mol_type = other DNA
gttggtgatgtctaacacac

SEQ ID NO: 65919 - DNA, 20 bp, synthetic construct
  source 1..20: mol_type = other DNA
agttggtgatgtctaacaca

SEQ ID NO: 65920 - DNA, 20 bp, synthetic construct
  source 1..20: mol_type = other DNA
aagttggtgatgtctaacac

SEQ ID NO: 65921 - DNA, 20 bp, synthetic construct
  source 1..20: mol_type = other DNA
aaagttggtgatgtctaaca

SEQ ID NO: 65922 - DNA, 20 bp, synthetic construct
  source 1..20: mol_type = other DNA
caaagttggtgatgtctaac

SEQ ID NO: 65923 - DNA, 20 bp, synthetic construct
  source 1..20: mol_type = other DNA
acaaagttggtgatgtctaa

SEQ ID NO: 65924 - DNA, 20 bp, synthetic construct
  source 1..20: mol_type = other DNA
cacaaagttggtgatgtcta

SEQ ID NO: 65925 - DNA, 20 bp, synthetic construct
  source 1..20: mol_type = other DNA
gcacaaagttggtgatgtct

SEQ ID NO: 65926 - DNA, 20 bp, synthetic construct
  source 1..20: mol_type = other DNA
ggcacaaagttggtgatgtc

SEQ ID NO: 65927 - DNA, 20 bp, synthetic construct
  source 1..20: mol_type = other DNA
aggcacaaagttggtgatgt

SEQ ID NO: 65928 - DNA, 20 bp, synthetic construct
  source 1..20: mol_type = other DNA
aaggcacaaagttggtgatg

SEQ ID NO: 65929 - DNA, 20 bp, synthetic construct
  source 1..20: mol_type = other DNA
gaaggcacaaagttggtgat

SEQ ID NO: 65930 - DNA, 20 bp, synthetic construct
  source 1..20: mol_type = other DNA
agaaggcacaaagttggtga

SEQ ID NO: 65931 - DNA, 20 bp, synthetic construct
  source 1..20: mol_type = other DNA
aagaaggcacaaagttggtg

SEQ ID NO: 65932 - DNA, 20 bp, synthetic construct
  source 1..20: mol_type = other DNA
aaagaaggcacaaagttggt

SEQ ID NO: 65933 - DNA, 20 bp, synthetic construct
  source 1..20: mol_type = other DNA
aaaagaaggcacaaagttgg

SEQ ID NO: 65934 - DNA, 20 bp, synthetic construct
  source 1..20: mol_type = other DNA
aaaaagaaggcacaaagttg

SEQ ID NO: 65935 - DNA, 20 bp, synthetic construct
  source 1..20: mol_type = other DNA
aaaaaagaaggcacaaagtt

SEQ ID NO: 65936 - DNA, 20 bp, synthetic construct
  source 1..20: mol_type = other DNA
aaaaaaagaaggcacaaagt

SEQ ID NO: 65937 - DNA, 20 bp, synthetic construct
  source 1..20: mol_type = other DNA
caaaaaaagaaggcacaaag

SEQ ID NO: 65938 - DNA, 20 bp, synthetic construct
  source 1..20: mol_type = other DNA
acaaaaaaagaaggcacaaa

SEQ ID NO: 65939 - DNA, 20 bp, synthetic construct
  source 1..20: mol_type = other DNA
aacaaaaaaagaaggcacaa

SEQ ID NO: 65940 - DNA, 20 bp, synthetic construct
  source 1..20: mol_type = other DNA
aaacaaaaaaagaaggcaca

SEQ ID NO: 65941 - DNA, 20 bp, synthetic construct
  source 1..20: mol_type = other DNA
caaacaaaaaaagaaggcac

SEQ ID NO: 65942 - DNA, 20 bp, synthetic construct
  source 1..20: mol_type = other DNA
acaaacaaaaaaagaaggca

SEQ ID NO: 65943 - DNA, 20 bp, synthetic construct
  source 1..20: mol_type = other DNA
aacaaacaaaaaaagaaggc

SEQ ID NO: 65944 - DNA, 20 bp, synthetic construct
  source 1..20: mol_type = other DNA
aaacaaacaaaaaaagaagg

SEQ ID NO: 65945 - DNA, 20 bp, synthetic construct
  source 1..20: mol_type = other DNA
aaaacaaacaaaaaaagaag

SEQ ID NO: 65946 - DNA, 20 bp, synthetic construct
  source 1..20: mol_type = other DNA
aaaaacaaacaaaaaaagaa

SEQ ID NO: 65947 - DNA, 20 bp, synthetic construct
  source 1..20: mol_type = other DNA
caaaaacaaacaaaaaaaga

SEQ ID NO: 65948 - DNA, 20 bp, synthetic construct
  source 1..20: mol_type = other DNA
tcaaaaacaaacaaaaaaag

SEQ ID NO: 65949 - DNA, 20 bp, synthetic construct
  source 1..20: mol_type = other DNA
ctcaaaaacaaacaaaaaaa

SEQ ID NO: 65950 - DNA, 20 bp, synthetic construct
  source 1..20: mol_type = other DNA
actcaaaaacaaacaaaaaa

SEQ ID NO: 65951 - DNA, 20 bp, synthetic construct
  source 1..20: mol_type = other DNA
aactcaaaaacaaacaaaaa

SEQ ID NO: 65952 - DNA, 20 bp, synthetic construct
  source 1..20: mol_type = other DNA
caactcaaaaacaaacaaaa

SEQ ID NO: 65953 - DNA, 20 bp, synthetic construct
  source 1..20: mol_type = other DNA
ccaactcaaaaacaaacaaa

SEQ ID NO: 65954 - DNA, 20 bp, synthetic construct
  source 1..20: mol_type = other DNA
tccaactcaaaaacaaacaa

SEQ ID NO: 65955 - DNA, 20 bp, synthetic construct
  source 1..20: mol_type = other DNA
ctccaactcaaaaacaaaca

SEQ ID NO: 65956 - DNA, 20 bp, synthetic construct
  source 1..20: mol_type = other DNA
actccaactcaaaaacaaac

SEQ ID NO: 65957 - DNA, 20 bp, synthetic construct
  source 1..20: mol_type = other DNA
gactccaactcaaaaacaaa

SEQ ID NO: 65958 - DNA, 20 bp, synthetic construct
  source 1..20: mol_type = other DNA
agactccaactcaaaaacaa

SEQ ID NO: 65959 - DNA, 20 bp, synthetic construct
  source 1..20: mol_type = other DNA
gagactccaactcaaaaaca

SEQ ID NO: 65960 - DNA, 20 bp, synthetic construct
  source 1..20: mol_type = other DNA
tgagactccaactcaaaaac

SEQ ID NO: 65961 - DNA, 20 bp, synthetic construct
  source 1..20: mol_type = other DNA
gtgagactccaactcaaaaa

SEQ ID NO: 65962 - DNA, 20 bp, synthetic construct
  source 1..20: mol_type = other DNA
agtgagactccaactcaaaa

SEQ ID NO: 65963 - DNA, 20 bp, synthetic construct
  source 1..20: mol_type = other DNA
gagtgagactccaactcaaa

SEQ ID NO: 65964 - DNA, 20 bp, synthetic construct
  source 1..20: mol_type = other DNA
agagtgagactccaactcaa

SEQ ID NO: 65965 - DNA, 20 bp, synthetic construct
  source 1..20: mol_type = other DNA
cagagtgagactccaactca

SEQ ID NO: 65966 - DNA, 20 bp, synthetic construct
  source 1..20: mol_type = other DNA
acagagtgagactccaactc

SEQ ID NO: 65967 - DNA, 20 bp, synthetic construct
  source 1..20: mol_type = other DNA
aacagagtgagactccaact

SEQ ID NO: 65968 - DNA, 20 bp, synthetic construct
  source 1..20: mol_type = other DNA
caacagagtgagactccaac

SEQ ID NO: 65969 - DNA, 20 bp, synthetic construct
  source 1..20: mol_type = other DNA
gcaacagagtgagactccaa

SEQ ID NO: 65970 - DNA, 20 bp, synthetic construct
  source 1..20: mol_type = other DNA
ggcaacagagtgagactcca

SEQ ID NO: 65971 - DNA, 20 bp, synthetic construct
  source 1..20: mol_type = other DNA
gggcaacagagtgagactcc

SEQ ID NO: 65972 - DNA, 20 bp, synthetic construct
  source 1..20: mol_type = other DNA
tgggcaacagagtgagactc

SEQ ID NO: 65973 - DNA, 20 bp, synthetic construct
  source 1..20: mol_type = other DNA
ctgggcaacagagtgagact

SEQ ID NO: 65974 - DNA, 20 bp, synthetic construct
  source 1..20: mol_type = other DNA
cctgggcaacagagtgagac

SEQ ID NO: 65975 - DNA, 20 bp, synthetic construct
  source 1..20: mol_type = other DNA
acctgggcaacagagtgaga

SEQ ID NO: 65976 - DNA, 20 bp, synthetic construct
  source 1..20: mol_type = other DNA
aacctgggcaacagagtgag

SEQ ID NO: 65977 - DNA, 20 bp, synthetic construct
  source 1..20: mol_type = other DNA
caacctgggcaacagagtga

SEQ ID NO: 65978 - DNA, 20 bp, synthetic construct
  source 1..20: mol_type = other DNA
ccaacctgggcaacagagtg

SEQ ID NO: 65979 - DNA, 20 bp, synthetic construct
  source 1..20: mol_type = other DNA
tccaacctgggcaacagagt

SEQ ID NO: 65980 - DNA, 20 bp, synthetic construct
  source 1..20: mol_type = other DNA
ctccaacctgggcaacagag

SEQ ID NO: 65981 - DNA, 20 bp, synthetic construct
  source 1..20: mol_type = other DNA
actccaacctgggcaacaga

SEQ ID NO: 65982 - DNA, 20 bp, synthetic construct
  source 1..20: mol_type = other DNA
cactccaacctgggcaacag

SEQ ID NO: 65983 - DNA, 20 bp, synthetic construct
  source 1..20: mol_type = other DNA
gcactccaacctgggcaaca

SEQ ID NO: 65984 - DNA, 20 bp, synthetic construct
  source 1..20: mol_type = other DNA
tgcactccaacctgggcaac

SEQ ID NO: 65985 - DNA, 20 bp, synthetic construct
  source 1..20: mol_type = other DNA
ctgcactccaacctgggcaa

SEQ ID NO: 65986 - DNA, 20 bp, synthetic construct
  source 1..20: mol_type = other DNA
actgcactccaacctgggca

SEQ ID NO: 65987 - DNA, 20 bp, synthetic construct
  source 1..20: mol_type = other DNA
cactgcactccaacctgggc

SEQ ID NO: 65988 - DNA, 20 bp, synthetic construct
  source 1..20: mol_type = other DNA
ccactgcactccaacctggg

SEQ ID NO: 65989 - DNA, 20 bp, synthetic construct
  source 1..20: mol_type = other DNA
gccactgcactccaacctgg

SEQ ID NO: 65990 - DNA, 20 bp, synthetic construct
  source 1..20: mol_type = other DNA
cgccactgcactccaacctg

SEQ ID NO: 65991 - DNA, 20 bp, synthetic construct
  source 1..20: mol_type = other DNA
gcgccactgcactccaacct

SEQ ID NO: 65992 - DNA, 20 bp, synthetic construct
  source 1..20: mol_type = other DNA
cgcgccactgcactccaacc

SEQ ID NO: 65993 - DNA, 20 bp, synthetic construct
  source 1..20: mol_type = other DNA
tcgcgccactgcactccaac

SEQ ID NO: 65994 - DNA, 20 bp, synthetic construct
  source 1..20: mol_type = other DNA
atcgcgccactgcactccaa

SEQ ID NO: 65995 - DNA, 20 bp, synthetic construct
  source 1..20: mol_type = other DNA
gatcgcgccactgcactcca

SEQ ID NO: 65996 - DNA, 20 bp, synthetic construct
  source 1..20: mol_type = other DNA
agatcgcgccactgcactcc

SEQ ID NO: 65997 - DNA, 20 bp, synthetic construct
  source 1..20: mol_type = other DNA
aagatcgcgccactgcactc

SEQ ID NO: 65998 - DNA, 20 bp, synthetic construct
  source 1..20: mol_type = other DNA
caagatcgcgccactgcact

SEQ ID NO: 65999 - DNA, 20 bp, synthetic construct
  source 1..20: mol_type = other DNA
ccaagatcgcgccactgcac

SEQ ID NO: 66000 - DNA, 20 bp, synthetic construct
  source 1..20: mol_type = other DNA
gccaagatcgcgccactgca

SEQ ID NO: 66001 - DNA, 20 bp, synthetic construct
  source 1..20: mol_type = other DNA
agccaagatcgcgccactgc

SEQ ID NO: 66002 - DNA, 20 bp, synthetic construct
  source 1..20: mol_type = other DNA
gagccaagatcgcgccactg

SEQ ID NO: 66003 - DNA, 20 bp, synthetic construct
  source 1..20: mol_type = other DNA
tgagccaagatcgcgccact

SEQ ID NO: 66004 - DNA, 20 bp, synthetic construct
  source 1..20: mol_type = other DNA
gtgagccaagatcgcgccac

SEQ ID NO: 66005 - DNA, 20 bp, synthetic construct
  source 1..20: mol_type = other DNA
ggtgagccaagatcgcgcca

SEQ ID NO: 66006 - DNA, 20 bp, synthetic construct
  source 1..20: mol_type = other DNA
tggtgagccaagatcgcgcc

SEQ ID NO: 66007 - DNA, 20 bp, synthetic construct
  source 1..20: mol_type = other DNA
gtggtgagccaagatcgcgc

SEQ ID NO: 66008 - DNA, 20 bp, synthetic construct
  source 1..20: mol_type = other DNA
tgtggtgagccaagatcgcg

SEQ ID NO: 66009 - DNA, 20 bp, synthetic construct
  source 1..20: mol_type = other DNA
ttgtggtgagccaagatcgc

SEQ ID NO: 66010 - DNA, 20 bp, synthetic construct
  source 1..20: mol_type = other DNA
gttgtggtgagccaagatcg

SEQ ID NO: 66011 - DNA, 20 bp, synthetic construct
  source 1..20: mol_type = other DNA
ggttgtggtgagccaagatc

SEQ ID NO: 66012 - DNA, 20 bp, synthetic construct
  source 1..20: mol_type = other DNA
aggttgtggtgagccaagat

SEQ ID NO: 66013 - DNA, 20 bp, synthetic construct
  source 1..20: mol_type = other DNA
gaggttgtggtgagccaaga

SEQ ID NO: 66014 - DNA, 20 bp, synthetic construct
  source 1..20: mol_type = other DNA
agaggttgtggtgagccaag

SEQ ID NO: 66015 - DNA, 20 bp, synthetic construct
  source 1..20: mol_type = other DNA
cagaggttgtggtgagccaa

SEQ ID NO: 66016 - DNA, 20 bp, synthetic construct
  source 1..20: mol_type = other DNA
gcagaggttgtggtgagcca

SEQ ID NO: 66017 - DNA, 20 bp, synthetic construct
  source 1..20: mol_type = other DNA
ggcagaggttgtggtgagcc

SEQ ID NO: 66018 - DNA, 20 bp, synthetic construct
  source 1..20: mol_type = other DNA
aggcagaggttgtggtgagc

SEQ ID NO: 66019 - DNA, 20 bp, synthetic construct
  source 1..20: mol_type = other DNA
gaggcagaggttgtggtgag

SEQ ID NO: 66020 - DNA, 20 bp, synthetic construct
  source 1..20: mol_type = other DNA
ggaggcagaggttgtggtga

SEQ ID NO: 66021 - DNA, 20 bp, synthetic construct
  source 1..20: mol_type = other DNA
gggaggcagaggttgtggtg

SEQ ID NO: 66022 - DNA, 20 bp, synthetic construct
  source 1..20: mol_type = other DNA
cgggaggcagaggttgtggt

SEQ ID NO: 66023 - DNA, 20 bp, synthetic construct
  source 1..20: mol_type = other DNA
ccgggaggcagaggttgtgg

SEQ ID NO: 66024 - DNA, 20 bp, synthetic construct
  source 1..20: mol_type = other DNA
cccgggaggcagaggttgtg

SEQ ID NO: 66025 - DNA, 20 bp, synthetic construct
  source 1..20: mol_type = other DNA
acccgggaggcagaggttgt

SEQ ID NO: 66026 - DNA, 20 bp, synthetic construct
  source 1..20: mol_type = other DNA
aacccgggaggcagaggttg

SEQ ID NO: 66027 - DNA, 20 bp, synthetic construct
  source 1..20: mol_type = other DNA
gaacccgggaggcagaggtt

SEQ ID NO: 66028 - DNA, 20 bp, synthetic construct
  source 1..20: mol_type = other DNA
ggaacccgggaggcagaggt

SEQ ID NO: 66029 - DNA, 20 bp, synthetic construct
  source 1..20: mol_type = other DNA
tggaacccgggaggcagagg

SEQ ID NO: 66030 - DNA, 20 bp, synthetic construct
  source 1..20: mol_type = other DNA
ctggaacccgggaggcagag

SEQ ID NO: 66031 - DNA, 20 bp, synthetic construct
  source 1..20: mol_type = other DNA
actggaacccgggaggcaga

SEQ ID NO: 66032 - DNA, 20 bp, synthetic construct
  source 1..20: mol_type = other DNA
cactggaacccgggaggcag

SEQ ID NO: 66033 - DNA, 20 bp, synthetic construct
  source 1..20: mol_type = other DNA
tcactggaacccgggaggca

SEQ ID NO: 66034 - DNA, 20 bp, synthetic construct
  source 1..20: mol_type = other DNA
atcactggaacccgggaggc

SEQ ID NO: 66035 - DNA, 20 bp, synthetic construct
  source 1..20: mol_type = other DNA
aatcactggaacccgggagg

SEQ ID NO: 66036 - DNA, 20 bp, synthetic construct
  source 1..20: mol_type = other DNA
gaatcactggaacccgggag

SEQ ID NO: 66037 - DNA, 20 bp, synthetic construct
  source 1..20: mol_type = other DNA
agaatcactggaacccggga

SEQ ID NO: 66038 - DNA, 20 bp, synthetic construct
  source 1..20: mol_type = other DNA
gagaatcactggaacccggg

SEQ ID NO: 66039 - DNA, 20 bp, synthetic construct
  source 1..20: mol_type = other DNA
ggagaatcactggaacccgg

SEQ ID NO: 66040 - DNA, 20 bp, synthetic construct
  source 1..20: mol_type = other DNA
aggagaatcactggaacccg

SEQ ID NO: 66041 - DNA, 20 bp, synthetic construct
  source 1..20: mol_type = other DNA
caggagaatcactggaaccc

SEQ ID NO: 66042 - DNA, 20 bp, synthetic construct
  source 1..20: mol_type = other DNA
gcaggagaatcactggaacc

SEQ ID NO: 66043 - DNA, 20 bp, synthetic construct
  source 1..20: mol_type = other DNA
ggcaggagaatcactggaac

SEQ ID NO: 66044 - DNA, 20 bp, synthetic construct
  source 1..20: mol_type = other DNA
aggcaggagaatcactggaa

SEQ ID NO: 66045 - DNA, 20 bp, synthetic construct
  source 1..20: mol_type = other DNA
caggcaggagaatcactgga

SEQ ID NO: 66046 - DNA, 20 bp, synthetic construct
  source 1..20: mol_type = other DNA
tcaggcaggagaatcactgg

SEQ ID NO: 66047 - DNA, 20 bp, synthetic construct
  source 1..20: mol_type = other DNA
ctcaggcaggagaatcactg

SEQ ID NO: 66048 - DNA, 20 bp, synthetic construct
  source 1..20: mol_type = other DNA
gctcaggcaggagaatcact

SEQ ID NO: 66049 - DNA, 20 bp, synthetic construct
  source 1..20: mol_type = other DNA
ggctcaggcaggagaatcac

SEQ ID NO: 66050 - DNA, 20 bp, synthetic construct
  source 1..20: mol_type = other DNA
aggctcaggcaggagaatca

SEQ ID NO: 66051 - DNA, 20 bp, synthetic construct
  source 1..20: mol_type = other DNA
gaggctcaggcaggagaatc

SEQ ID NO: 66052 - DNA, 20 bp, synthetic construct
  source 1..20: mol_type = other DNA
ggaggctcaggcaggagaat

SEQ ID NO: 66053 - DNA, 20 bp, synthetic construct
  source 1..20: mol_type = other DNA
gggaggctcaggcaggagaa

SEQ ID NO: 66054 - DNA, 20 bp, synthetic construct
  source 1..20: mol_type = other DNA
cgggaggctcaggcaggaga

SEQ ID NO: 66055 - DNA, 20 bp, synthetic construct
  source 1..20: mol_type = other DNA
tcgggaggctcaggcaggag

SEQ ID NO: 66056 - DNA, 20 bp, synthetic construct
  source 1..20: mol_type = other DNA
ctcgggaggctcaggcagga

SEQ ID NO: 66057 - DNA, 20 bp, synthetic construct
  source 1..20: mol_type = other DNA
tctcgggaggctcaggcagg

SEQ ID NO: 66058 - DNA, 20 bp, synthetic construct
  source 1..20: mol_type = other DNA
ttctcgggaggctcaggcag

SEQ ID NO: 66059 - DNA, 20 bp, synthetic construct
  source 1..20: mol_type = other DNA
cttctcgggaggctcaggca

SEQ ID NO: 66060 - DNA, 20 bp, synthetic construct
  source 1..20: mol_type = other DNA
gcttctcgggaggctcaggc

SEQ ID NO: 66061 - DNA, 20 bp, synthetic construct
  source 1..20: mol_type = other DNA
agcttctcgggaggctcagg

SEQ ID NO: 66062 - DNA, 20 bp, synthetic construct
  source 1..20: mol_type = other DNA
cagcttctcgggaggctcag

SEQ ID NO: 66063 - DNA, 20 bp, synthetic construct
  source 1..20: mol_type = other DNA
tcagcttctcgggaggctca

SEQ ID NO: 66064 - DNA, 20 bp, synthetic construct
  source 1..20: mol_type = other DNA
ctcagcttctcgggaggctc

SEQ ID NO: 66065 - DNA, 20 bp, synthetic construct
  source 1..20: mol_type = other DNA
tctcagcttctcgggaggct

SEQ ID NO: 66066 - DNA, 20 bp, synthetic construct
  source 1..20: mol_type = other DNA
gtctcagcttctcgggaggc

SEQ ID NO: 66067 - DNA, 20 bp, synthetic construct
  source 1..20: mol_type = other DNA
cgtctcagcttctcgggagg

SEQ ID NO: 66068 - DNA, 20 bp, synthetic construct
  source 1..20: mol_type = other DNA
tcgtctcagcttctcgggag

SEQ ID NO: 66069 - DNA, 20 bp, synthetic construct
  source 1..20: mol_type = other DNA
gtcgtctcagcttctcggga

SEQ ID NO: 66070 - DNA, 20 bp, synthetic construct
  source 1..20: mol_type = other DNA
tgtcgtctcagcttctcggg

SEQ ID NO: 66071 - DNA, 20 bp, synthetic construct
  source 1..20: mol_type = other DNA
ctgtcgtctcagcttctcgg

SEQ ID NO: 66072 - DNA, 20 bp, synthetic construct
  source 1..20: mol_type = other DNA
cctgtcgtctcagcttctcg

SEQ ID NO: 66073 - DNA, 20 bp, synthetic construct
  source 1..20: mol_type = other DNA
gcctgtcgtctcagcttctc

SEQ ID NO: 66074 - DNA, 20 bp, synthetic construct
  source 1..20: mol_type = other DNA
cgcctgtcgtctcagcttct

SEQ ID NO: 66075 - DNA, 20 bp, synthetic construct
  source 1..20: mol_type = other DNA
gcgcctgtcgtctcagcttc

SEQ ID NO: 66076 - DNA, 20 bp, synthetic construct
  source 1..20: mol_type = other DNA
cgcgcctgtcgtctcagctt

SEQ ID NO: 66077 - DNA, 20 bp, synthetic construct
  source 1..20: mol_type = other DNA
gcgcgcctgtcgtctcagct

SEQ ID NO: 66078 - DNA, 20 bp, synthetic construct
  source 1..20: mol_type = other DNA
cgcgcgcctgtcgtctcagc

SEQ ID NO: 66079 - DNA, 20 bp, synthetic construct
  source 1..20: mol_type = other DNA
gcgcgcgcctgtcgtctcag

SEQ ID NO: 66080 - DNA, 20 bp, synthetic construct
  source 1..20: mol_type = other DNA
ggcgcgcgcctgtcgtctca

SEQ ID NO: 66081 - DNA, 20 bp, synthetic construct
  source 1..20: mol_type = other DNA
tggcgcgcgcctgtcgtctc

SEQ ID NO: 66082 - DNA, 20 bp, synthetic construct
  source 1..20: mol_type = other DNA
gtggcgcgcgcctgtcgtct

SEQ ID NO: 66083 - DNA, 20 bp, synthetic construct
  source 1..20: mol_type = other DNA
ggtggcgcgcgcctgtcgtc

SEQ ID NO: 66084 - DNA, 20 bp, synthetic construct
  source 1..20: mol_type = other DNA
tggtggcgcgcgcctgtcgt

SEQ ID NO: 66085 - DNA, 20 bp, synthetic construct
  source 1..20: mol_type = other DNA
atggtggcgcgcgcctgtcg

SEQ ID NO: 66086 - DNA, 20 bp, synthetic construct
  source 1..20: mol_type = other DNA
catggtggcgcgcgcctgtc

SEQ ID NO: 66087 - DNA, 20 bp, synthetic construct
  source 1..20: mol_type = other DNA
gcatggtggcgcgcgcctgt

SEQ ID NO: 66088 - DNA, 20 bp, synthetic construct
  source 1..20: mol_type = other DNA
ggcatggtggcgcgcgcctg

SEQ ID NO: 66089 - DNA, 20 bp, synthetic construct
  source 1..20: mol_type = other DNA
gggcatggtggcgcgcgcct

SEQ ID NO: 66090 - DNA, 20 bp, synthetic construct
  source 1..20: mol_type = other DNA
agggcatggtggcgcgcgcc

SEQ ID NO: 66091 - DNA, 20 bp, synthetic construct
  source 1..20: mol_type = other DNA
cagggcatggtggcgcgcgc

SEQ ID NO: 66092 - DNA, 20 bp, synthetic construct
  source 1..20: mol_type = other DNA
gcagggcatggtggcgcgcg

SEQ ID NO: 66093 - DNA, 20 bp, synthetic construct
  source 1..20: mol_type = other DNA
agcagggcatggtggcgcgc

SEQ ID NO: 66094 - DNA, 20 bp, synthetic construct
  source 1..20: mol_type = other DNA
tagcagggcatggtggcgcg

SEQ ID NO: 66095 - DNA, 20 bp, synthetic construct
  source 1..20: mol_type = other DNA
ttagcagggcatggtggcgc

SEQ ID NO: 66096 - DNA, 20 bp, synthetic construct
  source 1..20: mol_type = other DNA
gttagcagggcatggtggcg

SEQ ID NO: 66097 - DNA, 20 bp, synthetic construct
  source 1..20: mol_type = other DNA
agttagcagggcatggtggc

SEQ ID NO: 66098 - DNA, 20 bp, synthetic construct
  source 1..20: mol_type = other DNA
aagttagcagggcatggtgg

SEQ ID NO: 66099 - DNA, 20 bp, synthetic construct
  source 1..20: mol_type = other DNA
aaagttagcagggcatggtg

SEQ ID NO: 66100 - DNA, 20 bp, synthetic construct
  source 1..20: mol_type = other DNA
aaaagttagcagggcatggt

SEQ ID NO: 66101 - DNA, 20 bp, synthetic construct
  source 1..20: mol_type = other DNA
caaaagttagcagggcatgg

SEQ ID NO: 66102 - DNA, 20 bp, synthetic construct
  source 1..20: mol_type = other DNA
acaaaagttagcagggcatg

SEQ ID NO: 66103 - DNA, 20 bp, synthetic construct
  source 1..20: mol_type = other DNA
tacaaaagttagcagggcat

SEQ ID NO: 66104 - DNA, 20 bp, synthetic construct
  source 1..20: mol_type = other DNA
atacaaaagttagcagggca

SEQ ID NO: 66105 - DNA, 20 bp, synthetic construct
  source 1..20: mol_type = other DNA
aatacaaaagttagcagggc

SEQ ID NO: 66106 - DNA, 20 bp, synthetic construct
  source 1..20: mol_type = other DNA
aaatacaaaagttagcaggg

SEQ ID NO: 66107 - DNA, 20 bp, synthetic construct
  source 1..20: mol_type = other DNA
aaaatacaaaagttagcagg

SEQ ID NO: 66108 - DNA, 20 bp, synthetic construct
  source 1..20: mol_type = other DNA
aaaaatacaaaagttagcag

SEQ ID NO: 66109 - DNA, 20 bp, synthetic construct
  source 1..20: mol_type = other DNA
taaaaatacaaaagttagca

SEQ ID NO: 66110 - DNA, 20 bp, synthetic construct
  source 1..20: mol_type = other DNA
ctaaaaatacaaaagttagc

SEQ ID NO: 66111 - DNA, 20 bp, synthetic construct
  source 1..20: mol_type = other DNA
actaaaaatacaaaagttag

SEQ ID NO: 66112 - DNA, 20 bp, synthetic construct
  source 1..20: mol_type = other DNA
tactaaaaatacaaaagtta

SEQ ID NO: 66113 - DNA, 20 bp, synthetic construct
  source 1..20: mol_type = other DNA
ctactaaaaatacaaaagtt

SEQ ID NO: 66114 - DNA, 20 bp, synthetic construct
  source 1..20: mol_type = other DNA
tctactaaaaatacaaaagt

SEQ ID NO: 66115 - DNA, 20 bp, synthetic construct
  source 1..20: mol_type = other DNA
ctctactaaaaatacaaaag

SEQ ID NO: 66116 - DNA, 20 bp, synthetic construct
  source 1..20: mol_type = other DNA
tctctactaaaaatacaaaa

SEQ ID NO: 66117 - DNA, 20 bp, synthetic construct
  source 1..20: mol_type = other DNA
atctctactaaaaatacaaa

SEQ ID NO: 66118 - DNA, 20 bp, synthetic construct
  source 1..20: mol_type = other DNA
catctctactaaaaatacaa

SEQ ID NO: 66119 - DNA, 20 bp, synthetic construct
  source 1..20: mol_type = other DNA
ccatctctactaaaaataca

SEQ ID NO: 66120 - DNA, 20 bp, synthetic construct
  source 1..20: mol_type = other DNA
cccatctctactaaaaatac

SEQ ID NO: 66121 - DNA, 20 bp, synthetic construct
  source 1..20: mol_type = other DNA
acccatctctactaaaaata

SEQ ID NO: 66122 - DNA, 20 bp, synthetic construct
  source 1..20: mol_type = other DNA
aacccatctctactaaaaat

SEQ ID NO: 66123 - DNA, 20 bp, synthetic construct
  source 1..20: mol_type = other DNA
aaacccatctctactaaaaa

SEQ ID NO: 66124 - DNA, 20 bp, synthetic construct
  source 1..20: mol_type = other DNA
gaaacccatctctactaaaa

SEQ ID NO: 66125 - DNA, 20 bp, synthetic construct
  source 1..20: mol_type = other DNA
tgaaacccatctctactaaa

SEQ ID NO: 66126 - DNA, 20 bp, synthetic construct
  source 1..20: mol_type = other DNA
gtgaaacccatctctactaa

SEQ ID NO: 66127 - DNA, 20 bp, synthetic construct
  source 1..20: mol_type = other DNA
agtgaaacccatctctacta

SEQ ID NO: 66128 - DNA, 20 bp, synthetic construct
  source 1..20: mol_type = other DNA
cagtgaaacccatctctact

SEQ ID NO: 66129 - DNA, 20 bp, synthetic construct
  source 1..20: mol_type = other DNA
acagtgaaacccatctctac

SEQ ID NO: 66130 - DNA, 20 bp, synthetic construct
  source 1..20: mol_type = other DNA
cacagtgaaacccatctcta

SEQ ID NO: 66131 - DNA, 20 bp, synthetic construct
  source 1..20: mol_type = other DNA
acacagtgaaacccatctct

SEQ ID NO: 66132 - DNA, 20 bp, synthetic construct
  source 1..20: mol_type = other DNA
aacacagtgaaacccatctc

SEQ ID NO: 66133 - DNA, 20 bp, synthetic construct
  source 1..20: mol_type = other DNA
aaacacagtgaaacccatct

SEQ ID NO: 66134 - DNA, 20 bp, synthetic construct
  source 1..20: mol_type = other DNA
gaaacacagtgaaacccatc

SEQ ID NO: 66135 - DNA, 20 bp, synthetic construct
  source 1..20: mol_type = other DNA
ggaaacacagtgaaacccat

SEQ ID NO: 66136 - DNA, 20 bp, synthetic construct
  source 1..20: mol_type = other DNA
gggaaacacagtgaaaccca

SEQ ID NO: 66137 - DNA, 20 bp, synthetic construct
  source 1..20: mol_type = other DNA
tgggaaacacagtgaaaccc

SEQ ID NO: 66138 - DNA, 20 bp, synthetic construct
  source 1..20: mol_type = other DNA
ctgggaaacacagtgaaacc

SEQ ID NO: 66139 - DNA, 20 bp, synthetic construct
  source 1..20: mol_type = other DNA
cctgggaaacacagtgaaac

SEQ ID NO: 66140 - DNA, 20 bp, synthetic construct
  source 1..20: mol_type = other DNA
gcctgggaaacacagtgaaa

SEQ ID NO: 66141 - DNA, 20 bp, synthetic construct
  source 1..20: mol_type = other DNA
agcctgggaaacacagtgaa

SEQ ID NO: 66142 - DNA, 20 bp, synthetic construct
  source 1..20: mol_type = other DNA
cagcctgggaaacacagtga

SEQ ID NO: 66143 - DNA, 20 bp, synthetic construct
  source 1..20: mol_type = other DNA
ccagcctgggaaacacagtg

SEQ ID NO: 66144 - DNA, 20 bp, synthetic construct
  source 1..20: mol_type = other DNA
accagcctgggaaacacagt

SEQ ID NO: 66145 - DNA, 20 bp, synthetic construct
  source 1..20: mol_type = other DNA
gaccagcctgggaaacacag

SEQ ID NO: 66146 - DNA, 20 bp, synthetic construct
  source 1..20: mol_type = other DNA
agaccagcctgggaaacaca

SEQ ID NO: 66147 - DNA, 20 bp, synthetic construct
  source 1..20: mol_type = other DNA
gagaccagcctgggaaacac

SEQ ID NO: 66148 - DNA, 20 bp, synthetic construct
  source 1..20: mol_type = other DNA
cgagaccagcctgggaaaca

SEQ ID NO: 66149 - DNA, 20 bp, synthetic construct
  source 1..20: mol_type = other DNA
tcgagaccagcctgggaaac

SEQ ID NO: 66150 - DNA, 20 bp, synthetic construct
  source 1..20: mol_type = other DNA
ttcgagaccagcctgggaaa

SEQ ID NO: 66151 - DNA, 20 bp, synthetic construct
  source 1..20: mol_type = other DNA
gttcgagaccagcctgggaa

SEQ ID NO: 66152 - DNA, 20 bp, synthetic construct
  source 1..20: mol_type = other DNA
agttcgagaccagcctggga

SEQ ID NO: 66153 - DNA, 20 bp, synthetic construct
  source 1..20: mol_type = other DNA
gagttcgagaccagcctggg

SEQ ID NO: 66154 - DNA, 20 bp, synthetic construct
  source 1..20: mol_type = other DNA
ggagttcgagaccagcctgg

SEQ ID NO: 66155 - DNA, 20 bp, synthetic construct
  source 1..20: mol_type = other DNA
aggagttcgagaccagcctg

SEQ ID NO: 66156 - DNA, 20 bp, synthetic construct
  source 1..20: mol_type = other DNA
caggagttcgagaccagcct

SEQ ID NO: 66157 - DNA, 20 bp, synthetic construct
  source 1..20: mol_type = other DNA
tcaggagttcgagaccagcc

SEQ ID NO: 66158 - DNA, 20 bp, synthetic construct
  source 1..20: mol_type = other DNA
gtcaggagttcgagaccagc

SEQ ID NO: 66159 - DNA, 20 bp, synthetic construct
  source 1..20: mol_type = other DNA
ggtcaggagttcgagaccag

SEQ ID NO: 66160 - DNA, 20 bp, synthetic construct
  source 1..20: mol_type = other DNA
aggtcaggagttcgagacca

SEQ ID NO: 66161 - DNA, 20 bp, synthetic construct
  source 1..20: mol_type = other DNA
aaggtcaggagttcgagacc

SEQ ID NO: 66162 - DNA, 20 bp, synthetic construct
  source 1..20: mol_type = other DNA
caaggtcaggagttcgagac

SEQ ID NO: 66163 - DNA, 20 bp, synthetic construct
  source 1..20: mol_type = other DNA
acaaggtcaggagttcgaga

SEQ ID NO: 66164 - DNA, 20 bp, synthetic construct
  source 1..20: mol_type = other DNA
cacaaggtcaggagttcgag

SEQ ID NO: 66165 - DNA, 20 bp, synthetic construct
  source 1..20: mol_type = other DNA
tcacaaggtcaggagttcga

SEQ ID NO: 66166 - DNA, 20 bp, synthetic construct
  source 1..20: mol_type = other DNA
atcacaaggtcaggagttcg

SEQ ID NO: 66167 - DNA, 20 bp, synthetic construct
  source 1..20: mol_type = other DNA
gatcacaaggtcaggagttc

SEQ ID NO: 66168 - DNA, 20 bp, synthetic construct
  source 1..20: mol_type = other DNA
ggatcacaaggtcaggagtt

SEQ ID NO: 66169 - DNA, 20 bp, synthetic construct
  source 1..20: mol_type = other DNA
tggatcacaaggtcaggagt

SEQ ID NO: 66170 - DNA, 20 bp, synthetic construct
  source 1..20: mol_type = other DNA
gtggatcacaaggtcaggag

SEQ ID NO: 66171 - DNA, 20 bp, synthetic construct
  source 1..20: mol_type = other DNA
ggtggatcacaaggtcagga

SEQ ID NO: 66172 - DNA, 20 bp, synthetic construct
  source 1..20: mol_type = other DNA
aggtggatcacaaggtcagg

SEQ ID NO: 66173 - DNA, 20 bp, synthetic construct
  source 1..20: mol_type = other DNA
caggtggatcacaaggtcag

SEQ ID NO: 66174 - DNA, 20 bp, synthetic construct
  source 1..20: mol_type = other DNA
gcaggtggatcacaaggtca

SEQ ID NO: 66175 - DNA, 20 bp, synthetic construct
  source 1..20: mol_type = other DNA
ggcaggtggatcacaaggtc

SEQ ID NO: 66176 - DNA, 20 bp, synthetic construct
  source 1..20: mol_type = other DNA
aggcaggtggatcacaaggt

SEQ ID NO: 66177 - DNA, 20 bp, synthetic construct
  source 1..20: mol_type = other DNA
aaggcaggtggatcacaagg

SEQ ID NO: 66178 - DNA, 20 bp, synthetic construct
  source 1..20: mol_type = other DNA
caaggcaggtggatcacaag

SEQ ID NO: 66179 - DNA, 20 bp, synthetic construct
  source 1..20: mol_type = other DNA
ccaaggcaggtggatcacaa

SEQ ID NO: 66180 - DNA, 20 bp, synthetic construct
  source 1..20: mol_type = other DNA
cccaaggcaggtggatcaca

SEQ ID NO: 66181 - DNA, 20 bp, synthetic construct
  source 1..20: mol_type = other DNA
gcccaaggcaggtggatcac

SEQ ID NO: 66182 - DNA, 20 bp, synthetic construct
  source 1..20: mol_type = other DNA
agcccaaggcaggtggatca

SEQ ID NO: 66183 - DNA, 20 bp, synthetic construct
  source 1..20: mol_type = other DNA
gagcccaaggcaggtggatc

SEQ ID NO: 66184 - DNA, 20 bp, synthetic construct
  source 1..20: mol_type = other DNA
ggagcccaaggcaggtggat

SEQ ID NO: 66185 - DNA, 20 bp, synthetic construct
  source 1..20: mol_type = other DNA
gggagcccaaggcaggtgga

SEQ ID NO: 66186 - DNA, 20 bp, synthetic construct
  source 1..20: mol_type = other DNA
tgggagcccaaggcaggtgg

SEQ ID NO: 66187 - DNA, 20 bp, synthetic construct
  source 1..20: mol_type = other DNA
ttgggagcccaaggcaggtg

SEQ ID NO: 66188 - DNA, 20 bp, synthetic construct
  source 1..20: mol_type = other DNA
tttgggagcccaaggcaggt

SEQ ID NO: 66189 - DNA, 20 bp, synthetic construct
  source 1..20: mol_type = other DNA
atttgggagcccaaggcagg

SEQ ID NO: 66190 - DNA, 20 bp, synthetic construct
  source 1..20: mol_type = other DNA
aatttgggagcccaaggcag

SEQ ID NO: 66191 - DNA, 20 bp, synthetic construct
  source 1..20: mol_type = other DNA
caatttgggagcccaaggca

SEQ ID NO: 66192 - DNA, 20 bp, synthetic construct
  source 1..20: mol_type = other DNA
gcaatttgggagcccaaggc

SEQ ID NO: 66193 - DNA, 20 bp, synthetic construct
  source 1..20: mol_type = other DNA
agcaatttgggagcccaagg

SEQ ID NO: 66194 - DNA, 20 bp, synthetic construct
  source 1..20: mol_type = other DNA
cagcaatttgggagcccaag

SEQ ID NO: 66195 - DNA, 20 bp, synthetic construct
  source 1..20: mol_type = other DNA
ccagcaatttgggagcccaa

SEQ ID NO: 66196 - DNA, 20 bp, synthetic construct
  source 1..20: mol_type = other DNA
cccagcaatttgggagccca

SEQ ID NO: 66197 - DNA, 20 bp, synthetic construct
  source 1..20: mol_type = other DNA
tcccagcaatttgggagccc

SEQ ID NO: 66198 - DNA, 20 bp, synthetic construct
  source 1..20: mol_type = other DNA
atcccagcaatttgggagcc

SEQ ID NO: 66199 - DNA, 20 bp, synthetic construct
  source 1..20: mol_type = other DNA
aatcccagcaatttgggagc

SEQ ID NO: 66200 - DNA, 20 bp, synthetic construct
  source 1..20: mol_type = other DNA
taatcccagcaatttgggag

SEQ ID NO: 66201 - DNA, 20 bp, synthetic construct
  source 1..20: mol_type = other DNA
gtaatcccagcaatttggga

SEQ ID NO: 66202 - DNA, 20 bp, synthetic construct
  source 1..20: mol_type = other DNA
tgtaatcccagcaatttggg

SEQ ID NO: 66203 - DNA, 20 bp, synthetic construct
  source 1..20: mol_type = other DNA
ctgtaatcccagcaatttgg

SEQ ID NO: 66204 - DNA, 20 bp, synthetic construct
  source 1..20: mol_type = other DNA
cctgtaatcccagcaatttg

SEQ ID NO: 66205 - DNA, 20 bp, synthetic construct
  source 1..20: mol_type = other DNA
gcctgtaatcccagcaattt

SEQ ID NO: 66206 - DNA, 20 bp, synthetic construct
  source 1..20: mol_type = other DNA
cgcctgtaatcccagcaatt

SEQ ID NO: 66207 - DNA, 20 bp, synthetic construct
  source 1..20: mol_type = other DNA
acgcctgtaatcccagcaat

SEQ ID NO: 66208 - DNA, 20 bp, synthetic construct
  source 1..20: mol_type = other DNA
cacgcctgtaatcccagcaa

SEQ ID NO: 66209 - DNA, 20 bp, synthetic construct
  source 1..20: mol_type = other DNA
tcacgcctgtaatcccagca

SEQ ID NO: 66210 - DNA, 20 bp, synthetic construct
  source 1..20: mol_type = other DNA
ctcacgcctgtaatcccagc

SEQ ID NO: 66211 - DNA, 20 bp, synthetic construct
  source 1..20: mol_type = other DNA
gctcacgcctgtaatcccag

SEQ ID NO: 66212 - DNA, 20 bp, synthetic construct
  source 1..20: mol_type = other DNA
ggctcacgcctgtaatccca

SEQ ID NO: 66213 - DNA, 20 bp, synthetic construct
  source 1..20: mol_type = other DNA
tggctcacgcctgtaatccc

SEQ ID NO: 66214 - DNA, 20 bp, synthetic construct
  source 1..20: mol_type = other DNA
gtggctcacgcctgtaatcc

SEQ ID NO: 66215 - DNA, 20 bp, synthetic construct
  source 1..20: mol_type = other DNA
ggtggctcacgcctgtaatc

SEQ ID NO: 66216 - DNA, 20 bp, synthetic construct
  source 1..20: mol_type = other DNA
cggtggctcacgcctgtaat

SEQ ID NO: 66217 - DNA, 20 bp, synthetic construct
  source 1..20: mol_type = other DNA
gcggtggctcacgcctgtaa

SEQ ID NO: 66218 - DNA, 20 bp, synthetic construct
  source 1..20: mol_type = other DNA
cgcggtggctcacgcctgta

SEQ ID NO: 66219 - DNA, 20 bp, synthetic construct
  source 1..20: mol_type = other DNA
ccgcggtggctcacgcctgt

SEQ ID NO: 66220 - DNA, 20 bp, synthetic construct
  source 1..20: mol_type = other DNA
gccgcggtggctcacgcctg

SEQ ID NO: 66221 - DNA, 20 bp, synthetic construct
  source 1..20: mol_type = other DNA
ggccgcggtggctcacgcct

SEQ ID NO: 66222 - DNA, 20 bp, synthetic construct
  source 1..20: mol_type = other DNA
gggccgcggtggctcacgcc

SEQ ID NO: 66223 - DNA, 20 bp, synthetic construct
  source 1..20: mol_type = other DNA
ggggccgcggtggctcacgc

SEQ ID NO: 66224 - DNA, 20 bp, synthetic construct
  source 1..20: mol_type = other DNA
gggggccgcggtggctcacg

SEQ ID NO: 66225 - DNA, 20 bp, synthetic construct
  source 1..20: mol_type = other DNA
agggggccgcggtggctcac

SEQ ID NO: 66226 - DNA, 20 bp, synthetic construct
  source 1..20: mol_type = other DNA
cagggggccgcggtggctca

SEQ ID NO: 66227 - DNA, 20 bp, synthetic construct
  source 1..20: mol_type = other DNA
acagggggccgcggtggctc

SEQ ID NO: 66228 - DNA, 20 bp, synthetic construct
  source 1..20: mol_type = other DNA
cacagggggccgcggtggct

SEQ ID NO: 66229 - DNA, 20 bp, synthetic construct
  source 1..20: mol_type = other DNA
gcacagggggccgcggtggc

SEQ ID NO: 66230 - DNA, 20 bp, synthetic construct
  source 1..20: mol_type = other DNA
ggcacagggggccgcggtgg

SEQ ID NO: 66231 - DNA, 20 bp, synthetic construct
  source 1..20: mol_type = other DNA
aggcacagggggccgcggtg

SEQ ID NO: 66232 - DNA, 20 bp, synthetic construct
  source 1..20: mol_type = other DNA
aaggcacagggggccgcggt

SEQ ID NO: 66233 - DNA, 20 bp, synthetic construct
  source 1..20: mol_type = other DNA
gaaggcacagggggccgcgg

SEQ ID NO: 66234 - DNA, 20 bp, synthetic construct
  source 1..20: mol_type = other DNA
agaaggcacagggggccgcg

SEQ ID NO: 66235 - DNA, 20 bp, synthetic construct
  source 1..20: mol_type = other DNA
aagaaggcacagggggccgc

SEQ ID NO: 66236 - DNA, 20 bp, synthetic construct
  source 1..20: mol_type = other DNA
gaagaaggcacagggggccg

SEQ ID NO: 66237 - DNA, 20 bp, synthetic construct
  source 1..20: mol_type = other DNA
agaagaaggcacagggggcc

SEQ ID NO: 66238 - DNA, 20 bp, synthetic construct
  source 1..20: mol_type = other DNA
aagaagaaggcacagggggc

SEQ ID NO: 66239 - DNA, 20 bp, synthetic construct
  source 1..20: mol_type = other DNA
aaagaagaaggcacaggggg

SEQ ID NO: 66240 - DNA, 20 bp, synthetic construct
  source 1..20: mol_type = other DNA
aaaagaagaaggcacagggg

SEQ ID NO: 66241 - DNA, 20 bp, synthetic construct
  source 1..20: mol_type = other DNA
taaaagaagaaggcacaggg

SEQ ID NO: 66242 - DNA, 20 bp, synthetic construct
  source 1..20: mol_type = other DNA
gtaaaagaagaaggcacagg

SEQ ID NO: 66243 - DNA, 20 bp, synthetic construct
  source 1..20: mol_type = other DNA
agtaaaagaagaaggcacag

SEQ ID NO: 66244 - DNA, 20 bp, synthetic construct
  source 1..20: mol_type = other DNA
gagtaaaagaagaaggcaca

SEQ ID NO: 66245 - DNA, 20 bp, synthetic construct
  source 1..20: mol_type = other DNA
ggagtaaaagaagaaggcac

SEQ ID NO: 66246 - DNA, 20 bp, synthetic construct
  source 1..20: mol_type = other DNA
aggagtaaaagaagaaggca

SEQ ID NO: 66247 - DNA, 20 bp, synthetic construct
  source 1..20: mol_type = other DNA
caggagtaaaagaagaaggc

SEQ ID NO: 66248 - DNA, 20 bp, synthetic construct
  source 1..20: mol_type = other DNA
ccaggagtaaaagaagaagg

SEQ ID NO: 66249 - DNA, 20 bp, synthetic construct
  source 1..20: mol_type = other DNA
tccaggagtaaaagaagaag

SEQ ID NO: 66250 - DNA, 20 bp, synthetic construct
  source 1..20: mol_type = other DNA
atccaggagtaaaagaagaa

SEQ ID NO: 66251 - DNA, 20 bp, synthetic construct
  source 1..20: mol_type = other DNA
aatccaggagtaaaagaaga

SEQ ID NO: 66252 - DNA, 20 bp, synthetic construct
  source 1..20: mol_type = other DNA
aaatccaggagtaaaagaag

SEQ ID NO: 66253 - DNA, 20 bp, synthetic construct
  source 1..20: mol_type = other DNA
taaatccaggagtaaaagaa

SEQ ID NO: 66254 - DNA, 20 bp, synthetic construct
  source 1..20: mol_type = other DNA
ttaaatccaggagtaaaaga

SEQ ID NO: 66255 - DNA, 20 bp, synthetic construct
  source 1..20: mol_type = other DNA
attaaatccaggagtaaaag

SEQ ID NO: 66256 - DNA, 20 bp, synthetic construct
  source 1..20: mol_type = other DNA
gattaaatccaggagtaaaa

SEQ ID NO: 66257 - DNA, 20 bp, synthetic construct
  source 1..20: mol_type = other DNA
ggattaaatccaggagtaaa

SEQ ID NO: 66258 - DNA, 20 bp, synthetic construct
  source 1..20: mol_type = other DNA
gggattaaatccaggagtaa

SEQ ID NO: 66259 - DNA, 20 bp, synthetic construct
  source 1..20: mol_type = other DNA
tgggattaaatccaggagta

SEQ ID NO: 66260 - DNA, 20 bp, synthetic construct
  source 1..20: mol_type = other DNA
ttgggattaaatccaggagt

SEQ ID NO: 66261 - DNA, 20 bp, synthetic construct
  source 1..20: mol_type = other DNA
gttgggattaaatccaggag

SEQ ID NO: 66262 - DNA, 20 bp, synthetic construct
  source 1..20: mol_type = other DNA
cgttgggattaaatccagga

SEQ ID NO: 66263 - DNA, 20 bp, synthetic construct
  source 1..20: mol_type = other DNA
acgttgggattaaatccagg

SEQ ID NO: 66264 - DNA, 20 bp, synthetic construct
  source 1..20: mol_type = other DNA
cacgttgggattaaatccag

SEQ ID NO: 66265 - DNA, 20 bp, synthetic construct
  source 1..20: mol_type = other DNA
tcacgttgggattaaatcca

SEQ ID NO: 66266 - DNA, 20 bp, synthetic construct
  source 1..20: mol_type = other DNA
ttcacgttgggattaaatcc

SEQ ID NO: 66267 - DNA, 20 bp, synthetic construct
  source 1..20: mol_type = other DNA
cttcacgttgggattaaatc

SEQ ID NO: 66268 - DNA, 20 bp, synthetic construct
  source 1..20: mol_type = other DNA
tcttcacgttgggattaaat

SEQ ID NO: 66269 - DNA, 20 bp, synthetic construct
  source 1..20: mol_type = other DNA
ttcttcacgttgggattaaa

SEQ ID NO: 66270 - DNA, 20 bp, synthetic construct
  source 1..20: mol_type = other DNA
attcttcacgttgggattaa

SEQ ID NO: 66271 - DNA, 20 bp, synthetic construct
  source 1..20: mol_type = other DNA
gattcttcacgttgggatta

SEQ ID NO: 66272 - DNA, 20 bp, synthetic construct
  source 1..20: mol_type = other DNA
agattcttcacgttgggatt

SEQ ID NO: 66273 - DNA, 20 bp, synthetic construct
  source 1..20: mol_type = other DNA
tagattcttcacgttgggat

SEQ ID NO: 66274 - DNA, 20 bp, synthetic construct
  source 1..20: mol_type = other DNA
gtagattcttcacgttggga

SEQ ID NO: 66275 - DNA, 20 bp, synthetic construct
  source 1..20: mol_type = other DNA
ggtagattcttcacgttggg

SEQ ID NO: 66276 - DNA, 20 bp, synthetic construct
  source 1..20: mol_type = other DNA
aggtagattcttcacgttgg

SEQ ID NO: 66277 - DNA, 20 bp, synthetic construct
  source 1..20: mol_type = other DNA
aaggtagattcttcacgttg

SEQ ID NO: 66278 - DNA, 20 bp, synthetic construct
  source 1..20: mol_type = other DNA
taaggtagattcttcacgtt

SEQ ID NO: 66279 - DNA, 20 bp, synthetic construct
  source 1..20: mol_type = other DNA
gtaaggtagattcttcacgt

SEQ ID NO: 66280 - DNA, 20 bp, synthetic construct
  source 1..20: mol_type = other DNA
agtaaggtagattcttcacg

SEQ ID NO: 66281 - DNA, 20 bp, synthetic construct
  source 1..20: mol_type = other DNA
tagtaaggtagattcttcac

SEQ ID NO: 66282 - DNA, 20 bp, synthetic construct
  source 1..20: mol_type = other DNA
ttagtaaggtagattcttca

SEQ ID NO: 66283 - DNA, 20 bp, synthetic construct
  source 1..20: mol_type = other DNA
gttagtaaggtagattcttc

SEQ ID NO: 66284 - DNA, 20 bp, synthetic construct
  source 1..20: mol_type = other DNA
agttagtaaggtagattctt

SEQ ID NO: 66285 - DNA, 20 bp, synthetic construct
  source 1..20: mol_type = other DNA
tagttagtaaggtagattct

SEQ ID NO: 66286 - DNA, 20 bp, synthetic construct
  source 1..20: mol_type = other DNA
ctagttagtaaggtagattc

SEQ ID NO: 66287 - DNA, 20 bp, synthetic construct
  source 1..20: mol_type = other DNA
tctagttagtaaggtagatt

SEQ ID NO: 66288 - DNA, 20 bp, synthetic construct
  source 1..20: mol_type = other DNA
ctctagttagtaaggtagat

SEQ ID NO: 66289 - DNA, 20 bp, synthetic construct
  source 1..20: mol_type = other DNA
actctagttagtaaggtaga

SEQ ID NO: 66290 - DNA, 20 bp, synthetic construct
  source 1..20: mol_type = other DNA
aactctagttagtaaggtag

SEQ ID NO: 66291 - DNA, 20 bp, synthetic construct
  source 1..20: mol_type = other DNA
aaactctagttagtaaggta

SEQ ID NO: 66292 - DNA, 20 bp, synthetic construct
  source 1..20: mol_type = other DNA
aaaactctagttagtaaggt

SEQ ID NO: 66293 - DNA, 20 bp, synthetic construct
  source 1..20: mol_type = other DNA
taaaactctagttagtaagg

SEQ ID NO: 66294 - DNA, 20 bp, synthetic construct
  source 1..20: mol_type = other DNA
ctaaaactctagttagtaag

SEQ ID NO: 66295 - DNA, 20 bp, synthetic construct
  source 1..20: mol_type = other DNA
tctaaaactctagttagtaa

SEQ ID NO: 66296 - DNA, 20 bp, synthetic construct
  source 1..20: mol_type = other DNA
atctaaaactctagttagta

SEQ ID NO: 66297 - DNA, 20 bp, synthetic construct
  source 1..20: mol_type = other DNA
tatctaaaactctagttagt

SEQ ID NO: 66298 - DNA, 20 bp, synthetic construct
  source 1..20: mol_type = other DNA
gtatctaaaactctagttag

SEQ ID NO: 66299 - DNA, 20 bp, synthetic construct
  source 1..20: mol_type = other DNA
agtatctaaaactctagtta

SEQ ID NO: 66300 - DNA, 20 bp, synthetic construct
  source 1..20: mol_type = other DNA
aagtatctaaaactctagtt

SEQ ID NO: 66301 - DNA, 20 bp, synthetic construct
  source 1..20: mol_type = other DNA
aaagtatctaaaactctagt

SEQ ID NO: 66302 - DNA, 20 bp, synthetic construct
  source 1..20: mol_type = other DNA
aaaagtatctaaaactctag

SEQ ID NO: 66303 - DNA, 20 bp, synthetic construct
  source 1..20: mol_type = other DNA
aaaaagtatctaaaactcta

SEQ ID NO: 66304 - DNA, 20 bp, synthetic construct
  source 1..20: mol_type = other DNA
gaaaaagtatctaaaactct

SEQ ID NO: 66305 - DNA, 20 bp, synthetic construct
  source 1..20: mol_type = other DNA
tgaaaaagtatctaaaactc

SEQ ID NO: 66306 - DNA, 20 bp, synthetic construct
  source 1..20: mol_type = other DNA
ttgaaaaagtatctaaaact

SEQ ID NO: 66307 - DNA, 20 bp, synthetic construct
  source 1..20: mol_type = other DNA
tttgaaaaagtatctaaaac

SEQ ID NO: 66308 - DNA, 20 bp, synthetic construct
  source 1..20: mol_type = other DNA
ttttgaaaaagtatctaaaa

SEQ ID NO: 66309 - DNA, 20 bp, synthetic construct
  source 1..20: mol_type = other DNA
gttttgaaaaagtatctaaa

SEQ ID NO: 66310 - DNA, 20 bp, synthetic construct
  source 1..20: mol_type = other DNA
ggttttgaaaaagtatctaa

SEQ ID NO: 66311 - DNA, 20 bp, synthetic construct
  source 1..20: mol_type = other DNA
tggttttgaaaaagtatcta

SEQ ID NO: 66312 - DNA, 20 bp, synthetic construct
  source 1..20: mol_type = other DNA
ttggttttgaaaaagtatct

SEQ ID NO: 66313 - DNA, 20 bp, synthetic construct
  source 1..20: mol_type = other DNA
cttggttttgaaaaagtatc

SEQ ID NO: 66314 - DNA, 20 bp, synthetic construct
  source 1..20: mol_type = other DNA
gcttggttttgaaaaagtat

SEQ ID NO: 66315 - DNA, 20 bp, synthetic construct
  source 1..20: mol_type = other DNA
ggcttggttttgaaaaagta

SEQ ID NO: 66316 - DNA, 20 bp, synthetic construct
  source 1..20: mol_type = other DNA
gggcttggttttgaaaaagt

SEQ ID NO: 66317 - DNA, 20 bp, synthetic construct
  source 1..20: mol_type = other DNA
tgggcttggttttgaaaaag

SEQ ID NO: 66318 - DNA, 20 bp, synthetic construct
  source 1..20: mol_type = other DNA
gtgggcttggttttgaaaaa

SEQ ID NO: 66319 - DNA, 20 bp, synthetic construct
  source 1..20: mol_type = other DNA
tgtgggcttggttttgaaaa

SEQ ID NO: 66320 - DNA, 20 bp, synthetic construct
  source 1..20: mol_type = other DNA
atgtgggcttggttttgaaa

SEQ ID NO: 66321 - DNA, 20 bp, synthetic construct
  source 1..20: mol_type = other DNA
gatgtgggcttggttttgaa

SEQ ID NO: 66322 - DNA, 20 bp, synthetic construct
  source 1..20: mol_type = other DNA
agatgtgggcttggttttga

SEQ ID NO: 66323 - DNA, 20 bp, synthetic construct
  source 1..20: mol_type = other DNA
cagatgtgggcttggttttg

SEQ ID NO: 66324 - DNA, 20 bp, synthetic construct
  source 1..20: mol_type = other DNA
acagatgtgggcttggtttt

SEQ ID NO: 66325 - DNA, 20 bp, synthetic construct
  source 1..20: mol_type = other DNA
gacagatgtgggcttggttt

SEQ ID NO: 66326 - DNA, 20 bp, synthetic construct
  source 1..20: mol_type = other DNA
ggacagatgtgggcttggtt

SEQ ID NO: 66327 - DNA, 20 bp, synthetic construct
  source 1..20: mol_type = other DNA
aggacagatgtgggcttggt

SEQ ID NO: 66328 - DNA, 20 bp, synthetic construct
  source 1..20: mol_type = other DNA
aaggacagatgtgggcttgg

SEQ ID NO: 66329 - DNA, 20 bp, synthetic construct
  source 1..20: mol_type = other DNA
aaaggacagatgtgggcttg

SEQ ID NO: 66330 - DNA, 20 bp, synthetic construct
  source 1..20: mol_type = other DNA
aaaaggacagatgtgggctt

SEQ ID NO: 66331 - DNA, 20 bp, synthetic construct
  source 1..20: mol_type = other DNA
aaaaaggacagatgtgggct

SEQ ID NO: 66332 - DNA, 20 bp, synthetic construct
  source 1..20: mol_type = other DNA
taaaaaggacagatgtgggc

SEQ ID NO: 66333 - DNA, 20 bp, synthetic construct
  source 1..20: mol_type = other DNA
ctaaaaaggacagatgtggg

SEQ ID NO: 66334 - DNA, 20 bp, synthetic construct
  source 1..20: mol_type = other DNA
tctaaaaaggacagatgtgg

SEQ ID NO: 66335 - DNA, 20 bp, synthetic construct
  source 1..20: mol_type = other DNA
ctctaaaaaggacagatgtg

SEQ ID NO: 66336 - DNA, 20 bp, synthetic construct
  source 1..20: mol_type = other DNA
actctaaaaaggacagatgt

SEQ ID NO: 66337 - DNA, 20 bp, synthetic construct
  source 1..20: mol_type = other DNA
gactctaaaaaggacagatg

SEQ ID NO: 66338 - DNA, 20 bp, synthetic construct
  source 1..20: mol_type = other DNA
agactctaaaaaggacagat

SEQ ID NO: 66339 - DNA, 20 bp, synthetic construct
  source 1..20: mol_type = other DNA
aagactctaaaaaggacaga

SEQ ID NO: 66340 - DNA, 20 bp, synthetic construct
  source 1..20: mol_type = other DNA
gaagactctaaaaaggacag

SEQ ID NO: 66341 - DNA, 20 bp, synthetic construct
  source 1..20: mol_type = other DNA
agaagactctaaaaaggaca

SEQ ID NO: 66342 - DNA, 20 bp, synthetic construct
  source 1..20: mol_type = other DNA
gagaagactctaaaaaggac

SEQ ID NO: 66343 - DNA, 20 bp, synthetic construct
  source 1..20: mol_type = other DNA
agagaagactctaaaaagga

SEQ ID NO: 66344 - DNA, 20 bp, synthetic construct
  source 1..20: mol_type = other DNA
cagagaagactctaaaaagg

SEQ ID NO: 66345 - DNA, 20 bp, synthetic construct
  source 1..20: mol_type = other DNA
tcagagaagactctaaaaag

SEQ ID NO: 66346 - DNA, 20 bp, synthetic construct
  source 1..20: mol_type = other DNA
gtcagagaagactctaaaaa

SEQ ID NO: 66347 - DNA, 20 bp, synthetic construct
  source 1..20: mol_type = other DNA
ggtcagagaagactctaaaa

SEQ ID NO: 66348 - DNA, 20 bp, synthetic construct
  source 1..20: mol_type = other DNA
aggtcagagaagactctaaa

SEQ ID NO: 66349 - DNA, 20 bp, synthetic construct
  source 1..20: mol_type = other DNA
aaggtcagagaagactctaa

SEQ ID NO: 66350 - DNA, 20 bp, synthetic construct
  source 1..20: mol_type = other DNA
gaaggtcagagaagactcta

SEQ ID NO: 66351 - DNA, 20 bp, synthetic construct
  source 1..20: mol_type = other DNA
ggaaggtcagagaagactct

SEQ ID NO: 66352 - DNA, 20 bp, synthetic construct
  source 1..20: mol_type = other DNA
gggaaggtcagagaagactc

SEQ ID NO: 66353 - DNA, 20 bp, synthetic construct
  source 1..20: mol_type = other DNA
agggaaggtcagagaagact

SEQ ID NO: 66354 - DNA, 20 bp, synthetic construct
  source 1..20: mol_type = other DNA
cagggaaggtcagagaagac

SEQ ID NO: 66355 - DNA, 20 bp, synthetic construct
  source 1..20: mol_type = other DNA
gcagggaaggtcagagaaga

SEQ ID NO: 66356 - DNA, 20 bp, synthetic construct
  source 1..20: mol_type = other DNA
agcagggaaggtcagagaag

SEQ ID NO: 66357 - DNA, 20 bp, synthetic construct
  source 1..20: mol_type = other DNA
gagcagggaaggtcagagaa

SEQ ID NO: 66358 - DNA, 20 bp, synthetic construct
  source 1..20: mol_type = other DNA
tgagcagggaaggtcagaga

SEQ ID NO: 66359 - DNA, 20 bp, synthetic construct
  source 1..20: mol_type = other DNA
atgagcagggaaggtcagag

SEQ ID NO: 66360 - DNA, 20 bp, synthetic construct
  source 1..20: mol_type = other DNA
aatgagcagggaaggtcaga

SEQ ID NO: 66361 - DNA, 20 bp, synthetic construct
  source 1..20: mol_type = other DNA
caatgagcagggaaggtcag

SEQ ID NO: 66362 - DNA, 20 bp, synthetic construct
  source 1..20: mol_type = other DNA
acaatgagcagggaaggtca

SEQ ID NO: 66363 - DNA, 20 bp, synthetic construct
  source 1..20: mol_type = other DNA
cacaatgagcagggaaggtc

SEQ ID NO: 66364 - DNA, 20 bp, synthetic construct
  source 1..20: mol_type = other DNA
ccacaatgagcagggaaggt

SEQ ID NO: 66365 - DNA, 20 bp, synthetic construct
  source 1..20: mol_type = other DNA
accacaatgagcagggaagg

SEQ ID NO: 66366 - DNA, 20 bp, synthetic construct
  source 1..20: mol_type = other DNA
aaccacaatgagcagggaag

SEQ ID NO: 66367 - DNA, 20 bp, synthetic construct
  source 1..20: mol_type = other DNA
aaaccacaatgagcagggaa

SEQ ID NO: 66368 - DNA, 20 bp, synthetic construct
  source 1..20: mol_type = other DNA
caaaccacaatgagcaggga

SEQ ID NO: 66369 - DNA, 20 bp, synthetic construct
  source 1..20: mol_type = other DNA
acaaaccacaatgagcaggg

SEQ ID NO: 66370 - DNA, 20 bp, synthetic construct
  source 1..20: mol_type = other DNA
aacaaaccacaatgagcagg

SEQ ID NO: 66371 - DNA, 20 bp, synthetic construct
  source 1..20: mol_type = other DNA
aaacaaaccacaatgagcag

SEQ ID NO: 66372 - DNA, 20 bp, synthetic construct
  source 1..20: mol_type = other DNA
aaaacaaaccacaatgagca

SEQ ID NO: 66373 - DNA, 20 bp, synthetic construct
  source 1..20: mol_type = other DNA
aaaaacaaaccacaatgagc

SEQ ID NO: 66374 - DNA, 20 bp, synthetic construct
  source 1..20: mol_type = other DNA
taaaaacaaaccacaatgag

SEQ ID NO: 66375 - DNA, 20 bp, synthetic construct
  source 1..20: mol_type = other DNA
ataaaaacaaaccacaatga

SEQ ID NO: 66376 - DNA, 20 bp, synthetic construct
  source 1..20: mol_type = other DNA
aataaaaacaaaccacaatg

SEQ ID NO: 66377 - DNA, 20 bp, synthetic construct
  source 1..20: mol_type = other DNA
caataaaaacaaaccacaat

SEQ ID NO: 66378 - DNA, 20 bp, synthetic construct
  source 1..20: mol_type = other DNA
gcaataaaaacaaaccacaa

SEQ ID NO: 66379 - DNA, 20 bp, synthetic construct
  source 1..20: mol_type = other DNA
ggcaataaaaacaaaccaca

SEQ ID NO: 66380 - DNA, 20 bp, synthetic construct
  source 1..20: mol_type = other DNA
aggcaataaaaacaaaccac

SEQ ID NO: 66381 - DNA, 20 bp, synthetic construct
  source 1..20: mol_type = other DNA
caggcaataaaaacaaacca

SEQ ID NO: 66382 - DNA, 20 bp, synthetic construct
  source 1..20: mol_type = other DNA
acaggcaataaaaacaaacc

SEQ ID NO: 66383 - DNA, 20 bp, synthetic construct
  source 1..20: mol_type = other DNA
tacaggcaataaaaacaaac

SEQ ID NO: 66384 - DNA, 20 bp, synthetic construct
  source 1..20: mol_type = other DNA
ttacaggcaataaaaacaaa

SEQ ID NO: 66385 - DNA, 20 bp, synthetic construct
  source 1..20: mol_type = other DNA
gttacaggcaataaaaacaa

SEQ ID NO: 66386 - DNA, 20 bp, synthetic construct
  source 1..20: mol_type = other DNA
tgttacaggcaataaaaaca

SEQ ID NO: 66387 - DNA, 20 bp, synthetic construct
  source 1..20: mol_type = other DNA
ttgttacaggcaataaaaac

SEQ ID NO: 66388 - DNA, 20 bp, synthetic construct
  source 1..20: mol_type = other DNA
attgttacaggcaataaaaa

SEQ ID NO: 66389 - DNA, 20 bp, synthetic construct
  source 1..20: mol_type = other DNA
cattgttacaggcaataaaa

SEQ ID NO: 66390 - DNA, 20 bp, synthetic construct
  source 1..20: mol_type = other DNA
ccattgttacaggcaataaa

SEQ ID NO: 66391 - DNA, 20 bp, synthetic construct
  source 1..20: mol_type = other DNA
gccattgttacaggcaataa

SEQ ID NO: 66392 - DNA, 20 bp, synthetic construct
  source 1..20: mol_type = other DNA
agccattgttacaggcaata

SEQ ID NO: 66393 - DNA, 20 bp, synthetic construct
  source 1..20: mol_type = other DNA
cagccattgttacaggcaat

SEQ ID NO: 66394 - DNA, 20 bp, synthetic construct
  source 1..20: mol_type = other DNA
acagccattgttacaggcaa

SEQ ID NO: 66395 - DNA, 20 bp, synthetic construct
  source 1..20: mol_type = other DNA
aacagccattgttacaggca

SEQ ID NO: 66396 - DNA, 20 bp, synthetic construct
  source 1..20: mol_type = other DNA
taacagccattgttacaggc

SEQ ID NO: 66397 - DNA, 20 bp, synthetic construct
  source 1..20: mol_type = other DNA
ttaacagccattgttacagg

SEQ ID NO: 66398 - DNA, 20 bp, synthetic construct
  source 1..20: mol_type = other DNA
tttaacagccattgttacag

SEQ ID NO: 66399 - DNA, 20 bp, synthetic construct
  source 1..20: mol_type = other DNA
gtttaacagccattgttaca

SEQ ID NO: 66400 - DNA, 20 bp, synthetic construct
  source 1..20: mol_type = other DNA
agtttaacagccattgttac

SEQ ID NO: 66401 - DNA, 20 bp, synthetic construct
  source 1..20: mol_type = other DNA
aagtttaacagccattgtta

SEQ ID NO: 66402 - DNA, 20 bp, synthetic construct
  source 1..20: mol_type = other DNA
aaagtttaacagccattgtt

SEQ ID NO: 66403 - DNA, 20 bp, synthetic construct
  source 1..20: mol_type = other DNA
taaagtttaacagccattgt

SEQ ID NO: 66404 - DNA, 20 bp, synthetic construct
  source 1..20: mol_type = other DNA
gtaaagtttaacagccattg

SEQ ID NO: 66405 - DNA, 20 bp, synthetic construct
  source 1..20: mol_type = other DNA
tgtaaagtttaacagccatt

SEQ ID NO: 66406 - DNA, 20 bp, synthetic construct
  source 1..20: mol_type = other DNA
atgtaaagtttaacagccat

SEQ ID NO: 66407 - DNA, 20 bp, synthetic construct
  source 1..20: mol_type = other DNA
aatgtaaagtttaacagcca

SEQ ID NO: 66408 - DNA, 20 bp, synthetic construct
  source 1..20: mol_type = other DNA
aaatgtaaagtttaacagcc

SEQ ID NO: 66409 - DNA, 20 bp, synthetic construct
  source 1..20: mol_type = other DNA
aaaatgtaaagtttaacagc

SEQ ID NO: 66410 - DNA, 20 bp, synthetic construct
  source 1..20: mol_type = other DNA
taaaatgtaaagtttaacag

SEQ ID NO: 66411 - DNA, 20 bp, synthetic construct
  source 1..20: mol_type = other DNA
ttaaaatgtaaagtttaaca

SEQ ID NO: 66412 - DNA, 20 bp, synthetic construct
  source 1..20: mol_type = other DNA
tttaaaatgtaaagtttaac

SEQ ID NO: 66413 - DNA, 20 bp, synthetic construct
  source 1..20: mol_type = other DNA
atttaaaatgtaaagtttaa

SEQ ID NO: 66414 - DNA, 20 bp, synthetic construct
  source 1..20: mol_type = other DNA
aatttaaaatgtaaagttta

SEQ ID NO: 66415 - DNA, 20 bp, synthetic construct
  source 1..20: mol_type = other DNA
taatttaaaatgtaaagttt

SEQ ID NO: 66416 - DNA, 20 bp, synthetic construct
  source 1..20: mol_type = other DNA
ttaatttaaaatgtaaagtt

SEQ ID NO: 66417 - DNA, 20 bp, synthetic construct
  source 1..20: mol_type = other DNA
attaatttaaaatgtaaagt

SEQ ID NO: 66418 - DNA, 20 bp, synthetic construct
  source 1..20: mol_type = other DNA
aattaatttaaaatgtaaag

SEQ ID NO: 66419 - DNA, 20 bp, synthetic construct
  source 1..20: mol_type = other DNA
aaattaatttaaaatgtaaa

SEQ ID NO: 66420 - DNA, 20 bp, synthetic construct
  source 1..20: mol_type = other DNA
taaattaatttaaaatgtaa

SEQ ID NO: 66421 - DNA, 20 bp, synthetic construct
  source 1..20: mol_type = other DNA
ataaattaatttaaaatgta

SEQ ID NO: 66422 - DNA, 20 bp, synthetic construct
  source 1..20: mol_type = other DNA
cataaattaatttaaaatgt

SEQ ID NO: 66423 - DNA, 20 bp, synthetic construct
  source 1..20: mol_type = other DNA
acataaattaatttaaaatg

SEQ ID NO: 66424 - DNA, 20 bp, synthetic construct
  source 1..20: mol_type = other DNA
aacataaattaatttaaaat

SEQ ID NO: 66425 - DNA, 20 bp, synthetic construct
  source 1..20: mol_type = other DNA
aaacataaattaatttaaaa

SEQ ID NO: 66426 - DNA, 20 bp, synthetic construct
  source 1..20: mol_type = other DNA
caaacataaattaatttaaa

SEQ ID NO: 66427 - DNA, 20 bp, synthetic construct
  source 1..20: mol_type = other DNA
acaaacataaattaatttaa

SEQ ID NO: 66428 - DNA, 20 bp, synthetic construct
  source 1..20: mol_type = other DNA
tacaaacataaattaattta

SEQ ID NO: 66429 - DNA, 20 bp, synthetic construct
  source 1..20: mol_type = other DNA
atacaaacataaattaattt

SEQ ID NO: 66430 - DNA, 20 bp, synthetic construct
  source 1..20: mol_type = other DNA
catacaaacataaattaatt

SEQ ID NO: 66431 - DNA, 20 bp, synthetic construct
  source 1..20: mol_type = other DNA
acatacaaacataaattaat

SEQ ID NO: 66432 - DNA, 20 bp, synthetic construct
  source 1..20: mol_type = other DNA
tacatacaaacataaattaa

SEQ ID NO: 66433 - DNA, 20 bp, synthetic construct
  source 1..20: mol_type = other DNA
atacatacaaacataaatta

SEQ ID NO: 66434 - DNA, 20 bp, synthetic construct
  source 1..20: mol_type = other DNA
aatacatacaaacataaatt

SEQ ID NO: 66435 - DNA, 20 bp, synthetic construct
  source 1..20: mol_type = other DNA
aaatacatacaaacataaat

SEQ ID NO: 66436 - DNA, 20 bp, synthetic construct
  source 1..20: mol_type = other DNA
taaatacatacaaacataaa

SEQ ID NO: 66437 - DNA, 20 bp, synthetic construct
  source 1..20: mol_type = other DNA
ataaatacatacaaacataa

SEQ ID NO: 66438 - DNA, 20 bp, synthetic construct
  source 1..20: mol_type = other DNA
aataaatacatacaaacata

SEQ ID NO: 66439 - DNA, 20 bp, synthetic construct
  source 1..20: mol_type = other DNA
aaataaatacatacaaacat

SEQ ID NO: 66440 - DNA, 20 bp, synthetic construct
  source 1..20: mol_type = other DNA
caaataaatacatacaaaca

SEQ ID NO: 66441 - DNA, 20 bp, synthetic construct
  source 1..20: mol_type = other DNA
acaaataaatacatacaaac

SEQ ID NO: 66442 - DNA, 20 bp, synthetic construct
  source 1..20: mol_type = other DNA
aacaaataaatacatacaaa

SEQ ID NO: 66443 - DNA, 20 bp, synthetic construct
  source 1..20: mol_type = other DNA
caacaaataaatacatacaa

SEQ ID NO: 66444 - DNA, 20 bp, synthetic construct
  source 1..20: mol_type = other DNA
tcaacaaataaatacataca

SEQ ID NO: 66445 - DNA, 20 bp, synthetic construct
  source 1..20: mol_type = other DNA
ctcaacaaataaatacatac

SEQ ID NO: 66446 - DNA, 20 bp, synthetic construct
  source 1..20: mol_type = other DNA
tctcaacaaataaatacata

SEQ ID NO: 66447 - DNA, 20 bp, synthetic construct
  source 1..20: mol_type = other DNA
ttctcaacaaataaatacat

SEQ ID NO: 66448 - DNA, 20 bp, synthetic construct
  source 1..20: mol_type = other DNA
tttctcaacaaataaataca

SEQ ID NO: 66449 - DNA, 20 bp, synthetic construct
  source 1..20: mol_type = other DNA
ctttctcaacaaataaatac

SEQ ID NO: 66450 - DNA, 20 bp, synthetic construct
  source 1..20: mol_type = other DNA
cctttctcaacaaataaata

SEQ ID NO: 66451 - DNA, 20 bp, synthetic construct
  source 1..20: mol_type = other DNA
ccctttctcaacaaataaat

SEQ ID NO: 66452 - DNA, 20 bp, synthetic construct
  source 1..20: mol_type = other DNA
accctttctcaacaaataaa

SEQ ID NO: 66453 - DNA, 20 bp, synthetic construct
  source 1..20: mol_type = other DNA
gaccctttctcaacaaataa

SEQ ID NO: 66454 - DNA, 20 bp, synthetic construct
  source 1..20: mol_type = other DNA
agaccctttctcaacaaata

SEQ ID NO: 66455 - DNA, 20 bp, synthetic construct
  source 1..20: mol_type = other DNA
gagaccctttctcaacaaat

SEQ ID NO: 66456 - DNA, 20 bp, synthetic construct
  source 1..20: mol_type = other DNA
agagaccctttctcaacaaa

SEQ ID NO: 66457 - DNA, 20 bp, synthetic construct
  source 1..20: mol_type = other DNA
gagagaccctttctcaacaa

SEQ ID NO: 66458 - DNA, 20 bp, synthetic construct
  source 1..20: mol_type = other DNA
agagagaccctttctcaaca

SEQ ID NO: 66459 - DNA, 20 bp, synthetic construct
  source 1..20: mol_type = other DNA
gagagagaccctttctcaac

SEQ ID NO: 66460 - DNA, 20 bp, synthetic construct
  source 1..20: mol_type = other DNA
agagagagaccctttctcaa

SEQ ID NO: 66461 - DNA, 20 bp, synthetic construct
  source 1..20: mol_type = other DNA
cagagagagaccctttctca

SEQ ID NO: 66462 - DNA, 20 bp, synthetic construct
  source 1..20: mol_type = other DNA
acagagagagaccctttctc

SEQ ID NO: 66463 - DNA, 20 bp, synthetic construct
  source 1..20: mol_type = other DNA
gacagagagagaccctttct

SEQ ID NO: 66464 - DNA, 20 bp, synthetic construct
  source 1..20: mol_type = other DNA
tgacagagagagaccctttc

SEQ ID NO: 66465 - DNA, 20 bp, synthetic construct
  source 1..20: mol_type = other DNA
gtgacagagagagacccttt

SEQ ID NO: 66466 - DNA, 20 bp, synthetic construct
  source 1..20: mol_type = other DNA
ggtgacagagagagaccctt

SEQ ID NO: 66467 - DNA, 20 bp, synthetic construct
  source 1..20: mol_type = other DNA
gggtgacagagagagaccct

SEQ ID NO: 66468 - DNA, 20 bp, synthetic construct
  source 1..20: mol_type = other DNA
ggggtgacagagagagaccc

SEQ ID NO: 66469 - DNA, 20 bp, synthetic construct
  source 1..20: mol_type = other DNA
aggggtgacagagagagacc

SEQ ID NO: 66470 - DNA, 20 bp, synthetic construct
  source 1..20: mol_type = other DNA
taggggtgacagagagagac

SEQ ID NO: 66471 - DNA, 20 bp, synthetic construct
  source 1..20: mol_type = other DNA
gtaggggtgacagagagaga

SEQ ID NO: 66472 - DNA, 20 bp, synthetic construct
  source 1..20: mol_type = other DNA
agtaggggtgacagagagag

SEQ ID NO: 66473 - DNA, 20 bp, synthetic construct
  source 1..20: mol_type = other DNA
tagtaggggtgacagagaga

SEQ ID NO: 66474 - DNA, 20 bp, synthetic construct
  source 1..20: mol_type = other DNA
ctagtaggggtgacagagag

SEQ ID NO: 66475 - DNA, 20 bp, synthetic construct
  source 1..20: mol_type = other DNA
tctagtaggggtgacagaga

SEQ ID NO: 66476 - DNA, 20 bp, synthetic construct
  source 1..20: mol_type = other DNA
ttctagtaggggtgacagag

SEQ ID NO: 66477 - DNA, 20 bp, synthetic construct
  source 1..20: mol_type = other DNA
attctagtaggggtgacaga

SEQ ID NO: 66478 - DNA, 20 bp, synthetic construct
  source 1..20: mol_type = other DNA
cattctagtaggggtgacag

SEQ ID NO: 66479 - DNA, 20 bp, synthetic construct
  source 1..20: mol_type = other DNA
gcattctagtaggggtgaca

SEQ ID NO: 66480 - DNA, 20 bp, synthetic construct
  source 1..20: mol_type = other DNA
tgcattctagtaggggtgac

SEQ ID NO: 66481 - DNA, 20 bp, synthetic construct
  source 1..20: mol_type = other DNA
ctgcattctagtaggggtga

SEQ ID NO: 66482 - DNA, 20 bp, synthetic construct
  source 1..20: mol_type = other DNA
actgcattctagtaggggtg

SEQ ID NO: 66483 - DNA, 20 bp, synthetic construct
  source 1..20: mol_type = other DNA
cactgcattctagtaggggt

SEQ ID NO: 66484 - DNA, 20 bp, synthetic construct
  source 1..20: mol_type = other DNA
ccactgcattctagtagggg

SEQ ID NO: 66485 - DNA, 20 bp, synthetic construct
  source 1..20: mol_type = other DNA
gccactgcattctagtaggg

SEQ ID NO: 66486 - DNA, 20 bp, synthetic construct
  source 1..20: mol_type = other DNA
cgccactgcattctagtagg

SEQ ID NO: 66487 - DNA, 20 bp, synthetic construct
  source 1..20: mol_type = other DNA
gcgccactgcattctagtag

SEQ ID NO: 66488 - DNA, 20 bp, synthetic construct
  source 1..20: mol_type = other DNA
ggcgccactgcattctagta

SEQ ID NO: 66489 - DNA, 20 bp, synthetic construct
  source 1..20: mol_type = other DNA
tggcgccactgcattctagt

SEQ ID NO: 66490 - DNA, 20 bp, synthetic construct
  source 1..20: mol_type = other DNA
atggcgccactgcattctag

SEQ ID NO: 66491 - DNA, 20 bp, synthetic construct
  source 1..20: mol_type = other DNA
gatggcgccactgcattcta

SEQ ID NO: 66492 - DNA, 20 bp, synthetic construct
  source 1..20: mol_type = other DNA
tgatggcgccactgcattct

SEQ ID NO: 66493 - DNA, 20 bp, synthetic construct
  source 1..20: mol_type = other DNA
atgatggcgccactgcattc

SEQ ID NO: 66494 - DNA, 20 bp, synthetic construct
  source 1..20: mol_type = other DNA
catgatggcgccactgcatt

SEQ ID NO: 66495 - DNA, 20 bp, synthetic construct
  source 1..20: mol_type = other DNA
ccatgatggcgccactgcat

SEQ ID NO: 66496 - DNA, 20 bp, synthetic construct
  source 1..20: mol_type = other DNA
gccatgatggcgccactgca

SEQ ID NO: 66497 - DNA, 20 bp, synthetic construct
  source 1..20: mol_type = other DNA
agccatgatggcgccactgc

SEQ ID NO: 66498 - DNA, 20 bp, synthetic construct
  source 1..20: mol_type = other DNA
aagccatgatggcgccactg

SEQ ID NO: 66499 - DNA, 20 bp, synthetic construct
  source 1..20: mol_type = other DNA
taagccatgatggcgccact

SEQ ID NO: 66500 - DNA, 20 bp, synthetic construct
  source 1..20: mol_type = other DNA
gtaagccatgatggcgccac

SEQ ID NO: 66501 - DNA, 20 bp, synthetic construct
  source 1..20: mol_type = other DNA
agtaagccatgatggcgcca

SEQ ID NO: 66502 - DNA, 20 bp, synthetic construct
  source 1..20: mol_type = other DNA
cagtaagccatgatggcgcc

SEQ ID NO: 66503 - DNA, 20 bp, synthetic construct
  source 1..20: mol_type = other DNA
gcagtaagccatgatggcgc

SEQ ID NO: 66504 - DNA, 20 bp, synthetic construct
  source 1..20: mol_type = other DNA
agcagtaagccatgatggcg

SEQ ID NO: 66505 - DNA, 20 bp, synthetic construct
  source 1..20: mol_type = other DNA
aagcagtaagccatgatggc

SEQ ID NO: 66506 - DNA, 20 bp, synthetic construct
  source 1..20: mol_type = other DNA
gaagcagtaagccatgatgg

SEQ ID NO: 66507 - DNA, 20 bp, synthetic construct
  source 1..20: mol_type = other DNA
ggaagcagtaagccatgatg

SEQ ID NO: 66508 - DNA, 20 bp, synthetic construct
  source 1..20: mol_type = other DNA
aggaagcagtaagccatgat

SEQ ID NO: 66509 - DNA, 20 bp, synthetic construct
  source 1..20: mol_type = other DNA
caggaagcagtaagccatga

SEQ ID NO: 66510 - DNA, 20 bp, synthetic construct
  source 1..20: mol_type = other DNA
ccaggaagcagtaagccatg

SEQ ID NO: 66511 - DNA, 20 bp, synthetic construct
  source 1..20: mol_type = other DNA
cccaggaagcagtaagccat

SEQ ID NO: 66512 - DNA, 20 bp, synthetic construct
  source 1..20: mol_type = other DNA
gcccaggaagcagtaagcca

SEQ ID NO: 66513 - DNA, 20 bp, synthetic construct
  source 1..20: mol_type = other DNA
agcccaggaagcagtaagcc

SEQ ID NO: 66514 - DNA, 20 bp, synthetic construct
  source 1..20: mol_type = other DNA
gagcccaggaagcagtaagc

SEQ ID NO: 66515 - DNA, 20 bp, synthetic construct
  source 1..20: mol_type = other DNA
tgagcccaggaagcagtaag

SEQ ID NO: 66516 - DNA, 20 bp, synthetic construct
  source 1..20: mol_type = other DNA
ttgagcccaggaagcagtaa

SEQ ID NO: 66517 - DNA, 20 bp, synthetic construct
  source 1..20: mol_type = other DNA
cttgagcccaggaagcagta

SEQ ID NO: 66518 - DNA, 20 bp, synthetic construct
  source 1..20: mol_type = other DNA
gcttgagcccaggaagcagt

SEQ ID NO: 66519 - DNA, 20 bp, synthetic construct
  source 1..20: mol_type = other DNA
agcttgagcccaggaagcag

SEQ ID NO: 66520 - DNA, 20 bp, synthetic construct
  source 1..20: mol_type = other DNA
cagcttgagcccaggaagca

SEQ ID NO: 66521 - DNA, 20 bp, synthetic construct
  source 1..20: mol_type = other DNA
acagcttgagcccaggaagc

SEQ ID NO: 66522 - DNA, 20 bp, synthetic construct
  source 1..20: mol_type = other DNA
aacagcttgagcccaggaag

SEQ ID NO: 66523 - DNA, 20 bp, synthetic construct
  source 1..20: mol_type = other DNA
gaacagcttgagcccaggaa

SEQ ID NO: 66524 - DNA, 20 bp, synthetic construct
  source 1..20: mol_type = other DNA
agaacagcttgagcccagga

SEQ ID NO: 66525 - DNA, 20 bp, synthetic construct
  source 1..20: mol_type = other DNA
gagaacagcttgagcccagg

SEQ ID NO: 66526 - DNA, 20 bp, synthetic construct
  source 1..20: mol_type = other DNA
ggagaacagcttgagcccag

SEQ ID NO: 66527 - DNA, 20 bp, synthetic construct
  source 1..20: mol_type = other DNA
gggagaacagcttgagccca

SEQ ID NO: 66528 - DNA, 20 bp, synthetic construct
  source 1..20: mol_type = other DNA
tgggagaacagcttgagccc

SEQ ID NO: 66529 - DNA, 20 bp, synthetic construct
  source 1..20: mol_type = other DNA
atgggagaacagcttgagcc

SEQ ID NO: 66530 - DNA, 20 bp, synthetic construct
  source 1..20: mol_type = other DNA
aatgggagaacagcttgagc

SEQ ID NO: 66531 - DNA, 20 bp, synthetic construct
  source 1..20: mol_type = other DNA
aaatgggagaacagcttgag

SEQ ID NO: 66532 - DNA, 20 bp, synthetic construct
  source 1..20: mol_type = other DNA
gaaatgggagaacagcttga

SEQ ID NO: 66533 - DNA, 20 bp, synthetic construct
  source 1..20: mol_type = other DNA
tgaaatgggagaacagcttg

SEQ ID NO: 66534 - DNA, 20 bp, synthetic construct
  source 1..20: mol_type = other DNA
ctgaaatgggagaacagctt

SEQ ID NO: 66535 - DNA, 20 bp, synthetic construct
  source 1..20: mol_type = other DNA
gctgaaatgggagaacagct

SEQ ID NO: 66536 - DNA, 20 bp, synthetic construct
  source 1..20: mol_type = other DNA
ggctgaaatgggagaacagc

SEQ ID NO: 66537 - DNA, 20 bp, synthetic construct
  source 1..20: mol_type = other DNA
aggctgaaatgggagaacag

SEQ ID NO: 66538 - DNA, 20 bp, synthetic construct
  source 1..20: mol_type = other DNA
gaggctgaaatgggagaaca

SEQ ID NO: 66539 - DNA, 20 bp, synthetic construct
  source 1..20: mol_type = other DNA
ggaggctgaaatgggagaac

SEQ ID NO: 66540 - DNA, 20 bp, synthetic construct
  source 1..20: mol_type = other DNA
gggaggctgaaatgggagaa

SEQ ID NO: 66541 - DNA, 20 bp, synthetic construct
  source 1..20: mol_type = other DNA
ggggaggctgaaatgggaga

SEQ ID NO: 66542 - DNA, 20 bp, synthetic construct
  source 1..20: mol_type = other DNA
tggggaggctgaaatgggag

SEQ ID NO: 66543 - DNA, 20 bp, synthetic construct
  source 1..20: mol_type = other DNA
atggggaggctgaaatggga

SEQ ID NO: 66544 - DNA, 20 bp, synthetic construct
  source 1..20: mol_type = other DNA
catggggaggctgaaatggg

SEQ ID NO: 66545 - DNA, 20 bp, synthetic construct
  source 1..20: mol_type = other DNA
gcatggggaggctgaaatgg

SEQ ID NO: 66546 - DNA, 20 bp, synthetic construct
  source 1..20: mol_type = other DNA
tgcatggggaggctgaaatg

SEQ ID NO: 66547 - DNA, 20 bp, synthetic construct
  source 1..20: mol_type = other DNA
gtgcatggggaggctgaaat

SEQ ID NO: 66548 - DNA, 20 bp, synthetic construct
  source 1..20: mol_type = other DNA
ggtgcatggggaggctgaaa

SEQ ID NO: 66549 - DNA, 20 bp, synthetic construct
  source 1..20: mol_type = other DNA
tggtgcatggggaggctgaa

SEQ ID NO: 66550 - DNA, 20 bp, synthetic construct
  source 1..20: mol_type = other DNA
gtggtgcatggggaggctga

SEQ ID NO: 66551 - DNA, 20 bp, synthetic construct
  source 1..20: mol_type = other DNA
ggtggtgcatggggaggctg

SEQ ID NO: 66552 - DNA, 20 bp, synthetic construct
  source 1..20: mol_type = other DNA
gggtggtgcatggggaggct

SEQ ID NO: 66553 - DNA, 20 bp, synthetic construct
  source 1..20: mol_type = other DNA
agggtggtgcatggggaggc

SEQ ID NO: 66554 - DNA, 20 bp, synthetic construct
  source 1..20: mol_type = other DNA
tagggtggtgcatggggagg

SEQ ID NO: 66555 - DNA, 20 bp, synthetic construct
  source 1..20: mol_type = other DNA
gtagggtggtgcatggggag

SEQ ID NO: 66556 - DNA, 20 bp, synthetic construct
  source 1..20: mol_type = other DNA
ggtagggtggtgcatgggga

SEQ ID NO: 66557 - DNA, 20 bp, synthetic construct
  source 1..20: mol_type = other DNA
aggtagggtggtgcatgggg

SEQ ID NO: 66558 - DNA, 20 bp, synthetic construct
  source 1..20: mol_type = other DNA
caggtagggtggtgcatggg

SEQ ID NO: 66559 - DNA, 20 bp, synthetic construct
  source 1..20: mol_type = other DNA
ccaggtagggtggtgcatgg

SEQ ID NO: 66560 - DNA, 20 bp, synthetic construct
  source 1..20: mol_type = other DNA
gccaggtagggtggtgcatg

SEQ ID NO: 66561 - DNA, 20 bp, synthetic construct
  source 1..20: mol_type = other DNA
agccaggtagggtggtgcat

SEQ ID NO: 66562 - DNA, 20 bp, synthetic construct
  source 1..20: mol_type = other DNA
tagccaggtagggtggtgca

SEQ ID NO: 66563 - DNA, 20 bp, synthetic construct
  source 1..20: mol_type = other DNA
ttagccaggtagggtggtgc

SEQ ID NO: 66564 - DNA, 20 bp, synthetic construct
  source 1..20: mol_type = other DNA
attagccaggtagggtggtg

SEQ ID NO: 66565 - DNA, 20 bp, synthetic construct
  source 1..20: mol_type = other DNA
aattagccaggtagggtggt

SEQ ID NO: 66566 - DNA, 20 bp, synthetic construct
  source 1..20: mol_type = other DNA
aaattagccaggtagggtgg

SEQ ID NO: 66567 - DNA, 20 bp, synthetic construct
  source 1..20: mol_type = other DNA
aaaattagccaggtagggtg

SEQ ID NO: 66568 - DNA, 20 bp, synthetic construct
  source 1..20: mol_type = other DNA
aaaaattagccaggtagggt

SEQ ID NO: 66569 - DNA, 20 bp, synthetic construct
  source 1..20: mol_type = other DNA
aaaaaattagccaggtaggg

SEQ ID NO: 66570 - DNA, 20 bp, synthetic construct
  source 1..20: mol_type = other DNA
aaaaaaattagccaggtagg

SEQ ID NO: 66571 - DNA, 20 bp, synthetic construct
  source 1..20: mol_type = other DNA
caaaaaaattagccaggtag

SEQ ID NO: 66572 - DNA, 20 bp, synthetic construct
  source 1..20: mol_type = other DNA
acaaaaaaattagccaggta

SEQ ID NO: 66573 - DNA, 20 bp, synthetic construct
  source 1..20: mol_type = other DNA
aacaaaaaaattagccaggt

SEQ ID NO: 66574 - DNA, 20 bp, synthetic construct
  source 1..20: mol_type = other DNA
aaacaaaaaaattagccagg

SEQ ID NO: 66575 - DNA, 20 bp, synthetic construct
  source 1..20: mol_type = other DNA
caaacaaaaaaattagccag

SEQ ID NO: 66576 - DNA, 20 bp, synthetic construct
  source 1..20: mol_type = other DNA
acaaacaaaaaaattagcca

SEQ ID NO: 66577 - DNA, 20 bp, synthetic construct
  source 1..20: mol_type = other DNA
aacaaacaaaaaaattagcc

SEQ ID NO: 66578 - DNA, 20 bp, synthetic construct
  source 1..20: mol_type = other DNA
aaacaaacaaaaaaattagc

SEQ ID NO: 66579 - DNA, 20 bp, synthetic construct
  source 1..20: mol_type = other DNA
aaaacaaacaaaaaaattag

SEQ ID NO: 66580 - DNA, 20 bp, synthetic construct
  source 1..20: mol_type = other DNA
aaaaacaaacaaaaaaatta

SEQ ID NO: 66581 - DNA, 20 bp, synthetic construct
  source 1..20: mol_type = other DNA
aaaaaacaaacaaaaaaatt

SEQ ID NO: 66582 - DNA, 20 bp, synthetic construct
  source 1..20: mol_type = other DNA
aaaaaaacaaacaaaaaaat

SEQ ID NO: 66583 - DNA, 20 bp, synthetic construct
  source 1..20: mol_type = other DNA
aaaaaaaacaaacaaaaaaa

SEQ ID NO: 66584 - DNA, 20 bp, synthetic construct
  source 1..20: mol_type = other DNA
taaaaaaaacaaacaaaaaa

SEQ ID NO: 66585 - DNA, 20 bp, synthetic construct
  source 1..20: mol_type = other DNA
ctaaaaaaaacaaacaaaaa

SEQ ID NO: 66586 - DNA, 20 bp, synthetic construct
  source 1..20: mol_type = other DNA
actaaaaaaaacaaacaaaa

SEQ ID NO: 66587 - DNA, 20 bp, synthetic construct
  source 1..20: mol_type = other DNA
aactaaaaaaaacaaacaaa

SEQ ID NO: 66588 - DNA, 20 bp, synthetic construct
  source 1..20: mol_type = other DNA
aaactaaaaaaaacaaacaa

SEQ ID NO: 66589 - DNA, 20 bp, synthetic construct
  source 1..20: mol_type = other DNA
taaactaaaaaaaacaaaca

SEQ ID NO: 66590 - DNA, 20 bp, synthetic construct
  source 1..20: mol_type = other DNA
ctaaactaaaaaaaacaaac

SEQ ID NO: 66591 - DNA, 20 bp, synthetic construct
  source 1..20: mol_type = other DNA
actaaactaaaaaaaacaaa

SEQ ID NO: 66592 - DNA, 20 bp, synthetic construct
  source 1..20: mol_type = other DNA
aactaaactaaaaaaaacaa

SEQ ID NO: 66593 - DNA, 20 bp, synthetic construct
  source 1..20: mol_type = other DNA
aaactaaactaaaaaaaaca

SEQ ID NO: 66594 - DNA, 20 bp, synthetic construct
  source 1..20: mol_type = other DNA
aaaactaaactaaaaaaaac

SEQ ID NO: 66595 - DNA, 20 bp, synthetic construct
  source 1..20: mol_type = other DNA
aaaaactaaactaaaaaaaa

SEQ ID NO: 66596 - DNA, 20 bp, synthetic construct
  source 1..20: mol_type = other DNA
caaaaactaaactaaaaaaa

SEQ ID NO: 66597 - DNA, 20 bp, synthetic construct
  source 1..20: mol_type = other DNA
acaaaaactaaactaaaaaa

SEQ ID NO: 66598 - DNA, 20 bp, synthetic construct
  source 1..20: mol_type = other DNA
tacaaaaactaaactaaaaa

SEQ ID NO: 66599 - DNA, 20 bp, synthetic construct
  source 1..20: mol_type = other DNA
ctacaaaaactaaactaaaa

SEQ ID NO: 66600 - DNA, 20 bp, synthetic construct
  source 1..20: mol_type = other DNA
tctacaaaaactaaactaaa

SEQ ID NO: 66601 - DNA, 20 bp, synthetic construct
  source 1..20: mol_type = other DNA
ctctacaaaaactaaactaa

SEQ ID NO: 66602 - DNA, 20 bp, synthetic construct
  source 1..20: mol_type = other DNA
tctctacaaaaactaaacta

SEQ ID NO: 66603 - DNA, 20 bp, synthetic construct
  source 1..20: mol_type = other DNA
gtctctacaaaaactaaact

SEQ ID NO: 66604 - DNA, 20 bp, synthetic construct
  source 1..20: mol_type = other DNA
tgtctctacaaaaactaaac

SEQ ID NO: 66605 - DNA, 20 bp, synthetic construct
  source 1..20: mol_type = other DNA
ctgtctctacaaaaactaaa

SEQ ID NO: 66606 - DNA, 20 bp, synthetic construct
  source 1..20: mol_type = other DNA
tctgtctctacaaaaactaa

SEQ ID NO: 66607 - DNA, 20 bp, synthetic construct
  source 1..20: mol_type = other DNA
atctgtctctacaaaaacta

SEQ ID NO: 66608 - DNA, 20 bp, synthetic construct
  source 1..20: mol_type = other DNA
catctgtctctacaaaaact

SEQ ID NO: 66609 - DNA, 20 bp, synthetic construct
  source 1..20: mol_type = other DNA
acatctgtctctacaaaaac

SEQ ID NO: 66610 - DNA, 20 bp, synthetic construct
  source 1..20: mol_type = other DNA
gacatctgtctctacaaaaa

SEQ ID NO: 66611 - DNA, 20 bp, synthetic construct
  source 1..20: mol_type = other DNA
agacatctgtctctacaaaa

SEQ ID NO: 66612 - DNA, 20 bp, synthetic construct
  source 1..20: mol_type = other DNA
gagacatctgtctctacaaa

SEQ ID NO: 66613 - DNA, 20 bp, synthetic construct
  source 1..20: mol_type = other DNA
tgagacatctgtctctacaa

SEQ ID NO: 66614 - DNA, 20 bp, synthetic construct
  source 1..20: mol_type = other DNA
gtgagacatctgtctctaca

SEQ ID NO: 66615 - DNA, 20 bp, synthetic construct
  source 1..20: mol_type = other DNA
agtgagacatctgtctctac

SEQ ID NO: 66616 - DNA, 20 bp, synthetic construct
  source 1..20: mol_type = other DNA
cagtgagacatctgtctcta

SEQ ID NO: 66617 - DNA, 20 bp, synthetic construct
  source 1..20: mol_type = other DNA
acagtgagacatctgtctct

SEQ ID NO: 66618 - DNA, 20 bp, synthetic construct
  source 1..20: mol_type = other DNA
cacagtgagacatctgtctc

SEQ ID NO: 66619 - DNA, 20 bp, synthetic construct
  source 1..20: mol_type = other DNA
acacagtgagacatctgtct

SEQ ID NO: 66620 - DNA, 20 bp, synthetic construct
  source 1..20: mol_type = other DNA
aacacagtgagacatctgtc

SEQ ID NO: 66621 - DNA, 20 bp, synthetic construct
  source 1..20: mol_type = other DNA
caacacagtgagacatctgt

SEQ ID NO: 66622 - DNA, 20 bp, synthetic construct
  source 1..20: mol_type = other DNA
gcaacacagtgagacatctg

SEQ ID NO: 66623 - DNA, 20 bp, synthetic construct
  source 1..20: mol_type = other DNA
tgcaacacagtgagacatct

SEQ ID NO: 66624 - DNA, 20 bp, synthetic construct
  source 1..20: mol_type = other DNA
gtgcaacacagtgagacatc

SEQ ID NO: 66625 - DNA, 20 bp, synthetic construct
  source 1..20: mol_type = other DNA
tgtgcaacacagtgagacat

SEQ ID NO: 66626 - DNA, 20 bp, synthetic construct
  source 1..20: mol_type = other DNA
ctgtgcaacacagtgagaca

SEQ ID NO: 66627 - DNA, 20 bp, synthetic construct
  source 1..20: mol_type = other DNA
cctgtgcaacacagtgagac

SEQ ID NO: 66628 - DNA, 20 bp, synthetic construct
  source 1..20: mol_type = other DNA
gcctgtgcaacacagtgaga

SEQ ID NO: 66629 - DNA, 20 bp, synthetic construct
  source 1..20: mol_type = other DNA
agcctgtgcaacacagtgag

SEQ ID NO: 66630 - DNA, 20 bp, synthetic construct
  source 1..20: mol_type = other DNA
cagcctgtgcaacacagtga

SEQ ID NO: 66631 - DNA, 20 bp, synthetic construct
  source 1..20: mol_type = other DNA
tcagcctgtgcaacacagtg

SEQ ID NO: 66632 - DNA, 20 bp, synthetic construct
  source 1..20: mol_type = other DNA
atcagcctgtgcaacacagt

SEQ ID NO: 66633 - DNA, 20 bp, synthetic construct
  source 1..20: mol_type = other DNA
gatcagcctgtgcaacacag

SEQ ID NO: 66634 - DNA, 20 bp, synthetic construct
  source 1..20: mol_type = other DNA
agatcagcctgtgcaacaca

SEQ ID NO: 66635 - DNA, 20 bp, synthetic construct
  source 1..20: mol_type = other DNA
aagatcagcctgtgcaacac

SEQ ID NO: 66636 - DNA, 20 bp, synthetic construct
  source 1..20: mol_type = other DNA
caagatcagcctgtgcaaca

SEQ ID NO: 66637 - DNA, 20 bp, synthetic construct
  source 1..20: mol_type = other DNA
tcaagatcagcctgtgcaac

SEQ ID NO: 66638 - DNA, 20 bp, synthetic construct
  source 1..20: mol_type = other DNA
ttcaagatcagcctgtgcaa

SEQ ID NO: 66639 - DNA, 20 bp, synthetic construct
  source 1..20: mol_type = other DNA
gttcaagatcagcctgtgca

SEQ ID NO: 66640 - DNA, 20 bp, synthetic construct
  source 1..20: mol_type = other DNA
agttcaagatcagcctgtgc

SEQ ID NO: 66641 - DNA, 20 bp, synthetic construct
  source 1..20: mol_type = other DNA
gagttcaagatcagcctgtg

SEQ ID NO: 66642 - DNA, 20 bp, synthetic construct
  source 1..20: mol_type = other DNA
ggagttcaagatcagcctgt

SEQ ID NO: 66643 - DNA, 20 bp, synthetic construct
  source 1..20: mol_type = other DNA
aggagttcaagatcagcctg

SEQ ID NO: 66644 - DNA, 20 bp, synthetic construct
  source 1..20: mol_type = other DNA
caggagttcaagatcagcct

SEQ ID NO: 66645 - DNA, 20 bp, synthetic construct
  source 1..20: mol_type = other DNA
ccaggagttcaagatcagcc

SEQ ID NO: 66646 - DNA, 20 bp, synthetic construct
  source 1..20: mol_type = other DNA
cccaggagttcaagatcagc

SEQ ID NO: 66647 - DNA, 20 bp, synthetic construct
  source 1..20: mol_type = other DNA
gcccaggagttcaagatcag

SEQ ID NO: 66648 - DNA, 20 bp, synthetic construct
  source 1..20: mol_type = other DNA
agcccaggagttcaagatca

SEQ ID NO: 66649 - DNA, 20 bp, synthetic construct
  source 1..20: mol_type = other DNA
gagcccaggagttcaagatc

SEQ ID NO: 66650 - DNA, 20 bp, synthetic construct
  source 1..20: mol_type = other DNA
tgagcccaggagttcaagat

SEQ ID NO: 66651 - DNA, 20 bp, synthetic construct
  source 1..20: mol_type = other DNA
gtgagcccaggagttcaaga

SEQ ID NO: 66652 - DNA, 20 bp, synthetic construct
  source 1..20: mol_type = other DNA
agtgagcccaggagttcaag

SEQ ID NO: 66653 - DNA, 20 bp, synthetic construct
  source 1..20: mol_type = other DNA
aagtgagcccaggagttcaa

SEQ ID NO: 66654 - DNA, 20 bp, synthetic construct
  source 1..20: mol_type = other DNA
caagtgagcccaggagttca

SEQ ID NO: 66655 - DNA, 20 bp, synthetic construct
  source 1..20: mol_type = other DNA
tcaagtgagcccaggagttc

SEQ ID NO: 66656 - DNA, 20 bp, synthetic construct
  source 1..20: mol_type = other DNA
atcaagtgagcccaggagtt

SEQ ID NO: 66657 - DNA, 20 bp, synthetic construct
  source 1..20: mol_type = other DNA
gatcaagtgagcccaggagt

SEQ ID NO: 66658 - DNA, 20 bp, synthetic construct
  source 1..20: mol_type = other DNA
ggatcaagtgagcccaggag

SEQ ID NO: 66659 - DNA, 20 bp, synthetic construct
  source 1..20: mol_type = other DNA
aggatcaagtgagcccagga

SEQ ID NO: 66660 - DNA, 20 bp, synthetic construct
  source 1..20: mol_type = other DNA
gaggatcaagtgagcccagg

SEQ ID NO: 66661 - DNA, 20 bp, synthetic construct
  source 1..20: mol_type = other DNA
ggaggatcaagtgagcccag

SEQ ID NO: 66662 - DNA, 20 bp, synthetic construct
  source 1..20: mol_type = other DNA
gggaggatcaagtgagccca

SEQ ID NO: 66663 - DNA, 20 bp, synthetic construct
  source 1..20: mol_type = other DNA
tgggaggatcaagtgagccc

SEQ ID NO: 66664 - DNA, 20 bp, synthetic construct
  source 1..20: mol_type = other DNA
atgggaggatcaagtgagcc

SEQ ID NO: 66665 - DNA, 20 bp, synthetic construct
  source 1..20: mol_type = other DNA
gatgggaggatcaagtgagc

SEQ ID NO: 66666 - DNA, 20 bp, synthetic construct
  source 1..20: mol_type = other DNA
agatgggaggatcaagtgag

SEQ ID NO: 66667 - DNA, 20 bp, synthetic construct
  source 1..20: mol_type = other DNA
gagatgggaggatcaagtga

SEQ ID NO: 66668 - DNA, 20 bp, synthetic construct
  source 1..20: mol_type = other DNA
tgagatgggaggatcaagtg

SEQ ID NO: 66669 - DNA, 20 bp, synthetic construct
  source 1..20: mol_type = other DNA
ctgagatgggaggatcaagt

SEQ ID NO: 66670 - DNA, 20 bp, synthetic construct
  source 1..20: mol_type = other DNA
gctgagatgggaggatcaag

SEQ ID NO: 66671 - DNA, 20 bp, synthetic construct
  source 1..20: mol_type = other DNA
ggctgagatgggaggatcaa

SEQ ID NO: 66672 - DNA, 20 bp, synthetic construct
  source 1..20: mol_type = other DNA
aggctgagatgggaggatca

SEQ ID NO: 66673 - DNA, 20 bp, synthetic construct
  source 1..20: mol_type = other DNA
gaggctgagatgggaggatc

SEQ ID NO: 66674 - DNA, 20 bp, synthetic construct
  source 1..20: mol_type = other DNA
ggaggctgagatgggaggat

SEQ ID NO: 66675 - DNA, 20 bp, synthetic construct
  source 1..20: mol_type = other DNA
gggaggctgagatgggagga

SEQ ID NO: 66676 - DNA, 20 bp, synthetic construct
  source 1..20: mol_type = other DNA
ggggaggctgagatgggagg

SEQ ID NO: 66677 - DNA, 20 bp, synthetic construct
  source 1..20: mol_type = other DNA
tggggaggctgagatgggag

SEQ ID NO: 66678 - DNA, 20 bp, synthetic construct
  source 1..20: mol_type = other DNA
ttggggaggctgagatggga

SEQ ID NO: 66679 - DNA, 20 bp, synthetic construct
  source 1..20: mol_type = other DNA
cttggggaggctgagatggg

SEQ ID NO: 66680 - DNA, 20 bp, synthetic construct
  source 1..20: mol_type = other DNA
acttggggaggctgagatgg

SEQ ID NO: 66681 - DNA, 20 bp, synthetic construct
  source 1..20: mol_type = other DNA
cacttggggaggctgagatg

SEQ ID NO: 66682 - DNA, 20 bp, synthetic construct
  source 1..20: mol_type = other DNA
gcacttggggaggctgagat

SEQ ID NO: 66683 - DNA, 20 bp, synthetic construct
  source 1..20: mol_type = other DNA
agcacttggggaggctgaga

SEQ ID NO: 66684 - DNA, 20 bp, synthetic construct
  source 1..20: mol_type = other DNA
cagcacttggggaggctgag

SEQ ID NO: 66685 - DNA, 20 bp, synthetic construct
  source 1..20: mol_type = other DNA
ccagcacttggggaggctga

SEQ ID NO: 66686 - DNA, 20 bp, synthetic construct
  source 1..20: mol_type = other DNA
cccagcacttggggaggctg

SEQ ID NO: 66687 - DNA, 20 bp, synthetic construct
  source 1..20: mol_type = other DNA
tcccagcacttggggaggct

SEQ ID NO: 66688 - DNA, 20 bp, synthetic construct
  source 1..20: mol_type = other DNA
atcccagcacttggggaggc

SEQ ID NO: 66689 - DNA, 20 bp, synthetic construct
  source 1..20: mol_type = other DNA
aatcccagcacttggggagg

SEQ ID NO: 66690 - DNA, 20 bp, synthetic construct
  source 1..20: mol_type = other DNA
taatcccagcacttggggag

SEQ ID NO: 66691 - DNA, 20 bp, synthetic construct
  source 1..20: mol_type = other DNA
gtaatcccagcacttgggga

SEQ ID NO: 66692 - DNA, 20 bp, synthetic construct
  source 1..20: mol_type = other DNA
tgtaatcccagcacttgggg

SEQ ID NO: 66693 - DNA, 20 bp, synthetic construct
  source 1..20: mol_type = other DNA
ctgtaatcccagcacttggg

SEQ ID NO: 66694 - DNA, 20 bp, synthetic construct
  source 1..20: mol_type = other DNA
cctgtaatcccagcacttgg

SEQ ID NO: 66695 - DNA, 20 bp, synthetic construct
  source 1..20: mol_type = other DNA
acctgtaatcccagcacttg

SEQ ID NO: 66696 - DNA, 20 bp, synthetic construct
  source 1..20: mol_type = other DNA
cacctgtaatcccagcactt

SEQ ID NO: 66697 - DNA, 20 bp, synthetic construct
  source 1..20: mol_type = other DNA
acacctgtaatcccagcact

SEQ ID NO: 66698 - DNA, 20 bp, synthetic construct
  source 1..20: mol_type = other DNA
cacacctgtaatcccagcac

SEQ ID NO: 66699 - DNA, 20 bp, synthetic construct
  source 1..20: mol_type = other DNA
tcacacctgtaatcccagca

SEQ ID NO: 66700 - DNA, 20 bp, synthetic construct
  source 1..20: mol_type = other DNA
ctcacacctgtaatcccagc

SEQ ID NO: 66701 - DNA, 20 bp, synthetic construct
  source 1..20: mol_type = other DNA
actcacacctgtaatcccag

SEQ ID NO: 66702 - DNA, 20 bp, synthetic construct
  source 1..20: mol_type = other DNA
gactcacacctgtaatccca

SEQ ID NO: 66703 - DNA, 20 bp, synthetic construct
  source 1..20: mol_type = other DNA
tgactcacacctgtaatccc

SEQ ID NO: 66704 - DNA, 20 bp, synthetic construct
  source 1..20: mol_type = other DNA
gtgactcacacctgtaatcc

SEQ ID NO: 66705 - DNA, 20 bp, synthetic construct
  source 1..20: mol_type = other DNA
ggtgactcacacctgtaatc

SEQ ID NO: 66706 - DNA, 20 bp, synthetic construct
  source 1..20: mol_type = other DNA
tggtgactcacacctgtaat

SEQ ID NO: 66707 - DNA, 20 bp, synthetic construct
  source 1..20: mol_type = other DNA
atggtgactcacacctgtaa

SEQ ID NO: 66708 - DNA, 20 bp, synthetic construct
  source 1..20: mol_type = other DNA
catggtgactcacacctgta

SEQ ID NO: 66709 - DNA, 20 bp, synthetic construct
  source 1..20: mol_type = other DNA
gcatggtgactcacacctgt

SEQ ID NO: 66710 - DNA, 20 bp, synthetic construct
  source 1..20: mol_type = other DNA
ggcatggtgactcacacctg

SEQ ID NO: 66711 - DNA, 20 bp, synthetic construct
  source 1..20: mol_type = other DNA
gggcatggtgactcacacct

SEQ ID NO: 66712 - DNA, 20 bp, synthetic construct
  source 1..20: mol_type = other DNA
tgggcatggtgactcacacc

SEQ ID NO: 66713 - DNA, 20 bp, synthetic construct
  source 1..20: mol_type = other DNA
ctgggcatggtgactcacac

SEQ ID NO: 66714 - DNA, 20 bp, synthetic construct
  source 1..20: mol_type = other DNA
tctgggcatggtgactcaca

SEQ ID NO: 66715 - DNA, 20 bp, synthetic construct
  source 1..20: mol_type = other DNA
gtctgggcatggtgactcac

SEQ ID NO: 66716 - DNA, 20 bp, synthetic construct
  source 1..20: mol_type = other DNA
agtctgggcatggtgactca

SEQ ID NO: 66717 - DNA, 20 bp, synthetic construct
  source 1..20: mol_type = other DNA
aagtctgggcatggtgactc

SEQ ID NO: 66718 - DNA, 20 bp, synthetic construct
  source 1..20: mol_type = other DNA
aaagtctgggcatggtgact

SEQ ID NO: 66719 - DNA, 20 bp, synthetic construct
  source 1..20: mol_type = other DNA
taaagtctgggcatggtgac

SEQ ID NO: 66720 - DNA, 20 bp, synthetic construct
  source 1..20: mol_type = other DNA
ttaaagtctgggcatggtga

SEQ ID NO: 66721 - DNA, 20 bp, synthetic construct
  source 1..20: mol_type = other DNA
gttaaagtctgggcatggtg

SEQ ID NO: 66722 - DNA, 20 bp, synthetic construct
  source 1..20: mol_type = other DNA
tgttaaagtctgggcatggt

SEQ ID NO: 66723 - DNA, 20 bp, synthetic construct
  source 1..20: mol_type = other DNA
atgttaaagtctgggcatgg

SEQ ID NO: 66724 - DNA, 20 bp, synthetic construct
  source 1..20: mol_type = other DNA
aatgttaaagtctgggcatg

SEQ ID NO: 66725 - DNA, 20 bp, synthetic construct
  source 1..20: mol_type = other DNA
aaatgttaaagtctgggcat

SEQ ID NO: 66726 - DNA, 20 bp, synthetic construct
  source 1..20: mol_type = other DNA
aaaatgttaaagtctgggca

SEQ ID NO: 66727 - DNA, 20 bp, synthetic construct
  source 1..20: mol_type = other DNA
gaaaatgttaaagtctgggc

SEQ ID NO: 66728 - DNA, 20 bp, synthetic construct
  source 1..20: mol_type = other DNA
agaaaatgttaaagtctggg

SEQ ID NO: 66729 - DNA, 20 bp, synthetic construct
  source 1..20: mol_type = other DNA
aagaaaatgttaaagtctgg

SEQ ID NO: 66730 - DNA, 20 bp, synthetic construct
  source 1..20: mol_type = other DNA
aaagaaaatgttaaagtctg

SEQ ID NO: 66731 - DNA, 20 bp, synthetic construct
  source 1..20: mol_type = other DNA
aaaagaaaatgttaaagtct

SEQ ID NO: 66732 - DNA, 20 bp, synthetic construct
  source 1..20: mol_type = other DNA
aaaaagaaaatgttaaagtc

SEQ ID NO: 66733 - DNA, 20 bp, synthetic construct
  source 1..20: mol_type = other DNA
taaaaagaaaatgttaaagt

SEQ ID NO: 66734 - DNA, 20 bp, synthetic construct
  source 1..20: mol_type = other DNA
ctaaaaagaaaatgttaaag

SEQ ID NO: 66735 - DNA, 20 bp, synthetic construct
  source 1..20: mol_type = other DNA
actaaaaagaaaatgttaaa

SEQ ID NO: 66736 - DNA, 20 bp, synthetic construct
  source 1..20: mol_type = other DNA
tactaaaaagaaaatgttaa

SEQ ID NO: 66737 - DNA, 20 bp, synthetic construct
  source 1..20: mol_type = other DNA
atactaaaaagaaaatgtta

SEQ ID NO: 66738 - DNA, 20 bp, synthetic construct
  source 1..20: mol_type = other DNA
tatactaaaaagaaaatgtt

SEQ ID NO: 66739 - DNA, 20 bp, synthetic construct
  source 1..20: mol_type = other DNA
ctatactaaaaagaaaatgt

SEQ ID NO: 66740 - DNA, 20 bp, synthetic construct
  source 1..20: mol_type = other DNA
tctatactaaaaagaaaatg

SEQ ID NO: 66741 - DNA, 20 bp, synthetic construct
  source 1..20: mol_type = other DNA
ttctatactaaaaagaaaat

SEQ ID NO: 66742 - DNA, 20 bp, synthetic construct
  source 1..20: mol_type = other DNA
attctatactaaaaagaaaa

SEQ ID NO: 66743 - DNA, 20 bp, synthetic construct
  source 1..20: mol_type = other DNA
tattctatactaaaaagaaa

SEQ ID NO: 66744 - DNA, 20 bp, synthetic construct
  source 1..20: mol_type = other DNA
ctattctatactaaaaagaa

SEQ ID NO: 66745 - DNA, 20 bp, synthetic construct
  source 1..20: mol_type = other DNA
cctattctatactaaaaaga

SEQ ID NO: 66746 - DNA, 20 bp, synthetic construct
  source 1..20: mol_type = other DNA
acctattctatactaaaaag

SEQ ID NO: 66747 - DNA, 20 bp, synthetic construct
  source 1..20: mol_type = other DNA
gacctattctatactaaaaa

SEQ ID NO: 66748 - DNA, 20 bp, synthetic construct
  source 1..20: mol_type = other DNA
tgacctattctatactaaaa

SEQ ID NO: 66749 - DNA, 20 bp, synthetic construct
  source 1..20: mol_type = other DNA
ctgacctattctatactaaa

SEQ ID NO: 66750 - DNA, 20 bp, synthetic construct
  source 1..20: mol_type = other DNA
actgacctattctatactaa

SEQ ID NO: 66751 - DNA, 20 bp, synthetic construct
  source 1..20: mol_type = other DNA
aactgacctattctatacta

SEQ ID NO: 66752 - DNA, 20 bp, synthetic construct
  source 1..20: mol_type = other DNA
aaactgacctattctatact

SEQ ID NO: 66753 - DNA, 20 bp, synthetic construct
  source 1..20: mol_type = other DNA
aaaactgacctattctatac

SEQ ID NO: 66754 - DNA, 20 bp, synthetic construct
  source 1..20: mol_type = other DNA
aaaaactgacctattctata

SEQ ID NO: 66755 - DNA, 20 bp, synthetic construct
  source 1..20: mol_type = other DNA
aaaaaactgacctattctat

SEQ ID NO: 66756 - DNA, 20 bp, synthetic construct
  source 1..20: mol_type = other DNA
aaaaaaactgacctattcta

SEQ ID NO: 66757 - DNA, 20 bp, synthetic construct
  source 1..20: mol_type = other DNA
gaaaaaaactgacctattct

SEQ ID NO: 66758 - DNA, 20 bp, synthetic construct
  source 1..20: mol_type = other DNA
ggaaaaaaactgacctattc

SEQ ID NO: 66759 - DNA, 20 bp, synthetic construct
  source 1..20: mol_type = other DNA
gggaaaaaaactgacctatt

SEQ ID NO: 66760 - DNA, 20 bp, synthetic construct
  source 1..20: mol_type = other DNA
agggaaaaaaactgacctat

SEQ ID NO: 66761 - DNA, 20 bp, synthetic construct
  source 1..20: mol_type = other DNA
gagggaaaaaaactgaccta

SEQ ID NO: 66762 - DNA, 20 bp, synthetic construct
  source 1..20: mol_type = other DNA
agagggaaaaaaactgacct

SEQ ID NO: 66763 - DNA, 20 bp, synthetic construct
  source 1..20: mol_type = other DNA
cagagggaaaaaaactgacc

SEQ ID NO: 66764 - DNA, 20 bp, synthetic construct
  source 1..20: mol_type = other DNA
tcagagggaaaaaaactgac

SEQ ID NO: 66765 - DNA, 20 bp, synthetic construct
  source 1..20: mol_type = other DNA
atcagagggaaaaaaactga

SEQ ID NO: 66766 - DNA, 20 bp, synthetic construct
  source 1..20: mol_type = other DNA
catcagagggaaaaaaactg

SEQ ID NO: 66767 - DNA, 20 bp, synthetic construct
  source 1..20: mol_type = other DNA
tcatcagagggaaaaaaact

SEQ ID NO: 66768 - DNA, 20 bp, synthetic construct
  source 1..20: mol_type = other DNA
ctcatcagagggaaaaaaac

SEQ ID NO: 66769 - DNA, 20 bp, synthetic construct
  source 1..20: mol_type = other DNA
tctcatcagagggaaaaaaa

SEQ ID NO: 66770 - DNA, 20 bp, synthetic construct
  source 1..20: mol_type = other DNA
atctcatcagagggaaaaaa

SEQ ID NO: 66771 - DNA, 20 bp, synthetic construct
  source 1..20: mol_type = other DNA
gatctcatcagagggaaaaa

SEQ ID NO: 66772 - DNA, 20 bp, synthetic construct
  source 1..20: mol_type = other DNA
ggatctcatcagagggaaaa

SEQ ID NO: 66773 - DNA, 20 bp, synthetic construct
  source 1..20: mol_type = other DNA
gggatctcatcagagggaaa

SEQ ID NO: 66774 - DNA, 20 bp, synthetic construct
  source 1..20: mol_type = other DNA
tgggatctcatcagagggaa

SEQ ID NO: 66775 - DNA, 20 bp, synthetic construct
  source 1..20: mol_type = other DNA
atgggatctcatcagaggga

SEQ ID NO: 66776 - DNA, 20 bp, synthetic construct
  source 1..20: mol_type = other DNA
catgggatctcatcagaggg

SEQ ID NO: 66777 - DNA, 20 bp, synthetic construct
  source 1..20: mol_type = other DNA
gcatgggatctcatcagagg

SEQ ID NO: 66778 - DNA, 20 bp, synthetic construct
  source 1..20: mol_type = other DNA
agcatgggatctcatcagag

SEQ ID NO: 66779 - DNA, 20 bp, synthetic construct
  source 1..20: mol_type = other DNA
cagcatgggatctcatcaga

SEQ ID NO: 66780 - DNA, 20 bp, synthetic construct
  source 1..20: mol_type = other DNA
tcagcatgggatctcatcag

SEQ ID NO: 66781 - DNA, 20 bp, synthetic construct
  source 1..20: mol_type = other DNA
gtcagcatgggatctcatca

SEQ ID NO: 66782 - DNA, 20 bp, synthetic construct
  source 1..20: mol_type = other DNA
agtcagcatgggatctcatc

SEQ ID NO: 66783 - DNA, 20 bp, synthetic construct
  source 1..20: mol_type = other DNA
gagtcagcatgggatctcat

SEQ ID NO: 66784 - DNA, 20 bp, synthetic construct
  source 1..20: mol_type = other DNA
agagtcagcatgggatctca

SEQ ID NO: 66785 - DNA, 20 bp, synthetic construct
  source 1..20: mol_type = other DNA
aagagtcagcatgggatctc

SEQ ID NO: 66786 - DNA, 20 bp, synthetic construct
  source 1..20: mol_type = other DNA
taagagtcagcatgggatct

SEQ ID NO: 66787 - DNA, 20 bp, synthetic construct
  source 1..20: mol_type = other DNA
ctaagagtcagcatgggatc

SEQ ID NO: 66788 - DNA, 20 bp, synthetic construct
  source 1..20: mol_type = other DNA
actaagagtcagcatgggat

SEQ ID NO: 66789 - DNA, 20 bp, synthetic construct
  source 1..20: mol_type = other DNA
aactaagagtcagcatggga

SEQ ID NO: 66790 - DNA, 20 bp, synthetic construct
  source 1..20: mol_type = other DNA
taactaagagtcagcatggg

SEQ ID NO: 66791 - DNA, 20 bp, synthetic construct
  source 1..20: mol_type = other DNA
ttaactaagagtcagcatgg

SEQ ID NO: 66792 - DNA, 20 bp, synthetic construct
  source 1..20: mol_type = other DNA
tttaactaagagtcagcatg

SEQ ID NO: 66793 - DNA, 20 bp, synthetic construct
  source 1..20: mol_type = other DNA
ttttaactaagagtcagcat

SEQ ID NO: 66794 - DNA, 20 bp, synthetic construct
  source 1..20: mol_type = other DNA
gttttaactaagagtcagca

SEQ ID NO: 66795 - DNA, 20 bp, synthetic construct
  source 1..20: mol_type = other DNA
tgttttaactaagagtcagc

SEQ ID NO: 66796 - DNA, 20 bp, synthetic construct
  source 1..20: mol_type = other DNA
ttgttttaactaagagtcag

SEQ ID NO: 66797 - DNA, 20 bp, synthetic construct
  source 1..20: mol_type = other DNA
cttgttttaactaagagtca

SEQ ID NO: 66798 - DNA, 20 bp, synthetic construct
  source 1..20: mol_type = other DNA
ccttgttttaactaagagtc

SEQ ID NO: 66799 - DNA, 20 bp, synthetic construct
  source 1..20: mol_type = other DNA
gccttgttttaactaagagt

SEQ ID NO: 66800 - DNA, 20 bp, synthetic construct
  source 1..20: mol_type = other DNA
agccttgttttaactaagag

SEQ ID NO: 66801 - DNA, 20 bp, synthetic construct
  source 1..20: mol_type = other DNA
aagccttgttttaactaaga

SEQ ID NO: 66802 - DNA, 20 bp, synthetic construct
  source 1..20: mol_type = other DNA
aaagccttgttttaactaag

SEQ ID NO: 66803 - DNA, 20 bp, synthetic construct
  source 1..20: mol_type = other DNA
caaagccttgttttaactaa

SEQ ID NO: 66804 - DNA, 20 bp, synthetic construct
  source 1..20: mol_type = other DNA
ccaaagccttgttttaacta

SEQ ID NO: 66805 - DNA, 20 bp, synthetic construct
  source 1..20: mol_type = other DNA
accaaagccttgttttaact

SEQ ID NO: 66806 - DNA, 20 bp, synthetic construct
  source 1..20: mol_type = other DNA
aaccaaagccttgttttaac

SEQ ID NO: 66807 - DNA, 20 bp, synthetic construct
  source 1..20: mol_type = other DNA
caaccaaagccttgttttaa

SEQ ID NO: 66808 - DNA, 20 bp, synthetic construct
  source 1..20: mol_type = other DNA
ccaaccaaagccttgtttta

SEQ ID NO: 66809 - DNA, 20 bp, synthetic construct
  source 1..20: mol_type = other DNA
tccaaccaaagccttgtttt

SEQ ID NO: 66810 - DNA, 20 bp, synthetic construct
  source 1..20: mol_type = other DNA
ttccaaccaaagccttgttt

SEQ ID NO: 66811 - DNA, 20 bp, synthetic construct
  source 1..20: mol_type = other DNA
cttccaaccaaagccttgtt

SEQ ID NO: 66812 - DNA, 20 bp, synthetic construct
  source 1..20: mol_type = other DNA
tcttccaaccaaagccttgt

SEQ ID NO: 66813 - DNA, 20 bp, synthetic construct
  source 1..20: mol_type = other DNA
ttcttccaaccaaagccttg

SEQ ID NO: 66814 - DNA, 20 bp, synthetic construct
  source 1..20: mol_type = other DNA
cttcttccaaccaaagcctt

SEQ ID NO: 66815 - DNA, 20 bp, synthetic construct
  source 1..20: mol_type = other DNA
tcttcttccaaccaaagcct

SEQ ID NO: 66816 - DNA, 20 bp, synthetic construct
  source 1..20: mol_type = other DNA
ctcttcttccaaccaaagcc

SEQ ID NO: 66817 - DNA, 20 bp, synthetic construct
  source 1..20: mol_type = other DNA
gctcttcttccaaccaaagc

SEQ ID NO: 66818 - DNA, 20 bp, synthetic construct
  source 1..20: mol_type = other DNA
agctcttcttccaaccaaag

SEQ ID NO: 66819 - DNA, 20 bp, synthetic construct
  source 1..20: mol_type = other DNA
tagctcttcttccaaccaaa

SEQ ID NO: 66820 - DNA, 20 bp, synthetic construct
  source 1..20: mol_type = other DNA
ctagctcttcttccaaccaa

SEQ ID NO: 66821 - DNA, 20 bp, synthetic construct
  source 1..20: mol_type = other DNA
actagctcttcttccaacca

SEQ ID NO: 66822 - DNA, 20 bp, synthetic construct
  source 1..20: mol_type = other DNA
cactagctcttcttccaacc

SEQ ID NO: 66823 - DNA, 20 bp, synthetic construct
  source 1..20: mol_type = other DNA
tcactagctcttcttccaac

SEQ ID NO: 66824 - DNA, 20 bp, synthetic construct
  source 1..20: mol_type = other DNA
atcactagctcttcttccaa

SEQ ID NO: 66825 - DNA, 20 bp, synthetic construct
  source 1..20: mol_type = other DNA
catcactagctcttcttcca

SEQ ID NO: 66826 - DNA, 20 bp, synthetic construct
  source 1..20: mol_type = other DNA
acatcactagctcttcttcc

SEQ ID NO: 66827 - DNA, 20 bp, synthetic construct
  source 1..20: mol_type = other DNA
gacatcactagctcttcttc

SEQ ID NO: 66828 - DNA, 20 bp, synthetic construct
  source 1..20: mol_type = other DNA
ggacatcactagctcttctt

SEQ ID NO: 66829 - DNA, 20 bp, synthetic construct
  source 1..20: mol_type = other DNA
aggacatcactagctcttct

SEQ ID NO: 66830 - DNA, 20 bp, synthetic construct
  source 1..20: mol_type = other DNA
taggacatcactagctcttc

SEQ ID NO: 66831 - DNA, 20 bp, synthetic construct
  source 1..20: mol_type = other DNA
ctaggacatcactagctctt

SEQ ID NO: 66832 - DNA, 20 bp, synthetic construct
  source 1..20: mol_type = other DNA
gctaggacatcactagctct

SEQ ID NO: 66833 - DNA, 20 bp, synthetic construct
  source 1..20: mol_type = other DNA
agctaggacatcactagctc

SEQ ID NO: 66834 - DNA, 20 bp, synthetic construct
  source 1..20: mol_type = other DNA
gagctaggacatcactagct

SEQ ID NO: 66835 - DNA, 20 bp, synthetic construct
  source 1..20: mol_type = other DNA
ggagctaggacatcactagc

SEQ ID NO: 66836 - DNA, 20 bp, synthetic construct
  source 1..20: mol_type = other DNA
gggagctaggacatcactag

SEQ ID NO: 66837 - DNA, 20 bp, synthetic construct
  source 1..20: mol_type = other DNA
agggagctaggacatcacta

SEQ ID NO: 66838 - DNA, 20 bp, synthetic construct
  source 1..20: mol_type = other DNA
tagggagctaggacatcact

SEQ ID NO: 66839 - DNA, 20 bp, synthetic construct
  source 1..20: mol_type = other DNA
gtagggagctaggacatcac

SEQ ID NO: 66840 - DNA, 20 bp, synthetic construct
  source 1..20: mol_type = other DNA
agtagggagctaggacatca

SEQ ID NO: 66841 - DNA, 20 bp, synthetic construct
  source 1..20: mol_type = other DNA
aagtagggagctaggacatc

SEQ ID NO: 66842 - DNA, 20 bp, synthetic construct
  source 1..20: mol_type = other DNA
taagtagggagctaggacat

SEQ ID NO: 66843 - DNA, 20 bp, synthetic construct
  source 1..20: mol_type = other DNA
gtaagtagggagctaggaca

SEQ ID NO: 66844 - DNA, 20 bp, synthetic construct
  source 1..20: mol_type = other DNA
agtaagtagggagctaggac

SEQ ID NO: 66845 - DNA, 20 bp, synthetic construct
  source 1..20: mol_type = other DNA
gagtaagtagggagctagga

SEQ ID NO: 66846 - DNA, 20 bp, synthetic construct
  source 1..20: mol_type = other DNA
ggagtaagtagggagctagg

SEQ ID NO: 66847 - DNA, 20 bp, synthetic construct
  source 1..20: mol_type = other DNA
tggagtaagtagggagctag

SEQ ID NO: 66848 - DNA, 20 bp, synthetic construct
  source 1..20: mol_type = other DNA
gtggagtaagtagggagcta

SEQ ID NO: 66849 - DNA, 20 bp, synthetic construct
  source 1..20: mol_type = other DNA
agtggagtaagtagggagct

SEQ ID NO: 66850 - DNA, 20 bp, synthetic construct
  source 1..20: mol_type = other DNA
aagtggagtaagtagggagc

SEQ ID NO: 66851 - DNA, 20 bp, synthetic construct
  source 1..20: mol_type = other DNA
aaagtggagtaagtagggag

SEQ ID NO: 66852 - DNA, 20 bp, synthetic construct
  source 1..20: mol_type = other DNA
gaaagtggagtaagtaggga

SEQ ID NO: 66853 - DNA, 20 bp, synthetic construct
  source 1..20: mol_type = other DNA
ggaaagtggagtaagtaggg

SEQ ID NO: 66854 - DNA, 20 bp, synthetic construct
  source 1..20: mol_type = other DNA
gggaaagtggagtaagtagg

SEQ ID NO: 66855 - DNA, 20 bp, synthetic construct
  source 1..20: mol_type = other DNA
agggaaagtggagtaagtag

SEQ ID NO: 66856 - DNA, 20 bp, synthetic construct
  source 1..20: mol_type = other DNA
aagggaaagtggagtaagta

SEQ ID NO: 66857 - DNA, 20 bp, synthetic construct
  source 1..20: mol_type = other DNA
caagggaaagtggagtaagt

SEQ ID NO: 66858 - DNA, 20 bp, synthetic construct
  source 1..20: mol_type = other DNA
gcaagggaaagtggagtaag

SEQ ID NO: 66859 - DNA, 20 bp, synthetic construct
  source 1..20: mol_type = other DNA
ggcaagggaaagtggagtaa

SEQ ID NO: 66860 - DNA, 20 bp, synthetic construct
  source 1..20: mol_type = other DNA
aggcaagggaaagtggagta

SEQ ID NO: 66861 - DNA, 20 bp, synthetic construct
  source 1..20: mol_type = other DNA
aaggcaagggaaagtggagt

SEQ ID NO: 66862 - DNA, 20 bp, synthetic construct
  source 1..20: mol_type = other DNA
gaaggcaagggaaagtggag

SEQ ID NO: 66863 - DNA, 20 bp, synthetic construct
  source 1..20: mol_type = other DNA
agaaggcaagggaaagtgga

SEQ ID NO: 66864 - DNA, 20 bp, synthetic construct
  source 1..20: mol_type = other DNA
cagaaggcaagggaaagtgg

SEQ ID NO: 66865 - DNA, 20 bp, synthetic construct
  source 1..20: mol_type = other DNA
ccagaaggcaagggaaagtg

SEQ ID NO: 66866 - DNA, 20 bp, synthetic construct
  source 1..20: mol_type = other DNA
cccagaaggcaagggaaagt

SEQ ID NO: 66867 - DNA, 20 bp, synthetic construct
  source 1..20: mol_type = other DNA
ccccagaaggcaagggaaag

SEQ ID NO: 66868 - DNA, 20 bp, synthetic construct
  source 1..20: mol_type = other DNA
accccagaaggcaagggaaa

SEQ ID NO: 66869 - DNA, 20 bp, synthetic construct
  source 1..20: mol_type = other DNA
caccccagaaggcaagggaa

SEQ ID NO: 66870 - DNA, 20 bp, synthetic construct
  source 1..20: mol_type = other DNA
acaccccagaaggcaaggga

SEQ ID NO: 66871 - DNA, 20 bp, synthetic construct
  source 1..20: mol_type = other DNA
gacaccccagaaggcaaggg

SEQ ID NO: 66872 - DNA, 20 bp, synthetic construct
  source 1..20: mol_type = other DNA
ggacaccccagaaggcaagg

SEQ ID NO: 66873 - DNA, 20 bp, synthetic construct
  source 1..20: mol_type = other DNA
aggacaccccagaaggcaag

SEQ ID NO: 66874 - DNA, 20 bp, synthetic construct
  source 1..20: mol_type = other DNA
caggacaccccagaaggcaa

SEQ ID NO: 66875 - DNA, 20 bp, synthetic construct
  source 1..20: mol_type = other DNA
tcaggacaccccagaaggca

SEQ ID NO: 66876 - DNA, 20 bp, synthetic construct
  source 1..20: mol_type = other DNA
ttcaggacaccccagaaggc

SEQ ID NO: 66877 - DNA, 20 bp, synthetic construct
  source 1..20: mol_type = other DNA
cttcaggacaccccagaagg

SEQ ID NO: 66878 - DNA, 20 bp, synthetic construct
  source 1..20: mol_type = other DNA
tcttcaggacaccccagaag

SEQ ID NO: 66879 - DNA, 20 bp, synthetic construct
  source 1..20: mol_type = other DNA
gtcttcaggacaccccagaa

SEQ ID NO: 66880 - DNA, 20 bp, synthetic construct
  source 1..20: mol_type = other DNA
tgtcttcaggacaccccaga

SEQ ID NO: 66881 - DNA, 20 bp, synthetic construct
  source 1..20: mol_type = other DNA
atgtcttcaggacaccccag

SEQ ID NO: 66882 - DNA, 20 bp, synthetic construct
  source 1..20: mol_type = other DNA
gatgtcttcaggacacccca

SEQ ID NO: 66883 - DNA, 20 bp, synthetic construct
  source 1..20: mol_type = other DNA
tgatgtcttcaggacacccc

SEQ ID NO: 66884 - DNA, 20 bp, synthetic construct
  source 1..20: mol_type = other DNA
atgatgtcttcaggacaccc

SEQ ID NO: 66885 - DNA, 20 bp, synthetic construct
  source 1..20: mol_type = other DNA
tatgatgtcttcaggacacc

SEQ ID NO: 66886 - DNA, 20 bp, synthetic construct
  source 1..20: mol_type = other DNA
ctatgatgtcttcaggacac

SEQ ID NO: 66887 - DNA, 20 bp, synthetic construct
  source 1..20: mol_type = other DNA
cctatgatgtcttcaggaca

SEQ ID NO: 66888 - DNA, 20 bp, synthetic construct
  source 1..20: mol_type = other DNA
ccctatgatgtcttcaggac

SEQ ID NO: 66889 - DNA, 20 bp, synthetic construct
  source 1..20: mol_type = other DNA
accctatgatgtcttcagga

SEQ ID NO: 66890 - DNA, 20 bp, synthetic construct
  source 1..20: mol_type = other DNA
caccctatgatgtcttcagg

SEQ ID NO: 66891 - DNA, 20 bp, synthetic construct
  source 1..20: mol_type = other DNA
acaccctatgatgtcttcag

SEQ ID NO: 66892 - DNA, 20 bp, synthetic construct
  source 1..20: mol_type = other DNA
gacaccctatgatgtcttca

SEQ ID NO: 66893 - DNA, 20 bp, synthetic construct
  source 1..20: mol_type = other DNA
tgacaccctatgatgtcttc

SEQ ID NO: 66894 - DNA, 20 bp, synthetic construct
  source 1..20: mol_type = other DNA
atgacaccctatgatgtctt

SEQ ID NO: 66895 - DNA, 20 bp, synthetic construct
  source 1..20: mol_type = other DNA
catgacaccctatgatgtct

SEQ ID NO: 66896 - DNA, 20 bp, synthetic construct
  source 1..20: mol_type = other DNA
tcatgacaccctatgatgtc

SEQ ID NO: 66897 - DNA, 20 bp, synthetic construct
  source 1..20: mol_type = other DNA
ttcatgacaccctatgatgt

SEQ ID NO: 66898 - DNA, 20 bp, synthetic construct
  source 1..20: mol_type = other DNA
cttcatgacaccctatgatg

SEQ ID NO: 66899 - DNA, 20 bp, synthetic construct
  source 1..20: mol_type = other DNA
acttcatgacaccctatgat

SEQ ID NO: 66900 - DNA, 20 bp, synthetic construct
  source 1..20: mol_type = other DNA
tacttcatgacaccctatga

SEQ ID NO: 66901 - DNA, 20 bp, synthetic construct
  source 1..20: mol_type = other DNA
gtacttcatgacaccctatg

SEQ ID NO: 66902 - DNA, 20 bp, synthetic construct
  source 1..20: mol_type = other DNA
tgtacttcatgacaccctat

SEQ ID NO: 66903 - DNA, 20 bp, synthetic construct
  source 1..20: mol_type = other DNA
ctgtacttcatgacacccta

SEQ ID NO: 66904 - DNA, 20 bp, synthetic construct
  source 1..20: mol_type = other DNA
actgtacttcatgacaccct

SEQ ID NO: 66905 - DNA, 20 bp, synthetic construct
  source 1..20: mol_type = other DNA
aactgtacttcatgacaccc

SEQ ID NO: 66906 - DNA, 20 bp, synthetic construct
  source 1..20: mol_type = other DNA
caactgtacttcatgacacc

SEQ ID NO: 66907 - DNA, 20 bp, synthetic construct
  source 1..20: mol_type = other DNA
ccaactgtacttcatgacac

SEQ ID NO: 66908 - DNA, 20 bp, synthetic construct
  source 1..20: mol_type = other DNA
tccaactgtacttcatgaca

SEQ ID NO: 66909 - DNA, 20 bp, synthetic construct
  source 1..20: mol_type = other DNA
ctccaactgtacttcatgac

SEQ ID NO: 66910 - DNA, 20 bp, synthetic construct
  source 1..20: mol_type = other DNA
tctccaactgtacttcatga

SEQ ID NO: 66911 - DNA, 20 bp, synthetic construct
  source 1..20: mol_type = other DNA
ttctccaactgtacttcatg

SEQ ID NO: 66912 - DNA, 20 bp, synthetic construct
  source 1..20: mol_type = other DNA
gttctccaactgtacttcat

SEQ ID NO: 66913 - DNA, 20 bp, synthetic construct
  source 1..20: mol_type = other DNA
ggttctccaactgtacttca

SEQ ID NO: 66914 - DNA, 20 bp, synthetic construct
  source 1..20: mol_type = other DNA
tggttctccaactgtacttc

SEQ ID NO: 66915 - DNA, 20 bp, synthetic construct
  source 1..20: mol_type = other DNA
ctggttctccaactgtactt

SEQ ID NO: 66916 - DNA, 20 bp, synthetic construct
  source 1..20: mol_type = other DNA
actggttctccaactgtact

SEQ ID NO: 66917 - DNA, 20 bp, synthetic construct
  source 1..20: mol_type = other DNA
cactggttctccaactgtac

SEQ ID NO: 66918 - DNA, 20 bp, synthetic construct
  source 1..20: mol_type = other DNA
ccactggttctccaactgta

SEQ ID NO: 66919 - DNA, 20 bp, synthetic construct
  source 1..20: mol_type = other DNA
accactggttctccaactgt

SEQ ID NO: 66920 - DNA, 20 bp, synthetic construct
  source 1..20: mol_type = other DNA
gaccactggttctccaactg

SEQ ID NO: 66921 - DNA, 20 bp, synthetic construct
  source 1..20: mol_type = other DNA
agaccactggttctccaact

SEQ ID NO: 66922 - DNA, 20 bp, synthetic construct
  source 1..20: mol_type = other DNA
gagaccactggttctccaac

SEQ ID NO: 66923 - DNA, 20 bp, synthetic construct
  source 1..20: mol_type = other DNA
ggagaccactggttctccaa

SEQ ID NO: 66924 - DNA, 20 bp, synthetic construct
  source 1..20: mol_type = other DNA
tggagaccactggttctcca

SEQ ID NO: 66925 - DNA, 20 bp, synthetic construct
  source 1..20: mol_type = other DNA
atggagaccactggttctcc

SEQ ID NO: 66926 - DNA, 20 bp, synthetic construct
  source 1..20: mol_type = other DNA
gatggagaccactggttctc

SEQ ID NO: 66927 - DNA, 20 bp, synthetic construct
  source 1..20: mol_type = other DNA
tgatggagaccactggttct

SEQ ID NO: 66928 - DNA, 20 bp, synthetic construct
  source 1..20: mol_type = other DNA
atgatggagaccactggttc

SEQ ID NO: 66929 - DNA, 20 bp, synthetic construct
  source 1..20: mol_type = other DNA
catgatggagaccactggtt

SEQ ID NO: 66930 - DNA, 20 bp, synthetic construct
  source 1..20: mol_type = other DNA
acatgatggagaccactggt

SEQ ID NO: 66931 - DNA, 20 bp, synthetic construct
  source 1..20: mol_type = other DNA
tacatgatggagaccactgg

SEQ ID NO: 66932 - DNA, 20 bp, synthetic construct
  source 1..20: mol_type = other DNA
gtacatgatggagaccactg

SEQ ID NO: 66933 - DNA, 20 bp, synthetic construct
  source 1..20: mol_type = other DNA
ggtacatgatggagaccact

SEQ ID NO: 66934 - DNA, 20 bp, synthetic construct
  source 1..20: mol_type = other DNA
tggtacatgatggagaccac

SEQ ID NO: 66935 - DNA, 20 bp, synthetic construct
  source 1..20: mol_type = other DNA
ttggtacatgatggagacca

SEQ ID NO: 66936 - DNA, 20 bp, synthetic construct
  source 1..20: mol_type = other DNA
tttggtacatgatggagacc

SEQ ID NO: 66937 - DNA, 20 bp, synthetic construct
  source 1..20: mol_type = other DNA
gtttggtacatgatggagac

SEQ ID NO: 66938 - DNA, 20 bp, synthetic construct
  source 1..20: mol_type = other DNA
tgtttggtacatgatggaga

SEQ ID NO: 66939 - DNA, 20 bp, synthetic construct
  source 1..20: mol_type = other DNA
gtgtttggtacatgatggag

SEQ ID NO: 66940 - DNA, 20 bp, synthetic construct
  source 1..20: mol_type = other DNA
agtgtttggtacatgatgga

SEQ ID NO: 66941 - DNA, 20 bp, synthetic construct
  source 1..20: mol_type = other DNA
gagtgtttggtacatgatgg

SEQ ID NO: 66942 - DNA, 20 bp, synthetic construct
  source 1..20: mol_type = other DNA
tgagtgtttggtacatgatg

SEQ ID NO: 66943 - DNA, 20 bp, synthetic construct
  source 1..20: mol_type = other DNA
atgagtgtttggtacatgat

SEQ ID NO: 66944 - DNA, 20 bp, synthetic construct
  source 1..20: mol_type = other DNA
gatgagtgtttggtacatga

SEQ ID NO: 66945 - DNA, 20 bp, synthetic construct
  source 1..20: mol_type = other DNA
agatgagtgtttggtacatg

SEQ ID NO: 66946 - DNA, 20 bp, synthetic construct
  source 1..20: mol_type = other DNA
aagatgagtgtttggtacat

SEQ ID NO: 66947 - DNA, 20 bp, synthetic construct
  source 1..20: mol_type = other DNA
gaagatgagtgtttggtaca

SEQ ID NO: 66948 - DNA, 20 bp, synthetic construct
  source 1..20: mol_type = other DNA
tgaagatgagtgtttggtac

SEQ ID NO: 66949 - DNA, 20 bp, synthetic construct
  source 1..20: mol_type = other DNA
gtgaagatgagtgtttggta

SEQ ID NO: 66950 - DNA, 20 bp, synthetic construct
  source 1..20: mol_type = other DNA
cgtgaagatgagtgtttggt

SEQ ID NO: 66951 - DNA, 20 bp, synthetic construct
  source 1..20: mol_type = other DNA
tcgtgaagatgagtgtttgg

SEQ ID NO: 66952 - DNA, 20 bp, synthetic construct
  source 1..20: mol_type = other DNA
ttcgtgaagatgagtgtttg

SEQ ID NO: 66953 - DNA, 20 bp, synthetic construct
  source 1..20: mol_type = other DNA
cttcgtgaagatgagtgttt

SEQ ID NO: 66954 - DNA, 20 bp, synthetic construct
  source 1..20: mol_type = other DNA
gcttcgtgaagatgagtgtt

SEQ ID NO: 66955 - DNA, 20 bp, synthetic construct
  source 1..20: mol_type = other DNA
tgcttcgtgaagatgagtgt

SEQ ID NO: 66956 - DNA, 20 bp, synthetic construct
  source 1..20: mol_type = other DNA
ctgcttcgtgaagatgagtg

SEQ ID NO: 66957 - DNA, 20 bp, synthetic construct
  source 1..20: mol_type = other DNA
actgcttcgtgaagatgagt

SEQ ID NO: 66958 - DNA, 20 bp, synthetic construct
  source 1..20: mol_type = other DNA
tactgcttcgtgaagatgag

SEQ ID NO: 66959 - DNA, 20 bp, synthetic construct
  source 1..20: mol_type = other DNA
atactgcttcgtgaagatga

SEQ ID NO: 66960 - DNA, 20 bp, synthetic construct
  source 1..20: mol_type = other DNA
catactgcttcgtgaagatg

SEQ ID NO: 66961 - DNA, 20 bp, synthetic construct
  source 1..20: mol_type = other DNA
acatactgcttcgtgaagat

SEQ ID NO: 66962 - DNA, 20 bp, synthetic construct
  source 1..20: mol_type = other DNA
tacatactgcttcgtgaaga

SEQ ID NO: 66963 - DNA, 20 bp, synthetic construct
  source 1..20: mol_type = other DNA
ctacatactgcttcgtgaag

SEQ ID NO: 66964 - DNA, 20 bp, synthetic construct
  source 1..20: mol_type = other DNA
actacatactgcttcgtgaa

SEQ ID NO: 66965 - DNA, 20 bp, synthetic construct
  source 1..20: mol_type = other DNA
cactacatactgcttcgtga

SEQ ID NO: 66966 - DNA, 20 bp, synthetic construct
  source 1..20: mol_type = other DNA
acactacatactgcttcgtg

SEQ ID NO: 66967 - DNA, 20 bp, synthetic construct
  source 1..20: mol_type = other DNA
gacactacatactgcttcgt

SEQ ID NO: 66968 - DNA, 20 bp, synthetic construct
  source 1..20: mol_type = other DNA
agacactacatactgcttcg

SEQ ID NO: 66969 - DNA, 20 bp, synthetic construct
  source 1..20: mol_type = other DNA
aagacactacatactgcttc

SEQ ID NO: 66970 - DNA, 20 bp, synthetic construct
  source 1..20: mol_type = other DNA
aaagacactacatactgctt

SEQ ID NO: 66971 - DNA, 20 bp, synthetic construct
  source 1..20: mol_type = other DNA
aaaagacactacatactgct

SEQ ID NO: 66972 - DNA, 20 bp, synthetic construct
  source 1..20: mol_type = other DNA
aaaaagacactacatactgc

SEQ ID NO: 66973 - DNA, 20 bp, synthetic construct
  source 1..20: mol_type = other DNA
aaaaaagacactacatactg

SEQ ID NO: 66974 - DNA, 20 bp, synthetic construct
  source 1..20: mol_type = other DNA
taaaaaagacactacatact

SEQ ID NO: 66975 - DNA, 20 bp, synthetic construct
  source 1..20: mol_type = other DNA
gtaaaaaagacactacatac

SEQ ID NO: 66976 - DNA, 20 bp, synthetic construct
  source 1..20: mol_type = other DNA
ggtaaaaaagacactacata

SEQ ID NO: 66977 - DNA, 20 bp, synthetic construct
  source 1..20: mol_type = other DNA
cggtaaaaaagacactacat

SEQ ID NO: 66978 - DNA, 20 bp, synthetic construct
  source 1..20: mol_type = other DNA
ccggtaaaaaagacactaca

SEQ ID NO: 66979 - DNA, 20 bp, synthetic construct
  source 1..20: mol_type = other DNA
accggtaaaaaagacactac

SEQ ID NO: 66980 - DNA, 20 bp, synthetic construct
  source 1..20: mol_type = other DNA
taccggtaaaaaagacacta

SEQ ID NO: 66981 - DNA, 20 bp, synthetic construct
  source 1..20: mol_type = other DNA
ataccggtaaaaaagacact

SEQ ID NO: 66982 - DNA, 20 bp, synthetic construct
  source 1..20: mol_type = other DNA
tataccggtaaaaaagacac

SEQ ID NO: 66983 - DNA, 20 bp, synthetic construct
  source 1..20: mol_type = other DNA
atataccggtaaaaaagaca

SEQ ID NO: 66984 - DNA, 20 bp, synthetic construct
  source 1..20: mol_type = other DNA
aatataccggtaaaaaagac

SEQ ID NO: 66985 - DNA, 20 bp, synthetic construct
  source 1..20: mol_type = other DNA
aaatataccggtaaaaaaga

SEQ ID NO: 66986 - DNA, 20 bp, synthetic construct
  source 1..20: mol_type = other DNA
aaaatataccggtaaaaaag

SEQ ID NO: 66987 - DNA, 20 bp, synthetic construct
  source 1..20: mol_type = other DNA
gaaaatataccggtaaaaaa

SEQ ID NO: 66988 - DNA, 20 bp, synthetic construct
  source 1..20: mol_type = other DNA
agaaaatataccggtaaaaa

SEQ ID NO: 66989 - DNA, 20 bp, synthetic construct
  source 1..20: mol_type = other DNA
gagaaaatataccggtaaaa

SEQ ID NO: 66990 - DNA, 20 bp, synthetic construct
  source 1..20: mol_type = other DNA
agagaaaatataccggtaaa

SEQ ID NO: 66991 - DNA, 20 bp, synthetic construct
  source 1..20: mol_type = other DNA
gagagaaaatataccggtaa

SEQ ID NO: 66992 - DNA, 20 bp, synthetic construct
  source 1..20: mol_type = other DNA
agagagaaaatataccggta

SEQ ID NO: 66993 - DNA, 20 bp, synthetic construct
  source 1..20: mol_type = other DNA
gagagagaaaatataccggt

SEQ ID NO: 66994 - DNA, 20 bp, synthetic construct
  source 1..20: mol_type = other DNA
ggagagagaaaatataccgg

SEQ ID NO: 66995 - DNA, 20 bp, synthetic construct
  source 1..20: mol_type = other DNA
gggagagagaaaatataccg

SEQ ID NO: 66996 - DNA, 20 bp, synthetic construct
  source 1..20: mol_type = other DNA
tgggagagagaaaatatacc

SEQ ID NO: 66997 - DNA, 20 bp, synthetic construct
  source 1..20: mol_type = other DNA
ttgggagagagaaaatatac

SEQ ID NO: 66998 - DNA, 20 bp, synthetic construct
  source 1..20: mol_type = other DNA
attgggagagagaaaatata

SEQ ID NO: 66999 - DNA, 20 bp, synthetic construct
  source 1..20: mol_type = other DNA
cattgggagagagaaaatat

SEQ ID NO: 67000 - DNA, 20 bp, synthetic construct
  source 1..20: mol_type = other DNA
gcattgggagagagaaaata

SEQ ID NO: 67001 - DNA, 20 bp, synthetic construct
  source 1..20: mol_type = other DNA
tgcattgggagagagaaaat

SEQ ID NO: 67002 - DNA, 20 bp, synthetic construct
  source 1..20: mol_type = other DNA
atgcattgggagagagaaaa

SEQ ID NO: 67003 - DNA, 20 bp, synthetic construct
  source 1..20: mol_type = other DNA
aatgcattgggagagagaaa

SEQ ID NO: 67004 - DNA, 20 bp, synthetic construct
  source 1..20: mol_type = other DNA
taatgcattgggagagagaa

SEQ ID NO: 67005 - DNA, 20 bp, synthetic construct
  source 1..20: mol_type = other DNA
ttaatgcattgggagagaga

SEQ ID NO: 67006 - DNA, 20 bp, synthetic construct
  source 1..20: mol_type = other DNA
tttaatgcattgggagagag

SEQ ID NO: 67007 - DNA, 20 bp, synthetic construct
  source 1..20: mol_type = other DNA
gtttaatgcattgggagaga

SEQ ID NO: 67008 - DNA, 20 bp, synthetic construct
  source 1..20: mol_type = other DNA
agtttaatgcattgggagag

SEQ ID NO: 67009 - DNA, 20 bp, synthetic construct
  source 1..20: mol_type = other DNA
aagtttaatgcattgggaga

SEQ ID NO: 67010 - DNA, 20 bp, synthetic construct
  source 1..20: mol_type = other DNA
aaagtttaatgcattgggag

SEQ ID NO: 67011 - DNA, 20 bp, synthetic construct
  source 1..20: mol_type = other DNA
aaaagtttaatgcattggga

SEQ ID NO: 67012 - DNA, 20 bp, synthetic construct
  source 1..20: mol_type = other DNA
gaaaagtttaatgcattggg

SEQ ID NO: 67013 - DNA, 20 bp, synthetic construct
  source 1..20: mol_type = other DNA
agaaaagtttaatgcattgg

SEQ ID NO: 67014 - DNA, 20 bp, synthetic construct
  source 1..20: mol_type = other DNA
cagaaaagtttaatgcattg

SEQ ID NO: 67015 - DNA, 20 bp, synthetic construct
  source 1..20: mol_type = other DNA
ccagaaaagtttaatgcatt

SEQ ID NO: 67016 - DNA, 20 bp, synthetic construct
  source 1..20: mol_type = other DNA
tccagaaaagtttaatgcat

SEQ ID NO: 67017 - DNA, 20 bp, synthetic construct
  source 1..20: mol_type = other DNA
ctccagaaaagtttaatgca

SEQ ID NO: 67018 - DNA, 20 bp, synthetic construct
  source 1..20: mol_type = other DNA
actccagaaaagtttaatgc

SEQ ID NO: 67019 - DNA, 20 bp, synthetic construct
  source 1..20: mol_type = other DNA
aactccagaaaagtttaatg

SEQ ID NO: 67020 - DNA, 20 bp, synthetic construct
  source 1..20: mol_type = other DNA
gaactccagaaaagtttaat

SEQ ID NO: 67021 - DNA, 20 bp, synthetic construct
  source 1..20: mol_type = other DNA
tgaactccagaaaagtttaa

SEQ ID NO: 67022 - DNA, 20 bp, synthetic construct
  source 1..20: mol_type = other DNA
ctgaactccagaaaagttta

SEQ ID NO: 67023 - DNA, 20 bp, synthetic construct
  source 1..20: mol_type = other DNA
tctgaactccagaaaagttt

SEQ ID NO: 67024 - DNA, 20 bp, synthetic construct
  source 1..20: mol_type = other DNA
ttctgaactccagaaaagtt

SEQ ID NO: 67025 - DNA, 20 bp, synthetic construct
  source 1..20: mol_type = other DNA
tttctgaactccagaaaagt

SEQ ID NO: 67026 - DNA, 20 bp, synthetic construct
  source 1..20: mol_type = other DNA
ttttctgaactccagaaaag

SEQ ID NO: 67027 - DNA, 20 bp, synthetic construct
  source 1..20: mol_type = other DNA
gttttctgaactccagaaaa

SEQ ID NO: 67028 - DNA, 20 bp, synthetic construct
  source 1..20: mol_type = other DNA
tgttttctgaactccagaaa

SEQ ID NO: 67029 - DNA, 20 bp, synthetic construct
  source 1..20: mol_type = other DNA
ttgttttctgaactccagaa

SEQ ID NO: 67030 - DNA, 20 bp, synthetic construct
  source 1..20: mol_type = other DNA
tttgttttctgaactccaga

SEQ ID NO: 67031 - DNA, 20 bp, synthetic construct
  source 1..20: mol_type = other DNA
atttgttttctgaactccag

SEQ ID NO: 67032 - DNA, 20 bp, synthetic construct
  source 1..20: mol_type = other DNA
aatttgttttctgaactcca

SEQ ID NO: 67033 - DNA, 20 bp, synthetic construct
  source 1..20: mol_type = other DNA
aaatttgttttctgaactcc

SEQ ID NO: 67034 - DNA, 20 bp, synthetic construct
  source 1..20: mol_type = other DNA
taaatttgttttctgaactc

SEQ ID NO: 67035 - DNA, 20 bp, synthetic construct
  source 1..20: mol_type = other DNA
ataaatttgttttctgaact

SEQ ID NO: 67036 - DNA, 20 bp, synthetic construct
  source 1..20: mol_type = other DNA
tataaatttgttttctgaac

SEQ ID NO: 67037 - DNA, 20 bp, synthetic construct
  source 1..20: mol_type = other DNA
ctataaatttgttttctgaa

SEQ ID NO: 67038 - DNA, 20 bp, synthetic construct
  source 1..20: mol_type = other DNA
tctataaatttgttttctga

SEQ ID NO: 67039 - DNA, 20 bp, synthetic construct
  source 1..20: mol_type = other DNA
ttctataaatttgttttctg

SEQ ID NO: 67040 - DNA, 20 bp, synthetic construct
  source 1..20: mol_type = other DNA
attctataaatttgttttct

SEQ ID NO: 67041 - DNA, 20 bp, synthetic construct
  source 1..20: mol_type = other DNA
aattctataaatttgttttc

SEQ ID NO: 67042 - DNA, 20 bp, synthetic construct
  source 1..20: mol_type = other DNA
taattctataaatttgtttt

SEQ ID NO: 67043 - DNA, 20 bp, synthetic construct
  source 1..20: mol_type = other DNA
ttaattctataaatttgttt

SEQ ID NO: 67044 - DNA, 20 bp, synthetic construct
  source 1..20: mol_type = other DNA
cttaattctataaatttgtt

SEQ ID NO: 67045 - DNA, 20 bp, synthetic construct
  source 1..20: mol_type = other DNA
ccttaattctataaatttgt

SEQ ID NO: 67046 - DNA, 20 bp, synthetic construct
  source 1..20: mol_type = other DNA
tccttaattctataaatttg

SEQ ID NO: 67047 - DNA, 20 bp, synthetic construct
  source 1..20: mol_type = other DNA
ttccttaattctataaattt

SEQ ID NO: 67048 - DNA, 20 bp, synthetic construct
  source 1..20: mol_type = other DNA
tttccttaattctataaatt

SEQ ID NO: 67049 - DNA, 20 bp, synthetic construct
  source 1..20: mol_type = other DNA
atttccttaattctataaat

SEQ ID NO: 67050 - DNA, 20 bp, synthetic construct
  source 1..20: mol_type = other DNA
catttccttaattctataaa

SEQ ID NO: 67051 - DNA, 20 bp, synthetic construct
  source 1..20: mol_type = other DNA
gcatttccttaattctataa

SEQ ID NO: 67052 - DNA, 20 bp, synthetic construct
  source 1..20: mol_type = other DNA
cgcatttccttaattctata

SEQ ID NO: 67053 - DNA, 20 bp, synthetic construct
  source 1..20: mol_type = other DNA
acgcatttccttaattctat

SEQ ID NO: 67054 - DNA, 20 bp, synthetic construct
  source 1..20: mol_type = other DNA
gacgcatttccttaattcta

SEQ ID NO: 67055 - DNA, 20 bp, synthetic construct
  source 1..20: mol_type = other DNA
ggacgcatttccttaattct

SEQ ID NO: 67056 - DNA, 20 bp, synthetic construct
  source 1..20: mol_type = other DNA
gggacgcatttccttaattc

SEQ ID NO: 67057 - DNA, 20 bp, synthetic construct
  source 1..20: mol_type = other DNA
ggggacgcatttccttaatt

SEQ ID NO: 67058 - DNA, 20 bp, synthetic construct
  source 1..20: mol_type = other DNA
gggggacgcatttccttaat

SEQ ID NO: 67059 - DNA, 20 bp, synthetic construct
  source 1..20: mol_type = other DNA
ggggggacgcatttccttaa

SEQ ID NO: 67060 - DNA, 20 bp, synthetic construct
  source 1..20: mol_type = other DNA
gggggggacgcatttcctta

SEQ ID NO: 67061 - DNA, 20 bp, synthetic construct
  source 1..20: mol_type = other DNA
tgggggggacgcatttcctt

SEQ ID NO: 67062 - DNA, 20 bp, synthetic construct
  source 1..20: mol_type = other DNA
ttgggggggacgcatttcct

SEQ ID NO: 67063 - DNA, 20 bp, synthetic construct
  source 1..20: mol_type = other DNA
gttgggggggacgcatttcc

SEQ ID NO: 67064 - DNA, 20 bp, synthetic construct
  source 1..20: mol_type = other DNA
ggttgggggggacgcatttc

SEQ ID NO: 67065 - DNA, 20 bp, synthetic construct
  source 1..20: mol_type = other DNA
tggttgggggggacgcattt

SEQ ID NO: 67066 - DNA, 20 bp, synthetic construct
  source 1..20: mol_type = other DNA
atggttgggggggacgcatt

SEQ ID NO: 67067 - DNA, 20 bp, synthetic construct
  source 1..20: mol_type = other DNA
catggttgggggggacgcat

SEQ ID NO: 67068 - DNA, 20 bp, synthetic construct
  source 1..20: mol_type = other DNA
ccatggttgggggggacgca

SEQ ID NO: 67069 - DNA, 20 bp, synthetic construct
  source 1..20: mol_type = other DNA
accatggttgggggggacgc

SEQ ID NO: 67070 - DNA, 20 bp, synthetic construct
  source 1..20: mol_type = other DNA
caccatggttgggggggacg

SEQ ID NO: 67071 - DNA, 20 bp, synthetic construct
  source 1..20: mol_type = other DNA
acaccatggttgggggggac

SEQ ID NO: 67072 - DNA, 20 bp, synthetic construct
  source 1..20: mol_type = other DNA
gacaccatggttggggggga

SEQ ID NO: 67073 - DNA, 20 bp, synthetic construct
  source 1..20: mol_type = other DNA
agacaccatggttggggggg

SEQ ID NO: 67074 - DNA, 20 bp, synthetic construct
  source 1..20: mol_type = other DNA
tagacaccatggttgggggg

SEQ ID NO: 67075 - DNA, 20 bp, synthetic construct
  source 1..20: mol_type = other DNA
ctagacaccatggttggggg

SEQ ID NO: 67076 - DNA, 20 bp, synthetic construct
  source 1..20: mol_type = other DNA
actagacaccatggttgggg

SEQ ID NO: 67077 - DNA, 20 bp, synthetic construct
  source 1..20: mol_type = other DNA
tactagacaccatggttggg

SEQ ID NO: 67078 - DNA, 20 bp, synthetic construct
  source 1..20: mol_type = other DNA
atactagacaccatggttgg

SEQ ID NO: 67079 - DNA, 20 bp, synthetic construct
  source 1..20: mol_type = other DNA
tatactagacaccatggttg

SEQ ID NO: 67080 - DNA, 20 bp, synthetic construct
  source 1..20: mol_type = other DNA
atatactagacaccatggtt

SEQ ID NO: 67081 - DNA, 20 bp, synthetic construct
  source 1..20: mol_type = other DNA
tatatactagacaccatggt

SEQ ID NO: 67082 - DNA, 20 bp, synthetic construct
  source 1..20: mol_type = other DNA
atatatactagacaccatgg

SEQ ID NO: 67083 - DNA, 20 bp, synthetic construct
  source 1..20: mol_type = other DNA
tatatatactagacaccatg

SEQ ID NO: 67084 - DNA, 20 bp, synthetic construct
  source 1..20: mol_type = other DNA
gtatatatactagacaccat

SEQ ID NO: 67085 - DNA, 20 bp, synthetic construct
  source 1..20: mol_type = other DNA
tgtatatatactagacacca

SEQ ID NO: 67086 - DNA, 20 bp, synthetic construct
  source 1..20: mol_type = other DNA
ctgtatatatactagacacc

SEQ ID NO: 67087 - DNA, 20 bp, synthetic construct
  source 1..20: mol_type = other DNA
actgtatatatactagacac

SEQ ID NO: 67088 - DNA, 20 bp, synthetic construct
  source 1..20: mol_type = other DNA
cactgtatatatactagaca

SEQ ID NO: 67089 - DNA, 20 bp, synthetic construct
  source 1..20: mol_type = other DNA
tcactgtatatatactagac

SEQ ID NO: 67090 - DNA, 20 bp, synthetic construct
  source 1..20: mol_type = other DNA
gtcactgtatatatactaga

SEQ ID NO: 67091 - DNA, 20 bp, synthetic construct
  source 1..20: mol_type = other DNA
agtcactgtatatatactag

SEQ ID NO: 67092 - DNA, 20 bp, synthetic construct
  source 1..20: mol_type = other DNA
aagtcactgtatatatacta

SEQ ID NO: 67093 - DNA, 20 bp, synthetic construct
  source 1..20: mol_type = other DNA
taagtcactgtatatatact

SEQ ID NO: 67094 - DNA, 20 bp, synthetic construct
  source 1..20: mol_type = other DNA
gtaagtcactgtatatatac

SEQ ID NO: 67095 - DNA, 20 bp, synthetic construct
  source 1..20: mol_type = other DNA
tgtaagtcactgtatatata

SEQ ID NO: 67096 - DNA, 20 bp, synthetic construct
  source 1..20: mol_type = other DNA
ctgtaagtcactgtatatat

SEQ ID NO: 67097 - DNA, 20 bp, synthetic construct
  source 1..20: mol_type = other DNA
tctgtaagtcactgtatata

SEQ ID NO: 67098 - DNA, 20 bp, synthetic construct
  source 1..20: mol_type = other DNA
atctgtaagtcactgtatat

SEQ ID NO: 67099 - DNA, 20 bp, synthetic construct
  source 1..20: mol_type = other DNA
tatctgtaagtcactgtata

SEQ ID NO: 67100 - DNA, 20 bp, synthetic construct
  source 1..20: mol_type = other DNA
ttatctgtaagtcactgtat

SEQ ID NO: 67101 - DNA, 20 bp, synthetic construct
  source 1..20: mol_type = other DNA
gttatctgtaagtcactgta

SEQ ID NO: 67102 - DNA, 20 bp, synthetic construct
  source 1..20: mol_type = other DNA
tgttatctgtaagtcactgt

SEQ ID NO: 67103 - DNA, 20 bp, synthetic construct
  source 1..20: mol_type = other DNA
ctgttatctgtaagtcactg

SEQ ID NO: 67104 - DNA, 20 bp, synthetic construct
  source 1..20: mol_type = other DNA
cctgttatctgtaagtcact

SEQ ID NO: 67105 - DNA, 20 bp, synthetic construct
  source 1..20: mol_type = other DNA
acctgttatctgtaagtcac

SEQ ID NO: 67106 - DNA, 20 bp, synthetic construct
  source 1..20: mol_type = other DNA
cacctgttatctgtaagtca

SEQ ID NO: 67107 - DNA, 20 bp, synthetic construct
  source 1..20: mol_type = other DNA
acacctgttatctgtaagtc

SEQ ID NO: 67108 - DNA, 20 bp, synthetic construct
  source 1..20: mol_type = other DNA
aacacctgttatctgtaagt

SEQ ID NO: 67109 - DNA, 20 bp, synthetic construct
  source 1..20: mol_type = other DNA
gaacacctgttatctgtaag

SEQ ID NO: 67110 - DNA, 20 bp, synthetic construct
  source 1..20: mol_type = other DNA
tgaacacctgttatctgtaa

SEQ ID NO: 67111 - DNA, 20 bp, synthetic construct
  source 1..20: mol_type = other DNA
ttgaacacctgttatctgta

SEQ ID NO: 67112 - DNA, 20 bp, synthetic construct
  source 1..20: mol_type = other DNA
gttgaacacctgttatctgt

SEQ ID NO: 67113 - DNA, 20 bp, synthetic construct
  source 1..20: mol_type = other DNA
tgttgaacacctgttatctg

SEQ ID NO: 67114 - DNA, 20 bp, synthetic construct
  source 1..20: mol_type = other DNA
atgttgaacacctgttatct

SEQ ID NO: 67115 - DNA, 20 bp, synthetic construct
  source 1..20: mol_type = other DNA
tatgttgaacacctgttatc

SEQ ID NO: 67116 - DNA, 20 bp, synthetic construct
  source 1..20: mol_type = other DNA
atatgttgaacacctgttat

SEQ ID NO: 67117 - DNA, 20 bp, synthetic construct
  source 1..20: mol_type = other DNA
tatatgttgaacacctgtta

SEQ ID NO: 67118 - DNA, 20 bp, synthetic construct
  source 1..20: mol_type = other DNA
atatatgttgaacacctgtt

SEQ ID NO: 67119 - DNA, 20 bp, synthetic construct
  source 1..20: mol_type = other DNA
tatatatgttgaacacctgt

SEQ ID NO: 67120 - DNA, 20 bp, synthetic construct
  source 1..20: mol_type = other DNA
atatatatgttgaacacctg

SEQ ID NO: 67121 - DNA, 20 bp, synthetic construct
  source 1..20: mol_type = other DNA
tatatatatgttgaacacct

SEQ ID NO: 67122 - DNA, 20 bp, synthetic construct
  source 1..20: mol_type = other DNA
atatatatatgttgaacacc

SEQ ID NO: 67123 - DNA, 20 bp, synthetic construct
  source 1..20: mol_type = other DNA
aatatatatatgttgaacac

SEQ ID NO: 67124 - DNA, 20 bp, synthetic construct
  source 1..20: mol_type = other DNA
gaatatatatatgttgaaca

SEQ ID NO: 67125 - DNA, 20 bp, synthetic construct
  source 1..20: mol_type = other DNA
ggaatatatatatgttgaac

SEQ ID NO: 67126 - DNA, 20 bp, synthetic construct
  source 1..20: mol_type = other DNA
aggaatatatatatgttgaa

SEQ ID NO: 67127 - DNA, 20 bp, synthetic construct
  source 1..20: mol_type = other DNA
aaggaatatatatatgttga

SEQ ID NO: 67128 - DNA, 20 bp, synthetic construct
  source 1..20: mol_type = other DNA
aaaggaatatatatatgttg

SEQ ID NO: 67129 - DNA, 20 bp, synthetic construct
  source 1..20: mol_type = other DNA
caaaggaatatatatatgtt

SEQ ID NO: 67130 - DNA, 20 bp, synthetic construct
  source 1..20: mol_type = other DNA
tcaaaggaatatatatatgt

SEQ ID NO: 67131 - DNA, 20 bp, synthetic construct
  source 1..20: mol_type = other DNA
atcaaaggaatatatatatg

SEQ ID NO: 67132 - DNA, 20 bp, synthetic construct
  source 1..20: mol_type = other DNA
aatcaaaggaatatatatat

SEQ ID NO: 67133 - DNA, 20 bp, synthetic construct
  source 1..20: mol_type = other DNA
caatcaaaggaatatatata

SEQ ID NO: 67134 - DNA, 20 bp, synthetic construct
  source 1..20: mol_type = other DNA
tcaatcaaaggaatatatat

SEQ ID NO: 67135 - DNA, 20 bp, synthetic construct
  source 1..20: mol_type = other DNA
atcaatcaaaggaatatata

SEQ ID NO: 67136 - DNA, 20 bp, synthetic construct
  source 1..20: mol_type = other DNA
aatcaatcaaaggaatatat

SEQ ID NO: 67137 - DNA, 20 bp, synthetic construct
  source 1..20: mol_type = other DNA
aaatcaatcaaaggaatata

SEQ ID NO: 67138 - DNA, 20 bp, synthetic construct
  source 1..20: mol_type = other DNA
aaaatcaatcaaaggaatat

SEQ ID NO: 67139 - DNA, 20 bp, synthetic construct
  source 1..20: mol_type = other DNA
aaaaatcaatcaaaggaata

SEQ ID NO: 67140 - DNA, 20 bp, synthetic construct
  source 1..20: mol_type = other DNA
caaaaatcaatcaaaggaat

SEQ ID NO: 67141 - DNA, 20 bp, synthetic construct
  source 1..20: mol_type = other DNA
tcaaaaatcaatcaaaggaa

SEQ ID NO: 67142 - DNA, 20 bp, synthetic construct
  source 1..20: mol_type = other DNA
ttcaaaaatcaatcaaagga

SEQ ID NO: 67143 - DNA, 20 bp, synthetic construct
  source 1..20: mol_type = other DNA
tttcaaaaatcaatcaaagg

SEQ ID NO: 67144 - DNA, 20 bp, synthetic construct
  source 1..20: mol_type = other DNA
ttttcaaaaatcaatcaaag

SEQ ID NO: 67145 - DNA, 20 bp, synthetic construct
  source 1..20: mol_type = other DNA
cttttcaaaaatcaatcaaa

SEQ ID NO: 67146 - DNA, 20 bp, synthetic construct
  source 1..20: mol_type = other DNA
acttttcaaaaatcaatcaa

SEQ ID NO: 67147 - DNA, 20 bp, synthetic construct
  source 1..20: mol_type = other DNA
aacttttcaaaaatcaatca

SEQ ID NO: 67148 - DNA, 20 bp, synthetic construct
  source 1..20: mol_type = other DNA
aaacttttcaaaaatcaatc

SEQ ID NO: 67149 - DNA, 20 bp, synthetic construct
  source 1..20: mol_type = other DNA
taaacttttcaaaaatcaat

SEQ ID NO: 67150 - DNA, 20 bp, synthetic construct
  source 1..20: mol_type = other DNA
gtaaacttttcaaaaatcaa

SEQ ID NO: 67151 - DNA, 20 bp, synthetic construct
  source 1..20: mol_type = other DNA
tgtaaacttttcaaaaatca

SEQ ID NO: 67152 - DNA, 20 bp, synthetic construct
  source 1..20: mol_type = other DNA
atgtaaacttttcaaaaatc

SEQ ID NO: 67153 - DNA, 20 bp, synthetic construct
  source 1..20: mol_type = other DNA
catgtaaacttttcaaaaat

SEQ ID NO: 67154 - DNA, 20 bp, synthetic construct
  source 1..20: mol_type = other DNA
acatgtaaacttttcaaaaa

SEQ ID NO: 67155 - DNA, 20 bp, synthetic construct
  source 1..20: mol_type = other DNA
tacatgtaaacttttcaaaa

SEQ ID NO: 67156 - DNA, 20 bp, synthetic construct
  source 1..20: mol_type = other DNA
atacatgtaaacttttcaaa

SEQ ID NO: 67157 - DNA, 20 bp, synthetic construct
  source 1..20: mol_type = other DNA
tatacatgtaaacttttcaa

SEQ ID NO: 67158 - DNA, 20 bp, synthetic construct
  source 1..20: mol_type = other DNA
atatacatgtaaacttttca

SEQ ID NO: 67159 - DNA, 20 bp, synthetic construct
  source 1..20: mol_type = other DNA
tatatacatgtaaacttttc

SEQ ID NO: 67160 - DNA, 20 bp, synthetic construct
  source 1..20: mol_type = other DNA
atatatacatgtaaactttt

SEQ ID NO: 67161 - DNA, 20 bp, synthetic construct
  source 1..20: mol_type = other DNA
aatatatacatgtaaacttt

SEQ ID NO: 67162 - DNA, 20 bp, synthetic construct
  source 1..20: mol_type = other DNA
aaatatatacatgtaaactt

SEQ ID NO: 67163 - DNA, 20 bp, synthetic construct
  source 1..20: mol_type = other DNA
aaaatatatacatgtaaact

SEQ ID NO: 67164 - DNA, 20 bp, synthetic construct
  source 1..20: mol_type = other DNA
aaaaatatatacatgtaaac

SEQ ID NO: 67165 - DNA, 20 bp, synthetic construct
  source 1..20: mol_type = other DNA
aaaaaatatatacatgtaaa

SEQ ID NO: 67166 - DNA, 20 bp, synthetic construct
  source 1..20: mol_type = other DNA
taaaaaatatatacatgtaa

SEQ ID NO: 67167 - DNA, 20 bp, synthetic construct
  source 1..20: mol_type = other DNA
ataaaaaatatatacatgta

SEQ ID NO: 67168 - DNA, 20 bp, synthetic construct
  source 1..20: mol_type = other DNA
tataaaaaatatatacatgt

SEQ ID NO: 67169 - DNA, 20 bp, synthetic construct
  source 1..20: mol_type = other DNA
atataaaaaatatatacatg

SEQ ID NO: 67170 - DNA, 20 bp, synthetic construct
  source 1..20: mol_type = other DNA
tatataaaaaatatatacat

SEQ ID NO: 67171 - DNA, 20 bp, synthetic construct
  source 1..20: mol_type = other DNA
gtatataaaaaatatataca

SEQ ID NO: 67172 - DNA, 20 bp, synthetic construct
  source 1..20: mol_type = other DNA
cgtatataaaaaatatatac

SEQ ID NO: 67173 - DNA, 20 bp, synthetic construct
  source 1..20: mol_type = other DNA
ccgtatataaaaaatatata

SEQ ID NO: 67174 - DNA, 20 bp, synthetic construct
  source 1..20: mol_type = other DNA
cccgtatataaaaaatatat

SEQ ID NO: 67175 - DNA, 20 bp, synthetic construct
  source 1..20: mol_type = other DNA
ccccgtatataaaaaatata

SEQ ID NO: 67176 - DNA, 20 bp, synthetic construct
  source 1..20: mol_type = other DNA
accccgtatataaaaaatat

SEQ ID NO: 67177 - DNA, 20 bp, synthetic construct
  source 1..20: mol_type = other DNA
gaccccgtatataaaaaata

SEQ ID NO: 67178 - DNA, 20 bp, synthetic construct
  source 1..20: mol_type = other DNA
agaccccgtatataaaaaat

SEQ ID NO: 67179 - DNA, 20 bp, synthetic construct
  source 1..20: mol_type = other DNA
gagaccccgtatataaaaaa

SEQ ID NO: 67180 - DNA, 20 bp, synthetic construct
  source 1..20: mol_type = other DNA
tgagaccccgtatataaaaa

SEQ ID NO: 67181 - DNA, 20 bp, synthetic construct
  source 1..20: mol_type = other DNA
gtgagaccccgtatataaaa

SEQ ID NO: 67182 - DNA, 20 bp, synthetic construct
  source 1..20: mol_type = other DNA
agtgagaccccgtatataaa

SEQ ID NO: 67183 - DNA, 20 bp, synthetic construct
  source 1..20: mol_type = other DNA
gagtgagaccccgtatataa

SEQ ID NO: 67184 - DNA, 20 bp, synthetic construct
  source 1..20: mol_type = other DNA
agagtgagaccccgtatata

SEQ ID NO: 67185 - DNA, 20 bp, synthetic construct
  source 1..20: mol_type = other DNA
tagagtgagaccccgtatat

SEQ ID NO: 67186 - DNA, 20 bp, synthetic construct
  source 1..20: mol_type = other DNA
atagagtgagaccccgtata

SEQ ID NO: 67187 - DNA, 20 bp, synthetic construct
  source 1..20: mol_type = other DNA
gatagagtgagaccccgtat

SEQ ID NO: 67188 - DNA, 20 bp, synthetic construct
  source 1..20: mol_type = other DNA
tgatagagtgagaccccgta

SEQ ID NO: 67189 - DNA, 20 bp, synthetic construct
  source 1..20: mol_type = other DNA
gtgatagagtgagaccccgt

SEQ ID NO: 67190 - DNA, 20 bp, synthetic construct
  source 1..20: mol_type = other DNA
agtgatagagtgagaccccg

SEQ ID NO: 67191 - DNA, 20 bp, synthetic construct
  source 1..20: mol_type = other DNA
cagtgatagagtgagacccc

SEQ ID NO: 67192 - DNA, 20 bp, synthetic construct
  source 1..20: mol_type = other DNA
tcagtgatagagtgagaccc

SEQ ID NO: 67193 - DNA, 20 bp, synthetic construct
  source 1..20: mol_type = other DNA
ctcagtgatagagtgagacc

SEQ ID NO: 67194 - DNA, 20 bp, synthetic construct
  source 1..20: mol_type = other DNA
cctcagtgatagagtgagac

SEQ ID NO: 67195 - DNA, 20 bp, synthetic construct
  source 1..20: mol_type = other DNA
acctcagtgatagagtgaga

SEQ ID NO: 67196 - DNA, 20 bp, synthetic construct
  source 1..20: mol_type = other DNA
aacctcagtgatagagtgag

SEQ ID NO: 67197 - DNA, 20 bp, synthetic construct
  source 1..20: mol_type = other DNA
caacctcagtgatagagtga

SEQ ID NO: 67198 - DNA, 20 bp, synthetic construct
  source 1..20: mol_type = other DNA
ccaacctcagtgatagagtg

SEQ ID NO: 67199 - DNA, 20 bp, synthetic construct
  source 1..20: mol_type = other DNA
tccaacctcagtgatagagt

SEQ ID NO: 67200 - DNA, 20 bp, synthetic construct
  source 1..20: mol_type = other DNA
ctccaacctcagtgatagag

SEQ ID NO: 67201 - DNA, 20 bp, synthetic construct
  source 1..20: mol_type = other DNA
actccaacctcagtgataga

SEQ ID NO: 67202 - DNA, 20 bp, synthetic construct
  source 1..20: mol_type = other DNA
cactccaacctcagtgatag

SEQ ID NO: 67203 - DNA, 20 bp, synthetic construct
  source 1..20: mol_type = other DNA
acactccaacctcagtgata

SEQ ID NO: 67204 - DNA, 20 bp, synthetic construct
  source 1..20: mol_type = other DNA
cacactccaacctcagtgat

SEQ ID NO: 67205 - DNA, 20 bp, synthetic construct
  source 1..20: mol_type = other DNA
ccacactccaacctcagtga

SEQ ID NO: 67206 - DNA, 20 bp, synthetic construct
  source 1..20: mol_type = other DNA
accacactccaacctcagtg

SEQ ID NO: 67207 - DNA, 20 bp, synthetic construct
  source 1..20: mol_type = other DNA
caccacactccaacctcagt

SEQ ID NO: 67208 - DNA, 20 bp, synthetic construct
  source 1..20: mol_type = other DNA
tcaccacactccaacctcag

SEQ ID NO: 67209 - DNA, 20 bp, synthetic construct
  source 1..20: mol_type = other DNA
atcaccacactccaacctca

SEQ ID NO: 67210 - DNA, 20 bp, synthetic construct
  source 1..20: mol_type = other DNA
catcaccacactccaacctc

SEQ ID NO: 67211 - DNA, 20 bp, synthetic construct
  source 1..20: mol_type = other DNA
gcatcaccacactccaacct

SEQ ID NO: 67212 - DNA, 20 bp, synthetic construct
  source 1..20: mol_type = other DNA
tgcatcaccacactccaacc

SEQ ID NO: 67213 - DNA, 20 bp, synthetic construct
  source 1..20: mol_type = other DNA
ctgcatcaccacactccaac

SEQ ID NO: 67214 - DNA, 20 bp, synthetic construct
  source 1..20: mol_type = other DNA
tctgcatcaccacactccaa

SEQ ID NO: 67215 - DNA, 20 bp, synthetic construct
  source 1..20: mol_type = other DNA
atctgcatcaccacactcca

SEQ ID NO: 67216 - DNA, 20 bp, synthetic construct
  source 1..20: mol_type = other DNA
gatctgcatcaccacactcc

SEQ ID NO: 67217 - DNA, 20 bp, synthetic construct
  source 1..20: mol_type = other DNA
agatctgcatcaccacactc

SEQ ID NO: 67218 - DNA, 20 bp, synthetic construct
  source 1..20: mol_type = other DNA
aagatctgcatcaccacact

SEQ ID NO: 67219 - DNA, 20 bp, synthetic construct
  source 1..20: mol_type = other DNA
caagatctgcatcaccacac

SEQ ID NO: 67220 - DNA, 20 bp, synthetic construct
  source 1..20: mol_type = other DNA
ccaagatctgcatcaccaca

SEQ ID NO: 67221 - DNA, 20 bp, synthetic construct
  source 1..20: mol_type = other DNA
gccaagatctgcatcaccac

SEQ ID NO: 67222 - DNA, 20 bp, synthetic construct
  source 1..20: mol_type = other DNA
agccaagatctgcatcacca

SEQ ID NO: 67223 - DNA, 20 bp, synthetic construct
  source 1..20: mol_type = other DNA
gagccaagatctgcatcacc

SEQ ID NO: 67224 - DNA, 20 bp, synthetic construct
  source 1..20: mol_type = other DNA
tgagccaagatctgcatcac

SEQ ID NO: 67225 - DNA, 20 bp, synthetic construct
  source 1..20: mol_type = other DNA
gtgagccaagatctgcatca

SEQ ID NO: 67226 - DNA, 20 bp, synthetic construct
  source 1..20: mol_type = other DNA
ggtgagccaagatctgcatc

SEQ ID NO: 67227 - DNA, 20 bp, synthetic construct
  source 1..20: mol_type = other DNA
cggtgagccaagatctgcat

SEQ ID NO: 67228 - DNA, 20 bp, synthetic construct
  source 1..20: mol_type = other DNA
gcggtgagccaagatctgca

SEQ ID NO: 67229 - DNA, 20 bp, synthetic construct
  source 1..20: mol_type = other DNA
tgcggtgagccaagatctgc

SEQ ID NO: 67230 - DNA, 20 bp, synthetic construct
  source 1..20: mol_type = other DNA
ttgcggtgagccaagatctg

SEQ ID NO: 67231 - DNA, 20 bp, synthetic construct
  source 1..20: mol_type = other DNA
gttgcggtgagccaagatct

SEQ ID NO: 67232 - DNA, 20 bp, synthetic construct
  source 1..20: mol_type = other DNA
ggttgcggtgagccaagatc

SEQ ID NO: 67233 - DNA, 20 bp, synthetic construct
  source 1..20: mol_type = other DNA
aggttgcggtgagccaagat

SEQ ID NO: 67234 - DNA, 20 bp, synthetic construct
  source 1..20: mol_type = other DNA
gaggttgcggtgagccaaga

SEQ ID NO: 67235 - DNA, 20 bp, synthetic construct
  source 1..20: mol_type = other DNA
ggaggttgcggtgagccaag

SEQ ID NO: 67236 - DNA, 20 bp, synthetic construct
  source 1..20: mol_type = other DNA
aggaggttgcggtgagccaa

SEQ ID NO: 67237 - DNA, 20 bp, synthetic construct
  source 1..20: mol_type = other DNA
gaggaggttgcggtgagcca

SEQ ID NO: 67238 - DNA, 20 bp, synthetic construct
  source 1..20: mol_type = other DNA
ggaggaggttgcggtgagcc

SEQ ID NO: 67239 - DNA, 20 bp, synthetic construct
  source 1..20: mol_type = other DNA
aggaggaggttgcggtgagc

SEQ ID NO: 67240 - DNA, 20 bp, synthetic construct
  source 1..20: mol_type = other DNA
gaggaggaggttgcggtgag

SEQ ID NO: 67241 - DNA, 20 bp, synthetic construct
  source 1..20: mol_type = other DNA
ggaggaggaggttgcggtga

SEQ ID NO: 67242 - DNA, 20 bp, synthetic construct
  source 1..20: mol_type = other DNA
gggaggaggaggttgcggtg

SEQ ID NO: 67243 - DNA, 20 bp, synthetic construct
  source 1..20: mol_type = other DNA
tgggaggaggaggttgcggt

SEQ ID NO: 67244 - DNA, 20 bp, synthetic construct
  source 1..20: mol_type = other DNA
ctgggaggaggaggttgcgg

SEQ ID NO: 67245 - DNA, 20 bp, synthetic construct
  source 1..20: mol_type = other DNA
cctgggaggaggaggttgcg

SEQ ID NO: 67246 - DNA, 20 bp, synthetic construct
  source 1..20: mol_type = other DNA
gcctgggaggaggaggttgc

SEQ ID NO: 67247 - DNA, 20 bp, synthetic construct
  source 1..20: mol_type = other DNA
agcctgggaggaggaggttg

SEQ ID NO: 67248 - DNA, 20 bp, synthetic construct
  source 1..20: mol_type = other DNA
gagcctgggaggaggaggtt

SEQ ID NO: 67249 - DNA, 20 bp, synthetic construct
  source 1..20: mol_type = other DNA
tgagcctgggaggaggaggt

SEQ ID NO: 67250 - DNA, 20 bp, synthetic construct
  source 1..20: mol_type = other DNA
ttgagcctgggaggaggagg

SEQ ID NO: 67251 - DNA, 20 bp, synthetic construct
  source 1..20: mol_type = other DNA
cttgagcctgggaggaggag

SEQ ID NO: 67252 - DNA, 20 bp, synthetic construct
  source 1..20: mol_type = other DNA
acttgagcctgggaggagga

SEQ ID NO: 67253 - DNA, 20 bp, synthetic construct
  source 1..20: mol_type = other DNA
cacttgagcctgggaggagg

SEQ ID NO: 67254 - DNA, 20 bp, synthetic construct
  source 1..20: mol_type = other DNA
tcacttgagcctgggaggag

SEQ ID NO: 67255 - DNA, 20 bp, synthetic construct
  source 1..20: mol_type = other DNA
atcacttgagcctgggagga

SEQ ID NO: 67256 - DNA, 20 bp, synthetic construct
  source 1..20: mol_type = other DNA
aatcacttgagcctgggagg

SEQ ID NO: 67257 - DNA, 20 bp, synthetic construct
  source 1..20: mol_type = other DNA
gaatcacttgagcctgggag

SEQ ID NO: 67258 - DNA, 20 bp, synthetic construct
  source 1..20: mol_type = other DNA
agaatcacttgagcctggga

SEQ ID NO: 67259 - DNA, 20 bp, synthetic construct
  source 1..20: mol_type = other DNA
gagaatcacttgagcctggg

SEQ ID NO: 67260 - DNA, 20 bp, synthetic construct
  source 1..20: mol_type = other DNA
ggagaatcacttgagcctgg

SEQ ID NO: 67261 - DNA, 20 bp, synthetic construct
  source 1..20: mol_type = other DNA
gggagaatcacttgagcctg

SEQ ID NO: 67262 - DNA, 20 bp, synthetic construct
  source 1..20: mol_type = other DNA
tgggagaatcacttgagcct

SEQ ID NO: 67263 - DNA, 20 bp, synthetic construct
  source 1..20: mol_type = other DNA
gtgggagaatcacttgagcc

SEQ ID NO: 67264 - DNA, 20 bp, synthetic construct
  source 1..20: mol_type = other DNA
ggtgggagaatcacttgagc

SEQ ID NO: 67265 - DNA, 20 bp, synthetic construct
  source 1..20: mol_type = other DNA
aggtgggagaatcacttgag

SEQ ID NO: 67266 - DNA, 20 bp, synthetic construct
  source 1..20: mol_type = other DNA
gaggtgggagaatcacttga

SEQ ID NO: 67267 - DNA, 20 bp, synthetic construct
  source 1..20: mol_type = other DNA
tgaggtgggagaatcacttg

SEQ ID NO: 67268 - DNA, 20 bp, synthetic construct
  source 1..20: mol_type = other DNA
ctgaggtgggagaatcactt

SEQ ID NO: 67269 - DNA, 20 bp, synthetic construct
  source 1..20: mol_type = other DNA
gctgaggtgggagaatcact

SEQ ID NO: 67270 - DNA, 20 bp, synthetic construct
  source 1..20: mol_type = other DNA
ggctgaggtgggagaatcac

SEQ ID NO: 67271 - DNA, 20 bp, synthetic construct
  source 1..20: mol_type = other DNA
aggctgaggtgggagaatca

SEQ ID NO: 67272 - DNA, 20 bp, synthetic construct
  source 1..20: mol_type = other DNA
gaggctgaggtgggagaatc

SEQ ID NO: 67273 - DNA, 20 bp, synthetic construct
  source 1..20: mol_type = other DNA
ggaggctgaggtgggagaat

SEQ ID NO: 67274 - DNA, 20 bp, synthetic construct
  source 1..20: mol_type = other DNA
gggaggctgaggtgggagaa

SEQ ID NO: 67275 - DNA, 20 bp, synthetic construct
  source 1..20: mol_type = other DNA
cgggaggctgaggtgggaga

SEQ ID NO: 67276 - DNA, 20 bp, synthetic construct
  source 1..20: mol_type = other DNA
tcgggaggctgaggtgggag

SEQ ID NO: 67277 - DNA, 20 bp, synthetic construct
  source 1..20: mol_type = other DNA
ctcgggaggctgaggtggga

SEQ ID NO: 67278 - DNA, 20 bp, synthetic construct
  source 1..20: mol_type = other DNA
actcgggaggctgaggtggg

SEQ ID NO: 67279 - DNA, 20 bp, synthetic construct
  source 1..20: mol_type = other DNA
tactcgggaggctgaggtgg

SEQ ID NO: 67280 - DNA, 20 bp, synthetic construct
  source 1..20: mol_type = other DNA
gtactcgggaggctgaggtg

SEQ ID NO: 67281 - DNA, 20 bp, synthetic construct
  source 1..20: mol_type = other DNA
ggtactcgggaggctgaggt

SEQ ID NO: 67282 - DNA, 20 bp, synthetic construct
  source 1..20: mol_type = other DNA
aggtactcgggaggctgagg

SEQ ID NO: 67283 - DNA, 20 bp, synthetic construct
  source 1..20: mol_type = other DNA
caggtactcgggaggctgag

SEQ ID NO: 67284 - DNA, 20 bp, synthetic construct
  source 1..20: mol_type = other DNA
ccaggtactcgggaggctga

SEQ ID NO: 67285 - DNA, 20 bp, synthetic construct
  source 1..20: mol_type = other DNA
cccaggtactcgggaggctg

SEQ ID NO: 67286 - DNA, 20 bp, synthetic construct
  source 1..20: mol_type = other DNA
tcccaggtactcgggaggct

SEQ ID NO: 67287 - DNA, 20 bp, synthetic construct
  source 1..20: mol_type = other DNA
gtcccaggtactcgggaggc

SEQ ID NO: 67288 - DNA, 20 bp, synthetic construct
  source 1..20: mol_type = other DNA
ggtcccaggtactcgggagg

SEQ ID NO: 67289 - DNA, 20 bp, synthetic construct
  source 1..20: mol_type = other DNA
tggtcccaggtactcgggag

SEQ ID NO: 67290 - DNA, 20 bp, synthetic construct
  source 1..20: mol_type = other DNA
gtggtcccaggtactcggga

SEQ ID NO: 67291 - DNA, 20 bp, synthetic construct
  source 1..20: mol_type = other DNA
tgtggtcccaggtactcggg

SEQ ID NO: 67292 - DNA, 20 bp, synthetic construct
  source 1..20: mol_type = other DNA
ctgtggtcccaggtactcgg

SEQ ID NO: 67293 - DNA, 20 bp, synthetic construct
  source 1..20: mol_type = other DNA
cctgtggtcccaggtactcg

SEQ ID NO: 67294 - DNA, 20 bp, synthetic construct
  source 1..20: mol_type = other DNA
acctgtggtcccaggtactc

SEQ ID NO: 67295 - DNA, 20 bp, synthetic construct
  source 1..20: mol_type = other DNA
cacctgtggtcccaggtact

SEQ ID NO: 67296 - DNA, 20 bp, synthetic construct
  source 1..20: mol_type = other DNA
gcacctgtggtcccaggtac

SEQ ID NO: 67297 - DNA, 20 bp, synthetic construct
  source 1..20: mol_type = other DNA
cgcacctgtggtcccaggta

SEQ ID NO: 67298 - DNA, 20 bp, synthetic construct
  source 1..20: mol_type = other DNA
gcgcacctgtggtcccaggt

SEQ ID NO: 67299 - DNA, 20 bp, synthetic construct
  source 1..20: mol_type = other DNA
tgcgcacctgtggtcccagg

SEQ ID NO: 67300 - DNA, 20 bp, synthetic construct
  source 1..20: mol_type = other DNA
atgcgcacctgtggtcccag

SEQ ID NO: 67301 - DNA, 20 bp, synthetic construct
  source 1..20: mol_type = other DNA
gatgcgcacctgtggtccca

SEQ ID NO: 67302 - DNA, 20 bp, synthetic construct
  source 1..20: mol_type = other DNA
tgatgcgcacctgtggtccc

SEQ ID NO: 67303 - DNA, 20 bp, synthetic construct
  source 1..20: mol_type = other DNA
gtgatgcgcacctgtggtcc

SEQ ID NO: 67304 - DNA, 20 bp, synthetic construct
  source 1..20: mol_type = other DNA
ggtgatgcgcacctgtggtc

SEQ ID NO: 67305 - DNA, 20 bp, synthetic construct
  source 1..20: mol_type = other DNA
tggtgatgcgcacctgtggt

SEQ ID NO: 67306 - DNA, 20 bp, synthetic construct
  source 1..20: mol_type = other DNA
atggtgatgcgcacctgtgg

SEQ ID NO: 67307 - DNA, 20 bp, synthetic construct
  source 1..20: mol_type = other DNA
catggtgatgcgcacctgtg

SEQ ID NO: 67308 - DNA, 20 bp, synthetic construct
  source 1..20: mol_type = other DNA
gcatggtgatgcgcacctgt

SEQ ID NO: 67309 - DNA, 20 bp, synthetic construct
  source 1..20: mol_type = other DNA
ggcatggtgatgcgcacctg

SEQ ID NO: 67310 - DNA, 20 bp, synthetic construct
  source 1..20: mol_type = other DNA
aggcatggtgatgcgcacct

SEQ ID NO: 67311 - DNA, 20 bp, synthetic construct
  source 1..20: mol_type = other DNA
caggcatggtgatgcgcacc

SEQ ID NO: 67312 - DNA, 20 bp, synthetic construct
  source 1..20: mol_type = other DNA
ccaggcatggtgatgcgcac

SEQ ID NO: 67313 - DNA, 20 bp, synthetic construct
  source 1..20: mol_type = other DNA
gccaggcatggtgatgcgca

SEQ ID NO: 67314 - DNA, 20 bp, synthetic construct
  source 1..20: mol_type = other DNA
agccaggcatggtgatgcgc

SEQ ID NO: 67315 - DNA, 20 bp, synthetic construct
  source 1..20: mol_type = other DNA
tagccaggcatggtgatgcg

SEQ ID NO: 67316 - DNA, 20 bp, synthetic construct
  source 1..20: mol_type = other DNA
ttagccaggcatggtgatgc

SEQ ID NO: 67317 - DNA, 20 bp, synthetic construct
  source 1..20: mol_type = other DNA
attagccaggcatggtgatg

SEQ ID NO: 67318 - DNA, 20 bp, synthetic construct
  source 1..20: mol_type = other DNA
aattagccaggcatggtgat

SEQ ID NO: 67319 - DNA, 20 bp, synthetic construct
  source 1..20: mol_type = other DNA
aaattagccaggcatggtga

SEQ ID NO: 67320 - DNA, 20 bp, synthetic construct
  source 1..20: mol_type = other DNA
aaaattagccaggcatggtg

SEQ ID NO: 67321 - DNA, 20 bp, synthetic construct
  source 1..20: mol_type = other DNA
aaaaattagccaggcatggt

SEQ ID NO: 67322 - DNA, 20 bp, synthetic construct
  source 1..20: mol_type = other DNA
aaaaaattagccaggcatgg

SEQ ID NO: 67323 - DNA, 20 bp, synthetic construct
  source 1..20: mol_type = other DNA
taaaaaattagccaggcatg

SEQ ID NO: 67324 - DNA, 20 bp, synthetic construct
  source 1..20: mol_type = other DNA
ataaaaaattagccaggcat

SEQ ID NO: 67325 - DNA, 20 bp, synthetic construct
  source 1..20: mol_type = other DNA
tataaaaaattagccaggca

SEQ ID NO: 67326 - DNA, 20 bp, synthetic construct
  source 1..20: mol_type = other DNA
atataaaaaattagccaggc

SEQ ID NO: 67327 - DNA, 20 bp, synthetic construct
  source 1..20: mol_type = other DNA
aatataaaaaattagccagg

SEQ ID NO: 67328 - DNA, 20 bp, synthetic construct
  source 1..20: mol_type = other DNA
aaatataaaaaattagccag

SEQ ID NO: 67329 - DNA, 20 bp, synthetic construct
  source 1..20: mol_type = other DNA
aaaatataaaaaattagcca

SEQ ID NO: 67330 - DNA, 20 bp, synthetic construct
  source 1..20: mol_type = other DNA
aaaaatataaaaaattagcc

SEQ ID NO: 67331 - DNA, 20 bp, synthetic construct
  source 1..20: mol_type = other DNA
caaaaatataaaaaattagc

SEQ ID NO: 67332 - DNA, 20 bp, synthetic construct
  source 1..20: mol_type = other DNA
ccaaaaatataaaaaattag

SEQ ID NO: 67333 - DNA, 20 bp, synthetic construct
  source 1..20: mol_type = other DNA
accaaaaatataaaaaatta

SEQ ID NO: 67334 - DNA, 20 bp, synthetic construct
  source 1..20: mol_type = other DNA
taccaaaaatataaaaaatt

SEQ ID NO: 67335 - DNA, 20 bp, synthetic construct
  source 1..20: mol_type = other DNA
ctaccaaaaatataaaaaat

SEQ ID NO: 67336 - DNA, 20 bp, synthetic construct
  source 1..20: mol_type = other DNA
tctaccaaaaatataaaaaa

SEQ ID NO: 67337 - DNA, 20 bp, synthetic construct
  source 1..20: mol_type = other DNA
ctctaccaaaaatataaaaa

SEQ ID NO: 67338 - DNA, 20 bp, synthetic construct
  source 1..20: mol_type = other DNA
tctctaccaaaaatataaaa

SEQ ID NO: 67339 - DNA, 20 bp, synthetic construct
  source 1..20: mol_type = other DNA
gtctctaccaaaaatataaa

SEQ ID NO: 67340 - DNA, 20 bp, synthetic construct
  source 1..20: mol_type = other DNA
tgtctctaccaaaaatataa

SEQ ID NO: 67341 - DNA, 20 bp, synthetic construct
  source 1..20: mol_type = other DNA
ctgtctctaccaaaaatata

SEQ ID NO: 67342 - DNA, 20 bp, synthetic construct
  source 1..20: mol_type = other DNA
cctgtctctaccaaaaatat

SEQ ID NO: 67343 - DNA, 20 bp, synthetic construct
  source 1..20: mol_type = other DNA
tcctgtctctaccaaaaata

SEQ ID NO: 67344 - DNA, 20 bp, synthetic construct
  source 1..20: mol_type = other DNA
atcctgtctctaccaaaaat

SEQ ID NO: 67345 - DNA, 20 bp, synthetic construct
  source 1..20: mol_type = other DNA
aatcctgtctctaccaaaaa

SEQ ID NO: 67346 - DNA, 20 bp, synthetic construct
  source 1..20: mol_type = other DNA
aaatcctgtctctaccaaaa

SEQ ID NO: 67347 - DNA, 20 bp, synthetic construct
  source 1..20: mol_type = other DNA
aaaatcctgtctctaccaaa

SEQ ID NO: 67348 - DNA, 20 bp, synthetic construct
  source 1..20: mol_type = other DNA
caaaatcctgtctctaccaa

SEQ ID NO: 67349 - DNA, 20 bp, synthetic construct
  source 1..20: mol_type = other DNA
gcaaaatcctgtctctacca

SEQ ID NO: 67350 - DNA, 20 bp, synthetic construct
  source 1..20: mol_type = other DNA
ggcaaaatcctgtctctacc

SEQ ID NO: 67351 - DNA, 20 bp, synthetic construct
  source 1..20: mol_type = other DNA
cggcaaaatcctgtctctac

SEQ ID NO: 67352 - DNA, 20 bp, synthetic construct
  source 1..20: mol_type = other DNA
acggcaaaatcctgtctcta

SEQ ID NO: 67353 - DNA, 20 bp, synthetic construct
  source 1..20: mol_type = other DNA
cacggcaaaatcctgtctct

SEQ ID NO: 67354 - DNA, 20 bp, synthetic construct
  source 1..20: mol_type = other DNA
acacggcaaaatcctgtctc

SEQ ID NO: 67355 - DNA, 20 bp, synthetic construct
  source 1..20: mol_type = other DNA
aacacggcaaaatcctgtct

SEQ ID NO: 67356 - DNA, 20 bp, synthetic construct
  source 1..20: mol_type = other DNA
caacacggcaaaatcctgtc

SEQ ID NO: 67357 - DNA, 20 bp, synthetic construct
  source 1..20: mol_type = other DNA
gcaacacggcaaaatcctgt

SEQ ID NO: 67358 - DNA, 20 bp, synthetic construct
  source 1..20: mol_type = other DNA
ggcaacacggcaaaatcctg

SEQ ID NO: 67359 - DNA, 20 bp, synthetic construct
  source 1..20: mol_type = other DNA
gggcaacacggcaaaatcct

SEQ ID NO: 67360 - DNA, 20 bp, synthetic construct
  source 1..20: mol_type = other DNA
tgggcaacacggcaaaatcc

SEQ ID NO: 67361 - DNA, 20 bp, synthetic construct
  source 1..20: mol_type = other DNA
ctgggcaacacggcaaaatc

SEQ ID NO: 67362 - DNA, 20 bp, synthetic construct
  source 1..20: mol_type = other DNA
cctgggcaacacggcaaaat

SEQ ID NO: 67363 - DNA, 20 bp, synthetic construct
  source 1..20: mol_type = other DNA
acctgggcaacacggcaaaa

SEQ ID NO: 67364 - DNA, 20 bp, synthetic construct
  source 1..20: mol_type = other DNA
aacctgggcaacacggcaaa

SEQ ID NO: 67365 - DNA, 20 bp, synthetic construct
  source 1..20: mol_type = other DNA
caacctgggcaacacggcaa

SEQ ID NO: 67366 - DNA, 20 bp, synthetic construct
  source 1..20: mol_type = other DNA
ccaacctgggcaacacggca

SEQ ID NO: 67367 - DNA, 20 bp, synthetic construct
  source 1..20: mol_type = other DNA
accaacctgggcaacacggc

SEQ ID NO: 67368 - DNA, 20 bp, synthetic construct
  source 1..20: mol_type = other DNA
aaccaacctgggcaacacgg

SEQ ID NO: 67369 - DNA, 20 bp, synthetic construct
  source 1..20: mol_type = other DNA
aaaccaacctgggcaacacg

SEQ ID NO: 67370 - DNA, 20 bp, synthetic construct
  source 1..20: mol_type = other DNA
gaaaccaacctgggcaacac

SEQ ID NO: 67371 - DNA, 20 bp, synthetic construct
  source 1..20: mol_type = other DNA
cgaaaccaacctgggcaaca

SEQ ID NO: 67372 - DNA, 20 bp, synthetic construct
  source 1..20: mol_type = other DNA
tcgaaaccaacctgggcaac

SEQ ID NO: 67373 - DNA, 20 bp, synthetic construct
  source 1..20: mol_type = other DNA
ttcgaaaccaacctgggcaa

SEQ ID NO: 67374 - DNA, 20 bp, synthetic construct
  source 1..20: mol_type = other DNA
gttcgaaaccaacctgggca

SEQ ID NO: 67375 - DNA, 20 bp, synthetic construct
  source 1..20: mol_type = other DNA
agttcgaaaccaacctgggc

SEQ ID NO: 67376 - DNA, 20 bp, synthetic construct
  source 1..20: mol_type = other DNA
gagttcgaaaccaacctggg

SEQ ID NO: 67377 - DNA, 20 bp, synthetic construct
  source 1..20: mol_type = other DNA
ggagttcgaaaccaacctgg

SEQ ID NO: 67378 - DNA, 20 bp, synthetic construct
  source 1..20: mol_type = other DNA
aggagttcgaaaccaacctg

SEQ ID NO: 67379 - DNA, 20 bp, synthetic construct
  source 1..20: mol_type = other DNA
caggagttcgaaaccaacct

SEQ ID NO: 67380 - DNA, 20 bp, synthetic construct
  source 1..20: mol_type = other DNA
tcaggagttcgaaaccaacc

SEQ ID NO: 67381 - DNA, 20 bp, synthetic construct
  source 1..20: mol_type = other DNA
ctcaggagttcgaaaccaac

SEQ ID NO: 67382 - DNA, 20 bp, synthetic construct
  source 1..20: mol_type = other DNA
gctcaggagttcgaaaccaa

SEQ ID NO: 67383 - DNA, 20 bp, synthetic construct
  source 1..20: mol_type = other DNA
agctcaggagttcgaaacca

SEQ ID NO: 67384 - DNA, 20 bp, synthetic construct
  source 1..20: mol_type = other DNA
gagctcaggagttcgaaacc

SEQ ID NO: 67385 - DNA, 20 bp, synthetic construct
  source 1..20: mol_type = other DNA
tgagctcaggagttcgaaac

SEQ ID NO: 67386 - DNA, 20 bp, synthetic construct
  source 1..20: mol_type = other DNA
ctgagctcaggagttcgaaa

SEQ ID NO: 67387 - DNA, 20 bp, synthetic construct
  source 1..20: mol_type = other DNA
cctgagctcaggagttcgaa

SEQ ID NO: 67388 - DNA, 20 bp, synthetic construct
  source 1..20: mol_type = other DNA
gcctgagctcaggagttcga

SEQ ID NO: 67389 - DNA, 20 bp, synthetic construct
  source 1..20: mol_type = other DNA
tgcctgagctcaggagttcg

SEQ ID NO: 67390 - DNA, 20 bp, synthetic construct
  source 1..20: mol_type = other DNA
ctgcctgagctcaggagttc

SEQ ID NO: 67391 - DNA, 20 bp, synthetic construct
  source 1..20: mol_type = other DNA
actgcctgagctcaggagtt

SEQ ID NO: 67392 - DNA, 20 bp, synthetic construct
  source 1..20: mol_type = other DNA
gactgcctgagctcaggagt

SEQ ID NO: 67393 - DNA, 20 bp, synthetic construct
  source 1..20: mol_type = other DNA
ggactgcctgagctcaggag

SEQ ID NO: 67394 - DNA, 20 bp, synthetic construct
  source 1..20: mol_type = other DNA
tggactgcctgagctcagga

SEQ ID NO: 67395 - DNA, 20 bp, synthetic construct
  source 1..20: mol_type = other DNA
gtggactgcctgagctcagg

SEQ ID NO: 67396 - DNA, 20 bp, synthetic construct
  source 1..20: mol_type = other DNA
ggtggactgcctgagctcag

SEQ ID NO: 67397 - DNA, 20 bp, synthetic construct
  source 1..20: mol_type = other DNA
aggtggactgcctgagctca

SEQ ID NO: 67398 - DNA, 20 bp, synthetic construct
  source 1..20: mol_type = other DNA
caggtggactgcctgagctc

SEQ ID NO: 67399 - DNA, 20 bp, synthetic construct
  source 1..20: mol_type = other DNA
gcaggtggactgcctgagct

SEQ ID NO: 67400 - DNA, 20 bp, synthetic construct
  source 1..20: mol_type = other DNA
ggcaggtggactgcctgagc

SEQ ID NO: 67401 - DNA, 20 bp, synthetic construct
  source 1..20: mol_type = other DNA
aggcaggtggactgcctgag

SEQ ID NO: 67402 - DNA, 20 bp, synthetic construct
  source 1..20: mol_type = other DNA
aaggcaggtggactgcctga

SEQ ID NO: 67403 - DNA, 20 bp, synthetic construct
  source 1..20: mol_type = other DNA
caaggcaggtggactgcctg

SEQ ID NO: 67404 - DNA, 20 bp, synthetic construct
  source 1..20: mol_type = other DNA
ccaaggcaggtggactgcct

SEQ ID NO: 67405 - DNA, 20 bp, synthetic construct
  source 1..20: mol_type = other DNA
gccaaggcaggtggactgcc

SEQ ID NO: 67406 - DNA, 20 bp, synthetic construct
  source 1..20: mol_type = other DNA
agccaaggcaggtggactgc

SEQ ID NO: 67407 - DNA, 20 bp, synthetic construct
  source 1..20: mol_type = other DNA
aagccaaggcaggtggactg

SEQ ID NO: 67408 - DNA, 20 bp, synthetic construct
  source 1..20: mol_type = other DNA
gaagccaaggcaggtggact

SEQ ID NO: 67409 - DNA, 20 bp, synthetic construct
  source 1..20: mol_type = other DNA
ggaagccaaggcaggtggac

SEQ ID NO: 67410 - DNA, 20 bp, synthetic construct
  source 1..20: mol_type = other DNA
gggaagccaaggcaggtgga

SEQ ID NO: 67411 - DNA, 20 bp, synthetic construct
  source 1..20: mol_type = other DNA
tgggaagccaaggcaggtgg

SEQ ID NO: 67412 - DNA, 20 bp, synthetic construct
  source 1..20: mol_type = other DNA
ttgggaagccaaggcaggtg

SEQ ID NO: 67413 - DNA, 20 bp, synthetic construct
  source 1..20: mol_type = other DNA
cttgggaagccaaggcaggt

SEQ ID NO: 67414 - DNA, 20 bp, synthetic construct
  source 1..20: mol_type = other DNA
acttgggaagccaaggcagg

SEQ ID NO: 67415 - DNA, 20 bp, synthetic construct
  source 1..20: mol_type = other DNA
cacttgggaagccaaggcag

SEQ ID NO: 67416 - DNA, 20 bp, synthetic construct
  source 1..20: mol_type = other DNA
acacttgggaagccaaggca

SEQ ID NO: 67417 - DNA, 20 bp, synthetic construct
  source 1..20: mol_type = other DNA
cacacttgggaagccaaggc

SEQ ID NO: 67418 - DNA, 20 bp, synthetic construct
  source 1..20: mol_type = other DNA
tcacacttgggaagccaagg

SEQ ID NO: 67419 - DNA, 20 bp, synthetic construct
  source 1..20: mol_type = other DNA
ctcacacttgggaagccaag

SEQ ID NO: 67420 - DNA, 20 bp, synthetic construct
  source 1..20: mol_type = other DNA
gctcacacttgggaagccaa

SEQ ID NO: 67421 - DNA, 20 bp, synthetic construct
  source 1..20: mol_type = other DNA
ggctcacacttgggaagcca

SEQ ID NO: 67422 - DNA, 20 bp, synthetic construct
  source 1..20: mol_type = other DNA
tggctcacacttgggaagcc

SEQ ID NO: 67423 - DNA, 20 bp, synthetic construct
  source 1..20: mol_type = other DNA
gtggctcacacttgggaagc

SEQ ID NO: 67424 - DNA, 20 bp, synthetic construct
  source 1..20: mol_type = other DNA
ggtggctcacacttgggaag

SEQ ID NO: 67425 - DNA, 20 bp, synthetic construct
  source 1..20: mol_type = other DNA
tggtggctcacacttgggaa

SEQ ID NO: 67426 - DNA, 20 bp, synthetic construct
  source 1..20: mol_type = other DNA
gtggtggctcacacttggga

SEQ ID NO: 67427 - DNA, 20 bp, synthetic construct
  source 1..20: mol_type = other DNA
agtggtggctcacacttggg

SEQ ID NO: 67428 - DNA, 20 bp, synthetic construct
  source 1..20: mol_type = other DNA
cagtggtggctcacacttgg

SEQ ID NO: 67429 - DNA, 20 bp, synthetic construct
  source 1..20: mol_type = other DNA
tcagtggtggctcacacttg

SEQ ID NO: 67430 - DNA, 20 bp, synthetic construct
  source 1..20: mol_type = other DNA
ttcagtggtggctcacactt

SEQ ID NO: 67431 - DNA, 20 bp, synthetic construct
  source 1..20: mol_type = other DNA
tttcagtggtggctcacact

SEQ ID NO: 67432 - DNA, 20 bp, synthetic construct
  source 1..20: mol_type = other DNA
atttcagtggtggctcacac

SEQ ID NO: 67433 - DNA, 20 bp, synthetic construct
  source 1..20: mol_type = other DNA
tatttcagtggtggctcaca

SEQ ID NO: 67434 - DNA, 20 bp, synthetic construct
  source 1..20: mol_type = other DNA
gtatttcagtggtggctcac

SEQ ID NO: 67435 - DNA, 20 bp, synthetic construct
  source 1..20: mol_type = other DNA
agtatttcagtggtggctca

SEQ ID NO: 67436 - DNA, 20 bp, synthetic construct
  source 1..20: mol_type = other DNA
aagtatttcagtggtggctc

SEQ ID NO: 67437 - DNA, 20 bp, synthetic construct
  source 1..20: mol_type = other DNA
taagtatttcagtggtggct

SEQ ID NO: 67438 - DNA, 20 bp, synthetic construct
  source 1..20: mol_type = other DNA
ataagtatttcagtggtggc

SEQ ID NO: 67439 - DNA, 20 bp, synthetic construct
  source 1..20: mol_type = other DNA
tataagtatttcagtggtgg

SEQ ID NO: 67440 - DNA, 20 bp, synthetic construct
  source 1..20: mol_type = other DNA
atataagtatttcagtggtg

SEQ ID NO: 67441 - DNA, 20 bp, synthetic construct
  source 1..20: mol_type = other DNA
aatataagtatttcagtggt

SEQ ID NO: 67442 - DNA, 20 bp, synthetic construct
  source 1..20: mol_type = other DNA
aaatataagtatttcagtgg

SEQ ID NO: 67443 - DNA, 20 bp, synthetic construct
  source 1..20: mol_type = other DNA
aaaatataagtatttcagtg

SEQ ID NO: 67444 - DNA, 20 bp, synthetic construct
  source 1..20: mol_type = other DNA
aaaaatataagtatttcagt

SEQ ID NO: 67445 - DNA, 20 bp, synthetic construct
  source 1..20: mol_type = other DNA
taaaaatataagtatttcag

SEQ ID NO: 67446 - DNA, 20 bp, synthetic construct
  source 1..20: mol_type = other DNA
ttaaaaatataagtatttca

SEQ ID NO: 67447 - DNA, 20 bp, synthetic construct
  source 1..20: mol_type = other DNA
tttaaaaatataagtatttc

SEQ ID NO: 67448 - DNA, 20 bp, synthetic construct
  source 1..20: mol_type = other DNA
gtttaaaaatataagtattt

SEQ ID NO: 67449 - DNA, 20 bp, synthetic construct
  source 1..20: mol_type = other DNA
agtttaaaaatataagtatt

SEQ ID NO: 67450 - DNA, 20 bp, synthetic construct
  source 1..20: mol_type = other DNA
aagtttaaaaatataagtat

SEQ ID NO: 67451 - DNA, 20 bp, synthetic construct
  source 1..20: mol_type = other DNA
taagtttaaaaatataagta

SEQ ID NO: 67452 - DNA, 20 bp, synthetic construct
  source 1..20: mol_type = other DNA
ttaagtttaaaaatataagt

SEQ ID NO: 67453 - DNA, 20 bp, synthetic construct
  source 1..20: mol_type = other DNA
attaagtttaaaaatataag

SEQ ID NO: 67454 - DNA, 20 bp, synthetic construct
  source 1..20: mol_type = other DNA
aattaagtttaaaaatataa

SEQ ID NO: 67455 - DNA, 20 bp, synthetic construct
  source 1..20: mol_type = other DNA
aaattaagtttaaaaatata

SEQ ID NO: 67456 - DNA, 20 bp, synthetic construct
  source 1..20: mol_type = other DNA
taaattaagtttaaaaatat

SEQ ID NO: 67457 - DNA, 20 bp, synthetic construct
  source 1..20: mol_type = other DNA
ataaattaagtttaaaaata

SEQ ID NO: 67458 - DNA, 20 bp, synthetic construct
  source 1..20: mol_type = other DNA
aataaattaagtttaaaaat

SEQ ID NO: 67459 - DNA, 20 bp, synthetic construct
  source 1..20: mol_type = other DNA
aaataaattaagtttaaaaa

SEQ ID NO: 67460 - DNA, 20 bp, synthetic construct
  source 1..20: mol_type = other DNA
taaataaattaagtttaaaa

SEQ ID NO: 67461 - DNA, 20 bp, synthetic construct
  source 1..20: mol_type = other DNA
ataaataaattaagtttaaa

SEQ ID NO: 67462 - DNA, 20 bp, synthetic construct
  source 1..20: mol_type = other DNA
tataaataaattaagtttaa

SEQ ID NO: 67463 - DNA, 20 bp, synthetic construct
  source 1..20: mol_type = other DNA
atataaataaattaagttta

SEQ ID NO: 67464 - DNA, 20 bp, synthetic construct
  source 1..20: mol_type = other DNA
aatataaataaattaagttt

SEQ ID NO: 67465 - DNA, 20 bp, synthetic construct
  source 1..20: mol_type = other DNA
aaatataaataaattaagtt

SEQ ID NO: 67466 - DNA, 20 bp, synthetic construct
  source 1..20: mol_type = other DNA
taaatataaataaattaagt

SEQ ID NO: 67467 - DNA, 20 bp, synthetic construct
  source 1..20: mol_type = other DNA
ataaatataaataaattaag

SEQ ID NO: 67468 - DNA, 20 bp, synthetic construct
  source 1..20: mol_type = other DNA
aataaatataaataaattaa

SEQ ID NO: 67469 - DNA, 20 bp, synthetic construct
  source 1..20: mol_type = other DNA
taataaatataaataaatta

SEQ ID NO: 67470 - DNA, 20 bp, synthetic construct
  source 1..20: mol_type = other DNA
ataataaatataaataaatt

SEQ ID NO: 67471 - DNA, 20 bp, synthetic construct
  source 1..20: mol_type = other DNA
tataataaatataaataaat

SEQ ID NO: 67472 - DNA, 20 bp, synthetic construct
  source 1..20: mol_type = other DNA
atataataaatataaataaa

SEQ ID NO: 67473 - DNA, 20 bp, synthetic construct
  source 1..20: mol_type = other DNA
aatataataaatataaataa

SEQ ID NO: 67474 - DNA, 20 bp, synthetic construct
  source 1..20: mol_type = other DNA
aaatataataaatataaata

SEQ ID NO: 67475 - DNA, 20 bp, synthetic construct
  source 1..20: mol_type = other DNA
aaaatataataaatataaat

SEQ ID NO: 67476 - DNA, 20 bp, synthetic construct
  source 1..20: mol_type = other DNA
aaaaatataataaatataaa

SEQ ID NO: 67477 - DNA, 20 bp, synthetic construct
  source 1..20: mol_type = other DNA
taaaaatataataaatataa

SEQ ID NO: 67478 - DNA, 20 bp, synthetic construct
  source 1..20: mol_type = other DNA
ataaaaatataataaatata

SEQ ID NO: 67479 - DNA, 20 bp, synthetic construct
  source 1..20: mol_type = other DNA
cataaaaatataataaatat

SEQ ID NO: 67480 - DNA, 20 bp, synthetic construct
  source 1..20: mol_type = other DNA
acataaaaatataataaata

SEQ ID NO: 67481 - DNA, 20 bp, synthetic construct
  source 1..20: mol_type = other DNA
aacataaaaatataataaat

SEQ ID NO: 67482 - DNA, 20 bp, synthetic construct
  source 1..20: mol_type = other DNA
aaacataaaaatataataaa

SEQ ID NO: 67483 - DNA, 20 bp, synthetic construct
  source 1..20: mol_type = other DNA
aaaacataaaaatataataa

SEQ ID NO: 67484 - DNA, 20 bp, synthetic construct
  source 1..20: mol_type = other DNA
aaaaacataaaaatataata

SEQ ID NO: 67485 - DNA, 20 bp, synthetic construct
  source 1..20: mol_type = other DNA
taaaaacataaaaatataat

SEQ ID NO: 67486 - DNA, 20 bp, synthetic construct
  source 1..20: mol_type = other DNA
ataaaaacataaaaatataa

SEQ ID NO: 67487 - DNA, 20 bp, synthetic construct
  source 1..20: mol_type = other DNA
tataaaaacataaaaatata

SEQ ID NO: 67488 - DNA, 20 bp, synthetic construct
  source 1..20: mol_type = other DNA
atataaaaacataaaaatat

SEQ ID NO: 67489 - DNA, 20 bp, synthetic construct
  source 1..20: mol_type = other DNA
aatataaaaacataaaaata

SEQ ID NO: 67490 - DNA, 20 bp, synthetic construct
  source 1..20: mol_type = other DNA
aaatataaaaacataaaaat

SEQ ID NO: 67491 - DNA, 20 bp, synthetic construct
  source 1..20: mol_type = other DNA
aaaatataaaaacataaaaa

SEQ ID NO: 67492 - DNA, 20 bp, synthetic construct
  source 1..20: mol_type = other DNA
taaaatataaaaacataaaa

SEQ ID NO: 67493 - DNA, 20 bp, synthetic construct
  source 1..20: mol_type = other DNA
ttaaaatataaaaacataaa

SEQ ID NO: 67494 - DNA, 20 bp, synthetic construct
  source 1..20: mol_type = other DNA
tttaaaatataaaaacataa

SEQ ID NO: 67495 - DNA, 20 bp, synthetic construct
  source 1..20: mol_type = other DNA
ttttaaaatataaaaacata

SEQ ID NO: 67496 - DNA, 20 bp, synthetic construct
  source 1..20: mol_type = other DNA
tttttaaaatataaaaacat

SEQ ID NO: 67497 - DNA, 20 bp, synthetic construct
  source 1..20: mol_type = other DNA
ttttttaaaatataaaaaca

SEQ ID NO: 67498 - DNA, 20 bp, synthetic construct
  source 1..20: mol_type = other DNA
attttttaaaatataaaaac

SEQ ID NO: 67499 - DNA, 20 bp, synthetic construct
  source 1..20: mol_type = other DNA
tattttttaaaatataaaaa

SEQ ID NO: 67500 - DNA, 20 bp, synthetic construct
  source 1..20: mol_type = other DNA
atattttttaaaatataaaa

SEQ ID NO: 67501 - DNA, 20 bp, synthetic construct
  source 1..20: mol_type = other DNA
aatattttttaaaatataaa

SEQ ID NO: 67502 - DNA, 20 bp, synthetic construct
  source 1..20: mol_type = other DNA
aaatattttttaaaatataa

SEQ ID NO: 67503 - DNA, 20 bp, synthetic construct
  source 1..20: mol_type = other DNA
aaaatattttttaaaatata

SEQ ID NO: 67504 - DNA, 20 bp, synthetic construct
  source 1..20: mol_type = other DNA
aaaaatattttttaaaatat

SEQ ID NO: 67505 - DNA, 20 bp, synthetic construct
  source 1..20: mol_type = other DNA
taaaaatattttttaaaata

SEQ ID NO: 67506 - DNA, 20 bp, synthetic construct
  source 1..20: mol_type = other DNA
ataaaaatattttttaaaat

SEQ ID NO: 67507 - DNA, 20 bp, synthetic construct
  source 1..20: mol_type = other DNA
tataaaaatattttttaaaa

SEQ ID NO: 67508 - DNA, 20 bp, synthetic construct
  source 1..20: mol_type = other DNA
gtataaaaatattttttaaa

SEQ ID NO: 67509 - DNA, 20 bp, synthetic construct
  source 1..20: mol_type = other DNA
agtataaaaatattttttaa

SEQ ID NO: 67510 - DNA, 20 bp, synthetic construct
  source 1..20: mol_type = other DNA
gagtataaaaatatttttta

SEQ ID NO: 67511 - DNA, 20 bp, synthetic construct
  source 1..20: mol_type = other DNA
tgagtataaaaatatttttt

SEQ ID NO: 67512 - DNA, 20 bp, synthetic construct
  source 1..20: mol_type = other DNA
gtgagtataaaaatattttt

SEQ ID NO: 67513 - DNA, 20 bp, synthetic construct
  source 1..20: mol_type = other DNA
agtgagtataaaaatatttt

SEQ ID NO: 67514 - DNA, 20 bp, synthetic construct
  source 1..20: mol_type = other DNA
tagtgagtataaaaatattt

SEQ ID NO: 67515 - DNA, 20 bp, synthetic construct
  source 1..20: mol_type = other DNA
ctagtgagtataaaaatatt

SEQ ID NO: 67516 - DNA, 20 bp, synthetic construct
  source 1..20: mol_type = other DNA
tctagtgagtataaaaatat

SEQ ID NO: 67517 - DNA, 20 bp, synthetic construct
  source 1..20: mol_type = other DNA
gtctagtgagtataaaaata

SEQ ID NO: 67518 - DNA, 20 bp, synthetic construct
  source 1..20: mol_type = other DNA
ggtctagtgagtataaaaat

SEQ ID NO: 67519 - DNA, 20 bp, synthetic construct
  source 1..20: mol_type = other DNA
gggtctagtgagtataaaaa

SEQ ID NO: 67520 - DNA, 20 bp, synthetic construct
  source 1..20: mol_type = other DNA
tgggtctagtgagtataaaa

SEQ ID NO: 67521 - DNA, 20 bp, synthetic construct
  source 1..20: mol_type = other DNA
ttgggtctagtgagtataaa

SEQ ID NO: 67522 - DNA, 20 bp, synthetic construct
  source 1..20: mol_type = other DNA
attgggtctagtgagtataa

SEQ ID NO: 67523 - DNA, 20 bp, synthetic construct
  source 1..20: mol_type = other DNA
aattgggtctagtgagtata

SEQ ID NO: 67524 - DNA, 20 bp, synthetic construct
  source 1..20: mol_type = other DNA
aaattgggtctagtgagtat

SEQ ID NO: 67525 - DNA, 20 bp, synthetic construct
  source 1..20: mol_type = other DNA
aaaattgggtctagtgagta

SEQ ID NO: 67526 - DNA, 20 bp, synthetic construct
  source 1..20: mol_type = other DNA
taaaattgggtctagtgagt

SEQ ID NO: 67527 - DNA, 20 bp, synthetic construct
  source 1..20: mol_type = other DNA
ataaaattgggtctagtgag

SEQ ID NO: 67528 - DNA, 20 bp, synthetic construct
  source 1..20: mol_type = other DNA
tataaaattgggtctagtga

SEQ ID NO: 67529 - DNA, 20 bp, synthetic construct
  source 1..20: mol_type = other DNA
gtataaaattgggtctagtg

SEQ ID NO: 67530 - DNA, 20 bp, synthetic construct
  source 1..20: mol_type = other DNA
agtataaaattgggtctagt

SEQ ID NO: 67531 - DNA, 20 bp, synthetic construct
  source 1..20: mol_type = other DNA
gagtataaaattgggtctag

SEQ ID NO: 67532 - DNA, 20 bp, synthetic construct
  source 1..20: mol_type = other DNA
ggagtataaaattgggtcta

SEQ ID NO: 67533 - DNA, 20 bp, synthetic construct
  source 1..20: mol_type = other DNA
aggagtataaaattgggtct

SEQ ID NO: 67534 - DNA, 20 bp, synthetic construct
  source 1..20: mol_type = other DNA
taggagtataaaattgggtc

SEQ ID NO: 67535 - DNA, 20 bp, synthetic construct
  source 1..20: mol_type = other DNA
ttaggagtataaaattgggt

SEQ ID NO: 67536 - DNA, 20 bp, synthetic construct
  source 1..20: mol_type = other DNA
tttaggagtataaaattggg

SEQ ID NO: 67537 - DNA, 20 bp, synthetic construct
  source 1..20: mol_type = other DNA
gtttaggagtataaaattgg

SEQ ID NO: 67538 - DNA, 20 bp, synthetic construct
  source 1..20: mol_type = other DNA
ggtttaggagtataaaattg

SEQ ID NO: 67539 - DNA, 20 bp, synthetic construct
  source 1..20: mol_type = other DNA
tggtttaggagtataaaatt

SEQ ID NO: 67540 - DNA, 20 bp, synthetic construct
  source 1..20: mol_type = other DNA
ctggtttaggagtataaaat

SEQ ID NO: 67541 - DNA, 20 bp, synthetic construct
  source 1..20: mol_type = other DNA
cctggtttaggagtataaaa

SEQ ID NO: 67542 - DNA, 20 bp, synthetic construct
  source 1..20: mol_type = other DNA
ccctggtttaggagtataaa

SEQ ID NO: 67543 - DNA, 20 bp, synthetic construct
  source 1..20: mol_type = other DNA
tccctggtttaggagtataa

SEQ ID NO: 67544 - DNA, 20 bp, synthetic construct
  source 1..20: mol_type = other DNA
ttccctggtttaggagtata

SEQ ID NO: 67545 - DNA, 20 bp, synthetic construct
  source 1..20: mol_type = other DNA
attccctggtttaggagtat

SEQ ID NO: 67546 - DNA, 20 bp, synthetic construct
  source 1..20: mol_type = other DNA
tattccctggtttaggagta

SEQ ID NO: 67547 - DNA, 20 bp, synthetic construct
  source 1..20: mol_type = other DNA
ttattccctggtttaggagt

SEQ ID NO: 67548 - DNA, 20 bp, synthetic construct
  source 1..20: mol_type = other DNA
gttattccctggtttaggag

SEQ ID NO: 67549 - DNA, 20 bp, synthetic construct
  source 1..20: mol_type = other DNA
agttattccctggtttagga

SEQ ID NO: 67550 - DNA, 20 bp, synthetic construct
  source 1..20: mol_type = other DNA
cagttattccctggtttagg

SEQ ID NO: 67551 - DNA, 20 bp, synthetic construct
  source 1..20: mol_type = other DNA
acagttattccctggtttag

SEQ ID NO: 67552 - DNA, 20 bp, synthetic construct
  source 1..20: mol_type = other DNA
aacagttattccctggttta

SEQ ID NO: 67553 - DNA, 20 bp, synthetic construct
  source 1..20: mol_type = other DNA
aaacagttattccctggttt

SEQ ID NO: 67554 - DNA, 20 bp, synthetic construct
  source 1..20: mol_type = other DNA
aaaacagttattccctggtt

SEQ ID NO: 67555 - DNA, 20 bp, synthetic construct
  source 1..20: mol_type = other DNA
aaaaacagttattccctggt

SEQ ID NO: 67556 - DNA, 20 bp, synthetic construct
  source 1..20: mol_type = other DNA
aaaaaacagttattccctgg

SEQ ID NO: 67557 - DNA, 20 bp, synthetic construct
  source 1..20: mol_type = other DNA
aaaaaaacagttattccctg

SEQ ID NO: 67558 - DNA, 20 bp, synthetic construct
  source 1..20: mol_type = other DNA
aaaaaaaacagttattccct

SEQ ID NO: 67559 - DNA, 20 bp, synthetic construct
  source 1..20: mol_type = other DNA
aaaaaaaaacagttattccc

SEQ ID NO: 67560 - DNA, 20 bp, synthetic construct
  source 1..20: mol_type = other DNA
gaaaaaaaaacagttattcc

SEQ ID NO: 67561 - DNA, 20 bp, synthetic construct
  source 1..20: mol_type = other DNA
agaaaaaaaaacagttattc

SEQ ID NO: 67562 - DNA, 20 bp, synthetic construct
  source 1..20: mol_type = other DNA
gagaaaaaaaaacagttatt

SEQ ID NO: 67563 - DNA, 20 bp, synthetic construct
  source 1..20: mol_type = other DNA
agagaaaaaaaaacagttat

SEQ ID NO: 67564 - DNA, 20 bp, synthetic construct
  source 1..20: mol_type = other DNA
aagagaaaaaaaaacagtta

SEQ ID NO: 67565 - DNA, 20 bp, synthetic construct
  source 1..20: mol_type = other DNA
taagagaaaaaaaaacagtt

SEQ ID NO: 67566 - DNA, 20 bp, synthetic construct
  source 1..20: mol_type = other DNA
gtaagagaaaaaaaaacagt

SEQ ID NO: 67567 - DNA, 20 bp, synthetic construct
  source 1..20: mol_type = other DNA
tgtaagagaaaaaaaaacag

SEQ ID NO: 67568 - DNA, 20 bp, synthetic construct
  source 1..20: mol_type = other DNA
atgtaagagaaaaaaaaaca

SEQ ID NO: 67569 - DNA, 20 bp, synthetic construct
  source 1..20: mol_type = other DNA
tatgtaagagaaaaaaaaac

SEQ ID NO: 67570 - DNA, 20 bp, synthetic construct
  source 1..20: mol_type = other DNA
ctatgtaagagaaaaaaaaa

SEQ ID NO: 67571 - DNA, 20 bp, synthetic construct
  source 1..20: mol_type = other DNA
cctatgtaagagaaaaaaaa

SEQ ID NO: 67572 - DNA, 20 bp, synthetic construct
  source 1..20: mol_type = other DNA
gcctatgtaagagaaaaaaa

SEQ ID NO: 67573 - DNA, 20 bp, synthetic construct
  source 1..20: mol_type = other DNA
tgcctatgtaagagaaaaaa

SEQ ID NO: 67574 - DNA, 20 bp, synthetic construct
  source 1..20: mol_type = other DNA
atgcctatgtaagagaaaaa

SEQ ID NO: 67575 - DNA, 20 bp, synthetic construct
  source 1..20: mol_type = other DNA
catgcctatgtaagagaaaa

SEQ ID NO: 67576 - DNA, 20 bp, synthetic construct
  source 1..20: mol_type = other DNA
tcatgcctatgtaagagaaa

SEQ ID NO: 67577 - DNA, 20 bp, synthetic construct
  source 1..20: mol_type = other DNA
atcatgcctatgtaagagaa

SEQ ID NO: 67578 - DNA, 20 bp, synthetic construct
  source 1..20: mol_type = other DNA
tatcatgcctatgtaagaga

SEQ ID NO: 67579 - DNA, 20 bp, synthetic construct
  source 1..20: mol_type = other DNA
gtatcatgcctatgtaagag

SEQ ID NO: 67580 - DNA, 20 bp, synthetic construct
  source 1..20: mol_type = other DNA
ggtatcatgcctatgtaaga

SEQ ID NO: 67581 - DNA, 20 bp, synthetic construct
  source 1..20: mol_type = other DNA
tggtatcatgcctatgtaag

SEQ ID NO: 67582 - DNA, 20 bp, synthetic construct
  source 1..20: mol_type = other DNA
atggtatcatgcctatgtaa

SEQ ID NO: 67583 - DNA, 20 bp, synthetic construct
  source 1..20: mol_type = other DNA
tatggtatcatgcctatgta

SEQ ID NO: 67584 - DNA, 20 bp, synthetic construct
  source 1..20: mol_type = other DNA
ctatggtatcatgcctatgt

SEQ ID NO: 67585 - DNA, 20 bp, synthetic construct
  source 1..20: mol_type = other DNA
tctatggtatcatgcctatg

SEQ ID NO: 67586 - DNA, 20 bp, synthetic construct
  source 1..20: mol_type = other DNA
gtctatggtatcatgcctat

SEQ ID NO: 67587 - DNA, 20 bp, synthetic construct
  source 1..20: mol_type = other DNA
tgtctatggtatcatgccta

SEQ ID NO: 67588 - DNA, 20 bp, synthetic construct
  source 1..20: mol_type = other DNA
ttgtctatggtatcatgcct

SEQ ID NO: 67589 - DNA, 20 bp, synthetic construct
  source 1..20: mol_type = other DNA
attgtctatggtatcatgcc

SEQ ID NO: 67590 - DNA, 20 bp, synthetic construct
  source 1..20: mol_type = other DNA
cattgtctatggtatcatgc

SEQ ID NO: 67591 - DNA, 20 bp, synthetic construct
  source 1..20: mol_type = other DNA
tcattgtctatggtatcatg

SEQ ID NO: 67592 - DNA, 20 bp, synthetic construct
  source 1..20: mol_type = other DNA
atcattgtctatggtatcat

SEQ ID NO: 67593 - DNA, 20 bp, synthetic construct
  source 1..20: mol_type = other DNA
aatcattgtctatggtatca

SEQ ID NO: 67594 - DNA, 20 bp, synthetic construct
  source 1..20: mol_type = other DNA
taatcattgtctatggtatc

SEQ ID NO: 67595 - DNA, 20 bp, synthetic construct
  source 1..20: mol_type = other DNA
ttaatcattgtctatggtat

SEQ ID NO: 67596 - DNA, 20 bp, synthetic construct
  source 1..20: mol_type = other DNA
tttaatcattgtctatggta

SEQ ID NO: 67597 - DNA, 20 bp, synthetic construct
  source 1..20: mol_type = other DNA
ttttaatcattgtctatggt

SEQ ID NO: 67598 - DNA, 20 bp, synthetic construct
  source 1..20: mol_type = other DNA
attttaatcattgtctatgg

SEQ ID NO: 67599 - DNA, 20 bp, synthetic construct
  source 1..20: mol_type = other DNA
aattttaatcattgtctatg

SEQ ID NO: 67600 - DNA, 20 bp, synthetic construct
  source 1..20: mol_type = other DNA
caattttaatcattgtctat

SEQ ID NO: 67601 - DNA, 20 bp, synthetic construct
  source 1..20: mol_type = other DNA
acaattttaatcattgtcta

SEQ ID NO: 67602 - DNA, 20 bp, synthetic construct
  source 1..20: mol_type = other DNA
tacaattttaatcattgtct

SEQ ID NO: 67603 - DNA, 20 bp, synthetic construct
  source 1..20: mol_type = other DNA
ttacaattttaatcattgtc

SEQ ID NO: 67604 - DNA, 20 bp, synthetic construct
  source 1..20: mol_type = other DNA
attacaattttaatcattgt

SEQ ID NO: 67605 - DNA, 20 bp, synthetic construct
  source 1..20: mol_type = other DNA
aattacaattttaatcattg

SEQ ID NO: 67606 - DNA, 20 bp, synthetic construct
  source 1..20: mol_type = other DNA
taattacaattttaatcatt

SEQ ID NO: 67607 - DNA, 20 bp, synthetic construct
  source 1..20: mol_type = other DNA
gtaattacaattttaatcat

SEQ ID NO: 67608 - DNA, 20 bp, synthetic construct
  source 1..20: mol_type = other DNA
ggtaattacaattttaatca

SEQ ID NO: 67609 - DNA, 20 bp, synthetic construct
  source 1..20: mol_type = other DNA
tggtaattacaattttaatc

SEQ ID NO: 67610 - DNA, 20 bp, synthetic construct
  source 1..20: mol_type = other DNA
atggtaattacaattttaat

SEQ ID NO: 67611 - DNA, 20 bp, synthetic construct
  source 1..20: mol_type = other DNA
aatggtaattacaattttaa

SEQ ID NO: 67612 - DNA, 20 bp, synthetic construct
  source 1..20: mol_type = other DNA
gaatggtaattacaatttta

SEQ ID NO: 67613 - DNA, 20 bp, synthetic construct
  source 1..20: mol_type = other DNA
tgaatggtaattacaatttt

SEQ ID NO: 67614 - DNA, 20 bp, synthetic construct
  source 1..20: mol_type = other DNA
atgaatggtaattacaattt

SEQ ID NO: 67615 - DNA, 20 bp, synthetic construct
  source 1..20: mol_type = other DNA
aatgaatggtaattacaatt

SEQ ID NO: 67616 - DNA, 20 bp, synthetic construct
  source 1..20: mol_type = other DNA
aaatgaatggtaattacaat

SEQ ID NO: 67617 - DNA, 20 bp, synthetic construct
  source 1..20: mol_type = other DNA
gaaatgaatggtaattacaa

SEQ ID NO: 67618 - DNA, 20 bp, synthetic construct
  source 1..20: mol_type = other DNA
agaaatgaatggtaattaca

SEQ ID NO: 67619 - DNA, 20 bp, synthetic construct
  source 1..20: mol_type = other DNA
aagaaatgaatggtaattac

SEQ ID NO: 67620 - DNA, 20 bp, synthetic construct
  source 1..20: mol_type = other DNA
taagaaatgaatggtaatta

SEQ ID NO: 67621 - DNA, 20 bp, synthetic construct
  source 1..20: mol_type = other DNA
ctaagaaatgaatggtaatt

SEQ ID NO: 67622 - DNA, 20 bp, synthetic construct
  source 1..20: mol_type = other DNA
actaagaaatgaatggtaat

SEQ ID NO: 67623 - DNA, 20 bp, synthetic construct
  source 1..20: mol_type = other DNA
aactaagaaatgaatggtaa

SEQ ID NO: 67624 - DNA, 20 bp, synthetic construct
  source 1..20: mol_type = other DNA
aaactaagaaatgaatggta

SEQ ID NO: 67625 - DNA, 20 bp, synthetic construct
  source 1..20: mol_type = other DNA
aaaactaagaaatgaatggt

SEQ ID NO: 67626 - DNA, 20 bp, synthetic construct
  source 1..20: mol_type = other DNA
caaaactaagaaatgaatgg

SEQ ID NO: 67627 - DNA, 20 bp, synthetic construct
  source 1..20: mol_type = other DNA
acaaaactaagaaatgaatg

SEQ ID NO: 67628 - DNA, 20 bp, synthetic construct
  source 1..20: mol_type = other DNA
cacaaaactaagaaatgaat

SEQ ID NO: 67629 - DNA, 20 bp, synthetic construct
  source 1..20: mol_type = other DNA
ccacaaaactaagaaatgaa

SEQ ID NO: 67630 - DNA, 20 bp, synthetic construct
  source 1..20: mol_type = other DNA
gccacaaaactaagaaatga

SEQ ID NO: 67631 - DNA, 20 bp, synthetic construct
  source 1..20: mol_type = other DNA
agccacaaaactaagaaatg

SEQ ID NO: 67632 - DNA, 20 bp, synthetic construct
  source 1..20: mol_type = other DNA
cagccacaaaactaagaaat

SEQ ID NO: 67633 - DNA, 20 bp, synthetic construct
  source 1..20: mol_type = other DNA
ccagccacaaaactaagaaa

SEQ ID NO: 67634 - DNA, 20 bp, synthetic construct
  source 1..20: mol_type = other DNA
cccagccacaaaactaagaa

SEQ ID NO: 67635 - DNA, 20 bp, synthetic construct
  source 1..20: mol_type = other DNA
tcccagccacaaaactaaga

SEQ ID NO: 67636 - DNA, 20 bp, synthetic construct
  source 1..20: mol_type = other DNA
gtcccagccacaaaactaag

SEQ ID NO: 67637 - DNA, 20 bp, synthetic construct
  source 1..20: mol_type = other DNA
tgtcccagccacaaaactaa

SEQ ID NO: 67638 - DNA, 20 bp, synthetic construct
  source 1..20: mol_type = other DNA
gtgtcccagccacaaaacta

SEQ ID NO: 67639 - DNA, 20 bp, synthetic construct
  source 1..20: mol_type = other DNA
agtgtcccagccacaaaact

SEQ ID NO: 67640 - DNA, 20 bp, synthetic construct
  source 1..20: mol_type = other DNA
cagtgtcccagccacaaaac

SEQ ID NO: 67641 - DNA, 20 bp, synthetic construct
  source 1..20: mol_type = other DNA
tcagtgtcccagccacaaaa

SEQ ID NO: 67642 - DNA, 20 bp, synthetic construct
  source 1..20: mol_type = other DNA
atcagtgtcccagccacaaa

SEQ ID NO: 67643 - DNA, 20 bp, synthetic construct
  source 1..20: mol_type = other DNA
catcagtgtcccagccacaa

SEQ ID NO: 67644 - DNA, 20 bp, synthetic construct
  source 1..20: mol_type = other DNA
acatcagtgtcccagccaca

SEQ ID NO: 67645 - DNA, 20 bp, synthetic construct
  source 1..20: mol_type = other DNA
gacatcagtgtcccagccac

SEQ ID NO: 67646 - DNA, 20 bp, synthetic construct
  source 1..20: mol_type = other DNA
agacatcagtgtcccagcca

SEQ ID NO: 67647 - DNA, 20 bp, synthetic construct
  source 1..20: mol_type = other DNA
aagacatcagtgtcccagcc

SEQ ID NO: 67648 - DNA, 20 bp, synthetic construct
  source 1..20: mol_type = other DNA
gaagacatcagtgtcccagc

SEQ ID NO: 67649 - DNA, 20 bp, synthetic construct
  source 1..20: mol_type = other DNA
tgaagacatcagtgtcccag

SEQ ID NO: 67650 - DNA, 20 bp, synthetic construct
  source 1..20: mol_type = other DNA
ttgaagacatcagtgtccca

SEQ ID NO: 67651 - DNA, 20 bp, synthetic construct
  source 1..20: mol_type = other DNA
tttgaagacatcagtgtccc

SEQ ID NO: 67652 - DNA, 20 bp, synthetic construct
  source 1..20: mol_type = other DNA
atttgaagacatcagtgtcc

SEQ ID NO: 67653 - DNA, 20 bp, synthetic construct
  source 1..20: mol_type = other DNA
catttgaagacatcagtgtc

SEQ ID NO: 67654 - DNA, 20 bp, synthetic construct
  source 1..20: mol_type = other DNA
acatttgaagacatcagtgt

SEQ ID NO: 67655 - DNA, 20 bp, synthetic construct
  source 1..20: mol_type = other DNA
aacatttgaagacatcagtg

SEQ ID NO: 67656 - DNA, 20 bp, synthetic construct
  source 1..20: mol_type = other DNA
taacatttgaagacatcagt

SEQ ID NO: 67657 - DNA, 20 bp, synthetic construct
  source 1..20: mol_type = other DNA
ctaacatttgaagacatcag

SEQ ID NO: 67658 - DNA, 20 bp, synthetic construct
  source 1..20: mol_type = other DNA
actaacatttgaagacatca

SEQ ID NO: 67659 - DNA, 20 bp, synthetic construct
  source 1..20: mol_type = other DNA
aactaacatttgaagacatc

SEQ ID NO: 67660 - DNA, 20 bp, synthetic construct
  source 1..20: mol_type = other DNA
aaactaacatttgaagacat

SEQ ID NO: 67661 - DNA, 20 bp, synthetic construct
  source 1..20: mol_type = other DNA
caaactaacatttgaagaca

SEQ ID NO: 67662 - DNA, 20 bp, synthetic construct
  source 1..20: mol_type = other DNA
gcaaactaacatttgaagac

SEQ ID NO: 67663 - DNA, 20 bp, synthetic construct
  source 1..20: mol_type = other DNA
tgcaaactaacatttgaaga

SEQ ID NO: 67664 - DNA, 20 bp, synthetic construct
  source 1..20: mol_type = other DNA
ttgcaaactaacatttgaag

SEQ ID NO: 67665 - DNA, 20 bp, synthetic construct
  source 1..20: mol_type = other DNA
tttgcaaactaacatttgaa

SEQ ID NO: 67666 - DNA, 20 bp, synthetic construct
  source 1..20: mol_type = other DNA
atttgcaaactaacatttga

SEQ ID NO: 67667 - DNA, 20 bp, synthetic construct
  source 1..20: mol_type = other DNA
tatttgcaaactaacatttg

SEQ ID NO: 67668 - DNA, 20 bp, synthetic construct
  source 1..20: mol_type = other DNA
gtatttgcaaactaacattt

SEQ ID NO: 67669 - DNA, 20 bp, synthetic construct
  source 1..20: mol_type = other DNA
tgtatttgcaaactaacatt

SEQ ID NO: 67670 - DNA, 20 bp, synthetic construct
  source 1..20: mol_type = other DNA
ctgtatttgcaaactaacat

SEQ ID NO: 67671 - DNA, 20 bp, synthetic construct
  source 1..20: mol_type = other DNA
actgtatttgcaaactaaca

SEQ ID NO: 67672 - DNA, 20 bp, synthetic construct
  source 1..20: mol_type = other DNA
gactgtatttgcaaactaac

SEQ ID NO: 67673 - DNA, 20 bp, synthetic construct
  source 1..20: mol_type = other DNA
tgactgtatttgcaaactaa

SEQ ID NO: 67674 - DNA, 20 bp, synthetic construct
  source 1..20: mol_type = other DNA
ctgactgtatttgcaaacta

SEQ ID NO: 67675 - DNA, 20 bp, synthetic construct
  source 1..20: mol_type = other DNA
gctgactgtatttgcaaact

SEQ ID NO: 67676 - DNA, 20 bp, synthetic construct
  source 1..20: mol_type = other DNA
ggctgactgtatttgcaaac

SEQ ID NO: 67677 - DNA, 20 bp, synthetic construct
  source 1..20: mol_type = other DNA
gggctgactgtatttgcaaa

SEQ ID NO: 67678 - DNA, 20 bp, synthetic construct
  source 1..20: mol_type = other DNA
agggctgactgtatttgcaa

SEQ ID NO: 67679 - DNA, 20 bp, synthetic construct
  source 1..20: mol_type = other DNA
gagggctgactgtatttgca

SEQ ID NO: 67680 - DNA, 20 bp, synthetic construct
  source 1..20: mol_type = other DNA
agagggctgactgtatttgc

SEQ ID NO: 67681 - DNA, 20 bp, synthetic construct
  source 1..20: mol_type = other DNA
gagagggctgactgtatttg

SEQ ID NO: 67682 - DNA, 20 bp, synthetic construct
  source 1..20: mol_type = other DNA
agagagggctgactgtattt

SEQ ID NO: 67683 - DNA, 20 bp, synthetic construct
  source 1..20: mol_type = other DNA
tagagagggctgactgtatt

SEQ ID NO: 67684 - DNA, 20 bp, synthetic construct
  source 1..20: mol_type = other DNA
atagagagggctgactgtat

SEQ ID NO: 67685 - DNA, 20 bp, synthetic construct
  source 1..20: mol_type = other DNA
gatagagagggctgactgta

SEQ ID NO: 67686 - DNA, 20 bp, synthetic construct
  source 1..20: mol_type = other DNA
ggatagagagggctgactgt

SEQ ID NO: 67687 - DNA, 20 bp, synthetic construct
  source 1..20: mol_type = other DNA
tggatagagagggctgactg

SEQ ID NO: 67688 - DNA, 20 bp, synthetic construct
  source 1..20: mol_type = other DNA
atggatagagagggctgact

SEQ ID NO: 67689 - DNA, 20 bp, synthetic construct
  source 1..20: mol_type = other DNA
catggatagagagggctgac

SEQ ID NO: 67690 - DNA, 20 bp, synthetic construct
  source 1..20: mol_type = other DNA
ccatggatagagagggctga

SEQ ID NO: 67691 - DNA, 20 bp, synthetic construct
  source 1..20: mol_type = other DNA
cccatggatagagagggctg

SEQ ID NO: 67692 - DNA, 20 bp, synthetic construct
  source 1..20: mol_type = other DNA
acccatggatagagagggct

SEQ ID NO: 67693 - DNA, 20 bp, synthetic construct
  source 1..20: mol_type = other DNA
aacccatggatagagagggc

SEQ ID NO: 67694 - DNA, 20 bp, synthetic construct
  source 1..20: mol_type = other DNA
taacccatggatagagaggg

SEQ ID NO: 67695 - DNA, 20 bp, synthetic construct
  source 1..20: mol_type = other DNA
gtaacccatggatagagagg

SEQ ID NO: 67696 - DNA, 20 bp, synthetic construct
  source 1..20: mol_type = other DNA
tgtaacccatggatagagag

SEQ ID NO: 67697 - DNA, 20 bp, synthetic construct
  source 1..20: mol_type = other DNA
gtgtaacccatggatagaga

SEQ ID NO: 67698 - DNA, 20 bp, synthetic construct
  source 1..20: mol_type = other DNA
tgtgtaacccatggatagag

SEQ ID NO: 67699 - DNA, 20 bp, synthetic construct
  source 1..20: mol_type = other DNA
ctgtgtaacccatggataga

SEQ ID NO: 67700 - DNA, 20 bp, synthetic construct
  source 1..20: mol_type = other DNA
gctgtgtaacccatggatag

SEQ ID NO: 67701 - DNA, 20 bp, synthetic construct
  source 1..20: mol_type = other DNA
agctgtgtaacccatggata

SEQ ID NO: 67702 - DNA, 20 bp, synthetic construct
  source 1..20: mol_type = other DNA
cagctgtgtaacccatggat

SEQ ID NO: 67703 - DNA, 20 bp, synthetic construct
  source 1..20: mol_type = other DNA
acagctgtgtaacccatgga

SEQ ID NO: 67704 - DNA, 20 bp, synthetic construct
  source 1..20: mol_type = other DNA
cacagctgtgtaacccatgg

SEQ ID NO: 67705 - DNA, 20 bp, synthetic construct
  source 1..20: mol_type = other DNA
tcacagctgtgtaacccatg

SEQ ID NO: 67706 - DNA, 20 bp, synthetic construct
  source 1..20: mol_type = other DNA
ttcacagctgtgtaacccat

SEQ ID NO: 67707 - DNA, 20 bp, synthetic construct
  source 1..20: mol_type = other DNA
attcacagctgtgtaaccca

SEQ ID NO: 67708 - DNA, 20 bp, synthetic construct
  source 1..20: mol_type = other DNA
aattcacagctgtgtaaccc

SEQ ID NO: 67709 - DNA, 20 bp, synthetic construct
  source 1..20: mol_type = other DNA
gaattcacagctgtgtaacc

SEQ ID NO: 67710 - DNA, 20 bp, synthetic construct
  source 1..20: mol_type = other DNA
tgaattcacagctgtgtaac

SEQ ID NO: 67711 - DNA, 20 bp, synthetic construct
  source 1..20: mol_type = other DNA
ttgaattcacagctgtgtaa

SEQ ID NO: 67712 - DNA, 20 bp, synthetic construct
  source 1..20: mol_type = other DNA
gttgaattcacagctgtgta

SEQ ID NO: 67713 - DNA, 20 bp, synthetic construct
  source 1..20: mol_type = other DNA
ggttgaattcacagctgtgt

SEQ ID NO: 67714 - DNA, 20 bp, synthetic construct
  source 1..20: mol_type = other DNA
tggttgaattcacagctgtg

SEQ ID NO: 67715 - DNA, 20 bp, synthetic construct
  source 1..20: mol_type = other DNA
ttggttgaattcacagctgt

SEQ ID NO: 67716 - DNA, 20 bp, synthetic construct
  source 1..20: mol_type = other DNA
gttggttgaattcacagctg

SEQ ID NO: 67717 - DNA, 20 bp, synthetic construct
  source 1..20: mol_type = other DNA
ggttggttgaattcacagct

SEQ ID NO: 67718 - DNA, 20 bp, synthetic construct
  source 1..20: mol_type = other DNA
tggttggttgaattcacagc

SEQ ID NO: 67719 - DNA, 20 bp, synthetic construct
  source 1..20: mol_type = other DNA
atggttggttgaattcacag

SEQ ID NO: 67720 - DNA, 20 bp, synthetic construct
  source 1..20: mol_type = other DNA
catggttggttgaattcaca

SEQ ID NO: 67721 - DNA, 20 bp, synthetic construct
  source 1..20: mol_type = other DNA
ccatggttggttgaattcac

SEQ ID NO: 67722 - DNA, 20 bp, synthetic construct
  source 1..20: mol_type = other DNA
tccatggttggttgaattca

SEQ ID NO: 67723 - DNA, 20 bp, synthetic construct
  source 1..20: mol_type = other DNA
atccatggttggttgaattc

SEQ ID NO: 67724 - DNA, 20 bp, synthetic construct
  source 1..20: mol_type = other DNA
gatccatggttggttgaatt

SEQ ID NO: 67725 - DNA, 20 bp, synthetic construct
  source 1..20: mol_type = other DNA
ggatccatggttggttgaat

SEQ ID NO: 67726 - DNA, 20 bp, synthetic construct
  source 1..20: mol_type = other DNA
tggatccatggttggttgaa

SEQ ID NO: 67727 - DNA, 20 bp, synthetic construct
  source 1..20: mol_type = other DNA
ttggatccatggttggttga

SEQ ID NO: 67728 - DNA, 20 bp, synthetic construct
  source 1..20: mol_type = other DNA
tttggatccatggttggttg

SEQ ID NO: 67729 - DNA, 20 bp, synthetic construct
  source 1..20: mol_type = other DNA
ttttggatccatggttggtt

SEQ ID NO: 67730 - DNA, 20 bp, synthetic construct
  source 1..20: mol_type = other DNA
attttggatccatggttggt

SEQ ID NO: 67731 - DNA, 20 bp, synthetic construct
  source 1..20: mol_type = other DNA
tattttggatccatggttgg

SEQ ID NO: 67732 - DNA, 20 bp, synthetic construct
  source 1..20: mol_type = other DNA
atattttggatccatggttg

SEQ ID NO: 67733 - DNA, 20 bp, synthetic construct
  source 1..20: mol_type = other DNA
tatattttggatccatggtt

SEQ ID NO: 67734 - DNA, 20 bp, synthetic construct
  source 1..20: mol_type = other DNA
atatattttggatccatggt

SEQ ID NO: 67735 - DNA, 20 bp, synthetic construct
  source 1..20: mol_type = other DNA
catatattttggatccatgg

SEQ ID NO: 67736 - DNA, 20 bp, synthetic construct
  source 1..20: mol_type = other DNA
ccatatattttggatccatg

SEQ ID NO: 67737 - DNA, 20 bp, synthetic construct
  source 1..20: mol_type = other DNA
cccatatattttggatccat

SEQ ID NO: 67738 - DNA, 20 bp, synthetic construct
  source 1..20: mol_type = other DNA
tcccatatattttggatcca

SEQ ID NO: 67739 - DNA, 20 bp, synthetic construct
  source 1..20: mol_type = other DNA
ttcccatatattttggatcc

SEQ ID NO: 67740 - DNA, 20 bp, synthetic construct
  source 1..20: mol_type = other DNA
tttcccatatattttggatc

SEQ ID NO: 67741 - DNA, 20 bp, synthetic construct
  source 1..20: mol_type = other DNA
atttcccatatattttggat

SEQ ID NO: 67742 - DNA, 20 bp, synthetic construct
  source 1..20: mol_type = other DNA
tatttcccatatattttgga

SEQ ID NO: 67743 - DNA, 20 bp, synthetic construct
  source 1..20: mol_type = other DNA
gtatttcccatatattttgg

SEQ ID NO: 67744 - DNA, 20 bp, synthetic construct
  source 1..20: mol_type = other DNA
cgtatttcccatatattttg

SEQ ID NO: 67745 - DNA, 20 bp, synthetic construct
  source 1..20: mol_type = other DNA
gcgtatttcccatatatttt

SEQ ID NO: 67746 - DNA, 20 bp, synthetic construct
  source 1..20: mol_type = other DNA
agcgtatttcccatatattt

SEQ ID NO: 67747 - DNA, 20 bp, synthetic construct
  source 1..20: mol_type = other DNA
cagcgtatttcccatatatt

SEQ ID NO: 67748 - DNA, 20 bp, synthetic construct
  source 1..20: mol_type = other DNA
ccagcgtatttcccatatat

SEQ ID NO: 67749 - DNA, 20 bp, synthetic construct
  source 1..20: mol_type = other DNA
cccagcgtatttcccatata

SEQ ID NO: 67750 - DNA, 20 bp, synthetic construct
  source 1..20: mol_type = other DNA
ccccagcgtatttcccatat

SEQ ID NO: 67751 - DNA, 20 bp, synthetic construct
  source 1..20: mol_type = other DNA
gccccagcgtatttcccata

SEQ ID NO: 67752 - DNA, 20 bp, synthetic construct
  source 1..20: mol_type = other DNA
agccccagcgtatttcccat

SEQ ID NO: 67753 - DNA, 20 bp, synthetic construct
  source 1..20: mol_type = other DNA
cagccccagcgtatttccca

SEQ ID NO: 67754 - DNA, 20 bp, synthetic construct
  source 1..20: mol_type = other DNA
acagccccagcgtatttccc

SEQ ID NO: 67755 - DNA, 20 bp, synthetic construct
  source 1..20: mol_type = other DNA
cacagccccagcgtatttcc

SEQ ID NO: 67756 - DNA, 20 bp, synthetic construct
  source 1..20: mol_type = other DNA
ccacagccccagcgtatttc

SEQ ID NO: 67757 - DNA, 20 bp, synthetic construct
  source 1..20: mol_type = other DNA
cccacagccccagcgtattt

SEQ ID NO: 67758 - DNA, 20 bp, synthetic construct
  source 1..20: mol_type = other DNA
acccacagccccagcgtatt

SEQ ID NO: 67759 - DNA, 20 bp, synthetic construct
  source 1..20: mol_type = other DNA
gacccacagccccagcgtat

SEQ ID NO: 67760 - DNA, 20 bp, synthetic construct
  source 1..20: mol_type = other DNA
tgacccacagccccagcgta

SEQ ID NO: 67761 - DNA, 20 bp, synthetic construct
  source 1..20: mol_type = other DNA
gtgacccacagccccagcgt

SEQ ID NO: 67762 - DNA, 20 bp, synthetic construct
  source 1..20: mol_type = other DNA
tgtgacccacagccccagcg

SEQ ID NO: 67763 - DNA, 20 bp, synthetic construct
  source 1..20: mol_type = other DNA
gtgtgacccacagccccagc

SEQ ID NO: 67764 - DNA, 20 bp, synthetic construct
  source 1..20: mol_type = other DNA
ggtgtgacccacagccccag

SEQ ID NO: 67765 - DNA, 20 bp, synthetic construct
  source 1..20: mol_type = other DNA
aggtgtgacccacagcccca

SEQ ID NO: 67766 - DNA, 20 bp, synthetic construct
  source 1..20: mol_type = other DNA
caggtgtgacccacagcccc

SEQ ID NO: 67767 - DNA, 20 bp, synthetic construct
  source 1..20: mol_type = other DNA
acaggtgtgacccacagccc

SEQ ID NO: 67768 - DNA, 20 bp, synthetic construct
  source 1..20: mol_type = other DNA
tacaggtgtgacccacagcc

SEQ ID NO: 67769 - DNA, 20 bp, synthetic construct
  source 1..20: mol_type = other DNA
ttacaggtgtgacccacagc

SEQ ID NO: 67770 - DNA, 20 bp, synthetic construct
  source 1..20: mol_type = other DNA
attacaggtgtgacccacag

SEQ ID NO: 67771 - DNA, 20 bp, synthetic construct
  source 1..20: mol_type = other DNA
aattacaggtgtgacccaca

SEQ ID NO: 67772 - DNA, 20 bp, synthetic construct
  source 1..20: mol_type = other DNA
gaattacaggtgtgacccac

SEQ ID NO: 67773 - DNA, 20 bp, synthetic construct
  source 1..20: mol_type = other DNA
ggaattacaggtgtgaccca

SEQ ID NO: 67774 - DNA, 20 bp, synthetic construct
  source 1..20: mol_type = other DNA
tggaattacaggtgtgaccc

SEQ ID NO: 67775 - DNA, 20 bp, synthetic construct
  source 1..20: mol_type = other DNA
ctggaattacaggtgtgacc

SEQ ID NO: 67776 - DNA, 20 bp, synthetic construct
  source 1..20: mol_type = other DNA
gctggaattacaggtgtgac

SEQ ID NO: 67777 - DNA, 20 bp, synthetic construct
  source 1..20: mol_type = other DNA
tgctggaattacaggtgtga

SEQ ID NO: 67778 - DNA, 20 bp, synthetic construct
  source 1..20: mol_type = other DNA
gtgctggaattacaggtgtg

SEQ ID NO: 67779 - DNA, 20 bp, synthetic construct
  source 1..20: mol_type = other DNA
agtgctggaattacaggtgt

SEQ ID NO: 67780 - DNA, 20 bp, synthetic construct
  source 1..20: mol_type = other DNA
aagtgctggaattacaggtg

SEQ ID NO: 67781 - DNA, 20 bp, synthetic construct
  source 1..20: mol_type = other DNA
taagtgctggaattacaggt

SEQ ID NO: 67782 - DNA, 20 bp, synthetic construct
  source 1..20: mol_type = other DNA
ctaagtgctggaattacagg

SEQ ID NO: 67783 - DNA, 20 bp, synthetic construct
  source 1..20: mol_type = other DNA
cctaagtgctggaattacag

SEQ ID NO: 67784 - DNA, 20 bp, synthetic construct
  source 1..20: mol_type = other DNA
ccctaagtgctggaattaca

SEQ ID NO: 67785 - DNA, 20 bp, synthetic construct
  source 1..20: mol_type = other DNA
tccctaagtgctggaattac

SEQ ID NO: 67786 - DNA, 20 bp, synthetic construct
  source 1..20: mol_type = other DNA
ctccctaagtgctggaatta

SEQ ID NO: 67787 - DNA, 20 bp, synthetic construct
  source 1..20: mol_type = other DNA
cctccctaagtgctggaatt

SEQ ID NO: 67788 - DNA, 20 bp, synthetic construct
  source 1..20: mol_type = other DNA
gcctccctaagtgctggaat

SEQ ID NO: 67789 - DNA, 20 bp, synthetic construct
  source 1..20: mol_type = other DNA
agcctccctaagtgctggaa

SEQ ID NO: 67790 - DNA, 20 bp, synthetic construct
  source 1..20: mol_type = other DNA
cagcctccctaagtgctgga

SEQ ID NO: 67791 - DNA, 20 bp, synthetic construct
  source 1..20: mol_type = other DNA
tcagcctccctaagtgctgg

SEQ ID NO: 67792 - DNA, 20 bp, synthetic construct
  source 1..20: mol_type = other DNA
ctcagcctccctaagtgctg

SEQ ID NO: 67793 - DNA, 20 bp, synthetic construct
  source 1..20: mol_type = other DNA
cctcagcctccctaagtgct

SEQ ID NO: 67794 - DNA, 20 bp, synthetic construct
  source 1..20: mol_type = other DNA
gcctcagcctccctaagtgc

SEQ ID NO: 67795 - DNA, 20 bp, synthetic construct
  source 1..20: mol_type = other DNA
tgcctcagcctccctaagtg

SEQ ID NO: 67796 - DNA, 20 bp, synthetic construct
  source 1..20: mol_type = other DNA
ctgcctcagcctccctaagt

SEQ ID NO: 67797 - DNA, 20 bp, synthetic construct
  source 1..20: mol_type = other DNA
tctgcctcagcctccctaag

SEQ ID NO: 67798 - DNA, 20 bp, synthetic construct
  source 1..20: mol_type = other DNA
atctgcctcagcctccctaa

SEQ ID NO: 67799 - DNA, 20 bp, synthetic construct
  source 1..20: mol_type = other DNA
catctgcctcagcctcccta

SEQ ID NO: 67800 - DNA, 20 bp, synthetic construct
  source 1..20: mol_type = other DNA
ccatctgcctcagcctccct

SEQ ID NO: 67801 - DNA, 20 bp, synthetic construct
  source 1..20: mol_type = other DNA
tccatctgcctcagcctccc

SEQ ID NO: 67802 - DNA, 20 bp, synthetic construct
  source 1..20: mol_type = other DNA
atccatctgcctcagcctcc

SEQ ID NO: 67803 - DNA, 20 bp, synthetic construct
  source 1..20: mol_type = other DNA
gatccatctgcctcagcctc

SEQ ID NO: 67804 - DNA, 20 bp, synthetic construct
  source 1..20: mol_type = other DNA
tgatccatctgcctcagcct

SEQ ID NO: 67805 - DNA, 20 bp, synthetic construct
  source 1..20: mol_type = other DNA
gtgatccatctgcctcagcc

SEQ ID NO: 67806 - DNA, 20 bp, synthetic construct
  source 1..20: mol_type = other DNA
ggtgatccatctgcctcagc

SEQ ID NO: 67807 - DNA, 20 bp, synthetic construct
  source 1..20: mol_type = other DNA
aggtgatccatctgcctcag

SEQ ID NO: 67808 - DNA, 20 bp, synthetic construct
  source 1..20: mol_type = other DNA
caggtgatccatctgcctca

SEQ ID NO: 67809 - DNA, 20 bp, synthetic construct
  source 1..20: mol_type = other DNA
tcaggtgatccatctgcctc

SEQ ID NO: 67810 - DNA, 20 bp, synthetic construct
  source 1..20: mol_type = other DNA
ctcaggtgatccatctgcct

SEQ ID NO: 67811 - DNA, 20 bp, synthetic construct
  source 1..20: mol_type = other DNA
cctcaggtgatccatctgcc

SEQ ID NO: 67812 - DNA, 20 bp, synthetic construct
  source 1..20: mol_type = other DNA
acctcaggtgatccatctgc

SEQ ID NO: 67813 - DNA, 20 bp, synthetic construct
  source 1..20: mol_type = other DNA
gacctcaggtgatccatctg

SEQ ID NO: 67814 - DNA, 20 bp, synthetic construct
  source 1..20: mol_type = other DNA
tgacctcaggtgatccatct

SEQ ID NO: 67815 - DNA, 20 bp, synthetic construct
  source 1..20: mol_type = other DNA
ctgacctcaggtgatccatc

SEQ ID NO: 67816 - DNA, 20 bp, synthetic construct
  source 1..20: mol_type = other DNA
cctgacctcaggtgatccat

SEQ ID NO: 67817 - DNA, 20 bp, synthetic construct
  source 1..20: mol_type = other DNA
tcctgacctcaggtgatcca

SEQ ID NO: 67818 - DNA, 20 bp, synthetic construct
  source 1..20: mol_type = other DNA
ctcctgacctcaggtgatcc

SEQ ID NO: 67819 - DNA, 20 bp, synthetic construct
  source 1..20: mol_type = other DNA
actcctgacctcaggtgatc

SEQ ID NO: 67820 - DNA, 20 bp, synthetic construct
  source 1..20: mol_type = other DNA
aactcctgacctcaggtgat

SEQ ID NO: 67821 - DNA, 20 bp, synthetic construct
  source 1..20: mol_type = other DNA
gaactcctgacctcaggtga

SEQ ID NO: 67822 - DNA, 20 bp, synthetic construct
  source 1..20: mol_type = other DNA
tgaactcctgacctcaggtg

SEQ ID NO: 67823 - DNA, 20 bp, synthetic construct
  source 1..20: mol_type = other DNA
ttgaactcctgacctcaggt

SEQ ID NO: 67824 - DNA, 20 bp, synthetic construct
  source 1..20: mol_type = other DNA
cttgaactcctgacctcagg

SEQ ID NO: 67825 - DNA, 20 bp, synthetic construct
  source 1..20: mol_type = other DNA
tcttgaactcctgacctcag

SEQ ID NO: 67826 - DNA, 20 bp, synthetic construct
  source 1..20: mol_type = other DNA
gtcttgaactcctgacctca

SEQ ID NO: 67827 - DNA, 20 bp, synthetic construct
  source 1..20: mol_type = other DNA
ggtcttgaactcctgacctc

SEQ ID NO: 67828 - DNA, 20 bp, synthetic construct
  source 1..20: mol_type = other DNA
tggtcttgaactcctgacct

SEQ ID NO: 67829 - DNA, 20 bp, synthetic construct
  source 1..20: mol_type = other DNA
ctggtcttgaactcctgacc

SEQ ID NO: 67830 - DNA, 20 bp, synthetic construct
  source 1..20: mol_type = other DNA
gctggtcttgaactcctgac

SEQ ID NO: 67831 - DNA, 20 bp, synthetic construct
  source 1..20: mol_type = other DNA
ggctggtcttgaactcctga

SEQ ID NO: 67832 - DNA, 20 bp, synthetic construct
  source 1..20: mol_type = other DNA
aggctggtcttgaactcctg

SEQ ID NO: 67833 - DNA, 20 bp, synthetic construct
  source 1..20: mol_type = other DNA
caggctggtcttgaactcct

SEQ ID NO: 67834 - DNA, 20 bp, synthetic construct
  source 1..20: mol_type = other DNA
ccaggctggtcttgaactcc

SEQ ID NO: 67835 - DNA, 20 bp, synthetic construct
  source 1..20: mol_type = other DNA
gccaggctggtcttgaactc

SEQ ID NO: 67836 - DNA, 20 bp, synthetic construct
  source 1..20: mol_type = other DNA
ggccaggctggtcttgaact

SEQ ID NO: 67837 - DNA, 20 bp, synthetic construct
  source 1..20: mol_type = other DNA
tggccaggctggtcttgaac

SEQ ID NO: 67838 - DNA, 20 bp, synthetic construct
  source 1..20: mol_type = other DNA
ttggccaggctggtcttgaa

SEQ ID NO: 67839 - DNA, 20 bp, synthetic construct
  source 1..20: mol_type = other DNA
gttggccaggctggtcttga

SEQ ID NO: 67840 - DNA, 20 bp, synthetic construct
  source 1..20: mol_type = other DNA
tgttggccaggctggtcttg

SEQ ID NO: 67841 - DNA, 20 bp, synthetic construct
  source 1..20: mol_type = other DNA
atgttggccaggctggtctt

SEQ ID NO: 67842 - DNA, 20 bp, synthetic construct
  source 1..20: mol_type = other DNA
catgttggccaggctggtct

SEQ ID NO: 67843 - DNA, 20 bp, synthetic construct
  source 1..20: mol_type = other DNA
ccatgttggccaggctggtc

SEQ ID NO: 67844 - DNA, 20 bp, synthetic construct
  source 1..20: mol_type = other DNA
gccatgttggccaggctggt

SEQ ID NO: 67845 - DNA, 20 bp, synthetic construct
  source 1..20: mol_type = other DNA
tgccatgttggccaggctgg

SEQ ID NO: 67846 - DNA, 20 bp, synthetic construct
  source 1..20: mol_type = other DNA
ttgccatgttggccaggctg

SEQ ID NO: 67847 - DNA, 20 bp, synthetic construct
  source 1..20: mol_type = other DNA
tttgccatgttggccaggct

SEQ ID NO: 67848 - DNA, 20 bp, synthetic construct
  source 1..20: mol_type = other DNA
ttttgccatgttggccaggc

SEQ ID NO: 67849 - DNA, 20 bp, synthetic construct
  source 1..20: mol_type = other DNA
gttttgccatgttggccagg

SEQ ID NO: 67850 - DNA, 20 bp, synthetic construct
  source 1..20: mol_type = other DNA
ggttttgccatgttggccag

SEQ ID NO: 67851 - DNA, 20 bp, synthetic construct
  source 1..20: mol_type = other DNA
gggttttgccatgttggcca

SEQ ID NO: 67852 - DNA, 20 bp, synthetic construct
  source 1..20: mol_type = other DNA
agggttttgccatgttggcc

SEQ ID NO: 67853 - DNA, 20 bp, synthetic construct
  source 1..20: mol_type = other DNA
tagggttttgccatgttggc

SEQ ID NO: 67854 - DNA, 20 bp, synthetic construct
  source 1..20: mol_type = other DNA
ctagggttttgccatgttgg

SEQ ID NO: 67855 - DNA, 20 bp, synthetic construct
  source 1..20: mol_type = other DNA
gctagggttttgccatgttg

SEQ ID NO: 67856 - DNA, 20 bp, synthetic construct
  source 1..20: mol_type = other DNA
agctagggttttgccatgtt

SEQ ID NO: 67857 - DNA, 20 bp, synthetic construct
  source 1..20: mol_type = other DNA
gagctagggttttgccatgt

SEQ ID NO: 67858 - DNA, 20 bp, synthetic construct
  source 1..20: mol_type = other DNA
agagctagggttttgccatg

SEQ ID NO: 67859 - DNA, 20 bp, synthetic construct
  source 1..20: mol_type = other DNA
tagagctagggttttgccat

SEQ ID NO: 67860 - DNA, 20 bp, synthetic construct
  source 1..20: mol_type = other DNA
gtagagctagggttttgcca

SEQ ID NO: 67861 - DNA, 20 bp, synthetic construct
  source 1..20: mol_type = other DNA
agtagagctagggttttgcc

SEQ ID NO: 67862 - DNA, 20 bp, synthetic construct
  source 1..20: mol_type = other DNA
tagtagagctagggttttgc

SEQ ID NO: 67863 - DNA, 20 bp, synthetic construct
  source 1..20: mol_type = other DNA
atagtagagctagggttttg

SEQ ID NO: 67864 - DNA, 20 bp, synthetic construct
  source 1..20: mol_type = other DNA
tatagtagagctagggtttt

SEQ ID NO: 67865 - DNA, 20 bp, synthetic construct
  source 1..20: mol_type = other DNA
ttatagtagagctagggttt

SEQ ID NO: 67866 - DNA, 20 bp, synthetic construct
  source 1..20: mol_type = other DNA
cttatagtagagctagggtt

SEQ ID NO: 67867 - DNA, 20 bp, synthetic construct
  source 1..20: mol_type = other DNA
acttatagtagagctagggt

SEQ ID NO: 67868 - DNA, 20 bp, synthetic construct
  source 1..20: mol_type = other DNA
tacttatagtagagctaggg

SEQ ID NO: 67869 - DNA, 20 bp, synthetic construct
  source 1..20: mol_type = other DNA
gtacttatagtagagctagg

SEQ ID NO: 67870 - DNA, 20 bp, synthetic construct
  source 1..20: mol_type = other DNA
tgtacttatagtagagctag

SEQ ID NO: 67871 - DNA, 20 bp, synthetic construct
  source 1..20: mol_type = other DNA
ttgtacttatagtagagcta

SEQ ID NO: 67872 - DNA, 20 bp, synthetic construct
  source 1..20: mol_type = other DNA
tttgtacttatagtagagct

SEQ ID NO: 67873 - DNA, 20 bp, synthetic construct
  source 1..20: mol_type = other DNA
ttttgtacttatagtagagc

SEQ ID NO: 67874 - DNA, 20 bp, synthetic construct
  source 1..20: mol_type = other DNA
tttttgtacttatagtagag

SEQ ID NO: 67875 - DNA, 20 bp, synthetic construct
  source 1..20: mol_type = other DNA
ttttttgtacttatagtaga

SEQ ID NO: 67876 - DNA, 20 bp, synthetic construct
  source 1..20: mol_type = other DNA
attttttgtacttatagtag

SEQ ID NO: 67877 - DNA, 20 bp, synthetic construct
  source 1..20: mol_type = other DNA
aattttttgtacttatagta

SEQ ID NO: 67878 - DNA, 20 bp, synthetic construct
  source 1..20: mol_type = other DNA
taattttttgtacttatagt

SEQ ID NO: 67879 - DNA, 20 bp, synthetic construct
  source 1..20: mol_type = other DNA
ctaattttttgtacttatag

SEQ ID NO: 67880 - DNA, 20 bp, synthetic construct
  source 1..20: mol_type = other DNA
gctaattttttgtacttata

SEQ ID NO: 67881 - DNA, 20 bp, synthetic construct
  source 1..20: mol_type = other DNA
agctaattttttgtacttat

SEQ ID NO: 67882 - DNA, 20 bp, synthetic construct
  source 1..20: mol_type = other DNA
cagctaattttttgtactta

SEQ ID NO: 67883 - DNA, 20 bp, synthetic construct
  source 1..20: mol_type = other DNA
ccagctaattttttgtactt

SEQ ID NO: 67884 - DNA, 20 bp, synthetic construct
  source 1..20: mol_type = other DNA
gccagctaattttttgtact

SEQ ID NO: 67885 - DNA, 20 bp, synthetic construct
  source 1..20: mol_type = other DNA
ggccagctaattttttgtac

SEQ ID NO: 67886 - DNA, 20 bp, synthetic construct
  source 1..20: mol_type = other DNA
tggccagctaattttttgta

SEQ ID NO: 67887 - DNA, 20 bp, synthetic construct
  source 1..20: mol_type = other DNA
atggccagctaattttttgt

SEQ ID NO: 67888 - DNA, 20 bp, synthetic construct
  source 1..20: mol_type = other DNA
catggccagctaattttttg

SEQ ID NO: 67889 - DNA, 20 bp, synthetic construct
  source 1..20: mol_type = other DNA
ccatggccagctaatttttt

SEQ ID NO: 67890 - DNA, 20 bp, synthetic construct
  source 1..20: mol_type = other DNA
accatggccagctaattttt

SEQ ID NO: 67891 - DNA, 20 bp, synthetic construct
  source 1..20: mol_type = other DNA
taccatggccagctaatttt

SEQ ID NO: 67892 - DNA, 20 bp, synthetic construct
  source 1..20: mol_type = other DNA
ctaccatggccagctaattt

SEQ ID NO: 67893 - DNA, 20 bp, synthetic construct
  source 1..20: mol_type = other DNA
actaccatggccagctaatt

SEQ ID NO: 67894 - DNA, 20 bp, synthetic construct
  source 1..20: mol_type = other DNA
cactaccatggccagctaat

SEQ ID NO: 67895 - DNA, 20 bp, synthetic construct
  source 1..20: mol_type = other DNA
gcactaccatggccagctaa

SEQ ID NO: 67896 - DNA, 20 bp, synthetic construct
  source 1..20: mol_type = other DNA
tgcactaccatggccagcta

SEQ ID NO: 67897 - DNA, 20 bp, synthetic construct
  source 1..20: mol_type = other DNA
gtgcactaccatggccagct

SEQ ID NO: 67898 - DNA, 20 bp, synthetic construct
  source 1..20: mol_type = other DNA
tgtgcactaccatggccagc

SEQ ID NO: 67899 - DNA, 20 bp, synthetic construct
  source 1..20: mol_type = other DNA
atgtgcactaccatggccag

SEQ ID NO: 67900 - DNA, 20 bp, synthetic construct
  source 1..20: mol_type = other DNA
catgtgcactaccatggcca

SEQ ID NO: 67901 - DNA, 20 bp, synthetic construct
  source 1..20: mol_type = other DNA
acatgtgcactaccatggcc

SEQ ID NO: 67902 - DNA, 20 bp, synthetic construct
  source 1..20: mol_type = other DNA
cacatgtgcactaccatggc

SEQ ID NO: 67903 - DNA, 20 bp, synthetic construct
  source 1..20: mol_type = other DNA
acacatgtgcactaccatgg

SEQ ID NO: 67904 - DNA, 20 bp, synthetic construct
  source 1..20: mol_type = other DNA
tacacatgtgcactaccatg

SEQ ID NO: 67905 - DNA, 20 bp, synthetic construct
  source 1..20: mol_type = other DNA
ttacacatgtgcactaccat

SEQ ID NO: 67906 - DNA, 20 bp, synthetic construct
  source 1..20: mol_type = other DNA
attacacatgtgcactacca

SEQ ID NO: 67907 - DNA, 20 bp, synthetic construct
  source 1..20: mol_type = other DNA
gattacacatgtgcactacc

SEQ ID NO: 67908 - DNA, 20 bp, synthetic construct
  source 1..20: mol_type = other DNA
ggattacacatgtgcactac

SEQ ID NO: 67909 - DNA, 20 bp, synthetic construct
  source 1..20: mol_type = other DNA
gggattacacatgtgcacta

SEQ ID NO: 67910 - DNA, 20 bp, synthetic construct
  source 1..20: mol_type = other DNA
tgggattacacatgtgcact

SEQ ID NO: 67911 - DNA, 20 bp, synthetic construct
  source 1..20: mol_type = other DNA
ctgggattacacatgtgcac

SEQ ID NO: 67912 - DNA, 20 bp, synthetic construct
  source 1..20: mol_type = other DNA
gctgggattacacatgtgca

SEQ ID NO: 67913 - DNA, 20 bp, synthetic construct
  source 1..20: mol_type = other DNA
agctgggattacacatgtgc

SEQ ID NO: 67914 - DNA, 20 bp, synthetic construct
  source 1..20: mol_type = other DNA
tagctgggattacacatgtg

SEQ ID NO: 67915 - DNA, 20 bp, synthetic construct
  source 1..20: mol_type = other DNA
gtagctgggattacacatgt

SEQ ID NO: 67916 - DNA, 20 bp, synthetic construct
  source 1..20: mol_type = other DNA
agtagctgggattacacatg

SEQ ID NO: 67917 - DNA, 20 bp, synthetic construct
  source 1..20: mol_type = other DNA
gagtagctgggattacacat

SEQ ID NO: 67918 - DNA, 20 bp, synthetic construct
  source 1..20: mol_type = other DNA
cgagtagctgggattacaca

SEQ ID NO: 67919 - DNA, 20 bp, synthetic construct
  source 1..20: mol_type = other DNA
tcgagtagctgggattacac

SEQ ID NO: 67920 - DNA, 20 bp, synthetic construct
  source 1..20: mol_type = other DNA
ctcgagtagctgggattaca

SEQ ID NO: 67921 - DNA, 20 bp, synthetic construct
  source 1..20: mol_type = other DNA
tctcgagtagctgggattac

SEQ ID NO: 67922 - DNA, 20 bp, synthetic construct
  source 1..20: mol_type = other DNA
ctctcgagtagctgggatta

SEQ ID NO: 67923 - DNA, 20 bp, synthetic construct
  source 1..20: mol_type = other DNA
cctctcgagtagctgggatt

SEQ ID NO: 67924 - DNA, 20 bp, synthetic construct
  source 1..20: mol_type = other DNA
acctctcgagtagctgggat

SEQ ID NO: 67925 - DNA, 20 bp, synthetic construct
  source 1..20: mol_type = other DNA
aacctctcgagtagctggga

SEQ ID NO: 67926 - DNA, 20 bp, synthetic construct
  source 1..20: mol_type = other DNA
caacctctcgagtagctggg

SEQ ID NO: 67927 - DNA, 20 bp, synthetic construct
  source 1..20: mol_type = other DNA
tcaacctctcgagtagctgg

SEQ ID NO: 67928 - DNA, 20 bp, synthetic construct
  source 1..20: mol_type = other DNA
ctcaacctctcgagtagctg

SEQ ID NO: 67929 - DNA, 20 bp, synthetic construct
  source 1..20: mol_type = other DNA
tctcaacctctcgagtagct

SEQ ID NO: 67930 - DNA, 20 bp, synthetic construct
  source 1..20: mol_type = other DNA
gtctcaacctctcgagtagc

SEQ ID NO: 67931 - DNA, 20 bp, synthetic construct
  source 1..20: mol_type = other DNA
tgtctcaacctctcgagtag

SEQ ID NO: 67932 - DNA, 20 bp, synthetic construct
  source 1..20: mol_type = other DNA
ttgtctcaacctctcgagta

SEQ ID NO: 67933 - DNA, 20 bp, synthetic construct
  source 1..20: mol_type = other DNA
cttgtctcaacctctcgagt

SEQ ID NO: 67934 - DNA, 20 bp, synthetic construct
  source 1..20: mol_type = other DNA
gcttgtctcaacctctcgag

SEQ ID NO: 67935 - DNA, 20 bp, synthetic construct
  source 1..20: mol_type = other DNA
tgcttgtctcaacctctcga

SEQ ID NO: 67936 - DNA, 20 bp, synthetic construct
  source 1..20: mol_type = other DNA
ttgcttgtctcaacctctcg

SEQ ID NO: 67937 - DNA, 20 bp, synthetic construct
  source 1..20: mol_type = other DNA
attgcttgtctcaacctctc

SEQ ID NO: 67938 - DNA, 20 bp, synthetic construct
  source 1..20: mol_type = other DNA
aattgcttgtctcaacctct

SEQ ID NO: 67939 - DNA, 20 bp, synthetic construct
  source 1..20: mol_type = other DNA
aaattgcttgtctcaacctc

SEQ ID NO: 67940 - DNA, 20 bp, synthetic construct
  source 1..20: mol_type = other DNA
caaattgcttgtctcaacct

SEQ ID NO: 67941 - DNA, 20 bp, synthetic construct
  source 1..20: mol_type = other DNA
gcaaattgcttgtctcaacc

SEQ ID NO: 67942 - DNA, 20 bp, synthetic construct
  source 1..20: mol_type = other DNA
agcaaattgcttgtctcaac

SEQ ID NO: 67943 - DNA, 20 bp, synthetic construct
  source 1..20: mol_type = other DNA
aagcaaattgcttgtctcaa

SEQ ID NO: 67944 - DNA, 20 bp, synthetic construct
  source 1..20: mol_type = other DNA
caagcaaattgcttgtctca

SEQ ID NO: 67945 - DNA, 20 bp, synthetic construct
  source 1..20: mol_type = other DNA
tcaagcaaattgcttgtctc

SEQ ID NO: 67946 - DNA, 20 bp, synthetic construct
  source 1..20: mol_type = other DNA
ttcaagcaaattgcttgtct

SEQ ID NO: 67947 - DNA, 20 bp, synthetic construct
  source 1..20: mol_type = other DNA
gttcaagcaaattgcttgtc

SEQ ID NO: 67948 - DNA, 20 bp, synthetic construct
  source 1..20: mol_type = other DNA
ggttcaagcaaattgcttgt

SEQ ID NO: 67949 - DNA, 20 bp, synthetic construct
  source 1..20: mol_type = other DNA
aggttcaagcaaattgcttg

SEQ ID NO: 67950 - DNA, 20 bp, synthetic construct
  source 1..20: mol_type = other DNA
caggttcaagcaaattgctt

SEQ ID NO: 67951 - DNA, 20 bp, synthetic construct
  source 1..20: mol_type = other DNA
tcaggttcaagcaaattgct

SEQ ID NO: 67952 - DNA, 20 bp, synthetic construct
  source 1..20: mol_type = other DNA
ctcaggttcaagcaaattgc

SEQ ID NO: 67953 - DNA, 20 bp, synthetic construct
  source 1..20: mol_type = other DNA
tctcaggttcaagcaaattg

SEQ ID NO: 67954 - DNA, 20 bp, synthetic construct
  source 1..20: mol_type = other DNA
ttctcaggttcaagcaaatt

SEQ ID NO: 67955 - DNA, 20 bp, synthetic construct
  source 1..20: mol_type = other DNA
cttctcaggttcaagcaaat

SEQ ID NO: 67956 - DNA, 20 bp, synthetic construct
  source 1..20: mol_type = other DNA
acttctcaggttcaagcaaa

SEQ ID NO: 67957 - DNA, 20 bp, synthetic construct
  source 1..20: mol_type = other DNA
tacttctcaggttcaagcaa

SEQ ID NO: 67958 - DNA, 20 bp, synthetic construct
  source 1..20: mol_type = other DNA
ctacttctcaggttcaagca

SEQ ID NO: 67959 - DNA, 20 bp, synthetic construct
  source 1..20: mol_type = other DNA
tctacttctcaggttcaagc

SEQ ID NO: 67960 - DNA, 20 bp, synthetic construct
  source 1..20: mol_type = other DNA
ctctacttctcaggttcaag

SEQ ID NO: 67961 - DNA, 20 bp, synthetic construct
  source 1..20: mol_type = other DNA
cctctacttctcaggttcaa

SEQ ID NO: 67962 - DNA, 20 bp, synthetic construct
  source 1..20: mol_type = other DNA
acctctacttctcaggttca

SEQ ID NO: 67963 - DNA, 20 bp, synthetic construct
  source 1..20: mol_type = other DNA
aacctctacttctcaggttc

SEQ ID NO: 67964 - DNA, 20 bp, synthetic construct
  source 1..20: mol_type = other DNA
aaacctctacttctcaggtt

SEQ ID NO: 67965 - DNA, 20 bp, synthetic construct
  source 1..20: mol_type = other DNA
gaaacctctacttctcaggt

SEQ ID NO: 67966 - DNA, 20 bp, synthetic construct
  source 1..20: mol_type = other DNA
ggaaacctctacttctcagg

SEQ ID NO: 67967 - DNA, 20 bp, synthetic construct
  source 1..20: mol_type = other DNA
tggaaacctctacttctcag

SEQ ID NO: 67968 - DNA, 20 bp, synthetic construct
  source 1..20: mol_type = other DNA
atggaaacctctacttctca

SEQ ID NO: 67969 - DNA, 20 bp, synthetic construct
  source 1..20: mol_type = other DNA
catggaaacctctacttctc

SEQ ID NO: 67970 - DNA, 20 bp, synthetic construct
  source 1..20: mol_type = other DNA
tcatggaaacctctacttct

SEQ ID NO: 67971 - DNA, 20 bp, synthetic construct
  source 1..20: mol_type = other DNA
ctcatggaaacctctacttc

SEQ ID NO: 67972 - DNA, 20 bp, synthetic construct
  source 1..20: mol_type = other DNA
gctcatggaaacctctactt

SEQ ID NO: 67973 - DNA, 20 bp, synthetic construct
  source 1..20: mol_type = other DNA
agctcatggaaacctctact

SEQ ID NO: 67974 - DNA, 20 bp, synthetic construct
  source 1..20: mol_type = other DNA
cagctcatggaaacctctac

SEQ ID NO: 67975 - DNA, 20 bp, synthetic construct
  source 1..20: mol_type = other DNA
tcagctcatggaaacctcta

SEQ ID NO: 67976 - DNA, 20 bp, synthetic construct
  source 1..20: mol_type = other DNA
ctcagctcatggaaacctct

SEQ ID NO: 67977 - DNA, 20 bp, synthetic construct
  source 1..20: mol_type = other DNA
tctcagctcatggaaacctc

SEQ ID NO: 67978 - DNA, 20 bp, synthetic construct
  source 1..20: mol_type = other DNA
atctcagctcatggaaacct

SEQ ID NO: 67979 - DNA, 20 bp, synthetic construct
  source 1..20: mol_type = other DNA
aatctcagctcatggaaacc

SEQ ID NO: 67980 - DNA, 20 bp, synthetic construct
  source 1..20: mol_type = other DNA
caatctcagctcatggaaac

SEQ ID NO: 67981 - DNA, 20 bp, synthetic construct
  source 1..20: mol_type = other DNA
acaatctcagctcatggaaa

SEQ ID NO: 67982 - DNA, 20 bp, synthetic construct
  source 1..20: mol_type = other DNA
cacaatctcagctcatggaa

SEQ ID NO: 67983 - DNA, 20 bp, synthetic construct
  source 1..20: mol_type = other DNA
acacaatctcagctcatgga

SEQ ID NO: 67984 - DNA, 20 bp, synthetic construct
  source 1..20: mol_type = other DNA
gacacaatctcagctcatgg

SEQ ID NO: 67985 - DNA, 20 bp, synthetic construct
  source 1..20: mol_type = other DNA
tgacacaatctcagctcatg

SEQ ID NO: 67986 - DNA, 20 bp, synthetic construct
  source 1..20: mol_type = other DNA
gtgacacaatctcagctcat

SEQ ID NO: 67987 - DNA, 20 bp, synthetic construct
  source 1..20: mol_type = other DNA
agtgacacaatctcagctca

SEQ ID NO: 67988 - DNA, 20 bp, synthetic construct
  source 1..20: mol_type = other DNA
cagtgacacaatctcagctc

SEQ ID NO: 67989 - DNA, 20 bp, synthetic construct
  source 1..20: mol_type = other DNA
gcagtgacacaatctcagct

SEQ ID NO: 67990 - DNA, 20 bp, synthetic construct
  source 1..20: mol_type = other DNA
tgcagtgacacaatctcagc

SEQ ID NO: 67991 - DNA, 20 bp, synthetic construct
  source 1..20: mol_type = other DNA
gtgcagtgacacaatctcag

SEQ ID NO: 67992 - DNA, 20 bp, synthetic construct
  source 1..20: mol_type = other DNA
agtgcagtgacacaatctca

SEQ ID NO: 67993 - DNA, 20 bp, synthetic construct
  source 1..20: mol_type = other DNA
gagtgcagtgacacaatctc

SEQ ID NO: 67994 - DNA, 20 bp, synthetic construct
  source 1..20: mol_type = other DNA
ggagtgcagtgacacaatct

SEQ ID NO: 67995 - DNA, 20 bp, synthetic construct
  source 1..20: mol_type = other DNA
tggagtgcagtgacacaatc

SEQ ID NO: 67996 - DNA, 20 bp, synthetic construct
  source 1..20: mol_type = other DNA
ctggagtgcagtgacacaat

SEQ ID NO: 67997 - DNA, 20 bp, synthetic construct
  source 1..20: mol_type = other DNA
gctggagtgcagtgacacaa

SEQ ID NO: 67998 - DNA, 20 bp, synthetic construct
  source 1..20: mol_type = other DNA
ggctggagtgcagtgacaca

SEQ ID NO: 67999 - DNA, 20 bp, synthetic construct
  source 1..20: mol_type = other DNA
aggctggagtgcagtgacac

SEQ ID NO: 68000 - DNA, 20 bp, synthetic construct
  source 1..20: mol_type = other DNA
caggctggagtgcagtgaca

SEQ ID NO: 68001 - DNA, 20 bp, synthetic construct
  source 1..20: mol_type = other DNA
gcaggctggagtgcagtgac

SEQ ID NO: 68002 - DNA, 20 bp, synthetic construct
  source 1..20: mol_type = other DNA
cgcaggctggagtgcagtga

SEQ ID NO: 68003 - DNA, 20 bp, synthetic construct
  source 1..20: mol_type = other DNA
gcgcaggctggagtgcagtg

SEQ ID NO: 68004 - DNA, 20 bp, synthetic construct
  source 1..20: mol_type = other DNA
tgcgcaggctggagtgcagt

SEQ ID NO: 68005 - DNA, 20 bp, synthetic construct
  source 1..20: mol_type = other DNA
ttgcgcaggctggagtgcag

SEQ ID NO: 68006 - DNA, 20 bp, synthetic construct
  source 1..20: mol_type = other DNA
gttgcgcaggctggagtgca

SEQ ID NO: 68007 - DNA, 20 bp, synthetic construct
  source 1..20: mol_type = other DNA
tgttgcgcaggctggagtgc

SEQ ID NO: 68008 - DNA, 20 bp, synthetic construct
  source 1..20: mol_type = other DNA
ctgttgcgcaggctggagtg

SEQ ID NO: 68009 - DNA, 20 bp, synthetic construct
  source 1..20: mol_type = other DNA
tctgttgcgcaggctggagt

SEQ ID NO: 68010 - DNA, 20 bp, synthetic construct
  source 1..20: mol_type = other DNA
ctctgttgcgcaggctggag

SEQ ID NO: 68011 - DNA, 20 bp, synthetic construct
  source 1..20: mol_type = other DNA
actctgttgcgcaggctgga

SEQ ID NO: 68012 - DNA, 20 bp, synthetic construct
  source 1..20: mol_type = other DNA
cactctgttgcgcaggctgg

SEQ ID NO: 68013 - DNA, 20 bp, synthetic construct
  source 1..20: mol_type = other DNA
acactctgttgcgcaggctg

SEQ ID NO: 68014 - DNA, 20 bp, synthetic construct
  source 1..20: mol_type = other DNA
cacactctgttgcgcaggct

SEQ ID NO: 68015 - DNA, 20 bp, synthetic construct
  source 1..20: mol_type = other DNA
tcacactctgttgcgcaggc

SEQ ID NO: 68016 - DNA, 20 bp, synthetic construct
  source 1..20: mol_type = other DNA
ctcacactctgttgcgcagg

SEQ ID NO: 68017 - DNA, 20 bp, synthetic construct
  source 1..20: mol_type = other DNA
tctcacactctgttgcgcag

SEQ ID NO: 68018 - DNA, 20 bp, synthetic construct
  source 1..20: mol_type = other DNA
ttctcacactctgttgcgca

SEQ ID NO: 68019 - DNA, 20 bp, synthetic construct
  source 1..20: mol_type = other DNA
cttctcacactctgttgcgc

SEQ ID NO: 68020 - DNA, 20 bp, synthetic construct
  source 1..20: mol_type = other DNA
tcttctcacactctgttgcg

SEQ ID NO: 68021 - DNA, 20 bp, synthetic construct
  source 1..20: mol_type = other DNA
ttcttctcacactctgttgc

SEQ ID NO: 68022 - DNA, 20 bp, synthetic construct
  source 1..20: mol_type = other DNA
tttcttctcacactctgttg

SEQ ID NO: 68023 - DNA, 20 bp, synthetic construct
  source 1..20: mol_type = other DNA
ttttcttctcacactctgtt

SEQ ID NO: 68024 - DNA, 20 bp, synthetic construct
  source 1..20: mol_type = other DNA
cttttcttctcacactctgt

SEQ ID NO: 68025 - DNA, 20 bp, synthetic construct
  source 1..20: mol_type = other DNA
tcttttcttctcacactctg

SEQ ID NO: 68026 - DNA, 20 bp, synthetic construct
  source 1..20: mol_type = other DNA
ttcttttcttctcacactct

SEQ ID NO: 68027 - DNA, 20 bp, synthetic construct
  source 1..20: mol_type = other DNA
tttcttttcttctcacactc

SEQ ID NO: 68028 - DNA, 20 bp, synthetic construct
  source 1..20: mol_type = other DNA
ttttcttttcttctcacact

SEQ ID NO: 68029 - DNA, 20 bp, synthetic construct
  source 1..20: mol_type = other DNA
tttttcttttcttctcacac

SEQ ID NO: 68030 - DNA, 20 bp, synthetic construct
  source 1..20: mol_type = other DNA
ttttttcttttcttctcaca

SEQ ID NO: 68031 - DNA, 20 bp, synthetic construct
  source 1..20: mol_type = other DNA
tttttttcttttcttctcac

SEQ ID NO: 68032 - DNA, 20 bp, synthetic construct
  source 1..20: mol_type = other DNA
ttttttttcttttcttctca

SEQ ID NO: 68033 - DNA, 20 bp, synthetic construct
  source 1..20: mol_type = other DNA
gttttttttcttttcttctc

SEQ ID NO: 68034 - DNA, 20 bp, synthetic construct
  source 1..20: mol_type = other DNA
agttttttttcttttcttct

SEQ ID NO: 68035 - DNA, 20 bp, synthetic construct
  source 1..20: mol_type = other DNA
cagttttttttcttttcttc

SEQ ID NO: 68036 - DNA, 20 bp, synthetic construct
  source 1..20: mol_type = other DNA
acagttttttttcttttctt

SEQ ID NO: 68037 - DNA, 20 bp, synthetic construct
  source 1..20: mol_type = other DNA
gacagttttttttcttttct

SEQ ID NO: 68038 - DNA, 20 bp, synthetic construct
  source 1..20: mol_type = other DNA
agacagttttttttcttttc

SEQ ID NO: 68039 - DNA, 20 bp, synthetic construct
  source 1..20: mol_type = other DNA
cagacagttttttttctttt

SEQ ID NO: 68040 - DNA, 20 bp, synthetic construct
  source 1..20: mol_type = other DNA
tcagacagttttttttcttt

SEQ ID NO: 68041 - DNA, 20 bp, synthetic construct
  source 1..20: mol_type = other DNA
ttcagacagttttttttctt

SEQ ID NO: 68042 - DNA, 20 bp, synthetic construct
  source 1..20: mol_type = other DNA
tttcagacagttttttttct

SEQ ID NO: 68043 - DNA, 20 bp, synthetic construct
  source 1..20: mol_type = other DNA
ttttcagacagttttttttc

SEQ ID NO: 68044 - DNA, 20 bp, synthetic construct
  source 1..20: mol_type = other DNA
cttttcagacagtttttttt

SEQ ID NO: 68045 - DNA, 20 bp, synthetic construct
  source 1..20: mol_type = other DNA
tcttttcagacagttttttt

SEQ ID NO: 68046 - DNA, 20 bp, synthetic construct
  source 1..20: mol_type = other DNA
ttcttttcagacagtttttt

SEQ ID NO: 68047 - DNA, 20 bp, synthetic construct
  source 1..20: mol_type = other DNA
tttcttttcagacagttttt

SEQ ID NO: 68048 - DNA, 20 bp, synthetic construct
  source 1..20: mol_type = other DNA
ttttcttttcagacagtttt

SEQ ID NO: 68049 - DNA, 20 bp, synthetic construct
  source 1..20: mol_type = other DNA
tttttcttttcagacagttt

SEQ ID NO: 68050 - DNA, 20 bp, synthetic construct
  source 1..20: mol_type = other DNA
ttttttcttttcagacagtt

SEQ ID NO: 68051 - DNA, 20 bp, synthetic construct
  source 1..20: mol_type = other DNA
tttttttcttttcagacagt

SEQ ID NO: 68052 - DNA, 20 bp, synthetic construct
  source 1..20: mol_type = other DNA
ttttttttcttttcagacag

SEQ ID NO: 68053 - DNA, 20 bp, synthetic construct
  source 1..20: mol_type = other DNA
tttttttttcttttcagaca

SEQ ID NO: 68054 - DNA, 20 bp, synthetic construct
  source 1..20: mol_type = other DNA
ttttttttttcttttcagac

SEQ ID NO: 68055 - DNA, 20 bp, synthetic construct
  source 1..20: mol_type = other DNA
tttttttttttcttttcaga

SEQ ID NO: 68056 - DNA, 20 bp, synthetic construct
  source 1..20: mol_type = other DNA
atttttttttttcttttcag

SEQ ID NO: 68057 - DNA, 20 bp, synthetic construct
  source 1..20: mol_type = other DNA
aatttttttttttcttttca

SEQ ID NO: 68058 - DNA, 20 bp, synthetic construct
  source 1..20: mol_type = other DNA
taatttttttttttcttttc

SEQ ID NO: 68059 - DNA, 20 bp, synthetic construct
  source 1..20: mol_type = other DNA
ataatttttttttttctttt

SEQ ID NO: 68060 - DNA, 20 bp, synthetic construct
  source 1..20: mol_type = other DNA
tataatttttttttttcttt

SEQ ID NO: 68061 - DNA, 20 bp, synthetic construct
  source 1..20: mol_type = other DNA
atataatttttttttttctt

SEQ ID NO: 68062 - DNA, 20 bp, synthetic construct
  source 1..20: mol_type = other DNA
catataatttttttttttct

SEQ ID NO: 68063 - DNA, 20 bp, synthetic construct
  source 1..20: mol_type = other DNA
ccatataatttttttttttc

SEQ ID NO: 68064 - DNA, 20 bp, synthetic construct
  source 1..20: mol_type = other DNA
cccatataattttttttttt

SEQ ID NO: 68065 - DNA, 20 bp, synthetic construct
  source 1..20: mol_type = other DNA
tcccatataatttttttttt

SEQ ID NO: 68066 - DNA, 20 bp, synthetic construct
  source 1..20: mol_type = other DNA
ttcccatataattttttttt

SEQ ID NO: 68067 - DNA, 20 bp, synthetic construct
  source 1..20: mol_type = other DNA
tttcccatataatttttttt

SEQ ID NO: 68068 - DNA, 20 bp, synthetic construct
  source 1..20: mol_type = other DNA
atttcccatataattttttt

SEQ ID NO: 68069 - DNA, 20 bp, synthetic construct
  source 1..20: mol_type = other DNA
gatttcccatataatttttt

SEQ ID NO: 68070 - DNA, 20 bp, synthetic construct
  source 1..20: mol_type = other DNA
tgatttcccatataattttt

SEQ ID NO: 68071 - DNA, 20 bp, synthetic construct
  source 1..20: mol_type = other DNA
ttgatttcccatataatttt

SEQ ID NO: 68072 - DNA, 20 bp, synthetic construct
  source 1..20: mol_type = other DNA
tttgatttcccatataattt

SEQ ID NO: 68073 - DNA, 20 bp, synthetic construct
  source 1..20: mol_type = other DNA
ttttgatttcccatataatt

SEQ ID NO: 68074 - DNA, 20 bp, synthetic construct
  source 1..20: mol_type = other DNA
cttttgatttcccatataat

SEQ ID NO: 68075 - DNA, 20 bp, synthetic construct
  source 1..20: mol_type = other DNA
gcttttgatttcccatataa

SEQ ID NO: 68076 - DNA, 20 bp, synthetic construct
  source 1..20: mol_type = other DNA
tgcttttgatttcccatata

SEQ ID NO: 68077 - DNA, 20 bp, synthetic construct
  source 1..20: mol_type = other DNA
atgcttttgatttcccatat

SEQ ID NO: 68078 - DNA, 20 bp, synthetic construct
  source 1..20: mol_type = other DNA
gatgcttttgatttcccata

SEQ ID NO: 68079 - DNA, 20 bp, synthetic construct
  source 1..20: mol_type = other DNA
agatgcttttgatttcccat

SEQ ID NO: 68080 - DNA, 20 bp, synthetic construct
  source 1..20: mol_type = other DNA
tagatgcttttgatttccca

SEQ ID NO: 68081 - DNA, 20 bp, synthetic construct
  source 1..20: mol_type = other DNA
atagatgcttttgatttccc

SEQ ID NO: 68082 - DNA, 20 bp, synthetic construct
  source 1..20: mol_type = other DNA
tatagatgcttttgatttcc

SEQ ID NO: 68083 - DNA, 20 bp, synthetic construct
  source 1..20: mol_type = other DNA
gtatagatgcttttgatttc

SEQ ID NO: 68084 - DNA, 20 bp, synthetic construct
  source 1..20: mol_type = other DNA
agtatagatgcttttgattt

SEQ ID NO: 68085 - DNA, 20 bp, synthetic construct
  source 1..20: mol_type = other DNA
cagtatagatgcttttgatt

SEQ ID NO: 68086 - DNA, 20 bp, synthetic construct
  source 1..20: mol_type = other DNA
tcagtatagatgcttttgat

SEQ ID NO: 68087 - DNA, 20 bp, synthetic construct
  source 1..20: mol_type = other DNA
ttcagtatagatgcttttga

SEQ ID NO: 68088 - DNA, 20 bp, synthetic construct
  source 1..20: mol_type = other DNA
gttcagtatagatgcttttg

SEQ ID NO: 68089 - DNA, 20 bp, synthetic construct
  source 1..20: mol_type = other DNA
tgttcagtatagatgctttt

SEQ ID NO: 68090 - DNA, 20 bp, synthetic construct
  source 1..20: mol_type = other DNA
atgttcagtatagatgcttt

SEQ ID NO: 68091 - DNA, 20 bp, synthetic construct
  source 1..20: mol_type = other DNA
catgttcagtatagatgctt

SEQ ID NO: 68092 - DNA, 20 bp, synthetic construct
  source 1..20: mol_type = other DNA
acatgttcagtatagatgct

SEQ ID NO: 68093 - DNA, 20 bp, synthetic construct
  source 1..20: mol_type = other DNA
tacatgttcagtatagatgc

SEQ ID NO: 68094 - DNA, 20 bp, synthetic construct
  source 1..20: mol_type = other DNA
gtacatgttcagtatagatg

SEQ ID NO: 68095 - DNA, 20 bp, synthetic construct
  source 1..20: mol_type = other DNA
tgtacatgttcagtatagat

SEQ ID NO: 68096 - DNA, 20 bp, synthetic construct
  source 1..20: mol_type = other DNA
ctgtacatgttcagtataga

SEQ ID NO: 68097 - DNA, 20 bp, synthetic construct
  source 1..20: mol_type = other DNA
tctgtacatgttcagtatag

SEQ ID NO: 68098 - DNA, 20 bp, synthetic construct
  source 1..20: mol_type = other DNA
gtctgtacatgttcagtata

SEQ ID NO: 68099 - DNA, 20 bp, synthetic construct
  source 1..20: mol_type = other DNA
agtctgtacatgttcagtat

SEQ ID NO: 68100 - DNA, 20 bp, synthetic construct
  source 1..20: mol_type = other DNA
aagtctgtacatgttcagta

SEQ ID NO: 68101 - DNA, 20 bp, synthetic construct
  source 1..20: mol_type = other DNA
aaagtctgtacatgttcagt

SEQ ID NO: 68102 - DNA, 20 bp, synthetic construct
  source 1..20: mol_type = other DNA
aaaagtctgtacatgttcag

SEQ ID NO: 68103 - DNA, 20 bp, synthetic construct
  source 1..20: mol_type = other DNA
aaaaagtctgtacatgttca

SEQ ID NO: 68104 - DNA, 20 bp, synthetic construct
  source 1..20: mol_type = other DNA
aaaaaagtctgtacatgttc

SEQ ID NO: 68105 - DNA, 20 bp, synthetic construct
  source 1..20: mol_type = other DNA
aaaaaaagtctgtacatgtt

SEQ ID NO: 68106 - DNA, 20 bp, synthetic construct
  source 1..20: mol_type = other DNA
gaaaaaaagtctgtacatgt

SEQ ID NO: 68107 - DNA, 20 bp, synthetic construct
  source 1..20: mol_type = other DNA
agaaaaaaagtctgtacatg

SEQ ID NO: 68108 - DNA, 20 bp, synthetic construct
  source 1..20: mol_type = other DNA
aagaaaaaaagtctgtacat

SEQ ID NO: 68109 - DNA, 20 bp, synthetic construct
  source 1..20: mol_type = other DNA
caagaaaaaaagtctgtaca

SEQ ID NO: 68110 - DNA, 20 bp, synthetic construct
  source 1..20: mol_type = other DNA
acaagaaaaaaagtctgtac

SEQ ID NO: 68111 - DNA, 20 bp, synthetic construct
  source 1..20: mol_type = other DNA
gacaagaaaaaaagtctgta

SEQ ID NO: 68112 - DNA, 20 bp, synthetic construct
  source 1..20: mol_type = other DNA
tgacaagaaaaaaagtctgt

SEQ ID NO: 68113 - DNA, 20 bp, synthetic construct
  source 1..20: mol_type = other DNA
atgacaagaaaaaaagtctg

SEQ ID NO: 68114 - DNA, 20 bp, synthetic construct
  source 1..20: mol_type = other DNA
aatgacaagaaaaaaagtct

SEQ ID NO: 68115 - DNA, 20 bp, synthetic construct
  source 1..20: mol_type = other DNA
taatgacaagaaaaaaagtc

SEQ ID NO: 68116 - DNA, 20 bp, synthetic construct
  source 1..20: mol_type = other DNA
ataatgacaagaaaaaaagt

SEQ ID NO: 68117 - DNA, 20 bp, synthetic construct
  source 1..20: mol_type = other DNA
aataatgacaagaaaaaaag

SEQ ID NO: 68118 - DNA, 20 bp, synthetic construct
  source 1..20: mol_type = other DNA
gaataatgacaagaaaaaaa

SEQ ID NO: 68119 - DNA, 20 bp, synthetic construct
  source 1..20: mol_type = other DNA
ggaataatgacaagaaaaaa

SEQ ID NO: 68120 - DNA, 20 bp, synthetic construct
  source 1..20: mol_type = other DNA
aggaataatgacaagaaaaa

SEQ ID NO: 68121 - DNA, 20 bp, synthetic construct
  source 1..20: mol_type = other DNA
aaggaataatgacaagaaaa

SEQ ID NO: 68122 - DNA, 20 bp, synthetic construct
  source 1..20: mol_type = other DNA
taaggaataatgacaagaaa

SEQ ID NO: 68123 - DNA, 20 bp, synthetic construct
  source 1..20: mol_type = other DNA
ttaaggaataatgacaagaa

SEQ ID NO: 68124 - DNA, 20 bp, synthetic construct
  source 1..20: mol_type = other DNA
cttaaggaataatgacaaga

SEQ ID NO: 68125 - DNA, 20 bp, synthetic construct
  source 1..20: mol_type = other DNA
gcttaaggaataatgacaag

SEQ ID NO: 68126 - DNA, 20 bp, synthetic construct
  source 1..20: mol_type = other DNA
tgcttaaggaataatgacaa

SEQ ID NO: 68127 - DNA, 20 bp, synthetic construct
  source 1..20: mol_type = other DNA
ctgcttaaggaataatgaca

SEQ ID NO: 68128 - DNA, 20 bp, synthetic construct
  source 1..20: mol_type = other DNA
actgcttaaggaataatgac

SEQ ID NO: 68129 - DNA, 20 bp, synthetic construct
  source 1..20: mol_type = other DNA
tactgcttaaggaataatga

SEQ ID NO: 68130 - DNA, 20 bp, synthetic construct
  source 1..20: mol_type = other DNA
gtactgcttaaggaataatg

SEQ ID NO: 68131 - DNA, 20 bp, synthetic construct
  source 1..20: mol_type = other DNA
ggtactgcttaaggaataat

SEQ ID NO: 68132 - DNA, 20 bp, synthetic construct
  source 1..20: mol_type = other DNA
tggtactgcttaaggaataa

SEQ ID NO: 68133 - DNA, 20 bp, synthetic construct
  source 1..20: mol_type = other DNA
gtggtactgcttaaggaata

SEQ ID NO: 68134 - DNA, 20 bp, synthetic construct
  source 1..20: mol_type = other DNA
tgtggtactgcttaaggaat

SEQ ID NO: 68135 - DNA, 20 bp, synthetic construct
  source 1..20: mol_type = other DNA
ttgtggtactgcttaaggaa

SEQ ID NO: 68136 - DNA, 20 bp, synthetic construct
  source 1..20: mol_type = other DNA
gttgtggtactgcttaagga

SEQ ID NO: 68137 - DNA, 20 bp, synthetic construct
  source 1..20: mol_type = other DNA
agttgtggtactgcttaagg

SEQ ID NO: 68138 - DNA, 20 bp, synthetic construct
  source 1..20: mol_type = other DNA
tagttgtggtactgcttaag

SEQ ID NO: 68139 - DNA, 20 bp, synthetic construct
  source 1..20: mol_type = other DNA
atagttgtggtactgcttaa

SEQ ID NO: 68140 - DNA, 20 bp, synthetic construct
  source 1..20: mol_type = other DNA
aatagttgtggtactgctta

SEQ ID NO: 68141 - DNA, 20 bp, synthetic construct
  source 1..20: mol_type = other DNA
aaatagttgtggtactgctt

SEQ ID NO: 68142 - DNA, 20 bp, synthetic construct
  source 1..20: mol_type = other DNA
gaaatagttgtggtactgct

SEQ ID NO: 68143 - DNA, 20 bp, synthetic construct
  source 1..20: mol_type = other DNA
ggaaatagttgtggtactgc

SEQ ID NO: 68144 - DNA, 20 bp, synthetic construct
  source 1..20: mol_type = other DNA
cggaaatagttgtggtactg

SEQ ID NO: 68145 - DNA, 20 bp, synthetic construct
  source 1..20: mol_type = other DNA
acggaaatagttgtggtact

SEQ ID NO: 68146 - DNA, 20 bp, synthetic construct
  source 1..20: mol_type = other DNA
tacggaaatagttgtggtac

SEQ ID NO: 68147 - DNA, 20 bp, synthetic construct
  source 1..20: mol_type = other DNA
ctacggaaatagttgtggta

SEQ ID NO: 68148 - DNA, 20 bp, synthetic construct
  source 1..20: mol_type = other DNA
gctacggaaatagttgtggt

SEQ ID NO: 68149 - DNA, 20 bp, synthetic construct
  source 1..20: mol_type = other DNA
tgctacggaaatagttgtgg

SEQ ID NO: 68150 - DNA, 20 bp, synthetic construct
  source 1..20: mol_type = other DNA
atgctacggaaatagttgtg

SEQ ID NO: 68151 - DNA, 20 bp, synthetic construct
  source 1..20: mol_type = other DNA
aatgctacggaaatagttgt

SEQ ID NO: 68152 - DNA, 20 bp, synthetic construct
  source 1..20: mol_type = other DNA
aaatgctacggaaatagttg

SEQ ID NO: 68153 - DNA, 20 bp, synthetic construct
  source 1..20: mol_type = other DNA
taaatgctacggaaatagtt

SEQ ID NO: 68154 - DNA, 20 bp, synthetic construct
  source 1..20: mol_type = other DNA
gtaaatgctacggaaatagt

SEQ ID NO: 68155 - DNA, 20 bp, synthetic construct
  source 1..20: mol_type = other DNA
agtaaatgctacggaaatag

SEQ ID NO: 68156 - DNA, 20 bp, synthetic construct
  source 1..20: mol_type = other DNA
aagtaaatgctacggaaata

SEQ ID NO: 68157 - DNA, 20 bp, synthetic construct
  source 1..20: mol_type = other DNA
aaagtaaatgctacggaaat

SEQ ID NO: 68158 - DNA, 20 bp, synthetic construct
  source 1..20: mol_type = other DNA
caaagtaaatgctacggaaa

SEQ ID NO: 68159 - DNA, 20 bp, synthetic construct
  source 1..20: mol_type = other DNA
acaaagtaaatgctacggaa

SEQ ID NO: 68160 - DNA, 20 bp, synthetic construct
  source 1..20: mol_type = other DNA
tacaaagtaaatgctacgga

SEQ ID NO: 68161 - DNA, 20 bp, synthetic construct
  source 1..20: mol_type = other DNA
atacaaagtaaatgctacgg

SEQ ID NO: 68162 - DNA, 20 bp, synthetic construct
  source 1..20: mol_type = other DNA
aatacaaagtaaatgctacg

SEQ ID NO: 68163 - DNA, 20 bp, synthetic construct
  source 1..20: mol_type = other DNA
taatacaaagtaaatgctac

SEQ ID NO: 68164 - DNA, 20 bp, synthetic construct
  source 1..20: mol_type = other DNA
ctaatacaaagtaaatgcta

SEQ ID NO: 68165 - DNA, 20 bp, synthetic construct
  source 1..20: mol_type = other DNA
cctaatacaaagtaaatgct

SEQ ID NO: 68166 - DNA, 20 bp, synthetic construct
  source 1..20: mol_type = other DNA
acctaatacaaagtaaatgc

SEQ ID NO: 68167 - DNA, 20 bp, synthetic construct
  source 1..20: mol_type = other DNA
tacctaatacaaagtaaatg

SEQ ID NO: 68168 - DNA, 20 bp, synthetic construct
  source 1..20: mol_type = other DNA
atacctaatacaaagtaaat

SEQ ID NO: 68169 - DNA, 20 bp, synthetic construct
  source 1..20: mol_type = other DNA
aatacctaatacaaagtaaa

SEQ ID NO: 68170 - DNA, 20 bp, synthetic construct
  source 1..20: mol_type = other DNA
taatacctaatacaaagtaa

SEQ ID NO: 68171 - DNA, 20 bp, synthetic construct
  source 1..20: mol_type = other DNA
ataatacctaatacaaagta

SEQ ID NO: 68172 - DNA, 20 bp, synthetic construct
  source 1..20: mol_type = other DNA
tataatacctaatacaaagt

SEQ ID NO: 68173 - DNA, 20 bp, synthetic construct
  source 1..20: mol_type = other DNA
ctataatacctaatacaaag

SEQ ID NO: 68174 - DNA, 20 bp, synthetic construct
  source 1..20: mol_type = other DNA
cctataatacctaatacaaa

SEQ ID NO: 68175 - DNA, 20 bp, synthetic construct
  source 1..20: mol_type = other DNA
acctataatacctaatacaa

SEQ ID NO: 68176 - DNA, 20 bp, synthetic construct
  source 1..20: mol_type = other DNA
tacctataatacctaataca

SEQ ID NO: 68177 - DNA, 20 bp, synthetic construct
  source 1..20: mol_type = other DNA
ttacctataatacctaatac

SEQ ID NO: 68178 - DNA, 20 bp, synthetic construct
  source 1..20: mol_type = other DNA
gttacctataatacctaata

SEQ ID NO: 68179 - DNA, 20 bp, synthetic construct
  source 1..20: mol_type = other DNA
ggttacctataatacctaat

SEQ ID NO: 68180 - DNA, 20 bp, synthetic construct
  source 1..20: mol_type = other DNA
aggttacctataatacctaa

SEQ ID NO: 68181 - DNA, 20 bp, synthetic construct
  source 1..20: mol_type = other DNA
taggttacctataataccta

SEQ ID NO: 68182 - DNA, 20 bp, synthetic construct
  source 1..20: mol_type = other DNA
ctaggttacctataatacct

SEQ ID NO: 68183 - DNA, 20 bp, synthetic construct
  source 1..20: mol_type = other DNA
tctaggttacctataatacc

SEQ ID NO: 68184 - DNA, 20 bp, synthetic construct
  source 1..20: mol_type = other DNA
ctctaggttacctataatac

SEQ ID NO: 68185 - DNA, 20 bp, synthetic construct
  source 1..20: mol_type = other DNA
cctctaggttacctataata

SEQ ID NO: 68186 - DNA, 20 bp, synthetic construct
  source 1..20: mol_type = other DNA
acctctaggttacctataat

SEQ ID NO: 68187 - DNA, 20 bp, synthetic construct
  source 1..20: mol_type = other DNA
aacctctaggttacctataa

SEQ ID NO: 68188 - DNA, 20 bp, synthetic construct
  source 1..20: mol_type = other DNA
aaacctctaggttacctata

SEQ ID NO: 68189 - DNA, 20 bp, synthetic construct
  source 1..20: mol_type = other DNA
taaacctctaggttacctat

SEQ ID NO: 68190 - DNA, 20 bp, synthetic construct
  source 1..20: mol_type = other DNA
ttaaacctctaggttaccta

SEQ ID NO: 68191 - DNA, 20 bp, synthetic construct
  source 1..20: mol_type = other DNA
tttaaacctctaggttacct

SEQ ID NO: 68192 - DNA, 20 bp, synthetic construct
  source 1..20: mol_type = other DNA
ctttaaacctctaggttacc

SEQ ID NO: 68193 - DNA, 20 bp, synthetic construct
  source 1..20: mol_type = other DNA
actttaaacctctaggttac

SEQ ID NO: 68194 - DNA, 20 bp, synthetic construct
  source 1..20: mol_type = other DNA
tactttaaacctctaggtta

SEQ ID NO: 68195 - DNA, 20 bp, synthetic construct
  source 1..20: mol_type = other DNA
atactttaaacctctaggtt

SEQ ID NO: 68196 - DNA, 20 bp, synthetic construct
  source 1..20: mol_type = other DNA
catactttaaacctctaggt

SEQ ID NO: 68197 - DNA, 20 bp, synthetic construct
  source 1..20: mol_type = other DNA
gcatactttaaacctctagg

SEQ ID NO: 68198 - DNA, 20 bp, synthetic construct
  source 1..20: mol_type = other DNA
cgcatactttaaacctctag

SEQ ID NO: 68199 - DNA, 20 bp, synthetic construct
  source 1..20: mol_type = other DNA
tcgcatactttaaacctcta

SEQ ID NO: 68200 - DNA, 20 bp, synthetic construct
  source 1..20: mol_type = other DNA
ctcgcatactttaaacctct

SEQ ID NO: 68201 - DNA, 20 bp, synthetic construct
  source 1..20: mol_type = other DNA
tctcgcatactttaaacctc

SEQ ID NO: 68202 - DNA, 20 bp, synthetic construct
  source 1..20: mol_type = other DNA
ctctcgcatactttaaacct

SEQ ID NO: 68203 - DNA, 20 bp, synthetic construct
  source 1..20: mol_type = other DNA
actctcgcatactttaaacc

SEQ ID NO: 68204 - DNA, 20 bp, synthetic construct
  source 1..20: mol_type = other DNA
tactctcgcatactttaaac

SEQ ID NO: 68205 - DNA, 20 bp, synthetic construct
  source 1..20: mol_type = other DNA
atactctcgcatactttaaa

SEQ ID NO: 68206 - DNA, 20 bp, synthetic construct
  source 1..20: mol_type = other DNA
catactctcgcatactttaa

SEQ ID NO: 68207 - DNA, 20 bp, synthetic construct
  source 1..20: mol_type = other DNA
gcatactctcgcatacttta

SEQ ID NO: 68208 - DNA, 20 bp, synthetic construct
  source 1..20: mol_type = other DNA
tgcatactctcgcatacttt

SEQ ID NO: 68209 - DNA, 20 bp, synthetic construct
  source 1..20: mol_type = other DNA
ttgcatactctcgcatactt

SEQ ID NO: 68210 - DNA, 20 bp, synthetic construct
  source 1..20: mol_type = other DNA
tttgcatactctcgcatact

SEQ ID NO: 68211 - DNA, 20 bp, synthetic construct
  source 1..20: mol_type = other DNA
atttgcatactctcgcatac

SEQ ID NO: 68212 - DNA, 20 bp, synthetic construct
  source 1..20: mol_type = other DNA
tatttgcatactctcgcata

SEQ ID NO: 68213 - DNA, 20 bp, synthetic construct
  source 1..20: mol_type = other DNA
gtatttgcatactctcgcat

SEQ ID NO: 68214 - DNA, 20 bp, synthetic construct
  source 1..20: mol_type = other DNA
agtatttgcatactctcgca

SEQ ID NO: 68215 - DNA, 20 bp, synthetic construct
  source 1..20: mol_type = other DNA
tagtatttgcatactctcgc

SEQ ID NO: 68216 - DNA, 20 bp, synthetic construct
  source 1..20: mol_type = other DNA
gtagtatttgcatactctcg

SEQ ID NO: 68217 - DNA, 20 bp, synthetic construct
  source 1..20: mol_type = other DNA
tgtagtatttgcatactctc

SEQ ID NO: 68218 - DNA, 20 bp, synthetic construct
  source 1..20: mol_type = other DNA
gtgtagtatttgcatactct

SEQ ID NO: 68219 - DNA, 20 bp, synthetic construct
  source 1..20: mol_type = other DNA
ggtgtagtatttgcatactc

SEQ ID NO: 68220 - DNA, 20 bp, synthetic construct
  source 1..20: mol_type = other DNA
tggtgtagtatttgcatact

SEQ ID NO: 68221 - DNA, 20 bp, synthetic construct
  source 1..20: mol_type = other DNA
gtggtgtagtatttgcatac

SEQ ID NO: 68222 - DNA, 20 bp, synthetic construct
  source 1..20: mol_type = other DNA
agtggtgtagtatttgcata

SEQ ID NO: 68223 - DNA, 20 bp, synthetic construct
  source 1..20: mol_type = other DNA
aagtggtgtagtatttgcat

SEQ ID NO: 68224 - DNA, 20 bp, synthetic construct
  source 1..20: mol_type = other DNA
aaagtggtgtagtatttgca

SEQ ID NO: 68225 - DNA, 20 bp, synthetic construct
  source 1..20: mol_type = other DNA
caaagtggtgtagtatttgc

SEQ ID NO: 68226 - DNA, 20 bp, synthetic construct
  source 1..20: mol_type = other DNA
acaaagtggtgtagtatttg

SEQ ID NO: 68227 - DNA, 20 bp, synthetic construct
  source 1..20: mol_type = other DNA
tacaaagtggtgtagtattt

SEQ ID NO: 68228 - DNA, 20 bp, synthetic construct
  source 1..20: mol_type = other DNA
atacaaagtggtgtagtatt

SEQ ID NO: 68229 - DNA, 20 bp, synthetic construct
  source 1..20: mol_type = other DNA
gatacaaagtggtgtagtat

SEQ ID NO: 68230 - DNA, 20 bp, synthetic construct
  source 1..20: mol_type = other DNA
tgatacaaagtggtgtagta

SEQ ID NO: 68231 - DNA, 20 bp, synthetic construct
  source 1..20: mol_type = other DNA
ctgatacaaagtggtgtagt

SEQ ID NO: 68232 - DNA, 20 bp, synthetic construct
  source 1..20: mol_type = other DNA
cctgatacaaagtggtgtag

SEQ ID NO: 68233 - DNA, 20 bp, synthetic construct
  source 1..20: mol_type = other DNA
ccctgatacaaagtggtgta

SEQ ID NO: 68234 - DNA, 20 bp, synthetic construct
  source 1..20: mol_type = other DNA
tccctgatacaaagtggtgt

SEQ ID NO: 68235 - DNA, 20 bp, synthetic construct
  source 1..20: mol_type = other DNA
gtccctgatacaaagtggtg

SEQ ID NO: 68236 - DNA, 20 bp, synthetic construct
  source 1..20: mol_type = other DNA
agtccctgatacaaagtggt

SEQ ID NO: 68237 - DNA, 20 bp, synthetic construct
  source 1..20: mol_type = other DNA
aagtccctgatacaaagtgg

SEQ ID NO: 68238 - DNA, 20 bp, synthetic construct
  source 1..20: mol_type = other DNA
taagtccctgatacaaagtg

SEQ ID NO: 68239 - DNA, 20 bp, synthetic construct
  source 1..20: mol_type = other DNA
ttaagtccctgatacaaagt

SEQ ID NO: 68240 - DNA, 20 bp, synthetic construct
  source 1..20: mol_type = other DNA
cttaagtccctgatacaaag

SEQ ID NO: 68241 - DNA, 20 bp, synthetic construct
  source 1..20: mol_type = other DNA
gcttaagtccctgatacaaa

SEQ ID NO: 68242 - DNA, 20 bp, synthetic construct
  source 1..20: mol_type = other DNA
tgcttaagtccctgatacaa

SEQ ID NO: 68243 - DNA, 20 bp, synthetic construct
  source 1..20: mol_type = other DNA
atgcttaagtccctgataca

SEQ ID NO: 68244 - DNA, 20 bp, synthetic construct
  source 1..20: mol_type = other DNA
gatgcttaagtccctgatac

SEQ ID NO: 68245 - DNA, 20 bp, synthetic construct
  source 1..20: mol_type = other DNA
ggatgcttaagtccctgata

SEQ ID NO: 68246 - DNA, 20 bp, synthetic construct
  source 1..20: mol_type = other DNA
gggatgcttaagtccctgat

SEQ ID NO: 68247 - DNA, 20 bp, synthetic construct
  source 1..20: mol_type = other DNA
agggatgcttaagtccctga

SEQ ID NO: 68248 - DNA, 20 bp, synthetic construct
  source 1..20: mol_type = other DNA
cagggatgcttaagtccctg

SEQ ID NO: 68249 - DNA, 20 bp, synthetic construct
  source 1..20: mol_type = other DNA
ccagggatgcttaagtccct

SEQ ID NO: 68250 - DNA, 20 bp, synthetic construct
  source 1..20: mol_type = other DNA
tccagggatgcttaagtccc

SEQ ID NO: 68251 - DNA, 20 bp, synthetic construct
  source 1..20: mol_type = other DNA
atccagggatgcttaagtcc

SEQ ID NO: 68252 - DNA, 20 bp, synthetic construct
  source 1..20: mol_type = other DNA
aatccagggatgcttaagtc

SEQ ID NO: 68253 - DNA, 20 bp, synthetic construct
  source 1..20: mol_type = other DNA
aaatccagggatgcttaagt

SEQ ID NO: 68254 - DNA, 20 bp, synthetic construct
  source 1..20: mol_type = other DNA
aaaatccagggatgcttaag

SEQ ID NO: 68255 - DNA, 20 bp, synthetic construct
  source 1..20: mol_type = other DNA
caaaatccagggatgcttaa

SEQ ID NO: 68256 - DNA, 20 bp, synthetic construct
  source 1..20: mol_type = other DNA
ccaaaatccagggatgctta

SEQ ID NO: 68257 - DNA, 20 bp, synthetic construct
  source 1..20: mol_type = other DNA
accaaaatccagggatgctt

SEQ ID NO: 68258 - DNA, 20 bp, synthetic construct
  source 1..20: mol_type = other DNA
taccaaaatccagggatgct

SEQ ID NO: 68259 - DNA, 20 bp, synthetic construct
  source 1..20: mol_type = other DNA
ataccaaaatccagggatgc

SEQ ID NO: 68260 - DNA, 20 bp, synthetic construct
  source 1..20: mol_type = other DNA
gataccaaaatccagggatg

SEQ ID NO: 68261 - DNA, 20 bp, synthetic construct
  source 1..20: mol_type = other DNA
ggataccaaaatccagggat

SEQ ID NO: 68262 - DNA, 20 bp, synthetic construct
  source 1..20: mol_type = other DNA
gggataccaaaatccaggga

SEQ ID NO: 68263 - DNA, 20 bp, synthetic construct
  source 1..20: mol_type = other DNA
agggataccaaaatccaggg

SEQ ID NO: 68264 - DNA, 20 bp, synthetic construct
  source 1..20: mol_type = other DNA
tagggataccaaaatccagg

SEQ ID NO: 68265 - DNA, 20 bp, synthetic construct
  source 1..20: mol_type = other DNA
ctagggataccaaaatccag

SEQ ID NO: 68266 - DNA, 20 bp, synthetic construct
  source 1..20: mol_type = other DNA
cctagggataccaaaatcca

SEQ ID NO: 68267 - DNA, 20 bp, synthetic construct
  source 1..20: mol_type = other DNA
ccctagggataccaaaatcc

SEQ ID NO: 68268 - DNA, 20 bp, synthetic construct
  source 1..20: mol_type = other DNA
cccctagggataccaaaatc

SEQ ID NO: 68269 - DNA, 20 bp, synthetic construct
  source 1..20: mol_type = other DNA
ccccctagggataccaaaat

SEQ ID NO: 68270 - DNA, 20 bp, synthetic construct
  source 1..20: mol_type = other DNA
accccctagggataccaaaa

SEQ ID NO: 68271 - DNA, 20 bp, synthetic construct
  source 1..20: mol_type = other DNA
taccccctagggataccaaa

SEQ ID NO: 68272 - DNA, 20 bp, synthetic construct
  source 1..20: mol_type = other DNA
ataccccctagggataccaa

SEQ ID NO: 68273 - DNA, 20 bp, synthetic construct
  source 1..20: mol_type = other DNA
aataccccctagggatacca

SEQ ID NO: 68274 - DNA, 20 bp, synthetic construct
  source 1..20: mol_type = other DNA
taataccccctagggatacc

SEQ ID NO: 68275 - DNA, 20 bp, synthetic construct
  source 1..20: mol_type = other DNA
ctaataccccctagggatac

SEQ ID NO: 68276 - DNA, 20 bp, synthetic construct
  source 1..20: mol_type = other DNA
tctaataccccctagggata

SEQ ID NO: 68277 - DNA, 20 bp, synthetic construct
  source 1..20: mol_type = other DNA
ttctaataccccctagggat

SEQ ID NO: 68278 - DNA, 20 bp, synthetic construct
  source 1..20: mol_type = other DNA
gttctaataccccctaggga

SEQ ID NO: 68279 - DNA, 20 bp, synthetic construct
  source 1..20: mol_type = other DNA
ggttctaataccccctaggg

SEQ ID NO: 68280 - DNA, 20 bp, synthetic construct
  source 1..20: mol_type = other DNA
tggttctaataccccctagg

SEQ ID NO: 68281 - DNA, 20 bp, synthetic construct
  source 1..20: mol_type = other DNA
ttggttctaataccccctag

SEQ ID NO: 68282 - DNA, 20 bp, synthetic construct
  source 1..20: mol_type = other DNA
attggttctaatacccccta

SEQ ID NO: 68283 - DNA, 20 bp, synthetic construct
  source 1..20: mol_type = other DNA
gattggttctaataccccct

SEQ ID NO: 68284 - DNA, 20 bp, synthetic construct
  source 1..20: mol_type = other DNA
ggattggttctaataccccc

SEQ ID NO: 68285 - DNA, 20 bp, synthetic construct
  source 1..20: mol_type = other DNA
gggattggttctaatacccc

SEQ ID NO: 68286 - DNA, 20 bp, synthetic construct
  source 1..20: mol_type = other DNA
ggggattggttctaataccc

SEQ ID NO: 68287 - DNA, 20 bp, synthetic construct
  source 1..20: mol_type = other DNA
gggggattggttctaatacc

SEQ ID NO: 68288 - DNA, 20 bp, synthetic construct
  source 1..20: mol_type = other DNA
tgggggattggttctaatac

SEQ ID NO: 68289 - DNA, 20 bp, synthetic construct
  source 1..20: mol_type = other DNA
atgggggattggttctaata

SEQ ID NO: 68290 - DNA, 20 bp, synthetic construct
  source 1..20: mol_type = other DNA
tatgggggattggttctaat

SEQ ID NO: 68291 - DNA, 20 bp, synthetic construct
  source 1..20: mol_type = other DNA
ctatgggggattggttctaa

SEQ ID NO: 68292 - DNA, 20 bp, synthetic construct
  source 1..20: mol_type = other DNA
tctatgggggattggttcta

SEQ ID NO: 68293 - DNA, 20 bp, synthetic construct
  source 1..20: mol_type = other DNA
atctatgggggattggttct

SEQ ID NO: 68294 - DNA, 20 bp, synthetic construct
  source 1..20: mol_type = other DNA
catctatgggggattggttc

SEQ ID NO: 68295 - DNA, 20 bp, synthetic construct
  source 1..20: mol_type = other DNA
gcatctatgggggattggtt

SEQ ID NO: 68296 - DNA, 20 bp, synthetic construct
  source 1..20: mol_type = other DNA
agcatctatgggggattggt

SEQ ID NO: 68297 - DNA, 20 bp, synthetic construct
  source 1..20: mol_type = other DNA
cagcatctatgggggattgg

SEQ ID NO: 68298 - DNA, 20 bp, synthetic construct
  source 1..20: mol_type = other DNA
tcagcatctatgggggattg

SEQ ID NO: 68299 - DNA, 20 bp, synthetic construct
  source 1..20: mol_type = other DNA
ttcagcatctatgggggatt

SEQ ID NO: 68300 - DNA, 20 bp, synthetic construct
  source 1..20: mol_type = other DNA
cttcagcatctatgggggat

SEQ ID NO: 68301 - DNA, 20 bp, synthetic construct
  source 1..20: mol_type = other DNA
ccttcagcatctatggggga

SEQ ID NO: 68302 - DNA, 20 bp, synthetic construct
  source 1..20: mol_type = other DNA
tccttcagcatctatggggg

SEQ ID NO: 68303 - DNA, 20 bp, synthetic construct
  source 1..20: mol_type = other DNA
gtccttcagcatctatgggg

SEQ ID NO: 68304 - DNA, 20 bp, synthetic construct
  source 1..20: mol_type = other DNA
tgtccttcagcatctatggg

SEQ ID NO: 68305 - DNA, 20 bp, synthetic construct
  source 1..20: mol_type = other DNA
ttgtccttcagcatctatgg

SEQ ID NO: 68306 - DNA, 20 bp, synthetic construct
  source 1..20: mol_type = other DNA
gttgtccttcagcatctatg

SEQ ID NO: 68307 - DNA, 20 bp, synthetic construct
  source 1..20: mol_type = other DNA
agttgtccttcagcatctat

SEQ ID NO: 68308 - DNA, 20 bp, synthetic construct
  source 1..20: mol_type = other DNA
cagttgtccttcagcatcta

SEQ ID NO: 68309 - DNA, 20 bp, synthetic construct
  source 1..20: mol_type = other DNA
acagttgtccttcagcatct

SEQ ID NO: 68310 - DNA, 20 bp, synthetic construct
  source 1..20: mol_type = other DNA
tacagttgtccttcagcatc

SEQ ID NO: 68311 - DNA, 20 bp, synthetic construct
  source 1..20: mol_type = other DNA
ctacagttgtccttcagcat

SEQ ID NO: 68312 - DNA, 20 bp, synthetic construct
  source 1..20: mol_type = other DNA
actacagttgtccttcagca

SEQ ID NO: 68313 - DNA, 20 bp, synthetic construct
  source 1..20: mol_type = other DNA
cactacagttgtccttcagc

SEQ ID NO: 68314 - DNA, 20 bp, synthetic construct
  source 1..20: mol_type = other DNA
acactacagttgtccttcag

SEQ ID NO: 68315 - DNA, 20 bp, synthetic construct
  source 1..20: mol_type = other DNA
cacactacagttgtccttca

SEQ ID NO: 68316 - DNA, 20 bp, synthetic construct
  source 1..20: mol_type = other DNA
acacactacagttgtccttc

SEQ ID NO: 68317 - DNA, 20 bp, synthetic construct
  source 1..20: mol_type = other DNA
cacacactacagttgtcctt

SEQ ID NO: 68318 - DNA, 20 bp, synthetic construct
  source 1..20: mol_type = other DNA
acacacactacagttgtcct

SEQ ID NO: 68319 - DNA, 20 bp, synthetic construct
  source 1..20: mol_type = other DNA
aacacacactacagttgtcc

SEQ ID NO: 68320 - DNA, 20 bp, synthetic construct
  source 1..20: mol_type = other DNA
caacacacactacagttgtc

SEQ ID NO: 68321 - DNA, 20 bp, synthetic construct
  source 1..20: mol_type = other DNA
ccaacacacactacagttgt

SEQ ID NO: 68322 - DNA, 20 bp, synthetic construct
  source 1..20: mol_type = other DNA
tccaacacacactacagttg

SEQ ID NO: 68323 - DNA, 20 bp, synthetic construct
  source 1..20: mol_type = other DNA
ttccaacacacactacagtt

SEQ ID NO: 68324 - DNA, 20 bp, synthetic construct
  source 1..20: mol_type = other DNA
attccaacacacactacagt

SEQ ID NO: 68325 - DNA, 20 bp, synthetic construct
  source 1..20: mol_type = other DNA
tattccaacacacactacag

SEQ ID NO: 68326 - DNA, 20 bp, synthetic construct
  source 1..20: mol_type = other DNA
ttattccaacacacactaca

SEQ ID NO: 68327 - DNA, 20 bp, synthetic construct
  source 1..20: mol_type = other DNA
attattccaacacacactac

SEQ ID NO: 68328 - DNA, 20 bp, synthetic construct
  source 1..20: mol_type = other DNA
aattattccaacacacacta

SEQ ID NO: 68329 - DNA, 20 bp, synthetic construct
  source 1..20: mol_type = other DNA
aaattattccaacacacact

SEQ ID NO: 68330 - DNA, 20 bp, synthetic construct
  source 1..20: mol_type = other DNA
taaattattccaacacacac

SEQ ID NO: 68331 - DNA, 20 bp, synthetic construct
  source 1..20: mol_type = other DNA
ataaattattccaacacaca

SEQ ID NO: 68332 - DNA, 20 bp, synthetic construct
  source 1..20: mol_type = other DNA
aataaattattccaacacac

SEQ ID NO: 68333 - DNA, 20 bp, synthetic construct
  source 1..20: mol_type = other DNA
aaataaattattccaacaca

SEQ ID NO: 68334 - DNA, 20 bp, synthetic construct
  source 1..20: mol_type = other DNA
aaaataaattattccaacac

SEQ ID NO: 68335 - DNA, 20 bp, synthetic construct
  source 1..20: mol_type = other DNA
gaaaataaattattccaaca

SEQ ID NO: 68336 - DNA, 20 bp, synthetic construct
  source 1..20: mol_type = other DNA
tgaaaataaattattccaac

SEQ ID NO: 68337 - DNA, 20 bp, synthetic construct
  source 1..20: mol_type = other DNA
ttgaaaataaattattccaa

SEQ ID NO: 68338 - DNA, 20 bp, synthetic construct
  source 1..20: mol_type = other DNA
tttgaaaataaattattcca

SEQ ID NO: 68339 - DNA, 20 bp, synthetic construct
  source 1..20: mol_type = other DNA
atttgaaaataaattattcc

SEQ ID NO: 68340 - DNA, 20 bp, synthetic construct
  source 1..20: mol_type = other DNA
catttgaaaataaattattc

SEQ ID NO: 68341 - DNA, 20 bp, synthetic construct
  source 1..20: mol_type = other DNA
ccatttgaaaataaattatt

SEQ ID NO: 68342 - DNA, 20 bp, synthetic construct
  source 1..20: mol_type = other DNA
tccatttgaaaataaattat

SEQ ID NO: 68343 - DNA, 20 bp, synthetic construct
  source 1..20: mol_type = other DNA
atccatttgaaaataaatta

SEQ ID NO: 68344 - DNA, 20 bp, synthetic construct
  source 1..20: mol_type = other DNA
gatccatttgaaaataaatt

SEQ ID NO: 68345 - DNA, 20 bp, synthetic construct
  source 1..20: mol_type = other DNA
tgatccatttgaaaataaat

SEQ ID NO: 68346 - DNA, 20 bp, synthetic construct
  source 1..20: mol_type = other DNA
atgatccatttgaaaataaa

SEQ ID NO: 68347 - DNA, 20 bp, synthetic construct
  source 1..20: mol_type = other DNA
aatgatccatttgaaaataa

SEQ ID NO: 68348 - DNA, 20 bp, synthetic construct
  source 1..20: mol_type = other DNA
aaatgatccatttgaaaata

SEQ ID NO: 68349 - DNA, 20 bp, synthetic construct
  source 1..20: mol_type = other DNA
caaatgatccatttgaaaat

SEQ ID NO: 68350 - DNA, 20 bp, synthetic construct
  source 1..20: mol_type = other DNA
ccaaatgatccatttgaaaa

SEQ ID NO: 68351 - DNA, 20 bp, synthetic construct
  source 1..20: mol_type = other DNA
tccaaatgatccatttgaaa

SEQ ID NO: 68352 - DNA, 20 bp, synthetic construct
  source 1..20: mol_type = other DNA
ctccaaatgatccatttgaa

SEQ ID NO: 68353 - DNA, 20 bp, synthetic construct
  source 1..20: mol_type = other DNA
tctccaaatgatccatttga

SEQ ID NO: 68354 - DNA, 20 bp, synthetic construct
  source 1..20: mol_type = other DNA
ttctccaaatgatccatttg

SEQ ID NO: 68355 - DNA, 20 bp, synthetic construct
  source 1..20: mol_type = other DNA
gttctccaaatgatccattt

SEQ ID NO: 68356 - DNA, 20 bp, synthetic construct
  source 1..20: mol_type = other DNA
tgttctccaaatgatccatt

SEQ ID NO: 68357 - DNA, 20 bp, synthetic construct
  source 1..20: mol_type = other DNA
gtgttctccaaatgatccat

SEQ ID NO: 68358 - DNA, 20 bp, synthetic construct
  source 1..20: mol_type = other DNA
agtgttctccaaatgatcca

SEQ ID NO: 68359 - DNA, 20 bp, synthetic construct
  source 1..20: mol_type = other DNA
tagtgttctccaaatgatcc

SEQ ID NO: 68360 - DNA, 20 bp, synthetic construct
  source 1..20: mol_type = other DNA
atagtgttctccaaatgatc

SEQ ID NO: 68361 - DNA, 20 bp, synthetic construct
  source 1..20: mol_type = other DNA
aatagtgttctccaaatgat

SEQ ID NO: 68362 - DNA, 20 bp, synthetic construct
  source 1..20: mol_type = other DNA
gaatagtgttctccaaatga

SEQ ID NO: 68363 - DNA, 20 bp, synthetic construct
  source 1..20: mol_type = other DNA
agaatagtgttctccaaatg

SEQ ID NO: 68364 - DNA, 20 bp, synthetic construct
  source 1..20: mol_type = other DNA
aagaatagtgttctccaaat

SEQ ID NO: 68365 - DNA, 20 bp, synthetic construct
  source 1..20: mol_type = other DNA
aaagaatagtgttctccaaa

SEQ ID NO: 68366 - DNA, 20 bp, synthetic construct
  source 1..20: mol_type = other DNA
taaagaatagtgttctccaa

SEQ ID NO: 68367 - DNA, 20 bp, synthetic construct
  source 1..20: mol_type = other DNA
ctaaagaatagtgttctcca

SEQ ID NO: 68368 - DNA, 20 bp, synthetic construct
  source 1..20: mol_type = other DNA
cctaaagaatagtgttctcc

SEQ ID NO: 68369 - DNA, 20 bp, synthetic construct
  source 1..20: mol_type = other DNA
tcctaaagaatagtgttctc

SEQ ID NO: 68370 - DNA, 20 bp, synthetic construct
  source 1..20: mol_type = other DNA
ttcctaaagaatagtgttct

SEQ ID NO: 68371 - DNA, 20 bp, synthetic construct
  source 1..20: mol_type = other DNA
tttcctaaagaatagtgttc

SEQ ID NO: 68372 - DNA, 20 bp, synthetic construct
  source 1..20: mol_type = other DNA
gtttcctaaagaatagtgtt

SEQ ID NO: 68373 - DNA, 20 bp, synthetic construct
  source 1..20: mol_type = other DNA
tgtttcctaaagaatagtgt

SEQ ID NO: 68374 - DNA, 20 bp, synthetic construct
  source 1..20: mol_type = other DNA
atgtttcctaaagaatagtg

SEQ ID NO: 68375 - DNA, 20 bp, synthetic construct
  source 1..20: mol_type = other DNA
tatgtttcctaaagaatagt

SEQ ID NO: 68376 - DNA, 20 bp, synthetic construct
  source 1..20: mol_type = other DNA
ctatgtttcctaaagaatag

SEQ ID NO: 68377 - DNA, 20 bp, synthetic construct
  source 1..20: mol_type = other DNA
gctatgtttcctaaagaata

SEQ ID NO: 68378 - DNA, 20 bp, synthetic construct
  source 1..20: mol_type = other DNA
ggctatgtttcctaaagaat

SEQ ID NO: 68379 - DNA, 20 bp, synthetic construct
  source 1..20: mol_type = other DNA
aggctatgtttcctaaagaa

SEQ ID NO: 68380 - DNA, 20 bp, synthetic construct
  source 1..20: mol_type = other DNA
gaggctatgtttcctaaaga

SEQ ID NO: 68381 - DNA, 20 bp, synthetic construct
  source 1..20: mol_type = other DNA
ggaggctatgtttcctaaag

SEQ ID NO: 68382 - DNA, 20 bp, synthetic construct
  source 1..20: mol_type = other DNA
aggaggctatgtttcctaaa

SEQ ID NO: 68383 - DNA, 20 bp, synthetic construct
  source 1..20: mol_type = other DNA
taggaggctatgtttcctaa

SEQ ID NO: 68384 - DNA, 20 bp, synthetic construct
  source 1..20: mol_type = other DNA
ttaggaggctatgtttccta

SEQ ID NO: 68385 - DNA, 20 bp, synthetic construct
  source 1..20: mol_type = other DNA
cttaggaggctatgtttcct

SEQ ID NO: 68386 - DNA, 20 bp, synthetic construct
  source 1..20: mol_type = other DNA
acttaggaggctatgtttcc

SEQ ID NO: 68387 - DNA, 20 bp, synthetic construct
  source 1..20: mol_type = other DNA
aacttaggaggctatgtttc

SEQ ID NO: 68388 - DNA, 20 bp, synthetic construct
  source 1..20: mol_type = other DNA
gaacttaggaggctatgttt

SEQ ID NO: 68389 - DNA, 20 bp, synthetic construct
  source 1..20: mol_type = other DNA
agaacttaggaggctatgtt

SEQ ID NO: 68390 - DNA, 20 bp, synthetic construct
  source 1..20: mol_type = other DNA
cagaacttaggaggctatgt

SEQ ID NO: 68391 - DNA, 20 bp, synthetic construct
  source 1..20: mol_type = other DNA
acagaacttaggaggctatg

SEQ ID NO: 68392 - DNA, 20 bp, synthetic construct
  source 1..20: mol_type = other DNA
aacagaacttaggaggctat

SEQ ID NO: 68393 - DNA, 20 bp, synthetic construct
  source 1..20: mol_type = other DNA
gaacagaacttaggaggcta

SEQ ID NO: 68394 - DNA, 20 bp, synthetic construct
  source 1..20: mol_type = other DNA
ggaacagaacttaggaggct

SEQ ID NO: 68395 - DNA, 20 bp, synthetic construct
  source 1..20: mol_type = other DNA
tggaacagaacttaggaggc

SEQ ID NO: 68396 - DNA, 20 bp, synthetic construct
  source 1..20: mol_type = other DNA
atggaacagaacttaggagg

SEQ ID NO: 68397 - DNA, 20 bp, synthetic construct
  source 1..20: mol_type = other DNA
tatggaacagaacttaggag

SEQ ID NO: 68398 - DNA, 20 bp, synthetic construct
  source 1..20: mol_type = other DNA
gtatggaacagaacttagga

SEQ ID NO: 68399 - DNA, 20 bp, synthetic construct
  source 1..20: mol_type = other DNA
tgtatggaacagaacttagg

SEQ ID NO: 68400 - DNA, 20 bp, synthetic construct
  source 1..20: mol_type = other DNA
atgtatggaacagaacttag

SEQ ID NO: 68401 - DNA, 20 bp, synthetic construct
  source 1..20: mol_type = other DNA
gatgtatggaacagaactta

SEQ ID NO: 68402 - DNA, 20 bp, synthetic construct
  source 1..20: mol_type = other DNA
ggatgtatggaacagaactt

SEQ ID NO: 68403 - DNA, 20 bp, synthetic construct
  source 1..20: mol_type = other DNA
gggatgtatggaacagaact

SEQ ID NO: 68404 - DNA, 20 bp, synthetic construct
  source 1..20: mol_type = other DNA
agggatgtatggaacagaac

SEQ ID NO: 68405 - DNA, 20 bp, synthetic construct
  source 1..20: mol_type = other DNA
aagggatgtatggaacagaa

SEQ ID NO: 68406 - DNA, 20 bp, synthetic construct
  source 1..20: mol_type = other DNA
aaagggatgtatggaacaga

SEQ ID NO: 68407 - DNA, 20 bp, synthetic construct
  source 1..20: mol_type = other DNA
gaaagggatgtatggaacag

SEQ ID NO: 68408 - DNA, 20 bp, synthetic construct
  source 1..20: mol_type = other DNA
tgaaagggatgtatggaaca

SEQ ID NO: 68409 - DNA, 20 bp, synthetic construct
  source 1..20: mol_type = other DNA
gtgaaagggatgtatggaac

SEQ ID NO: 68410 - DNA, 20 bp, synthetic construct
  source 1..20: mol_type = other DNA
ggtgaaagggatgtatggaa

SEQ ID NO: 68411 - DNA, 20 bp, synthetic construct
  source 1..20: mol_type = other DNA
aggtgaaagggatgtatgga

SEQ ID NO: 68412 - DNA, 20 bp, synthetic construct
  source 1..20: mol_type = other DNA
gaggtgaaagggatgtatgg

SEQ ID NO: 68413 - DNA, 20 bp, synthetic construct
  source 1..20: mol_type = other DNA
ggaggtgaaagggatgtatg

SEQ ID NO: 68414 - DNA, 20 bp, synthetic construct
  source 1..20: mol_type = other DNA
tggaggtgaaagggatgtat

SEQ ID NO: 68415 - DNA, 20 bp, synthetic construct
  source 1..20: mol_type = other DNA
gtggaggtgaaagggatgta

SEQ ID NO: 68416 - DNA, 20 bp, synthetic construct
  source 1..20: mol_type = other DNA
cgtggaggtgaaagggatgt

SEQ ID NO: 68417 - DNA, 20 bp, synthetic construct
  source 1..20: mol_type = other DNA
ccgtggaggtgaaagggatg

SEQ ID NO: 68418 - DNA, 20 bp, synthetic construct
  source 1..20: mol_type = other DNA
gccgtggaggtgaaagggat

SEQ ID NO: 68419 - DNA, 20 bp, synthetic construct
  source 1..20: mol_type = other DNA
cgccgtggaggtgaaaggga

SEQ ID NO: 68420 - DNA, 20 bp, synthetic construct
  source 1..20: mol_type = other DNA
acgccgtggaggtgaaaggg

SEQ ID NO: 68421 - DNA, 20 bp, synthetic construct
  source 1..20: mol_type = other DNA
aacgccgtggaggtgaaagg

SEQ ID NO: 68422 - DNA, 20 bp, synthetic construct
  source 1..20: mol_type = other DNA
caacgccgtggaggtgaaag

SEQ ID NO: 68423 - DNA, 20 bp, synthetic construct
  source 1..20: mol_type = other DNA
acaacgccgtggaggtgaaa

SEQ ID NO: 68424 - DNA, 20 bp, synthetic construct
  source 1..20: mol_type = other DNA
tacaacgccgtggaggtgaa

SEQ ID NO: 68425 - DNA, 20 bp, synthetic construct
  source 1..20: mol_type = other DNA
ctacaacgccgtggaggtga

SEQ ID NO: 68426 - DNA, 20 bp, synthetic construct
  source 1..20: mol_type = other DNA
gctacaacgccgtggaggtg

SEQ ID NO: 68427 - DNA, 20 bp, synthetic construct
  source 1..20: mol_type = other DNA
tgctacaacgccgtggaggt

SEQ ID NO: 68428 - DNA, 20 bp, synthetic construct
  source 1..20: mol_type = other DNA
atgctacaacgccgtggagg

SEQ ID NO: 68429 - DNA, 20 bp, synthetic construct
  source 1..20: mol_type = other DNA
gatgctacaacgccgtggag

SEQ ID NO: 68430 - DNA, 20 bp, synthetic construct
  source 1..20: mol_type = other DNA
ggatgctacaacgccgtgga

SEQ ID NO: 68431 - DNA, 20 bp, synthetic construct
  source 1..20: mol_type = other DNA
aggatgctacaacgccgtgg

SEQ ID NO: 68432 - DNA, 20 bp, synthetic construct
  source 1..20: mol_type = other DNA
caggatgctacaacgccgtg

SEQ ID NO: 68433 - DNA, 20 bp, synthetic construct
  source 1..20: mol_type = other DNA
gcaggatgctacaacgccgt

SEQ ID NO: 68434 - DNA, 20 bp, synthetic construct
  source 1..20: mol_type = other DNA
agcaggatgctacaacgccg

SEQ ID NO: 68435 - DNA, 20 bp, synthetic construct
  source 1..20: mol_type = other DNA
aagcaggatgctacaacgcc

SEQ ID NO: 68436 - DNA, 20 bp, synthetic construct
  source 1..20: mol_type = other DNA
aaagcaggatgctacaacgc

SEQ ID NO: 68437 - DNA, 20 bp, synthetic construct
  source 1..20: mol_type = other DNA
gaaagcaggatgctacaacg

SEQ ID NO: 68438 - DNA, 20 bp, synthetic construct
  source 1..20: mol_type = other DNA
tgaaagcaggatgctacaac

SEQ ID NO: 68439 - DNA, 20 bp, synthetic construct
  source 1..20: mol_type = other DNA
atgaaagcaggatgctacaa

SEQ ID NO: 68440 - DNA, 20 bp, synthetic construct
  source 1..20: mol_type = other DNA
catgaaagcaggatgctaca

SEQ ID NO: 68441 - DNA, 20 bp, synthetic construct
  source 1..20: mol_type = other DNA
tcatgaaagcaggatgctac

SEQ ID NO: 68442 - DNA, 20 bp, synthetic construct
  source 1..20: mol_type = other DNA
gtcatgaaagcaggatgcta

SEQ ID NO: 68443 - DNA, 20 bp, synthetic construct
  source 1..20: mol_type = other DNA
agtcatgaaagcaggatgct

SEQ ID NO: 68444 - DNA, 20 bp, synthetic construct
  source 1..20: mol_type = other DNA
cagtcatgaaagcaggatgc

SEQ ID NO: 68445 - DNA, 20 bp, synthetic construct
  source 1..20: mol_type = other DNA
acagtcatgaaagcaggatg

SEQ ID NO: 68446 - DNA, 20 bp, synthetic construct
  source 1..20: mol_type = other DNA
cacagtcatgaaagcaggat

SEQ ID NO: 68447 - DNA, 20 bp, synthetic construct
  source 1..20: mol_type = other DNA
acacagtcatgaaagcagga

SEQ ID NO: 68448 - DNA, 20 bp, synthetic construct
  source 1..20: mol_type = other DNA
gacacagtcatgaaagcagg

SEQ ID NO: 68449 - DNA, 20 bp, synthetic construct
  source 1..20: mol_type = other DNA
tgacacagtcatgaaagcag

SEQ ID NO: 68450 - DNA, 20 bp, synthetic construct
  source 1..20: mol_type = other DNA
atgacacagtcatgaaagca

SEQ ID NO: 68451 - DNA, 20 bp, synthetic construct
  source 1..20: mol_type = other DNA
gatgacacagtcatgaaagc

SEQ ID NO: 68452 - DNA, 20 bp, synthetic construct
  source 1..20: mol_type = other DNA
tgatgacacagtcatgaaag

SEQ ID NO: 68453 - DNA, 20 bp, synthetic construct
  source 1..20: mol_type = other DNA
gtgatgacacagtcatgaaa

SEQ ID NO: 68454 - DNA, 20 bp, synthetic construct
  source 1..20: mol_type = other DNA
agtgatgacacagtcatgaa

SEQ ID NO: 68455 - DNA, 20 bp, synthetic construct
  source 1..20: mol_type = other DNA
gagtgatgacacagtcatga

SEQ ID NO: 68456 - DNA, 20 bp, synthetic construct
  source 1..20: mol_type = other DNA
cgagtgatgacacagtcatg

SEQ ID NO: 68457 - DNA, 20 bp, synthetic construct
  source 1..20: mol_type = other DNA
ccgagtgatgacacagtcat

SEQ ID NO: 68458 - DNA, 20 bp, synthetic construct
  source 1..20: mol_type = other DNA
tccgagtgatgacacagtca

SEQ ID NO: 68459 - DNA, 20 bp, synthetic construct
  source 1..20: mol_type = other DNA
ttccgagtgatgacacagtc

SEQ ID NO: 68460 - DNA, 20 bp, synthetic construct
  source 1..20: mol_type = other DNA
cttccgagtgatgacacagt

SEQ ID NO: 68461 - DNA, 20 bp, synthetic construct
  source 1..20: mol_type = other DNA
ccttccgagtgatgacacag

SEQ ID NO: 68462 - DNA, 20 bp, synthetic construct
  source 1..20: mol_type = other DNA
tccttccgagtgatgacaca

SEQ ID NO: 68463 - DNA, 20 bp, synthetic construct
  source 1..20: mol_type = other DNA
ttccttccgagtgatgacac

SEQ ID NO: 68464 - DNA, 20 bp, synthetic construct
  source 1..20: mol_type = other DNA
gttccttccgagtgatgaca

SEQ ID NO: 68465 - DNA, 20 bp, synthetic construct
  source 1..20: mol_type = other DNA
agttccttccgagtgatgac

SEQ ID NO: 68466 - DNA, 20 bp, synthetic construct
  source 1..20: mol_type = other DNA
cagttccttccgagtgatga

SEQ ID NO: 68467 - DNA, 20 bp, synthetic construct
  source 1..20: mol_type = other DNA
gcagttccttccgagtgatg

SEQ ID NO: 68468 - DNA, 20 bp, synthetic construct
  source 1..20: mol_type = other DNA
agcagttccttccgagtgat

SEQ ID NO: 68469 - DNA, 20 bp, synthetic construct
  source 1..20: mol_type = other DNA
aagcagttccttccgagtga

SEQ ID NO: 68470 - DNA, 20 bp, synthetic construct
  source 1..20: mol_type = other DNA
gaagcagttccttccgagtg

SEQ ID NO: 68471 - DNA, 20 bp, synthetic construct
  source 1..20: mol_type = other DNA
agaagcagttccttccgagt

SEQ ID NO: 68472 - DNA, 20 bp, synthetic construct
  source 1..20: mol_type = other DNA
gagaagcagttccttccgag

SEQ ID NO: 68473 - DNA, 20 bp, synthetic construct
  source 1..20: mol_type = other DNA
agagaagcagttccttccga

SEQ ID NO: 68474 - DNA, 20 bp, synthetic construct
  source 1..20: mol_type = other DNA
aagagaagcagttccttccg

SEQ ID NO: 68475 - DNA, 20 bp, synthetic construct
  source 1..20: mol_type = other DNA
gaagagaagcagttccttcc

SEQ ID NO: 68476 - DNA, 20 bp, synthetic construct
  source 1..20: mol_type = other DNA
ggaagagaagcagttccttc

SEQ ID NO: 68477 - DNA, 20 bp, synthetic construct
  source 1..20: mol_type = other DNA
tggaagagaagcagttcctt

SEQ ID NO: 68478 - DNA, 20 bp, synthetic construct
  source 1..20: mol_type = other DNA
ctggaagagaagcagttcct

SEQ ID NO: 68479 - DNA, 20 bp, synthetic construct
  source 1..20: mol_type = other DNA
tctggaagagaagcagttcc

SEQ ID NO: 68480 - DNA, 20 bp, synthetic construct
  source 1..20: mol_type = other DNA
ttctggaagagaagcagttc

SEQ ID NO: 68481 - DNA, 20 bp, synthetic construct
  source 1..20: mol_type = other DNA
attctggaagagaagcagtt

SEQ ID NO: 68482 - DNA, 20 bp, synthetic construct
  source 1..20: mol_type = other DNA
cattctggaagagaagcagt

SEQ ID NO: 68483 - DNA, 20 bp, synthetic construct
  source 1..20: mol_type = other DNA
gcattctggaagagaagcag

SEQ ID NO: 68484 - DNA, 20 bp, synthetic construct
  source 1..20: mol_type = other DNA
agcattctggaagagaagca

SEQ ID NO: 68485 - DNA, 20 bp, synthetic construct
  source 1..20: mol_type = other DNA
aagcattctggaagagaagc

SEQ ID NO: 68486 - DNA, 20 bp, synthetic construct
  source 1..20: mol_type = other DNA
aaagcattctggaagagaag

SEQ ID NO: 68487 - DNA, 20 bp, synthetic construct
  source 1..20: mol_type = other DNA
aaaagcattctggaagagaa

SEQ ID NO: 68488 - DNA, 20 bp, synthetic construct
  source 1..20: mol_type = other DNA
gaaaagcattctggaagaga

SEQ ID NO: 68489 - DNA, 20 bp, synthetic construct
  source 1..20: mol_type = other DNA
tgaaaagcattctggaagag

SEQ ID NO: 68490 - DNA, 20 bp, synthetic construct
  source 1..20: mol_type = other DNA
ttgaaaagcattctggaaga

SEQ ID NO: 68491 - DNA, 20 bp, synthetic construct
  source 1..20: mol_type = other DNA
cttgaaaagcattctggaag

SEQ ID NO: 68492 - DNA, 20 bp, synthetic construct
  source 1..20: mol_type = other DNA
tcttgaaaagcattctggaa

SEQ ID NO: 68493 - DNA, 20 bp, synthetic construct
  source 1..20: mol_type = other DNA
atcttgaaaagcattctgga

SEQ ID NO: 68494 - DNA, 20 bp, synthetic construct
  source 1..20: mol_type = other DNA
gatcttgaaaagcattctgg

SEQ ID NO: 68495 - DNA, 20 bp, synthetic construct
  source 1..20: mol_type = other DNA
agatcttgaaaagcattctg

SEQ ID NO: 68496 - DNA, 20 bp, synthetic construct
  source 1..20: mol_type = other DNA
tagatcttgaaaagcattct

SEQ ID NO: 68497 - DNA, 20 bp, synthetic construct
  source 1..20: mol_type = other DNA
gtagatcttgaaaagcattc

SEQ ID NO: 68498 - DNA, 20 bp, synthetic construct
  source 1..20: mol_type = other DNA
agtagatcttgaaaagcatt

SEQ ID NO: 68499 - DNA, 20 bp, synthetic construct
  source 1..20: mol_type = other DNA
gagtagatcttgaaaagcat

SEQ ID NO: 68500 - DNA, 20 bp, synthetic construct
  source 1..20: mol_type = other DNA
agagtagatcttgaaaagca

SEQ ID NO: 68501 - DNA, 20 bp, synthetic construct
  source 1..20: mol_type = other DNA
cagagtagatcttgaaaagc

SEQ ID NO: 68502 - DNA, 20 bp, synthetic construct
  source 1..20: mol_type = other DNA
tcagagtagatcttgaaaag

SEQ ID NO: 68503 - DNA, 20 bp, synthetic construct
  source 1..20: mol_type = other DNA
gtcagagtagatcttgaaaa

SEQ ID NO: 68504 - DNA, 20 bp, synthetic construct
  source 1..20: mol_type = other DNA
ggtcagagtagatcttgaaa

SEQ ID NO: 68505 - DNA, 20 bp, synthetic construct
  source 1..20: mol_type = other DNA
tggtcagagtagatcttgaa

SEQ ID NO: 68506 - DNA, 20 bp, synthetic construct
  source 1..20: mol_type = other DNA
gtggtcagagtagatcttga

SEQ ID NO: 68507 - DNA, 20 bp, synthetic construct
  source 1..20: mol_type = other DNA
tgtggtcagagtagatcttg

SEQ ID NO: 68508 - DNA, 20 bp, synthetic construct
  source 1..20: mol_type = other DNA
ctgtggtcagagtagatctt

SEQ ID NO: 68509 - DNA, 20 bp, synthetic construct
  source 1..20: mol_type = other DNA
gctgtggtcagagtagatct

SEQ ID NO: 68510 - DNA, 20 bp, synthetic construct
  source 1..20: mol_type = other DNA
agctgtggtcagagtagatc

SEQ ID NO: 68511 - DNA, 20 bp, synthetic construct
  source 1..20: mol_type = other DNA
tagctgtggtcagagtagat

SEQ ID NO: 68512 - DNA, 20 bp, synthetic construct
  source 1..20: mol_type = other DNA
atagctgtggtcagagtaga

SEQ ID NO: 68513 - DNA, 20 bp, synthetic construct
  source 1..20: mol_type = other DNA
tatagctgtggtcagagtag

SEQ ID NO: 68514 - DNA, 20 bp, synthetic construct
  source 1..20: mol_type = other DNA
ttatagctgtggtcagagta

SEQ ID NO: 68515 - DNA, 20 bp, synthetic construct
  source 1..20: mol_type = other DNA
tttatagctgtggtcagagt

SEQ ID NO: 68516 - DNA, 20 bp, synthetic construct
  source 1..20: mol_type = other DNA
gtttatagctgtggtcagag

SEQ ID NO: 68517 - DNA, 20 bp, synthetic construct
  source 1..20: mol_type = other DNA
agtttatagctgtggtcaga

SEQ ID NO: 68518 - DNA, 20 bp, synthetic construct
  source 1..20: mol_type = other DNA
aagtttatagctgtggtcag

SEQ ID NO: 68519 - DNA, 20 bp, synthetic construct
  source 1..20: mol_type = other DNA
aaagtttatagctgtggtca

SEQ ID NO: 68520 - DNA, 20 bp, synthetic construct
  source 1..20: mol_type = other DNA
taaagtttatagctgtggtc

SEQ ID NO: 68521 - DNA, 20 bp, synthetic construct
  source 1..20: mol_type = other DNA
gtaaagtttatagctgtggt

SEQ ID NO: 68522 - DNA, 20 bp, synthetic construct
  source 1..20: mol_type = other DNA
tgtaaagtttatagctgtgg

SEQ ID NO: 68523 - DNA, 20 bp, synthetic construct
  source 1..20: mol_type = other DNA
gtgtaaagtttatagctgtg

SEQ ID NO: 68524 - DNA, 20 bp, synthetic construct
  source 1..20: mol_type = other DNA
agtgtaaagtttatagctgt

SEQ ID NO: 68525 - DNA, 20 bp, synthetic construct
  source 1..20: mol_type = other DNA
aagtgtaaagtttatagctg

SEQ ID NO: 68526 - DNA, 20 bp, synthetic construct
  source 1..20: mol_type = other DNA
gaagtgtaaagtttatagct

SEQ ID NO: 68527 - DNA, 20 bp, synthetic construct
  source 1..20: mol_type = other DNA
agaagtgtaaagtttatagc

SEQ ID NO: 68528 - DNA, 20 bp, synthetic construct
  source 1..20: mol_type = other DNA
tagaagtgtaaagtttatag

SEQ ID NO: 68529 - DNA, 20 bp, synthetic construct
  source 1..20: mol_type = other DNA
atagaagtgtaaagtttata

SEQ ID NO: 68530 - DNA, 20 bp, synthetic construct
  source 1..20: mol_type = other DNA
aatagaagtgtaaagtttat

SEQ ID NO: 68531 - DNA, 20 bp, synthetic construct
  source 1..20: mol_type = other DNA
gaatagaagtgtaaagttta

SEQ ID NO: 68532 - DNA, 20 bp, synthetic construct
  source 1..20: mol_type = other DNA
agaatagaagtgtaaagttt

SEQ ID NO: 68533 - DNA, 20 bp, synthetic construct
  source 1..20: mol_type = other DNA
gagaatagaagtgtaaagtt

SEQ ID NO: 68534 - DNA, 20 bp, synthetic construct
  source 1..20: mol_type = other DNA
agagaatagaagtgtaaagt

SEQ ID NO: 68535 - DNA, 20 bp, synthetic construct
  source 1..20: mol_type = other DNA
aagagaatagaagtgtaaag

SEQ ID NO: 68536 - DNA, 20 bp, synthetic construct
  source 1..20: mol_type = other DNA
gaagagaatagaagtgtaaa

SEQ ID NO: 68537 - DNA, 20 bp, synthetic construct
  source 1..20: mol_type = other DNA
agaagagaatagaagtgtaa

SEQ ID NO: 68538 - DNA, 20 bp, synthetic construct
  source 1..20: mol_type = other DNA
aagaagagaatagaagtgta

SEQ ID NO: 68539 - DNA, 20 bp, synthetic construct
  source 1..20: mol_type = other DNA
caagaagagaatagaagtgt

SEQ ID NO: 68540 - DNA, 20 bp, synthetic construct
  source 1..20: mol_type = other DNA
gcaagaagagaatagaagtg

SEQ ID NO: 68541 - DNA, 20 bp, synthetic construct
  source 1..20: mol_type = other DNA
ggcaagaagagaatagaagt

SEQ ID NO: 68542 - DNA, 20 bp, synthetic construct
  source 1..20: mol_type = other DNA
gggcaagaagagaatagaag

SEQ ID NO: 68543 - DNA, 20 bp, synthetic construct
  source 1..20: mol_type = other DNA
ggggcaagaagagaatagaa

SEQ ID NO: 68544 - DNA, 20 bp, synthetic construct
  source 1..20: mol_type = other DNA
aggggcaagaagagaataga

SEQ ID NO: 68545 - DNA, 20 bp, synthetic construct
  source 1..20: mol_type = other DNA
gaggggcaagaagagaatag

SEQ ID NO: 68546 - DNA, 20 bp, synthetic construct
  source 1..20: mol_type = other DNA
tgaggggcaagaagagaata

SEQ ID NO: 68547 - DNA, 20 bp, synthetic construct
  source 1..20: mol_type = other DNA
gtgaggggcaagaagagaat

SEQ ID NO: 68548 - DNA, 20 bp, synthetic construct
  source 1..20: mol_type = other DNA
tgtgaggggcaagaagagaa

SEQ ID NO: 68549 - DNA, 20 bp, synthetic construct
  source 1..20: mol_type = other DNA
ctgtgaggggcaagaagaga

SEQ ID NO: 68550 - DNA, 20 bp, synthetic construct
  source 1..20: mol_type = other DNA
actgtgaggggcaagaagag

SEQ ID NO: 68551 - DNA, 20 bp, synthetic construct
  source 1..20: mol_type = other DNA
cactgtgaggggcaagaaga

SEQ ID NO: 68552 - DNA, 20 bp, synthetic construct
  source 1..20: mol_type = other DNA
acactgtgaggggcaagaag

SEQ ID NO: 68553 - DNA, 20 bp, synthetic construct
  source 1..20: mol_type = other DNA
aacactgtgaggggcaagaa

SEQ ID NO: 68554 - DNA, 20 bp, synthetic construct
  source 1..20: mol_type = other DNA
gaacactgtgaggggcaaga

SEQ ID NO: 68555 - DNA, 20 bp, synthetic construct
  source 1..20: mol_type = other DNA
agaacactgtgaggggcaag

SEQ ID NO: 68556 - DNA, 20 bp, synthetic construct
  source 1..20: mol_type = other DNA
gagaacactgtgaggggcaa

SEQ ID NO: 68557 - DNA, 20 bp, synthetic construct
  source 1..20: mol_type = other DNA
agagaacactgtgaggggca

SEQ ID NO: 68558 - DNA, 20 bp, synthetic construct
  source 1..20: mol_type = other DNA
cagagaacactgtgaggggc

SEQ ID NO: 68559 - DNA, 20 bp, synthetic construct
  source 1..20: mol_type = other DNA
acagagaacactgtgagggg

SEQ ID NO: 68560 - DNA, 20 bp, synthetic construct
  source 1..20: mol_type = other DNA
aacagagaacactgtgaggg

SEQ ID NO: 68561 - DNA, 20 bp, synthetic construct
  source 1..20: mol_type = other DNA
gaacagagaacactgtgagg

SEQ ID NO: 68562 - DNA, 20 bp, synthetic construct
  source 1..20: mol_type = other DNA
ggaacagagaacactgtgag

SEQ ID NO: 68563 - DNA, 20 bp, synthetic construct
  source 1..20: mol_type = other DNA
aggaacagagaacactgtga

SEQ ID NO: 68564 - DNA, 20 bp, synthetic construct
  source 1..20: mol_type = other DNA
gaggaacagagaacactgtg

SEQ ID NO: 68565 - DNA, 20 bp, synthetic construct
  source 1..20: mol_type = other DNA
agaggaacagagaacactgt

SEQ ID NO: 68566 - DNA, 20 bp, synthetic construct
  source 1..20: mol_type = other DNA
tagaggaacagagaacactg

SEQ ID NO: 68567 - DNA, 20 bp, synthetic construct
  source 1..20: mol_type = other DNA
ttagaggaacagagaacact

SEQ ID NO: 68568 - DNA, 20 bp, synthetic construct
  source 1..20: mol_type = other DNA
cttagaggaacagagaacac

SEQ ID NO: 68569 - DNA, 20 bp, synthetic construct
  source 1..20: mol_type = other DNA
tcttagaggaacagagaaca

SEQ ID NO: 68570 - DNA, 20 bp, synthetic construct
  source 1..20: mol_type = other DNA
atcttagaggaacagagaac

SEQ ID NO: 68571 - DNA, 20 bp, synthetic construct
  source 1..20: mol_type = other DNA
gatcttagaggaacagagaa

SEQ ID NO: 68572 - DNA, 20 bp, synthetic construct
  source 1..20: mol_type = other DNA
agatcttagaggaacagaga

SEQ ID NO: 68573 - DNA, 20 bp, synthetic construct
  source 1..20: mol_type = other DNA
aagatcttagaggaacagag

SEQ ID NO: 68574 - DNA, 20 bp, synthetic construct
  source 1..20: mol_type = other DNA
taagatcttagaggaacaga

SEQ ID NO: 68575 - DNA, 20 bp, synthetic construct
  source 1..20: mol_type = other DNA
ttaagatcttagaggaacag

SEQ ID NO: 68576 - DNA, 20 bp, synthetic construct
  source 1..20: mol_type = other DNA
tttaagatcttagaggaaca

SEQ ID NO: 68577 - DNA, 20 bp, synthetic construct
  source 1..20: mol_type = other DNA
gtttaagatcttagaggaac

SEQ ID NO: 68578 - DNA, 20 bp, synthetic construct
  source 1..20: mol_type = other DNA
agtttaagatcttagaggaa

SEQ ID NO: 68579 - DNA, 20 bp, synthetic construct
  source 1..20: mol_type = other DNA
gagtttaagatcttagagga

SEQ ID NO: 68580 - DNA, 20 bp, synthetic construct
  source 1..20: mol_type = other DNA
agagtttaagatcttagagg

SEQ ID NO: 68581 - DNA, 20 bp, synthetic construct
  source 1..20: mol_type = other DNA
cagagtttaagatcttagag

SEQ ID NO: 68582 - DNA, 20 bp, synthetic construct
  source 1..20: mol_type = other DNA
acagagtttaagatcttaga

SEQ ID NO: 68583 - DNA, 20 bp, synthetic construct
  source 1..20: mol_type = other DNA
gacagagtttaagatcttag

SEQ ID NO: 68584 - DNA, 20 bp, synthetic construct
  source 1..20: mol_type = other DNA
agacagagtttaagatctta

SEQ ID NO: 68585 - DNA, 20 bp, synthetic construct
  source 1..20: mol_type = other DNA
tagacagagtttaagatctt

SEQ ID NO: 68586 - DNA, 20 bp, synthetic construct
  source 1..20: mol_type = other DNA
gtagacagagtttaagatct

SEQ ID NO: 68587 - DNA, 20 bp, synthetic construct
  source 1..20: mol_type = other DNA
agtagacagagtttaagatc

SEQ ID NO: 68588 - DNA, 20 bp, synthetic construct
  source 1..20: mol_type = other DNA
gagtagacagagtttaagat

SEQ ID NO: 68589 - DNA, 20 bp, synthetic construct
  source 1..20: mol_type = other DNA
ggagtagacagagtttaaga

SEQ ID NO: 68590 - DNA, 20 bp, synthetic construct
  source 1..20: mol_type = other DNA
aggagtagacagagtttaag

SEQ ID NO: 68591 - DNA, 20 bp, synthetic construct
  source 1..20: mol_type = other DNA
taggagtagacagagtttaa

SEQ ID NO: 68592 - DNA, 20 bp, synthetic construct
  source 1..20: mol_type = other DNA
ttaggagtagacagagttta

SEQ ID NO: 68593 - DNA, 20 bp, synthetic construct
  source 1..20: mol_type = other DNA
attaggagtagacagagttt

SEQ ID NO: 68594 - DNA, 20 bp, synthetic construct
  source 1..20: mol_type = other DNA
gattaggagtagacagagtt

SEQ ID NO: 68595 - DNA, 20 bp, synthetic construct
  source 1..20: mol_type = other DNA
ggattaggagtagacagagt

SEQ ID NO: 68596 - DNA, 20 bp, synthetic construct
  source 1..20: mol_type = other DNA
tggattaggagtagacagag

SEQ ID NO: 68597 - DNA, 20 bp, synthetic construct
  source 1..20: mol_type = other DNA
ctggattaggagtagacaga

SEQ ID NO: 68598 - DNA, 20 bp, synthetic construct
  source 1..20: mol_type = other DNA
gctggattaggagtagacag

SEQ ID NO: 68599 - DNA, 20 bp, synthetic construct
  source 1..20: mol_type = other DNA
ggctggattaggagtagaca

SEQ ID NO: 68600 - DNA, 20 bp, synthetic construct
  source 1..20: mol_type = other DNA
aggctggattaggagtagac

SEQ ID NO: 68601 - DNA, 20 bp, synthetic construct
  source 1..20: mol_type = other DNA
caggctggattaggagtaga

SEQ ID NO: 68602 - DNA, 20 bp, synthetic construct
  source 1..20: mol_type = other DNA
gcaggctggattaggagtag

SEQ ID NO: 68603 - DNA, 20 bp, synthetic construct
  source 1..20: mol_type = other DNA
agcaggctggattaggagta

SEQ ID NO: 68604 - DNA, 20 bp, synthetic construct
  source 1..20: mol_type = other DNA
cagcaggctggattaggagt

SEQ ID NO: 68605 - DNA, 20 bp, synthetic construct
  source 1..20: mol_type = other DNA
ccagcaggctggattaggag

SEQ ID NO: 68606 - DNA, 20 bp, synthetic construct
  source 1..20: mol_type = other DNA
cccagcaggctggattagga

SEQ ID NO: 68607 - DNA, 20 bp, synthetic construct
  source 1..20: mol_type = other DNA
acccagcaggctggattagg

SEQ ID NO: 68608 - DNA, 20 bp, synthetic construct
  source 1..20: mol_type = other DNA
cacccagcaggctggattag

SEQ ID NO: 68609 - DNA, 20 bp, synthetic construct
  source 1..20: mol_type = other DNA
acacccagcaggctggatta

SEQ ID NO: 68610 - DNA, 20 bp, synthetic construct
  source 1..20: mol_type = other DNA
cacacccagcaggctggatt

SEQ ID NO: 68611 - DNA, 20 bp, synthetic construct
  source 1..20: mol_type = other DNA
ccacacccagcaggctggat

SEQ ID NO: 68612 - DNA, 20 bp, synthetic construct
  source 1..20: mol_type = other DNA
gccacacccagcaggctgga

SEQ ID NO: 68613 - DNA, 20 bp, synthetic construct
  source 1..20: mol_type = other DNA
agccacacccagcaggctgg

SEQ ID NO: 68614 - DNA, 20 bp, synthetic construct
  source 1..20: mol_type = other DNA
cagccacacccagcaggctg

SEQ ID NO: 68615 - DNA, 20 bp, synthetic construct
  source 1..20: mol_type = other DNA
ccagccacacccagcaggct

SEQ ID NO: 68616 - DNA, 20 bp, synthetic construct
  source 1..20: mol_type = other DNA
tccagccacacccagcaggc

SEQ ID NO: 68617 - DNA, 20 bp, synthetic construct
  source 1..20: mol_type = other DNA
ctccagccacacccagcagg

SEQ ID NO: 68618 - DNA, 20 bp, synthetic construct
  source 1..20: mol_type = other DNA
tctccagccacacccagcag

SEQ ID NO: 68619 - DNA, 20 bp, synthetic construct
  source 1..20: mol_type = other DNA
ttctccagccacacccagca

SEQ ID NO: 68620 - DNA, 20 bp, synthetic construct
  source 1..20: mol_type = other DNA
tttctccagccacacccagc

SEQ ID NO: 68621 - DNA, 20 bp, synthetic construct
  source 1..20: mol_type = other DNA
ctttctccagccacacccag

SEQ ID NO: 68622 - DNA, 20 bp, synthetic construct
  source 1..20: mol_type = other DNA
actttctccagccacaccca

SEQ ID NO: 68623 - DNA, 20 bp, synthetic construct
  source 1..20: mol_type = other DNA
gactttctccagccacaccc

SEQ ID NO: 68624 - DNA, 20 bp, synthetic construct
  source 1..20: mol_type = other DNA
ggactttctccagccacacc

SEQ ID NO: 68625 - DNA, 20 bp, synthetic construct
  source 1..20: mol_type = other DNA
gggactttctccagccacac

SEQ ID NO: 68626 - DNA, 20 bp, synthetic construct
  source 1..20: mol_type = other DNA
tgggactttctccagccaca

SEQ ID NO: 68627 - DNA, 20 bp, synthetic construct
  source 1..20: mol_type = other DNA
gtgggactttctccagccac

SEQ ID NO: 68628 - DNA, 20 bp, synthetic construct
  source 1..20: mol_type = other DNA
agtgggactttctccagcca

SEQ ID NO: 68629 - DNA, 20 bp, synthetic construct
  source 1..20: mol_type = other DNA
cagtgggactttctccagcc

SEQ ID NO: 68630 - DNA, 20 bp, synthetic construct
  source 1..20: mol_type = other DNA
ccagtgggactttctccagc

SEQ ID NO: 68631 - DNA, 20 bp, synthetic construct
  source 1..20: mol_type = other DNA
cccagtgggactttctccag

SEQ ID NO: 68632 - DNA, 20 bp, synthetic construct
  source 1..20: mol_type = other DNA
ccccagtgggactttctcca

SEQ ID NO: 68633 - DNA, 20 bp, synthetic construct
  source 1..20: mol_type = other DNA
cccccagtgggactttctcc

SEQ ID NO: 68634 - DNA, 20 bp, synthetic construct
  source 1..20: mol_type = other DNA
ccccccagtgggactttctc

SEQ ID NO: 68635 - DNA, 20 bp, synthetic construct
  source 1..20: mol_type = other DNA
gccccccagtgggactttct

SEQ ID NO: 68636 - DNA, 20 bp, synthetic construct
  source 1..20: mol_type = other DNA
agccccccagtgggactttc

SEQ ID NO: 68637 - DNA, 20 bp, synthetic construct
  source 1..20: mol_type = other DNA
cagccccccagtgggacttt

SEQ ID NO: 68638 - DNA, 20 bp, synthetic construct
  source 1..20: mol_type = other DNA
tcagccccccagtgggactt

SEQ ID NO: 68639 - DNA, 20 bp, synthetic construct
  source 1..20: mol_type = other DNA
atcagccccccagtgggact

SEQ ID NO: 68640 - DNA, 20 bp, synthetic construct
  source 1..20: mol_type = other DNA
aatcagccccccagtgggac

SEQ ID NO: 68641 - DNA, 20 bp, synthetic construct
  source 1..20: mol_type = other DNA
taatcagccccccagtggga

SEQ ID NO: 68642 - DNA, 20 bp, synthetic construct
  source 1..20: mol_type = other DNA
ctaatcagccccccagtggg

SEQ ID NO: 68643 - DNA, 20 bp, synthetic construct
  source 1..20: mol_type = other DNA
actaatcagccccccagtgg

SEQ ID NO: 68644 - DNA, 20 bp, synthetic construct
  source 1..20: mol_type = other DNA
aactaatcagccccccagtg

SEQ ID NO: 68645 - DNA, 20 bp, synthetic construct
  source 1..20: mol_type = other DNA
taactaatcagccccccagt

SEQ ID NO: 68646 - DNA, 20 bp, synthetic construct
  source 1..20: mol_type = other DNA
ctaactaatcagccccccag

SEQ ID NO: 68647 - DNA, 20 bp, synthetic construct
  source 1..20: mol_type = other DNA
cctaactaatcagcccccca

SEQ ID NO: 68648 - DNA, 20 bp, synthetic construct
  source 1..20: mol_type = other DNA
tcctaactaatcagcccccc

SEQ ID NO: 68649 - DNA, 20 bp, synthetic construct
  source 1..20: mol_type = other DNA
ttcctaactaatcagccccc

SEQ ID NO: 68650 - DNA, 20 bp, synthetic construct
  source 1..20: mol_type = other DNA
attcctaactaatcagcccc

SEQ ID NO: 68651 - DNA, 20 bp, synthetic construct
  source 1..20: mol_type = other DNA
cattcctaactaatcagccc

SEQ ID NO: 68652 - DNA, 20 bp, synthetic construct
  source 1..20: mol_type = other DNA
acattcctaactaatcagcc

SEQ ID NO: 68653 - DNA, 20 bp, synthetic construct
  source 1..20: mol_type = other DNA
tacattcctaactaatcagc

SEQ ID NO: 68654 - DNA, 20 bp, synthetic construct
  source 1..20: mol_type = other DNA
ctacattcctaactaatcag

SEQ ID NO: 68655 - DNA, 20 bp, synthetic construct
  source 1..20: mol_type = other DNA
cctacattcctaactaatca

SEQ ID NO: 68656 - DNA, 20 bp, synthetic construct
  source 1..20: mol_type = other DNA
ccctacattcctaactaatc

SEQ ID NO: 68657 - DNA, 20 bp, synthetic construct
  source 1..20: mol_type = other DNA
accctacattcctaactaat

SEQ ID NO: 68658 - DNA, 20 bp, synthetic construct
  source 1..20: mol_type = other DNA
aaccctacattcctaactaa

SEQ ID NO: 68659 - DNA, 20 bp, synthetic construct
  source 1..20: mol_type = other DNA
aaaccctacattcctaacta

SEQ ID NO: 68660 - DNA, 20 bp, synthetic construct
  source 1..20: mol_type = other DNA
gaaaccctacattcctaact

SEQ ID NO: 68661 - DNA, 20 bp, synthetic construct
  source 1..20: mol_type = other DNA
ggaaaccctacattcctaac

SEQ ID NO: 68662 - DNA, 20 bp, synthetic construct
  source 1..20: mol_type = other DNA
tggaaaccctacattcctaa

SEQ ID NO: 68663 - DNA, 20 bp, synthetic construct
  source 1..20: mol_type = other DNA
ctggaaaccctacattccta

SEQ ID NO: 68664 - DNA, 20 bp, synthetic construct
  source 1..20: mol_type = other DNA
gctggaaaccctacattcct

SEQ ID NO: 68665 - DNA, 20 bp, synthetic construct
  source 1..20: mol_type = other DNA
agctggaaaccctacattcc

SEQ ID NO: 68666 - DNA, 20 bp, synthetic construct
  source 1..20: mol_type = other DNA
gagctggaaaccctacattc

SEQ ID NO: 68667 - DNA, 20 bp, synthetic construct
  source 1..20: mol_type = other DNA
agagctggaaaccctacatt

SEQ ID NO: 68668 - DNA, 20 bp, synthetic construct
  source 1..20: mol_type = other DNA
aagagctggaaaccctacat

SEQ ID NO: 68669 - DNA, 20 bp, synthetic construct
  source 1..20: mol_type = other DNA
caagagctggaaaccctaca

SEQ ID NO: 68670 - DNA, 20 bp, synthetic construct
  source 1..20: mol_type = other DNA
gcaagagctggaaaccctac

SEQ ID NO: 68671 - DNA, 20 bp, synthetic construct
  source 1..20: mol_type = other DNA
agcaagagctggaaacccta

SEQ ID NO: 68672 - DNA, 20 bp, synthetic construct
  source 1..20: mol_type = other DNA
cagcaagagctggaaaccct

SEQ ID NO: 68673 - DNA, 20 bp, synthetic construct
  source 1..20: mol_type = other DNA
ccagcaagagctggaaaccc

SEQ ID NO: 68674 - DNA, 20 bp, synthetic construct
  source 1..20: mol_type = other DNA
tccagcaagagctggaaacc

SEQ ID NO: 68675 - DNA, 20 bp, synthetic construct
  source 1..20: mol_type = other DNA
ctccagcaagagctggaaac

SEQ ID NO: 68676 - DNA, 20 bp, synthetic construct
  source 1..20: mol_type = other DNA
gctccagcaagagctggaaa

SEQ ID NO: 68677 - DNA, 20 bp, synthetic construct
  source 1..20: mol_type = other DNA
ggctccagcaagagctggaa

SEQ ID NO: 68678 - DNA, 20 bp, synthetic construct
  source 1..20: mol_type = other DNA
aggctccagcaagagctgga

SEQ ID NO: 68679 - DNA, 20 bp, synthetic construct
  source 1..20: mol_type = other DNA
gaggctccagcaagagctgg

SEQ ID NO: 68680 - DNA, 20 bp, synthetic construct
  source 1..20: mol_type = other DNA
tgaggctccagcaagagctg

SEQ ID NO: 68681 - DNA, 20 bp, synthetic construct
  source 1..20: mol_type = other DNA
ctgaggctccagcaagagct

SEQ ID NO: 68682 - DNA, 20 bp, synthetic construct
  source 1..20: mol_type = other DNA
tctgaggctccagcaagagc

SEQ ID NO: 68683 - DNA, 20 bp, synthetic construct
  source 1..20: mol_type = other DNA
ttctgaggctccagcaagag

SEQ ID NO: 68684 - DNA, 20 bp, synthetic construct
  source 1..20: mol_type = other DNA
cttctgaggctccagcaaga

SEQ ID NO: 68685 - DNA, 20 bp, synthetic construct
  source 1..20: mol_type = other DNA
tcttctgaggctccagcaag

SEQ ID NO: 68686 - DNA, 20 bp, synthetic construct
  source 1..20: mol_type = other DNA
ctcttctgaggctccagcaa

SEQ ID NO: 68687 - DNA, 20 bp, synthetic construct
  source 1..20: mol_type = other DNA
actcttctgaggctccagca

SEQ ID NO: 68688 - DNA, 20 bp, synthetic construct
  source 1..20: mol_type = other DNA
aactcttctgaggctccagc

SEQ ID NO: 68689 - DNA, 20 bp, synthetic construct
  source 1..20: mol_type = other DNA
gaactcttctgaggctccag

SEQ ID NO: 68690 - DNA, 20 bp, synthetic construct
  source 1..20: mol_type = other DNA
tgaactcttctgaggctcca

SEQ ID NO: 68691 - DNA, 20 bp, synthetic construct
  source 1..20: mol_type = other DNA
ctgaactcttctgaggctcc

SEQ ID NO: 68692 - DNA, 20 bp, synthetic construct
  source 1..20: mol_type = other DNA
gctgaactcttctgaggctc

SEQ ID NO: 68693 - DNA, 20 bp, synthetic construct
  source 1..20: mol_type = other DNA
tgctgaactcttctgaggct

SEQ ID NO: 68694 - DNA, 20 bp, synthetic construct
  source 1..20: mol_type = other DNA
ctgctgaactcttctgaggc

SEQ ID NO: 68695 - DNA, 20 bp, synthetic construct
  source 1..20: mol_type = other DNA
tctgctgaactcttctgagg

SEQ ID NO: 68696 - DNA, 20 bp, synthetic construct
  source 1..20: mol_type = other DNA
gtctgctgaactcttctgag

SEQ ID NO: 68697 - DNA, 20 bp, synthetic construct
  source 1..20: mol_type = other DNA
agtctgctgaactcttctga

SEQ ID NO: 68698 - DNA, 20 bp, synthetic construct
  source 1..20: mol_type = other DNA
aagtctgctgaactcttctg

SEQ ID NO: 68699 - DNA, 20 bp, synthetic construct
  source 1..20: mol_type = other DNA
aaagtctgctgaactcttct

SEQ ID NO: 68700 - DNA, 20 bp, synthetic construct
  source 1..20: mol_type = other DNA
aaaagtctgctgaactcttc

SEQ ID NO: 68701 - DNA, 20 bp, synthetic construct
  source 1..20: mol_type = other DNA
aaaaagtctgctgaactctt

SEQ ID NO: 68702 - DNA, 20 bp, synthetic construct
  source 1..20: mol_type = other DNA
aaaaaagtctgctgaactct

SEQ ID NO: 68703 - DNA, 20 bp, synthetic construct
  source 1..20: mol_type = other DNA
aaaaaaagtctgctgaactc

SEQ ID NO: 68704 - DNA, 20 bp, synthetic construct
  source 1..20: mol_type = other DNA
aaaaaaaagtctgctgaact

SEQ ID NO: 68705 - DNA, 20 bp, synthetic construct
  source 1..20: mol_type = other DNA
aaaaaaaaagtctgctgaac

SEQ ID NO: 68706 - DNA, 20 bp, synthetic construct
  source 1..20: mol_type = other DNA
aaaaaaaaaagtctgctgaa

SEQ ID NO: 68707 - DNA, 20 bp, synthetic construct
  source 1..20: mol_type = other DNA
aaaaaaaaaaagtctgctga

SEQ ID NO: 68708 - DNA, 20 bp, synthetic construct
  source 1..20: mol_type = other DNA
aaaaaaaaaaaagtctgctg

SEQ ID NO: 68709 - DNA, 20 bp, synthetic construct
  source 1..20: mol_type = other DNA
aaaaaaaaaaaaagtctgct

SEQ ID NO: 68710 - DNA, 20 bp, synthetic construct
  source 1..20: mol_type = other DNA
aaaaaaaaaaaaaagtctgc

SEQ ID NO: 68711 - DNA, 20 bp, synthetic construct
  source 1..20: mol_type = other DNA
aaaaaaaaaaaaaaagtctg

SEQ ID NO: 68712 - DNA, 20 bp, synthetic construct
  source 1..20: mol_type = other DNA
aaaaaaaaaaaaaaaagtct

SEQ ID NO: 68713 - DNA, 20 bp, synthetic construct
  source 1..20: mol_type = other DNA
aaaaaaaaaaaaaaaaagtc

SEQ ID NO: 68714 - DNA, 20 bp, synthetic construct
  source 1..20: mol_type = other DNA
aaaaaaaaaaaaaaaaaagt

SEQ ID NO: 68715 - DNA, 20 bp, synthetic construct
  source 1..20: mol_type = other DNA
gaaaaaaaaaaaaaaaaaag

SEQ ID NO: 68716 - DNA, 20 bp, synthetic construct
  source 1..20: mol_type = other DNA
ggaaaaaaaaaaaaaaaaaa

SEQ ID NO: 68717 - DNA, 20 bp, synthetic construct
  source 1..20: mol_type = other DNA
aggaaaaaaaaaaaaaaaaa

SEQ ID NO: 68718 - DNA, 20 bp, synthetic construct
  source 1..20: mol_type = other DNA
aaggaaaaaaaaaaaaaaaa

SEQ ID NO: 68719 - DNA, 20 bp, synthetic construct
  source 1..20: mol_type = other DNA
taaggaaaaaaaaaaaaaaa

SEQ ID NO: 68720 - DNA, 20 bp, synthetic construct
  source 1..20: mol_type = other DNA
ttaaggaaaaaaaaaaaaaa

SEQ ID NO: 68721 - DNA, 20 bp, synthetic construct
  source 1..20: mol_type = other DNA
tttaaggaaaaaaaaaaaaa

SEQ ID NO: 68722 - DNA, 20 bp, synthetic construct
  source 1..20: mol_type = other DNA
gtttaaggaaaaaaaaaaaa

SEQ ID NO: 68723 - DNA, 20 bp, synthetic construct
  source 1..20: mol_type = other DNA
ggtttaaggaaaaaaaaaaa

SEQ ID NO: 68724 - DNA, 20 bp, synthetic construct
  source 1..20: mol_type = other DNA
aggtttaaggaaaaaaaaaa

SEQ ID NO: 68725 - DNA, 20 bp, synthetic construct
  source 1..20: mol_type = other DNA
taggtttaaggaaaaaaaaa

SEQ ID NO: 68726 - DNA, 20 bp, synthetic construct
  source 1..20: mol_type = other DNA
ataggtttaaggaaaaaaaa

SEQ ID NO: 68727 - DNA, 20 bp, synthetic construct
  source 1..20: mol_type = other DNA
aataggtttaaggaaaaaaa

SEQ ID NO: 68728 - DNA, 20 bp, synthetic construct
  source 1..20: mol_type = other DNA
aaataggtttaaggaaaaaa

SEQ ID NO: 68729 - DNA, 20 bp, synthetic construct
  source 1..20: mol_type = other DNA
gaaataggtttaaggaaaaa

SEQ ID NO: 68730 - DNA, 20 bp, synthetic construct
  source 1..20: mol_type = other DNA
agaaataggtttaaggaaaa

SEQ ID NO: 68731 - DNA, 20 bp, synthetic construct
  source 1..20: mol_type = other DNA
cagaaataggtttaaggaaa

SEQ ID NO: 68732 - DNA, 20 bp, synthetic construct
  source 1..20: mol_type = other DNA
gcagaaataggtttaaggaa

SEQ ID NO: 68733 - DNA, 20 bp, synthetic construct
  source 1..20: mol_type = other DNA
tgcagaaataggtttaagga

SEQ ID NO: 68734 - DNA, 20 bp, synthetic construct
  source 1..20: mol_type = other DNA
ctgcagaaataggtttaagg

SEQ ID NO: 68735 - DNA, 20 bp, synthetic construct
  source 1..20: mol_type = other DNA
gctgcagaaataggtttaag

SEQ ID NO: 68736 - DNA, 20 bp, synthetic construct
  source 1..20: mol_type = other DNA
ggctgcagaaataggtttaa

SEQ ID NO: 68737 - DNA, 20 bp, synthetic construct
  source 1..20: mol_type = other DNA
aggctgcagaaataggttta

SEQ ID NO: 68738 - DNA, 20 bp, synthetic construct
  source 1..20: mol_type = other DNA
aaggctgcagaaataggttt

SEQ ID NO: 68739 - DNA, 20 bp, synthetic construct
  source 1..20: mol_type = other DNA
caaggctgcagaaataggtt

SEQ ID NO: 68740 - DNA, 20 bp, synthetic construct
  source 1..20: mol_type = other DNA
tcaaggctgcagaaataggt

SEQ ID NO: 68741 - DNA, 20 bp, synthetic construct
  source 1..20: mol_type = other DNA
atcaaggctgcagaaatagg

SEQ ID NO: 68742 - DNA, 20 bp, synthetic construct
  source 1..20: mol_type = other DNA
catcaaggctgcagaaatag

SEQ ID NO: 68743 - DNA, 20 bp, synthetic construct
  source 1..20: mol_type = other DNA
tcatcaaggctgcagaaata

SEQ ID NO: 68744 - DNA, 20 bp, synthetic construct
  source 1..20: mol_type = other DNA
gtcatcaaggctgcagaaat

SEQ ID NO: 68745 - DNA, 20 bp, synthetic construct
  source 1..20: mol_type = other DNA
ggtcatcaaggctgcagaaa

SEQ ID NO: 68746 - DNA, 20 bp, synthetic construct
  source 1..20: mol_type = other DNA
tggtcatcaaggctgcagaa

SEQ ID NO: 68747 - DNA, 20 bp, synthetic construct
  source 1..20: mol_type = other DNA
gtggtcatcaaggctgcaga

SEQ ID NO: 68748 - DNA, 20 bp, synthetic construct
  source 1..20: mol_type = other DNA
agtggtcatcaaggctgcag

SEQ ID NO: 68749 - DNA, 20 bp, synthetic construct
  source 1..20: mol_type = other DNA
gagtggtcatcaaggctgca

SEQ ID NO: 68750 - DNA, 20 bp, synthetic construct
  source 1..20: mol_type = other DNA
ggagtggtcatcaaggctgc

SEQ ID NO: 68751 - DNA, 20 bp, synthetic construct
  source 1..20: mol_type = other DNA
aggagtggtcatcaaggctg

SEQ ID NO: 68752 - DNA, 20 bp, synthetic construct
  source 1..20: mol_type = other DNA
aaggagtggtcatcaaggct

SEQ ID NO: 68753 - DNA, 20 bp, synthetic construct
  source 1..20: mol_type = other DNA
gaaggagtggtcatcaaggc

SEQ ID NO: 68754 - DNA, 20 bp, synthetic construct
  source 1..20: mol_type = other DNA
ggaaggagtggtcatcaagg

SEQ ID NO: 68755 - DNA, 20 bp, synthetic construct
  source 1..20: mol_type = other DNA
tggaaggagtggtcatcaag

SEQ ID NO: 68756 - DNA, 20 bp, synthetic construct
  source 1..20: mol_type = other DNA
ctggaaggagtggtcatcaa

SEQ ID NO: 68757 - DNA, 20 bp, synthetic construct
  source 1..20: mol_type = other DNA
actggaaggagtggtcatca

SEQ ID NO: 68758 - DNA, 20 bp, synthetic construct
  source 1..20: mol_type = other DNA
gactggaaggagtggtcatc

SEQ ID NO: 68759 - DNA, 20 bp, synthetic construct
  source 1..20: mol_type = other DNA
ggactggaaggagtggtcat

SEQ ID NO: 68760 - DNA, 20 bp, synthetic construct
  source 1..20: mol_type = other DNA
gggactggaaggagtggtca

SEQ ID NO: 68761 - DNA, 20 bp, synthetic construct
  source 1..20: mol_type = other DNA
agggactggaaggagtggtc

SEQ ID NO: 68762 - DNA, 20 bp, synthetic construct
  source 1..20: mol_type = other DNA
gagggactggaaggagtggt

SEQ ID NO: 68763 - DNA, 20 bp, synthetic construct
  source 1..20: mol_type = other DNA
tgagggactggaaggagtgg

SEQ ID NO: 68764 - DNA, 20 bp, synthetic construct
  source 1..20: mol_type = other DNA
gtgagggactggaaggagtg

SEQ ID NO: 68765 - DNA, 20 bp, synthetic construct
  source 1..20: mol_type = other DNA
ggtgagggactggaaggagt

SEQ ID NO: 68766 - DNA, 20 bp, synthetic construct
  source 1..20: mol_type = other DNA
aggtgagggactggaaggag

SEQ ID NO: 68767 - DNA, 20 bp, synthetic construct
  source 1..20: mol_type = other DNA
taggtgagggactggaagga

SEQ ID NO: 68768 - DNA, 20 bp, synthetic construct
  source 1..20: mol_type = other DNA
ataggtgagggactggaagg

SEQ ID NO: 68769 - DNA, 20 bp, synthetic construct
  source 1..20: mol_type = other DNA
aataggtgagggactggaag

SEQ ID NO: 68770 - DNA, 20 bp, synthetic construct
  source 1..20: mol_type = other DNA
aaataggtgagggactggaa

SEQ ID NO: 68771 - DNA, 20 bp, synthetic construct
  source 1..20: mol_type = other DNA
caaataggtgagggactgga

SEQ ID NO: 68772 - DNA, 20 bp, synthetic construct
  source 1..20: mol_type = other DNA
gcaaataggtgagggactgg

SEQ ID NO: 68773 - DNA, 20 bp, synthetic construct
  source 1..20: mol_type = other DNA
agcaaataggtgagggactg

SEQ ID NO: 68774 - DNA, 20 bp, synthetic construct
  source 1..20: mol_type = other DNA
aagcaaataggtgagggact

SEQ ID NO: 68775 - DNA, 20 bp, synthetic construct
  source 1..20: mol_type = other DNA
aaagcaaataggtgagggac

SEQ ID NO: 68776 - DNA, 20 bp, synthetic construct
  source 1..20: mol_type = other DNA
taaagcaaataggtgaggga

SEQ ID NO: 68777 - DNA, 20 bp, synthetic construct
  source 1..20: mol_type = other DNA
ataaagcaaataggtgaggg

SEQ ID NO: 68778 - DNA, 20 bp, synthetic construct
  source 1..20: mol_type = other DNA
aataaagcaaataggtgagg

SEQ ID NO: 68779 - DNA, 20 bp, synthetic construct
  source 1..20: mol_type = other DNA
gaataaagcaaataggtgag

SEQ ID NO: 68780 - DNA, 20 bp, synthetic construct
  source 1..20: mol_type = other DNA
tgaataaagcaaataggtga

SEQ ID NO: 68781 - DNA, 20 bp, synthetic construct
  source 1..20: mol_type = other DNA
atgaataaagcaaataggtg

SEQ ID NO: 68782 - DNA, 20 bp, synthetic construct
  source 1..20: mol_type = other DNA
catgaataaagcaaataggt

SEQ ID NO: 68783 - DNA, 20 bp, synthetic construct
  source 1..20: mol_type = other DNA
ccatgaataaagcaaatagg

SEQ ID NO: 68784 - DNA, 20 bp, synthetic construct
  source 1..20: mol_type = other DNA
gccatgaataaagcaaatag

SEQ ID NO: 68785 - DNA, 20 bp, synthetic construct
  source 1..20: mol_type = other DNA
tgccatgaataaagcaaata

SEQ ID NO: 68786 - DNA, 20 bp, synthetic construct
  source 1..20: mol_type = other DNA
ctgccatgaataaagcaaat

SEQ ID NO: 68787 - DNA, 20 bp, synthetic construct
  source 1..20: mol_type = other DNA
tctgccatgaataaagcaaa

SEQ ID NO: 68788 - DNA, 20 bp, synthetic construct
  source 1..20: mol_type = other DNA
ctctgccatgaataaagcaa

SEQ ID NO: 68789 - DNA, 20 bp, synthetic construct
  source 1..20: mol_type = other DNA
cctctgccatgaataaagca

SEQ ID NO: 68790 - DNA, 20 bp, synthetic construct
  source 1..20: mol_type = other DNA
gcctctgccatgaataaagc

SEQ ID NO: 68791 - DNA, 20 bp, synthetic construct
  source 1..20: mol_type = other DNA
agcctctgccatgaataaag

SEQ ID NO: 68792 - DNA, 20 bp, synthetic construct
  source 1..20: mol_type = other DNA
gagcctctgccatgaataaa

SEQ ID NO: 68793 - DNA, 20 bp, synthetic construct
  source 1..20: mol_type = other DNA
agagcctctgccatgaataa

SEQ ID NO: 68794 - DNA, 20 bp, synthetic construct
  source 1..20: mol_type = other DNA
aagagcctctgccatgaata

SEQ ID NO: 68795 - DNA, 20 bp, synthetic construct
  source 1..20: mol_type = other DNA
aaagagcctctgccatgaat

SEQ ID NO: 68796 - DNA, 20 bp, synthetic construct
  source 1..20: mol_type = other DNA
gaaagagcctctgccatgaa

SEQ ID NO: 68797 - DNA, 20 bp, synthetic construct
  source 1..20: mol_type = other DNA
agaaagagcctctgccatga

SEQ ID NO: 68798 - DNA, 20 bp, synthetic construct
  source 1..20: mol_type = other DNA
aagaaagagcctctgccatg

SEQ ID NO: 68799 - DNA, 20 bp, synthetic construct
  source 1..20: mol_type = other DNA
gaagaaagagcctctgccat

SEQ ID NO: 68800 - DNA, 20 bp, synthetic construct
  source 1..20: mol_type = other DNA
ggaagaaagagcctctgcca

SEQ ID NO: 68801 - DNA, 20 bp, synthetic construct
  source 1..20: mol_type = other DNA
aggaagaaagagcctctgcc

SEQ ID NO: 68802 - DNA, 20 bp, synthetic construct
  source 1..20: mol_type = other DNA
caggaagaaagagcctctgc

SEQ ID NO: 68803 - DNA, 20 bp, synthetic construct
  source 1..20: mol_type = other DNA
gcaggaagaaagagcctctg

SEQ ID NO: 68804 - DNA, 20 bp, synthetic construct
  source 1..20: mol_type = other DNA
agcaggaagaaagagcctct

SEQ ID NO: 68805 - DNA, 20 bp, synthetic construct
  source 1..20: mol_type = other DNA
aagcaggaagaaagagcctc

SEQ ID NO: 68806 - DNA, 20 bp, synthetic construct
  source 1..20: mol_type = other DNA
caagcaggaagaaagagcct

SEQ ID NO: 68807 - DNA, 20 bp, synthetic construct
  source 1..20: mol_type = other DNA
acaagcaggaagaaagagcc

SEQ ID NO: 68808 - DNA, 20 bp, synthetic construct
  source 1..20: mol_type = other DNA
gacaagcaggaagaaagagc

SEQ ID NO: 68809 - DNA, 20 bp, synthetic construct
  source 1..20: mol_type = other DNA
tgacaagcaggaagaaagag

SEQ ID NO: 68810 - DNA, 20 bp, synthetic construct
  source 1..20: mol_type = other DNA
ctgacaagcaggaagaaaga

SEQ ID NO: 68811 - DNA, 20 bp, synthetic construct
  source 1..20: mol_type = other DNA
actgacaagcaggaagaaag

SEQ ID NO: 68812 - DNA, 20 bp, synthetic construct
  source 1..20: mol_type = other DNA
tactgacaagcaggaagaaa

SEQ ID NO: 68813 - DNA, 20 bp, synthetic construct
  source 1..20: mol_type = other DNA
gtactgacaagcaggaagaa

SEQ ID NO: 68814 - DNA, 20 bp, synthetic construct
  source 1..20: mol_type = other DNA
tgtactgacaagcaggaaga

SEQ ID NO: 68815 - DNA, 20 bp, synthetic construct
  source 1..20: mol_type = other DNA
ttgtactgacaagcaggaag

SEQ ID NO: 68816 - DNA, 20 bp, synthetic construct
  source 1..20: mol_type = other DNA
tttgtactgacaagcaggaa

SEQ ID NO: 68817 - DNA, 20 bp, synthetic construct
  source 1..20: mol_type = other DNA
ctttgtactgacaagcagga

SEQ ID NO: 68818 - DNA, 20 bp, synthetic construct
  source 1..20: mol_type = other DNA
tctttgtactgacaagcagg

SEQ ID NO: 68819 - DNA, 20 bp, synthetic construct
  source 1..20: mol_type = other DNA
ctctttgtactgacaagcag

SEQ ID NO: 68820 - DNA, 20 bp, synthetic construct
  source 1..20: mol_type = other DNA
cctctttgtactgacaagca

SEQ ID NO: 68821 - DNA, 20 bp, synthetic construct
  source 1..20: mol_type = other DNA
gcctctttgtactgacaagc

SEQ ID NO: 68822 - DNA, 20 bp, synthetic construct
  source 1..20: mol_type = other DNA
tgcctctttgtactgacaag

SEQ ID NO: 68823 - DNA, 20 bp, synthetic construct
  source 1..20: mol_type = other DNA
ctgcctctttgtactgacaa

SEQ ID NO: 68824 - DNA, 20 bp, synthetic construct
  source 1..20: mol_type = other DNA
cctgcctctttgtactgaca

SEQ ID NO: 68825 - DNA, 20 bp, synthetic construct
  source 1..20: mol_type = other DNA
tcctgcctctttgtactgac

SEQ ID NO: 68826 - DNA, 20 bp, synthetic construct
  source 1..20: mol_type = other DNA
atcctgcctctttgtactga

SEQ ID NO: 68827 - DNA, 20 bp, synthetic construct
  source 1..20: mol_type = other DNA
aatcctgcctctttgtactg

SEQ ID NO: 68828 - DNA, 20 bp, synthetic construct
  source 1..20: mol_type = other DNA
gaatcctgcctctttgtact

SEQ ID NO: 68829 - DNA, 20 bp, synthetic construct
  source 1..20: mol_type = other DNA
agaatcctgcctctttgtac

SEQ ID NO: 68830 - DNA, 20 bp, synthetic construct
  source 1..20: mol_type = other DNA
aagaatcctgcctctttgta

SEQ ID NO: 68831 - DNA, 20 bp, synthetic construct
  source 1..20: mol_type = other DNA
gaagaatcctgcctctttgt

SEQ ID NO: 68832 - DNA, 20 bp, synthetic construct
  source 1..20: mol_type = other DNA
tgaagaatcctgcctctttg

SEQ ID NO: 68833 - DNA, 20 bp, synthetic construct
  source 1..20: mol_type = other DNA
gtgaagaatcctgcctcttt

SEQ ID NO: 68834 - DNA, 20 bp, synthetic construct
  source 1..20: mol_type = other DNA
ggtgaagaatcctgcctctt

SEQ ID NO: 68835 - DNA, 20 bp, synthetic construct
  source 1..20: mol_type = other DNA
aggtgaagaatcctgcctct

SEQ ID NO: 68836 - DNA, 20 bp, synthetic construct
  source 1..20: mol_type = other DNA
caggtgaagaatcctgcctc

SEQ ID NO: 68837 - DNA, 20 bp, synthetic construct
  source 1..20: mol_type = other DNA
ccaggtgaagaatcctgcct

SEQ ID NO: 68838 - DNA, 20 bp, synthetic construct
  source 1..20: mol_type = other DNA
tccaggtgaagaatcctgcc

SEQ ID NO: 68839 - DNA, 20 bp, synthetic construct
  source 1..20: mol_type = other DNA
atccaggtgaagaatcctgc

SEQ ID NO: 68840 - DNA, 20 bp, synthetic construct
  source 1..20: mol_type = other DNA
gatccaggtgaagaatcctg

SEQ ID NO: 68841 - DNA, 20 bp, synthetic construct
  source 1..20: mol_type = other DNA
agatccaggtgaagaatcct

SEQ ID NO: 68842 - DNA, 20 bp, synthetic construct
  source 1..20: mol_type = other DNA
cagatccaggtgaagaatcc

SEQ ID NO: 68843 - DNA, 20 bp, synthetic construct
  source 1..20: mol_type = other DNA
acagatccaggtgaagaatc

SEQ ID NO: 68844 - DNA, 20 bp, synthetic construct
  source 1..20: mol_type = other DNA
cacagatccaggtgaagaat

SEQ ID NO: 68845 - DNA, 20 bp, synthetic construct
  source 1..20: mol_type = other DNA
ccacagatccaggtgaagaa

SEQ ID NO: 68846 - DNA, 20 bp, synthetic construct
  source 1..20: mol_type = other DNA
tccacagatccaggtgaaga

SEQ ID NO: 68847 - DNA, 20 bp, synthetic construct
  source 1..20: mol_type = other DNA
atccacagatccaggtgaag

SEQ ID NO: 68848 - DNA, 20 bp, synthetic construct
  source 1..20: mol_type = other DNA
aatccacagatccaggtgaa

SEQ ID NO: 68849 - DNA, 20 bp, synthetic construct
  source 1..20: mol_type = other DNA
gaatccacagatccaggtga

SEQ ID NO: 68850 - DNA, 20 bp, synthetic construct
  source 1..20: mol_type = other DNA
agaatccacagatccaggtg

SEQ ID NO: 68851 - DNA, 20 bp, synthetic construct
  source 1..20: mol_type = other DNA
gagaatccacagatccaggt

SEQ ID NO: 68852 - DNA, 20 bp, synthetic construct
  source 1..20: mol_type = other DNA
tgagaatccacagatccagg

SEQ ID NO: 68853 - DNA, 20 bp, synthetic construct
  source 1..20: mol_type = other DNA
ttgagaatccacagatccag

SEQ ID NO: 68854 - DNA, 20 bp, synthetic construct
  source 1..20: mol_type = other DNA
tttgagaatccacagatcca

SEQ ID NO: 68855 - DNA, 20 bp, synthetic construct
  source 1..20: mol_type = other DNA
ctttgagaatccacagatcc

SEQ ID NO: 68856 - DNA, 20 bp, synthetic construct
  source 1..20: mol_type = other DNA
tctttgagaatccacagatc

SEQ ID NO: 68857 - DNA, 20 bp, synthetic construct
  source 1..20: mol_type = other DNA
ttctttgagaatccacagat

SEQ ID NO: 68858 - DNA, 20 bp, synthetic construct
  source 1..20: mol_type = other DNA
attctttgagaatccacaga

SEQ ID NO: 68859 - DNA, 20 bp, synthetic construct
  source 1..20: mol_type = other DNA
aattctttgagaatccacag

SEQ ID NO: 68860 - DNA, 20 bp, synthetic construct
  source 1..20: mol_type = other DNA
aaattctttgagaatccaca

SEQ ID NO: 68861 - DNA, 20 bp, synthetic construct
  source 1..20: mol_type = other DNA
caaattctttgagaatccac

SEQ ID NO: 68862 - DNA, 20 bp, synthetic construct
  source 1..20: mol_type = other DNA
acaaattctttgagaatcca

SEQ ID NO: 68863 - DNA, 20 bp, synthetic construct
  source 1..20: mol_type = other DNA
cacaaattctttgagaatcc

SEQ ID NO: 68864 - DNA, 20 bp, synthetic construct
  source 1..20: mol_type = other DNA
ccacaaattctttgagaatc

SEQ ID NO: 68865 - DNA, 20 bp, synthetic construct
  source 1..20: mol_type = other DNA
tccacaaattctttgagaat

SEQ ID NO: 68866 - DNA, 20 bp, synthetic construct
  source 1..20: mol_type = other DNA
ctccacaaattctttgagaa

SEQ ID NO: 68867 - DNA, 20 bp, synthetic construct
  source 1..20: mol_type = other DNA
tctccacaaattctttgaga

SEQ ID NO: 68868 - DNA, 20 bp, synthetic construct
  source 1..20: mol_type = other DNA
ctctccacaaattctttgag

SEQ ID NO: 68869 - DNA, 20 bp, synthetic construct
  source 1..20: mol_type = other DNA
tctctccacaaattctttga

SEQ ID NO: 68870 - DNA, 20 bp, synthetic construct
  source 1..20: mol_type = other DNA
ttctctccacaaattctttg

SEQ ID NO: 68871 - DNA, 20 bp, synthetic construct
  source 1..20: mol_type = other DNA
attctctccacaaattcttt

SEQ ID NO: 68872 - DNA, 20 bp, synthetic construct
  source 1..20: mol_type = other DNA
aattctctccacaaattctt

SEQ ID NO: 68873 - DNA, 20 bp, synthetic construct
  source 1..20: mol_type = other DNA
gaattctctccacaaattct

SEQ ID NO: 68874 - DNA, 20 bp, synthetic construct
  source 1..20: mol_type = other DNA
tgaattctctccacaaattc

SEQ ID NO: 68875 - DNA, 20 bp, synthetic construct
  source 1..20: mol_type = other DNA
ctgaattctctccacaaatt

SEQ ID NO: 68876 - DNA, 20 bp, synthetic construct
  source 1..20: mol_type = other DNA
cctgaattctctccacaaat

SEQ ID NO: 68877 - DNA, 20 bp, synthetic construct
  source 1..20: mol_type = other DNA
ccctgaattctctccacaaa

SEQ ID NO: 68878 - DNA, 20 bp, synthetic construct
  source 1..20: mol_type = other DNA
gccctgaattctctccacaa

SEQ ID NO: 68879 - DNA, 20 bp, synthetic construct
  source 1..20: mol_type = other DNA
tgccctgaattctctccaca

SEQ ID NO: 68880 - DNA, 20 bp, synthetic construct
  source 1..20: mol_type = other DNA
atgccctgaattctctccac

SEQ ID NO: 68881 - DNA, 20 bp, synthetic construct
  source 1..20: mol_type = other DNA
aatgccctgaattctctcca

SEQ ID NO: 68882 - DNA, 20 bp, synthetic construct
  source 1..20: mol_type = other DNA
caatgccctgaattctctcc

SEQ ID NO: 68883 - DNA, 20 bp, synthetic construct
  source 1..20: mol_type = other DNA
tcaatgccctgaattctctc

SEQ ID NO: 68884 - DNA, 20 bp, synthetic construct
  source 1..20: mol_type = other DNA
atcaatgccctgaattctct

SEQ ID NO: 68885 - DNA, 20 bp, synthetic construct
  source 1..20: mol_type = other DNA
catcaatgccctgaattctc

SEQ ID NO: 68886 - DNA, 20 bp, synthetic construct
  source 1..20: mol_type = other DNA
tcatcaatgccctgaattct

SEQ ID NO: 68887 - DNA, 20 bp, synthetic construct
  source 1..20: mol_type = other DNA
gtcatcaatgccctgaattc

SEQ ID NO: 68888 - DNA, 20 bp, synthetic construct
  source 1..20: mol_type = other DNA
ggtcatcaatgccctgaatt

SEQ ID NO: 68889 - DNA, 20 bp, synthetic construct
  source 1..20: mol_type = other DNA
aggtcatcaatgccctgaat

SEQ ID NO: 68890 - DNA, 20 bp, synthetic construct
  source 1..20: mol_type = other DNA
aaggtcatcaatgccctgaa

SEQ ID NO: 68891 - DNA, 20 bp, synthetic construct
  source 1..20: mol_type = other DNA
caaggtcatcaatgccctga

SEQ ID NO: 68892 - DNA, 20 bp, synthetic construct
  source 1..20: mol_type = other DNA
ccaaggtcatcaatgccctg

SEQ ID NO: 68893 - DNA, 20 bp, synthetic construct
  source 1..20: mol_type = other DNA
tccaaggtcatcaatgccct

SEQ ID NO: 68894 - DNA, 20 bp, synthetic construct
  source 1..20: mol_type = other DNA
atccaaggtcatcaatgccc

SEQ ID NO: 68895 - DNA, 20 bp, synthetic construct
  source 1..20: mol_type = other DNA
catccaaggtcatcaatgcc

SEQ ID NO: 68896 - DNA, 20 bp, synthetic construct
  source 1..20: mol_type = other DNA
tcatccaaggtcatcaatgc

SEQ ID NO: 68897 - DNA, 20 bp, synthetic construct
  source 1..20: mol_type = other DNA
ttcatccaaggtcatcaatg

SEQ ID NO: 68898 - DNA, 20 bp, synthetic construct
  source 1..20: mol_type = other DNA
cttcatccaaggtcatcaat

SEQ ID NO: 68899 - DNA, 20 bp, synthetic construct
  source 1..20: mol_type = other DNA
tcttcatccaaggtcatcaa

SEQ ID NO: 68900 - DNA, 20 bp, synthetic construct
  source 1..20: mol_type = other DNA
ctcttcatccaaggtcatca

SEQ ID NO: 68901 - DNA, 20 bp, synthetic construct
  source 1..20: mol_type = other DNA
tctcttcatccaaggtcatc

SEQ ID NO: 68902 - DNA, 20 bp, synthetic construct
  source 1..20: mol_type = other DNA
ttctcttcatccaaggtcat

SEQ ID NO: 68903 - DNA, 20 bp, synthetic construct
  source 1..20: mol_type = other DNA
tttctcttcatccaaggtca

SEQ ID NO: 68904 - DNA, 20 bp, synthetic construct
  source 1..20: mol_type = other DNA
atttctcttcatccaaggtc

SEQ ID NO: 68905 - DNA, 20 bp, synthetic construct
  source 1..20: mol_type = other DNA
aatttctcttcatccaaggt

SEQ ID NO: 68906 - DNA, 20 bp, synthetic construct
  source 1..20: mol_type = other DNA
aaatttctcttcatccaagg

SEQ ID NO: 68907 - DNA, 20 bp, synthetic construct
  source 1..20: mol_type = other DNA
taaatttctcttcatccaag

SEQ ID NO: 68908 - DNA, 20 bp, synthetic construct
  source 1..20: mol_type = other DNA
gtaaatttctcttcatccaa

SEQ ID NO: 68909 - DNA, 20 bp, synthetic construct
  source 1..20: mol_type = other DNA
tgtaaatttctcttcatcca

SEQ ID NO: 68910 - DNA, 20 bp, synthetic construct
  source 1..20: mol_type = other DNA
atgtaaatttctcttcatcc

SEQ ID NO: 68911 - DNA, 20 bp, synthetic construct
  source 1..20: mol_type = other DNA
gatgtaaatttctcttcatc

SEQ ID NO: 68912 - DNA, 20 bp, synthetic construct
  source 1..20: mol_type = other DNA
agatgtaaatttctcttcat

SEQ ID NO: 68913 - DNA, 20 bp, synthetic construct
  source 1..20: mol_type = other DNA
aagatgtaaatttctcttca

SEQ ID NO: 68914 - DNA, 20 bp, synthetic construct
  source 1..20: mol_type = other DNA
aaagatgtaaatttctcttc

SEQ ID NO: 68915 - DNA, 20 bp, synthetic construct
  source 1..20: mol_type = other DNA
taaagatgtaaatttctctt

SEQ ID NO: 68916 - DNA, 20 bp, synthetic construct
  source 1..20: mol_type = other DNA
ataaagatgtaaatttctct

SEQ ID NO: 68917 - DNA, 20 bp, synthetic construct
  source 1..20: mol_type = other DNA
aataaagatgtaaatttctc

SEQ ID NO: 68918 - DNA, 20 bp, synthetic construct
  source 1..20: mol_type = other DNA
aaataaagatgtaaatttct

SEQ ID NO: 68919 - DNA, 20 bp, synthetic construct
  source 1..20: mol_type = other DNA
taaataaagatgtaaatttc

SEQ ID NO: 68920 - DNA, 20 bp, synthetic construct
  source 1..20: mol_type = other DNA
gtaaataaagatgtaaattt

SEQ ID NO: 68921 - DNA, 20 bp, synthetic construct
  source 1..20: mol_type = other DNA
tgtaaataaagatgtaaatt

SEQ ID NO: 68922 - DNA, 20 bp, synthetic construct
  source 1..20: mol_type = other DNA
gtgtaaataaagatgtaaat

SEQ ID NO: 68923 - DNA, 20 bp, synthetic construct
  source 1..20: mol_type = other DNA
agtgtaaataaagatgtaaa

SEQ ID NO: 68924 - DNA, 20 bp, synthetic construct
  source 1..20: mol_type = other DNA
tagtgtaaataaagatgtaa

SEQ ID NO: 68925 - DNA, 20 bp, synthetic construct
  source 1..20: mol_type = other DNA
ttagtgtaaataaagatgta

SEQ ID NO: 68926 - DNA, 20 bp, synthetic construct
  source 1..20: mol_type = other DNA
gttagtgtaaataaagatgt

SEQ ID NO: 68927 - DNA, 20 bp, synthetic construct
  source 1..20: mol_type = other DNA
ggttagtgtaaataaagatg

SEQ ID NO: 68928 - DNA, 20 bp, synthetic construct
  source 1..20: mol_type = other DNA
aggttagtgtaaataaagat

SEQ ID NO: 68929 - DNA, 20 bp, synthetic construct
  source 1..20: mol_type = other DNA
aaggttagtgtaaataaaga

SEQ ID NO: 68930 - DNA, 20 bp, synthetic construct
  source 1..20: mol_type = other DNA
gaaggttagtgtaaataaag

SEQ ID NO: 68931 - DNA, 20 bp, synthetic construct
  source 1..20: mol_type = other DNA
tgaaggttagtgtaaataaa

SEQ ID NO: 68932 - DNA, 20 bp, synthetic construct
  source 1..20: mol_type = other DNA
ttgaaggttagtgtaaataa

SEQ ID NO: 68933 - DNA, 20 bp, synthetic construct
  source 1..20: mol_type = other DNA
cttgaaggttagtgtaaata

SEQ ID NO: 68934 - DNA, 20 bp, synthetic construct
  source 1..20: mol_type = other DNA
acttgaaggttagtgtaaat

SEQ ID NO: 68935 - DNA, 20 bp, synthetic construct
  source 1..20: mol_type = other DNA
cacttgaaggttagtgtaaa

SEQ ID NO: 68936 - DNA, 20 bp, synthetic construct
  source 1..20: mol_type = other DNA
tcacttgaaggttagtgtaa

SEQ ID NO: 68937 - DNA, 20 bp, synthetic construct
  source 1..20: mol_type = other DNA
ttcacttgaaggttagtgta

SEQ ID NO: 68938 - DNA, 20 bp, synthetic construct
  source 1..20: mol_type = other DNA
tttcacttgaaggttagtgt

SEQ ID NO: 68939 - DNA, 20 bp, synthetic construct
  source 1..20: mol_type = other DNA
atttcacttgaaggttagtg

SEQ ID NO: 68940 - DNA, 20 bp, synthetic construct
  source 1..20: mol_type = other DNA
aatttcacttgaaggttagt

SEQ ID NO: 68941 - DNA, 20 bp, synthetic construct
  source 1..20: mol_type = other DNA
aaatttcacttgaaggttag

SEQ ID NO: 68942 - DNA, 20 bp, synthetic construct
  source 1..20: mol_type = other DNA
taaatttcacttgaaggtta

SEQ ID NO: 68943 - DNA, 20 bp, synthetic construct
  source 1..20: mol_type = other DNA
ctaaatttcacttgaaggtt

SEQ ID NO: 68944 - DNA, 20 bp, synthetic construct
  source 1..20: mol_type = other DNA
gctaaatttcacttgaaggt

SEQ ID NO: 68945 - DNA, 20 bp, synthetic construct
  source 1..20: mol_type = other DNA
tgctaaatttcacttgaagg

SEQ ID NO: 68946 - DNA, 20 bp, synthetic construct
  source 1..20: mol_type = other DNA
atgctaaatttcacttgaag

SEQ ID NO: 68947 - DNA, 20 bp, synthetic construct
  source 1..20: mol_type = other DNA
aatgctaaatttcacttgaa

SEQ ID NO: 68948 - DNA, 20 bp, synthetic construct
  source 1..20: mol_type = other DNA
aaatgctaaatttcacttga

SEQ ID NO: 68949 - DNA, 20 bp, synthetic construct
  source 1..20: mol_type = other DNA
aaaatgctaaatttcacttg

SEQ ID NO: 68950 - DNA, 20 bp, synthetic construct
  source 1..20: mol_type = other DNA
aaaaatgctaaatttcactt

SEQ ID NO: 68951 - DNA, 20 bp, synthetic construct
  source 1..20: mol_type = other DNA
aaaaaatgctaaatttcact

SEQ ID NO: 68952 - DNA, 20 bp, synthetic construct
  source 1..20: mol_type = other DNA
caaaaaatgctaaatttcac

SEQ ID NO: 68953 - DNA, 20 bp, synthetic construct
  source 1..20: mol_type = other DNA
gcaaaaaatgctaaatttca

SEQ ID NO: 68954 - DNA, 20 bp, synthetic construct
  source 1..20: mol_type = other DNA
ggcaaaaaatgctaaatttc

SEQ ID NO: 68955 - DNA, 20 bp, synthetic construct
  source 1..20: mol_type = other DNA
tggcaaaaaatgctaaattt

SEQ ID NO: 68956 - DNA, 20 bp, synthetic construct
  source 1..20: mol_type = other DNA
atggcaaaaaatgctaaatt

SEQ ID NO: 68957 - DNA, 20 bp, synthetic construct
  source 1..20: mol_type = other DNA
aatggcaaaaaatgctaaat

SEQ ID NO: 68958 - DNA, 20 bp, synthetic construct
  source 1..20: mol_type = other DNA
aaatggcaaaaaatgctaaa

SEQ ID NO: 68959 - DNA, 20 bp, synthetic construct
  source 1..20: mol_type = other DNA
taaatggcaaaaaatgctaa

SEQ ID NO: 68960 - DNA, 20 bp, synthetic construct
  source 1..20: mol_type = other DNA
ttaaatggcaaaaaatgcta

SEQ ID NO: 68961 - DNA, 20 bp, synthetic construct
  source 1..20: mol_type = other DNA
tttaaatggcaaaaaatgct

SEQ ID NO: 68962 - DNA, 20 bp, synthetic construct
  source 1..20: mol_type = other DNA
ttttaaatggcaaaaaatgc

SEQ ID NO: 68963 - DNA, 20 bp, synthetic construct
  source 1..20: mol_type = other DNA
tttttaaatggcaaaaaatg

SEQ ID NO: 68964 - DNA, 20 bp, synthetic construct
  source 1..20: mol_type = other DNA
atttttaaatggcaaaaaat

SEQ ID NO: 68965 - DNA, 20 bp, synthetic construct
  source 1..20: mol_type = other DNA
tatttttaaatggcaaaaaa

SEQ ID NO: 68966 - DNA, 20 bp, synthetic construct
  source 1..20: mol_type = other DNA
atatttttaaatggcaaaaa

SEQ ID NO: 68967 - DNA, 20 bp, synthetic construct
  source 1..20: mol_type = other DNA
catatttttaaatggcaaaa

SEQ ID NO: 68968 - DNA, 20 bp, synthetic construct
  source 1..20: mol_type = other DNA
ccatatttttaaatggcaaa

SEQ ID NO: 68969 - DNA, 20 bp, synthetic construct
  source 1..20: mol_type = other DNA
cccatatttttaaatggcaa

SEQ ID NO: 68970 - DNA, 20 bp, synthetic construct
  source 1..20: mol_type = other DNA
gcccatatttttaaatggca

SEQ ID NO: 68971 - DNA, 20 bp, synthetic construct
  source 1..20: mol_type = other DNA
tgcccatatttttaaatggc

SEQ ID NO: 68972 - DNA, 20 bp, synthetic construct
  source 1..20: mol_type = other DNA
ttgcccatatttttaaatgg

SEQ ID NO: 68973 - DNA, 20 bp, synthetic construct
  source 1..20: mol_type = other DNA
gttgcccatatttttaaatg

SEQ ID NO: 68974 - DNA, 20 bp, synthetic construct
  source 1..20: mol_type = other DNA
tgttgcccatatttttaaat

SEQ ID NO: 68975 - DNA, 20 bp, synthetic construct
  source 1..20: mol_type = other DNA
ttgttgcccatatttttaaa

SEQ ID NO: 68976 - DNA, 20 bp, synthetic construct
  source 1..20: mol_type = other DNA
tttgttgcccatatttttaa

SEQ ID NO: 68977 - DNA, 20 bp, synthetic construct
  source 1..20: mol_type = other DNA
gtttgttgcccatattttta

SEQ ID NO: 68978 - DNA, 20 bp, synthetic construct
  source 1..20: mol_type = other DNA
tgtttgttgcccatattttt

SEQ ID NO: 68979 - DNA, 20 bp, synthetic construct
  source 1..20: mol_type = other DNA
ttgtttgttgcccatatttt

SEQ ID NO: 68980 - DNA, 20 bp, synthetic construct
  source 1..20: mol_type = other DNA
gttgtttgttgcccatattt

SEQ ID NO: 68981 - DNA, 20 bp, synthetic construct
  source 1..20: mol_type = other DNA
agttgtttgttgcccatatt

SEQ ID NO: 68982 - DNA, 20 bp, synthetic construct
  source 1..20: mol_type = other DNA
tagttgtttgttgcccatat

SEQ ID NO: 68983 - DNA, 20 bp, synthetic construct
  source 1..20: mol_type = other DNA
ctagttgtttgttgcccata

SEQ ID NO: 68984 - DNA, 20 bp, synthetic construct
  source 1..20: mol_type = other DNA
actagttgtttgttgcccat

SEQ ID NO: 68985 - DNA, 20 bp, synthetic construct
  source 1..20: mol_type = other DNA
tactagttgtttgttgccca

SEQ ID NO: 68986 - DNA, 20 bp, synthetic construct
  source 1..20: mol_type = other DNA
ctactagttgtttgttgccc

SEQ ID NO: 68987 - DNA, 20 bp, synthetic construct
  source 1..20: mol_type = other DNA
actactagttgtttgttgcc

SEQ ID NO: 68988 - DNA, 20 bp, synthetic construct
  source 1..20: mol_type = other DNA
tactactagttgtttgttgc

SEQ ID NO: 68989 - DNA, 20 bp, synthetic construct
  source 1..20: mol_type = other DNA
atactactagttgtttgttg

SEQ ID NO: 68990 - DNA, 20 bp, synthetic construct
  source 1..20: mol_type = other DNA
aatactactagttgtttgtt

SEQ ID NO: 68991 - DNA, 20 bp, synthetic construct
  source 1..20: mol_type = other DNA
taatactactagttgtttgt

SEQ ID NO: 68992 - DNA, 20 bp, synthetic construct
  source 1..20: mol_type = other DNA
ctaatactactagttgtttg

SEQ ID NO: 68993 - DNA, 20 bp, synthetic construct
  source 1..20: mol_type = other DNA
gctaatactactagttgttt

SEQ ID NO: 68994 - DNA, 20 bp, synthetic construct
  source 1..20: mol_type = other DNA
tgctaatactactagttgtt

SEQ ID NO: 68995 - DNA, 20 bp, synthetic construct
  source 1..20: mol_type = other DNA
ctgctaatactactagttgt

SEQ ID NO: 68996 - DNA, 20 bp, synthetic construct
  source 1..20: mol_type = other DNA
actgctaatactactagttg

SEQ ID NO: 68997 - DNA, 20 bp, synthetic construct
  source 1..20: mol_type = other DNA
tactgctaatactactagtt

SEQ ID NO: 68998 - DNA, 20 bp, synthetic construct
  source 1..20: mol_type = other DNA
atactgctaatactactagt

SEQ ID NO: 68999 - DNA, 20 bp, synthetic construct
  source 1..20: mol_type = other DNA
aatactgctaatactactag

SEQ ID NO: 69000 - DNA, 20 bp, synthetic construct
  source 1..20: mol_type = other DNA
aaatactgctaatactacta

SEQ ID NO: 69001 - DNA, 20 bp, synthetic construct
  source 1..20: mol_type = other DNA
taaatactgctaatactact

SEQ ID NO: 69002 - DNA, 20 bp, synthetic construct
  source 1..20: mol_type = other DNA
ataaatactgctaatactac

SEQ ID NO: 69003 - DNA, 20 bp, synthetic construct
  source 1..20: mol_type = other DNA
cataaatactgctaatacta

SEQ ID NO: 69004 - DNA, 20 bp, synthetic construct
  source 1..20: mol_type = other DNA
tcataaatactgctaatact

SEQ ID NO: 69005 - DNA, 20 bp, synthetic construct
  source 1..20: mol_type = other DNA
gtcataaatactgctaatac

SEQ ID NO: 69006 - DNA, 20 bp, synthetic construct
  source 1..20: mol_type = other DNA
agtcataaatactgctaata

SEQ ID NO: 69007 - DNA, 20 bp, synthetic construct
  source 1..20: mol_type = other DNA
aagtcataaatactgctaat

SEQ ID NO: 69008 - DNA, 20 bp, synthetic construct
  source 1..20: mol_type = other DNA
taagtcataaatactgctaa

SEQ ID NO: 69009 - DNA, 20 bp, synthetic construct
  source 1..20: mol_type = other DNA
ttaagtcataaatactgcta

SEQ ID NO: 69010 - DNA, 20 bp, synthetic construct
  source 1..20: mol_type = other DNA
cttaagtcataaatactgct

SEQ ID NO: 69011 - DNA, 20 bp, synthetic construct
  source 1..20: mol_type = other DNA
gcttaagtcataaatactgc

SEQ ID NO: 69012 - DNA, 20 bp, synthetic construct
  source 1..20: mol_type = other DNA
tgcttaagtcataaatactg

SEQ ID NO: 69013 - DNA, 20 bp, synthetic construct
  source 1..20: mol_type = other DNA
gtgcttaagtcataaatact

SEQ ID NO: 69014 - DNA, 20 bp, synthetic construct
  source 1..20: mol_type = other DNA
ggtgcttaagtcataaatac

SEQ ID NO: 69015 - DNA, 20 bp, synthetic construct
  source 1..20: mol_type = other DNA
aggtgcttaagtcataaata

SEQ ID NO: 69016 - DNA, 20 bp, synthetic construct
  source 1..20: mol_type = other DNA
taggtgcttaagtcataaat

SEQ ID NO: 69017 - DNA, 20 bp, synthetic construct
  source 1..20: mol_type = other DNA
ataggtgcttaagtcataaa

SEQ ID NO: 69018 - DNA, 20 bp, synthetic construct
  source 1..20: mol_type = other DNA
tataggtgcttaagtcataa

SEQ ID NO: 69019 - DNA, 20 bp, synthetic construct
  source 1..20: mol_type = other DNA
ctataggtgcttaagtcata

SEQ ID NO: 69020 - DNA, 20 bp, synthetic construct
  source 1..20: mol_type = other DNA
tctataggtgcttaagtcat

SEQ ID NO: 69021 - DNA, 20 bp, synthetic construct
  source 1..20: mol_type = other DNA
ttctataggtgcttaagtca

SEQ ID NO: 69022 - DNA, 20 bp, synthetic construct
  source 1..20: mol_type = other DNA
gttctataggtgcttaagtc

SEQ ID NO: 69023 - DNA, 20 bp, synthetic construct
  source 1..20: mol_type = other DNA
agttctataggtgcttaagt

SEQ ID NO: 69024 - DNA, 20 bp, synthetic construct
  source 1..20: mol_type = other DNA
gagttctataggtgcttaag

SEQ ID NO: 69025 - DNA, 20 bp, synthetic construct
  source 1..20: mol_type = other DNA
tgagttctataggtgcttaa

SEQ ID NO: 69026 - DNA, 20 bp, synthetic construct
  source 1..20: mol_type = other DNA
ctgagttctataggtgctta

SEQ ID NO: 69027 - DNA, 20 bp, synthetic construct
  source 1..20: mol_type = other DNA
actgagttctataggtgctt

SEQ ID NO: 69028 - DNA, 20 bp, synthetic construct
  source 1..20: mol_type = other DNA
aactgagttctataggtgct

SEQ ID NO: 69029 - DNA, 20 bp, synthetic construct
  source 1..20: mol_type = other DNA
taactgagttctataggtgc

SEQ ID NO: 69030 - DNA, 20 bp, synthetic construct
  source 1..20: mol_type = other DNA
ttaactgagttctataggtg

SEQ ID NO: 69031 - DNA, 20 bp, synthetic construct
  source 1..20: mol_type = other DNA
attaactgagttctataggt

SEQ ID NO: 69032 - DNA, 20 bp, synthetic construct
  source 1..20: mol_type = other DNA
aattaactgagttctatagg

SEQ ID NO: 69033 - DNA, 20 bp, synthetic construct
  source 1..20: mol_type = other DNA
aaattaactgagttctatag

SEQ ID NO: 69034 - DNA, 20 bp, synthetic construct
  source 1..20: mol_type = other DNA
gaaattaactgagttctata

SEQ ID NO: 69035 - DNA, 20 bp, synthetic construct
  source 1..20: mol_type = other DNA
tgaaattaactgagttctat

SEQ ID NO: 69036 - DNA, 20 bp, synthetic construct
  source 1..20: mol_type = other DNA
atgaaattaactgagttcta

SEQ ID NO: 69037 - DNA, 20 bp, synthetic construct
  source 1..20: mol_type = other DNA
tatgaaattaactgagttct

SEQ ID NO: 69038 - DNA, 20 bp, synthetic construct
  source 1..20: mol_type = other DNA
atatgaaattaactgagttc

SEQ ID NO: 69039 - DNA, 20 bp, synthetic construct
  source 1..20: mol_type = other DNA
gatatgaaattaactgagtt

SEQ ID NO: 69040 - DNA, 20 bp, synthetic construct
  source 1..20: mol_type = other DNA
cgatatgaaattaactgagt

SEQ ID NO: 69041 - DNA, 20 bp, synthetic construct
  source 1..20: mol_type = other DNA
gcgatatgaaattaactgag

SEQ ID NO: 69042 - DNA, 20 bp, synthetic construct
  source 1..20: mol_type = other DNA
agcgatatgaaattaactga

SEQ ID NO: 69043 - DNA, 20 bp, synthetic construct
  source 1..20: mol_type = other DNA
aagcgatatgaaattaactg

SEQ ID NO: 69044 - DNA, 20 bp, synthetic construct
  source 1..20: mol_type = other DNA
caagcgatatgaaattaact

SEQ ID NO: 69045 - DNA, 20 bp, synthetic construct
  source 1..20: mol_type = other DNA
tcaagcgatatgaaattaac

SEQ ID NO: 69046 - DNA, 20 bp, synthetic construct
  source 1..20: mol_type = other DNA
atcaagcgatatgaaattaa

SEQ ID NO: 69047 - DNA, 20 bp, synthetic construct
  source 1..20: mol_type = other DNA
catcaagcgatatgaaatta

SEQ ID NO: 69048 - DNA, 20 bp, synthetic construct
  source 1..20: mol_type = other DNA
acatcaagcgatatgaaatt

SEQ ID NO: 69049 - DNA, 20 bp, synthetic construct
  source 1..20: mol_type = other DNA
aacatcaagcgatatgaaat

SEQ ID NO: 69050 - DNA, 20 bp, synthetic construct
  source 1..20: mol_type = other DNA
taacatcaagcgatatgaaa

SEQ ID NO: 69051 - DNA, 20 bp, synthetic construct
  source 1..20: mol_type = other DNA
ataacatcaagcgatatgaa

SEQ ID NO: 69052 - DNA, 20 bp, synthetic construct
  source 1..20: mol_type = other DNA
cataacatcaagcgatatga

SEQ ID NO: 69053 - DNA, 20 bp, synthetic construct
  source 1..20: mol_type = other DNA
ccataacatcaagcgatatg

SEQ ID NO: 69054 - DNA, 20 bp, synthetic construct
  source 1..20: mol_type = other DNA
cccataacatcaagcgatat

SEQ ID NO: 69055 - DNA, 20 bp, synthetic construct
  source 1..20: mol_type = other DNA
acccataacatcaagcgata

SEQ ID NO: 69056 - DNA, 20 bp, synthetic construct
  source 1..20: mol_type = other DNA
tacccataacatcaagcgat

SEQ ID NO: 69057 - DNA, 20 bp, synthetic construct
  source 1..20: mol_type = other DNA
atacccataacatcaagcga

SEQ ID NO: 69058 - DNA, 20 bp, synthetic construct
  source 1..20: mol_type = other DNA
gatacccataacatcaagcg

SEQ ID NO: 69059 - DNA, 20 bp, synthetic construct
  source 1..20: mol_type = other DNA
agatacccataacatcaagc

SEQ ID NO: 69060 - DNA, 20 bp, synthetic construct
  source 1..20: mol_type = other DNA
gagatacccataacatcaag

SEQ ID NO: 69061 - DNA, 20 bp, synthetic construct
  source 1..20: mol_type = other DNA
tgagatacccataacatcaa

SEQ ID NO: 69062 - DNA, 20 bp, synthetic construct
  source 1..20: mol_type = other DNA
ttgagatacccataacatca

SEQ ID NO: 69063 - DNA, 20 bp, synthetic construct
  source 1..20: mol_type = other DNA
tttgagatacccataacatc

SEQ ID NO: 69064 - DNA, 20 bp, synthetic construct
  source 1..20: mol_type = other DNA
atttgagatacccataacat

SEQ ID NO: 69065 - DNA, 20 bp, synthetic construct
  source 1..20: mol_type = other DNA
aatttgagatacccataaca

SEQ ID NO: 69066 - DNA, 20 bp, synthetic construct
  source 1..20: mol_type = other DNA
taatttgagatacccataac

SEQ ID NO: 69067 - DNA, 20 bp, synthetic construct
  source 1..20: mol_type = other DNA
ataatttgagatacccataa

SEQ ID NO: 69068 - DNA, 20 bp, synthetic construct
  source 1..20: mol_type = other DNA
aataatttgagatacccata

SEQ ID NO: 69069 - DNA, 20 bp, synthetic construct
  source 1..20: mol_type = other DNA
taataatttgagatacccat

SEQ ID NO: 69070 - DNA, 20 bp, synthetic construct
  source 1..20: mol_type = other DNA
ataataatttgagataccca

SEQ ID NO: 69071 - DNA, 20 bp, synthetic construct
  source 1..20: mol_type = other DNA
aataataatttgagataccc

SEQ ID NO: 69072 - DNA, 20 bp, synthetic construct
  source 1..20: mol_type = other DNA
aaataataatttgagatacc

SEQ ID NO: 69073 - DNA, 20 bp, synthetic construct
  source 1..20: mol_type = other DNA
aaaataataatttgagatac

SEQ ID NO: 69074 - DNA, 20 bp, synthetic construct
  source 1..20: mol_type = other DNA
taaaataataatttgagata

SEQ ID NO: 69075 - DNA, 20 bp, synthetic construct
  source 1..20: mol_type = other DNA
ataaaataataatttgagat

SEQ ID NO: 69076 - DNA, 20 bp, synthetic construct
  source 1..20: mol_type = other DNA
cataaaataataatttgaga

SEQ ID NO: 69077 - DNA, 20 bp, synthetic construct
  source 1..20: mol_type = other DNA
acataaaataataatttgag

SEQ ID NO: 69078 - DNA, 20 bp, synthetic construct
  source 1..20: mol_type = other DNA
tacataaaataataatttga

SEQ ID NO: 69079 - DNA, 20 bp, synthetic construct
  source 1..20: mol_type = other DNA
atacataaaataataatttg

SEQ ID NO: 69080 - DNA, 20 bp, synthetic construct
  source 1..20: mol_type = other DNA
tatacataaaataataattt

SEQ ID NO: 69081 - DNA, 20 bp, synthetic construct
  source 1..20: mol_type = other DNA
atatacataaaataataatt

SEQ ID NO: 69082 - DNA, 20 bp, synthetic construct
  source 1..20: mol_type = other DNA
tatatacataaaataataat

SEQ ID NO: 69083 - DNA, 20 bp, synthetic construct
  source 1..20: mol_type = other DNA
atatatacataaaataataa

SEQ ID NO: 69084 - DNA, 20 bp, synthetic construct
  source 1..20: mol_type = other DNA
tatatatacataaaataata

SEQ ID NO: 69085 - DNA, 20 bp, synthetic construct
  source 1..20: mol_type = other DNA
atatatatacataaaataat

SEQ ID NO: 69086 - DNA, 20 bp, synthetic construct
  source 1..20: mol_type = other DNA
aatatatatacataaaataa

SEQ ID NO: 69087 - DNA, 20 bp, synthetic construct
  source 1..20: mol_type = other DNA
aaatatatatacataaaata

SEQ ID NO: 69088 - DNA, 20 bp, synthetic construct
  source 1..20: mol_type = other DNA
aaaatatatatacataaaat

SEQ ID NO: 69089 - DNA, 20 bp, synthetic construct
  source 1..20: mol_type = other DNA
aaaaatatatatacataaaa

SEQ ID NO: 69090 - DNA, 20 bp, synthetic construct
  source 1..20: mol_type = other DNA
caaaaatatatatacataaa

SEQ ID NO: 69091 - DNA, 20 bp, synthetic construct
  source 1..20: mol_type = other DNA
tcaaaaatatatatacataa

SEQ ID NO: 69092 - DNA, 20 bp, synthetic construct
  source 1..20: mol_type = other DNA
ctcaaaaatatatatacata

SEQ ID NO: 69093 - DNA, 20 bp, synthetic construct
  source 1..20: mol_type = other DNA
tctcaaaaatatatatacat

SEQ ID NO: 69094 - DNA, 20 bp, synthetic construct
  source 1..20: mol_type = other DNA
atctcaaaaatatatataca

SEQ ID NO: 69095 - DNA, 20 bp, synthetic construct
  source 1..20: mol_type = other DNA
catctcaaaaatatatatac

SEQ ID NO: 69096 - DNA, 20 bp, synthetic construct
  source 1..20: mol_type = other DNA
ccatctcaaaaatatatata

SEQ ID NO: 69097 - DNA, 20 bp, synthetic construct
  source 1..20: mol_type = other DNA
tccatctcaaaaatatatat

SEQ ID NO: 69098 - DNA, 20 bp, synthetic construct
  source 1..20: mol_type = other DNA
ctccatctcaaaaatatata

SEQ ID NO: 69099 - DNA, 20 bp, synthetic construct
  source 1..20: mol_type = other DNA
actccatctcaaaaatatat

SEQ ID NO: 69100 - DNA, 20 bp, synthetic construct
  source 1..20: mol_type = other DNA
gactccatctcaaaaatata

SEQ ID NO: 69101 - DNA, 20 bp, synthetic construct
  source 1..20: mol_type = other DNA
agactccatctcaaaaatat

SEQ ID NO: 69102 - DNA, 20 bp, synthetic construct
  source 1..20: mol_type = other DNA
gagactccatctcaaaaata

SEQ ID NO: 69103 - DNA, 20 bp, synthetic construct
  source 1..20: mol_type = other DNA
cgagactccatctcaaaaat

SEQ ID NO: 69104 - DNA, 20 bp, synthetic construct
  source 1..20: mol_type = other DNA
gcgagactccatctcaaaaa

SEQ ID NO: 69105 - DNA, 20 bp, synthetic construct
  source 1..20: mol_type = other DNA
agcgagactccatctcaaaa

SEQ ID NO: 69106 - DNA, 20 bp, synthetic construct
  source 1..20: mol_type = other DNA
gagcgagactccatctcaaa

SEQ ID NO: 69107 - DNA, 20 bp, synthetic construct
  source 1..20: mol_type = other DNA
agagcgagactccatctcaa

SEQ ID NO: 69108 - DNA, 20 bp, synthetic construct
  source 1..20: mol_type = other DNA
cagagcgagactccatctca

SEQ ID NO: 69109 - DNA, 20 bp, synthetic construct
  source 1..20: mol_type = other DNA
acagagcgagactccatctc

SEQ ID NO: 69110 - DNA, 20 bp, synthetic construct
  source 1..20: mol_type = other DNA
gacagagcgagactccatct

SEQ ID NO: 69111 - DNA, 20 bp, synthetic construct
  source 1..20: mol_type = other DNA
agacagagcgagactccatc

SEQ ID NO: 69112 - DNA, 20 bp, synthetic construct
  source 1..20: mol_type = other DNA
gagacagagcgagactccat

SEQ ID NO: 69113 - DNA, 20 bp, synthetic construct
  source 1..20: mol_type = other DNA
ggagacagagcgagactcca

SEQ ID NO: 69114 - DNA, 20 bp, synthetic construct
  source 1..20: mol_type = other DNA
gggagacagagcgagactcc

SEQ ID NO: 69115 - DNA, 20 bp, synthetic construct
  source 1..20: mol_type = other DNA
tgggagacagagcgagactc

SEQ ID NO: 69116 - DNA, 20 bp, synthetic construct
  source 1..20: mol_type = other DNA
ctgggagacagagcgagact

SEQ ID NO: 69117 - DNA, 20 bp, synthetic construct
  source 1..20: mol_type = other DNA
cctgggagacagagcgagac

SEQ ID NO: 69118 - DNA, 20 bp, synthetic construct
  source 1..20: mol_type = other DNA
gcctgggagacagagcgaga

SEQ ID NO: 69119 - DNA, 20 bp, synthetic construct
  source 1..20: mol_type = other DNA
agcctgggagacagagcgag

SEQ ID NO: 69120 - DNA, 20 bp, synthetic construct
  source 1..20: mol_type = other DNA
cagcctgggagacagagcga

SEQ ID NO: 69121 - DNA, 20 bp, synthetic construct
  source 1..20: mol_type = other DNA
tcagcctgggagacagagcg

SEQ ID NO: 69122 - DNA, 20 bp, synthetic construct
  source 1..20: mol_type = other DNA
ctcagcctgggagacagagc

SEQ ID NO: 69123 - DNA, 20 bp, synthetic construct
  source 1..20: mol_type = other DNA
actcagcctgggagacagag

SEQ ID NO: 69124 - DNA, 20 bp, synthetic construct
  source 1..20: mol_type = other DNA
cactcagcctgggagacaga

SEQ ID NO: 69125 - DNA, 20 bp, synthetic construct
  source 1..20: mol_type = other DNA
gcactcagcctgggagacag

SEQ ID NO: 69126 - DNA, 20 bp, synthetic construct
  source 1..20: mol_type = other DNA
tgcactcagcctgggagaca

SEQ ID NO: 69127 - DNA, 20 bp, synthetic construct
  source 1..20: mol_type = other DNA
ctgcactcagcctgggagac

SEQ ID NO: 69128 - DNA, 20 bp, synthetic construct
  source 1..20: mol_type = other DNA
actgcactcagcctgggaga

SEQ ID NO: 69129 - DNA, 20 bp, synthetic construct
  source 1..20: mol_type = other DNA
cactgcactcagcctgggag

SEQ ID NO: 69130 - DNA, 20 bp, synthetic construct
  source 1..20: mol_type = other DNA
ccactgcactcagcctggga

SEQ ID NO: 69131 - DNA, 20 bp, synthetic construct
  source 1..20: mol_type = other DNA
accactgcactcagcctggg

SEQ ID NO: 69132 - DNA, 20 bp, synthetic construct
  source 1..20: mol_type = other DNA
caccactgcactcagcctgg

SEQ ID NO: 69133 - DNA, 20 bp, synthetic construct
  source 1..20: mol_type = other DNA
gcaccactgcactcagcctg

SEQ ID NO: 69134 - DNA, 20 bp, synthetic construct
  source 1..20: mol_type = other DNA
tgcaccactgcactcagcct

SEQ ID NO: 69135 - DNA, 20 bp, synthetic construct
  source 1..20: mol_type = other DNA
ctgcaccactgcactcagcc

SEQ ID NO: 69136 - DNA, 20 bp, synthetic construct
  source 1..20: mol_type = other DNA
actgcaccactgcactcagc

SEQ ID NO: 69137 - DNA, 20 bp, synthetic construct
  source 1..20: mol_type = other DNA
gactgcaccactgcactcag

SEQ ID NO: 69138 - DNA, 20 bp, synthetic construct
  source 1..20: mol_type = other DNA
agactgcaccactgcactca

SEQ ID NO: 69139 - DNA, 20 bp, synthetic construct
  source 1..20: mol_type = other DNA
gagactgcaccactgcactc

SEQ ID NO: 69140 - DNA, 20 bp, synthetic construct
  source 1..20: mol_type = other DNA
tgagactgcaccactgcact

SEQ ID NO: 69141 - DNA, 20 bp, synthetic construct
  source 1..20: mol_type = other DNA
ctgagactgcaccactgcac

SEQ ID NO: 69142 - DNA, 20 bp, synthetic construct
  source 1..20: mol_type = other DNA
gctgagactgcaccactgca

SEQ ID NO: 69143 - DNA, 20 bp, synthetic construct
  source 1..20: mol_type = other DNA
ggctgagactgcaccactgc

SEQ ID NO: 69144 - DNA, 20 bp, synthetic construct
  source 1..20: mol_type = other DNA
gggctgagactgcaccactg

SEQ ID NO: 69145 - DNA, 20 bp, synthetic construct
  source 1..20: mol_type = other DNA
tgggctgagactgcaccact

SEQ ID NO: 69146 - DNA, 20 bp, synthetic construct
  source 1..20: mol_type = other DNA
atgggctgagactgcaccac

SEQ ID NO: 69147 - DNA, 20 bp, synthetic construct
  source 1..20: mol_type = other DNA
aatgggctgagactgcacca

SEQ ID NO: 69148 - DNA, 20 bp, synthetic construct
  source 1..20: mol_type = other DNA
caatgggctgagactgcacc

SEQ ID NO: 69149 - DNA, 20 bp, synthetic construct
  source 1..20: mol_type = other DNA
gcaatgggctgagactgcac

SEQ ID NO: 69150 - DNA, 20 bp, synthetic construct
  source 1..20: mol_type = other DNA
tgcaatgggctgagactgca

SEQ ID NO: 69151 - DNA, 20 bp, synthetic construct
  source 1..20: mol_type = other DNA
ttgcaatgggctgagactgc

SEQ ID NO: 69152 - DNA, 20 bp, synthetic construct
  source 1..20: mol_type = other DNA
gttgcaatgggctgagactg

SEQ ID NO: 69153 - DNA, 20 bp, synthetic construct
  source 1..20: mol_type = other DNA
ggttgcaatgggctgagact

SEQ ID NO: 69154 - DNA, 20 bp, synthetic construct
  source 1..20: mol_type = other DNA
aggttgcaatgggctgagac

SEQ ID NO: 69155 - DNA, 20 bp, synthetic construct
  source 1..20: mol_type = other DNA
gaggttgcaatgggctgaga

SEQ ID NO: 69156 - DNA, 20 bp, synthetic construct
  source 1..20: mol_type = other DNA
agaggttgcaatgggctgag

SEQ ID NO: 69157 - DNA, 20 bp, synthetic construct
  source 1..20: mol_type = other DNA
cagaggttgcaatgggctga

SEQ ID NO: 69158 - DNA, 20 bp, synthetic construct
  source 1..20: mol_type = other DNA
gcagaggttgcaatgggctg

SEQ ID NO: 69159 - DNA, 20 bp, synthetic construct
  source 1..20: mol_type = other DNA
ggcagaggttgcaatgggct

SEQ ID NO: 69160 - DNA, 20 bp, synthetic construct
  source 1..20: mol_type = other DNA
aggcagaggttgcaatgggc

SEQ ID NO: 69161 - DNA, 20 bp, synthetic construct
  source 1..20: mol_type = other DNA
gaggcagaggttgcaatggg

SEQ ID NO: 69162 - DNA, 20 bp, synthetic construct
  source 1..20: mol_type = other DNA
ggaggcagaggttgcaatgg

SEQ ID NO: 69163 - DNA, 20 bp, synthetic construct
  source 1..20: mol_type = other DNA
aggaggcagaggttgcaatg

SEQ ID NO: 69164 - DNA, 20 bp, synthetic construct
  source 1..20: mol_type = other DNA
caggaggcagaggttgcaat

SEQ ID NO: 69165 - DNA, 20 bp, synthetic construct
  source 1..20: mol_type = other DNA
ccaggaggcagaggttgcaa

SEQ ID NO: 69166 - DNA, 20 bp, synthetic construct
  source 1..20: mol_type = other DNA
cccaggaggcagaggttgca

SEQ ID NO: 69167 - DNA, 20 bp, synthetic construct
  source 1..20: mol_type = other DNA
acccaggaggcagaggttgc

SEQ ID NO: 69168 - DNA, 20 bp, synthetic construct
  source 1..20: mol_type = other DNA
aacccaggaggcagaggttg

SEQ ID NO: 69169 - DNA, 20 bp, synthetic construct
  source 1..20: mol_type = other DNA
gaacccaggaggcagaggtt

SEQ ID NO: 69170 - DNA, 20 bp, synthetic construct
  source 1..20: mol_type = other DNA
tgaacccaggaggcagaggt

SEQ ID NO: 69171 - DNA, 20 bp, synthetic construct
  source 1..20: mol_type = other DNA
ttgaacccaggaggcagagg

SEQ ID NO: 69172 - DNA, 20 bp, synthetic construct
  source 1..20: mol_type = other DNA
tttgaacccaggaggcagag

SEQ ID NO: 69173 - DNA, 20 bp, synthetic construct
  source 1..20: mol_type = other DNA
gtttgaacccaggaggcaga

SEQ ID NO: 69174 - DNA, 20 bp, synthetic construct
  source 1..20: mol_type = other DNA
cgtttgaacccaggaggcag

SEQ ID NO: 69175 - DNA, 20 bp, synthetic construct
  source 1..20: mol_type = other DNA
tcgtttgaacccaggaggca

SEQ ID NO: 69176 - DNA, 20 bp, synthetic construct
  source 1..20: mol_type = other DNA
atcgtttgaacccaggaggc

SEQ ID NO: 69177 - DNA, 20 bp, synthetic construct
  source 1..20: mol_type = other DNA
aatcgtttgaacccaggagg

SEQ ID NO: 69178 - DNA, 20 bp, synthetic construct
  source 1..20: mol_type = other DNA
gaatcgtttgaacccaggag

SEQ ID NO: 69179 - DNA, 20 bp, synthetic construct
  source 1..20: mol_type = other DNA
agaatcgtttgaacccagga

SEQ ID NO: 69180 - DNA, 20 bp, synthetic construct
  source 1..20: mol_type = other DNA
gagaatcgtttgaacccagg

SEQ ID NO: 69181 - DNA, 20 bp, synthetic construct
  source 1..20: mol_type = other DNA
ggagaatcgtttgaacccag

SEQ ID NO: 69182 - DNA, 20 bp, synthetic construct
  source 1..20: mol_type = other DNA
aggagaatcgtttgaaccca

SEQ ID NO: 69183 - DNA, 20 bp, synthetic construct
  source 1..20: mol_type = other DNA
caggagaatcgtttgaaccc

SEQ ID NO: 69184 - DNA, 20 bp, synthetic construct
  source 1..20: mol_type = other DNA
gcaggagaatcgtttgaacc

SEQ ID NO: 69185 - DNA, 20 bp, synthetic construct
  source 1..20: mol_type = other DNA
ggcaggagaatcgtttgaac

SEQ ID NO: 69186 - DNA, 20 bp, synthetic construct
  source 1..20: mol_type = other DNA
aggcaggagaatcgtttgaa

SEQ ID NO: 69187 - DNA, 20 bp, synthetic construct
  source 1..20: mol_type = other DNA
gaggcaggagaatcgtttga

SEQ ID NO: 69188 - DNA, 20 bp, synthetic construct
  source 1..20: mol_type = other DNA
tgaggcaggagaatcgtttg

SEQ ID NO: 69189 - DNA, 20 bp, synthetic construct
  source 1..20: mol_type = other DNA
ctgaggcaggagaatcgttt

SEQ ID NO: 69190 - DNA, 20 bp, synthetic construct
  source 1..20: mol_type = other DNA
gctgaggcaggagaatcgtt

SEQ ID NO: 69191 - DNA, 20 bp, synthetic construct
  source 1..20: mol_type = other DNA
ggctgaggcaggagaatcgt

SEQ ID NO: 69192 - DNA, 20 bp, synthetic construct
  source 1..20: mol_type = other DNA
aggctgaggcaggagaatcg

SEQ ID NO: 69193 - DNA, 20 bp, synthetic construct
  source 1..20: mol_type = other DNA
gaggctgaggcaggagaatc

SEQ ID NO: 69194 - DNA, 20 bp, synthetic construct
  source 1..20: mol_type = other DNA
ggaggctgaggcaggagaat

SEQ ID NO: 69195 - DNA, 20 bp, synthetic construct
  source 1..20: mol_type = other DNA
aggaggctgaggcaggagaa

SEQ ID NO: 69196 - DNA, 20 bp, synthetic construct
  source 1..20: mol_type = other DNA
caggaggctgaggcaggaga

SEQ ID NO: 69197 - DNA, 20 bp, synthetic construct
  source 1..20: mol_type = other DNA
tcaggaggctgaggcaggag

SEQ ID NO: 69198 - DNA, 20 bp, synthetic construct
  source 1..20: mol_type = other DNA
ctcaggaggctgaggcagga

SEQ ID NO: 69199 - DNA, 20 bp, synthetic construct
  source 1..20: mol_type = other DNA
actcaggaggctgaggcagg

SEQ ID NO: 69200 - DNA, 20 bp, synthetic construct
  source 1..20: mol_type = other DNA
tactcaggaggctgaggcag

SEQ ID NO: 69201 - DNA, 20 bp, synthetic construct
  source 1..20: mol_type = other DNA
ctactcaggaggctgaggca

SEQ ID NO: 69202 - DNA, 20 bp, synthetic construct
  source 1..20: mol_type = other DNA
gctactcaggaggctgaggc

SEQ ID NO: 69203 - DNA, 20 bp, synthetic construct
  source 1..20: mol_type = other DNA
agctactcaggaggctgagg

SEQ ID NO: 69204 - DNA, 20 bp, synthetic construct
  source 1..20: mol_type = other DNA
cagctactcaggaggctgag

SEQ ID NO: 69205 - DNA, 20 bp, synthetic construct
  source 1..20: mol_type = other DNA
ccagctactcaggaggctga

SEQ ID NO: 69206 - DNA, 20 bp, synthetic construct
  source 1..20: mol_type = other DNA
cccagctactcaggaggctg

SEQ ID NO: 69207 - DNA, 20 bp, synthetic construct
  source 1..20: mol_type = other DNA
tcccagctactcaggaggct

SEQ ID NO: 69208 - DNA, 20 bp, synthetic construct
  source 1..20: mol_type = other DNA
atcccagctactcaggaggc

SEQ ID NO: 69209 - DNA, 20 bp, synthetic construct
  source 1..20: mol_type = other DNA
aatcccagctactcaggagg

SEQ ID NO: 69210 - DNA, 20 bp, synthetic construct
  source 1..20: mol_type = other DNA
taatcccagctactcaggag

SEQ ID NO: 69211 - DNA, 20 bp, synthetic construct
  source 1..20: mol_type = other DNA
gtaatcccagctactcagga

SEQ ID NO: 69212 - DNA, 20 bp, synthetic construct
  source 1..20: mol_type = other DNA
tgtaatcccagctactcagg

SEQ ID NO: 69213 - DNA, 20 bp, synthetic construct
  source 1..20: mol_type = other DNA
ctgtaatcccagctactcag

SEQ ID NO: 69214 - DNA, 20 bp, synthetic construct
  source 1..20: mol_type = other DNA
cctgtaatcccagctactca

SEQ ID NO: 69215 - DNA, 20 bp, synthetic construct
  source 1..20: mol_type = other DNA
gcctgtaatcccagctactc

SEQ ID NO: 69216 - DNA, 20 bp, synthetic construct
  source 1..20: mol_type = other DNA
cgcctgtaatcccagctact

SEQ ID NO: 69217 - DNA, 20 bp, synthetic construct
  source 1..20: mol_type = other DNA
gcgcctgtaatcccagctac

SEQ ID NO: 69218 - DNA, 20 bp, synthetic construct
  source 1..20: mol_type = other DNA
tgcgcctgtaatcccagcta

SEQ ID NO: 69219 - DNA, 20 bp, synthetic construct
  source 1..20: mol_type = other DNA
gtgcgcctgtaatcccagct

SEQ ID NO: 69220 - DNA, 20 bp, synthetic construct
  source 1..20: mol_type = other DNA
tgtgcgcctgtaatcccagc

SEQ ID NO: 69221 - DNA, 20 bp, synthetic construct
  source 1..20: mol_type = other DNA
gtgtgcgcctgtaatcccag

SEQ ID NO: 69222 - DNA, 20 bp, synthetic construct
  source 1..20: mol_type = other DNA
ggtgtgcgcctgtaatccca

SEQ ID NO: 69223 - DNA, 20 bp, synthetic construct
  source 1..20: mol_type = other DNA
tggtgtgcgcctgtaatccc

SEQ ID NO: 69224 - DNA, 20 bp, synthetic construct
  source 1..20: mol_type = other DNA
gtggtgtgcgcctgtaatcc

SEQ ID NO: 69225 - DNA, 20 bp, synthetic construct
  source 1..20: mol_type = other DNA
ggtggtgtgcgcctgtaatc

SEQ ID NO: 69226 - DNA, 20 bp, synthetic construct
  source 1..20: mol_type = other DNA
tggtggtgtgcgcctgtaat

SEQ ID NO: 69227 - DNA, 20 bp, synthetic construct
  source 1..20: mol_type = other DNA
gtggtggtgtgcgcctgtaa

SEQ ID NO: 69228 - DNA, 20 bp, synthetic construct
  source 1..20: mol_type = other DNA
cgtggtggtgtgcgcctgta

SEQ ID NO: 69229 - DNA, 20 bp, synthetic construct
  source 1..20: mol_type = other DNA
gcgtggtggtgtgcgcctgt

SEQ ID NO: 69230 - DNA, 20 bp, synthetic construct
  source 1..20: mol_type = other DNA
ggcgtggtggtgtgcgcctg

SEQ ID NO: 69231 - DNA, 20 bp, synthetic construct
  source 1..20: mol_type = other DNA
aggcgtggtggtgtgcgcct

SEQ ID NO: 69232 - DNA, 20 bp, synthetic construct
  source 1..20: mol_type = other DNA
taggcgtggtggtgtgcgcc

SEQ ID NO: 69233 - DNA, 20 bp, synthetic construct
  source 1..20: mol_type = other DNA
ctaggcgtggtggtgtgcgc

SEQ ID NO: 69234 - DNA, 20 bp, synthetic construct
  source 1..20: mol_type = other DNA
gctaggcgtggtggtgtgcg

SEQ ID NO: 69235 - DNA, 20 bp, synthetic construct
  source 1..20: mol_type = other DNA
agctaggcgtggtggtgtgc

SEQ ID NO: 69236 - DNA, 20 bp, synthetic construct
  source 1..20: mol_type = other DNA
tagctaggcgtggtggtgtg

SEQ ID NO: 69237 - DNA, 20 bp, synthetic construct
  source 1..20: mol_type = other DNA
ttagctaggcgtggtggtgt

SEQ ID NO: 69238 - DNA, 20 bp, synthetic construct
  source 1..20: mol_type = other DNA
attagctaggcgtggtggtg

SEQ ID NO: 69239 - DNA, 20 bp, synthetic construct
  source 1..20: mol_type = other DNA
cattagctaggcgtggtggt

SEQ ID NO: 69240 - DNA, 20 bp, synthetic construct
  source 1..20: mol_type = other DNA
acattagctaggcgtggtgg

SEQ ID NO: 69241 - DNA, 20 bp, synthetic construct
  source 1..20: mol_type = other DNA
aacattagctaggcgtggtg

SEQ ID NO: 69242 - DNA, 20 bp, synthetic construct
  source 1..20: mol_type = other DNA
aaacattagctaggcgtggt

SEQ ID NO: 69243 - DNA, 20 bp, synthetic construct
  source 1..20: mol_type = other DNA
caaacattagctaggcgtgg

SEQ ID NO: 69244 - DNA, 20 bp, synthetic construct
  source 1..20: mol_type = other DNA
acaaacattagctaggcgtg

SEQ ID NO: 69245 - DNA, 20 bp, synthetic construct
  source 1..20: mol_type = other DNA
tacaaacattagctaggcgt

SEQ ID NO: 69246 - DNA, 20 bp, synthetic construct
  source 1..20: mol_type = other DNA
atacaaacattagctaggcg

SEQ ID NO: 69247 - DNA, 20 bp, synthetic construct
  source 1..20: mol_type = other DNA
aatacaaacattagctaggc

SEQ ID NO: 69248 - DNA, 20 bp, synthetic construct
  source 1..20: mol_type = other DNA
aaatacaaacattagctagg

SEQ ID NO: 69249 - DNA, 20 bp, synthetic construct
  source 1..20: mol_type = other DNA
aaaatacaaacattagctag

SEQ ID NO: 69250 - DNA, 20 bp, synthetic construct
  source 1..20: mol_type = other DNA
gaaaatacaaacattagcta

SEQ ID NO: 69251 - DNA, 20 bp, synthetic construct
  source 1..20: mol_type = other DNA
tgaaaatacaaacattagct

SEQ ID NO: 69252 - DNA, 20 bp, synthetic construct
  source 1..20: mol_type = other DNA
ctgaaaatacaaacattagc

SEQ ID NO: 69253 - DNA, 20 bp, synthetic construct
  source 1..20: mol_type = other DNA
actgaaaatacaaacattag

SEQ ID NO: 69254 - DNA, 20 bp, synthetic construct
  source 1..20: mol_type = other DNA
tactgaaaatacaaacatta

SEQ ID NO: 69255 - DNA, 20 bp, synthetic construct
  source 1..20: mol_type = other DNA
ctactgaaaatacaaacatt

SEQ ID NO: 69256 - DNA, 20 bp, synthetic construct
  source 1..20: mol_type = other DNA
tctactgaaaatacaaacat

SEQ ID NO: 69257 - DNA, 20 bp, synthetic construct
  source 1..20: mol_type = other DNA
ctctactgaaaatacaaaca

SEQ ID NO: 69258 - DNA, 20 bp, synthetic construct
  source 1..20: mol_type = other DNA
tctctactgaaaatacaaac

SEQ ID NO: 69259 - DNA, 20 bp, synthetic construct
  source 1..20: mol_type = other DNA
ttctctactgaaaatacaaa

SEQ ID NO: 69260 - DNA, 20 bp, synthetic construct
  source 1..20: mol_type = other DNA
cttctctactgaaaatacaa

SEQ ID NO: 69261 - DNA, 20 bp, synthetic construct
  source 1..20: mol_type = other DNA
ccttctctactgaaaataca

SEQ ID NO: 69262 - DNA, 20 bp, synthetic construct
  source 1..20: mol_type = other DNA
cccttctctactgaaaatac

SEQ ID NO: 69263 - DNA, 20 bp, synthetic construct
  source 1..20: mol_type = other DNA
ccccttctctactgaaaata

SEQ ID NO: 69264 - DNA, 20 bp, synthetic construct
  source 1..20: mol_type = other DNA
accccttctctactgaaaat

SEQ ID NO: 69265 - DNA, 20 bp, synthetic construct
  source 1..20: mol_type = other DNA
aaccccttctctactgaaaa

SEQ ID NO: 69266 - DNA, 20 bp, synthetic construct
  source 1..20: mol_type = other DNA
aaaccccttctctactgaaa

SEQ ID NO: 69267 - DNA, 20 bp, synthetic construct
  source 1..20: mol_type = other DNA
gaaaccccttctctactgaa

SEQ ID NO: 69268 - DNA, 20 bp, synthetic construct
  source 1..20: mol_type = other DNA
tgaaaccccttctctactga

SEQ ID NO: 69269 - DNA, 20 bp, synthetic construct
  source 1..20: mol_type = other DNA
gtgaaaccccttctctactg

SEQ ID NO: 69270 - DNA, 20 bp, synthetic construct
  source 1..20: mol_type = other DNA
ggtgaaaccccttctctact

SEQ ID NO: 69271 - DNA, 20 bp, synthetic construct
  source 1..20: mol_type = other DNA
tggtgaaaccccttctctac

SEQ ID NO: 69272 - DNA, 20 bp, synthetic construct
  source 1..20: mol_type = other DNA
atggtgaaaccccttctcta

SEQ ID NO: 69273 - DNA, 20 bp, synthetic construct
  source 1..20: mol_type = other DNA
tatggtgaaaccccttctct

SEQ ID NO: 69274 - DNA, 20 bp, synthetic construct
  source 1..20: mol_type = other DNA
atatggtgaaaccccttctc

SEQ ID NO: 69275 - DNA, 20 bp, synthetic construct
  source 1..20: mol_type = other DNA
aatatggtgaaaccccttct

SEQ ID NO: 69276 - DNA, 20 bp, synthetic construct
  source 1..20: mol_type = other DNA
caatatggtgaaaccccttc

SEQ ID NO: 69277 - DNA, 20 bp, synthetic construct
  source 1..20: mol_type = other DNA
ccaatatggtgaaacccctt

SEQ ID NO: 69278 - DNA, 20 bp, synthetic construct
  source 1..20: mol_type = other DNA
gccaatatggtgaaacccct

SEQ ID NO: 69279 - DNA, 20 bp, synthetic construct
  source 1..20: mol_type = other DNA
ggccaatatggtgaaacccc

SEQ ID NO: 69280 - DNA, 20 bp, synthetic construct
  source 1..20: mol_type = other DNA
tggccaatatggtgaaaccc

SEQ ID NO: 69281 - DNA, 20 bp, synthetic construct
  source 1..20: mol_type = other DNA
ctggccaatatggtgaaacc

SEQ ID NO: 69282 - DNA, 20 bp, synthetic construct
  source 1..20: mol_type = other DNA
cctggccaatatggtgaaac

SEQ ID NO: 69283 - DNA, 20 bp, synthetic construct
  source 1..20: mol_type = other DNA
gcctggccaatatggtgaaa

SEQ ID NO: 69284 - DNA, 20 bp, synthetic construct
  source 1..20: mol_type = other DNA
agcctggccaatatggtgaa

SEQ ID NO: 69285 - DNA, 20 bp, synthetic construct
  source 1..20: mol_type = other DNA
cagcctggccaatatggtga

SEQ ID NO: 69286 - DNA, 20 bp, synthetic construct
  source 1..20: mol_type = other DNA
ccagcctggccaatatggtg

SEQ ID NO: 69287 - DNA, 20 bp, synthetic construct
  source 1..20: mol_type = other DNA
accagcctggccaatatggt

SEQ ID NO: 69288 - DNA, 20 bp, synthetic construct
  source 1..20: mol_type = other DNA
gaccagcctggccaatatgg

SEQ ID NO: 69289 - DNA, 20 bp, synthetic construct
  source 1..20: mol_type = other DNA
tgaccagcctggccaatatg

SEQ ID NO: 69290 - DNA, 20 bp, synthetic construct
  source 1..20: mol_type = other DNA
gtgaccagcctggccaatat

SEQ ID NO: 69291 - DNA, 20 bp, synthetic construct
  source 1..20: mol_type = other DNA
ggtgaccagcctggccaata

SEQ ID NO: 69292 - DNA, 20 bp, synthetic construct
  source 1..20: mol_type = other DNA
tggtgaccagcctggccaat

SEQ ID NO: 69293 - DNA, 20 bp, synthetic construct
  source 1..20: mol_type = other DNA
ttggtgaccagcctggccaa

SEQ ID NO: 69294 - DNA, 20 bp, synthetic construct
  source 1..20: mol_type = other DNA
gttggtgaccagcctggcca

SEQ ID NO: 69295 - DNA, 20 bp, synthetic construct
  source 1..20: mol_type = other DNA
agttggtgaccagcctggcc

SEQ ID NO: 69296 - DNA, 20 bp, synthetic construct
  source 1..20: mol_type = other DNA
gagttggtgaccagcctggc

SEQ ID NO: 69297 - DNA, 20 bp, synthetic construct
  source 1..20: mol_type = other DNA
ggagttggtgaccagcctgg

SEQ ID NO: 69298 - DNA, 20 bp, synthetic construct
  source 1..20: mol_type = other DNA
aggagttggtgaccagcctg

SEQ ID NO: 69299 - DNA, 20 bp, synthetic construct
  source 1..20: mol_type = other DNA
caggagttggtgaccagcct

SEQ ID NO: 69300 - DNA, 20 bp, synthetic construct
  source 1..20: mol_type = other DNA
tcaggagttggtgaccagcc

SEQ ID NO: 69301 - DNA, 20 bp, synthetic construct
  source 1..20: mol_type = other DNA
gtcaggagttggtgaccagc

SEQ ID NO: 69302 - DNA, 20 bp, synthetic construct
  source 1..20: mol_type = other DNA
ggtcaggagttggtgaccag

SEQ ID NO: 69303 - DNA, 20 bp, synthetic construct
  source 1..20: mol_type = other DNA
aggtcaggagttggtgacca

SEQ ID NO: 69304 - DNA, 20 bp, synthetic construct
  source 1..20: mol_type = other DNA
gaggtcaggagttggtgacc

SEQ ID NO: 69305 - DNA, 20 bp, synthetic construct
  source 1..20: mol_type = other DNA
tgaggtcaggagttggtgac

SEQ ID NO: 69306 - DNA, 20 bp, synthetic construct
  source 1..20: mol_type = other DNA
ttgaggtcaggagttggtga

SEQ ID NO: 69307 - DNA, 20 bp, synthetic construct
  source 1..20: mol_type = other DNA
cttgaggtcaggagttggtg

SEQ ID NO: 69308 - DNA, 20 bp, synthetic construct
  source 1..20: mol_type = other DNA
acttgaggtcaggagttggt

SEQ ID NO: 69309 - DNA, 20 bp, synthetic construct
  source 1..20: mol_type = other DNA
cacttgaggtcaggagttgg

SEQ ID NO: 69310 - DNA, 20 bp, synthetic construct
  source 1..20: mol_type = other DNA
tcacttgaggtcaggagttg

SEQ ID NO: 69311 - DNA, 20 bp, synthetic construct
  source 1..20: mol_type = other DNA
atcacttgaggtcaggagtt

SEQ ID NO: 69312 - DNA, 20 bp, synthetic construct
  source 1..20: mol_type = other DNA
gatcacttgaggtcaggagt

SEQ ID NO: 69313 - DNA, 20 bp, synthetic construct
  source 1..20: mol_type = other DNA
ggatcacttgaggtcaggag

SEQ ID NO: 69314 - DNA, 20 bp, synthetic construct
  source 1..20: mol_type = other DNA
cggatcacttgaggtcagga

SEQ ID NO: 69315 - DNA, 20 bp, synthetic construct
  source 1..20: mol_type = other DNA
gcggatcacttgaggtcagg

SEQ ID NO: 69316 - DNA, 20 bp, synthetic construct
  source 1..20: mol_type = other DNA
ggcggatcacttgaggtcag

SEQ ID NO: 69317 - DNA, 20 bp, synthetic construct
  source 1..20: mol_type = other DNA
aggcggatcacttgaggtca

SEQ ID NO: 69318 - DNA, 20 bp, synthetic construct
  source 1..20: mol_type = other DNA
caggcggatcacttgaggtc

SEQ ID NO: 69319 - DNA, 20 bp, synthetic construct
  source 1..20: mol_type = other DNA
gcaggcggatcacttgaggt

SEQ ID NO: 69320 - DNA, 20 bp, synthetic construct
  source 1..20: mol_type = other DNA
ggcaggcggatcacttgagg

SEQ ID NO: 69321 - DNA, 20 bp, synthetic construct
  source 1..20: mol_type = other DNA
aggcaggcggatcacttgag

SEQ ID NO: 69322 - DNA, 20 bp, synthetic construct
  source 1..20: mol_type = other DNA
aaggcaggcggatcacttga

SEQ ID NO: 69323 - DNA, 20 bp, synthetic construct
  source 1..20: mol_type = other DNA
caaggcaggcggatcacttg

SEQ ID NO: 69324 - DNA, 20 bp, synthetic construct
  source 1..20: mol_type = other DNA
ccaaggcaggcggatcactt

SEQ ID NO: 69325 - DNA, 20 bp, synthetic construct
  source 1..20: mol_type = other DNA
gccaaggcaggcggatcact

SEQ ID NO: 69326 - DNA, 20 bp, synthetic construct
  source 1..20: mol_type = other DNA
agccaaggcaggcggatcac

SEQ ID NO: 69327 - DNA, 20 bp, synthetic construct
  source 1..20: mol_type = other DNA
aagccaaggcaggcggatca

SEQ ID NO: 69328 - DNA, 20 bp, synthetic construct
  source 1..20: mol_type = other DNA
gaagccaaggcaggcggatc

SEQ ID NO: 69329 - DNA, 20 bp, synthetic construct
  source 1..20: mol_type = other DNA
ggaagccaaggcaggcggat

SEQ ID NO: 69330 - DNA, 20 bp, synthetic construct
  source 1..20: mol_type = other DNA
tggaagccaaggcaggcgga

SEQ ID NO: 69331 - DNA, 20 bp, synthetic construct
  source 1..20: mol_type = other DNA
ttggaagccaaggcaggcgg

SEQ ID NO: 69332 - DNA, 20 bp, synthetic construct
  source 1..20: mol_type = other DNA
tttggaagccaaggcaggcg

SEQ ID NO: 69333 - DNA, 20 bp, synthetic construct
  source 1..20: mol_type = other DNA
ctttggaagccaaggcaggc

SEQ ID NO: 69334 - DNA, 20 bp, synthetic construct
  source 1..20: mol_type = other DNA
actttggaagccaaggcagg

SEQ ID NO: 69335 - DNA, 20 bp, synthetic construct
  source 1..20: mol_type = other DNA
cactttggaagccaaggcag

SEQ ID NO: 69336 - DNA, 20 bp, synthetic construct
  source 1..20: mol_type = other DNA
gcactttggaagccaaggca

SEQ ID NO: 69337 - DNA, 20 bp, synthetic construct
  source 1..20: mol_type = other DNA
agcactttggaagccaaggc

SEQ ID NO: 69338 - DNA, 20 bp, synthetic construct
  source 1..20: mol_type = other DNA
cagcactttggaagccaagg

SEQ ID NO: 69339 - DNA, 20 bp, synthetic construct
  source 1..20: mol_type = other DNA
ccagcactttggaagccaag

SEQ ID NO: 69340 - DNA, 20 bp, synthetic construct
  source 1..20: mol_type = other DNA
cccagcactttggaagccaa

SEQ ID NO: 69341 - DNA, 20 bp, synthetic construct
  source 1..20: mol_type = other DNA
tcccagcactttggaagcca

SEQ ID NO: 69342 - DNA, 20 bp, synthetic construct
  source 1..20: mol_type = other DNA
atcccagcactttggaagcc

SEQ ID NO: 69343 - DNA, 20 bp, synthetic construct
  source 1..20: mol_type = other DNA
aatcccagcactttggaagc

SEQ ID NO: 69344 - DNA, 20 bp, synthetic construct
  source 1..20: mol_type = other DNA
taatcccagcactttggaag

SEQ ID NO: 69345 - DNA, 20 bp, synthetic construct
  source 1..20: mol_type = other DNA
gtaatcccagcactttggaa

SEQ ID NO: 69346 - DNA, 20 bp, synthetic construct
  source 1..20: mol_type = other DNA
tgtaatcccagcactttgga

SEQ ID NO: 69347 - DNA, 20 bp, synthetic construct
  source 1..20: mol_type = other DNA
ctgtaatcccagcactttgg

SEQ ID NO: 69348 - DNA, 20 bp, synthetic construct
  source 1..20: mol_type = other DNA
cctgtaatcccagcactttg

SEQ ID NO: 69349 - DNA, 20 bp, synthetic construct
  source 1..20: mol_type = other DNA
acctgtaatcccagcacttt

SEQ ID NO: 69350 - DNA, 20 bp, synthetic construct
  source 1..20: mol_type = other DNA
cacctgtaatcccagcactt

SEQ ID NO: 69351 - DNA, 20 bp, synthetic construct
  source 1..20: mol_type = other DNA
acacctgtaatcccagcact

SEQ ID NO: 69352 - DNA, 20 bp, synthetic construct
  source 1..20: mol_type = other DNA
cacacctgtaatcccagcac

SEQ ID NO: 69353 - DNA, 20 bp, synthetic construct
  source 1..20: mol_type = other DNA
tcacacctgtaatcccagca

SEQ ID NO: 69354 - DNA, 20 bp, synthetic construct
  source 1..20: mol_type = other DNA
ctcacacctgtaatcccagc

SEQ ID NO: 69355 - DNA, 20 bp, synthetic construct
  source 1..20: mol_type = other DNA
gctcacacctgtaatcccag

SEQ ID NO: 69356 - DNA, 20 bp, synthetic construct
  source 1..20: mol_type = other DNA
ggctcacacctgtaatccca

SEQ ID NO: 69357 - DNA, 20 bp, synthetic construct
  source 1..20: mol_type = other DNA
tggctcacacctgtaatccc

SEQ ID NO: 69358 - DNA, 20 bp, synthetic construct
  source 1..20: mol_type = other DNA
gtggctcacacctgtaatcc

SEQ ID NO: 69359 - DNA, 20 bp, synthetic construct
  source 1..20: mol_type = other DNA
ggtggctcacacctgtaatc

SEQ ID NO: 69360 - DNA, 20 bp, synthetic construct
  source 1..20: mol_type = other DNA
cggtggctcacacctgtaat

SEQ ID NO: 69361 - DNA, 20 bp, synthetic construct
  source 1..20: mol_type = other DNA
gcggtggctcacacctgtaa

SEQ ID NO: 69362 - DNA, 20 bp, synthetic construct
  source 1..20: mol_type = other DNA
tgcggtggctcacacctgta

SEQ ID NO: 69363 - DNA, 20 bp, synthetic construct
  source 1..20: mol_type = other DNA
gtgcggtggctcacacctgt

SEQ ID NO: 69364 - DNA, 20 bp, synthetic construct
  source 1..20: mol_type = other DNA
ggtgcggtggctcacacctg

SEQ ID NO: 69365 - DNA, 20 bp, synthetic construct
  source 1..20: mol_type = other DNA
gggtgcggtggctcacacct

SEQ ID NO: 69366 - DNA, 20 bp, synthetic construct
  source 1..20: mol_type = other DNA
cgggtgcggtggctcacacc

SEQ ID NO: 69367 - DNA, 20 bp, synthetic construct
  source 1..20: mol_type = other DNA
ccgggtgcggtggctcacac

SEQ ID NO: 69368 - DNA, 20 bp, synthetic construct
  source 1..20: mol_type = other DNA
gccgggtgcggtggctcaca

SEQ ID NO: 69369 - DNA, 20 bp, synthetic construct
  source 1..20: mol_type = other DNA
ggccgggtgcggtggctcac

SEQ ID NO: 69370 - DNA, 20 bp, synthetic construct
  source 1..20: mol_type = other DNA
aggccgggtgcggtggctca

SEQ ID NO: 69371 - DNA, 20 bp, synthetic construct
  source 1..20: mol_type = other DNA
gaggccgggtgcggtggctc

SEQ ID NO: 69372 - DNA, 20 bp, synthetic construct
  source 1..20: mol_type = other DNA
tgaggccgggtgcggtggct

SEQ ID NO: 69373 - DNA, 20 bp, synthetic construct
  source 1..20: mol_type = other DNA
ttgaggccgggtgcggtggc

SEQ ID NO: 69374 - DNA, 20 bp, synthetic construct
  source 1..20: mol_type = other DNA
tttgaggccgggtgcggtgg

SEQ ID NO: 69375 - DNA, 20 bp, synthetic construct
  source 1..20: mol_type = other DNA
atttgaggccgggtgcggtg

SEQ ID NO: 69376 - DNA, 20 bp, synthetic construct
  source 1..20: mol_type = other DNA
aatttgaggccgggtgcggt

SEQ ID NO: 69377 - DNA, 20 bp, synthetic construct
  source 1..20: mol_type = other DNA
taatttgaggccgggtgcgg

SEQ ID NO: 69378 - DNA, 20 bp, synthetic construct
  source 1..20: mol_type = other DNA
ataatttgaggccgggtgcg

SEQ ID NO: 69379 - DNA, 20 bp, synthetic construct
  source 1..20: mol_type = other DNA
aataatttgaggccgggtgc

SEQ ID NO: 69380 - DNA, 20 bp, synthetic construct
  source 1..20: mol_type = other DNA
aaataatttgaggccgggtg

SEQ ID NO: 69381 - DNA, 20 bp, synthetic construct
  source 1..20: mol_type = other DNA
aaaataatttgaggccgggt

SEQ ID NO: 69382 - DNA, 20 bp, synthetic construct
  source 1..20: mol_type = other DNA
aaaaataatttgaggccggg

SEQ ID NO: 69383 - DNA, 20 bp, synthetic construct
  source 1..20: mol_type = other DNA
taaaaataatttgaggccgg

SEQ ID NO: 69384 - DNA, 20 bp, synthetic construct
  source 1..20: mol_type = other DNA
ctaaaaataatttgaggccg

SEQ ID NO: 69385 - DNA, 20 bp, synthetic construct
  source 1..20: mol_type = other DNA
tctaaaaataatttgaggcc

SEQ ID NO: 69386 - DNA, 20 bp, synthetic construct
  source 1..20: mol_type = other DNA
ttctaaaaataatttgaggc

SEQ ID NO: 69387 - DNA, 20 bp, synthetic construct
  source 1..20: mol_type = other DNA
tttctaaaaataatttgagg

SEQ ID NO: 69388 - DNA, 20 bp, synthetic construct
  source 1..20: mol_type = other DNA
gtttctaaaaataatttgag

SEQ ID NO: 69389 - DNA, 20 bp, synthetic construct
  source 1..20: mol_type = other DNA
tgtttctaaaaataatttga

SEQ ID NO: 69390 - DNA, 20 bp, synthetic construct
  source 1..20: mol_type = other DNA
ctgtttctaaaaataatttg

SEQ ID NO: 69391 - DNA, 20 bp, synthetic construct
  source 1..20: mol_type = other DNA
tctgtttctaaaaataattt

SEQ ID NO: 69392 - DNA, 20 bp, synthetic construct
  source 1..20: mol_type = other DNA
ttctgtttctaaaaataatt

SEQ ID NO: 69393 - DNA, 20 bp, synthetic construct
  source 1..20: mol_type = other DNA
attctgtttctaaaaataat

SEQ ID NO: 69394 - DNA, 20 bp, synthetic construct
  source 1..20: mol_type = other DNA
gattctgtttctaaaaataa

SEQ ID NO: 69395 - DNA, 20 bp, synthetic construct
  source 1..20: mol_type = other DNA
agattctgtttctaaaaata

SEQ ID NO: 69396 - DNA, 20 bp, synthetic construct
  source 1..20: mol_type = other DNA
aagattctgtttctaaaaat

SEQ ID NO: 69397 - DNA, 20 bp, synthetic construct
  source 1..20: mol_type = other DNA
caagattctgtttctaaaaa

SEQ ID NO: 69398 - DNA, 20 bp, synthetic construct
  source 1..20: mol_type = other DNA
tcaagattctgtttctaaaa

SEQ ID NO: 69399 - DNA, 20 bp, synthetic construct
  source 1..20: mol_type = other DNA
atcaagattctgtttctaaa

SEQ ID NO: 69400 - DNA, 20 bp, synthetic construct
  source 1..20: mol_type = other DNA
tatcaagattctgtttctaa

SEQ ID NO: 69401 - DNA, 20 bp, synthetic construct
  source 1..20: mol_type = other DNA
atatcaagattctgtttcta

SEQ ID NO: 69402 - DNA, 20 bp, synthetic construct
  source 1..20: mol_type = other DNA
catatcaagattctgtttct

SEQ ID NO: 69403 - DNA, 20 bp, synthetic construct
  source 1..20: mol_type = other DNA
ccatatcaagattctgtttc

SEQ ID NO: 69404 - DNA, 20 bp, synthetic construct
  source 1..20: mol_type = other DNA
accatatcaagattctgttt

SEQ ID NO: 69405 - DNA, 20 bp, synthetic construct
  source 1..20: mol_type = other DNA
taccatatcaagattctgtt

SEQ ID NO: 69406 - DNA, 20 bp, synthetic construct
  source 1..20: mol_type = other DNA
ataccatatcaagattctgt

SEQ ID NO: 69407 - DNA, 20 bp, synthetic construct
  source 1..20: mol_type = other DNA
gataccatatcaagattctg

SEQ ID NO: 69408 - DNA, 20 bp, synthetic construct
  source 1..20: mol_type = other DNA
ggataccatatcaagattct

SEQ ID NO: 69409 - DNA, 20 bp, synthetic construct
  source 1..20: mol_type = other DNA
cggataccatatcaagattc

SEQ ID NO: 69410 - DNA, 20 bp, synthetic construct
  source 1..20: mol_type = other DNA
gcggataccatatcaagatt

SEQ ID NO: 69411 - DNA, 20 bp, synthetic construct
  source 1..20: mol_type = other DNA
agcggataccatatcaagat

SEQ ID NO: 69412 - DNA, 20 bp, synthetic construct
  source 1..20: mol_type = other DNA
gagcggataccatatcaaga

SEQ ID NO: 69413 - DNA, 20 bp, synthetic construct
  source 1..20: mol_type = other DNA
agagcggataccatatcaag

SEQ ID NO: 69414 - DNA, 20 bp, synthetic construct
  source 1..20: mol_type = other DNA
cagagcggataccatatcaa

SEQ ID NO: 69415 - DNA, 20 bp, synthetic construct
  source 1..20: mol_type = other DNA
ccagagcggataccatatca

SEQ ID NO: 69416 - DNA, 20 bp, synthetic construct
  source 1..20: mol_type = other DNA
gccagagcggataccatatc

SEQ ID NO: 69417 - DNA, 20 bp, synthetic construct
  source 1..20: mol_type = other DNA
ggccagagcggataccatat

SEQ ID NO: 69418 - DNA, 20 bp, synthetic construct
  source 1..20: mol_type = other DNA
aggccagagcggataccata

SEQ ID NO: 69419 - DNA, 20 bp, synthetic construct
  source 1..20: mol_type = other DNA
aaggccagagcggataccat

SEQ ID NO: 69420 - DNA, 20 bp, synthetic construct
  source 1..20: mol_type = other DNA
caaggccagagcggatacca

SEQ ID NO: 69421 - DNA, 20 bp, synthetic construct
  source 1..20: mol_type = other DNA
tcaaggccagagcggatacc

SEQ ID NO: 69422 - DNA, 20 bp, synthetic construct
  source 1..20: mol_type = other DNA
ttcaaggccagagcggatac

SEQ ID NO: 69423 - DNA, 20 bp, synthetic construct
  source 1..20: mol_type = other DNA
gttcaaggccagagcggata

SEQ ID NO: 69424 - DNA, 20 bp, synthetic construct
  source 1..20: mol_type = other DNA
agttcaaggccagagcggat

SEQ ID NO: 69425 - DNA, 20 bp, synthetic construct
  source 1..20: mol_type = other DNA
aagttcaaggccagagcgga

SEQ ID NO: 69426 - DNA, 20 bp, synthetic construct
  source 1..20: mol_type = other DNA
caagttcaaggccagagcgg

SEQ ID NO: 69427 - DNA, 20 bp, synthetic construct
  source 1..20: mol_type = other DNA
acaagttcaaggccagagcg

SEQ ID NO: 69428 - DNA, 20 bp, synthetic construct
  source 1..20: mol_type = other DNA
cacaagttcaaggccagagc

SEQ ID NO: 69429 - DNA, 20 bp, synthetic construct
  source 1..20: mol_type = other DNA
ccacaagttcaaggccagag

SEQ ID NO: 69430 - DNA, 20 bp, synthetic construct
  source 1..20: mol_type = other DNA
cccacaagttcaaggccaga

SEQ ID NO: 69431 - DNA, 20 bp, synthetic construct
  source 1..20: mol_type = other DNA
gcccacaagttcaaggccag

SEQ ID NO: 69432 - DNA, 20 bp, synthetic construct
  source 1..20: mol_type = other DNA
agcccacaagttcaaggcca

SEQ ID NO: 69433 - DNA, 20 bp, synthetic construct
  source 1..20: mol_type = other DNA
gagcccacaagttcaaggcc

SEQ ID NO: 69434 - DNA, 20 bp, synthetic construct
  source 1..20: mol_type = other DNA
tgagcccacaagttcaaggc

SEQ ID NO: 69435 - DNA, 20 bp, synthetic construct
  source 1..20: mol_type = other DNA
ctgagcccacaagttcaagg

SEQ ID NO: 69436 - DNA, 20 bp, synthetic construct
  source 1..20: mol_type = other DNA
cctgagcccacaagttcaag

SEQ ID NO: 69437 - DNA, 20 bp, synthetic construct
  source 1..20: mol_type = other DNA
gcctgagcccacaagttcaa

SEQ ID NO: 69438 - DNA, 20 bp, synthetic construct
  source 1..20: mol_type = other DNA
tgcctgagcccacaagttca

SEQ ID NO: 69439 - DNA, 20 bp, synthetic construct
  source 1..20: mol_type = other DNA
ctgcctgagcccacaagttc

SEQ ID NO: 69440 - DNA, 20 bp, synthetic construct
  source 1..20: mol_type = other DNA
actgcctgagcccacaagtt

SEQ ID NO: 69441 - DNA, 20 bp, synthetic construct
  source 1..20: mol_type = other DNA
gactgcctgagcccacaagt

SEQ ID NO: 69442 - DNA, 20 bp, synthetic construct
  source 1..20: mol_type = other DNA
ggactgcctgagcccacaag

SEQ ID NO: 69443 - DNA, 20 bp, synthetic construct
  source 1..20: mol_type = other DNA
aggactgcctgagcccacaa

SEQ ID NO: 69444 - DNA, 20 bp, synthetic construct
  source 1..20: mol_type = other DNA
gaggactgcctgagcccaca

SEQ ID NO: 69445 - DNA, 20 bp, synthetic construct
  source 1..20: mol_type = other DNA
ggaggactgcctgagcccac

SEQ ID NO: 69446 - DNA, 20 bp, synthetic construct
  source 1..20: mol_type = other DNA
gggaggactgcctgagccca

SEQ ID NO: 69447 - DNA, 20 bp, synthetic construct
  source 1..20: mol_type = other DNA
tgggaggactgcctgagccc

SEQ ID NO: 69448 - DNA, 20 bp, synthetic construct
  source 1..20: mol_type = other DNA
gtgggaggactgcctgagcc

SEQ ID NO: 69449 - DNA, 20 bp, synthetic construct
  source 1..20: mol_type = other DNA
ggtgggaggactgcctgagc

SEQ ID NO: 69450 - DNA, 20 bp, synthetic construct
  source 1..20: mol_type = other DNA
aggtgggaggactgcctgag

SEQ ID NO: 69451 - DNA, 20 bp, synthetic construct
  source 1..20: mol_type = other DNA
gaggtgggaggactgcctga

SEQ ID NO: 69452 - DNA, 20 bp, synthetic construct
  source 1..20: mol_type = other DNA
tgaggtgggaggactgcctg

SEQ ID NO: 69453 - DNA, 20 bp, synthetic construct
  source 1..20: mol_type = other DNA
ctgaggtgggaggactgcct

SEQ ID NO: 69454 - DNA, 20 bp, synthetic construct
  source 1..20: mol_type = other DNA
gctgaggtgggaggactgcc

SEQ ID NO: 69455 - DNA, 20 bp, synthetic construct
  source 1..20: mol_type = other DNA
ggctgaggtgggaggactgc

SEQ ID NO: 69456 - DNA, 20 bp, synthetic construct
  source 1..20: mol_type = other DNA
aggctgaggtgggaggactg

SEQ ID NO: 69457 - DNA, 20 bp, synthetic construct
  source 1..20: mol_type = other DNA
gaggctgaggtgggaggact

SEQ ID NO: 69458 - DNA, 20 bp, synthetic construct
  source 1..20: mol_type = other DNA
ggaggctgaggtgggaggac

SEQ ID NO: 69459 - DNA, 20 bp, synthetic construct
  source 1..20: mol_type = other DNA
aggaggctgaggtgggagga

SEQ ID NO: 69460 - DNA, 20 bp, synthetic construct
  source 1..20: mol_type = other DNA
caggaggctgaggtgggagg

SEQ ID NO: 69461 - DNA, 20 bp, synthetic construct
  source 1..20: mol_type = other DNA
tcaggaggctgaggtgggag

SEQ ID NO: 69462 - DNA, 20 bp, synthetic construct
  source 1..20: mol_type = other DNA
ctcaggaggctgaggtggga

SEQ ID NO: 69463 - DNA, 20 bp, synthetic construct
  source 1..20: mol_type = other DNA
actcaggaggctgaggtggg

SEQ ID NO: 69464 - DNA, 20 bp, synthetic construct
  source 1..20: mol_type = other DNA
tactcaggaggctgaggtgg

SEQ ID NO: 69465 - DNA, 20 bp, synthetic construct
  source 1..20: mol_type = other DNA
ctactcaggaggctgaggtg

SEQ ID NO: 69466 - DNA, 20 bp, synthetic construct
  source 1..20: mol_type = other DNA
gctactcaggaggctgaggt

SEQ ID NO: 69467 - DNA, 20 bp, synthetic construct
  source 1..20: mol_type = other DNA
agctactcaggaggctgagg

SEQ ID NO: 69468 - DNA, 20 bp, synthetic construct
  source 1..20: mol_type = other DNA
cagctactcaggaggctgag

SEQ ID NO: 69469 - DNA, 20 bp, synthetic construct
  source 1..20: mol_type = other DNA
ccagctactcaggaggctga

SEQ ID NO: 69470 - DNA, 20 bp, synthetic construct
  source 1..20: mol_type = other DNA
cccagctactcaggaggctg

SEQ ID NO: 69471 - DNA, 20 bp, synthetic construct
  source 1..20: mol_type = other DNA
tcccagctactcaggaggct

SEQ ID NO: 69472 - DNA, 20 bp, synthetic construct
  source 1..20: mol_type = other DNA
atcccagctactcaggaggc

SEQ ID NO: 69473 - DNA, 20 bp, synthetic construct
  source 1..20: mol_type = other DNA
aatcccagctactcaggagg

SEQ ID NO: 69474 - DNA, 20 bp, synthetic construct
  source 1..20: mol_type = other DNA
taatcccagctactcaggag

SEQ ID NO: 69475 - DNA, 20 bp, synthetic construct
  source 1..20: mol_type = other DNA
ataatcccagctactcagga

SEQ ID NO: 69476 - DNA, 20 bp, synthetic construct
  source 1..20: mol_type = other DNA
tataatcccagctactcagg

SEQ ID NO: 69477 - DNA, 20 bp, synthetic construct
  source 1..20: mol_type = other DNA
ctataatcccagctactcag

SEQ ID NO: 69478 - DNA, 20 bp, synthetic construct
  source 1..20: mol_type = other DNA
cctataatcccagctactca

SEQ ID NO: 69479 - DNA, 20 bp, synthetic construct
  source 1..20: mol_type = other DNA
gcctataatcccagctactc

SEQ ID NO: 69480 - DNA, 20 bp, synthetic construct
  source 1..20: mol_type = other DNA
tgcctataatcccagctact

SEQ ID NO: 69481 - DNA, 20 bp, synthetic construct
  source 1..20: mol_type = other DNA
atgcctataatcccagctac

SEQ ID NO: 69482 - DNA, 20 bp, synthetic construct
  source 1..20: mol_type = other DNA
catgcctataatcccagcta

SEQ ID NO: 69483 - DNA, 20 bp, synthetic construct
  source 1..20: mol_type = other DNA
acatgcctataatcccagct

SEQ ID NO: 69484 - DNA, 20 bp, synthetic construct
  source 1..20: mol_type = other DNA
cacatgcctataatcccagc

SEQ ID NO: 69485 - DNA, 20 bp, synthetic construct
  source 1..20: mol_type = other DNA
gcacatgcctataatcccag

SEQ ID NO: 69486 - DNA, 20 bp, synthetic construct
  source 1..20: mol_type = other DNA
ggcacatgcctataatccca

SEQ ID NO: 69487 - DNA, 20 bp, synthetic construct
  source 1..20: mol_type = other DNA
tggcacatgcctataatccc

SEQ ID NO: 69488 - DNA, 20 bp, synthetic construct
  source 1..20: mol_type = other DNA
gtggcacatgcctataatcc

SEQ ID NO: 69489 - DNA, 20 bp, synthetic construct
  source 1..20: mol_type = other DNA
agtggcacatgcctataatc

SEQ ID NO: 69490 - DNA, 20 bp, synthetic construct
  source 1..20: mol_type = other DNA
cagtggcacatgcctataat

SEQ ID NO: 69491 - DNA, 20 bp, synthetic construct
  source 1..20: mol_type = other DNA
gcagtggcacatgcctataa

SEQ ID NO: 69492 - DNA, 20 bp, synthetic construct
  source 1..20: mol_type = other DNA
tgcagtggcacatgcctata

SEQ ID NO: 69493 - DNA, 20 bp, synthetic construct
  source 1..20: mol_type = other DNA
gtgcagtggcacatgcctat

SEQ ID NO: 69494 - DNA, 20 bp, synthetic construct
  source 1..20: mol_type = other DNA
ggtgcagtggcacatgccta

SEQ ID NO: 69495 - DNA, 20 bp, synthetic construct
  source 1..20: mol_type = other DNA
tggtgcagtggcacatgcct

SEQ ID NO: 69496 - DNA, 20 bp, synthetic construct
  source 1..20: mol_type = other DNA
ctggtgcagtggcacatgcc

SEQ ID NO: 69497 - DNA, 20 bp, synthetic construct
  source 1..20: mol_type = other DNA
cctggtgcagtggcacatgc

SEQ ID NO: 69498 - DNA, 20 bp, synthetic construct
  source 1..20: mol_type = other DNA
gcctggtgcagtggcacatg

SEQ ID NO: 69499 - DNA, 20 bp, synthetic construct
  source 1..20: mol_type = other DNA
agcctggtgcagtggcacat

SEQ ID NO: 69500 - DNA, 20 bp, synthetic construct
  source 1..20: mol_type = other DNA
aagcctggtgcagtggcaca

SEQ ID NO: 69501 - DNA, 20 bp, synthetic construct
  source 1..20: mol_type = other DNA
gaagcctggtgcagtggcac

SEQ ID NO: 69502 - DNA, 20 bp, synthetic construct
  source 1..20: mol_type = other DNA
tgaagcctggtgcagtggca

SEQ ID NO: 69503 - DNA, 20 bp, synthetic construct
  source 1..20: mol_type = other DNA
ttgaagcctggtgcagtggc

SEQ ID NO: 69504 - DNA, 20 bp, synthetic construct
  source 1..20: mol_type = other DNA
tttgaagcctggtgcagtgg

SEQ ID NO: 69505 - DNA, 20 bp, synthetic construct
  source 1..20: mol_type = other DNA
atttgaagcctggtgcagtg

SEQ ID NO: 69506 - DNA, 20 bp, synthetic construct
  source 1..20: mol_type = other DNA
aatttgaagcctggtgcagt

SEQ ID NO: 69507 - DNA, 20 bp, synthetic construct
  source 1..20: mol_type = other DNA
taatttgaagcctggtgcag

SEQ ID NO: 69508 - DNA, 20 bp, synthetic construct
  source 1..20: mol_type = other DNA
ataatttgaagcctggtgca

SEQ ID NO: 69509 - DNA, 20 bp, synthetic construct
  source 1..20: mol_type = other DNA
aataatttgaagcctggtgc

SEQ ID NO: 69510 - DNA, 20 bp, synthetic construct
  source 1..20: mol_type = other DNA
taataatttgaagcctggtg

SEQ ID NO: 69511 - DNA, 20 bp, synthetic construct
  source 1..20: mol_type = other DNA
ataataatttgaagcctggt

SEQ ID NO: 69512 - DNA, 20 bp, synthetic construct
  source 1..20: mol_type = other DNA
cataataatttgaagcctgg

SEQ ID NO: 69513 - DNA, 20 bp, synthetic construct
  source 1..20: mol_type = other DNA
acataataatttgaagcctg

SEQ ID NO: 69514 - DNA, 20 bp, synthetic construct
  source 1..20: mol_type = other DNA
tacataataatttgaagcct

SEQ ID NO: 69515 - DNA, 20 bp, synthetic construct
  source 1..20: mol_type = other DNA
atacataataatttgaagcc

SEQ ID NO: 69516 - DNA, 20 bp, synthetic construct
  source 1..20: mol_type = other DNA
catacataataatttgaagc

SEQ ID NO: 69517 - DNA, 20 bp, synthetic construct
  source 1..20: mol_type = other DNA
acatacataataatttgaag

SEQ ID NO: 69518 - DNA, 20 bp, synthetic construct
  source 1..20: mol_type = other DNA
aacatacataataatttgaa

SEQ ID NO: 69519 - DNA, 20 bp, synthetic construct
  source 1..20: mol_type = other DNA
gaacatacataataatttga

SEQ ID NO: 69520 - DNA, 20 bp, synthetic construct
  source 1..20: mol_type = other DNA
tgaacatacataataatttg

SEQ ID NO: 69521 - DNA, 20 bp, synthetic construct
  source 1..20: mol_type = other DNA
atgaacatacataataattt

SEQ ID NO: 69522 - DNA, 20 bp, synthetic construct
  source 1..20: mol_type = other DNA
gatgaacatacataataatt

SEQ ID NO: 69523 - DNA, 20 bp, synthetic construct
  source 1..20: mol_type = other DNA
tgatgaacatacataataat

SEQ ID NO: 69524 - DNA, 20 bp, synthetic construct
  source 1..20: mol_type = other DNA
gtgatgaacatacataataa

SEQ ID NO: 69525 - DNA, 20 bp, synthetic construct
  source 1..20: mol_type = other DNA
ggtgatgaacatacataata

SEQ ID NO: 69526 - DNA, 20 bp, synthetic construct
  source 1..20: mol_type = other DNA
aggtgatgaacatacataat

SEQ ID NO: 69527 - DNA, 20 bp, synthetic construct
  source 1..20: mol_type = other DNA
gaggtgatgaacatacataa

SEQ ID NO: 69528 - DNA, 20 bp, synthetic construct
  source 1..20: mol_type = other DNA
agaggtgatgaacatacata

SEQ ID NO: 69529 - DNA, 20 bp, synthetic construct
  source 1..20: mol_type = other DNA
aagaggtgatgaacatacat

SEQ ID NO: 69530 - DNA, 20 bp, synthetic construct
  source 1..20: mol_type = other DNA
aaagaggtgatgaacataca

SEQ ID NO: 69531 - DNA, 20 bp, synthetic construct
  source 1..20: mol_type = other DNA
taaagaggtgatgaacatac

SEQ ID NO: 69532 - DNA, 20 bp, synthetic construct
  source 1..20: mol_type = other DNA
ttaaagaggtgatgaacata

SEQ ID NO: 69533 - DNA, 20 bp, synthetic construct
  source 1..20: mol_type = other DNA
tttaaagaggtgatgaacat

SEQ ID NO: 69534 - DNA, 20 bp, synthetic construct
  source 1..20: mol_type = other DNA
atttaaagaggtgatgaaca

SEQ ID NO: 69535 - DNA, 20 bp, synthetic construct
  source 1..20: mol_type = other DNA
aatttaaagaggtgatgaac

SEQ ID NO: 69536 - DNA, 20 bp, synthetic construct
  source 1..20: mol_type = other DNA
aaatttaaagaggtgatgaa

SEQ ID NO: 69537 - DNA, 20 bp, synthetic construct
  source 1..20: mol_type = other DNA
taaatttaaagaggtgatga

SEQ ID NO: 69538 - DNA, 20 bp, synthetic construct
  source 1..20: mol_type = other DNA
ataaatttaaagaggtgatg

SEQ ID NO: 69539 - DNA, 20 bp, synthetic construct
  source 1..20: mol_type = other DNA
tataaatttaaagaggtgat

SEQ ID NO: 69540 - DNA, 20 bp, synthetic construct
  source 1..20: mol_type = other DNA
ttataaatttaaagaggtga

SEQ ID NO: 69541 - DNA, 20 bp, synthetic construct
  source 1..20: mol_type = other DNA
attataaatttaaagaggtg

SEQ ID NO: 69542 - DNA, 20 bp, synthetic construct
  source 1..20: mol_type = other DNA
tattataaatttaaagaggt

SEQ ID NO: 69543 - DNA, 20 bp, synthetic construct
  source 1..20: mol_type = other DNA
ctattataaatttaaagagg

SEQ ID NO: 69544 - DNA, 20 bp, synthetic construct
  source 1..20: mol_type = other DNA
actattataaatttaaagag

SEQ ID NO: 69545 - DNA, 20 bp, synthetic construct
  source 1..20: mol_type = other DNA
aactattataaatttaaaga

SEQ ID NO: 69546 - DNA, 20 bp, synthetic construct
  source 1..20: mol_type = other DNA
taactattataaatttaaag

SEQ ID NO: 69547 - DNA, 20 bp, synthetic construct
  source 1..20: mol_type = other DNA
ataactattataaatttaaa

SEQ ID NO: 69548 - DNA, 20 bp, synthetic construct
  source 1..20: mol_type = other DNA
aataactattataaatttaa

SEQ ID NO: 69549 - DNA, 20 bp, synthetic construct
  source 1..20: mol_type = other DNA
taataactattataaattta

SEQ ID NO: 69550 - DNA, 20 bp, synthetic construct
  source 1..20: mol_type = other DNA
ttaataactattataaattt

SEQ ID NO: 69551 - DNA, 20 bp, synthetic construct
  source 1..20: mol_type = other DNA
tttaataactattataaatt

SEQ ID NO: 69552 - DNA, 20 bp, synthetic construct
  source 1..20: mol_type = other DNA
gtttaataactattataaat

SEQ ID NO: 69553 - DNA, 20 bp, synthetic construct
  source 1..20: mol_type = other DNA
ggtttaataactattataaa

SEQ ID NO: 69554 - DNA, 20 bp, synthetic construct
  source 1..20: mol_type = other DNA
aggtttaataactattataa

SEQ ID NO: 69555 - DNA, 20 bp, synthetic construct
  source 1..20: mol_type = other DNA
caggtttaataactattata

SEQ ID NO: 69556 - DNA, 20 bp, synthetic construct
  source 1..20: mol_type = other DNA
acaggtttaataactattat

SEQ ID NO: 69557 - DNA, 20 bp, synthetic construct
  source 1..20: mol_type = other DNA
aacaggtttaataactatta

SEQ ID NO: 69558 - DNA, 20 bp, synthetic construct
  source 1..20: mol_type = other DNA
taacaggtttaataactatt

SEQ ID NO: 69559 - DNA, 20 bp, synthetic construct
  source 1..20: mol_type = other DNA
gtaacaggtttaataactat

SEQ ID NO: 69560 - DNA, 20 bp, synthetic construct
  source 1..20: mol_type = other DNA
agtaacaggtttaataacta

SEQ ID NO: 69561 - DNA, 20 bp, synthetic construct
  source 1..20: mol_type = other DNA
cagtaacaggtttaataact

SEQ ID NO: 69562 - DNA, 20 bp, synthetic construct
  source 1..20: mol_type = other DNA
ccagtaacaggtttaataac

SEQ ID NO: 69563 - DNA, 20 bp, synthetic construct
  source 1..20: mol_type = other DNA
tccagtaacaggtttaataa

SEQ ID NO: 69564 - DNA, 20 bp, synthetic construct
  source 1..20: mol_type = other DNA
atccagtaacaggtttaata

SEQ ID NO: 69565 - DNA, 20 bp, synthetic construct
  source 1..20: mol_type = other DNA
gatccagtaacaggtttaat

SEQ ID NO: 69566 - DNA, 20 bp, synthetic construct
  source 1..20: mol_type = other DNA
agatccagtaacaggtttaa

SEQ ID NO: 69567 - DNA, 20 bp, synthetic construct
  source 1..20: mol_type = other DNA
aagatccagtaacaggttta

SEQ ID NO: 69568 - DNA, 20 bp, synthetic construct
  source 1..20: mol_type = other DNA
taagatccagtaacaggttt

SEQ ID NO: 69569 - DNA, 20 bp, synthetic construct
  source 1..20: mol_type = other DNA
ttaagatccagtaacaggtt

SEQ ID NO: 69570 - DNA, 20 bp, synthetic construct
  source 1..20: mol_type = other DNA
attaagatccagtaacaggt

SEQ ID NO: 69571 - DNA, 20 bp, synthetic construct
  source 1..20: mol_type = other DNA
tattaagatccagtaacagg

SEQ ID NO: 69572 - DNA, 20 bp, synthetic construct
  source 1..20: mol_type = other DNA
atattaagatccagtaacag

SEQ ID NO: 69573 - DNA, 20 bp, synthetic construct
  source 1..20: mol_type = other DNA
aatattaagatccagtaaca

SEQ ID NO: 69574 - DNA, 20 bp, synthetic construct
  source 1..20: mol_type = other DNA
aaatattaagatccagtaac

SEQ ID NO: 69575 - DNA, 20 bp, synthetic construct
  source 1..20: mol_type = other DNA
taaatattaagatccagtaa

SEQ ID NO: 69576 - DNA, 20 bp, synthetic construct
  source 1..20: mol_type = other DNA
ttaaatattaagatccagta

SEQ ID NO: 69577 - DNA, 20 bp, synthetic construct
  source 1..20: mol_type = other DNA
attaaatattaagatccagt

SEQ ID NO: 69578 - DNA, 20 bp, synthetic construct
  source 1..20: mol_type = other DNA
cattaaatattaagatccag

SEQ ID NO: 69579 - DNA, 20 bp, synthetic construct
  source 1..20: mol_type = other DNA
gcattaaatattaagatcca

SEQ ID NO: 69580 - DNA, 20 bp, synthetic construct
  source 1..20: mol_type = other DNA
agcattaaatattaagatcc

SEQ ID NO: 69581 - DNA, 20 bp, synthetic construct
  source 1..20: mol_type = other DNA
aagcattaaatattaagatc

SEQ ID NO: 69582 - DNA, 20 bp, synthetic construct
  source 1..20: mol_type = other DNA
aaagcattaaatattaagat

SEQ ID NO: 69583 - DNA, 20 bp, synthetic construct
  source 1..20: mol_type = other DNA
taaagcattaaatattaaga

SEQ ID NO: 69584 - DNA, 20 bp, synthetic construct
  source 1..20: mol_type = other DNA
ttaaagcattaaatattaag

SEQ ID NO: 69585 - DNA, 20 bp, synthetic construct
  source 1..20: mol_type = other DNA
attaaagcattaaatattaa

SEQ ID NO: 69586 - DNA, 20 bp, synthetic construct
  source 1..20: mol_type = other DNA
aattaaagcattaaatatta

SEQ ID NO: 69587 - DNA, 20 bp, synthetic construct
  source 1..20: mol_type = other DNA
taattaaagcattaaatatt

SEQ ID NO: 69588 - DNA, 20 bp, synthetic construct
  source 1..20: mol_type = other DNA
ttaattaaagcattaaatat

SEQ ID NO: 69589 - DNA, 20 bp, synthetic construct
  source 1..20: mol_type = other DNA
cttaattaaagcattaaata

SEQ ID NO: 69590 - DNA, 20 bp, synthetic construct
  source 1..20: mol_type = other DNA
tcttaattaaagcattaaat

SEQ ID NO: 69591 - DNA, 20 bp, synthetic construct
  source 1..20: mol_type = other DNA
ttcttaattaaagcattaaa

SEQ ID NO: 69592 - DNA, 20 bp, synthetic construct
  source 1..20: mol_type = other DNA
gttcttaattaaagcattaa

SEQ ID NO: 69593 - DNA, 20 bp, synthetic construct
  source 1..20: mol_type = other DNA
tgttcttaattaaagcatta

SEQ ID NO: 69594 - DNA, 20 bp, synthetic construct
  source 1..20: mol_type = other DNA
atgttcttaattaaagcatt

SEQ ID NO: 69595 - DNA, 20 bp, synthetic construct
  source 1..20: mol_type = other DNA
catgttcttaattaaagcat

SEQ ID NO: 69596 - DNA, 20 bp, synthetic construct
  source 1..20: mol_type = other DNA
acatgttcttaattaaagca

SEQ ID NO: 69597 - DNA, 20 bp, synthetic construct
  source 1..20: mol_type = other DNA
tacatgttcttaattaaagc

SEQ ID NO: 69598 - DNA, 20 bp, synthetic construct
  source 1..20: mol_type = other DNA
atacatgttcttaattaaag

SEQ ID NO: 69599 - DNA, 20 bp, synthetic construct
  source 1..20: mol_type = other DNA
catacatgttcttaattaaa

SEQ ID NO: 69600 - DNA, 20 bp, synthetic construct
  source 1..20: mol_type = other DNA
acatacatgttcttaattaa

SEQ ID NO: 69601 - DNA, 20 bp, synthetic construct
  source 1..20: mol_type = other DNA
aacatacatgttcttaatta

SEQ ID NO: 69602 - DNA, 20 bp, synthetic construct
  source 1..20: mol_type = other DNA
taacatacatgttcttaatt

SEQ ID NO: 69603 - DNA, 20 bp, synthetic construct
  source 1..20: mol_type = other DNA
gtaacatacatgttcttaat

SEQ ID NO: 69604 - DNA, 20 bp, synthetic construct
  source 1..20: mol_type = other DNA
agtaacatacatgttcttaa

SEQ ID NO: 69605 - DNA, 20 bp, synthetic construct
  source 1..20: mol_type = other DNA
tagtaacatacatgttctta

SEQ ID NO: 69606 - DNA, 20 bp, synthetic construct
  source 1..20: mol_type = other DNA
atagtaacatacatgttctt

SEQ ID NO: 69607 - DNA, 20 bp, synthetic construct
  source 1..20: mol_type = other DNA
catagtaacatacatgttct

SEQ ID NO: 69608 - DNA, 20 bp, synthetic construct
  source 1..20: mol_type = other DNA
gcatagtaacatacatgttc

SEQ ID NO: 69609 - DNA, 20 bp, synthetic construct
  source 1..20: mol_type = other DNA
ggcatagtaacatacatgtt

SEQ ID NO: 69610 - DNA, 20 bp, synthetic construct
  source 1..20: mol_type = other DNA
tggcatagtaacatacatgt

SEQ ID NO: 69611 - DNA, 20 bp, synthetic construct
  source 1..20: mol_type = other DNA
ttggcatagtaacatacatg

SEQ ID NO: 69612 - DNA, 20 bp, synthetic construct
  source 1..20: mol_type = other DNA
gttggcatagtaacatacat

SEQ ID NO: 69613 - DNA, 20 bp, synthetic construct
  source 1..20: mol_type = other DNA
tgttggcatagtaacataca

SEQ ID NO: 69614 - DNA, 20 bp, synthetic construct
  source 1..20: mol_type = other DNA
ctgttggcatagtaacatac

SEQ ID NO: 69615 - DNA, 20 bp, synthetic construct
  source 1..20: mol_type = other DNA
tctgttggcatagtaacata

SEQ ID NO: 69616 - DNA, 20 bp, synthetic construct
  source 1..20: mol_type = other DNA
atctgttggcatagtaacat

SEQ ID NO: 69617 - DNA, 20 bp, synthetic construct
  source 1..20: mol_type = other DNA
aatctgttggcatagtaaca

SEQ ID NO: 69618 - DNA, 20 bp, synthetic construct
  source 1..20: mol_type = other DNA
aaatctgttggcatagtaac

SEQ ID NO: 69619 - DNA, 20 bp, synthetic construct
  source 1..20: mol_type = other DNA
aaaatctgttggcatagtaa

SEQ ID NO: 69620 - DNA, 20 bp, synthetic construct
  source 1..20: mol_type = other DNA
aaaaatctgttggcatagta

SEQ ID NO: 69621 - DNA, 20 bp, synthetic construct
  source 1..20: mol_type = other DNA
aaaaaatctgttggcatagt

SEQ ID NO: 69622 - DNA, 20 bp, synthetic construct
  source 1..20: mol_type = other DNA
aaaaaaatctgttggcatag

SEQ ID NO: 69623 - DNA, 20 bp, synthetic construct
  source 1..20: mol_type = other DNA
taaaaaaatctgttggcata

SEQ ID NO: 69624 - DNA, 20 bp, synthetic construct
  source 1..20: mol_type = other DNA
ctaaaaaaatctgttggcat

SEQ ID NO: 69625 - DNA, 20 bp, synthetic construct
  source 1..20: mol_type = other DNA
actaaaaaaatctgttggca

SEQ ID NO: 69626 - DNA, 20 bp, synthetic construct
  source 1..20: mol_type = other DNA
aactaaaaaaatctgttggc

SEQ ID NO: 69627 - DNA, 20 bp, synthetic construct
  source 1..20: mol_type = other DNA
aaactaaaaaaatctgttgg

SEQ ID NO: 69628 - DNA, 20 bp, synthetic construct
  source 1..20: mol_type = other DNA
aaaactaaaaaaatctgttg

SEQ ID NO: 69629 - DNA, 20 bp, synthetic construct
  source 1..20: mol_type = other DNA
aaaaactaaaaaaatctgtt

SEQ ID NO: 69630 - DNA, 20 bp, synthetic construct
  source 1..20: mol_type = other DNA
caaaaactaaaaaaatctgt

SEQ ID NO: 69631 - DNA, 20 bp, synthetic construct
  source 1..20: mol_type = other DNA
tcaaaaactaaaaaaatctg

SEQ ID NO: 69632 - DNA, 20 bp, synthetic construct
  source 1..20: mol_type = other DNA
atcaaaaactaaaaaaatct

SEQ ID NO: 69633 - DNA, 20 bp, synthetic construct
  source 1..20: mol_type = other DNA
tatcaaaaactaaaaaaatc

SEQ ID NO: 69634 - DNA, 20 bp, synthetic construct
  source 1..20: mol_type = other DNA
ttatcaaaaactaaaaaaat

SEQ ID NO: 69635 - DNA, 20 bp, synthetic construct
  source 1..20: mol_type = other DNA
gttatcaaaaactaaaaaaa

SEQ ID NO: 69636 - DNA, 20 bp, synthetic construct
  source 1..20: mol_type = other DNA
agttatcaaaaactaaaaaa

SEQ ID NO: 69637 - DNA, 20 bp, synthetic construct
  source 1..20: mol_type = other DNA
cagttatcaaaaactaaaaa

SEQ ID NO: 69638 - DNA, 20 bp, synthetic construct
  source 1..20: mol_type = other DNA
gcagttatcaaaaactaaaa

SEQ ID NO: 69639 - DNA, 20 bp, synthetic construct
  source 1..20: mol_type = other DNA
tgcagttatcaaaaactaaa

SEQ ID NO: 69640 - DNA, 20 bp, synthetic construct
  source 1..20: mol_type = other DNA
atgcagttatcaaaaactaa

SEQ ID NO: 69641 - DNA, 20 bp, synthetic construct
  source 1..20: mol_type = other DNA
aatgcagttatcaaaaacta

SEQ ID NO: 69642 - DNA, 20 bp, synthetic construct
  source 1..20: mol_type = other DNA
aaatgcagttatcaaaaact

SEQ ID NO: 69643 - DNA, 20 bp, synthetic construct
  source 1..20: mol_type = other DNA
gaaatgcagttatcaaaaac

SEQ ID NO: 69644 - DNA, 20 bp, synthetic construct
  source 1..20: mol_type = other DNA
tgaaatgcagttatcaaaaa

SEQ ID NO: 69645 - DNA, 20 bp, synthetic construct
  source 1..20: mol_type = other DNA
atgaaatgcagttatcaaaa

SEQ ID NO: 69646 - DNA, 20 bp, synthetic construct
  source 1..20: mol_type = other DNA
aatgaaatgcagttatcaaa

SEQ ID NO: 69647 - DNA, 20 bp, synthetic construct
  source 1..20: mol_type = other DNA
caatgaaatgcagttatcaa

SEQ ID NO: 69648 - DNA, 20 bp, synthetic construct
  source 1..20: mol_type = other DNA
acaatgaaatgcagttatca

SEQ ID NO: 69649 - DNA, 20 bp, synthetic construct
  source 1..20: mol_type = other DNA
aacaatgaaatgcagttatc

SEQ ID NO: 69650 - DNA, 20 bp, synthetic construct
  source 1..20: mol_type = other DNA
taacaatgaaatgcagttat

SEQ ID NO: 69651 - DNA, 20 bp, synthetic construct
  source 1..20: mol_type = other DNA
gtaacaatgaaatgcagtta

SEQ ID NO: 69652 - DNA, 20 bp, synthetic construct
  source 1..20: mol_type = other DNA
agtaacaatgaaatgcagtt

SEQ ID NO: 69653 - DNA, 20 bp, synthetic construct
  source 1..20: mol_type = other DNA
aagtaacaatgaaatgcagt

SEQ ID NO: 69654 - DNA, 20 bp, synthetic construct
  source 1..20: mol_type = other DNA
caagtaacaatgaaatgcag

SEQ ID NO: 69655 - DNA, 20 bp, synthetic construct
  source 1..20: mol_type = other DNA
acaagtaacaatgaaatgca

SEQ ID NO: 69656 - DNA, 20 bp, synthetic construct
  source 1..20: mol_type = other DNA
aacaagtaacaatgaaatgc

SEQ ID NO: 69657 - DNA, 20 bp, synthetic construct
  source 1..20: mol_type = other DNA
gaacaagtaacaatgaaatg

SEQ ID NO: 69658 - DNA, 20 bp, synthetic construct
  source 1..20: mol_type = other DNA
agaacaagtaacaatgaaat

SEQ ID NO: 69659 - DNA, 20 bp, synthetic construct
  source 1..20: mol_type = other DNA
gagaacaagtaacaatgaaa

SEQ ID NO: 69660 - DNA, 20 bp, synthetic construct
  source 1..20: mol_type = other DNA
tgagaacaagtaacaatgaa

SEQ ID NO: 69661 - DNA, 20 bp, synthetic construct
  source 1..20: mol_type = other DNA
atgagaacaagtaacaatga

SEQ ID NO: 69662 - DNA, 20 bp, synthetic construct
  source 1..20: mol_type = other DNA
aatgagaacaagtaacaatg

SEQ ID NO: 69663 - DNA, 20 bp, synthetic construct
  source 1..20: mol_type = other DNA
aaatgagaacaagtaacaat

SEQ ID NO: 69664 - DNA, 20 bp, synthetic construct
  source 1..20: mol_type = other DNA
caaatgagaacaagtaacaa

SEQ ID NO: 69665 - DNA, 20 bp, synthetic construct
  source 1..20: mol_type = other DNA
tcaaatgagaacaagtaaca

SEQ ID NO: 69666 - DNA, 20 bp, synthetic construct
  source 1..20: mol_type = other DNA
atcaaatgagaacaagtaac

SEQ ID NO: 69667 - DNA, 20 bp, synthetic construct
  source 1..20: mol_type = other DNA
aatcaaatgagaacaagtaa

SEQ ID NO: 69668 - DNA, 20 bp, synthetic construct
  source 1..20: mol_type = other DNA
aaatcaaatgagaacaagta

SEQ ID NO: 69669 - DNA, 20 bp, synthetic construct
  source 1..20: mol_type = other DNA
gaaatcaaatgagaacaagt

SEQ ID NO: 69670 - DNA, 20 bp, synthetic construct
  source 1..20: mol_type = other DNA
ggaaatcaaatgagaacaag

SEQ ID NO: 69671 - DNA, 20 bp, synthetic construct
  source 1..20: mol_type = other DNA
aggaaatcaaatgagaacaa

SEQ ID NO: 69672 - DNA, 20 bp, synthetic construct
  source 1..20: mol_type = other DNA
caggaaatcaaatgagaaca

SEQ ID NO: 69673 - DNA, 20 bp, synthetic construct
  source 1..20: mol_type = other DNA
acaggaaatcaaatgagaac

SEQ ID NO: 69674 - DNA, 20 bp, synthetic construct
  source 1..20: mol_type = other DNA
cacaggaaatcaaatgagaa

SEQ ID NO: 69675 - DNA, 20 bp, synthetic construct
  source 1..20: mol_type = other DNA
acacaggaaatcaaatgaga

SEQ ID NO: 69676 - DNA, 20 bp, synthetic construct
  source 1..20: mol_type = other DNA
tacacaggaaatcaaatgag

SEQ ID NO: 69677 - DNA, 20 bp, synthetic construct
  source 1..20: mol_type = other DNA
atacacaggaaatcaaatga

SEQ ID NO: 69678 - DNA, 20 bp, synthetic construct
  source 1..20: mol_type = other DNA
aatacacaggaaatcaaatg

SEQ ID NO: 69679 - DNA, 20 bp, synthetic construct
  source 1..20: mol_type = other DNA
aaatacacaggaaatcaaat

SEQ ID NO: 69680 - DNA, 20 bp, synthetic construct
  source 1..20: mol_type = other DNA
aaaatacacaggaaatcaaa

SEQ ID NO: 69681 - DNA, 20 bp, synthetic construct
  source 1..20: mol_type = other DNA
taaaatacacaggaaatcaa

SEQ ID NO: 69682 - DNA, 20 bp, synthetic construct
  source 1..20: mol_type = other DNA
gtaaaatacacaggaaatca

SEQ ID NO: 69683 - DNA, 20 bp, synthetic construct
  source 1..20: mol_type = other DNA
cgtaaaatacacaggaaatc

SEQ ID NO: 69684 - DNA, 20 bp, synthetic construct
  source 1..20: mol_type = other DNA
tcgtaaaatacacaggaaat

SEQ ID NO: 69685 - DNA, 20 bp, synthetic construct
  source 1..20: mol_type = other DNA
ttcgtaaaatacacaggaaa

SEQ ID NO: 69686 - DNA, 20 bp, synthetic construct
  source 1..20: mol_type = other DNA
attcgtaaaatacacaggaa

SEQ ID NO: 69687 - DNA, 20 bp, synthetic construct
  source 1..20: mol_type = other DNA
aattcgtaaaatacacagga

SEQ ID NO: 69688 - DNA, 20 bp, synthetic construct
  source 1..20: mol_type = other DNA
aaattcgtaaaatacacagg

SEQ ID NO: 69689 - DNA, 20 bp, synthetic construct
  source 1..20: mol_type = other DNA
taaattcgtaaaatacacag

SEQ ID NO: 69690 - DNA, 20 bp, synthetic construct
  source 1..20: mol_type = other DNA
ttaaattcgtaaaatacaca

SEQ ID NO: 69691 - DNA, 20 bp, synthetic construct
  source 1..20: mol_type = other DNA
cttaaattcgtaaaatacac

SEQ ID NO: 69692 - DNA, 20 bp, synthetic construct
  source 1..20: mol_type = other DNA
acttaaattcgtaaaataca

SEQ ID NO: 69693 - DNA, 20 bp, synthetic construct
  source 1..20: mol_type = other DNA
tacttaaattcgtaaaatac

SEQ ID NO: 69694 - DNA, 20 bp, synthetic construct
  source 1..20: mol_type = other DNA
gtacttaaattcgtaaaata

SEQ ID NO: 69695 - DNA, 20 bp, synthetic construct
  source 1..20: mol_type = other DNA
tgtacttaaattcgtaaaat

SEQ ID NO: 69696 - DNA, 20 bp, synthetic construct
  source 1..20: mol_type = other DNA
atgtacttaaattcgtaaaa

SEQ ID NO: 69697 - DNA, 20 bp, synthetic construct
  source 1..20: mol_type = other DNA
aatgtacttaaattcgtaaa

SEQ ID NO: 69698 - DNA, 20 bp, synthetic construct
  source 1..20: mol_type = other DNA
gaatgtacttaaattcgtaa

SEQ ID NO: 69699 - DNA, 20 bp, synthetic construct
  source 1..20: mol_type = other DNA
agaatgtacttaaattcgta

SEQ ID NO: 69700 - DNA, 20 bp, synthetic construct
  source 1..20: mol_type = other DNA
cagaatgtacttaaattcgt

SEQ ID NO: 69701 - DNA, 20 bp, synthetic construct
  source 1..20: mol_type = other DNA
tcagaatgtacttaaattcg

SEQ ID NO: 69702 - DNA, 20 bp, synthetic construct
  source 1..20: mol_type = other DNA
ttcagaatgtacttaaattc

SEQ ID NO: 69703 - DNA, 20 bp, synthetic construct
  source 1..20: mol_type = other DNA
attcagaatgtacttaaatt

SEQ ID NO: 69704 - DNA, 20 bp, synthetic construct
  source 1..20: mol_type = other DNA
tattcagaatgtacttaaat

SEQ ID NO: 69705 - DNA, 20 bp, synthetic construct
  source 1..20: mol_type = other DNA
gtattcagaatgtacttaaa

SEQ ID NO: 69706 - DNA, 20 bp, synthetic construct
  source 1..20: mol_type = other DNA
cgtattcagaatgtacttaa

SEQ ID NO: 69707 - DNA, 20 bp, synthetic construct
  source 1..20: mol_type = other DNA
ccgtattcagaatgtactta

SEQ ID NO: 69708 - DNA, 20 bp, synthetic construct
  source 1..20: mol_type = other DNA
accgtattcagaatgtactt

SEQ ID NO: 69709 - DNA, 20 bp, synthetic construct
  source 1..20: mol_type = other DNA
aaccgtattcagaatgtact

SEQ ID NO: 69710 - DNA, 20 bp, synthetic construct
  source 1..20: mol_type = other DNA
aaaccgtattcagaatgtac

SEQ ID NO: 69711 - DNA, 20 bp, synthetic construct
  source 1..20: mol_type = other DNA
gaaaccgtattcagaatgta

SEQ ID NO: 69712 - DNA, 20 bp, synthetic construct
  source 1..20: mol_type = other DNA
tgaaaccgtattcagaatgt

SEQ ID NO: 69713 - DNA, 20 bp, synthetic construct
  source 1..20: mol_type = other DNA
atgaaaccgtattcagaatg

SEQ ID NO: 69714 - DNA, 20 bp, synthetic construct
  source 1..20: mol_type = other DNA
tatgaaaccgtattcagaat

SEQ ID NO: 69715 - DNA, 20 bp, synthetic construct
  source 1..20: mol_type = other DNA
ctatgaaaccgtattcagaa

SEQ ID NO: 69716 - DNA, 20 bp, synthetic construct
  source 1..20: mol_type = other DNA
cctatgaaaccgtattcaga

SEQ ID NO: 69717 - DNA, 20 bp, synthetic construct
  source 1..20: mol_type = other DNA
gcctatgaaaccgtattcag

SEQ ID NO: 69718 - DNA, 20 bp, synthetic construct
  source 1..20: mol_type = other DNA
agcctatgaaaccgtattca

SEQ ID NO: 69719 - DNA, 20 bp, synthetic construct
  source 1..20: mol_type = other DNA
aagcctatgaaaccgtattc

SEQ ID NO: 69720 - DNA, 20 bp, synthetic construct
  source 1..20: mol_type = other DNA
gaagcctatgaaaccgtatt

SEQ ID NO: 69721 - DNA, 20 bp, synthetic construct
  source 1..20: mol_type = other DNA
ggaagcctatgaaaccgtat

SEQ ID NO: 69722 - DNA, 20 bp, synthetic construct
  source 1..20: mol_type = other DNA
gggaagcctatgaaaccgta

SEQ ID NO: 69723 - DNA, 20 bp, synthetic construct
  source 1..20: mol_type = other DNA
agggaagcctatgaaaccgt

SEQ ID NO: 69724 - DNA, 20 bp, synthetic construct
  source 1..20: mol_type = other DNA
tagggaagcctatgaaaccg

SEQ ID NO: 69725 - DNA, 20 bp, synthetic construct
  source 1..20: mol_type = other DNA
ttagggaagcctatgaaacc

SEQ ID NO: 69726 - DNA, 20 bp, synthetic construct
  source 1..20: mol_type = other DNA
tttagggaagcctatgaaac

SEQ ID NO: 69727 - DNA, 20 bp, synthetic construct
  source 1..20: mol_type = other DNA
ttttagggaagcctatgaaa

SEQ ID NO: 69728 - DNA, 20 bp, synthetic construct
  source 1..20: mol_type = other DNA
attttagggaagcctatgaa

SEQ ID NO: 69729 - DNA, 20 bp, synthetic construct
  source 1..20: mol_type = other DNA
tattttagggaagcctatga

SEQ ID NO: 69730 - DNA, 20 bp, synthetic construct
  source 1..20: mol_type = other DNA
atattttagggaagcctatg

SEQ ID NO: 69731 - DNA, 20 bp, synthetic construct
  source 1..20: mol_type = other DNA
aatattttagggaagcctat

SEQ ID NO: 69732 - DNA, 20 bp, synthetic construct
  source 1..20: mol_type = other DNA
caatattttagggaagccta

SEQ ID NO: 69733 - DNA, 20 bp, synthetic construct
  source 1..20: mol_type = other DNA
tcaatattttagggaagcct

SEQ ID NO: 69734 - DNA, 20 bp, synthetic construct
  source 1..20: mol_type = other DNA
ttcaatattttagggaagcc

SEQ ID NO: 69735 - DNA, 20 bp, synthetic construct
  source 1..20: mol_type = other DNA
cttcaatattttagggaagc

SEQ ID NO: 69736 - DNA, 20 bp, synthetic construct
  source 1..20: mol_type = other DNA
ccttcaatattttagggaag

SEQ ID NO: 69737 - DNA, 20 bp, synthetic construct
  source 1..20: mol_type = other DNA
cccttcaatattttagggaa

SEQ ID NO: 69738 - DNA, 20 bp, synthetic construct
  source 1..20: mol_type = other DNA
ccccttcaatattttaggga

SEQ ID NO: 69739 - DNA, 20 bp, synthetic construct
  source 1..20: mol_type = other DNA
gccccttcaatattttaggg

SEQ ID NO: 69740 - DNA, 20 bp, synthetic construct
  source 1..20: mol_type = other DNA
ggccccttcaatattttagg

SEQ ID NO: 69741 - DNA, 20 bp, synthetic construct
  source 1..20: mol_type = other DNA
gggccccttcaatattttag

SEQ ID NO: 69742 - DNA, 20 bp, synthetic construct
  source 1..20: mol_type = other DNA
tgggccccttcaatatttta

SEQ ID NO: 69743 - DNA, 20 bp, synthetic construct
  source 1..20: mol_type = other DNA
atgggccccttcaatatttt

SEQ ID NO: 69744 - DNA, 20 bp, synthetic construct
  source 1..20: mol_type = other DNA
catgggccccttcaatattt

SEQ ID NO: 69745 - DNA, 20 bp, synthetic construct
  source 1..20: mol_type = other DNA
ccatgggccccttcaatatt

SEQ ID NO: 69746 - DNA, 20 bp, synthetic construct
  source 1..20: mol_type = other DNA
tccatgggccccttcaatat

SEQ ID NO: 69747 - DNA, 20 bp, synthetic construct
  source 1..20: mol_type = other DNA
atccatgggccccttcaata

SEQ ID NO: 69748 - DNA, 20 bp, synthetic construct
  source 1..20: mol_type = other DNA
aatccatgggccccttcaat

SEQ ID NO: 69749 - DNA, 20 bp, synthetic construct
  source 1..20: mol_type = other DNA
taatccatgggccccttcaa

SEQ ID NO: 69750 - DNA, 20 bp, synthetic construct
  source 1..20: mol_type = other DNA
ttaatccatgggccccttca

SEQ ID NO: 69751 - DNA, 20 bp, synthetic construct
  source 1..20: mol_type = other DNA
cttaatccatgggccccttc

SEQ ID NO: 69752 - DNA, 20 bp, synthetic construct
  source 1..20: mol_type = other DNA
tcttaatccatgggcccctt

SEQ ID NO: 69753 - DNA, 20 bp, synthetic construct
  source 1..20: mol_type = other DNA
ttcttaatccatgggcccct

SEQ ID NO: 69754 - DNA, 20 bp, synthetic construct
  source 1..20: mol_type = other DNA
tttcttaatccatgggcccc

SEQ ID NO: 69755 - DNA, 20 bp, synthetic construct
  source 1..20: mol_type = other DNA
ttttcttaatccatgggccc

SEQ ID NO: 69756 - DNA, 20 bp, synthetic construct
  source 1..20: mol_type = other DNA
tttttcttaatccatgggcc

SEQ ID NO: 69757 - DNA, 20 bp, synthetic construct
  source 1..20: mol_type = other DNA
ctttttcttaatccatgggc

SEQ ID NO: 69758 - DNA, 20 bp, synthetic construct
  source 1..20: mol_type = other DNA
cctttttcttaatccatggg

SEQ ID NO: 69759 - DNA, 20 bp, synthetic construct
  source 1..20: mol_type = other DNA
gcctttttcttaatccatgg

SEQ ID NO: 69760 - DNA, 20 bp, synthetic construct
  source 1..20: mol_type = other DNA
agcctttttcttaatccatg

SEQ ID NO: 69761 - DNA, 20 bp, synthetic construct
  source 1..20: mol_type = other DNA
tagcctttttcttaatccat

SEQ ID NO: 69762 - DNA, 20 bp, synthetic construct
  source 1..20: mol_type = other DNA
ttagcctttttcttaatcca

SEQ ID NO: 69763 - DNA, 20 bp, synthetic construct
  source 1..20: mol_type = other DNA
cttagcctttttcttaatcc

SEQ ID NO: 69764 - DNA, 20 bp, synthetic construct
  source 1..20: mol_type = other DNA
tcttagcctttttcttaatc

SEQ ID NO: 69765 - DNA, 20 bp, synthetic construct
  source 1..20: mol_type = other DNA
ttcttagcctttttcttaat

SEQ ID NO: 69766 - DNA, 20 bp, synthetic construct
  source 1..20: mol_type = other DNA
attcttagcctttttcttaa

SEQ ID NO: 69767 - DNA, 20 bp, synthetic construct
  source 1..20: mol_type = other DNA
gattcttagcctttttctta

SEQ ID NO: 69768 - DNA, 20 bp, synthetic construct
  source 1..20: mol_type = other DNA
ggattcttagcctttttctt

SEQ ID NO: 69769 - DNA, 20 bp, synthetic construct
  source 1..20: mol_type = other DNA
gggattcttagcctttttct

SEQ ID NO: 69770 - DNA, 20 bp, synthetic construct
  source 1..20: mol_type = other DNA
agggattcttagcctttttc

SEQ ID NO: 69771 - DNA, 20 bp, synthetic construct
  source 1..20: mol_type = other DNA
tagggattcttagccttttt

SEQ ID NO: 69772 - DNA, 20 bp, synthetic construct
  source 1..20: mol_type = other DNA
ttagggattcttagcctttt

SEQ ID NO: 69773 - DNA, 20 bp, synthetic construct
  source 1..20: mol_type = other DNA
attagggattcttagccttt

SEQ ID NO: 69774 - DNA, 20 bp, synthetic construct
  source 1..20: mol_type = other DNA
gattagggattcttagcctt

SEQ ID NO: 69775 - DNA, 20 bp, synthetic construct
  source 1..20: mol_type = other DNA
agattagggattcttagcct

SEQ ID NO: 69776 - DNA, 20 bp, synthetic construct
  source 1..20: mol_type = other DNA
tagattagggattcttagcc

SEQ ID NO: 69777 - DNA, 20 bp, synthetic construct
  source 1..20: mol_type = other DNA
ctagattagggattcttagc

SEQ ID NO: 69778 - DNA, 20 bp, synthetic construct
  source 1..20: mol_type = other DNA
tctagattagggattcttag

SEQ ID NO: 69779 - DNA, 20 bp, synthetic construct
  source 1..20: mol_type = other DNA
ctctagattagggattctta

SEQ ID NO: 69780 - DNA, 20 bp, synthetic construct
  source 1..20: mol_type = other DNA
cctctagattagggattctt

SEQ ID NO: 69781 - DNA, 20 bp, synthetic construct
  source 1..20: mol_type = other DNA
gcctctagattagggattct

SEQ ID NO: 69782 - DNA, 20 bp, synthetic construct
  source 1..20: mol_type = other DNA
agcctctagattagggattc

SEQ ID NO: 69783 - DNA, 20 bp, synthetic construct
  source 1..20: mol_type = other DNA
gagcctctagattagggatt

SEQ ID NO: 69784 - DNA, 20 bp, synthetic construct
  source 1..20: mol_type = other DNA
ggagcctctagattagggat

SEQ ID NO: 69785 - DNA, 20 bp, synthetic construct
  source 1..20: mol_type = other DNA
gggagcctctagattaggga

SEQ ID NO: 69786 - DNA, 20 bp, synthetic construct
  source 1..20: mol_type = other DNA
ggggagcctctagattaggg

SEQ ID NO: 69787 - DNA, 20 bp, synthetic construct
  source 1..20: mol_type = other DNA
tggggagcctctagattagg

SEQ ID NO: 69788 - DNA, 20 bp, synthetic construct
  source 1..20: mol_type = other DNA
gtggggagcctctagattag

SEQ ID NO: 69789 - DNA, 20 bp, synthetic construct
  source 1..20: mol_type = other DNA
tgtggggagcctctagatta

SEQ ID NO: 69790 - DNA, 20 bp, synthetic construct
  source 1..20: mol_type = other DNA
ctgtggggagcctctagatt

SEQ ID NO: 69791 - DNA, 20 bp, synthetic construct
  source 1..20: mol_type = other DNA
actgtggggagcctctagat

SEQ ID NO: 69792 - DNA, 20 bp, synthetic construct
  source 1..20: mol_type = other DNA
gactgtggggagcctctaga

SEQ ID NO: 69793 - DNA, 20 bp, synthetic construct
  source 1..20: mol_type = other DNA
ggactgtggggagcctctag

SEQ ID NO: 69794 - DNA, 20 bp, synthetic construct
  source 1..20: mol_type = other DNA
aggactgtggggagcctcta

SEQ ID NO: 69795 - DNA, 20 bp, synthetic construct
  source 1..20: mol_type = other DNA
gaggactgtggggagcctct

SEQ ID NO: 69796 - DNA, 20 bp, synthetic construct
  source 1..20: mol_type = other DNA
agaggactgtggggagcctc

SEQ ID NO: 69797 - DNA, 20 bp, synthetic construct
  source 1..20: mol_type = other DNA
aagaggactgtggggagcct

SEQ ID NO: 69798 - DNA, 20 bp, synthetic construct
  source 1..20: mol_type = other DNA
aaagaggactgtggggagcc

SEQ ID NO: 69799 - DNA, 20 bp, synthetic construct
  source 1..20: mol_type = other DNA
aaaagaggactgtggggagc

SEQ ID NO: 69800 - DNA, 20 bp, synthetic construct
  source 1..20: mol_type = other DNA
caaaagaggactgtggggag

SEQ ID NO: 69801 - DNA, 20 bp, synthetic construct
  source 1..20: mol_type = other DNA
acaaaagaggactgtgggga

SEQ ID NO: 69802 - DNA, 20 bp, synthetic construct
  source 1..20: mol_type = other DNA
gacaaaagaggactgtgggg

SEQ ID NO: 69803 - DNA, 20 bp, synthetic construct
  source 1..20: mol_type = other DNA
tgacaaaagaggactgtggg

SEQ ID NO: 69804 - DNA, 20 bp, synthetic construct
  source 1..20: mol_type = other DNA
atgacaaaagaggactgtgg

SEQ ID NO: 69805 - DNA, 20 bp, synthetic construct
  source 1..20: mol_type = other DNA
gatgacaaaagaggactgtg

SEQ ID NO: 69806 - DNA, 20 bp, synthetic construct
  source 1..20: mol_type = other DNA
tgatgacaaaagaggactgt

SEQ ID NO: 69807 - DNA, 20 bp, synthetic construct
  source 1..20: mol_type = other DNA
atgatgacaaaagaggactg

SEQ ID NO: 69808 - DNA, 20 bp, synthetic construct
  source 1..20: mol_type = other DNA
tatgatgacaaaagaggact

SEQ ID NO: 69809 - DNA, 20 bp, synthetic construct
  source 1..20: mol_type = other DNA
gtatgatgacaaaagaggac

SEQ ID NO: 69810 - DNA, 20 bp, synthetic construct
  source 1..20: mol_type = other DNA
ggtatgatgacaaaagagga

SEQ ID NO: 69811 - DNA, 20 bp, synthetic construct
  source 1..20: mol_type = other DNA
gggtatgatgacaaaagagg

SEQ ID NO: 69812 - DNA, 20 bp, synthetic construct
  source 1..20: mol_type = other DNA
ggggtatgatgacaaaagag

SEQ ID NO: 69813 - DNA, 20 bp, synthetic construct
  source 1..20: mol_type = other DNA
aggggtatgatgacaaaaga

SEQ ID NO: 69814 - DNA, 20 bp, synthetic construct
  source 1..20: mol_type = other DNA
taggggtatgatgacaaaag

SEQ ID NO: 69815 - DNA, 20 bp, synthetic construct
  source 1..20: mol_type = other DNA
gtaggggtatgatgacaaaa

SEQ ID NO: 69816 - DNA, 20 bp, synthetic construct
  source 1..20: mol_type = other DNA
ggtaggggtatgatgacaaa

SEQ ID NO: 69817 - DNA, 20 bp, synthetic construct
  source 1..20: mol_type = other DNA
gggtaggggtatgatgacaa

SEQ ID NO: 69818 - DNA, 20 bp, synthetic construct
  source 1..20: mol_type = other DNA
ggggtaggggtatgatgaca

SEQ ID NO: 69819 - DNA, 20 bp, synthetic construct
  source 1..20: mol_type = other DNA
tggggtaggggtatgatgac

SEQ ID NO: 69820 - DNA, 20 bp, synthetic construct
  source 1..20: mol_type = other DNA
atggggtaggggtatgatga

SEQ ID NO: 69821 - DNA, 20 bp, synthetic construct
  source 1..20: mol_type = other DNA
aatggggtaggggtatgatg

SEQ ID NO: 69822 - DNA, 20 bp, synthetic construct
  source 1..20: mol_type = other DNA
gaatggggtaggggtatgat

SEQ ID NO: 69823 - DNA, 20 bp, synthetic construct
  source 1..20: mol_type = other DNA
agaatggggtaggggtatga

SEQ ID NO: 69824 - DNA, 20 bp, synthetic construct
  source 1..20: mol_type = other DNA
tagaatggggtaggggtatg

SEQ ID NO: 69825 - DNA, 20 bp, synthetic construct
  source 1..20: mol_type = other DNA
ctagaatggggtaggggtat

SEQ ID NO: 69826 - DNA, 20 bp, synthetic construct
  source 1..20: mol_type = other DNA
gctagaatggggtaggggta

SEQ ID NO: 69827 - DNA, 20 bp, synthetic construct
  source 1..20: mol_type = other DNA
ggctagaatggggtaggggt

SEQ ID NO: 69828 - DNA, 20 bp, synthetic construct
  source 1..20: mol_type = other DNA
aggctagaatggggtagggg

SEQ ID NO: 69829 - DNA, 20 bp, synthetic construct
  source 1..20: mol_type = other DNA
caggctagaatggggtaggg

SEQ ID NO: 69830 - DNA, 20 bp, synthetic construct
  source 1..20: mol_type = other DNA
tcaggctagaatggggtagg

SEQ ID NO: 69831 - DNA, 20 bp, synthetic construct
  source 1..20: mol_type = other DNA
ctcaggctagaatggggtag

SEQ ID NO: 69832 - DNA, 20 bp, synthetic construct
  source 1..20: mol_type = other DNA
cctcaggctagaatggggta

SEQ ID NO: 69833 - DNA, 20 bp, synthetic construct
  source 1..20: mol_type = other DNA
tcctcaggctagaatggggt

SEQ ID NO: 69834 - DNA, 20 bp, synthetic construct
  source 1..20: mol_type = other DNA
ctcctcaggctagaatgggg

SEQ ID NO: 69835 - DNA, 20 bp, synthetic construct
  source 1..20: mol_type = other DNA
gctcctcaggctagaatggg

SEQ ID NO: 69836 - DNA, 20 bp, synthetic construct
  source 1..20: mol_type = other DNA
cgctcctcaggctagaatgg

SEQ ID NO: 69837 - DNA, 20 bp, synthetic construct
  source 1..20: mol_type = other DNA
acgctcctcaggctagaatg

SEQ ID NO: 69838 - DNA, 20 bp, synthetic construct
  source 1..20: mol_type = other DNA
cacgctcctcaggctagaat

SEQ ID NO: 69839 - DNA, 20 bp, synthetic construct
  source 1..20: mol_type = other DNA
ccacgctcctcaggctagaa

SEQ ID NO: 69840 - DNA, 20 bp, synthetic construct
  source 1..20: mol_type = other DNA
gccacgctcctcaggctaga

SEQ ID NO: 69841 - DNA, 20 bp, synthetic construct
  source 1..20: mol_type = other DNA
agccacgctcctcaggctag

SEQ ID NO: 69842 - DNA, 20 bp, synthetic construct
  source 1..20: mol_type = other DNA
gagccacgctcctcaggcta

SEQ ID NO: 69843 - DNA, 20 bp, synthetic construct
  source 1..20: mol_type = other DNA
ggagccacgctcctcaggct

SEQ ID NO: 69844 - DNA, 20 bp, synthetic construct
  source 1..20: mol_type = other DNA
tggagccacgctcctcaggc

SEQ ID NO: 69845 - DNA, 20 bp, synthetic construct
  source 1..20: mol_type = other DNA
gtggagccacgctcctcagg

SEQ ID NO: 69846 - DNA, 20 bp, synthetic construct
  source 1..20: mol_type = other DNA
ggtggagccacgctcctcag

SEQ ID NO: 69847 - DNA, 20 bp, synthetic construct
  source 1..20: mol_type = other DNA
aggtggagccacgctcctca

SEQ ID NO: 69848 - DNA, 20 bp, synthetic construct
  source 1..20: mol_type = other DNA
caggtggagccacgctcctc

SEQ ID NO: 69849 - DNA, 20 bp, synthetic construct
  source 1..20: mol_type = other DNA
acaggtggagccacgctcct

SEQ ID NO: 69850 - DNA, 20 bp, synthetic construct
  source 1..20: mol_type = other DNA
cacaggtggagccacgctcc

SEQ ID NO: 69851 - DNA, 20 bp, synthetic construct
  source 1..20: mol_type = other DNA
gcacaggtggagccacgctc

SEQ ID NO: 69852 - DNA, 20 bp, synthetic construct
  source 1..20: mol_type = other DNA
ggcacaggtggagccacgct

SEQ ID NO: 69853 - DNA, 20 bp, synthetic construct
  source 1..20: mol_type = other DNA
gggcacaggtggagccacgc

SEQ ID NO: 69854 - DNA, 20 bp, synthetic construct
  source 1..20: mol_type = other DNA
agggcacaggtggagccacg

SEQ ID NO: 69855 - DNA, 20 bp, synthetic construct
  source 1..20: mol_type = other DNA
aagggcacaggtggagccac

SEQ ID NO: 69856 - DNA, 20 bp, synthetic construct
  source 1..20: mol_type = other DNA
caagggcacaggtggagcca

SEQ ID NO: 69857 - DNA, 20 bp, synthetic construct
  source 1..20: mol_type = other DNA
ccaagggcacaggtggagcc

SEQ ID NO: 69858 - DNA, 20 bp, synthetic construct
  source 1..20: mol_type = other DNA
accaagggcacaggtggagc

SEQ ID NO: 69859 - DNA, 20 bp, synthetic construct
  source 1..20: mol_type = other DNA
aaccaagggcacaggtggag

SEQ ID NO: 69860 - DNA, 20 bp, synthetic construct
  source 1..20: mol_type = other DNA
aaaccaagggcacaggtgga

SEQ ID NO: 69861 - DNA, 20 bp, synthetic construct
  source 1..20: mol_type = other DNA
aaaaccaagggcacaggtgg

SEQ ID NO: 69862 - DNA, 20 bp, synthetic construct
  source 1..20: mol_type = other DNA
caaaaccaagggcacaggtg

SEQ ID NO: 69863 - DNA, 20 bp, synthetic construct
  source 1..20: mol_type = other DNA
acaaaaccaagggcacaggt

SEQ ID NO: 69864 - DNA, 20 bp, synthetic construct
  source 1..20: mol_type = other DNA
aacaaaaccaagggcacagg

SEQ ID NO: 69865 - DNA, 20 bp, synthetic construct
  source 1..20: mol_type = other DNA
caacaaaaccaagggcacag

SEQ ID NO: 69866 - DNA, 20 bp, synthetic construct
  source 1..20: mol_type = other DNA
acaacaaaaccaagggcaca

SEQ ID NO: 69867 - DNA, 20 bp, synthetic construct
  source 1..20: mol_type = other DNA
aacaacaaaaccaagggcac

SEQ ID NO: 69868 - DNA, 20 bp, synthetic construct
  source 1..20: mol_type = other DNA
gaacaacaaaaccaagggca

SEQ ID NO: 69869 - DNA, 20 bp, synthetic construct
  source 1..20: mol_type = other DNA
ggaacaacaaaaccaagggc

SEQ ID NO: 69870 - DNA, 20 bp, synthetic construct
  source 1..20: mol_type = other DNA
tggaacaacaaaaccaaggg

SEQ ID NO: 69871 - DNA, 20 bp, synthetic construct
  source 1..20: mol_type = other DNA
ctggaacaacaaaaccaagg

SEQ ID NO: 69872 - DNA, 20 bp, synthetic construct
  source 1..20: mol_type = other DNA
actggaacaacaaaaccaag

SEQ ID NO: 69873 - DNA, 20 bp, synthetic construct
  source 1..20: mol_type = other DNA
gactggaacaacaaaaccaa

SEQ ID NO: 69874 - DNA, 20 bp, synthetic construct
  source 1..20: mol_type = other DNA
ggactggaacaacaaaacca

SEQ ID NO: 69875 - DNA, 20 bp, synthetic construct
  source 1..20: mol_type = other DNA
tggactggaacaacaaaacc

SEQ ID NO: 69876 - DNA, 20 bp, synthetic construct
  source 1..20: mol_type = other DNA
atggactggaacaacaaaac

SEQ ID NO: 69877 - DNA, 20 bp, synthetic construct
  source 1..20: mol_type = other DNA
tatggactggaacaacaaaa

SEQ ID NO: 69878 - DNA, 20 bp, synthetic construct
  source 1..20: mol_type = other DNA
gtatggactggaacaacaaa

SEQ ID NO: 69879 - DNA, 20 bp, synthetic construct
  source 1..20: mol_type = other DNA
tgtatggactggaacaacaa

SEQ ID NO: 69880 - DNA, 20 bp, synthetic construct
  source 1..20: mol_type = other DNA
atgtatggactggaacaaca

SEQ ID NO: 69881 - DNA, 20 bp, synthetic construct
  source 1..20: mol_type = other DNA
gatgtatggactggaacaac

SEQ ID NO: 69882 - DNA, 20 bp, synthetic construct
  source 1..20: mol_type = other DNA
ggatgtatggactggaacaa

SEQ ID NO: 69883 - DNA, 20 bp, synthetic construct
  source 1..20: mol_type = other DNA
aggatgtatggactggaaca

SEQ ID NO: 69884 - DNA, 20 bp, synthetic construct
  source 1..20: mol_type = other DNA
caggatgtatggactggaac

SEQ ID NO: 69885 - DNA, 20 bp, synthetic construct
  source 1..20: mol_type = other DNA
gcaggatgtatggactggaa

SEQ ID NO: 69886 - DNA, 20 bp, synthetic construct
  source 1..20: mol_type = other DNA
tgcaggatgtatggactgga

SEQ ID NO: 69887 - DNA, 20 bp, synthetic construct
  source 1..20: mol_type = other DNA
gtgcaggatgtatggactgg

SEQ ID NO: 69888 - DNA, 20 bp, synthetic construct
  source 1..20: mol_type = other DNA
ggtgcaggatgtatggactg

SEQ ID NO: 69889 - DNA, 20 bp, synthetic construct
  source 1..20: mol_type = other DNA
gggtgcaggatgtatggact

SEQ ID NO: 69890 - DNA, 20 bp, synthetic construct
  source 1..20: mol_type = other DNA
agggtgcaggatgtatggac

SEQ ID NO: 69891 - DNA, 20 bp, synthetic construct
  source 1..20: mol_type = other DNA
aagggtgcaggatgtatgga

SEQ ID NO: 69892 - DNA, 20 bp, synthetic construct
  source 1..20: mol_type = other DNA
taagggtgcaggatgtatgg

SEQ ID NO: 69893 - DNA, 20 bp, synthetic construct
  source 1..20: mol_type = other DNA
ttaagggtgcaggatgtatg

SEQ ID NO: 69894 - DNA, 20 bp, synthetic construct
  source 1..20: mol_type = other DNA
gttaagggtgcaggatgtat

SEQ ID NO: 69895 - DNA, 20 bp, synthetic construct
  source 1..20: mol_type = other DNA
agttaagggtgcaggatgta

SEQ ID NO: 69896 - DNA, 20 bp, synthetic construct
  source 1..20: mol_type = other DNA
cagttaagggtgcaggatgt

SEQ ID NO: 69897 - DNA, 20 bp, synthetic construct
  source 1..20: mol_type = other DNA
acagttaagggtgcaggatg

SEQ ID NO: 69898 - DNA, 20 bp, synthetic construct
  source 1..20: mol_type = other DNA
cacagttaagggtgcaggat

SEQ ID NO: 69899 - DNA, 20 bp, synthetic construct
  source 1..20: mol_type = other DNA
acacagttaagggtgcagga

SEQ ID NO: 69900 - DNA, 20 bp, synthetic construct
  source 1..20: mol_type = other DNA
aacacagttaagggtgcagg

SEQ ID NO: 69901 - DNA, 20 bp, synthetic construct
  source 1..20: mol_type = other DNA
aaacacagttaagggtgcag

SEQ ID NO: 69902 - DNA, 20 bp, synthetic construct
  source 1..20: mol_type = other DNA
gaaacacagttaagggtgca

SEQ ID NO: 69903 - DNA, 20 bp, synthetic construct
  source 1..20: mol_type = other DNA
agaaacacagttaagggtgc

SEQ ID NO: 69904 - DNA, 20 bp, synthetic construct
  source 1..20: mol_type = other DNA
aagaaacacagttaagggtg

SEQ ID NO: 69905 - DNA, 20 bp, synthetic construct
  source 1..20: mol_type = other DNA
taagaaacacagttaagggt

SEQ ID NO: 69906 - DNA, 20 bp, synthetic construct
  source 1..20: mol_type = other DNA
ataagaaacacagttaaggg

SEQ ID NO: 69907 - DNA, 20 bp, synthetic construct
  source 1..20: mol_type = other DNA
gataagaaacacagttaagg

SEQ ID NO: 69908 - DNA, 20 bp, synthetic construct
  source 1..20: mol_type = other DNA
ggataagaaacacagttaag

SEQ ID NO: 69909 - DNA, 20 bp, synthetic construct
  source 1..20: mol_type = other DNA
gggataagaaacacagttaa

SEQ ID NO: 69910 - DNA, 20 bp, synthetic construct
  source 1..20: mol_type = other DNA
ggggataagaaacacagtta

SEQ ID NO: 69911 - DNA, 20 bp, synthetic construct
  source 1..20: mol_type = other DNA
tggggataagaaacacagtt

SEQ ID NO: 69912 - DNA, 20 bp, synthetic construct
  source 1..20: mol_type = other DNA
ttggggataagaaacacagt

SEQ ID NO: 69913 - DNA, 20 bp, synthetic construct
  source 1..20: mol_type = other DNA
gttggggataagaaacacag

SEQ ID NO: 69914 - DNA, 20 bp, synthetic construct
  source 1..20: mol_type = other DNA
agttggggataagaaacaca

SEQ ID NO: 69915 - DNA, 20 bp, synthetic construct
  source 1..20: mol_type = other DNA
aagttggggataagaaacac

SEQ ID NO: 69916 - DNA, 20 bp, synthetic construct
  source 1..20: mol_type = other DNA
caagttggggataagaaaca

SEQ ID NO: 69917 - DNA, 20 bp, synthetic construct
  source 1..20: mol_type = other DNA
acaagttggggataagaaac

SEQ ID NO: 69918 - DNA, 20 bp, synthetic construct
  source 1..20: mol_type = other DNA
aacaagttggggataagaaa

SEQ ID NO: 69919 - DNA, 20 bp, synthetic construct
  source 1..20: mol_type = other DNA
aaacaagttggggataagaa

SEQ ID NO: 69920 - DNA, 20 bp, synthetic construct
  source 1..20: mol_type = other DNA
gaaacaagttggggataaga

SEQ ID NO: 69921 - DNA, 20 bp, synthetic construct
  source 1..20: mol_type = other DNA
agaaacaagttggggataag

SEQ ID NO: 69922 - DNA, 20 bp, synthetic construct
  source 1..20: mol_type = other DNA
aagaaacaagttggggataa

SEQ ID NO: 69923 - DNA, 20 bp, synthetic construct
  source 1..20: mol_type = other DNA
aaagaaacaagttggggata

SEQ ID NO: 69924 - DNA, 20 bp, synthetic construct
  source 1..20: mol_type = other DNA
caaagaaacaagttggggat

SEQ ID NO: 69925 - DNA, 20 bp, synthetic construct
  source 1..20: mol_type = other DNA
acaaagaaacaagttgggga

SEQ ID NO: 69926 - DNA, 20 bp, synthetic construct
  source 1..20: mol_type = other DNA
cacaaagaaacaagttgggg

SEQ ID NO: 69927 - DNA, 20 bp, synthetic construct
  source 1..20: mol_type = other DNA
acacaaagaaacaagttggg

SEQ ID NO: 69928 - DNA, 20 bp, synthetic construct
  source 1..20: mol_type = other DNA
aacacaaagaaacaagttgg

SEQ ID NO: 69929 - DNA, 20 bp, synthetic construct
  source 1..20: mol_type = other DNA
taacacaaagaaacaagttg

SEQ ID NO: 69930 - DNA, 20 bp, synthetic construct
  source 1..20: mol_type = other DNA
ataacacaaagaaacaagtt

SEQ ID NO: 69931 - DNA, 20 bp, synthetic construct
  source 1..20: mol_type = other DNA
aataacacaaagaaacaagt

SEQ ID NO: 69932 - DNA, 20 bp, synthetic construct
  source 1..20: mol_type = other DNA
gaataacacaaagaaacaag

SEQ ID NO: 69933 - DNA, 20 bp, synthetic construct
  source 1..20: mol_type = other DNA
agaataacacaaagaaacaa

SEQ ID NO: 69934 - DNA, 20 bp, synthetic construct
  source 1..20: mol_type = other DNA
aagaataacacaaagaaaca

SEQ ID NO: 69935 - DNA, 20 bp, synthetic construct
  source 1..20: mol_type = other DNA
gaagaataacacaaagaaac

SEQ ID NO: 69936 - DNA, 20 bp, synthetic construct
  source 1..20: mol_type = other DNA
tgaagaataacacaaagaaa

SEQ ID NO: 69937 - DNA, 20 bp, synthetic construct
  source 1..20: mol_type = other DNA
ctgaagaataacacaaagaa

SEQ ID NO: 69938 - DNA, 20 bp, synthetic construct
  source 1..20: mol_type = other DNA
actgaagaataacacaaaga

SEQ ID NO: 69939 - DNA, 20 bp, synthetic construct
  source 1..20: mol_type = other DNA
tactgaagaataacacaaag

SEQ ID NO: 69940 - DNA, 20 bp, synthetic construct
  source 1..20: mol_type = other DNA
atactgaagaataacacaaa

SEQ ID NO: 69941 - DNA, 20 bp, synthetic construct
  source 1..20: mol_type = other DNA
aatactgaagaataacacaa

SEQ ID NO: 69942 - DNA, 20 bp, synthetic construct
  source 1..20: mol_type = other DNA
taatactgaagaataacaca

SEQ ID NO: 69943 - DNA, 20 bp, synthetic construct
  source 1..20: mol_type = other DNA
ataatactgaagaataacac

SEQ ID NO: 69944 - DNA, 20 bp, synthetic construct
  source 1..20: mol_type = other DNA
tataatactgaagaataaca

SEQ ID NO: 69945 - DNA, 20 bp, synthetic construct
  source 1..20: mol_type = other DNA
ctataatactgaagaataac

SEQ ID NO: 69946 - DNA, 20 bp, synthetic construct
  source 1..20: mol_type = other DNA
actataatactgaagaataa

SEQ ID NO: 69947 - DNA, 20 bp, synthetic construct
  source 1..20: mol_type = other DNA
gactataatactgaagaata

SEQ ID NO: 69948 - DNA, 20 bp, synthetic construct
  source 1..20: mol_type = other DNA
agactataatactgaagaat

SEQ ID NO: 69949 - DNA, 20 bp, synthetic construct
  source 1..20: mol_type = other DNA
aagactataatactgaagaa

SEQ ID NO: 69950 - DNA, 20 bp, synthetic construct
  source 1..20: mol_type = other DNA
aaagactataatactgaaga

SEQ ID NO: 69951 - DNA, 20 bp, synthetic construct
  source 1..20: mol_type = other DNA
taaagactataatactgaag

SEQ ID NO: 69952 - DNA, 20 bp, synthetic construct
  source 1..20: mol_type = other DNA
ttaaagactataatactgaa

SEQ ID NO: 69953 - DNA, 20 bp, synthetic construct
  source 1..20: mol_type = other DNA
attaaagactataatactga

SEQ ID NO: 69954 - DNA, 20 bp, synthetic construct
  source 1..20: mol_type = other DNA
tattaaagactataatactg

SEQ ID NO: 69955 - DNA, 20 bp, synthetic construct
  source 1..20: mol_type = other DNA
atattaaagactataatact

SEQ ID NO: 69956 - DNA, 20 bp, synthetic construct
  source 1..20: mol_type = other DNA
tatattaaagactataatac

SEQ ID NO: 69957 - DNA, 20 bp, synthetic construct
  source 1..20: mol_type = other DNA
ttatattaaagactataata

SEQ ID NO: 69958 - DNA, 20 bp, synthetic construct
  source 1..20: mol_type = other DNA
attatattaaagactataat

SEQ ID NO: 69959 - DNA, 20 bp, synthetic construct
  source 1..20: mol_type = other DNA
gattatattaaagactataa

SEQ ID NO: 69960 - DNA, 20 bp, synthetic construct
  source 1..20: mol_type = other DNA
agattatattaaagactata

SEQ ID NO: 69961 - DNA, 20 bp, synthetic construct
  source 1..20: mol_type = other DNA
cagattatattaaagactat

SEQ ID NO: 69962 - DNA, 20 bp, synthetic construct
  source 1..20: mol_type = other DNA
acagattatattaaagacta

SEQ ID NO: 69963 - DNA, 20 bp, synthetic construct
  source 1..20: mol_type = other DNA
tacagattatattaaagact

SEQ ID NO: 69964 - DNA, 20 bp, synthetic construct
  source 1..20: mol_type = other DNA
atacagattatattaaagac

SEQ ID NO: 69965 - DNA, 20 bp, synthetic construct
  source 1..20: mol_type = other DNA
tatacagattatattaaaga

SEQ ID NO: 69966 - DNA, 20 bp, synthetic construct
  source 1..20: mol_type = other DNA
ttatacagattatattaaag

SEQ ID NO: 69967 - DNA, 20 bp, synthetic construct
  source 1..20: mol_type = other DNA
attatacagattatattaaa

SEQ ID NO: 69968 - DNA, 20 bp, synthetic construct
  source 1..20: mol_type = other DNA
tattatacagattatattaa

SEQ ID NO: 69969 - DNA, 20 bp, synthetic construct
  source 1..20: mol_type = other DNA
gtattatacagattatatta

SEQ ID NO: 69970 - DNA, 20 bp, synthetic construct
  source 1..20: mol_type = other DNA
tgtattatacagattatatt

SEQ ID NO: 69971 - DNA, 20 bp, synthetic construct
  source 1..20: mol_type = other DNA
atgtattatacagattatat

SEQ ID NO: 69972 - DNA, 20 bp, synthetic construct
  source 1..20: mol_type = other DNA
catgtattatacagattata

SEQ ID NO: 69973 - DNA, 20 bp, synthetic construct
  source 1..20: mol_type = other DNA
ccatgtattatacagattat

SEQ ID NO: 69974 - DNA, 20 bp, synthetic construct
  source 1..20: mol_type = other DNA
accatgtattatacagatta

SEQ ID NO: 69975 - DNA, 20 bp, synthetic construct
  source 1..20: mol_type = other DNA
caccatgtattatacagatt

SEQ ID NO: 69976 - DNA, 20 bp, synthetic construct
  source 1..20: mol_type = other DNA
acaccatgtattatacagat

SEQ ID NO: 69977 - DNA, 20 bp, synthetic construct
  source 1..20: mol_type = other DNA
tacaccatgtattatacaga

SEQ ID NO: 69978 - DNA, 20 bp, synthetic construct
  source 1..20: mol_type = other DNA
ctacaccatgtattatacag

SEQ ID NO: 69979 - DNA, 20 bp, synthetic construct
  source 1..20: mol_type = other DNA
actacaccatgtattataca

SEQ ID NO: 69980 - DNA, 20 bp, synthetic construct
  source 1..20: mol_type = other DNA
tactacaccatgtattatac

SEQ ID NO: 69981 - DNA, 20 bp, synthetic construct
  source 1..20: mol_type = other DNA
ctactacaccatgtattata

SEQ ID NO: 69982 - DNA, 20 bp, synthetic construct
  source 1..20: mol_type = other DNA
actactacaccatgtattat

SEQ ID NO: 69983 - DNA, 20 bp, synthetic construct
  source 1..20: mol_type = other DNA
tactactacaccatgtatta

SEQ ID NO: 69984 - DNA, 20 bp, synthetic construct
  source 1..20: mol_type = other DNA
atactactacaccatgtatt

SEQ ID NO: 69985 - DNA, 20 bp, synthetic construct
  source 1..20: mol_type = other DNA
tatactactacaccatgtat

SEQ ID NO: 69986 - DNA, 20 bp, synthetic construct
  source 1..20: mol_type = other DNA
atatactactacaccatgta

SEQ ID NO: 69987 - DNA, 20 bp, synthetic construct
  source 1..20: mol_type = other DNA
catatactactacaccatgt

SEQ ID NO: 69988 - DNA, 20 bp, synthetic construct
  source 1..20: mol_type = other DNA
gcatatactactacaccatg

SEQ ID NO: 69989 - DNA, 20 bp, synthetic construct
  source 1..20: mol_type = other DNA
agcatatactactacaccat

SEQ ID NO: 69990 - DNA, 20 bp, synthetic construct
  source 1..20: mol_type = other DNA
gagcatatactactacacca

SEQ ID NO: 69991 - DNA, 20 bp, synthetic construct
  source 1..20: mol_type = other DNA
cgagcatatactactacacc

SEQ ID NO: 69992 - DNA, 20 bp, synthetic construct
  source 1..20: mol_type = other DNA
acgagcatatactactacac

SEQ ID NO: 69993 - DNA, 20 bp, synthetic construct
  source 1..20: mol_type = other DNA
tacgagcatatactactaca

SEQ ID NO: 69994 - DNA, 20 bp, synthetic construct
  source 1..20: mol_type = other DNA
ctacgagcatatactactac

SEQ ID NO: 69995 - DNA, 20 bp, synthetic construct
  source 1..20: mol_type = other DNA
actacgagcatatactacta

SEQ ID NO: 69996 - DNA, 20 bp, synthetic construct
  source 1..20: mol_type = other DNA
tactacgagcatatactact

SEQ ID NO: 69997 - DNA, 20 bp, synthetic construct
  source 1..20: mol_type = other DNA
atactacgagcatatactac

SEQ ID NO: 69998 - DNA, 20 bp, synthetic construct
  source 1..20: mol_type = other DNA
tatactacgagcatatacta

SEQ ID NO: 69999 - DNA, 20 bp, synthetic construct
  source 1..20: mol_type = other DNA
gtatactacgagcatatact

SEQ ID NO: 70000 - DNA, 20 bp, synthetic construct
  source 1..20: mol_type = other DNA
tgtatactacgagcatatac

SEQ ID NO: 70001 - DNA, 20 bp, synthetic construct
  source 1..20: mol_type = other DNA
ttgtatactacgagcatata

SEQ ID NO: 70002 - DNA, 20 bp, synthetic construct
  source 1..20: mol_type = other DNA
attgtatactacgagcatat

SEQ ID NO: 70003 - DNA, 20 bp, synthetic construct
  source 1..20: mol_type = other DNA
aattgtatactacgagcata

SEQ ID NO: 70004 - DNA, 20 bp, synthetic construct
  source 1..20: mol_type = other DNA
gaattgtatactacgagcat

SEQ ID NO: 70005 - DNA, 20 bp, synthetic construct
  source 1..20: mol_type = other DNA
tgaattgtatactacgagca

SEQ ID NO: 70006 - DNA, 20 bp, synthetic construct
  source 1..20: mol_type = other DNA
ctgaattgtatactacgagc

SEQ ID NO: 70007 - DNA, 20 bp, synthetic construct
  source 1..20: mol_type = other DNA
actgaattgtatactacgag

SEQ ID NO: 70008 - DNA, 20 bp, synthetic construct
  source 1..20: mol_type = other DNA
aactgaattgtatactacga

SEQ ID NO: 70009 - DNA, 20 bp, synthetic construct
  source 1..20: mol_type = other DNA
taactgaattgtatactacg

SEQ ID NO: 70010 - DNA, 20 bp, synthetic construct
  source 1..20: mol_type = other DNA
ctaactgaattgtatactac

SEQ ID NO: 70011 - DNA, 20 bp, synthetic construct
  source 1..20: mol_type = other DNA
tctaactgaattgtatacta

SEQ ID NO: 70012 - DNA, 20 bp, synthetic construct
  source 1..20: mol_type = other DNA
ttctaactgaattgtatact

SEQ ID NO: 70013 - DNA, 20 bp, synthetic construct
  source 1..20: mol_type = other DNA
gttctaactgaattgtatac

SEQ ID NO: 70014 - DNA, 20 bp, synthetic construct
  source 1..20: mol_type = other DNA
tgttctaactgaattgtata

SEQ ID NO: 70015 - DNA, 20 bp, synthetic construct
  source 1..20: mol_type = other DNA
ctgttctaactgaattgtat

SEQ ID NO: 70016 - DNA, 20 bp, synthetic construct
  source 1..20: mol_type = other DNA
tctgttctaactgaattgta

SEQ ID NO: 70017 - DNA, 20 bp, synthetic construct
  source 1..20: mol_type = other DNA
atctgttctaactgaattgt

SEQ ID NO: 70018 - DNA, 20 bp, synthetic construct
  source 1..20: mol_type = other DNA
catctgttctaactgaattg

SEQ ID NO: 70019 - DNA, 20 bp, synthetic construct
  source 1..20: mol_type = other DNA
tcatctgttctaactgaatt

SEQ ID NO: 70020 - DNA, 20 bp, synthetic construct
  source 1..20: mol_type = other DNA
ctcatctgttctaactgaat

SEQ ID NO: 70021 - DNA, 20 bp, synthetic construct
  source 1..20: mol_type = other DNA
actcatctgttctaactgaa

SEQ ID NO: 70022 - DNA, 20 bp, synthetic construct
  source 1..20: mol_type = other DNA
tactcatctgttctaactga

SEQ ID NO: 70023 - DNA, 20 bp, synthetic construct
  source 1..20: mol_type = other DNA
atactcatctgttctaactg

SEQ ID NO: 70024 - DNA, 20 bp, synthetic construct
  source 1..20: mol_type = other DNA
aatactcatctgttctaact

SEQ ID NO: 70025 - DNA, 20 bp, synthetic construct
  source 1..20: mol_type = other DNA
gaatactcatctgttctaac

SEQ ID NO: 70026 - DNA, 20 bp, synthetic construct
  source 1..20: mol_type = other DNA
tgaatactcatctgttctaa

SEQ ID NO: 70027 - DNA, 20 bp, synthetic construct
  source 1..20: mol_type = other DNA
ttgaatactcatctgttcta

SEQ ID NO: 70028 - DNA, 20 bp, synthetic construct
  source 1..20: mol_type = other DNA
attgaatactcatctgttct

SEQ ID NO: 70029 - DNA, 20 bp, synthetic construct
  source 1..20: mol_type = other DNA
cattgaatactcatctgttc

SEQ ID NO: 70030 - DNA, 20 bp, synthetic construct
  source 1..20: mol_type = other DNA
tcattgaatactcatctgtt

SEQ ID NO: 70031 - DNA, 20 bp, synthetic construct
  source 1..20: mol_type = other DNA
ttcattgaatactcatctgt

SEQ ID NO: 70032 - DNA, 20 bp, synthetic construct
  source 1..20: mol_type = other DNA
tttcattgaatactcatctg

SEQ ID NO: 70033 - DNA, 20 bp, synthetic construct
  source 1..20: mol_type = other DNA
ttttcattgaatactcatct

SEQ ID NO: 70034 - DNA, 20 bp, synthetic construct
  source 1..20: mol_type = other DNA
cttttcattgaatactcatc

SEQ ID NO: 70035 - DNA, 20 bp, synthetic construct
  source 1..20: mol_type = other DNA
tcttttcattgaatactcat

SEQ ID NO: 70036 - DNA, 20 bp, synthetic construct
  source 1..20: mol_type = other DNA
atcttttcattgaatactca

SEQ ID NO: 70037 - DNA, 20 bp, synthetic construct
  source 1..20: mol_type = other DNA
tatcttttcattgaatactc

SEQ ID NO: 70038 - DNA, 20 bp, synthetic construct
  source 1..20: mol_type = other DNA
ttatcttttcattgaatact

SEQ ID NO: 70039 - DNA, 20 bp, synthetic construct
  source 1..20: mol_type = other DNA
attatcttttcattgaatac

SEQ ID NO: 70040 - DNA, 20 bp, synthetic construct
  source 1..20: mol_type = other DNA
gattatcttttcattgaata

SEQ ID NO: 70041 - DNA, 20 bp, synthetic construct
  source 1..20: mol_type = other DNA
agattatcttttcattgaat

SEQ ID NO: 70042 - DNA, 20 bp, synthetic construct
  source 1..20: mol_type = other DNA
gagattatcttttcattgaa

SEQ ID NO: 70043 - DNA, 20 bp, synthetic construct
  source 1..20: mol_type = other DNA
ggagattatcttttcattga

SEQ ID NO: 70044 - DNA, 20 bp, synthetic construct
  source 1..20: mol_type = other DNA
aggagattatcttttcattg

SEQ ID NO: 70045 - DNA, 20 bp, synthetic construct
  source 1..20: mol_type = other DNA
gaggagattatcttttcatt

SEQ ID NO: 70046 - DNA, 20 bp, synthetic construct
  source 1..20: mol_type = other DNA
agaggagattatcttttcat

SEQ ID NO: 70047 - DNA, 20 bp, synthetic construct
  source 1..20: mol_type = other DNA
gagaggagattatcttttca

SEQ ID NO: 70048 - DNA, 20 bp, synthetic construct
  source 1..20: mol_type = other DNA
agagaggagattatcttttc

SEQ ID NO: 70049 - DNA, 20 bp, synthetic construct
  source 1..20: mol_type = other DNA
tagagaggagattatctttt

SEQ ID NO: 70050 - DNA, 20 bp, synthetic construct
  source 1..20: mol_type = other DNA
ttagagaggagattatcttt

SEQ ID NO: 70051 - DNA, 20 bp, synthetic construct
  source 1..20: mol_type = other DNA
gttagagaggagattatctt

SEQ ID NO: 70052 - DNA, 20 bp, synthetic construct
  source 1..20: mol_type = other DNA
ggttagagaggagattatct

SEQ ID NO: 70053 - DNA, 20 bp, synthetic construct
  source 1..20: mol_type = other DNA
gggttagagaggagattatc

SEQ ID NO: 70054 - DNA, 20 bp, synthetic construct
  source 1..20: mol_type = other DNA
ggggttagagaggagattat

SEQ ID NO: 70055 - DNA, 20 bp, synthetic construct
  source 1..20: mol_type = other DNA
gggggttagagaggagatta

SEQ ID NO: 70056 - DNA, 20 bp, synthetic construct
  source 1..20: mol_type = other DNA
tgggggttagagaggagatt

SEQ ID NO: 70057 - DNA, 20 bp, synthetic construct
  source 1..20: mol_type = other DNA
ctgggggttagagaggagat

SEQ ID NO: 70058 - DNA, 20 bp, synthetic construct
  source 1..20: mol_type = other DNA
actgggggttagagaggaga

SEQ ID NO: 70059 - DNA, 20 bp, synthetic construct
  source 1..20: mol_type = other DNA
gactgggggttagagaggag

SEQ ID NO: 70060 - DNA, 20 bp, synthetic construct
  source 1..20: mol_type = other DNA
ggactgggggttagagagga

SEQ ID NO: 70061 - DNA, 20 bp, synthetic construct
  source 1..20: mol_type = other DNA
gggactgggggttagagagg

SEQ ID NO: 70062 - DNA, 20 bp, synthetic construct
  source 1..20: mol_type = other DNA
tgggactgggggttagagag

SEQ ID NO: 70063 - DNA, 20 bp, synthetic construct
  source 1..20: mol_type = other DNA
gtgggactgggggttagaga

SEQ ID NO: 70064 - DNA, 20 bp, synthetic construct
  source 1..20: mol_type = other DNA
agtgggactgggggttagag

SEQ ID NO: 70065 - DNA, 20 bp, synthetic construct
  source 1..20: mol_type = other DNA
aagtgggactgggggttaga

SEQ ID NO: 70066 - DNA, 20 bp, synthetic construct
  source 1..20: mol_type = other DNA
gaagtgggactgggggttag

SEQ ID NO: 70067 - DNA, 20 bp, synthetic construct
  source 1..20: mol_type = other DNA
ggaagtgggactgggggtta

SEQ ID NO: 70068 - DNA, 20 bp, synthetic construct
  source 1..20: mol_type = other DNA
gggaagtgggactgggggtt

SEQ ID NO: 70069 - DNA, 20 bp, synthetic construct
  source 1..20: mol_type = other DNA
agggaagtgggactgggggt

SEQ ID NO: 70070 - DNA, 20 bp, synthetic construct
  source 1..20: mol_type = other DNA
cagggaagtgggactggggg

SEQ ID NO: 70071 - DNA, 20 bp, synthetic construct
  source 1..20: mol_type = other DNA
ccagggaagtgggactgggg

SEQ ID NO: 70072 - DNA, 20 bp, synthetic construct
  source 1..20: mol_type = other DNA
cccagggaagtgggactggg

SEQ ID NO: 70073 - DNA, 20 bp, synthetic construct
  source 1..20: mol_type = other DNA
ccccagggaagtgggactgg

SEQ ID NO: 70074 - DNA, 20 bp, synthetic construct
  source 1..20: mol_type = other DNA
tccccagggaagtgggactg

SEQ ID NO: 70075 - DNA, 20 bp, synthetic construct
  source 1..20: mol_type = other DNA
ttccccagggaagtgggact

SEQ ID NO: 70076 - DNA, 20 bp, synthetic construct
  source 1..20: mol_type = other DNA
cttccccagggaagtgggac

SEQ ID NO: 70077 - DNA, 20 bp, synthetic construct
  source 1..20: mol_type = other DNA
gcttccccagggaagtggga

SEQ ID NO: 70078 - DNA, 20 bp, synthetic construct
  source 1..20: mol_type = other DNA
ggcttccccagggaagtggg

SEQ ID NO: 70079 - DNA, 20 bp, synthetic construct
  source 1..20: mol_type = other DNA
aggcttccccagggaagtgg

SEQ ID NO: 70080 - DNA, 20 bp, synthetic construct
  source 1..20: mol_type = other DNA
caggcttccccagggaagtg

SEQ ID NO: 70081 - DNA, 20 bp, synthetic construct
  source 1..20: mol_type = other DNA
acaggcttccccagggaagt

SEQ ID NO: 70082 - DNA, 20 bp, synthetic construct
  source 1..20: mol_type = other DNA
cacaggcttccccagggaag

SEQ ID NO: 70083 - DNA, 20 bp, synthetic construct
  source 1..20: mol_type = other DNA
acacaggcttccccagggaa

SEQ ID NO: 70084 - DNA, 20 bp, synthetic construct
  source 1..20: mol_type = other DNA
aacacaggcttccccaggga

SEQ ID NO: 70085 - DNA, 20 bp, synthetic construct
  source 1..20: mol_type = other DNA
gaacacaggcttccccaggg

SEQ ID NO: 70086 - DNA, 20 bp, synthetic construct
  source 1..20: mol_type = other DNA
agaacacaggcttccccagg

SEQ ID NO: 70087 - DNA, 20 bp, synthetic construct
  source 1..20: mol_type = other DNA
aagaacacaggcttccccag

SEQ ID NO: 70088 - DNA, 20 bp, synthetic construct
  source 1..20: mol_type = other DNA
caagaacacaggcttcccca

SEQ ID NO: 70089 - DNA, 20 bp, synthetic construct
  source 1..20: mol_type = other DNA
acaagaacacaggcttcccc

SEQ ID NO: 70090 - DNA, 20 bp, synthetic construct
  source 1..20: mol_type = other DNA
cacaagaacacaggcttccc

SEQ ID NO: 70091 - DNA, 20 bp, synthetic construct
  source 1..20: mol_type = other DNA
acacaagaacacaggcttcc

SEQ ID NO: 70092 - DNA, 20 bp, synthetic construct
  source 1..20: mol_type = other DNA
tacacaagaacacaggcttc

SEQ ID NO: 70093 - DNA, 20 bp, synthetic construct
  source 1..20: mol_type = other DNA
gtacacaagaacacaggctt

SEQ ID NO: 70094 - DNA, 20 bp, synthetic construct
  source 1..20: mol_type = other DNA
tgtacacaagaacacaggct

SEQ ID NO: 70095 - DNA, 20 bp, synthetic construct
  source 1..20: mol_type = other DNA
ttgtacacaagaacacaggc

SEQ ID NO: 70096 - DNA, 20 bp, synthetic construct
  source 1..20: mol_type = other DNA
attgtacacaagaacacagg

SEQ ID NO: 70097 - DNA, 20 bp, synthetic construct
  source 1..20: mol_type = other DNA
aattgtacacaagaacacag

SEQ ID NO: 70098 - DNA, 20 bp, synthetic construct
  source 1..20: mol_type = other DNA
gaattgtacacaagaacaca

SEQ ID NO: 70099 - DNA, 20 bp, synthetic construct
  source 1..20: mol_type = other DNA
tgaattgtacacaagaacac

SEQ ID NO: 70100 - DNA, 20 bp, synthetic construct
  source 1..20: mol_type = other DNA
ctgaattgtacacaagaaca

SEQ ID NO: 70101 - DNA, 20 bp, synthetic construct
  source 1..20: mol_type = other DNA
tctgaattgtacacaagaac

SEQ ID NO: 70102 - DNA, 20 bp, synthetic construct
  source 1..20: mol_type = other DNA
ttctgaattgtacacaagaa

SEQ ID NO: 70103 - DNA, 20 bp, synthetic construct
  source 1..20: mol_type = other DNA
tttctgaattgtacacaaga

SEQ ID NO: 70104 - DNA, 20 bp, synthetic construct
  source 1..20: mol_type = other DNA
ttttctgaattgtacacaag

SEQ ID NO: 70105 - DNA, 20 bp, synthetic construct
  source 1..20: mol_type = other DNA
attttctgaattgtacacaa

SEQ ID NO: 70106 - DNA, 20 bp, synthetic construct
  source 1..20: mol_type = other DNA
cattttctgaattgtacaca

SEQ ID NO: 70107 - DNA, 20 bp, synthetic construct
  source 1..20: mol_type = other DNA
acattttctgaattgtacac

SEQ ID NO: 70108 - DNA, 20 bp, synthetic construct
  source 1..20: mol_type = other DNA
aacattttctgaattgtaca

SEQ ID NO: 70109 - DNA, 20 bp, synthetic construct
  source 1..20: mol_type = other DNA
aaacattttctgaattgtac

SEQ ID NO: 70110 - DNA, 20 bp, synthetic construct
  source 1..20: mol_type = other DNA
taaacattttctgaattgta

SEQ ID NO: 70111 - DNA, 20 bp, synthetic construct
  source 1..20: mol_type = other DNA
ataaacattttctgaattgt

SEQ ID NO: 70112 - DNA, 20 bp, synthetic construct
  source 1..20: mol_type = other DNA
tataaacattttctgaattg

SEQ ID NO: 70113 - DNA, 20 bp, synthetic construct
  source 1..20: mol_type = other DNA
gtataaacattttctgaatt

SEQ ID NO: 70114 - DNA, 20 bp, synthetic construct
  source 1..20: mol_type = other DNA
tgtataaacattttctgaat

SEQ ID NO: 70115 - DNA, 20 bp, synthetic construct
  source 1..20: mol_type = other DNA
gtgtataaacattttctgaa

SEQ ID NO: 70116 - DNA, 20 bp, synthetic construct
  source 1..20: mol_type = other DNA
tgtgtataaacattttctga

SEQ ID NO: 70117 - DNA, 20 bp, synthetic construct
  source 1..20: mol_type = other DNA
atgtgtataaacattttctg

SEQ ID NO: 70118 - DNA, 20 bp, synthetic construct
  source 1..20: mol_type = other DNA
tatgtgtataaacattttct

SEQ ID NO: 70119 - DNA, 20 bp, synthetic construct
  source 1..20: mol_type = other DNA
atatgtgtataaacattttc

SEQ ID NO: 70120 - DNA, 20 bp, synthetic construct
  source 1..20: mol_type = other DNA
aatatgtgtataaacatttt

SEQ ID NO: 70121 - DNA, 20 bp, synthetic construct
  source 1..20: mol_type = other DNA
aaatatgtgtataaacattt

SEQ ID NO: 70122 - DNA, 20 bp, synthetic construct
  source 1..20: mol_type = other DNA
aaaatatgtgtataaacatt

SEQ ID NO: 70123 - DNA, 20 bp, synthetic construct
  source 1..20: mol_type = other DNA
aaaaatatgtgtataaacat

SEQ ID NO: 70124 - DNA, 20 bp, synthetic construct
  source 1..20: mol_type = other DNA
aaaaaatatgtgtataaaca

SEQ ID NO: 70125 - DNA, 20 bp, synthetic construct
  source 1..20: mol_type = other DNA
taaaaaatatgtgtataaac

SEQ ID NO: 70126 - DNA, 20 bp, synthetic construct
  source 1..20: mol_type = other DNA
ataaaaaatatgtgtataaa

SEQ ID NO: 70127 - DNA, 20 bp, synthetic construct
  source 1..20: mol_type = other DNA
aataaaaaatatgtgtataa

SEQ ID NO: 70128 - DNA, 20 bp, synthetic construct
  source 1..20: mol_type = other DNA
aaataaaaaatatgtgtata

SEQ ID NO: 70129 - DNA, 20 bp, synthetic construct
  source 1..20: mol_type = other DNA
taaataaaaaatatgtgtat

SEQ ID NO: 70130 - DNA, 20 bp, synthetic construct
  source 1..20: mol_type = other DNA
ataaataaaaaatatgtgta

SEQ ID NO: 70131 - DNA, 20 bp, synthetic construct
  source 1..20: mol_type = other DNA
aataaataaaaaatatgtgt

SEQ ID NO: 70132 - DNA, 20 bp, synthetic construct
  source 1..20: mol_type = other DNA
aaataaataaaaaatatgtg

SEQ ID NO: 70133 - DNA, 20 bp, synthetic construct
  source 1..20: mol_type = other DNA
taaataaataaaaaatatgt

SEQ ID NO: 70134 - DNA, 20 bp, synthetic construct
  source 1..20: mol_type = other DNA
ataaataaataaaaaatatg

SEQ ID NO: 70135 - DNA, 20 bp, synthetic construct
  source 1..20: mol_type = other DNA
aataaataaataaaaaatat

SEQ ID NO: 70136 - DNA, 20 bp, synthetic construct
  source 1..20: mol_type = other DNA
aaataaataaataaaaaata

SEQ ID NO: 70137 - DNA, 20 bp, synthetic construct
  source 1..20: mol_type = other DNA
aaaataaataaataaaaaat

SEQ ID NO: 70138 - DNA, 20 bp, synthetic construct
  source 1..20: mol_type = other DNA
aaaaataaataaataaaaaa

SEQ ID NO: 70139 - DNA, 20 bp, synthetic construct
  source 1..20: mol_type = other DNA
aaaaaataaataaataaaaa

SEQ ID NO: 70140 - DNA, 20 bp, synthetic construct
  source 1..20: mol_type = other DNA
caaaaaataaataaataaaa

SEQ ID NO: 70141 - DNA, 20 bp, synthetic construct
  source 1..20: mol_type = other DNA
tcaaaaaataaataaataaa

SEQ ID NO: 70142 - DNA, 20 bp, synthetic construct
  source 1..20: mol_type = other DNA
ctcaaaaaataaataaataa

SEQ ID NO: 70143 - DNA, 20 bp, synthetic construct
  source 1..20: mol_type = other DNA
tctcaaaaaataaataaata

SEQ ID NO: 70144 - DNA, 20 bp, synthetic construct
  source 1..20: mol_type = other DNA
gtctcaaaaaataaataaat

SEQ ID NO: 70145 - DNA, 20 bp, synthetic construct
  source 1..20: mol_type = other DNA
cgtctcaaaaaataaataaa

SEQ ID NO: 70146 - DNA, 20 bp, synthetic construct
  source 1..20: mol_type = other DNA
ccgtctcaaaaaataaataa

SEQ ID NO: 70147 - DNA, 20 bp, synthetic construct
  source 1..20: mol_type = other DNA
tccgtctcaaaaaataaata

SEQ ID NO: 70148 - DNA, 20 bp, synthetic construct
  source 1..20: mol_type = other DNA
ctccgtctcaaaaaataaat

SEQ ID NO: 70149 - DNA, 20 bp, synthetic construct
  source 1..20: mol_type = other DNA
actccgtctcaaaaaataaa

SEQ ID NO: 70150 - DNA, 20 bp, synthetic construct
  source 1..20: mol_type = other DNA
gactccgtctcaaaaaataa

SEQ ID NO: 70151 - DNA, 20 bp, synthetic construct
  source 1..20: mol_type = other DNA
agactccgtctcaaaaaata

SEQ ID NO: 70152 - DNA, 20 bp, synthetic construct
  source 1..20: mol_type = other DNA
gagactccgtctcaaaaaat

SEQ ID NO: 70153 - DNA, 20 bp, synthetic construct
  source 1..20: mol_type = other DNA
cgagactccgtctcaaaaaa

SEQ ID NO: 70154 - DNA, 20 bp, synthetic construct
  source 1..20: mol_type = other DNA
gcgagactccgtctcaaaaa

SEQ ID NO: 70155 - DNA, 20 bp, synthetic construct
  source 1..20: mol_type = other DNA
agcgagactccgtctcaaaa

SEQ ID NO: 70156 - DNA, 20 bp, synthetic construct
  source 1..20: mol_type = other DNA
gagcgagactccgtctcaaa

SEQ ID NO: 70157 - DNA, 20 bp, synthetic construct
  source 1..20: mol_type = other DNA
agagcgagactccgtctcaa

SEQ ID NO: 70158 - DNA, 20 bp, synthetic construct
  source 1..20: mol_type = other DNA
gagagcgagactccgtctca

SEQ ID NO: 70159 - DNA, 20 bp, synthetic construct
  source 1..20: mol_type = other DNA
cgagagcgagactccgtctc

SEQ ID NO: 70160 - DNA, 20 bp, synthetic construct
  source 1..20: mol_type = other DNA
gcgagagcgagactccgtct

SEQ ID NO: 70161 - DNA, 20 bp, synthetic construct
  source 1..20: mol_type = other DNA
ggcgagagcgagactccgtc

SEQ ID NO: 70162 - DNA, 20 bp, synthetic construct
  source 1..20: mol_type = other DNA
tggcgagagcgagactccgt

SEQ ID NO: 70163 - DNA, 20 bp, synthetic construct
  source 1..20: mol_type = other DNA
ctggcgagagcgagactccg

SEQ ID NO: 70164 - DNA, 20 bp, synthetic construct
  source 1..20: mol_type = other DNA
cctggcgagagcgagactcc

SEQ ID NO: 70165 - DNA, 20 bp, synthetic construct
  source 1..20: mol_type = other DNA
acctggcgagagcgagactc

SEQ ID NO: 70166 - DNA, 20 bp, synthetic construct
  source 1..20: mol_type = other DNA
aacctggcgagagcgagact

SEQ ID NO: 70167 - DNA, 20 bp, synthetic construct
  source 1..20: mol_type = other DNA
caacctggcgagagcgagac

SEQ ID NO: 70168 - DNA, 20 bp, synthetic construct
  source 1..20: mol_type = other DNA
ccaacctggcgagagcgaga

SEQ ID NO: 70169 - DNA, 20 bp, synthetic construct
  source 1..20: mol_type = other DNA
tccaacctggcgagagcgag

SEQ ID NO: 70170 - DNA, 20 bp, synthetic construct
  source 1..20: mol_type = other DNA
ctccaacctggcgagagcga

SEQ ID NO: 70171 - DNA, 20 bp, synthetic construct
  source 1..20: mol_type = other DNA
actccaacctggcgagagcg

SEQ ID NO: 70172 - DNA, 20 bp, synthetic construct
  source 1..20: mol_type = other DNA
cactccaacctggcgagagc

SEQ ID NO: 70173 - DNA, 20 bp, synthetic construct
  source 1..20: mol_type = other DNA
gcactccaacctggcgagag

SEQ ID NO: 70174 - DNA, 20 bp, synthetic construct
  source 1..20: mol_type = other DNA
tgcactccaacctggcgaga

SEQ ID NO: 70175 - DNA, 20 bp, synthetic construct
  source 1..20: mol_type = other DNA
ctgcactccaacctggcgag

SEQ ID NO: 70176 - DNA, 20 bp, synthetic construct
  source 1..20: mol_type = other DNA
actgcactccaacctggcga

SEQ ID NO: 70177 - DNA, 20 bp, synthetic construct
  source 1..20: mol_type = other DNA
cactgcactccaacctggcg

SEQ ID NO: 70178 - DNA, 20 bp, synthetic construct
  source 1..20: mol_type = other DNA
ccactgcactccaacctggc

SEQ ID NO: 70179 - DNA, 20 bp, synthetic construct
  source 1..20: mol_type = other DNA
gccactgcactccaacctgg

SEQ ID NO: 70180 - DNA, 20 bp, synthetic construct
  source 1..20: mol_type = other DNA
cgccactgcactccaacctg

SEQ ID NO: 70181 - DNA, 20 bp, synthetic construct
  source 1..20: mol_type = other DNA
gcgccactgcactccaacct

SEQ ID NO: 70182 - DNA, 20 bp, synthetic construct
  source 1..20: mol_type = other DNA
tgcgccactgcactccaacc

SEQ ID NO: 70183 - DNA, 20 bp, synthetic construct
  source 1..20: mol_type = other DNA
ttgcgccactgcactccaac

SEQ ID NO: 70184 - DNA, 20 bp, synthetic construct
  source 1..20: mol_type = other DNA
attgcgccactgcactccaa

SEQ ID NO: 70185 - DNA, 20 bp, synthetic construct
  source 1..20: mol_type = other DNA
gattgcgccactgcactcca

SEQ ID NO: 70186 - DNA, 20 bp, synthetic construct
  source 1..20: mol_type = other DNA
agattgcgccactgcactcc

SEQ ID NO: 70187 - DNA, 20 bp, synthetic construct
  source 1..20: mol_type = other DNA
aagattgcgccactgcactc

SEQ ID NO: 70188 - DNA, 20 bp, synthetic construct
  source 1..20: mol_type = other DNA
caagattgcgccactgcact

SEQ ID NO: 70189 - DNA, 20 bp, synthetic construct
  source 1..20: mol_type = other DNA
ccaagattgcgccactgcac

SEQ ID NO: 70190 - DNA, 20 bp, synthetic construct
  source 1..20: mol_type = other DNA
gccaagattgcgccactgca

SEQ ID NO: 70191 - DNA, 20 bp, synthetic construct
  source 1..20: mol_type = other DNA
agccaagattgcgccactgc

SEQ ID NO: 70192 - DNA, 20 bp, synthetic construct
  source 1..20: mol_type = other DNA
gagccaagattgcgccactg

SEQ ID NO: 70193 - DNA, 20 bp, synthetic construct
  source 1..20: mol_type = other DNA
tgagccaagattgcgccact

SEQ ID NO: 70194 - DNA, 20 bp, synthetic construct
  source 1..20: mol_type = other DNA
gtgagccaagattgcgccac

SEQ ID NO: 70195 - DNA, 20 bp, synthetic construct
  source 1..20: mol_type = other DNA
agtgagccaagattgcgcca

SEQ ID NO: 70196 - DNA, 20 bp, synthetic construct
  source 1..20: mol_type = other DNA
tagtgagccaagattgcgcc

SEQ ID NO: 70197 - DNA, 20 bp, synthetic construct
  source 1..20: mol_type = other DNA
gtagtgagccaagattgcgc

SEQ ID NO: 70198 - DNA, 20 bp, synthetic construct
  source 1..20: mol_type = other DNA
tgtagtgagccaagattgcg

SEQ ID NO: 70199 - DNA, 20 bp, synthetic construct
  source 1..20: mol_type = other DNA
ttgtagtgagccaagattgc

SEQ ID NO: 70200 - DNA, 20 bp, synthetic construct
  source 1..20: mol_type = other DNA
gttgtagtgagccaagattg

SEQ ID NO: 70201 - DNA, 20 bp, synthetic construct
  source 1..20: mol_type = other DNA
ggttgtagtgagccaagatt

SEQ ID NO: 70202 - DNA, 20 bp, synthetic construct
  source 1..20: mol_type = other DNA
aggttgtagtgagccaagat

SEQ ID NO: 70203 - DNA, 20 bp, synthetic construct
  source 1..20: mol_type = other DNA
gaggttgtagtgagccaaga

SEQ ID NO: 70204 - DNA, 20 bp, synthetic construct
  source 1..20: mol_type = other DNA
ggaggttgtagtgagccaag

SEQ ID NO: 70205 - DNA, 20 bp, synthetic construct
  source 1..20: mol_type = other DNA
cggaggttgtagtgagccaa

SEQ ID NO: 70206 - DNA, 20 bp, synthetic construct
  source 1..20: mol_type = other DNA
gcggaggttgtagtgagcca

SEQ ID NO: 70207 - DNA, 20 bp, synthetic construct
  source 1..20: mol_type = other DNA
ggcggaggttgtagtgagcc

SEQ ID NO: 70208 - DNA, 20 bp, synthetic construct
  source 1..20: mol_type = other DNA
aggcggaggttgtagtgagc

SEQ ID NO: 70209 - DNA, 20 bp, synthetic construct
  source 1..20: mol_type = other DNA
gaggcggaggttgtagtgag

SEQ ID NO: 70210 - DNA, 20 bp, synthetic construct
  source 1..20: mol_type = other DNA
ggaggcggaggttgtagtga

SEQ ID NO: 70211 - DNA, 20 bp, synthetic construct
  source 1..20: mol_type = other DNA
gggaggcggaggttgtagtg

SEQ ID NO: 70212 - DNA, 20 bp, synthetic construct
  source 1..20: mol_type = other DNA
agggaggcggaggttgtagt

SEQ ID NO: 70213 - DNA, 20 bp, synthetic construct
  source 1..20: mol_type = other DNA
tagggaggcggaggttgtag

SEQ ID NO: 70214 - DNA, 20 bp, synthetic construct
  source 1..20: mol_type = other DNA
ctagggaggcggaggttgta

SEQ ID NO: 70215 - DNA, 20 bp, synthetic construct
  source 1..20: mol_type = other DNA
actagggaggcggaggttgt

SEQ ID NO: 70216 - DNA, 20 bp, synthetic construct
  source 1..20: mol_type = other DNA
tactagggaggcggaggttg

SEQ ID NO: 70217 - DNA, 20 bp, synthetic construct
  source 1..20: mol_type = other DNA
ctactagggaggcggaggtt

SEQ ID NO: 70218 - DNA, 20 bp, synthetic construct
  source 1..20: mol_type = other DNA
actactagggaggcggaggt

SEQ ID NO: 70219 - DNA, 20 bp, synthetic construct
  source 1..20: mol_type = other DNA
aactactagggaggcggagg

SEQ ID NO: 70220 - DNA, 20 bp, synthetic construct
  source 1..20: mol_type = other DNA
gaactactagggaggcggag

SEQ ID NO: 70221 - DNA, 20 bp, synthetic construct
  source 1..20: mol_type = other DNA
tgaactactagggaggcgga

SEQ ID NO: 70222 - DNA, 20 bp, synthetic construct
  source 1..20: mol_type = other DNA
ttgaactactagggaggcgg

SEQ ID NO: 70223 - DNA, 20 bp, synthetic construct
  source 1..20: mol_type = other DNA
cttgaactactagggaggcg

SEQ ID NO: 70224 - DNA, 20 bp, synthetic construct
  source 1..20: mol_type = other DNA
gcttgaactactagggaggc

SEQ ID NO: 70225 - DNA, 20 bp, synthetic construct
  source 1..20: mol_type = other DNA
tgcttgaactactagggagg

SEQ ID NO: 70226 - DNA, 20 bp, synthetic construct
  source 1..20: mol_type = other DNA
ttgcttgaactactagggag

SEQ ID NO: 70227 - DNA, 20 bp, synthetic construct
  source 1..20: mol_type = other DNA
attgcttgaactactaggga

SEQ ID NO: 70228 - DNA, 20 bp, synthetic construct
  source 1..20: mol_type = other DNA
aattgcttgaactactaggg

SEQ ID NO: 70229 - DNA, 20 bp, synthetic construct
  source 1..20: mol_type = other DNA
gaattgcttgaactactagg

SEQ ID NO: 70230 - DNA, 20 bp, synthetic construct
  source 1..20: mol_type = other DNA
tgaattgcttgaactactag

SEQ ID NO: 70231 - DNA, 20 bp, synthetic construct
  source 1..20: mol_type = other DNA
ttgaattgcttgaactacta

SEQ ID NO: 70232 - DNA, 20 bp, synthetic construct
  source 1..20: mol_type = other DNA
cttgaattgcttgaactact

SEQ ID NO: 70233 - DNA, 20 bp, synthetic construct
  source 1..20: mol_type = other DNA
ccttgaattgcttgaactac

SEQ ID NO: 70234 - DNA, 20 bp, synthetic construct
  source 1..20: mol_type = other DNA
accttgaattgcttgaacta

SEQ ID NO: 70235 - DNA, 20 bp, synthetic construct
  source 1..20: mol_type = other DNA
aaccttgaattgcttgaact

SEQ ID NO: 70236 - DNA, 20 bp, synthetic construct
  source 1..20: mol_type = other DNA
gaaccttgaattgcttgaac

SEQ ID NO: 70237 - DNA, 20 bp, synthetic construct
  source 1..20: mol_type = other DNA
tgaaccttgaattgcttgaa

SEQ ID NO: 70238 - DNA, 20 bp, synthetic construct
  source 1..20: mol_type = other DNA
ttgaaccttgaattgcttga

SEQ ID NO: 70239 - DNA, 20 bp, synthetic construct
  source 1..20: mol_type = other DNA
cttgaaccttgaattgcttg

SEQ ID NO: 70240 - DNA, 20 bp, synthetic construct
  source 1..20: mol_type = other DNA
gcttgaaccttgaattgctt

SEQ ID NO: 70241 - DNA, 20 bp, synthetic construct
  source 1..20: mol_type = other DNA
tgcttgaaccttgaattgct

SEQ ID NO: 70242 - DNA, 20 bp, synthetic construct
  source 1..20: mol_type = other DNA
ttgcttgaaccttgaattgc

SEQ ID NO: 70243 - DNA, 20 bp, synthetic construct
  source 1..20: mol_type = other DNA
attgcttgaaccttgaattg

SEQ ID NO: 70244 - DNA, 20 bp, synthetic construct
  source 1..20: mol_type = other DNA
aattgcttgaaccttgaatt

SEQ ID NO: 70245 - DNA, 20 bp, synthetic construct
  source 1..20: mol_type = other DNA
gaattgcttgaaccttgaat

SEQ ID NO: 70246 - DNA, 20 bp, synthetic construct
  source 1..20: mol_type = other DNA
cgaattgcttgaaccttgaa

SEQ ID NO: 70247 - DNA, 20 bp, synthetic construct
  source 1..20: mol_type = other DNA
gcgaattgcttgaaccttga

SEQ ID NO: 70248 - DNA, 20 bp, synthetic construct
  source 1..20: mol_type = other DNA
ggcgaattgcttgaaccttg

SEQ ID NO: 70249 - DNA, 20 bp, synthetic construct
  source 1..20: mol_type = other DNA
aggcgaattgcttgaacctt

SEQ ID NO: 70250 - DNA, 20 bp, synthetic construct
  source 1..20: mol_type = other DNA
caggcgaattgcttgaacct

SEQ ID NO: 70251 - DNA, 20 bp, synthetic construct
  source 1..20: mol_type = other DNA
gcaggcgaattgcttgaacc

SEQ ID NO: 70252 - DNA, 20 bp, synthetic construct
  source 1..20: mol_type = other DNA
ggcaggcgaattgcttgaac

SEQ ID NO: 70253 - DNA, 20 bp, synthetic construct
  source 1..20: mol_type = other DNA
aggcaggcgaattgcttgaa

SEQ ID NO: 70254 - DNA, 20 bp, synthetic construct
  source 1..20: mol_type = other DNA
gaggcaggcgaattgcttga

SEQ ID NO: 70255 - DNA, 20 bp, synthetic construct
  source 1..20: mol_type = other DNA
tgaggcaggcgaattgcttg

SEQ ID NO: 70256 - DNA, 20 bp, synthetic construct
  source 1..20: mol_type = other DNA
ctgaggcaggcgaattgctt

SEQ ID NO: 70257 - DNA, 20 bp, synthetic construct
  source 1..20: mol_type = other DNA
gctgaggcaggcgaattgct

SEQ ID NO: 70258 - DNA, 20 bp, synthetic construct
  source 1..20: mol_type = other DNA
ggctgaggcaggcgaattgc

SEQ ID NO: 70259 - DNA, 20 bp, synthetic construct
  source 1..20: mol_type = other DNA
aggctgaggcaggcgaattg

SEQ ID NO: 70260 - DNA, 20 bp, synthetic construct
  source 1..20: mol_type = other DNA
gaggctgaggcaggcgaatt

SEQ ID NO: 70261 - DNA, 20 bp, synthetic construct
  source 1..20: mol_type = other DNA
ggaggctgaggcaggcgaat

SEQ ID NO: 70262 - DNA, 20 bp, synthetic construct
  source 1..20: mol_type = other DNA
gggaggctgaggcaggcgaa

SEQ ID NO: 70263 - DNA, 20 bp, synthetic construct
  source 1..20: mol_type = other DNA
cgggaggctgaggcaggcga

SEQ ID NO: 70264 - DNA, 20 bp, synthetic construct
  source 1..20: mol_type = other DNA
tcgggaggctgaggcaggcg

SEQ ID NO: 70265 - DNA, 20 bp, synthetic construct
  source 1..20: mol_type = other DNA
ctcgggaggctgaggcaggc

SEQ ID NO: 70266 - DNA, 20 bp, synthetic construct
  source 1..20: mol_type = other DNA
actcgggaggctgaggcagg

SEQ ID NO: 70267 - DNA, 20 bp, synthetic construct
  source 1..20: mol_type = other DNA
tactcgggaggctgaggcag

SEQ ID NO: 70268 - DNA, 20 bp, synthetic construct
  source 1..20: mol_type = other DNA
ctactcgggaggctgaggca

SEQ ID NO: 70269 - DNA, 20 bp, synthetic construct
  source 1..20: mol_type = other DNA
gctactcgggaggctgaggc

SEQ ID NO: 70270 - DNA, 20 bp, synthetic construct
  source 1..20: mol_type = other DNA
agctactcgggaggctgagg

SEQ ID NO: 70271 - DNA, 20 bp, synthetic construct
  source 1..20: mol_type = other DNA
cagctactcgggaggctgag

SEQ ID NO: 70272 - DNA, 20 bp, synthetic construct
  source 1..20: mol_type = other DNA
ccagctactcgggaggctga

SEQ ID NO: 70273 - DNA, 20 bp, synthetic construct
  source 1..20: mol_type = other DNA
cccagctactcgggaggctg

SEQ ID NO: 70274 - DNA, 20 bp, synthetic construct
  source 1..20: mol_type = other DNA
tcccagctactcgggaggct

SEQ ID NO: 70275 - DNA, 20 bp, synthetic construct
  source 1..20: mol_type = other DNA
gtcccagctactcgggaggc

SEQ ID NO: 70276 - DNA, 20 bp, synthetic construct
  source 1..20: mol_type = other DNA
agtcccagctactcgggagg

SEQ ID NO: 70277 - DNA, 20 bp, synthetic construct
  source 1..20: mol_type = other DNA
tagtcccagctactcgggag

SEQ ID NO: 70278 - DNA, 20 bp, synthetic construct
  source 1..20: mol_type = other DNA
atagtcccagctactcggga

SEQ ID NO: 70279 - DNA, 20 bp, synthetic construct
  source 1..20: mol_type = other DNA
tatagtcccagctactcggg

SEQ ID NO: 70280 - DNA, 20 bp, synthetic construct
  source 1..20: mol_type = other DNA
ctatagtcccagctactcgg

SEQ ID NO: 70281 - DNA, 20 bp, synthetic construct
  source 1..20: mol_type = other DNA
cctatagtcccagctactcg

SEQ ID NO: 70282 - DNA, 20 bp, synthetic construct
  source 1..20: mol_type = other DNA
gcctatagtcccagctactc

SEQ ID NO: 70283 - DNA, 20 bp, synthetic construct
  source 1..20: mol_type = other DNA
cgcctatagtcccagctact

SEQ ID NO: 70284 - DNA, 20 bp, synthetic construct
  source 1..20: mol_type = other DNA
acgcctatagtcccagctac

SEQ ID NO: 70285 - DNA, 20 bp, synthetic construct
  source 1..20: mol_type = other DNA
cacgcctatagtcccagcta

SEQ ID NO: 70286 - DNA, 20 bp, synthetic construct
  source 1..20: mol_type = other DNA
acacgcctatagtcccagct

SEQ ID NO: 70287 - DNA, 20 bp, synthetic construct
  source 1..20: mol_type = other DNA
tacacgcctatagtcccagc

SEQ ID NO: 70288 - DNA, 20 bp, synthetic construct
  source 1..20: mol_type = other DNA
gtacacgcctatagtcccag

SEQ ID NO: 70289 - DNA, 20 bp, synthetic construct
  source 1..20: mol_type = other DNA
ggtacacgcctatagtccca

SEQ ID NO: 70290 - DNA, 20 bp, synthetic construct
  source 1..20: mol_type = other DNA
tggtacacgcctatagtccc

SEQ ID NO: 70291 - DNA, 20 bp, synthetic construct
  source 1..20: mol_type = other DNA
gtggtacacgcctatagtcc

SEQ ID NO: 70292 - DNA, 20 bp, synthetic construct
  source 1..20: mol_type = other DNA
ggtggtacacgcctatagtc

SEQ ID NO: 70293 - DNA, 20 bp, synthetic construct
  source 1..20: mol_type = other DNA
tggtggtacacgcctatagt

SEQ ID NO: 70294 - DNA, 20 bp, synthetic construct
  source 1..20: mol_type = other DNA
gtggtggtacacgcctatag

SEQ ID NO: 70295 - DNA, 20 bp, synthetic construct
  source 1..20: mol_type = other DNA
cgtggtggtacacgcctata

SEQ ID NO: 70296 - DNA, 20 bp, synthetic construct
  source 1..20: mol_type = other DNA
gcgtggtggtacacgcctat

SEQ ID NO: 70297 - DNA, 20 bp, synthetic construct
  source 1..20: mol_type = other DNA
ggcgtggtggtacacgccta

SEQ ID NO: 70298 - DNA, 20 bp, synthetic construct
  source 1..20: mol_type = other DNA
aggcgtggtggtacacgcct

SEQ ID NO: 70299 - DNA, 20 bp, synthetic construct
  source 1..20: mol_type = other DNA
taggcgtggtggtacacgcc

SEQ ID NO: 70300 - DNA, 20 bp, synthetic construct
  source 1..20: mol_type = other DNA
gtaggcgtggtggtacacgc

SEQ ID NO: 70301 - DNA, 20 bp, synthetic construct
  source 1..20: mol_type = other DNA
ggtaggcgtggtggtacacg

SEQ ID NO: 70302 - DNA, 20 bp, synthetic construct
  source 1..20: mol_type = other DNA
aggtaggcgtggtggtacac

SEQ ID NO: 70303 - DNA, 20 bp, synthetic construct
  source 1..20: mol_type = other DNA
taggtaggcgtggtggtaca

SEQ ID NO: 70304 - DNA, 20 bp, synthetic construct
  source 1..20: mol_type = other DNA
ttaggtaggcgtggtggtac

SEQ ID NO: 70305 - DNA, 20 bp, synthetic construct
  source 1..20: mol_type = other DNA
attaggtaggcgtggtggta

SEQ ID NO: 70306 - DNA, 20 bp, synthetic construct
  source 1..20: mol_type = other DNA
aattaggtaggcgtggtggt

SEQ ID NO: 70307 - DNA, 20 bp, synthetic construct
  source 1..20: mol_type = other DNA
aaattaggtaggcgtggtgg

SEQ ID NO: 70308 - DNA, 20 bp, synthetic construct
  source 1..20: mol_type = other DNA
aaaattaggtaggcgtggtg

SEQ ID NO: 70309 - DNA, 20 bp, synthetic construct
  source 1..20: mol_type = other DNA
aaaaattaggtaggcgtggt

SEQ ID NO: 70310 - DNA, 20 bp, synthetic construct
  source 1..20: mol_type = other DNA
caaaaattaggtaggcgtgg

SEQ ID NO: 70311 - DNA, 20 bp, synthetic construct
  source 1..20: mol_type = other DNA
acaaaaattaggtaggcgtg

SEQ ID NO: 70312 - DNA, 20 bp, synthetic construct
  source 1..20: mol_type = other DNA
tacaaaaattaggtaggcgt

SEQ ID NO: 70313 - DNA, 20 bp, synthetic construct
  source 1..20: mol_type = other DNA
atacaaaaattaggtaggcg

SEQ ID NO: 70314 - DNA, 20 bp, synthetic construct
  source 1..20: mol_type = other DNA
aatacaaaaattaggtaggc

SEQ ID NO: 70315 - DNA, 20 bp, synthetic construct
  source 1..20: mol_type = other DNA
aaatacaaaaattaggtagg

SEQ ID NO: 70316 - DNA, 20 bp, synthetic construct
  source 1..20: mol_type = other DNA
aaaatacaaaaattaggtag

SEQ ID NO: 70317 - DNA, 20 bp, synthetic construct
  source 1..20: mol_type = other DNA
aaaaatacaaaaattaggta

SEQ ID NO: 70318 - DNA, 20 bp, synthetic construct
  source 1..20: mol_type = other DNA
taaaaatacaaaaattaggt

SEQ ID NO: 70319 - DNA, 20 bp, synthetic construct
  source 1..20: mol_type = other DNA
ctaaaaatacaaaaattagg

SEQ ID NO: 70320 - DNA, 20 bp, synthetic construct
  source 1..20: mol_type = other DNA
actaaaaatacaaaaattag

SEQ ID NO: 70321 - DNA, 20 bp, synthetic construct
  source 1..20: mol_type = other DNA
tactaaaaatacaaaaatta

SEQ ID NO: 70322 - DNA, 20 bp, synthetic construct
  source 1..20: mol_type = other DNA
ctactaaaaatacaaaaatt

SEQ ID NO: 70323 - DNA, 20 bp, synthetic construct
  source 1..20: mol_type = other DNA
tctactaaaaatacaaaaat

SEQ ID NO: 70324 - DNA, 20 bp, synthetic construct
  source 1..20: mol_type = other DNA
ctctactaaaaatacaaaaa

SEQ ID NO: 70325 - DNA, 20 bp, synthetic construct
  source 1..20: mol_type = other DNA
tctctactaaaaatacaaaa

SEQ ID NO: 70326 - DNA, 20 bp, synthetic construct
  source 1..20: mol_type = other DNA
gtctctactaaaaatacaaa

SEQ ID NO: 70327 - DNA, 20 bp, synthetic construct
  source 1..20: mol_type = other DNA
tgtctctactaaaaatacaa

SEQ ID NO: 70328 - DNA, 20 bp, synthetic construct
  source 1..20: mol_type = other DNA
ctgtctctactaaaaataca

SEQ ID NO: 70329 - DNA, 20 bp, synthetic construct
  source 1..20: mol_type = other DNA
cctgtctctactaaaaatac

SEQ ID NO: 70330 - DNA, 20 bp, synthetic construct
  source 1..20: mol_type = other DNA
ccctgtctctactaaaaata

SEQ ID NO: 70331 - DNA, 20 bp, synthetic construct
  source 1..20: mol_type = other DNA
accctgtctctactaaaaat

SEQ ID NO: 70332 - DNA, 20 bp, synthetic construct
  source 1..20: mol_type = other DNA
aaccctgtctctactaaaaa

SEQ ID NO: 70333 - DNA, 20 bp, synthetic construct
  source 1..20: mol_type = other DNA
aaaccctgtctctactaaaa

SEQ ID NO: 70334 - DNA, 20 bp, synthetic construct
  source 1..20: mol_type = other DNA
gaaaccctgtctctactaaa

SEQ ID NO: 70335 - DNA, 20 bp, synthetic construct
  source 1..20: mol_type = other DNA
tgaaaccctgtctctactaa

SEQ ID NO: 70336 - DNA, 20 bp, synthetic construct
  source 1..20: mol_type = other DNA
gtgaaaccctgtctctacta

SEQ ID NO: 70337 - DNA, 20 bp, synthetic construct
  source 1..20: mol_type = other DNA
ggtgaaaccctgtctctact

SEQ ID NO: 70338 - DNA, 20 bp, synthetic construct
  source 1..20: mol_type = other DNA
tggtgaaaccctgtctctac

SEQ ID NO: 70339 - DNA, 20 bp, synthetic construct
  source 1..20: mol_type = other DNA
atggtgaaaccctgtctcta

SEQ ID NO: 70340 - DNA, 20 bp, synthetic construct
  source 1..20: mol_type = other DNA
catggtgaaaccctgtctct

SEQ ID NO: 70341 - DNA, 20 bp, synthetic construct
  source 1..20: mol_type = other DNA
acatggtgaaaccctgtctc

SEQ ID NO: 70342 - DNA, 20 bp, synthetic construct
  source 1..20: mol_type = other DNA
aacatggtgaaaccctgtct

SEQ ID NO: 70343 - DNA, 20 bp, synthetic construct
  source 1..20: mol_type = other DNA
caacatggtgaaaccctgtc

SEQ ID NO: 70344 - DNA, 20 bp, synthetic construct
  source 1..20: mol_type = other DNA
ccaacatggtgaaaccctgt

SEQ ID NO: 70345 - DNA, 20 bp, synthetic construct
  source 1..20: mol_type = other DNA
gccaacatggtgaaaccctg

SEQ ID NO: 70346 - DNA, 20 bp, synthetic construct
  source 1..20: mol_type = other DNA
ggccaacatggtgaaaccct

SEQ ID NO: 70347 - DNA, 20 bp, synthetic construct
  source 1..20: mol_type = other DNA
tggccaacatggtgaaaccc

SEQ ID NO: 70348 - DNA, 20 bp, synthetic construct
  source 1..20: mol_type = other DNA
ctggccaacatggtgaaacc

SEQ ID NO: 70349 - DNA, 20 bp, synthetic construct
  source 1..20: mol_type = other DNA
cctggccaacatggtgaaac

SEQ ID NO: 70350 - DNA, 20 bp, synthetic construct
  source 1..20: mol_type = other DNA
tcctggccaacatggtgaaa

SEQ ID NO: 70351 - DNA, 20 bp, synthetic construct
  source 1..20: mol_type = other DNA
atcctggccaacatggtgaa

SEQ ID NO: 70352 - DNA, 20 bp, synthetic construct
  source 1..20: mol_type = other DNA
catcctggccaacatggtga

SEQ ID NO: 70353 - DNA, 20 bp, synthetic construct
  source 1..20: mol_type = other DNA
ccatcctggccaacatggtg

SEQ ID NO: 70354 - DNA, 20 bp, synthetic construct
  source 1..20: mol_type = other DNA
accatcctggccaacatggt

SEQ ID NO: 70355 - DNA, 20 bp, synthetic construct
  source 1..20: mol_type = other DNA
gaccatcctggccaacatgg

SEQ ID NO: 70356 - DNA, 20 bp, synthetic construct
  source 1..20: mol_type = other DNA
agaccatcctggccaacatg

SEQ ID NO: 70357 - DNA, 20 bp, synthetic construct
  source 1..20: mol_type = other DNA
gagaccatcctggccaacat

SEQ ID NO: 70358 - DNA, 20 bp, synthetic construct
  source 1..20: mol_type = other DNA
cgagaccatcctggccaaca

SEQ ID NO: 70359 - DNA, 20 bp, synthetic construct
  source 1..20: mol_type = other DNA
tcgagaccatcctggccaac

SEQ ID NO: 70360 - DNA, 20 bp, synthetic construct
  source 1..20: mol_type = other DNA
atcgagaccatcctggccaa

SEQ ID NO: 70361 - DNA, 20 bp, synthetic construct
  source 1..20: mol_type = other DNA
gatcgagaccatcctggcca

SEQ ID NO: 70362 - DNA, 20 bp, synthetic construct
  source 1..20: mol_type = other DNA
agatcgagaccatcctggcc

SEQ ID NO: 70363 - DNA, 20 bp, synthetic construct
  source 1..20: mol_type = other DNA
gagatcgagaccatcctggc

SEQ ID NO: 70364 - DNA, 20 bp, synthetic construct
  source 1..20: mol_type = other DNA
agagatcgagaccatcctgg

SEQ ID NO: 70365 - DNA, 20 bp, synthetic construct
  source 1..20: mol_type = other DNA
aagagatcgagaccatcctg

SEQ ID NO: 70366 - DNA, 20 bp, synthetic construct
  source 1..20: mol_type = other DNA
caagagatcgagaccatcct

SEQ ID NO: 70367 - DNA, 20 bp, synthetic construct
  source 1..20: mol_type = other DNA
tcaagagatcgagaccatcc

SEQ ID NO: 70368 - DNA, 20 bp, synthetic construct
  source 1..20: mol_type = other DNA
gtcaagagatcgagaccatc

SEQ ID NO: 70369 - DNA, 20 bp, synthetic construct
  source 1..20: mol_type = other DNA
ggtcaagagatcgagaccat

SEQ ID NO: 70370 - DNA, 20 bp, synthetic construct
  source 1..20: mol_type = other DNA
aggtcaagagatcgagacca

SEQ ID NO: 70371 - DNA, 20 bp, synthetic construct
  source 1..20: mol_type = other DNA
gaggtcaagagatcgagacc

SEQ ID NO: 70372 - DNA, 20 bp, synthetic construct
  source 1..20: mol_type = other DNA
tgaggtcaagagatcgagac

SEQ ID NO: 70373 - DNA, 20 bp, synthetic construct
  source 1..20: mol_type = other DNA
atgaggtcaagagatcgaga

SEQ ID NO: 70374 - DNA, 20 bp, synthetic construct
  source 1..20: mol_type = other DNA
catgaggtcaagagatcgag

SEQ ID NO: 70375 - DNA, 20 bp, synthetic construct
  source 1..20: mol_type = other DNA
tcatgaggtcaagagatcga

SEQ ID NO: 70376 - DNA, 20 bp, synthetic construct
  source 1..20: mol_type = other DNA
atcatgaggtcaagagatcg

SEQ ID NO: 70377 - DNA, 20 bp, synthetic construct
  source 1..20: mol_type = other DNA
gatcatgaggtcaagagatc

SEQ ID NO: 70378 - DNA, 20 bp, synthetic construct
  source 1..20: mol_type = other DNA
ggatcatgaggtcaagagat

SEQ ID NO: 70379 - DNA, 20 bp, synthetic construct
  source 1..20: mol_type = other DNA
tggatcatgaggtcaagaga

SEQ ID NO: 70380 - DNA, 20 bp, synthetic construct
  source 1..20: mol_type = other DNA
gtggatcatgaggtcaagag

SEQ ID NO: 70381 - DNA, 20 bp, synthetic construct
  source 1..20: mol_type = other DNA
ggtggatcatgaggtcaaga

SEQ ID NO: 70382 - DNA, 20 bp, synthetic construct
  source 1..20: mol_type = other DNA
gggtggatcatgaggtcaag

SEQ ID NO: 70383 - DNA, 20 bp, synthetic construct
  source 1..20: mol_type = other DNA
cgggtggatcatgaggtcaa

SEQ ID NO: 70384 - DNA, 20 bp, synthetic construct
  source 1..20: mol_type = other DNA
gcgggtggatcatgaggtca

SEQ ID NO: 70385 - DNA, 20 bp, synthetic construct
  source 1..20: mol_type = other DNA
ggcgggtggatcatgaggtc

SEQ ID NO: 70386 - DNA, 20 bp, synthetic construct
  source 1..20: mol_type = other DNA
aggcgggtggatcatgaggt

SEQ ID NO: 70387 - DNA, 20 bp, synthetic construct
  source 1..20: mol_type = other DNA
gaggcgggtggatcatgagg

SEQ ID NO: 70388 - DNA, 20 bp, synthetic construct
  source 1..20: mol_type = other DNA
tgaggcgggtggatcatgag

SEQ ID NO: 70389 - DNA, 20 bp, synthetic construct
  source 1..20: mol_type = other DNA
ctgaggcgggtggatcatga

SEQ ID NO: 70390 - DNA, 20 bp, synthetic construct
  source 1..20: mol_type = other DNA
gctgaggcgggtggatcatg

SEQ ID NO: 70391 - DNA, 20 bp, synthetic construct
  source 1..20: mol_type = other DNA
ggctgaggcgggtggatcat

SEQ ID NO: 70392 - DNA, 20 bp, synthetic construct
  source 1..20: mol_type = other DNA
aggctgaggcgggtggatca

SEQ ID NO: 70393 - DNA, 20 bp, synthetic construct
  source 1..20: mol_type = other DNA
gaggctgaggcgggtggatc

SEQ ID NO: 70394 - DNA, 20 bp, synthetic construct
  source 1..20: mol_type = other DNA
ggaggctgaggcgggtggat

SEQ ID NO: 70395 - DNA, 20 bp, synthetic construct
  source 1..20: mol_type = other DNA
gggaggctgaggcgggtgga

SEQ ID NO: 70396 - DNA, 20 bp, synthetic construct
  source 1..20: mol_type = other DNA
tgggaggctgaggcgggtgg

SEQ ID NO: 70397 - DNA, 20 bp, synthetic construct
  source 1..20: mol_type = other DNA
ttgggaggctgaggcgggtg

SEQ ID NO: 70398 - DNA, 20 bp, synthetic construct
  source 1..20: mol_type = other DNA
tttgggaggctgaggcgggt

SEQ ID NO: 70399 - DNA, 20 bp, synthetic construct
  source 1..20: mol_type = other DNA
ctttgggaggctgaggcggg

SEQ ID NO: 70400 - DNA, 20 bp, synthetic construct
  source 1..20: mol_type = other DNA
actttgggaggctgaggcgg

SEQ ID NO: 70401 - DNA, 20 bp, synthetic construct
  source 1..20: mol_type = other DNA
cactttgggaggctgaggcg

SEQ ID NO: 70402 - DNA, 20 bp, synthetic construct
  source 1..20: mol_type = other DNA
gcactttgggaggctgaggc

SEQ ID NO: 70403 - DNA, 20 bp, synthetic construct
  source 1..20: mol_type = other DNA
agcactttgggaggctgagg

SEQ ID NO: 70404 - DNA, 20 bp, synthetic construct
  source 1..20: mol_type = other DNA
cagcactttgggaggctgag

SEQ ID NO: 70405 - DNA, 20 bp, synthetic construct
  source 1..20: mol_type = other DNA
ccagcactttgggaggctga

SEQ ID NO: 70406 - DNA, 20 bp, synthetic construct
  source 1..20: mol_type = other DNA
cccagcactttgggaggctg

SEQ ID NO: 70407 - DNA, 20 bp, synthetic construct
  source 1..20: mol_type = other DNA
tcccagcactttgggaggct

SEQ ID NO: 70408 - DNA, 20 bp, synthetic construct
  source 1..20: mol_type = other DNA
atcccagcactttgggaggc

SEQ ID NO: 70409 - DNA, 20 bp, synthetic construct
  source 1..20: mol_type = other DNA
aatcccagcactttgggagg

SEQ ID NO: 70410 - DNA, 20 bp, synthetic construct
  source 1..20: mol_type = other DNA
taatcccagcactttgggag

SEQ ID NO: 70411 - DNA, 20 bp, synthetic construct
  source 1..20: mol_type = other DNA
gtaatcccagcactttggga

SEQ ID NO: 70412 - DNA, 20 bp, synthetic construct
  source 1..20: mol_type = other DNA
tgtaatcccagcactttggg

SEQ ID NO: 70413 - DNA, 20 bp, synthetic construct
  source 1..20: mol_type = other DNA
ctgtaatcccagcactttgg

SEQ ID NO: 70414 - DNA, 20 bp, synthetic construct
  source 1..20: mol_type = other DNA
tctgtaatcccagcactttg

SEQ ID NO: 70415 - DNA, 20 bp, synthetic construct
  source 1..20: mol_type = other DNA
atctgtaatcccagcacttt

SEQ ID NO: 70416 - DNA, 20 bp, synthetic construct
  source 1..20: mol_type = other DNA
catctgtaatcccagcactt

SEQ ID NO: 70417 - DNA, 20 bp, synthetic construct
  source 1..20: mol_type = other DNA
acatctgtaatcccagcact

SEQ ID NO: 70418 - DNA, 20 bp, synthetic construct
  source 1..20: mol_type = other DNA
cacatctgtaatcccagcac

SEQ ID NO: 70419 - DNA, 20 bp, synthetic construct
  source 1..20: mol_type = other DNA
tcacatctgtaatcccagca

SEQ ID NO: 70420 - DNA, 20 bp, synthetic construct
  source 1..20: mol_type = other DNA
ctcacatctgtaatcccagc

SEQ ID NO: 70421 - DNA, 20 bp, synthetic construct
  source 1..20: mol_type = other DNA
gctcacatctgtaatcccag

SEQ ID NO: 70422 - DNA, 20 bp, synthetic construct
  source 1..20: mol_type = other DNA
ggctcacatctgtaatccca

SEQ ID NO: 70423 - DNA, 20 bp, synthetic construct
  source 1..20: mol_type = other DNA
tggctcacatctgtaatccc

SEQ ID NO: 70424 - DNA, 20 bp, synthetic construct
  source 1..20: mol_type = other DNA
gtggctcacatctgtaatcc

SEQ ID NO: 70425 - DNA, 20 bp, synthetic construct
  source 1..20: mol_type = other DNA
agtggctcacatctgtaatc

SEQ ID NO: 70426 - DNA, 20 bp, synthetic construct
  source 1..20: mol_type = other DNA
cagtggctcacatctgtaat

SEQ ID NO: 70427 - DNA, 20 bp, synthetic construct
  source 1..20: mol_type = other DNA
acagtggctcacatctgtaa

SEQ ID NO: 70428 - DNA, 20 bp, synthetic construct
  source 1..20: mol_type = other DNA
cacagtggctcacatctgta

SEQ ID NO: 70429 - DNA, 20 bp, synthetic construct
  source 1..20: mol_type = other DNA
gcacagtggctcacatctgt

SEQ ID NO: 70430 - DNA, 20 bp, synthetic construct
  source 1..20: mol_type = other DNA
ggcacagtggctcacatctg

SEQ ID NO: 70431 - DNA, 20 bp, synthetic construct
  source 1..20: mol_type = other DNA
gggcacagtggctcacatct

SEQ ID NO: 70432 - DNA, 20 bp, synthetic construct
  source 1..20: mol_type = other DNA
tgggcacagtggctcacatc

SEQ ID NO: 70433 - DNA, 20 bp, synthetic construct
  source 1..20: mol_type = other DNA
ctgggcacagtggctcacat

SEQ ID NO: 70434 - DNA, 20 bp, synthetic construct
  source 1..20: mol_type = other DNA
gctgggcacagtggctcaca

SEQ ID NO: 70435 - DNA, 20 bp, synthetic construct
  source 1..20: mol_type = other DNA
ggctgggcacagtggctcac

SEQ ID NO: 70436 - DNA, 20 bp, synthetic construct
  source 1..20: mol_type = other DNA
aggctgggcacagtggctca

SEQ ID NO: 70437 - DNA, 20 bp, synthetic construct
  source 1..20: mol_type = other DNA
caggctgggcacagtggctc

SEQ ID NO: 70438 - DNA, 20 bp, synthetic construct
  source 1..20: mol_type = other DNA
acaggctgggcacagtggct

SEQ ID NO: 70439 - DNA, 20 bp, synthetic construct
  source 1..20: mol_type = other DNA
aacaggctgggcacagtggc

SEQ ID NO: 70440 - DNA, 20 bp, synthetic construct
  source 1..20: mol_type = other DNA
caacaggctgggcacagtgg

SEQ ID NO: 70441 - DNA, 20 bp, synthetic construct
  source 1..20: mol_type = other DNA
tcaacaggctgggcacagtg

SEQ ID NO: 70442 - DNA, 20 bp, synthetic construct
  source 1..20: mol_type = other DNA
atcaacaggctgggcacagt

SEQ ID NO: 70443 - DNA, 20 bp, synthetic construct
  source 1..20: mol_type = other DNA
aatcaacaggctgggcacag

SEQ ID NO: 70444 - DNA, 20 bp, synthetic construct
  source 1..20: mol_type = other DNA
aaatcaacaggctgggcaca

SEQ ID NO: 70445 - DNA, 20 bp, synthetic construct
  source 1..20: mol_type = other DNA
taaatcaacaggctgggcac

SEQ ID NO: 70446 - DNA, 20 bp, synthetic construct
  source 1..20: mol_type = other DNA
ttaaatcaacaggctgggca

SEQ ID NO: 70447 - DNA, 20 bp, synthetic construct
  source 1..20: mol_type = other DNA
attaaatcaacaggctgggc

SEQ ID NO: 70448 - DNA, 20 bp, synthetic construct
  source 1..20: mol_type = other DNA
aattaaatcaacaggctggg

SEQ ID NO: 70449 - DNA, 20 bp, synthetic construct
  source 1..20: mol_type = other DNA
aaattaaatcaacaggctgg

SEQ ID NO: 70450 - DNA, 20 bp, synthetic construct
  source 1..20: mol_type = other DNA
aaaattaaatcaacaggctg

SEQ ID NO: 70451 - DNA, 20 bp, synthetic construct
  source 1..20: mol_type = other DNA
taaaattaaatcaacaggct

SEQ ID NO: 70452 - DNA, 20 bp, synthetic construct
  source 1..20: mol_type = other DNA
ttaaaattaaatcaacaggc

SEQ ID NO: 70453 - DNA, 20 bp, synthetic construct
  source 1..20: mol_type = other DNA
tttaaaattaaatcaacagg

SEQ ID NO: 70454 - DNA, 20 bp, synthetic construct
  source 1..20: mol_type = other DNA
gtttaaaattaaatcaacag

SEQ ID NO: 70455 - DNA, 20 bp, synthetic construct
  source 1..20: mol_type = other DNA
tgtttaaaattaaatcaaca

SEQ ID NO: 70456 - DNA, 20 bp, synthetic construct
  source 1..20: mol_type = other DNA
ctgtttaaaattaaatcaac

SEQ ID NO: 70457 - DNA, 20 bp, synthetic construct
  source 1..20: mol_type = other DNA
tctgtttaaaattaaatcaa

SEQ ID NO: 70458 - DNA, 20 bp, synthetic construct
  source 1..20: mol_type = other DNA
ctctgtttaaaattaaatca

SEQ ID NO: 70459 - DNA, 20 bp, synthetic construct
  source 1..20: mol_type = other DNA
actctgtttaaaattaaatc

SEQ ID NO: 70460 - DNA, 20 bp, synthetic construct
  source 1..20: mol_type = other DNA
aactctgtttaaaattaaat

SEQ ID NO: 70461 - DNA, 20 bp, synthetic construct
  source 1..20: mol_type = other DNA
aaactctgtttaaaattaaa

SEQ ID NO: 70462 - DNA, 20 bp, synthetic construct
  source 1..20: mol_type = other DNA
gaaactctgtttaaaattaa

SEQ ID NO: 70463 - DNA, 20 bp, synthetic construct
  source 1..20: mol_type = other DNA
cgaaactctgtttaaaatta

SEQ ID NO: 70464 - DNA, 20 bp, synthetic construct
  source 1..20: mol_type = other DNA
gcgaaactctgtttaaaatt

SEQ ID NO: 70465 - DNA, 20 bp, synthetic construct
  source 1..20: mol_type = other DNA
agcgaaactctgtttaaaat

SEQ ID NO: 70466 - DNA, 20 bp, synthetic construct
  source 1..20: mol_type = other DNA
gagcgaaactctgtttaaaa

SEQ ID NO: 70467 - DNA, 20 bp, synthetic construct
  source 1..20: mol_type = other DNA
agagcgaaactctgtttaaa

SEQ ID NO: 70468 - DNA, 20 bp, synthetic construct
  source 1..20: mol_type = other DNA
aagagcgaaactctgtttaa

SEQ ID NO: 70469 - DNA, 20 bp, synthetic construct
  source 1..20: mol_type = other DNA
caagagcgaaactctgttta

SEQ ID NO: 70470 - DNA, 20 bp, synthetic construct
  source 1..20: mol_type = other DNA
acaagagcgaaactctgttt

SEQ ID NO: 70471 - DNA, 20 bp, synthetic construct
  source 1..20: mol_type = other DNA
aacaagagcgaaactctgtt

SEQ ID NO: 70472 - DNA, 20 bp, synthetic construct
  source 1..20: mol_type = other DNA
taacaagagcgaaactctgt

SEQ ID NO: 70473 - DNA, 20 bp, synthetic construct
  source 1..20: mol_type = other DNA
gtaacaagagcgaaactctg

SEQ ID NO: 70474 - DNA, 20 bp, synthetic construct
  source 1..20: mol_type = other DNA
ggtaacaagagcgaaactct

SEQ ID NO: 70475 - DNA, 20 bp, synthetic construct
  source 1..20: mol_type = other DNA
gggtaacaagagcgaaactc

SEQ ID NO: 70476 - DNA, 20 bp, synthetic construct
  source 1..20: mol_type = other DNA
tgggtaacaagagcgaaact

SEQ ID NO: 70477 - DNA, 20 bp, synthetic construct
  source 1..20: mol_type = other DNA
ctgggtaacaagagcgaaac

SEQ ID NO: 70478 - DNA, 20 bp, synthetic construct
  source 1..20: mol_type = other DNA
cctgggtaacaagagcgaaa

SEQ ID NO: 70479 - DNA, 20 bp, synthetic construct
  source 1..20: mol_type = other DNA
gcctgggtaacaagagcgaa

SEQ ID NO: 70480 - DNA, 20 bp, synthetic construct
  source 1..20: mol_type = other DNA
agcctgggtaacaagagcga

SEQ ID NO: 70481 - DNA, 20 bp, synthetic construct
  source 1..20: mol_type = other DNA
cagcctgggtaacaagagcg

SEQ ID NO: 70482 - DNA, 20 bp, synthetic construct
  source 1..20: mol_type = other DNA
ccagcctgggtaacaagagc

SEQ ID NO: 70483 - DNA, 20 bp, synthetic construct
  source 1..20: mol_type = other DNA
tccagcctgggtaacaagag

SEQ ID NO: 70484 - DNA, 20 bp, synthetic construct
  source 1..20: mol_type = other DNA
ctccagcctgggtaacaaga

SEQ ID NO: 70485 - DNA, 20 bp, synthetic construct
  source 1..20: mol_type = other DNA
actccagcctgggtaacaag

SEQ ID NO: 70486 - DNA, 20 bp, synthetic construct
  source 1..20: mol_type = other DNA
cactccagcctgggtaacaa

SEQ ID NO: 70487 - DNA, 20 bp, synthetic construct
  source 1..20: mol_type = other DNA
gcactccagcctgggtaaca

SEQ ID NO: 70488 - DNA, 20 bp, synthetic construct
  source 1..20: mol_type = other DNA
tgcactccagcctgggtaac

SEQ ID NO: 70489 - DNA, 20 bp, synthetic construct
  source 1..20: mol_type = other DNA
ttgcactccagcctgggtaa

SEQ ID NO: 70490 - DNA, 20 bp, synthetic construct
  source 1..20: mol_type = other DNA
attgcactccagcctgggta

SEQ ID NO: 70491 - DNA, 20 bp, synthetic construct
  source 1..20: mol_type = other DNA
cattgcactccagcctgggt

SEQ ID NO: 70492 - DNA, 20 bp, synthetic construct
  source 1..20: mol_type = other DNA
ccattgcactccagcctggg

SEQ ID NO: 70493 - DNA, 20 bp, synthetic construct
  source 1..20: mol_type = other DNA
accattgcactccagcctgg

SEQ ID NO: 70494 - DNA, 20 bp, synthetic construct
  source 1..20: mol_type = other DNA
caccattgcactccagcctg

SEQ ID NO: 70495 - DNA, 20 bp, synthetic construct
  source 1..20: mol_type = other DNA
gcaccattgcactccagcct

SEQ ID NO: 70496 - DNA, 20 bp, synthetic construct
  source 1..20: mol_type = other DNA
cgcaccattgcactccagcc

SEQ ID NO: 70497 - DNA, 20 bp, synthetic construct
  source 1..20: mol_type = other DNA
tcgcaccattgcactccagc

SEQ ID NO: 70498 - DNA, 20 bp, synthetic construct
  source 1..20: mol_type = other DNA
atcgcaccattgcactccag

SEQ ID NO: 70499 - DNA, 20 bp, synthetic construct
  source 1..20: mol_type = other DNA
gatcgcaccattgcactcca

SEQ ID NO: 70500 - DNA, 20 bp, synthetic construct
  source 1..20: mol_type = other DNA
agatcgcaccattgcactcc

SEQ ID NO: 70501 - DNA, 20 bp, synthetic construct
  source 1..20: mol_type = other DNA
gagatcgcaccattgcactc

SEQ ID NO: 70502 - DNA, 20 bp, synthetic construct
  source 1..20: mol_type = other DNA
cgagatcgcaccattgcact

SEQ ID NO: 70503 - DNA, 20 bp, synthetic construct
  source 1..20: mol_type = other DNA
ccgagatcgcaccattgcac

SEQ ID NO: 70504 - DNA, 20 bp, synthetic construct
  source 1..20: mol_type = other DNA
gccgagatcgcaccattgca

SEQ ID NO: 70505 - DNA, 20 bp, synthetic construct
  source 1..20: mol_type = other DNA
agccgagatcgcaccattgc

SEQ ID NO: 70506 - DNA, 20 bp, synthetic construct
  source 1..20: mol_type = other DNA
gagccgagatcgcaccattg

SEQ ID NO: 70507 - DNA, 20 bp, synthetic construct
  source 1..20: mol_type = other DNA
tgagccgagatcgcaccatt

SEQ ID NO: 70508 - DNA, 20 bp, synthetic construct
  source 1..20: mol_type = other DNA
gtgagccgagatcgcaccat

SEQ ID NO: 70509 - DNA, 20 bp, synthetic construct
  source 1..20: mol_type = other DNA
ggtgagccgagatcgcacca

SEQ ID NO: 70510 - DNA, 20 bp, synthetic construct
  source 1..20: mol_type = other DNA
cggtgagccgagatcgcacc

SEQ ID NO: 70511 - DNA, 20 bp, synthetic construct
  source 1..20: mol_type = other DNA
gcggtgagccgagatcgcac

SEQ ID NO: 70512 - DNA, 20 bp, synthetic construct
  source 1..20: mol_type = other DNA
tgcggtgagccgagatcgca

SEQ ID NO: 70513 - DNA, 20 bp, synthetic construct
  source 1..20: mol_type = other DNA
ctgcggtgagccgagatcgc

SEQ ID NO: 70514 - DNA, 20 bp, synthetic construct
  source 1..20: mol_type = other DNA
gctgcggtgagccgagatcg

SEQ ID NO: 70515 - DNA, 20 bp, synthetic construct
  source 1..20: mol_type = other DNA
ggctgcggtgagccgagatc

SEQ ID NO: 70516 - DNA, 20 bp, synthetic construct
  source 1..20: mol_type = other DNA
aggctgcggtgagccgagat

SEQ ID NO: 70517 - DNA, 20 bp, synthetic construct
  source 1..20: mol_type = other DNA
gaggctgcggtgagccgaga

SEQ ID NO: 70518 - DNA, 20 bp, synthetic construct
  source 1..20: mol_type = other DNA
agaggctgcggtgagccgag

SEQ ID NO: 70519 - DNA, 20 bp, synthetic construct
  source 1..20: mol_type = other DNA
cagaggctgcggtgagccga

SEQ ID NO: 70520 - DNA, 20 bp, synthetic construct
  source 1..20: mol_type = other DNA
gcagaggctgcggtgagccg

SEQ ID NO: 70521 - DNA, 20 bp, synthetic construct
  source 1..20: mol_type = other DNA
ggcagaggctgcggtgagcc

SEQ ID NO: 70522 - DNA, 20 bp, synthetic construct
  source 1..20: mol_type = other DNA
aggcagaggctgcggtgagc

SEQ ID NO: 70523 - DNA, 20 bp, synthetic construct
  source 1..20: mol_type = other DNA
gaggcagaggctgcggtgag

SEQ ID NO: 70524 - DNA, 20 bp, synthetic construct
  source 1..20: mol_type = other DNA
ggaggcagaggctgcggtga

SEQ ID NO: 70525 - DNA, 20 bp, synthetic construct
  source 1..20: mol_type = other DNA
gggaggcagaggctgcggtg

SEQ ID NO: 70526 - DNA, 20 bp, synthetic construct
  source 1..20: mol_type = other DNA
tgggaggcagaggctgcggt

SEQ ID NO: 70527 - DNA, 20 bp, synthetic construct
  source 1..20: mol_type = other DNA
ctgggaggcagaggctgcgg

SEQ ID NO: 70528 - DNA, 20 bp, synthetic construct
  source 1..20: mol_type = other DNA
cctgggaggcagaggctgcg

SEQ ID NO: 70529 - DNA, 20 bp, synthetic construct
  source 1..20: mol_type = other DNA
acctgggaggcagaggctgc

SEQ ID NO: 70530 - DNA, 20 bp, synthetic construct
  source 1..20: mol_type = other DNA
aacctgggaggcagaggctg

SEQ ID NO: 70531 - DNA, 20 bp, synthetic construct
  source 1..20: mol_type = other DNA
gaacctgggaggcagaggct

SEQ ID NO: 70532 - DNA, 20 bp, synthetic construct
  source 1..20: mol_type = other DNA
tgaacctgggaggcagaggc

SEQ ID NO: 70533 - DNA, 20 bp, synthetic construct
  source 1..20: mol_type = other DNA
ttgaacctgggaggcagagg

SEQ ID NO: 70534 - DNA, 20 bp, synthetic construct
  source 1..20: mol_type = other DNA
cttgaacctgggaggcagag

SEQ ID NO: 70535 - DNA, 20 bp, synthetic construct
  source 1..20: mol_type = other DNA
acttgaacctgggaggcaga

SEQ ID NO: 70536 - DNA, 20 bp, synthetic construct
  source 1..20: mol_type = other DNA
cacttgaacctgggaggcag

SEQ ID NO: 70537 - DNA, 20 bp, synthetic construct
  source 1..20: mol_type = other DNA
tcacttgaacctgggaggca

SEQ ID NO: 70538 - DNA, 20 bp, synthetic construct
  source 1..20: mol_type = other DNA
atcacttgaacctgggaggc

SEQ ID NO: 70539 - DNA, 20 bp, synthetic construct
  source 1..20: mol_type = other DNA
aatcacttgaacctgggagg

SEQ ID NO: 70540 - DNA, 20 bp, synthetic construct
  source 1..20: mol_type = other DNA
gaatcacttgaacctgggag

SEQ ID NO: 70541 - DNA, 20 bp, synthetic construct
  source 1..20: mol_type = other DNA
agaatcacttgaacctggga

SEQ ID NO: 70542 - DNA, 20 bp, synthetic construct
  source 1..20: mol_type = other DNA
gagaatcacttgaacctggg

SEQ ID NO: 70543 - DNA, 20 bp, synthetic construct
  source 1..20: mol_type = other DNA
ggagaatcacttgaacctgg

SEQ ID NO: 70544 - DNA, 20 bp, synthetic construct
  source 1..20: mol_type = other DNA
aggagaatcacttgaacctg

SEQ ID NO: 70545 - DNA, 20 bp, synthetic construct
  source 1..20: mol_type = other DNA
caggagaatcacttgaacct

SEQ ID NO: 70546 - DNA, 20 bp, synthetic construct
  source 1..20: mol_type = other DNA
gcaggagaatcacttgaacc

SEQ ID NO: 70547 - DNA, 20 bp, synthetic construct
  source 1..20: mol_type = other DNA
agcaggagaatcacttgaac

SEQ ID NO: 70548 - DNA, 20 bp, synthetic construct
  source 1..20: mol_type = other DNA
aagcaggagaatcacttgaa

SEQ ID NO: 70549 - DNA, 20 bp, synthetic construct
  source 1..20: mol_type = other DNA
gaagcaggagaatcacttga

SEQ ID NO: 70550 - DNA, 20 bp, synthetic construct
  source 1..20: mol_type = other DNA
tgaagcaggagaatcacttg

SEQ ID NO: 70551 - DNA, 20 bp, synthetic construct
  source 1..20: mol_type = other DNA
ctgaagcaggagaatcactt

SEQ ID NO: 70552 - DNA, 20 bp, synthetic construct
  source 1..20: mol_type = other DNA
gctgaagcaggagaatcact

SEQ ID NO: 70553 - DNA, 20 bp, synthetic construct
  source 1..20: mol_type = other DNA
ggctgaagcaggagaatcac

SEQ ID NO: 70554 - DNA, 20 bp, synthetic construct
  source 1..20: mol_type = other DNA
aggctgaagcaggagaatca

SEQ ID NO: 70555 - DNA, 20 bp, synthetic construct
  source 1..20: mol_type = other DNA
gaggctgaagcaggagaatc

SEQ ID NO: 70556 - DNA, 20 bp, synthetic construct
  source 1..20: mol_type = other DNA
ggaggctgaagcaggagaat

SEQ ID NO: 70557 - DNA, 20 bp, synthetic construct
  source 1..20: mol_type = other DNA
gggaggctgaagcaggagaa

SEQ ID NO: 70558 - DNA, 20 bp, synthetic construct
  source 1..20: mol_type = other DNA
cgggaggctgaagcaggaga

SEQ ID NO: 70559 - DNA, 20 bp, synthetic construct
  source 1..20: mol_type = other DNA
tcgggaggctgaagcaggag

SEQ ID NO: 70560 - DNA, 20 bp, synthetic construct
  source 1..20: mol_type = other DNA
ctcgggaggctgaagcagga

SEQ ID NO: 70561 - DNA, 20 bp, synthetic construct
  source 1..20: mol_type = other DNA
gctcgggaggctgaagcagg

SEQ ID NO: 70562 - DNA, 20 bp, synthetic construct
  source 1..20: mol_type = other DNA
tgctcgggaggctgaagcag

SEQ ID NO: 70563 - DNA, 20 bp, synthetic construct
  source 1..20: mol_type = other DNA
ctgctcgggaggctgaagca

SEQ ID NO: 70564 - DNA, 20 bp, synthetic construct
  source 1..20: mol_type = other DNA
gctgctcgggaggctgaagc

SEQ ID NO: 70565 - DNA, 20 bp, synthetic construct
  source 1..20: mol_type = other DNA
agctgctcgggaggctgaag

SEQ ID NO: 70566 - DNA, 20 bp, synthetic construct
  source 1..20: mol_type = other DNA
cagctgctcgggaggctgaa

SEQ ID NO: 70567 - DNA, 20 bp, synthetic construct
  source 1..20: mol_type = other DNA
ccagctgctcgggaggctga

SEQ ID NO: 70568 - DNA, 20 bp, synthetic construct
  source 1..20: mol_type = other DNA
cccagctgctcgggaggctg

SEQ ID NO: 70569 - DNA, 20 bp, synthetic construct
  source 1..20: mol_type = other DNA
tcccagctgctcgggaggct

SEQ ID NO: 70570 - DNA, 20 bp, synthetic construct
  source 1..20: mol_type = other DNA
atcccagctgctcgggaggc

SEQ ID NO: 70571 - DNA, 20 bp, synthetic construct
  source 1..20: mol_type = other DNA
aatcccagctgctcgggagg

SEQ ID NO: 70572 - DNA, 20 bp, synthetic construct
  source 1..20: mol_type = other DNA
taatcccagctgctcgggag

SEQ ID NO: 70573 - DNA, 20 bp, synthetic construct
  source 1..20: mol_type = other DNA
gtaatcccagctgctcggga

SEQ ID NO: 70574 - DNA, 20 bp, synthetic construct
  source 1..20: mol_type = other DNA
tgtaatcccagctgctcggg

SEQ ID NO: 70575 - DNA, 20 bp, synthetic construct
  source 1..20: mol_type = other DNA
ctgtaatcccagctgctcgg

SEQ ID NO: 70576 - DNA, 20 bp, synthetic construct
  source 1..20: mol_type = other DNA
cctgtaatcccagctgctcg

SEQ ID NO: 70577 - DNA, 20 bp, synthetic construct
  source 1..20: mol_type = other DNA
gcctgtaatcccagctgctc

SEQ ID NO: 70578 - DNA, 20 bp, synthetic construct
  source 1..20: mol_type = other DNA
tgcctgtaatcccagctgct

SEQ ID NO: 70579 - DNA, 20 bp, synthetic construct
  source 1..20: mol_type = other DNA
atgcctgtaatcccagctgc

SEQ ID NO: 70580 - DNA, 20 bp, synthetic construct
  source 1..20: mol_type = other DNA
catgcctgtaatcccagctg

SEQ ID NO: 70581 - DNA, 20 bp, synthetic construct
  source 1..20: mol_type = other DNA
gcatgcctgtaatcccagct

SEQ ID NO: 70582 - DNA, 20 bp, synthetic construct
  source 1..20: mol_type = other DNA
tgcatgcctgtaatcccagc

SEQ ID NO: 70583 - DNA, 20 bp, synthetic construct
  source 1..20: mol_type = other DNA
gtgcatgcctgtaatcccag

SEQ ID NO: 70584 - DNA, 20 bp, synthetic construct
  source 1..20: mol_type = other DNA
ggtgcatgcctgtaatccca

SEQ ID NO: 70585 - DNA, 20 bp, synthetic construct
  source 1..20: mol_type = other DNA
tggtgcatgcctgtaatccc

SEQ ID NO: 70586 - DNA, 20 bp, synthetic construct
  source 1..20: mol_type = other DNA
gtggtgcatgcctgtaatcc

SEQ ID NO: 70587 - DNA, 20 bp, synthetic construct
  source 1..20: mol_type = other DNA
ggtggtgcatgcctgtaatc

SEQ ID NO: 70588 - DNA, 20 bp, synthetic construct
  source 1..20: mol_type = other DNA
tggtggtgcatgcctgtaat

SEQ ID NO: 70589 - DNA, 20 bp, synthetic construct
  source 1..20: mol_type = other DNA
atggtggtgcatgcctgtaa

SEQ ID NO: 70590 - DNA, 20 bp, synthetic construct
  source 1..20: mol_type = other DNA
catggtggtgcatgcctgta

SEQ ID NO: 70591 - DNA, 20 bp, synthetic construct
  source 1..20: mol_type = other DNA
gcatggtggtgcatgcctgt

SEQ ID NO: 70592 - DNA, 20 bp, synthetic construct
  source 1..20: mol_type = other DNA
tgcatggtggtgcatgcctg

SEQ ID NO: 70593 - DNA, 20 bp, synthetic construct
  source 1..20: mol_type = other DNA
gtgcatggtggtgcatgcct

SEQ ID NO: 70594 - DNA, 20 bp, synthetic construct
  source 1..20: mol_type = other DNA
tgtgcatggtggtgcatgcc

SEQ ID NO: 70595 - DNA, 20 bp, synthetic construct
  source 1..20: mol_type = other DNA
ctgtgcatggtggtgcatgc

SEQ ID NO: 70596 - DNA, 20 bp, synthetic construct
  source 1..20: mol_type = other DNA
gctgtgcatggtggtgcatg

SEQ ID NO: 70597 - DNA, 20 bp, synthetic construct
  source 1..20: mol_type = other DNA
agctgtgcatggtggtgcat

SEQ ID NO: 70598 - DNA, 20 bp, synthetic construct
  source 1..20: mol_type = other DNA
tagctgtgcatggtggtgca

SEQ ID NO: 70599 - DNA, 20 bp, synthetic construct
  source 1..20: mol_type = other DNA
atagctgtgcatggtggtgc

SEQ ID NO: 70600 - DNA, 20 bp, synthetic construct
  source 1..20: mol_type = other DNA
tatagctgtgcatggtggtg

SEQ ID NO: 70601 - DNA, 20 bp, synthetic construct
  source 1..20: mol_type = other DNA
atatagctgtgcatggtggt

SEQ ID NO: 70602 - DNA, 20 bp, synthetic construct
  source 1..20: mol_type = other DNA
aatatagctgtgcatggtgg

SEQ ID NO: 70603 - DNA, 20 bp, synthetic construct
  source 1..20: mol_type = other DNA
aaatatagctgtgcatggtg

SEQ ID NO: 70604 - DNA, 20 bp, synthetic construct
  source 1..20: mol_type = other DNA
taaatatagctgtgcatggt

SEQ ID NO: 70605 - DNA, 20 bp, synthetic construct
  source 1..20: mol_type = other DNA
ctaaatatagctgtgcatgg

SEQ ID NO: 70606 - DNA, 20 bp, synthetic construct
  source 1..20: mol_type = other DNA
actaaatatagctgtgcatg

SEQ ID NO: 70607 - DNA, 20 bp, synthetic construct
  source 1..20: mol_type = other DNA
tactaaatatagctgtgcat

SEQ ID NO: 70608 - DNA, 20 bp, synthetic construct
  source 1..20: mol_type = other DNA
ctactaaatatagctgtgca

SEQ ID NO: 70609 - DNA, 20 bp, synthetic construct
  source 1..20: mol_type = other DNA
tctactaaatatagctgtgc

SEQ ID NO: 70610 - DNA, 20 bp, synthetic construct
  source 1..20: mol_type = other DNA
ctctactaaatatagctgtg

SEQ ID NO: 70611 - DNA, 20 bp, synthetic construct
  source 1..20: mol_type = other DNA
tctctactaaatatagctgt

SEQ ID NO: 70612 - DNA, 20 bp, synthetic construct
  source 1..20: mol_type = other DNA
atctctactaaatatagctg

SEQ ID NO: 70613 - DNA, 20 bp, synthetic construct
  source 1..20: mol_type = other DNA
catctctactaaatatagct

SEQ ID NO: 70614 - DNA, 20 bp, synthetic construct
  source 1..20: mol_type = other DNA
ccatctctactaaatatagc

SEQ ID NO: 70615 - DNA, 20 bp, synthetic construct
  source 1..20: mol_type = other DNA
cccatctctactaaatatag

SEQ ID NO: 70616 - DNA, 20 bp, synthetic construct
  source 1..20: mol_type = other DNA
ccccatctctactaaatata

SEQ ID NO: 70617 - DNA, 20 bp, synthetic construct
  source 1..20: mol_type = other DNA
cccccatctctactaaatat

SEQ ID NO: 70618 - DNA, 20 bp, synthetic construct
  source 1..20: mol_type = other DNA
acccccatctctactaaata

SEQ ID NO: 70619 - DNA, 20 bp, synthetic construct
  source 1..20: mol_type = other DNA
aacccccatctctactaaat

SEQ ID NO: 70620 - DNA, 20 bp, synthetic construct
  source 1..20: mol_type = other DNA
aaacccccatctctactaaa

SEQ ID NO: 70621 - DNA, 20 bp, synthetic construct
  source 1..20: mol_type = other DNA
gaaacccccatctctactaa

SEQ ID NO: 70622 - DNA, 20 bp, synthetic construct
  source 1..20: mol_type = other DNA
agaaacccccatctctacta

SEQ ID NO: 70623 - DNA, 20 bp, synthetic construct
  source 1..20: mol_type = other DNA
gagaaacccccatctctact

SEQ ID NO: 70624 - DNA, 20 bp, synthetic construct
  source 1..20: mol_type = other DNA
ggagaaacccccatctctac

SEQ ID NO: 70625 - DNA, 20 bp, synthetic construct
  source 1..20: mol_type = other DNA
tggagaaacccccatctcta

SEQ ID NO: 70626 - DNA, 20 bp, synthetic construct
  source 1..20: mol_type = other DNA
atggagaaacccccatctct

SEQ ID NO: 70627 - DNA, 20 bp, synthetic construct
  source 1..20: mol_type = other DNA
catggagaaacccccatctc

SEQ ID NO: 70628 - DNA, 20 bp, synthetic construct
  source 1..20: mol_type = other DNA
acatggagaaacccccatct

SEQ ID NO: 70629 - DNA, 20 bp, synthetic construct
  source 1..20: mol_type = other DNA
aacatggagaaacccccatc

SEQ ID NO: 70630 - DNA, 20 bp, synthetic construct
  source 1..20: mol_type = other DNA
caacatggagaaacccccat

SEQ ID NO: 70631 - DNA, 20 bp, synthetic construct
  source 1..20: mol_type = other DNA
ccaacatggagaaaccccca

SEQ ID NO: 70632 - DNA, 20 bp, synthetic construct
  source 1..20: mol_type = other DNA
accaacatggagaaaccccc

SEQ ID NO: 70633 - DNA, 20 bp, synthetic construct
  source 1..20: mol_type = other DNA
gaccaacatggagaaacccc

SEQ ID NO: 70634 - DNA, 20 bp, synthetic construct
  source 1..20: mol_type = other DNA
tgaccaacatggagaaaccc

SEQ ID NO: 70635 - DNA, 20 bp, synthetic construct
  source 1..20: mol_type = other DNA
ctgaccaacatggagaaacc

SEQ ID NO: 70636 - DNA, 20 bp, synthetic construct
  source 1..20: mol_type = other DNA
cctgaccaacatggagaaac

SEQ ID NO: 70637 - DNA, 20 bp, synthetic construct
  source 1..20: mol_type = other DNA
gcctgaccaacatggagaaa

SEQ ID NO: 70638 - DNA, 20 bp, synthetic construct
  source 1..20: mol_type = other DNA
agcctgaccaacatggagaa

SEQ ID NO: 70639 - DNA, 20 bp, synthetic construct
  source 1..20: mol_type = other DNA
cagcctgaccaacatggaga

SEQ ID NO: 70640 - DNA, 20 bp, synthetic construct
  source 1..20: mol_type = other DNA
ccagcctgaccaacatggag

SEQ ID NO: 70641 - DNA, 20 bp, synthetic construct
  source 1..20: mol_type = other DNA
accagcctgaccaacatgga

SEQ ID NO: 70642 - DNA, 20 bp, synthetic construct
  source 1..20: mol_type = other DNA
gaccagcctgaccaacatgg

SEQ ID NO: 70643 - DNA, 20 bp, synthetic construct
  source 1..20: mol_type = other DNA
agaccagcctgaccaacatg

SEQ ID NO: 70644 - DNA, 20 bp, synthetic construct
  source 1..20: mol_type = other DNA
gagaccagcctgaccaacat

SEQ ID NO: 70645 - DNA, 20 bp, synthetic construct
  source 1..20: mol_type = other DNA
cgagaccagcctgaccaaca

SEQ ID NO: 70646 - DNA, 20 bp, synthetic construct
  source 1..20: mol_type = other DNA
tcgagaccagcctgaccaac

SEQ ID NO: 70647 - DNA, 20 bp, synthetic construct
  source 1..20: mol_type = other DNA
ttcgagaccagcctgaccaa

SEQ ID NO: 70648 - DNA, 20 bp, synthetic construct
  source 1..20: mol_type = other DNA
gttcgagaccagcctgacca

SEQ ID NO: 70649 - DNA, 20 bp, synthetic construct
  source 1..20: mol_type = other DNA
agttcgagaccagcctgacc

SEQ ID NO: 70650 - DNA, 20 bp, synthetic construct
  source 1..20: mol_type = other DNA
gagttcgagaccagcctgac

SEQ ID NO: 70651 - DNA, 20 bp, synthetic construct
  source 1..20: mol_type = other DNA
ggagttcgagaccagcctga

SEQ ID NO: 70652 - DNA, 20 bp, synthetic construct
  source 1..20: mol_type = other DNA
cggagttcgagaccagcctg

SEQ ID NO: 70653 - DNA, 20 bp, synthetic construct
  source 1..20: mol_type = other DNA
ccggagttcgagaccagcct

SEQ ID NO: 70654 - DNA, 20 bp, synthetic construct
  source 1..20: mol_type = other DNA
tccggagttcgagaccagcc

SEQ ID NO: 70655 - DNA, 20 bp, synthetic construct
  source 1..20: mol_type = other DNA
gtccggagttcgagaccagc

SEQ ID NO: 70656 - DNA, 20 bp, synthetic construct
  source 1..20: mol_type = other DNA
ggtccggagttcgagaccag

SEQ ID NO: 70657 - DNA, 20 bp, synthetic construct
  source 1..20: mol_type = other DNA
aggtccggagttcgagacca

SEQ ID NO: 70658 - DNA, 20 bp, synthetic construct
  source 1..20: mol_type = other DNA
gaggtccggagttcgagacc

SEQ ID NO: 70659 - DNA, 20 bp, synthetic construct
  source 1..20: mol_type = other DNA
tgaggtccggagttcgagac

SEQ ID NO: 70660 - DNA, 20 bp, synthetic construct
  source 1..20: mol_type = other DNA
ctgaggtccggagttcgaga

SEQ ID NO: 70661 - DNA, 20 bp, synthetic construct
  source 1..20: mol_type = other DNA
cctgaggtccggagttcgag

SEQ ID NO: 70662 - DNA, 20 bp, synthetic construct
  source 1..20: mol_type = other DNA
acctgaggtccggagttcga

SEQ ID NO: 70663 - DNA, 20 bp, synthetic construct
  source 1..20: mol_type = other DNA
cacctgaggtccggagttcg

SEQ ID NO: 70664 - DNA, 20 bp, synthetic construct
  source 1..20: mol_type = other DNA
tcacctgaggtccggagttc

SEQ ID NO: 70665 - DNA, 20 bp, synthetic construct
  source 1..20: mol_type = other DNA
atcacctgaggtccggagtt

SEQ ID NO: 70666 - DNA, 20 bp, synthetic construct
  source 1..20: mol_type = other DNA
gatcacctgaggtccggagt

SEQ ID NO: 70667 - DNA, 20 bp, synthetic construct
  source 1..20: mol_type = other DNA
ggatcacctgaggtccggag

SEQ ID NO: 70668 - DNA, 20 bp, synthetic construct
  source 1..20: mol_type = other DNA
cggatcacctgaggtccgga

SEQ ID NO: 70669 - DNA, 20 bp, synthetic construct
  source 1..20: mol_type = other DNA
gcggatcacctgaggtccgg

SEQ ID NO: 70670 - DNA, 20 bp, synthetic construct
  source 1..20: mol_type = other DNA
ggcggatcacctgaggtccg

SEQ ID NO: 70671 - DNA, 20 bp, synthetic construct
  source 1..20: mol_type = other DNA
gggcggatcacctgaggtcc

SEQ ID NO: 70672 - DNA, 20 bp, synthetic construct
  source 1..20: mol_type = other DNA
cgggcggatcacctgaggtc

SEQ ID NO: 70673 - DNA, 20 bp, synthetic construct
  source 1..20: mol_type = other DNA
gcgggcggatcacctgaggt

SEQ ID NO: 70674 - DNA, 20 bp, synthetic construct
  source 1..20: mol_type = other DNA
ggcgggcggatcacctgagg

SEQ ID NO: 70675 - DNA, 20 bp, synthetic construct
  source 1..20: mol_type = other DNA
aggcgggcggatcacctgag

SEQ ID NO: 70676 - DNA, 20 bp, synthetic construct
  source 1..20: mol_type = other DNA
gaggcgggcggatcacctga

SEQ ID NO: 70677 - DNA, 20 bp, synthetic construct
  source 1..20: mol_type = other DNA
cgaggcgggcggatcacctg

SEQ ID NO: 70678 - DNA, 20 bp, synthetic construct
  source 1..20: mol_type = other DNA
ccgaggcgggcggatcacct

SEQ ID NO: 70679 - DNA, 20 bp, synthetic construct
  source 1..20: mol_type = other DNA
gccgaggcgggcggatcacc

SEQ ID NO: 70680 - DNA, 20 bp, synthetic construct
  source 1..20: mol_type = other DNA
ggccgaggcgggcggatcac

SEQ ID NO: 70681 - DNA, 20 bp, synthetic construct
  source 1..20: mol_type = other DNA
aggccgaggcgggcggatca

SEQ ID NO: 70682 - DNA, 20 bp, synthetic construct
  source 1..20: mol_type = other DNA
gaggccgaggcgggcggatc

SEQ ID NO: 70683 - DNA, 20 bp, synthetic construct
  source 1..20: mol_type = other DNA
ggaggccgaggcgggcggat

SEQ ID NO: 70684 - DNA, 20 bp, synthetic construct
  source 1..20: mol_type = other DNA
gggaggccgaggcgggcgga

SEQ ID NO: 70685 - DNA, 20 bp, synthetic construct
  source 1..20: mol_type = other DNA
tgggaggccgaggcgggcgg

SEQ ID NO: 70686 - DNA, 20 bp, synthetic construct
  source 1..20: mol_type = other DNA
ttgggaggccgaggcgggcg

SEQ ID NO: 70687 - DNA, 20 bp, synthetic construct
  source 1..20: mol_type = other DNA
tttgggaggccgaggcgggc

SEQ ID NO: 70688 - DNA, 20 bp, synthetic construct
  source 1..20: mol_type = other DNA
ctttgggaggccgaggcggg

SEQ ID NO: 70689 - DNA, 20 bp, synthetic construct
  source 1..20: mol_type = other DNA
actttgggaggccgaggcgg

SEQ ID NO: 70690 - DNA, 20 bp, synthetic construct
  source 1..20: mol_type = other DNA
cactttgggaggccgaggcg

SEQ ID NO: 70691 - DNA, 20 bp, synthetic construct
  source 1..20: mol_type = other DNA
tcactttgggaggccgaggc

SEQ ID NO: 70692 - DNA, 20 bp, synthetic construct
  source 1..20: mol_type = other DNA
atcactttgggaggccgagg

SEQ ID NO: 70693 - DNA, 20 bp, synthetic construct
  source 1..20: mol_type = other DNA
catcactttgggaggccgag

SEQ ID NO: 70694 - DNA, 20 bp, synthetic construct
  source 1..20: mol_type = other DNA
ccatcactttgggaggccga

SEQ ID NO: 70695 - DNA, 20 bp, synthetic construct
  source 1..20: mol_type = other DNA
cccatcactttgggaggccg

SEQ ID NO: 70696 - DNA, 20 bp, synthetic construct
  source 1..20: mol_type = other DNA
tcccatcactttgggaggcc

SEQ ID NO: 70697 - DNA, 20 bp, synthetic construct
  source 1..20: mol_type = other DNA
atcccatcactttgggaggc

SEQ ID NO: 70698 - DNA, 20 bp, synthetic construct
  source 1..20: mol_type = other DNA
aatcccatcactttgggagg

SEQ ID NO: 70699 - DNA, 20 bp, synthetic construct
  source 1..20: mol_type = other DNA
taatcccatcactttgggag

SEQ ID NO: 70700 - DNA, 20 bp, synthetic construct
  source 1..20: mol_type = other DNA
gtaatcccatcactttggga

SEQ ID NO: 70701 - DNA, 20 bp, synthetic construct
  source 1..20: mol_type = other DNA
tgtaatcccatcactttggg

SEQ ID NO: 70702 - DNA, 20 bp, synthetic construct
  source 1..20: mol_type = other DNA
ctgtaatcccatcactttgg

SEQ ID NO: 70703 - DNA, 20 bp, synthetic construct
  source 1..20: mol_type = other DNA
cctgtaatcccatcactttg

SEQ ID NO: 70704 - DNA, 20 bp, synthetic construct
  source 1..20: mol_type = other DNA
gcctgtaatcccatcacttt

SEQ ID NO: 70705 - DNA, 20 bp, synthetic construct
  source 1..20: mol_type = other DNA
cgcctgtaatcccatcactt

SEQ ID NO: 70706 - DNA, 20 bp, synthetic construct
  source 1..20: mol_type = other DNA
acgcctgtaatcccatcact

SEQ ID NO: 70707 - DNA, 20 bp, synthetic construct
  source 1..20: mol_type = other DNA
gacgcctgtaatcccatcac

SEQ ID NO: 70708 - DNA, 20 bp, synthetic construct
  source 1..20: mol_type = other DNA
tgacgcctgtaatcccatca

SEQ ID NO: 70709 - DNA, 20 bp, synthetic construct
  source 1..20: mol_type = other DNA
ctgacgcctgtaatcccatc

SEQ ID NO: 70710 - DNA, 20 bp, synthetic construct
  source 1..20: mol_type = other DNA
gctgacgcctgtaatcccat

SEQ ID NO: 70711 - DNA, 20 bp, synthetic construct
  source 1..20: mol_type = other DNA
ggctgacgcctgtaatccca

SEQ ID NO: 70712 - DNA, 20 bp, synthetic construct
  source 1..20: mol_type = other DNA
tggctgacgcctgtaatccc

SEQ ID NO: 70713 - DNA, 20 bp, synthetic construct
  source 1..20: mol_type = other DNA
gtggctgacgcctgtaatcc

SEQ ID NO: 70714 - DNA, 20 bp, synthetic construct
  source 1..20: mol_type = other DNA
agtggctgacgcctgtaatc

SEQ ID NO: 70715 - DNA, 20 bp, synthetic construct
  source 1..20: mol_type = other DNA
cagtggctgacgcctgtaat

SEQ ID NO: 70716 - DNA, 20 bp, synthetic construct
  source 1..20: mol_type = other DNA
gcagtggctgacgcctgtaa

SEQ ID NO: 70717 - DNA, 20 bp, synthetic construct
  source 1..20: mol_type = other DNA
tgcagtggctgacgcctgta

SEQ ID NO: 70718 - DNA, 20 bp, synthetic construct
  source 1..20: mol_type = other DNA
gtgcagtggctgacgcctgt

SEQ ID NO: 70719 - DNA, 20 bp, synthetic construct
  source 1..20: mol_type = other DNA
ggtgcagtggctgacgcctg

SEQ ID NO: 70720 - DNA, 20 bp, synthetic construct
  source 1..20: mol_type = other DNA
gggtgcagtggctgacgcct

SEQ ID NO: 70721 - DNA, 20 bp, synthetic construct
  source 1..20: mol_type = other DNA
ggggtgcagtggctgacgcc

SEQ ID NO: 70722 - DNA, 20 bp, synthetic construct
  source 1..20: mol_type = other DNA
cggggtgcagtggctgacgc

SEQ ID NO: 70723 - DNA, 20 bp, synthetic construct
  source 1..20: mol_type = other DNA
gcggggtgcagtggctgacg

SEQ ID NO: 70724 - DNA, 20 bp, synthetic construct
  source 1..20: mol_type = other DNA
ggcggggtgcagtggctgac

SEQ ID NO: 70725 - DNA, 20 bp, synthetic construct
  source 1..20: mol_type = other DNA
aggcggggtgcagtggctga

SEQ ID NO: 70726 - DNA, 20 bp, synthetic construct
  source 1..20: mol_type = other DNA
taggcggggtgcagtggctg

SEQ ID NO: 70727 - DNA, 20 bp, synthetic construct
  source 1..20: mol_type = other DNA
ataggcggggtgcagtggct

SEQ ID NO: 70728 - DNA, 20 bp, synthetic construct
  source 1..20: mol_type = other DNA
tataggcggggtgcagtggc

SEQ ID NO: 70729 - DNA, 20 bp, synthetic construct
  source 1..20: mol_type = other DNA
gtataggcggggtgcagtgg

SEQ ID NO: 70730 - DNA, 20 bp, synthetic construct
  source 1..20: mol_type = other DNA
tgtataggcggggtgcagtg

SEQ ID NO: 70731 - DNA, 20 bp, synthetic construct
  source 1..20: mol_type = other DNA
gtgtataggcggggtgcagt

SEQ ID NO: 70732 - DNA, 20 bp, synthetic construct
  source 1..20: mol_type = other DNA
tgtgtataggcggggtgcag

SEQ ID NO: 70733 - DNA, 20 bp, synthetic construct
  source 1..20: mol_type = other DNA
atgtgtataggcggggtgca

SEQ ID NO: 70734 - DNA, 20 bp, synthetic construct
  source 1..20: mol_type = other DNA
aatgtgtataggcggggtgc

SEQ ID NO: 70735 - DNA, 20 bp, synthetic construct
  source 1..20: mol_type = other DNA
aaatgtgtataggcggggtg

SEQ ID NO: 70736 - DNA, 20 bp, synthetic construct
  source 1..20: mol_type = other DNA
aaaatgtgtataggcggggt

SEQ ID NO: 70737 - DNA, 20 bp, synthetic construct
  source 1..20: mol_type = other DNA
aaaaatgtgtataggcgggg

SEQ ID NO: 70738 - DNA, 20 bp, synthetic construct
  source 1..20: mol_type = other DNA
aaaaaatgtgtataggcggg

SEQ ID NO: 70739 - DNA, 20 bp, synthetic construct
  source 1..20: mol_type = other DNA
aaaaaaatgtgtataggcgg

SEQ ID NO: 70740 - DNA, 20 bp, synthetic construct
  source 1..20: mol_type = other DNA
caaaaaaatgtgtataggcg

SEQ ID NO: 70741 - DNA, 20 bp, synthetic construct
  source 1..20: mol_type = other DNA
acaaaaaaatgtgtataggc

SEQ ID NO: 70742 - DNA, 20 bp, synthetic construct
  source 1..20: mol_type = other DNA
aacaaaaaaatgtgtatagg

SEQ ID NO: 70743 - DNA, 20 bp, synthetic construct
  source 1..20: mol_type = other DNA
aaacaaaaaaatgtgtatag

SEQ ID NO: 70744 - DNA, 20 bp, synthetic construct
  source 1..20: mol_type = other DNA
aaaacaaaaaaatgtgtata

SEQ ID NO: 70745 - DNA, 20 bp, synthetic construct
  source 1..20: mol_type = other DNA
aaaaacaaaaaaatgtgtat

SEQ ID NO: 70746 - DNA, 20 bp, synthetic construct
  source 1..20: mol_type = other DNA
aaaaaacaaaaaaatgtgta

SEQ ID NO: 70747 - DNA, 20 bp, synthetic construct
  source 1..20: mol_type = other DNA
caaaaaacaaaaaaatgtgt

SEQ ID NO: 70748 - DNA, 20 bp, synthetic construct
  source 1..20: mol_type = other DNA
acaaaaaacaaaaaaatgtg

SEQ ID NO: 70749 - DNA, 20 bp, synthetic construct
  source 1..20: mol_type = other DNA
aacaaaaaacaaaaaaatgt

SEQ ID NO: 70750 - DNA, 20 bp, synthetic construct
  source 1..20: mol_type = other DNA
aaacaaaaaacaaaaaaatg

SEQ ID NO: 70751 - DNA, 20 bp, synthetic construct
  source 1..20: mol_type = other DNA
aaaacaaaaaacaaaaaaat

SEQ ID NO: 70752 - DNA, 20 bp, synthetic construct
  source 1..20: mol_type = other DNA
aaaaacaaaaaacaaaaaaa

SEQ ID NO: 70753 - DNA, 20 bp, synthetic construct
  source 1..20: mol_type = other DNA
aaaaaacaaaaaacaaaaaa

SEQ ID NO: 70754 - DNA, 20 bp, synthetic construct
  source 1..20: mol_type = other DNA
aaaaaaacaaaaaacaaaaa

SEQ ID NO: 70755 - DNA, 20 bp, synthetic construct
  source 1..20: mol_type = other DNA
caaaaaaacaaaaaacaaaa

SEQ ID NO: 70756 - DNA, 20 bp, synthetic construct
  source 1..20: mol_type = other DNA
tcaaaaaaacaaaaaacaaa

SEQ ID NO: 70757 - DNA, 20 bp, synthetic construct
  source 1..20: mol_type = other DNA
ctcaaaaaaacaaaaaacaa

SEQ ID NO: 70758 - DNA, 20 bp, synthetic construct
  source 1..20: mol_type = other DNA
tctcaaaaaaacaaaaaaca

SEQ ID NO: 70759 - DNA, 20 bp, synthetic construct
  source 1..20: mol_type = other DNA
atctcaaaaaaacaaaaaac

SEQ ID NO: 70760 - DNA, 20 bp, synthetic construct
  source 1..20: mol_type = other DNA
catctcaaaaaaacaaaaaa

SEQ ID NO: 70761 - DNA, 20 bp, synthetic construct
  source 1..20: mol_type = other DNA
ccatctcaaaaaaacaaaaa

SEQ ID NO: 70762 - DNA, 20 bp, synthetic construct
  source 1..20: mol_type = other DNA
tccatctcaaaaaaacaaaa

SEQ ID NO: 70763 - DNA, 20 bp, synthetic construct
  source 1..20: mol_type = other DNA
ctccatctcaaaaaaacaaa

SEQ ID NO: 70764 - DNA, 20 bp, synthetic construct
  source 1..20: mol_type = other DNA
actccatctcaaaaaaacaa

SEQ ID NO: 70765 - DNA, 20 bp, synthetic construct
  source 1..20: mol_type = other DNA
gactccatctcaaaaaaaca

SEQ ID NO: 70766 - DNA, 20 bp, synthetic construct
  source 1..20: mol_type = other DNA
agactccatctcaaaaaaac

SEQ ID NO: 70767 - DNA, 20 bp, synthetic construct
  source 1..20: mol_type = other DNA
gagactccatctcaaaaaaa

SEQ ID NO: 70768 - DNA, 20 bp, synthetic construct
  source 1..20: mol_type = other DNA
cgagactccatctcaaaaaa

SEQ ID NO: 70769 - DNA, 20 bp, synthetic construct
  source 1..20: mol_type = other DNA
gcgagactccatctcaaaaa

SEQ ID NO: 70770 - DNA, 20 bp, synthetic construct
  source 1..20: mol_type = other DNA
agcgagactccatctcaaaa

SEQ ID NO: 70771 - DNA, 20 bp, synthetic construct
  source 1..20: mol_type = other DNA
gagcgagactccatctcaaa

SEQ ID NO: 70772 - DNA, 20 bp, synthetic construct
  source 1..20: mol_type = other DNA
agagcgagactccatctcaa

SEQ ID NO: 70773 - DNA, 20 bp, synthetic construct
  source 1..20: mol_type = other DNA
cagagcgagactccatctca

SEQ ID NO: 70774 - DNA, 20 bp, synthetic construct
  source 1..20: mol_type = other DNA
acagagcgagactccatctc

SEQ ID NO: 70775 - DNA, 20 bp, synthetic construct
  source 1..20: mol_type = other DNA
aacagagcgagactccatct

SEQ ID NO: 70776 - DNA, 20 bp, synthetic construct
  source 1..20: mol_type = other DNA
caacagagcgagactccatc

SEQ ID NO: 70777 - DNA, 20 bp, synthetic construct
  source 1..20: mol_type = other DNA
acaacagagcgagactccat

SEQ ID NO: 70778 - DNA, 20 bp, synthetic construct
  source 1..20: mol_type = other DNA
gacaacagagcgagactcca

SEQ ID NO: 70779 - DNA, 20 bp, synthetic construct
  source 1..20: mol_type = other DNA
ggacaacagagcgagactcc

SEQ ID NO: 70780 - DNA, 20 bp, synthetic construct
  source 1..20: mol_type = other DNA
tggacaacagagcgagactc

SEQ ID NO: 70781 - DNA, 20 bp, synthetic construct
  source 1..20: mol_type = other DNA
ctggacaacagagcgagact

SEQ ID NO: 70782 - DNA, 20 bp, synthetic construct
  source 1..20: mol_type = other DNA
cctggacaacagagcgagac

SEQ ID NO: 70783 - DNA, 20 bp, synthetic construct
  source 1..20: mol_type = other DNA
gcctggacaacagagcgaga

SEQ ID NO: 70784 - DNA, 20 bp, synthetic construct
  source 1..20: mol_type = other DNA
agcctggacaacagagcgag

SEQ ID NO: 70785 - DNA, 20 bp, synthetic construct
  source 1..20: mol_type = other DNA
cagcctggacaacagagcga

SEQ ID NO: 70786 - DNA, 20 bp, synthetic construct
  source 1..20: mol_type = other DNA
ccagcctggacaacagagcg

SEQ ID NO: 70787 - DNA, 20 bp, synthetic construct
  source 1..20: mol_type = other DNA
tccagcctggacaacagagc

SEQ ID NO: 70788 - DNA, 20 bp, synthetic construct
  source 1..20: mol_type = other DNA
ctccagcctggacaacagag

SEQ ID NO: 70789 - DNA, 20 bp, synthetic construct
  source 1..20: mol_type = other DNA
actccagcctggacaacaga

SEQ ID NO: 70790 - DNA, 20 bp, synthetic construct
  source 1..20: mol_type = other DNA
cactccagcctggacaacag

SEQ ID NO: 70791 - DNA, 20 bp, synthetic construct
  source 1..20: mol_type = other DNA
gcactccagcctggacaaca

SEQ ID NO: 70792 - DNA, 20 bp, synthetic construct
  source 1..20: mol_type = other DNA
tgcactccagcctggacaac

SEQ ID NO: 70793 - DNA, 20 bp, synthetic construct
  source 1..20: mol_type = other DNA
ctgcactccagcctggacaa

SEQ ID NO: 70794 - DNA, 20 bp, synthetic construct
  source 1..20: mol_type = other DNA
actgcactccagcctggaca

SEQ ID NO: 70795 - DNA, 20 bp, synthetic construct
  source 1..20: mol_type = other DNA
cactgcactccagcctggac

SEQ ID NO: 70796 - DNA, 20 bp, synthetic construct
  source 1..20: mol_type = other DNA
ccactgcactccagcctgga

SEQ ID NO: 70797 - DNA, 20 bp, synthetic construct
  source 1..20: mol_type = other DNA
gccactgcactccagcctgg

SEQ ID NO: 70798 - DNA, 20 bp, synthetic construct
  source 1..20: mol_type = other DNA
cgccactgcactccagcctg

SEQ ID NO: 70799 - DNA, 20 bp, synthetic construct
  source 1..20: mol_type = other DNA
gcgccactgcactccagcct

SEQ ID NO: 70800 - DNA, 20 bp, synthetic construct
  source 1..20: mol_type = other DNA
cgcgccactgcactccagcc

SEQ ID NO: 70801 - DNA, 20 bp, synthetic construct
  source 1..20: mol_type = other DNA
tcgcgccactgcactccagc

SEQ ID NO: 70802 - DNA, 20 bp, synthetic construct
  source 1..20: mol_type = other DNA
atcgcgccactgcactccag

SEQ ID NO: 70803 - DNA, 20 bp, synthetic construct
  source 1..20: mol_type = other DNA
gatcgcgccactgcactcca

SEQ ID NO: 70804 - DNA, 20 bp, synthetic construct
  source 1..20: mol_type = other DNA
agatcgcgccactgcactcc

SEQ ID NO: 70805 - DNA, 20 bp, synthetic construct
  source 1..20: mol_type = other DNA
gagatcgcgccactgcactc

SEQ ID NO: 70806 - DNA, 20 bp, synthetic construct
  source 1..20: mol_type = other DNA
agagatcgcgccactgcact

SEQ ID NO: 70807 - DNA, 20 bp, synthetic construct
  source 1..20: mol_type = other DNA
cagagatcgcgccactgcac

SEQ ID NO: 70808 - DNA, 20 bp, synthetic construct
  source 1..20: mol_type = other DNA
gcagagatcgcgccactgca

SEQ ID NO: 70809 - DNA, 20 bp, synthetic construct
  source 1..20: mol_type = other DNA
agcagagatcgcgccactgc

SEQ ID NO: 70810 - DNA, 20 bp, synthetic construct
  source 1..20: mol_type = other DNA
gagcagagatcgcgccactg

SEQ ID NO: 70811 - DNA, 20 bp, synthetic construct
  source 1..20: mol_type = other DNA
tgagcagagatcgcgccact

SEQ ID NO: 70812 - DNA, 20 bp, synthetic construct
  source 1..20: mol_type = other DNA
gtgagcagagatcgcgccac

SEQ ID NO: 70813 - DNA, 20 bp, synthetic construct
  source 1..20: mol_type = other DNA
agtgagcagagatcgcgcca

SEQ ID NO: 70814 - DNA, 20 bp, synthetic construct
  source 1..20: mol_type = other DNA
cagtgagcagagatcgcgcc

SEQ ID NO: 70815 - DNA, 20 bp, synthetic construct
  source 1..20: mol_type = other DNA
gcagtgagcagagatcgcgc

SEQ ID NO: 70816 - DNA, 20 bp, synthetic construct
  source 1..20: mol_type = other DNA
tgcagtgagcagagatcgcg

SEQ ID NO: 70817 - DNA, 20 bp, synthetic construct
  source 1..20: mol_type = other DNA
ttgcagtgagcagagatcgc

SEQ ID NO: 70818 - DNA, 20 bp, synthetic construct
  source 1..20: mol_type = other DNA
cttgcagtgagcagagatcg

SEQ ID NO: 70819 - DNA, 20 bp, synthetic construct
  source 1..20: mol_type = other DNA
gcttgcagtgagcagagatc

SEQ ID NO: 70820 - DNA, 20 bp, synthetic construct
  source 1..20: mol_type = other DNA
agcttgcagtgagcagagat

SEQ ID NO: 70821 - DNA, 20 bp, synthetic construct
  source 1..20: mol_type = other DNA
gagcttgcagtgagcagaga

SEQ ID NO: 70822 - DNA, 20 bp, synthetic construct
  source 1..20: mol_type = other DNA
agagcttgcagtgagcagag

SEQ ID NO: 70823 - DNA, 20 bp, synthetic construct
  source 1..20: mol_type = other DNA
cagagcttgcagtgagcaga

SEQ ID NO: 70824 - DNA, 20 bp, synthetic construct
  source 1..20: mol_type = other DNA
gcagagcttgcagtgagcag

SEQ ID NO: 70825 - DNA, 20 bp, synthetic construct
  source 1..20: mol_type = other DNA
ggcagagcttgcagtgagca

SEQ ID NO: 70826 - DNA, 20 bp, synthetic construct
  source 1..20: mol_type = other DNA
aggcagagcttgcagtgagc

SEQ ID NO: 70827 - DNA, 20 bp, synthetic construct
  source 1..20: mol_type = other DNA
gaggcagagcttgcagtgag

SEQ ID NO: 70828 - DNA, 20 bp, synthetic construct
  source 1..20: mol_type = other DNA
ggaggcagagcttgcagtga

SEQ ID NO: 70829 - DNA, 20 bp, synthetic construct
  source 1..20: mol_type = other DNA
gggaggcagagcttgcagtg

SEQ ID NO: 70830 - DNA, 20 bp, synthetic construct
  source 1..20: mol_type = other DNA
agggaggcagagcttgcagt

SEQ ID NO: 70831 - DNA, 20 bp, synthetic construct
  source 1..20: mol_type = other DNA
cagggaggcagagcttgcag

SEQ ID NO: 70832 - DNA, 20 bp, synthetic construct
  source 1..20: mol_type = other DNA
ccagggaggcagagcttgca

SEQ ID NO: 70833 - DNA, 20 bp, synthetic construct
  source 1..20: mol_type = other DNA
accagggaggcagagcttgc

SEQ ID NO: 70834 - DNA, 20 bp, synthetic construct
  source 1..20: mol_type = other DNA
aaccagggaggcagagcttg

SEQ ID NO: 70835 - DNA, 20 bp, synthetic construct
  source 1..20: mol_type = other DNA
gaaccagggaggcagagctt

SEQ ID NO: 70836 - DNA, 20 bp, synthetic construct
  source 1..20: mol_type = other DNA
tgaaccagggaggcagagct

SEQ ID NO: 70837 - DNA, 20 bp, synthetic construct
  source 1..20: mol_type = other DNA
gtgaaccagggaggcagagc

SEQ ID NO: 70838 - DNA, 20 bp, synthetic construct
  source 1..20: mol_type = other DNA
tgtgaaccagggaggcagag

SEQ ID NO: 70839 - DNA, 20 bp, synthetic construct
  source 1..20: mol_type = other DNA
gtgtgaaccagggaggcaga

SEQ ID NO: 70840 - DNA, 20 bp, synthetic construct
  source 1..20: mol_type = other DNA
ggtgtgaaccagggaggcag

SEQ ID NO: 70841 - DNA, 20 bp, synthetic construct
  source 1..20: mol_type = other DNA
tggtgtgaaccagggaggca

SEQ ID NO: 70842 - DNA, 20 bp, synthetic construct
  source 1..20: mol_type = other DNA
atggtgtgaaccagggaggc

SEQ ID NO: 70843 - DNA, 20 bp, synthetic construct
  source 1..20: mol_type = other DNA
aatggtgtgaaccagggagg

SEQ ID NO: 70844 - DNA, 20 bp, synthetic construct
  source 1..20: mol_type = other DNA
gaatggtgtgaaccagggag

SEQ ID NO: 70845 - DNA, 20 bp, synthetic construct
  source 1..20: mol_type = other DNA
agaatggtgtgaaccaggga

SEQ ID NO: 70846 - DNA, 20 bp, synthetic construct
  source 1..20: mol_type = other DNA
gagaatggtgtgaaccaggg

SEQ ID NO: 70847 - DNA, 20 bp, synthetic construct
  source 1..20: mol_type = other DNA
ggagaatggtgtgaaccagg

SEQ ID NO: 70848 - DNA, 20 bp, synthetic construct
  source 1..20: mol_type = other DNA
aggagaatggtgtgaaccag

SEQ ID NO: 70849 - DNA, 20 bp, synthetic construct
  source 1..20: mol_type = other DNA
caggagaatggtgtgaacca

SEQ ID NO: 70850 - DNA, 20 bp, synthetic construct
  source 1..20: mol_type = other DNA
gcaggagaatggtgtgaacc

SEQ ID NO: 70851 - DNA, 20 bp, synthetic construct
  source 1..20: mol_type = other DNA
ggcaggagaatggtgtgaac

SEQ ID NO: 70852 - DNA, 20 bp, synthetic construct
  source 1..20: mol_type = other DNA
aggcaggagaatggtgtgaa

SEQ ID NO: 70853 - DNA, 20 bp, synthetic construct
  source 1..20: mol_type = other DNA
gaggcaggagaatggtgtga

SEQ ID NO: 70854 - DNA, 20 bp, synthetic construct
  source 1..20: mol_type = other DNA
tgaggcaggagaatggtgtg

SEQ ID NO: 70855 - DNA, 20 bp, synthetic construct
  source 1..20: mol_type = other DNA
ctgaggcaggagaatggtgt

SEQ ID NO: 70856 - DNA, 20 bp, synthetic construct
  source 1..20: mol_type = other DNA
gctgaggcaggagaatggtg

SEQ ID NO: 70857 - DNA, 20 bp, synthetic construct
  source 1..20: mol_type = other DNA
ggctgaggcaggagaatggt

SEQ ID NO: 70858 - DNA, 20 bp, synthetic construct
  source 1..20: mol_type = other DNA
aggctgaggcaggagaatgg

SEQ ID NO: 70859 - DNA, 20 bp, synthetic construct
  source 1..20: mol_type = other DNA
gaggctgaggcaggagaatg

SEQ ID NO: 70860 - DNA, 20 bp, synthetic construct
  source 1..20: mol_type = other DNA
ggaggctgaggcaggagaat

SEQ ID NO: 70861 - DNA, 20 bp, synthetic construct
  source 1..20: mol_type = other DNA
gggaggctgaggcaggagaa

SEQ ID NO: 70862 - DNA, 20 bp, synthetic construct
  source 1..20: mol_type = other DNA
cgggaggctgaggcaggaga

SEQ ID NO: 70863 - DNA, 20 bp, synthetic construct
  source 1..20: mol_type = other DNA
tcgggaggctgaggcaggag

SEQ ID NO: 70864 - DNA, 20 bp, synthetic construct
  source 1..20: mol_type = other DNA
ctcgggaggctgaggcagga

SEQ ID NO: 70865 - DNA, 20 bp, synthetic construct
  source 1..20: mol_type = other DNA
actcgggaggctgaggcagg

SEQ ID NO: 70866 - DNA, 20 bp, synthetic construct
  source 1..20: mol_type = other DNA
tactcgggaggctgaggcag

SEQ ID NO: 70867 - DNA, 20 bp, synthetic construct
  source 1..20: mol_type = other DNA
ctactcgggaggctgaggca

SEQ ID NO: 70868 - DNA, 20 bp, synthetic construct
  source 1..20: mol_type = other DNA
gctactcgggaggctgaggc

SEQ ID NO: 70869 - DNA, 20 bp, synthetic construct
  source 1..20: mol_type = other DNA
agctactcgggaggctgagg

SEQ ID NO: 70870 - DNA, 20 bp, synthetic construct
  source 1..20: mol_type = other DNA
cagctactcgggaggctgag

SEQ ID NO: 70871 - DNA, 20 bp, synthetic construct
  source 1..20: mol_type = other DNA
ccagctactcgggaggctga

SEQ ID NO: 70872 - DNA, 20 bp, synthetic construct
  source 1..20: mol_type = other DNA
cccagctactcgggaggctg

SEQ ID NO: 70873 - DNA, 20 bp, synthetic construct
  source 1..20: mol_type = other DNA
tcccagctactcgggaggct

SEQ ID NO: 70874 - DNA, 20 bp, synthetic construct
  source 1..20: mol_type = other DNA
atcccagctactcgggaggc

SEQ ID NO: 70875 - DNA, 20 bp, synthetic construct
  source 1..20: mol_type = other DNA
aatcccagctactcgggagg

SEQ ID NO: 70876 - DNA, 20 bp, synthetic construct
  source 1..20: mol_type = other DNA
taatcccagctactcgggag

SEQ ID NO: 70877 - DNA, 20 bp, synthetic construct
  source 1..20: mol_type = other DNA
gtaatcccagctactcggga

SEQ ID NO: 70878 - DNA, 20 bp, synthetic construct
  source 1..20: mol_type = other DNA
tgtaatcccagctactcggg

SEQ ID NO: 70879 - DNA, 20 bp, synthetic construct
  source 1..20: mol_type = other DNA
ctgtaatcccagctactcgg

SEQ ID NO: 70880 - DNA, 20 bp, synthetic construct
  source 1..20: mol_type = other DNA
cctgtaatcccagctactcg

SEQ ID NO: 70881 - DNA, 20 bp, synthetic construct
  source 1..20: mol_type = other DNA
gcctgtaatcccagctactc

SEQ ID NO: 70882 - DNA, 20 bp, synthetic construct
  source 1..20: mol_type = other DNA
cgcctgtaatcccagctact

SEQ ID NO: 70883 - DNA, 20 bp, synthetic construct
  source 1..20: mol_type = other DNA
gcgcctgtaatcccagctac

SEQ ID NO: 70884 - DNA, 20 bp, synthetic construct
  source 1..20: mol_type = other DNA
ggcgcctgtaatcccagcta

SEQ ID NO: 70885 - DNA, 20 bp, synthetic construct
  source 1..20: mol_type = other DNA
cggcgcctgtaatcccagct

SEQ ID NO: 70886 - DNA, 20 bp, synthetic construct
  source 1..20: mol_type = other DNA
ccggcgcctgtaatcccagc

SEQ ID NO: 70887 - DNA, 20 bp, synthetic construct
  source 1..20: mol_type = other DNA
gccggcgcctgtaatcccag

SEQ ID NO: 70888 - DNA, 20 bp, synthetic construct
  source 1..20: mol_type = other DNA
ggccggcgcctgtaatccca

SEQ ID NO: 70889 - DNA, 20 bp, synthetic construct
  source 1..20: mol_type = other DNA
tggccggcgcctgtaatccc

SEQ ID NO: 70890 - DNA, 20 bp, synthetic construct
  source 1..20: mol_type = other DNA
gtggccggcgcctgtaatcc

SEQ ID NO: 70891 - DNA, 20 bp, synthetic construct
  source 1..20: mol_type = other DNA
agtggccggcgcctgtaatc

SEQ ID NO: 70892 - DNA, 20 bp, synthetic construct
  source 1..20: mol_type = other DNA
tagtggccggcgcctgtaat

SEQ ID NO: 70893 - DNA, 20 bp, synthetic construct
  source 1..20: mol_type = other DNA
gtagtggccggcgcctgtaa

SEQ ID NO: 70894 - DNA, 20 bp, synthetic construct
  source 1..20: mol_type = other DNA
cgtagtggccggcgcctgta

SEQ ID NO: 70895 - DNA, 20 bp, synthetic construct
  source 1..20: mol_type = other DNA
gcgtagtggccggcgcctgt

SEQ ID NO: 70896 - DNA, 20 bp, synthetic construct
  source 1..20: mol_type = other DNA
ggcgtagtggccggcgcctg

SEQ ID NO: 70897 - DNA, 20 bp, synthetic construct
  source 1..20: mol_type = other DNA
gggcgtagtggccggcgcct

SEQ ID NO: 70898 - DNA, 20 bp, synthetic construct
  source 1..20: mol_type = other DNA
tgggcgtagtggccggcgcc

SEQ ID NO: 70899 - DNA, 20 bp, synthetic construct
  source 1..20: mol_type = other DNA
atgggcgtagtggccggcgc

SEQ ID NO: 70900 - DNA, 20 bp, synthetic construct
  source 1..20: mol_type = other DNA
gatgggcgtagtggccggcg

SEQ ID NO: 70901 - DNA, 20 bp, synthetic construct
  source 1..20: mol_type = other DNA
agatgggcgtagtggccggc

SEQ ID NO: 70902 - DNA, 20 bp, synthetic construct
  source 1..20: mol_type = other DNA
tagatgggcgtagtggccgg

SEQ ID NO: 70903 - DNA, 20 bp, synthetic construct
  source 1..20: mol_type = other DNA
ttagatgggcgtagtggccg

SEQ ID NO: 70904 - DNA, 20 bp, synthetic construct
  source 1..20: mol_type = other DNA
gttagatgggcgtagtggcc

SEQ ID NO: 70905 - DNA, 20 bp, synthetic construct
  source 1..20: mol_type = other DNA
agttagatgggcgtagtggc

SEQ ID NO: 70906 - DNA, 20 bp, synthetic construct
  source 1..20: mol_type = other DNA
aagttagatgggcgtagtgg

SEQ ID NO: 70907 - DNA, 20 bp, synthetic construct
  source 1..20: mol_type = other DNA
aaagttagatgggcgtagtg

SEQ ID NO: 70908 - DNA, 20 bp, synthetic construct
  source 1..20: mol_type = other DNA
aaaagttagatgggcgtagt

SEQ ID NO: 70909 - DNA, 20 bp, synthetic construct
  source 1..20: mol_type = other DNA
aaaaagttagatgggcgtag

SEQ ID NO: 70910 - DNA, 20 bp, synthetic construct
  source 1..20: mol_type = other DNA
caaaaagttagatgggcgta

SEQ ID NO: 70911 - DNA, 20 bp, synthetic construct
  source 1..20: mol_type = other DNA
acaaaaagttagatgggcgt

SEQ ID NO: 70912 - DNA, 20 bp, synthetic construct
  source 1..20: mol_type = other DNA
tacaaaaagttagatgggcg

SEQ ID NO: 70913 - DNA, 20 bp, synthetic construct
  source 1..20: mol_type = other DNA
atacaaaaagttagatgggc

SEQ ID NO: 70914 - DNA, 20 bp, synthetic construct
  source 1..20: mol_type = other DNA
aatacaaaaagttagatggg

SEQ ID NO: 70915 - DNA, 20 bp, synthetic construct
  source 1..20: mol_type = other DNA
aaatacaaaaagttagatgg

SEQ ID NO: 70916 - DNA, 20 bp, synthetic construct
  source 1..20: mol_type = other DNA
aaaatacaaaaagttagatg

SEQ ID NO: 70917 - DNA, 20 bp, synthetic construct
  source 1..20: mol_type = other DNA
aaaaatacaaaaagttagat

SEQ ID NO: 70918 - DNA, 20 bp, synthetic construct
  source 1..20: mol_type = other DNA
taaaaatacaaaaagttaga

SEQ ID NO: 70919 - DNA, 20 bp, synthetic construct
  source 1..20: mol_type = other DNA
ctaaaaatacaaaaagttag

SEQ ID NO: 70920 - DNA, 20 bp, synthetic construct
  source 1..20: mol_type = other DNA
actaaaaatacaaaaagtta

SEQ ID NO: 70921 - DNA, 20 bp, synthetic construct
  source 1..20: mol_type = other DNA
tactaaaaatacaaaaagtt

SEQ ID NO: 70922 - DNA, 20 bp, synthetic construct
  source 1..20: mol_type = other DNA
ctactaaaaatacaaaaagt

SEQ ID NO: 70923 - DNA, 20 bp, synthetic construct
  source 1..20: mol_type = other DNA
tctactaaaaatacaaaaag

SEQ ID NO: 70924 - DNA, 20 bp, synthetic construct
  source 1..20: mol_type = other DNA
ctctactaaaaatacaaaaa

SEQ ID NO: 70925 - DNA, 20 bp, synthetic construct
  source 1..20: mol_type = other DNA
tctctactaaaaatacaaaa

SEQ ID NO: 70926 - DNA, 20 bp, synthetic construct
  source 1..20: mol_type = other DNA
atctctactaaaaatacaaa

SEQ ID NO: 70927 - DNA, 20 bp, synthetic construct
  source 1..20: mol_type = other DNA
catctctactaaaaatacaa

SEQ ID NO: 70928 - DNA, 20 bp, synthetic construct
  source 1..20: mol_type = other DNA
ccatctctactaaaaataca

SEQ ID NO: 70929 - DNA, 20 bp, synthetic construct
  source 1..20: mol_type = other DNA
cccatctctactaaaaatac

SEQ ID NO: 70930 - DNA, 20 bp, synthetic construct
  source 1..20: mol_type = other DNA
ccccatctctactaaaaata

SEQ ID NO: 70931 - DNA, 20 bp, synthetic construct
  source 1..20: mol_type = other DNA
accccatctctactaaaaat

SEQ ID NO: 70932 - DNA, 20 bp, synthetic construct
  source 1..20: mol_type = other DNA
aaccccatctctactaaaaa

SEQ ID NO: 70933 - DNA, 20 bp, synthetic construct
  source 1..20: mol_type = other DNA
aaaccccatctctactaaaa

SEQ ID NO: 70934 - DNA, 20 bp, synthetic construct
  source 1..20: mol_type = other DNA
gaaaccccatctctactaaa

SEQ ID NO: 70935 - DNA, 20 bp, synthetic construct
  source 1..20: mol_type = other DNA
tgaaaccccatctctactaa

SEQ ID NO: 70936 - DNA, 20 bp, synthetic construct
  source 1..20: mol_type = other DNA
gtgaaaccccatctctacta

SEQ ID NO: 70937 - DNA, 20 bp, synthetic construct
  source 1..20: mol_type = other DNA
ggtgaaaccccatctctact

SEQ ID NO: 70938 - DNA, 20 bp, synthetic construct
  source 1..20: mol_type = other DNA
cggtgaaaccccatctctac

SEQ ID NO: 70939 - DNA, 20 bp, synthetic construct
  source 1..20: mol_type = other DNA
acggtgaaaccccatctcta

SEQ ID NO: 70940 - DNA, 20 bp, synthetic construct
  source 1..20: mol_type = other DNA
cacggtgaaaccccatctct

SEQ ID NO: 70941 - DNA, 20 bp, synthetic construct
  source 1..20: mol_type = other DNA
acacggtgaaaccccatctc

SEQ ID NO: 70942 - DNA, 20 bp, synthetic construct
  source 1..20: mol_type = other DNA
aacacggtgaaaccccatct

SEQ ID NO: 70943 - DNA, 20 bp, synthetic construct
  source 1..20: mol_type = other DNA
taacacggtgaaaccccatc

SEQ ID NO: 70944 - DNA, 20 bp, synthetic construct
  source 1..20: mol_type = other DNA
ttaacacggtgaaaccccat

SEQ ID NO: 70945 - DNA, 20 bp, synthetic construct
  source 1..20: mol_type = other DNA
gttaacacggtgaaacccca

SEQ ID NO: 70946 - DNA, 20 bp, synthetic construct
  source 1..20: mol_type = other DNA
ggttaacacggtgaaacccc

SEQ ID NO: 70947 - DNA, 20 bp, synthetic construct
  source 1..20: mol_type = other DNA
tggttaacacggtgaaaccc

SEQ ID NO: 70948 - DNA, 20 bp, synthetic construct
  source 1..20: mol_type = other DNA
ctggttaacacggtgaaacc

SEQ ID NO: 70949 - DNA, 20 bp, synthetic construct
  source 1..20: mol_type = other DNA
cctggttaacacggtgaaac

SEQ ID NO: 70950 - DNA, 20 bp, synthetic construct
  source 1..20: mol_type = other DNA
tcctggttaacacggtgaaa

SEQ ID NO: 70951 - DNA, 20 bp, synthetic construct
  source 1..20: mol_type = other DNA
atcctggttaacacggtgaa

SEQ ID NO: 70952 - DNA, 20 bp, synthetic construct
  source 1..20: mol_type = other DNA
catcctggttaacacggtga

SEQ ID NO: 70953 - DNA, 20 bp, synthetic construct
  source 1..20: mol_type = other DNA
ccatcctggttaacacggtg

SEQ ID NO: 70954 - DNA, 20 bp, synthetic construct
  source 1..20: mol_type = other DNA
accatcctggttaacacggt

SEQ ID NO: 70955 - DNA, 20 bp, synthetic construct
  source 1..20: mol_type = other DNA
gaccatcctggttaacacgg

SEQ ID NO: 70956 - DNA, 20 bp, synthetic construct
  source 1..20: mol_type = other DNA
agaccatcctggttaacacg

SEQ ID NO: 70957 - DNA, 20 bp, synthetic construct
  source 1..20: mol_type = other DNA
aagaccatcctggttaacac

SEQ ID NO: 70958 - DNA, 20 bp, synthetic construct
  source 1..20: mol_type = other DNA
caagaccatcctggttaaca

SEQ ID NO: 70959 - DNA, 20 bp, synthetic construct
  source 1..20: mol_type = other DNA
tcaagaccatcctggttaac

SEQ ID NO: 70960 - DNA, 20 bp, synthetic construct
  source 1..20: mol_type = other DNA
atcaagaccatcctggttaa

SEQ ID NO: 70961 - DNA, 20 bp, synthetic construct
  source 1..20: mol_type = other DNA
gatcaagaccatcctggtta

SEQ ID NO: 70962 - DNA, 20 bp, synthetic construct
  source 1..20: mol_type = other DNA
agatcaagaccatcctggtt

SEQ ID NO: 70963 - DNA, 20 bp, synthetic construct
  source 1..20: mol_type = other DNA
gagatcaagaccatcctggt

SEQ ID NO: 70964 - DNA, 20 bp, synthetic construct
  source 1..20: mol_type = other DNA
ggagatcaagaccatcctgg

SEQ ID NO: 70965 - DNA, 20 bp, synthetic construct
  source 1..20: mol_type = other DNA
aggagatcaagaccatcctg

SEQ ID NO: 70966 - DNA, 20 bp, synthetic construct
  source 1..20: mol_type = other DNA
caggagatcaagaccatcct

SEQ ID NO: 70967 - DNA, 20 bp, synthetic construct
  source 1..20: mol_type = other DNA
tcaggagatcaagaccatcc

SEQ ID NO: 70968 - DNA, 20 bp, synthetic construct
  source 1..20: mol_type = other DNA
gtcaggagatcaagaccatc

SEQ ID NO: 70969 - DNA, 20 bp, synthetic construct
  source 1..20: mol_type = other DNA
ggtcaggagatcaagaccat

SEQ ID NO: 70970 - DNA, 20 bp, synthetic construct
  source 1..20: mol_type = other DNA
aggtcaggagatcaagacca

SEQ ID NO: 70971 - DNA, 20 bp, synthetic construct
  source 1..20: mol_type = other DNA
gaggtcaggagatcaagacc

SEQ ID NO: 70972 - DNA, 20 bp, synthetic construct
  source 1..20: mol_type = other DNA
cgaggtcaggagatcaagac

SEQ ID NO: 70973 - DNA, 20 bp, synthetic construct
  source 1..20: mol_type = other DNA
acgaggtcaggagatcaaga

SEQ ID NO: 70974 - DNA, 20 bp, synthetic construct
  source 1..20: mol_type = other DNA
cacgaggtcaggagatcaag

SEQ ID NO: 70975 - DNA, 20 bp, synthetic construct
  source 1..20: mol_type = other DNA
tcacgaggtcaggagatcaa

SEQ ID NO: 70976 - DNA, 20 bp, synthetic construct
  source 1..20: mol_type = other DNA
atcacgaggtcaggagatca

SEQ ID NO: 70977 - DNA, 20 bp, synthetic construct
  source 1..20: mol_type = other DNA
gatcacgaggtcaggagatc

SEQ ID NO: 70978 - DNA, 20 bp, synthetic construct
  source 1..20: mol_type = other DNA
agatcacgaggtcaggagat

SEQ ID NO: 70979 - DNA, 20 bp, synthetic construct
  source 1..20: mol_type = other DNA
cagatcacgaggtcaggaga

SEQ ID NO: 70980 - DNA, 20 bp, synthetic construct
  source 1..20: mol_type = other DNA
gcagatcacgaggtcaggag

SEQ ID NO: 70981 - DNA, 20 bp, synthetic construct
  source 1..20: mol_type = other DNA
ggcagatcacgaggtcagga

SEQ ID NO: 70982 - DNA, 20 bp, synthetic construct
  source 1..20: mol_type = other DNA
aggcagatcacgaggtcagg

SEQ ID NO: 70983 - DNA, 20 bp, synthetic construct
  source 1..20: mol_type = other DNA
caggcagatcacgaggtcag

SEQ ID NO: 70984 - DNA, 20 bp, synthetic construct
  source 1..20: mol_type = other DNA
tcaggcagatcacgaggtca

SEQ ID NO: 70985 - DNA, 20 bp, synthetic construct
  source 1..20: mol_type = other DNA
gtcaggcagatcacgaggtc

SEQ ID NO: 70986 - DNA, 20 bp, synthetic construct
  source 1..20: mol_type = other DNA
agtcaggcagatcacgaggt

SEQ ID NO: 70987 - DNA, 20 bp, synthetic construct
  source 1..20: mol_type = other DNA
cagtcaggcagatcacgagg

SEQ ID NO: 70988 - DNA, 20 bp, synthetic construct
  source 1..20: mol_type = other DNA
ccagtcaggcagatcacgag

SEQ ID NO: 70989 - DNA, 20 bp, synthetic construct
  source 1..20: mol_type = other DNA
cccagtcaggcagatcacga

SEQ ID NO: 70990 - DNA, 20 bp, synthetic construct
  source 1..20: mol_type = other DNA
gcccagtcaggcagatcacg

SEQ ID NO: 70991 - DNA, 20 bp, synthetic construct
  source 1..20: mol_type = other DNA
ggcccagtcaggcagatcac

SEQ ID NO: 70992 - DNA, 20 bp, synthetic construct
  source 1..20: mol_type = other DNA
aggcccagtcaggcagatca

SEQ ID NO: 70993 - DNA, 20 bp, synthetic construct
  source 1..20: mol_type = other DNA
gaggcccagtcaggcagatc

SEQ ID NO: 70994 - DNA, 20 bp, synthetic construct
  source 1..20: mol_type = other DNA
ggaggcccagtcaggcagat

SEQ ID NO: 70995 - DNA, 20 bp, synthetic construct
  source 1..20: mol_type = other DNA
gggaggcccagtcaggcaga

SEQ ID NO: 70996 - DNA, 20 bp, synthetic construct
  source 1..20: mol_type = other DNA
tgggaggcccagtcaggcag

SEQ ID NO: 70997 - DNA, 20 bp, synthetic construct
  source 1..20: mol_type = other DNA
ttgggaggcccagtcaggca

SEQ ID NO: 70998 - DNA, 20 bp, synthetic construct
  source 1..20: mol_type = other DNA
tttgggaggcccagtcaggc

SEQ ID NO: 70999 - DNA, 20 bp, synthetic construct
  source 1..20: mol_type = other DNA
ttttgggaggcccagtcagg

SEQ ID NO: 71000 - DNA, 20 bp, synthetic construct
  source 1..20: mol_type = other DNA
attttgggaggcccagtcag

SEQ ID NO: 71001 - DNA, 20 bp, synthetic construct
  source 1..20: mol_type = other DNA
cattttgggaggcccagtca

SEQ ID NO: 71002 - DNA, 20 bp, synthetic construct
  source 1..20: mol_type = other DNA
gcattttgggaggcccagtc

SEQ ID NO: 71003 - DNA, 20 bp, synthetic construct
  source 1..20: mol_type = other DNA
agcattttgggaggcccagt

SEQ ID NO: 71004 - DNA, 20 bp, synthetic construct
  source 1..20: mol_type = other DNA
cagcattttgggaggcccag

SEQ ID NO: 71005 - DNA, 20 bp, synthetic construct
  source 1..20: mol_type = other DNA
tcagcattttgggaggccca

SEQ ID NO: 71006 - DNA, 20 bp, synthetic construct
  source 1..20: mol_type = other DNA
ctcagcattttgggaggccc

SEQ ID NO: 71007 - DNA, 20 bp, synthetic construct
  source 1..20: mol_type = other DNA
tctcagcattttgggaggcc

SEQ ID NO: 71008 - DNA, 20 bp, synthetic construct
  source 1..20: mol_type = other DNA
atctcagcattttgggaggc

SEQ ID NO: 71009 - DNA, 20 bp, synthetic construct
  source 1..20: mol_type = other DNA
aatctcagcattttgggagg

SEQ ID NO: 71010 - DNA, 20 bp, synthetic construct
  source 1..20: mol_type = other DNA
taatctcagcattttgggag

SEQ ID NO: 71011 - DNA, 20 bp, synthetic construct
  source 1..20: mol_type = other DNA
gtaatctcagcattttggga

SEQ ID NO: 71012 - DNA, 20 bp, synthetic construct
  source 1..20: mol_type = other DNA
tgtaatctcagcattttggg

SEQ ID NO: 71013 - DNA, 20 bp, synthetic construct
  source 1..20: mol_type = other DNA
ctgtaatctcagcattttgg

SEQ ID NO: 71014 - DNA, 20 bp, synthetic construct
  source 1..20: mol_type = other DNA
cctgtaatctcagcattttg

SEQ ID NO: 71015 - DNA, 20 bp, synthetic construct
  source 1..20: mol_type = other DNA
gcctgtaatctcagcatttt

SEQ ID NO: 71016 - DNA, 20 bp, synthetic construct
  source 1..20: mol_type = other DNA
cgcctgtaatctcagcattt

SEQ ID NO: 71017 - DNA, 20 bp, synthetic construct
  source 1..20: mol_type = other DNA
acgcctgtaatctcagcatt

SEQ ID NO: 71018 - DNA, 20 bp, synthetic construct
  source 1..20: mol_type = other DNA
cacgcctgtaatctcagcat

SEQ ID NO: 71019 - DNA, 20 bp, synthetic construct
  source 1..20: mol_type = other DNA
tcacgcctgtaatctcagca

SEQ ID NO: 71020 - DNA, 20 bp, synthetic construct
  source 1..20: mol_type = other DNA
ctcacgcctgtaatctcagc

SEQ ID NO: 71021 - DNA, 20 bp, synthetic construct
  source 1..20: mol_type = other DNA
gctcacgcctgtaatctcag

SEQ ID NO: 71022 - DNA, 20 bp, synthetic construct
  source 1..20: mol_type = other DNA
ggctcacgcctgtaatctca

SEQ ID NO: 71023 - DNA, 20 bp, synthetic construct
  source 1..20: mol_type = other DNA
tggctcacgcctgtaatctc

SEQ ID NO: 71024 - DNA, 20 bp, synthetic construct
  source 1..20: mol_type = other DNA
gtggctcacgcctgtaatct

SEQ ID NO: 71025 - DNA, 20 bp, synthetic construct
  source 1..20: mol_type = other DNA
ggtggctcacgcctgtaatc

SEQ ID NO: 71026 - DNA, 20 bp, synthetic construct
  source 1..20: mol_type = other DNA
cggtggctcacgcctgtaat

SEQ ID NO: 71027 - DNA, 20 bp, synthetic construct
  source 1..20: mol_type = other DNA
gcggtggctcacgcctgtaa

SEQ ID NO: 71028 - DNA, 20 bp, synthetic construct
  source 1..20: mol_type = other DNA
agcggtggctcacgcctgta

SEQ ID NO: 71029 - DNA, 20 bp, synthetic construct
  source 1..20: mol_type = other DNA
gagcggtggctcacgcctgt

SEQ ID NO: 71030 - DNA, 20 bp, synthetic construct
  source 1..20: mol_type = other DNA
ggagcggtggctcacgcctg

SEQ ID NO: 71031 - DNA, 20 bp, synthetic construct
  source 1..20: mol_type = other DNA
gggagcggtggctcacgcct

SEQ ID NO: 71032 - DNA, 20 bp, synthetic construct
  source 1..20: mol_type = other DNA
tgggagcggtggctcacgcc

SEQ ID NO: 71033 - DNA, 20 bp, synthetic construct
  source 1..20: mol_type = other DNA
ctgggagcggtggctcacgc

SEQ ID NO: 71034 - DNA, 20 bp, synthetic construct
  source 1..20: mol_type = other DNA
gctgggagcggtggctcacg

SEQ ID NO: 71035 - DNA, 20 bp, synthetic construct
  source 1..20: mol_type = other DNA
agctgggagcggtggctcac

SEQ ID NO: 71036 - DNA, 20 bp, synthetic construct
  source 1..20: mol_type = other DNA
tagctgggagcggtggctca

SEQ ID NO: 71037 - DNA, 20 bp, synthetic construct
  source 1..20: mol_type = other DNA
atagctgggagcggtggctc

SEQ ID NO: 71038 - DNA, 20 bp, synthetic construct
  source 1..20: mol_type = other DNA
tatagctgggagcggtggct

SEQ ID NO: 71039 - DNA, 20 bp, synthetic construct
  source 1..20: mol_type = other DNA
gtatagctgggagcggtggc

SEQ ID NO: 71040 - DNA, 20 bp, synthetic construct
  source 1..20: mol_type = other DNA
tgtatagctgggagcggtgg

SEQ ID NO: 71041 - DNA, 20 bp, synthetic construct
  source 1..20: mol_type = other DNA
gtgtatagctgggagcggtg

SEQ ID NO: 71042 - DNA, 20 bp, synthetic construct
  source 1..20: mol_type = other DNA
cgtgtatagctgggagcggt

SEQ ID NO: 71043 - DNA, 20 bp, synthetic construct
  source 1..20: mol_type = other DNA
acgtgtatagctgggagcgg

SEQ ID NO: 71044 - DNA, 20 bp, synthetic construct
  source 1..20: mol_type = other DNA
tacgtgtatagctgggagcg

SEQ ID NO: 71045 - DNA, 20 bp, synthetic construct
  source 1..20: mol_type = other DNA
atacgtgtatagctgggagc

SEQ ID NO: 71046 - DNA, 20 bp, synthetic construct
  source 1..20: mol_type = other DNA
aatacgtgtatagctgggag

SEQ ID NO: 71047 - DNA, 20 bp, synthetic construct
  source 1..20: mol_type = other DNA
aaatacgtgtatagctggga

SEQ ID NO: 71048 - DNA, 20 bp, synthetic construct
  source 1..20: mol_type = other DNA
aaaatacgtgtatagctggg

SEQ ID NO: 71049 - DNA, 20 bp, synthetic construct
  source 1..20: mol_type = other DNA
aaaaatacgtgtatagctgg

SEQ ID NO: 71050 - DNA, 20 bp, synthetic construct
  source 1..20: mol_type = other DNA
taaaaatacgtgtatagctg

SEQ ID NO: 71051 - DNA, 20 bp, synthetic construct
  source 1..20: mol_type = other DNA
ttaaaaatacgtgtatagct

SEQ ID NO: 71052 - DNA, 20 bp, synthetic construct
  source 1..20: mol_type = other DNA
attaaaaatacgtgtatagc

SEQ ID NO: 71053 - DNA, 20 bp, synthetic construct
  source 1..20: mol_type = other DNA
cattaaaaatacgtgtatag

SEQ ID NO: 71054 - DNA, 20 bp, synthetic construct
  source 1..20: mol_type = other DNA
gcattaaaaatacgtgtata

SEQ ID NO: 71055 - DNA, 20 bp, synthetic construct
  source 1..20: mol_type = other DNA
ggcattaaaaatacgtgtat

SEQ ID NO: 71056 - DNA, 20 bp, synthetic construct
  source 1..20: mol_type = other DNA
tggcattaaaaatacgtgta

SEQ ID NO: 71057 - DNA, 20 bp, synthetic construct
  source 1..20: mol_type = other DNA
gtggcattaaaaatacgtgt

SEQ ID NO: 71058 - DNA, 20 bp, synthetic construct
  source 1..20: mol_type = other DNA
agtggcattaaaaatacgtg

SEQ ID NO: 71059 - DNA, 20 bp, synthetic construct
  source 1..20: mol_type = other DNA
gagtggcattaaaaatacgt

SEQ ID NO: 71060 - DNA, 20 bp, synthetic construct
  source 1..20: mol_type = other DNA
ggagtggcattaaaaatacg

SEQ ID NO: 71061 - DNA, 20 bp, synthetic construct
  source 1..20: mol_type = other DNA
tggagtggcattaaaaatac

SEQ ID NO: 71062 - DNA, 20 bp, synthetic construct
  source 1..20: mol_type = other DNA
ctggagtggcattaaaaata

SEQ ID NO: 71063 - DNA, 20 bp, synthetic construct
  source 1..20: mol_type = other DNA
actggagtggcattaaaaat

SEQ ID NO: 71064 - DNA, 20 bp, synthetic construct
  source 1..20: mol_type = other DNA
gactggagtggcattaaaaa

SEQ ID NO: 71065 - DNA, 20 bp, synthetic construct
  source 1..20: mol_type = other DNA
agactggagtggcattaaaa

SEQ ID NO: 71066 - DNA, 20 bp, synthetic construct
  source 1..20: mol_type = other DNA
tagactggagtggcattaaa

SEQ ID NO: 71067 - DNA, 20 bp, synthetic construct
  source 1..20: mol_type = other DNA
atagactggagtggcattaa

SEQ ID NO: 71068 - DNA, 20 bp, synthetic construct
  source 1..20: mol_type = other DNA
catagactggagtggcatta

SEQ ID NO: 71069 - DNA, 20 bp, synthetic construct
  source 1..20: mol_type = other DNA
acatagactggagtggcatt

SEQ ID NO: 71070 - DNA, 20 bp, synthetic construct
  source 1..20: mol_type = other DNA
aacatagactggagtggcat

SEQ ID NO: 71071 - DNA, 20 bp, synthetic construct
  source 1..20: mol_type = other DNA
caacatagactggagtggca

SEQ ID NO: 71072 - DNA, 20 bp, synthetic construct
  source 1..20: mol_type = other DNA
ccaacatagactggagtggc

SEQ ID NO: 71073 - DNA, 20 bp, synthetic construct
  source 1..20: mol_type = other DNA
tccaacatagactggagtgg

SEQ ID NO: 71074 - DNA, 20 bp, synthetic construct
  source 1..20: mol_type = other DNA
ttccaacatagactggagtg

SEQ ID NO: 71075 - DNA, 20 bp, synthetic construct
  source 1..20: mol_type = other DNA
gttccaacatagactggagt

SEQ ID NO: 71076 - DNA, 20 bp, synthetic construct
  source 1..20: mol_type = other DNA
ggttccaacatagactggag

SEQ ID NO: 71077 - DNA, 20 bp, synthetic construct
  source 1..20: mol_type = other DNA
tggttccaacatagactgga

SEQ ID NO: 71078 - DNA, 20 bp, synthetic construct
  source 1..20: mol_type = other DNA
atggttccaacatagactgg

SEQ ID NO: 71079 - DNA, 20 bp, synthetic construct
  source 1..20: mol_type = other DNA
aatggttccaacatagactg

SEQ ID NO: 71080 - DNA, 20 bp, synthetic construct
  source 1..20: mol_type = other DNA
aaatggttccaacatagact

SEQ ID NO: 71081 - DNA, 20 bp, synthetic construct
  source 1..20: mol_type = other DNA
aaaatggttccaacatagac

SEQ ID NO: 71082 - DNA, 20 bp, synthetic construct
  source 1..20: mol_type = other DNA
taaaatggttccaacataga

SEQ ID NO: 71083 - DNA, 20 bp, synthetic construct
  source 1..20: mol_type = other DNA
gtaaaatggttccaacatag

SEQ ID NO: 71084 - DNA, 20 bp, synthetic construct
  source 1..20: mol_type = other DNA
agtaaaatggttccaacata

SEQ ID NO: 71085 - DNA, 20 bp, synthetic construct
  source 1..20: mol_type = other DNA
aagtaaaatggttccaacat

SEQ ID NO: 71086 - DNA, 20 bp, synthetic construct
  source 1..20: mol_type = other DNA
gaagtaaaatggttccaaca

SEQ ID NO: 71087 - DNA, 20 bp, synthetic construct
  source 1..20: mol_type = other DNA
ggaagtaaaatggttccaac

SEQ ID NO: 71088 - DNA, 20 bp, synthetic construct
  source 1..20: mol_type = other DNA
gggaagtaaaatggttccaa

SEQ ID NO: 71089 - DNA, 20 bp, synthetic construct
  source 1..20: mol_type = other DNA
ggggaagtaaaatggttcca

SEQ ID NO: 71090 - DNA, 20 bp, synthetic construct
  source 1..20: mol_type = other DNA
aggggaagtaaaatggttcc

SEQ ID NO: 71091 - DNA, 20 bp, synthetic construct
  source 1..20: mol_type = other DNA
aaggggaagtaaaatggttc

SEQ ID NO: 71092 - DNA, 20 bp, synthetic construct
  source 1..20: mol_type = other DNA
aaaggggaagtaaaatggtt

SEQ ID NO: 71093 - DNA, 20 bp, synthetic construct
  source 1..20: mol_type = other DNA
gaaaggggaagtaaaatggt

SEQ ID NO: 71094 - DNA, 20 bp, synthetic construct
  source 1..20: mol_type = other DNA
agaaaggggaagtaaaatgg

SEQ ID NO: 71095 - DNA, 20 bp, synthetic construct
  source 1..20: mol_type = other DNA
aagaaaggggaagtaaaatg

SEQ ID NO: 71096 - DNA, 20 bp, synthetic construct
  source 1..20: mol_type = other DNA
taagaaaggggaagtaaaat

SEQ ID NO: 71097 - DNA, 20 bp, synthetic construct
  source 1..20: mol_type = other DNA
ataagaaaggggaagtaaaa

SEQ ID NO: 71098 - DNA, 20 bp, synthetic construct
  source 1..20: mol_type = other DNA
aataagaaaggggaagtaaa

SEQ ID NO: 71099 - DNA, 20 bp, synthetic construct
  source 1..20: mol_type = other DNA
aaataagaaaggggaagtaa

SEQ ID NO: 71100 - DNA, 20 bp, synthetic construct
  source 1..20: mol_type = other DNA
aaaataagaaaggggaagta

SEQ ID NO: 71101 - DNA, 20 bp, synthetic construct
  source 1..20: mol_type = other DNA
gaaaataagaaaggggaagt

SEQ ID NO: 71102 - DNA, 20 bp, synthetic construct
  source 1..20: mol_type = other DNA
agaaaataagaaaggggaag

SEQ ID NO: 71103 - DNA, 20 bp, synthetic construct
  source 1..20: mol_type = other DNA
aagaaaataagaaaggggaa

SEQ ID NO: 71104 - DNA, 20 bp, synthetic construct
  source 1..20: mol_type = other DNA
gaagaaaataagaaagggga

SEQ ID NO: 71105 - DNA, 20 bp, synthetic construct
  source 1..20: mol_type = other DNA
agaagaaaataagaaagggg

SEQ ID NO: 71106 - DNA, 20 bp, synthetic construct
  source 1..20: mol_type = other DNA
aagaagaaaataagaaaggg

SEQ ID NO: 71107 - DNA, 20 bp, synthetic construct
  source 1..20: mol_type = other DNA
caagaagaaaataagaaagg

SEQ ID NO: 71108 - DNA, 20 bp, synthetic construct
  source 1..20: mol_type = other DNA
acaagaagaaaataagaaag

SEQ ID NO: 71109 - DNA, 20 bp, synthetic construct
  source 1..20: mol_type = other DNA
cacaagaagaaaataagaaa

SEQ ID NO: 71110 - DNA, 20 bp, synthetic construct
  source 1..20: mol_type = other DNA
acacaagaagaaaataagaa

SEQ ID NO: 71111 - DNA, 20 bp, synthetic construct
  source 1..20: mol_type = other DNA
aacacaagaagaaaataaga

SEQ ID NO: 71112 - DNA, 20 bp, synthetic construct
  source 1..20: mol_type = other DNA
gaacacaagaagaaaataag

SEQ ID NO: 71113 - DNA, 20 bp, synthetic construct
  source 1..20: mol_type = other DNA
agaacacaagaagaaaataa

SEQ ID NO: 71114 - DNA, 20 bp, synthetic construct
  source 1..20: mol_type = other DNA
aagaacacaagaagaaaata

SEQ ID NO: 71115 - DNA, 20 bp, synthetic construct
  source 1..20: mol_type = other DNA
caagaacacaagaagaaaat

SEQ ID NO: 71116 - DNA, 20 bp, synthetic construct
  source 1..20: mol_type = other DNA
tcaagaacacaagaagaaaa

SEQ ID NO: 71117 - DNA, 20 bp, synthetic construct
  source 1..20: mol_type = other DNA
ttcaagaacacaagaagaaa

SEQ ID NO: 71118 - DNA, 20 bp, synthetic construct
  source 1..20: mol_type = other DNA
cttcaagaacacaagaagaa

SEQ ID NO: 71119 - DNA, 20 bp, synthetic construct
  source 1..20: mol_type = other DNA
ccttcaagaacacaagaaga

SEQ ID NO: 71120 - DNA, 20 bp, synthetic construct
  source 1..20: mol_type = other DNA
gccttcaagaacacaagaag

SEQ ID NO: 71121 - DNA, 20 bp, synthetic construct
  source 1..20: mol_type = other DNA
ggccttcaagaacacaagaa

SEQ ID NO: 71122 - DNA, 20 bp, synthetic construct
  source 1..20: mol_type = other DNA
aggccttcaagaacacaaga

SEQ ID NO: 71123 - DNA, 20 bp, synthetic construct
  source 1..20: mol_type = other DNA
taggccttcaagaacacaag

SEQ ID NO: 71124 - DNA, 20 bp, synthetic construct
  source 1..20: mol_type = other DNA
ctaggccttcaagaacacaa

SEQ ID NO: 71125 - DNA, 20 bp, synthetic construct
  source 1..20: mol_type = other DNA
tctaggccttcaagaacaca

SEQ ID NO: 71126 - DNA, 20 bp, synthetic construct
  source 1..20: mol_type = other DNA
atctaggccttcaagaacac

SEQ ID NO: 71127 - DNA, 20 bp, synthetic construct
  source 1..20: mol_type = other DNA
gatctaggccttcaagaaca

SEQ ID NO: 71128 - DNA, 20 bp, synthetic construct
  source 1..20: mol_type = other DNA
tgatctaggccttcaagaac

SEQ ID NO: 71129 - DNA, 20 bp, synthetic construct
  source 1..20: mol_type = other DNA
ctgatctaggccttcaagaa

SEQ ID NO: 71130 - DNA, 20 bp, synthetic construct
  source 1..20: mol_type = other DNA
gctgatctaggccttcaaga

SEQ ID NO: 71131 - DNA, 20 bp, synthetic construct
  source 1..20: mol_type = other DNA
agctgatctaggccttcaag

SEQ ID NO: 71132 - DNA, 20 bp, synthetic construct
  source 1..20: mol_type = other DNA
cagctgatctaggccttcaa

SEQ ID NO: 71133 - DNA, 20 bp, synthetic construct
  source 1..20: mol_type = other DNA
acagctgatctaggccttca

SEQ ID NO: 71134 - DNA, 20 bp, synthetic construct
  source 1..20: mol_type = other DNA
aacagctgatctaggccttc

SEQ ID NO: 71135 - DNA, 20 bp, synthetic construct
  source 1..20: mol_type = other DNA
caacagctgatctaggcctt

SEQ ID NO: 71136 - DNA, 20 bp, synthetic construct
  source 1..20: mol_type = other DNA
gcaacagctgatctaggcct

SEQ ID NO: 71137 - DNA, 20 bp, synthetic construct
  source 1..20: mol_type = other DNA
agcaacagctgatctaggcc

SEQ ID NO: 71138 - DNA, 20 bp, synthetic construct
  source 1..20: mol_type = other DNA
cagcaacagctgatctaggc

SEQ ID NO: 71139 - DNA, 20 bp, synthetic construct
  source 1..20: mol_type = other DNA
tcagcaacagctgatctagg

SEQ ID NO: 71140 - DNA, 20 bp, synthetic construct
  source 1..20: mol_type = other DNA
atcagcaacagctgatctag

SEQ ID NO: 71141 - DNA, 20 bp, synthetic construct
  source 1..20: mol_type = other DNA
tatcagcaacagctgatcta

SEQ ID NO: 71142 - DNA, 20 bp, synthetic construct
  source 1..20: mol_type = other DNA
ctatcagcaacagctgatct

SEQ ID NO: 71143 - DNA, 20 bp, synthetic construct
  source 1..20: mol_type = other DNA
cctatcagcaacagctgatc

SEQ ID NO: 71144 - DNA, 20 bp, synthetic construct
  source 1..20: mol_type = other DNA
gcctatcagcaacagctgat

SEQ ID NO: 71145 - DNA, 20 bp, synthetic construct
  source 1..20: mol_type = other DNA
agcctatcagcaacagctga

SEQ ID NO: 71146 - DNA, 20 bp, synthetic construct
  source 1..20: mol_type = other DNA
cagcctatcagcaacagctg

SEQ ID NO: 71147 - DNA, 20 bp, synthetic construct
  source 1..20: mol_type = other DNA
acagcctatcagcaacagct

SEQ ID NO: 71148 - DNA, 20 bp, synthetic construct
  source 1..20: mol_type = other DNA
gacagcctatcagcaacagc

SEQ ID NO: 71149 - DNA, 20 bp, synthetic construct
  source 1..20: mol_type = other DNA
tgacagcctatcagcaacag

SEQ ID NO: 71150 - DNA, 20 bp, synthetic construct
  source 1..20: mol_type = other DNA
gtgacagcctatcagcaaca

SEQ ID NO: 71151 - DNA, 20 bp, synthetic construct
  source 1..20: mol_type = other DNA
agtgacagcctatcagcaac

SEQ ID NO: 71152 - DNA, 20 bp, synthetic construct
  source 1..20: mol_type = other DNA
cagtgacagcctatcagcaa

SEQ ID NO: 71153 - DNA, 20 bp, synthetic construct
  source 1..20: mol_type = other DNA
acagtgacagcctatcagca

SEQ ID NO: 71154 - DNA, 20 bp, synthetic construct
  source 1..20: mol_type = other DNA
gacagtgacagcctatcagc

SEQ ID NO: 71155 - DNA, 20 bp, synthetic construct
  source 1..20: mol_type = other DNA
tgacagtgacagcctatcag

SEQ ID NO: 71156 - DNA, 20 bp, synthetic construct
  source 1..20: mol_type = other DNA
gtgacagtgacagcctatca

SEQ ID NO: 71157 - DNA, 20 bp, synthetic construct
  source 1..20: mol_type = other DNA
agtgacagtgacagcctatc

SEQ ID NO: 71158 - DNA, 20 bp, synthetic construct
  source 1..20: mol_type = other DNA
aagtgacagtgacagcctat

SEQ ID NO: 71159 - DNA, 20 bp, synthetic construct
  source 1..20: mol_type = other DNA
aaagtgacagtgacagccta

SEQ ID NO: 71160 - DNA, 20 bp, synthetic construct
  source 1..20: mol_type = other DNA
taaagtgacagtgacagcct

SEQ ID NO: 71161 - DNA, 20 bp, synthetic construct
  source 1..20: mol_type = other DNA
ctaaagtgacagtgacagcc

SEQ ID NO: 71162 - DNA, 20 bp, synthetic construct
  source 1..20: mol_type = other DNA
tctaaagtgacagtgacagc

SEQ ID NO: 71163 - DNA, 20 bp, synthetic construct
  source 1..20: mol_type = other DNA
ttctaaagtgacagtgacag

SEQ ID NO: 71164 - DNA, 20 bp, synthetic construct
  source 1..20: mol_type = other DNA
tttctaaagtgacagtgaca

SEQ ID NO: 71165 - DNA, 20 bp, synthetic construct
  source 1..20: mol_type = other DNA
ctttctaaagtgacagtgac

SEQ ID NO: 71166 - DNA, 20 bp, synthetic construct
  source 1..20: mol_type = other DNA
gctttctaaagtgacagtga

SEQ ID NO: 71167 - DNA, 20 bp, synthetic construct
  source 1..20: mol_type = other DNA
ggctttctaaagtgacagtg

SEQ ID NO: 71168 - DNA, 20 bp, synthetic construct
  source 1..20: mol_type = other DNA
gggctttctaaagtgacagt

SEQ ID NO: 71169 - DNA, 20 bp, synthetic construct
  source 1..20: mol_type = other DNA
tgggctttctaaagtgacag

SEQ ID NO: 71170 - DNA, 20 bp, synthetic construct
  source 1..20: mol_type = other DNA
ctgggctttctaaagtgaca

SEQ ID NO: 71171 - DNA, 20 bp, synthetic construct
  source 1..20: mol_type = other DNA
tctgggctttctaaagtgac

SEQ ID NO: 71172 - DNA, 20 bp, synthetic construct
  source 1..20: mol_type = other DNA
ctctgggctttctaaagtga

SEQ ID NO: 71173 - DNA, 20 bp, synthetic construct
  source 1..20: mol_type = other DNA
gctctgggctttctaaagtg

SEQ ID NO: 71174 - DNA, 20 bp, synthetic construct
  source 1..20: mol_type = other DNA
ggctctgggctttctaaagt

SEQ ID NO: 71175 - DNA, 20 bp, synthetic construct
  source 1..20: mol_type = other DNA
aggctctgggctttctaaag

SEQ ID NO: 71176 - DNA, 20 bp, synthetic construct
  source 1..20: mol_type = other DNA
aaggctctgggctttctaaa

SEQ ID NO: 71177 - DNA, 20 bp, synthetic construct
  source 1..20: mol_type = other DNA
aaaggctctgggctttctaa

SEQ ID NO: 71178 - DNA, 20 bp, synthetic construct
  source 1..20: mol_type = other DNA
aaaaggctctgggctttcta

SEQ ID NO: 71179 - DNA, 20 bp, synthetic construct
  source 1..20: mol_type = other DNA
caaaaggctctgggctttct

SEQ ID NO: 71180 - DNA, 20 bp, synthetic construct
  source 1..20: mol_type = other DNA
acaaaaggctctgggctttc

SEQ ID NO: 71181 - DNA, 20 bp, synthetic construct
  source 1..20: mol_type = other DNA
aacaaaaggctctgggcttt

SEQ ID NO: 71182 - DNA, 20 bp, synthetic construct
  source 1..20: mol_type = other DNA
gaacaaaaggctctgggctt

SEQ ID NO: 71183 - DNA, 20 bp, synthetic construct
  source 1..20: mol_type = other DNA
ggaacaaaaggctctgggct

SEQ ID NO: 71184 - DNA, 20 bp, synthetic construct
  source 1..20: mol_type = other DNA
aggaacaaaaggctctgggc

SEQ ID NO: 71185 - DNA, 20 bp, synthetic construct
  source 1..20: mol_type = other DNA
aaggaacaaaaggctctggg

SEQ ID NO: 71186 - DNA, 20 bp, synthetic construct
  source 1..20: mol_type = other DNA
taaggaacaaaaggctctgg

SEQ ID NO: 71187 - DNA, 20 bp, synthetic construct
  source 1..20: mol_type = other DNA
ctaaggaacaaaaggctctg

SEQ ID NO: 71188 - DNA, 20 bp, synthetic construct
  source 1..20: mol_type = other DNA
tctaaggaacaaaaggctct

SEQ ID NO: 71189 - DNA, 20 bp, synthetic construct
  source 1..20: mol_type = other DNA
ttctaaggaacaaaaggctc

SEQ ID NO: 71190 - DNA, 20 bp, synthetic construct
  source 1..20: mol_type = other DNA
gttctaaggaacaaaaggct

SEQ ID NO: 71191 - DNA, 20 bp, synthetic construct
  source 1..20: mol_type = other DNA
agttctaaggaacaaaaggc

SEQ ID NO: 71192 - DNA, 20 bp, synthetic construct
  source 1..20: mol_type = other DNA
aagttctaaggaacaaaagg

SEQ ID NO: 71193 - DNA, 20 bp, synthetic construct
  source 1..20: mol_type = other DNA
aaagttctaaggaacaaaag

SEQ ID NO: 71194 - DNA, 20 bp, synthetic construct
  source 1..20: mol_type = other DNA
caaagttctaaggaacaaaa

SEQ ID NO: 71195 - DNA, 20 bp, synthetic construct
  source 1..20: mol_type = other DNA
acaaagttctaaggaacaaa

SEQ ID NO: 71196 - DNA, 20 bp, synthetic construct
  source 1..20: mol_type = other DNA
aacaaagttctaaggaacaa

SEQ ID NO: 71197 - DNA, 20 bp, synthetic construct
  source 1..20: mol_type = other DNA
aaacaaagttctaaggaaca

SEQ ID NO: 71198 - DNA, 20 bp, synthetic construct
  source 1..20: mol_type = other DNA
aaaacaaagttctaaggaac

SEQ ID NO: 71199 - DNA, 20 bp, synthetic construct
  source 1..20: mol_type = other DNA
aaaaacaaagttctaaggaa

SEQ ID NO: 71200 - DNA, 20 bp, synthetic construct
  source 1..20: mol_type = other DNA
taaaaacaaagttctaagga

SEQ ID NO: 71201 - DNA, 20 bp, synthetic construct
  source 1..20: mol_type = other DNA
ttaaaaacaaagttctaagg

SEQ ID NO: 71202 - DNA, 20 bp, synthetic construct
  source 1..20: mol_type = other DNA
attaaaaacaaagttctaag

SEQ ID NO: 71203 - DNA, 20 bp, synthetic construct
  source 1..20: mol_type = other DNA
aattaaaaacaaagttctaa

SEQ ID NO: 71204 - DNA, 20 bp, synthetic construct
  source 1..20: mol_type = other DNA
caattaaaaacaaagttcta

SEQ ID NO: 71205 - DNA, 20 bp, synthetic construct
  source 1..20: mol_type = other DNA
acaattaaaaacaaagttct

SEQ ID NO: 71206 - DNA, 20 bp, synthetic construct
  source 1..20: mol_type = other DNA
tacaattaaaaacaaagttc

SEQ ID NO: 71207 - DNA, 20 bp, synthetic construct
  source 1..20: mol_type = other DNA
atacaattaaaaacaaagtt

SEQ ID NO: 71208 - DNA, 20 bp, synthetic construct
  source 1..20: mol_type = other DNA
aatacaattaaaaacaaagt

SEQ ID NO: 71209 - DNA, 20 bp, synthetic construct
  source 1..20: mol_type = other DNA
caatacaattaaaaacaaag

SEQ ID NO: 71210 - DNA, 20 bp, synthetic construct
  source 1..20: mol_type = other DNA
acaatacaattaaaaacaaa

SEQ ID NO: 71211 - DNA, 20 bp, synthetic construct
  source 1..20: mol_type = other DNA
tacaatacaattaaaaacaa

SEQ ID NO: 71212 - DNA, 20 bp, synthetic construct
  source 1..20: mol_type = other DNA
ctacaatacaattaaaaaca

SEQ ID NO: 71213 - DNA, 20 bp, synthetic construct
  source 1..20: mol_type = other DNA
gctacaatacaattaaaaac

SEQ ID NO: 71214 - DNA, 20 bp, synthetic construct
  source 1..20: mol_type = other DNA
tgctacaatacaattaaaaa

SEQ ID NO: 71215 - DNA, 20 bp, synthetic construct
  source 1..20: mol_type = other DNA
gtgctacaatacaattaaaa

SEQ ID NO: 71216 - DNA, 20 bp, synthetic construct
  source 1..20: mol_type = other DNA
agtgctacaatacaattaaa

SEQ ID NO: 71217 - DNA, 20 bp, synthetic construct
  source 1..20: mol_type = other DNA
gagtgctacaatacaattaa

SEQ ID NO: 71218 - DNA, 20 bp, synthetic construct
  source 1..20: mol_type = other DNA
tgagtgctacaatacaatta

SEQ ID NO: 71219 - DNA, 20 bp, synthetic construct
  source 1..20: mol_type = other DNA
atgagtgctacaatacaatt

SEQ ID NO: 71220 - DNA, 20 bp, synthetic construct
  source 1..20: mol_type = other DNA
aatgagtgctacaatacaat

SEQ ID NO: 71221 - DNA, 20 bp, synthetic construct
  source 1..20: mol_type = other DNA
caatgagtgctacaatacaa

SEQ ID NO: 71222 - DNA, 20 bp, synthetic construct
  source 1..20: mol_type = other DNA
acaatgagtgctacaataca

SEQ ID NO: 71223 - DNA, 20 bp, synthetic construct
  source 1..20: mol_type = other DNA
tacaatgagtgctacaatac

SEQ ID NO: 71224 - DNA, 20 bp, synthetic construct
  source 1..20: mol_type = other DNA
atacaatgagtgctacaata

SEQ ID NO: 71225 - DNA, 20 bp, synthetic construct
  source 1..20: mol_type = other DNA
aatacaatgagtgctacaat

SEQ ID NO: 71226 - DNA, 20 bp, synthetic construct
  source 1..20: mol_type = other DNA
gaatacaatgagtgctacaa

SEQ ID NO: 71227 - DNA, 20 bp, synthetic construct
  source 1..20: mol_type = other DNA
cgaatacaatgagtgctaca

SEQ ID NO: 71228 - DNA, 20 bp, synthetic construct
  source 1..20: mol_type = other DNA
tcgaatacaatgagtgctac

SEQ ID NO: 71229 - DNA, 20 bp, synthetic construct
  source 1..20: mol_type = other DNA
atcgaatacaatgagtgcta

SEQ ID NO: 71230 - DNA, 20 bp, synthetic construct
  source 1..20: mol_type = other DNA
aatcgaatacaatgagtgct

SEQ ID NO: 71231 - DNA, 20 bp, synthetic construct
  source 1..20: mol_type = other DNA
gaatcgaatacaatgagtgc

SEQ ID NO: 71232 - DNA, 20 bp, synthetic construct
  source 1..20: mol_type = other DNA
agaatcgaatacaatgagtg

SEQ ID NO: 71233 - DNA, 20 bp, synthetic construct
  source 1..20: mol_type = other DNA
tagaatcgaatacaatgagt

SEQ ID NO: 71234 - DNA, 20 bp, synthetic construct
  source 1..20: mol_type = other DNA
ttagaatcgaatacaatgag

SEQ ID NO: 71235 - DNA, 20 bp, synthetic construct
  source 1..20: mol_type = other DNA
tttagaatcgaatacaatga

SEQ ID NO: 71236 - DNA, 20 bp, synthetic construct
  source 1..20: mol_type = other DNA
ttttagaatcgaatacaatg

SEQ ID NO: 71237 - DNA, 20 bp, synthetic construct
  source 1..20: mol_type = other DNA
cttttagaatcgaatacaat

SEQ ID NO: 71238 - DNA, 20 bp, synthetic construct
  source 1..20: mol_type = other DNA
tcttttagaatcgaatacaa

SEQ ID NO: 71239 - DNA, 20 bp, synthetic construct
  source 1..20: mol_type = other DNA
atcttttagaatcgaataca

SEQ ID NO: 71240 - DNA, 20 bp, synthetic construct
  source 1..20: mol_type = other DNA
aatcttttagaatcgaatac

SEQ ID NO: 71241 - DNA, 20 bp, synthetic construct
  source 1..20: mol_type = other DNA
aaatcttttagaatcgaata

SEQ ID NO: 71242 - DNA, 20 bp, synthetic construct
  source 1..20: mol_type = other DNA
caaatcttttagaatcgaat

SEQ ID NO: 71243 - DNA, 20 bp, synthetic construct
  source 1..20: mol_type = other DNA
gcaaatcttttagaatcgaa

SEQ ID NO: 71244 - DNA, 20 bp, synthetic construct
  source 1..20: mol_type = other DNA
agcaaatcttttagaatcga

SEQ ID NO: 71245 - DNA, 20 bp, synthetic construct
  source 1..20: mol_type = other DNA
aagcaaatcttttagaatcg

SEQ ID NO: 71246 - DNA, 20 bp, synthetic construct
  source 1..20: mol_type = other DNA
gaagcaaatcttttagaatc

SEQ ID NO: 71247 - DNA, 20 bp, synthetic construct
  source 1..20: mol_type = other DNA
tgaagcaaatcttttagaat

SEQ ID NO: 71248 - DNA, 20 bp, synthetic construct
  source 1..20: mol_type = other DNA
atgaagcaaatcttttagaa

SEQ ID NO: 71249 - DNA, 20 bp, synthetic construct
  source 1..20: mol_type = other DNA
aatgaagcaaatcttttaga

SEQ ID NO: 71250 - DNA, 20 bp, synthetic construct
  source 1..20: mol_type = other DNA
aaatgaagcaaatcttttag

SEQ ID NO: 71251 - DNA, 20 bp, synthetic construct
  source 1..20: mol_type = other DNA
gaaatgaagcaaatctttta

SEQ ID NO: 71252 - DNA, 20 bp, synthetic construct
  source 1..20: mol_type = other DNA
agaaatgaagcaaatctttt

SEQ ID NO: 71253 - DNA, 20 bp, synthetic construct
  source 1..20: mol_type = other DNA
cagaaatgaagcaaatcttt

SEQ ID NO: 71254 - DNA, 20 bp, synthetic construct
  source 1..20: mol_type = other DNA
acagaaatgaagcaaatctt

SEQ ID NO: 71255 - DNA, 20 bp, synthetic construct
  source 1..20: mol_type = other DNA
tacagaaatgaagcaaatct

SEQ ID NO: 71256 - DNA, 20 bp, synthetic construct
  source 1..20: mol_type = other DNA
ttacagaaatgaagcaaatc

SEQ ID NO: 71257 - DNA, 20 bp, synthetic construct
  source 1..20: mol_type = other DNA
gttacagaaatgaagcaaat

SEQ ID NO: 71258 - DNA, 20 bp, synthetic construct
  source 1..20: mol_type = other DNA
agttacagaaatgaagcaaa

SEQ ID NO: 71259 - DNA, 20 bp, synthetic construct
  source 1..20: mol_type = other DNA
tagttacagaaatgaagcaa

SEQ ID NO: 71260 - DNA, 20 bp, synthetic construct
  source 1..20: mol_type = other DNA
ctagttacagaaatgaagca

SEQ ID NO: 71261 - DNA, 20 bp, synthetic construct
  source 1..20: mol_type = other DNA
actagttacagaaatgaagc

SEQ ID NO: 71262 - DNA, 20 bp, synthetic construct
  source 1..20: mol_type = other DNA
gactagttacagaaatgaag

SEQ ID NO: 71263 - DNA, 20 bp, synthetic construct
  source 1..20: mol_type = other DNA
agactagttacagaaatgaa

SEQ ID NO: 71264 - DNA, 20 bp, synthetic construct
  source 1..20: mol_type = other DNA
gagactagttacagaaatga

SEQ ID NO: 71265 - DNA, 20 bp, synthetic construct
  source 1..20: mol_type = other DNA
agagactagttacagaaatg

SEQ ID NO: 71266 - DNA, 20 bp, synthetic construct
  source 1..20: mol_type = other DNA
aagagactagttacagaaat

SEQ ID NO: 71267 - DNA, 20 bp, synthetic construct
  source 1..20: mol_type = other DNA
taagagactagttacagaaa

SEQ ID NO: 71268 - DNA, 20 bp, synthetic construct
  source 1..20: mol_type = other DNA
gtaagagactagttacagaa

SEQ ID NO: 71269 - DNA, 20 bp, synthetic construct
  source 1..20: mol_type = other DNA
tgtaagagactagttacaga

SEQ ID NO: 71270 - DNA, 20 bp, synthetic construct
  source 1..20: mol_type = other DNA
gtgtaagagactagttacag

SEQ ID NO: 71271 - DNA, 20 bp, synthetic construct
  source 1..20: mol_type = other DNA
ggtgtaagagactagttaca

SEQ ID NO: 71272 - DNA, 20 bp, synthetic construct
  source 1..20: mol_type = other DNA
gggtgtaagagactagttac

SEQ ID NO: 71273 - DNA, 20 bp, synthetic construct
  source 1..20: mol_type = other DNA
tgggtgtaagagactagtta

SEQ ID NO: 71274 - DNA, 20 bp, synthetic construct
  source 1..20: mol_type = other DNA
ctgggtgtaagagactagtt

SEQ ID NO: 71275 - DNA, 20 bp, synthetic construct
  source 1..20: mol_type = other DNA
cctgggtgtaagagactagt

SEQ ID NO: 71276 - DNA, 20 bp, synthetic construct
  source 1..20: mol_type = other DNA
tcctgggtgtaagagactag

SEQ ID NO: 71277 - DNA, 20 bp, synthetic construct
  source 1..20: mol_type = other DNA
ctcctgggtgtaagagacta

SEQ ID NO: 71278 - DNA, 20 bp, synthetic construct
  source 1..20: mol_type = other DNA
gctcctgggtgtaagagact

SEQ ID NO: 71279 - DNA, 20 bp, synthetic construct
  source 1..20: mol_type = other DNA
agctcctgggtgtaagagac

SEQ ID NO: 71280 - DNA, 20 bp, synthetic construct
  source 1..20: mol_type = other DNA
gagctcctgggtgtaagaga

SEQ ID NO: 71281 - DNA, 20 bp, synthetic construct
  source 1..20: mol_type = other DNA
ggagctcctgggtgtaagag

SEQ ID NO: 71282 - DNA, 20 bp, synthetic construct
  source 1..20: mol_type = other DNA
aggagctcctgggtgtaaga

SEQ ID NO: 71283 - DNA, 20 bp, synthetic construct
  source 1..20: mol_type = other DNA
taggagctcctgggtgtaag

SEQ ID NO: 71284 - DNA, 20 bp, synthetic construct
  source 1..20: mol_type = other DNA
ctaggagctcctgggtgtaa

SEQ ID NO: 71285 - DNA, 20 bp, synthetic construct
  source 1..20: mol_type = other DNA
actaggagctcctgggtgta

SEQ ID NO: 71286 - DNA, 20 bp, synthetic construct
  source 1..20: mol_type = other DNA
aactaggagctcctgggtgt

SEQ ID NO: 71287 - DNA, 20 bp, synthetic construct
  source 1..20: mol_type = other DNA
gaactaggagctcctgggtg

SEQ ID NO: 71288 - DNA, 20 bp, synthetic construct
  source 1..20: mol_type = other DNA
ggaactaggagctcctgggt

SEQ ID NO: 71289 - DNA, 20 bp, synthetic construct
  source 1..20: mol_type = other DNA
aggaactaggagctcctggg

SEQ ID NO: 71290 - DNA, 20 bp, synthetic construct
  source 1..20: mol_type = other DNA
taggaactaggagctcctgg

SEQ ID NO: 71291 - DNA, 20 bp, synthetic construct
  source 1..20: mol_type = other DNA
gtaggaactaggagctcctg

SEQ ID NO: 71292 - DNA, 20 bp, synthetic construct
  source 1..20: mol_type = other DNA
tgtaggaactaggagctcct

SEQ ID NO: 71293 - DNA, 20 bp, synthetic construct
  source 1..20: mol_type = other DNA
ctgtaggaactaggagctcc

SEQ ID NO: 71294 - DNA, 20 bp, synthetic construct
  source 1..20: mol_type = other DNA
cctgtaggaactaggagctc

SEQ ID NO: 71295 - DNA, 20 bp, synthetic construct
  source 1..20: mol_type = other DNA
tcctgtaggaactaggagct

SEQ ID NO: 71296 - DNA, 20 bp, synthetic construct
  source 1..20: mol_type = other DNA
ttcctgtaggaactaggagc

SEQ ID NO: 71297 - DNA, 20 bp, synthetic construct
  source 1..20: mol_type = other DNA
tttcctgtaggaactaggag

SEQ ID NO: 71298 - DNA, 20 bp, synthetic construct
  source 1..20: mol_type = other DNA
atttcctgtaggaactagga

SEQ ID NO: 71299 - DNA, 20 bp, synthetic construct
  source 1..20: mol_type = other DNA
catttcctgtaggaactagg

SEQ ID NO: 71300 - DNA, 20 bp, synthetic construct
  source 1..20: mol_type = other DNA
gcatttcctgtaggaactag

SEQ ID NO: 71301 - DNA, 20 bp, synthetic construct
  source 1..20: mol_type = other DNA
agcatttcctgtaggaacta

SEQ ID NO: 71302 - DNA, 20 bp, synthetic construct
  source 1..20: mol_type = other DNA
cagcatttcctgtaggaact

SEQ ID NO: 71303 - DNA, 20 bp, synthetic construct
  source 1..20: mol_type = other DNA
ccagcatttcctgtaggaac

SEQ ID NO: 71304 - DNA, 20 bp, synthetic construct
  source 1..20: mol_type = other DNA
cccagcatttcctgtaggaa

SEQ ID NO: 71305 - DNA, 20 bp, synthetic construct
  source 1..20: mol_type = other DNA
tcccagcatttcctgtagga

SEQ ID NO: 71306 - DNA, 20 bp, synthetic construct
  source 1..20: mol_type = other DNA
ttcccagcatttcctgtagg

SEQ ID NO: 71307 - DNA, 20 bp, synthetic construct
  source 1..20: mol_type = other DNA
attcccagcatttcctgtag

SEQ ID NO: 71308 - DNA, 20 bp, synthetic construct
  source 1..20: mol_type = other DNA
aattcccagcatttcctgta

SEQ ID NO: 71309 - DNA, 20 bp, synthetic construct
  source 1..20: mol_type = other DNA
caattcccagcatttcctgt

SEQ ID NO: 71310 - DNA, 20 bp, synthetic construct
  source 1..20: mol_type = other DNA
acaattcccagcatttcctg

SEQ ID NO: 71311 - DNA, 20 bp, synthetic construct
  source 1..20: mol_type = other DNA
tacaattcccagcatttcct

SEQ ID NO: 71312 - DNA, 20 bp, synthetic construct
  source 1..20: mol_type = other DNA
atacaattcccagcatttcc

SEQ ID NO: 71313 - DNA, 20 bp, synthetic construct
  source 1..20: mol_type = other DNA
gatacaattcccagcatttc

SEQ ID NO: 71314 - DNA, 20 bp, synthetic construct
  source 1..20: mol_type = other DNA
tgatacaattcccagcattt

SEQ ID NO: 71315 - DNA, 20 bp, synthetic construct
  source 1..20: mol_type = other DNA
ctgatacaattcccagcatt

SEQ ID NO: 71316 - DNA, 20 bp, synthetic construct
  source 1..20: mol_type = other DNA
actgatacaattcccagcat

SEQ ID NO: 71317 - DNA, 20 bp, synthetic construct
  source 1..20: mol_type = other DNA
gactgatacaattcccagca

SEQ ID NO: 71318 - DNA, 20 bp, synthetic construct
  source 1..20: mol_type = other DNA
tgactgatacaattcccagc

SEQ ID NO: 71319 - DNA, 20 bp, synthetic construct
  source 1..20: mol_type = other DNA
ttgactgatacaattcccag

SEQ ID NO: 71320 - DNA, 20 bp, synthetic construct
  source 1..20: mol_type = other DNA
tttgactgatacaattccca

SEQ ID NO: 71321 - DNA, 20 bp, synthetic construct
  source 1..20: mol_type = other DNA
atttgactgatacaattccc

SEQ ID NO: 71322 - DNA, 20 bp, synthetic construct
  source 1..20: mol_type = other DNA
catttgactgatacaattcc

SEQ ID NO: 71323 - DNA, 20 bp, synthetic construct
  source 1..20: mol_type = other DNA
acatttgactgatacaattc

SEQ ID NO: 71324 - DNA, 20 bp, synthetic construct
  source 1..20: mol_type = other DNA
cacatttgactgatacaatt

SEQ ID NO: 71325 - DNA, 20 bp, synthetic construct
  source 1..20: mol_type = other DNA
tcacatttgactgatacaat

SEQ ID NO: 71326 - DNA, 20 bp, synthetic construct
  source 1..20: mol_type = other DNA
ttcacatttgactgatacaa

SEQ ID NO: 71327 - DNA, 20 bp, synthetic construct
  source 1..20: mol_type = other DNA
attcacatttgactgataca

SEQ ID NO: 71328 - DNA, 20 bp, synthetic construct
  source 1..20: mol_type = other DNA
gattcacatttgactgatac

SEQ ID NO: 71329 - DNA, 20 bp, synthetic construct
  source 1..20: mol_type = other DNA
ggattcacatttgactgata

SEQ ID NO: 71330 - DNA, 20 bp, synthetic construct
  source 1..20: mol_type = other DNA
gggattcacatttgactgat

SEQ ID NO: 71331 - DNA, 20 bp, synthetic construct
  source 1..20: mol_type = other DNA
ggggattcacatttgactga

SEQ ID NO: 71332 - DNA, 20 bp, synthetic construct
  source 1..20: mol_type = other DNA
tggggattcacatttgactg

SEQ ID NO: 71333 - DNA, 20 bp, synthetic construct
  source 1..20: mol_type = other DNA
gtggggattcacatttgact

SEQ ID NO: 71334 - DNA, 20 bp, synthetic construct
  source 1..20: mol_type = other DNA
ggtggggattcacatttgac

SEQ ID NO: 71335 - DNA, 20 bp, synthetic construct
  source 1..20: mol_type = other DNA
aggtggggattcacatttga

SEQ ID NO: 71336 - DNA, 20 bp, synthetic construct
  source 1..20: mol_type = other DNA
gaggtggggattcacatttg

SEQ ID NO: 71337 - DNA, 20 bp, synthetic construct
  source 1..20: mol_type = other DNA
cgaggtggggattcacattt

SEQ ID NO: 71338 - DNA, 20 bp, synthetic construct
  source 1..20: mol_type = other DNA
acgaggtggggattcacatt

SEQ ID NO: 71339 - DNA, 20 bp, synthetic construct
  source 1..20: mol_type = other DNA
gacgaggtggggattcacat

SEQ ID NO: 71340 - DNA, 20 bp, synthetic construct
  source 1..20: mol_type = other DNA
ggacgaggtggggattcaca

SEQ ID NO: 71341 - DNA, 20 bp, synthetic construct
  source 1..20: mol_type = other DNA
tggacgaggtggggattcac

SEQ ID NO: 71342 - DNA, 20 bp, synthetic construct
  source 1..20: mol_type = other DNA
ctggacgaggtggggattca

SEQ ID NO: 71343 - DNA, 20 bp, synthetic construct
  source 1..20: mol_type = other DNA
tctggacgaggtggggattc

SEQ ID NO: 71344 - DNA, 20 bp, synthetic construct
  source 1..20: mol_type = other DNA
gtctggacgaggtggggatt

SEQ ID NO: 71345 - DNA, 20 bp, synthetic construct
  source 1..20: mol_type = other DNA
agtctggacgaggtggggat

SEQ ID NO: 71346 - DNA, 20 bp, synthetic construct
  source 1..20: mol_type = other DNA
aagtctggacgaggtgggga

SEQ ID NO: 71347 - DNA, 20 bp, synthetic construct
  source 1..20: mol_type = other DNA
taagtctggacgaggtgggg

SEQ ID NO: 71348 - DNA, 20 bp, synthetic construct
  source 1..20: mol_type = other DNA
ataagtctggacgaggtggg

SEQ ID NO: 71349 - DNA, 20 bp, synthetic construct
  source 1..20: mol_type = other DNA
cataagtctggacgaggtgg

SEQ ID NO: 71350 - DNA, 20 bp, synthetic construct
  source 1..20: mol_type = other DNA
tcataagtctggacgaggtg

SEQ ID NO: 71351 - DNA, 20 bp, synthetic construct
  source 1..20: mol_type = other DNA
ctcataagtctggacgaggt

SEQ ID NO: 71352 - DNA, 20 bp, synthetic construct
  source 1..20: mol_type = other DNA
actcataagtctggacgagg

SEQ ID NO: 71353 - DNA, 20 bp, synthetic construct
  source 1..20: mol_type = other DNA
cactcataagtctggacgag

SEQ ID NO: 71354 - DNA, 20 bp, synthetic construct
  source 1..20: mol_type = other DNA
gcactcataagtctggacga

SEQ ID NO: 71355 - DNA, 20 bp, synthetic construct
  source 1..20: mol_type = other DNA
tgcactcataagtctggacg

SEQ ID NO: 71356 - DNA, 20 bp, synthetic construct
  source 1..20: mol_type = other DNA
atgcactcataagtctggac

SEQ ID NO: 71357 - DNA, 20 bp, synthetic construct
  source 1..20: mol_type = other DNA
aatgcactcataagtctgga

SEQ ID NO: 71358 - DNA, 20 bp, synthetic construct
  source 1..20: mol_type = other DNA
caatgcactcataagtctgg

SEQ ID NO: 71359 - DNA, 20 bp, synthetic construct
  source 1..20: mol_type = other DNA
acaatgcactcataagtctg

SEQ ID NO: 71360 - DNA, 20 bp, synthetic construct
  source 1..20: mol_type = other DNA
tacaatgcactcataagtct

SEQ ID NO: 71361 - DNA, 20 bp, synthetic construct
  source 1..20: mol_type = other DNA
ctacaatgcactcataagtc

SEQ ID NO: 71362 - DNA, 20 bp, synthetic construct
  source 1..20: mol_type = other DNA
cctacaatgcactcataagt

SEQ ID NO: 71363 - DNA, 20 bp, synthetic construct
  source 1..20: mol_type = other DNA
acctacaatgcactcataag

SEQ ID NO: 71364 - DNA, 20 bp, synthetic construct
  source 1..20: mol_type = other DNA
tacctacaatgcactcataa

SEQ ID NO: 71365 - DNA, 20 bp, synthetic construct
  source 1..20: mol_type = other DNA
gtacctacaatgcactcata

SEQ ID NO: 71366 - DNA, 20 bp, synthetic construct
  source 1..20: mol_type = other DNA
agtacctacaatgcactcat

SEQ ID NO: 71367 - DNA, 20 bp, synthetic construct
  source 1..20: mol_type = other DNA
gagtacctacaatgcactca

SEQ ID NO: 71368 - DNA, 20 bp, synthetic construct
  source 1..20: mol_type = other DNA
tgagtacctacaatgcactc

SEQ ID NO: 71369 - DNA, 20 bp, synthetic construct
  source 1..20: mol_type = other DNA
ctgagtacctacaatgcact

SEQ ID NO: 71370 - DNA, 20 bp, synthetic construct
  source 1..20: mol_type = other DNA
actgagtacctacaatgcac

SEQ ID NO: 71371 - DNA, 20 bp, synthetic construct
  source 1..20: mol_type = other DNA
tactgagtacctacaatgca

SEQ ID NO: 71372 - DNA, 20 bp, synthetic construct
  source 1..20: mol_type = other DNA
ttactgagtacctacaatgc

SEQ ID NO: 71373 - DNA, 20 bp, synthetic construct
  source 1..20: mol_type = other DNA
cttactgagtacctacaatg

SEQ ID NO: 71374 - DNA, 20 bp, synthetic construct
  source 1..20: mol_type = other DNA
acttactgagtacctacaat

SEQ ID NO: 71375 - DNA, 20 bp, synthetic construct
  source 1..20: mol_type = other DNA
cacttactgagtacctacaa

SEQ ID NO: 71376 - DNA, 20 bp, synthetic construct
  source 1..20: mol_type = other DNA
gcacttactgagtacctaca

SEQ ID NO: 71377 - DNA, 20 bp, synthetic construct
  source 1..20: mol_type = other DNA
agcacttactgagtacctac

SEQ ID NO: 71378 - DNA, 20 bp, synthetic construct
  source 1..20: mol_type = other DNA
tagcacttactgagtaccta

SEQ ID NO: 71379 - DNA, 20 bp, synthetic construct
  source 1..20: mol_type = other DNA
ttagcacttactgagtacct

SEQ ID NO: 71380 - DNA, 20 bp, synthetic construct
  source 1..20: mol_type = other DNA
tttagcacttactgagtacc

SEQ ID NO: 71381 - DNA, 20 bp, synthetic construct
  source 1..20: mol_type = other DNA
ttttagcacttactgagtac

SEQ ID NO: 71382 - DNA, 20 bp, synthetic construct
  source 1..20: mol_type = other DNA
tttttagcacttactgagta

SEQ ID NO: 71383 - DNA, 20 bp, synthetic construct
  source 1..20: mol_type = other DNA
atttttagcacttactgagt

SEQ ID NO: 71384 - DNA, 20 bp, synthetic construct
  source 1..20: mol_type = other DNA
catttttagcacttactgag

SEQ ID NO: 71385 - DNA, 20 bp, synthetic construct
  source 1..20: mol_type = other DNA
tcatttttagcacttactga

SEQ ID NO: 71386 - DNA, 20 bp, synthetic construct
  source 1..20: mol_type = other DNA
gtcatttttagcacttactg

SEQ ID NO: 71387 - DNA, 20 bp, synthetic construct
  source 1..20: mol_type = other DNA
agtcatttttagcacttact

SEQ ID NO: 71388 - DNA, 20 bp, synthetic construct
  source 1..20: mol_type = other DNA
tagtcatttttagcacttac

SEQ ID NO: 71389 - DNA, 20 bp, synthetic construct
  source 1..20: mol_type = other DNA
ttagtcatttttagcactta

SEQ ID NO: 71390 - DNA, 20 bp, synthetic construct
  source 1..20: mol_type = other DNA
tttagtcatttttagcactt

SEQ ID NO: 71391 - DNA, 20 bp, synthetic construct
  source 1..20: mol_type = other DNA
atttagtcatttttagcact

SEQ ID NO: 71392 - DNA, 20 bp, synthetic construct
  source 1..20: mol_type = other DNA
tatttagtcatttttagcac

SEQ ID NO: 71393 - DNA, 20 bp, synthetic construct
  source 1..20: mol_type = other DNA
ctatttagtcatttttagca

SEQ ID NO: 71394 - DNA, 20 bp, synthetic construct
  source 1..20: mol_type = other DNA
actatttagtcatttttagc

SEQ ID NO: 71395 - DNA, 20 bp, synthetic construct
  source 1..20: mol_type = other DNA
gactatttagtcatttttag

SEQ ID NO: 71396 - DNA, 20 bp, synthetic construct
  source 1..20: mol_type = other DNA
ggactatttagtcattttta

SEQ ID NO: 71397 - DNA, 20 bp, synthetic construct
  source 1..20: mol_type = other DNA
gggactatttagtcattttt

SEQ ID NO: 71398 - DNA, 20 bp, synthetic construct
  source 1..20: mol_type = other DNA
tgggactatttagtcatttt

SEQ ID NO: 71399 - DNA, 20 bp, synthetic construct
  source 1..20: mol_type = other DNA
gtgggactatttagtcattt

SEQ ID NO: 71400 - DNA, 20 bp, synthetic construct
  source 1..20: mol_type = other DNA
agtgggactatttagtcatt

SEQ ID NO: 71401 - DNA, 20 bp, synthetic construct
  source 1..20: mol_type = other DNA
cagtgggactatttagtcat

SEQ ID NO: 71402 - DNA, 20 bp, synthetic construct
  source 1..20: mol_type = other DNA
tcagtgggactatttagtca

SEQ ID NO: 71403 - DNA, 20 bp, synthetic construct
  source 1..20: mol_type = other DNA
atcagtgggactatttagtc

SEQ ID NO: 71404 - DNA, 20 bp, synthetic construct
  source 1..20: mol_type = other DNA
tatcagtgggactatttagt

SEQ ID NO: 71405 - DNA, 20 bp, synthetic construct
  source 1..20: mol_type = other DNA
gtatcagtgggactatttag

SEQ ID NO: 71406 - DNA, 20 bp, synthetic construct
  source 1..20: mol_type = other DNA
ggtatcagtgggactattta

SEQ ID NO: 71407 - DNA, 20 bp, synthetic construct
  source 1..20: mol_type = other DNA
tggtatcagtgggactattt

SEQ ID NO: 71408 - DNA, 20 bp, synthetic construct
  source 1..20: mol_type = other DNA
ttggtatcagtgggactatt

SEQ ID NO: 71409 - DNA, 20 bp, synthetic construct
  source 1..20: mol_type = other DNA
attggtatcagtgggactat

SEQ ID NO: 71410 - DNA, 20 bp, synthetic construct
  source 1..20: mol_type = other DNA
gattggtatcagtgggacta

SEQ ID NO: 71411 - DNA, 20 bp, synthetic construct
  source 1..20: mol_type = other DNA
agattggtatcagtgggact

SEQ ID NO: 71412 - DNA, 20 bp, synthetic construct
  source 1..20: mol_type = other DNA
tagattggtatcagtgggac

SEQ ID NO: 71413 - DNA, 20 bp, synthetic construct
  source 1..20: mol_type = other DNA
atagattggtatcagtggga

SEQ ID NO: 71414 - DNA, 20 bp, synthetic construct
  source 1..20: mol_type = other DNA
tatagattggtatcagtggg

SEQ ID NO: 71415 - DNA, 20 bp, synthetic construct
  source 1..20: mol_type = other DNA
atatagattggtatcagtgg

SEQ ID NO: 71416 - DNA, 20 bp, synthetic construct
  source 1..20: mol_type = other DNA
tatatagattggtatcagtg

SEQ ID NO: 71417 - DNA, 20 bp, synthetic construct
  source 1..20: mol_type = other DNA
gtatatagattggtatcagt

SEQ ID NO: 71418 - DNA, 20 bp, synthetic construct
  source 1..20: mol_type = other DNA
agtatatagattggtatcag

SEQ ID NO: 71419 - DNA, 20 bp, synthetic construct
  source 1..20: mol_type = other DNA
cagtatatagattggtatca

SEQ ID NO: 71420 - DNA, 20 bp, synthetic construct
  source 1..20: mol_type = other DNA
tcagtatatagattggtatc

SEQ ID NO: 71421 - DNA, 20 bp, synthetic construct
  source 1..20: mol_type = other DNA
atcagtatatagattggtat

SEQ ID NO: 71422 - DNA, 20 bp, synthetic construct
  source 1..20: mol_type = other DNA
tatcagtatatagattggta

SEQ ID NO: 71423 - DNA, 20 bp, synthetic construct
  source 1..20: mol_type = other DNA
gtatcagtatatagattggt

SEQ ID NO: 71424 - DNA, 20 bp, synthetic construct
  source 1..20: mol_type = other DNA
agtatcagtatatagattgg

SEQ ID NO: 71425 - DNA, 20 bp, synthetic construct
  source 1..20: mol_type = other DNA
aagtatcagtatatagattg

SEQ ID NO: 71426 - DNA, 20 bp, synthetic construct
  source 1..20: mol_type = other DNA
aaagtatcagtatatagatt

SEQ ID NO: 71427 - DNA, 20 bp, synthetic construct
  source 1..20: mol_type = other DNA
taaagtatcagtatatagat

SEQ ID NO: 71428 - DNA, 20 bp, synthetic construct
  source 1..20: mol_type = other DNA
ataaagtatcagtatataga

SEQ ID NO: 71429 - DNA, 20 bp, synthetic construct
  source 1..20: mol_type = other DNA
tataaagtatcagtatatag

SEQ ID NO: 71430 - DNA, 20 bp, synthetic construct
  source 1..20: mol_type = other DNA
atataaagtatcagtatata

SEQ ID NO: 71431 - DNA, 20 bp, synthetic construct
  source 1..20: mol_type = other DNA
tatataaagtatcagtatat

SEQ ID NO: 71432 - DNA, 20 bp, synthetic construct
  source 1..20: mol_type = other DNA
ctatataaagtatcagtata

SEQ ID NO: 71433 - DNA, 20 bp, synthetic construct
  source 1..20: mol_type = other DNA
actatataaagtatcagtat

SEQ ID NO: 71434 - DNA, 20 bp, synthetic construct
  source 1..20: mol_type = other DNA
tactatataaagtatcagta

SEQ ID NO: 71435 - DNA, 20 bp, synthetic construct
  source 1..20: mol_type = other DNA
atactatataaagtatcagt

SEQ ID NO: 71436 - DNA, 20 bp, synthetic construct
  source 1..20: mol_type = other DNA
tatactatataaagtatcag

SEQ ID NO: 71437 - DNA, 20 bp, synthetic construct
  source 1..20: mol_type = other DNA
atatactatataaagtatca

SEQ ID NO: 71438 - DNA, 20 bp, synthetic construct
  source 1..20: mol_type = other DNA
tatatactatataaagtatc

SEQ ID NO: 71439 - DNA, 20 bp, synthetic construct
  source 1..20: mol_type = other DNA
ctatatactatataaagtat

SEQ ID NO: 71440 - DNA, 20 bp, synthetic construct
  source 1..20: mol_type = other DNA
tctatatactatataaagta

SEQ ID NO: 71441 - DNA, 20 bp, synthetic construct
  source 1..20: mol_type = other DNA
atctatatactatataaagt

SEQ ID NO: 71442 - DNA, 20 bp, synthetic construct
  source 1..20: mol_type = other DNA
aatctatatactatataaag

SEQ ID NO: 71443 - DNA, 20 bp, synthetic construct
  source 1..20: mol_type = other DNA
caatctatatactatataaa

SEQ ID NO: 71444 - DNA, 20 bp, synthetic construct
  source 1..20: mol_type = other DNA
ccaatctatatactatataa

SEQ ID NO: 71445 - DNA, 20 bp, synthetic construct
  source 1..20: mol_type = other DNA
accaatctatatactatata

SEQ ID NO: 71446 - DNA, 20 bp, synthetic construct
  source 1..20: mol_type = other DNA
gaccaatctatatactatat

SEQ ID NO: 71447 - DNA, 20 bp, synthetic construct
  source 1..20: mol_type = other DNA
ggaccaatctatatactata

SEQ ID NO: 71448 - DNA, 20 bp, synthetic construct
  source 1..20: mol_type = other DNA
tggaccaatctatatactat

SEQ ID NO: 71449 - DNA, 20 bp, synthetic construct
  source 1..20: mol_type = other DNA
gtggaccaatctatatacta

SEQ ID NO: 71450 - DNA, 20 bp, synthetic construct
  source 1..20: mol_type = other DNA
tgtggaccaatctatatact

SEQ ID NO: 71451 - DNA, 20 bp, synthetic construct
  source 1..20: mol_type = other DNA
atgtggaccaatctatatac

SEQ ID NO: 71452 - DNA, 20 bp, synthetic construct
  source 1..20: mol_type = other DNA
tatgtggaccaatctatata

SEQ ID NO: 71453 - DNA, 20 bp, synthetic construct
  source 1..20: mol_type = other DNA
atatgtggaccaatctatat

SEQ ID NO: 71454 - DNA, 20 bp, synthetic construct
  source 1..20: mol_type = other DNA
tatatgtggaccaatctata

SEQ ID NO: 71455 - DNA, 20 bp, synthetic construct
  source 1..20: mol_type = other DNA
ttatatgtggaccaatctat

SEQ ID NO: 71456 - DNA, 20 bp, synthetic construct
  source 1..20: mol_type = other DNA
gttatatgtggaccaatcta

SEQ ID NO: 71457 - DNA, 20 bp, synthetic construct
  source 1..20: mol_type = other DNA
cgttatatgtggaccaatct

SEQ ID NO: 71458 - DNA, 20 bp, synthetic construct
  source 1..20: mol_type = other DNA
tcgttatatgtggaccaatc

SEQ ID NO: 71459 - DNA, 20 bp, synthetic construct
  source 1..20: mol_type = other DNA
atcgttatatgtggaccaat

SEQ ID NO: 71460 - DNA, 20 bp, synthetic construct
  source 1..20: mol_type = other DNA
catcgttatatgtggaccaa

SEQ ID NO: 71461 - DNA, 20 bp, synthetic construct
  source 1..20: mol_type = other DNA
tcatcgttatatgtggacca

SEQ ID NO: 71462 - DNA, 20 bp, synthetic construct
  source 1..20: mol_type = other DNA
gtcatcgttatatgtggacc

SEQ ID NO: 71463 - DNA, 20 bp, synthetic construct
  source 1..20: mol_type = other DNA
tgtcatcgttatatgtggac

SEQ ID NO: 71464 - DNA, 20 bp, synthetic construct
  source 1..20: mol_type = other DNA
gtgtcatcgttatatgtgga

SEQ ID NO: 71465 - DNA, 20 bp, synthetic construct
  source 1..20: mol_type = other DNA
tgtgtcatcgttatatgtgg

SEQ ID NO: 71466 - DNA, 20 bp, synthetic construct
  source 1..20: mol_type = other DNA
atgtgtcatcgttatatgtg

SEQ ID NO: 71467 - DNA, 20 bp, synthetic construct
  source 1..20: mol_type = other DNA
tatgtgtcatcgttatatgt

SEQ ID NO: 71468 - DNA, 20 bp, synthetic construct
  source 1..20: mol_type = other DNA
ttatgtgtcatcgttatatg

SEQ ID NO: 71469 - DNA, 20 bp, synthetic construct
  source 1..20: mol_type = other DNA
attatgtgtcatcgttatat

SEQ ID NO: 71470 - DNA, 20 bp, synthetic construct
  source 1..20: mol_type = other DNA
cattatgtgtcatcgttata

SEQ ID NO: 71471 - DNA, 20 bp, synthetic construct
  source 1..20: mol_type = other DNA
tcattatgtgtcatcgttat

SEQ ID NO: 71472 - DNA, 20 bp, synthetic construct
  source 1..20: mol_type = other DNA
ctcattatgtgtcatcgtta

SEQ ID NO: 71473 - DNA, 20 bp, synthetic construct
  source 1..20: mol_type = other DNA
tctcattatgtgtcatcgtt

SEQ ID NO: 71474 - DNA, 20 bp, synthetic construct
  source 1..20: mol_type = other DNA
ttctcattatgtgtcatcgt

SEQ ID NO: 71475 - DNA, 20 bp, synthetic construct
  source 1..20: mol_type = other DNA
tttctcattatgtgtcatcg

SEQ ID NO: 71476 - DNA, 20 bp, synthetic construct
  source 1..20: mol_type = other DNA
gtttctcattatgtgtcatc

SEQ ID NO: 71477 - DNA, 20 bp, synthetic construct
  source 1..20: mol_type = other DNA
agtttctcattatgtgtcat

SEQ ID NO: 71478 - DNA, 20 bp, synthetic construct
  source 1..20: mol_type = other DNA
cagtttctcattatgtgtca

SEQ ID NO: 71479 - DNA, 20 bp, synthetic construct
  source 1..20: mol_type = other DNA
acagtttctcattatgtgtc

SEQ ID NO: 71480 - DNA, 20 bp, synthetic construct
  source 1..20: mol_type = other DNA
gacagtttctcattatgtgt

SEQ ID NO: 71481 - DNA, 20 bp, synthetic construct
  source 1..20: mol_type = other DNA
agacagtttctcattatgtg

SEQ ID NO: 71482 - DNA, 20 bp, synthetic construct
  source 1..20: mol_type = other DNA
aagacagtttctcattatgt

SEQ ID NO: 71483 - DNA, 20 bp, synthetic construct
  source 1..20: mol_type = other DNA
taagacagtttctcattatg

SEQ ID NO: 71484 - DNA, 20 bp, synthetic construct
  source 1..20: mol_type = other DNA
ttaagacagtttctcattat

SEQ ID NO: 71485 - DNA, 20 bp, synthetic construct
  source 1..20: mol_type = other DNA
tttaagacagtttctcatta

SEQ ID NO: 71486 - DNA, 20 bp, synthetic construct
  source 1..20: mol_type = other DNA
ttttaagacagtttctcatt

SEQ ID NO: 71487 - DNA, 20 bp, synthetic construct
  source 1..20: mol_type = other DNA
tttttaagacagtttctcat

SEQ ID NO: 71488 - DNA, 20 bp, synthetic construct
  source 1..20: mol_type = other DNA
ctttttaagacagtttctca

SEQ ID NO: 71489 - DNA, 20 bp, synthetic construct
  source 1..20: mol_type = other DNA
actttttaagacagtttctc

SEQ ID NO: 71490 - DNA, 20 bp, synthetic construct
  source 1..20: mol_type = other DNA
aactttttaagacagtttct

SEQ ID NO: 71491 - DNA, 20 bp, synthetic construct
  source 1..20: mol_type = other DNA
caactttttaagacagtttc

SEQ ID NO: 71492 - DNA, 20 bp, synthetic construct
  source 1..20: mol_type = other DNA
acaactttttaagacagttt

SEQ ID NO: 71493 - DNA, 20 bp, synthetic construct
  source 1..20: mol_type = other DNA
aacaactttttaagacagtt

SEQ ID NO: 71494 - DNA, 20 bp, synthetic construct
  source 1..20: mol_type = other DNA
caacaactttttaagacagt

SEQ ID NO: 71495 - DNA, 20 bp, synthetic construct
  source 1..20: mol_type = other DNA
tcaacaactttttaagacag

SEQ ID NO: 71496 - DNA, 20 bp, synthetic construct
  source 1..20: mol_type = other DNA
ttcaacaactttttaagaca

SEQ ID NO: 71497 - DNA, 20 bp, synthetic construct
  source 1..20: mol_type = other DNA
tttcaacaactttttaagac

SEQ ID NO: 71498 - DNA, 20 bp, synthetic construct
  source 1..20: mol_type = other DNA
ctttcaacaactttttaaga

SEQ ID NO: 71499 - DNA, 20 bp, synthetic construct
  source 1..20: mol_type = other DNA
actttcaacaactttttaag

SEQ ID NO: 71500 - DNA, 20 bp, synthetic construct
  source 1..20: mol_type = other DNA
cactttcaacaactttttaa

SEQ ID NO: 71501 - DNA, 20 bp, synthetic construct
  source 1..20: mol_type = other DNA
gcactttcaacaacttttta

SEQ ID NO: 71502 - DNA, 20 bp, synthetic construct
  source 1..20: mol_type = other DNA
ggcactttcaacaacttttt

SEQ ID NO: 71503 - DNA, 20 bp, synthetic construct
  source 1..20: mol_type = other DNA
cggcactttcaacaactttt

SEQ ID NO: 71504 - DNA, 20 bp, synthetic construct
  source 1..20: mol_type = other DNA
gcggcactttcaacaacttt

SEQ ID NO: 71505 - DNA, 20 bp, synthetic construct
  source 1..20: mol_type = other DNA
tgcggcactttcaacaactt

SEQ ID NO: 71506 - DNA, 20 bp, synthetic construct
  source 1..20: mol_type = other DNA
ctgcggcactttcaacaact

SEQ ID NO: 71507 - DNA, 20 bp, synthetic construct
  source 1..20: mol_type = other DNA
cctgcggcactttcaacaac

SEQ ID NO: 71508 - DNA, 20 bp, synthetic construct
  source 1..20: mol_type = other DNA
tcctgcggcactttcaacaa

SEQ ID NO: 71509 - DNA, 20 bp, synthetic construct
  source 1..20: mol_type = other DNA
ttcctgcggcactttcaaca

SEQ ID NO: 71510 - DNA, 20 bp, synthetic construct
  source 1..20: mol_type = other DNA
attcctgcggcactttcaac

SEQ ID NO: 71511 - DNA, 20 bp, synthetic construct
  source 1..20: mol_type = other DNA
tattcctgcggcactttcaa

SEQ ID NO: 71512 - DNA, 20 bp, synthetic construct
  source 1..20: mol_type = other DNA
ctattcctgcggcactttca

SEQ ID NO: 71513 - DNA, 20 bp, synthetic construct
  source 1..20: mol_type = other DNA
cctattcctgcggcactttc

SEQ ID NO: 71514 - DNA, 20 bp, synthetic construct
  source 1..20: mol_type = other DNA
tcctattcctgcggcacttt

SEQ ID NO: 71515 - DNA, 20 bp, synthetic construct
  source 1..20: mol_type = other DNA
ttcctattcctgcggcactt

SEQ ID NO: 71516 - DNA, 20 bp, synthetic construct
  source 1..20: mol_type = other DNA
attcctattcctgcggcact

SEQ ID NO: 71517 - DNA, 20 bp, synthetic construct
  source 1..20: mol_type = other DNA
aattcctattcctgcggcac

SEQ ID NO: 71518 - DNA, 20 bp, synthetic construct
  source 1..20: mol_type = other DNA
caattcctattcctgcggca

SEQ ID NO: 71519 - DNA, 20 bp, synthetic construct
  source 1..20: mol_type = other DNA
tcaattcctattcctgcggc

SEQ ID NO: 71520 - DNA, 20 bp, synthetic construct
  source 1..20: mol_type = other DNA
atcaattcctattcctgcgg

SEQ ID NO: 71521 - DNA, 20 bp, synthetic construct
  source 1..20: mol_type = other DNA
gatcaattcctattcctgcg

SEQ ID NO: 71522 - DNA, 20 bp, synthetic construct
  source 1..20: mol_type = other DNA
tgatcaattcctattcctgc

SEQ ID NO: 71523 - DNA, 20 bp, synthetic construct
  source 1..20: mol_type = other DNA
ttgatcaattcctattcctg

SEQ ID NO: 71524 - DNA, 20 bp, synthetic construct
  source 1..20: mol_type = other DNA
tttgatcaattcctattcct

SEQ ID NO: 71525 - DNA, 20 bp, synthetic construct
  source 1..20: mol_type = other DNA
ttttgatcaattcctattcc

SEQ ID NO: 71526 - DNA, 20 bp, synthetic construct
  source 1..20: mol_type = other DNA
gttttgatcaattcctattc

SEQ ID NO: 71527 - DNA, 20 bp, synthetic construct
  source 1..20: mol_type = other DNA
tgttttgatcaattcctatt

SEQ ID NO: 71528 - DNA, 20 bp, synthetic construct
  source 1..20: mol_type = other DNA
ttgttttgatcaattcctat

SEQ ID NO: 71529 - DNA, 20 bp, synthetic construct
  source 1..20: mol_type = other DNA
attgttttgatcaattccta

SEQ ID NO: 71530 - DNA, 20 bp, synthetic construct
  source 1..20: mol_type = other DNA
tattgttttgatcaattcct

SEQ ID NO: 71531 - DNA, 20 bp, synthetic construct
  source 1..20: mol_type = other DNA
atattgttttgatcaattcc

SEQ ID NO: 71532 - DNA, 20 bp, synthetic construct
  source 1..20: mol_type = other DNA
catattgttttgatcaattc

SEQ ID NO: 71533 - DNA, 20 bp, synthetic construct
  source 1..20: mol_type = other DNA
tcatattgttttgatcaatt

SEQ ID NO: 71534 - DNA, 20 bp, synthetic construct
  source 1..20: mol_type = other DNA
atcatattgttttgatcaat

SEQ ID NO: 71535 - DNA, 20 bp, synthetic construct
  source 1..20: mol_type = other DNA
aatcatattgttttgatcaa

SEQ ID NO: 71536 - DNA, 20 bp, synthetic construct
  source 1..20: mol_type = other DNA
aaatcatattgttttgatca

SEQ ID NO: 71537 - DNA, 20 bp, synthetic construct
  source 1..20: mol_type = other DNA
aaaatcatattgttttgatc

SEQ ID NO: 71538 - DNA, 20 bp, synthetic construct
  source 1..20: mol_type = other DNA
aaaaatcatattgttttgat

SEQ ID NO: 71539 - DNA, 20 bp, synthetic construct
  source 1..20: mol_type = other DNA
aaaaaatcatattgttttga

SEQ ID NO: 71540 - DNA, 20 bp, synthetic construct
  source 1..20: mol_type = other DNA
taaaaaatcatattgttttg

SEQ ID NO: 71541 - DNA, 20 bp, synthetic construct
  source 1..20: mol_type = other DNA
ctaaaaaatcatattgtttt

SEQ ID NO: 71542 - DNA, 20 bp, synthetic construct
  source 1..20: mol_type = other DNA
cctaaaaaatcatattgttt

SEQ ID NO: 71543 - DNA, 20 bp, synthetic construct
  source 1..20: mol_type = other DNA
acctaaaaaatcatattgtt

SEQ ID NO: 71544 - DNA, 20 bp, synthetic construct
  source 1..20: mol_type = other DNA
aacctaaaaaatcatattgt

SEQ ID NO: 71545 - DNA, 20 bp, synthetic construct
  source 1..20: mol_type = other DNA
aaacctaaaaaatcatattg

SEQ ID NO: 71546 - DNA, 20 bp, synthetic construct
  source 1..20: mol_type = other DNA
taaacctaaaaaatcatatt

SEQ ID NO: 71547 - DNA, 20 bp, synthetic construct
  source 1..20: mol_type = other DNA
ataaacctaaaaaatcatat

SEQ ID NO: 71548 - DNA, 20 bp, synthetic construct
  source 1..20: mol_type = other DNA
tataaacctaaaaaatcata

SEQ ID NO: 71549 - DNA, 20 bp, synthetic construct
  source 1..20: mol_type = other DNA
atataaacctaaaaaatcat

SEQ ID NO: 71550 - DNA, 20 bp, synthetic construct
  source 1..20: mol_type = other DNA
catataaacctaaaaaatca

SEQ ID NO: 71551 - DNA, 20 bp, synthetic construct
  source 1..20: mol_type = other DNA
ccatataaacctaaaaaatc

SEQ ID NO: 71552 - DNA, 20 bp, synthetic construct
  source 1..20: mol_type = other DNA
tccatataaacctaaaaaat

SEQ ID NO: 71553 - DNA, 20 bp, synthetic construct
  source 1..20: mol_type = other DNA
ttccatataaacctaaaaaa

SEQ ID NO: 71554 - DNA, 20 bp, synthetic construct
  source 1..20: mol_type = other DNA
gttccatataaacctaaaaa

SEQ ID NO: 71555 - DNA, 20 bp, synthetic construct
  source 1..20: mol_type = other DNA
agttccatataaacctaaaa

SEQ ID NO: 71556 - DNA, 20 bp, synthetic construct
  source 1..20: mol_type = other DNA
aagttccatataaacctaaa

SEQ ID NO: 71557 - DNA, 20 bp, synthetic construct
  source 1..20: mol_type = other DNA
aaagttccatataaacctaa

SEQ ID NO: 71558 - DNA, 20 bp, synthetic construct
  source 1..20: mol_type = other DNA
caaagttccatataaaccta

SEQ ID NO: 71559 - DNA, 20 bp, synthetic construct
  source 1..20: mol_type = other DNA
tcaaagttccatataaacct

SEQ ID NO: 71560 - DNA, 20 bp, synthetic construct
  source 1..20: mol_type = other DNA
atcaaagttccatataaacc

SEQ ID NO: 71561 - DNA, 20 bp, synthetic construct
  source 1..20: mol_type = other DNA
catcaaagttccatataaac

SEQ ID NO: 71562 - DNA, 20 bp, synthetic construct
  source 1..20: mol_type = other DNA
acatcaaagttccatataaa

SEQ ID NO: 71563 - DNA, 20 bp, synthetic construct
  source 1..20: mol_type = other DNA
aacatcaaagttccatataa

SEQ ID NO: 71564 - DNA, 20 bp, synthetic construct
  source 1..20: mol_type = other DNA
aaacatcaaagttccatata

SEQ ID NO: 71565 - DNA, 20 bp, synthetic construct
  source 1..20: mol_type = other DNA
caaacatcaaagttccatat

SEQ ID NO: 71566 - DNA, 20 bp, synthetic construct
  source 1..20: mol_type = other DNA
tcaaacatcaaagttccata

SEQ ID NO: 71567 - DNA, 20 bp, synthetic construct
  source 1..20: mol_type = other DNA
ctcaaacatcaaagttccat

SEQ ID NO: 71568 - DNA, 20 bp, synthetic construct
  source 1..20: mol_type = other DNA
tctcaaacatcaaagttcca

SEQ ID NO: 71569 - DNA, 20 bp, synthetic construct
  source 1..20: mol_type = other DNA
ttctcaaacatcaaagttcc

SEQ ID NO: 71570 - DNA, 20 bp, synthetic construct
  source 1..20: mol_type = other DNA
tttctcaaacatcaaagttc

SEQ ID NO: 71571 - DNA, 20 bp, synthetic construct
  source 1..20: mol_type = other DNA
ttttctcaaacatcaaagtt

SEQ ID NO: 71572 - DNA, 20 bp, synthetic construct
  source 1..20: mol_type = other DNA
cttttctcaaacatcaaagt

SEQ ID NO: 71573 - DNA, 20 bp, synthetic construct
  source 1..20: mol_type = other DNA
ccttttctcaaacatcaaag

SEQ ID NO: 71574 - DNA, 20 bp, synthetic construct
  source 1..20: mol_type = other DNA
gccttttctcaaacatcaaa

SEQ ID NO: 71575 - DNA, 20 bp, synthetic construct
  source 1..20: mol_type = other DNA
agccttttctcaaacatcaa

SEQ ID NO: 71576 - DNA, 20 bp, synthetic construct
  source 1..20: mol_type = other DNA
cagccttttctcaaacatca

SEQ ID NO: 71577 - DNA, 20 bp, synthetic construct
  source 1..20: mol_type = other DNA
tcagccttttctcaaacatc

SEQ ID NO: 71578 - DNA, 20 bp, synthetic construct
  source 1..20: mol_type = other DNA
atcagccttttctcaaacat

SEQ ID NO: 71579 - DNA, 20 bp, synthetic construct
  source 1..20: mol_type = other DNA
aatcagccttttctcaaaca

SEQ ID NO: 71580 - DNA, 20 bp, synthetic construct
  source 1..20: mol_type = other DNA
aaatcagccttttctcaaac

SEQ ID NO: 71581 - DNA, 20 bp, synthetic construct
  source 1..20: mol_type = other DNA
taaatcagccttttctcaaa

SEQ ID NO: 71582 - DNA, 20 bp, synthetic construct
  source 1..20: mol_type = other DNA
ctaaatcagccttttctcaa

SEQ ID NO: 71583 - DNA, 20 bp, synthetic construct
  source 1..20: mol_type = other DNA
actaaatcagccttttctca

SEQ ID NO: 71584 - DNA, 20 bp, synthetic construct
  source 1..20: mol_type = other DNA
aactaaatcagccttttctc

SEQ ID NO: 71585 - DNA, 20 bp, synthetic construct
  source 1..20: mol_type = other DNA
caactaaatcagccttttct

SEQ ID NO: 71586 - DNA, 20 bp, synthetic construct
  source 1..20: mol_type = other DNA
tcaactaaatcagccttttc

SEQ ID NO: 71587 - DNA, 20 bp, synthetic construct
  source 1..20: mol_type = other DNA
ctcaactaaatcagcctttt

SEQ ID NO: 71588 - DNA, 20 bp, synthetic construct
  source 1..20: mol_type = other DNA
tctcaactaaatcagccttt

SEQ ID NO: 71589 - DNA, 20 bp, synthetic construct
  source 1..20: mol_type = other DNA
ttctcaactaaatcagcctt

SEQ ID NO: 71590 - DNA, 20 bp, synthetic construct
  source 1..20: mol_type = other DNA
cttctcaactaaatcagcct

SEQ ID NO: 71591 - DNA, 20 bp, synthetic construct
  source 1..20: mol_type = other DNA
tcttctcaactaaatcagcc

SEQ ID NO: 71592 - DNA, 20 bp, synthetic construct
  source 1..20: mol_type = other DNA
ttcttctcaactaaatcagc

SEQ ID NO: 71593 - DNA, 20 bp, synthetic construct
  source 1..20: mol_type = other DNA
tttcttctcaactaaatcag

SEQ ID NO: 71594 - DNA, 20 bp, synthetic construct
  source 1..20: mol_type = other DNA
atttcttctcaactaaatca

SEQ ID NO: 71595 - DNA, 20 bp, synthetic construct
  source 1..20: mol_type = other DNA
catttcttctcaactaaatc

SEQ ID NO: 71596 - DNA, 20 bp, synthetic construct
  source 1..20: mol_type = other DNA
ccatttcttctcaactaaat

SEQ ID NO: 71597 - DNA, 20 bp, synthetic construct
  source 1..20: mol_type = other DNA
accatttcttctcaactaaa

SEQ ID NO: 71598 - DNA, 20 bp, synthetic construct
  source 1..20: mol_type = other DNA
aaccatttcttctcaactaa

SEQ ID NO: 71599 - DNA, 20 bp, synthetic construct
  source 1..20: mol_type = other DNA
taaccatttcttctcaacta

SEQ ID NO: 71600 - DNA, 20 bp, synthetic construct
  source 1..20: mol_type = other DNA
ctaaccatttcttctcaact

SEQ ID NO: 71601 - DNA, 20 bp, synthetic construct
  source 1..20: mol_type = other DNA
gctaaccatttcttctcaac

SEQ ID NO: 71602 - DNA, 20 bp, synthetic construct
  source 1..20: mol_type = other DNA
agctaaccatttcttctcaa

SEQ ID NO: 71603 - DNA, 20 bp, synthetic construct
  source 1..20: mol_type = other DNA
cagctaaccatttcttctca

SEQ ID NO: 71604 - DNA, 20 bp, synthetic construct
  source 1..20: mol_type = other DNA
tcagctaaccatttcttctc

SEQ ID NO: 71605 - DNA, 20 bp, synthetic construct
  source 1..20: mol_type = other DNA
ctcagctaaccatttcttct

SEQ ID NO: 71606 - DNA, 20 bp, synthetic construct
  source 1..20: mol_type = other DNA
cctcagctaaccatttcttc

SEQ ID NO: 71607 - DNA, 20 bp, synthetic construct
  source 1..20: mol_type = other DNA
tcctcagctaaccatttctt

SEQ ID NO: 71608 - DNA, 20 bp, synthetic construct
  source 1..20: mol_type = other DNA
atcctcagctaaccatttct

SEQ ID NO: 71609 - DNA, 20 bp, synthetic construct
  source 1..20: mol_type = other DNA
aatcctcagctaaccatttc

SEQ ID NO: 71610 - DNA, 20 bp, synthetic construct
  source 1..20: mol_type = other DNA
aaatcctcagctaaccattt

SEQ ID NO: 71611 - DNA, 20 bp, synthetic construct
  source 1..20: mol_type = other DNA
aaaatcctcagctaaccatt

SEQ ID NO: 71612 - DNA, 20 bp, synthetic construct
  source 1..20: mol_type = other DNA
caaaatcctcagctaaccat

SEQ ID NO: 71613 - DNA, 20 bp, synthetic construct
  source 1..20: mol_type = other DNA
tcaaaatcctcagctaacca

SEQ ID NO: 71614 - DNA, 20 bp, synthetic construct
  source 1..20: mol_type = other DNA
atcaaaatcctcagctaacc

SEQ ID NO: 71615 - DNA, 20 bp, synthetic construct
  source 1..20: mol_type = other DNA
catcaaaatcctcagctaac

SEQ ID NO: 71616 - DNA, 20 bp, synthetic construct
  source 1..20: mol_type = other DNA
tcatcaaaatcctcagctaa

SEQ ID NO: 71617 - DNA, 20 bp, synthetic construct
  source 1..20: mol_type = other DNA
gtcatcaaaatcctcagcta

SEQ ID NO: 71618 - DNA, 20 bp, synthetic construct
  source 1..20: mol_type = other DNA
agtcatcaaaatcctcagct

SEQ ID NO: 71619 - DNA, 20 bp, synthetic construct
  source 1..20: mol_type = other DNA
aagtcatcaaaatcctcagc

SEQ ID NO: 71620 - DNA, 20 bp, synthetic construct
  source 1..20: mol_type = other DNA
gaagtcatcaaaatcctcag

SEQ ID NO: 71621 - DNA, 20 bp, synthetic construct
  source 1..20: mol_type = other DNA
agaagtcatcaaaatcctca

SEQ ID NO: 71622 - DNA, 20 bp, synthetic construct
  source 1..20: mol_type = other DNA
gagaagtcatcaaaatcctc

SEQ ID NO: 71623 - DNA, 20 bp, synthetic construct
  source 1..20: mol_type = other DNA
agagaagtcatcaaaatcct

SEQ ID NO: 71624 - DNA, 20 bp, synthetic construct
  source 1..20: mol_type = other DNA
cagagaagtcatcaaaatcc

SEQ ID NO: 71625 - DNA, 20 bp, synthetic construct
  source 1..20: mol_type = other DNA
ccagagaagtcatcaaaatc

SEQ ID NO: 71626 - DNA, 20 bp, synthetic construct
  source 1..20: mol_type = other DNA
tccagagaagtcatcaaaat

SEQ ID NO: 71627 - DNA, 20 bp, synthetic construct
  source 1..20: mol_type = other DNA
ttccagagaagtcatcaaaa

SEQ ID NO: 71628 - DNA, 20 bp, synthetic construct
  source 1..20: mol_type = other DNA
cttccagagaagtcatcaaa

SEQ ID NO: 71629 - DNA, 20 bp, synthetic construct
  source 1..20: mol_type = other DNA
gcttccagagaagtcatcaa

SEQ ID NO: 71630 - DNA, 20 bp, synthetic construct
  source 1..20: mol_type = other DNA
tgcttccagagaagtcatca

SEQ ID NO: 71631 - DNA, 20 bp, synthetic construct
  source 1..20: mol_type = other DNA
gtgcttccagagaagtcatc

SEQ ID NO: 71632 - DNA, 20 bp, synthetic construct
  source 1..20: mol_type = other DNA
tgtgcttccagagaagtcat

SEQ ID NO: 71633 - DNA, 20 bp, synthetic construct
  source 1..20: mol_type = other DNA
atgtgcttccagagaagtca

SEQ ID NO: 71634 - DNA, 20 bp, synthetic construct
  source 1..20: mol_type = other DNA
aatgtgcttccagagaagtc

SEQ ID NO: 71635 - DNA, 20 bp, synthetic construct
  source 1..20: mol_type = other DNA
aaatgtgcttccagagaagt

SEQ ID NO: 71636 - DNA, 20 bp, synthetic construct
  source 1..20: mol_type = other DNA
caaatgtgcttccagagaag

SEQ ID NO: 71637 - DNA, 20 bp, synthetic construct
  source 1..20: mol_type = other DNA
tcaaatgtgcttccagagaa

SEQ ID NO: 71638 - DNA, 20 bp, synthetic construct
  source 1..20: mol_type = other DNA
ctcaaatgtgcttccagaga

SEQ ID NO: 71639 - DNA, 20 bp, synthetic construct
  source 1..20: mol_type = other DNA
cctcaaatgtgcttccagag

SEQ ID NO: 71640 - DNA, 20 bp, synthetic construct
  source 1..20: mol_type = other DNA
ccctcaaatgtgcttccaga

SEQ ID NO: 71641 - DNA, 20 bp, synthetic construct
  source 1..20: mol_type = other DNA
accctcaaatgtgcttccag

SEQ ID NO: 71642 - DNA, 20 bp, synthetic construct
  source 1..20: mol_type = other DNA
aaccctcaaatgtgcttcca

SEQ ID NO: 71643 - DNA, 20 bp, synthetic construct
  source 1..20: mol_type = other DNA
aaaccctcaaatgtgcttcc

SEQ ID NO: 71644 - DNA, 20 bp, synthetic construct
  source 1..20: mol_type = other DNA
caaaccctcaaatgtgcttc

SEQ ID NO: 71645 - DNA, 20 bp, synthetic construct
  source 1..20: mol_type = other DNA
acaaaccctcaaatgtgctt

SEQ ID NO: 71646 - DNA, 20 bp, synthetic construct
  source 1..20: mol_type = other DNA
cacaaaccctcaaatgtgct

SEQ ID NO: 71647 - DNA, 20 bp, synthetic construct
  source 1..20: mol_type = other DNA
tcacaaaccctcaaatgtgc

SEQ ID NO: 71648 - DNA, 20 bp, synthetic construct
  source 1..20: mol_type = other DNA
atcacaaaccctcaaatgtg

SEQ ID NO: 71649 - DNA, 20 bp, synthetic construct
  source 1..20: mol_type = other DNA
catcacaaaccctcaaatgt

SEQ ID NO: 71650 - DNA, 20 bp, synthetic construct
  source 1..20: mol_type = other DNA
acatcacaaaccctcaaatg

SEQ ID NO: 71651 - DNA, 20 bp, synthetic construct
  source 1..20: mol_type = other DNA
aacatcacaaaccctcaaat

SEQ ID NO: 71652 - DNA, 20 bp, synthetic construct
  source 1..20: mol_type = other DNA
taacatcacaaaccctcaaa

SEQ ID NO: 71653 - DNA, 20 bp, synthetic construct
  source 1..20: mol_type = other DNA
ttaacatcacaaaccctcaa

SEQ ID NO: 71654 - DNA, 20 bp, synthetic construct
  source 1..20: mol_type = other DNA
tttaacatcacaaaccctca

SEQ ID NO: 71655 - DNA, 20 bp, synthetic construct
  source 1..20: mol_type = other DNA
atttaacatcacaaaccctc

SEQ ID NO: 71656 - DNA, 20 bp, synthetic construct
  source 1..20: mol_type = other DNA
gatttaacatcacaaaccct

SEQ ID NO: 71657 - DNA, 20 bp, synthetic construct
  source 1..20: mol_type = other DNA
agatttaacatcacaaaccc

SEQ ID NO: 71658 - DNA, 20 bp, synthetic construct
  source 1..20: mol_type = other DNA
cagatttaacatcacaaacc

SEQ ID NO: 71659 - DNA, 20 bp, synthetic construct
  source 1..20: mol_type = other DNA
tcagatttaacatcacaaac

SEQ ID NO: 71660 - DNA, 20 bp, synthetic construct
  source 1..20: mol_type = other DNA
atcagatttaacatcacaaa

SEQ ID NO: 71661 - DNA, 20 bp, synthetic construct
  source 1..20: mol_type = other DNA
catcagatttaacatcacaa

SEQ ID NO: 71662 - DNA, 20 bp, synthetic construct
  source 1..20: mol_type = other DNA
acatcagatttaacatcaca

SEQ ID NO: 71663 - DNA, 20 bp, synthetic construct
  source 1..20: mol_type = other DNA
aacatcagatttaacatcac

SEQ ID NO: 71664 - DNA, 20 bp, synthetic construct
  source 1..20: mol_type = other DNA
taacatcagatttaacatca

SEQ ID NO: 71665 - DNA, 20 bp, synthetic construct
  source 1..20: mol_type = other DNA
ttaacatcagatttaacatc

SEQ ID NO: 71666 - DNA, 20 bp, synthetic construct
  source 1..20: mol_type = other DNA
attaacatcagatttaacat

SEQ ID NO: 71667 - DNA, 20 bp, synthetic construct
  source 1..20: mol_type = other DNA
cattaacatcagatttaaca

SEQ ID NO: 71668 - DNA, 20 bp, synthetic construct
  source 1..20: mol_type = other DNA
tcattaacatcagatttaac

SEQ ID NO: 71669 - DNA, 20 bp, synthetic construct
  source 1..20: mol_type = other DNA
atcattaacatcagatttaa

SEQ ID NO: 71670 - DNA, 20 bp, synthetic construct
  source 1..20: mol_type = other DNA
aatcattaacatcagattta

SEQ ID NO: 71671 - DNA, 20 bp, synthetic construct
  source 1..20: mol_type = other DNA
taatcattaacatcagattt

SEQ ID NO: 71672 - DNA, 20 bp, synthetic construct
  source 1..20: mol_type = other DNA
ataatcattaacatcagatt

SEQ ID NO: 71673 - DNA, 20 bp, synthetic construct
  source 1..20: mol_type = other DNA
aataatcattaacatcagat

SEQ ID NO: 71674 - DNA, 20 bp, synthetic construct
  source 1..20: mol_type = other DNA
aaataatcattaacatcaga

SEQ ID NO: 71675 - DNA, 20 bp, synthetic construct
  source 1..20: mol_type = other DNA
gaaataatcattaacatcag

SEQ ID NO: 71676 - DNA, 20 bp, synthetic construct
  source 1..20: mol_type = other DNA
tgaaataatcattaacatca

SEQ ID NO: 71677 - DNA, 20 bp, synthetic construct
  source 1..20: mol_type = other DNA
atgaaataatcattaacatc

SEQ ID NO: 71678 - DNA, 20 bp, synthetic construct
  source 1..20: mol_type = other DNA
gatgaaataatcattaacat

SEQ ID NO: 71679 - DNA, 20 bp, synthetic construct
  source 1..20: mol_type = other DNA
ggatgaaataatcattaaca

SEQ ID NO: 71680 - DNA, 20 bp, synthetic construct
  source 1..20: mol_type = other DNA
tggatgaaataatcattaac

SEQ ID NO: 71681 - DNA, 20 bp, synthetic construct
  source 1..20: mol_type = other DNA
ctggatgaaataatcattaa

SEQ ID NO: 71682 - DNA, 20 bp, synthetic construct
  source 1..20: mol_type = other DNA
actggatgaaataatcatta

SEQ ID NO: 71683 - DNA, 20 bp, synthetic construct
  source 1..20: mol_type = other DNA
aactggatgaaataatcatt

SEQ ID NO: 71684 - DNA, 20 bp, synthetic construct
  source 1..20: mol_type = other DNA
aaactggatgaaataatcat

SEQ ID NO: 71685 - DNA, 20 bp, synthetic construct
  source 1..20: mol_type = other DNA
aaaactggatgaaataatca

SEQ ID NO: 71686 - DNA, 20 bp, synthetic construct
  source 1..20: mol_type = other DNA
taaaactggatgaaataatc

SEQ ID NO: 71687 - DNA, 20 bp, synthetic construct
  source 1..20: mol_type = other DNA
ataaaactggatgaaataat

SEQ ID NO: 71688 - DNA, 20 bp, synthetic construct
  source 1..20: mol_type = other DNA
cataaaactggatgaaataa

SEQ ID NO: 71689 - DNA, 20 bp, synthetic construct
  source 1..20: mol_type = other DNA
acataaaactggatgaaata

SEQ ID NO: 71690 - DNA, 20 bp, synthetic construct
  source 1..20: mol_type = other DNA
gacataaaactggatgaaat

SEQ ID NO: 71691 - DNA, 20 bp, synthetic construct
  source 1..20: mol_type = other DNA
tgacataaaactggatgaaa

SEQ ID NO: 71692 - DNA, 20 bp, synthetic construct
  source 1..20: mol_type = other DNA
atgacataaaactggatgaa

SEQ ID NO: 71693 - DNA, 20 bp, synthetic construct
  source 1..20: mol_type = other DNA
aatgacataaaactggatga

SEQ ID NO: 71694 - DNA, 20 bp, synthetic construct
  source 1..20: mol_type = other DNA
aaatgacataaaactggatg

SEQ ID NO: 71695 - DNA, 20 bp, synthetic construct
  source 1..20: mol_type = other DNA
aaaatgacataaaactggat

SEQ ID NO: 71696 - DNA, 20 bp, synthetic construct
  source 1..20: mol_type = other DNA
taaaatgacataaaactgga

SEQ ID NO: 71697 - DNA, 20 bp, synthetic construct
  source 1..20: mol_type = other DNA
ataaaatgacataaaactgg

SEQ ID NO: 71698 - DNA, 20 bp, synthetic construct
  source 1..20: mol_type = other DNA
tataaaatgacataaaactg

SEQ ID NO: 71699 - DNA, 20 bp, synthetic construct
  source 1..20: mol_type = other DNA
ctataaaatgacataaaact

SEQ ID NO: 71700 - DNA, 20 bp, synthetic construct
  source 1..20: mol_type = other DNA
actataaaatgacataaaac

SEQ ID NO: 71701 - DNA, 20 bp, synthetic construct
  source 1..20: mol_type = other DNA
aactataaaatgacataaaa

SEQ ID NO: 71702 - DNA, 20 bp, synthetic construct
  source 1..20: mol_type = other DNA
aaactataaaatgacataaa

SEQ ID NO: 71703 - DNA, 20 bp, synthetic construct
  source 1..20: mol_type = other DNA
aaaactataaaatgacataa

SEQ ID NO: 71704 - DNA, 20 bp, synthetic construct
  source 1..20: mol_type = other DNA
aaaaactataaaatgacata

SEQ ID NO: 71705 - DNA, 20 bp, synthetic construct
  source 1..20: mol_type = other DNA
taaaaactataaaatgacat

SEQ ID NO: 71706 - DNA, 20 bp, synthetic construct
  source 1..20: mol_type = other DNA
ataaaaactataaaatgaca

SEQ ID NO: 71707 - DNA, 20 bp, synthetic construct
  source 1..20: mol_type = other DNA
tataaaaactataaaatgac

SEQ ID NO: 71708 - DNA, 20 bp, synthetic construct
  source 1..20: mol_type = other DNA
gtataaaaactataaaatga

SEQ ID NO: 71709 - DNA, 20 bp, synthetic construct
  source 1..20: mol_type = other DNA
tgtataaaaactataaaatg

SEQ ID NO: 71710 - DNA, 20 bp, synthetic construct
  source 1..20: mol_type = other DNA
atgtataaaaactataaaat

SEQ ID NO: 71711 - DNA, 20 bp, synthetic construct
  source 1..20: mol_type = other DNA
aatgtataaaaactataaaa

SEQ ID NO: 71712 - DNA, 20 bp, synthetic construct
  source 1..20: mol_type = other DNA
aaatgtataaaaactataaa

SEQ ID NO: 71713 - DNA, 20 bp, synthetic construct
  source 1..20: mol_type = other DNA
taaatgtataaaaactataa

SEQ ID NO: 71714 - DNA, 20 bp, synthetic construct
  source 1..20: mol_type = other DNA
ttaaatgtataaaaactata

SEQ ID NO: 71715 - DNA, 20 bp, synthetic construct
  source 1..20: mol_type = other DNA
cttaaatgtataaaaactat

SEQ ID NO: 71716 - DNA, 20 bp, synthetic construct
  source 1..20: mol_type = other DNA
acttaaatgtataaaaacta

SEQ ID NO: 71717 - DNA, 20 bp, synthetic construct
  source 1..20: mol_type = other DNA
tacttaaatgtataaaaact

SEQ ID NO: 71718 - DNA, 20 bp, synthetic construct
  source 1..20: mol_type = other DNA
atacttaaatgtataaaaac

SEQ ID NO: 71719 - DNA, 20 bp, synthetic construct
  source 1..20: mol_type = other DNA
tatacttaaatgtataaaaa

SEQ ID NO: 71720 - DNA, 20 bp, synthetic construct
  source 1..20: mol_type = other DNA
atatacttaaatgtataaaa

SEQ ID NO: 71721 - DNA, 20 bp, synthetic construct
  source 1..20: mol_type = other DNA
aatatacttaaatgtataaa

SEQ ID NO: 71722 - DNA, 20 bp, synthetic construct
  source 1..20: mol_type = other DNA
aaatatacttaaatgtataa

SEQ ID NO: 71723 - DNA, 20 bp, synthetic construct
  source 1..20: mol_type = other DNA
taaatatacttaaatgtata

SEQ ID NO: 71724 - DNA, 20 bp, synthetic construct
  source 1..20: mol_type = other DNA
ataaatatacttaaatgtat

SEQ ID NO: 71725 - DNA, 20 bp, synthetic construct
  source 1..20: mol_type = other DNA
aataaatatacttaaatgta

SEQ ID NO: 71726 - DNA, 20 bp, synthetic construct
  source 1..20: mol_type = other DNA
aaataaatatacttaaatgt

SEQ ID NO: 71727 - DNA, 20 bp, synthetic construct
  source 1..20: mol_type = other DNA
gaaataaatatacttaaatg

SEQ ID NO: 71728 - DNA, 20 bp, synthetic construct
  source 1..20: mol_type = other DNA
agaaataaatatacttaaat

SEQ ID NO: 71729 - DNA, 20 bp, synthetic construct
  source 1..20: mol_type = other DNA
tagaaataaatatacttaaa

SEQ ID NO: 71730 - DNA, 20 bp, synthetic construct
  source 1..20: mol_type = other DNA
ttagaaataaatatacttaa

SEQ ID NO: 71731 - DNA, 20 bp, synthetic construct
  source 1..20: mol_type = other DNA
attagaaataaatatactta

SEQ ID NO: 71732 - DNA, 20 bp, synthetic construct
  source 1..20: mol_type = other DNA
cattagaaataaatatactt

SEQ ID NO: 71733 - DNA, 20 bp, synthetic construct
  source 1..20: mol_type = other DNA
acattagaaataaatatact

SEQ ID NO: 71734 - DNA, 20 bp, synthetic construct
  source 1..20: mol_type = other DNA
aacattagaaataaatatac

SEQ ID NO: 71735 - DNA, 20 bp, synthetic construct
  source 1..20: mol_type = other DNA
aaacattagaaataaatata

SEQ ID NO: 71736 - DNA, 20 bp, synthetic construct
  source 1..20: mol_type = other DNA
taaacattagaaataaatat

SEQ ID NO: 71737 - DNA, 20 bp, synthetic construct
  source 1..20: mol_type = other DNA
ttaaacattagaaataaata

SEQ ID NO: 71738 - DNA, 20 bp, synthetic construct
  source 1..20: mol_type = other DNA
gttaaacattagaaataaat

SEQ ID NO: 71739 - DNA, 20 bp, synthetic construct
  source 1..20: mol_type = other DNA
tgttaaacattagaaataaa

SEQ ID NO: 71740 - DNA, 20 bp, synthetic construct
  source 1..20: mol_type = other DNA
gtgttaaacattagaaataa

SEQ ID NO: 71741 - DNA, 20 bp, synthetic construct
  source 1..20: mol_type = other DNA
agtgttaaacattagaaata

SEQ ID NO: 71742 - DNA, 20 bp, synthetic construct
  source 1..20: mol_type = other DNA
tagtgttaaacattagaaat

SEQ ID NO: 71743 - DNA, 20 bp, synthetic construct
  source 1..20: mol_type = other DNA
gtagtgttaaacattagaaa

SEQ ID NO: 71744 - DNA, 20 bp, synthetic construct
  source 1..20: mol_type = other DNA
ggtagtgttaaacattagaa

SEQ ID NO: 71745 - DNA, 20 bp, synthetic construct
  source 1..20: mol_type = other DNA
tggtagtgttaaacattaga

SEQ ID NO: 71746 - DNA, 20 bp, synthetic construct
  source 1..20: mol_type = other DNA
atggtagtgttaaacattag

SEQ ID NO: 71747 - DNA, 20 bp, synthetic construct
  source 1..20: mol_type = other DNA
aatggtagtgttaaacatta

SEQ ID NO: 71748 - DNA, 20 bp, synthetic construct
  source 1..20: mol_type = other DNA
aaatggtagtgttaaacatt

SEQ ID NO: 71749 - DNA, 20 bp, synthetic construct
  source 1..20: mol_type = other DNA
aaaatggtagtgttaaacat

SEQ ID NO: 71750 - DNA, 20 bp, synthetic construct
  source 1..20: mol_type = other DNA
taaaatggtagtgttaaaca

SEQ ID NO: 71751 - DNA, 20 bp, synthetic construct
  source 1..20: mol_type = other DNA
ctaaaatggtagtgttaaac

SEQ ID NO: 71752 - DNA, 20 bp, synthetic construct
  source 1..20: mol_type = other DNA
actaaaatggtagtgttaaa

SEQ ID NO: 71753 - DNA, 20 bp, synthetic construct
  source 1..20: mol_type = other DNA
aactaaaatggtagtgttaa

SEQ ID NO: 71754 - DNA, 20 bp, synthetic construct
  source 1..20: mol_type = other DNA
taactaaaatggtagtgtta

SEQ ID NO: 71755 - DNA, 20 bp, synthetic construct
  source 1..20: mol_type = other DNA
ataactaaaatggtagtgtt

SEQ ID NO: 71756 - DNA, 20 bp, synthetic construct
  source 1..20: mol_type = other DNA
aataactaaaatggtagtgt

SEQ ID NO: 71757 - DNA, 20 bp, synthetic construct
  source 1..20: mol_type = other DNA
aaataactaaaatggtagtg

SEQ ID NO: 71758 - DNA, 20 bp, synthetic construct
  source 1..20: mol_type = other DNA
caaataactaaaatggtagt

SEQ ID NO: 71759 - DNA, 20 bp, synthetic construct
  source 1..20: mol_type = other DNA
tcaaataactaaaatggtag

SEQ ID NO: 71760 - DNA, 20 bp, synthetic construct
  source 1..20: mol_type = other DNA
gtcaaataactaaaatggta

SEQ ID NO: 71761 - DNA, 20 bp, synthetic construct
  source 1..20: mol_type = other DNA
ggtcaaataactaaaatggt

SEQ ID NO: 71762 - DNA, 20 bp, synthetic construct
  source 1..20: mol_type = other DNA
tggtcaaataactaaaatgg

SEQ ID NO: 71763 - DNA, 20 bp, synthetic construct
  source 1..20: mol_type = other DNA
atggtcaaataactaaaatg

SEQ ID NO: 71764 - DNA, 20 bp, synthetic construct
  source 1..20: mol_type = other DNA
aatggtcaaataactaaaat

SEQ ID NO: 71765 - DNA, 20 bp, synthetic construct
  source 1..20: mol_type = other DNA
taatggtcaaataactaaaa

SEQ ID NO: 71766 - DNA, 20 bp, synthetic construct
  source 1..20: mol_type = other DNA
ataatggtcaaataactaaa

SEQ ID NO: 71767 - DNA, 20 bp, synthetic construct
  source 1..20: mol_type = other DNA
aataatggtcaaataactaa

SEQ ID NO: 71768 - DNA, 20 bp, synthetic construct
  source 1..20: mol_type = other DNA
gaataatggtcaaataacta

SEQ ID NO: 71769 - DNA, 20 bp, synthetic construct
  source 1..20: mol_type = other DNA
agaataatggtcaaataact

SEQ ID NO: 71770 - DNA, 20 bp, synthetic construct
  source 1..20: mol_type = other DNA
cagaataatggtcaaataac

SEQ ID NO: 71771 - DNA, 20 bp, synthetic construct
  source 1..20: mol_type = other DNA
ccagaataatggtcaaataa

SEQ ID NO: 71772 - DNA, 20 bp, synthetic construct
  source 1..20: mol_type = other DNA
gccagaataatggtcaaata

SEQ ID NO: 71773 - DNA, 20 bp, synthetic construct
  source 1..20: mol_type = other DNA
ggccagaataatggtcaaat

SEQ ID NO: 71774 - DNA, 20 bp, synthetic construct
  source 1..20: mol_type = other DNA
gggccagaataatggtcaaa

SEQ ID NO: 71775 - DNA, 20 bp, synthetic construct
  source 1..20: mol_type = other DNA
agggccagaataatggtcaa

SEQ ID NO: 71776 - DNA, 20 bp, synthetic construct
  source 1..20: mol_type = other DNA
aagggccagaataatggtca

SEQ ID NO: 71777 - DNA, 20 bp, synthetic construct
  source 1..20: mol_type = other DNA
aaagggccagaataatggtc

SEQ ID NO: 71778 - DNA, 20 bp, synthetic construct
  source 1..20: mol_type = other DNA
taaagggccagaataatggt

SEQ ID NO: 71779 - DNA, 20 bp, synthetic construct
  source 1..20: mol_type = other DNA
ttaaagggccagaataatgg

SEQ ID NO: 71780 - DNA, 20 bp, synthetic construct
  source 1..20: mol_type = other DNA
tttaaagggccagaataatg

SEQ ID NO: 71781 - DNA, 20 bp, synthetic construct
  source 1..20: mol_type = other DNA
ttttaaagggccagaataat

SEQ ID NO: 71782 - DNA, 20 bp, synthetic construct
  source 1..20: mol_type = other DNA
tttttaaagggccagaataa

SEQ ID NO: 71783 - DNA, 20 bp, synthetic construct
  source 1..20: mol_type = other DNA
ttttttaaagggccagaata

SEQ ID NO: 71784 - DNA, 20 bp, synthetic construct
  source 1..20: mol_type = other DNA
attttttaaagggccagaat

SEQ ID NO: 71785 - DNA, 20 bp, synthetic construct
  source 1..20: mol_type = other DNA
cattttttaaagggccagaa

SEQ ID NO: 71786 - DNA, 20 bp, synthetic construct
  source 1..20: mol_type = other DNA
gcattttttaaagggccaga

SEQ ID NO: 71787 - DNA, 20 bp, synthetic construct
  source 1..20: mol_type = other DNA
agcattttttaaagggccag

SEQ ID NO: 71788 - DNA, 20 bp, synthetic construct
  source 1..20: mol_type = other DNA
gagcattttttaaagggcca

SEQ ID NO: 71789 - DNA, 20 bp, synthetic construct
  source 1..20: mol_type = other DNA
tgagcattttttaaagggcc

SEQ ID NO: 71790 - DNA, 20 bp, synthetic construct
  source 1..20: mol_type = other DNA
ctgagcattttttaaagggc

SEQ ID NO: 71791 - DNA, 20 bp, synthetic construct
  source 1..20: mol_type = other DNA
tctgagcattttttaaaggg

SEQ ID NO: 71792 - DNA, 20 bp, synthetic construct
  source 1..20: mol_type = other DNA
gtctgagcattttttaaagg

SEQ ID NO: 71793 - DNA, 20 bp, synthetic construct
  source 1..20: mol_type = other DNA
tgtctgagcattttttaaag

SEQ ID NO: 71794 - DNA, 20 bp, synthetic construct
  source 1..20: mol_type = other DNA
ttgtctgagcattttttaaa

SEQ ID NO: 71795 - DNA, 20 bp, synthetic construct
  source 1..20: mol_type = other DNA
cttgtctgagcattttttaa

SEQ ID NO: 71796 - DNA, 20 bp, synthetic construct
  source 1..20: mol_type = other DNA
acttgtctgagcatttttta

SEQ ID NO: 71797 - DNA, 20 bp, synthetic construct
  source 1..20: mol_type = other DNA
aacttgtctgagcatttttt

SEQ ID NO: 71798 - DNA, 20 bp, synthetic construct
  source 1..20: mol_type = other DNA
aaacttgtctgagcattttt

SEQ ID NO: 71799 - DNA, 20 bp, synthetic construct
  source 1..20: mol_type = other DNA
caaacttgtctgagcatttt

SEQ ID NO: 71800 - DNA, 20 bp, synthetic construct
  source 1..20: mol_type = other DNA
tcaaacttgtctgagcattt

SEQ ID NO: 71801 - DNA, 20 bp, synthetic construct
  source 1..20: mol_type = other DNA
ttcaaacttgtctgagcatt

SEQ ID NO: 71802 - DNA, 20 bp, synthetic construct
  source 1..20: mol_type = other DNA
attcaaacttgtctgagcat

SEQ ID NO: 71803 - DNA, 20 bp, synthetic construct
  source 1..20: mol_type = other DNA
cattcaaacttgtctgagca

SEQ ID NO: 71804 - DNA, 20 bp, synthetic construct
  source 1..20: mol_type = other DNA
tcattcaaacttgtctgagc

SEQ ID NO: 71805 - DNA, 20 bp, synthetic construct
  source 1..20: mol_type = other DNA
atcattcaaacttgtctgag

SEQ ID NO: 71806 - DNA, 20 bp, synthetic construct
  source 1..20: mol_type = other DNA
aatcattcaaacttgtctga

SEQ ID NO: 71807 - DNA, 20 bp, synthetic construct
  source 1..20: mol_type = other DNA
aaatcattcaaacttgtctg

SEQ ID NO: 71808 - DNA, 20 bp, synthetic construct
  source 1..20: mol_type = other DNA
aaaatcattcaaacttgtct

SEQ ID NO: 71809 - DNA, 20 bp, synthetic construct
  source 1..20: mol_type = other DNA
aaaaatcattcaaacttgtc

SEQ ID NO: 71810 - DNA, 20 bp, synthetic construct
  source 1..20: mol_type = other DNA
gaaaaatcattcaaacttgt

SEQ ID NO: 71811 - DNA, 20 bp, synthetic construct
  source 1..20: mol_type = other DNA
tgaaaaatcattcaaacttg

SEQ ID NO: 71812 - DNA, 20 bp, synthetic construct
  source 1..20: mol_type = other DNA
ctgaaaaatcattcaaactt

SEQ ID NO: 71813 - DNA, 20 bp, synthetic construct
  source 1..20: mol_type = other DNA
tctgaaaaatcattcaaact

SEQ ID NO: 71814 - DNA, 20 bp, synthetic construct
  source 1..20: mol_type = other DNA
ctctgaaaaatcattcaaac

SEQ ID NO: 71815 - DNA, 20 bp, synthetic construct
  source 1..20: mol_type = other DNA
cctctgaaaaatcattcaaa

SEQ ID NO: 71816 - DNA, 20 bp, synthetic construct
  source 1..20: mol_type = other DNA
gcctctgaaaaatcattcaa

SEQ ID NO: 71817 - DNA, 20 bp, synthetic construct
  source 1..20: mol_type = other DNA
tgcctctgaaaaatcattca

SEQ ID NO: 71818 - DNA, 20 bp, synthetic construct
  source 1..20: mol_type = other DNA
atgcctctgaaaaatcattc

SEQ ID NO: 71819 - DNA, 20 bp, synthetic construct
  source 1..20: mol_type = other DNA
aatgcctctgaaaaatcatt

SEQ ID NO: 71820 - DNA, 20 bp, synthetic construct
  source 1..20: mol_type = other DNA
taatgcctctgaaaaatcat

SEQ ID NO: 71821 - DNA, 20 bp, synthetic construct
  source 1..20: mol_type = other DNA
ataatgcctctgaaaaatca

SEQ ID NO: 71822 - DNA, 20 bp, synthetic construct
  source 1..20: mol_type = other DNA
aataatgcctctgaaaaatc

SEQ ID NO: 71823 - DNA, 20 bp, synthetic construct
  source 1..20: mol_type = other DNA
caataatgcctctgaaaaat

SEQ ID NO: 71824 - DNA, 20 bp, synthetic construct
  source 1..20: mol_type = other DNA
ccaataatgcctctgaaaaa

SEQ ID NO: 71825 - DNA, 20 bp, synthetic construct
  source 1..20: mol_type = other DNA
gccaataatgcctctgaaaa

SEQ ID NO: 71826 - DNA, 20 bp, synthetic construct
  source 1..20: mol_type = other DNA
agccaataatgcctctgaaa

SEQ ID NO: 71827 - DNA, 20 bp, synthetic construct
  source 1..20: mol_type = other DNA
gagccaataatgcctctgaa

SEQ ID NO: 71828 - DNA, 20 bp, synthetic construct
  source 1..20: mol_type = other DNA
tgagccaataatgcctctga

SEQ ID NO: 71829 - DNA, 20 bp, synthetic construct
  source 1..20: mol_type = other DNA
ctgagccaataatgcctctg

SEQ ID NO: 71830 - DNA, 20 bp, synthetic construct
  source 1..20: mol_type = other DNA
tctgagccaataatgcctct

SEQ ID NO: 71831 - DNA, 20 bp, synthetic construct
  source 1..20: mol_type = other DNA
ctctgagccaataatgcctc

SEQ ID NO: 71832 - DNA, 20 bp, synthetic construct
  source 1..20: mol_type = other DNA
cctctgagccaataatgcct

SEQ ID NO: 71833 - DNA, 20 bp, synthetic construct
  source 1..20: mol_type = other DNA
acctctgagccaataatgcc

SEQ ID NO: 71834 - DNA, 20 bp, synthetic construct
  source 1..20: mol_type = other DNA
tacctctgagccaataatgc

SEQ ID NO: 71835 - DNA, 20 bp, synthetic construct
  source 1..20: mol_type = other DNA
ttacctctgagccaataatg

SEQ ID NO: 71836 - DNA, 20 bp, synthetic construct
  source 1..20: mol_type = other DNA
tttacctctgagccaataat

SEQ ID NO: 71837 - DNA, 20 bp, synthetic construct
  source 1..20: mol_type = other DNA
ttttacctctgagccaataa

SEQ ID NO: 71838 - DNA, 20 bp, synthetic construct
  source 1..20: mol_type = other DNA
cttttacctctgagccaata

SEQ ID NO: 71839 - DNA, 20 bp, synthetic construct
  source 1..20: mol_type = other DNA
tcttttacctctgagccaat

SEQ ID NO: 71840 - DNA, 20 bp, synthetic construct
  source 1..20: mol_type = other DNA
ctcttttacctctgagccaa

SEQ ID NO: 71841 - DNA, 20 bp, synthetic construct
  source 1..20: mol_type = other DNA
cctcttttacctctgagcca

SEQ ID NO: 71842 - DNA, 20 bp, synthetic construct
  source 1..20: mol_type = other DNA
tcctcttttacctctgagcc

SEQ ID NO: 71843 - DNA, 20 bp, synthetic construct
  source 1..20: mol_type = other DNA
ttcctcttttacctctgagc

SEQ ID NO: 71844 - DNA, 20 bp, synthetic construct
  source 1..20: mol_type = other DNA
tttcctcttttacctctgag

SEQ ID NO: 71845 - DNA, 20 bp, synthetic construct
  source 1..20: mol_type = other DNA
ctttcctcttttacctctga

SEQ ID NO: 71846 - DNA, 20 bp, synthetic construct
  source 1..20: mol_type = other DNA
tctttcctcttttacctctg

SEQ ID NO: 71847 - DNA, 20 bp, synthetic construct
  source 1..20: mol_type = other DNA
atctttcctcttttacctct

SEQ ID NO: 71848 - DNA, 20 bp, synthetic construct
  source 1..20: mol_type = other DNA
aatctttcctcttttacctc

SEQ ID NO: 71849 - DNA, 20 bp, synthetic construct
  source 1..20: mol_type = other DNA
caatctttcctcttttacct

SEQ ID NO: 71850 - DNA, 20 bp, synthetic construct
  source 1..20: mol_type = other DNA
tcaatctttcctcttttacc

SEQ ID NO: 71851 - DNA, 20 bp, synthetic construct
  source 1..20: mol_type = other DNA
ctcaatctttcctcttttac

SEQ ID NO: 71852 - DNA, 20 bp, synthetic construct
  source 1..20: mol_type = other DNA
tctcaatctttcctctttta

SEQ ID NO: 71853 - DNA, 20 bp, synthetic construct
  source 1..20: mol_type = other DNA
ttctcaatctttcctctttt

SEQ ID NO: 71854 - DNA, 20 bp, synthetic construct
  source 1..20: mol_type = other DNA
cttctcaatctttcctcttt

SEQ ID NO: 71855 - DNA, 20 bp, synthetic construct
  source 1..20: mol_type = other DNA
gcttctcaatctttcctctt

SEQ ID NO: 71856 - DNA, 20 bp, synthetic construct
  source 1..20: mol_type = other DNA
agcttctcaatctttcctct

SEQ ID NO: 71857 - DNA, 20 bp, synthetic construct
  source 1..20: mol_type = other DNA
cagcttctcaatctttcctc

SEQ ID NO: 71858 - DNA, 20 bp, synthetic construct
  source 1..20: mol_type = other DNA
tcagcttctcaatctttcct

SEQ ID NO: 71859 - DNA, 20 bp, synthetic construct
  source 1..20: mol_type = other DNA
ttcagcttctcaatctttcc

SEQ ID NO: 71860 - DNA, 20 bp, synthetic construct
  source 1..20: mol_type = other DNA
attcagcttctcaatctttc

SEQ ID NO: 71861 - DNA, 20 bp, synthetic construct
  source 1..20: mol_type = other DNA
tattcagcttctcaatcttt

SEQ ID NO: 71862 - DNA, 20 bp, synthetic construct
  source 1..20: mol_type = other DNA
atattcagcttctcaatctt

SEQ ID NO: 71863 - DNA, 20 bp, synthetic construct
  source 1..20: mol_type = other DNA
catattcagcttctcaatct

SEQ ID NO: 71864 - DNA, 20 bp, synthetic construct
  source 1..20: mol_type = other DNA
acatattcagcttctcaatc

SEQ ID NO: 71865 - DNA, 20 bp, synthetic construct
  source 1..20: mol_type = other DNA
tacatattcagcttctcaat

SEQ ID NO: 71866 - DNA, 20 bp, synthetic construct
  source 1..20: mol_type = other DNA
gtacatattcagcttctcaa

SEQ ID NO: 71867 - DNA, 20 bp, synthetic construct
  source 1..20: mol_type = other DNA
agtacatattcagcttctca

SEQ ID NO: 71868 - DNA, 20 bp, synthetic construct
  source 1..20: mol_type = other DNA
gagtacatattcagcttctc

SEQ ID NO: 71869 - DNA, 20 bp, synthetic construct
  source 1..20: mol_type = other DNA
agagtacatattcagcttct

SEQ ID NO: 71870 - DNA, 20 bp, synthetic construct
  source 1..20: mol_type = other DNA
cagagtacatattcagcttc

SEQ ID NO: 71871 - DNA, 20 bp, synthetic construct
  source 1..20: mol_type = other DNA
acagagtacatattcagctt

SEQ ID NO: 71872 - DNA, 20 bp, synthetic construct
  source 1..20: mol_type = other DNA
aacagagtacatattcagct

SEQ ID NO: 71873 - DNA, 20 bp, synthetic construct
  source 1..20: mol_type = other DNA
aaacagagtacatattcagc

SEQ ID NO: 71874 - DNA, 20 bp, synthetic construct
  source 1..20: mol_type = other DNA
gaaacagagtacatattcag

SEQ ID NO: 71875 - DNA, 20 bp, synthetic construct
  source 1..20: mol_type = other DNA
ggaaacagagtacatattca

SEQ ID NO: 71876 - DNA, 20 bp, synthetic construct
  source 1..20: mol_type = other DNA
aggaaacagagtacatattc

SEQ ID NO: 71877 - DNA, 20 bp, synthetic construct
  source 1..20: mol_type = other DNA
caggaaacagagtacatatt

SEQ ID NO: 71878 - DNA, 20 bp, synthetic construct
  source 1..20: mol_type = other DNA
ccaggaaacagagtacatat

SEQ ID NO: 71879 - DNA, 20 bp, synthetic construct
  source 1..20: mol_type = other DNA
cccaggaaacagagtacata

SEQ ID NO: 71880 - DNA, 20 bp, synthetic construct
  source 1..20: mol_type = other DNA
acccaggaaacagagtacat

SEQ ID NO: 71881 - DNA, 20 bp, synthetic construct
  source 1..20: mol_type = other DNA
tacccaggaaacagagtaca

SEQ ID NO: 71882 - DNA, 20 bp, synthetic construct
  source 1..20: mol_type = other DNA
atacccaggaaacagagtac

SEQ ID NO: 71883 - DNA, 20 bp, synthetic construct
  source 1..20: mol_type = other DNA
catacccaggaaacagagta

SEQ ID NO: 71884 - DNA, 20 bp, synthetic construct
  source 1..20: mol_type = other DNA
ccatacccaggaaacagagt

SEQ ID NO: 71885 - DNA, 20 bp, synthetic construct
  source 1..20: mol_type = other DNA
cccatacccaggaaacagag

SEQ ID NO: 71886 - DNA, 20 bp, synthetic construct
  source 1..20: mol_type = other DNA
ccccatacccaggaaacaga

SEQ ID NO: 71887 - DNA, 20 bp, synthetic construct
  source 1..20: mol_type = other DNA
gccccatacccaggaaacag

SEQ ID NO: 71888 - DNA, 20 bp, synthetic construct
  source 1..20: mol_type = other DNA
agccccatacccaggaaaca

SEQ ID NO: 71889 - DNA, 20 bp, synthetic construct
  source 1..20: mol_type = other DNA
cagccccatacccaggaaac

SEQ ID NO: 71890 - DNA, 20 bp, synthetic construct
  source 1..20: mol_type = other DNA
ccagccccatacccaggaaa

SEQ ID NO: 71891 - DNA, 20 bp, synthetic construct
  source 1..20: mol_type = other DNA
cccagccccatacccaggaa

SEQ ID NO: 71892 - DNA, 20 bp, synthetic construct
  source 1..20: mol_type = other DNA
ccccagccccatacccagga

SEQ ID NO: 71893 - DNA, 20 bp, synthetic construct
  source 1..20: mol_type = other DNA
tccccagccccatacccagg

SEQ ID NO: 71894 - DNA, 20 bp, synthetic construct
  source 1..20: mol_type = other DNA
atccccagccccatacccag

SEQ ID NO: 71895 - DNA, 20 bp, synthetic construct
  source 1..20: mol_type = other DNA
tatccccagccccataccca

SEQ ID NO: 71896 - DNA, 20 bp, synthetic construct
  source 1..20: mol_type = other DNA
gtatccccagccccataccc

SEQ ID NO: 71897 - DNA, 20 bp, synthetic construct
  source 1..20: mol_type = other DNA
ggtatccccagccccatacc

SEQ ID NO: 71898 - DNA, 20 bp, synthetic construct
  source 1..20: mol_type = other DNA
gggtatccccagccccatac

SEQ ID NO: 71899 - DNA, 20 bp, synthetic construct
  source 1..20: mol_type = other DNA
tgggtatccccagccccata

SEQ ID NO: 71900 - DNA, 20 bp, synthetic construct
  source 1..20: mol_type = other DNA
ctgggtatccccagccccat

SEQ ID NO: 71901 - DNA, 20 bp, synthetic construct
  source 1..20: mol_type = other DNA
tctgggtatccccagcccca

SEQ ID NO: 71902 - DNA, 20 bp, synthetic construct
  source 1..20: mol_type = other DNA
ttctgggtatccccagcccc

SEQ ID NO: 71903 - DNA, 20 bp, synthetic construct
  source 1..20: mol_type = other DNA
cttctgggtatccccagccc

SEQ ID NO: 71904 - DNA, 20 bp, synthetic construct
  source 1..20: mol_type = other DNA
tcttctgggtatccccagcc

SEQ ID NO: 71905 - DNA, 20 bp, synthetic construct
  source 1..20: mol_type = other DNA
ctcttctgggtatccccagc

SEQ ID NO: 71906 - DNA, 20 bp, synthetic construct
  source 1..20: mol_type = other DNA
cctcttctgggtatccccag

SEQ ID NO: 71907 - DNA, 20 bp, synthetic construct
  source 1..20: mol_type = other DNA
acctcttctgggtatcccca

SEQ ID NO: 71908 - DNA, 20 bp, synthetic construct
  source 1..20: mol_type = other DNA
aacctcttctgggtatcccc

SEQ ID NO: 71909 - DNA, 20 bp, synthetic construct
  source 1..20: mol_type = other DNA
gaacctcttctgggtatccc

SEQ ID NO: 71910 - DNA, 20 bp, synthetic construct
  source 1..20: mol_type = other DNA
tgaacctcttctgggtatcc

SEQ ID NO: 71911 - DNA, 20 bp, synthetic construct
  source 1..20: mol_type = other DNA
gtgaacctcttctgggtatc

SEQ ID NO: 71912 - DNA, 20 bp, synthetic construct
  source 1..20: mol_type = other DNA
tgtgaacctcttctgggtat

SEQ ID NO: 71913 - DNA, 20 bp, synthetic construct
  source 1..20: mol_type = other DNA
gtgtgaacctcttctgggta

SEQ ID NO: 71914 - DNA, 20 bp, synthetic construct
  source 1..20: mol_type = other DNA
cgtgtgaacctcttctgggt

SEQ ID NO: 71915 - DNA, 20 bp, synthetic construct
  source 1..20: mol_type = other DNA
acgtgtgaacctcttctggg

SEQ ID NO: 71916 - DNA, 20 bp, synthetic construct
  source 1..20: mol_type = other DNA
aacgtgtgaacctcttctgg

SEQ ID NO: 71917 - DNA, 20 bp, synthetic construct
  source 1..20: mol_type = other DNA
caacgtgtgaacctcttctg

SEQ ID NO: 71918 - DNA, 20 bp, synthetic construct
  source 1..20: mol_type = other DNA
ccaacgtgtgaacctcttct

SEQ ID NO: 71919 - DNA, 20 bp, synthetic construct
  source 1..20: mol_type = other DNA
accaacgtgtgaacctcttc

SEQ ID NO: 71920 - DNA, 20 bp, synthetic construct
  source 1..20: mol_type = other DNA
gaccaacgtgtgaacctctt

SEQ ID NO: 71921 - DNA, 20 bp, synthetic construct
  source 1..20: mol_type = other DNA
cgaccaacgtgtgaacctct

SEQ ID NO: 71922 - DNA, 20 bp, synthetic construct
  source 1..20: mol_type = other DNA
tcgaccaacgtgtgaacctc

SEQ ID NO: 71923 - DNA, 20 bp, synthetic construct
  source 1..20: mol_type = other DNA
ctcgaccaacgtgtgaacct

SEQ ID NO: 71924 - DNA, 20 bp, synthetic construct
  source 1..20: mol_type = other DNA
tctcgaccaacgtgtgaacc

SEQ ID NO: 71925 - DNA, 20 bp, synthetic construct
  source 1..20: mol_type = other DNA
gtctcgaccaacgtgtgaac

SEQ ID NO: 71926 - DNA, 20 bp, synthetic construct
  source 1..20: mol_type = other DNA
tgtctcgaccaacgtgtgaa

SEQ ID NO: 71927 - DNA, 20 bp, synthetic construct
  source 1..20: mol_type = other DNA
atgtctcgaccaacgtgtga

SEQ ID NO: 71928 - DNA, 20 bp, synthetic construct
  source 1..20: mol_type = other DNA
aatgtctcgaccaacgtgtg

SEQ ID NO: 71929 - DNA, 20 bp, synthetic construct
  source 1..20: mol_type = other DNA
aaatgtctcgaccaacgtgt

SEQ ID NO: 71930 - DNA, 20 bp, synthetic construct
  source 1..20: mol_type = other DNA
gaaatgtctcgaccaacgtg

SEQ ID NO: 71931 - DNA, 20 bp, synthetic construct
  source 1..20: mol_type = other DNA
agaaatgtctcgaccaacgt

SEQ ID NO: 71932 - DNA, 20 bp, synthetic construct
  source 1..20: mol_type = other DNA
aagaaatgtctcgaccaacg

SEQ ID NO: 71933 - DNA, 20 bp, synthetic construct
  source 1..20: mol_type = other DNA
aaagaaatgtctcgaccaac

SEQ ID NO: 71934 - DNA, 20 bp, synthetic construct
  source 1..20: mol_type = other DNA
taaagaaatgtctcgaccaa

SEQ ID NO: 71935 - DNA, 20 bp, synthetic construct
  source 1..20: mol_type = other DNA
ataaagaaatgtctcgacca

SEQ ID NO: 71936 - DNA, 20 bp, synthetic construct
  source 1..20: mol_type = other DNA
cataaagaaatgtctcgacc

SEQ ID NO: 71937 - DNA, 20 bp, synthetic construct
  source 1..20: mol_type = other DNA
tcataaagaaatgtctcgac

SEQ ID NO: 71938 - DNA, 20 bp, synthetic construct
  source 1..20: mol_type = other DNA
gtcataaagaaatgtctcga

SEQ ID NO: 71939 - DNA, 20 bp, synthetic construct
  source 1..20: mol_type = other DNA
ggtcataaagaaatgtctcg

SEQ ID NO: 71940 - DNA, 20 bp, synthetic construct
  source 1..20: mol_type = other DNA
tggtcataaagaaatgtctc

SEQ ID NO: 71941 - DNA, 20 bp, synthetic construct
  source 1..20: mol_type = other DNA
gtggtcataaagaaatgtct

SEQ ID NO: 71942 - DNA, 20 bp, synthetic construct
  source 1..20: mol_type = other DNA
ggtggtcataaagaaatgtc

SEQ ID NO: 71943 - DNA, 20 bp, synthetic construct
  source 1..20: mol_type = other DNA
tggtggtcataaagaaatgt

SEQ ID NO: 71944 - DNA, 20 bp, synthetic construct
  source 1..20: mol_type = other DNA
ctggtggtcataaagaaatg

SEQ ID NO: 71945 - DNA, 20 bp, synthetic construct
  source 1..20: mol_type = other DNA
gctggtggtcataaagaaat

SEQ ID NO: 71946 - DNA, 20 bp, synthetic construct
  source 1..20: mol_type = other DNA
tgctggtggtcataaagaaa

SEQ ID NO: 71947 - DNA, 20 bp, synthetic construct
  source 1..20: mol_type = other DNA
ctgctggtggtcataaagaa

SEQ ID NO: 71948 - DNA, 20 bp, synthetic construct
  source 1..20: mol_type = other DNA
cctgctggtggtcataaaga

SEQ ID NO: 71949 - DNA, 20 bp, synthetic construct
  source 1..20: mol_type = other DNA
acctgctggtggtcataaag

SEQ ID NO: 71950 - DNA, 20 bp, synthetic construct
  source 1..20: mol_type = other DNA
cacctgctggtggtcataaa

SEQ ID NO: 71951 - DNA, 20 bp, synthetic construct
  source 1..20: mol_type = other DNA
ccacctgctggtggtcataa

SEQ ID NO: 71952 - DNA, 20 bp, synthetic construct
  source 1..20: mol_type = other DNA
gccacctgctggtggtcata

SEQ ID NO: 71953 - DNA, 20 bp, synthetic construct
  source 1..20: mol_type = other DNA
tgccacctgctggtggtcat

SEQ ID NO: 71954 - DNA, 20 bp, synthetic construct
  source 1..20: mol_type = other DNA
atgccacctgctggtggtca

SEQ ID NO: 71955 - DNA, 20 bp, synthetic construct
  source 1..20: mol_type = other DNA
gatgccacctgctggtggtc

SEQ ID NO: 71956 - DNA, 20 bp, synthetic construct
  source 1..20: mol_type = other DNA
tgatgccacctgctggtggt

SEQ ID NO: 71957 - DNA, 20 bp, synthetic construct
  source 1..20: mol_type = other DNA
gtgatgccacctgctggtgg

SEQ ID NO: 71958 - DNA, 20 bp, synthetic construct
  source 1..20: mol_type = other DNA
ggtgatgccacctgctggtg

SEQ ID NO: 71959 - DNA, 20 bp, synthetic construct
  source 1..20: mol_type = other DNA
cggtgatgccacctgctggt

SEQ ID NO: 71960 - DNA, 20 bp, synthetic construct
  source 1..20: mol_type = other DNA
ccggtgatgccacctgctgg

SEQ ID NO: 71961 - DNA, 20 bp, synthetic construct
  source 1..20: mol_type = other DNA
gccggtgatgccacctgctg

SEQ ID NO: 71962 - DNA, 20 bp, synthetic construct
  source 1..20: mol_type = other DNA
ggccggtgatgccacctgct

SEQ ID NO: 71963 - DNA, 20 bp, synthetic construct
  source 1..20: mol_type = other DNA
gggccggtgatgccacctgc

SEQ ID NO: 71964 - DNA, 20 bp, synthetic construct
  source 1..20: mol_type = other DNA
tgggccggtgatgccacctg

SEQ ID NO: 71965 - DNA, 20 bp, synthetic construct
  source 1..20: mol_type = other DNA
ttgggccggtgatgccacct

SEQ ID NO: 71966 - DNA, 20 bp, synthetic construct
  source 1..20: mol_type = other DNA
tttgggccggtgatgccacc

SEQ ID NO: 71967 - DNA, 20 bp, synthetic construct
  source 1..20: mol_type = other DNA
ttttgggccggtgatgccac

SEQ ID NO: 71968 - DNA, 20 bp, synthetic construct
  source 1..20: mol_type = other DNA
attttgggccggtgatgcca

SEQ ID NO: 71969 - DNA, 20 bp, synthetic construct
  source 1..20: mol_type = other DNA
cattttgggccggtgatgcc

SEQ ID NO: 71970 - DNA, 20 bp, synthetic construct
  source 1..20: mol_type = other DNA
tcattttgggccggtgatgc

SEQ ID NO: 71971 - DNA, 20 bp, synthetic construct
  source 1..20: mol_type = other DNA
gtcattttgggccggtgatg

SEQ ID NO: 71972 - DNA, 20 bp, synthetic construct
  source 1..20: mol_type = other DNA
agtcattttgggccggtgat

SEQ ID NO: 71973 - DNA, 20 bp, synthetic construct
  source 1..20: mol_type = other DNA
tagtcattttgggccggtga

SEQ ID NO: 71974 - DNA, 20 bp, synthetic construct
  source 1..20: mol_type = other DNA
ttagtcattttgggccggtg

SEQ ID NO: 71975 - DNA, 20 bp, synthetic construct
  source 1..20: mol_type = other DNA
cttagtcattttgggccggt

SEQ ID NO: 71976 - DNA, 20 bp, synthetic construct
  source 1..20: mol_type = other DNA
acttagtcattttgggccgg

SEQ ID NO: 71977 - DNA, 20 bp, synthetic construct
  source 1..20: mol_type = other DNA
aacttagtcattttgggccg

SEQ ID NO: 71978 - DNA, 20 bp, synthetic construct
  source 1..20: mol_type = other DNA
aaacttagtcattttgggcc

SEQ ID NO: 71979 - DNA, 20 bp, synthetic construct
  source 1..20: mol_type = other DNA
gaaacttagtcattttgggc

SEQ ID NO: 71980 - DNA, 20 bp, synthetic construct
  source 1..20: mol_type = other DNA
agaaacttagtcattttggg

SEQ ID NO: 71981 - DNA, 20 bp, synthetic construct
  source 1..20: mol_type = other DNA
cagaaacttagtcattttgg

SEQ ID NO: 71982 - DNA, 20 bp, synthetic construct
  source 1..20: mol_type = other DNA
gcagaaacttagtcattttg

SEQ ID NO: 71983 - DNA, 20 bp, synthetic construct
  source 1..20: mol_type = other DNA
ggcagaaacttagtcatttt

SEQ ID NO: 71984 - DNA, 20 bp, synthetic construct
  source 1..20: mol_type = other DNA
gggcagaaacttagtcattt

SEQ ID NO: 71985 - DNA, 20 bp, synthetic construct
  source 1..20: mol_type = other DNA
tgggcagaaacttagtcatt

SEQ ID NO: 71986 - DNA, 20 bp, synthetic construct
  source 1..20: mol_type = other DNA
ctgggcagaaacttagtcat

SEQ ID NO: 71987 - DNA, 20 bp, synthetic construct
  source 1..20: mol_type = other DNA
tctgggcagaaacttagtca

SEQ ID NO: 71988 - DNA, 20 bp, synthetic construct
  source 1..20: mol_type = other DNA
ttctgggcagaaacttagtc

SEQ ID NO: 71989 - DNA, 20 bp, synthetic construct
  source 1..20: mol_type = other DNA
attctgggcagaaacttagt

SEQ ID NO: 71990 - DNA, 20 bp, synthetic construct
  source 1..20: mol_type = other DNA
gattctgggcagaaacttag

SEQ ID NO: 71991 - DNA, 20 bp, synthetic construct
  source 1..20: mol_type = other DNA
tgattctgggcagaaactta

SEQ ID NO: 71992 - DNA, 20 bp, synthetic construct
  source 1..20: mol_type = other DNA
ctgattctgggcagaaactt

SEQ ID NO: 71993 - DNA, 20 bp, synthetic construct
  source 1..20: mol_type = other DNA
tctgattctgggcagaaact

SEQ ID NO: 71994 - DNA, 20 bp, synthetic construct
  source 1..20: mol_type = other DNA
ttctgattctgggcagaaac

SEQ ID NO: 71995 - DNA, 20 bp, synthetic construct
  source 1..20: mol_type = other DNA
cttctgattctgggcagaaa

SEQ ID NO: 71996 - DNA, 20 bp, synthetic construct
  source 1..20: mol_type = other DNA
tcttctgattctgggcagaa

SEQ ID NO: 71997 - DNA, 20 bp, synthetic construct
  source 1..20: mol_type = other DNA
ctcttctgattctgggcaga

SEQ ID NO: 71998 - DNA, 20 bp, synthetic construct
  source 1..20: mol_type = other DNA
tctcttctgattctgggcag

SEQ ID NO: 71999 - DNA, 20 bp, synthetic construct
  source 1..20: mol_type = other DNA
ttctcttctgattctgggca

SEQ ID NO: 72000 - DNA, 20 bp, synthetic construct
  source 1..20: mol_type = other DNA
cttctcttctgattctgggc

SEQ ID NO: 72001 - DNA, 20 bp, synthetic construct
  source 1..20: mol_type = other DNA
ccttctcttctgattctggg

SEQ ID NO: 72002 - DNA, 20 bp, synthetic construct
  source 1..20: mol_type = other DNA
accttctcttctgattctgg

SEQ ID NO: 72003 - DNA, 20 bp, synthetic construct
  source 1..20: mol_type = other DNA
caccttctcttctgattctg

SEQ ID NO: 72004 - DNA, 20 bp, synthetic construct
  source 1..20: mol_type = other DNA
acaccttctcttctgattct

SEQ ID NO: 72005 - DNA, 20 bp, synthetic construct
  source 1..20: mol_type = other DNA
aacaccttctcttctgattc

SEQ ID NO: 72006 - DNA, 20 bp, synthetic construct
  source 1..20: mol_type = other DNA
caacaccttctcttctgatt

SEQ ID NO: 72007 - DNA, 20 bp, synthetic construct
  source 1..20: mol_type = other DNA
tcaacaccttctcttctgat

SEQ ID NO: 72008 - DNA, 20 bp, synthetic construct
  source 1..20: mol_type = other DNA
ctcaacaccttctcttctga

SEQ ID NO: 72009 - DNA, 20 bp, synthetic construct
  source 1..20: mol_type = other DNA
tctcaacaccttctcttctg

SEQ ID NO: 72010 - DNA, 20 bp, synthetic construct
  source 1..20: mol_type = other DNA
ctctcaacaccttctcttct

SEQ ID NO: 72011 - DNA, 20 bp, synthetic construct
  source 1..20: mol_type = other DNA
gctctcaacaccttctcttc

SEQ ID NO: 72012 - DNA, 20 bp, synthetic construct
  source 1..20: mol_type = other DNA
ggctctcaacaccttctctt

SEQ ID NO: 72013 - DNA, 20 bp, synthetic construct
  source 1..20: mol_type = other DNA
gggctctcaacaccttctct

SEQ ID NO: 72014 - DNA, 20 bp, synthetic construct
  source 1..20: mol_type = other DNA
tgggctctcaacaccttctc

SEQ ID NO: 72015 - DNA, 20 bp, synthetic construct
  source 1..20: mol_type = other DNA
gtgggctctcaacaccttct

SEQ ID NO: 72016 - DNA, 20 bp, synthetic construct
  source 1..20: mol_type = other DNA
agtgggctctcaacaccttc

SEQ ID NO: 72017 - DNA, 20 bp, synthetic construct
  source 1..20: mol_type = other DNA
cagtgggctctcaacacctt

SEQ ID NO: 72018 - DNA, 20 bp, synthetic construct
  source 1..20: mol_type = other DNA
gcagtgggctctcaacacct

SEQ ID NO: 72019 - DNA, 20 bp, synthetic construct
  source 1..20: mol_type = other DNA
agcagtgggctctcaacacc

SEQ ID NO: 72020 - DNA, 20 bp, synthetic construct
  source 1..20: mol_type = other DNA
cagcagtgggctctcaacac

SEQ ID NO: 72021 - DNA, 20 bp, synthetic construct
  source 1..20: mol_type = other DNA
acagcagtgggctctcaaca

SEQ ID NO: 72022 - DNA, 20 bp, synthetic construct
  source 1..20: mol_type = other DNA
cacagcagtgggctctcaac

SEQ ID NO: 72023 - DNA, 20 bp, synthetic construct
  source 1..20: mol_type = other DNA
ccacagcagtgggctctcaa

SEQ ID NO: 72024 - DNA, 20 bp, synthetic construct
  source 1..20: mol_type = other DNA
cccacagcagtgggctctca

SEQ ID NO: 72025 - DNA, 20 bp, synthetic construct
  source 1..20: mol_type = other DNA
ccccacagcagtgggctctc

SEQ ID NO: 72026 - DNA, 20 bp, synthetic construct
  source 1..20: mol_type = other DNA
cccccacagcagtgggctct

SEQ ID NO: 72027 - DNA, 20 bp, synthetic construct
  source 1..20: mol_type = other DNA
acccccacagcagtgggctc

SEQ ID NO: 72028 - DNA, 20 bp, synthetic construct
  source 1..20: mol_type = other DNA
tacccccacagcagtgggct

SEQ ID NO: 72029 - DNA, 20 bp, synthetic construct
  source 1..20: mol_type = other DNA
ctacccccacagcagtgggc

SEQ ID NO: 72030 - DNA, 20 bp, synthetic construct
  source 1..20: mol_type = other DNA
gctacccccacagcagtggg

SEQ ID NO: 72031 - DNA, 20 bp, synthetic construct
  source 1..20: mol_type = other DNA
tgctacccccacagcagtgg

SEQ ID NO: 72032 - DNA, 20 bp, synthetic construct
  source 1..20: mol_type = other DNA
atgctacccccacagcagtg

SEQ ID NO: 72033 - DNA, 20 bp, synthetic construct
  source 1..20: mol_type = other DNA
catgctacccccacagcagt

SEQ ID NO: 72034 - DNA, 20 bp, synthetic construct
  source 1..20: mol_type = other DNA
ccatgctacccccacagcag

SEQ ID NO: 72035 - DNA, 20 bp, synthetic construct
  source 1..20: mol_type = other DNA
tccatgctacccccacagca

SEQ ID NO: 72036 - DNA, 20 bp, synthetic construct
  source 1..20: mol_type = other DNA
ctccatgctacccccacagc

SEQ ID NO: 72037 - DNA, 20 bp, synthetic construct
  source 1..20: mol_type = other DNA
cctccatgctacccccacag

SEQ ID NO: 72038 - DNA, 20 bp, synthetic construct
  source 1..20: mol_type = other DNA
acctccatgctacccccaca

SEQ ID NO: 72039 - DNA, 20 bp, synthetic construct
  source 1..20: mol_type = other DNA
cacctccatgctacccccac

SEQ ID NO: 72040 - DNA, 20 bp, synthetic construct
  source 1..20: mol_type = other DNA
ccacctccatgctaccccca

SEQ ID NO: 72041 - DNA, 20 bp, synthetic construct
  source 1..20: mol_type = other DNA
cccacctccatgctaccccc

SEQ ID NO: 72042 - DNA, 20 bp, synthetic construct
  source 1..20: mol_type = other DNA
tcccacctccatgctacccc

SEQ ID NO: 72043 - DNA, 20 bp, synthetic construct
  source 1..20: mol_type = other DNA
atcccacctccatgctaccc

SEQ ID NO: 72044 - DNA, 20 bp, synthetic construct
  source 1..20: mol_type = other DNA
tatcccacctccatgctacc

SEQ ID NO: 72045 - DNA, 20 bp, synthetic construct
  source 1..20: mol_type = other DNA
gtatcccacctccatgctac

SEQ ID NO: 72046 - DNA, 20 bp, synthetic construct
  source 1..20: mol_type = other DNA
tgtatcccacctccatgcta

SEQ ID NO: 72047 - DNA, 20 bp, synthetic construct
  source 1..20: mol_type = other DNA
ctgtatcccacctccatgct

SEQ ID NO: 72048 - DNA, 20 bp, synthetic construct
  source 1..20: mol_type = other DNA
cctgtatcccacctccatgc

SEQ ID NO: 72049 - DNA, 20 bp, synthetic construct
  source 1..20: mol_type = other DNA
ccctgtatcccacctccatg

SEQ ID NO: 72050 - DNA, 20 bp, synthetic construct
  source 1..20: mol_type = other DNA
cccctgtatcccacctccat

SEQ ID NO: 72051 - DNA, 20 bp, synthetic construct
  source 1..20: mol_type = other DNA
gcccctgtatcccacctcca

SEQ ID NO: 72052 - DNA, 20 bp, synthetic construct
  source 1..20: mol_type = other DNA
agcccctgtatcccacctcc

SEQ ID NO: 72053 - DNA, 20 bp, synthetic construct
  source 1..20: mol_type = other DNA
cagcccctgtatcccacctc

SEQ ID NO: 72054 - DNA, 20 bp, synthetic construct
  source 1..20: mol_type = other DNA
ccagcccctgtatcccacct

SEQ ID NO: 72055 - DNA, 20 bp, synthetic construct
  source 1..20: mol_type = other DNA
tccagcccctgtatcccacc

SEQ ID NO: 72056 - DNA, 20 bp, synthetic construct
  source 1..20: mol_type = other DNA
ctccagcccctgtatcccac

SEQ ID NO: 72057 - DNA, 20 bp, synthetic construct
  source 1..20: mol_type = other DNA
cctccagcccctgtatccca

SEQ ID NO: 72058 - DNA, 20 bp, synthetic construct
  source 1..20: mol_type = other DNA
acctccagcccctgtatccc

SEQ ID NO: 72059 - DNA, 20 bp, synthetic construct
  source 1..20: mol_type = other DNA
cacctccagcccctgtatcc

SEQ ID NO: 72060 - DNA, 20 bp, synthetic construct
  source 1..20: mol_type = other DNA
tcacctccagcccctgtatc

SEQ ID NO: 72061 - DNA, 20 bp, synthetic construct
  source 1..20: mol_type = other DNA
atcacctccagcccctgtat

SEQ ID NO: 72062 - DNA, 20 bp, synthetic construct
  source 1..20: mol_type = other DNA
tatcacctccagcccctgta

SEQ ID NO: 72063 - DNA, 20 bp, synthetic construct
  source 1..20: mol_type = other DNA
gtatcacctccagcccctgt

SEQ ID NO: 72064 - DNA, 20 bp, synthetic construct
  source 1..20: mol_type = other DNA
tgtatcacctccagcccctg

SEQ ID NO: 72065 - DNA, 20 bp, synthetic construct
  source 1..20: mol_type = other DNA
ttgtatcacctccagcccct

SEQ ID NO: 72066 - DNA, 20 bp, synthetic construct
  source 1..20: mol_type = other DNA
attgtatcacctccagcccc

SEQ ID NO: 72067 - DNA, 20 bp, synthetic construct
  source 1..20: mol_type = other DNA
aattgtatcacctccagccc

SEQ ID NO: 72068 - DNA, 20 bp, synthetic construct
  source 1..20: mol_type = other DNA
aaattgtatcacctccagcc

SEQ ID NO: 72069 - DNA, 20 bp, synthetic construct
  source 1..20: mol_type = other DNA
aaaattgtatcacctccagc

SEQ ID NO: 72070 - DNA, 20 bp, synthetic construct
  source 1..20: mol_type = other DNA
caaaattgtatcacctccag

SEQ ID NO: 72071 - DNA, 20 bp, synthetic construct
  source 1..20: mol_type = other DNA
acaaaattgtatcacctcca

SEQ ID NO: 72072 - DNA, 20 bp, synthetic construct
  source 1..20: mol_type = other DNA
aacaaaattgtatcacctcc

SEQ ID NO: 72073 - DNA, 20 bp, synthetic construct
  source 1..20: mol_type = other DNA
aaacaaaattgtatcacctc

SEQ ID NO: 72074 - DNA, 20 bp, synthetic construct
  source 1..20: mol_type = other DNA
gaaacaaaattgtatcacct

SEQ ID NO: 72075 - DNA, 20 bp, synthetic construct
  source 1..20: mol_type = other DNA
agaaacaaaattgtatcacc

SEQ ID NO: 72076 - DNA, 20 bp, synthetic construct
  source 1..20: mol_type = other DNA
aagaaacaaaattgtatcac

SEQ ID NO: 72077 - DNA, 20 bp, synthetic construct
  source 1..20: mol_type = other DNA
gaagaaacaaaattgtatca

SEQ ID NO: 72078 - DNA, 20 bp, synthetic construct
  source 1..20: mol_type = other DNA
ggaagaaacaaaattgtatc

SEQ ID NO: 72079 - DNA, 20 bp, synthetic construct
  source 1..20: mol_type = other DNA
aggaagaaacaaaattgtat

SEQ ID NO: 72080 - DNA, 20 bp, synthetic construct
  source 1..20: mol_type = other DNA
gaggaagaaacaaaattgta

SEQ ID NO: 72081 - DNA, 20 bp, synthetic construct
  source 1..20: mol_type = other DNA
ggaggaagaaacaaaattgt

SEQ ID NO: 72082 - DNA, 20 bp, synthetic construct
  source 1..20: mol_type = other DNA
tggaggaagaaacaaaattg

SEQ ID NO: 72083 - DNA, 20 bp, synthetic construct
  source 1..20: mol_type = other DNA
ttggaggaagaaacaaaatt

SEQ ID NO: 72084 - DNA, 20 bp, synthetic construct
  source 1..20: mol_type = other DNA
gttggaggaagaaacaaaat

SEQ ID NO: 72085 - DNA, 20 bp, synthetic construct
  source 1..20: mol_type = other DNA
tgttggaggaagaaacaaaa

SEQ ID NO: 72086 - DNA, 20 bp, synthetic construct
  source 1..20: mol_type = other DNA
atgttggaggaagaaacaaa

SEQ ID NO: 72087 - DNA, 20 bp, synthetic construct
  source 1..20: mol_type = other DNA
gatgttggaggaagaaacaa

SEQ ID NO: 72088 - DNA, 20 bp, synthetic construct
  source 1..20: mol_type = other DNA
cgatgttggaggaagaaaca

SEQ ID NO: 72089 - DNA, 20 bp, synthetic construct
  source 1..20: mol_type = other DNA
gcgatgttggaggaagaaac

SEQ ID NO: 72090 - DNA, 20 bp, synthetic construct
  source 1..20: mol_type = other DNA
ggcgatgttggaggaagaaa

SEQ ID NO: 72091 - DNA, 20 bp, synthetic construct
  source 1..20: mol_type = other DNA
aggcgatgttggaggaagaa

SEQ ID NO: 72092 - DNA, 20 bp, synthetic construct
  source 1..20: mol_type = other DNA
caggcgatgttggaggaaga

SEQ ID NO: 72093 - DNA, 20 bp, synthetic construct
  source 1..20: mol_type = other DNA
gcaggcgatgttggaggaag

SEQ ID NO: 72094 - DNA, 20 bp, synthetic construct
  source 1..20: mol_type = other DNA
agcaggcgatgttggaggaa

SEQ ID NO: 72095 - DNA, 20 bp, synthetic construct
  source 1..20: mol_type = other DNA
tagcaggcgatgttggagga

SEQ ID NO: 72096 - DNA, 20 bp, synthetic construct
  source 1..20: mol_type = other DNA
ctagcaggcgatgttggagg

SEQ ID NO: 72097 - DNA, 20 bp, synthetic construct
  source 1..20: mol_type = other DNA
actagcaggcgatgttggag

SEQ ID NO: 72098 - DNA, 20 bp, synthetic construct
  source 1..20: mol_type = other DNA
gactagcaggcgatgttgga

SEQ ID NO: 72099 - DNA, 20 bp, synthetic construct
  source 1..20: mol_type = other DNA
agactagcaggcgatgttgg

SEQ ID NO: 72100 - DNA, 20 bp, synthetic construct
  source 1..20: mol_type = other DNA
tagactagcaggcgatgttg

SEQ ID NO: 72101 - DNA, 20 bp, synthetic construct
  source 1..20: mol_type = other DNA
ctagactagcaggcgatgtt

SEQ ID NO: 72102 - DNA, 20 bp, synthetic construct
  source 1..20: mol_type = other DNA
tctagactagcaggcgatgt

SEQ ID NO: 72103 - DNA, 20 bp, synthetic construct
  source 1..20: mol_type = other DNA
ctctagactagcaggcgatg

SEQ ID NO: 72104 - DNA, 20 bp, synthetic construct
  source 1..20: mol_type = other DNA
cctctagactagcaggcgat

SEQ ID NO: 72105 - DNA, 20 bp, synthetic construct
  source 1..20: mol_type = other DNA
gcctctagactagcaggcga

SEQ ID NO: 72106 - DNA, 20 bp, synthetic construct
  source 1..20: mol_type = other DNA
agcctctagactagcaggcg

SEQ ID NO: 72107 - DNA, 20 bp, synthetic construct
  source 1..20: mol_type = other DNA
aagcctctagactagcaggc

SEQ ID NO: 72108 - DNA, 20 bp, synthetic construct
  source 1..20: mol_type = other DNA
aaagcctctagactagcagg

SEQ ID NO: 72109 - DNA, 20 bp, synthetic construct
  source 1..20: mol_type = other DNA
aaaagcctctagactagcag

SEQ ID NO: 72110 - DNA, 20 bp, synthetic construct
  source 1..20: mol_type = other DNA
taaaagcctctagactagca

SEQ ID NO: 72111 - DNA, 20 bp, synthetic construct
  source 1..20: mol_type = other DNA
ataaaagcctctagactagc

SEQ ID NO: 72112 - DNA, 20 bp, synthetic construct
  source 1..20: mol_type = other DNA
tataaaagcctctagactag

SEQ ID NO: 72113 - DNA, 20 bp, synthetic construct
  source 1..20: mol_type = other DNA
ttataaaagcctctagacta

SEQ ID NO: 72114 - DNA, 20 bp, synthetic construct
  source 1..20: mol_type = other DNA
tttataaaagcctctagact

SEQ ID NO: 72115 - DNA, 20 bp, synthetic construct
  source 1..20: mol_type = other DNA
atttataaaagcctctagac

SEQ ID NO: 72116 - DNA, 20 bp, synthetic construct
  source 1..20: mol_type = other DNA
aatttataaaagcctctaga

SEQ ID NO: 72117 - DNA, 20 bp, synthetic construct
  source 1..20: mol_type = other DNA
caatttataaaagcctctag

SEQ ID NO: 72118 - DNA, 20 bp, synthetic construct
  source 1..20: mol_type = other DNA
tcaatttataaaagcctcta

SEQ ID NO: 72119 - DNA, 20 bp, synthetic construct
  source 1..20: mol_type = other DNA
ttcaatttataaaagcctct

SEQ ID NO: 72120 - DNA, 20 bp, synthetic construct
  source 1..20: mol_type = other DNA
tttcaatttataaaagcctc

SEQ ID NO: 72121 - DNA, 20 bp, synthetic construct
  source 1..20: mol_type = other DNA
ttttcaatttataaaagcct

SEQ ID NO: 72122 - DNA, 20 bp, synthetic construct
  source 1..20: mol_type = other DNA
tttttcaatttataaaagcc

SEQ ID NO: 72123 - DNA, 20 bp, synthetic construct
  source 1..20: mol_type = other DNA
gtttttcaatttataaaagc

SEQ ID NO: 72124 - DNA, 20 bp, synthetic construct
  source 1..20: mol_type = other DNA
agtttttcaatttataaaag

SEQ ID NO: 72125 - DNA, 20 bp, synthetic construct
  source 1..20: mol_type = other DNA
tagtttttcaatttataaaa

SEQ ID NO: 72126 - DNA, 20 bp, synthetic construct
  source 1..20: mol_type = other DNA
ttagtttttcaatttataaa

SEQ ID NO: 72127 - DNA, 20 bp, synthetic construct
  source 1..20: mol_type = other DNA
attagtttttcaatttataa

SEQ ID NO: 72128 - DNA, 20 bp, synthetic construct
  source 1..20: mol_type = other DNA
aattagtttttcaatttata

SEQ ID NO: 72129 - DNA, 20 bp, synthetic construct
  source 1..20: mol_type = other DNA
gaattagtttttcaatttat

SEQ ID NO: 72130 - DNA, 20 bp, synthetic construct
  source 1..20: mol_type = other DNA
agaattagtttttcaattta

SEQ ID NO: 72131 - DNA, 20 bp, synthetic construct
  source 1..20: mol_type = other DNA
aagaattagtttttcaattt

SEQ ID NO: 72132 - DNA, 20 bp, synthetic construct
  source 1..20: mol_type = other DNA
aaagaattagtttttcaatt

SEQ ID NO: 72133 - DNA, 20 bp, synthetic construct
  source 1..20: mol_type = other DNA
taaagaattagtttttcaat

SEQ ID NO: 72134 - DNA, 20 bp, synthetic construct
  source 1..20: mol_type = other DNA
ataaagaattagtttttcaa

SEQ ID NO: 72135 - DNA, 20 bp, synthetic construct
  source 1..20: mol_type = other DNA
gataaagaattagtttttca

SEQ ID NO: 72136 - DNA, 20 bp, synthetic construct
  source 1..20: mol_type = other DNA
tgataaagaattagtttttc

SEQ ID NO: 72137 - DNA, 20 bp, synthetic construct
  source 1..20: mol_type = other DNA
atgataaagaattagttttt

SEQ ID NO: 72138 - DNA, 20 bp, synthetic construct
  source 1..20: mol_type = other DNA
gatgataaagaattagtttt

SEQ ID NO: 72139 - DNA, 20 bp, synthetic construct
  source 1..20: mol_type = other DNA
agatgataaagaattagttt

SEQ ID NO: 72140 - DNA, 20 bp, synthetic construct
  source 1..20: mol_type = other DNA
gagatgataaagaattagtt

SEQ ID NO: 72141 - DNA, 20 bp, synthetic construct
  source 1..20: mol_type = other DNA
tgagatgataaagaattagt

SEQ ID NO: 72142 - DNA, 20 bp, synthetic construct
  source 1..20: mol_type = other DNA
atgagatgataaagaattag

SEQ ID NO: 72143 - DNA, 20 bp, synthetic construct
  source 1..20: mol_type = other DNA
gatgagatgataaagaatta

SEQ ID NO: 72144 - DNA, 20 bp, synthetic construct
  source 1..20: mol_type = other DNA
agatgagatgataaagaatt

SEQ ID NO: 72145 - DNA, 20 bp, synthetic construct
  source 1..20: mol_type = other DNA
cagatgagatgataaagaat

SEQ ID NO: 72146 - DNA, 20 bp, synthetic construct
  source 1..20: mol_type = other DNA
tcagatgagatgataaagaa

SEQ ID NO: 72147 - DNA, 20 bp, synthetic construct
  source 1..20: mol_type = other DNA
atcagatgagatgataaaga

SEQ ID NO: 72148 - DNA, 20 bp, synthetic construct
  source 1..20: mol_type = other DNA
catcagatgagatgataaag

SEQ ID NO: 72149 - DNA, 20 bp, synthetic construct
  source 1..20: mol_type = other DNA
ccatcagatgagatgataaa

SEQ ID NO: 72150 - DNA, 20 bp, synthetic construct
  source 1..20: mol_type = other DNA
accatcagatgagatgataa

SEQ ID NO: 72151 - DNA, 20 bp, synthetic construct
  source 1..20: mol_type = other DNA
aaccatcagatgagatgata

SEQ ID NO: 72152 - DNA, 20 bp, synthetic construct
  source 1..20: mol_type = other DNA
aaaccatcagatgagatgat

SEQ ID NO: 72153 - DNA, 20 bp, synthetic construct
  source 1..20: mol_type = other DNA
aaaaccatcagatgagatga

SEQ ID NO: 72154 - DNA, 20 bp, synthetic construct
  source 1..20: mol_type = other DNA
aaaaaccatcagatgagatg

SEQ ID NO: 72155 - DNA, 20 bp, synthetic construct
  source 1..20: mol_type = other DNA
taaaaaccatcagatgagat

SEQ ID NO: 72156 - DNA, 20 bp, synthetic construct
  source 1..20: mol_type = other DNA
ataaaaaccatcagatgaga

SEQ ID NO: 72157 - DNA, 20 bp, synthetic construct
  source 1..20: mol_type = other DNA
cataaaaaccatcagatgag

SEQ ID NO: 72158 - DNA, 20 bp, synthetic construct
  source 1..20: mol_type = other DNA
acataaaaaccatcagatga

SEQ ID NO: 72159 - DNA, 20 bp, synthetic construct
  source 1..20: mol_type = other DNA
aacataaaaaccatcagatg

SEQ ID NO: 72160 - DNA, 20 bp, synthetic construct
  source 1..20: mol_type = other DNA
aaacataaaaaccatcagat

SEQ ID NO: 72161 - DNA, 20 bp, synthetic construct
  source 1..20: mol_type = other DNA
aaaacataaaaaccatcaga

SEQ ID NO: 72162 - DNA, 20 bp, synthetic construct
  source 1..20: mol_type = other DNA
aaaaacataaaaaccatcag

SEQ ID NO: 72163 - DNA, 20 bp, synthetic construct
  source 1..20: mol_type = other DNA
gaaaaacataaaaaccatca

SEQ ID NO: 72164 - DNA, 20 bp, synthetic construct
  source 1..20: mol_type = other DNA
ggaaaaacataaaaaccatc

SEQ ID NO: 72165 - DNA, 20 bp, synthetic construct
  source 1..20: mol_type = other DNA
aggaaaaacataaaaaccat

SEQ ID NO: 72166 - DNA, 20 bp, synthetic construct
  source 1..20: mol_type = other DNA
aaggaaaaacataaaaacca

SEQ ID NO: 72167 - DNA, 20 bp, synthetic construct
  source 1..20: mol_type = other DNA
aaaggaaaaacataaaaacc

SEQ ID NO: 72168 - DNA, 20 bp, synthetic construct
  source 1..20: mol_type = other DNA
aaaaggaaaaacataaaaac

SEQ ID NO: 72169 - DNA, 20 bp, synthetic construct
  source 1..20: mol_type = other DNA
aaaaaggaaaaacataaaaa

SEQ ID NO: 72170 - DNA, 20 bp, synthetic construct
  source 1..20: mol_type = other DNA
aaaaaaggaaaaacataaaa

SEQ ID NO: 72171 - DNA, 20 bp, synthetic construct
  source 1..20: mol_type = other DNA
gaaaaaaggaaaaacataaa

SEQ ID NO: 72172 - DNA, 20 bp, synthetic construct
  source 1..20: mol_type = other DNA
agaaaaaaggaaaaacataa

SEQ ID NO: 72173 - DNA, 20 bp, synthetic construct
  source 1..20: mol_type = other DNA
gagaaaaaaggaaaaacata

SEQ ID NO: 72174 - DNA, 20 bp, synthetic construct
  source 1..20: mol_type = other DNA
agagaaaaaaggaaaaacat

SEQ ID NO: 72175 - DNA, 20 bp, synthetic construct
  source 1..20: mol_type = other DNA
gagagaaaaaaggaaaaaca

SEQ ID NO: 72176 - DNA, 20 bp, synthetic construct
  source 1..20: mol_type = other DNA
agagagaaaaaaggaaaaac

SEQ ID NO: 72177 - DNA, 20 bp, synthetic construct
  source 1..20: mol_type = other DNA
tagagagaaaaaaggaaaaa

SEQ ID NO: 72178 - DNA, 20 bp, synthetic construct
  source 1..20: mol_type = other DNA
atagagagaaaaaaggaaaa

SEQ ID NO: 72179 - DNA, 20 bp, synthetic construct
  source 1..20: mol_type = other DNA
tatagagagaaaaaaggaaa

SEQ ID NO: 72180 - DNA, 20 bp, synthetic construct
  source 1..20: mol_type = other DNA
gtatagagagaaaaaaggaa

SEQ ID NO: 72181 - DNA, 20 bp, synthetic construct
  source 1..20: mol_type = other DNA
ggtatagagagaaaaaagga

SEQ ID NO: 72182 - DNA, 20 bp, synthetic construct
  source 1..20: mol_type = other DNA
aggtatagagagaaaaaagg

SEQ ID NO: 72183 - DNA, 20 bp, synthetic construct
  source 1..20: mol_type = other DNA
caggtatagagagaaaaaag

SEQ ID NO: 72184 - DNA, 20 bp, synthetic construct
  source 1..20: mol_type = other DNA
acaggtatagagagaaaaaa

SEQ ID NO: 72185 - DNA, 20 bp, synthetic construct
  source 1..20: mol_type = other DNA
tacaggtatagagagaaaaa

SEQ ID NO: 72186 - DNA, 20 bp, synthetic construct
  source 1..20: mol_type = other DNA
ctacaggtatagagagaaaa

SEQ ID NO: 72187 - DNA, 20 bp, synthetic construct
  source 1..20: mol_type = other DNA
actacaggtatagagagaaa

SEQ ID NO: 72188 - DNA, 20 bp, synthetic construct
  source 1..20: mol_type = other DNA
aactacaggtatagagagaa

SEQ ID NO: 72189 - DNA, 20 bp, synthetic construct
  source 1..20: mol_type = other DNA
gaactacaggtatagagaga

SEQ ID NO: 72190 - DNA, 20 bp, synthetic construct
  source 1..20: mol_type = other DNA
ggaactacaggtatagagag

SEQ ID NO: 72191 - DNA, 20 bp, synthetic construct
  source 1..20: mol_type = other DNA
aggaactacaggtatagaga

SEQ ID NO: 72192 - DNA, 20 bp, synthetic construct
  source 1..20: mol_type = other DNA
aaggaactacaggtatagag

SEQ ID NO: 72193 - DNA, 20 bp, synthetic construct
  source 1..20: mol_type = other DNA
gaaggaactacaggtataga

SEQ ID NO: 72194 - DNA, 20 bp, synthetic construct
  source 1..20: mol_type = other DNA
tgaaggaactacaggtatag

SEQ ID NO: 72195 - DNA, 20 bp, synthetic construct
  source 1..20: mol_type = other DNA
ctgaaggaactacaggtata

SEQ ID NO: 72196 - DNA, 20 bp, synthetic construct
  source 1..20: mol_type = other DNA
tctgaaggaactacaggtat

SEQ ID NO: 72197 - DNA, 20 bp, synthetic construct
  source 1..20: mol_type = other DNA
ttctgaaggaactacaggta

SEQ ID NO: 72198 - DNA, 20 bp, synthetic construct
  source 1..20: mol_type = other DNA
tttctgaaggaactacaggt

SEQ ID NO: 72199 - DNA, 20 bp, synthetic construct
  source 1..20: mol_type = other DNA
gtttctgaaggaactacagg

SEQ ID NO: 72200 - DNA, 20 bp, synthetic construct
  source 1..20: mol_type = other DNA
tgtttctgaaggaactacag

SEQ ID NO: 72201 - DNA, 20 bp, synthetic construct
  source 1..20: mol_type = other DNA
ctgtttctgaaggaactaca

SEQ ID NO: 72202 - DNA, 20 bp, synthetic construct
  source 1..20: mol_type = other DNA
cctgtttctgaaggaactac

SEQ ID NO: 72203 - DNA, 20 bp, synthetic construct
  source 1..20: mol_type = other DNA
acctgtttctgaaggaacta

SEQ ID NO: 72204 - DNA, 20 bp, synthetic construct
  source 1..20: mol_type = other DNA
tacctgtttctgaaggaact

SEQ ID NO: 72205 - DNA, 20 bp, synthetic construct
  source 1..20: mol_type = other DNA
ttacctgtttctgaaggaac

SEQ ID NO: 72206 - DNA, 20 bp, synthetic construct
  source 1..20: mol_type = other DNA
gttacctgtttctgaaggaa

SEQ ID NO: 72207 - DNA, 20 bp, synthetic construct
  source 1..20: mol_type = other DNA
tgttacctgtttctgaagga

SEQ ID NO: 72208 - DNA, 20 bp, synthetic construct
  source 1..20: mol_type = other DNA
gtgttacctgtttctgaagg

SEQ ID NO: 72209 - DNA, 20 bp, synthetic construct
  source 1..20: mol_type = other DNA
agtgttacctgtttctgaag

SEQ ID NO: 72210 - DNA, 20 bp, synthetic construct
  source 1..20: mol_type = other DNA
aagtgttacctgtttctgaa

SEQ ID NO: 72211 - DNA, 20 bp, synthetic construct
  source 1..20: mol_type = other DNA
aaagtgttacctgtttctga

SEQ ID NO: 72212 - DNA, 20 bp, synthetic construct
  source 1..20: mol_type = other DNA
aaaagtgttacctgtttctg

SEQ ID NO: 72213 - DNA, 20 bp, synthetic construct
  source 1..20: mol_type = other DNA
gaaaagtgttacctgtttct

SEQ ID NO: 72214 - DNA, 20 bp, synthetic construct
  source 1..20: mol_type = other DNA
agaaaagtgttacctgtttc

SEQ ID NO: 72215 - DNA, 20 bp, synthetic construct
  source 1..20: mol_type = other DNA
tagaaaagtgttacctgttt

SEQ ID NO: 72216 - DNA, 20 bp, synthetic construct
  source 1..20: mol_type = other DNA
ttagaaaagtgttacctgtt

SEQ ID NO: 72217 - DNA, 20 bp, synthetic construct
  source 1..20: mol_type = other DNA
attagaaaagtgttacctgt

SEQ ID NO: 72218 - DNA, 20 bp, synthetic construct
  source 1..20: mol_type = other DNA
tattagaaaagtgttacctg

SEQ ID NO: 72219 - DNA, 20 bp, synthetic construct
  source 1..20: mol_type = other DNA
ctattagaaaagtgttacct

SEQ ID NO: 72220 - DNA, 20 bp, synthetic construct
  source 1..20: mol_type = other DNA
actattagaaaagtgttacc

SEQ ID NO: 72221 - DNA, 20 bp, synthetic construct
  source 1..20: mol_type = other DNA
gactattagaaaagtgttac

SEQ ID NO: 72222 - DNA, 20 bp, synthetic construct
  source 1..20: mol_type = other DNA
tgactattagaaaagtgtta

SEQ ID NO: 72223 - DNA, 20 bp, synthetic construct
  source 1..20: mol_type = other DNA
gtgactattagaaaagtgtt

SEQ ID NO: 72224 - DNA, 20 bp, synthetic construct
  source 1..20: mol_type = other DNA
cgtgactattagaaaagtgt

SEQ ID NO: 72225 - DNA, 20 bp, synthetic construct
  source 1..20: mol_type = other DNA
acgtgactattagaaaagtg

SEQ ID NO: 72226 - DNA, 20 bp, synthetic construct
  source 1..20: mol_type = other DNA
aacgtgactattagaaaagt

SEQ ID NO: 72227 - DNA, 20 bp, synthetic construct
  source 1..20: mol_type = other DNA
caacgtgactattagaaaag

SEQ ID NO: 72228 - DNA, 20 bp, synthetic construct
  source 1..20: mol_type = other DNA
acaacgtgactattagaaaa

SEQ ID NO: 72229 - DNA, 20 bp, synthetic construct
  source 1..20: mol_type = other DNA
tacaacgtgactattagaaa

SEQ ID NO: 72230 - DNA, 20 bp, synthetic construct
  source 1..20: mol_type = other DNA
atacaacgtgactattagaa

SEQ ID NO: 72231 - DNA, 20 bp, synthetic construct
  source 1..20: mol_type = other DNA
aatacaacgtgactattaga

SEQ ID NO: 72232 - DNA, 20 bp, synthetic construct
  source 1..20: mol_type = other DNA
gaatacaacgtgactattag

SEQ ID NO: 72233 - DNA, 20 bp, synthetic construct
  source 1..20: mol_type = other DNA
agaatacaacgtgactatta

SEQ ID NO: 72234 - DNA, 20 bp, synthetic construct
  source 1..20: mol_type = other DNA
aagaatacaacgtgactatt

SEQ ID NO: 72235 - DNA, 20 bp, synthetic construct
  source 1..20: mol_type = other DNA
caagaatacaacgtgactat

SEQ ID NO: 72236 - DNA, 20 bp, synthetic construct
  source 1..20: mol_type = other DNA
gcaagaatacaacgtgacta

SEQ ID NO: 72237 - DNA, 20 bp, synthetic construct
  source 1..20: mol_type = other DNA
tgcaagaatacaacgtgact

SEQ ID NO: 72238 - DNA, 20 bp, synthetic construct
  source 1..20: mol_type = other DNA
atgcaagaatacaacgtgac

SEQ ID NO: 72239 - DNA, 20 bp, synthetic construct
  source 1..20: mol_type = other DNA
gatgcaagaatacaacgtga

SEQ ID NO: 72240 - DNA, 20 bp, synthetic construct
  source 1..20: mol_type = other DNA
agatgcaagaatacaacgtg

SEQ ID NO: 72241 - DNA, 20 bp, synthetic construct
  source 1..20: mol_type = other DNA
aagatgcaagaatacaacgt

SEQ ID NO: 72242 - DNA, 20 bp, synthetic construct
  source 1..20: mol_type = other DNA
caagatgcaagaatacaacg

SEQ ID NO: 72243 - DNA, 20 bp, synthetic construct
  source 1..20: mol_type = other DNA
acaagatgcaagaatacaac

SEQ ID NO: 72244 - DNA, 20 bp, synthetic construct
  source 1..20: mol_type = other DNA
aacaagatgcaagaatacaa

SEQ ID NO: 72245 - DNA, 20 bp, synthetic construct
  source 1..20: mol_type = other DNA
caacaagatgcaagaataca

SEQ ID NO: 72246 - DNA, 20 bp, synthetic construct
  source 1..20: mol_type = other DNA
acaacaagatgcaagaatac

SEQ ID NO: 72247 - DNA, 20 bp, synthetic construct
  source 1..20: mol_type = other DNA
aacaacaagatgcaagaata

SEQ ID NO: 72248 - DNA, 20 bp, synthetic construct
  source 1..20: mol_type = other DNA
taacaacaagatgcaagaat

SEQ ID NO: 72249 - DNA, 20 bp, synthetic construct
  source 1..20: mol_type = other DNA
gtaacaacaagatgcaagaa

SEQ ID NO: 72250 - DNA, 20 bp, synthetic construct
  source 1..20: mol_type = other DNA
tgtaacaacaagatgcaaga

SEQ ID NO: 72251 - DNA, 20 bp, synthetic construct
  source 1..20: mol_type = other DNA
ttgtaacaacaagatgcaag

SEQ ID NO: 72252 - DNA, 20 bp, synthetic construct
  source 1..20: mol_type = other DNA
attgtaacaacaagatgcaa

SEQ ID NO: 72253 - DNA, 20 bp, synthetic construct
  source 1..20: mol_type = other DNA
cattgtaacaacaagatgca

SEQ ID NO: 72254 - DNA, 20 bp, synthetic construct
  source 1..20: mol_type = other DNA
gcattgtaacaacaagatgc

SEQ ID NO: 72255 - DNA, 20 bp, synthetic construct
  source 1..20: mol_type = other DNA
agcattgtaacaacaagatg

SEQ ID NO: 72256 - DNA, 20 bp, synthetic construct
  source 1..20: mol_type = other DNA
aagcattgtaacaacaagat

SEQ ID NO: 72257 - DNA, 20 bp, synthetic construct
  source 1..20: mol_type = other DNA
aaagcattgtaacaacaaga

SEQ ID NO: 72258 - DNA, 20 bp, synthetic construct
  source 1..20: mol_type = other DNA
aaaagcattgtaacaacaag

SEQ ID NO: 72259 - DNA, 20 bp, synthetic construct
  source 1..20: mol_type = other DNA
caaaagcattgtaacaacaa

SEQ ID NO: 72260 - DNA, 20 bp, synthetic construct
  source 1..20: mol_type = other DNA
acaaaagcattgtaacaaca

SEQ ID NO: 72261 - DNA, 20 bp, synthetic construct
  source 1..20: mol_type = other DNA
aacaaaagcattgtaacaac

SEQ ID NO: 72262 - DNA, 20 bp, synthetic construct
  source 1..20: mol_type = other DNA
aaacaaaagcattgtaacaa

SEQ ID NO: 72263 - DNA, 20 bp, synthetic construct
  source 1..20: mol_type = other DNA
gaaacaaaagcattgtaaca

SEQ ID NO: 72264 - DNA, 20 bp, synthetic construct
  source 1..20: mol_type = other DNA
agaaacaaaagcattgtaac

SEQ ID NO: 72265 - DNA, 20 bp, synthetic construct
  source 1..20: mol_type = other DNA
gagaaacaaaagcattgtaa

SEQ ID NO: 72266 - DNA, 20 bp, synthetic construct
  source 1..20: mol_type = other DNA
tgagaaacaaaagcattgta

SEQ ID NO: 72267 - DNA, 20 bp, synthetic construct
  source 1..20: mol_type = other DNA
gtgagaaacaaaagcattgt

SEQ ID NO: 72268 - DNA, 20 bp, synthetic construct
  source 1..20: mol_type = other DNA
ggtgagaaacaaaagcattg

SEQ ID NO: 72269 - DNA, 20 bp, synthetic construct
  source 1..20: mol_type = other DNA
tggtgagaaacaaaagcatt

SEQ ID NO: 72270 - DNA, 20 bp, synthetic construct
  source 1..20: mol_type = other DNA
atggtgagaaacaaaagcat

SEQ ID NO: 72271 - DNA, 20 bp, synthetic construct
  source 1..20: mol_type = other DNA
tatggtgagaaacaaaagca

SEQ ID NO: 72272 - DNA, 20 bp, synthetic construct
  source 1..20: mol_type = other DNA
ctatggtgagaaacaaaagc

SEQ ID NO: 72273 - DNA, 20 bp, synthetic construct
  source 1..20: mol_type = other DNA
cctatggtgagaaacaaaag

SEQ ID NO: 72274 - DNA, 20 bp, synthetic construct
  source 1..20: mol_type = other DNA
ccctatggtgagaaacaaaa

SEQ ID NO: 72275 - DNA, 20 bp, synthetic construct
  source 1..20: mol_type = other DNA
cccctatggtgagaaacaaa

SEQ ID NO: 72276 - DNA, 20 bp, synthetic construct
  source 1..20: mol_type = other DNA
tcccctatggtgagaaacaa

SEQ ID NO: 72277 - DNA, 20 bp, synthetic construct
  source 1..20: mol_type = other DNA
atcccctatggtgagaaaca

SEQ ID NO: 72278 - DNA, 20 bp, synthetic construct
  source 1..20: mol_type = other DNA
catcccctatggtgagaaac

SEQ ID NO: 72279 - DNA, 20 bp, synthetic construct
  source 1..20: mol_type = other DNA
tcatcccctatggtgagaaa

SEQ ID NO: 72280 - DNA, 20 bp, synthetic construct
  source 1..20: mol_type = other DNA
atcatcccctatggtgagaa

SEQ ID NO: 72281 - DNA, 20 bp, synthetic construct
  source 1..20: mol_type = other DNA
catcatcccctatggtgaga

SEQ ID NO: 72282 - DNA, 20 bp, synthetic construct
  source 1..20: mol_type = other DNA
ccatcatcccctatggtgag

SEQ ID NO: 72283 - DNA, 20 bp, synthetic construct
  source 1..20: mol_type = other DNA
tccatcatcccctatggtga

SEQ ID NO: 72284 - DNA, 20 bp, synthetic construct
  source 1..20: mol_type = other DNA
ttccatcatcccctatggtg

SEQ ID NO: 72285 - DNA, 20 bp, synthetic construct
  source 1..20: mol_type = other DNA
tttccatcatcccctatggt

SEQ ID NO: 72286 - DNA, 20 bp, synthetic construct
  source 1..20: mol_type = other DNA
ttttccatcatcccctatgg

SEQ ID NO: 72287 - DNA, 20 bp, synthetic construct
  source 1..20: mol_type = other DNA
attttccatcatcccctatg

SEQ ID NO: 72288 - DNA, 20 bp, synthetic construct
  source 1..20: mol_type = other DNA
aattttccatcatcccctat

SEQ ID NO: 72289 - DNA, 20 bp, synthetic construct
  source 1..20: mol_type = other DNA
taattttccatcatccccta

SEQ ID NO: 72290 - DNA, 20 bp, synthetic construct
  source 1..20: mol_type = other DNA
ttaattttccatcatcccct

SEQ ID NO: 72291 - DNA, 20 bp, synthetic construct
  source 1..20: mol_type = other DNA
attaattttccatcatcccc

SEQ ID NO: 72292 - DNA, 20 bp, synthetic construct
  source 1..20: mol_type = other DNA
tattaattttccatcatccc

SEQ ID NO: 72293 - DNA, 20 bp, synthetic construct
  source 1..20: mol_type = other DNA
atattaattttccatcatcc

SEQ ID NO: 72294 - DNA, 20 bp, synthetic construct
  source 1..20: mol_type = other DNA
aatattaattttccatcatc

SEQ ID NO: 72295 - DNA, 20 bp, synthetic construct
  source 1..20: mol_type = other DNA
gaatattaattttccatcat

SEQ ID NO: 72296 - DNA, 20 bp, synthetic construct
  source 1..20: mol_type = other DNA
agaatattaattttccatca

SEQ ID NO: 72297 - DNA, 20 bp, synthetic construct
  source 1..20: mol_type = other DNA
aagaatattaattttccatc

SEQ ID NO: 72298 - DNA, 20 bp, synthetic construct
  source 1..20: mol_type = other DNA
aaagaatattaattttccat

SEQ ID NO: 72299 - DNA, 20 bp, synthetic construct
  source 1..20: mol_type = other DNA
caaagaatattaattttcca

SEQ ID NO: 72300 - DNA, 20 bp, synthetic construct
  source 1..20: mol_type = other DNA
tcaaagaatattaattttcc

SEQ ID NO: 72301 - DNA, 20 bp, synthetic construct
  source 1..20: mol_type = other DNA
gtcaaagaatattaattttc

SEQ ID NO: 72302 - DNA, 20 bp, synthetic construct
  source 1..20: mol_type = other DNA
agtcaaagaatattaatttt

SEQ ID NO: 72303 - DNA, 20 bp, synthetic construct
  source 1..20: mol_type = other DNA
aagtcaaagaatattaattt

SEQ ID NO: 72304 - DNA, 20 bp, synthetic construct
  source 1..20: mol_type = other DNA
taagtcaaagaatattaatt

SEQ ID NO: 72305 - DNA, 20 bp, synthetic construct
  source 1..20: mol_type = other DNA
ataagtcaaagaatattaat

SEQ ID NO: 72306 - DNA, 20 bp, synthetic construct
  source 1..20: mol_type = other DNA
cataagtcaaagaatattaa

SEQ ID NO: 72307 - DNA, 20 bp, synthetic construct
  source 1..20: mol_type = other DNA
ccataagtcaaagaatatta

SEQ ID NO: 72308 - DNA, 20 bp, synthetic construct
  source 1..20: mol_type = other DNA
gccataagtcaaagaatatt

SEQ ID NO: 72309 - DNA, 20 bp, synthetic construct
  source 1..20: mol_type = other DNA
tgccataagtcaaagaatat

SEQ ID NO: 72310 - DNA, 20 bp, synthetic construct
  source 1..20: mol_type = other DNA
atgccataagtcaaagaata

SEQ ID NO: 72311 - DNA, 20 bp, synthetic construct
  source 1..20: mol_type = other DNA
aatgccataagtcaaagaat

SEQ ID NO: 72312 - DNA, 20 bp, synthetic construct
  source 1..20: mol_type = other DNA
caatgccataagtcaaagaa

SEQ ID NO: 72313 - DNA, 20 bp, synthetic construct
  source 1..20: mol_type = other DNA
ccaatgccataagtcaaaga

SEQ ID NO: 72314 - DNA, 20 bp, synthetic construct
  source 1..20: mol_type = other DNA
accaatgccataagtcaaag

SEQ ID NO: 72315 - DNA, 20 bp, synthetic construct
  source 1..20: mol_type = other DNA
taccaatgccataagtcaaa

SEQ ID NO: 72316 - DNA, 20 bp, synthetic construct
  source 1..20: mol_type = other DNA
ttaccaatgccataagtcaa

SEQ ID NO: 72317 - DNA, 20 bp, synthetic construct
  source 1..20: mol_type = other DNA
tttaccaatgccataagtca

SEQ ID NO: 72318 - DNA, 20 bp, synthetic construct
  source 1..20: mol_type = other DNA
ttttaccaatgccataagtc

SEQ ID NO: 72319 - DNA, 20 bp, synthetic construct
  source 1..20: mol_type = other DNA
attttaccaatgccataagt

SEQ ID NO: 72320 - DNA, 20 bp, synthetic construct
  source 1..20: mol_type = other DNA
gattttaccaatgccataag

SEQ ID NO: 72321 - DNA, 20 bp, synthetic construct
  source 1..20: mol_type = other DNA
agattttaccaatgccataa

SEQ ID NO: 72322 - DNA, 20 bp, synthetic construct
  source 1..20: mol_type = other DNA
cagattttaccaatgccata

SEQ ID NO: 72323 - DNA, 20 bp, synthetic construct
  source 1..20: mol_type = other DNA
gcagattttaccaatgccat

SEQ ID NO: 72324 - DNA, 20 bp, synthetic construct
  source 1..20: mol_type = other DNA
tgcagattttaccaatgcca

SEQ ID NO: 72325 - DNA, 20 bp, synthetic construct
  source 1..20: mol_type = other DNA
atgcagattttaccaatgcc

SEQ ID NO: 72326 - DNA, 20 bp, synthetic construct
  source 1..20: mol_type = other DNA
catgcagattttaccaatgc

SEQ ID NO: 72327 - DNA, 20 bp, synthetic construct
  source 1..20: mol_type = other DNA
gcatgcagattttaccaatg

SEQ ID NO: 72328 - DNA, 20 bp, synthetic construct
  source 1..20: mol_type = other DNA
tgcatgcagattttaccaat

SEQ ID NO: 72329 - DNA, 20 bp, synthetic construct
  source 1..20: mol_type = other DNA
ttgcatgcagattttaccaa

SEQ ID NO: 72330 - DNA, 20 bp, synthetic construct
  source 1..20: mol_type = other DNA
tttgcatgcagattttacca

SEQ ID NO: 72331 - DNA, 20 bp, synthetic construct
  source 1..20: mol_type = other DNA
atttgcatgcagattttacc

SEQ ID NO: 72332 - DNA, 20 bp, synthetic construct
  source 1..20: mol_type = other DNA
aatttgcatgcagattttac

SEQ ID NO: 72333 - DNA, 20 bp, synthetic construct
  source 1..20: mol_type = other DNA
gaatttgcatgcagatttta

SEQ ID NO: 72334 - DNA, 20 bp, synthetic construct
  source 1..20: mol_type = other DNA
ggaatttgcatgcagatttt

SEQ ID NO: 72335 - DNA, 20 bp, synthetic construct
  source 1..20: mol_type = other DNA
gggaatttgcatgcagattt

SEQ ID NO: 72336 - DNA, 20 bp, synthetic construct
  source 1..20: mol_type = other DNA
tgggaatttgcatgcagatt

SEQ ID NO: 72337 - DNA, 20 bp, synthetic construct
  source 1..20: mol_type = other DNA
gtgggaatttgcatgcagat

SEQ ID NO: 72338 - DNA, 20 bp, synthetic construct
  source 1..20: mol_type = other DNA
tgtgggaatttgcatgcaga

SEQ ID NO: 72339 - DNA, 20 bp, synthetic construct
  source 1..20: mol_type = other DNA
ctgtgggaatttgcatgcag

SEQ ID NO: 72340 - DNA, 20 bp, synthetic construct
  source 1..20: mol_type = other DNA
actgtgggaatttgcatgca

SEQ ID NO: 72341 - DNA, 20 bp, synthetic construct
  source 1..20: mol_type = other DNA
aactgtgggaatttgcatgc

SEQ ID NO: 72342 - DNA, 20 bp, synthetic construct
  source 1..20: mol_type = other DNA
caactgtgggaatttgcatg

SEQ ID NO: 72343 - DNA, 20 bp, synthetic construct
  source 1..20: mol_type = other DNA
gcaactgtgggaatttgcat

SEQ ID NO: 72344 - DNA, 20 bp, synthetic construct
  source 1..20: mol_type = other DNA
ggcaactgtgggaatttgca

SEQ ID NO: 72345 - DNA, 20 bp, synthetic construct
  source 1..20: mol_type = other DNA
aggcaactgtgggaatttgc

SEQ ID NO: 72346 - DNA, 20 bp, synthetic construct
  source 1..20: mol_type = other DNA
caggcaactgtgggaatttg

SEQ ID NO: 72347 - DNA, 20 bp, synthetic construct
  source 1..20: mol_type = other DNA
acaggcaactgtgggaattt

SEQ ID NO: 72348 - DNA, 20 bp, synthetic construct
  source 1..20: mol_type = other DNA
tacaggcaactgtgggaatt

SEQ ID NO: 72349 - DNA, 20 bp, synthetic construct
  source 1..20: mol_type = other DNA
ctacaggcaactgtgggaat

SEQ ID NO: 72350 - DNA, 20 bp, synthetic construct
  source 1..20: mol_type = other DNA
tctacaggcaactgtgggaa

SEQ ID NO: 72351 - DNA, 20 bp, synthetic construct
  source 1..20: mol_type = other DNA
atctacaggcaactgtggga

SEQ ID NO: 72352 - DNA, 20 bp, synthetic construct
  source 1..20: mol_type = other DNA
aatctacaggcaactgtggg

SEQ ID NO: 72353 - DNA, 20 bp, synthetic construct
  source 1..20: mol_type = other DNA
taatctacaggcaactgtgg

SEQ ID NO: 72354 - DNA, 20 bp, synthetic construct
  source 1..20: mol_type = other DNA
ctaatctacaggcaactgtg

SEQ ID NO: 72355 - DNA, 20 bp, synthetic construct
  source 1..20: mol_type = other DNA
tctaatctacaggcaactgt

SEQ ID NO: 72356 - DNA, 20 bp, synthetic construct
  source 1..20: mol_type = other DNA
ctctaatctacaggcaactg

SEQ ID NO: 72357 - DNA, 20 bp, synthetic construct
  source 1..20: mol_type = other DNA
gctctaatctacaggcaact

SEQ ID NO: 72358 - DNA, 20 bp, synthetic construct
  source 1..20: mol_type = other DNA
ggctctaatctacaggcaac

SEQ ID NO: 72359 - DNA, 20 bp, synthetic construct
  source 1..20: mol_type = other DNA
tggctctaatctacaggcaa

SEQ ID NO: 72360 - DNA, 20 bp, synthetic construct
  source 1..20: mol_type = other DNA
ctggctctaatctacaggca

SEQ ID NO: 72361 - DNA, 20 bp, synthetic construct
  source 1..20: mol_type = other DNA
actggctctaatctacaggc

SEQ ID NO: 72362 - DNA, 20 bp, synthetic construct
  source 1..20: mol_type = other DNA
aactggctctaatctacagg

SEQ ID NO: 72363 - DNA, 20 bp, synthetic construct
  source 1..20: mol_type = other DNA
caactggctctaatctacag

SEQ ID NO: 72364 - DNA, 20 bp, synthetic construct
  source 1..20: mol_type = other DNA
acaactggctctaatctaca

SEQ ID NO: 72365 - DNA, 20 bp, synthetic construct
  source 1..20: mol_type = other DNA
aacaactggctctaatctac

SEQ ID NO: 72366 - DNA, 20 bp, synthetic construct
  source 1..20: mol_type = other DNA
aaacaactggctctaatcta

SEQ ID NO: 72367 - DNA, 20 bp, synthetic construct
  source 1..20: mol_type = other DNA
aaaacaactggctctaatct

SEQ ID NO: 72368 - DNA, 20 bp, synthetic construct
  source 1..20: mol_type = other DNA
aaaaacaactggctctaatc

SEQ ID NO: 72369 - DNA, 20 bp, synthetic construct
  source 1..20: mol_type = other DNA
aaaaaacaactggctctaat

SEQ ID NO: 72370 - DNA, 20 bp, synthetic construct
  source 1..20: mol_type = other DNA
aaaaaaacaactggctctaa

SEQ ID NO: 72371 - DNA, 20 bp, synthetic construct
  source 1..20: mol_type = other DNA
gaaaaaaacaactggctcta

SEQ ID NO: 72372 - DNA, 20 bp, synthetic construct
  source 1..20: mol_type = other DNA
agaaaaaaacaactggctct

SEQ ID NO: 72373 - DNA, 20 bp, synthetic construct
  source 1..20: mol_type = other DNA
gagaaaaaaacaactggctc

SEQ ID NO: 72374 - DNA, 20 bp, synthetic construct
  source 1..20: mol_type = other DNA
tgagaaaaaaacaactggct

SEQ ID NO: 72375 - DNA, 20 bp, synthetic construct
  source 1..20: mol_type = other DNA
ttgagaaaaaaacaactggc

SEQ ID NO: 72376 - DNA, 20 bp, synthetic construct
  source 1..20: mol_type = other DNA
gttgagaaaaaaacaactgg

SEQ ID NO: 72377 - DNA, 20 bp, synthetic construct
  source 1..20: mol_type = other DNA
agttgagaaaaaaacaactg

SEQ ID NO: 72378 - DNA, 20 bp, synthetic construct
  source 1..20: mol_type = other DNA
aagttgagaaaaaaacaact

SEQ ID NO: 72379 - DNA, 20 bp, synthetic construct
  source 1..20: mol_type = other DNA
aaagttgagaaaaaaacaac

SEQ ID NO: 72380 - DNA, 20 bp, synthetic construct
  source 1..20: mol_type = other DNA
caaagttgagaaaaaaacaa

SEQ ID NO: 72381 - DNA, 20 bp, synthetic construct
  source 1..20: mol_type = other DNA
gcaaagttgagaaaaaaaca

SEQ ID NO: 72382 - DNA, 20 bp, synthetic construct
  source 1..20: mol_type = other DNA
tgcaaagttgagaaaaaaac

SEQ ID NO: 72383 - DNA, 20 bp, synthetic construct
  source 1..20: mol_type = other DNA
ctgcaaagttgagaaaaaaa

SEQ ID NO: 72384 - DNA, 20 bp, synthetic construct
  source 1..20: mol_type = other DNA
cctgcaaagttgagaaaaaa

SEQ ID NO: 72385 - DNA, 20 bp, synthetic construct
  source 1..20: mol_type = other DNA
tcctgcaaagttgagaaaaa

SEQ ID NO: 72386 - DNA, 20 bp, synthetic construct
  source 1..20: mol_type = other DNA
ttcctgcaaagttgagaaaa

SEQ ID NO: 72387 - DNA, 20 bp, synthetic construct
  source 1..20: mol_type = other DNA
attcctgcaaagttgagaaa

SEQ ID NO: 72388 - DNA, 20 bp, synthetic construct
  source 1..20: mol_type = other DNA
gattcctgcaaagttgagaa

SEQ ID NO: 72389 - DNA, 20 bp, synthetic construct
  source 1..20: mol_type = other DNA
ggattcctgcaaagttgaga

SEQ ID NO: 72390 - DNA, 20 bp, synthetic construct
  source 1..20: mol_type = other DNA
aggattcctgcaaagttgag

SEQ ID NO: 72391 - DNA, 20 bp, synthetic construct
  source 1..20: mol_type = other DNA
caggattcctgcaaagttga

SEQ ID NO: 72392 - DNA, 20 bp, synthetic construct
  source 1..20: mol_type = other DNA
ccaggattcctgcaaagttg

SEQ ID NO: 72393 - DNA, 20 bp, synthetic construct
  source 1..20: mol_type = other DNA
accaggattcctgcaaagtt

SEQ ID NO: 72394 - DNA, 20 bp, synthetic construct
  source 1..20: mol_type = other DNA
aaccaggattcctgcaaagt

SEQ ID NO: 72395 - DNA, 20 bp, synthetic construct
  source 1..20: mol_type = other DNA
taaccaggattcctgcaaag

SEQ ID NO: 72396 - DNA, 20 bp, synthetic construct
  source 1..20: mol_type = other DNA
gtaaccaggattcctgcaaa

SEQ ID NO: 72397 - DNA, 20 bp, synthetic construct
  source 1..20: mol_type = other DNA
tgtaaccaggattcctgcaa

SEQ ID NO: 72398 - DNA, 20 bp, synthetic construct
  source 1..20: mol_type = other DNA
ttgtaaccaggattcctgca

SEQ ID NO: 72399 - DNA, 20 bp, synthetic construct
  source 1..20: mol_type = other DNA
gttgtaaccaggattcctgc

SEQ ID NO: 72400 - DNA, 20 bp, synthetic construct
  source 1..20: mol_type = other DNA
tgttgtaaccaggattcctg

SEQ ID NO: 72401 - DNA, 20 bp, synthetic construct
  source 1..20: mol_type = other DNA
atgttgtaaccaggattcct

SEQ ID NO: 72402 - DNA, 20 bp, synthetic construct
  source 1..20: mol_type = other DNA
aatgttgtaaccaggattcc

SEQ ID NO: 72403 - DNA, 20 bp, synthetic construct
  source 1..20: mol_type = other DNA
caatgttgtaaccaggattc

SEQ ID NO: 72404 - DNA, 20 bp, synthetic construct
  source 1..20: mol_type = other DNA
acaatgttgtaaccaggatt

SEQ ID NO: 72405 - DNA, 20 bp, synthetic construct
  source 1..20: mol_type = other DNA
tacaatgttgtaaccaggat

SEQ ID NO: 72406 - DNA, 20 bp, synthetic construct
  source 1..20: mol_type = other DNA
gtacaatgttgtaaccagga

SEQ ID NO: 72407 - DNA, 20 bp, synthetic construct
  source 1..20: mol_type = other DNA
agtacaatgttgtaaccagg

SEQ ID NO: 72408 - DNA, 20 bp, synthetic construct
  source 1..20: mol_type = other DNA
tagtacaatgttgtaaccag

SEQ ID NO: 72409 - DNA, 20 bp, synthetic construct
  source 1..20: mol_type = other DNA
atagtacaatgttgtaacca

SEQ ID NO: 72410 - DNA, 20 bp, synthetic construct
  source 1..20: mol_type = other DNA
aatagtacaatgttgtaacc

SEQ ID NO: 72411 - DNA, 20 bp, synthetic construct
  source 1..20: mol_type = other DNA
aaatagtacaatgttgtaac

SEQ ID NO: 72412 - DNA, 20 bp, synthetic construct
  source 1..20: mol_type = other DNA
taaatagtacaatgttgtaa

SEQ ID NO: 72413 - DNA, 20 bp, synthetic construct
  source 1..20: mol_type = other DNA
gtaaatagtacaatgttgta

SEQ ID NO: 72414 - DNA, 20 bp, synthetic construct
  source 1..20: mol_type = other DNA
agtaaatagtacaatgttgt

SEQ ID NO: 72415 - DNA, 20 bp, synthetic construct
  source 1..20: mol_type = other DNA
tagtaaatagtacaatgttg

SEQ ID NO: 72416 - DNA, 20 bp, synthetic construct
  source 1..20: mol_type = other DNA
gtagtaaatagtacaatgtt

SEQ ID NO: 72417 - DNA, 20 bp, synthetic construct
  source 1..20: mol_type = other DNA
ggtagtaaatagtacaatgt

SEQ ID NO: 72418 - DNA, 20 bp, synthetic construct
  source 1..20: mol_type = other DNA
tggtagtaaatagtacaatg

SEQ ID NO: 72419 - DNA, 20 bp, synthetic construct
  source 1..20: mol_type = other DNA
ttggtagtaaatagtacaat

SEQ ID NO: 72420 - DNA, 20 bp, synthetic construct
  source 1..20: mol_type = other DNA
gttggtagtaaatagtacaa

SEQ ID NO: 72421 - DNA, 20 bp, synthetic construct
  source 1..20: mol_type = other DNA
tgttggtagtaaatagtaca

SEQ ID NO: 72422 - DNA, 20 bp, synthetic construct
  source 1..20: mol_type = other DNA
ctgttggtagtaaatagtac

SEQ ID NO: 72423 - DNA, 20 bp, synthetic construct
  source 1..20: mol_type = other DNA
actgttggtagtaaatagta

SEQ ID NO: 72424 - DNA, 20 bp, synthetic construct
  source 1..20: mol_type = other DNA
cactgttggtagtaaatagt

SEQ ID NO: 72425 - DNA, 20 bp, synthetic construct
  source 1..20: mol_type = other DNA
acactgttggtagtaaatag

SEQ ID NO: 72426 - DNA, 20 bp, synthetic construct
  source 1..20: mol_type = other DNA
aacactgttggtagtaaata

SEQ ID NO: 72427 - DNA, 20 bp, synthetic construct
  source 1..20: mol_type = other DNA
aaacactgttggtagtaaat

SEQ ID NO: 72428 - DNA, 20 bp, synthetic construct
  source 1..20: mol_type = other DNA
aaaacactgttggtagtaaa

SEQ ID NO: 72429 - DNA, 20 bp, synthetic construct
  source 1..20: mol_type = other DNA
aaaaacactgttggtagtaa

SEQ ID NO: 72430 - DNA, 20 bp, synthetic construct
  source 1..20: mol_type = other DNA
aaaaaacactgttggtagta

SEQ ID NO: 72431 - DNA, 20 bp, synthetic construct
  source 1..20: mol_type = other DNA
aaaaaaacactgttggtagt

SEQ ID NO: 72432 - DNA, 20 bp, synthetic construct
  source 1..20: mol_type = other DNA
aaaaaaaacactgttggtag

SEQ ID NO: 72433 - DNA, 20 bp, synthetic construct
  source 1..20: mol_type = other DNA
aaaaaaaaacactgttggta

SEQ ID NO: 72434 - DNA, 20 bp, synthetic construct
  source 1..20: mol_type = other DNA
aaaaaaaaaacactgttggt

SEQ ID NO: 72435 - DNA, 20 bp, synthetic construct
  source 1..20: mol_type = other DNA
aaaaaaaaaaacactgttgg

SEQ ID NO: 72436 - DNA, 20 bp, synthetic construct
  source 1..20: mol_type = other DNA
aaaaaaaaaaaacactgttg

SEQ ID NO: 72437 - DNA, 20 bp, synthetic construct
  source 1..20: mol_type = other DNA
taaaaaaaaaaaacactgtt

SEQ ID NO: 72438 - DNA, 20 bp, synthetic construct
  source 1..20: mol_type = other DNA
ttaaaaaaaaaaaacactgt

SEQ ID NO: 72439 - DNA, 20 bp, synthetic construct
  source 1..20: mol_type = other DNA
tttaaaaaaaaaaaacactg

SEQ ID NO: 72440 - DNA, 20 bp, synthetic construct
  source 1..20: mol_type = other DNA
ttttaaaaaaaaaaaacact

SEQ ID NO: 72441 - DNA, 20 bp, synthetic construct
  source 1..20: mol_type = other DNA
attttaaaaaaaaaaaacac

SEQ ID NO: 72442 - DNA, 20 bp, synthetic construct
  source 1..20: mol_type = other DNA
gattttaaaaaaaaaaaaca

SEQ ID NO: 72443 - DNA, 20 bp, synthetic construct
  source 1..20: mol_type = other DNA
ggattttaaaaaaaaaaaac

SEQ ID NO: 72444 - DNA, 20 bp, synthetic construct
  source 1..20: mol_type = other DNA
tggattttaaaaaaaaaaaa

SEQ ID NO: 72445 - DNA, 20 bp, synthetic construct
  source 1..20: mol_type = other DNA
ctggattttaaaaaaaaaaa

SEQ ID NO: 72446 - DNA, 20 bp, synthetic construct
  source 1..20: mol_type = other DNA
tctggattttaaaaaaaaaa

SEQ ID NO: 72447 - DNA, 20 bp, synthetic construct
  source 1..20: mol_type = other DNA
gtctggattttaaaaaaaaa

SEQ ID NO: 72448 - DNA, 20 bp, synthetic construct
  source 1..20: mol_type = other DNA
agtctggattttaaaaaaaa

SEQ ID NO: 72449 - DNA, 20 bp, synthetic construct
  source 1..20: mol_type = other DNA
aagtctggattttaaaaaaa

SEQ ID NO: 72450 - DNA, 20 bp, synthetic construct
  source 1..20: mol_type = other DNA
caagtctggattttaaaaaa

SEQ ID NO: 72451 - DNA, 20 bp, synthetic construct
  source 1..20: mol_type = other DNA
gcaagtctggattttaaaaa

SEQ ID NO: 72452 - DNA, 20 bp, synthetic construct
  source 1..20: mol_type = other DNA
agcaagtctggattttaaaa

SEQ ID NO: 72453 - DNA, 20 bp, synthetic construct
  source 1..20: mol_type = other DNA
cagcaagtctggattttaaa

SEQ ID NO: 72454 - DNA, 20 bp, synthetic construct
  source 1..20: mol_type = other DNA
ccagcaagtctggattttaa

SEQ ID NO: 72455 - DNA, 20 bp, synthetic construct
  source 1..20: mol_type = other DNA
cccagcaagtctggatttta

SEQ ID NO: 72456 - DNA, 20 bp, synthetic construct
  source 1..20: mol_type = other DNA
gcccagcaagtctggatttt

SEQ ID NO: 72457 - DNA, 20 bp, synthetic construct
  source 1..20: mol_type = other DNA
tgcccagcaagtctggattt

SEQ ID NO: 72458 - DNA, 20 bp, synthetic construct
  source 1..20: mol_type = other DNA
atgcccagcaagtctggatt

SEQ ID NO: 72459 - DNA, 20 bp, synthetic construct
  source 1..20: mol_type = other DNA
tatgcccagcaagtctggat

SEQ ID NO: 72460 - DNA, 20 bp, synthetic construct
  source 1..20: mol_type = other DNA
ctatgcccagcaagtctgga

SEQ ID NO: 72461 - DNA, 20 bp, synthetic construct
  source 1..20: mol_type = other DNA
actatgcccagcaagtctgg

SEQ ID NO: 72462 - DNA, 20 bp, synthetic construct
  source 1..20: mol_type = other DNA
cactatgcccagcaagtctg

SEQ ID NO: 72463 - DNA, 20 bp, synthetic construct
  source 1..20: mol_type = other DNA
ccactatgcccagcaagtct

SEQ ID NO: 72464 - DNA, 20 bp, synthetic construct
  source 1..20: mol_type = other DNA
gccactatgcccagcaagtc

SEQ ID NO: 72465 - DNA, 20 bp, synthetic construct
  source 1..20: mol_type = other DNA
agccactatgcccagcaagt

SEQ ID NO: 72466 - DNA, 20 bp, synthetic construct
  source 1..20: mol_type = other DNA
gagccactatgcccagcaag

SEQ ID NO: 72467 - DNA, 20 bp, synthetic construct
  source 1..20: mol_type = other DNA
tgagccactatgcccagcaa

SEQ ID NO: 72468 - DNA, 20 bp, synthetic construct
  source 1..20: mol_type = other DNA
atgagccactatgcccagca

SEQ ID NO: 72469 - DNA, 20 bp, synthetic construct
  source 1..20: mol_type = other DNA
catgagccactatgcccagc

SEQ ID NO: 72470 - DNA, 20 bp, synthetic construct
  source 1..20: mol_type = other DNA
gcatgagccactatgcccag

SEQ ID NO: 72471 - DNA, 20 bp, synthetic construct
  source 1..20: mol_type = other DNA
ggcatgagccactatgccca

SEQ ID NO: 72472 - DNA, 20 bp, synthetic construct
  source 1..20: mol_type = other DNA
aggcatgagccactatgccc

SEQ ID NO: 72473 - DNA, 20 bp, synthetic construct
  source 1..20: mol_type = other DNA
caggcatgagccactatgcc

SEQ ID NO: 72474 - DNA, 20 bp, synthetic construct
  source 1..20: mol_type = other DNA
acaggcatgagccactatgc

SEQ ID NO: 72475 - DNA, 20 bp, synthetic construct
  source 1..20: mol_type = other DNA
tacaggcatgagccactatg

SEQ ID NO: 72476 - DNA, 20 bp, synthetic construct
  source 1..20: mol_type = other DNA
ttacaggcatgagccactat

SEQ ID NO: 72477 - DNA, 20 bp, synthetic construct
  source 1..20: mol_type = other DNA
attacaggcatgagccacta

SEQ ID NO: 72478 - DNA, 20 bp, synthetic construct
  source 1..20: mol_type = other DNA
gattacaggcatgagccact

SEQ ID NO: 72479 - DNA, 20 bp, synthetic construct
  source 1..20: mol_type = other DNA
agattacaggcatgagccac

SEQ ID NO: 72480 - DNA, 20 bp, synthetic construct
  source 1..20: mol_type = other DNA
gagattacaggcatgagcca

SEQ ID NO: 72481 - DNA, 20 bp, synthetic construct
  source 1..20: mol_type = other DNA
tgagattacaggcatgagcc

SEQ ID NO: 72482 - DNA, 20 bp, synthetic construct
  source 1..20: mol_type = other DNA
ctgagattacaggcatgagc

SEQ ID NO: 72483 - DNA, 20 bp, synthetic construct
  source 1..20: mol_type = other DNA
gctgagattacaggcatgag

SEQ ID NO: 72484 - DNA, 20 bp, synthetic construct
  source 1..20: mol_type = other DNA
cgctgagattacaggcatga

SEQ ID NO: 72485 - DNA, 20 bp, synthetic construct
  source 1..20: mol_type = other DNA
tcgctgagattacaggcatg

SEQ ID NO: 72486 - DNA, 20 bp, synthetic construct
  source 1..20: mol_type = other DNA
gtcgctgagattacaggcat

SEQ ID NO: 72487 - DNA, 20 bp, synthetic construct
  source 1..20: mol_type = other DNA
agtcgctgagattacaggca

SEQ ID NO: 72488 - DNA, 20 bp, synthetic construct
  source 1..20: mol_type = other DNA
aagtcgctgagattacaggc

SEQ ID NO: 72489 - DNA, 20 bp, synthetic construct
  source 1..20: mol_type = other DNA
caagtcgctgagattacagg

SEQ ID NO: 72490 - DNA, 20 bp, synthetic construct
  source 1..20: mol_type = other DNA
ccaagtcgctgagattacag

SEQ ID NO: 72491 - DNA, 20 bp, synthetic construct
  source 1..20: mol_type = other DNA
cccaagtcgctgagattaca

SEQ ID NO: 72492 - DNA, 20 bp, synthetic construct
  source 1..20: mol_type = other DNA
tcccaagtcgctgagattac

SEQ ID NO: 72493 - DNA, 20 bp, synthetic construct
  source 1..20: mol_type = other DNA
ctcccaagtcgctgagatta

SEQ ID NO: 72494 - DNA, 20 bp, synthetic construct
  source 1..20: mol_type = other DNA
cctcccaagtcgctgagatt

SEQ ID NO: 72495 - DNA, 20 bp, synthetic construct
  source 1..20: mol_type = other DNA
gcctcccaagtcgctgagat

SEQ ID NO: 72496 - DNA, 20 bp, synthetic construct
  source 1..20: mol_type = other DNA
agcctcccaagtcgctgaga

SEQ ID NO: 72497 - DNA, 20 bp, synthetic construct
  source 1..20: mol_type = other DNA
cagcctcccaagtcgctgag

SEQ ID NO: 72498 - DNA, 20 bp, synthetic construct
  source 1..20: mol_type = other DNA
tcagcctcccaagtcgctga

SEQ ID NO: 72499 - DNA, 20 bp, synthetic construct
  source 1..20: mol_type = other DNA
ctcagcctcccaagtcgctg

SEQ ID NO: 72500 - DNA, 20 bp, synthetic construct
  source 1..20: mol_type = other DNA
cctcagcctcccaagtcgct

SEQ ID NO: 72501 - DNA, 20 bp, synthetic construct
  source 1..20: mol_type = other DNA
acctcagcctcccaagtcgc

SEQ ID NO: 72502 - DNA, 20 bp, synthetic construct
  source 1..20: mol_type = other DNA
cacctcagcctcccaagtcg

SEQ ID NO: 72503 - DNA, 20 bp, synthetic construct
  source 1..20: mol_type = other DNA
ccacctcagcctcccaagtc

SEQ ID NO: 72504 - DNA, 20 bp, synthetic construct
  source 1..20: mol_type = other DNA
cccacctcagcctcccaagt

SEQ ID NO: 72505 - DNA, 20 bp, synthetic construct
  source 1..20: mol_type = other DNA
tcccacctcagcctcccaag

SEQ ID NO: 72506 - DNA, 20 bp, synthetic construct
  source 1..20: mol_type = other DNA
ctcccacctcagcctcccaa

SEQ ID NO: 72507 - DNA, 20 bp, synthetic construct
  source 1..20: mol_type = other DNA
cctcccacctcagcctccca

SEQ ID NO: 72508 - DNA, 20 bp, synthetic construct
  source 1..20: mol_type = other DNA
tcctcccacctcagcctccc

SEQ ID NO: 72509 - DNA, 20 bp, synthetic construct
  source 1..20: mol_type = other DNA
atcctcccacctcagcctcc

SEQ ID NO: 72510 - DNA, 20 bp, synthetic construct
  source 1..20: mol_type = other DNA
aatcctcccacctcagcctc

SEQ ID NO: 72511 - DNA, 20 bp, synthetic construct
  source 1..20: mol_type = other DNA
caatcctcccacctcagcct

SEQ ID NO: 72512 - DNA, 20 bp, synthetic construct
  source 1..20: mol_type = other DNA
gcaatcctcccacctcagcc

SEQ ID NO: 72513 - DNA, 20 bp, synthetic construct
  source 1..20: mol_type = other DNA
agcaatcctcccacctcagc

SEQ ID NO: 72514 - DNA, 20 bp, synthetic construct
  source 1..20: mol_type = other DNA
aagcaatcctcccacctcag

SEQ ID NO: 72515 - DNA, 20 bp, synthetic construct
  source 1..20: mol_type = other DNA
caagcaatcctcccacctca

SEQ ID NO: 72516 - DNA, 20 bp, synthetic construct
  source 1..20: mol_type = other DNA
tcaagcaatcctcccacctc

SEQ ID NO: 72517 - DNA, 20 bp, synthetic construct
  source 1..20: mol_type = other DNA
ctcaagcaatcctcccacct

SEQ ID NO: 72518 - DNA, 20 bp, synthetic construct
  source 1..20: mol_type = other DNA
gctcaagcaatcctcccacc

SEQ ID NO: 72519 - DNA, 20 bp, synthetic construct
  source 1..20: mol_type = other DNA
ggctcaagcaatcctcccac

SEQ ID NO: 72520 - DNA, 20 bp, synthetic construct
  source 1..20: mol_type = other DNA
gggctcaagcaatcctccca

SEQ ID NO: 72521 - DNA, 20 bp, synthetic construct
  source 1..20: mol_type = other DNA
tgggctcaagcaatcctccc

SEQ ID NO: 72522 - DNA, 20 bp, synthetic construct
  source 1..20: mol_type = other DNA
ctgggctcaagcaatcctcc

SEQ ID NO: 72523 - DNA, 20 bp, synthetic construct
  source 1..20: mol_type = other DNA
cctgggctcaagcaatcctc

SEQ ID NO: 72524 - DNA, 20 bp, synthetic construct
  source 1..20: mol_type = other DNA
ccctgggctcaagcaatcct

SEQ ID NO: 72525 - DNA, 20 bp, synthetic construct
  source 1..20: mol_type = other DNA
gccctgggctcaagcaatcc

SEQ ID NO: 72526 - DNA, 20 bp, synthetic construct
  source 1..20: mol_type = other DNA
agccctgggctcaagcaatc

SEQ ID NO: 72527 - DNA, 20 bp, synthetic construct
  source 1..20: mol_type = other DNA
cagccctgggctcaagcaat

SEQ ID NO: 72528 - DNA, 20 bp, synthetic construct
  source 1..20: mol_type = other DNA
gcagccctgggctcaagcaa

SEQ ID NO: 72529 - DNA, 20 bp, synthetic construct
  source 1..20: mol_type = other DNA
tgcagccctgggctcaagca

SEQ ID NO: 72530 - DNA, 20 bp, synthetic construct
  source 1..20: mol_type = other DNA
ctgcagccctgggctcaagc

SEQ ID NO: 72531 - DNA, 20 bp, synthetic construct
  source 1..20: mol_type = other DNA
actgcagccctgggctcaag

SEQ ID NO: 72532 - DNA, 20 bp, synthetic construct
  source 1..20: mol_type = other DNA
cactgcagccctgggctcaa

SEQ ID NO: 72533 - DNA, 20 bp, synthetic construct
  source 1..20: mol_type = other DNA
tcactgcagccctgggctca

SEQ ID NO: 72534 - DNA, 20 bp, synthetic construct
  source 1..20: mol_type = other DNA
atcactgcagccctgggctc

SEQ ID NO: 72535 - DNA, 20 bp, synthetic construct
  source 1..20: mol_type = other DNA
aatcactgcagccctgggct

SEQ ID NO: 72536 - DNA, 20 bp, synthetic construct
  source 1..20: mol_type = other DNA
caatcactgcagccctgggc

SEQ ID NO: 72537 - DNA, 20 bp, synthetic construct
  source 1..20: mol_type = other DNA
gcaatcactgcagccctggg

SEQ ID NO: 72538 - DNA, 20 bp, synthetic construct
  source 1..20: mol_type = other DNA
cgcaatcactgcagccctgg

SEQ ID NO: 72539 - DNA, 20 bp, synthetic construct
  source 1..20: mol_type = other DNA
ccgcaatcactgcagccctg

SEQ ID NO: 72540 - DNA, 20 bp, synthetic construct
  source 1..20: mol_type = other DNA
gccgcaatcactgcagccct

SEQ ID NO: 72541 - DNA, 20 bp, synthetic construct
  source 1..20: mol_type = other DNA
tgccgcaatcactgcagccc

SEQ ID NO: 72542 - DNA, 20 bp, synthetic construct
  source 1..20: mol_type = other DNA
gtgccgcaatcactgcagcc

SEQ ID NO: 72543 - DNA, 20 bp, synthetic construct
  source 1..20: mol_type = other DNA
agtgccgcaatcactgcagc

SEQ ID NO: 72544 - DNA, 20 bp, synthetic construct
  source 1..20: mol_type = other DNA
tagtgccgcaatcactgcag

SEQ ID NO: 72545 - DNA, 20 bp, synthetic construct
  source 1..20: mol_type = other DNA
gtagtgccgcaatcactgca

SEQ ID NO: 72546 - DNA, 20 bp, synthetic construct
  source 1..20: mol_type = other DNA
tgtagtgccgcaatcactgc

SEQ ID NO: 72547 - DNA, 20 bp, synthetic construct
  source 1..20: mol_type = other DNA
gtgtagtgccgcaatcactg

SEQ ID NO: 72548 - DNA, 20 bp, synthetic construct
  source 1..20: mol_type = other DNA
agtgtagtgccgcaatcact

SEQ ID NO: 72549 - DNA, 20 bp, synthetic construct
  source 1..20: mol_type = other DNA
gagtgtagtgccgcaatcac

SEQ ID NO: 72550 - DNA, 20 bp, synthetic construct
  source 1..20: mol_type = other DNA
ggagtgtagtgccgcaatca

SEQ ID NO: 72551 - DNA, 20 bp, synthetic construct
  source 1..20: mol_type = other DNA
tggagtgtagtgccgcaatc

SEQ ID NO: 72552 - DNA, 20 bp, synthetic construct
  source 1..20: mol_type = other DNA
ctggagtgtagtgccgcaat

SEQ ID NO: 72553 - DNA, 20 bp, synthetic construct
  source 1..20: mol_type = other DNA
gctggagtgtagtgccgcaa

SEQ ID NO: 72554 - DNA, 20 bp, synthetic construct
  source 1..20: mol_type = other DNA
tgctggagtgtagtgccgca

SEQ ID NO: 72555 - DNA, 20 bp, synthetic construct
  source 1..20: mol_type = other DNA
atgctggagtgtagtgccgc

SEQ ID NO: 72556 - DNA, 20 bp, synthetic construct
  source 1..20: mol_type = other DNA
catgctggagtgtagtgccg

SEQ ID NO: 72557 - DNA, 20 bp, synthetic construct
  source 1..20: mol_type = other DNA
tcatgctggagtgtagtgcc

SEQ ID NO: 72558 - DNA, 20 bp, synthetic construct
  source 1..20: mol_type = other DNA
ctcatgctggagtgtagtgc

SEQ ID NO: 72559 - DNA, 20 bp, synthetic construct
  source 1..20: mol_type = other DNA
actcatgctggagtgtagtg

SEQ ID NO: 72560 - DNA, 20 bp, synthetic construct
  source 1..20: mol_type = other DNA
cactcatgctggagtgtagt

SEQ ID NO: 72561 - DNA, 20 bp, synthetic construct
  source 1..20: mol_type = other DNA
tcactcatgctggagtgtag

SEQ ID NO: 72562 - DNA, 20 bp, synthetic construct
  source 1..20: mol_type = other DNA
gtcactcatgctggagtgta

SEQ ID NO: 72563 - DNA, 20 bp, synthetic construct
  source 1..20: mol_type = other DNA
tgtcactcatgctggagtgt

SEQ ID NO: 72564 - DNA, 20 bp, synthetic construct
  source 1..20: mol_type = other DNA
ttgtcactcatgctggagtg

SEQ ID NO: 72565 - DNA, 20 bp, synthetic construct
  source 1..20: mol_type = other DNA
tttgtcactcatgctggagt

SEQ ID NO: 72566 - DNA, 20 bp, synthetic construct
  source 1..20: mol_type = other DNA
ctttgtcactcatgctggag

SEQ ID NO: 72567 - DNA, 20 bp, synthetic construct
  source 1..20: mol_type = other DNA
tctttgtcactcatgctgga

SEQ ID NO: 72568 - DNA, 20 bp, synthetic construct
  source 1..20: mol_type = other DNA
gtctttgtcactcatgctgg

SEQ ID NO: 72569 - DNA, 20 bp, synthetic construct
  source 1..20: mol_type = other DNA
ggtctttgtcactcatgctg

SEQ ID NO: 72570 - DNA, 20 bp, synthetic construct
  source 1..20: mol_type = other DNA
gggtctttgtcactcatgct

SEQ ID NO: 72571 - DNA, 20 bp, synthetic construct
  source 1..20: mol_type = other DNA
ggggtctttgtcactcatgc

SEQ ID NO: 72572 - DNA, 20 bp, synthetic construct
  source 1..20: mol_type = other DNA
tggggtctttgtcactcatg

SEQ ID NO: 72573 - DNA, 20 bp, synthetic construct
  source 1..20: mol_type = other DNA
atggggtctttgtcactcat

SEQ ID NO: 72574 - DNA, 20 bp, synthetic construct
  source 1..20: mol_type = other DNA
gatggggtctttgtcactca

SEQ ID NO: 72575 - DNA, 20 bp, synthetic construct
  source 1..20: mol_type = other DNA
agatggggtctttgtcactc

SEQ ID NO: 72576 - DNA, 20 bp, synthetic construct
  source 1..20: mol_type = other DNA
gagatggggtctttgtcact

SEQ ID NO: 72577 - DNA, 20 bp, synthetic construct
  source 1..20: mol_type = other DNA
agagatggggtctttgtcac

SEQ ID NO: 72578 - DNA, 20 bp, synthetic construct
  source 1..20: mol_type = other DNA
cagagatggggtctttgtca

SEQ ID NO: 72579 - DNA, 20 bp, synthetic construct
  source 1..20: mol_type = other DNA
tcagagatggggtctttgtc

SEQ ID NO: 72580 - DNA, 20 bp, synthetic construct
  source 1..20: mol_type = other DNA
ttcagagatggggtctttgt

SEQ ID NO: 72581 - DNA, 20 bp, synthetic construct
  source 1..20: mol_type = other DNA
tttcagagatggggtctttg

SEQ ID NO: 72582 - DNA, 20 bp, synthetic construct
  source 1..20: mol_type = other DNA
ttttcagagatggggtcttt

SEQ ID NO: 72583 - DNA, 20 bp, synthetic construct
  source 1..20: mol_type = other DNA
tttttcagagatggggtctt

SEQ ID NO: 72584 - DNA, 20 bp, synthetic construct
  source 1..20: mol_type = other DNA
ttttttcagagatggggtct

SEQ ID NO: 72585 - DNA, 20 bp, synthetic construct
  source 1..20: mol_type = other DNA
gttttttcagagatggggtc

SEQ ID NO: 72586 - DNA, 20 bp, synthetic construct
  source 1..20: mol_type = other DNA
tgttttttcagagatggggt

SEQ ID NO: 72587 - DNA, 20 bp, synthetic construct
  source 1..20: mol_type = other DNA
ttgttttttcagagatgggg

SEQ ID NO: 72588 - DNA, 20 bp, synthetic construct
  source 1..20: mol_type = other DNA
tttgttttttcagagatggg

SEQ ID NO: 72589 - DNA, 20 bp, synthetic construct
  source 1..20: mol_type = other DNA
ttttgttttttcagagatgg

SEQ ID NO: 72590 - DNA, 20 bp, synthetic construct
  source 1..20: mol_type = other DNA
tttttgttttttcagagatg

SEQ ID NO: 72591 - DNA, 20 bp, synthetic construct
  source 1..20: mol_type = other DNA
gtttttgttttttcagagat

SEQ ID NO: 72592 - DNA, 20 bp, synthetic construct
  source 1..20: mol_type = other DNA
tgtttttgttttttcagaga

SEQ ID NO: 72593 - DNA, 20 bp, synthetic construct
  source 1..20: mol_type = other DNA
ttgtttttgttttttcagag

SEQ ID NO: 72594 - DNA, 20 bp, synthetic construct
  source 1..20: mol_type = other DNA
tttgtttttgttttttcaga

SEQ ID NO: 72595 - DNA, 20 bp, synthetic construct
  source 1..20: mol_type = other DNA
ttttgtttttgttttttcag

SEQ ID NO: 72596 - DNA, 20 bp, synthetic construct
  source 1..20: mol_type = other DNA
tttttgtttttgttttttca

SEQ ID NO: 72597 - DNA, 20 bp, synthetic construct
  source 1..20: mol_type = other DNA
gtttttgtttttgttttttc

SEQ ID NO: 72598 - DNA, 20 bp, synthetic construct
  source 1..20: mol_type = other DNA
tgtttttgtttttgtttttt

SEQ ID NO: 72599 - DNA, 20 bp, synthetic construct
  source 1..20: mol_type = other DNA
ttgtttttgtttttgttttt

SEQ ID NO: 72600 - DNA, 20 bp, synthetic construct
  source 1..20: mol_type = other DNA
tttgtttttgtttttgtttt

SEQ ID NO: 72601 - DNA, 20 bp, synthetic construct
  source 1..20: mol_type = other DNA
atttgtttttgtttttgttt

SEQ ID NO: 72602 - DNA, 20 bp, synthetic construct
  source 1..20: mol_type = other DNA
aatttgtttttgtttttgtt

SEQ ID NO: 72603 - DNA, 20 bp, synthetic construct
  source 1..20: mol_type = other DNA
aaatttgtttttgtttttgt

SEQ ID NO: 72604 - DNA, 20 bp, synthetic construct
  source 1..20: mol_type = other DNA
aaaatttgtttttgtttttg

SEQ ID NO: 72605 - DNA, 20 bp, synthetic construct
  source 1..20: mol_type = other DNA
aaaaatttgtttttgttttt

SEQ ID NO: 72606 - DNA, 20 bp, synthetic construct
  source 1..20: mol_type = other DNA
aaaaaatttgtttttgtttt

SEQ ID NO: 72607 - DNA, 20 bp, synthetic construct
  source 1..20: mol_type = other DNA
aaaaaaatttgtttttgttt

SEQ ID NO: 72608 - DNA, 20 bp, synthetic construct
  source 1..20: mol_type = other DNA
aaaaaaaatttgtttttgtt

SEQ ID NO: 72609 - DNA, 20 bp, synthetic construct
  source 1..20: mol_type = other DNA
taaaaaaaatttgtttttgt

SEQ ID NO: 72610 - DNA, 20 bp, synthetic construct
  source 1..20: mol_type = other DNA
ttaaaaaaaatttgtttttg

SEQ ID NO: 72611 - DNA, 20 bp, synthetic construct
  source 1..20: mol_type = other DNA
tttaaaaaaaatttgttttt

SEQ ID NO: 72612 - DNA, 20 bp, synthetic construct
  source 1..20: mol_type = other DNA
ctttaaaaaaaatttgtttt

SEQ ID NO: 72613 - DNA, 20 bp, synthetic construct
  source 1..20: mol_type = other DNA
tctttaaaaaaaatttgttt

SEQ ID NO: 72614 - DNA, 20 bp, synthetic construct
  source 1..20: mol_type = other DNA
ttctttaaaaaaaatttgtt

SEQ ID NO: 72615 - DNA, 20 bp, synthetic construct
  source 1..20: mol_type = other DNA
tttctttaaaaaaaatttgt

SEQ ID NO: 72616 - DNA, 20 bp, synthetic construct
  source 1..20: mol_type = other DNA
gtttctttaaaaaaaatttg

SEQ ID NO: 72617 - DNA, 20 bp, synthetic construct
  source 1..20: mol_type = other DNA
tgtttctttaaaaaaaattt

SEQ ID NO: 72618 - DNA, 20 bp, synthetic construct
  source 1..20: mol_type = other DNA
ctgtttctttaaaaaaaatt

SEQ ID NO: 72619 - DNA, 20 bp, synthetic construct
  source 1..20: mol_type = other DNA
tctgtttctttaaaaaaaat

SEQ ID NO: 72620 - DNA, 20 bp, synthetic construct
  source 1..20: mol_type = other DNA
ttctgtttctttaaaaaaaa

SEQ ID NO: 72621 - DNA, 20 bp, synthetic construct
  source 1..20: mol_type = other DNA
tttctgtttctttaaaaaaa

SEQ ID NO: 72622 - DNA, 20 bp, synthetic construct
  source 1..20: mol_type = other DNA
gtttctgtttctttaaaaaa

SEQ ID NO: 72623 - DNA, 20 bp, synthetic construct
  source 1..20: mol_type = other DNA
tgtttctgtttctttaaaaa

SEQ ID NO: 72624 - DNA, 20 bp, synthetic construct
  source 1..20: mol_type = other DNA
ttgtttctgtttctttaaaa

SEQ ID NO: 72625 - DNA, 20 bp, synthetic construct
  source 1..20: mol_type = other DNA
tttgtttctgtttctttaaa

SEQ ID NO: 72626 - DNA, 20 bp, synthetic construct
  source 1..20: mol_type = other DNA
ttttgtttctgtttctttaa

SEQ ID NO: 72627 - DNA, 20 bp, synthetic construct
  source 1..20: mol_type = other DNA
tttttgtttctgtttcttta

SEQ ID NO: 72628 - DNA, 20 bp, synthetic construct
  source 1..20: mol_type = other DNA
atttttgtttctgtttcttt

SEQ ID NO: 72629 - DNA, 20 bp, synthetic construct
  source 1..20: mol_type = other DNA
gatttttgtttctgtttctt

SEQ ID NO: 72630 - DNA, 20 bp, synthetic construct
  source 1..20: mol_type = other DNA
ggatttttgtttctgtttct

SEQ ID NO: 72631 - DNA, 20 bp, synthetic construct
  source 1..20: mol_type = other DNA
tggatttttgtttctgtttc

SEQ ID NO: 72632 - DNA, 20 bp, synthetic construct
  source 1..20: mol_type = other DNA
ttggatttttgtttctgttt

SEQ ID NO: 72633 - DNA, 20 bp, synthetic construct
  source 1..20: mol_type = other DNA
tttggatttttgtttctgtt

SEQ ID NO: 72634 - DNA, 20 bp, synthetic construct
  source 1..20: mol_type = other DNA
gtttggatttttgtttctgt

SEQ ID NO: 72635 - DNA, 20 bp, synthetic construct
  source 1..20: mol_type = other DNA
agtttggatttttgtttctg

SEQ ID NO: 72636 - DNA, 20 bp, synthetic construct
  source 1..20: mol_type = other DNA
aagtttggatttttgtttct

SEQ ID NO: 72637 - DNA, 20 bp, synthetic construct
  source 1..20: mol_type = other DNA
caagtttggatttttgtttc

SEQ ID NO: 72638 - DNA, 20 bp, synthetic construct
  source 1..20: mol_type = other DNA
acaagtttggatttttgttt

SEQ ID NO: 72639 - DNA, 20 bp, synthetic construct
  source 1..20: mol_type = other DNA
tacaagtttggatttttgtt

SEQ ID NO: 72640 - DNA, 20 bp, synthetic construct
  source 1..20: mol_type = other DNA
ttacaagtttggatttttgt

SEQ ID NO: 72641 - DNA, 20 bp, synthetic construct
  source 1..20: mol_type = other DNA
gttacaagtttggatttttg

SEQ ID NO: 72642 - DNA, 20 bp, synthetic construct
  source 1..20: mol_type = other DNA
ggttacaagtttggattttt

SEQ ID NO: 72643 - DNA, 20 bp, synthetic construct
  source 1..20: mol_type = other DNA
tggttacaagtttggatttt

SEQ ID NO: 72644 - DNA, 20 bp, synthetic construct
  source 1..20: mol_type = other DNA
gtggttacaagtttggattt

SEQ ID NO: 72645 - DNA, 20 bp, synthetic construct
  source 1..20: mol_type = other DNA
agtggttacaagtttggatt

SEQ ID NO: 72646 - DNA, 20 bp, synthetic construct
  source 1..20: mol_type = other DNA
cagtggttacaagtttggat

SEQ ID NO: 72647 - DNA, 20 bp, synthetic construct
  source 1..20: mol_type = other DNA
acagtggttacaagtttgga

SEQ ID NO: 72648 - DNA, 20 bp, synthetic construct
  source 1..20: mol_type = other DNA
tacagtggttacaagtttgg

SEQ ID NO: 72649 - DNA, 20 bp, synthetic construct
  source 1..20: mol_type = other DNA
ttacagtggttacaagtttg

SEQ ID NO: 72650 - DNA, 20 bp, synthetic construct
  source 1..20: mol_type = other DNA
tttacagtggttacaagttt

SEQ ID NO: 72651 - DNA, 20 bp, synthetic construct
  source 1..20: mol_type = other DNA
ttttacagtggttacaagtt

SEQ ID NO: 72652 - DNA, 20 bp, synthetic construct
  source 1..20: mol_type = other DNA
gttttacagtggttacaagt

SEQ ID NO: 72653 - DNA, 20 bp, synthetic construct
  source 1..20: mol_type = other DNA
tgttttacagtggttacaag

SEQ ID NO: 72654 - DNA, 20 bp, synthetic construct
  source 1..20: mol_type = other DNA
ttgttttacagtggttacaa

SEQ ID NO: 72655 - DNA, 20 bp, synthetic construct
  source 1..20: mol_type = other DNA
tttgttttacagtggttaca

SEQ ID NO: 72656 - DNA, 20 bp, synthetic construct
  source 1..20: mol_type = other DNA
atttgttttacagtggttac

SEQ ID NO: 72657 - DNA, 20 bp, synthetic construct
  source 1..20: mol_type = other DNA
gatttgttttacagtggtta

SEQ ID NO: 72658 - DNA, 20 bp, synthetic construct
  source 1..20: mol_type = other DNA
tgatttgttttacagtggtt

SEQ ID NO: 72659 - DNA, 20 bp, synthetic construct
  source 1..20: mol_type = other DNA
ctgatttgttttacagtggt

SEQ ID NO: 72660 - DNA, 20 bp, synthetic construct
  source 1..20: mol_type = other DNA
tctgatttgttttacagtgg

SEQ ID NO: 72661 - DNA, 20 bp, synthetic construct
  source 1..20: mol_type = other DNA
ttctgatttgttttacagtg

SEQ ID NO: 72662 - DNA, 20 bp, synthetic construct
  source 1..20: mol_type = other DNA
attctgatttgttttacagt

SEQ ID NO: 72663 - DNA, 20 bp, synthetic construct
  source 1..20: mol_type = other DNA
aattctgatttgttttacag

SEQ ID NO: 72664 - DNA, 20 bp, synthetic construct
  source 1..20: mol_type = other DNA
aaattctgatttgttttaca

SEQ ID NO: 72665 - DNA, 20 bp, synthetic construct
  source 1..20: mol_type = other DNA
taaattctgatttgttttac

SEQ ID NO: 72666 - DNA, 20 bp, synthetic construct
  source 1..20: mol_type = other DNA
gtaaattctgatttgtttta

SEQ ID NO: 72667 - DNA, 20 bp, synthetic construct
  source 1..20: mol_type = other DNA
cgtaaattctgatttgtttt

SEQ ID NO: 72668 - DNA, 20 bp, synthetic construct
  source 1..20: mol_type = other DNA
tcgtaaattctgatttgttt

SEQ ID NO: 72669 - DNA, 20 bp, synthetic construct
  source 1..20: mol_type = other DNA
atcgtaaattctgatttgtt

SEQ ID NO: 72670 - DNA, 20 bp, synthetic construct
  source 1..20: mol_type = other DNA
tatcgtaaattctgatttgt

SEQ ID NO: 72671 - DNA, 20 bp, synthetic construct
  source 1..20: mol_type = other DNA
ctatcgtaaattctgatttg

SEQ ID NO: 72672 - DNA, 20 bp, synthetic construct
  source 1..20: mol_type = other DNA
actatcgtaaattctgattt

SEQ ID NO: 72673 - DNA, 20 bp, synthetic construct
  source 1..20: mol_type = other DNA
cactatcgtaaattctgatt

SEQ ID NO: 72674 - DNA, 20 bp, synthetic construct
  source 1..20: mol_type = other DNA
ccactatcgtaaattctgat

SEQ ID NO: 72675 - DNA, 20 bp, synthetic construct
  source 1..20: mol_type = other DNA
tccactatcgtaaattctga

SEQ ID NO: 72676 - DNA, 20 bp, synthetic construct
  source 1..20: mol_type = other DNA
atccactatcgtaaattctg

SEQ ID NO: 72677 - DNA, 20 bp, synthetic construct
  source 1..20: mol_type = other DNA
tatccactatcgtaaattct

SEQ ID NO: 72678 - DNA, 20 bp, synthetic construct
  source 1..20: mol_type = other DNA
atatccactatcgtaaattc

SEQ ID NO: 72679 - DNA, 20 bp, synthetic construct
  source 1..20: mol_type = other DNA
aatatccactatcgtaaatt

SEQ ID NO: 72680 - DNA, 20 bp, synthetic construct
  source 1..20: mol_type = other DNA
taatatccactatcgtaaat

SEQ ID NO: 72681 - DNA, 20 bp, synthetic construct
  source 1..20: mol_type = other DNA
ataatatccactatcgtaaa

SEQ ID NO: 72682 - DNA, 20 bp, synthetic construct
  source 1..20: mol_type = other DNA
aataatatccactatcgtaa

SEQ ID NO: 72683 - DNA, 20 bp, synthetic construct
  source 1..20: mol_type = other DNA
taataatatccactatcgta

SEQ ID NO: 72684 - DNA, 20 bp, synthetic construct
  source 1..20: mol_type = other DNA
ttaataatatccactatcgt

SEQ ID NO: 72685 - DNA, 20 bp, synthetic construct
  source 1..20: mol_type = other DNA
attaataatatccactatcg

SEQ ID NO: 72686 - DNA, 20 bp, synthetic construct
  source 1..20: mol_type = other DNA
tattaataatatccactatc

SEQ ID NO: 72687 - DNA, 20 bp, synthetic construct
  source 1..20: mol_type = other DNA
ctattaataatatccactat

SEQ ID NO: 72688 - DNA, 20 bp, synthetic construct
  source 1..20: mol_type = other DNA
actattaataatatccacta

SEQ ID NO: 72689 - DNA, 20 bp, synthetic construct
  source 1..20: mol_type = other DNA
cactattaataatatccact

SEQ ID NO: 72690 - DNA, 20 bp, synthetic construct
  source 1..20: mol_type = other DNA
gcactattaataatatccac

SEQ ID NO: 72691 - DNA, 20 bp, synthetic construct
  source 1..20: mol_type = other DNA
tgcactattaataatatcca

SEQ ID NO: 72692 - DNA, 20 bp, synthetic construct
  source 1..20: mol_type = other DNA
ctgcactattaataatatcc

SEQ ID NO: 72693 - DNA, 20 bp, synthetic construct
  source 1..20: mol_type = other DNA
tctgcactattaataatatc

SEQ ID NO: 72694 - DNA, 20 bp, synthetic construct
  source 1..20: mol_type = other DNA
ttctgcactattaataatat

SEQ ID NO: 72695 - DNA, 20 bp, synthetic construct
  source 1..20: mol_type = other DNA
attctgcactattaataata

SEQ ID NO: 72696 - DNA, 20 bp, synthetic construct
  source 1..20: mol_type = other DNA
cattctgcactattaataat

SEQ ID NO: 72697 - DNA, 20 bp, synthetic construct
  source 1..20: mol_type = other DNA
ccattctgcactattaataa

SEQ ID NO: 72698 - DNA, 20 bp, synthetic construct
  source 1..20: mol_type = other DNA
tccattctgcactattaata

SEQ ID NO: 72699 - DNA, 20 bp, synthetic construct
  source 1..20: mol_type = other DNA
atccattctgcactattaat

SEQ ID NO: 72700 - DNA, 20 bp, synthetic construct
  source 1..20: mol_type = other DNA
tatccattctgcactattaa

SEQ ID NO: 72701 - DNA, 20 bp, synthetic construct
  source 1..20: mol_type = other DNA
gtatccattctgcactatta

SEQ ID NO: 72702 - DNA, 20 bp, synthetic construct
  source 1..20: mol_type = other DNA
ggtatccattctgcactatt

SEQ ID NO: 72703 - DNA, 20 bp, synthetic construct
  source 1..20: mol_type = other DNA
gggtatccattctgcactat

SEQ ID NO: 72704 - DNA, 20 bp, synthetic construct
  source 1..20: mol_type = other DNA
tgggtatccattctgcacta

SEQ ID NO: 72705 - DNA, 20 bp, synthetic construct
  source 1..20: mol_type = other DNA
ctgggtatccattctgcact

SEQ ID NO: 72706 - DNA, 20 bp, synthetic construct
  source 1..20: mol_type = other DNA
tctgggtatccattctgcac

SEQ ID NO: 72707 - DNA, 20 bp, synthetic construct
  source 1..20: mol_type = other DNA
atctgggtatccattctgca

SEQ ID NO: 72708 - DNA, 20 bp, synthetic construct
  source 1..20: mol_type = other DNA
gatctgggtatccattctgc

SEQ ID NO: 72709 - DNA, 20 bp, synthetic construct
  source 1..20: mol_type = other DNA
agatctgggtatccattctg

SEQ ID NO: 72710 - DNA, 20 bp, synthetic construct
  source 1..20: mol_type = other DNA
aagatctgggtatccattct

SEQ ID NO: 72711 - DNA, 20 bp, synthetic construct
  source 1..20: mol_type = other DNA
caagatctgggtatccattc

SEQ ID NO: 72712 - DNA, 20 bp, synthetic construct
  source 1..20: mol_type = other DNA
gcaagatctgggtatccatt

SEQ ID NO: 72713 - DNA, 20 bp, synthetic construct
  source 1..20: mol_type = other DNA
agcaagatctgggtatccat

SEQ ID NO: 72714 - DNA, 20 bp, synthetic construct
  source 1..20: mol_type = other DNA
aagcaagatctgggtatcca

SEQ ID NO: 72715 - DNA, 20 bp, synthetic construct
  source 1..20: mol_type = other DNA
gaagcaagatctgggtatcc

SEQ ID NO: 72716 - DNA, 20 bp, synthetic construct
  source 1..20: mol_type = other DNA
ggaagcaagatctgggtatc

SEQ ID NO: 72717 - DNA, 20 bp, synthetic construct
  source 1..20: mol_type = other DNA
aggaagcaagatctgggtat

SEQ ID NO: 72718 - DNA, 20 bp, synthetic construct
  source 1..20: mol_type = other DNA
aaggaagcaagatctgggta

SEQ ID NO: 72719 - DNA, 20 bp, synthetic construct
  source 1..20: mol_type = other DNA
aaaggaagcaagatctgggt

SEQ ID NO: 72720 - DNA, 20 bp, synthetic construct
  source 1..20: mol_type = other DNA
gaaaggaagcaagatctggg

SEQ ID NO: 72721 - DNA, 20 bp, synthetic construct
  source 1..20: mol_type = other DNA
agaaaggaagcaagatctgg

SEQ ID NO: 72722 - DNA, 20 bp, synthetic construct
  source 1..20: mol_type = other DNA
tagaaaggaagcaagatctg

SEQ ID NO: 72723 - DNA, 20 bp, synthetic construct
  source 1..20: mol_type = other DNA
ctagaaaggaagcaagatct

SEQ ID NO: 72724 - DNA, 20 bp, synthetic construct
  source 1..20: mol_type = other DNA
gctagaaaggaagcaagatc

SEQ ID NO: 72725 - DNA, 20 bp, synthetic construct
  source 1..20: mol_type = other DNA
agctagaaaggaagcaagat

SEQ ID NO: 72726 - DNA, 20 bp, synthetic construct
  source 1..20: mol_type = other DNA
tagctagaaaggaagcaaga

SEQ ID NO: 72727 - DNA, 20 bp, synthetic construct
  source 1..20: mol_type = other DNA
ttagctagaaaggaagcaag

SEQ ID NO: 72728 - DNA, 20 bp, synthetic construct
  source 1..20: mol_type = other DNA
attagctagaaaggaagcaa

SEQ ID NO: 72729 - DNA, 20 bp, synthetic construct
  source 1..20: mol_type = other DNA
cattagctagaaaggaagca

SEQ ID NO: 72730 - DNA, 20 bp, synthetic construct
  source 1..20: mol_type = other DNA
tcattagctagaaaggaagc

SEQ ID NO: 72731 - DNA, 20 bp, synthetic construct
  source 1..20: mol_type = other DNA
atcattagctagaaaggaag

SEQ ID NO: 72732 - DNA, 20 bp, synthetic construct
  source 1..20: mol_type = other DNA
catcattagctagaaaggaa

SEQ ID NO: 72733 - DNA, 20 bp, synthetic construct
  source 1..20: mol_type = other DNA
gcatcattagctagaaagga

SEQ ID NO: 72734 - DNA, 20 bp, synthetic construct
  source 1..20: mol_type = other DNA
tgcatcattagctagaaagg

SEQ ID NO: 72735 - DNA, 20 bp, synthetic construct
  source 1..20: mol_type = other DNA
ttgcatcattagctagaaag

SEQ ID NO: 72736 - DNA, 20 bp, synthetic construct
  source 1..20: mol_type = other DNA
attgcatcattagctagaaa

SEQ ID NO: 72737 - DNA, 20 bp, synthetic construct
  source 1..20: mol_type = other DNA
cattgcatcattagctagaa

SEQ ID NO: 72738 - DNA, 20 bp, synthetic construct
  source 1..20: mol_type = other DNA
acattgcatcattagctaga

SEQ ID NO: 72739 - DNA, 20 bp, synthetic construct
  source 1..20: mol_type = other DNA
aacattgcatcattagctag

SEQ ID NO: 72740 - DNA, 20 bp, synthetic construct
  source 1..20: mol_type = other DNA
caacattgcatcattagcta

SEQ ID NO: 72741 - DNA, 20 bp, synthetic construct
  source 1..20: mol_type = other DNA
ccaacattgcatcattagct

SEQ ID NO: 72742 - DNA, 20 bp, synthetic construct
  source 1..20: mol_type = other DNA
gccaacattgcatcattagc

SEQ ID NO: 72743 - DNA, 20 bp, synthetic construct
  source 1..20: mol_type = other DNA
ggccaacattgcatcattag

SEQ ID NO: 72744 - DNA, 20 bp, synthetic construct
  source 1..20: mol_type = other DNA
aggccaacattgcatcatta

SEQ ID NO: 72745 - DNA, 20 bp, synthetic construct
  source 1..20: mol_type = other DNA
caggccaacattgcatcatt

SEQ ID NO: 72746 - DNA, 20 bp, synthetic construct
  source 1..20: mol_type = other DNA
tcaggccaacattgcatcat

SEQ ID NO: 72747 - DNA, 20 bp, synthetic construct
  source 1..20: mol_type = other DNA
ttcaggccaacattgcatca

SEQ ID NO: 72748 - DNA, 20 bp, synthetic construct
  source 1..20: mol_type = other DNA
tttcaggccaacattgcatc

SEQ ID NO: 72749 - DNA, 20 bp, synthetic construct
  source 1..20: mol_type = other DNA
atttcaggccaacattgcat

SEQ ID NO: 72750 - DNA, 20 bp, synthetic construct
  source 1..20: mol_type = other DNA
catttcaggccaacattgca

SEQ ID NO: 72751 - DNA, 20 bp, synthetic construct
  source 1..20: mol_type = other DNA
gcatttcaggccaacattgc

SEQ ID NO: 72752 - DNA, 20 bp, synthetic construct
  source 1..20: mol_type = other DNA
tgcatttcaggccaacattg

SEQ ID NO: 72753 - DNA, 20 bp, synthetic construct
  source 1..20: mol_type = other DNA
atgcatttcaggccaacatt

SEQ ID NO: 72754 - DNA, 20 bp, synthetic construct
  source 1..20: mol_type = other DNA
aatgcatttcaggccaacat

SEQ ID NO: 72755 - DNA, 20 bp, synthetic construct
  source 1..20: mol_type = other DNA
taatgcatttcaggccaaca

SEQ ID NO: 72756 - DNA, 20 bp, synthetic construct
  source 1..20: mol_type = other DNA
gtaatgcatttcaggccaac

SEQ ID NO: 72757 - DNA, 20 bp, synthetic construct
  source 1..20: mol_type = other DNA
agtaatgcatttcaggccaa

SEQ ID NO: 72758 - DNA, 20 bp, synthetic construct
  source 1..20: mol_type = other DNA
aagtaatgcatttcaggcca

SEQ ID NO: 72759 - DNA, 20 bp, synthetic construct
  source 1..20: mol_type = other DNA
taagtaatgcatttcaggcc

SEQ ID NO: 72760 - DNA, 20 bp, synthetic construct
  source 1..20: mol_type = other DNA
ataagtaatgcatttcaggc

SEQ ID NO: 72761 - DNA, 20 bp, synthetic construct
  source 1..20: mol_type = other DNA
tataagtaatgcatttcagg

SEQ ID NO: 72762 - DNA, 20 bp, synthetic construct
  source 1..20: mol_type = other DNA
ctataagtaatgcatttcag

SEQ ID NO: 72763 - DNA, 20 bp, synthetic construct
  source 1..20: mol_type = other DNA
gctataagtaatgcatttca

SEQ ID NO: 72764 - DNA, 20 bp, synthetic construct
  source 1..20: mol_type = other DNA
ggctataagtaatgcatttc

SEQ ID NO: 72765 - DNA, 20 bp, synthetic construct
  source 1..20: mol_type = other DNA
tggctataagtaatgcattt

SEQ ID NO: 72766 - DNA, 20 bp, synthetic construct
  source 1..20: mol_type = other DNA
ctggctataagtaatgcatt

SEQ ID NO: 72767 - DNA, 20 bp, synthetic construct
  source 1..20: mol_type = other DNA
cctggctataagtaatgcat

SEQ ID NO: 72768 - DNA, 20 bp, synthetic construct
  source 1..20: mol_type = other DNA
ccctggctataagtaatgca

SEQ ID NO: 72769 - DNA, 20 bp, synthetic construct
  source 1..20: mol_type = other DNA
tccctggctataagtaatgc

SEQ ID NO: 72770 - DNA, 20 bp, synthetic construct
  source 1..20: mol_type = other DNA
atccctggctataagtaatg

SEQ ID NO: 72771 - DNA, 20 bp, synthetic construct
  source 1..20: mol_type = other DNA
aatccctggctataagtaat

SEQ ID NO: 72772 - DNA, 20 bp, synthetic construct
  source 1..20: mol_type = other DNA
aaatccctggctataagtaa

SEQ ID NO: 72773 - DNA, 20 bp, synthetic construct
  source 1..20: mol_type = other DNA
aaaatccctggctataagta

SEQ ID NO: 72774 - DNA, 20 bp, synthetic construct
  source 1..20: mol_type = other DNA
gaaaatccctggctataagt

SEQ ID NO: 72775 - DNA, 20 bp, synthetic construct
  source 1..20: mol_type = other DNA
agaaaatccctggctataag

SEQ ID NO: 72776 - DNA, 20 bp, synthetic construct
  source 1..20: mol_type = other DNA
gagaaaatccctggctataa

SEQ ID NO: 72777 - DNA, 20 bp, synthetic construct
  source 1..20: mol_type = other DNA
tgagaaaatccctggctata

SEQ ID NO: 72778 - DNA, 20 bp, synthetic construct
  source 1..20: mol_type = other DNA
ctgagaaaatccctggctat

SEQ ID NO: 72779 - DNA, 20 bp, synthetic construct
  source 1..20: mol_type = other DNA
gctgagaaaatccctggcta

SEQ ID NO: 72780 - DNA, 20 bp, synthetic construct
  source 1..20: mol_type = other DNA
tgctgagaaaatccctggct

SEQ ID NO: 72781 - DNA, 20 bp, synthetic construct
  source 1..20: mol_type = other DNA
atgctgagaaaatccctggc

SEQ ID NO: 72782 - DNA, 20 bp, synthetic construct
  source 1..20: mol_type = other DNA
gatgctgagaaaatccctgg

SEQ ID NO: 72783 - DNA, 20 bp, synthetic construct
  source 1..20: mol_type = other DNA
ggatgctgagaaaatccctg

SEQ ID NO: 72784 - DNA, 20 bp, synthetic construct
  source 1..20: mol_type = other DNA
aggatgctgagaaaatccct

SEQ ID NO: 72785 - DNA, 20 bp, synthetic construct
  source 1..20: mol_type = other DNA
caggatgctgagaaaatccc

SEQ ID NO: 72786 - DNA, 20 bp, synthetic construct
  source 1..20: mol_type = other DNA
tcaggatgctgagaaaatcc

SEQ ID NO: 72787 - DNA, 20 bp, synthetic construct
  source 1..20: mol_type = other DNA
atcaggatgctgagaaaatc

SEQ ID NO: 72788 - DNA, 20 bp, synthetic construct
  source 1..20: mol_type = other DNA
catcaggatgctgagaaaat

SEQ ID NO: 72789 - DNA, 20 bp, synthetic construct
  source 1..20: mol_type = other DNA
tcatcaggatgctgagaaaa

SEQ ID NO: 72790 - DNA, 20 bp, synthetic construct
  source 1..20: mol_type = other DNA
atcatcaggatgctgagaaa

SEQ ID NO: 72791 - DNA, 20 bp, synthetic construct
  source 1..20: mol_type = other DNA
tatcatcaggatgctgagaa

SEQ ID NO: 72792 - DNA, 20 bp, synthetic construct
  source 1..20: mol_type = other DNA
atatcatcaggatgctgaga

SEQ ID NO: 72793 - DNA, 20 bp, synthetic construct
  source 1..20: mol_type = other DNA
tatatcatcaggatgctgag

SEQ ID NO: 72794 - DNA, 20 bp, synthetic construct
  source 1..20: mol_type = other DNA
ctatatcatcaggatgctga

SEQ ID NO: 72795 - DNA, 20 bp, synthetic construct
  source 1..20: mol_type = other DNA
gctatatcatcaggatgctg

SEQ ID NO: 72796 - DNA, 20 bp, synthetic construct
  source 1..20: mol_type = other DNA
ggctatatcatcaggatgct

SEQ ID NO: 72797 - DNA, 20 bp, synthetic construct
  source 1..20: mol_type = other DNA
aggctatatcatcaggatgc

SEQ ID NO: 72798 - DNA, 20 bp, synthetic construct
  source 1..20: mol_type = other DNA
gaggctatatcatcaggatg

SEQ ID NO: 72799 - DNA, 20 bp, synthetic construct
  source 1..20: mol_type = other DNA
tgaggctatatcatcaggat

SEQ ID NO: 72800 - DNA, 20 bp, synthetic construct
  source 1..20: mol_type = other DNA
atgaggctatatcatcagga

SEQ ID NO: 72801 - DNA, 20 bp, synthetic construct
  source 1..20: mol_type = other DNA
aatgaggctatatcatcagg

SEQ ID NO: 72802 - DNA, 20 bp, synthetic construct
  source 1..20: mol_type = other DNA
aaatgaggctatatcatcag

SEQ ID NO: 72803 - DNA, 20 bp, synthetic construct
  source 1..20: mol_type = other DNA
gaaatgaggctatatcatca

SEQ ID NO: 72804 - DNA, 20 bp, synthetic construct
  source 1..20: mol_type = other DNA
cgaaatgaggctatatcatc

SEQ ID NO: 72805 - DNA, 20 bp, synthetic construct
  source 1..20: mol_type = other DNA
acgaaatgaggctatatcat

SEQ ID NO: 72806 - DNA, 20 bp, synthetic construct
  source 1..20: mol_type = other DNA
cacgaaatgaggctatatca

SEQ ID NO: 72807 - DNA, 20 bp, synthetic construct
  source 1..20: mol_type = other DNA
gcacgaaatgaggctatatc

SEQ ID NO: 72808 - DNA, 20 bp, synthetic construct
  source 1..20: mol_type = other DNA
agcacgaaatgaggctatat

SEQ ID NO: 72809 - DNA, 20 bp, synthetic construct
  source 1..20: mol_type = other DNA
tagcacgaaatgaggctata

SEQ ID NO: 72810 - DNA, 20 bp, synthetic construct
  source 1..20: mol_type = other DNA
ttagcacgaaatgaggctat

SEQ ID NO: 72811 - DNA, 20 bp, synthetic construct
  source 1..20: mol_type = other DNA
gttagcacgaaatgaggcta

SEQ ID NO: 72812 - DNA, 20 bp, synthetic construct
  source 1..20: mol_type = other DNA
agttagcacgaaatgaggct

SEQ ID NO: 72813 - DNA, 20 bp, synthetic construct
  source 1..20: mol_type = other DNA
gagttagcacgaaatgaggc

SEQ ID NO: 72814 - DNA, 20 bp, synthetic construct
  source 1..20: mol_type = other DNA
agagttagcacgaaatgagg

SEQ ID NO: 72815 - DNA, 20 bp, synthetic construct
  source 1..20: mol_type = other DNA
gagagttagcacgaaatgag

SEQ ID NO: 72816 - DNA, 20 bp, synthetic construct
  source 1..20: mol_type = other DNA
ggagagttagcacgaaatga

SEQ ID NO: 72817 - DNA, 20 bp, synthetic construct
  source 1..20: mol_type = other DNA
tggagagttagcacgaaatg

SEQ ID NO: 72818 - DNA, 20 bp, synthetic construct
  source 1..20: mol_type = other DNA
gtggagagttagcacgaaat

SEQ ID NO: 72819 - DNA, 20 bp, synthetic construct
  source 1..20: mol_type = other DNA
agtggagagttagcacgaaa

SEQ ID NO: 72820 - DNA, 20 bp, synthetic construct
  source 1..20: mol_type = other DNA
aagtggagagttagcacgaa

SEQ ID NO: 72821 - DNA, 20 bp, synthetic construct
  source 1..20: mol_type = other DNA
gaagtggagagttagcacga

SEQ ID NO: 72822 - DNA, 20 bp, synthetic construct
  source 1..20: mol_type = other DNA
agaagtggagagttagcacg

SEQ ID NO: 72823 - DNA, 20 bp, synthetic construct
  source 1..20: mol_type = other DNA
cagaagtggagagttagcac

SEQ ID NO: 72824 - DNA, 20 bp, synthetic construct
  source 1..20: mol_type = other DNA
gcagaagtggagagttagca

SEQ ID NO: 72825 - DNA, 20 bp, synthetic construct
  source 1..20: mol_type = other DNA
tgcagaagtggagagttagc

SEQ ID NO: 72826 - DNA, 20 bp, synthetic construct
  source 1..20: mol_type = other DNA
gtgcagaagtggagagttag

SEQ ID NO: 72827 - DNA, 20 bp, synthetic construct
  source 1..20: mol_type = other DNA
tgtgcagaagtggagagtta

SEQ ID NO: 72828 - DNA, 20 bp, synthetic construct
  source 1..20: mol_type = other DNA
atgtgcagaagtggagagtt

SEQ ID NO: 72829 - DNA, 20 bp, synthetic construct
  source 1..20: mol_type = other DNA
gatgtgcagaagtggagagt

SEQ ID NO: 72830 - DNA, 20 bp, synthetic construct
  source 1..20: mol_type = other DNA
agatgtgcagaagtggagag

SEQ ID NO: 72831 - DNA, 20 bp, synthetic construct
  source 1..20: mol_type = other DNA
aagatgtgcagaagtggaga

SEQ ID NO: 72832 - DNA, 20 bp, synthetic construct
  source 1..20: mol_type = other DNA
gaagatgtgcagaagtggag

SEQ ID NO: 72833 - DNA, 20 bp, synthetic construct
  source 1..20: mol_type = other DNA
ggaagatgtgcagaagtgga

SEQ ID NO: 72834 - DNA, 20 bp, synthetic construct
  source 1..20: mol_type = other DNA
gggaagatgtgcagaagtgg

SEQ ID NO: 72835 - DNA, 20 bp, synthetic construct
  source 1..20: mol_type = other DNA
ggggaagatgtgcagaagtg

SEQ ID NO: 72836 - DNA, 20 bp, synthetic construct
  source 1..20: mol_type = other DNA
aggggaagatgtgcagaagt

SEQ ID NO: 72837 - DNA, 20 bp, synthetic construct
  source 1..20: mol_type = other DNA
taggggaagatgtgcagaag

SEQ ID NO: 72838 - DNA, 20 bp, synthetic construct
  source 1..20: mol_type = other DNA
ttaggggaagatgtgcagaa

SEQ ID NO: 72839 - DNA, 20 bp, synthetic construct
  source 1..20: mol_type = other DNA
cttaggggaagatgtgcaga

SEQ ID NO: 72840 - DNA, 20 bp, synthetic construct
  source 1..20: mol_type = other DNA
acttaggggaagatgtgcag

SEQ ID NO: 72841 - DNA, 20 bp, synthetic construct
  source 1..20: mol_type = other DNA
gacttaggggaagatgtgca

SEQ ID NO: 72842 - DNA, 20 bp, synthetic construct
  source 1..20: mol_type = other DNA
ggacttaggggaagatgtgc

SEQ ID NO: 72843 - DNA, 20 bp, synthetic construct
  source 1..20: mol_type = other DNA
aggacttaggggaagatgtg

SEQ ID NO: 72844 - DNA, 20 bp, synthetic construct
  source 1..20: mol_type = other DNA
aaggacttaggggaagatgt

SEQ ID NO: 72845 - DNA, 20 bp, synthetic construct
  source 1..20: mol_type = other DNA
aaaggacttaggggaagatg

SEQ ID NO: 72846 - DNA, 20 bp, synthetic construct
  source 1..20: mol_type = other DNA
taaaggacttaggggaagat

SEQ ID NO: 72847 - DNA, 20 bp, synthetic construct
  source 1..20: mol_type = other DNA
gtaaaggacttaggggaaga

SEQ ID NO: 72848 - DNA, 20 bp, synthetic construct
  source 1..20: mol_type = other DNA
agtaaaggacttaggggaag

SEQ ID NO: 72849 - DNA, 20 bp, synthetic construct
  source 1..20: mol_type = other DNA
gagtaaaggacttaggggaa

SEQ ID NO: 72850 - DNA, 20 bp, synthetic construct
  source 1..20: mol_type = other DNA
tgagtaaaggacttagggga

SEQ ID NO: 72851 - DNA, 20 bp, synthetic construct
  source 1..20: mol_type = other DNA
atgagtaaaggacttagggg

SEQ ID NO: 72852 - DNA, 20 bp, synthetic construct
  source 1..20: mol_type = other DNA
gatgagtaaaggacttaggg

SEQ ID NO: 72853 - DNA, 20 bp, synthetic construct
  source 1..20: mol_type = other DNA
agatgagtaaaggacttagg

SEQ ID NO: 72854 - DNA, 20 bp, synthetic construct
  source 1..20: mol_type = other DNA
aagatgagtaaaggacttag

SEQ ID NO: 72855 - DNA, 20 bp, synthetic construct
  source 1..20: mol_type = other DNA
aaagatgagtaaaggactta

SEQ ID NO: 72856 - DNA, 20 bp, synthetic construct
  source 1..20: mol_type = other DNA
taaagatgagtaaaggactt

SEQ ID NO: 72857 - DNA, 20 bp, synthetic construct
  source 1..20: mol_type = other DNA
ctaaagatgagtaaaggact

SEQ ID NO: 72858 - DNA, 20 bp, synthetic construct
  source 1..20: mol_type = other DNA
tctaaagatgagtaaaggac

SEQ ID NO: 72859 - DNA, 20 bp, synthetic construct
  source 1..20: mol_type = other DNA
ttctaaagatgagtaaagga

SEQ ID NO: 72860 - DNA, 20 bp, synthetic construct
  source 1..20: mol_type = other DNA
tttctaaagatgagtaaagg

SEQ ID NO: 72861 - DNA, 20 bp, synthetic construct
  source 1..20: mol_type = other DNA
ctttctaaagatgagtaaag

SEQ ID NO: 72862 - DNA, 20 bp, synthetic construct
  source 1..20: mol_type = other DNA
tctttctaaagatgagtaaa

SEQ ID NO: 72863 - DNA, 20 bp, synthetic construct
  source 1..20: mol_type = other DNA
ctctttctaaagatgagtaa

SEQ ID NO: 72864 - DNA, 20 bp, synthetic construct
  source 1..20: mol_type = other DNA
gctctttctaaagatgagta

SEQ ID NO: 72865 - DNA, 20 bp, synthetic construct
  source 1..20: mol_type = other DNA
agctctttctaaagatgagt

SEQ ID NO: 72866 - DNA, 20 bp, synthetic construct
  source 1..20: mol_type = other DNA
tagctctttctaaagatgag

SEQ ID NO: 72867 - DNA, 20 bp, synthetic construct
  source 1..20: mol_type = other DNA
gtagctctttctaaagatga

SEQ ID NO: 72868 - DNA, 20 bp, synthetic construct
  source 1..20: mol_type = other DNA
agtagctctttctaaagatg

SEQ ID NO: 72869 - DNA, 20 bp, synthetic construct
  source 1..20: mol_type = other DNA
aagtagctctttctaaagat

SEQ ID NO: 72870 - DNA, 20 bp, synthetic construct
  source 1..20: mol_type = other DNA
aaagtagctctttctaaaga

SEQ ID NO: 72871 - DNA, 20 bp, synthetic construct
  source 1..20: mol_type = other DNA
aaaagtagctctttctaaag

SEQ ID NO: 72872 - DNA, 20 bp, synthetic construct
  source 1..20: mol_type = other DNA
caaaagtagctctttctaaa

SEQ ID NO: 72873 - DNA, 20 bp, synthetic construct
  source 1..20: mol_type = other DNA
ccaaaagtagctctttctaa

SEQ ID NO: 72874 - DNA, 20 bp, synthetic construct
  source 1..20: mol_type = other DNA
accaaaagtagctctttcta

SEQ ID NO: 72875 - DNA, 20 bp, synthetic construct
  source 1..20: mol_type = other DNA
caccaaaagtagctctttct

SEQ ID NO: 72876 - DNA, 20 bp, synthetic construct
  source 1..20: mol_type = other DNA
tcaccaaaagtagctctttc

SEQ ID NO: 72877 - DNA, 20 bp, synthetic construct
  source 1..20: mol_type = other DNA
ttcaccaaaagtagctcttt

SEQ ID NO: 72878 - DNA, 20 bp, synthetic construct
  source 1..20: mol_type = other DNA
tttcaccaaaagtagctctt

SEQ ID NO: 72879 - DNA, 20 bp, synthetic construct
  source 1..20: mol_type = other DNA
atttcaccaaaagtagctct

SEQ ID NO: 72880 - DNA, 20 bp, synthetic construct
  source 1..20: mol_type = other DNA
aatttcaccaaaagtagctc

SEQ ID NO: 72881 - DNA, 20 bp, synthetic construct
  source 1..20: mol_type = other DNA
aaatttcaccaaaagtagct

SEQ ID NO: 72882 - DNA, 20 bp, synthetic construct
  source 1..20: mol_type = other DNA
aaaatttcaccaaaagtagc

SEQ ID NO: 72883 - DNA, 20 bp, synthetic construct
  source 1..20: mol_type = other DNA
taaaatttcaccaaaagtag

SEQ ID NO: 72884 - DNA, 20 bp, synthetic construct
  source 1..20: mol_type = other DNA
ttaaaatttcaccaaaagta

SEQ ID NO: 72885 - DNA, 20 bp, synthetic construct
  source 1..20: mol_type = other DNA
tttaaaatttcaccaaaagt

SEQ ID NO: 72886 - DNA, 20 bp, synthetic construct
  source 1..20: mol_type = other DNA
ttttaaaatttcaccaaaag

SEQ ID NO: 72887 - DNA, 20 bp, synthetic construct
  source 1..20: mol_type = other DNA
gttttaaaatttcaccaaaa

SEQ ID NO: 72888 - DNA, 20 bp, synthetic construct
  source 1..20: mol_type = other DNA
ggttttaaaatttcaccaaa

SEQ ID NO: 72889 - DNA, 20 bp, synthetic construct
  source 1..20: mol_type = other DNA
tggttttaaaatttcaccaa

SEQ ID NO: 72890 - DNA, 20 bp, synthetic construct
  source 1..20: mol_type = other DNA
ttggttttaaaatttcacca

SEQ ID NO: 72891 - DNA, 20 bp, synthetic construct
  source 1..20: mol_type = other DNA
cttggttttaaaatttcacc

SEQ ID NO: 72892 - DNA, 20 bp, synthetic construct
  source 1..20: mol_type = other DNA
ccttggttttaaaatttcac

SEQ ID NO: 72893 - DNA, 20 bp, synthetic construct
  source 1..20: mol_type = other DNA
tccttggttttaaaatttca

SEQ ID NO: 72894 - DNA, 20 bp, synthetic construct
  source 1..20: mol_type = other DNA
ttccttggttttaaaatttc

SEQ ID NO: 72895 - DNA, 20 bp, synthetic construct
  source 1..20: mol_type = other DNA
attccttggttttaaaattt

SEQ ID NO: 72896 - DNA, 20 bp, synthetic construct
  source 1..20: mol_type = other DNA
tattccttggttttaaaatt

SEQ ID NO: 72897 - DNA, 20 bp, synthetic construct
  source 1..20: mol_type = other DNA
atattccttggttttaaaat

SEQ ID NO: 72898 - DNA, 20 bp, synthetic construct
  source 1..20: mol_type = other DNA
gatattccttggttttaaaa

SEQ ID NO: 72899 - DNA, 20 bp, synthetic construct
  source 1..20: mol_type = other DNA
tgatattccttggttttaaa

SEQ ID NO: 72900 - DNA, 20 bp, synthetic construct
  source 1..20: mol_type = other DNA
atgatattccttggttttaa

SEQ ID NO: 72901 - DNA, 20 bp, synthetic construct
  source 1..20: mol_type = other DNA
aatgatattccttggtttta

SEQ ID NO: 72902 - DNA, 20 bp, synthetic construct
  source 1..20: mol_type = other DNA
gaatgatattccttggtttt

SEQ ID NO: 72903 - DNA, 20 bp, synthetic construct
  source 1..20: mol_type = other DNA
agaatgatattccttggttt

SEQ ID NO: 72904 - DNA, 20 bp, synthetic construct
  source 1..20: mol_type = other DNA
aagaatgatattccttggtt

SEQ ID NO: 72905 - DNA, 20 bp, synthetic construct
  source 1..20: mol_type = other DNA
aaagaatgatattccttggt

SEQ ID NO: 72906 - DNA, 20 bp, synthetic construct
  source 1..20: mol_type = other DNA
taaagaatgatattccttgg

SEQ ID NO: 72907 - DNA, 20 bp, synthetic construct
  source 1..20: mol_type = other DNA
ataaagaatgatattccttg

SEQ ID NO: 72908 - DNA, 20 bp, synthetic construct
  source 1..20: mol_type = other DNA
tataaagaatgatattcctt

SEQ ID NO: 72909 - DNA, 20 bp, synthetic construct
  source 1..20: mol_type = other DNA
ctataaagaatgatattcct

SEQ ID NO: 72910 - DNA, 20 bp, synthetic construct
  source 1..20: mol_type = other DNA
tctataaagaatgatattcc

SEQ ID NO: 72911 - DNA, 20 bp, synthetic construct
  source 1..20: mol_type = other DNA
ttctataaagaatgatattc

SEQ ID NO: 72912 - DNA, 20 bp, synthetic construct
  source 1..20: mol_type = other DNA
attctataaagaatgatatt

SEQ ID NO: 72913 - DNA, 20 bp, synthetic construct
  source 1..20: mol_type = other DNA
gattctataaagaatgatat

SEQ ID NO: 72914 - DNA, 20 bp, synthetic construct
  source 1..20: mol_type = other DNA
tgattctataaagaatgata

SEQ ID NO: 72915 - DNA, 20 bp, synthetic construct
  source 1..20: mol_type = other DNA
gtgattctataaagaatgat

SEQ ID NO: 72916 - DNA, 20 bp, synthetic construct
  source 1..20: mol_type = other DNA
tgtgattctataaagaatga

SEQ ID NO: 72917 - DNA, 20 bp, synthetic construct
  source 1..20: mol_type = other DNA
gtgtgattctataaagaatg

SEQ ID NO: 72918 - DNA, 20 bp, synthetic construct
  source 1..20: mol_type = other DNA
agtgtgattctataaagaat

SEQ ID NO: 72919 - DNA, 20 bp, synthetic construct
  source 1..20: mol_type = other DNA
aagtgtgattctataaagaa

SEQ ID NO: 72920 - DNA, 20 bp, synthetic construct
  source 1..20: mol_type = other DNA
gaagtgtgattctataaaga

SEQ ID NO: 72921 - DNA, 20 bp, synthetic construct
  source 1..20: mol_type = other DNA
agaagtgtgattctataaag

SEQ ID NO: 72922 - DNA, 20 bp, synthetic construct
  source 1..20: mol_type = other DNA
cagaagtgtgattctataaa

SEQ ID NO: 72923 - DNA, 20 bp, synthetic construct
  source 1..20: mol_type = other DNA
acagaagtgtgattctataa

SEQ ID NO: 72924 - DNA, 20 bp, synthetic construct
  source 1..20: mol_type = other DNA
cacagaagtgtgattctata

SEQ ID NO: 72925 - DNA, 20 bp, synthetic construct
  source 1..20: mol_type = other DNA
acacagaagtgtgattctat

SEQ ID NO: 72926 - DNA, 20 bp, synthetic construct
  source 1..20: mol_type = other DNA
aacacagaagtgtgattcta

SEQ ID NO: 72927 - DNA, 20 bp, synthetic construct
  source 1..20: mol_type = other DNA
aaacacagaagtgtgattct

SEQ ID NO: 72928 - DNA, 20 bp, synthetic construct
  source 1..20: mol_type = other DNA
aaaacacagaagtgtgattc

SEQ ID NO: 72929 - DNA, 20 bp, synthetic construct
  source 1..20: mol_type = other DNA
gaaaacacagaagtgtgatt

SEQ ID NO: 72930 - DNA, 20 bp, synthetic construct
  source 1..20: mol_type = other DNA
ggaaaacacagaagtgtgat

SEQ ID NO: 72931 - DNA, 20 bp, synthetic construct
  source 1..20: mol_type = other DNA
gggaaaacacagaagtgtga

SEQ ID NO: 72932 - DNA, 20 bp, synthetic construct
  source 1..20: mol_type = other DNA
ggggaaaacacagaagtgtg

SEQ ID NO: 72933 - DNA, 20 bp, synthetic construct
  source 1..20: mol_type = other DNA
aggggaaaacacagaagtgt

SEQ ID NO: 72934 - DNA, 20 bp, synthetic construct
  source 1..20: mol_type = other DNA
aaggggaaaacacagaagtg

SEQ ID NO: 72935 - DNA, 20 bp, synthetic construct
  source 1..20: mol_type = other DNA
gaaggggaaaacacagaagt

SEQ ID NO: 72936 - DNA, 20 bp, synthetic construct
  source 1..20: mol_type = other DNA
ggaaggggaaaacacagaag

SEQ ID NO: 72937 - DNA, 20 bp, synthetic construct
  source 1..20: mol_type = other DNA
gggaaggggaaaacacagaa

SEQ ID NO: 72938 - DNA, 20 bp, synthetic construct
  source 1..20: mol_type = other DNA
ggggaaggggaaaacacaga

SEQ ID NO: 72939 - DNA, 20 bp, synthetic construct
  source 1..20: mol_type = other DNA
tggggaaggggaaaacacag

SEQ ID NO: 72940 - DNA, 20 bp, synthetic construct
  source 1..20: mol_type = other DNA
atggggaaggggaaaacaca

SEQ ID NO: 72941 - DNA, 20 bp, synthetic construct
  source 1..20: mol_type = other DNA
aatggggaaggggaaaacac

SEQ ID NO: 72942 - DNA, 20 bp, synthetic construct
  source 1..20: mol_type = other DNA
aaatggggaaggggaaaaca

SEQ ID NO: 72943 - DNA, 20 bp, synthetic construct
  source 1..20: mol_type = other DNA
gaaatggggaaggggaaaac

SEQ ID NO: 72944 - DNA, 20 bp, synthetic construct
  source 1..20: mol_type = other DNA
agaaatggggaaggggaaaa

SEQ ID NO: 72945 - DNA, 20 bp, synthetic construct
  source 1..20: mol_type = other DNA
cagaaatggggaaggggaaa

SEQ ID NO: 72946 - DNA, 20 bp, synthetic construct
  source 1..20: mol_type = other DNA
acagaaatggggaaggggaa

SEQ ID NO: 72947 - DNA, 20 bp, synthetic construct
  source 1..20: mol_type = other DNA
gacagaaatggggaagggga

SEQ ID NO: 72948 - DNA, 20 bp, synthetic construct
  source 1..20: mol_type = other DNA
agacagaaatggggaagggg

SEQ ID NO: 72949 - DNA, 20 bp, synthetic construct
  source 1..20: mol_type = other DNA
gagacagaaatggggaaggg

SEQ ID NO: 72950 - DNA, 20 bp, synthetic construct
  source 1..20: mol_type = other DNA
cgagacagaaatggggaagg

SEQ ID NO: 72951 - DNA, 20 bp, synthetic construct
  source 1..20: mol_type = other DNA
tcgagacagaaatggggaag

SEQ ID NO: 72952 - DNA, 20 bp, synthetic construct
  source 1..20: mol_type = other DNA
ttcgagacagaaatggggaa

SEQ ID NO: 72953 - DNA, 20 bp, synthetic construct
  source 1..20: mol_type = other DNA
tttcgagacagaaatgggga

SEQ ID NO: 72954 - DNA, 20 bp, synthetic construct
  source 1..20: mol_type = other DNA
ctttcgagacagaaatgggg

SEQ ID NO: 72955 - DNA, 20 bp, synthetic construct
  source 1..20: mol_type = other DNA
gctttcgagacagaaatggg

SEQ ID NO: 72956 - DNA, 20 bp, synthetic construct
  source 1..20: mol_type = other DNA
cgctttcgagacagaaatgg

SEQ ID NO: 72957 - DNA, 20 bp, synthetic construct
  source 1..20: mol_type = other DNA
tcgctttcgagacagaaatg

SEQ ID NO: 72958 - DNA, 20 bp, synthetic construct
  source 1..20: mol_type = other DNA
gtcgctttcgagacagaaat

SEQ ID NO: 72959 - DNA, 20 bp, synthetic construct
  source 1..20: mol_type = other DNA
tgtcgctttcgagacagaaa

SEQ ID NO: 72960 - DNA, 20 bp, synthetic construct
  source 1..20: mol_type = other DNA
ctgtcgctttcgagacagaa

SEQ ID NO: 72961 - DNA, 20 bp, synthetic construct
  source 1..20: mol_type = other DNA
tctgtcgctttcgagacaga

SEQ ID NO: 72962 - DNA, 20 bp, synthetic construct
  source 1..20: mol_type = other DNA
gtctgtcgctttcgagacag

SEQ ID NO: 72963 - DNA, 20 bp, synthetic construct
  source 1..20: mol_type = other DNA
agtctgtcgctttcgagaca

SEQ ID NO: 72964 - DNA, 20 bp, synthetic construct
  source 1..20: mol_type = other DNA
cagtctgtcgctttcgagac

SEQ ID NO: 72965 - DNA, 20 bp, synthetic construct
  source 1..20: mol_type = other DNA
gcagtctgtcgctttcgaga

SEQ ID NO: 72966 - DNA, 20 bp, synthetic construct
  source 1..20: mol_type = other DNA
agcagtctgtcgctttcgag

SEQ ID NO: 72967 - DNA, 20 bp, synthetic construct
  source 1..20: mol_type = other DNA
tagcagtctgtcgctttcga

SEQ ID NO: 72968 - DNA, 20 bp, synthetic construct
  source 1..20: mol_type = other DNA
gtagcagtctgtcgctttcg

SEQ ID NO: 72969 - DNA, 20 bp, synthetic construct
  source 1..20: mol_type = other DNA
tgtagcagtctgtcgctttc

SEQ ID NO: 72970 - DNA, 20 bp, synthetic construct
  source 1..20: mol_type = other DNA
atgtagcagtctgtcgcttt

SEQ ID NO: 72971 - DNA, 20 bp, synthetic construct
  source 1..20: mol_type = other DNA
tatgtagcagtctgtcgctt

SEQ ID NO: 72972 - DNA, 20 bp, synthetic construct
  source 1..20: mol_type = other DNA
ttatgtagcagtctgtcgct

SEQ ID NO: 72973 - DNA, 20 bp, synthetic construct
  source 1..20: mol_type = other DNA
gttatgtagcagtctgtcgc

SEQ ID NO: 72974 - DNA, 20 bp, synthetic construct
  source 1..20: mol_type = other DNA
ggttatgtagcagtctgtcg

SEQ ID NO: 72975 - DNA, 20 bp, synthetic construct
  source 1..20: mol_type = other DNA
aggttatgtagcagtctgtc

SEQ ID NO: 72976 - DNA, 20 bp, synthetic construct
  source 1..20: mol_type = other DNA
caggttatgtagcagtctgt

SEQ ID NO: 72977 - DNA, 20 bp, synthetic construct
  source 1..20: mol_type = other DNA
acaggttatgtagcagtctg

SEQ ID NO: 72978 - DNA, 20 bp, synthetic construct
  source 1..20: mol_type = other DNA
cacaggttatgtagcagtct

SEQ ID NO: 72979 - DNA, 20 bp, synthetic construct
  source 1..20: mol_type = other DNA
tcacaggttatgtagcagtc

SEQ ID NO: 72980 - DNA, 20 bp, synthetic construct
  source 1..20: mol_type = other DNA
ttcacaggttatgtagcagt

SEQ ID NO: 72981 - DNA, 20 bp, synthetic construct
  source 1..20: mol_type = other DNA
attcacaggttatgtagcag

SEQ ID NO: 72982 - DNA, 20 bp, synthetic construct
  source 1..20: mol_type = other DNA
tattcacaggttatgtagca

SEQ ID NO: 72983 - DNA, 20 bp, synthetic construct
  source 1..20: mol_type = other DNA
gtattcacaggttatgtagc

SEQ ID NO: 72984 - DNA, 20 bp, synthetic construct
  source 1..20: mol_type = other DNA
agtattcacaggttatgtag

SEQ ID NO: 72985 - DNA, 20 bp, synthetic construct
  source 1..20: mol_type = other DNA
aagtattcacaggttatgta

SEQ ID NO: 72986 - DNA, 20 bp, synthetic construct
  source 1..20: mol_type = other DNA
aaagtattcacaggttatgt

SEQ ID NO: 72987 - DNA, 20 bp, synthetic construct
  source 1..20: mol_type = other DNA
aaaagtattcacaggttatg

SEQ ID NO: 72988 - DNA, 20 bp, synthetic construct
  source 1..20: mol_type = other DNA
aaaaagtattcacaggttat

SEQ ID NO: 72989 - DNA, 20 bp, synthetic construct
  source 1..20: mol_type = other DNA
aaaaaagtattcacaggtta

SEQ ID NO: 72990 - DNA, 20 bp, synthetic construct
  source 1..20: mol_type = other DNA
aaaaaaagtattcacaggtt

SEQ ID NO: 72991 - DNA, 20 bp, synthetic construct
  source 1..20: mol_type = other DNA
aaaaaaaagtattcacaggt

SEQ ID NO: 72992 - DNA, 20 bp, synthetic construct
  source 1..20: mol_type = other DNA
taaaaaaaagtattcacagg

SEQ ID NO: 72993 - DNA, 20 bp, synthetic construct
  source 1..20: mol_type = other DNA
ttaaaaaaaagtattcacag

SEQ ID NO: 72994 - DNA, 20 bp, synthetic construct
  source 1..20: mol_type = other DNA
tttaaaaaaaagtattcaca

SEQ ID NO: 72995 - DNA, 20 bp, synthetic construct
  source 1..20: mol_type = other DNA
ttttaaaaaaaagtattcac

SEQ ID NO: 72996 - DNA, 20 bp, synthetic construct
  source 1..20: mol_type = other DNA
tttttaaaaaaaagtattca

SEQ ID NO: 72997 - DNA, 20 bp, synthetic construct
  source 1..20: mol_type = other DNA
ttttttaaaaaaaagtattc

SEQ ID NO: 72998 - DNA, 20 bp, synthetic construct
  source 1..20: mol_type = other DNA
tttttttaaaaaaaagtatt

SEQ ID NO: 72999 - DNA, 20 bp, synthetic construct
  source 1..20: mol_type = other DNA
ctttttttaaaaaaaagtat

SEQ ID NO: 73000 - DNA, 20 bp, synthetic construct
  source 1..20: mol_type = other DNA
actttttttaaaaaaaagta

SEQ ID NO: 73001 - DNA, 20 bp, synthetic construct
  source 1..20: mol_type = other DNA
aactttttttaaaaaaaagt

SEQ ID NO: 73002 - DNA, 20 bp, synthetic construct
  source 1..20: mol_type = other DNA
aaactttttttaaaaaaaag

SEQ ID NO: 73003 - DNA, 20 bp, synthetic construct
  source 1..20: mol_type = other DNA
caaactttttttaaaaaaaa

SEQ ID NO: 73004 - DNA, 20 bp, synthetic construct
  source 1..20: mol_type = other DNA
ccaaactttttttaaaaaaa

SEQ ID NO: 73005 - DNA, 20 bp, synthetic construct
  source 1..20: mol_type = other DNA
accaaactttttttaaaaaa

SEQ ID NO: 73006 - DNA, 20 bp, synthetic construct
  source 1..20: mol_type = other DNA
taccaaactttttttaaaaa

SEQ ID NO: 73007 - DNA, 20 bp, synthetic construct
  source 1..20: mol_type = other DNA
ataccaaactttttttaaaa

SEQ ID NO: 73008 - DNA, 20 bp, synthetic construct
  source 1..20: mol_type = other DNA
aataccaaactttttttaaa

SEQ ID NO: 73009 - DNA, 20 bp, synthetic construct
  source 1..20: mol_type = other DNA
caataccaaactttttttaa

SEQ ID NO: 73010 - DNA, 20 bp, synthetic construct
  source 1..20: mol_type = other DNA
acaataccaaacttttttta

SEQ ID NO: 73011 - DNA, 20 bp, synthetic construct
  source 1..20: mol_type = other DNA
tacaataccaaacttttttt

SEQ ID NO: 73012 - DNA, 20 bp, synthetic construct
  source 1..20: mol_type = other DNA
ttacaataccaaactttttt

SEQ ID NO: 73013 - DNA, 20 bp, synthetic construct
  source 1..20: mol_type = other DNA
tttacaataccaaacttttt

SEQ ID NO: 73014 - DNA, 20 bp, synthetic construct
  source 1..20: mol_type = other DNA
gtttacaataccaaactttt

SEQ ID NO: 73015 - DNA, 20 bp, synthetic construct
  source 1..20: mol_type = other DNA
tgtttacaataccaaacttt

SEQ ID NO: 73016 - DNA, 20 bp, synthetic construct
  source 1..20: mol_type = other DNA
ctgtttacaataccaaactt

SEQ ID NO: 73017 - DNA, 20 bp, synthetic construct
  source 1..20: mol_type = other DNA
tctgtttacaataccaaact

SEQ ID NO: 73018 - DNA, 20 bp, synthetic construct
  source 1..20: mol_type = other DNA
ttctgtttacaataccaaac

SEQ ID NO: 73019 - DNA, 20 bp, synthetic construct
  source 1..20: mol_type = other DNA
cttctgtttacaataccaaa

SEQ ID NO: 73020 - DNA, 20 bp, synthetic construct
  source 1..20: mol_type = other DNA
tcttctgtttacaataccaa

SEQ ID NO: 73021 - DNA, 20 bp, synthetic construct
  source 1..20: mol_type = other DNA
atcttctgtttacaatacca

SEQ ID NO: 73022 - DNA, 20 bp, synthetic construct
  source 1..20: mol_type = other DNA
aatcttctgtttacaatacc

SEQ ID NO: 73023 - DNA, 20 bp, synthetic construct
  source 1..20: mol_type = other DNA
aaatcttctgtttacaatac

SEQ ID NO: 73024 - DNA, 20 bp, synthetic construct
  source 1..20: mol_type = other DNA
taaatcttctgtttacaata

SEQ ID NO: 73025 - DNA, 20 bp, synthetic construct
  source 1..20: mol_type = other DNA
ttaaatcttctgtttacaat

SEQ ID NO: 73026 - DNA, 20 bp, synthetic construct
  source 1..20: mol_type = other DNA
cttaaatcttctgtttacaa

SEQ ID NO: 73027 - DNA, 20 bp, synthetic construct
  source 1..20: mol_type = other DNA
tcttaaatcttctgtttaca

SEQ ID NO: 73028 - DNA, 20 bp, synthetic construct
  source 1..20: mol_type = other DNA
atcttaaatcttctgtttac

SEQ ID NO: 73029 - DNA, 20 bp, synthetic construct
  source 1..20: mol_type = other DNA
aatcttaaatcttctgttta

SEQ ID NO: 73030 - DNA, 20 bp, synthetic construct
  source 1..20: mol_type = other DNA
taatcttaaatcttctgttt

SEQ ID NO: 73031 - DNA, 20 bp, synthetic construct
  source 1..20: mol_type = other DNA
ttaatcttaaatcttctgtt

SEQ ID NO: 73032 - DNA, 20 bp, synthetic construct
  source 1..20: mol_type = other DNA
tttaatcttaaatcttctgt

SEQ ID NO: 73033 - DNA, 20 bp, synthetic construct
  source 1..20: mol_type = other DNA
ttttaatcttaaatcttctg

SEQ ID NO: 73034 - DNA, 20 bp, synthetic construct
  source 1..20: mol_type = other DNA
attttaatcttaaatcttct

SEQ ID NO: 73035 - DNA, 20 bp, synthetic construct
  source 1..20: mol_type = other DNA
cattttaatcttaaatcttc

SEQ ID NO: 73036 - DNA, 20 bp, synthetic construct
  source 1..20: mol_type = other DNA
acattttaatcttaaatctt

SEQ ID NO: 73037 - DNA, 20 bp, synthetic construct
  source 1..20: mol_type = other DNA
tacattttaatcttaaatct

SEQ ID NO: 73038 - DNA, 20 bp, synthetic construct
  source 1..20: mol_type = other DNA
ctacattttaatcttaaatc

SEQ ID NO: 73039 - DNA, 20 bp, synthetic construct
  source 1..20: mol_type = other DNA
gctacattttaatcttaaat

SEQ ID NO: 73040 - DNA, 20 bp, synthetic construct
  source 1..20: mol_type = other DNA
tgctacattttaatcttaaa

SEQ ID NO: 73041 - DNA, 20 bp, synthetic construct
  source 1..20: mol_type = other DNA
atgctacattttaatcttaa

SEQ ID NO: 73042 - DNA, 20 bp, synthetic construct
  source 1..20: mol_type = other DNA
aatgctacattttaatctta

SEQ ID NO: 73043 - DNA, 20 bp, synthetic construct
  source 1..20: mol_type = other DNA
caatgctacattttaatctt

SEQ ID NO: 73044 - DNA, 20 bp, synthetic construct
  source 1..20: mol_type = other DNA
tcaatgctacattttaatct

SEQ ID NO: 73045 - DNA, 20 bp, synthetic construct
  source 1..20: mol_type = other DNA
ctcaatgctacattttaatc

SEQ ID NO: 73046 - DNA, 20 bp, synthetic construct
  source 1..20: mol_type = other DNA
tctcaatgctacattttaat

SEQ ID NO: 73047 - DNA, 20 bp, synthetic construct
  source 1..20: mol_type = other DNA
ttctcaatgctacattttaa

SEQ ID NO: 73048 - DNA, 20 bp, synthetic construct
  source 1..20: mol_type = other DNA
tttctcaatgctacatttta

SEQ ID NO: 73049 - DNA, 20 bp, synthetic construct
  source 1..20: mol_type = other DNA
ttttctcaatgctacatttt

SEQ ID NO: 73050 - DNA, 20 bp, synthetic construct
  source 1..20: mol_type = other DNA
tttttctcaatgctacattt

SEQ ID NO: 73051 - DNA, 20 bp, synthetic construct
  source 1..20: mol_type = other DNA
atttttctcaatgctacatt

SEQ ID NO: 73052 - DNA, 20 bp, synthetic construct
  source 1..20: mol_type = other DNA
tatttttctcaatgctacat

SEQ ID NO: 73053 - DNA, 20 bp, synthetic construct
  source 1..20: mol_type = other DNA
ctatttttctcaatgctaca

SEQ ID NO: 73054 - DNA, 20 bp, synthetic construct
  source 1..20: mol_type = other DNA
tctatttttctcaatgctac

SEQ ID NO: 73055 - DNA, 20 bp, synthetic construct
  source 1..20: mol_type = other DNA
atctatttttctcaatgcta

SEQ ID NO: 73056 - DNA, 20 bp, synthetic construct
  source 1..20: mol_type = other DNA
aatctatttttctcaatgct

SEQ ID NO: 73057 - DNA, 20 bp, synthetic construct
  source 1..20: mol_type = other DNA
aaatctatttttctcaatgc

SEQ ID NO: 73058 - DNA, 20 bp, synthetic construct
  source 1..20: mol_type = other DNA
taaatctatttttctcaatg

SEQ ID NO: 73059 - DNA, 20 bp, synthetic construct
  source 1..20: mol_type = other DNA
ataaatctatttttctcaat

SEQ ID NO: 73060 - DNA, 20 bp, synthetic construct
  source 1..20: mol_type = other DNA
aataaatctatttttctcaa

SEQ ID NO: 73061 - DNA, 20 bp, synthetic construct
  source 1..20: mol_type = other DNA
taataaatctatttttctca

SEQ ID NO: 73062 - DNA, 20 bp, synthetic construct
  source 1..20: mol_type = other DNA
ttaataaatctatttttctc

SEQ ID NO: 73063 - DNA, 20 bp, synthetic construct
  source 1..20: mol_type = other DNA
attaataaatctatttttct

SEQ ID NO: 73064 - DNA, 20 bp, synthetic construct
  source 1..20: mol_type = other DNA
tattaataaatctatttttc

SEQ ID NO: 73065 - DNA, 20 bp, synthetic construct
  source 1..20: mol_type = other DNA
ttattaataaatctattttt

SEQ ID NO: 73066 - DNA, 20 bp, synthetic construct
  source 1..20: mol_type = other DNA
attattaataaatctatttt

SEQ ID NO: 73067 - DNA, 20 bp, synthetic construct
  source 1..20: mol_type = other DNA
cattattaataaatctattt

SEQ ID NO: 73068 - DNA, 20 bp, synthetic construct
  source 1..20: mol_type = other DNA
gcattattaataaatctatt

SEQ ID NO: 73069 - DNA, 20 bp, synthetic construct
  source 1..20: mol_type = other DNA
ggcattattaataaatctat

SEQ ID NO: 73070 - DNA, 20 bp, synthetic construct
  source 1..20: mol_type = other DNA
gggcattattaataaatcta

SEQ ID NO: 73071 - DNA, 20 bp, synthetic construct
  source 1..20: mol_type = other DNA
agggcattattaataaatct

SEQ ID NO: 73072 - DNA, 20 bp, synthetic construct
  source 1..20: mol_type = other DNA
gagggcattattaataaatc

SEQ ID NO: 73073 - DNA, 20 bp, synthetic construct
  source 1..20: mol_type = other DNA
agagggcattattaataaat

SEQ ID NO: 73074 - DNA, 20 bp, synthetic construct
  source 1..20: mol_type = other DNA
aagagggcattattaataaa

SEQ ID NO: 73075 - DNA, 20 bp, synthetic construct
  source 1..20: mol_type = other DNA
taagagggcattattaataa

SEQ ID NO: 73076 - DNA, 20 bp, synthetic construct
  source 1..20: mol_type = other DNA
ttaagagggcattattaata

SEQ ID NO: 73077 - DNA, 20 bp, synthetic construct
  source 1..20: mol_type = other DNA
gttaagagggcattattaat

SEQ ID NO: 73078 - DNA, 20 bp, synthetic construct
  source 1..20: mol_type = other DNA
tgttaagagggcattattaa

SEQ ID NO: 73079 - DNA, 20 bp, synthetic construct
  source 1..20: mol_type = other DNA
gtgttaagagggcattatta

SEQ ID NO: 73080 - DNA, 20 bp, synthetic construct
  source 1..20: mol_type = other DNA
tgtgttaagagggcattatt

SEQ ID NO: 73081 - DNA, 20 bp, synthetic construct
  source 1..20: mol_type = other DNA
ttgtgttaagagggcattat

SEQ ID NO: 73082 - DNA, 20 bp, synthetic construct
  source 1..20: mol_type = other DNA
gttgtgttaagagggcatta

SEQ ID NO: 73083 - DNA, 20 bp, synthetic construct
  source 1..20: mol_type = other DNA
ggttgtgttaagagggcatt

SEQ ID NO: 73084 - DNA, 20 bp, synthetic construct
  source 1..20: mol_type = other DNA
aggttgtgttaagagggcat

SEQ ID NO: 73085 - DNA, 20 bp, synthetic construct
  source 1..20: mol_type = other DNA
taggttgtgttaagagggca

SEQ ID NO: 73086 - DNA, 20 bp, synthetic construct
  source 1..20: mol_type = other DNA
ttaggttgtgttaagagggc

SEQ ID NO: 73087 - DNA, 20 bp, synthetic construct
  source 1..20: mol_type = other DNA
tttaggttgtgttaagaggg

SEQ ID NO: 73088 - DNA, 20 bp, synthetic construct
  source 1..20: mol_type = other DNA
atttaggttgtgttaagagg

SEQ ID NO: 73089 - DNA, 20 bp, synthetic construct
  source 1..20: mol_type = other DNA
aatttaggttgtgttaagag

SEQ ID NO: 73090 - DNA, 20 bp, synthetic construct
  source 1..20: mol_type = other DNA
gaatttaggttgtgttaaga

SEQ ID NO: 73091 - DNA, 20 bp, synthetic construct
  source 1..20: mol_type = other DNA
agaatttaggttgtgttaag

SEQ ID NO: 73092 - DNA, 20 bp, synthetic construct
  source 1..20: mol_type = other DNA
cagaatttaggttgtgttaa

SEQ ID NO: 73093 - DNA, 20 bp, synthetic construct
  source 1..20: mol_type = other DNA
ccagaatttaggttgtgtta

SEQ ID NO: 73094 - DNA, 20 bp, synthetic construct
  source 1..20: mol_type = other DNA
accagaatttaggttgtgtt

SEQ ID NO: 73095 - DNA, 20 bp, synthetic construct
  source 1..20: mol_type = other DNA
gaccagaatttaggttgtgt

SEQ ID NO: 73096 - DNA, 20 bp, synthetic construct
  source 1..20: mol_type = other DNA
tgaccagaatttaggttgtg

SEQ ID NO: 73097 - DNA, 20 bp, synthetic construct
  source 1..20: mol_type = other DNA
ctgaccagaatttaggttgt

SEQ ID NO: 73098 - DNA, 20 bp, synthetic construct
  source 1..20: mol_type = other DNA
actgaccagaatttaggttg

SEQ ID NO: 73099 - DNA, 20 bp, synthetic construct
  source 1..20: mol_type = other DNA
cactgaccagaatttaggtt

SEQ ID NO: 73100 - DNA, 20 bp, synthetic construct
  source 1..20: mol_type = other DNA
ccactgaccagaatttaggt

SEQ ID NO: 73101 - DNA, 20 bp, synthetic construct
  source 1..20: mol_type = other DNA
tccactgaccagaatttagg

SEQ ID NO: 73102 - DNA, 20 bp, synthetic construct
  source 1..20: mol_type = other DNA
ttccactgaccagaatttag

SEQ ID NO: 73103 - DNA, 20 bp, synthetic construct
  source 1..20: mol_type = other DNA
attccactgaccagaattta

SEQ ID NO: 73104 - DNA, 20 bp, synthetic construct
  source 1..20: mol_type = other DNA
tattccactgaccagaattt

SEQ ID NO: 73105 - DNA, 20 bp, synthetic construct
  source 1..20: mol_type = other DNA
ttattccactgaccagaatt

SEQ ID NO: 73106 - DNA, 20 bp, synthetic construct
  source 1..20: mol_type = other DNA
tttattccactgaccagaat

SEQ ID NO: 73107 - DNA, 20 bp, synthetic construct
  source 1..20: mol_type = other DNA
ctttattccactgaccagaa

SEQ ID NO: 73108 - DNA, 20 bp, synthetic construct
  source 1..20: mol_type = other DNA
gctttattccactgaccaga

SEQ ID NO: 73109 - DNA, 20 bp, synthetic construct
  source 1..20: mol_type = other DNA
ggctttattccactgaccag

SEQ ID NO: 73110 - DNA, 20 bp, synthetic construct
  source 1..20: mol_type = other DNA
aggctttattccactgacca

SEQ ID NO: 73111 - DNA, 20 bp, synthetic construct
  source 1..20: mol_type = other DNA
caggctttattccactgacc

SEQ ID NO: 73112 - DNA, 20 bp, synthetic construct
  source 1..20: mol_type = other DNA
ccaggctttattccactgac

SEQ ID NO: 73113 - DNA, 20 bp, synthetic construct
  source 1..20: mol_type = other DNA
cccaggctttattccactga

SEQ ID NO: 73114 - DNA, 20 bp, synthetic construct
  source 1..20: mol_type = other DNA
acccaggctttattccactg

SEQ ID NO: 73115 - DNA, 20 bp, synthetic construct
  source 1..20: mol_type = other DNA
gacccaggctttattccact

SEQ ID NO: 73116 - DNA, 20 bp, synthetic construct
  source 1..20: mol_type = other DNA
ggacccaggctttattccac

SEQ ID NO: 73117 - DNA, 20 bp, synthetic construct
  source 1..20: mol_type = other DNA
aggacccaggctttattcca

SEQ ID NO: 73118 - DNA, 20 bp, synthetic construct
  source 1..20: mol_type = other DNA
taggacccaggctttattcc

SEQ ID NO: 73119 - DNA, 20 bp, synthetic construct
  source 1..20: mol_type = other DNA
ttaggacccaggctttattc

SEQ ID NO: 73120 - DNA, 20 bp, synthetic construct
  source 1..20: mol_type = other DNA
tttaggacccaggctttatt

SEQ ID NO: 73121 - DNA, 20 bp, synthetic construct
  source 1..20: mol_type = other DNA
ctttaggacccaggctttat

SEQ ID NO: 73122 - DNA, 20 bp, synthetic construct
  source 1..20: mol_type = other DNA
actttaggacccaggcttta

SEQ ID NO: 73123 - DNA, 20 bp, synthetic construct
  source 1..20: mol_type = other DNA
aactttaggacccaggcttt

SEQ ID NO: 73124 - DNA, 20 bp, synthetic construct
  source 1..20: mol_type = other DNA
aaactttaggacccaggctt

SEQ ID NO: 73125 - DNA, 20 bp, synthetic construct
  source 1..20: mol_type = other DNA
aaaactttaggacccaggct

SEQ ID NO: 73126 - DNA, 20 bp, synthetic construct
  source 1..20: mol_type = other DNA
taaaactttaggacccaggc

SEQ ID NO: 73127 - DNA, 20 bp, synthetic construct
  source 1..20: mol_type = other DNA
ctaaaactttaggacccagg

SEQ ID NO: 73128 - DNA, 20 bp, synthetic construct
  source 1..20: mol_type = other DNA
tctaaaactttaggacccag

SEQ ID NO: 73129 - DNA, 20 bp, synthetic construct
  source 1..20: mol_type = other DNA
gtctaaaactttaggaccca

SEQ ID NO: 73130 - DNA, 20 bp, synthetic construct
  source 1..20: mol_type = other DNA
cgtctaaaactttaggaccc

SEQ ID NO: 73131 - DNA, 20 bp, synthetic construct
  source 1..20: mol_type = other DNA
gcgtctaaaactttaggacc

SEQ ID NO: 73132 - DNA, 20 bp, synthetic construct
  source 1..20: mol_type = other DNA
agcgtctaaaactttaggac

SEQ ID NO: 73133 - DNA, 20 bp, synthetic construct
  source 1..20: mol_type = other DNA
aagcgtctaaaactttagga

SEQ ID NO: 73134 - DNA, 20 bp, synthetic construct
  source 1..20: mol_type = other DNA
caagcgtctaaaactttagg

SEQ ID NO: 73135 - DNA, 20 bp, synthetic construct
  source 1..20: mol_type = other DNA
gcaagcgtctaaaactttag

SEQ ID NO: 73136 - DNA, 20 bp, synthetic construct
  source 1..20: mol_type = other DNA
agcaagcgtctaaaacttta

SEQ ID NO: 73137 - DNA, 20 bp, synthetic construct
  source 1..20: mol_type = other DNA
aagcaagcgtctaaaacttt

SEQ ID NO: 73138 - DNA, 20 bp, synthetic construct
  source 1..20: mol_type = other DNA
caagcaagcgtctaaaactt

SEQ ID NO: 73139 - DNA, 20 bp, synthetic construct
  source 1..20: mol_type = other DNA
gcaagcaagcgtctaaaact

SEQ ID NO: 73140 - DNA, 20 bp, synthetic construct
  source 1..20: mol_type = other DNA
agcaagcaagcgtctaaaac

SEQ ID NO: 73141 - DNA, 20 bp, synthetic construct
  source 1..20: mol_type = other DNA
aagcaagcaagcgtctaaaa

SEQ ID NO: 73142 - DNA, 20 bp, synthetic construct
  source 1..20: mol_type = other DNA
aaagcaagcaagcgtctaaa

SEQ ID NO: 73143 - DNA, 20 bp, synthetic construct
  source 1..20: mol_type = other DNA
aaaagcaagcaagcgtctaa

SEQ ID NO: 73144 - DNA, 20 bp, synthetic construct
  source 1..20: mol_type = other DNA
gaaaagcaagcaagcgtcta

SEQ ID NO: 73145 - DNA, 20 bp, synthetic construct
  source 1..20: mol_type = other DNA
ggaaaagcaagcaagcgtct

SEQ ID NO: 73146 - DNA, 20 bp, synthetic construct
  source 1..20: mol_type = other DNA
tggaaaagcaagcaagcgtc

SEQ ID NO: 73147 - DNA, 20 bp, synthetic construct
  source 1..20: mol_type = other DNA
gtggaaaagcaagcaagcgt

SEQ ID NO: 73148 - DNA, 20 bp, synthetic construct
  source 1..20: mol_type = other DNA
tgtggaaaagcaagcaagcg

SEQ ID NO: 73149 - DNA, 20 bp, synthetic construct
  source 1..20: mol_type = other DNA
gtgtggaaaagcaagcaagc

SEQ ID NO: 73150 - DNA, 20 bp, synthetic construct
  source 1..20: mol_type = other DNA
agtgtggaaaagcaagcaag

SEQ ID NO: 73151 - DNA, 20 bp, synthetic construct
  source 1..20: mol_type = other DNA
cagtgtggaaaagcaagcaa

SEQ ID NO: 73152 - DNA, 20 bp, synthetic construct
  source 1..20: mol_type = other DNA
ccagtgtggaaaagcaagca

SEQ ID NO: 73153 - DNA, 20 bp, synthetic construct
  source 1..20: mol_type = other DNA
gccagtgtggaaaagcaagc

SEQ ID NO: 73154 - DNA, 20 bp, synthetic construct
  source 1..20: mol_type = other DNA
agccagtgtggaaaagcaag

SEQ ID NO: 73155 - DNA, 20 bp, synthetic construct
  source 1..20: mol_type = other DNA
gagccagtgtggaaaagcaa

SEQ ID NO: 73156 - DNA, 20 bp, synthetic construct
  source 1..20: mol_type = other DNA
agagccagtgtggaaaagca

SEQ ID NO: 73157 - DNA, 20 bp, synthetic construct
  source 1..20: mol_type = other DNA
aagagccagtgtggaaaagc

SEQ ID NO: 73158 - DNA, 20 bp, synthetic construct
  source 1..20: mol_type = other DNA
taagagccagtgtggaaaag

SEQ ID NO: 73159 - DNA, 20 bp, synthetic construct
  source 1..20: mol_type = other DNA
gtaagagccagtgtggaaaa

SEQ ID NO: 73160 - DNA, 20 bp, synthetic construct
  source 1..20: mol_type = other DNA
agtaagagccagtgtggaaa

SEQ ID NO: 73161 - DNA, 20 bp, synthetic construct
  source 1..20: mol_type = other DNA
aagtaagagccagtgtggaa

SEQ ID NO: 73162 - DNA, 20 bp, synthetic construct
  source 1..20: mol_type = other DNA
caagtaagagccagtgtgga

SEQ ID NO: 73163 - DNA, 20 bp, synthetic construct
  source 1..20: mol_type = other DNA
ccaagtaagagccagtgtgg

SEQ ID NO: 73164 - DNA, 20 bp, synthetic construct
  source 1..20: mol_type = other DNA
cccaagtaagagccagtgtg

SEQ ID NO: 73165 - DNA, 20 bp, synthetic construct
  source 1..20: mol_type = other DNA
ccccaagtaagagccagtgt

SEQ ID NO: 73166 - DNA, 20 bp, synthetic construct
  source 1..20: mol_type = other DNA
tccccaagtaagagccagtg

SEQ ID NO: 73167 - DNA, 20 bp, synthetic construct
  source 1..20: mol_type = other DNA
atccccaagtaagagccagt

SEQ ID NO: 73168 - DNA, 20 bp, synthetic construct
  source 1..20: mol_type = other DNA
gatccccaagtaagagccag

SEQ ID NO: 73169 - DNA, 20 bp, synthetic construct
  source 1..20: mol_type = other DNA
ggatccccaagtaagagcca

SEQ ID NO: 73170 - DNA, 20 bp, synthetic construct
  source 1..20: mol_type = other DNA
aggatccccaagtaagagcc

SEQ ID NO: 73171 - DNA, 20 bp, synthetic construct
  source 1..20: mol_type = other DNA
aaggatccccaagtaagagc

SEQ ID NO: 73172 - DNA, 20 bp, synthetic construct
  source 1..20: mol_type = other DNA
aaaggatccccaagtaagag

SEQ ID NO: 73173 - DNA, 20 bp, synthetic construct
  source 1..20: mol_type = other DNA
aaaaggatccccaagtaaga

SEQ ID NO: 73174 - DNA, 20 bp, synthetic construct
  source 1..20: mol_type = other DNA
taaaaggatccccaagtaag

SEQ ID NO: 73175 - DNA, 20 bp, synthetic construct
  source 1..20: mol_type = other DNA
ctaaaaggatccccaagtaa

SEQ ID NO: 73176 - DNA, 20 bp, synthetic construct
  source 1..20: mol_type = other DNA
tctaaaaggatccccaagta

SEQ ID NO: 73177 - DNA, 20 bp, synthetic construct
  source 1..20: mol_type = other DNA
ttctaaaaggatccccaagt

SEQ ID NO: 73178 - DNA, 20 bp, synthetic construct
  source 1..20: mol_type = other DNA
tttctaaaaggatccccaag

SEQ ID NO: 73179 - DNA, 20 bp, synthetic construct
  source 1..20: mol_type = other DNA
atttctaaaaggatccccaa

SEQ ID NO: 73180 - DNA, 20 bp, synthetic construct
  source 1..20: mol_type = other DNA
aatttctaaaaggatcccca

SEQ ID NO: 73181 - DNA, 20 bp, synthetic construct
  source 1..20: mol_type = other DNA
aaatttctaaaaggatcccc

SEQ ID NO: 73182 - DNA, 20 bp, synthetic construct
  source 1..20: mol_type = other DNA
caaatttctaaaaggatccc

SEQ ID NO: 73183 - DNA, 20 bp, synthetic construct
  source 1..20: mol_type = other DNA
acaaatttctaaaaggatcc

SEQ ID NO: 73184 - DNA, 20 bp, synthetic construct
  source 1..20: mol_type = other DNA
aacaaatttctaaaaggatc

SEQ ID NO: 73185 - DNA, 20 bp, synthetic construct
  source 1..20: mol_type = other DNA
aaacaaatttctaaaaggat

SEQ ID NO: 73186 - DNA, 20 bp, synthetic construct
  source 1..20: mol_type = other DNA
taaacaaatttctaaaagga

SEQ ID NO: 73187 - DNA, 20 bp, synthetic construct
  source 1..20: mol_type = other DNA
ctaaacaaatttctaaaagg

SEQ ID NO: 73188 - DNA, 20 bp, synthetic construct
  source 1..20: mol_type = other DNA
tctaaacaaatttctaaaag

SEQ ID NO: 73189 - DNA, 20 bp, synthetic construct
  source 1..20: mol_type = other DNA
ttctaaacaaatttctaaaa

SEQ ID NO: 73190 - DNA, 20 bp, synthetic construct
  source 1..20: mol_type = other DNA
attctaaacaaatttctaaa

SEQ ID NO: 73191 - DNA, 20 bp, synthetic construct
  source 1..20: mol_type = other DNA
tattctaaacaaatttctaa

SEQ ID NO: 73192 - DNA, 20 bp, synthetic construct
  source 1..20: mol_type = other DNA
ttattctaaacaaatttcta

SEQ ID NO: 73193 - DNA, 20 bp, synthetic construct
  source 1..20: mol_type = other DNA
attattctaaacaaatttct

SEQ ID NO: 73194 - DNA, 20 bp, synthetic construct
  source 1..20: mol_type = other DNA
tattattctaaacaaatttc

SEQ ID NO: 73195 - DNA, 20 bp, synthetic construct
  source 1..20: mol_type = other DNA
gtattattctaaacaaattt

SEQ ID NO: 73196 - DNA, 20 bp, synthetic construct
  source 1..20: mol_type = other DNA
agtattattctaaacaaatt

SEQ ID NO: 73197 - DNA, 20 bp, synthetic construct
  source 1..20: mol_type = other DNA
cagtattattctaaacaaat

SEQ ID NO: 73198 - DNA, 20 bp, synthetic construct
  source 1..20: mol_type = other DNA
acagtattattctaaacaaa

SEQ ID NO: 73199 - DNA, 20 bp, synthetic construct
  source 1..20: mol_type = other DNA
tacagtattattctaaacaa

SEQ ID NO: 73200 - DNA, 20 bp, synthetic construct
  source 1..20: mol_type = other DNA
ttacagtattattctaaaca

SEQ ID NO: 73201 - DNA, 20 bp, synthetic construct
  source 1..20: mol_type = other DNA
tttacagtattattctaaac

SEQ ID NO: 73202 - DNA, 20 bp, synthetic construct
  source 1..20: mol_type = other DNA
ttttacagtattattctaaa

SEQ ID NO: 73203 - DNA, 20 bp, synthetic construct
  source 1..20: mol_type = other DNA
tttttacagtattattctaa

SEQ ID NO: 73204 - DNA, 20 bp, synthetic construct
  source 1..20: mol_type = other DNA
gtttttacagtattattcta

SEQ ID NO: 73205 - DNA, 20 bp, synthetic construct
  source 1..20: mol_type = other DNA
tgtttttacagtattattct

SEQ ID NO: 73206 - DNA, 20 bp, synthetic construct
  source 1..20: mol_type = other DNA
atgtttttacagtattattc

SEQ ID NO: 73207 - DNA, 20 bp, synthetic construct
  source 1..20: mol_type = other DNA
tatgtttttacagtattatt

SEQ ID NO: 73208 - DNA, 20 bp, synthetic construct
  source 1..20: mol_type = other DNA
atatgtttttacagtattat

SEQ ID NO: 73209 - DNA, 20 bp, synthetic construct
  source 1..20: mol_type = other DNA
aatatgtttttacagtatta

SEQ ID NO: 73210 - DNA, 20 bp, synthetic construct
  source 1..20: mol_type = other DNA
aaatatgtttttacagtatt

SEQ ID NO: 73211 - DNA, 20 bp, synthetic construct
  source 1..20: mol_type = other DNA
taaatatgtttttacagtat

SEQ ID NO: 73212 - DNA, 20 bp, synthetic construct
  source 1..20: mol_type = other DNA
ttaaatatgtttttacagta

SEQ ID NO: 73213 - DNA, 20 bp, synthetic construct
  source 1..20: mol_type = other DNA
cttaaatatgtttttacagt

SEQ ID NO: 73214 - DNA, 20 bp, synthetic construct
  source 1..20: mol_type = other DNA
gcttaaatatgtttttacag

SEQ ID NO: 73215 - DNA, 20 bp, synthetic construct
  source 1..20: mol_type = other DNA
agcttaaatatgtttttaca

SEQ ID NO: 73216 - DNA, 20 bp, synthetic construct
  source 1..20: mol_type = other DNA
tagcttaaatatgtttttac

SEQ ID NO: 73217 - DNA, 20 bp, synthetic construct
  source 1..20: mol_type = other DNA
gtagcttaaatatgttttta

SEQ ID NO: 73218 - DNA, 20 bp, synthetic construct
  source 1..20: mol_type = other DNA
agtagcttaaatatgttttt

SEQ ID NO: 73219 - DNA, 20 bp, synthetic construct
  source 1..20: mol_type = other DNA
aagtagcttaaatatgtttt

SEQ ID NO: 73220 - DNA, 20 bp, synthetic construct
  source 1..20: mol_type = other DNA
aaagtagcttaaatatgttt

SEQ ID NO: 73221 - DNA, 20 bp, synthetic construct
  source 1..20: mol_type = other DNA
caaagtagcttaaatatgtt

SEQ ID NO: 73222 - DNA, 20 bp, synthetic construct
  source 1..20: mol_type = other DNA
acaaagtagcttaaatatgt

SEQ ID NO: 73223 - DNA, 20 bp, synthetic construct
  source 1..20: mol_type = other DNA
cacaaagtagcttaaatatg

SEQ ID NO: 73224 - DNA, 20 bp, synthetic construct
  source 1..20: mol_type = other DNA
acacaaagtagcttaaatat

SEQ ID NO: 73225 - DNA, 20 bp, synthetic construct
  source 1..20: mol_type = other DNA
cacacaaagtagcttaaata

SEQ ID NO: 73226 - DNA, 20 bp, synthetic construct
  source 1..20: mol_type = other DNA
acacacaaagtagcttaaat

SEQ ID NO: 73227 - DNA, 20 bp, synthetic construct
  source 1..20: mol_type = other DNA
tacacacaaagtagcttaaa

SEQ ID NO: 73228 - DNA, 20 bp, synthetic construct
  source 1..20: mol_type = other DNA
gtacacacaaagtagcttaa

SEQ ID NO: 73229 - DNA, 20 bp, synthetic construct
  source 1..20: mol_type = other DNA
tgtacacacaaagtagctta

SEQ ID NO: 73230 - DNA, 20 bp, synthetic construct
  source 1..20: mol_type = other DNA
atgtacacacaaagtagctt

SEQ ID NO: 73231 - DNA, 20 bp, synthetic construct
  source 1..20: mol_type = other DNA
aatgtacacacaaagtagct

SEQ ID NO: 73232 - DNA, 20 bp, synthetic construct
  source 1..20: mol_type = other DNA
aaatgtacacacaaagtagc

SEQ ID NO: 73233 - DNA, 20 bp, synthetic construct
  source 1..20: mol_type = other DNA
caaatgtacacacaaagtag

SEQ ID NO: 73234 - DNA, 20 bp, synthetic construct
  source 1..20: mol_type = other DNA
ccaaatgtacacacaaagta

SEQ ID NO: 73235 - DNA, 20 bp, synthetic construct
  source 1..20: mol_type = other DNA
cccaaatgtacacacaaagt

SEQ ID NO: 73236 - DNA, 20 bp, synthetic construct
  source 1..20: mol_type = other DNA
tcccaaatgtacacacaaag

SEQ ID NO: 73237 - DNA, 20 bp, synthetic construct
  source 1..20: mol_type = other DNA
atcccaaatgtacacacaaa

SEQ ID NO: 73238 - DNA, 20 bp, synthetic construct
  source 1..20: mol_type = other DNA
gatcccaaatgtacacacaa

SEQ ID NO: 73239 - DNA, 20 bp, synthetic construct
  source 1..20: mol_type = other DNA
agatcccaaatgtacacaca

SEQ ID NO: 73240 - DNA, 20 bp, synthetic construct
  source 1..20: mol_type = other DNA
aagatcccaaatgtacacac

SEQ ID NO: 73241 - DNA, 20 bp, synthetic construct
  source 1..20: mol_type = other DNA
aaagatcccaaatgtacaca

SEQ ID NO: 73242 - DNA, 20 bp, synthetic construct
  source 1..20: mol_type = other DNA
aaaagatcccaaatgtacac

SEQ ID NO: 73243 - DNA, 20 bp, synthetic construct
  source 1..20: mol_type = other DNA
caaaagatcccaaatgtaca

SEQ ID NO: 73244 - DNA, 20 bp, synthetic construct
  source 1..20: mol_type = other DNA
ccaaaagatcccaaatgtac

SEQ ID NO: 73245 - DNA, 20 bp, synthetic construct
  source 1..20: mol_type = other DNA
accaaaagatcccaaatgta

SEQ ID NO: 73246 - DNA, 20 bp, synthetic construct
  source 1..20: mol_type = other DNA
aaccaaaagatcccaaatgt

SEQ ID NO: 73247 - DNA, 20 bp, synthetic construct
  source 1..20: mol_type = other DNA
aaaccaaaagatcccaaatg

SEQ ID NO: 73248 - DNA, 20 bp, synthetic construct
  source 1..20: mol_type = other DNA
caaaccaaaagatcccaaat

SEQ ID NO: 73249 - DNA, 20 bp, synthetic construct
  source 1..20: mol_type = other DNA
tcaaaccaaaagatcccaaa

SEQ ID NO: 73250 - DNA, 20 bp, synthetic construct
  source 1..20: mol_type = other DNA
ttcaaaccaaaagatcccaa

SEQ ID NO: 73251 - DNA, 20 bp, synthetic construct
  source 1..20: mol_type = other DNA
cttcaaaccaaaagatccca

SEQ ID NO: 73252 - DNA, 20 bp, synthetic construct
  source 1..20: mol_type = other DNA
tcttcaaaccaaaagatccc

SEQ ID NO: 73253 - DNA, 20 bp, synthetic construct
  source 1..20: mol_type = other DNA
gtcttcaaaccaaaagatcc

SEQ ID NO: 73254 - DNA, 20 bp, synthetic construct
  source 1..20: mol_type = other DNA
cgtcttcaaaccaaaagatc

SEQ ID NO: 73255 - DNA, 20 bp, synthetic construct
  source 1..20: mol_type = other DNA
ccgtcttcaaaccaaaagat

SEQ ID NO: 73256 - DNA, 20 bp, synthetic construct
  source 1..20: mol_type = other DNA
gccgtcttcaaaccaaaaga

SEQ ID NO: 73257 - DNA, 20 bp, synthetic construct
  source 1..20: mol_type = other DNA
agccgtcttcaaaccaaaag

SEQ ID NO: 73258 - DNA, 20 bp, synthetic construct
  source 1..20: mol_type = other DNA
aagccgtcttcaaaccaaaa

SEQ ID NO: 73259 - DNA, 20 bp, synthetic construct
  source 1..20: mol_type = other DNA
caagccgtcttcaaaccaaa

SEQ ID NO: 73260 - DNA, 20 bp, synthetic construct
  source 1..20: mol_type = other DNA
tcaagccgtcttcaaaccaa

SEQ ID NO: 73261 - DNA, 20 bp, synthetic construct
  source 1..20: mol_type = other DNA
gtcaagccgtcttcaaacca

SEQ ID NO: 73262 - DNA, 20 bp, synthetic construct
  source 1..20: mol_type = other DNA
agtcaagccgtcttcaaacc

SEQ ID NO: 73263 - DNA, 20 bp, synthetic construct
  source 1..20: mol_type = other DNA
gagtcaagccgtcttcaaac

SEQ ID NO: 73264 - DNA, 20 bp, synthetic construct
  source 1..20: mol_type = other DNA
tgagtcaagccgtcttcaaa

SEQ ID NO: 73265 - DNA, 20 bp, synthetic construct
  source 1..20: mol_type = other DNA
ttgagtcaagccgtcttcaa

SEQ ID NO: 73266 - DNA, 20 bp, synthetic construct
  source 1..20: mol_type = other DNA
cttgagtcaagccgtcttca

SEQ ID NO: 73267 - DNA, 20 bp, synthetic construct
  source 1..20: mol_type = other DNA
tcttgagtcaagccgtcttc

SEQ ID NO: 73268 - DNA, 20 bp, synthetic construct
  source 1..20: mol_type = other DNA
gtcttgagtcaagccgtctt

SEQ ID NO: 73269 - DNA, 20 bp, synthetic construct
  source 1..20: mol_type = other DNA
agtcttgagtcaagccgtct

SEQ ID NO: 73270 - DNA, 20 bp, synthetic construct
  source 1..20: mol_type = other DNA
aagtcttgagtcaagccgtc

SEQ ID NO: 73271 - DNA, 20 bp, synthetic construct
  source 1..20: mol_type = other DNA
aaagtcttgagtcaagccgt

SEQ ID NO: 73272 - DNA, 20 bp, synthetic construct
  source 1..20: mol_type = other DNA
gaaagtcttgagtcaagccg

SEQ ID NO: 73273 - DNA, 20 bp, synthetic construct
  source 1..20: mol_type = other DNA
agaaagtcttgagtcaagcc

SEQ ID NO: 73274 - DNA, 20 bp, synthetic construct
  source 1..20: mol_type = other DNA
tagaaagtcttgagtcaagc

SEQ ID NO: 73275 - DNA, 20 bp, synthetic construct
  source 1..20: mol_type = other DNA
ttagaaagtcttgagtcaag

SEQ ID NO: 73276 - DNA, 20 bp, synthetic construct
  source 1..20: mol_type = other DNA
tttagaaagtcttgagtcaa

SEQ ID NO: 73277 - DNA, 20 bp, synthetic construct
  source 1..20: mol_type = other DNA
atttagaaagtcttgagtca

SEQ ID NO: 73278 - DNA, 20 bp, synthetic construct
  source 1..20: mol_type = other DNA
tatttagaaagtcttgagtc

SEQ ID NO: 73279 - DNA, 20 bp, synthetic construct
  source 1..20: mol_type = other DNA
atatttagaaagtcttgagt

SEQ ID NO: 73280 - DNA, 20 bp, synthetic construct
  source 1..20: mol_type = other DNA
aatatttagaaagtcttgag

SEQ ID NO: 73281 - DNA, 20 bp, synthetic construct
  source 1..20: mol_type = other DNA
aaatatttagaaagtcttga

SEQ ID NO: 73282 - DNA, 20 bp, synthetic construct
  source 1..20: mol_type = other DNA
aaaatatttagaaagtcttg

SEQ ID NO: 73283 - DNA, 20 bp, synthetic construct
  source 1..20: mol_type = other DNA
gaaaatatttagaaagtctt

SEQ ID NO: 73284 - DNA, 20 bp, synthetic construct
  source 1..20: mol_type = other DNA
tgaaaatatttagaaagtct

SEQ ID NO: 73285 - DNA, 20 bp, synthetic construct
  source 1..20: mol_type = other DNA
gtgaaaatatttagaaagtc

SEQ ID NO: 73286 - DNA, 20 bp, synthetic construct
  source 1..20: mol_type = other DNA
tgtgaaaatatttagaaagt

SEQ ID NO: 73287 - DNA, 20 bp, synthetic construct
  source 1..20: mol_type = other DNA
gtgtgaaaatatttagaaag

SEQ ID NO: 73288 - DNA, 20 bp, synthetic construct
  source 1..20: mol_type = other DNA
tgtgtgaaaatatttagaaa

SEQ ID NO: 73289 - DNA, 20 bp, synthetic construct
  source 1..20: mol_type = other DNA
gtgtgtgaaaatatttagaa

SEQ ID NO: 73290 - DNA, 20 bp, synthetic construct
  source 1..20: mol_type = other DNA
tgtgtgtgaaaatatttaga

SEQ ID NO: 73291 - DNA, 20 bp, synthetic construct
  source 1..20: mol_type = other DNA
gtgtgtgtgaaaatatttag

SEQ ID NO: 73292 - DNA, 20 bp, synthetic construct
  source 1..20: mol_type = other DNA
tgtgtgtgtgaaaatattta

SEQ ID NO: 73293 - DNA, 20 bp, synthetic construct
  source 1..20: mol_type = other DNA
gtgtgtgtgtgaaaatattt

SEQ ID NO: 73294 - DNA, 20 bp, synthetic construct
  source 1..20: mol_type = other DNA
tgtgtgtgtgtgaaaatatt

SEQ ID NO: 73295 - DNA, 20 bp, synthetic construct
  source 1..20: mol_type = other DNA
gtgtgtgtgtgtgaaaatat

SEQ ID NO: 73296 - DNA, 20 bp, synthetic construct
  source 1..20: mol_type = other DNA
tgtgtgtgtgtgtgaaaata

SEQ ID NO: 73297 - DNA, 20 bp, synthetic construct
  source 1..20: mol_type = other DNA
atgtgtgtgtgtgtgaaaat

SEQ ID NO: 73298 - DNA, 20 bp, synthetic construct
  source 1..20: mol_type = other DNA
tatgtgtgtgtgtgtgaaaa

SEQ ID NO: 73299 - DNA, 20 bp, synthetic construct
  source 1..20: mol_type = other DNA
gtatgtgtgtgtgtgtgaaa

SEQ ID NO: 73300 - DNA, 20 bp, synthetic construct
  source 1..20: mol_type = other DNA
ggtatgtgtgtgtgtgtgaa

SEQ ID NO: 73301 - DNA, 20 bp, synthetic construct
  source 1..20: mol_type = other DNA
gggtatgtgtgtgtgtgtga

SEQ ID NO: 73302 - DNA, 20 bp, synthetic construct
  source 1..20: mol_type = other DNA
agggtatgtgtgtgtgtgtg

SEQ ID NO: 73303 - DNA, 20 bp, synthetic construct
  source 1..20: mol_type = other DNA
cagggtatgtgtgtgtgtgt

SEQ ID NO: 73304 - DNA, 20 bp, synthetic construct
  source 1..20: mol_type = other DNA
acagggtatgtgtgtgtgtg

SEQ ID NO: 73305 - DNA, 20 bp, synthetic construct
  source 1..20: mol_type = other DNA
tacagggtatgtgtgtgtgt

SEQ ID NO: 73306 - DNA, 20 bp, synthetic construct
  source 1..20: mol_type = other DNA
ctacagggtatgtgtgtgtg

SEQ ID NO: 73307 - DNA, 20 bp, synthetic construct
  source 1..20: mol_type = other DNA
actacagggtatgtgtgtgt

SEQ ID NO: 73308 - DNA, 20 bp, synthetic construct
  source 1..20: mol_type = other DNA
cactacagggtatgtgtgtg

SEQ ID NO: 73309 - DNA, 20 bp, synthetic construct
  source 1..20: mol_type = other DNA
tcactacagggtatgtgtgt

SEQ ID NO: 73310 - DNA, 20 bp, synthetic construct
  source 1..20: mol_type = other DNA
ctcactacagggtatgtgtg

SEQ ID NO: 73311 - DNA, 20 bp, synthetic construct
  source 1..20: mol_type = other DNA
tctcactacagggtatgtgt

SEQ ID NO: 73312 - DNA, 20 bp, synthetic construct
  source 1..20: mol_type = other DNA
ttctcactacagggtatgtg

SEQ ID NO: 73313 - DNA, 20 bp, synthetic construct
  source 1..20: mol_type = other DNA
tttctcactacagggtatgt

SEQ ID NO: 73314 - DNA, 20 bp, synthetic construct
  source 1..20: mol_type = other DNA
ttttctcactacagggtatg

SEQ ID NO: 73315 - DNA, 20 bp, synthetic construct
  source 1..20: mol_type = other DNA
tttttctcactacagggtat

SEQ ID NO: 73316 - DNA, 20 bp, synthetic construct
  source 1..20: mol_type = other DNA
ttttttctcactacagggta

SEQ ID NO: 73317 - DNA, 20 bp, synthetic construct
  source 1..20: mol_type = other DNA
tttttttctcactacagggt

SEQ ID NO: 73318 - DNA, 20 bp, synthetic construct
  source 1..20: mol_type = other DNA
atttttttctcactacaggg

SEQ ID NO: 73319 - DNA, 20 bp, synthetic construct
  source 1..20: mol_type = other DNA
gatttttttctcactacagg

SEQ ID NO: 73320 - DNA, 20 bp, synthetic construct
  source 1..20: mol_type = other DNA
ggatttttttctcactacag

SEQ ID NO: 73321 - DNA, 20 bp, synthetic construct
  source 1..20: mol_type = other DNA
cggatttttttctcactaca

SEQ ID NO: 73322 - DNA, 20 bp, synthetic construct
  source 1..20: mol_type = other DNA
acggatttttttctcactac

SEQ ID NO: 73323 - DNA, 20 bp, synthetic construct
  source 1..20: mol_type = other DNA
aacggatttttttctcacta

SEQ ID NO: 73324 - DNA, 20 bp, synthetic construct
  source 1..20: mol_type = other DNA
aaacggatttttttctcact

SEQ ID NO: 73325 - DNA, 20 bp, synthetic construct
  source 1..20: mol_type = other DNA
taaacggatttttttctcac

SEQ ID NO: 73326 - DNA, 20 bp, synthetic construct
  source 1..20: mol_type = other DNA
ataaacggatttttttctca

SEQ ID NO: 73327 - DNA, 20 bp, synthetic construct
  source 1..20: mol_type = other DNA
tataaacggatttttttctc

SEQ ID NO: 73328 - DNA, 20 bp, synthetic construct
  source 1..20: mol_type = other DNA
atataaacggatttttttct

SEQ ID NO: 73329 - DNA, 20 bp, synthetic construct
  source 1..20: mol_type = other DNA
catataaacggatttttttc

SEQ ID NO: 73330 - DNA, 20 bp, synthetic construct
  source 1..20: mol_type = other DNA
ccatataaacggattttttt

SEQ ID NO: 73331 - DNA, 20 bp, synthetic construct
  source 1..20: mol_type = other DNA
accatataaacggatttttt

SEQ ID NO: 73332 - DNA, 20 bp, synthetic construct
  source 1..20: mol_type = other DNA
aaccatataaacggattttt

SEQ ID NO: 73333 - DNA, 20 bp, synthetic construct
  source 1..20: mol_type = other DNA
gaaccatataaacggatttt

SEQ ID NO: 73334 - DNA, 20 bp, synthetic construct
  source 1..20: mol_type = other DNA
agaaccatataaacggattt

SEQ ID NO: 73335 - DNA, 20 bp, synthetic construct
  source 1..20: mol_type = other DNA
tagaaccatataaacggatt

SEQ ID NO: 73336 - DNA, 20 bp, synthetic construct
  source 1..20: mol_type = other DNA
atagaaccatataaacggat

SEQ ID NO: 73337 - DNA, 20 bp, synthetic construct
  source 1..20: mol_type = other DNA
tatagaaccatataaacgga

SEQ ID NO: 73338 - DNA, 20 bp, synthetic construct
  source 1..20: mol_type = other DNA
ttatagaaccatataaacgg

SEQ ID NO: 73339 - DNA, 20 bp, synthetic construct
  source 1..20: mol_type = other DNA
tttatagaaccatataaacg

SEQ ID NO: 73340 - DNA, 20 bp, synthetic construct
  source 1..20: mol_type = other DNA
ttttatagaaccatataaac

SEQ ID NO: 73341 - DNA, 20 bp, synthetic construct
  source 1..20: mol_type = other DNA
tttttatagaaccatataaa

SEQ ID NO: 73342 - DNA, 20 bp, synthetic construct
  source 1..20: mol_type = other DNA
atttttatagaaccatataa

SEQ ID NO: 73343 - DNA, 20 bp, synthetic construct
  source 1..20: mol_type = other DNA
gatttttatagaaccatata

SEQ ID NO: 73344 - DNA, 20 bp, synthetic construct
  source 1..20: mol_type = other DNA
agatttttatagaaccatat

SEQ ID NO: 73345 - DNA, 20 bp, synthetic construct
  source 1..20: mol_type = other DNA
gagatttttatagaaccata

SEQ ID NO: 73346 - DNA, 20 bp, synthetic construct
  source 1..20: mol_type = other DNA
agagatttttatagaaccat

SEQ ID NO: 73347 - DNA, 20 bp, synthetic construct
  source 1..20: mol_type = other DNA
tagagatttttatagaacca

SEQ ID NO: 73348 - DNA, 20 bp, synthetic construct
  source 1..20: mol_type = other DNA
ctagagatttttatagaacc

SEQ ID NO: 73349 - DNA, 20 bp, synthetic construct
  source 1..20: mol_type = other DNA
gctagagatttttatagaac

SEQ ID NO: 73350 - DNA, 20 bp, synthetic construct
  source 1..20: mol_type = other DNA
agctagagatttttatagaa

SEQ ID NO: 73351 - DNA, 20 bp, synthetic construct
  source 1..20: mol_type = other DNA
cagctagagatttttataga

SEQ ID NO: 73352 - DNA, 20 bp, synthetic construct
  source 1..20: mol_type = other DNA
gcagctagagatttttatag

SEQ ID NO: 73353 - DNA, 20 bp, synthetic construct
  source 1..20: mol_type = other DNA
agcagctagagatttttata

SEQ ID NO: 73354 - DNA, 20 bp, synthetic construct
  source 1..20: mol_type = other DNA
aagcagctagagatttttat

SEQ ID NO: 73355 - DNA, 20 bp, synthetic construct
  source 1..20: mol_type = other DNA
gaagcagctagagattttta

SEQ ID NO: 73356 - DNA, 20 bp, synthetic construct
  source 1..20: mol_type = other DNA
cgaagcagctagagattttt

SEQ ID NO: 73357 - DNA, 20 bp, synthetic construct
  source 1..20: mol_type = other DNA
tcgaagcagctagagatttt

SEQ ID NO: 73358 - DNA, 20 bp, synthetic construct
  source 1..20: mol_type = other DNA
ctcgaagcagctagagattt

SEQ ID NO: 73359 - DNA, 20 bp, synthetic construct
  source 1..20: mol_type = other DNA
gctcgaagcagctagagatt

SEQ ID NO: 73360 - DNA, 20 bp, synthetic construct
  source 1..20: mol_type = other DNA
agctcgaagcagctagagat

SEQ ID NO: 73361 - DNA, 20 bp, synthetic construct
  source 1..20: mol_type = other DNA
aagctcgaagcagctagaga

SEQ ID NO: 73362 - DNA, 20 bp, synthetic construct
  source 1..20: mol_type = other DNA
aaagctcgaagcagctagag

SEQ ID NO: 73363 - DNA, 20 bp, synthetic construct
  source 1..20: mol_type = other DNA
taaagctcgaagcagctaga

SEQ ID NO: 73364 - DNA, 20 bp, synthetic construct
  source 1..20: mol_type = other DNA
ttaaagctcgaagcagctag

SEQ ID NO: 73365 - DNA, 20 bp, synthetic construct
  source 1..20: mol_type = other DNA
attaaagctcgaagcagcta

SEQ ID NO: 73366 - DNA, 20 bp, synthetic construct
  source 1..20: mol_type = other DNA
aattaaagctcgaagcagct

SEQ ID NO: 73367 - DNA, 20 bp, synthetic construct
  source 1..20: mol_type = other DNA
aaattaaagctcgaagcagc

SEQ ID NO: 73368 - DNA, 20 bp, synthetic construct
  source 1..20: mol_type = other DNA
gaaattaaagctcgaagcag

SEQ ID NO: 73369 - DNA, 20 bp, synthetic construct
  source 1..20: mol_type = other DNA
agaaattaaagctcgaagca

SEQ ID NO: 73370 - DNA, 20 bp, synthetic construct
  source 1..20: mol_type = other DNA
aagaaattaaagctcgaagc

SEQ ID NO: 73371 - DNA, 20 bp, synthetic construct
  source 1..20: mol_type = other DNA
caagaaattaaagctcgaag

SEQ ID NO: 73372 - DNA, 20 bp, synthetic construct
  source 1..20: mol_type = other DNA
tcaagaaattaaagctcgaa

SEQ ID NO: 73373 - DNA, 20 bp, synthetic construct
  source 1..20: mol_type = other DNA
ttcaagaaattaaagctcga

SEQ ID NO: 73374 - DNA, 20 bp, synthetic construct
  source 1..20: mol_type = other DNA
attcaagaaattaaagctcg

SEQ ID NO: 73375 - DNA, 20 bp, synthetic construct
  source 1..20: mol_type = other DNA
gattcaagaaattaaagctc

SEQ ID NO: 73376 - DNA, 20 bp, synthetic construct
  source 1..20: mol_type = other DNA
tgattcaagaaattaaagct

SEQ ID NO: 73377 - DNA, 20 bp, synthetic construct
  source 1..20: mol_type = other DNA
ttgattcaagaaattaaagc

SEQ ID NO: 73378 - DNA, 20 bp, synthetic construct
  source 1..20: mol_type = other DNA
tttgattcaagaaattaaag

SEQ ID NO: 73379 - DNA, 20 bp, synthetic construct
  source 1..20: mol_type = other DNA
ttttgattcaagaaattaaa

SEQ ID NO: 73380 - DNA, 20 bp, synthetic construct
  source 1..20: mol_type = other DNA
cttttgattcaagaaattaa

SEQ ID NO: 73381 - DNA, 20 bp, synthetic construct
  source 1..20: mol_type = other DNA
tcttttgattcaagaaatta

SEQ ID NO: 73382 - DNA, 20 bp, synthetic construct
  source 1..20: mol_type = other DNA
ctcttttgattcaagaaatt

SEQ ID NO: 73383 - DNA, 20 bp, synthetic construct
  source 1..20: mol_type = other DNA
actcttttgattcaagaaat

SEQ ID NO: 73384 - DNA, 20 bp, synthetic construct
  source 1..20: mol_type = other DNA
tactcttttgattcaagaaa

SEQ ID NO: 73385 - DNA, 20 bp, synthetic construct
  source 1..20: mol_type = other DNA
atactcttttgattcaagaa

SEQ ID NO: 73386 - DNA, 20 bp, synthetic construct
  source 1..20: mol_type = other DNA
aatactcttttgattcaaga

SEQ ID NO: 73387 - DNA, 20 bp, synthetic construct
  source 1..20: mol_type = other DNA
caatactcttttgattcaag

SEQ ID NO: 73388 - DNA, 20 bp, synthetic construct
  source 1..20: mol_type = other DNA
acaatactcttttgattcaa

SEQ ID NO: 73389 - DNA, 20 bp, synthetic construct
  source 1..20: mol_type = other DNA
aacaatactcttttgattca

SEQ ID NO: 73390 - DNA, 20 bp, synthetic construct
  source 1..20: mol_type = other DNA
aaacaatactcttttgattc

SEQ ID NO: 73391 - DNA, 20 bp, synthetic construct
  source 1..20: mol_type = other DNA
aaaacaatactcttttgatt

SEQ ID NO: 73392 - DNA, 20 bp, synthetic construct
  source 1..20: mol_type = other DNA
aaaaacaatactcttttgat

SEQ ID NO: 73393 - DNA, 20 bp, synthetic construct
  source 1..20: mol_type = other DNA
taaaaacaatactcttttga

SEQ ID NO: 73394 - DNA, 20 bp, synthetic construct
  source 1..20: mol_type = other DNA
ttaaaaacaatactcttttg

SEQ ID NO: 73395 - DNA, 20 bp, synthetic construct
  source 1..20: mol_type = other DNA
attaaaaacaatactctttt

SEQ ID NO: 73396 - DNA, 20 bp, synthetic construct
  source 1..20: mol_type = other DNA
tattaaaaacaatactcttt

SEQ ID NO: 73397 - DNA, 20 bp, synthetic construct
  source 1..20: mol_type = other DNA
gtattaaaaacaatactctt

SEQ ID NO: 73398 - DNA, 20 bp, synthetic construct
  source 1..20: mol_type = other DNA
agtattaaaaacaatactct

SEQ ID NO: 73399 - DNA, 20 bp, synthetic construct
  source 1..20: mol_type = other DNA
cagtattaaaaacaatactc

SEQ ID NO: 73400 - DNA, 20 bp, synthetic construct
  source 1..20: mol_type = other DNA
tcagtattaaaaacaatact

SEQ ID NO: 73401 - DNA, 20 bp, synthetic construct
  source 1..20: mol_type = other DNA
ctcagtattaaaaacaatac

SEQ ID NO: 73402 - DNA, 20 bp, synthetic construct
  source 1..20: mol_type = other DNA
gctcagtattaaaaacaata

SEQ ID NO: 73403 - DNA, 20 bp, synthetic construct
  source 1..20: mol_type = other DNA
agctcagtattaaaaacaat

SEQ ID NO: 73404 - DNA, 20 bp, synthetic construct
  source 1..20: mol_type = other DNA
aagctcagtattaaaaacaa

SEQ ID NO: 73405 - DNA, 20 bp, synthetic construct
  source 1..20: mol_type = other DNA
gaagctcagtattaaaaaca

SEQ ID NO: 73406 - DNA, 20 bp, synthetic construct
  source 1..20: mol_type = other DNA
agaagctcagtattaaaaac

SEQ ID NO: 73407 - DNA, 20 bp, synthetic construct
  source 1..20: mol_type = other DNA
tagaagctcagtattaaaaa

SEQ ID NO: 73408 - DNA, 20 bp, synthetic construct
  source 1..20: mol_type = other DNA
atagaagctcagtattaaaa

SEQ ID NO: 73409 - DNA, 20 bp, synthetic construct
  source 1..20: mol_type = other DNA
gatagaagctcagtattaaa

SEQ ID NO: 73410 - DNA, 20 bp, synthetic construct
  source 1..20: mol_type = other DNA
agatagaagctcagtattaa

SEQ ID NO: 73411 - DNA, 20 bp, synthetic construct
  source 1..20: mol_type = other DNA
tagatagaagctcagtatta

SEQ ID NO: 73412 - DNA, 20 bp, synthetic construct
  source 1..20: mol_type = other DNA
ttagatagaagctcagtatt

SEQ ID NO: 73413 - DNA, 20 bp, synthetic construct
  source 1..20: mol_type = other DNA
tttagatagaagctcagtat

SEQ ID NO: 73414 - DNA, 20 bp, synthetic construct
  source 1..20: mol_type = other DNA
atttagatagaagctcagta

SEQ ID NO: 73415 - DNA, 20 bp, synthetic construct
  source 1..20: mol_type = other DNA
tatttagatagaagctcagt

SEQ ID NO: 73416 - DNA, 20 bp, synthetic construct
  source 1..20: mol_type = other DNA
ttatttagatagaagctcag

SEQ ID NO: 73417 - DNA, 20 bp, synthetic construct
  source 1..20: mol_type = other DNA
tttatttagatagaagctca

SEQ ID NO: 73418 - DNA, 20 bp, synthetic construct
  source 1..20: mol_type = other DNA
atttatttagatagaagctc

SEQ ID NO: 73419 - DNA, 20 bp, synthetic construct
  source 1..20: mol_type = other DNA
catttatttagatagaagct

SEQ ID NO: 73420 - DNA, 20 bp, synthetic construct
  source 1..20: mol_type = other DNA
gcatttatttagatagaagc

SEQ ID NO: 73421 - DNA, 20 bp, synthetic construct
  source 1..20: mol_type = other DNA
agcatttatttagatagaag

SEQ ID NO: 73422 - DNA, 20 bp, synthetic construct
  source 1..20: mol_type = other DNA
aagcatttatttagatagaa

SEQ ID NO: 73423 - DNA, 20 bp, synthetic construct
  source 1..20: mol_type = other DNA
aaagcatttatttagataga

SEQ ID NO: 73424 - DNA, 20 bp, synthetic construct
  source 1..20: mol_type = other DNA
taaagcatttatttagatag

SEQ ID NO: 73425 - DNA, 20 bp, synthetic construct
  source 1..20: mol_type = other DNA
ataaagcatttatttagata

SEQ ID NO: 73426 - DNA, 20 bp, synthetic construct
  source 1..20: mol_type = other DNA
aataaagcatttatttagat

SEQ ID NO: 73427 - DNA, 20 bp, synthetic construct
  source 1..20: mol_type = other DNA
aaataaagcatttatttaga

SEQ ID NO: 73428 - DNA, 20 bp, synthetic construct
  source 1..20: mol_type = other DNA
taaataaagcatttatttag

SEQ ID NO: 73429 - DNA, 20 bp, synthetic construct
  source 1..20: mol_type = other DNA
gtaaataaagcatttattta

SEQ ID NO: 73430 - DNA, 20 bp, synthetic construct
  source 1..20: mol_type = other DNA
agtaaataaagcatttattt

SEQ ID NO: 73431 - DNA, 20 bp, synthetic construct
  source 1..20: mol_type = other DNA
aagtaaataaagcatttatt

SEQ ID NO: 73432 - DNA, 20 bp, synthetic construct
  source 1..20: mol_type = other DNA
taagtaaataaagcatttat

SEQ ID NO: 73433 - DNA, 20 bp, synthetic construct
  source 1..20: mol_type = other DNA
ttaagtaaataaagcattta

SEQ ID NO: 73434 - DNA, 20 bp, synthetic construct
  source 1..20: mol_type = other DNA
tttaagtaaataaagcattt

SEQ ID NO: 73435 - DNA, 20 bp, synthetic construct
  source 1..20: mol_type = other DNA
atttaagtaaataaagcatt

SEQ ID NO: 73436 - DNA, 20 bp, synthetic construct
  source 1..20: mol_type = other DNA
catttaagtaaataaagcat

SEQ ID NO: 73437 - DNA, 20 bp, synthetic construct
  source 1..20: mol_type = other DNA
acatttaagtaaataaagca

SEQ ID NO: 73438 - DNA, 20 bp, synthetic construct
  source 1..20: mol_type = other DNA
cacatttaagtaaataaagc

SEQ ID NO: 73439 - DNA, 20 bp, synthetic construct
  source 1..20: mol_type = other DNA
acacatttaagtaaataaag

SEQ ID NO: 73440 - DNA, 20 bp, synthetic construct
  source 1..20: mol_type = other DNA
cacacatttaagtaaataaa

SEQ ID NO: 73441 - DNA, 20 bp, synthetic construct
  source 1..20: mol_type = other DNA
gcacacatttaagtaaataa

SEQ ID NO: 73442 - DNA, 20 bp, synthetic construct
  source 1..20: mol_type = other DNA
agcacacatttaagtaaata

SEQ ID NO: 73443 - DNA, 20 bp, synthetic construct
  source 1..20: mol_type = other DNA
aagcacacatttaagtaaat

SEQ ID NO: 73444 - DNA, 20 bp, synthetic construct
  source 1..20: mol_type = other DNA
aaagcacacatttaagtaaa

SEQ ID NO: 73445 - DNA, 20 bp, synthetic construct
  source 1..20: mol_type = other DNA
aaaagcacacatttaagtaa

SEQ ID NO: 73446 - DNA, 20 bp, synthetic construct
  source 1..20: mol_type = other DNA
gaaaagcacacatttaagta

SEQ ID NO: 73447 - DNA, 20 bp, synthetic construct
  source 1..20: mol_type = other DNA
tgaaaagcacacatttaagt

SEQ ID NO: 73448 - DNA, 20 bp, synthetic construct
  source 1..20: mol_type = other DNA
ttgaaaagcacacatttaag

SEQ ID NO: 73449 - DNA, 20 bp, synthetic construct
  source 1..20: mol_type = other DNA
tttgaaaagcacacatttaa

SEQ ID NO: 73450 - DNA, 20 bp, synthetic construct
  source 1..20: mol_type = other DNA
ttttgaaaagcacacattta

SEQ ID NO: 73451 - DNA, 20 bp, synthetic construct
  source 1..20: mol_type = other DNA
tttttgaaaagcacacattt

SEQ ID NO: 73452 - DNA, 20 bp, synthetic construct
  source 1..20: mol_type = other DNA
gtttttgaaaagcacacatt

SEQ ID NO: 73453 - DNA, 20 bp, synthetic construct
  source 1..20: mol_type = other DNA
agtttttgaaaagcacacat

SEQ ID NO: 73454 - DNA, 20 bp, synthetic construct
  source 1..20: mol_type = other DNA
tagtttttgaaaagcacaca

SEQ ID NO: 73455 - DNA, 20 bp, synthetic construct
  source 1..20: mol_type = other DNA
ctagtttttgaaaagcacac

SEQ ID NO: 73456 - DNA, 20 bp, synthetic construct
  source 1..20: mol_type = other DNA
actagtttttgaaaagcaca

SEQ ID NO: 73457 - DNA, 20 bp, synthetic construct
  source 1..20: mol_type = other DNA
tactagtttttgaaaagcac

SEQ ID NO: 73458 - DNA, 20 bp, synthetic construct
  source 1..20: mol_type = other DNA
atactagtttttgaaaagca

SEQ ID NO: 73459 - DNA, 20 bp, synthetic construct
  source 1..20: mol_type = other DNA
catactagtttttgaaaagc

SEQ ID NO: 73460 - DNA, 20 bp, synthetic construct
  source 1..20: mol_type = other DNA
tcatactagtttttgaaaag

SEQ ID NO: 73461 - DNA, 20 bp, synthetic construct
  source 1..20: mol_type = other DNA
atcatactagtttttgaaaa

SEQ ID NO: 73462 - DNA, 20 bp, synthetic construct
  source 1..20: mol_type = other DNA
aatcatactagtttttgaaa

SEQ ID NO: 73463 - DNA, 20 bp, synthetic construct
  source 1..20: mol_type = other DNA
taatcatactagtttttgaa

SEQ ID NO: 73464 - DNA, 20 bp, synthetic construct
  source 1..20: mol_type = other DNA
ttaatcatactagtttttga

SEQ ID NO: 73465 - DNA, 20 bp, synthetic construct
  source 1..20: mol_type = other DNA
cttaatcatactagtttttg

SEQ ID NO: 73466 - DNA, 20 bp, synthetic construct
  source 1..20: mol_type = other DNA
tcttaatcatactagttttt

SEQ ID NO: 73467 - DNA, 20 bp, synthetic construct
  source 1..20: mol_type = other DNA
gtcttaatcatactagtttt

SEQ ID NO: 73468 - DNA, 20 bp, synthetic construct
  source 1..20: mol_type = other DNA
tgtcttaatcatactagttt

SEQ ID NO: 73469 - DNA, 20 bp, synthetic construct
  source 1..20: mol_type = other DNA
atgtcttaatcatactagtt

SEQ ID NO: 73470 - DNA, 20 bp, synthetic construct
  source 1..20: mol_type = other DNA
aatgtcttaatcatactagt

SEQ ID NO: 73471 - DNA, 20 bp, synthetic construct
  source 1..20: mol_type = other DNA
taatgtcttaatcatactag

SEQ ID NO: 73472 - DNA, 20 bp, synthetic construct
  source 1..20: mol_type = other DNA
ttaatgtcttaatcatacta

SEQ ID NO: 73473 - DNA, 20 bp, synthetic construct
  source 1..20: mol_type = other DNA
gttaatgtcttaatcatact

SEQ ID NO: 73474 - DNA, 20 bp, synthetic construct
  source 1..20: mol_type = other DNA
tgttaatgtcttaatcatac

SEQ ID NO: 73475 - DNA, 20 bp, synthetic construct
  source 1..20: mol_type = other DNA
ctgttaatgtcttaatcata

SEQ ID NO: 73476 - DNA, 20 bp, synthetic construct
  source 1..20: mol_type = other DNA
cctgttaatgtcttaatcat

SEQ ID NO: 73477 - DNA, 20 bp, synthetic construct
  source 1..20: mol_type = other DNA
tcctgttaatgtcttaatca

SEQ ID NO: 73478 - DNA, 20 bp, synthetic construct
  source 1..20: mol_type = other DNA
atcctgttaatgtcttaatc

SEQ ID NO: 73479 - DNA, 20 bp, synthetic construct
  source 1..20: mol_type = other DNA
gatcctgttaatgtcttaat

SEQ ID NO: 73480 - DNA, 20 bp, synthetic construct
  source 1..20: mol_type = other DNA
agatcctgttaatgtcttaa

SEQ ID NO: 73481 - DNA, 20 bp, synthetic construct
  source 1..20: mol_type = other DNA
aagatcctgttaatgtctta

SEQ ID NO: 73482 - DNA, 20 bp, synthetic construct
  source 1..20: mol_type = other DNA
taagatcctgttaatgtctt

SEQ ID NO: 73483 - DNA, 20 bp, synthetic construct
  source 1..20: mol_type = other DNA
ctaagatcctgttaatgtct

SEQ ID NO: 73484 - DNA, 20 bp, synthetic construct
  source 1..20: mol_type = other DNA
tctaagatcctgttaatgtc

SEQ ID NO: 73485 - DNA, 20 bp, synthetic construct
  source 1..20: mol_type = other DNA
gtctaagatcctgttaatgt

SEQ ID NO: 73486 - DNA, 20 bp, synthetic construct
  source 1..20: mol_type = other DNA
cgtctaagatcctgttaatg

SEQ ID NO: 73487 - DNA, 20 bp, synthetic construct
  source 1..20: mol_type = other DNA
acgtctaagatcctgttaat

SEQ ID NO: 73488 - DNA, 20 bp, synthetic construct
  source 1..20: mol_type = other DNA
tacgtctaagatcctgttaa

SEQ ID NO: 73489 - DNA, 20 bp, synthetic construct
  source 1..20: mol_type = other DNA
ttacgtctaagatcctgtta

SEQ ID NO: 73490 - DNA, 20 bp, synthetic construct
  source 1..20: mol_type = other DNA
tttacgtctaagatcctgtt

SEQ ID NO: 73491 - DNA, 20 bp, synthetic construct
  source 1..20: mol_type = other DNA
ctttacgtctaagatcctgt

SEQ ID NO: 73492 - DNA, 20 bp, synthetic construct
  source 1..20: mol_type = other DNA
cctttacgtctaagatcctg

SEQ ID NO: 73493 - DNA, 20 bp, synthetic construct
  source 1..20: mol_type = other DNA
tcctttacgtctaagatcct

SEQ ID NO: 73494 - DNA, 20 bp, synthetic construct
  source 1..20: mol_type = other DNA
ttcctttacgtctaagatcc

SEQ ID NO: 73495 - DNA, 20 bp, synthetic construct
  source 1..20: mol_type = other DNA
gttcctttacgtctaagatc

SEQ ID NO: 73496 - DNA, 20 bp, synthetic construct
  source 1..20: mol_type = other DNA
tgttcctttacgtctaagat

SEQ ID NO: 73497 - DNA, 20 bp, synthetic construct
  source 1..20: mol_type = other DNA
ctgttcctttacgtctaaga

SEQ ID NO: 73498 - DNA, 20 bp, synthetic construct
  source 1..20: mol_type = other DNA
actgttcctttacgtctaag

SEQ ID NO: 73499 - DNA, 20 bp, synthetic construct
  source 1..20: mol_type = other DNA
gactgttcctttacgtctaa

SEQ ID NO: 73500 - DNA, 20 bp, synthetic construct
  source 1..20: mol_type = other DNA
ggactgttcctttacgtcta

SEQ ID NO: 73501 - DNA, 20 bp, synthetic construct
  source 1..20: mol_type = other DNA
aggactgttcctttacgtct

SEQ ID NO: 73502 - DNA, 20 bp, synthetic construct
  source 1..20: mol_type = other DNA
caggactgttcctttacgtc

SEQ ID NO: 73503 - DNA, 20 bp, synthetic construct
  source 1..20: mol_type = other DNA
acaggactgttcctttacgt

SEQ ID NO: 73504 - DNA, 20 bp, synthetic construct
  source 1..20: mol_type = other DNA
aacaggactgttcctttacg

SEQ ID NO: 73505 - DNA, 20 bp, synthetic construct
  source 1..20: mol_type = other DNA
caacaggactgttcctttac

SEQ ID NO: 73506 - DNA, 20 bp, synthetic construct
  source 1..20: mol_type = other DNA
gcaacaggactgttccttta

SEQ ID NO: 73507 - DNA, 20 bp, synthetic construct
  source 1..20: mol_type = other DNA
agcaacaggactgttccttt

SEQ ID NO: 73508 - DNA, 20 bp, synthetic construct
  source 1..20: mol_type = other DNA
aagcaacaggactgttcctt

SEQ ID NO: 73509 - DNA, 20 bp, synthetic construct
  source 1..20: mol_type = other DNA
gaagcaacaggactgttcct

SEQ ID NO: 73510 - DNA, 20 bp, synthetic construct
  source 1..20: mol_type = other DNA
agaagcaacaggactgttcc

SEQ ID NO: 73511 - DNA, 20 bp, synthetic construct
  source 1..20: mol_type = other DNA
aagaagcaacaggactgttc

SEQ ID NO: 73512 - DNA, 20 bp, synthetic construct
  source 1..20: mol_type = other DNA
gaagaagcaacaggactgtt

SEQ ID NO: 73513 - DNA, 20 bp, synthetic construct
  source 1..20: mol_type = other DNA
ggaagaagcaacaggactgt

SEQ ID NO: 73514 - DNA, 20 bp, synthetic construct
  source 1..20: mol_type = other DNA
tggaagaagcaacaggactg

SEQ ID NO: 73515 - DNA, 20 bp, synthetic construct
  source 1..20: mol_type = other DNA
ctggaagaagcaacaggact

SEQ ID NO: 73516 - DNA, 20 bp, synthetic construct
  source 1..20: mol_type = other DNA
tctggaagaagcaacaggac

SEQ ID NO: 73517 - DNA, 20 bp, synthetic construct
  source 1..20: mol_type = other DNA
ttctggaagaagcaacagga

SEQ ID NO: 73518 - DNA, 20 bp, synthetic construct
  source 1..20: mol_type = other DNA
cttctggaagaagcaacagg

SEQ ID NO: 73519 - DNA, 20 bp, synthetic construct
  source 1..20: mol_type = other DNA
tcttctggaagaagcaacag

SEQ ID NO: 73520 - DNA, 20 bp, synthetic construct
  source 1..20: mol_type = other DNA
atcttctggaagaagcaaca

SEQ ID NO: 73521 - DNA, 20 bp, synthetic construct
  source 1..20: mol_type = other DNA
tatcttctggaagaagcaac

SEQ ID NO: 73522 - DNA, 20 bp, synthetic construct
  source 1..20: mol_type = other DNA
ttatcttctggaagaagcaa

SEQ ID NO: 73523 - DNA, 20 bp, synthetic construct
  source 1..20: mol_type = other DNA
attatcttctggaagaagca

SEQ ID NO: 73524 - DNA, 20 bp, synthetic construct
  source 1..20: mol_type = other DNA
tattatcttctggaagaagc

SEQ ID NO: 73525 - DNA, 20 bp, synthetic construct
  source 1..20: mol_type = other DNA
atattatcttctggaagaag

SEQ ID NO: 73526 - DNA, 20 bp, synthetic construct
  source 1..20: mol_type = other DNA
catattatcttctggaagaa

SEQ ID NO: 73527 - DNA, 20 bp, synthetic construct
  source 1..20: mol_type = other DNA
tcatattatcttctggaaga

SEQ ID NO: 73528 - DNA, 20 bp, synthetic construct
  source 1..20: mol_type = other DNA
gtcatattatcttctggaag

SEQ ID NO: 73529 - DNA, 20 bp, synthetic construct
  source 1..20: mol_type = other DNA
agtcatattatcttctggaa

SEQ ID NO: 73530 - DNA, 20 bp, synthetic construct
  source 1..20: mol_type = other DNA
gagtcatattatcttctgga

SEQ ID NO: 73531 - DNA, 20 bp, synthetic construct
  source 1..20: mol_type = other DNA
cgagtcatattatcttctgg

SEQ ID NO: 73532 - DNA, 20 bp, synthetic construct
  source 1..20: mol_type = other DNA
acgagtcatattatcttctg

SEQ ID NO: 73533 - DNA, 20 bp, synthetic construct
  source 1..20: mol_type = other DNA
aacgagtcatattatcttct

SEQ ID NO: 73534 - DNA, 20 bp, synthetic construct
  source 1..20: mol_type = other DNA
aaacgagtcatattatcttc

SEQ ID NO: 73535 - DNA, 20 bp, synthetic construct
  source 1..20: mol_type = other DNA
caaacgagtcatattatctt

SEQ ID NO: 73536 - DNA, 20 bp, synthetic construct
  source 1..20: mol_type = other DNA
ccaaacgagtcatattatct

SEQ ID NO: 73537 - DNA, 20 bp, synthetic construct
  source 1..20: mol_type = other DNA
tccaaacgagtcatattatc

SEQ ID NO: 73538 - DNA, 20 bp, synthetic construct
  source 1..20: mol_type = other DNA
ttccaaacgagtcatattat

SEQ ID NO: 73539 - DNA, 20 bp, synthetic construct
  source 1..20: mol_type = other DNA
attccaaacgagtcatatta

SEQ ID NO: 73540 - DNA, 20 bp, synthetic construct
  source 1..20: mol_type = other DNA
aattccaaacgagtcatatt

SEQ ID NO: 73541 - DNA, 20 bp, synthetic construct
  source 1..20: mol_type = other DNA
aaattccaaacgagtcatat

SEQ ID NO: 73542 - DNA, 20 bp, synthetic construct
  source 1..20: mol_type = other DNA
aaaattccaaacgagtcata

SEQ ID NO: 73543 - DNA, 20 bp, synthetic construct
  source 1..20: mol_type = other DNA
gaaaattccaaacgagtcat

SEQ ID NO: 73544 - DNA, 20 bp, synthetic construct
  source 1..20: mol_type = other DNA
ggaaaattccaaacgagtca

SEQ ID NO: 73545 - DNA, 20 bp, synthetic construct
  source 1..20: mol_type = other DNA
aggaaaattccaaacgagtc

SEQ ID NO: 73546 - DNA, 20 bp, synthetic construct
  source 1..20: mol_type = other DNA
taggaaaattccaaacgagt

SEQ ID NO: 73547 - DNA, 20 bp, synthetic construct
  source 1..20: mol_type = other DNA
ataggaaaattccaaacgag

SEQ ID NO: 73548 - DNA, 20 bp, synthetic construct
  source 1..20: mol_type = other DNA
tataggaaaattccaaacga

SEQ ID NO: 73549 - DNA, 20 bp, synthetic construct
  source 1..20: mol_type = other DNA
ctataggaaaattccaaacg

SEQ ID NO: 73550 - DNA, 20 bp, synthetic construct
  source 1..20: mol_type = other DNA
actataggaaaattccaaac

SEQ ID NO: 73551 - DNA, 20 bp, synthetic construct
  source 1..20: mol_type = other DNA
cactataggaaaattccaaa

SEQ ID NO: 73552 - DNA, 20 bp, synthetic construct
  source 1..20: mol_type = other DNA
acactataggaaaattccaa

SEQ ID NO: 73553 - DNA, 20 bp, synthetic construct
  source 1..20: mol_type = other DNA
tacactataggaaaattcca

SEQ ID NO: 73554 - DNA, 20 bp, synthetic construct
  source 1..20: mol_type = other DNA
ctacactataggaaaattcc

SEQ ID NO: 73555 - DNA, 20 bp, synthetic construct
  source 1..20: mol_type = other DNA
actacactataggaaaattc

SEQ ID NO: 73556 - DNA, 20 bp, synthetic construct
  source 1..20: mol_type = other DNA
aactacactataggaaaatt

SEQ ID NO: 73557 - DNA, 20 bp, synthetic construct
  source 1..20: mol_type = other DNA
aaactacactataggaaaat

SEQ ID NO: 73558 - DNA, 20 bp, synthetic construct
  source 1..20: mol_type = other DNA
aaaactacactataggaaaa

SEQ ID NO: 73559 - DNA, 20 bp, synthetic construct
  source 1..20: mol_type = other DNA
aaaaactacactataggaaa

SEQ ID NO: 73560 - DNA, 20 bp, synthetic construct
  source 1..20: mol_type = other DNA
aaaaaactacactataggaa

SEQ ID NO: 73561 - DNA, 20 bp, synthetic construct
  source 1..20: mol_type = other DNA
caaaaaactacactatagga

SEQ ID NO: 73562 - DNA, 20 bp, synthetic construct
  source 1..20: mol_type = other DNA
acaaaaaactacactatagg

SEQ ID NO: 73563 - DNA, 20 bp, synthetic construct
  source 1..20: mol_type = other DNA
gacaaaaaactacactatag

SEQ ID NO: 73564 - DNA, 20 bp, synthetic construct
  source 1..20: mol_type = other DNA
agacaaaaaactacactata

SEQ ID NO: 73565 - DNA, 20 bp, synthetic construct
  source 1..20: mol_type = other DNA
tagacaaaaaactacactat

SEQ ID NO: 73566 - DNA, 20 bp, synthetic construct
  source 1..20: mol_type = other DNA
ctagacaaaaaactacacta

SEQ ID NO: 73567 - DNA, 20 bp, synthetic construct
  source 1..20: mol_type = other DNA
actagacaaaaaactacact

SEQ ID NO: 73568 - DNA, 20 bp, synthetic construct
  source 1..20: mol_type = other DNA
cactagacaaaaaactacac

SEQ ID NO: 73569 - DNA, 20 bp, synthetic construct
  source 1..20: mol_type = other DNA
acactagacaaaaaactaca

SEQ ID NO: 73570 - DNA, 20 bp, synthetic construct
  source 1..20: mol_type = other DNA
aacactagacaaaaaactac

SEQ ID NO: 73571 - DNA, 20 bp, synthetic construct
  source 1..20: mol_type = other DNA
caacactagacaaaaaacta

SEQ ID NO: 73572 - DNA, 20 bp, synthetic construct
  source 1..20: mol_type = other DNA
acaacactagacaaaaaact

SEQ ID NO: 73573 - DNA, 20 bp, synthetic construct
  source 1..20: mol_type = other DNA
cacaacactagacaaaaaac

SEQ ID NO: 73574 - DNA, 20 bp, synthetic construct
  source 1..20: mol_type = other DNA
tcacaacactagacaaaaaa

SEQ ID NO: 73575 - DNA, 20 bp, synthetic construct
  source 1..20: mol_type = other DNA
ctcacaacactagacaaaaa

SEQ ID NO: 73576 - DNA, 20 bp, synthetic construct
  source 1..20: mol_type = other DNA
tctcacaacactagacaaaa

SEQ ID NO: 73577 - DNA, 20 bp, synthetic construct
  source 1..20: mol_type = other DNA
ttctcacaacactagacaaa

SEQ ID NO: 73578 - DNA, 20 bp, synthetic construct
  source 1..20: mol_type = other DNA
attctcacaacactagacaa

SEQ ID NO: 73579 - DNA, 20 bp, synthetic construct
  source 1..20: mol_type = other DNA
aattctcacaacactagaca

SEQ ID NO: 73580 - DNA, 20 bp, synthetic construct
  source 1..20: mol_type = other DNA
taattctcacaacactagac

SEQ ID NO: 73581 - DNA, 20 bp, synthetic construct
  source 1..20: mol_type = other DNA
ttaattctcacaacactaga

SEQ ID NO: 73582 - DNA, 20 bp, synthetic construct
  source 1..20: mol_type = other DNA
tttaattctcacaacactag

SEQ ID NO: 73583 - DNA, 20 bp, synthetic construct
  source 1..20: mol_type = other DNA
ctttaattctcacaacacta

SEQ ID NO: 73584 - DNA, 20 bp, synthetic construct
  source 1..20: mol_type = other DNA
cctttaattctcacaacact

SEQ ID NO: 73585 - DNA, 20 bp, synthetic construct
  source 1..20: mol_type = other DNA
ccctttaattctcacaacac

SEQ ID NO: 73586 - DNA, 20 bp, synthetic construct
  source 1..20: mol_type = other DNA
tccctttaattctcacaaca

SEQ ID NO: 73587 - DNA, 20 bp, synthetic construct
  source 1..20: mol_type = other DNA
atccctttaattctcacaac

SEQ ID NO: 73588 - DNA, 20 bp, synthetic construct
  source 1..20: mol_type = other DNA
aatccctttaattctcacaa

SEQ ID NO: 73589 - DNA, 20 bp, synthetic construct
  source 1..20: mol_type = other DNA
aaatccctttaattctcaca

SEQ ID NO: 73590 - DNA, 20 bp, synthetic construct
  source 1..20: mol_type = other DNA
gaaatccctttaattctcac

SEQ ID NO: 73591 - DNA, 20 bp, synthetic construct
  source 1..20: mol_type = other DNA
tgaaatccctttaattctca

SEQ ID NO: 73592 - DNA, 20 bp, synthetic construct
  source 1..20: mol_type = other DNA
ctgaaatccctttaattctc

SEQ ID NO: 73593 - DNA, 20 bp, synthetic construct
  source 1..20: mol_type = other DNA
cctgaaatccctttaattct

SEQ ID NO: 73594 - DNA, 20 bp, synthetic construct
  source 1..20: mol_type = other DNA
tcctgaaatccctttaattc

SEQ ID NO: 73595 - DNA, 20 bp, synthetic construct
  source 1..20: mol_type = other DNA
atcctgaaatccctttaatt

SEQ ID NO: 73596 - DNA, 20 bp, synthetic construct
  source 1..20: mol_type = other DNA
gatcctgaaatccctttaat

SEQ ID NO: 73597 - DNA, 20 bp, synthetic construct
  source 1..20: mol_type = other DNA
agatcctgaaatccctttaa

SEQ ID NO: 73598 - DNA, 20 bp, synthetic construct
  source 1..20: mol_type = other DNA
aagatcctgaaatcccttta

SEQ ID NO: 73599 - DNA, 20 bp, synthetic construct
  source 1..20: mol_type = other DNA
taagatcctgaaatcccttt

SEQ ID NO: 73600 - DNA, 20 bp, synthetic construct
  source 1..20: mol_type = other DNA
ttaagatcctgaaatccctt

SEQ ID NO: 73601 - DNA, 20 bp, synthetic construct
  source 1..20: mol_type = other DNA
cttaagatcctgaaatccct

SEQ ID NO: 73602 - DNA, 20 bp, synthetic construct
  source 1..20: mol_type = other DNA
ccttaagatcctgaaatccc

SEQ ID NO: 73603 - DNA, 20 bp, synthetic construct
  source 1..20: mol_type = other DNA
accttaagatcctgaaatcc

SEQ ID NO: 73604 - DNA, 20 bp, synthetic construct
  source 1..20: mol_type = other DNA
taccttaagatcctgaaatc

SEQ ID NO: 73605 - DNA, 20 bp, synthetic construct
  source 1..20: mol_type = other DNA
ctaccttaagatcctgaaat

SEQ ID NO: 73606 - DNA, 20 bp, synthetic construct
  source 1..20: mol_type = other DNA
cctaccttaagatcctgaaa

SEQ ID NO: 73607 - DNA, 20 bp, synthetic construct
  source 1..20: mol_type = other DNA
acctaccttaagatcctgaa

SEQ ID NO: 73608 - DNA, 20 bp, synthetic construct
  source 1..20: mol_type = other DNA
aacctaccttaagatcctga

SEQ ID NO: 73609 - DNA, 20 bp, synthetic construct
  source 1..20: mol_type = other DNA
taacctaccttaagatcctg

SEQ ID NO: 73610 - DNA, 20 bp, synthetic construct
  source 1..20: mol_type = other DNA
ataacctaccttaagatcct

SEQ ID NO: 73611 - DNA, 20 bp, synthetic construct
  source 1..20: mol_type = other DNA
aataacctaccttaagatcc

SEQ ID NO: 73612 - DNA, 20 bp, synthetic construct
  source 1..20: mol_type = other DNA
taataacctaccttaagatc

SEQ ID NO: 73613 - DNA, 20 bp, synthetic construct
  source 1..20: mol_type = other DNA
ataataacctaccttaagat

SEQ ID NO: 73614 - DNA, 20 bp, synthetic construct
  source 1..20: mol_type = other DNA
aataataacctaccttaaga

SEQ ID NO: 73615 - DNA, 20 bp, synthetic construct
  source 1..20: mol_type = other DNA
aaataataacctaccttaag

SEQ ID NO: 73616 - DNA, 20 bp, synthetic construct
  source 1..20: mol_type = other DNA
caaataataacctaccttaa

SEQ ID NO: 73617 - DNA, 20 bp, synthetic construct
  source 1..20: mol_type = other DNA
tcaaataataacctacctta

SEQ ID NO: 73618 - DNA, 20 bp, synthetic construct
  source 1..20: mol_type = other DNA
atcaaataataacctacctt

SEQ ID NO: 73619 - DNA, 20 bp, synthetic construct
  source 1..20: mol_type = other DNA
catcaaataataacctacct

SEQ ID NO: 73620 - DNA, 20 bp, synthetic construct
  source 1..20: mol_type = other DNA
acatcaaataataacctacc

SEQ ID NO: 73621 - DNA, 20 bp, synthetic construct
  source 1..20: mol_type = other DNA
aacatcaaataataacctac

SEQ ID NO: 73622 - DNA, 20 bp, synthetic construct
  source 1..20: mol_type = other DNA
aaacatcaaataataaccta

SEQ ID NO: 73623 - DNA, 20 bp, synthetic construct
  source 1..20: mol_type = other DNA
aaaacatcaaataataacct

SEQ ID NO: 73624 - DNA, 20 bp, synthetic construct
  source 1..20: mol_type = other DNA
gaaaacatcaaataataacc

SEQ ID NO: 73625 - DNA, 20 bp, synthetic construct
  source 1..20: mol_type = other DNA
agaaaacatcaaataataac

SEQ ID NO: 73626 - DNA, 20 bp, synthetic construct
  source 1..20: mol_type = other DNA
aagaaaacatcaaataataa

SEQ ID NO: 73627 - DNA, 20 bp, synthetic construct
  source 1..20: mol_type = other DNA
caagaaaacatcaaataata

SEQ ID NO: 73628 - DNA, 20 bp, synthetic construct
  source 1..20: mol_type = other DNA
ccaagaaaacatcaaataat

SEQ ID NO: 73629 - DNA, 20 bp, synthetic construct
  source 1..20: mol_type = other DNA
tccaagaaaacatcaaataa

SEQ ID NO: 73630 - DNA, 20 bp, synthetic construct
  source 1..20: mol_type = other DNA
ttccaagaaaacatcaaata

SEQ ID NO: 73631 - DNA, 20 bp, synthetic construct
  source 1..20: mol_type = other DNA
gttccaagaaaacatcaaat

SEQ ID NO: 73632 - DNA, 20 bp, synthetic construct
  source 1..20: mol_type = other DNA
tgttccaagaaaacatcaaa

SEQ ID NO: 73633 - DNA, 20 bp, synthetic construct
  source 1..20: mol_type = other DNA
atgttccaagaaaacatcaa

SEQ ID NO: 73634 - DNA, 20 bp, synthetic construct
  source 1..20: mol_type = other DNA
aatgttccaagaaaacatca

SEQ ID NO: 73635 - DNA, 20 bp, synthetic construct
  source 1..20: mol_type = other DNA
aaatgttccaagaaaacatc

SEQ ID NO: 73636 - DNA, 20 bp, synthetic construct
  source 1..20: mol_type = other DNA
aaaatgttccaagaaaacat

SEQ ID NO: 73637 - DNA, 20 bp, synthetic construct
  source 1..20: mol_type = other DNA
taaaatgttccaagaaaaca

SEQ ID NO: 73638 - DNA, 20 bp, synthetic construct
  source 1..20: mol_type = other DNA
gtaaaatgttccaagaaaac

SEQ ID NO: 73639 - DNA, 20 bp, synthetic construct
  source 1..20: mol_type = other DNA
tgtaaaatgttccaagaaaa

SEQ ID NO: 73640 - DNA, 20 bp, synthetic construct
  source 1..20: mol_type = other DNA
atgtaaaatgttccaagaaa

SEQ ID NO: 73641 - DNA, 20 bp, synthetic construct
  source 1..20: mol_type = other DNA
aatgtaaaatgttccaagaa

SEQ ID NO: 73642 - DNA, 20 bp, synthetic construct
  source 1..20: mol_type = other DNA
gaatgtaaaatgttccaaga

SEQ ID NO: 73643 - DNA, 20 bp, synthetic construct
  source 1..20: mol_type = other DNA
agaatgtaaaatgttccaag

SEQ ID NO: 73644 - DNA, 20 bp, synthetic construct
  source 1..20: mol_type = other DNA
aagaatgtaaaatgttccaa

SEQ ID NO: 73645 - DNA, 20 bp, synthetic construct
  source 1..20: mol_type = other DNA
caagaatgtaaaatgttcca

SEQ ID NO: 73646 - DNA, 20 bp, synthetic construct
  source 1..20: mol_type = other DNA
tcaagaatgtaaaatgttcc

SEQ ID NO: 73647 - DNA, 20 bp, synthetic construct
  source 1..20: mol_type = other DNA
ttcaagaatgtaaaatgttc

SEQ ID NO: 73648 - DNA, 20 bp, synthetic construct
  source 1..20: mol_type = other DNA
tttcaagaatgtaaaatgtt

SEQ ID NO: 73649 - DNA, 20 bp, synthetic construct
  source 1..20: mol_type = other DNA
ttttcaagaatgtaaaatgt

SEQ ID NO: 73650 - DNA, 20 bp, synthetic construct
  source 1..20: mol_type = other DNA
attttcaagaatgtaaaatg

SEQ ID NO: 73651 - DNA, 20 bp, synthetic construct
  source 1..20: mol_type = other DNA
tattttcaagaatgtaaaat

SEQ ID NO: 73652 - DNA, 20 bp, synthetic construct
  source 1..20: mol_type = other DNA
gtattttcaagaatgtaaaa

SEQ ID NO: 73653 - DNA, 20 bp, synthetic construct
  source 1..20: mol_type = other DNA
tgtattttcaagaatgtaaa

SEQ ID NO: 73654 - DNA, 20 bp, synthetic construct
  source 1..20: mol_type = other DNA
gtgtattttcaagaatgtaa

SEQ ID NO: 73655 - DNA, 20 bp, synthetic construct
  source 1..20: mol_type = other DNA
tgtgtattttcaagaatgta

SEQ ID NO: 73656 - DNA, 20 bp, synthetic construct
  source 1..20: mol_type = other DNA
atgtgtattttcaagaatgt

SEQ ID NO: 73657 - DNA, 20 bp, synthetic construct
  source 1..20: mol_type = other DNA
catgtgtattttcaagaatg

SEQ ID NO: 73658 - DNA, 20 bp, synthetic construct
  source 1..20: mol_type = other DNA
ccatgtgtattttcaagaat

SEQ ID NO: 73659 - DNA, 20 bp, synthetic construct
  source 1..20: mol_type = other DNA
gccatgtgtattttcaagaa

SEQ ID NO: 73660 - DNA, 20 bp, synthetic construct
  source 1..20: mol_type = other DNA
agccatgtgtattttcaaga

SEQ ID NO: 73661 - DNA, 20 bp, synthetic construct
  source 1..20: mol_type = other DNA
tagccatgtgtattttcaag

SEQ ID NO: 73662 - DNA, 20 bp, synthetic construct
  source 1..20: mol_type = other DNA
ttagccatgtgtattttcaa

SEQ ID NO: 73663 - DNA, 20 bp, synthetic construct
  source 1..20: mol_type = other DNA
tttagccatgtgtattttca

SEQ ID NO: 73664 - DNA, 20 bp, synthetic construct
  source 1..20: mol_type = other DNA
atttagccatgtgtattttc

SEQ ID NO: 73665 - DNA, 20 bp, synthetic construct
  source 1..20: mol_type = other DNA
aatttagccatgtgtatttt

SEQ ID NO: 73666 - DNA, 20 bp, synthetic construct
  source 1..20: mol_type = other DNA
taatttagccatgtgtattt

SEQ ID NO: 73667 - DNA, 20 bp, synthetic construct
  source 1..20: mol_type = other DNA
ttaatttagccatgtgtatt

SEQ ID NO: 73668 - DNA, 20 bp, synthetic construct
  source 1..20: mol_type = other DNA
attaatttagccatgtgtat

SEQ ID NO: 73669 - DNA, 20 bp, synthetic construct
  source 1..20: mol_type = other DNA
aattaatttagccatgtgta

SEQ ID NO: 73670 - DNA, 20 bp, synthetic construct
  source 1..20: mol_type = other DNA
aaattaatttagccatgtgt

SEQ ID NO: 73671 - DNA, 20 bp, synthetic construct
  source 1..20: mol_type = other DNA
aaaattaatttagccatgtg

SEQ ID NO: 73672 - DNA, 20 bp, synthetic construct
  source 1..20: mol_type = other DNA
aaaaattaatttagccatgt

SEQ ID NO: 73673 - DNA, 20 bp, synthetic construct
  source 1..20: mol_type = other DNA
caaaaattaatttagccatg

SEQ ID NO: 73674 - DNA, 20 bp, synthetic construct
  source 1..20: mol_type = other DNA
gcaaaaattaatttagccat

SEQ ID NO: 73675 - DNA, 20 bp, synthetic construct
  source 1..20: mol_type = other DNA
ggcaaaaattaatttagcca

SEQ ID NO: 73676 - DNA, 20 bp, synthetic construct
  source 1..20: mol_type = other DNA
tggcaaaaattaatttagcc

SEQ ID NO: 73677 - DNA, 20 bp, synthetic construct
  source 1..20: mol_type = other DNA
ctggcaaaaattaatttagc

SEQ ID NO: 73678 - DNA, 20 bp, synthetic construct
  source 1..20: mol_type = other DNA
gctggcaaaaattaatttag

SEQ ID NO: 73679 - DNA, 20 bp, synthetic construct
  source 1..20: mol_type = other DNA
tgctggcaaaaattaattta

SEQ ID NO: 73680 - DNA, 20 bp, synthetic construct
  source 1..20: mol_type = other DNA
ttgctggcaaaaattaattt

SEQ ID NO: 73681 - DNA, 20 bp, synthetic construct
  source 1..20: mol_type = other DNA
attgctggcaaaaattaatt

SEQ ID NO: 73682 - DNA, 20 bp, synthetic construct
  source 1..20: mol_type = other DNA
gattgctggcaaaaattaat

SEQ ID NO: 73683 - DNA, 20 bp, synthetic construct
  source 1..20: mol_type = other DNA
ggattgctggcaaaaattaa

SEQ ID NO: 73684 - DNA, 20 bp, synthetic construct
  source 1..20: mol_type = other DNA
tggattgctggcaaaaatta

SEQ ID NO: 73685 - DNA, 20 bp, synthetic construct
  source 1..20: mol_type = other DNA
gtggattgctggcaaaaatt

SEQ ID NO: 73686 - DNA, 20 bp, synthetic construct
  source 1..20: mol_type = other DNA
tgtggattgctggcaaaaat

SEQ ID NO: 73687 - DNA, 20 bp, synthetic construct
  source 1..20: mol_type = other DNA
atgtggattgctggcaaaaa

SEQ ID NO: 73688 - DNA, 20 bp, synthetic construct
  source 1..20: mol_type = other DNA
tatgtggattgctggcaaaa

SEQ ID NO: 73689 - DNA, 20 bp, synthetic construct
  source 1..20: mol_type = other DNA
ttatgtggattgctggcaaa

SEQ ID NO: 73690 - DNA, 20 bp, synthetic construct
  source 1..20: mol_type = other DNA
gttatgtggattgctggcaa

SEQ ID NO: 73691 - DNA, 20 bp, synthetic construct
  source 1..20: mol_type = other DNA
agttatgtggattgctggca

SEQ ID NO: 73692 - DNA, 20 bp, synthetic construct
  source 1..20: mol_type = other DNA
aagttatgtggattgctggc

SEQ ID NO: 73693 - DNA, 20 bp, synthetic construct
  source 1..20: mol_type = other DNA
aaagttatgtggattgctgg

SEQ ID NO: 73694 - DNA, 20 bp, synthetic construct
  source 1..20: mol_type = other DNA
taaagttatgtggattgctg

SEQ ID NO: 73695 - DNA, 20 bp, synthetic construct
  source 1..20: mol_type = other DNA
ttaaagttatgtggattgct

SEQ ID NO: 73696 - DNA, 20 bp, synthetic construct
  source 1..20: mol_type = other DNA
cttaaagttatgtggattgc

SEQ ID NO: 73697 - DNA, 20 bp, synthetic construct
  source 1..20: mol_type = other DNA
tcttaaagttatgtggattg

SEQ ID NO: 73698 - DNA, 20 bp, synthetic construct
  source 1..20: mol_type = other DNA
atcttaaagttatgtggatt

SEQ ID NO: 73699 - DNA, 20 bp, synthetic construct
  source 1..20: mol_type = other DNA
tatcttaaagttatgtggat

SEQ ID NO: 73700 - DNA, 20 bp, synthetic construct
  source 1..20: mol_type = other DNA
ttatcttaaagttatgtgga

SEQ ID NO: 73701 - DNA, 20 bp, synthetic construct
  source 1..20: mol_type = other DNA
attatcttaaagttatgtgg

SEQ ID NO: 73702 - DNA, 20 bp, synthetic construct
  source 1..20: mol_type = other DNA
cattatcttaaagttatgtg

SEQ ID NO: 73703 - DNA, 20 bp, synthetic construct
  source 1..20: mol_type = other DNA
acattatcttaaagttatgt

SEQ ID NO: 73704 - DNA, 20 bp, synthetic construct
  source 1..20: mol_type = other DNA
tacattatcttaaagttatg

SEQ ID NO: 73705 - DNA, 20 bp, synthetic construct
  source 1..20: mol_type = other DNA
ctacattatcttaaagttat

SEQ ID NO: 73706 - DNA, 20 bp, synthetic construct
  source 1..20: mol_type = other DNA
tctacattatcttaaagtta

SEQ ID NO: 73707 - DNA, 20 bp, synthetic construct
  source 1..20: mol_type = other DNA
ctctacattatcttaaagtt

SEQ ID NO: 73708 - DNA, 20 bp, synthetic construct
  source 1..20: mol_type = other DNA
tctctacattatcttaaagt

SEQ ID NO: 73709 - DNA, 20 bp, synthetic construct
  source 1..20: mol_type = other DNA
ttctctacattatcttaaag

SEQ ID NO: 73710 - DNA, 20 bp, synthetic construct
  source 1..20: mol_type = other DNA
cttctctacattatcttaaa

SEQ ID NO: 73711 - DNA, 20 bp, synthetic construct
  source 1..20: mol_type = other DNA
tcttctctacattatcttaa

SEQ ID NO: 73712 - DNA, 20 bp, synthetic construct
  source 1..20: mol_type = other DNA
ttcttctctacattatctta

SEQ ID NO: 73713 - DNA, 20 bp, synthetic construct
  source 1..20: mol_type = other DNA
gttcttctctacattatctt

SEQ ID NO: 73714 - DNA, 20 bp, synthetic construct
  source 1..20: mol_type = other DNA
cgttcttctctacattatct

SEQ ID NO: 73715 - DNA, 20 bp, synthetic construct
  source 1..20: mol_type = other DNA
acgttcttctctacattatc

SEQ ID NO: 73716 - DNA, 20 bp, synthetic construct
  source 1..20: mol_type = other DNA
cacgttcttctctacattat

SEQ ID NO: 73717 - DNA, 20 bp, synthetic construct
  source 1..20: mol_type = other DNA
tcacgttcttctctacatta

SEQ ID NO: 73718 - DNA, 20 bp, synthetic construct
  source 1..20: mol_type = other DNA
atcacgttcttctctacatt

SEQ ID NO: 73719 - DNA, 20 bp, synthetic construct
  source 1..20: mol_type = other DNA
aatcacgttcttctctacat

SEQ ID NO: 73720 - DNA, 20 bp, synthetic construct
  source 1..20: mol_type = other DNA
gaatcacgttcttctctaca

SEQ ID NO: 73721 - DNA, 20 bp, synthetic construct
  source 1..20: mol_type = other DNA
tgaatcacgttcttctctac

SEQ ID NO: 73722 - DNA, 20 bp, synthetic construct
  source 1..20: mol_type = other DNA
ctgaatcacgttcttctcta

SEQ ID NO: 73723 - DNA, 20 bp, synthetic construct
  source 1..20: mol_type = other DNA
cctgaatcacgttcttctct

SEQ ID NO: 73724 - DNA, 20 bp, synthetic construct
  source 1..20: mol_type = other DNA
acctgaatcacgttcttctc

SEQ ID NO: 73725 - DNA, 20 bp, synthetic construct
  source 1..20: mol_type = other DNA
aacctgaatcacgttcttct

SEQ ID NO: 73726 - DNA, 20 bp, synthetic construct
  source 1..20: mol_type = other DNA
taacctgaatcacgttcttc

SEQ ID NO: 73727 - DNA, 20 bp, synthetic construct
  source 1..20: mol_type = other DNA
ctaacctgaatcacgttctt

SEQ ID NO: 73728 - DNA, 20 bp, synthetic construct
  source 1..20: mol_type = other DNA
actaacctgaatcacgttct

SEQ ID NO: 73729 - DNA, 20 bp, synthetic construct
  source 1..20: mol_type = other DNA
tactaacctgaatcacgttc

SEQ ID NO: 73730 - DNA, 20 bp, synthetic construct
  source 1..20: mol_type = other DNA
atactaacctgaatcacgtt

SEQ ID NO: 73731 - DNA, 20 bp, synthetic construct
  source 1..20: mol_type = other DNA
gatactaacctgaatcacgt

SEQ ID NO: 73732 - DNA, 20 bp, synthetic construct
  source 1..20: mol_type = other DNA
tgatactaacctgaatcacg

SEQ ID NO: 73733 - DNA, 20 bp, synthetic construct
  source 1..20: mol_type = other DNA
ttgatactaacctgaatcac

SEQ ID NO: 73734 - DNA, 20 bp, synthetic construct
  source 1..20: mol_type = other DNA
tttgatactaacctgaatca

SEQ ID NO: 73735 - DNA, 20 bp, synthetic construct
  source 1..20: mol_type = other DNA
atttgatactaacctgaatc

SEQ ID NO: 73736 - DNA, 20 bp, synthetic construct
  source 1..20: mol_type = other DNA
tatttgatactaacctgaat

SEQ ID NO: 73737 - DNA, 20 bp, synthetic construct
  source 1..20: mol_type = other DNA
ttatttgatactaacctgaa

SEQ ID NO: 73738 - DNA, 20 bp, synthetic construct
  source 1..20: mol_type = other DNA
cttatttgatactaacctga

SEQ ID NO: 73739 - DNA, 20 bp, synthetic construct
  source 1..20: mol_type = other DNA
ccttatttgatactaacctg

SEQ ID NO: 73740 - DNA, 20 bp, synthetic construct
  source 1..20: mol_type = other DNA
accttatttgatactaacct

SEQ ID NO: 73741 - DNA, 20 bp, synthetic construct
  source 1..20: mol_type = other DNA
gaccttatttgatactaacc

SEQ ID NO: 73742 - DNA, 20 bp, synthetic construct
  source 1..20: mol_type = other DNA
tgaccttatttgatactaac

SEQ ID NO: 73743 - DNA, 20 bp, synthetic construct
  source 1..20: mol_type = other DNA
ctgaccttatttgatactaa

SEQ ID NO: 73744 - DNA, 20 bp, synthetic construct
  source 1..20: mol_type = other DNA
tctgaccttatttgatacta

SEQ ID NO: 73745 - DNA, 20 bp, synthetic construct
  source 1..20: mol_type = other DNA
atctgaccttatttgatact

SEQ ID NO: 73746 - DNA, 20 bp, synthetic construct
  source 1..20: mol_type = other DNA
aatctgaccttatttgatac

SEQ ID NO: 73747 - DNA, 20 bp, synthetic construct
  source 1..20: mol_type = other DNA
aaatctgaccttatttgata

SEQ ID NO: 73748 - DNA, 20 bp, synthetic construct
  source 1..20: mol_type = other DNA
gaaatctgaccttatttgat

SEQ ID NO: 73749 - DNA, 20 bp, synthetic construct
  source 1..20: mol_type = other DNA
agaaatctgaccttatttga

SEQ ID NO: 73750 - DNA, 20 bp, synthetic construct
  source 1..20: mol_type = other DNA
tagaaatctgaccttatttg

SEQ ID NO: 73751 - DNA, 20 bp, synthetic construct
  source 1..20: mol_type = other DNA
ctagaaatctgaccttattt

SEQ ID NO: 73752 - DNA, 20 bp, synthetic construct
  source 1..20: mol_type = other DNA
actagaaatctgaccttatt

SEQ ID NO: 73753 - DNA, 20 bp, synthetic construct
  source 1..20: mol_type = other DNA
cactagaaatctgaccttat

SEQ ID NO: 73754 - DNA, 20 bp, synthetic construct
  source 1..20: mol_type = other DNA
gcactagaaatctgacctta

SEQ ID NO: 73755 - DNA, 20 bp, synthetic construct
  source 1..20: mol_type = other DNA
ggcactagaaatctgacctt

SEQ ID NO: 73756 - DNA, 20 bp, synthetic construct
  source 1..20: mol_type = other DNA
tggcactagaaatctgacct

SEQ ID NO: 73757 - DNA, 20 bp, synthetic construct
  source 1..20: mol_type = other DNA
atggcactagaaatctgacc

SEQ ID NO: 73758 - DNA, 20 bp, synthetic construct
  source 1..20: mol_type = other DNA
gatggcactagaaatctgac

SEQ ID NO: 73759 - DNA, 20 bp, synthetic construct
  source 1..20: mol_type = other DNA
tgatggcactagaaatctga

SEQ ID NO: 73760 - DNA, 20 bp, synthetic construct
  source 1..20: mol_type = other DNA
ctgatggcactagaaatctg

SEQ ID NO: 73761 - DNA, 20 bp, synthetic construct
  source 1..20: mol_type = other DNA
actgatggcactagaaatct

SEQ ID NO: 73762 - DNA, 20 bp, synthetic construct
  source 1..20: mol_type = other DNA
tactgatggcactagaaatc

SEQ ID NO: 73763 - DNA, 20 bp, synthetic construct
  source 1..20: mol_type = other DNA
ctactgatggcactagaaat

SEQ ID NO: 73764 - DNA, 20 bp, synthetic construct
  source 1..20: mol_type = other DNA
gctactgatggcactagaaa

SEQ ID NO: 73765 - DNA, 20 bp, synthetic construct
  source 1..20: mol_type = other DNA
agctactgatggcactagaa

SEQ ID NO: 73766 - DNA, 20 bp, synthetic construct
  source 1..20: mol_type = other DNA
aagctactgatggcactaga

SEQ ID NO: 73767 - DNA, 20 bp, synthetic construct
  source 1..20: mol_type = other DNA
aaagctactgatggcactag

SEQ ID NO: 73768 - DNA, 20 bp, synthetic construct
  source 1..20: mol_type = other DNA
gaaagctactgatggcacta

SEQ ID NO: 73769 - DNA, 20 bp, synthetic construct
  source 1..20: mol_type = other DNA
tgaaagctactgatggcact

SEQ ID NO: 73770 - DNA, 20 bp, synthetic construct
  source 1..20: mol_type = other DNA
ctgaaagctactgatggcac

SEQ ID NO: 73771 - DNA, 20 bp, synthetic construct
  source 1..20: mol_type = other DNA
gctgaaagctactgatggca

SEQ ID NO: 73772 - DNA, 20 bp, synthetic construct
  source 1..20: mol_type = other DNA
tgctgaaagctactgatggc

SEQ ID NO: 73773 - DNA, 20 bp, synthetic construct
  source 1..20: mol_type = other DNA
ttgctgaaagctactgatgg

SEQ ID NO: 73774 - DNA, 20 bp, synthetic construct
  source 1..20: mol_type = other DNA
tttgctgaaagctactgatg

SEQ ID NO: 73775 - DNA, 20 bp, synthetic construct
  source 1..20: mol_type = other DNA
ctttgctgaaagctactgat

SEQ ID NO: 73776 - DNA, 20 bp, synthetic construct
  source 1..20: mol_type = other DNA
tctttgctgaaagctactga

SEQ ID NO: 73777 - DNA, 20 bp, synthetic construct
  source 1..20: mol_type = other DNA
atctttgctgaaagctactg

SEQ ID NO: 73778 - DNA, 20 bp, synthetic construct
  source 1..20: mol_type = other DNA
catctttgctgaaagctact

SEQ ID NO: 73779 - DNA, 20 bp, synthetic construct
  source 1..20: mol_type = other DNA
tcatctttgctgaaagctac

SEQ ID NO: 73780 - DNA, 20 bp, synthetic construct
  source 1..20: mol_type = other DNA
ctcatctttgctgaaagcta

SEQ ID NO: 73781 - DNA, 20 bp, synthetic construct
  source 1..20: mol_type = other DNA
cctcatctttgctgaaagct

SEQ ID NO: 73782 - DNA, 20 bp, synthetic construct
  source 1..20: mol_type = other DNA
acctcatctttgctgaaagc

SEQ ID NO: 73783 - DNA, 20 bp, synthetic construct
  source 1..20: mol_type = other DNA
cacctcatctttgctgaaag

SEQ ID NO: 73784 - DNA, 20 bp, synthetic construct
  source 1..20: mol_type = other DNA
acacctcatctttgctgaaa

SEQ ID NO: 73785 - DNA, 20 bp, synthetic construct
  source 1..20: mol_type = other DNA
aacacctcatctttgctgaa

SEQ ID NO: 73786 - DNA, 20 bp, synthetic construct
  source 1..20: mol_type = other DNA
caacacctcatctttgctga

SEQ ID NO: 73787 - DNA, 20 bp, synthetic construct
  source 1..20: mol_type = other DNA
ccaacacctcatctttgctg

SEQ ID NO: 73788 - DNA, 20 bp, synthetic construct
  source 1..20: mol_type = other DNA
accaacacctcatctttgct

SEQ ID NO: 73789 - DNA, 20 bp, synthetic construct
  source 1..20: mol_type = other DNA
taccaacacctcatctttgc

SEQ ID NO: 73790 - DNA, 20 bp, synthetic construct
  source 1..20: mol_type = other DNA
ttaccaacacctcatctttg

SEQ ID NO: 73791 - DNA, 20 bp, synthetic construct
  source 1..20: mol_type = other DNA
cttaccaacacctcatcttt

SEQ ID NO: 73792 - DNA, 20 bp, synthetic construct
  source 1..20: mol_type = other DNA
tcttaccaacacctcatctt

SEQ ID NO: 73793 - DNA, 20 bp, synthetic construct
  source 1..20: mol_type = other DNA
atcttaccaacacctcatct

SEQ ID NO: 73794 - DNA, 20 bp, synthetic construct
  source 1..20: mol_type = other DNA
tatcttaccaacacctcatc

SEQ ID NO: 73795 - DNA, 20 bp, synthetic construct
  source 1..20: mol_type = other DNA
ctatcttaccaacacctcat

SEQ ID NO: 73796 - DNA, 20 bp, synthetic construct
  source 1..20: mol_type = other DNA
gctatcttaccaacacctca

SEQ ID NO: 73797 - DNA, 20 bp, synthetic construct
  source 1..20: mol_type = other DNA
tgctatcttaccaacacctc

SEQ ID NO: 73798 - DNA, 20 bp, synthetic construct
  source 1..20: mol_type = other DNA
atgctatcttaccaacacct

SEQ ID NO: 73799 - DNA, 20 bp, synthetic construct
  source 1..20: mol_type = other DNA
aatgctatcttaccaacacc

SEQ ID NO: 73800 - DNA, 20 bp, synthetic construct
  source 1..20: mol_type = other DNA
taatgctatcttaccaacac

SEQ ID NO: 73801 - DNA, 20 bp, synthetic construct
  source 1..20: mol_type = other DNA
ctaatgctatcttaccaaca

SEQ ID NO: 73802 - DNA, 20 bp, synthetic construct
  source 1..20: mol_type = other DNA
actaatgctatcttaccaac

SEQ ID NO: 73803 - DNA, 20 bp, synthetic construct
  source 1..20: mol_type = other DNA
gactaatgctatcttaccaa

SEQ ID NO: 73804 - DNA, 20 bp, synthetic construct
  source 1..20: mol_type = other DNA
agactaatgctatcttacca

SEQ ID NO: 73805 - DNA, 20 bp, synthetic construct
  source 1..20: mol_type = other DNA
gagactaatgctatcttacc

SEQ ID NO: 73806 - DNA, 20 bp, synthetic construct
  source 1..20: mol_type = other DNA
agagactaatgctatcttac

SEQ ID NO: 73807 - DNA, 20 bp, synthetic construct
  source 1..20: mol_type = other DNA
aagagactaatgctatctta

SEQ ID NO: 73808 - DNA, 20 bp, synthetic construct
  source 1..20: mol_type = other DNA
taagagactaatgctatctt

SEQ ID NO: 73809 - DNA, 20 bp, synthetic construct
  source 1..20: mol_type = other DNA
ctaagagactaatgctatct

SEQ ID NO: 73810 - DNA, 20 bp, synthetic construct
  source 1..20: mol_type = other DNA
tctaagagactaatgctatc

SEQ ID NO: 73811 - DNA, 20 bp, synthetic construct
  source 1..20: mol_type = other DNA
ttctaagagactaatgctat

SEQ ID NO: 73812 - DNA, 20 bp, synthetic construct
  source 1..20: mol_type = other DNA
attctaagagactaatgcta

SEQ ID NO: 73813 - DNA, 20 bp, synthetic construct
  source 1..20: mol_type = other DNA
gattctaagagactaatgct

SEQ ID NO: 73814 - DNA, 20 bp, synthetic construct
  source 1..20: mol_type = other DNA
agattctaagagactaatgc

SEQ ID NO: 73815 - DNA, 20 bp, synthetic construct
  source 1..20: mol_type = other DNA
gagattctaagagactaatg

SEQ ID NO: 73816 - DNA, 20 bp, synthetic construct
  source 1..20: mol_type = other DNA
agagattctaagagactaat

SEQ ID NO: 73817 - DNA, 20 bp, synthetic construct
  source 1..20: mol_type = other DNA
aagagattctaagagactaa

SEQ ID NO: 73818 - DNA, 20 bp, synthetic construct
  source 1..20: mol_type = other DNA
taagagattctaagagacta

SEQ ID NO: 73819 - DNA, 20 bp, synthetic construct
  source 1..20: mol_type = other DNA
ctaagagattctaagagact

SEQ ID NO: 73820 - DNA, 20 bp, synthetic construct
  source 1..20: mol_type = other DNA
tctaagagattctaagagac

SEQ ID NO: 73821 - DNA, 20 bp, synthetic construct
  source 1..20: mol_type = other DNA
ctctaagagattctaagaga

SEQ ID NO: 73822 - DNA, 20 bp, synthetic construct
  source 1..20: mol_type = other DNA
tctctaagagattctaagag

SEQ ID NO: 73823 - DNA, 20 bp, synthetic construct
  source 1..20: mol_type = other DNA
ctctctaagagattctaaga

SEQ ID NO: 73824 - DNA, 20 bp, synthetic construct
  source 1..20: mol_type = other DNA
tctctctaagagattctaag

SEQ ID NO: 73825 - DNA, 20 bp, synthetic construct
  source 1..20: mol_type = other DNA
atctctctaagagattctaa

SEQ ID NO: 73826 - DNA, 20 bp, synthetic construct
  source 1..20: mol_type = other DNA
aatctctctaagagattcta

SEQ ID NO: 73827 - DNA, 20 bp, synthetic construct
  source 1..20: mol_type = other DNA
aaatctctctaagagattct

SEQ ID NO: 73828 - DNA, 20 bp, synthetic construct
  source 1..20: mol_type = other DNA
aaaatctctctaagagattc

SEQ ID NO: 73829 - DNA, 20 bp, synthetic construct
  source 1..20: mol_type = other DNA
gaaaatctctctaagagatt

SEQ ID NO: 73830 - DNA, 20 bp, synthetic construct
  source 1..20: mol_type = other DNA
ggaaaatctctctaagagat

SEQ ID NO: 73831 - DNA, 20 bp, synthetic construct
  source 1..20: mol_type = other DNA
tggaaaatctctctaagaga

SEQ ID NO: 73832 - DNA, 20 bp, synthetic construct
  source 1..20: mol_type = other DNA
ttggaaaatctctctaagag

SEQ ID NO: 73833 - DNA, 20 bp, synthetic construct
  source 1..20: mol_type = other DNA
tttggaaaatctctctaaga

SEQ ID NO: 73834 - DNA, 20 bp, synthetic construct
  source 1..20: mol_type = other DNA
ttttggaaaatctctctaag

SEQ ID NO: 73835 - DNA, 20 bp, synthetic construct
  source 1..20: mol_type = other DNA
attttggaaaatctctctaa

SEQ ID NO: 73836 - DNA, 20 bp, synthetic construct
  source 1..20: mol_type = other DNA
aattttggaaaatctctcta

SEQ ID NO: 73837 - DNA, 20 bp, synthetic construct
  source 1..20: mol_type = other DNA
gaattttggaaaatctctct

SEQ ID NO: 73838 - DNA, 20 bp, synthetic construct
  source 1..20: mol_type = other DNA
tgaattttggaaaatctctc

SEQ ID NO: 73839 - DNA, 20 bp, synthetic construct
  source 1..20: mol_type = other DNA
ctgaattttggaaaatctct

SEQ ID NO: 73840 - DNA, 20 bp, synthetic construct
  source 1..20: mol_type = other DNA
gctgaattttggaaaatctc

SEQ ID NO: 73841 - DNA, 20 bp, synthetic construct
  source 1..20: mol_type = other DNA
ggctgaattttggaaaatct

SEQ ID NO: 73842 - DNA, 20 bp, synthetic construct
  source 1..20: mol_type = other DNA
tggctgaattttggaaaatc

SEQ ID NO: 73843 - DNA, 20 bp, synthetic construct
  source 1..20: mol_type = other DNA
atggctgaattttggaaaat

SEQ ID NO: 73844 - DNA, 20 bp, synthetic construct
  source 1..20: mol_type = other DNA
aatggctgaattttggaaaa

SEQ ID NO: 73845 - DNA, 20 bp, synthetic construct
  source 1..20: mol_type = other DNA
aaatggctgaattttggaaa

SEQ ID NO: 73846 - DNA, 20 bp, synthetic construct
  source 1..20: mol_type = other DNA
gaaatggctgaattttggaa

SEQ ID NO: 73847 - DNA, 20 bp, synthetic construct
  source 1..20: mol_type = other DNA
agaaatggctgaattttgga

SEQ ID NO: 73848 - DNA, 20 bp, synthetic construct
  source 1..20: mol_type = other DNA
tagaaatggctgaattttgg

SEQ ID NO: 73849 - DNA, 20 bp, synthetic construct
  source 1..20: mol_type = other DNA
ctagaaatggctgaattttg

SEQ ID NO: 73850 - DNA, 20 bp, synthetic construct
  source 1..20: mol_type = other DNA
actagaaatggctgaatttt

SEQ ID NO: 73851 - DNA, 20 bp, synthetic construct
  source 1..20: mol_type = other DNA
cactagaaatggctgaattt

SEQ ID NO: 73852 - DNA, 20 bp, synthetic construct
  source 1..20: mol_type = other DNA
tcactagaaatggctgaatt

SEQ ID NO: 73853 - DNA, 20 bp, synthetic construct
  source 1..20: mol_type = other DNA
ttcactagaaatggctgaat

SEQ ID NO: 73854 - DNA, 20 bp, synthetic construct
  source 1..20: mol_type = other DNA
attcactagaaatggctgaa

SEQ ID NO: 73855 - DNA, 20 bp, synthetic construct
  source 1..20: mol_type = other DNA
cattcactagaaatggctga

SEQ ID NO: 73856 - DNA, 20 bp, synthetic construct
  source 1..20: mol_type = other DNA
gcattcactagaaatggctg

SEQ ID NO: 73857 - DNA, 20 bp, synthetic construct
  source 1..20: mol_type = other DNA
agcattcactagaaatggct

SEQ ID NO: 73858 - DNA, 20 bp, synthetic construct
  source 1..20: mol_type = other DNA
gagcattcactagaaatggc

SEQ ID NO: 73859 - DNA, 20 bp, synthetic construct
  source 1..20: mol_type = other DNA
ggagcattcactagaaatgg

SEQ ID NO: 73860 - DNA, 20 bp, synthetic construct
  source 1..20: mol_type = other DNA
tggagcattcactagaaatg

SEQ ID NO: 73861 - DNA, 20 bp, synthetic construct
  source 1..20: mol_type = other DNA
atggagcattcactagaaat

SEQ ID NO: 73862 - DNA, 20 bp, synthetic construct
  source 1..20: mol_type = other DNA
aatggagcattcactagaaa

SEQ ID NO: 73863 - DNA, 20 bp, synthetic construct
  source 1..20: mol_type = other DNA
gaatggagcattcactagaa

SEQ ID NO: 73864 - DNA, 20 bp, synthetic construct
  source 1..20: mol_type = other DNA
ggaatggagcattcactaga

SEQ ID NO: 73865 - DNA, 20 bp, synthetic construct
  source 1..20: mol_type = other DNA
tggaatggagcattcactag

SEQ ID NO: 73866 - DNA, 20 bp, synthetic construct
  source 1..20: mol_type = other DNA
gtggaatggagcattcacta

SEQ ID NO: 73867 - DNA, 20 bp, synthetic construct
  source 1..20: mol_type = other DNA
ggtggaatggagcattcact

SEQ ID NO: 73868 - DNA, 20 bp, synthetic construct
  source 1..20: mol_type = other DNA
gggtggaatggagcattcac

SEQ ID NO: 73869 - DNA, 20 bp, synthetic construct
  source 1..20: mol_type = other DNA
ggggtggaatggagcattca

SEQ ID NO: 73870 - DNA, 20 bp, synthetic construct
  source 1..20: mol_type = other DNA
gggggtggaatggagcattc

SEQ ID NO: 73871 - DNA, 20 bp, synthetic construct
  source 1..20: mol_type = other DNA
tgggggtggaatggagcatt

SEQ ID NO: 73872 - DNA, 20 bp, synthetic construct
  source 1..20: mol_type = other DNA
ctgggggtggaatggagcat

SEQ ID NO: 73873 - DNA, 20 bp, synthetic construct
  source 1..20: mol_type = other DNA
gctgggggtggaatggagca

SEQ ID NO: 73874 - DNA, 20 bp, synthetic construct
  source 1..20: mol_type = other DNA
agctgggggtggaatggagc

SEQ ID NO: 73875 - DNA, 20 bp, synthetic construct
  source 1..20: mol_type = other DNA
cagctgggggtggaatggag

SEQ ID NO: 73876 - DNA, 20 bp, synthetic construct
  source 1..20: mol_type = other DNA
tcagctgggggtggaatgga

SEQ ID NO: 73877 - DNA, 20 bp, synthetic construct
  source 1..20: mol_type = other DNA
ctcagctgggggtggaatgg

SEQ ID NO: 73878 - DNA, 20 bp, synthetic construct
  source 1..20: mol_type = other DNA
actcagctgggggtggaatg

SEQ ID NO: 73879 - DNA, 20 bp, synthetic construct
  source 1..20: mol_type = other DNA
gactcagctgggggtggaat

SEQ ID NO: 73880 - DNA, 20 bp, synthetic construct
  source 1..20: mol_type = other DNA
ggactcagctgggggtggaa

SEQ ID NO: 73881 - DNA, 20 bp, synthetic construct
  source 1..20: mol_type = other DNA
aggactcagctgggggtgga

SEQ ID NO: 73882 - DNA, 20 bp, synthetic construct
  source 1..20: mol_type = other DNA
caggactcagctgggggtgg

SEQ ID NO: 73883 - DNA, 20 bp, synthetic construct
  source 1..20: mol_type = other DNA
gcaggactcagctgggggtg

SEQ ID NO: 73884 - DNA, 20 bp, synthetic construct
  source 1..20: mol_type = other DNA
agcaggactcagctgggggt

SEQ ID NO: 73885 - DNA, 20 bp, synthetic construct
  source 1..20: mol_type = other DNA
cagcaggactcagctggggg

SEQ ID NO: 73886 - DNA, 20 bp, synthetic construct
  source 1..20: mol_type = other DNA
gcagcaggactcagctgggg

SEQ ID NO: 73887 - DNA, 20 bp, synthetic construct
  source 1..20: mol_type = other DNA
agcagcaggactcagctggg

SEQ ID NO: 73888 - DNA, 20 bp, synthetic construct
  source 1..20: mol_type = other DNA
gagcagcaggactcagctgg

SEQ ID NO: 73889 - DNA, 20 bp, synthetic construct
  source 1..20: mol_type = other DNA
agagcagcaggactcagctg

SEQ ID NO: 73890 - DNA, 20 bp, synthetic construct
  source 1..20: mol_type = other DNA
cagagcagcaggactcagct

SEQ ID NO: 73891 - DNA, 20 bp, synthetic construct
  source 1..20: mol_type = other DNA
ccagagcagcaggactcagc

SEQ ID NO: 73892 - DNA, 20 bp, synthetic construct
  source 1..20: mol_type = other DNA
cccagagcagcaggactcag

SEQ ID NO: 73893 - DNA, 20 bp, synthetic construct
  source 1..20: mol_type = other DNA
ccccagagcagcaggactca

SEQ ID NO: 73894 - DNA, 20 bp, synthetic construct
  source 1..20: mol_type = other DNA
tccccagagcagcaggactc

SEQ ID NO: 73895 - DNA, 20 bp, synthetic construct
  source 1..20: mol_type = other DNA
ttccccagagcagcaggact

SEQ ID NO: 73896 - DNA, 20 bp, synthetic construct
  source 1..20: mol_type = other DNA
gttccccagagcagcaggac

SEQ ID NO: 73897 - DNA, 20 bp, synthetic construct
  source 1..20: mol_type = other DNA
agttccccagagcagcagga

SEQ ID NO: 73898 - DNA, 20 bp, synthetic construct
  source 1..20: mol_type = other DNA
gagttccccagagcagcagg

SEQ ID NO: 73899 - DNA, 20 bp, synthetic construct
  source 1..20: mol_type = other DNA
ggagttccccagagcagcag

SEQ ID NO: 73900 - DNA, 20 bp, synthetic construct
  source 1..20: mol_type = other DNA
gggagttccccagagcagca

SEQ ID NO: 73901 - DNA, 20 bp, synthetic construct
  source 1..20: mol_type = other DNA
agggagttccccagagcagc

SEQ ID NO: 73902 - DNA, 20 bp, synthetic construct
  source 1..20: mol_type = other DNA
gagggagttccccagagcag

SEQ ID NO: 73903 - DNA, 20 bp, synthetic construct
  source 1..20: mol_type = other DNA
tgagggagttccccagagca

SEQ ID NO: 73904 - DNA, 20 bp, synthetic construct
  source 1..20: mol_type = other DNA
ctgagggagttccccagagc

SEQ ID NO: 73905 - DNA, 20 bp, synthetic construct
  source 1..20: mol_type = other DNA
gctgagggagttccccagag

SEQ ID NO: 73906 - DNA, 20 bp, synthetic construct
  source 1..20: mol_type = other DNA
tgctgagggagttccccaga

SEQ ID NO: 73907 - DNA, 20 bp, synthetic construct
  source 1..20: mol_type = other DNA
gtgctgagggagttccccag

SEQ ID NO: 73908 - DNA, 20 bp, synthetic construct
  source 1..20: mol_type = other DNA
tgtgctgagggagttcccca

SEQ ID NO: 73909 - DNA, 20 bp, synthetic construct
  source 1..20: mol_type = other DNA
gtgtgctgagggagttcccc

SEQ ID NO: 73910 - DNA, 20 bp, synthetic construct
  source 1..20: mol_type = other DNA
agtgtgctgagggagttccc

SEQ ID NO: 73911 - DNA, 20 bp, synthetic construct
  source 1..20: mol_type = other DNA
gagtgtgctgagggagttcc

SEQ ID NO: 73912 - DNA, 20 bp, synthetic construct
  source 1..20: mol_type = other DNA
agagtgtgctgagggagttc

SEQ ID NO: 73913 - DNA, 20 bp, synthetic construct
  source 1..20: mol_type = other DNA
aagagtgtgctgagggagtt

SEQ ID NO: 73914 - DNA, 20 bp, synthetic construct
  source 1..20: mol_type = other DNA
caagagtgtgctgagggagt

SEQ ID NO: 73915 - DNA, 20 bp, synthetic construct
  source 1..20: mol_type = other DNA
ccaagagtgtgctgagggag

SEQ ID NO: 73916 - DNA, 20 bp, synthetic construct
  source 1..20: mol_type = other DNA
gccaagagtgtgctgaggga

SEQ ID NO: 73917 - DNA, 20 bp, synthetic construct
  source 1..20: mol_type = other DNA
agccaagagtgtgctgaggg

SEQ ID NO: 73918 - DNA, 20 bp, synthetic construct
  source 1..20: mol_type = other DNA
gagccaagagtgtgctgagg

SEQ ID NO: 73919 - DNA, 20 bp, synthetic construct
  source 1..20: mol_type = other DNA
agagccaagagtgtgctgag

SEQ ID NO: 73920 - DNA, 20 bp, synthetic construct
  source 1..20: mol_type = other DNA
aagagccaagagtgtgctga

SEQ ID NO: 73921 - DNA, 20 bp, synthetic construct
  source 1..20: mol_type = other DNA
taagagccaagagtgtgctg

SEQ ID NO: 73922 - DNA, 20 bp, synthetic construct
  source 1..20: mol_type = other DNA
ctaagagccaagagtgtgct

SEQ ID NO: 73923 - DNA, 20 bp, synthetic construct
  source 1..20: mol_type = other DNA
tctaagagccaagagtgtgc

SEQ ID NO: 73924 - DNA, 20 bp, synthetic construct
  source 1..20: mol_type = other DNA
ttctaagagccaagagtgtg

SEQ ID NO: 73925 - DNA, 20 bp, synthetic construct
  source 1..20: mol_type = other DNA
attctaagagccaagagtgt

SEQ ID NO: 73926 - DNA, 20 bp, synthetic construct
  source 1..20: mol_type = other DNA
aattctaagagccaagagtg

SEQ ID NO: 73927 - DNA, 20 bp, synthetic construct
  source 1..20: mol_type = other DNA
caattctaagagccaagagt

SEQ ID NO: 73928 - DNA, 20 bp, synthetic construct
  source 1..20: mol_type = other DNA
gcaattctaagagccaagag

SEQ ID NO: 73929 - DNA, 20 bp, synthetic construct
  source 1..20: mol_type = other DNA
agcaattctaagagccaaga

SEQ ID NO: 73930 - DNA, 20 bp, synthetic construct
  source 1..20: mol_type = other DNA
tagcaattctaagagccaag

SEQ ID NO: 73931 - DNA, 20 bp, synthetic construct
  source 1..20: mol_type = other DNA
ctagcaattctaagagccaa

SEQ ID NO: 73932 - DNA, 20 bp, synthetic construct
  source 1..20: mol_type = other DNA
gctagcaattctaagagcca

SEQ ID NO: 73933 - DNA, 20 bp, synthetic construct
  source 1..20: mol_type = other DNA
tgctagcaattctaagagcc

SEQ ID NO: 73934 - DNA, 20 bp, synthetic construct
  source 1..20: mol_type = other DNA
ttgctagcaattctaagagc

SEQ ID NO: 73935 - DNA, 20 bp, synthetic construct
  source 1..20: mol_type = other DNA
attgctagcaattctaagag

SEQ ID NO: 73936 - DNA, 20 bp, synthetic construct
  source 1..20: mol_type = other DNA
cattgctagcaattctaaga

SEQ ID NO: 73937 - DNA, 20 bp, synthetic construct
  source 1..20: mol_type = other DNA
ccattgctagcaattctaag

SEQ ID NO: 73938 - DNA, 20 bp, synthetic construct
  source 1..20: mol_type = other DNA
cccattgctagcaattctaa

SEQ ID NO: 73939 - DNA, 20 bp, synthetic construct
  source 1..20: mol_type = other DNA
tcccattgctagcaattcta

SEQ ID NO: 73940 - DNA, 20 bp, synthetic construct
  source 1..20: mol_type = other DNA
ctcccattgctagcaattct

SEQ ID NO: 73941 - DNA, 20 bp, synthetic construct
  source 1..20: mol_type = other DNA
actcccattgctagcaattc

SEQ ID NO: 73942 - DNA, 20 bp, synthetic construct
  source 1..20: mol_type = other DNA
tactcccattgctagcaatt

SEQ ID NO: 73943 - DNA, 20 bp, synthetic construct
  source 1..20: mol_type = other DNA
ctactcccattgctagcaat

SEQ ID NO: 73944 - DNA, 20 bp, synthetic construct
  source 1..20: mol_type = other DNA
actactcccattgctagcaa

SEQ ID NO: 73945 - DNA, 20 bp, synthetic construct
  source 1..20: mol_type = other DNA
cactactcccattgctagca

SEQ ID NO: 73946 - DNA, 20 bp, synthetic construct
  source 1..20: mol_type = other DNA
gcactactcccattgctagc

SEQ ID NO: 73947 - DNA, 20 bp, synthetic construct
  source 1..20: mol_type = other DNA
agcactactcccattgctag

SEQ ID NO: 73948 - DNA, 20 bp, synthetic construct
  source 1..20: mol_type = other DNA
cagcactactcccattgcta

SEQ ID NO: 73949 - DNA, 20 bp, synthetic construct
  source 1..20: mol_type = other DNA
gcagcactactcccattgct

SEQ ID NO: 73950 - DNA, 20 bp, synthetic construct
  source 1..20: mol_type = other DNA
agcagcactactcccattgc

SEQ ID NO: 73951 - DNA, 20 bp, synthetic construct
  source 1..20: mol_type = other DNA
cagcagcactactcccattg

SEQ ID NO: 73952 - DNA, 20 bp, synthetic construct
  source 1..20: mol_type = other DNA
ccagcagcactactcccatt

SEQ ID NO: 73953 - DNA, 20 bp, synthetic construct
  source 1..20: mol_type = other DNA
accagcagcactactcccat

SEQ ID NO: 73954 - DNA, 20 bp, synthetic construct
  source 1..20: mol_type = other DNA
caccagcagcactactccca

SEQ ID NO: 73955 - DNA, 20 bp, synthetic construct
  source 1..20: mol_type = other DNA
ccaccagcagcactactccc

SEQ ID NO: 73956 - DNA, 20 bp, synthetic construct
  source 1..20: mol_type = other DNA
tccaccagcagcactactcc

SEQ ID NO: 73957 - DNA, 20 bp, synthetic construct
  source 1..20: mol_type = other DNA
ctccaccagcagcactactc

SEQ ID NO: 73958 - DNA, 20 bp, synthetic construct
  source 1..20: mol_type = other DNA
gctccaccagcagcactact

SEQ ID NO: 73959 - DNA, 20 bp, synthetic construct
  source 1..20: mol_type = other DNA
agctccaccagcagcactac

SEQ ID NO: 73960 - DNA, 20 bp, synthetic construct
  source 1..20: mol_type = other DNA
cagctccaccagcagcacta

SEQ ID NO: 73961 - DNA, 20 bp, synthetic construct
  source 1..20: mol_type = other DNA
ccagctccaccagcagcact

SEQ ID NO: 73962 - DNA, 20 bp, synthetic construct
  source 1..20: mol_type = other DNA
gccagctccaccagcagcac

SEQ ID NO: 73963 - DNA, 20 bp, synthetic construct
  source 1..20: mol_type = other DNA
tgccagctccaccagcagca

SEQ ID NO: 73964 - DNA, 20 bp, synthetic construct
  source 1..20: mol_type = other DNA
ctgccagctccaccagcagc

SEQ ID NO: 73965 - DNA, 20 bp, synthetic construct
  source 1..20: mol_type = other DNA
gctgccagctccaccagcag

SEQ ID NO: 73966 - DNA, 20 bp, synthetic construct
  source 1..20: mol_type = other DNA
agctgccagctccaccagca

SEQ ID NO: 73967 - DNA, 20 bp, synthetic construct
  source 1..20: mol_type = other DNA
tagctgccagctccaccagc

SEQ ID NO: 73968 - DNA, 20 bp, synthetic construct
  source 1..20: mol_type = other DNA
ttagctgccagctccaccag

SEQ ID NO: 73969 - DNA, 20 bp, synthetic construct
  source 1..20: mol_type = other DNA
cttagctgccagctccacca

SEQ ID NO: 73970 - DNA, 20 bp, synthetic construct
  source 1..20: mol_type = other DNA
gcttagctgccagctccacc

SEQ ID NO: 73971 - DNA, 20 bp, synthetic construct
  source 1..20: mol_type = other DNA
ggcttagctgccagctccac

SEQ ID NO: 73972 - DNA, 20 bp, synthetic construct
  source 1..20: mol_type = other DNA
gggcttagctgccagctcca

SEQ ID NO: 73973 - DNA, 20 bp, synthetic construct
  source 1..20: mol_type = other DNA
tgggcttagctgccagctcc

SEQ ID NO: 73974 - DNA, 20 bp, synthetic construct
  source 1..20: mol_type = other DNA
ctgggcttagctgccagctc

SEQ ID NO: 73975 - DNA, 20 bp, synthetic construct
  source 1..20: mol_type = other DNA
tctgggcttagctgccagct

SEQ ID NO: 73976 - DNA, 20 bp, synthetic construct
  source 1..20: mol_type = other DNA
ctctgggcttagctgccagc

SEQ ID NO: 73977 - DNA, 20 bp, synthetic construct
  source 1..20: mol_type = other DNA
cctctgggcttagctgccag

SEQ ID NO: 73978 - DNA, 20 bp, synthetic construct
  source 1..20: mol_type = other DNA
acctctgggcttagctgcca

SEQ ID NO: 73979 - DNA, 20 bp, synthetic construct
  source 1..20: mol_type = other DNA
cacctctgggcttagctgcc

SEQ ID NO: 73980 - DNA, 20 bp, synthetic construct
  source 1..20: mol_type = other DNA
ccacctctgggcttagctgc

SEQ ID NO: 73981 - DNA, 20 bp, synthetic construct
  source 1..20: mol_type = other DNA
tccacctctgggcttagctg

SEQ ID NO: 73982 - DNA, 20 bp, synthetic construct
  source 1..20: mol_type = other DNA
atccacctctgggcttagct

SEQ ID NO: 73983 - DNA, 20 bp, synthetic construct
  source 1..20: mol_type = other DNA
aatccacctctgggcttagc

SEQ ID NO: 73984 - DNA, 20 bp, synthetic construct
  source 1..20: mol_type = other DNA
taatccacctctgggcttag

SEQ ID NO: 73985 - DNA, 20 bp, synthetic construct
  source 1..20: mol_type = other DNA
ttaatccacctctgggctta

SEQ ID NO: 73986 - DNA, 20 bp, synthetic construct
  source 1..20: mol_type = other DNA
attaatccacctctgggctt

SEQ ID NO: 73987 - DNA, 20 bp, synthetic construct
  source 1..20: mol_type = other DNA
cattaatccacctctgggct

SEQ ID NO: 73988 - DNA, 20 bp, synthetic construct
  source 1..20: mol_type = other DNA
gcattaatccacctctgggc

SEQ ID NO: 73989 - DNA, 20 bp, synthetic construct
  source 1..20: mol_type = other DNA
agcattaatccacctctggg

SEQ ID NO: 73990 - DNA, 20 bp, synthetic construct
  source 1..20: mol_type = other DNA
aagcattaatccacctctgg

SEQ ID NO: 73991 - DNA, 20 bp, synthetic construct
  source 1..20: mol_type = other DNA
aaagcattaatccacctctg

SEQ ID NO: 73992 - DNA, 20 bp, synthetic construct
  source 1..20: mol_type = other DNA
aaaagcattaatccacctct

SEQ ID NO: 73993 - DNA, 20 bp, synthetic construct
  source 1..20: mol_type = other DNA
taaaagcattaatccacctc

SEQ ID NO: 73994 - DNA, 20 bp, synthetic construct
  source 1..20: mol_type = other DNA
ataaaagcattaatccacct

SEQ ID NO: 73995 - DNA, 20 bp, synthetic construct
  source 1..20: mol_type = other DNA
aataaaagcattaatccacc

SEQ ID NO: 73996 - DNA, 20 bp, synthetic construct
  source 1..20: mol_type = other DNA
gaataaaagcattaatccac

SEQ ID NO: 73997 - DNA, 20 bp, synthetic construct
  source 1..20: mol_type = other DNA
ggaataaaagcattaatcca

SEQ ID NO: 73998 - DNA, 20 bp, synthetic construct
  source 1..20: mol_type = other DNA
gggaataaaagcattaatcc

SEQ ID NO: 73999 - DNA, 20 bp, synthetic construct
  source 1..20: mol_type = other DNA
agggaataaaagcattaatc

SEQ ID NO: 74000 - DNA, 20 bp, synthetic construct
  source 1..20: mol_type = other DNA
cagggaataaaagcattaat

SEQ ID NO: 74001 - DNA, 20 bp, synthetic construct
  source 1..20: mol_type = other DNA
tcagggaataaaagcattaa

SEQ ID NO: 74002 - DNA, 20 bp, synthetic construct
  source 1..20: mol_type = other DNA
atcagggaataaaagcatta

SEQ ID NO: 74003 - DNA, 20 bp, synthetic construct
  source 1..20: mol_type = other DNA
catcagggaataaaagcatt

SEQ ID NO: 74004 - DNA, 20 bp, synthetic construct
  source 1..20: mol_type = other DNA
acatcagggaataaaagcat

SEQ ID NO: 74005 - DNA, 20 bp, synthetic construct
  source 1..20: mol_type = other DNA
tacatcagggaataaaagca

SEQ ID NO: 74006 - DNA, 20 bp, synthetic construct
  source 1..20: mol_type = other DNA
gtacatcagggaataaaagc

SEQ ID NO: 74007 - DNA, 20 bp, synthetic construct
  source 1..20: mol_type = other DNA
tgtacatcagggaataaaag

SEQ ID NO: 74008 - DNA, 20 bp, synthetic construct
  source 1..20: mol_type = other DNA
ctgtacatcagggaataaaa

SEQ ID NO: 74009 - DNA, 20 bp, synthetic construct
  source 1..20: mol_type = other DNA
cctgtacatcagggaataaa

SEQ ID NO: 74010 - DNA, 20 bp, synthetic construct
  source 1..20: mol_type = other DNA
acctgtacatcagggaataa

SEQ ID NO: 74011 - DNA, 20 bp, synthetic construct
  source 1..20: mol_type = other DNA
tacctgtacatcagggaata

SEQ ID NO: 74012 - DNA, 20 bp, synthetic construct
  source 1..20: mol_type = other DNA
gtacctgtacatcagggaat

SEQ ID NO: 74013 - DNA, 20 bp, synthetic construct
  source 1..20: mol_type = other DNA
tgtacctgtacatcagggaa

SEQ ID NO: 74014 - DNA, 20 bp, synthetic construct
  source 1..20: mol_type = other DNA
gtgtacctgtacatcaggga

SEQ ID NO: 74015 - DNA, 20 bp, synthetic construct
  source 1..20: mol_type = other DNA
tgtgtacctgtacatcaggg

SEQ ID NO: 74016 - DNA, 20 bp, synthetic construct
  source 1..20: mol_type = other DNA
gtgtgtacctgtacatcagg

SEQ ID NO: 74017 - DNA, 20 bp, synthetic construct
  source 1..20: mol_type = other DNA
tgtgtgtacctgtacatcag

SEQ ID NO: 74018 - DNA, 20 bp, synthetic construct
  source 1..20: mol_type = other DNA
gtgtgtgtacctgtacatca

SEQ ID NO: 74019 - DNA, 20 bp, synthetic construct
  source 1..20: mol_type = other DNA
agtgtgtgtacctgtacatc

SEQ ID NO: 74020 - DNA, 20 bp, synthetic construct
  source 1..20: mol_type = other DNA
gagtgtgtgtacctgtacat

SEQ ID NO: 74021 - DNA, 20 bp, synthetic construct
  source 1..20: mol_type = other DNA
tgagtgtgtgtacctgtaca

SEQ ID NO: 74022 - DNA, 20 bp, synthetic construct
  source 1..20: mol_type = other DNA
atgagtgtgtgtacctgtac

SEQ ID NO: 74023 - DNA, 20 bp, synthetic construct
  source 1..20: mol_type = other DNA
tatgagtgtgtgtacctgta

SEQ ID NO: 74024 - DNA, 20 bp, synthetic construct
  source 1..20: mol_type = other DNA
gtatgagtgtgtgtacctgt

SEQ ID NO: 74025 - DNA, 20 bp, synthetic construct
  source 1..20: mol_type = other DNA
ggtatgagtgtgtgtacctg

SEQ ID NO: 74026 - DNA, 20 bp, synthetic construct
  source 1..20: mol_type = other DNA
aggtatgagtgtgtgtacct

SEQ ID NO: 74027 - DNA, 20 bp, synthetic construct
  source 1..20: mol_type = other DNA
taggtatgagtgtgtgtacc

SEQ ID NO: 74028 - DNA, 20 bp, synthetic construct
  source 1..20: mol_type = other DNA
gtaggtatgagtgtgtgtac

SEQ ID NO: 74029 - DNA, 20 bp, synthetic construct
  source 1..20: mol_type = other DNA
ggtaggtatgagtgtgtgta

SEQ ID NO: 74030 - DNA, 20 bp, synthetic construct
  source 1..20: mol_type = other DNA
gggtaggtatgagtgtgtgt

SEQ ID NO: 74031 - DNA, 20 bp, synthetic construct
  source 1..20: mol_type = other DNA
tgggtaggtatgagtgtgtg

SEQ ID NO: 74032 - DNA, 20 bp, synthetic construct
  source 1..20: mol_type = other DNA
gtgggtaggtatgagtgtgt

SEQ ID NO: 74033 - DNA, 20 bp, synthetic construct
  source 1..20: mol_type = other DNA
tgtgggtaggtatgagtgtg

SEQ ID NO: 74034 - DNA, 20 bp, synthetic construct
  source 1..20: mol_type = other DNA
gtgtgggtaggtatgagtgt

SEQ ID NO: 74035 - DNA, 20 bp, synthetic construct
  source 1..20: mol_type = other DNA
ggtgtgggtaggtatgagtg

SEQ ID NO: 74036 - DNA, 20 bp, synthetic construct
  source 1..20: mol_type = other DNA
aggtgtgggtaggtatgagt

SEQ ID NO: 74037 - DNA, 20 bp, synthetic construct
  source 1..20: mol_type = other DNA
taggtgtgggtaggtatgag

SEQ ID NO: 74038 - DNA, 20 bp, synthetic construct
  source 1..20: mol_type = other DNA
ctaggtgtgggtaggtatga

SEQ ID NO: 74039 - DNA, 20 bp, synthetic construct
  source 1..20: mol_type = other DNA
actaggtgtgggtaggtatg

SEQ ID NO: 74040 - DNA, 20 bp, synthetic construct
  source 1..20: mol_type = other DNA
aactaggtgtgggtaggtat

SEQ ID NO: 74041 - DNA, 20 bp, synthetic construct
  source 1..20: mol_type = other DNA
aaactaggtgtgggtaggta

SEQ ID NO: 74042 - DNA, 20 bp, synthetic construct
  source 1..20: mol_type = other DNA
caaactaggtgtgggtaggt

SEQ ID NO: 74043 - DNA, 20 bp, synthetic construct
  source 1..20: mol_type = other DNA
ccaaactaggtgtgggtagg

SEQ ID NO: 74044 - DNA, 20 bp, synthetic construct
  source 1..20: mol_type = other DNA
cccaaactaggtgtgggtag

SEQ ID NO: 74045 - DNA, 20 bp, synthetic construct
  source 1..20: mol_type = other DNA
tcccaaactaggtgtgggta

SEQ ID NO: 74046 - DNA, 20 bp, synthetic construct
  source 1..20: mol_type = other DNA
atcccaaactaggtgtgggt

SEQ ID NO: 74047 - DNA, 20 bp, synthetic construct
  source 1..20: mol_type = other DNA
tatcccaaactaggtgtggg

SEQ ID NO: 74048 - DNA, 20 bp, synthetic construct
  source 1..20: mol_type = other DNA
ttatcccaaactaggtgtgg

SEQ ID NO: 74049 - DNA, 20 bp, synthetic construct
  source 1..20: mol_type = other DNA
cttatcccaaactaggtgtg

SEQ ID NO: 74050 - DNA, 20 bp, synthetic construct
  source 1..20: mol_type = other DNA
tcttatcccaaactaggtgt

SEQ ID NO: 74051 - DNA, 20 bp, synthetic construct
  source 1..20: mol_type = other DNA
ttcttatcccaaactaggtg

SEQ ID NO: 74052 - DNA, 20 bp, synthetic construct
  source 1..20: mol_type = other DNA
cttcttatcccaaactaggt

SEQ ID NO: 74053 - DNA, 20 bp, synthetic construct
  source 1..20: mol_type = other DNA
tcttcttatcccaaactagg

SEQ ID NO: 74054 - DNA, 20 bp, synthetic construct
  source 1..20: mol_type = other DNA
ctcttcttatcccaaactag

SEQ ID NO: 74055 - DNA, 20 bp, synthetic construct
  source 1..20: mol_type = other DNA
cctcttcttatcccaaacta

SEQ ID NO: 74056 - DNA, 20 bp, synthetic construct
  source 1..20: mol_type = other DNA
acctcttcttatcccaaact

SEQ ID NO: 74057 - DNA, 20 bp, synthetic construct
  source 1..20: mol_type = other DNA
aacctcttcttatcccaaac

SEQ ID NO: 74058 - DNA, 20 bp, synthetic construct
  source 1..20: mol_type = other DNA
taacctcttcttatcccaaa

SEQ ID NO: 74059 - DNA, 20 bp, synthetic construct
  source 1..20: mol_type = other DNA
ctaacctcttcttatcccaa

SEQ ID NO: 74060 - DNA, 20 bp, synthetic construct
  source 1..20: mol_type = other DNA
tctaacctcttcttatccca

SEQ ID NO: 74061 - DNA, 20 bp, synthetic construct
  source 1..20: mol_type = other DNA
ttctaacctcttcttatccc

SEQ ID NO: 74062 - DNA, 20 bp, synthetic construct
  source 1..20: mol_type = other DNA
attctaacctcttcttatcc

SEQ ID NO: 74063 - DNA, 20 bp, synthetic construct
  source 1..20: mol_type = other DNA
aattctaacctcttcttatc

SEQ ID NO: 74064 - DNA, 20 bp, synthetic construct
  source 1..20: mol_type = other DNA
taattctaacctcttcttat

SEQ ID NO: 74065 - DNA, 20 bp, synthetic construct
  source 1..20: mol_type = other DNA
ctaattctaacctcttctta

SEQ ID NO: 74066 - DNA, 20 bp, synthetic construct
  source 1..20: mol_type = other DNA
gctaattctaacctcttctt

SEQ ID NO: 74067 - DNA, 20 bp, synthetic construct
  source 1..20: mol_type = other DNA
agctaattctaacctcttct

SEQ ID NO: 74068 - DNA, 20 bp, synthetic construct
  source 1..20: mol_type = other DNA
tagctaattctaacctcttc

SEQ ID NO: 74069 - DNA, 20 bp, synthetic construct
  source 1..20: mol_type = other DNA
ctagctaattctaacctctt

SEQ ID NO: 74070 - DNA, 20 bp, synthetic construct
  source 1..20: mol_type = other DNA
cctagctaattctaacctct

SEQ ID NO: 74071 - DNA, 20 bp, synthetic construct
  source 1..20: mol_type = other DNA
gcctagctaattctaacctc

SEQ ID NO: 74072 - DNA, 20 bp, synthetic construct
  source 1..20: mol_type = other DNA
agcctagctaattctaacct

SEQ ID NO: 74073 - DNA, 20 bp, synthetic construct
  source 1..20: mol_type = other DNA
aagcctagctaattctaacc

SEQ ID NO: 74074 - DNA, 20 bp, synthetic construct
  source 1..20: mol_type = other DNA
caagcctagctaattctaac

SEQ ID NO: 74075 - DNA, 20 bp, synthetic construct
  source 1..20: mol_type = other DNA
tcaagcctagctaattctaa

SEQ ID NO: 74076 - DNA, 20 bp, synthetic construct
  source 1..20: mol_type = other DNA
ttcaagcctagctaattcta

SEQ ID NO: 74077 - DNA, 20 bp, synthetic construct
  source 1..20: mol_type = other DNA
cttcaagcctagctaattct

SEQ ID NO: 74078 - DNA, 20 bp, synthetic construct
  source 1..20: mol_type = other DNA
acttcaagcctagctaattc

SEQ ID NO: 74079 - DNA, 20 bp, synthetic construct
  source 1..20: mol_type = other DNA
aacttcaagcctagctaatt

SEQ ID NO: 74080 - DNA, 20 bp, synthetic construct
  source 1..20: mol_type = other DNA
gaacttcaagcctagctaat

SEQ ID NO: 74081 - DNA, 20 bp, synthetic construct
  source 1..20: mol_type = other DNA
ggaacttcaagcctagctaa

SEQ ID NO: 74082 - DNA, 20 bp, synthetic construct
  source 1..20: mol_type = other DNA
tggaacttcaagcctagcta

SEQ ID NO: 74083 - DNA, 20 bp, synthetic construct
  source 1..20: mol_type = other DNA
atggaacttcaagcctagct

SEQ ID NO: 74084 - DNA, 20 bp, synthetic construct
  source 1..20: mol_type = other DNA
catggaacttcaagcctagc

SEQ ID NO: 74085 - DNA, 20 bp, synthetic construct
  source 1..20: mol_type = other DNA
gcatggaacttcaagcctag

SEQ ID NO: 74086 - DNA, 20 bp, synthetic construct
  source 1..20: mol_type = other DNA
agcatggaacttcaagccta

SEQ ID NO: 74087 - DNA, 20 bp, synthetic construct
  source 1..20: mol_type = other DNA
aagcatggaacttcaagcct

SEQ ID NO: 74088 - DNA, 20 bp, synthetic construct
  source 1..20: mol_type = other DNA
taagcatggaacttcaagcc

SEQ ID NO: 74089 - DNA, 20 bp, synthetic construct
  source 1..20: mol_type = other DNA
ttaagcatggaacttcaagc

SEQ ID NO: 74090 - DNA, 20 bp, synthetic construct
  source 1..20: mol_type = other DNA
tttaagcatggaacttcaag

SEQ ID NO: 74091 - DNA, 20 bp, synthetic construct
  source 1..20: mol_type = other DNA
atttaagcatggaacttcaa

SEQ ID NO: 74092 - DNA, 20 bp, synthetic construct
  source 1..20: mol_type = other DNA
aatttaagcatggaacttca

SEQ ID NO: 74093 - DNA, 20 bp, synthetic construct
  source 1..20: mol_type = other DNA
aaatttaagcatggaacttc

SEQ ID NO: 74094 - DNA, 20 bp, synthetic construct
  source 1..20: mol_type = other DNA
caaatttaagcatggaactt

SEQ ID NO: 74095 - DNA, 20 bp, synthetic construct
  source 1..20: mol_type = other DNA
gcaaatttaagcatggaact

SEQ ID NO: 74096 - DNA, 20 bp, synthetic construct
  source 1..20: mol_type = other DNA
agcaaatttaagcatggaac

SEQ ID NO: 74097 - DNA, 20 bp, synthetic construct
  source 1..20: mol_type = other DNA
cagcaaatttaagcatggaa

SEQ ID NO: 74098 - DNA, 20 bp, synthetic construct
  source 1..20: mol_type = other DNA
ccagcaaatttaagcatgga

SEQ ID NO: 74099 - DNA, 20 bp, synthetic construct
  source 1..20: mol_type = other DNA
gccagcaaatttaagcatgg

SEQ ID NO: 74100 - DNA, 20 bp, synthetic construct
  source 1..20: mol_type = other DNA
agccagcaaatttaagcatg

SEQ ID NO: 74101 - DNA, 20 bp, synthetic construct
  source 1..20: mol_type = other DNA
gagccagcaaatttaagcat

SEQ ID NO: 74102 - DNA, 20 bp, synthetic construct
  source 1..20: mol_type = other DNA
tgagccagcaaatttaagca

SEQ ID NO: 74103 - DNA, 20 bp, synthetic construct
  source 1..20: mol_type = other DNA
ctgagccagcaaatttaagc

SEQ ID NO: 74104 - DNA, 20 bp, synthetic construct
  source 1..20: mol_type = other DNA
tctgagccagcaaatttaag

SEQ ID NO: 74105 - DNA, 20 bp, synthetic construct
  source 1..20: mol_type = other DNA
atctgagccagcaaatttaa

SEQ ID NO: 74106 - DNA, 20 bp, synthetic construct
  source 1..20: mol_type = other DNA
aatctgagccagcaaattta

SEQ ID NO: 74107 - DNA, 20 bp, synthetic construct
  source 1..20: mol_type = other DNA
aaatctgagccagcaaattt

SEQ ID NO: 74108 - DNA, 20 bp, synthetic construct
  source 1..20: mol_type = other DNA
gaaatctgagccagcaaatt

SEQ ID NO: 74109 - DNA, 20 bp, synthetic construct
  source 1..20: mol_type = other DNA
agaaatctgagccagcaaat

SEQ ID NO: 74110 - DNA, 20 bp, synthetic construct
  source 1..20: mol_type = other DNA
aagaaatctgagccagcaaa

SEQ ID NO: 74111 - DNA, 20 bp, synthetic construct
  source 1..20: mol_type = other DNA
taagaaatctgagccagcaa

SEQ ID NO: 74112 - DNA, 20 bp, synthetic construct
  source 1..20: mol_type = other DNA
ataagaaatctgagccagca

SEQ ID NO: 74113 - DNA, 20 bp, synthetic construct
  source 1..20: mol_type = other DNA
aataagaaatctgagccagc

SEQ ID NO: 74114 - DNA, 20 bp, synthetic construct
  source 1..20: mol_type = other DNA
aaataagaaatctgagccag

SEQ ID NO: 74115 - DNA, 20 bp, synthetic construct
  source 1..20: mol_type = other DNA
aaaataagaaatctgagcca

SEQ ID NO: 74116 - DNA, 20 bp, synthetic construct
  source 1..20: mol_type = other DNA
caaaataagaaatctgagcc

SEQ ID NO: 74117 - DNA, 20 bp, synthetic construct
  source 1..20: mol_type = other DNA
ccaaaataagaaatctgagc

SEQ ID NO: 74118 - DNA, 20 bp, synthetic construct
  source 1..20: mol_type = other DNA
gccaaaataagaaatctgag

SEQ ID NO: 74119 - DNA, 20 bp, synthetic construct
  source 1..20: mol_type = other DNA
tgccaaaataagaaatctga

SEQ ID NO: 74120 - DNA, 20 bp, synthetic construct
  source 1..20: mol_type = other DNA
atgccaaaataagaaatctg

SEQ ID NO: 74121 - DNA, 20 bp, synthetic construct
  source 1..20: mol_type = other DNA
gatgccaaaataagaaatct

SEQ ID NO: 74122 - DNA, 20 bp, synthetic construct
  source 1..20: mol_type = other DNA
tgatgccaaaataagaaatc

SEQ ID NO: 74123 - DNA, 20 bp, synthetic construct
  source 1..20: mol_type = other DNA
gtgatgccaaaataagaaat

SEQ ID NO: 74124 - DNA, 20 bp, synthetic construct
  source 1..20: mol_type = other DNA
agtgatgccaaaataagaaa

SEQ ID NO: 74125 - DNA, 20 bp, synthetic construct
  source 1..20: mol_type = other DNA
aagtgatgccaaaataagaa

SEQ ID NO: 74126 - DNA, 20 bp, synthetic construct
  source 1..20: mol_type = other DNA
aaagtgatgccaaaataaga

SEQ ID NO: 74127 - DNA, 20 bp, synthetic construct
  source 1..20: mol_type = other DNA
caaagtgatgccaaaataag

SEQ ID NO: 74128 - DNA, 20 bp, synthetic construct
  source 1..20: mol_type = other DNA
gcaaagtgatgccaaaataa

SEQ ID NO: 74129 - DNA, 20 bp, synthetic construct
  source 1..20: mol_type = other DNA
ggcaaagtgatgccaaaata

SEQ ID NO: 74130 - DNA, 20 bp, synthetic construct
  source 1..20: mol_type = other DNA
gggcaaagtgatgccaaaat

SEQ ID NO: 74131 - DNA, 20 bp, synthetic construct
  source 1..20: mol_type = other DNA
tgggcaaagtgatgccaaaa

SEQ ID NO: 74132 - DNA, 20 bp, synthetic construct
  source 1..20: mol_type = other DNA
atgggcaaagtgatgccaaa

SEQ ID NO: 74133 - DNA, 20 bp, synthetic construct
  source 1..20: mol_type = other DNA
aatgggcaaagtgatgccaa

SEQ ID NO: 74134 - DNA, 20 bp, synthetic construct
  source 1..20: mol_type = other DNA
taatgggcaaagtgatgcca

SEQ ID NO: 74135 - DNA, 20 bp, synthetic construct
  source 1..20: mol_type = other DNA
ctaatgggcaaagtgatgcc

SEQ ID NO: 74136 - DNA, 20 bp, synthetic construct
  source 1..20: mol_type = other DNA
cctaatgggcaaagtgatgc

SEQ ID NO: 74137 - DNA, 20 bp, synthetic construct
  source 1..20: mol_type = other DNA
ccctaatgggcaaagtgatg

SEQ ID NO: 74138 - DNA, 20 bp, synthetic construct
  source 1..20: mol_type = other DNA
tccctaatgggcaaagtgat

SEQ ID NO: 74139 - DNA, 20 bp, synthetic construct
  source 1..20: mol_type = other DNA
ctccctaatgggcaaagtga

SEQ ID NO: 74140 - DNA, 20 bp, synthetic construct
  source 1..20: mol_type = other DNA
tctccctaatgggcaaagtg

SEQ ID NO: 74141 - DNA, 20 bp, synthetic construct
  source 1..20: mol_type = other DNA
gtctccctaatgggcaaagt

SEQ ID NO: 74142 - DNA, 20 bp, synthetic construct
  source 1..20: mol_type = other DNA
tgtctccctaatgggcaaag

SEQ ID NO: 74143 - DNA, 20 bp, synthetic construct
  source 1..20: mol_type = other DNA
ttgtctccctaatgggcaaa

SEQ ID NO: 74144 - DNA, 20 bp, synthetic construct
  source 1..20: mol_type = other DNA
attgtctccctaatgggcaa

SEQ ID NO: 74145 - DNA, 20 bp, synthetic construct
  source 1..20: mol_type = other DNA
cattgtctccctaatgggca

SEQ ID NO: 74146 - DNA, 20 bp, synthetic construct
  source 1..20: mol_type = other DNA
tcattgtctccctaatgggc

SEQ ID NO: 74147 - DNA, 20 bp, synthetic construct
  source 1..20: mol_type = other DNA
gtcattgtctccctaatggg

SEQ ID NO: 74148 - DNA, 20 bp, synthetic construct
  source 1..20: mol_type = other DNA
tgtcattgtctccctaatgg

SEQ ID NO: 74149 - DNA, 20 bp, synthetic construct
  source 1..20: mol_type = other DNA
ctgtcattgtctccctaatg

SEQ ID NO: 74150 - DNA, 20 bp, synthetic construct
  source 1..20: mol_type = other DNA
actgtcattgtctccctaat

SEQ ID NO: 74151 - DNA, 20 bp, synthetic construct
  source 1..20: mol_type = other DNA
aactgtcattgtctccctaa

SEQ ID NO: 74152 - DNA, 20 bp, synthetic construct
  source 1..20: mol_type = other DNA
taactgtcattgtctcccta

SEQ ID NO: 74153 - DNA, 20 bp, synthetic construct
  source 1..20: mol_type = other DNA
ataactgtcattgtctccct

SEQ ID NO: 74154 - DNA, 20 bp, synthetic construct
  source 1..20: mol_type = other DNA
tataactgtcattgtctccc

SEQ ID NO: 74155 - DNA, 20 bp, synthetic construct
  source 1..20: mol_type = other DNA
ctataactgtcattgtctcc

SEQ ID NO: 74156 - DNA, 20 bp, synthetic construct
  source 1..20: mol_type = other DNA
tctataactgtcattgtctc

SEQ ID NO: 74157 - DNA, 20 bp, synthetic construct
  source 1..20: mol_type = other DNA
ttctataactgtcattgtct

SEQ ID NO: 74158 - DNA, 20 bp, synthetic construct
  source 1..20: mol_type = other DNA
cttctataactgtcattgtc

SEQ ID NO: 74159 - DNA, 20 bp, synthetic construct
  source 1..20: mol_type = other DNA
gcttctataactgtcattgt

SEQ ID NO: 74160 - DNA, 20 bp, synthetic construct
  source 1..20: mol_type = other DNA
tgcttctataactgtcattg

SEQ ID NO: 74161 - DNA, 20 bp, synthetic construct
  source 1..20: mol_type = other DNA
atgcttctataactgtcatt

SEQ ID NO: 74162 - DNA, 20 bp, synthetic construct
  source 1..20: mol_type = other DNA
aatgcttctataactgtcat

SEQ ID NO: 74163 - DNA, 20 bp, synthetic construct
  source 1..20: mol_type = other DNA
caatgcttctataactgtca

SEQ ID NO: 74164 - DNA, 20 bp, synthetic construct
  source 1..20: mol_type = other DNA
gcaatgcttctataactgtc

SEQ ID NO: 74165 - DNA, 20 bp, synthetic construct
  source 1..20: mol_type = other DNA
ggcaatgcttctataactgt

SEQ ID NO: 74166 - DNA, 20 bp, synthetic construct
  source 1..20: mol_type = other DNA
tggcaatgcttctataactg

SEQ ID NO: 74167 - DNA, 20 bp, synthetic construct
  source 1..20: mol_type = other DNA
ttggcaatgcttctataact

SEQ ID NO: 74168 - DNA, 20 bp, synthetic construct
  source 1..20: mol_type = other DNA
tttggcaatgcttctataac

SEQ ID NO: 74169 - DNA, 20 bp, synthetic construct
  source 1..20: mol_type = other DNA
atttggcaatgcttctataa

SEQ ID NO: 74170 - DNA, 20 bp, synthetic construct
  source 1..20: mol_type = other DNA
tatttggcaatgcttctata

SEQ ID NO: 74171 - DNA, 20 bp, synthetic construct
  source 1..20: mol_type = other DNA
ttatttggcaatgcttctat

SEQ ID NO: 74172 - DNA, 20 bp, synthetic construct
  source 1..20: mol_type = other DNA
tttatttggcaatgcttcta

SEQ ID NO: 74173 - DNA, 20 bp, synthetic construct
  source 1..20: mol_type = other DNA
ttttatttggcaatgcttct

SEQ ID NO: 74174 - DNA, 20 bp, synthetic construct
  source 1..20: mol_type = other DNA
tttttatttggcaatgcttc

SEQ ID NO: 74175 - DNA, 20 bp, synthetic construct
  source 1..20: mol_type = other DNA
ttttttatttggcaatgctt

SEQ ID NO: 74176 - DNA, 20 bp, synthetic construct
  source 1..20: mol_type = other DNA
attttttatttggcaatgct

SEQ ID NO: 74177 - DNA, 20 bp, synthetic construct
  source 1..20: mol_type = other DNA
gattttttatttggcaatgc

SEQ ID NO: 74178 - DNA, 20 bp, synthetic construct
  source 1..20: mol_type = other DNA
ggattttttatttggcaatg

SEQ ID NO: 74179 - DNA, 20 bp, synthetic construct
  source 1..20: mol_type = other DNA
tggattttttatttggcaat

SEQ ID NO: 74180 - DNA, 20 bp, synthetic construct
  source 1..20: mol_type = other DNA
atggattttttatttggcaa

SEQ ID NO: 74181 - DNA, 20 bp, synthetic construct
  source 1..20: mol_type = other DNA
gatggattttttatttggca

SEQ ID NO: 74182 - DNA, 20 bp, synthetic construct
  source 1..20: mol_type = other DNA
agatggattttttatttggc

SEQ ID NO: 74183 - DNA, 20 bp, synthetic construct
  source 1..20: mol_type = other DNA
cagatggattttttatttgg

SEQ ID NO: 74184 - DNA, 20 bp, synthetic construct
  source 1..20: mol_type = other DNA
ccagatggattttttatttg

SEQ ID NO: 74185 - DNA, 20 bp, synthetic construct
  source 1..20: mol_type = other DNA
tccagatggattttttattt

SEQ ID NO: 74186 - DNA, 20 bp, synthetic construct
  source 1..20: mol_type = other DNA
ttccagatggattttttatt

SEQ ID NO: 74187 - DNA, 20 bp, synthetic construct
  source 1..20: mol_type = other DNA
attccagatggattttttat

SEQ ID NO: 74188 - DNA, 20 bp, synthetic construct
  source 1..20: mol_type = other DNA
tattccagatggatttttta

SEQ ID NO: 74189 - DNA, 20 bp, synthetic construct
  source 1..20: mol_type = other DNA
ttattccagatggatttttt

SEQ ID NO: 74190 - DNA, 20 bp, synthetic construct
  source 1..20: mol_type = other DNA
gttattccagatggattttt

SEQ ID NO: 74191 - DNA, 20 bp, synthetic construct
  source 1..20: mol_type = other DNA
ggttattccagatggatttt

SEQ ID NO: 74192 - DNA, 20 bp, synthetic construct
  source 1..20: mol_type = other DNA
aggttattccagatggattt

SEQ ID NO: 74193 - DNA, 20 bp, synthetic construct
  source 1..20: mol_type = other DNA
gaggttattccagatggatt

SEQ ID NO: 74194 - DNA, 20 bp, synthetic construct
  source 1..20: mol_type = other DNA
agaggttattccagatggat

SEQ ID NO: 74195 - DNA, 20 bp, synthetic construct
  source 1..20: mol_type = other DNA
aagaggttattccagatgga

SEQ ID NO: 74196 - DNA, 20 bp, synthetic construct
  source 1..20: mol_type = other DNA
aaagaggttattccagatgg

SEQ ID NO: 74197 - DNA, 20 bp, synthetic construct
  source 1..20: mol_type = other DNA
aaaagaggttattccagatg

SEQ ID NO: 74198 - DNA, 20 bp, synthetic construct
  source 1..20: mol_type = other DNA
caaaagaggttattccagat

SEQ ID NO: 74199 - DNA, 20 bp, synthetic construct
  source 1..20: mol_type = other DNA
acaaaagaggttattccaga

SEQ ID NO: 74200 - DNA, 20 bp, synthetic construct
  source 1..20: mol_type = other DNA
tacaaaagaggttattccag

SEQ ID NO: 74201 - DNA, 20 bp, synthetic construct
  source 1..20: mol_type = other DNA
ctacaaaagaggttattcca

SEQ ID NO: 74202 - DNA, 20 bp, synthetic construct
  source 1..20: mol_type = other DNA
cctacaaaagaggttattcc

SEQ ID NO: 74203 - DNA, 20 bp, synthetic construct
  source 1..20: mol_type = other DNA
tcctacaaaagaggttattc

SEQ ID NO: 74204 - DNA, 20 bp, synthetic construct
  source 1..20: mol_type = other DNA
ctcctacaaaagaggttatt

SEQ ID NO: 74205 - DNA, 20 bp, synthetic construct
  source 1..20: mol_type = other DNA
actcctacaaaagaggttat

SEQ ID NO: 74206 - DNA, 20 bp, synthetic construct
  source 1..20: mol_type = other DNA
tactcctacaaaagaggtta

SEQ ID NO: 74207 - DNA, 20 bp, synthetic construct
  source 1..20: mol_type = other DNA
atactcctacaaaagaggtt

SEQ ID NO: 74208 - DNA, 20 bp, synthetic construct
  source 1..20: mol_type = other DNA
aatactcctacaaaagaggt

SEQ ID NO: 74209 - DNA, 20 bp, synthetic construct
  source 1..20: mol_type = other DNA
caatactcctacaaaagagg

SEQ ID NO: 74210 - DNA, 20 bp, synthetic construct
  source 1..20: mol_type = other DNA
acaatactcctacaaaagag

SEQ ID NO: 74211 - DNA, 20 bp, synthetic construct
  source 1..20: mol_type = other DNA
cacaatactcctacaaaaga

SEQ ID NO: 74212 - DNA, 20 bp, synthetic construct
  source 1..20: mol_type = other DNA
acacaatactcctacaaaag

SEQ ID NO: 74213 - DNA, 20 bp, synthetic construct
  source 1..20: mol_type = other DNA
cacacaatactcctacaaaa

SEQ ID NO: 74214 - DNA, 20 bp, synthetic construct
  source 1..20: mol_type = other DNA
acacacaatactcctacaaa

SEQ ID NO: 74215 - DNA, 20 bp, synthetic construct
  source 1..20: mol_type = other DNA
aacacacaatactcctacaa

SEQ ID NO: 74216 - DNA, 20 bp, synthetic construct
  source 1..20: mol_type = other DNA
aaacacacaatactcctaca

SEQ ID NO: 74217 - DNA, 20 bp, synthetic construct
  source 1..20: mol_type = other DNA
taaacacacaatactcctac

SEQ ID NO: 74218 - DNA, 20 bp, synthetic construct
  source 1..20: mol_type = other DNA
ctaaacacacaatactccta

SEQ ID NO: 74219 - DNA, 20 bp, synthetic construct
  source 1..20: mol_type = other DNA
actaaacacacaatactcct

SEQ ID NO: 74220 - DNA, 20 bp, synthetic construct
  source 1..20: mol_type = other DNA
aactaaacacacaatactcc

SEQ ID NO: 74221 - DNA, 20 bp, synthetic construct
  source 1..20: mol_type = other DNA
caactaaacacacaatactc

SEQ ID NO: 74222 - DNA, 20 bp, synthetic construct
  source 1..20: mol_type = other DNA
acaactaaacacacaatact

SEQ ID NO: 74223 - DNA, 20 bp, synthetic construct
  source 1..20: mol_type = other DNA
aacaactaaacacacaatac

SEQ ID NO: 74224 - DNA, 20 bp, synthetic construct
  source 1..20: mol_type = other DNA
caacaactaaacacacaata

SEQ ID NO: 74225 - DNA, 20 bp, synthetic construct
  source 1..20: mol_type = other DNA
tcaacaactaaacacacaat

SEQ ID NO: 74226 - DNA, 20 bp, synthetic construct
  source 1..20: mol_type = other DNA
atcaacaactaaacacacaa

SEQ ID NO: 74227 - DNA, 20 bp, synthetic construct
  source 1..20: mol_type = other DNA
aatcaacaactaaacacaca

SEQ ID NO: 74228 - DNA, 20 bp, synthetic construct
  source 1..20: mol_type = other DNA
gaatcaacaactaaacacac

SEQ ID NO: 74229 - DNA, 20 bp, synthetic construct
  source 1..20: mol_type = other DNA
cgaatcaacaactaaacaca

SEQ ID NO: 74230 - DNA, 20 bp, synthetic construct
  source 1..20: mol_type = other DNA
acgaatcaacaactaaacac

SEQ ID NO: 74231 - DNA, 20 bp, synthetic construct
  source 1..20: mol_type = other DNA
gacgaatcaacaactaaaca

SEQ ID NO: 74232 - DNA, 20 bp, synthetic construct
  source 1..20: mol_type = other DNA
ggacgaatcaacaactaaac

SEQ ID NO: 74233 - DNA, 20 bp, synthetic construct
  source 1..20: mol_type = other DNA
gggacgaatcaacaactaaa

SEQ ID NO: 74234 - DNA, 20 bp, synthetic construct
  source 1..20: mol_type = other DNA
agggacgaatcaacaactaa

SEQ ID NO: 74235 - DNA, 20 bp, synthetic construct
  source 1..20: mol_type = other DNA
aagggacgaatcaacaacta

SEQ ID NO: 74236 - DNA, 20 bp, synthetic construct
  source 1..20: mol_type = other DNA
gaagggacgaatcaacaact

SEQ ID NO: 74237 - DNA, 20 bp, synthetic construct
  source 1..20: mol_type = other DNA
ggaagggacgaatcaacaac

SEQ ID NO: 74238 - DNA, 20 bp, synthetic construct
  source 1..20: mol_type = other DNA
aggaagggacgaatcaacaa

SEQ ID NO: 74239 - DNA, 20 bp, synthetic construct
  source 1..20: mol_type = other DNA
gaggaagggacgaatcaaca

SEQ ID NO: 74240 - DNA, 20 bp, synthetic construct
  source 1..20: mol_type = other DNA
ggaggaagggacgaatcaac

SEQ ID NO: 74241 - DNA, 20 bp, synthetic construct
  source 1..20: mol_type = other DNA
aggaggaagggacgaatcaa

SEQ ID NO: 74242 - DNA, 20 bp, synthetic construct
  source 1..20: mol_type = other DNA
gaggaggaagggacgaatca

SEQ ID NO: 74243 - DNA, 20 bp, synthetic construct
  source 1..20: mol_type = other DNA
agaggaggaagggacgaatc

SEQ ID NO: 74244 - DNA, 20 bp, synthetic construct
  source 1..20: mol_type = other DNA
aagaggaggaagggacgaat

SEQ ID NO: 74245 - DNA, 20 bp, synthetic construct
  source 1..20: mol_type = other DNA
taagaggaggaagggacgaa

SEQ ID NO: 74246 - DNA, 20 bp, synthetic construct
  source 1..20: mol_type = other DNA
ctaagaggaggaagggacga

SEQ ID NO: 74247 - DNA, 20 bp, synthetic construct
  source 1..20: mol_type = other DNA
actaagaggaggaagggacg

SEQ ID NO: 74248 - DNA, 20 bp, synthetic construct
  source 1..20: mol_type = other DNA
cactaagaggaggaagggac

SEQ ID NO: 74249 - DNA, 20 bp, synthetic construct
  source 1..20: mol_type = other DNA
ccactaagaggaggaaggga

SEQ ID NO: 74250 - DNA, 20 bp, synthetic construct
  source 1..20: mol_type = other DNA
gccactaagaggaggaaggg

SEQ ID NO: 74251 - DNA, 20 bp, synthetic construct
  source 1..20: mol_type = other DNA
tgccactaagaggaggaagg

SEQ ID NO: 74252 - DNA, 20 bp, synthetic construct
  source 1..20: mol_type = other DNA
ttgccactaagaggaggaag

SEQ ID NO: 74253 - DNA, 20 bp, synthetic construct
  source 1..20: mol_type = other DNA
gttgccactaagaggaggaa

SEQ ID NO: 74254 - DNA, 20 bp, synthetic construct
  source 1..20: mol_type = other DNA
agttgccactaagaggagga

SEQ ID NO: 74255 - DNA, 20 bp, synthetic construct
  source 1..20: mol_type = other DNA
aagttgccactaagaggagg

SEQ ID NO: 74256 - DNA, 20 bp, synthetic construct
  source 1..20: mol_type = other DNA
taagttgccactaagaggag

SEQ ID NO: 74257 - DNA, 20 bp, synthetic construct
  source 1..20: mol_type = other DNA
gtaagttgccactaagagga

SEQ ID NO: 74258 - DNA, 20 bp, synthetic construct
  source 1..20: mol_type = other DNA
tgtaagttgccactaagagg

SEQ ID NO: 74259 - DNA, 20 bp, synthetic construct
  source 1..20: mol_type = other DNA
ctgtaagttgccactaagag

SEQ ID NO: 74260 - DNA, 20 bp, synthetic construct
  source 1..20: mol_type = other DNA
actgtaagttgccactaaga

SEQ ID NO: 74261 - DNA, 20 bp, synthetic construct
  source 1..20: mol_type = other DNA
tactgtaagttgccactaag

SEQ ID NO: 74262 - DNA, 20 bp, synthetic construct
  source 1..20: mol_type = other DNA
gtactgtaagttgccactaa

SEQ ID NO: 74263 - DNA, 20 bp, synthetic construct
  source 1..20: mol_type = other DNA
agtactgtaagttgccacta

SEQ ID NO: 74264 - DNA, 20 bp, synthetic construct
  source 1..20: mol_type = other DNA
cagtactgtaagttgccact

SEQ ID NO: 74265 - DNA, 20 bp, synthetic construct
  source 1..20: mol_type = other DNA
ccagtactgtaagttgccac

SEQ ID NO: 74266 - DNA, 20 bp, synthetic construct
  source 1..20: mol_type = other DNA
cccagtactgtaagttgcca

SEQ ID NO: 74267 - DNA, 20 bp, synthetic construct
  source 1..20: mol_type = other DNA
tcccagtactgtaagttgcc

SEQ ID NO: 74268 - DNA, 20 bp, synthetic construct
  source 1..20: mol_type = other DNA
ttcccagtactgtaagttgc

SEQ ID NO: 74269 - DNA, 20 bp, synthetic construct
  source 1..20: mol_type = other DNA
cttcccagtactgtaagttg

SEQ ID NO: 74270 - DNA, 20 bp, synthetic construct
  source 1..20: mol_type = other DNA
ccttcccagtactgtaagtt

SEQ ID NO: 74271 - DNA, 20 bp, synthetic construct
  source 1..20: mol_type = other DNA
tccttcccagtactgtaagt

SEQ ID NO: 74272 - DNA, 20 bp, synthetic construct
  source 1..20: mol_type = other DNA
ttccttcccagtactgtaag

SEQ ID NO: 74273 - DNA, 20 bp, synthetic construct
  source 1..20: mol_type = other DNA
gttccttcccagtactgtaa

SEQ ID NO: 74274 - DNA, 20 bp, synthetic construct
  source 1..20: mol_type = other DNA
tgttccttcccagtactgta

SEQ ID NO: 74275 - DNA, 20 bp, synthetic construct
  source 1..20: mol_type = other DNA
ctgttccttcccagtactgt

SEQ ID NO: 74276 - DNA, 20 bp, synthetic construct
  source 1..20: mol_type = other DNA
actgttccttcccagtactg

SEQ ID NO: 74277 - DNA, 20 bp, synthetic construct
  source 1..20: mol_type = other DNA
cactgttccttcccagtact

SEQ ID NO: 74278 - DNA, 20 bp, synthetic construct
  source 1..20: mol_type = other DNA
ccactgttccttcccagtac

SEQ ID NO: 74279 - DNA, 20 bp, synthetic construct
  source 1..20: mol_type = other DNA
gccactgttccttcccagta

SEQ ID NO: 74280 - DNA, 20 bp, synthetic construct
  source 1..20: mol_type = other DNA
agccactgttccttcccagt

SEQ ID NO: 74281 - DNA, 20 bp, synthetic construct
  source 1..20: mol_type = other DNA
cagccactgttccttcccag

SEQ ID NO: 74282 - DNA, 20 bp, synthetic construct
  source 1..20: mol_type = other DNA
ccagccactgttccttccca

SEQ ID NO: 74283 - DNA, 20 bp, synthetic construct
  source 1..20: mol_type = other DNA
cccagccactgttccttccc

SEQ ID NO: 74284 - DNA, 20 bp, synthetic construct
  source 1..20: mol_type = other DNA
tcccagccactgttccttcc

SEQ ID NO: 74285 - DNA, 20 bp, synthetic construct
  source 1..20: mol_type = other DNA
ctcccagccactgttccttc

SEQ ID NO: 74286 - DNA, 20 bp, synthetic construct
  source 1..20: mol_type = other DNA
gctcccagccactgttcctt

SEQ ID NO: 74287 - DNA, 20 bp, synthetic construct
  source 1..20: mol_type = other DNA
agctcccagccactgttcct

SEQ ID NO: 74288 - DNA, 20 bp, synthetic construct
  source 1..20: mol_type = other DNA
aagctcccagccactgttcc

SEQ ID NO: 74289 - DNA, 20 bp, synthetic construct
  source 1..20: mol_type = other DNA
taagctcccagccactgttc

SEQ ID NO: 74290 - DNA, 20 bp, synthetic construct
  source 1..20: mol_type = other DNA
ataagctcccagccactgtt

SEQ ID NO: 74291 - DNA, 20 bp, synthetic construct
  source 1..20: mol_type = other DNA
tataagctcccagccactgt

SEQ ID NO: 74292 - DNA, 20 bp, synthetic construct
  source 1..20: mol_type = other DNA
atataagctcccagccactg

SEQ ID NO: 74293 - DNA, 20 bp, synthetic construct
  source 1..20: mol_type = other DNA
aatataagctcccagccact

SEQ ID NO: 74294 - DNA, 20 bp, synthetic construct
  source 1..20: mol_type = other DNA
gaatataagctcccagccac

SEQ ID NO: 74295 - DNA, 20 bp, synthetic construct
  source 1..20: mol_type = other DNA
ggaatataagctcccagcca

SEQ ID NO: 74296 - DNA, 20 bp, synthetic construct
  source 1..20: mol_type = other DNA
aggaatataagctcccagcc

SEQ ID NO: 74297 - DNA, 20 bp, synthetic construct
  source 1..20: mol_type = other DNA
gaggaatataagctcccagc

SEQ ID NO: 74298 - DNA, 20 bp, synthetic construct
  source 1..20: mol_type = other DNA
tgaggaatataagctcccag

SEQ ID NO: 74299 - DNA, 20 bp, synthetic construct
  source 1..20: mol_type = other DNA
ctgaggaatataagctccca

SEQ ID NO: 74300 - DNA, 20 bp, synthetic construct
  source 1..20: mol_type = other DNA
gctgaggaatataagctccc

SEQ ID NO: 74301 - DNA, 20 bp, synthetic construct
  source 1..20: mol_type = other DNA
tgctgaggaatataagctcc

SEQ ID NO: 74302 - DNA, 20 bp, synthetic construct
  source 1..20: mol_type = other DNA
ctgctgaggaatataagctc

SEQ ID NO: 74303 - DNA, 20 bp, synthetic construct
  source 1..20: mol_type = other DNA
tctgctgaggaatataagct

SEQ ID NO: 74304 - DNA, 20 bp, synthetic construct
  source 1..20: mol_type = other DNA
ctctgctgaggaatataagc

SEQ ID NO: 74305 - DNA, 20 bp, synthetic construct
  source 1..20: mol_type = other DNA
gctctgctgaggaatataag

SEQ ID NO: 74306 - DNA, 20 bp, synthetic construct
  source 1..20: mol_type = other DNA
ggctctgctgaggaatataa

SEQ ID NO: 74307 - DNA, 20 bp, synthetic construct
  source 1..20: mol_type = other DNA
tggctctgctgaggaatata

SEQ ID NO: 74308 - DNA, 20 bp, synthetic construct
  source 1..20: mol_type = other DNA
ctggctctgctgaggaatat

SEQ ID NO: 74309 - DNA, 20 bp, synthetic construct
  source 1..20: mol_type = other DNA
tctggctctgctgaggaata

SEQ ID NO: 74310 - DNA, 20 bp, synthetic construct
  source 1..20: mol_type = other DNA
atctggctctgctgaggaat

SEQ ID NO: 74311 - DNA, 20 bp, synthetic construct
  source 1..20: mol_type = other DNA
gatctggctctgctgaggaa

SEQ ID NO: 74312 - DNA, 20 bp, synthetic construct
  source 1..20: mol_type = other DNA
tgatctggctctgctgagga

SEQ ID NO: 74313 - DNA, 20 bp, synthetic construct
  source 1..20: mol_type = other DNA
ctgatctggctctgctgagg

SEQ ID NO: 74314 - DNA, 20 bp, synthetic construct
  source 1..20: mol_type = other DNA
gctgatctggctctgctgag

SEQ ID NO: 74315 - DNA, 20 bp, synthetic construct
  source 1..20: mol_type = other DNA
tgctgatctggctctgctga

SEQ ID NO: 74316 - DNA, 20 bp, synthetic construct
  source 1..20: mol_type = other DNA
ctgctgatctggctctgctg

SEQ ID NO: 74317 - DNA, 20 bp, synthetic construct
  source 1..20: mol_type = other DNA
tctgctgatctggctctgct

SEQ ID NO: 74318 - DNA, 20 bp, synthetic construct
  source 1..20: mol_type = other DNA
ttctgctgatctggctctgc

SEQ ID NO: 74319 - DNA, 20 bp, synthetic construct
  source 1..20: mol_type = other DNA
cttctgctgatctggctctg

SEQ ID NO: 74320 - DNA, 20 bp, synthetic construct
  source 1..20: mol_type = other DNA
acttctgctgatctggctct

SEQ ID NO: 74321 - DNA, 20 bp, synthetic construct
  source 1..20: mol_type = other DNA
tacttctgctgatctggctc

SEQ ID NO: 74322 - DNA, 20 bp, synthetic construct
  source 1..20: mol_type = other DNA
atacttctgctgatctggct

SEQ ID NO: 74323 - DNA, 20 bp, synthetic construct
  source 1..20: mol_type = other DNA
aatacttctgctgatctggc

SEQ ID NO: 74324 - DNA, 20 bp, synthetic construct
  source 1..20: mol_type = other DNA
taatacttctgctgatctgg

SEQ ID NO: 74325 - DNA, 20 bp, synthetic construct
  source 1..20: mol_type = other DNA
gtaatacttctgctgatctg

SEQ ID NO: 74326 - DNA, 20 bp, synthetic construct
  source 1..20: mol_type = other DNA
agtaatacttctgctgatct

SEQ ID NO: 74327 - DNA, 20 bp, synthetic construct
  source 1..20: mol_type = other DNA
gagtaatacttctgctgatc

SEQ ID NO: 74328 - DNA, 20 bp, synthetic construct
  source 1..20: mol_type = other DNA
ggagtaatacttctgctgat

SEQ ID NO: 74329 - DNA, 20 bp, synthetic construct
  source 1..20: mol_type = other DNA
aggagtaatacttctgctga

SEQ ID NO: 74330 - DNA, 20 bp, synthetic construct
  source 1..20: mol_type = other DNA
aaggagtaatacttctgctg

SEQ ID NO: 74331 - DNA, 20 bp, synthetic construct
  source 1..20: mol_type = other DNA
taaggagtaatacttctgct

SEQ ID NO: 74332 - DNA, 20 bp, synthetic construct
  source 1..20: mol_type = other DNA
ctaaggagtaatacttctgc

SEQ ID NO: 74333 - DNA, 20 bp, synthetic construct
  source 1..20: mol_type = other DNA
actaaggagtaatacttctg

SEQ ID NO: 74334 - DNA, 20 bp, synthetic construct
  source 1..20: mol_type = other DNA
aactaaggagtaatacttct

SEQ ID NO: 74335 - DNA, 20 bp, synthetic construct
  source 1..20: mol_type = other DNA
gaactaaggagtaatacttc

SEQ ID NO: 74336 - DNA, 20 bp, synthetic construct
  source 1..20: mol_type = other DNA
cgaactaaggagtaatactt

SEQ ID NO: 74337 - DNA, 20 bp, synthetic construct
  source 1..20: mol_type = other DNA
acgaactaaggagtaatact

SEQ ID NO: 74338 - DNA, 20 bp, synthetic construct
  source 1..20: mol_type = other DNA
tacgaactaaggagtaatac

SEQ ID NO: 74339 - DNA, 20 bp, synthetic construct
  source 1..20: mol_type = other DNA
ctacgaactaaggagtaata

SEQ ID NO: 74340 - DNA, 20 bp, synthetic construct
  source 1..20: mol_type = other DNA
actacgaactaaggagtaat

SEQ ID NO: 74341 - DNA, 20 bp, synthetic construct
  source 1..20: mol_type = other DNA
tactacgaactaaggagtaa

SEQ ID NO: 74342 - DNA, 20 bp, synthetic construct
  source 1..20: mol_type = other DNA
ctactacgaactaaggagta

SEQ ID NO: 74343 - DNA, 20 bp, synthetic construct
  source 1..20: mol_type = other DNA
cctactacgaactaaggagt

SEQ ID NO: 74344 - DNA, 20 bp, synthetic construct
  source 1..20: mol_type = other DNA
acctactacgaactaaggag

SEQ ID NO: 74345 - DNA, 20 bp, synthetic construct
  source 1..20: mol_type = other DNA
cacctactacgaactaagga

SEQ ID NO: 74346 - DNA, 20 bp, synthetic construct
  source 1..20: mol_type = other DNA
ccacctactacgaactaagg

SEQ ID NO: 74347 - DNA, 20 bp, synthetic construct
  source 1..20: mol_type = other DNA
accacctactacgaactaag

SEQ ID NO: 74348 - DNA, 20 bp, synthetic construct
  source 1..20: mol_type = other DNA
taccacctactacgaactaa

SEQ ID NO: 74349 - DNA, 20 bp, synthetic construct
  source 1..20: mol_type = other DNA
gtaccacctactacgaacta

SEQ ID NO: 74350 - DNA, 20 bp, synthetic construct
  source 1..20: mol_type = other DNA
ggtaccacctactacgaact

SEQ ID NO: 74351 - DNA, 20 bp, synthetic construct
  source 1..20: mol_type = other DNA
gggtaccacctactacgaac

SEQ ID NO: 74352 - DNA, 20 bp, synthetic construct
  source 1..20: mol_type = other DNA
agggtaccacctactacgaa

SEQ ID NO: 74353 - DNA, 20 bp, synthetic construct
  source 1..20: mol_type = other DNA
tagggtaccacctactacga

SEQ ID NO: 74354 - DNA, 20 bp, synthetic construct
  source 1..20: mol_type = other DNA
atagggtaccacctactacg

SEQ ID NO: 74355 - DNA, 20 bp, synthetic construct
  source 1..20: mol_type = other DNA
catagggtaccacctactac

SEQ ID NO: 74356 - DNA, 20 bp, synthetic construct
  source 1..20: mol_type = other DNA
ccatagggtaccacctacta

SEQ ID NO: 74357 - DNA, 20 bp, synthetic construct
  source 1..20: mol_type = other DNA
cccatagggtaccacctact

SEQ ID NO: 74358 - DNA, 20 bp, synthetic construct
  source 1..20: mol_type = other DNA
acccatagggtaccacctac

SEQ ID NO: 74359 - DNA, 20 bp, synthetic construct
  source 1..20: mol_type = other DNA
gacccatagggtaccaccta

SEQ ID NO: 74360 - DNA, 20 bp, synthetic construct
  source 1..20: mol_type = other DNA
ggacccatagggtaccacct

SEQ ID NO: 74361 - DNA, 20 bp, synthetic construct
  source 1..20: mol_type = other DNA
tggacccatagggtaccacc

SEQ ID NO: 74362 - DNA, 20 bp, synthetic construct
  source 1..20: mol_type = other DNA
ctggacccatagggtaccac

SEQ ID NO: 74363 - DNA, 20 bp, synthetic construct
  source 1..20: mol_type = other DNA
actggacccatagggtacca

SEQ ID NO: 74364 - DNA, 20 bp, synthetic construct
  source 1..20: mol_type = other DNA
gactggacccatagggtacc

SEQ ID NO: 74365 - DNA, 20 bp, synthetic construct
  source 1..20: mol_type = other DNA
tgactggacccatagggtac

SEQ ID NO: 74366 - DNA, 20 bp, synthetic construct
  source 1..20: mol_type = other DNA
atgactggacccatagggta

SEQ ID NO: 74367 - DNA, 20 bp, synthetic construct
  source 1..20: mol_type = other DNA
aatgactggacccatagggt

SEQ ID NO: 74368 - DNA, 20 bp, synthetic construct
  source 1..20: mol_type = other DNA
aaatgactggacccataggg

SEQ ID NO: 74369 - DNA, 20 bp, synthetic construct
  source 1..20: mol_type = other DNA
taaatgactggacccatagg

SEQ ID NO: 74370 - DNA, 20 bp, synthetic construct
  source 1..20: mol_type = other DNA
ttaaatgactggacccatag

SEQ ID NO: 74371 - DNA, 20 bp, synthetic construct
  source 1..20: mol_type = other DNA
tttaaatgactggacccata

SEQ ID NO: 74372 - DNA, 20 bp, synthetic construct
  source 1..20: mol_type = other DNA
atttaaatgactggacccat

SEQ ID NO: 74373 - DNA, 20 bp, synthetic construct
  source 1..20: mol_type = other DNA
catttaaatgactggaccca

SEQ ID NO: 74374 - DNA, 20 bp, synthetic construct
  source 1..20: mol_type = other DNA
gcatttaaatgactggaccc

SEQ ID NO: 74375 - DNA, 20 bp, synthetic construct
  source 1..20: mol_type = other DNA
tgcatttaaatgactggacc

SEQ ID NO: 74376 - DNA, 20 bp, synthetic construct
  source 1..20: mol_type = other DNA
ttgcatttaaatgactggac

SEQ ID NO: 74377 - DNA, 20 bp, synthetic construct
  source 1..20: mol_type = other DNA
cttgcatttaaatgactgga

SEQ ID NO: 74378 - DNA, 20 bp, synthetic construct
  source 1..20: mol_type = other DNA
gcttgcatttaaatgactgg

SEQ ID NO: 74379 - DNA, 20 bp, synthetic construct
  source 1..20: mol_type = other DNA
ggcttgcatttaaatgactg

SEQ ID NO: 74380 - DNA, 20 bp, synthetic construct
  source 1..20: mol_type = other DNA
aggcttgcatttaaatgact

SEQ ID NO: 74381 - DNA, 20 bp, synthetic construct
  source 1..20: mol_type = other DNA
caggcttgcatttaaatgac

SEQ ID NO: 74382 - DNA, 20 bp, synthetic construct
  source 1..20: mol_type = other DNA
acaggcttgcatttaaatga

SEQ ID NO: 74383 - DNA, 20 bp, synthetic construct
  source 1..20: mol_type = other DNA
tacaggcttgcatttaaatg

SEQ ID NO: 74384 - DNA, 20 bp, synthetic construct
  source 1..20: mol_type = other DNA
atacaggcttgcatttaaat

SEQ ID NO: 74385 - DNA, 20 bp, synthetic construct
  source 1..20: mol_type = other DNA
gatacaggcttgcatttaaa

SEQ ID NO: 74386 - DNA, 20 bp, synthetic construct
  source 1..20: mol_type = other DNA
agatacaggcttgcatttaa

SEQ ID NO: 74387 - DNA, 20 bp, synthetic construct
  source 1..20: mol_type = other DNA
tagatacaggcttgcattta

SEQ ID NO: 74388 - DNA, 20 bp, synthetic construct
  source 1..20: mol_type = other DNA
gtagatacaggcttgcattt

SEQ ID NO: 74389 - DNA, 20 bp, synthetic construct
  source 1..20: mol_type = other DNA
tgtagatacaggcttgcatt

SEQ ID NO: 74390 - DNA, 20 bp, synthetic construct
  source 1..20: mol_type = other DNA
ctgtagatacaggcttgcat

SEQ ID NO: 74391 - DNA, 20 bp, synthetic construct
  source 1..20: mol_type = other DNA
tctgtagatacaggcttgca

SEQ ID NO: 74392 - DNA, 20 bp, synthetic construct
  source 1..20: mol_type = other DNA
ctctgtagatacaggcttgc

SEQ ID NO: 74393 - DNA, 20 bp, synthetic construct
  source 1..20: mol_type = other DNA
gctctgtagatacaggcttg

SEQ ID NO: 74394 - DNA, 20 bp, synthetic construct
  source 1..20: mol_type = other DNA
cgctctgtagatacaggctt

SEQ ID NO: 74395 - DNA, 20 bp, synthetic construct
  source 1..20: mol_type = other DNA
acgctctgtagatacaggct

SEQ ID NO: 74396 - DNA, 20 bp, synthetic construct
  source 1..20: mol_type = other DNA
aacgctctgtagatacaggc

SEQ ID NO: 74397 - DNA, 20 bp, synthetic construct
  source 1..20: mol_type = other DNA
aaacgctctgtagatacagg

SEQ ID NO: 74398 - DNA, 20 bp, synthetic construct
  source 1..20: mol_type = other DNA
gaaacgctctgtagatacag

SEQ ID NO: 74399 - DNA, 20 bp, synthetic construct
  source 1..20: mol_type = other DNA
ggaaacgctctgtagataca

SEQ ID NO: 74400 - DNA, 20 bp, synthetic construct
  source 1..20: mol_type = other DNA
aggaaacgctctgtagatac

SEQ ID NO: 74401 - DNA, 20 bp, synthetic construct
  source 1..20: mol_type = other DNA
taggaaacgctctgtagata

SEQ ID NO: 74402 - DNA, 20 bp, synthetic construct
  source 1..20: mol_type = other DNA
ctaggaaacgctctgtagat

SEQ ID NO: 74403 - DNA, 20 bp, synthetic construct
  source 1..20: mol_type = other DNA
actaggaaacgctctgtaga

SEQ ID NO: 74404 - DNA, 20 bp, synthetic construct
  source 1..20: mol_type = other DNA
cactaggaaacgctctgtag

SEQ ID NO: 74405 - DNA, 20 bp, synthetic construct
  source 1..20: mol_type = other DNA
gcactaggaaacgctctgta

SEQ ID NO: 74406 - DNA, 20 bp, synthetic construct
  source 1..20: mol_type = other DNA
ggcactaggaaacgctctgt

SEQ ID NO: 74407 - DNA, 20 bp, synthetic construct
  source 1..20: mol_type = other DNA
tggcactaggaaacgctctg

SEQ ID NO: 74408 - DNA, 20 bp, synthetic construct
  source 1..20: mol_type = other DNA
atggcactaggaaacgctct

SEQ ID NO: 74409 - DNA, 20 bp, synthetic construct
  source 1..20: mol_type = other DNA
gatggcactaggaaacgctc

SEQ ID NO: 74410 - DNA, 20 bp, synthetic construct
  source 1..20: mol_type = other DNA
tgatggcactaggaaacgct

SEQ ID NO: 74411 - DNA, 20 bp, synthetic construct
  source 1..20: mol_type = other DNA
atgatggcactaggaaacgc

SEQ ID NO: 74412 - DNA, 20 bp, synthetic construct
  source 1..20: mol_type = other DNA
aatgatggcactaggaaacg

SEQ ID NO: 74413 - DNA, 20 bp, synthetic construct
  source 1..20: mol_type = other DNA
caatgatggcactaggaaac

SEQ ID NO: 74414 - DNA, 20 bp, synthetic construct
  source 1..20: mol_type = other DNA
gcaatgatggcactaggaaa

SEQ ID NO: 74415 - DNA, 20 bp, synthetic construct
  source 1..20: mol_type = other DNA
ggcaatgatggcactaggaa

SEQ ID NO: 74416 - DNA, 20 bp, synthetic construct
  source 1..20: mol_type = other DNA
gggcaatgatggcactagga

SEQ ID NO: 74417 - DNA, 20 bp, synthetic construct
  source 1..20: mol_type = other DNA
tgggcaatgatggcactagg

SEQ ID NO: 74418 - DNA, 20 bp, synthetic construct
  source 1..20: mol_type = other DNA
ctgggcaatgatggcactag

SEQ ID NO: 74419 - DNA, 20 bp, synthetic construct
  source 1..20: mol_type = other DNA
actgggcaatgatggcacta

SEQ ID NO: 74420 - DNA, 20 bp, synthetic construct
  source 1..20: mol_type = other DNA
cactgggcaatgatggcact

SEQ ID NO: 74421 - DNA, 20 bp, synthetic construct
  source 1..20: mol_type = other DNA
ccactgggcaatgatggcac

SEQ ID NO: 74422 - DNA, 20 bp, synthetic construct
  source 1..20: mol_type = other DNA
cccactgggcaatgatggca

SEQ ID NO: 74423 - DNA, 20 bp, synthetic construct
  source 1..20: mol_type = other DNA
gcccactgggcaatgatggc

SEQ ID NO: 74424 - DNA, 20 bp, synthetic construct
  source 1..20: mol_type = other DNA
ggcccactgggcaatgatgg

SEQ ID NO: 74425 - DNA, 20 bp, synthetic construct
  source 1..20: mol_type = other DNA
aggcccactgggcaatgatg

SEQ ID NO: 74426 - DNA, 20 bp, synthetic construct
  source 1..20: mol_type = other DNA
aaggcccactgggcaatgat

SEQ ID NO: 74427 - DNA, 20 bp, synthetic construct
  source 1..20: mol_type = other DNA
aaaggcccactgggcaatga

SEQ ID NO: 74428 - DNA, 20 bp, synthetic construct
  source 1..20: mol_type = other DNA
taaaggcccactgggcaatg

SEQ ID NO: 74429 - DNA, 20 bp, synthetic construct
  source 1..20: mol_type = other DNA
ataaaggcccactgggcaat

SEQ ID NO: 74430 - DNA, 20 bp, synthetic construct
  source 1..20: mol_type = other DNA
aataaaggcccactgggcaa

SEQ ID NO: 74431 - DNA, 20 bp, synthetic construct
  source 1..20: mol_type = other DNA
aaataaaggcccactgggca

SEQ ID NO: 74432 - DNA, 20 bp, synthetic construct
  source 1..20: mol_type = other DNA
taaataaaggcccactgggc

SEQ ID NO: 74433 - DNA, 20 bp, synthetic construct
  source 1..20: mol_type = other DNA
ctaaataaaggcccactggg

SEQ ID NO: 74434 - DNA, 20 bp, synthetic construct
  source 1..20: mol_type = other DNA
gctaaataaaggcccactgg

SEQ ID NO: 74435 - DNA, 20 bp, synthetic construct
  source 1..20: mol_type = other DNA
agctaaataaaggcccactg

SEQ ID NO: 74436 - DNA, 20 bp, synthetic construct
  source 1..20: mol_type = other DNA
cagctaaataaaggcccact

SEQ ID NO: 74437 - DNA, 20 bp, synthetic construct
  source 1..20: mol_type = other DNA
tcagctaaataaaggcccac

SEQ ID NO: 74438 - DNA, 20 bp, synthetic construct
  source 1..20: mol_type = other DNA
ctcagctaaataaaggccca

SEQ ID NO: 74439 - DNA, 20 bp, synthetic construct
  source 1..20: mol_type = other DNA
actcagctaaataaaggccc

SEQ ID NO: 74440 - DNA, 20 bp, synthetic construct
  source 1..20: mol_type = other DNA
gactcagctaaataaaggcc

SEQ ID NO: 74441 - DNA, 20 bp, synthetic construct
  source 1..20: mol_type = other DNA
agactcagctaaataaaggc

SEQ ID NO: 74442 - DNA, 20 bp, synthetic construct
  source 1..20: mol_type = other DNA
tagactcagctaaataaagg

SEQ ID NO: 74443 - DNA, 20 bp, synthetic construct
  source 1..20: mol_type = other DNA
ttagactcagctaaataaag

SEQ ID NO: 74444 - DNA, 20 bp, synthetic construct
  source 1..20: mol_type = other DNA
gttagactcagctaaataaa

SEQ ID NO: 74445 - DNA, 20 bp, synthetic construct
  source 1..20: mol_type = other DNA
agttagactcagctaaataa

SEQ ID NO: 74446 - DNA, 20 bp, synthetic construct
  source 1..20: mol_type = other DNA
gagttagactcagctaaata

SEQ ID NO: 74447 - DNA, 20 bp, synthetic construct
  source 1..20: mol_type = other DNA
ggagttagactcagctaaat

SEQ ID NO: 74448 - DNA, 20 bp, synthetic construct
  source 1..20: mol_type = other DNA
gggagttagactcagctaaa

SEQ ID NO: 74449 - DNA, 20 bp, synthetic construct
  source 1..20: mol_type = other DNA
tgggagttagactcagctaa

SEQ ID NO: 74450 - DNA, 20 bp, synthetic construct
  source 1..20: mol_type = other DNA
ttgggagttagactcagcta

SEQ ID NO: 74451 - DNA, 20 bp, synthetic construct
  source 1..20: mol_type = other DNA
gttgggagttagactcagct

SEQ ID NO: 74452 - DNA, 20 bp, synthetic construct
  source 1..20: mol_type = other DNA
agttgggagttagactcagc

SEQ ID NO: 74453 - DNA, 20 bp, synthetic construct
  source 1..20: mol_type = other DNA
tagttgggagttagactcag

SEQ ID NO: 74454 - DNA, 20 bp, synthetic construct
  source 1..20: mol_type = other DNA
ctagttgggagttagactca

SEQ ID NO: 74455 - DNA, 20 bp, synthetic construct
  source 1..20: mol_type = other DNA
tctagttgggagttagactc

SEQ ID NO: 74456 - DNA, 20 bp, synthetic construct
  source 1..20: mol_type = other DNA
ctctagttgggagttagact

SEQ ID NO: 74457 - DNA, 20 bp, synthetic construct
  source 1..20: mol_type = other DNA
tctctagttgggagttagac

SEQ ID NO: 74458 - DNA, 20 bp, synthetic construct
  source 1..20: mol_type = other DNA
ttctctagttgggagttaga

SEQ ID NO: 74459 - DNA, 20 bp, synthetic construct
  source 1..20: mol_type = other DNA
tttctctagttgggagttag

SEQ ID NO: 74460 - DNA, 20 bp, synthetic construct
  source 1..20: mol_type = other DNA
ttttctctagttgggagtta

SEQ ID NO: 74461 - DNA, 20 bp, synthetic construct
  source 1..20: mol_type = other DNA
attttctctagttgggagtt

SEQ ID NO: 74462 - DNA, 20 bp, synthetic construct
  source 1..20: mol_type = other DNA
aattttctctagttgggagt

SEQ ID NO: 74463 - DNA, 20 bp, synthetic construct
  source 1..20: mol_type = other DNA
aaattttctctagttgggag

SEQ ID NO: 74464 - DNA, 20 bp, synthetic construct
  source 1..20: mol_type = other DNA
gaaattttctctagttggga

SEQ ID NO: 74465 - DNA, 20 bp, synthetic construct
  source 1..20: mol_type = other DNA
ggaaattttctctagttggg

SEQ ID NO: 74466 - DNA, 20 bp, synthetic construct
  source 1..20: mol_type = other DNA
aggaaattttctctagttgg

SEQ ID NO: 74467 - DNA, 20 bp, synthetic construct
  source 1..20: mol_type = other DNA
caggaaattttctctagttg

SEQ ID NO: 74468 - DNA, 20 bp, synthetic construct
  source 1..20: mol_type = other DNA
acaggaaattttctctagtt

SEQ ID NO: 74469 - DNA, 20 bp, synthetic construct
  source 1..20: mol_type = other DNA
cacaggaaattttctctagt

SEQ ID NO: 74470 - DNA, 20 bp, synthetic construct
  source 1..20: mol_type = other DNA
gcacaggaaattttctctag

SEQ ID NO: 74471 - DNA, 20 bp, synthetic construct
  source 1..20: mol_type = other DNA
ggcacaggaaattttctcta

SEQ ID NO: 74472 - DNA, 20 bp, synthetic construct
  source 1..20: mol_type = other DNA
tggcacaggaaattttctct

SEQ ID NO: 74473 - DNA, 20 bp, synthetic construct
  source 1..20: mol_type = other DNA
ctggcacaggaaattttctc

SEQ ID NO: 74474 - DNA, 20 bp, synthetic construct
  source 1..20: mol_type = other DNA
tctggcacaggaaattttct

SEQ ID NO: 74475 - DNA, 20 bp, synthetic construct
  source 1..20: mol_type = other DNA
gtctggcacaggaaattttc

SEQ ID NO: 74476 - DNA, 20 bp, synthetic construct
  source 1..20: mol_type = other DNA
tgtctggcacaggaaatttt

SEQ ID NO: 74477 - DNA, 20 bp, synthetic construct
  source 1..20: mol_type = other DNA
ctgtctggcacaggaaattt

SEQ ID NO: 74478 - DNA, 20 bp, synthetic construct
  source 1..20: mol_type = other DNA
gctgtctggcacaggaaatt

SEQ ID NO: 74479 - DNA, 20 bp, synthetic construct
  source 1..20: mol_type = other DNA
tgctgtctggcacaggaaat

SEQ ID NO: 74480 - DNA, 20 bp, synthetic construct
  source 1..20: mol_type = other DNA
ctgctgtctggcacaggaaa

SEQ ID NO: 74481 - DNA, 20 bp, synthetic construct
  source 1..20: mol_type = other DNA
actgctgtctggcacaggaa

SEQ ID NO: 74482 - DNA, 20 bp, synthetic construct
  source 1..20: mol_type = other DNA
tactgctgtctggcacagga

SEQ ID NO: 74483 - DNA, 20 bp, synthetic construct
  source 1..20: mol_type = other DNA
atactgctgtctggcacagg

SEQ ID NO: 74484 - DNA, 20 bp, synthetic construct
  source 1..20: mol_type = other DNA
catactgctgtctggcacag

SEQ ID NO: 74485 - DNA, 20 bp, synthetic construct
  source 1..20: mol_type = other DNA
ccatactgctgtctggcaca

SEQ ID NO: 74486 - DNA, 20 bp, synthetic construct
  source 1..20: mol_type = other DNA
accatactgctgtctggcac

SEQ ID NO: 74487 - DNA, 20 bp, synthetic construct
  source 1..20: mol_type = other DNA
gaccatactgctgtctggca

SEQ ID NO: 74488 - DNA, 20 bp, synthetic construct
  source 1..20: mol_type = other DNA
tgaccatactgctgtctggc

SEQ ID NO: 74489 - DNA, 20 bp, synthetic construct
  source 1..20: mol_type = other DNA
ctgaccatactgctgtctgg

SEQ ID NO: 74490 - DNA, 20 bp, synthetic construct
  source 1..20: mol_type = other DNA
gctgaccatactgctgtctg

SEQ ID NO: 74491 - DNA, 20 bp, synthetic construct
  source 1..20: mol_type = other DNA
agctgaccatactgctgtct

SEQ ID NO: 74492 - DNA, 20 bp, synthetic construct
  source 1..20: mol_type = other DNA
tagctgaccatactgctgtc

SEQ ID NO: 74493 - DNA, 20 bp, synthetic construct
  source 1..20: mol_type = other DNA
ttagctgaccatactgctgt

SEQ ID NO: 74494 - DNA, 20 bp, synthetic construct
  source 1..20: mol_type = other DNA
gttagctgaccatactgctg

SEQ ID NO: 74495 - DNA, 20 bp, synthetic construct
  source 1..20: mol_type = other DNA
tgttagctgaccatactgct

SEQ ID NO: 74496 - DNA, 20 bp, synthetic construct
  source 1..20: mol_type = other DNA
atgttagctgaccatactgc

SEQ ID NO: 74497 - DNA, 20 bp, synthetic construct
  source 1..20: mol_type = other DNA
catgttagctgaccatactg

SEQ ID NO: 74498 - DNA, 20 bp, synthetic construct
  source 1..20: mol_type = other DNA
acatgttagctgaccatact

SEQ ID NO: 74499 - DNA, 20 bp, synthetic construct
  source 1..20: mol_type = other DNA
cacatgttagctgaccatac

SEQ ID NO: 74500 - DNA, 20 bp, synthetic construct
  source 1..20: mol_type = other DNA
ccacatgttagctgaccata

SEQ ID NO: 74501 - DNA, 20 bp, synthetic construct
  source 1..20: mol_type = other DNA
tccacatgttagctgaccat

SEQ ID NO: 74502 - DNA, 20 bp, synthetic construct
  source 1..20: mol_type = other DNA
atccacatgttagctgacca

SEQ ID NO: 74503 - DNA, 20 bp, synthetic construct
  source 1..20: mol_type = other DNA
catccacatgttagctgacc

SEQ ID NO: 74504 - DNA, 20 bp, synthetic construct
  source 1..20: mol_type = other DNA
gcatccacatgttagctgac

SEQ ID NO: 74505 - DNA, 20 bp, synthetic construct
  source 1..20: mol_type = other DNA
agcatccacatgttagctga

SEQ ID NO: 74506 - DNA, 20 bp, synthetic construct
  source 1..20: mol_type = other DNA
tagcatccacatgttagctg

SEQ ID NO: 74507 - DNA, 20 bp, synthetic construct
  source 1..20: mol_type = other DNA
gtagcatccacatgttagct

SEQ ID NO: 74508 - DNA, 20 bp, synthetic construct
  source 1..20: mol_type = other DNA
tgtagcatccacatgttagc

SEQ ID NO: 74509 - DNA, 20 bp, synthetic construct
  source 1..20: mol_type = other DNA
atgtagcatccacatgttag

SEQ ID NO: 74510 - DNA, 20 bp, synthetic construct
  source 1..20: mol_type = other DNA
aatgtagcatccacatgtta

SEQ ID NO: 74511 - DNA, 20 bp, synthetic construct
  source 1..20: mol_type = other DNA
aaatgtagcatccacatgtt

SEQ ID NO: 74512 - DNA, 20 bp, synthetic construct
  source 1..20: mol_type = other DNA
caaatgtagcatccacatgt

SEQ ID NO: 74513 - DNA, 20 bp, synthetic construct
  source 1..20: mol_type = other DNA
gcaaatgtagcatccacatg

SEQ ID NO: 74514 - DNA, 20 bp, synthetic construct
  source 1..20: mol_type = other DNA
agcaaatgtagcatccacat

SEQ ID NO: 74515 - DNA, 20 bp, synthetic construct
  source 1..20: mol_type = other DNA
aagcaaatgtagcatccaca

SEQ ID NO: 74516 - DNA, 20 bp, synthetic construct
  source 1..20: mol_type = other DNA
aaagcaaatgtagcatccac

SEQ ID NO: 74517 - DNA, 20 bp, synthetic construct
  source 1..20: mol_type = other DNA
gaaagcaaatgtagcatcca

SEQ ID NO: 74518 - DNA, 20 bp, synthetic construct
  source 1..20: mol_type = other DNA
tgaaagcaaatgtagcatcc

SEQ ID NO: 74519 - DNA, 20 bp, synthetic construct
  source 1..20: mol_type = other DNA
atgaaagcaaatgtagcatc

SEQ ID NO: 74520 - DNA, 20 bp, synthetic construct
  source 1..20: mol_type = other DNA
tatgaaagcaaatgtagcat

SEQ ID NO: 74521 - DNA, 20 bp, synthetic construct
  source 1..20: mol_type = other DNA
ttatgaaagcaaatgtagca

SEQ ID NO: 74522 - DNA, 20 bp, synthetic construct
  source 1..20: mol_type = other DNA
cttatgaaagcaaatgtagc

SEQ ID NO: 74523 - DNA, 20 bp, synthetic construct
  source 1..20: mol_type = other DNA
acttatgaaagcaaatgtag

SEQ ID NO: 74524 - DNA, 20 bp, synthetic construct
  source 1..20: mol_type = other DNA
gacttatgaaagcaaatgta

SEQ ID NO: 74525 - DNA, 20 bp, synthetic construct
  source 1..20: mol_type = other DNA
tgacttatgaaagcaaatgt

SEQ ID NO: 74526 - DNA, 20 bp, synthetic construct
  source 1..20: mol_type = other DNA
ctgacttatgaaagcaaatg

SEQ ID NO: 74527 - DNA, 20 bp, synthetic construct
  source 1..20: mol_type = other DNA
actgacttatgaaagcaaat

SEQ ID NO: 74528 - DNA, 20 bp, synthetic construct
  source 1..20: mol_type = other DNA
tactgacttatgaaagcaaa

SEQ ID NO: 74529 - DNA, 20 bp, synthetic construct
  source 1..20: mol_type = other DNA
gtactgacttatgaaagcaa

SEQ ID NO: 74530 - DNA, 20 bp, synthetic construct
  source 1..20: mol_type = other DNA
agtactgacttatgaaagca

SEQ ID NO: 74531 - DNA, 20 bp, synthetic construct
  source 1..20: mol_type = other DNA
gagtactgacttatgaaagc

SEQ ID NO: 74532 - DNA, 20 bp, synthetic construct
  source 1..20: mol_type = other DNA
agagtactgacttatgaaag

SEQ ID NO: 74533 - DNA, 20 bp, synthetic construct
  source 1..20: mol_type = other DNA
aagagtactgacttatgaaa

SEQ ID NO: 74534 - DNA, 20 bp, synthetic construct
  source 1..20: mol_type = other DNA
gaagagtactgacttatgaa

SEQ ID NO: 74535 - DNA, 20 bp, synthetic construct
  source 1..20: mol_type = other DNA
tgaagagtactgacttatga

SEQ ID NO: 74536 - DNA, 20 bp, synthetic construct
  source 1..20: mol_type = other DNA
ttgaagagtactgacttatg

SEQ ID NO: 74537 - DNA, 20 bp, synthetic construct
  source 1..20: mol_type = other DNA
attgaagagtactgacttat

SEQ ID NO: 74538 - DNA, 20 bp, synthetic construct
  source 1..20: mol_type = other DNA
tattgaagagtactgactta

SEQ ID NO: 74539 - DNA, 20 bp, synthetic construct
  source 1..20: mol_type = other DNA
ttattgaagagtactgactt

SEQ ID NO: 74540 - DNA, 20 bp, synthetic construct
  source 1..20: mol_type = other DNA
gttattgaagagtactgact

SEQ ID NO: 74541 - DNA, 20 bp, synthetic construct
  source 1..20: mol_type = other DNA
tgttattgaagagtactgac

SEQ ID NO: 74542 - DNA, 20 bp, synthetic construct
  source 1..20: mol_type = other DNA
atgttattgaagagtactga

SEQ ID NO: 74543 - DNA, 20 bp, synthetic construct
  source 1..20: mol_type = other DNA
aatgttattgaagagtactg

SEQ ID NO: 74544 - DNA, 20 bp, synthetic construct
  source 1..20: mol_type = other DNA
taatgttattgaagagtact

SEQ ID NO: 74545 - DNA, 20 bp, synthetic construct
  source 1..20: mol_type = other DNA
ctaatgttattgaagagtac

SEQ ID NO: 74546 - DNA, 20 bp, synthetic construct
  source 1..20: mol_type = other DNA
actaatgttattgaagagta

SEQ ID NO: 74547 - DNA, 20 bp, synthetic construct
  source 1..20: mol_type = other DNA
tactaatgttattgaagagt

SEQ ID NO: 74548 - DNA, 20 bp, synthetic construct
  source 1..20: mol_type = other DNA
ctactaatgttattgaagag

SEQ ID NO: 74549 - DNA, 20 bp, synthetic construct
  source 1..20: mol_type = other DNA
tctactaatgttattgaaga

SEQ ID NO: 74550 - DNA, 20 bp, synthetic construct
  source 1..20: mol_type = other DNA
ttctactaatgttattgaag

SEQ ID NO: 74551 - DNA, 20 bp, synthetic construct
  source 1..20: mol_type = other DNA
cttctactaatgttattgaa

SEQ ID NO: 74552 - DNA, 20 bp, synthetic construct
  source 1..20: mol_type = other DNA
tcttctactaatgttattga

SEQ ID NO: 74553 - DNA, 20 bp, synthetic construct
  source 1..20: mol_type = other DNA
ctcttctactaatgttattg

SEQ ID NO: 74554 - DNA, 20 bp, synthetic construct
  source 1..20: mol_type = other DNA
tctcttctactaatgttatt

SEQ ID NO: 74555 - DNA, 20 bp, synthetic construct
  source 1..20: mol_type = other DNA
ttctcttctactaatgttat

SEQ ID NO: 74556 - DNA, 20 bp, synthetic construct
  source 1..20: mol_type = other DNA
cttctcttctactaatgtta

SEQ ID NO: 74557 - DNA, 20 bp, synthetic construct
  source 1..20: mol_type = other DNA
tcttctcttctactaatgtt

SEQ ID NO: 74558 - DNA, 20 bp, synthetic construct
  source 1..20: mol_type = other DNA
ctcttctcttctactaatgt

SEQ ID NO: 74559 - DNA, 20 bp, synthetic construct
  source 1..20: mol_type = other DNA
cctcttctcttctactaatg

SEQ ID NO: 74560 - DNA, 20 bp, synthetic construct
  source 1..20: mol_type = other DNA
tcctcttctcttctactaat

SEQ ID NO: 74561 - DNA, 20 bp, synthetic construct
  source 1..20: mol_type = other DNA
gtcctcttctcttctactaa

SEQ ID NO: 74562 - DNA, 20 bp, synthetic construct
  source 1..20: mol_type = other DNA
tgtcctcttctcttctacta

SEQ ID NO: 74563 - DNA, 20 bp, synthetic construct
  source 1..20: mol_type = other DNA
gtgtcctcttctcttctact

SEQ ID NO: 74564 - DNA, 20 bp, synthetic construct
  source 1..20: mol_type = other DNA
tgtgtcctcttctcttctac

SEQ ID NO: 74565 - DNA, 20 bp, synthetic construct
  source 1..20: mol_type = other DNA
ttgtgtcctcttctcttcta

SEQ ID NO: 74566 - DNA, 20 bp, synthetic construct
  source 1..20: mol_type = other DNA
tttgtgtcctcttctcttct

SEQ ID NO: 74567 - DNA, 20 bp, synthetic construct
  source 1..20: mol_type = other DNA
ctttgtgtcctcttctcttc

SEQ ID NO: 74568 - DNA, 20 bp, synthetic construct
  source 1..20: mol_type = other DNA
actttgtgtcctcttctctt

SEQ ID NO: 74569 - DNA, 20 bp, synthetic construct
  source 1..20: mol_type = other DNA
cactttgtgtcctcttctct

SEQ ID NO: 74570 - DNA, 20 bp, synthetic construct
  source 1..20: mol_type = other DNA
tcactttgtgtcctcttctc

SEQ ID NO: 74571 - DNA, 20 bp, synthetic construct
  source 1..20: mol_type = other DNA
ctcactttgtgtcctcttct

SEQ ID NO: 74572 - DNA, 20 bp, synthetic construct
  source 1..20: mol_type = other DNA
tctcactttgtgtcctcttc

SEQ ID NO: 74573 - DNA, 20 bp, synthetic construct
  source 1..20: mol_type = other DNA
ctctcactttgtgtcctctt

SEQ ID NO: 74574 - DNA, 20 bp, synthetic construct
  source 1..20: mol_type = other DNA
actctcactttgtgtcctct

SEQ ID NO: 74575 - DNA, 20 bp, synthetic construct
  source 1..20: mol_type = other DNA
cactctcactttgtgtcctc

SEQ ID NO: 74576 - DNA, 20 bp, synthetic construct
  source 1..20: mol_type = other DNA
acactctcactttgtgtcct

SEQ ID NO: 74577 - DNA, 20 bp, synthetic construct
  source 1..20: mol_type = other DNA
cacactctcactttgtgtcc

SEQ ID NO: 74578 - DNA, 20 bp, synthetic construct
  source 1..20: mol_type = other DNA
acacactctcactttgtgtc

SEQ ID NO: 74579 - DNA, 20 bp, synthetic construct
  source 1..20: mol_type = other DNA
aacacactctcactttgtgt

SEQ ID NO: 74580 - DNA, 20 bp, synthetic construct
  source 1..20: mol_type = other DNA
taacacactctcactttgtg

SEQ ID NO: 74581 - DNA, 20 bp, synthetic construct
  source 1..20: mol_type = other DNA
ttaacacactctcactttgt

SEQ ID NO: 74582 - DNA, 20 bp, synthetic construct
  source 1..20: mol_type = other DNA
attaacacactctcactttg

SEQ ID NO: 74583 - DNA, 20 bp, synthetic construct
  source 1..20: mol_type = other DNA
tattaacacactctcacttt

SEQ ID NO: 74584 - DNA, 20 bp, synthetic construct
  source 1..20: mol_type = other DNA
ctattaacacactctcactt

SEQ ID NO: 74585 - DNA, 20 bp, synthetic construct
  source 1..20: mol_type = other DNA
cctattaacacactctcact

SEQ ID NO: 74586 - DNA, 20 bp, synthetic construct
  source 1..20: mol_type = other DNA
tcctattaacacactctcac

SEQ ID NO: 74587 - DNA, 20 bp, synthetic construct
  source 1..20: mol_type = other DNA
ttcctattaacacactctca

SEQ ID NO: 74588 - DNA, 20 bp, synthetic construct
  source 1..20: mol_type = other DNA
cttcctattaacacactctc

SEQ ID NO: 74589 - DNA, 20 bp, synthetic construct
  source 1..20: mol_type = other DNA
acttcctattaacacactct

SEQ ID NO: 74590 - DNA, 20 bp, synthetic construct
  source 1..20: mol_type = other DNA
gacttcctattaacacactc

SEQ ID NO: 74591 - DNA, 20 bp, synthetic construct
  source 1..20: mol_type = other DNA
ggacttcctattaacacact

SEQ ID NO: 74592 - DNA, 20 bp, synthetic construct
  source 1..20: mol_type = other DNA
tggacttcctattaacacac

SEQ ID NO: 74593 - DNA, 20 bp, synthetic construct
  source 1..20: mol_type = other DNA
ctggacttcctattaacaca

SEQ ID NO: 74594 - DNA, 20 bp, synthetic construct
  source 1..20: mol_type = other DNA
cctggacttcctattaacac

SEQ ID NO: 74595 - DNA, 20 bp, synthetic construct
  source 1..20: mol_type = other DNA
acctggacttcctattaaca

SEQ ID NO: 74596 - DNA, 20 bp, synthetic construct
  source 1..20: mol_type = other DNA
tacctggacttcctattaac

SEQ ID NO: 74597 - DNA, 20 bp, synthetic construct
  source 1..20: mol_type = other DNA
atacctggacttcctattaa

SEQ ID NO: 74598 - DNA, 20 bp, synthetic construct
  source 1..20: mol_type = other DNA
catacctggacttcctatta

SEQ ID NO: 74599 - DNA, 20 bp, synthetic construct
  source 1..20: mol_type = other DNA
gcatacctggacttcctatt

SEQ ID NO: 74600 - DNA, 20 bp, synthetic construct
  source 1..20: mol_type = other DNA
ggcatacctggacttcctat

SEQ ID NO: 74601 - DNA, 20 bp, synthetic construct
  source 1..20: mol_type = other DNA
aggcatacctggacttccta

SEQ ID NO: 74602 - DNA, 20 bp, synthetic construct
  source 1..20: mol_type = other DNA
caggcatacctggacttcct

SEQ ID NO: 74603 - DNA, 20 bp, synthetic construct
  source 1..20: mol_type = other DNA
gcaggcatacctggacttcc

SEQ ID NO: 74604 - DNA, 20 bp, synthetic construct
  source 1..20: mol_type = other DNA
agcaggcatacctggacttc

SEQ ID NO: 74605 - DNA, 20 bp, synthetic construct
  source 1..20: mol_type = other DNA
tagcaggcatacctggactt

SEQ ID NO: 74606 - DNA, 20 bp, synthetic construct
  source 1..20: mol_type = other DNA
gtagcaggcatacctggact

SEQ ID NO: 74607 - DNA, 20 bp, synthetic construct
  source 1..20: mol_type = other DNA
ggtagcaggcatacctggac

SEQ ID NO: 74608 - DNA, 20 bp, synthetic construct
  source 1..20: mol_type = other DNA
aggtagcaggcatacctgga

SEQ ID NO: 74609 - DNA, 20 bp, synthetic construct
  source 1..20: mol_type = other DNA
caggtagcaggcatacctgg

SEQ ID NO: 74610 - DNA, 20 bp, synthetic construct
  source 1..20: mol_type = other DNA
tcaggtagcaggcatacctg

SEQ ID NO: 74611 - DNA, 20 bp, synthetic construct
  source 1..20: mol_type = other DNA
ttcaggtagcaggcatacct

SEQ ID NO: 74612 - DNA, 20 bp, synthetic construct
  source 1..20: mol_type = other DNA
gttcaggtagcaggcatacc

SEQ ID NO: 74613 - DNA, 20 bp, synthetic construct
  source 1..20: mol_type = other DNA
agttcaggtagcaggcatac

SEQ ID NO: 74614 - DNA, 20 bp, synthetic construct
  source 1..20: mol_type = other DNA
aagttcaggtagcaggcata

SEQ ID NO: 74615 - DNA, 20 bp, synthetic construct
  source 1..20: mol_type = other DNA
aaagttcaggtagcaggcat

SEQ ID NO: 74616 - DNA, 20 bp, synthetic construct
  source 1..20: mol_type = other DNA
gaaagttcaggtagcaggca

SEQ ID NO: 74617 - DNA, 20 bp, synthetic construct
  source 1..20: mol_type = other DNA
agaaagttcaggtagcaggc

SEQ ID NO: 74618 - DNA, 20 bp, synthetic construct
  source 1..20: mol_type = other DNA
cagaaagttcaggtagcagg

SEQ ID NO: 74619 - DNA, 20 bp, synthetic construct
  source 1..20: mol_type = other DNA
tcagaaagttcaggtagcag

SEQ ID NO: 74620 - DNA, 20 bp, synthetic construct
  source 1..20: mol_type = other DNA
ctcagaaagttcaggtagca

SEQ ID NO: 74621 - DNA, 20 bp, synthetic construct
  source 1..20: mol_type = other DNA
tctcagaaagttcaggtagc

SEQ ID NO: 74622 - DNA, 20 bp, synthetic construct
  source 1..20: mol_type = other DNA
gtctcagaaagttcaggtag

SEQ ID NO: 74623 - DNA, 20 bp, synthetic construct
  source 1..20: mol_type = other DNA
tgtctcagaaagttcaggta

SEQ ID NO: 74624 - DNA, 20 bp, synthetic construct
  source 1..20: mol_type = other DNA
ctgtctcagaaagttcaggt

SEQ ID NO: 74625 - DNA, 20 bp, synthetic construct
  source 1..20: mol_type = other DNA
cctgtctcagaaagttcagg

SEQ ID NO: 74626 - DNA, 20 bp, synthetic construct
  source 1..20: mol_type = other DNA
acctgtctcagaaagttcag

SEQ ID NO: 74627 - DNA, 20 bp, synthetic construct
  source 1..20: mol_type = other DNA
tacctgtctcagaaagttca

SEQ ID NO: 74628 - DNA, 20 bp, synthetic construct
  source 1..20: mol_type = other DNA
ttacctgtctcagaaagttc

SEQ ID NO: 74629 - DNA, 20 bp, synthetic construct
  source 1..20: mol_type = other DNA
attacctgtctcagaaagtt

SEQ ID NO: 74630 - DNA, 20 bp, synthetic construct
  source 1..20: mol_type = other DNA
tattacctgtctcagaaagt

SEQ ID NO: 74631 - DNA, 20 bp, synthetic construct
  source 1..20: mol_type = other DNA
gtattacctgtctcagaaag

SEQ ID NO: 74632 - DNA, 20 bp, synthetic construct
  source 1..20: mol_type = other DNA
agtattacctgtctcagaaa

SEQ ID NO: 74633 - DNA, 20 bp, synthetic construct
  source 1..20: mol_type = other DNA
cagtattacctgtctcagaa

SEQ ID NO: 74634 - DNA, 20 bp, synthetic construct
  source 1..20: mol_type = other DNA
acagtattacctgtctcaga

SEQ ID NO: 74635 - DNA, 20 bp, synthetic construct
  source 1..20: mol_type = other DNA
tacagtattacctgtctcag

SEQ ID NO: 74636 - DNA, 20 bp, synthetic construct
  source 1..20: mol_type = other DNA
ctacagtattacctgtctca

SEQ ID NO: 74637 - DNA, 20 bp, synthetic construct
  source 1..20: mol_type = other DNA
cctacagtattacctgtctc

SEQ ID NO: 74638 - DNA, 20 bp, synthetic construct
  source 1..20: mol_type = other DNA
ccctacagtattacctgtct

SEQ ID NO: 74639 - DNA, 20 bp, synthetic construct
  source 1..20: mol_type = other DNA
gccctacagtattacctgtc

SEQ ID NO: 74640 - DNA, 20 bp, synthetic construct
  source 1..20: mol_type = other DNA
ggccctacagtattacctgt

SEQ ID NO: 74641 - DNA, 20 bp, synthetic construct
  source 1..20: mol_type = other DNA
aggccctacagtattacctg

SEQ ID NO: 74642 - DNA, 20 bp, synthetic construct
  source 1..20: mol_type = other DNA
caggccctacagtattacct

SEQ ID NO: 74643 - DNA, 20 bp, synthetic construct
  source 1..20: mol_type = other DNA
tcaggccctacagtattacc

SEQ ID NO: 74644 - DNA, 20 bp, synthetic construct
  source 1..20: mol_type = other DNA
ttcaggccctacagtattac

SEQ ID NO: 74645 - DNA, 20 bp, synthetic construct
  source 1..20: mol_type = other DNA
gttcaggccctacagtatta

SEQ ID NO: 74646 - DNA, 20 bp, synthetic construct
  source 1..20: mol_type = other DNA
agttcaggccctacagtatt

SEQ ID NO: 74647 - DNA, 20 bp, synthetic construct
  source 1..20: mol_type = other DNA
aagttcaggccctacagtat

SEQ ID NO: 74648 - DNA, 20 bp, synthetic construct
  source 1..20: mol_type = other DNA
aaagttcaggccctacagta

SEQ ID NO: 74649 - DNA, 20 bp, synthetic construct
  source 1..20: mol_type = other DNA
caaagttcaggccctacagt

SEQ ID NO: 74650 - DNA, 20 bp, synthetic construct
  source 1..20: mol_type = other DNA
acaaagttcaggccctacag

SEQ ID NO: 74651 - DNA, 20 bp, synthetic construct
  source 1..20: mol_type = other DNA
tacaaagttcaggccctaca

SEQ ID NO: 74652 - DNA, 20 bp, synthetic construct
  source 1..20: mol_type = other DNA
ctacaaagttcaggccctac

SEQ ID NO: 74653 - DNA, 20 bp, synthetic construct
  source 1..20: mol_type = other DNA
gctacaaagttcaggcccta

SEQ ID NO: 74654 - DNA, 20 bp, synthetic construct
  source 1..20: mol_type = other DNA
tgctacaaagttcaggccct

SEQ ID NO: 74655 - DNA, 20 bp, synthetic construct
  source 1..20: mol_type = other DNA
ctgctacaaagttcaggccc

SEQ ID NO: 74656 - DNA, 20 bp, synthetic construct
  source 1..20: mol_type = other DNA
tctgctacaaagttcaggcc

SEQ ID NO: 74657 - DNA, 20 bp, synthetic construct
  source 1..20: mol_type = other DNA
ctctgctacaaagttcaggc

SEQ ID NO: 74658 - DNA, 20 bp, synthetic construct
  source 1..20: mol_type = other DNA
actctgctacaaagttcagg

SEQ ID NO: 74659 - DNA, 20 bp, synthetic construct
  source 1..20: mol_type = other DNA
cactctgctacaaagttcag

SEQ ID NO: 74660 - DNA, 20 bp, synthetic construct
  source 1..20: mol_type = other DNA
ccactctgctacaaagttca

SEQ ID NO: 74661 - DNA, 20 bp, synthetic construct
  source 1..20: mol_type = other DNA
accactctgctacaaagttc

SEQ ID NO: 74662 - DNA, 20 bp, synthetic construct
  source 1..20: mol_type = other DNA
aaccactctgctacaaagtt

SEQ ID NO: 74663 - DNA, 20 bp, synthetic construct
  source 1..20: mol_type = other DNA
taaccactctgctacaaagt

SEQ ID NO: 74664 - DNA, 20 bp, synthetic construct
  source 1..20: mol_type = other DNA
ataaccactctgctacaaag

SEQ ID NO: 74665 - DNA, 20 bp, synthetic construct
  source 1..20: mol_type = other DNA
tataaccactctgctacaaa

SEQ ID NO: 74666 - DNA, 20 bp, synthetic construct
  source 1..20: mol_type = other DNA
atataaccactctgctacaa

SEQ ID NO: 74667 - DNA, 20 bp, synthetic construct
  source 1..20: mol_type = other DNA
tatataaccactctgctaca

SEQ ID NO: 74668 - DNA, 20 bp, synthetic construct
  source 1..20: mol_type = other DNA
atatataaccactctgctac

SEQ ID NO: 74669 - DNA, 20 bp, synthetic construct
  source 1..20: mol_type = other DNA
catatataaccactctgcta

SEQ ID NO: 74670 - DNA, 20 bp, synthetic construct
  source 1..20: mol_type = other DNA
tcatatataaccactctgct

SEQ ID NO: 74671 - DNA, 20 bp, synthetic construct
  source 1..20: mol_type = other DNA
ttcatatataaccactctgc

SEQ ID NO: 74672 - DNA, 20 bp, synthetic construct
  source 1..20: mol_type = other DNA
cttcatatataaccactctg

SEQ ID NO: 74673 - DNA, 20 bp, synthetic construct
  source 1..20: mol_type = other DNA
tcttcatatataaccactct

SEQ ID NO: 74674 - DNA, 20 bp, synthetic construct
  source 1..20: mol_type = other DNA
ttcttcatatataaccactc

SEQ ID NO: 74675 - DNA, 20 bp, synthetic construct
  source 1..20: mol_type = other DNA
cttcttcatatataaccact

SEQ ID NO: 74676 - DNA, 20 bp, synthetic construct
  source 1..20: mol_type = other DNA
acttcttcatatataaccac

SEQ ID NO: 74677 - DNA, 20 bp, synthetic construct
  source 1..20: mol_type = other DNA
cacttcttcatatataacca

SEQ ID NO: 74678 - DNA, 20 bp, synthetic construct
  source 1..20: mol_type = other DNA
ccacttcttcatatataacc

SEQ ID NO: 74679 - DNA, 20 bp, synthetic construct
  source 1..20: mol_type = other DNA
cccacttcttcatatataac

SEQ ID NO: 74680 - DNA, 20 bp, synthetic construct
  source 1..20: mol_type = other DNA
acccacttcttcatatataa

SEQ ID NO: 74681 - DNA, 20 bp, synthetic construct
  source 1..20: mol_type = other DNA
aacccacttcttcatatata

SEQ ID NO: 74682 - DNA, 20 bp, synthetic construct
  source 1..20: mol_type = other DNA
gaacccacttcttcatatat

SEQ ID NO: 74683 - DNA, 20 bp, synthetic construct
  source 1..20: mol_type = other DNA
agaacccacttcttcatata

SEQ ID NO: 74684 - DNA, 20 bp, synthetic construct
  source 1..20: mol_type = other DNA
cagaacccacttcttcatat

SEQ ID NO: 74685 - DNA, 20 bp, synthetic construct
  source 1..20: mol_type = other DNA
ccagaacccacttcttcata

SEQ ID NO: 74686 - DNA, 20 bp, synthetic construct
  source 1..20: mol_type = other DNA
cccagaacccacttcttcat

SEQ ID NO: 74687 - DNA, 20 bp, synthetic construct
  source 1..20: mol_type = other DNA
tcccagaacccacttcttca

SEQ ID NO: 74688 - DNA, 20 bp, synthetic construct
  source 1..20: mol_type = other DNA
ctcccagaacccacttcttc

SEQ ID NO: 74689 - DNA, 20 bp, synthetic construct
  source 1..20: mol_type = other DNA
cctcccagaacccacttctt

SEQ ID NO: 74690 - DNA, 20 bp, synthetic construct
  source 1..20: mol_type = other DNA
ccctcccagaacccacttct

SEQ ID NO: 74691 - DNA, 20 bp, synthetic construct
  source 1..20: mol_type = other DNA
cccctcccagaacccacttc

SEQ ID NO: 74692 - DNA, 20 bp, synthetic construct
  source 1..20: mol_type = other DNA
acccctcccagaacccactt

SEQ ID NO: 74693 - DNA, 20 bp, synthetic construct
  source 1..20: mol_type = other DNA
aacccctcccagaacccact

SEQ ID NO: 74694 - DNA, 20 bp, synthetic construct
  source 1..20: mol_type = other DNA
taacccctcccagaacccac

SEQ ID NO: 74695 - DNA, 20 bp, synthetic construct
  source 1..20: mol_type = other DNA
ttaacccctcccagaaccca

SEQ ID NO: 74696 - DNA, 20 bp, synthetic construct
  source 1..20: mol_type = other DNA
tttaacccctcccagaaccc

SEQ ID NO: 74697 - DNA, 20 bp, synthetic construct
  source 1..20: mol_type = other DNA
gtttaacccctcccagaacc

SEQ ID NO: 74698 - DNA, 20 bp, synthetic construct
  source 1..20: mol_type = other DNA
ggtttaacccctcccagaac

SEQ ID NO: 74699 - DNA, 20 bp, synthetic construct
  source 1..20: mol_type = other DNA
tggtttaacccctcccagaa

SEQ ID NO: 74700 - DNA, 20 bp, synthetic construct
  source 1..20: mol_type = other DNA
gtggtttaacccctcccaga

SEQ ID NO: 74701 - DNA, 20 bp, synthetic construct
  source 1..20: mol_type = other DNA
agtggtttaacccctcccag

SEQ ID NO: 74702 - DNA, 20 bp, synthetic construct
  source 1..20: mol_type = other DNA
aagtggtttaacccctccca

SEQ ID NO: 74703 - DNA, 20 bp, synthetic construct
  source 1..20: mol_type = other DNA
taagtggtttaacccctccc

SEQ ID NO: 74704 - DNA, 20 bp, synthetic construct
  source 1..20: mol_type = other DNA
ctaagtggtttaacccctcc

SEQ ID NO: 74705 - DNA, 20 bp, synthetic construct
  source 1..20: mol_type = other DNA
tctaagtggtttaacccctc

SEQ ID NO: 74706 - DNA, 20 bp, synthetic construct
  source 1..20: mol_type = other DNA
ttctaagtggtttaacccct

SEQ ID NO: 74707 - DNA, 20 bp, synthetic construct
  source 1..20: mol_type = other DNA
attctaagtggtttaacccc

SEQ ID NO: 74708 - DNA, 20 bp, synthetic construct
  source 1..20: mol_type = other DNA
cattctaagtggtttaaccc

SEQ ID NO: 74709 - DNA, 20 bp, synthetic construct
  source 1..20: mol_type = other DNA
ccattctaagtggtttaacc

SEQ ID NO: 74710 - DNA, 20 bp, synthetic construct
  source 1..20: mol_type = other DNA
gccattctaagtggtttaac

SEQ ID NO: 74711 - DNA, 20 bp, synthetic construct
  source 1..20: mol_type = other DNA
agccattctaagtggtttaa

SEQ ID NO: 74712 - DNA, 20 bp, synthetic construct
  source 1..20: mol_type = other DNA
aagccattctaagtggttta

SEQ ID NO: 74713 - DNA, 20 bp, synthetic construct
  source 1..20: mol_type = other DNA
gaagccattctaagtggttt

SEQ ID NO: 74714 - DNA, 20 bp, synthetic construct
  source 1..20: mol_type = other DNA
tgaagccattctaagtggtt

SEQ ID NO: 74715 - DNA, 20 bp, synthetic construct
  source 1..20: mol_type = other DNA
atgaagccattctaagtggt

SEQ ID NO: 74716 - DNA, 20 bp, synthetic construct
  source 1..20: mol_type = other DNA
aatgaagccattctaagtgg

SEQ ID NO: 74717 - DNA, 20 bp, synthetic construct
  source 1..20: mol_type = other DNA
aaatgaagccattctaagtg

SEQ ID NO: 74718 - DNA, 20 bp, synthetic construct
  source 1..20: mol_type = other DNA
taaatgaagccattctaagt

SEQ ID NO: 74719 - DNA, 20 bp, synthetic construct
  source 1..20: mol_type = other DNA
gtaaatgaagccattctaag

SEQ ID NO: 74720 - DNA, 20 bp, synthetic construct
  source 1..20: mol_type = other DNA
agtaaatgaagccattctaa

SEQ ID NO: 74721 - DNA, 20 bp, synthetic construct
  source 1..20: mol_type = other DNA
tagtaaatgaagccattcta

SEQ ID NO: 74722 - DNA, 20 bp, synthetic construct
  source 1..20: mol_type = other DNA
ttagtaaatgaagccattct

SEQ ID NO: 74723 - DNA, 20 bp, synthetic construct
  source 1..20: mol_type = other DNA
attagtaaatgaagccattc

SEQ ID NO: 74724 - DNA, 20 bp, synthetic construct
  source 1..20: mol_type = other DNA
cattagtaaatgaagccatt

SEQ ID NO: 74725 - DNA, 20 bp, synthetic construct
  source 1..20: mol_type = other DNA
ccattagtaaatgaagccat

SEQ ID NO: 74726 - DNA, 20 bp, synthetic construct
  source 1..20: mol_type = other DNA
gccattagtaaatgaagcca

SEQ ID NO: 74727 - DNA, 20 bp, synthetic construct
  source 1..20: mol_type = other DNA
tgccattagtaaatgaagcc

SEQ ID NO: 74728 - DNA, 20 bp, synthetic construct
  source 1..20: mol_type = other DNA
ttgccattagtaaatgaagc

SEQ ID NO: 74729 - DNA, 20 bp, synthetic construct
  source 1..20: mol_type = other DNA
cttgccattagtaaatgaag

SEQ ID NO: 74730 - DNA, 20 bp, synthetic construct
  source 1..20: mol_type = other DNA
tcttgccattagtaaatgaa

SEQ ID NO: 74731 - DNA, 20 bp, synthetic construct
  source 1..20: mol_type = other DNA
ctcttgccattagtaaatga

SEQ ID NO: 74732 - DNA, 20 bp, synthetic construct
  source 1..20: mol_type = other DNA
actcttgccattagtaaatg

SEQ ID NO: 74733 - DNA, 20 bp, synthetic construct
  source 1..20: mol_type = other DNA
aactcttgccattagtaaat

SEQ ID NO: 74734 - DNA, 20 bp, synthetic construct
  source 1..20: mol_type = other DNA
aaactcttgccattagtaaa

SEQ ID NO: 74735 - DNA, 20 bp, synthetic construct
  source 1..20: mol_type = other DNA
caaactcttgccattagtaa

SEQ ID NO: 74736 - DNA, 20 bp, synthetic construct
  source 1..20: mol_type = other DNA
gcaaactcttgccattagta

SEQ ID NO: 74737 - DNA, 20 bp, synthetic construct
  source 1..20: mol_type = other DNA
agcaaactcttgccattagt

SEQ ID NO: 74738 - DNA, 20 bp, synthetic construct
  source 1..20: mol_type = other DNA
cagcaaactcttgccattag

SEQ ID NO: 74739 - DNA, 20 bp, synthetic construct
  source 1..20: mol_type = other DNA
ccagcaaactcttgccatta

SEQ ID NO: 74740 - DNA, 20 bp, synthetic construct
  source 1..20: mol_type = other DNA
cccagcaaactcttgccatt

SEQ ID NO: 74741 - DNA, 20 bp, synthetic construct
  source 1..20: mol_type = other DNA
tcccagcaaactcttgccat

SEQ ID NO: 74742 - DNA, 20 bp, synthetic construct
  source 1..20: mol_type = other DNA
atcccagcaaactcttgcca

SEQ ID NO: 74743 - DNA, 20 bp, synthetic construct
  source 1..20: mol_type = other DNA
tatcccagcaaactcttgcc

SEQ ID NO: 74744 - DNA, 20 bp, synthetic construct
  source 1..20: mol_type = other DNA
atatcccagcaaactcttgc

SEQ ID NO: 74745 - DNA, 20 bp, synthetic construct
  source 1..20: mol_type = other DNA
aatatcccagcaaactcttg

SEQ ID NO: 74746 - DNA, 20 bp, synthetic construct
  source 1..20: mol_type = other DNA
caatatcccagcaaactctt

SEQ ID NO: 74747 - DNA, 20 bp, synthetic construct
  source 1..20: mol_type = other DNA
tcaatatcccagcaaactct

SEQ ID NO: 74748 - DNA, 20 bp, synthetic construct
  source 1..20: mol_type = other DNA
gtcaatatcccagcaaactc

SEQ ID NO: 74749 - DNA, 20 bp, synthetic construct
  source 1..20: mol_type = other DNA
ggtcaatatcccagcaaact

SEQ ID NO: 74750 - DNA, 20 bp, synthetic construct
  source 1..20: mol_type = other DNA
tggtcaatatcccagcaaac

SEQ ID NO: 74751 - DNA, 20 bp, synthetic construct
  source 1..20: mol_type = other DNA
gtggtcaatatcccagcaaa

SEQ ID NO: 74752 - DNA, 20 bp, synthetic construct
  source 1..20: mol_type = other DNA
agtggtcaatatcccagcaa

SEQ ID NO: 74753 - DNA, 20 bp, synthetic construct
  source 1..20: mol_type = other DNA
cagtggtcaatatcccagca

SEQ ID NO: 74754 - DNA, 20 bp, synthetic construct
  source 1..20: mol_type = other DNA
acagtggtcaatatcccagc

SEQ ID NO: 74755 - DNA, 20 bp, synthetic construct
  source 1..20: mol_type = other DNA
tacagtggtcaatatcccag

SEQ ID NO: 74756 - DNA, 20 bp, synthetic construct
  source 1..20: mol_type = other DNA
gtacagtggtcaatatccca

SEQ ID NO: 74757 - DNA, 20 bp, synthetic construct
  source 1..20: mol_type = other DNA
tgtacagtggtcaatatccc

SEQ ID NO: 74758 - DNA, 20 bp, synthetic construct
  source 1..20: mol_type = other DNA
atgtacagtggtcaatatcc

SEQ ID NO: 74759 - DNA, 20 bp, synthetic construct
  source 1..20: mol_type = other DNA
tatgtacagtggtcaatatc

SEQ ID NO: 74760 - DNA, 20 bp, synthetic construct
  source 1..20: mol_type = other DNA
ctatgtacagtggtcaatat

SEQ ID NO: 74761 - DNA, 20 bp, synthetic construct
  source 1..20: mol_type = other DNA
tctatgtacagtggtcaata

SEQ ID NO: 74762 - DNA, 20 bp, synthetic construct
  source 1..20: mol_type = other DNA
gtctatgtacagtggtcaat

SEQ ID NO: 74763 - DNA, 20 bp, synthetic construct
  source 1..20: mol_type = other DNA
tgtctatgtacagtggtcaa

SEQ ID NO: 74764 - DNA, 20 bp, synthetic construct
  source 1..20: mol_type = other DNA
atgtctatgtacagtggtca

SEQ ID NO: 74765 - DNA, 20 bp, synthetic construct
  source 1..20: mol_type = other DNA
catgtctatgtacagtggtc

SEQ ID NO: 74766 - DNA, 20 bp, synthetic construct
  source 1..20: mol_type = other DNA
tcatgtctatgtacagtggt

SEQ ID NO: 74767 - DNA, 20 bp, synthetic construct
  source 1..20: mol_type = other DNA
ttcatgtctatgtacagtgg

SEQ ID NO: 74768 - DNA, 20 bp, synthetic construct
  source 1..20: mol_type = other DNA
attcatgtctatgtacagtg

SEQ ID NO: 74769 - DNA, 20 bp, synthetic construct
  source 1..20: mol_type = other DNA
tattcatgtctatgtacagt

SEQ ID NO: 74770 - DNA, 20 bp, synthetic construct
  source 1..20: mol_type = other DNA
atattcatgtctatgtacag

SEQ ID NO: 74771 - DNA, 20 bp, synthetic construct
  source 1..20: mol_type = other DNA
catattcatgtctatgtaca

SEQ ID NO: 74772 - DNA, 20 bp, synthetic construct
  source 1..20: mol_type = other DNA
ccatattcatgtctatgtac

SEQ ID NO: 74773 - DNA, 20 bp, synthetic construct
  source 1..20: mol_type = other DNA
tccatattcatgtctatgta

SEQ ID NO: 74774 - DNA, 20 bp, synthetic construct
  source 1..20: mol_type = other DNA
ttccatattcatgtctatgt

SEQ ID NO: 74775 - DNA, 20 bp, synthetic construct
  source 1..20: mol_type = other DNA
tttccatattcatgtctatg

SEQ ID NO: 74776 - DNA, 20 bp, synthetic construct
  source 1..20: mol_type = other DNA
ctttccatattcatgtctat

SEQ ID NO: 74777 - DNA, 20 bp, synthetic construct
  source 1..20: mol_type = other DNA
actttccatattcatgtcta

SEQ ID NO: 74778 - DNA, 20 bp, synthetic construct
  source 1..20: mol_type = other DNA
aactttccatattcatgtct

SEQ ID NO: 74779 - DNA, 20 bp, synthetic construct
  source 1..20: mol_type = other DNA
taactttccatattcatgtc

SEQ ID NO: 74780 - DNA, 20 bp, synthetic construct
  source 1..20: mol_type = other DNA
ttaactttccatattcatgt

SEQ ID NO: 74781 - DNA, 20 bp, synthetic construct
  source 1..20: mol_type = other DNA
tttaactttccatattcatg

SEQ ID NO: 74782 - DNA, 20 bp, synthetic construct
  source 1..20: mol_type = other DNA
ttttaactttccatattcat

SEQ ID NO: 74783 - DNA, 20 bp, synthetic construct
  source 1..20: mol_type = other DNA
tttttaactttccatattca

SEQ ID NO: 74784 - DNA, 20 bp, synthetic construct
  source 1..20: mol_type = other DNA
gtttttaactttccatattc

SEQ ID NO: 74785 - DNA, 20 bp, synthetic construct
  source 1..20: mol_type = other DNA
tgtttttaactttccatatt

SEQ ID NO: 74786 - DNA, 20 bp, synthetic construct
  source 1..20: mol_type = other DNA
ttgtttttaactttccatat

SEQ ID NO: 74787 - DNA, 20 bp, synthetic construct
  source 1..20: mol_type = other DNA
tttgtttttaactttccata

SEQ ID NO: 74788 - DNA, 20 bp, synthetic construct
  source 1..20: mol_type = other DNA
ttttgtttttaactttccat

SEQ ID NO: 74789 - DNA, 20 bp, synthetic construct
  source 1..20: mol_type = other DNA
attttgtttttaactttcca

SEQ ID NO: 74790 - DNA, 20 bp, synthetic construct
  source 1..20: mol_type = other DNA
gattttgtttttaactttcc

SEQ ID NO: 74791 - DNA, 20 bp, synthetic construct
  source 1..20: mol_type = other DNA
ggattttgtttttaactttc

SEQ ID NO: 74792 - DNA, 20 bp, synthetic construct
  source 1..20: mol_type = other DNA
tggattttgtttttaacttt

SEQ ID NO: 74793 - DNA, 20 bp, synthetic construct
  source 1..20: mol_type = other DNA
gtggattttgtttttaactt

SEQ ID NO: 74794 - DNA, 20 bp, synthetic construct
  source 1..20: mol_type = other DNA
tgtggattttgtttttaact

SEQ ID NO: 74795 - DNA, 20 bp, synthetic construct
  source 1..20: mol_type = other DNA
atgtggattttgtttttaac

SEQ ID NO: 74796 - DNA, 20 bp, synthetic construct
  source 1..20: mol_type = other DNA
tatgtggattttgtttttaa

SEQ ID NO: 74797 - DNA, 20 bp, synthetic construct
  source 1..20: mol_type = other DNA
atatgtggattttgttttta

SEQ ID NO: 74798 - DNA, 20 bp, synthetic construct
  source 1..20: mol_type = other DNA
tatatgtggattttgttttt

SEQ ID NO: 74799 - DNA, 20 bp, synthetic construct
  source 1..20: mol_type = other DNA
atatatgtggattttgtttt

SEQ ID NO: 74800 - DNA, 20 bp, synthetic construct
  source 1..20: mol_type = other DNA
aatatatgtggattttgttt

SEQ ID NO: 74801 - DNA, 20 bp, synthetic construct
  source 1..20: mol_type = other DNA
aaatatatgtggattttgtt

SEQ ID NO: 74802 - DNA, 20 bp, synthetic construct
  source 1..20: mol_type = other DNA
caaatatatgtggattttgt

SEQ ID NO: 74803 - DNA, 20 bp, synthetic construct
  source 1..20: mol_type = other DNA
ccaaatatatgtggattttg

SEQ ID NO: 74804 - DNA, 20 bp, synthetic construct
  source 1..20: mol_type = other DNA
gccaaatatatgtggatttt

SEQ ID NO: 74805 - DNA, 20 bp, synthetic construct
  source 1..20: mol_type = other DNA
agccaaatatatgtggattt

SEQ ID NO: 74806 - DNA, 20 bp, synthetic construct
  source 1..20: mol_type = other DNA
cagccaaatatatgtggatt

SEQ ID NO: 74807 - DNA, 20 bp, synthetic construct
  source 1..20: mol_type = other DNA
gcagccaaatatatgtggat

SEQ ID NO: 74808 - DNA, 20 bp, synthetic construct
  source 1..20: mol_type = other DNA
tgcagccaaatatatgtgga

SEQ ID NO: 74809 - DNA, 20 bp, synthetic construct
  source 1..20: mol_type = other DNA
ttgcagccaaatatatgtgg

SEQ ID NO: 74810 - DNA, 20 bp, synthetic construct
  source 1..20: mol_type = other DNA
cttgcagccaaatatatgtg

SEQ ID NO: 74811 - DNA, 20 bp, synthetic construct
  source 1..20: mol_type = other DNA
acttgcagccaaatatatgt

SEQ ID NO: 74812 - DNA, 20 bp, synthetic construct
  source 1..20: mol_type = other DNA
tacttgcagccaaatatatg

SEQ ID NO: 74813 - DNA, 20 bp, synthetic construct
  source 1..20: mol_type = other DNA
gtacttgcagccaaatatat

SEQ ID NO: 74814 - DNA, 20 bp, synthetic construct
  source 1..20: mol_type = other DNA
agtacttgcagccaaatata

SEQ ID NO: 74815 - DNA, 20 bp, synthetic construct
  source 1..20: mol_type = other DNA
gagtacttgcagccaaatat

SEQ ID NO: 74816 - DNA, 20 bp, synthetic construct
  source 1..20: mol_type = other DNA
ggagtacttgcagccaaata

SEQ ID NO: 74817 - DNA, 20 bp, synthetic construct
  source 1..20: mol_type = other DNA
cggagtacttgcagccaaat

SEQ ID NO: 74818 - DNA, 20 bp, synthetic construct
  source 1..20: mol_type = other DNA
tcggagtacttgcagccaaa

SEQ ID NO: 74819 - DNA, 20 bp, synthetic construct
  source 1..20: mol_type = other DNA
ttcggagtacttgcagccaa

SEQ ID NO: 74820 - DNA, 20 bp, synthetic construct
  source 1..20: mol_type = other DNA
cttcggagtacttgcagcca

SEQ ID NO: 74821 - DNA, 20 bp, synthetic construct
  source 1..20: mol_type = other DNA
ccttcggagtacttgcagcc

SEQ ID NO: 74822 - DNA, 20 bp, synthetic construct
  source 1..20: mol_type = other DNA
accttcggagtacttgcagc

SEQ ID NO: 74823 - DNA, 20 bp, synthetic construct
  source 1..20: mol_type = other DNA
taccttcggagtacttgcag

SEQ ID NO: 74824 - DNA, 20 bp, synthetic construct
  source 1..20: mol_type = other DNA
ataccttcggagtacttgca

SEQ ID NO: 74825 - DNA, 20 bp, synthetic construct
  source 1..20: mol_type = other DNA
tataccttcggagtacttgc

SEQ ID NO: 74826 - DNA, 20 bp, synthetic construct
  source 1..20: mol_type = other DNA
atataccttcggagtacttg

SEQ ID NO: 74827 - DNA, 20 bp, synthetic construct
  source 1..20: mol_type = other DNA
gatataccttcggagtactt

SEQ ID NO: 74828 - DNA, 20 bp, synthetic construct
  source 1..20: mol_type = other DNA
agatataccttcggagtact

SEQ ID NO: 74829 - DNA, 20 bp, synthetic construct
  source 1..20: mol_type = other DNA
tagatataccttcggagtac

SEQ ID NO: 74830 - DNA, 20 bp, synthetic construct
  source 1..20: mol_type = other DNA
ttagatataccttcggagta

SEQ ID NO: 74831 - DNA, 20 bp, synthetic construct
  source 1..20: mol_type = other DNA
attagatataccttcggagt

SEQ ID NO: 74832 - DNA, 20 bp, synthetic construct
  source 1..20: mol_type = other DNA
aattagatataccttcggag

SEQ ID NO: 74833 - DNA, 20 bp, synthetic construct
  source 1..20: mol_type = other DNA
taattagatataccttcgga

SEQ ID NO: 74834 - DNA, 20 bp, synthetic construct
  source 1..20: mol_type = other DNA
ctaattagatataccttcgg

SEQ ID NO: 74835 - DNA, 20 bp, synthetic construct
  source 1..20: mol_type = other DNA
actaattagatataccttcg

SEQ ID NO: 74836 - DNA, 20 bp, synthetic construct
  source 1..20: mol_type = other DNA
cactaattagatataccttc

SEQ ID NO: 74837 - DNA, 20 bp, synthetic construct
  source 1..20: mol_type = other DNA
gcactaattagatatacctt

SEQ ID NO: 74838 - DNA, 20 bp, synthetic construct
  source 1..20: mol_type = other DNA
tgcactaattagatatacct

SEQ ID NO: 74839 - DNA, 20 bp, synthetic construct
  source 1..20: mol_type = other DNA
atgcactaattagatatacc

SEQ ID NO: 74840 - DNA, 20 bp, synthetic construct
  source 1..20: mol_type = other DNA
gatgcactaattagatatac

SEQ ID NO: 74841 - DNA, 20 bp, synthetic construct
  source 1..20: mol_type = other DNA
ggatgcactaattagatata

SEQ ID NO: 74842 - DNA, 20 bp, synthetic construct
  source 1..20: mol_type = other DNA
tggatgcactaattagatat

SEQ ID NO: 74843 - DNA, 20 bp, synthetic construct
  source 1..20: mol_type = other DNA
atggatgcactaattagata

SEQ ID NO: 74844 - DNA, 20 bp, synthetic construct
  source 1..20: mol_type = other DNA
aatggatgcactaattagat

SEQ ID NO: 74845 - DNA, 20 bp, synthetic construct
  source 1..20: mol_type = other DNA
taatggatgcactaattaga

SEQ ID NO: 74846 - DNA, 20 bp, synthetic construct
  source 1..20: mol_type = other DNA
ttaatggatgcactaattag

SEQ ID NO: 74847 - DNA, 20 bp, synthetic construct
  source 1..20: mol_type = other DNA
tttaatggatgcactaatta

SEQ ID NO: 74848 - DNA, 20 bp, synthetic construct
  source 1..20: mol_type = other DNA
gtttaatggatgcactaatt

SEQ ID NO: 74849 - DNA, 20 bp, synthetic construct
  source 1..20: mol_type = other DNA
tgtttaatggatgcactaat

SEQ ID NO: 74850 - DNA, 20 bp, synthetic construct
  source 1..20: mol_type = other DNA
ttgtttaatggatgcactaa

SEQ ID NO: 74851 - DNA, 20 bp, synthetic construct
  source 1..20: mol_type = other DNA
tttgtttaatggatgcacta

SEQ ID NO: 74852 - DNA, 20 bp, synthetic construct
  source 1..20: mol_type = other DNA
ttttgtttaatggatgcact

SEQ ID NO: 74853 - DNA, 20 bp, synthetic construct
  source 1..20: mol_type = other DNA
cttttgtttaatggatgcac

SEQ ID NO: 74854 - DNA, 20 bp, synthetic construct
  source 1..20: mol_type = other DNA
tcttttgtttaatggatgca

SEQ ID NO: 74855 - DNA, 20 bp, synthetic construct
  source 1..20: mol_type = other DNA
ctcttttgtttaatggatgc

SEQ ID NO: 74856 - DNA, 20 bp, synthetic construct
  source 1..20: mol_type = other DNA
tctcttttgtttaatggatg

SEQ ID NO: 74857 - DNA, 20 bp, synthetic construct
  source 1..20: mol_type = other DNA
atctcttttgtttaatggat

SEQ ID NO: 74858 - DNA, 20 bp, synthetic construct
  source 1..20: mol_type = other DNA
tatctcttttgtttaatgga

SEQ ID NO: 74859 - DNA, 20 bp, synthetic construct
  source 1..20: mol_type = other DNA
atatctcttttgtttaatgg

SEQ ID NO: 74860 - DNA, 20 bp, synthetic construct
  source 1..20: mol_type = other DNA
aatatctcttttgtttaatg

SEQ ID NO: 74861 - DNA, 20 bp, synthetic construct
  source 1..20: mol_type = other DNA
aaatatctcttttgtttaat

SEQ ID NO: 74862 - DNA, 20 bp, synthetic construct
  source 1..20: mol_type = other DNA
aaaatatctcttttgtttaa

SEQ ID NO: 74863 - DNA, 20 bp, synthetic construct
  source 1..20: mol_type = other DNA
taaaatatctcttttgttta

SEQ ID NO: 74864 - DNA, 20 bp, synthetic construct
  source 1..20: mol_type = other DNA
ctaaaatatctcttttgttt

SEQ ID NO: 74865 - DNA, 20 bp, synthetic construct
  source 1..20: mol_type = other DNA
cctaaaatatctcttttgtt

SEQ ID NO: 74866 - DNA, 20 bp, synthetic construct
  source 1..20: mol_type = other DNA
gcctaaaatatctcttttgt

SEQ ID NO: 74867 - DNA, 20 bp, synthetic construct
  source 1..20: mol_type = other DNA
ggcctaaaatatctcttttg

SEQ ID NO: 74868 - DNA, 20 bp, synthetic construct
  source 1..20: mol_type = other DNA
cggcctaaaatatctctttt

SEQ ID NO: 74869 - DNA, 20 bp, synthetic construct
  source 1..20: mol_type = other DNA
ccggcctaaaatatctcttt

SEQ ID NO: 74870 - DNA, 20 bp, synthetic construct
  source 1..20: mol_type = other DNA
cccggcctaaaatatctctt

SEQ ID NO: 74871 - DNA, 20 bp, synthetic construct
  source 1..20: mol_type = other DNA
gcccggcctaaaatatctct

SEQ ID NO: 74872 - DNA, 20 bp, synthetic construct
  source 1..20: mol_type = other DNA
tgcccggcctaaaatatctc

SEQ ID NO: 74873 - DNA, 20 bp, synthetic construct
  source 1..20: mol_type = other DNA
atgcccggcctaaaatatct

SEQ ID NO: 74874 - DNA, 20 bp, synthetic construct
  source 1..20: mol_type = other DNA
catgcccggcctaaaatatc

SEQ ID NO: 74875 - DNA, 20 bp, synthetic construct
  source 1..20: mol_type = other DNA
ccatgcccggcctaaaatat

SEQ ID NO: 74876 - DNA, 20 bp, synthetic construct
  source 1..20: mol_type = other DNA
accatgcccggcctaaaata

SEQ ID NO: 74877 - DNA, 20 bp, synthetic construct
  source 1..20: mol_type = other DNA
aaccatgcccggcctaaaat

SEQ ID NO: 74878 - DNA, 20 bp, synthetic construct
  source 1..20: mol_type = other DNA
caaccatgcccggcctaaaa

SEQ ID NO: 74879 - DNA, 20 bp, synthetic construct
  source 1..20: mol_type = other DNA
gcaaccatgcccggcctaaa

SEQ ID NO: 74880 - DNA, 20 bp, synthetic construct
  source 1..20: mol_type = other DNA
agcaaccatgcccggcctaa

SEQ ID NO: 74881 - DNA, 20 bp, synthetic construct
  source 1..20: mol_type = other DNA
gagcaaccatgcccggccta

SEQ ID NO: 74882 - DNA, 20 bp, synthetic construct
  source 1..20: mol_type = other DNA
tgagcaaccatgcccggcct

SEQ ID NO: 74883 - DNA, 20 bp, synthetic construct
  source 1..20: mol_type = other DNA
gtgagcaaccatgcccggcc

SEQ ID NO: 74884 - DNA, 20 bp, synthetic construct
  source 1..20: mol_type = other DNA
tgtgagcaaccatgcccggc

SEQ ID NO: 74885 - DNA, 20 bp, synthetic construct
  source 1..20: mol_type = other DNA
gtgtgagcaaccatgcccgg

SEQ ID NO: 74886 - DNA, 20 bp, synthetic construct
  source 1..20: mol_type = other DNA
ggtgtgagcaaccatgcccg

SEQ ID NO: 74887 - DNA, 20 bp, synthetic construct
  source 1..20: mol_type = other DNA
aggtgtgagcaaccatgccc

SEQ ID NO: 74888 - DNA, 20 bp, synthetic construct
  source 1..20: mol_type = other DNA
caggtgtgagcaaccatgcc

SEQ ID NO: 74889 - DNA, 20 bp, synthetic construct
  source 1..20: mol_type = other DNA
acaggtgtgagcaaccatgc

SEQ ID NO: 74890 - DNA, 20 bp, synthetic construct
  source 1..20: mol_type = other DNA
tacaggtgtgagcaaccatg

SEQ ID NO: 74891 - DNA, 20 bp, synthetic construct
  source 1..20: mol_type = other DNA
ttacaggtgtgagcaaccat

SEQ ID NO: 74892 - DNA, 20 bp, synthetic construct
  source 1..20: mol_type = other DNA
attacaggtgtgagcaacca

SEQ ID NO: 74893 - DNA, 20 bp, synthetic construct
  source 1..20: mol_type = other DNA
gattacaggtgtgagcaacc

SEQ ID NO: 74894 - DNA, 20 bp, synthetic construct
  source 1..20: mol_type = other DNA
ggattacaggtgtgagcaac

SEQ ID NO: 74895 - DNA, 20 bp, synthetic construct
  source 1..20: mol_type = other DNA
gggattacaggtgtgagcaa

SEQ ID NO: 74896 - DNA, 20 bp, synthetic construct
  source 1..20: mol_type = other DNA
tgggattacaggtgtgagca

SEQ ID NO: 74897 - DNA, 20 bp, synthetic construct
  source 1..20: mol_type = other DNA
ctgggattacaggtgtgagc

SEQ ID NO: 74898 - DNA, 20 bp, synthetic construct
  source 1..20: mol_type = other DNA
gctgggattacaggtgtgag

SEQ ID NO: 74899 - DNA, 20 bp, synthetic construct
  source 1..20: mol_type = other DNA
tgctgggattacaggtgtga

SEQ ID NO: 74900 - DNA, 20 bp, synthetic construct
  source 1..20: mol_type = other DNA
gtgctgggattacaggtgtg

SEQ ID NO: 74901 - DNA, 20 bp, synthetic construct
  source 1..20: mol_type = other DNA
agtgctgggattacaggtgt

SEQ ID NO: 74902 - DNA, 20 bp, synthetic construct
  source 1..20: mol_type = other DNA
aagtgctgggattacaggtg

SEQ ID NO: 74903 - DNA, 20 bp, synthetic construct
  source 1..20: mol_type = other DNA
aaagtgctgggattacaggt

SEQ ID NO: 74904 - DNA, 20 bp, synthetic construct
  source 1..20: mol_type = other DNA
caaagtgctgggattacagg

SEQ ID NO: 74905 - DNA, 20 bp, synthetic construct
  source 1..20: mol_type = other DNA
ccaaagtgctgggattacag

SEQ ID NO: 74906 - DNA, 20 bp, synthetic construct
  source 1..20: mol_type = other DNA
cccaaagtgctgggattaca

SEQ ID NO: 74907 - DNA, 20 bp, synthetic construct
  source 1..20: mol_type = other DNA
tcccaaagtgctgggattac

SEQ ID NO: 74908 - DNA, 20 bp, synthetic construct
  source 1..20: mol_type = other DNA
ctcccaaagtgctgggatta

SEQ ID NO: 74909 - DNA, 20 bp, synthetic construct
  source 1..20: mol_type = other DNA
cctcccaaagtgctgggatt

SEQ ID NO: 74910 - DNA, 20 bp, synthetic construct
  source 1..20: mol_type = other DNA
gcctcccaaagtgctgggat

SEQ ID NO: 74911 - DNA, 20 bp, synthetic construct
  source 1..20: mol_type = other DNA
ggcctcccaaagtgctggga

SEQ ID NO: 74912 - DNA, 20 bp, synthetic construct
  source 1..20: mol_type = other DNA
tggcctcccaaagtgctggg

SEQ ID NO: 74913 - DNA, 20 bp, synthetic construct
  source 1..20: mol_type = other DNA
ttggcctcccaaagtgctgg

SEQ ID NO: 74914 - DNA, 20 bp, synthetic construct
  source 1..20: mol_type = other DNA
cttggcctcccaaagtgctg

SEQ ID NO: 74915 - DNA, 20 bp, synthetic construct
  source 1..20: mol_type = other DNA
ccttggcctcccaaagtgct

SEQ ID NO: 74916 - DNA, 20 bp, synthetic construct
  source 1..20: mol_type = other DNA
accttggcctcccaaagtgc

SEQ ID NO: 74917 - DNA, 20 bp, synthetic construct
  source 1..20: mol_type = other DNA
caccttggcctcccaaagtg

SEQ ID NO: 74918 - DNA, 20 bp, synthetic construct
  source 1..20: mol_type = other DNA
ccaccttggcctcccaaagt

SEQ ID NO: 74919 - DNA, 20 bp, synthetic construct
  source 1..20: mol_type = other DNA
cccaccttggcctcccaaag

SEQ ID NO: 74920 - DNA, 20 bp, synthetic construct
  source 1..20: mol_type = other DNA
acccaccttggcctcccaaa

SEQ ID NO: 74921 - DNA, 20 bp, synthetic construct
  source 1..20: mol_type = other DNA
cacccaccttggcctcccaa

SEQ ID NO: 74922 - DNA, 20 bp, synthetic construct
  source 1..20: mol_type = other DNA
ccacccaccttggcctccca

SEQ ID NO: 74923 - DNA, 20 bp, synthetic construct
  source 1..20: mol_type = other DNA
tccacccaccttggcctccc

SEQ ID NO: 74924 - DNA, 20 bp, synthetic construct
  source 1..20: mol_type = other DNA
atccacccaccttggcctcc

SEQ ID NO: 74925 - DNA, 20 bp, synthetic construct
  source 1..20: mol_type = other DNA
gatccacccaccttggcctc

SEQ ID NO: 74926 - DNA, 20 bp, synthetic construct
  source 1..20: mol_type = other DNA
tgatccacccaccttggcct

SEQ ID NO: 74927 - DNA, 20 bp, synthetic construct
  source 1..20: mol_type = other DNA
gtgatccacccaccttggcc

SEQ ID NO: 74928 - DNA, 20 bp, synthetic construct
  source 1..20: mol_type = other DNA
ggtgatccacccaccttggc

SEQ ID NO: 74929 - DNA, 20 bp, synthetic construct
  source 1..20: mol_type = other DNA
aggtgatccacccaccttgg

SEQ ID NO: 74930 - DNA, 20 bp, synthetic construct
  source 1..20: mol_type = other DNA
caggtgatccacccaccttg

SEQ ID NO: 74931 - DNA, 20 bp, synthetic construct
  source 1..20: mol_type = other DNA
tcaggtgatccacccacctt

SEQ ID NO: 74932 - DNA, 20 bp, synthetic construct
  source 1..20: mol_type = other DNA
ctcaggtgatccacccacct

SEQ ID NO: 74933 - DNA, 20 bp, synthetic construct
  source 1..20: mol_type = other DNA
cctcaggtgatccacccacc

SEQ ID NO: 74934 - DNA, 20 bp, synthetic construct
  source 1..20: mol_type = other DNA
acctcaggtgatccacccac

SEQ ID NO: 74935 - DNA, 20 bp, synthetic construct
  source 1..20: mol_type = other DNA
gacctcaggtgatccaccca

SEQ ID NO: 74936 - DNA, 20 bp, synthetic construct
  source 1..20: mol_type = other DNA
tgacctcaggtgatccaccc

SEQ ID NO: 74937 - DNA, 20 bp, synthetic construct
  source 1..20: mol_type = other DNA
ctgacctcaggtgatccacc

SEQ ID NO: 74938 - DNA, 20 bp, synthetic construct
  source 1..20: mol_type = other DNA
cctgacctcaggtgatccac

SEQ ID NO: 74939 - DNA, 20 bp, synthetic construct
  source 1..20: mol_type = other DNA
tcctgacctcaggtgatcca

SEQ ID NO: 74940 - DNA, 20 bp, synthetic construct
  source 1..20: mol_type = other DNA
ctcctgacctcaggtgatcc

SEQ ID NO: 74941 - DNA, 20 bp, synthetic construct
  source 1..20: mol_type = other DNA
actcctgacctcaggtgatc

SEQ ID NO: 74942 - DNA, 20 bp, synthetic construct
  source 1..20: mol_type = other DNA
aactcctgacctcaggtgat

SEQ ID NO: 74943 - DNA, 20 bp, synthetic construct
  source 1..20: mol_type = other DNA
gaactcctgacctcaggtga

SEQ ID NO: 74944 - DNA, 20 bp, synthetic construct
  source 1..20: mol_type = other DNA
cgaactcctgacctcaggtg

SEQ ID NO: 74945 - DNA, 20 bp, synthetic construct
  source 1..20: mol_type = other DNA
tcgaactcctgacctcaggt

SEQ ID NO: 74946 - DNA, 20 bp, synthetic construct
  source 1..20: mol_type = other DNA
ctcgaactcctgacctcagg

SEQ ID NO: 74947 - DNA, 20 bp, synthetic construct
  source 1..20: mol_type = other DNA
tctcgaactcctgacctcag

SEQ ID NO: 74948 - DNA, 20 bp, synthetic construct
  source 1..20: mol_type = other DNA
gtctcgaactcctgacctca

SEQ ID NO: 74949 - DNA, 20 bp, synthetic construct
  source 1..20: mol_type = other DNA
ggtctcgaactcctgacctc

SEQ ID NO: 74950 - DNA, 20 bp, synthetic construct
  source 1..20: mol_type = other DNA
tggtctcgaactcctgacct

SEQ ID NO: 74951 - DNA, 20 bp, synthetic construct
  source 1..20: mol_type = other DNA
ctggtctcgaactcctgacc

SEQ ID NO: 74952 - DNA, 20 bp, synthetic construct
  source 1..20: mol_type = other DNA
gctggtctcgaactcctgac

SEQ ID NO: 74953 - DNA, 20 bp, synthetic construct
  source 1..20: mol_type = other DNA
ggctggtctcgaactcctga

SEQ ID NO: 74954 - DNA, 20 bp, synthetic construct
  source 1..20: mol_type = other DNA
aggctggtctcgaactcctg

SEQ ID NO: 74955 - DNA, 20 bp, synthetic construct
  source 1..20: mol_type = other DNA
caggctggtctcgaactcct

SEQ ID NO: 74956 - DNA, 20 bp, synthetic construct
  source 1..20: mol_type = other DNA
ccaggctggtctcgaactcc

SEQ ID NO: 74957 - DNA, 20 bp, synthetic construct
  source 1..20: mol_type = other DNA
gccaggctggtctcgaactc

SEQ ID NO: 74958 - DNA, 20 bp, synthetic construct
  source 1..20: mol_type = other DNA
ggccaggctggtctcgaact

SEQ ID NO: 74959 - DNA, 20 bp, synthetic construct
  source 1..20: mol_type = other DNA
tggccaggctggtctcgaac

SEQ ID NO: 74960 - DNA, 20 bp, synthetic construct
  source 1..20: mol_type = other DNA
ttggccaggctggtctcgaa

SEQ ID NO: 74961 - DNA, 20 bp, synthetic construct
  source 1..20: mol_type = other DNA
gttggccaggctggtctcga

SEQ ID NO: 74962 - DNA, 20 bp, synthetic construct
  source 1..20: mol_type = other DNA
tgttggccaggctggtctcg

SEQ ID NO: 74963 - DNA, 20 bp, synthetic construct
  source 1..20: mol_type = other DNA
atgttggccaggctggtctc

SEQ ID NO: 74964 - DNA, 20 bp, synthetic construct
  source 1..20: mol_type = other DNA
catgttggccaggctggtct

SEQ ID NO: 74965 - DNA, 20 bp, synthetic construct
  source 1..20: mol_type = other DNA
ccatgttggccaggctggtc

SEQ ID NO: 74966 - DNA, 20 bp, synthetic construct
  source 1..20: mol_type = other DNA
accatgttggccaggctggt

SEQ ID NO: 74967 - DNA, 20 bp, synthetic construct
  source 1..20: mol_type = other DNA
caccatgttggccaggctgg

SEQ ID NO: 74968 - DNA, 20 bp, synthetic construct
  source 1..20: mol_type = other DNA
tcaccatgttggccaggctg

SEQ ID NO: 74969 - DNA, 20 bp, synthetic construct
  source 1..20: mol_type = other DNA
ttcaccatgttggccaggct

SEQ ID NO: 74970 - DNA, 20 bp, synthetic construct
  source 1..20: mol_type = other DNA
tttcaccatgttggccaggc

SEQ ID NO: 74971 - DNA, 20 bp, synthetic construct
  source 1..20: mol_type = other DNA
gtttcaccatgttggccagg

SEQ ID NO: 74972 - DNA, 20 bp, synthetic construct
  source 1..20: mol_type = other DNA
ggtttcaccatgttggccag

SEQ ID NO: 74973 - DNA, 20 bp, synthetic construct
  source 1..20: mol_type = other DNA
gggtttcaccatgttggcca

SEQ ID NO: 74974 - DNA, 20 bp, synthetic construct
  source 1..20: mol_type = other DNA
agggtttcaccatgttggcc

SEQ ID NO: 74975 - DNA, 20 bp, synthetic construct
  source 1..20: mol_type = other DNA
cagggtttcaccatgttggc

SEQ ID NO: 74976 - DNA, 20 bp, synthetic construct
  source 1..20: mol_type = other DNA
acagggtttcaccatgttgg

SEQ ID NO: 74977 - DNA, 20 bp, synthetic construct
  source 1..20: mol_type = other DNA
gacagggtttcaccatgttg

SEQ ID NO: 74978 - DNA, 20 bp, synthetic construct
  source 1..20: mol_type = other DNA
agacagggtttcaccatgtt

SEQ ID NO: 74979 - DNA, 20 bp, synthetic construct
  source 1..20: mol_type = other DNA
gagacagggtttcaccatgt

SEQ ID NO: 74980 - DNA, 20 bp, synthetic construct
  source 1..20: mol_type = other DNA
agagacagggtttcaccatg

SEQ ID NO: 74981 - DNA, 20 bp, synthetic construct
  source 1..20: mol_type = other DNA
cagagacagggtttcaccat

SEQ ID NO: 74982 - DNA, 20 bp, synthetic construct
  source 1..20: mol_type = other DNA
gcagagacagggtttcacca

SEQ ID NO: 74983 - DNA, 20 bp, synthetic construct
  source 1..20: mol_type = other DNA
agcagagacagggtttcacc

SEQ ID NO: 74984 - DNA, 20 bp, synthetic construct
  source 1..20: mol_type = other DNA
tagcagagacagggtttcac

SEQ ID NO: 74985 - DNA, 20 bp, synthetic construct
  source 1..20: mol_type = other DNA
ttagcagagacagggtttca

SEQ ID NO: 74986 - DNA, 20 bp, synthetic construct
  source 1..20: mol_type = other DNA
tttagcagagacagggtttc

SEQ ID NO: 74987 - DNA, 20 bp, synthetic construct
  source 1..20: mol_type = other DNA
ttttagcagagacagggttt

SEQ ID NO: 74988 - DNA, 20 bp, synthetic construct
  source 1..20: mol_type = other DNA
tttttagcagagacagggtt

SEQ ID NO: 74989 - DNA, 20 bp, synthetic construct
  source 1..20: mol_type = other DNA
atttttagcagagacagggt

SEQ ID NO: 74990 - DNA, 20 bp, synthetic construct
  source 1..20: mol_type = other DNA
tatttttagcagagacaggg

SEQ ID NO: 74991 - DNA, 20 bp, synthetic construct
  source 1..20: mol_type = other DNA
gtatttttagcagagacagg

SEQ ID NO: 74992 - DNA, 20 bp, synthetic construct
  source 1..20: mol_type = other DNA
tgtatttttagcagagacag

SEQ ID NO: 74993 - DNA, 20 bp, synthetic construct
  source 1..20: mol_type = other DNA
ttgtatttttagcagagaca

SEQ ID NO: 74994 - DNA, 20 bp, synthetic construct
  source 1..20: mol_type = other DNA
tttgtatttttagcagagac

SEQ ID NO: 74995 - DNA, 20 bp, synthetic construct
  source 1..20: mol_type = other DNA
gtttgtatttttagcagaga

SEQ ID NO: 74996 - DNA, 20 bp, synthetic construct
  source 1..20: mol_type = other DNA
tgtttgtatttttagcagag

SEQ ID NO: 74997 - DNA, 20 bp, synthetic construct
  source 1..20: mol_type = other DNA
atgtttgtatttttagcaga

SEQ ID NO: 74998 - DNA, 20 bp, synthetic construct
  source 1..20: mol_type = other DNA
aatgtttgtatttttagcag

SEQ ID NO: 74999 - DNA, 20 bp, synthetic construct
  source 1..20: mol_type = other DNA
taatgtttgtatttttagca

SEQ ID NO: 75000 - DNA, 20 bp, synthetic construct
  source 1..20: mol_type = other DNA
ctaatgtttgtatttttagc

SEQ ID NO: 75001 - DNA, 20 bp, synthetic construct
  source 1..20: mol_type = other DNA
gctaatgtttgtatttttag

SEQ ID NO: 75002 - DNA, 20 bp, synthetic construct
  source 1..20: mol_type = other DNA
agctaatgtttgtattttta

SEQ ID NO: 75003 - DNA, 20 bp, synthetic construct
  source 1..20: mol_type = other DNA
cagctaatgtttgtattttt

SEQ ID NO: 75004 - DNA, 20 bp, synthetic construct
  source 1..20: mol_type = other DNA
ccagctaatgtttgtatttt

SEQ ID NO: 75005 - DNA, 20 bp, synthetic construct
  source 1..20: mol_type = other DNA
cccagctaatgtttgtattt

SEQ ID NO: 75006 - DNA, 20 bp, synthetic construct
  source 1..20: mol_type = other DNA
gcccagctaatgtttgtatt

SEQ ID NO: 75007 - DNA, 20 bp, synthetic construct
  source 1..20: mol_type = other DNA
cgcccagctaatgtttgtat

SEQ ID NO: 75008 - DNA, 20 bp, synthetic construct
  source 1..20: mol_type = other DNA
acgcccagctaatgtttgta

SEQ ID NO: 75009 - DNA, 20 bp, synthetic construct
  source 1..20: mol_type = other DNA
cacgcccagctaatgtttgt

SEQ ID NO: 75010 - DNA, 20 bp, synthetic construct
  source 1..20: mol_type = other DNA
acacgcccagctaatgtttg

SEQ ID NO: 75011 - DNA, 20 bp, synthetic construct
  source 1..20: mol_type = other DNA
aacacgcccagctaatgttt

SEQ ID NO: 75012 - DNA, 20 bp, synthetic construct
  source 1..20: mol_type = other DNA
caacacgcccagctaatgtt

SEQ ID NO: 75013 - DNA, 20 bp, synthetic construct
  source 1..20: mol_type = other DNA
ccaacacgcccagctaatgt

SEQ ID NO: 75014 - DNA, 20 bp, synthetic construct
  source 1..20: mol_type = other DNA
accaacacgcccagctaatg

SEQ ID NO: 75015 - DNA, 20 bp, synthetic construct
  source 1..20: mol_type = other DNA
caccaacacgcccagctaat

SEQ ID NO: 75016 - DNA, 20 bp, synthetic construct
  source 1..20: mol_type = other DNA
ccaccaacacgcccagctaa

SEQ ID NO: 75017 - DNA, 20 bp, synthetic construct
  source 1..20: mol_type = other DNA
cccaccaacacgcccagcta

SEQ ID NO: 75018 - DNA, 20 bp, synthetic construct
  source 1..20: mol_type = other DNA
gcccaccaacacgcccagct

SEQ ID NO: 75019 - DNA, 20 bp, synthetic construct
  source 1..20: mol_type = other DNA
cgcccaccaacacgcccagc

SEQ ID NO: 75020 - DNA, 20 bp, synthetic construct
  source 1..20: mol_type = other DNA
gcgcccaccaacacgcccag

SEQ ID NO: 75021 - DNA, 20 bp, synthetic construct
  source 1..20: mol_type = other DNA
ggcgcccaccaacacgccca

SEQ ID NO: 75022 - DNA, 20 bp, synthetic construct
  source 1..20: mol_type = other DNA
aggcgcccaccaacacgccc

SEQ ID NO: 75023 - DNA, 20 bp, synthetic construct
  source 1..20: mol_type = other DNA
caggcgcccaccaacacgcc

SEQ ID NO: 75024 - DNA, 20 bp, synthetic construct
  source 1..20: mol_type = other DNA
acaggcgcccaccaacacgc

SEQ ID NO: 75025 - DNA, 20 bp, synthetic construct
  source 1..20: mol_type = other DNA
tacaggcgcccaccaacacg

SEQ ID NO: 75026 - DNA, 20 bp, synthetic construct
  source 1..20: mol_type = other DNA
ttacaggcgcccaccaacac

SEQ ID NO: 75027 - DNA, 20 bp, synthetic construct
  source 1..20: mol_type = other DNA
attacaggcgcccaccaaca

SEQ ID NO: 75028 - DNA, 20 bp, synthetic construct
  source 1..20: mol_type = other DNA
gattacaggcgcccaccaac

SEQ ID NO: 75029 - DNA, 20 bp, synthetic construct
  source 1..20: mol_type = other DNA
agattacaggcgcccaccaa

SEQ ID NO: 75030 - DNA, 20 bp, synthetic construct
  source 1..20: mol_type = other DNA
aagattacaggcgcccacca

SEQ ID NO: 75031 - DNA, 20 bp, synthetic construct
  source 1..20: mol_type = other DNA
taagattacaggcgcccacc

SEQ ID NO: 75032 - DNA, 20 bp, synthetic construct
  source 1..20: mol_type = other DNA
ctaagattacaggcgcccac

SEQ ID NO: 75033 - DNA, 20 bp, synthetic construct
  source 1..20: mol_type = other DNA
gctaagattacaggcgccca

SEQ ID NO: 75034 - DNA, 20 bp, synthetic construct
  source 1..20: mol_type = other DNA
agctaagattacaggcgccc

SEQ ID NO: 75035 - DNA, 20 bp, synthetic construct
  source 1..20: mol_type = other DNA
tagctaagattacaggcgcc

SEQ ID NO: 75036 - DNA, 20 bp, synthetic construct
  source 1..20: mol_type = other DNA
gtagctaagattacaggcgc

SEQ ID NO: 75037 - DNA, 20 bp, synthetic construct
  source 1..20: mol_type = other DNA
agtagctaagattacaggcg

SEQ ID NO: 75038 - DNA, 20 bp, synthetic construct
  source 1..20: mol_type = other DNA
aagtagctaagattacaggc

SEQ ID NO: 75039 - DNA, 20 bp, synthetic construct
  source 1..20: mol_type = other DNA
caagtagctaagattacagg

SEQ ID NO: 75040 - DNA, 20 bp, synthetic construct
  source 1..20: mol_type = other DNA
ccaagtagctaagattacag

SEQ ID NO: 75041 - DNA, 20 bp, synthetic construct
  source 1..20: mol_type = other DNA
cccaagtagctaagattaca

SEQ ID NO: 75042 - DNA, 20 bp, synthetic construct
  source 1..20: mol_type = other DNA
tcccaagtagctaagattac

SEQ ID NO: 75043 - DNA, 20 bp, synthetic construct
  source 1..20: mol_type = other DNA
ctcccaagtagctaagatta

SEQ ID NO: 75044 - DNA, 20 bp, synthetic construct
  source 1..20: mol_type = other DNA
cctcccaagtagctaagatt

SEQ ID NO: 75045 - DNA, 20 bp, synthetic construct
  source 1..20: mol_type = other DNA
gcctcccaagtagctaagat

SEQ ID NO: 75046 - DNA, 20 bp, synthetic construct
  source 1..20: mol_type = other DNA
agcctcccaagtagctaaga

SEQ ID NO: 75047 - DNA, 20 bp, synthetic construct
  source 1..20: mol_type = other DNA
cagcctcccaagtagctaag

SEQ ID NO: 75048 - DNA, 20 bp, synthetic construct
  source 1..20: mol_type = other DNA
tcagcctcccaagtagctaa

SEQ ID NO: 75049 - DNA, 20 bp, synthetic construct
  source 1..20: mol_type = other DNA
ctcagcctcccaagtagcta

SEQ ID NO: 75050 - DNA, 20 bp, synthetic construct
  source 1..20: mol_type = other DNA
cctcagcctcccaagtagct

SEQ ID NO: 75051 - DNA, 20 bp, synthetic construct
  source 1..20: mol_type = other DNA
gcctcagcctcccaagtagc

SEQ ID NO: 75052 - DNA, 20 bp, synthetic construct
  source 1..20: mol_type = other DNA
tgcctcagcctcccaagtag

SEQ ID NO: 75053 - DNA, 20 bp, synthetic construct
  source 1..20: mol_type = other DNA
ctgcctcagcctcccaagta

SEQ ID NO: 75054 - DNA, 20 bp, synthetic construct
  source 1..20: mol_type = other DNA
cctgcctcagcctcccaagt

SEQ ID NO: 75055 - DNA, 20 bp, synthetic construct
  source 1..20: mol_type = other DNA
tcctgcctcagcctcccaag

SEQ ID NO: 75056 - DNA, 20 bp, synthetic construct
  source 1..20: mol_type = other DNA
ctcctgcctcagcctcccaa

SEQ ID NO: 75057 - DNA, 20 bp, synthetic construct
  source 1..20: mol_type = other DNA
tctcctgcctcagcctccca

SEQ ID NO: 75058 - DNA, 20 bp, synthetic construct
  source 1..20: mol_type = other DNA
atctcctgcctcagcctccc

SEQ ID NO: 75059 - DNA, 20 bp, synthetic construct
  source 1..20: mol_type = other DNA
aatctcctgcctcagcctcc

SEQ ID NO: 75060 - DNA, 20 bp, synthetic construct
  source 1..20: mol_type = other DNA
gaatctcctgcctcagcctc

SEQ ID NO: 75061 - DNA, 20 bp, synthetic construct
  source 1..20: mol_type = other DNA
ggaatctcctgcctcagcct

SEQ ID NO: 75062 - DNA, 20 bp, synthetic construct
  source 1..20: mol_type = other DNA
gggaatctcctgcctcagcc

SEQ ID NO: 75063 - DNA, 20 bp, synthetic construct
  source 1..20: mol_type = other DNA
agggaatctcctgcctcagc

SEQ ID NO: 75064 - DNA, 20 bp, synthetic construct
  source 1..20: mol_type = other DNA
aagggaatctcctgcctcag

SEQ ID NO: 75065 - DNA, 20 bp, synthetic construct
  source 1..20: mol_type = other DNA
caagggaatctcctgcctca

SEQ ID NO: 75066 - DNA, 20 bp, synthetic construct
  source 1..20: mol_type = other DNA
tcaagggaatctcctgcctc

SEQ ID NO: 75067 - DNA, 20 bp, synthetic construct
  source 1..20: mol_type = other DNA
ttcaagggaatctcctgcct

SEQ ID NO: 75068 - DNA, 20 bp, synthetic construct
  source 1..20: mol_type = other DNA
gttcaagggaatctcctgcc

SEQ ID NO: 75069 - DNA, 20 bp, synthetic construct
  source 1..20: mol_type = other DNA
ggttcaagggaatctcctgc

SEQ ID NO: 75070 - DNA, 20 bp, synthetic construct
  source 1..20: mol_type = other DNA
aggttcaagggaatctcctg

SEQ ID NO: 75071 - DNA, 20 bp, synthetic construct
  source 1..20: mol_type = other DNA
caggttcaagggaatctcct

SEQ ID NO: 75072 - DNA, 20 bp, synthetic construct
  source 1..20: mol_type = other DNA
ccaggttcaagggaatctcc

SEQ ID NO: 75073 - DNA, 20 bp, synthetic construct
  source 1..20: mol_type = other DNA
tccaggttcaagggaatctc

SEQ ID NO: 75074 - DNA, 20 bp, synthetic construct
  source 1..20: mol_type = other DNA
ttccaggttcaagggaatct

SEQ ID NO: 75075 - DNA, 20 bp, synthetic construct
  source 1..20: mol_type = other DNA
cttccaggttcaagggaatc

SEQ ID NO: 75076 - DNA, 20 bp, synthetic construct
  source 1..20: mol_type = other DNA
ccttccaggttcaagggaat

SEQ ID NO: 75077 - DNA, 20 bp, synthetic construct
  source 1..20: mol_type = other DNA
accttccaggttcaagggaa

SEQ ID NO: 75078 - DNA, 20 bp, synthetic construct
  source 1..20: mol_type = other DNA
caccttccaggttcaaggga

SEQ ID NO: 75079 - DNA, 20 bp, synthetic construct
  source 1..20: mol_type = other DNA
ccaccttccaggttcaaggg

SEQ ID NO: 75080 - DNA, 20 bp, synthetic construct
  source 1..20: mol_type = other DNA
tccaccttccaggttcaagg

SEQ ID NO: 75081 - DNA, 20 bp, synthetic construct
  source 1..20: mol_type = other DNA
atccaccttccaggttcaag

SEQ ID NO: 75082 - DNA, 20 bp, synthetic construct
  source 1..20: mol_type = other DNA
catccaccttccaggttcaa

SEQ ID NO: 75083 - DNA, 20 bp, synthetic construct
  source 1..20: mol_type = other DNA
acatccaccttccaggttca

SEQ ID NO: 75084 - DNA, 20 bp, synthetic construct
  source 1..20: mol_type = other DNA
aacatccaccttccaggttc

SEQ ID NO: 75085 - DNA, 20 bp, synthetic construct
  source 1..20: mol_type = other DNA
caacatccaccttccaggtt

SEQ ID NO: 75086 - DNA, 20 bp, synthetic construct
  source 1..20: mol_type = other DNA
gcaacatccaccttccaggt

SEQ ID NO: 75087 - DNA, 20 bp, synthetic construct
  source 1..20: mol_type = other DNA
tgcaacatccaccttccagg

SEQ ID NO: 75088 - DNA, 20 bp, synthetic construct
  source 1..20: mol_type = other DNA
ctgcaacatccaccttccag

SEQ ID NO: 75089 - DNA, 20 bp, synthetic construct
  source 1..20: mol_type = other DNA
cctgcaacatccaccttcca

SEQ ID NO: 75090 - DNA, 20 bp, synthetic construct
  source 1..20: mol_type = other DNA
ccctgcaacatccaccttcc

SEQ ID NO: 75091 - DNA, 20 bp, synthetic construct
  source 1..20: mol_type = other DNA
tccctgcaacatccaccttc

SEQ ID NO: 75092 - DNA, 20 bp, synthetic construct
  source 1..20: mol_type = other DNA
ctccctgcaacatccacctt

SEQ ID NO: 75093 - DNA, 20 bp, synthetic construct
  source 1..20: mol_type = other DNA
gctccctgcaacatccacct

SEQ ID NO: 75094 - DNA, 20 bp, synthetic construct
  source 1..20: mol_type = other DNA
ggctccctgcaacatccacc

SEQ ID NO: 75095 - DNA, 20 bp, synthetic construct
  source 1..20: mol_type = other DNA
cggctccctgcaacatccac

SEQ ID NO: 75096 - DNA, 20 bp, synthetic construct
  source 1..20: mol_type = other DNA
tcggctccctgcaacatcca

SEQ ID NO: 75097 - DNA, 20 bp, synthetic construct
  source 1..20: mol_type = other DNA
ctcggctccctgcaacatcc

SEQ ID NO: 75098 - DNA, 20 bp, synthetic construct
  source 1..20: mol_type = other DNA
tctcggctccctgcaacatc

SEQ ID NO: 75099 - DNA, 20 bp, synthetic construct
  source 1..20: mol_type = other DNA
atctcggctccctgcaacat

SEQ ID NO: 75100 - DNA, 20 bp, synthetic construct
  source 1..20: mol_type = other DNA
catctcggctccctgcaaca

SEQ ID NO: 75101 - DNA, 20 bp, synthetic construct
  source 1..20: mol_type = other DNA
ccatctcggctccctgcaac

SEQ ID NO: 75102 - DNA, 20 bp, synthetic construct
  source 1..20: mol_type = other DNA
accatctcggctccctgcaa

SEQ ID NO: 75103 - DNA, 20 bp, synthetic construct
  source 1..20: mol_type = other DNA
caccatctcggctccctgca

SEQ ID NO: 75104 - DNA, 20 bp, synthetic construct
  source 1..20: mol_type = other DNA
acaccatctcggctccctgc

SEQ ID NO: 75105 - DNA, 20 bp, synthetic construct
  source 1..20: mol_type = other DNA
gacaccatctcggctccctg

SEQ ID NO: 75106 - DNA, 20 bp, synthetic construct
  source 1..20: mol_type = other DNA
tgacaccatctcggctccct

SEQ ID NO: 75107 - DNA, 20 bp, synthetic construct
  source 1..20: mol_type = other DNA
gtgacaccatctcggctccc

SEQ ID NO: 75108 - DNA, 20 bp, synthetic construct
  source 1..20: mol_type = other DNA
agtgacaccatctcggctcc

SEQ ID NO: 75109 - DNA, 20 bp, synthetic construct
  source 1..20: mol_type = other DNA
cagtgacaccatctcggctc

SEQ ID NO: 75110 - DNA, 20 bp, synthetic construct
  source 1..20: mol_type = other DNA
gcagtgacaccatctcggct

SEQ ID NO: 75111 - DNA, 20 bp, synthetic construct
  source 1..20: mol_type = other DNA
tgcagtgacaccatctcggc

SEQ ID NO: 75112 - DNA, 20 bp, synthetic construct
  source 1..20: mol_type = other DNA
gtgcagtgacaccatctcgg

SEQ ID NO: 75113 - DNA, 20 bp, synthetic construct
  source 1..20: mol_type = other DNA
agtgcagtgacaccatctcg

SEQ ID NO: 75114 - DNA, 20 bp, synthetic construct
  source 1..20: mol_type = other DNA
gagtgcagtgacaccatctc

SEQ ID NO: 75115 - DNA, 20 bp, synthetic construct
  source 1..20: mol_type = other DNA
ggagtgcagtgacaccatct

SEQ ID NO: 75116 - DNA, 20 bp, synthetic construct
  source 1..20: mol_type = other DNA
cggagtgcagtgacaccatc

SEQ ID NO: 75117 - DNA, 20 bp, synthetic construct
  source 1..20: mol_type = other DNA
ccggagtgcagtgacaccat

SEQ ID NO: 75118 - DNA, 20 bp, synthetic construct
  source 1..20: mol_type = other DNA
accggagtgcagtgacacca

SEQ ID NO: 75119 - DNA, 20 bp, synthetic construct
  source 1..20: mol_type = other DNA
gaccggagtgcagtgacacc

SEQ ID NO: 75120 - DNA, 20 bp, synthetic construct
  source 1..20: mol_type = other DNA
agaccggagtgcagtgacac

SEQ ID NO: 75121 - DNA, 20 bp, synthetic construct
  source 1..20: mol_type = other DNA
cagaccggagtgcagtgaca

SEQ ID NO: 75122 - DNA, 20 bp, synthetic construct
  source 1..20: mol_type = other DNA
ccagaccggagtgcagtgac

SEQ ID NO: 75123 - DNA, 20 bp, synthetic construct
  source 1..20: mol_type = other DNA
cccagaccggagtgcagtga

SEQ ID NO: 75124 - DNA, 20 bp, synthetic construct
  source 1..20: mol_type = other DNA
acccagaccggagtgcagtg

SEQ ID NO: 75125 - DNA, 20 bp, synthetic construct
  source 1..20: mol_type = other DNA
cacccagaccggagtgcagt

SEQ ID NO: 75126 - DNA, 20 bp, synthetic construct
  source 1..20: mol_type = other DNA
tcacccagaccggagtgcag

SEQ ID NO: 75127 - DNA, 20 bp, synthetic construct
  source 1..20: mol_type = other DNA
ttcacccagaccggagtgca

SEQ ID NO: 75128 - DNA, 20 bp, synthetic construct
  source 1..20: mol_type = other DNA
tttcacccagaccggagtgc

SEQ ID NO: 75129 - DNA, 20 bp, synthetic construct
  source 1..20: mol_type = other DNA
ctttcacccagaccggagtg

SEQ ID NO: 75130 - DNA, 20 bp, synthetic construct
  source 1..20: mol_type = other DNA
tctttcacccagaccggagt

SEQ ID NO: 75131 - DNA, 20 bp, synthetic construct
  source 1..20: mol_type = other DNA
ctctttcacccagaccggag

SEQ ID NO: 75132 - DNA, 20 bp, synthetic construct
  source 1..20: mol_type = other DNA
gctctttcacccagaccgga

SEQ ID NO: 75133 - DNA, 20 bp, synthetic construct
  source 1..20: mol_type = other DNA
tgctctttcacccagaccgg

SEQ ID NO: 75134 - DNA, 20 bp, synthetic construct
  source 1..20: mol_type = other DNA
ttgctctttcacccagaccg

SEQ ID NO: 75135 - DNA, 20 bp, synthetic construct
  source 1..20: mol_type = other DNA
cttgctctttcacccagacc

SEQ ID NO: 75136 - DNA, 20 bp, synthetic construct
  source 1..20: mol_type = other DNA
gcttgctctttcacccagac

SEQ ID NO: 75137 - DNA, 20 bp, synthetic construct
  source 1..20: mol_type = other DNA
agcttgctctttcacccaga

SEQ ID NO: 75138 - DNA, 20 bp, synthetic construct
  source 1..20: mol_type = other DNA
gagcttgctctttcacccag

SEQ ID NO: 75139 - DNA, 20 bp, synthetic construct
  source 1..20: mol_type = other DNA
ggagcttgctctttcaccca

SEQ ID NO: 75140 - DNA, 20 bp, synthetic construct
  source 1..20: mol_type = other DNA
tggagcttgctctttcaccc

SEQ ID NO: 75141 - DNA, 20 bp, synthetic construct
  source 1..20: mol_type = other DNA
atggagcttgctctttcacc

SEQ ID NO: 75142 - DNA, 20 bp, synthetic construct
  source 1..20: mol_type = other DNA
gatggagcttgctctttcac

SEQ ID NO: 75143 - DNA, 20 bp, synthetic construct
  source 1..20: mol_type = other DNA
agatggagcttgctctttca

SEQ ID NO: 75144 - DNA, 20 bp, synthetic construct
  source 1..20: mol_type = other DNA
gagatggagcttgctctttc

SEQ ID NO: 75145 - DNA, 20 bp, synthetic construct
  source 1..20: mol_type = other DNA
tgagatggagcttgctcttt

SEQ ID NO: 75146 - DNA, 20 bp, synthetic construct
  source 1..20: mol_type = other DNA
ttgagatggagcttgctctt

SEQ ID NO: 75147 - DNA, 20 bp, synthetic construct
  source 1..20: mol_type = other DNA
tttgagatggagcttgctct

SEQ ID NO: 75148 - DNA, 20 bp, synthetic construct
  source 1..20: mol_type = other DNA
ttttgagatggagcttgctc

SEQ ID NO: 75149 - DNA, 20 bp, synthetic construct
  source 1..20: mol_type = other DNA
tttttgagatggagcttgct

SEQ ID NO: 75150 - DNA, 20 bp, synthetic construct
  source 1..20: mol_type = other DNA
ttttttgagatggagcttgc

SEQ ID NO: 75151 - DNA, 20 bp, synthetic construct
  source 1..20: mol_type = other DNA
cttttttgagatggagcttg

SEQ ID NO: 75152 - DNA, 20 bp, synthetic construct
  source 1..20: mol_type = other DNA
tcttttttgagatggagctt

SEQ ID NO: 75153 - DNA, 20 bp, synthetic construct
  source 1..20: mol_type = other DNA
ttcttttttgagatggagct

SEQ ID NO: 75154 - DNA, 20 bp, synthetic construct
  source 1..20: mol_type = other DNA
tttcttttttgagatggagc

SEQ ID NO: 75155 - DNA, 20 bp, synthetic construct
  source 1..20: mol_type = other DNA
ttttcttttttgagatggag

SEQ ID NO: 75156 - DNA, 20 bp, synthetic construct
  source 1..20: mol_type = other DNA
tttttcttttttgagatgga

SEQ ID NO: 75157 - DNA, 20 bp, synthetic construct
  source 1..20: mol_type = other DNA
ttttttcttttttgagatgg

SEQ ID NO: 75158 - DNA, 20 bp, synthetic construct
  source 1..20: mol_type = other DNA
tttttttcttttttgagatg

SEQ ID NO: 75159 - DNA, 20 bp, synthetic construct
  source 1..20: mol_type = other DNA
ttttttttcttttttgagat

SEQ ID NO: 75160 - DNA, 20 bp, synthetic construct
  source 1..20: mol_type = other DNA
tttttttttcttttttgaga

SEQ ID NO: 75161 - DNA, 20 bp, synthetic construct
  source 1..20: mol_type = other DNA
ttttttttttcttttttgag

SEQ ID NO: 75162 - DNA, 20 bp, synthetic construct
  source 1..20: mol_type = other DNA
tttttttttttcttttttga

SEQ ID NO: 75163 - DNA, 20 bp, synthetic construct
  source 1..20: mol_type = other DNA
ttttttttttttcttttttg

SEQ ID NO: 75164 - DNA, 20 bp, synthetic construct
  source 1..20: mol_type = other DNA
tttttttttttttctttttt

SEQ ID NO: 75165 - DNA, 20 bp, synthetic construct
  source 1..20: mol_type = other DNA
ctttttttttttttcttttt

SEQ ID NO: 75166 - DNA, 20 bp, synthetic construct
  source 1..20: mol_type = other DNA
tctttttttttttttctttt

SEQ ID NO: 75167 - DNA, 20 bp, synthetic construct
  source 1..20: mol_type = other DNA
ctctttttttttttttcttt

SEQ ID NO: 75168 - DNA, 20 bp, synthetic construct
  source 1..20: mol_type = other DNA
tctctttttttttttttctt

SEQ ID NO: 75169 - DNA, 20 bp, synthetic construct
  source 1..20: mol_type = other DNA
atctctttttttttttttct

SEQ ID NO: 75170 - DNA, 20 bp, synthetic construct
  source 1..20: mol_type = other DNA
tatctctttttttttttttc

SEQ ID NO: 75171 - DNA, 20 bp, synthetic construct
  source 1..20: mol_type = other DNA
atatctcttttttttttttt

SEQ ID NO: 75172 - DNA, 20 bp, synthetic construct
  source 1..20: mol_type = other DNA
aatatctctttttttttttt

SEQ ID NO: 75173 - DNA, 20 bp, synthetic construct
  source 1..20: mol_type = other DNA
aaatatctcttttttttttt

SEQ ID NO: 75174 - DNA, 20 bp, synthetic construct
  source 1..20: mol_type = other DNA
aaaatatctctttttttttt

SEQ ID NO: 75175 - DNA, 20 bp, synthetic construct
  source 1..20: mol_type = other DNA
aaaaatatctcttttttttt

SEQ ID NO: 75176 - DNA, 20 bp, synthetic construct
  source 1..20: mol_type = other DNA
caaaaatatctctttttttt

SEQ ID NO: 75177 - DNA, 20 bp, synthetic construct
  source 1..20: mol_type = other DNA
tcaaaaatatctcttttttt

SEQ ID NO: 75178 - DNA, 20 bp, synthetic construct
  source 1..20: mol_type = other DNA
atcaaaaatatctctttttt

SEQ ID NO: 75179 - DNA, 20 bp, synthetic construct
  source 1..20: mol_type = other DNA
catcaaaaatatctcttttt

SEQ ID NO: 75180 - DNA, 20 bp, synthetic construct
  source 1..20: mol_type = other DNA
ccatcaaaaatatctctttt

SEQ ID NO: 75181 - DNA, 20 bp, synthetic construct
  source 1..20: mol_type = other DNA
tccatcaaaaatatctcttt

SEQ ID NO: 75182 - DNA, 20 bp, synthetic construct
  source 1..20: mol_type = other DNA
atccatcaaaaatatctctt

SEQ ID NO: 75183 - DNA, 20 bp, synthetic construct
  source 1..20: mol_type = other DNA
aatccatcaaaaatatctct

SEQ ID NO: 75184 - DNA, 20 bp, synthetic construct
  source 1..20: mol_type = other DNA
caatccatcaaaaatatctc

SEQ ID NO: 75185 - DNA, 20 bp, synthetic construct
  source 1..20: mol_type = other DNA
tcaatccatcaaaaatatct

SEQ ID NO: 75186 - DNA, 20 bp, synthetic construct
  source 1..20: mol_type = other DNA
atcaatccatcaaaaatatc

SEQ ID NO: 75187 - DNA, 20 bp, synthetic construct
  source 1..20: mol_type = other DNA
tatcaatccatcaaaaatat

SEQ ID NO: 75188 - DNA, 20 bp, synthetic construct
  source 1..20: mol_type = other DNA
ctatcaatccatcaaaaata

SEQ ID NO: 75189 - DNA, 20 bp, synthetic construct
  source 1..20: mol_type = other DNA
tctatcaatccatcaaaaat

SEQ ID NO: 75190 - DNA, 20 bp, synthetic construct
  source 1..20: mol_type = other DNA
ttctatcaatccatcaaaaa

SEQ ID NO: 75191 - DNA, 20 bp, synthetic construct
  source 1..20: mol_type = other DNA
tttctatcaatccatcaaaa

SEQ ID NO: 75192 - DNA, 20 bp, synthetic construct
  source 1..20: mol_type = other DNA
atttctatcaatccatcaaa

SEQ ID NO: 75193 - DNA, 20 bp, synthetic construct
  source 1..20: mol_type = other DNA
aatttctatcaatccatcaa

SEQ ID NO: 75194 - DNA, 20 bp, synthetic construct
  source 1..20: mol_type = other DNA
aaatttctatcaatccatca

SEQ ID NO: 75195 - DNA, 20 bp, synthetic construct
  source 1..20: mol_type = other DNA
aaaatttctatcaatccatc

SEQ ID NO: 75196 - DNA, 20 bp, synthetic construct
  source 1..20: mol_type = other DNA
gaaaatttctatcaatccat

SEQ ID NO: 75197 - DNA, 20 bp, synthetic construct
  source 1..20: mol_type = other DNA
agaaaatttctatcaatcca

SEQ ID NO: 75198 - DNA, 20 bp, synthetic construct
  source 1..20: mol_type = other DNA
aagaaaatttctatcaatcc

SEQ ID NO: 75199 - DNA, 20 bp, synthetic construct
  source 1..20: mol_type = other DNA
aaagaaaatttctatcaatc

SEQ ID NO: 75200 - DNA, 20 bp, synthetic construct
  source 1..20: mol_type = other DNA
aaaagaaaatttctatcaat

SEQ ID NO: 75201 - DNA, 20 bp, synthetic construct
  source 1..20: mol_type = other DNA
aaaaagaaaatttctatcaa

SEQ ID NO: 75202 - DNA, 20 bp, synthetic construct
  source 1..20: mol_type = other DNA
gaaaaagaaaatttctatca

SEQ ID NO: 75203 - DNA, 20 bp, synthetic construct
  source 1..20: mol_type = other DNA
agaaaaagaaaatttctatc

SEQ ID NO: 75204 - DNA, 20 bp, synthetic construct
  source 1..20: mol_type = other DNA
aagaaaaagaaaatttctat

SEQ ID NO: 75205 - DNA, 20 bp, synthetic construct
  source 1..20: mol_type = other DNA
aaagaaaaagaaaatttcta

SEQ ID NO: 75206 - DNA, 20 bp, synthetic construct
  source 1..20: mol_type = other DNA
aaaagaaaaagaaaatttct

SEQ ID NO: 75207 - DNA, 20 bp, synthetic construct
  source 1..20: mol_type = other DNA
aaaaagaaaaagaaaatttc

SEQ ID NO: 75208 - DNA, 20 bp, synthetic construct
  source 1..20: mol_type = other DNA
aaaaaagaaaaagaaaattt

SEQ ID NO: 75209 - DNA, 20 bp, synthetic construct
  source 1..20: mol_type = other DNA
aaaaaaagaaaaagaaaatt

SEQ ID NO: 75210 - DNA, 20 bp, synthetic construct
  source 1..20: mol_type = other DNA
aaaaaaaagaaaaagaaaat

SEQ ID NO: 75211 - DNA, 20 bp, synthetic construct
  source 1..20: mol_type = other DNA
aaaaaaaaagaaaaagaaaa

SEQ ID NO: 75212 - DNA, 20 bp, synthetic construct
  source 1..20: mol_type = other DNA
aaaaaaaaaagaaaaagaaa

SEQ ID NO: 75213 - DNA, 20 bp, synthetic construct
  source 1..20: mol_type = other DNA
aaaaaaaaaaagaaaaagaa

SEQ ID NO: 75214 - DNA, 20 bp, synthetic construct
  source 1..20: mol_type = other DNA
caaaaaaaaaaagaaaaaga

SEQ ID NO: 75215 - DNA, 20 bp, synthetic construct
  source 1..20: mol_type = other DNA
tcaaaaaaaaaaagaaaaag

SEQ ID NO: 75216 - DNA, 20 bp, synthetic construct
  source 1..20: mol_type = other DNA
ctcaaaaaaaaaaagaaaaa

SEQ ID NO: 75217 - DNA, 20 bp, synthetic construct
  source 1..20: mol_type = other DNA
tctcaaaaaaaaaaagaaaa

SEQ ID NO: 75218 - DNA, 20 bp, synthetic construct
  source 1..20: mol_type = other DNA
gtctcaaaaaaaaaaagaaa

SEQ ID NO: 75219 - DNA, 20 bp, synthetic construct
  source 1..20: mol_type = other DNA
tgtctcaaaaaaaaaaagaa

SEQ ID NO: 75220 - DNA, 20 bp, synthetic construct
  source 1..20: mol_type = other DNA
ctgtctcaaaaaaaaaaaga

SEQ ID NO: 75221 - DNA, 20 bp, synthetic construct
  source 1..20: mol_type = other DNA
cctgtctcaaaaaaaaaaag

SEQ ID NO: 75222 - DNA, 20 bp, synthetic construct
  source 1..20: mol_type = other DNA
ccctgtctcaaaaaaaaaaa

SEQ ID NO: 75223 - DNA, 20 bp, synthetic construct
  source 1..20: mol_type = other DNA
accctgtctcaaaaaaaaaa

SEQ ID NO: 75224 - DNA, 20 bp, synthetic construct
  source 1..20: mol_type = other DNA
gaccctgtctcaaaaaaaaa

SEQ ID NO: 75225 - DNA, 20 bp, synthetic construct
  source 1..20: mol_type = other DNA
agaccctgtctcaaaaaaaa

SEQ ID NO: 75226 - DNA, 20 bp, synthetic construct
  source 1..20: mol_type = other DNA
gagaccctgtctcaaaaaaa

SEQ ID NO: 75227 - DNA, 20 bp, synthetic construct
  source 1..20: mol_type = other DNA
tgagaccctgtctcaaaaaa

SEQ ID NO: 75228 - DNA, 20 bp, synthetic construct
  source 1..20: mol_type = other DNA
gtgagaccctgtctcaaaaa

SEQ ID NO: 75229 - DNA, 20 bp, synthetic construct
  source 1..20: mol_type = other DNA
agtgagaccctgtctcaaaa

SEQ ID NO: 75230 - DNA, 20 bp, synthetic construct
  source 1..20: mol_type = other DNA
gagtgagaccctgtctcaaa

SEQ ID NO: 75231 - DNA, 20 bp, synthetic construct
  source 1..20: mol_type = other DNA
agagtgagaccctgtctcaa

SEQ ID NO: 75232 - DNA, 20 bp, synthetic construct
  source 1..20: mol_type = other DNA
cagagtgagaccctgtctca

SEQ ID NO: 75233 - DNA, 20 bp, synthetic construct
  source 1..20: mol_type = other DNA
acagagtgagaccctgtctc

SEQ ID NO: 75234 - DNA, 20 bp, synthetic construct
  source 1..20: mol_type = other DNA
gacagagtgagaccctgtct

SEQ ID NO: 75235 - DNA, 20 bp, synthetic construct
  source 1..20: mol_type = other DNA
cgacagagtgagaccctgtc

SEQ ID NO: 75236 - DNA, 20 bp, synthetic construct
  source 1..20: mol_type = other DNA
gcgacagagtgagaccctgt

SEQ ID NO: 75237 - DNA, 20 bp, synthetic construct
  source 1..20: mol_type = other DNA
ggcgacagagtgagaccctg

SEQ ID NO: 75238 - DNA, 20 bp, synthetic construct
  source 1..20: mol_type = other DNA
tggcgacagagtgagaccct

SEQ ID NO: 75239 - DNA, 20 bp, synthetic construct
  source 1..20: mol_type = other DNA
ctggcgacagagtgagaccc

SEQ ID NO: 75240 - DNA, 20 bp, synthetic construct
  source 1..20: mol_type = other DNA
cctggcgacagagtgagacc

SEQ ID NO: 75241 - DNA, 20 bp, synthetic construct
  source 1..20: mol_type = other DNA
gcctggcgacagagtgagac

SEQ ID NO: 75242 - DNA, 20 bp, synthetic construct
  source 1..20: mol_type = other DNA
agcctggcgacagagtgaga

SEQ ID NO: 75243 - DNA, 20 bp, synthetic construct
  source 1..20: mol_type = other DNA
cagcctggcgacagagtgag

SEQ ID NO: 75244 - DNA, 20 bp, synthetic construct
  source 1..20: mol_type = other DNA
ccagcctggcgacagagtga

SEQ ID NO: 75245 - DNA, 20 bp, synthetic construct
  source 1..20: mol_type = other DNA
tccagcctggcgacagagtg

SEQ ID NO: 75246 - DNA, 20 bp, synthetic construct
  source 1..20: mol_type = other DNA
ctccagcctggcgacagagt

SEQ ID NO: 75247 - DNA, 20 bp, synthetic construct
  source 1..20: mol_type = other DNA
gctccagcctggcgacagag

SEQ ID NO: 75248 - DNA, 20 bp, synthetic construct
  source 1..20: mol_type = other DNA
tgctccagcctggcgacaga

SEQ ID NO: 75249 - DNA, 20 bp, synthetic construct
  source 1..20: mol_type = other DNA
gtgctccagcctggcgacag

SEQ ID NO: 75250 - DNA, 20 bp, synthetic construct
  source 1..20: mol_type = other DNA
tgtgctccagcctggcgaca

SEQ ID NO: 75251 - DNA, 20 bp, synthetic construct
  source 1..20: mol_type = other DNA
ctgtgctccagcctggcgac

SEQ ID NO: 75252 - DNA, 20 bp, synthetic construct
  source 1..20: mol_type = other DNA
actgtgctccagcctggcga

SEQ ID NO: 75253 - DNA, 20 bp, synthetic construct
  source 1..20: mol_type = other DNA
cactgtgctccagcctggcg

SEQ ID NO: 75254 - DNA, 20 bp, synthetic construct
  source 1..20: mol_type = other DNA
ccactgtgctccagcctggc

SEQ ID NO: 75255 - DNA, 20 bp, synthetic construct
  source 1..20: mol_type = other DNA
gccactgtgctccagcctgg

SEQ ID NO: 75256 - DNA, 20 bp, synthetic construct
  source 1..20: mol_type = other DNA
cgccactgtgctccagcctg

SEQ ID NO: 75257 - DNA, 20 bp, synthetic construct
  source 1..20: mol_type = other DNA
acgccactgtgctccagcct

SEQ ID NO: 75258 - DNA, 20 bp, synthetic construct
  source 1..20: mol_type = other DNA
cacgccactgtgctccagcc

SEQ ID NO: 75259 - DNA, 20 bp, synthetic construct
  source 1..20: mol_type = other DNA
tcacgccactgtgctccagc

SEQ ID NO: 75260 - DNA, 20 bp, synthetic construct
  source 1..20: mol_type = other DNA
atcacgccactgtgctccag

SEQ ID NO: 75261 - DNA, 20 bp, synthetic construct
  source 1..20: mol_type = other DNA
gatcacgccactgtgctcca

SEQ ID NO: 75262 - DNA, 20 bp, synthetic construct
  source 1..20: mol_type = other DNA
agatcacgccactgtgctcc

SEQ ID NO: 75263 - DNA, 20 bp, synthetic construct
  source 1..20: mol_type = other DNA
gagatcacgccactgtgctc

SEQ ID NO: 75264 - DNA, 20 bp, synthetic construct
  source 1..20: mol_type = other DNA
ggagatcacgccactgtgct

SEQ ID NO: 75265 - DNA, 20 bp, synthetic construct
  source 1..20: mol_type = other DNA
tggagatcacgccactgtgc

SEQ ID NO: 75266 - DNA, 20 bp, synthetic construct
  source 1..20: mol_type = other DNA
atggagatcacgccactgtg

SEQ ID NO: 75267 - DNA, 20 bp, synthetic construct
  source 1..20: mol_type = other DNA
aatggagatcacgccactgt

SEQ ID NO: 75268 - DNA, 20 bp, synthetic construct
  source 1..20: mol_type = other DNA
gaatggagatcacgccactg

SEQ ID NO: 75269 - DNA, 20 bp, synthetic construct
  source 1..20: mol_type = other DNA
tgaatggagatcacgccact

SEQ ID NO: 75270 - DNA, 20 bp, synthetic construct
  source 1..20: mol_type = other DNA
atgaatggagatcacgccac

SEQ ID NO: 75271 - DNA, 20 bp, synthetic construct
  source 1..20: mol_type = other DNA
aatgaatggagatcacgcca

SEQ ID NO: 75272 - DNA, 20 bp, synthetic construct
  source 1..20: mol_type = other DNA
caatgaatggagatcacgcc

SEQ ID NO: 75273 - DNA, 20 bp, synthetic construct
  source 1..20: mol_type = other DNA
gcaatgaatggagatcacgc

SEQ ID NO: 75274 - DNA, 20 bp, synthetic construct
  source 1..20: mol_type = other DNA
tgcaatgaatggagatcacg

SEQ ID NO: 75275 - DNA, 20 bp, synthetic construct
  source 1..20: mol_type = other DNA
ttgcaatgaatggagatcac

SEQ ID NO: 75276 - DNA, 20 bp, synthetic construct
  source 1..20: mol_type = other DNA
gttgcaatgaatggagatca

SEQ ID NO: 75277 - DNA, 20 bp, synthetic construct
  source 1..20: mol_type = other DNA
ggttgcaatgaatggagatc

SEQ ID NO: 75278 - DNA, 20 bp, synthetic construct
  source 1..20: mol_type = other DNA
aggttgcaatgaatggagat

SEQ ID NO: 75279 - DNA, 20 bp, synthetic construct
  source 1..20: mol_type = other DNA
gaggttgcaatgaatggaga

SEQ ID NO: 75280 - DNA, 20 bp, synthetic construct
  source 1..20: mol_type = other DNA
ggaggttgcaatgaatggag

SEQ ID NO: 75281 - DNA, 20 bp, synthetic construct
  source 1..20: mol_type = other DNA
tggaggttgcaatgaatgga

SEQ ID NO: 75282 - DNA, 20 bp, synthetic construct
  source 1..20: mol_type = other DNA
gtggaggttgcaatgaatgg

SEQ ID NO: 75283 - DNA, 20 bp, synthetic construct
  source 1..20: mol_type = other DNA
ggtggaggttgcaatgaatg

SEQ ID NO: 75284 - DNA, 20 bp, synthetic construct
  source 1..20: mol_type = other DNA
aggtggaggttgcaatgaat

SEQ ID NO: 75285 - DNA, 20 bp, synthetic construct
  source 1..20: mol_type = other DNA
gaggtggaggttgcaatgaa

SEQ ID NO: 75286 - DNA, 20 bp, synthetic construct
  source 1..20: mol_type = other DNA
ggaggtggaggttgcaatga

SEQ ID NO: 75287 - DNA, 20 bp, synthetic construct
  source 1..20: mol_type = other DNA
gggaggtggaggttgcaatg

SEQ ID NO: 75288 - DNA, 20 bp, synthetic construct
  source 1..20: mol_type = other DNA
cgggaggtggaggttgcaat

SEQ ID NO: 75289 - DNA, 20 bp, synthetic construct
  source 1..20: mol_type = other DNA
ccgggaggtggaggttgcaa

SEQ ID NO: 75290 - DNA, 20 bp, synthetic construct
  source 1..20: mol_type = other DNA
cccgggaggtggaggttgca

SEQ ID NO: 75291 - DNA, 20 bp, synthetic construct
  source 1..20: mol_type = other DNA
acccgggaggtggaggttgc

SEQ ID NO: 75292 - DNA, 20 bp, synthetic construct
  source 1..20: mol_type = other DNA
aacccgggaggtggaggttg

SEQ ID NO: 75293 - DNA, 20 bp, synthetic construct
  source 1..20: mol_type = other DNA
gaacccgggaggtggaggtt

SEQ ID NO: 75294 - DNA, 20 bp, synthetic construct
  source 1..20: mol_type = other DNA
tgaacccgggaggtggaggt

SEQ ID NO: 75295 - DNA, 20 bp, synthetic construct
  source 1..20: mol_type = other DNA
ttgaacccgggaggtggagg

SEQ ID NO: 75296 - DNA, 20 bp, synthetic construct
  source 1..20: mol_type = other DNA
tttgaacccgggaggtggag

SEQ ID NO: 75297 - DNA, 20 bp, synthetic construct
  source 1..20: mol_type = other DNA
gtttgaacccgggaggtgga

SEQ ID NO: 75298 - DNA, 20 bp, synthetic construct
  source 1..20: mol_type = other DNA
cgtttgaacccgggaggtgg

SEQ ID NO: 75299 - DNA, 20 bp, synthetic construct
  source 1..20: mol_type = other DNA
tcgtttgaacccgggaggtg

SEQ ID NO: 75300 - DNA, 20 bp, synthetic construct
  source 1..20: mol_type = other DNA
atcgtttgaacccgggaggt

SEQ ID NO: 75301 - DNA, 20 bp, synthetic construct
  source 1..20: mol_type = other DNA
aatcgtttgaacccgggagg

SEQ ID NO: 75302 - DNA, 20 bp, synthetic construct
  source 1..20: mol_type = other DNA
gaatcgtttgaacccgggag

SEQ ID NO: 75303 - DNA, 20 bp, synthetic construct
  source 1..20: mol_type = other DNA
agaatcgtttgaacccggga

SEQ ID NO: 75304 - DNA, 20 bp, synthetic construct
  source 1..20: mol_type = other DNA
gagaatcgtttgaacccggg

SEQ ID NO: 75305 - DNA, 20 bp, synthetic construct
  source 1..20: mol_type = other DNA
ggagaatcgtttgaacccgg

SEQ ID NO: 75306 - DNA, 20 bp, synthetic construct
  source 1..20: mol_type = other DNA
aggagaatcgtttgaacccg

SEQ ID NO: 75307 - DNA, 20 bp, synthetic construct
  source 1..20: mol_type = other DNA
aaggagaatcgtttgaaccc

SEQ ID NO: 75308 - DNA, 20 bp, synthetic construct
  source 1..20: mol_type = other DNA
gaaggagaatcgtttgaacc

SEQ ID NO: 75309 - DNA, 20 bp, synthetic construct
  source 1..20: mol_type = other DNA
ggaaggagaatcgtttgaac

SEQ ID NO: 75310 - DNA, 20 bp, synthetic construct
  source 1..20: mol_type = other DNA
aggaaggagaatcgtttgaa

SEQ ID NO: 75311 - DNA, 20 bp, synthetic construct
  source 1..20: mol_type = other DNA
gaggaaggagaatcgtttga

SEQ ID NO: 75312 - DNA, 20 bp, synthetic construct
  source 1..20: mol_type = other DNA
tgaggaaggagaatcgtttg

SEQ ID NO: 75313 - DNA, 20 bp, synthetic construct
  source 1..20: mol_type = other DNA
ctgaggaaggagaatcgttt

SEQ ID NO: 75314 - DNA, 20 bp, synthetic construct
  source 1..20: mol_type = other DNA
gctgaggaaggagaatcgtt

SEQ ID NO: 75315 - DNA, 20 bp, synthetic construct
  source 1..20: mol_type = other DNA
ggctgaggaaggagaatcgt

SEQ ID NO: 75316 - DNA, 20 bp, synthetic construct
  source 1..20: mol_type = other DNA
aggctgaggaaggagaatcg

SEQ ID NO: 75317 - DNA, 20 bp, synthetic construct
  source 1..20: mol_type = other DNA
gaggctgaggaaggagaatc

SEQ ID NO: 75318 - DNA, 20 bp, synthetic construct
  source 1..20: mol_type = other DNA
ggaggctgaggaaggagaat

SEQ ID NO: 75319 - DNA, 20 bp, synthetic construct
  source 1..20: mol_type = other DNA
gggaggctgaggaaggagaa

SEQ ID NO: 75320 - DNA, 20 bp, synthetic construct
  source 1..20: mol_type = other DNA
cgggaggctgaggaaggaga

SEQ ID NO: 75321 - DNA, 20 bp, synthetic construct
  source 1..20: mol_type = other DNA
tcgggaggctgaggaaggag

SEQ ID NO: 75322 - DNA, 20 bp, synthetic construct
  source 1..20: mol_type = other DNA
ctcgggaggctgaggaagga

SEQ ID NO: 75323 - DNA, 20 bp, synthetic construct
  source 1..20: mol_type = other DNA
actcgggaggctgaggaagg

SEQ ID NO: 75324 - DNA, 20 bp, synthetic construct
  source 1..20: mol_type = other DNA
tactcgggaggctgaggaag

SEQ ID NO: 75325 - DNA, 20 bp, synthetic construct
  source 1..20: mol_type = other DNA
ctactcgggaggctgaggaa

SEQ ID NO: 75326 - DNA, 20 bp, synthetic construct
  source 1..20: mol_type = other DNA
gctactcgggaggctgagga

SEQ ID NO: 75327 - DNA, 20 bp, synthetic construct
  source 1..20: mol_type = other DNA
agctactcgggaggctgagg

SEQ ID NO: 75328 - DNA, 20 bp, synthetic construct
  source 1..20: mol_type = other DNA
cagctactcgggaggctgag

SEQ ID NO: 75329 - DNA, 20 bp, synthetic construct
  source 1..20: mol_type = other DNA
ccagctactcgggaggctga

SEQ ID NO: 75330 - DNA, 20 bp, synthetic construct
  source 1..20: mol_type = other DNA
cccagctactcgggaggctg

SEQ ID NO: 75331 - DNA, 20 bp, synthetic construct
  source 1..20: mol_type = other DNA
tcccagctactcgggaggct

SEQ ID NO: 75332 - DNA, 20 bp, synthetic construct
  source 1..20: mol_type = other DNA
gtcccagctactcgggaggc

SEQ ID NO: 75333 - DNA, 20 bp, synthetic construct
  source 1..20: mol_type = other DNA
agtcccagctactcgggagg

SEQ ID NO: 75334 - DNA, 20 bp, synthetic construct
  source 1..20: mol_type = other DNA
tagtcccagctactcgggag

SEQ ID NO: 75335 - DNA, 20 bp, synthetic construct
  source 1..20: mol_type = other DNA
gtagtcccagctactcggga

SEQ ID NO: 75336 - DNA, 20 bp, synthetic construct
  source 1..20: mol_type = other DNA
tgtagtcccagctactcggg

SEQ ID NO: 75337 - DNA, 20 bp, synthetic construct
  source 1..20: mol_type = other DNA
ctgtagtcccagctactcgg

SEQ ID NO: 75338 - DNA, 20 bp, synthetic construct
  source 1..20: mol_type = other DNA
cctgtagtcccagctactcg

SEQ ID NO: 75339 - DNA, 20 bp, synthetic construct
  source 1..20: mol_type = other DNA
gcctgtagtcccagctactc

SEQ ID NO: 75340 - DNA, 20 bp, synthetic construct
  source 1..20: mol_type = other DNA
tgcctgtagtcccagctact

SEQ ID NO: 75341 - DNA, 20 bp, synthetic construct
  source 1..20: mol_type = other DNA
atgcctgtagtcccagctac

SEQ ID NO: 75342 - DNA, 20 bp, synthetic construct
  source 1..20: mol_type = other DNA
catgcctgtagtcccagcta

SEQ ID NO: 75343 - DNA, 20 bp, synthetic construct
  source 1..20: mol_type = other DNA
acatgcctgtagtcccagct

SEQ ID NO: 75344 - DNA, 20 bp, synthetic construct
  source 1..20: mol_type = other DNA
cacatgcctgtagtcccagc

SEQ ID NO: 75345 - DNA, 20 bp, synthetic construct
  source 1..20: mol_type = other DNA
gcacatgcctgtagtcccag

SEQ ID NO: 75346 - DNA, 20 bp, synthetic construct
  source 1..20: mol_type = other DNA
ggcacatgcctgtagtccca

SEQ ID NO: 75347 - DNA, 20 bp, synthetic construct
  source 1..20: mol_type = other DNA
tggcacatgcctgtagtccc

SEQ ID NO: 75348 - DNA, 20 bp, synthetic construct
  source 1..20: mol_type = other DNA
gtggcacatgcctgtagtcc

SEQ ID NO: 75349 - DNA, 20 bp, synthetic construct
  source 1..20: mol_type = other DNA
ggtggcacatgcctgtagtc

SEQ ID NO: 75350 - DNA, 20 bp, synthetic construct
  source 1..20: mol_type = other DNA
tggtggcacatgcctgtagt

SEQ ID NO: 75351 - DNA, 20 bp, synthetic construct
  source 1..20: mol_type = other DNA
atggtggcacatgcctgtag

SEQ ID NO: 75352 - DNA, 20 bp, synthetic construct
  source 1..20: mol_type = other DNA
catggtggcacatgcctgta

SEQ ID NO: 75353 - DNA, 20 bp, synthetic construct
  source 1..20: mol_type = other DNA
gcatggtggcacatgcctgt

SEQ ID NO: 75354 - DNA, 20 bp, synthetic construct
  source 1..20: mol_type = other DNA
ggcatggtggcacatgcctg

SEQ ID NO: 75355 - DNA, 20 bp, synthetic construct
  source 1..20: mol_type = other DNA
gggcatggtggcacatgcct

SEQ ID NO: 75356 - DNA, 20 bp, synthetic construct
  source 1..20: mol_type = other DNA
tgggcatggtggcacatgcc

SEQ ID NO: 75357 - DNA, 20 bp, synthetic construct
  source 1..20: mol_type = other DNA
ttgggcatggtggcacatgc

SEQ ID NO: 75358 - DNA, 20 bp, synthetic construct
  source 1..20: mol_type = other DNA
gttgggcatggtggcacatg

SEQ ID NO: 75359 - DNA, 20 bp, synthetic construct
  source 1..20: mol_type = other DNA
agttgggcatggtggcacat

SEQ ID NO: 75360 - DNA, 20 bp, synthetic construct
  source 1..20: mol_type = other DNA
tagttgggcatggtggcaca

SEQ ID NO: 75361 - DNA, 20 bp, synthetic construct
  source 1..20: mol_type = other DNA
ttagttgggcatggtggcac

SEQ ID NO: 75362 - DNA, 20 bp, synthetic construct
  source 1..20: mol_type = other DNA
attagttgggcatggtggca

SEQ ID NO: 75363 - DNA, 20 bp, synthetic construct
  source 1..20: mol_type = other DNA
aattagttgggcatggtggc

SEQ ID NO: 75364 - DNA, 20 bp, synthetic construct
  source 1..20: mol_type = other DNA
aaattagttgggcatggtgg

SEQ ID NO: 75365 - DNA, 20 bp, synthetic construct
  source 1..20: mol_type = other DNA
aaaattagttgggcatggtg

SEQ ID NO: 75366 - DNA, 20 bp, synthetic construct
  source 1..20: mol_type = other DNA
aaaaattagttgggcatggt

SEQ ID NO: 75367 - DNA, 20 bp, synthetic construct
  source 1..20: mol_type = other DNA
caaaaattagttgggcatgg

SEQ ID NO: 75368 - DNA, 20 bp, synthetic construct
  source 1..20: mol_type = other DNA
acaaaaattagttgggcatg

SEQ ID NO: 75369 - DNA, 20 bp, synthetic construct
  source 1..20: mol_type = other DNA
tacaaaaattagttgggcat

SEQ ID NO: 75370 - DNA, 20 bp, synthetic construct
  source 1..20: mol_type = other DNA
atacaaaaattagttgggca

SEQ ID NO: 75371 - DNA, 20 bp, synthetic construct
  source 1..20: mol_type = other DNA
aatacaaaaattagttgggc

SEQ ID NO: 75372 - DNA, 20 bp, synthetic construct
  source 1..20: mol_type = other DNA
aaatacaaaaattagttggg

SEQ ID NO: 75373 - DNA, 20 bp, synthetic construct
  source 1..20: mol_type = other DNA
aaaatacaaaaattagttgg

SEQ ID NO: 75374 - DNA, 20 bp, synthetic construct
  source 1..20: mol_type = other DNA
aaaaatacaaaaattagttg

SEQ ID NO: 75375 - DNA, 20 bp, synthetic construct
  source 1..20: mol_type = other DNA
taaaaatacaaaaattagtt

SEQ ID NO: 75376 - DNA, 20 bp, synthetic construct
  source 1..20: mol_type = other DNA
ctaaaaatacaaaaattagt

SEQ ID NO: 75377 - DNA, 20 bp, synthetic construct
  source 1..20: mol_type = other DNA
actaaaaatacaaaaattag

SEQ ID NO: 75378 - DNA, 20 bp, synthetic construct
  source 1..20: mol_type = other DNA
tactaaaaatacaaaaatta

SEQ ID NO: 75379 - DNA, 20 bp, synthetic construct
  source 1..20: mol_type = other DNA
ctactaaaaatacaaaaatt

SEQ ID NO: 75380 - DNA, 20 bp, synthetic construct
  source 1..20: mol_type = other DNA
tctactaaaaatacaaaaat

SEQ ID NO: 75381 - DNA, 20 bp, synthetic construct
  source 1..20: mol_type = other DNA
ctctactaaaaatacaaaaa

SEQ ID NO: 75382 - DNA, 20 bp, synthetic construct
  source 1..20: mol_type = other DNA
tctctactaaaaatacaaaa

SEQ ID NO: 75383 - DNA, 20 bp, synthetic construct
  source 1..20: mol_type = other DNA
ctctctactaaaaatacaaa

SEQ ID NO: 75384 - DNA, 20 bp, synthetic construct
  source 1..20: mol_type = other DNA
tctctctactaaaaatacaa

SEQ ID NO: 75385 - DNA, 20 bp, synthetic construct
  source 1..20: mol_type = other DNA
ctctctctactaaaaataca

SEQ ID NO: 75386 - DNA, 20 bp, synthetic construct
  source 1..20: mol_type = other DNA
cctctctctactaaaaatac

SEQ ID NO: 75387 - DNA, 20 bp, synthetic construct
  source 1..20: mol_type = other DNA
ccctctctctactaaaaata

SEQ ID NO: 75388 - DNA, 20 bp, synthetic construct
  source 1..20: mol_type = other DNA
accctctctctactaaaaat

SEQ ID NO: 75389 - DNA, 20 bp, synthetic construct
  source 1..20: mol_type = other DNA
aaccctctctctactaaaaa

SEQ ID NO: 75390 - DNA, 20 bp, synthetic construct
  source 1..20: mol_type = other DNA
aaaccctctctctactaaaa

SEQ ID NO: 75391 - DNA, 20 bp, synthetic construct
  source 1..20: mol_type = other DNA
gaaaccctctctctactaaa

SEQ ID NO: 75392 - DNA, 20 bp, synthetic construct
  source 1..20: mol_type = other DNA
tgaaaccctctctctactaa

SEQ ID NO: 75393 - DNA, 20 bp, synthetic construct
  source 1..20: mol_type = other DNA
gtgaaaccctctctctacta

SEQ ID NO: 75394 - DNA, 20 bp, synthetic construct
  source 1..20: mol_type = other DNA
ggtgaaaccctctctctact

SEQ ID NO: 75395 - DNA, 20 bp, synthetic construct
  source 1..20: mol_type = other DNA
tggtgaaaccctctctctac

SEQ ID NO: 75396 - DNA, 20 bp, synthetic construct
  source 1..20: mol_type = other DNA
atggtgaaaccctctctcta

SEQ ID NO: 75397 - DNA, 20 bp, synthetic construct
  source 1..20: mol_type = other DNA
catggtgaaaccctctctct

SEQ ID NO: 75398 - DNA, 20 bp, synthetic construct
  source 1..20: mol_type = other DNA
acatggtgaaaccctctctc

SEQ ID NO: 75399 - DNA, 20 bp, synthetic construct
  source 1..20: mol_type = other DNA
aacatggtgaaaccctctct

SEQ ID NO: 75400 - DNA, 20 bp, synthetic construct
  source 1..20: mol_type = other DNA
caacatggtgaaaccctctc

SEQ ID NO: 75401 - DNA, 20 bp, synthetic construct
  source 1..20: mol_type = other DNA
ccaacatggtgaaaccctct

SEQ ID NO: 75402 - DNA, 20 bp, synthetic construct
  source 1..20: mol_type = other DNA
gccaacatggtgaaaccctc

SEQ ID NO: 75403 - DNA, 20 bp, synthetic construct
  source 1..20: mol_type = other DNA
ggccaacatggtgaaaccct

SEQ ID NO: 75404 - DNA, 20 bp, synthetic construct
  source 1..20: mol_type = other DNA
tggccaacatggtgaaaccc

SEQ ID NO: 75405 - DNA, 20 bp, synthetic construct
  source 1..20: mol_type = other DNA
ctggccaacatggtgaaacc

SEQ ID NO: 75406 - DNA, 20 bp, synthetic construct
  source 1..20: mol_type = other DNA
cctggccaacatggtgaaac

SEQ ID NO: 75407 - DNA, 20 bp, synthetic construct
  source 1..20: mol_type = other DNA
tcctggccaacatggtgaaa

SEQ ID NO: 75408 - DNA, 20 bp, synthetic construct
  source 1..20: mol_type = other DNA
atcctggccaacatggtgaa

SEQ ID NO: 75409 - DNA, 20 bp, synthetic construct
  source 1..20: mol_type = other DNA
catcctggccaacatggtga

SEQ ID NO: 75410 - DNA, 20 bp, synthetic construct
  source 1..20: mol_type = other DNA
ccatcctggccaacatggtg

SEQ ID NO: 75411 - DNA, 20 bp, synthetic construct
  source 1..20: mol_type = other DNA
accatcctggccaacatggt

SEQ ID NO: 75412 - DNA, 20 bp, synthetic construct
  source 1..20: mol_type = other DNA
gaccatcctggccaacatgg

SEQ ID NO: 75413 - DNA, 20 bp, synthetic construct
  source 1..20: mol_type = other DNA
agaccatcctggccaacatg

SEQ ID NO: 75414 - DNA, 20 bp, synthetic construct
  source 1..20: mol_type = other DNA
gagaccatcctggccaacat

SEQ ID NO: 75415 - DNA, 20 bp, synthetic construct
  source 1..20: mol_type = other DNA
cgagaccatcctggccaaca

SEQ ID NO: 75416 - DNA, 20 bp, synthetic construct
  source 1..20: mol_type = other DNA
tcgagaccatcctggccaac

SEQ ID NO: 75417 - DNA, 20 bp, synthetic construct
  source 1..20: mol_type = other DNA
atcgagaccatcctggccaa

SEQ ID NO: 75418 - DNA, 20 bp, synthetic construct
  source 1..20: mol_type = other DNA
gatcgagaccatcctggcca

SEQ ID NO: 75419 - DNA, 20 bp, synthetic construct
  source 1..20: mol_type = other DNA
agatcgagaccatcctggcc

SEQ ID NO: 75420 - DNA, 20 bp, synthetic construct
  source 1..20: mol_type = other DNA
gagatcgagaccatcctggc

SEQ ID NO: 75421 - DNA, 20 bp, synthetic construct
  source 1..20: mol_type = other DNA
agagatcgagaccatcctgg

SEQ ID NO: 75422 - DNA, 20 bp, synthetic construct
  source 1..20: mol_type = other DNA
aagagatcgagaccatcctg

SEQ ID NO: 75423 - DNA, 20 bp, synthetic construct
  source 1..20: mol_type = other DNA
taagagatcgagaccatcct

SEQ ID NO: 75424 - DNA, 20 bp, synthetic construct
  source 1..20: mol_type = other DNA
ttaagagatcgagaccatcc

SEQ ID NO: 75425 - DNA, 20 bp, synthetic construct
  source 1..20: mol_type = other DNA
gttaagagatcgagaccatc

SEQ ID NO: 75426 - DNA, 20 bp, synthetic construct
  source 1..20: mol_type = other DNA
ggttaagagatcgagaccat

SEQ ID NO: 75427 - DNA, 20 bp, synthetic construct
  source 1..20: mol_type = other DNA
aggttaagagatcgagacca

SEQ ID NO: 75428 - DNA, 20 bp, synthetic construct
  source 1..20: mol_type = other DNA
gaggttaagagatcgagacc

SEQ ID NO: 75429 - DNA, 20 bp, synthetic construct
  source 1..20: mol_type = other DNA
tgaggttaagagatcgagac

SEQ ID NO: 75430 - DNA, 20 bp, synthetic construct
  source 1..20: mol_type = other DNA
atgaggttaagagatcgaga

SEQ ID NO: 75431 - DNA, 20 bp, synthetic construct
  source 1..20: mol_type = other DNA
catgaggttaagagatcgag

SEQ ID NO: 75432 - DNA, 20 bp, synthetic construct
  source 1..20: mol_type = other DNA
tcatgaggttaagagatcga

SEQ ID NO: 75433 - DNA, 20 bp, synthetic construct
  source 1..20: mol_type = other DNA
atcatgaggttaagagatcg

SEQ ID NO: 75434 - DNA, 20 bp, synthetic construct
  source 1..20: mol_type = other DNA
gatcatgaggttaagagatc

SEQ ID NO: 75435 - DNA, 20 bp, synthetic construct
  source 1..20: mol_type = other DNA
ggatcatgaggttaagagat

SEQ ID NO: 75436 - DNA, 20 bp, synthetic construct
  source 1..20: mol_type = other DNA
tggatcatgaggttaagaga

SEQ ID NO: 75437 - DNA, 20 bp, synthetic construct
  source 1..20: mol_type = other DNA
gtggatcatgaggttaagag

SEQ ID NO: 75438 - DNA, 20 bp, synthetic construct
  source 1..20: mol_type = other DNA
ggtggatcatgaggttaaga

SEQ ID NO: 75439 - DNA, 20 bp, synthetic construct
  source 1..20: mol_type = other DNA
aggtggatcatgaggttaag

SEQ ID NO: 75440 - DNA, 20 bp, synthetic construct
  source 1..20: mol_type = other DNA
caggtggatcatgaggttaa

SEQ ID NO: 75441 - DNA, 20 bp, synthetic construct
  source 1..20: mol_type = other DNA
gcaggtggatcatgaggtta

SEQ ID NO: 75442 - DNA, 20 bp, synthetic construct
  source 1..20: mol_type = other DNA
ggcaggtggatcatgaggtt

SEQ ID NO: 75443 - DNA, 20 bp, synthetic construct
  source 1..20: mol_type = other DNA
aggcaggtggatcatgaggt

SEQ ID NO: 75444 - DNA, 20 bp, synthetic construct
  source 1..20: mol_type = other DNA
caggcaggtggatcatgagg

SEQ ID NO: 75445 - DNA, 20 bp, synthetic construct
  source 1..20: mol_type = other DNA
ccaggcaggtggatcatgag

SEQ ID NO: 75446 - DNA, 20 bp, synthetic construct
  source 1..20: mol_type = other DNA
cccaggcaggtggatcatga

SEQ ID NO: 75447 - DNA, 20 bp, synthetic construct
  source 1..20: mol_type = other DNA
gcccaggcaggtggatcatg

SEQ ID NO: 75448 - DNA, 20 bp, synthetic construct
  source 1..20: mol_type = other DNA
ggcccaggcaggtggatcat

SEQ ID NO: 75449 - DNA, 20 bp, synthetic construct
  source 1..20: mol_type = other DNA
aggcccaggcaggtggatca

SEQ ID NO: 75450 - DNA, 20 bp, synthetic construct
  source 1..20: mol_type = other DNA
gaggcccaggcaggtggatc

SEQ ID NO: 75451 - DNA, 20 bp, synthetic construct
  source 1..20: mol_type = other DNA
ggaggcccaggcaggtggat

SEQ ID NO: 75452 - DNA, 20 bp, synthetic construct
  source 1..20: mol_type = other DNA
gggaggcccaggcaggtgga

SEQ ID NO: 75453 - DNA, 20 bp, synthetic construct
  source 1..20: mol_type = other DNA
tgggaggcccaggcaggtgg

SEQ ID NO: 75454 - DNA, 20 bp, synthetic construct
  source 1..20: mol_type = other DNA
ttgggaggcccaggcaggtg

SEQ ID NO: 75455 - DNA, 20 bp, synthetic construct
  source 1..20: mol_type = other DNA
tttgggaggcccaggcaggt

SEQ ID NO: 75456 - DNA, 20 bp, synthetic construct
  source 1..20: mol_type = other DNA
ctttgggaggcccaggcagg

SEQ ID NO: 75457 - DNA, 20 bp, synthetic construct
  source 1..20: mol_type = other DNA
actttgggaggcccaggcag

SEQ ID NO: 75458 - DNA, 20 bp, synthetic construct
  source 1..20: mol_type = other DNA
cactttgggaggcccaggca

SEQ ID NO: 75459 - DNA, 20 bp, synthetic construct
  source 1..20: mol_type = other DNA
gcactttgggaggcccaggc

SEQ ID NO: 75460 - DNA, 20 bp, synthetic construct
  source 1..20: mol_type = other DNA
agcactttgggaggcccagg

SEQ ID NO: 75461 - DNA, 20 bp, synthetic construct
  source 1..20: mol_type = other DNA
cagcactttgggaggcccag

SEQ ID NO: 75462 - DNA, 20 bp, synthetic construct
  source 1..20: mol_type = other DNA
ccagcactttgggaggccca

SEQ ID NO: 75463 - DNA, 20 bp, synthetic construct
  source 1..20: mol_type = other DNA
accagcactttgggaggccc

SEQ ID NO: 75464 - DNA, 20 bp, synthetic construct
  source 1..20: mol_type = other DNA
taccagcactttgggaggcc

SEQ ID NO: 75465 - DNA, 20 bp, synthetic construct
  source 1..20: mol_type = other DNA
ataccagcactttgggaggc

SEQ ID NO: 75466 - DNA, 20 bp, synthetic construct
  source 1..20: mol_type = other DNA
aataccagcactttgggagg

SEQ ID NO: 75467 - DNA, 20 bp, synthetic construct
  source 1..20: mol_type = other DNA
taataccagcactttgggag

SEQ ID NO: 75468 - DNA, 20 bp, synthetic construct
  source 1..20: mol_type = other DNA
gtaataccagcactttggga

SEQ ID NO: 75469 - DNA, 20 bp, synthetic construct
  source 1..20: mol_type = other DNA
tgtaataccagcactttggg

SEQ ID NO: 75470 - DNA, 20 bp, synthetic construct
  source 1..20: mol_type = other DNA
ctgtaataccagcactttgg

SEQ ID NO: 75471 - DNA, 20 bp, synthetic construct
  source 1..20: mol_type = other DNA
cctgtaataccagcactttg

SEQ ID NO: 75472 - DNA, 20 bp, synthetic construct
  source 1..20: mol_type = other DNA
gcctgtaataccagcacttt

SEQ ID NO: 75473 - DNA, 20 bp, synthetic construct
  source 1..20: mol_type = other DNA
tgcctgtaataccagcactt

SEQ ID NO: 75474 - DNA, 20 bp, synthetic construct
  source 1..20: mol_type = other DNA
atgcctgtaataccagcact

SEQ ID NO: 75475 - DNA, 20 bp, synthetic construct
  source 1..20: mol_type = other DNA
catgcctgtaataccagcac

SEQ ID NO: 75476 - DNA, 20 bp, synthetic construct
  source 1..20: mol_type = other DNA
tcatgcctgtaataccagca

SEQ ID NO: 75477 - DNA, 20 bp, synthetic construct
  source 1..20: mol_type = other DNA
ctcatgcctgtaataccagc

SEQ ID NO: 75478 - DNA, 20 bp, synthetic construct
  source 1..20: mol_type = other DNA
gctcatgcctgtaataccag

SEQ ID NO: 75479 - DNA, 20 bp, synthetic construct
  source 1..20: mol_type = other DNA
ggctcatgcctgtaatacca

SEQ ID NO: 75480 - DNA, 20 bp, synthetic construct
  source 1..20: mol_type = other DNA
tggctcatgcctgtaatacc

SEQ ID NO: 75481 - DNA, 20 bp, synthetic construct
  source 1..20: mol_type = other DNA
gtggctcatgcctgtaatac

SEQ ID NO: 75482 - DNA, 20 bp, synthetic construct
  source 1..20: mol_type = other DNA
ggtggctcatgcctgtaata

SEQ ID NO: 75483 - DNA, 20 bp, synthetic construct
  source 1..20: mol_type = other DNA
tggtggctcatgcctgtaat

SEQ ID NO: 75484 - DNA, 20 bp, synthetic construct
  source 1..20: mol_type = other DNA
gtggtggctcatgcctgtaa

SEQ ID NO: 75485 - DNA, 20 bp, synthetic construct
  source 1..20: mol_type = other DNA
tgtggtggctcatgcctgta

SEQ ID NO: 75486 - DNA, 20 bp, synthetic construct
  source 1..20: mol_type = other DNA
atgtggtggctcatgcctgt

SEQ ID NO: 75487 - DNA, 20 bp, synthetic construct
  source 1..20: mol_type = other DNA
gatgtggtggctcatgcctg

SEQ ID NO: 75488 - DNA, 20 bp, synthetic construct
  source 1..20: mol_type = other DNA
agatgtggtggctcatgcct

SEQ ID NO: 75489 - DNA, 20 bp, synthetic construct
  source 1..20: mol_type = other DNA
cagatgtggtggctcatgcc

SEQ ID NO: 75490 - DNA, 20 bp, synthetic construct
  source 1..20: mol_type = other DNA
ccagatgtggtggctcatgc

SEQ ID NO: 75491 - DNA, 20 bp, synthetic construct
  source 1..20: mol_type = other DNA
gccagatgtggtggctcatg

SEQ ID NO: 75492 - DNA, 20 bp, synthetic construct
  source 1..20: mol_type = other DNA
ggccagatgtggtggctcat

SEQ ID NO: 75493 - DNA, 20 bp, synthetic construct
  source 1..20: mol_type = other DNA
tggccagatgtggtggctca

SEQ ID NO: 75494 - DNA, 20 bp, synthetic construct
  source 1..20: mol_type = other DNA
ctggccagatgtggtggctc

SEQ ID NO: 75495 - DNA, 20 bp, synthetic construct
  source 1..20: mol_type = other DNA
tctggccagatgtggtggct

SEQ ID NO: 75496 - DNA, 20 bp, synthetic construct
  source 1..20: mol_type = other DNA
ttctggccagatgtggtggc

SEQ ID NO: 75497 - DNA, 20 bp, synthetic construct
  source 1..20: mol_type = other DNA
tttctggccagatgtggtgg

SEQ ID NO: 75498 - DNA, 20 bp, synthetic construct
  source 1..20: mol_type = other DNA
atttctggccagatgtggtg

SEQ ID NO: 75499 - DNA, 20 bp, synthetic construct
  source 1..20: mol_type = other DNA
aatttctggccagatgtggt

SEQ ID NO: 75500 - DNA, 20 bp, synthetic construct
  source 1..20: mol_type = other DNA
aaatttctggccagatgtgg

SEQ ID NO: 75501 - DNA, 20 bp, synthetic construct
  source 1..20: mol_type = other DNA
aaaatttctggccagatgtg

SEQ ID NO: 75502 - DNA, 20 bp, synthetic construct
  source 1..20: mol_type = other DNA
gaaaatttctggccagatgt

SEQ ID NO: 75503 - DNA, 20 bp, synthetic construct
  source 1..20: mol_type = other DNA
agaaaatttctggccagatg

SEQ ID NO: 75504 - DNA, 20 bp, synthetic construct
  source 1..20: mol_type = other DNA
aagaaaatttctggccagat

SEQ ID NO: 75505 - DNA, 20 bp, synthetic construct
  source 1..20: mol_type = other DNA
caagaaaatttctggccaga

SEQ ID NO: 75506 - DNA, 20 bp, synthetic construct
  source 1..20: mol_type = other DNA
ccaagaaaatttctggccag

SEQ ID NO: 75507 - DNA, 20 bp, synthetic construct
  source 1..20: mol_type = other DNA
accaagaaaatttctggcca

SEQ ID NO: 75508 - DNA, 20 bp, synthetic construct
  source 1..20: mol_type = other DNA
gaccaagaaaatttctggcc

SEQ ID NO: 75509 - DNA, 20 bp, synthetic construct
  source 1..20: mol_type = other DNA
tgaccaagaaaatttctggc

SEQ ID NO: 75510 - DNA, 20 bp, synthetic construct
  source 1..20: mol_type = other DNA
gtgaccaagaaaatttctgg

SEQ ID NO: 75511 - DNA, 20 bp, synthetic construct
  source 1..20: mol_type = other DNA
agtgaccaagaaaatttctg

SEQ ID NO: 75512 - DNA, 20 bp, synthetic construct
  source 1..20: mol_type = other DNA
aagtgaccaagaaaatttct

SEQ ID NO: 75513 - DNA, 20 bp, synthetic construct
  source 1..20: mol_type = other DNA
gaagtgaccaagaaaatttc

SEQ ID NO: 75514 - DNA, 20 bp, synthetic construct
  source 1..20: mol_type = other DNA
agaagtgaccaagaaaattt

SEQ ID NO: 75515 - DNA, 20 bp, synthetic construct
  source 1..20: mol_type = other DNA
cagaagtgaccaagaaaatt

SEQ ID NO: 75516 - DNA, 20 bp, synthetic construct
  source 1..20: mol_type = other DNA
tcagaagtgaccaagaaaat

SEQ ID NO: 75517 - DNA, 20 bp, synthetic construct
  source 1..20: mol_type = other DNA
ctcagaagtgaccaagaaaa

SEQ ID NO: 75518 - DNA, 20 bp, synthetic construct
  source 1..20: mol_type = other DNA
tctcagaagtgaccaagaaa

SEQ ID NO: 75519 - DNA, 20 bp, synthetic construct
  source 1..20: mol_type = other DNA
gtctcagaagtgaccaagaa

SEQ ID NO: 75520 - DNA, 20 bp, synthetic construct
  source 1..20: mol_type = other DNA
tgtctcagaagtgaccaaga

SEQ ID NO: 75521 - DNA, 20 bp, synthetic construct
  source 1..20: mol_type = other DNA
atgtctcagaagtgaccaag

SEQ ID NO: 75522 - DNA, 20 bp, synthetic construct
  source 1..20: mol_type = other DNA
catgtctcagaagtgaccaa

SEQ ID NO: 75523 - DNA, 20 bp, synthetic construct
  source 1..20: mol_type = other DNA
gcatgtctcagaagtgacca

SEQ ID NO: 75524 - DNA, 20 bp, synthetic construct
  source 1..20: mol_type = other DNA
tgcatgtctcagaagtgacc

SEQ ID NO: 75525 - DNA, 20 bp, synthetic construct
  source 1..20: mol_type = other DNA
ctgcatgtctcagaagtgac

SEQ ID NO: 75526 - DNA, 20 bp, synthetic construct
  source 1..20: mol_type = other DNA
tctgcatgtctcagaagtga

SEQ ID NO: 75527 - DNA, 20 bp, synthetic construct
  source 1..20: mol_type = other DNA
ctctgcatgtctcagaagtg

SEQ ID NO: 75528 - DNA, 20 bp, synthetic construct
  source 1..20: mol_type = other DNA
actctgcatgtctcagaagt

SEQ ID NO: 75529 - DNA, 20 bp, synthetic construct
  source 1..20: mol_type = other DNA
tactctgcatgtctcagaag

SEQ ID NO: 75530 - DNA, 20 bp, synthetic construct
  source 1..20: mol_type = other DNA
ttactctgcatgtctcagaa

SEQ ID NO: 75531 - DNA, 20 bp, synthetic construct
  source 1..20: mol_type = other DNA
attactctgcatgtctcaga

SEQ ID NO: 75532 - DNA, 20 bp, synthetic construct
  source 1..20: mol_type = other DNA
aattactctgcatgtctcag

SEQ ID NO: 75533 - DNA, 20 bp, synthetic construct
  source 1..20: mol_type = other DNA
taattactctgcatgtctca

SEQ ID NO: 75534 - DNA, 20 bp, synthetic construct
  source 1..20: mol_type = other DNA
gtaattactctgcatgtctc

SEQ ID NO: 75535 - DNA, 20 bp, synthetic construct
  source 1..20: mol_type = other DNA
ggtaattactctgcatgtct

SEQ ID NO: 75536 - DNA, 20 bp, synthetic construct
  source 1..20: mol_type = other DNA
aggtaattactctgcatgtc

SEQ ID NO: 75537 - DNA, 20 bp, synthetic construct
  source 1..20: mol_type = other DNA
caggtaattactctgcatgt

SEQ ID NO: 75538 - DNA, 20 bp, synthetic construct
  source 1..20: mol_type = other DNA
acaggtaattactctgcatg

SEQ ID NO: 75539 - DNA, 20 bp, synthetic construct
  source 1..20: mol_type = other DNA
tacaggtaattactctgcat

SEQ ID NO: 75540 - DNA, 20 bp, synthetic construct
  source 1..20: mol_type = other DNA
ttacaggtaattactctgca

SEQ ID NO: 75541 - DNA, 20 bp, synthetic construct
  source 1..20: mol_type = other DNA
attacaggtaattactctgc

SEQ ID NO: 75542 - DNA, 20 bp, synthetic construct
  source 1..20: mol_type = other DNA
tattacaggtaattactctg

SEQ ID NO: 75543 - DNA, 20 bp, synthetic construct
  source 1..20: mol_type = other DNA
atattacaggtaattactct

SEQ ID NO: 75544 - DNA, 20 bp, synthetic construct
  source 1..20: mol_type = other DNA
tatattacaggtaattactc

SEQ ID NO: 75545 - DNA, 20 bp, synthetic construct
  source 1..20: mol_type = other DNA
ttatattacaggtaattact

SEQ ID NO: 75546 - DNA, 20 bp, synthetic construct
  source 1..20: mol_type = other DNA
attatattacaggtaattac

SEQ ID NO: 75547 - DNA, 20 bp, synthetic construct
  source 1..20: mol_type = other DNA
aattatattacaggtaatta

SEQ ID NO: 75548 - DNA, 20 bp, synthetic construct
  source 1..20: mol_type = other DNA
aaattatattacaggtaatt

SEQ ID NO: 75549 - DNA, 20 bp, synthetic construct
  source 1..20: mol_type = other DNA
taaattatattacaggtaat

SEQ ID NO: 75550 - DNA, 20 bp, synthetic construct
  source 1..20: mol_type = other DNA
ttaaattatattacaggtaa

SEQ ID NO: 75551 - DNA, 20 bp, synthetic construct
  source 1..20: mol_type = other DNA
attaaattatattacaggta

SEQ ID NO: 75552 - DNA, 20 bp, synthetic construct
  source 1..20: mol_type = other DNA
cattaaattatattacaggt

SEQ ID NO: 75553 - DNA, 20 bp, synthetic construct
  source 1..20: mol_type = other DNA
tcattaaattatattacagg

SEQ ID NO: 75554 - DNA, 20 bp, synthetic construct
  source 1..20: mol_type = other DNA
ttcattaaattatattacag

SEQ ID NO: 75555 - DNA, 20 bp, synthetic construct
  source 1..20: mol_type = other DNA
attcattaaattatattaca

SEQ ID NO: 75556 - DNA, 20 bp, synthetic construct
  source 1..20: mol_type = other DNA
aattcattaaattatattac

SEQ ID NO: 75557 - DNA, 20 bp, synthetic construct
  source 1..20: mol_type = other DNA
taattcattaaattatatta

SEQ ID NO: 75558 - DNA, 20 bp, synthetic construct
  source 1..20: mol_type = other DNA
ataattcattaaattatatt

SEQ ID NO: 75559 - DNA, 20 bp, synthetic construct
  source 1..20: mol_type = other DNA
cataattcattaaattatat

SEQ ID NO: 75560 - DNA, 20 bp, synthetic construct
  source 1..20: mol_type = other DNA
acataattcattaaattata

SEQ ID NO: 75561 - DNA, 20 bp, synthetic construct
  source 1..20: mol_type = other DNA
gacataattcattaaattat

SEQ ID NO: 75562 - DNA, 20 bp, synthetic construct
  source 1..20: mol_type = other DNA
tgacataattcattaaatta

SEQ ID NO: 75563 - DNA, 20 bp, synthetic construct
  source 1..20: mol_type = other DNA
ttgacataattcattaaatt

SEQ ID NO: 75564 - DNA, 20 bp, synthetic construct
  source 1..20: mol_type = other DNA
attgacataattcattaaat

SEQ ID NO: 75565 - DNA, 20 bp, synthetic construct
  source 1..20: mol_type = other DNA
tattgacataattcattaaa

SEQ ID NO: 75566 - DNA, 20 bp, synthetic construct
  source 1..20: mol_type = other DNA
atattgacataattcattaa

SEQ ID NO: 75567 - DNA, 20 bp, synthetic construct
  source 1..20: mol_type = other DNA
tatattgacataattcatta

SEQ ID NO: 75568 - DNA, 20 bp, synthetic construct
  source 1..20: mol_type = other DNA
atatattgacataattcatt

SEQ ID NO: 75569 - DNA, 20 bp, synthetic construct
  source 1..20: mol_type = other DNA
aatatattgacataattcat

SEQ ID NO: 75570 - DNA, 20 bp, synthetic construct
  source 1..20: mol_type = other DNA
taatatattgacataattca

SEQ ID NO: 75571 - DNA, 20 bp, synthetic construct
  source 1..20: mol_type = other DNA
ttaatatattgacataattc

SEQ ID NO: 75572 - DNA, 20 bp, synthetic construct
  source 1..20: mol_type = other DNA
tttaatatattgacataatt

SEQ ID NO: 75573 - DNA, 20 bp, synthetic construct
  source 1..20: mol_type = other DNA
ttttaatatattgacataat

SEQ ID NO: 75574 - DNA, 20 bp, synthetic construct
  source 1..20: mol_type = other DNA
attttaatatattgacataa

SEQ ID NO: 75575 - DNA, 20 bp, synthetic construct
  source 1..20: mol_type = other DNA
tattttaatatattgacata

SEQ ID NO: 75576 - DNA, 20 bp, synthetic construct
  source 1..20: mol_type = other DNA
atattttaatatattgacat

SEQ ID NO: 75577 - DNA, 20 bp, synthetic construct
  source 1..20: mol_type = other DNA
catattttaatatattgaca

SEQ ID NO: 75578 - DNA, 20 bp, synthetic construct
  source 1..20: mol_type = other DNA
gcatattttaatatattgac

SEQ ID NO: 75579 - DNA, 20 bp, synthetic construct
  source 1..20: mol_type = other DNA
agcatattttaatatattga

SEQ ID NO: 75580 - DNA, 20 bp, synthetic construct
  source 1..20: mol_type = other DNA
aagcatattttaatatattg

SEQ ID NO: 75581 - DNA, 20 bp, synthetic construct
  source 1..20: mol_type = other DNA
gaagcatattttaatatatt

SEQ ID NO: 75582 - DNA, 20 bp, synthetic construct
  source 1..20: mol_type = other DNA
tgaagcatattttaatatat

SEQ ID NO: 75583 - DNA, 20 bp, synthetic construct
  source 1..20: mol_type = other DNA
atgaagcatattttaatata

SEQ ID NO: 75584 - DNA, 20 bp, synthetic construct
  source 1..20: mol_type = other DNA
catgaagcatattttaatat

SEQ ID NO: 75585 - DNA, 20 bp, synthetic construct
  source 1..20: mol_type = other DNA
acatgaagcatattttaata

SEQ ID NO: 75586 - DNA, 20 bp, synthetic construct
  source 1..20: mol_type = other DNA
cacatgaagcatattttaat

SEQ ID NO: 75587 - DNA, 20 bp, synthetic construct
  source 1..20: mol_type = other DNA
ccacatgaagcatattttaa

SEQ ID NO: 75588 - DNA, 20 bp, synthetic construct
  source 1..20: mol_type = other DNA
cccacatgaagcatatttta

SEQ ID NO: 75589 - DNA, 20 bp, synthetic construct
  source 1..20: mol_type = other DNA
gcccacatgaagcatatttt

SEQ ID NO: 75590 - DNA, 20 bp, synthetic construct
  source 1..20: mol_type = other DNA
agcccacatgaagcatattt

SEQ ID NO: 75591 - DNA, 20 bp, synthetic construct
  source 1..20: mol_type = other DNA
cagcccacatgaagcatatt

SEQ ID NO: 75592 - DNA, 20 bp, synthetic construct
  source 1..20: mol_type = other DNA
ccagcccacatgaagcatat

SEQ ID NO: 75593 - DNA, 20 bp, synthetic construct
  source 1..20: mol_type = other DNA
cccagcccacatgaagcata

SEQ ID NO: 75594 - DNA, 20 bp, synthetic construct
  source 1..20: mol_type = other DNA
gcccagcccacatgaagcat

SEQ ID NO: 75595 - DNA, 20 bp, synthetic construct
  source 1..20: mol_type = other DNA
tgcccagcccacatgaagca

SEQ ID NO: 75596 - DNA, 20 bp, synthetic construct
  source 1..20: mol_type = other DNA
atgcccagcccacatgaagc

SEQ ID NO: 75597 - DNA, 20 bp, synthetic construct
  source 1..20: mol_type = other DNA
catgcccagcccacatgaag

SEQ ID NO: 75598 - DNA, 20 bp, synthetic construct
  source 1..20: mol_type = other DNA
ccatgcccagcccacatgaa

SEQ ID NO: 75599 - DNA, 20 bp, synthetic construct
  source 1..20: mol_type = other DNA
accatgcccagcccacatga

SEQ ID NO: 75600 - DNA, 20 bp, synthetic construct
  source 1..20: mol_type = other DNA
caccatgcccagcccacatg

SEQ ID NO: 75601 - DNA, 20 bp, synthetic construct
  source 1..20: mol_type = other DNA
ccaccatgcccagcccacat

SEQ ID NO: 75602 - DNA, 20 bp, synthetic construct
  source 1..20: mol_type = other DNA
gccaccatgcccagcccaca

SEQ ID NO: 75603 - DNA, 20 bp, synthetic construct
  source 1..20: mol_type = other DNA
agccaccatgcccagcccac

SEQ ID NO: 75604 - DNA, 20 bp, synthetic construct
  source 1..20: mol_type = other DNA
gagccaccatgcccagccca

SEQ ID NO: 75605 - DNA, 20 bp, synthetic construct
  source 1..20: mol_type = other DNA
tgagccaccatgcccagccc

SEQ ID NO: 75606 - DNA, 20 bp, synthetic construct
  source 1..20: mol_type = other DNA
atgagccaccatgcccagcc

SEQ ID NO: 75607 - DNA, 20 bp, synthetic construct
  source 1..20: mol_type = other DNA
catgagccaccatgcccagc

SEQ ID NO: 75608 - DNA, 20 bp, synthetic construct
  source 1..20: mol_type = other DNA
gcatgagccaccatgcccag

SEQ ID NO: 75609 - DNA, 20 bp, synthetic construct
  source 1..20: mol_type = other DNA
ggcatgagccaccatgccca

SEQ ID NO: 75610 - DNA, 20 bp, synthetic construct
  source 1..20: mol_type = other DNA
aggcatgagccaccatgccc

SEQ ID NO: 75611 - DNA, 20 bp, synthetic construct
  source 1..20: mol_type = other DNA
caggcatgagccaccatgcc

SEQ ID NO: 75612 - DNA, 20 bp, synthetic construct
  source 1..20: mol_type = other DNA
acaggcatgagccaccatgc

SEQ ID NO: 75613 - DNA, 20 bp, synthetic construct
  source 1..20: mol_type = other DNA
tacaggcatgagccaccatg

SEQ ID NO: 75614 - DNA, 20 bp, synthetic construct
  source 1..20: mol_type = other DNA
ttacaggcatgagccaccat

SEQ ID NO: 75615 - DNA, 20 bp, synthetic construct
  source 1..20: mol_type = other DNA
attacaggcatgagccacca

SEQ ID NO: 75616 - DNA, 20 bp, synthetic construct
  source 1..20: mol_type = other DNA
gattacaggcatgagccacc

SEQ ID NO: 75617 - DNA, 20 bp, synthetic construct
  source 1..20: mol_type = other DNA
ggattacaggcatgagccac

SEQ ID NO: 75618 - DNA, 20 bp, synthetic construct
  source 1..20: mol_type = other DNA
gggattacaggcatgagcca

SEQ ID NO: 75619 - DNA, 20 bp, synthetic construct
  source 1..20: mol_type = other DNA
tgggattacaggcatgagcc

SEQ ID NO: 75620 - DNA, 20 bp, synthetic construct
  source 1..20: mol_type = other DNA
ctgggattacaggcatgagc

SEQ ID NO: 75621 - DNA, 20 bp, synthetic construct
  source 1..20: mol_type = other DNA
gctgggattacaggcatgag

SEQ ID NO: 75622 - DNA, 20 bp, synthetic construct
  source 1..20: mol_type = other DNA
tgctgggattacaggcatga

SEQ ID NO: 75623 - DNA, 20 bp, synthetic construct
  source 1..20: mol_type = other DNA
gtgctgggattacaggcatg

SEQ ID NO: 75624 - DNA, 20 bp, synthetic construct
  source 1..20: mol_type = other DNA
agtgctgggattacaggcat

SEQ ID NO: 75625 - DNA, 20 bp, synthetic construct
  source 1..20: mol_type = other DNA
aagtgctgggattacaggca

SEQ ID NO: 75626 - DNA, 20 bp, synthetic construct
  source 1..20: mol_type = other DNA
aaagtgctgggattacaggc

SEQ ID NO: 75627 - DNA, 20 bp, synthetic construct
  source 1..20: mol_type = other DNA
caaagtgctgggattacagg

SEQ ID NO: 75628 - DNA, 20 bp, synthetic construct
  source 1..20: mol_type = other DNA
ccaaagtgctgggattacag

SEQ ID NO: 75629 - DNA, 20 bp, synthetic construct
  source 1..20: mol_type = other DNA
cccaaagtgctgggattaca

SEQ ID NO: 75630 - DNA, 20 bp, synthetic construct
  source 1..20: mol_type = other DNA
tcccaaagtgctgggattac

SEQ ID NO: 75631 - DNA, 20 bp, synthetic construct
  source 1..20: mol_type = other DNA
ctcccaaagtgctgggatta

SEQ ID NO: 75632 - DNA, 20 bp, synthetic construct
  source 1..20: mol_type = other DNA
cctcccaaagtgctgggatt

SEQ ID NO: 75633 - DNA, 20 bp, synthetic construct
  source 1..20: mol_type = other DNA
gcctcccaaagtgctgggat

SEQ ID NO: 75634 - DNA, 20 bp, synthetic construct
  source 1..20: mol_type = other DNA
ggcctcccaaagtgctggga

SEQ ID NO: 75635 - DNA, 20 bp, synthetic construct
  source 1..20: mol_type = other DNA
tggcctcccaaagtgctggg

SEQ ID NO: 75636 - DNA, 20 bp, synthetic construct
  source 1..20: mol_type = other DNA
ttggcctcccaaagtgctgg

SEQ ID NO: 75637 - DNA, 20 bp, synthetic construct
  source 1..20: mol_type = other DNA
cttggcctcccaaagtgctg

SEQ ID NO: 75638 - DNA, 20 bp, synthetic construct
  source 1..20: mol_type = other DNA
ccttggcctcccaaagtgct

SEQ ID NO: 75639 - DNA, 20 bp, synthetic construct
  source 1..20: mol_type = other DNA
accttggcctcccaaagtgc

SEQ ID NO: 75640 - DNA, 20 bp, synthetic construct
  source 1..20: mol_type = other DNA
caccttggcctcccaaagtg

SEQ ID NO: 75641 - DNA, 20 bp, synthetic construct
  source 1..20: mol_type = other DNA
ccaccttggcctcccaaagt

SEQ ID NO: 75642 - DNA, 20 bp, synthetic construct
  source 1..20: mol_type = other DNA
cccaccttggcctcccaaag

SEQ ID NO: 75643 - DNA, 20 bp, synthetic construct
  source 1..20: mol_type = other DNA
ccccaccttggcctcccaaa

SEQ ID NO: 75644 - DNA, 20 bp, synthetic construct
  source 1..20: mol_type = other DNA
cccccaccttggcctcccaa

SEQ ID NO: 75645 - DNA, 20 bp, synthetic construct
  source 1..20: mol_type = other DNA
acccccaccttggcctccca

SEQ ID NO: 75646 - DNA, 20 bp, synthetic construct
  source 1..20: mol_type = other DNA
tacccccaccttggcctccc

SEQ ID NO: 75647 - DNA, 20 bp, synthetic construct
  source 1..20: mol_type = other DNA
atacccccaccttggcctcc

SEQ ID NO: 75648 - DNA, 20 bp, synthetic construct
  source 1..20: mol_type = other DNA
gatacccccaccttggcctc

SEQ ID NO: 75649 - DNA, 20 bp, synthetic construct
  source 1..20: mol_type = other DNA
tgatacccccaccttggcct

SEQ ID NO: 75650 - DNA, 20 bp, synthetic construct
  source 1..20: mol_type = other DNA
gtgatacccccaccttggcc

SEQ ID NO: 75651 - DNA, 20 bp, synthetic construct
  source 1..20: mol_type = other DNA
agtgatacccccaccttggc

SEQ ID NO: 75652 - DNA, 20 bp, synthetic construct
  source 1..20: mol_type = other DNA
tagtgatacccccaccttgg

SEQ ID NO: 75653 - DNA, 20 bp, synthetic construct
  source 1..20: mol_type = other DNA
ctagtgatacccccaccttg

SEQ ID NO: 75654 - DNA, 20 bp, synthetic construct
  source 1..20: mol_type = other DNA
cctagtgatacccccacctt

SEQ ID NO: 75655 - DNA, 20 bp, synthetic construct
  source 1..20: mol_type = other DNA
acctagtgatacccccacct

SEQ ID NO: 75656 - DNA, 20 bp, synthetic construct
  source 1..20: mol_type = other DNA
gacctagtgatacccccacc

SEQ ID NO: 75657 - DNA, 20 bp, synthetic construct
  source 1..20: mol_type = other DNA
tgacctagtgatacccccac

SEQ ID NO: 75658 - DNA, 20 bp, synthetic construct
  source 1..20: mol_type = other DNA
ctgacctagtgataccccca

SEQ ID NO: 75659 - DNA, 20 bp, synthetic construct
  source 1..20: mol_type = other DNA
cctgacctagtgataccccc

SEQ ID NO: 75660 - DNA, 20 bp, synthetic construct
  source 1..20: mol_type = other DNA
tcctgacctagtgatacccc

SEQ ID NO: 75661 - DNA, 20 bp, synthetic construct
  source 1..20: mol_type = other DNA
ctcctgacctagtgataccc

SEQ ID NO: 75662 - DNA, 20 bp, synthetic construct
  source 1..20: mol_type = other DNA
tctcctgacctagtgatacc

SEQ ID NO: 75663 - DNA, 20 bp, synthetic construct
  source 1..20: mol_type = other DNA
atctcctgacctagtgatac

SEQ ID NO: 75664 - DNA, 20 bp, synthetic construct
  source 1..20: mol_type = other DNA
gatctcctgacctagtgata

SEQ ID NO: 75665 - DNA, 20 bp, synthetic construct
  source 1..20: mol_type = other DNA
tgatctcctgacctagtgat

SEQ ID NO: 75666 - DNA, 20 bp, synthetic construct
  source 1..20: mol_type = other DNA
ttgatctcctgacctagtga

SEQ ID NO: 75667 - DNA, 20 bp, synthetic construct
  source 1..20: mol_type = other DNA
cttgatctcctgacctagtg

SEQ ID NO: 75668 - DNA, 20 bp, synthetic construct
  source 1..20: mol_type = other DNA
tcttgatctcctgacctagt

SEQ ID NO: 75669 - DNA, 20 bp, synthetic construct
  source 1..20: mol_type = other DNA
gtcttgatctcctgacctag

SEQ ID NO: 75670 - DNA, 20 bp, synthetic construct
  source 1..20: mol_type = other DNA
ggtcttgatctcctgaccta

SEQ ID NO: 75671 - DNA, 20 bp, synthetic construct
  source 1..20: mol_type = other DNA
tggtcttgatctcctgacct

SEQ ID NO: 75672 - DNA, 20 bp, synthetic construct
  source 1..20: mol_type = other DNA
ctggtcttgatctcctgacc

SEQ ID NO: 75673 - DNA, 20 bp, synthetic construct
  source 1..20: mol_type = other DNA
gctggtcttgatctcctgac

SEQ ID NO: 75674 - DNA, 20 bp, synthetic construct
  source 1..20: mol_type = other DNA
ggctggtcttgatctcctga

SEQ ID NO: 75675 - DNA, 20 bp, synthetic construct
  source 1..20: mol_type = other DNA
aggctggtcttgatctcctg

SEQ ID NO: 75676 - DNA, 20 bp, synthetic construct
  source 1..20: mol_type = other DNA
caggctggtcttgatctcct

SEQ ID NO: 75677 - DNA, 20 bp, synthetic construct
  source 1..20: mol_type = other DNA
ccaggctggtcttgatctcc

SEQ ID NO: 75678 - DNA, 20 bp, synthetic construct
  source 1..20: mol_type = other DNA
gccaggctggtcttgatctc

SEQ ID NO: 75679 - DNA, 20 bp, synthetic construct
  source 1..20: mol_type = other DNA
agccaggctggtcttgatct

SEQ ID NO: 75680 - DNA, 20 bp, synthetic construct
  source 1..20: mol_type = other DNA
tagccaggctggtcttgatc

SEQ ID NO: 75681 - DNA, 20 bp, synthetic construct
  source 1..20: mol_type = other DNA
ttagccaggctggtcttgat

SEQ ID NO: 75682 - DNA, 20 bp, synthetic construct
  source 1..20: mol_type = other DNA
gttagccaggctggtcttga

SEQ ID NO: 75683 - DNA, 20 bp, synthetic construct
  source 1..20: mol_type = other DNA
tgttagccaggctggtcttg

SEQ ID NO: 75684 - DNA, 20 bp, synthetic construct
  source 1..20: mol_type = other DNA
gtgttagccaggctggtctt

SEQ ID NO: 75685 - DNA, 20 bp, synthetic construct
  source 1..20: mol_type = other DNA
cgtgttagccaggctggtct

SEQ ID NO: 75686 - DNA, 20 bp, synthetic construct
  source 1..20: mol_type = other DNA
ccgtgttagccaggctggtc

SEQ ID NO: 75687 - DNA, 20 bp, synthetic construct
  source 1..20: mol_type = other DNA
accgtgttagccaggctggt

SEQ ID NO: 75688 - DNA, 20 bp, synthetic construct
  source 1..20: mol_type = other DNA
caccgtgttagccaggctgg

SEQ ID NO: 75689 - DNA, 20 bp, synthetic construct
  source 1..20: mol_type = other DNA
tcaccgtgttagccaggctg

SEQ ID NO: 75690 - DNA, 20 bp, synthetic construct
  source 1..20: mol_type = other DNA
ttcaccgtgttagccaggct

SEQ ID NO: 75691 - DNA, 20 bp, synthetic construct
  source 1..20: mol_type = other DNA
tttcaccgtgttagccaggc

SEQ ID NO: 75692 - DNA, 20 bp, synthetic construct
  source 1..20: mol_type = other DNA
gtttcaccgtgttagccagg

SEQ ID NO: 75693 - DNA, 20 bp, synthetic construct
  source 1..20: mol_type = other DNA
ggtttcaccgtgttagccag

SEQ ID NO: 75694 - DNA, 20 bp, synthetic construct
  source 1..20: mol_type = other DNA
gggtttcaccgtgttagcca

SEQ ID NO: 75695 - DNA, 20 bp, synthetic construct
  source 1..20: mol_type = other DNA
ggggtttcaccgtgttagcc

SEQ ID NO: 75696 - DNA, 20 bp, synthetic construct
  source 1..20: mol_type = other DNA
cggggtttcaccgtgttagc

SEQ ID NO: 75697 - DNA, 20 bp, synthetic construct
  source 1..20: mol_type = other DNA
acggggtttcaccgtgttag

SEQ ID NO: 75698 - DNA, 20 bp, synthetic construct
  source 1..20: mol_type = other DNA
gacggggtttcaccgtgtta

SEQ ID NO: 75699 - DNA, 20 bp, synthetic construct
  source 1..20: mol_type = other DNA
agacggggtttcaccgtgtt

SEQ ID NO: 75700 - DNA, 20 bp, synthetic construct
  source 1..20: mol_type = other DNA
tagacggggtttcaccgtgt

SEQ ID NO: 75701 - DNA, 20 bp, synthetic construct
  source 1..20: mol_type = other DNA
gtagacggggtttcaccgtg

SEQ ID NO: 75702 - DNA, 20 bp, synthetic construct
  source 1..20: mol_type = other DNA
agtagacggggtttcaccgt

SEQ ID NO: 75703 - DNA, 20 bp, synthetic construct
  source 1..20: mol_type = other DNA
tagtagacggggtttcaccg

SEQ ID NO: 75704 - DNA, 20 bp, synthetic construct
  source 1..20: mol_type = other DNA
ttagtagacggggtttcacc

SEQ ID NO: 75705 - DNA, 20 bp, synthetic construct
  source 1..20: mol_type = other DNA
tttagtagacggggtttcac

SEQ ID NO: 75706 - DNA, 20 bp, synthetic construct
  source 1..20: mol_type = other DNA
ttttagtagacggggtttca

SEQ ID NO: 75707 - DNA, 20 bp, synthetic construct
  source 1..20: mol_type = other DNA
tttttagtagacggggtttc

SEQ ID NO: 75708 - DNA, 20 bp, synthetic construct
  source 1..20: mol_type = other DNA
atttttagtagacggggttt

SEQ ID NO: 75709 - DNA, 20 bp, synthetic construct
  source 1..20: mol_type = other DNA
tatttttagtagacggggtt

SEQ ID NO: 75710 - DNA, 20 bp, synthetic construct
  source 1..20: mol_type = other DNA
gtatttttagtagacggggt

SEQ ID NO: 75711 - DNA, 20 bp, synthetic construct
  source 1..20: mol_type = other DNA
tgtatttttagtagacgggg

SEQ ID NO: 75712 - DNA, 20 bp, synthetic construct
  source 1..20: mol_type = other DNA
ttgtatttttagtagacggg

SEQ ID NO: 75713 - DNA, 20 bp, synthetic construct
  source 1..20: mol_type = other DNA
tttgtatttttagtagacgg

SEQ ID NO: 75714 - DNA, 20 bp, synthetic construct
  source 1..20: mol_type = other DNA
ttttgtatttttagtagacg

SEQ ID NO: 75715 - DNA, 20 bp, synthetic construct
  source 1..20: mol_type = other DNA
tttttgtatttttagtagac

SEQ ID NO: 75716 - DNA, 20 bp, synthetic construct
  source 1..20: mol_type = other DNA
ttttttgtatttttagtaga

SEQ ID NO: 75717 - DNA, 20 bp, synthetic construct
  source 1..20: mol_type = other DNA
attttttgtatttttagtag

SEQ ID NO: 75718 - DNA, 20 bp, synthetic construct
  source 1..20: mol_type = other DNA
aattttttgtatttttagta

SEQ ID NO: 75719 - DNA, 20 bp, synthetic construct
  source 1..20: mol_type = other DNA
taattttttgtatttttagt

SEQ ID NO: 75720 - DNA, 20 bp, synthetic construct
  source 1..20: mol_type = other DNA
ataattttttgtatttttag

SEQ ID NO: 75721 - DNA, 20 bp, synthetic construct
  source 1..20: mol_type = other DNA
gataattttttgtattttta

SEQ ID NO: 75722 - DNA, 20 bp, synthetic construct
  source 1..20: mol_type = other DNA
ggataattttttgtattttt

SEQ ID NO: 75723 - DNA, 20 bp, synthetic construct
  source 1..20: mol_type = other DNA
cggataattttttgtatttt

SEQ ID NO: 75724 - DNA, 20 bp, synthetic construct
  source 1..20: mol_type = other DNA
ccggataattttttgtattt

SEQ ID NO: 75725 - DNA, 20 bp, synthetic construct
  source 1..20: mol_type = other DNA
cccggataattttttgtatt

SEQ ID NO: 75726 - DNA, 20 bp, synthetic construct
  source 1..20: mol_type = other DNA
gcccggataattttttgtat

SEQ ID NO: 75727 - DNA, 20 bp, synthetic construct
  source 1..20: mol_type = other DNA
cgcccggataattttttgta

SEQ ID NO: 75728 - DNA, 20 bp, synthetic construct
  source 1..20: mol_type = other DNA
acgcccggataattttttgt

SEQ ID NO: 75729 - DNA, 20 bp, synthetic construct
  source 1..20: mol_type = other DNA
cacgcccggataattttttg

SEQ ID NO: 75730 - DNA, 20 bp, synthetic construct
  source 1..20: mol_type = other DNA
ccacgcccggataatttttt

SEQ ID NO: 75731 - DNA, 20 bp, synthetic construct
  source 1..20: mol_type = other DNA
accacgcccggataattttt

SEQ ID NO: 75732 - DNA, 20 bp, synthetic construct
  source 1..20: mol_type = other DNA
caccacgcccggataatttt

SEQ ID NO: 75733 - DNA, 20 bp, synthetic construct
  source 1..20: mol_type = other DNA
ccaccacgcccggataattt

SEQ ID NO: 75734 - DNA, 20 bp, synthetic construct
  source 1..20: mol_type = other DNA
accaccacgcccggataatt

SEQ ID NO: 75735 - DNA, 20 bp, synthetic construct
  source 1..20: mol_type = other DNA
taccaccacgcccggataat

SEQ ID NO: 75736 - DNA, 20 bp, synthetic construct
  source 1..20: mol_type = other DNA
gtaccaccacgcccggataa

SEQ ID NO: 75737 - DNA, 20 bp, synthetic construct
  source 1..20: mol_type = other DNA
tgtaccaccacgcccggata

SEQ ID NO: 75738 - DNA, 20 bp, synthetic construct
  source 1..20: mol_type = other DNA
gtgtaccaccacgcccggat

SEQ ID NO: 75739 - DNA, 20 bp, synthetic construct
  source 1..20: mol_type = other DNA
tgtgtaccaccacgcccgga

SEQ ID NO: 75740 - DNA, 20 bp, synthetic construct
  source 1..20: mol_type = other DNA
gtgtgtaccaccacgcccgg

SEQ ID NO: 75741 - DNA, 20 bp, synthetic construct
  source 1..20: mol_type = other DNA
ggtgtgtaccaccacgcccg

SEQ ID NO: 75742 - DNA, 20 bp, synthetic construct
  source 1..20: mol_type = other DNA
aggtgtgtaccaccacgccc

SEQ ID NO: 75743 - DNA, 20 bp, synthetic construct
  source 1..20: mol_type = other DNA
caggtgtgtaccaccacgcc

SEQ ID NO: 75744 - DNA, 20 bp, synthetic construct
  source 1..20: mol_type = other DNA
acaggtgtgtaccaccacgc

SEQ ID NO: 75745 - DNA, 20 bp, synthetic construct
  source 1..20: mol_type = other DNA
tacaggtgtgtaccaccacg

SEQ ID NO: 75746 - DNA, 20 bp, synthetic construct
  source 1..20: mol_type = other DNA
ctacaggtgtgtaccaccac

SEQ ID NO: 75747 - DNA, 20 bp, synthetic construct
  source 1..20: mol_type = other DNA
actacaggtgtgtaccacca

SEQ ID NO: 75748 - DNA, 20 bp, synthetic construct
  source 1..20: mol_type = other DNA
gactacaggtgtgtaccacc

SEQ ID NO: 75749 - DNA, 20 bp, synthetic construct
  source 1..20: mol_type = other DNA
ggactacaggtgtgtaccac

SEQ ID NO: 75750 - DNA, 20 bp, synthetic construct
  source 1..20: mol_type = other DNA
gggactacaggtgtgtacca

SEQ ID NO: 75751 - DNA, 20 bp, synthetic construct
  source 1..20: mol_type = other DNA
tgggactacaggtgtgtacc

SEQ ID NO: 75752 - DNA, 20 bp, synthetic construct
  source 1..20: mol_type = other DNA
ctgggactacaggtgtgtac

SEQ ID NO: 75753 - DNA, 20 bp, synthetic construct
  source 1..20: mol_type = other DNA
gctgggactacaggtgtgta

SEQ ID NO: 75754 - DNA, 20 bp, synthetic construct
  source 1..20: mol_type = other DNA
agctgggactacaggtgtgt

SEQ ID NO: 75755 - DNA, 20 bp, synthetic construct
  source 1..20: mol_type = other DNA
tagctgggactacaggtgtg

SEQ ID NO: 75756 - DNA, 20 bp, synthetic construct
  source 1..20: mol_type = other DNA
gtagctgggactacaggtgt

SEQ ID NO: 75757 - DNA, 20 bp, synthetic construct
  source 1..20: mol_type = other DNA
agtagctgggactacaggtg

SEQ ID NO: 75758 - DNA, 20 bp, synthetic construct
  source 1..20: mol_type = other DNA
gagtagctgggactacaggt

SEQ ID NO: 75759 - DNA, 20 bp, synthetic construct
  source 1..20: mol_type = other DNA
cgagtagctgggactacagg

SEQ ID NO: 75760 - DNA, 20 bp, synthetic construct
  source 1..20: mol_type = other DNA
ccgagtagctgggactacag

SEQ ID NO: 75761 - DNA, 20 bp, synthetic construct
  source 1..20: mol_type = other DNA
cccgagtagctgggactaca

SEQ ID NO: 75762 - DNA, 20 bp, synthetic construct
  source 1..20: mol_type = other DNA
tcccgagtagctgggactac

SEQ ID NO: 75763 - DNA, 20 bp, synthetic construct
  source 1..20: mol_type = other DNA
ctcccgagtagctgggacta

SEQ ID NO: 75764 - DNA, 20 bp, synthetic construct
  source 1..20: mol_type = other DNA
tctcccgagtagctgggact

SEQ ID NO: 75765 - DNA, 20 bp, synthetic construct
  source 1..20: mol_type = other DNA
gtctcccgagtagctgggac

SEQ ID NO: 75766 - DNA, 20 bp, synthetic construct
  source 1..20: mol_type = other DNA
agtctcccgagtagctggga

SEQ ID NO: 75767 - DNA, 20 bp, synthetic construct
  source 1..20: mol_type = other DNA
cagtctcccgagtagctggg

SEQ ID NO: 75768 - DNA, 20 bp, synthetic construct
  source 1..20: mol_type = other DNA
tcagtctcccgagtagctgg

SEQ ID NO: 75769 - DNA, 20 bp, synthetic construct
  source 1..20: mol_type = other DNA
ctcagtctcccgagtagctg

SEQ ID NO: 75770 - DNA, 20 bp, synthetic construct
  source 1..20: mol_type = other DNA
cctcagtctcccgagtagct

SEQ ID NO: 75771 - DNA, 20 bp, synthetic construct
  source 1..20: mol_type = other DNA
gcctcagtctcccgagtagc

SEQ ID NO: 75772 - DNA, 20 bp, synthetic construct
  source 1..20: mol_type = other DNA
tgcctcagtctcccgagtag

SEQ ID NO: 75773 - DNA, 20 bp, synthetic construct
  source 1..20: mol_type = other DNA
ctgcctcagtctcccgagta

SEQ ID NO: 75774 - DNA, 20 bp, synthetic construct
  source 1..20: mol_type = other DNA
cctgcctcagtctcccgagt

SEQ ID NO: 75775 - DNA, 20 bp, synthetic construct
  source 1..20: mol_type = other DNA
tcctgcctcagtctcccgag

SEQ ID NO: 75776 - DNA, 20 bp, synthetic construct
  source 1..20: mol_type = other DNA
ctcctgcctcagtctcccga

SEQ ID NO: 75777 - DNA, 20 bp, synthetic construct
  source 1..20: mol_type = other DNA
tctcctgcctcagtctcccg

SEQ ID NO: 75778 - DNA, 20 bp, synthetic construct
  source 1..20: mol_type = other DNA
ttctcctgcctcagtctccc

SEQ ID NO: 75779 - DNA, 20 bp, synthetic construct
  source 1..20: mol_type = other DNA
attctcctgcctcagtctcc

SEQ ID NO: 75780 - DNA, 20 bp, synthetic construct
  source 1..20: mol_type = other DNA
gattctcctgcctcagtctc

SEQ ID NO: 75781 - DNA, 20 bp, synthetic construct
  source 1..20: mol_type = other DNA
cgattctcctgcctcagtct

SEQ ID NO: 75782 - DNA, 20 bp, synthetic construct
  source 1..20: mol_type = other DNA
gcgattctcctgcctcagtc

SEQ ID NO: 75783 - DNA, 20 bp, synthetic construct
  source 1..20: mol_type = other DNA
agcgattctcctgcctcagt

SEQ ID NO: 75784 - DNA, 20 bp, synthetic construct
  source 1..20: mol_type = other DNA
aagcgattctcctgcctcag

SEQ ID NO: 75785 - DNA, 20 bp, synthetic construct
  source 1..20: mol_type = other DNA
caagcgattctcctgcctca

SEQ ID NO: 75786 - DNA, 20 bp, synthetic construct
  source 1..20: mol_type = other DNA
tcaagcgattctcctgcctc

SEQ ID NO: 75787 - DNA, 20 bp, synthetic construct
  source 1..20: mol_type = other DNA
ttcaagcgattctcctgcct

SEQ ID NO: 75788 - DNA, 20 bp, synthetic construct
  source 1..20: mol_type = other DNA
gttcaagcgattctcctgcc

SEQ ID NO: 75789 - DNA, 20 bp, synthetic construct
  source 1..20: mol_type = other DNA
ggttcaagcgattctcctgc

SEQ ID NO: 75790 - DNA, 20 bp, synthetic construct
  source 1..20: mol_type = other DNA
gggttcaagcgattctcctg

SEQ ID NO: 75791 - DNA, 20 bp, synthetic construct
  source 1..20: mol_type = other DNA
cgggttcaagcgattctcct

SEQ ID NO: 75792 - DNA, 20 bp, synthetic construct
  source 1..20: mol_type = other DNA
ccgggttcaagcgattctcc

SEQ ID NO: 75793 - DNA, 20 bp, synthetic construct
  source 1..20: mol_type = other DNA
cccgggttcaagcgattctc

SEQ ID NO: 75794 - DNA, 20 bp, synthetic construct
  source 1..20: mol_type = other DNA
tcccgggttcaagcgattct

SEQ ID NO: 75795 - DNA, 20 bp, synthetic construct
  source 1..20: mol_type = other DNA
ctcccgggttcaagcgattc

SEQ ID NO: 75796 - DNA, 20 bp, synthetic construct
  source 1..20: mol_type = other DNA
cctcccgggttcaagcgatt

SEQ ID NO: 75797 - DNA, 20 bp, synthetic construct
  source 1..20: mol_type = other DNA
gcctcccgggttcaagcgat

SEQ ID NO: 75798 - DNA, 20 bp, synthetic construct
  source 1..20: mol_type = other DNA
tgcctcccgggttcaagcga

SEQ ID NO: 75799 - DNA, 20 bp, synthetic construct
  source 1..20: mol_type = other DNA
ctgcctcccgggttcaagcg

SEQ ID NO: 75800 - DNA, 20 bp, synthetic construct
  source 1..20: mol_type = other DNA
tctgcctcccgggttcaagc

SEQ ID NO: 75801 - DNA, 20 bp, synthetic construct
  source 1..20: mol_type = other DNA
ctctgcctcccgggttcaag

SEQ ID NO: 75802 - DNA, 20 bp, synthetic construct
  source 1..20: mol_type = other DNA
cctctgcctcccgggttcaa

SEQ ID NO: 75803 - DNA, 20 bp, synthetic construct
  source 1..20: mol_type = other DNA
acctctgcctcccgggttca

SEQ ID NO: 75804 - DNA, 20 bp, synthetic construct
  source 1..20: mol_type = other DNA
aacctctgcctcccgggttc

SEQ ID NO: 75805 - DNA, 20 bp, synthetic construct
  source 1..20: mol_type = other DNA
caacctctgcctcccgggtt

SEQ ID NO: 75806 - DNA, 20 bp, synthetic construct
  source 1..20: mol_type = other DNA
gcaacctctgcctcccgggt

SEQ ID NO: 75807 - DNA, 20 bp, synthetic construct
  source 1..20: mol_type = other DNA
tgcaacctctgcctcccggg

SEQ ID NO: 75808 - DNA, 20 bp, synthetic construct
  source 1..20: mol_type = other DNA
ctgcaacctctgcctcccgg

SEQ ID NO: 75809 - DNA, 20 bp, synthetic construct
  source 1..20: mol_type = other DNA
actgcaacctctgcctcccg

SEQ ID NO: 75810 - DNA, 20 bp, synthetic construct
  source 1..20: mol_type = other DNA
cactgcaacctctgcctccc

SEQ ID NO: 75811 - DNA, 20 bp, synthetic construct
  source 1..20: mol_type = other DNA
tcactgcaacctctgcctcc

SEQ ID NO: 75812 - DNA, 20 bp, synthetic construct
  source 1..20: mol_type = other DNA
ctcactgcaacctctgcctc

SEQ ID NO: 75813 - DNA, 20 bp, synthetic construct
  source 1..20: mol_type = other DNA
gctcactgcaacctctgcct

SEQ ID NO: 75814 - DNA, 20 bp, synthetic construct
  source 1..20: mol_type = other DNA
ggctcactgcaacctctgcc

SEQ ID NO: 75815 - DNA, 20 bp, synthetic construct
  source 1..20: mol_type = other DNA
cggctcactgcaacctctgc

SEQ ID NO: 75816 - DNA, 20 bp, synthetic construct
  source 1..20: mol_type = other DNA
tcggctcactgcaacctctg

SEQ ID NO: 75817 - DNA, 20 bp, synthetic construct
  source 1..20: mol_type = other DNA
ctcggctcactgcaacctct

SEQ ID NO: 75818 - DNA, 20 bp, synthetic construct
  source 1..20: mol_type = other DNA
tctcggctcactgcaacctc

SEQ ID NO: 75819 - DNA, 20 bp, synthetic construct
  source 1..20: mol_type = other DNA
atctcggctcactgcaacct

SEQ ID NO: 75820 - DNA, 20 bp, synthetic construct
  source 1..20: mol_type = other DNA
gatctcggctcactgcaacc

SEQ ID NO: 75821 - DNA, 20 bp, synthetic construct
  source 1..20: mol_type = other DNA
tgatctcggctcactgcaac

SEQ ID NO: 75822 - DNA, 20 bp, synthetic construct
  source 1..20: mol_type = other DNA
gtgatctcggctcactgcaa

SEQ ID NO: 75823 - DNA, 20 bp, synthetic construct
  source 1..20: mol_type = other DNA
cgtgatctcggctcactgca

SEQ ID NO: 75824 - DNA, 20 bp, synthetic construct
  source 1..20: mol_type = other DNA
gcgtgatctcggctcactgc

SEQ ID NO: 75825 - DNA, 20 bp, synthetic construct
  source 1..20: mol_type = other DNA
ggcgtgatctcggctcactg

SEQ ID NO: 75826 - DNA, 20 bp, synthetic construct
  source 1..20: mol_type = other DNA
tggcgtgatctcggctcact

SEQ ID NO: 75827 - DNA, 20 bp, synthetic construct
  source 1..20: mol_type = other DNA
gtggcgtgatctcggctcac

SEQ ID NO: 75828 - DNA, 20 bp, synthetic construct
  source 1..20: mol_type = other DNA
agtggcgtgatctcggctca

SEQ ID NO: 75829 - DNA, 20 bp, synthetic construct
  source 1..20: mol_type = other DNA
cagtggcgtgatctcggctc

SEQ ID NO: 75830 - DNA, 20 bp, synthetic construct
  source 1..20: mol_type = other DNA
gcagtggcgtgatctcggct

SEQ ID NO: 75831 - DNA, 20 bp, synthetic construct
  source 1..20: mol_type = other DNA
tgcagtggcgtgatctcggc

SEQ ID NO: 75832 - DNA, 20 bp, synthetic construct
  source 1..20: mol_type = other DNA
atgcagtggcgtgatctcgg

SEQ ID NO: 75833 - DNA, 20 bp, synthetic construct
  source 1..20: mol_type = other DNA
aatgcagtggcgtgatctcg

SEQ ID NO: 75834 - DNA, 20 bp, synthetic construct
  source 1..20: mol_type = other DNA
gaatgcagtggcgtgatctc

SEQ ID NO: 75835 - DNA, 20 bp, synthetic construct
  source 1..20: mol_type = other DNA
ggaatgcagtggcgtgatct

SEQ ID NO: 75836 - DNA, 20 bp, synthetic construct
  source 1..20: mol_type = other DNA
tggaatgcagtggcgtgatc

SEQ ID NO: 75837 - DNA, 20 bp, synthetic construct
  source 1..20: mol_type = other DNA
ctggaatgcagtggcgtgat

SEQ ID NO: 75838 - DNA, 20 bp, synthetic construct
  source 1..20: mol_type = other DNA
gctggaatgcagtggcgtga

SEQ ID NO: 75839 - DNA, 20 bp, synthetic construct
  source 1..20: mol_type = other DNA
ggctggaatgcagtggcgtg

SEQ ID NO: 75840 - DNA, 20 bp, synthetic construct
  source 1..20: mol_type = other DNA
aggctggaatgcagtggcgt

SEQ ID NO: 75841 - DNA, 20 bp, synthetic construct
  source 1..20: mol_type = other DNA
caggctggaatgcagtggcg

SEQ ID NO: 75842 - DNA, 20 bp, synthetic construct
  source 1..20: mol_type = other DNA
ccaggctggaatgcagtggc

SEQ ID NO: 75843 - DNA, 20 bp, synthetic construct
  source 1..20: mol_type = other DNA
cccaggctggaatgcagtgg

SEQ ID NO: 75844 - DNA, 20 bp, synthetic construct
  source 1..20: mol_type = other DNA
gcccaggctggaatgcagtg

SEQ ID NO: 75845 - DNA, 20 bp, synthetic construct
  source 1..20: mol_type = other DNA
tgcccaggctggaatgcagt

SEQ ID NO: 75846 - DNA, 20 bp, synthetic construct
  source 1..20: mol_type = other DNA
ttgcccaggctggaatgcag

SEQ ID NO: 75847 - DNA, 20 bp, synthetic construct
  source 1..20: mol_type = other DNA
gttgcccaggctggaatgca

SEQ ID NO: 75848 - DNA, 20 bp, synthetic construct
  source 1..20: mol_type = other DNA
tgttgcccaggctggaatgc

SEQ ID NO: 75849 - DNA, 20 bp, synthetic construct
  source 1..20: mol_type = other DNA
ctgttgcccaggctggaatg

SEQ ID NO: 75850 - DNA, 20 bp, synthetic construct
  source 1..20: mol_type = other DNA
tctgttgcccaggctggaat

SEQ ID NO: 75851 - DNA, 20 bp, synthetic construct
  source 1..20: mol_type = other DNA
ttctgttgcccaggctggaa

SEQ ID NO: 75852 - DNA, 20 bp, synthetic construct
  source 1..20: mol_type = other DNA
gttctgttgcccaggctgga

SEQ ID NO: 75853 - DNA, 20 bp, synthetic construct
  source 1..20: mol_type = other DNA
cgttctgttgcccaggctgg

SEQ ID NO: 75854 - DNA, 20 bp, synthetic construct
  source 1..20: mol_type = other DNA
tcgttctgttgcccaggctg

SEQ ID NO: 75855 - DNA, 20 bp, synthetic construct
  source 1..20: mol_type = other DNA
ctcgttctgttgcccaggct

SEQ ID NO: 75856 - DNA, 20 bp, synthetic construct
  source 1..20: mol_type = other DNA
tctcgttctgttgcccaggc

SEQ ID NO: 75857 - DNA, 20 bp, synthetic construct
  source 1..20: mol_type = other DNA
gtctcgttctgttgcccagg

SEQ ID NO: 75858 - DNA, 20 bp, synthetic construct
  source 1..20: mol_type = other DNA
agtctcgttctgttgcccag

SEQ ID NO: 75859 - DNA, 20 bp, synthetic construct
  source 1..20: mol_type = other DNA
gagtctcgttctgttgccca

SEQ ID NO: 75860 - DNA, 20 bp, synthetic construct
  source 1..20: mol_type = other DNA
agagtctcgttctgttgccc

SEQ ID NO: 75861 - DNA, 20 bp, synthetic construct
  source 1..20: mol_type = other DNA
tagagtctcgttctgttgcc

SEQ ID NO: 75862 - DNA, 20 bp, synthetic construct
  source 1..20: mol_type = other DNA
atagagtctcgttctgttgc

SEQ ID NO: 75863 - DNA, 20 bp, synthetic construct
  source 1..20: mol_type = other DNA
gatagagtctcgttctgttg

SEQ ID NO: 75864 - DNA, 20 bp, synthetic construct
  source 1..20: mol_type = other DNA
agatagagtctcgttctgtt

SEQ ID NO: 75865 - DNA, 20 bp, synthetic construct
  source 1..20: mol_type = other DNA
gagatagagtctcgttctgt

SEQ ID NO: 75866 - DNA, 20 bp, synthetic construct
  source 1..20: mol_type = other DNA
tgagatagagtctcgttctg

SEQ ID NO: 75867 - DNA, 20 bp, synthetic construct
  source 1..20: mol_type = other DNA
ttgagatagagtctcgttct

SEQ ID NO: 75868 - DNA, 20 bp, synthetic construct
  source 1..20: mol_type = other DNA
tttgagatagagtctcgttc

SEQ ID NO: 75869 - DNA, 20 bp, synthetic construct
  source 1..20: mol_type = other DNA
ttttgagatagagtctcgtt

SEQ ID NO: 75870 - DNA, 20 bp, synthetic construct
  source 1..20: mol_type = other DNA
tttttgagatagagtctcgt

SEQ ID NO: 75871 - DNA, 20 bp, synthetic construct
  source 1..20: mol_type = other DNA
ttttttgagatagagtctcg

SEQ ID NO: 75872 - DNA, 20 bp, synthetic construct
  source 1..20: mol_type = other DNA
tttttttgagatagagtctc

SEQ ID NO: 75873 - DNA, 20 bp, synthetic construct
  source 1..20: mol_type = other DNA
ttttttttgagatagagtct

SEQ ID NO: 75874 - DNA, 20 bp, synthetic construct
  source 1..20: mol_type = other DNA
tttttttttgagatagagtc

SEQ ID NO: 75875 - DNA, 20 bp, synthetic construct
  source 1..20: mol_type = other DNA
ttttttttttgagatagagt

SEQ ID NO: 75876 - DNA, 20 bp, synthetic construct
  source 1..20: mol_type = other DNA
tttttttttttgagatagag

SEQ ID NO: 75877 - DNA, 20 bp, synthetic construct
  source 1..20: mol_type = other DNA
ttttttttttttgagataga

SEQ ID NO: 75878 - DNA, 20 bp, synthetic construct
  source 1..20: mol_type = other DNA
tttttttttttttgagatag

SEQ ID NO: 75879 - DNA, 20 bp, synthetic construct
  source 1..20: mol_type = other DNA
ttttttttttttttgagata

SEQ ID NO: 75880 - DNA, 20 bp, synthetic construct
  source 1..20: mol_type = other DNA
tttttttttttttttgagat

SEQ ID NO: 75881 - DNA, 20 bp, synthetic construct
  source 1..20: mol_type = other DNA
ttttttttttttttttgaga

SEQ ID NO: 75882 - DNA, 20 bp, synthetic construct
  source 1..20: mol_type = other DNA
attttttttttttttttgag

SEQ ID NO: 75883 - DNA, 20 bp, synthetic construct
  source 1..20: mol_type = other DNA
cattttttttttttttttga

SEQ ID NO: 75884 - DNA, 20 bp, synthetic construct
  source 1..20: mol_type = other DNA
gcattttttttttttttttg

SEQ ID NO: 75885 - DNA, 20 bp, synthetic construct
  source 1..20: mol_type = other DNA
agcatttttttttttttttt

SEQ ID NO: 75886 - DNA, 20 bp, synthetic construct
  source 1..20: mol_type = other DNA
aagcattttttttttttttt

SEQ ID NO: 75887 - DNA, 20 bp, synthetic construct
  source 1..20: mol_type = other DNA
gaagcatttttttttttttt

SEQ ID NO: 75888 - DNA, 20 bp, synthetic construct
  source 1..20: mol_type = other DNA
cgaagcattttttttttttt

SEQ ID NO: 75889 - DNA, 20 bp, synthetic construct
  source 1..20: mol_type = other DNA
acgaagcatttttttttttt

SEQ ID NO: 75890 - DNA, 20 bp, synthetic construct
  source 1..20: mol_type = other DNA
cacgaagcattttttttttt

SEQ ID NO: 75891 - DNA, 20 bp, synthetic construct
  source 1..20: mol_type = other DNA
acacgaagcatttttttttt

SEQ ID NO: 75892 - DNA, 20 bp, synthetic construct
  source 1..20: mol_type = other DNA
cacacgaagcattttttttt

SEQ ID NO: 75893 - DNA, 20 bp, synthetic construct
  source 1..20: mol_type = other DNA
ccacacgaagcatttttttt

SEQ ID NO: 75894 - DNA, 20 bp, synthetic construct
  source 1..20: mol_type = other DNA
gccacacgaagcattttttt

SEQ ID NO: 75895 - DNA, 20 bp, synthetic construct
  source 1..20: mol_type = other DNA
agccacacgaagcatttttt

SEQ ID NO: 75896 - DNA, 20 bp, synthetic construct
  source 1..20: mol_type = other DNA
aagccacacgaagcattttt

SEQ ID NO: 75897 - DNA, 20 bp, synthetic construct
  source 1..20: mol_type = other DNA
taagccacacgaagcatttt

SEQ ID NO: 75898 - DNA, 20 bp, synthetic construct
  source 1..20: mol_type = other DNA
ttaagccacacgaagcattt

SEQ ID NO: 75899 - DNA, 20 bp, synthetic construct
  source 1..20: mol_type = other DNA
tttaagccacacgaagcatt

SEQ ID NO: 75900 - DNA, 20 bp, synthetic construct
  source 1..20: mol_type = other DNA
ttttaagccacacgaagcat

SEQ ID NO: 75901 - DNA, 20 bp, synthetic construct
  source 1..20: mol_type = other DNA
attttaagccacacgaagca

SEQ ID NO: 75902 - DNA, 20 bp, synthetic construct
  source 1..20: mol_type = other DNA
aattttaagccacacgaagc

SEQ ID NO: 75903 - DNA, 20 bp, synthetic construct
  source 1..20: mol_type = other DNA
taattttaagccacacgaag

SEQ ID NO: 75904 - DNA, 20 bp, synthetic construct
  source 1..20: mol_type = other DNA
ataattttaagccacacgaa

SEQ ID NO: 75905 - DNA, 20 bp, synthetic construct
  source 1..20: mol_type = other DNA
tataattttaagccacacga

SEQ ID NO: 75906 - DNA, 20 bp, synthetic construct
  source 1..20: mol_type = other DNA
atataattttaagccacacg

SEQ ID NO: 75907 - DNA, 20 bp, synthetic construct
  source 1..20: mol_type = other DNA
catataattttaagccacac

SEQ ID NO: 75908 - DNA, 20 bp, synthetic construct
  source 1..20: mol_type = other DNA
tcatataattttaagccaca

SEQ ID NO: 75909 - DNA, 20 bp, synthetic construct
  source 1..20: mol_type = other DNA
ttcatataattttaagccac

SEQ ID NO: 75910 - DNA, 20 bp, synthetic construct
  source 1..20: mol_type = other DNA
tttcatataattttaagcca

SEQ ID NO: 75911 - DNA, 20 bp, synthetic construct
  source 1..20: mol_type = other DNA
ttttcatataattttaagcc

SEQ ID NO: 75912 - DNA, 20 bp, synthetic construct
  source 1..20: mol_type = other DNA
cttttcatataattttaagc

SEQ ID NO: 75913 - DNA, 20 bp, synthetic construct
  source 1..20: mol_type = other DNA
tcttttcatataattttaag

SEQ ID NO: 75914 - DNA, 20 bp, synthetic construct
  source 1..20: mol_type = other DNA
ttcttttcatataattttaa

SEQ ID NO: 75915 - DNA, 20 bp, synthetic construct
  source 1..20: mol_type = other DNA
tttcttttcatataatttta

SEQ ID NO: 75916 - DNA, 20 bp, synthetic construct
  source 1..20: mol_type = other DNA
ttttcttttcatataatttt

SEQ ID NO: 75917 - DNA, 20 bp, synthetic construct
  source 1..20: mol_type = other DNA
attttcttttcatataattt

SEQ ID NO: 75918 - DNA, 20 bp, synthetic construct
  source 1..20: mol_type = other DNA
tattttcttttcatataatt

SEQ ID NO: 75919 - DNA, 20 bp, synthetic construct
  source 1..20: mol_type = other DNA
gtattttcttttcatataat

SEQ ID NO: 75920 - DNA, 20 bp, synthetic construct
  source 1..20: mol_type = other DNA
ggtattttcttttcatataa

SEQ ID NO: 75921 - DNA, 20 bp, synthetic construct
  source 1..20: mol_type = other DNA
aggtattttcttttcatata

SEQ ID NO: 75922 - DNA, 20 bp, synthetic construct
  source 1..20: mol_type = other DNA
aaggtattttcttttcatat

SEQ ID NO: 75923 - DNA, 20 bp, synthetic construct
  source 1..20: mol_type = other DNA
aaaggtattttcttttcata

SEQ ID NO: 75924 - DNA, 20 bp, synthetic construct
  source 1..20: mol_type = other DNA
taaaggtattttcttttcat

SEQ ID NO: 75925 - DNA, 20 bp, synthetic construct
  source 1..20: mol_type = other DNA
gtaaaggtattttcttttca

SEQ ID NO: 75926 - DNA, 20 bp, synthetic construct
  source 1..20: mol_type = other DNA
agtaaaggtattttcttttc

SEQ ID NO: 75927 - DNA, 20 bp, synthetic construct
  source 1..20: mol_type = other DNA
cagtaaaggtattttctttt

SEQ ID NO: 75928 - DNA, 20 bp, synthetic construct
  source 1..20: mol_type = other DNA
tcagtaaaggtattttcttt

SEQ ID NO: 75929 - DNA, 20 bp, synthetic construct
  source 1..20: mol_type = other DNA
atcagtaaaggtattttctt

SEQ ID NO: 75930 - DNA, 20 bp, synthetic construct
  source 1..20: mol_type = other DNA
tatcagtaaaggtattttct

SEQ ID NO: 75931 - DNA, 20 bp, synthetic construct
  source 1..20: mol_type = other DNA
ctatcagtaaaggtattttc

SEQ ID NO: 75932 - DNA, 20 bp, synthetic construct
  source 1..20: mol_type = other DNA
actatcagtaaaggtatttt

SEQ ID NO: 75933 - DNA, 20 bp, synthetic construct
  source 1..20: mol_type = other DNA
gactatcagtaaaggtattt

SEQ ID NO: 75934 - DNA, 20 bp, synthetic construct
  source 1..20: mol_type = other DNA
tgactatcagtaaaggtatt

SEQ ID NO: 75935 - DNA, 20 bp, synthetic construct
  source 1..20: mol_type = other DNA
atgactatcagtaaaggtat

SEQ ID NO: 75936 - DNA, 20 bp, synthetic construct
  source 1..20: mol_type = other DNA
gatgactatcagtaaaggta

SEQ ID NO: 75937 - DNA, 20 bp, synthetic construct
  source 1..20: mol_type = other DNA
agatgactatcagtaaaggt

SEQ ID NO: 75938 - DNA, 20 bp, synthetic construct
  source 1..20: mol_type = other DNA
cagatgactatcagtaaagg

SEQ ID NO: 75939 - DNA, 20 bp, synthetic construct
  source 1..20: mol_type = other DNA
acagatgactatcagtaaag

SEQ ID NO: 75940 - DNA, 20 bp, synthetic construct
  source 1..20: mol_type = other DNA
cacagatgactatcagtaaa

SEQ ID NO: 75941 - DNA, 20 bp, synthetic construct
  source 1..20: mol_type = other DNA
tcacagatgactatcagtaa

SEQ ID NO: 75942 - DNA, 20 bp, synthetic construct
  source 1..20: mol_type = other DNA
atcacagatgactatcagta

SEQ ID NO: 75943 - DNA, 20 bp, synthetic construct
  source 1..20: mol_type = other DNA
aatcacagatgactatcagt

SEQ ID NO: 75944 - DNA, 20 bp, synthetic construct
  source 1..20: mol_type = other DNA
gaatcacagatgactatcag

SEQ ID NO: 75945 - DNA, 20 bp, synthetic construct
  source 1..20: mol_type = other DNA
ggaatcacagatgactatca

SEQ ID NO: 75946 - DNA, 20 bp, synthetic construct
  source 1..20: mol_type = other DNA
tggaatcacagatgactatc

SEQ ID NO: 75947 - DNA, 20 bp, synthetic construct
  source 1..20: mol_type = other DNA
atggaatcacagatgactat

SEQ ID NO: 75948 - DNA, 20 bp, synthetic construct
  source 1..20: mol_type = other DNA
aatggaatcacagatgacta

SEQ ID NO: 75949 - DNA, 20 bp, synthetic construct
  source 1..20: mol_type = other DNA
aaatggaatcacagatgact

SEQ ID NO: 75950 - DNA, 20 bp, synthetic construct
  source 1..20: mol_type = other DNA
caaatggaatcacagatgac

SEQ ID NO: 75951 - DNA, 20 bp, synthetic construct
  source 1..20: mol_type = other DNA
gcaaatggaatcacagatga

SEQ ID NO: 75952 - DNA, 20 bp, synthetic construct
  source 1..20: mol_type = other DNA
agcaaatggaatcacagatg

SEQ ID NO: 75953 - DNA, 20 bp, synthetic construct
  source 1..20: mol_type = other DNA
tagcaaatggaatcacagat

SEQ ID NO: 75954 - DNA, 20 bp, synthetic construct
  source 1..20: mol_type = other DNA
ttagcaaatggaatcacaga

SEQ ID NO: 75955 - DNA, 20 bp, synthetic construct
  source 1..20: mol_type = other DNA
tttagcaaatggaatcacag

SEQ ID NO: 75956 - DNA, 20 bp, synthetic construct
  source 1..20: mol_type = other DNA
atttagcaaatggaatcaca

SEQ ID NO: 75957 - DNA, 20 bp, synthetic construct
  source 1..20: mol_type = other DNA
aatttagcaaatggaatcac

SEQ ID NO: 75958 - DNA, 20 bp, synthetic construct
  source 1..20: mol_type = other DNA
taatttagcaaatggaatca

SEQ ID NO: 75959 - DNA, 20 bp, synthetic construct
  source 1..20: mol_type = other DNA
ttaatttagcaaatggaatc

SEQ ID NO: 75960 - DNA, 20 bp, synthetic construct
  source 1..20: mol_type = other DNA
tttaatttagcaaatggaat

SEQ ID NO: 75961 - DNA, 20 bp, synthetic construct
  source 1..20: mol_type = other DNA
gtttaatttagcaaatggaa

SEQ ID NO: 75962 - DNA, 20 bp, synthetic construct
  source 1..20: mol_type = other DNA
cgtttaatttagcaaatgga

SEQ ID NO: 75963 - DNA, 20 bp, synthetic construct
  source 1..20: mol_type = other DNA
acgtttaatttagcaaatgg

SEQ ID NO: 75964 - DNA, 20 bp, synthetic construct
  source 1..20: mol_type = other DNA
cacgtttaatttagcaaatg

SEQ ID NO: 75965 - DNA, 20 bp, synthetic construct
  source 1..20: mol_type = other DNA
tcacgtttaatttagcaaat

SEQ ID NO: 75966 - DNA, 20 bp, synthetic construct
  source 1..20: mol_type = other DNA
ttcacgtttaatttagcaaa

SEQ ID NO: 75967 - DNA, 20 bp, synthetic construct
  source 1..20: mol_type = other DNA
tttcacgtttaatttagcaa

SEQ ID NO: 75968 - DNA, 20 bp, synthetic construct
  source 1..20: mol_type = other DNA
ctttcacgtttaatttagca

SEQ ID NO: 75969 - DNA, 20 bp, synthetic construct
  source 1..20: mol_type = other DNA
gctttcacgtttaatttagc

SEQ ID NO: 75970 - DNA, 20 bp, synthetic construct
  source 1..20: mol_type = other DNA
tgctttcacgtttaatttag

SEQ ID NO: 75971 - DNA, 20 bp, synthetic construct
  source 1..20: mol_type = other DNA
atgctttcacgtttaattta

SEQ ID NO: 75972 - DNA, 20 bp, synthetic construct
  source 1..20: mol_type = other DNA
tatgctttcacgtttaattt

SEQ ID NO: 75973 - DNA, 20 bp, synthetic construct
  source 1..20: mol_type = other DNA
gtatgctttcacgtttaatt

SEQ ID NO: 75974 - DNA, 20 bp, synthetic construct
  source 1..20: mol_type = other DNA
agtatgctttcacgtttaat

SEQ ID NO: 75975 - DNA, 20 bp, synthetic construct
  source 1..20: mol_type = other DNA
aagtatgctttcacgtttaa

SEQ ID NO: 75976 - DNA, 20 bp, synthetic construct
  source 1..20: mol_type = other DNA
aaagtatgctttcacgttta

SEQ ID NO: 75977 - DNA, 20 bp, synthetic construct
  source 1..20: mol_type = other DNA
aaaagtatgctttcacgttt

SEQ ID NO: 75978 - DNA, 20 bp, synthetic construct
  source 1..20: mol_type = other DNA
taaaagtatgctttcacgtt

SEQ ID NO: 75979 - DNA, 20 bp, synthetic construct
  source 1..20: mol_type = other DNA
gtaaaagtatgctttcacgt

SEQ ID NO: 75980 - DNA, 20 bp, synthetic construct
  source 1..20: mol_type = other DNA
agtaaaagtatgctttcacg

SEQ ID NO: 75981 - DNA, 20 bp, synthetic construct
  source 1..20: mol_type = other DNA
cagtaaaagtatgctttcac

SEQ ID NO: 75982 - DNA, 20 bp, synthetic construct
  source 1..20: mol_type = other DNA
tcagtaaaagtatgctttca

SEQ ID NO: 75983 - DNA, 20 bp, synthetic construct
  source 1..20: mol_type = other DNA
ttcagtaaaagtatgctttc

SEQ ID NO: 75984 - DNA, 20 bp, synthetic construct
  source 1..20: mol_type = other DNA
attcagtaaaagtatgcttt

SEQ ID NO: 75985 - DNA, 20 bp, synthetic construct
  source 1..20: mol_type = other DNA
tattcagtaaaagtatgctt

SEQ ID NO: 75986 - DNA, 20 bp, synthetic construct
  source 1..20: mol_type = other DNA
gtattcagtaaaagtatgct

SEQ ID NO: 75987 - DNA, 20 bp, synthetic construct
  source 1..20: mol_type = other DNA
agtattcagtaaaagtatgc

SEQ ID NO: 75988 - DNA, 20 bp, synthetic construct
  source 1..20: mol_type = other DNA
tagtattcagtaaaagtatg

SEQ ID NO: 75989 - DNA, 20 bp, synthetic construct
  source 1..20: mol_type = other DNA
atagtattcagtaaaagtat

SEQ ID NO: 75990 - DNA, 20 bp, synthetic construct
  source 1..20: mol_type = other DNA
tatagtattcagtaaaagta

SEQ ID NO: 75991 - DNA, 20 bp, synthetic construct
  source 1..20: mol_type = other DNA
atatagtattcagtaaaagt

SEQ ID NO: 75992 - DNA, 20 bp, synthetic construct
  source 1..20: mol_type = other DNA
tatatagtattcagtaaaag

SEQ ID NO: 75993 - DNA, 20 bp, synthetic construct
  source 1..20: mol_type = other DNA
atatatagtattcagtaaaa

SEQ ID NO: 75994 - DNA, 20 bp, synthetic construct
  source 1..20: mol_type = other DNA
aatatatagtattcagtaaa

SEQ ID NO: 75995 - DNA, 20 bp, synthetic construct
  source 1..20: mol_type = other DNA
gaatatatagtattcagtaa

SEQ ID NO: 75996 - DNA, 20 bp, synthetic construct
  source 1..20: mol_type = other DNA
ggaatatatagtattcagta

SEQ ID NO: 75997 - DNA, 20 bp, synthetic construct
  source 1..20: mol_type = other DNA
cggaatatatagtattcagt

SEQ ID NO: 75998 - DNA, 20 bp, synthetic construct
  source 1..20: mol_type = other DNA
acggaatatatagtattcag

SEQ ID NO: 75999 - DNA, 20 bp, synthetic construct
  source 1..20: mol_type = other DNA
tacggaatatatagtattca

SEQ ID NO: 76000 - DNA, 20 bp, synthetic construct
  source 1..20: mol_type = other DNA
atacggaatatatagtattc

SEQ ID NO: 76001 - DNA, 20 bp, synthetic construct
  source 1..20: mol_type = other DNA
gatacggaatatatagtatt

SEQ ID NO: 76002 - DNA, 20 bp, synthetic construct
  source 1..20: mol_type = other DNA
tgatacggaatatatagtat

SEQ ID NO: 76003 - DNA, 20 bp, synthetic construct
  source 1..20: mol_type = other DNA
ctgatacggaatatatagta

SEQ ID NO: 76004 - DNA, 20 bp, synthetic construct
  source 1..20: mol_type = other DNA
actgatacggaatatatagt

SEQ ID NO: 76005 - DNA, 20 bp, synthetic construct
  source 1..20: mol_type = other DNA
aactgatacggaatatatag

SEQ ID NO: 76006 - DNA, 20 bp, synthetic construct
  source 1..20: mol_type = other DNA
aaactgatacggaatatata

SEQ ID NO: 76007 - DNA, 20 bp, synthetic construct
  source 1..20: mol_type = other DNA
taaactgatacggaatatat

SEQ ID NO: 76008 - DNA, 20 bp, synthetic construct
  source 1..20: mol_type = other DNA
ctaaactgatacggaatata

SEQ ID NO: 76009 - DNA, 20 bp, synthetic construct
  source 1..20: mol_type = other DNA
tctaaactgatacggaatat

SEQ ID NO: 76010 - DNA, 20 bp, synthetic construct
  source 1..20: mol_type = other DNA
atctaaactgatacggaata

SEQ ID NO: 76011 - DNA, 20 bp, synthetic construct
  source 1..20: mol_type = other DNA
tatctaaactgatacggaat

SEQ ID NO: 76012 - DNA, 20 bp, synthetic construct
  source 1..20: mol_type = other DNA
ctatctaaactgatacggaa

SEQ ID NO: 76013 - DNA, 20 bp, synthetic construct
  source 1..20: mol_type = other DNA
gctatctaaactgatacgga

SEQ ID NO: 76014 - DNA, 20 bp, synthetic construct
  source 1..20: mol_type = other DNA
tgctatctaaactgatacgg

SEQ ID NO: 76015 - DNA, 20 bp, synthetic construct
  source 1..20: mol_type = other DNA
ctgctatctaaactgatacg

SEQ ID NO: 76016 - DNA, 20 bp, synthetic construct
  source 1..20: mol_type = other DNA
actgctatctaaactgatac

SEQ ID NO: 76017 - DNA, 20 bp, synthetic construct
  source 1..20: mol_type = other DNA
aactgctatctaaactgata

SEQ ID NO: 76018 - DNA, 20 bp, synthetic construct
  source 1..20: mol_type = other DNA
aaactgctatctaaactgat

SEQ ID NO: 76019 - DNA, 20 bp, synthetic construct
  source 1..20: mol_type = other DNA
taaactgctatctaaactga

SEQ ID NO: 76020 - DNA, 20 bp, synthetic construct
  source 1..20: mol_type = other DNA
ataaactgctatctaaactg

SEQ ID NO: 76021 - DNA, 20 bp, synthetic construct
  source 1..20: mol_type = other DNA
gataaactgctatctaaact

SEQ ID NO: 76022 - DNA, 20 bp, synthetic construct
  source 1..20: mol_type = other DNA
agataaactgctatctaaac

SEQ ID NO: 76023 - DNA, 20 bp, synthetic construct
  source 1..20: mol_type = other DNA
aagataaactgctatctaaa

SEQ ID NO: 76024 - DNA, 20 bp, synthetic construct
  source 1..20: mol_type = other DNA
gaagataaactgctatctaa

SEQ ID NO: 76025 - DNA, 20 bp, synthetic construct
  source 1..20: mol_type = other DNA
tgaagataaactgctatcta

SEQ ID NO: 76026 - DNA, 20 bp, synthetic construct
  source 1..20: mol_type = other DNA
gtgaagataaactgctatct

SEQ ID NO: 76027 - DNA, 20 bp, synthetic construct
  source 1..20: mol_type = other DNA
tgtgaagataaactgctatc

SEQ ID NO: 76028 - DNA, 20 bp, synthetic construct
  source 1..20: mol_type = other DNA
atgtgaagataaactgctat

SEQ ID NO: 76029 - DNA, 20 bp, synthetic construct
  source 1..20: mol_type = other DNA
tatgtgaagataaactgcta

SEQ ID NO: 76030 - DNA, 20 bp, synthetic construct
  source 1..20: mol_type = other DNA
gtatgtgaagataaactgct

SEQ ID NO: 76031 - DNA, 20 bp, synthetic construct
  source 1..20: mol_type = other DNA
tgtatgtgaagataaactgc

SEQ ID NO: 76032 - DNA, 20 bp, synthetic construct
  source 1..20: mol_type = other DNA
atgtatgtgaagataaactg

SEQ ID NO: 76033 - DNA, 20 bp, synthetic construct
  source 1..20: mol_type = other DNA
tatgtatgtgaagataaact

SEQ ID NO: 76034 - DNA, 20 bp, synthetic construct
  source 1..20: mol_type = other DNA
ttatgtatgtgaagataaac

SEQ ID NO: 76035 - DNA, 20 bp, synthetic construct
  source 1..20: mol_type = other DNA
cttatgtatgtgaagataaa

SEQ ID NO: 76036 - DNA, 20 bp, synthetic construct
  source 1..20: mol_type = other DNA
acttatgtatgtgaagataa

SEQ ID NO: 76037 - DNA, 20 bp, synthetic construct
  source 1..20: mol_type = other DNA
aacttatgtatgtgaagata

SEQ ID NO: 76038 - DNA, 20 bp, synthetic construct
  source 1..20: mol_type = other DNA
aaacttatgtatgtgaagat

SEQ ID NO: 76039 - DNA, 20 bp, synthetic construct
  source 1..20: mol_type = other DNA
aaaacttatgtatgtgaaga

SEQ ID NO: 76040 - DNA, 20 bp, synthetic construct
  source 1..20: mol_type = other DNA
taaaacttatgtatgtgaag

SEQ ID NO: 76041 - DNA, 20 bp, synthetic construct
  source 1..20: mol_type = other DNA
ttaaaacttatgtatgtgaa

SEQ ID NO: 76042 - DNA, 20 bp, synthetic construct
  source 1..20: mol_type = other DNA
cttaaaacttatgtatgtga

SEQ ID NO: 76043 - DNA, 20 bp, synthetic construct
  source 1..20: mol_type = other DNA
acttaaaacttatgtatgtg

SEQ ID NO: 76044 - DNA, 20 bp, synthetic construct
  source 1..20: mol_type = other DNA
aacttaaaacttatgtatgt

SEQ ID NO: 76045 - DNA, 20 bp, synthetic construct
  source 1..20: mol_type = other DNA
aaacttaaaacttatgtatg

SEQ ID NO: 76046 - DNA, 20 bp, synthetic construct
  source 1..20: mol_type = other DNA
taaacttaaaacttatgtat

SEQ ID NO: 76047 - DNA, 20 bp, synthetic construct
  source 1..20: mol_type = other DNA
gtaaacttaaaacttatgta

SEQ ID NO: 76048 - DNA, 20 bp, synthetic construct
  source 1..20: mol_type = other DNA
ggtaaacttaaaacttatgt

SEQ ID NO: 76049 - DNA, 20 bp, synthetic construct
  source 1..20: mol_type = other DNA
aggtaaacttaaaacttatg

SEQ ID NO: 76050 - DNA, 20 bp, synthetic construct
  source 1..20: mol_type = other DNA
aaggtaaacttaaaacttat

SEQ ID NO: 76051 - DNA, 20 bp, synthetic construct
  source 1..20: mol_type = other DNA
aaaggtaaacttaaaactta

SEQ ID NO: 76052 - DNA, 20 bp, synthetic construct
  source 1..20: mol_type = other DNA
taaaggtaaacttaaaactt

SEQ ID NO: 76053 - DNA, 20 bp, synthetic construct
  source 1..20: mol_type = other DNA
ataaaggtaaacttaaaact

SEQ ID NO: 76054 - DNA, 20 bp, synthetic construct
  source 1..20: mol_type = other DNA
aataaaggtaaacttaaaac

SEQ ID NO: 76055 - DNA, 20 bp, synthetic construct
  source 1..20: mol_type = other DNA
taataaaggtaaacttaaaa

SEQ ID NO: 76056 - DNA, 20 bp, synthetic construct
  source 1..20: mol_type = other DNA
ataataaaggtaaacttaaa

SEQ ID NO: 76057 - DNA, 20 bp, synthetic construct
  source 1..20: mol_type = other DNA
tataataaaggtaaacttaa

SEQ ID NO: 76058 - DNA, 20 bp, synthetic construct
  source 1..20: mol_type = other DNA
ctataataaaggtaaactta

SEQ ID NO: 76059 - DNA, 20 bp, synthetic construct
  source 1..20: mol_type = other DNA
actataataaaggtaaactt

SEQ ID NO: 76060 - DNA, 20 bp, synthetic construct
  source 1..20: mol_type = other DNA
cactataataaaggtaaact

SEQ ID NO: 76061 - DNA, 20 bp, synthetic construct
  source 1..20: mol_type = other DNA
gcactataataaaggtaaac

SEQ ID NO: 76062 - DNA, 20 bp, synthetic construct
  source 1..20: mol_type = other DNA
tgcactataataaaggtaaa

SEQ ID NO: 76063 - DNA, 20 bp, synthetic construct
  source 1..20: mol_type = other DNA
atgcactataataaaggtaa

SEQ ID NO: 76064 - DNA, 20 bp, synthetic construct
  source 1..20: mol_type = other DNA
aatgcactataataaaggta

SEQ ID NO: 76065 - DNA, 20 bp, synthetic construct
  source 1..20: mol_type = other DNA
caatgcactataataaaggt

SEQ ID NO: 76066 - DNA, 20 bp, synthetic construct
  source 1..20: mol_type = other DNA
ccaatgcactataataaagg

SEQ ID NO: 76067 - DNA, 20 bp, synthetic construct
  source 1..20: mol_type = other DNA
accaatgcactataataaag

SEQ ID NO: 76068 - DNA, 20 bp, synthetic construct
  source 1..20: mol_type = other DNA
gaccaatgcactataataaa

SEQ ID NO: 76069 - DNA, 20 bp, synthetic construct
  source 1..20: mol_type = other DNA
agaccaatgcactataataa

SEQ ID NO: 76070 - DNA, 20 bp, synthetic construct
  source 1..20: mol_type = other DNA
aagaccaatgcactataata

SEQ ID NO: 76071 - DNA, 20 bp, synthetic construct
  source 1..20: mol_type = other DNA
aaagaccaatgcactataat

SEQ ID NO: 76072 - DNA, 20 bp, synthetic construct
  source 1..20: mol_type = other DNA
aaaagaccaatgcactataa

SEQ ID NO: 76073 - DNA, 20 bp, synthetic construct
  source 1..20: mol_type = other DNA
caaaagaccaatgcactata

SEQ ID NO: 76074 - DNA, 20 bp, synthetic construct
  source 1..20: mol_type = other DNA
acaaaagaccaatgcactat

SEQ ID NO: 76075 - DNA, 20 bp, synthetic construct
  source 1..20: mol_type = other DNA
aacaaaagaccaatgcacta

SEQ ID NO: 76076 - DNA, 20 bp, synthetic construct
  source 1..20: mol_type = other DNA
aaacaaaagaccaatgcact

SEQ ID NO: 76077 - DNA, 20 bp, synthetic construct
  source 1..20: mol_type = other DNA
aaaacaaaagaccaatgcac

SEQ ID NO: 76078 - DNA, 20 bp, synthetic construct
  source 1..20: mol_type = other DNA
gaaaacaaaagaccaatgca

SEQ ID NO: 76079 - DNA, 20 bp, synthetic construct
  source 1..20: mol_type = other DNA
tgaaaacaaaagaccaatgc

SEQ ID NO: 76080 - DNA, 20 bp, synthetic construct
  source 1..20: mol_type = other DNA
atgaaaacaaaagaccaatg

SEQ ID NO: 76081 - DNA, 20 bp, synthetic construct
  source 1..20: mol_type = other DNA
gatgaaaacaaaagaccaat

SEQ ID NO: 76082 - DNA, 20 bp, synthetic construct
  source 1..20: mol_type = other DNA
tgatgaaaacaaaagaccaa

SEQ ID NO: 76083 - DNA, 20 bp, synthetic construct
  source 1..20: mol_type = other DNA
ttgatgaaaacaaaagacca

SEQ ID NO: 76084 - DNA, 20 bp, synthetic construct
  source 1..20: mol_type = other DNA
gttgatgaaaacaaaagacc

SEQ ID NO: 76085 - DNA, 20 bp, synthetic construct
  source 1..20: mol_type = other DNA
ggttgatgaaaacaaaagac

SEQ ID NO: 76086 - DNA, 20 bp, synthetic construct
  source 1..20: mol_type = other DNA
aggttgatgaaaacaaaaga

SEQ ID NO: 76087 - DNA, 20 bp, synthetic construct
  source 1..20: mol_type = other DNA
taggttgatgaaaacaaaag

SEQ ID NO: 76088 - DNA, 20 bp, synthetic construct
  source 1..20: mol_type = other DNA
ttaggttgatgaaaacaaaa

SEQ ID NO: 76089 - DNA, 20 bp, synthetic construct
  source 1..20: mol_type = other DNA
tttaggttgatgaaaacaaa

SEQ ID NO: 76090 - DNA, 20 bp, synthetic construct
  source 1..20: mol_type = other DNA
atttaggttgatgaaaacaa

SEQ ID NO: 76091 - DNA, 20 bp, synthetic construct
  source 1..20: mol_type = other DNA
aatttaggttgatgaaaaca

SEQ ID NO: 76092 - DNA, 20 bp, synthetic construct
  source 1..20: mol_type = other DNA
taatttaggttgatgaaaac

SEQ ID NO: 76093 - DNA, 20 bp, synthetic construct
  source 1..20: mol_type = other DNA
ataatttaggttgatgaaaa

SEQ ID NO: 76094 - DNA, 20 bp, synthetic construct
  source 1..20: mol_type = other DNA
cataatttaggttgatgaaa

SEQ ID NO: 76095 - DNA, 20 bp, synthetic construct
  source 1..20: mol_type = other DNA
acataatttaggttgatgaa

SEQ ID NO: 76096 - DNA, 20 bp, synthetic construct
  source 1..20: mol_type = other DNA
aacataatttaggttgatga

SEQ ID NO: 76097 - DNA, 20 bp, synthetic construct
  source 1..20: mol_type = other DNA
gaacataatttaggttgatg

SEQ ID NO: 76098 - DNA, 20 bp, synthetic construct
  source 1..20: mol_type = other DNA
tgaacataatttaggttgat

SEQ ID NO: 76099 - DNA, 20 bp, synthetic construct
  source 1..20: mol_type = other DNA
ttgaacataatttaggttga

SEQ ID NO: 76100 - DNA, 20 bp, synthetic construct
  source 1..20: mol_type = other DNA
attgaacataatttaggttg

SEQ ID NO: 76101 - DNA, 20 bp, synthetic construct
  source 1..20: mol_type = other DNA
tattgaacataatttaggtt

SEQ ID NO: 76102 - DNA, 20 bp, synthetic construct
  source 1..20: mol_type = other DNA
ttattgaacataatttaggt

SEQ ID NO: 76103 - DNA, 20 bp, synthetic construct
  source 1..20: mol_type = other DNA
tttattgaacataatttagg

SEQ ID NO: 76104 - DNA, 20 bp, synthetic construct
  source 1..20: mol_type = other DNA
atttattgaacataatttag

SEQ ID NO: 76105 - DNA, 20 bp, synthetic construct
  source 1..20: mol_type = other DNA
catttattgaacataattta

SEQ ID NO: 76106 - DNA, 20 bp, synthetic construct
  source 1..20: mol_type = other DNA
acatttattgaacataattt

SEQ ID NO: 76107 - DNA, 20 bp, synthetic construct
  source 1..20: mol_type = other DNA
aacatttattgaacataatt

SEQ ID NO: 76108 - DNA, 20 bp, synthetic construct
  source 1..20: mol_type = other DNA
aaacatttattgaacataat

SEQ ID NO: 76109 - DNA, 20 bp, synthetic construct
  source 1..20: mol_type = other DNA
gaaacatttattgaacataa

SEQ ID NO: 76110 - DNA, 20 bp, synthetic construct
  source 1..20: mol_type = other DNA
agaaacatttattgaacata

SEQ ID NO: 76111 - DNA, 20 bp, synthetic construct
  source 1..20: mol_type = other DNA
cagaaacatttattgaacat

SEQ ID NO: 76112 - DNA, 20 bp, synthetic construct
  source 1..20: mol_type = other DNA
acagaaacatttattgaaca

SEQ ID NO: 76113 - DNA, 20 bp, synthetic construct
  source 1..20: mol_type = other DNA
aacagaaacatttattgaac

SEQ ID NO: 76114 - DNA, 20 bp, synthetic construct
  source 1..20: mol_type = other DNA
taacagaaacatttattgaa

SEQ ID NO: 76115 - DNA, 20 bp, synthetic construct
  source 1..20: mol_type = other DNA
ctaacagaaacatttattga

SEQ ID NO: 76116 - DNA, 20 bp, synthetic construct
  source 1..20: mol_type = other DNA
tctaacagaaacatttattg

SEQ ID NO: 76117 - DNA, 20 bp, synthetic construct
  source 1..20: mol_type = other DNA
atctaacagaaacatttatt

SEQ ID NO: 76118 - DNA, 20 bp, synthetic construct
  source 1..20: mol_type = other DNA
aatctaacagaaacatttat

SEQ ID NO: 76119 - DNA, 20 bp, synthetic construct
  source 1..20: mol_type = other DNA
aaatctaacagaaacattta

SEQ ID NO: 76120 - DNA, 20 bp, synthetic construct
  source 1..20: mol_type = other DNA
aaaatctaacagaaacattt

SEQ ID NO: 76121 - DNA, 20 bp, synthetic construct
  source 1..20: mol_type = other DNA
taaaatctaacagaaacatt

SEQ ID NO: 76122 - DNA, 20 bp, synthetic construct
  source 1..20: mol_type = other DNA
ttaaaatctaacagaaacat

SEQ ID NO: 76123 - DNA, 20 bp, synthetic construct
  source 1..20: mol_type = other DNA
cttaaaatctaacagaaaca

SEQ ID NO: 76124 - DNA, 20 bp, synthetic construct
  source 1..20: mol_type = other DNA
acttaaaatctaacagaaac

SEQ ID NO: 76125 - DNA, 20 bp, synthetic construct
  source 1..20: mol_type = other DNA
aacttaaaatctaacagaaa

SEQ ID NO: 76126 - DNA, 20 bp, synthetic construct
  source 1..20: mol_type = other DNA
taacttaaaatctaacagaa

SEQ ID NO: 76127 - DNA, 20 bp, synthetic construct
  source 1..20: mol_type = other DNA
ttaacttaaaatctaacaga

SEQ ID NO: 76128 - DNA, 20 bp, synthetic construct
  source 1..20: mol_type = other DNA
tttaacttaaaatctaacag

SEQ ID NO: 76129 - DNA, 20 bp, synthetic construct
  source 1..20: mol_type = other DNA
gtttaacttaaaatctaaca

SEQ ID NO: 76130 - DNA, 20 bp, synthetic construct
  source 1..20: mol_type = other DNA
tgtttaacttaaaatctaac

SEQ ID NO: 76131 - DNA, 20 bp, synthetic construct
  source 1..20: mol_type = other DNA
ttgtttaacttaaaatctaa

SEQ ID NO: 76132 - DNA, 20 bp, synthetic construct
  source 1..20: mol_type = other DNA
attgtttaacttaaaatcta

SEQ ID NO: 76133 - DNA, 20 bp, synthetic construct
  source 1..20: mol_type = other DNA
aattgtttaacttaaaatct

SEQ ID NO: 76134 - DNA, 20 bp, synthetic construct
  source 1..20: mol_type = other DNA
taattgtttaacttaaaatc

SEQ ID NO: 76135 - DNA, 20 bp, synthetic construct
  source 1..20: mol_type = other DNA
ataattgtttaacttaaaat

SEQ ID NO: 76136 - DNA, 20 bp, synthetic construct
  source 1..20: mol_type = other DNA
cataattgtttaacttaaaa

SEQ ID NO: 76137 - DNA, 20 bp, synthetic construct
  source 1..20: mol_type = other DNA
acataattgtttaacttaaa

SEQ ID NO: 76138 - DNA, 20 bp, synthetic construct
  source 1..20: mol_type = other DNA
cacataattgtttaacttaa

SEQ ID NO: 76139 - DNA, 20 bp, synthetic construct
  source 1..20: mol_type = other DNA
tcacataattgtttaactta

SEQ ID NO: 76140 - DNA, 20 bp, synthetic construct
  source 1..20: mol_type = other DNA
ttcacataattgtttaactt

SEQ ID NO: 76141 - DNA, 20 bp, synthetic construct
  source 1..20: mol_type = other DNA
tttcacataattgtttaact

SEQ ID NO: 76142 - DNA, 20 bp, synthetic construct
  source 1..20: mol_type = other DNA
atttcacataattgtttaac

SEQ ID NO: 76143 - DNA, 20 bp, synthetic construct
  source 1..20: mol_type = other DNA
aatttcacataattgtttaa

SEQ ID NO: 76144 - DNA, 20 bp, synthetic construct
  source 1..20: mol_type = other DNA
gaatttcacataattgttta

SEQ ID NO: 76145 - DNA, 20 bp, synthetic construct
  source 1..20: mol_type = other DNA
tgaatttcacataattgttt

SEQ ID NO: 76146 - DNA, 20 bp, synthetic construct
  source 1..20: mol_type = other DNA
atgaatttcacataattgtt

SEQ ID NO: 76147 - DNA, 20 bp, synthetic construct
  source 1..20: mol_type = other DNA
aatgaatttcacataattgt

SEQ ID NO: 76148 - DNA, 20 bp, synthetic construct
  source 1..20: mol_type = other DNA
aaatgaatttcacataattg

SEQ ID NO: 76149 - DNA, 20 bp, synthetic construct
  source 1..20: mol_type = other DNA
aaaatgaatttcacataatt

SEQ ID NO: 76150 - DNA, 20 bp, synthetic construct
  source 1..20: mol_type = other DNA
aaaaatgaatttcacataat

SEQ ID NO: 76151 - DNA, 20 bp, synthetic construct
  source 1..20: mol_type = other DNA
gaaaaatgaatttcacataa

SEQ ID NO: 76152 - DNA, 20 bp, synthetic construct
  source 1..20: mol_type = other DNA
cgaaaaatgaatttcacata

SEQ ID NO: 76153 - DNA, 20 bp, synthetic construct
  source 1..20: mol_type = other DNA
acgaaaaatgaatttcacat

SEQ ID NO: 76154 - DNA, 20 bp, synthetic construct
  source 1..20: mol_type = other DNA
tacgaaaaatgaatttcaca

SEQ ID NO: 76155 - DNA, 20 bp, synthetic construct
  source 1..20: mol_type = other DNA
ttacgaaaaatgaatttcac

SEQ ID NO: 76156 - DNA, 20 bp, synthetic construct
  source 1..20: mol_type = other DNA
attacgaaaaatgaatttca

SEQ ID NO: 76157 - DNA, 20 bp, synthetic construct
  source 1..20: mol_type = other DNA
aattacgaaaaatgaatttc

SEQ ID NO: 76158 - DNA, 20 bp, synthetic construct
  source 1..20: mol_type = other DNA
caattacgaaaaatgaattt

SEQ ID NO: 76159 - DNA, 20 bp, synthetic construct
  source 1..20: mol_type = other DNA
acaattacgaaaaatgaatt

SEQ ID NO: 76160 - DNA, 20 bp, synthetic construct
  source 1..20: mol_type = other DNA
aacaattacgaaaaatgaat

SEQ ID NO: 76161 - DNA, 20 bp, synthetic construct
  source 1..20: mol_type = other DNA
aaacaattacgaaaaatgaa

SEQ ID NO: 76162 - DNA, 20 bp, synthetic construct
  source 1..20: mol_type = other DNA
aaaacaattacgaaaaatga

SEQ ID NO: 76163 - DNA, 20 bp, synthetic construct
  source 1..20: mol_type = other DNA
aaaaacaattacgaaaaatg

SEQ ID NO: 76164 - DNA, 20 bp, synthetic construct
  source 1..20: mol_type = other DNA
aaaaaacaattacgaaaaat

SEQ ID NO: 76165 - DNA, 20 bp, synthetic construct
  source 1..20: mol_type = other DNA
taaaaaacaattacgaaaaa

SEQ ID NO: 76166 - DNA, 20 bp, synthetic construct
  source 1..20: mol_type = other DNA
ttaaaaaacaattacgaaaa

SEQ ID NO: 76167 - DNA, 20 bp, synthetic construct
  source 1..20: mol_type = other DNA
gttaaaaaacaattacgaaa

SEQ ID NO: 76168 - DNA, 20 bp, synthetic construct
  source 1..20: mol_type = other DNA
tgttaaaaaacaattacgaa

SEQ ID NO: 76169 - DNA, 20 bp, synthetic construct
  source 1..20: mol_type = other DNA
atgttaaaaaacaattacga

SEQ ID NO: 76170 - DNA, 20 bp, synthetic construct
  source 1..20: mol_type = other DNA
tatgttaaaaaacaattacg

SEQ ID NO: 76171 - DNA, 20 bp, synthetic construct
  source 1..20: mol_type = other DNA
atatgttaaaaaacaattac

SEQ ID NO: 76172 - DNA, 20 bp, synthetic construct
  source 1..20: mol_type = other DNA
catatgttaaaaaacaatta

SEQ ID NO: 76173 - DNA, 20 bp, synthetic construct
  source 1..20: mol_type = other DNA
acatatgttaaaaaacaatt

SEQ ID NO: 76174 - DNA, 20 bp, synthetic construct
  source 1..20: mol_type = other DNA
gacatatgttaaaaaacaat

SEQ ID NO: 76175 - DNA, 20 bp, synthetic construct
  source 1..20: mol_type = other DNA
agacatatgttaaaaaacaa

SEQ ID NO: 76176 - DNA, 20 bp, synthetic construct
  source 1..20: mol_type = other DNA
aagacatatgttaaaaaaca

SEQ ID NO: 76177 - DNA, 20 bp, synthetic construct
  source 1..20: mol_type = other DNA
aaagacatatgttaaaaaac

SEQ ID NO: 76178 - DNA, 20 bp, synthetic construct
  source 1..20: mol_type = other DNA
caaagacatatgttaaaaaa

SEQ ID NO: 76179 - DNA, 20 bp, synthetic construct
  source 1..20: mol_type = other DNA
acaaagacatatgttaaaaa

SEQ ID NO: 76180 - DNA, 20 bp, synthetic construct
  source 1..20: mol_type = other DNA
aacaaagacatatgttaaaa

SEQ ID NO: 76181 - DNA, 20 bp, synthetic construct
  source 1..20: mol_type = other DNA
caacaaagacatatgttaaa

SEQ ID NO: 76182 - DNA, 20 bp, synthetic construct
  source 1..20: mol_type = other DNA
ccaacaaagacatatgttaa

SEQ ID NO: 76183 - DNA, 20 bp, synthetic construct
  source 1..20: mol_type = other DNA
accaacaaagacatatgtta

SEQ ID NO: 76184 - DNA, 20 bp, synthetic construct
  source 1..20: mol_type = other DNA
taccaacaaagacatatgtt

SEQ ID NO: 76185 - DNA, 20 bp, synthetic construct
  source 1..20: mol_type = other DNA
ttaccaacaaagacatatgt

SEQ ID NO: 76186 - DNA, 20 bp, synthetic construct
  source 1..20: mol_type = other DNA
attaccaacaaagacatatg

SEQ ID NO: 76187 - DNA, 20 bp, synthetic construct
  source 1..20: mol_type = other DNA
aattaccaacaaagacatat

SEQ ID NO: 76188 - DNA, 20 bp, synthetic construct
  source 1..20: mol_type = other DNA
gaattaccaacaaagacata

SEQ ID NO: 76189 - DNA, 20 bp, synthetic construct
  source 1..20: mol_type = other DNA
tgaattaccaacaaagacat

SEQ ID NO: 76190 - DNA, 20 bp, synthetic construct
  source 1..20: mol_type = other DNA
gtgaattaccaacaaagaca

SEQ ID NO: 76191 - DNA, 20 bp, synthetic construct
  source 1..20: mol_type = other DNA
cgtgaattaccaacaaagac

SEQ ID NO: 76192 - DNA, 20 bp, synthetic construct
  source 1..20: mol_type = other DNA
acgtgaattaccaacaaaga

SEQ ID NO: 76193 - DNA, 20 bp, synthetic construct
  source 1..20: mol_type = other DNA
cacgtgaattaccaacaaag

SEQ ID NO: 76194 - DNA, 20 bp, synthetic construct
  source 1..20: mol_type = other DNA
acacgtgaattaccaacaaa

SEQ ID NO: 76195 - DNA, 20 bp, synthetic construct
  source 1..20: mol_type = other DNA
cacacgtgaattaccaacaa

SEQ ID NO: 76196 - DNA, 20 bp, synthetic construct
  source 1..20: mol_type = other DNA
acacacgtgaattaccaaca

SEQ ID NO: 76197 - DNA, 20 bp, synthetic construct
  source 1..20: mol_type = other DNA
cacacacgtgaattaccaac

SEQ ID NO: 76198 - DNA, 20 bp, synthetic construct
  source 1..20: mol_type = other DNA
tcacacacgtgaattaccaa

SEQ ID NO: 76199 - DNA, 20 bp, synthetic construct
  source 1..20: mol_type = other DNA
ctcacacacgtgaattacca

SEQ ID NO: 76200 - DNA, 20 bp, synthetic construct
  source 1..20: mol_type = other DNA
actcacacacgtgaattacc

SEQ ID NO: 76201 - DNA, 20 bp, synthetic construct
  source 1..20: mol_type = other DNA
cactcacacacgtgaattac

SEQ ID NO: 76202 - DNA, 20 bp, synthetic construct
  source 1..20: mol_type = other DNA
acactcacacacgtgaatta

SEQ ID NO: 76203 - DNA, 20 bp, synthetic construct
  source 1..20: mol_type = other DNA
tacactcacacacgtgaatt

SEQ ID NO: 76204 - DNA, 20 bp, synthetic construct
  source 1..20: mol_type = other DNA
ttacactcacacacgtgaat

SEQ ID NO: 76205 - DNA, 20 bp, synthetic construct
  source 1..20: mol_type = other DNA
gttacactcacacacgtgaa

SEQ ID NO: 76206 - DNA, 20 bp, synthetic construct
  source 1..20: mol_type = other DNA
agttacactcacacacgtga

SEQ ID NO: 76207 - DNA, 20 bp, synthetic construct
  source 1..20: mol_type = other DNA
cagttacactcacacacgtg

SEQ ID NO: 76208 - DNA, 20 bp, synthetic construct
  source 1..20: mol_type = other DNA
tcagttacactcacacacgt

SEQ ID NO: 76209 - DNA, 20 bp, synthetic construct
  source 1..20: mol_type = other DNA
atcagttacactcacacacg

SEQ ID NO: 76210 - DNA, 20 bp, synthetic construct
  source 1..20: mol_type = other DNA
aatcagttacactcacacac

SEQ ID NO: 76211 - DNA, 20 bp, synthetic construct
  source 1..20: mol_type = other DNA
caatcagttacactcacaca

SEQ ID NO: 76212 - DNA, 20 bp, synthetic construct
  source 1..20: mol_type = other DNA
gcaatcagttacactcacac

SEQ ID NO: 76213 - DNA, 20 bp, synthetic construct
  source 1..20: mol_type = other DNA
ggcaatcagttacactcaca

SEQ ID NO: 76214 - DNA, 20 bp, synthetic construct
  source 1..20: mol_type = other DNA
tggcaatcagttacactcac

SEQ ID NO: 76215 - DNA, 20 bp, synthetic construct
  source 1..20: mol_type = other DNA
ctggcaatcagttacactca

SEQ ID NO: 76216 - DNA, 20 bp, synthetic construct
  source 1..20: mol_type = other DNA
tctggcaatcagttacactc

SEQ ID NO: 76217 - DNA, 20 bp, synthetic construct
  source 1..20: mol_type = other DNA
atctggcaatcagttacact

SEQ ID NO: 76218 - DNA, 20 bp, synthetic construct
  source 1..20: mol_type = other DNA
aatctggcaatcagttacac

SEQ ID NO: 76219 - DNA, 20 bp, synthetic construct
  source 1..20: mol_type = other DNA
taatctggcaatcagttaca

SEQ ID NO: 76220 - DNA, 20 bp, synthetic construct
  source 1..20: mol_type = other DNA
ataatctggcaatcagttac

SEQ ID NO: 76221 - DNA, 20 bp, synthetic construct
  source 1..20: mol_type = other DNA
tataatctggcaatcagtta

SEQ ID NO: 76222 - DNA, 20 bp, synthetic construct
  source 1..20: mol_type = other DNA
atataatctggcaatcagtt

SEQ ID NO: 76223 - DNA, 20 bp, synthetic construct
  source 1..20: mol_type = other DNA
tatataatctggcaatcagt

SEQ ID NO: 76224 - DNA, 20 bp, synthetic construct
  source 1..20: mol_type = other DNA
ttatataatctggcaatcag

SEQ ID NO: 76225 - DNA, 20 bp, synthetic construct
  source 1..20: mol_type = other DNA
tttatataatctggcaatca

SEQ ID NO: 76226 - DNA, 20 bp, synthetic construct
  source 1..20: mol_type = other DNA
gtttatataatctggcaatc

SEQ ID NO: 76227 - DNA, 20 bp, synthetic construct
  source 1..20: mol_type = other DNA
agtttatataatctggcaat

SEQ ID NO: 76228 - DNA, 20 bp, synthetic construct
  source 1..20: mol_type = other DNA
aagtttatataatctggcaa

SEQ ID NO: 76229 - DNA, 20 bp, synthetic construct
  source 1..20: mol_type = other DNA
aaagtttatataatctggca

SEQ ID NO: 76230 - DNA, 20 bp, synthetic construct
  source 1..20: mol_type = other DNA
gaaagtttatataatctggc

SEQ ID NO: 76231 - DNA, 20 bp, synthetic construct
  source 1..20: mol_type = other DNA
tgaaagtttatataatctgg

SEQ ID NO: 76232 - DNA, 20 bp, synthetic construct
  source 1..20: mol_type = other DNA
ttgaaagtttatataatctg

SEQ ID NO: 76233 - DNA, 20 bp, synthetic construct
  source 1..20: mol_type = other DNA
gttgaaagtttatataatct

SEQ ID NO: 76234 - DNA, 20 bp, synthetic construct
  source 1..20: mol_type = other DNA
ggttgaaagtttatataatc

SEQ ID NO: 76235 - DNA, 20 bp, synthetic construct
  source 1..20: mol_type = other DNA
tggttgaaagtttatataat

SEQ ID NO: 76236 - DNA, 20 bp, synthetic construct
  source 1..20: mol_type = other DNA
ttggttgaaagtttatataa

SEQ ID NO: 76237 - DNA, 20 bp, synthetic construct
  source 1..20: mol_type = other DNA
tttggttgaaagtttatata

SEQ ID NO: 76238 - DNA, 20 bp, synthetic construct
  source 1..20: mol_type = other DNA
ttttggttgaaagtttatat

SEQ ID NO: 76239 - DNA, 20 bp, synthetic construct
  source 1..20: mol_type = other DNA
gttttggttgaaagtttata

SEQ ID NO: 76240 - DNA, 20 bp, synthetic construct
  source 1..20: mol_type = other DNA
ggttttggttgaaagtttat

SEQ ID NO: 76241 - DNA, 20 bp, synthetic construct
  source 1..20: mol_type = other DNA
tggttttggttgaaagttta

SEQ ID NO: 76242 - DNA, 20 bp, synthetic construct
  source 1..20: mol_type = other DNA
atggttttggttgaaagttt

SEQ ID NO: 76243 - DNA, 20 bp, synthetic construct
  source 1..20: mol_type = other DNA
aatggttttggttgaaagtt

SEQ ID NO: 76244 - DNA, 20 bp, synthetic construct
  source 1..20: mol_type = other DNA
gaatggttttggttgaaagt

SEQ ID NO: 76245 - DNA, 20 bp, synthetic construct
  source 1..20: mol_type = other DNA
agaatggttttggttgaaag

SEQ ID NO: 76246 - DNA, 20 bp, synthetic construct
  source 1..20: mol_type = other DNA
aagaatggttttggttgaaa

SEQ ID NO: 76247 - DNA, 20 bp, synthetic construct
  source 1..20: mol_type = other DNA
aaagaatggttttggttgaa

SEQ ID NO: 76248 - DNA, 20 bp, synthetic construct
  source 1..20: mol_type = other DNA
caaagaatggttttggttga

SEQ ID NO: 76249 - DNA, 20 bp, synthetic construct
  source 1..20: mol_type = other DNA
gcaaagaatggttttggttg

SEQ ID NO: 76250 - DNA, 20 bp, synthetic construct
  source 1..20: mol_type = other DNA
tgcaaagaatggttttggtt

SEQ ID NO: 76251 - DNA, 20 bp, synthetic construct
  source 1..20: mol_type = other DNA
ctgcaaagaatggttttggt

SEQ ID NO: 76252 - DNA, 20 bp, synthetic construct
  source 1..20: mol_type = other DNA
tctgcaaagaatggttttgg

SEQ ID NO: 76253 - DNA, 20 bp, synthetic construct
  source 1..20: mol_type = other DNA
atctgcaaagaatggttttg

SEQ ID NO: 76254 - DNA, 20 bp, synthetic construct
  source 1..20: mol_type = other DNA
catctgcaaagaatggtttt

SEQ ID NO: 76255 - DNA, 20 bp, synthetic construct
  source 1..20: mol_type = other DNA
gcatctgcaaagaatggttt

SEQ ID NO: 76256 - DNA, 20 bp, synthetic construct
  source 1..20: mol_type = other DNA
agcatctgcaaagaatggtt

SEQ ID NO: 76257 - DNA, 20 bp, synthetic construct
  source 1..20: mol_type = other DNA
aagcatctgcaaagaatggt

SEQ ID NO: 76258 - DNA, 20 bp, synthetic construct
  source 1..20: mol_type = other DNA
aaagcatctgcaaagaatgg

SEQ ID NO: 76259 - DNA, 20 bp, synthetic construct
  source 1..20: mol_type = other DNA
aaaagcatctgcaaagaatg

SEQ ID NO: 76260 - DNA, 20 bp, synthetic construct
  source 1..20: mol_type = other DNA
taaaagcatctgcaaagaat

SEQ ID NO: 76261 - DNA, 20 bp, synthetic construct
  source 1..20: mol_type = other DNA
gtaaaagcatctgcaaagaa

SEQ ID NO: 76262 - DNA, 20 bp, synthetic construct
  source 1..20: mol_type = other DNA
agtaaaagcatctgcaaaga

SEQ ID NO: 76263 - DNA, 20 bp, synthetic construct
  source 1..20: mol_type = other DNA
cagtaaaagcatctgcaaag

SEQ ID NO: 76264 - DNA, 20 bp, synthetic construct
  source 1..20: mol_type = other DNA
tcagtaaaagcatctgcaaa

SEQ ID NO: 76265 - DNA, 20 bp, synthetic construct
  source 1..20: mol_type = other DNA
gtcagtaaaagcatctgcaa

SEQ ID NO: 76266 - DNA, 20 bp, synthetic construct
  source 1..20: mol_type = other DNA
agtcagtaaaagcatctgca

SEQ ID NO: 76267 - DNA, 20 bp, synthetic construct
  source 1..20: mol_type = other DNA
gagtcagtaaaagcatctgc

SEQ ID NO: 76268 - DNA, 20 bp, synthetic construct
  source 1..20: mol_type = other DNA
agagtcagtaaaagcatctg

SEQ ID NO: 76269 - DNA, 20 bp, synthetic construct
  source 1..20: mol_type = other DNA
cagagtcagtaaaagcatct

SEQ ID NO: 76270 - DNA, 20 bp, synthetic construct
  source 1..20: mol_type = other DNA
gcagagtcagtaaaagcatc

SEQ ID NO: 76271 - DNA, 20 bp, synthetic construct
  source 1..20: mol_type = other DNA
agcagagtcagtaaaagcat

SEQ ID NO: 76272 - DNA, 20 bp, synthetic construct
  source 1..20: mol_type = other DNA
tagcagagtcagtaaaagca

SEQ ID NO: 76273 - DNA, 20 bp, synthetic construct
  source 1..20: mol_type = other DNA
atagcagagtcagtaaaagc

SEQ ID NO: 76274 - DNA, 20 bp, synthetic construct
  source 1..20: mol_type = other DNA
gatagcagagtcagtaaaag

SEQ ID NO: 76275 - DNA, 20 bp, synthetic construct
  source 1..20: mol_type = other DNA
tgatagcagagtcagtaaaa

SEQ ID NO: 76276 - DNA, 20 bp, synthetic construct
  source 1..20: mol_type = other DNA
ctgatagcagagtcagtaaa

SEQ ID NO: 76277 - DNA, 20 bp, synthetic construct
  source 1..20: mol_type = other DNA
actgatagcagagtcagtaa

SEQ ID NO: 76278 - DNA, 20 bp, synthetic construct
  source 1..20: mol_type = other DNA
cactgatagcagagtcagta

SEQ ID NO: 76279 - DNA, 20 bp, synthetic construct
  source 1..20: mol_type = other DNA
gcactgatagcagagtcagt

SEQ ID NO: 76280 - DNA, 20 bp, synthetic construct
  source 1..20: mol_type = other DNA
agcactgatagcagagtcag

SEQ ID NO: 76281 - DNA, 20 bp, synthetic construct
  source 1..20: mol_type = other DNA
tagcactgatagcagagtca

SEQ ID NO: 76282 - DNA, 20 bp, synthetic construct
  source 1..20: mol_type = other DNA
ttagcactgatagcagagtc

SEQ ID NO: 76283 - DNA, 20 bp, synthetic construct
  source 1..20: mol_type = other DNA
tttagcactgatagcagagt

SEQ ID NO: 76284 - DNA, 20 bp, synthetic construct
  source 1..20: mol_type = other DNA
ctttagcactgatagcagag

SEQ ID NO: 76285 - DNA, 20 bp, synthetic construct
  source 1..20: mol_type = other DNA
actttagcactgatagcaga

SEQ ID NO: 76286 - DNA, 20 bp, synthetic construct
  source 1..20: mol_type = other DNA
cactttagcactgatagcag

SEQ ID NO: 76287 - DNA, 20 bp, synthetic construct
  source 1..20: mol_type = other DNA
tcactttagcactgatagca

SEQ ID NO: 76288 - DNA, 20 bp, synthetic construct
  source 1..20: mol_type = other DNA
ttcactttagcactgatagc

SEQ ID NO: 76289 - DNA, 20 bp, synthetic construct
  source 1..20: mol_type = other DNA
attcactttagcactgatag

SEQ ID NO: 76290 - DNA, 20 bp, synthetic construct
  source 1..20: mol_type = other DNA
cattcactttagcactgata

SEQ ID NO: 76291 - DNA, 20 bp, synthetic construct
  source 1..20: mol_type = other DNA
ccattcactttagcactgat

SEQ ID NO: 76292 - DNA, 20 bp, synthetic construct
  source 1..20: mol_type = other DNA
gccattcactttagcactga

SEQ ID NO: 76293 - DNA, 20 bp, synthetic construct
  source 1..20: mol_type = other DNA
cgccattcactttagcactg

SEQ ID NO: 76294 - DNA, 20 bp, synthetic construct
  source 1..20: mol_type = other DNA
tcgccattcactttagcact

SEQ ID NO: 76295 - DNA, 20 bp, synthetic construct
  source 1..20: mol_type = other DNA
ttcgccattcactttagcac

SEQ ID NO: 76296 - DNA, 20 bp, synthetic construct
  source 1..20: mol_type = other DNA
gttcgccattcactttagca

SEQ ID NO: 76297 - DNA, 20 bp, synthetic construct
  source 1..20: mol_type = other DNA
tgttcgccattcactttagc

SEQ ID NO: 76298 - DNA, 20 bp, synthetic construct
  source 1..20: mol_type = other DNA
gtgttcgccattcactttag

SEQ ID NO: 76299 - DNA, 20 bp, synthetic construct
  source 1..20: mol_type = other DNA
tgtgttcgccattcacttta

SEQ ID NO: 76300 - DNA, 20 bp, synthetic construct
  source 1..20: mol_type = other DNA
ttgtgttcgccattcacttt

SEQ ID NO: 76301 - DNA, 20 bp, synthetic construct
  source 1..20: mol_type = other DNA
tttgtgttcgccattcactt

SEQ ID NO: 76302 - DNA, 20 bp, synthetic construct
  source 1..20: mol_type = other DNA
ctttgtgttcgccattcact

SEQ ID NO: 76303 - DNA, 20 bp, synthetic construct
  source 1..20: mol_type = other DNA
tctttgtgttcgccattcac

SEQ ID NO: 76304 - DNA, 20 bp, synthetic construct
  source 1..20: mol_type = other DNA
ctctttgtgttcgccattca

SEQ ID NO: 76305 - DNA, 20 bp, synthetic construct
  source 1..20: mol_type = other DNA
tctctttgtgttcgccattc

SEQ ID NO: 76306 - DNA, 20 bp, synthetic construct
  source 1..20: mol_type = other DNA
ttctctttgtgttcgccatt

SEQ ID NO: 76307 - DNA, 20 bp, synthetic construct
  source 1..20: mol_type = other DNA
cttctctttgtgttcgccat

SEQ ID NO: 76308 - DNA, 20 bp, synthetic construct
  source 1..20: mol_type = other DNA
ccttctctttgtgttcgcca

SEQ ID NO: 76309 - DNA, 20 bp, synthetic construct
  source 1..20: mol_type = other DNA
tccttctctttgtgttcgcc

SEQ ID NO: 76310 - DNA, 20 bp, synthetic construct
  source 1..20: mol_type = other DNA
gtccttctctttgtgttcgc

SEQ ID NO: 76311 - DNA, 20 bp, synthetic construct
  source 1..20: mol_type = other DNA
ggtccttctctttgtgttcg

SEQ ID NO: 76312 - DNA, 20 bp, synthetic construct
  source 1..20: mol_type = other DNA
aggtccttctctttgtgttc

SEQ ID NO: 76313 - DNA, 20 bp, synthetic construct
  source 1..20: mol_type = other DNA
caggtccttctctttgtgtt

SEQ ID NO: 76314 - DNA, 20 bp, synthetic construct
  source 1..20: mol_type = other DNA
ccaggtccttctctttgtgt

SEQ ID NO: 76315 - DNA, 20 bp, synthetic construct
  source 1..20: mol_type = other DNA
tccaggtccttctctttgtg

SEQ ID NO: 76316 - DNA, 20 bp, synthetic construct
  source 1..20: mol_type = other DNA
ctccaggtccttctctttgt

SEQ ID NO: 76317 - DNA, 20 bp, synthetic construct
  source 1..20: mol_type = other DNA
gctccaggtccttctctttg

SEQ ID NO: 76318 - DNA, 20 bp, synthetic construct
  source 1..20: mol_type = other DNA
ggctccaggtccttctcttt

SEQ ID NO: 76319 - DNA, 20 bp, synthetic construct
  source 1..20: mol_type = other DNA
gggctccaggtccttctctt

SEQ ID NO: 76320 - DNA, 20 bp, synthetic construct
  source 1..20: mol_type = other DNA
agggctccaggtccttctct

SEQ ID NO: 76321 - DNA, 20 bp, synthetic construct
  source 1..20: mol_type = other DNA
cagggctccaggtccttctc

SEQ ID NO: 76322 - DNA, 20 bp, synthetic construct
  source 1..20: mol_type = other DNA
ccagggctccaggtccttct

SEQ ID NO: 76323 - DNA, 20 bp, synthetic construct
  source 1..20: mol_type = other DNA
cccagggctccaggtccttc

SEQ ID NO: 76324 - DNA, 20 bp, synthetic construct
  source 1..20: mol_type = other DNA
tcccagggctccaggtcctt

SEQ ID NO: 76325 - DNA, 20 bp, synthetic construct
  source 1..20: mol_type = other DNA
atcccagggctccaggtcct

SEQ ID NO: 76326 - DNA, 20 bp, synthetic construct
  source 1..20: mol_type = other DNA
catcccagggctccaggtcc

SEQ ID NO: 76327 - DNA, 20 bp, synthetic construct
  source 1..20: mol_type = other DNA
gcatcccagggctccaggtc

SEQ ID NO: 76328 - DNA, 20 bp, synthetic construct
  source 1..20: mol_type = other DNA
tgcatcccagggctccaggt

SEQ ID NO: 76329 - DNA, 20 bp, synthetic construct
  source 1..20: mol_type = other DNA
ctgcatcccagggctccagg

SEQ ID NO: 76330 - DNA, 20 bp, synthetic construct
  source 1..20: mol_type = other DNA
cctgcatcccagggctccag

SEQ ID NO: 76331 - DNA, 20 bp, synthetic construct
  source 1..20: mol_type = other DNA
acctgcatcccagggctcca

SEQ ID NO: 76332 - DNA, 20 bp, synthetic construct
  source 1..20: mol_type = other DNA
cacctgcatcccagggctcc

SEQ ID NO: 76333 - DNA, 20 bp, synthetic construct
  source 1..20: mol_type = other DNA
tcacctgcatcccagggctc

SEQ ID NO: 76334 - DNA, 20 bp, synthetic construct
  source 1..20: mol_type = other DNA
ttcacctgcatcccagggct

SEQ ID NO: 76335 - DNA, 20 bp, synthetic construct
  source 1..20: mol_type = other DNA
gttcacctgcatcccagggc

SEQ ID NO: 76336 - DNA, 20 bp, synthetic construct
  source 1..20: mol_type = other DNA
agttcacctgcatcccaggg

SEQ ID NO: 76337 - DNA, 20 bp, synthetic construct
  source 1..20: mol_type = other DNA
gagttcacctgcatcccagg

SEQ ID NO: 76338 - DNA, 20 bp, synthetic construct
  source 1..20: mol_type = other DNA
tgagttcacctgcatcccag

SEQ ID NO: 76339 - DNA, 20 bp, synthetic construct
  source 1..20: mol_type = other DNA
gtgagttcacctgcatccca

SEQ ID NO: 76340 - DNA, 20 bp, synthetic construct
  source 1..20: mol_type = other DNA
tgtgagttcacctgcatccc

SEQ ID NO: 76341 - DNA, 20 bp, synthetic construct
  source 1..20: mol_type = other DNA
ctgtgagttcacctgcatcc

SEQ ID NO: 76342 - DNA, 20 bp, synthetic construct
  source 1..20: mol_type = other DNA
gctgtgagttcacctgcatc

SEQ ID NO: 76343 - DNA, 20 bp, synthetic construct
  source 1..20: mol_type = other DNA
ggctgtgagttcacctgcat

SEQ ID NO: 76344 - DNA, 20 bp, synthetic construct
  source 1..20: mol_type = other DNA
tggctgtgagttcacctgca

SEQ ID NO: 76345 - DNA, 20 bp, synthetic construct
  source 1..20: mol_type = other DNA
ttggctgtgagttcacctgc

SEQ ID NO: 76346 - DNA, 20 bp, synthetic construct
  source 1..20: mol_type = other DNA
attggctgtgagttcacctg

SEQ ID NO: 76347 - DNA, 20 bp, synthetic construct
  source 1..20: mol_type = other DNA
cattggctgtgagttcacct

SEQ ID NO: 76348 - DNA, 20 bp, synthetic construct
  source 1..20: mol_type = other DNA
tcattggctgtgagttcacc

SEQ ID NO: 76349 - DNA, 20 bp, synthetic construct
  source 1..20: mol_type = other DNA
ctcattggctgtgagttcac

SEQ ID NO: 76350 - DNA, 20 bp, synthetic construct
  source 1..20: mol_type = other DNA
cctcattggctgtgagttca

SEQ ID NO: 76351 - DNA, 20 bp, synthetic construct
  source 1..20: mol_type = other DNA
tcctcattggctgtgagttc

SEQ ID NO: 76352 - DNA, 20 bp, synthetic construct
  source 1..20: mol_type = other DNA
ttcctcattggctgtgagtt

SEQ ID NO: 76353 - DNA, 20 bp, synthetic construct
  source 1..20: mol_type = other DNA
gttcctcattggctgtgagt

SEQ ID NO: 76354 - DNA, 20 bp, synthetic construct
  source 1..20: mol_type = other DNA
agttcctcattggctgtgag

SEQ ID NO: 76355 - DNA, 20 bp, synthetic construct
  source 1..20: mol_type = other DNA
aagttcctcattggctgtga

SEQ ID NO: 76356 - DNA, 20 bp, synthetic construct
  source 1..20: mol_type = other DNA
caagttcctcattggctgtg

SEQ ID NO: 76357 - DNA, 20 bp, synthetic construct
  source 1..20: mol_type = other DNA
tcaagttcctcattggctgt

SEQ ID NO: 76358 - DNA, 20 bp, synthetic construct
  source 1..20: mol_type = other DNA
ctcaagttcctcattggctg

SEQ ID NO: 76359 - DNA, 20 bp, synthetic construct
  source 1..20: mol_type = other DNA
cctcaagttcctcattggct

SEQ ID NO: 76360 - DNA, 20 bp, synthetic construct
  source 1..20: mol_type = other DNA
gcctcaagttcctcattggc

SEQ ID NO: 76361 - DNA, 20 bp, synthetic construct
  source 1..20: mol_type = other DNA
agcctcaagttcctcattgg

SEQ ID NO: 76362 - DNA, 20 bp, synthetic construct
  source 1..20: mol_type = other DNA
aagcctcaagttcctcattg

SEQ ID NO: 76363 - DNA, 20 bp, synthetic construct
  source 1..20: mol_type = other DNA
aaagcctcaagttcctcatt

SEQ ID NO: 76364 - DNA, 20 bp, synthetic construct
  source 1..20: mol_type = other DNA
caaagcctcaagttcctcat

SEQ ID NO: 76365 - DNA, 20 bp, synthetic construct
  source 1..20: mol_type = other DNA
ccaaagcctcaagttcctca

SEQ ID NO: 76366 - DNA, 20 bp, synthetic construct
  source 1..20: mol_type = other DNA
tccaaagcctcaagttcctc

SEQ ID NO: 76367 - DNA, 20 bp, synthetic construct
  source 1..20: mol_type = other DNA
ttccaaagcctcaagttcct

SEQ ID NO: 76368 - DNA, 20 bp, synthetic construct
  source 1..20: mol_type = other DNA
tttccaaagcctcaagttcc

SEQ ID NO: 76369 - DNA, 20 bp, synthetic construct
  source 1..20: mol_type = other DNA
ttttccaaagcctcaagttc

SEQ ID NO: 76370 - DNA, 20 bp, synthetic construct
  source 1..20: mol_type = other DNA
attttccaaagcctcaagtt

SEQ ID NO: 76371 - DNA, 20 bp, synthetic construct
  source 1..20: mol_type = other DNA
cattttccaaagcctcaagt

SEQ ID NO: 76372 - DNA, 20 bp, synthetic construct
  source 1..20: mol_type = other DNA
tcattttccaaagcctcaag

SEQ ID NO: 76373 - DNA, 20 bp, synthetic construct
  source 1..20: mol_type = other DNA
gtcattttccaaagcctcaa

SEQ ID NO: 76374 - DNA, 20 bp, synthetic construct
  source 1..20: mol_type = other DNA
cgtcattttccaaagcctca

SEQ ID NO: 76375 - DNA, 20 bp, synthetic construct
  source 1..20: mol_type = other DNA
acgtcattttccaaagcctc

SEQ ID NO: 76376 - DNA, 20 bp, synthetic construct
  source 1..20: mol_type = other DNA
tacgtcattttccaaagcct

SEQ ID NO: 76377 - DNA, 20 bp, synthetic construct
  source 1..20: mol_type = other DNA
ctacgtcattttccaaagcc

SEQ ID NO: 76378 - DNA, 20 bp, synthetic construct
  source 1..20: mol_type = other DNA
actacgtcattttccaaagc

SEQ ID NO: 76379 - DNA, 20 bp, synthetic construct
  source 1..20: mol_type = other DNA
tactacgtcattttccaaag

SEQ ID NO: 76380 - DNA, 20 bp, synthetic construct
  source 1..20: mol_type = other DNA
ttactacgtcattttccaaa

SEQ ID NO: 76381 - DNA, 20 bp, synthetic construct
  source 1..20: mol_type = other DNA
cttactacgtcattttccaa

SEQ ID NO: 76382 - DNA, 20 bp, synthetic construct
  source 1..20: mol_type = other DNA
acttactacgtcattttcca

SEQ ID NO: 76383 - DNA, 20 bp, synthetic construct
  source 1..20: mol_type = other DNA
tacttactacgtcattttcc

SEQ ID NO: 76384 - DNA, 20 bp, synthetic construct
  source 1..20: mol_type = other DNA
ttacttactacgtcattttc

SEQ ID NO: 76385 - DNA, 20 bp, synthetic construct
  source 1..20: mol_type = other DNA
gttacttactacgtcatttt

SEQ ID NO: 76386 - DNA, 20 bp, synthetic construct
  source 1..20: mol_type = other DNA
tgttacttactacgtcattt

SEQ ID NO: 76387 - DNA, 20 bp, synthetic construct
  source 1..20: mol_type = other DNA
atgttacttactacgtcatt

SEQ ID NO: 76388 - DNA, 20 bp, synthetic construct
  source 1..20: mol_type = other DNA
gatgttacttactacgtcat

SEQ ID NO: 76389 - DNA, 20 bp, synthetic construct
  source 1..20: mol_type = other DNA
agatgttacttactacgtca

SEQ ID NO: 76390 - DNA, 20 bp, synthetic construct
  source 1..20: mol_type = other DNA
aagatgttacttactacgtc

SEQ ID NO: 76391 - DNA, 20 bp, synthetic construct
  source 1..20: mol_type = other DNA
aaagatgttacttactacgt

SEQ ID NO: 76392 - DNA, 20 bp, synthetic construct
  source 1..20: mol_type = other DNA
caaagatgttacttactacg

SEQ ID NO: 76393 - DNA, 20 bp, synthetic construct
  source 1..20: mol_type = other DNA
acaaagatgttacttactac

SEQ ID NO: 76394 - DNA, 20 bp, synthetic construct
  source 1..20: mol_type = other DNA
tacaaagatgttacttacta

SEQ ID NO: 76395 - DNA, 20 bp, synthetic construct
  source 1..20: mol_type = other DNA
ttacaaagatgttacttact

SEQ ID NO: 76396 - DNA, 20 bp, synthetic construct
  source 1..20: mol_type = other DNA
attacaaagatgttacttac

SEQ ID NO: 76397 - DNA, 20 bp, synthetic construct
  source 1..20: mol_type = other DNA
aattacaaagatgttactta

SEQ ID NO: 76398 - DNA, 20 bp, synthetic construct
  source 1..20: mol_type = other DNA
taattacaaagatgttactt

SEQ ID NO: 76399 - DNA, 20 bp, synthetic construct
  source 1..20: mol_type = other DNA
ataattacaaagatgttact

SEQ ID NO: 76400 - DNA, 20 bp, synthetic construct
  source 1..20: mol_type = other DNA
aataattacaaagatgttac

SEQ ID NO: 76401 - DNA, 20 bp, synthetic construct
  source 1..20: mol_type = other DNA
caataattacaaagatgtta

SEQ ID NO: 76402 - DNA, 20 bp, synthetic construct
  source 1..20: mol_type = other DNA
gcaataattacaaagatgtt

SEQ ID NO: 76403 - DNA, 20 bp, synthetic construct
  source 1..20: mol_type = other DNA
agcaataattacaaagatgt

SEQ ID NO: 76404 - DNA, 20 bp, synthetic construct
  source 1..20: mol_type = other DNA
tagcaataattacaaagatg

SEQ ID NO: 76405 - DNA, 20 bp, synthetic construct
  source 1..20: mol_type = other DNA
ctagcaataattacaaagat

SEQ ID NO: 76406 - DNA, 20 bp, synthetic construct
  source 1..20: mol_type = other DNA
tctagcaataattacaaaga

SEQ ID NO: 76407 - DNA, 20 bp, synthetic construct
  source 1..20: mol_type = other DNA
gtctagcaataattacaaag

SEQ ID NO: 76408 - DNA, 20 bp, synthetic construct
  source 1..20: mol_type = other DNA
agtctagcaataattacaaa

SEQ ID NO: 76409 - DNA, 20 bp, synthetic construct
  source 1..20: mol_type = other DNA
gagtctagcaataattacaa

SEQ ID NO: 76410 - DNA, 20 bp, synthetic construct
  source 1..20: mol_type = other DNA
agagtctagcaataattaca

SEQ ID NO: 76411 - DNA, 20 bp, synthetic construct
  source 1..20: mol_type = other DNA
cagagtctagcaataattac

SEQ ID NO: 76412 - DNA, 20 bp, synthetic construct
  source 1..20: mol_type = other DNA
ccagagtctagcaataatta

SEQ ID NO: 76413 - DNA, 20 bp, synthetic construct
  source 1..20: mol_type = other DNA
accagagtctagcaataatt

SEQ ID NO: 76414 - DNA, 20 bp, synthetic construct
  source 1..20: mol_type = other DNA
gaccagagtctagcaataat

SEQ ID NO: 76415 - DNA, 20 bp, synthetic construct
  source 1..20: mol_type = other DNA
tgaccagagtctagcaataa

SEQ ID NO: 76416 - DNA, 20 bp, synthetic construct
  source 1..20: mol_type = other DNA
ctgaccagagtctagcaata

SEQ ID NO: 76417 - DNA, 20 bp, synthetic construct
  source 1..20: mol_type = other DNA
actgaccagagtctagcaat

SEQ ID NO: 76418 - DNA, 20 bp, synthetic construct
  source 1..20: mol_type = other DNA
tactgaccagagtctagcaa

SEQ ID NO: 76419 - DNA, 20 bp, synthetic construct
  source 1..20: mol_type = other DNA
atactgaccagagtctagca

SEQ ID NO: 76420 - DNA, 20 bp, synthetic construct
  source 1..20: mol_type = other DNA
catactgaccagagtctagc

SEQ ID NO: 76421 - DNA, 20 bp, synthetic construct
  source 1..20: mol_type = other DNA
tcatactgaccagagtctag

SEQ ID NO: 76422 - DNA, 20 bp, synthetic construct
  source 1..20: mol_type = other DNA
gtcatactgaccagagtcta

SEQ ID NO: 76423 - DNA, 20 bp, synthetic construct
  source 1..20: mol_type = other DNA
tgtcatactgaccagagtct

SEQ ID NO: 76424 - DNA, 20 bp, synthetic construct
  source 1..20: mol_type = other DNA
atgtcatactgaccagagtc

SEQ ID NO: 76425 - DNA, 20 bp, synthetic construct
  source 1..20: mol_type = other DNA
gatgtcatactgaccagagt

SEQ ID NO: 76426 - DNA, 20 bp, synthetic construct
  source 1..20: mol_type = other DNA
ggatgtcatactgaccagag

SEQ ID NO: 76427 - DNA, 20 bp, synthetic construct
  source 1..20: mol_type = other DNA
aggatgtcatactgaccaga

SEQ ID NO: 76428 - DNA, 20 bp, synthetic construct
  source 1..20: mol_type = other DNA
caggatgtcatactgaccag

SEQ ID NO: 76429 - DNA, 20 bp, synthetic construct
  source 1..20: mol_type = other DNA
acaggatgtcatactgacca

SEQ ID NO: 76430 - DNA, 20 bp, synthetic construct
  source 1..20: mol_type = other DNA
gacaggatgtcatactgacc

SEQ ID NO: 76431 - DNA, 20 bp, synthetic construct
  source 1..20: mol_type = other DNA
tgacaggatgtcatactgac

SEQ ID NO: 76432 - DNA, 20 bp, synthetic construct
  source 1..20: mol_type = other DNA
gtgacaggatgtcatactga

SEQ ID NO: 76433 - DNA, 20 bp, synthetic construct
  source 1..20: mol_type = other DNA
agtgacaggatgtcatactg

SEQ ID NO: 76434 - DNA, 20 bp, synthetic construct
  source 1..20: mol_type = other DNA
aagtgacaggatgtcatact

SEQ ID NO: 76435 - DNA, 20 bp, synthetic construct
  source 1..20: mol_type = other DNA
caagtgacaggatgtcatac

SEQ ID NO: 76436 - DNA, 20 bp, synthetic construct
  source 1..20: mol_type = other DNA
ccaagtgacaggatgtcata

SEQ ID NO: 76437 - DNA, 20 bp, synthetic construct
  source 1..20: mol_type = other DNA
accaagtgacaggatgtcat

SEQ ID NO: 76438 - DNA, 20 bp, synthetic construct
  source 1..20: mol_type = other DNA
aaccaagtgacaggatgtca

SEQ ID NO: 76439 - DNA, 20 bp, synthetic construct
  source 1..20: mol_type = other DNA
caaccaagtgacaggatgtc

SEQ ID NO: 76440 - DNA, 20 bp, synthetic construct
  source 1..20: mol_type = other DNA
acaaccaagtgacaggatgt

SEQ ID NO: 76441 - DNA, 20 bp, synthetic construct
  source 1..20: mol_type = other DNA
tacaaccaagtgacaggatg

SEQ ID NO: 76442 - DNA, 20 bp, synthetic construct
  source 1..20: mol_type = other DNA
ttacaaccaagtgacaggat

SEQ ID NO: 76443 - DNA, 20 bp, synthetic construct
  source 1..20: mol_type = other DNA
attacaaccaagtgacagga

SEQ ID NO: 76444 - DNA, 20 bp, synthetic construct
  source 1..20: mol_type = other DNA
aattacaaccaagtgacagg

SEQ ID NO: 76445 - DNA, 20 bp, synthetic construct
  source 1..20: mol_type = other DNA
aaattacaaccaagtgacag

SEQ ID NO: 76446 - DNA, 20 bp, synthetic construct
  source 1..20: mol_type = other DNA
taaattacaaccaagtgaca

SEQ ID NO: 76447 - DNA, 20 bp, synthetic construct
  source 1..20: mol_type = other DNA
ttaaattacaaccaagtgac

SEQ ID NO: 76448 - DNA, 20 bp, synthetic construct
  source 1..20: mol_type = other DNA
tttaaattacaaccaagtga

SEQ ID NO: 76449 - DNA, 20 bp, synthetic construct
  source 1..20: mol_type = other DNA
atttaaattacaaccaagtg

SEQ ID NO: 76450 - DNA, 20 bp, synthetic construct
  source 1..20: mol_type = other DNA
catttaaattacaaccaagt

SEQ ID NO: 76451 - DNA, 20 bp, synthetic construct
  source 1..20: mol_type = other DNA
acatttaaattacaaccaag

SEQ ID NO: 76452 - DNA, 20 bp, synthetic construct
  source 1..20: mol_type = other DNA
cacatttaaattacaaccaa

SEQ ID NO: 76453 - DNA, 20 bp, synthetic construct
  source 1..20: mol_type = other DNA
gcacatttaaattacaacca

SEQ ID NO: 76454 - DNA, 20 bp, synthetic construct
  source 1..20: mol_type = other DNA
agcacatttaaattacaacc

SEQ ID NO: 76455 - DNA, 20 bp, synthetic construct
  source 1..20: mol_type = other DNA
aagcacatttaaattacaac

SEQ ID NO: 76456 - DNA, 20 bp, synthetic construct
  source 1..20: mol_type = other DNA
aaagcacatttaaattacaa

SEQ ID NO: 76457 - DNA, 20 bp, synthetic construct
  source 1..20: mol_type = other DNA
aaaagcacatttaaattaca

SEQ ID NO: 76458 - DNA, 20 bp, synthetic construct
  source 1..20: mol_type = other DNA
caaaagcacatttaaattac

SEQ ID NO: 76459 - DNA, 20 bp, synthetic construct
  source 1..20: mol_type = other DNA
acaaaagcacatttaaatta

SEQ ID NO: 76460 - DNA, 20 bp, synthetic construct
  source 1..20: mol_type = other DNA
aacaaaagcacatttaaatt

SEQ ID NO: 76461 - DNA, 20 bp, synthetic construct
  source 1..20: mol_type = other DNA
caacaaaagcacatttaaat

SEQ ID NO: 76462 - DNA, 20 bp, synthetic construct
  source 1..20: mol_type = other DNA
acaacaaaagcacatttaaa

SEQ ID NO: 76463 - DNA, 20 bp, synthetic construct
  source 1..20: mol_type = other DNA
aacaacaaaagcacatttaa

SEQ ID NO: 76464 - DNA, 20 bp, synthetic construct
  source 1..20: mol_type = other DNA
caacaacaaaagcacattta

SEQ ID NO: 76465 - DNA, 20 bp, synthetic construct
  source 1..20: mol_type = other DNA
acaacaacaaaagcacattt

SEQ ID NO: 76466 - DNA, 20 bp, synthetic construct
  source 1..20: mol_type = other DNA
aacaacaacaaaagcacatt

SEQ ID NO: 76467 - DNA, 20 bp, synthetic construct
  source 1..20: mol_type = other DNA
caacaacaacaaaagcacat

SEQ ID NO: 76468 - DNA, 20 bp, synthetic construct
  source 1..20: mol_type = other DNA
acaacaacaacaaaagcaca

SEQ ID NO: 76469 - DNA, 20 bp, synthetic construct
  source 1..20: mol_type = other DNA
aacaacaacaacaaaagcac

SEQ ID NO: 76470 - DNA, 20 bp, synthetic construct
  source 1..20: mol_type = other DNA
taacaacaacaacaaaagca

SEQ ID NO: 76471 - DNA, 20 bp, synthetic construct
  source 1..20: mol_type = other DNA
ataacaacaacaacaaaagc

SEQ ID NO: 76472 - DNA, 20 bp, synthetic construct
  source 1..20: mol_type = other DNA
aataacaacaacaacaaaag

SEQ ID NO: 76473 - DNA, 20 bp, synthetic construct
  source 1..20: mol_type = other DNA
caataacaacaacaacaaaa

SEQ ID NO: 76474 - DNA, 20 bp, synthetic construct
  source 1..20: mol_type = other DNA
acaataacaacaacaacaaa

SEQ ID NO: 76475 - DNA, 20 bp, synthetic construct
  source 1..20: mol_type = other DNA
tacaataacaacaacaacaa

SEQ ID NO: 76476 - DNA, 20 bp, synthetic construct
  source 1..20: mol_type = other DNA
ctacaataacaacaacaaca

SEQ ID NO: 76477 - DNA, 20 bp, synthetic construct
  source 1..20: mol_type = other DNA
actacaataacaacaacaac

SEQ ID NO: 76478 - DNA, 20 bp, synthetic construct
  source 1..20: mol_type = other DNA
cactacaataacaacaacaa

SEQ ID NO: 76479 - DNA, 20 bp, synthetic construct
  source 1..20: mol_type = other DNA
tcactacaataacaacaaca

SEQ ID NO: 76480 - DNA, 20 bp, synthetic construct
  source 1..20: mol_type = other DNA
ctcactacaataacaacaac

SEQ ID NO: 76481 - DNA, 20 bp, synthetic construct
  source 1..20: mol_type = other DNA
actcactacaataacaacaa

SEQ ID NO: 76482 - DNA, 20 bp, synthetic construct
  source 1..20: mol_type = other DNA
cactcactacaataacaaca

SEQ ID NO: 76483 - DNA, 20 bp, synthetic construct
  source 1..20: mol_type = other DNA
acactcactacaataacaac

SEQ ID NO: 76484 - DNA, 20 bp, synthetic construct
  source 1..20: mol_type = other DNA
tacactcactacaataacaa

SEQ ID NO: 76485 - DNA, 20 bp, synthetic construct
  source 1..20: mol_type = other DNA
atacactcactacaataaca

SEQ ID NO: 76486 - DNA, 20 bp, synthetic construct
  source 1..20: mol_type = other DNA
aatacactcactacaataac

SEQ ID NO: 76487 - DNA, 20 bp, synthetic construct
  source 1..20: mol_type = other DNA
aaatacactcactacaataa

SEQ ID NO: 76488 - DNA, 20 bp, synthetic construct
  source 1..20: mol_type = other DNA
taaatacactcactacaata

SEQ ID NO: 76489 - DNA, 20 bp, synthetic construct
  source 1..20: mol_type = other DNA
ctaaatacactcactacaat

SEQ ID NO: 76490 - DNA, 20 bp, synthetic construct
  source 1..20: mol_type = other DNA
tctaaatacactcactacaa

SEQ ID NO: 76491 - DNA, 20 bp, synthetic construct
  source 1..20: mol_type = other DNA
ctctaaatacactcactaca

SEQ ID NO: 76492 - DNA, 20 bp, synthetic construct
  source 1..20: mol_type = other DNA
gctctaaatacactcactac

SEQ ID NO: 76493 - DNA, 20 bp, synthetic construct
  source 1..20: mol_type = other DNA
tgctctaaatacactcacta

SEQ ID NO: 76494 - DNA, 20 bp, synthetic construct
  source 1..20: mol_type = other DNA
ctgctctaaatacactcact

SEQ ID NO: 76495 - DNA, 20 bp, synthetic construct
  source 1..20: mol_type = other DNA
gctgctctaaatacactcac

SEQ ID NO: 76496 - DNA, 20 bp, synthetic construct
  source 1..20: mol_type = other DNA
tgctgctctaaatacactca

SEQ ID NO: 76497 - DNA, 20 bp, synthetic construct
  source 1..20: mol_type = other DNA
ctgctgctctaaatacactc

SEQ ID NO: 76498 - DNA, 20 bp, synthetic construct
  source 1..20: mol_type = other DNA
cctgctgctctaaatacact

SEQ ID NO: 76499 - DNA, 20 bp, synthetic construct
  source 1..20: mol_type = other DNA
acctgctgctctaaatacac

SEQ ID NO: 76500 - DNA, 20 bp, synthetic construct
  source 1..20: mol_type = other DNA
aacctgctgctctaaataca

SEQ ID NO: 76501 - DNA, 20 bp, synthetic construct
  source 1..20: mol_type = other DNA
aaacctgctgctctaaatac

SEQ ID NO: 76502 - DNA, 20 bp, synthetic construct
  source 1..20: mol_type = other DNA
caaacctgctgctctaaata

SEQ ID NO: 76503 - DNA, 20 bp, synthetic construct
  source 1..20: mol_type = other DNA
acaaacctgctgctctaaat

SEQ ID NO: 76504 - DNA, 20 bp, synthetic construct
  source 1..20: mol_type = other DNA
aacaaacctgctgctctaaa

SEQ ID NO: 76505 - DNA, 20 bp, synthetic construct
  source 1..20: mol_type = other DNA
caacaaacctgctgctctaa

SEQ ID NO: 76506 - DNA, 20 bp, synthetic construct
  source 1..20: mol_type = other DNA
acaacaaacctgctgctcta

SEQ ID NO: 76507 - DNA, 20 bp, synthetic construct
  source 1..20: mol_type = other DNA
tacaacaaacctgctgctct

SEQ ID NO: 76508 - DNA, 20 bp, synthetic construct
  source 1..20: mol_type = other DNA
atacaacaaacctgctgctc

SEQ ID NO: 76509 - DNA, 20 bp, synthetic construct
  source 1..20: mol_type = other DNA
tatacaacaaacctgctgct

SEQ ID NO: 76510 - DNA, 20 bp, synthetic construct
  source 1..20: mol_type = other DNA
ttatacaacaaacctgctgc

SEQ ID NO: 76511 - DNA, 20 bp, synthetic construct
  source 1..20: mol_type = other DNA
gttatacaacaaacctgctg

SEQ ID NO: 76512 - DNA, 20 bp, synthetic construct
  source 1..20: mol_type = other DNA
agttatacaacaaacctgct

SEQ ID NO: 76513 - DNA, 20 bp, synthetic construct
  source 1..20: mol_type = other DNA
tagttatacaacaaacctgc

SEQ ID NO: 76514 - DNA, 20 bp, synthetic construct
  source 1..20: mol_type = other DNA
ctagttatacaacaaacctg

SEQ ID NO: 76515 - DNA, 20 bp, synthetic construct
  source 1..20: mol_type = other DNA
tctagttatacaacaaacct

SEQ ID NO: 76516 - DNA, 20 bp, synthetic construct
  source 1..20: mol_type = other DNA
ctctagttatacaacaaacc

SEQ ID NO: 76517 - DNA, 20 bp, synthetic construct
  source 1..20: mol_type = other DNA
tctctagttatacaacaaac

SEQ ID NO: 76518 - DNA, 20 bp, synthetic construct
  source 1..20: mol_type = other DNA
gtctctagttatacaacaaa

SEQ ID NO: 76519 - DNA, 20 bp, synthetic construct
  source 1..20: mol_type = other DNA
agtctctagttatacaacaa

SEQ ID NO: 76520 - DNA, 20 bp, synthetic construct
  source 1..20: mol_type = other DNA
aagtctctagttatacaaca

SEQ ID NO: 76521 - DNA, 20 bp, synthetic construct
  source 1..20: mol_type = other DNA
aaagtctctagttatacaac

SEQ ID NO: 76522 - DNA, 20 bp, synthetic construct
  source 1..20: mol_type = other DNA
gaaagtctctagttatacaa

SEQ ID NO: 76523 - DNA, 20 bp, synthetic construct
  source 1..20: mol_type = other DNA
agaaagtctctagttataca

SEQ ID NO: 76524 - DNA, 20 bp, synthetic construct
  source 1..20: mol_type = other DNA
gagaaagtctctagttatac

SEQ ID NO: 76525 - DNA, 20 bp, synthetic construct
  source 1..20: mol_type = other DNA
ggagaaagtctctagttata

SEQ ID NO: 76526 - DNA, 20 bp, synthetic construct
  source 1..20: mol_type = other DNA
gggagaaagtctctagttat

SEQ ID NO: 76527 - DNA, 20 bp, synthetic construct
  source 1..20: mol_type = other DNA
tgggagaaagtctctagtta

SEQ ID NO: 76528 - DNA, 20 bp, synthetic construct
  source 1..20: mol_type = other DNA
ttgggagaaagtctctagtt

SEQ ID NO: 76529 - DNA, 20 bp, synthetic construct
  source 1..20: mol_type = other DNA
cttgggagaaagtctctagt

SEQ ID NO: 76530 - DNA, 20 bp, synthetic construct
  source 1..20: mol_type = other DNA
gcttgggagaaagtctctag

SEQ ID NO: 76531 - DNA, 20 bp, synthetic construct
  source 1..20: mol_type = other DNA
tgcttgggagaaagtctcta

SEQ ID NO: 76532 - DNA, 20 bp, synthetic construct
  source 1..20: mol_type = other DNA
ttgcttgggagaaagtctct

SEQ ID NO: 76533 - DNA, 20 bp, synthetic construct
  source 1..20: mol_type = other DNA
attgcttgggagaaagtctc

SEQ ID NO: 76534 - DNA, 20 bp, synthetic construct
  source 1..20: mol_type = other DNA
tattgcttgggagaaagtct

SEQ ID NO: 76535 - DNA, 20 bp, synthetic construct
  source 1..20: mol_type = other DNA
atattgcttgggagaaagtc

SEQ ID NO: 76536 - DNA, 20 bp, synthetic construct
  source 1..20: mol_type = other DNA
tatattgcttgggagaaagt

SEQ ID NO: 76537 - DNA, 20 bp, synthetic construct
  source 1..20: mol_type = other DNA
atatattgcttgggagaaag

SEQ ID NO: 76538 - DNA, 20 bp, synthetic construct
  source 1..20: mol_type = other DNA
tatatattgcttgggagaaa

SEQ ID NO: 76539 - DNA, 20 bp, synthetic construct
  source 1..20: mol_type = other DNA
ttatatattgcttgggagaa

SEQ ID NO: 76540 - DNA, 20 bp, synthetic construct
  source 1..20: mol_type = other DNA
tttatatattgcttgggaga

SEQ ID NO: 76541 - DNA, 20 bp, synthetic construct
  source 1..20: mol_type = other DNA
ctttatatattgcttgggag

SEQ ID NO: 76542 - DNA, 20 bp, synthetic construct
  source 1..20: mol_type = other DNA
tctttatatattgcttggga

SEQ ID NO: 76543 - DNA, 20 bp, synthetic construct
  source 1..20: mol_type = other DNA
ttctttatatattgcttggg

SEQ ID NO: 76544 - DNA, 20 bp, synthetic construct
  source 1..20: mol_type = other DNA
tttctttatatattgcttgg

SEQ ID NO: 76545 - DNA, 20 bp, synthetic construct
  source 1..20: mol_type = other DNA
ttttctttatatattgcttg

SEQ ID NO: 76546 - DNA, 20 bp, synthetic construct
  source 1..20: mol_type = other DNA
tttttctttatatattgctt

SEQ ID NO: 76547 - DNA, 20 bp, synthetic construct
  source 1..20: mol_type = other DNA
atttttctttatatattgct

SEQ ID NO: 76548 - DNA, 20 bp, synthetic construct
  source 1..20: mol_type = other DNA
catttttctttatatattgc

SEQ ID NO: 76549 - DNA, 20 bp, synthetic construct
  source 1..20: mol_type = other DNA
acatttttctttatatattg

SEQ ID NO: 76550 - DNA, 20 bp, synthetic construct
  source 1..20: mol_type = other DNA
aacatttttctttatatatt

SEQ ID NO: 76551 - DNA, 20 bp, synthetic construct
  source 1..20: mol_type = other DNA
aaacatttttctttatatat

SEQ ID NO: 76552 - DNA, 20 bp, synthetic construct
  source 1..20: mol_type = other DNA
caaacatttttctttatata

SEQ ID NO: 76553 - DNA, 20 bp, synthetic construct
  source 1..20: mol_type = other DNA
acaaacatttttctttatat

SEQ ID NO: 76554 - DNA, 20 bp, synthetic construct
  source 1..20: mol_type = other DNA
gacaaacatttttctttata

SEQ ID NO: 76555 - DNA, 20 bp, synthetic construct
  source 1..20: mol_type = other DNA
tgacaaacatttttctttat

SEQ ID NO: 76556 - DNA, 20 bp, synthetic construct
  source 1..20: mol_type = other DNA
atgacaaacatttttcttta

SEQ ID NO: 76557 - DNA, 20 bp, synthetic construct
  source 1..20: mol_type = other DNA
aatgacaaacatttttcttt

SEQ ID NO: 76558 - DNA, 20 bp, synthetic construct
  source 1..20: mol_type = other DNA
aaatgacaaacatttttctt

SEQ ID NO: 76559 - DNA, 20 bp, synthetic construct
  source 1..20: mol_type = other DNA
aaaatgacaaacatttttct

SEQ ID NO: 76560 - DNA, 20 bp, synthetic construct
  source 1..20: mol_type = other DNA
taaaatgacaaacatttttc

SEQ ID NO: 76561 - DNA, 20 bp, synthetic construct
  source 1..20: mol_type = other DNA
gtaaaatgacaaacattttt

SEQ ID NO: 76562 - DNA, 20 bp, synthetic construct
  source 1..20: mol_type = other DNA
agtaaaatgacaaacatttt

SEQ ID NO: 76563 - DNA, 20 bp, synthetic construct
  source 1..20: mol_type = other DNA
aagtaaaatgacaaacattt

SEQ ID NO: 76564 - DNA, 20 bp, synthetic construct
  source 1..20: mol_type = other DNA
caagtaaaatgacaaacatt

SEQ ID NO: 76565 - DNA, 20 bp, synthetic construct
  source 1..20: mol_type = other DNA
acaagtaaaatgacaaacat

SEQ ID NO: 76566 - DNA, 20 bp, synthetic construct
  source 1..20: mol_type = other DNA
tacaagtaaaatgacaaaca

SEQ ID NO: 76567 - DNA, 20 bp, synthetic construct
  source 1..20: mol_type = other DNA
ctacaagtaaaatgacaaac

SEQ ID NO: 76568 - DNA, 20 bp, synthetic construct
  source 1..20: mol_type = other DNA
cctacaagtaaaatgacaaa

SEQ ID NO: 76569 - DNA, 20 bp, synthetic construct
  source 1..20: mol_type = other DNA
ccctacaagtaaaatgacaa

SEQ ID NO: 76570 - DNA, 20 bp, synthetic construct
  source 1..20: mol_type = other DNA
cccctacaagtaaaatgaca

SEQ ID NO: 76571 - DNA, 20 bp, synthetic construct
  source 1..20: mol_type = other DNA
acccctacaagtaaaatgac

SEQ ID NO: 76572 - DNA, 20 bp, synthetic construct
  source 1..20: mol_type = other DNA
aacccctacaagtaaaatga

SEQ ID NO: 76573 - DNA, 20 bp, synthetic construct
  source 1..20: mol_type = other DNA
taacccctacaagtaaaatg

SEQ ID NO: 76574 - DNA, 20 bp, synthetic construct
  source 1..20: mol_type = other DNA
ttaacccctacaagtaaaat

SEQ ID NO: 76575 - DNA, 20 bp, synthetic construct
  source 1..20: mol_type = other DNA
cttaacccctacaagtaaaa

SEQ ID NO: 76576 - DNA, 20 bp, synthetic construct
  source 1..20: mol_type = other DNA
gcttaacccctacaagtaaa

SEQ ID NO: 76577 - DNA, 20 bp, synthetic construct
  source 1..20: mol_type = other DNA
tgcttaacccctacaagtaa

SEQ ID NO: 76578 - DNA, 20 bp, synthetic construct
  source 1..20: mol_type = other DNA
ctgcttaacccctacaagta

SEQ ID NO: 76579 - DNA, 20 bp, synthetic construct
  source 1..20: mol_type = other DNA
cctgcttaacccctacaagt

SEQ ID NO: 76580 - DNA, 20 bp, synthetic construct
  source 1..20: mol_type = other DNA
tcctgcttaacccctacaag

SEQ ID NO: 76581 - DNA, 20 bp, synthetic construct
  source 1..20: mol_type = other DNA
ctcctgcttaacccctacaa

SEQ ID NO: 76582 - DNA, 20 bp, synthetic construct
  source 1..20: mol_type = other DNA
actcctgcttaacccctaca

SEQ ID NO: 76583 - DNA, 20 bp, synthetic construct
  source 1..20: mol_type = other DNA
tactcctgcttaacccctac

SEQ ID NO: 76584 - DNA, 20 bp, synthetic construct
  source 1..20: mol_type = other DNA
gtactcctgcttaaccccta

SEQ ID NO: 76585 - DNA, 20 bp, synthetic construct
  source 1..20: mol_type = other DNA
agtactcctgcttaacccct

SEQ ID NO: 76586 - DNA, 20 bp, synthetic construct
  source 1..20: mol_type = other DNA
cagtactcctgcttaacccc

SEQ ID NO: 76587 - DNA, 20 bp, synthetic construct
  source 1..20: mol_type = other DNA
acagtactcctgcttaaccc

SEQ ID NO: 76588 - DNA, 20 bp, synthetic construct
  source 1..20: mol_type = other DNA
gacagtactcctgcttaacc

SEQ ID NO: 76589 - DNA, 20 bp, synthetic construct
  source 1..20: mol_type = other DNA
agacagtactcctgcttaac

SEQ ID NO: 76590 - DNA, 20 bp, synthetic construct
  source 1..20: mol_type = other DNA
cagacagtactcctgcttaa

SEQ ID NO: 76591 - DNA, 20 bp, synthetic construct
  source 1..20: mol_type = other DNA
acagacagtactcctgctta

SEQ ID NO: 76592 - DNA, 20 bp, synthetic construct
  source 1..20: mol_type = other DNA
aacagacagtactcctgctt

SEQ ID NO: 76593 - DNA, 20 bp, synthetic construct
  source 1..20: mol_type = other DNA
gaacagacagtactcctgct

SEQ ID NO: 76594 - DNA, 20 bp, synthetic construct
  source 1..20: mol_type = other DNA
agaacagacagtactcctgc

SEQ ID NO: 76595 - DNA, 20 bp, synthetic construct
  source 1..20: mol_type = other DNA
aagaacagacagtactcctg

SEQ ID NO: 76596 - DNA, 20 bp, synthetic construct
  source 1..20: mol_type = other DNA
caagaacagacagtactcct

SEQ ID NO: 76597 - DNA, 20 bp, synthetic construct
  source 1..20: mol_type = other DNA
acaagaacagacagtactcc

SEQ ID NO: 76598 - DNA, 20 bp, synthetic construct
  source 1..20: mol_type = other DNA
cacaagaacagacagtactc

SEQ ID NO: 76599 - DNA, 20 bp, synthetic construct
  source 1..20: mol_type = other DNA
ccacaagaacagacagtact

SEQ ID NO: 76600 - DNA, 20 bp, synthetic construct
  source 1..20: mol_type = other DNA
tccacaagaacagacagtac

SEQ ID NO: 76601 - DNA, 20 bp, synthetic construct
  source 1..20: mol_type = other DNA
atccacaagaacagacagta

SEQ ID NO: 76602 - DNA, 20 bp, synthetic construct
  source 1..20: mol_type = other DNA
catccacaagaacagacagt

SEQ ID NO: 76603 - DNA, 20 bp, synthetic construct
  source 1..20: mol_type = other DNA
gcatccacaagaacagacag

SEQ ID NO: 76604 - DNA, 20 bp, synthetic construct
  source 1..20: mol_type = other DNA
agcatccacaagaacagaca

SEQ ID NO: 76605 - DNA, 20 bp, synthetic construct
  source 1..20: mol_type = other DNA
gagcatccacaagaacagac

SEQ ID NO: 76606 - DNA, 20 bp, synthetic construct
  source 1..20: mol_type = other DNA
tgagcatccacaagaacaga

SEQ ID NO: 76607 - DNA, 20 bp, synthetic construct
  source 1..20: mol_type = other DNA
atgagcatccacaagaacag

SEQ ID NO: 76608 - DNA, 20 bp, synthetic construct
  source 1..20: mol_type = other DNA
catgagcatccacaagaaca

SEQ ID NO: 76609 - DNA, 20 bp, synthetic construct
  source 1..20: mol_type = other DNA
tcatgagcatccacaagaac

SEQ ID NO: 76610 - DNA, 20 bp, synthetic construct
  source 1..20: mol_type = other DNA
ttcatgagcatccacaagaa

SEQ ID NO: 76611 - DNA, 20 bp, synthetic construct
  source 1..20: mol_type = other DNA
attcatgagcatccacaaga

SEQ ID NO: 76612 - DNA, 20 bp, synthetic construct
  source 1..20: mol_type = other DNA
aattcatgagcatccacaag

SEQ ID NO: 76613 - DNA, 20 bp, synthetic construct
  source 1..20: mol_type = other DNA
taattcatgagcatccacaa

SEQ ID NO: 76614 - DNA, 20 bp, synthetic construct
  source 1..20: mol_type = other DNA
gtaattcatgagcatccaca

SEQ ID NO: 76615 - DNA, 20 bp, synthetic construct
  source 1..20: mol_type = other DNA
agtaattcatgagcatccac

SEQ ID NO: 76616 - DNA, 20 bp, synthetic construct
  source 1..20: mol_type = other DNA
aagtaattcatgagcatcca

SEQ ID NO: 76617 - DNA, 20 bp, synthetic construct
  source 1..20: mol_type = other DNA
gaagtaattcatgagcatcc

SEQ ID NO: 76618 - DNA, 20 bp, synthetic construct
  source 1..20: mol_type = other DNA
agaagtaattcatgagcatc

SEQ ID NO: 76619 - DNA, 20 bp, synthetic construct
  source 1..20: mol_type = other DNA
aagaagtaattcatgagcat

SEQ ID NO: 76620 - DNA, 20 bp, synthetic construct
  source 1..20: mol_type = other DNA
aaagaagtaattcatgagca

SEQ ID NO: 76621 - DNA, 20 bp, synthetic construct
  source 1..20: mol_type = other DNA
caaagaagtaattcatgagc

SEQ ID NO: 76622 - DNA, 20 bp, synthetic construct
  source 1..20: mol_type = other DNA
acaaagaagtaattcatgag

SEQ ID NO: 76623 - DNA, 20 bp, synthetic construct
  source 1..20: mol_type = other DNA
cacaaagaagtaattcatga

SEQ ID NO: 76624 - DNA, 20 bp, synthetic construct
  source 1..20: mol_type = other DNA
tcacaaagaagtaattcatg

SEQ ID NO: 76625 - DNA, 20 bp, synthetic construct
  source 1..20: mol_type = other DNA
atcacaaagaagtaattcat

SEQ ID NO: 76626 - DNA, 20 bp, synthetic construct
  source 1..20: mol_type = other DNA
aatcacaaagaagtaattca

SEQ ID NO: 76627 - DNA, 20 bp, synthetic construct
  source 1..20: mol_type = other DNA
taatcacaaagaagtaattc

SEQ ID NO: 76628 - DNA, 20 bp, synthetic construct
  source 1..20: mol_type = other DNA
ttaatcacaaagaagtaatt

SEQ ID NO: 76629 - DNA, 20 bp, synthetic construct
  source 1..20: mol_type = other DNA
tttaatcacaaagaagtaat

SEQ ID NO: 76630 - DNA, 20 bp, synthetic construct
  source 1..20: mol_type = other DNA
ttttaatcacaaagaagtaa

SEQ ID NO: 76631 - DNA, 20 bp, synthetic construct
  source 1..20: mol_type = other DNA
attttaatcacaaagaagta

SEQ ID NO: 76632 - DNA, 20 bp, synthetic construct
  source 1..20: mol_type = other DNA
tattttaatcacaaagaagt

SEQ ID NO: 76633 - DNA, 20 bp, synthetic construct
  source 1..20: mol_type = other DNA
ttattttaatcacaaagaag

SEQ ID NO: 76634 - DNA, 20 bp, synthetic construct
  source 1..20: mol_type = other DNA
tttattttaatcacaaagaa

SEQ ID NO: 76635 - DNA, 20 bp, synthetic construct
  source 1..20: mol_type = other DNA
atttattttaatcacaaaga

SEQ ID NO: 76636 - DNA, 20 bp, synthetic construct
  source 1..20: mol_type = other DNA
tatttattttaatcacaaag

SEQ ID NO: 76637 - DNA, 20 bp, synthetic construct
  source 1..20: mol_type = other DNA
ttatttattttaatcacaaa

SEQ ID NO: 76638 - DNA, 20 bp, synthetic construct
  source 1..20: mol_type = other DNA
attatttattttaatcacaa

SEQ ID NO: 76639 - DNA, 20 bp, synthetic construct
  source 1..20: mol_type = other DNA
tattatttattttaatcaca

SEQ ID NO: 76640 - DNA, 20 bp, synthetic construct
  source 1..20: mol_type = other DNA
ttattatttattttaatcac

SEQ ID NO: 76641 - DNA, 20 bp, synthetic construct
  source 1..20: mol_type = other DNA
cttattatttattttaatca

SEQ ID NO: 76642 - DNA, 20 bp, synthetic construct
  source 1..20: mol_type = other DNA
tcttattatttattttaatc

SEQ ID NO: 76643 - DNA, 20 bp, synthetic construct
  source 1..20: mol_type = other DNA
ttcttattatttattttaat

SEQ ID NO: 76644 - DNA, 20 bp, synthetic construct
  source 1..20: mol_type = other DNA
cttcttattatttattttaa

SEQ ID NO: 76645 - DNA, 20 bp, synthetic construct
  source 1..20: mol_type = other DNA
acttcttattatttatttta

SEQ ID NO: 76646 - DNA, 20 bp, synthetic construct
  source 1..20: mol_type = other DNA
tacttcttattatttatttt

SEQ ID NO: 76647 - DNA, 20 bp, synthetic construct
  source 1..20: mol_type = other DNA
ctacttcttattatttattt

SEQ ID NO: 76648 - DNA, 20 bp, synthetic construct
  source 1..20: mol_type = other DNA
gctacttcttattatttatt

SEQ ID NO: 76649 - DNA, 20 bp, synthetic construct
  source 1..20: mol_type = other DNA
agctacttcttattatttat

SEQ ID NO: 76650 - DNA, 20 bp, synthetic construct
  source 1..20: mol_type = other DNA
aagctacttcttattattta

SEQ ID NO: 76651 - DNA, 20 bp, synthetic construct
  source 1..20: mol_type = other DNA
taagctacttcttattattt

SEQ ID NO: 76652 - DNA, 20 bp, synthetic construct
  source 1..20: mol_type = other DNA
ttaagctacttcttattatt

SEQ ID NO: 76653 - DNA, 20 bp, synthetic construct
  source 1..20: mol_type = other DNA
tttaagctacttcttattat

SEQ ID NO: 76654 - DNA, 20 bp, synthetic construct
  source 1..20: mol_type = other DNA
atttaagctacttcttatta

SEQ ID NO: 76655 - DNA, 20 bp, synthetic construct
  source 1..20: mol_type = other DNA
aatttaagctacttcttatt

SEQ ID NO: 76656 - DNA, 20 bp, synthetic construct
  source 1..20: mol_type = other DNA
taatttaagctacttcttat

SEQ ID NO: 76657 - DNA, 20 bp, synthetic construct
  source 1..20: mol_type = other DNA
ttaatttaagctacttctta

SEQ ID NO: 76658 - DNA, 20 bp, synthetic construct
  source 1..20: mol_type = other DNA
tttaatttaagctacttctt

SEQ ID NO: 76659 - DNA, 20 bp, synthetic construct
  source 1..20: mol_type = other DNA
ttttaatttaagctacttct

SEQ ID NO: 76660 - DNA, 20 bp, synthetic construct
  source 1..20: mol_type = other DNA
attttaatttaagctacttc

SEQ ID NO: 76661 - DNA, 20 bp, synthetic construct
  source 1..20: mol_type = other DNA
aattttaatttaagctactt

SEQ ID NO: 76662 - DNA, 20 bp, synthetic construct
  source 1..20: mol_type = other DNA
taattttaatttaagctact

SEQ ID NO: 76663 - DNA, 20 bp, synthetic construct
  source 1..20: mol_type = other DNA
ctaattttaatttaagctac

SEQ ID NO: 76664 - DNA, 20 bp, synthetic construct
  source 1..20: mol_type = other DNA
tctaattttaatttaagcta

SEQ ID NO: 76665 - DNA, 20 bp, synthetic construct
  source 1..20: mol_type = other DNA
ttctaattttaatttaagct

SEQ ID NO: 76666 - DNA, 20 bp, synthetic construct
  source 1..20: mol_type = other DNA
tttctaattttaatttaagc

SEQ ID NO: 76667 - DNA, 20 bp, synthetic construct
  source 1..20: mol_type = other DNA
gtttctaattttaatttaag

SEQ ID NO: 76668 - DNA, 20 bp, synthetic construct
  source 1..20: mol_type = other DNA
ggtttctaattttaatttaa

SEQ ID NO: 76669 - DNA, 20 bp, synthetic construct
  source 1..20: mol_type = other DNA
tggtttctaattttaattta

SEQ ID NO: 76670 - DNA, 20 bp, synthetic construct
  source 1..20: mol_type = other DNA
atggtttctaattttaattt

SEQ ID NO: 76671 - DNA, 20 bp, synthetic construct
  source 1..20: mol_type = other DNA
catggtttctaattttaatt

SEQ ID NO: 76672 - DNA, 20 bp, synthetic construct
  source 1..20: mol_type = other DNA
ccatggtttctaattttaat

SEQ ID NO: 76673 - DNA, 20 bp, synthetic construct
  source 1..20: mol_type = other DNA
cccatggtttctaattttaa

SEQ ID NO: 76674 - DNA, 20 bp, synthetic construct
  source 1..20: mol_type = other DNA
tcccatggtttctaatttta

SEQ ID NO: 76675 - DNA, 20 bp, synthetic construct
  source 1..20: mol_type = other DNA
ttcccatggtttctaatttt

SEQ ID NO: 76676 - DNA, 20 bp, synthetic construct
  source 1..20: mol_type = other DNA
tttcccatggtttctaattt

SEQ ID NO: 76677 - DNA, 20 bp, synthetic construct
  source 1..20: mol_type = other DNA
atttcccatggtttctaatt

SEQ ID NO: 76678 - DNA, 20 bp, synthetic construct
  source 1..20: mol_type = other DNA
catttcccatggtttctaat

SEQ ID NO: 76679 - DNA, 20 bp, synthetic construct
  source 1..20: mol_type = other DNA
gcatttcccatggtttctaa

SEQ ID NO: 76680 - DNA, 20 bp, synthetic construct
  source 1..20: mol_type = other DNA
ggcatttcccatggtttcta

SEQ ID NO: 76681 - DNA, 20 bp, synthetic construct
  source 1..20: mol_type = other DNA
cggcatttcccatggtttct

SEQ ID NO: 76682 - DNA, 20 bp, synthetic construct
  source 1..20: mol_type = other DNA
ccggcatttcccatggtttc

SEQ ID NO: 76683 - DNA, 20 bp, synthetic construct
  source 1..20: mol_type = other DNA
accggcatttcccatggttt

SEQ ID NO: 76684 - DNA, 20 bp, synthetic construct
  source 1..20: mol_type = other DNA
caccggcatttcccatggtt

SEQ ID NO: 76685 - DNA, 20 bp, synthetic construct
  source 1..20: mol_type = other DNA
acaccggcatttcccatggt

SEQ ID NO: 76686 - DNA, 20 bp, synthetic construct
  source 1..20: mol_type = other DNA
cacaccggcatttcccatgg

SEQ ID NO: 76687 - DNA, 20 bp, synthetic construct
  source 1..20: mol_type = other DNA
acacaccggcatttcccatg

SEQ ID NO: 76688 - DNA, 20 bp, synthetic construct
  source 1..20: mol_type = other DNA
aacacaccggcatttcccat

SEQ ID NO: 76689 - DNA, 20 bp, synthetic construct
  source 1..20: mol_type = other DNA
aaacacaccggcatttccca

SEQ ID NO: 76690 - DNA, 20 bp, synthetic construct
  source 1..20: mol_type = other DNA
aaaacacaccggcatttccc

SEQ ID NO: 76691 - DNA, 20 bp, synthetic construct
  source 1..20: mol_type = other DNA
caaaacacaccggcatttcc

SEQ ID NO: 76692 - DNA, 20 bp, synthetic construct
  source 1..20: mol_type = other DNA
gcaaaacacaccggcatttc

SEQ ID NO: 76693 - DNA, 20 bp, synthetic construct
  source 1..20: mol_type = other DNA
agcaaaacacaccggcattt

SEQ ID NO: 76694 - DNA, 20 bp, synthetic construct
  source 1..20: mol_type = other DNA
aagcaaaacacaccggcatt

SEQ ID NO: 76695 - DNA, 20 bp, synthetic construct
  source 1..20: mol_type = other DNA
aaagcaaaacacaccggcat

SEQ ID NO: 76696 - DNA, 20 bp, synthetic construct
  source 1..20: mol_type = other DNA
taaagcaaaacacaccggca

SEQ ID NO: 76697 - DNA, 20 bp, synthetic construct
  source 1..20: mol_type = other DNA
ttaaagcaaaacacaccggc

SEQ ID NO: 76698 - DNA, 20 bp, synthetic construct
  source 1..20: mol_type = other DNA
gttaaagcaaaacacaccgg

SEQ ID NO: 76699 - DNA, 20 bp, synthetic construct
  source 1..20: mol_type = other DNA
tgttaaagcaaaacacaccg

SEQ ID NO: 76700 - DNA, 20 bp, synthetic construct
  source 1..20: mol_type = other DNA
gtgttaaagcaaaacacacc

SEQ ID NO: 76701 - DNA, 20 bp, synthetic construct
  source 1..20: mol_type = other DNA
ggtgttaaagcaaaacacac

SEQ ID NO: 76702 - DNA, 20 bp, synthetic construct
  source 1..20: mol_type = other DNA
gggtgttaaagcaaaacaca

SEQ ID NO: 76703 - DNA, 20 bp, synthetic construct
  source 1..20: mol_type = other DNA
tgggtgttaaagcaaaacac

SEQ ID NO: 76704 - DNA, 20 bp, synthetic construct
  source 1..20: mol_type = other DNA
ctgggtgttaaagcaaaaca

SEQ ID NO: 76705 - DNA, 20 bp, synthetic construct
  source 1..20: mol_type = other DNA
gctgggtgttaaagcaaaac

SEQ ID NO: 76706 - DNA, 20 bp, synthetic construct
  source 1..20: mol_type = other DNA
ggctgggtgttaaagcaaaa

SEQ ID NO: 76707 - DNA, 20 bp, synthetic construct
  source 1..20: mol_type = other DNA
tggctgggtgttaaagcaaa

SEQ ID NO: 76708 - DNA, 20 bp, synthetic construct
  source 1..20: mol_type = other DNA
ttggctgggtgttaaagcaa

SEQ ID NO: 76709 - DNA, 20 bp, synthetic construct
  source 1..20: mol_type = other DNA
tttggctgggtgttaaagca

SEQ ID NO: 76710 - DNA, 20 bp, synthetic construct
  source 1..20: mol_type = other DNA
atttggctgggtgttaaagc

SEQ ID NO: 76711 - DNA, 20 bp, synthetic construct
  source 1..20: mol_type = other DNA
tatttggctgggtgttaaag

SEQ ID NO: 76712 - DNA, 20 bp, synthetic construct
  source 1..20: mol_type = other DNA
ttatttggctgggtgttaaa

SEQ ID NO: 76713 - DNA, 20 bp, synthetic construct
  source 1..20: mol_type = other DNA
cttatttggctgggtgttaa

SEQ ID NO: 76714 - DNA, 20 bp, synthetic construct
  source 1..20: mol_type = other DNA
ccttatttggctgggtgtta

SEQ ID NO: 76715 - DNA, 20 bp, synthetic construct
  source 1..20: mol_type = other DNA
accttatttggctgggtgtt

SEQ ID NO: 76716 - DNA, 20 bp, synthetic construct
  source 1..20: mol_type = other DNA
taccttatttggctgggtgt

SEQ ID NO: 76717 - DNA, 20 bp, synthetic construct
  source 1..20: mol_type = other DNA
ctaccttatttggctgggtg

SEQ ID NO: 76718 - DNA, 20 bp, synthetic construct
  source 1..20: mol_type = other DNA
gctaccttatttggctgggt

SEQ ID NO: 76719 - DNA, 20 bp, synthetic construct
  source 1..20: mol_type = other DNA
ggctaccttatttggctggg

SEQ ID NO: 76720 - DNA, 20 bp, synthetic construct
  source 1..20: mol_type = other DNA
aggctaccttatttggctgg

SEQ ID NO: 76721 - DNA, 20 bp, synthetic construct
  source 1..20: mol_type = other DNA
taggctaccttatttggctg

SEQ ID NO: 76722 - DNA, 20 bp, synthetic construct
  source 1..20: mol_type = other DNA
ttaggctaccttatttggct

SEQ ID NO: 76723 - DNA, 20 bp, synthetic construct
  source 1..20: mol_type = other DNA
cttaggctaccttatttggc

SEQ ID NO: 76724 - DNA, 20 bp, synthetic construct
  source 1..20: mol_type = other DNA
ccttaggctaccttatttgg

SEQ ID NO: 76725 - DNA, 20 bp, synthetic construct
  source 1..20: mol_type = other DNA
tccttaggctaccttatttg

SEQ ID NO: 76726 - DNA, 20 bp, synthetic construct
  source 1..20: mol_type = other DNA
ttccttaggctaccttattt

SEQ ID NO: 76727 - DNA, 20 bp, synthetic construct
  source 1..20: mol_type = other DNA
tttccttaggctaccttatt

SEQ ID NO: 76728 - DNA, 20 bp, synthetic construct
  source 1..20: mol_type = other DNA
ctttccttaggctaccttat

SEQ ID NO: 76729 - DNA, 20 bp, synthetic construct
  source 1..20: mol_type = other DNA
actttccttaggctacctta

SEQ ID NO: 76730 - DNA, 20 bp, synthetic construct
  source 1..20: mol_type = other DNA
cactttccttaggctacctt

SEQ ID NO: 76731 - DNA, 20 bp, synthetic construct
  source 1..20: mol_type = other DNA
ccactttccttaggctacct

SEQ ID NO: 76732 - DNA, 20 bp, synthetic construct
  source 1..20: mol_type = other DNA
accactttccttaggctacc

SEQ ID NO: 76733 - DNA, 20 bp, synthetic construct
  source 1..20: mol_type = other DNA
caccactttccttaggctac

SEQ ID NO: 76734 - DNA, 20 bp, synthetic construct
  source 1..20: mol_type = other DNA
acaccactttccttaggcta

SEQ ID NO: 76735 - DNA, 20 bp, synthetic construct
  source 1..20: mol_type = other DNA
gacaccactttccttaggct

SEQ ID NO: 76736 - DNA, 20 bp, synthetic construct
  source 1..20: mol_type = other DNA
agacaccactttccttaggc

SEQ ID NO: 76737 - DNA, 20 bp, synthetic construct
  source 1..20: mol_type = other DNA
aagacaccactttccttagg

SEQ ID NO: 76738 - DNA, 20 bp, synthetic construct
  source 1..20: mol_type = other DNA
taagacaccactttccttag

SEQ ID NO: 76739 - DNA, 20 bp, synthetic construct
  source 1..20: mol_type = other DNA
ttaagacaccactttcctta

SEQ ID NO: 76740 - DNA, 20 bp, synthetic construct
  source 1..20: mol_type = other DNA
attaagacaccactttcctt

SEQ ID NO: 76741 - DNA, 20 bp, synthetic construct
  source 1..20: mol_type = other DNA
aattaagacaccactttcct

SEQ ID NO: 76742 - DNA, 20 bp, synthetic construct
  source 1..20: mol_type = other DNA
caattaagacaccactttcc

SEQ ID NO: 76743 - DNA, 20 bp, synthetic construct
  source 1..20: mol_type = other DNA
acaattaagacaccactttc

SEQ ID NO: 76744 - DNA, 20 bp, synthetic construct
  source 1..20: mol_type = other DNA
aacaattaagacaccacttt

SEQ ID NO: 76745 - DNA, 20 bp, synthetic construct
  source 1..20: mol_type = other DNA
caacaattaagacaccactt

SEQ ID NO: 76746 - DNA, 20 bp, synthetic construct
  source 1..20: mol_type = other DNA
tcaacaattaagacaccact

SEQ ID NO: 76747 - DNA, 20 bp, synthetic construct
  source 1..20: mol_type = other DNA
gtcaacaattaagacaccac

SEQ ID NO: 76748 - DNA, 20 bp, synthetic construct
  source 1..20: mol_type = other DNA
agtcaacaattaagacacca

SEQ ID NO: 76749 - DNA, 20 bp, synthetic construct
  source 1..20: mol_type = other DNA
aagtcaacaattaagacacc

SEQ ID NO: 76750 - DNA, 20 bp, synthetic construct
  source 1..20: mol_type = other DNA
gaagtcaacaattaagacac

SEQ ID NO: 76751 - DNA, 20 bp, synthetic construct
  source 1..20: mol_type = other DNA
tgaagtcaacaattaagaca

SEQ ID NO: 76752 - DNA, 20 bp, synthetic construct
  source 1..20: mol_type = other DNA
gtgaagtcaacaattaagac

SEQ ID NO: 76753 - DNA, 20 bp, synthetic construct
  source 1..20: mol_type = other DNA
ggtgaagtcaacaattaaga

SEQ ID NO: 76754 - DNA, 20 bp, synthetic construct
  source 1..20: mol_type = other DNA
aggtgaagtcaacaattaag

SEQ ID NO: 76755 - DNA, 20 bp, synthetic construct
  source 1..20: mol_type = other DNA
taggtgaagtcaacaattaa

SEQ ID NO: 76756 - DNA, 20 bp, synthetic construct
  source 1..20: mol_type = other DNA
ctaggtgaagtcaacaatta

SEQ ID NO: 76757 - DNA, 20 bp, synthetic construct
  source 1..20: mol_type = other DNA
tctaggtgaagtcaacaatt

SEQ ID NO: 76758 - DNA, 20 bp, synthetic construct
  source 1..20: mol_type = other DNA
ctctaggtgaagtcaacaat

SEQ ID NO: 76759 - DNA, 20 bp, synthetic construct
  source 1..20: mol_type = other DNA
tctctaggtgaagtcaacaa

SEQ ID NO: 76760 - DNA, 20 bp, synthetic construct
  source 1..20: mol_type = other DNA
ttctctaggtgaagtcaaca

SEQ ID NO: 76761 - DNA, 20 bp, synthetic construct
  source 1..20: mol_type = other DNA
cttctctaggtgaagtcaac

SEQ ID NO: 76762 - DNA, 20 bp, synthetic construct
  source 1..20: mol_type = other DNA
tcttctctaggtgaagtcaa

SEQ ID NO: 76763 - DNA, 20 bp, synthetic construct
  source 1..20: mol_type = other DNA
ctcttctctaggtgaagtca

SEQ ID NO: 76764 - DNA, 20 bp, synthetic construct
  source 1..20: mol_type = other DNA
cctcttctctaggtgaagtc

SEQ ID NO: 76765 - DNA, 20 bp, synthetic construct
  source 1..20: mol_type = other DNA
acctcttctctaggtgaagt

SEQ ID NO: 76766 - DNA, 20 bp, synthetic construct
  source 1..20: mol_type = other DNA
aacctcttctctaggtgaag

SEQ ID NO: 76767 - DNA, 20 bp, synthetic construct
  source 1..20: mol_type = other DNA
caacctcttctctaggtgaa

SEQ ID NO: 76768 - DNA, 20 bp, synthetic construct
  source 1..20: mol_type = other DNA
tcaacctcttctctaggtga

SEQ ID NO: 76769 - DNA, 20 bp, synthetic construct
  source 1..20: mol_type = other DNA
ttcaacctcttctctaggtg

SEQ ID NO: 76770 - DNA, 20 bp, synthetic construct
  source 1..20: mol_type = other DNA
cttcaacctcttctctaggt

SEQ ID NO: 76771 - DNA, 20 bp, synthetic construct
  source 1..20: mol_type = other DNA
acttcaacctcttctctagg

SEQ ID NO: 76772 - DNA, 20 bp, synthetic construct
  source 1..20: mol_type = other DNA
tacttcaacctcttctctag

SEQ ID NO: 76773 - DNA, 20 bp, synthetic construct
  source 1..20: mol_type = other DNA
ctacttcaacctcttctcta

SEQ ID NO: 76774 - DNA, 20 bp, synthetic construct
  source 1..20: mol_type = other DNA
cctacttcaacctcttctct

SEQ ID NO: 76775 - DNA, 20 bp, synthetic construct
  source 1..20: mol_type = other DNA
tcctacttcaacctcttctc

SEQ ID NO: 76776 - DNA, 20 bp, synthetic construct
  source 1..20: mol_type = other DNA
gtcctacttcaacctcttct

SEQ ID NO: 76777 - DNA, 20 bp, synthetic construct
  source 1..20: mol_type = other DNA
tgtcctacttcaacctcttc

SEQ ID NO: 76778 - DNA, 20 bp, synthetic construct
  source 1..20: mol_type = other DNA
atgtcctacttcaacctctt

SEQ ID NO: 76779 - DNA, 20 bp, synthetic construct
  source 1..20: mol_type = other DNA
aatgtcctacttcaacctct

SEQ ID NO: 76780 - DNA, 20 bp, synthetic construct
  source 1..20: mol_type = other DNA
aaatgtcctacttcaacctc

SEQ ID NO: 76781 - DNA, 20 bp, synthetic construct
  source 1..20: mol_type = other DNA
aaaatgtcctacttcaacct

SEQ ID NO: 76782 - DNA, 20 bp, synthetic construct
  source 1..20: mol_type = other DNA
taaaatgtcctacttcaacc

SEQ ID NO: 76783 - DNA, 20 bp, synthetic construct
  source 1..20: mol_type = other DNA
ttaaaatgtcctacttcaac

SEQ ID NO: 76784 - DNA, 20 bp, synthetic construct
  source 1..20: mol_type = other DNA
cttaaaatgtcctacttcaa

SEQ ID NO: 76785 - DNA, 20 bp, synthetic construct
  source 1..20: mol_type = other DNA
gcttaaaatgtcctacttca

SEQ ID NO: 76786 - DNA, 20 bp, synthetic construct
  source 1..20: mol_type = other DNA
ggcttaaaatgtcctacttc

SEQ ID NO: 76787 - DNA, 20 bp, synthetic construct
  source 1..20: mol_type = other DNA
aggcttaaaatgtcctactt

SEQ ID NO: 76788 - DNA, 20 bp, synthetic construct
  source 1..20: mol_type = other DNA
gaggcttaaaatgtcctact

SEQ ID NO: 76789 - DNA, 20 bp, synthetic construct
  source 1..20: mol_type = other DNA
agaggcttaaaatgtcctac

SEQ ID NO: 76790 - DNA, 20 bp, synthetic construct
  source 1..20: mol_type = other DNA
aagaggcttaaaatgtccta

SEQ ID NO: 76791 - DNA, 20 bp, synthetic construct
  source 1..20: mol_type = other DNA
caagaggcttaaaatgtcct

SEQ ID NO: 76792 - DNA, 20 bp, synthetic construct
  source 1..20: mol_type = other DNA
acaagaggcttaaaatgtcc

SEQ ID NO: 76793 - DNA, 20 bp, synthetic construct
  source 1..20: mol_type = other DNA
gacaagaggcttaaaatgtc

SEQ ID NO: 76794 - DNA, 20 bp, synthetic construct
  source 1..20: mol_type = other DNA
agacaagaggcttaaaatgt

SEQ ID NO: 76795 - DNA, 20 bp, synthetic construct
  source 1..20: mol_type = other DNA
cagacaagaggcttaaaatg

SEQ ID NO: 76796 - DNA, 20 bp, synthetic construct
  source 1..20: mol_type = other DNA
tcagacaagaggcttaaaat

SEQ ID NO: 76797 - DNA, 20 bp, synthetic construct
  source 1..20: mol_type = other DNA
ttcagacaagaggcttaaaa

SEQ ID NO: 76798 - DNA, 20 bp, synthetic construct
  source 1..20: mol_type = other DNA
cttcagacaagaggcttaaa

SEQ ID NO: 76799 - DNA, 20 bp, synthetic construct
  source 1..20: mol_type = other DNA
tcttcagacaagaggcttaa

SEQ ID NO: 76800 - DNA, 20 bp, synthetic construct
  source 1..20: mol_type = other DNA
ttcttcagacaagaggctta

SEQ ID NO: 76801 - DNA, 20 bp, synthetic construct
  source 1..20: mol_type = other DNA
tttcttcagacaagaggctt

SEQ ID NO: 76802 - DNA, 20 bp, synthetic construct
  source 1..20: mol_type = other DNA
ttttcttcagacaagaggct

SEQ ID NO: 76803 - DNA, 20 bp, synthetic construct
  source 1..20: mol_type = other DNA
cttttcttcagacaagaggc

SEQ ID NO: 76804 - DNA, 20 bp, synthetic construct
  source 1..20: mol_type = other DNA
ccttttcttcagacaagagg

SEQ ID NO: 76805 - DNA, 20 bp, synthetic construct
  source 1..20: mol_type = other DNA
accttttcttcagacaagag

SEQ ID NO: 76806 - DNA, 20 bp, synthetic construct
  source 1..20: mol_type = other DNA
aaccttttcttcagacaaga

SEQ ID NO: 76807 - DNA, 20 bp, synthetic construct
  source 1..20: mol_type = other DNA
caaccttttcttcagacaag

SEQ ID NO: 76808 - DNA, 20 bp, synthetic construct
  source 1..20: mol_type = other DNA
acaaccttttcttcagacaa

SEQ ID NO: 76809 - DNA, 20 bp, synthetic construct
  source 1..20: mol_type = other DNA
gacaaccttttcttcagaca

SEQ ID NO: 76810 - DNA, 20 bp, synthetic construct
  source 1..20: mol_type = other DNA
tgacaaccttttcttcagac

SEQ ID NO: 76811 - DNA, 20 bp, synthetic construct
  source 1..20: mol_type = other DNA
atgacaaccttttcttcaga

SEQ ID NO: 76812 - DNA, 20 bp, synthetic construct
  source 1..20: mol_type = other DNA
aatgacaaccttttcttcag

SEQ ID NO: 76813 - DNA, 20 bp, synthetic construct
  source 1..20: mol_type = other DNA
taatgacaaccttttcttca

SEQ ID NO: 76814 - DNA, 20 bp, synthetic construct
  source 1..20: mol_type = other DNA
ttaatgacaaccttttcttc

SEQ ID NO: 76815 - DNA, 20 bp, synthetic construct
  source 1..20: mol_type = other DNA
cttaatgacaaccttttctt

SEQ ID NO: 76816 - DNA, 20 bp, synthetic construct
  source 1..20: mol_type = other DNA
tcttaatgacaaccttttct

SEQ ID NO: 76817 - DNA, 20 bp, synthetic construct
  source 1..20: mol_type = other DNA
atcttaatgacaaccttttc

SEQ ID NO: 76818 - DNA, 20 bp, synthetic construct
  source 1..20: mol_type = other DNA
tatcttaatgacaacctttt

SEQ ID NO: 76819 - DNA, 20 bp, synthetic construct
  source 1..20: mol_type = other DNA
ttatcttaatgacaaccttt

SEQ ID NO: 76820 - DNA, 20 bp, synthetic construct
  source 1..20: mol_type = other DNA
tttatcttaatgacaacctt

SEQ ID NO: 76821 - DNA, 20 bp, synthetic construct
  source 1..20: mol_type = other DNA
atttatcttaatgacaacct

SEQ ID NO: 76822 - DNA, 20 bp, synthetic construct
  source 1..20: mol_type = other DNA
tatttatcttaatgacaacc

SEQ ID NO: 76823 - DNA, 20 bp, synthetic construct
  source 1..20: mol_type = other DNA
ttatttatcttaatgacaac

SEQ ID NO: 76824 - DNA, 20 bp, synthetic construct
  source 1..20: mol_type = other DNA
attatttatcttaatgacaa

SEQ ID NO: 76825 - DNA, 20 bp, synthetic construct
  source 1..20: mol_type = other DNA
aattatttatcttaatgaca

SEQ ID NO: 76826 - DNA, 20 bp, synthetic construct
  source 1..20: mol_type = other DNA
taattatttatcttaatgac

SEQ ID NO: 76827 - DNA, 20 bp, synthetic construct
  source 1..20: mol_type = other DNA
ctaattatttatcttaatga

SEQ ID NO: 76828 - DNA, 20 bp, synthetic construct
  source 1..20: mol_type = other DNA
cctaattatttatcttaatg

SEQ ID NO: 76829 - DNA, 20 bp, synthetic construct
  source 1..20: mol_type = other DNA
acctaattatttatcttaat

SEQ ID NO: 76830 - DNA, 20 bp, synthetic construct
  source 1..20: mol_type = other DNA
aacctaattatttatcttaa

SEQ ID NO: 76831 - DNA, 20 bp, synthetic construct
  source 1..20: mol_type = other DNA
taacctaattatttatctta

SEQ ID NO: 76832 - DNA, 20 bp, synthetic construct
  source 1..20: mol_type = other DNA
gtaacctaattatttatctt

SEQ ID NO: 76833 - DNA, 20 bp, synthetic construct
  source 1..20: mol_type = other DNA
tgtaacctaattatttatct

SEQ ID NO: 76834 - DNA, 20 bp, synthetic construct
  source 1..20: mol_type = other DNA
atgtaacctaattatttatc

SEQ ID NO: 76835 - DNA, 20 bp, synthetic construct
  source 1..20: mol_type = other DNA
aatgtaacctaattatttat

SEQ ID NO: 76836 - DNA, 20 bp, synthetic construct
  source 1..20: mol_type = other DNA
caatgtaacctaattattta

SEQ ID NO: 76837 - DNA, 20 bp, synthetic construct
  source 1..20: mol_type = other DNA
ccaatgtaacctaattattt

SEQ ID NO: 76838 - DNA, 20 bp, synthetic construct
  source 1..20: mol_type = other DNA
tccaatgtaacctaattatt

SEQ ID NO: 76839 - DNA, 20 bp, synthetic construct
  source 1..20: mol_type = other DNA
ttccaatgtaacctaattat

SEQ ID NO: 76840 - DNA, 20 bp, synthetic construct
  source 1..20: mol_type = other DNA
attccaatgtaacctaatta

SEQ ID NO: 76841 - DNA, 20 bp, synthetic construct
  source 1..20: mol_type = other DNA
aattccaatgtaacctaatt

SEQ ID NO: 76842 - DNA, 20 bp, synthetic construct
  source 1..20: mol_type = other DNA
taattccaatgtaacctaat

SEQ ID NO: 76843 - DNA, 20 bp, synthetic construct
  source 1..20: mol_type = other DNA
ttaattccaatgtaacctaa

SEQ ID NO: 76844 - DNA, 20 bp, synthetic construct
  source 1..20: mol_type = other DNA
tttaattccaatgtaaccta

SEQ ID NO: 76845 - DNA, 20 bp, synthetic construct
  source 1..20: mol_type = other DNA
ctttaattccaatgtaacct

SEQ ID NO: 76846 - DNA, 20 bp, synthetic construct
  source 1..20: mol_type = other DNA
gctttaattccaatgtaacc

SEQ ID NO: 76847 - DNA, 20 bp, synthetic construct
  source 1..20: mol_type = other DNA
tgctttaattccaatgtaac

SEQ ID NO: 76848 - DNA, 20 bp, synthetic construct
  source 1..20: mol_type = other DNA
atgctttaattccaatgtaa

SEQ ID NO: 76849 - DNA, 20 bp, synthetic construct
  source 1..20: mol_type = other DNA
aatgctttaattccaatgta

SEQ ID NO: 76850 - DNA, 20 bp, synthetic construct
  source 1..20: mol_type = other DNA
taatgctttaattccaatgt

SEQ ID NO: 76851 - DNA, 20 bp, synthetic construct
  source 1..20: mol_type = other DNA
gtaatgctttaattccaatg

SEQ ID NO: 76852 - DNA, 20 bp, synthetic construct
  source 1..20: mol_type = other DNA
tgtaatgctttaattccaat

SEQ ID NO: 76853 - DNA, 20 bp, synthetic construct
  source 1..20: mol_type = other DNA
atgtaatgctttaattccaa

SEQ ID NO: 76854 - DNA, 20 bp, synthetic construct
  source 1..20: mol_type = other DNA
tatgtaatgctttaattcca

SEQ ID NO: 76855 - DNA, 20 bp, synthetic construct
  source 1..20: mol_type = other DNA
ttatgtaatgctttaattcc

SEQ ID NO: 76856 - DNA, 20 bp, synthetic construct
  source 1..20: mol_type = other DNA
tttatgtaatgctttaattc

SEQ ID NO: 76857 - DNA, 20 bp, synthetic construct
  source 1..20: mol_type = other DNA
atttatgtaatgctttaatt

SEQ ID NO: 76858 - DNA, 20 bp, synthetic construct
  source 1..20: mol_type = other DNA
aatttatgtaatgctttaat

SEQ ID NO: 76859 - DNA, 20 bp, synthetic construct
  source 1..20: mol_type = other DNA
aaatttatgtaatgctttaa

SEQ ID NO: 76860 - DNA, 20 bp, synthetic construct
  source 1..20: mol_type = other DNA
gaaatttatgtaatgcttta

SEQ ID NO: 76861 - DNA, 20 bp, synthetic construct
  source 1..20: mol_type = other DNA
agaaatttatgtaatgcttt

SEQ ID NO: 76862 - DNA, 20 bp, synthetic construct
  source 1..20: mol_type = other DNA
aagaaatttatgtaatgctt

SEQ ID NO: 76863 - DNA, 20 bp, synthetic construct
  source 1..20: mol_type = other DNA
caagaaatttatgtaatgct

SEQ ID NO: 76864 - DNA, 20 bp, synthetic construct
  source 1..20: mol_type = other DNA
ccaagaaatttatgtaatgc

SEQ ID NO: 76865 - DNA, 20 bp, synthetic construct
  source 1..20: mol_type = other DNA
accaagaaatttatgtaatg

SEQ ID NO: 76866 - DNA, 20 bp, synthetic construct
  source 1..20: mol_type = other DNA
gaccaagaaatttatgtaat

SEQ ID NO: 76867 - DNA, 20 bp, synthetic construct
  source 1..20: mol_type = other DNA
agaccaagaaatttatgtaa

SEQ ID NO: 76868 - DNA, 20 bp, synthetic construct
  source 1..20: mol_type = other DNA
aagaccaagaaatttatgta

SEQ ID NO: 76869 - DNA, 20 bp, synthetic construct
  source 1..20: mol_type = other DNA
taagaccaagaaatttatgt

SEQ ID NO: 76870 - DNA, 20 bp, synthetic construct
  source 1..20: mol_type = other DNA
ttaagaccaagaaatttatg

SEQ ID NO: 76871 - DNA, 20 bp, synthetic construct
  source 1..20: mol_type = other DNA
tttaagaccaagaaatttat

SEQ ID NO: 76872 - DNA, 20 bp, synthetic construct
  source 1..20: mol_type = other DNA
atttaagaccaagaaattta

SEQ ID NO: 76873 - DNA, 20 bp, synthetic construct
  source 1..20: mol_type = other DNA
aatttaagaccaagaaattt

SEQ ID NO: 76874 - DNA, 20 bp, synthetic construct
  source 1..20: mol_type = other DNA
aaatttaagaccaagaaatt

SEQ ID NO: 76875 - DNA, 20 bp, synthetic construct
  source 1..20: mol_type = other DNA
caaatttaagaccaagaaat

SEQ ID NO: 76876 - DNA, 20 bp, synthetic construct
  source 1..20: mol_type = other DNA
ccaaatttaagaccaagaaa

SEQ ID NO: 76877 - DNA, 20 bp, synthetic construct
  source 1..20: mol_type = other DNA
tccaaatttaagaccaagaa

SEQ ID NO: 76878 - DNA, 20 bp, synthetic construct
  source 1..20: mol_type = other DNA
atccaaatttaagaccaaga

SEQ ID NO: 76879 - DNA, 20 bp, synthetic construct
  source 1..20: mol_type = other DNA
aatccaaatttaagaccaag

SEQ ID NO: 76880 - DNA, 20 bp, synthetic construct
  source 1..20: mol_type = other DNA
taatccaaatttaagaccaa

SEQ ID NO: 76881 - DNA, 20 bp, synthetic construct
  source 1..20: mol_type = other DNA
ataatccaaatttaagacca

SEQ ID NO: 76882 - DNA, 20 bp, synthetic construct
  source 1..20: mol_type = other DNA
aataatccaaatttaagacc

SEQ ID NO: 76883 - DNA, 20 bp, synthetic construct
  source 1..20: mol_type = other DNA
gaataatccaaatttaagac

SEQ ID NO: 76884 - DNA, 20 bp, synthetic construct
  source 1..20: mol_type = other DNA
agaataatccaaatttaaga

SEQ ID NO: 76885 - DNA, 20 bp, synthetic construct
  source 1..20: mol_type = other DNA
gagaataatccaaatttaag

SEQ ID NO: 76886 - DNA, 20 bp, synthetic construct
  source 1..20: mol_type = other DNA
ggagaataatccaaatttaa

SEQ ID NO: 76887 - DNA, 20 bp, synthetic construct
  source 1..20: mol_type = other DNA
tggagaataatccaaattta

SEQ ID NO: 76888 - DNA, 20 bp, synthetic construct
  source 1..20: mol_type = other DNA
gtggagaataatccaaattt

SEQ ID NO: 76889 - DNA, 20 bp, synthetic construct
  source 1..20: mol_type = other DNA
tgtggagaataatccaaatt

SEQ ID NO: 76890 - DNA, 20 bp, synthetic construct
  source 1..20: mol_type = other DNA
ttgtggagaataatccaaat

SEQ ID NO: 76891 - DNA, 20 bp, synthetic construct
  source 1..20: mol_type = other DNA
tttgtggagaataatccaaa

SEQ ID NO: 76892 - DNA, 20 bp, synthetic construct
  source 1..20: mol_type = other DNA
ttttgtggagaataatccaa

SEQ ID NO: 76893 - DNA, 20 bp, synthetic construct
  source 1..20: mol_type = other DNA
attttgtggagaataatcca

SEQ ID NO: 76894 - DNA, 20 bp, synthetic construct
  source 1..20: mol_type = other DNA
aattttgtggagaataatcc

SEQ ID NO: 76895 - DNA, 20 bp, synthetic construct
  source 1..20: mol_type = other DNA
gaattttgtggagaataatc

SEQ ID NO: 76896 - DNA, 20 bp, synthetic construct
  source 1..20: mol_type = other DNA
agaattttgtggagaataat

SEQ ID NO: 76897 - DNA, 20 bp, synthetic construct
  source 1..20: mol_type = other DNA
aagaattttgtggagaataa

SEQ ID NO: 76898 - DNA, 20 bp, synthetic construct
  source 1..20: mol_type = other DNA
aaagaattttgtggagaata

SEQ ID NO: 76899 - DNA, 20 bp, synthetic construct
  source 1..20: mol_type = other DNA
aaaagaattttgtggagaat

SEQ ID NO: 76900 - DNA, 20 bp, synthetic construct
  source 1..20: mol_type = other DNA
taaaagaattttgtggagaa

SEQ ID NO: 76901 - DNA, 20 bp, synthetic construct
  source 1..20: mol_type = other DNA
ataaaagaattttgtggaga

SEQ ID NO: 76902 - DNA, 20 bp, synthetic construct
  source 1..20: mol_type = other DNA
aataaaagaattttgtggag

SEQ ID NO: 76903 - DNA, 20 bp, synthetic construct
  source 1..20: mol_type = other DNA
aaataaaagaattttgtgga

SEQ ID NO: 76904 - DNA, 20 bp, synthetic construct
  source 1..20: mol_type = other DNA
gaaataaaagaattttgtgg

SEQ ID NO: 76905 - DNA, 20 bp, synthetic construct
  source 1..20: mol_type = other DNA
agaaataaaagaattttgtg

SEQ ID NO: 76906 - DNA, 20 bp, synthetic construct
  source 1..20: mol_type = other DNA
tagaaataaaagaattttgt

SEQ ID NO: 76907 - DNA, 20 bp, synthetic construct
  source 1..20: mol_type = other DNA
ttagaaataaaagaattttg

SEQ ID NO: 76908 - DNA, 20 bp, synthetic construct
  source 1..20: mol_type = other DNA
tttagaaataaaagaatttt

SEQ ID NO: 76909 - DNA, 20 bp, synthetic construct
  source 1..20: mol_type = other DNA
ttttagaaataaaagaattt

SEQ ID NO: 76910 - DNA, 20 bp, synthetic construct
  source 1..20: mol_type = other DNA
gttttagaaataaaagaatt

SEQ ID NO: 76911 - DNA, 20 bp, synthetic construct
  source 1..20: mol_type = other DNA
cgttttagaaataaaagaat

SEQ ID NO: 76912 - DNA, 20 bp, synthetic construct
  source 1..20: mol_type = other DNA
gcgttttagaaataaaagaa

SEQ ID NO: 76913 - DNA, 20 bp, synthetic construct
  source 1..20: mol_type = other DNA
ggcgttttagaaataaaaga

SEQ ID NO: 76914 - DNA, 20 bp, synthetic construct
  source 1..20: mol_type = other DNA
aggcgttttagaaataaaag

SEQ ID NO: 76915 - DNA, 20 bp, synthetic construct
  source 1..20: mol_type = other DNA
gaggcgttttagaaataaaa

SEQ ID NO: 76916 - DNA, 20 bp, synthetic construct
  source 1..20: mol_type = other DNA
agaggcgttttagaaataaa

SEQ ID NO: 76917 - DNA, 20 bp, synthetic construct
  source 1..20: mol_type = other DNA
aagaggcgttttagaaataa

SEQ ID NO: 76918 - DNA, 20 bp, synthetic construct
  source 1..20: mol_type = other DNA
caagaggcgttttagaaata

SEQ ID NO: 76919 - DNA, 20 bp, synthetic construct
  source 1..20: mol_type = other DNA
acaagaggcgttttagaaat

SEQ ID NO: 76920 - DNA, 20 bp, synthetic construct
  source 1..20: mol_type = other DNA
gacaagaggcgttttagaaa

SEQ ID NO: 76921 - DNA, 20 bp, synthetic construct
  source 1..20: mol_type = other DNA
tgacaagaggcgttttagaa

SEQ ID NO: 76922 - DNA, 20 bp, synthetic construct
  source 1..20: mol_type = other DNA
gtgacaagaggcgttttaga

SEQ ID NO: 76923 - DNA, 20 bp, synthetic construct
  source 1..20: mol_type = other DNA
tgtgacaagaggcgttttag

SEQ ID NO: 76924 - DNA, 20 bp, synthetic construct
  source 1..20: mol_type = other DNA
atgtgacaagaggcgtttta

SEQ ID NO: 76925 - DNA, 20 bp, synthetic construct
  source 1..20: mol_type = other DNA
tatgtgacaagaggcgtttt

SEQ ID NO: 76926 - DNA, 20 bp, synthetic construct
  source 1..20: mol_type = other DNA
gtatgtgacaagaggcgttt

SEQ ID NO: 76927 - DNA, 20 bp, synthetic construct
  source 1..20: mol_type = other DNA
agtatgtgacaagaggcgtt

SEQ ID NO: 76928 - DNA, 20 bp, synthetic construct
  source 1..20: mol_type = other DNA
tagtatgtgacaagaggcgt

SEQ ID NO: 76929 - DNA, 20 bp, synthetic construct
  source 1..20: mol_type = other DNA
ctagtatgtgacaagaggcg

SEQ ID NO: 76930 - DNA, 20 bp, synthetic construct
  source 1..20: mol_type = other DNA
actagtatgtgacaagaggc

SEQ ID NO: 76931 - DNA, 20 bp, synthetic construct
  source 1..20: mol_type = other DNA
aactagtatgtgacaagagg

SEQ ID NO: 76932 - DNA, 20 bp, synthetic construct
  source 1..20: mol_type = other DNA
aaactagtatgtgacaagag

SEQ ID NO: 76933 - DNA, 20 bp, synthetic construct
  source 1..20: mol_type = other DNA
aaaactagtatgtgacaaga

SEQ ID NO: 76934 - DNA, 20 bp, synthetic construct
  source 1..20: mol_type = other DNA
caaaactagtatgtgacaag

SEQ ID NO: 76935 - DNA, 20 bp, synthetic construct
  source 1..20: mol_type = other DNA
acaaaactagtatgtgacaa

SEQ ID NO: 76936 - DNA, 20 bp, synthetic construct
  source 1..20: mol_type = other DNA
aacaaaactagtatgtgaca

SEQ ID NO: 76937 - DNA, 20 bp, synthetic construct
  source 1..20: mol_type = other DNA
aaacaaaactagtatgtgac

SEQ ID NO: 76938 - DNA, 20 bp, synthetic construct
  source 1..20: mol_type = other DNA
gaaacaaaactagtatgtga

SEQ ID NO: 76939 - DNA, 20 bp, synthetic construct
  source 1..20: mol_type = other DNA
agaaacaaaactagtatgtg

SEQ ID NO: 76940 - DNA, 20 bp, synthetic construct
  source 1..20: mol_type = other DNA
gagaaacaaaactagtatgt

SEQ ID NO: 76941 - DNA, 20 bp, synthetic construct
  source 1..20: mol_type = other DNA
agagaaacaaaactagtatg

SEQ ID NO: 76942 - DNA, 20 bp, synthetic construct
  source 1..20: mol_type = other DNA
gagagaaacaaaactagtat

SEQ ID NO: 76943 - DNA, 20 bp, synthetic construct
  source 1..20: mol_type = other DNA
agagagaaacaaaactagta

SEQ ID NO: 76944 - DNA, 20 bp, synthetic construct
  source 1..20: mol_type = other DNA
aagagagaaacaaaactagt

SEQ ID NO: 76945 - DNA, 20 bp, synthetic construct
  source 1..20: mol_type = other DNA
aaagagagaaacaaaactag

SEQ ID NO: 76946 - DNA, 20 bp, synthetic construct
  source 1..20: mol_type = other DNA
taaagagagaaacaaaacta

SEQ ID NO: 76947 - DNA, 20 bp, synthetic construct
  source 1..20: mol_type = other DNA
ttaaagagagaaacaaaact

SEQ ID NO: 76948 - DNA, 20 bp, synthetic construct
  source 1..20: mol_type = other DNA
attaaagagagaaacaaaac

SEQ ID NO: 76949 - DNA, 20 bp, synthetic construct
  source 1..20: mol_type = other DNA
cattaaagagagaaacaaaa

SEQ ID NO: 76950 - DNA, 20 bp, synthetic construct
  source 1..20: mol_type = other DNA
gcattaaagagagaaacaaa

SEQ ID NO: 76951 - DNA, 20 bp, synthetic construct
  source 1..20: mol_type = other DNA
tgcattaaagagagaaacaa

SEQ ID NO: 76952 - DNA, 20 bp, synthetic construct
  source 1..20: mol_type = other DNA
atgcattaaagagagaaaca

SEQ ID NO: 76953 - DNA, 20 bp, synthetic construct
  source 1..20: mol_type = other DNA
aatgcattaaagagagaaac

SEQ ID NO: 76954 - DNA, 20 bp, synthetic construct
  source 1..20: mol_type = other DNA
taatgcattaaagagagaaa

SEQ ID NO: 76955 - DNA, 20 bp, synthetic construct
  source 1..20: mol_type = other DNA
ataatgcattaaagagagaa

SEQ ID NO: 76956 - DNA, 20 bp, synthetic construct
  source 1..20: mol_type = other DNA
gataatgcattaaagagaga

SEQ ID NO: 76957 - DNA, 20 bp, synthetic construct
  source 1..20: mol_type = other DNA
agataatgcattaaagagag

SEQ ID NO: 76958 - DNA, 20 bp, synthetic construct
  source 1..20: mol_type = other DNA
cagataatgcattaaagaga

SEQ ID NO: 76959 - DNA, 20 bp, synthetic construct
  source 1..20: mol_type = other DNA
acagataatgcattaaagag

SEQ ID NO: 76960 - DNA, 20 bp, synthetic construct
  source 1..20: mol_type = other DNA
tacagataatgcattaaaga

SEQ ID NO: 76961 - DNA, 20 bp, synthetic construct
  source 1..20: mol_type = other DNA
gtacagataatgcattaaag

SEQ ID NO: 76962 - DNA, 20 bp, synthetic construct
  source 1..20: mol_type = other DNA
agtacagataatgcattaaa

SEQ ID NO: 76963 - DNA, 20 bp, synthetic construct
  source 1..20: mol_type = other DNA
aagtacagataatgcattaa

SEQ ID NO: 76964 - DNA, 20 bp, synthetic construct
  source 1..20: mol_type = other DNA
caagtacagataatgcatta

SEQ ID NO: 76965 - DNA, 20 bp, synthetic construct
  source 1..20: mol_type = other DNA
tcaagtacagataatgcatt

SEQ ID NO: 76966 - DNA, 20 bp, synthetic construct
  source 1..20: mol_type = other DNA
ttcaagtacagataatgcat

SEQ ID NO: 76967 - DNA, 20 bp, synthetic construct
  source 1..20: mol_type = other DNA
cttcaagtacagataatgca

SEQ ID NO: 76968 - DNA, 20 bp, synthetic construct
  source 1..20: mol_type = other DNA
acttcaagtacagataatgc

SEQ ID NO: 76969 - DNA, 20 bp, synthetic construct
  source 1..20: mol_type = other DNA
cacttcaagtacagataatg

SEQ ID NO: 76970 - DNA, 20 bp, synthetic construct
  source 1..20: mol_type = other DNA
gcacttcaagtacagataat

SEQ ID NO: 76971 - DNA, 20 bp, synthetic construct
  source 1..20: mol_type = other DNA
agcacttcaagtacagataa

SEQ ID NO: 76972 - DNA, 20 bp, synthetic construct
  source 1..20: mol_type = other DNA
aagcacttcaagtacagata

SEQ ID NO: 76973 - DNA, 20 bp, synthetic construct
  source 1..20: mol_type = other DNA
taagcacttcaagtacagat

SEQ ID NO: 76974 - DNA, 20 bp, synthetic construct
  source 1..20: mol_type = other DNA
ctaagcacttcaagtacaga

SEQ ID NO: 76975 - DNA, 20 bp, synthetic construct
  source 1..20: mol_type = other DNA
gctaagcacttcaagtacag

SEQ ID NO: 76976 - DNA, 20 bp, synthetic construct
  source 1..20: mol_type = other DNA
agctaagcacttcaagtaca

SEQ ID NO: 76977 - DNA, 20 bp, synthetic construct
  source 1..20: mol_type = other DNA
cagctaagcacttcaagtac

SEQ ID NO: 76978 - DNA, 20 bp, synthetic construct
  source 1..20: mol_type = other DNA
ccagctaagcacttcaagta

SEQ ID NO: 76979 - DNA, 20 bp, synthetic construct
  source 1..20: mol_type = other DNA
cccagctaagcacttcaagt

SEQ ID NO: 76980 - DNA, 20 bp, synthetic construct
  source 1..20: mol_type = other DNA
acccagctaagcacttcaag

SEQ ID NO: 76981 - DNA, 20 bp, synthetic construct
  source 1..20: mol_type = other DNA
tacccagctaagcacttcaa

SEQ ID NO: 76982 - DNA, 20 bp, synthetic construct
  source 1..20: mol_type = other DNA
atacccagctaagcacttca

SEQ ID NO: 76983 - DNA, 20 bp, synthetic construct
  source 1..20: mol_type = other DNA
catacccagctaagcacttc

SEQ ID NO: 76984 - DNA, 20 bp, synthetic construct
  source 1..20: mol_type = other DNA
gcatacccagctaagcactt

SEQ ID NO: 76985 - DNA, 20 bp, synthetic construct
  source 1..20: mol_type = other DNA
agcatacccagctaagcact

SEQ ID NO: 76986 - DNA, 20 bp, synthetic construct
  source 1..20: mol_type = other DNA
cagcatacccagctaagcac

SEQ ID NO: 76987 - DNA, 20 bp, synthetic construct
  source 1..20: mol_type = other DNA
ccagcatacccagctaagca

SEQ ID NO: 76988 - DNA, 20 bp, synthetic construct
  source 1..20: mol_type = other DNA
gccagcatacccagctaagc

SEQ ID NO: 76989 - DNA, 20 bp, synthetic construct
  source 1..20: mol_type = other DNA
tgccagcatacccagctaag

SEQ ID NO: 76990 - DNA, 20 bp, synthetic construct
  source 1..20: mol_type = other DNA
gtgccagcatacccagctaa

SEQ ID NO: 76991 - DNA, 20 bp, synthetic construct
  source 1..20: mol_type = other DNA
tgtgccagcatacccagcta

SEQ ID NO: 76992 - DNA, 20 bp, synthetic construct
  source 1..20: mol_type = other DNA
atgtgccagcatacccagct

SEQ ID NO: 76993 - DNA, 20 bp, synthetic construct
  source 1..20: mol_type = other DNA
catgtgccagcatacccagc

SEQ ID NO: 76994 - DNA, 20 bp, synthetic construct
  source 1..20: mol_type = other DNA
gcatgtgccagcatacccag

SEQ ID NO: 76995 - DNA, 20 bp, synthetic construct
  source 1..20: mol_type = other DNA
ggcatgtgccagcataccca

SEQ ID NO: 76996 - DNA, 20 bp, synthetic construct
  source 1..20: mol_type = other DNA
aggcatgtgccagcataccc

SEQ ID NO: 76997 - DNA, 20 bp, synthetic construct
  source 1..20: mol_type = other DNA
caggcatgtgccagcatacc

SEQ ID NO: 76998 - DNA, 20 bp, synthetic construct
  source 1..20: mol_type = other DNA
gcaggcatgtgccagcatac

SEQ ID NO: 76999 - DNA, 20 bp, synthetic construct
  source 1..20: mol_type = other DNA
tgcaggcatgtgccagcata

SEQ ID NO: 77000 - DNA, 20 bp, synthetic construct
  source 1..20: mol_type = other DNA
ctgcaggcatgtgccagcat

SEQ ID NO: 77001 - DNA, 20 bp, synthetic construct
  source 1..20: mol_type = other DNA
actgcaggcatgtgccagca

SEQ ID NO: 77002 - DNA, 20 bp, synthetic construct
  source 1..20: mol_type = other DNA
gactgcaggcatgtgccagc

SEQ ID NO: 77003 - DNA, 20 bp, synthetic construct
  source 1..20: mol_type = other DNA
ggactgcaggcatgtgccag

SEQ ID NO: 77004 - DNA, 20 bp, synthetic construct
  source 1..20: mol_type = other DNA
gggactgcaggcatgtgcca

SEQ ID NO: 77005 - DNA, 20 bp, synthetic construct
  source 1..20: mol_type = other DNA
tgggactgcaggcatgtgcc

SEQ ID NO: 77006 - DNA, 20 bp, synthetic construct
  source 1..20: mol_type = other DNA
ctgggactgcaggcatgtgc

SEQ ID NO: 77007 - DNA, 20 bp, synthetic construct
  source 1..20: mol_type = other DNA
gctgggactgcaggcatgtg

SEQ ID NO: 77008 - DNA, 20 bp, synthetic construct
  source 1..20: mol_type = other DNA
agctgggactgcaggcatgt

SEQ ID NO: 77009 - DNA, 20 bp, synthetic construct
  source 1..20: mol_type = other DNA
tagctgggactgcaggcatg

SEQ ID NO: 77010 - DNA, 20 bp, synthetic construct
  source 1..20: mol_type = other DNA
gtagctgggactgcaggcat

SEQ ID NO: 77011 - DNA, 20 bp, synthetic construct
  source 1..20: mol_type = other DNA
agtagctgggactgcaggca

SEQ ID NO: 77012 - DNA, 20 bp, synthetic construct
  source 1..20: mol_type = other DNA
aagtagctgggactgcaggc

SEQ ID NO: 77013 - DNA, 20 bp, synthetic construct
  source 1..20: mol_type = other DNA
caagtagctgggactgcagg

SEQ ID NO: 77014 - DNA, 20 bp, synthetic construct
  source 1..20: mol_type = other DNA
ccaagtagctgggactgcag

SEQ ID NO: 77015 - DNA, 20 bp, synthetic construct
  source 1..20: mol_type = other DNA
cccaagtagctgggactgca

SEQ ID NO: 77016 - DNA, 20 bp, synthetic construct
  source 1..20: mol_type = other DNA
tcccaagtagctgggactgc

SEQ ID NO: 77017 - DNA, 20 bp, synthetic construct
  source 1..20: mol_type = other DNA
ctcccaagtagctgggactg

SEQ ID NO: 77018 - DNA, 20 bp, synthetic construct
  source 1..20: mol_type = other DNA
cctcccaagtagctgggact

SEQ ID NO: 77019 - DNA, 20 bp, synthetic construct
  source 1..20: mol_type = other DNA
gcctcccaagtagctgggac

SEQ ID NO: 77020 - DNA, 20 bp, synthetic construct
  source 1..20: mol_type = other DNA
agcctcccaagtagctggga

SEQ ID NO: 77021 - DNA, 20 bp, synthetic construct
  source 1..20: mol_type = other DNA
cagcctcccaagtagctggg

SEQ ID NO: 77022 - DNA, 20 bp, synthetic construct
  source 1..20: mol_type = other DNA
tcagcctcccaagtagctgg

SEQ ID NO: 77023 - DNA, 20 bp, synthetic construct
  source 1..20: mol_type = other DNA
ttcagcctcccaagtagctg

SEQ ID NO: 77024 - DNA, 20 bp, synthetic construct
  source 1..20: mol_type = other DNA
cttcagcctcccaagtagct

SEQ ID NO: 77025 - DNA, 20 bp, synthetic construct
  source 1..20: mol_type = other DNA
gcttcagcctcccaagtagc

SEQ ID NO: 77026 - DNA, 20 bp, synthetic construct
  source 1..20: mol_type = other DNA
tgcttcagcctcccaagtag

SEQ ID NO: 77027 - DNA, 20 bp, synthetic construct
  source 1..20: mol_type = other DNA
ctgcttcagcctcccaagta

SEQ ID NO: 77028 - DNA, 20 bp, synthetic construct
  source 1..20: mol_type = other DNA
cctgcttcagcctcccaagt

SEQ ID NO: 77029 - DNA, 20 bp, synthetic construct
  source 1..20: mol_type = other DNA
tcctgcttcagcctcccaag

SEQ ID NO: 77030 - DNA, 20 bp, synthetic construct
  source 1..20: mol_type = other DNA
ctcctgcttcagcctcccaa

SEQ ID NO: 77031 - DNA, 20 bp, synthetic construct
  source 1..20: mol_type = other DNA
cctcctgcttcagcctccca

SEQ ID NO: 77032 - DNA, 20 bp, synthetic construct
  source 1..20: mol_type = other DNA
tcctcctgcttcagcctccc

SEQ ID NO: 77033 - DNA, 20 bp, synthetic construct
  source 1..20: mol_type = other DNA
atcctcctgcttcagcctcc

SEQ ID NO: 77034 - DNA, 20 bp, synthetic construct
  source 1..20: mol_type = other DNA
gatcctcctgcttcagcctc

SEQ ID NO: 77035 - DNA, 20 bp, synthetic construct
  source 1..20: mol_type = other DNA
tgatcctcctgcttcagcct

SEQ ID NO: 77036 - DNA, 20 bp, synthetic construct
  source 1..20: mol_type = other DNA
gtgatcctcctgcttcagcc

SEQ ID NO: 77037 - DNA, 20 bp, synthetic construct
  source 1..20: mol_type = other DNA
agtgatcctcctgcttcagc

SEQ ID NO: 77038 - DNA, 20 bp, synthetic construct
  source 1..20: mol_type = other DNA
aagtgatcctcctgcttcag

SEQ ID NO: 77039 - DNA, 20 bp, synthetic construct
  source 1..20: mol_type = other DNA
caagtgatcctcctgcttca

SEQ ID NO: 77040 - DNA, 20 bp, synthetic construct
  source 1..20: mol_type = other DNA
tcaagtgatcctcctgcttc

SEQ ID NO: 77041 - DNA, 20 bp, synthetic construct
  source 1..20: mol_type = other DNA
ctcaagtgatcctcctgctt

SEQ ID NO: 77042 - DNA, 20 bp, synthetic construct
  source 1..20: mol_type = other DNA
gctcaagtgatcctcctgct

SEQ ID NO: 77043 - DNA, 20 bp, synthetic construct
  source 1..20: mol_type = other DNA
ggctcaagtgatcctcctgc

SEQ ID NO: 77044 - DNA, 20 bp, synthetic construct
  source 1..20: mol_type = other DNA
gggctcaagtgatcctcctg

SEQ ID NO: 77045 - DNA, 20 bp, synthetic construct
  source 1..20: mol_type = other DNA
tgggctcaagtgatcctcct

SEQ ID NO: 77046 - DNA, 20 bp, synthetic construct
  source 1..20: mol_type = other DNA
ctgggctcaagtgatcctcc

SEQ ID NO: 77047 - DNA, 20 bp, synthetic construct
  source 1..20: mol_type = other DNA
cctgggctcaagtgatcctc

SEQ ID NO: 77048 - DNA, 20 bp, synthetic construct
  source 1..20: mol_type = other DNA
tcctgggctcaagtgatcct

SEQ ID NO: 77049 - DNA, 20 bp, synthetic construct
  source 1..20: mol_type = other DNA
ctcctgggctcaagtgatcc

SEQ ID NO: 77050 - DNA, 20 bp, synthetic construct
  source 1..20: mol_type = other DNA
actcctgggctcaagtgatc

SEQ ID NO: 77051 - DNA, 20 bp, synthetic construct
  source 1..20: mol_type = other DNA
aactcctgggctcaagtgat

SEQ ID NO: 77052 - DNA, 20 bp, synthetic construct
  source 1..20: mol_type = other DNA
caactcctgggctcaagtga

SEQ ID NO: 77053 - DNA, 20 bp, synthetic construct
  source 1..20: mol_type = other DNA
ccaactcctgggctcaagtg

SEQ ID NO: 77054 - DNA, 20 bp, synthetic construct
  source 1..20: mol_type = other DNA
tccaactcctgggctcaagt

SEQ ID NO: 77055 - DNA, 20 bp, synthetic construct
  source 1..20: mol_type = other DNA
ctccaactcctgggctcaag

SEQ ID NO: 77056 - DNA, 20 bp, synthetic construct
  source 1..20: mol_type = other DNA
actccaactcctgggctcaa

SEQ ID NO: 77057 - DNA, 20 bp, synthetic construct
  source 1..20: mol_type = other DNA
gactccaactcctgggctca

SEQ ID NO: 77058 - DNA, 20 bp, synthetic construct
  source 1..20: mol_type = other DNA
ggactccaactcctgggctc

SEQ ID NO: 77059 - DNA, 20 bp, synthetic construct
  source 1..20: mol_type = other DNA
tggactccaactcctgggct

SEQ ID NO: 77060 - DNA, 20 bp, synthetic construct
  source 1..20: mol_type = other DNA
ctggactccaactcctgggc

SEQ ID NO: 77061 - DNA, 20 bp, synthetic construct
  source 1..20: mol_type = other DNA
gctggactccaactcctggg

SEQ ID NO: 77062 - DNA, 20 bp, synthetic construct
  source 1..20: mol_type = other DNA
ggctggactccaactcctgg

SEQ ID NO: 77063 - DNA, 20 bp, synthetic construct
  source 1..20: mol_type = other DNA
aggctggactccaactcctg

SEQ ID NO: 77064 - DNA, 20 bp, synthetic construct
  source 1..20: mol_type = other DNA
caggctggactccaactcct

SEQ ID NO: 77065 - DNA, 20 bp, synthetic construct
  source 1..20: mol_type = other DNA
tcaggctggactccaactcc

SEQ ID NO: 77066 - DNA, 20 bp, synthetic construct
  source 1..20: mol_type = other DNA
ttcaggctggactccaactc

SEQ ID NO: 77067 - DNA, 20 bp, synthetic construct
  source 1..20: mol_type = other DNA
attcaggctggactccaact

SEQ ID NO: 77068 - DNA, 20 bp, synthetic construct
  source 1..20: mol_type = other DNA
cattcaggctggactccaac

SEQ ID NO: 77069 - DNA, 20 bp, synthetic construct
  source 1..20: mol_type = other DNA
tcattcaggctggactccaa

SEQ ID NO: 77070 - DNA, 20 bp, synthetic construct
  source 1..20: mol_type = other DNA
gtcattcaggctggactcca

SEQ ID NO: 77071 - DNA, 20 bp, synthetic construct
  source 1..20: mol_type = other DNA
tgtcattcaggctggactcc

SEQ ID NO: 77072 - DNA, 20 bp, synthetic construct
  source 1..20: mol_type = other DNA
atgtcattcaggctggactc

SEQ ID NO: 77073 - DNA, 20 bp, synthetic construct
  source 1..20: mol_type = other DNA
tatgtcattcaggctggact

SEQ ID NO: 77074 - DNA, 20 bp, synthetic construct
  source 1..20: mol_type = other DNA
ttatgtcattcaggctggac

SEQ ID NO: 77075 - DNA, 20 bp, synthetic construct
  source 1..20: mol_type = other DNA
cttatgtcattcaggctgga

SEQ ID NO: 77076 - DNA, 20 bp, synthetic construct
  source 1..20: mol_type = other DNA
ccttatgtcattcaggctgg

SEQ ID NO: 77077 - DNA, 20 bp, synthetic construct
  source 1..20: mol_type = other DNA
tccttatgtcattcaggctg

SEQ ID NO: 77078 - DNA, 20 bp, synthetic construct
  source 1..20: mol_type = other DNA
ctccttatgtcattcaggct

SEQ ID NO: 77079 - DNA, 20 bp, synthetic construct
  source 1..20: mol_type = other DNA
tctccttatgtcattcaggc

SEQ ID NO: 77080 - DNA, 20 bp, synthetic construct
  source 1..20: mol_type = other DNA
gtctccttatgtcattcagg

SEQ ID NO: 77081 - DNA, 20 bp, synthetic construct
  source 1..20: mol_type = other DNA
ggtctccttatgtcattcag

SEQ ID NO: 77082 - DNA, 20 bp, synthetic construct
  source 1..20: mol_type = other DNA
gggtctccttatgtcattca

SEQ ID NO: 77083 - DNA, 20 bp, synthetic construct
  source 1..20: mol_type = other DNA
ggggtctccttatgtcattc

SEQ ID NO: 77084 - DNA, 20 bp, synthetic construct
  source 1..20: mol_type = other DNA
aggggtctccttatgtcatt

SEQ ID NO: 77085 - DNA, 20 bp, synthetic construct
  source 1..20: mol_type = other DNA
aaggggtctccttatgtcat

SEQ ID NO: 77086 - DNA, 20 bp, synthetic construct
  source 1..20: mol_type = other DNA
gaaggggtctccttatgtca

SEQ ID NO: 77087 - DNA, 20 bp, synthetic construct
  source 1..20: mol_type = other DNA
agaaggggtctccttatgtc

SEQ ID NO: 77088 - DNA, 20 bp, synthetic construct
  source 1..20: mol_type = other DNA
gagaaggggtctccttatgt

SEQ ID NO: 77089 - DNA, 20 bp, synthetic construct
  source 1..20: mol_type = other DNA
agagaaggggtctccttatg

SEQ ID NO: 77090 - DNA, 20 bp, synthetic construct
  source 1..20: mol_type = other DNA
tagagaaggggtctccttat

SEQ ID NO: 77091 - DNA, 20 bp, synthetic construct
  source 1..20: mol_type = other DNA
ttagagaaggggtctcctta

SEQ ID NO: 77092 - DNA, 20 bp, synthetic construct
  source 1..20: mol_type = other DNA
cttagagaaggggtctcctt

SEQ ID NO: 77093 - DNA, 20 bp, synthetic construct
  source 1..20: mol_type = other DNA
tcttagagaaggggtctcct

SEQ ID NO: 77094 - DNA, 20 bp, synthetic construct
  source 1..20: mol_type = other DNA
ttcttagagaaggggtctcc

SEQ ID NO: 77095 - DNA, 20 bp, synthetic construct
  source 1..20: mol_type = other DNA
tttcttagagaaggggtctc

SEQ ID NO: 77096 - DNA, 20 bp, synthetic construct
  source 1..20: mol_type = other DNA
atttcttagagaaggggtct

SEQ ID NO: 77097 - DNA, 20 bp, synthetic construct
  source 1..20: mol_type = other DNA
tatttcttagagaaggggtc

SEQ ID NO: 77098 - DNA, 20 bp, synthetic construct
  source 1..20: mol_type = other DNA
ttatttcttagagaaggggt

SEQ ID NO: 77099 - DNA, 20 bp, synthetic construct
  source 1..20: mol_type = other DNA
tttatttcttagagaagggg

SEQ ID NO: 77100 - DNA, 20 bp, synthetic construct
  source 1..20: mol_type = other DNA
ttttatttcttagagaaggg

SEQ ID NO: 77101 - DNA, 20 bp, synthetic construct
  source 1..20: mol_type = other DNA
tttttatttcttagagaagg

SEQ ID NO: 77102 - DNA, 20 bp, synthetic construct
  source 1..20: mol_type = other DNA
atttttatttcttagagaag

SEQ ID NO: 77103 - DNA, 20 bp, synthetic construct
  source 1..20: mol_type = other DNA
tatttttatttcttagagaa

SEQ ID NO: 77104 - DNA, 20 bp, synthetic construct
  source 1..20: mol_type = other DNA
ttatttttatttcttagaga

SEQ ID NO: 77105 - DNA, 20 bp, synthetic construct
  source 1..20: mol_type = other DNA
tttatttttatttcttagag

SEQ ID NO: 77106 - DNA, 20 bp, synthetic construct
  source 1..20: mol_type = other DNA
ttttatttttatttcttaga

SEQ ID NO: 77107 - DNA, 20 bp, synthetic construct
  source 1..20: mol_type = other DNA
tttttatttttatttcttag

SEQ ID NO: 77108 - DNA, 20 bp, synthetic construct
  source 1..20: mol_type = other DNA
gtttttatttttatttctta

SEQ ID NO: 77109 - DNA, 20 bp, synthetic construct
  source 1..20: mol_type = other DNA
tgtttttatttttatttctt

SEQ ID NO: 77110 - DNA, 20 bp, synthetic construct
  source 1..20: mol_type = other DNA
ttgtttttatttttatttct

SEQ ID NO: 77111 - DNA, 20 bp, synthetic construct
  source 1..20: mol_type = other DNA
tttgtttttatttttatttc

SEQ ID NO: 77112 - DNA, 20 bp, synthetic construct
  source 1..20: mol_type = other DNA
atttgtttttatttttattt

SEQ ID NO: 77113 - DNA, 20 bp, synthetic construct
  source 1..20: mol_type = other DNA
tatttgtttttatttttatt

SEQ ID NO: 77114 - DNA, 20 bp, synthetic construct
  source 1..20: mol_type = other DNA
gtatttgtttttatttttat

SEQ ID NO: 77115 - DNA, 20 bp, synthetic construct
  source 1..20: mol_type = other DNA
agtatttgtttttattttta

SEQ ID NO: 77116 - DNA, 20 bp, synthetic construct
  source 1..20: mol_type = other DNA
aagtatttgtttttattttt

SEQ ID NO: 77117 - DNA, 20 bp, synthetic construct
  source 1..20: mol_type = other DNA
taagtatttgtttttatttt

SEQ ID NO: 77118 - DNA, 20 bp, synthetic construct
  source 1..20: mol_type = other DNA
ttaagtatttgtttttattt

SEQ ID NO: 77119 - DNA, 20 bp, synthetic construct
  source 1..20: mol_type = other DNA
attaagtatttgtttttatt

SEQ ID NO: 77120 - DNA, 20 bp, synthetic construct
  source 1..20: mol_type = other DNA
tattaagtatttgtttttat

SEQ ID NO: 77121 - DNA, 20 bp, synthetic construct
  source 1..20: mol_type = other DNA
ttattaagtatttgttttta

SEQ ID NO: 77122 - DNA, 20 bp, synthetic construct
  source 1..20: mol_type = other DNA
tttattaagtatttgttttt

SEQ ID NO: 77123 - DNA, 20 bp, synthetic construct
  source 1..20: mol_type = other DNA
ctttattaagtatttgtttt

SEQ ID NO: 77124 - DNA, 20 bp, synthetic construct
  source 1..20: mol_type = other DNA
tctttattaagtatttgttt

SEQ ID NO: 77125 - DNA, 20 bp, synthetic construct
  source 1..20: mol_type = other DNA
gtctttattaagtatttgtt

SEQ ID NO: 77126 - DNA, 20 bp, synthetic construct
  source 1..20: mol_type = other DNA
agtctttattaagtatttgt

SEQ ID NO: 77127 - DNA, 20 bp, synthetic construct
  source 1..20: mol_type = other DNA
gagtctttattaagtatttg

SEQ ID NO: 77128 - DNA, 20 bp, synthetic construct
  source 1..20: mol_type = other DNA
agagtctttattaagtattt

SEQ ID NO: 77129 - DNA, 20 bp, synthetic construct
  source 1..20: mol_type = other DNA
cagagtctttattaagtatt

SEQ ID NO: 77130 - DNA, 20 bp, synthetic construct
  source 1..20: mol_type = other DNA
acagagtctttattaagtat

SEQ ID NO: 77131 - DNA, 20 bp, synthetic construct
  source 1..20: mol_type = other DNA
gacagagtctttattaagta

SEQ ID NO: 77132 - DNA, 20 bp, synthetic construct
  source 1..20: mol_type = other DNA
agacagagtctttattaagt

SEQ ID NO: 77133 - DNA, 20 bp, synthetic construct
  source 1..20: mol_type = other DNA
aagacagagtctttattaag

SEQ ID NO: 77134 - DNA, 20 bp, synthetic construct
  source 1..20: mol_type = other DNA
aaagacagagtctttattaa

SEQ ID NO: 77135 - DNA, 20 bp, synthetic construct
  source 1..20: mol_type = other DNA
taaagacagagtctttatta

SEQ ID NO: 77136 - DNA, 20 bp, synthetic construct
  source 1..20: mol_type = other DNA
ctaaagacagagtctttatt

SEQ ID NO: 77137 - DNA, 20 bp, synthetic construct
  source 1..20: mol_type = other DNA
cctaaagacagagtctttat

SEQ ID NO: 77138 - DNA, 20 bp, synthetic construct
  source 1..20: mol_type = other DNA
tcctaaagacagagtcttta

SEQ ID NO: 77139 - DNA, 20 bp, synthetic construct
  source 1..20: mol_type = other DNA
atcctaaagacagagtcttt

SEQ ID NO: 77140 - DNA, 20 bp, synthetic construct
  source 1..20: mol_type = other DNA
tatcctaaagacagagtctt

SEQ ID NO: 77141 - DNA, 20 bp, synthetic construct
  source 1..20: mol_type = other DNA
ctatcctaaagacagagtct

SEQ ID NO: 77142 - DNA, 20 bp, synthetic construct
  source 1..20: mol_type = other DNA
tctatcctaaagacagagtc

SEQ ID NO: 77143 - DNA, 20 bp, synthetic construct
  source 1..20: mol_type = other DNA
ctctatcctaaagacagagt

SEQ ID NO: 77144 - DNA, 20 bp, synthetic construct
  source 1..20: mol_type = other DNA
tctctatcctaaagacagag

SEQ ID NO: 77145 - DNA, 20 bp, synthetic construct
  source 1..20: mol_type = other DNA
ctctctatcctaaagacaga

SEQ ID NO: 77146 - DNA, 20 bp, synthetic construct
  source 1..20: mol_type = other DNA
gctctctatcctaaagacag

SEQ ID NO: 77147 - DNA, 20 bp, synthetic construct
  source 1..20: mol_type = other DNA
tgctctctatcctaaagaca

SEQ ID NO: 77148 - DNA, 20 bp, synthetic construct
  source 1..20: mol_type = other DNA
atgctctctatcctaaagac

SEQ ID NO: 77149 - DNA, 20 bp, synthetic construct
  source 1..20: mol_type = other DNA
tatgctctctatcctaaaga

SEQ ID NO: 77150 - DNA, 20 bp, synthetic construct
  source 1..20: mol_type = other DNA
ctatgctctctatcctaaag

SEQ ID NO: 77151 - DNA, 20 bp, synthetic construct
  source 1..20: mol_type = other DNA
tctatgctctctatcctaaa

SEQ ID NO: 77152 - DNA, 20 bp, synthetic construct
  source 1..20: mol_type = other DNA
ctctatgctctctatcctaa

SEQ ID NO: 77153 - DNA, 20 bp, synthetic construct
  source 1..20: mol_type = other DNA
tctctatgctctctatccta

SEQ ID NO: 77154 - DNA, 20 bp, synthetic construct
  source 1..20: mol_type = other DNA
atctctatgctctctatcct

SEQ ID NO: 77155 - DNA, 20 bp, synthetic construct
  source 1..20: mol_type = other DNA
tatctctatgctctctatcc

SEQ ID NO: 77156 - DNA, 20 bp, synthetic construct
  source 1..20: mol_type = other DNA
atatctctatgctctctatc

SEQ ID NO: 77157 - DNA, 20 bp, synthetic construct
  source 1..20: mol_type = other DNA
tatatctctatgctctctat

SEQ ID NO: 77158 - DNA, 20 bp, synthetic construct
  source 1..20: mol_type = other DNA
ttatatctctatgctctcta

SEQ ID NO: 77159 - DNA, 20 bp, synthetic construct
  source 1..20: mol_type = other DNA
tttatatctctatgctctct

SEQ ID NO: 77160 - DNA, 20 bp, synthetic construct
  source 1..20: mol_type = other DNA
ctttatatctctatgctctc

SEQ ID NO: 77161 - DNA, 20 bp, synthetic construct
  source 1..20: mol_type = other DNA
gctttatatctctatgctct

SEQ ID NO: 77162 - DNA, 20 bp, synthetic construct
  source 1..20: mol_type = other DNA
tgctttatatctctatgctc

SEQ ID NO: 77163 - DNA, 20 bp, synthetic construct
  source 1..20: mol_type = other DNA
ttgctttatatctctatgct

SEQ ID NO: 77164 - DNA, 20 bp, synthetic construct
  source 1..20: mol_type = other DNA
tttgctttatatctctatgc

SEQ ID NO: 77165 - DNA, 20 bp, synthetic construct
  source 1..20: mol_type = other DNA
ctttgctttatatctctatg

SEQ ID NO: 77166 - DNA, 20 bp, synthetic construct
  source 1..20: mol_type = other DNA
actttgctttatatctctat

SEQ ID NO: 77167 - DNA, 20 bp, synthetic construct
  source 1..20: mol_type = other DNA
cactttgctttatatctcta

SEQ ID NO: 77168 - DNA, 20 bp, synthetic construct
  source 1..20: mol_type = other DNA
acactttgctttatatctct

SEQ ID NO: 77169 - DNA, 20 bp, synthetic construct
  source 1..20: mol_type = other DNA
gacactttgctttatatctc

SEQ ID NO: 77170 - DNA, 20 bp, synthetic construct
  source 1..20: mol_type = other DNA
agacactttgctttatatct

SEQ ID NO: 77171 - DNA, 20 bp, synthetic construct
  source 1..20: mol_type = other DNA
aagacactttgctttatatc

SEQ ID NO: 77172 - DNA, 20 bp, synthetic construct
  source 1..20: mol_type = other DNA
caagacactttgctttatat

SEQ ID NO: 77173 - DNA, 20 bp, synthetic construct
  source 1..20: mol_type = other DNA
gcaagacactttgctttata

SEQ ID NO: 77174 - DNA, 20 bp, synthetic construct
  source 1..20: mol_type = other DNA
ggcaagacactttgctttat

SEQ ID NO: 77175 - DNA, 20 bp, synthetic construct
  source 1..20: mol_type = other DNA
tggcaagacactttgcttta

SEQ ID NO: 77176 - DNA, 20 bp, synthetic construct
  source 1..20: mol_type = other DNA
ttggcaagacactttgcttt

SEQ ID NO: 77177 - DNA, 20 bp, synthetic construct
  source 1..20: mol_type = other DNA
tttggcaagacactttgctt

SEQ ID NO: 77178 - DNA, 20 bp, synthetic construct
  source 1..20: mol_type = other DNA
ttttggcaagacactttgct

SEQ ID NO: 77179 - DNA, 20 bp, synthetic construct
  source 1..20: mol_type = other DNA
tttttggcaagacactttgc

SEQ ID NO: 77180 - DNA, 20 bp, synthetic construct
  source 1..20: mol_type = other DNA
atttttggcaagacactttg

SEQ ID NO: 77181 - DNA, 20 bp, synthetic construct
  source 1..20: mol_type = other DNA
catttttggcaagacacttt

SEQ ID NO: 77182 - DNA, 20 bp, synthetic construct
  source 1..20: mol_type = other DNA
tcatttttggcaagacactt

SEQ ID NO: 77183 - DNA, 20 bp, synthetic construct
  source 1..20: mol_type = other DNA
ctcatttttggcaagacact

SEQ ID NO: 77184 - DNA, 20 bp, synthetic construct
  source 1..20: mol_type = other DNA
actcatttttggcaagacac

SEQ ID NO: 77185 - DNA, 20 bp, synthetic construct
  source 1..20: mol_type = other DNA
cactcatttttggcaagaca

SEQ ID NO: 77186 - DNA, 20 bp, synthetic construct
  source 1..20: mol_type = other DNA
acactcatttttggcaagac

SEQ ID NO: 77187 - DNA, 20 bp, synthetic construct
  source 1..20: mol_type = other DNA
aacactcatttttggcaaga

SEQ ID NO: 77188 - DNA, 20 bp, synthetic construct
  source 1..20: mol_type = other DNA
taacactcatttttggcaag

SEQ ID NO: 77189 - DNA, 20 bp, synthetic construct
  source 1..20: mol_type = other DNA
ataacactcatttttggcaa

SEQ ID NO: 77190 - DNA, 20 bp, synthetic construct
  source 1..20: mol_type = other DNA
cataacactcatttttggca

SEQ ID NO: 77191 - DNA, 20 bp, synthetic construct
  source 1..20: mol_type = other DNA
ccataacactcatttttggc

SEQ ID NO: 77192 - DNA, 20 bp, synthetic construct
  source 1..20: mol_type = other DNA
accataacactcatttttgg

SEQ ID NO: 77193 - DNA, 20 bp, synthetic construct
  source 1..20: mol_type = other DNA
taccataacactcatttttg

SEQ ID NO: 77194 - DNA, 20 bp, synthetic construct
  source 1..20: mol_type = other DNA
gtaccataacactcattttt

SEQ ID NO: 77195 - DNA, 20 bp, synthetic construct
  source 1..20: mol_type = other DNA
ggtaccataacactcatttt

SEQ ID NO: 77196 - DNA, 20 bp, synthetic construct
  source 1..20: mol_type = other DNA
tggtaccataacactcattt

SEQ ID NO: 77197 - DNA, 20 bp, synthetic construct
  source 1..20: mol_type = other DNA
ttggtaccataacactcatt

SEQ ID NO: 77198 - DNA, 20 bp, synthetic construct
  source 1..20: mol_type = other DNA
attggtaccataacactcat

SEQ ID NO: 77199 - DNA, 20 bp, synthetic construct
  source 1..20: mol_type = other DNA
tattggtaccataacactca

SEQ ID NO: 77200 - DNA, 20 bp, synthetic construct
  source 1..20: mol_type = other DNA
atattggtaccataacactc

SEQ ID NO: 77201 - DNA, 20 bp, synthetic construct
  source 1..20: mol_type = other DNA
aatattggtaccataacact

SEQ ID NO: 77202 - DNA, 20 bp, synthetic construct
  source 1..20: mol_type = other DNA
aaatattggtaccataacac

SEQ ID NO: 77203 - DNA, 20 bp, synthetic construct
  source 1..20: mol_type = other DNA
caaatattggtaccataaca

SEQ ID NO: 77204 - DNA, 20 bp, synthetic construct
  source 1..20: mol_type = other DNA
tcaaatattggtaccataac

SEQ ID NO: 77205 - DNA, 20 bp, synthetic construct
  source 1..20: mol_type = other DNA
ctcaaatattggtaccataa

SEQ ID NO: 77206 - DNA, 20 bp, synthetic construct
  source 1..20: mol_type = other DNA
actcaaatattggtaccata

SEQ ID NO: 77207 - DNA, 20 bp, synthetic construct
  source 1..20: mol_type = other DNA
tactcaaatattggtaccat

SEQ ID NO: 77208 - DNA, 20 bp, synthetic construct
  source 1..20: mol_type = other DNA
ctactcaaatattggtacca

SEQ ID NO: 77209 - DNA, 20 bp, synthetic construct
  source 1..20: mol_type = other DNA
tctactcaaatattggtacc

SEQ ID NO: 77210 - DNA, 20 bp, synthetic construct
  source 1..20: mol_type = other DNA
ttctactcaaatattggtac

SEQ ID NO: 77211 - DNA, 20 bp, synthetic construct
  source 1..20: mol_type = other DNA
attctactcaaatattggta

SEQ ID NO: 77212 - DNA, 20 bp, synthetic construct
  source 1..20: mol_type = other DNA
cattctactcaaatattggt

SEQ ID NO: 77213 - DNA, 20 bp, synthetic construct
  source 1..20: mol_type = other DNA
tcattctactcaaatattgg

SEQ ID NO: 77214 - DNA, 20 bp, synthetic construct
  source 1..20: mol_type = other DNA
ttcattctactcaaatattg

SEQ ID NO: 77215 - DNA, 20 bp, synthetic construct
  source 1..20: mol_type = other DNA
cttcattctactcaaatatt

SEQ ID NO: 77216 - DNA, 20 bp, synthetic construct
  source 1..20: mol_type = other DNA
tcttcattctactcaaatat

SEQ ID NO: 77217 - DNA, 20 bp, synthetic construct
  source 1..20: mol_type = other DNA
ttcttcattctactcaaata

SEQ ID NO: 77218 - DNA, 20 bp, synthetic construct
  source 1..20: mol_type = other DNA
attcttcattctactcaaat

SEQ ID NO: 77219 - DNA, 20 bp, synthetic construct
  source 1..20: mol_type = other DNA
gattcttcattctactcaaa

SEQ ID NO: 77220 - DNA, 20 bp, synthetic construct
  source 1..20: mol_type = other DNA
agattcttcattctactcaa

SEQ ID NO: 77221 - DNA, 20 bp, synthetic construct
  source 1..20: mol_type = other DNA
aagattcttcattctactca

SEQ ID NO: 77222 - DNA, 20 bp, synthetic construct
  source 1..20: mol_type = other DNA
gaagattcttcattctactc

SEQ ID NO: 77223 - DNA, 20 bp, synthetic construct
  source 1..20: mol_type = other DNA
ggaagattcttcattctact

SEQ ID NO: 77224 - DNA, 20 bp, synthetic construct
  source 1..20: mol_type = other DNA
tggaagattcttcattctac

SEQ ID NO: 77225 - DNA, 20 bp, synthetic construct
  source 1..20: mol_type = other DNA
atggaagattcttcattcta

SEQ ID NO: 77226 - DNA, 20 bp, synthetic construct
  source 1..20: mol_type = other DNA
aatggaagattcttcattct

SEQ ID NO: 77227 - DNA, 20 bp, synthetic construct
  source 1..20: mol_type = other DNA
caatggaagattcttcattc

SEQ ID NO: 77228 - DNA, 20 bp, synthetic construct
  source 1..20: mol_type = other DNA
tcaatggaagattcttcatt

SEQ ID NO: 77229 - DNA, 20 bp, synthetic construct
  source 1..20: mol_type = other DNA
ctcaatggaagattcttcat

SEQ ID NO: 77230 - DNA, 20 bp, synthetic construct
  source 1..20: mol_type = other DNA
actcaatggaagattcttca

SEQ ID NO: 77231 - DNA, 20 bp, synthetic construct
  source 1..20: mol_type = other DNA
tactcaatggaagattcttc

SEQ ID NO: 77232 - DNA, 20 bp, synthetic construct
  source 1..20: mol_type = other DNA
ctactcaatggaagattctt

SEQ ID NO: 77233 - DNA, 20 bp, synthetic construct
  source 1..20: mol_type = other DNA
tctactcaatggaagattct

SEQ ID NO: 77234 - DNA, 20 bp, synthetic construct
  source 1..20: mol_type = other DNA
ttctactcaatggaagattc

SEQ ID NO: 77235 - DNA, 20 bp, synthetic construct
  source 1..20: mol_type = other DNA
tttctactcaatggaagatt

SEQ ID NO: 77236 - DNA, 20 bp, synthetic construct
  source 1..20: mol_type = other DNA
ctttctactcaatggaagat

SEQ ID NO: 77237 - DNA, 20 bp, synthetic construct
  source 1..20: mol_type = other DNA
tctttctactcaatggaaga

SEQ ID NO: 77238 - DNA, 20 bp, synthetic construct
  source 1..20: mol_type = other DNA
ctctttctactcaatggaag

SEQ ID NO: 77239 - DNA, 20 bp, synthetic construct
  source 1..20: mol_type = other DNA
tctctttctactcaatggaa

SEQ ID NO: 77240 - DNA, 20 bp, synthetic construct
  source 1..20: mol_type = other DNA
ttctctttctactcaatgga

SEQ ID NO: 77241 - DNA, 20 bp, synthetic construct
  source 1..20: mol_type = other DNA
attctctttctactcaatgg

SEQ ID NO: 77242 - DNA, 20 bp, synthetic construct
  source 1..20: mol_type = other DNA
aattctctttctactcaatg

SEQ ID NO: 77243 - DNA, 20 bp, synthetic construct
  source 1..20: mol_type = other DNA
aaattctctttctactcaat

SEQ ID NO: 77244 - DNA, 20 bp, synthetic construct
  source 1..20: mol_type = other DNA
caaattctctttctactcaa

SEQ ID NO: 77245 - DNA, 20 bp, synthetic construct
  source 1..20: mol_type = other DNA
acaaattctctttctactca

SEQ ID NO: 77246 - DNA, 20 bp, synthetic construct
  source 1..20: mol_type = other DNA
tacaaattctctttctactc

SEQ ID NO: 77247 - DNA, 20 bp, synthetic construct
  source 1..20: mol_type = other DNA
ttacaaattctctttctact

SEQ ID NO: 77248 - DNA, 20 bp, synthetic construct
  source 1..20: mol_type = other DNA
gttacaaattctctttctac

SEQ ID NO: 77249 - DNA, 20 bp, synthetic construct
  source 1..20: mol_type = other DNA
tgttacaaattctctttcta

SEQ ID NO: 77250 - DNA, 20 bp, synthetic construct
  source 1..20: mol_type = other DNA
atgttacaaattctctttct

SEQ ID NO: 77251 - DNA, 20 bp, synthetic construct
  source 1..20: mol_type = other DNA
tatgttacaaattctctttc

SEQ ID NO: 77252 - DNA, 20 bp, synthetic construct
  source 1..20: mol_type = other DNA
atatgttacaaattctcttt

SEQ ID NO: 77253 - DNA, 20 bp, synthetic construct
  source 1..20: mol_type = other DNA
gatatgttacaaattctctt

SEQ ID NO: 77254 - DNA, 20 bp, synthetic construct
  source 1..20: mol_type = other DNA
agatatgttacaaattctct

SEQ ID NO: 77255 - DNA, 20 bp, synthetic construct
  source 1..20: mol_type = other DNA
cagatatgttacaaattctc

SEQ ID NO: 77256 - DNA, 20 bp, synthetic construct
  source 1..20: mol_type = other DNA
acagatatgttacaaattct

SEQ ID NO: 77257 - DNA, 20 bp, synthetic construct
  source 1..20: mol_type = other DNA
cacagatatgttacaaattc

SEQ ID NO: 77258 - DNA, 20 bp, synthetic construct
  source 1..20: mol_type = other DNA
acacagatatgttacaaatt

SEQ ID NO: 77259 - DNA, 20 bp, synthetic construct
  source 1..20: mol_type = other DNA
aacacagatatgttacaaat

SEQ ID NO: 77260 - DNA, 20 bp, synthetic construct
  source 1..20: mol_type = other DNA
aaacacagatatgttacaaa

SEQ ID NO: 77261 - DNA, 20 bp, synthetic construct
  source 1..20: mol_type = other DNA
caaacacagatatgttacaa

SEQ ID NO: 77262 - DNA, 20 bp, synthetic construct
  source 1..20: mol_type = other DNA
tcaaacacagatatgttaca

SEQ ID NO: 77263 - DNA, 20 bp, synthetic construct
  source 1..20: mol_type = other DNA
atcaaacacagatatgttac

SEQ ID NO: 77264 - DNA, 20 bp, synthetic construct
  source 1..20: mol_type = other DNA
catcaaacacagatatgtta

SEQ ID NO: 77265 - DNA, 20 bp, synthetic construct
  source 1..20: mol_type = other DNA
acatcaaacacagatatgtt

SEQ ID NO: 77266 - DNA, 20 bp, synthetic construct
  source 1..20: mol_type = other DNA
aacatcaaacacagatatgt

SEQ ID NO: 77267 - DNA, 20 bp, synthetic construct
  source 1..20: mol_type = other DNA
aaacatcaaacacagatatg

SEQ ID NO: 77268 - DNA, 20 bp, synthetic construct
  source 1..20: mol_type = other DNA
taaacatcaaacacagatat

SEQ ID NO: 77269 - DNA, 20 bp, synthetic construct
  source 1..20: mol_type = other DNA
ttaaacatcaaacacagata

SEQ ID NO: 77270 - DNA, 20 bp, synthetic construct
  source 1..20: mol_type = other DNA
cttaaacatcaaacacagat

SEQ ID NO: 77271 - DNA, 20 bp, synthetic construct
  source 1..20: mol_type = other DNA
ccttaaacatcaaacacaga

SEQ ID NO: 77272 - DNA, 20 bp, synthetic construct
  source 1..20: mol_type = other DNA
gccttaaacatcaaacacag

SEQ ID NO: 77273 - DNA, 20 bp, synthetic construct
  source 1..20: mol_type = other DNA
tgccttaaacatcaaacaca

SEQ ID NO: 77274 - DNA, 20 bp, synthetic construct
  source 1..20: mol_type = other DNA
atgccttaaacatcaaacac

SEQ ID NO: 77275 - DNA, 20 bp, synthetic construct
  source 1..20: mol_type = other DNA
tatgccttaaacatcaaaca

SEQ ID NO: 77276 - DNA, 20 bp, synthetic construct
  source 1..20: mol_type = other DNA
ttatgccttaaacatcaaac

SEQ ID NO: 77277 - DNA, 20 bp, synthetic construct
  source 1..20: mol_type = other DNA
gttatgccttaaacatcaaa

SEQ ID NO: 77278 - DNA, 20 bp, synthetic construct
  source 1..20: mol_type = other DNA
tgttatgccttaaacatcaa

SEQ ID NO: 77279 - DNA, 20 bp, synthetic construct
  source 1..20: mol_type = other DNA
ctgttatgccttaaacatca

SEQ ID NO: 77280 - DNA, 20 bp, synthetic construct
  source 1..20: mol_type = other DNA
gctgttatgccttaaacatc

SEQ ID NO: 77281 - DNA, 20 bp, synthetic construct
  source 1..20: mol_type = other DNA
agctgttatgccttaaacat

SEQ ID NO: 77282 - DNA, 20 bp, synthetic construct
  source 1..20: mol_type = other DNA
aagctgttatgccttaaaca

SEQ ID NO: 77283 - DNA, 20 bp, synthetic construct
  source 1..20: mol_type = other DNA
taagctgttatgccttaaac

SEQ ID NO: 77284 - DNA, 20 bp, synthetic construct
  source 1..20: mol_type = other DNA
ttaagctgttatgccttaaa

SEQ ID NO: 77285 - DNA, 20 bp, synthetic construct
  source 1..20: mol_type = other DNA
attaagctgttatgccttaa

SEQ ID NO: 77286 - DNA, 20 bp, synthetic construct
  source 1..20: mol_type = other DNA
tattaagctgttatgcctta

SEQ ID NO: 77287 - DNA, 20 bp, synthetic construct
  source 1..20: mol_type = other DNA
ttattaagctgttatgcctt

SEQ ID NO: 77288 - DNA, 20 bp, synthetic construct
  source 1..20: mol_type = other DNA
attattaagctgttatgcct

SEQ ID NO: 77289 - DNA, 20 bp, synthetic construct
  source 1..20: mol_type = other DNA
cattattaagctgttatgcc

SEQ ID NO: 77290 - DNA, 20 bp, synthetic construct
  source 1..20: mol_type = other DNA
tcattattaagctgttatgc

SEQ ID NO: 77291 - DNA, 20 bp, synthetic construct
  source 1..20: mol_type = other DNA
gtcattattaagctgttatg

SEQ ID NO: 77292 - DNA, 20 bp, synthetic construct
  source 1..20: mol_type = other DNA
tgtcattattaagctgttat

SEQ ID NO: 77293 - DNA, 20 bp, synthetic construct
  source 1..20: mol_type = other DNA
gtgtcattattaagctgtta

SEQ ID NO: 77294 - DNA, 20 bp, synthetic construct
  source 1..20: mol_type = other DNA
agtgtcattattaagctgtt

SEQ ID NO: 77295 - DNA, 20 bp, synthetic construct
  source 1..20: mol_type = other DNA
gagtgtcattattaagctgt

SEQ ID NO: 77296 - DNA, 20 bp, synthetic construct
  source 1..20: mol_type = other DNA
agagtgtcattattaagctg

SEQ ID NO: 77297 - DNA, 20 bp, synthetic construct
  source 1..20: mol_type = other DNA
aagagtgtcattattaagct

SEQ ID NO: 77298 - DNA, 20 bp, synthetic construct
  source 1..20: mol_type = other DNA
gaagagtgtcattattaagc

SEQ ID NO: 77299 - DNA, 20 bp, synthetic construct
  source 1..20: mol_type = other DNA
ggaagagtgtcattattaag

SEQ ID NO: 77300 - DNA, 20 bp, synthetic construct
  source 1..20: mol_type = other DNA
aggaagagtgtcattattaa

SEQ ID NO: 77301 - DNA, 20 bp, synthetic construct
  source 1..20: mol_type = other DNA
gaggaagagtgtcattatta

SEQ ID NO: 77302 - DNA, 20 bp, synthetic construct
  source 1..20: mol_type = other DNA
tgaggaagagtgtcattatt

SEQ ID NO: 77303 - DNA, 20 bp, synthetic construct
  source 1..20: mol_type = other DNA
ctgaggaagagtgtcattat

SEQ ID NO: 77304 - DNA, 20 bp, synthetic construct
  source 1..20: mol_type = other DNA
tctgaggaagagtgtcatta

SEQ ID NO: 77305 - DNA, 20 bp, synthetic construct
  source 1..20: mol_type = other DNA
gtctgaggaagagtgtcatt

SEQ ID NO: 77306 - DNA, 20 bp, synthetic construct
  source 1..20: mol_type = other DNA
tgtctgaggaagagtgtcat

SEQ ID NO: 77307 - DNA, 20 bp, synthetic construct
  source 1..20: mol_type = other DNA
ctgtctgaggaagagtgtca

SEQ ID NO: 77308 - DNA, 20 bp, synthetic construct
  source 1..20: mol_type = other DNA
cctgtctgaggaagagtgtc

SEQ ID NO: 77309 - DNA, 20 bp, synthetic construct
  source 1..20: mol_type = other DNA
tcctgtctgaggaagagtgt

SEQ ID NO: 77310 - DNA, 20 bp, synthetic construct
  source 1..20: mol_type = other DNA
ttcctgtctgaggaagagtg

SEQ ID NO: 77311 - DNA, 20 bp, synthetic construct
  source 1..20: mol_type = other DNA
cttcctgtctgaggaagagt

SEQ ID NO: 77312 - DNA, 20 bp, synthetic construct
  source 1..20: mol_type = other DNA
gcttcctgtctgaggaagag

SEQ ID NO: 77313 - DNA, 20 bp, synthetic construct
  source 1..20: mol_type = other DNA
ggcttcctgtctgaggaaga

SEQ ID NO: 77314 - DNA, 20 bp, synthetic construct
  source 1..20: mol_type = other DNA
aggcttcctgtctgaggaag

SEQ ID NO: 77315 - DNA, 20 bp, synthetic construct
  source 1..20: mol_type = other DNA
caggcttcctgtctgaggaa

SEQ ID NO: 77316 - DNA, 20 bp, synthetic construct
  source 1..20: mol_type = other DNA
tcaggcttcctgtctgagga

SEQ ID NO: 77317 - DNA, 20 bp, synthetic construct
  source 1..20: mol_type = other DNA
ttcaggcttcctgtctgagg

SEQ ID NO: 77318 - DNA, 20 bp, synthetic construct
  source 1..20: mol_type = other DNA
tttcaggcttcctgtctgag

SEQ ID NO: 77319 - DNA, 20 bp, synthetic construct
  source 1..20: mol_type = other DNA
atttcaggcttcctgtctga

SEQ ID NO: 77320 - DNA, 20 bp, synthetic construct
  source 1..20: mol_type = other DNA
catttcaggcttcctgtctg

SEQ ID NO: 77321 - DNA, 20 bp, synthetic construct
  source 1..20: mol_type = other DNA
acatttcaggcttcctgtct

SEQ ID NO: 77322 - DNA, 20 bp, synthetic construct
  source 1..20: mol_type = other DNA
gacatttcaggcttcctgtc

SEQ ID NO: 77323 - DNA, 20 bp, synthetic construct
  source 1..20: mol_type = other DNA
ggacatttcaggcttcctgt

SEQ ID NO: 77324 - DNA, 20 bp, synthetic construct
  source 1..20: mol_type = other DNA
aggacatttcaggcttcctg

SEQ ID NO: 77325 - DNA, 20 bp, synthetic construct
  source 1..20: mol_type = other DNA
taggacatttcaggcttcct

SEQ ID NO: 77326 - DNA, 20 bp, synthetic construct
  source 1..20: mol_type = other DNA
gtaggacatttcaggcttcc

SEQ ID NO: 77327 - DNA, 20 bp, synthetic construct
  source 1..20: mol_type = other DNA
agtaggacatttcaggcttc

SEQ ID NO: 77328 - DNA, 20 bp, synthetic construct
  source 1..20: mol_type = other DNA
aagtaggacatttcaggctt

SEQ ID NO: 77329 - DNA, 20 bp, synthetic construct
  source 1..20: mol_type = other DNA
aaagtaggacatttcaggct

SEQ ID NO: 77330 - DNA, 20 bp, synthetic construct
  source 1..20: mol_type = other DNA
caaagtaggacatttcaggc

SEQ ID NO: 77331 - DNA, 20 bp, synthetic construct
  source 1..20: mol_type = other DNA
tcaaagtaggacatttcagg

SEQ ID NO: 77332 - DNA, 20 bp, synthetic construct
  source 1..20: mol_type = other DNA
gtcaaagtaggacatttcag

SEQ ID NO: 77333 - DNA, 20 bp, synthetic construct
  source 1..20: mol_type = other DNA
ggtcaaagtaggacatttca

SEQ ID NO: 77334 - DNA, 20 bp, synthetic construct
  source 1..20: mol_type = other DNA
aggtcaaagtaggacatttc

SEQ ID NO: 77335 - DNA, 20 bp, synthetic construct
  source 1..20: mol_type = other DNA
taggtcaaagtaggacattt

SEQ ID NO: 77336 - DNA, 20 bp, synthetic construct
  source 1..20: mol_type = other DNA
ttaggtcaaagtaggacatt

SEQ ID NO: 77337 - DNA, 20 bp, synthetic construct
  source 1..20: mol_type = other DNA
tttaggtcaaagtaggacat

SEQ ID NO: 77338 - DNA, 20 bp, synthetic construct
  source 1..20: mol_type = other DNA
ctttaggtcaaagtaggaca

SEQ ID NO: 77339 - DNA, 20 bp, synthetic construct
  source 1..20: mol_type = other DNA
actttaggtcaaagtaggac

SEQ ID NO: 77340 - DNA, 20 bp, synthetic construct
  source 1..20: mol_type = other DNA
gactttaggtcaaagtagga

SEQ ID NO: 77341 - DNA, 20 bp, synthetic construct
  source 1..20: mol_type = other DNA
agactttaggtcaaagtagg

SEQ ID NO: 77342 - DNA, 20 bp, synthetic construct
  source 1..20: mol_type = other DNA
tagactttaggtcaaagtag

SEQ ID NO: 77343 - DNA, 20 bp, synthetic construct
  source 1..20: mol_type = other DNA
ctagactttaggtcaaagta

SEQ ID NO: 77344 - DNA, 20 bp, synthetic construct
  source 1..20: mol_type = other DNA
actagactttaggtcaaagt

SEQ ID NO: 77345 - DNA, 20 bp, synthetic construct
  source 1..20: mol_type = other DNA
tactagactttaggtcaaag

SEQ ID NO: 77346 - DNA, 20 bp, synthetic construct
  source 1..20: mol_type = other DNA
ttactagactttaggtcaaa

SEQ ID NO: 77347 - DNA, 20 bp, synthetic construct
  source 1..20: mol_type = other DNA
attactagactttaggtcaa

SEQ ID NO: 77348 - DNA, 20 bp, synthetic construct
  source 1..20: mol_type = other DNA
tattactagactttaggtca

SEQ ID NO: 77349 - DNA, 20 bp, synthetic construct
  source 1..20: mol_type = other DNA
ttattactagactttaggtc

SEQ ID NO: 77350 - DNA, 20 bp, synthetic construct
  source 1..20: mol_type = other DNA
tttattactagactttaggt

SEQ ID NO: 77351 - DNA, 20 bp, synthetic construct
  source 1..20: mol_type = other DNA
ttttattactagactttagg

SEQ ID NO: 77352 - DNA, 20 bp, synthetic construct
  source 1..20: mol_type = other DNA
gttttattactagactttag

SEQ ID NO: 77353 - DNA, 20 bp, synthetic construct
  source 1..20: mol_type = other DNA
agttttattactagacttta

SEQ ID NO: 77354 - DNA, 20 bp, synthetic construct
  source 1..20: mol_type = other DNA
cagttttattactagacttt

SEQ ID NO: 77355 - DNA, 20 bp, synthetic construct
  source 1..20: mol_type = other DNA
ccagttttattactagactt

SEQ ID NO: 77356 - DNA, 20 bp, synthetic construct
  source 1..20: mol_type = other DNA
tccagttttattactagact

SEQ ID NO: 77357 - DNA, 20 bp, synthetic construct
  source 1..20: mol_type = other DNA
gtccagttttattactagac

SEQ ID NO: 77358 - DNA, 20 bp, synthetic construct
  source 1..20: mol_type = other DNA
tgtccagttttattactaga

SEQ ID NO: 77359 - DNA, 20 bp, synthetic construct
  source 1..20: mol_type = other DNA
atgtccagttttattactag

SEQ ID NO: 77360 - DNA, 20 bp, synthetic construct
  source 1..20: mol_type = other DNA
tatgtccagttttattacta

SEQ ID NO: 77361 - DNA, 20 bp, synthetic construct
  source 1..20: mol_type = other DNA
gtatgtccagttttattact

SEQ ID NO: 77362 - DNA, 20 bp, synthetic construct
  source 1..20: mol_type = other DNA
tgtatgtccagttttattac

SEQ ID NO: 77363 - DNA, 20 bp, synthetic construct
  source 1..20: mol_type = other DNA
gtgtatgtccagttttatta

SEQ ID NO: 77364 - DNA, 20 bp, synthetic construct
  source 1..20: mol_type = other DNA
tgtgtatgtccagttttatt

SEQ ID NO: 77365 - DNA, 20 bp, synthetic construct
  source 1..20: mol_type = other DNA
ctgtgtatgtccagttttat

SEQ ID NO: 77366 - DNA, 20 bp, synthetic construct
  source 1..20: mol_type = other DNA
cctgtgtatgtccagtttta

SEQ ID NO: 77367 - DNA, 20 bp, synthetic construct
  source 1..20: mol_type = other DNA
gcctgtgtatgtccagtttt

SEQ ID NO: 77368 - DNA, 20 bp, synthetic construct
  source 1..20: mol_type = other DNA
tgcctgtgtatgtccagttt

SEQ ID NO: 77369 - DNA, 20 bp, synthetic construct
  source 1..20: mol_type = other DNA
ttgcctgtgtatgtccagtt

SEQ ID NO: 77370 - DNA, 20 bp, synthetic construct
  source 1..20: mol_type = other DNA
gttgcctgtgtatgtccagt

SEQ ID NO: 77371 - DNA, 20 bp, synthetic construct
  source 1..20: mol_type = other DNA
tgttgcctgtgtatgtccag

SEQ ID NO: 77372 - DNA, 20 bp, synthetic construct
  source 1..20: mol_type = other DNA
atgttgcctgtgtatgtcca

SEQ ID NO: 77373 - DNA, 20 bp, synthetic construct
  source 1..20: mol_type = other DNA
catgttgcctgtgtatgtcc

SEQ ID NO: 77374 - DNA, 20 bp, synthetic construct
  source 1..20: mol_type = other DNA
acatgttgcctgtgtatgtc

SEQ ID NO: 77375 - DNA, 20 bp, synthetic construct
  source 1..20: mol_type = other DNA
gacatgttgcctgtgtatgt

SEQ ID NO: 77376 - DNA, 20 bp, synthetic construct
  source 1..20: mol_type = other DNA
tgacatgttgcctgtgtatg

SEQ ID NO: 77377 - DNA, 20 bp, synthetic construct
  source 1..20: mol_type = other DNA
atgacatgttgcctgtgtat

SEQ ID NO: 77378 - DNA, 20 bp, synthetic construct
  source 1..20: mol_type = other DNA
aatgacatgttgcctgtgta

SEQ ID NO: 77379 - DNA, 20 bp, synthetic construct
  source 1..20: mol_type = other DNA
taatgacatgttgcctgtgt

SEQ ID NO: 77380 - DNA, 20 bp, synthetic construct
  source 1..20: mol_type = other DNA
ttaatgacatgttgcctgtg

SEQ ID NO: 77381 - DNA, 20 bp, synthetic construct
  source 1..20: mol_type = other DNA
attaatgacatgttgcctgt

SEQ ID NO: 77382 - DNA, 20 bp, synthetic construct
  source 1..20: mol_type = other DNA
aattaatgacatgttgcctg

SEQ ID NO: 77383 - DNA, 20 bp, synthetic construct
  source 1..20: mol_type = other DNA
gaattaatgacatgttgcct

SEQ ID NO: 77384 - DNA, 20 bp, synthetic construct
  source 1..20: mol_type = other DNA
agaattaatgacatgttgcc

SEQ ID NO: 77385 - DNA, 20 bp, synthetic construct
  source 1..20: mol_type = other DNA
gagaattaatgacatgttgc

SEQ ID NO: 77386 - DNA, 20 bp, synthetic construct
  source 1..20: mol_type = other DNA
tgagaattaatgacatgttg

SEQ ID NO: 77387 - DNA, 20 bp, synthetic construct
  source 1..20: mol_type = other DNA
ttgagaattaatgacatgtt

SEQ ID NO: 77388 - DNA, 20 bp, synthetic construct
  source 1..20: mol_type = other DNA
tttgagaattaatgacatgt

SEQ ID NO: 77389 - DNA, 20 bp, synthetic construct
  source 1..20: mol_type = other DNA
gtttgagaattaatgacatg

SEQ ID NO: 77390 - DNA, 20 bp, synthetic construct
  source 1..20: mol_type = other DNA
agtttgagaattaatgacat

SEQ ID NO: 77391 - DNA, 20 bp, synthetic construct
  source 1..20: mol_type = other DNA
aagtttgagaattaatgaca

SEQ ID NO: 77392 - DNA, 20 bp, synthetic construct
  source 1..20: mol_type = other DNA
aaagtttgagaattaatgac

SEQ ID NO: 77393 - DNA, 20 bp, synthetic construct
  source 1..20: mol_type = other DNA
taaagtttgagaattaatga

SEQ ID NO: 77394 - DNA, 20 bp, synthetic construct
  source 1..20: mol_type = other DNA
ttaaagtttgagaattaatg

SEQ ID NO: 77395 - DNA, 20 bp, synthetic construct
  source 1..20: mol_type = other DNA
gttaaagtttgagaattaat

SEQ ID NO: 77396 - DNA, 20 bp, synthetic construct
  source 1..20: mol_type = other DNA
tgttaaagtttgagaattaa

SEQ ID NO: 77397 - DNA, 20 bp, synthetic construct
  source 1..20: mol_type = other DNA
ttgttaaagtttgagaatta

SEQ ID NO: 77398 - DNA, 20 bp, synthetic construct
  source 1..20: mol_type = other DNA
tttgttaaagtttgagaatt

SEQ ID NO: 77399 - DNA, 20 bp, synthetic construct
  source 1..20: mol_type = other DNA
atttgttaaagtttgagaat

SEQ ID NO: 77400 - DNA, 20 bp, synthetic construct
  source 1..20: mol_type = other DNA
gatttgttaaagtttgagaa

SEQ ID NO: 77401 - DNA, 20 bp, synthetic construct
  source 1..20: mol_type = other DNA
tgatttgttaaagtttgaga

SEQ ID NO: 77402 - DNA, 20 bp, synthetic construct
  source 1..20: mol_type = other DNA
atgatttgttaaagtttgag

SEQ ID NO: 77403 - DNA, 20 bp, synthetic construct
  source 1..20: mol_type = other DNA
tatgatttgttaaagtttga

SEQ ID NO: 77404 - DNA, 20 bp, synthetic construct
  source 1..20: mol_type = other DNA
atatgatttgttaaagtttg

SEQ ID NO: 77405 - DNA, 20 bp, synthetic construct
  source 1..20: mol_type = other DNA
tatatgatttgttaaagttt

SEQ ID NO: 77406 - DNA, 20 bp, synthetic construct
  source 1..20: mol_type = other DNA
atatatgatttgttaaagtt

SEQ ID NO: 77407 - DNA, 20 bp, synthetic construct
  source 1..20: mol_type = other DNA
tatatatgatttgttaaagt

SEQ ID NO: 77408 - DNA, 20 bp, synthetic construct
  source 1..20: mol_type = other DNA
ttatatatgatttgttaaag

SEQ ID NO: 77409 - DNA, 20 bp, synthetic construct
  source 1..20: mol_type = other DNA
gttatatatgatttgttaaa

SEQ ID NO: 77410 - DNA, 20 bp, synthetic construct
  source 1..20: mol_type = other DNA
ggttatatatgatttgttaa

SEQ ID NO: 77411 - DNA, 20 bp, synthetic construct
  source 1..20: mol_type = other DNA
aggttatatatgatttgtta

SEQ ID NO: 77412 - DNA, 20 bp, synthetic construct
  source 1..20: mol_type = other DNA
taggttatatatgatttgtt

SEQ ID NO: 77413 - DNA, 20 bp, synthetic construct
  source 1..20: mol_type = other DNA
ttaggttatatatgatttgt

SEQ ID NO: 77414 - DNA, 20 bp, synthetic construct
  source 1..20: mol_type = other DNA
attaggttatatatgatttg

SEQ ID NO: 77415 - DNA, 20 bp, synthetic construct
  source 1..20: mol_type = other DNA
tattaggttatatatgattt

SEQ ID NO: 77416 - DNA, 20 bp, synthetic construct
  source 1..20: mol_type = other DNA
atattaggttatatatgatt

SEQ ID NO: 77417 - DNA, 20 bp, synthetic construct
  source 1..20: mol_type = other DNA
tatattaggttatatatgat

SEQ ID NO: 77418 - DNA, 20 bp, synthetic construct
  source 1..20: mol_type = other DNA
ttatattaggttatatatga

SEQ ID NO: 77419 - DNA, 20 bp, synthetic construct
  source 1..20: mol_type = other DNA
attatattaggttatatatg

SEQ ID NO: 77420 - DNA, 20 bp, synthetic construct
  source 1..20: mol_type = other DNA
cattatattaggttatatat

SEQ ID NO: 77421 - DNA, 20 bp, synthetic construct
  source 1..20: mol_type = other DNA
ccattatattaggttatata

SEQ ID NO: 77422 - DNA, 20 bp, synthetic construct
  source 1..20: mol_type = other DNA
accattatattaggttatat

SEQ ID NO: 77423 - DNA, 20 bp, synthetic construct
  source 1..20: mol_type = other DNA
aaccattatattaggttata

SEQ ID NO: 77424 - DNA, 20 bp, synthetic construct
  source 1..20: mol_type = other DNA
gaaccattatattaggttat

SEQ ID NO: 77425 - DNA, 20 bp, synthetic construct
  source 1..20: mol_type = other DNA
agaaccattatattaggtta

SEQ ID NO: 77426 - DNA, 20 bp, synthetic construct
  source 1..20: mol_type = other DNA
gagaaccattatattaggtt

SEQ ID NO: 77427 - DNA, 20 bp, synthetic construct
  source 1..20: mol_type = other DNA
tgagaaccattatattaggt

SEQ ID NO: 77428 - DNA, 20 bp, synthetic construct
  source 1..20: mol_type = other DNA
ttgagaaccattatattagg

SEQ ID NO: 77429 - DNA, 20 bp, synthetic construct
  source 1..20: mol_type = other DNA
cttgagaaccattatattag

SEQ ID NO: 77430 - DNA, 20 bp, synthetic construct
  source 1..20: mol_type = other DNA
acttgagaaccattatatta

SEQ ID NO: 77431 - DNA, 20 bp, synthetic construct
  source 1..20: mol_type = other DNA
gacttgagaaccattatatt

SEQ ID NO: 77432 - DNA, 20 bp, synthetic construct
  source 1..20: mol_type = other DNA
agacttgagaaccattatat

SEQ ID NO: 77433 - DNA, 20 bp, synthetic construct
  source 1..20: mol_type = other DNA
cagacttgagaaccattata

SEQ ID NO: 77434 - DNA, 20 bp, synthetic construct
  source 1..20: mol_type = other DNA
acagacttgagaaccattat

SEQ ID NO: 77435 - DNA, 20 bp, synthetic construct
  source 1..20: mol_type = other DNA
tacagacttgagaaccatta

SEQ ID NO: 77436 - DNA, 20 bp, synthetic construct
  source 1..20: mol_type = other DNA
gtacagacttgagaaccatt

SEQ ID NO: 77437 - DNA, 20 bp, synthetic construct
  source 1..20: mol_type = other DNA
tgtacagacttgagaaccat

SEQ ID NO: 77438 - DNA, 20 bp, synthetic construct
  source 1..20: mol_type = other DNA
atgtacagacttgagaacca

SEQ ID NO: 77439 - DNA, 20 bp, synthetic construct
  source 1..20: mol_type = other DNA
gatgtacagacttgagaacc

SEQ ID NO: 77440 - DNA, 20 bp, synthetic construct
  source 1..20: mol_type = other DNA
tgatgtacagacttgagaac

SEQ ID NO: 77441 - DNA, 20 bp, synthetic construct
  source 1..20: mol_type = other DNA
gtgatgtacagacttgagaa

SEQ ID NO: 77442 - DNA, 20 bp, synthetic construct
  source 1..20: mol_type = other DNA
cgtgatgtacagacttgaga

SEQ ID NO: 77443 - DNA, 20 bp, synthetic construct
  source 1..20: mol_type = other DNA
acgtgatgtacagacttgag

SEQ ID NO: 77444 - DNA, 20 bp, synthetic construct
  source 1..20: mol_type = other DNA
gacgtgatgtacagacttga

SEQ ID NO: 77445 - DNA, 20 bp, synthetic construct
  source 1..20: mol_type = other DNA
tgacgtgatgtacagacttg

SEQ ID NO: 77446 - DNA, 20 bp, synthetic construct
  source 1..20: mol_type = other DNA
gtgacgtgatgtacagactt

SEQ ID NO: 77447 - DNA, 20 bp, synthetic construct
  source 1..20: mol_type = other DNA
ggtgacgtgatgtacagact

SEQ ID NO: 77448 - DNA, 20 bp, synthetic construct
  source 1..20: mol_type = other DNA
aggtgacgtgatgtacagac

SEQ ID NO: 77449 - DNA, 20 bp, synthetic construct
  source 1..20: mol_type = other DNA
caggtgacgtgatgtacaga

SEQ ID NO: 77450 - DNA, 20 bp, synthetic construct
  source 1..20: mol_type = other DNA
acaggtgacgtgatgtacag

SEQ ID NO: 77451 - DNA, 20 bp, synthetic construct
  source 1..20: mol_type = other DNA
tacaggtgacgtgatgtaca

SEQ ID NO: 77452 - DNA, 20 bp, synthetic construct
  source 1..20: mol_type = other DNA
atacaggtgacgtgatgtac

SEQ ID NO: 77453 - DNA, 20 bp, synthetic construct
  source 1..20: mol_type = other DNA
catacaggtgacgtgatgta

SEQ ID NO: 77454 - DNA, 20 bp, synthetic construct
  source 1..20: mol_type = other DNA
tcatacaggtgacgtgatgt

SEQ ID NO: 77455 - DNA, 20 bp, synthetic construct
  source 1..20: mol_type = other DNA
ttcatacaggtgacgtgatg

SEQ ID NO: 77456 - DNA, 20 bp, synthetic construct
  source 1..20: mol_type = other DNA
tttcatacaggtgacgtgat

SEQ ID NO: 77457 - DNA, 20 bp, synthetic construct
  source 1..20: mol_type = other DNA
ttttcatacaggtgacgtga

SEQ ID NO: 77458 - DNA, 20 bp, synthetic construct
  source 1..20: mol_type = other DNA
tttttcatacaggtgacgtg

SEQ ID NO: 77459 - DNA, 20 bp, synthetic construct
  source 1..20: mol_type = other DNA
atttttcatacaggtgacgt

SEQ ID NO: 77460 - DNA, 20 bp, synthetic construct
  source 1..20: mol_type = other DNA
tatttttcatacaggtgacg

SEQ ID NO: 77461 - DNA, 20 bp, synthetic construct
  source 1..20: mol_type = other DNA
atatttttcatacaggtgac

SEQ ID NO: 77462 - DNA, 20 bp, synthetic construct
  source 1..20: mol_type = other DNA
catatttttcatacaggtga

SEQ ID NO: 77463 - DNA, 20 bp, synthetic construct
  source 1..20: mol_type = other DNA
tcatatttttcatacaggtg

SEQ ID NO: 77464 - DNA, 20 bp, synthetic construct
  source 1..20: mol_type = other DNA
ctcatatttttcatacaggt

SEQ ID NO: 77465 - DNA, 20 bp, synthetic construct
  source 1..20: mol_type = other DNA
cctcatatttttcatacagg

SEQ ID NO: 77466 - DNA, 20 bp, synthetic construct
  source 1..20: mol_type = other DNA
tcctcatatttttcatacag

SEQ ID NO: 77467 - DNA, 20 bp, synthetic construct
  source 1..20: mol_type = other DNA
ttcctcatatttttcataca

SEQ ID NO: 77468 - DNA, 20 bp, synthetic construct
  source 1..20: mol_type = other DNA
tttcctcatatttttcatac

SEQ ID NO: 77469 - DNA, 20 bp, synthetic construct
  source 1..20: mol_type = other DNA
gtttcctcatatttttcata

SEQ ID NO: 77470 - DNA, 20 bp, synthetic construct
  source 1..20: mol_type = other DNA
tgtttcctcatatttttcat

SEQ ID NO: 77471 - DNA, 20 bp, synthetic construct
  source 1..20: mol_type = other DNA
ctgtttcctcatatttttca

SEQ ID NO: 77472 - DNA, 20 bp, synthetic construct
  source 1..20: mol_type = other DNA
tctgtttcctcatatttttc

SEQ ID NO: 77473 - DNA, 20 bp, synthetic construct
  source 1..20: mol_type = other DNA
ctctgtttcctcatattttt

SEQ ID NO: 77474 - DNA, 20 bp, synthetic construct
  source 1..20: mol_type = other DNA
tctctgtttcctcatatttt

SEQ ID NO: 77475 - DNA, 20 bp, synthetic construct
  source 1..20: mol_type = other DNA
gtctctgtttcctcatattt

SEQ ID NO: 77476 - DNA, 20 bp, synthetic construct
  source 1..20: mol_type = other DNA
agtctctgtttcctcatatt

SEQ ID NO: 77477 - DNA, 20 bp, synthetic construct
  source 1..20: mol_type = other DNA
aagtctctgtttcctcatat

SEQ ID NO: 77478 - DNA, 20 bp, synthetic construct
  source 1..20: mol_type = other DNA
gaagtctctgtttcctcata

SEQ ID NO: 77479 - DNA, 20 bp, synthetic construct
  source 1..20: mol_type = other DNA
agaagtctctgtttcctcat

SEQ ID NO: 77480 - DNA, 20 bp, synthetic construct
  source 1..20: mol_type = other DNA
aagaagtctctgtttcctca

SEQ ID NO: 77481 - DNA, 20 bp, synthetic construct
  source 1..20: mol_type = other DNA
aaagaagtctctgtttcctc

SEQ ID NO: 77482 - DNA, 20 bp, synthetic construct
  source 1..20: mol_type = other DNA
aaaagaagtctctgtttcct

SEQ ID NO: 77483 - DNA, 20 bp, synthetic construct
  source 1..20: mol_type = other DNA
taaaagaagtctctgtttcc

SEQ ID NO: 77484 - DNA, 20 bp, synthetic construct
  source 1..20: mol_type = other DNA
gtaaaagaagtctctgtttc

SEQ ID NO: 77485 - DNA, 20 bp, synthetic construct
  source 1..20: mol_type = other DNA
tgtaaaagaagtctctgttt

SEQ ID NO: 77486 - DNA, 20 bp, synthetic construct
  source 1..20: mol_type = other DNA
gtgtaaaagaagtctctgtt

SEQ ID NO: 77487 - DNA, 20 bp, synthetic construct
  source 1..20: mol_type = other DNA
agtgtaaaagaagtctctgt

SEQ ID NO: 77488 - DNA, 20 bp, synthetic construct
  source 1..20: mol_type = other DNA
tagtgtaaaagaagtctctg

SEQ ID NO: 77489 - DNA, 20 bp, synthetic construct
  source 1..20: mol_type = other DNA
atagtgtaaaagaagtctct

SEQ ID NO: 77490 - DNA, 20 bp, synthetic construct
  source 1..20: mol_type = other DNA
aatagtgtaaaagaagtctc

SEQ ID NO: 77491 - DNA, 20 bp, synthetic construct
  source 1..20: mol_type = other DNA
caatagtgtaaaagaagtct

SEQ ID NO: 77492 - DNA, 20 bp, synthetic construct
  source 1..20: mol_type = other DNA
ccaatagtgtaaaagaagtc

SEQ ID NO: 77493 - DNA, 20 bp, synthetic construct
  source 1..20: mol_type = other DNA
accaatagtgtaaaagaagt

SEQ ID NO: 77494 - DNA, 20 bp, synthetic construct
  source 1..20: mol_type = other DNA
caccaatagtgtaaaagaag

SEQ ID NO: 77495 - DNA, 20 bp, synthetic construct
  source 1..20: mol_type = other DNA
tcaccaatagtgtaaaagaa

SEQ ID NO: 77496 - DNA, 20 bp, synthetic construct
  source 1..20: mol_type = other DNA
ctcaccaatagtgtaaaaga

SEQ ID NO: 77497 - DNA, 20 bp, synthetic construct
  source 1..20: mol_type = other DNA
cctcaccaatagtgtaaaag

SEQ ID NO: 77498 - DNA, 20 bp, synthetic construct
  source 1..20: mol_type = other DNA
acctcaccaatagtgtaaaa

SEQ ID NO: 77499 - DNA, 20 bp, synthetic construct
  source 1..20: mol_type = other DNA
cacctcaccaatagtgtaaa

SEQ ID NO: 77500 - DNA, 20 bp, synthetic construct
  source 1..20: mol_type = other DNA
ccacctcaccaatagtgtaa

SEQ ID NO: 77501 - DNA, 20 bp, synthetic construct
  source 1..20: mol_type = other DNA
tccacctcaccaatagtgta

SEQ ID NO: 77502 - DNA, 20 bp, synthetic construct
  source 1..20: mol_type = other DNA
atccacctcaccaatagtgt

SEQ ID NO: 77503 - DNA, 20 bp, synthetic construct
  source 1..20: mol_type = other DNA
tatccacctcaccaatagtg

SEQ ID NO: 77504 - DNA, 20 bp, synthetic construct
  source 1..20: mol_type = other DNA
ttatccacctcaccaatagt

SEQ ID NO: 77505 - DNA, 20 bp, synthetic construct
  source 1..20: mol_type = other DNA
tttatccacctcaccaatag

SEQ ID NO: 77506 - DNA, 20 bp, synthetic construct
  source 1..20: mol_type = other DNA
atttatccacctcaccaata

SEQ ID NO: 77507 - DNA, 20 bp, synthetic construct
  source 1..20: mol_type = other DNA
aatttatccacctcaccaat

SEQ ID NO: 77508 - DNA, 20 bp, synthetic construct
  source 1..20: mol_type = other DNA
caatttatccacctcaccaa

SEQ ID NO: 77509 - DNA, 20 bp, synthetic construct
  source 1..20: mol_type = other DNA
tcaatttatccacctcacca

SEQ ID NO: 77510 - DNA, 20 bp, synthetic construct
  source 1..20: mol_type = other DNA
atcaatttatccacctcacc

SEQ ID NO: 77511 - DNA, 20 bp, synthetic construct
  source 1..20: mol_type = other DNA
tatcaatttatccacctcac

SEQ ID NO: 77512 - DNA, 20 bp, synthetic construct
  source 1..20: mol_type = other DNA
ctatcaatttatccacctca

SEQ ID NO: 77513 - DNA, 20 bp, synthetic construct
  source 1..20: mol_type = other DNA
tctatcaatttatccacctc

SEQ ID NO: 77514 - DNA, 20 bp, synthetic construct
  source 1..20: mol_type = other DNA
ctctatcaatttatccacct

SEQ ID NO: 77515 - DNA, 20 bp, synthetic construct
  source 1..20: mol_type = other DNA
actctatcaatttatccacc

SEQ ID NO: 77516 - DNA, 20 bp, synthetic construct
  source 1..20: mol_type = other DNA
gactctatcaatttatccac

SEQ ID NO: 77517 - DNA, 20 bp, synthetic construct
  source 1..20: mol_type = other DNA
agactctatcaatttatcca

SEQ ID NO: 77518 - DNA, 20 bp, synthetic construct
  source 1..20: mol_type = other DNA
aagactctatcaatttatcc

SEQ ID NO: 77519 - DNA, 20 bp, synthetic construct
  source 1..20: mol_type = other DNA
aaagactctatcaatttatc

SEQ ID NO: 77520 - DNA, 20 bp, synthetic construct
  source 1..20: mol_type = other DNA
gaaagactctatcaatttat

SEQ ID NO: 77521 - DNA, 20 bp, synthetic construct
  source 1..20: mol_type = other DNA
agaaagactctatcaattta

SEQ ID NO: 77522 - DNA, 20 bp, synthetic construct
  source 1..20: mol_type = other DNA
cagaaagactctatcaattt

SEQ ID NO: 77523 - DNA, 20 bp, synthetic construct
  source 1..20: mol_type = other DNA
ccagaaagactctatcaatt

SEQ ID NO: 77524 - DNA, 20 bp, synthetic construct
  source 1..20: mol_type = other DNA
tccagaaagactctatcaat

SEQ ID NO: 77525 - DNA, 20 bp, synthetic construct
  source 1..20: mol_type = other DNA
ctccagaaagactctatcaa

SEQ ID NO: 77526 - DNA, 20 bp, synthetic construct
  source 1..20: mol_type = other DNA
tctccagaaagactctatca

SEQ ID NO: 77527 - DNA, 20 bp, synthetic construct
  source 1..20: mol_type = other DNA
ctctccagaaagactctatc

SEQ ID NO: 77528 - DNA, 20 bp, synthetic construct
  source 1..20: mol_type = other DNA
tctctccagaaagactctat

SEQ ID NO: 77529 - DNA, 20 bp, synthetic construct
  source 1..20: mol_type = other DNA
ttctctccagaaagactcta

SEQ ID NO: 77530 - DNA, 20 bp, synthetic construct
  source 1..20: mol_type = other DNA
attctctccagaaagactct

SEQ ID NO: 77531 - DNA, 20 bp, synthetic construct
  source 1..20: mol_type = other DNA
gattctctccagaaagactc

SEQ ID NO: 77532 - DNA, 20 bp, synthetic construct
  source 1..20: mol_type = other DNA
agattctctccagaaagact

SEQ ID NO: 77533 - DNA, 20 bp, synthetic construct
  source 1..20: mol_type = other DNA
cagattctctccagaaagac

SEQ ID NO: 77534 - DNA, 20 bp, synthetic construct
  source 1..20: mol_type = other DNA
ccagattctctccagaaaga

SEQ ID NO: 77535 - DNA, 20 bp, synthetic construct
  source 1..20: mol_type = other DNA
gccagattctctccagaaag

SEQ ID NO: 77536 - DNA, 20 bp, synthetic construct
  source 1..20: mol_type = other DNA
tgccagattctctccagaaa

SEQ ID NO: 77537 - DNA, 20 bp, synthetic construct
  source 1..20: mol_type = other DNA
ttgccagattctctccagaa

SEQ ID NO: 77538 - DNA, 20 bp, synthetic construct
  source 1..20: mol_type = other DNA
attgccagattctctccaga

SEQ ID NO: 77539 - DNA, 20 bp, synthetic construct
  source 1..20: mol_type = other DNA
cattgccagattctctccag

SEQ ID NO: 77540 - DNA, 20 bp, synthetic construct
  source 1..20: mol_type = other DNA
gcattgccagattctctcca

SEQ ID NO: 77541 - DNA, 20 bp, synthetic construct
  source 1..20: mol_type = other DNA
agcattgccagattctctcc

SEQ ID NO: 77542 - DNA, 20 bp, synthetic construct
  source 1..20: mol_type = other DNA
tagcattgccagattctctc

SEQ ID NO: 77543 - DNA, 20 bp, synthetic construct
  source 1..20: mol_type = other DNA
ttagcattgccagattctct

SEQ ID NO: 77544 - DNA, 20 bp, synthetic construct
  source 1..20: mol_type = other DNA
attagcattgccagattctc

SEQ ID NO: 77545 - DNA, 20 bp, synthetic construct
  source 1..20: mol_type = other DNA
gattagcattgccagattct

SEQ ID NO: 77546 - DNA, 20 bp, synthetic construct
  source 1..20: mol_type = other DNA
tgattagcattgccagattc

SEQ ID NO: 77547 - DNA, 20 bp, synthetic construct
  source 1..20: mol_type = other DNA
ttgattagcattgccagatt

SEQ ID NO: 77548 - DNA, 20 bp, synthetic construct
  source 1..20: mol_type = other DNA
tttgattagcattgccagat

SEQ ID NO: 77549 - DNA, 20 bp, synthetic construct
  source 1..20: mol_type = other DNA
ttttgattagcattgccaga

SEQ ID NO: 77550 - DNA, 20 bp, synthetic construct
  source 1..20: mol_type = other DNA
attttgattagcattgccag

SEQ ID NO: 77551 - DNA, 20 bp, synthetic construct
  source 1..20: mol_type = other DNA
aattttgattagcattgcca

SEQ ID NO: 77552 - DNA, 20 bp, synthetic construct
  source 1..20: mol_type = other DNA
aaattttgattagcattgcc

SEQ ID NO: 77553 - DNA, 20 bp, synthetic construct
  source 1..20: mol_type = other DNA
taaattttgattagcattgc

SEQ ID NO: 77554 - DNA, 20 bp, synthetic construct
  source 1..20: mol_type = other DNA
ttaaattttgattagcattg

SEQ ID NO: 77555 - DNA, 20 bp, synthetic construct
  source 1..20: mol_type = other DNA
tttaaattttgattagcatt

SEQ ID NO: 77556 - DNA, 20 bp, synthetic construct
  source 1..20: mol_type = other DNA
ttttaaattttgattagcat

SEQ ID NO: 77557 - DNA, 20 bp, synthetic construct
  source 1..20: mol_type = other DNA
attttaaattttgattagca

SEQ ID NO: 77558 - DNA, 20 bp, synthetic construct
  source 1..20: mol_type = other DNA
cattttaaattttgattagc

SEQ ID NO: 77559 - DNA, 20 bp, synthetic construct
  source 1..20: mol_type = other DNA
gcattttaaattttgattag

SEQ ID NO: 77560 - DNA, 20 bp, synthetic construct
  source 1..20: mol_type = other DNA
tgcattttaaattttgatta

SEQ ID NO: 77561 - DNA, 20 bp, synthetic construct
  source 1..20: mol_type = other DNA
gtgcattttaaattttgatt

SEQ ID NO: 77562 - DNA, 20 bp, synthetic construct
  source 1..20: mol_type = other DNA
tgtgcattttaaattttgat

SEQ ID NO: 77563 - DNA, 20 bp, synthetic construct
  source 1..20: mol_type = other DNA
atgtgcattttaaattttga

SEQ ID NO: 77564 - DNA, 20 bp, synthetic construct
  source 1..20: mol_type = other DNA
tatgtgcattttaaattttg

SEQ ID NO: 77565 - DNA, 20 bp, synthetic construct
  source 1..20: mol_type = other DNA
gtatgtgcattttaaatttt

SEQ ID NO: 77566 - DNA, 20 bp, synthetic construct
  source 1..20: mol_type = other DNA
tgtatgtgcattttaaattt

SEQ ID NO: 77567 - DNA, 20 bp, synthetic construct
  source 1..20: mol_type = other DNA
gtgtatgtgcattttaaatt

SEQ ID NO: 77568 - DNA, 20 bp, synthetic construct
  source 1..20: mol_type = other DNA
agtgtatgtgcattttaaat

SEQ ID NO: 77569 - DNA, 20 bp, synthetic construct
  source 1..20: mol_type = other DNA
aagtgtatgtgcattttaaa

SEQ ID NO: 77570 - DNA, 20 bp, synthetic construct
  source 1..20: mol_type = other DNA
aaagtgtatgtgcattttaa

SEQ ID NO: 77571 - DNA, 20 bp, synthetic construct
  source 1..20: mol_type = other DNA
caaagtgtatgtgcatttta

SEQ ID NO: 77572 - DNA, 20 bp, synthetic construct
  source 1..20: mol_type = other DNA
acaaagtgtatgtgcatttt

SEQ ID NO: 77573 - DNA, 20 bp, synthetic construct
  source 1..20: mol_type = other DNA
aacaaagtgtatgtgcattt

SEQ ID NO: 77574 - DNA, 20 bp, synthetic construct
  source 1..20: mol_type = other DNA
gaacaaagtgtatgtgcatt

SEQ ID NO: 77575 - DNA, 20 bp, synthetic construct
  source 1..20: mol_type = other DNA
ggaacaaagtgtatgtgcat

SEQ ID NO: 77576 - DNA, 20 bp, synthetic construct
  source 1..20: mol_type = other DNA
tggaacaaagtgtatgtgca

SEQ ID NO: 77577 - DNA, 20 bp, synthetic construct
  source 1..20: mol_type = other DNA
ctggaacaaagtgtatgtgc

SEQ ID NO: 77578 - DNA, 20 bp, synthetic construct
  source 1..20: mol_type = other DNA
gctggaacaaagtgtatgtg

SEQ ID NO: 77579 - DNA, 20 bp, synthetic construct
  source 1..20: mol_type = other DNA
tgctggaacaaagtgtatgt

SEQ ID NO: 77580 - DNA, 20 bp, synthetic construct
  source 1..20: mol_type = other DNA
ctgctggaacaaagtgtatg

SEQ ID NO: 77581 - DNA, 20 bp, synthetic construct
  source 1..20: mol_type = other DNA
actgctggaacaaagtgtat

SEQ ID NO: 77582 - DNA, 20 bp, synthetic construct
  source 1..20: mol_type = other DNA
aactgctggaacaaagtgta

SEQ ID NO: 77583 - DNA, 20 bp, synthetic construct
  source 1..20: mol_type = other DNA
gaactgctggaacaaagtgt

SEQ ID NO: 77584 - DNA, 20 bp, synthetic construct
  source 1..20: mol_type = other DNA
agaactgctggaacaaagtg

SEQ ID NO: 77585 - DNA, 20 bp, synthetic construct
  source 1..20: mol_type = other DNA
tagaactgctggaacaaagt

SEQ ID NO: 77586 - DNA, 20 bp, synthetic construct
  source 1..20: mol_type = other DNA
atagaactgctggaacaaag

SEQ ID NO: 77587 - DNA, 20 bp, synthetic construct
  source 1..20: mol_type = other DNA
gatagaactgctggaacaaa

SEQ ID NO: 77588 - DNA, 20 bp, synthetic construct
  source 1..20: mol_type = other DNA
agatagaactgctggaacaa

SEQ ID NO: 77589 - DNA, 20 bp, synthetic construct
  source 1..20: mol_type = other DNA
gagatagaactgctggaaca

SEQ ID NO: 77590 - DNA, 20 bp, synthetic construct
  source 1..20: mol_type = other DNA
agagatagaactgctggaac

SEQ ID NO: 77591 - DNA, 20 bp, synthetic construct
  source 1..20: mol_type = other DNA
tagagatagaactgctggaa

SEQ ID NO: 77592 - DNA, 20 bp, synthetic construct
  source 1..20: mol_type = other DNA
ctagagatagaactgctgga

SEQ ID NO: 77593 - DNA, 20 bp, synthetic construct
  source 1..20: mol_type = other DNA
actagagatagaactgctgg

SEQ ID NO: 77594 - DNA, 20 bp, synthetic construct
  source 1..20: mol_type = other DNA
tactagagatagaactgctg

SEQ ID NO: 77595 - DNA, 20 bp, synthetic construct
  source 1..20: mol_type = other DNA
ttactagagatagaactgct

SEQ ID NO: 77596 - DNA, 20 bp, synthetic construct
  source 1..20: mol_type = other DNA
attactagagatagaactgc

SEQ ID NO: 77597 - DNA, 20 bp, synthetic construct
  source 1..20: mol_type = other DNA
aattactagagatagaactg

SEQ ID NO: 77598 - DNA, 20 bp, synthetic construct
  source 1..20: mol_type = other DNA
aaattactagagatagaact

SEQ ID NO: 77599 - DNA, 20 bp, synthetic construct
  source 1..20: mol_type = other DNA
taaattactagagatagaac

SEQ ID NO: 77600 - DNA, 20 bp, synthetic construct
  source 1..20: mol_type = other DNA
ataaattactagagatagaa

SEQ ID NO: 77601 - DNA, 20 bp, synthetic construct
  source 1..20: mol_type = other DNA
aataaattactagagataga

SEQ ID NO: 77602 - DNA, 20 bp, synthetic construct
  source 1..20: mol_type = other DNA
aaataaattactagagatag

SEQ ID NO: 77603 - DNA, 20 bp, synthetic construct
  source 1..20: mol_type = other DNA
aaaataaattactagagata

SEQ ID NO: 77604 - DNA, 20 bp, synthetic construct
  source 1..20: mol_type = other DNA
aaaaataaattactagagat

SEQ ID NO: 77605 - DNA, 20 bp, synthetic construct
  source 1..20: mol_type = other DNA
caaaaataaattactagaga

SEQ ID NO: 77606 - DNA, 20 bp, synthetic construct
  source 1..20: mol_type = other DNA
gcaaaaataaattactagag

SEQ ID NO: 77607 - DNA, 20 bp, synthetic construct
  source 1..20: mol_type = other DNA
ggcaaaaataaattactaga

SEQ ID NO: 77608 - DNA, 20 bp, synthetic construct
  source 1..20: mol_type = other DNA
gggcaaaaataaattactag

SEQ ID NO: 77609 - DNA, 20 bp, synthetic construct
  source 1..20: mol_type = other DNA
agggcaaaaataaattacta

SEQ ID NO: 77610 - DNA, 20 bp, synthetic construct
  source 1..20: mol_type = other DNA
gagggcaaaaataaattact

SEQ ID NO: 77611 - DNA, 20 bp, synthetic construct
  source 1..20: mol_type = other DNA
tgagggcaaaaataaattac

SEQ ID NO: 77612 - DNA, 20 bp, synthetic construct
  source 1..20: mol_type = other DNA
atgagggcaaaaataaatta

SEQ ID NO: 77613 - DNA, 20 bp, synthetic construct
  source 1..20: mol_type = other DNA
tatgagggcaaaaataaatt

SEQ ID NO: 77614 - DNA, 20 bp, synthetic construct
  source 1..20: mol_type = other DNA
atatgagggcaaaaataaat

SEQ ID NO: 77615 - DNA, 20 bp, synthetic construct
  source 1..20: mol_type = other DNA
tatatgagggcaaaaataaa

SEQ ID NO: 77616 - DNA, 20 bp, synthetic construct
  source 1..20: mol_type = other DNA
atatatgagggcaaaaataa

SEQ ID NO: 77617 - DNA, 20 bp, synthetic construct
  source 1..20: mol_type = other DNA
gatatatgagggcaaaaata

SEQ ID NO: 77618 - DNA, 20 bp, synthetic construct
  source 1..20: mol_type = other DNA
ggatatatgagggcaaaaat

SEQ ID NO: 77619 - DNA, 20 bp, synthetic construct
  source 1..20: mol_type = other DNA
tggatatatgagggcaaaaa

SEQ ID NO: 77620 - DNA, 20 bp, synthetic construct
  source 1..20: mol_type = other DNA
atggatatatgagggcaaaa

SEQ ID NO: 77621 - DNA, 20 bp, synthetic construct
  source 1..20: mol_type = other DNA
tatggatatatgagggcaaa

SEQ ID NO: 77622 - DNA, 20 bp, synthetic construct
  source 1..20: mol_type = other DNA
ttatggatatatgagggcaa

SEQ ID NO: 77623 - DNA, 20 bp, synthetic construct
  source 1..20: mol_type = other DNA
cttatggatatatgagggca

SEQ ID NO: 77624 - DNA, 20 bp, synthetic construct
  source 1..20: mol_type = other DNA
tcttatggatatatgagggc

SEQ ID NO: 77625 - DNA, 20 bp, synthetic construct
  source 1..20: mol_type = other DNA
gtcttatggatatatgaggg

SEQ ID NO: 77626 - DNA, 20 bp, synthetic construct
  source 1..20: mol_type = other DNA
tgtcttatggatatatgagg

SEQ ID NO: 77627 - DNA, 20 bp, synthetic construct
  source 1..20: mol_type = other DNA
atgtcttatggatatatgag

SEQ ID NO: 77628 - DNA, 20 bp, synthetic construct
  source 1..20: mol_type = other DNA
catgtcttatggatatatga

SEQ ID NO: 77629 - DNA, 20 bp, synthetic construct
  source 1..20: mol_type = other DNA
gcatgtcttatggatatatg

SEQ ID NO: 77630 - DNA, 20 bp, synthetic construct
  source 1..20: mol_type = other DNA
tgcatgtcttatggatatat

SEQ ID NO: 77631 - DNA, 20 bp, synthetic construct
  source 1..20: mol_type = other DNA
ttgcatgtcttatggatata

SEQ ID NO: 77632 - DNA, 20 bp, synthetic construct
  source 1..20: mol_type = other DNA
tttgcatgtcttatggatat

SEQ ID NO: 77633 - DNA, 20 bp, synthetic construct
  source 1..20: mol_type = other DNA
atttgcatgtcttatggata

SEQ ID NO: 77634 - DNA, 20 bp, synthetic construct
  source 1..20: mol_type = other DNA
tatttgcatgtcttatggat

SEQ ID NO: 77635 - DNA, 20 bp, synthetic construct
  source 1..20: mol_type = other DNA
ttatttgcatgtcttatgga

SEQ ID NO: 77636 - DNA, 20 bp, synthetic construct
  source 1..20: mol_type = other DNA
attatttgcatgtcttatgg

SEQ ID NO: 77637 - DNA, 20 bp, synthetic construct
  source 1..20: mol_type = other DNA
aattatttgcatgtcttatg

SEQ ID NO: 77638 - DNA, 20 bp, synthetic construct
  source 1..20: mol_type = other DNA
taattatttgcatgtcttat

SEQ ID NO: 77639 - DNA, 20 bp, synthetic construct
  source 1..20: mol_type = other DNA
ataattatttgcatgtctta

SEQ ID NO: 77640 - DNA, 20 bp, synthetic construct
  source 1..20: mol_type = other DNA
tataattatttgcatgtctt

SEQ ID NO: 77641 - DNA, 20 bp, synthetic construct
  source 1..20: mol_type = other DNA
atataattatttgcatgtct

SEQ ID NO: 77642 - DNA, 20 bp, synthetic construct
  source 1..20: mol_type = other DNA
catataattatttgcatgtc

SEQ ID NO: 77643 - DNA, 20 bp, synthetic construct
  source 1..20: mol_type = other DNA
acatataattatttgcatgt

SEQ ID NO: 77644 - DNA, 20 bp, synthetic construct
  source 1..20: mol_type = other DNA
cacatataattatttgcatg

SEQ ID NO: 77645 - DNA, 20 bp, synthetic construct
  source 1..20: mol_type = other DNA
tcacatataattatttgcat

SEQ ID NO: 77646 - DNA, 20 bp, synthetic construct
  source 1..20: mol_type = other DNA
ttcacatataattatttgca

SEQ ID NO: 77647 - DNA, 20 bp, synthetic construct
  source 1..20: mol_type = other DNA
cttcacatataattatttgc

SEQ ID NO: 77648 - DNA, 20 bp, synthetic construct
  source 1..20: mol_type = other DNA
tcttcacatataattatttg

SEQ ID NO: 77649 - DNA, 20 bp, synthetic construct
  source 1..20: mol_type = other DNA
atcttcacatataattattt

SEQ ID NO: 77650 - DNA, 20 bp, synthetic construct
  source 1..20: mol_type = other DNA
aatcttcacatataattatt

SEQ ID NO: 77651 - DNA, 20 bp, synthetic construct
  source 1..20: mol_type = other DNA
aaatcttcacatataattat

SEQ ID NO: 77652 - DNA, 20 bp, synthetic construct
  source 1..20: mol_type = other DNA
aaaatcttcacatataatta

SEQ ID NO: 77653 - DNA, 20 bp, synthetic construct
  source 1..20: mol_type = other DNA
aaaaatcttcacatataatt

SEQ ID NO: 77654 - DNA, 20 bp, synthetic construct
  source 1..20: mol_type = other DNA
aaaaaatcttcacatataat

SEQ ID NO: 77655 - DNA, 20 bp, synthetic construct
  source 1..20: mol_type = other DNA
aaaaaaatcttcacatataa

SEQ ID NO: 77656 - DNA, 20 bp, synthetic construct
  source 1..20: mol_type = other DNA
aaaaaaaatcttcacatata

SEQ ID NO: 77657 - DNA, 20 bp, synthetic construct
  source 1..20: mol_type = other DNA
aaaaaaaaatcttcacatat

SEQ ID NO: 77658 - DNA, 20 bp, synthetic construct
  source 1..20: mol_type = other DNA
aaaaaaaaaatcttcacata

SEQ ID NO: 77659 - DNA, 20 bp, synthetic construct
  source 1..20: mol_type = other DNA
aaaaaaaaaaatcttcacat

SEQ ID NO: 77660 - DNA, 20 bp, synthetic construct
  source 1..20: mol_type = other DNA
aaaaaaaaaaaatcttcaca

SEQ ID NO: 77661 - DNA, 20 bp, synthetic construct
  source 1..20: mol_type = other DNA
gaaaaaaaaaaaatcttcac

SEQ ID NO: 77662 - DNA, 20 bp, synthetic construct
  source 1..20: mol_type = other DNA
agaaaaaaaaaaaatcttca

SEQ ID NO: 77663 - DNA, 20 bp, synthetic construct
  source 1..20: mol_type = other DNA
aagaaaaaaaaaaaatcttc

SEQ ID NO: 77664 - DNA, 20 bp, synthetic construct
  source 1..20: mol_type = other DNA
aaagaaaaaaaaaaaatctt

SEQ ID NO: 77665 - DNA, 20 bp, synthetic construct
  source 1..20: mol_type = other DNA
aaaagaaaaaaaaaaaatct

SEQ ID NO: 77666 - DNA, 20 bp, synthetic construct
  source 1..20: mol_type = other DNA
aaaaagaaaaaaaaaaaatc

SEQ ID NO: 77667 - DNA, 20 bp, synthetic construct
  source 1..20: mol_type = other DNA
gaaaaagaaaaaaaaaaaat

SEQ ID NO: 77668 - DNA, 20 bp, synthetic construct
  source 1..20: mol_type = other DNA
agaaaaagaaaaaaaaaaaa

SEQ ID NO: 77669 - DNA, 20 bp, synthetic construct
  source 1..20: mol_type = other DNA
cagaaaaagaaaaaaaaaaa

SEQ ID NO: 77670 - DNA, 20 bp, synthetic construct
  source 1..20: mol_type = other DNA
gcagaaaaagaaaaaaaaaa

SEQ ID NO: 77671 - DNA, 20 bp, synthetic construct
  source 1..20: mol_type = other DNA
tgcagaaaaagaaaaaaaaa

SEQ ID NO: 77672 - DNA, 20 bp, synthetic construct
  source 1..20: mol_type = other DNA
ctgcagaaaaagaaaaaaaa

SEQ ID NO: 77673 - DNA, 20 bp, synthetic construct
  source 1..20: mol_type = other DNA
tctgcagaaaaagaaaaaaa

SEQ ID NO: 77674 - DNA, 20 bp, synthetic construct
  source 1..20: mol_type = other DNA
ctctgcagaaaaagaaaaaa

SEQ ID NO: 77675 - DNA, 20 bp, synthetic construct
  source 1..20: mol_type = other DNA
tctctgcagaaaaagaaaaa

SEQ ID NO: 77676 - DNA, 20 bp, synthetic construct
  source 1..20: mol_type = other DNA
gtctctgcagaaaaagaaaa

SEQ ID NO: 77677 - DNA, 20 bp, synthetic construct
  source 1..20: mol_type = other DNA
tgtctctgcagaaaaagaaa

SEQ ID NO: 77678 - DNA, 20 bp, synthetic construct
  source 1..20: mol_type = other DNA
ctgtctctgcagaaaaagaa

SEQ ID NO: 77679 - DNA, 20 bp, synthetic construct
  source 1..20: mol_type = other DNA
cctgtctctgcagaaaaaga

SEQ ID NO: 77680 - DNA, 20 bp, synthetic construct
  source 1..20: mol_type = other DNA
ccctgtctctgcagaaaaag

SEQ ID NO: 77681 - DNA, 20 bp, synthetic construct
  source 1..20: mol_type = other DNA
accctgtctctgcagaaaaa

SEQ ID NO: 77682 - DNA, 20 bp, synthetic construct
  source 1..20: mol_type = other DNA
aaccctgtctctgcagaaaa

SEQ ID NO: 77683 - DNA, 20 bp, synthetic construct
  source 1..20: mol_type = other DNA
aaaccctgtctctgcagaaa

SEQ ID NO: 77684 - DNA, 20 bp, synthetic construct
  source 1..20: mol_type = other DNA
aaaaccctgtctctgcagaa

SEQ ID NO: 77685 - DNA, 20 bp, synthetic construct
  source 1..20: mol_type = other DNA
taaaaccctgtctctgcaga

SEQ ID NO: 77686 - DNA, 20 bp, synthetic construct
  source 1..20: mol_type = other DNA
gtaaaaccctgtctctgcag

SEQ ID NO: 77687 - DNA, 20 bp, synthetic construct
  source 1..20: mol_type = other DNA
ggtaaaaccctgtctctgca

SEQ ID NO: 77688 - DNA, 20 bp, synthetic construct
  source 1..20: mol_type = other DNA
tggtaaaaccctgtctctgc

SEQ ID NO: 77689 - DNA, 20 bp, synthetic construct
  source 1..20: mol_type = other DNA
atggtaaaaccctgtctctg

SEQ ID NO: 77690 - DNA, 20 bp, synthetic construct
  source 1..20: mol_type = other DNA
catggtaaaaccctgtctct

SEQ ID NO: 77691 - DNA, 20 bp, synthetic construct
  source 1..20: mol_type = other DNA
acatggtaaaaccctgtctc

SEQ ID NO: 77692 - DNA, 20 bp, synthetic construct
  source 1..20: mol_type = other DNA
aacatggtaaaaccctgtct

SEQ ID NO: 77693 - DNA, 20 bp, synthetic construct
  source 1..20: mol_type = other DNA
caacatggtaaaaccctgtc

SEQ ID NO: 77694 - DNA, 20 bp, synthetic construct
  source 1..20: mol_type = other DNA
gcaacatggtaaaaccctgt

SEQ ID NO: 77695 - DNA, 20 bp, synthetic construct
  source 1..20: mol_type = other DNA
ggcaacatggtaaaaccctg

SEQ ID NO: 77696 - DNA, 20 bp, synthetic construct
  source 1..20: mol_type = other DNA
gggcaacatggtaaaaccct

SEQ ID NO: 77697 - DNA, 20 bp, synthetic construct
  source 1..20: mol_type = other DNA
tgggcaacatggtaaaaccc

SEQ ID NO: 77698 - DNA, 20 bp, synthetic construct
  source 1..20: mol_type = other DNA
ctgggcaacatggtaaaacc

SEQ ID NO: 77699 - DNA, 20 bp, synthetic construct
  source 1..20: mol_type = other DNA
cctgggcaacatggtaaaac

SEQ ID NO: 77700 - DNA, 20 bp, synthetic construct
  source 1..20: mol_type = other DNA
ccctgggcaacatggtaaaa

SEQ ID NO: 77701 - DNA, 20 bp, synthetic construct
  source 1..20: mol_type = other DNA
accctgggcaacatggtaaa

SEQ ID NO: 77702 - DNA, 20 bp, synthetic construct
  source 1..20: mol_type = other DNA
caccctgggcaacatggtaa

SEQ ID NO: 77703 - DNA, 20 bp, synthetic construct
  source 1..20: mol_type = other DNA
tcaccctgggcaacatggta

SEQ ID NO: 77704 - DNA, 20 bp, synthetic construct
  source 1..20: mol_type = other DNA
atcaccctgggcaacatggt

SEQ ID NO: 77705 - DNA, 20 bp, synthetic construct
  source 1..20: mol_type = other DNA
gatcaccctgggcaacatgg

SEQ ID NO: 77706 - DNA, 20 bp, synthetic construct
  source 1..20: mol_type = other DNA
agatcaccctgggcaacatg

SEQ ID NO: 77707 - DNA, 20 bp, synthetic construct
  source 1..20: mol_type = other DNA
cagatcaccctgggcaacat

SEQ ID NO: 77708 - DNA, 20 bp, synthetic construct
  source 1..20: mol_type = other DNA
ccagatcaccctgggcaaca

SEQ ID NO: 77709 - DNA, 20 bp, synthetic construct
  source 1..20: mol_type = other DNA
tccagatcaccctgggcaac

SEQ ID NO: 77710 - DNA, 20 bp, synthetic construct
  source 1..20: mol_type = other DNA
ttccagatcaccctgggcaa

SEQ ID NO: 77711 - DNA, 20 bp, synthetic construct
  source 1..20: mol_type = other DNA
gttccagatcaccctgggca

SEQ ID NO: 77712 - DNA, 20 bp, synthetic construct
  source 1..20: mol_type = other DNA
agttccagatcaccctgggc

SEQ ID NO: 77713 - DNA, 20 bp, synthetic construct
  source 1..20: mol_type = other DNA
gagttccagatcaccctggg

SEQ ID NO: 77714 - DNA, 20 bp, synthetic construct
  source 1..20: mol_type = other DNA
ggagttccagatcaccctgg

SEQ ID NO: 77715 - DNA, 20 bp, synthetic construct
  source 1..20: mol_type = other DNA
aggagttccagatcaccctg

SEQ ID NO: 77716 - DNA, 20 bp, synthetic construct
  source 1..20: mol_type = other DNA
caggagttccagatcaccct

SEQ ID NO: 77717 - DNA, 20 bp, synthetic construct
  source 1..20: mol_type = other DNA
tcaggagttccagatcaccc

SEQ ID NO: 77718 - DNA, 20 bp, synthetic construct
  source 1..20: mol_type = other DNA
ctcaggagttccagatcacc

SEQ ID NO: 77719 - DNA, 20 bp, synthetic construct
  source 1..20: mol_type = other DNA
gctcaggagttccagatcac

SEQ ID NO: 77720 - DNA, 20 bp, synthetic construct
  source 1..20: mol_type = other DNA
agctcaggagttccagatca

SEQ ID NO: 77721 - DNA, 20 bp, synthetic construct
  source 1..20: mol_type = other DNA
gagctcaggagttccagatc

SEQ ID NO: 77722 - DNA, 20 bp, synthetic construct
  source 1..20: mol_type = other DNA
tgagctcaggagttccagat

SEQ ID NO: 77723 - DNA, 20 bp, synthetic construct
  source 1..20: mol_type = other DNA
ctgagctcaggagttccaga

SEQ ID NO: 77724 - DNA, 20 bp, synthetic construct
  source 1..20: mol_type = other DNA
cctgagctcaggagttccag

SEQ ID NO: 77725 - DNA, 20 bp, synthetic construct
  source 1..20: mol_type = other DNA
acctgagctcaggagttcca

SEQ ID NO: 77726 - DNA, 20 bp, synthetic construct
  source 1..20: mol_type = other DNA
tacctgagctcaggagttcc

SEQ ID NO: 77727 - DNA, 20 bp, synthetic construct
  source 1..20: mol_type = other DNA
ttacctgagctcaggagttc

SEQ ID NO: 77728 - DNA, 20 bp, synthetic construct
  source 1..20: mol_type = other DNA
attacctgagctcaggagtt

SEQ ID NO: 77729 - DNA, 20 bp, synthetic construct
  source 1..20: mol_type = other DNA
gattacctgagctcaggagt

SEQ ID NO: 77730 - DNA, 20 bp, synthetic construct
  source 1..20: mol_type = other DNA
ggattacctgagctcaggag

SEQ ID NO: 77731 - DNA, 20 bp, synthetic construct
  source 1..20: mol_type = other DNA
tggattacctgagctcagga

SEQ ID NO: 77732 - DNA, 20 bp, synthetic construct
  source 1..20: mol_type = other DNA
gtggattacctgagctcagg

SEQ ID NO: 77733 - DNA, 20 bp, synthetic construct
  source 1..20: mol_type = other DNA
ggtggattacctgagctcag

SEQ ID NO: 77734 - DNA, 20 bp, synthetic construct
  source 1..20: mol_type = other DNA
gggtggattacctgagctca

SEQ ID NO: 77735 - DNA, 20 bp, synthetic construct
  source 1..20: mol_type = other DNA
tgggtggattacctgagctc

SEQ ID NO: 77736 - DNA, 20 bp, synthetic construct
  source 1..20: mol_type = other DNA
gtgggtggattacctgagct

SEQ ID NO: 77737 - DNA, 20 bp, synthetic construct
  source 1..20: mol_type = other DNA
ggtgggtggattacctgagc

SEQ ID NO: 77738 - DNA, 20 bp, synthetic construct
  source 1..20: mol_type = other DNA
aggtgggtggattacctgag

SEQ ID NO: 77739 - DNA, 20 bp, synthetic construct
  source 1..20: mol_type = other DNA
gaggtgggtggattacctga

SEQ ID NO: 77740 - DNA, 20 bp, synthetic construct
  source 1..20: mol_type = other DNA
tgaggtgggtggattacctg

SEQ ID NO: 77741 - DNA, 20 bp, synthetic construct
  source 1..20: mol_type = other DNA
ctgaggtgggtggattacct

SEQ ID NO: 77742 - DNA, 20 bp, synthetic construct
  source 1..20: mol_type = other DNA
gctgaggtgggtggattacc

SEQ ID NO: 77743 - DNA, 20 bp, synthetic construct
  source 1..20: mol_type = other DNA
ggctgaggtgggtggattac

SEQ ID NO: 77744 - DNA, 20 bp, synthetic construct
  source 1..20: mol_type = other DNA
aggctgaggtgggtggatta

SEQ ID NO: 77745 - DNA, 20 bp, synthetic construct
  source 1..20: mol_type = other DNA
gaggctgaggtgggtggatt

SEQ ID NO: 77746 - DNA, 20 bp, synthetic construct
  source 1..20: mol_type = other DNA
ggaggctgaggtgggtggat

SEQ ID NO: 77747 - DNA, 20 bp, synthetic construct
  source 1..20: mol_type = other DNA
gggaggctgaggtgggtgga

SEQ ID NO: 77748 - DNA, 20 bp, synthetic construct
  source 1..20: mol_type = other DNA
tgggaggctgaggtgggtgg

SEQ ID NO: 77749 - DNA, 20 bp, synthetic construct
  source 1..20: mol_type = other DNA
ttgggaggctgaggtgggtg

SEQ ID NO: 77750 - DNA, 20 bp, synthetic construct
  source 1..20: mol_type = other DNA
tttgggaggctgaggtgggt

SEQ ID NO: 77751 - DNA, 20 bp, synthetic construct
  source 1..20: mol_type = other DNA
ctttgggaggctgaggtggg

SEQ ID NO: 77752 - DNA, 20 bp, synthetic construct
  source 1..20: mol_type = other DNA
actttgggaggctgaggtgg

SEQ ID NO: 77753 - DNA, 20 bp, synthetic construct
  source 1..20: mol_type = other DNA
cactttgggaggctgaggtg

SEQ ID NO: 77754 - DNA, 20 bp, synthetic construct
  source 1..20: mol_type = other DNA
gcactttgggaggctgaggt

SEQ ID NO: 77755 - DNA, 20 bp, synthetic construct
  source 1..20: mol_type = other DNA
agcactttgggaggctgagg

SEQ ID NO: 77756 - DNA, 20 bp, synthetic construct
  source 1..20: mol_type = other DNA
cagcactttgggaggctgag

SEQ ID NO: 77757 - DNA, 20 bp, synthetic construct
  source 1..20: mol_type = other DNA
ccagcactttgggaggctga

SEQ ID NO: 77758 - DNA, 20 bp, synthetic construct
  source 1..20: mol_type = other DNA
cccagcactttgggaggctg

SEQ ID NO: 77759 - DNA, 20 bp, synthetic construct
  source 1..20: mol_type = other DNA
tcccagcactttgggaggct

SEQ ID NO: 77760 - DNA, 20 bp, synthetic construct
  source 1..20: mol_type = other DNA
atcccagcactttgggaggc

SEQ ID NO: 77761 - DNA, 20 bp, synthetic construct
  source 1..20: mol_type = other DNA
aatcccagcactttgggagg

SEQ ID NO: 77762 - DNA, 20 bp, synthetic construct
  source 1..20: mol_type = other DNA
taatcccagcactttgggag

SEQ ID NO: 77763 - DNA, 20 bp, synthetic construct
  source 1..20: mol_type = other DNA
gtaatcccagcactttggga

SEQ ID NO: 77764 - DNA, 20 bp, synthetic construct
  source 1..20: mol_type = other DNA
tgtaatcccagcactttggg

SEQ ID NO: 77765 - DNA, 20 bp, synthetic construct
  source 1..20: mol_type = other DNA
ctgtaatcccagcactttgg

SEQ ID NO: 77766 - DNA, 20 bp, synthetic construct
  source 1..20: mol_type = other DNA
cctgtaatcccagcactttg

SEQ ID NO: 77767 - DNA, 20 bp, synthetic construct
  source 1..20: mol_type = other DNA
acctgtaatcccagcacttt

SEQ ID NO: 77768 - DNA, 20 bp, synthetic construct
  source 1..20: mol_type = other DNA
cacctgtaatcccagcactt

SEQ ID NO: 77769 - DNA, 20 bp, synthetic construct
  source 1..20: mol_type = other DNA
acacctgtaatcccagcact

SEQ ID NO: 77770 - DNA, 20 bp, synthetic construct
  source 1..20: mol_type = other DNA
cacacctgtaatcccagcac

SEQ ID NO: 77771 - DNA, 20 bp, synthetic construct
  source 1..20: mol_type = other DNA
tcacacctgtaatcccagca

SEQ ID NO: 77772 - DNA, 20 bp, synthetic construct
  source 1..20: mol_type = other DNA
ctcacacctgtaatcccagc

SEQ ID NO: 77773 - DNA, 20 bp, synthetic construct
  source 1..20: mol_type = other DNA
gctcacacctgtaatcccag

SEQ ID NO: 77774 - DNA, 20 bp, synthetic construct
  source 1..20: mol_type = other DNA
ggctcacacctgtaatccca

SEQ ID NO: 77775 - DNA, 20 bp, synthetic construct
  source 1..20: mol_type = other DNA
tggctcacacctgtaatccc

SEQ ID NO: 77776 - DNA, 20 bp, synthetic construct
  source 1..20: mol_type = other DNA
atggctcacacctgtaatcc

SEQ ID NO: 77777 - DNA, 20 bp, synthetic construct
  source 1..20: mol_type = other DNA
gatggctcacacctgtaatc

SEQ ID NO: 77778 - DNA, 20 bp, synthetic construct
  source 1..20: mol_type = other DNA
tgatggctcacacctgtaat

SEQ ID NO: 77779 - DNA, 20 bp, synthetic construct
  source 1..20: mol_type = other DNA
atgatggctcacacctgtaa

SEQ ID NO: 77780 - DNA, 20 bp, synthetic construct
  source 1..20: mol_type = other DNA
catgatggctcacacctgta

SEQ ID NO: 77781 - DNA, 20 bp, synthetic construct
  source 1..20: mol_type = other DNA
gcatgatggctcacacctgt

SEQ ID NO: 77782 - DNA, 20 bp, synthetic construct
  source 1..20: mol_type = other DNA
ggcatgatggctcacacctg

SEQ ID NO: 77783 - DNA, 20 bp, synthetic construct
  source 1..20: mol_type = other DNA
aggcatgatggctcacacct

SEQ ID NO: 77784 - DNA, 20 bp, synthetic construct
  source 1..20: mol_type = other DNA
caggcatgatggctcacacc

SEQ ID NO: 77785 - DNA, 20 bp, synthetic construct
  source 1..20: mol_type = other DNA
tcaggcatgatggctcacac

SEQ ID NO: 77786 - DNA, 20 bp, synthetic construct
  source 1..20: mol_type = other DNA
gtcaggcatgatggctcaca

SEQ ID NO: 77787 - DNA, 20 bp, synthetic construct
  source 1..20: mol_type = other DNA
ggtcaggcatgatggctcac

SEQ ID NO: 77788 - DNA, 20 bp, synthetic construct
  source 1..20: mol_type = other DNA
tggtcaggcatgatggctca

SEQ ID NO: 77789 - DNA, 20 bp, synthetic construct
  source 1..20: mol_type = other DNA
ctggtcaggcatgatggctc

SEQ ID NO: 77790 - DNA, 20 bp, synthetic construct
  source 1..20: mol_type = other DNA
cctggtcaggcatgatggct

SEQ ID NO: 77791 - DNA, 20 bp, synthetic construct
  source 1..20: mol_type = other DNA
tcctggtcaggcatgatggc

SEQ ID NO: 77792 - DNA, 20 bp, synthetic construct
  source 1..20: mol_type = other DNA
atcctggtcaggcatgatgg

SEQ ID NO: 77793 - DNA, 20 bp, synthetic construct
  source 1..20: mol_type = other DNA
aatcctggtcaggcatgatg

SEQ ID NO: 77794 - DNA, 20 bp, synthetic construct
  source 1..20: mol_type = other DNA
aaatcctggtcaggcatgat

SEQ ID NO: 77795 - DNA, 20 bp, synthetic construct
  source 1..20: mol_type = other DNA
aaaatcctggtcaggcatga

SEQ ID NO: 77796 - DNA, 20 bp, synthetic construct
  source 1..20: mol_type = other DNA
aaaaatcctggtcaggcatg

SEQ ID NO: 77797 - DNA, 20 bp, synthetic construct
  source 1..20: mol_type = other DNA
aaaaaatcctggtcaggcat

SEQ ID NO: 77798 - DNA, 20 bp, synthetic construct
  source 1..20: mol_type = other DNA
aaaaaaatcctggtcaggca

SEQ ID NO: 77799 - DNA, 20 bp, synthetic construct
  source 1..20: mol_type = other DNA
aaaaaaaatcctggtcaggc

SEQ ID NO: 77800 - DNA, 20 bp, synthetic construct
  source 1..20: mol_type = other DNA
aaaaaaaaatcctggtcagg

SEQ ID NO: 77801 - DNA, 20 bp, synthetic construct
  source 1..20: mol_type = other DNA
aaaaaaaaaatcctggtcag

SEQ ID NO: 77802 - DNA, 20 bp, synthetic construct
  source 1..20: mol_type = other DNA
aaaaaaaaaaatcctggtca

SEQ ID NO: 77803 - DNA, 20 bp, synthetic construct
  source 1..20: mol_type = other DNA
aaaaaaaaaaaatcctggtc

SEQ ID NO: 77804 - DNA, 20 bp, synthetic construct
  source 1..20: mol_type = other DNA
aaaaaaaaaaaaatcctggt

SEQ ID NO: 77805 - DNA, 20 bp, synthetic construct
  source 1..20: mol_type = other DNA
gaaaaaaaaaaaaatcctgg

SEQ ID NO: 77806 - DNA, 20 bp, synthetic construct
  source 1..20: mol_type = other DNA
tgaaaaaaaaaaaaatcctg

SEQ ID NO: 77807 - DNA, 20 bp, synthetic construct
  source 1..20: mol_type = other DNA
ctgaaaaaaaaaaaaatcct

SEQ ID NO: 77808 - DNA, 20 bp, synthetic construct
  source 1..20: mol_type = other DNA
gctgaaaaaaaaaaaaatcc

SEQ ID NO: 77809 - DNA, 20 bp, synthetic construct
  source 1..20: mol_type = other DNA
tgctgaaaaaaaaaaaaatc

SEQ ID NO: 77810 - DNA, 20 bp, synthetic construct
  source 1..20: mol_type = other DNA
atgctgaaaaaaaaaaaaat

SEQ ID NO: 77811 - DNA, 20 bp, synthetic construct
  source 1..20: mol_type = other DNA
aatgctgaaaaaaaaaaaaa

SEQ ID NO: 77812 - DNA, 20 bp, synthetic construct
  source 1..20: mol_type = other DNA
taatgctgaaaaaaaaaaaa

SEQ ID NO: 77813 - DNA, 20 bp, synthetic construct
  source 1..20: mol_type = other DNA
ataatgctgaaaaaaaaaaa

SEQ ID NO: 77814 - DNA, 20 bp, synthetic construct
  source 1..20: mol_type = other DNA
aataatgctgaaaaaaaaaa

SEQ ID NO: 77815 - DNA, 20 bp, synthetic construct
  source 1..20: mol_type = other DNA
aaataatgctgaaaaaaaaa

SEQ ID NO: 77816 - DNA, 20 bp, synthetic construct
  source 1..20: mol_type = other DNA
gaaataatgctgaaaaaaaa

SEQ ID NO: 77817 - DNA, 20 bp, synthetic construct
  source 1..20: mol_type = other DNA
agaaataatgctgaaaaaaa

SEQ ID NO: 77818 - DNA, 20 bp, synthetic construct
  source 1..20: mol_type = other DNA
aagaaataatgctgaaaaaa

SEQ ID NO: 77819 - DNA, 20 bp, synthetic construct
  source 1..20: mol_type = other DNA
aaagaaataatgctgaaaaa

SEQ ID NO: 77820 - DNA, 20 bp, synthetic construct
  source 1..20: mol_type = other DNA
aaaagaaataatgctgaaaa

SEQ ID NO: 77821 - DNA, 20 bp, synthetic construct
  source 1..20: mol_type = other DNA
caaaagaaataatgctgaaa

SEQ ID NO: 77822 - DNA, 20 bp, synthetic construct
  source 1..20: mol_type = other DNA
acaaaagaaataatgctgaa

SEQ ID NO: 77823 - DNA, 20 bp, synthetic construct
  source 1..20: mol_type = other DNA
aacaaaagaaataatgctga

SEQ ID NO: 77824 - DNA, 20 bp, synthetic construct
  source 1..20: mol_type = other DNA
caacaaaagaaataatgctg

SEQ ID NO: 77825 - DNA, 20 bp, synthetic construct
  source 1..20: mol_type = other DNA
acaacaaaagaaataatgct

SEQ ID NO: 77826 - DNA, 20 bp, synthetic construct
  source 1..20: mol_type = other DNA
aacaacaaaagaaataatgc

SEQ ID NO: 77827 - DNA, 20 bp, synthetic construct
  source 1..20: mol_type = other DNA
caacaacaaaagaaataatg

SEQ ID NO: 77828 - DNA, 20 bp, synthetic construct
  source 1..20: mol_type = other DNA
acaacaacaaaagaaataat

SEQ ID NO: 77829 - DNA, 20 bp, synthetic construct
  source 1..20: mol_type = other DNA
aacaacaacaaaagaaataa

SEQ ID NO: 77830 - DNA, 20 bp, synthetic construct
  source 1..20: mol_type = other DNA
caacaacaacaaaagaaata

SEQ ID NO: 77831 - DNA, 20 bp, synthetic construct
  source 1..20: mol_type = other DNA
gcaacaacaacaaaagaaat

SEQ ID NO: 77832 - DNA, 20 bp, synthetic construct
  source 1..20: mol_type = other DNA
agcaacaacaacaaaagaaa

SEQ ID NO: 77833 - DNA, 20 bp, synthetic construct
  source 1..20: mol_type = other DNA
cagcaacaacaacaaaagaa

SEQ ID NO: 77834 - DNA, 20 bp, synthetic construct
  source 1..20: mol_type = other DNA
acagcaacaacaacaaaaga

SEQ ID NO: 77835 - DNA, 20 bp, synthetic construct
  source 1..20: mol_type = other DNA
aacagcaacaacaacaaaag

SEQ ID NO: 77836 - DNA, 20 bp, synthetic construct
  source 1..20: mol_type = other DNA
caacagcaacaacaacaaaa

SEQ ID NO: 77837 - DNA, 20 bp, synthetic construct
  source 1..20: mol_type = other DNA
acaacagcaacaacaacaaa

SEQ ID NO: 77838 - DNA, 20 bp, synthetic construct
  source 1..20: mol_type = other DNA
aacaacagcaacaacaacaa

SEQ ID NO: 77839 - DNA, 20 bp, synthetic construct
  source 1..20: mol_type = other DNA
aaacaacagcaacaacaaca

SEQ ID NO: 77840 - DNA, 20 bp, synthetic construct
  source 1..20: mol_type = other DNA
aaaacaacagcaacaacaac

SEQ ID NO: 77841 - DNA, 20 bp, synthetic construct
  source 1..20: mol_type = other DNA
caaaacaacagcaacaacaa

SEQ ID NO: 77842 - DNA, 20 bp, synthetic construct
  source 1..20: mol_type = other DNA
tcaaaacaacagcaacaaca

SEQ ID NO: 77843 - DNA, 20 bp, synthetic construct
  source 1..20: mol_type = other DNA
ctcaaaacaacagcaacaac

SEQ ID NO: 77844 - DNA, 20 bp, synthetic construct
  source 1..20: mol_type = other DNA
tctcaaaacaacagcaacaa

SEQ ID NO: 77845 - DNA, 20 bp, synthetic construct
  source 1..20: mol_type = other DNA
ctctcaaaacaacagcaaca

SEQ ID NO: 77846 - DNA, 20 bp, synthetic construct
  source 1..20: mol_type = other DNA
tctctcaaaacaacagcaac

SEQ ID NO: 77847 - DNA, 20 bp, synthetic construct
  source 1..20: mol_type = other DNA
atctctcaaaacaacagcaa

SEQ ID NO: 77848 - DNA, 20 bp, synthetic construct
  source 1..20: mol_type = other DNA
catctctcaaaacaacagca

SEQ ID NO: 77849 - DNA, 20 bp, synthetic construct
  source 1..20: mol_type = other DNA
ccatctctcaaaacaacagc

SEQ ID NO: 77850 - DNA, 20 bp, synthetic construct
  source 1..20: mol_type = other DNA
tccatctctcaaaacaacag

SEQ ID NO: 77851 - DNA, 20 bp, synthetic construct
  source 1..20: mol_type = other DNA
ctccatctctcaaaacaaca

SEQ ID NO: 77852 - DNA, 20 bp, synthetic construct
  source 1..20: mol_type = other DNA
actccatctctcaaaacaac

SEQ ID NO: 77853 - DNA, 20 bp, synthetic construct
  source 1..20: mol_type = other DNA
gactccatctctcaaaacaa

SEQ ID NO: 77854 - DNA, 20 bp, synthetic construct
  source 1..20: mol_type = other DNA
agactccatctctcaaaaca

SEQ ID NO: 77855 - DNA, 20 bp, synthetic construct
  source 1..20: mol_type = other DNA
gagactccatctctcaaaac

SEQ ID NO: 77856 - DNA, 20 bp, synthetic construct
  source 1..20: mol_type = other DNA
tgagactccatctctcaaaa

SEQ ID NO: 77857 - DNA, 20 bp, synthetic construct
  source 1..20: mol_type = other DNA
gtgagactccatctctcaaa

SEQ ID NO: 77858 - DNA, 20 bp, synthetic construct
  source 1..20: mol_type = other DNA
agtgagactccatctctcaa

SEQ ID NO: 77859 - DNA, 20 bp, synthetic construct
  source 1..20: mol_type = other DNA
gagtgagactccatctctca

SEQ ID NO: 77860 - DNA, 20 bp, synthetic construct
  source 1..20: mol_type = other DNA
agagtgagactccatctctc

SEQ ID NO: 77861 - DNA, 20 bp, synthetic construct
  source 1..20: mol_type = other DNA
cagagtgagactccatctct

SEQ ID NO: 77862 - DNA, 20 bp, synthetic construct
  source 1..20: mol_type = other DNA
acagagtgagactccatctc

SEQ ID NO: 77863 - DNA, 20 bp, synthetic construct
  source 1..20: mol_type = other DNA
gacagagtgagactccatct

SEQ ID NO: 77864 - DNA, 20 bp, synthetic construct
  source 1..20: mol_type = other DNA
tgacagagtgagactccatc

SEQ ID NO: 77865 - DNA, 20 bp, synthetic construct
  source 1..20: mol_type = other DNA
gtgacagagtgagactccat

SEQ ID NO: 77866 - DNA, 20 bp, synthetic construct
  source 1..20: mol_type = other DNA
ggtgacagagtgagactcca

SEQ ID NO: 77867 - DNA, 20 bp, synthetic construct
  source 1..20: mol_type = other DNA
gggtgacagagtgagactcc

SEQ ID NO: 77868 - DNA, 20 bp, synthetic construct
  source 1..20: mol_type = other DNA
tgggtgacagagtgagactc

SEQ ID NO: 77869 - DNA, 20 bp, synthetic construct
  source 1..20: mol_type = other DNA
ctgggtgacagagtgagact

SEQ ID NO: 77870 - DNA, 20 bp, synthetic construct
  source 1..20: mol_type = other DNA
tctgggtgacagagtgagac

SEQ ID NO: 77871 - DNA, 20 bp, synthetic construct
  source 1..20: mol_type = other DNA
gtctgggtgacagagtgaga

SEQ ID NO: 77872 - DNA, 20 bp, synthetic construct
  source 1..20: mol_type = other DNA
agtctgggtgacagagtgag

SEQ ID NO: 77873 - DNA, 20 bp, synthetic construct
  source 1..20: mol_type = other DNA
cagtctgggtgacagagtga

SEQ ID NO: 77874 - DNA, 20 bp, synthetic construct
  source 1..20: mol_type = other DNA
ccagtctgggtgacagagtg

SEQ ID NO: 77875 - DNA, 20 bp, synthetic construct
  source 1..20: mol_type = other DNA
tccagtctgggtgacagagt

SEQ ID NO: 77876 - DNA, 20 bp, synthetic construct
  source 1..20: mol_type = other DNA
ctccagtctgggtgacagag

SEQ ID NO: 77877 - DNA, 20 bp, synthetic construct
  source 1..20: mol_type = other DNA
actccagtctgggtgacaga

SEQ ID NO: 77878 - DNA, 20 bp, synthetic construct
  source 1..20: mol_type = other DNA
cactccagtctgggtgacag

SEQ ID NO: 77879 - DNA, 20 bp, synthetic construct
  source 1..20: mol_type = other DNA
gcactccagtctgggtgaca

SEQ ID NO: 77880 - DNA, 20 bp, synthetic construct
  source 1..20: mol_type = other DNA
tgcactccagtctgggtgac

SEQ ID NO: 77881 - DNA, 20 bp, synthetic construct
  source 1..20: mol_type = other DNA
ctgcactccagtctgggtga

SEQ ID NO: 77882 - DNA, 20 bp, synthetic construct
  source 1..20: mol_type = other DNA
actgcactccagtctgggtg

SEQ ID NO: 77883 - DNA, 20 bp, synthetic construct
  source 1..20: mol_type = other DNA
cactgcactccagtctgggt

SEQ ID NO: 77884 - DNA, 20 bp, synthetic construct
  source 1..20: mol_type = other DNA
ccactgcactccagtctggg

SEQ ID NO: 77885 - DNA, 20 bp, synthetic construct
  source 1..20: mol_type = other DNA
accactgcactccagtctgg

SEQ ID NO: 77886 - DNA, 20 bp, synthetic construct
  source 1..20: mol_type = other DNA
caccactgcactccagtctg

SEQ ID NO: 77887 - DNA, 20 bp, synthetic construct
  source 1..20: mol_type = other DNA
gcaccactgcactccagtct

SEQ ID NO: 77888 - DNA, 20 bp, synthetic construct
  source 1..20: mol_type = other DNA
cgcaccactgcactccagtc

SEQ ID NO: 77889 - DNA, 20 bp, synthetic construct
  source 1..20: mol_type = other DNA
tcgcaccactgcactccagt

SEQ ID NO: 77890 - DNA, 20 bp, synthetic construct
  source 1..20: mol_type = other DNA
atcgcaccactgcactccag

SEQ ID NO: 77891 - DNA, 20 bp, synthetic construct
  source 1..20: mol_type = other DNA
gatcgcaccactgcactcca

SEQ ID NO: 77892 - DNA, 20 bp, synthetic construct
  source 1..20: mol_type = other DNA
agatcgcaccactgcactcc

SEQ ID NO: 77893 - DNA, 20 bp, synthetic construct
  source 1..20: mol_type = other DNA
gagatcgcaccactgcactc

SEQ ID NO: 77894 - DNA, 20 bp, synthetic construct
  source 1..20: mol_type = other DNA
cgagatcgcaccactgcact

SEQ ID NO: 77895 - DNA, 20 bp, synthetic construct
  source 1..20: mol_type = other DNA
ccgagatcgcaccactgcac

SEQ ID NO: 77896 - DNA, 20 bp, synthetic construct
  source 1..20: mol_type = other DNA
gccgagatcgcaccactgca

SEQ ID NO: 77897 - DNA, 20 bp, synthetic construct
  source 1..20: mol_type = other DNA
agccgagatcgcaccactgc

SEQ ID NO: 77898 - DNA, 20 bp, synthetic construct
  source 1..20: mol_type = other DNA
gagccgagatcgcaccactg

SEQ ID NO: 77899 - DNA, 20 bp, synthetic construct
  source 1..20: mol_type = other DNA
ggagccgagatcgcaccact

SEQ ID NO: 77900 - DNA, 20 bp, synthetic construct
  source 1..20: mol_type = other DNA
gggagccgagatcgcaccac

SEQ ID NO: 77901 - DNA, 20 bp, synthetic construct
  source 1..20: mol_type = other DNA
agggagccgagatcgcacca

SEQ ID NO: 77902 - DNA, 20 bp, synthetic construct
  source 1..20: mol_type = other DNA
cagggagccgagatcgcacc

SEQ ID NO: 77903 - DNA, 20 bp, synthetic construct
  source 1..20: mol_type = other DNA
acagggagccgagatcgcac

SEQ ID NO: 77904 - DNA, 20 bp, synthetic construct
  source 1..20: mol_type = other DNA
tacagggagccgagatcgca

SEQ ID NO: 77905 - DNA, 20 bp, synthetic construct
  source 1..20: mol_type = other DNA
ttacagggagccgagatcgc

SEQ ID NO: 77906 - DNA, 20 bp, synthetic construct
  source 1..20: mol_type = other DNA
gttacagggagccgagatcg

SEQ ID NO: 77907 - DNA, 20 bp, synthetic construct
  source 1..20: mol_type = other DNA
ggttacagggagccgagatc

SEQ ID NO: 77908 - DNA, 20 bp, synthetic construct
  source 1..20: mol_type = other DNA
aggttacagggagccgagat

SEQ ID NO: 77909 - DNA, 20 bp, synthetic construct
  source 1..20: mol_type = other DNA
gaggttacagggagccgaga

SEQ ID NO: 77910 - DNA, 20 bp, synthetic construct
  source 1..20: mol_type = other DNA
ggaggttacagggagccgag

SEQ ID NO: 77911 - DNA, 20 bp, synthetic construct
  source 1..20: mol_type = other DNA
tggaggttacagggagccga

SEQ ID NO: 77912 - DNA, 20 bp, synthetic construct
  source 1..20: mol_type = other DNA
gtggaggttacagggagccg

SEQ ID NO: 77913 - DNA, 20 bp, synthetic construct
  source 1..20: mol_type = other DNA
ggtggaggttacagggagcc

SEQ ID NO: 77914 - DNA, 20 bp, synthetic construct
  source 1..20: mol_type = other DNA
aggtggaggttacagggagc

SEQ ID NO: 77915 - DNA, 20 bp, synthetic construct
  source 1..20: mol_type = other DNA
gaggtggaggttacagggag

SEQ ID NO: 77916 - DNA, 20 bp, synthetic construct
  source 1..20: mol_type = other DNA
ggaggtggaggttacaggga

SEQ ID NO: 77917 - DNA, 20 bp, synthetic construct
  source 1..20: mol_type = other DNA
aggaggtggaggttacaggg

SEQ ID NO: 77918 - DNA, 20 bp, synthetic construct
  source 1..20: mol_type = other DNA
caggaggtggaggttacagg

SEQ ID NO: 77919 - DNA, 20 bp, synthetic construct
  source 1..20: mol_type = other DNA
ccaggaggtggaggttacag

SEQ ID NO: 77920 - DNA, 20 bp, synthetic construct
  source 1..20: mol_type = other DNA
cccaggaggtggaggttaca

SEQ ID NO: 77921 - DNA, 20 bp, synthetic construct
  source 1..20: mol_type = other DNA
acccaggaggtggaggttac

SEQ ID NO: 77922 - DNA, 20 bp, synthetic construct
  source 1..20: mol_type = other DNA
aacccaggaggtggaggtta

SEQ ID NO: 77923 - DNA, 20 bp, synthetic construct
  source 1..20: mol_type = other DNA
gaacccaggaggtggaggtt

SEQ ID NO: 77924 - DNA, 20 bp, synthetic construct
  source 1..20: mol_type = other DNA
tgaacccaggaggtggaggt

SEQ ID NO: 77925 - DNA, 20 bp, synthetic construct
  source 1..20: mol_type = other DNA
ttgaacccaggaggtggagg

SEQ ID NO: 77926 - DNA, 20 bp, synthetic construct
  source 1..20: mol_type = other DNA
cttgaacccaggaggtggag

SEQ ID NO: 77927 - DNA, 20 bp, synthetic construct
  source 1..20: mol_type = other DNA
acttgaacccaggaggtgga

SEQ ID NO: 77928 - DNA, 20 bp, synthetic construct
  source 1..20: mol_type = other DNA
cacttgaacccaggaggtgg

SEQ ID NO: 77929 - DNA, 20 bp, synthetic construct
  source 1..20: mol_type = other DNA
tcacttgaacccaggaggtg

SEQ ID NO: 77930 - DNA, 20 bp, synthetic construct
  source 1..20: mol_type = other DNA
atcacttgaacccaggaggt

SEQ ID NO: 77931 - DNA, 20 bp, synthetic construct
  source 1..20: mol_type = other DNA
aatcacttgaacccaggagg

SEQ ID NO: 77932 - DNA, 20 bp, synthetic construct
  source 1..20: mol_type = other DNA
gaatcacttgaacccaggag

SEQ ID NO: 77933 - DNA, 20 bp, synthetic construct
  source 1..20: mol_type = other DNA
agaatcacttgaacccagga

SEQ ID NO: 77934 - DNA, 20 bp, synthetic construct
  source 1..20: mol_type = other DNA
tagaatcacttgaacccagg

SEQ ID NO: 77935 - DNA, 20 bp, synthetic construct
  source 1..20: mol_type = other DNA
gtagaatcacttgaacccag

SEQ ID NO: 77936 - DNA, 20 bp, synthetic construct
  source 1..20: mol_type = other DNA
agtagaatcacttgaaccca

SEQ ID NO: 77937 - DNA, 20 bp, synthetic construct
  source 1..20: mol_type = other DNA
cagtagaatcacttgaaccc

SEQ ID NO: 77938 - DNA, 20 bp, synthetic construct
  source 1..20: mol_type = other DNA
gcagtagaatcacttgaacc

SEQ ID NO: 77939 - DNA, 20 bp, synthetic construct
  source 1..20: mol_type = other DNA
ggcagtagaatcacttgaac

SEQ ID NO: 77940 - DNA, 20 bp, synthetic construct
  source 1..20: mol_type = other DNA
aggcagtagaatcacttgaa

SEQ ID NO: 77941 - DNA, 20 bp, synthetic construct
  source 1..20: mol_type = other DNA
gaggcagtagaatcacttga

SEQ ID NO: 77942 - DNA, 20 bp, synthetic construct
  source 1..20: mol_type = other DNA
tgaggcagtagaatcacttg

SEQ ID NO: 77943 - DNA, 20 bp, synthetic construct
  source 1..20: mol_type = other DNA
ctgaggcagtagaatcactt

SEQ ID NO: 77944 - DNA, 20 bp, synthetic construct
  source 1..20: mol_type = other DNA
gctgaggcagtagaatcact

SEQ ID NO: 77945 - DNA, 20 bp, synthetic construct
  source 1..20: mol_type = other DNA
agctgaggcagtagaatcac

SEQ ID NO: 77946 - DNA, 20 bp, synthetic construct
  source 1..20: mol_type = other DNA
aagctgaggcagtagaatca

SEQ ID NO: 77947 - DNA, 20 bp, synthetic construct
  source 1..20: mol_type = other DNA
aaagctgaggcagtagaatc

SEQ ID NO: 77948 - DNA, 20 bp, synthetic construct
  source 1..20: mol_type = other DNA
gaaagctgaggcagtagaat

SEQ ID NO: 77949 - DNA, 20 bp, synthetic construct
  source 1..20: mol_type = other DNA
ggaaagctgaggcagtagaa

SEQ ID NO: 77950 - DNA, 20 bp, synthetic construct
  source 1..20: mol_type = other DNA
tggaaagctgaggcagtaga

SEQ ID NO: 77951 - DNA, 20 bp, synthetic construct
  source 1..20: mol_type = other DNA
ttggaaagctgaggcagtag

SEQ ID NO: 77952 - DNA, 20 bp, synthetic construct
  source 1..20: mol_type = other DNA
cttggaaagctgaggcagta

SEQ ID NO: 77953 - DNA, 20 bp, synthetic construct
  source 1..20: mol_type = other DNA
gcttggaaagctgaggcagt

SEQ ID NO: 77954 - DNA, 20 bp, synthetic construct
  source 1..20: mol_type = other DNA
tgcttggaaagctgaggcag

SEQ ID NO: 77955 - DNA, 20 bp, synthetic construct
  source 1..20: mol_type = other DNA
ctgcttggaaagctgaggca

SEQ ID NO: 77956 - DNA, 20 bp, synthetic construct
  source 1..20: mol_type = other DNA
gctgcttggaaagctgaggc

SEQ ID NO: 77957 - DNA, 20 bp, synthetic construct
  source 1..20: mol_type = other DNA
agctgcttggaaagctgagg

SEQ ID NO: 77958 - DNA, 20 bp, synthetic construct
  source 1..20: mol_type = other DNA
cagctgcttggaaagctgag

SEQ ID NO: 77959 - DNA, 20 bp, synthetic construct
  source 1..20: mol_type = other DNA
ccagctgcttggaaagctga

SEQ ID NO: 77960 - DNA, 20 bp, synthetic construct
  source 1..20: mol_type = other DNA
cccagctgcttggaaagctg

SEQ ID NO: 77961 - DNA, 20 bp, synthetic construct
  source 1..20: mol_type = other DNA
tcccagctgcttggaaagct

SEQ ID NO: 77962 - DNA, 20 bp, synthetic construct
  source 1..20: mol_type = other DNA
gtcccagctgcttggaaagc

SEQ ID NO: 77963 - DNA, 20 bp, synthetic construct
  source 1..20: mol_type = other DNA
agtcccagctgcttggaaag

SEQ ID NO: 77964 - DNA, 20 bp, synthetic construct
  source 1..20: mol_type = other DNA
tagtcccagctgcttggaaa

SEQ ID NO: 77965 - DNA, 20 bp, synthetic construct
  source 1..20: mol_type = other DNA
atagtcccagctgcttggaa

SEQ ID NO: 77966 - DNA, 20 bp, synthetic construct
  source 1..20: mol_type = other DNA
tatagtcccagctgcttgga

SEQ ID NO: 77967 - DNA, 20 bp, synthetic construct
  source 1..20: mol_type = other DNA
ctatagtcccagctgcttgg

SEQ ID NO: 77968 - DNA, 20 bp, synthetic construct
  source 1..20: mol_type = other DNA
cctatagtcccagctgcttg

SEQ ID NO: 77969 - DNA, 20 bp, synthetic construct
  source 1..20: mol_type = other DNA
gcctatagtcccagctgctt

SEQ ID NO: 77970 - DNA, 20 bp, synthetic construct
  source 1..20: mol_type = other DNA
cgcctatagtcccagctgct

SEQ ID NO: 77971 - DNA, 20 bp, synthetic construct
  source 1..20: mol_type = other DNA
acgcctatagtcccagctgc

SEQ ID NO: 77972 - DNA, 20 bp, synthetic construct
  source 1..20: mol_type = other DNA
cacgcctatagtcccagctg

SEQ ID NO: 77973 - DNA, 20 bp, synthetic construct
  source 1..20: mol_type = other DNA
gcacgcctatagtcccagct

SEQ ID NO: 77974 - DNA, 20 bp, synthetic construct
  source 1..20: mol_type = other DNA
cgcacgcctatagtcccagc

SEQ ID NO: 77975 - DNA, 20 bp, synthetic construct
  source 1..20: mol_type = other DNA
gcgcacgcctatagtcccag

SEQ ID NO: 77976 - DNA, 20 bp, synthetic construct
  source 1..20: mol_type = other DNA
ggcgcacgcctatagtccca

SEQ ID NO: 77977 - DNA, 20 bp, synthetic construct
  source 1..20: mol_type = other DNA
tggcgcacgcctatagtccc

SEQ ID NO: 77978 - DNA, 20 bp, synthetic construct
  source 1..20: mol_type = other DNA
gtggcgcacgcctatagtcc

SEQ ID NO: 77979 - DNA, 20 bp, synthetic construct
  source 1..20: mol_type = other DNA
ggtggcgcacgcctatagtc

SEQ ID NO: 77980 - DNA, 20 bp, synthetic construct
  source 1..20: mol_type = other DNA
tggtggcgcacgcctatagt

SEQ ID NO: 77981 - DNA, 20 bp, synthetic construct
  source 1..20: mol_type = other DNA
gtggtggcgcacgcctatag

SEQ ID NO: 77982 - DNA, 20 bp, synthetic construct
  source 1..20: mol_type = other DNA
tgtggtggcgcacgcctata

SEQ ID NO: 77983 - DNA, 20 bp, synthetic construct
  source 1..20: mol_type = other DNA
gtgtggtggcgcacgcctat

SEQ ID NO: 77984 - DNA, 20 bp, synthetic construct
  source 1..20: mol_type = other DNA
ggtgtggtggcgcacgccta

SEQ ID NO: 77985 - DNA, 20 bp, synthetic construct
  source 1..20: mol_type = other DNA
gggtgtggtggcgcacgcct

SEQ ID NO: 77986 - DNA, 20 bp, synthetic construct
  source 1..20: mol_type = other DNA
tgggtgtggtggcgcacgcc

SEQ ID NO: 77987 - DNA, 20 bp, synthetic construct
  source 1..20: mol_type = other DNA
ctgggtgtggtggcgcacgc

SEQ ID NO: 77988 - DNA, 20 bp, synthetic construct
  source 1..20: mol_type = other DNA
gctgggtgtggtggcgcacg

SEQ ID NO: 77989 - DNA, 20 bp, synthetic construct
  source 1..20: mol_type = other DNA
agctgggtgtggtggcgcac

SEQ ID NO: 77990 - DNA, 20 bp, synthetic construct
  source 1..20: mol_type = other DNA
tagctgggtgtggtggcgca

SEQ ID NO: 77991 - DNA, 20 bp, synthetic construct
  source 1..20: mol_type = other DNA
ttagctgggtgtggtggcgc

SEQ ID NO: 77992 - DNA, 20 bp, synthetic construct
  source 1..20: mol_type = other DNA
attagctgggtgtggtggcg

SEQ ID NO: 77993 - DNA, 20 bp, synthetic construct
  source 1..20: mol_type = other DNA
aattagctgggtgtggtggc

SEQ ID NO: 77994 - DNA, 20 bp, synthetic construct
  source 1..20: mol_type = other DNA
aaattagctgggtgtggtgg

SEQ ID NO: 77995 - DNA, 20 bp, synthetic construct
  source 1..20: mol_type = other DNA
aaaattagctgggtgtggtg

SEQ ID NO: 77996 - DNA, 20 bp, synthetic construct
  source 1..20: mol_type = other DNA
aaaaattagctgggtgtggt

SEQ ID NO: 77997 - DNA, 20 bp, synthetic construct
  source 1..20: mol_type = other DNA
caaaaattagctgggtgtgg

SEQ ID NO: 77998 - DNA, 20 bp, synthetic construct
  source 1..20: mol_type = other DNA
acaaaaattagctgggtgtg

SEQ ID NO: 77999 - DNA, 20 bp, synthetic construct
  source 1..20: mol_type = other DNA
tacaaaaattagctgggtgt

SEQ ID NO: 78000 - DNA, 20 bp, synthetic construct
  source 1..20: mol_type = other DNA
atacaaaaattagctgggtg

SEQ ID NO: 78001 - DNA, 20 bp, synthetic construct
  source 1..20: mol_type = other DNA
aatacaaaaattagctgggt

SEQ ID NO: 78002 - DNA, 20 bp, synthetic construct
  source 1..20: mol_type = other DNA
aaatacaaaaattagctggg

SEQ ID NO: 78003 - DNA, 20 bp, synthetic construct
  source 1..20: mol_type = other DNA
aaaatacaaaaattagctgg

SEQ ID NO: 78004 - DNA, 20 bp, synthetic construct
  source 1..20: mol_type = other DNA
aaaaatacaaaaattagctg

SEQ ID NO: 78005 - DNA, 20 bp, synthetic construct
  source 1..20: mol_type = other DNA
taaaaatacaaaaattagct

SEQ ID NO: 78006 - DNA, 20 bp, synthetic construct
  source 1..20: mol_type = other DNA
ctaaaaatacaaaaattagc

SEQ ID NO: 78007 - DNA, 20 bp, synthetic construct
  source 1..20: mol_type = other DNA
actaaaaatacaaaaattag

SEQ ID NO: 78008 - DNA, 20 bp, synthetic construct
  source 1..20: mol_type = other DNA
tactaaaaatacaaaaatta

SEQ ID NO: 78009 - DNA, 20 bp, synthetic construct
  source 1..20: mol_type = other DNA
ctactaaaaatacaaaaatt

SEQ ID NO: 78010 - DNA, 20 bp, synthetic construct
  source 1..20: mol_type = other DNA
tctactaaaaatacaaaaat

SEQ ID NO: 78011 - DNA, 20 bp, synthetic construct
  source 1..20: mol_type = other DNA
ctctactaaaaatacaaaaa

SEQ ID NO: 78012 - DNA, 20 bp, synthetic construct
  source 1..20: mol_type = other DNA
tctctactaaaaatacaaaa

SEQ ID NO: 78013 - DNA, 20 bp, synthetic construct
  source 1..20: mol_type = other DNA
gtctctactaaaaatacaaa

SEQ ID NO: 78014 - DNA, 20 bp, synthetic construct
  source 1..20: mol_type = other DNA
cgtctctactaaaaatacaa

SEQ ID NO: 78015 - DNA, 20 bp, synthetic construct
  source 1..20: mol_type = other DNA
ccgtctctactaaaaataca

SEQ ID NO: 78016 - DNA, 20 bp, synthetic construct
  source 1..20: mol_type = other DNA
cccgtctctactaaaaatac

SEQ ID NO: 78017 - DNA, 20 bp, synthetic construct
  source 1..20: mol_type = other DNA
ccccgtctctactaaaaata

SEQ ID NO: 78018 - DNA, 20 bp, synthetic construct
  source 1..20: mol_type = other DNA
accccgtctctactaaaaat

SEQ ID NO: 78019 - DNA, 20 bp, synthetic construct
  source 1..20: mol_type = other DNA
aaccccgtctctactaaaaa

SEQ ID NO: 78020 - DNA, 20 bp, synthetic construct
  source 1..20: mol_type = other DNA
aaaccccgtctctactaaaa

SEQ ID NO: 78021 - DNA, 20 bp, synthetic construct
  source 1..20: mol_type = other DNA
gaaaccccgtctctactaaa

SEQ ID NO: 78022 - DNA, 20 bp, synthetic construct
  source 1..20: mol_type = other DNA
tgaaaccccgtctctactaa

SEQ ID NO: 78023 - DNA, 20 bp, synthetic construct
  source 1..20: mol_type = other DNA
gtgaaaccccgtctctacta

SEQ ID NO: 78024 - DNA, 20 bp, synthetic construct
  source 1..20: mol_type = other DNA
ggtgaaaccccgtctctact

SEQ ID NO: 78025 - DNA, 20 bp, synthetic construct
  source 1..20: mol_type = other DNA
tggtgaaaccccgtctctac

SEQ ID NO: 78026 - DNA, 20 bp, synthetic construct
  source 1..20: mol_type = other DNA
atggtgaaaccccgtctcta

SEQ ID NO: 78027 - DNA, 20 bp, synthetic construct
  source 1..20: mol_type = other DNA
tatggtgaaaccccgtctct

SEQ ID NO: 78028 - DNA, 20 bp, synthetic construct
  source 1..20: mol_type = other DNA
atatggtgaaaccccgtctc

SEQ ID NO: 78029 - DNA, 20 bp, synthetic construct
  source 1..20: mol_type = other DNA
catatggtgaaaccccgtct

SEQ ID NO: 78030 - DNA, 20 bp, synthetic construct
  source 1..20: mol_type = other DNA
acatatggtgaaaccccgtc

SEQ ID NO: 78031 - DNA, 20 bp, synthetic construct
  source 1..20: mol_type = other DNA
aacatatggtgaaaccccgt

SEQ ID NO: 78032 - DNA, 20 bp, synthetic construct
  source 1..20: mol_type = other DNA
caacatatggtgaaaccccg

SEQ ID NO: 78033 - DNA, 20 bp, synthetic construct
  source 1..20: mol_type = other DNA
ccaacatatggtgaaacccc

SEQ ID NO: 78034 - DNA, 20 bp, synthetic construct
  source 1..20: mol_type = other DNA
gccaacatatggtgaaaccc

SEQ ID NO: 78035 - DNA, 20 bp, synthetic construct
  source 1..20: mol_type = other DNA
ggccaacatatggtgaaacc

SEQ ID NO: 78036 - DNA, 20 bp, synthetic construct
  source 1..20: mol_type = other DNA
tggccaacatatggtgaaac

SEQ ID NO: 78037 - DNA, 20 bp, synthetic construct
  source 1..20: mol_type = other DNA
ctggccaacatatggtgaaa

SEQ ID NO: 78038 - DNA, 20 bp, synthetic construct
  source 1..20: mol_type = other DNA
cctggccaacatatggtgaa

SEQ ID NO: 78039 - DNA, 20 bp, synthetic construct
  source 1..20: mol_type = other DNA
gcctggccaacatatggtga

SEQ ID NO: 78040 - DNA, 20 bp, synthetic construct
  source 1..20: mol_type = other DNA
agcctggccaacatatggtg

SEQ ID NO: 78041 - DNA, 20 bp, synthetic construct
  source 1..20: mol_type = other DNA
cagcctggccaacatatggt

SEQ ID NO: 78042 - DNA, 20 bp, synthetic construct
  source 1..20: mol_type = other DNA
ccagcctggccaacatatgg

SEQ ID NO: 78043 - DNA, 20 bp, synthetic construct
  source 1..20: mol_type = other DNA
accagcctggccaacatatg

SEQ ID NO: 78044 - DNA, 20 bp, synthetic construct
  source 1..20: mol_type = other DNA
gaccagcctggccaacatat

SEQ ID NO: 78045 - DNA, 20 bp, synthetic construct
  source 1..20: mol_type = other DNA
agaccagcctggccaacata

SEQ ID NO: 78046 - DNA, 20 bp, synthetic construct
  source 1..20: mol_type = other DNA
aagaccagcctggccaacat

SEQ ID NO: 78047 - DNA, 20 bp, synthetic construct
  source 1..20: mol_type = other DNA
caagaccagcctggccaaca

SEQ ID NO: 78048 - DNA, 20 bp, synthetic construct
  source 1..20: mol_type = other DNA
tcaagaccagcctggccaac

SEQ ID NO: 78049 - DNA, 20 bp, synthetic construct
  source 1..20: mol_type = other DNA
ttcaagaccagcctggccaa

SEQ ID NO: 78050 - DNA, 20 bp, synthetic construct
  source 1..20: mol_type = other DNA
gttcaagaccagcctggcca

SEQ ID NO: 78051 - DNA, 20 bp, synthetic construct
  source 1..20: mol_type = other DNA
agttcaagaccagcctggcc

SEQ ID NO: 78052 - DNA, 20 bp, synthetic construct
  source 1..20: mol_type = other DNA
gagttcaagaccagcctggc

SEQ ID NO: 78053 - DNA, 20 bp, synthetic construct
  source 1..20: mol_type = other DNA
ggagttcaagaccagcctgg

SEQ ID NO: 78054 - DNA, 20 bp, synthetic construct
  source 1..20: mol_type = other DNA
aggagttcaagaccagcctg

SEQ ID NO: 78055 - DNA, 20 bp, synthetic construct
  source 1..20: mol_type = other DNA
caggagttcaagaccagcct

SEQ ID NO: 78056 - DNA, 20 bp, synthetic construct
  source 1..20: mol_type = other DNA
tcaggagttcaagaccagcc

SEQ ID NO: 78057 - DNA, 20 bp, synthetic construct
  source 1..20: mol_type = other DNA
gtcaggagttcaagaccagc

SEQ ID NO: 78058 - DNA, 20 bp, synthetic construct
  source 1..20: mol_type = other DNA
ggtcaggagttcaagaccag

SEQ ID NO: 78059 - DNA, 20 bp, synthetic construct
  source 1..20: mol_type = other DNA
aggtcaggagttcaagacca

SEQ ID NO: 78060 - DNA, 20 bp, synthetic construct
  source 1..20: mol_type = other DNA
gaggtcaggagttcaagacc

SEQ ID NO: 78061 - DNA, 20 bp, synthetic construct
  source 1..20: mol_type = other DNA
tgaggtcaggagttcaagac

SEQ ID NO: 78062 - DNA, 20 bp, synthetic construct
  source 1..20: mol_type = other DNA
ctgaggtcaggagttcaaga

SEQ ID NO: 78063 - DNA, 20 bp, synthetic construct
  source 1..20: mol_type = other DNA
cctgaggtcaggagttcaag

SEQ ID NO: 78064 - DNA, 20 bp, synthetic construct
  source 1..20: mol_type = other DNA
acctgaggtcaggagttcaa

SEQ ID NO: 78065 - DNA, 20 bp, synthetic construct
  source 1..20: mol_type = other DNA
cacctgaggtcaggagttca

SEQ ID NO: 78066 - DNA, 20 bp, synthetic construct
  source 1..20: mol_type = other DNA
tcacctgaggtcaggagttc

SEQ ID NO: 78067 - DNA, 20 bp, synthetic construct
  source 1..20: mol_type = other DNA
atcacctgaggtcaggagtt

SEQ ID NO: 78068 - DNA, 20 bp, synthetic construct
  source 1..20: mol_type = other DNA
gatcacctgaggtcaggagt

SEQ ID NO: 78069 - DNA, 20 bp, synthetic construct
  source 1..20: mol_type = other DNA
agatcacctgaggtcaggag

SEQ ID NO: 78070 - DNA, 20 bp, synthetic construct
  source 1..20: mol_type = other DNA
cagatcacctgaggtcagga

SEQ ID NO: 78071 - DNA, 20 bp, synthetic construct
  source 1..20: mol_type = other DNA
gcagatcacctgaggtcagg

SEQ ID NO: 78072 - DNA, 20 bp, synthetic construct
  source 1..20: mol_type = other DNA
ggcagatcacctgaggtcag

SEQ ID NO: 78073 - DNA, 20 bp, synthetic construct
  source 1..20: mol_type = other DNA
gggcagatcacctgaggtca

SEQ ID NO: 78074 - DNA, 20 bp, synthetic construct
  source 1..20: mol_type = other DNA
tgggcagatcacctgaggtc

SEQ ID NO: 78075 - DNA, 20 bp, synthetic construct
  source 1..20: mol_type = other DNA
gtgggcagatcacctgaggt

SEQ ID NO: 78076 - DNA, 20 bp, synthetic construct
  source 1..20: mol_type = other DNA
ggtgggcagatcacctgagg

SEQ ID NO: 78077 - DNA, 20 bp, synthetic construct
  source 1..20: mol_type = other DNA
aggtgggcagatcacctgag

SEQ ID NO: 78078 - DNA, 20 bp, synthetic construct
  source 1..20: mol_type = other DNA
gaggtgggcagatcacctga

SEQ ID NO: 78079 - DNA, 20 bp, synthetic construct
  source 1..20: mol_type = other DNA
cgaggtgggcagatcacctg

SEQ ID NO: 78080 - DNA, 20 bp, synthetic construct
  source 1..20: mol_type = other DNA
ccgaggtgggcagatcacct

SEQ ID NO: 78081 - DNA, 20 bp, synthetic construct
  source 1..20: mol_type = other DNA
gccgaggtgggcagatcacc

SEQ ID NO: 78082 - DNA, 20 bp, synthetic construct
  source 1..20: mol_type = other DNA
ggccgaggtgggcagatcac

SEQ ID NO: 78083 - DNA, 20 bp, synthetic construct
  source 1..20: mol_type = other DNA
aggccgaggtgggcagatca

SEQ ID NO: 78084 - DNA, 20 bp, synthetic construct
  source 1..20: mol_type = other DNA
gaggccgaggtgggcagatc

SEQ ID NO: 78085 - DNA, 20 bp, synthetic construct
  source 1..20: mol_type = other DNA
ggaggccgaggtgggcagat

SEQ ID NO: 78086 - DNA, 20 bp, synthetic construct
  source 1..20: mol_type = other DNA
gggaggccgaggtgggcaga

SEQ ID NO: 78087 - DNA, 20 bp, synthetic construct
  source 1..20: mol_type = other DNA
tgggaggccgaggtgggcag

SEQ ID NO: 78088 - DNA, 20 bp, synthetic construct
  source 1..20: mol_type = other DNA
ttgggaggccgaggtgggca

SEQ ID NO: 78089 - DNA, 20 bp, synthetic construct
  source 1..20: mol_type = other DNA
tttgggaggccgaggtgggc

SEQ ID NO: 78090 - DNA, 20 bp, synthetic construct
  source 1..20: mol_type = other DNA
ctttgggaggccgaggtggg

SEQ ID NO: 78091 - DNA, 20 bp, synthetic construct
  source 1..20: mol_type = other DNA
actttgggaggccgaggtgg

SEQ ID NO: 78092 - DNA, 20 bp, synthetic construct
  source 1..20: mol_type = other DNA
cactttgggaggccgaggtg

SEQ ID NO: 78093 - DNA, 20 bp, synthetic construct
  source 1..20: mol_type = other DNA
gcactttgggaggccgaggt

SEQ ID NO: 78094 - DNA, 20 bp, synthetic construct
  source 1..20: mol_type = other DNA
agcactttgggaggccgagg

SEQ ID NO: 78095 - DNA, 20 bp, synthetic construct
  source 1..20: mol_type = other DNA
cagcactttgggaggccgag

SEQ ID NO: 78096 - DNA, 20 bp, synthetic construct
  source 1..20: mol_type = other DNA
tcagcactttgggaggccga

SEQ ID NO: 78097 - DNA, 20 bp, synthetic construct
  source 1..20: mol_type = other DNA
ctcagcactttgggaggccg

SEQ ID NO: 78098 - DNA, 20 bp, synthetic construct
  source 1..20: mol_type = other DNA
tctcagcactttgggaggcc

SEQ ID NO: 78099 - DNA, 20 bp, synthetic construct
  source 1..20: mol_type = other DNA
atctcagcactttgggaggc

SEQ ID NO: 78100 - DNA, 20 bp, synthetic construct
  source 1..20: mol_type = other DNA
aatctcagcactttgggagg

SEQ ID NO: 78101 - DNA, 20 bp, synthetic construct
  source 1..20: mol_type = other DNA
taatctcagcactttgggag

SEQ ID NO: 78102 - DNA, 20 bp, synthetic construct
  source 1..20: mol_type = other DNA
ataatctcagcactttggga

SEQ ID NO: 78103 - DNA, 20 bp, synthetic construct
  source 1..20: mol_type = other DNA
tataatctcagcactttggg

SEQ ID NO: 78104 - DNA, 20 bp, synthetic construct
  source 1..20: mol_type = other DNA
ctataatctcagcactttgg

SEQ ID NO: 78105 - DNA, 20 bp, synthetic construct
  source 1..20: mol_type = other DNA
cctataatctcagcactttg

SEQ ID NO: 78106 - DNA, 20 bp, synthetic construct
  source 1..20: mol_type = other DNA
gcctataatctcagcacttt

SEQ ID NO: 78107 - DNA, 20 bp, synthetic construct
  source 1..20: mol_type = other DNA
cgcctataatctcagcactt

SEQ ID NO: 78108 - DNA, 20 bp, synthetic construct
  source 1..20: mol_type = other DNA
acgcctataatctcagcact

SEQ ID NO: 78109 - DNA, 20 bp, synthetic construct
  source 1..20: mol_type = other DNA
cacgcctataatctcagcac

SEQ ID NO: 78110 - DNA, 20 bp, synthetic construct
  source 1..20: mol_type = other DNA
tcacgcctataatctcagca

SEQ ID NO: 78111 - DNA, 20 bp, synthetic construct
  source 1..20: mol_type = other DNA
ttcacgcctataatctcagc

SEQ ID NO: 78112 - DNA, 20 bp, synthetic construct
  source 1..20: mol_type = other DNA
gttcacgcctataatctcag

SEQ ID NO: 78113 - DNA, 20 bp, synthetic construct
  source 1..20: mol_type = other DNA
ggttcacgcctataatctca

SEQ ID NO: 78114 - DNA, 20 bp, synthetic construct
  source 1..20: mol_type = other DNA
tggttcacgcctataatctc

SEQ ID NO: 78115 - DNA, 20 bp, synthetic construct
  source 1..20: mol_type = other DNA
gtggttcacgcctataatct

SEQ ID NO: 78116 - DNA, 20 bp, synthetic construct
  source 1..20: mol_type = other DNA
ggtggttcacgcctataatc

SEQ ID NO: 78117 - DNA, 20 bp, synthetic construct
  source 1..20: mol_type = other DNA
tggtggttcacgcctataat

SEQ ID NO: 78118 - DNA, 20 bp, synthetic construct
  source 1..20: mol_type = other DNA
atggtggttcacgcctataa

SEQ ID NO: 78119 - DNA, 20 bp, synthetic construct
  source 1..20: mol_type = other DNA
catggtggttcacgcctata

SEQ ID NO: 78120 - DNA, 20 bp, synthetic construct
  source 1..20: mol_type = other DNA
gcatggtggttcacgcctat

SEQ ID NO: 78121 - DNA, 20 bp, synthetic construct
  source 1..20: mol_type = other DNA
ggcatggtggttcacgccta

SEQ ID NO: 78122 - DNA, 20 bp, synthetic construct
  source 1..20: mol_type = other DNA
aggcatggtggttcacgcct

SEQ ID NO: 78123 - DNA, 20 bp, synthetic construct
  source 1..20: mol_type = other DNA
caggcatggtggttcacgcc

SEQ ID NO: 78124 - DNA, 20 bp, synthetic construct
  source 1..20: mol_type = other DNA
ccaggcatggtggttcacgc

SEQ ID NO: 78125 - DNA, 20 bp, synthetic construct
  source 1..20: mol_type = other DNA
gccaggcatggtggttcacg

SEQ ID NO: 78126 - DNA, 20 bp, synthetic construct
  source 1..20: mol_type = other DNA
ggccaggcatggtggttcac

SEQ ID NO: 78127 - DNA, 20 bp, synthetic construct
  source 1..20: mol_type = other DNA
tggccaggcatggtggttca

SEQ ID NO: 78128 - DNA, 20 bp, synthetic construct
  source 1..20: mol_type = other DNA
atggccaggcatggtggttc

SEQ ID NO: 78129 - DNA, 20 bp, synthetic construct
  source 1..20: mol_type = other DNA
tatggccaggcatggtggtt

SEQ ID NO: 78130 - DNA, 20 bp, synthetic construct
  source 1..20: mol_type = other DNA
ctatggccaggcatggtggt

SEQ ID NO: 78131 - DNA, 20 bp, synthetic construct
  source 1..20: mol_type = other DNA
gctatggccaggcatggtgg

SEQ ID NO: 78132 - DNA, 20 bp, synthetic construct
  source 1..20: mol_type = other DNA
tgctatggccaggcatggtg

SEQ ID NO: 78133 - DNA, 20 bp, synthetic construct
  source 1..20: mol_type = other DNA
atgctatggccaggcatggt

SEQ ID NO: 78134 - DNA, 20 bp, synthetic construct
  source 1..20: mol_type = other DNA
aatgctatggccaggcatgg

SEQ ID NO: 78135 - DNA, 20 bp, synthetic construct
  source 1..20: mol_type = other DNA
taatgctatggccaggcatg

SEQ ID NO: 78136 - DNA, 20 bp, synthetic construct
  source 1..20: mol_type = other DNA
ataatgctatggccaggcat

SEQ ID NO: 78137 - DNA, 20 bp, synthetic construct
  source 1..20: mol_type = other DNA
aataatgctatggccaggca

SEQ ID NO: 78138 - DNA, 20 bp, synthetic construct
  source 1..20: mol_type = other DNA
aaataatgctatggccaggc

SEQ ID NO: 78139 - DNA, 20 bp, synthetic construct
  source 1..20: mol_type = other DNA
gaaataatgctatggccagg

SEQ ID NO: 78140 - DNA, 20 bp, synthetic construct
  source 1..20: mol_type = other DNA
agaaataatgctatggccag

SEQ ID NO: 78141 - DNA, 20 bp, synthetic construct
  source 1..20: mol_type = other DNA
tagaaataatgctatggcca

SEQ ID NO: 78142 - DNA, 20 bp, synthetic construct
  source 1..20: mol_type = other DNA
ttagaaataatgctatggcc

SEQ ID NO: 78143 - DNA, 20 bp, synthetic construct
  source 1..20: mol_type = other DNA
attagaaataatgctatggc

SEQ ID NO: 78144 - DNA, 20 bp, synthetic construct
  source 1..20: mol_type = other DNA
tattagaaataatgctatgg

SEQ ID NO: 78145 - DNA, 20 bp, synthetic construct
  source 1..20: mol_type = other DNA
ctattagaaataatgctatg

SEQ ID NO: 78146 - DNA, 20 bp, synthetic construct
  source 1..20: mol_type = other DNA
actattagaaataatgctat

SEQ ID NO: 78147 - DNA, 20 bp, synthetic construct
  source 1..20: mol_type = other DNA
cactattagaaataatgcta

SEQ ID NO: 78148 - DNA, 20 bp, synthetic construct
  source 1..20: mol_type = other DNA
tcactattagaaataatgct

SEQ ID NO: 78149 - DNA, 20 bp, synthetic construct
  source 1..20: mol_type = other DNA
ttcactattagaaataatgc

SEQ ID NO: 78150 - DNA, 20 bp, synthetic construct
  source 1..20: mol_type = other DNA
tttcactattagaaataatg

SEQ ID NO: 78151 - DNA, 20 bp, synthetic construct
  source 1..20: mol_type = other DNA
ttttcactattagaaataat

SEQ ID NO: 78152 - DNA, 20 bp, synthetic construct
  source 1..20: mol_type = other DNA
tttttcactattagaaataa

SEQ ID NO: 78153 - DNA, 20 bp, synthetic construct
  source 1..20: mol_type = other DNA
atttttcactattagaaata

SEQ ID NO: 78154 - DNA, 20 bp, synthetic construct
  source 1..20: mol_type = other DNA
aatttttcactattagaaat

SEQ ID NO: 78155 - DNA, 20 bp, synthetic construct
  source 1..20: mol_type = other DNA
caatttttcactattagaaa

SEQ ID NO: 78156 - DNA, 20 bp, synthetic construct
  source 1..20: mol_type = other DNA
ccaatttttcactattagaa

SEQ ID NO: 78157 - DNA, 20 bp, synthetic construct
  source 1..20: mol_type = other DNA
tccaatttttcactattaga

SEQ ID NO: 78158 - DNA, 20 bp, synthetic construct
  source 1..20: mol_type = other DNA
ttccaatttttcactattag

SEQ ID NO: 78159 - DNA, 20 bp, synthetic construct
  source 1..20: mol_type = other DNA
tttccaatttttcactatta

SEQ ID NO: 78160 - DNA, 20 bp, synthetic construct
  source 1..20: mol_type = other DNA
gtttccaatttttcactatt

SEQ ID NO: 78161 - DNA, 20 bp, synthetic construct
  source 1..20: mol_type = other DNA
tgtttccaatttttcactat

SEQ ID NO: 78162 - DNA, 20 bp, synthetic construct
  source 1..20: mol_type = other DNA
atgtttccaatttttcacta

SEQ ID NO: 78163 - DNA, 20 bp, synthetic construct
  source 1..20: mol_type = other DNA
catgtttccaatttttcact

SEQ ID NO: 78164 - DNA, 20 bp, synthetic construct
  source 1..20: mol_type = other DNA
gcatgtttccaatttttcac

SEQ ID NO: 78165 - DNA, 20 bp, synthetic construct
  source 1..20: mol_type = other DNA
agcatgtttccaatttttca

SEQ ID NO: 78166 - DNA, 20 bp, synthetic construct
  source 1..20: mol_type = other DNA
tagcatgtttccaatttttc

SEQ ID NO: 78167 - DNA, 20 bp, synthetic construct
  source 1..20: mol_type = other DNA
ttagcatgtttccaattttt

SEQ ID NO: 78168 - DNA, 20 bp, synthetic construct
  source 1..20: mol_type = other DNA
cttagcatgtttccaatttt

SEQ ID NO: 78169 - DNA, 20 bp, synthetic construct
  source 1..20: mol_type = other DNA
acttagcatgtttccaattt

SEQ ID NO: 78170 - DNA, 20 bp, synthetic construct
  source 1..20: mol_type = other DNA
cacttagcatgtttccaatt

SEQ ID NO: 78171 - DNA, 20 bp, synthetic construct
  source 1..20: mol_type = other DNA
acacttagcatgtttccaat

SEQ ID NO: 78172 - DNA, 20 bp, synthetic construct
  source 1..20: mol_type = other DNA
gacacttagcatgtttccaa

SEQ ID NO: 78173 - DNA, 20 bp, synthetic construct
  source 1..20: mol_type = other DNA
agacacttagcatgtttcca

SEQ ID NO: 78174 - DNA, 20 bp, synthetic construct
  source 1..20: mol_type = other DNA
tagacacttagcatgtttcc

SEQ ID NO: 78175 - DNA, 20 bp, synthetic construct
  source 1..20: mol_type = other DNA
atagacacttagcatgtttc

SEQ ID NO: 78176 - DNA, 20 bp, synthetic construct
  source 1..20: mol_type = other DNA
gatagacacttagcatgttt

SEQ ID NO: 78177 - DNA, 20 bp, synthetic construct
  source 1..20: mol_type = other DNA
tgatagacacttagcatgtt

SEQ ID NO: 78178 - DNA, 20 bp, synthetic construct
  source 1..20: mol_type = other DNA
ttgatagacacttagcatgt

SEQ ID NO: 78179 - DNA, 20 bp, synthetic construct
  source 1..20: mol_type = other DNA
attgatagacacttagcatg

SEQ ID NO: 78180 - DNA, 20 bp, synthetic construct
  source 1..20: mol_type = other DNA
tattgatagacacttagcat

SEQ ID NO: 78181 - DNA, 20 bp, synthetic construct
  source 1..20: mol_type = other DNA
atattgatagacacttagca

SEQ ID NO: 78182 - DNA, 20 bp, synthetic construct
  source 1..20: mol_type = other DNA
tatattgatagacacttagc

SEQ ID NO: 78183 - DNA, 20 bp, synthetic construct
  source 1..20: mol_type = other DNA
ctatattgatagacacttag

SEQ ID NO: 78184 - DNA, 20 bp, synthetic construct
  source 1..20: mol_type = other DNA
gctatattgatagacactta

SEQ ID NO: 78185 - DNA, 20 bp, synthetic construct
  source 1..20: mol_type = other DNA
tgctatattgatagacactt

SEQ ID NO: 78186 - DNA, 20 bp, synthetic construct
  source 1..20: mol_type = other DNA
atgctatattgatagacact

SEQ ID NO: 78187 - DNA, 20 bp, synthetic construct
  source 1..20: mol_type = other DNA
catgctatattgatagacac

SEQ ID NO: 78188 - DNA, 20 bp, synthetic construct
  source 1..20: mol_type = other DNA
tcatgctatattgatagaca

SEQ ID NO: 78189 - DNA, 20 bp, synthetic construct
  source 1..20: mol_type = other DNA
ctcatgctatattgatagac

SEQ ID NO: 78190 - DNA, 20 bp, synthetic construct
  source 1..20: mol_type = other DNA
actcatgctatattgataga

SEQ ID NO: 78191 - DNA, 20 bp, synthetic construct
  source 1..20: mol_type = other DNA
aactcatgctatattgatag

SEQ ID NO: 78192 - DNA, 20 bp, synthetic construct
  source 1..20: mol_type = other DNA
taactcatgctatattgata

SEQ ID NO: 78193 - DNA, 20 bp, synthetic construct
  source 1..20: mol_type = other DNA
ctaactcatgctatattgat

SEQ ID NO: 78194 - DNA, 20 bp, synthetic construct
  source 1..20: mol_type = other DNA
tctaactcatgctatattga

SEQ ID NO: 78195 - DNA, 20 bp, synthetic construct
  source 1..20: mol_type = other DNA
atctaactcatgctatattg

SEQ ID NO: 78196 - DNA, 20 bp, synthetic construct
  source 1..20: mol_type = other DNA
aatctaactcatgctatatt

SEQ ID NO: 78197 - DNA, 20 bp, synthetic construct
  source 1..20: mol_type = other DNA
aaatctaactcatgctatat

SEQ ID NO: 78198 - DNA, 20 bp, synthetic construct
  source 1..20: mol_type = other DNA
taaatctaactcatgctata

SEQ ID NO: 78199 - DNA, 20 bp, synthetic construct
  source 1..20: mol_type = other DNA
ataaatctaactcatgctat

SEQ ID NO: 78200 - DNA, 20 bp, synthetic construct
  source 1..20: mol_type = other DNA
cataaatctaactcatgcta

SEQ ID NO: 78201 - DNA, 20 bp, synthetic construct
  source 1..20: mol_type = other DNA
tcataaatctaactcatgct

SEQ ID NO: 78202 - DNA, 20 bp, synthetic construct
  source 1..20: mol_type = other DNA
atcataaatctaactcatgc

SEQ ID NO: 78203 - DNA, 20 bp, synthetic construct
  source 1..20: mol_type = other DNA
catcataaatctaactcatg

SEQ ID NO: 78204 - DNA, 20 bp, synthetic construct
  source 1..20: mol_type = other DNA
acatcataaatctaactcat

SEQ ID NO: 78205 - DNA, 20 bp, synthetic construct
  source 1..20: mol_type = other DNA
gacatcataaatctaactca

SEQ ID NO: 78206 - DNA, 20 bp, synthetic construct
  source 1..20: mol_type = other DNA
tgacatcataaatctaactc

SEQ ID NO: 78207 - DNA, 20 bp, synthetic construct
  source 1..20: mol_type = other DNA
gtgacatcataaatctaact

SEQ ID NO: 78208 - DNA, 20 bp, synthetic construct
  source 1..20: mol_type = other DNA
ggtgacatcataaatctaac

SEQ ID NO: 78209 - DNA, 20 bp, synthetic construct
  source 1..20: mol_type = other DNA
tggtgacatcataaatctaa

SEQ ID NO: 78210 - DNA, 20 bp, synthetic construct
  source 1..20: mol_type = other DNA
atggtgacatcataaatcta

SEQ ID NO: 78211 - DNA, 20 bp, synthetic construct
  source 1..20: mol_type = other DNA
aatggtgacatcataaatct

SEQ ID NO: 78212 - DNA, 20 bp, synthetic construct
  source 1..20: mol_type = other DNA
gaatggtgacatcataaatc

SEQ ID NO: 78213 - DNA, 20 bp, synthetic construct
  source 1..20: mol_type = other DNA
tgaatggtgacatcataaat

SEQ ID NO: 78214 - DNA, 20 bp, synthetic construct
  source 1..20: mol_type = other DNA
ttgaatggtgacatcataaa

SEQ ID NO: 78215 - DNA, 20 bp, synthetic construct
  source 1..20: mol_type = other DNA
attgaatggtgacatcataa

SEQ ID NO: 78216 - DNA, 20 bp, synthetic construct
  source 1..20: mol_type = other DNA
aattgaatggtgacatcata

SEQ ID NO: 78217 - DNA, 20 bp, synthetic construct
  source 1..20: mol_type = other DNA
caattgaatggtgacatcat

SEQ ID NO: 78218 - DNA, 20 bp, synthetic construct
  source 1..20: mol_type = other DNA
tcaattgaatggtgacatca

SEQ ID NO: 78219 - DNA, 20 bp, synthetic construct
  source 1..20: mol_type = other DNA
ttcaattgaatggtgacatc

SEQ ID NO: 78220 - DNA, 20 bp, synthetic construct
  source 1..20: mol_type = other DNA
tttcaattgaatggtgacat

SEQ ID NO: 78221 - DNA, 20 bp, synthetic construct
  source 1..20: mol_type = other DNA
gtttcaattgaatggtgaca

SEQ ID NO: 78222 - DNA, 20 bp, synthetic construct
  source 1..20: mol_type = other DNA
tgtttcaattgaatggtgac

SEQ ID NO: 78223 - DNA, 20 bp, synthetic construct
  source 1..20: mol_type = other DNA
gtgtttcaattgaatggtga

SEQ ID NO: 78224 - DNA, 20 bp, synthetic construct
  source 1..20: mol_type = other DNA
agtgtttcaattgaatggtg

SEQ ID NO: 78225 - DNA, 20 bp, synthetic construct
  source 1..20: mol_type = other DNA
tagtgtttcaattgaatggt

SEQ ID NO: 78226 - DNA, 20 bp, synthetic construct
  source 1..20: mol_type = other DNA
gtagtgtttcaattgaatgg

SEQ ID NO: 78227 - DNA, 20 bp, synthetic construct
  source 1..20: mol_type = other DNA
tgtagtgtttcaattgaatg

SEQ ID NO: 78228 - DNA, 20 bp, synthetic construct
  source 1..20: mol_type = other DNA
atgtagtgtttcaattgaat

SEQ ID NO: 78229 - DNA, 20 bp, synthetic construct
  source 1..20: mol_type = other DNA
tatgtagtgtttcaattgaa

SEQ ID NO: 78230 - DNA, 20 bp, synthetic construct
  source 1..20: mol_type = other DNA
atatgtagtgtttcaattga

SEQ ID NO: 78231 - DNA, 20 bp, synthetic construct
  source 1..20: mol_type = other DNA
gatatgtagtgtttcaattg

SEQ ID NO: 78232 - DNA, 20 bp, synthetic construct
  source 1..20: mol_type = other DNA
agatatgtagtgtttcaatt

SEQ ID NO: 78233 - DNA, 20 bp, synthetic construct
  source 1..20: mol_type = other DNA
gagatatgtagtgtttcaat

SEQ ID NO: 78234 - DNA, 20 bp, synthetic construct
  source 1..20: mol_type = other DNA
ggagatatgtagtgtttcaa

SEQ ID NO: 78235 - DNA, 20 bp, synthetic construct
  source 1..20: mol_type = other DNA
gggagatatgtagtgtttca

SEQ ID NO: 78236 - DNA, 20 bp, synthetic construct
  source 1..20: mol_type = other DNA
tgggagatatgtagtgtttc

SEQ ID NO: 78237 - DNA, 20 bp, synthetic construct
  source 1..20: mol_type = other DNA
ttgggagatatgtagtgttt

SEQ ID NO: 78238 - DNA, 20 bp, synthetic construct
  source 1..20: mol_type = other DNA
tttgggagatatgtagtgtt

SEQ ID NO: 78239 - DNA, 20 bp, synthetic construct
  source 1..20: mol_type = other DNA
ttttgggagatatgtagtgt

SEQ ID NO: 78240 - DNA, 20 bp, synthetic construct
  source 1..20: mol_type = other DNA
tttttgggagatatgtagtg

SEQ ID NO: 78241 - DNA, 20 bp, synthetic construct
  source 1..20: mol_type = other DNA
ctttttgggagatatgtagt

SEQ ID NO: 78242 - DNA, 20 bp, synthetic construct
  source 1..20: mol_type = other DNA
tctttttgggagatatgtag

SEQ ID NO: 78243 - DNA, 20 bp, synthetic construct
  source 1..20: mol_type = other DNA
ttctttttgggagatatgta

SEQ ID NO: 78244 - DNA, 20 bp, synthetic construct
  source 1..20: mol_type = other DNA
attctttttgggagatatgt

SEQ ID NO: 78245 - DNA, 20 bp, synthetic construct
  source 1..20: mol_type = other DNA
cattctttttgggagatatg

SEQ ID NO: 78246 - DNA, 20 bp, synthetic construct
  source 1..20: mol_type = other DNA
ccattctttttgggagatat

SEQ ID NO: 78247 - DNA, 20 bp, synthetic construct
  source 1..20: mol_type = other DNA
accattctttttgggagata

SEQ ID NO: 78248 - DNA, 20 bp, synthetic construct
  source 1..20: mol_type = other DNA
caccattctttttgggagat

SEQ ID NO: 78249 - DNA, 20 bp, synthetic construct
  source 1..20: mol_type = other DNA
acaccattctttttgggaga

SEQ ID NO: 78250 - DNA, 20 bp, synthetic construct
  source 1..20: mol_type = other DNA
aacaccattctttttgggag

SEQ ID NO: 78251 - DNA, 20 bp, synthetic construct
  source 1..20: mol_type = other DNA
gaacaccattctttttggga

SEQ ID NO: 78252 - DNA, 20 bp, synthetic construct
  source 1..20: mol_type = other DNA
ggaacaccattctttttggg

SEQ ID NO: 78253 - DNA, 20 bp, synthetic construct
  source 1..20: mol_type = other DNA
tggaacaccattctttttgg

SEQ ID NO: 78254 - DNA, 20 bp, synthetic construct
  source 1..20: mol_type = other DNA
ttggaacaccattctttttg

SEQ ID NO: 78255 - DNA, 20 bp, synthetic construct
  source 1..20: mol_type = other DNA
attggaacaccattcttttt

SEQ ID NO: 78256 - DNA, 20 bp, synthetic construct
  source 1..20: mol_type = other DNA
tattggaacaccattctttt

SEQ ID NO: 78257 - DNA, 20 bp, synthetic construct
  source 1..20: mol_type = other DNA
atattggaacaccattcttt

SEQ ID NO: 78258 - DNA, 20 bp, synthetic construct
  source 1..20: mol_type = other DNA
catattggaacaccattctt

SEQ ID NO: 78259 - DNA, 20 bp, synthetic construct
  source 1..20: mol_type = other DNA
ccatattggaacaccattct

SEQ ID NO: 78260 - DNA, 20 bp, synthetic construct
  source 1..20: mol_type = other DNA
tccatattggaacaccattc

SEQ ID NO: 78261 - DNA, 20 bp, synthetic construct
  source 1..20: mol_type = other DNA
ttccatattggaacaccatt

SEQ ID NO: 78262 - DNA, 20 bp, synthetic construct
  source 1..20: mol_type = other DNA
tttccatattggaacaccat

SEQ ID NO: 78263 - DNA, 20 bp, synthetic construct
  source 1..20: mol_type = other DNA
ctttccatattggaacacca

SEQ ID NO: 78264 - DNA, 20 bp, synthetic construct
  source 1..20: mol_type = other DNA
tctttccatattggaacacc

SEQ ID NO: 78265 - DNA, 20 bp, synthetic construct
  source 1..20: mol_type = other DNA
atctttccatattggaacac

SEQ ID NO: 78266 - DNA, 20 bp, synthetic construct
  source 1..20: mol_type = other DNA
tatctttccatattggaaca

SEQ ID NO: 78267 - DNA, 20 bp, synthetic construct
  source 1..20: mol_type = other DNA
atatctttccatattggaac

SEQ ID NO: 78268 - DNA, 20 bp, synthetic construct
  source 1..20: mol_type = other DNA
gatatctttccatattggaa

SEQ ID NO: 78269 - DNA, 20 bp, synthetic construct
  source 1..20: mol_type = other DNA
agatatctttccatattgga

SEQ ID NO: 78270 - DNA, 20 bp, synthetic construct
  source 1..20: mol_type = other DNA
tagatatctttccatattgg

SEQ ID NO: 78271 - DNA, 20 bp, synthetic construct
  source 1..20: mol_type = other DNA
ttagatatctttccatattg

SEQ ID NO: 78272 - DNA, 20 bp, synthetic construct
  source 1..20: mol_type = other DNA
cttagatatctttccatatt

SEQ ID NO: 78273 - DNA, 20 bp, synthetic construct
  source 1..20: mol_type = other DNA
tcttagatatctttccatat

SEQ ID NO: 78274 - DNA, 20 bp, synthetic construct
  source 1..20: mol_type = other DNA
atcttagatatctttccata

SEQ ID NO: 78275 - DNA, 20 bp, synthetic construct
  source 1..20: mol_type = other DNA
aatcttagatatctttccat

SEQ ID NO: 78276 - DNA, 20 bp, synthetic construct
  source 1..20: mol_type = other DNA
aaatcttagatatctttcca

SEQ ID NO: 78277 - DNA, 20 bp, synthetic construct
  source 1..20: mol_type = other DNA
taaatcttagatatctttcc

SEQ ID NO: 78278 - DNA, 20 bp, synthetic construct
  source 1..20: mol_type = other DNA
ataaatcttagatatctttc

SEQ ID NO: 78279 - DNA, 20 bp, synthetic construct
  source 1..20: mol_type = other DNA
aataaatcttagatatcttt

SEQ ID NO: 78280 - DNA, 20 bp, synthetic construct
  source 1..20: mol_type = other DNA
taataaatcttagatatctt

SEQ ID NO: 78281 - DNA, 20 bp, synthetic construct
  source 1..20: mol_type = other DNA
ttaataaatcttagatatct

SEQ ID NO: 78282 - DNA, 20 bp, synthetic construct
  source 1..20: mol_type = other DNA
cttaataaatcttagatatc

SEQ ID NO: 78283 - DNA, 20 bp, synthetic construct
  source 1..20: mol_type = other DNA
tcttaataaatcttagatat

SEQ ID NO: 78284 - DNA, 20 bp, synthetic construct
  source 1..20: mol_type = other DNA
ctcttaataaatcttagata

SEQ ID NO: 78285 - DNA, 20 bp, synthetic construct
  source 1..20: mol_type = other DNA
tctcttaataaatcttagat

SEQ ID NO: 78286 - DNA, 20 bp, synthetic construct
  source 1..20: mol_type = other DNA
ttctcttaataaatcttaga

SEQ ID NO: 78287 - DNA, 20 bp, synthetic construct
  source 1..20: mol_type = other DNA
tttctcttaataaatcttag

SEQ ID NO: 78288 - DNA, 20 bp, synthetic construct
  source 1..20: mol_type = other DNA
ttttctcttaataaatctta

SEQ ID NO: 78289 - DNA, 20 bp, synthetic construct
  source 1..20: mol_type = other DNA
tttttctcttaataaatctt

SEQ ID NO: 78290 - DNA, 20 bp, synthetic construct
  source 1..20: mol_type = other DNA
ctttttctcttaataaatct

SEQ ID NO: 78291 - DNA, 20 bp, synthetic construct
  source 1..20: mol_type = other DNA
gctttttctcttaataaatc

SEQ ID NO: 78292 - DNA, 20 bp, synthetic construct
  source 1..20: mol_type = other DNA
tgctttttctcttaataaat

SEQ ID NO: 78293 - DNA, 20 bp, synthetic construct
  source 1..20: mol_type = other DNA
gtgctttttctcttaataaa

SEQ ID NO: 78294 - DNA, 20 bp, synthetic construct
  source 1..20: mol_type = other DNA
tgtgctttttctcttaataa

SEQ ID NO: 78295 - DNA, 20 bp, synthetic construct
  source 1..20: mol_type = other DNA
atgtgctttttctcttaata

SEQ ID NO: 78296 - DNA, 20 bp, synthetic construct
  source 1..20: mol_type = other DNA
aatgtgctttttctcttaat

SEQ ID NO: 78297 - DNA, 20 bp, synthetic construct
  source 1..20: mol_type = other DNA
caatgtgctttttctcttaa

SEQ ID NO: 78298 - DNA, 20 bp, synthetic construct
  source 1..20: mol_type = other DNA
gcaatgtgctttttctctta

SEQ ID NO: 78299 - DNA, 20 bp, synthetic construct
  source 1..20: mol_type = other DNA
tgcaatgtgctttttctctt

SEQ ID NO: 78300 - DNA, 20 bp, synthetic construct
  source 1..20: mol_type = other DNA
ctgcaatgtgctttttctct

SEQ ID NO: 78301 - DNA, 20 bp, synthetic construct
  source 1..20: mol_type = other DNA
tctgcaatgtgctttttctc

SEQ ID NO: 78302 - DNA, 20 bp, synthetic construct
  source 1..20: mol_type = other DNA
ttctgcaatgtgctttttct

SEQ ID NO: 78303 - DNA, 20 bp, synthetic construct
  source 1..20: mol_type = other DNA
gttctgcaatgtgctttttc

SEQ ID NO: 78304 - DNA, 20 bp, synthetic construct
  source 1..20: mol_type = other DNA
tgttctgcaatgtgcttttt

SEQ ID NO: 78305 - DNA, 20 bp, synthetic construct
  source 1..20: mol_type = other DNA
gtgttctgcaatgtgctttt

SEQ ID NO: 78306 - DNA, 20 bp, synthetic construct
  source 1..20: mol_type = other DNA
agtgttctgcaatgtgcttt

SEQ ID NO: 78307 - DNA, 20 bp, synthetic construct
  source 1..20: mol_type = other DNA
cagtgttctgcaatgtgctt

SEQ ID NO: 78308 - DNA, 20 bp, synthetic construct
  source 1..20: mol_type = other DNA
ccagtgttctgcaatgtgct

SEQ ID NO: 78309 - DNA, 20 bp, synthetic construct
  source 1..20: mol_type = other DNA
cccagtgttctgcaatgtgc

SEQ ID NO: 78310 - DNA, 20 bp, synthetic construct
  source 1..20: mol_type = other DNA
tcccagtgttctgcaatgtg

SEQ ID NO: 78311 - DNA, 20 bp, synthetic construct
  source 1..20: mol_type = other DNA
atcccagtgttctgcaatgt

SEQ ID NO: 78312 - DNA, 20 bp, synthetic construct
  source 1..20: mol_type = other DNA
gatcccagtgttctgcaatg

SEQ ID NO: 78313 - DNA, 20 bp, synthetic construct
  source 1..20: mol_type = other DNA
ggatcccagtgttctgcaat

SEQ ID NO: 78314 - DNA, 20 bp, synthetic construct
  source 1..20: mol_type = other DNA
aggatcccagtgttctgcaa

SEQ ID NO: 78315 - DNA, 20 bp, synthetic construct
  source 1..20: mol_type = other DNA
taggatcccagtgttctgca

SEQ ID NO: 78316 - DNA, 20 bp, synthetic construct
  source 1..20: mol_type = other DNA
ataggatcccagtgttctgc

SEQ ID NO: 78317 - DNA, 20 bp, synthetic construct
  source 1..20: mol_type = other DNA
aataggatcccagtgttctg

SEQ ID NO: 78318 - DNA, 20 bp, synthetic construct
  source 1..20: mol_type = other DNA
aaataggatcccagtgttct

SEQ ID NO: 78319 - DNA, 20 bp, synthetic construct
  source 1..20: mol_type = other DNA
caaataggatcccagtgttc

SEQ ID NO: 78320 - DNA, 20 bp, synthetic construct
  source 1..20: mol_type = other DNA
gcaaataggatcccagtgtt

SEQ ID NO: 78321 - DNA, 20 bp, synthetic construct
  source 1..20: mol_type = other DNA
agcaaataggatcccagtgt

SEQ ID NO: 78322 - DNA, 20 bp, synthetic construct
  source 1..20: mol_type = other DNA
aagcaaataggatcccagtg

SEQ ID NO: 78323 - DNA, 20 bp, synthetic construct
  source 1..20: mol_type = other DNA
aaagcaaataggatcccagt

SEQ ID NO: 78324 - DNA, 20 bp, synthetic construct
  source 1..20: mol_type = other DNA
aaaagcaaataggatcccag

SEQ ID NO: 78325 - DNA, 20 bp, synthetic construct
  source 1..20: mol_type = other DNA
aaaaagcaaataggatccca

SEQ ID NO: 78326 - DNA, 20 bp, synthetic construct
  source 1..20: mol_type = other DNA
aaaaaagcaaataggatccc

SEQ ID NO: 78327 - DNA, 20 bp, synthetic construct
  source 1..20: mol_type = other DNA
aaaaaaagcaaataggatcc

SEQ ID NO: 78328 - DNA, 20 bp, synthetic construct
  source 1..20: mol_type = other DNA
aaaaaaaagcaaataggatc

SEQ ID NO: 78329 - DNA, 20 bp, synthetic construct
  source 1..20: mol_type = other DNA
aaaaaaaaagcaaataggat

SEQ ID NO: 78330 - DNA, 20 bp, synthetic construct
  source 1..20: mol_type = other DNA
aaaaaaaaaagcaaatagga

SEQ ID NO: 78331 - DNA, 20 bp, synthetic construct
  source 1..20: mol_type = other DNA
gaaaaaaaaaagcaaatagg

SEQ ID NO: 78332 - DNA, 20 bp, synthetic construct
  source 1..20: mol_type = other DNA
agaaaaaaaaaagcaaatag

SEQ ID NO: 78333 - DNA, 20 bp, synthetic construct
  source 1..20: mol_type = other DNA
aagaaaaaaaaaagcaaata

SEQ ID NO: 78334 - DNA, 20 bp, synthetic construct
  source 1..20: mol_type = other DNA
aaagaaaaaaaaaagcaaat

SEQ ID NO: 78335 - DNA, 20 bp, synthetic construct
  source 1..20: mol_type = other DNA
aaaagaaaaaaaaaagcaaa

SEQ ID NO: 78336 - DNA, 20 bp, synthetic construct
  source 1..20: mol_type = other DNA
aaaaagaaaaaaaaaagcaa

SEQ ID NO: 78337 - DNA, 20 bp, synthetic construct
  source 1..20: mol_type = other DNA
aaaaaagaaaaaaaaaagca

SEQ ID NO: 78338 - DNA, 20 bp, synthetic construct
  source 1..20: mol_type = other DNA
aaaaaaagaaaaaaaaaagc

SEQ ID NO: 78339 - DNA, 20 bp, synthetic construct
  source 1..20: mol_type = other DNA
caaaaaaagaaaaaaaaaag

SEQ ID NO: 78340 - DNA, 20 bp, synthetic construct
  source 1..20: mol_type = other DNA
tcaaaaaaagaaaaaaaaaa

SEQ ID NO: 78341 - DNA, 20 bp, synthetic construct
  source 1..20: mol_type = other DNA
ctcaaaaaaagaaaaaaaaa

SEQ ID NO: 78342 - DNA, 20 bp, synthetic construct
  source 1..20: mol_type = other DNA
tctcaaaaaaagaaaaaaaa

SEQ ID NO: 78343 - DNA, 20 bp, synthetic construct
  source 1..20: mol_type = other DNA
gtctcaaaaaaagaaaaaaa

SEQ ID NO: 78344 - DNA, 20 bp, synthetic construct
  source 1..20: mol_type = other DNA
tgtctcaaaaaaagaaaaaa

SEQ ID NO: 78345 - DNA, 20 bp, synthetic construct
  source 1..20: mol_type = other DNA
ctgtctcaaaaaaagaaaaa

SEQ ID NO: 78346 - DNA, 20 bp, synthetic construct
  source 1..20: mol_type = other DNA
tctgtctcaaaaaaagaaaa

SEQ ID NO: 78347 - DNA, 20 bp, synthetic construct
  source 1..20: mol_type = other DNA
ctctgtctcaaaaaaagaaa

SEQ ID NO: 78348 - DNA, 20 bp, synthetic construct
  source 1..20: mol_type = other DNA
actctgtctcaaaaaaagaa

SEQ ID NO: 78349 - DNA, 20 bp, synthetic construct
  source 1..20: mol_type = other DNA
gactctgtctcaaaaaaaga

SEQ ID NO: 78350 - DNA, 20 bp, synthetic construct
  source 1..20: mol_type = other DNA
agactctgtctcaaaaaaag

SEQ ID NO: 78351 - DNA, 20 bp, synthetic construct
  source 1..20: mol_type = other DNA
aagactctgtctcaaaaaaa

SEQ ID NO: 78352 - DNA, 20 bp, synthetic construct
  source 1..20: mol_type = other DNA
caagactctgtctcaaaaaa

SEQ ID NO: 78353 - DNA, 20 bp, synthetic construct
  source 1..20: mol_type = other DNA
gcaagactctgtctcaaaaa

SEQ ID NO: 78354 - DNA, 20 bp, synthetic construct
  source 1..20: mol_type = other DNA
agcaagactctgtctcaaaa

SEQ ID NO: 78355 - DNA, 20 bp, synthetic construct
  source 1..20: mol_type = other DNA
gagcaagactctgtctcaaa

SEQ ID NO: 78356 - DNA, 20 bp, synthetic construct
  source 1..20: mol_type = other DNA
agagcaagactctgtctcaa

SEQ ID NO: 78357 - DNA, 20 bp, synthetic construct
  source 1..20: mol_type = other DNA
cagagcaagactctgtctca

SEQ ID NO: 78358 - DNA, 20 bp, synthetic construct
  source 1..20: mol_type = other DNA
acagagcaagactctgtctc

SEQ ID NO: 78359 - DNA, 20 bp, synthetic construct
  source 1..20: mol_type = other DNA
gacagagcaagactctgtct

SEQ ID NO: 78360 - DNA, 20 bp, synthetic construct
  source 1..20: mol_type = other DNA
tgacagagcaagactctgtc

SEQ ID NO: 78361 - DNA, 20 bp, synthetic construct
  source 1..20: mol_type = other DNA
gtgacagagcaagactctgt

SEQ ID NO: 78362 - DNA, 20 bp, synthetic construct
  source 1..20: mol_type = other DNA
tgtgacagagcaagactctg

SEQ ID NO: 78363 - DNA, 20 bp, synthetic construct
  source 1..20: mol_type = other DNA
gtgtgacagagcaagactct

SEQ ID NO: 78364 - DNA, 20 bp, synthetic construct
  source 1..20: mol_type = other DNA
agtgtgacagagcaagactc

SEQ ID NO: 78365 - DNA, 20 bp, synthetic construct
  source 1..20: mol_type = other DNA
cagtgtgacagagcaagact

SEQ ID NO: 78366 - DNA, 20 bp, synthetic construct
  source 1..20: mol_type = other DNA
gcagtgtgacagagcaagac

SEQ ID NO: 78367 - DNA, 20 bp, synthetic construct
  source 1..20: mol_type = other DNA
tgcagtgtgacagagcaaga

SEQ ID NO: 78368 - DNA, 20 bp, synthetic construct
  source 1..20: mol_type = other DNA
ttgcagtgtgacagagcaag

SEQ ID NO: 78369 - DNA, 20 bp, synthetic construct
  source 1..20: mol_type = other DNA
gttgcagtgtgacagagcaa

SEQ ID NO: 78370 - DNA, 20 bp, synthetic construct
  source 1..20: mol_type = other DNA
ggttgcagtgtgacagagca

SEQ ID NO: 78371 - DNA, 20 bp, synthetic construct
  source 1..20: mol_type = other DNA
aggttgcagtgtgacagagc

SEQ ID NO: 78372 - DNA, 20 bp, synthetic construct
  source 1..20: mol_type = other DNA
gaggttgcagtgtgacagag

SEQ ID NO: 78373 - DNA, 20 bp, synthetic construct
  source 1..20: mol_type = other DNA
ggaggttgcagtgtgacaga

SEQ ID NO: 78374 - DNA, 20 bp, synthetic construct
  source 1..20: mol_type = other DNA
cggaggttgcagtgtgacag

SEQ ID NO: 78375 - DNA, 20 bp, synthetic construct
  source 1..20: mol_type = other DNA
gcggaggttgcagtgtgaca

SEQ ID NO: 78376 - DNA, 20 bp, synthetic construct
  source 1..20: mol_type = other DNA
ggcggaggttgcagtgtgac

SEQ ID NO: 78377 - DNA, 20 bp, synthetic construct
  source 1..20: mol_type = other DNA
aggcggaggttgcagtgtga

SEQ ID NO: 78378 - DNA, 20 bp, synthetic construct
  source 1..20: mol_type = other DNA
gaggcggaggttgcagtgtg

SEQ ID NO: 78379 - DNA, 20 bp, synthetic construct
  source 1..20: mol_type = other DNA
ggaggcggaggttgcagtgt

SEQ ID NO: 78380 - DNA, 20 bp, synthetic construct
  source 1..20: mol_type = other DNA
gggaggcggaggttgcagtg

SEQ ID NO: 78381 - DNA, 20 bp, synthetic construct
  source 1..20: mol_type = other DNA
cgggaggcggaggttgcagt

SEQ ID NO: 78382 - DNA, 20 bp, synthetic construct
  source 1..20: mol_type = other DNA
ccgggaggcggaggttgcag

SEQ ID NO: 78383 - DNA, 20 bp, synthetic construct
  source 1..20: mol_type = other DNA
cccgggaggcggaggttgca

SEQ ID NO: 78384 - DNA, 20 bp, synthetic construct
  source 1..20: mol_type = other DNA
acccgggaggcggaggttgc

SEQ ID NO: 78385 - DNA, 20 bp, synthetic construct
  source 1..20: mol_type = other DNA
aacccgggaggcggaggttg

SEQ ID NO: 78386 - DNA, 20 bp, synthetic construct
  source 1..20: mol_type = other DNA
gaacccgggaggcggaggtt

SEQ ID NO: 78387 - DNA, 20 bp, synthetic construct
  source 1..20: mol_type = other DNA
tgaacccgggaggcggaggt

SEQ ID NO: 78388 - DNA, 20 bp, synthetic construct
  source 1..20: mol_type = other DNA
ttgaacccgggaggcggagg

SEQ ID NO: 78389 - DNA, 20 bp, synthetic construct
  source 1..20: mol_type = other DNA
cttgaacccgggaggcggag

SEQ ID NO: 78390 - DNA, 20 bp, synthetic construct
  source 1..20: mol_type = other DNA
gcttgaacccgggaggcgga

SEQ ID NO: 78391 - DNA, 20 bp, synthetic construct
  source 1..20: mol_type = other DNA
cgcttgaacccgggaggcgg

SEQ ID NO: 78392 - DNA, 20 bp, synthetic construct
  source 1..20: mol_type = other DNA
tcgcttgaacccgggaggcg

SEQ ID NO: 78393 - DNA, 20 bp, synthetic construct
  source 1..20: mol_type = other DNA
atcgcttgaacccgggaggc

SEQ ID NO: 78394 - DNA, 20 bp, synthetic construct
  source 1..20: mol_type = other DNA
aatcgcttgaacccgggagg

SEQ ID NO: 78395 - DNA, 20 bp, synthetic construct
  source 1..20: mol_type = other DNA
gaatcgcttgaacccgggag

SEQ ID NO: 78396 - DNA, 20 bp, synthetic construct
  source 1..20: mol_type = other DNA
agaatcgcttgaacccggga

SEQ ID NO: 78397 - DNA, 20 bp, synthetic construct
  source 1..20: mol_type = other DNA
gagaatcgcttgaacccggg

SEQ ID NO: 78398 - DNA, 20 bp, synthetic construct
  source 1..20: mol_type = other DNA
ggagaatcgcttgaacccgg

SEQ ID NO: 78399 - DNA, 20 bp, synthetic construct
  source 1..20: mol_type = other DNA
aggagaatcgcttgaacccg

SEQ ID NO: 78400 - DNA, 20 bp, synthetic construct
  source 1..20: mol_type = other DNA
caggagaatcgcttgaaccc

SEQ ID NO: 78401 - DNA, 20 bp, synthetic construct
  source 1..20: mol_type = other DNA
gcaggagaatcgcttgaacc

SEQ ID NO: 78402 - DNA, 20 bp, synthetic construct
  source 1..20: mol_type = other DNA
ggcaggagaatcgcttgaac

SEQ ID NO: 78403 - DNA, 20 bp, synthetic construct
  source 1..20: mol_type = other DNA
aggcaggagaatcgcttgaa

SEQ ID NO: 78404 - DNA, 20 bp, synthetic construct
  source 1..20: mol_type = other DNA
gaggcaggagaatcgcttga

SEQ ID NO: 78405 - DNA, 20 bp, synthetic construct
  source 1..20: mol_type = other DNA
tgaggcaggagaatcgcttg

SEQ ID NO: 78406 - DNA, 20 bp, synthetic construct
  source 1..20: mol_type = other DNA
ctgaggcaggagaatcgctt

SEQ ID NO: 78407 - DNA, 20 bp, synthetic construct
  source 1..20: mol_type = other DNA
gctgaggcaggagaatcgct

SEQ ID NO: 78408 - DNA, 20 bp, synthetic construct
  source 1..20: mol_type = other DNA
ggctgaggcaggagaatcgc

SEQ ID NO: 78409 - DNA, 20 bp, synthetic construct
  source 1..20: mol_type = other DNA
aggctgaggcaggagaatcg

SEQ ID NO: 78410 - DNA, 20 bp, synthetic construct
  source 1..20: mol_type = other DNA
gaggctgaggcaggagaatc

SEQ ID NO: 78411 - DNA, 20 bp, synthetic construct
  source 1..20: mol_type = other DNA
ggaggctgaggcaggagaat

SEQ ID NO: 78412 - DNA, 20 bp, synthetic construct
  source 1..20: mol_type = other DNA
aggaggctgaggcaggagaa

SEQ ID NO: 78413 - DNA, 20 bp, synthetic construct
  source 1..20: mol_type = other DNA
caggaggctgaggcaggaga

SEQ ID NO: 78414 - DNA, 20 bp, synthetic construct
  source 1..20: mol_type = other DNA
tcaggaggctgaggcaggag

SEQ ID NO: 78415 - DNA, 20 bp, synthetic construct
  source 1..20: mol_type = other DNA
ctcaggaggctgaggcagga

SEQ ID NO: 78416 - DNA, 20 bp, synthetic construct
  source 1..20: mol_type = other DNA
actcaggaggctgaggcagg

SEQ ID NO: 78417 - DNA, 20 bp, synthetic construct
  source 1..20: mol_type = other DNA
tactcaggaggctgaggcag

SEQ ID NO: 78418 - DNA, 20 bp, synthetic construct
  source 1..20: mol_type = other DNA
ctactcaggaggctgaggca

SEQ ID NO: 78419 - DNA, 20 bp, synthetic construct
  source 1..20: mol_type = other DNA
gctactcaggaggctgaggc

SEQ ID NO: 78420 - DNA, 20 bp, synthetic construct
  source 1..20: mol_type = other DNA
agctactcaggaggctgagg

SEQ ID NO: 78421 - DNA, 20 bp, synthetic construct
  source 1..20: mol_type = other DNA
cagctactcaggaggctgag

SEQ ID NO: 78422 - DNA, 20 bp, synthetic construct
  source 1..20: mol_type = other DNA
gcagctactcaggaggctga

SEQ ID NO: 78423 - DNA, 20 bp, synthetic construct
  source 1..20: mol_type = other DNA
ggcagctactcaggaggctg

SEQ ID NO: 78424 - DNA, 20 bp, synthetic construct
  source 1..20: mol_type = other DNA
tggcagctactcaggaggct

SEQ ID NO: 78425 - DNA, 20 bp, synthetic construct
  source 1..20: mol_type = other DNA
gtggcagctactcaggaggc

SEQ ID NO: 78426 - DNA, 20 bp, synthetic construct
  source 1..20: mol_type = other DNA
ggtggcagctactcaggagg

SEQ ID NO: 78427 - DNA, 20 bp, synthetic construct
  source 1..20: mol_type = other DNA
tggtggcagctactcaggag

SEQ ID NO: 78428 - DNA, 20 bp, synthetic construct
  source 1..20: mol_type = other DNA
atggtggcagctactcagga

SEQ ID NO: 78429 - DNA, 20 bp, synthetic construct
  source 1..20: mol_type = other DNA
catggtggcagctactcagg

SEQ ID NO: 78430 - DNA, 20 bp, synthetic construct
  source 1..20: mol_type = other DNA
gcatggtggcagctactcag

SEQ ID NO: 78431 - DNA, 20 bp, synthetic construct
  source 1..20: mol_type = other DNA
ggcatggtggcagctactca

SEQ ID NO: 78432 - DNA, 20 bp, synthetic construct
  source 1..20: mol_type = other DNA
gggcatggtggcagctactc

SEQ ID NO: 78433 - DNA, 20 bp, synthetic construct
  source 1..20: mol_type = other DNA
tgggcatggtggcagctact

SEQ ID NO: 78434 - DNA, 20 bp, synthetic construct
  source 1..20: mol_type = other DNA
ctgggcatggtggcagctac

SEQ ID NO: 78435 - DNA, 20 bp, synthetic construct
  source 1..20: mol_type = other DNA
gctgggcatggtggcagcta

SEQ ID NO: 78436 - DNA, 20 bp, synthetic construct
  source 1..20: mol_type = other DNA
agctgggcatggtggcagct

SEQ ID NO: 78437 - DNA, 20 bp, synthetic construct
  source 1..20: mol_type = other DNA
tagctgggcatggtggcagc

SEQ ID NO: 78438 - DNA, 20 bp, synthetic construct
  source 1..20: mol_type = other DNA
ttagctgggcatggtggcag

SEQ ID NO: 78439 - DNA, 20 bp, synthetic construct
  source 1..20: mol_type = other DNA
attagctgggcatggtggca

SEQ ID NO: 78440 - DNA, 20 bp, synthetic construct
  source 1..20: mol_type = other DNA
aattagctgggcatggtggc

SEQ ID NO: 78441 - DNA, 20 bp, synthetic construct
  source 1..20: mol_type = other DNA
aaattagctgggcatggtgg

SEQ ID NO: 78442 - DNA, 20 bp, synthetic construct
  source 1..20: mol_type = other DNA
aaaattagctgggcatggtg

SEQ ID NO: 78443 - DNA, 20 bp, synthetic construct
  source 1..20: mol_type = other DNA
aaaaattagctgggcatggt

SEQ ID NO: 78444 - DNA, 20 bp, synthetic construct
  source 1..20: mol_type = other DNA
caaaaattagctgggcatgg

SEQ ID NO: 78445 - DNA, 20 bp, synthetic construct
  source 1..20: mol_type = other DNA
acaaaaattagctgggcatg

SEQ ID NO: 78446 - DNA, 20 bp, synthetic construct
  source 1..20: mol_type = other DNA
cacaaaaattagctgggcat

SEQ ID NO: 78447 - DNA, 20 bp, synthetic construct
  source 1..20: mol_type = other DNA
acacaaaaattagctgggca

SEQ ID NO: 78448 - DNA, 20 bp, synthetic construct
  source 1..20: mol_type = other DNA
aacacaaaaattagctgggc

SEQ ID NO: 78449 - DNA, 20 bp, synthetic construct
  source 1..20: mol_type = other DNA
aaacacaaaaattagctggg

SEQ ID NO: 78450 - DNA, 20 bp, synthetic construct
  source 1..20: mol_type = other DNA
aaaacacaaaaattagctgg

SEQ ID NO: 78451 - DNA, 20 bp, synthetic construct
  source 1..20: mol_type = other DNA
aaaaacacaaaaattagctg

SEQ ID NO: 78452 - DNA, 20 bp, synthetic construct
  source 1..20: mol_type = other DNA
taaaaacacaaaaattagct

SEQ ID NO: 78453 - DNA, 20 bp, synthetic construct
  source 1..20: mol_type = other DNA
ctaaaaacacaaaaattagc

SEQ ID NO: 78454 - DNA, 20 bp, synthetic construct
  source 1..20: mol_type = other DNA
actaaaaacacaaaaattag

SEQ ID NO: 78455 - DNA, 20 bp, synthetic construct
  source 1..20: mol_type = other DNA
tactaaaaacacaaaaatta

SEQ ID NO: 78456 - DNA, 20 bp, synthetic construct
  source 1..20: mol_type = other DNA
ctactaaaaacacaaaaatt

SEQ ID NO: 78457 - DNA, 20 bp, synthetic construct
  source 1..20: mol_type = other DNA
tctactaaaaacacaaaaat

SEQ ID NO: 78458 - DNA, 20 bp, synthetic construct
  source 1..20: mol_type = other DNA
ctctactaaaaacacaaaaa

SEQ ID NO: 78459 - DNA, 20 bp, synthetic construct
  source 1..20: mol_type = other DNA
tctctactaaaaacacaaaa

SEQ ID NO: 78460 - DNA, 20 bp, synthetic construct
  source 1..20: mol_type = other DNA
ttctctactaaaaacacaaa

SEQ ID NO: 78461 - DNA, 20 bp, synthetic construct
  source 1..20: mol_type = other DNA
cttctctactaaaaacacaa

SEQ ID NO: 78462 - DNA, 20 bp, synthetic construct
  source 1..20: mol_type = other DNA
ccttctctactaaaaacaca

SEQ ID NO: 78463 - DNA, 20 bp, synthetic construct
  source 1..20: mol_type = other DNA
cccttctctactaaaaacac

SEQ ID NO: 78464 - DNA, 20 bp, synthetic construct
  source 1..20: mol_type = other DNA
ccccttctctactaaaaaca

SEQ ID NO: 78465 - DNA, 20 bp, synthetic construct
  source 1..20: mol_type = other DNA
accccttctctactaaaaac

SEQ ID NO: 78466 - DNA, 20 bp, synthetic construct
  source 1..20: mol_type = other DNA
aaccccttctctactaaaaa

SEQ ID NO: 78467 - DNA, 20 bp, synthetic construct
  source 1..20: mol_type = other DNA
aaaccccttctctactaaaa

SEQ ID NO: 78468 - DNA, 20 bp, synthetic construct
  source 1..20: mol_type = other DNA
gaaaccccttctctactaaa

SEQ ID NO: 78469 - DNA, 20 bp, synthetic construct
  source 1..20: mol_type = other DNA
tgaaaccccttctctactaa

SEQ ID NO: 78470 - DNA, 20 bp, synthetic construct
  source 1..20: mol_type = other DNA
gtgaaaccccttctctacta

SEQ ID NO: 78471 - DNA, 20 bp, synthetic construct
  source 1..20: mol_type = other DNA
ggtgaaaccccttctctact

SEQ ID NO: 78472 - DNA, 20 bp, synthetic construct
  source 1..20: mol_type = other DNA
tggtgaaaccccttctctac

SEQ ID NO: 78473 - DNA, 20 bp, synthetic construct
  source 1..20: mol_type = other DNA
atggtgaaaccccttctcta

SEQ ID NO: 78474 - DNA, 20 bp, synthetic construct
  source 1..20: mol_type = other DNA
catggtgaaaccccttctct

SEQ ID NO: 78475 - DNA, 20 bp, synthetic construct
  source 1..20: mol_type = other DNA
acatggtgaaaccccttctc

SEQ ID NO: 78476 - DNA, 20 bp, synthetic construct
  source 1..20: mol_type = other DNA
aacatggtgaaaccccttct

SEQ ID NO: 78477 - DNA, 20 bp, synthetic construct
  source 1..20: mol_type = other DNA
aaacatggtgaaaccccttc

SEQ ID NO: 78478 - DNA, 20 bp, synthetic construct
  source 1..20: mol_type = other DNA
caaacatggtgaaacccctt

SEQ ID NO: 78479 - DNA, 20 bp, synthetic construct
  source 1..20: mol_type = other DNA
acaaacatggtgaaacccct

SEQ ID NO: 78480 - DNA, 20 bp, synthetic construct
  source 1..20: mol_type = other DNA
gacaaacatggtgaaacccc

SEQ ID NO: 78481 - DNA, 20 bp, synthetic construct
  source 1..20: mol_type = other DNA
tgacaaacatggtgaaaccc

SEQ ID NO: 78482 - DNA, 20 bp, synthetic construct
  source 1..20: mol_type = other DNA
ctgacaaacatggtgaaacc

SEQ ID NO: 78483 - DNA, 20 bp, synthetic construct
  source 1..20: mol_type = other DNA
cctgacaaacatggtgaaac

SEQ ID NO: 78484 - DNA, 20 bp, synthetic construct
  source 1..20: mol_type = other DNA
gcctgacaaacatggtgaaa

SEQ ID NO: 78485 - DNA, 20 bp, synthetic construct
  source 1..20: mol_type = other DNA
agcctgacaaacatggtgaa

SEQ ID NO: 78486 - DNA, 20 bp, synthetic construct
  source 1..20: mol_type = other DNA
cagcctgacaaacatggtga

SEQ ID NO: 78487 - DNA, 20 bp, synthetic construct
  source 1..20: mol_type = other DNA
ccagcctgacaaacatggtg

SEQ ID NO: 78488 - DNA, 20 bp, synthetic construct
  source 1..20: mol_type = other DNA
accagcctgacaaacatggt

SEQ ID NO: 78489 - DNA, 20 bp, synthetic construct
  source 1..20: mol_type = other DNA
gaccagcctgacaaacatgg

SEQ ID NO: 78490 - DNA, 20 bp, synthetic construct
  source 1..20: mol_type = other DNA
agaccagcctgacaaacatg

SEQ ID NO: 78491 - DNA, 20 bp, synthetic construct
  source 1..20: mol_type = other DNA
aagaccagcctgacaaacat

SEQ ID NO: 78492 - DNA, 20 bp, synthetic construct
  source 1..20: mol_type = other DNA
caagaccagcctgacaaaca

SEQ ID NO: 78493 - DNA, 20 bp, synthetic construct
  source 1..20: mol_type = other DNA
tcaagaccagcctgacaaac

SEQ ID NO: 78494 - DNA, 20 bp, synthetic construct
  source 1..20: mol_type = other DNA
ttcaagaccagcctgacaaa

SEQ ID NO: 78495 - DNA, 20 bp, synthetic construct
  source 1..20: mol_type = other DNA
gttcaagaccagcctgacaa

SEQ ID NO: 78496 - DNA, 20 bp, synthetic construct
  source 1..20: mol_type = other DNA
agttcaagaccagcctgaca

SEQ ID NO: 78497 - DNA, 20 bp, synthetic construct
  source 1..20: mol_type = other DNA
gagttcaagaccagcctgac

SEQ ID NO: 78498 - DNA, 20 bp, synthetic construct
  source 1..20: mol_type = other DNA
ggagttcaagaccagcctga

SEQ ID NO: 78499 - DNA, 20 bp, synthetic construct
  source 1..20: mol_type = other DNA
aggagttcaagaccagcctg

SEQ ID NO: 78500 - DNA, 20 bp, synthetic construct
  source 1..20: mol_type = other DNA
caggagttcaagaccagcct

SEQ ID NO: 78501 - DNA, 20 bp, synthetic construct
  source 1..20: mol_type = other DNA
tcaggagttcaagaccagcc

SEQ ID NO: 78502 - DNA, 20 bp, synthetic construct
  source 1..20: mol_type = other DNA
ttcaggagttcaagaccagc

SEQ ID NO: 78503 - DNA, 20 bp, synthetic construct
  source 1..20: mol_type = other DNA
gttcaggagttcaagaccag

SEQ ID NO: 78504 - DNA, 20 bp, synthetic construct
  source 1..20: mol_type = other DNA
agttcaggagttcaagacca

SEQ ID NO: 78505 - DNA, 20 bp, synthetic construct
  source 1..20: mol_type = other DNA
gagttcaggagttcaagacc

SEQ ID NO: 78506 - DNA, 20 bp, synthetic construct
  source 1..20: mol_type = other DNA
cgagttcaggagttcaagac

SEQ ID NO: 78507 - DNA, 20 bp, synthetic construct
  source 1..20: mol_type = other DNA
acgagttcaggagttcaaga

SEQ ID NO: 78508 - DNA, 20 bp, synthetic construct
  source 1..20: mol_type = other DNA
cacgagttcaggagttcaag

SEQ ID NO: 78509 - DNA, 20 bp, synthetic construct
  source 1..20: mol_type = other DNA
tcacgagttcaggagttcaa

SEQ ID NO: 78510 - DNA, 20 bp, synthetic construct
  source 1..20: mol_type = other DNA
atcacgagttcaggagttca

SEQ ID NO: 78511 - DNA, 20 bp, synthetic construct
  source 1..20: mol_type = other DNA
gatcacgagttcaggagttc

SEQ ID NO: 78512 - DNA, 20 bp, synthetic construct
  source 1..20: mol_type = other DNA
ggatcacgagttcaggagtt

SEQ ID NO: 78513 - DNA, 20 bp, synthetic construct
  source 1..20: mol_type = other DNA
tggatcacgagttcaggagt

SEQ ID NO: 78514 - DNA, 20 bp, synthetic construct
  source 1..20: mol_type = other DNA
gtggatcacgagttcaggag

SEQ ID NO: 78515 - DNA, 20 bp, synthetic construct
  source 1..20: mol_type = other DNA
ggtggatcacgagttcagga

SEQ ID NO: 78516 - DNA, 20 bp, synthetic construct
  source 1..20: mol_type = other DNA
aggtggatcacgagttcagg

SEQ ID NO: 78517 - DNA, 20 bp, synthetic construct
  source 1..20: mol_type = other DNA
caggtggatcacgagttcag

SEQ ID NO: 78518 - DNA, 20 bp, synthetic construct
  source 1..20: mol_type = other DNA
gcaggtggatcacgagttca

SEQ ID NO: 78519 - DNA, 20 bp, synthetic construct
  source 1..20: mol_type = other DNA
ggcaggtggatcacgagttc

SEQ ID NO: 78520 - DNA, 20 bp, synthetic construct
  source 1..20: mol_type = other DNA
aggcaggtggatcacgagtt

SEQ ID NO: 78521 - DNA, 20 bp, synthetic construct
  source 1..20: mol_type = other DNA
gaggcaggtggatcacgagt

SEQ ID NO: 78522 - DNA, 20 bp, synthetic construct
  source 1..20: mol_type = other DNA
tgaggcaggtggatcacgag

SEQ ID NO: 78523 - DNA, 20 bp, synthetic construct
  source 1..20: mol_type = other DNA
ctgaggcaggtggatcacga

SEQ ID NO: 78524 - DNA, 20 bp, synthetic construct
  source 1..20: mol_type = other DNA
gctgaggcaggtggatcacg

SEQ ID NO: 78525 - DNA, 20 bp, synthetic construct
  source 1..20: mol_type = other DNA
ggctgaggcaggtggatcac

SEQ ID NO: 78526 - DNA, 20 bp, synthetic construct
  source 1..20: mol_type = other DNA
aggctgaggcaggtggatca

SEQ ID NO: 78527 - DNA, 20 bp, synthetic construct
  source 1..20: mol_type = other DNA
gaggctgaggcaggtggatc

SEQ ID NO: 78528 - DNA, 20 bp, synthetic construct
  source 1..20: mol_type = other DNA
ggaggctgaggcaggtggat

SEQ ID NO: 78529 - DNA, 20 bp, synthetic construct
  source 1..20: mol_type = other DNA
gggaggctgaggcaggtgga

SEQ ID NO: 78530 - DNA, 20 bp, synthetic construct
  source 1..20: mol_type = other DNA
tgggaggctgaggcaggtgg

SEQ ID NO: 78531 - DNA, 20 bp, synthetic construct
  source 1..20: mol_type = other DNA
ttgggaggctgaggcaggtg

SEQ ID NO: 78532 - DNA, 20 bp, synthetic construct
  source 1..20: mol_type = other DNA
tttgggaggctgaggcaggt

SEQ ID NO: 78533 - DNA, 20 bp, synthetic construct
  source 1..20: mol_type = other DNA
ctttgggaggctgaggcagg

SEQ ID NO: 78534 - DNA, 20 bp, synthetic construct
  source 1..20: mol_type = other DNA
actttgggaggctgaggcag

SEQ ID NO: 78535 - DNA, 20 bp, synthetic construct
  source 1..20: mol_type = other DNA
cactttgggaggctgaggca

SEQ ID NO: 78536 - DNA, 20 bp, synthetic construct
  source 1..20: mol_type = other DNA
gcactttgggaggctgaggc

SEQ ID NO: 78537 - DNA, 20 bp, synthetic construct
  source 1..20: mol_type = other DNA
agcactttgggaggctgagg

SEQ ID NO: 78538 - DNA, 20 bp, synthetic construct
  source 1..20: mol_type = other DNA
cagcactttgggaggctgag

SEQ ID NO: 78539 - DNA, 20 bp, synthetic construct
  source 1..20: mol_type = other DNA
gcagcactttgggaggctga

SEQ ID NO: 78540 - DNA, 20 bp, synthetic construct
  source 1..20: mol_type = other DNA
cgcagcactttgggaggctg

SEQ ID NO: 78541 - DNA, 20 bp, synthetic construct
  source 1..20: mol_type = other DNA
tcgcagcactttgggaggct

SEQ ID NO: 78542 - DNA, 20 bp, synthetic construct
  source 1..20: mol_type = other DNA
atcgcagcactttgggaggc

SEQ ID NO: 78543 - DNA, 20 bp, synthetic construct
  source 1..20: mol_type = other DNA
aatcgcagcactttgggagg

SEQ ID NO: 78544 - DNA, 20 bp, synthetic construct
  source 1..20: mol_type = other DNA
taatcgcagcactttgggag

SEQ ID NO: 78545 - DNA, 20 bp, synthetic construct
  source 1..20: mol_type = other DNA
gtaatcgcagcactttggga

SEQ ID NO: 78546 - DNA, 20 bp, synthetic construct
  source 1..20: mol_type = other DNA
agtaatcgcagcactttggg

SEQ ID NO: 78547 - DNA, 20 bp, synthetic construct
  source 1..20: mol_type = other DNA
cagtaatcgcagcactttgg

SEQ ID NO: 78548 - DNA, 20 bp, synthetic construct
  source 1..20: mol_type = other DNA
ccagtaatcgcagcactttg

SEQ ID NO: 78549 - DNA, 20 bp, synthetic construct
  source 1..20: mol_type = other DNA
gccagtaatcgcagcacttt

SEQ ID NO: 78550 - DNA, 20 bp, synthetic construct
  source 1..20: mol_type = other DNA
tgccagtaatcgcagcactt

SEQ ID NO: 78551 - DNA, 20 bp, synthetic construct
  source 1..20: mol_type = other DNA
atgccagtaatcgcagcact

SEQ ID NO: 78552 - DNA, 20 bp, synthetic construct
  source 1..20: mol_type = other DNA
catgccagtaatcgcagcac

SEQ ID NO: 78553 - DNA, 20 bp, synthetic construct
  source 1..20: mol_type = other DNA
tcatgccagtaatcgcagca

SEQ ID NO: 78554 - DNA, 20 bp, synthetic construct
  source 1..20: mol_type = other DNA
ctcatgccagtaatcgcagc

SEQ ID NO: 78555 - DNA, 20 bp, synthetic construct
  source 1..20: mol_type = other DNA
gctcatgccagtaatcgcag

SEQ ID NO: 78556 - DNA, 20 bp, synthetic construct
  source 1..20: mol_type = other DNA
ggctcatgccagtaatcgca

SEQ ID NO: 78557 - DNA, 20 bp, synthetic construct
  source 1..20: mol_type = other DNA
tggctcatgccagtaatcgc

SEQ ID NO: 78558 - DNA, 20 bp, synthetic construct
  source 1..20: mol_type = other DNA
gtggctcatgccagtaatcg

SEQ ID NO: 78559 - DNA, 20 bp, synthetic construct
  source 1..20: mol_type = other DNA
ggtggctcatgccagtaatc

SEQ ID NO: 78560 - DNA, 20 bp, synthetic construct
  source 1..20: mol_type = other DNA
cggtggctcatgccagtaat

SEQ ID NO: 78561 - DNA, 20 bp, synthetic construct
  source 1..20: mol_type = other DNA
gcggtggctcatgccagtaa

SEQ ID NO: 78562 - DNA, 20 bp, synthetic construct
  source 1..20: mol_type = other DNA
tgcggtggctcatgccagta

SEQ ID NO: 78563 - DNA, 20 bp, synthetic construct
  source 1..20: mol_type = other DNA
gtgcggtggctcatgccagt

SEQ ID NO: 78564 - DNA, 20 bp, synthetic construct
  source 1..20: mol_type = other DNA
ggtgcggtggctcatgccag

SEQ ID NO: 78565 - DNA, 20 bp, synthetic construct
  source 1..20: mol_type = other DNA
aggtgcggtggctcatgcca

SEQ ID NO: 78566 - DNA, 20 bp, synthetic construct
  source 1..20: mol_type = other DNA
caggtgcggtggctcatgcc

SEQ ID NO: 78567 - DNA, 20 bp, synthetic construct
  source 1..20: mol_type = other DNA
ccaggtgcggtggctcatgc

SEQ ID NO: 78568 - DNA, 20 bp, synthetic construct
  source 1..20: mol_type = other DNA
gccaggtgcggtggctcatg

SEQ ID NO: 78569 - DNA, 20 bp, synthetic construct
  source 1..20: mol_type = other DNA
ggccaggtgcggtggctcat

SEQ ID NO: 78570 - DNA, 20 bp, synthetic construct
  source 1..20: mol_type = other DNA
tggccaggtgcggtggctca

SEQ ID NO: 78571 - DNA, 20 bp, synthetic construct
  source 1..20: mol_type = other DNA
atggccaggtgcggtggctc

SEQ ID NO: 78572 - DNA, 20 bp, synthetic construct
  source 1..20: mol_type = other DNA
catggccaggtgcggtggct

SEQ ID NO: 78573 - DNA, 20 bp, synthetic construct
  source 1..20: mol_type = other DNA
tcatggccaggtgcggtggc

SEQ ID NO: 78574 - DNA, 20 bp, synthetic construct
  source 1..20: mol_type = other DNA
ttcatggccaggtgcggtgg

SEQ ID NO: 78575 - DNA, 20 bp, synthetic construct
  source 1..20: mol_type = other DNA
tttcatggccaggtgcggtg

SEQ ID NO: 78576 - DNA, 20 bp, synthetic construct
  source 1..20: mol_type = other DNA
atttcatggccaggtgcggt

SEQ ID NO: 78577 - DNA, 20 bp, synthetic construct
  source 1..20: mol_type = other DNA
aatttcatggccaggtgcgg

SEQ ID NO: 78578 - DNA, 20 bp, synthetic construct
  source 1..20: mol_type = other DNA
aaatttcatggccaggtgcg

SEQ ID NO: 78579 - DNA, 20 bp, synthetic construct
  source 1..20: mol_type = other DNA
aaaatttcatggccaggtgc

SEQ ID NO: 78580 - DNA, 20 bp, synthetic construct
  source 1..20: mol_type = other DNA
aaaaatttcatggccaggtg

SEQ ID NO: 78581 - DNA, 20 bp, synthetic construct
  source 1..20: mol_type = other DNA
aaaaaatttcatggccaggt

SEQ ID NO: 78582 - DNA, 20 bp, synthetic construct
  source 1..20: mol_type = other DNA
aaaaaaatttcatggccagg

SEQ ID NO: 78583 - DNA, 20 bp, synthetic construct
  source 1..20: mol_type = other DNA
aaaaaaaatttcatggccag

SEQ ID NO: 78584 - DNA, 20 bp, synthetic construct
  source 1..20: mol_type = other DNA
aaaaaaaaatttcatggcca

SEQ ID NO: 78585 - DNA, 20 bp, synthetic construct
  source 1..20: mol_type = other DNA
aaaaaaaaaatttcatggcc

SEQ ID NO: 78586 - DNA, 20 bp, synthetic construct
  source 1..20: mol_type = other DNA
aaaaaaaaaaatttcatggc

SEQ ID NO: 78587 - DNA, 20 bp, synthetic construct
  source 1..20: mol_type = other DNA
aaaaaaaaaaaatttcatgg

SEQ ID NO: 78588 - DNA, 20 bp, synthetic construct
  source 1..20: mol_type = other DNA
aaaaaaaaaaaaatttcatg

SEQ ID NO: 78589 - DNA, 20 bp, synthetic construct
  source 1..20: mol_type = other DNA
aaaaaaaaaaaaaatttcat

SEQ ID NO: 78590 - DNA, 20 bp, synthetic construct
  source 1..20: mol_type = other DNA
aaaaaaaaaaaaaaatttca

SEQ ID NO: 78591 - DNA, 20 bp, synthetic construct
  source 1..20: mol_type = other DNA
taaaaaaaaaaaaaaatttc

SEQ ID NO: 78592 - DNA, 20 bp, synthetic construct
  source 1..20: mol_type = other DNA
ttaaaaaaaaaaaaaaattt

SEQ ID NO: 78593 - DNA, 20 bp, synthetic construct
  source 1..20: mol_type = other DNA
tttaaaaaaaaaaaaaaatt

SEQ ID NO: 78594 - DNA, 20 bp, synthetic construct
  source 1..20: mol_type = other DNA
ctttaaaaaaaaaaaaaaat

SEQ ID NO: 78595 - DNA, 20 bp, synthetic construct
  source 1..20: mol_type = other DNA
tctttaaaaaaaaaaaaaaa

SEQ ID NO: 78596 - DNA, 20 bp, synthetic construct
  source 1..20: mol_type = other DNA
ctctttaaaaaaaaaaaaaa

SEQ ID NO: 78597 - DNA, 20 bp, synthetic construct
  source 1..20: mol_type = other DNA
gctctttaaaaaaaaaaaaa

SEQ ID NO: 78598 - DNA, 20 bp, synthetic construct
  source 1..20: mol_type = other DNA
agctctttaaaaaaaaaaaa

SEQ ID NO: 78599 - DNA, 20 bp, synthetic construct
  source 1..20: mol_type = other DNA
cagctctttaaaaaaaaaaa

SEQ ID NO: 78600 - DNA, 20 bp, synthetic construct
  source 1..20: mol_type = other DNA
acagctctttaaaaaaaaaa

SEQ ID NO: 78601 - DNA, 20 bp, synthetic construct
  source 1..20: mol_type = other DNA
aacagctctttaaaaaaaaa

SEQ ID NO: 78602 - DNA, 20 bp, synthetic construct
  source 1..20: mol_type = other DNA
gaacagctctttaaaaaaaa

SEQ ID NO: 78603 - DNA, 20 bp, synthetic construct
  source 1..20: mol_type = other DNA
tgaacagctctttaaaaaaa

SEQ ID NO: 78604 - DNA, 20 bp, synthetic construct
  source 1..20: mol_type = other DNA
atgaacagctctttaaaaaa

SEQ ID NO: 78605 - DNA, 20 bp, synthetic construct
  source 1..20: mol_type = other DNA
tatgaacagctctttaaaaa

SEQ ID NO: 78606 - DNA, 20 bp, synthetic construct
  source 1..20: mol_type = other DNA
atatgaacagctctttaaaa

SEQ ID NO: 78607 - DNA, 20 bp, synthetic construct
  source 1..20: mol_type = other DNA
aatatgaacagctctttaaa

SEQ ID NO: 78608 - DNA, 20 bp, synthetic construct
  source 1..20: mol_type = other DNA
gaatatgaacagctctttaa

SEQ ID NO: 78609 - DNA, 20 bp, synthetic construct
  source 1..20: mol_type = other DNA
agaatatgaacagctcttta

SEQ ID NO: 78610 - DNA, 20 bp, synthetic construct
  source 1..20: mol_type = other DNA
aagaatatgaacagctcttt

SEQ ID NO: 78611 - DNA, 20 bp, synthetic construct
  source 1..20: mol_type = other DNA
taagaatatgaacagctctt

SEQ ID NO: 78612 - DNA, 20 bp, synthetic construct
  source 1..20: mol_type = other DNA
ataagaatatgaacagctct

SEQ ID NO: 78613 - DNA, 20 bp, synthetic construct
  source 1..20: mol_type = other DNA
aataagaatatgaacagctc

SEQ ID NO: 78614 - DNA, 20 bp, synthetic construct
  source 1..20: mol_type = other DNA
caataagaatatgaacagct

SEQ ID NO: 78615 - DNA, 20 bp, synthetic construct
  source 1..20: mol_type = other DNA
gcaataagaatatgaacagc

SEQ ID NO: 78616 - DNA, 20 bp, synthetic construct
  source 1..20: mol_type = other DNA
ggcaataagaatatgaacag

SEQ ID NO: 78617 - DNA, 20 bp, synthetic construct
  source 1..20: mol_type = other DNA
aggcaataagaatatgaaca

SEQ ID NO: 78618 - DNA, 20 bp, synthetic construct
  source 1..20: mol_type = other DNA
taggcaataagaatatgaac

SEQ ID NO: 78619 - DNA, 20 bp, synthetic construct
  source 1..20: mol_type = other DNA
ctaggcaataagaatatgaa

SEQ ID NO: 78620 - DNA, 20 bp, synthetic construct
  source 1..20: mol_type = other DNA
tctaggcaataagaatatga

SEQ ID NO: 78621 - DNA, 20 bp, synthetic construct
  source 1..20: mol_type = other DNA
ttctaggcaataagaatatg

SEQ ID NO: 78622 - DNA, 20 bp, synthetic construct
  source 1..20: mol_type = other DNA
cttctaggcaataagaatat

SEQ ID NO: 78623 - DNA, 20 bp, synthetic construct
  source 1..20: mol_type = other DNA
tcttctaggcaataagaata

SEQ ID NO: 78624 - DNA, 20 bp, synthetic construct
  source 1..20: mol_type = other DNA
atcttctaggcaataagaat

SEQ ID NO: 78625 - DNA, 20 bp, synthetic construct
  source 1..20: mol_type = other DNA
catcttctaggcaataagaa

SEQ ID NO: 78626 - DNA, 20 bp, synthetic construct
  source 1..20: mol_type = other DNA
acatcttctaggcaataaga

SEQ ID NO: 78627 - DNA, 20 bp, synthetic construct
  source 1..20: mol_type = other DNA
gacatcttctaggcaataag

SEQ ID NO: 78628 - DNA, 20 bp, synthetic construct
  source 1..20: mol_type = other DNA
agacatcttctaggcaataa

SEQ ID NO: 78629 - DNA, 20 bp, synthetic construct
  source 1..20: mol_type = other DNA
cagacatcttctaggcaata

SEQ ID NO: 78630 - DNA, 20 bp, synthetic construct
  source 1..20: mol_type = other DNA
tcagacatcttctaggcaat

SEQ ID NO: 78631 - DNA, 20 bp, synthetic construct
  source 1..20: mol_type = other DNA
ttcagacatcttctaggcaa

SEQ ID NO: 78632 - DNA, 20 bp, synthetic construct
  source 1..20: mol_type = other DNA
tttcagacatcttctaggca

SEQ ID NO: 78633 - DNA, 20 bp, synthetic construct
  source 1..20: mol_type = other DNA
atttcagacatcttctaggc

SEQ ID NO: 78634 - DNA, 20 bp, synthetic construct
  source 1..20: mol_type = other DNA
aatttcagacatcttctagg

SEQ ID NO: 78635 - DNA, 20 bp, synthetic construct
  source 1..20: mol_type = other DNA
taatttcagacatcttctag

SEQ ID NO: 78636 - DNA, 20 bp, synthetic construct
  source 1..20: mol_type = other DNA
gtaatttcagacatcttcta

SEQ ID NO: 78637 - DNA, 20 bp, synthetic construct
  source 1..20: mol_type = other DNA
tgtaatttcagacatcttct

SEQ ID NO: 78638 - DNA, 20 bp, synthetic construct
  source 1..20: mol_type = other DNA
gtgtaatttcagacatcttc

SEQ ID NO: 78639 - DNA, 20 bp, synthetic construct
  source 1..20: mol_type = other DNA
ggtgtaatttcagacatctt

SEQ ID NO: 78640 - DNA, 20 bp, synthetic construct
  source 1..20: mol_type = other DNA
gggtgtaatttcagacatct

SEQ ID NO: 78641 - DNA, 20 bp, synthetic construct
  source 1..20: mol_type = other DNA
tgggtgtaatttcagacatc

SEQ ID NO: 78642 - DNA, 20 bp, synthetic construct
  source 1..20: mol_type = other DNA
ttgggtgtaatttcagacat

SEQ ID NO: 78643 - DNA, 20 bp, synthetic construct
  source 1..20: mol_type = other DNA
cttgggtgtaatttcagaca

SEQ ID NO: 78644 - DNA, 20 bp, synthetic construct
  source 1..20: mol_type = other DNA
tcttgggtgtaatttcagac

SEQ ID NO: 78645 - DNA, 20 bp, synthetic construct
  source 1..20: mol_type = other DNA
ttcttgggtgtaatttcaga

SEQ ID NO: 78646 - DNA, 20 bp, synthetic construct
  source 1..20: mol_type = other DNA
tttcttgggtgtaatttcag

SEQ ID NO: 78647 - DNA, 20 bp, synthetic construct
  source 1..20: mol_type = other DNA
gtttcttgggtgtaatttca

SEQ ID NO: 78648 - DNA, 20 bp, synthetic construct
  source 1..20: mol_type = other DNA
agtttcttgggtgtaatttc

SEQ ID NO: 78649 - DNA, 20 bp, synthetic construct
  source 1..20: mol_type = other DNA
gagtttcttgggtgtaattt

SEQ ID NO: 78650 - DNA, 20 bp, synthetic construct
  source 1..20: mol_type = other DNA
agagtttcttgggtgtaatt

SEQ ID NO: 78651 - DNA, 20 bp, synthetic construct
  source 1..20: mol_type = other DNA
aagagtttcttgggtgtaat

SEQ ID NO: 78652 - DNA, 20 bp, synthetic construct
  source 1..20: mol_type = other DNA
aaagagtttcttgggtgtaa

SEQ ID NO: 78653 - DNA, 20 bp, synthetic construct
  source 1..20: mol_type = other DNA
aaaagagtttcttgggtgta

SEQ ID NO: 78654 - DNA, 20 bp, synthetic construct
  source 1..20: mol_type = other DNA
aaaaagagtttcttgggtgt

SEQ ID NO: 78655 - DNA, 20 bp, synthetic construct
  source 1..20: mol_type = other DNA
caaaaagagtttcttgggtg

SEQ ID NO: 78656 - DNA, 20 bp, synthetic construct
  source 1..20: mol_type = other DNA
tcaaaaagagtttcttgggt

SEQ ID NO: 78657 - DNA, 20 bp, synthetic construct
  source 1..20: mol_type = other DNA
ctcaaaaagagtttcttggg

SEQ ID NO: 78658 - DNA, 20 bp, synthetic construct
  source 1..20: mol_type = other DNA
tctcaaaaagagtttcttgg

SEQ ID NO: 78659 - DNA, 20 bp, synthetic construct
  source 1..20: mol_type = other DNA
gtctcaaaaagagtttcttg

SEQ ID NO: 78660 - DNA, 20 bp, synthetic construct
  source 1..20: mol_type = other DNA
cgtctcaaaaagagtttctt

SEQ ID NO: 78661 - DNA, 20 bp, synthetic construct
  source 1..20: mol_type = other DNA
ccgtctcaaaaagagtttct

SEQ ID NO: 78662 - DNA, 20 bp, synthetic construct
  source 1..20: mol_type = other DNA
tccgtctcaaaaagagtttc

SEQ ID NO: 78663 - DNA, 20 bp, synthetic construct
  source 1..20: mol_type = other DNA
ctccgtctcaaaaagagttt

SEQ ID NO: 78664 - DNA, 20 bp, synthetic construct
  source 1..20: mol_type = other DNA
actccgtctcaaaaagagtt

SEQ ID NO: 78665 - DNA, 20 bp, synthetic construct
  source 1..20: mol_type = other DNA
gactccgtctcaaaaagagt

SEQ ID NO: 78666 - DNA, 20 bp, synthetic construct
  source 1..20: mol_type = other DNA
agactccgtctcaaaaagag

SEQ ID NO: 78667 - DNA, 20 bp, synthetic construct
  source 1..20: mol_type = other DNA
aagactccgtctcaaaaaga

SEQ ID NO: 78668 - DNA, 20 bp, synthetic construct
  source 1..20: mol_type = other DNA
caagactccgtctcaaaaag

SEQ ID NO: 78669 - DNA, 20 bp, synthetic construct
  source 1..20: mol_type = other DNA
gcaagactccgtctcaaaaa

SEQ ID NO: 78670 - DNA, 20 bp, synthetic construct
  source 1..20: mol_type = other DNA
agcaagactccgtctcaaaa

SEQ ID NO: 78671 - DNA, 20 bp, synthetic construct
  source 1..20: mol_type = other DNA
gagcaagactccgtctcaaa

SEQ ID NO: 78672 - DNA, 20 bp, synthetic construct
  source 1..20: mol_type = other DNA
agagcaagactccgtctcaa

SEQ ID NO: 78673 - DNA, 20 bp, synthetic construct
  source 1..20: mol_type = other DNA
cagagcaagactccgtctca

SEQ ID NO: 78674 - DNA, 20 bp, synthetic construct
  source 1..20: mol_type = other DNA
acagagcaagactccgtctc

SEQ ID NO: 78675 - DNA, 20 bp, synthetic construct
  source 1..20: mol_type = other DNA
aacagagcaagactccgtct

SEQ ID NO: 78676 - DNA, 20 bp, synthetic construct
  source 1..20: mol_type = other DNA
caacagagcaagactccgtc

SEQ ID NO: 78677 - DNA, 20 bp, synthetic construct
  source 1..20: mol_type = other DNA
acaacagagcaagactccgt

SEQ ID NO: 78678 - DNA, 20 bp, synthetic construct
  source 1..20: mol_type = other DNA
gacaacagagcaagactccg

SEQ ID NO: 78679 - DNA, 20 bp, synthetic construct
  source 1..20: mol_type = other DNA
ggacaacagagcaagactcc

SEQ ID NO: 78680 - DNA, 20 bp, synthetic construct
  source 1..20: mol_type = other DNA
tggacaacagagcaagactc

SEQ ID NO: 78681 - DNA, 20 bp, synthetic construct
  source 1..20: mol_type = other DNA
ctggacaacagagcaagact

SEQ ID NO: 78682 - DNA, 20 bp, synthetic construct
  source 1..20: mol_type = other DNA
cctggacaacagagcaagac

SEQ ID NO: 78683 - DNA, 20 bp, synthetic construct
  source 1..20: mol_type = other DNA
gcctggacaacagagcaaga

SEQ ID NO: 78684 - DNA, 20 bp, synthetic construct
  source 1..20: mol_type = other DNA
agcctggacaacagagcaag

SEQ ID NO: 78685 - DNA, 20 bp, synthetic construct
  source 1..20: mol_type = other DNA
cagcctggacaacagagcaa

SEQ ID NO: 78686 - DNA, 20 bp, synthetic construct
  source 1..20: mol_type = other DNA
ccagcctggacaacagagca

SEQ ID NO: 78687 - DNA, 20 bp, synthetic construct
  source 1..20: mol_type = other DNA
tccagcctggacaacagagc

SEQ ID NO: 78688 - DNA, 20 bp, synthetic construct
  source 1..20: mol_type = other DNA
ctccagcctggacaacagag

SEQ ID NO: 78689 - DNA, 20 bp, synthetic construct
  source 1..20: mol_type = other DNA
actccagcctggacaacaga

SEQ ID NO: 78690 - DNA, 20 bp, synthetic construct
  source 1..20: mol_type = other DNA
cactccagcctggacaacag

SEQ ID NO: 78691 - DNA, 20 bp, synthetic construct
  source 1..20: mol_type = other DNA
gcactccagcctggacaaca

SEQ ID NO: 78692 - DNA, 20 bp, synthetic construct
  source 1..20: mol_type = other DNA
tgcactccagcctggacaac

SEQ ID NO: 78693 - DNA, 20 bp, synthetic construct
  source 1..20: mol_type = other DNA
ttgcactccagcctggacaa

SEQ ID NO: 78694 - DNA, 20 bp, synthetic construct
  source 1..20: mol_type = other DNA
attgcactccagcctggaca

SEQ ID NO: 78695 - DNA, 20 bp, synthetic construct
  source 1..20: mol_type = other DNA
cattgcactccagcctggac

SEQ ID NO: 78696 - DNA, 20 bp, synthetic construct
  source 1..20: mol_type = other DNA
ccattgcactccagcctgga

SEQ ID NO: 78697 - DNA, 20 bp, synthetic construct
  source 1..20: mol_type = other DNA
gccattgcactccagcctgg

SEQ ID NO: 78698 - DNA, 20 bp, synthetic construct
  source 1..20: mol_type = other DNA
cgccattgcactccagcctg

SEQ ID NO: 78699 - DNA, 20 bp, synthetic construct
  source 1..20: mol_type = other DNA
acgccattgcactccagcct

SEQ ID NO: 78700 - DNA, 20 bp, synthetic construct
  source 1..20: mol_type = other DNA
cacgccattgcactccagcc

SEQ ID NO: 78701 - DNA, 20 bp, synthetic construct
  source 1..20: mol_type = other DNA
tcacgccattgcactccagc

SEQ ID NO: 78702 - DNA, 20 bp, synthetic construct
  source 1..20: mol_type = other DNA
atcacgccattgcactccag

SEQ ID NO: 78703 - DNA, 20 bp, synthetic construct
  source 1..20: mol_type = other DNA
gatcacgccattgcactcca

SEQ ID NO: 78704 - DNA, 20 bp, synthetic construct
  source 1..20: mol_type = other DNA
agatcacgccattgcactcc

SEQ ID NO: 78705 - DNA, 20 bp, synthetic construct
  source 1..20: mol_type = other DNA
aagatcacgccattgcactc

SEQ ID NO: 78706 - DNA, 20 bp, synthetic construct
  source 1..20: mol_type = other DNA
caagatcacgccattgcact

SEQ ID NO: 78707 - DNA, 20 bp, synthetic construct
  source 1..20: mol_type = other DNA
ccaagatcacgccattgcac

SEQ ID NO: 78708 - DNA, 20 bp, synthetic construct
  source 1..20: mol_type = other DNA
gccaagatcacgccattgca

SEQ ID NO: 78709 - DNA, 20 bp, synthetic construct
  source 1..20: mol_type = other DNA
agccaagatcacgccattgc

SEQ ID NO: 78710 - DNA, 20 bp, synthetic construct
  source 1..20: mol_type = other DNA
gagccaagatcacgccattg

SEQ ID NO: 78711 - DNA, 20 bp, synthetic construct
  source 1..20: mol_type = other DNA
tgagccaagatcacgccatt

SEQ ID NO: 78712 - DNA, 20 bp, synthetic construct
  source 1..20: mol_type = other DNA
gtgagccaagatcacgccat

SEQ ID NO: 78713 - DNA, 20 bp, synthetic construct
  source 1..20: mol_type = other DNA
agtgagccaagatcacgcca

SEQ ID NO: 78714 - DNA, 20 bp, synthetic construct
  source 1..20: mol_type = other DNA
cagtgagccaagatcacgcc

SEQ ID NO: 78715 - DNA, 20 bp, synthetic construct
  source 1..20: mol_type = other DNA
tcagtgagccaagatcacgc

SEQ ID NO: 78716 - DNA, 20 bp, synthetic construct
  source 1..20: mol_type = other DNA
ttcagtgagccaagatcacg

SEQ ID NO: 78717 - DNA, 20 bp, synthetic construct
  source 1..20: mol_type = other DNA
tttcagtgagccaagatcac

SEQ ID NO: 78718 - DNA, 20 bp, synthetic construct
  source 1..20: mol_type = other DNA
gtttcagtgagccaagatca

SEQ ID NO: 78719 - DNA, 20 bp, synthetic construct
  source 1..20: mol_type = other DNA
ggtttcagtgagccaagatc

SEQ ID NO: 78720 - DNA, 20 bp, synthetic construct
  source 1..20: mol_type = other DNA
aggtttcagtgagccaagat

SEQ ID NO: 78721 - DNA, 20 bp, synthetic construct
  source 1..20: mol_type = other DNA
gaggtttcagtgagccaaga

SEQ ID NO: 78722 - DNA, 20 bp, synthetic construct
  source 1..20: mol_type = other DNA
agaggtttcagtgagccaag

SEQ ID NO: 78723 - DNA, 20 bp, synthetic construct
  source 1..20: mol_type = other DNA
cagaggtttcagtgagccaa

SEQ ID NO: 78724 - DNA, 20 bp, synthetic construct
  source 1..20: mol_type = other DNA
gcagaggtttcagtgagcca

SEQ ID NO: 78725 - DNA, 20 bp, synthetic construct
  source 1..20: mol_type = other DNA
ggcagaggtttcagtgagcc

SEQ ID NO: 78726 - DNA, 20 bp, synthetic construct
  source 1..20: mol_type = other DNA
aggcagaggtttcagtgagc

SEQ ID NO: 78727 - DNA, 20 bp, synthetic construct
  source 1..20: mol_type = other DNA
aaggcagaggtttcagtgag

SEQ ID NO: 78728 - DNA, 20 bp, synthetic construct
  source 1..20: mol_type = other DNA
gaaggcagaggtttcagtga

SEQ ID NO: 78729 - DNA, 20 bp, synthetic construct
  source 1..20: mol_type = other DNA
ggaaggcagaggtttcagtg

SEQ ID NO: 78730 - DNA, 20 bp, synthetic construct
  source 1..20: mol_type = other DNA
tggaaggcagaggtttcagt

SEQ ID NO: 78731 - DNA, 20 bp, synthetic construct
  source 1..20: mol_type = other DNA
ctggaaggcagaggtttcag

SEQ ID NO: 78732 - DNA, 20 bp, synthetic construct
  source 1..20: mol_type = other DNA
cctggaaggcagaggtttca

SEQ ID NO: 78733 - DNA, 20 bp, synthetic construct
  source 1..20: mol_type = other DNA
acctggaaggcagaggtttc

SEQ ID NO: 78734 - DNA, 20 bp, synthetic construct
  source 1..20: mol_type = other DNA
aacctggaaggcagaggttt

SEQ ID NO: 78735 - DNA, 20 bp, synthetic construct
  source 1..20: mol_type = other DNA
gaacctggaaggcagaggtt

SEQ ID NO: 78736 - DNA, 20 bp, synthetic construct
  source 1..20: mol_type = other DNA
tgaacctggaaggcagaggt

SEQ ID NO: 78737 - DNA, 20 bp, synthetic construct
  source 1..20: mol_type = other DNA
ttgaacctggaaggcagagg

SEQ ID NO: 78738 - DNA, 20 bp, synthetic construct
  source 1..20: mol_type = other DNA
cttgaacctggaaggcagag

SEQ ID NO: 78739 - DNA, 20 bp, synthetic construct
  source 1..20: mol_type = other DNA
gcttgaacctggaaggcaga

SEQ ID NO: 78740 - DNA, 20 bp, synthetic construct
  source 1..20: mol_type = other DNA
cgcttgaacctggaaggcag

SEQ ID NO: 78741 - DNA, 20 bp, synthetic construct
  source 1..20: mol_type = other DNA
tcgcttgaacctggaaggca

SEQ ID NO: 78742 - DNA, 20 bp, synthetic construct
  source 1..20: mol_type = other DNA
atcgcttgaacctggaaggc

SEQ ID NO: 78743 - DNA, 20 bp, synthetic construct
  source 1..20: mol_type = other DNA
aatcgcttgaacctggaagg

SEQ ID NO: 78744 - DNA, 20 bp, synthetic construct
  source 1..20: mol_type = other DNA
gaatcgcttgaacctggaag

SEQ ID NO: 78745 - DNA, 20 bp, synthetic construct
  source 1..20: mol_type = other DNA
agaatcgcttgaacctggaa

SEQ ID NO: 78746 - DNA, 20 bp, synthetic construct
  source 1..20: mol_type = other DNA
gagaatcgcttgaacctgga

SEQ ID NO: 78747 - DNA, 20 bp, synthetic construct
  source 1..20: mol_type = other DNA
ggagaatcgcttgaacctgg

SEQ ID NO: 78748 - DNA, 20 bp, synthetic construct
  source 1..20: mol_type = other DNA
aggagaatcgcttgaacctg

SEQ ID NO: 78749 - DNA, 20 bp, synthetic construct
  source 1..20: mol_type = other DNA
caggagaatcgcttgaacct

SEQ ID NO: 78750 - DNA, 20 bp, synthetic construct
  source 1..20: mol_type = other DNA
gcaggagaatcgcttgaacc

SEQ ID NO: 78751 - DNA, 20 bp, synthetic construct
  source 1..20: mol_type = other DNA
agcaggagaatcgcttgaac

SEQ ID NO: 78752 - DNA, 20 bp, synthetic construct
  source 1..20: mol_type = other DNA
aagcaggagaatcgcttgaa

SEQ ID NO: 78753 - DNA, 20 bp, synthetic construct
  source 1..20: mol_type = other DNA
gaagcaggagaatcgcttga

SEQ ID NO: 78754 - DNA, 20 bp, synthetic construct
  source 1..20: mol_type = other DNA
tgaagcaggagaatcgcttg

SEQ ID NO: 78755 - DNA, 20 bp, synthetic construct
  source 1..20: mol_type = other DNA
ctgaagcaggagaatcgctt

SEQ ID NO: 78756 - DNA, 20 bp, synthetic construct
  source 1..20: mol_type = other DNA
gctgaagcaggagaatcgct

SEQ ID NO: 78757 - DNA, 20 bp, synthetic construct
  source 1..20: mol_type = other DNA
ggctgaagcaggagaatcgc

SEQ ID NO: 78758 - DNA, 20 bp, synthetic construct
  source 1..20: mol_type = other DNA
aggctgaagcaggagaatcg

SEQ ID NO: 78759 - DNA, 20 bp, synthetic construct
  source 1..20: mol_type = other DNA
aaggctgaagcaggagaatc

SEQ ID NO: 78760 - DNA, 20 bp, synthetic construct
  source 1..20: mol_type = other DNA
gaaggctgaagcaggagaat

SEQ ID NO: 78761 - DNA, 20 bp, synthetic construct
  source 1..20: mol_type = other DNA
agaaggctgaagcaggagaa

SEQ ID NO: 78762 - DNA, 20 bp, synthetic construct
  source 1..20: mol_type = other DNA
cagaaggctgaagcaggaga

SEQ ID NO: 78763 - DNA, 20 bp, synthetic construct
  source 1..20: mol_type = other DNA
tcagaaggctgaagcaggag

SEQ ID NO: 78764 - DNA, 20 bp, synthetic construct
  source 1..20: mol_type = other DNA
ctcagaaggctgaagcagga

SEQ ID NO: 78765 - DNA, 20 bp, synthetic construct
  source 1..20: mol_type = other DNA
actcagaaggctgaagcagg

SEQ ID NO: 78766 - DNA, 20 bp, synthetic construct
  source 1..20: mol_type = other DNA
tactcagaaggctgaagcag

SEQ ID NO: 78767 - DNA, 20 bp, synthetic construct
  source 1..20: mol_type = other DNA
ctactcagaaggctgaagca

SEQ ID NO: 78768 - DNA, 20 bp, synthetic construct
  source 1..20: mol_type = other DNA
gctactcagaaggctgaagc

SEQ ID NO: 78769 - DNA, 20 bp, synthetic construct
  source 1..20: mol_type = other DNA
agctactcagaaggctgaag

SEQ ID NO: 78770 - DNA, 20 bp, synthetic construct
  source 1..20: mol_type = other DNA
cagctactcagaaggctgaa

SEQ ID NO: 78771 - DNA, 20 bp, synthetic construct
  source 1..20: mol_type = other DNA
ccagctactcagaaggctga

SEQ ID NO: 78772 - DNA, 20 bp, synthetic construct
  source 1..20: mol_type = other DNA
cccagctactcagaaggctg

SEQ ID NO: 78773 - DNA, 20 bp, synthetic construct
  source 1..20: mol_type = other DNA
tcccagctactcagaaggct

SEQ ID NO: 78774 - DNA, 20 bp, synthetic construct
  source 1..20: mol_type = other DNA
gtcccagctactcagaaggc

SEQ ID NO: 78775 - DNA, 20 bp, synthetic construct
  source 1..20: mol_type = other DNA
agtcccagctactcagaagg

SEQ ID NO: 78776 - DNA, 20 bp, synthetic construct
  source 1..20: mol_type = other DNA
tagtcccagctactcagaag

SEQ ID NO: 78777 - DNA, 20 bp, synthetic construct
  source 1..20: mol_type = other DNA
gtagtcccagctactcagaa

SEQ ID NO: 78778 - DNA, 20 bp, synthetic construct
  source 1..20: mol_type = other DNA
tgtagtcccagctactcaga

SEQ ID NO: 78779 - DNA, 20 bp, synthetic construct
  source 1..20: mol_type = other DNA
ttgtagtcccagctactcag

SEQ ID NO: 78780 - DNA, 20 bp, synthetic construct
  source 1..20: mol_type = other DNA
cttgtagtcccagctactca

SEQ ID NO: 78781 - DNA, 20 bp, synthetic construct
  source 1..20: mol_type = other DNA
gcttgtagtcccagctactc

SEQ ID NO: 78782 - DNA, 20 bp, synthetic construct
  source 1..20: mol_type = other DNA
cgcttgtagtcccagctact

SEQ ID NO: 78783 - DNA, 20 bp, synthetic construct
  source 1..20: mol_type = other DNA
gcgcttgtagtcccagctac

SEQ ID NO: 78784 - DNA, 20 bp, synthetic construct
  source 1..20: mol_type = other DNA
ggcgcttgtagtcccagcta

SEQ ID NO: 78785 - DNA, 20 bp, synthetic construct
  source 1..20: mol_type = other DNA
gggcgcttgtagtcccagct

SEQ ID NO: 78786 - DNA, 20 bp, synthetic construct
  source 1..20: mol_type = other DNA
cgggcgcttgtagtcccagc

SEQ ID NO: 78787 - DNA, 20 bp, synthetic construct
  source 1..20: mol_type = other DNA
gcgggcgcttgtagtcccag

SEQ ID NO: 78788 - DNA, 20 bp, synthetic construct
  source 1..20: mol_type = other DNA
ggcgggcgcttgtagtccca

SEQ ID NO: 78789 - DNA, 20 bp, synthetic construct
  source 1..20: mol_type = other DNA
tggcgggcgcttgtagtccc

SEQ ID NO: 78790 - DNA, 20 bp, synthetic construct
  source 1..20: mol_type = other DNA
gtggcgggcgcttgtagtcc

SEQ ID NO: 78791 - DNA, 20 bp, synthetic construct
  source 1..20: mol_type = other DNA
ggtggcgggcgcttgtagtc

SEQ ID NO: 78792 - DNA, 20 bp, synthetic construct
  source 1..20: mol_type = other DNA
tggtggcgggcgcttgtagt

SEQ ID NO: 78793 - DNA, 20 bp, synthetic construct
  source 1..20: mol_type = other DNA
gtggtggcgggcgcttgtag

SEQ ID NO: 78794 - DNA, 20 bp, synthetic construct
  source 1..20: mol_type = other DNA
tgtggtggcgggcgcttgta

SEQ ID NO: 78795 - DNA, 20 bp, synthetic construct
  source 1..20: mol_type = other DNA
atgtggtggcgggcgcttgt

SEQ ID NO: 78796 - DNA, 20 bp, synthetic construct
  source 1..20: mol_type = other DNA
gatgtggtggcgggcgcttg

SEQ ID NO: 78797 - DNA, 20 bp, synthetic construct
  source 1..20: mol_type = other DNA
agatgtggtggcgggcgctt

SEQ ID NO: 78798 - DNA, 20 bp, synthetic construct
  source 1..20: mol_type = other DNA
cagatgtggtggcgggcgct

SEQ ID NO: 78799 - DNA, 20 bp, synthetic construct
  source 1..20: mol_type = other DNA
ccagatgtggtggcgggcgc

SEQ ID NO: 78800 - DNA, 20 bp, synthetic construct
  source 1..20: mol_type = other DNA
gccagatgtggtggcgggcg

SEQ ID NO: 78801 - DNA, 20 bp, synthetic construct
  source 1..20: mol_type = other DNA
agccagatgtggtggcgggc

SEQ ID NO: 78802 - DNA, 20 bp, synthetic construct
  source 1..20: mol_type = other DNA
tagccagatgtggtggcggg

SEQ ID NO: 78803 - DNA, 20 bp, synthetic construct
  source 1..20: mol_type = other DNA
ttagccagatgtggtggcgg

SEQ ID NO: 78804 - DNA, 20 bp, synthetic construct
  source 1..20: mol_type = other DNA
attagccagatgtggtggcg

SEQ ID NO: 78805 - DNA, 20 bp, synthetic construct
  source 1..20: mol_type = other DNA
aattagccagatgtggtggc

SEQ ID NO: 78806 - DNA, 20 bp, synthetic construct
  source 1..20: mol_type = other DNA
aaattagccagatgtggtgg

SEQ ID NO: 78807 - DNA, 20 bp, synthetic construct
  source 1..20: mol_type = other DNA
aaaattagccagatgtggtg

SEQ ID NO: 78808 - DNA, 20 bp, synthetic construct
  source 1..20: mol_type = other DNA
aaaaattagccagatgtggt

SEQ ID NO: 78809 - DNA, 20 bp, synthetic construct
  source 1..20: mol_type = other DNA
aaaaaattagccagatgtgg

SEQ ID NO: 78810 - DNA, 20 bp, synthetic construct
  source 1..20: mol_type = other DNA
caaaaaattagccagatgtg

SEQ ID NO: 78811 - DNA, 20 bp, synthetic construct
  source 1..20: mol_type = other DNA
acaaaaaattagccagatgt

SEQ ID NO: 78812 - DNA, 20 bp, synthetic construct
  source 1..20: mol_type = other DNA
tacaaaaaattagccagatg

SEQ ID NO: 78813 - DNA, 20 bp, synthetic construct
  source 1..20: mol_type = other DNA
atacaaaaaattagccagat

SEQ ID NO: 78814 - DNA, 20 bp, synthetic construct
  source 1..20: mol_type = other DNA
aatacaaaaaattagccaga

SEQ ID NO: 78815 - DNA, 20 bp, synthetic construct
  source 1..20: mol_type = other DNA
aaatacaaaaaattagccag

SEQ ID NO: 78816 - DNA, 20 bp, synthetic construct
  source 1..20: mol_type = other DNA
aaaatacaaaaaattagcca

SEQ ID NO: 78817 - DNA, 20 bp, synthetic construct
  source 1..20: mol_type = other DNA
aaaaatacaaaaaattagcc

SEQ ID NO: 78818 - DNA, 20 bp, synthetic construct
  source 1..20: mol_type = other DNA
taaaaatacaaaaaattagc

SEQ ID NO: 78819 - DNA, 20 bp, synthetic construct
  source 1..20: mol_type = other DNA
ctaaaaatacaaaaaattag

SEQ ID NO: 78820 - DNA, 20 bp, synthetic construct
  source 1..20: mol_type = other DNA
actaaaaatacaaaaaatta

SEQ ID NO: 78821 - DNA, 20 bp, synthetic construct
  source 1..20: mol_type = other DNA
tactaaaaatacaaaaaatt

SEQ ID NO: 78822 - DNA, 20 bp, synthetic construct
  source 1..20: mol_type = other DNA
ctactaaaaatacaaaaaat

SEQ ID NO: 78823 - DNA, 20 bp, synthetic construct
  source 1..20: mol_type = other DNA
tctactaaaaatacaaaaaa

SEQ ID NO: 78824 - DNA, 20 bp, synthetic construct
  source 1..20: mol_type = other DNA
ctctactaaaaatacaaaaa

SEQ ID NO: 78825 - DNA, 20 bp, synthetic construct
  source 1..20: mol_type = other DNA
tctctactaaaaatacaaaa

SEQ ID NO: 78826 - DNA, 20 bp, synthetic construct
  source 1..20: mol_type = other DNA
gtctctactaaaaatacaaa

SEQ ID NO: 78827 - DNA, 20 bp, synthetic construct
  source 1..20: mol_type = other DNA
tgtctctactaaaaatacaa

SEQ ID NO: 78828 - DNA, 20 bp, synthetic construct
  source 1..20: mol_type = other DNA
ctgtctctactaaaaataca

SEQ ID NO: 78829 - DNA, 20 bp, synthetic construct
  source 1..20: mol_type = other DNA
cctgtctctactaaaaatac

SEQ ID NO: 78830 - DNA, 20 bp, synthetic construct
  source 1..20: mol_type = other DNA
ccctgtctctactaaaaata

SEQ ID NO: 78831 - DNA, 20 bp, synthetic construct
  source 1..20: mol_type = other DNA
accctgtctctactaaaaat

SEQ ID NO: 78832 - DNA, 20 bp, synthetic construct
  source 1..20: mol_type = other DNA
aaccctgtctctactaaaaa

SEQ ID NO: 78833 - DNA, 20 bp, synthetic construct
  source 1..20: mol_type = other DNA
aaaccctgtctctactaaaa

SEQ ID NO: 78834 - DNA, 20 bp, synthetic construct
  source 1..20: mol_type = other DNA
gaaaccctgtctctactaaa

SEQ ID NO: 78835 - DNA, 20 bp, synthetic construct
  source 1..20: mol_type = other DNA
tgaaaccctgtctctactaa

SEQ ID NO: 78836 - DNA, 20 bp, synthetic construct
  source 1..20: mol_type = other DNA
ttgaaaccctgtctctacta

SEQ ID NO: 78837 - DNA, 20 bp, synthetic construct
  source 1..20: mol_type = other DNA
gttgaaaccctgtctctact

SEQ ID NO: 78838 - DNA, 20 bp, synthetic construct
  source 1..20: mol_type = other DNA
tgttgaaaccctgtctctac

SEQ ID NO: 78839 - DNA, 20 bp, synthetic construct
  source 1..20: mol_type = other DNA
atgttgaaaccctgtctcta

SEQ ID NO: 78840 - DNA, 20 bp, synthetic construct
  source 1..20: mol_type = other DNA
catgttgaaaccctgtctct

SEQ ID NO: 78841 - DNA, 20 bp, synthetic construct
  source 1..20: mol_type = other DNA
acatgttgaaaccctgtctc

SEQ ID NO: 78842 - DNA, 20 bp, synthetic construct
  source 1..20: mol_type = other DNA
aacatgttgaaaccctgtct

SEQ ID NO: 78843 - DNA, 20 bp, synthetic construct
  source 1..20: mol_type = other DNA
caacatgttgaaaccctgtc

SEQ ID NO: 78844 - DNA, 20 bp, synthetic construct
  source 1..20: mol_type = other DNA
ccaacatgttgaaaccctgt

SEQ ID NO: 78845 - DNA, 20 bp, synthetic construct
  source 1..20: mol_type = other DNA
gccaacatgttgaaaccctg

SEQ ID NO: 78846 - DNA, 20 bp, synthetic construct
  source 1..20: mol_type = other DNA
ggccaacatgttgaaaccct

SEQ ID NO: 78847 - DNA, 20 bp, synthetic construct
  source 1..20: mol_type = other DNA
tggccaacatgttgaaaccc

SEQ ID NO: 78848 - DNA, 20 bp, synthetic construct
  source 1..20: mol_type = other DNA
ctggccaacatgttgaaacc

SEQ ID NO: 78849 - DNA, 20 bp, synthetic construct
  source 1..20: mol_type = other DNA
cctggccaacatgttgaaac

SEQ ID NO: 78850 - DNA, 20 bp, synthetic construct
  source 1..20: mol_type = other DNA
gcctggccaacatgttgaaa

SEQ ID NO: 78851 - DNA, 20 bp, synthetic construct
  source 1..20: mol_type = other DNA
agcctggccaacatgttgaa

SEQ ID NO: 78852 - DNA, 20 bp, synthetic construct
  source 1..20: mol_type = other DNA
cagcctggccaacatgttga

SEQ ID NO: 78853 - DNA, 20 bp, synthetic construct
  source 1..20: mol_type = other DNA
ccagcctggccaacatgttg

SEQ ID NO: 78854 - DNA, 20 bp, synthetic construct
  source 1..20: mol_type = other DNA
accagcctggccaacatgtt

SEQ ID NO: 78855 - DNA, 20 bp, synthetic construct
  source 1..20: mol_type = other DNA
gaccagcctggccaacatgt

SEQ ID NO: 78856 - DNA, 20 bp, synthetic construct
  source 1..20: mol_type = other DNA
ggaccagcctggccaacatg

SEQ ID NO: 78857 - DNA, 20 bp, synthetic construct
  source 1..20: mol_type = other DNA
gggaccagcctggccaacat

SEQ ID NO: 78858 - DNA, 20 bp, synthetic construct
  source 1..20: mol_type = other DNA
cgggaccagcctggccaaca

SEQ ID NO: 78859 - DNA, 20 bp, synthetic construct
  source 1..20: mol_type = other DNA
tcgggaccagcctggccaac

SEQ ID NO: 78860 - DNA, 20 bp, synthetic construct
  source 1..20: mol_type = other DNA
ttcgggaccagcctggccaa

SEQ ID NO: 78861 - DNA, 20 bp, synthetic construct
  source 1..20: mol_type = other DNA
gttcgggaccagcctggcca

SEQ ID NO: 78862 - DNA, 20 bp, synthetic construct
  source 1..20: mol_type = other DNA
agttcgggaccagcctggcc

SEQ ID NO: 78863 - DNA, 20 bp, synthetic construct
  source 1..20: mol_type = other DNA
gagttcgggaccagcctggc

SEQ ID NO: 78864 - DNA, 20 bp, synthetic construct
  source 1..20: mol_type = other DNA
ggagttcgggaccagcctgg

SEQ ID NO: 78865 - DNA, 20 bp, synthetic construct
  source 1..20: mol_type = other DNA
aggagttcgggaccagcctg

SEQ ID NO: 78866 - DNA, 20 bp, synthetic construct
  source 1..20: mol_type = other DNA
taggagttcgggaccagcct

SEQ ID NO: 78867 - DNA, 20 bp, synthetic construct
  source 1..20: mol_type = other DNA
ttaggagttcgggaccagcc

SEQ ID NO: 78868 - DNA, 20 bp, synthetic construct
  source 1..20: mol_type = other DNA
attaggagttcgggaccagc

SEQ ID NO: 78869 - DNA, 20 bp, synthetic construct
  source 1..20: mol_type = other DNA
gattaggagttcgggaccag

SEQ ID NO: 78870 - DNA, 20 bp, synthetic construct
  source 1..20: mol_type = other DNA
agattaggagttcgggacca

SEQ ID NO: 78871 - DNA, 20 bp, synthetic construct
  source 1..20: mol_type = other DNA
gagattaggagttcgggacc

SEQ ID NO: 78872 - DNA, 20 bp, synthetic construct
  source 1..20: mol_type = other DNA
tgagattaggagttcgggac

SEQ ID NO: 78873 - DNA, 20 bp, synthetic construct
  source 1..20: mol_type = other DNA
ctgagattaggagttcggga

SEQ ID NO: 78874 - DNA, 20 bp, synthetic construct
  source 1..20: mol_type = other DNA
cctgagattaggagttcggg

SEQ ID NO: 78875 - DNA, 20 bp, synthetic construct
  source 1..20: mol_type = other DNA
acctgagattaggagttcgg

SEQ ID NO: 78876 - DNA, 20 bp, synthetic construct
  source 1..20: mol_type = other DNA
cacctgagattaggagttcg

SEQ ID NO: 78877 - DNA, 20 bp, synthetic construct
  source 1..20: mol_type = other DNA
tcacctgagattaggagttc

SEQ ID NO: 78878 - DNA, 20 bp, synthetic construct
  source 1..20: mol_type = other DNA
atcacctgagattaggagtt

SEQ ID NO: 78879 - DNA, 20 bp, synthetic construct
  source 1..20: mol_type = other DNA
gatcacctgagattaggagt

SEQ ID NO: 78880 - DNA, 20 bp, synthetic construct
  source 1..20: mol_type = other DNA
ggatcacctgagattaggag

SEQ ID NO: 78881 - DNA, 20 bp, synthetic construct
  source 1..20: mol_type = other DNA
tggatcacctgagattagga

SEQ ID NO: 78882 - DNA, 20 bp, synthetic construct
  source 1..20: mol_type = other DNA
gtggatcacctgagattagg

SEQ ID NO: 78883 - DNA, 20 bp, synthetic construct
  source 1..20: mol_type = other DNA
ggtggatcacctgagattag

SEQ ID NO: 78884 - DNA, 20 bp, synthetic construct
  source 1..20: mol_type = other DNA
gggtggatcacctgagatta

SEQ ID NO: 78885 - DNA, 20 bp, synthetic construct
  source 1..20: mol_type = other DNA
tgggtggatcacctgagatt

SEQ ID NO: 78886 - DNA, 20 bp, synthetic construct
  source 1..20: mol_type = other DNA
gtgggtggatcacctgagat

SEQ ID NO: 78887 - DNA, 20 bp, synthetic construct
  source 1..20: mol_type = other DNA
ggtgggtggatcacctgaga

SEQ ID NO: 78888 - DNA, 20 bp, synthetic construct
  source 1..20: mol_type = other DNA
aggtgggtggatcacctgag

SEQ ID NO: 78889 - DNA, 20 bp, synthetic construct
  source 1..20: mol_type = other DNA
aaggtgggtggatcacctga

SEQ ID NO: 78890 - DNA, 20 bp, synthetic construct
  source 1..20: mol_type = other DNA
caaggtgggtggatcacctg

SEQ ID NO: 78891 - DNA, 20 bp, synthetic construct
  source 1..20: mol_type = other DNA
ccaaggtgggtggatcacct

SEQ ID NO: 78892 - DNA, 20 bp, synthetic construct
  source 1..20: mol_type = other DNA
gccaaggtgggtggatcacc

SEQ ID NO: 78893 - DNA, 20 bp, synthetic construct
  source 1..20: mol_type = other DNA
ggccaaggtgggtggatcac

SEQ ID NO: 78894 - DNA, 20 bp, synthetic construct
  source 1..20: mol_type = other DNA
aggccaaggtgggtggatca

SEQ ID NO: 78895 - DNA, 20 bp, synthetic construct
  source 1..20: mol_type = other DNA
gaggccaaggtgggtggatc

SEQ ID NO: 78896 - DNA, 20 bp, synthetic construct
  source 1..20: mol_type = other DNA
agaggccaaggtgggtggat

SEQ ID NO: 78897 - DNA, 20 bp, synthetic construct
  source 1..20: mol_type = other DNA
gagaggccaaggtgggtgga

SEQ ID NO: 78898 - DNA, 20 bp, synthetic construct
  source 1..20: mol_type = other DNA
tgagaggccaaggtgggtgg

SEQ ID NO: 78899 - DNA, 20 bp, synthetic construct
  source 1..20: mol_type = other DNA
ttgagaggccaaggtgggtg

SEQ ID NO: 78900 - DNA, 20 bp, synthetic construct
  source 1..20: mol_type = other DNA
tttgagaggccaaggtgggt

SEQ ID NO: 78901 - DNA, 20 bp, synthetic construct
  source 1..20: mol_type = other DNA
ctttgagaggccaaggtggg

SEQ ID NO: 78902 - DNA, 20 bp, synthetic construct
  source 1..20: mol_type = other DNA
actttgagaggccaaggtgg

SEQ ID NO: 78903 - DNA, 20 bp, synthetic construct
  source 1..20: mol_type = other DNA
cactttgagaggccaaggtg

SEQ ID NO: 78904 - DNA, 20 bp, synthetic construct
  source 1..20: mol_type = other DNA
gcactttgagaggccaaggt

SEQ ID NO: 78905 - DNA, 20 bp, synthetic construct
  source 1..20: mol_type = other DNA
agcactttgagaggccaagg

SEQ ID NO: 78906 - DNA, 20 bp, synthetic construct
  source 1..20: mol_type = other DNA
cagcactttgagaggccaag

SEQ ID NO: 78907 - DNA, 20 bp, synthetic construct
  source 1..20: mol_type = other DNA
ccagcactttgagaggccaa

SEQ ID NO: 78908 - DNA, 20 bp, synthetic construct
  source 1..20: mol_type = other DNA
cccagcactttgagaggcca

SEQ ID NO: 78909 - DNA, 20 bp, synthetic construct
  source 1..20: mol_type = other DNA
tcccagcactttgagaggcc

SEQ ID NO: 78910 - DNA, 20 bp, synthetic construct
  source 1..20: mol_type = other DNA
atcccagcactttgagaggc

SEQ ID NO: 78911 - DNA, 20 bp, synthetic construct
  source 1..20: mol_type = other DNA
aatcccagcactttgagagg

SEQ ID NO: 78912 - DNA, 20 bp, synthetic construct
  source 1..20: mol_type = other DNA
taatcccagcactttgagag

SEQ ID NO: 78913 - DNA, 20 bp, synthetic construct
  source 1..20: mol_type = other DNA
gtaatcccagcactttgaga

SEQ ID NO: 78914 - DNA, 20 bp, synthetic construct
  source 1..20: mol_type = other DNA
tgtaatcccagcactttgag

SEQ ID NO: 78915 - DNA, 20 bp, synthetic construct
  source 1..20: mol_type = other DNA
ctgtaatcccagcactttga

SEQ ID NO: 78916 - DNA, 20 bp, synthetic construct
  source 1..20: mol_type = other DNA
cctgtaatcccagcactttg

SEQ ID NO: 78917 - DNA, 20 bp, synthetic construct
  source 1..20: mol_type = other DNA
gcctgtaatcccagcacttt

SEQ ID NO: 78918 - DNA, 20 bp, synthetic construct
  source 1..20: mol_type = other DNA
tgcctgtaatcccagcactt

SEQ ID NO: 78919 - DNA, 20 bp, synthetic construct
  source 1..20: mol_type = other DNA
atgcctgtaatcccagcact

SEQ ID NO: 78920 - DNA, 20 bp, synthetic construct
  source 1..20: mol_type = other DNA
catgcctgtaatcccagcac

SEQ ID NO: 78921 - DNA, 20 bp, synthetic construct
  source 1..20: mol_type = other DNA
tcatgcctgtaatcccagca

SEQ ID NO: 78922 - DNA, 20 bp, synthetic construct
  source 1..20: mol_type = other DNA
ctcatgcctgtaatcccagc

SEQ ID NO: 78923 - DNA, 20 bp, synthetic construct
  source 1..20: mol_type = other DNA
gctcatgcctgtaatcccag

SEQ ID NO: 78924 - DNA, 20 bp, synthetic construct
  source 1..20: mol_type = other DNA
ggctcatgcctgtaatccca

SEQ ID NO: 78925 - DNA, 20 bp, synthetic construct
  source 1..20: mol_type = other DNA
tggctcatgcctgtaatccc

SEQ ID NO: 78926 - DNA, 20 bp, synthetic construct
  source 1..20: mol_type = other DNA
gtggctcatgcctgtaatcc

SEQ ID NO: 78927 - DNA, 20 bp, synthetic construct
  source 1..20: mol_type = other DNA
agtggctcatgcctgtaatc

SEQ ID NO: 78928 - DNA, 20 bp, synthetic construct
  source 1..20: mol_type = other DNA
cagtggctcatgcctgtaat

SEQ ID NO: 78929 - DNA, 20 bp, synthetic construct
  source 1..20: mol_type = other DNA
gcagtggctcatgcctgtaa

SEQ ID NO: 78930 - DNA, 20 bp, synthetic construct
  source 1..20: mol_type = other DNA
cgcagtggctcatgcctgta

SEQ ID NO: 78931 - DNA, 20 bp, synthetic construct
  source 1..20: mol_type = other DNA
gcgcagtggctcatgcctgt

SEQ ID NO: 78932 - DNA, 20 bp, synthetic construct
  source 1..20: mol_type = other DNA
ggcgcagtggctcatgcctg

SEQ ID NO: 78933 - DNA, 20 bp, synthetic construct
  source 1..20: mol_type = other DNA
gggcgcagtggctcatgcct

SEQ ID NO: 78934 - DNA, 20 bp, synthetic construct
  source 1..20: mol_type = other DNA
cgggcgcagtggctcatgcc

SEQ ID NO: 78935 - DNA, 20 bp, synthetic construct
  source 1..20: mol_type = other DNA
ccgggcgcagtggctcatgc

SEQ ID NO: 78936 - DNA, 20 bp, synthetic construct
  source 1..20: mol_type = other DNA
gccgggcgcagtggctcatg

SEQ ID NO: 78937 - DNA, 20 bp, synthetic construct
  source 1..20: mol_type = other DNA
agccgggcgcagtggctcat

SEQ ID NO: 78938 - DNA, 20 bp, synthetic construct
  source 1..20: mol_type = other DNA
cagccgggcgcagtggctca

SEQ ID NO: 78939 - DNA, 20 bp, synthetic construct
  source 1..20: mol_type = other DNA
tcagccgggcgcagtggctc

SEQ ID NO: 78940 - DNA, 20 bp, synthetic construct
  source 1..20: mol_type = other DNA
ttcagccgggcgcagtggct

SEQ ID NO: 78941 - DNA, 20 bp, synthetic construct
  source 1..20: mol_type = other DNA
tttcagccgggcgcagtggc

SEQ ID NO: 78942 - DNA, 20 bp, synthetic construct
  source 1..20: mol_type = other DNA
gtttcagccgggcgcagtgg

SEQ ID NO: 78943 - DNA, 20 bp, synthetic construct
  source 1..20: mol_type = other DNA
agtttcagccgggcgcagtg

SEQ ID NO: 78944 - DNA, 20 bp, synthetic construct
  source 1..20: mol_type = other DNA
gagtttcagccgggcgcagt

SEQ ID NO: 78945 - DNA, 20 bp, synthetic construct
  source 1..20: mol_type = other DNA
agagtttcagccgggcgcag

SEQ ID NO: 78946 - DNA, 20 bp, synthetic construct
  source 1..20: mol_type = other DNA
aagagtttcagccgggcgca

SEQ ID NO: 78947 - DNA, 20 bp, synthetic construct
  source 1..20: mol_type = other DNA
aaagagtttcagccgggcgc

SEQ ID NO: 78948 - DNA, 20 bp, synthetic construct
  source 1..20: mol_type = other DNA
aaaagagtttcagccgggcg

SEQ ID NO: 78949 - DNA, 20 bp, synthetic construct
  source 1..20: mol_type = other DNA
aaaaagagtttcagccgggc

SEQ ID NO: 78950 - DNA, 20 bp, synthetic construct
  source 1..20: mol_type = other DNA
aaaaaagagtttcagccggg

SEQ ID NO: 78951 - DNA, 20 bp, synthetic construct
  source 1..20: mol_type = other DNA
aaaaaaagagtttcagccgg

SEQ ID NO: 78952 - DNA, 20 bp, synthetic construct
  source 1..20: mol_type = other DNA
aaaaaaaagagtttcagccg

SEQ ID NO: 78953 - DNA, 20 bp, synthetic construct
  source 1..20: mol_type = other DNA
aaaaaaaaagagtttcagcc

SEQ ID NO: 78954 - DNA, 20 bp, synthetic construct
  source 1..20: mol_type = other DNA
gaaaaaaaaagagtttcagc

SEQ ID NO: 78955 - DNA, 20 bp, synthetic construct
  source 1..20: mol_type = other DNA
agaaaaaaaaagagtttcag

SEQ ID NO: 78956 - DNA, 20 bp, synthetic construct
  source 1..20: mol_type = other DNA
aagaaaaaaaaagagtttca

SEQ ID NO: 78957 - DNA, 20 bp, synthetic construct
  source 1..20: mol_type = other DNA
aaagaaaaaaaaagagtttc

SEQ ID NO: 78958 - DNA, 20 bp, synthetic construct
  source 1..20: mol_type = other DNA
aaaagaaaaaaaaagagttt

SEQ ID NO: 78959 - DNA, 20 bp, synthetic construct
  source 1..20: mol_type = other DNA
taaaagaaaaaaaaagagtt

SEQ ID NO: 78960 - DNA, 20 bp, synthetic construct
  source 1..20: mol_type = other DNA
ttaaaagaaaaaaaaagagt

SEQ ID NO: 78961 - DNA, 20 bp, synthetic construct
  source 1..20: mol_type = other DNA
cttaaaagaaaaaaaaagag

SEQ ID NO: 78962 - DNA, 20 bp, synthetic construct
  source 1..20: mol_type = other DNA
tcttaaaagaaaaaaaaaga

SEQ ID NO: 78963 - DNA, 20 bp, synthetic construct
  source 1..20: mol_type = other DNA
atcttaaaagaaaaaaaaag

SEQ ID NO: 78964 - DNA, 20 bp, synthetic construct
  source 1..20: mol_type = other DNA
catcttaaaagaaaaaaaaa

SEQ ID NO: 78965 - DNA, 20 bp, synthetic construct
  source 1..20: mol_type = other DNA
ccatcttaaaagaaaaaaaa

SEQ ID NO: 78966 - DNA, 20 bp, synthetic construct
  source 1..20: mol_type = other DNA
tccatcttaaaagaaaaaaa

SEQ ID NO: 78967 - DNA, 20 bp, synthetic construct
  source 1..20: mol_type = other DNA
ctccatcttaaaagaaaaaa

SEQ ID NO: 78968 - DNA, 20 bp, synthetic construct
  source 1..20: mol_type = other DNA
actccatcttaaaagaaaaa

SEQ ID NO: 78969 - DNA, 20 bp, synthetic construct
  source 1..20: mol_type = other DNA
gactccatcttaaaagaaaa

SEQ ID NO: 78970 - DNA, 20 bp, synthetic construct
  source 1..20: mol_type = other DNA
agactccatcttaaaagaaa

SEQ ID NO: 78971 - DNA, 20 bp, synthetic construct
  source 1..20: mol_type = other DNA
gagactccatcttaaaagaa

SEQ ID NO: 78972 - DNA, 20 bp, synthetic construct
  source 1..20: mol_type = other DNA
cgagactccatcttaaaaga

SEQ ID NO: 78973 - DNA, 20 bp, synthetic construct
  source 1..20: mol_type = other DNA
gcgagactccatcttaaaag

SEQ ID NO: 78974 - DNA, 20 bp, synthetic construct
  source 1..20: mol_type = other DNA
agcgagactccatcttaaaa

SEQ ID NO: 78975 - DNA, 20 bp, synthetic construct
  source 1..20: mol_type = other DNA
gagcgagactccatcttaaa

SEQ ID NO: 78976 - DNA, 20 bp, synthetic construct
  source 1..20: mol_type = other DNA
agagcgagactccatcttaa

SEQ ID NO: 78977 - DNA, 20 bp, synthetic construct
  source 1..20: mol_type = other DNA
cagagcgagactccatctta

SEQ ID NO: 78978 - DNA, 20 bp, synthetic construct
  source 1..20: mol_type = other DNA
acagagcgagactccatctt

SEQ ID NO: 78979 - DNA, 20 bp, synthetic construct
  source 1..20: mol_type = other DNA
gacagagcgagactccatct

SEQ ID NO: 78980 - DNA, 20 bp, synthetic construct
  source 1..20: mol_type = other DNA
cgacagagcgagactccatc

SEQ ID NO: 78981 - DNA, 20 bp, synthetic construct
  source 1..20: mol_type = other DNA
gcgacagagcgagactccat

SEQ ID NO: 78982 - DNA, 20 bp, synthetic construct
  source 1..20: mol_type = other DNA
ggcgacagagcgagactcca

SEQ ID NO: 78983 - DNA, 20 bp, synthetic construct
  source 1..20: mol_type = other DNA
gggcgacagagcgagactcc

SEQ ID NO: 78984 - DNA, 20 bp, synthetic construct
  source 1..20: mol_type = other DNA
tgggcgacagagcgagactc

SEQ ID NO: 78985 - DNA, 20 bp, synthetic construct
  source 1..20: mol_type = other DNA
ctgggcgacagagcgagact

SEQ ID NO: 78986 - DNA, 20 bp, synthetic construct
  source 1..20: mol_type = other DNA
tctgggcgacagagcgagac

SEQ ID NO: 78987 - DNA, 20 bp, synthetic construct
  source 1..20: mol_type = other DNA
gtctgggcgacagagcgaga

SEQ ID NO: 78988 - DNA, 20 bp, synthetic construct
  source 1..20: mol_type = other DNA
agtctgggcgacagagcgag

SEQ ID NO: 78989 - DNA, 20 bp, synthetic construct
  source 1..20: mol_type = other DNA
aagtctgggcgacagagcga

SEQ ID NO: 78990 - DNA, 20 bp, synthetic construct
  source 1..20: mol_type = other DNA
caagtctgggcgacagagcg

SEQ ID NO: 78991 - DNA, 20 bp, synthetic construct
  source 1..20: mol_type = other DNA
tcaagtctgggcgacagagc

SEQ ID NO: 78992 - DNA, 20 bp, synthetic construct
  source 1..20: mol_type = other DNA
ctcaagtctgggcgacagag

SEQ ID NO: 78993 - DNA, 20 bp, synthetic construct
  source 1..20: mol_type = other DNA
actcaagtctgggcgacaga

SEQ ID NO: 78994 - DNA, 20 bp, synthetic construct
  source 1..20: mol_type = other DNA
cactcaagtctgggcgacag

SEQ ID NO: 78995 - DNA, 20 bp, synthetic construct
  source 1..20: mol_type = other DNA
gcactcaagtctgggcgaca

SEQ ID NO: 78996 - DNA, 20 bp, synthetic construct
  source 1..20: mol_type = other DNA
tgcactcaagtctgggcgac

SEQ ID NO: 78997 - DNA, 20 bp, synthetic construct
  source 1..20: mol_type = other DNA
ctgcactcaagtctgggcga

SEQ ID NO: 78998 - DNA, 20 bp, synthetic construct
  source 1..20: mol_type = other DNA
actgcactcaagtctgggcg

SEQ ID NO: 78999 - DNA, 20 bp, synthetic construct
  source 1..20: mol_type = other DNA
cactgcactcaagtctgggc

SEQ ID NO: 79000 - DNA, 20 bp, synthetic construct
  source 1..20: mol_type = other DNA
ccactgcactcaagtctggg

SEQ ID NO: 79001 - DNA, 20 bp, synthetic construct
  source 1..20: mol_type = other DNA
accactgcactcaagtctgg

SEQ ID NO: 79002 - DNA, 20 bp, synthetic construct
  source 1..20: mol_type = other DNA
caccactgcactcaagtctg

SEQ ID NO: 79003 - DNA, 20 bp, synthetic construct
  source 1..20: mol_type = other DNA
acaccactgcactcaagtct

SEQ ID NO: 79004 - DNA, 20 bp, synthetic construct
  source 1..20: mol_type = other DNA
cacaccactgcactcaagtc

SEQ ID NO: 79005 - DNA, 20 bp, synthetic construct
  source 1..20: mol_type = other DNA
tcacaccactgcactcaagt

SEQ ID NO: 79006 - DNA, 20 bp, synthetic construct
  source 1..20: mol_type = other DNA
atcacaccactgcactcaag

SEQ ID NO: 79007 - DNA, 20 bp, synthetic construct
  source 1..20: mol_type = other DNA
gatcacaccactgcactcaa

SEQ ID NO: 79008 - DNA, 20 bp, synthetic construct
  source 1..20: mol_type = other DNA
agatcacaccactgcactca

SEQ ID NO: 79009 - DNA, 20 bp, synthetic construct
  source 1..20: mol_type = other DNA
gagatcacaccactgcactc

SEQ ID NO: 79010 - DNA, 20 bp, synthetic construct
  source 1..20: mol_type = other DNA
tgagatcacaccactgcact

SEQ ID NO: 79011 - DNA, 20 bp, synthetic construct
  source 1..20: mol_type = other DNA
ctgagatcacaccactgcac

SEQ ID NO: 79012 - DNA, 20 bp, synthetic construct
  source 1..20: mol_type = other DNA
gctgagatcacaccactgca

SEQ ID NO: 79013 - DNA, 20 bp, synthetic construct
  source 1..20: mol_type = other DNA
agctgagatcacaccactgc

SEQ ID NO: 79014 - DNA, 20 bp, synthetic construct
  source 1..20: mol_type = other DNA
gagctgagatcacaccactg

SEQ ID NO: 79015 - DNA, 20 bp, synthetic construct
  source 1..20: mol_type = other DNA
tgagctgagatcacaccact

SEQ ID NO: 79016 - DNA, 20 bp, synthetic construct
  source 1..20: mol_type = other DNA
gtgagctgagatcacaccac

SEQ ID NO: 79017 - DNA, 20 bp, synthetic construct
  source 1..20: mol_type = other DNA
agtgagctgagatcacacca

SEQ ID NO: 79018 - DNA, 20 bp, synthetic construct
  source 1..20: mol_type = other DNA
cagtgagctgagatcacacc

SEQ ID NO: 79019 - DNA, 20 bp, synthetic construct
  source 1..20: mol_type = other DNA
gcagtgagctgagatcacac

SEQ ID NO: 79020 - DNA, 20 bp, synthetic construct
  source 1..20: mol_type = other DNA
tgcagtgagctgagatcaca

SEQ ID NO: 79021 - DNA, 20 bp, synthetic construct
  source 1..20: mol_type = other DNA
ttgcagtgagctgagatcac

SEQ ID NO: 79022 - DNA, 20 bp, synthetic construct
  source 1..20: mol_type = other DNA
cttgcagtgagctgagatca

SEQ ID NO: 79023 - DNA, 20 bp, synthetic construct
  source 1..20: mol_type = other DNA
gcttgcagtgagctgagatc

SEQ ID NO: 79024 - DNA, 20 bp, synthetic construct
  source 1..20: mol_type = other DNA
agcttgcagtgagctgagat

SEQ ID NO: 79025 - DNA, 20 bp, synthetic construct
  source 1..20: mol_type = other DNA
gagcttgcagtgagctgaga

SEQ ID NO: 79026 - DNA, 20 bp, synthetic construct
  source 1..20: mol_type = other DNA
agagcttgcagtgagctgag

SEQ ID NO: 79027 - DNA, 20 bp, synthetic construct
  source 1..20: mol_type = other DNA
cagagcttgcagtgagctga

SEQ ID NO: 79028 - DNA, 20 bp, synthetic construct
  source 1..20: mol_type = other DNA
gcagagcttgcagtgagctg

SEQ ID NO: 79029 - DNA, 20 bp, synthetic construct
  source 1..20: mol_type = other DNA
ggcagagcttgcagtgagct

SEQ ID NO: 79030 - DNA, 20 bp, synthetic construct
  source 1..20: mol_type = other DNA
aggcagagcttgcagtgagc

SEQ ID NO: 79031 - DNA, 20 bp, synthetic construct
  source 1..20: mol_type = other DNA
gaggcagagcttgcagtgag

SEQ ID NO: 79032 - DNA, 20 bp, synthetic construct
  source 1..20: mol_type = other DNA
ggaggcagagcttgcagtga

SEQ ID NO: 79033 - DNA, 20 bp, synthetic construct
  source 1..20: mol_type = other DNA
gggaggcagagcttgcagtg

SEQ ID NO: 79034 - DNA, 20 bp, synthetic construct
  source 1..20: mol_type = other DNA
cgggaggcagagcttgcagt

SEQ ID NO: 79035 - DNA, 20 bp, synthetic construct
  source 1..20: mol_type = other DNA
ccgggaggcagagcttgcag

SEQ ID NO: 79036 - DNA, 20 bp, synthetic construct
  source 1..20: mol_type = other DNA
cccgggaggcagagcttgca

SEQ ID NO: 79037 - DNA, 20 bp, synthetic construct
  source 1..20: mol_type = other DNA
acccgggaggcagagcttgc

SEQ ID NO: 79038 - DNA, 20 bp, synthetic construct
  source 1..20: mol_type = other DNA
aacccgggaggcagagcttg

SEQ ID NO: 79039 - DNA, 20 bp, synthetic construct
  source 1..20: mol_type = other DNA
gaacccgggaggcagagctt

SEQ ID NO: 79040 - DNA, 20 bp, synthetic construct
  source 1..20: mol_type = other DNA
tgaacccgggaggcagagct

SEQ ID NO: 79041 - DNA, 20 bp, synthetic construct
  source 1..20: mol_type = other DNA
gtgaacccgggaggcagagc

SEQ ID NO: 79042 - DNA, 20 bp, synthetic construct
  source 1..20: mol_type = other DNA
tgtgaacccgggaggcagag

SEQ ID NO: 79043 - DNA, 20 bp, synthetic construct
  source 1..20: mol_type = other DNA
gtgtgaacccgggaggcaga

SEQ ID NO: 79044 - DNA, 20 bp, synthetic construct
  source 1..20: mol_type = other DNA
ggtgtgaacccgggaggcag

SEQ ID NO: 79045 - DNA, 20 bp, synthetic construct
  source 1..20: mol_type = other DNA
tggtgtgaacccgggaggca

SEQ ID NO: 79046 - DNA, 20 bp, synthetic construct
  source 1..20: mol_type = other DNA
atggtgtgaacccgggaggc

SEQ ID NO: 79047 - DNA, 20 bp, synthetic construct
  source 1..20: mol_type = other DNA
aatggtgtgaacccgggagg

SEQ ID NO: 79048 - DNA, 20 bp, synthetic construct
  source 1..20: mol_type = other DNA
gaatggtgtgaacccgggag

SEQ ID NO: 79049 - DNA, 20 bp, synthetic construct
  source 1..20: mol_type = other DNA
agaatggtgtgaacccggga

SEQ ID NO: 79050 - DNA, 20 bp, synthetic construct
  source 1..20: mol_type = other DNA
gagaatggtgtgaacccggg

SEQ ID NO: 79051 - DNA, 20 bp, synthetic construct
  source 1..20: mol_type = other DNA
ggagaatggtgtgaacccgg

SEQ ID NO: 79052 - DNA, 20 bp, synthetic construct
  source 1..20: mol_type = other DNA
aggagaatggtgtgaacccg

SEQ ID NO: 79053 - DNA, 20 bp, synthetic construct
  source 1..20: mol_type = other DNA
caggagaatggtgtgaaccc

SEQ ID NO: 79054 - DNA, 20 bp, synthetic construct
  source 1..20: mol_type = other DNA
gcaggagaatggtgtgaacc

SEQ ID NO: 79055 - DNA, 20 bp, synthetic construct
  source 1..20: mol_type = other DNA
ggcaggagaatggtgtgaac

SEQ ID NO: 79056 - DNA, 20 bp, synthetic construct
  source 1..20: mol_type = other DNA
gggcaggagaatggtgtgaa

SEQ ID NO: 79057 - DNA, 20 bp, synthetic construct
  source 1..20: mol_type = other DNA
agggcaggagaatggtgtga

SEQ ID NO: 79058 - DNA, 20 bp, synthetic construct
  source 1..20: mol_type = other DNA
tagggcaggagaatggtgtg

SEQ ID NO: 79059 - DNA, 20 bp, synthetic construct
  source 1..20: mol_type = other DNA
ctagggcaggagaatggtgt

SEQ ID NO: 79060 - DNA, 20 bp, synthetic construct
  source 1..20: mol_type = other DNA
gctagggcaggagaatggtg

SEQ ID NO: 79061 - DNA, 20 bp, synthetic construct
  source 1..20: mol_type = other DNA
ggctagggcaggagaatggt

SEQ ID NO: 79062 - DNA, 20 bp, synthetic construct
  source 1..20: mol_type = other DNA
aggctagggcaggagaatgg

SEQ ID NO: 79063 - DNA, 20 bp, synthetic construct
  source 1..20: mol_type = other DNA
gaggctagggcaggagaatg

SEQ ID NO: 79064 - DNA, 20 bp, synthetic construct
  source 1..20: mol_type = other DNA
ggaggctagggcaggagaat

SEQ ID NO: 79065 - DNA, 20 bp, synthetic construct
  source 1..20: mol_type = other DNA
gggaggctagggcaggagaa

SEQ ID NO: 79066 - DNA, 20 bp, synthetic construct
  source 1..20: mol_type = other DNA
tgggaggctagggcaggaga

SEQ ID NO: 79067 - DNA, 20 bp, synthetic construct
  source 1..20: mol_type = other DNA
ttgggaggctagggcaggag

SEQ ID NO: 79068 - DNA, 20 bp, synthetic construct
  source 1..20: mol_type = other DNA
cttgggaggctagggcagga

SEQ ID NO: 79069 - DNA, 20 bp, synthetic construct
  source 1..20: mol_type = other DNA
acttgggaggctagggcagg

SEQ ID NO: 79070 - DNA, 20 bp, synthetic construct
  source 1..20: mol_type = other DNA
tacttgggaggctagggcag

SEQ ID NO: 79071 - DNA, 20 bp, synthetic construct
  source 1..20: mol_type = other DNA
ctacttgggaggctagggca

SEQ ID NO: 79072 - DNA, 20 bp, synthetic construct
  source 1..20: mol_type = other DNA
gctacttgggaggctagggc

SEQ ID NO: 79073 - DNA, 20 bp, synthetic construct
  source 1..20: mol_type = other DNA
agctacttgggaggctaggg

SEQ ID NO: 79074 - DNA, 20 bp, synthetic construct
  source 1..20: mol_type = other DNA
cagctacttgggaggctagg

SEQ ID NO: 79075 - DNA, 20 bp, synthetic construct
  source 1..20: mol_type = other DNA
ccagctacttgggaggctag

SEQ ID NO: 79076 - DNA, 20 bp, synthetic construct
  source 1..20: mol_type = other DNA
cccagctacttgggaggcta

SEQ ID NO: 79077 - DNA, 20 bp, synthetic construct
  source 1..20: mol_type = other DNA
tcccagctacttgggaggct

SEQ ID NO: 79078 - DNA, 20 bp, synthetic construct
  source 1..20: mol_type = other DNA
gtcccagctacttgggaggc

SEQ ID NO: 79079 - DNA, 20 bp, synthetic construct
  source 1..20: mol_type = other DNA
agtcccagctacttgggagg

SEQ ID NO: 79080 - DNA, 20 bp, synthetic construct
  source 1..20: mol_type = other DNA
tagtcccagctacttgggag

SEQ ID NO: 79081 - DNA, 20 bp, synthetic construct
  source 1..20: mol_type = other DNA
gtagtcccagctacttggga

SEQ ID NO: 79082 - DNA, 20 bp, synthetic construct
  source 1..20: mol_type = other DNA
tgtagtcccagctacttggg

SEQ ID NO: 79083 - DNA, 20 bp, synthetic construct
  source 1..20: mol_type = other DNA
ctgtagtcccagctacttgg

SEQ ID NO: 79084 - DNA, 20 bp, synthetic construct
  source 1..20: mol_type = other DNA
cctgtagtcccagctacttg

SEQ ID NO: 79085 - DNA, 20 bp, synthetic construct
  source 1..20: mol_type = other DNA
gcctgtagtcccagctactt

SEQ ID NO: 79086 - DNA, 20 bp, synthetic construct
  source 1..20: mol_type = other DNA
agcctgtagtcccagctact

SEQ ID NO: 79087 - DNA, 20 bp, synthetic construct
  source 1..20: mol_type = other DNA
gagcctgtagtcccagctac

SEQ ID NO: 79088 - DNA, 20 bp, synthetic construct
  source 1..20: mol_type = other DNA
ggagcctgtagtcccagcta

SEQ ID NO: 79089 - DNA, 20 bp, synthetic construct
  source 1..20: mol_type = other DNA
gggagcctgtagtcccagct

SEQ ID NO: 79090 - DNA, 20 bp, synthetic construct
  source 1..20: mol_type = other DNA
cgggagcctgtagtcccagc

SEQ ID NO: 79091 - DNA, 20 bp, synthetic construct
  source 1..20: mol_type = other DNA
gcgggagcctgtagtcccag

SEQ ID NO: 79092 - DNA, 20 bp, synthetic construct
  source 1..20: mol_type = other DNA
ggcgggagcctgtagtccca

SEQ ID NO: 79093 - DNA, 20 bp, synthetic construct
  source 1..20: mol_type = other DNA
tggcgggagcctgtagtccc

SEQ ID NO: 79094 - DNA, 20 bp, synthetic construct
  source 1..20: mol_type = other DNA
gtggcgggagcctgtagtcc

SEQ ID NO: 79095 - DNA, 20 bp, synthetic construct
  source 1..20: mol_type = other DNA
ggtggcgggagcctgtagtc

SEQ ID NO: 79096 - DNA, 20 bp, synthetic construct
  source 1..20: mol_type = other DNA
tggtggcgggagcctgtagt

SEQ ID NO: 79097 - DNA, 20 bp, synthetic construct
  source 1..20: mol_type = other DNA
gtggtggcgggagcctgtag

SEQ ID NO: 79098 - DNA, 20 bp, synthetic construct
  source 1..20: mol_type = other DNA
tgtggtggcgggagcctgta

SEQ ID NO: 79099 - DNA, 20 bp, synthetic construct
  source 1..20: mol_type = other DNA
gtgtggtggcgggagcctgt

SEQ ID NO: 79100 - DNA, 20 bp, synthetic construct
  source 1..20: mol_type = other DNA
ggtgtggtggcgggagcctg

SEQ ID NO: 79101 - DNA, 20 bp, synthetic construct
  source 1..20: mol_type = other DNA
aggtgtggtggcgggagcct

SEQ ID NO: 79102 - DNA, 20 bp, synthetic construct
  source 1..20: mol_type = other DNA
caggtgtggtggcgggagcc

SEQ ID NO: 79103 - DNA, 20 bp, synthetic construct
  source 1..20: mol_type = other DNA
ccaggtgtggtggcgggagc

SEQ ID NO: 79104 - DNA, 20 bp, synthetic construct
  source 1..20: mol_type = other DNA
gccaggtgtggtggcgggag

SEQ ID NO: 79105 - DNA, 20 bp, synthetic construct
  source 1..20: mol_type = other DNA
agccaggtgtggtggcggga

SEQ ID NO: 79106 - DNA, 20 bp, synthetic construct
  source 1..20: mol_type = other DNA
tagccaggtgtggtggcggg

SEQ ID NO: 79107 - DNA, 20 bp, synthetic construct
  source 1..20: mol_type = other DNA
ttagccaggtgtggtggcgg

SEQ ID NO: 79108 - DNA, 20 bp, synthetic construct
  source 1..20: mol_type = other DNA
attagccaggtgtggtggcg

SEQ ID NO: 79109 - DNA, 20 bp, synthetic construct
  source 1..20: mol_type = other DNA
aattagccaggtgtggtggc

SEQ ID NO: 79110 - DNA, 20 bp, synthetic construct
  source 1..20: mol_type = other DNA
aaattagccaggtgtggtgg

SEQ ID NO: 79111 - DNA, 20 bp, synthetic construct
  source 1..20: mol_type = other DNA
aaaattagccaggtgtggtg

SEQ ID NO: 79112 - DNA, 20 bp, synthetic construct
  source 1..20: mol_type = other DNA
aaaaattagccaggtgtggt

SEQ ID NO: 79113 - DNA, 20 bp, synthetic construct
  source 1..20: mol_type = other DNA
aaaaaattagccaggtgtgg

SEQ ID NO: 79114 - DNA, 20 bp, synthetic construct
  source 1..20: mol_type = other DNA
caaaaaattagccaggtgtg

SEQ ID NO: 79115 - DNA, 20 bp, synthetic construct
  source 1..20: mol_type = other DNA
acaaaaaattagccaggtgt

SEQ ID NO: 79116 - DNA, 20 bp, synthetic construct
  source 1..20: mol_type = other DNA
tacaaaaaattagccaggtg

SEQ ID NO: 79117 - DNA, 20 bp, synthetic construct
  source 1..20: mol_type = other DNA
atacaaaaaattagccaggt

SEQ ID NO: 79118 - DNA, 20 bp, synthetic construct
  source 1..20: mol_type = other DNA
aatacaaaaaattagccagg

SEQ ID NO: 79119 - DNA, 20 bp, synthetic construct
  source 1..20: mol_type = other DNA
aaatacaaaaaattagccag

SEQ ID NO: 79120 - DNA, 20 bp, synthetic construct
  source 1..20: mol_type = other DNA
aaaatacaaaaaattagcca

SEQ ID NO: 79121 - DNA, 20 bp, synthetic construct
  source 1..20: mol_type = other DNA
aaaaatacaaaaaattagcc

SEQ ID NO: 79122 - DNA, 20 bp, synthetic construct
  source 1..20: mol_type = other DNA
taaaaatacaaaaaattagc

SEQ ID NO: 79123 - DNA, 20 bp, synthetic construct
  source 1..20: mol_type = other DNA
ctaaaaatacaaaaaattag

SEQ ID NO: 79124 - DNA, 20 bp, synthetic construct
  source 1..20: mol_type = other DNA
actaaaaatacaaaaaatta

SEQ ID NO: 79125 - DNA, 20 bp, synthetic construct
  source 1..20: mol_type = other DNA
tactaaaaatacaaaaaatt

SEQ ID NO: 79126 - DNA, 20 bp, synthetic construct
  source 1..20: mol_type = other DNA
ctactaaaaatacaaaaaat

SEQ ID NO: 79127 - DNA, 20 bp, synthetic construct
  source 1..20: mol_type = other DNA
tctactaaaaatacaaaaaa

SEQ ID NO: 79128 - DNA, 20 bp, synthetic construct
  source 1..20: mol_type = other DNA
ctctactaaaaatacaaaaa

SEQ ID NO: 79129 - DNA, 20 bp, synthetic construct
  source 1..20: mol_type = other DNA
tctctactaaaaatacaaaa

SEQ ID NO: 79130 - DNA, 20 bp, synthetic construct
  source 1..20: mol_type = other DNA
gtctctactaaaaatacaaa

SEQ ID NO: 79131 - DNA, 20 bp, synthetic construct
  source 1..20: mol_type = other DNA
tgtctctactaaaaatacaa

SEQ ID NO: 79132 - DNA, 20 bp, synthetic construct
  source 1..20: mol_type = other DNA
ctgtctctactaaaaataca

SEQ ID NO: 79133 - DNA, 20 bp, synthetic construct
  source 1..20: mol_type = other DNA
cctgtctctactaaaaatac

SEQ ID NO: 79134 - DNA, 20 bp, synthetic construct
  source 1..20: mol_type = other DNA
ccctgtctctactaaaaata

SEQ ID NO: 79135 - DNA, 20 bp, synthetic construct
  source 1..20: mol_type = other DNA
accctgtctctactaaaaat

SEQ ID NO: 79136 - DNA, 20 bp, synthetic construct
  source 1..20: mol_type = other DNA
aaccctgtctctactaaaaa

SEQ ID NO: 79137 - DNA, 20 bp, synthetic construct
  source 1..20: mol_type = other DNA
aaaccctgtctctactaaaa

SEQ ID NO: 79138 - DNA, 20 bp, synthetic construct
  source 1..20: mol_type = other DNA
gaaaccctgtctctactaaa

SEQ ID NO: 79139 - DNA, 20 bp, synthetic construct
  source 1..20: mol_type = other DNA
tgaaaccctgtctctactaa

SEQ ID NO: 79140 - DNA, 20 bp, synthetic construct
  source 1..20: mol_type = other DNA
gtgaaaccctgtctctacta

SEQ ID NO: 79141 - DNA, 20 bp, synthetic construct
  source 1..20: mol_type = other DNA
ggtgaaaccctgtctctact

SEQ ID NO: 79142 - DNA, 20 bp, synthetic construct
  source 1..20: mol_type = other DNA
tggtgaaaccctgtctctac

SEQ ID NO: 79143 - DNA, 20 bp, synthetic construct
  source 1..20: mol_type = other DNA
atggtgaaaccctgtctcta

SEQ ID NO: 79144 - DNA, 20 bp, synthetic construct
  source 1..20: mol_type = other DNA
catggtgaaaccctgtctct

SEQ ID NO: 79145 - DNA, 20 bp, synthetic construct
  source 1..20: mol_type = other DNA
acatggtgaaaccctgtctc

SEQ ID NO: 79146 - DNA, 20 bp, synthetic construct
  source 1..20: mol_type = other DNA
aacatggtgaaaccctgtct

SEQ ID NO: 79147 - DNA, 20 bp, synthetic construct
  source 1..20: mol_type = other DNA
taacatggtgaaaccctgtc

SEQ ID NO: 79148 - DNA, 20 bp, synthetic construct
  source 1..20: mol_type = other DNA
ctaacatggtgaaaccctgt

SEQ ID NO: 79149 - DNA, 20 bp, synthetic construct
  source 1..20: mol_type = other DNA
gctaacatggtgaaaccctg

SEQ ID NO: 79150 - DNA, 20 bp, synthetic construct
  source 1..20: mol_type = other DNA
ggctaacatggtgaaaccct

SEQ ID NO: 79151 - DNA, 20 bp, synthetic construct
  source 1..20: mol_type = other DNA
tggctaacatggtgaaaccc

SEQ ID NO: 79152 - DNA, 20 bp, synthetic construct
  source 1..20: mol_type = other DNA
ctggctaacatggtgaaacc

SEQ ID NO: 79153 - DNA, 20 bp, synthetic construct
  source 1..20: mol_type = other DNA
gctggctaacatggtgaaac

SEQ ID NO: 79154 - DNA, 20 bp, synthetic construct
  source 1..20: mol_type = other DNA
tgctggctaacatggtgaaa

SEQ ID NO: 79155 - DNA, 20 bp, synthetic construct
  source 1..20: mol_type = other DNA
atgctggctaacatggtgaa

SEQ ID NO: 79156 - DNA, 20 bp, synthetic construct
  source 1..20: mol_type = other DNA
catgctggctaacatggtga

SEQ ID NO: 79157 - DNA, 20 bp, synthetic construct
  source 1..20: mol_type = other DNA
ccatgctggctaacatggtg

SEQ ID NO: 79158 - DNA, 20 bp, synthetic construct
  source 1..20: mol_type = other DNA
accatgctggctaacatggt

SEQ ID NO: 79159 - DNA, 20 bp, synthetic construct
  source 1..20: mol_type = other DNA
gaccatgctggctaacatgg

SEQ ID NO: 79160 - DNA, 20 bp, synthetic construct
  source 1..20: mol_type = other DNA
agaccatgctggctaacatg

SEQ ID NO: 79161 - DNA, 20 bp, synthetic construct
  source 1..20: mol_type = other DNA
gagaccatgctggctaacat

SEQ ID NO: 79162 - DNA, 20 bp, synthetic construct
  source 1..20: mol_type = other DNA
tgagaccatgctggctaaca

SEQ ID NO: 79163 - DNA, 20 bp, synthetic construct
  source 1..20: mol_type = other DNA
ttgagaccatgctggctaac

SEQ ID NO: 79164 - DNA, 20 bp, synthetic construct
  source 1..20: mol_type = other DNA
attgagaccatgctggctaa

SEQ ID NO: 79165 - DNA, 20 bp, synthetic construct
  source 1..20: mol_type = other DNA
gattgagaccatgctggcta

SEQ ID NO: 79166 - DNA, 20 bp, synthetic construct
  source 1..20: mol_type = other DNA
agattgagaccatgctggct

SEQ ID NO: 79167 - DNA, 20 bp, synthetic construct
  source 1..20: mol_type = other DNA
gagattgagaccatgctggc

SEQ ID NO: 79168 - DNA, 20 bp, synthetic construct
  source 1..20: mol_type = other DNA
ggagattgagaccatgctgg

SEQ ID NO: 79169 - DNA, 20 bp, synthetic construct
  source 1..20: mol_type = other DNA
aggagattgagaccatgctg

SEQ ID NO: 79170 - DNA, 20 bp, synthetic construct
  source 1..20: mol_type = other DNA
caggagattgagaccatgct

SEQ ID NO: 79171 - DNA, 20 bp, synthetic construct
  source 1..20: mol_type = other DNA
tcaggagattgagaccatgc

SEQ ID NO: 79172 - DNA, 20 bp, synthetic construct
  source 1..20: mol_type = other DNA
gtcaggagattgagaccatg

SEQ ID NO: 79173 - DNA, 20 bp, synthetic construct
  source 1..20: mol_type = other DNA
agtcaggagattgagaccat

SEQ ID NO: 79174 - DNA, 20 bp, synthetic construct
  source 1..20: mol_type = other DNA
aagtcaggagattgagacca

SEQ ID NO: 79175 - DNA, 20 bp, synthetic construct
  source 1..20: mol_type = other DNA
gaagtcaggagattgagacc

SEQ ID NO: 79176 - DNA, 20 bp, synthetic construct
  source 1..20: mol_type = other DNA
cgaagtcaggagattgagac

SEQ ID NO: 79177 - DNA, 20 bp, synthetic construct
  source 1..20: mol_type = other DNA
acgaagtcaggagattgaga

SEQ ID NO: 79178 - DNA, 20 bp, synthetic construct
  source 1..20: mol_type = other DNA
cacgaagtcaggagattgag

SEQ ID NO: 79179 - DNA, 20 bp, synthetic construct
  source 1..20: mol_type = other DNA
tcacgaagtcaggagattga

SEQ ID NO: 79180 - DNA, 20 bp, synthetic construct
  source 1..20: mol_type = other DNA
atcacgaagtcaggagattg

SEQ ID NO: 79181 - DNA, 20 bp, synthetic construct
  source 1..20: mol_type = other DNA
gatcacgaagtcaggagatt

SEQ ID NO: 79182 - DNA, 20 bp, synthetic construct
  source 1..20: mol_type = other DNA
ggatcacgaagtcaggagat

SEQ ID NO: 79183 - DNA, 20 bp, synthetic construct
  source 1..20: mol_type = other DNA
aggatcacgaagtcaggaga

SEQ ID NO: 79184 - DNA, 20 bp, synthetic construct
  source 1..20: mol_type = other DNA
gaggatcacgaagtcaggag

SEQ ID NO: 79185 - DNA, 20 bp, synthetic construct
  source 1..20: mol_type = other DNA
ggaggatcacgaagtcagga

SEQ ID NO: 79186 - DNA, 20 bp, synthetic construct
  source 1..20: mol_type = other DNA
aggaggatcacgaagtcagg

SEQ ID NO: 79187 - DNA, 20 bp, synthetic construct
  source 1..20: mol_type = other DNA
caggaggatcacgaagtcag

SEQ ID NO: 79188 - DNA, 20 bp, synthetic construct
  source 1..20: mol_type = other DNA
gcaggaggatcacgaagtca

SEQ ID NO: 79189 - DNA, 20 bp, synthetic construct
  source 1..20: mol_type = other DNA
ggcaggaggatcacgaagtc

SEQ ID NO: 79190 - DNA, 20 bp, synthetic construct
  source 1..20: mol_type = other DNA
aggcaggaggatcacgaagt

SEQ ID NO: 79191 - DNA, 20 bp, synthetic construct
  source 1..20: mol_type = other DNA
gaggcaggaggatcacgaag

SEQ ID NO: 79192 - DNA, 20 bp, synthetic construct
  source 1..20: mol_type = other DNA
cgaggcaggaggatcacgaa

SEQ ID NO: 79193 - DNA, 20 bp, synthetic construct
  source 1..20: mol_type = other DNA
ccgaggcaggaggatcacga

SEQ ID NO: 79194 - DNA, 20 bp, synthetic construct
  source 1..20: mol_type = other DNA
gccgaggcaggaggatcacg

SEQ ID NO: 79195 - DNA, 20 bp, synthetic construct
  source 1..20: mol_type = other DNA
ggccgaggcaggaggatcac

SEQ ID NO: 79196 - DNA, 20 bp, synthetic construct
  source 1..20: mol_type = other DNA
aggccgaggcaggaggatca

SEQ ID NO: 79197 - DNA, 20 bp, synthetic construct
  source 1..20: mol_type = other DNA
gaggccgaggcaggaggatc

SEQ ID NO: 79198 - DNA, 20 bp, synthetic construct
  source 1..20: mol_type = other DNA
ggaggccgaggcaggaggat

SEQ ID NO: 79199 - DNA, 20 bp, synthetic construct
  source 1..20: mol_type = other DNA
gggaggccgaggcaggagga

SEQ ID NO: 79200 - DNA, 20 bp, synthetic construct
  source 1..20: mol_type = other DNA
tgggaggccgaggcaggagg

SEQ ID NO: 79201 - DNA, 20 bp, synthetic construct
  source 1..20: mol_type = other DNA
ttgggaggccgaggcaggag

SEQ ID NO: 79202 - DNA, 20 bp, synthetic construct
  source 1..20: mol_type = other DNA
tttgggaggccgaggcagga

SEQ ID NO: 79203 - DNA, 20 bp, synthetic construct
  source 1..20: mol_type = other DNA
ctttgggaggccgaggcagg

SEQ ID NO: 79204 - DNA, 20 bp, synthetic construct
  source 1..20: mol_type = other DNA
actttgggaggccgaggcag

SEQ ID NO: 79205 - DNA, 20 bp, synthetic construct
  source 1..20: mol_type = other DNA
cactttgggaggccgaggca

SEQ ID NO: 79206 - DNA, 20 bp, synthetic construct
  source 1..20: mol_type = other DNA
gcactttgggaggccgaggc

SEQ ID NO: 79207 - DNA, 20 bp, synthetic construct
  source 1..20: mol_type = other DNA
agcactttgggaggccgagg

SEQ ID NO: 79208 - DNA, 20 bp, synthetic construct
  source 1..20: mol_type = other DNA
cagcactttgggaggccgag

SEQ ID NO: 79209 - DNA, 20 bp, synthetic construct
  source 1..20: mol_type = other DNA
ccagcactttgggaggccga

SEQ ID NO: 79210 - DNA, 20 bp, synthetic construct
  source 1..20: mol_type = other DNA
cccagcactttgggaggccg

SEQ ID NO: 79211 - DNA, 20 bp, synthetic construct
  source 1..20: mol_type = other DNA
tcccagcactttgggaggcc

SEQ ID NO: 79212 - DNA, 20 bp, synthetic construct
  source 1..20: mol_type = other DNA
atcccagcactttgggaggc

SEQ ID NO: 79213 - DNA, 20 bp, synthetic construct
  source 1..20: mol_type = other DNA
tatcccagcactttgggagg

SEQ ID NO: 79214 - DNA, 20 bp, synthetic construct
  source 1..20: mol_type = other DNA
gtatcccagcactttgggag

SEQ ID NO: 79215 - DNA, 20 bp, synthetic construct
  source 1..20: mol_type = other DNA
ggtatcccagcactttggga

SEQ ID NO: 79216 - DNA, 20 bp, synthetic construct
  source 1..20: mol_type = other DNA
tggtatcccagcactttggg

SEQ ID NO: 79217 - DNA, 20 bp, synthetic construct
  source 1..20: mol_type = other DNA
ctggtatcccagcactttgg

SEQ ID NO: 79218 - DNA, 20 bp, synthetic construct
  source 1..20: mol_type = other DNA
cctggtatcccagcactttg

SEQ ID NO: 79219 - DNA, 20 bp, synthetic construct
  source 1..20: mol_type = other DNA
gcctggtatcccagcacttt

SEQ ID NO: 79220 - DNA, 20 bp, synthetic construct
  source 1..20: mol_type = other DNA
tgcctggtatcccagcactt

SEQ ID NO: 79221 - DNA, 20 bp, synthetic construct
  source 1..20: mol_type = other DNA
atgcctggtatcccagcact

SEQ ID NO: 79222 - DNA, 20 bp, synthetic construct
  source 1..20: mol_type = other DNA
catgcctggtatcccagcac

SEQ ID NO: 79223 - DNA, 20 bp, synthetic construct
  source 1..20: mol_type = other DNA
tcatgcctggtatcccagca

SEQ ID NO: 79224 - DNA, 20 bp, synthetic construct
  source 1..20: mol_type = other DNA
ctcatgcctggtatcccagc

SEQ ID NO: 79225 - DNA, 20 bp, synthetic construct
  source 1..20: mol_type = other DNA
gctcatgcctggtatcccag

SEQ ID NO: 79226 - DNA, 20 bp, synthetic construct
  source 1..20: mol_type = other DNA
ggctcatgcctggtatccca

SEQ ID NO: 79227 - DNA, 20 bp, synthetic construct
  source 1..20: mol_type = other DNA
tggctcatgcctggtatccc

SEQ ID NO: 79228 - DNA, 20 bp, synthetic construct
  source 1..20: mol_type = other DNA
gtggctcatgcctggtatcc

SEQ ID NO: 79229 - DNA, 20 bp, synthetic construct
  source 1..20: mol_type = other DNA
ggtggctcatgcctggtatc

SEQ ID NO: 79230 - DNA, 20 bp, synthetic construct
  source 1..20: mol_type = other DNA
cggtggctcatgcctggtat

SEQ ID NO: 79231 - DNA, 20 bp, synthetic construct
  source 1..20: mol_type = other DNA
acggtggctcatgcctggta

SEQ ID NO: 79232 - DNA, 20 bp, synthetic construct
  source 1..20: mol_type = other DNA
cacggtggctcatgcctggt

SEQ ID NO: 79233 - DNA, 20 bp, synthetic construct
  source 1..20: mol_type = other DNA
gcacggtggctcatgcctgg

SEQ ID NO: 79234 - DNA, 20 bp, synthetic construct
  source 1..20: mol_type = other DNA
ggcacggtggctcatgcctg

SEQ ID NO: 79235 - DNA, 20 bp, synthetic construct
  source 1..20: mol_type = other DNA
gggcacggtggctcatgcct

SEQ ID NO: 79236 - DNA, 20 bp, synthetic construct
  source 1..20: mol_type = other DNA
cgggcacggtggctcatgcc

SEQ ID NO: 79237 - DNA, 20 bp, synthetic construct
  source 1..20: mol_type = other DNA
ccgggcacggtggctcatgc

SEQ ID NO: 79238 - DNA, 20 bp, synthetic construct
  source 1..20: mol_type = other DNA
gccgggcacggtggctcatg

SEQ ID NO: 79239 - DNA, 20 bp, synthetic construct
  source 1..20: mol_type = other DNA
ggccgggcacggtggctcat

SEQ ID NO: 79240 - DNA, 20 bp, synthetic construct
  source 1..20: mol_type = other DNA
tggccgggcacggtggctca

SEQ ID NO: 79241 - DNA, 20 bp, synthetic construct
  source 1..20: mol_type = other DNA
ctggccgggcacggtggctc

SEQ ID NO: 79242 - DNA, 20 bp, synthetic construct
  source 1..20: mol_type = other DNA
tctggccgggcacggtggct

SEQ ID NO: 79243 - DNA, 20 bp, synthetic construct
  source 1..20: mol_type = other DNA
ttctggccgggcacggtggc

SEQ ID NO: 79244 - DNA, 20 bp, synthetic construct
  source 1..20: mol_type = other DNA
gttctggccgggcacggtgg

SEQ ID NO: 79245 - DNA, 20 bp, synthetic construct
  source 1..20: mol_type = other DNA
agttctggccgggcacggtg

SEQ ID NO: 79246 - DNA, 20 bp, synthetic construct
  source 1..20: mol_type = other DNA
gagttctggccgggcacggt

SEQ ID NO: 79247 - DNA, 20 bp, synthetic construct
  source 1..20: mol_type = other DNA
agagttctggccgggcacgg

SEQ ID NO: 79248 - DNA, 20 bp, synthetic construct
  source 1..20: mol_type = other DNA
aagagttctggccgggcacg

SEQ ID NO: 79249 - DNA, 20 bp, synthetic construct
  source 1..20: mol_type = other DNA
taagagttctggccgggcac

SEQ ID NO: 79250 - DNA, 20 bp, synthetic construct
  source 1..20: mol_type = other DNA
ttaagagttctggccgggca

SEQ ID NO: 79251 - DNA, 20 bp, synthetic construct
  source 1..20: mol_type = other DNA
attaagagttctggccgggc

SEQ ID NO: 79252 - DNA, 20 bp, synthetic construct
  source 1..20: mol_type = other DNA
tattaagagttctggccggg

SEQ ID NO: 79253 - DNA, 20 bp, synthetic construct
  source 1..20: mol_type = other DNA
ctattaagagttctggccgg

SEQ ID NO: 79254 - DNA, 20 bp, synthetic construct
  source 1..20: mol_type = other DNA
actattaagagttctggccg

SEQ ID NO: 79255 - DNA, 20 bp, synthetic construct
  source 1..20: mol_type = other DNA
tactattaagagttctggcc

SEQ ID NO: 79256 - DNA, 20 bp, synthetic construct
  source 1..20: mol_type = other DNA
ctactattaagagttctggc

SEQ ID NO: 79257 - DNA, 20 bp, synthetic construct
  source 1..20: mol_type = other DNA
actactattaagagttctgg

SEQ ID NO: 79258 - DNA, 20 bp, synthetic construct
  source 1..20: mol_type = other DNA
aactactattaagagttctg

SEQ ID NO: 79259 - DNA, 20 bp, synthetic construct
  source 1..20: mol_type = other DNA
taactactattaagagttct

SEQ ID NO: 79260 - DNA, 20 bp, synthetic construct
  source 1..20: mol_type = other DNA
ataactactattaagagttc

SEQ ID NO: 79261 - DNA, 20 bp, synthetic construct
  source 1..20: mol_type = other DNA
aataactactattaagagtt

SEQ ID NO: 79262 - DNA, 20 bp, synthetic construct
  source 1..20: mol_type = other DNA
aaataactactattaagagt

SEQ ID NO: 79263 - DNA, 20 bp, synthetic construct
  source 1..20: mol_type = other DNA
taaataactactattaagag

SEQ ID NO: 79264 - DNA, 20 bp, synthetic construct
  source 1..20: mol_type = other DNA
ataaataactactattaaga

SEQ ID NO: 79265 - DNA, 20 bp, synthetic construct
  source 1..20: mol_type = other DNA
cataaataactactattaag

SEQ ID NO: 79266 - DNA, 20 bp, synthetic construct
  source 1..20: mol_type = other DNA
gcataaataactactattaa

SEQ ID NO: 79267 - DNA, 20 bp, synthetic construct
  source 1..20: mol_type = other DNA
tgcataaataactactatta

SEQ ID NO: 79268 - DNA, 20 bp, synthetic construct
  source 1..20: mol_type = other DNA
gtgcataaataactactatt

SEQ ID NO: 79269 - DNA, 20 bp, synthetic construct
  source 1..20: mol_type = other DNA
cgtgcataaataactactat

SEQ ID NO: 79270 - DNA, 20 bp, synthetic construct
  source 1..20: mol_type = other DNA
gcgtgcataaataactacta

SEQ ID NO: 79271 - DNA, 20 bp, synthetic construct
  source 1..20: mol_type = other DNA
agcgtgcataaataactact

SEQ ID NO: 79272 - DNA, 20 bp, synthetic construct
  source 1..20: mol_type = other DNA
cagcgtgcataaataactac

SEQ ID NO: 79273 - DNA, 20 bp, synthetic construct
  source 1..20: mol_type = other DNA
ccagcgtgcataaataacta

SEQ ID NO: 79274 - DNA, 20 bp, synthetic construct
  source 1..20: mol_type = other DNA
cccagcgtgcataaataact

SEQ ID NO: 79275 - DNA, 20 bp, synthetic construct
  source 1..20: mol_type = other DNA
tcccagcgtgcataaataac

SEQ ID NO: 79276 - DNA, 20 bp, synthetic construct
  source 1..20: mol_type = other DNA
atcccagcgtgcataaataa

SEQ ID NO: 79277 - DNA, 20 bp, synthetic construct
  source 1..20: mol_type = other DNA
aatcccagcgtgcataaata

SEQ ID NO: 79278 - DNA, 20 bp, synthetic construct
  source 1..20: mol_type = other DNA
caatcccagcgtgcataaat

SEQ ID NO: 79279 - DNA, 20 bp, synthetic construct
  source 1..20: mol_type = other DNA
ccaatcccagcgtgcataaa

SEQ ID NO: 79280 - DNA, 20 bp, synthetic construct
  source 1..20: mol_type = other DNA
tccaatcccagcgtgcataa

SEQ ID NO: 79281 - DNA, 20 bp, synthetic construct
  source 1..20: mol_type = other DNA
ttccaatcccagcgtgcata

SEQ ID NO: 79282 - DNA, 20 bp, synthetic construct
  source 1..20: mol_type = other DNA
cttccaatcccagcgtgcat

SEQ ID NO: 79283 - DNA, 20 bp, synthetic construct
  source 1..20: mol_type = other DNA
tcttccaatcccagcgtgca

SEQ ID NO: 79284 - DNA, 20 bp, synthetic construct
  source 1..20: mol_type = other DNA
gtcttccaatcccagcgtgc

SEQ ID NO: 79285 - DNA, 20 bp, synthetic construct
  source 1..20: mol_type = other DNA
tgtcttccaatcccagcgtg

SEQ ID NO: 79286 - DNA, 20 bp, synthetic construct
  source 1..20: mol_type = other DNA
atgtcttccaatcccagcgt

SEQ ID NO: 79287 - DNA, 20 bp, synthetic construct
  source 1..20: mol_type = other DNA
aatgtcttccaatcccagcg

SEQ ID NO: 79288 - DNA, 20 bp, synthetic construct
  source 1..20: mol_type = other DNA
aaatgtcttccaatcccagc

SEQ ID NO: 79289 - DNA, 20 bp, synthetic construct
  source 1..20: mol_type = other DNA
taaatgtcttccaatcccag

SEQ ID NO: 79290 - DNA, 20 bp, synthetic construct
  source 1..20: mol_type = other DNA
gtaaatgtcttccaatccca

SEQ ID NO: 79291 - DNA, 20 bp, synthetic construct
  source 1..20: mol_type = other DNA
agtaaatgtcttccaatccc

SEQ ID NO: 79292 - DNA, 20 bp, synthetic construct
  source 1..20: mol_type = other DNA
aagtaaatgtcttccaatcc

SEQ ID NO: 79293 - DNA, 20 bp, synthetic construct
  source 1..20: mol_type = other DNA
aaagtaaatgtcttccaatc

SEQ ID NO: 79294 - DNA, 20 bp, synthetic construct
  source 1..20: mol_type = other DNA
aaaagtaaatgtcttccaat

SEQ ID NO: 79295 - DNA, 20 bp, synthetic construct
  source 1..20: mol_type = other DNA
aaaaagtaaatgtcttccaa

SEQ ID NO: 79296 - DNA, 20 bp, synthetic construct
  source 1..20: mol_type = other DNA
taaaaagtaaatgtcttcca

SEQ ID NO: 79297 - DNA, 20 bp, synthetic construct
  source 1..20: mol_type = other DNA
gtaaaaagtaaatgtcttcc

SEQ ID NO: 79298 - DNA, 20 bp, synthetic construct
  source 1..20: mol_type = other DNA
agtaaaaagtaaatgtcttc

SEQ ID NO: 79299 - DNA, 20 bp, synthetic construct
  source 1..20: mol_type = other DNA
cagtaaaaagtaaatgtctt

SEQ ID NO: 79300 - DNA, 20 bp, synthetic construct
  source 1..20: mol_type = other DNA
ccagtaaaaagtaaatgtct

SEQ ID NO: 79301 - DNA, 20 bp, synthetic construct
  source 1..20: mol_type = other DNA
tccagtaaaaagtaaatgtc

SEQ ID NO: 79302 - DNA, 20 bp, synthetic construct
  source 1..20: mol_type = other DNA
atccagtaaaaagtaaatgt

SEQ ID NO: 79303 - DNA, 20 bp, synthetic construct
  source 1..20: mol_type = other DNA
catccagtaaaaagtaaatg

SEQ ID NO: 79304 - DNA, 20 bp, synthetic construct
  source 1..20: mol_type = other DNA
acatccagtaaaaagtaaat

SEQ ID NO: 79305 - DNA, 20 bp, synthetic construct
  source 1..20: mol_type = other DNA
gacatccagtaaaaagtaaa

SEQ ID NO: 79306 - DNA, 20 bp, synthetic construct
  source 1..20: mol_type = other DNA
agacatccagtaaaaagtaa

SEQ ID NO: 79307 - DNA, 20 bp, synthetic construct
  source 1..20: mol_type = other DNA
aagacatccagtaaaaagta

SEQ ID NO: 79308 - DNA, 20 bp, synthetic construct
  source 1..20: mol_type = other DNA
aaagacatccagtaaaaagt

SEQ ID NO: 79309 - DNA, 20 bp, synthetic construct
  source 1..20: mol_type = other DNA
gaaagacatccagtaaaaag

SEQ ID NO: 79310 - DNA, 20 bp, synthetic construct
  source 1..20: mol_type = other DNA
ggaaagacatccagtaaaaa

SEQ ID NO: 79311 - DNA, 20 bp, synthetic construct
  source 1..20: mol_type = other DNA
cggaaagacatccagtaaaa

SEQ ID NO: 79312 - DNA, 20 bp, synthetic construct
  source 1..20: mol_type = other DNA
acggaaagacatccagtaaa

SEQ ID NO: 79313 - DNA, 20 bp, synthetic construct
  source 1..20: mol_type = other DNA
tacggaaagacatccagtaa

SEQ ID NO: 79314 - DNA, 20 bp, synthetic construct
  source 1..20: mol_type = other DNA
atacggaaagacatccagta

SEQ ID NO: 79315 - DNA, 20 bp, synthetic construct
  source 1..20: mol_type = other DNA
aatacggaaagacatccagt

SEQ ID NO: 79316 - DNA, 20 bp, synthetic construct
  source 1..20: mol_type = other DNA
caatacggaaagacatccag

SEQ ID NO: 79317 - DNA, 20 bp, synthetic construct
  source 1..20: mol_type = other DNA
acaatacggaaagacatcca

SEQ ID NO: 79318 - DNA, 20 bp, synthetic construct
  source 1..20: mol_type = other DNA
cacaatacggaaagacatcc

SEQ ID NO: 79319 - DNA, 20 bp, synthetic construct
  source 1..20: mol_type = other DNA
acacaatacggaaagacatc

SEQ ID NO: 79320 - DNA, 20 bp, synthetic construct
  source 1..20: mol_type = other DNA
cacacaatacggaaagacat

SEQ ID NO: 79321 - DNA, 20 bp, synthetic construct
  source 1..20: mol_type = other DNA
gcacacaatacggaaagaca

SEQ ID NO: 79322 - DNA, 20 bp, synthetic construct
  source 1..20: mol_type = other DNA
agcacacaatacggaaagac

SEQ ID NO: 79323 - DNA, 20 bp, synthetic construct
  source 1..20: mol_type = other DNA
aagcacacaatacggaaaga

SEQ ID NO: 79324 - DNA, 20 bp, synthetic construct
  source 1..20: mol_type = other DNA
aaagcacacaatacggaaag

SEQ ID NO: 79325 - DNA, 20 bp, synthetic construct
  source 1..20: mol_type = other DNA
aaaagcacacaatacggaaa

SEQ ID NO: 79326 - DNA, 20 bp, synthetic construct
  source 1..20: mol_type = other DNA
aaaaagcacacaatacggaa

SEQ ID NO: 79327 - DNA, 20 bp, synthetic construct
  source 1..20: mol_type = other DNA
aaaaaagcacacaatacgga

SEQ ID NO: 79328 - DNA, 20 bp, synthetic construct
  source 1..20: mol_type = other DNA
aaaaaaagcacacaatacgg

SEQ ID NO: 79329 - DNA, 20 bp, synthetic construct
  source 1..20: mol_type = other DNA
aaaaaaaagcacacaatacg

SEQ ID NO: 79330 - DNA, 20 bp, synthetic construct
  source 1..20: mol_type = other DNA
aaaaaaaaagcacacaatac

SEQ ID NO: 79331 - DNA, 20 bp, synthetic construct
  source 1..20: mol_type = other DNA
aaaaaaaaaagcacacaata

SEQ ID NO: 79332 - DNA, 20 bp, synthetic construct
  source 1..20: mol_type = other DNA
aaaaaaaaaaagcacacaat

SEQ ID NO: 79333 - DNA, 20 bp, synthetic construct
  source 1..20: mol_type = other DNA
aaaaaaaaaaaagcacacaa

SEQ ID NO: 79334 - DNA, 20 bp, synthetic construct
  source 1..20: mol_type = other DNA
aaaaaaaaaaaaagcacaca

SEQ ID NO: 79335 - DNA, 20 bp, synthetic construct
  source 1..20: mol_type = other DNA
aaaaaaaaaaaaaagcacac

SEQ ID NO: 79336 - DNA, 20 bp, synthetic construct
  source 1..20: mol_type = other DNA
aaaaaaaaaaaaaaagcaca

SEQ ID NO: 79337 - DNA, 20 bp, synthetic construct
  source 1..20: mol_type = other DNA
aaaaaaaaaaaaaaaagcac

SEQ ID NO: 79338 - DNA, 20 bp, synthetic construct
  source 1..20: mol_type = other DNA
aaaaaaaaaaaaaaaaagca

SEQ ID NO: 79339 - DNA, 20 bp, synthetic construct
  source 1..20: mol_type = other DNA
aaaaaaaaaaaaaaaaaagc

SEQ ID NO: 79340 - DNA, 20 bp, synthetic construct
  source 1..20: mol_type = other DNA
taaaaaaaaaaaaaaaaaag

SEQ ID NO: 79341 - DNA, 20 bp, synthetic construct
  source 1..20: mol_type = other DNA
ataaaaaaaaaaaaaaaaaa

SEQ ID NO: 79342 - DNA, 20 bp, synthetic construct
  source 1..20: mol_type = other DNA
cataaaaaaaaaaaaaaaaa

SEQ ID NO: 79343 - DNA, 20 bp, synthetic construct
  source 1..20: mol_type = other DNA
acataaaaaaaaaaaaaaaa

SEQ ID NO: 79344 - DNA, 20 bp, synthetic construct
  source 1..20: mol_type = other DNA
tacataaaaaaaaaaaaaaa

SEQ ID NO: 79345 - DNA, 20 bp, synthetic construct
  source 1..20: mol_type = other DNA
ctacataaaaaaaaaaaaaa

SEQ ID NO: 79346 - DNA, 20 bp, synthetic construct
  source 1..20: mol_type = other DNA
cctacataaaaaaaaaaaaa

SEQ ID NO: 79347 - DNA, 20 bp, synthetic construct
  source 1..20: mol_type = other DNA
ccctacataaaaaaaaaaaa

SEQ ID NO: 79348 - DNA, 20 bp, synthetic construct
  source 1..20: mol_type = other DNA
gccctacataaaaaaaaaaa

SEQ ID NO: 79349 - DNA, 20 bp, synthetic construct
  source 1..20: mol_type = other DNA
tgccctacataaaaaaaaaa

SEQ ID NO: 79350 - DNA, 20 bp, synthetic construct
  source 1..20: mol_type = other DNA
atgccctacataaaaaaaaa

SEQ ID NO: 79351 - DNA, 20 bp, synthetic construct
  source 1..20: mol_type = other DNA
tatgccctacataaaaaaaa

SEQ ID NO: 79352 - DNA, 20 bp, synthetic construct
  source 1..20: mol_type = other DNA
gtatgccctacataaaaaaa

SEQ ID NO: 79353 - DNA, 20 bp, synthetic construct
  source 1..20: mol_type = other DNA
tgtatgccctacataaaaaa

SEQ ID NO: 79354 - DNA, 20 bp, synthetic construct
  source 1..20: mol_type = other DNA
atgtatgccctacataaaaa

SEQ ID NO: 79355 - DNA, 20 bp, synthetic construct
  source 1..20: mol_type = other DNA
aatgtatgccctacataaaa

SEQ ID NO: 79356 - DNA, 20 bp, synthetic construct
  source 1..20: mol_type = other DNA
taatgtatgccctacataaa

SEQ ID NO: 79357 - DNA, 20 bp, synthetic construct
  source 1..20: mol_type = other DNA
gtaatgtatgccctacataa

SEQ ID NO: 79358 - DNA, 20 bp, synthetic construct
  source 1..20: mol_type = other DNA
agtaatgtatgccctacata

SEQ ID NO: 79359 - DNA, 20 bp, synthetic construct
  source 1..20: mol_type = other DNA
aagtaatgtatgccctacat

SEQ ID NO: 79360 - DNA, 20 bp, synthetic construct
  source 1..20: mol_type = other DNA
taagtaatgtatgccctaca

SEQ ID NO: 79361 - DNA, 20 bp, synthetic construct
  source 1..20: mol_type = other DNA
ttaagtaatgtatgccctac

SEQ ID NO: 79362 - DNA, 20 bp, synthetic construct
  source 1..20: mol_type = other DNA
cttaagtaatgtatgcccta

SEQ ID NO: 79363 - DNA, 20 bp, synthetic construct
  source 1..20: mol_type = other DNA
acttaagtaatgtatgccct

SEQ ID NO: 79364 - DNA, 20 bp, synthetic construct
  source 1..20: mol_type = other DNA
tacttaagtaatgtatgccc

SEQ ID NO: 79365 - DNA, 20 bp, synthetic construct
  source 1..20: mol_type = other DNA
ttacttaagtaatgtatgcc

SEQ ID NO: 79366 - DNA, 20 bp, synthetic construct
  source 1..20: mol_type = other DNA
attacttaagtaatgtatgc

SEQ ID NO: 79367 - DNA, 20 bp, synthetic construct
  source 1..20: mol_type = other DNA
aattacttaagtaatgtatg

SEQ ID NO: 79368 - DNA, 20 bp, synthetic construct
  source 1..20: mol_type = other DNA
aaattacttaagtaatgtat

SEQ ID NO: 79369 - DNA, 20 bp, synthetic construct
  source 1..20: mol_type = other DNA
aaaattacttaagtaatgta

SEQ ID NO: 79370 - DNA, 20 bp, synthetic construct
  source 1..20: mol_type = other DNA
taaaattacttaagtaatgt

SEQ ID NO: 79371 - DNA, 20 bp, synthetic construct
  source 1..20: mol_type = other DNA
ttaaaattacttaagtaatg

SEQ ID NO: 79372 - DNA, 20 bp, synthetic construct
  source 1..20: mol_type = other DNA
tttaaaattacttaagtaat

SEQ ID NO: 79373 - DNA, 20 bp, synthetic construct
  source 1..20: mol_type = other DNA
ctttaaaattacttaagtaa

SEQ ID NO: 79374 - DNA, 20 bp, synthetic construct
  source 1..20: mol_type = other DNA
gctttaaaattacttaagta

SEQ ID NO: 79375 - DNA, 20 bp, synthetic construct
  source 1..20: mol_type = other DNA
ggctttaaaattacttaagt

SEQ ID NO: 79376 - DNA, 20 bp, synthetic construct
  source 1..20: mol_type = other DNA
aggctttaaaattacttaag

SEQ ID NO: 79377 - DNA, 20 bp, synthetic construct
  source 1..20: mol_type = other DNA
gaggctttaaaattacttaa

SEQ ID NO: 79378 - DNA, 20 bp, synthetic construct
  source 1..20: mol_type = other DNA
ggaggctttaaaattactta

SEQ ID NO: 79379 - DNA, 20 bp, synthetic construct
  source 1..20: mol_type = other DNA
tggaggctttaaaattactt

SEQ ID NO: 79380 - DNA, 20 bp, synthetic construct
  source 1..20: mol_type = other DNA
atggaggctttaaaattact

SEQ ID NO: 79381 - DNA, 20 bp, synthetic construct
  source 1..20: mol_type = other DNA
tatggaggctttaaaattac

SEQ ID NO: 79382 - DNA, 20 bp, synthetic construct
  source 1..20: mol_type = other DNA
ttatggaggctttaaaatta

SEQ ID NO: 79383 - DNA, 20 bp, synthetic construct
  source 1..20: mol_type = other DNA
cttatggaggctttaaaatt

SEQ ID NO: 79384 - DNA, 20 bp, synthetic construct
  source 1..20: mol_type = other DNA
acttatggaggctttaaaat

SEQ ID NO: 79385 - DNA, 20 bp, synthetic construct
  source 1..20: mol_type = other DNA
tacttatggaggctttaaaa

SEQ ID NO: 79386 - DNA, 20 bp, synthetic construct
  source 1..20: mol_type = other DNA
ttacttatggaggctttaaa

SEQ ID NO: 79387 - DNA, 20 bp, synthetic construct
  source 1..20: mol_type = other DNA
cttacttatggaggctttaa

SEQ ID NO: 79388 - DNA, 20 bp, synthetic construct
  source 1..20: mol_type = other DNA
acttacttatggaggcttta

SEQ ID NO: 79389 - DNA, 20 bp, synthetic construct
  source 1..20: mol_type = other DNA
cacttacttatggaggcttt

SEQ ID NO: 79390 - DNA, 20 bp, synthetic construct
  source 1..20: mol_type = other DNA
acacttacttatggaggctt

SEQ ID NO: 79391 - DNA, 20 bp, synthetic construct
  source 1..20: mol_type = other DNA
cacacttacttatggaggct

SEQ ID NO: 79392 - DNA, 20 bp, synthetic construct
  source 1..20: mol_type = other DNA
tcacacttacttatggaggc

SEQ ID NO: 79393 - DNA, 20 bp, synthetic construct
  source 1..20: mol_type = other DNA
atcacacttacttatggagg

SEQ ID NO: 79394 - DNA, 20 bp, synthetic construct
  source 1..20: mol_type = other DNA
aatcacacttacttatggag

SEQ ID NO: 79395 - DNA, 20 bp, synthetic construct
  source 1..20: mol_type = other DNA
aaatcacacttacttatgga

SEQ ID NO: 79396 - DNA, 20 bp, synthetic construct
  source 1..20: mol_type = other DNA
gaaatcacacttacttatgg

SEQ ID NO: 79397 - DNA, 20 bp, synthetic construct
  source 1..20: mol_type = other DNA
ggaaatcacacttacttatg

SEQ ID NO: 79398 - DNA, 20 bp, synthetic construct
  source 1..20: mol_type = other DNA
aggaaatcacacttacttat

SEQ ID NO: 79399 - DNA, 20 bp, synthetic construct
  source 1..20: mol_type = other DNA
caggaaatcacacttactta

SEQ ID NO: 79400 - DNA, 20 bp, synthetic construct
  source 1..20: mol_type = other DNA
gcaggaaatcacacttactt

SEQ ID NO: 79401 - DNA, 20 bp, synthetic construct
  source 1..20: mol_type = other DNA
ggcaggaaatcacacttact

SEQ ID NO: 79402 - DNA, 20 bp, synthetic construct
  source 1..20: mol_type = other DNA
gggcaggaaatcacacttac

SEQ ID NO: 79403 - DNA, 20 bp, synthetic construct
  source 1..20: mol_type = other DNA
tgggcaggaaatcacactta

SEQ ID NO: 79404 - DNA, 20 bp, synthetic construct
  source 1..20: mol_type = other DNA
atgggcaggaaatcacactt

SEQ ID NO: 79405 - DNA, 20 bp, synthetic construct
  source 1..20: mol_type = other DNA
catgggcaggaaatcacact

SEQ ID NO: 79406 - DNA, 20 bp, synthetic construct
  source 1..20: mol_type = other DNA
acatgggcaggaaatcacac

SEQ ID NO: 79407 - DNA, 20 bp, synthetic construct
  source 1..20: mol_type = other DNA
cacatgggcaggaaatcaca

SEQ ID NO: 79408 - DNA, 20 bp, synthetic construct
  source 1..20: mol_type = other DNA
acacatgggcaggaaatcac

SEQ ID NO: 79409 - DNA, 20 bp, synthetic construct
  source 1..20: mol_type = other DNA
aacacatgggcaggaaatca

SEQ ID NO: 79410 - DNA, 20 bp, synthetic construct
  source 1..20: mol_type = other DNA
aaacacatgggcaggaaatc

SEQ ID NO: 79411 - DNA, 20 bp, synthetic construct
  source 1..20: mol_type = other DNA
caaacacatgggcaggaaat

SEQ ID NO: 79412 - DNA, 20 bp, synthetic construct
  source 1..20: mol_type = other DNA
ccaaacacatgggcaggaaa

SEQ ID NO: 79413 - DNA, 20 bp, synthetic construct
  source 1..20: mol_type = other DNA
gccaaacacatgggcaggaa

SEQ ID NO: 79414 - DNA, 20 bp, synthetic construct
  source 1..20: mol_type = other DNA
tgccaaacacatgggcagga

SEQ ID NO: 79415 - DNA, 20 bp, synthetic construct
  source 1..20: mol_type = other DNA
ttgccaaacacatgggcagg

SEQ ID NO: 79416 - DNA, 20 bp, synthetic construct
  source 1..20: mol_type = other DNA
tttgccaaacacatgggcag

SEQ ID NO: 79417 - DNA, 20 bp, synthetic construct
  source 1..20: mol_type = other DNA
ttttgccaaacacatgggca

SEQ ID NO: 79418 - DNA, 20 bp, synthetic construct
  source 1..20: mol_type = other DNA
cttttgccaaacacatgggc

SEQ ID NO: 79419 - DNA, 20 bp, synthetic construct
  source 1..20: mol_type = other DNA
ccttttgccaaacacatggg

SEQ ID NO: 79420 - DNA, 20 bp, synthetic construct
  source 1..20: mol_type = other DNA
tccttttgccaaacacatgg

SEQ ID NO: 79421 - DNA, 20 bp, synthetic construct
  source 1..20: mol_type = other DNA
ttccttttgccaaacacatg

SEQ ID NO: 79422 - DNA, 20 bp, synthetic construct
  source 1..20: mol_type = other DNA
attccttttgccaaacacat

SEQ ID NO: 79423 - DNA, 20 bp, synthetic construct
  source 1..20: mol_type = other DNA
aattccttttgccaaacaca

SEQ ID NO: 79424 - DNA, 20 bp, synthetic construct
  source 1..20: mol_type = other DNA
caattccttttgccaaacac

SEQ ID NO: 79425 - DNA, 20 bp, synthetic construct
  source 1..20: mol_type = other DNA
gcaattccttttgccaaaca

SEQ ID NO: 79426 - DNA, 20 bp, synthetic construct
  source 1..20: mol_type = other DNA
tgcaattccttttgccaaac

SEQ ID NO: 79427 - DNA, 20 bp, synthetic construct
  source 1..20: mol_type = other DNA
atgcaattccttttgccaaa

SEQ ID NO: 79428 - DNA, 20 bp, synthetic construct
  source 1..20: mol_type = other DNA
aatgcaattccttttgccaa

SEQ ID NO: 79429 - DNA, 20 bp, synthetic construct
  source 1..20: mol_type = other DNA
caatgcaattccttttgcca

SEQ ID NO: 79430 - DNA, 20 bp, synthetic construct
  source 1..20: mol_type = other DNA
ccaatgcaattccttttgcc

SEQ ID NO: 79431 - DNA, 20 bp, synthetic construct
  source 1..20: mol_type = other DNA
accaatgcaattccttttgc

SEQ ID NO: 79432 - DNA, 20 bp, synthetic construct
  source 1..20: mol_type = other DNA
caccaatgcaattccttttg

SEQ ID NO: 79433 - DNA, 20 bp, synthetic construct
  source 1..20: mol_type = other DNA
ccaccaatgcaattcctttt

SEQ ID NO: 79434 - DNA, 20 bp, synthetic construct
  source 1..20: mol_type = other DNA
accaccaatgcaattccttt

SEQ ID NO: 79435 - DNA, 20 bp, synthetic construct
  source 1..20: mol_type = other DNA
taccaccaatgcaattcctt

SEQ ID NO: 79436 - DNA, 20 bp, synthetic construct
  source 1..20: mol_type = other DNA
ctaccaccaatgcaattcct

SEQ ID NO: 79437 - DNA, 20 bp, synthetic construct
  source 1..20: mol_type = other DNA
tctaccaccaatgcaattcc

SEQ ID NO: 79438 - DNA, 20 bp, synthetic construct
  source 1..20: mol_type = other DNA
gtctaccaccaatgcaattc

SEQ ID NO: 79439 - DNA, 20 bp, synthetic construct
  source 1..20: mol_type = other DNA
agtctaccaccaatgcaatt

SEQ ID NO: 79440 - DNA, 20 bp, synthetic construct
  source 1..20: mol_type = other DNA
aagtctaccaccaatgcaat

SEQ ID NO: 79441 - DNA, 20 bp, synthetic construct
  source 1..20: mol_type = other DNA
taagtctaccaccaatgcaa

SEQ ID NO: 79442 - DNA, 20 bp, synthetic construct
  source 1..20: mol_type = other DNA
gtaagtctaccaccaatgca

SEQ ID NO: 79443 - DNA, 20 bp, synthetic construct
  source 1..20: mol_type = other DNA
tgtaagtctaccaccaatgc

SEQ ID NO: 79444 - DNA, 20 bp, synthetic construct
  source 1..20: mol_type = other DNA
atgtaagtctaccaccaatg

SEQ ID NO: 79445 - DNA, 20 bp, synthetic construct
  source 1..20: mol_type = other DNA
aatgtaagtctaccaccaat

SEQ ID NO: 79446 - DNA, 20 bp, synthetic construct
  source 1..20: mol_type = other DNA
taatgtaagtctaccaccaa

SEQ ID NO: 79447 - DNA, 20 bp, synthetic construct
  source 1..20: mol_type = other DNA
ataatgtaagtctaccacca

SEQ ID NO: 79448 - DNA, 20 bp, synthetic construct
  source 1..20: mol_type = other DNA
tataatgtaagtctaccacc

SEQ ID NO: 79449 - DNA, 20 bp, synthetic construct
  source 1..20: mol_type = other DNA
ctataatgtaagtctaccac

SEQ ID NO: 79450 - DNA, 20 bp, synthetic construct
  source 1..20: mol_type = other DNA
actataatgtaagtctacca

SEQ ID NO: 79451 - DNA, 20 bp, synthetic construct
  source 1..20: mol_type = other DNA
gactataatgtaagtctacc

SEQ ID NO: 79452 - DNA, 20 bp, synthetic construct
  source 1..20: mol_type = other DNA
agactataatgtaagtctac

SEQ ID NO: 79453 - DNA, 20 bp, synthetic construct
  source 1..20: mol_type = other DNA
aagactataatgtaagtcta

SEQ ID NO: 79454 - DNA, 20 bp, synthetic construct
  source 1..20: mol_type = other DNA
taagactataatgtaagtct

SEQ ID NO: 79455 - DNA, 20 bp, synthetic construct
  source 1..20: mol_type = other DNA
gtaagactataatgtaagtc

SEQ ID NO: 79456 - DNA, 20 bp, synthetic construct
  source 1..20: mol_type = other DNA
ggtaagactataatgtaagt

SEQ ID NO: 79457 - DNA, 20 bp, synthetic construct
  source 1..20: mol_type = other DNA
aggtaagactataatgtaag

SEQ ID NO: 79458 - DNA, 20 bp, synthetic construct
  source 1..20: mol_type = other DNA
caggtaagactataatgtaa

SEQ ID NO: 79459 - DNA, 20 bp, synthetic construct
  source 1..20: mol_type = other DNA
ccaggtaagactataatgta

SEQ ID NO: 79460 - DNA, 20 bp, synthetic construct
  source 1..20: mol_type = other DNA
tccaggtaagactataatgt

SEQ ID NO: 79461 - DNA, 20 bp, synthetic construct
  source 1..20: mol_type = other DNA
ctccaggtaagactataatg

SEQ ID NO: 79462 - DNA, 20 bp, synthetic construct
  source 1..20: mol_type = other DNA
actccaggtaagactataat

SEQ ID NO: 79463 - DNA, 20 bp, synthetic construct
  source 1..20: mol_type = other DNA
tactccaggtaagactataa

SEQ ID NO: 79464 - DNA, 20 bp, synthetic construct
  source 1..20: mol_type = other DNA
ctactccaggtaagactata

SEQ ID NO: 79465 - DNA, 20 bp, synthetic construct
  source 1..20: mol_type = other DNA
gctactccaggtaagactat

SEQ ID NO: 79466 - DNA, 20 bp, synthetic construct
  source 1..20: mol_type = other DNA
tgctactccaggtaagacta

SEQ ID NO: 79467 - DNA, 20 bp, synthetic construct
  source 1..20: mol_type = other DNA
gtgctactccaggtaagact

SEQ ID NO: 79468 - DNA, 20 bp, synthetic construct
  source 1..20: mol_type = other DNA
tgtgctactccaggtaagac

SEQ ID NO: 79469 - DNA, 20 bp, synthetic construct
  source 1..20: mol_type = other DNA
ctgtgctactccaggtaaga

SEQ ID NO: 79470 - DNA, 20 bp, synthetic construct
  source 1..20: mol_type = other DNA
cctgtgctactccaggtaag

SEQ ID NO: 79471 - DNA, 20 bp, synthetic construct
  source 1..20: mol_type = other DNA
tcctgtgctactccaggtaa

SEQ ID NO: 79472 - DNA, 20 bp, synthetic construct
  source 1..20: mol_type = other DNA
ctcctgtgctactccaggta

SEQ ID NO: 79473 - DNA, 20 bp, synthetic construct
  source 1..20: mol_type = other DNA
cctcctgtgctactccaggt

SEQ ID NO: 79474 - DNA, 20 bp, synthetic construct
  source 1..20: mol_type = other DNA
tcctcctgtgctactccagg

SEQ ID NO: 79475 - DNA, 20 bp, synthetic construct
  source 1..20: mol_type = other DNA
gtcctcctgtgctactccag

SEQ ID NO: 79476 - DNA, 20 bp, synthetic construct
  source 1..20: mol_type = other DNA
ggtcctcctgtgctactcca

SEQ ID NO: 79477 - DNA, 20 bp, synthetic construct
  source 1..20: mol_type = other DNA
gggtcctcctgtgctactcc

SEQ ID NO: 79478 - DNA, 20 bp, synthetic construct
  source 1..20: mol_type = other DNA
tgggtcctcctgtgctactc

SEQ ID NO: 79479 - DNA, 20 bp, synthetic construct
  source 1..20: mol_type = other DNA
ttgggtcctcctgtgctact

SEQ ID NO: 79480 - DNA, 20 bp, synthetic construct
  source 1..20: mol_type = other DNA
cttgggtcctcctgtgctac

SEQ ID NO: 79481 - DNA, 20 bp, synthetic construct
  source 1..20: mol_type = other DNA
ccttgggtcctcctgtgcta

SEQ ID NO: 79482 - DNA, 20 bp, synthetic construct
  source 1..20: mol_type = other DNA
accttgggtcctcctgtgct

SEQ ID NO: 79483 - DNA, 20 bp, synthetic construct
  source 1..20: mol_type = other DNA
aaccttgggtcctcctgtgc

SEQ ID NO: 79484 - DNA, 20 bp, synthetic construct
  source 1..20: mol_type = other DNA
taaccttgggtcctcctgtg

SEQ ID NO: 79485 - DNA, 20 bp, synthetic construct
  source 1..20: mol_type = other DNA
ttaaccttgggtcctcctgt

SEQ ID NO: 79486 - DNA, 20 bp, synthetic construct
  source 1..20: mol_type = other DNA
attaaccttgggtcctcctg

SEQ ID NO: 79487 - DNA, 20 bp, synthetic construct
  source 1..20: mol_type = other DNA
tattaaccttgggtcctcct

SEQ ID NO: 79488 - DNA, 20 bp, synthetic construct
  source 1..20: mol_type = other DNA
ctattaaccttgggtcctcc

SEQ ID NO: 79489 - DNA, 20 bp, synthetic construct
  source 1..20: mol_type = other DNA
cctattaaccttgggtcctc

SEQ ID NO: 79490 - DNA, 20 bp, synthetic construct
  source 1..20: mol_type = other DNA
acctattaaccttgggtcct

SEQ ID NO: 79491 - DNA, 20 bp, synthetic construct
  source 1..20: mol_type = other DNA
cacctattaaccttgggtcc

SEQ ID NO: 79492 - DNA, 20 bp, synthetic construct
  source 1..20: mol_type = other DNA
tcacctattaaccttgggtc

SEQ ID NO: 79493 - DNA, 20 bp, synthetic construct
  source 1..20: mol_type = other DNA
ttcacctattaaccttgggt

SEQ ID NO: 79494 - DNA, 20 bp, synthetic construct
  source 1..20: mol_type = other DNA
gttcacctattaaccttggg

SEQ ID NO: 79495 - DNA, 20 bp, synthetic construct
  source 1..20: mol_type = other DNA
agttcacctattaaccttgg

SEQ ID NO: 79496 - DNA, 20 bp, synthetic construct
  source 1..20: mol_type = other DNA
aagttcacctattaaccttg

SEQ ID NO: 79497 - DNA, 20 bp, synthetic construct
  source 1..20: mol_type = other DNA
gaagttcacctattaacctt

SEQ ID NO: 79498 - DNA, 20 bp, synthetic construct
  source 1..20: mol_type = other DNA
cgaagttcacctattaacct

SEQ ID NO: 79499 - DNA, 20 bp, synthetic construct
  source 1..20: mol_type = other DNA
tcgaagttcacctattaacc

SEQ ID NO: 79500 - DNA, 20 bp, synthetic construct
  source 1..20: mol_type = other DNA
ctcgaagttcacctattaac

SEQ ID NO: 79501 - DNA, 20 bp, synthetic construct
  source 1..20: mol_type = other DNA
cctcgaagttcacctattaa

SEQ ID NO: 79502 - DNA, 20 bp, synthetic construct
  source 1..20: mol_type = other DNA
gcctcgaagttcacctatta

SEQ ID NO: 79503 - DNA, 20 bp, synthetic construct
  source 1..20: mol_type = other DNA
tgcctcgaagttcacctatt

SEQ ID NO: 79504 - DNA, 20 bp, synthetic construct
  source 1..20: mol_type = other DNA
ttgcctcgaagttcacctat

SEQ ID NO: 79505 - DNA, 20 bp, synthetic construct
  source 1..20: mol_type = other DNA
cttgcctcgaagttcaccta

SEQ ID NO: 79506 - DNA, 20 bp, synthetic construct
  source 1..20: mol_type = other DNA
gcttgcctcgaagttcacct

SEQ ID NO: 79507 - DNA, 20 bp, synthetic construct
  source 1..20: mol_type = other DNA
ggcttgcctcgaagttcacc

SEQ ID NO: 79508 - DNA, 20 bp, synthetic construct
  source 1..20: mol_type = other DNA
aggcttgcctcgaagttcac

SEQ ID NO: 79509 - DNA, 20 bp, synthetic construct
  source 1..20: mol_type = other DNA
aaggcttgcctcgaagttca

SEQ ID NO: 79510 - DNA, 20 bp, synthetic construct
  source 1..20: mol_type = other DNA
taaggcttgcctcgaagttc

SEQ ID NO: 79511 - DNA, 20 bp, synthetic construct
  source 1..20: mol_type = other DNA
ctaaggcttgcctcgaagtt

SEQ ID NO: 79512 - DNA, 20 bp, synthetic construct
  source 1..20: mol_type = other DNA
gctaaggcttgcctcgaagt

SEQ ID NO: 79513 - DNA, 20 bp, synthetic construct
  source 1..20: mol_type = other DNA
tgctaaggcttgcctcgaag

SEQ ID NO: 79514 - DNA, 20 bp, synthetic construct
  source 1..20: mol_type = other DNA
atgctaaggcttgcctcgaa

SEQ ID NO: 79515 - DNA, 20 bp, synthetic construct
  source 1..20: mol_type = other DNA
aatgctaaggcttgcctcga

SEQ ID NO: 79516 - DNA, 20 bp, synthetic construct
  source 1..20: mol_type = other DNA
caatgctaaggcttgcctcg

SEQ ID NO: 79517 - DNA, 20 bp, synthetic construct
  source 1..20: mol_type = other DNA
tcaatgctaaggcttgcctc

SEQ ID NO: 79518 - DNA, 20 bp, synthetic construct
  source 1..20: mol_type = other DNA
ctcaatgctaaggcttgcct

SEQ ID NO: 79519 - DNA, 20 bp, synthetic construct
  source 1..20: mol_type = other DNA
cctcaatgctaaggcttgcc

SEQ ID NO: 79520 - DNA, 20 bp, synthetic construct
  source 1..20: mol_type = other DNA
acctcaatgctaaggcttgc

SEQ ID NO: 79521 - DNA, 20 bp, synthetic construct
  source 1..20: mol_type = other DNA
aacctcaatgctaaggcttg

SEQ ID NO: 79522 - DNA, 20 bp, synthetic construct
  source 1..20: mol_type = other DNA
caacctcaatgctaaggctt

SEQ ID NO: 79523 - DNA, 20 bp, synthetic construct
  source 1..20: mol_type = other DNA
gcaacctcaatgctaaggct

SEQ ID NO: 79524 - DNA, 20 bp, synthetic construct
  source 1..20: mol_type = other DNA
ggcaacctcaatgctaaggc

SEQ ID NO: 79525 - DNA, 20 bp, synthetic construct
  source 1..20: mol_type = other DNA
tggcaacctcaatgctaagg

SEQ ID NO: 79526 - DNA, 20 bp, synthetic construct
  source 1..20: mol_type = other DNA
atggcaacctcaatgctaag

SEQ ID NO: 79527 - DNA, 20 bp, synthetic construct
  source 1..20: mol_type = other DNA
gatggcaacctcaatgctaa

SEQ ID NO: 79528 - DNA, 20 bp, synthetic construct
  source 1..20: mol_type = other DNA
tgatggcaacctcaatgcta

SEQ ID NO: 79529 - DNA, 20 bp, synthetic construct
  source 1..20: mol_type = other DNA
ctgatggcaacctcaatgct

SEQ ID NO: 79530 - DNA, 20 bp, synthetic construct
  source 1..20: mol_type = other DNA
gctgatggcaacctcaatgc

SEQ ID NO: 79531 - DNA, 20 bp, synthetic construct
  source 1..20: mol_type = other DNA
tgctgatggcaacctcaatg

SEQ ID NO: 79532 - DNA, 20 bp, synthetic construct
  source 1..20: mol_type = other DNA
atgctgatggcaacctcaat

SEQ ID NO: 79533 - DNA, 20 bp, synthetic construct
  source 1..20: mol_type = other DNA
aatgctgatggcaacctcaa

SEQ ID NO: 79534 - DNA, 20 bp, synthetic construct
  source 1..20: mol_type = other DNA
caatgctgatggcaacctca

SEQ ID NO: 79535 - DNA, 20 bp, synthetic construct
  source 1..20: mol_type = other DNA
gcaatgctgatggcaacctc

SEQ ID NO: 79536 - DNA, 20 bp, synthetic construct
  source 1..20: mol_type = other DNA
agcaatgctgatggcaacct

SEQ ID NO: 79537 - DNA, 20 bp, synthetic construct
  source 1..20: mol_type = other DNA
aagcaatgctgatggcaacc

SEQ ID NO: 79538 - DNA, 20 bp, synthetic construct
  source 1..20: mol_type = other DNA
caagcaatgctgatggcaac

SEQ ID NO: 79539 - DNA, 20 bp, synthetic construct
  source 1..20: mol_type = other DNA
ccaagcaatgctgatggcaa

SEQ ID NO: 79540 - DNA, 20 bp, synthetic construct
  source 1..20: mol_type = other DNA
accaagcaatgctgatggca

SEQ ID NO: 79541 - DNA, 20 bp, synthetic construct
  source 1..20: mol_type = other DNA
aaccaagcaatgctgatggc

SEQ ID NO: 79542 - DNA, 20 bp, synthetic construct
  source 1..20: mol_type = other DNA
caaccaagcaatgctgatgg

SEQ ID NO: 79543 - DNA, 20 bp, synthetic construct
  source 1..20: mol_type = other DNA
tcaaccaagcaatgctgatg

SEQ ID NO: 79544 - DNA, 20 bp, synthetic construct
  source 1..20: mol_type = other DNA
atcaaccaagcaatgctgat

SEQ ID NO: 79545 - DNA, 20 bp, synthetic construct
  source 1..20: mol_type = other DNA
catcaaccaagcaatgctga

SEQ ID NO: 79546 - DNA, 20 bp, synthetic construct
  source 1..20: mol_type = other DNA
acatcaaccaagcaatgctg

SEQ ID NO: 79547 - DNA, 20 bp, synthetic construct
  source 1..20: mol_type = other DNA
cacatcaaccaagcaatgct

SEQ ID NO: 79548 - DNA, 20 bp, synthetic construct
  source 1..20: mol_type = other DNA
acacatcaaccaagcaatgc

SEQ ID NO: 79549 - DNA, 20 bp, synthetic construct
  source 1..20: mol_type = other DNA
aacacatcaaccaagcaatg

SEQ ID NO: 79550 - DNA, 20 bp, synthetic construct
  source 1..20: mol_type = other DNA
gaacacatcaaccaagcaat

SEQ ID NO: 79551 - DNA, 20 bp, synthetic construct
  source 1..20: mol_type = other DNA
tgaacacatcaaccaagcaa

SEQ ID NO: 79552 - DNA, 20 bp, synthetic construct
  source 1..20: mol_type = other DNA
atgaacacatcaaccaagca

SEQ ID NO: 79553 - DNA, 20 bp, synthetic construct
  source 1..20: mol_type = other DNA
aatgaacacatcaaccaagc

SEQ ID NO: 79554 - DNA, 20 bp, synthetic construct
  source 1..20: mol_type = other DNA
gaatgaacacatcaaccaag

SEQ ID NO: 79555 - DNA, 20 bp, synthetic construct
  source 1..20: mol_type = other DNA
agaatgaacacatcaaccaa

SEQ ID NO: 79556 - DNA, 20 bp, synthetic construct
  source 1..20: mol_type = other DNA
aagaatgaacacatcaacca

SEQ ID NO: 79557 - DNA, 20 bp, synthetic construct
  source 1..20: mol_type = other DNA
gaagaatgaacacatcaacc

SEQ ID NO: 79558 - DNA, 20 bp, synthetic construct
  source 1..20: mol_type = other DNA
agaagaatgaacacatcaac

SEQ ID NO: 79559 - DNA, 20 bp, synthetic construct
  source 1..20: mol_type = other DNA
cagaagaatgaacacatcaa

SEQ ID NO: 79560 - DNA, 20 bp, synthetic construct
  source 1..20: mol_type = other DNA
ccagaagaatgaacacatca

SEQ ID NO: 79561 - DNA, 20 bp, synthetic construct
  source 1..20: mol_type = other DNA
cccagaagaatgaacacatc

SEQ ID NO: 79562 - DNA, 20 bp, synthetic construct
  source 1..20: mol_type = other DNA
tcccagaagaatgaacacat

SEQ ID NO: 79563 - DNA, 20 bp, synthetic construct
  source 1..20: mol_type = other DNA
atcccagaagaatgaacaca

SEQ ID NO: 79564 - DNA, 20 bp, synthetic construct
  source 1..20: mol_type = other DNA
catcccagaagaatgaacac

SEQ ID NO: 79565 - DNA, 20 bp, synthetic construct
  source 1..20: mol_type = other DNA
ccatcccagaagaatgaaca

SEQ ID NO: 79566 - DNA, 20 bp, synthetic construct
  source 1..20: mol_type = other DNA
tccatcccagaagaatgaac

SEQ ID NO: 79567 - DNA, 20 bp, synthetic construct
  source 1..20: mol_type = other DNA
atccatcccagaagaatgaa

SEQ ID NO: 79568 - DNA, 20 bp, synthetic construct
  source 1..20: mol_type = other DNA
aatccatcccagaagaatga

SEQ ID NO: 79569 - DNA, 20 bp, synthetic construct
  source 1..20: mol_type = other DNA
taatccatcccagaagaatg

SEQ ID NO: 79570 - DNA, 20 bp, synthetic construct
  source 1..20: mol_type = other DNA
gtaatccatcccagaagaat

SEQ ID NO: 79571 - DNA, 20 bp, synthetic construct
  source 1..20: mol_type = other DNA
tgtaatccatcccagaagaa

SEQ ID NO: 79572 - DNA, 20 bp, synthetic construct
  source 1..20: mol_type = other DNA
ttgtaatccatcccagaaga

SEQ ID NO: 79573 - DNA, 20 bp, synthetic construct
  source 1..20: mol_type = other DNA
gttgtaatccatcccagaag

SEQ ID NO: 79574 - DNA, 20 bp, synthetic construct
  source 1..20: mol_type = other DNA
ggttgtaatccatcccagaa

SEQ ID NO: 79575 - DNA, 20 bp, synthetic construct
  source 1..20: mol_type = other DNA
aggttgtaatccatcccaga

SEQ ID NO: 79576 - DNA, 20 bp, synthetic construct
  source 1..20: mol_type = other DNA
aaggttgtaatccatcccag

SEQ ID NO: 79577 - DNA, 20 bp, synthetic construct
  source 1..20: mol_type = other DNA
aaaggttgtaatccatccca

SEQ ID NO: 79578 - DNA, 20 bp, synthetic construct
  source 1..20: mol_type = other DNA
taaaggttgtaatccatccc

SEQ ID NO: 79579 - DNA, 20 bp, synthetic construct
  source 1..20: mol_type = other DNA
gtaaaggttgtaatccatcc

SEQ ID NO: 79580 - DNA, 20 bp, synthetic construct
  source 1..20: mol_type = other DNA
agtaaaggttgtaatccatc

SEQ ID NO: 79581 - DNA, 20 bp, synthetic construct
  source 1..20: mol_type = other DNA
cagtaaaggttgtaatccat

SEQ ID NO: 79582 - DNA, 20 bp, synthetic construct
  source 1..20: mol_type = other DNA
ccagtaaaggttgtaatcca

SEQ ID NO: 79583 - DNA, 20 bp, synthetic construct
  source 1..20: mol_type = other DNA
tccagtaaaggttgtaatcc

SEQ ID NO: 79584 - DNA, 20 bp, synthetic construct
  source 1..20: mol_type = other DNA
gtccagtaaaggttgtaatc

SEQ ID NO: 79585 - DNA, 20 bp, synthetic construct
  source 1..20: mol_type = other DNA
agtccagtaaaggttgtaat

SEQ ID NO: 79586 - DNA, 20 bp, synthetic construct
  source 1..20: mol_type = other DNA
aagtccagtaaaggttgtaa

SEQ ID NO: 79587 - DNA, 20 bp, synthetic construct
  source 1..20: mol_type = other DNA
aaagtccagtaaaggttgta

SEQ ID NO: 79588 - DNA, 20 bp, synthetic construct
  source 1..20: mol_type = other DNA
taaagtccagtaaaggttgt

SEQ ID NO: 79589 - DNA, 20 bp, synthetic construct
  source 1..20: mol_type = other DNA
ataaagtccagtaaaggttg

SEQ ID NO: 79590 - DNA, 20 bp, synthetic construct
  source 1..20: mol_type = other DNA
tataaagtccagtaaaggtt

SEQ ID NO: 79591 - DNA, 20 bp, synthetic construct
  source 1..20: mol_type = other DNA
gtataaagtccagtaaaggt

SEQ ID NO: 79592 - DNA, 20 bp, synthetic construct
  source 1..20: mol_type = other DNA
agtataaagtccagtaaagg

SEQ ID NO: 79593 - DNA, 20 bp, synthetic construct
  source 1..20: mol_type = other DNA
aagtataaagtccagtaaag

SEQ ID NO: 79594 - DNA, 20 bp, synthetic construct
  source 1..20: mol_type = other DNA
aaagtataaagtccagtaaa

SEQ ID NO: 79595 - DNA, 20 bp, synthetic construct
  source 1..20: mol_type = other DNA
aaaagtataaagtccagtaa

SEQ ID NO: 79596 - DNA, 20 bp, synthetic construct
  source 1..20: mol_type = other DNA
gaaaagtataaagtccagta

SEQ ID NO: 79597 - DNA, 20 bp, synthetic construct
  source 1..20: mol_type = other DNA
tgaaaagtataaagtccagt

SEQ ID NO: 79598 - DNA, 20 bp, synthetic construct
  source 1..20: mol_type = other DNA
gtgaaaagtataaagtccag

SEQ ID NO: 79599 - DNA, 20 bp, synthetic construct
  source 1..20: mol_type = other DNA
ggtgaaaagtataaagtcca

SEQ ID NO: 79600 - DNA, 20 bp, synthetic construct
  source 1..20: mol_type = other DNA
tggtgaaaagtataaagtcc

SEQ ID NO: 79601 - DNA, 20 bp, synthetic construct
  source 1..20: mol_type = other DNA
ctggtgaaaagtataaagtc

SEQ ID NO: 79602 - DNA, 20 bp, synthetic construct
  source 1..20: mol_type = other DNA
actggtgaaaagtataaagt

SEQ ID NO: 79603 - DNA, 20 bp, synthetic construct
  source 1..20: mol_type = other DNA
tactggtgaaaagtataaag

SEQ ID NO: 79604 - DNA, 20 bp, synthetic construct
  source 1..20: mol_type = other DNA
ttactggtgaaaagtataaa

SEQ ID NO: 79605 - DNA, 20 bp, synthetic construct
  source 1..20: mol_type = other DNA
cttactggtgaaaagtataa

SEQ ID NO: 79606 - DNA, 20 bp, synthetic construct
  source 1..20: mol_type = other DNA
ccttactggtgaaaagtata

SEQ ID NO: 79607 - DNA, 20 bp, synthetic construct
  source 1..20: mol_type = other DNA
gccttactggtgaaaagtat

SEQ ID NO: 79608 - DNA, 20 bp, synthetic construct
  source 1..20: mol_type = other DNA
agccttactggtgaaaagta

SEQ ID NO: 79609 - DNA, 20 bp, synthetic construct
  source 1..20: mol_type = other DNA
aagccttactggtgaaaagt

SEQ ID NO: 79610 - DNA, 20 bp, synthetic construct
  source 1..20: mol_type = other DNA
aaagccttactggtgaaaag

SEQ ID NO: 79611 - DNA, 20 bp, synthetic construct
  source 1..20: mol_type = other DNA
taaagccttactggtgaaaa

SEQ ID NO: 79612 - DNA, 20 bp, synthetic construct
  source 1..20: mol_type = other DNA
ttaaagccttactggtgaaa

SEQ ID NO: 79613 - DNA, 20 bp, synthetic construct
  source 1..20: mol_type = other DNA
tttaaagccttactggtgaa

SEQ ID NO: 79614 - DNA, 20 bp, synthetic construct
  source 1..20: mol_type = other DNA
ttttaaagccttactggtga

SEQ ID NO: 79615 - DNA, 20 bp, synthetic construct
  source 1..20: mol_type = other DNA
tttttaaagccttactggtg

SEQ ID NO: 79616 - DNA, 20 bp, synthetic construct
  source 1..20: mol_type = other DNA
ttttttaaagccttactggt

SEQ ID NO: 79617 - DNA, 20 bp, synthetic construct
  source 1..20: mol_type = other DNA
cttttttaaagccttactgg

SEQ ID NO: 79618 - DNA, 20 bp, synthetic construct
  source 1..20: mol_type = other DNA
ccttttttaaagccttactg

SEQ ID NO: 79619 - DNA, 20 bp, synthetic construct
  source 1..20: mol_type = other DNA
tccttttttaaagccttact

SEQ ID NO: 79620 - DNA, 20 bp, synthetic construct
  source 1..20: mol_type = other DNA
ctccttttttaaagccttac

SEQ ID NO: 79621 - DNA, 20 bp, synthetic construct
  source 1..20: mol_type = other DNA
actccttttttaaagcctta

SEQ ID NO: 79622 - DNA, 20 bp, synthetic construct
  source 1..20: mol_type = other DNA
aactccttttttaaagcctt

SEQ ID NO: 79623 - DNA, 20 bp, synthetic construct
  source 1..20: mol_type = other DNA
caactccttttttaaagcct

SEQ ID NO: 79624 - DNA, 20 bp, synthetic construct
  source 1..20: mol_type = other DNA
tcaactccttttttaaagcc

SEQ ID NO: 79625 - DNA, 20 bp, synthetic construct
  source 1..20: mol_type = other DNA
ttcaactccttttttaaagc

SEQ ID NO: 79626 - DNA, 20 bp, synthetic construct
  source 1..20: mol_type = other DNA
tttcaactccttttttaaag

SEQ ID NO: 79627 - DNA, 20 bp, synthetic construct
  source 1..20: mol_type = other DNA
gtttcaactccttttttaaa

SEQ ID NO: 79628 - DNA, 20 bp, synthetic construct
  source 1..20: mol_type = other DNA
tgtttcaactccttttttaa

SEQ ID NO: 79629 - DNA, 20 bp, synthetic construct
  source 1..20: mol_type = other DNA
atgtttcaactcctttttta

SEQ ID NO: 79630 - DNA, 20 bp, synthetic construct
  source 1..20: mol_type = other DNA
aatgtttcaactcctttttt

SEQ ID NO: 79631 - DNA, 20 bp, synthetic construct
  source 1..20: mol_type = other DNA
taatgtttcaactccttttt

SEQ ID NO: 79632 - DNA, 20 bp, synthetic construct
  source 1..20: mol_type = other DNA
ctaatgtttcaactcctttt

SEQ ID NO: 79633 - DNA, 20 bp, synthetic construct
  source 1..20: mol_type = other DNA
tctaatgtttcaactccttt

SEQ ID NO: 79634 - DNA, 20 bp, synthetic construct
  source 1..20: mol_type = other DNA
ctctaatgtttcaactcctt

SEQ ID NO: 79635 - DNA, 20 bp, synthetic construct
  source 1..20: mol_type = other DNA
tctctaatgtttcaactcct

SEQ ID NO: 79636 - DNA, 20 bp, synthetic construct
  source 1..20: mol_type = other DNA
ttctctaatgtttcaactcc

SEQ ID NO: 79637 - DNA, 20 bp, synthetic construct
  source 1..20: mol_type = other DNA
attctctaatgtttcaactc

SEQ ID NO: 79638 - DNA, 20 bp, synthetic construct
  source 1..20: mol_type = other DNA
tattctctaatgtttcaact

SEQ ID NO: 79639 - DNA, 20 bp, synthetic construct
  source 1..20: mol_type = other DNA
ttattctctaatgtttcaac

SEQ ID NO: 79640 - DNA, 20 bp, synthetic construct
  source 1..20: mol_type = other DNA
attattctctaatgtttcaa

SEQ ID NO: 79641 - DNA, 20 bp, synthetic construct
  source 1..20: mol_type = other DNA
aattattctctaatgtttca

SEQ ID NO: 79642 - DNA, 20 bp, synthetic construct
  source 1..20: mol_type = other DNA
taattattctctaatgtttc

SEQ ID NO: 79643 - DNA, 20 bp, synthetic construct
  source 1..20: mol_type = other DNA
ataattattctctaatgttt

SEQ ID NO: 79644 - DNA, 20 bp, synthetic construct
  source 1..20: mol_type = other DNA
gataattattctctaatgtt

SEQ ID NO: 79645 - DNA, 20 bp, synthetic construct
  source 1..20: mol_type = other DNA
ggataattattctctaatgt

SEQ ID NO: 79646 - DNA, 20 bp, synthetic construct
  source 1..20: mol_type = other DNA
tggataattattctctaatg

SEQ ID NO: 79647 - DNA, 20 bp, synthetic construct
  source 1..20: mol_type = other DNA
ctggataattattctctaat

SEQ ID NO: 79648 - DNA, 20 bp, synthetic construct
  source 1..20: mol_type = other DNA
cctggataattattctctaa

SEQ ID NO: 79649 - DNA, 20 bp, synthetic construct
  source 1..20: mol_type = other DNA
gcctggataattattctcta

SEQ ID NO: 79650 - DNA, 20 bp, synthetic construct
  source 1..20: mol_type = other DNA
tgcctggataattattctct

SEQ ID NO: 79651 - DNA, 20 bp, synthetic construct
  source 1..20: mol_type = other DNA
ctgcctggataattattctc

SEQ ID NO: 79652 - DNA, 20 bp, synthetic construct
  source 1..20: mol_type = other DNA
actgcctggataattattct

SEQ ID NO: 79653 - DNA, 20 bp, synthetic construct
  source 1..20: mol_type = other DNA
tactgcctggataattattc

SEQ ID NO: 79654 - DNA, 20 bp, synthetic construct
  source 1..20: mol_type = other DNA
ttactgcctggataattatt

SEQ ID NO: 79655 - DNA, 20 bp, synthetic construct
  source 1..20: mol_type = other DNA
attactgcctggataattat

SEQ ID NO: 79656 - DNA, 20 bp, synthetic construct
  source 1..20: mol_type = other DNA
tattactgcctggataatta

SEQ ID NO: 79657 - DNA, 20 bp, synthetic construct
  source 1..20: mol_type = other DNA
atattactgcctggataatt

SEQ ID NO: 79658 - DNA, 20 bp, synthetic construct
  source 1..20: mol_type = other DNA
aatattactgcctggataat

SEQ ID NO: 79659 - DNA, 20 bp, synthetic construct
  source 1..20: mol_type = other DNA
gaatattactgcctggataa

SEQ ID NO: 79660 - DNA, 20 bp, synthetic construct
  source 1..20: mol_type = other DNA
tgaatattactgcctggata

SEQ ID NO: 79661 - DNA, 20 bp, synthetic construct
  source 1..20: mol_type = other DNA
gtgaatattactgcctggat

SEQ ID NO: 79662 - DNA, 20 bp, synthetic construct
  source 1..20: mol_type = other DNA
agtgaatattactgcctgga

SEQ ID NO: 79663 - DNA, 20 bp, synthetic construct
  source 1..20: mol_type = other DNA
cagtgaatattactgcctgg

SEQ ID NO: 79664 - DNA, 20 bp, synthetic construct
  source 1..20: mol_type = other DNA
ccagtgaatattactgcctg

SEQ ID NO: 79665 - DNA, 20 bp, synthetic construct
  source 1..20: mol_type = other DNA
accagtgaatattactgcct

SEQ ID NO: 79666 - DNA, 20 bp, synthetic construct
  source 1..20: mol_type = other DNA
taccagtgaatattactgcc

SEQ ID NO: 79667 - DNA, 20 bp, synthetic construct
  source 1..20: mol_type = other DNA
ttaccagtgaatattactgc

SEQ ID NO: 79668 - DNA, 20 bp, synthetic construct
  source 1..20: mol_type = other DNA
tttaccagtgaatattactg

SEQ ID NO: 79669 - DNA, 20 bp, synthetic construct
  source 1..20: mol_type = other DNA
atttaccagtgaatattact

SEQ ID NO: 79670 - DNA, 20 bp, synthetic construct
  source 1..20: mol_type = other DNA
tatttaccagtgaatattac

SEQ ID NO: 79671 - DNA, 20 bp, synthetic construct
  source 1..20: mol_type = other DNA
ctatttaccagtgaatatta

SEQ ID NO: 79672 - DNA, 20 bp, synthetic construct
  source 1..20: mol_type = other DNA
actatttaccagtgaatatt

SEQ ID NO: 79673 - DNA, 20 bp, synthetic construct
  source 1..20: mol_type = other DNA
gactatttaccagtgaatat

SEQ ID NO: 79674 - DNA, 20 bp, synthetic construct
  source 1..20: mol_type = other DNA
agactatttaccagtgaata

SEQ ID NO: 79675 - DNA, 20 bp, synthetic construct
  source 1..20: mol_type = other DNA
aagactatttaccagtgaat

SEQ ID NO: 79676 - DNA, 20 bp, synthetic construct
  source 1..20: mol_type = other DNA
gaagactatttaccagtgaa

SEQ ID NO: 79677 - DNA, 20 bp, synthetic construct
  source 1..20: mol_type = other DNA
ggaagactatttaccagtga

SEQ ID NO: 79678 - DNA, 20 bp, synthetic construct
  source 1..20: mol_type = other DNA
tggaagactatttaccagtg

SEQ ID NO: 79679 - DNA, 20 bp, synthetic construct
  source 1..20: mol_type = other DNA
ctggaagactatttaccagt

SEQ ID NO: 79680 - DNA, 20 bp, synthetic construct
  source 1..20: mol_type = other DNA
gctggaagactatttaccag

SEQ ID NO: 79681 - DNA, 20 bp, synthetic construct
  source 1..20: mol_type = other DNA
ggctggaagactatttacca

SEQ ID NO: 79682 - DNA, 20 bp, synthetic construct
  source 1..20: mol_type = other DNA
aggctggaagactatttacc

SEQ ID NO: 79683 - DNA, 20 bp, synthetic construct
  source 1..20: mol_type = other DNA
caggctggaagactatttac

SEQ ID NO: 79684 - DNA, 20 bp, synthetic construct
  source 1..20: mol_type = other DNA
acaggctggaagactattta

SEQ ID NO: 79685 - DNA, 20 bp, synthetic construct
  source 1..20: mol_type = other DNA
cacaggctggaagactattt

SEQ ID NO: 79686 - DNA, 20 bp, synthetic construct
  source 1..20: mol_type = other DNA
ccacaggctggaagactatt

SEQ ID NO: 79687 - DNA, 20 bp, synthetic construct
  source 1..20: mol_type = other DNA
gccacaggctggaagactat

SEQ ID NO: 79688 - DNA, 20 bp, synthetic construct
  source 1..20: mol_type = other DNA
ggccacaggctggaagacta

SEQ ID NO: 79689 - DNA, 20 bp, synthetic construct
  source 1..20: mol_type = other DNA
gggccacaggctggaagact

SEQ ID NO: 79690 - DNA, 20 bp, synthetic construct
  source 1..20: mol_type = other DNA
tgggccacaggctggaagac

SEQ ID NO: 79691 - DNA, 20 bp, synthetic construct
  source 1..20: mol_type = other DNA
ttgggccacaggctggaaga

SEQ ID NO: 79692 - DNA, 20 bp, synthetic construct
  source 1..20: mol_type = other DNA
attgggccacaggctggaag

SEQ ID NO: 79693 - DNA, 20 bp, synthetic construct
  source 1..20: mol_type = other DNA
aattgggccacaggctggaa

SEQ ID NO: 79694 - DNA, 20 bp, synthetic construct
  source 1..20: mol_type = other DNA
caattgggccacaggctgga

SEQ ID NO: 79695 - DNA, 20 bp, synthetic construct
  source 1..20: mol_type = other DNA
ccaattgggccacaggctgg

SEQ ID NO: 79696 - DNA, 20 bp, synthetic construct
  source 1..20: mol_type = other DNA
accaattgggccacaggctg

SEQ ID NO: 79697 - DNA, 20 bp, synthetic construct
  source 1..20: mol_type = other DNA
aaccaattgggccacaggct

SEQ ID NO: 79698 - DNA, 20 bp, synthetic construct
  source 1..20: mol_type = other DNA
caaccaattgggccacaggc

SEQ ID NO: 79699 - DNA, 20 bp, synthetic construct
  source 1..20: mol_type = other DNA
tcaaccaattgggccacagg

SEQ ID NO: 79700 - DNA, 20 bp, synthetic construct
  source 1..20: mol_type = other DNA
atcaaccaattgggccacag

SEQ ID NO: 79701 - DNA, 20 bp, synthetic construct
  source 1..20: mol_type = other DNA
aatcaaccaattgggccaca

SEQ ID NO: 79702 - DNA, 20 bp, synthetic construct
  source 1..20: mol_type = other DNA
gaatcaaccaattgggccac

SEQ ID NO: 79703 - DNA, 20 bp, synthetic construct
  source 1..20: mol_type = other DNA
agaatcaaccaattgggcca

SEQ ID NO: 79704 - DNA, 20 bp, synthetic construct
  source 1..20: mol_type = other DNA
aagaatcaaccaattgggcc

SEQ ID NO: 79705 - DNA, 20 bp, synthetic construct
  source 1..20: mol_type = other DNA
aaagaatcaaccaattgggc

SEQ ID NO: 79706 - DNA, 20 bp, synthetic construct
  source 1..20: mol_type = other DNA
aaaagaatcaaccaattggg

SEQ ID NO: 79707 - DNA, 20 bp, synthetic construct
  source 1..20: mol_type = other DNA
taaaagaatcaaccaattgg

SEQ ID NO: 79708 - DNA, 20 bp, synthetic construct
  source 1..20: mol_type = other DNA
gtaaaagaatcaaccaattg

SEQ ID NO: 79709 - DNA, 20 bp, synthetic construct
  source 1..20: mol_type = other DNA
cgtaaaagaatcaaccaatt

SEQ ID NO: 79710 - DNA, 20 bp, synthetic construct
  source 1..20: mol_type = other DNA
acgtaaaagaatcaaccaat

SEQ ID NO: 79711 - DNA, 20 bp, synthetic construct
  source 1..20: mol_type = other DNA
aacgtaaaagaatcaaccaa

SEQ ID NO: 79712 - DNA, 20 bp, synthetic construct
  source 1..20: mol_type = other DNA
taacgtaaaagaatcaacca

SEQ ID NO: 79713 - DNA, 20 bp, synthetic construct
  source 1..20: mol_type = other DNA
ttaacgtaaaagaatcaacc

SEQ ID NO: 79714 - DNA, 20 bp, synthetic construct
  source 1..20: mol_type = other DNA
tttaacgtaaaagaatcaac

SEQ ID NO: 79715 - DNA, 20 bp, synthetic construct
  source 1..20: mol_type = other DNA
ctttaacgtaaaagaatcaa

SEQ ID NO: 79716 - DNA, 20 bp, synthetic construct
  source 1..20: mol_type = other DNA
tctttaacgtaaaagaatca

SEQ ID NO: 79717 - DNA, 20 bp, synthetic construct
  source 1..20: mol_type = other DNA
ttctttaacgtaaaagaatc

SEQ ID NO: 79718 - DNA, 20 bp, synthetic construct
  source 1..20: mol_type = other DNA
attctttaacgtaaaagaat

SEQ ID NO: 79719 - DNA, 20 bp, synthetic construct
  source 1..20: mol_type = other DNA
cattctttaacgtaaaagaa

SEQ ID NO: 79720 - DNA, 20 bp, synthetic construct
  source 1..20: mol_type = other DNA
gcattctttaacgtaaaaga

SEQ ID NO: 79721 - DNA, 20 bp, synthetic construct
  source 1..20: mol_type = other DNA
tgcattctttaacgtaaaag

SEQ ID NO: 79722 - DNA, 20 bp, synthetic construct
  source 1..20: mol_type = other DNA
ctgcattctttaacgtaaaa

SEQ ID NO: 79723 - DNA, 20 bp, synthetic construct
  source 1..20: mol_type = other DNA
gctgcattctttaacgtaaa

SEQ ID NO: 79724 - DNA, 20 bp, synthetic construct
  source 1..20: mol_type = other DNA
ggctgcattctttaacgtaa

SEQ ID NO: 79725 - DNA, 20 bp, synthetic construct
  source 1..20: mol_type = other DNA
aggctgcattctttaacgta

SEQ ID NO: 79726 - DNA, 20 bp, synthetic construct
  source 1..20: mol_type = other DNA
gaggctgcattctttaacgt

SEQ ID NO: 79727 - DNA, 20 bp, synthetic construct
  source 1..20: mol_type = other DNA
tgaggctgcattctttaacg

SEQ ID NO: 79728 - DNA, 20 bp, synthetic construct
  source 1..20: mol_type = other DNA
ctgaggctgcattctttaac

SEQ ID NO: 79729 - DNA, 20 bp, synthetic construct
  source 1..20: mol_type = other DNA
gctgaggctgcattctttaa

SEQ ID NO: 79730 - DNA, 20 bp, synthetic construct
  source 1..20: mol_type = other DNA
agctgaggctgcattcttta

SEQ ID NO: 79731 - DNA, 20 bp, synthetic construct
  source 1..20: mol_type = other DNA
cagctgaggctgcattcttt

SEQ ID NO: 79732 - DNA, 20 bp, synthetic construct
  source 1..20: mol_type = other DNA
gcagctgaggctgcattctt

SEQ ID NO: 79733 - DNA, 20 bp, synthetic construct
  source 1..20: mol_type = other DNA
agcagctgaggctgcattct

SEQ ID NO: 79734 - DNA, 20 bp, synthetic construct
  source 1..20: mol_type = other DNA
gagcagctgaggctgcattc

SEQ ID NO: 79735 - DNA, 20 bp, synthetic construct
  source 1..20: mol_type = other DNA
agagcagctgaggctgcatt

SEQ ID NO: 79736 - DNA, 20 bp, synthetic construct
  source 1..20: mol_type = other DNA
cagagcagctgaggctgcat

SEQ ID NO: 79737 - DNA, 20 bp, synthetic construct
  source 1..20: mol_type = other DNA
gcagagcagctgaggctgca

SEQ ID NO: 79738 - DNA, 20 bp, synthetic construct
  source 1..20: mol_type = other DNA
ggcagagcagctgaggctgc

SEQ ID NO: 79739 - DNA, 20 bp, synthetic construct
  source 1..20: mol_type = other DNA
aggcagagcagctgaggctg

SEQ ID NO: 79740 - DNA, 20 bp, synthetic construct
  source 1..20: mol_type = other DNA
taggcagagcagctgaggct

SEQ ID NO: 79741 - DNA, 20 bp, synthetic construct
  source 1..20: mol_type = other DNA
ataggcagagcagctgaggc

SEQ ID NO: 79742 - DNA, 20 bp, synthetic construct
  source 1..20: mol_type = other DNA
cataggcagagcagctgagg

SEQ ID NO: 79743 - DNA, 20 bp, synthetic construct
  source 1..20: mol_type = other DNA
ccataggcagagcagctgag

SEQ ID NO: 79744 - DNA, 20 bp, synthetic construct
  source 1..20: mol_type = other DNA
tccataggcagagcagctga

SEQ ID NO: 79745 - DNA, 20 bp, synthetic construct
  source 1..20: mol_type = other DNA
ctccataggcagagcagctg

SEQ ID NO: 79746 - DNA, 20 bp, synthetic construct
  source 1..20: mol_type = other DNA
actccataggcagagcagct

SEQ ID NO: 79747 - DNA, 20 bp, synthetic construct
  source 1..20: mol_type = other DNA
tactccataggcagagcagc

SEQ ID NO: 79748 - DNA, 20 bp, synthetic construct
  source 1..20: mol_type = other DNA
ctactccataggcagagcag

SEQ ID NO: 79749 - DNA, 20 bp, synthetic construct
  source 1..20: mol_type = other DNA
cctactccataggcagagca

SEQ ID NO: 79750 - DNA, 20 bp, synthetic construct
  source 1..20: mol_type = other DNA
tcctactccataggcagagc

SEQ ID NO: 79751 - DNA, 20 bp, synthetic construct
  source 1..20: mol_type = other DNA
atcctactccataggcagag

SEQ ID NO: 79752 - DNA, 20 bp, synthetic construct
  source 1..20: mol_type = other DNA
aatcctactccataggcaga

SEQ ID NO: 79753 - DNA, 20 bp, synthetic construct
  source 1..20: mol_type = other DNA
gaatcctactccataggcag

SEQ ID NO: 79754 - DNA, 20 bp, synthetic construct
  source 1..20: mol_type = other DNA
agaatcctactccataggca

SEQ ID NO: 79755 - DNA, 20 bp, synthetic construct
  source 1..20: mol_type = other DNA
aagaatcctactccataggc

SEQ ID NO: 79756 - DNA, 20 bp, synthetic construct
  source 1..20: mol_type = other DNA
aaagaatcctactccatagg

SEQ ID NO: 79757 - DNA, 20 bp, synthetic construct
  source 1..20: mol_type = other DNA
aaaagaatcctactccatag

SEQ ID NO: 79758 - DNA, 20 bp, synthetic construct
  source 1..20: mol_type = other DNA
taaaagaatcctactccata

SEQ ID NO: 79759 - DNA, 20 bp, synthetic construct
  source 1..20: mol_type = other DNA
ataaaagaatcctactccat

SEQ ID NO: 79760 - DNA, 20 bp, synthetic construct
  source 1..20: mol_type = other DNA
aataaaagaatcctactcca

SEQ ID NO: 79761 - DNA, 20 bp, synthetic construct
  source 1..20: mol_type = other DNA
aaataaaagaatcctactcc

SEQ ID NO: 79762 - DNA, 20 bp, synthetic construct
  source 1..20: mol_type = other DNA
taaataaaagaatcctactc

SEQ ID NO: 79763 - DNA, 20 bp, synthetic construct
  source 1..20: mol_type = other DNA
gtaaataaaagaatcctact

SEQ ID NO: 79764 - DNA, 20 bp, synthetic construct
  source 1..20: mol_type = other DNA
agtaaataaaagaatcctac

SEQ ID NO: 79765 - DNA, 20 bp, synthetic construct
  source 1..20: mol_type = other DNA
aagtaaataaaagaatccta

SEQ ID NO: 79766 - DNA, 20 bp, synthetic construct
  source 1..20: mol_type = other DNA
aaagtaaataaaagaatcct

SEQ ID NO: 79767 - DNA, 20 bp, synthetic construct
  source 1..20: mol_type = other DNA
gaaagtaaataaaagaatcc

SEQ ID NO: 79768 - DNA, 20 bp, synthetic construct
  source 1..20: mol_type = other DNA
agaaagtaaataaaagaatc

SEQ ID NO: 79769 - DNA, 20 bp, synthetic construct
  source 1..20: mol_type = other DNA
aagaaagtaaataaaagaat

SEQ ID NO: 79770 - DNA, 20 bp, synthetic construct
  source 1..20: mol_type = other DNA
taagaaagtaaataaaagaa

SEQ ID NO: 79771 - DNA, 20 bp, synthetic construct
  source 1..20: mol_type = other DNA
ttaagaaagtaaataaaaga

SEQ ID NO: 79772 - DNA, 20 bp, synthetic construct
  source 1..20: mol_type = other DNA
attaagaaagtaaataaaag

SEQ ID NO: 79773 - DNA, 20 bp, synthetic construct
  source 1..20: mol_type = other DNA
tattaagaaagtaaataaaa

SEQ ID NO: 79774 - DNA, 20 bp, synthetic construct
  source 1..20: mol_type = other DNA
ttattaagaaagtaaataaa

SEQ ID NO: 79775 - DNA, 20 bp, synthetic construct
  source 1..20: mol_type = other DNA
tttattaagaaagtaaataa

SEQ ID NO: 79776 - DNA, 20 bp, synthetic construct
  source 1..20: mol_type = other DNA
gtttattaagaaagtaaata

SEQ ID NO: 79777 - DNA, 20 bp, synthetic construct
  source 1..20: mol_type = other DNA
agtttattaagaaagtaaat

SEQ ID NO: 79778 - DNA, 20 bp, synthetic construct
  source 1..20: mol_type = other DNA
aagtttattaagaaagtaaa

SEQ ID NO: 79779 - DNA, 20 bp, synthetic construct
  source 1..20: mol_type = other DNA
caagtttattaagaaagtaa

SEQ ID NO: 79780 - DNA, 20 bp, synthetic construct
  source 1..20: mol_type = other DNA
gcaagtttattaagaaagta

SEQ ID NO: 79781 - DNA, 20 bp, synthetic construct
  source 1..20: mol_type = other DNA
agcaagtttattaagaaagt

SEQ ID NO: 79782 - DNA, 20 bp, synthetic construct
  source 1..20: mol_type = other DNA
aagcaagtttattaagaaag

SEQ ID NO: 79783 - DNA, 20 bp, synthetic construct
  source 1..20: mol_type = other DNA
caagcaagtttattaagaaa

SEQ ID NO: 79784 - DNA, 20 bp, synthetic construct
  source 1..20: mol_type = other DNA
gcaagcaagtttattaagaa

SEQ ID NO: 79785 - DNA, 20 bp, synthetic construct
  source 1..20: mol_type = other DNA
ggcaagcaagtttattaaga

SEQ ID NO: 79786 - DNA, 20 bp, synthetic construct
  source 1..20: mol_type = other DNA
gggcaagcaagtttattaag

SEQ ID NO: 79787 - DNA, 20 bp, synthetic construct
  source 1..20: mol_type = other DNA
ggggcaagcaagtttattaa

SEQ ID NO: 79788 - DNA, 20 bp, synthetic construct
  source 1..20: mol_type = other DNA
aggggcaagcaagtttatta

SEQ ID NO: 79789 - DNA, 20 bp, synthetic construct
  source 1..20: mol_type = other DNA
caggggcaagcaagtttatt

SEQ ID NO: 79790 - DNA, 20 bp, synthetic construct
  source 1..20: mol_type = other DNA
ccaggggcaagcaagtttat

SEQ ID NO: 79791 - DNA, 20 bp, synthetic construct
  source 1..20: mol_type = other DNA
gccaggggcaagcaagttta

SEQ ID NO: 79792 - DNA, 20 bp, synthetic construct
  source 1..20: mol_type = other DNA
agccaggggcaagcaagttt

SEQ ID NO: 79793 - DNA, 20 bp, synthetic construct
  source 1..20: mol_type = other DNA
gagccaggggcaagcaagtt

SEQ ID NO: 79794 - DNA, 20 bp, synthetic construct
  source 1..20: mol_type = other DNA
ggagccaggggcaagcaagt

SEQ ID NO: 79795 - DNA, 20 bp, synthetic construct
  source 1..20: mol_type = other DNA
gggagccaggggcaagcaag

SEQ ID NO: 79796 - DNA, 20 bp, synthetic construct
  source 1..20: mol_type = other DNA
ggggagccaggggcaagcaa

SEQ ID NO: 79797 - DNA, 20 bp, synthetic construct
  source 1..20: mol_type = other DNA
gggggagccaggggcaagca

SEQ ID NO: 79798 - DNA, 20 bp, synthetic construct
  source 1..20: mol_type = other DNA
ggggggagccaggggcaagc

SEQ ID NO: 79799 - DNA, 20 bp, synthetic construct
  source 1..20: mol_type = other DNA
gggggggagccaggggcaag

SEQ ID NO: 79800 - DNA, 20 bp, synthetic construct
  source 1..20: mol_type = other DNA
tgggggggagccaggggcaa

SEQ ID NO: 79801 - DNA, 20 bp, synthetic construct
  source 1..20: mol_type = other DNA
gtgggggggagccaggggca

SEQ ID NO: 79802 - DNA, 20 bp, synthetic construct
  source 1..20: mol_type = other DNA
ggtgggggggagccaggggc

SEQ ID NO: 79803 - DNA, 20 bp, synthetic construct
  source 1..20: mol_type = other DNA
tggtgggggggagccagggg

SEQ ID NO: 79804 - DNA, 20 bp, synthetic construct
  source 1..20: mol_type = other DNA
ttggtgggggggagccaggg

SEQ ID NO: 79805 - DNA, 20 bp, synthetic construct
  source 1..20: mol_type = other DNA
tttggtgggggggagccagg

SEQ ID NO: 79806 - DNA, 20 bp, synthetic construct
  source 1..20: mol_type = other DNA
ttttggtgggggggagccag

SEQ ID NO: 79807 - DNA, 20 bp, synthetic construct
  source 1..20: mol_type = other DNA
tttttggtgggggggagcca

SEQ ID NO: 79808 - DNA, 20 bp, synthetic construct
  source 1..20: mol_type = other DNA
ttttttggtgggggggagcc

SEQ ID NO: 79809 - DNA, 20 bp, synthetic construct
  source 1..20: mol_type = other DNA
tttttttggtgggggggagc

SEQ ID NO: 79810 - DNA, 20 bp, synthetic construct
  source 1..20: mol_type = other DNA
ctttttttggtgggggggag

SEQ ID NO: 79811 - DNA, 20 bp, synthetic construct
  source 1..20: mol_type = other DNA
tctttttttggtggggggga

SEQ ID NO: 79812 - DNA, 20 bp, synthetic construct
  source 1..20: mol_type = other DNA
ttctttttttggtggggggg

SEQ ID NO: 79813 - DNA, 20 bp, synthetic construct
  source 1..20: mol_type = other DNA
cttctttttttggtgggggg

SEQ ID NO: 79814 - DNA, 20 bp, synthetic construct
  source 1..20: mol_type = other DNA
ccttctttttttggtggggg

SEQ ID NO: 79815 - DNA, 20 bp, synthetic construct
  source 1..20: mol_type = other DNA
gccttctttttttggtgggg

SEQ ID NO: 79816 - DNA, 20 bp, synthetic construct
  source 1..20: mol_type = other DNA
tgccttctttttttggtggg

SEQ ID NO: 79817 - DNA, 20 bp, synthetic construct
  source 1..20: mol_type = other DNA
ctgccttctttttttggtgg

SEQ ID NO: 79818 - DNA, 20 bp, synthetic construct
  source 1..20: mol_type = other DNA
gctgccttctttttttggtg

SEQ ID NO: 79819 - DNA, 20 bp, synthetic construct
  source 1..20: mol_type = other DNA
ggctgccttctttttttggt

SEQ ID NO: 79820 - DNA, 20 bp, synthetic construct
  source 1..20: mol_type = other DNA
aggctgccttctttttttgg

SEQ ID NO: 79821 - DNA, 20 bp, synthetic construct
  source 1..20: mol_type = other DNA
gaggctgccttctttttttg

SEQ ID NO: 79822 - DNA, 20 bp, synthetic construct
  source 1..20: mol_type = other DNA
ggaggctgccttcttttttt

SEQ ID NO: 79823 - DNA, 20 bp, synthetic construct
  source 1..20: mol_type = other DNA
gggaggctgccttctttttt

SEQ ID NO: 79824 - DNA, 20 bp, synthetic construct
  source 1..20: mol_type = other DNA
agggaggctgccttcttttt

SEQ ID NO: 79825 - DNA, 20 bp, synthetic construct
  source 1..20: mol_type = other DNA
aagggaggctgccttctttt

SEQ ID NO: 79826 - DNA, 20 bp, synthetic construct
  source 1..20: mol_type = other DNA
aaagggaggctgccttcttt

SEQ ID NO: 79827 - DNA, 20 bp, synthetic construct
  source 1..20: mol_type = other DNA
aaaagggaggctgccttctt

SEQ ID NO: 79828 - DNA, 20 bp, synthetic construct
  source 1..20: mol_type = other DNA
caaaagggaggctgccttct

SEQ ID NO: 79829 - DNA, 20 bp, synthetic construct
  source 1..20: mol_type = other DNA
gcaaaagggaggctgccttc

SEQ ID NO: 79830 - DNA, 20 bp, synthetic construct
  source 1..20: mol_type = other DNA
cgcaaaagggaggctgcctt

SEQ ID NO: 79831 - DNA, 20 bp, synthetic construct
  source 1..20: mol_type = other DNA
tcgcaaaagggaggctgcct

SEQ ID NO: 79832 - DNA, 20 bp, synthetic construct
  source 1..20: mol_type = other DNA
ttcgcaaaagggaggctgcc

SEQ ID NO: 79833 - DNA, 20 bp, synthetic construct
  source 1..20: mol_type = other DNA
attcgcaaaagggaggctgc

SEQ ID NO: 79834 - DNA, 20 bp, synthetic construct
  source 1..20: mol_type = other DNA
cattcgcaaaagggaggctg

SEQ ID NO: 79835 - DNA, 20 bp, synthetic construct
  source 1..20: mol_type = other DNA
ccattcgcaaaagggaggct

SEQ ID NO: 79836 - DNA, 20 bp, synthetic construct
  source 1..20: mol_type = other DNA
accattcgcaaaagggaggc

SEQ ID NO: 79837 - DNA, 20 bp, synthetic construct
  source 1..20: mol_type = other DNA
taccattcgcaaaagggagg

SEQ ID NO: 79838 - DNA, 20 bp, synthetic construct
  source 1..20: mol_type = other DNA
ttaccattcgcaaaagggag

SEQ ID NO: 79839 - DNA, 20 bp, synthetic construct
  source 1..20: mol_type = other DNA
attaccattcgcaaaaggga

SEQ ID NO: 79840 - DNA, 20 bp, synthetic construct
  source 1..20: mol_type = other DNA
aattaccattcgcaaaaggg

SEQ ID NO: 79841 - DNA, 20 bp, synthetic construct
  source 1..20: mol_type = other DNA
aaattaccattcgcaaaagg

SEQ ID NO: 79842 - DNA, 20 bp, synthetic construct
  source 1..20: mol_type = other DNA
gaaattaccattcgcaaaag

SEQ ID NO: 79843 - DNA, 20 bp, synthetic construct
  source 1..20: mol_type = other DNA
ggaaattaccattcgcaaaa

SEQ ID NO: 79844 - DNA, 20 bp, synthetic construct
  source 1..20: mol_type = other DNA
aggaaattaccattcgcaaa

SEQ ID NO: 79845 - DNA, 20 bp, synthetic construct
  source 1..20: mol_type = other DNA
taggaaattaccattcgcaa

SEQ ID NO: 79846 - DNA, 20 bp, synthetic construct
  source 1..20: mol_type = other DNA
ataggaaattaccattcgca

SEQ ID NO: 79847 - DNA, 20 bp, synthetic construct
  source 1..20: mol_type = other DNA
tataggaaattaccattcgc

SEQ ID NO: 79848 - DNA, 20 bp, synthetic construct
  source 1..20: mol_type = other DNA
ctataggaaattaccattcg

SEQ ID NO: 79849 - DNA, 20 bp, synthetic construct
  source 1..20: mol_type = other DNA
actataggaaattaccattc

SEQ ID NO: 79850 - DNA, 20 bp, synthetic construct
  source 1..20: mol_type = other DNA
aactataggaaattaccatt

SEQ ID NO: 79851 - DNA, 20 bp, synthetic construct
  source 1..20: mol_type = other DNA
aaactataggaaattaccat

SEQ ID NO: 79852 - DNA, 20 bp, synthetic construct
  source 1..20: mol_type = other DNA
gaaactataggaaattacca

SEQ ID NO: 79853 - DNA, 20 bp, synthetic construct
  source 1..20: mol_type = other DNA
ggaaactataggaaattacc

SEQ ID NO: 79854 - DNA, 20 bp, synthetic construct
  source 1..20: mol_type = other DNA
aggaaactataggaaattac

SEQ ID NO: 79855 - DNA, 20 bp, synthetic construct
  source 1..20: mol_type = other DNA
gaggaaactataggaaatta

SEQ ID NO: 79856 - DNA, 20 bp, synthetic construct
  source 1..20: mol_type = other DNA
cgaggaaactataggaaatt

SEQ ID NO: 79857 - DNA, 20 bp, synthetic construct
  source 1..20: mol_type = other DNA
acgaggaaactataggaaat

SEQ ID NO: 79858 - DNA, 20 bp, synthetic construct
  source 1..20: mol_type = other DNA
tacgaggaaactataggaaa

SEQ ID NO: 79859 - DNA, 20 bp, synthetic construct
  source 1..20: mol_type = other DNA
ctacgaggaaactataggaa

SEQ ID NO: 79860 - DNA, 20 bp, synthetic construct
  source 1..20: mol_type = other DNA
tctacgaggaaactatagga

SEQ ID NO: 79861 - DNA, 20 bp, synthetic construct
  source 1..20: mol_type = other DNA
ttctacgaggaaactatagg

SEQ ID NO: 79862 - DNA, 20 bp, synthetic construct
  source 1..20: mol_type = other DNA
attctacgaggaaactatag

SEQ ID NO: 79863 - DNA, 20 bp, synthetic construct
  source 1..20: mol_type = other DNA
aattctacgaggaaactata

SEQ ID NO: 79864 - DNA, 20 bp, synthetic construct
  source 1..20: mol_type = other DNA
caattctacgaggaaactat

SEQ ID NO: 79865 - DNA, 20 bp, synthetic construct
  source 1..20: mol_type = other DNA
acaattctacgaggaaacta

SEQ ID NO: 79866 - DNA, 20 bp, synthetic construct
  source 1..20: mol_type = other DNA
cacaattctacgaggaaact

SEQ ID NO: 79867 - DNA, 20 bp, synthetic construct
  source 1..20: mol_type = other DNA
ccacaattctacgaggaaac

SEQ ID NO: 79868 - DNA, 20 bp, synthetic construct
  source 1..20: mol_type = other DNA
tccacaattctacgaggaaa

SEQ ID NO: 79869 - DNA, 20 bp, synthetic construct
  source 1..20: mol_type = other DNA
ctccacaattctacgaggaa

SEQ ID NO: 79870 - DNA, 20 bp, synthetic construct
  source 1..20: mol_type = other DNA
actccacaattctacgagga

SEQ ID NO: 79871 - DNA, 20 bp, synthetic construct
  source 1..20: mol_type = other DNA
aactccacaattctacgagg

SEQ ID NO: 79872 - DNA, 20 bp, synthetic construct
  source 1..20: mol_type = other DNA
taactccacaattctacgag

SEQ ID NO: 79873 - DNA, 20 bp, synthetic construct
  source 1..20: mol_type = other DNA
gtaactccacaattctacga

SEQ ID NO: 79874 - DNA, 20 bp, synthetic construct
  source 1..20: mol_type = other DNA
ggtaactccacaattctacg

SEQ ID NO: 79875 - DNA, 20 bp, synthetic construct
  source 1..20: mol_type = other DNA
aggtaactccacaattctac

SEQ ID NO: 79876 - DNA, 20 bp, synthetic construct
  source 1..20: mol_type = other DNA
taggtaactccacaattcta

SEQ ID NO: 79877 - DNA, 20 bp, synthetic construct
  source 1..20: mol_type = other DNA
ataggtaactccacaattct

SEQ ID NO: 79878 - DNA, 20 bp, synthetic construct
  source 1..20: mol_type = other DNA
cataggtaactccacaattc

SEQ ID NO: 79879 - DNA, 20 bp, synthetic construct
  source 1..20: mol_type = other DNA
gcataggtaactccacaatt

SEQ ID NO: 79880 - DNA, 20 bp, synthetic construct
  source 1..20: mol_type = other DNA
agcataggtaactccacaat

SEQ ID NO: 79881 - DNA, 20 bp, synthetic construct
  source 1..20: mol_type = other DNA
cagcataggtaactccacaa

SEQ ID NO: 79882 - DNA, 20 bp, synthetic construct
  source 1..20: mol_type = other DNA
tcagcataggtaactccaca

SEQ ID NO: 79883 - DNA, 20 bp, synthetic construct
  source 1..20: mol_type = other DNA
ctcagcataggtaactccac

SEQ ID NO: 79884 - DNA, 20 bp, synthetic construct
  source 1..20: mol_type = other DNA
cctcagcataggtaactcca

SEQ ID NO: 79885 - DNA, 20 bp, synthetic construct
  source 1..20: mol_type = other DNA
acctcagcataggtaactcc

SEQ ID NO: 79886 - DNA, 20 bp, synthetic construct
  source 1..20: mol_type = other DNA
aacctcagcataggtaactc

SEQ ID NO: 79887 - DNA, 20 bp, synthetic construct
  source 1..20: mol_type = other DNA
taacctcagcataggtaact

SEQ ID NO: 79888 - DNA, 20 bp, synthetic construct
  source 1..20: mol_type = other DNA
ataacctcagcataggtaac

SEQ ID NO: 79889 - DNA, 20 bp, synthetic construct
  source 1..20: mol_type = other DNA
tataacctcagcataggtaa

SEQ ID NO: 79890 - DNA, 20 bp, synthetic construct
  source 1..20: mol_type = other DNA
ctataacctcagcataggta

SEQ ID NO: 79891 - DNA, 20 bp, synthetic construct
  source 1..20: mol_type = other DNA
cctataacctcagcataggt

SEQ ID NO: 79892 - DNA, 20 bp, synthetic construct
  source 1..20: mol_type = other DNA
acctataacctcagcatagg

SEQ ID NO: 79893 - DNA, 20 bp, synthetic construct
  source 1..20: mol_type = other DNA
aacctataacctcagcatag

SEQ ID NO: 79894 - DNA, 20 bp, synthetic construct
  source 1..20: mol_type = other DNA
taacctataacctcagcata

SEQ ID NO: 79895 - DNA, 20 bp, synthetic construct
  source 1..20: mol_type = other DNA
ctaacctataacctcagcat

SEQ ID NO: 79896 - DNA, 20 bp, synthetic construct
  source 1..20: mol_type = other DNA
cctaacctataacctcagca

SEQ ID NO: 79897 - DNA, 20 bp, synthetic construct
  source 1..20: mol_type = other DNA
ccctaacctataacctcagc

SEQ ID NO: 79898 - DNA, 20 bp, synthetic construct
  source 1..20: mol_type = other DNA
accctaacctataacctcag

SEQ ID NO: 79899 - DNA, 20 bp, synthetic construct
  source 1..20: mol_type = other DNA
taccctaacctataacctca

SEQ ID NO: 79900 - DNA, 20 bp, synthetic construct
  source 1..20: mol_type = other DNA
ataccctaacctataacctc

SEQ ID NO: 79901 - DNA, 20 bp, synthetic construct
  source 1..20: mol_type = other DNA
aataccctaacctataacct

SEQ ID NO: 79902 - DNA, 20 bp, synthetic construct
  source 1..20: mol_type = other DNA
caataccctaacctataacc

SEQ ID NO: 79903 - DNA, 20 bp, synthetic construct
  source 1..20: mol_type = other DNA
tcaataccctaacctataac

SEQ ID NO: 79904 - DNA, 20 bp, synthetic construct
  source 1..20: mol_type = other DNA
ctcaataccctaacctataa

SEQ ID NO: 79905 - DNA, 20 bp, synthetic construct
  source 1..20: mol_type = other DNA
tctcaataccctaacctata

SEQ ID NO: 79906 - DNA, 20 bp, synthetic construct
  source 1..20: mol_type = other DNA
atctcaataccctaacctat

SEQ ID NO: 79907 - DNA, 20 bp, synthetic construct
  source 1..20: mol_type = other DNA
gatctcaataccctaaccta

SEQ ID NO: 79908 - DNA, 20 bp, synthetic construct
  source 1..20: mol_type = other DNA
ggatctcaataccctaacct

SEQ ID NO: 79909 - DNA, 20 bp, synthetic construct
  source 1..20: mol_type = other DNA
tggatctcaataccctaacc

SEQ ID NO: 79910 - DNA, 20 bp, synthetic construct
  source 1..20: mol_type = other DNA
ctggatctcaataccctaac

SEQ ID NO: 79911 - DNA, 20 bp, synthetic construct
  source 1..20: mol_type = other DNA
tctggatctcaataccctaa

SEQ ID NO: 79912 - DNA, 20 bp, synthetic construct
  source 1..20: mol_type = other DNA
ctctggatctcaatacccta

SEQ ID NO: 79913 - DNA, 20 bp, synthetic construct
  source 1..20: mol_type = other DNA
actctggatctcaataccct

SEQ ID NO: 79914 - DNA, 20 bp, synthetic construct
  source 1..20: mol_type = other DNA
aactctggatctcaataccc

SEQ ID NO: 79915 - DNA, 20 bp, synthetic construct
  source 1..20: mol_type = other DNA
caactctggatctcaatacc

SEQ ID NO: 79916 - DNA, 20 bp, synthetic construct
  source 1..20: mol_type = other DNA
gcaactctggatctcaatac

SEQ ID NO: 79917 - DNA, 20 bp, synthetic construct
  source 1..20: mol_type = other DNA
ggcaactctggatctcaata

SEQ ID NO: 79918 - DNA, 20 bp, synthetic construct
  source 1..20: mol_type = other DNA
tggcaactctggatctcaat

SEQ ID NO: 79919 - DNA, 20 bp, synthetic construct
  source 1..20: mol_type = other DNA
gtggcaactctggatctcaa

SEQ ID NO: 79920 - DNA, 20 bp, synthetic construct
  source 1..20: mol_type = other DNA
agtggcaactctggatctca

SEQ ID NO: 79921 - DNA, 20 bp, synthetic construct
  source 1..20: mol_type = other DNA
aagtggcaactctggatctc

SEQ ID NO: 79922 - DNA, 20 bp, synthetic construct
  source 1..20: mol_type = other DNA
gaagtggcaactctggatct

SEQ ID NO: 79923 - DNA, 20 bp, synthetic construct
  source 1..20: mol_type = other DNA
agaagtggcaactctggatc

SEQ ID NO: 79924 - DNA, 20 bp, synthetic construct
  source 1..20: mol_type = other DNA
cagaagtggcaactctggat

SEQ ID NO: 79925 - DNA, 20 bp, synthetic construct
  source 1..20: mol_type = other DNA
tcagaagtggcaactctgga

SEQ ID NO: 79926 - DNA, 20 bp, synthetic construct
  source 1..20: mol_type = other DNA
ctcagaagtggcaactctgg

SEQ ID NO: 79927 - DNA, 20 bp, synthetic construct
  source 1..20: mol_type = other DNA
cctcagaagtggcaactctg

SEQ ID NO: 79928 - DNA, 20 bp, synthetic construct
  source 1..20: mol_type = other DNA
acctcagaagtggcaactct

SEQ ID NO: 79929 - DNA, 20 bp, synthetic construct
  source 1..20: mol_type = other DNA
cacctcagaagtggcaactc

SEQ ID NO: 79930 - DNA, 20 bp, synthetic construct
  source 1..20: mol_type = other DNA
acacctcagaagtggcaact

SEQ ID NO: 79931 - DNA, 20 bp, synthetic construct
  source 1..20: mol_type = other DNA
gacacctcagaagtggcaac

SEQ ID NO: 79932 - DNA, 20 bp, synthetic construct
  source 1..20: mol_type = other DNA
tgacacctcagaagtggcaa

SEQ ID NO: 79933 - DNA, 20 bp, synthetic construct
  source 1..20: mol_type = other DNA
gtgacacctcagaagtggca

SEQ ID NO: 79934 - DNA, 20 bp, synthetic construct
  source 1..20: mol_type = other DNA
tgtgacacctcagaagtggc

SEQ ID NO: 79935 - DNA, 20 bp, synthetic construct
  source 1..20: mol_type = other DNA
ttgtgacacctcagaagtgg

SEQ ID NO: 79936 - DNA, 20 bp, synthetic construct
  source 1..20: mol_type = other DNA
gttgtgacacctcagaagtg

SEQ ID NO: 79937 - DNA, 20 bp, synthetic construct
  source 1..20: mol_type = other DNA
agttgtgacacctcagaagt

SEQ ID NO: 79938 - DNA, 20 bp, synthetic construct
  source 1..20: mol_type = other DNA
cagttgtgacacctcagaag

SEQ ID NO: 79939 - DNA, 20 bp, synthetic construct
  source 1..20: mol_type = other DNA
gcagttgtgacacctcagaa

SEQ ID NO: 79940 - DNA, 20 bp, synthetic construct
  source 1..20: mol_type = other DNA
agcagttgtgacacctcaga

SEQ ID NO: 79941 - DNA, 20 bp, synthetic construct
  source 1..20: mol_type = other DNA
tagcagttgtgacacctcag

SEQ ID NO: 79942 - DNA, 20 bp, synthetic construct
  source 1..20: mol_type = other DNA
ttagcagttgtgacacctca

SEQ ID NO: 79943 - DNA, 20 bp, synthetic construct
  source 1..20: mol_type = other DNA
attagcagttgtgacacctc

SEQ ID NO: 79944 - DNA, 20 bp, synthetic construct
  source 1..20: mol_type = other DNA
cattagcagttgtgacacct

SEQ ID NO: 79945 - DNA, 20 bp, synthetic construct
  source 1..20: mol_type = other DNA
ccattagcagttgtgacacc

SEQ ID NO: 79946 - DNA, 20 bp, synthetic construct
  source 1..20: mol_type = other DNA
accattagcagttgtgacac

SEQ ID NO: 79947 - DNA, 20 bp, synthetic construct
  source 1..20: mol_type = other DNA
taccattagcagttgtgaca

SEQ ID NO: 79948 - DNA, 20 bp, synthetic construct
  source 1..20: mol_type = other DNA
ttaccattagcagttgtgac

SEQ ID NO: 79949 - DNA, 20 bp, synthetic construct
  source 1..20: mol_type = other DNA
tttaccattagcagttgtga

SEQ ID NO: 79950 - DNA, 20 bp, synthetic construct
  source 1..20: mol_type = other DNA
ttttaccattagcagttgtg

SEQ ID NO: 79951 - DNA, 20 bp, synthetic construct
  source 1..20: mol_type = other DNA
gttttaccattagcagttgt

SEQ ID NO: 79952 - DNA, 20 bp, synthetic construct
  source 1..20: mol_type = other DNA
ggttttaccattagcagttg

SEQ ID NO: 79953 - DNA, 20 bp, synthetic construct
  source 1..20: mol_type = other DNA
tggttttaccattagcagtt

SEQ ID NO: 79954 - DNA, 20 bp, synthetic construct
  source 1..20: mol_type = other DNA
atggttttaccattagcagt

SEQ ID NO: 79955 - DNA, 20 bp, synthetic construct
  source 1..20: mol_type = other DNA
aatggttttaccattagcag

SEQ ID NO: 79956 - DNA, 20 bp, synthetic construct
  source 1..20: mol_type = other DNA
aaatggttttaccattagca

SEQ ID NO: 79957 - DNA, 20 bp, synthetic construct
  source 1..20: mol_type = other DNA
gaaatggttttaccattagc

SEQ ID NO: 79958 - DNA, 20 bp, synthetic construct
  source 1..20: mol_type = other DNA
agaaatggttttaccattag

SEQ ID NO: 79959 - DNA, 20 bp, synthetic construct
  source 1..20: mol_type = other DNA
tagaaatggttttaccatta

SEQ ID NO: 79960 - DNA, 20 bp, synthetic construct
  source 1..20: mol_type = other DNA
ttagaaatggttttaccatt

SEQ ID NO: 79961 - DNA, 20 bp, synthetic construct
  source 1..20: mol_type = other DNA
tttagaaatggttttaccat

SEQ ID NO: 79962 - DNA, 20 bp, synthetic construct
  source 1..20: mol_type = other DNA
ctttagaaatggttttacca

SEQ ID NO: 79963 - DNA, 20 bp, synthetic construct
  source 1..20: mol_type = other DNA
gctttagaaatggttttacc

SEQ ID NO: 79964 - DNA, 20 bp, synthetic construct
  source 1..20: mol_type = other DNA
ggctttagaaatggttttac

SEQ ID NO: 79965 - DNA, 20 bp, synthetic construct
  source 1..20: mol_type = other DNA
gggctttagaaatggtttta

SEQ ID NO: 79966 - DNA, 20 bp, synthetic construct
  source 1..20: mol_type = other DNA
tgggctttagaaatggtttt

SEQ ID NO: 79967 - DNA, 20 bp, synthetic construct
  source 1..20: mol_type = other DNA
ctgggctttagaaatggttt

SEQ ID NO: 79968 - DNA, 20 bp, synthetic construct
  source 1..20: mol_type = other DNA
actgggctttagaaatggtt

SEQ ID NO: 79969 - DNA, 20 bp, synthetic construct
  source 1..20: mol_type = other DNA
aactgggctttagaaatggt

SEQ ID NO: 79970 - DNA, 20 bp, synthetic construct
  source 1..20: mol_type = other DNA
gaactgggctttagaaatgg

SEQ ID NO: 79971 - DNA, 20 bp, synthetic construct
  source 1..20: mol_type = other DNA
agaactgggctttagaaatg

SEQ ID NO: 79972 - DNA, 20 bp, synthetic construct
  source 1..20: mol_type = other DNA
aagaactgggctttagaaat

SEQ ID NO: 79973 - DNA, 20 bp, synthetic construct
  source 1..20: mol_type = other DNA
caagaactgggctttagaaa

SEQ ID NO: 79974 - DNA, 20 bp, synthetic construct
  source 1..20: mol_type = other DNA
acaagaactgggctttagaa

SEQ ID NO: 79975 - DNA, 20 bp, synthetic construct
  source 1..20: mol_type = other DNA
cacaagaactgggctttaga

SEQ ID NO: 79976 - DNA, 20 bp, synthetic construct
  source 1..20: mol_type = other DNA
tcacaagaactgggctttag

SEQ ID NO: 79977 - DNA, 20 bp, synthetic construct
  source 1..20: mol_type = other DNA
gtcacaagaactgggcttta

SEQ ID NO: 79978 - DNA, 20 bp, synthetic construct
  source 1..20: mol_type = other DNA
agtcacaagaactgggcttt

SEQ ID NO: 79979 - DNA, 20 bp, synthetic construct
  source 1..20: mol_type = other DNA
aagtcacaagaactgggctt

SEQ ID NO: 79980 - DNA, 20 bp, synthetic construct
  source 1..20: mol_type = other DNA
aaagtcacaagaactgggct

SEQ ID NO: 79981 - DNA, 20 bp, synthetic construct
  source 1..20: mol_type = other DNA
caaagtcacaagaactgggc

SEQ ID NO: 79982 - DNA, 20 bp, synthetic construct
  source 1..20: mol_type = other DNA
acaaagtcacaagaactggg

SEQ ID NO: 79983 - DNA, 20 bp, synthetic construct
  source 1..20: mol_type = other DNA
gacaaagtcacaagaactgg

SEQ ID NO: 79984 - DNA, 20 bp, synthetic construct
  source 1..20: mol_type = other DNA
ggacaaagtcacaagaactg

SEQ ID NO: 79985 - DNA, 20 bp, synthetic construct
  source 1..20: mol_type = other DNA
tggacaaagtcacaagaact

SEQ ID NO: 79986 - DNA, 20 bp, synthetic construct
  source 1..20: mol_type = other DNA
ctggacaaagtcacaagaac

SEQ ID NO: 79987 - DNA, 20 bp, synthetic construct
  source 1..20: mol_type = other DNA
actggacaaagtcacaagaa

SEQ ID NO: 79988 - DNA, 20 bp, synthetic construct
  source 1..20: mol_type = other DNA
cactggacaaagtcacaaga

SEQ ID NO: 79989 - DNA, 20 bp, synthetic construct
  source 1..20: mol_type = other DNA
tcactggacaaagtcacaag

SEQ ID NO: 79990 - DNA, 20 bp, synthetic construct
  source 1..20: mol_type = other DNA
atcactggacaaagtcacaa

SEQ ID NO: 79991 - DNA, 20 bp, synthetic construct
  source 1..20: mol_type = other DNA
aatcactggacaaagtcaca

SEQ ID NO: 79992 - DNA, 20 bp, synthetic construct
  source 1..20: mol_type = other DNA
caatcactggacaaagtcac

SEQ ID NO: 79993 - DNA, 20 bp, synthetic construct
  source 1..20: mol_type = other DNA
gcaatcactggacaaagtca

SEQ ID NO: 79994 - DNA, 20 bp, synthetic construct
  source 1..20: mol_type = other DNA
ggcaatcactggacaaagtc

SEQ ID NO: 79995 - DNA, 20 bp, synthetic construct
  source 1..20: mol_type = other DNA
aggcaatcactggacaaagt

SEQ ID NO: 79996 - DNA, 20 bp, synthetic construct
  source 1..20: mol_type = other DNA
caggcaatcactggacaaag

SEQ ID NO: 79997 - DNA, 20 bp, synthetic construct
  source 1..20: mol_type = other DNA
acaggcaatcactggacaaa

SEQ ID NO: 79998 - DNA, 20 bp, synthetic construct
  source 1..20: mol_type = other DNA
aacaggcaatcactggacaa

SEQ ID NO: 79999 - DNA, 20 bp, synthetic construct
  source 1..20: mol_type = other DNA
gaacaggcaatcactggaca

SEQ ID NO: 80000 - DNA, 20 bp, synthetic construct
  source 1..20: mol_type = other DNA
tgaacaggcaatcactggac

SEQ ID NO: 80001 - DNA, 20 bp, synthetic construct
  source 1..20: mol_type = other DNA
gtgaacaggcaatcactgga

SEQ ID NO: 80002 - DNA, 20 bp, synthetic construct
  source 1..20: mol_type = other DNA
ggtgaacaggcaatcactgg

SEQ ID NO: 80003 - DNA, 20 bp, synthetic construct
  source 1..20: mol_type = other DNA
cggtgaacaggcaatcactg

SEQ ID NO: 80004 - DNA, 20 bp, synthetic construct
  source 1..20: mol_type = other DNA
acggtgaacaggcaatcact

SEQ ID NO: 80005 - DNA, 20 bp, synthetic construct
  source 1..20: mol_type = other DNA
aacggtgaacaggcaatcac

SEQ ID NO: 80006 - DNA, 20 bp, synthetic construct
  source 1..20: mol_type = other DNA
aaacggtgaacaggcaatca

SEQ ID NO: 80007 - DNA, 20 bp, synthetic construct
  source 1..20: mol_type = other DNA
gaaacggtgaacaggcaatc

SEQ ID NO: 80008 - DNA, 20 bp, synthetic construct
  source 1..20: mol_type = other DNA
tgaaacggtgaacaggcaat

SEQ ID NO: 80009 - DNA, 20 bp, synthetic construct
  source 1..20: mol_type = other DNA
atgaaacggtgaacaggcaa

SEQ ID NO: 80010 - DNA, 20 bp, synthetic construct
  source 1..20: mol_type = other DNA
catgaaacggtgaacaggca

SEQ ID NO: 80011 - DNA, 20 bp, synthetic construct
  source 1..20: mol_type = other DNA
gcatgaaacggtgaacaggc

SEQ ID NO: 80012 - DNA, 20 bp, synthetic construct
  source 1..20: mol_type = other DNA
agcatgaaacggtgaacagg

SEQ ID NO: 80013 - DNA, 20 bp, synthetic construct
  source 1..20: mol_type = other DNA
cagcatgaaacggtgaacag

SEQ ID NO: 80014 - DNA, 20 bp, synthetic construct
  source 1..20: mol_type = other DNA
gcagcatgaaacggtgaaca

SEQ ID NO: 80015 - DNA, 20 bp, synthetic construct
  source 1..20: mol_type = other DNA
ggcagcatgaaacggtgaac

SEQ ID NO: 80016 - DNA, 20 bp, synthetic construct
  source 1..20: mol_type = other DNA
aggcagcatgaaacggtgaa

SEQ ID NO: 80017 - DNA, 20 bp, synthetic construct
  source 1..20: mol_type = other DNA
aaggcagcatgaaacggtga

SEQ ID NO: 80018 - DNA, 20 bp, synthetic construct
  source 1..20: mol_type = other DNA
gaaggcagcatgaaacggtg

SEQ ID NO: 80019 - DNA, 20 bp, synthetic construct
  source 1..20: mol_type = other DNA
ggaaggcagcatgaaacggt

SEQ ID NO: 80020 - DNA, 20 bp, synthetic construct
  source 1..20: mol_type = other DNA
gggaaggcagcatgaaacgg

SEQ ID NO: 80021 - DNA, 20 bp, synthetic construct
  source 1..20: mol_type = other DNA
tgggaaggcagcatgaaacg

SEQ ID NO: 80022 - DNA, 20 bp, synthetic construct
  source 1..20: mol_type = other DNA
atgggaaggcagcatgaaac

SEQ ID NO: 80023 - DNA, 20 bp, synthetic construct
  source 1..20: mol_type = other DNA
aatgggaaggcagcatgaaa

SEQ ID NO: 80024 - DNA, 20 bp, synthetic construct
  source 1..20: mol_type = other DNA
aaatgggaaggcagcatgaa

SEQ ID NO: 80025 - DNA, 20 bp, synthetic construct
  source 1..20: mol_type = other DNA
caaatgggaaggcagcatga

SEQ ID NO: 80026 - DNA, 20 bp, synthetic construct
  source 1..20: mol_type = other DNA
tcaaatgggaaggcagcatg

SEQ ID NO: 80027 - DNA, 20 bp, synthetic construct
  source 1..20: mol_type = other DNA
ctcaaatgggaaggcagcat

SEQ ID NO: 80028 - DNA, 20 bp, synthetic construct
  source 1..20: mol_type = other DNA
gctcaaatgggaaggcagca

SEQ ID NO: 80029 - DNA, 20 bp, synthetic construct
  source 1..20: mol_type = other DNA
tgctcaaatgggaaggcagc

SEQ ID NO: 80030 - DNA, 20 bp, synthetic construct
  source 1..20: mol_type = other DNA
atgctcaaatgggaaggcag

SEQ ID NO: 80031 - DNA, 20 bp, synthetic construct
  source 1..20: mol_type = other DNA
aatgctcaaatgggaaggca

SEQ ID NO: 80032 - DNA, 20 bp, synthetic construct
  source 1..20: mol_type = other DNA
gaatgctcaaatgggaaggc

SEQ ID NO: 80033 - DNA, 20 bp, synthetic construct
  source 1..20: mol_type = other DNA
ggaatgctcaaatgggaagg

SEQ ID NO: 80034 - DNA, 20 bp, synthetic construct
  source 1..20: mol_type = other DNA
gggaatgctcaaatgggaag

SEQ ID NO: 80035 - DNA, 20 bp, synthetic construct
  source 1..20: mol_type = other DNA
tgggaatgctcaaatgggaa

SEQ ID NO: 80036 - DNA, 20 bp, synthetic construct
  source 1..20: mol_type = other DNA
ctgggaatgctcaaatggga

SEQ ID NO: 80037 - DNA, 20 bp, synthetic construct
  source 1..20: mol_type = other DNA
cctgggaatgctcaaatggg

SEQ ID NO: 80038 - DNA, 20 bp, synthetic construct
  source 1..20: mol_type = other DNA
tcctgggaatgctcaaatgg

SEQ ID NO: 80039 - DNA, 20 bp, synthetic construct
  source 1..20: mol_type = other DNA
ctcctgggaatgctcaaatg

SEQ ID NO: 80040 - DNA, 20 bp, synthetic construct
  source 1..20: mol_type = other DNA
cctcctgggaatgctcaaat

SEQ ID NO: 80041 - DNA, 20 bp, synthetic construct
  source 1..20: mol_type = other DNA
tcctcctgggaatgctcaaa

SEQ ID NO: 80042 - DNA, 20 bp, synthetic construct
  source 1..20: mol_type = other DNA
ttcctcctgggaatgctcaa

SEQ ID NO: 80043 - DNA, 20 bp, synthetic construct
  source 1..20: mol_type = other DNA
cttcctcctgggaatgctca

SEQ ID NO: 80044 - DNA, 20 bp, synthetic construct
  source 1..20: mol_type = other DNA
ccttcctcctgggaatgctc

SEQ ID NO: 80045 - DNA, 20 bp, synthetic construct
  source 1..20: mol_type = other DNA
cccttcctcctgggaatgct

SEQ ID NO: 80046 - DNA, 20 bp, synthetic construct
  source 1..20: mol_type = other DNA
ccccttcctcctgggaatgc

SEQ ID NO: 80047 - DNA, 20 bp, synthetic construct
  source 1..20: mol_type = other DNA
tccccttcctcctgggaatg

SEQ ID NO: 80048 - DNA, 20 bp, synthetic construct
  source 1..20: mol_type = other DNA
ctccccttcctcctgggaat

SEQ ID NO: 80049 - DNA, 20 bp, synthetic construct
  source 1..20: mol_type = other DNA
cctccccttcctcctgggaa

SEQ ID NO: 80050 - DNA, 20 bp, synthetic construct
  source 1..20: mol_type = other DNA
acctccccttcctcctggga

SEQ ID NO: 80051 - DNA, 20 bp, synthetic construct
  source 1..20: mol_type = other DNA
aacctccccttcctcctggg

SEQ ID NO: 80052 - DNA, 20 bp, synthetic construct
  source 1..20: mol_type = other DNA
caacctccccttcctcctgg

SEQ ID NO: 80053 - DNA, 20 bp, synthetic construct
  source 1..20: mol_type = other DNA
gcaacctccccttcctcctg

SEQ ID NO: 80054 - DNA, 20 bp, synthetic construct
  source 1..20: mol_type = other DNA
ggcaacctccccttcctcct

SEQ ID NO: 80055 - DNA, 20 bp, synthetic construct
  source 1..20: mol_type = other DNA
tggcaacctccccttcctcc

SEQ ID NO: 80056 - DNA, 20 bp, synthetic construct
  source 1..20: mol_type = other DNA
ctggcaacctccccttcctc

SEQ ID NO: 80057 - DNA, 20 bp, synthetic construct
  source 1..20: mol_type = other DNA
cctggcaacctccccttcct

SEQ ID NO: 80058 - DNA, 20 bp, synthetic construct
  source 1..20: mol_type = other DNA
ccctggcaacctccccttcc

SEQ ID NO: 80059 - DNA, 20 bp, synthetic construct
  source 1..20: mol_type = other DNA
tccctggcaacctccccttc

SEQ ID NO: 80060 - DNA, 20 bp, synthetic construct
  source 1..20: mol_type = other DNA
gtccctggcaacctcccctt

SEQ ID NO: 80061 - DNA, 20 bp, synthetic construct
  source 1..20: mol_type = other DNA
ggtccctggcaacctcccct

SEQ ID NO: 80062 - DNA, 20 bp, synthetic construct
  source 1..20: mol_type = other DNA
aggtccctggcaacctcccc

SEQ ID NO: 80063 - DNA, 20 bp, synthetic construct
  source 1..20: mol_type = other DNA
taggtccctggcaacctccc

SEQ ID NO: 80064 - DNA, 20 bp, synthetic construct
  source 1..20: mol_type = other DNA
ctaggtccctggcaacctcc

SEQ ID NO: 80065 - DNA, 20 bp, synthetic construct
  source 1..20: mol_type = other DNA
actaggtccctggcaacctc

SEQ ID NO: 80066 - DNA, 20 bp, synthetic construct
  source 1..20: mol_type = other DNA
tactaggtccctggcaacct

SEQ ID NO: 80067 - DNA, 20 bp, synthetic construct
  source 1..20: mol_type = other DNA
gtactaggtccctggcaacc

SEQ ID NO: 80068 - DNA, 20 bp, synthetic construct
  source 1..20: mol_type = other DNA
ggtactaggtccctggcaac

SEQ ID NO: 80069 - DNA, 20 bp, synthetic construct
  source 1..20: mol_type = other DNA
tggtactaggtccctggcaa

SEQ ID NO: 80070 - DNA, 20 bp, synthetic construct
  source 1..20: mol_type = other DNA
atggtactaggtccctggca

SEQ ID NO: 80071 - DNA, 20 bp, synthetic construct
  source 1..20: mol_type = other DNA
tatggtactaggtccctggc

SEQ ID NO: 80072 - DNA, 20 bp, synthetic construct
  source 1..20: mol_type = other DNA
ctatggtactaggtccctgg

SEQ ID NO: 80073 - DNA, 20 bp, synthetic construct
  source 1..20: mol_type = other DNA
actatggtactaggtccctg

SEQ ID NO: 80074 - DNA, 20 bp, synthetic construct
  source 1..20: mol_type = other DNA
gactatggtactaggtccct

SEQ ID NO: 80075 - DNA, 20 bp, synthetic construct
  source 1..20: mol_type = other DNA
ggactatggtactaggtccc

SEQ ID NO: 80076 - DNA, 20 bp, synthetic construct
  source 1..20: mol_type = other DNA
cggactatggtactaggtcc

SEQ ID NO: 80077 - DNA, 20 bp, synthetic construct
  source 1..20: mol_type = other DNA
tcggactatggtactaggtc

SEQ ID NO: 80078 - DNA, 20 bp, synthetic construct
  source 1..20: mol_type = other DNA
gtcggactatggtactaggt

SEQ ID NO: 80079 - DNA, 20 bp, synthetic construct
  source 1..20: mol_type = other DNA
ggtcggactatggtactagg

SEQ ID NO: 80080 - DNA, 20 bp, synthetic construct
  source 1..20: mol_type = other DNA
aggtcggactatggtactag

SEQ ID NO: 80081 - DNA, 20 bp, synthetic construct
  source 1..20: mol_type = other DNA
aaggtcggactatggtacta

SEQ ID NO: 80082 - DNA, 20 bp, synthetic construct
  source 1..20: mol_type = other DNA
caaggtcggactatggtact

SEQ ID NO: 80083 - DNA, 20 bp, synthetic construct
  source 1..20: mol_type = other DNA
ccaaggtcggactatggtac

SEQ ID NO: 80084 - DNA, 20 bp, synthetic construct
  source 1..20: mol_type = other DNA
tccaaggtcggactatggta

SEQ ID NO: 80085 - DNA, 20 bp, synthetic construct
  source 1..20: mol_type = other DNA
ttccaaggtcggactatggt

SEQ ID NO: 80086 - DNA, 20 bp, synthetic construct
  source 1..20: mol_type = other DNA
attccaaggtcggactatgg

SEQ ID NO: 80087 - DNA, 20 bp, synthetic construct
  source 1..20: mol_type = other DNA
gattccaaggtcggactatg

SEQ ID NO: 80088 - DNA, 20 bp, synthetic construct
  source 1..20: mol_type = other DNA
cgattccaaggtcggactat

SEQ ID NO: 80089 - DNA, 20 bp, synthetic construct
  source 1..20: mol_type = other DNA
acgattccaaggtcggacta

SEQ ID NO: 80090 - DNA, 20 bp, synthetic construct
  source 1..20: mol_type = other DNA
aacgattccaaggtcggact

SEQ ID NO: 80091 - DNA, 20 bp, synthetic construct
  source 1..20: mol_type = other DNA
caacgattccaaggtcggac

SEQ ID NO: 80092 - DNA, 20 bp, synthetic construct
  source 1..20: mol_type = other DNA
tcaacgattccaaggtcgga

SEQ ID NO: 80093 - DNA, 20 bp, synthetic construct
  source 1..20: mol_type = other DNA
ttcaacgattccaaggtcgg

SEQ ID NO: 80094 - DNA, 20 bp, synthetic construct
  source 1..20: mol_type = other DNA
attcaacgattccaaggtcg

SEQ ID NO: 80095 - DNA, 20 bp, synthetic construct
  source 1..20: mol_type = other DNA
tattcaacgattccaaggtc

SEQ ID NO: 80096 - DNA, 20 bp, synthetic construct
  source 1..20: mol_type = other DNA
atattcaacgattccaaggt

SEQ ID NO: 80097 - DNA, 20 bp, synthetic construct
  source 1..20: mol_type = other DNA
catattcaacgattccaagg

SEQ ID NO: 80098 - DNA, 20 bp, synthetic construct
  source 1..20: mol_type = other DNA
tcatattcaacgattccaag

SEQ ID NO: 80099 - DNA, 20 bp, synthetic construct
  source 1..20: mol_type = other DNA
ctcatattcaacgattccaa

SEQ ID NO: 80100 - DNA, 20 bp, synthetic construct
  source 1..20: mol_type = other DNA
cctcatattcaacgattcca

SEQ ID NO: 80101 - DNA, 20 bp, synthetic construct
  source 1..20: mol_type = other DNA
ccctcatattcaacgattcc

SEQ ID NO: 80102 - DNA, 20 bp, synthetic construct
  source 1..20: mol_type = other DNA
tccctcatattcaacgattc

SEQ ID NO: 80103 - DNA, 20 bp, synthetic construct
  source 1..20: mol_type = other DNA
ttccctcatattcaacgatt

SEQ ID NO: 80104 - DNA, 20 bp, synthetic construct
  source 1..20: mol_type = other DNA
tttccctcatattcaacgat

SEQ ID NO: 80105 - DNA, 20 bp, synthetic construct
  source 1..20: mol_type = other DNA
ctttccctcatattcaacga

SEQ ID NO: 80106 - DNA, 20 bp, synthetic construct
  source 1..20: mol_type = other DNA
gctttccctcatattcaacg

SEQ ID NO: 80107 - DNA, 20 bp, synthetic construct
  source 1..20: mol_type = other DNA
cgctttccctcatattcaac

SEQ ID NO: 80108 - DNA, 20 bp, synthetic construct
  source 1..20: mol_type = other DNA
acgctttccctcatattcaa

SEQ ID NO: 80109 - DNA, 20 bp, synthetic construct
  source 1..20: mol_type = other DNA
aacgctttccctcatattca

SEQ ID NO: 80110 - DNA, 20 bp, synthetic construct
  source 1..20: mol_type = other DNA
caacgctttccctcatattc

SEQ ID NO: 80111 - DNA, 20 bp, synthetic construct
  source 1..20: mol_type = other DNA
ccaacgctttccctcatatt

SEQ ID NO: 80112 - DNA, 20 bp, synthetic construct
  source 1..20: mol_type = other DNA
gccaacgctttccctcatat

SEQ ID NO: 80113 - DNA, 20 bp, synthetic construct
  source 1..20: mol_type = other DNA
agccaacgctttccctcata

SEQ ID NO: 80114 - DNA, 20 bp, synthetic construct
  source 1..20: mol_type = other DNA
aagccaacgctttccctcat

SEQ ID NO: 80115 - DNA, 20 bp, synthetic construct
  source 1..20: mol_type = other DNA
gaagccaacgctttccctca

SEQ ID NO: 80116 - DNA, 20 bp, synthetic construct
  source 1..20: mol_type = other DNA
agaagccaacgctttccctc

SEQ ID NO: 80117 - DNA, 20 bp, synthetic construct
  source 1..20: mol_type = other DNA
gagaagccaacgctttccct

SEQ ID NO: 80118 - DNA, 20 bp, synthetic construct
  source 1..20: mol_type = other DNA
ggagaagccaacgctttccc

SEQ ID NO: 80119 - DNA, 20 bp, synthetic construct
  source 1..20: mol_type = other DNA
gggagaagccaacgctttcc

SEQ ID NO: 80120 - DNA, 20 bp, synthetic construct
  source 1..20: mol_type = other DNA
agggagaagccaacgctttc

SEQ ID NO: 80121 - DNA, 20 bp, synthetic construct
  source 1..20: mol_type = other DNA
aagggagaagccaacgcttt

SEQ ID NO: 80122 - DNA, 20 bp, synthetic construct
  source 1..20: mol_type = other DNA
gaagggagaagccaacgctt

SEQ ID NO: 80123 - DNA, 20 bp, synthetic construct
  source 1..20: mol_type = other DNA
agaagggagaagccaacgct

SEQ ID NO: 80124 - DNA, 20 bp, synthetic construct
  source 1..20: mol_type = other DNA
aagaagggagaagccaacgc

SEQ ID NO: 80125 - DNA, 20 bp, synthetic construct
  source 1..20: mol_type = other DNA
aaagaagggagaagccaacg

SEQ ID NO: 80126 - DNA, 20 bp, synthetic construct
  source 1..20: mol_type = other DNA
gaaagaagggagaagccaac

SEQ ID NO: 80127 - DNA, 20 bp, synthetic construct
  source 1..20: mol_type = other DNA
agaaagaagggagaagccaa

SEQ ID NO: 80128 - DNA, 20 bp, synthetic construct
  source 1..20: mol_type = other DNA
gagaaagaagggagaagcca

SEQ ID NO: 80129 - DNA, 20 bp, synthetic construct
  source 1..20: mol_type = other DNA
ggagaaagaagggagaagcc

SEQ ID NO: 80130 - DNA, 20 bp, synthetic construct
  source 1..20: mol_type = other DNA
gggagaaagaagggagaagc

SEQ ID NO: 80131 - DNA, 20 bp, synthetic construct
  source 1..20: mol_type = other DNA
tgggagaaagaagggagaag

SEQ ID NO: 80132 - DNA, 20 bp, synthetic construct
  source 1..20: mol_type = other DNA
ttgggagaaagaagggagaa

SEQ ID NO: 80133 - DNA, 20 bp, synthetic construct
  source 1..20: mol_type = other DNA
tttgggagaaagaagggaga

SEQ ID NO: 80134 - DNA, 20 bp, synthetic construct
  source 1..20: mol_type = other DNA
gtttgggagaaagaagggag

SEQ ID NO: 80135 - DNA, 20 bp, synthetic construct
  source 1..20: mol_type = other DNA
tgtttgggagaaagaaggga

SEQ ID NO: 80136 - DNA, 20 bp, synthetic construct
  source 1..20: mol_type = other DNA
atgtttgggagaaagaaggg

SEQ ID NO: 80137 - DNA, 20 bp, synthetic construct
  source 1..20: mol_type = other DNA
aatgtttgggagaaagaagg

SEQ ID NO: 80138 - DNA, 20 bp, synthetic construct
  source 1..20: mol_type = other DNA
caatgtttgggagaaagaag

SEQ ID NO: 80139 - DNA, 20 bp, synthetic construct
  source 1..20: mol_type = other DNA
ccaatgtttgggagaaagaa

SEQ ID NO: 80140 - DNA, 20 bp, synthetic construct
  source 1..20: mol_type = other DNA
tccaatgtttgggagaaaga

SEQ ID NO: 80141 - DNA, 20 bp, synthetic construct
  source 1..20: mol_type = other DNA
ttccaatgtttgggagaaag

SEQ ID NO: 80142 - DNA, 20 bp, synthetic construct
  source 1..20: mol_type = other DNA
cttccaatgtttgggagaaa

SEQ ID NO: 80143 - DNA, 20 bp, synthetic construct
  source 1..20: mol_type = other DNA
acttccaatgtttgggagaa

SEQ ID NO: 80144 - DNA, 20 bp, synthetic construct
  source 1..20: mol_type = other DNA
tacttccaatgtttgggaga

SEQ ID NO: 80145 - DNA, 20 bp, synthetic construct
  source 1..20: mol_type = other DNA
atacttccaatgtttgggag

SEQ ID NO: 80146 - DNA, 20 bp, synthetic construct
  source 1..20: mol_type = other DNA
aatacttccaatgtttggga

SEQ ID NO: 80147 - DNA, 20 bp, synthetic construct
  source 1..20: mol_type = other DNA
aaatacttccaatgtttggg

SEQ ID NO: 80148 - DNA, 20 bp, synthetic construct
  source 1..20: mol_type = other DNA
aaaatacttccaatgtttgg

SEQ ID NO: 80149 - DNA, 20 bp, synthetic construct
  source 1..20: mol_type = other DNA
aaaaatacttccaatgtttg

SEQ ID NO: 80150 - DNA, 20 bp, synthetic construct
  source 1..20: mol_type = other DNA
caaaaatacttccaatgttt

SEQ ID NO: 80151 - DNA, 20 bp, synthetic construct
  source 1..20: mol_type = other DNA
ccaaaaatacttccaatgtt

SEQ ID NO: 80152 - DNA, 20 bp, synthetic construct
  source 1..20: mol_type = other DNA
gccaaaaatacttccaatgt

SEQ ID NO: 80153 - DNA, 20 bp, synthetic construct
  source 1..20: mol_type = other DNA
agccaaaaatacttccaatg

SEQ ID NO: 80154 - DNA, 20 bp, synthetic construct
  source 1..20: mol_type = other DNA
cagccaaaaatacttccaat

SEQ ID NO: 80155 - DNA, 20 bp, synthetic construct
  source 1..20: mol_type = other DNA
acagccaaaaatacttccaa

SEQ ID NO: 80156 - DNA, 20 bp, synthetic construct
  source 1..20: mol_type = other DNA
aacagccaaaaatacttcca

SEQ ID NO: 80157 - DNA, 20 bp, synthetic construct
  source 1..20: mol_type = other DNA
taacagccaaaaatacttcc

SEQ ID NO: 80158 - DNA, 20 bp, synthetic construct
  source 1..20: mol_type = other DNA
ttaacagccaaaaatacttc

SEQ ID NO: 80159 - DNA, 20 bp, synthetic construct
  source 1..20: mol_type = other DNA
tttaacagccaaaaatactt

SEQ ID NO: 80160 - DNA, 20 bp, synthetic construct
  source 1..20: mol_type = other DNA
ttttaacagccaaaaatact

SEQ ID NO: 80161 - DNA, 20 bp, synthetic construct
  source 1..20: mol_type = other DNA
tttttaacagccaaaaatac

SEQ ID NO: 80162 - DNA, 20 bp, synthetic construct
  source 1..20: mol_type = other DNA
ctttttaacagccaaaaata

SEQ ID NO: 80163 - DNA, 20 bp, synthetic construct
  source 1..20: mol_type = other DNA
gctttttaacagccaaaaat

SEQ ID NO: 80164 - DNA, 20 bp, synthetic construct
  source 1..20: mol_type = other DNA
tgctttttaacagccaaaaa

SEQ ID NO: 80165 - DNA, 20 bp, synthetic construct
  source 1..20: mol_type = other DNA
gtgctttttaacagccaaaa

SEQ ID NO: 80166 - DNA, 20 bp, synthetic construct
  source 1..20: mol_type = other DNA
ggtgctttttaacagccaaa

SEQ ID NO: 80167 - DNA, 20 bp, synthetic construct
  source 1..20: mol_type = other DNA
gggtgctttttaacagccaa

SEQ ID NO: 80168 - DNA, 20 bp, synthetic construct
  source 1..20: mol_type = other DNA
ggggtgctttttaacagcca

SEQ ID NO: 80169 - DNA, 20 bp, synthetic construct
  source 1..20: mol_type = other DNA
aggggtgctttttaacagcc

SEQ ID NO: 80170 - DNA, 20 bp, synthetic construct
  source 1..20: mol_type = other DNA
aaggggtgctttttaacagc

SEQ ID NO: 80171 - DNA, 20 bp, synthetic construct
  source 1..20: mol_type = other DNA
caaggggtgctttttaacag

SEQ ID NO: 80172 - DNA, 20 bp, synthetic construct
  source 1..20: mol_type = other DNA
acaaggggtgctttttaaca

SEQ ID NO: 80173 - DNA, 20 bp, synthetic construct
  source 1..20: mol_type = other DNA
aacaaggggtgctttttaac

SEQ ID NO: 80174 - DNA, 20 bp, synthetic construct
  source 1..20: mol_type = other DNA
gaacaaggggtgctttttaa

SEQ ID NO: 80175 - DNA, 20 bp, synthetic construct
  source 1..20: mol_type = other DNA
ggaacaaggggtgcttttta

SEQ ID NO: 80176 - DNA, 20 bp, synthetic construct
  source 1..20: mol_type = other DNA
tggaacaaggggtgcttttt

SEQ ID NO: 80177 - DNA, 20 bp, synthetic construct
  source 1..20: mol_type = other DNA
atggaacaaggggtgctttt

SEQ ID NO: 80178 - DNA, 20 bp, synthetic construct
  source 1..20: mol_type = other DNA
catggaacaaggggtgcttt

SEQ ID NO: 80179 - DNA, 20 bp, synthetic construct
  source 1..20: mol_type = other DNA
acatggaacaaggggtgctt

SEQ ID NO: 80180 - DNA, 20 bp, synthetic construct
  source 1..20: mol_type = other DNA
cacatggaacaaggggtgct

SEQ ID NO: 80181 - DNA, 20 bp, synthetic construct
  source 1..20: mol_type = other DNA
ccacatggaacaaggggtgc

SEQ ID NO: 80182 - DNA, 20 bp, synthetic construct
  source 1..20: mol_type = other DNA
tccacatggaacaaggggtg

SEQ ID NO: 80183 - DNA, 20 bp, synthetic construct
  source 1..20: mol_type = other DNA
ttccacatggaacaaggggt

SEQ ID NO: 80184 - DNA, 20 bp, synthetic construct
  source 1..20: mol_type = other DNA
attccacatggaacaagggg

SEQ ID NO: 80185 - DNA, 20 bp, synthetic construct
  source 1..20: mol_type = other DNA
gattccacatggaacaaggg

SEQ ID NO: 80186 - DNA, 20 bp, synthetic construct
  source 1..20: mol_type = other DNA
ggattccacatggaacaagg

SEQ ID NO: 80187 - DNA, 20 bp, synthetic construct
  source 1..20: mol_type = other DNA
gggattccacatggaacaag

SEQ ID NO: 80188 - DNA, 20 bp, synthetic construct
  source 1..20: mol_type = other DNA
agggattccacatggaacaa

SEQ ID NO: 80189 - DNA, 20 bp, synthetic construct
  source 1..20: mol_type = other DNA
aagggattccacatggaaca

SEQ ID NO: 80190 - DNA, 20 bp, synthetic construct
  source 1..20: mol_type = other DNA
caagggattccacatggaac

SEQ ID NO: 80191 - DNA, 20 bp, synthetic construct
  source 1..20: mol_type = other DNA
acaagggattccacatggaa

SEQ ID NO: 80192 - DNA, 20 bp, synthetic construct
  source 1..20: mol_type = other DNA
aacaagggattccacatgga

SEQ ID NO: 80193 - DNA, 20 bp, synthetic construct
  source 1..20: mol_type = other DNA
aaacaagggattccacatgg

SEQ ID NO: 80194 - DNA, 20 bp, synthetic construct
  source 1..20: mol_type = other DNA
taaacaagggattccacatg

SEQ ID NO: 80195 - DNA, 20 bp, synthetic construct
  source 1..20: mol_type = other DNA
ttaaacaagggattccacat

SEQ ID NO: 80196 - DNA, 20 bp, synthetic construct
  source 1..20: mol_type = other DNA
tttaaacaagggattccaca

SEQ ID NO: 80197 - DNA, 20 bp, synthetic construct
  source 1..20: mol_type = other DNA
ttttaaacaagggattccac

SEQ ID NO: 80198 - DNA, 20 bp, synthetic construct
  source 1..20: mol_type = other DNA
cttttaaacaagggattcca

SEQ ID NO: 80199 - DNA, 20 bp, synthetic construct
  source 1..20: mol_type = other DNA
tcttttaaacaagggattcc

SEQ ID NO: 80200 - DNA, 20 bp, synthetic construct
  source 1..20: mol_type = other DNA
ttcttttaaacaagggattc

SEQ ID NO: 80201 - DNA, 20 bp, synthetic construct
  source 1..20: mol_type = other DNA
cttcttttaaacaagggatt

SEQ ID NO: 80202 - DNA, 20 bp, synthetic construct
  source 1..20: mol_type = other DNA
acttcttttaaacaagggat

SEQ ID NO: 80203 - DNA, 20 bp, synthetic construct
  source 1..20: mol_type = other DNA
tacttcttttaaacaaggga

SEQ ID NO: 80204 - DNA, 20 bp, synthetic construct
  source 1..20: mol_type = other DNA
ttacttcttttaaacaaggg

SEQ ID NO: 80205 - DNA, 20 bp, synthetic construct
  source 1..20: mol_type = other DNA
tttacttcttttaaacaagg

SEQ ID NO: 80206 - DNA, 20 bp, synthetic construct
  source 1..20: mol_type = other DNA
ttttacttcttttaaacaag

SEQ ID NO: 80207 - DNA, 20 bp, synthetic construct
  source 1..20: mol_type = other DNA
attttacttcttttaaacaa

SEQ ID NO: 80208 - DNA, 20 bp, synthetic construct
  source 1..20: mol_type = other DNA
tattttacttcttttaaaca

SEQ ID NO: 80209 - DNA, 20 bp, synthetic construct
  source 1..20: mol_type = other DNA
atattttacttcttttaaac

SEQ ID NO: 80210 - DNA, 20 bp, synthetic construct
  source 1..20: mol_type = other DNA
catattttacttcttttaaa

SEQ ID NO: 80211 - DNA, 20 bp, synthetic construct
  source 1..20: mol_type = other DNA
acatattttacttcttttaa

SEQ ID NO: 80212 - DNA, 20 bp, synthetic construct
  source 1..20: mol_type = other DNA
tacatattttacttctttta

SEQ ID NO: 80213 - DNA, 20 bp, synthetic construct
  source 1..20: mol_type = other DNA
gtacatattttacttctttt

SEQ ID NO: 80214 - DNA, 20 bp, synthetic construct
  source 1..20: mol_type = other DNA
ggtacatattttacttcttt

SEQ ID NO: 80215 - DNA, 20 bp, synthetic construct
  source 1..20: mol_type = other DNA
aggtacatattttacttctt

SEQ ID NO: 80216 - DNA, 20 bp, synthetic construct
  source 1..20: mol_type = other DNA
gaggtacatattttacttct

SEQ ID NO: 80217 - DNA, 20 bp, synthetic construct
  source 1..20: mol_type = other DNA
ggaggtacatattttacttc

SEQ ID NO: 80218 - DNA, 20 bp, synthetic construct
  source 1..20: mol_type = other DNA
aggaggtacatattttactt

SEQ ID NO: 80219 - DNA, 20 bp, synthetic construct
  source 1..20: mol_type = other DNA
caggaggtacatattttact

SEQ ID NO: 80220 - DNA, 20 bp, synthetic construct
  source 1..20: mol_type = other DNA
acaggaggtacatattttac

SEQ ID NO: 80221 - DNA, 20 bp, synthetic construct
  source 1..20: mol_type = other DNA
gacaggaggtacatatttta

SEQ ID NO: 80222 - DNA, 20 bp, synthetic construct
  source 1..20: mol_type = other DNA
ggacaggaggtacatatttt

SEQ ID NO: 80223 - DNA, 20 bp, synthetic construct
  source 1..20: mol_type = other DNA
aggacaggaggtacatattt

SEQ ID NO: 80224 - DNA, 20 bp, synthetic construct
  source 1..20: mol_type = other DNA
gaggacaggaggtacatatt

SEQ ID NO: 80225 - DNA, 20 bp, synthetic construct
  source 1..20: mol_type = other DNA
ggaggacaggaggtacatat

SEQ ID NO: 80226 - DNA, 20 bp, synthetic construct
  source 1..20: mol_type = other DNA
tggaggacaggaggtacata

SEQ ID NO: 80227 - DNA, 20 bp, synthetic construct
  source 1..20: mol_type = other DNA
gtggaggacaggaggtacat

SEQ ID NO: 80228 - DNA, 20 bp, synthetic construct
  source 1..20: mol_type = other DNA
tgtggaggacaggaggtaca

SEQ ID NO: 80229 - DNA, 20 bp, synthetic construct
  source 1..20: mol_type = other DNA
ctgtggaggacaggaggtac

SEQ ID NO: 80230 - DNA, 20 bp, synthetic construct
  source 1..20: mol_type = other DNA
tctgtggaggacaggaggta

SEQ ID NO: 80231 - DNA, 20 bp, synthetic construct
  source 1..20: mol_type = other DNA
gtctgtggaggacaggaggt

SEQ ID NO: 80232 - DNA, 20 bp, synthetic construct
  source 1..20: mol_type = other DNA
ggtctgtggaggacaggagg

SEQ ID NO: 80233 - DNA, 20 bp, synthetic construct
  source 1..20: mol_type = other DNA
aggtctgtggaggacaggag

SEQ ID NO: 80234 - DNA, 20 bp, synthetic construct
  source 1..20: mol_type = other DNA
caggtctgtggaggacagga

SEQ ID NO: 80235 - DNA, 20 bp, synthetic construct
  source 1..20: mol_type = other DNA
tcaggtctgtggaggacagg

SEQ ID NO: 80236 - DNA, 20 bp, synthetic construct
  source 1..20: mol_type = other DNA
ctcaggtctgtggaggacag

SEQ ID NO: 80237 - DNA, 20 bp, synthetic construct
  source 1..20: mol_type = other DNA
cctcaggtctgtggaggaca

SEQ ID NO: 80238 - DNA, 20 bp, synthetic construct
  source 1..20: mol_type = other DNA
tcctcaggtctgtggaggac

SEQ ID NO: 80239 - DNA, 20 bp, synthetic construct
  source 1..20: mol_type = other DNA
gtcctcaggtctgtggagga

SEQ ID NO: 80240 - DNA, 20 bp, synthetic construct
  source 1..20: mol_type = other DNA
ggtcctcaggtctgtggagg

SEQ ID NO: 80241 - DNA, 20 bp, synthetic construct
  source 1..20: mol_type = other DNA
tggtcctcaggtctgtggag

SEQ ID NO: 80242 - DNA, 20 bp, synthetic construct
  source 1..20: mol_type = other DNA
ctggtcctcaggtctgtgga

SEQ ID NO: 80243 - DNA, 20 bp, synthetic construct
  source 1..20: mol_type = other DNA
actggtcctcaggtctgtgg

SEQ ID NO: 80244 - DNA, 20 bp, synthetic construct
  source 1..20: mol_type = other DNA
cactggtcctcaggtctgtg

SEQ ID NO: 80245 - DNA, 20 bp, synthetic construct
  source 1..20: mol_type = other DNA
acactggtcctcaggtctgt

SEQ ID NO: 80246 - DNA, 20 bp, synthetic construct
  source 1..20: mol_type = other DNA
cacactggtcctcaggtctg

SEQ ID NO: 80247 - DNA, 20 bp, synthetic construct
  source 1..20: mol_type = other DNA
tcacactggtcctcaggtct

SEQ ID NO: 80248 - DNA, 20 bp, synthetic construct
  source 1..20: mol_type = other DNA
atcacactggtcctcaggtc

SEQ ID NO: 80249 - DNA, 20 bp, synthetic construct
  source 1..20: mol_type = other DNA
gatcacactggtcctcaggt

SEQ ID NO: 80250 - DNA, 20 bp, synthetic construct
  source 1..20: mol_type = other DNA
agatcacactggtcctcagg

SEQ ID NO: 80251 - DNA, 20 bp, synthetic construct
  source 1..20: mol_type = other DNA
gagatcacactggtcctcag

SEQ ID NO: 80252 - DNA, 20 bp, synthetic construct
  source 1..20: mol_type = other DNA
tgagatcacactggtcctca

SEQ ID NO: 80253 - DNA, 20 bp, synthetic construct
  source 1..20: mol_type = other DNA
ttgagatcacactggtcctc

SEQ ID NO: 80254 - DNA, 20 bp, synthetic construct
  source 1..20: mol_type = other DNA
cttgagatcacactggtcct

SEQ ID NO: 80255 - DNA, 20 bp, synthetic construct
  source 1..20: mol_type = other DNA
tcttgagatcacactggtcc

SEQ ID NO: 80256 - DNA, 20 bp, synthetic construct
  source 1..20: mol_type = other DNA
ttcttgagatcacactggtc

SEQ ID NO: 80257 - DNA, 20 bp, synthetic construct
  source 1..20: mol_type = other DNA
cttcttgagatcacactggt

SEQ ID NO: 80258 - DNA, 20 bp, synthetic construct
  source 1..20: mol_type = other DNA
ccttcttgagatcacactgg

SEQ ID NO: 80259 - DNA, 20 bp, synthetic construct
  source 1..20: mol_type = other DNA
accttcttgagatcacactg

SEQ ID NO: 80260 - DNA, 20 bp, synthetic construct
  source 1..20: mol_type = other DNA
aaccttcttgagatcacact

SEQ ID NO: 80261 - DNA, 20 bp, synthetic construct
  source 1..20: mol_type = other DNA
taaccttcttgagatcacac

SEQ ID NO: 80262 - DNA, 20 bp, synthetic construct
  source 1..20: mol_type = other DNA
gtaaccttcttgagatcaca

SEQ ID NO: 80263 - DNA, 20 bp, synthetic construct
  source 1..20: mol_type = other DNA
tgtaaccttcttgagatcac

SEQ ID NO: 80264 - DNA, 20 bp, synthetic construct
  source 1..20: mol_type = other DNA
ctgtaaccttcttgagatca

SEQ ID NO: 80265 - DNA, 20 bp, synthetic construct
  source 1..20: mol_type = other DNA
cctgtaaccttcttgagatc

SEQ ID NO: 80266 - DNA, 20 bp, synthetic construct
  source 1..20: mol_type = other DNA
acctgtaaccttcttgagat

SEQ ID NO: 80267 - DNA, 20 bp, synthetic construct
  source 1..20: mol_type = other DNA
tacctgtaaccttcttgaga

SEQ ID NO: 80268 - DNA, 20 bp, synthetic construct
  source 1..20: mol_type = other DNA
ttacctgtaaccttcttgag

SEQ ID NO: 80269 - DNA, 20 bp, synthetic construct
  source 1..20: mol_type = other DNA
tttacctgtaaccttcttga

SEQ ID NO: 80270 - DNA, 20 bp, synthetic construct
  source 1..20: mol_type = other DNA
atttacctgtaaccttcttg

SEQ ID NO: 80271 - DNA, 20 bp, synthetic construct
  source 1..20: mol_type = other DNA
catttacctgtaaccttctt

SEQ ID NO: 80272 - DNA, 20 bp, synthetic construct
  source 1..20: mol_type = other DNA
acatttacctgtaaccttct

SEQ ID NO: 80273 - DNA, 20 bp, synthetic construct
  source 1..20: mol_type = other DNA
tacatttacctgtaaccttc

SEQ ID NO: 80274 - DNA, 20 bp, synthetic construct
  source 1..20: mol_type = other DNA
ctacatttacctgtaacctt

SEQ ID NO: 80275 - DNA, 20 bp, synthetic construct
  source 1..20: mol_type = other DNA
tctacatttacctgtaacct

SEQ ID NO: 80276 - DNA, 20 bp, synthetic construct
  source 1..20: mol_type = other DNA
atctacatttacctgtaacc

SEQ ID NO: 80277 - DNA, 20 bp, synthetic construct
  source 1..20: mol_type = other DNA
catctacatttacctgtaac

SEQ ID NO: 80278 - DNA, 20 bp, synthetic construct
  source 1..20: mol_type = other DNA
acatctacatttacctgtaa

SEQ ID NO: 80279 - DNA, 20 bp, synthetic construct
  source 1..20: mol_type = other DNA
gacatctacatttacctgta

SEQ ID NO: 80280 - DNA, 20 bp, synthetic construct
  source 1..20: mol_type = other DNA
agacatctacatttacctgt

SEQ ID NO: 80281 - DNA, 20 bp, synthetic construct
  source 1..20: mol_type = other DNA
gagacatctacatttacctg

SEQ ID NO: 80282 - DNA, 20 bp, synthetic construct
  source 1..20: mol_type = other DNA
agagacatctacatttacct

SEQ ID NO: 80283 - DNA, 20 bp, synthetic construct
  source 1..20: mol_type = other DNA
tagagacatctacatttacc

SEQ ID NO: 80284 - DNA, 20 bp, synthetic construct
  source 1..20: mol_type = other DNA
ttagagacatctacatttac

SEQ ID NO: 80285 - DNA, 20 bp, synthetic construct
  source 1..20: mol_type = other DNA
gttagagacatctacattta

SEQ ID NO: 80286 - DNA, 20 bp, synthetic construct
  source 1..20: mol_type = other DNA
agttagagacatctacattt

SEQ ID NO: 80287 - DNA, 20 bp, synthetic construct
  source 1..20: mol_type = other DNA
cagttagagacatctacatt

SEQ ID NO: 80288 - DNA, 20 bp, synthetic construct
  source 1..20: mol_type = other DNA
tcagttagagacatctacat

SEQ ID NO: 80289 - DNA, 20 bp, synthetic construct
  source 1..20: mol_type = other DNA
ttcagttagagacatctaca

SEQ ID NO: 80290 - DNA, 20 bp, synthetic construct
  source 1..20: mol_type = other DNA
tttcagttagagacatctac

SEQ ID NO: 80291 - DNA, 20 bp, synthetic construct
  source 1..20: mol_type = other DNA
ctttcagttagagacatcta

SEQ ID NO: 80292 - DNA, 20 bp, synthetic construct
  source 1..20: mol_type = other DNA
cctttcagttagagacatct

SEQ ID NO: 80293 - DNA, 20 bp, synthetic construct
  source 1..20: mol_type = other DNA
acctttcagttagagacatc

SEQ ID NO: 80294 - DNA, 20 bp, synthetic construct
  source 1..20: mol_type = other DNA
cacctttcagttagagacat

SEQ ID NO: 80295 - DNA, 20 bp, synthetic construct
  source 1..20: mol_type = other DNA
ccacctttcagttagagaca

SEQ ID NO: 80296 - DNA, 20 bp, synthetic construct
  source 1..20: mol_type = other DNA
gccacctttcagttagagac

SEQ ID NO: 80297 - DNA, 20 bp, synthetic construct
  source 1..20: mol_type = other DNA
agccacctttcagttagaga

SEQ ID NO: 80298 - DNA, 20 bp, synthetic construct
  source 1..20: mol_type = other DNA
aagccacctttcagttagag

SEQ ID NO: 80299 - DNA, 20 bp, synthetic construct
  source 1..20: mol_type = other DNA
aaagccacctttcagttaga

SEQ ID NO: 80300 - DNA, 20 bp, synthetic construct
  source 1..20: mol_type = other DNA
aaaagccacctttcagttag

SEQ ID NO: 80301 - DNA, 20 bp, synthetic construct
  source 1..20: mol_type = other DNA
taaaagccacctttcagtta

SEQ ID NO: 80302 - DNA, 20 bp, synthetic construct
  source 1..20: mol_type = other DNA
gtaaaagccacctttcagtt

SEQ ID NO: 80303 - DNA, 20 bp, synthetic construct
  source 1..20: mol_type = other DNA
tgtaaaagccacctttcagt

SEQ ID NO: 80304 - DNA, 20 bp, synthetic construct
  source 1..20: mol_type = other DNA
ctgtaaaagccacctttcag

SEQ ID NO: 80305 - DNA, 20 bp, synthetic construct
  source 1..20: mol_type = other DNA
cctgtaaaagccacctttca

SEQ ID NO: 80306 - DNA, 20 bp, synthetic construct
  source 1..20: mol_type = other DNA
acctgtaaaagccacctttc

SEQ ID NO: 80307 - DNA, 20 bp, synthetic construct
  source 1..20: mol_type = other DNA
aacctgtaaaagccaccttt

SEQ ID NO: 80308 - DNA, 20 bp, synthetic construct
  source 1..20: mol_type = other DNA
taacctgtaaaagccacctt

SEQ ID NO: 80309 - DNA, 20 bp, synthetic construct
  source 1..20: mol_type = other DNA
ctaacctgtaaaagccacct

SEQ ID NO: 80310 - DNA, 20 bp, synthetic construct
  source 1..20: mol_type = other DNA
tctaacctgtaaaagccacc

SEQ ID NO: 80311 - DNA, 20 bp, synthetic construct
  source 1..20: mol_type = other DNA
ctctaacctgtaaaagccac

SEQ ID NO: 80312 - DNA, 20 bp, synthetic construct
  source 1..20: mol_type = other DNA
tctctaacctgtaaaagcca

SEQ ID NO: 80313 - DNA, 20 bp, synthetic construct
  source 1..20: mol_type = other DNA
ttctctaacctgtaaaagcc

SEQ ID NO: 80314 - DNA, 20 bp, synthetic construct
  source 1..20: mol_type = other DNA
tttctctaacctgtaaaagc

SEQ ID NO: 80315 - DNA, 20 bp, synthetic construct
  source 1..20: mol_type = other DNA
ttttctctaacctgtaaaag

SEQ ID NO: 80316 - DNA, 20 bp, synthetic construct
  source 1..20: mol_type = other DNA
cttttctctaacctgtaaaa

SEQ ID NO: 80317 - DNA, 20 bp, synthetic construct
  source 1..20: mol_type = other DNA
tcttttctctaacctgtaaa

SEQ ID NO: 80318 - DNA, 20 bp, synthetic construct
  source 1..20: mol_type = other DNA
ctcttttctctaacctgtaa

SEQ ID NO: 80319 - DNA, 20 bp, synthetic construct
  source 1..20: mol_type = other DNA
tctcttttctctaacctgta

SEQ ID NO: 80320 - DNA, 20 bp, synthetic construct
  source 1..20: mol_type = other DNA
ctctcttttctctaacctgt

SEQ ID NO: 80321 - DNA, 20 bp, synthetic construct
  source 1..20: mol_type = other DNA
tctctcttttctctaacctg

SEQ ID NO: 80322 - DNA, 20 bp, synthetic construct
  source 1..20: mol_type = other DNA
ttctctcttttctctaacct

SEQ ID NO: 80323 - DNA, 20 bp, synthetic construct
  source 1..20: mol_type = other DNA
gttctctcttttctctaacc

SEQ ID NO: 80324 - DNA, 20 bp, synthetic construct
  source 1..20: mol_type = other DNA
ggttctctcttttctctaac

SEQ ID NO: 80325 - DNA, 20 bp, synthetic construct
  source 1..20: mol_type = other DNA
gggttctctcttttctctaa

SEQ ID NO: 80326 - DNA, 20 bp, synthetic construct
  source 1..20: mol_type = other DNA
agggttctctcttttctcta

SEQ ID NO: 80327 - DNA, 20 bp, synthetic construct
  source 1..20: mol_type = other DNA
cagggttctctcttttctct

SEQ ID NO: 80328 - DNA, 20 bp, synthetic construct
  source 1..20: mol_type = other DNA
tcagggttctctcttttctc

SEQ ID NO: 80329 - DNA, 20 bp, synthetic construct
  source 1..20: mol_type = other DNA
atcagggttctctcttttct

SEQ ID NO: 80330 - DNA, 20 bp, synthetic construct
  source 1..20: mol_type = other DNA
gatcagggttctctcttttc

SEQ ID NO: 80331 - DNA, 20 bp, synthetic construct
  source 1..20: mol_type = other DNA
agatcagggttctctctttt

SEQ ID NO: 80332 - DNA, 20 bp, synthetic construct
  source 1..20: mol_type = other DNA
cagatcagggttctctcttt

SEQ ID NO: 80333 - DNA, 20 bp, synthetic construct
  source 1..20: mol_type = other DNA
tcagatcagggttctctctt

SEQ ID NO: 80334 - DNA, 20 bp, synthetic construct
  source 1..20: mol_type = other DNA
ttcagatcagggttctctct

SEQ ID NO: 80335 - DNA, 20 bp, synthetic construct
  source 1..20: mol_type = other DNA
cttcagatcagggttctctc

SEQ ID NO: 80336 - DNA, 20 bp, synthetic construct
  source 1..20: mol_type = other DNA
ccttcagatcagggttctct

SEQ ID NO: 80337 - DNA, 20 bp, synthetic construct
  source 1..20: mol_type = other DNA
gccttcagatcagggttctc

SEQ ID NO: 80338 - DNA, 20 bp, synthetic construct
  source 1..20: mol_type = other DNA
agccttcagatcagggttct

SEQ ID NO: 80339 - DNA, 20 bp, synthetic construct
  source 1..20: mol_type = other DNA
tagccttcagatcagggttc

SEQ ID NO: 80340 - DNA, 20 bp, synthetic construct
  source 1..20: mol_type = other DNA
atagccttcagatcagggtt

SEQ ID NO: 80341 - DNA, 20 bp, synthetic construct
  source 1..20: mol_type = other DNA
aatagccttcagatcagggt

SEQ ID NO: 80342 - DNA, 20 bp, synthetic construct
  source 1..20: mol_type = other DNA
aaatagccttcagatcaggg

SEQ ID NO: 80343 - DNA, 20 bp, synthetic construct
  source 1..20: mol_type = other DNA
aaaatagccttcagatcagg

SEQ ID NO: 80344 - DNA, 20 bp, synthetic construct
  source 1..20: mol_type = other DNA
taaaatagccttcagatcag

SEQ ID NO: 80345 - DNA, 20 bp, synthetic construct
  source 1..20: mol_type = other DNA
ataaaatagccttcagatca

SEQ ID NO: 80346 - DNA, 20 bp, synthetic construct
  source 1..20: mol_type = other DNA
cataaaatagccttcagatc

SEQ ID NO: 80347 - DNA, 20 bp, synthetic construct
  source 1..20: mol_type = other DNA
tcataaaatagccttcagat

SEQ ID NO: 80348 - DNA, 20 bp, synthetic construct
  source 1..20: mol_type = other DNA
ttcataaaatagccttcaga

SEQ ID NO: 80349 - DNA, 20 bp, synthetic construct
  source 1..20: mol_type = other DNA
cttcataaaatagccttcag

SEQ ID NO: 80350 - DNA, 20 bp, synthetic construct
  source 1..20: mol_type = other DNA
acttcataaaatagccttca

SEQ ID NO: 80351 - DNA, 20 bp, synthetic construct
  source 1..20: mol_type = other DNA
tacttcataaaatagccttc

SEQ ID NO: 80352 - DNA, 20 bp, synthetic construct
  source 1..20: mol_type = other DNA
ttacttcataaaatagcctt

SEQ ID NO: 80353 - DNA, 20 bp, synthetic construct
  source 1..20: mol_type = other DNA
attacttcataaaatagcct

SEQ ID NO: 80354 - DNA, 20 bp, synthetic construct
  source 1..20: mol_type = other DNA
aattacttcataaaatagcc

SEQ ID NO: 80355 - DNA, 20 bp, synthetic construct
  source 1..20: mol_type = other DNA
taattacttcataaaatagc

SEQ ID NO: 80356 - DNA, 20 bp, synthetic construct
  source 1..20: mol_type = other DNA
ttaattacttcataaaatag

SEQ ID NO: 80357 - DNA, 20 bp, synthetic construct
  source 1..20: mol_type = other DNA
tttaattacttcataaaata

SEQ ID NO: 80358 - DNA, 20 bp, synthetic construct
  source 1..20: mol_type = other DNA
ttttaattacttcataaaat

SEQ ID NO: 80359 - DNA, 20 bp, synthetic construct
  source 1..20: mol_type = other DNA
attttaattacttcataaaa

SEQ ID NO: 80360 - DNA, 20 bp, synthetic construct
  source 1..20: mol_type = other DNA
cattttaattacttcataaa

SEQ ID NO: 80361 - DNA, 20 bp, synthetic construct
  source 1..20: mol_type = other DNA
acattttaattacttcataa

SEQ ID NO: 80362 - DNA, 20 bp, synthetic construct
  source 1..20: mol_type = other DNA
aacattttaattacttcata

SEQ ID NO: 80363 - DNA, 20 bp, synthetic construct
  source 1..20: mol_type = other DNA
gaacattttaattacttcat

SEQ ID NO: 80364 - DNA, 20 bp, synthetic construct
  source 1..20: mol_type = other DNA
agaacattttaattacttca

SEQ ID NO: 80365 - DNA, 20 bp, synthetic construct
  source 1..20: mol_type = other DNA
tagaacattttaattacttc

SEQ ID NO: 80366 - DNA, 20 bp, synthetic construct
  source 1..20: mol_type = other DNA
ttagaacattttaattactt

SEQ ID NO: 80367 - DNA, 20 bp, synthetic construct
  source 1..20: mol_type = other DNA
tttagaacattttaattact

SEQ ID NO: 80368 - DNA, 20 bp, synthetic construct
  source 1..20: mol_type = other DNA
gtttagaacattttaattac

SEQ ID NO: 80369 - DNA, 20 bp, synthetic construct
  source 1..20: mol_type = other DNA
agtttagaacattttaatta

SEQ ID NO: 80370 - DNA, 20 bp, synthetic construct
  source 1..20: mol_type = other DNA
aagtttagaacattttaatt

SEQ ID NO: 80371 - DNA, 20 bp, synthetic construct
  source 1..20: mol_type = other DNA
aaagtttagaacattttaat

SEQ ID NO: 80372 - DNA, 20 bp, synthetic construct
  source 1..20: mol_type = other DNA
taaagtttagaacattttaa

SEQ ID NO: 80373 - DNA, 20 bp, synthetic construct
  source 1..20: mol_type = other DNA
ttaaagtttagaacatttta

SEQ ID NO: 80374 - DNA, 20 bp, synthetic construct
  source 1..20: mol_type = other DNA
tttaaagtttagaacatttt

SEQ ID NO: 80375 - DNA, 20 bp, synthetic construct
  source 1..20: mol_type = other DNA
ttttaaagtttagaacattt

SEQ ID NO: 80376 - DNA, 20 bp, synthetic construct
  source 1..20: mol_type = other DNA
tttttaaagtttagaacatt

SEQ ID NO: 80377 - DNA, 20 bp, synthetic construct
  source 1..20: mol_type = other DNA
atttttaaagtttagaacat

SEQ ID NO: 80378 - DNA, 20 bp, synthetic construct
  source 1..20: mol_type = other DNA
tatttttaaagtttagaaca

SEQ ID NO: 80379 - DNA, 20 bp, synthetic construct
  source 1..20: mol_type = other DNA
ttatttttaaagtttagaac

SEQ ID NO: 80380 - DNA, 20 bp, synthetic construct
  source 1..20: mol_type = other DNA
gttatttttaaagtttagaa

SEQ ID NO: 80381 - DNA, 20 bp, synthetic construct
  source 1..20: mol_type = other DNA
agttatttttaaagtttaga

SEQ ID NO: 80382 - DNA, 20 bp, synthetic construct
  source 1..20: mol_type = other DNA
cagttatttttaaagtttag

SEQ ID NO: 80383 - DNA, 20 bp, synthetic construct
  source 1..20: mol_type = other DNA
gcagttatttttaaagttta

SEQ ID NO: 80384 - DNA, 20 bp, synthetic construct
  source 1..20: mol_type = other DNA
agcagttatttttaaagttt

SEQ ID NO: 80385 - DNA, 20 bp, synthetic construct
  source 1..20: mol_type = other DNA
gagcagttatttttaaagtt

SEQ ID NO: 80386 - DNA, 20 bp, synthetic construct
  source 1..20: mol_type = other DNA
tgagcagttatttttaaagt

SEQ ID NO: 80387 - DNA, 20 bp, synthetic construct
  source 1..20: mol_type = other DNA
ttgagcagttatttttaaag

SEQ ID NO: 80388 - DNA, 20 bp, synthetic construct
  source 1..20: mol_type = other DNA
tttgagcagttatttttaaa

SEQ ID NO: 80389 - DNA, 20 bp, synthetic construct
  source 1..20: mol_type = other DNA
atttgagcagttatttttaa

SEQ ID NO: 80390 - DNA, 20 bp, synthetic construct
  source 1..20: mol_type = other DNA
tatttgagcagttattttta

SEQ ID NO: 80391 - DNA, 20 bp, synthetic construct
  source 1..20: mol_type = other DNA
ttatttgagcagttattttt

SEQ ID NO: 80392 - DNA, 20 bp, synthetic construct
  source 1..20: mol_type = other DNA
attatttgagcagttatttt

SEQ ID NO: 80393 - DNA, 20 bp, synthetic construct
  source 1..20: mol_type = other DNA
aattatttgagcagttattt

SEQ ID NO: 80394 - DNA, 20 bp, synthetic construct
  source 1..20: mol_type = other DNA
caattatttgagcagttatt

SEQ ID NO: 80395 - DNA, 20 bp, synthetic construct
  source 1..20: mol_type = other DNA
acaattatttgagcagttat

SEQ ID NO: 80396 - DNA, 20 bp, synthetic construct
  source 1..20: mol_type = other DNA
cacaattatttgagcagtta

SEQ ID NO: 80397 - DNA, 20 bp, synthetic construct
  source 1..20: mol_type = other DNA
acacaattatttgagcagtt

SEQ ID NO: 80398 - DNA, 20 bp, synthetic construct
  source 1..20: mol_type = other DNA
aacacaattatttgagcagt

SEQ ID NO: 80399 - DNA, 20 bp, synthetic construct
  source 1..20: mol_type = other DNA
caacacaattatttgagcag

SEQ ID NO: 80400 - DNA, 20 bp, synthetic construct
  source 1..20: mol_type = other DNA
acaacacaattatttgagca

SEQ ID NO: 80401 - DNA, 20 bp, synthetic construct
  source 1..20: mol_type = other DNA
tacaacacaattatttgagc

SEQ ID NO: 80402 - DNA, 20 bp, synthetic construct
  source 1..20: mol_type = other DNA
atacaacacaattatttgag

SEQ ID NO: 80403 - DNA, 20 bp, synthetic construct
  source 1..20: mol_type = other DNA
tatacaacacaattatttga

SEQ ID NO: 80404 - DNA, 20 bp, synthetic construct
  source 1..20: mol_type = other DNA
ctatacaacacaattatttg

SEQ ID NO: 80405 - DNA, 20 bp, synthetic construct
  source 1..20: mol_type = other DNA
actatacaacacaattattt

SEQ ID NO: 80406 - DNA, 20 bp, synthetic construct
  source 1..20: mol_type = other DNA
aactatacaacacaattatt

SEQ ID NO: 80407 - DNA, 20 bp, synthetic construct
  source 1..20: mol_type = other DNA
taactatacaacacaattat

SEQ ID NO: 80408 - DNA, 20 bp, synthetic construct
  source 1..20: mol_type = other DNA
gtaactatacaacacaatta

SEQ ID NO: 80409 - DNA, 20 bp, synthetic construct
  source 1..20: mol_type = other DNA
agtaactatacaacacaatt

SEQ ID NO: 80410 - DNA, 20 bp, synthetic construct
  source 1..20: mol_type = other DNA
aagtaactatacaacacaat

SEQ ID NO: 80411 - DNA, 20 bp, synthetic construct
  source 1..20: mol_type = other DNA
taagtaactatacaacacaa

SEQ ID NO: 80412 - DNA, 20 bp, synthetic construct
  source 1..20: mol_type = other DNA
ataagtaactatacaacaca

SEQ ID NO: 80413 - DNA, 20 bp, synthetic construct
  source 1..20: mol_type = other DNA
gataagtaactatacaacac

SEQ ID NO: 80414 - DNA, 20 bp, synthetic construct
  source 1..20: mol_type = other DNA
tgataagtaactatacaaca

SEQ ID NO: 80415 - DNA, 20 bp, synthetic construct
  source 1..20: mol_type = other DNA
ttgataagtaactatacaac

SEQ ID NO: 80416 - DNA, 20 bp, synthetic construct
  source 1..20: mol_type = other DNA
gttgataagtaactatacaa

SEQ ID NO: 80417 - DNA, 20 bp, synthetic construct
  source 1..20: mol_type = other DNA
agttgataagtaactataca

SEQ ID NO: 80418 - DNA, 20 bp, synthetic construct
  source 1..20: mol_type = other DNA
cagttgataagtaactatac

SEQ ID NO: 80419 - DNA, 20 bp, synthetic construct
  source 1..20: mol_type = other DNA
ccagttgataagtaactata

SEQ ID NO: 80420 - DNA, 20 bp, synthetic construct
  source 1..20: mol_type = other DNA
tccagttgataagtaactat

SEQ ID NO: 80421 - DNA, 20 bp, synthetic construct
  source 1..20: mol_type = other DNA
ctccagttgataagtaacta

SEQ ID NO: 80422 - DNA, 20 bp, synthetic construct
  source 1..20: mol_type = other DNA
cctccagttgataagtaact

SEQ ID NO: 80423 - DNA, 20 bp, synthetic construct
  source 1..20: mol_type = other DNA
ccctccagttgataagtaac

SEQ ID NO: 80424 - DNA, 20 bp, synthetic construct
  source 1..20: mol_type = other DNA
cccctccagttgataagtaa

SEQ ID NO: 80425 - DNA, 20 bp, synthetic construct
  source 1..20: mol_type = other DNA
gcccctccagttgataagta

SEQ ID NO: 80426 - DNA, 20 bp, synthetic construct
  source 1..20: mol_type = other DNA
agcccctccagttgataagt

SEQ ID NO: 80427 - DNA, 20 bp, synthetic construct
  source 1..20: mol_type = other DNA
cagcccctccagttgataag

SEQ ID NO: 80428 - DNA, 20 bp, synthetic construct
  source 1..20: mol_type = other DNA
tcagcccctccagttgataa

SEQ ID NO: 80429 - DNA, 20 bp, synthetic construct
  source 1..20: mol_type = other DNA
atcagcccctccagttgata

SEQ ID NO: 80430 - DNA, 20 bp, synthetic construct
  source 1..20: mol_type = other DNA
tatcagcccctccagttgat

SEQ ID NO: 80431 - DNA, 20 bp, synthetic construct
  source 1..20: mol_type = other DNA
ttatcagcccctccagttga

SEQ ID NO: 80432 - DNA, 20 bp, synthetic construct
  source 1..20: mol_type = other DNA
cttatcagcccctccagttg

SEQ ID NO: 80433 - DNA, 20 bp, synthetic construct
  source 1..20: mol_type = other DNA
acttatcagcccctccagtt

SEQ ID NO: 80434 - DNA, 20 bp, synthetic construct
  source 1..20: mol_type = other DNA
tacttatcagcccctccagt

SEQ ID NO: 80435 - DNA, 20 bp, synthetic construct
  source 1..20: mol_type = other DNA
atacttatcagcccctccag

SEQ ID NO: 80436 - DNA, 20 bp, synthetic construct
  source 1..20: mol_type = other DNA
aatacttatcagcccctcca

SEQ ID NO: 80437 - DNA, 20 bp, synthetic construct
  source 1..20: mol_type = other DNA
aaatacttatcagcccctcc

SEQ ID NO: 80438 - DNA, 20 bp, synthetic construct
  source 1..20: mol_type = other DNA
aaaatacttatcagcccctc

SEQ ID NO: 80439 - DNA, 20 bp, synthetic construct
  source 1..20: mol_type = other DNA
aaaaatacttatcagcccct

SEQ ID NO: 80440 - DNA, 20 bp, synthetic construct
  source 1..20: mol_type = other DNA
gaaaaatacttatcagcccc

SEQ ID NO: 80441 - DNA, 20 bp, synthetic construct
  source 1..20: mol_type = other DNA
agaaaaatacttatcagccc

SEQ ID NO: 80442 - DNA, 20 bp, synthetic construct
  source 1..20: mol_type = other DNA
tagaaaaatacttatcagcc

SEQ ID NO: 80443 - DNA, 20 bp, synthetic construct
  source 1..20: mol_type = other DNA
ttagaaaaatacttatcagc

SEQ ID NO: 80444 - DNA, 20 bp, synthetic construct
  source 1..20: mol_type = other DNA
tttagaaaaatacttatcag

SEQ ID NO: 80445 - DNA, 20 bp, synthetic construct
  source 1..20: mol_type = other DNA
ttttagaaaaatacttatca

SEQ ID NO: 80446 - DNA, 20 bp, synthetic construct
  source 1..20: mol_type = other DNA
gttttagaaaaatacttatc

SEQ ID NO: 80447 - DNA, 20 bp, synthetic construct
  source 1..20: mol_type = other DNA
tgttttagaaaaatacttat

SEQ ID NO: 80448 - DNA, 20 bp, synthetic construct
  source 1..20: mol_type = other DNA
atgttttagaaaaatactta

SEQ ID NO: 80449 - DNA, 20 bp, synthetic construct
  source 1..20: mol_type = other DNA
aatgttttagaaaaatactt

SEQ ID NO: 80450 - DNA, 20 bp, synthetic construct
  source 1..20: mol_type = other DNA
aaatgttttagaaaaatact

SEQ ID NO: 80451 - DNA, 20 bp, synthetic construct
  source 1..20: mol_type = other DNA
aaaatgttttagaaaaatac

SEQ ID NO: 80452 - DNA, 20 bp, synthetic construct
  source 1..20: mol_type = other DNA
aaaaatgttttagaaaaata

SEQ ID NO: 80453 - DNA, 20 bp, synthetic construct
  source 1..20: mol_type = other DNA
taaaaatgttttagaaaaat

SEQ ID NO: 80454 - DNA, 20 bp, synthetic construct
  source 1..20: mol_type = other DNA
ttaaaaatgttttagaaaaa

SEQ ID NO: 80455 - DNA, 20 bp, synthetic construct
  source 1..20: mol_type = other DNA
cttaaaaatgttttagaaaa

SEQ ID NO: 80456 - DNA, 20 bp, synthetic construct
  source 1..20: mol_type = other DNA
ccttaaaaatgttttagaaa

SEQ ID NO: 80457 - DNA, 20 bp, synthetic construct
  source 1..20: mol_type = other DNA
tccttaaaaatgttttagaa

SEQ ID NO: 80458 - DNA, 20 bp, synthetic construct
  source 1..20: mol_type = other DNA
ttccttaaaaatgttttaga

SEQ ID NO: 80459 - DNA, 20 bp, synthetic construct
  source 1..20: mol_type = other DNA
tttccttaaaaatgttttag

SEQ ID NO: 80460 - DNA, 20 bp, synthetic construct
  source 1..20: mol_type = other DNA
atttccttaaaaatgtttta

SEQ ID NO: 80461 - DNA, 20 bp, synthetic construct
  source 1..20: mol_type = other DNA
aatttccttaaaaatgtttt

SEQ ID NO: 80462 - DNA, 20 bp, synthetic construct
  source 1..20: mol_type = other DNA
aaatttccttaaaaatgttt

SEQ ID NO: 80463 - DNA, 20 bp, synthetic construct
  source 1..20: mol_type = other DNA
aaaatttccttaaaaatgtt

SEQ ID NO: 80464 - DNA, 20 bp, synthetic construct
  source 1..20: mol_type = other DNA
aaaaatttccttaaaaatgt

SEQ ID NO: 80465 - DNA, 20 bp, synthetic construct
  source 1..20: mol_type = other DNA
aaaaaatttccttaaaaatg

SEQ ID NO: 80466 - DNA, 20 bp, synthetic construct
  source 1..20: mol_type = other DNA
gaaaaaatttccttaaaaat

SEQ ID NO: 80467 - DNA, 20 bp, synthetic construct
  source 1..20: mol_type = other DNA
ggaaaaaatttccttaaaaa

SEQ ID NO: 80468 - DNA, 20 bp, synthetic construct
  source 1..20: mol_type = other DNA
aggaaaaaatttccttaaaa

SEQ ID NO: 80469 - DNA, 20 bp, synthetic construct
  source 1..20: mol_type = other DNA
taggaaaaaatttccttaaa

SEQ ID NO: 80470 - DNA, 20 bp, synthetic construct
  source 1..20: mol_type = other DNA
ataggaaaaaatttccttaa

SEQ ID NO: 80471 - DNA, 20 bp, synthetic construct
  source 1..20: mol_type = other DNA
aataggaaaaaatttcctta

SEQ ID NO: 80472 - DNA, 20 bp, synthetic construct
  source 1..20: mol_type = other DNA
aaataggaaaaaatttcctt

SEQ ID NO: 80473 - DNA, 20 bp, synthetic construct
  source 1..20: mol_type = other DNA
aaaataggaaaaaatttcct

SEQ ID NO: 80474 - DNA, 20 bp, synthetic construct
  source 1..20: mol_type = other DNA
gaaaataggaaaaaatttcc

SEQ ID NO: 80475 - DNA, 20 bp, synthetic construct
  source 1..20: mol_type = other DNA
agaaaataggaaaaaatttc

SEQ ID NO: 80476 - DNA, 20 bp, synthetic construct
  source 1..20: mol_type = other DNA
tagaaaataggaaaaaattt

SEQ ID NO: 80477 - DNA, 20 bp, synthetic construct
  source 1..20: mol_type = other DNA
ttagaaaataggaaaaaatt

SEQ ID NO: 80478 - DNA, 20 bp, synthetic construct
  source 1..20: mol_type = other DNA
attagaaaataggaaaaaat

SEQ ID NO: 80479 - DNA, 20 bp, synthetic construct
  source 1..20: mol_type = other DNA
aattagaaaataggaaaaaa

SEQ ID NO: 80480 - DNA, 20 bp, synthetic construct
  source 1..20: mol_type = other DNA
aaattagaaaataggaaaaa

SEQ ID NO: 80481 - DNA, 20 bp, synthetic construct
  source 1..20: mol_type = other DNA
caaattagaaaataggaaaa

SEQ ID NO: 80482 - DNA, 20 bp, synthetic construct
  source 1..20: mol_type = other DNA
gcaaattagaaaataggaaa

SEQ ID NO: 80483 - DNA, 20 bp, synthetic construct
  source 1..20: mol_type = other DNA
agcaaattagaaaataggaa

SEQ ID NO: 80484 - DNA, 20 bp, synthetic construct
  source 1..20: mol_type = other DNA
tagcaaattagaaaatagga

SEQ ID NO: 80485 - DNA, 20 bp, synthetic construct
  source 1..20: mol_type = other DNA
ttagcaaattagaaaatagg

SEQ ID NO: 80486 - DNA, 20 bp, synthetic construct
  source 1..20: mol_type = other DNA
attagcaaattagaaaatag

SEQ ID NO: 80487 - DNA, 20 bp, synthetic construct
  source 1..20: mol_type = other DNA
aattagcaaattagaaaata

SEQ ID NO: 80488 - DNA, 20 bp, synthetic construct
  source 1..20: mol_type = other DNA
aaattagcaaattagaaaat

SEQ ID NO: 80489 - DNA, 20 bp, synthetic construct
  source 1..20: mol_type = other DNA
aaaattagcaaattagaaaa

SEQ ID NO: 80490 - DNA, 20 bp, synthetic construct
  source 1..20: mol_type = other DNA
caaaattagcaaattagaaa

SEQ ID NO: 80491 - DNA, 20 bp, synthetic construct
  source 1..20: mol_type = other DNA
gcaaaattagcaaattagaa

SEQ ID NO: 80492 - DNA, 20 bp, synthetic construct
  source 1..20: mol_type = other DNA
agcaaaattagcaaattaga

SEQ ID NO: 80493 - DNA, 20 bp, synthetic construct
  source 1..20: mol_type = other DNA
gagcaaaattagcaaattag

SEQ ID NO: 80494 - DNA, 20 bp, synthetic construct
  source 1..20: mol_type = other DNA
tgagcaaaattagcaaatta

SEQ ID NO: 80495 - DNA, 20 bp, synthetic construct
  source 1..20: mol_type = other DNA
ttgagcaaaattagcaaatt

SEQ ID NO: 80496 - DNA, 20 bp, synthetic construct
  source 1..20: mol_type = other DNA
cttgagcaaaattagcaaat

SEQ ID NO: 80497 - DNA, 20 bp, synthetic construct
  source 1..20: mol_type = other DNA
acttgagcaaaattagcaaa

SEQ ID NO: 80498 - DNA, 20 bp, synthetic construct
  source 1..20: mol_type = other DNA
tacttgagcaaaattagcaa

SEQ ID NO: 80499 - DNA, 20 bp, synthetic construct
  source 1..20: mol_type = other DNA
ctacttgagcaaaattagca

SEQ ID NO: 80500 - DNA, 20 bp, synthetic construct
  source 1..20: mol_type = other DNA
actacttgagcaaaattagc

SEQ ID NO: 80501 - DNA, 20 bp, synthetic construct
  source 1..20: mol_type = other DNA
aactacttgagcaaaattag

SEQ ID NO: 80502 - DNA, 20 bp, synthetic construct
  source 1..20: mol_type = other DNA
aaactacttgagcaaaatta

SEQ ID NO: 80503 - DNA, 20 bp, synthetic construct
  source 1..20: mol_type = other DNA
caaactacttgagcaaaatt

SEQ ID NO: 80504 - DNA, 20 bp, synthetic construct
  source 1..20: mol_type = other DNA
acaaactacttgagcaaaat

SEQ ID NO: 80505 - DNA, 20 bp, synthetic construct
  source 1..20: mol_type = other DNA
aacaaactacttgagcaaaa

SEQ ID NO: 80506 - DNA, 20 bp, synthetic construct
  source 1..20: mol_type = other DNA
taacaaactacttgagcaaa

SEQ ID NO: 80507 - DNA, 20 bp, synthetic construct
  source 1..20: mol_type = other DNA
ctaacaaactacttgagcaa

SEQ ID NO: 80508 - DNA, 20 bp, synthetic construct
  source 1..20: mol_type = other DNA
tctaacaaactacttgagca

SEQ ID NO: 80509 - DNA, 20 bp, synthetic construct
  source 1..20: mol_type = other DNA
atctaacaaactacttgagc

SEQ ID NO: 80510 - DNA, 20 bp, synthetic construct
  source 1..20: mol_type = other DNA
tatctaacaaactacttgag

SEQ ID NO: 80511 - DNA, 20 bp, synthetic construct
  source 1..20: mol_type = other DNA
atatctaacaaactacttga

SEQ ID NO: 80512 - DNA, 20 bp, synthetic construct
  source 1..20: mol_type = other DNA
aatatctaacaaactacttg

SEQ ID NO: 80513 - DNA, 20 bp, synthetic construct
  source 1..20: mol_type = other DNA
caatatctaacaaactactt

SEQ ID NO: 80514 - DNA, 20 bp, synthetic construct
  source 1..20: mol_type = other DNA
acaatatctaacaaactact

SEQ ID NO: 80515 - DNA, 20 bp, synthetic construct
  source 1..20: mol_type = other DNA
aacaatatctaacaaactac

SEQ ID NO: 80516 - DNA, 20 bp, synthetic construct
  source 1..20: mol_type = other DNA
taacaatatctaacaaacta

SEQ ID NO: 80517 - DNA, 20 bp, synthetic construct
  source 1..20: mol_type = other DNA
ttaacaatatctaacaaact

SEQ ID NO: 80518 - DNA, 20 bp, synthetic construct
  source 1..20: mol_type = other DNA
attaacaatatctaacaaac

SEQ ID NO: 80519 - DNA, 20 bp, synthetic construct
  source 1..20: mol_type = other DNA
tattaacaatatctaacaaa

SEQ ID NO: 80520 - DNA, 20 bp, synthetic construct
  source 1..20: mol_type = other DNA
atattaacaatatctaacaa

SEQ ID NO: 80521 - DNA, 20 bp, synthetic construct
  source 1..20: mol_type = other DNA
tatattaacaatatctaaca

SEQ ID NO: 80522 - DNA, 20 bp, synthetic construct
  source 1..20: mol_type = other DNA
ctatattaacaatatctaac

SEQ ID NO: 80523 - DNA, 20 bp, synthetic construct
  source 1..20: mol_type = other DNA
tctatattaacaatatctaa

SEQ ID NO: 80524 - DNA, 20 bp, synthetic construct
  source 1..20: mol_type = other DNA
atctatattaacaatatcta

SEQ ID NO: 80525 - DNA, 20 bp, synthetic construct
  source 1..20: mol_type = other DNA
catctatattaacaatatct

SEQ ID NO: 80526 - DNA, 20 bp, synthetic construct
  source 1..20: mol_type = other DNA
acatctatattaacaatatc

SEQ ID NO: 80527 - DNA, 20 bp, synthetic construct
  source 1..20: mol_type = other DNA
aacatctatattaacaatat

SEQ ID NO: 80528 - DNA, 20 bp, synthetic construct
  source 1..20: mol_type = other DNA
caacatctatattaacaata

SEQ ID NO: 80529 - DNA, 20 bp, synthetic construct
  source 1..20: mol_type = other DNA
ccaacatctatattaacaat

SEQ ID NO: 80530 - DNA, 20 bp, synthetic construct
  source 1..20: mol_type = other DNA
accaacatctatattaacaa

SEQ ID NO: 80531 - DNA, 20 bp, synthetic construct
  source 1..20: mol_type = other DNA
aaccaacatctatattaaca

SEQ ID NO: 80532 - DNA, 20 bp, synthetic construct
  source 1..20: mol_type = other DNA
taaccaacatctatattaac

SEQ ID NO: 80533 - DNA, 20 bp, synthetic construct
  source 1..20: mol_type = other DNA
ataaccaacatctatattaa

SEQ ID NO: 80534 - DNA, 20 bp, synthetic construct
  source 1..20: mol_type = other DNA
tataaccaacatctatatta

SEQ ID NO: 80535 - DNA, 20 bp, synthetic construct
  source 1..20: mol_type = other DNA
ttataaccaacatctatatt

SEQ ID NO: 80536 - DNA, 20 bp, synthetic construct
  source 1..20: mol_type = other DNA
gttataaccaacatctatat

SEQ ID NO: 80537 - DNA, 20 bp, synthetic construct
  source 1..20: mol_type = other DNA
agttataaccaacatctata

SEQ ID NO: 80538 - DNA, 20 bp, synthetic construct
  source 1..20: mol_type = other DNA
cagttataaccaacatctat

SEQ ID NO: 80539 - DNA, 20 bp, synthetic construct
  source 1..20: mol_type = other DNA
tcagttataaccaacatcta

SEQ ID NO: 80540 - DNA, 20 bp, synthetic construct
  source 1..20: mol_type = other DNA
ttcagttataaccaacatct

SEQ ID NO: 80541 - DNA, 20 bp, synthetic construct
  source 1..20: mol_type = other DNA
attcagttataaccaacatc

SEQ ID NO: 80542 - DNA, 20 bp, synthetic construct
  source 1..20: mol_type = other DNA
cattcagttataaccaacat

SEQ ID NO: 80543 - DNA, 20 bp, synthetic construct
  source 1..20: mol_type = other DNA
tcattcagttataaccaaca

SEQ ID NO: 80544 - DNA, 20 bp, synthetic construct
  source 1..20: mol_type = other DNA
ttcattcagttataaccaac

SEQ ID NO: 80545 - DNA, 20 bp, synthetic construct
  source 1..20: mol_type = other DNA
tttcattcagttataaccaa

SEQ ID NO: 80546 - DNA, 20 bp, synthetic construct
  source 1..20: mol_type = other DNA
ctttcattcagttataacca

SEQ ID NO: 80547 - DNA, 20 bp, synthetic construct
  source 1..20: mol_type = other DNA
cctttcattcagttataacc

SEQ ID NO: 80548 - DNA, 20 bp, synthetic construct
  source 1..20: mol_type = other DNA
ccctttcattcagttataac

SEQ ID NO: 80549 - DNA, 20 bp, synthetic construct
  source 1..20: mol_type = other DNA
tccctttcattcagttataa

SEQ ID NO: 80550 - DNA, 20 bp, synthetic construct
  source 1..20: mol_type = other DNA
ttccctttcattcagttata

SEQ ID NO: 80551 - DNA, 20 bp, synthetic construct
  source 1..20: mol_type = other DNA
gttccctttcattcagttat

SEQ ID NO: 80552 - DNA, 20 bp, synthetic construct
  source 1..20: mol_type = other DNA
tgttccctttcattcagtta

SEQ ID NO: 80553 - DNA, 20 bp, synthetic construct
  source 1..20: mol_type = other DNA
ttgttccctttcattcagtt

SEQ ID NO: 80554 - DNA, 20 bp, synthetic construct
  source 1..20: mol_type = other DNA
gttgttccctttcattcagt

SEQ ID NO: 80555 - DNA, 20 bp, synthetic construct
  source 1..20: mol_type = other DNA
agttgttccctttcattcag

SEQ ID NO: 80556 - DNA, 20 bp, synthetic construct
  source 1..20: mol_type = other DNA
tagttgttccctttcattca

SEQ ID NO: 80557 - DNA, 20 bp, synthetic construct
  source 1..20: mol_type = other DNA
gtagttgttccctttcattc

SEQ ID NO: 80558 - DNA, 20 bp, synthetic construct
  source 1..20: mol_type = other DNA
agtagttgttccctttcatt

SEQ ID NO: 80559 - DNA, 20 bp, synthetic construct
  source 1..20: mol_type = other DNA
aagtagttgttccctttcat

SEQ ID NO: 80560 - DNA, 20 bp, synthetic construct
  source 1..20: mol_type = other DNA
aaagtagttgttccctttca

SEQ ID NO: 80561 - DNA, 20 bp, synthetic construct
  source 1..20: mol_type = other DNA
caaagtagttgttccctttc

SEQ ID NO: 80562 - DNA, 20 bp, synthetic construct
  source 1..20: mol_type = other DNA
tcaaagtagttgttcccttt

SEQ ID NO: 80563 - DNA, 20 bp, synthetic construct
  source 1..20: mol_type = other DNA
gtcaaagtagttgttccctt

SEQ ID NO: 80564 - DNA, 20 bp, synthetic construct
  source 1..20: mol_type = other DNA
tgtcaaagtagttgttccct

SEQ ID NO: 80565 - DNA, 20 bp, synthetic construct
  source 1..20: mol_type = other DNA
atgtcaaagtagttgttccc

SEQ ID NO: 80566 - DNA, 20 bp, synthetic construct
  source 1..20: mol_type = other DNA
aatgtcaaagtagttgttcc

SEQ ID NO: 80567 - DNA, 20 bp, synthetic construct
  source 1..20: mol_type = other DNA
aaatgtcaaagtagttgttc

SEQ ID NO: 80568 - DNA, 20 bp, synthetic construct
  source 1..20: mol_type = other DNA
aaaatgtcaaagtagttgtt

SEQ ID NO: 80569 - DNA, 20 bp, synthetic construct
  source 1..20: mol_type = other DNA
caaaatgtcaaagtagttgt

SEQ ID NO: 80570 - DNA, 20 bp, synthetic construct
  source 1..20: mol_type = other DNA
tcaaaatgtcaaagtagttg

SEQ ID NO: 80571 - DNA, 20 bp, synthetic construct
  source 1..20: mol_type = other DNA
ttcaaaatgtcaaagtagtt

SEQ ID NO: 80572 - DNA, 20 bp, synthetic construct
  source 1..20: mol_type = other DNA
tttcaaaatgtcaaagtagt

SEQ ID NO: 80573 - DNA, 20 bp, synthetic construct
  source 1..20: mol_type = other DNA
ttttcaaaatgtcaaagtag

SEQ ID NO: 80574 - DNA, 20 bp, synthetic construct
  source 1..20: mol_type = other DNA
tttttcaaaatgtcaaagta

SEQ ID NO: 80575 - DNA, 20 bp, synthetic construct
  source 1..20: mol_type = other DNA
gtttttcaaaatgtcaaagt

SEQ ID NO: 80576 - DNA, 20 bp, synthetic construct
  source 1..20: mol_type = other DNA
tgtttttcaaaatgtcaaag

SEQ ID NO: 80577 - DNA, 20 bp, synthetic construct
  source 1..20: mol_type = other DNA
ttgtttttcaaaatgtcaaa

SEQ ID NO: 80578 - DNA, 20 bp, synthetic construct
  source 1..20: mol_type = other DNA
cttgtttttcaaaatgtcaa

SEQ ID NO: 80579 - DNA, 20 bp, synthetic construct
  source 1..20: mol_type = other DNA
gcttgtttttcaaaatgtca

SEQ ID NO: 80580 - DNA, 20 bp, synthetic construct
  source 1..20: mol_type = other DNA
agcttgtttttcaaaatgtc

SEQ ID NO: 80581 - DNA, 20 bp, synthetic construct
  source 1..20: mol_type = other DNA
aagcttgtttttcaaaatgt

SEQ ID NO: 80582 - DNA, 20 bp, synthetic construct
  source 1..20: mol_type = other DNA
gaagcttgtttttcaaaatg

SEQ ID NO: 80583 - DNA, 20 bp, synthetic construct
  source 1..20: mol_type = other DNA
tgaagcttgtttttcaaaat

SEQ ID NO: 80584 - DNA, 20 bp, synthetic construct
  source 1..20: mol_type = other DNA
atgaagcttgtttttcaaaa

SEQ ID NO: 80585 - DNA, 20 bp, synthetic construct
  source 1..20: mol_type = other DNA
aatgaagcttgtttttcaaa

SEQ ID NO: 80586 - DNA, 20 bp, synthetic construct
  source 1..20: mol_type = other DNA
aaatgaagcttgtttttcaa

SEQ ID NO: 80587 - DNA, 20 bp, synthetic construct
  source 1..20: mol_type = other DNA
aaaatgaagcttgtttttca

SEQ ID NO: 80588 - DNA, 20 bp, synthetic construct
  source 1..20: mol_type = other DNA
gaaaatgaagcttgtttttc

SEQ ID NO: 80589 - DNA, 20 bp, synthetic construct
  source 1..20: mol_type = other DNA
agaaaatgaagcttgttttt

SEQ ID NO: 80590 - DNA, 20 bp, synthetic construct
  source 1..20: mol_type = other DNA
aagaaaatgaagcttgtttt

SEQ ID NO: 80591 - DNA, 20 bp, synthetic construct
  source 1..20: mol_type = other DNA
gaagaaaatgaagcttgttt

SEQ ID NO: 80592 - DNA, 20 bp, synthetic construct
  source 1..20: mol_type = other DNA
agaagaaaatgaagcttgtt

SEQ ID NO: 80593 - DNA, 20 bp, synthetic construct
  source 1..20: mol_type = other DNA
tagaagaaaatgaagcttgt

SEQ ID NO: 80594 - DNA, 20 bp, synthetic construct
  source 1..20: mol_type = other DNA
ctagaagaaaatgaagcttg

SEQ ID NO: 80595 - DNA, 20 bp, synthetic construct
  source 1..20: mol_type = other DNA
actagaagaaaatgaagctt

SEQ ID NO: 80596 - DNA, 20 bp, synthetic construct
  source 1..20: mol_type = other DNA
gactagaagaaaatgaagct

SEQ ID NO: 80597 - DNA, 20 bp, synthetic construct
  source 1..20: mol_type = other DNA
agactagaagaaaatgaagc

SEQ ID NO: 80598 - DNA, 20 bp, synthetic construct
  source 1..20: mol_type = other DNA
tagactagaagaaaatgaag

SEQ ID NO: 80599 - DNA, 20 bp, synthetic construct
  source 1..20: mol_type = other DNA
ttagactagaagaaaatgaa

SEQ ID NO: 80600 - DNA, 20 bp, synthetic construct
  source 1..20: mol_type = other DNA
attagactagaagaaaatga

SEQ ID NO: 80601 - DNA, 20 bp, synthetic construct
  source 1..20: mol_type = other DNA
cattagactagaagaaaatg

SEQ ID NO: 80602 - DNA, 20 bp, synthetic construct
  source 1..20: mol_type = other DNA
ccattagactagaagaaaat

SEQ ID NO: 80603 - DNA, 20 bp, synthetic construct
  source 1..20: mol_type = other DNA
tccattagactagaagaaaa

SEQ ID NO: 80604 - DNA, 20 bp, synthetic construct
  source 1..20: mol_type = other DNA
atccattagactagaagaaa

SEQ ID NO: 80605 - DNA, 20 bp, synthetic construct
  source 1..20: mol_type = other DNA
catccattagactagaagaa

SEQ ID NO: 80606 - DNA, 20 bp, synthetic construct
  source 1..20: mol_type = other DNA
ccatccattagactagaaga

SEQ ID NO: 80607 - DNA, 20 bp, synthetic construct
  source 1..20: mol_type = other DNA
cccatccattagactagaag

SEQ ID NO: 80608 - DNA, 20 bp, synthetic construct
  source 1..20: mol_type = other DNA
tcccatccattagactagaa

SEQ ID NO: 80609 - DNA, 20 bp, synthetic construct
  source 1..20: mol_type = other DNA
atcccatccattagactaga

SEQ ID NO: 80610 - DNA, 20 bp, synthetic construct
  source 1..20: mol_type = other DNA
gatcccatccattagactag

SEQ ID NO: 80611 - DNA, 20 bp, synthetic construct
  source 1..20: mol_type = other DNA
ggatcccatccattagacta

SEQ ID NO: 80612 - DNA, 20 bp, synthetic construct
  source 1..20: mol_type = other DNA
gggatcccatccattagact

SEQ ID NO: 80613 - DNA, 20 bp, synthetic construct
  source 1..20: mol_type = other DNA
tgggatcccatccattagac

SEQ ID NO: 80614 - DNA, 20 bp, synthetic construct
  source 1..20: mol_type = other DNA
ttgggatcccatccattaga

SEQ ID NO: 80615 - DNA, 20 bp, synthetic construct
  source 1..20: mol_type = other DNA
attgggatcccatccattag

SEQ ID NO: 80616 - DNA, 20 bp, synthetic construct
  source 1..20: mol_type = other DNA
cattgggatcccatccatta

SEQ ID NO: 80617 - DNA, 20 bp, synthetic construct
  source 1..20: mol_type = other DNA
tcattgggatcccatccatt

SEQ ID NO: 80618 - DNA, 20 bp, synthetic construct
  source 1..20: mol_type = other DNA
atcattgggatcccatccat

SEQ ID NO: 80619 - DNA, 20 bp, synthetic construct
  source 1..20: mol_type = other DNA
tatcattgggatcccatcca

SEQ ID NO: 80620 - DNA, 20 bp, synthetic construct
  source 1..20: mol_type = other DNA
atatcattgggatcccatcc

SEQ ID NO: 80621 - DNA, 20 bp, synthetic construct
  source 1..20: mol_type = other DNA
catatcattgggatcccatc

SEQ ID NO: 80622 - DNA, 20 bp, synthetic construct
  source 1..20: mol_type = other DNA
acatatcattgggatcccat

SEQ ID NO: 80623 - DNA, 20 bp, synthetic construct
  source 1..20: mol_type = other DNA
aacatatcattgggatccca

SEQ ID NO: 80624 - DNA, 20 bp, synthetic construct
  source 1..20: mol_type = other DNA
aaacatatcattgggatccc

SEQ ID NO: 80625 - DNA, 20 bp, synthetic construct
  source 1..20: mol_type = other DNA
gaaacatatcattgggatcc

SEQ ID NO: 80626 - DNA, 20 bp, synthetic construct
  source 1..20: mol_type = other DNA
cgaaacatatcattgggatc

SEQ ID NO: 80627 - DNA, 20 bp, synthetic construct
  source 1..20: mol_type = other DNA
tcgaaacatatcattgggat

SEQ ID NO: 80628 - DNA, 20 bp, synthetic construct
  source 1..20: mol_type = other DNA
atcgaaacatatcattggga

SEQ ID NO: 80629 - DNA, 20 bp, synthetic construct
  source 1..20: mol_type = other DNA
tatcgaaacatatcattggg

SEQ ID NO: 80630 - DNA, 20 bp, synthetic construct
  source 1..20: mol_type = other DNA
atatcgaaacatatcattgg

SEQ ID NO: 80631 - DNA, 20 bp, synthetic construct
  source 1..20: mol_type = other DNA
tatatcgaaacatatcattg

SEQ ID NO: 80632 - DNA, 20 bp, synthetic construct
  source 1..20: mol_type = other DNA
ttatatcgaaacatatcatt

SEQ ID NO: 80633 - DNA, 20 bp, synthetic construct
  source 1..20: mol_type = other DNA
attatatcgaaacatatcat

SEQ ID NO: 80634 - DNA, 20 bp, synthetic construct
  source 1..20: mol_type = other DNA
cattatatcgaaacatatca

SEQ ID NO: 80635 - DNA, 20 bp, synthetic construct
  source 1..20: mol_type = other DNA
tcattatatcgaaacatatc

SEQ ID NO: 80636 - DNA, 20 bp, synthetic construct
  source 1..20: mol_type = other DNA
ttcattatatcgaaacatat

SEQ ID NO: 80637 - DNA, 20 bp, synthetic construct
  source 1..20: mol_type = other DNA
cttcattatatcgaaacata

SEQ ID NO: 80638 - DNA, 20 bp, synthetic construct
  source 1..20: mol_type = other DNA
tcttcattatatcgaaacat

SEQ ID NO: 80639 - DNA, 20 bp, synthetic construct
  source 1..20: mol_type = other DNA
ttcttcattatatcgaaaca

SEQ ID NO: 80640 - DNA, 20 bp, synthetic construct
  source 1..20: mol_type = other DNA
tttcttcattatatcgaaac

SEQ ID NO: 80641 - DNA, 20 bp, synthetic construct
  source 1..20: mol_type = other DNA
ttttcttcattatatcgaaa

SEQ ID NO: 80642 - DNA, 20 bp, synthetic construct
  source 1..20: mol_type = other DNA
attttcttcattatatcgaa

SEQ ID NO: 80643 - DNA, 20 bp, synthetic construct
  source 1..20: mol_type = other DNA
aattttcttcattatatcga

SEQ ID NO: 80644 - DNA, 20 bp, synthetic construct
  source 1..20: mol_type = other DNA
taattttcttcattatatcg

SEQ ID NO: 80645 - DNA, 20 bp, synthetic construct
  source 1..20: mol_type = other DNA
ataattttcttcattatatc

SEQ ID NO: 80646 - DNA, 20 bp, synthetic construct
  source 1..20: mol_type = other DNA
cataattttcttcattatat

SEQ ID NO: 80647 - DNA, 20 bp, synthetic construct
  source 1..20: mol_type = other DNA
ccataattttcttcattata

SEQ ID NO: 80648 - DNA, 20 bp, synthetic construct
  source 1..20: mol_type = other DNA
accataattttcttcattat

SEQ ID NO: 80649 - DNA, 20 bp, synthetic construct
  source 1..20: mol_type = other DNA
caccataattttcttcatta

SEQ ID NO: 80650 - DNA, 20 bp, synthetic construct
  source 1..20: mol_type = other DNA
acaccataattttcttcatt

SEQ ID NO: 80651 - DNA, 20 bp, synthetic construct
  source 1..20: mol_type = other DNA
tacaccataattttcttcat

SEQ ID NO: 80652 - DNA, 20 bp, synthetic construct
  source 1..20: mol_type = other DNA
ctacaccataattttcttca

SEQ ID NO: 80653 - DNA, 20 bp, synthetic construct
  source 1..20: mol_type = other DNA
actacaccataattttcttc

SEQ ID NO: 80654 - DNA, 20 bp, synthetic construct
  source 1..20: mol_type = other DNA
cactacaccataattttctt

SEQ ID NO: 80655 - DNA, 20 bp, synthetic construct
  source 1..20: mol_type = other DNA
acactacaccataattttct

SEQ ID NO: 80656 - DNA, 20 bp, synthetic construct
  source 1..20: mol_type = other DNA
gacactacaccataattttc

SEQ ID NO: 80657 - DNA, 20 bp, synthetic construct
  source 1..20: mol_type = other DNA
agacactacaccataatttt

SEQ ID NO: 80658 - DNA, 20 bp, synthetic construct
  source 1..20: mol_type = other DNA
tagacactacaccataattt

SEQ ID NO: 80659 - DNA, 20 bp, synthetic construct
  source 1..20: mol_type = other DNA
gtagacactacaccataatt

SEQ ID NO: 80660 - DNA, 20 bp, synthetic construct
  source 1..20: mol_type = other DNA
cgtagacactacaccataat

SEQ ID NO: 80661 - DNA, 20 bp, synthetic construct
  source 1..20: mol_type = other DNA
acgtagacactacaccataa

SEQ ID NO: 80662 - DNA, 20 bp, synthetic construct
  source 1..20: mol_type = other DNA
tacgtagacactacaccata

SEQ ID NO: 80663 - DNA, 20 bp, synthetic construct
  source 1..20: mol_type = other DNA
atacgtagacactacaccat

SEQ ID NO: 80664 - DNA, 20 bp, synthetic construct
  source 1..20: mol_type = other DNA
catacgtagacactacacca

SEQ ID NO: 80665 - DNA, 20 bp, synthetic construct
  source 1..20: mol_type = other DNA
tcatacgtagacactacacc

SEQ ID NO: 80666 - DNA, 20 bp, synthetic construct
  source 1..20: mol_type = other DNA
atcatacgtagacactacac

SEQ ID NO: 80667 - DNA, 20 bp, synthetic construct
  source 1..20: mol_type = other DNA
tatcatacgtagacactaca

SEQ ID NO: 80668 - DNA, 20 bp, synthetic construct
  source 1..20: mol_type = other DNA
ctatcatacgtagacactac

SEQ ID NO: 80669 - DNA, 20 bp, synthetic construct
  source 1..20: mol_type = other DNA
gctatcatacgtagacacta

SEQ ID NO: 80670 - DNA, 20 bp, synthetic construct
  source 1..20: mol_type = other DNA
tgctatcatacgtagacact

SEQ ID NO: 80671 - DNA, 20 bp, synthetic construct
  source 1..20: mol_type = other DNA
ctgctatcatacgtagacac

SEQ ID NO: 80672 - DNA, 20 bp, synthetic construct
  source 1..20: mol_type = other DNA
actgctatcatacgtagaca

SEQ ID NO: 80673 - DNA, 20 bp, synthetic construct
  source 1..20: mol_type = other DNA
aactgctatcatacgtagac

SEQ ID NO: 80674 - DNA, 20 bp, synthetic construct
  source 1..20: mol_type = other DNA
aaactgctatcatacgtaga

SEQ ID NO: 80675 - DNA, 20 bp, synthetic construct
  source 1..20: mol_type = other DNA
taaactgctatcatacgtag

SEQ ID NO: 80676 - DNA, 20 bp, synthetic construct
  source 1..20: mol_type = other DNA
ataaactgctatcatacgta

SEQ ID NO: 80677 - DNA, 20 bp, synthetic construct
  source 1..20: mol_type = other DNA
gataaactgctatcatacgt

SEQ ID NO: 80678 - DNA, 20 bp, synthetic construct
  source 1..20: mol_type = other DNA
agataaactgctatcatacg

SEQ ID NO: 80679 - DNA, 20 bp, synthetic construct
  source 1..20: mol_type = other DNA
aagataaactgctatcatac

SEQ ID NO: 80680 - DNA, 20 bp, synthetic construct
  source 1..20: mol_type = other DNA
gaagataaactgctatcata

SEQ ID NO: 80681 - DNA, 20 bp, synthetic construct
  source 1..20: mol_type = other DNA
cgaagataaactgctatcat

SEQ ID NO: 80682 - DNA, 20 bp, synthetic construct
  source 1..20: mol_type = other DNA
acgaagataaactgctatca

SEQ ID NO: 80683 - DNA, 20 bp, synthetic construct
  source 1..20: mol_type = other DNA
tacgaagataaactgctatc

SEQ ID NO: 80684 - DNA, 20 bp, synthetic construct
  source 1..20: mol_type = other DNA
atacgaagataaactgctat

SEQ ID NO: 80685 - DNA, 20 bp, synthetic construct
  source 1..20: mol_type = other DNA
tatacgaagataaactgcta

SEQ ID NO: 80686 - DNA, 20 bp, synthetic construct
  source 1..20: mol_type = other DNA
gtatacgaagataaactgct

SEQ ID NO: 80687 - DNA, 20 bp, synthetic construct
  source 1..20: mol_type = other DNA
cgtatacgaagataaactgc

SEQ ID NO: 80688 - DNA, 20 bp, synthetic construct
  source 1..20: mol_type = other DNA
acgtatacgaagataaactg

SEQ ID NO: 80689 - DNA, 20 bp, synthetic construct
  source 1..20: mol_type = other DNA
tacgtatacgaagataaact

SEQ ID NO: 80690 - DNA, 20 bp, synthetic construct
  source 1..20: mol_type = other DNA
ttacgtatacgaagataaac

SEQ ID NO: 80691 - DNA, 20 bp, synthetic construct
  source 1..20: mol_type = other DNA
cttacgtatacgaagataaa

SEQ ID NO: 80692 - DNA, 20 bp, synthetic construct
  source 1..20: mol_type = other DNA
acttacgtatacgaagataa

SEQ ID NO: 80693 - DNA, 20 bp, synthetic construct
  source 1..20: mol_type = other DNA
aacttacgtatacgaagata

SEQ ID NO: 80694 - DNA, 20 bp, synthetic construct
  source 1..20: mol_type = other DNA
aaacttacgtatacgaagat

SEQ ID NO: 80695 - DNA, 20 bp, synthetic construct
  source 1..20: mol_type = other DNA
caaacttacgtatacgaaga

SEQ ID NO: 80696 - DNA, 20 bp, synthetic construct
  source 1..20: mol_type = other DNA
tcaaacttacgtatacgaag

SEQ ID NO: 80697 - DNA, 20 bp, synthetic construct
  source 1..20: mol_type = other DNA
ttcaaacttacgtatacgaa

SEQ ID NO: 80698 - DNA, 20 bp, synthetic construct
  source 1..20: mol_type = other DNA
tttcaaacttacgtatacga

SEQ ID NO: 80699 - DNA, 20 bp, synthetic construct
  source 1..20: mol_type = other DNA
ttttcaaacttacgtatacg

SEQ ID NO: 80700 - DNA, 20 bp, synthetic construct
  source 1..20: mol_type = other DNA
cttttcaaacttacgtatac

SEQ ID NO: 80701 - DNA, 20 bp, synthetic construct
  source 1..20: mol_type = other DNA
acttttcaaacttacgtata

SEQ ID NO: 80702 - DNA, 20 bp, synthetic construct
  source 1..20: mol_type = other DNA
aacttttcaaacttacgtat

SEQ ID NO: 80703 - DNA, 20 bp, synthetic construct
  source 1..20: mol_type = other DNA
aaacttttcaaacttacgta

SEQ ID NO: 80704 - DNA, 20 bp, synthetic construct
  source 1..20: mol_type = other DNA
caaacttttcaaacttacgt

SEQ ID NO: 80705 - DNA, 20 bp, synthetic construct
  source 1..20: mol_type = other DNA
acaaacttttcaaacttacg

SEQ ID NO: 80706 - DNA, 20 bp, synthetic construct
  source 1..20: mol_type = other DNA
aacaaacttttcaaacttac

SEQ ID NO: 80707 - DNA, 20 bp, synthetic construct
  source 1..20: mol_type = other DNA
aaacaaacttttcaaactta

SEQ ID NO: 80708 - DNA, 20 bp, synthetic construct
  source 1..20: mol_type = other DNA
aaaacaaacttttcaaactt

SEQ ID NO: 80709 - DNA, 20 bp, synthetic construct
  source 1..20: mol_type = other DNA
aaaaacaaacttttcaaact

SEQ ID NO: 80710 - DNA, 20 bp, synthetic construct
  source 1..20: mol_type = other DNA
taaaaacaaacttttcaaac

SEQ ID NO: 80711 - DNA, 20 bp, synthetic construct
  source 1..20: mol_type = other DNA
ataaaaacaaacttttcaaa

SEQ ID NO: 80712 - DNA, 20 bp, synthetic construct
  source 1..20: mol_type = other DNA
aataaaaacaaacttttcaa

SEQ ID NO: 80713 - DNA, 20 bp, synthetic construct
  source 1..20: mol_type = other DNA
aaataaaaacaaacttttca

SEQ ID NO: 80714 - DNA, 20 bp, synthetic construct
  source 1..20: mol_type = other DNA
aaaataaaaacaaacttttc

SEQ ID NO: 80715 - DNA, 20 bp, synthetic construct
  source 1..20: mol_type = other DNA
taaaataaaaacaaactttt

SEQ ID NO: 80716 - DNA, 20 bp, synthetic construct
  source 1..20: mol_type = other DNA
ctaaaataaaaacaaacttt

SEQ ID NO: 80717 - DNA, 20 bp, synthetic construct
  source 1..20: mol_type = other DNA
actaaaataaaaacaaactt

SEQ ID NO: 80718 - DNA, 20 bp, synthetic construct
  source 1..20: mol_type = other DNA
cactaaaataaaaacaaact

SEQ ID NO: 80719 - DNA, 20 bp, synthetic construct
  source 1..20: mol_type = other DNA
gcactaaaataaaaacaaac

SEQ ID NO: 80720 - DNA, 20 bp, synthetic construct
  source 1..20: mol_type = other DNA
tgcactaaaataaaaacaaa

SEQ ID NO: 80721 - DNA, 20 bp, synthetic construct
  source 1..20: mol_type = other DNA
atgcactaaaataaaaacaa

SEQ ID NO: 80722 - DNA, 20 bp, synthetic construct
  source 1..20: mol_type = other DNA
aatgcactaaaataaaaaca

SEQ ID NO: 80723 - DNA, 20 bp, synthetic construct
  source 1..20: mol_type = other DNA
aaatgcactaaaataaaaac

SEQ ID NO: 80724 - DNA, 20 bp, synthetic construct
  source 1..20: mol_type = other DNA
caaatgcactaaaataaaaa

SEQ ID NO: 80725 - DNA, 20 bp, synthetic construct
  source 1..20: mol_type = other DNA
acaaatgcactaaaataaaa

SEQ ID NO: 80726 - DNA, 20 bp, synthetic construct
  source 1..20: mol_type = other DNA
gacaaatgcactaaaataaa

SEQ ID NO: 80727 - DNA, 20 bp, synthetic construct
  source 1..20: mol_type = other DNA
agacaaatgcactaaaataa

SEQ ID NO: 80728 - DNA, 20 bp, synthetic construct
  source 1..20: mol_type = other DNA
aagacaaatgcactaaaata

SEQ ID NO: 80729 - DNA, 20 bp, synthetic construct
  source 1..20: mol_type = other DNA
aaagacaaatgcactaaaat

SEQ ID NO: 80730 - DNA, 20 bp, synthetic construct
  source 1..20: mol_type = other DNA
caaagacaaatgcactaaaa

SEQ ID NO: 80731 - DNA, 20 bp, synthetic construct
  source 1..20: mol_type = other DNA
tcaaagacaaatgcactaaa

SEQ ID NO: 80732 - DNA, 20 bp, synthetic construct
  source 1..20: mol_type = other DNA
atcaaagacaaatgcactaa

SEQ ID NO: 80733 - DNA, 20 bp, synthetic construct
  source 1..20: mol_type = other DNA
aatcaaagacaaatgcacta

SEQ ID NO: 80734 - DNA, 20 bp, synthetic construct
  source 1..20: mol_type = other DNA
aaatcaaagacaaatgcact

SEQ ID NO: 80735 - DNA, 20 bp, synthetic construct
  source 1..20: mol_type = other DNA
aaaatcaaagacaaatgcac

SEQ ID NO: 80736 - DNA, 20 bp, synthetic construct
  source 1..20: mol_type = other DNA
gaaaatcaaagacaaatgca

SEQ ID NO: 80737 - DNA, 20 bp, synthetic construct
  source 1..20: mol_type = other DNA
tgaaaatcaaagacaaatgc

SEQ ID NO: 80738 - DNA, 20 bp, synthetic construct
  source 1..20: mol_type = other DNA
atgaaaatcaaagacaaatg

SEQ ID NO: 80739 - DNA, 20 bp, synthetic construct
  source 1..20: mol_type = other DNA
gatgaaaatcaaagacaaat

SEQ ID NO: 80740 - DNA, 20 bp, synthetic construct
  source 1..20: mol_type = other DNA
tgatgaaaatcaaagacaaa

SEQ ID NO: 80741 - DNA, 20 bp, synthetic construct
  source 1..20: mol_type = other DNA
ctgatgaaaatcaaagacaa

SEQ ID NO: 80742 - DNA, 20 bp, synthetic construct
  source 1..20: mol_type = other DNA
gctgatgaaaatcaaagaca

SEQ ID NO: 80743 - DNA, 20 bp, synthetic construct
  source 1..20: mol_type = other DNA
agctgatgaaaatcaaagac

SEQ ID NO: 80744 - DNA, 20 bp, synthetic construct
  source 1..20: mol_type = other DNA
aagctgatgaaaatcaaaga

SEQ ID NO: 80745 - DNA, 20 bp, synthetic construct
  source 1..20: mol_type = other DNA
taagctgatgaaaatcaaag

SEQ ID NO: 80746 - DNA, 20 bp, synthetic construct
  source 1..20: mol_type = other DNA
ttaagctgatgaaaatcaaa

SEQ ID NO: 80747 - DNA, 20 bp, synthetic construct
  source 1..20: mol_type = other DNA
attaagctgatgaaaatcaa

SEQ ID NO: 80748 - DNA, 20 bp, synthetic construct
  source 1..20: mol_type = other DNA
aattaagctgatgaaaatca

SEQ ID NO: 80749 - DNA, 20 bp, synthetic construct
  source 1..20: mol_type = other DNA
aaattaagctgatgaaaatc

SEQ ID NO: 80750 - DNA, 20 bp, synthetic construct
  source 1..20: mol_type = other DNA
taaattaagctgatgaaaat

SEQ ID NO: 80751 - DNA, 20 bp, synthetic construct
  source 1..20: mol_type = other DNA
ataaattaagctgatgaaaa

SEQ ID NO: 80752 - DNA, 20 bp, synthetic construct
  source 1..20: mol_type = other DNA
cataaattaagctgatgaaa

SEQ ID NO: 80753 - DNA, 20 bp, synthetic construct
  source 1..20: mol_type = other DNA
tcataaattaagctgatgaa

SEQ ID NO: 80754 - DNA, 20 bp, synthetic construct
  source 1..20: mol_type = other DNA
atcataaattaagctgatga

SEQ ID NO: 80755 - DNA, 20 bp, synthetic construct
  source 1..20: mol_type = other DNA
catcataaattaagctgatg

SEQ ID NO: 80756 - DNA, 20 bp, synthetic construct
  source 1..20: mol_type = other DNA
tcatcataaattaagctgat

SEQ ID NO: 80757 - DNA, 20 bp, synthetic construct
  source 1..20: mol_type = other DNA
ttcatcataaattaagctga

SEQ ID NO: 80758 - DNA, 20 bp, synthetic construct
  source 1..20: mol_type = other DNA
attcatcataaattaagctg

SEQ ID NO: 80759 - DNA, 20 bp, synthetic construct
  source 1..20: mol_type = other DNA
tattcatcataaattaagct

SEQ ID NO: 80760 - DNA, 20 bp, synthetic construct
  source 1..20: mol_type = other DNA
ttattcatcataaattaagc

SEQ ID NO: 80761 - DNA, 20 bp, synthetic construct
  source 1..20: mol_type = other DNA
tttattcatcataaattaag

SEQ ID NO: 80762 - DNA, 20 bp, synthetic construct
  source 1..20: mol_type = other DNA
atttattcatcataaattaa

SEQ ID NO: 80763 - DNA, 20 bp, synthetic construct
  source 1..20: mol_type = other DNA
catttattcatcataaatta

SEQ ID NO: 80764 - DNA, 20 bp, synthetic construct
  source 1..20: mol_type = other DNA
acatttattcatcataaatt

SEQ ID NO: 80765 - DNA, 20 bp, synthetic construct
  source 1..20: mol_type = other DNA
aacatttattcatcataaat

SEQ ID NO: 80766 - DNA, 20 bp, synthetic construct
  source 1..20: mol_type = other DNA
aaacatttattcatcataaa

SEQ ID NO: 80767 - DNA, 20 bp, synthetic construct
  source 1..20: mol_type = other DNA
caaacatttattcatcataa

SEQ ID NO: 80768 - DNA, 20 bp, synthetic construct
  source 1..20: mol_type = other DNA
acaaacatttattcatcata

SEQ ID NO: 80769 - DNA, 20 bp, synthetic construct
  source 1..20: mol_type = other DNA
aacaaacatttattcatcat

SEQ ID NO: 80770 - DNA, 20 bp, synthetic construct
  source 1..20: mol_type = other DNA
taacaaacatttattcatca

SEQ ID NO: 80771 - DNA, 20 bp, synthetic construct
  source 1..20: mol_type = other DNA
ctaacaaacatttattcatc

SEQ ID NO: 80772 - DNA, 20 bp, synthetic construct
  source 1..20: mol_type = other DNA
actaacaaacatttattcat

SEQ ID NO: 80773 - DNA, 20 bp, synthetic construct
  source 1..20: mol_type = other DNA
aactaacaaacatttattca

SEQ ID NO: 80774 - DNA, 20 bp, synthetic construct
  source 1..20: mol_type = other DNA
aaactaacaaacatttattc

SEQ ID NO: 80775 - DNA, 20 bp, synthetic construct
  source 1..20: mol_type = other DNA
aaaactaacaaacatttatt

SEQ ID NO: 80776 - DNA, 20 bp, synthetic construct
  source 1..20: mol_type = other DNA
aaaaactaacaaacatttat

SEQ ID NO: 80777 - DNA, 20 bp, synthetic construct
  source 1..20: mol_type = other DNA
taaaaactaacaaacattta

SEQ ID NO: 80778 - DNA, 20 bp, synthetic construct
  source 1..20: mol_type = other DNA
ttaaaaactaacaaacattt

SEQ ID NO: 80779 - DNA, 20 bp, synthetic construct
  source 1..20: mol_type = other DNA
cttaaaaactaacaaacatt

SEQ ID NO: 80780 - DNA, 20 bp, synthetic construct
  source 1..20: mol_type = other DNA
acttaaaaactaacaaacat

SEQ ID NO: 80781 - DNA, 20 bp, synthetic construct
  source 1..20: mol_type = other DNA
aacttaaaaactaacaaaca

SEQ ID NO: 80782 - DNA, 20 bp, synthetic construct
  source 1..20: mol_type = other DNA
taacttaaaaactaacaaac

SEQ ID NO: 80783 - DNA, 20 bp, synthetic construct
  source 1..20: mol_type = other DNA
ttaacttaaaaactaacaaa

SEQ ID NO: 80784 - DNA, 20 bp, synthetic construct
  source 1..20: mol_type = other DNA
tttaacttaaaaactaacaa

SEQ ID NO: 80785 - DNA, 20 bp, synthetic construct
  source 1..20: mol_type = other DNA
gtttaacttaaaaactaaca

SEQ ID NO: 80786 - DNA, 20 bp, synthetic construct
  source 1..20: mol_type = other DNA
tgtttaacttaaaaactaac

SEQ ID NO: 80787 - DNA, 20 bp, synthetic construct
  source 1..20: mol_type = other DNA
ttgtttaacttaaaaactaa

SEQ ID NO: 80788 - DNA, 20 bp, synthetic construct
  source 1..20: mol_type = other DNA
attgtttaacttaaaaacta

SEQ ID NO: 80789 - DNA, 20 bp, synthetic construct
  source 1..20: mol_type = other DNA
aattgtttaacttaaaaact

SEQ ID NO: 80790 - DNA, 20 bp, synthetic construct
  source 1..20: mol_type = other DNA
taattgtttaacttaaaaac

SEQ ID NO: 80791 - DNA, 20 bp, synthetic construct
  source 1..20: mol_type = other DNA
gtaattgtttaacttaaaaa

SEQ ID NO: 80792 - DNA, 20 bp, synthetic construct
  source 1..20: mol_type = other DNA
tgtaattgtttaacttaaaa

SEQ ID NO: 80793 - DNA, 20 bp, synthetic construct
  source 1..20: mol_type = other DNA
atgtaattgtttaacttaaa

SEQ ID NO: 80794 - DNA, 20 bp, synthetic construct
  source 1..20: mol_type = other DNA
catgtaattgtttaacttaa

SEQ ID NO: 80795 - DNA, 20 bp, synthetic construct
  source 1..20: mol_type = other DNA
tcatgtaattgtttaactta

SEQ ID NO: 80796 - DNA, 20 bp, synthetic construct
  source 1..20: mol_type = other DNA
ttcatgtaattgtttaactt

SEQ ID NO: 80797 - DNA, 20 bp, synthetic construct
  source 1..20: mol_type = other DNA
tttcatgtaattgtttaact

SEQ ID NO: 80798 - DNA, 20 bp, synthetic construct
  source 1..20: mol_type = other DNA
atttcatgtaattgtttaac

SEQ ID NO: 80799 - DNA, 20 bp, synthetic construct
  source 1..20: mol_type = other DNA
tatttcatgtaattgtttaa

SEQ ID NO: 80800 - DNA, 20 bp, synthetic construct
  source 1..20: mol_type = other DNA
ttatttcatgtaattgttta

SEQ ID NO: 80801 - DNA, 20 bp, synthetic construct
  source 1..20: mol_type = other DNA
attatttcatgtaattgttt

SEQ ID NO: 80802 - DNA, 20 bp, synthetic construct
  source 1..20: mol_type = other DNA
aattatttcatgtaattgtt

SEQ ID NO: 80803 - DNA, 20 bp, synthetic construct
  source 1..20: mol_type = other DNA
aaattatttcatgtaattgt

SEQ ID NO: 80804 - DNA, 20 bp, synthetic construct
  source 1..20: mol_type = other DNA
aaaattatttcatgtaattg

SEQ ID NO: 80805 - DNA, 20 bp, synthetic construct
  source 1..20: mol_type = other DNA
aaaaattatttcatgtaatt

SEQ ID NO: 80806 - DNA, 20 bp, synthetic construct
  source 1..20: mol_type = other DNA
gaaaaattatttcatgtaat

SEQ ID NO: 80807 - DNA, 20 bp, synthetic construct
  source 1..20: mol_type = other DNA
agaaaaattatttcatgtaa

SEQ ID NO: 80808 - DNA, 20 bp, synthetic construct
  source 1..20: mol_type = other DNA
gagaaaaattatttcatgta

SEQ ID NO: 80809 - DNA, 20 bp, synthetic construct
  source 1..20: mol_type = other DNA
agagaaaaattatttcatgt

SEQ ID NO: 80810 - DNA, 20 bp, synthetic construct
  source 1..20: mol_type = other DNA
aagagaaaaattatttcatg

SEQ ID NO: 80811 - DNA, 20 bp, synthetic construct
  source 1..20: mol_type = other DNA
taagagaaaaattatttcat

SEQ ID NO: 80812 - DNA, 20 bp, synthetic construct
  source 1..20: mol_type = other DNA
ataagagaaaaattatttca

SEQ ID NO: 80813 - DNA, 20 bp, synthetic construct
  source 1..20: mol_type = other DNA
aataagagaaaaattatttc

SEQ ID NO: 80814 - DNA, 20 bp, synthetic construct
  source 1..20: mol_type = other DNA
taataagagaaaaattattt

SEQ ID NO: 80815 - DNA, 20 bp, synthetic construct
  source 1..20: mol_type = other DNA
gtaataagagaaaaattatt

SEQ ID NO: 80816 - DNA, 20 bp, synthetic construct
  source 1..20: mol_type = other DNA
ggtaataagagaaaaattat

SEQ ID NO: 80817 - DNA, 20 bp, synthetic construct
  source 1..20: mol_type = other DNA
tggtaataagagaaaaatta

SEQ ID NO: 80818 - DNA, 20 bp, synthetic construct
  source 1..20: mol_type = other DNA
ttggtaataagagaaaaatt

SEQ ID NO: 80819 - DNA, 20 bp, synthetic construct
  source 1..20: mol_type = other DNA
gttggtaataagagaaaaat

SEQ ID NO: 80820 - DNA, 20 bp, synthetic construct
  source 1..20: mol_type = other DNA
agttggtaataagagaaaaa

SEQ ID NO: 80821 - DNA, 20 bp, synthetic construct
  source 1..20: mol_type = other DNA
cagttggtaataagagaaaa

SEQ ID NO: 80822 - DNA, 20 bp, synthetic construct
  source 1..20: mol_type = other DNA
acagttggtaataagagaaa

SEQ ID NO: 80823 - DNA, 20 bp, synthetic construct
  source 1..20: mol_type = other DNA
cacagttggtaataagagaa

SEQ ID NO: 80824 - DNA, 20 bp, synthetic construct
  source 1..20: mol_type = other DNA
tcacagttggtaataagaga

SEQ ID NO: 80825 - DNA, 20 bp, synthetic construct
  source 1..20: mol_type = other DNA
atcacagttggtaataagag

SEQ ID NO: 80826 - DNA, 20 bp, synthetic construct
  source 1..20: mol_type = other DNA
tatcacagttggtaataaga

SEQ ID NO: 80827 - DNA, 20 bp, synthetic construct
  source 1..20: mol_type = other DNA
ttatcacagttggtaataag

SEQ ID NO: 80828 - DNA, 20 bp, synthetic construct
  source 1..20: mol_type = other DNA
tttatcacagttggtaataa

SEQ ID NO: 80829 - DNA, 20 bp, synthetic construct
  source 1..20: mol_type = other DNA
atttatcacagttggtaata

SEQ ID NO: 80830 - DNA, 20 bp, synthetic construct
  source 1..20: mol_type = other DNA
aatttatcacagttggtaat

SEQ ID NO: 80831 - DNA, 20 bp, synthetic construct
  source 1..20: mol_type = other DNA
aaatttatcacagttggtaa

SEQ ID NO: 80832 - DNA, 20 bp, synthetic construct
  source 1..20: mol_type = other DNA
gaaatttatcacagttggta

SEQ ID NO: 80833 - DNA, 20 bp, synthetic construct
  source 1..20: mol_type = other DNA
ggaaatttatcacagttggt

SEQ ID NO: 80834 - DNA, 20 bp, synthetic construct
  source 1..20: mol_type = other DNA
tggaaatttatcacagttgg

SEQ ID NO: 80835 - DNA, 20 bp, synthetic construct
  source 1..20: mol_type = other DNA
atggaaatttatcacagttg

SEQ ID NO: 80836 - DNA, 20 bp, synthetic construct
  source 1..20: mol_type = other DNA
aatggaaatttatcacagtt

SEQ ID NO: 80837 - DNA, 20 bp, synthetic construct
  source 1..20: mol_type = other DNA
taatggaaatttatcacagt

SEQ ID NO: 80838 - DNA, 20 bp, synthetic construct
  source 1..20: mol_type = other DNA
ttaatggaaatttatcacag

SEQ ID NO: 80839 - DNA, 20 bp, synthetic construct
  source 1..20: mol_type = other DNA
tttaatggaaatttatcaca

SEQ ID NO: 80840 - DNA, 20 bp, synthetic construct
  source 1..20: mol_type = other DNA
ttttaatggaaatttatcac

SEQ ID NO: 80841 - DNA, 20 bp, synthetic construct
  source 1..20: mol_type = other DNA
tttttaatggaaatttatca

SEQ ID NO: 80842 - DNA, 20 bp, synthetic construct
  source 1..20: mol_type = other DNA
ttttttaatggaaatttatc

SEQ ID NO: 80843 - DNA, 20 bp, synthetic construct
  source 1..20: mol_type = other DNA
tttttttaatggaaatttat

SEQ ID NO: 80844 - DNA, 20 bp, synthetic construct
  source 1..20: mol_type = other DNA
ctttttttaatggaaattta

SEQ ID NO: 80845 - DNA, 20 bp, synthetic construct
  source 1..20: mol_type = other DNA
cctttttttaatggaaattt

SEQ ID NO: 80846 - DNA, 20 bp, synthetic construct
  source 1..20: mol_type = other DNA
ccctttttttaatggaaatt

SEQ ID NO: 80847 - DNA, 20 bp, synthetic construct
  source 1..20: mol_type = other DNA
tccctttttttaatggaaat

SEQ ID NO: 80848 - DNA, 20 bp, synthetic construct
  source 1..20: mol_type = other DNA
ttccctttttttaatggaaa

SEQ ID NO: 80849 - DNA, 20 bp, synthetic construct
  source 1..20: mol_type = other DNA
attccctttttttaatggaa

SEQ ID NO: 80850 - DNA, 20 bp, synthetic construct
  source 1..20: mol_type = other DNA
tattccctttttttaatgga

SEQ ID NO: 80851 - DNA, 20 bp, synthetic construct
  source 1..20: mol_type = other DNA
ttattccctttttttaatgg

SEQ ID NO: 80852 - DNA, 20 bp, synthetic construct
  source 1..20: mol_type = other DNA
tttattccctttttttaatg

SEQ ID NO: 80853 - DNA, 20 bp, synthetic construct
  source 1..20: mol_type = other DNA
atttattccctttttttaat

SEQ ID NO: 80854 - DNA, 20 bp, synthetic construct
  source 1..20: mol_type = other DNA
catttattccctttttttaa

SEQ ID NO: 80855 - DNA, 20 bp, synthetic construct
  source 1..20: mol_type = other DNA
acatttattcccttttttta

SEQ ID NO: 80856 - DNA, 20 bp, synthetic construct
  source 1..20: mol_type = other DNA
tacatttattcccttttttt

SEQ ID NO: 80857 - DNA, 20 bp, synthetic construct
  source 1..20: mol_type = other DNA
ctacatttattccctttttt

SEQ ID NO: 80858 - DNA, 20 bp, synthetic construct
  source 1..20: mol_type = other DNA
actacatttattcccttttt

SEQ ID NO: 80859 - DNA, 20 bp, synthetic construct
  source 1..20: mol_type = other DNA
aactacatttattccctttt

SEQ ID NO: 80860 - DNA, 20 bp, synthetic construct
  source 1..20: mol_type = other DNA
aaactacatttattcccttt

SEQ ID NO: 80861 - DNA, 20 bp, synthetic construct
  source 1..20: mol_type = other DNA
caaactacatttattccctt

SEQ ID NO: 80862 - DNA, 20 bp, synthetic construct
  source 1..20: mol_type = other DNA
gcaaactacatttattccct

SEQ ID NO: 80863 - DNA, 20 bp, synthetic construct
  source 1..20: mol_type = other DNA
ggcaaactacatttattccc

SEQ ID NO: 80864 - DNA, 20 bp, synthetic construct
  source 1..20: mol_type = other DNA
aggcaaactacatttattcc

SEQ ID NO: 80865 - DNA, 20 bp, synthetic construct
  source 1..20: mol_type = other DNA
taggcaaactacatttattc

SEQ ID NO: 80866 - DNA, 20 bp, synthetic construct
  source 1..20: mol_type = other DNA
ataggcaaactacatttatt

SEQ ID NO: 80867 - DNA, 20 bp, synthetic construct
  source 1..20: mol_type = other DNA
tataggcaaactacatttat

SEQ ID NO: 80868 - DNA, 20 bp, synthetic construct
  source 1..20: mol_type = other DNA
gtataggcaaactacattta

SEQ ID NO: 80869 - DNA, 20 bp, synthetic construct
  source 1..20: mol_type = other DNA
ggtataggcaaactacattt

SEQ ID NO: 80870 - DNA, 20 bp, synthetic construct
  source 1..20: mol_type = other DNA
gggtataggcaaactacatt

SEQ ID NO: 80871 - DNA, 20 bp, synthetic construct
  source 1..20: mol_type = other DNA
agggtataggcaaactacat

SEQ ID NO: 80872 - DNA, 20 bp, synthetic construct
  source 1..20: mol_type = other DNA
cagggtataggcaaactaca

SEQ ID NO: 80873 - DNA, 20 bp, synthetic construct
  source 1..20: mol_type = other DNA
acagggtataggcaaactac

SEQ ID NO: 80874 - DNA, 20 bp, synthetic construct
  source 1..20: mol_type = other DNA
aacagggtataggcaaacta

SEQ ID NO: 80875 - DNA, 20 bp, synthetic construct
  source 1..20: mol_type = other DNA
aaacagggtataggcaaact

SEQ ID NO: 80876 - DNA, 20 bp, synthetic construct
  source 1..20: mol_type = other DNA
aaaacagggtataggcaaac

SEQ ID NO: 80877 - DNA, 20 bp, synthetic construct
  source 1..20: mol_type = other DNA
aaaaacagggtataggcaaa

SEQ ID NO: 80878 - DNA, 20 bp, synthetic construct
  source 1..20: mol_type = other DNA
taaaaacagggtataggcaa

SEQ ID NO: 80879 - DNA, 20 bp, synthetic construct
  source 1..20: mol_type = other DNA
ataaaaacagggtataggca

SEQ ID NO: 80880 - DNA, 20 bp, synthetic construct
  source 1..20: mol_type = other DNA
cataaaaacagggtataggc

SEQ ID NO: 80881 - DNA, 20 bp, synthetic construct
  source 1..20: mol_type = other DNA
gcataaaaacagggtatagg

SEQ ID NO: 80882 - DNA, 20 bp, synthetic construct
  source 1..20: mol_type = other DNA
agcataaaaacagggtatag

SEQ ID NO: 80883 - DNA, 20 bp, synthetic construct
  source 1..20: mol_type = other DNA
gagcataaaaacagggtata

SEQ ID NO: 80884 - DNA, 20 bp, synthetic construct
  source 1..20: mol_type = other DNA
agagcataaaaacagggtat

SEQ ID NO: 80885 - DNA, 20 bp, synthetic construct
  source 1..20: mol_type = other DNA
tagagcataaaaacagggta

SEQ ID NO: 80886 - DNA, 20 bp, synthetic construct
  source 1..20: mol_type = other DNA
ttagagcataaaaacagggt

SEQ ID NO: 80887 - DNA, 20 bp, synthetic construct
  source 1..20: mol_type = other DNA
tttagagcataaaaacaggg

SEQ ID NO: 80888 - DNA, 20 bp, synthetic construct
  source 1..20: mol_type = other DNA
gtttagagcataaaaacagg

SEQ ID NO: 80889 - DNA, 20 bp, synthetic construct
  source 1..20: mol_type = other DNA
tgtttagagcataaaaacag

SEQ ID NO: 80890 - DNA, 20 bp, synthetic construct
  source 1..20: mol_type = other DNA
ttgtttagagcataaaaaca

SEQ ID NO: 80891 - DNA, 20 bp, synthetic construct
  source 1..20: mol_type = other DNA
tttgtttagagcataaaaac

SEQ ID NO: 80892 - DNA, 20 bp, synthetic construct
  source 1..20: mol_type = other DNA
atttgtttagagcataaaaa

SEQ ID NO: 80893 - DNA, 20 bp, synthetic construct
  source 1..20: mol_type = other DNA
aatttgtttagagcataaaa

SEQ ID NO: 80894 - DNA, 20 bp, synthetic construct
  source 1..20: mol_type = other DNA
aaatttgtttagagcataaa

SEQ ID NO: 80895 - DNA, 20 bp, synthetic construct
  source 1..20: mol_type = other DNA
aaaatttgtttagagcataa

SEQ ID NO: 80896 - DNA, 20 bp, synthetic construct
  source 1..20: mol_type = other DNA
caaaatttgtttagagcata

SEQ ID NO: 80897 - DNA, 20 bp, synthetic construct
  source 1..20: mol_type = other DNA
ccaaaatttgtttagagcat

SEQ ID NO: 80898 - DNA, 20 bp, synthetic construct
  source 1..20: mol_type = other DNA
accaaaatttgtttagagca

SEQ ID NO: 80899 - DNA, 20 bp, synthetic construct
  source 1..20: mol_type = other DNA
aaccaaaatttgtttagagc

SEQ ID NO: 80900 - DNA, 20 bp, synthetic construct
  source 1..20: mol_type = other DNA
aaaccaaaatttgtttagag

SEQ ID NO: 80901 - DNA, 20 bp, synthetic construct
  source 1..20: mol_type = other DNA
aaaaccaaaatttgtttaga

SEQ ID NO: 80902 - DNA, 20 bp, synthetic construct
  source 1..20: mol_type = other DNA
caaaaccaaaatttgtttag

SEQ ID NO: 80903 - DNA, 20 bp, synthetic construct
  source 1..20: mol_type = other DNA
acaaaaccaaaatttgttta

SEQ ID NO: 80904 - DNA, 20 bp, synthetic construct
  source 1..20: mol_type = other DNA
gacaaaaccaaaatttgttt

SEQ ID NO: 80905 - DNA, 20 bp, synthetic construct
  source 1..20: mol_type = other DNA
agacaaaaccaaaatttgtt

SEQ ID NO: 80906 - DNA, 20 bp, synthetic construct
  source 1..20: mol_type = other DNA
aagacaaaaccaaaatttgt

SEQ ID NO: 80907 - DNA, 20 bp, synthetic construct
  source 1..20: mol_type = other DNA
aaagacaaaaccaaaatttg

SEQ ID NO: 80908 - DNA, 20 bp, synthetic construct
  source 1..20: mol_type = other DNA
aaaagacaaaaccaaaattt

SEQ ID NO: 80909 - DNA, 20 bp, synthetic construct
  source 1..20: mol_type = other DNA
aaaaagacaaaaccaaaatt

SEQ ID NO: 80910 - DNA, 20 bp, synthetic construct
  source 1..20: mol_type = other DNA
aaaaaagacaaaaccaaaat

SEQ ID NO: 80911 - DNA, 20 bp, synthetic construct
  source 1..20: mol_type = other DNA
aaaaaaagacaaaaccaaaa

SEQ ID NO: 80912 - DNA, 20 bp, synthetic construct
  source 1..20: mol_type = other DNA
aaaaaaaagacaaaaccaaa

SEQ ID NO: 80913 - DNA, 20 bp, synthetic construct
  source 1..20: mol_type = other DNA
aaaaaaaaagacaaaaccaa

SEQ ID NO: 80914 - DNA, 20 bp, synthetic construct
  source 1..20: mol_type = other DNA
gaaaaaaaaagacaaaacca

SEQ ID NO: 80915 - DNA, 20 bp, synthetic construct
  source 1..20: mol_type = other DNA
agaaaaaaaaagacaaaacc

SEQ ID NO: 80916 - DNA, 20 bp, synthetic construct
  source 1..20: mol_type = other DNA
aagaaaaaaaaagacaaaac

SEQ ID NO: 80917 - DNA, 20 bp, synthetic construct
  source 1..20: mol_type = other DNA
aaagaaaaaaaaagacaaaa

SEQ ID NO: 80918 - DNA, 20 bp, synthetic construct
  source 1..20: mol_type = other DNA
aaaagaaaaaaaaagacaaa

SEQ ID NO: 80919 - DNA, 20 bp, synthetic construct
  source 1..20: mol_type = other DNA
caaaagaaaaaaaaagacaa

SEQ ID NO: 80920 - DNA, 20 bp, synthetic construct
  source 1..20: mol_type = other DNA
tcaaaagaaaaaaaaagaca

SEQ ID NO: 80921 - DNA, 20 bp, synthetic construct
  source 1..20: mol_type = other DNA
ctcaaaagaaaaaaaaagac

SEQ ID NO: 80922 - DNA, 20 bp, synthetic construct
  source 1..20: mol_type = other DNA
tctcaaaagaaaaaaaaaga

SEQ ID NO: 80923 - DNA, 20 bp, synthetic construct
  source 1..20: mol_type = other DNA
ctctcaaaagaaaaaaaaag

SEQ ID NO: 80924 - DNA, 20 bp, synthetic construct
  source 1..20: mol_type = other DNA
cctctcaaaagaaaaaaaaa

SEQ ID NO: 80925 - DNA, 20 bp, synthetic construct
  source 1..20: mol_type = other DNA
ccctctcaaaagaaaaaaaa

SEQ ID NO: 80926 - DNA, 20 bp, synthetic construct
  source 1..20: mol_type = other DNA
tccctctcaaaagaaaaaaa

SEQ ID NO: 80927 - DNA, 20 bp, synthetic construct
  source 1..20: mol_type = other DNA
ttccctctcaaaagaaaaaa

SEQ ID NO: 80928 - DNA, 20 bp, synthetic construct
  source 1..20: mol_type = other DNA
attccctctcaaaagaaaaa

SEQ ID NO: 80929 - DNA, 20 bp, synthetic construct
  source 1..20: mol_type = other DNA
gattccctctcaaaagaaaa

SEQ ID NO: 80930 - DNA, 20 bp, synthetic construct
  source 1..20: mol_type = other DNA
agattccctctcaaaagaaa

SEQ ID NO: 80931 - DNA, 20 bp, synthetic construct
  source 1..20: mol_type = other DNA
gagattccctctcaaaagaa

SEQ ID NO: 80932 - DNA, 20 bp, synthetic construct
  source 1..20: mol_type = other DNA
cgagattccctctcaaaaga

SEQ ID NO: 80933 - DNA, 20 bp, synthetic construct
  source 1..20: mol_type = other DNA
gcgagattccctctcaaaag

SEQ ID NO: 80934 - DNA, 20 bp, synthetic construct
  source 1..20: mol_type = other DNA
agcgagattccctctcaaaa

SEQ ID NO: 80935 - DNA, 20 bp, synthetic construct
  source 1..20: mol_type = other DNA
cagcgagattccctctcaaa

SEQ ID NO: 80936 - DNA, 20 bp, synthetic construct
  source 1..20: mol_type = other DNA
acagcgagattccctctcaa

SEQ ID NO: 80937 - DNA, 20 bp, synthetic construct
  source 1..20: mol_type = other DNA
cacagcgagattccctctca

SEQ ID NO: 80938 - DNA, 20 bp, synthetic construct
  source 1..20: mol_type = other DNA
acacagcgagattccctctc

SEQ ID NO: 80939 - DNA, 20 bp, synthetic construct
  source 1..20: mol_type = other DNA
gacacagcgagattccctct

SEQ ID NO: 80940 - DNA, 20 bp, synthetic construct
  source 1..20: mol_type = other DNA
agacacagcgagattccctc

SEQ ID NO: 80941 - DNA, 20 bp, synthetic construct
  source 1..20: mol_type = other DNA
gagacacagcgagattccct

SEQ ID NO: 80942 - DNA, 20 bp, synthetic construct
  source 1..20: mol_type = other DNA
ggagacacagcgagattccc

SEQ ID NO: 80943 - DNA, 20 bp, synthetic construct
  source 1..20: mol_type = other DNA
tggagacacagcgagattcc

SEQ ID NO: 80944 - DNA, 20 bp, synthetic construct
  source 1..20: mol_type = other DNA
ctggagacacagcgagattc

SEQ ID NO: 80945 - DNA, 20 bp, synthetic construct
  source 1..20: mol_type = other DNA
cctggagacacagcgagatt

SEQ ID NO: 80946 - DNA, 20 bp, synthetic construct
  source 1..20: mol_type = other DNA
gcctggagacacagcgagat

SEQ ID NO: 80947 - DNA, 20 bp, synthetic construct
  source 1..20: mol_type = other DNA
agcctggagacacagcgaga

SEQ ID NO: 80948 - DNA, 20 bp, synthetic construct
  source 1..20: mol_type = other DNA
cagcctggagacacagcgag

SEQ ID NO: 80949 - DNA, 20 bp, synthetic construct
  source 1..20: mol_type = other DNA
ccagcctggagacacagcga

SEQ ID NO: 80950 - DNA, 20 bp, synthetic construct
  source 1..20: mol_type = other DNA
tccagcctggagacacagcg

SEQ ID NO: 80951 - DNA, 20 bp, synthetic construct
  source 1..20: mol_type = other DNA
ctccagcctggagacacagc

SEQ ID NO: 80952 - DNA, 20 bp, synthetic construct
  source 1..20: mol_type = other DNA
actccagcctggagacacag

SEQ ID NO: 80953 - DNA, 20 bp, synthetic construct
  source 1..20: mol_type = other DNA
cactccagcctggagacaca

SEQ ID NO: 80954 - DNA, 20 bp, synthetic construct
  source 1..20: mol_type = other DNA
gcactccagcctggagacac

SEQ ID NO: 80955 - DNA, 20 bp, synthetic construct
  source 1..20: mol_type = other DNA
tgcactccagcctggagaca

SEQ ID NO: 80956 - DNA, 20 bp, synthetic construct
  source 1..20: mol_type = other DNA
ctgcactccagcctggagac

SEQ ID NO: 80957 - DNA, 20 bp, synthetic construct
  source 1..20: mol_type = other DNA
actgcactccagcctggaga

SEQ ID NO: 80958 - DNA, 20 bp, synthetic construct
  source 1..20: mol_type = other DNA
cactgcactccagcctggag

SEQ ID NO: 80959 - DNA, 20 bp, synthetic construct
  source 1..20: mol_type = other DNA
ccactgcactccagcctgga

SEQ ID NO: 80960 - DNA, 20 bp, synthetic construct
  source 1..20: mol_type = other DNA
accactgcactccagcctgg

SEQ ID NO: 80961 - DNA, 20 bp, synthetic construct
  source 1..20: mol_type = other DNA
caccactgcactccagcctg

SEQ ID NO: 80962 - DNA, 20 bp, synthetic construct
  source 1..20: mol_type = other DNA
gcaccactgcactccagcct

SEQ ID NO: 80963 - DNA, 20 bp, synthetic construct
  source 1..20: mol_type = other DNA
tgcaccactgcactccagcc

SEQ ID NO: 80964 - DNA, 20 bp, synthetic construct
  source 1..20: mol_type = other DNA
ttgcaccactgcactccagc

SEQ ID NO: 80965 - DNA, 20 bp, synthetic construct
  source 1..20: mol_type = other DNA
attgcaccactgcactccag

SEQ ID NO: 80966 - DNA, 20 bp, synthetic construct
  source 1..20: mol_type = other DNA
gattgcaccactgcactcca

SEQ ID NO: 80967 - DNA, 20 bp, synthetic construct
  source 1..20: mol_type = other DNA
agattgcaccactgcactcc

SEQ ID NO: 80968 - DNA, 20 bp, synthetic construct
  source 1..20: mol_type = other DNA
gagattgcaccactgcactc

SEQ ID NO: 80969 - DNA, 20 bp, synthetic construct
  source 1..20: mol_type = other DNA
cgagattgcaccactgcact

SEQ ID NO: 80970 - DNA, 20 bp, synthetic construct
  source 1..20: mol_type = other DNA
ccgagattgcaccactgcac

SEQ ID NO: 80971 - DNA, 20 bp, synthetic construct
  source 1..20: mol_type = other DNA
gccgagattgcaccactgca

SEQ ID NO: 80972 - DNA, 20 bp, synthetic construct
  source 1..20: mol_type = other DNA
agccgagattgcaccactgc

SEQ ID NO: 80973 - DNA, 20 bp, synthetic construct
  source 1..20: mol_type = other DNA
gagccgagattgcaccactg

SEQ ID NO: 80974 - DNA, 20 bp, synthetic construct
  source 1..20: mol_type = other DNA
tgagccgagattgcaccact

SEQ ID NO: 80975 - DNA, 20 bp, synthetic construct
  source 1..20: mol_type = other DNA
gtgagccgagattgcaccac

SEQ ID NO: 80976 - DNA, 20 bp, synthetic construct
  source 1..20: mol_type = other DNA
agtgagccgagattgcacca

SEQ ID NO: 80977 - DNA, 20 bp, synthetic construct
  source 1..20: mol_type = other DNA
cagtgagccgagattgcacc

SEQ ID NO: 80978 - DNA, 20 bp, synthetic construct
  source 1..20: mol_type = other DNA
gcagtgagccgagattgcac

SEQ ID NO: 80979 - DNA, 20 bp, synthetic construct
  source 1..20: mol_type = other DNA
tgcagtgagccgagattgca

SEQ ID NO: 80980 - DNA, 20 bp, synthetic construct
  source 1..20: mol_type = other DNA
ttgcagtgagccgagattgc

SEQ ID NO: 80981 - DNA, 20 bp, synthetic construct
  source 1..20: mol_type = other DNA
gttgcagtgagccgagattg

SEQ ID NO: 80982 - DNA, 20 bp, synthetic construct
  source 1..20: mol_type = other DNA
ggttgcagtgagccgagatt

SEQ ID NO: 80983 - DNA, 20 bp, synthetic construct
  source 1..20: mol_type = other DNA
aggttgcagtgagccgagat

SEQ ID NO: 80984 - DNA, 20 bp, synthetic construct
  source 1..20: mol_type = other DNA
gaggttgcagtgagccgaga

SEQ ID NO: 80985 - DNA, 20 bp, synthetic construct
  source 1..20: mol_type = other DNA
agaggttgcagtgagccgag

SEQ ID NO: 80986 - DNA, 20 bp, synthetic construct
  source 1..20: mol_type = other DNA
cagaggttgcagtgagccga

SEQ ID NO: 80987 - DNA, 20 bp, synthetic construct
  source 1..20: mol_type = other DNA
gcagaggttgcagtgagccg

SEQ ID NO: 80988 - DNA, 20 bp, synthetic construct
  source 1..20: mol_type = other DNA
tgcagaggttgcagtgagcc

SEQ ID NO: 80989 - DNA, 20 bp, synthetic construct
  source 1..20: mol_type = other DNA
atgcagaggttgcagtgagc

SEQ ID NO: 80990 - DNA, 20 bp, synthetic construct
  source 1..20: mol_type = other DNA
gatgcagaggttgcagtgag

SEQ ID NO: 80991 - DNA, 20 bp, synthetic construct
  source 1..20: mol_type = other DNA
ggatgcagaggttgcagtga

SEQ ID NO: 80992 - DNA, 20 bp, synthetic construct
  source 1..20: mol_type = other DNA
gggatgcagaggttgcagtg

SEQ ID NO: 80993 - DNA, 20 bp, synthetic construct
  source 1..20: mol_type = other DNA
cgggatgcagaggttgcagt

SEQ ID NO: 80994 - DNA, 20 bp, synthetic construct
  source 1..20: mol_type = other DNA
ccgggatgcagaggttgcag

SEQ ID NO: 80995 - DNA, 20 bp, synthetic construct
  source 1..20: mol_type = other DNA
cccgggatgcagaggttgca

SEQ ID NO: 80996 - DNA, 20 bp, synthetic construct
  source 1..20: mol_type = other DNA
acccgggatgcagaggttgc

SEQ ID NO: 80997 - DNA, 20 bp, synthetic construct
  source 1..20: mol_type = other DNA
aacccgggatgcagaggttg

SEQ ID NO: 80998 - DNA, 20 bp, synthetic construct
  source 1..20: mol_type = other DNA
gaacccgggatgcagaggtt

SEQ ID NO: 80999 - DNA, 20 bp, synthetic construct
  source 1..20: mol_type = other DNA
tgaacccgggatgcagaggt

SEQ ID NO: 81000 - DNA, 20 bp, synthetic construct
  source 1..20: mol_type = other DNA
ttgaacccgggatgcagagg

SEQ ID NO: 81001 - DNA, 20 bp, synthetic construct
  source 1..20: mol_type = other DNA
cttgaacccgggatgcagag

SEQ ID NO: 81002 - DNA, 20 bp, synthetic construct
  source 1..20: mol_type = other DNA
gcttgaacccgggatgcaga

SEQ ID NO: 81003 - DNA, 20 bp, synthetic construct
  source 1..20: mol_type = other DNA
cgcttgaacccgggatgcag

SEQ ID NO: 81004 - DNA, 20 bp, synthetic construct
  source 1..20: mol_type = other DNA
tcgcttgaacccgggatgca

SEQ ID NO: 81005 - DNA, 20 bp, synthetic construct
  source 1..20: mol_type = other DNA
atcgcttgaacccgggatgc

SEQ ID NO: 81006 - DNA, 20 bp, synthetic construct
  source 1..20: mol_type = other DNA
aatcgcttgaacccgggatg

SEQ ID NO: 81007 - DNA, 20 bp, synthetic construct
  source 1..20: mol_type = other DNA
gaatcgcttgaacccgggat

SEQ ID NO: 81008 - DNA, 20 bp, synthetic construct
  source 1..20: mol_type = other DNA
agaatcgcttgaacccggga

SEQ ID NO: 81009 - DNA, 20 bp, synthetic construct
  source 1..20: mol_type = other DNA
gagaatcgcttgaacccggg

SEQ ID NO: 81010 - DNA, 20 bp, synthetic construct
  source 1..20: mol_type = other DNA
ggagaatcgcttgaacccgg

SEQ ID NO: 81011 - DNA, 20 bp, synthetic construct
  source 1..20: mol_type = other DNA
aggagaatcgcttgaacccg

SEQ ID NO: 81012 - DNA, 20 bp, synthetic construct
  source 1..20: mol_type = other DNA
caggagaatcgcttgaaccc

SEQ ID NO: 81013 - DNA, 20 bp, synthetic construct
  source 1..20: mol_type = other DNA
gcaggagaatcgcttgaacc

SEQ ID NO: 81014 - DNA, 20 bp, synthetic construct
  source 1..20: mol_type = other DNA
ggcaggagaatcgcttgaac

SEQ ID NO: 81015 - DNA, 20 bp, synthetic construct
  source 1..20: mol_type = other DNA
aggcaggagaatcgcttgaa

SEQ ID NO: 81016 - DNA, 20 bp, synthetic construct
  source 1..20: mol_type = other DNA
gaggcaggagaatcgcttga

SEQ ID NO: 81017 - DNA, 20 bp, synthetic construct
  source 1..20: mol_type = other DNA
tgaggcaggagaatcgcttg

SEQ ID NO: 81018 - DNA, 20 bp, synthetic construct
  source 1..20: mol_type = other DNA
ctgaggcaggagaatcgctt

SEQ ID NO: 81019 - DNA, 20 bp, synthetic construct
  source 1..20: mol_type = other DNA
gctgaggcaggagaatcgct

SEQ ID NO: 81020 - DNA, 20 bp, synthetic construct
  source 1..20: mol_type = other DNA
ggctgaggcaggagaatcgc

SEQ ID NO: 81021 - DNA, 20 bp, synthetic construct
  source 1..20: mol_type = other DNA
aggctgaggcaggagaatcg

SEQ ID NO: 81022 - DNA, 20 bp, synthetic construct
  source 1..20: mol_type = other DNA
gaggctgaggcaggagaatc

SEQ ID NO: 81023 - DNA, 20 bp, synthetic construct
  source 1..20: mol_type = other DNA
ggaggctgaggcaggagaat

SEQ ID NO: 81024 - DNA, 20 bp, synthetic construct
  source 1..20: mol_type = other DNA
gggaggctgaggcaggagaa

SEQ ID NO: 81025 - DNA, 20 bp, synthetic construct
  source 1..20: mol_type = other DNA
cgggaggctgaggcaggaga

SEQ ID NO: 81026 - DNA, 20 bp, synthetic construct
  source 1..20: mol_type = other DNA
tcgggaggctgaggcaggag

SEQ ID NO: 81027 - DNA, 20 bp, synthetic construct
  source 1..20: mol_type = other DNA
ctcgggaggctgaggcagga

SEQ ID NO: 81028 - DNA, 20 bp, synthetic construct
  source 1..20: mol_type = other DNA
actcgggaggctgaggcagg

SEQ ID NO: 81029 - DNA, 20 bp, synthetic construct
  source 1..20: mol_type = other DNA
tactcgggaggctgaggcag

SEQ ID NO: 81030 - DNA, 20 bp, synthetic construct
  source 1..20: mol_type = other DNA
ctactcgggaggctgaggca

SEQ ID NO: 81031 - DNA, 20 bp, synthetic construct
  source 1..20: mol_type = other DNA
gctactcgggaggctgaggc

SEQ ID NO: 81032 - DNA, 20 bp, synthetic construct
  source 1..20: mol_type = other DNA
agctactcgggaggctgagg

SEQ ID NO: 81033 - DNA, 20 bp, synthetic construct
  source 1..20: mol_type = other DNA
cagctactcgggaggctgag

SEQ ID NO: 81034 - DNA, 20 bp, synthetic construct
  source 1..20: mol_type = other DNA
ccagctactcgggaggctga

SEQ ID NO: 81035 - DNA, 20 bp, synthetic construct
  source 1..20: mol_type = other DNA
cccagctactcgggaggctg

SEQ ID NO: 81036 - DNA, 20 bp, synthetic construct
  source 1..20: mol_type = other DNA
tcccagctactcgggaggct

SEQ ID NO: 81037 - DNA, 20 bp, synthetic construct
  source 1..20: mol_type = other DNA
gtcccagctactcgggaggc

SEQ ID NO: 81038 - DNA, 20 bp, synthetic construct
  source 1..20: mol_type = other DNA
agtcccagctactcgggagg

SEQ ID NO: 81039 - DNA, 20 bp, synthetic construct
  source 1..20: mol_type = other DNA
tagtcccagctactcgggag

SEQ ID NO: 81040 - DNA, 20 bp, synthetic construct
  source 1..20: mol_type = other DNA
atagtcccagctactcggga

SEQ ID NO: 81041 - DNA, 20 bp, synthetic construct
  source 1..20: mol_type = other DNA
tatagtcccagctactcggg

SEQ ID NO: 81042 - DNA, 20 bp, synthetic construct
  source 1..20: mol_type = other DNA
ctatagtcccagctactcgg

SEQ ID NO: 81043 - DNA, 20 bp, synthetic construct
  source 1..20: mol_type = other DNA
cctatagtcccagctactcg

SEQ ID NO: 81044 - DNA, 20 bp, synthetic construct
  source 1..20: mol_type = other DNA
gcctatagtcccagctactc

SEQ ID NO: 81045 - DNA, 20 bp, synthetic construct
  source 1..20: mol_type = other DNA
cgcctatagtcccagctact

SEQ ID NO: 81046 - DNA, 20 bp, synthetic construct
  source 1..20: mol_type = other DNA
gcgcctatagtcccagctac

SEQ ID NO: 81047 - DNA, 20 bp, synthetic construct
  source 1..20: mol_type = other DNA
cgcgcctatagtcccagcta

SEQ ID NO: 81048 - DNA, 20 bp, synthetic construct
  source 1..20: mol_type = other DNA
acgcgcctatagtcccagct

SEQ ID NO: 81049 - DNA, 20 bp, synthetic construct
  source 1..20: mol_type = other DNA
cacgcgcctatagtcccagc

SEQ ID NO: 81050 - DNA, 20 bp, synthetic construct
  source 1..20: mol_type = other DNA
gcacgcgcctatagtcccag

SEQ ID NO: 81051 - DNA, 20 bp, synthetic construct
  source 1..20: mol_type = other DNA
agcacgcgcctatagtccca

SEQ ID NO: 81052 - DNA, 20 bp, synthetic construct
  source 1..20: mol_type = other DNA
tagcacgcgcctatagtccc

SEQ ID NO: 81053 - DNA, 20 bp, synthetic construct
  source 1..20: mol_type = other DNA
gtagcacgcgcctatagtcc

SEQ ID NO: 81054 - DNA, 20 bp, synthetic construct
  source 1..20: mol_type = other DNA
ggtagcacgcgcctatagtc

SEQ ID NO: 81055 - DNA, 20 bp, synthetic construct
  source 1..20: mol_type = other DNA
tggtagcacgcgcctatagt

SEQ ID NO: 81056 - DNA, 20 bp, synthetic construct
  source 1..20: mol_type = other DNA
atggtagcacgcgcctatag

SEQ ID NO: 81057 - DNA, 20 bp, synthetic construct
  source 1..20: mol_type = other DNA
catggtagcacgcgcctata

SEQ ID NO: 81058 - DNA, 20 bp, synthetic construct
  source 1..20: mol_type = other DNA
gcatggtagcacgcgcctat

SEQ ID NO: 81059 - DNA, 20 bp, synthetic construct
  source 1..20: mol_type = other DNA
ggcatggtagcacgcgccta

SEQ ID NO: 81060 - DNA, 20 bp, synthetic construct
  source 1..20: mol_type = other DNA
gggcatggtagcacgcgcct

SEQ ID NO: 81061 - DNA, 20 bp, synthetic construct
  source 1..20: mol_type = other DNA
tgggcatggtagcacgcgcc

SEQ ID NO: 81062 - DNA, 20 bp, synthetic construct
  source 1..20: mol_type = other DNA
atgggcatggtagcacgcgc

SEQ ID NO: 81063 - DNA, 20 bp, synthetic construct
  source 1..20: mol_type = other DNA
gatgggcatggtagcacgcg

SEQ ID NO: 81064 - DNA, 20 bp, synthetic construct
  source 1..20: mol_type = other DNA
agatgggcatggtagcacgc

SEQ ID NO: 81065 - DNA, 20 bp, synthetic construct
  source 1..20: mol_type = other DNA
tagatgggcatggtagcacg

SEQ ID NO: 81066 - DNA, 20 bp, synthetic construct
  source 1..20: mol_type = other DNA
ttagatgggcatggtagcac

SEQ ID NO: 81067 - DNA, 20 bp, synthetic construct
  source 1..20: mol_type = other DNA
attagatgggcatggtagca

SEQ ID NO: 81068 - DNA, 20 bp, synthetic construct
  source 1..20: mol_type = other DNA
aattagatgggcatggtagc

SEQ ID NO: 81069 - DNA, 20 bp, synthetic construct
  source 1..20: mol_type = other DNA
aaattagatgggcatggtag

SEQ ID NO: 81070 - DNA, 20 bp, synthetic construct
  source 1..20: mol_type = other DNA
gaaattagatgggcatggta

SEQ ID NO: 81071 - DNA, 20 bp, synthetic construct
  source 1..20: mol_type = other DNA
agaaattagatgggcatggt

SEQ ID NO: 81072 - DNA, 20 bp, synthetic construct
  source 1..20: mol_type = other DNA
cagaaattagatgggcatgg

SEQ ID NO: 81073 - DNA, 20 bp, synthetic construct
  source 1..20: mol_type = other DNA
acagaaattagatgggcatg

SEQ ID NO: 81074 - DNA, 20 bp, synthetic construct
  source 1..20: mol_type = other DNA
tacagaaattagatgggcat

SEQ ID NO: 81075 - DNA, 20 bp, synthetic construct
  source 1..20: mol_type = other DNA
atacagaaattagatgggca

SEQ ID NO: 81076 - DNA, 20 bp, synthetic construct
  source 1..20: mol_type = other DNA
aatacagaaattagatgggc

SEQ ID NO: 81077 - DNA, 20 bp, synthetic construct
  source 1..20: mol_type = other DNA
aaatacagaaattagatggg

SEQ ID NO: 81078 - DNA, 20 bp, synthetic construct
  source 1..20: mol_type = other DNA
aaaatacagaaattagatgg

SEQ ID NO: 81079 - DNA, 20 bp, synthetic construct
  source 1..20: mol_type = other DNA
aaaaatacagaaattagatg

SEQ ID NO: 81080 - DNA, 20 bp, synthetic construct
  source 1..20: mol_type = other DNA
taaaaatacagaaattagat

SEQ ID NO: 81081 - DNA, 20 bp, synthetic construct
  source 1..20: mol_type = other DNA
ctaaaaatacagaaattaga

SEQ ID NO: 81082 - DNA, 20 bp, synthetic construct
  source 1..20: mol_type = other DNA
actaaaaatacagaaattag

SEQ ID NO: 81083 - DNA, 20 bp, synthetic construct
  source 1..20: mol_type = other DNA
tactaaaaatacagaaatta

SEQ ID NO: 81084 - DNA, 20 bp, synthetic construct
  source 1..20: mol_type = other DNA
ctactaaaaatacagaaatt

SEQ ID NO: 81085 - DNA, 20 bp, synthetic construct
  source 1..20: mol_type = other DNA
tctactaaaaatacagaaat

SEQ ID NO: 81086 - DNA, 20 bp, synthetic construct
  source 1..20: mol_type = other DNA
ctctactaaaaatacagaaa

SEQ ID NO: 81087 - DNA, 20 bp, synthetic construct
  source 1..20: mol_type = other DNA
tctctactaaaaatacagaa

SEQ ID NO: 81088 - DNA, 20 bp, synthetic construct
  source 1..20: mol_type = other DNA
gtctctactaaaaatacaga

SEQ ID NO: 81089 - DNA, 20 bp, synthetic construct
  source 1..20: mol_type = other DNA
cgtctctactaaaaatacag

SEQ ID NO: 81090 - DNA, 20 bp, synthetic construct
  source 1..20: mol_type = other DNA
ccgtctctactaaaaataca

SEQ ID NO: 81091 - DNA, 20 bp, synthetic construct
  source 1..20: mol_type = other DNA
cccgtctctactaaaaatac

SEQ ID NO: 81092 - DNA, 20 bp, synthetic construct
  source 1..20: mol_type = other DNA
ccccgtctctactaaaaata

SEQ ID NO: 81093 - DNA, 20 bp, synthetic construct
  source 1..20: mol_type = other DNA
accccgtctctactaaaaat

SEQ ID NO: 81094 - DNA, 20 bp, synthetic construct
  source 1..20: mol_type = other DNA
aaccccgtctctactaaaaa

SEQ ID NO: 81095 - DNA, 20 bp, synthetic construct
  source 1..20: mol_type = other DNA
aaaccccgtctctactaaaa

SEQ ID NO: 81096 - DNA, 20 bp, synthetic construct
  source 1..20: mol_type = other DNA
gaaaccccgtctctactaaa

SEQ ID NO: 81097 - DNA, 20 bp, synthetic construct
  source 1..20: mol_type = other DNA
tgaaaccccgtctctactaa

SEQ ID NO: 81098 - DNA, 20 bp, synthetic construct
  source 1..20: mol_type = other DNA
gtgaaaccccgtctctacta

SEQ ID NO: 81099 - DNA, 20 bp, synthetic construct
  source 1..20: mol_type = other DNA
ggtgaaaccccgtctctact

SEQ ID NO: 81100 - DNA, 20 bp, synthetic construct
  source 1..20: mol_type = other DNA
tggtgaaaccccgtctctac

SEQ ID NO: 81101 - DNA, 20 bp, synthetic construct
  source 1..20: mol_type = other DNA
atggtgaaaccccgtctcta

SEQ ID NO: 81102 - DNA, 20 bp, synthetic construct
  source 1..20: mol_type = other DNA
catggtgaaaccccgtctct

SEQ ID NO: 81103 - DNA, 20 bp, synthetic construct
  source 1..20: mol_type = other DNA
acatggtgaaaccccgtctc

SEQ ID NO: 81104 - DNA, 20 bp, synthetic construct
  source 1..20: mol_type = other DNA
aacatggtgaaaccccgtct

SEQ ID NO: 81105 - DNA, 20 bp, synthetic construct
  source 1..20: mol_type = other DNA
caacatggtgaaaccccgtc

SEQ ID NO: 81106 - DNA, 20 bp, synthetic construct
  source 1..20: mol_type = other DNA
ccaacatggtgaaaccccgt

SEQ ID NO: 81107 - DNA, 20 bp, synthetic construct
  source 1..20: mol_type = other DNA
gccaacatggtgaaaccccg

SEQ ID NO: 81108 - DNA, 20 bp, synthetic construct
  source 1..20: mol_type = other DNA
ggccaacatggtgaaacccc

SEQ ID NO: 81109 - DNA, 20 bp, synthetic construct
  source 1..20: mol_type = other DNA
tggccaacatggtgaaaccc

SEQ ID NO: 81110 - DNA, 20 bp, synthetic construct
  source 1..20: mol_type = other DNA
ctggccaacatggtgaaacc

SEQ ID NO: 81111 - DNA, 20 bp, synthetic construct
  source 1..20: mol_type = other DNA
cctggccaacatggtgaaac

SEQ ID NO: 81112 - DNA, 20 bp, synthetic construct
  source 1..20: mol_type = other DNA
tcctggccaacatggtgaaa

SEQ ID NO: 81113 - DNA, 20 bp, synthetic construct
  source 1..20: mol_type = other DNA
atcctggccaacatggtgaa

SEQ ID NO: 81114 - DNA, 20 bp, synthetic construct
  source 1..20: mol_type = other DNA
tatcctggccaacatggtga

SEQ ID NO: 81115 - DNA, 20 bp, synthetic construct
  source 1..20: mol_type = other DNA
ctatcctggccaacatggtg

SEQ ID NO: 81116 - DNA, 20 bp, synthetic construct
  source 1..20: mol_type = other DNA
actatcctggccaacatggt

SEQ ID NO: 81117 - DNA, 20 bp, synthetic construct
  source 1..20: mol_type = other DNA
gactatcctggccaacatgg

SEQ ID NO: 81118 - DNA, 20 bp, synthetic construct
  source 1..20: mol_type = other DNA
agactatcctggccaacatg

SEQ ID NO: 81119 - DNA, 20 bp, synthetic construct
  source 1..20: mol_type = other DNA
gagactatcctggccaacat

SEQ ID NO: 81120 - DNA, 20 bp, synthetic construct
  source 1..20: mol_type = other DNA
cgagactatcctggccaaca

SEQ ID NO: 81121 - DNA, 20 bp, synthetic construct
  source 1..20: mol_type = other DNA
tcgagactatcctggccaac

SEQ ID NO: 81122 - DNA, 20 bp, synthetic construct
  source 1..20: mol_type = other DNA
atcgagactatcctggccaa

SEQ ID NO: 81123 - DNA, 20 bp, synthetic construct
  source 1..20: mol_type = other DNA
gatcgagactatcctggcca

SEQ ID NO: 81124 - DNA, 20 bp, synthetic construct
  source 1..20: mol_type = other DNA
agatcgagactatcctggcc

SEQ ID NO: 81125 - DNA, 20 bp, synthetic construct
  source 1..20: mol_type = other DNA
gagatcgagactatcctggc

SEQ ID NO: 81126 - DNA, 20 bp, synthetic construct
  source 1..20: mol_type = other DNA
agagatcgagactatcctgg

SEQ ID NO: 81127 - DNA, 20 bp, synthetic construct
  source 1..20: mol_type = other DNA
aagagatcgagactatcctg

SEQ ID NO: 81128 - DNA, 20 bp, synthetic construct
  source 1..20: mol_type = other DNA
gaagagatcgagactatcct

SEQ ID NO: 81129 - DNA, 20 bp, synthetic construct
  source 1..20: mol_type = other DNA
tgaagagatcgagactatcc

SEQ ID NO: 81130 - DNA, 20 bp, synthetic construct
  source 1..20: mol_type = other DNA
gtgaagagatcgagactatc

SEQ ID NO: 81131 - DNA, 20 bp, synthetic construct
  source 1..20: mol_type = other DNA
ggtgaagagatcgagactat

SEQ ID NO: 81132 - DNA, 20 bp, synthetic construct
  source 1..20: mol_type = other DNA
aggtgaagagatcgagacta

SEQ ID NO: 81133 - DNA, 20 bp, synthetic construct
  source 1..20: mol_type = other DNA
gaggtgaagagatcgagact

SEQ ID NO: 81134 - DNA, 20 bp, synthetic construct
  source 1..20: mol_type = other DNA
cgaggtgaagagatcgagac

SEQ ID NO: 81135 - DNA, 20 bp, synthetic construct
  source 1..20: mol_type = other DNA
acgaggtgaagagatcgaga

SEQ ID NO: 81136 - DNA, 20 bp, synthetic construct
  source 1..20: mol_type = other DNA
cacgaggtgaagagatcgag

SEQ ID NO: 81137 - DNA, 20 bp, synthetic construct
  source 1..20: mol_type = other DNA
tcacgaggtgaagagatcga

SEQ ID NO: 81138 - DNA, 20 bp, synthetic construct
  source 1..20: mol_type = other DNA
atcacgaggtgaagagatcg

SEQ ID NO: 81139 - DNA, 20 bp, synthetic construct
  source 1..20: mol_type = other DNA
gatcacgaggtgaagagatc

SEQ ID NO: 81140 - DNA, 20 bp, synthetic construct
  source 1..20: mol_type = other DNA
ggatcacgaggtgaagagat

SEQ ID NO: 81141 - DNA, 20 bp, synthetic construct
  source 1..20: mol_type = other DNA
tggatcacgaggtgaagaga

SEQ ID NO: 81142 - DNA, 20 bp, synthetic construct
  source 1..20: mol_type = other DNA
gtggatcacgaggtgaagag

SEQ ID NO: 81143 - DNA, 20 bp, synthetic construct
  source 1..20: mol_type = other DNA
ggtggatcacgaggtgaaga

SEQ ID NO: 81144 - DNA, 20 bp, synthetic construct
  source 1..20: mol_type = other DNA
aggtggatcacgaggtgaag

SEQ ID NO: 81145 - DNA, 20 bp, synthetic construct
  source 1..20: mol_type = other DNA
caggtggatcacgaggtgaa

SEQ ID NO: 81146 - DNA, 20 bp, synthetic construct
  source 1..20: mol_type = other DNA
gcaggtggatcacgaggtga

SEQ ID NO: 81147 - DNA, 20 bp, synthetic construct
  source 1..20: mol_type = other DNA
ggcaggtggatcacgaggtg

SEQ ID NO: 81148 - DNA, 20 bp, synthetic construct
  source 1..20: mol_type = other DNA
aggcaggtggatcacgaggt

SEQ ID NO: 81149 - DNA, 20 bp, synthetic construct
  source 1..20: mol_type = other DNA
gaggcaggtggatcacgagg

SEQ ID NO: 81150 - DNA, 20 bp, synthetic construct
  source 1..20: mol_type = other DNA
cgaggcaggtggatcacgag

SEQ ID NO: 81151 - DNA, 20 bp, synthetic construct
  source 1..20: mol_type = other DNA
ccgaggcaggtggatcacga

SEQ ID NO: 81152 - DNA, 20 bp, synthetic construct
  source 1..20: mol_type = other DNA
gccgaggcaggtggatcacg

SEQ ID NO: 81153 - DNA, 20 bp, synthetic construct
  source 1..20: mol_type = other DNA
ggccgaggcaggtggatcac

SEQ ID NO: 81154 - DNA, 20 bp, synthetic construct
  source 1..20: mol_type = other DNA
aggccgaggcaggtggatca

SEQ ID NO: 81155 - DNA, 20 bp, synthetic construct
  source 1..20: mol_type = other DNA
gaggccgaggcaggtggatc

SEQ ID NO: 81156 - DNA, 20 bp, synthetic construct
  source 1..20: mol_type = other DNA
ggaggccgaggcaggtggat

SEQ ID NO: 81157 - DNA, 20 bp, synthetic construct
  source 1..20: mol_type = other DNA
gggaggccgaggcaggtgga

SEQ ID NO: 81158 - DNA, 20 bp, synthetic construct
  source 1..20: mol_type = other DNA
tgggaggccgaggcaggtgg

SEQ ID NO: 81159 - DNA, 20 bp, synthetic construct
  source 1..20: mol_type = other DNA
ttgggaggccgaggcaggtg

SEQ ID NO: 81160 - DNA, 20 bp, synthetic construct
  source 1..20: mol_type = other DNA
tttgggaggccgaggcaggt

SEQ ID NO: 81161 - DNA, 20 bp, synthetic construct
  source 1..20: mol_type = other DNA
ctttgggaggccgaggcagg

SEQ ID NO: 81162 - DNA, 20 bp, synthetic construct
  source 1..20: mol_type = other DNA
actttgggaggccgaggcag

SEQ ID NO: 81163 - DNA, 20 bp, synthetic construct
  source 1..20: mol_type = other DNA
cactttgggaggccgaggca

SEQ ID NO: 81164 - DNA, 20 bp, synthetic construct
  source 1..20: mol_type = other DNA
gcactttgggaggccgaggc

SEQ ID NO: 81165 - DNA, 20 bp, synthetic construct
  source 1..20: mol_type = other DNA
agcactttgggaggccgagg

SEQ ID NO: 81166 - DNA, 20 bp, synthetic construct
  source 1..20: mol_type = other DNA
cagcactttgggaggccgag

SEQ ID NO: 81167 - DNA, 20 bp, synthetic construct
  source 1..20: mol_type = other DNA
ccagcactttgggaggccga

SEQ ID NO: 81168 - DNA, 20 bp, synthetic construct
  source 1..20: mol_type = other DNA
cccagcactttgggaggccg

SEQ ID NO: 81169 - DNA, 20 bp, synthetic construct
  source 1..20: mol_type = other DNA
tcccagcactttgggaggcc

SEQ ID NO: 81170 - DNA, 20 bp, synthetic construct
  source 1..20: mol_type = other DNA
atcccagcactttgggaggc

SEQ ID NO: 81171 - DNA, 20 bp, synthetic construct
  source 1..20: mol_type = other DNA
aatcccagcactttgggagg

SEQ ID NO: 81172 - DNA, 20 bp, synthetic construct
  source 1..20: mol_type = other DNA
taatcccagcactttgggag

SEQ ID NO: 81173 - DNA, 20 bp, synthetic construct
  source 1..20: mol_type = other DNA
gtaatcccagcactttggga

SEQ ID NO: 81174 - DNA, 20 bp, synthetic construct
  source 1..20: mol_type = other DNA
tgtaatcccagcactttggg

SEQ ID NO: 81175 - DNA, 20 bp, synthetic construct
  source 1..20: mol_type = other DNA
ctgtaatcccagcactttgg

SEQ ID NO: 81176 - DNA, 20 bp, synthetic construct
  source 1..20: mol_type = other DNA
cctgtaatcccagcactttg

SEQ ID NO: 81177 - DNA, 20 bp, synthetic construct
  source 1..20: mol_type = other DNA
acctgtaatcccagcacttt

SEQ ID NO: 81178 - DNA, 20 bp, synthetic construct
  source 1..20: mol_type = other DNA
cacctgtaatcccagcactt

SEQ ID NO: 81179 - DNA, 20 bp, synthetic construct
  source 1..20: mol_type = other DNA
acacctgtaatcccagcact

SEQ ID NO: 81180 - DNA, 20 bp, synthetic construct
  source 1..20: mol_type = other DNA
cacacctgtaatcccagcac

SEQ ID NO: 81181 - DNA, 20 bp, synthetic construct
  source 1..20: mol_type = other DNA
tcacacctgtaatcccagca

SEQ ID NO: 81182 - DNA, 20 bp, synthetic construct
  source 1..20: mol_type = other DNA
ctcacacctgtaatcccagc

SEQ ID NO: 81183 - DNA, 20 bp, synthetic construct
  source 1..20: mol_type = other DNA
gctcacacctgtaatcccag

SEQ ID NO: 81184 - DNA, 20 bp, synthetic construct
  source 1..20: mol_type = other DNA
ggctcacacctgtaatccca

SEQ ID NO: 81185 - DNA, 20 bp, synthetic construct
  source 1..20: mol_type = other DNA
tggctcacacctgtaatccc

SEQ ID NO: 81186 - DNA, 20 bp, synthetic construct
  source 1..20: mol_type = other DNA
gtggctcacacctgtaatcc

SEQ ID NO: 81187 - DNA, 20 bp, synthetic construct
  source 1..20: mol_type = other DNA
agtggctcacacctgtaatc

SEQ ID NO: 81188 - DNA, 20 bp, synthetic construct
  source 1..20: mol_type = other DNA
cagtggctcacacctgtaat

SEQ ID NO: 81189 - DNA, 20 bp, synthetic construct
  source 1..20: mol_type = other DNA
acagtggctcacacctgtaa

SEQ ID NO: 81190 - DNA, 20 bp, synthetic construct
  source 1..20: mol_type = other DNA
cacagtggctcacacctgta

SEQ ID NO: 81191 - DNA, 20 bp, synthetic construct
  source 1..20: mol_type = other DNA
gcacagtggctcacacctgt

SEQ ID NO: 81192 - DNA, 20 bp, synthetic construct
  source 1..20: mol_type = other DNA
ggcacagtggctcacacctg

SEQ ID NO: 81193 - DNA, 20 bp, synthetic construct
  source 1..20: mol_type = other DNA
aggcacagtggctcacacct

SEQ ID NO: 81194 - DNA, 20 bp, synthetic construct
  source 1..20: mol_type = other DNA
caggcacagtggctcacacc

SEQ ID NO: 81195 - DNA, 20 bp, synthetic construct
  source 1..20: mol_type = other DNA
ccaggcacagtggctcacac

SEQ ID NO: 81196 - DNA, 20 bp, synthetic construct
  source 1..20: mol_type = other DNA
gccaggcacagtggctcaca

SEQ ID NO: 81197 - DNA, 20 bp, synthetic construct
  source 1..20: mol_type = other DNA
ggccaggcacagtggctcac

SEQ ID NO: 81198 - DNA, 20 bp, synthetic construct
  source 1..20: mol_type = other DNA
cggccaggcacagtggctca

SEQ ID NO: 81199 - DNA, 20 bp, synthetic construct
  source 1..20: mol_type = other DNA
ccggccaggcacagtggctc

SEQ ID NO: 81200 - DNA, 20 bp, synthetic construct
  source 1..20: mol_type = other DNA
accggccaggcacagtggct

SEQ ID NO: 81201 - DNA, 20 bp, synthetic construct
  source 1..20: mol_type = other DNA
aaccggccaggcacagtggc

SEQ ID NO: 81202 - DNA, 20 bp, synthetic construct
  source 1..20: mol_type = other DNA
aaaccggccaggcacagtgg

SEQ ID NO: 81203 - DNA, 20 bp, synthetic construct
  source 1..20: mol_type = other DNA
aaaaccggccaggcacagtg

SEQ ID NO: 81204 - DNA, 20 bp, synthetic construct
  source 1..20: mol_type = other DNA
caaaaccggccaggcacagt

SEQ ID NO: 81205 - DNA, 20 bp, synthetic construct
  source 1..20: mol_type = other DNA
acaaaaccggccaggcacag

SEQ ID NO: 81206 - DNA, 20 bp, synthetic construct
  source 1..20: mol_type = other DNA
gacaaaaccggccaggcaca

SEQ ID NO: 81207 - DNA, 20 bp, synthetic construct
  source 1..20: mol_type = other DNA
agacaaaaccggccaggcac

SEQ ID NO: 81208 - DNA, 20 bp, synthetic construct
  source 1..20: mol_type = other DNA
aagacaaaaccggccaggca

SEQ ID NO: 81209 - DNA, 20 bp, synthetic construct
  source 1..20: mol_type = other DNA
gaagacaaaaccggccaggc

SEQ ID NO: 81210 - DNA, 20 bp, synthetic construct
  source 1..20: mol_type = other DNA
agaagacaaaaccggccagg

SEQ ID NO: 81211 - DNA, 20 bp, synthetic construct
  source 1..20: mol_type = other DNA
tagaagacaaaaccggccag

SEQ ID NO: 81212 - DNA, 20 bp, synthetic construct
  source 1..20: mol_type = other DNA
ttagaagacaaaaccggcca

SEQ ID NO: 81213 - DNA, 20 bp, synthetic construct
  source 1..20: mol_type = other DNA
cttagaagacaaaaccggcc

SEQ ID NO: 81214 - DNA, 20 bp, synthetic construct
  source 1..20: mol_type = other DNA
acttagaagacaaaaccggc

SEQ ID NO: 81215 - DNA, 20 bp, synthetic construct
  source 1..20: mol_type = other DNA
aacttagaagacaaaaccgg

SEQ ID NO: 81216 - DNA, 20 bp, synthetic construct
  source 1..20: mol_type = other DNA
caacttagaagacaaaaccg

SEQ ID NO: 81217 - DNA, 20 bp, synthetic construct
  source 1..20: mol_type = other DNA
acaacttagaagacaaaacc

SEQ ID NO: 81218 - DNA, 20 bp, synthetic construct
  source 1..20: mol_type = other DNA
aacaacttagaagacaaaac

SEQ ID NO: 81219 - DNA, 20 bp, synthetic construct
  source 1..20: mol_type = other DNA
taacaacttagaagacaaaa

SEQ ID NO: 81220 - DNA, 20 bp, synthetic construct
  source 1..20: mol_type = other DNA
ttaacaacttagaagacaaa

SEQ ID NO: 81221 - DNA, 20 bp, synthetic construct
  source 1..20: mol_type = other DNA
tttaacaacttagaagacaa

SEQ ID NO: 81222 - DNA, 20 bp, synthetic construct
  source 1..20: mol_type = other DNA
ttttaacaacttagaagaca

SEQ ID NO: 81223 - DNA, 20 bp, synthetic construct
  source 1..20: mol_type = other DNA
tttttaacaacttagaagac

SEQ ID NO: 81224 - DNA, 20 bp, synthetic construct
  source 1..20: mol_type = other DNA
ttttttaacaacttagaaga

SEQ ID NO: 81225 - DNA, 20 bp, synthetic construct
  source 1..20: mol_type = other DNA
attttttaacaacttagaag

SEQ ID NO: 81226 - DNA, 20 bp, synthetic construct
  source 1..20: mol_type = other DNA
tattttttaacaacttagaa

SEQ ID NO: 81227 - DNA, 20 bp, synthetic construct
  source 1..20: mol_type = other DNA
atattttttaacaacttaga

SEQ ID NO: 81228 - DNA, 20 bp, synthetic construct
  source 1..20: mol_type = other DNA
gatattttttaacaacttag

SEQ ID NO: 81229 - DNA, 20 bp, synthetic construct
  source 1..20: mol_type = other DNA
agatattttttaacaactta

SEQ ID NO: 81230 - DNA, 20 bp, synthetic construct
  source 1..20: mol_type = other DNA
tagatattttttaacaactt

SEQ ID NO: 81231 - DNA, 20 bp, synthetic construct
  source 1..20: mol_type = other DNA
ttagatattttttaacaact

SEQ ID NO: 81232 - DNA, 20 bp, synthetic construct
  source 1..20: mol_type = other DNA
tttagatattttttaacaac

SEQ ID NO: 81233 - DNA, 20 bp, synthetic construct
  source 1..20: mol_type = other DNA
atttagatattttttaacaa

SEQ ID NO: 81234 - DNA, 20 bp, synthetic construct
  source 1..20: mol_type = other DNA
aatttagatattttttaaca

SEQ ID NO: 81235 - DNA, 20 bp, synthetic construct
  source 1..20: mol_type = other DNA
aaatttagatattttttaac

SEQ ID NO: 81236 - DNA, 20 bp, synthetic construct
  source 1..20: mol_type = other DNA
caaatttagatattttttaa

SEQ ID NO: 81237 - DNA, 20 bp, synthetic construct
  source 1..20: mol_type = other DNA
gcaaatttagatatttttta

SEQ ID NO: 81238 - DNA, 20 bp, synthetic construct
  source 1..20: mol_type = other DNA
tgcaaatttagatatttttt

SEQ ID NO: 81239 - DNA, 20 bp, synthetic construct
  source 1..20: mol_type = other DNA
ttgcaaatttagatattttt

SEQ ID NO: 81240 - DNA, 20 bp, synthetic construct
  source 1..20: mol_type = other DNA
cttgcaaatttagatatttt

SEQ ID NO: 81241 - DNA, 20 bp, synthetic construct
  source 1..20: mol_type = other DNA
ccttgcaaatttagatattt

SEQ ID NO: 81242 - DNA, 20 bp, synthetic construct
  source 1..20: mol_type = other DNA
cccttgcaaatttagatatt

SEQ ID NO: 81243 - DNA, 20 bp, synthetic construct
  source 1..20: mol_type = other DNA
gcccttgcaaatttagatat

SEQ ID NO: 81244 - DNA, 20 bp, synthetic construct
  source 1..20: mol_type = other DNA
tgcccttgcaaatttagata

SEQ ID NO: 81245 - DNA, 20 bp, synthetic construct
  source 1..20: mol_type = other DNA
ctgcccttgcaaatttagat

SEQ ID NO: 81246 - DNA, 20 bp, synthetic construct
  source 1..20: mol_type = other DNA
tctgcccttgcaaatttaga

SEQ ID NO: 81247 - DNA, 20 bp, synthetic construct
  source 1..20: mol_type = other DNA
ctctgcccttgcaaatttag

SEQ ID NO: 81248 - DNA, 20 bp, synthetic construct
  source 1..20: mol_type = other DNA
tctctgcccttgcaaattta

SEQ ID NO: 81249 - DNA, 20 bp, synthetic construct
  source 1..20: mol_type = other DNA
atctctgcccttgcaaattt

SEQ ID NO: 81250 - DNA, 20 bp, synthetic construct
  source 1..20: mol_type = other DNA
aatctctgcccttgcaaatt

SEQ ID NO: 81251 - DNA, 20 bp, synthetic construct
  source 1..20: mol_type = other DNA
taatctctgcccttgcaaat

SEQ ID NO: 81252 - DNA, 20 bp, synthetic construct
  source 1..20: mol_type = other DNA
ataatctctgcccttgcaaa

SEQ ID NO: 81253 - DNA, 20 bp, synthetic construct
  source 1..20: mol_type = other DNA
cataatctctgcccttgcaa

SEQ ID NO: 81254 - DNA, 20 bp, synthetic construct
  source 1..20: mol_type = other DNA
ccataatctctgcccttgca

SEQ ID NO: 81255 - DNA, 20 bp, synthetic construct
  source 1..20: mol_type = other DNA
accataatctctgcccttgc

SEQ ID NO: 81256 - DNA, 20 bp, synthetic construct
  source 1..20: mol_type = other DNA
caccataatctctgcccttg

SEQ ID NO: 81257 - DNA, 20 bp, synthetic construct
  source 1..20: mol_type = other DNA
tcaccataatctctgccctt

SEQ ID NO: 81258 - DNA, 20 bp, synthetic construct
  source 1..20: mol_type = other DNA
ttcaccataatctctgccct

SEQ ID NO: 81259 - DNA, 20 bp, synthetic construct
  source 1..20: mol_type = other DNA
gttcaccataatctctgccc

SEQ ID NO: 81260 - DNA, 20 bp, synthetic construct
  source 1..20: mol_type = other DNA
tgttcaccataatctctgcc

SEQ ID NO: 81261 - DNA, 20 bp, synthetic construct
  source 1..20: mol_type = other DNA
ctgttcaccataatctctgc

SEQ ID NO: 81262 - DNA, 20 bp, synthetic construct
  source 1..20: mol_type = other DNA
actgttcaccataatctctg

SEQ ID NO: 81263 - DNA, 20 bp, synthetic construct
  source 1..20: mol_type = other DNA
aactgttcaccataatctct

SEQ ID NO: 81264 - DNA, 20 bp, synthetic construct
  source 1..20: mol_type = other DNA
aaactgttcaccataatctc

SEQ ID NO: 81265 - DNA, 20 bp, synthetic construct
  source 1..20: mol_type = other DNA
taaactgttcaccataatct

SEQ ID NO: 81266 - DNA, 20 bp, synthetic construct
  source 1..20: mol_type = other DNA
ttaaactgttcaccataatc

SEQ ID NO: 81267 - DNA, 20 bp, synthetic construct
  source 1..20: mol_type = other DNA
gttaaactgttcaccataat

SEQ ID NO: 81268 - DNA, 20 bp, synthetic construct
  source 1..20: mol_type = other DNA
ggttaaactgttcaccataa

SEQ ID NO: 81269 - DNA, 20 bp, synthetic construct
  source 1..20: mol_type = other DNA
tggttaaactgttcaccata

SEQ ID NO: 81270 - DNA, 20 bp, synthetic construct
  source 1..20: mol_type = other DNA
ctggttaaactgttcaccat

SEQ ID NO: 81271 - DNA, 20 bp, synthetic construct
  source 1..20: mol_type = other DNA
actggttaaactgttcacca

SEQ ID NO: 81272 - DNA, 20 bp, synthetic construct
  source 1..20: mol_type = other DNA
aactggttaaactgttcacc

SEQ ID NO: 81273 - DNA, 20 bp, synthetic construct
  source 1..20: mol_type = other DNA
aaactggttaaactgttcac

SEQ ID NO: 81274 - DNA, 20 bp, synthetic construct
  source 1..20: mol_type = other DNA
aaaactggttaaactgttca

SEQ ID NO: 81275 - DNA, 20 bp, synthetic construct
  source 1..20: mol_type = other DNA
aaaaactggttaaactgttc

SEQ ID NO: 81276 - DNA, 20 bp, synthetic construct
  source 1..20: mol_type = other DNA
caaaaactggttaaactgtt

SEQ ID NO: 81277 - DNA, 20 bp, synthetic construct
  source 1..20: mol_type = other DNA
tcaaaaactggttaaactgt

SEQ ID NO: 81278 - DNA, 20 bp, synthetic construct
  source 1..20: mol_type = other DNA
ttcaaaaactggttaaactg

SEQ ID NO: 81279 - DNA, 20 bp, synthetic construct
  source 1..20: mol_type = other DNA
tttcaaaaactggttaaact

SEQ ID NO: 81280 - DNA, 20 bp, synthetic construct
  source 1..20: mol_type = other DNA
atttcaaaaactggttaaac

SEQ ID NO: 81281 - DNA, 20 bp, synthetic construct
  source 1..20: mol_type = other DNA
tatttcaaaaactggttaaa

SEQ ID NO: 81282 - DNA, 20 bp, synthetic construct
  source 1..20: mol_type = other DNA
atatttcaaaaactggttaa

SEQ ID NO: 81283 - DNA, 20 bp, synthetic construct
  source 1..20: mol_type = other DNA
catatttcaaaaactggtta

SEQ ID NO: 81284 - DNA, 20 bp, synthetic construct
  source 1..20: mol_type = other DNA
acatatttcaaaaactggtt

SEQ ID NO: 81285 - DNA, 20 bp, synthetic construct
  source 1..20: mol_type = other DNA
aacatatttcaaaaactggt

SEQ ID NO: 81286 - DNA, 20 bp, synthetic construct
  source 1..20: mol_type = other DNA
gaacatatttcaaaaactgg

SEQ ID NO: 81287 - DNA, 20 bp, synthetic construct
  source 1..20: mol_type = other DNA
ggaacatatttcaaaaactg

SEQ ID NO: 81288 - DNA, 20 bp, synthetic construct
  source 1..20: mol_type = other DNA
aggaacatatttcaaaaact

SEQ ID NO: 81289 - DNA, 20 bp, synthetic construct
  source 1..20: mol_type = other DNA
gaggaacatatttcaaaaac

SEQ ID NO: 81290 - DNA, 20 bp, synthetic construct
  source 1..20: mol_type = other DNA
agaggaacatatttcaaaaa

SEQ ID NO: 81291 - DNA, 20 bp, synthetic construct
  source 1..20: mol_type = other DNA
cagaggaacatatttcaaaa

SEQ ID NO: 81292 - DNA, 20 bp, synthetic construct
  source 1..20: mol_type = other DNA
ccagaggaacatatttcaaa

SEQ ID NO: 81293 - DNA, 20 bp, synthetic construct
  source 1..20: mol_type = other DNA
tccagaggaacatatttcaa

SEQ ID NO: 81294 - DNA, 20 bp, synthetic construct
  source 1..20: mol_type = other DNA
ctccagaggaacatatttca

SEQ ID NO: 81295 - DNA, 20 bp, synthetic construct
  source 1..20: mol_type = other DNA
tctccagaggaacatatttc

SEQ ID NO: 81296 - DNA, 20 bp, synthetic construct
  source 1..20: mol_type = other DNA
ttctccagaggaacatattt

SEQ ID NO: 81297 - DNA, 20 bp, synthetic construct
  source 1..20: mol_type = other DNA
tttctccagaggaacatatt

SEQ ID NO: 81298 - DNA, 20 bp, synthetic construct
  source 1..20: mol_type = other DNA
ttttctccagaggaacatat

SEQ ID NO: 81299 - DNA, 20 bp, synthetic construct
  source 1..20: mol_type = other DNA
cttttctccagaggaacata

SEQ ID NO: 81300 - DNA, 20 bp, synthetic construct
  source 1..20: mol_type = other DNA
ccttttctccagaggaacat

SEQ ID NO: 81301 - DNA, 20 bp, synthetic construct
  source 1..20: mol_type = other DNA
accttttctccagaggaaca

SEQ ID NO: 81302 - DNA, 20 bp, synthetic construct
  source 1..20: mol_type = other DNA
taccttttctccagaggaac

SEQ ID NO: 81303 - DNA, 20 bp, synthetic construct
  source 1..20: mol_type = other DNA
ttaccttttctccagaggaa

SEQ ID NO: 81304 - DNA, 20 bp, synthetic construct
  source 1..20: mol_type = other DNA
gttaccttttctccagagga

SEQ ID NO: 81305 - DNA, 20 bp, synthetic construct
  source 1..20: mol_type = other DNA
tgttaccttttctccagagg

SEQ ID NO: 81306 - DNA, 20 bp, synthetic construct
  source 1..20: mol_type = other DNA
ctgttaccttttctccagag

SEQ ID NO: 81307 - DNA, 20 bp, synthetic construct
  source 1..20: mol_type = other DNA
tctgttaccttttctccaga

SEQ ID NO: 81308 - DNA, 20 bp, synthetic construct
  source 1..20: mol_type = other DNA
ttctgttaccttttctccag

SEQ ID NO: 81309 - DNA, 20 bp, synthetic construct
  source 1..20: mol_type = other DNA
tttctgttaccttttctcca

SEQ ID NO: 81310 - DNA, 20 bp, synthetic construct
  source 1..20: mol_type = other DNA
ttttctgttaccttttctcc

SEQ ID NO: 81311 - DNA, 20 bp, synthetic construct
  source 1..20: mol_type = other DNA
tttttctgttaccttttctc

SEQ ID NO: 81312 - DNA, 20 bp, synthetic construct
  source 1..20: mol_type = other DNA
ttttttctgttaccttttct

SEQ ID NO: 81313 - DNA, 20 bp, synthetic construct
  source 1..20: mol_type = other DNA
tttttttctgttaccttttc

SEQ ID NO: 81314 - DNA, 20 bp, synthetic construct
  source 1..20: mol_type = other DNA
ttttttttctgttacctttt

SEQ ID NO: 81315 - DNA, 20 bp, synthetic construct
  source 1..20: mol_type = other DNA
cttttttttctgttaccttt

SEQ ID NO: 81316 - DNA, 20 bp, synthetic construct
  source 1..20: mol_type = other DNA
acttttttttctgttacctt

SEQ ID NO: 81317 - DNA, 20 bp, synthetic construct
  source 1..20: mol_type = other DNA
aacttttttttctgttacct

SEQ ID NO: 81318 - DNA, 20 bp, synthetic construct
  source 1..20: mol_type = other DNA
taacttttttttctgttacc

SEQ ID NO: 81319 - DNA, 20 bp, synthetic construct
  source 1..20: mol_type = other DNA
ctaacttttttttctgttac

SEQ ID NO: 81320 - DNA, 20 bp, synthetic construct
  source 1..20: mol_type = other DNA
tctaacttttttttctgtta

SEQ ID NO: 81321 - DNA, 20 bp, synthetic construct
  source 1..20: mol_type = other DNA
ttctaacttttttttctgtt

SEQ ID NO: 81322 - DNA, 20 bp, synthetic construct
  source 1..20: mol_type = other DNA
attctaacttttttttctgt

SEQ ID NO: 81323 - DNA, 20 bp, synthetic construct
  source 1..20: mol_type = other DNA
aattctaacttttttttctg

SEQ ID NO: 81324 - DNA, 20 bp, synthetic construct
  source 1..20: mol_type = other DNA
aaattctaacttttttttct

SEQ ID NO: 81325 - DNA, 20 bp, synthetic construct
  source 1..20: mol_type = other DNA
aaaattctaacttttttttc

SEQ ID NO: 81326 - DNA, 20 bp, synthetic construct
  source 1..20: mol_type = other DNA
caaaattctaactttttttt

SEQ ID NO: 81327 - DNA, 20 bp, synthetic construct
  source 1..20: mol_type = other DNA
tcaaaattctaacttttttt

SEQ ID NO: 81328 - DNA, 20 bp, synthetic construct
  source 1..20: mol_type = other DNA
atcaaaattctaactttttt

SEQ ID NO: 81329 - DNA, 20 bp, synthetic construct
  source 1..20: mol_type = other DNA
aatcaaaattctaacttttt

SEQ ID NO: 81330 - DNA, 20 bp, synthetic construct
  source 1..20: mol_type = other DNA
aaatcaaaattctaactttt

SEQ ID NO: 81331 - DNA, 20 bp, synthetic construct
  source 1..20: mol_type = other DNA
taaatcaaaattctaacttt

SEQ ID NO: 81332 - DNA, 20 bp, synthetic construct
  source 1..20: mol_type = other DNA
ataaatcaaaattctaactt

SEQ ID NO: 81333 - DNA, 20 bp, synthetic construct
  source 1..20: mol_type = other DNA
tataaatcaaaattctaact

SEQ ID NO: 81334 - DNA, 20 bp, synthetic construct
  source 1..20: mol_type = other DNA
ttataaatcaaaattctaac

SEQ ID NO: 81335 - DNA, 20 bp, synthetic construct
  source 1..20: mol_type = other DNA
tttataaatcaaaattctaa

SEQ ID NO: 81336 - DNA, 20 bp, synthetic construct
  source 1..20: mol_type = other DNA
atttataaatcaaaattcta

SEQ ID NO: 81337 - DNA, 20 bp, synthetic construct
  source 1..20: mol_type = other DNA
tatttataaatcaaaattct

SEQ ID NO: 81338 - DNA, 20 bp, synthetic construct
  source 1..20: mol_type = other DNA
gtatttataaatcaaaattc

SEQ ID NO: 81339 - DNA, 20 bp, synthetic construct
  source 1..20: mol_type = other DNA
tgtatttataaatcaaaatt

SEQ ID NO: 81340 - DNA, 20 bp, synthetic construct
  source 1..20: mol_type = other DNA
gtgtatttataaatcaaaat

SEQ ID NO: 81341 - DNA, 20 bp, synthetic construct
  source 1..20: mol_type = other DNA
tgtgtatttataaatcaaaa

SEQ ID NO: 81342 - DNA, 20 bp, synthetic construct
  source 1..20: mol_type = other DNA
ctgtgtatttataaatcaaa

SEQ ID NO: 81343 - DNA, 20 bp, synthetic construct
  source 1..20: mol_type = other DNA
tctgtgtatttataaatcaa

SEQ ID NO: 81344 - DNA, 20 bp, synthetic construct
  source 1..20: mol_type = other DNA
atctgtgtatttataaatca

SEQ ID NO: 81345 - DNA, 20 bp, synthetic construct
  source 1..20: mol_type = other DNA
gatctgtgtatttataaatc

SEQ ID NO: 81346 - DNA, 20 bp, synthetic construct
  source 1..20: mol_type = other DNA
tgatctgtgtatttataaat

SEQ ID NO: 81347 - DNA, 20 bp, synthetic construct
  source 1..20: mol_type = other DNA
gtgatctgtgtatttataaa

SEQ ID NO: 81348 - DNA, 20 bp, synthetic construct
  source 1..20: mol_type = other DNA
agtgatctgtgtatttataa

SEQ ID NO: 81349 - DNA, 20 bp, synthetic construct
  source 1..20: mol_type = other DNA
tagtgatctgtgtatttata

SEQ ID NO: 81350 - DNA, 20 bp, synthetic construct
  source 1..20: mol_type = other DNA
atagtgatctgtgtatttat

SEQ ID NO: 81351 - DNA, 20 bp, synthetic construct
  source 1..20: mol_type = other DNA
tatagtgatctgtgtattta

SEQ ID NO: 81352 - DNA, 20 bp, synthetic construct
  source 1..20: mol_type = other DNA
ttatagtgatctgtgtattt

SEQ ID NO: 81353 - DNA, 20 bp, synthetic construct
  source 1..20: mol_type = other DNA
gttatagtgatctgtgtatt

SEQ ID NO: 81354 - DNA, 20 bp, synthetic construct
  source 1..20: mol_type = other DNA
agttatagtgatctgtgtat

SEQ ID NO: 81355 - DNA, 20 bp, synthetic construct
  source 1..20: mol_type = other DNA
aagttatagtgatctgtgta

SEQ ID NO: 81356 - DNA, 20 bp, synthetic construct
  source 1..20: mol_type = other DNA
aaagttatagtgatctgtgt

SEQ ID NO: 81357 - DNA, 20 bp, synthetic construct
  source 1..20: mol_type = other DNA
aaaagttatagtgatctgtg

SEQ ID NO: 81358 - DNA, 20 bp, synthetic construct
  source 1..20: mol_type = other DNA
taaaagttatagtgatctgt

SEQ ID NO: 81359 - DNA, 20 bp, synthetic construct
  source 1..20: mol_type = other DNA
ctaaaagttatagtgatctg

SEQ ID NO: 81360 - DNA, 20 bp, synthetic construct
  source 1..20: mol_type = other DNA
actaaaagttatagtgatct

SEQ ID NO: 81361 - DNA, 20 bp, synthetic construct
  source 1..20: mol_type = other DNA
aactaaaagttatagtgatc

SEQ ID NO: 81362 - DNA, 20 bp, synthetic construct
  source 1..20: mol_type = other DNA
aaactaaaagttatagtgat

SEQ ID NO: 81363 - DNA, 20 bp, synthetic construct
  source 1..20: mol_type = other DNA
aaaactaaaagttatagtga

SEQ ID NO: 81364 - DNA, 20 bp, synthetic construct
  source 1..20: mol_type = other DNA
taaaactaaaagttatagtg

SEQ ID NO: 81365 - DNA, 20 bp, synthetic construct
  source 1..20: mol_type = other DNA
ctaaaactaaaagttatagt

SEQ ID NO: 81366 - DNA, 20 bp, synthetic construct
  source 1..20: mol_type = other DNA
actaaaactaaaagttatag

SEQ ID NO: 81367 - DNA, 20 bp, synthetic construct
  source 1..20: mol_type = other DNA
aactaaaactaaaagttata

SEQ ID NO: 81368 - DNA, 20 bp, synthetic construct
  source 1..20: mol_type = other DNA
aaactaaaactaaaagttat

SEQ ID NO: 81369 - DNA, 20 bp, synthetic construct
  source 1..20: mol_type = other DNA
aaaactaaaactaaaagtta

SEQ ID NO: 81370 - DNA, 20 bp, synthetic construct
  source 1..20: mol_type = other DNA
taaaactaaaactaaaagtt

SEQ ID NO: 81371 - DNA, 20 bp, synthetic construct
  source 1..20: mol_type = other DNA
ctaaaactaaaactaaaagt

SEQ ID NO: 81372 - DNA, 20 bp, synthetic construct
  source 1..20: mol_type = other DNA
actaaaactaaaactaaaag

SEQ ID NO: 81373 - DNA, 20 bp, synthetic construct
  source 1..20: mol_type = other DNA
aactaaaactaaaactaaaa

SEQ ID NO: 81374 - DNA, 20 bp, synthetic construct
  source 1..20: mol_type = other DNA
aaactaaaactaaaactaaa

SEQ ID NO: 81375 - DNA, 20 bp, synthetic construct
  source 1..20: mol_type = other DNA
aaaactaaaactaaaactaa

SEQ ID NO: 81376 - DNA, 20 bp, synthetic construct
  source 1..20: mol_type = other DNA
taaaactaaaactaaaacta

SEQ ID NO: 81377 - DNA, 20 bp, synthetic construct
  source 1..20: mol_type = other DNA
ctaaaactaaaactaaaact

SEQ ID NO: 81378 - DNA, 20 bp, synthetic construct
  source 1..20: mol_type = other DNA
actaaaactaaaactaaaac

SEQ ID NO: 81379 - DNA, 20 bp, synthetic construct
  source 1..20: mol_type = other DNA
aactaaaactaaaactaaaa

SEQ ID NO: 81380 - DNA, 20 bp, synthetic construct
  source 1..20: mol_type = other DNA
aaactaaaactaaaactaaa

SEQ ID NO: 81381 - DNA, 20 bp, synthetic construct
  source 1..20: mol_type = other DNA
gaaactaaaactaaaactaa

SEQ ID NO: 81382 - DNA, 20 bp, synthetic construct
  source 1..20: mol_type = other DNA
agaaactaaaactaaaacta

SEQ ID NO: 81383 - DNA, 20 bp, synthetic construct
  source 1..20: mol_type = other DNA
cagaaactaaaactaaaact

SEQ ID NO: 81384 - DNA, 20 bp, synthetic construct
  source 1..20: mol_type = other DNA
acagaaactaaaactaaaac

SEQ ID NO: 81385 - DNA, 20 bp, synthetic construct
  source 1..20: mol_type = other DNA
aacagaaactaaaactaaaa

SEQ ID NO: 81386 - DNA, 20 bp, synthetic construct
  source 1..20: mol_type = other DNA
aaacagaaactaaaactaaa

SEQ ID NO: 81387 - DNA, 20 bp, synthetic construct
  source 1..20: mol_type = other DNA
aaaacagaaactaaaactaa

SEQ ID NO: 81388 - DNA, 20 bp, synthetic construct
  source 1..20: mol_type = other DNA
aaaaacagaaactaaaacta

SEQ ID NO: 81389 - DNA, 20 bp, synthetic construct
  source 1..20: mol_type = other DNA
taaaaacagaaactaaaact

SEQ ID NO: 81390 - DNA, 20 bp, synthetic construct
  source 1..20: mol_type = other DNA
gtaaaaacagaaactaaaac

SEQ ID NO: 81391 - DNA, 20 bp, synthetic construct
  source 1..20: mol_type = other DNA
ggtaaaaacagaaactaaaa

SEQ ID NO: 81392 - DNA, 20 bp, synthetic construct
  source 1..20: mol_type = other DNA
tggtaaaaacagaaactaaa

SEQ ID NO: 81393 - DNA, 20 bp, synthetic construct
  source 1..20: mol_type = other DNA
ctggtaaaaacagaaactaa

SEQ ID NO: 81394 - DNA, 20 bp, synthetic construct
  source 1..20: mol_type = other DNA
actggtaaaaacagaaacta

SEQ ID NO: 81395 - DNA, 20 bp, synthetic construct
  source 1..20: mol_type = other DNA
tactggtaaaaacagaaact

SEQ ID NO: 81396 - DNA, 20 bp, synthetic construct
  source 1..20: mol_type = other DNA
atactggtaaaaacagaaac

SEQ ID NO: 81397 - DNA, 20 bp, synthetic construct
  source 1..20: mol_type = other DNA
aatactggtaaaaacagaaa

SEQ ID NO: 81398 - DNA, 20 bp, synthetic construct
  source 1..20: mol_type = other DNA
gaatactggtaaaaacagaa

SEQ ID NO: 81399 - DNA, 20 bp, synthetic construct
  source 1..20: mol_type = other DNA
agaatactggtaaaaacaga

SEQ ID NO: 81400 - DNA, 20 bp, synthetic construct
  source 1..20: mol_type = other DNA
tagaatactggtaaaaacag

SEQ ID NO: 81401 - DNA, 20 bp, synthetic construct
  source 1..20: mol_type = other DNA
ttagaatactggtaaaaaca

SEQ ID NO: 81402 - DNA, 20 bp, synthetic construct
  source 1..20: mol_type = other DNA
tttagaatactggtaaaaac

SEQ ID NO: 81403 - DNA, 20 bp, synthetic construct
  source 1..20: mol_type = other DNA
gtttagaatactggtaaaaa

SEQ ID NO: 81404 - DNA, 20 bp, synthetic construct
  source 1..20: mol_type = other DNA
agtttagaatactggtaaaa

SEQ ID NO: 81405 - DNA, 20 bp, synthetic construct
  source 1..20: mol_type = other DNA
gagtttagaatactggtaaa

SEQ ID NO: 81406 - DNA, 20 bp, synthetic construct
  source 1..20: mol_type = other DNA
agagtttagaatactggtaa

SEQ ID NO: 81407 - DNA, 20 bp, synthetic construct
  source 1..20: mol_type = other DNA
tagagtttagaatactggta

SEQ ID NO: 81408 - DNA, 20 bp, synthetic construct
  source 1..20: mol_type = other DNA
ttagagtttagaatactggt

SEQ ID NO: 81409 - DNA, 20 bp, synthetic construct
  source 1..20: mol_type = other DNA
tttagagtttagaatactgg

SEQ ID NO: 81410 - DNA, 20 bp, synthetic construct
  source 1..20: mol_type = other DNA
gtttagagtttagaatactg

SEQ ID NO: 81411 - DNA, 20 bp, synthetic construct
  source 1..20: mol_type = other DNA
agtttagagtttagaatact

SEQ ID NO: 81412 - DNA, 20 bp, synthetic construct
  source 1..20: mol_type = other DNA
aagtttagagtttagaatac

SEQ ID NO: 81413 - DNA, 20 bp, synthetic construct
  source 1..20: mol_type = other DNA
aaagtttagagtttagaata

SEQ ID NO: 81414 - DNA, 20 bp, synthetic construct
  source 1..20: mol_type = other DNA
gaaagtttagagtttagaat

SEQ ID NO: 81415 - DNA, 20 bp, synthetic construct
  source 1..20: mol_type = other DNA
agaaagtttagagtttagaa

SEQ ID NO: 81416 - DNA, 20 bp, synthetic construct
  source 1..20: mol_type = other DNA
aagaaagtttagagtttaga

SEQ ID NO: 81417 - DNA, 20 bp, synthetic construct
  source 1..20: mol_type = other DNA
taagaaagtttagagtttag

SEQ ID NO: 81418 - DNA, 20 bp, synthetic construct
  source 1..20: mol_type = other DNA
ctaagaaagtttagagttta

SEQ ID NO: 81419 - DNA, 20 bp, synthetic construct
  source 1..20: mol_type = other DNA
actaagaaagtttagagttt

SEQ ID NO: 81420 - DNA, 20 bp, synthetic construct
  source 1..20: mol_type = other DNA
tactaagaaagtttagagtt

SEQ ID NO: 81421 - DNA, 20 bp, synthetic construct
  source 1..20: mol_type = other DNA
ctactaagaaagtttagagt

SEQ ID NO: 81422 - DNA, 20 bp, synthetic construct
  source 1..20: mol_type = other DNA
actactaagaaagtttagag

SEQ ID NO: 81423 - DNA, 20 bp, synthetic construct
  source 1..20: mol_type = other DNA
aactactaagaaagtttaga

SEQ ID NO: 81424 - DNA, 20 bp, synthetic construct
  source 1..20: mol_type = other DNA
caactactaagaaagtttag

SEQ ID NO: 81425 - DNA, 20 bp, synthetic construct
  source 1..20: mol_type = other DNA
tcaactactaagaaagttta

SEQ ID NO: 81426 - DNA, 20 bp, synthetic construct
  source 1..20: mol_type = other DNA
atcaactactaagaaagttt

SEQ ID NO: 81427 - DNA, 20 bp, synthetic construct
  source 1..20: mol_type = other DNA
aatcaactactaagaaagtt

SEQ ID NO: 81428 - DNA, 20 bp, synthetic construct
  source 1..20: mol_type = other DNA
taatcaactactaagaaagt

SEQ ID NO: 81429 - DNA, 20 bp, synthetic construct
  source 1..20: mol_type = other DNA
ataatcaactactaagaaag

SEQ ID NO: 81430 - DNA, 20 bp, synthetic construct
  source 1..20: mol_type = other DNA
cataatcaactactaagaaa

SEQ ID NO: 81431 - DNA, 20 bp, synthetic construct
  source 1..20: mol_type = other DNA
tcataatcaactactaagaa

SEQ ID NO: 81432 - DNA, 20 bp, synthetic construct
  source 1..20: mol_type = other DNA
gtcataatcaactactaaga

SEQ ID NO: 81433 - DNA, 20 bp, synthetic construct
  source 1..20: mol_type = other DNA
tgtcataatcaactactaag

SEQ ID NO: 81434 - DNA, 20 bp, synthetic construct
  source 1..20: mol_type = other DNA
ctgtcataatcaactactaa

SEQ ID NO: 81435 - DNA, 20 bp, synthetic construct
  source 1..20: mol_type = other DNA
tctgtcataatcaactacta

SEQ ID NO: 81436 - DNA, 20 bp, synthetic construct
  source 1..20: mol_type = other DNA
atctgtcataatcaactact

SEQ ID NO: 81437 - DNA, 20 bp, synthetic construct
  source 1..20: mol_type = other DNA
tatctgtcataatcaactac

SEQ ID NO: 81438 - DNA, 20 bp, synthetic construct
  source 1..20: mol_type = other DNA
gtatctgtcataatcaacta

SEQ ID NO: 81439 - DNA, 20 bp, synthetic construct
  source 1..20: mol_type = other DNA
tgtatctgtcataatcaact

SEQ ID NO: 81440 - DNA, 20 bp, synthetic construct
  source 1..20: mol_type = other DNA
atgtatctgtcataatcaac

SEQ ID NO: 81441 - DNA, 20 bp, synthetic construct
  source 1..20: mol_type = other DNA
tatgtatctgtcataatcaa

SEQ ID NO: 81442 - DNA, 20 bp, synthetic construct
  source 1..20: mol_type = other DNA
ttatgtatctgtcataatca

SEQ ID NO: 81443 - DNA, 20 bp, synthetic construct
  source 1..20: mol_type = other DNA
tttatgtatctgtcataatc

SEQ ID NO: 81444 - DNA, 20 bp, synthetic construct
  source 1..20: mol_type = other DNA
gtttatgtatctgtcataat

SEQ ID NO: 81445 - DNA, 20 bp, synthetic construct
  source 1..20: mol_type = other DNA
agtttatgtatctgtcataa

SEQ ID NO: 81446 - DNA, 20 bp, synthetic construct
  source 1..20: mol_type = other DNA
cagtttatgtatctgtcata

SEQ ID NO: 81447 - DNA, 20 bp, synthetic construct
  source 1..20: mol_type = other DNA
acagtttatgtatctgtcat

SEQ ID NO: 81448 - DNA, 20 bp, synthetic construct
  source 1..20: mol_type = other DNA
cacagtttatgtatctgtca

SEQ ID NO: 81449 - DNA, 20 bp, synthetic construct
  source 1..20: mol_type = other DNA
ccacagtttatgtatctgtc

SEQ ID NO: 81450 - DNA, 20 bp, synthetic construct
  source 1..20: mol_type = other DNA
gccacagtttatgtatctgt

SEQ ID NO: 81451 - DNA, 20 bp, synthetic construct
  source 1..20: mol_type = other DNA
agccacagtttatgtatctg

SEQ ID NO: 81452 - DNA, 20 bp, synthetic construct
  source 1..20: mol_type = other DNA
aagccacagtttatgtatct

SEQ ID NO: 81453 - DNA, 20 bp, synthetic construct
  source 1..20: mol_type = other DNA
aaagccacagtttatgtatc

SEQ ID NO: 81454 - DNA, 20 bp, synthetic construct
  source 1..20: mol_type = other DNA
taaagccacagtttatgtat

SEQ ID NO: 81455 - DNA, 20 bp, synthetic construct
  source 1..20: mol_type = other DNA
ttaaagccacagtttatgta

SEQ ID NO: 81456 - DNA, 20 bp, synthetic construct
  source 1..20: mol_type = other DNA
tttaaagccacagtttatgt

SEQ ID NO: 81457 - DNA, 20 bp, synthetic construct
  source 1..20: mol_type = other DNA
ctttaaagccacagtttatg

SEQ ID NO: 81458 - DNA, 20 bp, synthetic construct
  source 1..20: mol_type = other DNA
cctttaaagccacagtttat

SEQ ID NO: 81459 - DNA, 20 bp, synthetic construct
  source 1..20: mol_type = other DNA
tcctttaaagccacagttta

SEQ ID NO: 81460 - DNA, 20 bp, synthetic construct
  source 1..20: mol_type = other DNA
gtcctttaaagccacagttt

SEQ ID NO: 81461 - DNA, 20 bp, synthetic construct
  source 1..20: mol_type = other DNA
agtcctttaaagccacagtt

SEQ ID NO: 81462 - DNA, 20 bp, synthetic construct
  source 1..20: mol_type = other DNA
gagtcctttaaagccacagt

SEQ ID NO: 81463 - DNA, 20 bp, synthetic construct
  source 1..20: mol_type = other DNA
tgagtcctttaaagccacag

SEQ ID NO: 81464 - DNA, 20 bp, synthetic construct
  source 1..20: mol_type = other DNA
atgagtcctttaaagccaca

SEQ ID NO: 81465 - DNA, 20 bp, synthetic construct
  source 1..20: mol_type = other DNA
aatgagtcctttaaagccac

SEQ ID NO: 81466 - DNA, 20 bp, synthetic construct
  source 1..20: mol_type = other DNA
aaatgagtcctttaaagcca

SEQ ID NO: 81467 - DNA, 20 bp, synthetic construct
  source 1..20: mol_type = other DNA
aaaatgagtcctttaaagcc

SEQ ID NO: 81468 - DNA, 20 bp, synthetic construct
  source 1..20: mol_type = other DNA
caaaatgagtcctttaaagc

SEQ ID NO: 81469 - DNA, 20 bp, synthetic construct
  source 1..20: mol_type = other DNA
gcaaaatgagtcctttaaag

SEQ ID NO: 81470 - DNA, 20 bp, synthetic construct
  source 1..20: mol_type = other DNA
agcaaaatgagtcctttaaa

SEQ ID NO: 81471 - DNA, 20 bp, synthetic construct
  source 1..20: mol_type = other DNA
aagcaaaatgagtcctttaa

SEQ ID NO: 81472 - DNA, 20 bp, synthetic construct
  source 1..20: mol_type = other DNA
aaagcaaaatgagtccttta

SEQ ID NO: 81473 - DNA, 20 bp, synthetic construct
  source 1..20: mol_type = other DNA
aaaagcaaaatgagtccttt

SEQ ID NO: 81474 - DNA, 20 bp, synthetic construct
  source 1..20: mol_type = other DNA
gaaaagcaaaatgagtcctt

SEQ ID NO: 81475 - DNA, 20 bp, synthetic construct
  source 1..20: mol_type = other DNA
agaaaagcaaaatgagtcct

SEQ ID NO: 81476 - DNA, 20 bp, synthetic construct
  source 1..20: mol_type = other DNA
aagaaaagcaaaatgagtcc

SEQ ID NO: 81477 - DNA, 20 bp, synthetic construct
  source 1..20: mol_type = other DNA
aaagaaaagcaaaatgagtc

SEQ ID NO: 81478 - DNA, 20 bp, synthetic construct
  source 1..20: mol_type = other DNA
aaaagaaaagcaaaatgagt

SEQ ID NO: 81479 - DNA, 20 bp, synthetic construct
  source 1..20: mol_type = other DNA
gaaaagaaaagcaaaatgag

SEQ ID NO: 81480 - DNA, 20 bp, synthetic construct
  source 1..20: mol_type = other DNA
ggaaaagaaaagcaaaatga

SEQ ID NO: 81481 - DNA, 20 bp, synthetic construct
  source 1..20: mol_type = other DNA
aggaaaagaaaagcaaaatg

SEQ ID NO: 81482 - DNA, 20 bp, synthetic construct
  source 1..20: mol_type = other DNA
gaggaaaagaaaagcaaaat

SEQ ID NO: 81483 - DNA, 20 bp, synthetic construct
  source 1..20: mol_type = other DNA
tgaggaaaagaaaagcaaaa

SEQ ID NO: 81484 - DNA, 20 bp, synthetic construct
  source 1..20: mol_type = other DNA
atgaggaaaagaaaagcaaa

SEQ ID NO: 81485 - DNA, 20 bp, synthetic construct
  source 1..20: mol_type = other DNA
catgaggaaaagaaaagcaa

SEQ ID NO: 81486 - DNA, 20 bp, synthetic construct
  source 1..20: mol_type = other DNA
acatgaggaaaagaaaagca

SEQ ID NO: 81487 - DNA, 20 bp, synthetic construct
  source 1..20: mol_type = other DNA
aacatgaggaaaagaaaagc

SEQ ID NO: 81488 - DNA, 20 bp, synthetic construct
  source 1..20: mol_type = other DNA
aaacatgaggaaaagaaaag

SEQ ID NO: 81489 - DNA, 20 bp, synthetic construct
  source 1..20: mol_type = other DNA
gaaacatgaggaaaagaaaa

SEQ ID NO: 81490 - DNA, 20 bp, synthetic construct
  source 1..20: mol_type = other DNA
tgaaacatgaggaaaagaaa

SEQ ID NO: 81491 - DNA, 20 bp, synthetic construct
  source 1..20: mol_type = other DNA
ctgaaacatgaggaaaagaa

SEQ ID NO: 81492 - DNA, 20 bp, synthetic construct
  source 1..20: mol_type = other DNA
tctgaaacatgaggaaaaga

SEQ ID NO: 81493 - DNA, 20 bp, synthetic construct
  source 1..20: mol_type = other DNA
ctctgaaacatgaggaaaag

SEQ ID NO: 81494 - DNA, 20 bp, synthetic construct
  source 1..20: mol_type = other DNA
actctgaaacatgaggaaaa

SEQ ID NO: 81495 - DNA, 20 bp, synthetic construct
  source 1..20: mol_type = other DNA
cactctgaaacatgaggaaa

SEQ ID NO: 81496 - DNA, 20 bp, synthetic construct
  source 1..20: mol_type = other DNA
gcactctgaaacatgaggaa

SEQ ID NO: 81497 - DNA, 20 bp, synthetic construct
  source 1..20: mol_type = other DNA
ggcactctgaaacatgagga

SEQ ID NO: 81498 - DNA, 20 bp, synthetic construct
  source 1..20: mol_type = other DNA
gggcactctgaaacatgagg

SEQ ID NO: 81499 - DNA, 20 bp, synthetic construct
  source 1..20: mol_type = other DNA
agggcactctgaaacatgag

SEQ ID NO: 81500 - DNA, 20 bp, synthetic construct
  source 1..20: mol_type = other DNA
aagggcactctgaaacatga

SEQ ID NO: 81501 - DNA, 20 bp, synthetic construct
  source 1..20: mol_type = other DNA
taagggcactctgaaacatg

SEQ ID NO: 81502 - DNA, 20 bp, synthetic construct
  source 1..20: mol_type = other DNA
ctaagggcactctgaaacat

SEQ ID NO: 81503 - DNA, 20 bp, synthetic construct
  source 1..20: mol_type = other DNA
tctaagggcactctgaaaca

SEQ ID NO: 81504 - DNA, 20 bp, synthetic construct
  source 1..20: mol_type = other DNA
ttctaagggcactctgaaac

SEQ ID NO: 81505 - DNA, 20 bp, synthetic construct
  source 1..20: mol_type = other DNA
tttctaagggcactctgaaa

SEQ ID NO: 81506 - DNA, 20 bp, synthetic construct
  source 1..20: mol_type = other DNA
ctttctaagggcactctgaa

SEQ ID NO: 81507 - DNA, 20 bp, synthetic construct
  source 1..20: mol_type = other DNA
tctttctaagggcactctga

SEQ ID NO: 81508 - DNA, 20 bp, synthetic construct
  source 1..20: mol_type = other DNA
ctctttctaagggcactctg

SEQ ID NO: 81509 - DNA, 20 bp, synthetic construct
  source 1..20: mol_type = other DNA
tctctttctaagggcactct

SEQ ID NO: 81510 - DNA, 20 bp, synthetic construct
  source 1..20: mol_type = other DNA
atctctttctaagggcactc

SEQ ID NO: 81511 - DNA, 20 bp, synthetic construct
  source 1..20: mol_type = other DNA
tatctctttctaagggcact

SEQ ID NO: 81512 - DNA, 20 bp, synthetic construct
  source 1..20: mol_type = other DNA
ttatctctttctaagggcac

SEQ ID NO: 81513 - DNA, 20 bp, synthetic construct
  source 1..20: mol_type = other DNA
gttatctctttctaagggca

SEQ ID NO: 81514 - DNA, 20 bp, synthetic construct
  source 1..20: mol_type = other DNA
agttatctctttctaagggc

SEQ ID NO: 81515 - DNA, 20 bp, synthetic construct
  source 1..20: mol_type = other DNA
gagttatctctttctaaggg

SEQ ID NO: 81516 - DNA, 20 bp, synthetic construct
  source 1..20: mol_type = other DNA
tgagttatctctttctaagg

SEQ ID NO: 81517 - DNA, 20 bp, synthetic construct
  source 1..20: mol_type = other DNA
ctgagttatctctttctaag

SEQ ID NO: 81518 - DNA, 20 bp, synthetic construct
  source 1..20: mol_type = other DNA
tctgagttatctctttctaa

SEQ ID NO: 81519 - DNA, 20 bp, synthetic construct
  source 1..20: mol_type = other DNA
ttctgagttatctctttcta

SEQ ID NO: 81520 - DNA, 20 bp, synthetic construct
  source 1..20: mol_type = other DNA
cttctgagttatctctttct

SEQ ID NO: 81521 - DNA, 20 bp, synthetic construct
  source 1..20: mol_type = other DNA
tcttctgagttatctctttc

SEQ ID NO: 81522 - DNA, 20 bp, synthetic construct
  source 1..20: mol_type = other DNA
ttcttctgagttatctcttt

SEQ ID NO: 81523 - DNA, 20 bp, synthetic construct
  source 1..20: mol_type = other DNA
attcttctgagttatctctt

SEQ ID NO: 81524 - DNA, 20 bp, synthetic construct
  source 1..20: mol_type = other DNA
aattcttctgagttatctct

SEQ ID NO: 81525 - DNA, 20 bp, synthetic construct
  source 1..20: mol_type = other DNA
aaattcttctgagttatctc

SEQ ID NO: 81526 - DNA, 20 bp, synthetic construct
  source 1..20: mol_type = other DNA
aaaattcttctgagttatct

SEQ ID NO: 81527 - DNA, 20 bp, synthetic construct
  source 1..20: mol_type = other DNA
aaaaattcttctgagttatc

SEQ ID NO: 81528 - DNA, 20 bp, synthetic construct
  source 1..20: mol_type = other DNA
taaaaattcttctgagttat

SEQ ID NO: 81529 - DNA, 20 bp, synthetic construct
  source 1..20: mol_type = other DNA
ttaaaaattcttctgagtta

SEQ ID NO: 81530 - DNA, 20 bp, synthetic construct
  source 1..20: mol_type = other DNA
tttaaaaattcttctgagtt

SEQ ID NO: 81531 - DNA, 20 bp, synthetic construct
  source 1..20: mol_type = other DNA
ttttaaaaattcttctgagt

SEQ ID NO: 81532 - DNA, 20 bp, synthetic construct
  source 1..20: mol_type = other DNA
gttttaaaaattcttctgag

SEQ ID NO: 81533 - DNA, 20 bp, synthetic construct
  source 1..20: mol_type = other DNA
cgttttaaaaattcttctga

SEQ ID NO: 81534 - DNA, 20 bp, synthetic construct
  source 1..20: mol_type = other DNA
ccgttttaaaaattcttctg

SEQ ID NO: 81535 - DNA, 20 bp, synthetic construct
  source 1..20: mol_type = other DNA
cccgttttaaaaattcttct

SEQ ID NO: 81536 - DNA, 20 bp, synthetic construct
  source 1..20: mol_type = other DNA
tcccgttttaaaaattcttc

SEQ ID NO: 81537 - DNA, 20 bp, synthetic construct
  source 1..20: mol_type = other DNA
ttcccgttttaaaaattctt

SEQ ID NO: 81538 - DNA, 20 bp, synthetic construct
  source 1..20: mol_type = other DNA
cttcccgttttaaaaattct

SEQ ID NO: 81539 - DNA, 20 bp, synthetic construct
  source 1..20: mol_type = other DNA
gcttcccgttttaaaaattc

SEQ ID NO: 81540 - DNA, 20 bp, synthetic construct
  source 1..20: mol_type = other DNA
tgcttcccgttttaaaaatt

SEQ ID NO: 81541 - DNA, 20 bp, synthetic construct
  source 1..20: mol_type = other DNA
ttgcttcccgttttaaaaat

SEQ ID NO: 81542 - DNA, 20 bp, synthetic construct
  source 1..20: mol_type = other DNA
cttgcttcccgttttaaaaa

SEQ ID NO: 81543 - DNA, 20 bp, synthetic construct
  source 1..20: mol_type = other DNA
ccttgcttcccgttttaaaa

SEQ ID NO: 81544 - DNA, 20 bp, synthetic construct
  source 1..20: mol_type = other DNA
cccttgcttcccgttttaaa

SEQ ID NO: 81545 - DNA, 20 bp, synthetic construct
  source 1..20: mol_type = other DNA
gcccttgcttcccgttttaa

SEQ ID NO: 81546 - DNA, 20 bp, synthetic construct
  source 1..20: mol_type = other DNA
tgcccttgcttcccgtttta

SEQ ID NO: 81547 - DNA, 20 bp, synthetic construct
  source 1..20: mol_type = other DNA
ttgcccttgcttcccgtttt

SEQ ID NO: 81548 - DNA, 20 bp, synthetic construct
  source 1..20: mol_type = other DNA
tttgcccttgcttcccgttt

SEQ ID NO: 81549 - DNA, 20 bp, synthetic construct
  source 1..20: mol_type = other DNA
gtttgcccttgcttcccgtt

SEQ ID NO: 81550 - DNA, 20 bp, synthetic construct
  source 1..20: mol_type = other DNA
ggtttgcccttgcttcccgt

SEQ ID NO: 81551 - DNA, 20 bp, synthetic construct
  source 1..20: mol_type = other DNA
tggtttgcccttgcttcccg

SEQ ID NO: 81552 - DNA, 20 bp, synthetic construct
  source 1..20: mol_type = other DNA
ctggtttgcccttgcttccc

SEQ ID NO: 81553 - DNA, 20 bp, synthetic construct
  source 1..20: mol_type = other DNA
actggtttgcccttgcttcc

SEQ ID NO: 81554 - DNA, 20 bp, synthetic construct
  source 1..20: mol_type = other DNA
aactggtttgcccttgcttc

SEQ ID NO: 81555 - DNA, 20 bp, synthetic construct
  source 1..20: mol_type = other DNA
taactggtttgcccttgctt

SEQ ID NO: 81556 - DNA, 20 bp, synthetic construct
  source 1..20: mol_type = other DNA
ctaactggtttgcccttgct

SEQ ID NO: 81557 - DNA, 20 bp, synthetic construct
  source 1..20: mol_type = other DNA
gctaactggtttgcccttgc

SEQ ID NO: 81558 - DNA, 20 bp, synthetic construct
  source 1..20: mol_type = other DNA
tgctaactggtttgcccttg

SEQ ID NO: 81559 - DNA, 20 bp, synthetic construct
  source 1..20: mol_type = other DNA
ctgctaactggtttgccctt

SEQ ID NO: 81560 - DNA, 20 bp, synthetic construct
  source 1..20: mol_type = other DNA
tctgctaactggtttgccct

SEQ ID NO: 81561 - DNA, 20 bp, synthetic construct
  source 1..20: mol_type = other DNA
ttctgctaactggtttgccc

SEQ ID NO: 81562 - DNA, 20 bp, synthetic construct
  source 1..20: mol_type = other DNA
cttctgctaactggtttgcc

SEQ ID NO: 81563 - DNA, 20 bp, synthetic construct
  source 1..20: mol_type = other DNA
tcttctgctaactggtttgc

SEQ ID NO: 81564 - DNA, 20 bp, synthetic construct
  source 1..20: mol_type = other DNA
ttcttctgctaactggtttg

SEQ ID NO: 81565 - DNA, 20 bp, synthetic construct
  source 1..20: mol_type = other DNA
tttcttctgctaactggttt

SEQ ID NO: 81566 - DNA, 20 bp, synthetic construct
  source 1..20: mol_type = other DNA
atttcttctgctaactggtt

SEQ ID NO: 81567 - DNA, 20 bp, synthetic construct
  source 1..20: mol_type = other DNA
aatttcttctgctaactggt

SEQ ID NO: 81568 - DNA, 20 bp, synthetic construct
  source 1..20: mol_type = other DNA
caatttcttctgctaactgg

SEQ ID NO: 81569 - DNA, 20 bp, synthetic construct
  source 1..20: mol_type = other DNA
tcaatttcttctgctaactg

SEQ ID NO: 81570 - DNA, 20 bp, synthetic construct
  source 1..20: mol_type = other DNA
ctcaatttcttctgctaact

SEQ ID NO: 81571 - DNA, 20 bp, synthetic construct
  source 1..20: mol_type = other DNA
actcaatttcttctgctaac

SEQ ID NO: 81572 - DNA, 20 bp, synthetic construct
  source 1..20: mol_type = other DNA
gactcaatttcttctgctaa

SEQ ID NO: 81573 - DNA, 20 bp, synthetic construct
  source 1..20: mol_type = other DNA
tgactcaatttcttctgcta

SEQ ID NO: 81574 - DNA, 20 bp, synthetic construct
  source 1..20: mol_type = other DNA
ttgactcaatttcttctgct

SEQ ID NO: 81575 - DNA, 20 bp, synthetic construct
  source 1..20: mol_type = other DNA
cttgactcaatttcttctgc

SEQ ID NO: 81576 - DNA, 20 bp, synthetic construct
  source 1..20: mol_type = other DNA
acttgactcaatttcttctg

SEQ ID NO: 81577 - DNA, 20 bp, synthetic construct
  source 1..20: mol_type = other DNA
cacttgactcaatttcttct

SEQ ID NO: 81578 - DNA, 20 bp, synthetic construct
  source 1..20: mol_type = other DNA
gcacttgactcaatttcttc

SEQ ID NO: 81579 - DNA, 20 bp, synthetic construct
  source 1..20: mol_type = other DNA
ggcacttgactcaatttctt

SEQ ID NO: 81580 - DNA, 20 bp, synthetic construct
  source 1..20: mol_type = other DNA
gggcacttgactcaatttct

SEQ ID NO: 81581 - DNA, 20 bp, synthetic construct
  source 1..20: mol_type = other DNA
tgggcacttgactcaatttc

SEQ ID NO: 81582 - DNA, 20 bp, synthetic construct
  source 1..20: mol_type = other DNA
ctgggcacttgactcaattt

SEQ ID NO: 81583 - DNA, 20 bp, synthetic construct
  source 1..20: mol_type = other DNA
actgggcacttgactcaatt

SEQ ID NO: 81584 - DNA, 20 bp, synthetic construct
  source 1..20: mol_type = other DNA
tactgggcacttgactcaat

SEQ ID NO: 81585 - DNA, 20 bp, synthetic construct
  source 1..20: mol_type = other DNA
gtactgggcacttgactcaa

SEQ ID NO: 81586 - DNA, 20 bp, synthetic construct
  source 1..20: mol_type = other DNA
tgtactgggcacttgactca

SEQ ID NO: 81587 - DNA, 20 bp, synthetic construct
  source 1..20: mol_type = other DNA
ttgtactgggcacttgactc

SEQ ID NO: 81588 - DNA, 20 bp, synthetic construct
  source 1..20: mol_type = other DNA
tttgtactgggcacttgact

SEQ ID NO: 81589 - DNA, 20 bp, synthetic construct
  source 1..20: mol_type = other DNA
ctttgtactgggcacttgac

SEQ ID NO: 81590 - DNA, 20 bp, synthetic construct
  source 1..20: mol_type = other DNA
gctttgtactgggcacttga

SEQ ID NO: 81591 - DNA, 20 bp, synthetic construct
  source 1..20: mol_type = other DNA
agctttgtactgggcacttg

SEQ ID NO: 81592 - DNA, 20 bp, synthetic construct
  source 1..20: mol_type = other DNA
gagctttgtactgggcactt

SEQ ID NO: 81593 - DNA, 20 bp, synthetic construct
  source 1..20: mol_type = other DNA
cgagctttgtactgggcact

SEQ ID NO: 81594 - DNA, 20 bp, synthetic construct
  source 1..20: mol_type = other DNA
tcgagctttgtactgggcac

SEQ ID NO: 81595 - DNA, 20 bp, synthetic construct
  source 1..20: mol_type = other DNA
ctcgagctttgtactgggca

SEQ ID NO: 81596 - DNA, 20 bp, synthetic construct
  source 1..20: mol_type = other DNA
actcgagctttgtactgggc

SEQ ID NO: 81597 - DNA, 20 bp, synthetic construct
  source 1..20: mol_type = other DNA
cactcgagctttgtactggg

SEQ ID NO: 81598 - DNA, 20 bp, synthetic construct
  source 1..20: mol_type = other DNA
ccactcgagctttgtactgg

SEQ ID NO: 81599 - DNA, 20 bp, synthetic construct
  source 1..20: mol_type = other DNA
gccactcgagctttgtactg

SEQ ID NO: 81600 - DNA, 20 bp, synthetic construct
  source 1..20: mol_type = other DNA
ggccactcgagctttgtact

SEQ ID NO: 81601 - DNA, 20 bp, synthetic construct
  source 1..20: mol_type = other DNA
gggccactcgagctttgtac

SEQ ID NO: 81602 - DNA, 20 bp, synthetic construct
  source 1..20: mol_type = other DNA
agggccactcgagctttgta

SEQ ID NO: 81603 - DNA, 20 bp, synthetic construct
  source 1..20: mol_type = other DNA
cagggccactcgagctttgt

SEQ ID NO: 81604 - DNA, 20 bp, synthetic construct
  source 1..20: mol_type = other DNA
ccagggccactcgagctttg

SEQ ID NO: 81605 - DNA, 20 bp, synthetic construct
  source 1..20: mol_type = other DNA
tccagggccactcgagcttt

SEQ ID NO: 81606 - DNA, 20 bp, synthetic construct
  source 1..20: mol_type = other DNA
ttccagggccactcgagctt

SEQ ID NO: 81607 - DNA, 20 bp, synthetic construct
  source 1..20: mol_type = other DNA
tttccagggccactcgagct

SEQ ID NO: 81608 - DNA, 20 bp, synthetic construct
  source 1..20: mol_type = other DNA
ttttccagggccactcgagc

SEQ ID NO: 81609 - DNA, 20 bp, synthetic construct
  source 1..20: mol_type = other DNA
attttccagggccactcgag

SEQ ID NO: 81610 - DNA, 20 bp, synthetic construct
  source 1..20: mol_type = other DNA
cattttccagggccactcga

SEQ ID NO: 81611 - DNA, 20 bp, synthetic construct
  source 1..20: mol_type = other DNA
tcattttccagggccactcg

SEQ ID NO: 81612 - DNA, 20 bp, synthetic construct
  source 1..20: mol_type = other DNA
atcattttccagggccactc

SEQ ID NO: 81613 - DNA, 20 bp, synthetic construct
  source 1..20: mol_type = other DNA
catcattttccagggccact

SEQ ID NO: 81614 - DNA, 20 bp, synthetic construct
  source 1..20: mol_type = other DNA
tcatcattttccagggccac

SEQ ID NO: 81615 - DNA, 20 bp, synthetic construct
  source 1..20: mol_type = other DNA
atcatcattttccagggcca

SEQ ID NO: 81616 - DNA, 20 bp, synthetic construct
  source 1..20: mol_type = other DNA
tatcatcattttccagggcc

SEQ ID NO: 81617 - DNA, 20 bp, synthetic construct
  source 1..20: mol_type = other DNA
ctatcatcattttccagggc

SEQ ID NO: 81618 - DNA, 20 bp, synthetic construct
  source 1..20: mol_type = other DNA
cctatcatcattttccaggg

SEQ ID NO: 81619 - DNA, 20 bp, synthetic construct
  source 1..20: mol_type = other DNA
tcctatcatcattttccagg

SEQ ID NO: 81620 - DNA, 20 bp, synthetic construct
  source 1..20: mol_type = other DNA
ctcctatcatcattttccag

SEQ ID NO: 81621 - DNA, 20 bp, synthetic construct
  source 1..20: mol_type = other DNA
actcctatcatcattttcca

SEQ ID NO: 81622 - DNA, 20 bp, synthetic construct
  source 1..20: mol_type = other DNA
cactcctatcatcattttcc

SEQ ID NO: 81623 - DNA, 20 bp, synthetic construct
  source 1..20: mol_type = other DNA
tcactcctatcatcattttc

SEQ ID NO: 81624 - DNA, 20 bp, synthetic construct
  source 1..20: mol_type = other DNA
ctcactcctatcatcatttt

SEQ ID NO: 81625 - DNA, 20 bp, synthetic construct
  source 1..20: mol_type = other DNA
cctcactcctatcatcattt

SEQ ID NO: 81626 - DNA, 20 bp, synthetic construct
  source 1..20: mol_type = other DNA
tcctcactcctatcatcatt

SEQ ID NO: 81627 - DNA, 20 bp, synthetic construct
  source 1..20: mol_type = other DNA
ttcctcactcctatcatcat

SEQ ID NO: 81628 - DNA, 20 bp, synthetic construct
  source 1..20: mol_type = other DNA
cttcctcactcctatcatca

SEQ ID NO: 81629 - DNA, 20 bp, synthetic construct
  source 1..20: mol_type = other DNA
tcttcctcactcctatcatc

SEQ ID NO: 81630 - DNA, 20 bp, synthetic construct
  source 1..20: mol_type = other DNA
ttcttcctcactcctatcat

SEQ ID NO: 81631 - DNA, 20 bp, synthetic construct
  source 1..20: mol_type = other DNA
tttcttcctcactcctatca

SEQ ID NO: 81632 - DNA, 20 bp, synthetic construct
  source 1..20: mol_type = other DNA
ttttcttcctcactcctatc

SEQ ID NO: 81633 - DNA, 20 bp, synthetic construct
  source 1..20: mol_type = other DNA
tttttcttcctcactcctat

SEQ ID NO: 81634 - DNA, 20 bp, synthetic construct
  source 1..20: mol_type = other DNA
atttttcttcctcactccta

SEQ ID NO: 81635 - DNA, 20 bp, synthetic construct
  source 1..20: mol_type = other DNA
tatttttcttcctcactcct

SEQ ID NO: 81636 - DNA, 20 bp, synthetic construct
  source 1..20: mol_type = other DNA
gtatttttcttcctcactcc

SEQ ID NO: 81637 - DNA, 20 bp, synthetic construct
  source 1..20: mol_type = other DNA
tgtatttttcttcctcactc

SEQ ID NO: 81638 - DNA, 20 bp, synthetic construct
  source 1..20: mol_type = other DNA
gtgtatttttcttcctcact

SEQ ID NO: 81639 - DNA, 20 bp, synthetic construct
  source 1..20: mol_type = other DNA
tgtgtatttttcttcctcac

SEQ ID NO: 81640 - DNA, 20 bp, synthetic construct
  source 1..20: mol_type = other DNA
ctgtgtatttttcttcctca

SEQ ID NO: 81641 - DNA, 20 bp, synthetic construct
  source 1..20: mol_type = other DNA
gctgtgtatttttcttcctc

SEQ ID NO: 81642 - DNA, 20 bp, synthetic construct
  source 1..20: mol_type = other DNA
tgctgtgtatttttcttcct

SEQ ID NO: 81643 - DNA, 20 bp, synthetic construct
  source 1..20: mol_type = other DNA
ctgctgtgtatttttcttcc

SEQ ID NO: 81644 - DNA, 20 bp, synthetic construct
  source 1..20: mol_type = other DNA
actgctgtgtatttttcttc

SEQ ID NO: 81645 - DNA, 20 bp, synthetic construct
  source 1..20: mol_type = other DNA
aactgctgtgtatttttctt

SEQ ID NO: 81646 - DNA, 20 bp, synthetic construct
  source 1..20: mol_type = other DNA
gaactgctgtgtatttttct

SEQ ID NO: 81647 - DNA, 20 bp, synthetic construct
  source 1..20: mol_type = other DNA
tgaactgctgtgtatttttc

SEQ ID NO: 81648 - DNA, 20 bp, synthetic construct
  source 1..20: mol_type = other DNA
ctgaactgctgtgtattttt

SEQ ID NO: 81649 - DNA, 20 bp, synthetic construct
  source 1..20: mol_type = other DNA
tctgaactgctgtgtatttt

SEQ ID NO: 81650 - DNA, 20 bp, synthetic construct
  source 1..20: mol_type = other DNA
ctctgaactgctgtgtattt

SEQ ID NO: 81651 - DNA, 20 bp, synthetic construct
  source 1..20: mol_type = other DNA
tctctgaactgctgtgtatt

SEQ ID NO: 81652 - DNA, 20 bp, synthetic construct
  source 1..20: mol_type = other DNA
ttctctgaactgctgtgtat

SEQ ID NO: 81653 - DNA, 20 bp, synthetic construct
  source 1..20: mol_type = other DNA
tttctctgaactgctgtgta

SEQ ID NO: 81654 - DNA, 20 bp, synthetic construct
  source 1..20: mol_type = other DNA
atttctctgaactgctgtgt

SEQ ID NO: 81655 - DNA, 20 bp, synthetic construct
  source 1..20: mol_type = other DNA
aatttctctgaactgctgtg

SEQ ID NO: 81656 - DNA, 20 bp, synthetic construct
  source 1..20: mol_type = other DNA
gaatttctctgaactgctgt

SEQ ID NO: 81657 - DNA, 20 bp, synthetic construct
  source 1..20: mol_type = other DNA
ggaatttctctgaactgctg

SEQ ID NO: 81658 - DNA, 20 bp, synthetic construct
  source 1..20: mol_type = other DNA
tggaatttctctgaactgct

SEQ ID NO: 81659 - DNA, 20 bp, synthetic construct
  source 1..20: mol_type = other DNA
ctggaatttctctgaactgc

SEQ ID NO: 81660 - DNA, 20 bp, synthetic construct
  source 1..20: mol_type = other DNA
actggaatttctctgaactg

SEQ ID NO: 81661 - DNA, 20 bp, synthetic construct
  source 1..20: mol_type = other DNA
cactggaatttctctgaact

SEQ ID NO: 81662 - DNA, 20 bp, synthetic construct
  source 1..20: mol_type = other DNA
tcactggaatttctctgaac

SEQ ID NO: 81663 - DNA, 20 bp, synthetic construct
  source 1..20: mol_type = other DNA
ttcactggaatttctctgaa

SEQ ID NO: 81664 - DNA, 20 bp, synthetic construct
  source 1..20: mol_type = other DNA
gttcactggaatttctctga

SEQ ID NO: 81665 - DNA, 20 bp, synthetic construct
  source 1..20: mol_type = other DNA
cgttcactggaatttctctg

SEQ ID NO: 81666 - DNA, 20 bp, synthetic construct
  source 1..20: mol_type = other DNA
acgttcactggaatttctct

SEQ ID NO: 81667 - DNA, 20 bp, synthetic construct
  source 1..20: mol_type = other DNA
cacgttcactggaatttctc

SEQ ID NO: 81668 - DNA, 20 bp, synthetic construct
  source 1..20: mol_type = other DNA
tcacgttcactggaatttct

SEQ ID NO: 81669 - DNA, 20 bp, synthetic construct
  source 1..20: mol_type = other DNA
ctcacgttcactggaatttc

SEQ ID NO: 81670 - DNA, 20 bp, synthetic construct
  source 1..20: mol_type = other DNA
cctcacgttcactggaattt

SEQ ID NO: 81671 - DNA, 20 bp, synthetic construct
  source 1..20: mol_type = other DNA
ccctcacgttcactggaatt

SEQ ID NO: 81672 - DNA, 20 bp, synthetic construct
  source 1..20: mol_type = other DNA
cccctcacgttcactggaat

SEQ ID NO: 81673 - DNA, 20 bp, synthetic construct
  source 1..20: mol_type = other DNA
gcccctcacgttcactggaa

SEQ ID NO: 81674 - DNA, 20 bp, synthetic construct
  source 1..20: mol_type = other DNA
tgcccctcacgttcactgga

SEQ ID NO: 81675 - DNA, 20 bp, synthetic construct
  source 1..20: mol_type = other DNA
gtgcccctcacgttcactgg

SEQ ID NO: 81676 - DNA, 20 bp, synthetic construct
  source 1..20: mol_type = other DNA
tgtgcccctcacgttcactg

SEQ ID NO: 81677 - DNA, 20 bp, synthetic construct
  source 1..20: mol_type = other DNA
ctgtgcccctcacgttcact

SEQ ID NO: 81678 - DNA, 20 bp, synthetic construct
  source 1..20: mol_type = other DNA
gctgtgcccctcacgttcac

SEQ ID NO: 81679 - DNA, 20 bp, synthetic construct
  source 1..20: mol_type = other DNA
tgctgtgcccctcacgttca

SEQ ID NO: 81680 - DNA, 20 bp, synthetic construct
  source 1..20: mol_type = other DNA
atgctgtgcccctcacgttc

SEQ ID NO: 81681 - DNA, 20 bp, synthetic construct
  source 1..20: mol_type = other DNA
tatgctgtgcccctcacgtt

SEQ ID NO: 81682 - DNA, 20 bp, synthetic construct
  source 1..20: mol_type = other DNA
ttatgctgtgcccctcacgt

SEQ ID NO: 81683 - DNA, 20 bp, synthetic construct
  source 1..20: mol_type = other DNA
tttatgctgtgcccctcacg

SEQ ID NO: 81684 - DNA, 20 bp, synthetic construct
  source 1..20: mol_type = other DNA
gtttatgctgtgcccctcac

SEQ ID NO: 81685 - DNA, 20 bp, synthetic construct
  source 1..20: mol_type = other DNA
tgtttatgctgtgcccctca

SEQ ID NO: 81686 - DNA, 20 bp, synthetic construct
  source 1..20: mol_type = other DNA
gtgtttatgctgtgcccctc

SEQ ID NO: 81687 - DNA, 20 bp, synthetic construct
  source 1..20: mol_type = other DNA
agtgtttatgctgtgcccct

SEQ ID NO: 81688 - DNA, 20 bp, synthetic construct
  source 1..20: mol_type = other DNA
tagtgtttatgctgtgcccc

SEQ ID NO: 81689 - DNA, 20 bp, synthetic construct
  source 1..20: mol_type = other DNA
ctagtgtttatgctgtgccc

SEQ ID NO: 81690 - DNA, 20 bp, synthetic construct
  source 1..20: mol_type = other DNA
cctagtgtttatgctgtgcc

SEQ ID NO: 81691 - DNA, 20 bp, synthetic construct
  source 1..20: mol_type = other DNA
acctagtgtttatgctgtgc

SEQ ID NO: 81692 - DNA, 20 bp, synthetic construct
  source 1..20: mol_type = other DNA
tacctagtgtttatgctgtg

SEQ ID NO: 81693 - DNA, 20 bp, synthetic construct
  source 1..20: mol_type = other DNA
atacctagtgtttatgctgt

SEQ ID NO: 81694 - DNA, 20 bp, synthetic construct
  source 1..20: mol_type = other DNA
aatacctagtgtttatgctg

SEQ ID NO: 81695 - DNA, 20 bp, synthetic construct
  source 1..20: mol_type = other DNA
aaatacctagtgtttatgct

SEQ ID NO: 81696 - DNA, 20 bp, synthetic construct
  source 1..20: mol_type = other DNA
taaatacctagtgtttatgc

SEQ ID NO: 81697 - DNA, 20 bp, synthetic construct
  source 1..20: mol_type = other DNA
ttaaatacctagtgtttatg

SEQ ID NO: 81698 - DNA, 20 bp, synthetic construct
  source 1..20: mol_type = other DNA
tttaaatacctagtgtttat

SEQ ID NO: 81699 - DNA, 20 bp, synthetic construct
  source 1..20: mol_type = other DNA
ctttaaatacctagtgttta

SEQ ID NO: 81700 - DNA, 20 bp, synthetic construct
  source 1..20: mol_type = other DNA
cctttaaatacctagtgttt

SEQ ID NO: 81701 - DNA, 20 bp, synthetic construct
  source 1..20: mol_type = other DNA
tcctttaaatacctagtgtt

SEQ ID NO: 81702 - DNA, 20 bp, synthetic construct
  source 1..20: mol_type = other DNA
ttcctttaaatacctagtgt

SEQ ID NO: 81703 - DNA, 20 bp, synthetic construct
  source 1..20: mol_type = other DNA
tttcctttaaatacctagtg

SEQ ID NO: 81704 - DNA, 20 bp, synthetic construct
  source 1..20: mol_type = other DNA
atttcctttaaatacctagt

SEQ ID NO: 81705 - DNA, 20 bp, synthetic construct
  source 1..20: mol_type = other DNA
gatttcctttaaatacctag

SEQ ID NO: 81706 - DNA, 20 bp, synthetic construct
  source 1..20: mol_type = other DNA
tgatttcctttaaataccta

SEQ ID NO: 81707 - DNA, 20 bp, synthetic construct
  source 1..20: mol_type = other DNA
atgatttcctttaaatacct

SEQ ID NO: 81708 - DNA, 20 bp, synthetic construct
  source 1..20: mol_type = other DNA
catgatttcctttaaatacc

SEQ ID NO: 81709 - DNA, 20 bp, synthetic construct
  source 1..20: mol_type = other DNA
tcatgatttcctttaaatac

SEQ ID NO: 81710 - DNA, 20 bp, synthetic construct
  source 1..20: mol_type = other DNA
atcatgatttcctttaaata

SEQ ID NO: 81711 - DNA, 20 bp, synthetic construct
  source 1..20: mol_type = other DNA
catcatgatttcctttaaat

SEQ ID NO: 81712 - DNA, 20 bp, synthetic construct
  source 1..20: mol_type = other DNA
gcatcatgatttcctttaaa

SEQ ID NO: 81713 - DNA, 20 bp, synthetic construct
  source 1..20: mol_type = other DNA
tgcatcatgatttcctttaa

SEQ ID NO: 81714 - DNA, 20 bp, synthetic construct
  source 1..20: mol_type = other DNA
ctgcatcatgatttccttta

SEQ ID NO: 81715 - DNA, 20 bp, synthetic construct
  source 1..20: mol_type = other DNA
actgcatcatgatttccttt

SEQ ID NO: 81716 - DNA, 20 bp, synthetic construct
  source 1..20: mol_type = other DNA
tactgcatcatgatttcctt

SEQ ID NO: 81717 - DNA, 20 bp, synthetic construct
  source 1..20: mol_type = other DNA
atactgcatcatgatttcct

SEQ ID NO: 81718 - DNA, 20 bp, synthetic construct
  source 1..20: mol_type = other DNA
aatactgcatcatgatttcc

SEQ ID NO: 81719 - DNA, 20 bp, synthetic construct
  source 1..20: mol_type = other DNA
aaatactgcatcatgatttc

SEQ ID NO: 81720 - DNA, 20 bp, synthetic construct
  source 1..20: mol_type = other DNA
aaaatactgcatcatgattt

SEQ ID NO: 81721 - DNA, 20 bp, synthetic construct
  source 1..20: mol_type = other DNA
caaaatactgcatcatgatt

SEQ ID NO: 81722 - DNA, 20 bp, synthetic construct
  source 1..20: mol_type = other DNA
ccaaaatactgcatcatgat

SEQ ID NO: 81723 - DNA, 20 bp, synthetic construct
  source 1..20: mol_type = other DNA
tccaaaatactgcatcatga

SEQ ID NO: 81724 - DNA, 20 bp, synthetic construct
  source 1..20: mol_type = other DNA
atccaaaatactgcatcatg

SEQ ID NO: 81725 - DNA, 20 bp, synthetic construct
  source 1..20: mol_type = other DNA
tatccaaaatactgcatcat

SEQ ID NO: 81726 - DNA, 20 bp, synthetic construct
  source 1..20: mol_type = other DNA
gtatccaaaatactgcatca

SEQ ID NO: 81727 - DNA, 20 bp, synthetic construct
  source 1..20: mol_type = other DNA
tgtatccaaaatactgcatc

SEQ ID NO: 81728 - DNA, 20 bp, synthetic construct
  source 1..20: mol_type = other DNA
gtgtatccaaaatactgcat

SEQ ID NO: 81729 - DNA, 20 bp, synthetic construct
  source 1..20: mol_type = other DNA
tgtgtatccaaaatactgca

SEQ ID NO: 81730 - DNA, 20 bp, synthetic construct
  source 1..20: mol_type = other DNA
ttgtgtatccaaaatactgc

SEQ ID NO: 81731 - DNA, 20 bp, synthetic construct
  source 1..20: mol_type = other DNA
gttgtgtatccaaaatactg

SEQ ID NO: 81732 - DNA, 20 bp, synthetic construct
  source 1..20: mol_type = other DNA
agttgtgtatccaaaatact

SEQ ID NO: 81733 - DNA, 20 bp, synthetic construct
  source 1..20: mol_type = other DNA
gagttgtgtatccaaaatac

SEQ ID NO: 81734 - DNA, 20 bp, synthetic construct
  source 1..20: mol_type = other DNA
tgagttgtgtatccaaaata

SEQ ID NO: 81735 - DNA, 20 bp, synthetic construct
  source 1..20: mol_type = other DNA
ttgagttgtgtatccaaaat

SEQ ID NO: 81736 - DNA, 20 bp, synthetic construct
  source 1..20: mol_type = other DNA
cttgagttgtgtatccaaaa

SEQ ID NO: 81737 - DNA, 20 bp, synthetic construct
  source 1..20: mol_type = other DNA
ccttgagttgtgtatccaaa

SEQ ID NO: 81738 - DNA, 20 bp, synthetic construct
  source 1..20: mol_type = other DNA
accttgagttgtgtatccaa

SEQ ID NO: 81739 - DNA, 20 bp, synthetic construct
  source 1..20: mol_type = other DNA
gaccttgagttgtgtatcca

SEQ ID NO: 81740 - DNA, 20 bp, synthetic construct
  source 1..20: mol_type = other DNA
agaccttgagttgtgtatcc

SEQ ID NO: 81741 - DNA, 20 bp, synthetic construct
  source 1..20: mol_type = other DNA
cagaccttgagttgtgtatc

SEQ ID NO: 81742 - DNA, 20 bp, synthetic construct
  source 1..20: mol_type = other DNA
acagaccttgagttgtgtat

SEQ ID NO: 81743 - DNA, 20 bp, synthetic construct
  source 1..20: mol_type = other DNA
cacagaccttgagttgtgta

SEQ ID NO: 81744 - DNA, 20 bp, synthetic construct
  source 1..20: mol_type = other DNA
acacagaccttgagttgtgt

SEQ ID NO: 81745 - DNA, 20 bp, synthetic construct
  source 1..20: mol_type = other DNA
cacacagaccttgagttgtg

SEQ ID NO: 81746 - DNA, 20 bp, synthetic construct
  source 1..20: mol_type = other DNA
tcacacagaccttgagttgt

SEQ ID NO: 81747 - DNA, 20 bp, synthetic construct
  source 1..20: mol_type = other DNA
ctcacacagaccttgagttg

SEQ ID NO: 81748 - DNA, 20 bp, synthetic construct
  source 1..20: mol_type = other DNA
tctcacacagaccttgagtt

SEQ ID NO: 81749 - DNA, 20 bp, synthetic construct
  source 1..20: mol_type = other DNA
gtctcacacagaccttgagt

SEQ ID NO: 81750 - DNA, 20 bp, synthetic construct
  source 1..20: mol_type = other DNA
cgtctcacacagaccttgag

SEQ ID NO: 81751 - DNA, 20 bp, synthetic construct
  source 1..20: mol_type = other DNA
ccgtctcacacagaccttga

SEQ ID NO: 81752 - DNA, 20 bp, synthetic construct
  source 1..20: mol_type = other DNA
accgtctcacacagaccttg

SEQ ID NO: 81753 - DNA, 20 bp, synthetic construct
  source 1..20: mol_type = other DNA
caccgtctcacacagacctt

SEQ ID NO: 81754 - DNA, 20 bp, synthetic construct
  source 1..20: mol_type = other DNA
acaccgtctcacacagacct

SEQ ID NO: 81755 - DNA, 20 bp, synthetic construct
  source 1..20: mol_type = other DNA
tacaccgtctcacacagacc

SEQ ID NO: 81756 - DNA, 20 bp, synthetic construct
  source 1..20: mol_type = other DNA
atacaccgtctcacacagac

SEQ ID NO: 81757 - DNA, 20 bp, synthetic construct
  source 1..20: mol_type = other DNA
aatacaccgtctcacacaga

SEQ ID NO: 81758 - DNA, 20 bp, synthetic construct
  source 1..20: mol_type = other DNA
caatacaccgtctcacacag

SEQ ID NO: 81759 - DNA, 20 bp, synthetic construct
  source 1..20: mol_type = other DNA
acaatacaccgtctcacaca

SEQ ID NO: 81760 - DNA, 20 bp, synthetic construct
  source 1..20: mol_type = other DNA
aacaatacaccgtctcacac

SEQ ID NO: 81761 - DNA, 20 bp, synthetic construct
  source 1..20: mol_type = other DNA
taacaatacaccgtctcaca

SEQ ID NO: 81762 - DNA, 20 bp, synthetic construct
  source 1..20: mol_type = other DNA
ataacaatacaccgtctcac

SEQ ID NO: 81763 - DNA, 20 bp, synthetic construct
  source 1..20: mol_type = other DNA
aataacaatacaccgtctca

SEQ ID NO: 81764 - DNA, 20 bp, synthetic construct
  source 1..20: mol_type = other DNA
taataacaatacaccgtctc

SEQ ID NO: 81765 - DNA, 20 bp, synthetic construct
  source 1..20: mol_type = other DNA
ataataacaatacaccgtct

SEQ ID NO: 81766 - DNA, 20 bp, synthetic construct
  source 1..20: mol_type = other DNA
tataataacaatacaccgtc

SEQ ID NO: 81767 - DNA, 20 bp, synthetic construct
  source 1..20: mol_type = other DNA
atataataacaatacaccgt

SEQ ID NO: 81768 - DNA, 20 bp, synthetic construct
  source 1..20: mol_type = other DNA
aatataataacaatacaccg

SEQ ID NO: 81769 - DNA, 20 bp, synthetic construct
  source 1..20: mol_type = other DNA
aaatataataacaatacacc

SEQ ID NO: 81770 - DNA, 20 bp, synthetic construct
  source 1..20: mol_type = other DNA
gaaatataataacaatacac

SEQ ID NO: 81771 - DNA, 20 bp, synthetic construct
  source 1..20: mol_type = other DNA
ggaaatataataacaataca

SEQ ID NO: 81772 - DNA, 20 bp, synthetic construct
  source 1..20: mol_type = other DNA
aggaaatataataacaatac

SEQ ID NO: 81773 - DNA, 20 bp, synthetic construct
  source 1..20: mol_type = other DNA
gaggaaatataataacaata

SEQ ID NO: 81774 - DNA, 20 bp, synthetic construct
  source 1..20: mol_type = other DNA
agaggaaatataataacaat

SEQ ID NO: 81775 - DNA, 20 bp, synthetic construct
  source 1..20: mol_type = other DNA
aagaggaaatataataacaa

SEQ ID NO: 81776 - DNA, 20 bp, synthetic construct
  source 1..20: mol_type = other DNA
gaagaggaaatataataaca

SEQ ID NO: 81777 - DNA, 20 bp, synthetic construct
  source 1..20: mol_type = other DNA
ggaagaggaaatataataac

SEQ ID NO: 81778 - DNA, 20 bp, synthetic construct
  source 1..20: mol_type = other DNA
aggaagaggaaatataataa

SEQ ID NO: 81779 - DNA, 20 bp, synthetic construct
  source 1..20: mol_type = other DNA
aaggaagaggaaatataata

SEQ ID NO: 81780 - DNA, 20 bp, synthetic construct
  source 1..20: mol_type = other DNA
aaaggaagaggaaatataat

SEQ ID NO: 81781 - DNA, 20 bp, synthetic construct
  source 1..20: mol_type = other DNA
taaaggaagaggaaatataa

SEQ ID NO: 81782 - DNA, 20 bp, synthetic construct
  source 1..20: mol_type = other DNA
ttaaaggaagaggaaatata

SEQ ID NO: 81783 - DNA, 20 bp, synthetic construct
  source 1..20: mol_type = other DNA
attaaaggaagaggaaatat

SEQ ID NO: 81784 - DNA, 20 bp, synthetic construct
  source 1..20: mol_type = other DNA
tattaaaggaagaggaaata

SEQ ID NO: 81785 - DNA, 20 bp, synthetic construct
  source 1..20: mol_type = other DNA
atattaaaggaagaggaaat

SEQ ID NO: 81786 - DNA, 20 bp, synthetic construct
  source 1..20: mol_type = other DNA
tatattaaaggaagaggaaa

SEQ ID NO: 81787 - DNA, 20 bp, synthetic construct
  source 1..20: mol_type = other DNA
ctatattaaaggaagaggaa

SEQ ID NO: 81788 - DNA, 20 bp, synthetic construct
  source 1..20: mol_type = other DNA
gctatattaaaggaagagga

SEQ ID NO: 81789 - DNA, 20 bp, synthetic construct
  source 1..20: mol_type = other DNA
agctatattaaaggaagagg

SEQ ID NO: 81790 - DNA, 20 bp, synthetic construct
  source 1..20: mol_type = other DNA
aagctatattaaaggaagag

SEQ ID NO: 81791 - DNA, 20 bp, synthetic construct
  source 1..20: mol_type = other DNA
taagctatattaaaggaaga

SEQ ID NO: 81792 - DNA, 20 bp, synthetic construct
  source 1..20: mol_type = other DNA
ctaagctatattaaaggaag

SEQ ID NO: 81793 - DNA, 20 bp, synthetic construct
  source 1..20: mol_type = other DNA
cctaagctatattaaaggaa

SEQ ID NO: 81794 - DNA, 20 bp, synthetic construct
  source 1..20: mol_type = other DNA
acctaagctatattaaagga

SEQ ID NO: 81795 - DNA, 20 bp, synthetic construct
  source 1..20: mol_type = other DNA
tacctaagctatattaaagg

SEQ ID NO: 81796 - DNA, 20 bp, synthetic construct
  source 1..20: mol_type = other DNA
ctacctaagctatattaaag

SEQ ID NO: 81797 - DNA, 20 bp, synthetic construct
  source 1..20: mol_type = other DNA
tctacctaagctatattaaa

SEQ ID NO: 81798 - DNA, 20 bp, synthetic construct
  source 1..20: mol_type = other DNA
ctctacctaagctatattaa

SEQ ID NO: 81799 - DNA, 20 bp, synthetic construct
  source 1..20: mol_type = other DNA
tctctacctaagctatatta

SEQ ID NO: 81800 - DNA, 20 bp, synthetic construct
  source 1..20: mol_type = other DNA
ttctctacctaagctatatt

SEQ ID NO: 81801 - DNA, 20 bp, synthetic construct
  source 1..20: mol_type = other DNA
attctctacctaagctatat

SEQ ID NO: 81802 - DNA, 20 bp, synthetic construct
  source 1..20: mol_type = other DNA
cattctctacctaagctata

SEQ ID NO: 81803 - DNA, 20 bp, synthetic construct
  source 1..20: mol_type = other DNA
gcattctctacctaagctat

SEQ ID NO: 81804 - DNA, 20 bp, synthetic construct
  source 1..20: mol_type = other DNA
tgcattctctacctaagcta

SEQ ID NO: 81805 - DNA, 20 bp, synthetic construct
  source 1..20: mol_type = other DNA
ttgcattctctacctaagct

SEQ ID NO: 81806 - DNA, 20 bp, synthetic construct
  source 1..20: mol_type = other DNA
cttgcattctctacctaagc

SEQ ID NO: 81807 - DNA, 20 bp, synthetic construct
  source 1..20: mol_type = other DNA
acttgcattctctacctaag

SEQ ID NO: 81808 - DNA, 20 bp, synthetic construct
  source 1..20: mol_type = other DNA
tacttgcattctctacctaa

SEQ ID NO: 81809 - DNA, 20 bp, synthetic construct
  source 1..20: mol_type = other DNA
ctacttgcattctctaccta

SEQ ID NO: 81810 - DNA, 20 bp, synthetic construct
  source 1..20: mol_type = other DNA
tctacttgcattctctacct

SEQ ID NO: 81811 - DNA, 20 bp, synthetic construct
  source 1..20: mol_type = other DNA
ttctacttgcattctctacc

SEQ ID NO: 81812 - DNA, 20 bp, synthetic construct
  source 1..20: mol_type = other DNA
attctacttgcattctctac

SEQ ID NO: 81813 - DNA, 20 bp, synthetic construct
  source 1..20: mol_type = other DNA
aattctacttgcattctcta

SEQ ID NO: 81814 - DNA, 20 bp, synthetic construct
  source 1..20: mol_type = other DNA
caattctacttgcattctct

SEQ ID NO: 81815 - DNA, 20 bp, synthetic construct
  source 1..20: mol_type = other DNA
ccaattctacttgcattctc

SEQ ID NO: 81816 - DNA, 20 bp, synthetic construct
  source 1..20: mol_type = other DNA
accaattctacttgcattct

SEQ ID NO: 81817 - DNA, 20 bp, synthetic construct
  source 1..20: mol_type = other DNA
aaccaattctacttgcattc

SEQ ID NO: 81818 - DNA, 20 bp, synthetic construct
  source 1..20: mol_type = other DNA
aaaccaattctacttgcatt

SEQ ID NO: 81819 - DNA, 20 bp, synthetic construct
  source 1..20: mol_type = other DNA
taaaccaattctacttgcat

SEQ ID NO: 81820 - DNA, 20 bp, synthetic construct
  source 1..20: mol_type = other DNA
ttaaaccaattctacttgca

SEQ ID NO: 81821 - DNA, 20 bp, synthetic construct
  source 1..20: mol_type = other DNA
cttaaaccaattctacttgc

SEQ ID NO: 81822 - DNA, 20 bp, synthetic construct
  source 1..20: mol_type = other DNA
tcttaaaccaattctacttg

SEQ ID NO: 81823 - DNA, 20 bp, synthetic construct
  source 1..20: mol_type = other DNA
atcttaaaccaattctactt

SEQ ID NO: 81824 - DNA, 20 bp, synthetic construct
  source 1..20: mol_type = other DNA
gatcttaaaccaattctact

SEQ ID NO: 81825 - DNA, 20 bp, synthetic construct
  source 1..20: mol_type = other DNA
agatcttaaaccaattctac

SEQ ID NO: 81826 - DNA, 20 bp, synthetic construct
  source 1..20: mol_type = other DNA
cagatcttaaaccaattcta

SEQ ID NO: 81827 - DNA, 20 bp, synthetic construct
  source 1..20: mol_type = other DNA
acagatcttaaaccaattct

SEQ ID NO: 81828 - DNA, 20 bp, synthetic construct
  source 1..20: mol_type = other DNA
aacagatcttaaaccaattc

SEQ ID NO: 81829 - DNA, 20 bp, synthetic construct
  source 1..20: mol_type = other DNA
taacagatcttaaaccaatt

SEQ ID NO: 81830 - DNA, 20 bp, synthetic construct
  source 1..20: mol_type = other DNA
ctaacagatcttaaaccaat

SEQ ID NO: 81831 - DNA, 20 bp, synthetic construct
  source 1..20: mol_type = other DNA
tctaacagatcttaaaccaa

SEQ ID NO: 81832 - DNA, 20 bp, synthetic construct
  source 1..20: mol_type = other DNA
ctctaacagatcttaaacca

SEQ ID NO: 81833 - DNA, 20 bp, synthetic construct
  source 1..20: mol_type = other DNA
tctctaacagatcttaaacc

SEQ ID NO: 81834 - DNA, 20 bp, synthetic construct
  source 1..20: mol_type = other DNA
ttctctaacagatcttaaac

SEQ ID NO: 81835 - DNA, 20 bp, synthetic construct
  source 1..20: mol_type = other DNA
tttctctaacagatcttaaa

SEQ ID NO: 81836 - DNA, 20 bp, synthetic construct
  source 1..20: mol_type = other DNA
ttttctctaacagatcttaa

SEQ ID NO: 81837 - DNA, 20 bp, synthetic construct
  source 1..20: mol_type = other DNA
cttttctctaacagatctta

SEQ ID NO: 81838 - DNA, 20 bp, synthetic construct
  source 1..20: mol_type = other DNA
ccttttctctaacagatctt

SEQ ID NO: 81839 - DNA, 20 bp, synthetic construct
  source 1..20: mol_type = other DNA
accttttctctaacagatct

SEQ ID NO: 81840 - DNA, 20 bp, synthetic construct
  source 1..20: mol_type = other DNA
aaccttttctctaacagatc

SEQ ID NO: 81841 - DNA, 20 bp, synthetic construct
  source 1..20: mol_type = other DNA
taaccttttctctaacagat

SEQ ID NO: 81842 - DNA, 20 bp, synthetic construct
  source 1..20: mol_type = other DNA
ataaccttttctctaacaga

SEQ ID NO: 81843 - DNA, 20 bp, synthetic construct
  source 1..20: mol_type = other DNA
cataaccttttctctaacag

SEQ ID NO: 81844 - DNA, 20 bp, synthetic construct
  source 1..20: mol_type = other DNA
ccataaccttttctctaaca

SEQ ID NO: 81845 - DNA, 20 bp, synthetic construct
  source 1..20: mol_type = other DNA
accataaccttttctctaac

SEQ ID NO: 81846 - DNA, 20 bp, synthetic construct
  source 1..20: mol_type = other DNA
caccataaccttttctctaa

SEQ ID NO: 81847 - DNA, 20 bp, synthetic construct
  source 1..20: mol_type = other DNA
tcaccataaccttttctcta

SEQ ID NO: 81848 - DNA, 20 bp, synthetic construct
  source 1..20: mol_type = other DNA
atcaccataaccttttctct

SEQ ID NO: 81849 - DNA, 20 bp, synthetic construct
  source 1..20: mol_type = other DNA
gatcaccataaccttttctc

SEQ ID NO: 81850 - DNA, 20 bp, synthetic construct
  source 1..20: mol_type = other DNA
agatcaccataaccttttct

SEQ ID NO: 81851 - DNA, 20 bp, synthetic construct
  source 1..20: mol_type = other DNA
aagatcaccataaccttttc

SEQ ID NO: 81852 - DNA, 20 bp, synthetic construct
  source 1..20: mol_type = other DNA
caagatcaccataacctttt

SEQ ID NO: 81853 - DNA, 20 bp, synthetic construct
  source 1..20: mol_type = other DNA
ccaagatcaccataaccttt

SEQ ID NO: 81854 - DNA, 20 bp, synthetic construct
  source 1..20: mol_type = other DNA
tccaagatcaccataacctt

SEQ ID NO: 81855 - DNA, 20 bp, synthetic construct
  source 1..20: mol_type = other DNA
ttccaagatcaccataacct

SEQ ID NO: 81856 - DNA, 20 bp, synthetic construct
  source 1..20: mol_type = other DNA
tttccaagatcaccataacc

SEQ ID NO: 81857 - DNA, 20 bp, synthetic construct
  source 1..20: mol_type = other DNA
ttttccaagatcaccataac

SEQ ID NO: 81858 - DNA, 20 bp, synthetic construct
  source 1..20: mol_type = other DNA
attttccaagatcaccataa

SEQ ID NO: 81859 - DNA, 20 bp, synthetic construct
  source 1..20: mol_type = other DNA
tattttccaagatcaccata

SEQ ID NO: 81860 - DNA, 20 bp, synthetic construct
  source 1..20: mol_type = other DNA
atattttccaagatcaccat

SEQ ID NO: 81861 - DNA, 20 bp, synthetic construct
  source 1..20: mol_type = other DNA
catattttccaagatcacca

SEQ ID NO: 81862 - DNA, 20 bp, synthetic construct
  source 1..20: mol_type = other DNA
gcatattttccaagatcacc

SEQ ID NO: 81863 - DNA, 20 bp, synthetic construct
  source 1..20: mol_type = other DNA
agcatattttccaagatcac

SEQ ID NO: 81864 - DNA, 20 bp, synthetic construct
  source 1..20: mol_type = other DNA
aagcatattttccaagatca

SEQ ID NO: 81865 - DNA, 20 bp, synthetic construct
  source 1..20: mol_type = other DNA
aaagcatattttccaagatc

SEQ ID NO: 81866 - DNA, 20 bp, synthetic construct
  source 1..20: mol_type = other DNA
aaaagcatattttccaagat

SEQ ID NO: 81867 - DNA, 20 bp, synthetic construct
  source 1..20: mol_type = other DNA
caaaagcatattttccaaga

SEQ ID NO: 81868 - DNA, 20 bp, synthetic construct
  source 1..20: mol_type = other DNA
tcaaaagcatattttccaag

SEQ ID NO: 81869 - DNA, 20 bp, synthetic construct
  source 1..20: mol_type = other DNA
ctcaaaagcatattttccaa

SEQ ID NO: 81870 - DNA, 20 bp, synthetic construct
  source 1..20: mol_type = other DNA
tctcaaaagcatattttcca

SEQ ID NO: 81871 - DNA, 20 bp, synthetic construct
  source 1..20: mol_type = other DNA
ctctcaaaagcatattttcc

SEQ ID NO: 81872 - DNA, 20 bp, synthetic construct
  source 1..20: mol_type = other DNA
actctcaaaagcatattttc

SEQ ID NO: 81873 - DNA, 20 bp, synthetic construct
  source 1..20: mol_type = other DNA
tactctcaaaagcatatttt

SEQ ID NO: 81874 - DNA, 20 bp, synthetic construct
  source 1..20: mol_type = other DNA
ttactctcaaaagcatattt

SEQ ID NO: 81875 - DNA, 20 bp, synthetic construct
  source 1..20: mol_type = other DNA
cttactctcaaaagcatatt

SEQ ID NO: 81876 - DNA, 20 bp, synthetic construct
  source 1..20: mol_type = other DNA
gcttactctcaaaagcatat

SEQ ID NO: 81877 - DNA, 20 bp, synthetic construct
  source 1..20: mol_type = other DNA
agcttactctcaaaagcata

SEQ ID NO: 81878 - DNA, 20 bp, synthetic construct
  source 1..20: mol_type = other DNA
gagcttactctcaaaagcat

SEQ ID NO: 81879 - DNA, 20 bp, synthetic construct
  source 1..20: mol_type = other DNA
agagcttactctcaaaagca

SEQ ID NO: 81880 - DNA, 20 bp, synthetic construct
  source 1..20: mol_type = other DNA
cagagcttactctcaaaagc

SEQ ID NO: 81881 - DNA, 20 bp, synthetic construct
  source 1..20: mol_type = other DNA
acagagcttactctcaaaag

SEQ ID NO: 81882 - DNA, 20 bp, synthetic construct
  source 1..20: mol_type = other DNA
cacagagcttactctcaaaa

SEQ ID NO: 81883 - DNA, 20 bp, synthetic construct
  source 1..20: mol_type = other DNA
ccacagagcttactctcaaa

SEQ ID NO: 81884 - DNA, 20 bp, synthetic construct
  source 1..20: mol_type = other DNA
tccacagagcttactctcaa

SEQ ID NO: 81885 - DNA, 20 bp, synthetic construct
  source 1..20: mol_type = other DNA
ctccacagagcttactctca

SEQ ID NO: 81886 - DNA, 20 bp, synthetic construct
  source 1..20: mol_type = other DNA
gctccacagagcttactctc

SEQ ID NO: 81887 - DNA, 20 bp, synthetic construct
  source 1..20: mol_type = other DNA
ggctccacagagcttactct

SEQ ID NO: 81888 - DNA, 20 bp, synthetic construct
  source 1..20: mol_type = other DNA
tggctccacagagcttactc

SEQ ID NO: 81889 - DNA, 20 bp, synthetic construct
  source 1..20: mol_type = other DNA
ttggctccacagagcttact

SEQ ID NO: 81890 - DNA, 20 bp, synthetic construct
  source 1..20: mol_type = other DNA
cttggctccacagagcttac

SEQ ID NO: 81891 - DNA, 20 bp, synthetic construct
  source 1..20: mol_type = other DNA
acttggctccacagagctta

SEQ ID NO: 81892 - DNA, 20 bp, synthetic construct
  source 1..20: mol_type = other DNA
cacttggctccacagagctt

SEQ ID NO: 81893 - DNA, 20 bp, synthetic construct
  source 1..20: mol_type = other DNA
acacttggctccacagagct

SEQ ID NO: 81894 - DNA, 20 bp, synthetic construct
  source 1..20: mol_type = other DNA
aacacttggctccacagagc

SEQ ID NO: 81895 - DNA, 20 bp, synthetic construct
  source 1..20: mol_type = other DNA
caacacttggctccacagag

SEQ ID NO: 81896 - DNA, 20 bp, synthetic construct
  source 1..20: mol_type = other DNA
ccaacacttggctccacaga

SEQ ID NO: 81897 - DNA, 20 bp, synthetic construct
  source 1..20: mol_type = other DNA
accaacacttggctccacag

SEQ ID NO: 81898 - DNA, 20 bp, synthetic construct
  source 1..20: mol_type = other DNA
taccaacacttggctccaca

SEQ ID NO: 81899 - DNA, 20 bp, synthetic construct
  source 1..20: mol_type = other DNA
ataccaacacttggctccac

SEQ ID NO: 81900 - DNA, 20 bp, synthetic construct
  source 1..20: mol_type = other DNA
tataccaacacttggctcca

SEQ ID NO: 81901 - DNA, 20 bp, synthetic construct
  source 1..20: mol_type = other DNA
atataccaacacttggctcc

SEQ ID NO: 81902 - DNA, 20 bp, synthetic construct
  source 1..20: mol_type = other DNA
gatataccaacacttggctc

SEQ ID NO: 81903 - DNA, 20 bp, synthetic construct
  source 1..20: mol_type = other DNA
tgatataccaacacttggct

SEQ ID NO: 81904 - DNA, 20 bp, synthetic construct
  source 1..20: mol_type = other DNA
gtgatataccaacacttggc

SEQ ID NO: 81905 - DNA, 20 bp, synthetic construct
  source 1..20: mol_type = other DNA
cgtgatataccaacacttgg

SEQ ID NO: 81906 - DNA, 20 bp, synthetic construct
  source 1..20: mol_type = other DNA
ccgtgatataccaacacttg

SEQ ID NO: 81907 - DNA, 20 bp, synthetic construct
  source 1..20: mol_type = other DNA
accgtgatataccaacactt

SEQ ID NO: 81908 - DNA, 20 bp, synthetic construct
  source 1..20: mol_type = other DNA
caccgtgatataccaacact

SEQ ID NO: 81909 - DNA, 20 bp, synthetic construct
  source 1..20: mol_type = other DNA
tcaccgtgatataccaacac

SEQ ID NO: 81910 - DNA, 20 bp, synthetic construct
  source 1..20: mol_type = other DNA
ctcaccgtgatataccaaca

SEQ ID NO: 81911 - DNA, 20 bp, synthetic construct
  source 1..20: mol_type = other DNA
gctcaccgtgatataccaac

SEQ ID NO: 81912 - DNA, 20 bp, synthetic construct
  source 1..20: mol_type = other DNA
tgctcaccgtgatataccaa

SEQ ID NO: 81913 - DNA, 20 bp, synthetic construct
  source 1..20: mol_type = other DNA
ttgctcaccgtgatatacca

SEQ ID NO: 81914 - DNA, 20 bp, synthetic construct
  source 1..20: mol_type = other DNA
attgctcaccgtgatatacc

SEQ ID NO: 81915 - DNA, 20 bp, synthetic construct
  source 1..20: mol_type = other DNA
gattgctcaccgtgatatac

SEQ ID NO: 81916 - DNA, 20 bp, synthetic construct
  source 1..20: mol_type = other DNA
ggattgctcaccgtgatata

SEQ ID NO: 81917 - DNA, 20 bp, synthetic construct
  source 1..20: mol_type = other DNA
tggattgctcaccgtgatat

SEQ ID NO: 81918 - DNA, 20 bp, synthetic construct
  source 1..20: mol_type = other DNA
ttggattgctcaccgtgata

SEQ ID NO: 81919 - DNA, 20 bp, synthetic construct
  source 1..20: mol_type = other DNA
cttggattgctcaccgtgat

SEQ ID NO: 81920 - DNA, 20 bp, synthetic construct
  source 1..20: mol_type = other DNA
tcttggattgctcaccgtga

SEQ ID NO: 81921 - DNA, 20 bp, synthetic construct
  source 1..20: mol_type = other DNA
atcttggattgctcaccgtg

SEQ ID NO: 81922 - DNA, 20 bp, synthetic construct
  source 1..20: mol_type = other DNA
gatcttggattgctcaccgt

SEQ ID NO: 81923 - DNA, 20 bp, synthetic construct
  source 1..20: mol_type = other DNA
agatcttggattgctcaccg

SEQ ID NO: 81924 - DNA, 20 bp, synthetic construct
  source 1..20: mol_type = other DNA
aagatcttggattgctcacc

SEQ ID NO: 81925 - DNA, 20 bp, synthetic construct
  source 1..20: mol_type = other DNA
caagatcttggattgctcac

SEQ ID NO: 81926 - DNA, 20 bp, synthetic construct
  source 1..20: mol_type = other DNA
tcaagatcttggattgctca

SEQ ID NO: 81927 - DNA, 20 bp, synthetic construct
  source 1..20: mol_type = other DNA
ttcaagatcttggattgctc

SEQ ID NO: 81928 - DNA, 20 bp, synthetic construct
  source 1..20: mol_type = other DNA
cttcaagatcttggattgct

SEQ ID NO: 81929 - DNA, 20 bp, synthetic construct
  source 1..20: mol_type = other DNA
tcttcaagatcttggattgc

SEQ ID NO: 81930 - DNA, 20 bp, synthetic construct
  source 1..20: mol_type = other DNA
ctcttcaagatcttggattg

SEQ ID NO: 81931 - DNA, 20 bp, synthetic construct
  source 1..20: mol_type = other DNA
gctcttcaagatcttggatt

SEQ ID NO: 81932 - DNA, 20 bp, synthetic construct
  source 1..20: mol_type = other DNA
agctcttcaagatcttggat

SEQ ID NO: 81933 - DNA, 20 bp, synthetic construct
  source 1..20: mol_type = other DNA
aagctcttcaagatcttgga

SEQ ID NO: 81934 - DNA, 20 bp, synthetic construct
  source 1..20: mol_type = other DNA
caagctcttcaagatcttgg

SEQ ID NO: 81935 - DNA, 20 bp, synthetic construct
  source 1..20: mol_type = other DNA
acaagctcttcaagatcttg

SEQ ID NO: 81936 - DNA, 20 bp, synthetic construct
  source 1..20: mol_type = other DNA
aacaagctcttcaagatctt

SEQ ID NO: 81937 - DNA, 20 bp, synthetic construct
  source 1..20: mol_type = other DNA
taacaagctcttcaagatct

SEQ ID NO: 81938 - DNA, 20 bp, synthetic construct
  source 1..20: mol_type = other DNA
ttaacaagctcttcaagatc

SEQ ID NO: 81939 - DNA, 20 bp, synthetic construct
  source 1..20: mol_type = other DNA
tttaacaagctcttcaagat

SEQ ID NO: 81940 - DNA, 20 bp, synthetic construct
  source 1..20: mol_type = other DNA
ttttaacaagctcttcaaga

SEQ ID NO: 81941 - DNA, 20 bp, synthetic construct
  source 1..20: mol_type = other DNA
attttaacaagctcttcaag

SEQ ID NO: 81942 - DNA, 20 bp, synthetic construct
  source 1..20: mol_type = other DNA
tattttaacaagctcttcaa

SEQ ID NO: 81943 - DNA, 20 bp, synthetic construct
  source 1..20: mol_type = other DNA
ctattttaacaagctcttca

SEQ ID NO: 81944 - DNA, 20 bp, synthetic construct
  source 1..20: mol_type = other DNA
actattttaacaagctcttc

SEQ ID NO: 81945 - DNA, 20 bp, synthetic construct
  source 1..20: mol_type = other DNA
aactattttaacaagctctt

SEQ ID NO: 81946 - DNA, 20 bp, synthetic construct
  source 1..20: mol_type = other DNA
taactattttaacaagctct

SEQ ID NO: 81947 - DNA, 20 bp, synthetic construct
  source 1..20: mol_type = other DNA
ataactattttaacaagctc

SEQ ID NO: 81948 - DNA, 20 bp, synthetic construct
  source 1..20: mol_type = other DNA
gataactattttaacaagct

SEQ ID NO: 81949 - DNA, 20 bp, synthetic construct
  source 1..20: mol_type = other DNA
agataactattttaacaagc

SEQ ID NO: 81950 - DNA, 20 bp, synthetic construct
  source 1..20: mol_type = other DNA
cagataactattttaacaag

SEQ ID NO: 81951 - DNA, 20 bp, synthetic construct
  source 1..20: mol_type = other DNA
ccagataactattttaacaa

SEQ ID NO: 81952 - DNA, 20 bp, synthetic construct
  source 1..20: mol_type = other DNA
accagataactattttaaca

SEQ ID NO: 81953 - DNA, 20 bp, synthetic construct
  source 1..20: mol_type = other DNA
caccagataactattttaac

SEQ ID NO: 81954 - DNA, 20 bp, synthetic construct
  source 1..20: mol_type = other DNA
ccaccagataactattttaa

SEQ ID NO: 81955 - DNA, 20 bp, synthetic construct
  source 1..20: mol_type = other DNA
cccaccagataactatttta

SEQ ID NO: 81956 - DNA, 20 bp, synthetic construct
  source 1..20: mol_type = other DNA
ccccaccagataactatttt

SEQ ID NO: 81957 - DNA, 20 bp, synthetic construct
  source 1..20: mol_type = other DNA
cccccaccagataactattt

SEQ ID NO: 81958 - DNA, 20 bp, synthetic construct
  source 1..20: mol_type = other DNA
tcccccaccagataactatt

SEQ ID NO: 81959 - DNA, 20 bp, synthetic construct
  source 1..20: mol_type = other DNA
gtcccccaccagataactat

SEQ ID NO: 81960 - DNA, 20 bp, synthetic construct
  source 1..20: mol_type = other DNA
tgtcccccaccagataacta

SEQ ID NO: 81961 - DNA, 20 bp, synthetic construct
  source 1..20: mol_type = other DNA
gtgtcccccaccagataact

SEQ ID NO: 81962 - DNA, 20 bp, synthetic construct
  source 1..20: mol_type = other DNA
cgtgtcccccaccagataac

SEQ ID NO: 81963 - DNA, 20 bp, synthetic construct
  source 1..20: mol_type = other DNA
acgtgtcccccaccagataa

SEQ ID NO: 81964 - DNA, 20 bp, synthetic construct
  source 1..20: mol_type = other DNA
cacgtgtcccccaccagata

SEQ ID NO: 81965 - DNA, 20 bp, synthetic construct
  source 1..20: mol_type = other DNA
acacgtgtcccccaccagat

SEQ ID NO: 81966 - DNA, 20 bp, synthetic construct
  source 1..20: mol_type = other DNA
tacacgtgtcccccaccaga

SEQ ID NO: 81967 - DNA, 20 bp, synthetic construct
  source 1..20: mol_type = other DNA
ttacacgtgtcccccaccag

SEQ ID NO: 81968 - DNA, 20 bp, synthetic construct
  source 1..20: mol_type = other DNA
gttacacgtgtcccccacca

SEQ ID NO: 81969 - DNA, 20 bp, synthetic construct
  source 1..20: mol_type = other DNA
tgttacacgtgtcccccacc

SEQ ID NO: 81970 - DNA, 20 bp, synthetic construct
  source 1..20: mol_type = other DNA
ttgttacacgtgtcccccac

SEQ ID NO: 81971 - DNA, 20 bp, synthetic construct
  source 1..20: mol_type = other DNA
attgttacacgtgtccccca

SEQ ID NO: 81972 - DNA, 20 bp, synthetic construct
  source 1..20: mol_type = other DNA
gattgttacacgtgtccccc

SEQ ID NO: 81973 - DNA, 20 bp, synthetic construct
  source 1..20: mol_type = other DNA
tgattgttacacgtgtcccc

SEQ ID NO: 81974 - DNA, 20 bp, synthetic construct
  source 1..20: mol_type = other DNA
gtgattgttacacgtgtccc

SEQ ID NO: 81975 - DNA, 20 bp, synthetic construct
  source 1..20: mol_type = other DNA
tgtgattgttacacgtgtcc

SEQ ID NO: 81976 - DNA, 20 bp, synthetic construct
  source 1..20: mol_type = other DNA
ctgtgattgttacacgtgtc

SEQ ID NO: 81977 - DNA, 20 bp, synthetic construct
  source 1..20: mol_type = other DNA
gctgtgattgttacacgtgt

SEQ ID NO: 81978 - DNA, 20 bp, synthetic construct
  source 1..20: mol_type = other DNA
tgctgtgattgttacacgtg

SEQ ID NO: 81979 - DNA, 20 bp, synthetic construct
  source 1..20: mol_type = other DNA
ctgctgtgattgttacacgt

SEQ ID NO: 81980 - DNA, 20 bp, synthetic construct
  source 1..20: mol_type = other DNA
actgctgtgattgttacacg

SEQ ID NO: 81981 - DNA, 20 bp, synthetic construct
  source 1..20: mol_type = other DNA
tactgctgtgattgttacac

SEQ ID NO: 81982 - DNA, 20 bp, synthetic construct
  source 1..20: mol_type = other DNA
gtactgctgtgattgttaca

SEQ ID NO: 81983 - DNA, 20 bp, synthetic construct
  source 1..20: mol_type = other DNA
tgtactgctgtgattgttac

SEQ ID NO: 81984 - DNA, 20 bp, synthetic construct
  source 1..20: mol_type = other DNA
ttgtactgctgtgattgtta

SEQ ID NO: 81985 - DNA, 20 bp, synthetic construct
  source 1..20: mol_type = other DNA
attgtactgctgtgattgtt

SEQ ID NO: 81986 - DNA, 20 bp, synthetic construct
  source 1..20: mol_type = other DNA
tattgtactgctgtgattgt

SEQ ID NO: 81987 - DNA, 20 bp, synthetic construct
  source 1..20: mol_type = other DNA
atattgtactgctgtgattg

SEQ ID NO: 81988 - DNA, 20 bp, synthetic construct
  source 1..20: mol_type = other DNA
catattgtactgctgtgatt

SEQ ID NO: 81989 - DNA, 20 bp, synthetic construct
  source 1..20: mol_type = other DNA
tcatattgtactgctgtgat

SEQ ID NO: 81990 - DNA, 20 bp, synthetic construct
  source 1..20: mol_type = other DNA
atcatattgtactgctgtga

SEQ ID NO: 81991 - DNA, 20 bp, synthetic construct
  source 1..20: mol_type = other DNA
aatcatattgtactgctgtg

SEQ ID NO: 81992 - DNA, 20 bp, synthetic construct
  source 1..20: mol_type = other DNA
aaatcatattgtactgctgt

SEQ ID NO: 81993 - DNA, 20 bp, synthetic construct
  source 1..20: mol_type = other DNA
caaatcatattgtactgctg

SEQ ID NO: 81994 - DNA, 20 bp, synthetic construct
  source 1..20: mol_type = other DNA
gcaaatcatattgtactgct

SEQ ID NO: 81995 - DNA, 20 bp, synthetic construct
  source 1..20: mol_type = other DNA
agcaaatcatattgtactgc

SEQ ID NO: 81996 - DNA, 20 bp, synthetic construct
  source 1..20: mol_type = other DNA
aagcaaatcatattgtactg

SEQ ID NO: 81997 - DNA, 20 bp, synthetic construct
  source 1..20: mol_type = other DNA
caagcaaatcatattgtact

SEQ ID NO: 81998 - DNA, 20 bp, synthetic construct
  source 1..20: mol_type = other DNA
ccaagcaaatcatattgtac

SEQ ID NO: 81999 - DNA, 20 bp, synthetic construct
  source 1..20: mol_type = other DNA
accaagcaaatcatattgta

SEQ ID NO: 82000 - DNA, 20 bp, synthetic construct
  source 1..20: mol_type = other DNA
aaccaagcaaatcatattgt

SEQ ID NO: 82001 - DNA, 20 bp, synthetic construct
  source 1..20: mol_type = other DNA
taaccaagcaaatcatattg

SEQ ID NO: 82002 - DNA, 20 bp, synthetic construct
  source 1..20: mol_type = other DNA
ttaaccaagcaaatcatatt

SEQ ID NO: 82003 - DNA, 20 bp, synthetic construct
  source 1..20: mol_type = other DNA
tttaaccaagcaaatcatat

SEQ ID NO: 82004 - DNA, 20 bp, synthetic construct
  source 1..20: mol_type = other DNA
ctttaaccaagcaaatcata

SEQ ID NO: 82005 - DNA, 20 bp, synthetic construct
  source 1..20: mol_type = other DNA
cctttaaccaagcaaatcat

SEQ ID NO: 82006 - DNA, 20 bp, synthetic construct
  source 1..20: mol_type = other DNA
gcctttaaccaagcaaatca

SEQ ID NO: 82007 - DNA, 20 bp, synthetic construct
  source 1..20: mol_type = other DNA
tgcctttaaccaagcaaatc

SEQ ID NO: 82008 - DNA, 20 bp, synthetic construct
  source 1..20: mol_type = other DNA
atgcctttaaccaagcaaat

SEQ ID NO: 82009 - DNA, 20 bp, synthetic construct
  source 1..20: mol_type = other DNA
catgcctttaaccaagcaaa

SEQ ID NO: 82010 - DNA, 20 bp, synthetic construct
  source 1..20: mol_type = other DNA
acatgcctttaaccaagcaa

SEQ ID NO: 82011 - DNA, 20 bp, synthetic construct
  source 1..20: mol_type = other DNA
aacatgcctttaaccaagca

SEQ ID NO: 82012 - DNA, 20 bp, synthetic construct
  source 1..20: mol_type = other DNA
gaacatgcctttaaccaagc

SEQ ID NO: 82013 - DNA, 20 bp, synthetic construct
  source 1..20: mol_type = other DNA
tgaacatgcctttaaccaag

SEQ ID NO: 82014 - DNA, 20 bp, synthetic construct
  source 1..20: mol_type = other DNA
ttgaacatgcctttaaccaa

SEQ ID NO: 82015 - DNA, 20 bp, synthetic construct
  source 1..20: mol_type = other DNA
tttgaacatgcctttaacca

SEQ ID NO: 82016 - DNA, 20 bp, synthetic construct
  source 1..20: mol_type = other DNA
ctttgaacatgcctttaacc

SEQ ID NO: 82017 - DNA, 20 bp, synthetic construct
  source 1..20: mol_type = other DNA
actttgaacatgcctttaac

SEQ ID NO: 82018 - DNA, 20 bp, synthetic construct
  source 1..20: mol_type = other DNA
tactttgaacatgcctttaa

SEQ ID NO: 82019 - DNA, 20 bp, synthetic construct
  source 1..20: mol_type = other DNA
gtactttgaacatgccttta

SEQ ID NO: 82020 - DNA, 20 bp, synthetic construct
  source 1..20: mol_type = other DNA
agtactttgaacatgccttt

SEQ ID NO: 82021 - DNA, 20 bp, synthetic construct
  source 1..20: mol_type = other DNA
tagtactttgaacatgcctt

SEQ ID NO: 82022 - DNA, 20 bp, synthetic construct
  source 1..20: mol_type = other DNA
ctagtactttgaacatgcct

SEQ ID NO: 82023 - DNA, 20 bp, synthetic construct
  source 1..20: mol_type = other DNA
cctagtactttgaacatgcc

SEQ ID NO: 82024 - DNA, 20 bp, synthetic construct
  source 1..20: mol_type = other DNA
tcctagtactttgaacatgc

SEQ ID NO: 82025 - DNA, 20 bp, synthetic construct
  source 1..20: mol_type = other DNA
ttcctagtactttgaacatg

SEQ ID NO: 82026 - DNA, 20 bp, synthetic construct
  source 1..20: mol_type = other DNA
gttcctagtactttgaacat

SEQ ID NO: 82027 - DNA, 20 bp, synthetic construct
  source 1..20: mol_type = other DNA
tgttcctagtactttgaaca

SEQ ID NO: 82028 - DNA, 20 bp, synthetic construct
  source 1..20: mol_type = other DNA
atgttcctagtactttgaac

SEQ ID NO: 82029 - DNA, 20 bp, synthetic construct
  source 1..20: mol_type = other DNA
tatgttcctagtactttgaa

SEQ ID NO: 82030 - DNA, 20 bp, synthetic construct
  source 1..20: mol_type = other DNA
gtatgttcctagtactttga

SEQ ID NO: 82031 - DNA, 20 bp, synthetic construct
  source 1..20: mol_type = other DNA
tgtatgttcctagtactttg

SEQ ID NO: 82032 - DNA, 20 bp, synthetic construct
  source 1..20: mol_type = other DNA
ctgtatgttcctagtacttt

SEQ ID NO: 82033 - DNA, 20 bp, synthetic construct
  source 1..20: mol_type = other DNA
tctgtatgttcctagtactt

SEQ ID NO: 82034 - DNA, 20 bp, synthetic construct
  source 1..20: mol_type = other DNA
ttctgtatgttcctagtact

SEQ ID NO: 82035 - DNA, 20 bp, synthetic construct
  source 1..20: mol_type = other DNA
attctgtatgttcctagtac

SEQ ID NO: 82036 - DNA, 20 bp, synthetic construct
  source 1..20: mol_type = other DNA
cattctgtatgttcctagta

SEQ ID NO: 82037 - DNA, 20 bp, synthetic construct
  source 1..20: mol_type = other DNA
tcattctgtatgttcctagt

SEQ ID NO: 82038 - DNA, 20 bp, synthetic construct
  source 1..20: mol_type = other DNA
ctcattctgtatgttcctag

SEQ ID NO: 82039 - DNA, 20 bp, synthetic construct
  source 1..20: mol_type = other DNA
cctcattctgtatgttccta

SEQ ID NO: 82040 - DNA, 20 bp, synthetic construct
  source 1..20: mol_type = other DNA
tcctcattctgtatgttcct

SEQ ID NO: 82041 - DNA, 20 bp, synthetic construct
  source 1..20: mol_type = other DNA
ctcctcattctgtatgttcc

SEQ ID NO: 82042 - DNA, 20 bp, synthetic construct
  source 1..20: mol_type = other DNA
cctcctcattctgtatgttc

SEQ ID NO: 82043 - DNA, 20 bp, synthetic construct
  source 1..20: mol_type = other DNA
tcctcctcattctgtatgtt

SEQ ID NO: 82044 - DNA, 20 bp, synthetic construct
  source 1..20: mol_type = other DNA
ctcctcctcattctgtatgt

SEQ ID NO: 82045 - DNA, 20 bp, synthetic construct
  source 1..20: mol_type = other DNA
gctcctcctcattctgtatg

SEQ ID NO: 82046 - DNA, 20 bp, synthetic construct
  source 1..20: mol_type = other DNA
agctcctcctcattctgtat

SEQ ID NO: 82047 - DNA, 20 bp, synthetic construct
  source 1..20: mol_type = other DNA
tagctcctcctcattctgta

SEQ ID NO: 82048 - DNA, 20 bp, synthetic construct
  source 1..20: mol_type = other DNA
ctagctcctcctcattctgt

SEQ ID NO: 82049 - DNA, 20 bp, synthetic construct
  source 1..20: mol_type = other DNA
gctagctcctcctcattctg

SEQ ID NO: 82050 - DNA, 20 bp, synthetic construct
  source 1..20: mol_type = other DNA
tgctagctcctcctcattct

SEQ ID NO: 82051 - DNA, 20 bp, synthetic construct
  source 1..20: mol_type = other DNA
atgctagctcctcctcattc

SEQ ID NO: 82052 - DNA, 20 bp, synthetic construct
  source 1..20: mol_type = other DNA
tatgctagctcctcctcatt

SEQ ID NO: 82053 - DNA, 20 bp, synthetic construct
  source 1..20: mol_type = other DNA
ttatgctagctcctcctcat

SEQ ID NO: 82054 - DNA, 20 bp, synthetic construct
  source 1..20: mol_type = other DNA
gttatgctagctcctcctca

SEQ ID NO: 82055 - DNA, 20 bp, synthetic construct
  source 1..20: mol_type = other DNA
ggttatgctagctcctcctc

SEQ ID NO: 82056 - DNA, 20 bp, synthetic construct
  source 1..20: mol_type = other DNA
aggttatgctagctcctcct

SEQ ID NO: 82057 - DNA, 20 bp, synthetic construct
  source 1..20: mol_type = other DNA
caggttatgctagctcctcc

SEQ ID NO: 82058 - DNA, 20 bp, synthetic construct
  source 1..20: mol_type = other DNA
acaggttatgctagctcctc

SEQ ID NO: 82059 - DNA, 20 bp, synthetic construct
  source 1..20: mol_type = other DNA
tacaggttatgctagctcct

SEQ ID NO: 82060 - DNA, 20 bp, synthetic construct
  source 1..20: mol_type = other DNA
ctacaggttatgctagctcc

SEQ ID NO: 82061 - DNA, 20 bp, synthetic construct
  source 1..20: mol_type = other DNA
tctacaggttatgctagctc

SEQ ID NO: 82062 - DNA, 20 bp, synthetic construct
  source 1..20: mol_type = other DNA
ctctacaggttatgctagct

SEQ ID NO: 82063 - DNA, 20 bp, synthetic construct
  source 1..20: mol_type = other DNA
actctacaggttatgctagc

SEQ ID NO: 82064 - DNA, 20 bp, synthetic construct
  source 1..20: mol_type = other DNA
gactctacaggttatgctag

SEQ ID NO: 82065 - DNA, 20 bp, synthetic construct
  source 1..20: mol_type = other DNA
tgactctacaggttatgcta

SEQ ID NO: 82066 - DNA, 20 bp, synthetic construct
  source 1..20: mol_type = other DNA
ctgactctacaggttatgct

SEQ ID NO: 82067 - DNA, 20 bp, synthetic construct
  source 1..20: mol_type = other DNA
tctgactctacaggttatgc

SEQ ID NO: 82068 - DNA, 20 bp, synthetic construct
  source 1..20: mol_type = other DNA
ctctgactctacaggttatg

SEQ ID NO: 82069 - DNA, 20 bp, synthetic construct
  source 1..20: mol_type = other DNA
tctctgactctacaggttat

SEQ ID NO: 82070 - DNA, 20 bp, synthetic construct
  source 1..20: mol_type = other DNA
ttctctgactctacaggtta

SEQ ID NO: 82071 - DNA, 20 bp, synthetic construct
  source 1..20: mol_type = other DNA
tttctctgactctacaggtt

SEQ ID NO: 82072 - DNA, 20 bp, synthetic construct
  source 1..20: mol_type = other DNA
ttttctctgactctacaggt

SEQ ID NO: 82073 - DNA, 20 bp, synthetic construct
  source 1..20: mol_type = other DNA
gttttctctgactctacagg

SEQ ID NO: 82074 - DNA, 20 bp, synthetic construct
  source 1..20: mol_type = other DNA
ggttttctctgactctacag

SEQ ID NO: 82075 - DNA, 20 bp, synthetic construct
  source 1..20: mol_type = other DNA
aggttttctctgactctaca

SEQ ID NO: 82076 - DNA, 20 bp, synthetic construct
  source 1..20: mol_type = other DNA
gaggttttctctgactctac

SEQ ID NO: 82077 - DNA, 20 bp, synthetic construct
  source 1..20: mol_type = other DNA
tgaggttttctctgactcta

SEQ ID NO: 82078 - DNA, 20 bp, synthetic construct
  source 1..20: mol_type = other DNA
atgaggttttctctgactct

SEQ ID NO: 82079 - DNA, 20 bp, synthetic construct
  source 1..20: mol_type = other DNA
aatgaggttttctctgactc

SEQ ID NO: 82080 - DNA, 20 bp, synthetic construct
  source 1..20: mol_type = other DNA
caatgaggttttctctgact

SEQ ID NO: 82081 - DNA, 20 bp, synthetic construct
  source 1..20: mol_type = other DNA
tcaatgaggttttctctgac

SEQ ID NO: 82082 - DNA, 20 bp, synthetic construct
  source 1..20: mol_type = other DNA
ctcaatgaggttttctctga

SEQ ID NO: 82083 - DNA, 20 bp, synthetic construct
  source 1..20: mol_type = other DNA
cctcaatgaggttttctctg

SEQ ID NO: 82084 - DNA, 20 bp, synthetic construct
  source 1..20: mol_type = other DNA
tcctcaatgaggttttctct

SEQ ID NO: 82085 - DNA, 20 bp, synthetic construct
  source 1..20: mol_type = other DNA
ctcctcaatgaggttttctc

SEQ ID NO: 82086 - DNA, 20 bp, synthetic construct
  source 1..20: mol_type = other DNA
cctcctcaatgaggttttct

SEQ ID NO: 82087 - DNA, 20 bp, synthetic construct
  source 1..20: mol_type = other DNA
acctcctcaatgaggttttc

SEQ ID NO: 82088 - DNA, 20 bp, synthetic construct
  source 1..20: mol_type = other DNA
cacctcctcaatgaggtttt

SEQ ID NO: 82089 - DNA, 20 bp, synthetic construct
  source 1..20: mol_type = other DNA
tcacctcctcaatgaggttt

SEQ ID NO: 82090 - DNA, 20 bp, synthetic construct
  source 1..20: mol_type = other DNA
gtcacctcctcaatgaggtt

SEQ ID NO: 82091 - DNA, 20 bp, synthetic construct
  source 1..20: mol_type = other DNA
tgtcacctcctcaatgaggt

SEQ ID NO: 82092 - DNA, 20 bp, synthetic construct
  source 1..20: mol_type = other DNA
atgtcacctcctcaatgagg

SEQ ID NO: 82093 - DNA, 20 bp, synthetic construct
  source 1..20: mol_type = other DNA
aatgtcacctcctcaatgag

SEQ ID NO: 82094 - DNA, 20 bp, synthetic construct
  source 1..20: mol_type = other DNA
aaatgtcacctcctcaatga

SEQ ID NO: 82095 - DNA, 20 bp, synthetic construct
  source 1..20: mol_type = other DNA
aaaatgtcacctcctcaatg

SEQ ID NO: 82096 - DNA, 20 bp, synthetic construct
  source 1..20: mol_type = other DNA
caaaatgtcacctcctcaat

SEQ ID NO: 82097 - DNA, 20 bp, synthetic construct
  source 1..20: mol_type = other DNA
acaaaatgtcacctcctcaa

SEQ ID NO: 82098 - DNA, 20 bp, synthetic construct
  source 1..20: mol_type = other DNA
cacaaaatgtcacctcctca

SEQ ID NO: 82099 - DNA, 20 bp, synthetic construct
  source 1..20: mol_type = other DNA
tcacaaaatgtcacctcctc

SEQ ID NO: 82100 - DNA, 20 bp, synthetic construct
  source 1..20: mol_type = other DNA
atcacaaaatgtcacctcct

SEQ ID NO: 82101 - DNA, 20 bp, synthetic construct
  source 1..20: mol_type = other DNA
tatcacaaaatgtcacctcc

SEQ ID NO: 82102 - DNA, 20 bp, synthetic construct
  source 1..20: mol_type = other DNA
ttatcacaaaatgtcacctc

SEQ ID NO: 82103 - DNA, 20 bp, synthetic construct
  source 1..20: mol_type = other DNA
cttatcacaaaatgtcacct

SEQ ID NO: 82104 - DNA, 20 bp, synthetic construct
  source 1..20: mol_type = other DNA
tcttatcacaaaatgtcacc

SEQ ID NO: 82105 - DNA, 20 bp, synthetic construct
  source 1..20: mol_type = other DNA
atcttatcacaaaatgtcac

SEQ ID NO: 82106 - DNA, 20 bp, synthetic construct
  source 1..20: mol_type = other DNA
tatcttatcacaaaatgtca

SEQ ID NO: 82107 - DNA, 20 bp, synthetic construct
  source 1..20: mol_type = other DNA
ttatcttatcacaaaatgtc

SEQ ID NO: 82108 - DNA, 20 bp, synthetic construct
  source 1..20: mol_type = other DNA
attatcttatcacaaaatgt

SEQ ID NO: 82109 - DNA, 20 bp, synthetic construct
  source 1..20: mol_type = other DNA
tattatcttatcacaaaatg

SEQ ID NO: 82110 - DNA, 20 bp, synthetic construct
  source 1..20: mol_type = other DNA
ctattatcttatcacaaaat

SEQ ID NO: 82111 - DNA, 20 bp, synthetic construct
  source 1..20: mol_type = other DNA
cctattatcttatcacaaaa

SEQ ID NO: 82112 - DNA, 20 bp, synthetic construct
  source 1..20: mol_type = other DNA
ccctattatcttatcacaaa

SEQ ID NO: 82113 - DNA, 20 bp, synthetic construct
  source 1..20: mol_type = other DNA
accctattatcttatcacaa

SEQ ID NO: 82114 - DNA, 20 bp, synthetic construct
  source 1..20: mol_type = other DNA
gaccctattatcttatcaca

SEQ ID NO: 82115 - DNA, 20 bp, synthetic construct
  source 1..20: mol_type = other DNA
agaccctattatcttatcac

SEQ ID NO: 82116 - DNA, 20 bp, synthetic construct
  source 1..20: mol_type = other DNA
aagaccctattatcttatca

SEQ ID NO: 82117 - DNA, 20 bp, synthetic construct
  source 1..20: mol_type = other DNA
aaagaccctattatcttatc

SEQ ID NO: 82118 - DNA, 20 bp, synthetic construct
  source 1..20: mol_type = other DNA
caaagaccctattatcttat

SEQ ID NO: 82119 - DNA, 20 bp, synthetic construct
  source 1..20: mol_type = other DNA
tcaaagaccctattatctta

SEQ ID NO: 82120 - DNA, 20 bp, synthetic construct
  source 1..20: mol_type = other DNA
gtcaaagaccctattatctt

SEQ ID NO: 82121 - DNA, 20 bp, synthetic construct
  source 1..20: mol_type = other DNA
tgtcaaagaccctattatct

SEQ ID NO: 82122 - DNA, 20 bp, synthetic construct
  source 1..20: mol_type = other DNA
gtgtcaaagaccctattatc

SEQ ID NO: 82123 - DNA, 20 bp, synthetic construct
  source 1..20: mol_type = other DNA
agtgtcaaagaccctattat

SEQ ID NO: 82124 - DNA, 20 bp, synthetic construct
  source 1..20: mol_type = other DNA
aagtgtcaaagaccctatta

SEQ ID NO: 82125 - DNA, 20 bp, synthetic construct
  source 1..20: mol_type = other DNA
taagtgtcaaagaccctatt

SEQ ID NO: 82126 - DNA, 20 bp, synthetic construct
  source 1..20: mol_type = other DNA
ctaagtgtcaaagaccctat

SEQ ID NO: 82127 - DNA, 20 bp, synthetic construct
  source 1..20: mol_type = other DNA
tctaagtgtcaaagacccta

SEQ ID NO: 82128 - DNA, 20 bp, synthetic construct
  source 1..20: mol_type = other DNA
ctctaagtgtcaaagaccct

SEQ ID NO: 82129 - DNA, 20 bp, synthetic construct
  source 1..20: mol_type = other DNA
tctctaagtgtcaaagaccc

SEQ ID NO: 82130 - DNA, 20 bp, synthetic construct
  source 1..20: mol_type = other DNA
ttctctaagtgtcaaagacc

SEQ ID NO: 82131 - DNA, 20 bp, synthetic construct
  source 1..20: mol_type = other DNA
cttctctaagtgtcaaagac

SEQ ID NO: 82132 - DNA, 20 bp, synthetic construct
  source 1..20: mol_type = other DNA
tcttctctaagtgtcaaaga

SEQ ID NO: 82133 - DNA, 20 bp, synthetic construct
  source 1..20: mol_type = other DNA
ctcttctctaagtgtcaaag

SEQ ID NO: 82134 - DNA, 20 bp, synthetic construct
  source 1..20: mol_type = other DNA
actcttctctaagtgtcaaa

SEQ ID NO: 82135 - DNA, 20 bp, synthetic construct
  source 1..20: mol_type = other DNA
aactcttctctaagtgtcaa

SEQ ID NO: 82136 - DNA, 20 bp, synthetic construct
  source 1..20: mol_type = other DNA
caactcttctctaagtgtca

SEQ ID NO: 82137 - DNA, 20 bp, synthetic construct
  source 1..20: mol_type = other DNA
ccaactcttctctaagtgtc

SEQ ID NO: 82138 - DNA, 20 bp, synthetic construct
  source 1..20: mol_type = other DNA
cccaactcttctctaagtgt

SEQ ID NO: 82139 - DNA, 20 bp, synthetic construct
  source 1..20: mol_type = other DNA
tcccaactcttctctaagtg

SEQ ID NO: 82140 - DNA, 20 bp, synthetic construct
  source 1..20: mol_type = other DNA
ctcccaactcttctctaagt

SEQ ID NO: 82141 - DNA, 20 bp, synthetic construct
  source 1..20: mol_type = other DNA
tctcccaactcttctctaag

SEQ ID NO: 82142 - DNA, 20 bp, synthetic construct
  source 1..20: mol_type = other DNA
ttctcccaactcttctctaa

SEQ ID NO: 82143 - DNA, 20 bp, synthetic construct
  source 1..20: mol_type = other DNA
cttctcccaactcttctcta

SEQ ID NO: 82144 - DNA, 20 bp, synthetic construct
  source 1..20: mol_type = other DNA
tcttctcccaactcttctct

SEQ ID NO: 82145 - DNA, 20 bp, synthetic construct
  source 1..20: mol_type = other DNA
ctcttctcccaactcttctc

SEQ ID NO: 82146 - DNA, 20 bp, synthetic construct
  source 1..20: mol_type = other DNA
actcttctcccaactcttct

SEQ ID NO: 82147 - DNA, 20 bp, synthetic construct
  source 1..20: mol_type = other DNA
aactcttctcccaactcttc

SEQ ID NO: 82148 - DNA, 20 bp, synthetic construct
  source 1..20: mol_type = other DNA
aaactcttctcccaactctt

SEQ ID NO: 82149 - DNA, 20 bp, synthetic construct
  source 1..20: mol_type = other DNA
taaactcttctcccaactct

SEQ ID NO: 82150 - DNA, 20 bp, synthetic construct
  source 1..20: mol_type = other DNA
ataaactcttctcccaactc

SEQ ID NO: 82151 - DNA, 20 bp, synthetic construct
  source 1..20: mol_type = other DNA
gataaactcttctcccaact

SEQ ID NO: 82152 - DNA, 20 bp, synthetic construct
  source 1..20: mol_type = other DNA
tgataaactcttctcccaac

SEQ ID NO: 82153 - DNA, 20 bp, synthetic construct
  source 1..20: mol_type = other DNA
gtgataaactcttctcccaa

SEQ ID NO: 82154 - DNA, 20 bp, synthetic construct
  source 1..20: mol_type = other DNA
ggtgataaactcttctccca

SEQ ID NO: 82155 - DNA, 20 bp, synthetic construct
  source 1..20: mol_type = other DNA
aggtgataaactcttctccc

SEQ ID NO: 82156 - DNA, 20 bp, synthetic construct
  source 1..20: mol_type = other DNA
caggtgataaactcttctcc

SEQ ID NO: 82157 - DNA, 20 bp, synthetic construct
  source 1..20: mol_type = other DNA
tcaggtgataaactcttctc

SEQ ID NO: 82158 - DNA, 20 bp, synthetic construct
  source 1..20: mol_type = other DNA
atcaggtgataaactcttct

SEQ ID NO: 82159 - DNA, 20 bp, synthetic construct
  source 1..20: mol_type = other DNA
catcaggtgataaactcttc

SEQ ID NO: 82160 - DNA, 20 bp, synthetic construct
  source 1..20: mol_type = other DNA
tcatcaggtgataaactctt

SEQ ID NO: 82161 - DNA, 20 bp, synthetic construct
  source 1..20: mol_type = other DNA
ttcatcaggtgataaactct

SEQ ID NO: 82162 - DNA, 20 bp, synthetic construct
  source 1..20: mol_type = other DNA
tttcatcaggtgataaactc

SEQ ID NO: 82163 - DNA, 20 bp, synthetic construct
  source 1..20: mol_type = other DNA
ttttcatcaggtgataaact

SEQ ID NO: 82164 - DNA, 20 bp, synthetic construct
  source 1..20: mol_type = other DNA
cttttcatcaggtgataaac

SEQ ID NO: 82165 - DNA, 20 bp, synthetic construct
  source 1..20: mol_type = other DNA
gcttttcatcaggtgataaa

SEQ ID NO: 82166 - DNA, 20 bp, synthetic construct
  source 1..20: mol_type = other DNA
ggcttttcatcaggtgataa

SEQ ID NO: 82167 - DNA, 20 bp, synthetic construct
  source 1..20: mol_type = other DNA
tggcttttcatcaggtgata

SEQ ID NO: 82168 - DNA, 20 bp, synthetic construct
  source 1..20: mol_type = other DNA
atggcttttcatcaggtgat

SEQ ID NO: 82169 - DNA, 20 bp, synthetic construct
  source 1..20: mol_type = other DNA
catggcttttcatcaggtga

SEQ ID NO: 82170 - DNA, 20 bp, synthetic construct
  source 1..20: mol_type = other DNA
acatggcttttcatcaggtg

SEQ ID NO: 82171 - DNA, 20 bp, synthetic construct
  source 1..20: mol_type = other DNA
tacatggcttttcatcaggt

SEQ ID NO: 82172 - DNA, 20 bp, synthetic construct
  source 1..20: mol_type = other DNA
gtacatggcttttcatcagg

SEQ ID NO: 82173 - DNA, 20 bp, synthetic construct
  source 1..20: mol_type = other DNA
tgtacatggcttttcatcag

SEQ ID NO: 82174 - DNA, 20 bp, synthetic construct
  source 1..20: mol_type = other DNA
ttgtacatggcttttcatca

SEQ ID NO: 82175 - DNA, 20 bp, synthetic construct
  source 1..20: mol_type = other DNA
cttgtacatggcttttcatc

SEQ ID NO: 82176 - DNA, 20 bp, synthetic construct
  source 1..20: mol_type = other DNA
gcttgtacatggcttttcat

SEQ ID NO: 82177 - DNA, 20 bp, synthetic construct
  source 1..20: mol_type = other DNA
tgcttgtacatggcttttca

SEQ ID NO: 82178 - DNA, 20 bp, synthetic construct
  source 1..20: mol_type = other DNA
atgcttgtacatggcttttc

SEQ ID NO: 82179 - DNA, 20 bp, synthetic construct
  source 1..20: mol_type = other DNA
catgcttgtacatggctttt

SEQ ID NO: 82180 - DNA, 20 bp, synthetic construct
  source 1..20: mol_type = other DNA
ccatgcttgtacatggcttt

SEQ ID NO: 82181 - DNA, 20 bp, synthetic construct
  source 1..20: mol_type = other DNA
gccatgcttgtacatggctt

SEQ ID NO: 82182 - DNA, 20 bp, synthetic construct
  source 1..20: mol_type = other DNA
agccatgcttgtacatggct

SEQ ID NO: 82183 - DNA, 20 bp, synthetic construct
  source 1..20: mol_type = other DNA
tagccatgcttgtacatggc

SEQ ID NO: 82184 - DNA, 20 bp, synthetic construct
  source 1..20: mol_type = other DNA
atagccatgcttgtacatgg

SEQ ID NO: 82185 - DNA, 20 bp, synthetic construct
  source 1..20: mol_type = other DNA
catagccatgcttgtacatg

SEQ ID NO: 82186 - DNA, 20 bp, synthetic construct
  source 1..20: mol_type = other DNA
tcatagccatgcttgtacat

SEQ ID NO: 82187 - DNA, 20 bp, synthetic construct
  source 1..20: mol_type = other DNA
ctcatagccatgcttgtaca

SEQ ID NO: 82188 - DNA, 20 bp, synthetic construct
  source 1..20: mol_type = other DNA
tctcatagccatgcttgtac

SEQ ID NO: 82189 - DNA, 20 bp, synthetic construct
  source 1..20: mol_type = other DNA
ttctcatagccatgcttgta

SEQ ID NO: 82190 - DNA, 20 bp, synthetic construct
  source 1..20: mol_type = other DNA
tttctcatagccatgcttgt

SEQ ID NO: 82191 - DNA, 20 bp, synthetic construct
  source 1..20: mol_type = other DNA
ttttctcatagccatgcttg

SEQ ID NO: 82192 - DNA, 20 bp, synthetic construct
  source 1..20: mol_type = other DNA
attttctcatagccatgctt

SEQ ID NO: 82193 - DNA, 20 bp, synthetic construct
  source 1..20: mol_type = other DNA
aattttctcatagccatgct

SEQ ID NO: 82194 - DNA, 20 bp, synthetic construct
  source 1..20: mol_type = other DNA
aaattttctcatagccatgc

SEQ ID NO: 82195 - DNA, 20 bp, synthetic construct
  source 1..20: mol_type = other DNA
caaattttctcatagccatg

SEQ ID NO: 82196 - DNA, 20 bp, synthetic construct
  source 1..20: mol_type = other DNA
ccaaattttctcatagccat

SEQ ID NO: 82197 - DNA, 20 bp, synthetic construct
  source 1..20: mol_type = other DNA
gccaaattttctcatagcca

SEQ ID NO: 82198 - DNA, 20 bp, synthetic construct
  source 1..20: mol_type = other DNA
ggccaaattttctcatagcc

SEQ ID NO: 82199 - DNA, 20 bp, synthetic construct
  source 1..20: mol_type = other DNA
tggccaaattttctcatagc

SEQ ID NO: 82200 - DNA, 20 bp, synthetic construct
  source 1..20: mol_type = other DNA
ctggccaaattttctcatag

SEQ ID NO: 82201 - DNA, 20 bp, synthetic construct
  source 1..20: mol_type = other DNA
gctggccaaattttctcata

SEQ ID NO: 82202 - DNA, 20 bp, synthetic construct
  source 1..20: mol_type = other DNA
agctggccaaattttctcat

SEQ ID NO: 82203 - DNA, 20 bp, synthetic construct
  source 1..20: mol_type = other DNA
gagctggccaaattttctca

SEQ ID NO: 82204 - DNA, 20 bp, synthetic construct
  source 1..20: mol_type = other DNA
tgagctggccaaattttctc

SEQ ID NO: 82205 - DNA, 20 bp, synthetic construct
  source 1..20: mol_type = other DNA
ctgagctggccaaattttct

SEQ ID NO: 82206 - DNA, 20 bp, synthetic construct
  source 1..20: mol_type = other DNA
cctgagctggccaaattttc

SEQ ID NO: 82207 - DNA, 20 bp, synthetic construct
  source 1..20: mol_type = other DNA
tcctgagctggccaaatttt

SEQ ID NO: 82208 - DNA, 20 bp, synthetic construct
  source 1..20: mol_type = other DNA
ctcctgagctggccaaattt

SEQ ID NO: 82209 - DNA, 20 bp, synthetic construct
  source 1..20: mol_type = other DNA
tctcctgagctggccaaatt

SEQ ID NO: 82210 - DNA, 20 bp, synthetic construct
  source 1..20: mol_type = other DNA
ctctcctgagctggccaaat

SEQ ID NO: 82211 - DNA, 20 bp, synthetic construct
  source 1..20: mol_type = other DNA
cctctcctgagctggccaaa

SEQ ID NO: 82212 - DNA, 20 bp, synthetic construct
  source 1..20: mol_type = other DNA
ccctctcctgagctggccaa

SEQ ID NO: 82213 - DNA, 20 bp, synthetic construct
  source 1..20: mol_type = other DNA
gccctctcctgagctggcca

SEQ ID NO: 82214 - DNA, 20 bp, synthetic construct
  source 1..20: mol_type = other DNA
agccctctcctgagctggcc

SEQ ID NO: 82215 - DNA, 20 bp, synthetic construct
  source 1..20: mol_type = other DNA
cagccctctcctgagctggc

SEQ ID NO: 82216 - DNA, 20 bp, synthetic construct
  source 1..20: mol_type = other DNA
ccagccctctcctgagctgg

SEQ ID NO: 82217 - DNA, 20 bp, synthetic construct
  source 1..20: mol_type = other DNA
accagccctctcctgagctg

SEQ ID NO: 82218 - DNA, 20 bp, synthetic construct
  source 1..20: mol_type = other DNA
aaccagccctctcctgagct

SEQ ID NO: 82219 - DNA, 20 bp, synthetic construct
  source 1..20: mol_type = other DNA
caaccagccctctcctgagc

SEQ ID NO: 82220 - DNA, 20 bp, synthetic construct
  source 1..20: mol_type = other DNA
acaaccagccctctcctgag

SEQ ID NO: 82221 - DNA, 20 bp, synthetic construct
  source 1..20: mol_type = other DNA
aacaaccagccctctcctga

SEQ ID NO: 82222 - DNA, 20 bp, synthetic construct
  source 1..20: mol_type = other DNA
caacaaccagccctctcctg

SEQ ID NO: 82223 - DNA, 20 bp, synthetic construct
  source 1..20: mol_type = other DNA
gcaacaaccagccctctcct

SEQ ID NO: 82224 - DNA, 20 bp, synthetic construct
  source 1..20: mol_type = other DNA
tgcaacaaccagccctctcc

SEQ ID NO: 82225 - DNA, 20 bp, synthetic construct
  source 1..20: mol_type = other DNA
atgcaacaaccagccctctc

SEQ ID NO: 82226 - DNA, 20 bp, synthetic construct
  source 1..20: mol_type = other DNA
catgcaacaaccagccctct

SEQ ID NO: 82227 - DNA, 20 bp, synthetic construct
  source 1..20: mol_type = other DNA
acatgcaacaaccagccctc

SEQ ID NO: 82228 - DNA, 20 bp, synthetic construct
  source 1..20: mol_type = other DNA
cacatgcaacaaccagccct

SEQ ID NO: 82229 - DNA, 20 bp, synthetic construct
  source 1..20: mol_type = other DNA
acacatgcaacaaccagccc

SEQ ID NO: 82230 - DNA, 20 bp, synthetic construct
  source 1..20: mol_type = other DNA
gacacatgcaacaaccagcc

SEQ ID NO: 82231 - DNA, 20 bp, synthetic construct
  source 1..20: mol_type = other DNA
agacacatgcaacaaccagc

SEQ ID NO: 82232 - DNA, 20 bp, synthetic construct
  source 1..20: mol_type = other DNA
cagacacatgcaacaaccag

SEQ ID NO: 82233 - DNA, 20 bp, synthetic construct
  source 1..20: mol_type = other DNA
ccagacacatgcaacaacca

SEQ ID NO: 82234 - DNA, 20 bp, synthetic construct
  source 1..20: mol_type = other DNA
tccagacacatgcaacaacc

SEQ ID NO: 82235 - DNA, 20 bp, synthetic construct
  source 1..20: mol_type = other DNA
ttccagacacatgcaacaac

SEQ ID NO: 82236 - DNA, 20 bp, synthetic construct
  source 1..20: mol_type = other DNA
gttccagacacatgcaacaa

SEQ ID NO: 82237 - DNA, 20 bp, synthetic construct
  source 1..20: mol_type = other DNA
tgttccagacacatgcaaca

SEQ ID NO: 82238 - DNA, 20 bp, synthetic construct
  source 1..20: mol_type = other DNA
gtgttccagacacatgcaac

SEQ ID NO: 82239 - DNA, 20 bp, synthetic construct
  source 1..20: mol_type = other DNA
tgtgttccagacacatgcaa

SEQ ID NO: 82240 - DNA, 20 bp, synthetic construct
  source 1..20: mol_type = other DNA
ctgtgttccagacacatgca

SEQ ID NO: 82241 - DNA, 20 bp, synthetic construct
  source 1..20: mol_type = other DNA
cctgtgttccagacacatgc

SEQ ID NO: 82242 - DNA, 20 bp, synthetic construct
  source 1..20: mol_type = other DNA
tcctgtgttccagacacatg

SEQ ID NO: 82243 - DNA, 20 bp, synthetic construct
  source 1..20: mol_type = other DNA
atcctgtgttccagacacat

SEQ ID NO: 82244 - DNA, 20 bp, synthetic construct
  source 1..20: mol_type = other DNA
gatcctgtgttccagacaca

SEQ ID NO: 82245 - DNA, 20 bp, synthetic construct
  source 1..20: mol_type = other DNA
agatcctgtgttccagacac

SEQ ID NO: 82246 - DNA, 20 bp, synthetic construct
  source 1..20: mol_type = other DNA
cagatcctgtgttccagaca

SEQ ID NO: 82247 - DNA, 20 bp, synthetic construct
  source 1..20: mol_type = other DNA
acagatcctgtgttccagac

SEQ ID NO: 82248 - DNA, 20 bp, synthetic construct
  source 1..20: mol_type = other DNA
cacagatcctgtgttccaga

SEQ ID NO: 82249 - DNA, 20 bp, synthetic construct
  source 1..20: mol_type = other DNA
acacagatcctgtgttccag

SEQ ID NO: 82250 - DNA, 20 bp, synthetic construct
  source 1..20: mol_type = other DNA
gacacagatcctgtgttcca

SEQ ID NO: 82251 - DNA, 20 bp, synthetic construct
  source 1..20: mol_type = other DNA
tgacacagatcctgtgttcc

SEQ ID NO: 82252 - DNA, 20 bp, synthetic construct
  source 1..20: mol_type = other DNA
ctgacacagatcctgtgttc

SEQ ID NO: 82253 - DNA, 20 bp, synthetic construct
  source 1..20: mol_type = other DNA
cctgacacagatcctgtgtt

SEQ ID NO: 82254 - DNA, 20 bp, synthetic construct
  source 1..20: mol_type = other DNA
acctgacacagatcctgtgt

SEQ ID NO: 82255 - DNA, 20 bp, synthetic construct
  source 1..20: mol_type = other DNA
cacctgacacagatcctgtg

SEQ ID NO: 82256 - DNA, 20 bp, synthetic construct
  source 1..20: mol_type = other DNA
gcacctgacacagatcctgt

SEQ ID NO: 82257 - DNA, 20 bp, synthetic construct
  source 1..20: mol_type = other DNA
tgcacctgacacagatcctg

SEQ ID NO: 82258 - DNA, 20 bp, synthetic construct
  source 1..20: mol_type = other DNA
ctgcacctgacacagatcct

SEQ ID NO: 82259 - DNA, 20 bp, synthetic construct
  source 1..20: mol_type = other DNA
gctgcacctgacacagatcc

SEQ ID NO: 82260 - DNA, 20 bp, synthetic construct
  source 1..20: mol_type = other DNA
tgctgcacctgacacagatc

SEQ ID NO: 82261 - DNA, 20 bp, synthetic construct
  source 1..20: mol_type = other DNA
ctgctgcacctgacacagat

SEQ ID NO: 82262 - DNA, 20 bp, synthetic construct
  source 1..20: mol_type = other DNA
actgctgcacctgacacaga

SEQ ID NO: 82263 - DNA, 20 bp, synthetic construct
  source 1..20: mol_type = other DNA
cactgctgcacctgacacag

SEQ ID NO: 82264 - DNA, 20 bp, synthetic construct
  source 1..20: mol_type = other DNA
ccactgctgcacctgacaca

SEQ ID NO: 82265 - DNA, 20 bp, synthetic construct
  source 1..20: mol_type = other DNA
gccactgctgcacctgacac

SEQ ID NO: 82266 - DNA, 20 bp, synthetic construct
  source 1..20: mol_type = other DNA
tgccactgctgcacctgaca

SEQ ID NO: 82267 - DNA, 20 bp, synthetic construct
  source 1..20: mol_type = other DNA
ctgccactgctgcacctgac

SEQ ID NO: 82268 - DNA, 20 bp, synthetic construct
  source 1..20: mol_type = other DNA
actgccactgctgcacctga

SEQ ID NO: 82269 - DNA, 20 bp, synthetic construct
  source 1..20: mol_type = other DNA
aactgccactgctgcacctg

SEQ ID NO: 82270 - DNA, 20 bp, synthetic construct
  source 1..20: mol_type = other DNA
caactgccactgctgcacct

SEQ ID NO: 82271 - DNA, 20 bp, synthetic construct
  source 1..20: mol_type = other DNA
tcaactgccactgctgcacc

SEQ ID NO: 82272 - DNA, 20 bp, synthetic construct
  source 1..20: mol_type = other DNA
atcaactgccactgctgcac

SEQ ID NO: 82273 - DNA, 20 bp, synthetic construct
  source 1..20: mol_type = other DNA
tatcaactgccactgctgca

SEQ ID NO: 82274 - DNA, 20 bp, synthetic construct
  source 1..20: mol_type = other DNA
ctatcaactgccactgctgc

SEQ ID NO: 82275 - DNA, 20 bp, synthetic construct
  source 1..20: mol_type = other DNA
actatcaactgccactgctg

SEQ ID NO: 82276 - DNA, 20 bp, synthetic construct
  source 1..20: mol_type = other DNA
tactatcaactgccactgct

SEQ ID NO: 82277 - DNA, 20 bp, synthetic construct
  source 1..20: mol_type = other DNA
ctactatcaactgccactgc

SEQ ID NO: 82278 - DNA, 20 bp, synthetic construct
  source 1..20: mol_type = other DNA
cctactatcaactgccactg

SEQ ID NO: 82279 - DNA, 20 bp, synthetic construct
  source 1..20: mol_type = other DNA
tcctactatcaactgccact

SEQ ID NO: 82280 - DNA, 20 bp, synthetic construct
  source 1..20: mol_type = other DNA
ttcctactatcaactgccac

SEQ ID NO: 82281 - DNA, 20 bp, synthetic construct
  source 1..20: mol_type = other DNA
gttcctactatcaactgcca

SEQ ID NO: 82282 - DNA, 20 bp, synthetic construct
  source 1..20: mol_type = other DNA
agttcctactatcaactgcc

SEQ ID NO: 82283 - DNA, 20 bp, synthetic construct
  source 1..20: mol_type = other DNA
cagttcctactatcaactgc

SEQ ID NO: 82284 - DNA, 20 bp, synthetic construct
  source 1..20: mol_type = other DNA
tcagttcctactatcaactg

SEQ ID NO: 82285 - DNA, 20 bp, synthetic construct
  source 1..20: mol_type = other DNA
ctcagttcctactatcaact

SEQ ID NO: 82286 - DNA, 20 bp, synthetic construct
  source 1..20: mol_type = other DNA
cctcagttcctactatcaac

SEQ ID NO: 82287 - DNA, 20 bp, synthetic construct
  source 1..20: mol_type = other DNA
acctcagttcctactatcaa

SEQ ID NO: 82288 - DNA, 20 bp, synthetic construct
  source 1..20: mol_type = other DNA
gacctcagttcctactatca

SEQ ID NO: 82289 - DNA, 20 bp, synthetic construct
  source 1..20: mol_type = other DNA
tgacctcagttcctactatc

SEQ ID NO: 82290 - DNA, 20 bp, synthetic construct
  source 1..20: mol_type = other DNA
atgacctcagttcctactat

SEQ ID NO: 82291 - DNA, 20 bp, synthetic construct
  source 1..20: mol_type = other DNA
aatgacctcagttcctacta

SEQ ID NO: 82292 - DNA, 20 bp, synthetic construct
  source 1..20: mol_type = other DNA
taatgacctcagttcctact

SEQ ID NO: 82293 - DNA, 20 bp, synthetic construct
  source 1..20: mol_type = other DNA
ttaatgacctcagttcctac

SEQ ID NO: 82294 - DNA, 20 bp, synthetic construct
  source 1..20: mol_type = other DNA
tttaatgacctcagttccta

SEQ ID NO: 82295 - DNA, 20 bp, synthetic construct
  source 1..20: mol_type = other DNA
ctttaatgacctcagttcct

SEQ ID NO: 82296 - DNA, 20 bp, synthetic construct
  source 1..20: mol_type = other DNA
cctttaatgacctcagttcc

SEQ ID NO: 82297 - DNA, 20 bp, synthetic construct
  source 1..20: mol_type = other DNA
tcctttaatgacctcagttc

SEQ ID NO: 82298 - DNA, 20 bp, synthetic construct
  source 1..20: mol_type = other DNA
gtcctttaatgacctcagtt

SEQ ID NO: 82299 - DNA, 20 bp, synthetic construct
  source 1..20: mol_type = other DNA
agtcctttaatgacctcagt

SEQ ID NO: 82300 - DNA, 20 bp, synthetic construct
  source 1..20: mol_type = other DNA
aagtcctttaatgacctcag

SEQ ID NO: 82301 - DNA, 20 bp, synthetic construct
  source 1..20: mol_type = other DNA
caagtcctttaatgacctca

SEQ ID NO: 82302 - DNA, 20 bp, synthetic construct
  source 1..20: mol_type = other DNA
ccaagtcctttaatgacctc

SEQ ID NO: 82303 - DNA, 20 bp, synthetic construct
  source 1..20: mol_type = other DNA
gccaagtcctttaatgacct

SEQ ID NO: 82304 - DNA, 20 bp, synthetic construct
  source 1..20: mol_type = other DNA
tgccaagtcctttaatgacc

SEQ ID NO: 82305 - DNA, 20 bp, synthetic construct
  source 1..20: mol_type = other DNA
atgccaagtcctttaatgac

SEQ ID NO: 82306 - DNA, 20 bp, synthetic construct
  source 1..20: mol_type = other DNA
catgccaagtcctttaatga

SEQ ID NO: 82307 - DNA, 20 bp, synthetic construct
  source 1..20: mol_type = other DNA
acatgccaagtcctttaatg

SEQ ID NO: 82308 - DNA, 20 bp, synthetic construct
  source 1..20: mol_type = other DNA
gacatgccaagtcctttaat

SEQ ID NO: 82309 - DNA, 20 bp, synthetic construct
  source 1..20: mol_type = other DNA
tgacatgccaagtcctttaa

SEQ ID NO: 82310 - DNA, 20 bp, synthetic construct
  source 1..20: mol_type = other DNA
atgacatgccaagtccttta

SEQ ID NO: 82311 - DNA, 20 bp, synthetic construct
  source 1..20: mol_type = other DNA
catgacatgccaagtccttt

SEQ ID NO: 82312 - DNA, 20 bp, synthetic construct
  source 1..20: mol_type = other DNA
gcatgacatgccaagtcctt

SEQ ID NO: 82313 - DNA, 20 bp, synthetic construct
  source 1..20: mol_type = other DNA
agcatgacatgccaagtcct

SEQ ID NO: 82314 - DNA, 20 bp, synthetic construct
  source 1..20: mol_type = other DNA
tagcatgacatgccaagtcc

SEQ ID NO: 82315 - DNA, 20 bp, synthetic construct
  source 1..20: mol_type = other DNA
ttagcatgacatgccaagtc

SEQ ID NO: 82316 - DNA, 20 bp, synthetic construct
  source 1..20: mol_type = other DNA
tttagcatgacatgccaagt

SEQ ID NO: 82317 - DNA, 20 bp, synthetic construct
  source 1..20: mol_type = other DNA
ctttagcatgacatgccaag

SEQ ID NO: 82318 - DNA, 20 bp, synthetic construct
  source 1..20: mol_type = other DNA
tctttagcatgacatgccaa

SEQ ID NO: 82319 - DNA, 20 bp, synthetic construct
  source 1..20: mol_type = other DNA
ctctttagcatgacatgcca

SEQ ID NO: 82320 - DNA, 20 bp, synthetic construct
  source 1..20: mol_type = other DNA
gctctttagcatgacatgcc

SEQ ID NO: 82321 - DNA, 20 bp, synthetic construct
  source 1..20: mol_type = other DNA
tgctctttagcatgacatgc

SEQ ID NO: 82322 - DNA, 20 bp, synthetic construct
  source 1..20: mol_type = other DNA
gtgctctttagcatgacatg

SEQ ID NO: 82323 - DNA, 20 bp, synthetic construct
  source 1..20: mol_type = other DNA
ggtgctctttagcatgacat

SEQ ID NO: 82324 - DNA, 20 bp, synthetic construct
  source 1..20: mol_type = other DNA
gggtgctctttagcatgaca

SEQ ID NO: 82325 - DNA, 20 bp, synthetic construct
  source 1..20: mol_type = other DNA
agggtgctctttagcatgac

SEQ ID NO: 82326 - DNA, 20 bp, synthetic construct
  source 1..20: mol_type = other DNA
cagggtgctctttagcatga

SEQ ID NO: 82327 - DNA, 20 bp, synthetic construct
  source 1..20: mol_type = other DNA
acagggtgctctttagcatg

SEQ ID NO: 82328 - DNA, 20 bp, synthetic construct
  source 1..20: mol_type = other DNA
aacagggtgctctttagcat

SEQ ID NO: 82329 - DNA, 20 bp, synthetic construct
  source 1..20: mol_type = other DNA
caacagggtgctctttagca

SEQ ID NO: 82330 - DNA, 20 bp, synthetic construct
  source 1..20: mol_type = other DNA
ccaacagggtgctctttagc

SEQ ID NO: 82331 - DNA, 20 bp, synthetic construct
  source 1..20: mol_type = other DNA
tccaacagggtgctctttag

SEQ ID NO: 82332 - DNA, 20 bp, synthetic construct
  source 1..20: mol_type = other DNA
ttccaacagggtgctcttta

SEQ ID NO: 82333 - DNA, 20 bp, synthetic construct
  source 1..20: mol_type = other DNA
cttccaacagggtgctcttt

SEQ ID NO: 82334 - DNA, 20 bp, synthetic construct
  source 1..20: mol_type = other DNA
ccttccaacagggtgctctt

SEQ ID NO: 82335 - DNA, 20 bp, synthetic construct
  source 1..20: mol_type = other DNA
tccttccaacagggtgctct

SEQ ID NO: 82336 - DNA, 20 bp, synthetic construct
  source 1..20: mol_type = other DNA
ctccttccaacagggtgctc

SEQ ID NO: 82337 - DNA, 20 bp, synthetic construct
  source 1..20: mol_type = other DNA
tctccttccaacagggtgct

SEQ ID NO: 82338 - DNA, 20 bp, synthetic construct
  source 1..20: mol_type = other DNA
atctccttccaacagggtgc

SEQ ID NO: 82339 - DNA, 20 bp, synthetic construct
  source 1..20: mol_type = other DNA
catctccttccaacagggtg

SEQ ID NO: 82340 - DNA, 20 bp, synthetic construct
  source 1..20: mol_type = other DNA
ccatctccttccaacagggt

SEQ ID NO: 82341 - DNA, 20 bp, synthetic construct
  source 1..20: mol_type = other DNA
cccatctccttccaacaggg

SEQ ID NO: 82342 - DNA, 20 bp, synthetic construct
  source 1..20: mol_type = other DNA
ccccatctccttccaacagg

SEQ ID NO: 82343 - DNA, 20 bp, synthetic construct
  source 1..20: mol_type = other DNA
accccatctccttccaacag

SEQ ID NO: 82344 - DNA, 20 bp, synthetic construct
  source 1..20: mol_type = other DNA
caccccatctccttccaaca

SEQ ID NO: 82345 - DNA, 20 bp, synthetic construct
  source 1..20: mol_type = other DNA
tcaccccatctccttccaac

SEQ ID NO: 82346 - DNA, 20 bp, synthetic construct
  source 1..20: mol_type = other DNA
ttcaccccatctccttccaa

SEQ ID NO: 82347 - DNA, 20 bp, synthetic construct
  source 1..20: mol_type = other DNA
attcaccccatctccttcca

SEQ ID NO: 82348 - DNA, 20 bp, synthetic construct
  source 1..20: mol_type = other DNA
tattcaccccatctccttcc

SEQ ID NO: 82349 - DNA, 20 bp, synthetic construct
  source 1..20: mol_type = other DNA
ttattcaccccatctccttc

SEQ ID NO: 82350 - DNA, 20 bp, synthetic construct
  source 1..20: mol_type = other DNA
tttattcaccccatctcctt

SEQ ID NO: 82351 - DNA, 20 bp, synthetic construct
  source 1..20: mol_type = other DNA
gtttattcaccccatctcct

SEQ ID NO: 82352 - DNA, 20 bp, synthetic construct
  source 1..20: mol_type = other DNA
ggtttattcaccccatctcc

SEQ ID NO: 82353 - DNA, 20 bp, synthetic construct
  source 1..20: mol_type = other DNA
gggtttattcaccccatctc

SEQ ID NO: 82354 - DNA, 20 bp, synthetic construct
  source 1..20: mol_type = other DNA
agggtttattcaccccatct

SEQ ID NO: 82355 - DNA, 20 bp, synthetic construct
  source 1..20: mol_type = other DNA
cagggtttattcaccccatc

SEQ ID NO: 82356 - DNA, 20 bp, synthetic construct
  source 1..20: mol_type = other DNA
ccagggtttattcaccccat

SEQ ID NO: 82357 - DNA, 20 bp, synthetic construct
  source 1..20: mol_type = other DNA
cccagggtttattcacccca

SEQ ID NO: 82358 - DNA, 20 bp, synthetic construct
  source 1..20: mol_type = other DNA
ccccagggtttattcacccc

SEQ ID NO: 82359 - DNA, 20 bp, synthetic construct
  source 1..20: mol_type = other DNA
gccccagggtttattcaccc

SEQ ID NO: 82360 - DNA, 20 bp, synthetic construct
  source 1..20: mol_type = other DNA
tgccccagggtttattcacc

SEQ ID NO: 82361 - DNA, 20 bp, synthetic construct
  source 1..20: mol_type = other DNA
atgccccagggtttattcac

SEQ ID NO: 82362 - DNA, 20 bp, synthetic construct
  source 1..20: mol_type = other DNA
aatgccccagggtttattca

SEQ ID NO: 82363 - DNA, 20 bp, synthetic construct
  source 1..20: mol_type = other DNA
caatgccccagggtttattc

SEQ ID NO: 82364 - DNA, 20 bp, synthetic construct
  source 1..20: mol_type = other DNA
tcaatgccccagggtttatt

SEQ ID NO: 82365 - DNA, 20 bp, synthetic construct
  source 1..20: mol_type = other DNA
ctcaatgccccagggtttat

SEQ ID NO: 82366 - DNA, 20 bp, synthetic construct
  source 1..20: mol_type = other DNA
cctcaatgccccagggttta

SEQ ID NO: 82367 - DNA, 20 bp, synthetic construct
  source 1..20: mol_type = other DNA
tcctcaatgccccagggttt

SEQ ID NO: 82368 - DNA, 20 bp, synthetic construct
  source 1..20: mol_type = other DNA
gtcctcaatgccccagggtt

SEQ ID NO: 82369 - DNA, 20 bp, synthetic construct
  source 1..20: mol_type = other DNA
agtcctcaatgccccagggt

SEQ ID NO: 82370 - DNA, 20 bp, synthetic construct
  source 1..20: mol_type = other DNA
cagtcctcaatgccccaggg

SEQ ID NO: 82371 - DNA, 20 bp, synthetic construct
  source 1..20: mol_type = other DNA
ccagtcctcaatgccccagg

SEQ ID NO: 82372 - DNA, 20 bp, synthetic construct
  source 1..20: mol_type = other DNA
gccagtcctcaatgccccag

SEQ ID NO: 82373 - DNA, 20 bp, synthetic construct
  source 1..20: mol_type = other DNA
agccagtcctcaatgcccca

SEQ ID NO: 82374 - DNA, 20 bp, synthetic construct
  source 1..20: mol_type = other DNA
cagccagtcctcaatgcccc

SEQ ID NO: 82375 - DNA, 20 bp, synthetic construct
  source 1..20: mol_type = other DNA
tcagccagtcctcaatgccc

SEQ ID NO: 82376 - DNA, 20 bp, synthetic construct
  source 1..20: mol_type = other DNA
ctcagccagtcctcaatgcc

SEQ ID NO: 82377 - DNA, 20 bp, synthetic construct
  source 1..20: mol_type = other DNA
tctcagccagtcctcaatgc

SEQ ID NO: 82378 - DNA, 20 bp, synthetic construct
  source 1..20: mol_type = other DNA
gtctcagccagtcctcaatg

SEQ ID NO: 82379 - DNA, 20 bp, synthetic construct
  source 1..20: mol_type = other DNA
tgtctcagccagtcctcaat

SEQ ID NO: 82380 - DNA, 20 bp, synthetic construct
  source 1..20: mol_type = other DNA
gtgtctcagccagtcctcaa

SEQ ID NO: 82381 - DNA, 20 bp, synthetic construct
  source 1..20: mol_type = other DNA
tgtgtctcagccagtcctca

SEQ ID NO: 82382 - DNA, 20 bp, synthetic construct
  source 1..20: mol_type = other DNA
ctgtgtctcagccagtcctc

SEQ ID NO: 82383 - DNA, 20 bp, synthetic construct
  source 1..20: mol_type = other DNA
tctgtgtctcagccagtcct

SEQ ID NO: 82384 - DNA, 20 bp, synthetic construct
  source 1..20: mol_type = other DNA
ctctgtgtctcagccagtcc

SEQ ID NO: 82385 - DNA, 20 bp, synthetic construct
  source 1..20: mol_type = other DNA
tctctgtgtctcagccagtc

SEQ ID NO: 82386 - DNA, 20 bp, synthetic construct
  source 1..20: mol_type = other DNA
ttctctgtgtctcagccagt

SEQ ID NO: 82387 - DNA, 20 bp, synthetic construct
  source 1..20: mol_type = other DNA
gttctctgtgtctcagccag

SEQ ID NO: 82388 - DNA, 20 bp, synthetic construct
  source 1..20: mol_type = other DNA
tgttctctgtgtctcagcca

SEQ ID NO: 82389 - DNA, 20 bp, synthetic construct
  source 1..20: mol_type = other DNA
ctgttctctgtgtctcagcc

SEQ ID NO: 82390 - DNA, 20 bp, synthetic construct
  source 1..20: mol_type = other DNA
actgttctctgtgtctcagc

SEQ ID NO: 82391 - DNA, 20 bp, synthetic construct
  source 1..20: mol_type = other DNA
aactgttctctgtgtctcag

SEQ ID NO: 82392 - DNA, 20 bp, synthetic construct
  source 1..20: mol_type = other DNA
taactgttctctgtgtctca

SEQ ID NO: 82393 - DNA, 20 bp, synthetic construct
  source 1..20: mol_type = other DNA
ctaactgttctctgtgtctc

SEQ ID NO: 82394 - DNA, 20 bp, synthetic construct
  source 1..20: mol_type = other DNA
actaactgttctctgtgtct

SEQ ID NO: 82395 - DNA, 20 bp, synthetic construct
  source 1..20: mol_type = other DNA
cactaactgttctctgtgtc

SEQ ID NO: 82396 - DNA, 20 bp, synthetic construct
  source 1..20: mol_type = other DNA
gcactaactgttctctgtgt

SEQ ID NO: 82397 - DNA, 20 bp, synthetic construct
  source 1..20: mol_type = other DNA
tgcactaactgttctctgtg

SEQ ID NO: 82398 - DNA, 20 bp, synthetic construct
  source 1..20: mol_type = other DNA
gtgcactaactgttctctgt

SEQ ID NO: 82399 - DNA, 20 bp, synthetic construct
  source 1..20: mol_type = other DNA
agtgcactaactgttctctg

SEQ ID NO: 82400 - DNA, 20 bp, synthetic construct
  source 1..20: mol_type = other DNA
cagtgcactaactgttctct

SEQ ID NO: 82401 - DNA, 20 bp, synthetic construct
  source 1..20: mol_type = other DNA
tcagtgcactaactgttctc

SEQ ID NO: 82402 - DNA, 20 bp, synthetic construct
  source 1..20: mol_type = other DNA
ttcagtgcactaactgttct

SEQ ID NO: 82403 - DNA, 20 bp, synthetic construct
  source 1..20: mol_type = other DNA
tttcagtgcactaactgttc

SEQ ID NO: 82404 - DNA, 20 bp, synthetic construct
  source 1..20: mol_type = other DNA
atttcagtgcactaactgtt

SEQ ID NO: 82405 - DNA, 20 bp, synthetic construct
  source 1..20: mol_type = other DNA
tatttcagtgcactaactgt

SEQ ID NO: 82406 - DNA, 20 bp, synthetic construct
  source 1..20: mol_type = other DNA
ctatttcagtgcactaactg

SEQ ID NO: 82407 - DNA, 20 bp, synthetic construct
  source 1..20: mol_type = other DNA
actatttcagtgcactaact

SEQ ID NO: 82408 - DNA, 20 bp, synthetic construct
  source 1..20: mol_type = other DNA
aactatttcagtgcactaac

SEQ ID NO: 82409 - DNA, 20 bp, synthetic construct
  source 1..20: mol_type = other DNA
gaactatttcagtgcactaa

SEQ ID NO: 82410 - DNA, 20 bp, synthetic construct
  source 1..20: mol_type = other DNA
tgaactatttcagtgcacta

SEQ ID NO: 82411 - DNA, 20 bp, synthetic construct
  source 1..20: mol_type = other DNA
ttgaactatttcagtgcact

SEQ ID NO: 82412 - DNA, 20 bp, synthetic construct
  source 1..20: mol_type = other DNA
gttgaactatttcagtgcac

SEQ ID NO: 82413 - DNA, 20 bp, synthetic construct
  source 1..20: mol_type = other DNA
agttgaactatttcagtgca

SEQ ID NO: 82414 - DNA, 20 bp, synthetic construct
  source 1..20: mol_type = other DNA
cagttgaactatttcagtgc

SEQ ID NO: 82415 - DNA, 20 bp, synthetic construct
  source 1..20: mol_type = other DNA
acagttgaactatttcagtg

SEQ ID NO: 82416 - DNA, 20 bp, synthetic construct
  source 1..20: mol_type = other DNA
cacagttgaactatttcagt

SEQ ID NO: 82417 - DNA, 20 bp, synthetic construct
  source 1..20: mol_type = other DNA
tcacagttgaactatttcag

SEQ ID NO: 82418 - DNA, 20 bp, synthetic construct
  source 1..20: mol_type = other DNA
ctcacagttgaactatttca

SEQ ID NO: 82419 - DNA, 20 bp, synthetic construct
  source 1..20: mol_type = other DNA
tctcacagttgaactatttc

SEQ ID NO: 82420 - DNA, 20 bp, synthetic construct
  source 1..20: mol_type = other DNA
ttctcacagttgaactattt

SEQ ID NO: 82421 - DNA, 20 bp, synthetic construct
  source 1..20: mol_type = other DNA
attctcacagttgaactatt

SEQ ID NO: 82422 - DNA, 20 bp, synthetic construct
  source 1..20: mol_type = other DNA
aattctcacagttgaactat

SEQ ID NO: 82423 - DNA, 20 bp, synthetic construct
  source 1..20: mol_type = other DNA
aaattctcacagttgaacta

SEQ ID NO: 82424 - DNA, 20 bp, synthetic construct
  source 1..20: mol_type = other DNA
caaattctcacagttgaact

SEQ ID NO: 82425 - DNA, 20 bp, synthetic construct
  source 1..20: mol_type = other DNA
ccaaattctcacagttgaac

SEQ ID NO: 82426 - DNA, 20 bp, synthetic construct
  source 1..20: mol_type = other DNA
accaaattctcacagttgaa

SEQ ID NO: 82427 - DNA, 20 bp, synthetic construct
  source 1..20: mol_type = other DNA
taccaaattctcacagttga

SEQ ID NO: 82428 - DNA, 20 bp, synthetic construct
  source 1..20: mol_type = other DNA
ttaccaaattctcacagttg

SEQ ID NO: 82429 - DNA, 20 bp, synthetic construct
  source 1..20: mol_type = other DNA
gttaccaaattctcacagtt

SEQ ID NO: 82430 - DNA, 20 bp, synthetic construct
  source 1..20: mol_type = other DNA
ggttaccaaattctcacagt

SEQ ID NO: 82431 - DNA, 20 bp, synthetic construct
  source 1..20: mol_type = other DNA
tggttaccaaattctcacag

SEQ ID NO: 82432 - DNA, 20 bp, synthetic construct
  source 1..20: mol_type = other DNA
gtggttaccaaattctcaca

SEQ ID NO: 82433 - DNA, 20 bp, synthetic construct
  source 1..20: mol_type = other DNA
ggtggttaccaaattctcac

SEQ ID NO: 82434 - DNA, 20 bp, synthetic construct
  source 1..20: mol_type = other DNA
aggtggttaccaaattctca

SEQ ID NO: 82435 - DNA, 20 bp, synthetic construct
  source 1..20: mol_type = other DNA
taggtggttaccaaattctc

SEQ ID NO: 82436 - DNA, 20 bp, synthetic construct
  source 1..20: mol_type = other DNA
ctaggtggttaccaaattct

SEQ ID NO: 82437 - DNA, 20 bp, synthetic construct
  source 1..20: mol_type = other DNA
actaggtggttaccaaattc

SEQ ID NO: 82438 - DNA, 20 bp, synthetic construct
  source 1..20: mol_type = other DNA
aactaggtggttaccaaatt

SEQ ID NO: 82439 - DNA, 20 bp, synthetic construct
  source 1..20: mol_type = other DNA
taactaggtggttaccaaat

SEQ ID NO: 82440 - DNA, 20 bp, synthetic construct
  source 1..20: mol_type = other DNA
ttaactaggtggttaccaaa

SEQ ID NO: 82441 - DNA, 20 bp, synthetic construct
  source 1..20: mol_type = other DNA
cttaactaggtggttaccaa

SEQ ID NO: 82442 - DNA, 20 bp, synthetic construct
  source 1..20: mol_type = other DNA
ccttaactaggtggttacca

SEQ ID NO: 82443 - DNA, 20 bp, synthetic construct
  source 1..20: mol_type = other DNA
cccttaactaggtggttacc

SEQ ID NO: 82444 - DNA, 20 bp, synthetic construct
  source 1..20: mol_type = other DNA
tcccttaactaggtggttac

SEQ ID NO: 82445 - DNA, 20 bp, synthetic construct
  source 1..20: mol_type = other DNA
atcccttaactaggtggtta

SEQ ID NO: 82446 - DNA, 20 bp, synthetic construct
  source 1..20: mol_type = other DNA
catcccttaactaggtggtt

SEQ ID NO: 82447 - DNA, 20 bp, synthetic construct
  source 1..20: mol_type = other DNA
tcatcccttaactaggtggt

SEQ ID NO: 82448 - DNA, 20 bp, synthetic construct
  source 1..20: mol_type = other DNA
ctcatcccttaactaggtgg

SEQ ID NO: 82449 - DNA, 20 bp, synthetic construct
  source 1..20: mol_type = other DNA
gctcatcccttaactaggtg

SEQ ID NO: 82450 - DNA, 20 bp, synthetic construct
  source 1..20: mol_type = other DNA
ggctcatcccttaactaggt

SEQ ID NO: 82451 - DNA, 20 bp, synthetic construct
  source 1..20: mol_type = other DNA
aggctcatcccttaactagg

SEQ ID NO: 82452 - DNA, 20 bp, synthetic construct
  source 1..20: mol_type = other DNA
caggctcatcccttaactag

SEQ ID NO: 82453 - DNA, 20 bp, synthetic construct
  source 1..20: mol_type = other DNA
tcaggctcatcccttaacta

SEQ ID NO: 82454 - DNA, 20 bp, synthetic construct
  source 1..20: mol_type = other DNA
ctcaggctcatcccttaact

SEQ ID NO: 82455 - DNA, 20 bp, synthetic construct
  source 1..20: mol_type = other DNA
cctcaggctcatcccttaac

SEQ ID NO: 82456 - DNA, 20 bp, synthetic construct
  source 1..20: mol_type = other DNA
acctcaggctcatcccttaa

SEQ ID NO: 82457 - DNA, 20 bp, synthetic construct
  source 1..20: mol_type = other DNA
aacctcaggctcatccctta

SEQ ID NO: 82458 - DNA, 20 bp, synthetic construct
  source 1..20: mol_type = other DNA
aaacctcaggctcatccctt

SEQ ID NO: 82459 - DNA, 20 bp, synthetic construct
  source 1..20: mol_type = other DNA
taaacctcaggctcatccct

SEQ ID NO: 82460 - DNA, 20 bp, synthetic construct
  source 1..20: mol_type = other DNA
ataaacctcaggctcatccc

SEQ ID NO: 82461 - DNA, 20 bp, synthetic construct
  source 1..20: mol_type = other DNA
aataaacctcaggctcatcc

SEQ ID NO: 82462 - DNA, 20 bp, synthetic construct
  source 1..20: mol_type = other DNA
aaataaacctcaggctcatc

SEQ ID NO: 82463 - DNA, 20 bp, synthetic construct
  source 1..20: mol_type = other DNA
caaataaacctcaggctcat

SEQ ID NO: 82464 - DNA, 20 bp, synthetic construct
  source 1..20: mol_type = other DNA
tcaaataaacctcaggctca

SEQ ID NO: 82465 - DNA, 20 bp, synthetic construct
  source 1..20: mol_type = other DNA
atcaaataaacctcaggctc

SEQ ID NO: 82466 - DNA, 20 bp, synthetic construct
  source 1..20: mol_type = other DNA
tatcaaataaacctcaggct

SEQ ID NO: 82467 - DNA, 20 bp, synthetic construct
  source 1..20: mol_type = other DNA
ttatcaaataaacctcaggc

SEQ ID NO: 82468 - DNA, 20 bp, synthetic construct
  source 1..20: mol_type = other DNA
gttatcaaataaacctcagg

SEQ ID NO: 82469 - DNA, 20 bp, synthetic construct
  source 1..20: mol_type = other DNA
agttatcaaataaacctcag

SEQ ID NO: 82470 - DNA, 20 bp, synthetic construct
  source 1..20: mol_type = other DNA
tagttatcaaataaacctca

SEQ ID NO: 82471 - DNA, 20 bp, synthetic construct
  source 1..20: mol_type = other DNA
ttagttatcaaataaacctc

SEQ ID NO: 82472 - DNA, 20 bp, synthetic construct
  source 1..20: mol_type = other DNA
cttagttatcaaataaacct

SEQ ID NO: 82473 - DNA, 20 bp, synthetic construct
  source 1..20: mol_type = other DNA
acttagttatcaaataaacc

SEQ ID NO: 82474 - DNA, 20 bp, synthetic construct
  source 1..20: mol_type = other DNA
cacttagttatcaaataaac

SEQ ID NO: 82475 - DNA, 20 bp, synthetic construct
  source 1..20: mol_type = other DNA
tcacttagttatcaaataaa

SEQ ID NO: 82476 - DNA, 20 bp, synthetic construct
  source 1..20: mol_type = other DNA
gtcacttagttatcaaataa

SEQ ID NO: 82477 - DNA, 20 bp, synthetic construct
  source 1..20: mol_type = other DNA
agtcacttagttatcaaata

SEQ ID NO: 82478 - DNA, 20 bp, synthetic construct
  source 1..20: mol_type = other DNA
aagtcacttagttatcaaat

SEQ ID NO: 82479 - DNA, 20 bp, synthetic construct
  source 1..20: mol_type = other DNA
taagtcacttagttatcaaa

SEQ ID NO: 82480 - DNA, 20 bp, synthetic construct
  source 1..20: mol_type = other DNA
ttaagtcacttagttatcaa

SEQ ID NO: 82481 - DNA, 20 bp, synthetic construct
  source 1..20: mol_type = other DNA
attaagtcacttagttatca

SEQ ID NO: 82482 - DNA, 20 bp, synthetic construct
  source 1..20: mol_type = other DNA
cattaagtcacttagttatc

SEQ ID NO: 82483 - DNA, 20 bp, synthetic construct
  source 1..20: mol_type = other DNA
ccattaagtcacttagttat

SEQ ID NO: 82484 - DNA, 20 bp, synthetic construct
  source 1..20: mol_type = other DNA
tccattaagtcacttagtta

SEQ ID NO: 82485 - DNA, 20 bp, synthetic construct
  source 1..20: mol_type = other DNA
atccattaagtcacttagtt

SEQ ID NO: 82486 - DNA, 20 bp, synthetic construct
  source 1..20: mol_type = other DNA
catccattaagtcacttagt

SEQ ID NO: 82487 - DNA, 20 bp, synthetic construct
  source 1..20: mol_type = other DNA
acatccattaagtcacttag

SEQ ID NO: 82488 - DNA, 20 bp, synthetic construct
  source 1..20: mol_type = other DNA
tacatccattaagtcactta

SEQ ID NO: 82489 - DNA, 20 bp, synthetic construct
  source 1..20: mol_type = other DNA
gtacatccattaagtcactt

SEQ ID NO: 82490 - DNA, 20 bp, synthetic construct
  source 1..20: mol_type = other DNA
agtacatccattaagtcact

SEQ ID NO: 82491 - DNA, 20 bp, synthetic construct
  source 1..20: mol_type = other DNA
cagtacatccattaagtcac

SEQ ID NO: 82492 - DNA, 20 bp, synthetic construct
  source 1..20: mol_type = other DNA
ccagtacatccattaagtca

SEQ ID NO: 82493 - DNA, 20 bp, synthetic construct
  source 1..20: mol_type = other DNA
accagtacatccattaagtc

SEQ ID NO: 82494 - DNA, 20 bp, synthetic construct
  source 1..20: mol_type = other DNA
taccagtacatccattaagt

SEQ ID NO: 82495 - DNA, 20 bp, synthetic construct
  source 1..20: mol_type = other DNA
ttaccagtacatccattaag

SEQ ID NO: 82496 - DNA, 20 bp, synthetic construct
  source 1..20: mol_type = other DNA
cttaccagtacatccattaa

SEQ ID NO: 82497 - DNA, 20 bp, synthetic construct
  source 1..20: mol_type = other DNA
tcttaccagtacatccatta

SEQ ID NO: 82498 - DNA, 20 bp, synthetic construct
  source 1..20: mol_type = other DNA
ctcttaccagtacatccatt

SEQ ID NO: 82499 - DNA, 20 bp, synthetic construct
  source 1..20: mol_type = other DNA
tctcttaccagtacatccat

SEQ ID NO: 82500 - DNA, 20 bp, synthetic construct
  source 1..20: mol_type = other DNA
ctctcttaccagtacatcca

SEQ ID NO: 82501 - DNA, 20 bp, synthetic construct
  source 1..20: mol_type = other DNA
tctctcttaccagtacatcc

SEQ ID NO: 82502 - DNA, 20 bp, synthetic construct
  source 1..20: mol_type = other DNA
ctctctcttaccagtacatc

SEQ ID NO: 82503 - DNA, 20 bp, synthetic construct
  source 1..20: mol_type = other DNA
tctctctcttaccagtacat

SEQ ID NO: 82504 - DNA, 20 bp, synthetic construct
  source 1..20: mol_type = other DNA
ctctctctcttaccagtaca

SEQ ID NO: 82505 - DNA, 20 bp, synthetic construct
  source 1..20: mol_type = other DNA
cctctctctcttaccagtac

SEQ ID NO: 82506 - DNA, 20 bp, synthetic construct
  source 1..20: mol_type = other DNA
tcctctctctcttaccagta

SEQ ID NO: 82507 - DNA, 20 bp, synthetic construct
  source 1..20: mol_type = other DNA
ttcctctctctcttaccagt

SEQ ID NO: 82508 - DNA, 20 bp, synthetic construct
  source 1..20: mol_type = other DNA
tttcctctctctcttaccag

SEQ ID NO: 82509 - DNA, 20 bp, synthetic construct
  source 1..20: mol_type = other DNA
gtttcctctctctcttacca

SEQ ID NO: 82510 - DNA, 20 bp, synthetic construct
  source 1..20: mol_type = other DNA
tgtttcctctctctcttacc

SEQ ID NO: 82511 - DNA, 20 bp, synthetic construct
  source 1..20: mol_type = other DNA
atgtttcctctctctcttac

SEQ ID NO: 82512 - DNA, 20 bp, synthetic construct
  source 1..20: mol_type = other DNA
catgtttcctctctctctta

SEQ ID NO: 82513 - DNA, 20 bp, synthetic construct
  source 1..20: mol_type = other DNA
ccatgtttcctctctctctt

SEQ ID NO: 82514 - DNA, 20 bp, synthetic construct
  source 1..20: mol_type = other DNA
tccatgtttcctctctctct

SEQ ID NO: 82515 - DNA, 20 bp, synthetic construct
  source 1..20: mol_type = other DNA
ctccatgtttcctctctctc

SEQ ID NO: 82516 - DNA, 20 bp, synthetic construct
  source 1..20: mol_type = other DNA
gctccatgtttcctctctct

SEQ ID NO: 82517 - DNA, 20 bp, synthetic construct
  source 1..20: mol_type = other DNA
tgctccatgtttcctctctc

SEQ ID NO: 82518 - DNA, 20 bp, synthetic construct
  source 1..20: mol_type = other DNA
ttgctccatgtttcctctct

SEQ ID NO: 82519 - DNA, 20 bp, synthetic construct
  source 1..20: mol_type = other DNA
cttgctccatgtttcctctc

SEQ ID NO: 82520 - DNA, 20 bp, synthetic construct
  source 1..20: mol_type = other DNA
acttgctccatgtttcctct

SEQ ID NO: 82521 - DNA, 20 bp, synthetic construct
  source 1..20: mol_type = other DNA
aacttgctccatgtttcctc

SEQ ID NO: 82522 - DNA, 20 bp, synthetic construct
  source 1..20: mol_type = other DNA
aaacttgctccatgtttcct

SEQ ID NO: 82523 - DNA, 20 bp, synthetic construct
  source 1..20: mol_type = other DNA
caaacttgctccatgtttcc

SEQ ID NO: 82524 - DNA, 20 bp, synthetic construct
  source 1..20: mol_type = other DNA
tcaaacttgctccatgtttc

SEQ ID NO: 82525 - DNA, 20 bp, synthetic construct
  source 1..20: mol_type = other DNA
ctcaaacttgctccatgttt

SEQ ID NO: 82526 - DNA, 20 bp, synthetic construct
  source 1..20: mol_type = other DNA
cctcaaacttgctccatgtt

SEQ ID NO: 82527 - DNA, 20 bp, synthetic construct
  source 1..20: mol_type = other DNA
ccctcaaacttgctccatgt

SEQ ID NO: 82528 - DNA, 20 bp, synthetic construct
  source 1..20: mol_type = other DNA
cccctcaaacttgctccatg

SEQ ID NO: 82529 - DNA, 20 bp, synthetic construct
  source 1..20: mol_type = other DNA
tcccctcaaacttgctccat

SEQ ID NO: 82530 - DNA, 20 bp, synthetic construct
  source 1..20: mol_type = other DNA
ttcccctcaaacttgctcca

SEQ ID NO: 82531 - DNA, 20 bp, synthetic construct
  source 1..20: mol_type = other DNA
tttcccctcaaacttgctcc

SEQ ID NO: 82532 - DNA, 20 bp, synthetic construct
  source 1..20: mol_type = other DNA
ttttcccctcaaacttgctc

SEQ ID NO: 82533 - DNA, 20 bp, synthetic construct
  source 1..20: mol_type = other DNA
tttttcccctcaaacttgct

SEQ ID NO: 82534 - DNA, 20 bp, synthetic construct
  source 1..20: mol_type = other DNA
gtttttcccctcaaacttgc

SEQ ID NO: 82535 - DNA, 20 bp, synthetic construct
  source 1..20: mol_type = other DNA
tgtttttcccctcaaacttg

SEQ ID NO: 82536 - DNA, 20 bp, synthetic construct
  source 1..20: mol_type = other DNA
ctgtttttcccctcaaactt

SEQ ID NO: 82537 - DNA, 20 bp, synthetic construct
  source 1..20: mol_type = other DNA
actgtttttcccctcaaact

SEQ ID NO: 82538 - DNA, 20 bp, synthetic construct
  source 1..20: mol_type = other DNA
cactgtttttcccctcaaac

SEQ ID NO: 82539 - DNA, 20 bp, synthetic construct
  source 1..20: mol_type = other DNA
tcactgtttttcccctcaaa

SEQ ID NO: 82540 - DNA, 20 bp, synthetic construct
  source 1..20: mol_type = other DNA
gtcactgtttttcccctcaa

SEQ ID NO: 82541 - DNA, 20 bp, synthetic construct
  source 1..20: mol_type = other DNA
agtcactgtttttcccctca

SEQ ID NO: 82542 - DNA, 20 bp, synthetic construct
  source 1..20: mol_type = other DNA
gagtcactgtttttcccctc

SEQ ID NO: 82543 - DNA, 20 bp, synthetic construct
  source 1..20: mol_type = other DNA
ggagtcactgtttttcccct

SEQ ID NO: 82544 - DNA, 20 bp, synthetic construct
  source 1..20: mol_type = other DNA
cggagtcactgtttttcccc

SEQ ID NO: 82545 - DNA, 20 bp, synthetic construct
  source 1..20: mol_type = other DNA
acggagtcactgtttttccc

SEQ ID NO: 82546 - DNA, 20 bp, synthetic construct
  source 1..20: mol_type = other DNA
aacggagtcactgtttttcc

SEQ ID NO: 82547 - DNA, 20 bp, synthetic construct
  source 1..20: mol_type = other DNA
aaacggagtcactgtttttc

SEQ ID NO: 82548 - DNA, 20 bp, synthetic construct
  source 1..20: mol_type = other DNA
caaacggagtcactgttttt

SEQ ID NO: 82549 - DNA, 20 bp, synthetic construct
  source 1..20: mol_type = other DNA
acaaacggagtcactgtttt

SEQ ID NO: 82550 - DNA, 20 bp, synthetic construct
  source 1..20: mol_type = other DNA
cacaaacggagtcactgttt

SEQ ID NO: 82551 - DNA, 20 bp, synthetic construct
  source 1..20: mol_type = other DNA
gcacaaacggagtcactgtt

SEQ ID NO: 82552 - DNA, 20 bp, synthetic construct
  source 1..20: mol_type = other DNA
tgcacaaacggagtcactgt

SEQ ID NO: 82553 - DNA, 20 bp, synthetic construct
  source 1..20: mol_type = other DNA
ctgcacaaacggagtcactg

SEQ ID NO: 82554 - DNA, 20 bp, synthetic construct
  source 1..20: mol_type = other DNA
gctgcacaaacggagtcact

SEQ ID NO: 82555 - DNA, 20 bp, synthetic construct
  source 1..20: mol_type = other DNA
agctgcacaaacggagtcac

SEQ ID NO: 82556 - DNA, 20 bp, synthetic construct
  source 1..20: mol_type = other DNA
tagctgcacaaacggagtca

SEQ ID NO: 82557 - DNA, 20 bp, synthetic construct
  source 1..20: mol_type = other DNA
ttagctgcacaaacggagtc

SEQ ID NO: 82558 - DNA, 20 bp, synthetic construct
  source 1..20: mol_type = other DNA
attagctgcacaaacggagt

SEQ ID NO: 82559 - DNA, 20 bp, synthetic construct
  source 1..20: mol_type = other DNA
aattagctgcacaaacggag

SEQ ID NO: 82560 - DNA, 20 bp, synthetic construct
  source 1..20: mol_type = other DNA
caattagctgcacaaacgga

SEQ ID NO: 82561 - DNA, 20 bp, synthetic construct
  source 1..20: mol_type = other DNA
gcaattagctgcacaaacgg

SEQ ID NO: 82562 - DNA, 20 bp, synthetic construct
  source 1..20: mol_type = other DNA
tgcaattagctgcacaaacg

SEQ ID NO: 82563 - DNA, 20 bp, synthetic construct
  source 1..20: mol_type = other DNA
atgcaattagctgcacaaac

SEQ ID NO: 82564 - DNA, 20 bp, synthetic construct
  source 1..20: mol_type = other DNA
tatgcaattagctgcacaaa

SEQ ID NO: 82565 - DNA, 20 bp, synthetic construct
  source 1..20: mol_type = other DNA
atatgcaattagctgcacaa

SEQ ID NO: 82566 - DNA, 20 bp, synthetic construct
  source 1..20: mol_type = other DNA
catatgcaattagctgcaca

SEQ ID NO: 82567 - DNA, 20 bp, synthetic construct
  source 1..20: mol_type = other DNA
acatatgcaattagctgcac

SEQ ID NO: 82568 - DNA, 20 bp, synthetic construct
  source 1..20: mol_type = other DNA
cacatatgcaattagctgca

SEQ ID NO: 82569 - DNA, 20 bp, synthetic construct
  source 1..20: mol_type = other DNA
ccacatatgcaattagctgc

SEQ ID NO: 82570 - DNA, 20 bp, synthetic construct
  source 1..20: mol_type = other DNA
cccacatatgcaattagctg

SEQ ID NO: 82571 - DNA, 20 bp, synthetic construct
  source 1..20: mol_type = other DNA
gcccacatatgcaattagct

SEQ ID NO: 82572 - DNA, 20 bp, synthetic construct
  source 1..20: mol_type = other DNA
agcccacatatgcaattagc

SEQ ID NO: 82573 - DNA, 20 bp, synthetic construct
  source 1..20: mol_type = other DNA
aagcccacatatgcaattag

SEQ ID NO: 82574 - DNA, 20 bp, synthetic construct
  source 1..20: mol_type = other DNA
caagcccacatatgcaatta

SEQ ID NO: 82575 - DNA, 20 bp, synthetic construct
  source 1..20: mol_type = other DNA
acaagcccacatatgcaatt

SEQ ID NO: 82576 - DNA, 20 bp, synthetic construct
  source 1..20: mol_type = other DNA
cacaagcccacatatgcaat

SEQ ID NO: 82577 - DNA, 20 bp, synthetic construct
  source 1..20: mol_type = other DNA
ccacaagcccacatatgcaa

SEQ ID NO: 82578 - DNA, 20 bp, synthetic construct
  source 1..20: mol_type = other DNA
cccacaagcccacatatgca

SEQ ID NO: 82579 - DNA, 20 bp, synthetic construct
  source 1..20: mol_type = other DNA
acccacaagcccacatatgc

SEQ ID NO: 82580 - DNA, 20 bp, synthetic construct
  source 1..20: mol_type = other DNA
gacccacaagcccacatatg

SEQ ID NO: 82581 - DNA, 20 bp, synthetic construct
  source 1..20: mol_type = other DNA
agacccacaagcccacatat

SEQ ID NO: 82582 - DNA, 20 bp, synthetic construct
  source 1..20: mol_type = other DNA
aagacccacaagcccacata

SEQ ID NO: 82583 - DNA, 20 bp, synthetic construct
  source 1..20: mol_type = other DNA
aaagacccacaagcccacat

SEQ ID NO: 82584 - DNA, 20 bp, synthetic construct
  source 1..20: mol_type = other DNA
gaaagacccacaagcccaca

SEQ ID NO: 82585 - DNA, 20 bp, synthetic construct
  source 1..20: mol_type = other DNA
tgaaagacccacaagcccac

SEQ ID NO: 82586 - DNA, 20 bp, synthetic construct
  source 1..20: mol_type = other DNA
atgaaagacccacaagccca

SEQ ID NO: 82587 - DNA, 20 bp, synthetic construct
  source 1..20: mol_type = other DNA
aatgaaagacccacaagccc

SEQ ID NO: 82588 - DNA, 20 bp, synthetic construct
  source 1..20: mol_type = other DNA
aaatgaaagacccacaagcc

SEQ ID NO: 82589 - DNA, 20 bp, synthetic construct
  source 1..20: mol_type = other DNA
taaatgaaagacccacaagc

SEQ ID NO: 82590 - DNA, 20 bp, synthetic construct
  source 1..20: mol_type = other DNA
ataaatgaaagacccacaag

SEQ ID NO: 82591 - DNA, 20 bp, synthetic construct
  source 1..20: mol_type = other DNA
aataaatgaaagacccacaa

SEQ ID NO: 82592 - DNA, 20 bp, synthetic construct
  source 1..20: mol_type = other DNA
gaataaatgaaagacccaca

SEQ ID NO: 82593 - DNA, 20 bp, synthetic construct
  source 1..20: mol_type = other DNA
tgaataaatgaaagacccac

SEQ ID NO: 82594 - DNA, 20 bp, synthetic construct
  source 1..20: mol_type = other DNA
atgaataaatgaaagaccca

SEQ ID NO: 82595 - DNA, 20 bp, synthetic construct
  source 1..20: mol_type = other DNA
tatgaataaatgaaagaccc

SEQ ID NO: 82596 - DNA, 20 bp, synthetic construct
  source 1..20: mol_type = other DNA
ttatgaataaatgaaagacc

SEQ ID NO: 82597 - DNA, 20 bp, synthetic construct
  source 1..20: mol_type = other DNA
tttatgaataaatgaaagac

SEQ ID NO: 82598 - DNA, 20 bp, synthetic construct
  source 1..20: mol_type = other DNA
gtttatgaataaatgaaaga

SEQ ID NO: 82599 - DNA, 20 bp, synthetic construct
  source 1..20: mol_type = other DNA
cgtttatgaataaatgaaag

SEQ ID NO: 82600 - DNA, 20 bp, synthetic construct
  source 1..20: mol_type = other DNA
acgtttatgaataaatgaaa

SEQ ID NO: 82601 - DNA, 20 bp, synthetic construct
  source 1..20: mol_type = other DNA
cacgtttatgaataaatgaa

SEQ ID NO: 82602 - DNA, 20 bp, synthetic construct
  source 1..20: mol_type = other DNA
acacgtttatgaataaatga

SEQ ID NO: 82603 - DNA, 20 bp, synthetic construct
  source 1..20: mol_type = other DNA
aacacgtttatgaataaatg

SEQ ID NO: 82604 - DNA, 20 bp, synthetic construct
  source 1..20: mol_type = other DNA
caacacgtttatgaataaat

SEQ ID NO: 82605 - DNA, 20 bp, synthetic construct
  source 1..20: mol_type = other DNA
tcaacacgtttatgaataaa

SEQ ID NO: 82606 - DNA, 20 bp, synthetic construct
  source 1..20: mol_type = other DNA
ctcaacacgtttatgaataa

SEQ ID NO: 82607 - DNA, 20 bp, synthetic construct
  source 1..20: mol_type = other DNA
tctcaacacgtttatgaata

SEQ ID NO: 82608 - DNA, 20 bp, synthetic construct
  source 1..20: mol_type = other DNA
ttctcaacacgtttatgaat

SEQ ID NO: 82609 - DNA, 20 bp, synthetic construct
  source 1..20: mol_type = other DNA
tttctcaacacgtttatgaa

SEQ ID NO: 82610 - DNA, 20 bp, synthetic construct
  source 1..20: mol_type = other DNA
atttctcaacacgtttatga

SEQ ID NO: 82611 - DNA, 20 bp, synthetic construct
  source 1..20: mol_type = other DNA
tatttctcaacacgtttatg

SEQ ID NO: 82612 - DNA, 20 bp, synthetic construct
  source 1..20: mol_type = other DNA
gtatttctcaacacgtttat

SEQ ID NO: 82613 - DNA, 20 bp, synthetic construct
  source 1..20: mol_type = other DNA
ggtatttctcaacacgttta

SEQ ID NO: 82614 - DNA, 20 bp, synthetic construct
  source 1..20: mol_type = other DNA
aggtatttctcaacacgttt

SEQ ID NO: 82615 - DNA, 20 bp, synthetic construct
  source 1..20: mol_type = other DNA
caggtatttctcaacacgtt

SEQ ID NO: 82616 - DNA, 20 bp, synthetic construct
  source 1..20: mol_type = other DNA
gcaggtatttctcaacacgt

SEQ ID NO: 82617 - DNA, 20 bp, synthetic construct
  source 1..20: mol_type = other DNA
agcaggtatttctcaacacg

SEQ ID NO: 82618 - DNA, 20 bp, synthetic construct
  source 1..20: mol_type = other DNA
tagcaggtatttctcaacac

SEQ ID NO: 82619 - DNA, 20 bp, synthetic construct
  source 1..20: mol_type = other DNA
gtagcaggtatttctcaaca

SEQ ID NO: 82620 - DNA, 20 bp, synthetic construct
  source 1..20: mol_type = other DNA
ggtagcaggtatttctcaac

SEQ ID NO: 82621 - DNA, 20 bp, synthetic construct
  source 1..20: mol_type = other DNA
aggtagcaggtatttctcaa

SEQ ID NO: 82622 - DNA, 20 bp, synthetic construct
  source 1..20: mol_type = other DNA
taggtagcaggtatttctca

SEQ ID NO: 82623 - DNA, 20 bp, synthetic construct
  source 1..20: mol_type = other DNA
ataggtagcaggtatttctc

SEQ ID NO: 82624 - DNA, 20 bp, synthetic construct
  source 1..20: mol_type = other DNA
gataggtagcaggtatttct

SEQ ID NO: 82625 - DNA, 20 bp, synthetic construct
  source 1..20: mol_type = other DNA
agataggtagcaggtatttc

SEQ ID NO: 82626 - DNA, 20 bp, synthetic construct
  source 1..20: mol_type = other DNA
tagataggtagcaggtattt

SEQ ID NO: 82627 - DNA, 20 bp, synthetic construct
  source 1..20: mol_type = other DNA
ctagataggtagcaggtatt

SEQ ID NO: 82628 - DNA, 20 bp, synthetic construct
  source 1..20: mol_type = other DNA
actagataggtagcaggtat

SEQ ID NO: 82629 - DNA, 20 bp, synthetic construct
  source 1..20: mol_type = other DNA
tactagataggtagcaggta

SEQ ID NO: 82630 - DNA, 20 bp, synthetic construct
  source 1..20: mol_type = other DNA
ttactagataggtagcaggt

SEQ ID NO: 82631 - DNA, 20 bp, synthetic construct
  source 1..20: mol_type = other DNA
tttactagataggtagcagg

SEQ ID NO: 82632 - DNA, 20 bp, synthetic construct
  source 1..20: mol_type = other DNA
ctttactagataggtagcag

SEQ ID NO: 82633 - DNA, 20 bp, synthetic construct
  source 1..20: mol_type = other DNA
actttactagataggtagca

SEQ ID NO: 82634 - DNA, 20 bp, synthetic construct
  source 1..20: mol_type = other DNA
tactttactagataggtagc

SEQ ID NO: 82635 - DNA, 20 bp, synthetic construct
  source 1..20: mol_type = other DNA
ttactttactagataggtag

SEQ ID NO: 82636 - DNA, 20 bp, synthetic construct
  source 1..20: mol_type = other DNA
cttactttactagataggta

SEQ ID NO: 82637 - DNA, 20 bp, synthetic construct
  source 1..20: mol_type = other DNA
tcttactttactagataggt

SEQ ID NO: 82638 - DNA, 20 bp, synthetic construct
  source 1..20: mol_type = other DNA
ctcttactttactagatagg

SEQ ID NO: 82639 - DNA, 20 bp, synthetic construct
  source 1..20: mol_type = other DNA
tctcttactttactagatag

SEQ ID NO: 82640 - DNA, 20 bp, synthetic construct
  source 1..20: mol_type = other DNA
atctcttactttactagata

SEQ ID NO: 82641 - DNA, 20 bp, synthetic construct
  source 1..20: mol_type = other DNA
catctcttactttactagat

SEQ ID NO: 82642 - DNA, 20 bp, synthetic construct
  source 1..20: mol_type = other DNA
gcatctcttactttactaga

SEQ ID NO: 82643 - DNA, 20 bp, synthetic construct
  source 1..20: mol_type = other DNA
tgcatctcttactttactag

SEQ ID NO: 82644 - DNA, 20 bp, synthetic construct
  source 1..20: mol_type = other DNA
atgcatctcttactttacta

SEQ ID NO: 82645 - DNA, 20 bp, synthetic construct
  source 1..20: mol_type = other DNA
gatgcatctcttactttact

SEQ ID NO: 82646 - DNA, 20 bp, synthetic construct
  source 1..20: mol_type = other DNA
ggatgcatctcttactttac

SEQ ID NO: 82647 - DNA, 20 bp, synthetic construct
  source 1..20: mol_type = other DNA
aggatgcatctcttacttta

SEQ ID NO: 82648 - DNA, 20 bp, synthetic construct
  source 1..20: mol_type = other DNA
gaggatgcatctcttacttt

SEQ ID NO: 82649 - DNA, 20 bp, synthetic construct
  source 1..20: mol_type = other DNA
agaggatgcatctcttactt

SEQ ID NO: 82650 - DNA, 20 bp, synthetic construct
  source 1..20: mol_type = other DNA
gagaggatgcatctcttact

SEQ ID NO: 82651 - DNA, 20 bp, synthetic construct
  source 1..20: mol_type = other DNA
agagaggatgcatctcttac

SEQ ID NO: 82652 - DNA, 20 bp, synthetic construct
  source 1..20: mol_type = other DNA
aagagaggatgcatctctta

SEQ ID NO: 82653 - DNA, 20 bp, synthetic construct
  source 1..20: mol_type = other DNA
taagagaggatgcatctctt

SEQ ID NO: 82654 - DNA, 20 bp, synthetic construct
  source 1..20: mol_type = other DNA
ttaagagaggatgcatctct

SEQ ID NO: 82655 - DNA, 20 bp, synthetic construct
  source 1..20: mol_type = other DNA
tttaagagaggatgcatctc

SEQ ID NO: 82656 - DNA, 20 bp, synthetic construct
  source 1..20: mol_type = other DNA
ctttaagagaggatgcatct

SEQ ID NO: 82657 - DNA, 20 bp, synthetic construct
  source 1..20: mol_type = other DNA
cctttaagagaggatgcatc

SEQ ID NO: 82658 - DNA, 20 bp, synthetic construct
  source 1..20: mol_type = other DNA
gcctttaagagaggatgcat

SEQ ID NO: 82659 - DNA, 20 bp, synthetic construct
  source 1..20: mol_type = other DNA
tgcctttaagagaggatgca

SEQ ID NO: 82660 - DNA, 20 bp, synthetic construct
  source 1..20: mol_type = other DNA
ctgcctttaagagaggatgc

SEQ ID NO: 82661 - DNA, 20 bp, synthetic construct
  source 1..20: mol_type = other DNA
actgcctttaagagaggatg

SEQ ID NO: 82662 - DNA, 20 bp, synthetic construct
  source 1..20: mol_type = other DNA
gactgcctttaagagaggat

SEQ ID NO: 82663 - DNA, 20 bp, synthetic construct
  source 1..20: mol_type = other DNA
tgactgcctttaagagagga

SEQ ID NO: 82664 - DNA, 20 bp, synthetic construct
  source 1..20: mol_type = other DNA
ctgactgcctttaagagagg

SEQ ID NO: 82665 - DNA, 20 bp, synthetic construct
  source 1..20: mol_type = other DNA
gctgactgcctttaagagag

SEQ ID NO: 82666 - DNA, 20 bp, synthetic construct
  source 1..20: mol_type = other DNA
agctgactgcctttaagaga

SEQ ID NO: 82667 - DNA, 20 bp, synthetic construct
  source 1..20: mol_type = other DNA
aagctgactgcctttaagag

SEQ ID NO: 82668 - DNA, 20 bp, synthetic construct
  source 1..20: mol_type = other DNA
taagctgactgcctttaaga

SEQ ID NO: 82669 - DNA, 20 bp, synthetic construct
  source 1..20: mol_type = other DNA
ctaagctgactgcctttaag

SEQ ID NO: 82670 - DNA, 20 bp, synthetic construct
  source 1..20: mol_type = other DNA
tctaagctgactgcctttaa

SEQ ID NO: 82671 - DNA, 20 bp, synthetic construct
  source 1..20: mol_type = other DNA
ctctaagctgactgccttta

SEQ ID NO: 82672 - DNA, 20 bp, synthetic construct
  source 1..20: mol_type = other DNA
actctaagctgactgccttt

SEQ ID NO: 82673 - DNA, 20 bp, synthetic construct
  source 1..20: mol_type = other DNA
gactctaagctgactgcctt

SEQ ID NO: 82674 - DNA, 20 bp, synthetic construct
  source 1..20: mol_type = other DNA
agactctaagctgactgcct

SEQ ID NO: 82675 - DNA, 20 bp, synthetic construct
  source 1..20: mol_type = other DNA
cagactctaagctgactgcc

SEQ ID NO: 82676 - DNA, 20 bp, synthetic construct
  source 1..20: mol_type = other DNA
ccagactctaagctgactgc

SEQ ID NO: 82677 - DNA, 20 bp, synthetic construct
  source 1..20: mol_type = other DNA
accagactctaagctgactg

SEQ ID NO: 82678 - DNA, 20 bp, synthetic construct
  source 1..20: mol_type = other DNA
caccagactctaagctgact

SEQ ID NO: 82679 - DNA, 20 bp, synthetic construct
  source 1..20: mol_type = other DNA
tcaccagactctaagctgac

SEQ ID NO: 82680 - DNA, 20 bp, synthetic construct
  source 1..20: mol_type = other DNA
atcaccagactctaagctga

SEQ ID NO: 82681 - DNA, 20 bp, synthetic construct
  source 1..20: mol_type = other DNA
aatcaccagactctaagctg

SEQ ID NO: 82682 - DNA, 20 bp, synthetic construct
  source 1..20: mol_type = other DNA
aaatcaccagactctaagct

SEQ ID NO: 82683 - DNA, 20 bp, synthetic construct
  source 1..20: mol_type = other DNA
caaatcaccagactctaagc

SEQ ID NO: 82684 - DNA, 20 bp, synthetic construct
  source 1..20: mol_type = other DNA
tcaaatcaccagactctaag

SEQ ID NO: 82685 - DNA, 20 bp, synthetic construct
  source 1..20: mol_type = other DNA
ttcaaatcaccagactctaa

SEQ ID NO: 82686 - DNA, 20 bp, synthetic construct
  source 1..20: mol_type = other DNA
attcaaatcaccagactcta

SEQ ID NO: 82687 - DNA, 20 bp, synthetic construct
  source 1..20: mol_type = other DNA
aattcaaatcaccagactct

SEQ ID NO: 82688 - DNA, 20 bp, synthetic construct
  source 1..20: mol_type = other DNA
caattcaaatcaccagactc

SEQ ID NO: 82689 - DNA, 20 bp, synthetic construct
  source 1..20: mol_type = other DNA
tcaattcaaatcaccagact

SEQ ID NO: 82690 - DNA, 20 bp, synthetic construct
  source 1..20: mol_type = other DNA
gtcaattcaaatcaccagac

SEQ ID NO: 82691 - DNA, 20 bp, synthetic construct
  source 1..20: mol_type = other DNA
tgtcaattcaaatcaccaga

SEQ ID NO: 82692 - DNA, 20 bp, synthetic construct
  source 1..20: mol_type = other DNA
atgtcaattcaaatcaccag

SEQ ID NO: 82693 - DNA, 20 bp, synthetic construct
  source 1..20: mol_type = other DNA
catgtcaattcaaatcacca

SEQ ID NO: 82694 - DNA, 20 bp, synthetic construct
  source 1..20: mol_type = other DNA
acatgtcaattcaaatcacc

SEQ ID NO: 82695 - DNA, 20 bp, synthetic construct
  source 1..20: mol_type = other DNA
gacatgtcaattcaaatcac

SEQ ID NO: 82696 - DNA, 20 bp, synthetic construct
  source 1..20: mol_type = other DNA
ggacatgtcaattcaaatca

SEQ ID NO: 82697 - DNA, 20 bp, synthetic construct
  source 1..20: mol_type = other DNA
tggacatgtcaattcaaatc

SEQ ID NO: 82698 - DNA, 20 bp, synthetic construct
  source 1..20: mol_type = other DNA
gtggacatgtcaattcaaat

SEQ ID NO: 82699 - DNA, 20 bp, synthetic construct
  source 1..20: mol_type = other DNA
agtggacatgtcaattcaaa

SEQ ID NO: 82700 - DNA, 20 bp, synthetic construct
  source 1..20: mol_type = other DNA
cagtggacatgtcaattcaa

SEQ ID NO: 82701 - DNA, 20 bp, synthetic construct
  source 1..20: mol_type = other DNA
tcagtggacatgtcaattca

SEQ ID NO: 82702 - DNA, 20 bp, synthetic construct
  source 1..20: mol_type = other DNA
atcagtggacatgtcaattc

SEQ ID NO: 82703 - DNA, 20 bp, synthetic construct
  source 1..20: mol_type = other DNA
tatcagtggacatgtcaatt

SEQ ID NO: 82704 - DNA, 20 bp, synthetic construct
  source 1..20: mol_type = other DNA
ctatcagtggacatgtcaat

SEQ ID NO: 82705 - DNA, 20 bp, synthetic construct
  source 1..20: mol_type = other DNA
tctatcagtggacatgtcaa

SEQ ID NO: 82706 - DNA, 20 bp, synthetic construct
  source 1..20: mol_type = other DNA
atctatcagtggacatgtca

SEQ ID NO: 82707 - DNA, 20 bp, synthetic construct
  source 1..20: mol_type = other DNA
catctatcagtggacatgtc

SEQ ID NO: 82708 - DNA, 20 bp, synthetic construct
  source 1..20: mol_type = other DNA
acatctatcagtggacatgt

SEQ ID NO: 82709 - DNA, 20 bp, synthetic construct
  source 1..20: mol_type = other DNA
aacatctatcagtggacatg

SEQ ID NO: 82710 - DNA, 20 bp, synthetic construct
  source 1..20: mol_type = other DNA
caacatctatcagtggacat

SEQ ID NO: 82711 - DNA, 20 bp, synthetic construct
  source 1..20: mol_type = other DNA
tcaacatctatcagtggaca

SEQ ID NO: 82712 - DNA, 20 bp, synthetic construct
  source 1..20: mol_type = other DNA
gtcaacatctatcagtggac

SEQ ID NO: 82713 - DNA, 20 bp, synthetic construct
  source 1..20: mol_type = other DNA
tgtcaacatctatcagtgga

SEQ ID NO: 82714 - DNA, 20 bp, synthetic construct
  source 1..20: mol_type = other DNA
gtgtcaacatctatcagtgg

SEQ ID NO: 82715 - DNA, 20 bp, synthetic construct
  source 1..20: mol_type = other DNA
agtgtcaacatctatcagtg

SEQ ID NO: 82716 - DNA, 20 bp, synthetic construct
  source 1..20: mol_type = other DNA
cagtgtcaacatctatcagt

SEQ ID NO: 82717 - DNA, 20 bp, synthetic construct
  source 1..20: mol_type = other DNA
acagtgtcaacatctatcag

SEQ ID NO: 82718 - DNA, 20 bp, synthetic construct
  source 1..20: mol_type = other DNA
cacagtgtcaacatctatca

SEQ ID NO: 82719 - DNA, 20 bp, synthetic construct
  source 1..20: mol_type = other DNA
tcacagtgtcaacatctatc

SEQ ID NO: 82720 - DNA, 20 bp, synthetic construct
  source 1..20: mol_type = other DNA
ctcacagtgtcaacatctat

SEQ ID NO: 82721 - DNA, 20 bp, synthetic construct
  source 1..20: mol_type = other DNA
tctcacagtgtcaacatcta

SEQ ID NO: 82722 - DNA, 20 bp, synthetic construct
  source 1..20: mol_type = other DNA
gtctcacagtgtcaacatct

SEQ ID NO: 82723 - DNA, 20 bp, synthetic construct
  source 1..20: mol_type = other DNA
agtctcacagtgtcaacatc

SEQ ID NO: 82724 - DNA, 20 bp, synthetic construct
  source 1..20: mol_type = other DNA
cagtctcacagtgtcaacat

SEQ ID NO: 82725 - DNA, 20 bp, synthetic construct
  source 1..20: mol_type = other DNA
ccagtctcacagtgtcaaca

SEQ ID NO: 82726 - DNA, 20 bp, synthetic construct
  source 1..20: mol_type = other DNA
gccagtctcacagtgtcaac

SEQ ID NO: 82727 - DNA, 20 bp, synthetic construct
  source 1..20: mol_type = other DNA
cgccagtctcacagtgtcaa

SEQ ID NO: 82728 - DNA, 20 bp, synthetic construct
  source 1..20: mol_type = other DNA
ccgccagtctcacagtgtca

SEQ ID NO: 82729 - DNA, 20 bp, synthetic construct
  source 1..20: mol_type = other DNA
accgccagtctcacagtgtc

SEQ ID NO: 82730 - DNA, 20 bp, synthetic construct
  source 1..20: mol_type = other DNA
aaccgccagtctcacagtgt

SEQ ID NO: 82731 - DNA, 20 bp, synthetic construct
  source 1..20: mol_type = other DNA
gaaccgccagtctcacagtg

SEQ ID NO: 82732 - DNA, 20 bp, synthetic construct
  source 1..20: mol_type = other DNA
tgaaccgccagtctcacagt

SEQ ID NO: 82733 - DNA, 20 bp, synthetic construct
  source 1..20: mol_type = other DNA
ctgaaccgccagtctcacag

SEQ ID NO: 82734 - DNA, 20 bp, synthetic construct
  source 1..20: mol_type = other DNA
actgaaccgccagtctcaca

SEQ ID NO: 82735 - DNA, 20 bp, synthetic construct
  source 1..20: mol_type = other DNA
aactgaaccgccagtctcac

SEQ ID NO: 82736 - DNA, 20 bp, synthetic construct
  source 1..20: mol_type = other DNA
aaactgaaccgccagtctca

SEQ ID NO: 82737 - DNA, 20 bp, synthetic construct
  source 1..20: mol_type = other DNA
caaactgaaccgccagtctc

SEQ ID NO: 82738 - DNA, 20 bp, synthetic construct
  source 1..20: mol_type = other DNA
tcaaactgaaccgccagtct

SEQ ID NO: 82739 - DNA, 20 bp, synthetic construct
  source 1..20: mol_type = other DNA
ctcaaactgaaccgccagtc

SEQ ID NO: 82740 - DNA, 20 bp, synthetic construct
  source 1..20: mol_type = other DNA
cctcaaactgaaccgccagt

SEQ ID NO: 82741 - DNA, 20 bp, synthetic construct
  source 1..20: mol_type = other DNA
acctcaaactgaaccgccag

SEQ ID NO: 82742 - DNA, 20 bp, synthetic construct
  source 1..20: mol_type = other DNA
aacctcaaactgaaccgcca

SEQ ID NO: 82743 - DNA, 20 bp, synthetic construct
  source 1..20: mol_type = other DNA
aaacctcaaactgaaccgcc

SEQ ID NO: 82744 - DNA, 20 bp, synthetic construct
  source 1..20: mol_type = other DNA
gaaacctcaaactgaaccgc

SEQ ID NO: 82745 - DNA, 20 bp, synthetic construct
  source 1..20: mol_type = other DNA
tgaaacctcaaactgaaccg

SEQ ID NO: 82746 - DNA, 20 bp, synthetic construct
  source 1..20: mol_type = other DNA
atgaaacctcaaactgaacc

SEQ ID NO: 82747 - DNA, 20 bp, synthetic construct
  source 1..20: mol_type = other DNA
gatgaaacctcaaactgaac

SEQ ID NO: 82748 - DNA, 20 bp, synthetic construct
  source 1..20: mol_type = other DNA
tgatgaaacctcaaactgaa

SEQ ID NO: 82749 - DNA, 20 bp, synthetic construct
  source 1..20: mol_type = other DNA
ctgatgaaacctcaaactga

SEQ ID NO: 82750 - DNA, 20 bp, synthetic construct
  source 1..20: mol_type = other DNA
gctgatgaaacctcaaactg

SEQ ID NO: 82751 - DNA, 20 bp, synthetic construct
  source 1..20: mol_type = other DNA
tgctgatgaaacctcaaact

SEQ ID NO: 82752 - DNA, 20 bp, synthetic construct
  source 1..20: mol_type = other DNA
atgctgatgaaacctcaaac

SEQ ID NO: 82753 - DNA, 20 bp, synthetic construct
  source 1..20: mol_type = other DNA
aatgctgatgaaacctcaaa

SEQ ID NO: 82754 - DNA, 20 bp, synthetic construct
  source 1..20: mol_type = other DNA
caatgctgatgaaacctcaa

SEQ ID NO: 82755 - DNA, 20 bp, synthetic construct
  source 1..20: mol_type = other DNA
gcaatgctgatgaaacctca

SEQ ID NO: 82756 - DNA, 20 bp, synthetic construct
  source 1..20: mol_type = other DNA
ggcaatgctgatgaaacctc

SEQ ID NO: 82757 - DNA, 20 bp, synthetic construct
  source 1..20: mol_type = other DNA
cggcaatgctgatgaaacct

SEQ ID NO: 82758 - DNA, 20 bp, synthetic construct
  source 1..20: mol_type = other DNA
tcggcaatgctgatgaaacc

SEQ ID NO: 82759 - DNA, 20 bp, synthetic construct
  source 1..20: mol_type = other DNA
atcggcaatgctgatgaaac

SEQ ID NO: 82760 - DNA, 20 bp, synthetic construct
  source 1..20: mol_type = other DNA
tatcggcaatgctgatgaaa

SEQ ID NO: 82761 - DNA, 20 bp, synthetic construct
  source 1..20: mol_type = other DNA
atatcggcaatgctgatgaa

SEQ ID NO: 82762 - DNA, 20 bp, synthetic construct
  source 1..20: mol_type = other DNA
aatatcggcaatgctgatga

SEQ ID NO: 82763 - DNA, 20 bp, synthetic construct
  source 1..20: mol_type = other DNA
caatatcggcaatgctgatg

SEQ ID NO: 82764 - DNA, 20 bp, synthetic construct
  source 1..20: mol_type = other DNA
ccaatatcggcaatgctgat

SEQ ID NO: 82765 - DNA, 20 bp, synthetic construct
  source 1..20: mol_type = other DNA
tccaatatcggcaatgctga

SEQ ID NO: 82766 - DNA, 20 bp, synthetic construct
  source 1..20: mol_type = other DNA
ctccaatatcggcaatgctg

SEQ ID NO: 82767 - DNA, 20 bp, synthetic construct
  source 1..20: mol_type = other DNA
gctccaatatcggcaatgct

SEQ ID NO: 82768 - DNA, 20 bp, synthetic construct
  source 1..20: mol_type = other DNA
ggctccaatatcggcaatgc

SEQ ID NO: 82769 - DNA, 20 bp, synthetic construct
  source 1..20: mol_type = other DNA
tggctccaatatcggcaatg

SEQ ID NO: 82770 - DNA, 20 bp, synthetic construct
  source 1..20: mol_type = other DNA
atggctccaatatcggcaat

SEQ ID NO: 82771 - DNA, 20 bp, synthetic construct
  source 1..20: mol_type = other DNA
catggctccaatatcggcaa

SEQ ID NO: 82772 - DNA, 20 bp, synthetic construct
  source 1..20: mol_type = other DNA
tcatggctccaatatcggca

SEQ ID NO: 82773 - DNA, 20 bp, synthetic construct
  source 1..20: mol_type = other DNA
ttcatggctccaatatcggc

SEQ ID NO: 82774 - DNA, 20 bp, synthetic construct
  source 1..20: mol_type = other DNA
tttcatggctccaatatcgg

SEQ ID NO: 82775 - DNA, 20 bp, synthetic construct
  source 1..20: mol_type = other DNA
ttttcatggctccaatatcg

SEQ ID NO: 82776 - DNA, 20 bp, synthetic construct
  source 1..20: mol_type = other DNA
tttttcatggctccaatatc

SEQ ID NO: 82777 - DNA, 20 bp, synthetic construct
  source 1..20: mol_type = other DNA
gtttttcatggctccaatat

SEQ ID NO: 82778 - DNA, 20 bp, synthetic construct
  source 1..20: mol_type = other DNA
ggtttttcatggctccaata

SEQ ID NO: 82779 - DNA, 20 bp, synthetic construct
  source 1..20: mol_type = other DNA
tggtttttcatggctccaat

SEQ ID NO: 82780 - DNA, 20 bp, synthetic construct
  source 1..20: mol_type = other DNA
ttggtttttcatggctccaa

SEQ ID NO: 82781 - DNA, 20 bp, synthetic construct
  source 1..20: mol_type = other DNA
tttggtttttcatggctcca

SEQ ID NO: 82782 - DNA, 20 bp, synthetic construct
  source 1..20: mol_type = other DNA
ctttggtttttcatggctcc

SEQ ID NO: 82783 - DNA, 20 bp, synthetic construct
  source 1..20: mol_type = other DNA
tctttggtttttcatggctc

SEQ ID NO: 82784 - DNA, 20 bp, synthetic construct
  source 1..20: mol_type = other DNA
ttctttggtttttcatggct

SEQ ID NO: 82785 - DNA, 20 bp, synthetic construct
  source 1..20: mol_type = other DNA
gttctttggtttttcatggc

SEQ ID NO: 82786 - DNA, 20 bp, synthetic construct
  source 1..20: mol_type = other DNA
tgttctttggtttttcatgg

SEQ ID NO: 82787 - DNA, 20 bp, synthetic construct
  source 1..20: mol_type = other DNA
ctgttctttggtttttcatg

SEQ ID NO: 82788 - DNA, 20 bp, synthetic construct
  source 1..20: mol_type = other DNA
gctgttctttggtttttcat

SEQ ID NO: 82789 - DNA, 20 bp, synthetic construct
  source 1..20: mol_type = other DNA
ggctgttctttggtttttca

SEQ ID NO: 82790 - DNA, 20 bp, synthetic construct
  source 1..20: mol_type = other DNA
tggctgttctttggtttttc

SEQ ID NO: 82791 - DNA, 20 bp, synthetic construct
  source 1..20: mol_type = other DNA
ctggctgttctttggttttt

SEQ ID NO: 82792 - DNA, 20 bp, synthetic construct
  source 1..20: mol_type = other DNA
actggctgttctttggtttt

SEQ ID NO: 82793 - DNA, 20 bp, synthetic construct
  source 1..20: mol_type = other DNA
cactggctgttctttggttt

SEQ ID NO: 82794 - DNA, 20 bp, synthetic construct
  source 1..20: mol_type = other DNA
tcactggctgttctttggtt

SEQ ID NO: 82795 - DNA, 20 bp, synthetic construct
  source 1..20: mol_type = other DNA
ctcactggctgttctttggt

SEQ ID NO: 82796 - DNA, 20 bp, synthetic construct
  source 1..20: mol_type = other DNA
tctcactggctgttctttgg

SEQ ID NO: 82797 - DNA, 20 bp, synthetic construct
  source 1..20: mol_type = other DNA
ctctcactggctgttctttg

SEQ ID NO: 82798 - DNA, 20 bp, synthetic construct
  source 1..20: mol_type = other DNA
tctctcactggctgttcttt

SEQ ID NO: 82799 - DNA, 20 bp, synthetic construct
  source 1..20: mol_type = other DNA
ttctctcactggctgttctt

SEQ ID NO: 82800 - DNA, 20 bp, synthetic construct
  source 1..20: mol_type = other DNA
cttctctcactggctgttct

SEQ ID NO: 82801 - DNA, 20 bp, synthetic construct
  source 1..20: mol_type = other DNA
tcttctctcactggctgttc

SEQ ID NO: 82802 - DNA, 20 bp, synthetic construct
  source 1..20: mol_type = other DNA
ctcttctctcactggctgtt

SEQ ID NO: 82803 - DNA, 20 bp, synthetic construct
  source 1..20: mol_type = other DNA
tctcttctctcactggctgt

SEQ ID NO: 82804 - DNA, 20 bp, synthetic construct
  source 1..20: mol_type = other DNA
atctcttctctcactggctg

SEQ ID NO: 82805 - DNA, 20 bp, synthetic construct
  source 1..20: mol_type = other DNA
gatctcttctctcactggct

SEQ ID NO: 82806 - DNA, 20 bp, synthetic construct
  source 1..20: mol_type = other DNA
agatctcttctctcactggc

SEQ ID NO: 82807 - DNA, 20 bp, synthetic construct
  source 1..20: mol_type = other DNA
gagatctcttctctcactgg

SEQ ID NO: 82808 - DNA, 20 bp, synthetic construct
  source 1..20: mol_type = other DNA
tgagatctcttctctcactg

SEQ ID NO: 82809 - DNA, 20 bp, synthetic construct
  source 1..20: mol_type = other DNA
ctgagatctcttctctcact

SEQ ID NO: 82810 - DNA, 20 bp, synthetic construct
  source 1..20: mol_type = other DNA
tctgagatctcttctctcac

SEQ ID NO: 82811 - DNA, 20 bp, synthetic construct
  source 1..20: mol_type = other DNA
ctctgagatctcttctctca

SEQ ID NO: 82812 - DNA, 20 bp, synthetic construct
  source 1..20: mol_type = other DNA
tctctgagatctcttctctc

SEQ ID NO: 82813 - DNA, 20 bp, synthetic construct
  source 1..20: mol_type = other DNA
ttctctgagatctcttctct

SEQ ID NO: 82814 - DNA, 20 bp, synthetic construct
  source 1..20: mol_type = other DNA
tttctctgagatctcttctc

SEQ ID NO: 82815 - DNA, 20 bp, synthetic construct
  source 1..20: mol_type = other DNA
ttttctctgagatctcttct

SEQ ID NO: 82816 - DNA, 20 bp, synthetic construct
  source 1..20: mol_type = other DNA
attttctctgagatctcttc

SEQ ID NO: 82817 - DNA, 20 bp, synthetic construct
  source 1..20: mol_type = other DNA
tattttctctgagatctctt

SEQ ID NO: 82818 - DNA, 20 bp, synthetic construct
  source 1..20: mol_type = other DNA
ttattttctctgagatctct

SEQ ID NO: 82819 - DNA, 20 bp, synthetic construct
  source 1..20: mol_type = other DNA
tttattttctctgagatctc

SEQ ID NO: 82820 - DNA, 20 bp, synthetic construct
  source 1..20: mol_type = other DNA
ttttattttctctgagatct

SEQ ID NO: 82821 - DNA, 20 bp, synthetic construct
  source 1..20: mol_type = other DNA
attttattttctctgagatc

SEQ ID NO: 82822 - DNA, 20 bp, synthetic construct
  source 1..20: mol_type = other DNA
aattttattttctctgagat

SEQ ID NO: 82823 - DNA, 20 bp, synthetic construct
  source 1..20: mol_type = other DNA
caattttattttctctgaga

SEQ ID NO: 82824 - DNA, 20 bp, synthetic construct
  source 1..20: mol_type = other DNA
tcaattttattttctctgag

SEQ ID NO: 82825 - DNA, 20 bp, synthetic construct
  source 1..20: mol_type = other DNA
ctcaattttattttctctga

SEQ ID NO: 82826 - DNA, 20 bp, synthetic construct
  source 1..20: mol_type = other DNA
tctcaattttattttctctg

SEQ ID NO: 82827 - DNA, 20 bp, synthetic construct
  source 1..20: mol_type = other DNA
ttctcaattttattttctct

SEQ ID NO: 82828 - DNA, 20 bp, synthetic construct
  source 1..20: mol_type = other DNA
tttctcaattttattttctc

SEQ ID NO: 82829 - DNA, 20 bp, synthetic construct
  source 1..20: mol_type = other DNA
ctttctcaattttattttct

SEQ ID NO: 82830 - DNA, 20 bp, synthetic construct
  source 1..20: mol_type = other DNA
actttctcaattttattttc

SEQ ID NO: 82831 - DNA, 20 bp, synthetic construct
  source 1..20: mol_type = other DNA
cactttctcaattttatttt

SEQ ID NO: 82832 - DNA, 20 bp, synthetic construct
  source 1..20: mol_type = other DNA
tcactttctcaattttattt

SEQ ID NO: 82833 - DNA, 20 bp, synthetic construct
  source 1..20: mol_type = other DNA
ttcactttctcaattttatt

SEQ ID NO: 82834 - DNA, 20 bp, synthetic construct
  source 1..20: mol_type = other DNA
cttcactttctcaattttat

SEQ ID NO: 82835 - DNA, 20 bp, synthetic construct
  source 1..20: mol_type = other DNA
ccttcactttctcaatttta

SEQ ID NO: 82836 - DNA, 20 bp, synthetic construct
  source 1..20: mol_type = other DNA
tccttcactttctcaatttt

SEQ ID NO: 82837 - DNA, 20 bp, synthetic construct
  source 1..20: mol_type = other DNA
gtccttcactttctcaattt

SEQ ID NO: 82838 - DNA, 20 bp, synthetic construct
  source 1..20: mol_type = other DNA
tgtccttcactttctcaatt

SEQ ID NO: 82839 - DNA, 20 bp, synthetic construct
  source 1..20: mol_type = other DNA
ttgtccttcactttctcaat

SEQ ID NO: 82840 - DNA, 20 bp, synthetic construct
  source 1..20: mol_type = other DNA
tttgtccttcactttctcaa

SEQ ID NO: 82841 - DNA, 20 bp, synthetic construct
  source 1..20: mol_type = other DNA
ttttgtccttcactttctca

SEQ ID NO: 82842 - DNA, 20 bp, synthetic construct
  source 1..20: mol_type = other DNA
tttttgtccttcactttctc

SEQ ID NO: 82843 - DNA, 20 bp, synthetic construct
  source 1..20: mol_type = other DNA
ttttttgtccttcactttct

SEQ ID NO: 82844 - DNA, 20 bp, synthetic construct
  source 1..20: mol_type = other DNA
attttttgtccttcactttc

SEQ ID NO: 82845 - DNA, 20 bp, synthetic construct
  source 1..20: mol_type = other DNA
cattttttgtccttcacttt

SEQ ID NO: 82846 - DNA, 20 bp, synthetic construct
  source 1..20: mol_type = other DNA
acattttttgtccttcactt

SEQ ID NO: 82847 - DNA, 20 bp, synthetic construct
  source 1..20: mol_type = other DNA
aacattttttgtccttcact

SEQ ID NO: 82848 - DNA, 20 bp, synthetic construct
  source 1..20: mol_type = other DNA
caacattttttgtccttcac

SEQ ID NO: 82849 - DNA, 20 bp, synthetic construct
  source 1..20: mol_type = other DNA
acaacattttttgtccttca

SEQ ID NO: 82850 - DNA, 20 bp, synthetic construct
  source 1..20: mol_type = other DNA
cacaacattttttgtccttc

SEQ ID NO: 82851 - DNA, 20 bp, synthetic construct
  source 1..20: mol_type = other DNA
tcacaacattttttgtcctt

SEQ ID NO: 82852 - DNA, 20 bp, synthetic construct
  source 1..20: mol_type = other DNA
ttcacaacattttttgtcct

SEQ ID NO: 82853 - DNA, 20 bp, synthetic construct
  source 1..20: mol_type = other DNA
cttcacaacattttttgtcc

SEQ ID NO: 82854 - DNA, 20 bp, synthetic construct
  source 1..20: mol_type = other DNA
tcttcacaacattttttgtc

SEQ ID NO: 82855 - DNA, 20 bp, synthetic construct
  source 1..20: mol_type = other DNA
atcttcacaacattttttgt

SEQ ID NO: 82856 - DNA, 20 bp, synthetic construct
  source 1..20: mol_type = other DNA
tatcttcacaacattttttg

SEQ ID NO: 82857 - DNA, 20 bp, synthetic construct
  source 1..20: mol_type = other DNA
ctatcttcacaacatttttt

SEQ ID NO: 82858 - DNA, 20 bp, synthetic construct
  source 1..20: mol_type = other DNA
tctatcttcacaacattttt

SEQ ID NO: 82859 - DNA, 20 bp, synthetic construct
  source 1..20: mol_type = other DNA
gtctatcttcacaacatttt

SEQ ID NO: 82860 - DNA, 20 bp, synthetic construct
  source 1..20: mol_type = other DNA
ggtctatcttcacaacattt

SEQ ID NO: 82861 - DNA, 20 bp, synthetic construct
  source 1..20: mol_type = other DNA
tggtctatcttcacaacatt

SEQ ID NO: 82862 - DNA, 20 bp, synthetic construct
  source 1..20: mol_type = other DNA
ttggtctatcttcacaacat

SEQ ID NO: 82863 - DNA, 20 bp, synthetic construct
  source 1..20: mol_type = other DNA
cttggtctatcttcacaaca

SEQ ID NO: 82864 - DNA, 20 bp, synthetic construct
  source 1..20: mol_type = other DNA
tcttggtctatcttcacaac

SEQ ID NO: 82865 - DNA, 20 bp, synthetic construct
  source 1..20: mol_type = other DNA
atcttggtctatcttcacaa

SEQ ID NO: 82866 - DNA, 20 bp, synthetic construct
  source 1..20: mol_type = other DNA
aatcttggtctatcttcaca

SEQ ID NO: 82867 - DNA, 20 bp, synthetic construct
  source 1..20: mol_type = other DNA
caatcttggtctatcttcac

SEQ ID NO: 82868 - DNA, 20 bp, synthetic construct
  source 1..20: mol_type = other DNA
tcaatcttggtctatcttca

SEQ ID NO: 82869 - DNA, 20 bp, synthetic construct
  source 1..20: mol_type = other DNA
atcaatcttggtctatcttc

SEQ ID NO: 82870 - DNA, 20 bp, synthetic construct
  source 1..20: mol_type = other DNA
catcaatcttggtctatctt

SEQ ID NO: 82871 - DNA, 20 bp, synthetic construct
  source 1..20: mol_type = other DNA
ccatcaatcttggtctatct

SEQ ID NO: 82872 - DNA, 20 bp, synthetic construct
  source 1..20: mol_type = other DNA
tccatcaatcttggtctatc

SEQ ID NO: 82873 - DNA, 20 bp, synthetic construct
  source 1..20: mol_type = other DNA
ttccatcaatcttggtctat

SEQ ID NO: 82874 - DNA, 20 bp, synthetic construct
  source 1..20: mol_type = other DNA
attccatcaatcttggtcta

SEQ ID NO: 82875 - DNA, 20 bp, synthetic construct
  source 1..20: mol_type = other DNA
gattccatcaatcttggtct

SEQ ID NO: 82876 - DNA, 20 bp, synthetic construct
  source 1..20: mol_type = other DNA
tgattccatcaatcttggtc

SEQ ID NO: 82877 - DNA, 20 bp, synthetic construct
  source 1..20: mol_type = other DNA
ctgattccatcaatcttggt

SEQ ID NO: 82878 - DNA, 20 bp, synthetic construct
  source 1..20: mol_type = other DNA
gctgattccatcaatcttgg

SEQ ID NO: 82879 - DNA, 20 bp, synthetic construct
  source 1..20: mol_type = other DNA
ggctgattccatcaatcttg

SEQ ID NO: 82880 - DNA, 20 bp, synthetic construct
  source 1..20: mol_type = other DNA
tggctgattccatcaatctt

SEQ ID NO: 82881 - DNA, 20 bp, synthetic construct
  source 1..20: mol_type = other DNA
atggctgattccatcaatct

SEQ ID NO: 82882 - DNA, 20 bp, synthetic construct
  source 1..20: mol_type = other DNA
tatggctgattccatcaatc

SEQ ID NO: 82883 - DNA, 20 bp, synthetic construct
  source 1..20: mol_type = other DNA
ctatggctgattccatcaat

SEQ ID NO: 82884 - DNA, 20 bp, synthetic construct
  source 1..20: mol_type = other DNA
tctatggctgattccatcaa

SEQ ID NO: 82885 - DNA, 20 bp, synthetic construct
  source 1..20: mol_type = other DNA
ctctatggctgattccatca

SEQ ID NO: 82886 - DNA, 20 bp, synthetic construct
  source 1..20: mol_type = other DNA
tctctatggctgattccatc

SEQ ID NO: 82887 - DNA, 20 bp, synthetic construct
  source 1..20: mol_type = other DNA
ctctctatggctgattccat

SEQ ID NO: 82888 - DNA, 20 bp, synthetic construct
  source 1..20: mol_type = other DNA
cctctctatggctgattcca

SEQ ID NO: 82889 - DNA, 20 bp, synthetic construct
  source 1..20: mol_type = other DNA
acctctctatggctgattcc

SEQ ID NO: 82890 - DNA, 20 bp, synthetic construct
  source 1..20: mol_type = other DNA
gacctctctatggctgattc

SEQ ID NO: 82891 - DNA, 20 bp, synthetic construct
  source 1..20: mol_type = other DNA
tgacctctctatggctgatt

SEQ ID NO: 82892 - DNA, 20 bp, synthetic construct
  source 1..20: mol_type = other DNA
ttgacctctctatggctgat

SEQ ID NO: 82893 - DNA, 20 bp, synthetic construct
  source 1..20: mol_type = other DNA
cttgacctctctatggctga

SEQ ID NO: 82894 - DNA, 20 bp, synthetic construct
  source 1..20: mol_type = other DNA
acttgacctctctatggctg

SEQ ID NO: 82895 - DNA, 20 bp, synthetic construct
  source 1..20: mol_type = other DNA
cacttgacctctctatggct

SEQ ID NO: 82896 - DNA, 20 bp, synthetic construct
  source 1..20: mol_type = other DNA
ccacttgacctctctatggc

SEQ ID NO: 82897 - DNA, 20 bp, synthetic construct
  source 1..20: mol_type = other DNA
cccacttgacctctctatgg

SEQ ID NO: 82898 - DNA, 20 bp, synthetic construct
  source 1..20: mol_type = other DNA
tcccacttgacctctctatg

SEQ ID NO: 82899 - DNA, 20 bp, synthetic construct
  source 1..20: mol_type = other DNA
atcccacttgacctctctat

SEQ ID NO: 82900 - DNA, 20 bp, synthetic construct
  source 1..20: mol_type = other DNA
catcccacttgacctctcta

SEQ ID NO: 82901 - DNA, 20 bp, synthetic construct
  source 1..20: mol_type = other DNA
tcatcccacttgacctctct

SEQ ID NO: 82902 - DNA, 20 bp, synthetic construct
  source 1..20: mol_type = other DNA
ctcatcccacttgacctctc

SEQ ID NO: 82903 - DNA, 20 bp, synthetic construct
  source 1..20: mol_type = other DNA
tctcatcccacttgacctct

SEQ ID NO: 82904 - DNA, 20 bp, synthetic construct
  source 1..20: mol_type = other DNA
ttctcatcccacttgacctc

SEQ ID NO: 82905 - DNA, 20 bp, synthetic construct
  source 1..20: mol_type = other DNA
attctcatcccacttgacct

SEQ ID NO: 82906 - DNA, 20 bp, synthetic construct
  source 1..20: mol_type = other DNA
cattctcatcccacttgacc

SEQ ID NO: 82907 - DNA, 20 bp, synthetic construct
  source 1..20: mol_type = other DNA
tcattctcatcccacttgac

SEQ ID NO: 82908 - DNA, 20 bp, synthetic construct
  source 1..20: mol_type = other DNA
ctcattctcatcccacttga

SEQ ID NO: 82909 - DNA, 20 bp, synthetic construct
  source 1..20: mol_type = other DNA
gctcattctcatcccacttg

SEQ ID NO: 82910 - DNA, 20 bp, synthetic construct
  source 1..20: mol_type = other DNA
tgctcattctcatcccactt

SEQ ID NO: 82911 - DNA, 20 bp, synthetic construct
  source 1..20: mol_type = other DNA
gtgctcattctcatcccact

SEQ ID NO: 82912 - DNA, 20 bp, synthetic construct
  source 1..20: mol_type = other DNA
cgtgctcattctcatcccac

SEQ ID NO: 82913 - DNA, 20 bp, synthetic construct
  source 1..20: mol_type = other DNA
gcgtgctcattctcatccca

SEQ ID NO: 82914 - DNA, 20 bp, synthetic construct
  source 1..20: mol_type = other DNA
tgcgtgctcattctcatccc

SEQ ID NO: 82915 - DNA, 20 bp, synthetic construct
  source 1..20: mol_type = other DNA
atgcgtgctcattctcatcc

SEQ ID NO: 82916 - DNA, 20 bp, synthetic construct
  source 1..20: mol_type = other DNA
gatgcgtgctcattctcatc

SEQ ID NO: 82917 - DNA, 20 bp, synthetic construct
  source 1..20: mol_type = other DNA
agatgcgtgctcattctcat

SEQ ID NO: 82918 - DNA, 20 bp, synthetic construct
  source 1..20: mol_type = other DNA
cagatgcgtgctcattctca

SEQ ID NO: 82919 - DNA, 20 bp, synthetic construct
  source 1..20: mol_type = other DNA
acagatgcgtgctcattctc

SEQ ID NO: 82920 - DNA, 20 bp, synthetic construct
  source 1..20: mol_type = other DNA
aacagatgcgtgctcattct

SEQ ID NO: 82921 - DNA, 20 bp, synthetic construct
  source 1..20: mol_type = other DNA
taacagatgcgtgctcattc

SEQ ID NO: 82922 - DNA, 20 bp, synthetic construct
  source 1..20: mol_type = other DNA
ttaacagatgcgtgctcatt

SEQ ID NO: 82923 - DNA, 20 bp, synthetic construct
  source 1..20: mol_type = other DNA
tttaacagatgcgtgctcat

SEQ ID NO: 82924 - DNA, 20 bp, synthetic construct
  source 1..20: mol_type = other DNA
gtttaacagatgcgtgctca

SEQ ID NO: 82925 - DNA, 20 bp, synthetic construct
  source 1..20: mol_type = other DNA
agtttaacagatgcgtgctc

SEQ ID NO: 82926 - DNA, 20 bp, synthetic construct
  source 1..20: mol_type = other DNA
aagtttaacagatgcgtgct

SEQ ID NO: 82927 - DNA, 20 bp, synthetic construct
  source 1..20: mol_type = other DNA
aaagtttaacagatgcgtgc

SEQ ID NO: 82928 - DNA, 20 bp, synthetic construct
  source 1..20: mol_type = other DNA
caaagtttaacagatgcgtg

SEQ ID NO: 82929 - DNA, 20 bp, synthetic construct
  source 1..20: mol_type = other DNA
acaaagtttaacagatgcgt

SEQ ID NO: 82930 - DNA, 20 bp, synthetic construct
  source 1..20: mol_type = other DNA
cacaaagtttaacagatgcg

SEQ ID NO: 82931 - DNA, 20 bp, synthetic construct
  source 1..20: mol_type = other DNA
gcacaaagtttaacagatgc

SEQ ID NO: 82932 - DNA, 20 bp, synthetic construct
  source 1..20: mol_type = other DNA
agcacaaagtttaacagatg

SEQ ID NO: 82933 - DNA, 20 bp, synthetic construct
  source 1..20: mol_type = other DNA
aagcacaaagtttaacagat

SEQ ID NO: 82934 - DNA, 20 bp, synthetic construct
  source 1..20: mol_type = other DNA
taagcacaaagtttaacaga

SEQ ID NO: 82935 - DNA, 20 bp, synthetic construct
  source 1..20: mol_type = other DNA
ctaagcacaaagtttaacag

SEQ ID NO: 82936 - DNA, 20 bp, synthetic construct
  source 1..20: mol_type = other DNA
cctaagcacaaagtttaaca

SEQ ID NO: 82937 - DNA, 20 bp, synthetic construct
  source 1..20: mol_type = other DNA
tcctaagcacaaagtttaac

SEQ ID NO: 82938 - DNA, 20 bp, synthetic construct
  source 1..20: mol_type = other DNA
ctcctaagcacaaagtttaa

SEQ ID NO: 82939 - DNA, 20 bp, synthetic construct
  source 1..20: mol_type = other DNA
gctcctaagcacaaagttta

SEQ ID NO: 82940 - DNA, 20 bp, synthetic construct
  source 1..20: mol_type = other DNA
tgctcctaagcacaaagttt

SEQ ID NO: 82941 - DNA, 20 bp, synthetic construct
  source 1..20: mol_type = other DNA
ctgctcctaagcacaaagtt

SEQ ID NO: 82942 - DNA, 20 bp, synthetic construct
  source 1..20: mol_type = other DNA
tctgctcctaagcacaaagt

SEQ ID NO: 82943 - DNA, 20 bp, synthetic construct
  source 1..20: mol_type = other DNA
ttctgctcctaagcacaaag

SEQ ID NO: 82944 - DNA, 20 bp, synthetic construct
  source 1..20: mol_type = other DNA
attctgctcctaagcacaaa

SEQ ID NO: 82945 - DNA, 20 bp, synthetic construct
  source 1..20: mol_type = other DNA
gattctgctcctaagcacaa

SEQ ID NO: 82946 - DNA, 20 bp, synthetic construct
  source 1..20: mol_type = other DNA
agattctgctcctaagcaca

SEQ ID NO: 82947 - DNA, 20 bp, synthetic construct
  source 1..20: mol_type = other DNA
tagattctgctcctaagcac

SEQ ID NO: 82948 - DNA, 20 bp, synthetic construct
  source 1..20: mol_type = other DNA
ttagattctgctcctaagca

SEQ ID NO: 82949 - DNA, 20 bp, synthetic construct
  source 1..20: mol_type = other DNA
cttagattctgctcctaagc

SEQ ID NO: 82950 - DNA, 20 bp, synthetic construct
  source 1..20: mol_type = other DNA
ccttagattctgctcctaag

SEQ ID NO: 82951 - DNA, 20 bp, synthetic construct
  source 1..20: mol_type = other DNA
cccttagattctgctcctaa

SEQ ID NO: 82952 - DNA, 20 bp, synthetic construct
  source 1..20: mol_type = other DNA
tcccttagattctgctccta

SEQ ID NO: 82953 - DNA, 20 bp, synthetic construct
  source 1..20: mol_type = other DNA
ttcccttagattctgctcct

SEQ ID NO: 82954 - DNA, 20 bp, synthetic construct
  source 1..20: mol_type = other DNA
cttcccttagattctgctcc

SEQ ID NO: 82955 - DNA, 20 bp, synthetic construct
  source 1..20: mol_type = other DNA
ccttcccttagattctgctc

SEQ ID NO: 82956 - DNA, 20 bp, synthetic construct
  source 1..20: mol_type = other DNA
cccttcccttagattctgct

SEQ ID NO: 82957 - DNA, 20 bp, synthetic construct
  source 1..20: mol_type = other DNA
tcccttcccttagattctgc

SEQ ID NO: 82958 - DNA, 20 bp, synthetic construct
  source 1..20: mol_type = other DNA
gtcccttcccttagattctg

SEQ ID NO: 82959 - DNA, 20 bp, synthetic construct
  source 1..20: mol_type = other DNA
tgtcccttcccttagattct

SEQ ID NO: 82960 - DNA, 20 bp, synthetic construct
  source 1..20: mol_type = other DNA
ctgtcccttcccttagattc

SEQ ID NO: 82961 - DNA, 20 bp, synthetic construct
  source 1..20: mol_type = other DNA
actgtcccttcccttagatt

SEQ ID NO: 82962 - DNA, 20 bp, synthetic construct
  source 1..20: mol_type = other DNA
gactgtcccttcccttagat

SEQ ID NO: 82963 - DNA, 20 bp, synthetic construct
  source 1..20: mol_type = other DNA
ggactgtcccttcccttaga

SEQ ID NO: 82964 - DNA, 20 bp, synthetic construct
  source 1..20: mol_type = other DNA
tggactgtcccttcccttag

SEQ ID NO: 82965 - DNA, 20 bp, synthetic construct
  source 1..20: mol_type = other DNA
ctggactgtcccttccctta

SEQ ID NO: 82966 - DNA, 20 bp, synthetic construct
  source 1..20: mol_type = other DNA
tctggactgtcccttccctt

SEQ ID NO: 82967 - DNA, 20 bp, synthetic construct
  source 1..20: mol_type = other DNA
ctctggactgtcccttccct

SEQ ID NO: 82968 - DNA, 20 bp, synthetic construct
  source 1..20: mol_type = other DNA
cctctggactgtcccttccc

SEQ ID NO: 82969 - DNA, 20 bp, synthetic construct
  source 1..20: mol_type = other DNA
acctctggactgtcccttcc

SEQ ID NO: 82970 - DNA, 20 bp, synthetic construct
  source 1..20: mol_type = other DNA
aacctctggactgtcccttc

SEQ ID NO: 82971 - DNA, 20 bp, synthetic construct
  source 1..20: mol_type = other DNA
taacctctggactgtccctt

SEQ ID NO: 82972 - DNA, 20 bp, synthetic construct
  source 1..20: mol_type = other DNA
ctaacctctggactgtccct

SEQ ID NO: 82973 - DNA, 20 bp, synthetic construct
  source 1..20: mol_type = other DNA
tctaacctctggactgtccc

SEQ ID NO: 82974 - DNA, 20 bp, synthetic construct
  source 1..20: mol_type = other DNA
ttctaacctctggactgtcc

SEQ ID NO: 82975 - DNA, 20 bp, synthetic construct
  source 1..20: mol_type = other DNA
gttctaacctctggactgtc

SEQ ID NO: 82976 - DNA, 20 bp, synthetic construct
  source 1..20: mol_type = other DNA
agttctaacctctggactgt

SEQ ID NO: 82977 - DNA, 20 bp, synthetic construct
  source 1..20: mol_type = other DNA
gagttctaacctctggactg

SEQ ID NO: 82978 - DNA, 20 bp, synthetic construct
  source 1..20: mol_type = other DNA
tgagttctaacctctggact

SEQ ID NO: 82979 - DNA, 20 bp, synthetic construct
  source 1..20: mol_type = other DNA
ctgagttctaacctctggac

SEQ ID NO: 82980 - DNA, 20 bp, synthetic construct
  source 1..20: mol_type = other DNA
cctgagttctaacctctgga

SEQ ID NO: 82981 - DNA, 20 bp, synthetic construct
  source 1..20: mol_type = other DNA
ccctgagttctaacctctgg

SEQ ID NO: 82982 - DNA, 20 bp, synthetic construct
  source 1..20: mol_type = other DNA
accctgagttctaacctctg

SEQ ID NO: 82983 - DNA, 20 bp, synthetic construct
  source 1..20: mol_type = other DNA
taccctgagttctaacctct

SEQ ID NO: 82984 - DNA, 20 bp, synthetic construct
  source 1..20: mol_type = other DNA
ttaccctgagttctaacctc

SEQ ID NO: 82985 - DNA, 20 bp, synthetic construct
  source 1..20: mol_type = other DNA
cttaccctgagttctaacct

SEQ ID NO: 82986 - DNA, 20 bp, synthetic construct
  source 1..20: mol_type = other DNA
tcttaccctgagttctaacc

SEQ ID NO: 82987 - DNA, 20 bp, synthetic construct
  source 1..20: mol_type = other DNA
atcttaccctgagttctaac

SEQ ID NO: 82988 - DNA, 20 bp, synthetic construct
  source 1..20: mol_type = other DNA
catcttaccctgagttctaa

SEQ ID NO: 82989 - DNA, 20 bp, synthetic construct
  source 1..20: mol_type = other DNA
ccatcttaccctgagttcta

SEQ ID NO: 82990 - DNA, 20 bp, synthetic construct
  source 1..20: mol_type = other DNA
tccatcttaccctgagttct

SEQ ID NO: 82991 - DNA, 20 bp, synthetic construct
  source 1..20: mol_type = other DNA
ttccatcttaccctgagttc

SEQ ID NO: 82992 - DNA, 20 bp, synthetic construct
  source 1..20: mol_type = other DNA
cttccatcttaccctgagtt

SEQ ID NO: 82993 - DNA, 20 bp, synthetic construct
  source 1..20: mol_type = other DNA
tcttccatcttaccctgagt

SEQ ID NO: 82994 - DNA, 20 bp, synthetic construct
  source 1..20: mol_type = other DNA
ttcttccatcttaccctgag

SEQ ID NO: 82995 - DNA, 20 bp, synthetic construct
  source 1..20: mol_type = other DNA
gttcttccatcttaccctga

SEQ ID NO: 82996 - DNA, 20 bp, synthetic construct
  source 1..20: mol_type = other DNA
tgttcttccatcttaccctg

SEQ ID NO: 82997 - DNA, 20 bp, synthetic construct
  source 1..20: mol_type = other DNA
ctgttcttccatcttaccct

SEQ ID NO: 82998 - DNA, 20 bp, synthetic construct
  source 1..20: mol_type = other DNA
cctgttcttccatcttaccc

SEQ ID NO: 82999 - DNA, 20 bp, synthetic construct
  source 1..20: mol_type = other DNA
ccctgttcttccatcttacc

SEQ ID NO: 83000 - DNA, 20 bp, synthetic construct
  source 1..20: mol_type = other DNA
cccctgttcttccatcttac

SEQ ID NO: 83001 - DNA, 20 bp, synthetic construct
  source 1..20: mol_type = other DNA
gcccctgttcttccatctta

SEQ ID NO: 83002 - DNA, 20 bp, synthetic construct
  source 1..20: mol_type = other DNA
tgcccctgttcttccatctt

SEQ ID NO: 83003 - DNA, 20 bp, synthetic construct
  source 1..20: mol_type = other DNA
atgcccctgttcttccatct

SEQ ID NO: 83004 - DNA, 20 bp, synthetic construct
  source 1..20: mol_type = other DNA
gatgcccctgttcttccatc

SEQ ID NO: 83005 - DNA, 20 bp, synthetic construct
  source 1..20: mol_type = other DNA
agatgcccctgttcttccat

SEQ ID NO: 83006 - DNA, 20 bp, synthetic construct
  source 1..20: mol_type = other DNA
cagatgcccctgttcttcca

SEQ ID NO: 83007 - DNA, 20 bp, synthetic construct
  source 1..20: mol_type = other DNA
ccagatgcccctgttcttcc

SEQ ID NO: 83008 - DNA, 20 bp, synthetic construct
  source 1..20: mol_type = other DNA
cccagatgcccctgttcttc

SEQ ID NO: 83009 - DNA, 20 bp, synthetic construct
  source 1..20: mol_type = other DNA
tcccagatgcccctgttctt

SEQ ID NO: 83010 - DNA, 20 bp, synthetic construct
  source 1..20: mol_type = other DNA
ctcccagatgcccctgttct

SEQ ID NO: 83011 - DNA, 20 bp, synthetic construct
  source 1..20: mol_type = other DNA
actcccagatgcccctgttc

SEQ ID NO: 83012 - DNA, 20 bp, synthetic construct
  source 1..20: mol_type = other DNA
cactcccagatgcccctgtt

SEQ ID NO: 83013 - DNA, 20 bp, synthetic construct
  source 1..20: mol_type = other DNA
tcactcccagatgcccctgt

SEQ ID NO: 83014 - DNA, 20 bp, synthetic construct
  source 1..20: mol_type = other DNA
ctcactcccagatgcccctg

SEQ ID NO: 83015 - DNA, 20 bp, synthetic construct
  source 1..20: mol_type = other DNA
cctcactcccagatgcccct

SEQ ID NO: 83016 - DNA, 20 bp, synthetic construct
  source 1..20: mol_type = other DNA
gcctcactcccagatgcccc

SEQ ID NO: 83017 - DNA, 20 bp, synthetic construct
  source 1..20: mol_type = other DNA
tgcctcactcccagatgccc

SEQ ID NO: 83018 - DNA, 20 bp, synthetic construct
  source 1..20: mol_type = other DNA
ctgcctcactcccagatgcc

SEQ ID NO: 83019 - DNA, 20 bp, synthetic construct
  source 1..20: mol_type = other DNA
actgcctcactcccagatgc

SEQ ID NO: 83020 - DNA, 20 bp, synthetic construct
  source 1..20: mol_type = other DNA
aactgcctcactcccagatg

SEQ ID NO: 83021 - DNA, 20 bp, synthetic construct
  source 1..20: mol_type = other DNA
aaactgcctcactcccagat

SEQ ID NO: 83022 - DNA, 20 bp, synthetic construct
  source 1..20: mol_type = other DNA
caaactgcctcactcccaga

SEQ ID NO: 83023 - DNA, 20 bp, synthetic construct
  source 1..20: mol_type = other DNA
ccaaactgcctcactcccag

SEQ ID NO: 83024 - DNA, 20 bp, synthetic construct
  source 1..20: mol_type = other DNA
accaaactgcctcactccca

SEQ ID NO: 83025 - DNA, 20 bp, synthetic construct
  source 1..20: mol_type = other DNA
aaccaaactgcctcactccc

SEQ ID NO: 83026 - DNA, 20 bp, synthetic construct
  source 1..20: mol_type = other DNA
aaaccaaactgcctcactcc

SEQ ID NO: 83027 - DNA, 20 bp, synthetic construct
  source 1..20: mol_type = other DNA
taaaccaaactgcctcactc

SEQ ID NO: 83028 - DNA, 20 bp, synthetic construct
  source 1..20: mol_type = other DNA
ctaaaccaaactgcctcact

SEQ ID NO: 83029 - DNA, 20 bp, synthetic construct
  source 1..20: mol_type = other DNA
actaaaccaaactgcctcac

SEQ ID NO: 83030 - DNA, 20 bp, synthetic construct
  source 1..20: mol_type = other DNA
cactaaaccaaactgcctca

SEQ ID NO: 83031 - DNA, 20 bp, synthetic construct
  source 1..20: mol_type = other DNA
acactaaaccaaactgcctc

SEQ ID NO: 83032 - DNA, 20 bp, synthetic construct
  source 1..20: mol_type = other DNA
tacactaaaccaaactgcct

SEQ ID NO: 83033 - DNA, 20 bp, synthetic construct
  source 1..20: mol_type = other DNA
ctacactaaaccaaactgcc

SEQ ID NO: 83034 - DNA, 20 bp, synthetic construct
  source 1..20: mol_type = other DNA
tctacactaaaccaaactgc

SEQ ID NO: 83035 - DNA, 20 bp, synthetic construct
  source 1..20: mol_type = other DNA
ttctacactaaaccaaactg

SEQ ID NO: 83036 - DNA, 20 bp, synthetic construct
  source 1..20: mol_type = other DNA
gttctacactaaaccaaact

SEQ ID NO: 83037 - DNA, 20 bp, synthetic construct
  source 1..20: mol_type = other DNA
ggttctacactaaaccaaac

SEQ ID NO: 83038 - DNA, 20 bp, synthetic construct
  source 1..20: mol_type = other DNA
aggttctacactaaaccaaa

SEQ ID NO: 83039 - DNA, 20 bp, synthetic construct
  source 1..20: mol_type = other DNA
aaggttctacactaaaccaa

SEQ ID NO: 83040 - DNA, 20 bp, synthetic construct
  source 1..20: mol_type = other DNA
aaaggttctacactaaacca

SEQ ID NO: 83041 - DNA, 20 bp, synthetic construct
  source 1..20: mol_type = other DNA
aaaaggttctacactaaacc

SEQ ID NO: 83042 - DNA, 20 bp, synthetic construct
  source 1..20: mol_type = other DNA
aaaaaggttctacactaaac

SEQ ID NO: 83043 - DNA, 20 bp, synthetic construct
  source 1..20: mol_type = other DNA
caaaaaggttctacactaaa

SEQ ID NO: 83044 - DNA, 20 bp, synthetic construct
  source 1..20: mol_type = other DNA
acaaaaaggttctacactaa

SEQ ID NO: 83045 - DNA, 20 bp, synthetic construct
  source 1..20: mol_type = other DNA
tacaaaaaggttctacacta

SEQ ID NO: 83046 - DNA, 20 bp, synthetic construct
  source 1..20: mol_type = other DNA
ttacaaaaaggttctacact

SEQ ID NO: 83047 - DNA, 20 bp, synthetic construct
  source 1..20: mol_type = other DNA
gttacaaaaaggttctacac

SEQ ID NO: 83048 - DNA, 20 bp, synthetic construct
  source 1..20: mol_type = other DNA
tgttacaaaaaggttctaca

SEQ ID NO: 83049 - DNA, 20 bp, synthetic construct
  source 1..20: mol_type = other DNA
ttgttacaaaaaggttctac

SEQ ID NO: 83050 - DNA, 20 bp, synthetic construct
  source 1..20: mol_type = other DNA
cttgttacaaaaaggttcta

SEQ ID NO: 83051 - DNA, 20 bp, synthetic construct
  source 1..20: mol_type = other DNA
gcttgttacaaaaaggttct

SEQ ID NO: 83052 - DNA, 20 bp, synthetic construct
  source 1..20: mol_type = other DNA
tgcttgttacaaaaaggttc

SEQ ID NO: 83053 - DNA, 20 bp, synthetic construct
  source 1..20: mol_type = other DNA
atgcttgttacaaaaaggtt

SEQ ID NO: 83054 - DNA, 20 bp, synthetic construct
  source 1..20: mol_type = other DNA
aatgcttgttacaaaaaggt

SEQ ID NO: 83055 - DNA, 20 bp, synthetic construct
  source 1..20: mol_type = other DNA
gaatgcttgttacaaaaagg

SEQ ID NO: 83056 - DNA, 20 bp, synthetic construct
  source 1..20: mol_type = other DNA
ggaatgcttgttacaaaaag

SEQ ID NO: 83057 - DNA, 20 bp, synthetic construct
  source 1..20: mol_type = other DNA
gggaatgcttgttacaaaaa

SEQ ID NO: 83058 - DNA, 20 bp, synthetic construct
  source 1..20: mol_type = other DNA
agggaatgcttgttacaaaa

SEQ ID NO: 83059 - DNA, 20 bp, synthetic construct
  source 1..20: mol_type = other DNA
aagggaatgcttgttacaaa

SEQ ID NO: 83060 - DNA, 20 bp, synthetic construct
  source 1..20: mol_type = other DNA
gaagggaatgcttgttacaa

SEQ ID NO: 83061 - DNA, 20 bp, synthetic construct
  source 1..20: mol_type = other DNA
agaagggaatgcttgttaca

SEQ ID NO: 83062 - DNA, 20 bp, synthetic construct
  source 1..20: mol_type = other DNA
cagaagggaatgcttgttac

SEQ ID NO: 83063 - DNA, 20 bp, synthetic construct
  source 1..20: mol_type = other DNA
acagaagggaatgcttgtta

SEQ ID NO: 83064 - DNA, 20 bp, synthetic construct
  source 1..20: mol_type = other DNA
gacagaagggaatgcttgtt

SEQ ID NO: 83065 - DNA, 20 bp, synthetic construct
  source 1..20: mol_type = other DNA
agacagaagggaatgcttgt

SEQ ID NO: 83066 - DNA, 20 bp, synthetic construct
  source 1..20: mol_type = other DNA
tagacagaagggaatgcttg

SEQ ID NO: 83067 - DNA, 20 bp, synthetic construct
  source 1..20: mol_type = other DNA
ctagacagaagggaatgctt

SEQ ID NO: 83068 - DNA, 20 bp, synthetic construct
  source 1..20: mol_type = other DNA
tctagacagaagggaatgct

SEQ ID NO: 83069 - DNA, 20 bp, synthetic construct
  source 1..20: mol_type = other DNA
atctagacagaagggaatgc

SEQ ID NO: 83070 - DNA, 20 bp, synthetic construct
  source 1..20: mol_type = other DNA
catctagacagaagggaatg

SEQ ID NO: 83071 - DNA, 20 bp, synthetic construct
  source 1..20: mol_type = other DNA
tcatctagacagaagggaat

SEQ ID NO: 83072 - DNA, 20 bp, synthetic construct
  source 1..20: mol_type = other DNA
gtcatctagacagaagggaa

SEQ ID NO: 83073 - DNA, 20 bp, synthetic construct
  source 1..20: mol_type = other DNA
agtcatctagacagaaggga

SEQ ID NO: 83074 - DNA, 20 bp, synthetic construct
  source 1..20: mol_type = other DNA
aagtcatctagacagaaggg

SEQ ID NO: 83075 - DNA, 20 bp, synthetic construct
  source 1..20: mol_type = other DNA
aaagtcatctagacagaagg

SEQ ID NO: 83076 - DNA, 20 bp, synthetic construct
  source 1..20: mol_type = other DNA
aaaagtcatctagacagaag

SEQ ID NO: 83077 - DNA, 20 bp, synthetic construct
  source 1..20: mol_type = other DNA
taaaagtcatctagacagaa

SEQ ID NO: 83078 - DNA, 20 bp, synthetic construct
  source 1..20: mol_type = other DNA
ctaaaagtcatctagacaga

SEQ ID NO: 83079 - DNA, 20 bp, synthetic construct
  source 1..20: mol_type = other DNA
tctaaaagtcatctagacag

SEQ ID NO: 83080 - DNA, 20 bp, synthetic construct
  source 1..20: mol_type = other DNA
atctaaaagtcatctagaca

SEQ ID NO: 83081 - DNA, 20 bp, synthetic construct
  source 1..20: mol_type = other DNA
tatctaaaagtcatctagac

SEQ ID NO: 83082 - DNA, 20 bp, synthetic construct
  source 1..20: mol_type = other DNA
atatctaaaagtcatctaga

SEQ ID NO: 83083 - DNA, 20 bp, synthetic construct
  source 1..20: mol_type = other DNA
catatctaaaagtcatctag

SEQ ID NO: 83084 - DNA, 20 bp, synthetic construct
  source 1..20: mol_type = other DNA
acatatctaaaagtcatcta

SEQ ID NO: 83085 - DNA, 20 bp, synthetic construct
  source 1..20: mol_type = other DNA
aacatatctaaaagtcatct

SEQ ID NO: 83086 - DNA, 20 bp, synthetic construct
  source 1..20: mol_type = other DNA
aaacatatctaaaagtcatc

SEQ ID NO: 83087 - DNA, 20 bp, synthetic construct
  source 1..20: mol_type = other DNA
gaaacatatctaaaagtcat

SEQ ID NO: 83088 - DNA, 20 bp, synthetic construct
  source 1..20: mol_type = other DNA
tgaaacatatctaaaagtca

SEQ ID NO: 83089 - DNA, 20 bp, synthetic construct
  source 1..20: mol_type = other DNA
atgaaacatatctaaaagtc

SEQ ID NO: 83090 - DNA, 20 bp, synthetic construct
  source 1..20: mol_type = other DNA
aatgaaacatatctaaaagt

SEQ ID NO: 83091 - DNA, 20 bp, synthetic construct
  source 1..20: mol_type = other DNA
caatgaaacatatctaaaag

SEQ ID NO: 83092 - DNA, 20 bp, synthetic construct
  source 1..20: mol_type = other DNA
ccaatgaaacatatctaaaa

SEQ ID NO: 83093 - DNA, 20 bp, synthetic construct
  source 1..20: mol_type = other DNA
gccaatgaaacatatctaaa

SEQ ID NO: 83094 - DNA, 20 bp, synthetic construct
  source 1..20: mol_type = other DNA
agccaatgaaacatatctaa

SEQ ID NO: 83095 - DNA, 20 bp, synthetic construct
  source 1..20: mol_type = other DNA
aagccaatgaaacatatcta

SEQ ID NO: 83096 - DNA, 20 bp, synthetic construct
  source 1..20: mol_type = other DNA
caagccaatgaaacatatct

SEQ ID NO: 83097 - DNA, 20 bp, synthetic construct
  source 1..20: mol_type = other DNA
ccaagccaatgaaacatatc

SEQ ID NO: 83098 - DNA, 20 bp, synthetic construct
  source 1..20: mol_type = other DNA
accaagccaatgaaacatat

SEQ ID NO: 83099 - DNA, 20 bp, synthetic construct
  source 1..20: mol_type = other DNA
taccaagccaatgaaacata

SEQ ID NO: 83100 - DNA, 20 bp, synthetic construct
  source 1..20: mol_type = other DNA
gtaccaagccaatgaaacat

SEQ ID NO: 83101 - DNA, 20 bp, synthetic construct
  source 1..20: mol_type = other DNA
ggtaccaagccaatgaaaca

SEQ ID NO: 83102 - DNA, 20 bp, synthetic construct
  source 1..20: mol_type = other DNA
aggtaccaagccaatgaaac

SEQ ID NO: 83103 - DNA, 20 bp, synthetic construct
  source 1..20: mol_type = other DNA
aaggtaccaagccaatgaaa

SEQ ID NO: 83104 - DNA, 20 bp, synthetic construct
  source 1..20: mol_type = other DNA
aaaggtaccaagccaatgaa

SEQ ID NO: 83105 - DNA, 20 bp, synthetic construct
  source 1..20: mol_type = other DNA
aaaaggtaccaagccaatga

SEQ ID NO: 83106 - DNA, 20 bp, synthetic construct
  source 1..20: mol_type = other DNA
taaaaggtaccaagccaatg

SEQ ID NO: 83107 - DNA, 20 bp, synthetic construct
  source 1..20: mol_type = other DNA
ctaaaaggtaccaagccaat

SEQ ID NO: 83108 - DNA, 20 bp, synthetic construct
  source 1..20: mol_type = other DNA
tctaaaaggtaccaagccaa

SEQ ID NO: 83109 - DNA, 20 bp, synthetic construct
  source 1..20: mol_type = other DNA
ttctaaaaggtaccaagcca

SEQ ID NO: 83110 - DNA, 20 bp, synthetic construct
  source 1..20: mol_type = other DNA
attctaaaaggtaccaagcc

SEQ ID NO: 83111 - DNA, 20 bp, synthetic construct
  source 1..20: mol_type = other DNA
tattctaaaaggtaccaagc

SEQ ID NO: 83112 - DNA, 20 bp, synthetic construct
  source 1..20: mol_type = other DNA
ttattctaaaaggtaccaag

SEQ ID NO: 83113 - DNA, 20 bp, synthetic construct
  source 1..20: mol_type = other DNA
tttattctaaaaggtaccaa

SEQ ID NO: 83114 - DNA, 20 bp, synthetic construct
  source 1..20: mol_type = other DNA
ttttattctaaaaggtacca

SEQ ID NO: 83115 - DNA, 20 bp, synthetic construct
  source 1..20: mol_type = other DNA
attttattctaaaaggtacc

SEQ ID NO: 83116 - DNA, 20 bp, synthetic construct
  source 1..20: mol_type = other DNA
cattttattctaaaaggtac

SEQ ID NO: 83117 - DNA, 20 bp, synthetic construct
  source 1..20: mol_type = other DNA
tcattttattctaaaaggta

SEQ ID NO: 83118 - DNA, 20 bp, synthetic construct
  source 1..20: mol_type = other DNA
atcattttattctaaaaggt

SEQ ID NO: 83119 - DNA, 20 bp, synthetic construct
  source 1..20: mol_type = other DNA
aatcattttattctaaaagg

SEQ ID NO: 83120 - DNA, 20 bp, synthetic construct
  source 1..20: mol_type = other DNA
aaatcattttattctaaaag

SEQ ID NO: 83121 - DNA, 20 bp, synthetic construct
  source 1..20: mol_type = other DNA
taaatcattttattctaaaa

SEQ ID NO: 83122 - DNA, 20 bp, synthetic construct
  source 1..20: mol_type = other DNA
ctaaatcattttattctaaa

SEQ ID NO: 83123 - DNA, 20 bp, synthetic construct
  source 1..20: mol_type = other DNA
tctaaatcattttattctaa

SEQ ID NO: 83124 - DNA, 20 bp, synthetic construct
  source 1..20: mol_type = other DNA
ctctaaatcattttattcta

SEQ ID NO: 83125 - DNA, 20 bp, synthetic construct
  source 1..20: mol_type = other DNA
cctctaaatcattttattct

SEQ ID NO: 83126 - DNA, 20 bp, synthetic construct
  source 1..20: mol_type = other DNA
tcctctaaatcattttattc

SEQ ID NO: 83127 - DNA, 20 bp, synthetic construct
  source 1..20: mol_type = other DNA
atcctctaaatcattttatt

SEQ ID NO: 83128 - DNA, 20 bp, synthetic construct
  source 1..20: mol_type = other DNA
gatcctctaaatcattttat

SEQ ID NO: 83129 - DNA, 20 bp, synthetic construct
  source 1..20: mol_type = other DNA
agatcctctaaatcatttta

SEQ ID NO: 83130 - DNA, 20 bp, synthetic construct
  source 1..20: mol_type = other DNA
gagatcctctaaatcatttt

SEQ ID NO: 83131 - DNA, 20 bp, synthetic construct
  source 1..20: mol_type = other DNA
agagatcctctaaatcattt

SEQ ID NO: 83132 - DNA, 20 bp, synthetic construct
  source 1..20: mol_type = other DNA
gagagatcctctaaatcatt

SEQ ID NO: 83133 - DNA, 20 bp, synthetic construct
  source 1..20: mol_type = other DNA
tgagagatcctctaaatcat

SEQ ID NO: 83134 - DNA, 20 bp, synthetic construct
  source 1..20: mol_type = other DNA
atgagagatcctctaaatca

SEQ ID NO: 83135 - DNA, 20 bp, synthetic construct
  source 1..20: mol_type = other DNA
aatgagagatcctctaaatc

SEQ ID NO: 83136 - DNA, 20 bp, synthetic construct
  source 1..20: mol_type = other DNA
aaatgagagatcctctaaat

SEQ ID NO: 83137 - DNA, 20 bp, synthetic construct
  source 1..20: mol_type = other DNA
aaaatgagagatcctctaaa

SEQ ID NO: 83138 - DNA, 20 bp, synthetic construct
  source 1..20: mol_type = other DNA
gaaaatgagagatcctctaa

SEQ ID NO: 83139 - DNA, 20 bp, synthetic construct
  source 1..20: mol_type = other DNA
tgaaaatgagagatcctcta

SEQ ID NO: 83140 - DNA, 20 bp, synthetic construct
  source 1..20: mol_type = other DNA
ctgaaaatgagagatcctct

SEQ ID NO: 83141 - DNA, 20 bp, synthetic construct
  source 1..20: mol_type = other DNA
cctgaaaatgagagatcctc

SEQ ID NO: 83142 - DNA, 20 bp, synthetic construct
  source 1..20: mol_type = other DNA
ccctgaaaatgagagatcct

SEQ ID NO: 83143 - DNA, 20 bp, synthetic construct
  source 1..20: mol_type = other DNA
tccctgaaaatgagagatcc

SEQ ID NO: 83144 - DNA, 20 bp, synthetic construct
  source 1..20: mol_type = other DNA
ttccctgaaaatgagagatc

SEQ ID NO: 83145 - DNA, 20 bp, synthetic construct
  source 1..20: mol_type = other DNA
tttccctgaaaatgagagat

SEQ ID NO: 83146 - DNA, 20 bp, synthetic construct
  source 1..20: mol_type = other DNA
ttttccctgaaaatgagaga

SEQ ID NO: 83147 - DNA, 20 bp, synthetic construct
  source 1..20: mol_type = other DNA
attttccctgaaaatgagag

SEQ ID NO: 83148 - DNA, 20 bp, synthetic construct
  source 1..20: mol_type = other DNA
tattttccctgaaaatgaga

SEQ ID NO: 83149 - DNA, 20 bp, synthetic construct
  source 1..20: mol_type = other DNA
ttattttccctgaaaatgag

SEQ ID NO: 83150 - DNA, 20 bp, synthetic construct
  source 1..20: mol_type = other DNA
tttattttccctgaaaatga

SEQ ID NO: 83151 - DNA, 20 bp, synthetic construct
  source 1..20: mol_type = other DNA
atttattttccctgaaaatg

SEQ ID NO: 83152 - DNA, 20 bp, synthetic construct
  source 1..20: mol_type = other DNA
tatttattttccctgaaaat

SEQ ID NO: 83153 - DNA, 20 bp, synthetic construct
  source 1..20: mol_type = other DNA
atatttattttccctgaaaa

SEQ ID NO: 83154 - DNA, 20 bp, synthetic construct
  source 1..20: mol_type = other DNA
tatatttattttccctgaaa

SEQ ID NO: 83155 - DNA, 20 bp, synthetic construct
  source 1..20: mol_type = other DNA
atatatttattttccctgaa

SEQ ID NO: 83156 - DNA, 20 bp, synthetic construct
  source 1..20: mol_type = other DNA
aatatatttattttccctga

SEQ ID NO: 83157 - DNA, 20 bp, synthetic construct
  source 1..20: mol_type = other DNA
gaatatatttattttccctg

SEQ ID NO: 83158 - DNA, 20 bp, synthetic construct
  source 1..20: mol_type = other DNA
ggaatatatttattttccct

SEQ ID NO: 83159 - DNA, 20 bp, synthetic construct
  source 1..20: mol_type = other DNA
aggaatatatttattttccc

SEQ ID NO: 83160 - DNA, 20 bp, synthetic construct
  source 1..20: mol_type = other DNA
gaggaatatatttattttcc

SEQ ID NO: 83161 - DNA, 20 bp, synthetic construct
  source 1..20: mol_type = other DNA
ggaggaatatatttattttc

SEQ ID NO: 83162 - DNA, 20 bp, synthetic construct
  source 1..20: mol_type = other DNA
aggaggaatatatttatttt

SEQ ID NO: 83163 - DNA, 20 bp, synthetic construct
  source 1..20: mol_type = other DNA
caggaggaatatatttattt

SEQ ID NO: 83164 - DNA, 20 bp, synthetic construct
  source 1..20: mol_type = other DNA
ccaggaggaatatatttatt

SEQ ID NO: 83165 - DNA, 20 bp, synthetic construct
  source 1..20: mol_type = other DNA
tccaggaggaatatatttat

SEQ ID NO: 83166 - DNA, 20 bp, synthetic construct
  source 1..20: mol_type = other DNA
gtccaggaggaatatattta

SEQ ID NO: 83167 - DNA, 20 bp, synthetic construct
  source 1..20: mol_type = other DNA
tgtccaggaggaatatattt

SEQ ID NO: 83168 - DNA, 20 bp, synthetic construct
  source 1..20: mol_type = other DNA
ttgtccaggaggaatatatt

SEQ ID NO: 83169 - DNA, 20 bp, synthetic construct
  source 1..20: mol_type = other DNA
tttgtccaggaggaatatat

SEQ ID NO: 83170 - DNA, 20 bp, synthetic construct
  source 1..20: mol_type = other DNA
ctttgtccaggaggaatata

SEQ ID NO: 83171 - DNA, 20 bp, synthetic construct
  source 1..20: mol_type = other DNA
tctttgtccaggaggaatat

SEQ ID NO: 83172 - DNA, 20 bp, synthetic construct
  source 1..20: mol_type = other DNA
ttctttgtccaggaggaata

SEQ ID NO: 83173 - DNA, 20 bp, synthetic construct
  source 1..20: mol_type = other DNA
tttctttgtccaggaggaat

SEQ ID NO: 83174 - DNA, 20 bp, synthetic construct
  source 1..20: mol_type = other DNA
atttctttgtccaggaggaa

SEQ ID NO: 83175 - DNA, 20 bp, synthetic construct
  source 1..20: mol_type = other DNA
tatttctttgtccaggagga

SEQ ID NO: 83176 - DNA, 20 bp, synthetic construct
  source 1..20: mol_type = other DNA
ctatttctttgtccaggagg

SEQ ID NO: 83177 - DNA, 20 bp, synthetic construct
  source 1..20: mol_type = other DNA
tctatttctttgtccaggag

SEQ ID NO: 83178 - DNA, 20 bp, synthetic construct
  source 1..20: mol_type = other DNA
ctctatttctttgtccagga

SEQ ID NO: 83179 - DNA, 20 bp, synthetic construct
  source 1..20: mol_type = other DNA
tctctatttctttgtccagg

SEQ ID NO: 83180 - DNA, 20 bp, synthetic construct
  source 1..20: mol_type = other DNA
ttctctatttctttgtccag

SEQ ID NO: 83181 - DNA, 20 bp, synthetic construct
  source 1..20: mol_type = other DNA
cttctctatttctttgtcca

SEQ ID NO: 83182 - DNA, 20 bp, synthetic construct
  source 1..20: mol_type = other DNA
acttctctatttctttgtcc

SEQ ID NO: 83183 - DNA, 20 bp, synthetic construct
  source 1..20: mol_type = other DNA
gacttctctatttctttgtc

SEQ ID NO: 83184 - DNA, 20 bp, synthetic construct
  source 1..20: mol_type = other DNA
tgacttctctatttctttgt

SEQ ID NO: 83185 - DNA, 20 bp, synthetic construct
  source 1..20: mol_type = other DNA
atgacttctctatttctttg

SEQ ID NO: 83186 - DNA, 20 bp, synthetic construct
  source 1..20: mol_type = other DNA
tatgacttctctatttcttt

SEQ ID NO: 83187 - DNA, 20 bp, synthetic construct
  source 1..20: mol_type = other DNA
atatgacttctctatttctt

SEQ ID NO: 83188 - DNA, 20 bp, synthetic construct
  source 1..20: mol_type = other DNA
gatatgacttctctatttct

SEQ ID NO: 83189 - DNA, 20 bp, synthetic construct
  source 1..20: mol_type = other DNA
ggatatgacttctctatttc

SEQ ID NO: 83190 - DNA, 20 bp, synthetic construct
  source 1..20: mol_type = other DNA
aggatatgacttctctattt

SEQ ID NO: 83191 - DNA, 20 bp, synthetic construct
  source 1..20: mol_type = other DNA
caggatatgacttctctatt

SEQ ID NO: 83192 - DNA, 20 bp, synthetic construct
  source 1..20: mol_type = other DNA
ccaggatatgacttctctat

SEQ ID NO: 83193 - DNA, 20 bp, synthetic construct
  source 1..20: mol_type = other DNA
cccaggatatgacttctcta

SEQ ID NO: 83194 - DNA, 20 bp, synthetic construct
  source 1..20: mol_type = other DNA
ccccaggatatgacttctct

SEQ ID NO: 83195 - DNA, 20 bp, synthetic construct
  source 1..20: mol_type = other DNA
tccccaggatatgacttctc

SEQ ID NO: 83196 - DNA, 20 bp, synthetic construct
  source 1..20: mol_type = other DNA
ttccccaggatatgacttct

SEQ ID NO: 83197 - DNA, 20 bp, synthetic construct
  source 1..20: mol_type = other DNA
cttccccaggatatgacttc

SEQ ID NO: 83198 - DNA, 20 bp, synthetic construct
  source 1..20: mol_type = other DNA
acttccccaggatatgactt

SEQ ID NO: 83199 - DNA, 20 bp, synthetic construct
  source 1..20: mol_type = other DNA
cacttccccaggatatgact

SEQ ID NO: 83200 - DNA, 20 bp, synthetic construct
  source 1..20: mol_type = other DNA
ccacttccccaggatatgac

SEQ ID NO: 83201 - DNA, 20 bp, synthetic construct
  source 1..20: mol_type = other DNA
cccacttccccaggatatga

SEQ ID NO: 83202 - DNA, 20 bp, synthetic construct
  source 1..20: mol_type = other DNA
tcccacttccccaggatatg

SEQ ID NO: 83203 - DNA, 20 bp, synthetic construct
  source 1..20: mol_type = other DNA
ctcccacttccccaggatat

SEQ ID NO: 83204 - DNA, 20 bp, synthetic construct
  source 1..20: mol_type = other DNA
tctcccacttccccaggata

SEQ ID NO: 83205 - DNA, 20 bp, synthetic construct
  source 1..20: mol_type = other DNA
gtctcccacttccccaggat

SEQ ID NO: 83206 - DNA, 20 bp, synthetic construct
  source 1..20: mol_type = other DNA
tgtctcccacttccccagga

SEQ ID NO: 83207 - DNA, 20 bp, synthetic construct
  source 1..20: mol_type = other DNA
ctgtctcccacttccccagg

SEQ ID NO: 83208 - DNA, 20 bp, synthetic construct
  source 1..20: mol_type = other DNA
tctgtctcccacttccccag

SEQ ID NO: 83209 - DNA, 20 bp, synthetic construct
  source 1..20: mol_type = other DNA
ttctgtctcccacttcccca

SEQ ID NO: 83210 - DNA, 20 bp, synthetic construct
  source 1..20: mol_type = other DNA
attctgtctcccacttcccc

SEQ ID NO: 83211 - DNA, 20 bp, synthetic construct
  source 1..20: mol_type = other DNA
aattctgtctcccacttccc

SEQ ID NO: 83212 - DNA, 20 bp, synthetic construct
  source 1..20: mol_type = other DNA
gaattctgtctcccacttcc

SEQ ID NO: 83213 - DNA, 20 bp, synthetic construct
  source 1..20: mol_type = other DNA
tgaattctgtctcccacttc

SEQ ID NO: 83214 - DNA, 20 bp, synthetic construct
  source 1..20: mol_type = other DNA
gtgaattctgtctcccactt

SEQ ID NO: 83215 - DNA, 20 bp, synthetic construct
  source 1..20: mol_type = other DNA
ggtgaattctgtctcccact

SEQ ID NO: 83216 - DNA, 20 bp, synthetic construct
  source 1..20: mol_type = other DNA
cggtgaattctgtctcccac

SEQ ID NO: 83217 - DNA, 20 bp, synthetic construct
  source 1..20: mol_type = other DNA
gcggtgaattctgtctccca

SEQ ID NO: 83218 - DNA, 20 bp, synthetic construct
  source 1..20: mol_type = other DNA
cgcggtgaattctgtctccc

SEQ ID NO: 83219 - DNA, 20 bp, synthetic construct
  source 1..20: mol_type = other DNA
acgcggtgaattctgtctcc

SEQ ID NO: 83220 - DNA, 20 bp, synthetic construct
  source 1..20: mol_type = other DNA
tacgcggtgaattctgtctc

SEQ ID NO: 83221 - DNA, 20 bp, synthetic construct
  source 1..20: mol_type = other DNA
atacgcggtgaattctgtct

SEQ ID NO: 83222 - DNA, 20 bp, synthetic construct
  source 1..20: mol_type = other DNA
catacgcggtgaattctgtc

SEQ ID NO: 83223 - DNA, 20 bp, synthetic construct
  source 1..20: mol_type = other DNA
ccatacgcggtgaattctgt

SEQ ID NO: 83224 - DNA, 20 bp, synthetic construct
  source 1..20: mol_type = other DNA
cccatacgcggtgaattctg

SEQ ID NO: 83225 - DNA, 20 bp, synthetic construct
  source 1..20: mol_type = other DNA
gcccatacgcggtgaattct

SEQ ID NO: 83226 - DNA, 20 bp, synthetic construct
  source 1..20: mol_type = other DNA
ggcccatacgcggtgaattc

SEQ ID NO: 83227 - DNA, 20 bp, synthetic construct
  source 1..20: mol_type = other DNA
tggcccatacgcggtgaatt

SEQ ID NO: 83228 - DNA, 20 bp, synthetic construct
  source 1..20: mol_type = other DNA
ctggcccatacgcggtgaat

SEQ ID NO: 83229 - DNA, 20 bp, synthetic construct
  source 1..20: mol_type = other DNA
gctggcccatacgcggtgaa

SEQ ID NO: 83230 - DNA, 20 bp, synthetic construct
  source 1..20: mol_type = other DNA
ggctggcccatacgcggtga

SEQ ID NO: 83231 - DNA, 20 bp, synthetic construct
  source 1..20: mol_type = other DNA
aggctggcccatacgcggtg

SEQ ID NO: 83232 - DNA, 20 bp, synthetic construct
  source 1..20: mol_type = other DNA
caggctggcccatacgcggt

SEQ ID NO: 83233 - DNA, 20 bp, synthetic construct
  source 1..20: mol_type = other DNA
ccaggctggcccatacgcgg

SEQ ID NO: 83234 - DNA, 20 bp, synthetic construct
  source 1..20: mol_type = other DNA
tccaggctggcccatacgcg

SEQ ID NO: 83235 - DNA, 20 bp, synthetic construct
  source 1..20: mol_type = other DNA
atccaggctggcccatacgc

SEQ ID NO: 83236 - DNA, 20 bp, synthetic construct
  source 1..20: mol_type = other DNA
gatccaggctggcccatacg

SEQ ID NO: 83237 - DNA, 20 bp, synthetic construct
  source 1..20: mol_type = other DNA
cgatccaggctggcccatac

SEQ ID NO: 83238 - DNA, 20 bp, synthetic construct
  source 1..20: mol_type = other DNA
ccgatccaggctggcccata

SEQ ID NO: 83239 - DNA, 20 bp, synthetic construct
  source 1..20: mol_type = other DNA
cccgatccaggctggcccat

SEQ ID NO: 83240 - DNA, 20 bp, synthetic construct
  source 1..20: mol_type = other DNA
gcccgatccaggctggccca

SEQ ID NO: 83241 - DNA, 20 bp, synthetic construct
  source 1..20: mol_type = other DNA
agcccgatccaggctggccc

SEQ ID NO: 83242 - DNA, 20 bp, synthetic construct
  source 1..20: mol_type = other DNA
gagcccgatccaggctggcc

SEQ ID NO: 83243 - DNA, 20 bp, synthetic construct
  source 1..20: mol_type = other DNA
ggagcccgatccaggctggc

SEQ ID NO: 83244 - DNA, 20 bp, synthetic construct
  source 1..20: mol_type = other DNA
tggagcccgatccaggctgg

SEQ ID NO: 83245 - DNA, 20 bp, synthetic construct
  source 1..20: mol_type = other DNA
atggagcccgatccaggctg

SEQ ID NO: 83246 - DNA, 20 bp, synthetic construct
  source 1..20: mol_type = other DNA
catggagcccgatccaggct

SEQ ID NO: 83247 - DNA, 20 bp, synthetic construct
  source 1..20: mol_type = other DNA
gcatggagcccgatccaggc

SEQ ID NO: 83248 - DNA, 20 bp, synthetic construct
  source 1..20: mol_type = other DNA
ggcatggagcccgatccagg

SEQ ID NO: 83249 - DNA, 20 bp, synthetic construct
  source 1..20: mol_type = other DNA
tggcatggagcccgatccag

SEQ ID NO: 83250 - DNA, 20 bp, synthetic construct
  source 1..20: mol_type = other DNA
atggcatggagcccgatcca

SEQ ID NO: 83251 - DNA, 20 bp, synthetic construct
  source 1..20: mol_type = other DNA
gatggcatggagcccgatcc

SEQ ID NO: 83252 - DNA, 20 bp, synthetic construct
  source 1..20: mol_type = other DNA
tgatggcatggagcccgatc

SEQ ID NO: 83253 - DNA, 20 bp, synthetic construct
  source 1..20: mol_type = other DNA
ttgatggcatggagcccgat

SEQ ID NO: 83254 - DNA, 20 bp, synthetic construct
  source 1..20: mol_type = other DNA
cttgatggcatggagcccga

SEQ ID NO: 83255 - DNA, 20 bp, synthetic construct
  source 1..20: mol_type = other DNA
tcttgatggcatggagcccg

SEQ ID NO: 83256 - DNA, 20 bp, synthetic construct
  source 1..20: mol_type = other DNA
atcttgatggcatggagccc

SEQ ID NO: 83257 - DNA, 20 bp, synthetic construct
  source 1..20: mol_type = other DNA
gatcttgatggcatggagcc

SEQ ID NO: 83258 - DNA, 20 bp, synthetic construct
  source 1..20: mol_type = other DNA
ggatcttgatggcatggagc

SEQ ID NO: 83259 - DNA, 20 bp, synthetic construct
  source 1..20: mol_type = other DNA
tggatcttgatggcatggag

SEQ ID NO: 83260 - DNA, 20 bp, synthetic construct
  source 1..20: mol_type = other DNA
gtggatcttgatggcatgga

SEQ ID NO: 83261 - DNA, 20 bp, synthetic construct
  source 1..20: mol_type = other DNA
agtggatcttgatggcatgg

SEQ ID NO: 83262 - DNA, 20 bp, synthetic construct
  source 1..20: mol_type = other DNA
aagtggatcttgatggcatg

SEQ ID NO: 83263 - DNA, 20 bp, synthetic construct
  source 1..20: mol_type = other DNA
gaagtggatcttgatggcat

SEQ ID NO: 83264 - DNA, 20 bp, synthetic construct
  source 1..20: mol_type = other DNA
agaagtggatcttgatggca

SEQ ID NO: 83265 - DNA, 20 bp, synthetic construct
  source 1..20: mol_type = other DNA
gagaagtggatcttgatggc

SEQ ID NO: 83266 - DNA, 20 bp, synthetic construct
  source 1..20: mol_type = other DNA
tgagaagtggatcttgatgg

SEQ ID NO: 83267 - DNA, 20 bp, synthetic construct
  source 1..20: mol_type = other DNA
gtgagaagtggatcttgatg

SEQ ID NO: 83268 - DNA, 20 bp, synthetic construct
  source 1..20: mol_type = other DNA
tgtgagaagtggatcttgat

SEQ ID NO: 83269 - DNA, 20 bp, synthetic construct
  source 1..20: mol_type = other DNA
gtgtgagaagtggatcttga

SEQ ID NO: 83270 - DNA, 20 bp, synthetic construct
  source 1..20: mol_type = other DNA
agtgtgagaagtggatcttg

SEQ ID NO: 83271 - DNA, 20 bp, synthetic construct
  source 1..20: mol_type = other DNA
aagtgtgagaagtggatctt

SEQ ID NO: 83272 - DNA, 20 bp, synthetic construct
  source 1..20: mol_type = other DNA
gaagtgtgagaagtggatct

SEQ ID NO: 83273 - DNA, 20 bp, synthetic construct
  source 1..20: mol_type = other DNA
tgaagtgtgagaagtggatc

SEQ ID NO: 83274 - DNA, 20 bp, synthetic construct
  source 1..20: mol_type = other DNA
ctgaagtgtgagaagtggat

SEQ ID NO: 83275 - DNA, 20 bp, synthetic construct
  source 1..20: mol_type = other DNA
tctgaagtgtgagaagtgga

SEQ ID NO: 83276 - DNA, 20 bp, synthetic construct
  source 1..20: mol_type = other DNA
atctgaagtgtgagaagtgg

SEQ ID NO: 83277 - DNA, 20 bp, synthetic construct
  source 1..20: mol_type = other DNA
aatctgaagtgtgagaagtg

SEQ ID NO: 83278 - DNA, 20 bp, synthetic construct
  source 1..20: mol_type = other DNA
aaatctgaagtgtgagaagt

SEQ ID NO: 83279 - DNA, 20 bp, synthetic construct
  source 1..20: mol_type = other DNA
gaaatctgaagtgtgagaag

SEQ ID NO: 83280 - DNA, 20 bp, synthetic construct
  source 1..20: mol_type = other DNA
tgaaatctgaagtgtgagaa

SEQ ID NO: 83281 - DNA, 20 bp, synthetic construct
  source 1..20: mol_type = other DNA
ttgaaatctgaagtgtgaga

SEQ ID NO: 83282 - DNA, 20 bp, synthetic construct
  source 1..20: mol_type = other DNA
gttgaaatctgaagtgtgag

SEQ ID NO: 83283 - DNA, 20 bp, synthetic construct
  source 1..20: mol_type = other DNA
ggttgaaatctgaagtgtga

SEQ ID NO: 83284 - DNA, 20 bp, synthetic construct
  source 1..20: mol_type = other DNA
gggttgaaatctgaagtgtg

SEQ ID NO: 83285 - DNA, 20 bp, synthetic construct
  source 1..20: mol_type = other DNA
cgggttgaaatctgaagtgt

SEQ ID NO: 83286 - DNA, 20 bp, synthetic construct
  source 1..20: mol_type = other DNA
tcgggttgaaatctgaagtg

SEQ ID NO: 83287 - DNA, 20 bp, synthetic construct
  source 1..20: mol_type = other DNA
ttcgggttgaaatctgaagt

SEQ ID NO: 83288 - DNA, 20 bp, synthetic construct
  source 1..20: mol_type = other DNA
attcgggttgaaatctgaag

SEQ ID NO: 83289 - DNA, 20 bp, synthetic construct
  source 1..20: mol_type = other DNA
aattcgggttgaaatctgaa

SEQ ID NO: 83290 - DNA, 20 bp, synthetic construct
  source 1..20: mol_type = other DNA
gaattcgggttgaaatctga

SEQ ID NO: 83291 - DNA, 20 bp, synthetic construct
  source 1..20: mol_type = other DNA
agaattcgggttgaaatctg

SEQ ID NO: 83292 - DNA, 20 bp, synthetic construct
  source 1..20: mol_type = other DNA
cagaattcgggttgaaatct

SEQ ID NO: 83293 - DNA, 20 bp, synthetic construct
  source 1..20: mol_type = other DNA
ccagaattcgggttgaaatc

SEQ ID NO: 83294 - DNA, 20 bp, synthetic construct
  source 1..20: mol_type = other DNA
accagaattcgggttgaaat

SEQ ID NO: 83295 - DNA, 20 bp, synthetic construct
  source 1..20: mol_type = other DNA
aaccagaattcgggttgaaa

SEQ ID NO: 83296 - DNA, 20 bp, synthetic construct
  source 1..20: mol_type = other DNA
gaaccagaattcgggttgaa

SEQ ID NO: 83297 - DNA, 20 bp, synthetic construct
  source 1..20: mol_type = other DNA
tgaaccagaattcgggttga

SEQ ID NO: 83298 - DNA, 20 bp, synthetic construct
  source 1..20: mol_type = other DNA
ctgaaccagaattcgggttg

SEQ ID NO: 83299 - DNA, 20 bp, synthetic construct
  source 1..20: mol_type = other DNA
tctgaaccagaattcgggtt

SEQ ID NO: 83300 - DNA, 20 bp, synthetic construct
  source 1..20: mol_type = other DNA
gtctgaaccagaattcgggt

SEQ ID NO: 83301 - DNA, 20 bp, synthetic construct
  source 1..20: mol_type = other DNA
ggtctgaaccagaattcggg

SEQ ID NO: 83302 - DNA, 20 bp, synthetic construct
  source 1..20: mol_type = other DNA
tggtctgaaccagaattcgg

SEQ ID NO: 83303 - DNA, 20 bp, synthetic construct
  source 1..20: mol_type = other DNA
ttggtctgaaccagaattcg

SEQ ID NO: 83304 - DNA, 20 bp, synthetic construct
  source 1..20: mol_type = other DNA
tttggtctgaaccagaattc

SEQ ID NO: 83305 - DNA, 20 bp, synthetic construct
  source 1..20: mol_type = other DNA
ctttggtctgaaccagaatt

SEQ ID NO: 83306 - DNA, 20 bp, synthetic construct
  source 1..20: mol_type = other DNA
tctttggtctgaaccagaat

SEQ ID NO: 83307 - DNA, 20 bp, synthetic construct
  source 1..20: mol_type = other DNA
ctctttggtctgaaccagaa

SEQ ID NO: 83308 - DNA, 20 bp, synthetic construct
  source 1..20: mol_type = other DNA
actctttggtctgaaccaga

SEQ ID NO: 83309 - DNA, 20 bp, synthetic construct
  source 1..20: mol_type = other DNA
tactctttggtctgaaccag

SEQ ID NO: 83310 - DNA, 20 bp, synthetic construct
  source 1..20: mol_type = other DNA
ctactctttggtctgaacca

SEQ ID NO: 83311 - DNA, 20 bp, synthetic construct
  source 1..20: mol_type = other DNA
actactctttggtctgaacc

SEQ ID NO: 83312 - DNA, 20 bp, synthetic construct
  source 1..20: mol_type = other DNA
aactactctttggtctgaac

SEQ ID NO: 83313 - DNA, 20 bp, synthetic construct
  source 1..20: mol_type = other DNA
taactactctttggtctgaa

SEQ ID NO: 83314 - DNA, 20 bp, synthetic construct
  source 1..20: mol_type = other DNA
ttaactactctttggtctga

SEQ ID NO: 83315 - DNA, 20 bp, synthetic construct
  source 1..20: mol_type = other DNA
attaactactctttggtctg

SEQ ID NO: 83316 - DNA, 20 bp, synthetic construct
  source 1..20: mol_type = other DNA
cattaactactctttggtct

SEQ ID NO: 83317 - DNA, 20 bp, synthetic construct
  source 1..20: mol_type = other DNA
ccattaactactctttggtc

SEQ ID NO: 83318 - DNA, 20 bp, synthetic construct
  source 1..20: mol_type = other DNA
tccattaactactctttggt

SEQ ID NO: 83319 - DNA, 20 bp, synthetic construct
  source 1..20: mol_type = other DNA
ctccattaactactctttgg

SEQ ID NO: 83320 - DNA, 20 bp, synthetic construct
  source 1..20: mol_type = other DNA
cctccattaactactctttg

SEQ ID NO: 83321 - DNA, 20 bp, synthetic construct
  source 1..20: mol_type = other DNA
gcctccattaactactcttt

SEQ ID NO: 83322 - DNA, 20 bp, synthetic construct
  source 1..20: mol_type = other DNA
tgcctccattaactactctt

SEQ ID NO: 83323 - DNA, 20 bp, synthetic construct
  source 1..20: mol_type = other DNA
ttgcctccattaactactct

SEQ ID NO: 83324 - DNA, 20 bp, synthetic construct
  source 1..20: mol_type = other DNA
cttgcctccattaactactc

SEQ ID NO: 83325 - DNA, 20 bp, synthetic construct
  source 1..20: mol_type = other DNA
acttgcctccattaactact

SEQ ID NO: 83326 - DNA, 20 bp, synthetic construct
  source 1..20: mol_type = other DNA
tacttgcctccattaactac

SEQ ID NO: 83327 - DNA, 20 bp, synthetic construct
  source 1..20: mol_type = other DNA
atacttgcctccattaacta

SEQ ID NO: 83328 - DNA, 20 bp, synthetic construct
  source 1..20: mol_type = other DNA
aatacttgcctccattaact

SEQ ID NO: 83329 - DNA, 20 bp, synthetic construct
  source 1..20: mol_type = other DNA
aaatacttgcctccattaac

SEQ ID NO: 83330 - DNA, 20 bp, synthetic construct
  source 1..20: mol_type = other DNA
aaaatacttgcctccattaa

SEQ ID NO: 83331 - DNA, 20 bp, synthetic construct
  source 1..20: mol_type = other DNA
caaaatacttgcctccatta

SEQ ID NO: 83332 - DNA, 20 bp, synthetic construct
  source 1..20: mol_type = other DNA
tcaaaatacttgcctccatt

SEQ ID NO: 83333 - DNA, 20 bp, synthetic construct
  source 1..20: mol_type = other DNA
gtcaaaatacttgcctccat

SEQ ID NO: 83334 - DNA, 20 bp, synthetic construct
  source 1..20: mol_type = other DNA
ggtcaaaatacttgcctcca

SEQ ID NO: 83335 - DNA, 20 bp, synthetic construct
  source 1..20: mol_type = other DNA
tggtcaaaatacttgcctcc

SEQ ID NO: 83336 - DNA, 20 bp, synthetic construct
  source 1..20: mol_type = other DNA
ctggtcaaaatacttgcctc

SEQ ID NO: 83337 - DNA, 20 bp, synthetic construct
  source 1..20: mol_type = other DNA
tctggtcaaaatacttgcct

SEQ ID NO: 83338 - DNA, 20 bp, synthetic construct
  source 1..20: mol_type = other DNA
gtctggtcaaaatacttgcc

SEQ ID NO: 83339 - DNA, 20 bp, synthetic construct
  source 1..20: mol_type = other DNA
agtctggtcaaaatacttgc

SEQ ID NO: 83340 - DNA, 20 bp, synthetic construct
  source 1..20: mol_type = other DNA
aagtctggtcaaaatacttg

SEQ ID NO: 83341 - DNA, 20 bp, synthetic construct
  source 1..20: mol_type = other DNA
caagtctggtcaaaatactt

SEQ ID NO: 83342 - DNA, 20 bp, synthetic construct
  source 1..20: mol_type = other DNA
acaagtctggtcaaaatact

SEQ ID NO: 83343 - DNA, 20 bp, synthetic construct
  source 1..20: mol_type = other DNA
gacaagtctggtcaaaatac

SEQ ID NO: 83344 - DNA, 20 bp, synthetic construct
  source 1..20: mol_type = other DNA
tgacaagtctggtcaaaata

SEQ ID NO: 83345 - DNA, 20 bp, synthetic construct
  source 1..20: mol_type = other DNA
ttgacaagtctggtcaaaat

SEQ ID NO: 83346 - DNA, 20 bp, synthetic construct
  source 1..20: mol_type = other DNA
attgacaagtctggtcaaaa

SEQ ID NO: 83347 - DNA, 20 bp, synthetic construct
  source 1..20: mol_type = other DNA
tattgacaagtctggtcaaa

SEQ ID NO: 83348 - DNA, 20 bp, synthetic construct
  source 1..20: mol_type = other DNA
atattgacaagtctggtcaa

SEQ ID NO: 83349 - DNA, 20 bp, synthetic construct
  source 1..20: mol_type = other DNA
gatattgacaagtctggtca

SEQ ID NO: 83350 - DNA, 20 bp, synthetic construct
  source 1..20: mol_type = other DNA
tgatattgacaagtctggtc

SEQ ID NO: 83351 - DNA, 20 bp, synthetic construct
  source 1..20: mol_type = other DNA
atgatattgacaagtctggt

SEQ ID NO: 83352 - DNA, 20 bp, synthetic construct
  source 1..20: mol_type = other DNA
aatgatattgacaagtctgg

SEQ ID NO: 83353 - DNA, 20 bp, synthetic construct
  source 1..20: mol_type = other DNA
caatgatattgacaagtctg

SEQ ID NO: 83354 - DNA, 20 bp, synthetic construct
  source 1..20: mol_type = other DNA
tcaatgatattgacaagtct

SEQ ID NO: 83355 - DNA, 20 bp, synthetic construct
  source 1..20: mol_type = other DNA
atcaatgatattgacaagtc

SEQ ID NO: 83356 - DNA, 20 bp, synthetic construct
  source 1..20: mol_type = other DNA
tatcaatgatattgacaagt

SEQ ID NO: 83357 - DNA, 20 bp, synthetic construct
  source 1..20: mol_type = other DNA
ttatcaatgatattgacaag

SEQ ID NO: 83358 - DNA, 20 bp, synthetic construct
  source 1..20: mol_type = other DNA
tttatcaatgatattgacaa

SEQ ID NO: 83359 - DNA, 20 bp, synthetic construct
  source 1..20: mol_type = other DNA
ttttatcaatgatattgaca

SEQ ID NO: 83360 - DNA, 20 bp, synthetic construct
  source 1..20: mol_type = other DNA
attttatcaatgatattgac

SEQ ID NO: 83361 - DNA, 20 bp, synthetic construct
  source 1..20: mol_type = other DNA
tattttatcaatgatattga

SEQ ID NO: 83362 - DNA, 20 bp, synthetic construct
  source 1..20: mol_type = other DNA
ctattttatcaatgatattg

SEQ ID NO: 83363 - DNA, 20 bp, synthetic construct
  source 1..20: mol_type = other DNA
actattttatcaatgatatt

SEQ ID NO: 83364 - DNA, 20 bp, synthetic construct
  source 1..20: mol_type = other DNA
aactattttatcaatgatat

SEQ ID NO: 83365 - DNA, 20 bp, synthetic construct
  source 1..20: mol_type = other DNA
aaactattttatcaatgata

SEQ ID NO: 83366 - DNA, 20 bp, synthetic construct
  source 1..20: mol_type = other DNA
aaaactattttatcaatgat

SEQ ID NO: 83367 - DNA, 20 bp, synthetic construct
  source 1..20: mol_type = other DNA
gaaaactattttatcaatga

SEQ ID NO: 83368 - DNA, 20 bp, synthetic construct
  source 1..20: mol_type = other DNA
agaaaactattttatcaatg

SEQ ID NO: 83369 - DNA, 20 bp, synthetic construct
  source 1..20: mol_type = other DNA
tagaaaactattttatcaat

SEQ ID NO: 83370 - DNA, 20 bp, synthetic construct
  source 1..20: mol_type = other DNA
ttagaaaactattttatcaa

SEQ ID NO: 83371 - DNA, 20 bp, synthetic construct
  source 1..20: mol_type = other DNA
tttagaaaactattttatca

SEQ ID NO: 83372 - DNA, 20 bp, synthetic construct
  source 1..20: mol_type = other DNA
atttagaaaactattttatc

SEQ ID NO: 83373 - DNA, 20 bp, synthetic construct
  source 1..20: mol_type = other DNA
tatttagaaaactattttat

SEQ ID NO: 83374 - DNA, 20 bp, synthetic construct
  source 1..20: mol_type = other DNA
gtatttagaaaactatttta

SEQ ID NO: 83375 - DNA, 20 bp, synthetic construct
  source 1..20: mol_type = other DNA
agtatttagaaaactatttt

SEQ ID NO: 83376 - DNA, 20 bp, synthetic construct
  source 1..20: mol_type = other DNA
aagtatttagaaaactattt

SEQ ID NO: 83377 - DNA, 20 bp, synthetic construct
  source 1..20: mol_type = other DNA
taagtatttagaaaactatt

SEQ ID NO: 83378 - DNA, 20 bp, synthetic construct
  source 1..20: mol_type = other DNA
ttaagtatttagaaaactat

SEQ ID NO: 83379 - DNA, 20 bp, synthetic construct
  source 1..20: mol_type = other DNA
tttaagtatttagaaaacta

SEQ ID NO: 83380 - DNA, 20 bp, synthetic construct
  source 1..20: mol_type = other DNA
ttttaagtatttagaaaact

SEQ ID NO: 83381 - DNA, 20 bp, synthetic construct
  source 1..20: mol_type = other DNA
attttaagtatttagaaaac

SEQ ID NO: 83382 - DNA, 20 bp, synthetic construct
  source 1..20: mol_type = other DNA
tattttaagtatttagaaaa

SEQ ID NO: 83383 - DNA, 20 bp, synthetic construct
  source 1..20: mol_type = other DNA
gtattttaagtatttagaaa

SEQ ID NO: 83384 - DNA, 20 bp, synthetic construct
  source 1..20: mol_type = other DNA
agtattttaagtatttagaa

SEQ ID NO: 83385 - DNA, 20 bp, synthetic construct
  source 1..20: mol_type = other DNA
aagtattttaagtatttaga

SEQ ID NO: 83386 - DNA, 20 bp, synthetic construct
  source 1..20: mol_type = other DNA
taagtattttaagtatttag

SEQ ID NO: 83387 - DNA, 20 bp, synthetic construct
  source 1..20: mol_type = other DNA
ttaagtattttaagtattta

SEQ ID NO: 83388 - DNA, 20 bp, synthetic construct
  source 1..20: mol_type = other DNA
tttaagtattttaagtattt

SEQ ID NO: 83389 - DNA, 20 bp, synthetic construct
  source 1..20: mol_type = other DNA
ttttaagtattttaagtatt

SEQ ID NO: 83390 - DNA, 20 bp, synthetic construct
  source 1..20: mol_type = other DNA
attttaagtattttaagtat

SEQ ID NO: 83391 - DNA, 20 bp, synthetic construct
  source 1..20: mol_type = other DNA
tattttaagtattttaagta

SEQ ID NO: 83392 - DNA, 20 bp, synthetic construct
  source 1..20: mol_type = other DNA
ctattttaagtattttaagt

SEQ ID NO: 83393 - DNA, 20 bp, synthetic construct
  source 1..20: mol_type = other DNA
actattttaagtattttaag

SEQ ID NO: 83394 - DNA, 20 bp, synthetic construct
  source 1..20: mol_type = other DNA
aactattttaagtattttaa

SEQ ID NO: 83395 - DNA, 20 bp, synthetic construct
  source 1..20: mol_type = other DNA
aaactattttaagtatttta

SEQ ID NO: 83396 - DNA, 20 bp, synthetic construct
  source 1..20: mol_type = other DNA
taaactattttaagtatttt

SEQ ID NO: 83397 - DNA, 20 bp, synthetic construct
  source 1..20: mol_type = other DNA
gtaaactattttaagtattt

SEQ ID NO: 83398 - DNA, 20 bp, synthetic construct
  source 1..20: mol_type = other DNA
tgtaaactattttaagtatt

SEQ ID NO: 83399 - DNA, 20 bp, synthetic construct
  source 1..20: mol_type = other DNA
atgtaaactattttaagtat

SEQ ID NO: 83400 - DNA, 20 bp, synthetic construct
  source 1..20: mol_type = other DNA
tatgtaaactattttaagta

SEQ ID NO: 83401 - DNA, 20 bp, synthetic construct
  source 1..20: mol_type = other DNA
ttatgtaaactattttaagt

SEQ ID NO: 83402 - DNA, 20 bp, synthetic construct
  source 1..20: mol_type = other DNA
gttatgtaaactattttaag

SEQ ID NO: 83403 - DNA, 20 bp, synthetic construct
  source 1..20: mol_type = other DNA
agttatgtaaactattttaa

SEQ ID NO: 83404 - DNA, 20 bp, synthetic construct
  source 1..20: mol_type = other DNA
cagttatgtaaactatttta

SEQ ID NO: 83405 - DNA, 20 bp, synthetic construct
  source 1..20: mol_type = other DNA
tcagttatgtaaactatttt

SEQ ID NO: 83406 - DNA, 20 bp, synthetic construct
  source 1..20: mol_type = other DNA
atcagttatgtaaactattt

SEQ ID NO: 83407 - DNA, 20 bp, synthetic construct
  source 1..20: mol_type = other DNA
tatcagttatgtaaactatt

SEQ ID NO: 83408 - DNA, 20 bp, synthetic construct
  source 1..20: mol_type = other DNA
atatcagttatgtaaactat

SEQ ID NO: 83409 - DNA, 20 bp, synthetic construct
  source 1..20: mol_type = other DNA
catatcagttatgtaaacta

SEQ ID NO: 83410 - DNA, 20 bp, synthetic construct
  source 1..20: mol_type = other DNA
tcatatcagttatgtaaact

SEQ ID NO: 83411 - DNA, 20 bp, synthetic construct
  source 1..20: mol_type = other DNA
ttcatatcagttatgtaaac

SEQ ID NO: 83412 - DNA, 20 bp, synthetic construct
  source 1..20: mol_type = other DNA
attcatatcagttatgtaaa

SEQ ID NO: 83413 - DNA, 20 bp, synthetic construct
  source 1..20: mol_type = other DNA
cattcatatcagttatgtaa

SEQ ID NO: 83414 - DNA, 20 bp, synthetic construct
  source 1..20: mol_type = other DNA
acattcatatcagttatgta

SEQ ID NO: 83415 - DNA, 20 bp, synthetic construct
  source 1..20: mol_type = other DNA
cacattcatatcagttatgt

SEQ ID NO: 83416 - DNA, 20 bp, synthetic construct
  source 1..20: mol_type = other DNA
gcacattcatatcagttatg

SEQ ID NO: 83417 - DNA, 20 bp, synthetic construct
  source 1..20: mol_type = other DNA
tgcacattcatatcagttat

SEQ ID NO: 83418 - DNA, 20 bp, synthetic construct
  source 1..20: mol_type = other DNA
gtgcacattcatatcagtta

SEQ ID NO: 83419 - DNA, 20 bp, synthetic construct
  source 1..20: mol_type = other DNA
agtgcacattcatatcagtt

SEQ ID NO: 83420 - DNA, 20 bp, synthetic construct
  source 1..20: mol_type = other DNA
aagtgcacattcatatcagt

SEQ ID NO: 83421 - DNA, 20 bp, synthetic construct
  source 1..20: mol_type = other DNA
aaagtgcacattcatatcag

SEQ ID NO: 83422 - DNA, 20 bp, synthetic construct
  source 1..20: mol_type = other DNA
taaagtgcacattcatatca

SEQ ID NO: 83423 - DNA, 20 bp, synthetic construct
  source 1..20: mol_type = other DNA
ttaaagtgcacattcatatc

SEQ ID NO: 83424 - DNA, 20 bp, synthetic construct
  source 1..20: mol_type = other DNA
attaaagtgcacattcatat

SEQ ID NO: 83425 - DNA, 20 bp, synthetic construct
  source 1..20: mol_type = other DNA
cattaaagtgcacattcata

SEQ ID NO: 83426 - DNA, 20 bp, synthetic construct
  source 1..20: mol_type = other DNA
tcattaaagtgcacattcat

SEQ ID NO: 83427 - DNA, 20 bp, synthetic construct
  source 1..20: mol_type = other DNA
atcattaaagtgcacattca

SEQ ID NO: 83428 - DNA, 20 bp, synthetic construct
  source 1..20: mol_type = other DNA
aatcattaaagtgcacattc

SEQ ID NO: 83429 - DNA, 20 bp, synthetic construct
  source 1..20: mol_type = other DNA
aaatcattaaagtgcacatt

SEQ ID NO: 83430 - DNA, 20 bp, synthetic construct
  source 1..20: mol_type = other DNA
caaatcattaaagtgcacat

SEQ ID NO: 83431 - DNA, 20 bp, synthetic construct
  source 1..20: mol_type = other DNA
ccaaatcattaaagtgcaca

SEQ ID NO: 83432 - DNA, 20 bp, synthetic construct
  source 1..20: mol_type = other DNA
accaaatcattaaagtgcac

SEQ ID NO: 83433 - DNA, 20 bp, synthetic construct
  source 1..20: mol_type = other DNA
caccaaatcattaaagtgca

SEQ ID NO: 83434 - DNA, 20 bp, synthetic construct
  source 1..20: mol_type = other DNA
tcaccaaatcattaaagtgc

SEQ ID NO: 83435 - DNA, 20 bp, synthetic construct
  source 1..20: mol_type = other DNA
ctcaccaaatcattaaagtg

SEQ ID NO: 83436 - DNA, 20 bp, synthetic construct
  source 1..20: mol_type = other DNA
actcaccaaatcattaaagt

SEQ ID NO: 83437 - DNA, 20 bp, synthetic construct
  source 1..20: mol_type = other DNA
tactcaccaaatcattaaag

SEQ ID NO: 83438 - DNA, 20 bp, synthetic construct
  source 1..20: mol_type = other DNA
ctactcaccaaatcattaaa

SEQ ID NO: 83439 - DNA, 20 bp, synthetic construct
  source 1..20: mol_type = other DNA
gctactcaccaaatcattaa

SEQ ID NO: 83440 - DNA, 20 bp, synthetic construct
  source 1..20: mol_type = other DNA
agctactcaccaaatcatta

SEQ ID NO: 83441 - DNA, 20 bp, synthetic construct
  source 1..20: mol_type = other DNA
aagctactcaccaaatcatt

SEQ ID NO: 83442 - DNA, 20 bp, synthetic construct
  source 1..20: mol_type = other DNA
aaagctactcaccaaatcat

SEQ ID NO: 83443 - DNA, 20 bp, synthetic construct
  source 1..20: mol_type = other DNA
gaaagctactcaccaaatca

SEQ ID NO: 83444 - DNA, 20 bp, synthetic construct
  source 1..20: mol_type = other DNA
tgaaagctactcaccaaatc

SEQ ID NO: 83445 - DNA, 20 bp, synthetic construct
  source 1..20: mol_type = other DNA
gtgaaagctactcaccaaat

SEQ ID NO: 83446 - DNA, 20 bp, synthetic construct
  source 1..20: mol_type = other DNA
agtgaaagctactcaccaaa

SEQ ID NO: 83447 - DNA, 20 bp, synthetic construct
  source 1..20: mol_type = other DNA
aagtgaaagctactcaccaa

SEQ ID NO: 83448 - DNA, 20 bp, synthetic construct
  source 1..20: mol_type = other DNA
gaagtgaaagctactcacca

SEQ ID NO: 83449 - DNA, 20 bp, synthetic construct
  source 1..20: mol_type = other DNA
tgaagtgaaagctactcacc

SEQ ID NO: 83450 - DNA, 20 bp, synthetic construct
  source 1..20: mol_type = other DNA
ctgaagtgaaagctactcac

SEQ ID NO: 83451 - DNA, 20 bp, synthetic construct
  source 1..20: mol_type = other DNA
gctgaagtgaaagctactca

SEQ ID NO: 83452 - DNA, 20 bp, synthetic construct
  source 1..20: mol_type = other DNA
tgctgaagtgaaagctactc

SEQ ID NO: 83453 - DNA, 20 bp, synthetic construct
  source 1..20: mol_type = other DNA
atgctgaagtgaaagctact

SEQ ID NO: 83454 - DNA, 20 bp, synthetic construct
  source 1..20: mol_type = other DNA
aatgctgaagtgaaagctac

SEQ ID NO: 83455 - DNA, 20 bp, synthetic construct
  source 1..20: mol_type = other DNA
taatgctgaagtgaaagcta

SEQ ID NO: 83456 - DNA, 20 bp, synthetic construct
  source 1..20: mol_type = other DNA
gtaatgctgaagtgaaagct

SEQ ID NO: 83457 - DNA, 20 bp, synthetic construct
  source 1..20: mol_type = other DNA
agtaatgctgaagtgaaagc

SEQ ID NO: 83458 - DNA, 20 bp, synthetic construct
  source 1..20: mol_type = other DNA
aagtaatgctgaagtgaaag

SEQ ID NO: 83459 - DNA, 20 bp, synthetic construct
  source 1..20: mol_type = other DNA
taagtaatgctgaagtgaaa

SEQ ID NO: 83460 - DNA, 20 bp, synthetic construct
  source 1..20: mol_type = other DNA
ttaagtaatgctgaagtgaa

SEQ ID NO: 83461 - DNA, 20 bp, synthetic construct
  source 1..20: mol_type = other DNA
tttaagtaatgctgaagtga

SEQ ID NO: 83462 - DNA, 20 bp, synthetic construct
  source 1..20: mol_type = other DNA
ttttaagtaatgctgaagtg

SEQ ID NO: 83463 - DNA, 20 bp, synthetic construct
  source 1..20: mol_type = other DNA
attttaagtaatgctgaagt

SEQ ID NO: 83464 - DNA, 20 bp, synthetic construct
  source 1..20: mol_type = other DNA
aattttaagtaatgctgaag

SEQ ID NO: 83465 - DNA, 20 bp, synthetic construct
  source 1..20: mol_type = other DNA
caattttaagtaatgctgaa

SEQ ID NO: 83466 - DNA, 20 bp, synthetic construct
  source 1..20: mol_type = other DNA
ccaattttaagtaatgctga

SEQ ID NO: 83467 - DNA, 20 bp, synthetic construct
  source 1..20: mol_type = other DNA
gccaattttaagtaatgctg

SEQ ID NO: 83468 - DNA, 20 bp, synthetic construct
  source 1..20: mol_type = other DNA
agccaattttaagtaatgct

SEQ ID NO: 83469 - DNA, 20 bp, synthetic construct
  source 1..20: mol_type = other DNA
aagccaattttaagtaatgc

SEQ ID NO: 83470 - DNA, 20 bp, synthetic construct
  source 1..20: mol_type = other DNA
aaagccaattttaagtaatg

SEQ ID NO: 83471 - DNA, 20 bp, synthetic construct
  source 1..20: mol_type = other DNA
aaaagccaattttaagtaat

SEQ ID NO: 83472 - DNA, 20 bp, synthetic construct
  source 1..20: mol_type = other DNA
caaaagccaattttaagtaa

SEQ ID NO: 83473 - DNA, 20 bp, synthetic construct
  source 1..20: mol_type = other DNA
acaaaagccaattttaagta

SEQ ID NO: 83474 - DNA, 20 bp, synthetic construct
  source 1..20: mol_type = other DNA
cacaaaagccaattttaagt

SEQ ID NO: 83475 - DNA, 20 bp, synthetic construct
  source 1..20: mol_type = other DNA
ccacaaaagccaattttaag

SEQ ID NO: 83476 - DNA, 20 bp, synthetic construct
  source 1..20: mol_type = other DNA
tccacaaaagccaattttaa

SEQ ID NO: 83477 - DNA, 20 bp, synthetic construct
  source 1..20: mol_type = other DNA
atccacaaaagccaatttta

SEQ ID NO: 83478 - DNA, 20 bp, synthetic construct
  source 1..20: mol_type = other DNA
tatccacaaaagccaatttt

SEQ ID NO: 83479 - DNA, 20 bp, synthetic construct
  source 1..20: mol_type = other DNA
atatccacaaaagccaattt

SEQ ID NO: 83480 - DNA, 20 bp, synthetic construct
  source 1..20: mol_type = other DNA
aatatccacaaaagccaatt

SEQ ID NO: 83481 - DNA, 20 bp, synthetic construct
  source 1..20: mol_type = other DNA
taatatccacaaaagccaat

SEQ ID NO: 83482 - DNA, 20 bp, synthetic construct
  source 1..20: mol_type = other DNA
ttaatatccacaaaagccaa

SEQ ID NO: 83483 - DNA, 20 bp, synthetic construct
  source 1..20: mol_type = other DNA
tttaatatccacaaaagcca

SEQ ID NO: 83484 - DNA, 20 bp, synthetic construct
  source 1..20: mol_type = other DNA
atttaatatccacaaaagcc

SEQ ID NO: 83485 - DNA, 20 bp, synthetic construct
  source 1..20: mol_type = other DNA
aatttaatatccacaaaagc

SEQ ID NO: 83486 - DNA, 20 bp, synthetic construct
  source 1..20: mol_type = other DNA
taatttaatatccacaaaag

SEQ ID NO: 83487 - DNA, 20 bp, synthetic construct
  source 1..20: mol_type = other DNA
ctaatttaatatccacaaaa

SEQ ID NO: 83488 - DNA, 20 bp, synthetic construct
  source 1..20: mol_type = other DNA
actaatttaatatccacaaa

SEQ ID NO: 83489 - DNA, 20 bp, synthetic construct
  source 1..20: mol_type = other DNA
tactaatttaatatccacaa

SEQ ID NO: 83490 - DNA, 20 bp, synthetic construct
  source 1..20: mol_type = other DNA
ttactaatttaatatccaca

SEQ ID NO: 83491 - DNA, 20 bp, synthetic construct
  source 1..20: mol_type = other DNA
tttactaatttaatatccac

SEQ ID NO: 83492 - DNA, 20 bp, synthetic construct
  source 1..20: mol_type = other DNA
ttttactaatttaatatcca

SEQ ID NO: 83493 - DNA, 20 bp, synthetic construct
  source 1..20: mol_type = other DNA
gttttactaatttaatatcc

SEQ ID NO: 83494 - DNA, 20 bp, synthetic construct
  source 1..20: mol_type = other DNA
tgttttactaatttaatatc

SEQ ID NO: 83495 - DNA, 20 bp, synthetic construct
  source 1..20: mol_type = other DNA
atgttttactaatttaatat

SEQ ID NO: 83496 - DNA, 20 bp, synthetic construct
  source 1..20: mol_type = other DNA
aatgttttactaatttaata

SEQ ID NO: 83497 - DNA, 20 bp, synthetic construct
  source 1..20: mol_type = other DNA
caatgttttactaatttaat

SEQ ID NO: 83498 - DNA, 20 bp, synthetic construct
  source 1..20: mol_type = other DNA
acaatgttttactaatttaa

SEQ ID NO: 83499 - DNA, 20 bp, synthetic construct
  source 1..20: mol_type = other DNA
tacaatgttttactaattta

SEQ ID NO: 83500 - DNA, 20 bp, synthetic construct
  source 1..20: mol_type = other DNA
atacaatgttttactaattt

SEQ ID NO: 83501 - DNA, 20 bp, synthetic construct
  source 1..20: mol_type = other DNA
tatacaatgttttactaatt

SEQ ID NO: 83502 - DNA, 20 bp, synthetic construct
  source 1..20: mol_type = other DNA
atatacaatgttttactaat

SEQ ID NO: 83503 - DNA, 20 bp, synthetic construct
  source 1..20: mol_type = other DNA
catatacaatgttttactaa

SEQ ID NO: 83504 - DNA, 20 bp, synthetic construct
  source 1..20: mol_type = other DNA
acatatacaatgttttacta

SEQ ID NO: 83505 - DNA, 20 bp, synthetic construct
  source 1..20: mol_type = other DNA
gacatatacaatgttttact

SEQ ID NO: 83506 - DNA, 20 bp, synthetic construct
  source 1..20: mol_type = other DNA
tgacatatacaatgttttac

SEQ ID NO: 83507 - DNA, 20 bp, synthetic construct
  source 1..20: mol_type = other DNA
atgacatatacaatgtttta

SEQ ID NO: 83508 - DNA, 20 bp, synthetic construct
  source 1..20: mol_type = other DNA
aatgacatatacaatgtttt

SEQ ID NO: 83509 - DNA, 20 bp, synthetic construct
  source 1..20: mol_type = other DNA
caatgacatatacaatgttt

SEQ ID NO: 83510 - DNA, 20 bp, synthetic construct
  source 1..20: mol_type = other DNA
tcaatgacatatacaatgtt

SEQ ID NO: 83511 - DNA, 20 bp, synthetic construct
  source 1..20: mol_type = other DNA
gtcaatgacatatacaatgt

SEQ ID NO: 83512 - DNA, 20 bp, synthetic construct
  source 1..20: mol_type = other DNA
tgtcaatgacatatacaatg

SEQ ID NO: 83513 - DNA, 20 bp, synthetic construct
  source 1..20: mol_type = other DNA
atgtcaatgacatatacaat

SEQ ID NO: 83514 - DNA, 20 bp, synthetic construct
  source 1..20: mol_type = other DNA
tatgtcaatgacatatacaa

SEQ ID NO: 83515 - DNA, 20 bp, synthetic construct
  source 1..20: mol_type = other DNA
atatgtcaatgacatataca

SEQ ID NO: 83516 - DNA, 20 bp, synthetic construct
  source 1..20: mol_type = other DNA
tatatgtcaatgacatatac

SEQ ID NO: 83517 - DNA, 20 bp, synthetic construct
  source 1..20: mol_type = other DNA
atatatgtcaatgacatata

SEQ ID NO: 83518 - DNA, 20 bp, synthetic construct
  source 1..20: mol_type = other DNA
tatatatgtcaatgacatat

SEQ ID NO: 83519 - DNA, 20 bp, synthetic construct
  source 1..20: mol_type = other DNA
atatatatgtcaatgacata

SEQ ID NO: 83520 - DNA, 20 bp, synthetic construct
  source 1..20: mol_type = other DNA
aatatatatgtcaatgacat

SEQ ID NO: 83521 - DNA, 20 bp, synthetic construct
  source 1..20: mol_type = other DNA
taatatatatgtcaatgaca

SEQ ID NO: 83522 - DNA, 20 bp, synthetic construct
  source 1..20: mol_type = other DNA
ataatatatatgtcaatgac

SEQ ID NO: 83523 - DNA, 20 bp, synthetic construct
  source 1..20: mol_type = other DNA
aataatatatatgtcaatga

SEQ ID NO: 83524 - DNA, 20 bp, synthetic construct
  source 1..20: mol_type = other DNA
aaataatatatatgtcaatg

SEQ ID NO: 83525 - DNA, 20 bp, synthetic construct
  source 1..20: mol_type = other DNA
taaataatatatatgtcaat

SEQ ID NO: 83526 - DNA, 20 bp, synthetic construct
  source 1..20: mol_type = other DNA
ctaaataatatatatgtcaa

SEQ ID NO: 83527 - DNA, 20 bp, synthetic construct
  source 1..20: mol_type = other DNA
gctaaataatatatatgtca

SEQ ID NO: 83528 - DNA, 20 bp, synthetic construct
  source 1..20: mol_type = other DNA
tgctaaataatatatatgtc

SEQ ID NO: 83529 - DNA, 20 bp, synthetic construct
  source 1..20: mol_type = other DNA
atgctaaataatatatatgt

SEQ ID NO: 83530 - DNA, 20 bp, synthetic construct
  source 1..20: mol_type = other DNA
catgctaaataatatatatg

SEQ ID NO: 83531 - DNA, 20 bp, synthetic construct
  source 1..20: mol_type = other DNA
tcatgctaaataatatatat

SEQ ID NO: 83532 - DNA, 20 bp, synthetic construct
  source 1..20: mol_type = other DNA
atcatgctaaataatatata

SEQ ID NO: 83533 - DNA, 20 bp, synthetic construct
  source 1..20: mol_type = other DNA
catcatgctaaataatatat

SEQ ID NO: 83534 - DNA, 20 bp, synthetic construct
  source 1..20: mol_type = other DNA
tcatcatgctaaataatata

SEQ ID NO: 83535 - DNA, 20 bp, synthetic construct
  source 1..20: mol_type = other DNA
ttcatcatgctaaataatat

SEQ ID NO: 83536 - DNA, 20 bp, synthetic construct
  source 1..20: mol_type = other DNA
tttcatcatgctaaataata

SEQ ID NO: 83537 - DNA, 20 bp, synthetic construct
  source 1..20: mol_type = other DNA
atttcatcatgctaaataat

SEQ ID NO: 83538 - DNA, 20 bp, synthetic construct
  source 1..20: mol_type = other DNA
tatttcatcatgctaaataa

SEQ ID NO: 83539 - DNA, 20 bp, synthetic construct
  source 1..20: mol_type = other DNA
atatttcatcatgctaaata

SEQ ID NO: 83540 - DNA, 20 bp, synthetic construct
  source 1..20: mol_type = other DNA
aatatttcatcatgctaaat

SEQ ID NO: 83541 - DNA, 20 bp, synthetic construct
  source 1..20: mol_type = other DNA
gaatatttcatcatgctaaa

SEQ ID NO: 83542 - DNA, 20 bp, synthetic construct
  source 1..20: mol_type = other DNA
tgaatatttcatcatgctaa

SEQ ID NO: 83543 - DNA, 20 bp, synthetic construct
  source 1..20: mol_type = other DNA
atgaatatttcatcatgcta

SEQ ID NO: 83544 - DNA, 20 bp, synthetic construct
  source 1..20: mol_type = other DNA
catgaatatttcatcatgct

SEQ ID NO: 83545 - DNA, 20 bp, synthetic construct
  source 1..20: mol_type = other DNA
tcatgaatatttcatcatgc

SEQ ID NO: 83546 - DNA, 20 bp, synthetic construct
  source 1..20: mol_type = other DNA
atcatgaatatttcatcatg

SEQ ID NO: 83547 - DNA, 20 bp, synthetic construct
  source 1..20: mol_type = other DNA
catcatgaatatttcatcat

SEQ ID NO: 83548 - DNA, 20 bp, synthetic construct
  source 1..20: mol_type = other DNA
acatcatgaatatttcatca

SEQ ID NO: 83549 - DNA, 20 bp, synthetic construct
  source 1..20: mol_type = other DNA
tacatcatgaatatttcatc

SEQ ID NO: 83550 - DNA, 20 bp, synthetic construct
  source 1..20: mol_type = other DNA
gtacatcatgaatatttcat

SEQ ID NO: 83551 - DNA, 20 bp, synthetic construct
  source 1..20: mol_type = other DNA
agtacatcatgaatatttca

SEQ ID NO: 83552 - DNA, 20 bp, synthetic construct
  source 1..20: mol_type = other DNA
tagtacatcatgaatatttc

SEQ ID NO: 83553 - DNA, 20 bp, synthetic construct
  source 1..20: mol_type = other DNA
ttagtacatcatgaatattt

SEQ ID NO: 83554 - DNA, 20 bp, synthetic construct
  source 1..20: mol_type = other DNA
cttagtacatcatgaatatt

SEQ ID NO: 83555 - DNA, 20 bp, synthetic construct
  source 1..20: mol_type = other DNA
tcttagtacatcatgaatat

SEQ ID NO: 83556 - DNA, 20 bp, synthetic construct
  source 1..20: mol_type = other DNA
atcttagtacatcatgaata

SEQ ID NO: 83557 - DNA, 20 bp, synthetic construct
  source 1..20: mol_type = other DNA
tatcttagtacatcatgaat

SEQ ID NO: 83558 - DNA, 20 bp, synthetic construct
  source 1..20: mol_type = other DNA
ttatcttagtacatcatgaa

SEQ ID NO: 83559 - DNA, 20 bp, synthetic construct
  source 1..20: mol_type = other DNA
tttatcttagtacatcatga

SEQ ID NO: 83560 - DNA, 20 bp, synthetic construct
  source 1..20: mol_type = other DNA
ctttatcttagtacatcatg

SEQ ID NO: 83561 - DNA, 20 bp, synthetic construct
  source 1..20: mol_type = other DNA
actttatcttagtacatcat

SEQ ID NO: 83562 - DNA, 20 bp, synthetic construct
  source 1..20: mol_type = other DNA
cactttatcttagtacatca

SEQ ID NO: 83563 - DNA, 20 bp, synthetic construct
  source 1..20: mol_type = other DNA
gcactttatcttagtacatc

SEQ ID NO: 83564 - DNA, 20 bp, synthetic construct
  source 1..20: mol_type = other DNA
agcactttatcttagtacat

SEQ ID NO: 83565 - DNA, 20 bp, synthetic construct
  source 1..20: mol_type = other DNA
tagcactttatcttagtaca

SEQ ID NO: 83566 - DNA, 20 bp, synthetic construct
  source 1..20: mol_type = other DNA
gtagcactttatcttagtac

SEQ ID NO: 83567 - DNA, 20 bp, synthetic construct
  source 1..20: mol_type = other DNA
tgtagcactttatcttagta

SEQ ID NO: 83568 - DNA, 20 bp, synthetic construct
  source 1..20: mol_type = other DNA
atgtagcactttatcttagt

SEQ ID NO: 83569 - DNA, 20 bp, synthetic construct
  source 1..20: mol_type = other DNA
aatgtagcactttatcttag

SEQ ID NO: 83570 - DNA, 20 bp, synthetic construct
  source 1..20: mol_type = other DNA
aaatgtagcactttatctta

SEQ ID NO: 83571 - DNA, 20 bp, synthetic construct
  source 1..20: mol_type = other DNA
taaatgtagcactttatctt

SEQ ID NO: 83572 - DNA, 20 bp, synthetic construct
  source 1..20: mol_type = other DNA
ttaaatgtagcactttatct

SEQ ID NO: 83573 - DNA, 20 bp, synthetic construct
  source 1..20: mol_type = other DNA
gttaaatgtagcactttatc

SEQ ID NO: 83574 - DNA, 20 bp, synthetic construct
  source 1..20: mol_type = other DNA
ggttaaatgtagcactttat

SEQ ID NO: 83575 - DNA, 20 bp, synthetic construct
  source 1..20: mol_type = other DNA
gggttaaatgtagcacttta

SEQ ID NO: 83576 - DNA, 20 bp, synthetic construct
  source 1..20: mol_type = other DNA
tgggttaaatgtagcacttt

SEQ ID NO: 83577 - DNA, 20 bp, synthetic construct
  source 1..20: mol_type = other DNA
ttgggttaaatgtagcactt

SEQ ID NO: 83578 - DNA, 20 bp, synthetic construct
  source 1..20: mol_type = other DNA
cttgggttaaatgtagcact

SEQ ID NO: 83579 - DNA, 20 bp, synthetic construct
  source 1..20: mol_type = other DNA
tcttgggttaaatgtagcac

SEQ ID NO: 83580 - DNA, 20 bp, synthetic construct
  source 1..20: mol_type = other DNA
gtcttgggttaaatgtagca

SEQ ID NO: 83581 - DNA, 20 bp, synthetic construct
  source 1..20: mol_type = other DNA
tgtcttgggttaaatgtagc

SEQ ID NO: 83582 - DNA, 20 bp, synthetic construct
  source 1..20: mol_type = other DNA
ttgtcttgggttaaatgtag

SEQ ID NO: 83583 - DNA, 20 bp, synthetic construct
  source 1..20: mol_type = other DNA
attgtcttgggttaaatgta

SEQ ID NO: 83584 - DNA, 20 bp, synthetic construct
  source 1..20: mol_type = other DNA
gattgtcttgggttaaatgt

SEQ ID NO: 83585 - DNA, 20 bp, synthetic construct
  source 1..20: mol_type = other DNA
tgattgtcttgggttaaatg

SEQ ID NO: 83586 - DNA, 20 bp, synthetic construct
  source 1..20: mol_type = other DNA
gtgattgtcttgggttaaat

SEQ ID NO: 83587 - DNA, 20 bp, synthetic construct
  source 1..20: mol_type = other DNA
agtgattgtcttgggttaaa

SEQ ID NO: 83588 - DNA, 20 bp, synthetic construct
  source 1..20: mol_type = other DNA
aagtgattgtcttgggttaa

SEQ ID NO: 83589 - DNA, 20 bp, synthetic construct
  source 1..20: mol_type = other DNA
caagtgattgtcttgggtta

SEQ ID NO: 83590 - DNA, 20 bp, synthetic construct
  source 1..20: mol_type = other DNA
ccaagtgattgtcttgggtt

SEQ ID NO: 83591 - DNA, 20 bp, synthetic construct
  source 1..20: mol_type = other DNA
gccaagtgattgtcttgggt

SEQ ID NO: 83592 - DNA, 20 bp, synthetic construct
  source 1..20: mol_type = other DNA
ggccaagtgattgtcttggg

SEQ ID NO: 83593 - DNA, 20 bp, synthetic construct
  source 1..20: mol_type = other DNA
tggccaagtgattgtcttgg

SEQ ID NO: 83594 - DNA, 20 bp, synthetic construct
  source 1..20: mol_type = other DNA
ttggccaagtgattgtcttg

SEQ ID NO: 83595 - DNA, 20 bp, synthetic construct
  source 1..20: mol_type = other DNA
tttggccaagtgattgtctt

SEQ ID NO: 83596 - DNA, 20 bp, synthetic construct
  source 1..20: mol_type = other DNA
ttttggccaagtgattgtct

SEQ ID NO: 83597 - DNA, 20 bp, synthetic construct
  source 1..20: mol_type = other DNA
tttttggccaagtgattgtc

SEQ ID NO: 83598 - DNA, 20 bp, synthetic construct
  source 1..20: mol_type = other DNA
gtttttggccaagtgattgt

SEQ ID NO: 83599 - DNA, 20 bp, synthetic construct
  source 1..20: mol_type = other DNA
tgtttttggccaagtgattg

SEQ ID NO: 83600 - DNA, 20 bp, synthetic construct
  source 1..20: mol_type = other DNA
gtgtttttggccaagtgatt

SEQ ID NO: 83601 - DNA, 20 bp, synthetic construct
  source 1..20: mol_type = other DNA
agtgtttttggccaagtgat

SEQ ID NO: 83602 - DNA, 20 bp, synthetic construct
  source 1..20: mol_type = other DNA
aagtgtttttggccaagtga

SEQ ID NO: 83603 - DNA, 20 bp, synthetic construct
  source 1..20: mol_type = other DNA
gaagtgtttttggccaagtg

SEQ ID NO: 83604 - DNA, 20 bp, synthetic construct
  source 1..20: mol_type = other DNA
tgaagtgtttttggccaagt

SEQ ID NO: 83605 - DNA, 20 bp, synthetic construct
  source 1..20: mol_type = other DNA
gtgaagtgtttttggccaag

SEQ ID NO: 83606 - DNA, 20 bp, synthetic construct
  source 1..20: mol_type = other DNA
tgtgaagtgtttttggccaa

SEQ ID NO: 83607 - DNA, 20 bp, synthetic construct
  source 1..20: mol_type = other DNA
atgtgaagtgtttttggcca

SEQ ID NO: 83608 - DNA, 20 bp, synthetic construct
  source 1..20: mol_type = other DNA
tatgtgaagtgtttttggcc

SEQ ID NO: 83609 - DNA, 20 bp, synthetic construct
  source 1..20: mol_type = other DNA
atatgtgaagtgtttttggc

SEQ ID NO: 83610 - DNA, 20 bp, synthetic construct
  source 1..20: mol_type = other DNA
tatatgtgaagtgtttttgg

SEQ ID NO: 83611 - DNA, 20 bp, synthetic construct
  source 1..20: mol_type = other DNA
ttatatgtgaagtgtttttg

SEQ ID NO: 83612 - DNA, 20 bp, synthetic construct
  source 1..20: mol_type = other DNA
tttatatgtgaagtgttttt

SEQ ID NO: 83613 - DNA, 20 bp, synthetic construct
  source 1..20: mol_type = other DNA
ctttatatgtgaagtgtttt

SEQ ID NO: 83614 - DNA, 20 bp, synthetic construct
  source 1..20: mol_type = other DNA
tctttatatgtgaagtgttt

SEQ ID NO: 83615 - DNA, 20 bp, synthetic construct
  source 1..20: mol_type = other DNA
ttctttatatgtgaagtgtt

SEQ ID NO: 83616 - DNA, 20 bp, synthetic construct
  source 1..20: mol_type = other DNA
tttctttatatgtgaagtgt

SEQ ID NO: 83617 - DNA, 20 bp, synthetic construct
  source 1..20: mol_type = other DNA
atttctttatatgtgaagtg

SEQ ID NO: 83618 - DNA, 20 bp, synthetic construct
  source 1..20: mol_type = other DNA
aatttctttatatgtgaagt

SEQ ID NO: 83619 - DNA, 20 bp, synthetic construct
  source 1..20: mol_type = other DNA
caatttctttatatgtgaag

SEQ ID NO: 83620 - DNA, 20 bp, synthetic construct
  source 1..20: mol_type = other DNA
ccaatttctttatatgtgaa

SEQ ID NO: 83621 - DNA, 20 bp, synthetic construct
  source 1..20: mol_type = other DNA
tccaatttctttatatgtga

SEQ ID NO: 83622 - DNA, 20 bp, synthetic construct
  source 1..20: mol_type = other DNA
ttccaatttctttatatgtg

SEQ ID NO: 83623 - DNA, 20 bp, synthetic construct
  source 1..20: mol_type = other DNA
tttccaatttctttatatgt

SEQ ID NO: 83624 - DNA, 20 bp, synthetic construct
  source 1..20: mol_type = other DNA
gtttccaatttctttatatg

SEQ ID NO: 83625 - DNA, 20 bp, synthetic construct
  source 1..20: mol_type = other DNA
agtttccaatttctttatat

SEQ ID NO: 83626 - DNA, 20 bp, synthetic construct
  source 1..20: mol_type = other DNA
aagtttccaatttctttata

SEQ ID NO: 83627 - DNA, 20 bp, synthetic construct
  source 1..20: mol_type = other DNA
aaagtttccaatttctttat

SEQ ID NO: 83628 - DNA, 20 bp, synthetic construct
  source 1..20: mol_type = other DNA
caaagtttccaatttcttta

SEQ ID NO: 83629 - DNA, 20 bp, synthetic construct
  source 1..20: mol_type = other DNA
ccaaagtttccaatttcttt

SEQ ID NO: 83630 - DNA, 20 bp, synthetic construct
  source 1..20: mol_type = other DNA
cccaaagtttccaatttctt

SEQ ID NO: 83631 - DNA, 20 bp, synthetic construct
  source 1..20: mol_type = other DNA
acccaaagtttccaatttct

SEQ ID NO: 83632 - DNA, 20 bp, synthetic construct
  source 1..20: mol_type = other DNA
tacccaaagtttccaatttc

SEQ ID NO: 83633 - DNA, 20 bp, synthetic construct
  source 1..20: mol_type = other DNA
ctacccaaagtttccaattt

SEQ ID NO: 83634 - DNA, 20 bp, synthetic construct
  source 1..20: mol_type = other DNA
cctacccaaagtttccaatt

SEQ ID NO: 83635 - DNA, 20 bp, synthetic construct
  source 1..20: mol_type = other DNA
acctacccaaagtttccaat

SEQ ID NO: 83636 - DNA, 20 bp, synthetic construct
  source 1..20: mol_type = other DNA
aacctacccaaagtttccaa

SEQ ID NO: 83637 - DNA, 20 bp, synthetic construct
  source 1..20: mol_type = other DNA
gaacctacccaaagtttcca

SEQ ID NO: 83638 - DNA, 20 bp, synthetic construct
  source 1..20: mol_type = other DNA
agaacctacccaaagtttcc

SEQ ID NO: 83639 - DNA, 20 bp, synthetic construct
  source 1..20: mol_type = other DNA
gagaacctacccaaagtttc

SEQ ID NO: 83640 - DNA, 20 bp, synthetic construct
  source 1..20: mol_type = other DNA
tgagaacctacccaaagttt

SEQ ID NO: 83641 - DNA, 20 bp, synthetic construct
  source 1..20: mol_type = other DNA
ttgagaacctacccaaagtt

SEQ ID NO: 83642 - DNA, 20 bp, synthetic construct
  source 1..20: mol_type = other DNA
attgagaacctacccaaagt

SEQ ID NO: 83643 - DNA, 20 bp, synthetic construct
  source 1..20: mol_type = other DNA
aattgagaacctacccaaag

SEQ ID NO: 83644 - DNA, 20 bp, synthetic construct
  source 1..20: mol_type = other DNA
aaattgagaacctacccaaa

SEQ ID NO: 83645 - DNA, 20 bp, synthetic construct
  source 1..20: mol_type = other DNA
aaaattgagaacctacccaa

SEQ ID NO: 83646 - DNA, 20 bp, synthetic construct
  source 1..20: mol_type = other DNA
taaaattgagaacctaccca

SEQ ID NO: 83647 - DNA, 20 bp, synthetic construct
  source 1..20: mol_type = other DNA
ttaaaattgagaacctaccc

SEQ ID NO: 83648 - DNA, 20 bp, synthetic construct
  source 1..20: mol_type = other DNA
tttaaaattgagaacctacc

SEQ ID NO: 83649 - DNA, 20 bp, synthetic construct
  source 1..20: mol_type = other DNA
ttttaaaattgagaacctac

SEQ ID NO: 83650 - DNA, 20 bp, synthetic construct
  source 1..20: mol_type = other DNA
tttttaaaattgagaaccta

SEQ ID NO: 83651 - DNA, 20 bp, synthetic construct
  source 1..20: mol_type = other DNA
gtttttaaaattgagaacct

SEQ ID NO: 83652 - DNA, 20 bp, synthetic construct
  source 1..20: mol_type = other DNA
tgtttttaaaattgagaacc

SEQ ID NO: 83653 - DNA, 20 bp, synthetic construct
  source 1..20: mol_type = other DNA
gtgtttttaaaattgagaac

SEQ ID NO: 83654 - DNA, 20 bp, synthetic construct
  source 1..20: mol_type = other DNA
agtgtttttaaaattgagaa

SEQ ID NO: 83655 - DNA, 20 bp, synthetic construct
  source 1..20: mol_type = other DNA
cagtgtttttaaaattgaga

SEQ ID NO: 83656 - DNA, 20 bp, synthetic construct
  source 1..20: mol_type = other DNA
ccagtgtttttaaaattgag

SEQ ID NO: 83657 - DNA, 20 bp, synthetic construct
  source 1..20: mol_type = other DNA
tccagtgtttttaaaattga

SEQ ID NO: 83658 - DNA, 20 bp, synthetic construct
  source 1..20: mol_type = other DNA
atccagtgtttttaaaattg

SEQ ID NO: 83659 - DNA, 20 bp, synthetic construct
  source 1..20: mol_type = other DNA
tatccagtgtttttaaaatt

SEQ ID NO: 83660 - DNA, 20 bp, synthetic construct
  source 1..20: mol_type = other DNA
ttatccagtgtttttaaaat

SEQ ID NO: 83661 - DNA, 20 bp, synthetic construct
  source 1..20: mol_type = other DNA
attatccagtgtttttaaaa

SEQ ID NO: 83662 - DNA, 20 bp, synthetic construct
  source 1..20: mol_type = other DNA
tattatccagtgtttttaaa

SEQ ID NO: 83663 - DNA, 20 bp, synthetic construct
  source 1..20: mol_type = other DNA
ttattatccagtgtttttaa

SEQ ID NO: 83664 - DNA, 20 bp, synthetic construct
  source 1..20: mol_type = other DNA
tttattatccagtgttttta

SEQ ID NO: 83665 - DNA, 20 bp, synthetic construct
  source 1..20: mol_type = other DNA
ttttattatccagtgttttt

SEQ ID NO: 83666 - DNA, 20 bp, synthetic construct
  source 1..20: mol_type = other DNA
attttattatccagtgtttt

SEQ ID NO: 83667 - DNA, 20 bp, synthetic construct
  source 1..20: mol_type = other DNA
aattttattatccagtgttt

SEQ ID NO: 83668 - DNA, 20 bp, synthetic construct
  source 1..20: mol_type = other DNA
aaattttattatccagtgtt

SEQ ID NO: 83669 - DNA, 20 bp, synthetic construct
  source 1..20: mol_type = other DNA
aaaattttattatccagtgt

SEQ ID NO: 83670 - DNA, 20 bp, synthetic construct
  source 1..20: mol_type = other DNA
aaaaattttattatccagtg

SEQ ID NO: 83671 - DNA, 20 bp, synthetic construct
  source 1..20: mol_type = other DNA
aaaaaattttattatccagt

SEQ ID NO: 83672 - DNA, 20 bp, synthetic construct
  source 1..20: mol_type = other DNA
taaaaaattttattatccag

SEQ ID NO: 83673 - DNA, 20 bp, synthetic construct
  source 1..20: mol_type = other DNA
ctaaaaaattttattatcca

SEQ ID NO: 83674 - DNA, 20 bp, synthetic construct
  source 1..20: mol_type = other DNA
tctaaaaaattttattatcc

SEQ ID NO: 83675 - DNA, 20 bp, synthetic construct
  source 1..20: mol_type = other DNA
gtctaaaaaattttattatc

SEQ ID NO: 83676 - DNA, 20 bp, synthetic construct
  source 1..20: mol_type = other DNA
tgtctaaaaaattttattat

SEQ ID NO: 83677 - DNA, 20 bp, synthetic construct
  source 1..20: mol_type = other DNA
atgtctaaaaaattttatta

SEQ ID NO: 83678 - DNA, 20 bp, synthetic construct
  source 1..20: mol_type = other DNA
tatgtctaaaaaattttatt

SEQ ID NO: 83679 - DNA, 20 bp, synthetic construct
  source 1..20: mol_type = other DNA
ttatgtctaaaaaattttat

SEQ ID NO: 83680 - DNA, 20 bp, synthetic construct
  source 1..20: mol_type = other DNA
attatgtctaaaaaatttta

SEQ ID NO: 83681 - DNA, 20 bp, synthetic construct
  source 1..20: mol_type = other DNA
aattatgtctaaaaaatttt

SEQ ID NO: 83682 - DNA, 20 bp, synthetic construct
  source 1..20: mol_type = other DNA
aaattatgtctaaaaaattt

SEQ ID NO: 83683 - DNA, 20 bp, synthetic construct
  source 1..20: mol_type = other DNA
taaattatgtctaaaaaatt

SEQ ID NO: 83684 - DNA, 20 bp, synthetic construct
  source 1..20: mol_type = other DNA
ataaattatgtctaaaaaat

SEQ ID NO: 83685 - DNA, 20 bp, synthetic construct
  source 1..20: mol_type = other DNA
tataaattatgtctaaaaaa

SEQ ID NO: 83686 - DNA, 20 bp, synthetic construct
  source 1..20: mol_type = other DNA
atataaattatgtctaaaaa

SEQ ID NO: 83687 - DNA, 20 bp, synthetic construct
  source 1..20: mol_type = other DNA
catataaattatgtctaaaa

SEQ ID NO: 83688 - DNA, 20 bp, synthetic construct
  source 1..20: mol_type = other DNA
ccatataaattatgtctaaa

SEQ ID NO: 83689 - DNA, 20 bp, synthetic construct
  source 1..20: mol_type = other DNA
tccatataaattatgtctaa

SEQ ID NO: 83690 - DNA, 20 bp, synthetic construct
  source 1..20: mol_type = other DNA
ttccatataaattatgtcta

SEQ ID NO: 83691 - DNA, 20 bp, synthetic construct
  source 1..20: mol_type = other DNA
tttccatataaattatgtct

SEQ ID NO: 83692 - DNA, 20 bp, synthetic construct
  source 1..20: mol_type = other DNA
ttttccatataaattatgtc

SEQ ID NO: 83693 - DNA, 20 bp, synthetic construct
  source 1..20: mol_type = other DNA
attttccatataaattatgt

SEQ ID NO: 83694 - DNA, 20 bp, synthetic construct
  source 1..20: mol_type = other DNA
aattttccatataaattatg

SEQ ID NO: 83695 - DNA, 20 bp, synthetic construct
  source 1..20: mol_type = other DNA
gaattttccatataaattat

SEQ ID NO: 83696 - DNA, 20 bp, synthetic construct
  source 1..20: mol_type = other DNA
agaattttccatataaatta

SEQ ID NO: 83697 - DNA, 20 bp, synthetic construct
  source 1..20: mol_type = other DNA
tagaattttccatataaatt

SEQ ID NO: 83698 - DNA, 20 bp, synthetic construct
  source 1..20: mol_type = other DNA
ttagaattttccatataaat

SEQ ID NO: 83699 - DNA, 20 bp, synthetic construct
  source 1..20: mol_type = other DNA
gttagaattttccatataaa

SEQ ID NO: 83700 - DNA, 20 bp, synthetic construct
  source 1..20: mol_type = other DNA
ggttagaattttccatataa

SEQ ID NO: 83701 - DNA, 20 bp, synthetic construct
  source 1..20: mol_type = other DNA
aggttagaattttccatata

SEQ ID NO: 83702 - DNA, 20 bp, synthetic construct
  source 1..20: mol_type = other DNA
taggttagaattttccatat

SEQ ID NO: 83703 - DNA, 20 bp, synthetic construct
  source 1..20: mol_type = other DNA
ataggttagaattttccata

SEQ ID NO: 83704 - DNA, 20 bp, synthetic construct
  source 1..20: mol_type = other DNA
cataggttagaattttccat

SEQ ID NO: 83705 - DNA, 20 bp, synthetic construct
  source 1..20: mol_type = other DNA
acataggttagaattttcca

SEQ ID NO: 83706 - DNA, 20 bp, synthetic construct
  source 1..20: mol_type = other DNA
cacataggttagaattttcc

SEQ ID NO: 83707 - DNA, 20 bp, synthetic construct
  source 1..20: mol_type = other DNA
gcacataggttagaattttc

SEQ ID NO: 83708 - DNA, 20 bp, synthetic construct
  source 1..20: mol_type = other DNA
tgcacataggttagaatttt

SEQ ID NO: 83709 - DNA, 20 bp, synthetic construct
  source 1..20: mol_type = other DNA
ttgcacataggttagaattt

SEQ ID NO: 83710 - DNA, 20 bp, synthetic construct
  source 1..20: mol_type = other DNA
gttgcacataggttagaatt

SEQ ID NO: 83711 - DNA, 20 bp, synthetic construct
  source 1..20: mol_type = other DNA
tgttgcacataggttagaat

SEQ ID NO: 83712 - DNA, 20 bp, synthetic construct
  source 1..20: mol_type = other DNA
gtgttgcacataggttagaa

SEQ ID NO: 83713 - DNA, 20 bp, synthetic construct
  source 1..20: mol_type = other DNA
agtgttgcacataggttaga

SEQ ID NO: 83714 - DNA, 20 bp, synthetic construct
  source 1..20: mol_type = other DNA
cagtgttgcacataggttag

SEQ ID NO: 83715 - DNA, 20 bp, synthetic construct
  source 1..20: mol_type = other DNA
acagtgttgcacataggtta

SEQ ID NO: 83716 - DNA, 20 bp, synthetic construct
  source 1..20: mol_type = other DNA
cacagtgttgcacataggtt

SEQ ID NO: 83717 - DNA, 20 bp, synthetic construct
  source 1..20: mol_type = other DNA
ccacagtgttgcacataggt

SEQ ID NO: 83718 - DNA, 20 bp, synthetic construct
  source 1..20: mol_type = other DNA
accacagtgttgcacatagg

SEQ ID NO: 83719 - DNA, 20 bp, synthetic construct
  source 1..20: mol_type = other DNA
aaccacagtgttgcacatag

SEQ ID NO: 83720 - DNA, 20 bp, synthetic construct
  source 1..20: mol_type = other DNA
taaccacagtgttgcacata

SEQ ID NO: 83721 - DNA, 20 bp, synthetic construct
  source 1..20: mol_type = other DNA
ttaaccacagtgttgcacat

SEQ ID NO: 83722 - DNA, 20 bp, synthetic construct
  source 1..20: mol_type = other DNA
attaaccacagtgttgcaca

SEQ ID NO: 83723 - DNA, 20 bp, synthetic construct
  source 1..20: mol_type = other DNA
tattaaccacagtgttgcac

SEQ ID NO: 83724 - DNA, 20 bp, synthetic construct
  source 1..20: mol_type = other DNA
atattaaccacagtgttgca

SEQ ID NO: 83725 - DNA, 20 bp, synthetic construct
  source 1..20: mol_type = other DNA
tatattaaccacagtgttgc

SEQ ID NO: 83726 - DNA, 20 bp, synthetic construct
  source 1..20: mol_type = other DNA
ctatattaaccacagtgttg

SEQ ID NO: 83727 - DNA, 20 bp, synthetic construct
  source 1..20: mol_type = other DNA
tctatattaaccacagtgtt

SEQ ID NO: 83728 - DNA, 20 bp, synthetic construct
  source 1..20: mol_type = other DNA
atctatattaaccacagtgt

SEQ ID NO: 83729 - DNA, 20 bp, synthetic construct
  source 1..20: mol_type = other DNA
gatctatattaaccacagtg

SEQ ID NO: 83730 - DNA, 20 bp, synthetic construct
  source 1..20: mol_type = other DNA
tgatctatattaaccacagt

SEQ ID NO: 83731 - DNA, 20 bp, synthetic construct
  source 1..20: mol_type = other DNA
ttgatctatattaaccacag

SEQ ID NO: 83732 - DNA, 20 bp, synthetic construct
  source 1..20: mol_type = other DNA
attgatctatattaaccaca

SEQ ID NO: 83733 - DNA, 20 bp, synthetic construct
  source 1..20: mol_type = other DNA
aattgatctatattaaccac

SEQ ID NO: 83734 - DNA, 20 bp, synthetic construct
  source 1..20: mol_type = other DNA
aaattgatctatattaacca

SEQ ID NO: 83735 - DNA, 20 bp, synthetic construct
  source 1..20: mol_type = other DNA
aaaattgatctatattaacc

SEQ ID NO: 83736 - DNA, 20 bp, synthetic construct
  source 1..20: mol_type = other DNA
gaaaattgatctatattaac

SEQ ID NO: 83737 - DNA, 20 bp, synthetic construct
  source 1..20: mol_type = other DNA
tgaaaattgatctatattaa

SEQ ID NO: 83738 - DNA, 20 bp, synthetic construct
  source 1..20: mol_type = other DNA
atgaaaattgatctatatta

SEQ ID NO: 83739 - DNA, 20 bp, synthetic construct
  source 1..20: mol_type = other DNA
aatgaaaattgatctatatt

SEQ ID NO: 83740 - DNA, 20 bp, synthetic construct
  source 1..20: mol_type = other DNA
taatgaaaattgatctatat

SEQ ID NO: 83741 - DNA, 20 bp, synthetic construct
  source 1..20: mol_type = other DNA
ataatgaaaattgatctata

SEQ ID NO: 83742 - DNA, 20 bp, synthetic construct
  source 1..20: mol_type = other DNA
aataatgaaaattgatctat

SEQ ID NO: 83743 - DNA, 20 bp, synthetic construct
  source 1..20: mol_type = other DNA
aaataatgaaaattgatcta

SEQ ID NO: 83744 - DNA, 20 bp, synthetic construct
  source 1..20: mol_type = other DNA
caaataatgaaaattgatct

SEQ ID NO: 83745 - DNA, 20 bp, synthetic construct
  source 1..20: mol_type = other DNA
acaaataatgaaaattgatc

SEQ ID NO: 83746 - DNA, 20 bp, synthetic construct
  source 1..20: mol_type = other DNA
aacaaataatgaaaattgat

SEQ ID NO: 83747 - DNA, 20 bp, synthetic construct
  source 1..20: mol_type = other DNA
aaacaaataatgaaaattga

SEQ ID NO: 83748 - DNA, 20 bp, synthetic construct
  source 1..20: mol_type = other DNA
gaaacaaataatgaaaattg

SEQ ID NO: 83749 - DNA, 20 bp, synthetic construct
  source 1..20: mol_type = other DNA
agaaacaaataatgaaaatt

SEQ ID NO: 83750 - DNA, 20 bp, synthetic construct
  source 1..20: mol_type = other DNA
tagaaacaaataatgaaaat

SEQ ID NO: 83751 - DNA, 20 bp, synthetic construct
  source 1..20: mol_type = other DNA
atagaaacaaataatgaaaa

SEQ ID NO: 83752 - DNA, 20 bp, synthetic construct
  source 1..20: mol_type = other DNA
tatagaaacaaataatgaaa

SEQ ID NO: 83753 - DNA, 20 bp, synthetic construct
  source 1..20: mol_type = other DNA
atatagaaacaaataatgaa

SEQ ID NO: 83754 - DNA, 20 bp, synthetic construct
  source 1..20: mol_type = other DNA
aatatagaaacaaataatga

SEQ ID NO: 83755 - DNA, 20 bp, synthetic construct
  source 1..20: mol_type = other DNA
taatatagaaacaaataatg

SEQ ID NO: 83756 - DNA, 20 bp, synthetic construct
  source 1..20: mol_type = other DNA
ataatatagaaacaaataat

SEQ ID NO: 83757 - DNA, 20 bp, synthetic construct
  source 1..20: mol_type = other DNA
cataatatagaaacaaataa

SEQ ID NO: 83758 - DNA, 20 bp, synthetic construct
  source 1..20: mol_type = other DNA
gcataatatagaaacaaata

SEQ ID NO: 83759 - DNA, 20 bp, synthetic construct
  source 1..20: mol_type = other DNA
agcataatatagaaacaaat

SEQ ID NO: 83760 - DNA, 20 bp, synthetic construct
  source 1..20: mol_type = other DNA
aagcataatatagaaacaaa

SEQ ID NO: 83761 - DNA, 20 bp, synthetic construct
  source 1..20: mol_type = other DNA
taagcataatatagaaacaa

SEQ ID NO: 83762 - DNA, 20 bp, synthetic construct
  source 1..20: mol_type = other DNA
gtaagcataatatagaaaca

SEQ ID NO: 83763 - DNA, 20 bp, synthetic construct
  source 1..20: mol_type = other DNA
agtaagcataatatagaaac

SEQ ID NO: 83764 - DNA, 20 bp, synthetic construct
  source 1..20: mol_type = other DNA
aagtaagcataatatagaaa

SEQ ID NO: 83765 - DNA, 20 bp, synthetic construct
  source 1..20: mol_type = other DNA
gaagtaagcataatatagaa

SEQ ID NO: 83766 - DNA, 20 bp, synthetic construct
  source 1..20: mol_type = other DNA
tgaagtaagcataatataga

SEQ ID NO: 83767 - DNA, 20 bp, synthetic construct
  source 1..20: mol_type = other DNA
ttgaagtaagcataatatag

SEQ ID NO: 83768 - DNA, 20 bp, synthetic construct
  source 1..20: mol_type = other DNA
cttgaagtaagcataatata

SEQ ID NO: 83769 - DNA, 20 bp, synthetic construct
  source 1..20: mol_type = other DNA
tcttgaagtaagcataatat

SEQ ID NO: 83770 - DNA, 20 bp, synthetic construct
  source 1..20: mol_type = other DNA
ttcttgaagtaagcataata

SEQ ID NO: 83771 - DNA, 20 bp, synthetic construct
  source 1..20: mol_type = other DNA
tttcttgaagtaagcataat

SEQ ID NO: 83772 - DNA, 20 bp, synthetic construct
  source 1..20: mol_type = other DNA
ctttcttgaagtaagcataa

SEQ ID NO: 83773 - DNA, 20 bp, synthetic construct
  source 1..20: mol_type = other DNA
cctttcttgaagtaagcata

SEQ ID NO: 83774 - DNA, 20 bp, synthetic construct
  source 1..20: mol_type = other DNA
tcctttcttgaagtaagcat

SEQ ID NO: 83775 - DNA, 20 bp, synthetic construct
  source 1..20: mol_type = other DNA
atcctttcttgaagtaagca

SEQ ID NO: 83776 - DNA, 20 bp, synthetic construct
  source 1..20: mol_type = other DNA
gatcctttcttgaagtaagc

SEQ ID NO: 83777 - DNA, 20 bp, synthetic construct
  source 1..20: mol_type = other DNA
agatcctttcttgaagtaag

SEQ ID NO: 83778 - DNA, 20 bp, synthetic construct
  source 1..20: mol_type = other DNA
cagatcctttcttgaagtaa

SEQ ID NO: 83779 - DNA, 20 bp, synthetic construct
  source 1..20: mol_type = other DNA
tcagatcctttcttgaagta

SEQ ID NO: 83780 - DNA, 20 bp, synthetic construct
  source 1..20: mol_type = other DNA
ctcagatcctttcttgaagt

SEQ ID NO: 83781 - DNA, 20 bp, synthetic construct
  source 1..20: mol_type = other DNA
cctcagatcctttcttgaag

SEQ ID NO: 83782 - DNA, 20 bp, synthetic construct
  source 1..20: mol_type = other DNA
acctcagatcctttcttgaa

SEQ ID NO: 83783 - DNA, 20 bp, synthetic construct
  source 1..20: mol_type = other DNA
tacctcagatcctttcttga

SEQ ID NO: 83784 - DNA, 20 bp, synthetic construct
  source 1..20: mol_type = other DNA
ttacctcagatcctttcttg

SEQ ID NO: 83785 - DNA, 20 bp, synthetic construct
  source 1..20: mol_type = other DNA
gttacctcagatcctttctt

SEQ ID NO: 83786 - DNA, 20 bp, synthetic construct
  source 1..20: mol_type = other DNA
agttacctcagatcctttct

SEQ ID NO: 83787 - DNA, 20 bp, synthetic construct
  source 1..20: mol_type = other DNA
aagttacctcagatcctttc

SEQ ID NO: 83788 - DNA, 20 bp, synthetic construct
  source 1..20: mol_type = other DNA
taagttacctcagatccttt

SEQ ID NO: 83789 - DNA, 20 bp, synthetic construct
  source 1..20: mol_type = other DNA
ataagttacctcagatcctt

SEQ ID NO: 83790 - DNA, 20 bp, synthetic construct
  source 1..20: mol_type = other DNA
tataagttacctcagatcct

SEQ ID NO: 83791 - DNA, 20 bp, synthetic construct
  source 1..20: mol_type = other DNA
ttataagttacctcagatcc

SEQ ID NO: 83792 - DNA, 20 bp, synthetic construct
  source 1..20: mol_type = other DNA
attataagttacctcagatc

SEQ ID NO: 83793 - DNA, 20 bp, synthetic construct
  source 1..20: mol_type = other DNA
tattataagttacctcagat

SEQ ID NO: 83794 - DNA, 20 bp, synthetic construct
  source 1..20: mol_type = other DNA
gtattataagttacctcaga

SEQ ID NO: 83795 - DNA, 20 bp, synthetic construct
  source 1..20: mol_type = other DNA
tgtattataagttacctcag

SEQ ID NO: 83796 - DNA, 20 bp, synthetic construct
  source 1..20: mol_type = other DNA
ttgtattataagttacctca

SEQ ID NO: 83797 - DNA, 20 bp, synthetic construct
  source 1..20: mol_type = other DNA
cttgtattataagttacctc

SEQ ID NO: 83798 - DNA, 20 bp, synthetic construct
  source 1..20: mol_type = other DNA
tcttgtattataagttacct

SEQ ID NO: 83799 - DNA, 20 bp, synthetic construct
  source 1..20: mol_type = other DNA
gtcttgtattataagttacc

SEQ ID NO: 83800 - DNA, 20 bp, synthetic construct
  source 1..20: mol_type = other DNA
tgtcttgtattataagttac

SEQ ID NO: 83801 - DNA, 20 bp, synthetic construct
  source 1..20: mol_type = other DNA
atgtcttgtattataagtta

SEQ ID NO: 83802 - DNA, 20 bp, synthetic construct
  source 1..20: mol_type = other DNA
catgtcttgtattataagtt

SEQ ID NO: 83803 - DNA, 20 bp, synthetic construct
  source 1..20: mol_type = other DNA
tcatgtcttgtattataagt

SEQ ID NO: 83804 - DNA, 20 bp, synthetic construct
  source 1..20: mol_type = other DNA
atcatgtcttgtattataag

SEQ ID NO: 83805 - DNA, 20 bp, synthetic construct
  source 1..20: mol_type = other DNA
gatcatgtcttgtattataa

SEQ ID NO: 83806 - DNA, 20 bp, synthetic construct
  source 1..20: mol_type = other DNA
tgatcatgtcttgtattata

SEQ ID NO: 83807 - DNA, 20 bp, synthetic construct
  source 1..20: mol_type = other DNA
ttgatcatgtcttgtattat

SEQ ID NO: 83808 - DNA, 20 bp, synthetic construct
  source 1..20: mol_type = other DNA
cttgatcatgtcttgtatta

SEQ ID NO: 83809 - DNA, 20 bp, synthetic construct
  source 1..20: mol_type = other DNA
tcttgatcatgtcttgtatt

SEQ ID NO: 83810 - DNA, 20 bp, synthetic construct
  source 1..20: mol_type = other DNA
ctcttgatcatgtcttgtat

SEQ ID NO: 83811 - DNA, 20 bp, synthetic construct
  source 1..20: mol_type = other DNA
actcttgatcatgtcttgta

SEQ ID NO: 83812 - DNA, 20 bp, synthetic construct
  source 1..20: mol_type = other DNA
gactcttgatcatgtcttgt

SEQ ID NO: 83813 - DNA, 20 bp, synthetic construct
  source 1..20: mol_type = other DNA
tgactcttgatcatgtcttg

SEQ ID NO: 83814 - DNA, 20 bp, synthetic construct
  source 1..20: mol_type = other DNA
atgactcttgatcatgtctt

SEQ ID NO: 83815 - DNA, 20 bp, synthetic construct
  source 1..20: mol_type = other DNA
catgactcttgatcatgtct

SEQ ID NO: 83816 - DNA, 20 bp, synthetic construct
  source 1..20: mol_type = other DNA
acatgactcttgatcatgtc

SEQ ID NO: 83817 - DNA, 20 bp, synthetic construct
  source 1..20: mol_type = other DNA
cacatgactcttgatcatgt

SEQ ID NO: 83818 - DNA, 20 bp, synthetic construct
  source 1..20: mol_type = other DNA
tcacatgactcttgatcatg

SEQ ID NO: 83819 - DNA, 20 bp, synthetic construct
  source 1..20: mol_type = other DNA
ttcacatgactcttgatcat

SEQ ID NO: 83820 - DNA, 20 bp, synthetic construct
  source 1..20: mol_type = other DNA
cttcacatgactcttgatca

SEQ ID NO: 83821 - DNA, 20 bp, synthetic construct
  source 1..20: mol_type = other DNA
tcttcacatgactcttgatc

SEQ ID NO: 83822 - DNA, 20 bp, synthetic construct
  source 1..20: mol_type = other DNA
ttcttcacatgactcttgat

SEQ ID NO: 83823 - DNA, 20 bp, synthetic construct
  source 1..20: mol_type = other DNA
tttcttcacatgactcttga

SEQ ID NO: 83824 - DNA, 20 bp, synthetic construct
  source 1..20: mol_type = other DNA
ctttcttcacatgactcttg

SEQ ID NO: 83825 - DNA, 20 bp, synthetic construct
  source 1..20: mol_type = other DNA
actttcttcacatgactctt

SEQ ID NO: 83826 - DNA, 20 bp, synthetic construct
  source 1..20: mol_type = other DNA
cactttcttcacatgactct

SEQ ID NO: 83827 - DNA, 20 bp, synthetic construct
  source 1..20: mol_type = other DNA
tcactttcttcacatgactc

SEQ ID NO: 83828 - DNA, 20 bp, synthetic construct
  source 1..20: mol_type = other DNA
gtcactttcttcacatgact

SEQ ID NO: 83829 - DNA, 20 bp, synthetic construct
  source 1..20: mol_type = other DNA
agtcactttcttcacatgac

SEQ ID NO: 83830 - DNA, 20 bp, synthetic construct
  source 1..20: mol_type = other DNA
tagtcactttcttcacatga

SEQ ID NO: 83831 - DNA, 20 bp, synthetic construct
  source 1..20: mol_type = other DNA
ctagtcactttcttcacatg

SEQ ID NO: 83832 - DNA, 20 bp, synthetic construct
  source 1..20: mol_type = other DNA
tctagtcactttcttcacat

SEQ ID NO: 83833 - DNA, 20 bp, synthetic construct
  source 1..20: mol_type = other DNA
ctctagtcactttcttcaca

SEQ ID NO: 83834 - DNA, 20 bp, synthetic construct
  source 1..20: mol_type = other DNA
tctctagtcactttcttcac

SEQ ID NO: 83835 - DNA, 20 bp, synthetic construct
  source 1..20: mol_type = other DNA
ttctctagtcactttcttca

SEQ ID NO: 83836 - DNA, 20 bp, synthetic construct
  source 1..20: mol_type = other DNA
tttctctagtcactttcttc

SEQ ID NO: 83837 - DNA, 20 bp, synthetic construct
  source 1..20: mol_type = other DNA
atttctctagtcactttctt

SEQ ID NO: 83838 - DNA, 20 bp, synthetic construct
  source 1..20: mol_type = other DNA
aatttctctagtcactttct

SEQ ID NO: 83839 - DNA, 20 bp, synthetic construct
  source 1..20: mol_type = other DNA
aaatttctctagtcactttc

SEQ ID NO: 83840 - DNA, 20 bp, synthetic construct
  source 1..20: mol_type = other DNA
caaatttctctagtcacttt

SEQ ID NO: 83841 - DNA, 20 bp, synthetic construct
  source 1..20: mol_type = other DNA
gcaaatttctctagtcactt

SEQ ID NO: 83842 - DNA, 20 bp, synthetic construct
  source 1..20: mol_type = other DNA
agcaaatttctctagtcact

SEQ ID NO: 83843 - DNA, 20 bp, synthetic construct
  source 1..20: mol_type = other DNA
aagcaaatttctctagtcac

SEQ ID NO: 83844 - DNA, 20 bp, synthetic construct
  source 1..20: mol_type = other DNA
taagcaaatttctctagtca

SEQ ID NO: 83845 - DNA, 20 bp, synthetic construct
  source 1..20: mol_type = other DNA
ttaagcaaatttctctagtc

SEQ ID NO: 83846 - DNA, 20 bp, synthetic construct
  source 1..20: mol_type = other DNA
tttaagcaaatttctctagt

SEQ ID NO: 83847 - DNA, 20 bp, synthetic construct
  source 1..20: mol_type = other DNA
ttttaagcaaatttctctag

SEQ ID NO: 83848 - DNA, 20 bp, synthetic construct
  source 1..20: mol_type = other DNA
tttttaagcaaatttctcta

SEQ ID NO: 83849 - DNA, 20 bp, synthetic construct
  source 1..20: mol_type = other DNA
ttttttaagcaaatttctct

SEQ ID NO: 83850 - DNA, 20 bp, synthetic construct
  source 1..20: mol_type = other DNA
gttttttaagcaaatttctc

SEQ ID NO: 83851 - DNA, 20 bp, synthetic construct
  source 1..20: mol_type = other DNA
tgttttttaagcaaatttct

SEQ ID NO: 83852 - DNA, 20 bp, synthetic construct
  source 1..20: mol_type = other DNA
ttgttttttaagcaaatttc

SEQ ID NO: 83853 - DNA, 20 bp, synthetic construct
  source 1..20: mol_type = other DNA
gttgttttttaagcaaattt

SEQ ID NO: 83854 - DNA, 20 bp, synthetic construct
  source 1..20: mol_type = other DNA
tgttgttttttaagcaaatt

SEQ ID NO: 83855 - DNA, 20 bp, synthetic construct
  source 1..20: mol_type = other DNA
ttgttgttttttaagcaaat

SEQ ID NO: 83856 - DNA, 20 bp, synthetic construct
  source 1..20: mol_type = other DNA
tttgttgttttttaagcaaa

SEQ ID NO: 83857 - DNA, 20 bp, synthetic construct
  source 1..20: mol_type = other DNA
ttttgttgttttttaagcaa

SEQ ID NO: 83858 - DNA, 20 bp, synthetic construct
  source 1..20: mol_type = other DNA
tttttgttgttttttaagca

SEQ ID NO: 83859 - DNA, 20 bp, synthetic construct
  source 1..20: mol_type = other DNA
gtttttgttgttttttaagc

SEQ ID NO: 83860 - DNA, 20 bp, synthetic construct
  source 1..20: mol_type = other DNA
tgtttttgttgttttttaag

SEQ ID NO: 83861 - DNA, 20 bp, synthetic construct
  source 1..20: mol_type = other DNA
ttgtttttgttgttttttaa

SEQ ID NO: 83862 - DNA, 20 bp, synthetic construct
  source 1..20: mol_type = other DNA
gttgtttttgttgtttttta

SEQ ID NO: 83863 - DNA, 20 bp, synthetic construct
  source 1..20: mol_type = other DNA
ggttgtttttgttgtttttt

SEQ ID NO: 83864 - DNA, 20 bp, synthetic construct
  source 1..20: mol_type = other DNA
gggttgtttttgttgttttt

SEQ ID NO: 83865 - DNA, 20 bp, synthetic construct
  source 1..20: mol_type = other DNA
agggttgtttttgttgtttt

SEQ ID NO: 83866 - DNA, 20 bp, synthetic construct
  source 1..20: mol_type = other DNA
aagggttgtttttgttgttt

SEQ ID NO: 83867 - DNA, 20 bp, synthetic construct
  source 1..20: mol_type = other DNA
taagggttgtttttgttgtt

SEQ ID NO: 83868 - DNA, 20 bp, synthetic construct
  source 1..20: mol_type = other DNA
ctaagggttgtttttgttgt

SEQ ID NO: 83869 - DNA, 20 bp, synthetic construct
  source 1..20: mol_type = other DNA
actaagggttgtttttgttg

SEQ ID NO: 83870 - DNA, 20 bp, synthetic construct
  source 1..20: mol_type = other DNA
gactaagggttgtttttgtt

SEQ ID NO: 83871 - DNA, 20 bp, synthetic construct
  source 1..20: mol_type = other DNA
agactaagggttgtttttgt

SEQ ID NO: 83872 - DNA, 20 bp, synthetic construct
  source 1..20: mol_type = other DNA
tagactaagggttgtttttg

SEQ ID NO: 83873 - DNA, 20 bp, synthetic construct
  source 1..20: mol_type = other DNA
ttagactaagggttgttttt

SEQ ID NO: 83874 - DNA, 20 bp, synthetic construct
  source 1..20: mol_type = other DNA
cttagactaagggttgtttt

SEQ ID NO: 83875 - DNA, 20 bp, synthetic construct
  source 1..20: mol_type = other DNA
ccttagactaagggttgttt

SEQ ID NO: 83876 - DNA, 20 bp, synthetic construct
  source 1..20: mol_type = other DNA
cccttagactaagggttgtt

SEQ ID NO: 83877 - DNA, 20 bp, synthetic construct
  source 1..20: mol_type = other DNA
acccttagactaagggttgt

SEQ ID NO: 83878 - DNA, 20 bp, synthetic construct
  source 1..20: mol_type = other DNA
cacccttagactaagggttg

SEQ ID NO: 83879 - DNA, 20 bp, synthetic construct
  source 1..20: mol_type = other DNA
ccacccttagactaagggtt

SEQ ID NO: 83880 - DNA, 20 bp, synthetic construct
  source 1..20: mol_type = other DNA
tccacccttagactaagggt

SEQ ID NO: 83881 - DNA, 20 bp, synthetic construct
  source 1..20: mol_type = other DNA
atccacccttagactaaggg

SEQ ID NO: 83882 - DNA, 20 bp, synthetic construct
  source 1..20: mol_type = other DNA
catccacccttagactaagg

SEQ ID NO: 83883 - DNA, 20 bp, synthetic construct
  source 1..20: mol_type = other DNA
acatccacccttagactaag

SEQ ID NO: 83884 - DNA, 20 bp, synthetic construct
  source 1..20: mol_type = other DNA
aacatccacccttagactaa

SEQ ID NO: 83885 - DNA, 20 bp, synthetic construct
  source 1..20: mol_type = other DNA
taacatccacccttagacta

SEQ ID NO: 83886 - DNA, 20 bp, synthetic construct
  source 1..20: mol_type = other DNA
gtaacatccacccttagact

SEQ ID NO: 83887 - DNA, 20 bp, synthetic construct
  source 1..20: mol_type = other DNA
tgtaacatccacccttagac

SEQ ID NO: 83888 - DNA, 20 bp, synthetic construct
  source 1..20: mol_type = other DNA
ctgtaacatccacccttaga

SEQ ID NO: 83889 - DNA, 20 bp, synthetic construct
  source 1..20: mol_type = other DNA
actgtaacatccacccttag

SEQ ID NO: 83890 - DNA, 20 bp, synthetic construct
  source 1..20: mol_type = other DNA
aactgtaacatccaccctta

SEQ ID NO: 83891 - DNA, 20 bp, synthetic construct
  source 1..20: mol_type = other DNA
aaactgtaacatccaccctt

SEQ ID NO: 83892 - DNA, 20 bp, synthetic construct
  source 1..20: mol_type = other DNA
taaactgtaacatccaccct

SEQ ID NO: 83893 - DNA, 20 bp, synthetic construct
  source 1..20: mol_type = other DNA
ctaaactgtaacatccaccc

SEQ ID NO: 83894 - DNA, 20 bp, synthetic construct
  source 1..20: mol_type = other DNA
gctaaactgtaacatccacc

SEQ ID NO: 83895 - DNA, 20 bp, synthetic construct
  source 1..20: mol_type = other DNA
tgctaaactgtaacatccac

SEQ ID NO: 83896 - DNA, 20 bp, synthetic construct
  source 1..20: mol_type = other DNA
ttgctaaactgtaacatcca

SEQ ID NO: 83897 - DNA, 20 bp, synthetic construct
  source 1..20: mol_type = other DNA
gttgctaaactgtaacatcc

SEQ ID NO: 83898 - DNA, 20 bp, synthetic construct
  source 1..20: mol_type = other DNA
agttgctaaactgtaacatc

SEQ ID NO: 83899 - DNA, 20 bp, synthetic construct
  source 1..20: mol_type = other DNA
aagttgctaaactgtaacat

SEQ ID NO: 83900 - DNA, 20 bp, synthetic construct
  source 1..20: mol_type = other DNA
taagttgctaaactgtaaca

SEQ ID NO: 83901 - DNA, 20 bp, synthetic construct
  source 1..20: mol_type = other DNA
ttaagttgctaaactgtaac

SEQ ID NO: 83902 - DNA, 20 bp, synthetic construct
  source 1..20: mol_type = other DNA
cttaagttgctaaactgtaa

SEQ ID NO: 83903 - DNA, 20 bp, synthetic construct
  source 1..20: mol_type = other DNA
acttaagttgctaaactgta

SEQ ID NO: 83904 - DNA, 20 bp, synthetic construct
  source 1..20: mol_type = other DNA
tacttaagttgctaaactgt

SEQ ID NO: 83905 - DNA, 20 bp, synthetic construct
  source 1..20: mol_type = other DNA
ttacttaagttgctaaactg

SEQ ID NO: 83906 - DNA, 20 bp, synthetic construct
  source 1..20: mol_type = other DNA
tttacttaagttgctaaact

SEQ ID NO: 83907 - DNA, 20 bp, synthetic construct
  source 1..20: mol_type = other DNA
ttttacttaagttgctaaac

SEQ ID NO: 83908 - DNA, 20 bp, synthetic construct
  source 1..20: mol_type = other DNA
cttttacttaagttgctaaa

SEQ ID NO: 83909 - DNA, 20 bp, synthetic construct
  source 1..20: mol_type = other DNA
tcttttacttaagttgctaa

SEQ ID NO: 83910 - DNA, 20 bp, synthetic construct
  source 1..20: mol_type = other DNA
ttcttttacttaagttgcta

SEQ ID NO: 83911 - DNA, 20 bp, synthetic construct
  source 1..20: mol_type = other DNA
tttcttttacttaagttgct

SEQ ID NO: 83912 - DNA, 20 bp, synthetic construct
  source 1..20: mol_type = other DNA
gtttcttttacttaagttgc

SEQ ID NO: 83913 - DNA, 20 bp, synthetic construct
  source 1..20: mol_type = other DNA
ggtttcttttacttaagttg

SEQ ID NO: 83914 - DNA, 20 bp, synthetic construct
  source 1..20: mol_type = other DNA
aggtttcttttacttaagtt

SEQ ID NO: 83915 - DNA, 20 bp, synthetic construct
  source 1..20: mol_type = other DNA
caggtttcttttacttaagt

SEQ ID NO: 83916 - DNA, 20 bp, synthetic construct
  source 1..20: mol_type = other DNA
tcaggtttcttttacttaag

SEQ ID NO: 83917 - DNA, 20 bp, synthetic construct
  source 1..20: mol_type = other DNA
ttcaggtttcttttacttaa

SEQ ID NO: 83918 - DNA, 20 bp, synthetic construct
  source 1..20: mol_type = other DNA
attcaggtttcttttactta

SEQ ID NO: 83919 - DNA, 20 bp, synthetic construct
  source 1..20: mol_type = other DNA
gattcaggtttcttttactt

SEQ ID NO: 83920 - DNA, 20 bp, synthetic construct
  source 1..20: mol_type = other DNA
agattcaggtttcttttact

SEQ ID NO: 83921 - DNA, 20 bp, synthetic construct
  source 1..20: mol_type = other DNA
aagattcaggtttcttttac

SEQ ID NO: 83922 - DNA, 20 bp, synthetic construct
  source 1..20: mol_type = other DNA
aaagattcaggtttctttta

SEQ ID NO: 83923 - DNA, 20 bp, synthetic construct
  source 1..20: mol_type = other DNA
taaagattcaggtttctttt

SEQ ID NO: 83924 - DNA, 20 bp, synthetic construct
  source 1..20: mol_type = other DNA
ctaaagattcaggtttcttt

SEQ ID NO: 83925 - DNA, 20 bp, synthetic construct
  source 1..20: mol_type = other DNA
actaaagattcaggtttctt

SEQ ID NO: 83926 - DNA, 20 bp, synthetic construct
  source 1..20: mol_type = other DNA
tactaaagattcaggtttct

SEQ ID NO: 83927 - DNA, 20 bp, synthetic construct
  source 1..20: mol_type = other DNA
ctactaaagattcaggtttc

SEQ ID NO: 83928 - DNA, 20 bp, synthetic construct
  source 1..20: mol_type = other DNA
cctactaaagattcaggttt

SEQ ID NO: 83929 - DNA, 20 bp, synthetic construct
  source 1..20: mol_type = other DNA
tcctactaaagattcaggtt

SEQ ID NO: 83930 - DNA, 20 bp, synthetic construct
  source 1..20: mol_type = other DNA
ttcctactaaagattcaggt

SEQ ID NO: 83931 - DNA, 20 bp, synthetic construct
  source 1..20: mol_type = other DNA
cttcctactaaagattcagg

SEQ ID NO: 83932 - DNA, 20 bp, synthetic construct
  source 1..20: mol_type = other DNA
tcttcctactaaagattcag

SEQ ID NO: 83933 - DNA, 20 bp, synthetic construct
  source 1..20: mol_type = other DNA
gtcttcctactaaagattca

SEQ ID NO: 83934 - DNA, 20 bp, synthetic construct
  source 1..20: mol_type = other DNA
tgtcttcctactaaagattc

SEQ ID NO: 83935 - DNA, 20 bp, synthetic construct
  source 1..20: mol_type = other DNA
atgtcttcctactaaagatt

SEQ ID NO: 83936 - DNA, 20 bp, synthetic construct
  source 1..20: mol_type = other DNA
aatgtcttcctactaaagat

SEQ ID NO: 83937 - DNA, 20 bp, synthetic construct
  source 1..20: mol_type = other DNA
aaatgtcttcctactaaaga

SEQ ID NO: 83938 - DNA, 20 bp, synthetic construct
  source 1..20: mol_type = other DNA
aaaatgtcttcctactaaag

SEQ ID NO: 83939 - DNA, 20 bp, synthetic construct
  source 1..20: mol_type = other DNA
aaaaatgtcttcctactaaa

SEQ ID NO: 83940 - DNA, 20 bp, synthetic construct
  source 1..20: mol_type = other DNA
aaaaaatgtcttcctactaa

SEQ ID NO: 83941 - DNA, 20 bp, synthetic construct
  source 1..20: mol_type = other DNA
taaaaaatgtcttcctacta

SEQ ID NO: 83942 - DNA, 20 bp, synthetic construct
  source 1..20: mol_type = other DNA
gtaaaaaatgtcttcctact

SEQ ID NO: 83943 - DNA, 20 bp, synthetic construct
  source 1..20: mol_type = other DNA
agtaaaaaatgtcttcctac

SEQ ID NO: 83944 - DNA, 20 bp, synthetic construct
  source 1..20: mol_type = other DNA
gagtaaaaaatgtcttccta

SEQ ID NO: 83945 - DNA, 20 bp, synthetic construct
  source 1..20: mol_type = other DNA
agagtaaaaaatgtcttcct

SEQ ID NO: 83946 - DNA, 20 bp, synthetic construct
  source 1..20: mol_type = other DNA
tagagtaaaaaatgtcttcc

SEQ ID NO: 83947 - DNA, 20 bp, synthetic construct
  source 1..20: mol_type = other DNA
gtagagtaaaaaatgtcttc

SEQ ID NO: 83948 - DNA, 20 bp, synthetic construct
  source 1..20: mol_type = other DNA
ggtagagtaaaaaatgtctt

SEQ ID NO: 83949 - DNA, 20 bp, synthetic construct
  source 1..20: mol_type = other DNA
aggtagagtaaaaaatgtct

SEQ ID NO: 83950 - DNA, 20 bp, synthetic construct
  source 1..20: mol_type = other DNA
gaggtagagtaaaaaatgtc

SEQ ID NO: 83951 - DNA, 20 bp, synthetic construct
  source 1..20: mol_type = other DNA
agaggtagagtaaaaaatgt

SEQ ID NO: 83952 - DNA, 20 bp, synthetic construct
  source 1..20: mol_type = other DNA
tagaggtagagtaaaaaatg

SEQ ID NO: 83953 - DNA, 20 bp, synthetic construct
  source 1..20: mol_type = other DNA
ttagaggtagagtaaaaaat

SEQ ID NO: 83954 - DNA, 20 bp, synthetic construct
  source 1..20: mol_type = other DNA
tttagaggtagagtaaaaaa

SEQ ID NO: 83955 - DNA, 20 bp, synthetic construct
  source 1..20: mol_type = other DNA
atttagaggtagagtaaaaa

SEQ ID NO: 83956 - DNA, 20 bp, synthetic construct
  source 1..20: mol_type = other DNA
gatttagaggtagagtaaaa

SEQ ID NO: 83957 - DNA, 20 bp, synthetic construct
  source 1..20: mol_type = other DNA
agatttagaggtagagtaaa

SEQ ID NO: 83958 - DNA, 20 bp, synthetic construct
  source 1..20: mol_type = other DNA
tagatttagaggtagagtaa

SEQ ID NO: 83959 - DNA, 20 bp, synthetic construct
  source 1..20: mol_type = other DNA
ctagatttagaggtagagta

SEQ ID NO: 83960 - DNA, 20 bp, synthetic construct
  source 1..20: mol_type = other DNA
cctagatttagaggtagagt

SEQ ID NO: 83961 - DNA, 20 bp, synthetic construct
  source 1..20: mol_type = other DNA
acctagatttagaggtagag

SEQ ID NO: 83962 - DNA, 20 bp, synthetic construct
  source 1..20: mol_type = other DNA
aacctagatttagaggtaga

SEQ ID NO: 83963 - DNA, 20 bp, synthetic construct
  source 1..20: mol_type = other DNA
caacctagatttagaggtag

SEQ ID NO: 83964 - DNA, 20 bp, synthetic construct
  source 1..20: mol_type = other DNA
tcaacctagatttagaggta

SEQ ID NO: 83965 - DNA, 20 bp, synthetic construct
  source 1..20: mol_type = other DNA
ttcaacctagatttagaggt

SEQ ID NO: 83966 - DNA, 20 bp, synthetic construct
  source 1..20: mol_type = other DNA
attcaacctagatttagagg

SEQ ID NO: 83967 - DNA, 20 bp, synthetic construct
  source 1..20: mol_type = other DNA
tattcaacctagatttagag

SEQ ID NO: 83968 - DNA, 20 bp, synthetic construct
  source 1..20: mol_type = other DNA
atattcaacctagatttaga

SEQ ID NO: 83969 - DNA, 20 bp, synthetic construct
  source 1..20: mol_type = other DNA
tatattcaacctagatttag

SEQ ID NO: 83970 - DNA, 20 bp, synthetic construct
  source 1..20: mol_type = other DNA
atatattcaacctagattta

SEQ ID NO: 83971 - DNA, 20 bp, synthetic construct
  source 1..20: mol_type = other DNA
gatatattcaacctagattt

SEQ ID NO: 83972 - DNA, 20 bp, synthetic construct
  source 1..20: mol_type = other DNA
agatatattcaacctagatt

SEQ ID NO: 83973 - DNA, 20 bp, synthetic construct
  source 1..20: mol_type = other DNA
aagatatattcaacctagat

SEQ ID NO: 83974 - DNA, 20 bp, synthetic construct
  source 1..20: mol_type = other DNA
caagatatattcaacctaga

SEQ ID NO: 83975 - DNA, 20 bp, synthetic construct
  source 1..20: mol_type = other DNA
acaagatatattcaacctag

SEQ ID NO: 83976 - DNA, 20 bp, synthetic construct
  source 1..20: mol_type = other DNA
tacaagatatattcaaccta

SEQ ID NO: 83977 - DNA, 20 bp, synthetic construct
  source 1..20: mol_type = other DNA
ctacaagatatattcaacct

SEQ ID NO: 83978 - DNA, 20 bp, synthetic construct
  source 1..20: mol_type = other DNA
cctacaagatatattcaacc

SEQ ID NO: 83979 - DNA, 20 bp, synthetic construct
  source 1..20: mol_type = other DNA
acctacaagatatattcaac

SEQ ID NO: 83980 - DNA, 20 bp, synthetic construct
  source 1..20: mol_type = other DNA
aacctacaagatatattcaa

SEQ ID NO: 83981 - DNA, 20 bp, synthetic construct
  source 1..20: mol_type = other DNA
caacctacaagatatattca

SEQ ID NO: 83982 - DNA, 20 bp, synthetic construct
  source 1..20: mol_type = other DNA
acaacctacaagatatattc

SEQ ID NO: 83983 - DNA, 20 bp, synthetic construct
  source 1..20: mol_type = other DNA
cacaacctacaagatatatt

SEQ ID NO: 83984 - DNA, 20 bp, synthetic construct
  source 1..20: mol_type = other DNA
ccacaacctacaagatatat

SEQ ID NO: 83985 - DNA, 20 bp, synthetic construct
  source 1..20: mol_type = other DNA
tccacaacctacaagatata

SEQ ID NO: 83986 - DNA, 20 bp, synthetic construct
  source 1..20: mol_type = other DNA
atccacaacctacaagatat

SEQ ID NO: 83987 - DNA, 20 bp, synthetic construct
  source 1..20: mol_type = other DNA
gatccacaacctacaagata

SEQ ID NO: 83988 - DNA, 20 bp, synthetic construct
  source 1..20: mol_type = other DNA
agatccacaacctacaagat

SEQ ID NO: 83989 - DNA, 20 bp, synthetic construct
  source 1..20: mol_type = other DNA
aagatccacaacctacaaga

SEQ ID NO: 83990 - DNA, 20 bp, synthetic construct
  source 1..20: mol_type = other DNA
aaagatccacaacctacaag

SEQ ID NO: 83991 - DNA, 20 bp, synthetic construct
  source 1..20: mol_type = other DNA
aaaagatccacaacctacaa

SEQ ID NO: 83992 - DNA, 20 bp, synthetic construct
  source 1..20: mol_type = other DNA
gaaaagatccacaacctaca

SEQ ID NO: 83993 - DNA, 20 bp, synthetic construct
  source 1..20: mol_type = other DNA
ggaaaagatccacaacctac

SEQ ID NO: 83994 - DNA, 20 bp, synthetic construct
  source 1..20: mol_type = other DNA
tggaaaagatccacaaccta

SEQ ID NO: 83995 - DNA, 20 bp, synthetic construct
  source 1..20: mol_type = other DNA
atggaaaagatccacaacct

SEQ ID NO: 83996 - DNA, 20 bp, synthetic construct
  source 1..20: mol_type = other DNA
tatggaaaagatccacaacc

SEQ ID NO: 83997 - DNA, 20 bp, synthetic construct
  source 1..20: mol_type = other DNA
ttatggaaaagatccacaac

SEQ ID NO: 83998 - DNA, 20 bp, synthetic construct
  source 1..20: mol_type = other DNA
tttatggaaaagatccacaa

SEQ ID NO: 83999 - DNA, 20 bp, synthetic construct
  source 1..20: mol_type = other DNA
atttatggaaaagatccaca

SEQ ID NO: 84000 - DNA, 20 bp, synthetic construct
  source 1..20: mol_type = other DNA
gatttatggaaaagatccac

SEQ ID NO: 84001 - DNA, 20 bp, synthetic construct
  source 1..20: mol_type = other DNA
tgatttatggaaaagatcca

SEQ ID NO: 84002 - DNA, 20 bp, synthetic construct
  source 1..20: mol_type = other DNA
ctgatttatggaaaagatcc

SEQ ID NO: 84003 - DNA, 20 bp, synthetic construct
  source 1..20: mol_type = other DNA
cctgatttatggaaaagatc

SEQ ID NO: 84004 - DNA, 20 bp, synthetic construct
  source 1..20: mol_type = other DNA
ccctgatttatggaaaagat

SEQ ID NO: 84005 - DNA, 20 bp, synthetic construct
  source 1..20: mol_type = other DNA
tccctgatttatggaaaaga

SEQ ID NO: 84006 - DNA, 20 bp, synthetic construct
  source 1..20: mol_type = other DNA
atccctgatttatggaaaag

SEQ ID NO: 84007 - DNA, 20 bp, synthetic construct
  source 1..20: mol_type = other DNA
tatccctgatttatggaaaa

SEQ ID NO: 84008 - DNA, 20 bp, synthetic construct
  source 1..20: mol_type = other DNA
gtatccctgatttatggaaa

SEQ ID NO: 84009 - DNA, 20 bp, synthetic construct
  source 1..20: mol_type = other DNA
agtatccctgatttatggaa

SEQ ID NO: 84010 - DNA, 20 bp, synthetic construct
  source 1..20: mol_type = other DNA
cagtatccctgatttatgga

SEQ ID NO: 84011 - DNA, 20 bp, synthetic construct
  source 1..20: mol_type = other DNA
tcagtatccctgatttatgg

SEQ ID NO: 84012 - DNA, 20 bp, synthetic construct
  source 1..20: mol_type = other DNA
ttcagtatccctgatttatg

SEQ ID NO: 84013 - DNA, 20 bp, synthetic construct
  source 1..20: mol_type = other DNA
gttcagtatccctgatttat

SEQ ID NO: 84014 - DNA, 20 bp, synthetic construct
  source 1..20: mol_type = other DNA
tgttcagtatccctgattta

SEQ ID NO: 84015 - DNA, 20 bp, synthetic construct
  source 1..20: mol_type = other DNA
ttgttcagtatccctgattt

SEQ ID NO: 84016 - DNA, 20 bp, synthetic construct
  source 1..20: mol_type = other DNA
gttgttcagtatccctgatt

SEQ ID NO: 84017 - DNA, 20 bp, synthetic construct
  source 1..20: mol_type = other DNA
tgttgttcagtatccctgat

SEQ ID NO: 84018 - DNA, 20 bp, synthetic construct
  source 1..20: mol_type = other DNA
ctgttgttcagtatccctga

SEQ ID NO: 84019 - DNA, 20 bp, synthetic construct
  source 1..20: mol_type = other DNA
actgttgttcagtatccctg

SEQ ID NO: 84020 - DNA, 20 bp, synthetic construct
  source 1..20: mol_type = other DNA
aactgttgttcagtatccct

SEQ ID NO: 84021 - DNA, 20 bp, synthetic construct
  source 1..20: mol_type = other DNA
gaactgttgttcagtatccc

SEQ ID NO: 84022 - DNA, 20 bp, synthetic construct
  source 1..20: mol_type = other DNA
agaactgttgttcagtatcc

SEQ ID NO: 84023 - DNA, 20 bp, synthetic construct
  source 1..20: mol_type = other DNA
tagaactgttgttcagtatc

SEQ ID NO: 84024 - DNA, 20 bp, synthetic construct
  source 1..20: mol_type = other DNA
atagaactgttgttcagtat

SEQ ID NO: 84025 - DNA, 20 bp, synthetic construct
  source 1..20: mol_type = other DNA
catagaactgttgttcagta

SEQ ID NO: 84026 - DNA, 20 bp, synthetic construct
  source 1..20: mol_type = other DNA
ccatagaactgttgttcagt

SEQ ID NO: 84027 - DNA, 20 bp, synthetic construct
  source 1..20: mol_type = other DNA
tccatagaactgttgttcag

SEQ ID NO: 84028 - DNA, 20 bp, synthetic construct
  source 1..20: mol_type = other DNA
atccatagaactgttgttca

SEQ ID NO: 84029 - DNA, 20 bp, synthetic construct
  source 1..20: mol_type = other DNA
catccatagaactgttgttc

SEQ ID NO: 84030 - DNA, 20 bp, synthetic construct
  source 1..20: mol_type = other DNA
ccatccatagaactgttgtt

SEQ ID NO: 84031 - DNA, 20 bp, synthetic construct
  source 1..20: mol_type = other DNA
accatccatagaactgttgt

SEQ ID NO: 84032 - DNA, 20 bp, synthetic construct
  source 1..20: mol_type = other DNA
taccatccatagaactgttg

SEQ ID NO: 84033 - DNA, 20 bp, synthetic construct
  source 1..20: mol_type = other DNA
ataccatccatagaactgtt

SEQ ID NO: 84034 - DNA, 20 bp, synthetic construct
  source 1..20: mol_type = other DNA
cataccatccatagaactgt

SEQ ID NO: 84035 - DNA, 20 bp, synthetic construct
  source 1..20: mol_type = other DNA
ccataccatccatagaactg

SEQ ID NO: 84036 - DNA, 20 bp, synthetic construct
  source 1..20: mol_type = other DNA
tccataccatccatagaact

SEQ ID NO: 84037 - DNA, 20 bp, synthetic construct
  source 1..20: mol_type = other DNA
ttccataccatccatagaac

SEQ ID NO: 84038 - DNA, 20 bp, synthetic construct
  source 1..20: mol_type = other DNA
tttccataccatccatagaa

SEQ ID NO: 84039 - DNA, 20 bp, synthetic construct
  source 1..20: mol_type = other DNA
atttccataccatccataga

SEQ ID NO: 84040 - DNA, 20 bp, synthetic construct
  source 1..20: mol_type = other DNA
tatttccataccatccatag

SEQ ID NO: 84041 - DNA, 20 bp, synthetic construct
  source 1..20: mol_type = other DNA
ctatttccataccatccata

SEQ ID NO: 84042 - DNA, 20 bp, synthetic construct
  source 1..20: mol_type = other DNA
actatttccataccatccat

SEQ ID NO: 84043 - DNA, 20 bp, synthetic construct
  source 1..20: mol_type = other DNA
tactatttccataccatcca

SEQ ID NO: 84044 - DNA, 20 bp, synthetic construct
  source 1..20: mol_type = other DNA
ttactatttccataccatcc

SEQ ID NO: 84045 - DNA, 20 bp, synthetic construct
  source 1..20: mol_type = other DNA
attactatttccataccatc

SEQ ID NO: 84046 - DNA, 20 bp, synthetic construct
  source 1..20: mol_type = other DNA
tattactatttccataccat

SEQ ID NO: 84047 - DNA, 20 bp, synthetic construct
  source 1..20: mol_type = other DNA
ctattactatttccatacca

SEQ ID NO: 84048 - DNA, 20 bp, synthetic construct
  source 1..20: mol_type = other DNA
gctattactatttccatacc

SEQ ID NO: 84049 - DNA, 20 bp, synthetic construct
  source 1..20: mol_type = other DNA
tgctattactatttccatac

SEQ ID NO: 84050 - DNA, 20 bp, synthetic construct
  source 1..20: mol_type = other DNA
ttgctattactatttccata

SEQ ID NO: 84051 - DNA, 20 bp, synthetic construct
  source 1..20: mol_type = other DNA
attgctattactatttccat

SEQ ID NO: 84052 - DNA, 20 bp, synthetic construct
  source 1..20: mol_type = other DNA
tattgctattactatttcca

SEQ ID NO: 84053 - DNA, 20 bp, synthetic construct
  source 1..20: mol_type = other DNA
ctattgctattactatttcc

SEQ ID NO: 84054 - DNA, 20 bp, synthetic construct
  source 1..20: mol_type = other DNA
actattgctattactatttc

SEQ ID NO: 84055 - DNA, 20 bp, synthetic construct
  source 1..20: mol_type = other DNA
tactattgctattactattt

SEQ ID NO: 84056 - DNA, 20 bp, synthetic construct
  source 1..20: mol_type = other DNA
atactattgctattactatt

SEQ ID NO: 84057 - DNA, 20 bp, synthetic construct
  source 1..20: mol_type = other DNA
catactattgctattactat

SEQ ID NO: 84058 - DNA, 20 bp, synthetic construct
  source 1..20: mol_type = other DNA
acatactattgctattacta

SEQ ID NO: 84059 - DNA, 20 bp, synthetic construct
  source 1..20: mol_type = other DNA
aacatactattgctattact

SEQ ID NO: 84060 - DNA, 20 bp, synthetic construct
  source 1..20: mol_type = other DNA
taacatactattgctattac

SEQ ID NO: 84061 - DNA, 20 bp, synthetic construct
  source 1..20: mol_type = other DNA
gtaacatactattgctatta

SEQ ID NO: 84062 - DNA, 20 bp, synthetic construct
  source 1..20: mol_type = other DNA
agtaacatactattgctatt

SEQ ID NO: 84063 - DNA, 20 bp, synthetic construct
  source 1..20: mol_type = other DNA
tagtaacatactattgctat

SEQ ID NO: 84064 - DNA, 20 bp, synthetic construct
  source 1..20: mol_type = other DNA
ttagtaacatactattgcta

SEQ ID NO: 84065 - DNA, 20 bp, synthetic construct
  source 1..20: mol_type = other DNA
gttagtaacatactattgct

SEQ ID NO: 84066 - DNA, 20 bp, synthetic construct
  source 1..20: mol_type = other DNA
agttagtaacatactattgc

SEQ ID NO: 84067 - DNA, 20 bp, synthetic construct
  source 1..20: mol_type = other DNA
aagttagtaacatactattg

SEQ ID NO: 84068 - DNA, 20 bp, synthetic construct
  source 1..20: mol_type = other DNA
aaagttagtaacatactatt

SEQ ID NO: 84069 - DNA, 20 bp, synthetic construct
  source 1..20: mol_type = other DNA
caaagttagtaacatactat

SEQ ID NO: 84070 - DNA, 20 bp, synthetic construct
  source 1..20: mol_type = other DNA
acaaagttagtaacatacta

SEQ ID NO: 84071 - DNA, 20 bp, synthetic construct
  source 1..20: mol_type = other DNA
cacaaagttagtaacatact

SEQ ID NO: 84072 - DNA, 20 bp, synthetic construct
  source 1..20: mol_type = other DNA
ccacaaagttagtaacatac

SEQ ID NO: 84073 - DNA, 20 bp, synthetic construct
  source 1..20: mol_type = other DNA
cccacaaagttagtaacata

SEQ ID NO: 84074 - DNA, 20 bp, synthetic construct
  source 1..20: mol_type = other DNA
tcccacaaagttagtaacat

SEQ ID NO: 84075 - DNA, 20 bp, synthetic construct
  source 1..20: mol_type = other DNA
ttcccacaaagttagtaaca

SEQ ID NO: 84076 - DNA, 20 bp, synthetic construct
  source 1..20: mol_type = other DNA
tttcccacaaagttagtaac

SEQ ID NO: 84077 - DNA, 20 bp, synthetic construct
  source 1..20: mol_type = other DNA
ttttcccacaaagttagtaa

SEQ ID NO: 84078 - DNA, 20 bp, synthetic construct
  source 1..20: mol_type = other DNA
cttttcccacaaagttagta

SEQ ID NO: 84079 - DNA, 20 bp, synthetic construct
  source 1..20: mol_type = other DNA
tcttttcccacaaagttagt

SEQ ID NO: 84080 - DNA, 20 bp, synthetic construct
  source 1..20: mol_type = other DNA
ctcttttcccacaaagttag

SEQ ID NO: 84081 - DNA, 20 bp, synthetic construct
  source 1..20: mol_type = other DNA
actcttttcccacaaagtta

SEQ ID NO: 84082 - DNA, 20 bp, synthetic construct
  source 1..20: mol_type = other DNA
cactcttttcccacaaagtt

SEQ ID NO: 84083 - DNA, 20 bp, synthetic construct
  source 1..20: mol_type = other DNA
ccactcttttcccacaaagt

SEQ ID NO: 84084 - DNA, 20 bp, synthetic construct
  source 1..20: mol_type = other DNA
tccactcttttcccacaaag

SEQ ID NO: 84085 - DNA, 20 bp, synthetic construct
  source 1..20: mol_type = other DNA
gtccactcttttcccacaaa

SEQ ID NO: 84086 - DNA, 20 bp, synthetic construct
  source 1..20: mol_type = other DNA
tgtccactcttttcccacaa

SEQ ID NO: 84087 - DNA, 20 bp, synthetic construct
  source 1..20: mol_type = other DNA
atgtccactcttttcccaca

SEQ ID NO: 84088 - DNA, 20 bp, synthetic construct
  source 1..20: mol_type = other DNA
aatgtccactcttttcccac

SEQ ID NO: 84089 - DNA, 20 bp, synthetic construct
  source 1..20: mol_type = other DNA
gaatgtccactcttttccca

SEQ ID NO: 84090 - DNA, 20 bp, synthetic construct
  source 1..20: mol_type = other DNA
tgaatgtccactcttttccc

SEQ ID NO: 84091 - DNA, 20 bp, synthetic construct
  source 1..20: mol_type = other DNA
ttgaatgtccactcttttcc

SEQ ID NO: 84092 - DNA, 20 bp, synthetic construct
  source 1..20: mol_type = other DNA
attgaatgtccactcttttc

SEQ ID NO: 84093 - DNA, 20 bp, synthetic construct
  source 1..20: mol_type = other DNA
aattgaatgtccactctttt

SEQ ID NO: 84094 - DNA, 20 bp, synthetic construct
  source 1..20: mol_type = other DNA
aaattgaatgtccactcttt

SEQ ID NO: 84095 - DNA, 20 bp, synthetic construct
  source 1..20: mol_type = other DNA
aaaattgaatgtccactctt

SEQ ID NO: 84096 - DNA, 20 bp, synthetic construct
  source 1..20: mol_type = other DNA
taaaattgaatgtccactct

SEQ ID NO: 84097 - DNA, 20 bp, synthetic construct
  source 1..20: mol_type = other DNA
ctaaaattgaatgtccactc

SEQ ID NO: 84098 - DNA, 20 bp, synthetic construct
  source 1..20: mol_type = other DNA
gctaaaattgaatgtccact

SEQ ID NO: 84099 - DNA, 20 bp, synthetic construct
  source 1..20: mol_type = other DNA
agctaaaattgaatgtccac

SEQ ID NO: 84100 - DNA, 20 bp, synthetic construct
  source 1..20: mol_type = other DNA
tagctaaaattgaatgtcca

SEQ ID NO: 84101 - DNA, 20 bp, synthetic construct
  source 1..20: mol_type = other DNA
atagctaaaattgaatgtcc

SEQ ID NO: 84102 - DNA, 20 bp, synthetic construct
  source 1..20: mol_type = other DNA
aatagctaaaattgaatgtc

SEQ ID NO: 84103 - DNA, 20 bp, synthetic construct
  source 1..20: mol_type = other DNA
aaatagctaaaattgaatgt

SEQ ID NO: 84104 - DNA, 20 bp, synthetic construct
  source 1..20: mol_type = other DNA
taaatagctaaaattgaatg

SEQ ID NO: 84105 - DNA, 20 bp, synthetic construct
  source 1..20: mol_type = other DNA
ttaaatagctaaaattgaat

SEQ ID NO: 84106 - DNA, 20 bp, synthetic construct
  source 1..20: mol_type = other DNA
tttaaatagctaaaattgaa

SEQ ID NO: 84107 - DNA, 20 bp, synthetic construct
  source 1..20: mol_type = other DNA
atttaaatagctaaaattga

SEQ ID NO: 84108 - DNA, 20 bp, synthetic construct
  source 1..20: mol_type = other DNA
aatttaaatagctaaaattg

SEQ ID NO: 84109 - DNA, 20 bp, synthetic construct
  source 1..20: mol_type = other DNA
aaatttaaatagctaaaatt

SEQ ID NO: 84110 - DNA, 20 bp, synthetic construct
  source 1..20: mol_type = other DNA
caaatttaaatagctaaaat

SEQ ID NO: 84111 - DNA, 20 bp, synthetic construct
  source 1..20: mol_type = other DNA
ccaaatttaaatagctaaaa

SEQ ID NO: 84112 - DNA, 20 bp, synthetic construct
  source 1..20: mol_type = other DNA
tccaaatttaaatagctaaa

SEQ ID NO: 84113 - DNA, 20 bp, synthetic construct
  source 1..20: mol_type = other DNA
ttccaaatttaaatagctaa

SEQ ID NO: 84114 - DNA, 20 bp, synthetic construct
  source 1..20: mol_type = other DNA
tttccaaatttaaatagcta

SEQ ID NO: 84115 - DNA, 20 bp, synthetic construct
  source 1..20: mol_type = other DNA
ctttccaaatttaaatagct

SEQ ID NO: 84116 - DNA, 20 bp, synthetic construct
  source 1..20: mol_type = other DNA
actttccaaatttaaatagc

SEQ ID NO: 84117 - DNA, 20 bp, synthetic construct
  source 1..20: mol_type = other DNA
aactttccaaatttaaatag

SEQ ID NO: 84118 - DNA, 20 bp, synthetic construct
  source 1..20: mol_type = other DNA
taactttccaaatttaaata

SEQ ID NO: 84119 - DNA, 20 bp, synthetic construct
  source 1..20: mol_type = other DNA
ctaactttccaaatttaaat

SEQ ID NO: 84120 - DNA, 20 bp, synthetic construct
  source 1..20: mol_type = other DNA
tctaactttccaaatttaaa

SEQ ID NO: 84121 - DNA, 20 bp, synthetic construct
  source 1..20: mol_type = other DNA
atctaactttccaaatttaa

SEQ ID NO: 84122 - DNA, 20 bp, synthetic construct
  source 1..20: mol_type = other DNA
catctaactttccaaattta

SEQ ID NO: 84123 - DNA, 20 bp, synthetic construct
  source 1..20: mol_type = other DNA
tcatctaactttccaaattt

SEQ ID NO: 84124 - DNA, 20 bp, synthetic construct
  source 1..20: mol_type = other DNA
ttcatctaactttccaaatt

SEQ ID NO: 84125 - DNA, 20 bp, synthetic construct
  source 1..20: mol_type = other DNA
tttcatctaactttccaaat

SEQ ID NO: 84126 - DNA, 20 bp, synthetic construct
  source 1..20: mol_type = other DNA
ttttcatctaactttccaaa

SEQ ID NO: 84127 - DNA, 20 bp, synthetic construct
  source 1..20: mol_type = other DNA
attttcatctaactttccaa

SEQ ID NO: 84128 - DNA, 20 bp, synthetic construct
  source 1..20: mol_type = other DNA
tattttcatctaactttcca

SEQ ID NO: 84129 - DNA, 20 bp, synthetic construct
  source 1..20: mol_type = other DNA
ctattttcatctaactttcc

SEQ ID NO: 84130 - DNA, 20 bp, synthetic construct
  source 1..20: mol_type = other DNA
tctattttcatctaactttc

SEQ ID NO: 84131 - DNA, 20 bp, synthetic construct
  source 1..20: mol_type = other DNA
ctctattttcatctaacttt

SEQ ID NO: 84132 - DNA, 20 bp, synthetic construct
  source 1..20: mol_type = other DNA
tctctattttcatctaactt

SEQ ID NO: 84133 - DNA, 20 bp, synthetic construct
  source 1..20: mol_type = other DNA
ttctctattttcatctaact

SEQ ID NO: 84134 - DNA, 20 bp, synthetic construct
  source 1..20: mol_type = other DNA
gttctctattttcatctaac

SEQ ID NO: 84135 - DNA, 20 bp, synthetic construct
  source 1..20: mol_type = other DNA
tgttctctattttcatctaa

SEQ ID NO: 84136 - DNA, 20 bp, synthetic construct
  source 1..20: mol_type = other DNA
gtgttctctattttcatcta

SEQ ID NO: 84137 - DNA, 20 bp, synthetic construct
  source 1..20: mol_type = other DNA
agtgttctctattttcatct

SEQ ID NO: 84138 - DNA, 20 bp, synthetic construct
  source 1..20: mol_type = other DNA
tagtgttctctattttcatc

SEQ ID NO: 84139 - DNA, 20 bp, synthetic construct
  source 1..20: mol_type = other DNA
ttagtgttctctattttcat

SEQ ID NO: 84140 - DNA, 20 bp, synthetic construct
  source 1..20: mol_type = other DNA
cttagtgttctctattttca

SEQ ID NO: 84141 - DNA, 20 bp, synthetic construct
  source 1..20: mol_type = other DNA
acttagtgttctctattttc

SEQ ID NO: 84142 - DNA, 20 bp, synthetic construct
  source 1..20: mol_type = other DNA
aacttagtgttctctatttt

SEQ ID NO: 84143 - DNA, 20 bp, synthetic construct
  source 1..20: mol_type = other DNA
aaacttagtgttctctattt

SEQ ID NO: 84144 - DNA, 20 bp, synthetic construct
  source 1..20: mol_type = other DNA
gaaacttagtgttctctatt

SEQ ID NO: 84145 - DNA, 20 bp, synthetic construct
  source 1..20: mol_type = other DNA
ggaaacttagtgttctctat

SEQ ID NO: 84146 - DNA, 20 bp, synthetic construct
  source 1..20: mol_type = other DNA
tggaaacttagtgttctcta

SEQ ID NO: 84147 - DNA, 20 bp, synthetic construct
  source 1..20: mol_type = other DNA
ttggaaacttagtgttctct

SEQ ID NO: 84148 - DNA, 20 bp, synthetic construct
  source 1..20: mol_type = other DNA
attggaaacttagtgttctc

SEQ ID NO: 84149 - DNA, 20 bp, synthetic construct
  source 1..20: mol_type = other DNA
aattggaaacttagtgttct

SEQ ID NO: 84150 - DNA, 20 bp, synthetic construct
  source 1..20: mol_type = other DNA
aaattggaaacttagtgttc

SEQ ID NO: 84151 - DNA, 20 bp, synthetic construct
  source 1..20: mol_type = other DNA
gaaattggaaacttagtgtt

SEQ ID NO: 84152 - DNA, 20 bp, synthetic construct
  source 1..20: mol_type = other DNA
tgaaattggaaacttagtgt

SEQ ID NO: 84153 - DNA, 20 bp, synthetic construct
  source 1..20: mol_type = other DNA
atgaaattggaaacttagtg

SEQ ID NO: 84154 - DNA, 20 bp, synthetic construct
  source 1..20: mol_type = other DNA
aatgaaattggaaacttagt

SEQ ID NO: 84155 - DNA, 20 bp, synthetic construct
  source 1..20: mol_type = other DNA
aaatgaaattggaaacttag

SEQ ID NO: 84156 - DNA, 20 bp, synthetic construct
  source 1..20: mol_type = other DNA
caaatgaaattggaaactta

SEQ ID NO: 84157 - DNA, 20 bp, synthetic construct
  source 1..20: mol_type = other DNA
acaaatgaaattggaaactt

SEQ ID NO: 84158 - DNA, 20 bp, synthetic construct
  source 1..20: mol_type = other DNA
aacaaatgaaattggaaact

SEQ ID NO: 84159 - DNA, 20 bp, synthetic construct
  source 1..20: mol_type = other DNA
aaacaaatgaaattggaaac

SEQ ID NO: 84160 - DNA, 20 bp, synthetic construct
  source 1..20: mol_type = other DNA
aaaacaaatgaaattggaaa

SEQ ID NO: 84161 - DNA, 20 bp, synthetic construct
  source 1..20: mol_type = other DNA
gaaaacaaatgaaattggaa

SEQ ID NO: 84162 - DNA, 20 bp, synthetic construct
  source 1..20: mol_type = other DNA
tgaaaacaaatgaaattgga

SEQ ID NO: 84163 - DNA, 20 bp, synthetic construct
  source 1..20: mol_type = other DNA
atgaaaacaaatgaaattgg

SEQ ID NO: 84164 - DNA, 20 bp, synthetic construct
  source 1..20: mol_type = other DNA
aatgaaaacaaatgaaattg

SEQ ID NO: 84165 - DNA, 20 bp, synthetic construct
  source 1..20: mol_type = other DNA
caatgaaaacaaatgaaatt

SEQ ID NO: 84166 - DNA, 20 bp, synthetic construct
  source 1..20: mol_type = other DNA
tcaatgaaaacaaatgaaat

SEQ ID NO: 84167 - DNA, 20 bp, synthetic construct
  source 1..20: mol_type = other DNA
ctcaatgaaaacaaatgaaa

SEQ ID NO: 84168 - DNA, 20 bp, synthetic construct
  source 1..20: mol_type = other DNA
actcaatgaaaacaaatgaa

SEQ ID NO: 84169 - DNA, 20 bp, synthetic construct
  source 1..20: mol_type = other DNA
gactcaatgaaaacaaatga

SEQ ID NO: 84170 - DNA, 20 bp, synthetic construct
  source 1..20: mol_type = other DNA
agactcaatgaaaacaaatg

SEQ ID NO: 84171 - DNA, 20 bp, synthetic construct
  source 1..20: mol_type = other DNA
aagactcaatgaaaacaaat

SEQ ID NO: 84172 - DNA, 20 bp, synthetic construct
  source 1..20: mol_type = other DNA
aaagactcaatgaaaacaaa

SEQ ID NO: 84173 - DNA, 20 bp, synthetic construct
  source 1..20: mol_type = other DNA
aaaagactcaatgaaaacaa

SEQ ID NO: 84174 - DNA, 20 bp, synthetic construct
  source 1..20: mol_type = other DNA
gaaaagactcaatgaaaaca

SEQ ID NO: 84175 - DNA, 20 bp, synthetic construct
  source 1..20: mol_type = other DNA
agaaaagactcaatgaaaac

SEQ ID NO: 84176 - DNA, 20 bp, synthetic construct
  source 1..20: mol_type = other DNA
gagaaaagactcaatgaaaa

SEQ ID NO: 84177 - DNA, 20 bp, synthetic construct
  source 1..20: mol_type = other DNA
ggagaaaagactcaatgaaa

SEQ ID NO: 84178 - DNA, 20 bp, synthetic construct
  source 1..20: mol_type = other DNA
tggagaaaagactcaatgaa

SEQ ID NO: 84179 - DNA, 20 bp, synthetic construct
  source 1..20: mol_type = other DNA
ctggagaaaagactcaatga

SEQ ID NO: 84180 - DNA, 20 bp, synthetic construct
  source 1..20: mol_type = other DNA
tctggagaaaagactcaatg

SEQ ID NO: 84181 - DNA, 20 bp, synthetic construct
  source 1..20: mol_type = other DNA
ttctggagaaaagactcaat

SEQ ID NO: 84182 - DNA, 20 bp, synthetic construct
  source 1..20: mol_type = other DNA
attctggagaaaagactcaa

SEQ ID NO: 84183 - DNA, 20 bp, synthetic construct
  source 1..20: mol_type = other DNA
aattctggagaaaagactca

SEQ ID NO: 84184 - DNA, 20 bp, synthetic construct
  source 1..20: mol_type = other DNA
gaattctggagaaaagactc

SEQ ID NO: 84185 - DNA, 20 bp, synthetic construct
  source 1..20: mol_type = other DNA
ggaattctggagaaaagact

SEQ ID NO: 84186 - DNA, 20 bp, synthetic construct
  source 1..20: mol_type = other DNA
aggaattctggagaaaagac

SEQ ID NO: 84187 - DNA, 20 bp, synthetic construct
  source 1..20: mol_type = other DNA
gaggaattctggagaaaaga

SEQ ID NO: 84188 - DNA, 20 bp, synthetic construct
  source 1..20: mol_type = other DNA
agaggaattctggagaaaag

SEQ ID NO: 84189 - DNA, 20 bp, synthetic construct
  source 1..20: mol_type = other DNA
gagaggaattctggagaaaa

SEQ ID NO: 84190 - DNA, 20 bp, synthetic construct
  source 1..20: mol_type = other DNA
ggagaggaattctggagaaa

SEQ ID NO: 84191 - DNA, 20 bp, synthetic construct
  source 1..20: mol_type = other DNA
tggagaggaattctggagaa

SEQ ID NO: 84192 - DNA, 20 bp, synthetic construct
  source 1..20: mol_type = other DNA
ttggagaggaattctggaga

SEQ ID NO: 84193 - DNA, 20 bp, synthetic construct
  source 1..20: mol_type = other DNA
tttggagaggaattctggag

SEQ ID NO: 84194 - DNA, 20 bp, synthetic construct
  source 1..20: mol_type = other DNA
atttggagaggaattctgga

SEQ ID NO: 84195 - DNA, 20 bp, synthetic construct
  source 1..20: mol_type = other DNA
catttggagaggaattctgg

SEQ ID NO: 84196 - DNA, 20 bp, synthetic construct
  source 1..20: mol_type = other DNA
ccatttggagaggaattctg

SEQ ID NO: 84197 - DNA, 20 bp, synthetic construct
  source 1..20: mol_type = other DNA
tccatttggagaggaattct

SEQ ID NO: 84198 - DNA, 20 bp, synthetic construct
  source 1..20: mol_type = other DNA
gtccatttggagaggaattc

SEQ ID NO: 84199 - DNA, 20 bp, synthetic construct
  source 1..20: mol_type = other DNA
tgtccatttggagaggaatt

SEQ ID NO: 84200 - DNA, 20 bp, synthetic construct
  source 1..20: mol_type = other DNA
gtgtccatttggagaggaat

SEQ ID NO: 84201 - DNA, 20 bp, synthetic construct
  source 1..20: mol_type = other DNA
agtgtccatttggagaggaa

SEQ ID NO: 84202 - DNA, 20 bp, synthetic construct
  source 1..20: mol_type = other DNA
gagtgtccatttggagagga

SEQ ID NO: 84203 - DNA, 20 bp, synthetic construct
  source 1..20: mol_type = other DNA
agagtgtccatttggagagg

SEQ ID NO: 84204 - DNA, 20 bp, synthetic construct
  source 1..20: mol_type = other DNA
aagagtgtccatttggagag

SEQ ID NO: 84205 - DNA, 20 bp, synthetic construct
  source 1..20: mol_type = other DNA
caagagtgtccatttggaga

SEQ ID NO: 84206 - DNA, 20 bp, synthetic construct
  source 1..20: mol_type = other DNA
tcaagagtgtccatttggag

SEQ ID NO: 84207 - DNA, 20 bp, synthetic construct
  source 1..20: mol_type = other DNA
ctcaagagtgtccatttgga

SEQ ID NO: 84208 - DNA, 20 bp, synthetic construct
  source 1..20: mol_type = other DNA
actcaagagtgtccatttgg

SEQ ID NO: 84209 - DNA, 20 bp, synthetic construct
  source 1..20: mol_type = other DNA
tactcaagagtgtccatttg

SEQ ID NO: 84210 - DNA, 20 bp, synthetic construct
  source 1..20: mol_type = other DNA
atactcaagagtgtccattt

SEQ ID NO: 84211 - DNA, 20 bp, synthetic construct
  source 1..20: mol_type = other DNA
aatactcaagagtgtccatt

SEQ ID NO: 84212 - DNA, 20 bp, synthetic construct
  source 1..20: mol_type = other DNA
aaatactcaagagtgtccat

SEQ ID NO: 84213 - DNA, 20 bp, synthetic construct
  source 1..20: mol_type = other DNA
aaaatactcaagagtgtcca

SEQ ID NO: 84214 - DNA, 20 bp, synthetic construct
  source 1..20: mol_type = other DNA
gaaaatactcaagagtgtcc

SEQ ID NO: 84215 - DNA, 20 bp, synthetic construct
  source 1..20: mol_type = other DNA
tgaaaatactcaagagtgtc

SEQ ID NO: 84216 - DNA, 20 bp, synthetic construct
  source 1..20: mol_type = other DNA
ctgaaaatactcaagagtgt

SEQ ID NO: 84217 - DNA, 20 bp, synthetic construct
  source 1..20: mol_type = other DNA
actgaaaatactcaagagtg

SEQ ID NO: 84218 - DNA, 20 bp, synthetic construct
  source 1..20: mol_type = other DNA
tactgaaaatactcaagagt

SEQ ID NO: 84219 - DNA, 20 bp, synthetic construct
  source 1..20: mol_type = other DNA
gtactgaaaatactcaagag

SEQ ID NO: 84220 - DNA, 20 bp, synthetic construct
  source 1..20: mol_type = other DNA
agtactgaaaatactcaaga

SEQ ID NO: 84221 - DNA, 20 bp, synthetic construct
  source 1..20: mol_type = other DNA
aagtactgaaaatactcaag

SEQ ID NO: 84222 - DNA, 20 bp, synthetic construct
  source 1..20: mol_type = other DNA
taagtactgaaaatactcaa

SEQ ID NO: 84223 - DNA, 20 bp, synthetic construct
  source 1..20: mol_type = other DNA
ttaagtactgaaaatactca

SEQ ID NO: 84224 - DNA, 20 bp, synthetic construct
  source 1..20: mol_type = other DNA
attaagtactgaaaatactc

SEQ ID NO: 84225 - DNA, 20 bp, synthetic construct
  source 1..20: mol_type = other DNA
tattaagtactgaaaatact

SEQ ID NO: 84226 - DNA, 20 bp, synthetic construct
  source 1..20: mol_type = other DNA
atattaagtactgaaaatac

SEQ ID NO: 84227 - DNA, 20 bp, synthetic construct
  source 1..20: mol_type = other DNA
aatattaagtactgaaaata

SEQ ID NO: 84228 - DNA, 20 bp, synthetic construct
  source 1..20: mol_type = other DNA
caatattaagtactgaaaat

SEQ ID NO: 84229 - DNA, 20 bp, synthetic construct
  source 1..20: mol_type = other DNA
ccaatattaagtactgaaaa

SEQ ID NO: 84230 - DNA, 20 bp, synthetic construct
  source 1..20: mol_type = other DNA
cccaatattaagtactgaaa

SEQ ID NO: 84231 - DNA, 20 bp, synthetic construct
  source 1..20: mol_type = other DNA
ccccaatattaagtactgaa

SEQ ID NO: 84232 - DNA, 20 bp, synthetic construct
  source 1..20: mol_type = other DNA
cccccaatattaagtactga

SEQ ID NO: 84233 - DNA, 20 bp, synthetic construct
  source 1..20: mol_type = other DNA
acccccaatattaagtactg

SEQ ID NO: 84234 - DNA, 20 bp, synthetic construct
  source 1..20: mol_type = other DNA
cacccccaatattaagtact

SEQ ID NO: 84235 - DNA, 20 bp, synthetic construct
  source 1..20: mol_type = other DNA
tcacccccaatattaagtac

SEQ ID NO: 84236 - DNA, 20 bp, synthetic construct
  source 1..20: mol_type = other DNA
ttcacccccaatattaagta

SEQ ID NO: 84237 - DNA, 20 bp, synthetic construct
  source 1..20: mol_type = other DNA
tttcacccccaatattaagt

SEQ ID NO: 84238 - DNA, 20 bp, synthetic construct
  source 1..20: mol_type = other DNA
atttcacccccaatattaag

SEQ ID NO: 84239 - DNA, 20 bp, synthetic construct
  source 1..20: mol_type = other DNA
aatttcacccccaatattaa

SEQ ID NO: 84240 - DNA, 20 bp, synthetic construct
  source 1..20: mol_type = other DNA
aaatttcacccccaatatta

SEQ ID NO: 84241 - DNA, 20 bp, synthetic construct
  source 1..20: mol_type = other DNA
gaaatttcacccccaatatt

SEQ ID NO: 84242 - DNA, 20 bp, synthetic construct
  source 1..20: mol_type = other DNA
agaaatttcacccccaatat

SEQ ID NO: 84243 - DNA, 20 bp, synthetic construct
  source 1..20: mol_type = other DNA
aagaaatttcacccccaata

SEQ ID NO: 84244 - DNA, 20 bp, synthetic construct
  source 1..20: mol_type = other DNA
aaagaaatttcacccccaat

SEQ ID NO: 84245 - DNA, 20 bp, synthetic construct
  source 1..20: mol_type = other DNA
caaagaaatttcacccccaa

SEQ ID NO: 84246 - DNA, 20 bp, synthetic construct
  source 1..20: mol_type = other DNA
gcaaagaaatttcaccccca

SEQ ID NO: 84247 - DNA, 20 bp, synthetic construct
  source 1..20: mol_type = other DNA
agcaaagaaatttcaccccc

SEQ ID NO: 84248 - DNA, 20 bp, synthetic construct
  source 1..20: mol_type = other DNA
gagcaaagaaatttcacccc

SEQ ID NO: 84249 - DNA, 20 bp, synthetic construct
  source 1..20: mol_type = other DNA
tgagcaaagaaatttcaccc

SEQ ID NO: 84250 - DNA, 20 bp, synthetic construct
  source 1..20: mol_type = other DNA
gtgagcaaagaaatttcacc

SEQ ID NO: 84251 - DNA, 20 bp, synthetic construct
  source 1..20: mol_type = other DNA
agtgagcaaagaaatttcac

SEQ ID NO: 84252 - DNA, 20 bp, synthetic construct
  source 1..20: mol_type = other DNA
cagtgagcaaagaaatttca

SEQ ID NO: 84253 - DNA, 20 bp, synthetic construct
  source 1..20: mol_type = other DNA
tcagtgagcaaagaaatttc

SEQ ID NO: 84254 - DNA, 20 bp, synthetic construct
  source 1..20: mol_type = other DNA
ctcagtgagcaaagaaattt

SEQ ID NO: 84255 - DNA, 20 bp, synthetic construct
  source 1..20: mol_type = other DNA
cctcagtgagcaaagaaatt

SEQ ID NO: 84256 - DNA, 20 bp, synthetic construct
  source 1..20: mol_type = other DNA
tcctcagtgagcaaagaaat

SEQ ID NO: 84257 - DNA, 20 bp, synthetic construct
  source 1..20: mol_type = other DNA
ttcctcagtgagcaaagaaa

SEQ ID NO: 84258 - DNA, 20 bp, synthetic construct
  source 1..20: mol_type = other DNA
tttcctcagtgagcaaagaa

SEQ ID NO: 84259 - DNA, 20 bp, synthetic construct
  source 1..20: mol_type = other DNA
ctttcctcagtgagcaaaga

SEQ ID NO: 84260 - DNA, 20 bp, synthetic construct
  source 1..20: mol_type = other DNA
tctttcctcagtgagcaaag

SEQ ID NO: 84261 - DNA, 20 bp, synthetic construct
  source 1..20: mol_type = other DNA
atctttcctcagtgagcaaa

SEQ ID NO: 84262 - DNA, 20 bp, synthetic construct
  source 1..20: mol_type = other DNA
aatctttcctcagtgagcaa

SEQ ID NO: 84263 - DNA, 20 bp, synthetic construct
  source 1..20: mol_type = other DNA
aaatctttcctcagtgagca

SEQ ID NO: 84264 - DNA, 20 bp, synthetic construct
  source 1..20: mol_type = other DNA
aaaatctttcctcagtgagc

SEQ ID NO: 84265 - DNA, 20 bp, synthetic construct
  source 1..20: mol_type = other DNA
taaaatctttcctcagtgag

SEQ ID NO: 84266 - DNA, 20 bp, synthetic construct
  source 1..20: mol_type = other DNA
ctaaaatctttcctcagtga

SEQ ID NO: 84267 - DNA, 20 bp, synthetic construct
  source 1..20: mol_type = other DNA
actaaaatctttcctcagtg

SEQ ID NO: 84268 - DNA, 20 bp, synthetic construct
  source 1..20: mol_type = other DNA
aactaaaatctttcctcagt

SEQ ID NO: 84269 - DNA, 20 bp, synthetic construct
  source 1..20: mol_type = other DNA
caactaaaatctttcctcag

SEQ ID NO: 84270 - DNA, 20 bp, synthetic construct
  source 1..20: mol_type = other DNA
acaactaaaatctttcctca

SEQ ID NO: 84271 - DNA, 20 bp, synthetic construct
  source 1..20: mol_type = other DNA
aacaactaaaatctttcctc

SEQ ID NO: 84272 - DNA, 20 bp, synthetic construct
  source 1..20: mol_type = other DNA
aaacaactaaaatctttcct

SEQ ID NO: 84273 - DNA, 20 bp, synthetic construct
  source 1..20: mol_type = other DNA
taaacaactaaaatctttcc

SEQ ID NO: 84274 - DNA, 20 bp, synthetic construct
  source 1..20: mol_type = other DNA
ataaacaactaaaatctttc

SEQ ID NO: 84275 - DNA, 20 bp, synthetic construct
  source 1..20: mol_type = other DNA
tataaacaactaaaatcttt

SEQ ID NO: 84276 - DNA, 20 bp, synthetic construct
  source 1..20: mol_type = other DNA
ttataaacaactaaaatctt

SEQ ID NO: 84277 - DNA, 20 bp, synthetic construct
  source 1..20: mol_type = other DNA
tttataaacaactaaaatct

SEQ ID NO: 84278 - DNA, 20 bp, synthetic construct
  source 1..20: mol_type = other DNA
gtttataaacaactaaaatc

SEQ ID NO: 84279 - DNA, 20 bp, synthetic construct
  source 1..20: mol_type = other DNA
tgtttataaacaactaaaat

SEQ ID NO: 84280 - DNA, 20 bp, synthetic construct
  source 1..20: mol_type = other DNA
ctgtttataaacaactaaaa

SEQ ID NO: 84281 - DNA, 20 bp, synthetic construct
  source 1..20: mol_type = other DNA
tctgtttataaacaactaaa

SEQ ID NO: 84282 - DNA, 20 bp, synthetic construct
  source 1..20: mol_type = other DNA
ttctgtttataaacaactaa

SEQ ID NO: 84283 - DNA, 20 bp, synthetic construct
  source 1..20: mol_type = other DNA
attctgtttataaacaacta

SEQ ID NO: 84284 - DNA, 20 bp, synthetic construct
  source 1..20: mol_type = other DNA
aattctgtttataaacaact

SEQ ID NO: 84285 - DNA, 20 bp, synthetic construct
  source 1..20: mol_type = other DNA
aaattctgtttataaacaac

SEQ ID NO: 84286 - DNA, 20 bp, synthetic construct
  source 1..20: mol_type = other DNA
aaaattctgtttataaacaa

SEQ ID NO: 84287 - DNA, 20 bp, synthetic construct
  source 1..20: mol_type = other DNA
taaaattctgtttataaaca

SEQ ID NO: 84288 - DNA, 20 bp, synthetic construct
  source 1..20: mol_type = other DNA
ttaaaattctgtttataaac

SEQ ID NO: 84289 - DNA, 20 bp, synthetic construct
  source 1..20: mol_type = other DNA
tttaaaattctgtttataaa

SEQ ID NO: 84290 - DNA, 20 bp, synthetic construct
  source 1..20: mol_type = other DNA
ctttaaaattctgtttataa

SEQ ID NO: 84291 - DNA, 20 bp, synthetic construct
  source 1..20: mol_type = other DNA
actttaaaattctgtttata

SEQ ID NO: 84292 - DNA, 20 bp, synthetic construct
  source 1..20: mol_type = other DNA
aactttaaaattctgtttat

SEQ ID NO: 84293 - DNA, 20 bp, synthetic construct
  source 1..20: mol_type = other DNA
taactttaaaattctgttta

SEQ ID NO: 84294 - DNA, 20 bp, synthetic construct
  source 1..20: mol_type = other DNA
ttaactttaaaattctgttt

SEQ ID NO: 84295 - DNA, 20 bp, synthetic construct
  source 1..20: mol_type = other DNA
tttaactttaaaattctgtt

SEQ ID NO: 84296 - DNA, 20 bp, synthetic construct
  source 1..20: mol_type = other DNA
ttttaactttaaaattctgt

SEQ ID NO: 84297 - DNA, 20 bp, synthetic construct
  source 1..20: mol_type = other DNA
tttttaactttaaaattctg

SEQ ID NO: 84298 - DNA, 20 bp, synthetic construct
  source 1..20: mol_type = other DNA
ttttttaactttaaaattct

SEQ ID NO: 84299 - DNA, 20 bp, synthetic construct
  source 1..20: mol_type = other DNA
gttttttaactttaaaattc

SEQ ID NO: 84300 - DNA, 20 bp, synthetic construct
  source 1..20: mol_type = other DNA
ggttttttaactttaaaatt

SEQ ID NO: 84301 - DNA, 20 bp, synthetic construct
  source 1..20: mol_type = other DNA
aggttttttaactttaaaat

SEQ ID NO: 84302 - DNA, 20 bp, synthetic construct
  source 1..20: mol_type = other DNA
caggttttttaactttaaaa

SEQ ID NO: 84303 - DNA, 20 bp, synthetic construct
  source 1..20: mol_type = other DNA
tcaggttttttaactttaaa

SEQ ID NO: 84304 - DNA, 20 bp, synthetic construct
  source 1..20: mol_type = other DNA
ttcaggttttttaactttaa

SEQ ID NO: 84305 - DNA, 20 bp, synthetic construct
  source 1..20: mol_type = other DNA
cttcaggttttttaacttta

SEQ ID NO: 84306 - DNA, 20 bp, synthetic construct
  source 1..20: mol_type = other DNA
ccttcaggttttttaacttt

SEQ ID NO: 84307 - DNA, 20 bp, synthetic construct
  source 1..20: mol_type = other DNA
cccttcaggttttttaactt

SEQ ID NO: 84308 - DNA, 20 bp, synthetic construct
  source 1..20: mol_type = other DNA
ccccttcaggttttttaact

SEQ ID NO: 84309 - DNA, 20 bp, synthetic construct
  source 1..20: mol_type = other DNA
cccccttcaggttttttaac

SEQ ID NO: 84310 - DNA, 20 bp, synthetic construct
  source 1..20: mol_type = other DNA
gcccccttcaggttttttaa

SEQ ID NO: 84311 - DNA, 20 bp, synthetic construct
  source 1..20: mol_type = other DNA
agcccccttcaggtttttta

SEQ ID NO: 84312 - DNA, 20 bp, synthetic construct
  source 1..20: mol_type = other DNA
cagcccccttcaggtttttt

SEQ ID NO: 84313 - DNA, 20 bp, synthetic construct
  source 1..20: mol_type = other DNA
tcagcccccttcaggttttt

SEQ ID NO: 84314 - DNA, 20 bp, synthetic construct
  source 1..20: mol_type = other DNA
ctcagcccccttcaggtttt

SEQ ID NO: 84315 - DNA, 20 bp, synthetic construct
  source 1..20: mol_type = other DNA
tctcagcccccttcaggttt

SEQ ID NO: 84316 - DNA, 20 bp, synthetic construct
  source 1..20: mol_type = other DNA
ttctcagcccccttcaggtt

SEQ ID NO: 84317 - DNA, 20 bp, synthetic construct
  source 1..20: mol_type = other DNA
tttctcagcccccttcaggt

SEQ ID NO: 84318 - DNA, 20 bp, synthetic construct
  source 1..20: mol_type = other DNA
atttctcagcccccttcagg

SEQ ID NO: 84319 - DNA, 20 bp, synthetic construct
  source 1..20: mol_type = other DNA
tatttctcagcccccttcag

SEQ ID NO: 84320 - DNA, 20 bp, synthetic construct
  source 1..20: mol_type = other DNA
atatttctcagcccccttca

SEQ ID NO: 84321 - DNA, 20 bp, synthetic construct
  source 1..20: mol_type = other DNA
tatatttctcagcccccttc

SEQ ID NO: 84322 - DNA, 20 bp, synthetic construct
  source 1..20: mol_type = other DNA
atatatttctcagccccctt

SEQ ID NO: 84323 - DNA, 20 bp, synthetic construct
  source 1..20: mol_type = other DNA
catatatttctcagccccct

SEQ ID NO: 84324 - DNA, 20 bp, synthetic construct
  source 1..20: mol_type = other DNA
tcatatatttctcagccccc

SEQ ID NO: 84325 - DNA, 20 bp, synthetic construct
  source 1..20: mol_type = other DNA
atcatatatttctcagcccc

SEQ ID NO: 84326 - DNA, 20 bp, synthetic construct
  source 1..20: mol_type = other DNA
tatcatatatttctcagccc

SEQ ID NO: 84327 - DNA, 20 bp, synthetic construct
  source 1..20: mol_type = other DNA
gtatcatatatttctcagcc

SEQ ID NO: 84328 - DNA, 20 bp, synthetic construct
  source 1..20: mol_type = other DNA
agtatcatatatttctcagc

SEQ ID NO: 84329 - DNA, 20 bp, synthetic construct
  source 1..20: mol_type = other DNA
aagtatcatatatttctcag

SEQ ID NO: 84330 - DNA, 20 bp, synthetic construct
  source 1..20: mol_type = other DNA
taagtatcatatatttctca

SEQ ID NO: 84331 - DNA, 20 bp, synthetic construct
  source 1..20: mol_type = other DNA
ttaagtatcatatatttctc

SEQ ID NO: 84332 - DNA, 20 bp, synthetic construct
  source 1..20: mol_type = other DNA
cttaagtatcatatatttct

SEQ ID NO: 84333 - DNA, 20 bp, synthetic construct
  source 1..20: mol_type = other DNA
acttaagtatcatatatttc

SEQ ID NO: 84334 - DNA, 20 bp, synthetic construct
  source 1..20: mol_type = other DNA
cacttaagtatcatatattt

SEQ ID NO: 84335 - DNA, 20 bp, synthetic construct
  source 1..20: mol_type = other DNA
acacttaagtatcatatatt

SEQ ID NO: 84336 - DNA, 20 bp, synthetic construct
  source 1..20: mol_type = other DNA
cacacttaagtatcatatat

SEQ ID NO: 84337 - DNA, 20 bp, synthetic construct
  source 1..20: mol_type = other DNA
acacacttaagtatcatata

SEQ ID NO: 84338 - DNA, 20 bp, synthetic construct
  source 1..20: mol_type = other DNA
cacacacttaagtatcatat

SEQ ID NO: 84339 - DNA, 20 bp, synthetic construct
  source 1..20: mol_type = other DNA
ccacacacttaagtatcata

SEQ ID NO: 84340 - DNA, 20 bp, synthetic construct
  source 1..20: mol_type = other DNA
tccacacacttaagtatcat

SEQ ID NO: 84341 - DNA, 20 bp, synthetic construct
  source 1..20: mol_type = other DNA
ttccacacacttaagtatca

SEQ ID NO: 84342 - DNA, 20 bp, synthetic construct
  source 1..20: mol_type = other DNA
gttccacacacttaagtatc

SEQ ID NO: 84343 - DNA, 20 bp, synthetic construct
  source 1..20: mol_type = other DNA
ggttccacacacttaagtat

SEQ ID NO: 84344 - DNA, 20 bp, synthetic construct
  source 1..20: mol_type = other DNA
gggttccacacacttaagta

SEQ ID NO: 84345 - DNA, 20 bp, synthetic construct
  source 1..20: mol_type = other DNA
agggttccacacacttaagt

SEQ ID NO: 84346 - DNA, 20 bp, synthetic construct
  source 1..20: mol_type = other DNA
tagggttccacacacttaag

SEQ ID NO: 84347 - DNA, 20 bp, synthetic construct
  source 1..20: mol_type = other DNA
atagggttccacacacttaa

SEQ ID NO: 84348 - DNA, 20 bp, synthetic construct
  source 1..20: mol_type = other DNA
catagggttccacacactta

SEQ ID NO: 84349 - DNA, 20 bp, synthetic construct
  source 1..20: mol_type = other DNA
ccatagggttccacacactt

SEQ ID NO: 84350 - DNA, 20 bp, synthetic construct
  source 1..20: mol_type = other DNA
tccatagggttccacacact

SEQ ID NO: 84351 - DNA, 20 bp, synthetic construct
  source 1..20: mol_type = other DNA
ctccatagggttccacacac

SEQ ID NO: 84352 - DNA, 20 bp, synthetic construct
  source 1..20: mol_type = other DNA
tctccatagggttccacaca

SEQ ID NO: 84353 - DNA, 20 bp, synthetic construct
  source 1..20: mol_type = other DNA
ctctccatagggttccacac

SEQ ID NO: 84354 - DNA, 20 bp, synthetic construct
  source 1..20: mol_type = other DNA
cctctccatagggttccaca

SEQ ID NO: 84355 - DNA, 20 bp, synthetic construct
  source 1..20: mol_type = other DNA
tcctctccatagggttccac

SEQ ID NO: 84356 - DNA, 20 bp, synthetic construct
  source 1..20: mol_type = other DNA
ctcctctccatagggttcca

SEQ ID NO: 84357 - DNA, 20 bp, synthetic construct
  source 1..20: mol_type = other DNA
tctcctctccatagggttcc

SEQ ID NO: 84358 - DNA, 20 bp, synthetic construct
  source 1..20: mol_type = other DNA
gtctcctctccatagggttc

SEQ ID NO: 84359 - DNA, 20 bp, synthetic construct
  source 1..20: mol_type = other DNA
ggtctcctctccatagggtt

SEQ ID NO: 84360 - DNA, 20 bp, synthetic construct
  source 1..20: mol_type = other DNA
aggtctcctctccatagggt

SEQ ID NO: 84361 - DNA, 20 bp, synthetic construct
  source 1..20: mol_type = other DNA
caggtctcctctccataggg

SEQ ID NO: 84362 - DNA, 20 bp, synthetic construct
  source 1..20: mol_type = other DNA
ccaggtctcctctccatagg

SEQ ID NO: 84363 - DNA, 20 bp, synthetic construct
  source 1..20: mol_type = other DNA
tccaggtctcctctccatag

SEQ ID NO: 84364 - DNA, 20 bp, synthetic construct
  source 1..20: mol_type = other DNA
gtccaggtctcctctccata

SEQ ID NO: 84365 - DNA, 20 bp, synthetic construct
  source 1..20: mol_type = other DNA
agtccaggtctcctctccat

SEQ ID NO: 84366 - DNA, 20 bp, synthetic construct
  source 1..20: mol_type = other DNA
cagtccaggtctcctctcca

SEQ ID NO: 84367 - DNA, 20 bp, synthetic construct
  source 1..20: mol_type = other DNA
acagtccaggtctcctctcc

SEQ ID NO: 84368 - DNA, 20 bp, synthetic construct
  source 1..20: mol_type = other DNA
aacagtccaggtctcctctc

SEQ ID NO: 84369 - DNA, 20 bp, synthetic construct
  source 1..20: mol_type = other DNA
aaacagtccaggtctcctct

SEQ ID NO: 84370 - DNA, 20 bp, synthetic construct
  source 1..20: mol_type = other DNA
caaacagtccaggtctcctc

SEQ ID NO: 84371 - DNA, 20 bp, synthetic construct
  source 1..20: mol_type = other DNA
tcaaacagtccaggtctcct

SEQ ID NO: 84372 - DNA, 20 bp, synthetic construct
  source 1..20: mol_type = other DNA
atcaaacagtccaggtctcc

SEQ ID NO: 84373 - DNA, 20 bp, synthetic construct
  source 1..20: mol_type = other DNA
tatcaaacagtccaggtctc

SEQ ID NO: 84374 - DNA, 20 bp, synthetic construct
  source 1..20: mol_type = other DNA
ttatcaaacagtccaggtct

SEQ ID NO: 84375 - DNA, 20 bp, synthetic construct
  source 1..20: mol_type = other DNA
cttatcaaacagtccaggtc

SEQ ID NO: 84376 - DNA, 20 bp, synthetic construct
  source 1..20: mol_type = other DNA
tcttatcaaacagtccaggt

SEQ ID NO: 84377 - DNA, 20 bp, synthetic construct
  source 1..20: mol_type = other DNA
atcttatcaaacagtccagg

SEQ ID NO: 84378 - DNA, 20 bp, synthetic construct
  source 1..20: mol_type = other DNA
aatcttatcaaacagtccag

SEQ ID NO: 84379 - DNA, 20 bp, synthetic construct
  source 1..20: mol_type = other DNA
taatcttatcaaacagtcca

SEQ ID NO: 84380 - DNA, 20 bp, synthetic construct
  source 1..20: mol_type = other DNA
ttaatcttatcaaacagtcc

SEQ ID NO: 84381 - DNA, 20 bp, synthetic construct
  source 1..20: mol_type = other DNA
cttaatcttatcaaacagtc

SEQ ID NO: 84382 - DNA, 20 bp, synthetic construct
  source 1..20: mol_type = other DNA
ccttaatcttatcaaacagt

SEQ ID NO: 84383 - DNA, 20 bp, synthetic construct
  source 1..20: mol_type = other DNA
accttaatcttatcaaacag

SEQ ID NO: 84384 - DNA, 20 bp, synthetic construct
  source 1..20: mol_type = other DNA
taccttaatcttatcaaaca

SEQ ID NO: 84385 - DNA, 20 bp, synthetic construct
  source 1..20: mol_type = other DNA
ttaccttaatcttatcaaac

SEQ ID NO: 84386 - DNA, 20 bp, synthetic construct
  source 1..20: mol_type = other DNA
cttaccttaatcttatcaaa

SEQ ID NO: 84387 - DNA, 20 bp, synthetic construct
  source 1..20: mol_type = other DNA
acttaccttaatcttatcaa

SEQ ID NO: 84388 - DNA, 20 bp, synthetic construct
  source 1..20: mol_type = other DNA
cacttaccttaatcttatca

SEQ ID NO: 84389 - DNA, 20 bp, synthetic construct
  source 1..20: mol_type = other DNA
tcacttaccttaatcttatc

SEQ ID NO: 84390 - DNA, 20 bp, synthetic construct
  source 1..20: mol_type = other DNA
atcacttaccttaatcttat

SEQ ID NO: 84391 - DNA, 20 bp, synthetic construct
  source 1..20: mol_type = other DNA
tatcacttaccttaatctta

SEQ ID NO: 84392 - DNA, 20 bp, synthetic construct
  source 1..20: mol_type = other DNA
atatcacttaccttaatctt

SEQ ID NO: 84393 - DNA, 20 bp, synthetic construct
  source 1..20: mol_type = other DNA
catatcacttaccttaatct

SEQ ID NO: 84394 - DNA, 20 bp, synthetic construct
  source 1..20: mol_type = other DNA
acatatcacttaccttaatc

SEQ ID NO: 84395 - DNA, 20 bp, synthetic construct
  source 1..20: mol_type = other DNA
tacatatcacttaccttaat

SEQ ID NO: 84396 - DNA, 20 bp, synthetic construct
  source 1..20: mol_type = other DNA
ttacatatcacttaccttaa

SEQ ID NO: 84397 - DNA, 20 bp, synthetic construct
  source 1..20: mol_type = other DNA
attacatatcacttacctta

SEQ ID NO: 84398 - DNA, 20 bp, synthetic construct
  source 1..20: mol_type = other DNA
cattacatatcacttacctt

SEQ ID NO: 84399 - DNA, 20 bp, synthetic construct
  source 1..20: mol_type = other DNA
acattacatatcacttacct

SEQ ID NO: 84400 - DNA, 20 bp, synthetic construct
  source 1..20: mol_type = other DNA
aacattacatatcacttacc

SEQ ID NO: 84401 - DNA, 20 bp, synthetic construct
  source 1..20: mol_type = other DNA
taacattacatatcacttac

SEQ ID NO: 84402 - DNA, 20 bp, synthetic construct
  source 1..20: mol_type = other DNA
ttaacattacatatcactta

SEQ ID NO: 84403 - DNA, 20 bp, synthetic construct
  source 1..20: mol_type = other DNA
tttaacattacatatcactt

SEQ ID NO: 84404 - DNA, 20 bp, synthetic construct
  source 1..20: mol_type = other DNA
atttaacattacatatcact

SEQ ID NO: 84405 - DNA, 20 bp, synthetic construct
  source 1..20: mol_type = other DNA
tatttaacattacatatcac

SEQ ID NO: 84406 - DNA, 20 bp, synthetic construct
  source 1..20: mol_type = other DNA
gtatttaacattacatatca

SEQ ID NO: 84407 - DNA, 20 bp, synthetic construct
  source 1..20: mol_type = other DNA
agtatttaacattacatatc

SEQ ID NO: 84408 - DNA, 20 bp, synthetic construct
  source 1..20: mol_type = other DNA
tagtatttaacattacatat

SEQ ID NO: 84409 - DNA, 20 bp, synthetic construct
  source 1..20: mol_type = other DNA
ctagtatttaacattacata

SEQ ID NO: 84410 - DNA, 20 bp, synthetic construct
  source 1..20: mol_type = other DNA
gctagtatttaacattacat

SEQ ID NO: 84411 - DNA, 20 bp, synthetic construct
  source 1..20: mol_type = other DNA
agctagtatttaacattaca

SEQ ID NO: 84412 - DNA, 20 bp, synthetic construct
  source 1..20: mol_type = other DNA
cagctagtatttaacattac

SEQ ID NO: 84413 - DNA, 20 bp, synthetic construct
  source 1..20: mol_type = other DNA
acagctagtatttaacatta

SEQ ID NO: 84414 - DNA, 20 bp, synthetic construct
  source 1..20: mol_type = other DNA
tacagctagtatttaacatt

SEQ ID NO: 84415 - DNA, 20 bp, synthetic construct
  source 1..20: mol_type = other DNA
atacagctagtatttaacat

SEQ ID NO: 84416 - DNA, 20 bp, synthetic construct
  source 1..20: mol_type = other DNA
gatacagctagtatttaaca

SEQ ID NO: 84417 - DNA, 20 bp, synthetic construct
  source 1..20: mol_type = other DNA
agatacagctagtatttaac

SEQ ID NO: 84418 - DNA, 20 bp, synthetic construct
  source 1..20: mol_type = other DNA
aagatacagctagtatttaa

SEQ ID NO: 84419 - DNA, 20 bp, synthetic construct
  source 1..20: mol_type = other DNA
aaagatacagctagtattta

SEQ ID NO: 84420 - DNA, 20 bp, synthetic construct
  source 1..20: mol_type = other DNA
taaagatacagctagtattt

SEQ ID NO: 84421 - DNA, 20 bp, synthetic construct
  source 1..20: mol_type = other DNA
gtaaagatacagctagtatt

SEQ ID NO: 84422 - DNA, 20 bp, synthetic construct
  source 1..20: mol_type = other DNA
ggtaaagatacagctagtat

SEQ ID NO: 84423 - DNA, 20 bp, synthetic construct
  source 1..20: mol_type = other DNA
aggtaaagatacagctagta

SEQ ID NO: 84424 - DNA, 20 bp, synthetic construct
  source 1..20: mol_type = other DNA
taggtaaagatacagctagt

SEQ ID NO: 84425 - DNA, 20 bp, synthetic construct
  source 1..20: mol_type = other DNA
ctaggtaaagatacagctag

SEQ ID NO: 84426 - DNA, 20 bp, synthetic construct
  source 1..20: mol_type = other DNA
cctaggtaaagatacagcta

SEQ ID NO: 84427 - DNA, 20 bp, synthetic construct
  source 1..20: mol_type = other DNA
gcctaggtaaagatacagct

SEQ ID NO: 84428 - DNA, 20 bp, synthetic construct
  source 1..20: mol_type = other DNA
tgcctaggtaaagatacagc

SEQ ID NO: 84429 - DNA, 20 bp, synthetic construct
  source 1..20: mol_type = other DNA
atgcctaggtaaagatacag

SEQ ID NO: 84430 - DNA, 20 bp, synthetic construct
  source 1..20: mol_type = other DNA
tatgcctaggtaaagataca

SEQ ID NO: 84431 - DNA, 20 bp, synthetic construct
  source 1..20: mol_type = other DNA
atatgcctaggtaaagatac

SEQ ID NO: 84432 - DNA, 20 bp, synthetic construct
  source 1..20: mol_type = other DNA
gatatgcctaggtaaagata

SEQ ID NO: 84433 - DNA, 20 bp, synthetic construct
  source 1..20: mol_type = other DNA
ggatatgcctaggtaaagat

SEQ ID NO: 84434 - DNA, 20 bp, synthetic construct
  source 1..20: mol_type = other DNA
tggatatgcctaggtaaaga

SEQ ID NO: 84435 - DNA, 20 bp, synthetic construct
  source 1..20: mol_type = other DNA
atggatatgcctaggtaaag

SEQ ID NO: 84436 - DNA, 20 bp, synthetic construct
  source 1..20: mol_type = other DNA
gatggatatgcctaggtaaa

SEQ ID NO: 84437 - DNA, 20 bp, synthetic construct
  source 1..20: mol_type = other DNA
tgatggatatgcctaggtaa

SEQ ID NO: 84438 - DNA, 20 bp, synthetic construct
  source 1..20: mol_type = other DNA
ctgatggatatgcctaggta

SEQ ID NO: 84439 - DNA, 20 bp, synthetic construct
  source 1..20: mol_type = other DNA
actgatggatatgcctaggt

SEQ ID NO: 84440 - DNA, 20 bp, synthetic construct
  source 1..20: mol_type = other DNA
tactgatggatatgcctagg

SEQ ID NO: 84441 - DNA, 20 bp, synthetic construct
  source 1..20: mol_type = other DNA
atactgatggatatgcctag

SEQ ID NO: 84442 - DNA, 20 bp, synthetic construct
  source 1..20: mol_type = other DNA
tatactgatggatatgccta

SEQ ID NO: 84443 - DNA, 20 bp, synthetic construct
  source 1..20: mol_type = other DNA
ttatactgatggatatgcct

SEQ ID NO: 84444 - DNA, 20 bp, synthetic construct
  source 1..20: mol_type = other DNA
tttatactgatggatatgcc

SEQ ID NO: 84445 - DNA, 20 bp, synthetic construct
  source 1..20: mol_type = other DNA
atttatactgatggatatgc

SEQ ID NO: 84446 - DNA, 20 bp, synthetic construct
  source 1..20: mol_type = other DNA
aatttatactgatggatatg

SEQ ID NO: 84447 - DNA, 20 bp, synthetic construct
  source 1..20: mol_type = other DNA
aaatttatactgatggatat

SEQ ID NO: 84448 - DNA, 20 bp, synthetic construct
  source 1..20: mol_type = other DNA
taaatttatactgatggata

SEQ ID NO: 84449 - DNA, 20 bp, synthetic construct
  source 1..20: mol_type = other DNA
ataaatttatactgatggat

SEQ ID NO: 84450 - DNA, 20 bp, synthetic construct
  source 1..20: mol_type = other DNA
aataaatttatactgatgga

SEQ ID NO: 84451 - DNA, 20 bp, synthetic construct
  source 1..20: mol_type = other DNA
aaataaatttatactgatgg

SEQ ID NO: 84452 - DNA, 20 bp, synthetic construct
  source 1..20: mol_type = other DNA
caaataaatttatactgatg

SEQ ID NO: 84453 - DNA, 20 bp, synthetic construct
  source 1..20: mol_type = other DNA
ccaaataaatttatactgat

SEQ ID NO: 84454 - DNA, 20 bp, synthetic construct
  source 1..20: mol_type = other DNA
accaaataaatttatactga

SEQ ID NO: 84455 - DNA, 20 bp, synthetic construct
  source 1..20: mol_type = other DNA
caccaaataaatttatactg

SEQ ID NO: 84456 - DNA, 20 bp, synthetic construct
  source 1..20: mol_type = other DNA
tcaccaaataaatttatact

SEQ ID NO: 84457 - DNA, 20 bp, synthetic construct
  source 1..20: mol_type = other DNA
atcaccaaataaatttatac

SEQ ID NO: 84458 - DNA, 20 bp, synthetic construct
  source 1..20: mol_type = other DNA
catcaccaaataaatttata

SEQ ID NO: 84459 - DNA, 20 bp, synthetic construct
  source 1..20: mol_type = other DNA
tcatcaccaaataaatttat

SEQ ID NO: 84460 - DNA, 20 bp, synthetic construct
  source 1..20: mol_type = other DNA
gtcatcaccaaataaattta

SEQ ID NO: 84461 - DNA, 20 bp, synthetic construct
  source 1..20: mol_type = other DNA
agtcatcaccaaataaattt

SEQ ID NO: 84462 - DNA, 20 bp, synthetic construct
  source 1..20: mol_type = other DNA
cagtcatcaccaaataaatt

SEQ ID NO: 84463 - DNA, 20 bp, synthetic construct
  source 1..20: mol_type = other DNA
gcagtcatcaccaaataaat

SEQ ID NO: 84464 - DNA, 20 bp, synthetic construct
  source 1..20: mol_type = other DNA
agcagtcatcaccaaataaa

SEQ ID NO: 84465 - DNA, 20 bp, synthetic construct
  source 1..20: mol_type = other DNA
aagcagtcatcaccaaataa

SEQ ID NO: 84466 - DNA, 20 bp, synthetic construct
  source 1..20: mol_type = other DNA
aaagcagtcatcaccaaata

SEQ ID NO: 84467 - DNA, 20 bp, synthetic construct
  source 1..20: mol_type = other DNA
caaagcagtcatcaccaaat

SEQ ID NO: 84468 - DNA, 20 bp, synthetic construct
  source 1..20: mol_type = other DNA
acaaagcagtcatcaccaaa

SEQ ID NO: 84469 - DNA, 20 bp, synthetic construct
  source 1..20: mol_type = other DNA
tacaaagcagtcatcaccaa

SEQ ID NO: 84470 - DNA, 20 bp, synthetic construct
  source 1..20: mol_type = other DNA
ctacaaagcagtcatcacca

SEQ ID NO: 84471 - DNA, 20 bp, synthetic construct
  source 1..20: mol_type = other DNA
actacaaagcagtcatcacc

SEQ ID NO: 84472 - DNA, 20 bp, synthetic construct
  source 1..20: mol_type = other DNA
aactacaaagcagtcatcac

SEQ ID NO: 84473 - DNA, 20 bp, synthetic construct
  source 1..20: mol_type = other DNA
caactacaaagcagtcatca

SEQ ID NO: 84474 - DNA, 20 bp, synthetic construct
  source 1..20: mol_type = other DNA
gcaactacaaagcagtcatc

SEQ ID NO: 84475 - DNA, 20 bp, synthetic construct
  source 1..20: mol_type = other DNA
tgcaactacaaagcagtcat

SEQ ID NO: 84476 - DNA, 20 bp, synthetic construct
  source 1..20: mol_type = other DNA
ctgcaactacaaagcagtca

SEQ ID NO: 84477 - DNA, 20 bp, synthetic construct
  source 1..20: mol_type = other DNA
actgcaactacaaagcagtc

SEQ ID NO: 84478 - DNA, 20 bp, synthetic construct
  source 1..20: mol_type = other DNA
tactgcaactacaaagcagt

SEQ ID NO: 84479 - DNA, 20 bp, synthetic construct
  source 1..20: mol_type = other DNA
atactgcaactacaaagcag

SEQ ID NO: 84480 - DNA, 20 bp, synthetic construct
  source 1..20: mol_type = other DNA
aatactgcaactacaaagca

SEQ ID NO: 84481 - DNA, 20 bp, synthetic construct
  source 1..20: mol_type = other DNA
aaatactgcaactacaaagc

SEQ ID NO: 84482 - DNA, 20 bp, synthetic construct
  source 1..20: mol_type = other DNA
taaatactgcaactacaaag

SEQ ID NO: 84483 - DNA, 20 bp, synthetic construct
  source 1..20: mol_type = other DNA
ataaatactgcaactacaaa

SEQ ID NO: 84484 - DNA, 20 bp, synthetic construct
  source 1..20: mol_type = other DNA
aataaatactgcaactacaa

SEQ ID NO: 84485 - DNA, 20 bp, synthetic construct
  source 1..20: mol_type = other DNA
taataaatactgcaactaca

SEQ ID NO: 84486 - DNA, 20 bp, synthetic construct
  source 1..20: mol_type = other DNA
ttaataaatactgcaactac

SEQ ID NO: 84487 - DNA, 20 bp, synthetic construct
  source 1..20: mol_type = other DNA
cttaataaatactgcaacta

SEQ ID NO: 84488 - DNA, 20 bp, synthetic construct
  source 1..20: mol_type = other DNA
gcttaataaatactgcaact

SEQ ID NO: 84489 - DNA, 20 bp, synthetic construct
  source 1..20: mol_type = other DNA
tgcttaataaatactgcaac

SEQ ID NO: 84490 - DNA, 20 bp, synthetic construct
  source 1..20: mol_type = other DNA
ctgcttaataaatactgcaa

SEQ ID NO: 84491 - DNA, 20 bp, synthetic construct
  source 1..20: mol_type = other DNA
actgcttaataaatactgca

SEQ ID NO: 84492 - DNA, 20 bp, synthetic construct
  source 1..20: mol_type = other DNA
gactgcttaataaatactgc

SEQ ID NO: 84493 - DNA, 20 bp, synthetic construct
  source 1..20: mol_type = other DNA
cgactgcttaataaatactg

SEQ ID NO: 84494 - DNA, 20 bp, synthetic construct
  source 1..20: mol_type = other DNA
gcgactgcttaataaatact

SEQ ID NO: 84495 - DNA, 20 bp, synthetic construct
  source 1..20: mol_type = other DNA
agcgactgcttaataaatac

SEQ ID NO: 84496 - DNA, 20 bp, synthetic construct
  source 1..20: mol_type = other DNA
aagcgactgcttaataaata

SEQ ID NO: 84497 - DNA, 20 bp, synthetic construct
  source 1..20: mol_type = other DNA
taagcgactgcttaataaat

SEQ ID NO: 84498 - DNA, 20 bp, synthetic construct
  source 1..20: mol_type = other DNA
ctaagcgactgcttaataaa

SEQ ID NO: 84499 - DNA, 20 bp, synthetic construct
  source 1..20: mol_type = other DNA
tctaagcgactgcttaataa

SEQ ID NO: 84500 - DNA, 20 bp, synthetic construct
  source 1..20: mol_type = other DNA
atctaagcgactgcttaata

SEQ ID NO: 84501 - DNA, 20 bp, synthetic construct
  source 1..20: mol_type = other DNA
tatctaagcgactgcttaat

SEQ ID NO: 84502 - DNA, 20 bp, synthetic construct
  source 1..20: mol_type = other DNA
ttatctaagcgactgcttaa

SEQ ID NO: 84503 - DNA, 20 bp, synthetic construct
  source 1..20: mol_type = other DNA
cttatctaagcgactgctta

SEQ ID NO: 84504 - DNA, 20 bp, synthetic construct
  source 1..20: mol_type = other DNA
acttatctaagcgactgctt

SEQ ID NO: 84505 - DNA, 20 bp, synthetic construct
  source 1..20: mol_type = other DNA
cacttatctaagcgactgct

SEQ ID NO: 84506 - DNA, 20 bp, synthetic construct
  source 1..20: mol_type = other DNA
acacttatctaagcgactgc

SEQ ID NO: 84507 - DNA, 20 bp, synthetic construct
  source 1..20: mol_type = other DNA
aacacttatctaagcgactg

SEQ ID NO: 84508 - DNA, 20 bp, synthetic construct
  source 1..20: mol_type = other DNA
aaacacttatctaagcgact

SEQ ID NO: 84509 - DNA, 20 bp, synthetic construct
  source 1..20: mol_type = other DNA
taaacacttatctaagcgac

SEQ ID NO: 84510 - DNA, 20 bp, synthetic construct
  source 1..20: mol_type = other DNA
ttaaacacttatctaagcga

SEQ ID NO: 84511 - DNA, 20 bp, synthetic construct
  source 1..20: mol_type = other DNA
gttaaacacttatctaagcg

SEQ ID NO: 84512 - DNA, 20 bp, synthetic construct
  source 1..20: mol_type = other DNA
agttaaacacttatctaagc

SEQ ID NO: 84513 - DNA, 20 bp, synthetic construct
  source 1..20: mol_type = other DNA
cagttaaacacttatctaag

SEQ ID NO: 84514 - DNA, 20 bp, synthetic construct
  source 1..20: mol_type = other DNA
acagttaaacacttatctaa

SEQ ID NO: 84515 - DNA, 20 bp, synthetic construct
  source 1..20: mol_type = other DNA
tacagttaaacacttatcta

SEQ ID NO: 84516 - DNA, 20 bp, synthetic construct
  source 1..20: mol_type = other DNA
atacagttaaacacttatct

SEQ ID NO: 84517 - DNA, 20 bp, synthetic construct
  source 1..20: mol_type = other DNA
tatacagttaaacacttatc

SEQ ID NO: 84518 - DNA, 20 bp, synthetic construct
  source 1..20: mol_type = other DNA
ttatacagttaaacacttat

SEQ ID NO: 84519 - DNA, 20 bp, synthetic construct
  source 1..20: mol_type = other DNA
tttatacagttaaacactta

SEQ ID NO: 84520 - DNA, 20 bp, synthetic construct
  source 1..20: mol_type = other DNA
atttatacagttaaacactt

SEQ ID NO: 84521 - DNA, 20 bp, synthetic construct
  source 1..20: mol_type = other DNA
aatttatacagttaaacact

SEQ ID NO: 84522 - DNA, 20 bp, synthetic construct
  source 1..20: mol_type = other DNA
taatttatacagttaaacac

SEQ ID NO: 84523 - DNA, 20 bp, synthetic construct
  source 1..20: mol_type = other DNA
ataatttatacagttaaaca

SEQ ID NO: 84524 - DNA, 20 bp, synthetic construct
  source 1..20: mol_type = other DNA
aataatttatacagttaaac

SEQ ID NO: 84525 - DNA, 20 bp, synthetic construct
  source 1..20: mol_type = other DNA
aaataatttatacagttaaa

SEQ ID NO: 84526 - DNA, 20 bp, synthetic construct
  source 1..20: mol_type = other DNA
taaataatttatacagttaa

SEQ ID NO: 84527 - DNA, 20 bp, synthetic construct
  source 1..20: mol_type = other DNA
ctaaataatttatacagtta

SEQ ID NO: 84528 - DNA, 20 bp, synthetic construct
  source 1..20: mol_type = other DNA
tctaaataatttatacagtt

SEQ ID NO: 84529 - DNA, 20 bp, synthetic construct
  source 1..20: mol_type = other DNA
ttctaaataatttatacagt

SEQ ID NO: 84530 - DNA, 20 bp, synthetic construct
  source 1..20: mol_type = other DNA
cttctaaataatttatacag

SEQ ID NO: 84531 - DNA, 20 bp, synthetic construct
  source 1..20: mol_type = other DNA
ccttctaaataatttataca

SEQ ID NO: 84532 - DNA, 20 bp, synthetic construct
  source 1..20: mol_type = other DNA
accttctaaataatttatac

SEQ ID NO: 84533 - DNA, 20 bp, synthetic construct
  source 1..20: mol_type = other DNA
gaccttctaaataatttata

SEQ ID NO: 84534 - DNA, 20 bp, synthetic construct
  source 1..20: mol_type = other DNA
agaccttctaaataatttat

SEQ ID NO: 84535 - DNA, 20 bp, synthetic construct
  source 1..20: mol_type = other DNA
gagaccttctaaataattta

SEQ ID NO: 84536 - DNA, 20 bp, synthetic construct
  source 1..20: mol_type = other DNA
ggagaccttctaaataattt

SEQ ID NO: 84537 - DNA, 20 bp, synthetic construct
  source 1..20: mol_type = other DNA
gggagaccttctaaataatt

SEQ ID NO: 84538 - DNA, 20 bp, synthetic construct
  source 1..20: mol_type = other DNA
agggagaccttctaaataat

SEQ ID NO: 84539 - DNA, 20 bp, synthetic construct
  source 1..20: mol_type = other DNA
aagggagaccttctaaataa

SEQ ID NO: 84540 - DNA, 20 bp, synthetic construct
  source 1..20: mol_type = other DNA
aaagggagaccttctaaata

SEQ ID NO: 84541 - DNA, 20 bp, synthetic construct
  source 1..20: mol_type = other DNA
aaaagggagaccttctaaat

SEQ ID NO: 84542 - DNA, 20 bp, synthetic construct
  source 1..20: mol_type = other DNA
aaaaagggagaccttctaaa

SEQ ID NO: 84543 - DNA, 20 bp, synthetic construct
  source 1..20: mol_type = other DNA
gaaaaagggagaccttctaa

SEQ ID NO: 84544 - DNA, 20 bp, synthetic construct
  source 1..20: mol_type = other DNA
agaaaaagggagaccttcta

SEQ ID NO: 84545 - DNA, 20 bp, synthetic construct
  source 1..20: mol_type = other DNA
tagaaaaagggagaccttct

SEQ ID NO: 84546 - DNA, 20 bp, synthetic construct
  source 1..20: mol_type = other DNA
ctagaaaaagggagaccttc

SEQ ID NO: 84547 - DNA, 20 bp, synthetic construct
  source 1..20: mol_type = other DNA
actagaaaaagggagacctt

SEQ ID NO: 84548 - DNA, 20 bp, synthetic construct
  source 1..20: mol_type = other DNA
aactagaaaaagggagacct

SEQ ID NO: 84549 - DNA, 20 bp, synthetic construct
  source 1..20: mol_type = other DNA
aaactagaaaaagggagacc

SEQ ID NO: 84550 - DNA, 20 bp, synthetic construct
  source 1..20: mol_type = other DNA
taaactagaaaaagggagac

SEQ ID NO: 84551 - DNA, 20 bp, synthetic construct
  source 1..20: mol_type = other DNA
ttaaactagaaaaagggaga

SEQ ID NO: 84552 - DNA, 20 bp, synthetic construct
  source 1..20: mol_type = other DNA
attaaactagaaaaagggag

SEQ ID NO: 84553 - DNA, 20 bp, synthetic construct
  source 1..20: mol_type = other DNA
cattaaactagaaaaaggga

SEQ ID NO: 84554 - DNA, 20 bp, synthetic construct
  source 1..20: mol_type = other DNA
tcattaaactagaaaaaggg

SEQ ID NO: 84555 - DNA, 20 bp, synthetic construct
  source 1..20: mol_type = other DNA
ctcattaaactagaaaaagg

SEQ ID NO: 84556 - DNA, 20 bp, synthetic construct
  source 1..20: mol_type = other DNA
cctcattaaactagaaaaag

SEQ ID NO: 84557 - DNA, 20 bp, synthetic construct
  source 1..20: mol_type = other DNA
acctcattaaactagaaaaa

SEQ ID NO: 84558 - DNA, 20 bp, synthetic construct
  source 1..20: mol_type = other DNA
gacctcattaaactagaaaa

SEQ ID NO: 84559 - DNA, 20 bp, synthetic construct
  source 1..20: mol_type = other DNA
tgacctcattaaactagaaa

SEQ ID NO: 84560 - DNA, 20 bp, synthetic construct
  source 1..20: mol_type = other DNA
ttgacctcattaaactagaa

SEQ ID NO: 84561 - DNA, 20 bp, synthetic construct
  source 1..20: mol_type = other DNA
cttgacctcattaaactaga

SEQ ID NO: 84562 - DNA, 20 bp, synthetic construct
  source 1..20: mol_type = other DNA
tcttgacctcattaaactag

SEQ ID NO: 84563 - DNA, 20 bp, synthetic construct
  source 1..20: mol_type = other DNA
gtcttgacctcattaaacta

SEQ ID NO: 84564 - DNA, 20 bp, synthetic construct
  source 1..20: mol_type = other DNA
agtcttgacctcattaaact

SEQ ID NO: 84565 - DNA, 20 bp, synthetic construct
  source 1..20: mol_type = other DNA
aagtcttgacctcattaaac

SEQ ID NO: 84566 - DNA, 20 bp, synthetic construct
  source 1..20: mol_type = other DNA
aaagtcttgacctcattaaa

SEQ ID NO: 84567 - DNA, 20 bp, synthetic construct
  source 1..20: mol_type = other DNA
aaaagtcttgacctcattaa

SEQ ID NO: 84568 - DNA, 20 bp, synthetic construct
  source 1..20: mol_type = other DNA
aaaaagtcttgacctcatta

SEQ ID NO: 84569 - DNA, 20 bp, synthetic construct
  source 1..20: mol_type = other DNA
aaaaaagtcttgacctcatt

SEQ ID NO: 84570 - DNA, 20 bp, synthetic construct
  source 1..20: mol_type = other DNA
aaaaaaagtcttgacctcat

SEQ ID NO: 84571 - DNA, 20 bp, synthetic construct
  source 1..20: mol_type = other DNA
aaaaaaaagtcttgacctca

SEQ ID NO: 84572 - DNA, 20 bp, synthetic construct
  source 1..20: mol_type = other DNA
aaaaaaaaagtcttgacctc

SEQ ID NO: 84573 - DNA, 20 bp, synthetic construct
  source 1..20: mol_type = other DNA
caaaaaaaaagtcttgacct

SEQ ID NO: 84574 - DNA, 20 bp, synthetic construct
  source 1..20: mol_type = other DNA
tcaaaaaaaaagtcttgacc

SEQ ID NO: 84575 - DNA, 20 bp, synthetic construct
  source 1..20: mol_type = other DNA
ttcaaaaaaaaagtcttgac

SEQ ID NO: 84576 - DNA, 20 bp, synthetic construct
  source 1..20: mol_type = other DNA
tttcaaaaaaaaagtcttga

SEQ ID NO: 84577 - DNA, 20 bp, synthetic construct
  source 1..20: mol_type = other DNA
atttcaaaaaaaaagtcttg

SEQ ID NO: 84578 - DNA, 20 bp, synthetic construct
  source 1..20: mol_type = other DNA
tatttcaaaaaaaaagtctt

SEQ ID NO: 84579 - DNA, 20 bp, synthetic construct
  source 1..20: mol_type = other DNA
ctatttcaaaaaaaaagtct

SEQ ID NO: 84580 - DNA, 20 bp, synthetic construct
  source 1..20: mol_type = other DNA
gctatttcaaaaaaaaagtc

SEQ ID NO: 84581 - DNA, 20 bp, synthetic construct
  source 1..20: mol_type = other DNA
tgctatttcaaaaaaaaagt

SEQ ID NO: 84582 - DNA, 20 bp, synthetic construct
  source 1..20: mol_type = other DNA
ttgctatttcaaaaaaaaag

SEQ ID NO: 84583 - DNA, 20 bp, synthetic construct
  source 1..20: mol_type = other DNA
attgctatttcaaaaaaaaa

SEQ ID NO: 84584 - DNA, 20 bp, synthetic construct
  source 1..20: mol_type = other DNA
cattgctatttcaaaaaaaa

SEQ ID NO: 84585 - DNA, 20 bp, synthetic construct
  source 1..20: mol_type = other DNA
tcattgctatttcaaaaaaa

SEQ ID NO: 84586 - DNA, 20 bp, synthetic construct
  source 1..20: mol_type = other DNA
ttcattgctatttcaaaaaa

SEQ ID NO: 84587 - DNA, 20 bp, synthetic construct
  source 1..20: mol_type = other DNA
attcattgctatttcaaaaa

SEQ ID NO: 84588 - DNA, 20 bp, synthetic construct
  source 1..20: mol_type = other DNA
tattcattgctatttcaaaa

SEQ ID NO: 84589 - DNA, 20 bp, synthetic construct
  source 1..20: mol_type = other DNA
atattcattgctatttcaaa

SEQ ID NO: 84590 - DNA, 20 bp, synthetic construct
  source 1..20: mol_type = other DNA
aatattcattgctatttcaa

SEQ ID NO: 84591 - DNA, 20 bp, synthetic construct
  source 1..20: mol_type = other DNA
taatattcattgctatttca

SEQ ID NO: 84592 - DNA, 20 bp, synthetic construct
  source 1..20: mol_type = other DNA
ataatattcattgctatttc

SEQ ID NO: 84593 - DNA, 20 bp, synthetic construct
  source 1..20: mol_type = other DNA
gataatattcattgctattt

SEQ ID NO: 84594 - DNA, 20 bp, synthetic construct
  source 1..20: mol_type = other DNA
tgataatattcattgctatt

SEQ ID NO: 84595 - DNA, 20 bp, synthetic construct
  source 1..20: mol_type = other DNA
atgataatattcattgctat

SEQ ID NO: 84596 - DNA, 20 bp, synthetic construct
  source 1..20: mol_type = other DNA
aatgataatattcattgcta

SEQ ID NO: 84597 - DNA, 20 bp, synthetic construct
  source 1..20: mol_type = other DNA
aaatgataatattcattgct

SEQ ID NO: 84598 - DNA, 20 bp, synthetic construct
  source 1..20: mol_type = other DNA
caaatgataatattcattgc

SEQ ID NO: 84599 - DNA, 20 bp, synthetic construct
  source 1..20: mol_type = other DNA
tcaaatgataatattcattg

SEQ ID NO: 84600 - DNA, 20 bp, synthetic construct
  source 1..20: mol_type = other DNA
atcaaatgataatattcatt

SEQ ID NO: 84601 - DNA, 20 bp, synthetic construct
  source 1..20: mol_type = other DNA
tatcaaatgataatattcat

SEQ ID NO: 84602 - DNA, 20 bp, synthetic construct
  source 1..20: mol_type = other DNA
gtatcaaatgataatattca

SEQ ID NO: 84603 - DNA, 20 bp, synthetic construct
  source 1..20: mol_type = other DNA
agtatcaaatgataatattc

SEQ ID NO: 84604 - DNA, 20 bp, synthetic construct
  source 1..20: mol_type = other DNA
gagtatcaaatgataatatt

SEQ ID NO: 84605 - DNA, 20 bp, synthetic construct
  source 1..20: mol_type = other DNA
tgagtatcaaatgataatat

SEQ ID NO: 84606 - DNA, 20 bp, synthetic construct
  source 1..20: mol_type = other DNA
gtgagtatcaaatgataata

SEQ ID NO: 84607 - DNA, 20 bp, synthetic construct
  source 1..20: mol_type = other DNA
tgtgagtatcaaatgataat

SEQ ID NO: 84608 - DNA, 20 bp, synthetic construct
  source 1..20: mol_type = other DNA
ctgtgagtatcaaatgataa

SEQ ID NO: 84609 - DNA, 20 bp, synthetic construct
  source 1..20: mol_type = other DNA
cctgtgagtatcaaatgata

SEQ ID NO: 84610 - DNA, 20 bp, synthetic construct
  source 1..20: mol_type = other DNA
tcctgtgagtatcaaatgat

SEQ ID NO: 84611 - DNA, 20 bp, synthetic construct
  source 1..20: mol_type = other DNA
ctcctgtgagtatcaaatga

SEQ ID NO: 84612 - DNA, 20 bp, synthetic construct
  source 1..20: mol_type = other DNA
actcctgtgagtatcaaatg

SEQ ID NO: 84613 - DNA, 20 bp, synthetic construct
  source 1..20: mol_type = other DNA
gactcctgtgagtatcaaat

SEQ ID NO: 84614 - DNA, 20 bp, synthetic construct
  source 1..20: mol_type = other DNA
tgactcctgtgagtatcaaa

SEQ ID NO: 84615 - DNA, 20 bp, synthetic construct
  source 1..20: mol_type = other DNA
gtgactcctgtgagtatcaa

SEQ ID NO: 84616 - DNA, 20 bp, synthetic construct
  source 1..20: mol_type = other DNA
tgtgactcctgtgagtatca

SEQ ID NO: 84617 - DNA, 20 bp, synthetic construct
  source 1..20: mol_type = other DNA
ttgtgactcctgtgagtatc

SEQ ID NO: 84618 - DNA, 20 bp, synthetic construct
  source 1..20: mol_type = other DNA
tttgtgactcctgtgagtat

SEQ ID NO: 84619 - DNA, 20 bp, synthetic construct
  source 1..20: mol_type = other DNA
gtttgtgactcctgtgagta

SEQ ID NO: 84620 - DNA, 20 bp, synthetic construct
  source 1..20: mol_type = other DNA
agtttgtgactcctgtgagt

SEQ ID NO: 84621 - DNA, 20 bp, synthetic construct
  source 1..20: mol_type = other DNA
gagtttgtgactcctgtgag

SEQ ID NO: 84622 - DNA, 20 bp, synthetic construct
  source 1..20: mol_type = other DNA
agagtttgtgactcctgtga

SEQ ID NO: 84623 - DNA, 20 bp, synthetic construct
  source 1..20: mol_type = other DNA
tagagtttgtgactcctgtg

SEQ ID NO: 84624 - DNA, 20 bp, synthetic construct
  source 1..20: mol_type = other DNA
ctagagtttgtgactcctgt

SEQ ID NO: 84625 - DNA, 20 bp, synthetic construct
  source 1..20: mol_type = other DNA
tctagagtttgtgactcctg

SEQ ID NO: 84626 - DNA, 20 bp, synthetic construct
  source 1..20: mol_type = other DNA
ttctagagtttgtgactcct

SEQ ID NO: 84627 - DNA, 20 bp, synthetic construct
  source 1..20: mol_type = other DNA
cttctagagtttgtgactcc

SEQ ID NO: 84628 - DNA, 20 bp, synthetic construct
  source 1..20: mol_type = other DNA
tcttctagagtttgtgactc

SEQ ID NO: 84629 - DNA, 20 bp, synthetic construct
  source 1..20: mol_type = other DNA
ctcttctagagtttgtgact

SEQ ID NO: 84630 - DNA, 20 bp, synthetic construct
  source 1..20: mol_type = other DNA
actcttctagagtttgtgac

SEQ ID NO: 84631 - DNA, 20 bp, synthetic construct
  source 1..20: mol_type = other DNA
tactcttctagagtttgtga

SEQ ID NO: 84632 - DNA, 20 bp, synthetic construct
  source 1..20: mol_type = other DNA
ttactcttctagagtttgtg

SEQ ID NO: 84633 - DNA, 20 bp, synthetic construct
  source 1..20: mol_type = other DNA
attactcttctagagtttgt

SEQ ID NO: 84634 - DNA, 20 bp, synthetic construct
  source 1..20: mol_type = other DNA
cattactcttctagagtttg

SEQ ID NO: 84635 - DNA, 20 bp, synthetic construct
  source 1..20: mol_type = other DNA
acattactcttctagagttt

SEQ ID NO: 84636 - DNA, 20 bp, synthetic construct
  source 1..20: mol_type = other DNA
aacattactcttctagagtt

SEQ ID NO: 84637 - DNA, 20 bp, synthetic construct
  source 1..20: mol_type = other DNA
aaacattactcttctagagt

SEQ ID NO: 84638 - DNA, 20 bp, synthetic construct
  source 1..20: mol_type = other DNA
aaaacattactcttctagag

SEQ ID NO: 84639 - DNA, 20 bp, synthetic construct
  source 1..20: mol_type = other DNA
taaaacattactcttctaga

SEQ ID NO: 84640 - DNA, 20 bp, synthetic construct
  source 1..20: mol_type = other DNA
ataaaacattactcttctag

SEQ ID NO: 84641 - DNA, 20 bp, synthetic construct
  source 1..20: mol_type = other DNA
aataaaacattactcttcta

SEQ ID NO: 84642 - DNA, 20 bp, synthetic construct
  source 1..20: mol_type = other DNA
aaataaaacattactcttct

SEQ ID NO: 84643 - DNA, 20 bp, synthetic construct
  source 1..20: mol_type = other DNA
gaaataaaacattactcttc

SEQ ID NO: 84644 - DNA, 20 bp, synthetic construct
  source 1..20: mol_type = other DNA
agaaataaaacattactctt

SEQ ID NO: 84645 - DNA, 20 bp, synthetic construct
  source 1..20: mol_type = other DNA
tagaaataaaacattactct

SEQ ID NO: 84646 - DNA, 20 bp, synthetic construct
  source 1..20: mol_type = other DNA
gtagaaataaaacattactc

SEQ ID NO: 84647 - DNA, 20 bp, synthetic construct
  source 1..20: mol_type = other DNA
agtagaaataaaacattact

SEQ ID NO: 84648 - DNA, 20 bp, synthetic construct
  source 1..20: mol_type = other DNA
aagtagaaataaaacattac

SEQ ID NO: 84649 - DNA, 20 bp, synthetic construct
  source 1..20: mol_type = other DNA
taagtagaaataaaacatta

SEQ ID NO: 84650 - DNA, 20 bp, synthetic construct
  source 1..20: mol_type = other DNA
ttaagtagaaataaaacatt

SEQ ID NO: 84651 - DNA, 20 bp, synthetic construct
  source 1..20: mol_type = other DNA
tttaagtagaaataaaacat

SEQ ID NO: 84652 - DNA, 20 bp, synthetic construct
  source 1..20: mol_type = other DNA
atttaagtagaaataaaaca

SEQ ID NO: 84653 - DNA, 20 bp, synthetic construct
  source 1..20: mol_type = other DNA
catttaagtagaaataaaac

SEQ ID NO: 84654 - DNA, 20 bp, synthetic construct
  source 1..20: mol_type = other DNA
ccatttaagtagaaataaaa

SEQ ID NO: 84655 - DNA, 20 bp, synthetic construct
  source 1..20: mol_type = other DNA
cccatttaagtagaaataaa

SEQ ID NO: 84656 - DNA, 20 bp, synthetic construct
  source 1..20: mol_type = other DNA
tcccatttaagtagaaataa

SEQ ID NO: 84657 - DNA, 20 bp, synthetic construct
  source 1..20: mol_type = other DNA
gtcccatttaagtagaaata

SEQ ID NO: 84658 - DNA, 20 bp, synthetic construct
  source 1..20: mol_type = other DNA
agtcccatttaagtagaaat

SEQ ID NO: 84659 - DNA, 20 bp, synthetic construct
  source 1..20: mol_type = other DNA
aagtcccatttaagtagaaa

SEQ ID NO: 84660 - DNA, 20 bp, synthetic construct
  source 1..20: mol_type = other DNA
caagtcccatttaagtagaa

SEQ ID NO: 84661 - DNA, 20 bp, synthetic construct
  source 1..20: mol_type = other DNA
gcaagtcccatttaagtaga

SEQ ID NO: 84662 - DNA, 20 bp, synthetic construct
  source 1..20: mol_type = other DNA
agcaagtcccatttaagtag

SEQ ID NO: 84663 - DNA, 20 bp, synthetic construct
  source 1..20: mol_type = other DNA
aagcaagtcccatttaagta

SEQ ID NO: 84664 - DNA, 20 bp, synthetic construct
  source 1..20: mol_type = other DNA
taagcaagtcccatttaagt

SEQ ID NO: 84665 - DNA, 20 bp, synthetic construct
  source 1..20: mol_type = other DNA
ttaagcaagtcccatttaag

SEQ ID NO: 84666 - DNA, 20 bp, synthetic construct
  source 1..20: mol_type = other DNA
attaagcaagtcccatttaa

SEQ ID NO: 84667 - DNA, 20 bp, synthetic construct
  source 1..20: mol_type = other DNA
tattaagcaagtcccattta

SEQ ID NO: 84668 - DNA, 20 bp, synthetic construct
  source 1..20: mol_type = other DNA
ttattaagcaagtcccattt

SEQ ID NO: 84669 - DNA, 20 bp, synthetic construct
  source 1..20: mol_type = other DNA
cttattaagcaagtcccatt

SEQ ID NO: 84670 - DNA, 20 bp, synthetic construct
  source 1..20: mol_type = other DNA
tcttattaagcaagtcccat

SEQ ID NO: 84671 - DNA, 20 bp, synthetic construct
  source 1..20: mol_type = other DNA
atcttattaagcaagtccca

SEQ ID NO: 84672 - DNA, 20 bp, synthetic construct
  source 1..20: mol_type = other DNA
aatcttattaagcaagtccc

SEQ ID NO: 84673 - DNA, 20 bp, synthetic construct
  source 1..20: mol_type = other DNA
gaatcttattaagcaagtcc

SEQ ID NO: 84674 - DNA, 20 bp, synthetic construct
  source 1..20: mol_type = other DNA
ggaatcttattaagcaagtc

SEQ ID NO: 84675 - DNA, 20 bp, synthetic construct
  source 1..20: mol_type = other DNA
tggaatcttattaagcaagt

SEQ ID NO: 84676 - DNA, 20 bp, synthetic construct
  source 1..20: mol_type = other DNA
ttggaatcttattaagcaag

SEQ ID NO: 84677 - DNA, 20 bp, synthetic construct
  source 1..20: mol_type = other DNA
tttggaatcttattaagcaa

SEQ ID NO: 84678 - DNA, 20 bp, synthetic construct
  source 1..20: mol_type = other DNA
gtttggaatcttattaagca

SEQ ID NO: 84679 - DNA, 20 bp, synthetic construct
  source 1..20: mol_type = other DNA
agtttggaatcttattaagc

SEQ ID NO: 84680 - DNA, 20 bp, synthetic construct
  source 1..20: mol_type = other DNA
cagtttggaatcttattaag

SEQ ID NO: 84681 - DNA, 20 bp, synthetic construct
  source 1..20: mol_type = other DNA
tcagtttggaatcttattaa

SEQ ID NO: 84682 - DNA, 20 bp, synthetic construct
  source 1..20: mol_type = other DNA
ctcagtttggaatcttatta

SEQ ID NO: 84683 - DNA, 20 bp, synthetic construct
  source 1..20: mol_type = other DNA
actcagtttggaatcttatt

SEQ ID NO: 84684 - DNA, 20 bp, synthetic construct
  source 1..20: mol_type = other DNA
aactcagtttggaatcttat

SEQ ID NO: 84685 - DNA, 20 bp, synthetic construct
  source 1..20: mol_type = other DNA
gaactcagtttggaatctta

SEQ ID NO: 84686 - DNA, 20 bp, synthetic construct
  source 1..20: mol_type = other DNA
agaactcagtttggaatctt

SEQ ID NO: 84687 - DNA, 20 bp, synthetic construct
  source 1..20: mol_type = other DNA
cagaactcagtttggaatct

SEQ ID NO: 84688 - DNA, 20 bp, synthetic construct
  source 1..20: mol_type = other DNA
ccagaactcagtttggaatc

SEQ ID NO: 84689 - DNA, 20 bp, synthetic construct
  source 1..20: mol_type = other DNA
cccagaactcagtttggaat

SEQ ID NO: 84690 - DNA, 20 bp, synthetic construct
  source 1..20: mol_type = other DNA
acccagaactcagtttggaa

SEQ ID NO: 84691 - DNA, 20 bp, synthetic construct
  source 1..20: mol_type = other DNA
aacccagaactcagtttgga

SEQ ID NO: 84692 - DNA, 20 bp, synthetic construct
  source 1..20: mol_type = other DNA
gaacccagaactcagtttgg

SEQ ID NO: 84693 - DNA, 20 bp, synthetic construct
  source 1..20: mol_type = other DNA
tgaacccagaactcagtttg

SEQ ID NO: 84694 - DNA, 20 bp, synthetic construct
  source 1..20: mol_type = other DNA
ttgaacccagaactcagttt

SEQ ID NO: 84695 - DNA, 20 bp, synthetic construct
  source 1..20: mol_type = other DNA
cttgaacccagaactcagtt

SEQ ID NO: 84696 - DNA, 20 bp, synthetic construct
  source 1..20: mol_type = other DNA
acttgaacccagaactcagt

SEQ ID NO: 84697 - DNA, 20 bp, synthetic construct
  source 1..20: mol_type = other DNA
cacttgaacccagaactcag

SEQ ID NO: 84698 - DNA, 20 bp, synthetic construct
  source 1..20: mol_type = other DNA
acacttgaacccagaactca

SEQ ID NO: 84699 - DNA, 20 bp, synthetic construct
  source 1..20: mol_type = other DNA
tacacttgaacccagaactc

SEQ ID NO: 84700 - DNA, 20 bp, synthetic construct
  source 1..20: mol_type = other DNA
ttacacttgaacccagaact

SEQ ID NO: 84701 - DNA, 20 bp, synthetic construct
  source 1..20: mol_type = other DNA
tttacacttgaacccagaac

SEQ ID NO: 84702 - DNA, 20 bp, synthetic construct
  source 1..20: mol_type = other DNA
gtttacacttgaacccagaa

SEQ ID NO: 84703 - DNA, 20 bp, synthetic construct
  source 1..20: mol_type = other DNA
ggtttacacttgaacccaga

SEQ ID NO: 84704 - DNA, 20 bp, synthetic construct
  source 1..20: mol_type = other DNA
aggtttacacttgaacccag

SEQ ID NO: 84705 - DNA, 20 bp, synthetic construct
  source 1..20: mol_type = other DNA
caggtttacacttgaaccca

SEQ ID NO: 84706 - DNA, 20 bp, synthetic construct
  source 1..20: mol_type = other DNA
tcaggtttacacttgaaccc

SEQ ID NO: 84707 - DNA, 20 bp, synthetic construct
  source 1..20: mol_type = other DNA
atcaggtttacacttgaacc

SEQ ID NO: 84708 - DNA, 20 bp, synthetic construct
  source 1..20: mol_type = other DNA
catcaggtttacacttgaac

SEQ ID NO: 84709 - DNA, 20 bp, synthetic construct
  source 1..20: mol_type = other DNA
tcatcaggtttacacttgaa

SEQ ID NO: 84710 - DNA, 20 bp, synthetic construct
  source 1..20: mol_type = other DNA
ttcatcaggtttacacttga

SEQ ID NO: 84711 - DNA, 20 bp, synthetic construct
  source 1..20: mol_type = other DNA
tttcatcaggtttacacttg

SEQ ID NO: 84712 - DNA, 20 bp, synthetic construct
  source 1..20: mol_type = other DNA
ttttcatcaggtttacactt

SEQ ID NO: 84713 - DNA, 20 bp, synthetic construct
  source 1..20: mol_type = other DNA
attttcatcaggtttacact

SEQ ID NO: 84714 - DNA, 20 bp, synthetic construct
  source 1..20: mol_type = other DNA
gattttcatcaggtttacac

SEQ ID NO: 84715 - DNA, 20 bp, synthetic construct
  source 1..20: mol_type = other DNA
tgattttcatcaggtttaca

SEQ ID NO: 84716 - DNA, 20 bp, synthetic construct
  source 1..20: mol_type = other DNA
atgattttcatcaggtttac

SEQ ID NO: 84717 - DNA, 20 bp, synthetic construct
  source 1..20: mol_type = other DNA
tatgattttcatcaggttta

SEQ ID NO: 84718 - DNA, 20 bp, synthetic construct
  source 1..20: mol_type = other DNA
ctatgattttcatcaggttt

SEQ ID NO: 84719 - DNA, 20 bp, synthetic construct
  source 1..20: mol_type = other DNA
tctatgattttcatcaggtt

SEQ ID NO: 84720 - DNA, 20 bp, synthetic construct
  source 1..20: mol_type = other DNA
atctatgattttcatcaggt

SEQ ID NO: 84721 - DNA, 20 bp, synthetic construct
  source 1..20: mol_type = other DNA
tatctatgattttcatcagg

SEQ ID NO: 84722 - DNA, 20 bp, synthetic construct
  source 1..20: mol_type = other DNA
ttatctatgattttcatcag

SEQ ID NO: 84723 - DNA, 20 bp, synthetic construct
  source 1..20: mol_type = other DNA
attatctatgattttcatca

SEQ ID NO: 84724 - DNA, 20 bp, synthetic construct
  source 1..20: mol_type = other DNA
aattatctatgattttcatc

SEQ ID NO: 84725 - DNA, 20 bp, synthetic construct
  source 1..20: mol_type = other DNA
caattatctatgattttcat

SEQ ID NO: 84726 - DNA, 20 bp, synthetic construct
  source 1..20: mol_type = other DNA
acaattatctatgattttca

SEQ ID NO: 84727 - DNA, 20 bp, synthetic construct
  source 1..20: mol_type = other DNA
tacaattatctatgattttc

SEQ ID NO: 84728 - DNA, 20 bp, synthetic construct
  source 1..20: mol_type = other DNA
ttacaattatctatgatttt

SEQ ID NO: 84729 - DNA, 20 bp, synthetic construct
  source 1..20: mol_type = other DNA
cttacaattatctatgattt

SEQ ID NO: 84730 - DNA, 20 bp, synthetic construct
  source 1..20: mol_type = other DNA
ccttacaattatctatgatt

SEQ ID NO: 84731 - DNA, 20 bp, synthetic construct
  source 1..20: mol_type = other DNA
tccttacaattatctatgat

SEQ ID NO: 84732 - DNA, 20 bp, synthetic construct
  source 1..20: mol_type = other DNA
ttccttacaattatctatga

SEQ ID NO: 84733 - DNA, 20 bp, synthetic construct
  source 1..20: mol_type = other DNA
gttccttacaattatctatg

SEQ ID NO: 84734 - DNA, 20 bp, synthetic construct
  source 1..20: mol_type = other DNA
ggttccttacaattatctat

SEQ ID NO: 84735 - DNA, 20 bp, synthetic construct
  source 1..20: mol_type = other DNA
tggttccttacaattatcta

SEQ ID NO: 84736 - DNA, 20 bp, synthetic construct
  source 1..20: mol_type = other DNA
ctggttccttacaattatct

SEQ ID NO: 84737 - DNA, 20 bp, synthetic construct
  source 1..20: mol_type = other DNA
gctggttccttacaattatc

SEQ ID NO: 84738 - DNA, 20 bp, synthetic construct
  source 1..20: mol_type = other DNA
tgctggttccttacaattat

SEQ ID NO: 84739 - DNA, 20 bp, synthetic construct
  source 1..20: mol_type = other DNA
atgctggttccttacaatta

SEQ ID NO: 84740 - DNA, 20 bp, synthetic construct
  source 1..20: mol_type = other DNA
aatgctggttccttacaatt

SEQ ID NO: 84741 - DNA, 20 bp, synthetic construct
  source 1..20: mol_type = other DNA
aaatgctggttccttacaat

SEQ ID NO: 84742 - DNA, 20 bp, synthetic construct
  source 1..20: mol_type = other DNA
gaaatgctggttccttacaa

SEQ ID NO: 84743 - DNA, 20 bp, synthetic construct
  source 1..20: mol_type = other DNA
agaaatgctggttccttaca

SEQ ID NO: 84744 - DNA, 20 bp, synthetic construct
  source 1..20: mol_type = other DNA
tagaaatgctggttccttac

SEQ ID NO: 84745 - DNA, 20 bp, synthetic construct
  source 1..20: mol_type = other DNA
ttagaaatgctggttcctta

SEQ ID NO: 84746 - DNA, 20 bp, synthetic construct
  source 1..20: mol_type = other DNA
attagaaatgctggttcctt

SEQ ID NO: 84747 - DNA, 20 bp, synthetic construct
  source 1..20: mol_type = other DNA
aattagaaatgctggttcct

SEQ ID NO: 84748 - DNA, 20 bp, synthetic construct
  source 1..20: mol_type = other DNA
caattagaaatgctggttcc

SEQ ID NO: 84749 - DNA, 20 bp, synthetic construct
  source 1..20: mol_type = other DNA
ccaattagaaatgctggttc

SEQ ID NO: 84750 - DNA, 20 bp, synthetic construct
  source 1..20: mol_type = other DNA
tccaattagaaatgctggtt

SEQ ID NO: 84751 - DNA, 20 bp, synthetic construct
  source 1..20: mol_type = other DNA
atccaattagaaatgctggt

SEQ ID NO: 84752 - DNA, 20 bp, synthetic construct
  source 1..20: mol_type = other DNA
tatccaattagaaatgctgg

SEQ ID NO: 84753 - DNA, 20 bp, synthetic construct
  source 1..20: mol_type = other DNA
atatccaattagaaatgctg

SEQ ID NO: 84754 - DNA, 20 bp, synthetic construct
  source 1..20: mol_type = other DNA
tatatccaattagaaatgct

SEQ ID NO: 84755 - DNA, 20 bp, synthetic construct
  source 1..20: mol_type = other DNA
ttatatccaattagaaatgc

SEQ ID NO: 84756 - DNA, 20 bp, synthetic construct
  source 1..20: mol_type = other DNA
attatatccaattagaaatg

SEQ ID NO: 84757 - DNA, 20 bp, synthetic construct
  source 1..20: mol_type = other DNA
tattatatccaattagaaat

SEQ ID NO: 84758 - DNA, 20 bp, synthetic construct
  source 1..20: mol_type = other DNA
ctattatatccaattagaaa

SEQ ID NO: 84759 - DNA, 20 bp, synthetic construct
  source 1..20: mol_type = other DNA
gctattatatccaattagaa

SEQ ID NO: 84760 - DNA, 20 bp, synthetic construct
  source 1..20: mol_type = other DNA
agctattatatccaattaga

SEQ ID NO: 84761 - DNA, 20 bp, synthetic construct
  source 1..20: mol_type = other DNA
tagctattatatccaattag

SEQ ID NO: 84762 - DNA, 20 bp, synthetic construct
  source 1..20: mol_type = other DNA
gtagctattatatccaatta

SEQ ID NO: 84763 - DNA, 20 bp, synthetic construct
  source 1..20: mol_type = other DNA
agtagctattatatccaatt

SEQ ID NO: 84764 - DNA, 20 bp, synthetic construct
  source 1..20: mol_type = other DNA
cagtagctattatatccaat

SEQ ID NO: 84765 - DNA, 20 bp, synthetic construct
  source 1..20: mol_type = other DNA
gcagtagctattatatccaa

SEQ ID NO: 84766 - DNA, 20 bp, synthetic construct
  source 1..20: mol_type = other DNA
agcagtagctattatatcca

SEQ ID NO: 84767 - DNA, 20 bp, synthetic construct
  source 1..20: mol_type = other DNA
aagcagtagctattatatcc

SEQ ID NO: 84768 - DNA, 20 bp, synthetic construct
  source 1..20: mol_type = other DNA
taagcagtagctattatatc

SEQ ID NO: 84769 - DNA, 20 bp, synthetic construct
  source 1..20: mol_type = other DNA
ataagcagtagctattatat

SEQ ID NO: 84770 - DNA, 20 bp, synthetic construct
  source 1..20: mol_type = other DNA
aataagcagtagctattata

SEQ ID NO: 84771 - DNA, 20 bp, synthetic construct
  source 1..20: mol_type = other DNA
aaataagcagtagctattat

SEQ ID NO: 84772 - DNA, 20 bp, synthetic construct
  source 1..20: mol_type = other DNA
aaaataagcagtagctatta

SEQ ID NO: 84773 - DNA, 20 bp, synthetic construct
  source 1..20: mol_type = other DNA
gaaaataagcagtagctatt

SEQ ID NO: 84774 - DNA, 20 bp, synthetic construct
  source 1..20: mol_type = other DNA
cgaaaataagcagtagctat

SEQ ID NO: 84775 - DNA, 20 bp, synthetic construct
  source 1..20: mol_type = other DNA
acgaaaataagcagtagcta

SEQ ID NO: 84776 - DNA, 20 bp, synthetic construct
  source 1..20: mol_type = other DNA
aacgaaaataagcagtagct

SEQ ID NO: 84777 - DNA, 20 bp, synthetic construct
  source 1..20: mol_type = other DNA
taacgaaaataagcagtagc

SEQ ID NO: 84778 - DNA, 20 bp, synthetic construct
  source 1..20: mol_type = other DNA
ataacgaaaataagcagtag

SEQ ID NO: 84779 - DNA, 20 bp, synthetic construct
  source 1..20: mol_type = other DNA
cataacgaaaataagcagta

SEQ ID NO: 84780 - DNA, 20 bp, synthetic construct
  source 1..20: mol_type = other DNA
gcataacgaaaataagcagt

SEQ ID NO: 84781 - DNA, 20 bp, synthetic construct
  source 1..20: mol_type = other DNA
ggcataacgaaaataagcag

SEQ ID NO: 84782 - DNA, 20 bp, synthetic construct
  source 1..20: mol_type = other DNA
aggcataacgaaaataagca

SEQ ID NO: 84783 - DNA, 20 bp, synthetic construct
  source 1..20: mol_type = other DNA
gaggcataacgaaaataagc

SEQ ID NO: 84784 - DNA, 20 bp, synthetic construct
  source 1..20: mol_type = other DNA
tgaggcataacgaaaataag

SEQ ID NO: 84785 - DNA, 20 bp, synthetic construct
  source 1..20: mol_type = other DNA
ctgaggcataacgaaaataa

SEQ ID NO: 84786 - DNA, 20 bp, synthetic construct
  source 1..20: mol_type = other DNA
tctgaggcataacgaaaata

SEQ ID NO: 84787 - DNA, 20 bp, synthetic construct
  source 1..20: mol_type = other DNA
ctctgaggcataacgaaaat

SEQ ID NO: 84788 - DNA, 20 bp, synthetic construct
  source 1..20: mol_type = other DNA
actctgaggcataacgaaaa

SEQ ID NO: 84789 - DNA, 20 bp, synthetic construct
  source 1..20: mol_type = other DNA
aactctgaggcataacgaaa

SEQ ID NO: 84790 - DNA, 20 bp, synthetic construct
  source 1..20: mol_type = other DNA
taactctgaggcataacgaa

SEQ ID NO: 84791 - DNA, 20 bp, synthetic construct
  source 1..20: mol_type = other DNA
ttaactctgaggcataacga

SEQ ID NO: 84792 - DNA, 20 bp, synthetic construct
  source 1..20: mol_type = other DNA
tttaactctgaggcataacg

SEQ ID NO: 84793 - DNA, 20 bp, synthetic construct
  source 1..20: mol_type = other DNA
ttttaactctgaggcataac

SEQ ID NO: 84794 - DNA, 20 bp, synthetic construct
  source 1..20: mol_type = other DNA
gttttaactctgaggcataa

SEQ ID NO: 84795 - DNA, 20 bp, synthetic construct
  source 1..20: mol_type = other DNA
agttttaactctgaggcata

SEQ ID NO: 84796 - DNA, 20 bp, synthetic construct
  source 1..20: mol_type = other DNA
tagttttaactctgaggcat

SEQ ID NO: 84797 - DNA, 20 bp, synthetic construct
  source 1..20: mol_type = other DNA
ttagttttaactctgaggca

SEQ ID NO: 84798 - DNA, 20 bp, synthetic construct
  source 1..20: mol_type = other DNA
attagttttaactctgaggc

SEQ ID NO: 84799 - DNA, 20 bp, synthetic construct
  source 1..20: mol_type = other DNA
tattagttttaactctgagg

SEQ ID NO: 84800 - DNA, 20 bp, synthetic construct
  source 1..20: mol_type = other DNA
gtattagttttaactctgag

SEQ ID NO: 84801 - DNA, 20 bp, synthetic construct
  source 1..20: mol_type = other DNA
tgtattagttttaactctga

SEQ ID NO: 84802 - DNA, 20 bp, synthetic construct
  source 1..20: mol_type = other DNA
ctgtattagttttaactctg

SEQ ID NO: 84803 - DNA, 20 bp, synthetic construct
  source 1..20: mol_type = other DNA
actgtattagttttaactct

SEQ ID NO: 84804 - DNA, 20 bp, synthetic construct
  source 1..20: mol_type = other DNA
tactgtattagttttaactc

SEQ ID NO: 84805 - DNA, 20 bp, synthetic construct
  source 1..20: mol_type = other DNA
ttactgtattagttttaact

SEQ ID NO: 84806 - DNA, 20 bp, synthetic construct
  source 1..20: mol_type = other DNA
tttactgtattagttttaac

SEQ ID NO: 84807 - DNA, 20 bp, synthetic construct
  source 1..20: mol_type = other DNA
atttactgtattagttttaa

SEQ ID NO: 84808 - DNA, 20 bp, synthetic construct
  source 1..20: mol_type = other DNA
tatttactgtattagtttta

SEQ ID NO: 84809 - DNA, 20 bp, synthetic construct
  source 1..20: mol_type = other DNA
ttatttactgtattagtttt

SEQ ID NO: 84810 - DNA, 20 bp, synthetic construct
  source 1..20: mol_type = other DNA
attatttactgtattagttt

SEQ ID NO: 84811 - DNA, 20 bp, synthetic construct
  source 1..20: mol_type = other DNA
gattatttactgtattagtt

SEQ ID NO: 84812 - DNA, 20 bp, synthetic construct
  source 1..20: mol_type = other DNA
agattatttactgtattagt

SEQ ID NO: 84813 - DNA, 20 bp, synthetic construct
  source 1..20: mol_type = other DNA
aagattatttactgtattag

SEQ ID NO: 84814 - DNA, 20 bp, synthetic construct
  source 1..20: mol_type = other DNA
taagattatttactgtatta

SEQ ID NO: 84815 - DNA, 20 bp, synthetic construct
  source 1..20: mol_type = other DNA
gtaagattatttactgtatt

SEQ ID NO: 84816 - DNA, 20 bp, synthetic construct
  source 1..20: mol_type = other DNA
agtaagattatttactgtat

SEQ ID NO: 84817 - DNA, 20 bp, synthetic construct
  source 1..20: mol_type = other DNA
gagtaagattatttactgta

SEQ ID NO: 84818 - DNA, 20 bp, synthetic construct
  source 1..20: mol_type = other DNA
ggagtaagattatttactgt

SEQ ID NO: 84819 - DNA, 20 bp, synthetic construct
  source 1..20: mol_type = other DNA
aggagtaagattatttactg

SEQ ID NO: 84820 - DNA, 20 bp, synthetic construct
  source 1..20: mol_type = other DNA
caggagtaagattatttact

SEQ ID NO: 84821 - DNA, 20 bp, synthetic construct
  source 1..20: mol_type = other DNA
tcaggagtaagattatttac

SEQ ID NO: 84822 - DNA, 20 bp, synthetic construct
  source 1..20: mol_type = other DNA
ctcaggagtaagattattta

SEQ ID NO: 84823 - DNA, 20 bp, synthetic construct
  source 1..20: mol_type = other DNA
actcaggagtaagattattt

SEQ ID NO: 84824 - DNA, 20 bp, synthetic construct
  source 1..20: mol_type = other DNA
tactcaggagtaagattatt

SEQ ID NO: 84825 - DNA, 20 bp, synthetic construct
  source 1..20: mol_type = other DNA
ctactcaggagtaagattat

SEQ ID NO: 84826 - DNA, 20 bp, synthetic construct
  source 1..20: mol_type = other DNA
cctactcaggagtaagatta

SEQ ID NO: 84827 - DNA, 20 bp, synthetic construct
  source 1..20: mol_type = other DNA
tcctactcaggagtaagatt

SEQ ID NO: 84828 - DNA, 20 bp, synthetic construct
  source 1..20: mol_type = other DNA
ttcctactcaggagtaagat

SEQ ID NO: 84829 - DNA, 20 bp, synthetic construct
  source 1..20: mol_type = other DNA
attcctactcaggagtaaga

SEQ ID NO: 84830 - DNA, 20 bp, synthetic construct
  source 1..20: mol_type = other DNA
aattcctactcaggagtaag

SEQ ID NO: 84831 - DNA, 20 bp, synthetic construct
  source 1..20: mol_type = other DNA
taattcctactcaggagtaa

SEQ ID NO: 84832 - DNA, 20 bp, synthetic construct
  source 1..20: mol_type = other DNA
ataattcctactcaggagta

SEQ ID NO: 84833 - DNA, 20 bp, synthetic construct
  source 1..20: mol_type = other DNA
aataattcctactcaggagt

SEQ ID NO: 84834 - DNA, 20 bp, synthetic construct
  source 1..20: mol_type = other DNA
caataattcctactcaggag

SEQ ID NO: 84835 - DNA, 20 bp, synthetic construct
  source 1..20: mol_type = other DNA
acaataattcctactcagga

SEQ ID NO: 84836 - DNA, 20 bp, synthetic construct
  source 1..20: mol_type = other DNA
cacaataattcctactcagg

SEQ ID NO: 84837 - DNA, 20 bp, synthetic construct
  source 1..20: mol_type = other DNA
tcacaataattcctactcag

SEQ ID NO: 84838 - DNA, 20 bp, synthetic construct
  source 1..20: mol_type = other DNA
atcacaataattcctactca

SEQ ID NO: 84839 - DNA, 20 bp, synthetic construct
  source 1..20: mol_type = other DNA
aatcacaataattcctactc

SEQ ID NO: 84840 - DNA, 20 bp, synthetic construct
  source 1..20: mol_type = other DNA
aaatcacaataattcctact

SEQ ID NO: 84841 - DNA, 20 bp, synthetic construct
  source 1..20: mol_type = other DNA
taaatcacaataattcctac

SEQ ID NO: 84842 - DNA, 20 bp, synthetic construct
  source 1..20: mol_type = other DNA
ataaatcacaataattccta

SEQ ID NO: 84843 - DNA, 20 bp, synthetic construct
  source 1..20: mol_type = other DNA
aataaatcacaataattcct

SEQ ID NO: 84844 - DNA, 20 bp, synthetic construct
  source 1..20: mol_type = other DNA
taataaatcacaataattcc

SEQ ID NO: 84845 - DNA, 20 bp, synthetic construct
  source 1..20: mol_type = other DNA
ataataaatcacaataattc

SEQ ID NO: 84846 - DNA, 20 bp, synthetic construct
  source 1..20: mol_type = other DNA
cataataaatcacaataatt

SEQ ID NO: 84847 - DNA, 20 bp, synthetic construct
  source 1..20: mol_type = other DNA
acataataaatcacaataat

SEQ ID NO: 84848 - DNA, 20 bp, synthetic construct
  source 1..20: mol_type = other DNA
cacataataaatcacaataa

SEQ ID NO: 84849 - DNA, 20 bp, synthetic construct
  source 1..20: mol_type = other DNA
tcacataataaatcacaata

SEQ ID NO: 84850 - DNA, 20 bp, synthetic construct
  source 1..20: mol_type = other DNA
ttcacataataaatcacaat

SEQ ID NO: 84851 - DNA, 20 bp, synthetic construct
  source 1..20: mol_type = other DNA
tttcacataataaatcacaa

SEQ ID NO: 84852 - DNA, 20 bp, synthetic construct
  source 1..20: mol_type = other DNA
atttcacataataaatcaca

SEQ ID NO: 84853 - DNA, 20 bp, synthetic construct
  source 1..20: mol_type = other DNA
aatttcacataataaatcac

SEQ ID NO: 84854 - DNA, 20 bp, synthetic construct
  source 1..20: mol_type = other DNA
taatttcacataataaatca

SEQ ID NO: 84855 - DNA, 20 bp, synthetic construct
  source 1..20: mol_type = other DNA
ataatttcacataataaatc

SEQ ID NO: 84856 - DNA, 20 bp, synthetic construct
  source 1..20: mol_type = other DNA
gataatttcacataataaat

SEQ ID NO: 84857 - DNA, 20 bp, synthetic construct
  source 1..20: mol_type = other DNA
agataatttcacataataaa

SEQ ID NO: 84858 - DNA, 20 bp, synthetic construct
  source 1..20: mol_type = other DNA
tagataatttcacataataa

SEQ ID NO: 84859 - DNA, 20 bp, synthetic construct
  source 1..20: mol_type = other DNA
ctagataatttcacataata

SEQ ID NO: 84860 - DNA, 20 bp, synthetic construct
  source 1..20: mol_type = other DNA
actagataatttcacataat

SEQ ID NO: 84861 - DNA, 20 bp, synthetic construct
  source 1..20: mol_type = other DNA
cactagataatttcacataa

SEQ ID NO: 84862 - DNA, 20 bp, synthetic construct
  source 1..20: mol_type = other DNA
acactagataatttcacata

SEQ ID NO: 84863 - DNA, 20 bp, synthetic construct
  source 1..20: mol_type = other DNA
tacactagataatttcacat

SEQ ID NO: 84864 - DNA, 20 bp, synthetic construct
  source 1..20: mol_type = other DNA
atacactagataatttcaca

SEQ ID NO: 84865 - DNA, 20 bp, synthetic construct
  source 1..20: mol_type = other DNA
catacactagataatttcac

SEQ ID NO: 84866 - DNA, 20 bp, synthetic construct
  source 1..20: mol_type = other DNA
acatacactagataatttca

SEQ ID NO: 84867 - DNA, 20 bp, synthetic construct
  source 1..20: mol_type = other DNA
aacatacactagataatttc

SEQ ID NO: 84868 - DNA, 20 bp, synthetic construct
  source 1..20: mol_type = other DNA
taacatacactagataattt

SEQ ID NO: 84869 - DNA, 20 bp, synthetic construct
  source 1..20: mol_type = other DNA
ataacatacactagataatt

SEQ ID NO: 84870 - DNA, 20 bp, synthetic construct
  source 1..20: mol_type = other DNA
tataacatacactagataat

SEQ ID NO: 84871 - DNA, 20 bp, synthetic construct
  source 1..20: mol_type = other DNA
atataacatacactagataa

SEQ ID NO: 84872 - DNA, 20 bp, synthetic construct
  source 1..20: mol_type = other DNA
aatataacatacactagata

SEQ ID NO: 84873 - DNA, 20 bp, synthetic construct
  source 1..20: mol_type = other DNA
gaatataacatacactagat

SEQ ID NO: 84874 - DNA, 20 bp, synthetic construct
  source 1..20: mol_type = other DNA
ggaatataacatacactaga

SEQ ID NO: 84875 - DNA, 20 bp, synthetic construct
  source 1..20: mol_type = other DNA
aggaatataacatacactag

SEQ ID NO: 84876 - DNA, 20 bp, synthetic construct
  source 1..20: mol_type = other DNA
aaggaatataacatacacta

SEQ ID NO: 84877 - DNA, 20 bp, synthetic construct
  source 1..20: mol_type = other DNA
aaaggaatataacatacact

SEQ ID NO: 84878 - DNA, 20 bp, synthetic construct
  source 1..20: mol_type = other DNA
taaaggaatataacatacac

SEQ ID NO: 84879 - DNA, 20 bp, synthetic construct
  source 1..20: mol_type = other DNA
ttaaaggaatataacataca

SEQ ID NO: 84880 - DNA, 20 bp, synthetic construct
  source 1..20: mol_type = other DNA
tttaaaggaatataacatac

SEQ ID NO: 84881 - DNA, 20 bp, synthetic construct
  source 1..20: mol_type = other DNA
gtttaaaggaatataacata

SEQ ID NO: 84882 - DNA, 20 bp, synthetic construct
  source 1..20: mol_type = other DNA
tgtttaaaggaatataacat

SEQ ID NO: 84883 - DNA, 20 bp, synthetic construct
  source 1..20: mol_type = other DNA
ttgtttaaaggaatataaca

SEQ ID NO: 84884 - DNA, 20 bp, synthetic construct
  source 1..20: mol_type = other DNA
gttgtttaaaggaatataac

SEQ ID NO: 84885 - DNA, 20 bp, synthetic construct
  source 1..20: mol_type = other DNA
ggttgtttaaaggaatataa

SEQ ID NO: 84886 - DNA, 20 bp, synthetic construct
  source 1..20: mol_type = other DNA
tggttgtttaaaggaatata

SEQ ID NO: 84887 - DNA, 20 bp, synthetic construct
  source 1..20: mol_type = other DNA
ctggttgtttaaaggaatat

SEQ ID NO: 84888 - DNA, 20 bp, synthetic construct
  source 1..20: mol_type = other DNA
actggttgtttaaaggaata

SEQ ID NO: 84889 - DNA, 20 bp, synthetic construct
  source 1..20: mol_type = other DNA
aactggttgtttaaaggaat

SEQ ID NO: 84890 - DNA, 20 bp, synthetic construct
  source 1..20: mol_type = other DNA
taactggttgtttaaaggaa

SEQ ID NO: 84891 - DNA, 20 bp, synthetic construct
  source 1..20: mol_type = other DNA
gtaactggttgtttaaagga

SEQ ID NO: 84892 - DNA, 20 bp, synthetic construct
  source 1..20: mol_type = other DNA
agtaactggttgtttaaagg

SEQ ID NO: 84893 - DNA, 20 bp, synthetic construct
  source 1..20: mol_type = other DNA
cagtaactggttgtttaaag

SEQ ID NO: 84894 - DNA, 20 bp, synthetic construct
  source 1..20: mol_type = other DNA
tcagtaactggttgtttaaa

SEQ ID NO: 84895 - DNA, 20 bp, synthetic construct
  source 1..20: mol_type = other DNA
ctcagtaactggttgtttaa

SEQ ID NO: 84896 - DNA, 20 bp, synthetic construct
  source 1..20: mol_type = other DNA
tctcagtaactggttgttta

SEQ ID NO: 84897 - DNA, 20 bp, synthetic construct
  source 1..20: mol_type = other DNA
ttctcagtaactggttgttt

SEQ ID NO: 84898 - DNA, 20 bp, synthetic construct
  source 1..20: mol_type = other DNA
tttctcagtaactggttgtt

SEQ ID NO: 84899 - DNA, 20 bp, synthetic construct
  source 1..20: mol_type = other DNA
gtttctcagtaactggttgt

SEQ ID NO: 84900 - DNA, 20 bp, synthetic construct
  source 1..20: mol_type = other DNA
tgtttctcagtaactggttg

SEQ ID NO: 84901 - DNA, 20 bp, synthetic construct
  source 1..20: mol_type = other DNA
ctgtttctcagtaactggtt

SEQ ID NO: 84902 - DNA, 20 bp, synthetic construct
  source 1..20: mol_type = other DNA
actgtttctcagtaactggt

SEQ ID NO: 84903 - DNA, 20 bp, synthetic construct
  source 1..20: mol_type = other DNA
aactgtttctcagtaactgg

SEQ ID NO: 84904 - DNA, 20 bp, synthetic construct
  source 1..20: mol_type = other DNA
taactgtttctcagtaactg

SEQ ID NO: 84905 - DNA, 20 bp, synthetic construct
  source 1..20: mol_type = other DNA
ataactgtttctcagtaact

SEQ ID NO: 84906 - DNA, 20 bp, synthetic construct
  source 1..20: mol_type = other DNA
tataactgtttctcagtaac

SEQ ID NO: 84907 - DNA, 20 bp, synthetic construct
  source 1..20: mol_type = other DNA
ctataactgtttctcagtaa

SEQ ID NO: 84908 - DNA, 20 bp, synthetic construct
  source 1..20: mol_type = other DNA
tctataactgtttctcagta

SEQ ID NO: 84909 - DNA, 20 bp, synthetic construct
  source 1..20: mol_type = other DNA
ttctataactgtttctcagt

SEQ ID NO: 84910 - DNA, 20 bp, synthetic construct
  source 1..20: mol_type = other DNA
cttctataactgtttctcag

SEQ ID NO: 84911 - DNA, 20 bp, synthetic construct
  source 1..20: mol_type = other DNA
gcttctataactgtttctca

SEQ ID NO: 84912 - DNA, 20 bp, synthetic construct
  source 1..20: mol_type = other DNA
tgcttctataactgtttctc

SEQ ID NO: 84913 - DNA, 20 bp, synthetic construct
  source 1..20: mol_type = other DNA
ctgcttctataactgtttct

SEQ ID NO: 84914 - DNA, 20 bp, synthetic construct
  source 1..20: mol_type = other DNA
cctgcttctataactgtttc

SEQ ID NO: 84915 - DNA, 20 bp, synthetic construct
  source 1..20: mol_type = other DNA
tcctgcttctataactgttt

SEQ ID NO: 84916 - DNA, 20 bp, synthetic construct
  source 1..20: mol_type = other DNA
atcctgcttctataactgtt

SEQ ID NO: 84917 - DNA, 20 bp, synthetic construct
  source 1..20: mol_type = other DNA
aatcctgcttctataactgt

SEQ ID NO: 84918 - DNA, 20 bp, synthetic construct
  source 1..20: mol_type = other DNA
taatcctgcttctataactg

SEQ ID NO: 84919 - DNA, 20 bp, synthetic construct
  source 1..20: mol_type = other DNA
ttaatcctgcttctataact

SEQ ID NO: 84920 - DNA, 20 bp, synthetic construct
  source 1..20: mol_type = other DNA
attaatcctgcttctataac

SEQ ID NO: 84921 - DNA, 20 bp, synthetic construct
  source 1..20: mol_type = other DNA
tattaatcctgcttctataa

SEQ ID NO: 84922 - DNA, 20 bp, synthetic construct
  source 1..20: mol_type = other DNA
ctattaatcctgcttctata

SEQ ID NO: 84923 - DNA, 20 bp, synthetic construct
  source 1..20: mol_type = other DNA
cctattaatcctgcttctat

SEQ ID NO: 84924 - DNA, 20 bp, synthetic construct
  source 1..20: mol_type = other DNA
gcctattaatcctgcttcta

SEQ ID NO: 84925 - DNA, 20 bp, synthetic construct
  source 1..20: mol_type = other DNA
tgcctattaatcctgcttct

SEQ ID NO: 84926 - DNA, 20 bp, synthetic construct
  source 1..20: mol_type = other DNA
ttgcctattaatcctgcttc

SEQ ID NO: 84927 - DNA, 20 bp, synthetic construct
  source 1..20: mol_type = other DNA
tttgcctattaatcctgctt

SEQ ID NO: 84928 - DNA, 20 bp, synthetic construct
  source 1..20: mol_type = other DNA
ctttgcctattaatcctgct

SEQ ID NO: 84929 - DNA, 20 bp, synthetic construct
  source 1..20: mol_type = other DNA
actttgcctattaatcctgc

SEQ ID NO: 84930 - DNA, 20 bp, synthetic construct
  source 1..20: mol_type = other DNA
gactttgcctattaatcctg

SEQ ID NO: 84931 - DNA, 20 bp, synthetic construct
  source 1..20: mol_type = other DNA
agactttgcctattaatcct

SEQ ID NO: 84932 - DNA, 20 bp, synthetic construct
  source 1..20: mol_type = other DNA
aagactttgcctattaatcc

SEQ ID NO: 84933 - DNA, 20 bp, synthetic construct
  source 1..20: mol_type = other DNA
taagactttgcctattaatc

SEQ ID NO: 84934 - DNA, 20 bp, synthetic construct
  source 1..20: mol_type = other DNA
ttaagactttgcctattaat

SEQ ID NO: 84935 - DNA, 20 bp, synthetic construct
  source 1..20: mol_type = other DNA
gttaagactttgcctattaa

SEQ ID NO: 84936 - DNA, 20 bp, synthetic construct
  source 1..20: mol_type = other DNA
agttaagactttgcctatta

SEQ ID NO: 84937 - DNA, 20 bp, synthetic construct
  source 1..20: mol_type = other DNA
cagttaagactttgcctatt

SEQ ID NO: 84938 - DNA, 20 bp, synthetic construct
  source 1..20: mol_type = other DNA
acagttaagactttgcctat

SEQ ID NO: 84939 - DNA, 20 bp, synthetic construct
  source 1..20: mol_type = other DNA
gacagttaagactttgccta

SEQ ID NO: 84940 - DNA, 20 bp, synthetic construct
  source 1..20: mol_type = other DNA
agacagttaagactttgcct

SEQ ID NO: 84941 - DNA, 20 bp, synthetic construct
  source 1..20: mol_type = other DNA
aagacagttaagactttgcc

SEQ ID NO: 84942 - DNA, 20 bp, synthetic construct
  source 1..20: mol_type = other DNA
gaagacagttaagactttgc

SEQ ID NO: 84943 - DNA, 20 bp, synthetic construct
  source 1..20: mol_type = other DNA
agaagacagttaagactttg

SEQ ID NO: 84944 - DNA, 20 bp, synthetic construct
  source 1..20: mol_type = other DNA
aagaagacagttaagacttt

SEQ ID NO: 84945 - DNA, 20 bp, synthetic construct
  source 1..20: mol_type = other DNA
gaagaagacagttaagactt

SEQ ID NO: 84946 - DNA, 20 bp, synthetic construct
  source 1..20: mol_type = other DNA
tgaagaagacagttaagact

SEQ ID NO: 84947 - DNA, 20 bp, synthetic construct
  source 1..20: mol_type = other DNA
ttgaagaagacagttaagac

SEQ ID NO: 84948 - DNA, 20 bp, synthetic construct
  source 1..20: mol_type = other DNA
attgaagaagacagttaaga

SEQ ID NO: 84949 - DNA, 20 bp, synthetic construct
  source 1..20: mol_type = other DNA
tattgaagaagacagttaag

SEQ ID NO: 84950 - DNA, 20 bp, synthetic construct
  source 1..20: mol_type = other DNA
ctattgaagaagacagttaa

SEQ ID NO: 84951 - DNA, 20 bp, synthetic construct
  source 1..20: mol_type = other DNA
actattgaagaagacagtta

SEQ ID NO: 84952 - DNA, 20 bp, synthetic construct
  source 1..20: mol_type = other DNA
cactattgaagaagacagtt

SEQ ID NO: 84953 - DNA, 20 bp, synthetic construct
  source 1..20: mol_type = other DNA
acactattgaagaagacagt

SEQ ID NO: 84954 - DNA, 20 bp, synthetic construct
  source 1..20: mol_type = other DNA
cacactattgaagaagacag

SEQ ID NO: 84955 - DNA, 20 bp, synthetic construct
  source 1..20: mol_type = other DNA
acacactattgaagaagaca

SEQ ID NO: 84956 - DNA, 20 bp, synthetic construct
  source 1..20: mol_type = other DNA
tacacactattgaagaagac

SEQ ID NO: 84957 - DNA, 20 bp, synthetic construct
  source 1..20: mol_type = other DNA
atacacactattgaagaaga

SEQ ID NO: 84958 - DNA, 20 bp, synthetic construct
  source 1..20: mol_type = other DNA
tatacacactattgaagaag

SEQ ID NO: 84959 - DNA, 20 bp, synthetic construct
  source 1..20: mol_type = other DNA
ctatacacactattgaagaa

SEQ ID NO: 84960 - DNA, 20 bp, synthetic construct
  source 1..20: mol_type = other DNA
tctatacacactattgaaga

SEQ ID NO: 84961 - DNA, 20 bp, synthetic construct
  source 1..20: mol_type = other DNA
atctatacacactattgaag

SEQ ID NO: 84962 - DNA, 20 bp, synthetic construct
  source 1..20: mol_type = other DNA
gatctatacacactattgaa

SEQ ID NO: 84963 - DNA, 20 bp, synthetic construct
  source 1..20: mol_type = other DNA
ggatctatacacactattga

SEQ ID NO: 84964 - DNA, 20 bp, synthetic construct
  source 1..20: mol_type = other DNA
aggatctatacacactattg

SEQ ID NO: 84965 - DNA, 20 bp, synthetic construct
  source 1..20: mol_type = other DNA
taggatctatacacactatt

SEQ ID NO: 84966 - DNA, 20 bp, synthetic construct
  source 1..20: mol_type = other DNA
ttaggatctatacacactat

SEQ ID NO: 84967 - DNA, 20 bp, synthetic construct
  source 1..20: mol_type = other DNA
attaggatctatacacacta

SEQ ID NO: 84968 - DNA, 20 bp, synthetic construct
  source 1..20: mol_type = other DNA
aattaggatctatacacact

SEQ ID NO: 84969 - DNA, 20 bp, synthetic construct
  source 1..20: mol_type = other DNA
taattaggatctatacacac

SEQ ID NO: 84970 - DNA, 20 bp, synthetic construct
  source 1..20: mol_type = other DNA
ttaattaggatctatacaca

SEQ ID NO: 84971 - DNA, 20 bp, synthetic construct
  source 1..20: mol_type = other DNA
gttaattaggatctatacac

SEQ ID NO: 84972 - DNA, 20 bp, synthetic construct
  source 1..20: mol_type = other DNA
ggttaattaggatctataca

SEQ ID NO: 84973 - DNA, 20 bp, synthetic construct
  source 1..20: mol_type = other DNA
gggttaattaggatctatac

SEQ ID NO: 84974 - DNA, 20 bp, synthetic construct
  source 1..20: mol_type = other DNA
agggttaattaggatctata

SEQ ID NO: 84975 - DNA, 20 bp, synthetic construct
  source 1..20: mol_type = other DNA
aagggttaattaggatctat

SEQ ID NO: 84976 - DNA, 20 bp, synthetic construct
  source 1..20: mol_type = other DNA
aaagggttaattaggatcta

SEQ ID NO: 84977 - DNA, 20 bp, synthetic construct
  source 1..20: mol_type = other DNA
caaagggttaattaggatct

SEQ ID NO: 84978 - DNA, 20 bp, synthetic construct
  source 1..20: mol_type = other DNA
ccaaagggttaattaggatc

SEQ ID NO: 84979 - DNA, 20 bp, synthetic construct
  source 1..20: mol_type = other DNA
cccaaagggttaattaggat

SEQ ID NO: 84980 - DNA, 20 bp, synthetic construct
  source 1..20: mol_type = other DNA
tcccaaagggttaattagga

SEQ ID NO: 84981 - DNA, 20 bp, synthetic construct
  source 1..20: mol_type = other DNA
ttcccaaagggttaattagg

SEQ ID NO: 84982 - DNA, 20 bp, synthetic construct
  source 1..20: mol_type = other DNA
gttcccaaagggttaattag

SEQ ID NO: 84983 - DNA, 20 bp, synthetic construct
  source 1..20: mol_type = other DNA
cgttcccaaagggttaatta

SEQ ID NO: 84984 - DNA, 20 bp, synthetic construct
  source 1..20: mol_type = other DNA
acgttcccaaagggttaatt

SEQ ID NO: 84985 - DNA, 20 bp, synthetic construct
  source 1..20: mol_type = other DNA
cacgttcccaaagggttaat

SEQ ID NO: 84986 - DNA, 20 bp, synthetic construct
  source 1..20: mol_type = other DNA
acacgttcccaaagggttaa

SEQ ID NO: 84987 - DNA, 20 bp, synthetic construct
  source 1..20: mol_type = other DNA
tacacgttcccaaagggtta

SEQ ID NO: 84988 - DNA, 20 bp, synthetic construct
  source 1..20: mol_type = other DNA
atacacgttcccaaagggtt

SEQ ID NO: 84989 - DNA, 20 bp, synthetic construct
  source 1..20: mol_type = other DNA
aatacacgttcccaaagggt

SEQ ID NO: 84990 - DNA, 20 bp, synthetic construct
  source 1..20: mol_type = other DNA
gaatacacgttcccaaaggg

SEQ ID NO: 84991 - DNA, 20 bp, synthetic construct
  source 1..20: mol_type = other DNA
tgaatacacgttcccaaagg

SEQ ID NO: 84992 - DNA, 20 bp, synthetic construct
  source 1..20: mol_type = other DNA
atgaatacacgttcccaaag

SEQ ID NO: 84993 - DNA, 20 bp, synthetic construct
  source 1..20: mol_type = other DNA
aatgaatacacgttcccaaa

SEQ ID NO: 84994 - DNA, 20 bp, synthetic construct
  source 1..20: mol_type = other DNA
aaatgaatacacgttcccaa

SEQ ID NO: 84995 - DNA, 20 bp, synthetic construct
  source 1..20: mol_type = other DNA
taaatgaatacacgttccca

SEQ ID NO: 84996 - DNA, 20 bp, synthetic construct
  source 1..20: mol_type = other DNA
ttaaatgaatacacgttccc

SEQ ID NO: 84997 - DNA, 20 bp, synthetic construct
  source 1..20: mol_type = other DNA
tttaaatgaatacacgttcc

SEQ ID NO: 84998 - DNA, 20 bp, synthetic construct
  source 1..20: mol_type = other DNA
gtttaaatgaatacacgttc

SEQ ID NO: 84999 - DNA, 20 bp, synthetic construct
  source 1..20: mol_type = other DNA
tgtttaaatgaatacacgtt

SEQ ID NO: 85000 - DNA, 20 bp, synthetic construct
  source 1..20: mol_type = other DNA
ctgtttaaatgaatacacgt

SEQ ID NO: 85001 - DNA, 20 bp, synthetic construct
  source 1..20: mol_type = other DNA
tctgtttaaatgaatacacg

SEQ ID NO: 85002 - DNA, 20 bp, synthetic construct
  source 1..20: mol_type = other DNA
gtctgtttaaatgaatacac

SEQ ID NO: 85003 - DNA, 20 bp, synthetic construct
  source 1..20: mol_type = other DNA
agtctgtttaaatgaataca

SEQ ID NO: 85004 - DNA, 20 bp, synthetic construct
  source 1..20: mol_type = other DNA
aagtctgtttaaatgaatac

SEQ ID NO: 85005 - DNA, 20 bp, synthetic construct
  source 1..20: mol_type = other DNA
taagtctgtttaaatgaata

SEQ ID NO: 85006 - DNA, 20 bp, synthetic construct
  source 1..20: mol_type = other DNA
ttaagtctgtttaaatgaat

SEQ ID NO: 85007 - DNA, 20 bp, synthetic construct
  source 1..20: mol_type = other DNA
attaagtctgtttaaatgaa

SEQ ID NO: 85008 - DNA, 20 bp, synthetic construct
  source 1..20: mol_type = other DNA
gattaagtctgtttaaatga

SEQ ID NO: 85009 - DNA, 20 bp, synthetic construct
  source 1..20: mol_type = other DNA
agattaagtctgtttaaatg

SEQ ID NO: 85010 - DNA, 20 bp, synthetic construct
  source 1..20: mol_type = other DNA
aagattaagtctgtttaaat

SEQ ID NO: 85011 - DNA, 20 bp, synthetic construct
  source 1..20: mol_type = other DNA
taagattaagtctgtttaaa

SEQ ID NO: 85012 - DNA, 20 bp, synthetic construct
  source 1..20: mol_type = other DNA
ttaagattaagtctgtttaa

SEQ ID NO: 85013 - DNA, 20 bp, synthetic construct
  source 1..20: mol_type = other DNA
cttaagattaagtctgttta

SEQ ID NO: 85014 - DNA, 20 bp, synthetic construct
  source 1..20: mol_type = other DNA
ccttaagattaagtctgttt

SEQ ID NO: 85015 - DNA, 20 bp, synthetic construct
  source 1..20: mol_type = other DNA
tccttaagattaagtctgtt

SEQ ID NO: 85016 - DNA, 20 bp, synthetic construct
  source 1..20: mol_type = other DNA
ctccttaagattaagtctgt

SEQ ID NO: 85017 - DNA, 20 bp, synthetic construct
  source 1..20: mol_type = other DNA
cctccttaagattaagtctg

SEQ ID NO: 85018 - DNA, 20 bp, synthetic construct
  source 1..20: mol_type = other DNA
acctccttaagattaagtct

SEQ ID NO: 85019 - DNA, 20 bp, synthetic construct
  source 1..20: mol_type = other DNA
aacctccttaagattaagtc

SEQ ID NO: 85020 - DNA, 20 bp, synthetic construct
  source 1..20: mol_type = other DNA
taacctccttaagattaagt

SEQ ID NO: 85021 - DNA, 20 bp, synthetic construct
  source 1..20: mol_type = other DNA
ttaacctccttaagattaag

SEQ ID NO: 85022 - DNA, 20 bp, synthetic construct
  source 1..20: mol_type = other DNA
tttaacctccttaagattaa

SEQ ID NO: 85023 - DNA, 20 bp, synthetic construct
  source 1..20: mol_type = other DNA
ctttaacctccttaagatta

SEQ ID NO: 85024 - DNA, 20 bp, synthetic construct
  source 1..20: mol_type = other DNA
actttaacctccttaagatt

SEQ ID NO: 85025 - DNA, 20 bp, synthetic construct
  source 1..20: mol_type = other DNA
tactttaacctccttaagat

SEQ ID NO: 85026 - DNA, 20 bp, synthetic construct
  source 1..20: mol_type = other DNA
ttactttaacctccttaaga

SEQ ID NO: 85027 - DNA, 20 bp, synthetic construct
  source 1..20: mol_type = other DNA
tttactttaacctccttaag

SEQ ID NO: 85028 - DNA, 20 bp, synthetic construct
  source 1..20: mol_type = other DNA
ttttactttaacctccttaa

SEQ ID NO: 85029 - DNA, 20 bp, synthetic construct
  source 1..20: mol_type = other DNA
attttactttaacctcctta

SEQ ID NO: 85030 - DNA, 20 bp, synthetic construct
  source 1..20: mol_type = other DNA
cattttactttaacctcctt

SEQ ID NO: 85031 - DNA, 20 bp, synthetic construct
  source 1..20: mol_type = other DNA
acattttactttaacctcct

SEQ ID NO: 85032 - DNA, 20 bp, synthetic construct
  source 1..20: mol_type = other DNA
cacattttactttaacctcc

SEQ ID NO: 85033 - DNA, 20 bp, synthetic construct
  source 1..20: mol_type = other DNA
tcacattttactttaacctc

SEQ ID NO: 85034 - DNA, 20 bp, synthetic construct
  source 1..20: mol_type = other DNA
ttcacattttactttaacct

SEQ ID NO: 85035 - DNA, 20 bp, synthetic construct
  source 1..20: mol_type = other DNA
attcacattttactttaacc

SEQ ID NO: 85036 - DNA, 20 bp, synthetic construct
  source 1..20: mol_type = other DNA
aattcacattttactttaac

SEQ ID NO: 85037 - DNA, 20 bp, synthetic construct
  source 1..20: mol_type = other DNA
aaattcacattttactttaa

SEQ ID NO: 85038 - DNA, 20 bp, synthetic construct
  source 1..20: mol_type = other DNA
taaattcacattttacttta

SEQ ID NO: 85039 - DNA, 20 bp, synthetic construct
  source 1..20: mol_type = other DNA
ataaattcacattttacttt

SEQ ID NO: 85040 - DNA, 20 bp, synthetic construct
  source 1..20: mol_type = other DNA
cataaattcacattttactt

SEQ ID NO: 85041 - DNA, 20 bp, synthetic construct
  source 1..20: mol_type = other DNA
acataaattcacattttact

SEQ ID NO: 85042 - DNA, 20 bp, synthetic construct
  source 1..20: mol_type = other DNA
gacataaattcacattttac

SEQ ID NO: 85043 - DNA, 20 bp, synthetic construct
  source 1..20: mol_type = other DNA
tgacataaattcacatttta

SEQ ID NO: 85044 - DNA, 20 bp, synthetic construct
  source 1..20: mol_type = other DNA
ctgacataaattcacatttt

SEQ ID NO: 85045 - DNA, 20 bp, synthetic construct
  source 1..20: mol_type = other DNA
actgacataaattcacattt

SEQ ID NO: 85046 - DNA, 20 bp, synthetic construct
  source 1..20: mol_type = other DNA
aactgacataaattcacatt

SEQ ID NO: 85047 - DNA, 20 bp, synthetic construct
  source 1..20: mol_type = other DNA
taactgacataaattcacat

SEQ ID NO: 85048 - DNA, 20 bp, synthetic construct
  source 1..20: mol_type = other DNA
ttaactgacataaattcaca

SEQ ID NO: 85049 - DNA, 20 bp, synthetic construct
  source 1..20: mol_type = other DNA
cttaactgacataaattcac

SEQ ID NO: 85050 - DNA, 20 bp, synthetic construct
  source 1..20: mol_type = other DNA
acttaactgacataaattca

SEQ ID NO: 85051 - DNA, 20 bp, synthetic construct
  source 1..20: mol_type = other DNA
aacttaactgacataaattc

SEQ ID NO: 85052 - DNA, 20 bp, synthetic construct
  source 1..20: mol_type = other DNA
taacttaactgacataaatt

SEQ ID NO: 85053 - DNA, 20 bp, synthetic construct
  source 1..20: mol_type = other DNA
ataacttaactgacataaat

SEQ ID NO: 85054 - DNA, 20 bp, synthetic construct
  source 1..20: mol_type = other DNA
cataacttaactgacataaa

SEQ ID NO: 85055 - DNA, 20 bp, synthetic construct
  source 1..20: mol_type = other DNA
gcataacttaactgacataa

SEQ ID NO: 85056 - DNA, 20 bp, synthetic construct
  source 1..20: mol_type = other DNA
agcataacttaactgacata

SEQ ID NO: 85057 - DNA, 20 bp, synthetic construct
  source 1..20: mol_type = other DNA
tagcataacttaactgacat

SEQ ID NO: 85058 - DNA, 20 bp, synthetic construct
  source 1..20: mol_type = other DNA
ttagcataacttaactgaca

SEQ ID NO: 85059 - DNA, 20 bp, synthetic construct
  source 1..20: mol_type = other DNA
tttagcataacttaactgac

SEQ ID NO: 85060 - DNA, 20 bp, synthetic construct
  source 1..20: mol_type = other DNA
ttttagcataacttaactga

SEQ ID NO: 85061 - DNA, 20 bp, synthetic construct
  source 1..20: mol_type = other DNA
gttttagcataacttaactg

SEQ ID NO: 85062 - DNA, 20 bp, synthetic construct
  source 1..20: mol_type = other DNA
agttttagcataacttaact

SEQ ID NO: 85063 - DNA, 20 bp, synthetic construct
  source 1..20: mol_type = other DNA
aagttttagcataacttaac

SEQ ID NO: 85064 - DNA, 20 bp, synthetic construct
  source 1..20: mol_type = other DNA
taagttttagcataacttaa

SEQ ID NO: 85065 - DNA, 20 bp, synthetic construct
  source 1..20: mol_type = other DNA
ataagttttagcataactta

SEQ ID NO: 85066 - DNA, 20 bp, synthetic construct
  source 1..20: mol_type = other DNA
gataagttttagcataactt

SEQ ID NO: 85067 - DNA, 20 bp, synthetic construct
  source 1..20: mol_type = other DNA
tgataagttttagcataact

SEQ ID NO: 85068 - DNA, 20 bp, synthetic construct
  source 1..20: mol_type = other DNA
gtgataagttttagcataac

SEQ ID NO: 85069 - DNA, 20 bp, synthetic construct
  source 1..20: mol_type = other DNA
tgtgataagttttagcataa

SEQ ID NO: 85070 - DNA, 20 bp, synthetic construct
  source 1..20: mol_type = other DNA
ttgtgataagttttagcata

SEQ ID NO: 85071 - DNA, 20 bp, synthetic construct
  source 1..20: mol_type = other DNA
tttgtgataagttttagcat

SEQ ID NO: 85072 - DNA, 20 bp, synthetic construct
  source 1..20: mol_type = other DNA
atttgtgataagttttagca

SEQ ID NO: 85073 - DNA, 20 bp, synthetic construct
  source 1..20: mol_type = other DNA
gatttgtgataagttttagc

SEQ ID NO: 85074 - DNA, 20 bp, synthetic construct
  source 1..20: mol_type = other DNA
tgatttgtgataagttttag

SEQ ID NO: 85075 - DNA, 20 bp, synthetic construct
  source 1..20: mol_type = other DNA
ttgatttgtgataagtttta

SEQ ID NO: 85076 - DNA, 20 bp, synthetic construct
  source 1..20: mol_type = other DNA
tttgatttgtgataagtttt

SEQ ID NO: 85077 - DNA, 20 bp, synthetic construct
  source 1..20: mol_type = other DNA
atttgatttgtgataagttt

SEQ ID NO: 85078 - DNA, 20 bp, synthetic construct
  source 1..20: mol_type = other DNA
catttgatttgtgataagtt

SEQ ID NO: 85079 - DNA, 20 bp, synthetic construct
  source 1..20: mol_type = other DNA
tcatttgatttgtgataagt

SEQ ID NO: 85080 - DNA, 20 bp, synthetic construct
  source 1..20: mol_type = other DNA
gtcatttgatttgtgataag

SEQ ID NO: 85081 - DNA, 20 bp, synthetic construct
  source 1..20: mol_type = other DNA
agtcatttgatttgtgataa

SEQ ID NO: 85082 - DNA, 20 bp, synthetic construct
  source 1..20: mol_type = other DNA
cagtcatttgatttgtgata

SEQ ID NO: 85083 - DNA, 20 bp, synthetic construct
  source 1..20: mol_type = other DNA
acagtcatttgatttgtgat

SEQ ID NO: 85084 - DNA, 20 bp, synthetic construct
  source 1..20: mol_type = other DNA
gacagtcatttgatttgtga

SEQ ID NO: 85085 - DNA, 20 bp, synthetic construct
  source 1..20: mol_type = other DNA
ggacagtcatttgatttgtg

SEQ ID NO: 85086 - DNA, 20 bp, synthetic construct
  source 1..20: mol_type = other DNA
aggacagtcatttgatttgt

SEQ ID NO: 85087 - DNA, 20 bp, synthetic construct
  source 1..20: mol_type = other DNA
gaggacagtcatttgatttg

SEQ ID NO: 85088 - DNA, 20 bp, synthetic construct
  source 1..20: mol_type = other DNA
tgaggacagtcatttgattt

SEQ ID NO: 85089 - DNA, 20 bp, synthetic construct
  source 1..20: mol_type = other DNA
ttgaggacagtcatttgatt

SEQ ID NO: 85090 - DNA, 20 bp, synthetic construct
  source 1..20: mol_type = other DNA
tttgaggacagtcatttgat

SEQ ID NO: 85091 - DNA, 20 bp, synthetic construct
  source 1..20: mol_type = other DNA
ctttgaggacagtcatttga

SEQ ID NO: 85092 - DNA, 20 bp, synthetic construct
  source 1..20: mol_type = other DNA
cctttgaggacagtcatttg

SEQ ID NO: 85093 - DNA, 20 bp, synthetic construct
  source 1..20: mol_type = other DNA
ccctttgaggacagtcattt

SEQ ID NO: 85094 - DNA, 20 bp, synthetic construct
  source 1..20: mol_type = other DNA
accctttgaggacagtcatt

SEQ ID NO: 85095 - DNA, 20 bp, synthetic construct
  source 1..20: mol_type = other DNA
aaccctttgaggacagtcat

SEQ ID NO: 85096 - DNA, 20 bp, synthetic construct
  source 1..20: mol_type = other DNA
taaccctttgaggacagtca

SEQ ID NO: 85097 - DNA, 20 bp, synthetic construct
  source 1..20: mol_type = other DNA
ttaaccctttgaggacagtc

SEQ ID NO: 85098 - DNA, 20 bp, synthetic construct
  source 1..20: mol_type = other DNA
tttaaccctttgaggacagt

SEQ ID NO: 85099 - DNA, 20 bp, synthetic construct
  source 1..20: mol_type = other DNA
ttttaaccctttgaggacag

SEQ ID NO: 85100 - DNA, 20 bp, synthetic construct
  source 1..20: mol_type = other DNA
attttaaccctttgaggaca

SEQ ID NO: 85101 - DNA, 20 bp, synthetic construct
  source 1..20: mol_type = other DNA
cattttaaccctttgaggac

SEQ ID NO: 85102 - DNA, 20 bp, synthetic construct
  source 1..20: mol_type = other DNA
acattttaaccctttgagga

SEQ ID NO: 85103 - DNA, 20 bp, synthetic construct
  source 1..20: mol_type = other DNA
tacattttaaccctttgagg

SEQ ID NO: 85104 - DNA, 20 bp, synthetic construct
  source 1..20: mol_type = other DNA
gtacattttaaccctttgag

SEQ ID NO: 85105 - DNA, 20 bp, synthetic construct
  source 1..20: mol_type = other DNA
tgtacattttaaccctttga

SEQ ID NO: 85106 - DNA, 20 bp, synthetic construct
  source 1..20: mol_type = other DNA
ttgtacattttaaccctttg

SEQ ID NO: 85107 - DNA, 20 bp, synthetic construct
  source 1..20: mol_type = other DNA
cttgtacattttaacccttt

SEQ ID NO: 85108 - DNA, 20 bp, synthetic construct
  source 1..20: mol_type = other DNA
tcttgtacattttaaccctt

SEQ ID NO: 85109 - DNA, 20 bp, synthetic construct
  source 1..20: mol_type = other DNA
ttcttgtacattttaaccct

SEQ ID NO: 85110 - DNA, 20 bp, synthetic construct
  source 1..20: mol_type = other DNA
tttcttgtacattttaaccc

SEQ ID NO: 85111 - DNA, 20 bp, synthetic construct
  source 1..20: mol_type = other DNA
atttcttgtacattttaacc

SEQ ID NO: 85112 - DNA, 20 bp, synthetic construct
  source 1..20: mol_type = other DNA
gatttcttgtacattttaac

SEQ ID NO: 85113 - DNA, 20 bp, synthetic construct
  source 1..20: mol_type = other DNA
tgatttcttgtacattttaa

SEQ ID NO: 85114 - DNA, 20 bp, synthetic construct
  source 1..20: mol_type = other DNA
atgatttcttgtacatttta

SEQ ID NO: 85115 - DNA, 20 bp, synthetic construct
  source 1..20: mol_type = other DNA
aatgatttcttgtacatttt

SEQ ID NO: 85116 - DNA, 20 bp, synthetic construct
  source 1..20: mol_type = other DNA
aaatgatttcttgtacattt

SEQ ID NO: 85117 - DNA, 20 bp, synthetic construct
  source 1..20: mol_type = other DNA
aaaatgatttcttgtacatt

SEQ ID NO: 85118 - DNA, 20 bp, synthetic construct
  source 1..20: mol_type = other DNA
aaaaatgatttcttgtacat

SEQ ID NO: 85119 - DNA, 20 bp, synthetic construct
  source 1..20: mol_type = other DNA
caaaaatgatttcttgtaca

SEQ ID NO: 85120 - DNA, 20 bp, synthetic construct
  source 1..20: mol_type = other DNA
acaaaaatgatttcttgtac

SEQ ID NO: 85121 - DNA, 20 bp, synthetic construct
  source 1..20: mol_type = other DNA
gacaaaaatgatttcttgta

SEQ ID NO: 85122 - DNA, 20 bp, synthetic construct
  source 1..20: mol_type = other DNA
tgacaaaaatgatttcttgt

SEQ ID NO: 85123 - DNA, 20 bp, synthetic construct
  source 1..20: mol_type = other DNA
atgacaaaaatgatttcttg

SEQ ID NO: 85124 - DNA, 20 bp, synthetic construct
  source 1..20: mol_type = other DNA
aatgacaaaaatgatttctt

SEQ ID NO: 85125 - DNA, 20 bp, synthetic construct
  source 1..20: mol_type = other DNA
aaatgacaaaaatgatttct

SEQ ID NO: 85126 - DNA, 20 bp, synthetic construct
  source 1..20: mol_type = other DNA
aaaatgacaaaaatgatttc

SEQ ID NO: 85127 - DNA, 20 bp, synthetic construct
  source 1..20: mol_type = other DNA
taaaatgacaaaaatgattt

SEQ ID NO: 85128 - DNA, 20 bp, synthetic construct
  source 1..20: mol_type = other DNA
gtaaaatgacaaaaatgatt

SEQ ID NO: 85129 - DNA, 20 bp, synthetic construct
  source 1..20: mol_type = other DNA
agtaaaatgacaaaaatgat

SEQ ID NO: 85130 - DNA, 20 bp, synthetic construct
  source 1..20: mol_type = other DNA
aagtaaaatgacaaaaatga

SEQ ID NO: 85131 - DNA, 20 bp, synthetic construct
  source 1..20: mol_type = other DNA
aaagtaaaatgacaaaaatg

SEQ ID NO: 85132 - DNA, 20 bp, synthetic construct
  source 1..20: mol_type = other DNA
aaaagtaaaatgacaaaaat

SEQ ID NO: 85133 - DNA, 20 bp, synthetic construct
  source 1..20: mol_type = other DNA
aaaaagtaaaatgacaaaaa

SEQ ID NO: 85134 - DNA, 20 bp, synthetic construct
  source 1..20: mol_type = other DNA
aaaaaagtaaaatgacaaaa

SEQ ID NO: 85135 - DNA, 20 bp, synthetic construct
  source 1..20: mol_type = other DNA
aaaaaaagtaaaatgacaaa

SEQ ID NO: 85136 - DNA, 20 bp, synthetic construct
  source 1..20: mol_type = other DNA
gaaaaaaagtaaaatgacaa

SEQ ID NO: 85137 - DNA, 20 bp, synthetic construct
  source 1..20: mol_type = other DNA
agaaaaaaagtaaaatgaca

SEQ ID NO: 85138 - DNA, 20 bp, synthetic construct
  source 1..20: mol_type = other DNA
cagaaaaaaagtaaaatgac

SEQ ID NO: 85139 - DNA, 20 bp, synthetic construct
  source 1..20: mol_type = other DNA
acagaaaaaaagtaaaatga

SEQ ID NO: 85140 - DNA, 20 bp, synthetic construct
  source 1..20: mol_type = other DNA
aacagaaaaaaagtaaaatg

SEQ ID NO: 85141 - DNA, 20 bp, synthetic construct
  source 1..20: mol_type = other DNA
aaacagaaaaaaagtaaaat

SEQ ID NO: 85142 - DNA, 20 bp, synthetic construct
  source 1..20: mol_type = other DNA
taaacagaaaaaaagtaaaa

SEQ ID NO: 85143 - DNA, 20 bp, synthetic construct
  source 1..20: mol_type = other DNA
gtaaacagaaaaaaagtaaa

SEQ ID NO: 85144 - DNA, 20 bp, synthetic construct
  source 1..20: mol_type = other DNA
agtaaacagaaaaaaagtaa

SEQ ID NO: 85145 - DNA, 20 bp, synthetic construct
  source 1..20: mol_type = other DNA
aagtaaacagaaaaaaagta

SEQ ID NO: 85146 - DNA, 20 bp, synthetic construct
  source 1..20: mol_type = other DNA
aaagtaaacagaaaaaaagt

SEQ ID NO: 85147 - DNA, 20 bp, synthetic construct
  source 1..20: mol_type = other DNA
aaaagtaaacagaaaaaaag

SEQ ID NO: 85148 - DNA, 20 bp, synthetic construct
  source 1..20: mol_type = other DNA
aaaaagtaaacagaaaaaaa

SEQ ID NO: 85149 - DNA, 20 bp, synthetic construct
  source 1..20: mol_type = other DNA
aaaaaagtaaacagaaaaaa

SEQ ID NO: 85150 - DNA, 20 bp, synthetic construct
  source 1..20: mol_type = other DNA
gaaaaaagtaaacagaaaaa

SEQ ID NO: 85151 - DNA, 20 bp, synthetic construct
  source 1..20: mol_type = other DNA
ggaaaaaagtaaacagaaaa

SEQ ID NO: 85152 - DNA, 20 bp, synthetic construct
  source 1..20: mol_type = other DNA
gggaaaaaagtaaacagaaa

SEQ ID NO: 85153 - DNA, 20 bp, synthetic construct
  source 1..20: mol_type = other DNA
agggaaaaaagtaaacagaa

SEQ ID NO: 85154 - DNA, 20 bp, synthetic construct
  source 1..20: mol_type = other DNA
gagggaaaaaagtaaacaga

SEQ ID NO: 85155 - DNA, 20 bp, synthetic construct
  source 1..20: mol_type = other DNA
tgagggaaaaaagtaaacag

SEQ ID NO: 85156 - DNA, 20 bp, synthetic construct
  source 1..20: mol_type = other DNA
atgagggaaaaaagtaaaca

SEQ ID NO: 85157 - DNA, 20 bp, synthetic construct
  source 1..20: mol_type = other DNA
aatgagggaaaaaagtaaac

SEQ ID NO: 85158 - DNA, 20 bp, synthetic construct
  source 1..20: mol_type = other DNA
aaatgagggaaaaaagtaaa

SEQ ID NO: 85159 - DNA, 20 bp, synthetic construct
  source 1..20: mol_type = other DNA
aaaatgagggaaaaaagtaa

SEQ ID NO: 85160 - DNA, 20 bp, synthetic construct
  source 1..20: mol_type = other DNA
aaaaatgagggaaaaaagta

SEQ ID NO: 85161 - DNA, 20 bp, synthetic construct
  source 1..20: mol_type = other DNA
aaaaaatgagggaaaaaagt

SEQ ID NO: 85162 - DNA, 20 bp, synthetic construct
  source 1..20: mol_type = other DNA
aaaaaaatgagggaaaaaag

SEQ ID NO: 85163 - DNA, 20 bp, synthetic construct
  source 1..20: mol_type = other DNA
gaaaaaaatgagggaaaaaa

SEQ ID NO: 85164 - DNA, 20 bp, synthetic construct
  source 1..20: mol_type = other DNA
agaaaaaaatgagggaaaaa

SEQ ID NO: 85165 - DNA, 20 bp, synthetic construct
  source 1..20: mol_type = other DNA
aagaaaaaaatgagggaaaa

SEQ ID NO: 85166 - DNA, 20 bp, synthetic construct
  source 1..20: mol_type = other DNA
aaagaaaaaaatgagggaaa

SEQ ID NO: 85167 - DNA, 20 bp, synthetic construct
  source 1..20: mol_type = other DNA
taaagaaaaaaatgagggaa

SEQ ID NO: 85168 - DNA, 20 bp, synthetic construct
  source 1..20: mol_type = other DNA
ctaaagaaaaaaatgaggga

SEQ ID NO: 85169 - DNA, 20 bp, synthetic construct
  source 1..20: mol_type = other DNA
actaaagaaaaaaatgaggg

SEQ ID NO: 85170 - DNA, 20 bp, synthetic construct
  source 1..20: mol_type = other DNA
aactaaagaaaaaaatgagg

SEQ ID NO: 85171 - DNA, 20 bp, synthetic construct
  source 1..20: mol_type = other DNA
aaactaaagaaaaaaatgag

SEQ ID NO: 85172 - DNA, 20 bp, synthetic construct
  source 1..20: mol_type = other DNA
aaaactaaagaaaaaaatga

SEQ ID NO: 85173 - DNA, 20 bp, synthetic construct
  source 1..20: mol_type = other DNA
aaaaactaaagaaaaaaatg

SEQ ID NO: 85174 - DNA, 20 bp, synthetic construct
  source 1..20: mol_type = other DNA
taaaaactaaagaaaaaaat

SEQ ID NO: 85175 - DNA, 20 bp, synthetic construct
  source 1..20: mol_type = other DNA
ataaaaactaaagaaaaaaa

SEQ ID NO: 85176 - DNA, 20 bp, synthetic construct
  source 1..20: mol_type = other DNA
tataaaaactaaagaaaaaa

SEQ ID NO: 85177 - DNA, 20 bp, synthetic construct
  source 1..20: mol_type = other DNA
gtataaaaactaaagaaaaa

SEQ ID NO: 85178 - DNA, 20 bp, synthetic construct
  source 1..20: mol_type = other DNA
agtataaaaactaaagaaaa

SEQ ID NO: 85179 - DNA, 20 bp, synthetic construct
  source 1..20: mol_type = other DNA
aagtataaaaactaaagaaa

SEQ ID NO: 85180 - DNA, 20 bp, synthetic construct
  source 1..20: mol_type = other DNA
aaagtataaaaactaaagaa

SEQ ID NO: 85181 - DNA, 20 bp, synthetic construct
  source 1..20: mol_type = other DNA
gaaagtataaaaactaaaga

SEQ ID NO: 85182 - DNA, 20 bp, synthetic construct
  source 1..20: mol_type = other DNA
ggaaagtataaaaactaaag

SEQ ID NO: 85183 - DNA, 20 bp, synthetic construct
  source 1..20: mol_type = other DNA
aggaaagtataaaaactaaa

SEQ ID NO: 85184 - DNA, 20 bp, synthetic construct
  source 1..20: mol_type = other DNA
aaggaaagtataaaaactaa

SEQ ID NO: 85185 - DNA, 20 bp, synthetic construct
  source 1..20: mol_type = other DNA
gaaggaaagtataaaaacta

SEQ ID NO: 85186 - DNA, 20 bp, synthetic construct
  source 1..20: mol_type = other DNA
tgaaggaaagtataaaaact

SEQ ID NO: 85187 - DNA, 20 bp, synthetic construct
  source 1..20: mol_type = other DNA
atgaaggaaagtataaaaac

SEQ ID NO: 85188 - DNA, 20 bp, synthetic construct
  source 1..20: mol_type = other DNA
tatgaaggaaagtataaaaa

SEQ ID NO: 85189 - DNA, 20 bp, synthetic construct
  source 1..20: mol_type = other DNA
atatgaaggaaagtataaaa

SEQ ID NO: 85190 - DNA, 20 bp, synthetic construct
  source 1..20: mol_type = other DNA
gatatgaaggaaagtataaa

SEQ ID NO: 85191 - DNA, 20 bp, synthetic construct
  source 1..20: mol_type = other DNA
tgatatgaaggaaagtataa

SEQ ID NO: 85192 - DNA, 20 bp, synthetic construct
  source 1..20: mol_type = other DNA
atgatatgaaggaaagtata

SEQ ID NO: 85193 - DNA, 20 bp, synthetic construct
  source 1..20: mol_type = other DNA
aatgatatgaaggaaagtat

SEQ ID NO: 85194 - DNA, 20 bp, synthetic construct
  source 1..20: mol_type = other DNA
aaatgatatgaaggaaagta

SEQ ID NO: 85195 - DNA, 20 bp, synthetic construct
  source 1..20: mol_type = other DNA
caaatgatatgaaggaaagt

SEQ ID NO: 85196 - DNA, 20 bp, synthetic construct
  source 1..20: mol_type = other DNA
acaaatgatatgaaggaaag

SEQ ID NO: 85197 - DNA, 20 bp, synthetic construct
  source 1..20: mol_type = other DNA
aacaaatgatatgaaggaaa

SEQ ID NO: 85198 - DNA, 20 bp, synthetic construct
  source 1..20: mol_type = other DNA
gaacaaatgatatgaaggaa

SEQ ID NO: 85199 - DNA, 20 bp, synthetic construct
  source 1..20: mol_type = other DNA
agaacaaatgatatgaagga

SEQ ID NO: 85200 - DNA, 20 bp, synthetic construct
  source 1..20: mol_type = other DNA
cagaacaaatgatatgaagg

SEQ ID NO: 85201 - DNA, 20 bp, synthetic construct
  source 1..20: mol_type = other DNA
acagaacaaatgatatgaag

SEQ ID NO: 85202 - DNA, 20 bp, synthetic construct
  source 1..20: mol_type = other DNA
gacagaacaaatgatatgaa

SEQ ID NO: 85203 - DNA, 20 bp, synthetic construct
  source 1..20: mol_type = other DNA
tgacagaacaaatgatatga

SEQ ID NO: 85204 - DNA, 20 bp, synthetic construct
  source 1..20: mol_type = other DNA
ctgacagaacaaatgatatg

SEQ ID NO: 85205 - DNA, 20 bp, synthetic construct
  source 1..20: mol_type = other DNA
cctgacagaacaaatgatat

SEQ ID NO: 85206 - DNA, 20 bp, synthetic construct
  source 1..20: mol_type = other DNA
acctgacagaacaaatgata

SEQ ID NO: 85207 - DNA, 20 bp, synthetic construct
  source 1..20: mol_type = other DNA
cacctgacagaacaaatgat

SEQ ID NO: 85208 - DNA, 20 bp, synthetic construct
  source 1..20: mol_type = other DNA
acacctgacagaacaaatga

SEQ ID NO: 85209 - DNA, 20 bp, synthetic construct
  source 1..20: mol_type = other DNA
aacacctgacagaacaaatg

SEQ ID NO: 85210 - DNA, 20 bp, synthetic construct
  source 1..20: mol_type = other DNA
gaacacctgacagaacaaat

SEQ ID NO: 85211 - DNA, 20 bp, synthetic construct
  source 1..20: mol_type = other DNA
ggaacacctgacagaacaaa

SEQ ID NO: 85212 - DNA, 20 bp, synthetic construct
  source 1..20: mol_type = other DNA
gggaacacctgacagaacaa

SEQ ID NO: 85213 - DNA, 20 bp, synthetic construct
  source 1..20: mol_type = other DNA
agggaacacctgacagaaca

SEQ ID NO: 85214 - DNA, 20 bp, synthetic construct
  source 1..20: mol_type = other DNA
cagggaacacctgacagaac

SEQ ID NO: 85215 - DNA, 20 bp, synthetic construct
  source 1..20: mol_type = other DNA
ccagggaacacctgacagaa

SEQ ID NO: 85216 - DNA, 20 bp, synthetic construct
  source 1..20: mol_type = other DNA
gccagggaacacctgacaga

SEQ ID NO: 85217 - DNA, 20 bp, synthetic construct
  source 1..20: mol_type = other DNA
ggccagggaacacctgacag

SEQ ID NO: 85218 - DNA, 20 bp, synthetic construct
  source 1..20: mol_type = other DNA
tggccagggaacacctgaca

SEQ ID NO: 85219 - DNA, 20 bp, synthetic construct
  source 1..20: mol_type = other DNA
atggccagggaacacctgac

SEQ ID NO: 85220 - DNA, 20 bp, synthetic construct
  source 1..20: mol_type = other DNA
gatggccagggaacacctga

SEQ ID NO: 85221 - DNA, 20 bp, synthetic construct
  source 1..20: mol_type = other DNA
cgatggccagggaacacctg

SEQ ID NO: 85222 - DNA, 20 bp, synthetic construct
  source 1..20: mol_type = other DNA
gcgatggccagggaacacct

SEQ ID NO: 85223 - DNA, 20 bp, synthetic construct
  source 1..20: mol_type = other DNA
ggcgatggccagggaacacc

SEQ ID NO: 85224 - DNA, 20 bp, synthetic construct
  source 1..20: mol_type = other DNA
aggcgatggccagggaacac

SEQ ID NO: 85225 - DNA, 20 bp, synthetic construct
  source 1..20: mol_type = other DNA
aaggcgatggccagggaaca

SEQ ID NO: 85226 - DNA, 20 bp, synthetic construct
  source 1..20: mol_type = other DNA
caaggcgatggccagggaac

SEQ ID NO: 85227 - DNA, 20 bp, synthetic construct
  source 1..20: mol_type = other DNA
gcaaggcgatggccagggaa

SEQ ID NO: 85228 - DNA, 20 bp, synthetic construct
  source 1..20: mol_type = other DNA
ggcaaggcgatggccaggga

SEQ ID NO: 85229 - DNA, 20 bp, synthetic construct
  source 1..20: mol_type = other DNA
gggcaaggcgatggccaggg

SEQ ID NO: 85230 - DNA, 20 bp, synthetic construct
  source 1..20: mol_type = other DNA
tgggcaaggcgatggccagg

SEQ ID NO: 85231 - DNA, 20 bp, synthetic construct
  source 1..20: mol_type = other DNA
atgggcaaggcgatggccag

SEQ ID NO: 85232 - DNA, 20 bp, synthetic construct
  source 1..20: mol_type = other DNA
gatgggcaaggcgatggcca

SEQ ID NO: 85233 - DNA, 20 bp, synthetic construct
  source 1..20: mol_type = other DNA
agatgggcaaggcgatggcc

SEQ ID NO: 85234 - DNA, 20 bp, synthetic construct
  source 1..20: mol_type = other DNA
gagatgggcaaggcgatggc

SEQ ID NO: 85235 - DNA, 20 bp, synthetic construct
  source 1..20: mol_type = other DNA
ggagatgggcaaggcgatgg

SEQ ID NO: 85236 - DNA, 20 bp, synthetic construct
  source 1..20: mol_type = other DNA
aggagatgggcaaggcgatg

SEQ ID NO: 85237 - DNA, 20 bp, synthetic construct
  source 1..20: mol_type = other DNA
aaggagatgggcaaggcgat

SEQ ID NO: 85238 - DNA, 20 bp, synthetic construct
  source 1..20: mol_type = other DNA
gaaggagatgggcaaggcga

SEQ ID NO: 85239 - DNA, 20 bp, synthetic construct
  source 1..20: mol_type = other DNA
ggaaggagatgggcaaggcg

SEQ ID NO: 85240 - DNA, 20 bp, synthetic construct
  source 1..20: mol_type = other DNA
aggaaggagatgggcaaggc

SEQ ID NO: 85241 - DNA, 20 bp, synthetic construct
  source 1..20: mol_type = other DNA
gaggaaggagatgggcaagg

SEQ ID NO: 85242 - DNA, 20 bp, synthetic construct
  source 1..20: mol_type = other DNA
agaggaaggagatgggcaag

SEQ ID NO: 85243 - DNA, 20 bp, synthetic construct
  source 1..20: mol_type = other DNA
gagaggaaggagatgggcaa

SEQ ID NO: 85244 - DNA, 20 bp, synthetic construct
  source 1..20: mol_type = other DNA
cgagaggaaggagatgggca

SEQ ID NO: 85245 - DNA, 20 bp, synthetic construct
  source 1..20: mol_type = other DNA
gcgagaggaaggagatgggc

SEQ ID NO: 85246 - DNA, 20 bp, synthetic construct
  source 1..20: mol_type = other DNA
ggcgagaggaaggagatggg

SEQ ID NO: 85247 - DNA, 20 bp, synthetic construct
  source 1..20: mol_type = other DNA
gggcgagaggaaggagatgg

SEQ ID NO: 85248 - DNA, 20 bp, synthetic construct
  source 1..20: mol_type = other DNA
tgggcgagaggaaggagatg

SEQ ID NO: 85249 - DNA, 20 bp, synthetic construct
  source 1..20: mol_type = other DNA
gtgggcgagaggaaggagat

SEQ ID NO: 85250 - DNA, 20 bp, synthetic construct
  source 1..20: mol_type = other DNA
ggtgggcgagaggaaggaga

SEQ ID NO: 85251 - DNA, 20 bp, synthetic construct
  source 1..20: mol_type = other DNA
aggtgggcgagaggaaggag

SEQ ID NO: 85252 - DNA, 20 bp, synthetic construct
  source 1..20: mol_type = other DNA
aaggtgggcgagaggaagga

SEQ ID NO: 85253 - DNA, 20 bp, synthetic construct
  source 1..20: mol_type = other DNA
gaaggtgggcgagaggaagg

SEQ ID NO: 85254 - DNA, 20 bp, synthetic construct
  source 1..20: mol_type = other DNA
agaaggtgggcgagaggaag

SEQ ID NO: 85255 - DNA, 20 bp, synthetic construct
  source 1..20: mol_type = other DNA
gagaaggtgggcgagaggaa

SEQ ID NO: 85256 - DNA, 20 bp, synthetic construct
  source 1..20: mol_type = other DNA
cgagaaggtgggcgagagga

SEQ ID NO: 85257 - DNA, 20 bp, synthetic construct
  source 1..20: mol_type = other DNA
gcgagaaggtgggcgagagg

SEQ ID NO: 85258 - DNA, 20 bp, synthetic construct
  source 1..20: mol_type = other DNA
agcgagaaggtgggcgagag

SEQ ID NO: 85259 - DNA, 20 bp, synthetic construct
  source 1..20: mol_type = other DNA
tagcgagaaggtgggcgaga

SEQ ID NO: 85260 - DNA, 20 bp, synthetic construct
  source 1..20: mol_type = other DNA
gtagcgagaaggtgggcgag

SEQ ID NO: 85261 - DNA, 20 bp, synthetic construct
  source 1..20: mol_type = other DNA
ggtagcgagaaggtgggcga

SEQ ID NO: 85262 - DNA, 20 bp, synthetic construct
  source 1..20: mol_type = other DNA
tggtagcgagaaggtgggcg

SEQ ID NO: 85263 - DNA, 20 bp, synthetic construct
  source 1..20: mol_type = other DNA
ctggtagcgagaaggtgggc

SEQ ID NO: 85264 - DNA, 20 bp, synthetic construct
  source 1..20: mol_type = other DNA
actggtagcgagaaggtggg

SEQ ID NO: 85265 - DNA, 20 bp, synthetic construct
  source 1..20: mol_type = other DNA
gactggtagcgagaaggtgg

SEQ ID NO: 85266 - DNA, 20 bp, synthetic construct
  source 1..20: mol_type = other DNA
tgactggtagcgagaaggtg

SEQ ID NO: 85267 - DNA, 20 bp, synthetic construct
  source 1..20: mol_type = other DNA
ctgactggtagcgagaaggt

SEQ ID NO: 85268 - DNA, 20 bp, synthetic construct
  source 1..20: mol_type = other DNA
cctgactggtagcgagaagg

SEQ ID NO: 85269 - DNA, 20 bp, synthetic construct
  source 1..20: mol_type = other DNA
acctgactggtagcgagaag

SEQ ID NO: 85270 - DNA, 20 bp, synthetic construct
  source 1..20: mol_type = other DNA
gacctgactggtagcgagaa

SEQ ID NO: 85271 - DNA, 20 bp, synthetic construct
  source 1..20: mol_type = other DNA
ggacctgactggtagcgaga

SEQ ID NO: 85272 - DNA, 20 bp, synthetic construct
  source 1..20: mol_type = other DNA
gggacctgactggtagcgag

SEQ ID NO: 85273 - DNA, 20 bp, synthetic construct
  source 1..20: mol_type = other DNA
tgggacctgactggtagcga

SEQ ID NO: 85274 - DNA, 20 bp, synthetic construct
  source 1..20: mol_type = other DNA
ttgggacctgactggtagcg

SEQ ID NO: 85275 - DNA, 20 bp, synthetic construct
  source 1..20: mol_type = other DNA
gttgggacctgactggtagc

SEQ ID NO: 85276 - DNA, 20 bp, synthetic construct
  source 1..20: mol_type = other DNA
agttgggacctgactggtag

SEQ ID NO: 85277 - DNA, 20 bp, synthetic construct
  source 1..20: mol_type = other DNA
gagttgggacctgactggta

SEQ ID NO: 85278 - DNA, 20 bp, synthetic construct
  source 1..20: mol_type = other DNA
agagttgggacctgactggt

SEQ ID NO: 85279 - DNA, 20 bp, synthetic construct
  source 1..20: mol_type = other DNA
gagagttgggacctgactgg

SEQ ID NO: 85280 - DNA, 20 bp, synthetic construct
  source 1..20: mol_type = other DNA
agagagttgggacctgactg

SEQ ID NO: 85281 - DNA, 20 bp, synthetic construct
  source 1..20: mol_type = other DNA
aagagagttgggacctgact

SEQ ID NO: 85282 - DNA, 20 bp, synthetic construct
  source 1..20: mol_type = other DNA
gaagagagttgggacctgac

SEQ ID NO: 85283 - DNA, 20 bp, synthetic construct
  source 1..20: mol_type = other DNA
ggaagagagttgggacctga

SEQ ID NO: 85284 - DNA, 20 bp, synthetic construct
  source 1..20: mol_type = other DNA
tggaagagagttgggacctg

SEQ ID NO: 85285 - DNA, 20 bp, synthetic construct
  source 1..20: mol_type = other DNA
gtggaagagagttgggacct

SEQ ID NO: 85286 - DNA, 20 bp, synthetic construct
  source 1..20: mol_type = other DNA
ggtggaagagagttgggacc

SEQ ID NO: 85287 - DNA, 20 bp, synthetic construct
  source 1..20: mol_type = other DNA
aggtggaagagagttgggac

SEQ ID NO: 85288 - DNA, 20 bp, synthetic construct
  source 1..20: mol_type = other DNA
gaggtggaagagagttggga

SEQ ID NO: 85289 - DNA, 20 bp, synthetic construct
  source 1..20: mol_type = other DNA
cgaggtggaagagagttggg

SEQ ID NO: 85290 - DNA, 20 bp, synthetic construct
  source 1..20: mol_type = other DNA
ccgaggtggaagagagttgg

SEQ ID NO: 85291 - DNA, 20 bp, synthetic construct
  source 1..20: mol_type = other DNA
cccgaggtggaagagagttg

SEQ ID NO: 85292 - DNA, 20 bp, synthetic construct
  source 1..20: mol_type = other DNA
gcccgaggtggaagagagtt

SEQ ID NO: 85293 - DNA, 20 bp, synthetic construct
  source 1..20: mol_type = other DNA
tgcccgaggtggaagagagt

SEQ ID NO: 85294 - DNA, 20 bp, synthetic construct
  source 1..20: mol_type = other DNA
ctgcccgaggtggaagagag

SEQ ID NO: 85295 - DNA, 20 bp, synthetic construct
  source 1..20: mol_type = other DNA
gctgcccgaggtggaagaga

SEQ ID NO: 85296 - DNA, 20 bp, synthetic construct
  source 1..20: mol_type = other DNA
ggctgcccgaggtggaagag

SEQ ID NO: 85297 - DNA, 20 bp, synthetic construct
  source 1..20: mol_type = other DNA
tggctgcccgaggtggaaga

SEQ ID NO: 85298 - DNA, 20 bp, synthetic construct
  source 1..20: mol_type = other DNA
gtggctgcccgaggtggaag

SEQ ID NO: 85299 - DNA, 20 bp, synthetic construct
  source 1..20: mol_type = other DNA
ggtggctgcccgaggtggaa

SEQ ID NO: 85300 - DNA, 20 bp, synthetic construct
  source 1..20: mol_type = other DNA
gggtggctgcccgaggtgga

SEQ ID NO: 85301 - DNA, 20 bp, synthetic construct
  source 1..20: mol_type = other DNA
ggggtggctgcccgaggtgg

SEQ ID NO: 85302 - DNA, 20 bp, synthetic construct
  source 1..20: mol_type = other DNA
aggggtggctgcccgaggtg

SEQ ID NO: 85303 - DNA, 20 bp, synthetic construct
  source 1..20: mol_type = other DNA
taggggtggctgcccgaggt

SEQ ID NO: 85304 - DNA, 20 bp, synthetic construct
  source 1..20: mol_type = other DNA
gtaggggtggctgcccgagg

SEQ ID NO: 85305 - DNA, 20 bp, synthetic construct
  source 1..20: mol_type = other DNA
tgtaggggtggctgcccgag

SEQ ID NO: 85306 - DNA, 20 bp, synthetic construct
  source 1..20: mol_type = other DNA
gtgtaggggtggctgcccga

SEQ ID NO: 85307 - DNA, 20 bp, synthetic construct
  source 1..20: mol_type = other DNA
cgtgtaggggtggctgcccg

SEQ ID NO: 85308 - DNA, 20 bp, synthetic construct
  source 1..20: mol_type = other DNA
ccgtgtaggggtggctgccc

SEQ ID NO: 85309 - DNA, 20 bp, synthetic construct
  source 1..20: mol_type = other DNA
gccgtgtaggggtggctgcc

SEQ ID NO: 85310 - DNA, 20 bp, synthetic construct
  source 1..20: mol_type = other DNA
ggccgtgtaggggtggctgc

SEQ ID NO: 85311 - DNA, 20 bp, synthetic construct
  source 1..20: mol_type = other DNA
cggccgtgtaggggtggctg

SEQ ID NO: 85312 - DNA, 20 bp, synthetic construct
  source 1..20: mol_type = other DNA
gcggccgtgtaggggtggct

SEQ ID NO: 85313 - DNA, 20 bp, synthetic construct
  source 1..20: mol_type = other DNA
ggcggccgtgtaggggtggc

SEQ ID NO: 85314 - DNA, 20 bp, synthetic construct
  source 1..20: mol_type = other DNA
gggcggccgtgtaggggtgg

SEQ ID NO: 85315 - DNA, 20 bp, synthetic construct
  source 1..20: mol_type = other DNA
agggcggccgtgtaggggtg

SEQ ID NO: 85316 - DNA, 20 bp, synthetic construct
  source 1..20: mol_type = other DNA
gagggcggccgtgtaggggt

SEQ ID NO: 85317 - DNA, 20 bp, synthetic construct
  source 1..20: mol_type = other DNA
ggagggcggccgtgtagggg

SEQ ID NO: 85318 - DNA, 20 bp, synthetic construct
  source 1..20: mol_type = other DNA
tggagggcggccgtgtaggg

SEQ ID NO: 85319 - DNA, 20 bp, synthetic construct
  source 1..20: mol_type = other DNA
ctggagggcggccgtgtagg

SEQ ID NO: 85320 - DNA, 20 bp, synthetic construct
  source 1..20: mol_type = other DNA
cctggagggcggccgtgtag

SEQ ID NO: 85321 - DNA, 20 bp, synthetic construct
  source 1..20: mol_type = other DNA
gcctggagggcggccgtgta

SEQ ID NO: 85322 - DNA, 20 bp, synthetic construct
  source 1..20: mol_type = other DNA
ggcctggagggcggccgtgt

SEQ ID NO: 85323 - DNA, 20 bp, synthetic construct
  source 1..20: mol_type = other DNA
gggcctggagggcggccgtg

SEQ ID NO: 85324 - DNA, 20 bp, synthetic construct
  source 1..20: mol_type = other DNA
ggggcctggagggcggccgt

SEQ ID NO: 85325 - DNA, 20 bp, synthetic construct
  source 1..20: mol_type = other DNA
gggggcctggagggcggccg

SEQ ID NO: 85326 - DNA, 20 bp, synthetic construct
  source 1..20: mol_type = other DNA
ggggggcctggagggcggcc

SEQ ID NO: 85327 - DNA, 20 bp, synthetic construct
  source 1..20: mol_type = other DNA
aggggggcctggagggcggc

SEQ ID NO: 85328 - DNA, 20 bp, synthetic construct
  source 1..20: mol_type = other DNA
gaggggggcctggagggcgg

SEQ ID NO: 85329 - DNA, 20 bp, synthetic construct
  source 1..20: mol_type = other DNA
cgaggggggcctggagggcg

SEQ ID NO: 85330 - DNA, 20 bp, synthetic construct
  source 1..20: mol_type = other DNA
gcgaggggggcctggagggc

SEQ ID NO: 85331 - DNA, 20 bp, synthetic construct
  source 1..20: mol_type = other DNA
cgcgaggggggcctggaggg

SEQ ID NO: 85332 - DNA, 20 bp, synthetic construct
  source 1..20: mol_type = other DNA
ccgcgaggggggcctggagg

SEQ ID NO: 85333 - DNA, 20 bp, synthetic construct
  source 1..20: mol_type = other DNA
gccgcgaggggggcctggag

SEQ ID NO: 85334 - DNA, 20 bp, synthetic construct
  source 1..20: mol_type = other DNA
ggccgcgaggggggcctgga

SEQ ID NO: 85335 - DNA, 20 bp, synthetic construct
  source 1..20: mol_type = other DNA
tggccgcgaggggggcctgg

SEQ ID NO: 85336 - DNA, 20 bp, synthetic construct
  source 1..20: mol_type = other DNA
atggccgcgaggggggcctg

SEQ ID NO: 85337 - DNA, 20 bp, synthetic construct
  source 1..20: mol_type = other DNA
gatggccgcgaggggggcct

SEQ ID NO: 85338 - DNA, 20 bp, synthetic construct
  source 1..20: mol_type = other DNA
ggatggccgcgaggggggcc

SEQ ID NO: 85339 - DNA, 20 bp, synthetic construct
  source 1..20: mol_type = other DNA
tggatggccgcgaggggggc

SEQ ID NO: 85340 - DNA, 20 bp, synthetic construct
  source 1..20: mol_type = other DNA
ctggatggccgcgagggggg

SEQ ID NO: 85341 - DNA, 20 bp, synthetic construct
  source 1..20: mol_type = other DNA
tctggatggccgcgaggggg

SEQ ID NO: 85342 - DNA, 20 bp, synthetic construct
  source 1..20: mol_type = other DNA
gtctggatggccgcgagggg

SEQ ID NO: 85343 - DNA, 20 bp, synthetic construct
  source 1..20: mol_type = other DNA
ggtctggatggccgcgaggg

SEQ ID NO: 85344 - DNA, 20 bp, synthetic construct
  source 1..20: mol_type = other DNA
gggtctggatggccgcgagg

SEQ ID NO: 85345 - DNA, 20 bp, synthetic construct
  source 1..20: mol_type = other DNA
ggggtctggatggccgcgag

SEQ ID NO: 85346 - DNA, 20 bp, synthetic construct
  source 1..20: mol_type = other DNA
gggggtctggatggccgcga

SEQ ID NO: 85347 - DNA, 20 bp, synthetic construct
  source 1..20: mol_type = other DNA
cgggggtctggatggccgcg

SEQ ID NO: 85348 - DNA, 20 bp, synthetic construct
  source 1..20: mol_type = other DNA
acgggggtctggatggccgc

SEQ ID NO: 85349 - DNA, 20 bp, synthetic construct
  source 1..20: mol_type = other DNA
gacgggggtctggatggccg

SEQ ID NO: 85350 - DNA, 20 bp, synthetic construct
  source 1..20: mol_type = other DNA
agacgggggtctggatggcc

SEQ ID NO: 85351 - DNA, 20 bp, synthetic construct
  source 1..20: mol_type = other DNA
gagacgggggtctggatggc

SEQ ID NO: 85352 - DNA, 20 bp, synthetic construct
  source 1..20: mol_type = other DNA
tgagacgggggtctggatgg

SEQ ID NO: 85353 - DNA, 20 bp, synthetic construct
  source 1..20: mol_type = other DNA
gtgagacgggggtctggatg

SEQ ID NO: 85354 - DNA, 20 bp, synthetic construct
  source 1..20: mol_type = other DNA
ggtgagacgggggtctggat

SEQ ID NO: 85355 - DNA, 20 bp, synthetic construct
  source 1..20: mol_type = other DNA
gggtgagacgggggtctgga

SEQ ID NO: 85356 - DNA, 20 bp, synthetic construct
  source 1..20: mol_type = other DNA
ggggtgagacgggggtctgg

SEQ ID NO: 85357 - DNA, 20 bp, synthetic construct
  source 1..20: mol_type = other DNA
aggggtgagacgggggtctg

SEQ ID NO: 85358 - DNA, 20 bp, synthetic construct
  source 1..20: mol_type = other DNA
gaggggtgagacgggggtct

SEQ ID NO: 85359 - DNA, 20 bp, synthetic construct
  source 1..20: mol_type = other DNA
agaggggtgagacgggggtc

SEQ ID NO: 85360 - DNA, 20 bp, synthetic construct
  source 1..20: mol_type = other DNA
cagaggggtgagacgggggt

SEQ ID NO: 85361 - DNA, 20 bp, synthetic construct
  source 1..20: mol_type = other DNA
gcagaggggtgagacggggg

SEQ ID NO: 85362 - DNA, 20 bp, synthetic construct
  source 1..20: mol_type = other DNA
agcagaggggtgagacgggg

SEQ ID NO: 85363 - DNA, 20 bp, synthetic construct
  source 1..20: mol_type = other DNA
gagcagaggggtgagacggg

SEQ ID NO: 85364 - DNA, 20 bp, synthetic construct
  source 1..20: mol_type = other DNA
tgagcagaggggtgagacgg

SEQ ID NO: 85365 - DNA, 20 bp, synthetic construct
  source 1..20: mol_type = other DNA
atgagcagaggggtgagacg

SEQ ID NO: 85366 - DNA, 20 bp, synthetic construct
  source 1..20: mol_type = other DNA
catgagcagaggggtgagac

SEQ ID NO: 85367 - DNA, 20 bp, synthetic construct
  source 1..20: mol_type = other DNA
ccatgagcagaggggtgaga

SEQ ID NO: 85368 - DNA, 20 bp, synthetic construct
  source 1..20: mol_type = other DNA
accatgagcagaggggtgag

SEQ ID NO: 85369 - DNA, 20 bp, synthetic construct
  source 1..20: mol_type = other DNA
aaccatgagcagaggggtga

SEQ ID NO: 85370 - DNA, 20 bp, synthetic construct
  source 1..20: mol_type = other DNA
gaaccatgagcagaggggtg

SEQ ID NO: 85371 - DNA, 20 bp, synthetic construct
  source 1..20: mol_type = other DNA
agaaccatgagcagaggggt

SEQ ID NO: 85372 - DNA, 20 bp, synthetic construct
  source 1..20: mol_type = other DNA
gagaaccatgagcagagggg

SEQ ID NO: 85373 - DNA, 20 bp, synthetic construct
  source 1..20: mol_type = other DNA
ggagaaccatgagcagaggg

SEQ ID NO: 85374 - DNA, 20 bp, synthetic construct
  source 1..20: mol_type = other DNA
tggagaaccatgagcagagg

SEQ ID NO: 85375 - DNA, 20 bp, synthetic construct
  source 1..20: mol_type = other DNA
ctggagaaccatgagcagag

SEQ ID NO: 85376 - DNA, 20 bp, synthetic construct
  source 1..20: mol_type = other DNA
gctggagaaccatgagcaga

SEQ ID NO: 85377 - DNA, 20 bp, synthetic construct
  source 1..20: mol_type = other DNA
agctggagaaccatgagcag

SEQ ID NO: 85378 - DNA, 20 bp, synthetic construct
  source 1..20: mol_type = other DNA
gagctggagaaccatgagca

SEQ ID NO: 85379 - DNA, 20 bp, synthetic construct
  source 1..20: mol_type = other DNA
ggagctggagaaccatgagc

SEQ ID NO: 85380 - DNA, 20 bp, synthetic construct
  source 1..20: mol_type = other DNA
aggagctggagaaccatgag

SEQ ID NO: 85381 - DNA, 20 bp, synthetic construct
  source 1..20: mol_type = other DNA
caggagctggagaaccatga

SEQ ID NO: 85382 - DNA, 20 bp, synthetic construct
  source 1..20: mol_type = other DNA
acaggagctggagaaccatg

SEQ ID NO: 85383 - DNA, 20 bp, synthetic construct
  source 1..20: mol_type = other DNA
gacaggagctggagaaccat

SEQ ID NO: 85384 - DNA, 20 bp, synthetic construct
  source 1..20: mol_type = other DNA
agacaggagctggagaacca

SEQ ID NO: 85385 - DNA, 20 bp, synthetic construct
  source 1..20: mol_type = other DNA
gagacaggagctggagaacc

SEQ ID NO: 85386 - DNA, 20 bp, synthetic construct
  source 1..20: mol_type = other DNA
agagacaggagctggagaac

SEQ ID NO: 85387 - DNA, 20 bp, synthetic construct
  source 1..20: mol_type = other DNA
tagagacaggagctggagaa

SEQ ID NO: 85388 - DNA, 20 bp, synthetic construct
  source 1..20: mol_type = other DNA
gtagagacaggagctggaga

SEQ ID NO: 85389 - DNA, 20 bp, synthetic construct
  source 1..20: mol_type = other DNA
agtagagacaggagctggag

SEQ ID NO: 85390 - DNA, 20 bp, synthetic construct
  source 1..20: mol_type = other DNA
tagtagagacaggagctgga

SEQ ID NO: 85391 - DNA, 20 bp, synthetic construct
  source 1..20: mol_type = other DNA
atagtagagacaggagctgg

SEQ ID NO: 85392 - DNA, 20 bp, synthetic construct
  source 1..20: mol_type = other DNA
catagtagagacaggagctg

SEQ ID NO: 85393 - DNA, 20 bp, synthetic construct
  source 1..20: mol_type = other DNA
gcatagtagagacaggagct

SEQ ID NO: 85394 - DNA, 20 bp, synthetic construct
  source 1..20: mol_type = other DNA
ggcatagtagagacaggagc

SEQ ID NO: 85395 - DNA, 20 bp, synthetic construct
  source 1..20: mol_type = other DNA
aggcatagtagagacaggag

SEQ ID NO: 85396 - DNA, 20 bp, synthetic construct
  source 1..20: mol_type = other DNA
taggcatagtagagacagga

SEQ ID NO: 85397 - DNA, 20 bp, synthetic construct
  source 1..20: mol_type = other DNA
ttaggcatagtagagacagg

SEQ ID NO: 85398 - DNA, 20 bp, synthetic construct
  source 1..20: mol_type = other DNA
tttaggcatagtagagacag

SEQ ID NO: 85399 - DNA, 20 bp, synthetic construct
  source 1..20: mol_type = other DNA
gtttaggcatagtagagaca

SEQ ID NO: 85400 - DNA, 20 bp, synthetic construct
  source 1..20: mol_type = other DNA
cgtttaggcatagtagagac

SEQ ID NO: 85401 - DNA, 20 bp, synthetic construct
  source 1..20: mol_type = other DNA
gcgtttaggcatagtagaga

SEQ ID NO: 85402 - DNA, 20 bp, synthetic construct
  source 1..20: mol_type = other DNA
tgcgtttaggcatagtagag

SEQ ID NO: 85403 - DNA, 20 bp, synthetic construct
  source 1..20: mol_type = other DNA
atgcgtttaggcatagtaga

SEQ ID NO: 85404 - DNA, 20 bp, synthetic construct
  source 1..20: mol_type = other DNA
catgcgtttaggcatagtag

SEQ ID NO: 85405 - DNA, 20 bp, synthetic construct
  source 1..20: mol_type = other DNA
acatgcgtttaggcatagta

SEQ ID NO: 85406 - DNA, 20 bp, synthetic construct
  source 1..20: mol_type = other DNA
gacatgcgtttaggcatagt

SEQ ID NO: 85407 - DNA, 20 bp, synthetic construct
  source 1..20: mol_type = other DNA
agacatgcgtttaggcatag

SEQ ID NO: 85408 - DNA, 20 bp, synthetic construct
  source 1..20: mol_type = other DNA
aagacatgcgtttaggcata

SEQ ID NO: 85409 - DNA, 20 bp, synthetic construct
  source 1..20: mol_type = other DNA
gaagacatgcgtttaggcat

SEQ ID NO: 85410 - DNA, 20 bp, synthetic construct
  source 1..20: mol_type = other DNA
tgaagacatgcgtttaggca

SEQ ID NO: 85411 - DNA, 20 bp, synthetic construct
  source 1..20: mol_type = other DNA
ctgaagacatgcgtttaggc

SEQ ID NO: 85412 - DNA, 20 bp, synthetic construct
  source 1..20: mol_type = other DNA
tctgaagacatgcgtttagg

SEQ ID NO: 85413 - DNA, 20 bp, synthetic construct
  source 1..20: mol_type = other DNA
ttctgaagacatgcgtttag

SEQ ID NO: 85414 - DNA, 20 bp, synthetic construct
  source 1..20: mol_type = other DNA
cttctgaagacatgcgttta

SEQ ID NO: 85415 - DNA, 20 bp, synthetic construct
  source 1..20: mol_type = other DNA
ccttctgaagacatgcgttt

SEQ ID NO: 85416 - DNA, 20 bp, synthetic construct
  source 1..20: mol_type = other DNA
accttctgaagacatgcgtt

SEQ ID NO: 85417 - DNA, 20 bp, synthetic construct
  source 1..20: mol_type = other DNA
taccttctgaagacatgcgt

SEQ ID NO: 85418 - DNA, 20 bp, synthetic construct
  source 1..20: mol_type = other DNA
gtaccttctgaagacatgcg

SEQ ID NO: 85419 - DNA, 20 bp, synthetic construct
  source 1..20: mol_type = other DNA
tgtaccttctgaagacatgc

SEQ ID NO: 85420 - DNA, 20 bp, synthetic construct
  source 1..20: mol_type = other DNA
ttgtaccttctgaagacatg

SEQ ID NO: 85421 - DNA, 20 bp, synthetic construct
  source 1..20: mol_type = other DNA
attgtaccttctgaagacat

SEQ ID NO: 85422 - DNA, 20 bp, synthetic construct
  source 1..20: mol_type = other DNA
tattgtaccttctgaagaca

SEQ ID NO: 85423 - DNA, 20 bp, synthetic construct
  source 1..20: mol_type = other DNA
gtattgtaccttctgaagac

SEQ ID NO: 85424 - DNA, 20 bp, synthetic construct
  source 1..20: mol_type = other DNA
ggtattgtaccttctgaaga

SEQ ID NO: 85425 - DNA, 20 bp, synthetic construct
  source 1..20: mol_type = other DNA
tggtattgtaccttctgaag

SEQ ID NO: 85426 - DNA, 20 bp, synthetic construct
  source 1..20: mol_type = other DNA
gtggtattgtaccttctgaa

SEQ ID NO: 85427 - DNA, 20 bp, synthetic construct
  source 1..20: mol_type = other DNA
tgtggtattgtaccttctga

SEQ ID NO: 85428 - DNA, 20 bp, synthetic construct
  source 1..20: mol_type = other DNA
ttgtggtattgtaccttctg

SEQ ID NO: 85429 - DNA, 20 bp, synthetic construct
  source 1..20: mol_type = other DNA
attgtggtattgtaccttct

SEQ ID NO: 85430 - DNA, 20 bp, synthetic construct
  source 1..20: mol_type = other DNA
aattgtggtattgtaccttc

SEQ ID NO: 85431 - DNA, 20 bp, synthetic construct
  source 1..20: mol_type = other DNA
aaattgtggtattgtacctt

SEQ ID NO: 85432 - DNA, 20 bp, synthetic construct
  source 1..20: mol_type = other DNA
caaattgtggtattgtacct

SEQ ID NO: 85433 - DNA, 20 bp, synthetic construct
  source 1..20: mol_type = other DNA
acaaattgtggtattgtacc

SEQ ID NO: 85434 - DNA, 20 bp, synthetic construct
  source 1..20: mol_type = other DNA
aacaaattgtggtattgtac

SEQ ID NO: 85435 - DNA, 20 bp, synthetic construct
  source 1..20: mol_type = other DNA
gaacaaattgtggtattgta

SEQ ID NO: 85436 - DNA, 20 bp, synthetic construct
  source 1..20: mol_type = other DNA
tgaacaaattgtggtattgt

SEQ ID NO: 85437 - DNA, 20 bp, synthetic construct
  source 1..20: mol_type = other DNA
atgaacaaattgtggtattg

SEQ ID NO: 85438 - DNA, 20 bp, synthetic construct
  source 1..20: mol_type = other DNA
catgaacaaattgtggtatt

SEQ ID NO: 85439 - DNA, 20 bp, synthetic construct
  source 1..20: mol_type = other DNA
acatgaacaaattgtggtat

SEQ ID NO: 85440 - DNA, 20 bp, synthetic construct
  source 1..20: mol_type = other DNA
aacatgaacaaattgtggta

SEQ ID NO: 85441 - DNA, 20 bp, synthetic construct
  source 1..20: mol_type = other DNA
aaacatgaacaaattgtggt

SEQ ID NO: 85442 - DNA, 20 bp, synthetic construct
  source 1..20: mol_type = other DNA
aaaacatgaacaaattgtgg

SEQ ID NO: 85443 - DNA, 20 bp, synthetic construct
  source 1..20: mol_type = other DNA
aaaaacatgaacaaattgtg

SEQ ID NO: 85444 - DNA, 20 bp, synthetic construct
  source 1..20: mol_type = other DNA
caaaaacatgaacaaattgt

SEQ ID NO: 85445 - DNA, 20 bp, synthetic construct
  source 1..20: mol_type = other DNA
acaaaaacatgaacaaattg

SEQ ID NO: 85446 - DNA, 20 bp, synthetic construct
  source 1..20: mol_type = other DNA
aacaaaaacatgaacaaatt

SEQ ID NO: 85447 - DNA, 20 bp, synthetic construct
  source 1..20: mol_type = other DNA
aaacaaaaacatgaacaaat

SEQ ID NO: 85448 - DNA, 20 bp, synthetic construct
  source 1..20: mol_type = other DNA
caaacaaaaacatgaacaaa

SEQ ID NO: 85449 - DNA, 20 bp, synthetic construct
  source 1..20: mol_type = other DNA
acaaacaaaaacatgaacaa

SEQ ID NO: 85450 - DNA, 20 bp, synthetic construct
  source 1..20: mol_type = other DNA
gacaaacaaaaacatgaaca

SEQ ID NO: 85451 - DNA, 20 bp, synthetic construct
  source 1..20: mol_type = other DNA
agacaaacaaaaacatgaac

SEQ ID NO: 85452 - DNA, 20 bp, synthetic construct
  source 1..20: mol_type = other DNA
aagacaaacaaaaacatgaa

SEQ ID NO: 85453 - DNA, 20 bp, synthetic construct
  source 1..20: mol_type = other DNA
aaagacaaacaaaaacatga

SEQ ID NO: 85454 - DNA, 20 bp, synthetic construct
  source 1..20: mol_type = other DNA
caaagacaaacaaaaacatg

SEQ ID NO: 85455 - DNA, 20 bp, synthetic construct
  source 1..20: mol_type = other DNA
acaaagacaaacaaaaacat

SEQ ID NO: 85456 - DNA, 20 bp, synthetic construct
  source 1..20: mol_type = other DNA
aacaaagacaaacaaaaaca

SEQ ID NO: 85457 - DNA, 20 bp, synthetic construct
  source 1..20: mol_type = other DNA
aaacaaagacaaacaaaaac

SEQ ID NO: 85458 - DNA, 20 bp, synthetic construct
  source 1..20: mol_type = other DNA
taaacaaagacaaacaaaaa

SEQ ID NO: 85459 - DNA, 20 bp, synthetic construct
  source 1..20: mol_type = other DNA
ttaaacaaagacaaacaaaa

SEQ ID NO: 85460 - DNA, 20 bp, synthetic construct
  source 1..20: mol_type = other DNA
gttaaacaaagacaaacaaa

SEQ ID NO: 85461 - DNA, 20 bp, synthetic construct
  source 1..20: mol_type = other DNA
agttaaacaaagacaaacaa

SEQ ID NO: 85462 - DNA, 20 bp, synthetic construct
  source 1..20: mol_type = other DNA
gagttaaacaaagacaaaca

SEQ ID NO: 85463 - DNA, 20 bp, synthetic construct
  source 1..20: mol_type = other DNA
ggagttaaacaaagacaaac

SEQ ID NO: 85464 - DNA, 20 bp, synthetic construct
  source 1..20: mol_type = other DNA
aggagttaaacaaagacaaa

SEQ ID NO: 85465 - DNA, 20 bp, synthetic construct
  source 1..20: mol_type = other DNA
taggagttaaacaaagacaa

SEQ ID NO: 85466 - DNA, 20 bp, synthetic construct
  source 1..20: mol_type = other DNA
ataggagttaaacaaagaca

SEQ ID NO: 85467 - DNA, 20 bp, synthetic construct
  source 1..20: mol_type = other DNA
cataggagttaaacaaagac

SEQ ID NO: 85468 - DNA, 20 bp, synthetic construct
  source 1..20: mol_type = other DNA
acataggagttaaacaaaga

SEQ ID NO: 85469 - DNA, 20 bp, synthetic construct
  source 1..20: mol_type = other DNA
cacataggagttaaacaaag

SEQ ID NO: 85470 - DNA, 20 bp, synthetic construct
  source 1..20: mol_type = other DNA
tcacataggagttaaacaaa

SEQ ID NO: 85471 - DNA, 20 bp, synthetic construct
  source 1..20: mol_type = other DNA
ctcacataggagttaaacaa

SEQ ID NO: 85472 - DNA, 20 bp, synthetic construct
  source 1..20: mol_type = other DNA
actcacataggagttaaaca

SEQ ID NO: 85473 - DNA, 20 bp, synthetic construct
  source 1..20: mol_type = other DNA
aactcacataggagttaaac

SEQ ID NO: 85474 - DNA, 20 bp, synthetic construct
  source 1..20: mol_type = other DNA
aaactcacataggagttaaa

SEQ ID NO: 85475 - DNA, 20 bp, synthetic construct
  source 1..20: mol_type = other DNA
taaactcacataggagttaa

SEQ ID NO: 85476 - DNA, 20 bp, synthetic construct
  source 1..20: mol_type = other DNA
ataaactcacataggagtta

SEQ ID NO: 85477 - DNA, 20 bp, synthetic construct
  source 1..20: mol_type = other DNA
tataaactcacataggagtt

SEQ ID NO: 85478 - DNA, 20 bp, synthetic construct
  source 1..20: mol_type = other DNA
ttataaactcacataggagt

SEQ ID NO: 85479 - DNA, 20 bp, synthetic construct
  source 1..20: mol_type = other DNA
attataaactcacataggag

SEQ ID NO: 85480 - DNA, 20 bp, synthetic construct
  source 1..20: mol_type = other DNA
aattataaactcacatagga

SEQ ID NO: 85481 - DNA, 20 bp, synthetic construct
  source 1..20: mol_type = other DNA
taattataaactcacatagg

SEQ ID NO: 85482 - DNA, 20 bp, synthetic construct
  source 1..20: mol_type = other DNA
gtaattataaactcacatag

SEQ ID NO: 85483 - DNA, 20 bp, synthetic construct
  source 1..20: mol_type = other DNA
tgtaattataaactcacata

SEQ ID NO: 85484 - DNA, 20 bp, synthetic construct
  source 1..20: mol_type = other DNA
ttgtaattataaactcacat

SEQ ID NO: 85485 - DNA, 20 bp, synthetic construct
  source 1..20: mol_type = other DNA
tttgtaattataaactcaca

SEQ ID NO: 85486 - DNA, 20 bp, synthetic construct
  source 1..20: mol_type = other DNA
ttttgtaattataaactcac

SEQ ID NO: 85487 - DNA, 20 bp, synthetic construct
  source 1..20: mol_type = other DNA
attttgtaattataaactca

SEQ ID NO: 85488 - DNA, 20 bp, synthetic construct
  source 1..20: mol_type = other DNA
tattttgtaattataaactc

SEQ ID NO: 85489 - DNA, 20 bp, synthetic construct
  source 1..20: mol_type = other DNA
ctattttgtaattataaact

SEQ ID NO: 85490 - DNA, 20 bp, synthetic construct
  source 1..20: mol_type = other DNA
actattttgtaattataaac

SEQ ID NO: 85491 - DNA, 20 bp, synthetic construct
  source 1..20: mol_type = other DNA
aactattttgtaattataaa

SEQ ID NO: 85492 - DNA, 20 bp, synthetic construct
  source 1..20: mol_type = other DNA
aaactattttgtaattataa

SEQ ID NO: 85493 - DNA, 20 bp, synthetic construct
  source 1..20: mol_type = other DNA
gaaactattttgtaattata

SEQ ID NO: 85494 - DNA, 20 bp, synthetic construct
  source 1..20: mol_type = other DNA
ggaaactattttgtaattat

SEQ ID NO: 85495 - DNA, 20 bp, synthetic construct
  source 1..20: mol_type = other DNA
aggaaactattttgtaatta

SEQ ID NO: 85496 - DNA, 20 bp, synthetic construct
  source 1..20: mol_type = other DNA
gaggaaactattttgtaatt

SEQ ID NO: 85497 - DNA, 20 bp, synthetic construct
  source 1..20: mol_type = other DNA
agaggaaactattttgtaat

SEQ ID NO: 85498 - DNA, 20 bp, synthetic construct
  source 1..20: mol_type = other DNA
aagaggaaactattttgtaa

SEQ ID NO: 85499 - DNA, 20 bp, synthetic construct
  source 1..20: mol_type = other DNA
gaagaggaaactattttgta

SEQ ID NO: 85500 - DNA, 20 bp, synthetic construct
  source 1..20: mol_type = other DNA
tgaagaggaaactattttgt

SEQ ID NO: 85501 - DNA, 20 bp, synthetic construct
  source 1..20: mol_type = other DNA
atgaagaggaaactattttg

SEQ ID NO: 85502 - DNA, 20 bp, synthetic construct
  source 1..20: mol_type = other DNA
aatgaagaggaaactatttt

SEQ ID NO: 85503 - DNA, 20 bp, synthetic construct
  source 1..20: mol_type = other DNA
taatgaagaggaaactattt

SEQ ID NO: 85504 - DNA, 20 bp, synthetic construct
  source 1..20: mol_type = other DNA
ataatgaagaggaaactatt

SEQ ID NO: 85505 - DNA, 20 bp, synthetic construct
  source 1..20: mol_type = other DNA
aataatgaagaggaaactat

SEQ ID NO: 85506 - DNA, 20 bp, synthetic construct
  source 1..20: mol_type = other DNA
aaataatgaagaggaaacta

SEQ ID NO: 85507 - DNA, 20 bp, synthetic construct
  source 1..20: mol_type = other DNA
taaataatgaagaggaaact

SEQ ID NO: 85508 - DNA, 20 bp, synthetic construct
  source 1..20: mol_type = other DNA
ttaaataatgaagaggaaac

SEQ ID NO: 85509 - DNA, 20 bp, synthetic construct
  source 1..20: mol_type = other DNA
attaaataatgaagaggaaa

SEQ ID NO: 85510 - DNA, 20 bp, synthetic construct
  source 1..20: mol_type = other DNA
tattaaataatgaagaggaa

SEQ ID NO: 85511 - DNA, 20 bp, synthetic construct
  source 1..20: mol_type = other DNA
ttattaaataatgaagagga

SEQ ID NO: 85512 - DNA, 20 bp, synthetic construct
  source 1..20: mol_type = other DNA
gttattaaataatgaagagg

SEQ ID NO: 85513 - DNA, 20 bp, synthetic construct
  source 1..20: mol_type = other DNA
ggttattaaataatgaagag

SEQ ID NO: 85514 - DNA, 20 bp, synthetic construct
  source 1..20: mol_type = other DNA
aggttattaaataatgaaga

SEQ ID NO: 85515 - DNA, 20 bp, synthetic construct
  source 1..20: mol_type = other DNA
taggttattaaataatgaag

SEQ ID NO: 85516 - DNA, 20 bp, synthetic construct
  source 1..20: mol_type = other DNA
ataggttattaaataatgaa

SEQ ID NO: 85517 - DNA, 20 bp, synthetic construct
  source 1..20: mol_type = other DNA
tataggttattaaataatga

SEQ ID NO: 85518 - DNA, 20 bp, synthetic construct
  source 1..20: mol_type = other DNA
ttataggttattaaataatg

SEQ ID NO: 85519 - DNA, 20 bp, synthetic construct
  source 1..20: mol_type = other DNA
attataggttattaaataat

SEQ ID NO: 85520 - DNA, 20 bp, synthetic construct
  source 1..20: mol_type = other DNA
aattataggttattaaataa

SEQ ID NO: 85521 - DNA, 20 bp, synthetic construct
  source 1..20: mol_type = other DNA
aaattataggttattaaata

SEQ ID NO: 85522 - DNA, 20 bp, synthetic construct
  source 1..20: mol_type = other DNA
gaaattataggttattaaat

SEQ ID NO: 85523 - DNA, 20 bp, synthetic construct
  source 1..20: mol_type = other DNA
agaaattataggttattaaa

SEQ ID NO: 85524 - DNA, 20 bp, synthetic construct
  source 1..20: mol_type = other DNA
cagaaattataggttattaa

SEQ ID NO: 85525 - DNA, 20 bp, synthetic construct
  source 1..20: mol_type = other DNA
acagaaattataggttatta

SEQ ID NO: 85526 - DNA, 20 bp, synthetic construct
  source 1..20: mol_type = other DNA
cacagaaattataggttatt

SEQ ID NO: 85527 - DNA, 20 bp, synthetic construct
  source 1..20: mol_type = other DNA
acacagaaattataggttat

SEQ ID NO: 85528 - DNA, 20 bp, synthetic construct
  source 1..20: mol_type = other DNA
aacacagaaattataggtta

SEQ ID NO: 85529 - DNA, 20 bp, synthetic construct
  source 1..20: mol_type = other DNA
aaacacagaaattataggtt

SEQ ID NO: 85530 - DNA, 20 bp, synthetic construct
  source 1..20: mol_type = other DNA
aaaacacagaaattataggt

SEQ ID NO: 85531 - DNA, 20 bp, synthetic construct
  source 1..20: mol_type = other DNA
taaaacacagaaattatagg

SEQ ID NO: 85532 - DNA, 20 bp, synthetic construct
  source 1..20: mol_type = other DNA
ttaaaacacagaaattatag

SEQ ID NO: 85533 - DNA, 20 bp, synthetic construct
  source 1..20: mol_type = other DNA
gttaaaacacagaaattata

SEQ ID NO: 85534 - DNA, 20 bp, synthetic construct
  source 1..20: mol_type = other DNA
agttaaaacacagaaattat

SEQ ID NO: 85535 - DNA, 20 bp, synthetic construct
  source 1..20: mol_type = other DNA
aagttaaaacacagaaatta

SEQ ID NO: 85536 - DNA, 20 bp, synthetic construct
  source 1..20: mol_type = other DNA
aaagttaaaacacagaaatt

SEQ ID NO: 85537 - DNA, 20 bp, synthetic construct
  source 1..20: mol_type = other DNA
taaagttaaaacacagaaat

SEQ ID NO: 85538 - DNA, 20 bp, synthetic construct
  source 1..20: mol_type = other DNA
ctaaagttaaaacacagaaa

SEQ ID NO: 85539 - DNA, 20 bp, synthetic construct
  source 1..20: mol_type = other DNA
actaaagttaaaacacagaa

SEQ ID NO: 85540 - DNA, 20 bp, synthetic construct
  source 1..20: mol_type = other DNA
aactaaagttaaaacacaga

SEQ ID NO: 85541 - DNA, 20 bp, synthetic construct
  source 1..20: mol_type = other DNA
aaactaaagttaaaacacag

SEQ ID NO: 85542 - DNA, 20 bp, synthetic construct
  source 1..20: mol_type = other DNA
taaactaaagttaaaacaca

SEQ ID NO: 85543 - DNA, 20 bp, synthetic construct
  source 1..20: mol_type = other DNA
ataaactaaagttaaaacac

SEQ ID NO: 85544 - DNA, 20 bp, synthetic construct
  source 1..20: mol_type = other DNA
aataaactaaagttaaaaca

SEQ ID NO: 85545 - DNA, 20 bp, synthetic construct
  source 1..20: mol_type = other DNA
taataaactaaagttaaaac

SEQ ID NO: 85546 - DNA, 20 bp, synthetic construct
  source 1..20: mol_type = other DNA
ttaataaactaaagttaaaa

SEQ ID NO: 85547 - DNA, 20 bp, synthetic construct
  source 1..20: mol_type = other DNA
tttaataaactaaagttaaa

SEQ ID NO: 85548 - DNA, 20 bp, synthetic construct
  source 1..20: mol_type = other DNA
ttttaataaactaaagttaa

SEQ ID NO: 85549 - DNA, 20 bp, synthetic construct
  source 1..20: mol_type = other DNA
gttttaataaactaaagtta

SEQ ID NO: 85550 - DNA, 20 bp, synthetic construct
  source 1..20: mol_type = other DNA
agttttaataaactaaagtt

SEQ ID NO: 85551 - DNA, 20 bp, synthetic construct
  source 1..20: mol_type = other DNA
tagttttaataaactaaagt

SEQ ID NO: 85552 - DNA, 20 bp, synthetic construct
  source 1..20: mol_type = other DNA
atagttttaataaactaaag

SEQ ID NO: 85553 - DNA, 20 bp, synthetic construct
  source 1..20: mol_type = other DNA
aatagttttaataaactaaa

SEQ ID NO: 85554 - DNA, 20 bp, synthetic construct
  source 1..20: mol_type = other DNA
aaatagttttaataaactaa

SEQ ID NO: 85555 - DNA, 20 bp, synthetic construct
  source 1..20: mol_type = other DNA
gaaatagttttaataaacta

SEQ ID NO: 85556 - DNA, 20 bp, synthetic construct
  source 1..20: mol_type = other DNA
agaaatagttttaataaact

SEQ ID NO: 85557 - DNA, 20 bp, synthetic construct
  source 1..20: mol_type = other DNA
tagaaatagttttaataaac

SEQ ID NO: 85558 - DNA, 20 bp, synthetic construct
  source 1..20: mol_type = other DNA
atagaaatagttttaataaa

SEQ ID NO: 85559 - DNA, 20 bp, synthetic construct
  source 1..20: mol_type = other DNA
aatagaaatagttttaataa

SEQ ID NO: 85560 - DNA, 20 bp, synthetic construct
  source 1..20: mol_type = other DNA
taatagaaatagttttaata

SEQ ID NO: 85561 - DNA, 20 bp, synthetic construct
  source 1..20: mol_type = other DNA
ttaatagaaatagttttaat

SEQ ID NO: 85562 - DNA, 20 bp, synthetic construct
  source 1..20: mol_type = other DNA
gttaatagaaatagttttaa

SEQ ID NO: 85563 - DNA, 20 bp, synthetic construct
  source 1..20: mol_type = other DNA
ggttaatagaaatagtttta

SEQ ID NO: 85564 - DNA, 20 bp, synthetic construct
  source 1..20: mol_type = other DNA
aggttaatagaaatagtttt

SEQ ID NO: 85565 - DNA, 20 bp, synthetic construct
  source 1..20: mol_type = other DNA
aaggttaatagaaatagttt

SEQ ID NO: 85566 - DNA, 20 bp, synthetic construct
  source 1..20: mol_type = other DNA
aaaggttaatagaaatagtt

SEQ ID NO: 85567 - DNA, 20 bp, synthetic construct
  source 1..20: mol_type = other DNA
aaaaggttaatagaaatagt

SEQ ID NO: 85568 - DNA, 20 bp, synthetic construct
  source 1..20: mol_type = other DNA
caaaaggttaatagaaatag

SEQ ID NO: 85569 - DNA, 20 bp, synthetic construct
  source 1..20: mol_type = other DNA
acaaaaggttaatagaaata

SEQ ID NO: 85570 - DNA, 20 bp, synthetic construct
  source 1..20: mol_type = other DNA
aacaaaaggttaatagaaat

SEQ ID NO: 85571 - DNA, 20 bp, synthetic construct
  source 1..20: mol_type = other DNA
gaacaaaaggttaatagaaa

SEQ ID NO: 85572 - DNA, 20 bp, synthetic construct
  source 1..20: mol_type = other DNA
tgaacaaaaggttaatagaa

SEQ ID NO: 85573 - DNA, 20 bp, synthetic construct
  source 1..20: mol_type = other DNA
atgaacaaaaggttaataga

SEQ ID NO: 85574 - DNA, 20 bp, synthetic construct
  source 1..20: mol_type = other DNA
aatgaacaaaaggttaatag

SEQ ID NO: 85575 - DNA, 20 bp, synthetic construct
  source 1..20: mol_type = other DNA
taatgaacaaaaggttaata

SEQ ID NO: 85576 - DNA, 20 bp, synthetic construct
  source 1..20: mol_type = other DNA
ctaatgaacaaaaggttaat

SEQ ID NO: 85577 - DNA, 20 bp, synthetic construct
  source 1..20: mol_type = other DNA
tctaatgaacaaaaggttaa

SEQ ID NO: 85578 - DNA, 20 bp, synthetic construct
  source 1..20: mol_type = other DNA
ctctaatgaacaaaaggtta

SEQ ID NO: 85579 - DNA, 20 bp, synthetic construct
  source 1..20: mol_type = other DNA
tctctaatgaacaaaaggtt

SEQ ID NO: 85580 - DNA, 20 bp, synthetic construct
  source 1..20: mol_type = other DNA
ctctctaatgaacaaaaggt

SEQ ID NO: 85581 - DNA, 20 bp, synthetic construct
  source 1..20: mol_type = other DNA
tctctctaatgaacaaaagg

SEQ ID NO: 85582 - DNA, 20 bp, synthetic construct
  source 1..20: mol_type = other DNA
ttctctctaatgaacaaaag

SEQ ID NO: 85583 - DNA, 20 bp, synthetic construct
  source 1..20: mol_type = other DNA
tttctctctaatgaacaaaa

SEQ ID NO: 85584 - DNA, 20 bp, synthetic construct
  source 1..20: mol_type = other DNA
atttctctctaatgaacaaa

SEQ ID NO: 85585 - DNA, 20 bp, synthetic construct
  source 1..20: mol_type = other DNA
aatttctctctaatgaacaa

SEQ ID NO: 85586 - DNA, 20 bp, synthetic construct
  source 1..20: mol_type = other DNA
aaatttctctctaatgaaca

SEQ ID NO: 85587 - DNA, 20 bp, synthetic construct
  source 1..20: mol_type = other DNA
caaatttctctctaatgaac

SEQ ID NO: 85588 - DNA, 20 bp, synthetic construct
  source 1..20: mol_type = other DNA
tcaaatttctctctaatgaa

SEQ ID NO: 85589 - DNA, 20 bp, synthetic construct
  source 1..20: mol_type = other DNA
atcaaatttctctctaatga

SEQ ID NO: 85590 - DNA, 20 bp, synthetic construct
  source 1..20: mol_type = other DNA
tatcaaatttctctctaatg

SEQ ID NO: 85591 - DNA, 20 bp, synthetic construct
  source 1..20: mol_type = other DNA
ttatcaaatttctctctaat

SEQ ID NO: 85592 - DNA, 20 bp, synthetic construct
  source 1..20: mol_type = other DNA
tttatcaaatttctctctaa

SEQ ID NO: 85593 - DNA, 20 bp, synthetic construct
  source 1..20: mol_type = other DNA
atttatcaaatttctctcta

SEQ ID NO: 85594 - DNA, 20 bp, synthetic construct
  source 1..20: mol_type = other DNA
catttatcaaatttctctct

SEQ ID NO: 85595 - DNA, 20 bp, synthetic construct
  source 1..20: mol_type = other DNA
acatttatcaaatttctctc

SEQ ID NO: 85596 - DNA, 20 bp, synthetic construct
  source 1..20: mol_type = other DNA
cacatttatcaaatttctct

SEQ ID NO: 85597 - DNA, 20 bp, synthetic construct
  source 1..20: mol_type = other DNA
acacatttatcaaatttctc

SEQ ID NO: 85598 - DNA, 20 bp, synthetic construct
  source 1..20: mol_type = other DNA
cacacatttatcaaatttct

SEQ ID NO: 85599 - DNA, 20 bp, synthetic construct
  source 1..20: mol_type = other DNA
tcacacatttatcaaatttc

SEQ ID NO: 85600 - DNA, 20 bp, synthetic construct
  source 1..20: mol_type = other DNA
ttcacacatttatcaaattt

SEQ ID NO: 85601 - DNA, 20 bp, synthetic construct
  source 1..20: mol_type = other DNA
cttcacacatttatcaaatt

SEQ ID NO: 85602 - DNA, 20 bp, synthetic construct
  source 1..20: mol_type = other DNA
gcttcacacatttatcaaat

SEQ ID NO: 85603 - DNA, 20 bp, synthetic construct
  source 1..20: mol_type = other DNA
agcttcacacatttatcaaa

SEQ ID NO: 85604 - DNA, 20 bp, synthetic construct
  source 1..20: mol_type = other DNA
tagcttcacacatttatcaa

SEQ ID NO: 85605 - DNA, 20 bp, synthetic construct
  source 1..20: mol_type = other DNA
atagcttcacacatttatca

SEQ ID NO: 85606 - DNA, 20 bp, synthetic construct
  source 1..20: mol_type = other DNA
tatagcttcacacatttatc

SEQ ID NO: 85607 - DNA, 20 bp, synthetic construct
  source 1..20: mol_type = other DNA
ttatagcttcacacatttat

SEQ ID NO: 85608 - DNA, 20 bp, synthetic construct
  source 1..20: mol_type = other DNA
tttatagcttcacacattta

SEQ ID NO: 85609 - DNA, 20 bp, synthetic construct
  source 1..20: mol_type = other DNA
gtttatagcttcacacattt

SEQ ID NO: 85610 - DNA, 20 bp, synthetic construct
  source 1..20: mol_type = other DNA
agtttatagcttcacacatt

SEQ ID NO: 85611 - DNA, 20 bp, synthetic construct
  source 1..20: mol_type = other DNA
gagtttatagcttcacacat

SEQ ID NO: 85612 - DNA, 20 bp, synthetic construct
  source 1..20: mol_type = other DNA
agagtttatagcttcacaca

SEQ ID NO: 85613 - DNA, 20 bp, synthetic construct
  source 1..20: mol_type = other DNA
gagagtttatagcttcacac

SEQ ID NO: 85614 - DNA, 20 bp, synthetic construct
  source 1..20: mol_type = other DNA
agagagtttatagcttcaca

SEQ ID NO: 85615 - DNA, 20 bp, synthetic construct
  source 1..20: mol_type = other DNA
aagagagtttatagcttcac

SEQ ID NO: 85616 - DNA, 20 bp, synthetic construct
  source 1..20: mol_type = other DNA
caagagagtttatagcttca

SEQ ID NO: 85617 - DNA, 20 bp, synthetic construct
  source 1..20: mol_type = other DNA
tcaagagagtttatagcttc

SEQ ID NO: 85618 - DNA, 20 bp, synthetic construct
  source 1..20: mol_type = other DNA
ttcaagagagtttatagctt

SEQ ID NO: 85619 - DNA, 20 bp, synthetic construct
  source 1..20: mol_type = other DNA
attcaagagagtttatagct

SEQ ID NO: 85620 - DNA, 20 bp, synthetic construct
  source 1..20: mol_type = other DNA
aattcaagagagtttatagc

SEQ ID NO: 85621 - DNA, 20 bp, synthetic construct
  source 1..20: mol_type = other DNA
caattcaagagagtttatag

SEQ ID NO: 85622 - DNA, 20 bp, synthetic construct
  source 1..20: mol_type = other DNA
acaattcaagagagtttata

SEQ ID NO: 85623 - DNA, 20 bp, synthetic construct
  source 1..20: mol_type = other DNA
aacaattcaagagagtttat

SEQ ID NO: 85624 - DNA, 20 bp, synthetic construct
  source 1..20: mol_type = other DNA
caacaattcaagagagttta

SEQ ID NO: 85625 - DNA, 20 bp, synthetic construct
  source 1..20: mol_type = other DNA
acaacaattcaagagagttt

SEQ ID NO: 85626 - DNA, 20 bp, synthetic construct
  source 1..20: mol_type = other DNA
aacaacaattcaagagagtt

SEQ ID NO: 85627 - DNA, 20 bp, synthetic construct
  source 1..20: mol_type = other DNA
taacaacaattcaagagagt

SEQ ID NO: 85628 - DNA, 20 bp, synthetic construct
  source 1..20: mol_type = other DNA
ttaacaacaattcaagagag

SEQ ID NO: 85629 - DNA, 20 bp, synthetic construct
  source 1..20: mol_type = other DNA
tttaacaacaattcaagaga

SEQ ID NO: 85630 - DNA, 20 bp, synthetic construct
  source 1..20: mol_type = other DNA
ttttaacaacaattcaagag

SEQ ID NO: 85631 - DNA, 20 bp, synthetic construct
  source 1..20: mol_type = other DNA
tttttaacaacaattcaaga

SEQ ID NO: 85632 - DNA, 20 bp, synthetic construct
  source 1..20: mol_type = other DNA
ctttttaacaacaattcaag

SEQ ID NO: 85633 - DNA, 20 bp, synthetic construct
  source 1..20: mol_type = other DNA
cctttttaacaacaattcaa

SEQ ID NO: 85634 - DNA, 20 bp, synthetic construct
  source 1..20: mol_type = other DNA
ccctttttaacaacaattca

SEQ ID NO: 85635 - DNA, 20 bp, synthetic construct
  source 1..20: mol_type = other DNA
cccctttttaacaacaattc

SEQ ID NO: 85636 - DNA, 20 bp, synthetic construct
  source 1..20: mol_type = other DNA
ccccctttttaacaacaatt

SEQ ID NO: 85637 - DNA, 20 bp, synthetic construct
  source 1..20: mol_type = other DNA
accccctttttaacaacaat

SEQ ID NO: 85638 - DNA, 20 bp, synthetic construct
  source 1..20: mol_type = other DNA
aaccccctttttaacaacaa

SEQ ID NO: 85639 - DNA, 20 bp, synthetic construct
  source 1..20: mol_type = other DNA
aaaccccctttttaacaaca

SEQ ID NO: 85640 - DNA, 20 bp, synthetic construct
  source 1..20: mol_type = other DNA
taaaccccctttttaacaac

SEQ ID NO: 85641 - DNA, 20 bp, synthetic construct
  source 1..20: mol_type = other DNA
ataaaccccctttttaacaa

SEQ ID NO: 85642 - DNA, 20 bp, synthetic construct
  source 1..20: mol_type = other DNA
gataaaccccctttttaaca

SEQ ID NO: 85643 - DNA, 20 bp, synthetic construct
  source 1..20: mol_type = other DNA
agataaaccccctttttaac

SEQ ID NO: 85644 - DNA, 20 bp, synthetic construct
  source 1..20: mol_type = other DNA
gagataaaccccctttttaa

SEQ ID NO: 85645 - DNA, 20 bp, synthetic construct
  source 1..20: mol_type = other DNA
agagataaacccccttttta

SEQ ID NO: 85646 - DNA, 20 bp, synthetic construct
  source 1..20: mol_type = other DNA
cagagataaacccccttttt

SEQ ID NO: 85647 - DNA, 20 bp, synthetic construct
  source 1..20: mol_type = other DNA
gcagagataaaccccctttt

SEQ ID NO: 85648 - DNA, 20 bp, synthetic construct
  source 1..20: mol_type = other DNA
ggcagagataaacccccttt

SEQ ID NO: 85649 - DNA, 20 bp, synthetic construct
  source 1..20: mol_type = other DNA
aggcagagataaaccccctt

SEQ ID NO: 85650 - DNA, 20 bp, synthetic construct
  source 1..20: mol_type = other DNA
caggcagagataaaccccct

SEQ ID NO: 85651 - DNA, 20 bp, synthetic construct
  source 1..20: mol_type = other DNA
tcaggcagagataaaccccc

SEQ ID NO: 85652 - DNA, 20 bp, synthetic construct
  source 1..20: mol_type = other DNA
atcaggcagagataaacccc

SEQ ID NO: 85653 - DNA, 20 bp, synthetic construct
  source 1..20: mol_type = other DNA
tatcaggcagagataaaccc

SEQ ID NO: 85654 - DNA, 20 bp, synthetic construct
  source 1..20: mol_type = other DNA
ttatcaggcagagataaacc

SEQ ID NO: 85655 - DNA, 20 bp, synthetic construct
  source 1..20: mol_type = other DNA
attatcaggcagagataaac

SEQ ID NO: 85656 - DNA, 20 bp, synthetic construct
  source 1..20: mol_type = other DNA
aattatcaggcagagataaa

SEQ ID NO: 85657 - DNA, 20 bp, synthetic construct
  source 1..20: mol_type = other DNA
taattatcaggcagagataa

SEQ ID NO: 85658 - DNA, 20 bp, synthetic construct
  source 1..20: mol_type = other DNA
ataattatcaggcagagata

SEQ ID NO: 85659 - DNA, 20 bp, synthetic construct
  source 1..20: mol_type = other DNA
cataattatcaggcagagat

SEQ ID NO: 85660 - DNA, 20 bp, synthetic construct
  source 1..20: mol_type = other DNA
gcataattatcaggcagaga

SEQ ID NO: 85661 - DNA, 20 bp, synthetic construct
  source 1..20: mol_type = other DNA
agcataattatcaggcagag

SEQ ID NO: 85662 - DNA, 20 bp, synthetic construct
  source 1..20: mol_type = other DNA
aagcataattatcaggcaga

SEQ ID NO: 85663 - DNA, 20 bp, synthetic construct
  source 1..20: mol_type = other DNA
gaagcataattatcaggcag

SEQ ID NO: 85664 - DNA, 20 bp, synthetic construct
  source 1..20: mol_type = other DNA
agaagcataattatcaggca

SEQ ID NO: 85665 - DNA, 20 bp, synthetic construct
  source 1..20: mol_type = other DNA
aagaagcataattatcaggc

SEQ ID NO: 85666 - DNA, 20 bp, synthetic construct
  source 1..20: mol_type = other DNA
aaagaagcataattatcagg

SEQ ID NO: 85667 - DNA, 20 bp, synthetic construct
  source 1..20: mol_type = other DNA
taaagaagcataattatcag

SEQ ID NO: 85668 - DNA, 20 bp, synthetic construct
  source 1..20: mol_type = other DNA
gtaaagaagcataattatca

SEQ ID NO: 85669 - DNA, 20 bp, synthetic construct
  source 1..20: mol_type = other DNA
tgtaaagaagcataattatc

SEQ ID NO: 85670 - DNA, 20 bp, synthetic construct
  source 1..20: mol_type = other DNA
ctgtaaagaagcataattat

SEQ ID NO: 85671 - DNA, 20 bp, synthetic construct
  source 1..20: mol_type = other DNA
gctgtaaagaagcataatta

SEQ ID NO: 85672 - DNA, 20 bp, synthetic construct
  source 1..20: mol_type = other DNA
ggctgtaaagaagcataatt

SEQ ID NO: 85673 - DNA, 20 bp, synthetic construct
  source 1..20: mol_type = other DNA
gggctgtaaagaagcataat

SEQ ID NO: 85674 - DNA, 20 bp, synthetic construct
  source 1..20: mol_type = other DNA
ggggctgtaaagaagcataa

SEQ ID NO: 85675 - DNA, 20 bp, synthetic construct
  source 1..20: mol_type = other DNA
tggggctgtaaagaagcata

SEQ ID NO: 85676 - DNA, 20 bp, synthetic construct
  source 1..20: mol_type = other DNA
ctggggctgtaaagaagcat

SEQ ID NO: 85677 - DNA, 20 bp, synthetic construct
  source 1..20: mol_type = other DNA
tctggggctgtaaagaagca

SEQ ID NO: 85678 - DNA, 20 bp, synthetic construct
  source 1..20: mol_type = other DNA
ttctggggctgtaaagaagc

SEQ ID NO: 85679 - DNA, 20 bp, synthetic construct
  source 1..20: mol_type = other DNA
cttctggggctgtaaagaag

SEQ ID NO: 85680 - DNA, 20 bp, synthetic construct
  source 1..20: mol_type = other DNA
ccttctggggctgtaaagaa

SEQ ID NO: 85681 - DNA, 20 bp, synthetic construct
  source 1..20: mol_type = other DNA
cccttctggggctgtaaaga

SEQ ID NO: 85682 - DNA, 20 bp, synthetic construct
  source 1..20: mol_type = other DNA
acccttctggggctgtaaag

SEQ ID NO: 85683 - DNA, 20 bp, synthetic construct
  source 1..20: mol_type = other DNA
gacccttctggggctgtaaa

SEQ ID NO: 85684 - DNA, 20 bp, synthetic construct
  source 1..20: mol_type = other DNA
agacccttctggggctgtaa

SEQ ID NO: 85685 - DNA, 20 bp, synthetic construct
  source 1..20: mol_type = other DNA
cagacccttctggggctgta

SEQ ID NO: 85686 - DNA, 20 bp, synthetic construct
  source 1..20: mol_type = other DNA
gcagacccttctggggctgt

SEQ ID NO: 85687 - DNA, 20 bp, synthetic construct
  source 1..20: mol_type = other DNA
ggcagacccttctggggctg

SEQ ID NO: 85688 - DNA, 20 bp, synthetic construct
  source 1..20: mol_type = other DNA
gggcagacccttctggggct

SEQ ID NO: 85689 - DNA, 20 bp, synthetic construct
  source 1..20: mol_type = other DNA
ggggcagacccttctggggc

SEQ ID NO: 85690 - DNA, 20 bp, synthetic construct
  source 1..20: mol_type = other DNA
tggggcagacccttctgggg

SEQ ID NO: 85691 - DNA, 20 bp, synthetic construct
  source 1..20: mol_type = other DNA
gtggggcagacccttctggg

SEQ ID NO: 85692 - DNA, 20 bp, synthetic construct
  source 1..20: mol_type = other DNA
tgtggggcagacccttctgg

SEQ ID NO: 85693 - DNA, 20 bp, synthetic construct
  source 1..20: mol_type = other DNA
ctgtggggcagacccttctg

SEQ ID NO: 85694 - DNA, 20 bp, synthetic construct
  source 1..20: mol_type = other DNA
gctgtggggcagacccttct

SEQ ID NO: 85695 - DNA, 20 bp, synthetic construct
  source 1..20: mol_type = other DNA
ggctgtggggcagacccttc

SEQ ID NO: 85696 - DNA, 20 bp, synthetic construct
  source 1..20: mol_type = other DNA
aggctgtggggcagaccctt

SEQ ID NO: 85697 - DNA, 20 bp, synthetic construct
  source 1..20: mol_type = other DNA
aaggctgtggggcagaccct

SEQ ID NO: 85698 - DNA, 20 bp, synthetic construct
  source 1..20: mol_type = other DNA
gaaggctgtggggcagaccc

SEQ ID NO: 85699 - DNA, 20 bp, synthetic construct
  source 1..20: mol_type = other DNA
ggaaggctgtggggcagacc

SEQ ID NO: 85700 - DNA, 20 bp, synthetic construct
  source 1..20: mol_type = other DNA
gggaaggctgtggggcagac

SEQ ID NO: 85701 - DNA, 20 bp, synthetic construct
  source 1..20: mol_type = other DNA
ggggaaggctgtggggcaga

SEQ ID NO: 85702 - DNA, 20 bp, synthetic construct
  source 1..20: mol_type = other DNA
gggggaaggctgtggggcag

SEQ ID NO: 85703 - DNA, 20 bp, synthetic construct
  source 1..20: mol_type = other DNA
agggggaaggctgtggggca

SEQ ID NO: 85704 - DNA, 20 bp, synthetic construct
  source 1..20: mol_type = other DNA
gagggggaaggctgtggggc

SEQ ID NO: 85705 - DNA, 20 bp, synthetic construct
  source 1..20: mol_type = other DNA
ggagggggaaggctgtgggg

SEQ ID NO: 85706 - DNA, 20 bp, synthetic construct
  source 1..20: mol_type = other DNA
aggagggggaaggctgtggg

SEQ ID NO: 85707 - DNA, 20 bp, synthetic construct
  source 1..20: mol_type = other DNA
aaggagggggaaggctgtgg

SEQ ID NO: 85708 - DNA, 20 bp, synthetic construct
  source 1..20: mol_type = other DNA
taaggagggggaaggctgtg

SEQ ID NO: 85709 - DNA, 20 bp, synthetic construct
  source 1..20: mol_type = other DNA
ataaggagggggaaggctgt

SEQ ID NO: 85710 - DNA, 20 bp, synthetic construct
  source 1..20: mol_type = other DNA
aataaggagggggaaggctg

SEQ ID NO: 85711 - DNA, 20 bp, synthetic construct
  source 1..20: mol_type = other DNA
aaataaggagggggaaggct

SEQ ID NO: 85712 - DNA, 20 bp, synthetic construct
  source 1..20: mol_type = other DNA
caaataaggagggggaaggc

SEQ ID NO: 85713 - DNA, 20 bp, synthetic construct
  source 1..20: mol_type = other DNA
gcaaataaggagggggaagg

SEQ ID NO: 85714 - DNA, 20 bp, synthetic construct
  source 1..20: mol_type = other DNA
tgcaaataaggagggggaag

SEQ ID NO: 85715 - DNA, 20 bp, synthetic construct
  source 1..20: mol_type = other DNA
gtgcaaataaggagggggaa

SEQ ID NO: 85716 - DNA, 20 bp, synthetic construct
  source 1..20: mol_type = other DNA
agtgcaaataaggaggggga

SEQ ID NO: 85717 - DNA, 20 bp, synthetic construct
  source 1..20: mol_type = other DNA
cagtgcaaataaggaggggg

SEQ ID NO: 85718 - DNA, 20 bp, synthetic construct
  source 1..20: mol_type = other DNA
acagtgcaaataaggagggg

SEQ ID NO: 85719 - DNA, 20 bp, synthetic construct
  source 1..20: mol_type = other DNA
tacagtgcaaataaggaggg

SEQ ID NO: 85720 - DNA, 20 bp, synthetic construct
  source 1..20: mol_type = other DNA
atacagtgcaaataaggagg

SEQ ID NO: 85721 - DNA, 20 bp, synthetic construct
  source 1..20: mol_type = other DNA
tatacagtgcaaataaggag

SEQ ID NO: 85722 - DNA, 20 bp, synthetic construct
  source 1..20: mol_type = other DNA
gtatacagtgcaaataagga

SEQ ID NO: 85723 - DNA, 20 bp, synthetic construct
  source 1..20: mol_type = other DNA
tgtatacagtgcaaataagg

SEQ ID NO: 85724 - DNA, 20 bp, synthetic construct
  source 1..20: mol_type = other DNA
ctgtatacagtgcaaataag

SEQ ID NO: 85725 - DNA, 20 bp, synthetic construct
  source 1..20: mol_type = other DNA
actgtatacagtgcaaataa

SEQ ID NO: 85726 - DNA, 20 bp, synthetic construct
  source 1..20: mol_type = other DNA
tactgtatacagtgcaaata

SEQ ID NO: 85727 - DNA, 20 bp, synthetic construct
  source 1..20: mol_type = other DNA
ctactgtatacagtgcaaat

SEQ ID NO: 85728 - DNA, 20 bp, synthetic construct
  source 1..20: mol_type = other DNA
actactgtatacagtgcaaa

SEQ ID NO: 85729 - DNA, 20 bp, synthetic construct
  source 1..20: mol_type = other DNA
aactactgtatacagtgcaa

SEQ ID NO: 85730 - DNA, 20 bp, synthetic construct
  source 1..20: mol_type = other DNA
taactactgtatacagtgca

SEQ ID NO: 85731 - DNA, 20 bp, synthetic construct
  source 1..20: mol_type = other DNA
ttaactactgtatacagtgc

SEQ ID NO: 85732 - DNA, 20 bp, synthetic construct
  source 1..20: mol_type = other DNA
tttaactactgtatacagtg

SEQ ID NO: 85733 - DNA, 20 bp, synthetic construct
  source 1..20: mol_type = other DNA
gtttaactactgtatacagt

SEQ ID NO: 85734 - DNA, 20 bp, synthetic construct
  source 1..20: mol_type = other DNA
tgtttaactactgtatacag

SEQ ID NO: 85735 - DNA, 20 bp, synthetic construct
  source 1..20: mol_type = other DNA
ttgtttaactactgtataca

SEQ ID NO: 85736 - DNA, 20 bp, synthetic construct
  source 1..20: mol_type = other DNA
tttgtttaactactgtatac

SEQ ID NO: 85737 - DNA, 20 bp, synthetic construct
  source 1..20: mol_type = other DNA
atttgtttaactactgtata

SEQ ID NO: 85738 - DNA, 20 bp, synthetic construct
  source 1..20: mol_type = other DNA
catttgtttaactactgtat

SEQ ID NO: 85739 - DNA, 20 bp, synthetic construct
  source 1..20: mol_type = other DNA
tcatttgtttaactactgta

SEQ ID NO: 85740 - DNA, 20 bp, synthetic construct
  source 1..20: mol_type = other DNA
ttcatttgtttaactactgt

SEQ ID NO: 85741 - DNA, 20 bp, synthetic construct
  source 1..20: mol_type = other DNA
gttcatttgtttaactactg

SEQ ID NO: 85742 - DNA, 20 bp, synthetic construct
  source 1..20: mol_type = other DNA
agttcatttgtttaactact

SEQ ID NO: 85743 - DNA, 20 bp, synthetic construct
  source 1..20: mol_type = other DNA
aagttcatttgtttaactac

SEQ ID NO: 85744 - DNA, 20 bp, synthetic construct
  source 1..20: mol_type = other DNA
aaagttcatttgtttaacta

SEQ ID NO: 85745 - DNA, 20 bp, synthetic construct
  source 1..20: mol_type = other DNA
gaaagttcatttgtttaact

SEQ ID NO: 85746 - DNA, 20 bp, synthetic construct
  source 1..20: mol_type = other DNA
agaaagttcatttgtttaac

SEQ ID NO: 85747 - DNA, 20 bp, synthetic construct
  source 1..20: mol_type = other DNA
aagaaagttcatttgtttaa

SEQ ID NO: 85748 - DNA, 20 bp, synthetic construct
  source 1..20: mol_type = other DNA
gaagaaagttcatttgttta

SEQ ID NO: 85749 - DNA, 20 bp, synthetic construct
  source 1..20: mol_type = other DNA
tgaagaaagttcatttgttt

SEQ ID NO: 85750 - DNA, 20 bp, synthetic construct
  source 1..20: mol_type = other DNA
ctgaagaaagttcatttgtt

SEQ ID NO: 85751 - DNA, 20 bp, synthetic construct
  source 1..20: mol_type = other DNA
gctgaagaaagttcatttgt

SEQ ID NO: 85752 - DNA, 20 bp, synthetic construct
  source 1..20: mol_type = other DNA
ggctgaagaaagttcatttg

SEQ ID NO: 85753 - DNA, 20 bp, synthetic construct
  source 1..20: mol_type = other DNA
tggctgaagaaagttcattt

SEQ ID NO: 85754 - DNA, 20 bp, synthetic construct
  source 1..20: mol_type = other DNA
ctggctgaagaaagttcatt

SEQ ID NO: 85755 - DNA, 20 bp, synthetic construct
  source 1..20: mol_type = other DNA
actggctgaagaaagttcat

SEQ ID NO: 85756 - DNA, 20 bp, synthetic construct
  source 1..20: mol_type = other DNA
gactggctgaagaaagttca

SEQ ID NO: 85757 - DNA, 20 bp, synthetic construct
  source 1..20: mol_type = other DNA
agactggctgaagaaagttc

SEQ ID NO: 85758 - DNA, 20 bp, synthetic construct
  source 1..20: mol_type = other DNA
aagactggctgaagaaagtt

SEQ ID NO: 85759 - DNA, 20 bp, synthetic construct
  source 1..20: mol_type = other DNA
caagactggctgaagaaagt

SEQ ID NO: 85760 - DNA, 20 bp, synthetic construct
  source 1..20: mol_type = other DNA
tcaagactggctgaagaaag

SEQ ID NO: 85761 - DNA, 20 bp, synthetic construct
  source 1..20: mol_type = other DNA
ttcaagactggctgaagaaa

SEQ ID NO: 85762 - DNA, 20 bp, synthetic construct
  source 1..20: mol_type = other DNA
gttcaagactggctgaagaa

SEQ ID NO: 85763 - DNA, 20 bp, synthetic construct
  source 1..20: mol_type = other DNA
agttcaagactggctgaaga

SEQ ID NO: 85764 - DNA, 20 bp, synthetic construct
  source 1..20: mol_type = other DNA
aagttcaagactggctgaag

SEQ ID NO: 85765 - DNA, 20 bp, synthetic construct
  source 1..20: mol_type = other DNA
taagttcaagactggctgaa

SEQ ID NO: 85766 - DNA, 20 bp, synthetic construct
  source 1..20: mol_type = other DNA
ctaagttcaagactggctga

SEQ ID NO: 85767 - DNA, 20 bp, synthetic construct
  source 1..20: mol_type = other DNA
cctaagttcaagactggctg

SEQ ID NO: 85768 - DNA, 20 bp, synthetic construct
  source 1..20: mol_type = other DNA
acctaagttcaagactggct

SEQ ID NO: 85769 - DNA, 20 bp, synthetic construct
  source 1..20: mol_type = other DNA
aacctaagttcaagactggc

SEQ ID NO: 85770 - DNA, 20 bp, synthetic construct
  source 1..20: mol_type = other DNA
gaacctaagttcaagactgg

SEQ ID NO: 85771 - DNA, 20 bp, synthetic construct
  source 1..20: mol_type = other DNA
tgaacctaagttcaagactg

SEQ ID NO: 85772 - DNA, 20 bp, synthetic construct
  source 1..20: mol_type = other DNA
atgaacctaagttcaagact

SEQ ID NO: 85773 - DNA, 20 bp, synthetic construct
  source 1..20: mol_type = other DNA
aatgaacctaagttcaagac

SEQ ID NO: 85774 - DNA, 20 bp, synthetic construct
  source 1..20: mol_type = other DNA
aaatgaacctaagttcaaga

SEQ ID NO: 85775 - DNA, 20 bp, synthetic construct
  source 1..20: mol_type = other DNA
aaaatgaacctaagttcaag

SEQ ID NO: 85776 - DNA, 20 bp, synthetic construct
  source 1..20: mol_type = other DNA
taaaatgaacctaagttcaa

SEQ ID NO: 85777 - DNA, 20 bp, synthetic construct
  source 1..20: mol_type = other DNA
gtaaaatgaacctaagttca

SEQ ID NO: 85778 - DNA, 20 bp, synthetic construct
  source 1..20: mol_type = other DNA
tgtaaaatgaacctaagttc

SEQ ID NO: 85779 - DNA, 20 bp, synthetic construct
  source 1..20: mol_type = other DNA
ctgtaaaatgaacctaagtt

SEQ ID NO: 85780 - DNA, 20 bp, synthetic construct
  source 1..20: mol_type = other DNA
gctgtaaaatgaacctaagt

SEQ ID NO: 85781 - DNA, 20 bp, synthetic construct
  source 1..20: mol_type = other DNA
agctgtaaaatgaacctaag

SEQ ID NO: 85782 - DNA, 20 bp, synthetic construct
  source 1..20: mol_type = other DNA
gagctgtaaaatgaacctaa

SEQ ID NO: 85783 - DNA, 20 bp, synthetic construct
  source 1..20: mol_type = other DNA
agagctgtaaaatgaaccta

SEQ ID NO: 85784 - DNA, 20 bp, synthetic construct
  source 1..20: mol_type = other DNA
aagagctgtaaaatgaacct

SEQ ID NO: 85785 - DNA, 20 bp, synthetic construct
  source 1..20: mol_type = other DNA
aaagagctgtaaaatgaacc

SEQ ID NO: 85786 - DNA, 20 bp, synthetic construct
  source 1..20: mol_type = other DNA
caaagagctgtaaaatgaac

SEQ ID NO: 85787 - DNA, 20 bp, synthetic construct
  source 1..20: mol_type = other DNA
ccaaagagctgtaaaatgaa

SEQ ID NO: 85788 - DNA, 20 bp, synthetic construct
  source 1..20: mol_type = other DNA
gccaaagagctgtaaaatga

SEQ ID NO: 85789 - DNA, 20 bp, synthetic construct
  source 1..20: mol_type = other DNA
ggccaaagagctgtaaaatg

SEQ ID NO: 85790 - DNA, 20 bp, synthetic construct
  source 1..20: mol_type = other DNA
tggccaaagagctgtaaaat

SEQ ID NO: 85791 - DNA, 20 bp, synthetic construct
  source 1..20: mol_type = other DNA
ttggccaaagagctgtaaaa

SEQ ID NO: 85792 - DNA, 20 bp, synthetic construct
  source 1..20: mol_type = other DNA
cttggccaaagagctgtaaa

SEQ ID NO: 85793 - DNA, 20 bp, synthetic construct
  source 1..20: mol_type = other DNA
ccttggccaaagagctgtaa

SEQ ID NO: 85794 - DNA, 20 bp, synthetic construct
  source 1..20: mol_type = other DNA
accttggccaaagagctgta

SEQ ID NO: 85795 - DNA, 20 bp, synthetic construct
  source 1..20: mol_type = other DNA
gaccttggccaaagagctgt

SEQ ID NO: 85796 - DNA, 20 bp, synthetic construct
  source 1..20: mol_type = other DNA
ggaccttggccaaagagctg

SEQ ID NO: 85797 - DNA, 20 bp, synthetic construct
  source 1..20: mol_type = other DNA
aggaccttggccaaagagct

SEQ ID NO: 85798 - DNA, 20 bp, synthetic construct
  source 1..20: mol_type = other DNA
taggaccttggccaaagagc

SEQ ID NO: 85799 - DNA, 20 bp, synthetic construct
  source 1..20: mol_type = other DNA
ctaggaccttggccaaagag

SEQ ID NO: 85800 - DNA, 20 bp, synthetic construct
  source 1..20: mol_type = other DNA
actaggaccttggccaaaga

SEQ ID NO: 85801 - DNA, 20 bp, synthetic construct
  source 1..20: mol_type = other DNA
cactaggaccttggccaaag

SEQ ID NO: 85802 - DNA, 20 bp, synthetic construct
  source 1..20: mol_type = other DNA
tcactaggaccttggccaaa

SEQ ID NO: 85803 - DNA, 20 bp, synthetic construct
  source 1..20: mol_type = other DNA
ttcactaggaccttggccaa

SEQ ID NO: 85804 - DNA, 20 bp, synthetic construct
  source 1..20: mol_type = other DNA
gttcactaggaccttggcca

SEQ ID NO: 85805 - DNA, 20 bp, synthetic construct
  source 1..20: mol_type = other DNA
ggttcactaggaccttggcc

SEQ ID NO: 85806 - DNA, 20 bp, synthetic construct
  source 1..20: mol_type = other DNA
aggttcactaggaccttggc

SEQ ID NO: 85807 - DNA, 20 bp, synthetic construct
  source 1..20: mol_type = other DNA
aaggttcactaggaccttgg

SEQ ID NO: 85808 - DNA, 20 bp, synthetic construct
  source 1..20: mol_type = other DNA
gaaggttcactaggaccttg

SEQ ID NO: 85809 - DNA, 20 bp, synthetic construct
  source 1..20: mol_type = other DNA
ggaaggttcactaggacctt

SEQ ID NO: 85810 - DNA, 20 bp, synthetic construct
  source 1..20: mol_type = other DNA
aggaaggttcactaggacct

SEQ ID NO: 85811 - DNA, 20 bp, synthetic construct
  source 1..20: mol_type = other DNA
taggaaggttcactaggacc

SEQ ID NO: 85812 - DNA, 20 bp, synthetic construct
  source 1..20: mol_type = other DNA
ataggaaggttcactaggac

SEQ ID NO: 85813 - DNA, 20 bp, synthetic construct
  source 1..20: mol_type = other DNA
aataggaaggttcactagga

SEQ ID NO: 85814 - DNA, 20 bp, synthetic construct
  source 1..20: mol_type = other DNA
caataggaaggttcactagg

SEQ ID NO: 85815 - DNA, 20 bp, synthetic construct
  source 1..20: mol_type = other DNA
ccaataggaaggttcactag

SEQ ID NO: 85816 - DNA, 20 bp, synthetic construct
  source 1..20: mol_type = other DNA
gccaataggaaggttcacta

SEQ ID NO: 85817 - DNA, 20 bp, synthetic construct
  source 1..20: mol_type = other DNA
ggccaataggaaggttcact

SEQ ID NO: 85818 - DNA, 20 bp, synthetic construct
  source 1..20: mol_type = other DNA
tggccaataggaaggttcac

SEQ ID NO: 85819 - DNA, 20 bp, synthetic construct
  source 1..20: mol_type = other DNA
atggccaataggaaggttca

SEQ ID NO: 85820 - DNA, 20 bp, synthetic construct
  source 1..20: mol_type = other DNA
tatggccaataggaaggttc

SEQ ID NO: 85821 - DNA, 20 bp, synthetic construct
  source 1..20: mol_type = other DNA
ttatggccaataggaaggtt

SEQ ID NO: 85822 - DNA, 20 bp, synthetic construct
  source 1..20: mol_type = other DNA
cttatggccaataggaaggt

SEQ ID NO: 85823 - DNA, 20 bp, synthetic construct
  source 1..20: mol_type = other DNA
gcttatggccaataggaagg

SEQ ID NO: 85824 - DNA, 20 bp, synthetic construct
  source 1..20: mol_type = other DNA
tgcttatggccaataggaag

SEQ ID NO: 85825 - DNA, 20 bp, synthetic construct
  source 1..20: mol_type = other DNA
ctgcttatggccaataggaa

SEQ ID NO: 85826 - DNA, 20 bp, synthetic construct
  source 1..20: mol_type = other DNA
cctgcttatggccaatagga

SEQ ID NO: 85827 - DNA, 20 bp, synthetic construct
  source 1..20: mol_type = other DNA
ccctgcttatggccaatagg

SEQ ID NO: 85828 - DNA, 20 bp, synthetic construct
  source 1..20: mol_type = other DNA
tccctgcttatggccaatag

SEQ ID NO: 85829 - DNA, 20 bp, synthetic construct
  source 1..20: mol_type = other DNA
atccctgcttatggccaata

SEQ ID NO: 85830 - DNA, 20 bp, synthetic construct
  source 1..20: mol_type = other DNA
catccctgcttatggccaat

SEQ ID NO: 85831 - DNA, 20 bp, synthetic construct
  source 1..20: mol_type = other DNA
ccatccctgcttatggccaa

SEQ ID NO: 85832 - DNA, 20 bp, synthetic construct
  source 1..20: mol_type = other DNA
accatccctgcttatggcca

SEQ ID NO: 85833 - DNA, 20 bp, synthetic construct
  source 1..20: mol_type = other DNA
caccatccctgcttatggcc

SEQ ID NO: 85834 - DNA, 20 bp, synthetic construct
  source 1..20: mol_type = other DNA
acaccatccctgcttatggc

SEQ ID NO: 85835 - DNA, 20 bp, synthetic construct
  source 1..20: mol_type = other DNA
aacaccatccctgcttatgg

SEQ ID NO: 85836 - DNA, 20 bp, synthetic construct
  source 1..20: mol_type = other DNA
aaacaccatccctgcttatg

SEQ ID NO: 85837 - DNA, 20 bp, synthetic construct
  source 1..20: mol_type = other DNA
aaaacaccatccctgcttat

SEQ ID NO: 85838 - DNA, 20 bp, synthetic construct
  source 1..20: mol_type = other DNA
gaaaacaccatccctgctta

SEQ ID NO: 85839 - DNA, 20 bp, synthetic construct
  source 1..20: mol_type = other DNA
agaaaacaccatccctgctt

SEQ ID NO: 85840 - DNA, 20 bp, synthetic construct
  source 1..20: mol_type = other DNA
cagaaaacaccatccctgct

SEQ ID NO: 85841 - DNA, 20 bp, synthetic construct
  source 1..20: mol_type = other DNA
ccagaaaacaccatccctgc

SEQ ID NO: 85842 - DNA, 20 bp, synthetic construct
  source 1..20: mol_type = other DNA
cccagaaaacaccatccctg

SEQ ID NO: 85843 - DNA, 20 bp, synthetic construct
  source 1..20: mol_type = other DNA
acccagaaaacaccatccct

SEQ ID NO: 85844 - DNA, 20 bp, synthetic construct
  source 1..20: mol_type = other DNA
gacccagaaaacaccatccc

SEQ ID NO: 85845 - DNA, 20 bp, synthetic construct
  source 1..20: mol_type = other DNA
agacccagaaaacaccatcc

SEQ ID NO: 85846 - DNA, 20 bp, synthetic construct
  source 1..20: mol_type = other DNA
aagacccagaaaacaccatc

SEQ ID NO: 85847 - DNA, 20 bp, synthetic construct
  source 1..20: mol_type = other DNA
aaagacccagaaaacaccat

SEQ ID NO: 85848 - DNA, 20 bp, synthetic construct
  source 1..20: mol_type = other DNA
aaaagacccagaaaacacca

SEQ ID NO: 85849 - DNA, 20 bp, synthetic construct
  source 1..20: mol_type = other DNA
aaaaagacccagaaaacacc

SEQ ID NO: 85850 - DNA, 20 bp, synthetic construct
  source 1..20: mol_type = other DNA
aaaaaagacccagaaaacac

SEQ ID NO: 85851 - DNA, 20 bp, synthetic construct
  source 1..20: mol_type = other DNA
caaaaaagacccagaaaaca

SEQ ID NO: 85852 - DNA, 20 bp, synthetic construct
  source 1..20: mol_type = other DNA
tcaaaaaagacccagaaaac

SEQ ID NO: 85853 - DNA, 20 bp, synthetic construct
  source 1..20: mol_type = other DNA
ctcaaaaaagacccagaaaa

SEQ ID NO: 85854 - DNA, 20 bp, synthetic construct
  source 1..20: mol_type = other DNA
tctcaaaaaagacccagaaa

SEQ ID NO: 85855 - DNA, 20 bp, synthetic construct
  source 1..20: mol_type = other DNA
ctctcaaaaaagacccagaa

SEQ ID NO: 85856 - DNA, 20 bp, synthetic construct
  source 1..20: mol_type = other DNA
gctctcaaaaaagacccaga

SEQ ID NO: 85857 - DNA, 20 bp, synthetic construct
  source 1..20: mol_type = other DNA
cgctctcaaaaaagacccag

SEQ ID NO: 85858 - DNA, 20 bp, synthetic construct
  source 1..20: mol_type = other DNA
tcgctctcaaaaaagaccca

SEQ ID NO: 85859 - DNA, 20 bp, synthetic construct
  source 1..20: mol_type = other DNA
gtcgctctcaaaaaagaccc

SEQ ID NO: 85860 - DNA, 20 bp, synthetic construct
  source 1..20: mol_type = other DNA
tgtcgctctcaaaaaagacc

SEQ ID NO: 85861 - DNA, 20 bp, synthetic construct
  source 1..20: mol_type = other DNA
ctgtcgctctcaaaaaagac

SEQ ID NO: 85862 - DNA, 20 bp, synthetic construct
  source 1..20: mol_type = other DNA
gctgtcgctctcaaaaaaga

SEQ ID NO: 85863 - DNA, 20 bp, synthetic construct
  source 1..20: mol_type = other DNA
ggctgtcgctctcaaaaaag

SEQ ID NO: 85864 - DNA, 20 bp, synthetic construct
  source 1..20: mol_type = other DNA
gggctgtcgctctcaaaaaa

SEQ ID NO: 85865 - DNA, 20 bp, synthetic construct
  source 1..20: mol_type = other DNA
tgggctgtcgctctcaaaaa

SEQ ID NO: 85866 - DNA, 20 bp, synthetic construct
  source 1..20: mol_type = other DNA
atgggctgtcgctctcaaaa

SEQ ID NO: 85867 - DNA, 20 bp, synthetic construct
  source 1..20: mol_type = other DNA
catgggctgtcgctctcaaa

SEQ ID NO: 85868 - DNA, 20 bp, synthetic construct
  source 1..20: mol_type = other DNA
acatgggctgtcgctctcaa

SEQ ID NO: 85869 - DNA, 20 bp, synthetic construct
  source 1..20: mol_type = other DNA
tacatgggctgtcgctctca

SEQ ID NO: 85870 - DNA, 20 bp, synthetic construct
  source 1..20: mol_type = other DNA
ctacatgggctgtcgctctc

SEQ ID NO: 85871 - DNA, 20 bp, synthetic construct
  source 1..20: mol_type = other DNA
gctacatgggctgtcgctct

SEQ ID NO: 85872 - DNA, 20 bp, synthetic construct
  source 1..20: mol_type = other DNA
agctacatgggctgtcgctc

SEQ ID NO: 85873 - DNA, 20 bp, synthetic construct
  source 1..20: mol_type = other DNA
cagctacatgggctgtcgct

SEQ ID NO: 85874 - DNA, 20 bp, synthetic construct
  source 1..20: mol_type = other DNA
tcagctacatgggctgtcgc

SEQ ID NO: 85875 - DNA, 20 bp, synthetic construct
  source 1..20: mol_type = other DNA
gtcagctacatgggctgtcg

SEQ ID NO: 85876 - DNA, 20 bp, synthetic construct
  source 1..20: mol_type = other DNA
agtcagctacatgggctgtc

SEQ ID NO: 85877 - DNA, 20 bp, synthetic construct
  source 1..20: mol_type = other DNA
aagtcagctacatgggctgt

SEQ ID NO: 85878 - DNA, 20 bp, synthetic construct
  source 1..20: mol_type = other DNA
aaagtcagctacatgggctg

SEQ ID NO: 85879 - DNA, 20 bp, synthetic construct
  source 1..20: mol_type = other DNA
caaagtcagctacatgggct

SEQ ID NO: 85880 - DNA, 20 bp, synthetic construct
  source 1..20: mol_type = other DNA
gcaaagtcagctacatgggc

SEQ ID NO: 85881 - DNA, 20 bp, synthetic construct
  source 1..20: mol_type = other DNA
cgcaaagtcagctacatggg

SEQ ID NO: 85882 - DNA, 20 bp, synthetic construct
  source 1..20: mol_type = other DNA
acgcaaagtcagctacatgg

SEQ ID NO: 85883 - DNA, 20 bp, synthetic construct
  source 1..20: mol_type = other DNA
cacgcaaagtcagctacatg

SEQ ID NO: 85884 - DNA, 20 bp, synthetic construct
  source 1..20: mol_type = other DNA
acacgcaaagtcagctacat

SEQ ID NO: 85885 - DNA, 20 bp, synthetic construct
  source 1..20: mol_type = other DNA
gacacgcaaagtcagctaca

SEQ ID NO: 85886 - DNA, 20 bp, synthetic construct
  source 1..20: mol_type = other DNA
agacacgcaaagtcagctac

SEQ ID NO: 85887 - DNA, 20 bp, synthetic construct
  source 1..20: mol_type = other DNA
cagacacgcaaagtcagcta

SEQ ID NO: 85888 - DNA, 20 bp, synthetic construct
  source 1..20: mol_type = other DNA
gcagacacgcaaagtcagct

SEQ ID NO: 85889 - DNA, 20 bp, synthetic construct
  source 1..20: mol_type = other DNA
ggcagacacgcaaagtcagc

SEQ ID NO: 85890 - DNA, 20 bp, synthetic construct
  source 1..20: mol_type = other DNA
gggcagacacgcaaagtcag

SEQ ID NO: 85891 - DNA, 20 bp, synthetic construct
  source 1..20: mol_type = other DNA
agggcagacacgcaaagtca

SEQ ID NO: 85892 - DNA, 20 bp, synthetic construct
  source 1..20: mol_type = other DNA
aagggcagacacgcaaagtc

SEQ ID NO: 85893 - DNA, 20 bp, synthetic construct
  source 1..20: mol_type = other DNA
taagggcagacacgcaaagt

SEQ ID NO: 85894 - DNA, 20 bp, synthetic construct
  source 1..20: mol_type = other DNA
ctaagggcagacacgcaaag

SEQ ID NO: 85895 - DNA, 20 bp, synthetic construct
  source 1..20: mol_type = other DNA
tctaagggcagacacgcaaa

SEQ ID NO: 85896 - DNA, 20 bp, synthetic construct
  source 1..20: mol_type = other DNA
atctaagggcagacacgcaa

SEQ ID NO: 85897 - DNA, 20 bp, synthetic construct
  source 1..20: mol_type = other DNA
aatctaagggcagacacgca

SEQ ID NO: 85898 - DNA, 20 bp, synthetic construct
  source 1..20: mol_type = other DNA
taatctaagggcagacacgc

SEQ ID NO: 85899 - DNA, 20 bp, synthetic construct
  source 1..20: mol_type = other DNA
ttaatctaagggcagacacg

SEQ ID NO: 85900 - DNA, 20 bp, synthetic construct
  source 1..20: mol_type = other DNA
tttaatctaagggcagacac

SEQ ID NO: 85901 - DNA, 20 bp, synthetic construct
  source 1..20: mol_type = other DNA
ctttaatctaagggcagaca

SEQ ID NO: 85902 - DNA, 20 bp, synthetic construct
  source 1..20: mol_type = other DNA
actttaatctaagggcagac

SEQ ID NO: 85903 - DNA, 20 bp, synthetic construct
  source 1..20: mol_type = other DNA
tactttaatctaagggcaga

SEQ ID NO: 85904 - DNA, 20 bp, synthetic construct
  source 1..20: mol_type = other DNA
ctactttaatctaagggcag

SEQ ID NO: 85905 - DNA, 20 bp, synthetic construct
  source 1..20: mol_type = other DNA
actactttaatctaagggca

SEQ ID NO: 85906 - DNA, 20 bp, synthetic construct
  source 1..20: mol_type = other DNA
aactactttaatctaagggc

SEQ ID NO: 85907 - DNA, 20 bp, synthetic construct
  source 1..20: mol_type = other DNA
caactactttaatctaaggg

SEQ ID NO: 85908 - DNA, 20 bp, synthetic construct
  source 1..20: mol_type = other DNA
tcaactactttaatctaagg

SEQ ID NO: 85909 - DNA, 20 bp, synthetic construct
  source 1..20: mol_type = other DNA
atcaactactttaatctaag

SEQ ID NO: 85910 - DNA, 20 bp, synthetic construct
  source 1..20: mol_type = other DNA
aatcaactactttaatctaa

SEQ ID NO: 85911 - DNA, 20 bp, synthetic construct
  source 1..20: mol_type = other DNA
aaatcaactactttaatcta

SEQ ID NO: 85912 - DNA, 20 bp, synthetic construct
  source 1..20: mol_type = other DNA
aaaatcaactactttaatct

SEQ ID NO: 85913 - DNA, 20 bp, synthetic construct
  source 1..20: mol_type = other DNA
aaaaatcaactactttaatc

SEQ ID NO: 85914 - DNA, 20 bp, synthetic construct
  source 1..20: mol_type = other DNA
taaaaatcaactactttaat

SEQ ID NO: 85915 - DNA, 20 bp, synthetic construct
  source 1..20: mol_type = other DNA
ctaaaaatcaactactttaa

SEQ ID NO: 85916 - DNA, 20 bp, synthetic construct
  source 1..20: mol_type = other DNA
tctaaaaatcaactacttta

SEQ ID NO: 85917 - DNA, 20 bp, synthetic construct
  source 1..20: mol_type = other DNA
ttctaaaaatcaactacttt

SEQ ID NO: 85918 - DNA, 20 bp, synthetic construct
  source 1..20: mol_type = other DNA
attctaaaaatcaactactt

SEQ ID NO: 85919 - DNA, 20 bp, synthetic construct
  source 1..20: mol_type = other DNA
cattctaaaaatcaactact

SEQ ID NO: 85920 - DNA, 20 bp, synthetic construct
  source 1..20: mol_type = other DNA
gcattctaaaaatcaactac

SEQ ID NO: 85921 - DNA, 20 bp, synthetic construct
  source 1..20: mol_type = other DNA
ggcattctaaaaatcaacta

SEQ ID NO: 85922 - DNA, 20 bp, synthetic construct
  source 1..20: mol_type = other DNA
tggcattctaaaaatcaact

SEQ ID NO: 85923 - DNA, 20 bp, synthetic construct
  source 1..20: mol_type = other DNA
ctggcattctaaaaatcaac

SEQ ID NO: 85924 - DNA, 20 bp, synthetic construct
  source 1..20: mol_type = other DNA
tctggcattctaaaaatcaa

SEQ ID NO: 85925 - DNA, 20 bp, synthetic construct
  source 1..20: mol_type = other DNA
ttctggcattctaaaaatca

SEQ ID NO: 85926 - DNA, 20 bp, synthetic construct
  source 1..20: mol_type = other DNA
cttctggcattctaaaaatc

SEQ ID NO: 85927 - DNA, 20 bp, synthetic construct
  source 1..20: mol_type = other DNA
tcttctggcattctaaaaat

SEQ ID NO: 85928 - DNA, 20 bp, synthetic construct
  source 1..20: mol_type = other DNA
ttcttctggcattctaaaaa

SEQ ID NO: 85929 - DNA, 20 bp, synthetic construct
  source 1..20: mol_type = other DNA
attcttctggcattctaaaa

SEQ ID NO: 85930 - DNA, 20 bp, synthetic construct
  source 1..20: mol_type = other DNA
aattcttctggcattctaaa

SEQ ID NO: 85931 - DNA, 20 bp, synthetic construct
  source 1..20: mol_type = other DNA
gaattcttctggcattctaa

SEQ ID NO: 85932 - DNA, 20 bp, synthetic construct
  source 1..20: mol_type = other DNA
agaattcttctggcattcta

SEQ ID NO: 85933 - DNA, 20 bp, synthetic construct
  source 1..20: mol_type = other DNA
tagaattcttctggcattct

SEQ ID NO: 85934 - DNA, 20 bp, synthetic construct
  source 1..20: mol_type = other DNA
ttagaattcttctggcattc

SEQ ID NO: 85935 - DNA, 20 bp, synthetic construct
  source 1..20: mol_type = other DNA
tttagaattcttctggcatt

SEQ ID NO: 85936 - DNA, 20 bp, synthetic construct
  source 1..20: mol_type = other DNA
atttagaattcttctggcat

SEQ ID NO: 85937 - DNA, 20 bp, synthetic construct
  source 1..20: mol_type = other DNA
aatttagaattcttctggca

SEQ ID NO: 85938 - DNA, 20 bp, synthetic construct
  source 1..20: mol_type = other DNA
aaatttagaattcttctggc

SEQ ID NO: 85939 - DNA, 20 bp, synthetic construct
  source 1..20: mol_type = other DNA
taaatttagaattcttctgg

SEQ ID NO: 85940 - DNA, 20 bp, synthetic construct
  source 1..20: mol_type = other DNA
ttaaatttagaattcttctg

SEQ ID NO: 85941 - DNA, 20 bp, synthetic construct
  source 1..20: mol_type = other DNA
gttaaatttagaattcttct

SEQ ID NO: 85942 - DNA, 20 bp, synthetic construct
  source 1..20: mol_type = other DNA
agttaaatttagaattcttc

SEQ ID NO: 85943 - DNA, 20 bp, synthetic construct
  source 1..20: mol_type = other DNA
cagttaaatttagaattctt

SEQ ID NO: 85944 - DNA, 20 bp, synthetic construct
  source 1..20: mol_type = other DNA
tcagttaaatttagaattct

SEQ ID NO: 85945 - DNA, 20 bp, synthetic construct
  source 1..20: mol_type = other DNA
ctcagttaaatttagaattc

SEQ ID NO: 85946 - DNA, 20 bp, synthetic construct
  source 1..20: mol_type = other DNA
actcagttaaatttagaatt

SEQ ID NO: 85947 - DNA, 20 bp, synthetic construct
  source 1..20: mol_type = other DNA
tactcagttaaatttagaat

SEQ ID NO: 85948 - DNA, 20 bp, synthetic construct
  source 1..20: mol_type = other DNA
ttactcagttaaatttagaa

SEQ ID NO: 85949 - DNA, 20 bp, synthetic construct
  source 1..20: mol_type = other DNA
attactcagttaaatttaga

SEQ ID NO: 85950 - DNA, 20 bp, synthetic construct
  source 1..20: mol_type = other DNA
aattactcagttaaatttag

SEQ ID NO: 85951 - DNA, 20 bp, synthetic construct
  source 1..20: mol_type = other DNA
aaattactcagttaaattta

SEQ ID NO: 85952 - DNA, 20 bp, synthetic construct
  source 1..20: mol_type = other DNA
aaaattactcagttaaattt

SEQ ID NO: 85953 - DNA, 20 bp, synthetic construct
  source 1..20: mol_type = other DNA
aaaaattactcagttaaatt

SEQ ID NO: 85954 - DNA, 20 bp, synthetic construct
  source 1..20: mol_type = other DNA
aaaaaattactcagttaaat

SEQ ID NO: 85955 - DNA, 20 bp, synthetic construct
  source 1..20: mol_type = other DNA
aaaaaaattactcagttaaa

SEQ ID NO: 85956 - DNA, 20 bp, synthetic construct
  source 1..20: mol_type = other DNA
taaaaaaattactcagttaa

SEQ ID NO: 85957 - DNA, 20 bp, synthetic construct
  source 1..20: mol_type = other DNA
ttaaaaaaattactcagtta

SEQ ID NO: 85958 - DNA, 20 bp, synthetic construct
  source 1..20: mol_type = other DNA
tttaaaaaaattactcagtt

SEQ ID NO: 85959 - DNA, 20 bp, synthetic construct
  source 1..20: mol_type = other DNA
ctttaaaaaaattactcagt

SEQ ID NO: 85960 - DNA, 20 bp, synthetic construct
  source 1..20: mol_type = other DNA
actttaaaaaaattactcag

SEQ ID NO: 85961 - DNA, 20 bp, synthetic construct
  source 1..20: mol_type = other DNA
aactttaaaaaaattactca

SEQ ID NO: 85962 - DNA, 20 bp, synthetic construct
  source 1..20: mol_type = other DNA
taactttaaaaaaattactc

SEQ ID NO: 85963 - DNA, 20 bp, synthetic construct
  source 1..20: mol_type = other DNA
ctaactttaaaaaaattact

SEQ ID NO: 85964 - DNA, 20 bp, synthetic construct
  source 1..20: mol_type = other DNA
gctaactttaaaaaaattac

SEQ ID NO: 85965 - DNA, 20 bp, synthetic construct
  source 1..20: mol_type = other DNA
agctaactttaaaaaaatta

SEQ ID NO: 85966 - DNA, 20 bp, synthetic construct
  source 1..20: mol_type = other DNA
aagctaactttaaaaaaatt

SEQ ID NO: 85967 - DNA, 20 bp, synthetic construct
  source 1..20: mol_type = other DNA
aaagctaactttaaaaaaat

SEQ ID NO: 85968 - DNA, 20 bp, synthetic construct
  source 1..20: mol_type = other DNA
caaagctaactttaaaaaaa

SEQ ID NO: 85969 - DNA, 20 bp, synthetic construct
  source 1..20: mol_type = other DNA
gcaaagctaactttaaaaaa

SEQ ID NO: 85970 - DNA, 20 bp, synthetic construct
  source 1..20: mol_type = other DNA
tgcaaagctaactttaaaaa

SEQ ID NO: 85971 - DNA, 20 bp, synthetic construct
  source 1..20: mol_type = other DNA
ttgcaaagctaactttaaaa

SEQ ID NO: 85972 - DNA, 20 bp, synthetic construct
  source 1..20: mol_type = other DNA
attgcaaagctaactttaaa

SEQ ID NO: 85973 - DNA, 20 bp, synthetic construct
  source 1..20: mol_type = other DNA
gattgcaaagctaactttaa

SEQ ID NO: 85974 - DNA, 20 bp, synthetic construct
  source 1..20: mol_type = other DNA
agattgcaaagctaacttta

SEQ ID NO: 85975 - DNA, 20 bp, synthetic construct
  source 1..20: mol_type = other DNA
aagattgcaaagctaacttt

SEQ ID NO: 85976 - DNA, 20 bp, synthetic construct
  source 1..20: mol_type = other DNA
taagattgcaaagctaactt

SEQ ID NO: 85977 - DNA, 20 bp, synthetic construct
  source 1..20: mol_type = other DNA
gtaagattgcaaagctaact

SEQ ID NO: 85978 - DNA, 20 bp, synthetic construct
  source 1..20: mol_type = other DNA
tgtaagattgcaaagctaac

SEQ ID NO: 85979 - DNA, 20 bp, synthetic construct
  source 1..20: mol_type = other DNA
atgtaagattgcaaagctaa

SEQ ID NO: 85980 - DNA, 20 bp, synthetic construct
  source 1..20: mol_type = other DNA
tatgtaagattgcaaagcta

SEQ ID NO: 85981 - DNA, 20 bp, synthetic construct
  source 1..20: mol_type = other DNA
ctatgtaagattgcaaagct

SEQ ID NO: 85982 - DNA, 20 bp, synthetic construct
  source 1..20: mol_type = other DNA
actatgtaagattgcaaagc

SEQ ID NO: 85983 - DNA, 20 bp, synthetic construct
  source 1..20: mol_type = other DNA
cactatgtaagattgcaaag

SEQ ID NO: 85984 - DNA, 20 bp, synthetic construct
  source 1..20: mol_type = other DNA
tcactatgtaagattgcaaa

SEQ ID NO: 85985 - DNA, 20 bp, synthetic construct
  source 1..20: mol_type = other DNA
ttcactatgtaagattgcaa

SEQ ID NO: 85986 - DNA, 20 bp, synthetic construct
  source 1..20: mol_type = other DNA
tttcactatgtaagattgca

SEQ ID NO: 85987 - DNA, 20 bp, synthetic construct
  source 1..20: mol_type = other DNA
ctttcactatgtaagattgc

SEQ ID NO: 85988 - DNA, 20 bp, synthetic construct
  source 1..20: mol_type = other DNA
cctttcactatgtaagattg

SEQ ID NO: 85989 - DNA, 20 bp, synthetic construct
  source 1..20: mol_type = other DNA
gcctttcactatgtaagatt

SEQ ID NO: 85990 - DNA, 20 bp, synthetic construct
  source 1..20: mol_type = other DNA
agcctttcactatgtaagat

SEQ ID NO: 85991 - DNA, 20 bp, synthetic construct
  source 1..20: mol_type = other DNA
cagcctttcactatgtaaga

SEQ ID NO: 85992 - DNA, 20 bp, synthetic construct
  source 1..20: mol_type = other DNA
gcagcctttcactatgtaag

SEQ ID NO: 85993 - DNA, 20 bp, synthetic construct
  source 1..20: mol_type = other DNA
agcagcctttcactatgtaa

SEQ ID NO: 85994 - DNA, 20 bp, synthetic construct
  source 1..20: mol_type = other DNA
aagcagcctttcactatgta

SEQ ID NO: 85995 - DNA, 20 bp, synthetic construct
  source 1..20: mol_type = other DNA
aaagcagcctttcactatgt

SEQ ID NO: 85996 - DNA, 20 bp, synthetic construct
  source 1..20: mol_type = other DNA
taaagcagcctttcactatg

SEQ ID NO: 85997 - DNA, 20 bp, synthetic construct
  source 1..20: mol_type = other DNA
ttaaagcagcctttcactat

SEQ ID NO: 85998 - DNA, 20 bp, synthetic construct
  source 1..20: mol_type = other DNA
attaaagcagcctttcacta

SEQ ID NO: 85999 - DNA, 20 bp, synthetic construct
  source 1..20: mol_type = other DNA
gattaaagcagcctttcact

SEQ ID NO: 86000 - DNA, 20 bp, synthetic construct
  source 1..20: mol_type = other DNA
agattaaagcagcctttcac

SEQ ID NO: 86001 - DNA, 20 bp, synthetic construct
  source 1..20: mol_type = other DNA
cagattaaagcagcctttca

SEQ ID NO: 86002 - DNA, 20 bp, synthetic construct
  source 1..20: mol_type = other DNA
ccagattaaagcagcctttc

SEQ ID NO: 86003 - DNA, 20 bp, synthetic construct
  source 1..20: mol_type = other DNA
tccagattaaagcagccttt

SEQ ID NO: 86004 - DNA, 20 bp, synthetic construct
  source 1..20: mol_type = other DNA
ttccagattaaagcagcctt

SEQ ID NO: 86005 - DNA, 20 bp, synthetic construct
  source 1..20: mol_type = other DNA
cttccagattaaagcagcct

SEQ ID NO: 86006 - DNA, 20 bp, synthetic construct
  source 1..20: mol_type = other DNA
tcttccagattaaagcagcc

SEQ ID NO: 86007 - DNA, 20 bp, synthetic construct
  source 1..20: mol_type = other DNA
ttcttccagattaaagcagc

SEQ ID NO: 86008 - DNA, 20 bp, synthetic construct
  source 1..20: mol_type = other DNA
cttcttccagattaaagcag

SEQ ID NO: 86009 - DNA, 20 bp, synthetic construct
  source 1..20: mol_type = other DNA
acttcttccagattaaagca

SEQ ID NO: 86010 - DNA, 20 bp, synthetic construct
  source 1..20: mol_type = other DNA
gacttcttccagattaaagc

SEQ ID NO: 86011 - DNA, 20 bp, synthetic construct
  source 1..20: mol_type = other DNA
ggacttcttccagattaaag

SEQ ID NO: 86012 - DNA, 20 bp, synthetic construct
  source 1..20: mol_type = other DNA
aggacttcttccagattaaa

SEQ ID NO: 86013 - DNA, 20 bp, synthetic construct
  source 1..20: mol_type = other DNA
aaggacttcttccagattaa

SEQ ID NO: 86014 - DNA, 20 bp, synthetic construct
  source 1..20: mol_type = other DNA
caaggacttcttccagatta

SEQ ID NO: 86015 - DNA, 20 bp, synthetic construct
  source 1..20: mol_type = other DNA
tcaaggacttcttccagatt

SEQ ID NO: 86016 - DNA, 20 bp, synthetic construct
  source 1..20: mol_type = other DNA
atcaaggacttcttccagat

SEQ ID NO: 86017 - DNA, 20 bp, synthetic construct
  source 1..20: mol_type = other DNA
gatcaaggacttcttccaga

SEQ ID NO: 86018 - DNA, 20 bp, synthetic construct
  source 1..20: mol_type = other DNA
agatcaaggacttcttccag

SEQ ID NO: 86019 - DNA, 20 bp, synthetic construct
  source 1..20: mol_type = other DNA
cagatcaaggacttcttcca

SEQ ID NO: 86020 - DNA, 20 bp, synthetic construct
  source 1..20: mol_type = other DNA
tcagatcaaggacttcttcc

SEQ ID NO: 86021 - DNA, 20 bp, synthetic construct
  source 1..20: mol_type = other DNA
ctcagatcaaggacttcttc

SEQ ID NO: 86022 - DNA, 20 bp, synthetic construct
  source 1..20: mol_type = other DNA
tctcagatcaaggacttctt

SEQ ID NO: 86023 - DNA, 20 bp, synthetic construct
  source 1..20: mol_type = other DNA
atctcagatcaaggacttct

SEQ ID NO: 86024 - DNA, 20 bp, synthetic construct
  source 1..20: mol_type = other DNA
tatctcagatcaaggacttc

SEQ ID NO: 86025 - DNA, 20 bp, synthetic construct
  source 1..20: mol_type = other DNA
ttatctcagatcaaggactt

SEQ ID NO: 86026 - DNA, 20 bp, synthetic construct
  source 1..20: mol_type = other DNA
tttatctcagatcaaggact

SEQ ID NO: 86027 - DNA, 20 bp, synthetic construct
  source 1..20: mol_type = other DNA
ttttatctcagatcaaggac

SEQ ID NO: 86028 - DNA, 20 bp, synthetic construct
  source 1..20: mol_type = other DNA
attttatctcagatcaagga

SEQ ID NO: 86029 - DNA, 20 bp, synthetic construct
  source 1..20: mol_type = other DNA
aattttatctcagatcaagg

SEQ ID NO: 86030 - DNA, 20 bp, synthetic construct
  source 1..20: mol_type = other DNA
caattttatctcagatcaag

SEQ ID NO: 86031 - DNA, 20 bp, synthetic construct
  source 1..20: mol_type = other DNA
tcaattttatctcagatcaa

SEQ ID NO: 86032 - DNA, 20 bp, synthetic construct
  source 1..20: mol_type = other DNA
atcaattttatctcagatca

SEQ ID NO: 86033 - DNA, 20 bp, synthetic construct
  source 1..20: mol_type = other DNA
tatcaattttatctcagatc

SEQ ID NO: 86034 - DNA, 20 bp, synthetic construct
  source 1..20: mol_type = other DNA
ttatcaattttatctcagat

SEQ ID NO: 86035 - DNA, 20 bp, synthetic construct
  source 1..20: mol_type = other DNA
tttatcaattttatctcaga

SEQ ID NO: 86036 - DNA, 20 bp, synthetic construct
  source 1..20: mol_type = other DNA
ttttatcaattttatctcag

SEQ ID NO: 86037 - DNA, 20 bp, synthetic construct
  source 1..20: mol_type = other DNA
tttttatcaattttatctca

SEQ ID NO: 86038 - DNA, 20 bp, synthetic construct
  source 1..20: mol_type = other DNA
gtttttatcaattttatctc

SEQ ID NO: 86039 - DNA, 20 bp, synthetic construct
  source 1..20: mol_type = other DNA
cgtttttatcaattttatct

SEQ ID NO: 86040 - DNA, 20 bp, synthetic construct
  source 1..20: mol_type = other DNA
tcgtttttatcaattttatc

SEQ ID NO: 86041 - DNA, 20 bp, synthetic construct
  source 1..20: mol_type = other DNA
gtcgtttttatcaattttat

SEQ ID NO: 86042 - DNA, 20 bp, synthetic construct
  source 1..20: mol_type = other DNA
tgtcgtttttatcaatttta

SEQ ID NO: 86043 - DNA, 20 bp, synthetic construct
  source 1..20: mol_type = other DNA
atgtcgtttttatcaatttt

SEQ ID NO: 86044 - DNA, 20 bp, synthetic construct
  source 1..20: mol_type = other DNA
tatgtcgtttttatcaattt

SEQ ID NO: 86045 - DNA, 20 bp, synthetic construct
  source 1..20: mol_type = other DNA
atatgtcgtttttatcaatt

SEQ ID NO: 86046 - DNA, 20 bp, synthetic construct
  source 1..20: mol_type = other DNA
catatgtcgtttttatcaat

SEQ ID NO: 86047 - DNA, 20 bp, synthetic construct
  source 1..20: mol_type = other DNA
tcatatgtcgtttttatcaa

SEQ ID NO: 86048 - DNA, 20 bp, synthetic construct
  source 1..20: mol_type = other DNA
ttcatatgtcgtttttatca

SEQ ID NO: 86049 - DNA, 20 bp, synthetic construct
  source 1..20: mol_type = other DNA
attcatatgtcgtttttatc

SEQ ID NO: 86050 - DNA, 20 bp, synthetic construct
  source 1..20: mol_type = other DNA
aattcatatgtcgtttttat

SEQ ID NO: 86051 - DNA, 20 bp, synthetic construct
  source 1..20: mol_type = other DNA
aaattcatatgtcgttttta

SEQ ID NO: 86052 - DNA, 20 bp, synthetic construct
  source 1..20: mol_type = other DNA
caaattcatatgtcgttttt

SEQ ID NO: 86053 - DNA, 20 bp, synthetic construct
  source 1..20: mol_type = other DNA
tcaaattcatatgtcgtttt

SEQ ID NO: 86054 - DNA, 20 bp, synthetic construct
  source 1..20: mol_type = other DNA
ttcaaattcatatgtcgttt

SEQ ID NO: 86055 - DNA, 20 bp, synthetic construct
  source 1..20: mol_type = other DNA
attcaaattcatatgtcgtt

SEQ ID NO: 86056 - DNA, 20 bp, synthetic construct
  source 1..20: mol_type = other DNA
tattcaaattcatatgtcgt

SEQ ID NO: 86057 - DNA, 20 bp, synthetic construct
  source 1..20: mol_type = other DNA
atattcaaattcatatgtcg

SEQ ID NO: 86058 - DNA, 20 bp, synthetic construct
  source 1..20: mol_type = other DNA
aatattcaaattcatatgtc

SEQ ID NO: 86059 - DNA, 20 bp, synthetic construct
  source 1..20: mol_type = other DNA
aaatattcaaattcatatgt

SEQ ID NO: 86060 - DNA, 20 bp, synthetic construct
  source 1..20: mol_type = other DNA
taaatattcaaattcatatg

SEQ ID NO: 86061 - DNA, 20 bp, synthetic construct
  source 1..20: mol_type = other DNA
ctaaatattcaaattcatat

SEQ ID NO: 86062 - DNA, 20 bp, synthetic construct
  source 1..20: mol_type = other DNA
gctaaatattcaaattcata

SEQ ID NO: 86063 - DNA, 20 bp, synthetic construct
  source 1..20: mol_type = other DNA
agctaaatattcaaattcat

SEQ ID NO: 86064 - DNA, 20 bp, synthetic construct
  source 1..20: mol_type = other DNA
tagctaaatattcaaattca

SEQ ID NO: 86065 - DNA, 20 bp, synthetic construct
  source 1..20: mol_type = other DNA
atagctaaatattcaaattc

SEQ ID NO: 86066 - DNA, 20 bp, synthetic construct
  source 1..20: mol_type = other DNA
aatagctaaatattcaaatt

SEQ ID NO: 86067 - DNA, 20 bp, synthetic construct
  source 1..20: mol_type = other DNA
aaatagctaaatattcaaat

SEQ ID NO: 86068 - DNA, 20 bp, synthetic construct
  source 1..20: mol_type = other DNA
gaaatagctaaatattcaaa

SEQ ID NO: 86069 - DNA, 20 bp, synthetic construct
  source 1..20: mol_type = other DNA
agaaatagctaaatattcaa

SEQ ID NO: 86070 - DNA, 20 bp, synthetic construct
  source 1..20: mol_type = other DNA
aagaaatagctaaatattca

SEQ ID NO: 86071 - DNA, 20 bp, synthetic construct
  source 1..20: mol_type = other DNA
aaagaaatagctaaatattc

SEQ ID NO: 86072 - DNA, 20 bp, synthetic construct
  source 1..20: mol_type = other DNA
gaaagaaatagctaaatatt

SEQ ID NO: 86073 - DNA, 20 bp, synthetic construct
  source 1..20: mol_type = other DNA
ggaaagaaatagctaaatat

SEQ ID NO: 86074 - DNA, 20 bp, synthetic construct
  source 1..20: mol_type = other DNA
aggaaagaaatagctaaata

SEQ ID NO: 86075 - DNA, 20 bp, synthetic construct
  source 1..20: mol_type = other DNA
gaggaaagaaatagctaaat

SEQ ID NO: 86076 - DNA, 20 bp, synthetic construct
  source 1..20: mol_type = other DNA
cgaggaaagaaatagctaaa

SEQ ID NO: 86077 - DNA, 20 bp, synthetic construct
  source 1..20: mol_type = other DNA
acgaggaaagaaatagctaa

SEQ ID NO: 86078 - DNA, 20 bp, synthetic construct
  source 1..20: mol_type = other DNA
gacgaggaaagaaatagcta

SEQ ID NO: 86079 - DNA, 20 bp, synthetic construct
  source 1..20: mol_type = other DNA
tgacgaggaaagaaatagct

SEQ ID NO: 86080 - DNA, 20 bp, synthetic construct
  source 1..20: mol_type = other DNA
ttgacgaggaaagaaatagc

SEQ ID NO: 86081 - DNA, 20 bp, synthetic construct
  source 1..20: mol_type = other DNA
tttgacgaggaaagaaatag

SEQ ID NO: 86082 - DNA, 20 bp, synthetic construct
  source 1..20: mol_type = other DNA
ttttgacgaggaaagaaata

SEQ ID NO: 86083 - DNA, 20 bp, synthetic construct
  source 1..20: mol_type = other DNA
tttttgacgaggaaagaaat

SEQ ID NO: 86084 - DNA, 20 bp, synthetic construct
  source 1..20: mol_type = other DNA
atttttgacgaggaaagaaa

SEQ ID NO: 86085 - DNA, 20 bp, synthetic construct
  source 1..20: mol_type = other DNA
tatttttgacgaggaaagaa

SEQ ID NO: 86086 - DNA, 20 bp, synthetic construct
  source 1..20: mol_type = other DNA
ttatttttgacgaggaaaga

SEQ ID NO: 86087 - DNA, 20 bp, synthetic construct
  source 1..20: mol_type = other DNA
cttatttttgacgaggaaag

SEQ ID NO: 86088 - DNA, 20 bp, synthetic construct
  source 1..20: mol_type = other DNA
tcttatttttgacgaggaaa

SEQ ID NO: 86089 - DNA, 20 bp, synthetic construct
  source 1..20: mol_type = other DNA
ttcttatttttgacgaggaa

SEQ ID NO: 86090 - DNA, 20 bp, synthetic construct
  source 1..20: mol_type = other DNA
attcttatttttgacgagga

SEQ ID NO: 86091 - DNA, 20 bp, synthetic construct
  source 1..20: mol_type = other DNA
tattcttatttttgacgagg

SEQ ID NO: 86092 - DNA, 20 bp, synthetic construct
  source 1..20: mol_type = other DNA
ttattcttatttttgacgag

SEQ ID NO: 86093 - DNA, 20 bp, synthetic construct
  source 1..20: mol_type = other DNA
tttattcttatttttgacga

SEQ ID NO: 86094 - DNA, 20 bp, synthetic construct
  source 1..20: mol_type = other DNA
ttttattcttatttttgacg

SEQ ID NO: 86095 - DNA, 20 bp, synthetic construct
  source 1..20: mol_type = other DNA
attttattcttatttttgac

SEQ ID NO: 86096 - DNA, 20 bp, synthetic construct
  source 1..20: mol_type = other DNA
gattttattcttatttttga

SEQ ID NO: 86097 - DNA, 20 bp, synthetic construct
  source 1..20: mol_type = other DNA
agattttattcttatttttg

SEQ ID NO: 86098 - DNA, 20 bp, synthetic construct
  source 1..20: mol_type = other DNA
aagattttattcttattttt

SEQ ID NO: 86099 - DNA, 20 bp, synthetic construct
  source 1..20: mol_type = other DNA
caagattttattcttatttt

SEQ ID NO: 86100 - DNA, 20 bp, synthetic construct
  source 1..20: mol_type = other DNA
acaagattttattcttattt

SEQ ID NO: 86101 - DNA, 20 bp, synthetic construct
  source 1..20: mol_type = other DNA
tacaagattttattcttatt

SEQ ID NO: 86102 - DNA, 20 bp, synthetic construct
  source 1..20: mol_type = other DNA
ttacaagattttattcttat

SEQ ID NO: 86103 - DNA, 20 bp, synthetic construct
  source 1..20: mol_type = other DNA
attacaagattttattctta

SEQ ID NO: 86104 - DNA, 20 bp, synthetic construct
  source 1..20: mol_type = other DNA
aattacaagattttattctt

SEQ ID NO: 86105 - DNA, 20 bp, synthetic construct
  source 1..20: mol_type = other DNA
gaattacaagattttattct

SEQ ID NO: 86106 - DNA, 20 bp, synthetic construct
  source 1..20: mol_type = other DNA
agaattacaagattttattc

SEQ ID NO: 86107 - DNA, 20 bp, synthetic construct
  source 1..20: mol_type = other DNA
aagaattacaagattttatt

SEQ ID NO: 86108 - DNA, 20 bp, synthetic construct
  source 1..20: mol_type = other DNA
taagaattacaagattttat

SEQ ID NO: 86109 - DNA, 20 bp, synthetic construct
  source 1..20: mol_type = other DNA
ataagaattacaagatttta

SEQ ID NO: 86110 - DNA, 20 bp, synthetic construct
  source 1..20: mol_type = other DNA
aataagaattacaagatttt

SEQ ID NO: 86111 - DNA, 20 bp, synthetic construct
  source 1..20: mol_type = other DNA
gaataagaattacaagattt

SEQ ID NO: 86112 - DNA, 20 bp, synthetic construct
  source 1..20: mol_type = other DNA
tgaataagaattacaagatt

SEQ ID NO: 86113 - DNA, 20 bp, synthetic construct
  source 1..20: mol_type = other DNA
ctgaataagaattacaagat

SEQ ID NO: 86114 - DNA, 20 bp, synthetic construct
  source 1..20: mol_type = other DNA
actgaataagaattacaaga

SEQ ID NO: 86115 - DNA, 20 bp, synthetic construct
  source 1..20: mol_type = other DNA
tactgaataagaattacaag

SEQ ID NO: 86116 - DNA, 20 bp, synthetic construct
  source 1..20: mol_type = other DNA
atactgaataagaattacaa

SEQ ID NO: 86117 - DNA, 20 bp, synthetic construct
  source 1..20: mol_type = other DNA
aatactgaataagaattaca

SEQ ID NO: 86118 - DNA, 20 bp, synthetic construct
  source 1..20: mol_type = other DNA
aaatactgaataagaattac

SEQ ID NO: 86119 - DNA, 20 bp, synthetic construct
  source 1..20: mol_type = other DNA
caaatactgaataagaatta

SEQ ID NO: 86120 - DNA, 20 bp, synthetic construct
  source 1..20: mol_type = other DNA
ccaaatactgaataagaatt

SEQ ID NO: 86121 - DNA, 20 bp, synthetic construct
  source 1..20: mol_type = other DNA
gccaaatactgaataagaat

SEQ ID NO: 86122 - DNA, 20 bp, synthetic construct
  source 1..20: mol_type = other DNA
cgccaaatactgaataagaa

SEQ ID NO: 86123 - DNA, 20 bp, synthetic construct
  source 1..20: mol_type = other DNA
gcgccaaatactgaataaga

SEQ ID NO: 86124 - DNA, 20 bp, synthetic construct
  source 1..20: mol_type = other DNA
agcgccaaatactgaataag

SEQ ID NO: 86125 - DNA, 20 bp, synthetic construct
  source 1..20: mol_type = other DNA
tagcgccaaatactgaataa

SEQ ID NO: 86126 - DNA, 20 bp, synthetic construct
  source 1..20: mol_type = other DNA
ttagcgccaaatactgaata

SEQ ID NO: 86127 - DNA, 20 bp, synthetic construct
  source 1..20: mol_type = other DNA
tttagcgccaaatactgaat

SEQ ID NO: 86128 - DNA, 20 bp, synthetic construct
  source 1..20: mol_type = other DNA
atttagcgccaaatactgaa

SEQ ID NO: 86129 - DNA, 20 bp, synthetic construct
  source 1..20: mol_type = other DNA
gatttagcgccaaatactga

SEQ ID NO: 86130 - DNA, 20 bp, synthetic construct
  source 1..20: mol_type = other DNA
ggatttagcgccaaatactg

SEQ ID NO: 86131 - DNA, 20 bp, synthetic construct
  source 1..20: mol_type = other DNA
tggatttagcgccaaatact

SEQ ID NO: 86132 - DNA, 20 bp, synthetic construct
  source 1..20: mol_type = other DNA
atggatttagcgccaaatac

SEQ ID NO: 86133 - DNA, 20 bp, synthetic construct
  source 1..20: mol_type = other DNA
gatggatttagcgccaaata

SEQ ID NO: 86134 - DNA, 20 bp, synthetic construct
  source 1..20: mol_type = other DNA
tgatggatttagcgccaaat

SEQ ID NO: 86135 - DNA, 20 bp, synthetic construct
  source 1..20: mol_type = other DNA
atgatggatttagcgccaaa

SEQ ID NO: 86136 - DNA, 20 bp, synthetic construct
  source 1..20: mol_type = other DNA
aatgatggatttagcgccaa

SEQ ID NO: 86137 - DNA, 20 bp, synthetic construct
  source 1..20: mol_type = other DNA
caatgatggatttagcgcca

SEQ ID NO: 86138 - DNA, 20 bp, synthetic construct
  source 1..20: mol_type = other DNA
gcaatgatggatttagcgcc

SEQ ID NO: 86139 - DNA, 20 bp, synthetic construct
  source 1..20: mol_type = other DNA
ggcaatgatggatttagcgc

SEQ ID NO: 86140 - DNA, 20 bp, synthetic construct
  source 1..20: mol_type = other DNA
tggcaatgatggatttagcg

SEQ ID NO: 86141 - DNA, 20 bp, synthetic construct
  source 1..20: mol_type = other DNA
gtggcaatgatggatttagc

SEQ ID NO: 86142 - DNA, 20 bp, synthetic construct
  source 1..20: mol_type = other DNA
tgtggcaatgatggatttag

SEQ ID NO: 86143 - DNA, 20 bp, synthetic construct
  source 1..20: mol_type = other DNA
atgtggcaatgatggattta

SEQ ID NO: 86144 - DNA, 20 bp, synthetic construct
  source 1..20: mol_type = other DNA
tatgtggcaatgatggattt

SEQ ID NO: 86145 - DNA, 20 bp, synthetic construct
  source 1..20: mol_type = other DNA
atatgtggcaatgatggatt

SEQ ID NO: 86146 - DNA, 20 bp, synthetic construct
  source 1..20: mol_type = other DNA
gatatgtggcaatgatggat

SEQ ID NO: 86147 - DNA, 20 bp, synthetic construct
  source 1..20: mol_type = other DNA
tgatatgtggcaatgatgga

SEQ ID NO: 86148 - DNA, 20 bp, synthetic construct
  source 1..20: mol_type = other DNA
ttgatatgtggcaatgatgg

SEQ ID NO: 86149 - DNA, 20 bp, synthetic construct
  source 1..20: mol_type = other DNA
tttgatatgtggcaatgatg

SEQ ID NO: 86150 - DNA, 20 bp, synthetic construct
  source 1..20: mol_type = other DNA
atttgatatgtggcaatgat

SEQ ID NO: 86151 - DNA, 20 bp, synthetic construct
  source 1..20: mol_type = other DNA
tatttgatatgtggcaatga

SEQ ID NO: 86152 - DNA, 20 bp, synthetic construct
  source 1..20: mol_type = other DNA
gtatttgatatgtggcaatg

SEQ ID NO: 86153 - DNA, 20 bp, synthetic construct
  source 1..20: mol_type = other DNA
tgtatttgatatgtggcaat

SEQ ID NO: 86154 - DNA, 20 bp, synthetic construct
  source 1..20: mol_type = other DNA
ctgtatttgatatgtggcaa

SEQ ID NO: 86155 - DNA, 20 bp, synthetic construct
  source 1..20: mol_type = other DNA
cctgtatttgatatgtggca

SEQ ID NO: 86156 - DNA, 20 bp, synthetic construct
  source 1..20: mol_type = other DNA
ccctgtatttgatatgtggc

SEQ ID NO: 86157 - DNA, 20 bp, synthetic construct
  source 1..20: mol_type = other DNA
tccctgtatttgatatgtgg

SEQ ID NO: 86158 - DNA, 20 bp, synthetic construct
  source 1..20: mol_type = other DNA
atccctgtatttgatatgtg

SEQ ID NO: 86159 - DNA, 20 bp, synthetic construct
  source 1..20: mol_type = other DNA
tatccctgtatttgatatgt

SEQ ID NO: 86160 - DNA, 20 bp, synthetic construct
  source 1..20: mol_type = other DNA
atatccctgtatttgatatg

SEQ ID NO: 86161 - DNA, 20 bp, synthetic construct
  source 1..20: mol_type = other DNA
catatccctgtatttgatat

SEQ ID NO: 86162 - DNA, 20 bp, synthetic construct
  source 1..20: mol_type = other DNA
acatatccctgtatttgata

SEQ ID NO: 86163 - DNA, 20 bp, synthetic construct
  source 1..20: mol_type = other DNA
aacatatccctgtatttgat

SEQ ID NO: 86164 - DNA, 20 bp, synthetic construct
  source 1..20: mol_type = other DNA
caacatatccctgtatttga

SEQ ID NO: 86165 - DNA, 20 bp, synthetic construct
  source 1..20: mol_type = other DNA
acaacatatccctgtatttg

SEQ ID NO: 86166 - DNA, 20 bp, synthetic construct
  source 1..20: mol_type = other DNA
tacaacatatccctgtattt

SEQ ID NO: 86167 - DNA, 20 bp, synthetic construct
  source 1..20: mol_type = other DNA
ctacaacatatccctgtatt

SEQ ID NO: 86168 - DNA, 20 bp, synthetic construct
  source 1..20: mol_type = other DNA
tctacaacatatccctgtat

SEQ ID NO: 86169 - DNA, 20 bp, synthetic construct
  source 1..20: mol_type = other DNA
ttctacaacatatccctgta

SEQ ID NO: 86170 - DNA, 20 bp, synthetic construct
  source 1..20: mol_type = other DNA
tttctacaacatatccctgt

SEQ ID NO: 86171 - DNA, 20 bp, synthetic construct
  source 1..20: mol_type = other DNA
ctttctacaacatatccctg

SEQ ID NO: 86172 - DNA, 20 bp, synthetic construct
  source 1..20: mol_type = other DNA
cctttctacaacatatccct

SEQ ID NO: 86173 - DNA, 20 bp, synthetic construct
  source 1..20: mol_type = other DNA
acctttctacaacatatccc

SEQ ID NO: 86174 - DNA, 20 bp, synthetic construct
  source 1..20: mol_type = other DNA
tacctttctacaacatatcc

SEQ ID NO: 86175 - DNA, 20 bp, synthetic construct
  source 1..20: mol_type = other DNA
ttacctttctacaacatatc

SEQ ID NO: 86176 - DNA, 20 bp, synthetic construct
  source 1..20: mol_type = other DNA
gttacctttctacaacatat

SEQ ID NO: 86177 - DNA, 20 bp, synthetic construct
  source 1..20: mol_type = other DNA
tgttacctttctacaacata

SEQ ID NO: 86178 - DNA, 20 bp, synthetic construct
  source 1..20: mol_type = other DNA
atgttacctttctacaacat

SEQ ID NO: 86179 - DNA, 20 bp, synthetic construct
  source 1..20: mol_type = other DNA
aatgttacctttctacaaca

SEQ ID NO: 86180 - DNA, 20 bp, synthetic construct
  source 1..20: mol_type = other DNA
gaatgttacctttctacaac

SEQ ID NO: 86181 - DNA, 20 bp, synthetic construct
  source 1..20: mol_type = other DNA
agaatgttacctttctacaa

SEQ ID NO: 86182 - DNA, 20 bp, synthetic construct
  source 1..20: mol_type = other DNA
tagaatgttacctttctaca

SEQ ID NO: 86183 - DNA, 20 bp, synthetic construct
  source 1..20: mol_type = other DNA
ttagaatgttacctttctac

SEQ ID NO: 86184 - DNA, 20 bp, synthetic construct
  source 1..20: mol_type = other DNA
attagaatgttacctttcta

SEQ ID NO: 86185 - DNA, 20 bp, synthetic construct
  source 1..20: mol_type = other DNA
aattagaatgttacctttct

SEQ ID NO: 86186 - DNA, 20 bp, synthetic construct
  source 1..20: mol_type = other DNA
aaattagaatgttacctttc

SEQ ID NO: 86187 - DNA, 20 bp, synthetic construct
  source 1..20: mol_type = other DNA
taaattagaatgttaccttt

SEQ ID NO: 86188 - DNA, 20 bp, synthetic construct
  source 1..20: mol_type = other DNA
ttaaattagaatgttacctt

SEQ ID NO: 86189 - DNA, 20 bp, synthetic construct
  source 1..20: mol_type = other DNA
tttaaattagaatgttacct

SEQ ID NO: 86190 - DNA, 20 bp, synthetic construct
  source 1..20: mol_type = other DNA
atttaaattagaatgttacc

SEQ ID NO: 86191 - DNA, 20 bp, synthetic construct
  source 1..20: mol_type = other DNA
catttaaattagaatgttac

SEQ ID NO: 86192 - DNA, 20 bp, synthetic construct
  source 1..20: mol_type = other DNA
gcatttaaattagaatgtta

SEQ ID NO: 86193 - DNA, 20 bp, synthetic construct
  source 1..20: mol_type = other DNA
ggcatttaaattagaatgtt

SEQ ID NO: 86194 - DNA, 20 bp, synthetic construct
  source 1..20: mol_type = other DNA
tggcatttaaattagaatgt

SEQ ID NO: 86195 - DNA, 20 bp, synthetic construct
  source 1..20: mol_type = other DNA
gtggcatttaaattagaatg

SEQ ID NO: 86196 - DNA, 20 bp, synthetic construct
  source 1..20: mol_type = other DNA
ggtggcatttaaattagaat

SEQ ID NO: 86197 - DNA, 20 bp, synthetic construct
  source 1..20: mol_type = other DNA
gggtggcatttaaattagaa

SEQ ID NO: 86198 - DNA, 20 bp, synthetic construct
  source 1..20: mol_type = other DNA
tgggtggcatttaaattaga

SEQ ID NO: 86199 - DNA, 20 bp, synthetic construct
  source 1..20: mol_type = other DNA
atgggtggcatttaaattag

SEQ ID NO: 86200 - DNA, 20 bp, synthetic construct
  source 1..20: mol_type = other DNA
tatgggtggcatttaaatta

SEQ ID NO: 86201 - DNA, 20 bp, synthetic construct
  source 1..20: mol_type = other DNA
atatgggtggcatttaaatt

SEQ ID NO: 86202 - DNA, 20 bp, synthetic construct
  source 1..20: mol_type = other DNA
tatatgggtggcatttaaat

SEQ ID NO: 86203 - DNA, 20 bp, synthetic construct
  source 1..20: mol_type = other DNA
atatatgggtggcatttaaa

SEQ ID NO: 86204 - DNA, 20 bp, synthetic construct
  source 1..20: mol_type = other DNA
aatatatgggtggcatttaa

SEQ ID NO: 86205 - DNA, 20 bp, synthetic construct
  source 1..20: mol_type = other DNA
taatatatgggtggcattta

SEQ ID NO: 86206 - DNA, 20 bp, synthetic construct
  source 1..20: mol_type = other DNA
ttaatatatgggtggcattt

SEQ ID NO: 86207 - DNA, 20 bp, synthetic construct
  source 1..20: mol_type = other DNA
tttaatatatgggtggcatt

SEQ ID NO: 86208 - DNA, 20 bp, synthetic construct
  source 1..20: mol_type = other DNA
ttttaatatatgggtggcat

SEQ ID NO: 86209 - DNA, 20 bp, synthetic construct
  source 1..20: mol_type = other DNA
tttttaatatatgggtggca

SEQ ID NO: 86210 - DNA, 20 bp, synthetic construct
  source 1..20: mol_type = other DNA
gtttttaatatatgggtggc

SEQ ID NO: 86211 - DNA, 20 bp, synthetic construct
  source 1..20: mol_type = other DNA
ggtttttaatatatgggtgg

SEQ ID NO: 86212 - DNA, 20 bp, synthetic construct
  source 1..20: mol_type = other DNA
aggtttttaatatatgggtg

SEQ ID NO: 86213 - DNA, 20 bp, synthetic construct
  source 1..20: mol_type = other DNA
caggtttttaatatatgggt

SEQ ID NO: 86214 - DNA, 20 bp, synthetic construct
  source 1..20: mol_type = other DNA
acaggtttttaatatatggg

SEQ ID NO: 86215 - DNA, 20 bp, synthetic construct
  source 1..20: mol_type = other DNA
aacaggtttttaatatatgg

SEQ ID NO: 86216 - DNA, 20 bp, synthetic construct
  source 1..20: mol_type = other DNA
aaacaggtttttaatatatg

SEQ ID NO: 86217 - DNA, 20 bp, synthetic construct
  source 1..20: mol_type = other DNA
aaaacaggtttttaatatat

SEQ ID NO: 86218 - DNA, 20 bp, synthetic construct
  source 1..20: mol_type = other DNA
gaaaacaggtttttaatata

SEQ ID NO: 86219 - DNA, 20 bp, synthetic construct
  source 1..20: mol_type = other DNA
agaaaacaggtttttaatat

SEQ ID NO: 86220 - DNA, 20 bp, synthetic construct
  source 1..20: mol_type = other DNA
cagaaaacaggtttttaata

SEQ ID NO: 86221 - DNA, 20 bp, synthetic construct
  source 1..20: mol_type = other DNA
tcagaaaacaggtttttaat

SEQ ID NO: 86222 - DNA, 20 bp, synthetic construct
  source 1..20: mol_type = other DNA
ttcagaaaacaggtttttaa

SEQ ID NO: 86223 - DNA, 20 bp, synthetic construct
  source 1..20: mol_type = other DNA
attcagaaaacaggttttta

SEQ ID NO: 86224 - DNA, 20 bp, synthetic construct
  source 1..20: mol_type = other DNA
gattcagaaaacaggttttt

SEQ ID NO: 86225 - DNA, 20 bp, synthetic construct
  source 1..20: mol_type = other DNA
tgattcagaaaacaggtttt

SEQ ID NO: 86226 - DNA, 20 bp, synthetic construct
  source 1..20: mol_type = other DNA
atgattcagaaaacaggttt

SEQ ID NO: 86227 - DNA, 20 bp, synthetic construct
  source 1..20: mol_type = other DNA
tatgattcagaaaacaggtt

SEQ ID NO: 86228 - DNA, 20 bp, synthetic construct
  source 1..20: mol_type = other DNA
ttatgattcagaaaacaggt

SEQ ID NO: 86229 - DNA, 20 bp, synthetic construct
  source 1..20: mol_type = other DNA
attatgattcagaaaacagg

SEQ ID NO: 86230 - DNA, 20 bp, synthetic construct
  source 1..20: mol_type = other DNA
cattatgattcagaaaacag

SEQ ID NO: 86231 - DNA, 20 bp, synthetic construct
  source 1..20: mol_type = other DNA
acattatgattcagaaaaca

SEQ ID NO: 86232 - DNA, 20 bp, synthetic construct
  source 1..20: mol_type = other DNA
gacattatgattcagaaaac

SEQ ID NO: 86233 - DNA, 20 bp, synthetic construct
  source 1..20: mol_type = other DNA
ggacattatgattcagaaaa

SEQ ID NO: 86234 - DNA, 20 bp, synthetic construct
  source 1..20: mol_type = other DNA
aggacattatgattcagaaa

SEQ ID NO: 86235 - DNA, 20 bp, synthetic construct
  source 1..20: mol_type = other DNA
aaggacattatgattcagaa

SEQ ID NO: 86236 - DNA, 20 bp, synthetic construct
  source 1..20: mol_type = other DNA
aaaggacattatgattcaga

SEQ ID NO: 86237 - DNA, 20 bp, synthetic construct
  source 1..20: mol_type = other DNA
aaaaggacattatgattcag

SEQ ID NO: 86238 - DNA, 20 bp, synthetic construct
  source 1..20: mol_type = other DNA
caaaaggacattatgattca

SEQ ID NO: 86239 - DNA, 20 bp, synthetic construct
  source 1..20: mol_type = other DNA
tcaaaaggacattatgattc

SEQ ID NO: 86240 - DNA, 20 bp, synthetic construct
  source 1..20: mol_type = other DNA
atcaaaaggacattatgatt

SEQ ID NO: 86241 - DNA, 20 bp, synthetic construct
  source 1..20: mol_type = other DNA
tatcaaaaggacattatgat

SEQ ID NO: 86242 - DNA, 20 bp, synthetic construct
  source 1..20: mol_type = other DNA
gtatcaaaaggacattatga

SEQ ID NO: 86243 - DNA, 20 bp, synthetic construct
  source 1..20: mol_type = other DNA
agtatcaaaaggacattatg

SEQ ID NO: 86244 - DNA, 20 bp, synthetic construct
  source 1..20: mol_type = other DNA
tagtatcaaaaggacattat

SEQ ID NO: 86245 - DNA, 20 bp, synthetic construct
  source 1..20: mol_type = other DNA
ctagtatcaaaaggacatta

SEQ ID NO: 86246 - DNA, 20 bp, synthetic construct
  source 1..20: mol_type = other DNA
actagtatcaaaaggacatt

SEQ ID NO: 86247 - DNA, 20 bp, synthetic construct
  source 1..20: mol_type = other DNA
aactagtatcaaaaggacat

SEQ ID NO: 86248 - DNA, 20 bp, synthetic construct
  source 1..20: mol_type = other DNA
gaactagtatcaaaaggaca

SEQ ID NO: 86249 - DNA, 20 bp, synthetic construct
  source 1..20: mol_type = other DNA
agaactagtatcaaaaggac

SEQ ID NO: 86250 - DNA, 20 bp, synthetic construct
  source 1..20: mol_type = other DNA
cagaactagtatcaaaagga

SEQ ID NO: 86251 - DNA, 20 bp, synthetic construct
  source 1..20: mol_type = other DNA
tcagaactagtatcaaaagg

SEQ ID NO: 86252 - DNA, 20 bp, synthetic construct
  source 1..20: mol_type = other DNA
ttcagaactagtatcaaaag

SEQ ID NO: 86253 - DNA, 20 bp, synthetic construct
  source 1..20: mol_type = other DNA
attcagaactagtatcaaaa

SEQ ID NO: 86254 - DNA, 20 bp, synthetic construct
  source 1..20: mol_type = other DNA
tattcagaactagtatcaaa

SEQ ID NO: 86255 - DNA, 20 bp, synthetic construct
  source 1..20: mol_type = other DNA
atattcagaactagtatcaa

SEQ ID NO: 86256 - DNA, 20 bp, synthetic construct
  source 1..20: mol_type = other DNA
aatattcagaactagtatca

SEQ ID NO: 86257 - DNA, 20 bp, synthetic construct
  source 1..20: mol_type = other DNA
aaatattcagaactagtatc

SEQ ID NO: 86258 - DNA, 20 bp, synthetic construct
  source 1..20: mol_type = other DNA
caaatattcagaactagtat

SEQ ID NO: 86259 - DNA, 20 bp, synthetic construct
  source 1..20: mol_type = other DNA
acaaatattcagaactagta

SEQ ID NO: 86260 - DNA, 20 bp, synthetic construct
  source 1..20: mol_type = other DNA
cacaaatattcagaactagt

SEQ ID NO: 86261 - DNA, 20 bp, synthetic construct
  source 1..20: mol_type = other DNA
acacaaatattcagaactag

SEQ ID NO: 86262 - DNA, 20 bp, synthetic construct
  source 1..20: mol_type = other DNA
aacacaaatattcagaacta

SEQ ID NO: 86263 - DNA, 20 bp, synthetic construct
  source 1..20: mol_type = other DNA
taacacaaatattcagaact

SEQ ID NO: 86264 - DNA, 20 bp, synthetic construct
  source 1..20: mol_type = other DNA
ttaacacaaatattcagaac

SEQ ID NO: 86265 - DNA, 20 bp, synthetic construct
  source 1..20: mol_type = other DNA
tttaacacaaatattcagaa

SEQ ID NO: 86266 - DNA, 20 bp, synthetic construct
  source 1..20: mol_type = other DNA
ttttaacacaaatattcaga

SEQ ID NO: 86267 - DNA, 20 bp, synthetic construct
  source 1..20: mol_type = other DNA
attttaacacaaatattcag

SEQ ID NO: 86268 - DNA, 20 bp, synthetic construct
  source 1..20: mol_type = other DNA
aattttaacacaaatattca

SEQ ID NO: 86269 - DNA, 20 bp, synthetic construct
  source 1..20: mol_type = other DNA
aaattttaacacaaatattc

SEQ ID NO: 86270 - DNA, 20 bp, synthetic construct
  source 1..20: mol_type = other DNA
aaaattttaacacaaatatt

SEQ ID NO: 86271 - DNA, 20 bp, synthetic construct
  source 1..20: mol_type = other DNA
taaaattttaacacaaatat

SEQ ID NO: 86272 - DNA, 20 bp, synthetic construct
  source 1..20: mol_type = other DNA
ttaaaattttaacacaaata

SEQ ID NO: 86273 - DNA, 20 bp, synthetic construct
  source 1..20: mol_type = other DNA
attaaaattttaacacaaat

SEQ ID NO: 86274 - DNA, 20 bp, synthetic construct
  source 1..20: mol_type = other DNA
gattaaaattttaacacaaa

SEQ ID NO: 86275 - DNA, 20 bp, synthetic construct
  source 1..20: mol_type = other DNA
agattaaaattttaacacaa

SEQ ID NO: 86276 - DNA, 20 bp, synthetic construct
  source 1..20: mol_type = other DNA
cagattaaaattttaacaca

SEQ ID NO: 86277 - DNA, 20 bp, synthetic construct
  source 1..20: mol_type = other DNA
tcagattaaaattttaacac

SEQ ID NO: 86278 - DNA, 20 bp, synthetic construct
  source 1..20: mol_type = other DNA
atcagattaaaattttaaca

SEQ ID NO: 86279 - DNA, 20 bp, synthetic construct
  source 1..20: mol_type = other DNA
aatcagattaaaattttaac

SEQ ID NO: 86280 - DNA, 20 bp, synthetic construct
  source 1..20: mol_type = other DNA
aaatcagattaaaattttaa

SEQ ID NO: 86281 - DNA, 20 bp, synthetic construct
  source 1..20: mol_type = other DNA
caaatcagattaaaatttta

SEQ ID NO: 86282 - DNA, 20 bp, synthetic construct
  source 1..20: mol_type = other DNA
acaaatcagattaaaatttt

SEQ ID NO: 86283 - DNA, 20 bp, synthetic construct
  source 1..20: mol_type = other DNA
aacaaatcagattaaaattt

SEQ ID NO: 86284 - DNA, 20 bp, synthetic construct
  source 1..20: mol_type = other DNA
gaacaaatcagattaaaatt

SEQ ID NO: 86285 - DNA, 20 bp, synthetic construct
  source 1..20: mol_type = other DNA
tgaacaaatcagattaaaat

SEQ ID NO: 86286 - DNA, 20 bp, synthetic construct
  source 1..20: mol_type = other DNA
atgaacaaatcagattaaaa

SEQ ID NO: 86287 - DNA, 20 bp, synthetic construct
  source 1..20: mol_type = other DNA
aatgaacaaatcagattaaa

SEQ ID NO: 86288 - DNA, 20 bp, synthetic construct
  source 1..20: mol_type = other DNA
taatgaacaaatcagattaa

SEQ ID NO: 86289 - DNA, 20 bp, synthetic construct
  source 1..20: mol_type = other DNA
ttaatgaacaaatcagatta

SEQ ID NO: 86290 - DNA, 20 bp, synthetic construct
  source 1..20: mol_type = other DNA
tttaatgaacaaatcagatt

SEQ ID NO: 86291 - DNA, 20 bp, synthetic construct
  source 1..20: mol_type = other DNA
ttttaatgaacaaatcagat

SEQ ID NO: 86292 - DNA, 20 bp, synthetic construct
  source 1..20: mol_type = other DNA
attttaatgaacaaatcaga

SEQ ID NO: 86293 - DNA, 20 bp, synthetic construct
  source 1..20: mol_type = other DNA
aattttaatgaacaaatcag

SEQ ID NO: 86294 - DNA, 20 bp, synthetic construct
  source 1..20: mol_type = other DNA
taattttaatgaacaaatca

SEQ ID NO: 86295 - DNA, 20 bp, synthetic construct
  source 1..20: mol_type = other DNA
ctaattttaatgaacaaatc

SEQ ID NO: 86296 - DNA, 20 bp, synthetic construct
  source 1..20: mol_type = other DNA
actaattttaatgaacaaat

SEQ ID NO: 86297 - DNA, 20 bp, synthetic construct
  source 1..20: mol_type = other DNA
aactaattttaatgaacaaa

SEQ ID NO: 86298 - DNA, 20 bp, synthetic construct
  source 1..20: mol_type = other DNA
taactaattttaatgaacaa

SEQ ID NO: 86299 - DNA, 20 bp, synthetic construct
  source 1..20: mol_type = other DNA
ttaactaattttaatgaaca

SEQ ID NO: 86300 - DNA, 20 bp, synthetic construct
  source 1..20: mol_type = other DNA
attaactaattttaatgaac

SEQ ID NO: 86301 - DNA, 20 bp, synthetic construct
  source 1..20: mol_type = other DNA
tattaactaattttaatgaa

SEQ ID NO: 86302 - DNA, 20 bp, synthetic construct
  source 1..20: mol_type = other DNA
atattaactaattttaatga

SEQ ID NO: 86303 - DNA, 20 bp, synthetic construct
  source 1..20: mol_type = other DNA
aatattaactaattttaatg

SEQ ID NO: 86304 - DNA, 20 bp, synthetic construct
  source 1..20: mol_type = other DNA
caatattaactaattttaat

SEQ ID NO: 86305 - DNA, 20 bp, synthetic construct
  source 1..20: mol_type = other DNA
gcaatattaactaattttaa

SEQ ID NO: 86306 - DNA, 20 bp, synthetic construct
  source 1..20: mol_type = other DNA
agcaatattaactaatttta

SEQ ID NO: 86307 - DNA, 20 bp, synthetic construct
  source 1..20: mol_type = other DNA
aagcaatattaactaatttt

SEQ ID NO: 86308 - DNA, 20 bp, synthetic construct
  source 1..20: mol_type = other DNA
taagcaatattaactaattt

SEQ ID NO: 86309 - DNA, 20 bp, synthetic construct
  source 1..20: mol_type = other DNA
ataagcaatattaactaatt

SEQ ID NO: 86310 - DNA, 20 bp, synthetic construct
  source 1..20: mol_type = other DNA
cataagcaatattaactaat

SEQ ID NO: 86311 - DNA, 20 bp, synthetic construct
  source 1..20: mol_type = other DNA
acataagcaatattaactaa

SEQ ID NO: 86312 - DNA, 20 bp, synthetic construct
  source 1..20: mol_type = other DNA
aacataagcaatattaacta

SEQ ID NO: 86313 - DNA, 20 bp, synthetic construct
  source 1..20: mol_type = other DNA
caacataagcaatattaact

SEQ ID NO: 86314 - DNA, 20 bp, synthetic construct
  source 1..20: mol_type = other DNA
ccaacataagcaatattaac

SEQ ID NO: 86315 - DNA, 20 bp, synthetic construct
  source 1..20: mol_type = other DNA
cccaacataagcaatattaa

SEQ ID NO: 86316 - DNA, 20 bp, synthetic construct
  source 1..20: mol_type = other DNA
tcccaacataagcaatatta

SEQ ID NO: 86317 - DNA, 20 bp, synthetic construct
  source 1..20: mol_type = other DNA
gtcccaacataagcaatatt

SEQ ID NO: 86318 - DNA, 20 bp, synthetic construct
  source 1..20: mol_type = other DNA
agtcccaacataagcaatat

SEQ ID NO: 86319 - DNA, 20 bp, synthetic construct
  source 1..20: mol_type = other DNA
tagtcccaacataagcaata

SEQ ID NO: 86320 - DNA, 20 bp, synthetic construct
  source 1..20: mol_type = other DNA
ttagtcccaacataagcaat

SEQ ID NO: 86321 - DNA, 20 bp, synthetic construct
  source 1..20: mol_type = other DNA
attagtcccaacataagcaa

SEQ ID NO: 86322 - DNA, 20 bp, synthetic construct
  source 1..20: mol_type = other DNA
tattagtcccaacataagca

SEQ ID NO: 86323 - DNA, 20 bp, synthetic construct
  source 1..20: mol_type = other DNA
ttattagtcccaacataagc

SEQ ID NO: 86324 - DNA, 20 bp, synthetic construct
  source 1..20: mol_type = other DNA
tttattagtcccaacataag

SEQ ID NO: 86325 - DNA, 20 bp, synthetic construct
  source 1..20: mol_type = other DNA
ctttattagtcccaacataa

SEQ ID NO: 86326 - DNA, 20 bp, synthetic construct
  source 1..20: mol_type = other DNA
actttattagtcccaacata

SEQ ID NO: 86327 - DNA, 20 bp, synthetic construct
  source 1..20: mol_type = other DNA
aactttattagtcccaacat

SEQ ID NO: 86328 - DNA, 20 bp, synthetic construct
  source 1..20: mol_type = other DNA
aaactttattagtcccaaca

SEQ ID NO: 86329 - DNA, 20 bp, synthetic construct
  source 1..20: mol_type = other DNA
aaaactttattagtcccaac

SEQ ID NO: 86330 - DNA, 20 bp, synthetic construct
  source 1..20: mol_type = other DNA
gaaaactttattagtcccaa

SEQ ID NO: 86331 - DNA, 20 bp, synthetic construct
  source 1..20: mol_type = other DNA
ggaaaactttattagtccca

SEQ ID NO: 86332 - DNA, 20 bp, synthetic construct
  source 1..20: mol_type = other DNA
cggaaaactttattagtccc

SEQ ID NO: 86333 - DNA, 20 bp, synthetic construct
  source 1..20: mol_type = other DNA
gcggaaaactttattagtcc

SEQ ID NO: 86334 - DNA, 20 bp, synthetic construct
  source 1..20: mol_type = other DNA
tgcggaaaactttattagtc

SEQ ID NO: 86335 - DNA, 20 bp, synthetic construct
  source 1..20: mol_type = other DNA
gtgcggaaaactttattagt

SEQ ID NO: 86336 - DNA, 20 bp, synthetic construct
  source 1..20: mol_type = other DNA
tgtgcggaaaactttattag

SEQ ID NO: 86337 - DNA, 20 bp, synthetic construct
  source 1..20: mol_type = other DNA
ttgtgcggaaaactttatta

SEQ ID NO: 86338 - DNA, 20 bp, synthetic construct
  source 1..20: mol_type = other DNA
tttgtgcggaaaactttatt

SEQ ID NO: 86339 - DNA, 20 bp, synthetic construct
  source 1..20: mol_type = other DNA
ttttgtgcggaaaactttat

SEQ ID NO: 86340 - DNA, 20 bp, synthetic construct
  source 1..20: mol_type = other DNA
attttgtgcggaaaacttta

SEQ ID NO: 86341 - DNA, 20 bp, synthetic construct
  source 1..20: mol_type = other DNA
cattttgtgcggaaaacttt

SEQ ID NO: 86342 - DNA, 20 bp, synthetic construct
  source 1..20: mol_type = other DNA
acattttgtgcggaaaactt

SEQ ID NO: 86343 - DNA, 20 bp, synthetic construct
  source 1..20: mol_type = other DNA
cacattttgtgcggaaaact

SEQ ID NO: 86344 - DNA, 20 bp, synthetic construct
  source 1..20: mol_type = other DNA
acacattttgtgcggaaaac

SEQ ID NO: 86345 - DNA, 20 bp, synthetic construct
  source 1..20: mol_type = other DNA
aacacattttgtgcggaaaa

SEQ ID NO: 86346 - DNA, 20 bp, synthetic construct
  source 1..20: mol_type = other DNA
aaacacattttgtgcggaaa

SEQ ID NO: 86347 - DNA, 20 bp, synthetic construct
  source 1..20: mol_type = other DNA
gaaacacattttgtgcggaa

SEQ ID NO: 86348 - DNA, 20 bp, synthetic construct
  source 1..20: mol_type = other DNA
agaaacacattttgtgcgga

SEQ ID NO: 86349 - DNA, 20 bp, synthetic construct
  source 1..20: mol_type = other DNA
gagaaacacattttgtgcgg

SEQ ID NO: 86350 - DNA, 20 bp, synthetic construct
  source 1..20: mol_type = other DNA
ggagaaacacattttgtgcg

SEQ ID NO: 86351 - DNA, 20 bp, synthetic construct
  source 1..20: mol_type = other DNA
aggagaaacacattttgtgc

SEQ ID NO: 86352 - DNA, 20 bp, synthetic construct
  source 1..20: mol_type = other DNA
caggagaaacacattttgtg

SEQ ID NO: 86353 - DNA, 20 bp, synthetic construct
  source 1..20: mol_type = other DNA
gcaggagaaacacattttgt

SEQ ID NO: 86354 - DNA, 20 bp, synthetic construct
  source 1..20: mol_type = other DNA
agcaggagaaacacattttg

SEQ ID NO: 86355 - DNA, 20 bp, synthetic construct
  source 1..20: mol_type = other DNA
aagcaggagaaacacatttt

SEQ ID NO: 86356 - DNA, 20 bp, synthetic construct
  source 1..20: mol_type = other DNA
gaagcaggagaaacacattt

SEQ ID NO: 86357 - DNA, 20 bp, synthetic construct
  source 1..20: mol_type = other DNA
ggaagcaggagaaacacatt

SEQ ID NO: 86358 - DNA, 20 bp, synthetic construct
  source 1..20: mol_type = other DNA
gggaagcaggagaaacacat

SEQ ID NO: 86359 - DNA, 20 bp, synthetic construct
  source 1..20: mol_type = other DNA
agggaagcaggagaaacaca

SEQ ID NO: 86360 - DNA, 20 bp, synthetic construct
  source 1..20: mol_type = other DNA
cagggaagcaggagaaacac

SEQ ID NO: 86361 - DNA, 20 bp, synthetic construct
  source 1..20: mol_type = other DNA
ccagggaagcaggagaaaca

SEQ ID NO: 86362 - DNA, 20 bp, synthetic construct
  source 1..20: mol_type = other DNA
tccagggaagcaggagaaac

SEQ ID NO: 86363 - DNA, 20 bp, synthetic construct
  source 1..20: mol_type = other DNA
ctccagggaagcaggagaaa

SEQ ID NO: 86364 - DNA, 20 bp, synthetic construct
  source 1..20: mol_type = other DNA
tctccagggaagcaggagaa

SEQ ID NO: 86365 - DNA, 20 bp, synthetic construct
  source 1..20: mol_type = other DNA
ttctccagggaagcaggaga

SEQ ID NO: 86366 - DNA, 20 bp, synthetic construct
  source 1..20: mol_type = other DNA
tttctccagggaagcaggag

SEQ ID NO: 86367 - DNA, 20 bp, synthetic construct
  source 1..20: mol_type = other DNA
ttttctccagggaagcagga

SEQ ID NO: 86368 - DNA, 20 bp, synthetic construct
  source 1..20: mol_type = other DNA
gttttctccagggaagcagg

SEQ ID NO: 86369 - DNA, 20 bp, synthetic construct
  source 1..20: mol_type = other DNA
agttttctccagggaagcag

SEQ ID NO: 86370 - DNA, 20 bp, synthetic construct
  source 1..20: mol_type = other DNA
cagttttctccagggaagca

SEQ ID NO: 86371 - DNA, 20 bp, synthetic construct
  source 1..20: mol_type = other DNA
acagttttctccagggaagc

SEQ ID NO: 86372 - DNA, 20 bp, synthetic construct
  source 1..20: mol_type = other DNA
tacagttttctccagggaag

SEQ ID NO: 86373 - DNA, 20 bp, synthetic construct
  source 1..20: mol_type = other DNA
atacagttttctccagggaa

SEQ ID NO: 86374 - DNA, 20 bp, synthetic construct
  source 1..20: mol_type = other DNA
aatacagttttctccaggga

SEQ ID NO: 86375 - DNA, 20 bp, synthetic construct
  source 1..20: mol_type = other DNA
caatacagttttctccaggg

SEQ ID NO: 86376 - DNA, 20 bp, synthetic construct
  source 1..20: mol_type = other DNA
ccaatacagttttctccagg

SEQ ID NO: 86377 - DNA, 20 bp, synthetic construct
  source 1..20: mol_type = other DNA
gccaatacagttttctccag

SEQ ID NO: 86378 - DNA, 20 bp, synthetic construct
  source 1..20: mol_type = other DNA
agccaatacagttttctcca

SEQ ID NO: 86379 - DNA, 20 bp, synthetic construct
  source 1..20: mol_type = other DNA
tagccaatacagttttctcc

SEQ ID NO: 86380 - DNA, 20 bp, synthetic construct
  source 1..20: mol_type = other DNA
gtagccaatacagttttctc

SEQ ID NO: 86381 - DNA, 20 bp, synthetic construct
  source 1..20: mol_type = other DNA
agtagccaatacagttttct

SEQ ID NO: 86382 - DNA, 20 bp, synthetic construct
  source 1..20: mol_type = other DNA
aagtagccaatacagttttc

SEQ ID NO: 86383 - DNA, 20 bp, synthetic construct
  source 1..20: mol_type = other DNA
aaagtagccaatacagtttt

SEQ ID NO: 86384 - DNA, 20 bp, synthetic construct
  source 1..20: mol_type = other DNA
aaaagtagccaatacagttt

SEQ ID NO: 86385 - DNA, 20 bp, synthetic construct
  source 1..20: mol_type = other DNA
taaaagtagccaatacagtt

SEQ ID NO: 86386 - DNA, 20 bp, synthetic construct
  source 1..20: mol_type = other DNA
ttaaaagtagccaatacagt

SEQ ID NO: 86387 - DNA, 20 bp, synthetic construct
  source 1..20: mol_type = other DNA
tttaaaagtagccaatacag

SEQ ID NO: 86388 - DNA, 20 bp, synthetic construct
  source 1..20: mol_type = other DNA
atttaaaagtagccaataca

SEQ ID NO: 86389 - DNA, 20 bp, synthetic construct
  source 1..20: mol_type = other DNA
tatttaaaagtagccaatac

SEQ ID NO: 86390 - DNA, 20 bp, synthetic construct
  source 1..20: mol_type = other DNA
ttatttaaaagtagccaata

SEQ ID NO: 86391 - DNA, 20 bp, synthetic construct
  source 1..20: mol_type = other DNA
tttatttaaaagtagccaat

SEQ ID NO: 86392 - DNA, 20 bp, synthetic construct
  source 1..20: mol_type = other DNA
atttatttaaaagtagccaa

SEQ ID NO: 86393 - DNA, 20 bp, synthetic construct
  source 1..20: mol_type = other DNA
aatttatttaaaagtagcca

SEQ ID NO: 86394 - DNA, 20 bp, synthetic construct
  source 1..20: mol_type = other DNA
caatttatttaaaagtagcc

SEQ ID NO: 86395 - DNA, 20 bp, synthetic construct
  source 1..20: mol_type = other DNA
acaatttatttaaaagtagc

SEQ ID NO: 86396 - DNA, 20 bp, synthetic construct
  source 1..20: mol_type = other DNA
aacaatttatttaaaagtag

SEQ ID NO: 86397 - DNA, 20 bp, synthetic construct
  source 1..20: mol_type = other DNA
taacaatttatttaaaagta

SEQ ID NO: 86398 - DNA, 20 bp, synthetic construct
  source 1..20: mol_type = other DNA
gtaacaatttatttaaaagt

SEQ ID NO: 86399 - DNA, 20 bp, synthetic construct
  source 1..20: mol_type = other DNA
ggtaacaatttatttaaaag

SEQ ID NO: 86400 - DNA, 20 bp, synthetic construct
  source 1..20: mol_type = other DNA
tggtaacaatttatttaaaa

SEQ ID NO: 86401 - DNA, 20 bp, synthetic construct
  source 1..20: mol_type = other DNA
atggtaacaatttatttaaa

SEQ ID NO: 86402 - DNA, 20 bp, synthetic construct
  source 1..20: mol_type = other DNA
gatggtaacaatttatttaa

SEQ ID NO: 86403 - DNA, 20 bp, synthetic construct
  source 1..20: mol_type = other DNA
agatggtaacaatttattta

SEQ ID NO: 86404 - DNA, 20 bp, synthetic construct
  source 1..20: mol_type = other DNA
tagatggtaacaatttattt

SEQ ID NO: 86405 - DNA, 20 bp, synthetic construct
  source 1..20: mol_type = other DNA
ttagatggtaacaatttatt

SEQ ID NO: 86406 - DNA, 20 bp, synthetic construct
  source 1..20: mol_type = other DNA
cttagatggtaacaatttat

SEQ ID NO: 86407 - DNA, 20 bp, synthetic construct
  source 1..20: mol_type = other DNA
gcttagatggtaacaattta

SEQ ID NO: 86408 - DNA, 20 bp, synthetic construct
  source 1..20: mol_type = other DNA
tgcttagatggtaacaattt

SEQ ID NO: 86409 - DNA, 20 bp, synthetic construct
  source 1..20: mol_type = other DNA
ctgcttagatggtaacaatt

SEQ ID NO: 86410 - DNA, 20 bp, synthetic construct
  source 1..20: mol_type = other DNA
cctgcttagatggtaacaat

SEQ ID NO: 86411 - DNA, 20 bp, synthetic construct
  source 1..20: mol_type = other DNA
gcctgcttagatggtaacaa

SEQ ID NO: 86412 - DNA, 20 bp, synthetic construct
  source 1..20: mol_type = other DNA
tgcctgcttagatggtaaca

SEQ ID NO: 86413 - DNA, 20 bp, synthetic construct
  source 1..20: mol_type = other DNA
ctgcctgcttagatggtaac

SEQ ID NO: 86414 - DNA, 20 bp, synthetic construct
  source 1..20: mol_type = other DNA
cctgcctgcttagatggtaa

SEQ ID NO: 86415 - DNA, 20 bp, synthetic construct
  source 1..20: mol_type = other DNA
acctgcctgcttagatggta

SEQ ID NO: 86416 - DNA, 20 bp, synthetic construct
  source 1..20: mol_type = other DNA
gacctgcctgcttagatggt

SEQ ID NO: 86417 - DNA, 20 bp, synthetic construct
  source 1..20: mol_type = other DNA
tgacctgcctgcttagatgg

SEQ ID NO: 86418 - DNA, 20 bp, synthetic construct
  source 1..20: mol_type = other DNA
atgacctgcctgcttagatg

SEQ ID NO: 86419 - DNA, 20 bp, synthetic construct
  source 1..20: mol_type = other DNA
tatgacctgcctgcttagat

SEQ ID NO: 86420 - DNA, 20 bp, synthetic construct
  source 1..20: mol_type = other DNA
atatgacctgcctgcttaga

SEQ ID NO: 86421 - DNA, 20 bp, synthetic construct
  source 1..20: mol_type = other DNA
catatgacctgcctgcttag

SEQ ID NO: 86422 - DNA, 20 bp, synthetic construct
  source 1..20: mol_type = other DNA
tcatatgacctgcctgctta

SEQ ID NO: 86423 - DNA, 20 bp, synthetic construct
  source 1..20: mol_type = other DNA
gtcatatgacctgcctgctt

SEQ ID NO: 86424 - DNA, 20 bp, synthetic construct
  source 1..20: mol_type = other DNA
agtcatatgacctgcctgct

SEQ ID NO: 86425 - DNA, 20 bp, synthetic construct
  source 1..20: mol_type = other DNA
aagtcatatgacctgcctgc

SEQ ID NO: 86426 - DNA, 20 bp, synthetic construct
  source 1..20: mol_type = other DNA
aaagtcatatgacctgcctg

SEQ ID NO: 86427 - DNA, 20 bp, synthetic construct
  source 1..20: mol_type = other DNA
caaagtcatatgacctgcct

SEQ ID NO: 86428 - DNA, 20 bp, synthetic construct
  source 1..20: mol_type = other DNA
tcaaagtcatatgacctgcc

SEQ ID NO: 86429 - DNA, 20 bp, synthetic construct
  source 1..20: mol_type = other DNA
gtcaaagtcatatgacctgc

SEQ ID NO: 86430 - DNA, 20 bp, synthetic construct
  source 1..20: mol_type = other DNA
agtcaaagtcatatgacctg

SEQ ID NO: 86431 - DNA, 20 bp, synthetic construct
  source 1..20: mol_type = other DNA
cagtcaaagtcatatgacct

SEQ ID NO: 86432 - DNA, 20 bp, synthetic construct
  source 1..20: mol_type = other DNA
tcagtcaaagtcatatgacc

SEQ ID NO: 86433 - DNA, 20 bp, synthetic construct
  source 1..20: mol_type = other DNA
ttcagtcaaagtcatatgac

SEQ ID NO: 86434 - DNA, 20 bp, synthetic construct
  source 1..20: mol_type = other DNA
cttcagtcaaagtcatatga

SEQ ID NO: 86435 - DNA, 20 bp, synthetic construct
  source 1..20: mol_type = other DNA
gcttcagtcaaagtcatatg

SEQ ID NO: 86436 - DNA, 20 bp, synthetic construct
  source 1..20: mol_type = other DNA
tgcttcagtcaaagtcatat

SEQ ID NO: 86437 - DNA, 20 bp, synthetic construct
  source 1..20: mol_type = other DNA
atgcttcagtcaaagtcata

SEQ ID NO: 86438 - DNA, 20 bp, synthetic construct
  source 1..20: mol_type = other DNA
gatgcttcagtcaaagtcat

SEQ ID NO: 86439 - DNA, 20 bp, synthetic construct
  source 1..20: mol_type = other DNA
agatgcttcagtcaaagtca

SEQ ID NO: 86440 - DNA, 20 bp, synthetic construct
  source 1..20: mol_type = other DNA
tagatgcttcagtcaaagtc

SEQ ID NO: 86441 - DNA, 20 bp, synthetic construct
  source 1..20: mol_type = other DNA
ttagatgcttcagtcaaagt

SEQ ID NO: 86442 - DNA, 20 bp, synthetic construct
  source 1..20: mol_type = other DNA
gttagatgcttcagtcaaag

SEQ ID NO: 86443 - DNA, 20 bp, synthetic construct
  source 1..20: mol_type = other DNA
ggttagatgcttcagtcaaa

SEQ ID NO: 86444 - DNA, 20 bp, synthetic construct
  source 1..20: mol_type = other DNA
aggttagatgcttcagtcaa

SEQ ID NO: 86445 - DNA, 20 bp, synthetic construct
  source 1..20: mol_type = other DNA
aaggttagatgcttcagtca

SEQ ID NO: 86446 - DNA, 20 bp, synthetic construct
  source 1..20: mol_type = other DNA
caaggttagatgcttcagtc

SEQ ID NO: 86447 - DNA, 20 bp, synthetic construct
  source 1..20: mol_type = other DNA
tcaaggttagatgcttcagt

SEQ ID NO: 86448 - DNA, 20 bp, synthetic construct
  source 1..20: mol_type = other DNA
ttcaaggttagatgcttcag

SEQ ID NO: 86449 - DNA, 20 bp, synthetic construct
  source 1..20: mol_type = other DNA
cttcaaggttagatgcttca

SEQ ID NO: 86450 - DNA, 20 bp, synthetic construct
  source 1..20: mol_type = other DNA
tcttcaaggttagatgcttc

SEQ ID NO: 86451 - DNA, 20 bp, synthetic construct
  source 1..20: mol_type = other DNA
ctcttcaaggttagatgctt

SEQ ID NO: 86452 - DNA, 20 bp, synthetic construct
  source 1..20: mol_type = other DNA
gctcttcaaggttagatgct

SEQ ID NO: 86453 - DNA, 20 bp, synthetic construct
  source 1..20: mol_type = other DNA
tgctcttcaaggttagatgc

SEQ ID NO: 86454 - DNA, 20 bp, synthetic construct
  source 1..20: mol_type = other DNA
ttgctcttcaaggttagatg

SEQ ID NO: 86455 - DNA, 20 bp, synthetic construct
  source 1..20: mol_type = other DNA
cttgctcttcaaggttagat

SEQ ID NO: 86456 - DNA, 20 bp, synthetic construct
  source 1..20: mol_type = other DNA
acttgctcttcaaggttaga

SEQ ID NO: 86457 - DNA, 20 bp, synthetic construct
  source 1..20: mol_type = other DNA
aacttgctcttcaaggttag

SEQ ID NO: 86458 - DNA, 20 bp, synthetic construct
  source 1..20: mol_type = other DNA
gaacttgctcttcaaggtta

SEQ ID NO: 86459 - DNA, 20 bp, synthetic construct
  source 1..20: mol_type = other DNA
ggaacttgctcttcaaggtt

SEQ ID NO: 86460 - DNA, 20 bp, synthetic construct
  source 1..20: mol_type = other DNA
tggaacttgctcttcaaggt

SEQ ID NO: 86461 - DNA, 20 bp, synthetic construct
  source 1..20: mol_type = other DNA
gtggaacttgctcttcaagg

SEQ ID NO: 86462 - DNA, 20 bp, synthetic construct
  source 1..20: mol_type = other DNA
agtggaacttgctcttcaag

SEQ ID NO: 86463 - DNA, 20 bp, synthetic construct
  source 1..20: mol_type = other DNA
cagtggaacttgctcttcaa

SEQ ID NO: 86464 - DNA, 20 bp, synthetic construct
  source 1..20: mol_type = other DNA
tcagtggaacttgctcttca

SEQ ID NO: 86465 - DNA, 20 bp, synthetic construct
  source 1..20: mol_type = other DNA
atcagtggaacttgctcttc

SEQ ID NO: 86466 - DNA, 20 bp, synthetic construct
  source 1..20: mol_type = other DNA
aatcagtggaacttgctctt

SEQ ID NO: 86467 - DNA, 20 bp, synthetic construct
  source 1..20: mol_type = other DNA
aaatcagtggaacttgctct

SEQ ID NO: 86468 - DNA, 20 bp, synthetic construct
  source 1..20: mol_type = other DNA
aaaatcagtggaacttgctc

SEQ ID NO: 86469 - DNA, 20 bp, synthetic construct
  source 1..20: mol_type = other DNA
gaaaatcagtggaacttgct

SEQ ID NO: 86470 - DNA, 20 bp, synthetic construct
  source 1..20: mol_type = other DNA
tgaaaatcagtggaacttgc

SEQ ID NO: 86471 - DNA, 20 bp, synthetic construct
  source 1..20: mol_type = other DNA
ttgaaaatcagtggaacttg

SEQ ID NO: 86472 - DNA, 20 bp, synthetic construct
  source 1..20: mol_type = other DNA
cttgaaaatcagtggaactt

SEQ ID NO: 86473 - DNA, 20 bp, synthetic construct
  source 1..20: mol_type = other DNA
ccttgaaaatcagtggaact

SEQ ID NO: 86474 - DNA, 20 bp, synthetic construct
  source 1..20: mol_type = other DNA
accttgaaaatcagtggaac

SEQ ID NO: 86475 - DNA, 20 bp, synthetic construct
  source 1..20: mol_type = other DNA
caccttgaaaatcagtggaa

SEQ ID NO: 86476 - DNA, 20 bp, synthetic construct
  source 1..20: mol_type = other DNA
tcaccttgaaaatcagtgga

SEQ ID NO: 86477 - DNA, 20 bp, synthetic construct
  source 1..20: mol_type = other DNA
gtcaccttgaaaatcagtgg

SEQ ID NO: 86478 - DNA, 20 bp, synthetic construct
  source 1..20: mol_type = other DNA
agtcaccttgaaaatcagtg

SEQ ID NO: 86479 - DNA, 20 bp, synthetic construct
  source 1..20: mol_type = other DNA
aagtcaccttgaaaatcagt

SEQ ID NO: 86480 - DNA, 20 bp, synthetic construct
  source 1..20: mol_type = other DNA
gaagtcaccttgaaaatcag

SEQ ID NO: 86481 - DNA, 20 bp, synthetic construct
  source 1..20: mol_type = other DNA
agaagtcaccttgaaaatca

SEQ ID NO: 86482 - DNA, 20 bp, synthetic construct
  source 1..20: mol_type = other DNA
aagaagtcaccttgaaaatc

SEQ ID NO: 86483 - DNA, 20 bp, synthetic construct
  source 1..20: mol_type = other DNA
aaagaagtcaccttgaaaat

SEQ ID NO: 86484 - DNA, 20 bp, synthetic construct
  source 1..20: mol_type = other DNA
caaagaagtcaccttgaaaa

SEQ ID NO: 86485 - DNA, 20 bp, synthetic construct
  source 1..20: mol_type = other DNA
gcaaagaagtcaccttgaaa

SEQ ID NO: 86486 - DNA, 20 bp, synthetic construct
  source 1..20: mol_type = other DNA
agcaaagaagtcaccttgaa

SEQ ID NO: 86487 - DNA, 20 bp, synthetic construct
  source 1..20: mol_type = other DNA
gagcaaagaagtcaccttga

SEQ ID NO: 86488 - DNA, 20 bp, synthetic construct
  source 1..20: mol_type = other DNA
tgagcaaagaagtcaccttg

SEQ ID NO: 86489 - DNA, 20 bp, synthetic construct
  source 1..20: mol_type = other DNA
ttgagcaaagaagtcacctt

SEQ ID NO: 86490 - DNA, 20 bp, synthetic construct
  source 1..20: mol_type = other DNA
tttgagcaaagaagtcacct

SEQ ID NO: 86491 - DNA, 20 bp, synthetic construct
  source 1..20: mol_type = other DNA
ttttgagcaaagaagtcacc

SEQ ID NO: 86492 - DNA, 20 bp, synthetic construct
  source 1..20: mol_type = other DNA
cttttgagcaaagaagtcac

SEQ ID NO: 86493 - DNA, 20 bp, synthetic construct
  source 1..20: mol_type = other DNA
ccttttgagcaaagaagtca

SEQ ID NO: 86494 - DNA, 20 bp, synthetic construct
  source 1..20: mol_type = other DNA
cccttttgagcaaagaagtc

SEQ ID NO: 86495 - DNA, 20 bp, synthetic construct
  source 1..20: mol_type = other DNA
gcccttttgagcaaagaagt

SEQ ID NO: 86496 - DNA, 20 bp, synthetic construct
  source 1..20: mol_type = other DNA
ggcccttttgagcaaagaag

SEQ ID NO: 86497 - DNA, 20 bp, synthetic construct
  source 1..20: mol_type = other DNA
aggcccttttgagcaaagaa

SEQ ID NO: 86498 - DNA, 20 bp, synthetic construct
  source 1..20: mol_type = other DNA
aaggcccttttgagcaaaga

SEQ ID NO: 86499 - DNA, 20 bp, synthetic construct
  source 1..20: mol_type = other DNA
taaggcccttttgagcaaag

SEQ ID NO: 86500 - DNA, 20 bp, synthetic construct
  source 1..20: mol_type = other DNA
ttaaggcccttttgagcaaa

SEQ ID NO: 86501 - DNA, 20 bp, synthetic construct
  source 1..20: mol_type = other DNA
attaaggcccttttgagcaa

SEQ ID NO: 86502 - DNA, 20 bp, synthetic construct
  source 1..20: mol_type = other DNA
tattaaggcccttttgagca

SEQ ID NO: 86503 - DNA, 20 bp, synthetic construct
  source 1..20: mol_type = other DNA
ctattaaggcccttttgagc

SEQ ID NO: 86504 - DNA, 20 bp, synthetic construct
  source 1..20: mol_type = other DNA
actattaaggcccttttgag

SEQ ID NO: 86505 - DNA, 20 bp, synthetic construct
  source 1..20: mol_type = other DNA
cactattaaggcccttttga

SEQ ID NO: 86506 - DNA, 20 bp, synthetic construct
  source 1..20: mol_type = other DNA
ccactattaaggcccttttg

SEQ ID NO: 86507 - DNA, 20 bp, synthetic construct
  source 1..20: mol_type = other DNA
accactattaaggccctttt

SEQ ID NO: 86508 - DNA, 20 bp, synthetic construct
  source 1..20: mol_type = other DNA
gaccactattaaggcccttt

SEQ ID NO: 86509 - DNA, 20 bp, synthetic construct
  source 1..20: mol_type = other DNA
tgaccactattaaggccctt

SEQ ID NO: 86510 - DNA, 20 bp, synthetic construct
  source 1..20: mol_type = other DNA
gtgaccactattaaggccct

SEQ ID NO: 86511 - DNA, 20 bp, synthetic construct
  source 1..20: mol_type = other DNA
agtgaccactattaaggccc

SEQ ID NO: 86512 - DNA, 20 bp, synthetic construct
  source 1..20: mol_type = other DNA
tagtgaccactattaaggcc

SEQ ID NO: 86513 - DNA, 20 bp, synthetic construct
  source 1..20: mol_type = other DNA
ttagtgaccactattaaggc

SEQ ID NO: 86514 - DNA, 20 bp, synthetic construct
  source 1..20: mol_type = other DNA
tttagtgaccactattaagg

SEQ ID NO: 86515 - DNA, 20 bp, synthetic construct
  source 1..20: mol_type = other DNA
atttagtgaccactattaag

SEQ ID NO: 86516 - DNA, 20 bp, synthetic construct
  source 1..20: mol_type = other DNA
catttagtgaccactattaa

SEQ ID NO: 86517 - DNA, 20 bp, synthetic construct
  source 1..20: mol_type = other DNA
gcatttagtgaccactatta

SEQ ID NO: 86518 - DNA, 20 bp, synthetic construct
  source 1..20: mol_type = other DNA
tgcatttagtgaccactatt

SEQ ID NO: 86519 - DNA, 20 bp, synthetic construct
  source 1..20: mol_type = other DNA
ttgcatttagtgaccactat

SEQ ID NO: 86520 - DNA, 20 bp, synthetic construct
  source 1..20: mol_type = other DNA
tttgcatttagtgaccacta

SEQ ID NO: 86521 - DNA, 20 bp, synthetic construct
  source 1..20: mol_type = other DNA
ttttgcatttagtgaccact

SEQ ID NO: 86522 - DNA, 20 bp, synthetic construct
  source 1..20: mol_type = other DNA
attttgcatttagtgaccac

SEQ ID NO: 86523 - DNA, 20 bp, synthetic construct
  source 1..20: mol_type = other DNA
aattttgcatttagtgacca

SEQ ID NO: 86524 - DNA, 20 bp, synthetic construct
  source 1..20: mol_type = other DNA
gaattttgcatttagtgacc

SEQ ID NO: 86525 - DNA, 20 bp, synthetic construct
  source 1..20: mol_type = other DNA
agaattttgcatttagtgac

SEQ ID NO: 86526 - DNA, 20 bp, synthetic construct
  source 1..20: mol_type = other DNA
cagaattttgcatttagtga

SEQ ID NO: 86527 - DNA, 20 bp, synthetic construct
  source 1..20: mol_type = other DNA
acagaattttgcatttagtg

SEQ ID NO: 86528 - DNA, 20 bp, synthetic construct
  source 1..20: mol_type = other DNA
aacagaattttgcatttagt

SEQ ID NO: 86529 - DNA, 20 bp, synthetic construct
  source 1..20: mol_type = other DNA
caacagaattttgcatttag

SEQ ID NO: 86530 - DNA, 20 bp, synthetic construct
  source 1..20: mol_type = other DNA
tcaacagaattttgcattta

SEQ ID NO: 86531 - DNA, 20 bp, synthetic construct
  source 1..20: mol_type = other DNA
atcaacagaattttgcattt

SEQ ID NO: 86532 - DNA, 20 bp, synthetic construct
  source 1..20: mol_type = other DNA
tatcaacagaattttgcatt

SEQ ID NO: 86533 - DNA, 20 bp, synthetic construct
  source 1..20: mol_type = other DNA
atatcaacagaattttgcat

SEQ ID NO: 86534 - DNA, 20 bp, synthetic construct
  source 1..20: mol_type = other DNA
aatatcaacagaattttgca

SEQ ID NO: 86535 - DNA, 20 bp, synthetic construct
  source 1..20: mol_type = other DNA
aaatatcaacagaattttgc

SEQ ID NO: 86536 - DNA, 20 bp, synthetic construct
  source 1..20: mol_type = other DNA
aaaatatcaacagaattttg

SEQ ID NO: 86537 - DNA, 20 bp, synthetic construct
  source 1..20: mol_type = other DNA
aaaaatatcaacagaatttt

SEQ ID NO: 86538 - DNA, 20 bp, synthetic construct
  source 1..20: mol_type = other DNA
gaaaaatatcaacagaattt

SEQ ID NO: 86539 - DNA, 20 bp, synthetic construct
  source 1..20: mol_type = other DNA
agaaaaatatcaacagaatt

SEQ ID NO: 86540 - DNA, 20 bp, synthetic construct
  source 1..20: mol_type = other DNA
aagaaaaatatcaacagaat

SEQ ID NO: 86541 - DNA, 20 bp, synthetic construct
  source 1..20: mol_type = other DNA
caagaaaaatatcaacagaa

SEQ ID NO: 86542 - DNA, 20 bp, synthetic construct
  source 1..20: mol_type = other DNA
acaagaaaaatatcaacaga

SEQ ID NO: 86543 - DNA, 20 bp, synthetic construct
  source 1..20: mol_type = other DNA
tacaagaaaaatatcaacag

SEQ ID NO: 86544 - DNA, 20 bp, synthetic construct
  source 1..20: mol_type = other DNA
ctacaagaaaaatatcaaca

SEQ ID NO: 86545 - DNA, 20 bp, synthetic construct
  source 1..20: mol_type = other DNA
actacaagaaaaatatcaac

SEQ ID NO: 86546 - DNA, 20 bp, synthetic construct
  source 1..20: mol_type = other DNA
gactacaagaaaaatatcaa

SEQ ID NO: 86547 - DNA, 20 bp, synthetic construct
  source 1..20: mol_type = other DNA
ggactacaagaaaaatatca

SEQ ID NO: 86548 - DNA, 20 bp, synthetic construct
  source 1..20: mol_type = other DNA
tggactacaagaaaaatatc

SEQ ID NO: 86549 - DNA, 20 bp, synthetic construct
  source 1..20: mol_type = other DNA
atggactacaagaaaaatat

SEQ ID NO: 86550 - DNA, 20 bp, synthetic construct
  source 1..20: mol_type = other DNA
gatggactacaagaaaaata

SEQ ID NO: 86551 - DNA, 20 bp, synthetic construct
  source 1..20: mol_type = other DNA
tgatggactacaagaaaaat

SEQ ID NO: 86552 - DNA, 20 bp, synthetic construct
  source 1..20: mol_type = other DNA
atgatggactacaagaaaaa

SEQ ID NO: 86553 - DNA, 20 bp, synthetic construct
  source 1..20: mol_type = other DNA
aatgatggactacaagaaaa

SEQ ID NO: 86554 - DNA, 20 bp, synthetic construct
  source 1..20: mol_type = other DNA
aaatgatggactacaagaaa

SEQ ID NO: 86555 - DNA, 20 bp, synthetic construct
  source 1..20: mol_type = other DNA
caaatgatggactacaagaa

SEQ ID NO: 86556 - DNA, 20 bp, synthetic construct
  source 1..20: mol_type = other DNA
tcaaatgatggactacaaga

SEQ ID NO: 86557 - DNA, 20 bp, synthetic construct
  source 1..20: mol_type = other DNA
ctcaaatgatggactacaag

SEQ ID NO: 86558 - DNA, 20 bp, synthetic construct
  source 1..20: mol_type = other DNA
actcaaatgatggactacaa

SEQ ID NO: 86559 - DNA, 20 bp, synthetic construct
  source 1..20: mol_type = other DNA
tactcaaatgatggactaca

SEQ ID NO: 86560 - DNA, 20 bp, synthetic construct
  source 1..20: mol_type = other DNA
ttactcaaatgatggactac

SEQ ID NO: 86561 - DNA, 20 bp, synthetic construct
  source 1..20: mol_type = other DNA
cttactcaaatgatggacta

SEQ ID NO: 86562 - DNA, 20 bp, synthetic construct
  source 1..20: mol_type = other DNA
gcttactcaaatgatggact

SEQ ID NO: 86563 - DNA, 20 bp, synthetic construct
  source 1..20: mol_type = other DNA
cgcttactcaaatgatggac

SEQ ID NO: 86564 - DNA, 20 bp, synthetic construct
  source 1..20: mol_type = other DNA
tcgcttactcaaatgatgga

SEQ ID NO: 86565 - DNA, 20 bp, synthetic construct
  source 1..20: mol_type = other DNA
atcgcttactcaaatgatgg

SEQ ID NO: 86566 - DNA, 20 bp, synthetic construct
  source 1..20: mol_type = other DNA
catcgcttactcaaatgatg

SEQ ID NO: 86567 - DNA, 20 bp, synthetic construct
  source 1..20: mol_type = other DNA
acatcgcttactcaaatgat

SEQ ID NO: 86568 - DNA, 20 bp, synthetic construct
  source 1..20: mol_type = other DNA
aacatcgcttactcaaatga

SEQ ID NO: 86569 - DNA, 20 bp, synthetic construct
  source 1..20: mol_type = other DNA
aaacatcgcttactcaaatg

SEQ ID NO: 86570 - DNA, 20 bp, synthetic construct
  source 1..20: mol_type = other DNA
taaacatcgcttactcaaat

SEQ ID NO: 86571 - DNA, 20 bp, synthetic construct
  source 1..20: mol_type = other DNA
ataaacatcgcttactcaaa

SEQ ID NO: 86572 - DNA, 20 bp, synthetic construct
  source 1..20: mol_type = other DNA
aataaacatcgcttactcaa

SEQ ID NO: 86573 - DNA, 20 bp, synthetic construct
  source 1..20: mol_type = other DNA
aaataaacatcgcttactca

SEQ ID NO: 86574 - DNA, 20 bp, synthetic construct
  source 1..20: mol_type = other DNA
taaataaacatcgcttactc

SEQ ID NO: 86575 - DNA, 20 bp, synthetic construct
  source 1..20: mol_type = other DNA
ttaaataaacatcgcttact

SEQ ID NO: 86576 - DNA, 20 bp, synthetic construct
  source 1..20: mol_type = other DNA
attaaataaacatcgcttac

SEQ ID NO: 86577 - DNA, 20 bp, synthetic construct
  source 1..20: mol_type = other DNA
cattaaataaacatcgctta

SEQ ID NO: 86578 - DNA, 20 bp, synthetic construct
  source 1..20: mol_type = other DNA
tcattaaataaacatcgctt

SEQ ID NO: 86579 - DNA, 20 bp, synthetic construct
  source 1..20: mol_type = other DNA
ctcattaaataaacatcgct

SEQ ID NO: 86580 - DNA, 20 bp, synthetic construct
  source 1..20: mol_type = other DNA
tctcattaaataaacatcgc

SEQ ID NO: 86581 - DNA, 20 bp, synthetic construct
  source 1..20: mol_type = other DNA
ttctcattaaataaacatcg

SEQ ID NO: 86582 - DNA, 20 bp, synthetic construct
  source 1..20: mol_type = other DNA
attctcattaaataaacatc

SEQ ID NO: 86583 - DNA, 20 bp, synthetic construct
  source 1..20: mol_type = other DNA
tattctcattaaataaacat

SEQ ID NO: 86584 - DNA, 20 bp, synthetic construct
  source 1..20: mol_type = other DNA
atattctcattaaataaaca

SEQ ID NO: 86585 - DNA, 20 bp, synthetic construct
  source 1..20: mol_type = other DNA
tatattctcattaaataaac

SEQ ID NO: 86586 - DNA, 20 bp, synthetic construct
  source 1..20: mol_type = other DNA
atatattctcattaaataaa

SEQ ID NO: 86587 - DNA, 20 bp, synthetic construct
  source 1..20: mol_type = other DNA
aatatattctcattaaataa

SEQ ID NO: 86588 - DNA, 20 bp, synthetic construct
  source 1..20: mol_type = other DNA
taatatattctcattaaata

SEQ ID NO: 86589 - DNA, 20 bp, synthetic construct
  source 1..20: mol_type = other DNA
ttaatatattctcattaaat

SEQ ID NO: 86590 - DNA, 20 bp, synthetic construct
  source 1..20: mol_type = other DNA
tttaatatattctcattaaa

SEQ ID NO: 86591 - DNA, 20 bp, synthetic construct
  source 1..20: mol_type = other DNA
atttaatatattctcattaa

SEQ ID NO: 86592 - DNA, 20 bp, synthetic construct
  source 1..20: mol_type = other DNA
tatttaatatattctcatta

SEQ ID NO: 86593 - DNA, 20 bp, synthetic construct
  source 1..20: mol_type = other DNA
ttatttaatatattctcatt

SEQ ID NO: 86594 - DNA, 20 bp, synthetic construct
  source 1..20: mol_type = other DNA
tttatttaatatattctcat

SEQ ID NO: 86595 - DNA, 20 bp, synthetic construct
  source 1..20: mol_type = other DNA
ttttatttaatatattctca

SEQ ID NO: 86596 - DNA, 20 bp, synthetic construct
  source 1..20: mol_type = other DNA
gttttatttaatatattctc

SEQ ID NO: 86597 - DNA, 20 bp, synthetic construct
  source 1..20: mol_type = other DNA
tgttttatttaatatattct

SEQ ID NO: 86598 - DNA, 20 bp, synthetic construct
  source 1..20: mol_type = other DNA
atgttttatttaatatattc

SEQ ID NO: 86599 - DNA, 20 bp, synthetic construct
  source 1..20: mol_type = other DNA
catgttttatttaatatatt

SEQ ID NO: 86600 - DNA, 20 bp, synthetic construct
  source 1..20: mol_type = other DNA
tcatgttttatttaatatat

SEQ ID NO: 86601 - DNA, 20 bp, synthetic construct
  source 1..20: mol_type = other DNA
atcatgttttatttaatata

SEQ ID NO: 86602 - DNA, 20 bp, synthetic construct
  source 1..20: mol_type = other DNA
gatcatgttttatttaatat

SEQ ID NO: 86603 - DNA, 20 bp, synthetic construct
  source 1..20: mol_type = other DNA
tgatcatgttttatttaata

SEQ ID NO: 86604 - DNA, 20 bp, synthetic construct
  source 1..20: mol_type = other DNA
atgatcatgttttatttaat

SEQ ID NO: 86605 - DNA, 20 bp, synthetic construct
  source 1..20: mol_type = other DNA
aatgatcatgttttatttaa

SEQ ID NO: 86606 - DNA, 20 bp, synthetic construct
  source 1..20: mol_type = other DNA
taatgatcatgttttattta

SEQ ID NO: 86607 - DNA, 20 bp, synthetic construct
  source 1..20: mol_type = other DNA
ttaatgatcatgttttattt

SEQ ID NO: 86608 - DNA, 20 bp, synthetic construct
  source 1..20: mol_type = other DNA
attaatgatcatgttttatt

SEQ ID NO: 86609 - DNA, 20 bp, synthetic construct
  source 1..20: mol_type = other DNA
cattaatgatcatgttttat

SEQ ID NO: 86610 - DNA, 20 bp, synthetic construct
  source 1..20: mol_type = other DNA
tcattaatgatcatgtttta

SEQ ID NO: 86611 - DNA, 20 bp, synthetic construct
  source 1..20: mol_type = other DNA
gtcattaatgatcatgtttt

SEQ ID NO: 86612 - DNA, 20 bp, synthetic construct
  source 1..20: mol_type = other DNA
agtcattaatgatcatgttt

SEQ ID NO: 86613 - DNA, 20 bp, synthetic construct
  source 1..20: mol_type = other DNA
cagtcattaatgatcatgtt

SEQ ID NO: 86614 - DNA, 20 bp, synthetic construct
  source 1..20: mol_type = other DNA
acagtcattaatgatcatgt

SEQ ID NO: 86615 - DNA, 20 bp, synthetic construct
  source 1..20: mol_type = other DNA
cacagtcattaatgatcatg

SEQ ID NO: 86616 - DNA, 20 bp, synthetic construct
  source 1..20: mol_type = other DNA
tcacagtcattaatgatcat

SEQ ID NO: 86617 - DNA, 20 bp, synthetic construct
  source 1..20: mol_type = other DNA
ttcacagtcattaatgatca

SEQ ID NO: 86618 - DNA, 20 bp, synthetic construct
  source 1..20: mol_type = other DNA
gttcacagtcattaatgatc

SEQ ID NO: 86619 - DNA, 20 bp, synthetic construct
  source 1..20: mol_type = other DNA
tgttcacagtcattaatgat

SEQ ID NO: 86620 - DNA, 20 bp, synthetic construct
  source 1..20: mol_type = other DNA
atgttcacagtcattaatga

SEQ ID NO: 86621 - DNA, 20 bp, synthetic construct
  source 1..20: mol_type = other DNA
gatgttcacagtcattaatg

SEQ ID NO: 86622 - DNA, 20 bp, synthetic construct
  source 1..20: mol_type = other DNA
agatgttcacagtcattaat

SEQ ID NO: 86623 - DNA, 20 bp, synthetic construct
  source 1..20: mol_type = other DNA
aagatgttcacagtcattaa

SEQ ID NO: 86624 - DNA, 20 bp, synthetic construct
  source 1..20: mol_type = other DNA
aaagatgttcacagtcatta

SEQ ID NO: 86625 - DNA, 20 bp, synthetic construct
  source 1..20: mol_type = other DNA
taaagatgttcacagtcatt

SEQ ID NO: 86626 - DNA, 20 bp, synthetic construct
  source 1..20: mol_type = other DNA
ataaagatgttcacagtcat

SEQ ID NO: 86627 - DNA, 20 bp, synthetic construct
  source 1..20: mol_type = other DNA
aataaagatgttcacagtca

SEQ ID NO: 86628 - DNA, 20 bp, synthetic construct
  source 1..20: mol_type = other DNA
taataaagatgttcacagtc

SEQ ID NO: 86629 - DNA, 20 bp, synthetic construct
  source 1..20: mol_type = other DNA
gtaataaagatgttcacagt

SEQ ID NO: 86630 - DNA, 20 bp, synthetic construct
  source 1..20: mol_type = other DNA
tgtaataaagatgttcacag

SEQ ID NO: 86631 - DNA, 20 bp, synthetic construct
  source 1..20: mol_type = other DNA
atgtaataaagatgttcaca

SEQ ID NO: 86632 - DNA, 20 bp, synthetic construct
  source 1..20: mol_type = other DNA
aatgtaataaagatgttcac

SEQ ID NO: 86633 - DNA, 20 bp, synthetic construct
  source 1..20: mol_type = other DNA
taatgtaataaagatgttca

SEQ ID NO: 86634 - DNA, 20 bp, synthetic construct
  source 1..20: mol_type = other DNA
ttaatgtaataaagatgttc

SEQ ID NO: 86635 - DNA, 20 bp, synthetic construct
  source 1..20: mol_type = other DNA
cttaatgtaataaagatgtt

SEQ ID NO: 86636 - DNA, 20 bp, synthetic construct
  source 1..20: mol_type = other DNA
tcttaatgtaataaagatgt

SEQ ID NO: 86637 - DNA, 20 bp, synthetic construct
  source 1..20: mol_type = other DNA
atcttaatgtaataaagatg

SEQ ID NO: 86638 - DNA, 20 bp, synthetic construct
  source 1..20: mol_type = other DNA
aatcttaatgtaataaagat

SEQ ID NO: 86639 - DNA, 20 bp, synthetic construct
  source 1..20: mol_type = other DNA
aaatcttaatgtaataaaga

SEQ ID NO: 86640 - DNA, 20 bp, synthetic construct
  source 1..20: mol_type = other DNA
taaatcttaatgtaataaag

SEQ ID NO: 86641 - DNA, 20 bp, synthetic construct
  source 1..20: mol_type = other DNA
ttaaatcttaatgtaataaa

SEQ ID NO: 86642 - DNA, 20 bp, synthetic construct
  source 1..20: mol_type = other DNA
cttaaatcttaatgtaataa

SEQ ID NO: 86643 - DNA, 20 bp, synthetic construct
  source 1..20: mol_type = other DNA
ccttaaatcttaatgtaata

SEQ ID NO: 86644 - DNA, 20 bp, synthetic construct
  source 1..20: mol_type = other DNA
tccttaaatcttaatgtaat

SEQ ID NO: 86645 - DNA, 20 bp, synthetic construct
  source 1..20: mol_type = other DNA
gtccttaaatcttaatgtaa

SEQ ID NO: 86646 - DNA, 20 bp, synthetic construct
  source 1..20: mol_type = other DNA
agtccttaaatcttaatgta

SEQ ID NO: 86647 - DNA, 20 bp, synthetic construct
  source 1..20: mol_type = other DNA
cagtccttaaatcttaatgt

SEQ ID NO: 86648 - DNA, 20 bp, synthetic construct
  source 1..20: mol_type = other DNA
gcagtccttaaatcttaatg

SEQ ID NO: 86649 - DNA, 20 bp, synthetic construct
  source 1..20: mol_type = other DNA
agcagtccttaaatcttaat

SEQ ID NO: 86650 - DNA, 20 bp, synthetic construct
  source 1..20: mol_type = other DNA
gagcagtccttaaatcttaa

SEQ ID NO: 86651 - DNA, 20 bp, synthetic construct
  source 1..20: mol_type = other DNA
tgagcagtccttaaatctta

SEQ ID NO: 86652 - DNA, 20 bp, synthetic construct
  source 1..20: mol_type = other DNA
atgagcagtccttaaatctt

SEQ ID NO: 86653 - DNA, 20 bp, synthetic construct
  source 1..20: mol_type = other DNA
catgagcagtccttaaatct

SEQ ID NO: 86654 - DNA, 20 bp, synthetic construct
  source 1..20: mol_type = other DNA
acatgagcagtccttaaatc

SEQ ID NO: 86655 - DNA, 20 bp, synthetic construct
  source 1..20: mol_type = other DNA
tacatgagcagtccttaaat

SEQ ID NO: 86656 - DNA, 20 bp, synthetic construct
  source 1..20: mol_type = other DNA
atacatgagcagtccttaaa

SEQ ID NO: 86657 - DNA, 20 bp, synthetic construct
  source 1..20: mol_type = other DNA
aatacatgagcagtccttaa

SEQ ID NO: 86658 - DNA, 20 bp, synthetic construct
  source 1..20: mol_type = other DNA
taatacatgagcagtcctta

SEQ ID NO: 86659 - DNA, 20 bp, synthetic construct
  source 1..20: mol_type = other DNA
ttaatacatgagcagtcctt

SEQ ID NO: 86660 - DNA, 20 bp, synthetic construct
  source 1..20: mol_type = other DNA
gttaatacatgagcagtcct

SEQ ID NO: 86661 - DNA, 20 bp, synthetic construct
  source 1..20: mol_type = other DNA
agttaatacatgagcagtcc

SEQ ID NO: 86662 - DNA, 20 bp, synthetic construct
  source 1..20: mol_type = other DNA
aagttaatacatgagcagtc

SEQ ID NO: 86663 - DNA, 20 bp, synthetic construct
  source 1..20: mol_type = other DNA
gaagttaatacatgagcagt

SEQ ID NO: 86664 - DNA, 20 bp, synthetic construct
  source 1..20: mol_type = other DNA
tgaagttaatacatgagcag

SEQ ID NO: 86665 - DNA, 20 bp, synthetic construct
  source 1..20: mol_type = other DNA
gtgaagttaatacatgagca

SEQ ID NO: 86666 - DNA, 20 bp, synthetic construct
  source 1..20: mol_type = other DNA
tgtgaagttaatacatgagc

SEQ ID NO: 86667 - DNA, 20 bp, synthetic construct
  source 1..20: mol_type = other DNA
gtgtgaagttaatacatgag

SEQ ID NO: 86668 - DNA, 20 bp, synthetic construct
  source 1..20: mol_type = other DNA
tgtgtgaagttaatacatga

SEQ ID NO: 86669 - DNA, 20 bp, synthetic construct
  source 1..20: mol_type = other DNA
ctgtgtgaagttaatacatg

SEQ ID NO: 86670 - DNA, 20 bp, synthetic construct
  source 1..20: mol_type = other DNA
tctgtgtgaagttaatacat

SEQ ID NO: 86671 - DNA, 20 bp, synthetic construct
  source 1..20: mol_type = other DNA
ttctgtgtgaagttaataca

SEQ ID NO: 86672 - DNA, 20 bp, synthetic construct
  source 1..20: mol_type = other DNA
tttctgtgtgaagttaatac

SEQ ID NO: 86673 - DNA, 20 bp, synthetic construct
  source 1..20: mol_type = other DNA
atttctgtgtgaagttaata

SEQ ID NO: 86674 - DNA, 20 bp, synthetic construct
  source 1..20: mol_type = other DNA
tatttctgtgtgaagttaat

SEQ ID NO: 86675 - DNA, 20 bp, synthetic construct
  source 1..20: mol_type = other DNA
atatttctgtgtgaagttaa

SEQ ID NO: 86676 - DNA, 20 bp, synthetic construct
  source 1..20: mol_type = other DNA
tatatttctgtgtgaagtta

SEQ ID NO: 86677 - DNA, 20 bp, synthetic construct
  source 1..20: mol_type = other DNA
gtatatttctgtgtgaagtt

SEQ ID NO: 86678 - DNA, 20 bp, synthetic construct
  source 1..20: mol_type = other DNA
agtatatttctgtgtgaagt

SEQ ID NO: 86679 - DNA, 20 bp, synthetic construct
  source 1..20: mol_type = other DNA
aagtatatttctgtgtgaag

SEQ ID NO: 86680 - DNA, 20 bp, synthetic construct
  source 1..20: mol_type = other DNA
aaagtatatttctgtgtgaa

SEQ ID NO: 86681 - DNA, 20 bp, synthetic construct
  source 1..20: mol_type = other DNA
gaaagtatatttctgtgtga

SEQ ID NO: 86682 - DNA, 20 bp, synthetic construct
  source 1..20: mol_type = other DNA
agaaagtatatttctgtgtg

SEQ ID NO: 86683 - DNA, 20 bp, synthetic construct
  source 1..20: mol_type = other DNA
cagaaagtatatttctgtgt

SEQ ID NO: 86684 - DNA, 20 bp, synthetic construct
  source 1..20: mol_type = other DNA
acagaaagtatatttctgtg

SEQ ID NO: 86685 - DNA, 20 bp, synthetic construct
  source 1..20: mol_type = other DNA
cacagaaagtatatttctgt

SEQ ID NO: 86686 - DNA, 20 bp, synthetic construct
  source 1..20: mol_type = other DNA
acacagaaagtatatttctg

SEQ ID NO: 86687 - DNA, 20 bp, synthetic construct
  source 1..20: mol_type = other DNA
gacacagaaagtatatttct

SEQ ID NO: 86688 - DNA, 20 bp, synthetic construct
  source 1..20: mol_type = other DNA
tgacacagaaagtatatttc

SEQ ID NO: 86689 - DNA, 20 bp, synthetic construct
  source 1..20: mol_type = other DNA
atgacacagaaagtatattt

SEQ ID NO: 86690 - DNA, 20 bp, synthetic construct
  source 1..20: mol_type = other DNA
aatgacacagaaagtatatt

SEQ ID NO: 86691 - DNA, 20 bp, synthetic construct
  source 1..20: mol_type = other DNA
gaatgacacagaaagtatat

SEQ ID NO: 86692 - DNA, 20 bp, synthetic construct
  source 1..20: mol_type = other DNA
tgaatgacacagaaagtata

SEQ ID NO: 86693 - DNA, 20 bp, synthetic construct
  source 1..20: mol_type = other DNA
ctgaatgacacagaaagtat

SEQ ID NO: 86694 - DNA, 20 bp, synthetic construct
  source 1..20: mol_type = other DNA
tctgaatgacacagaaagta

SEQ ID NO: 86695 - DNA, 20 bp, synthetic construct
  source 1..20: mol_type = other DNA
ctctgaatgacacagaaagt

SEQ ID NO: 86696 - DNA, 20 bp, synthetic construct
  source 1..20: mol_type = other DNA
tctctgaatgacacagaaag

SEQ ID NO: 86697 - DNA, 20 bp, synthetic construct
  source 1..20: mol_type = other DNA
atctctgaatgacacagaaa

SEQ ID NO: 86698 - DNA, 20 bp, synthetic construct
  source 1..20: mol_type = other DNA
catctctgaatgacacagaa

SEQ ID NO: 86699 - DNA, 20 bp, synthetic construct
  source 1..20: mol_type = other DNA
acatctctgaatgacacaga

SEQ ID NO: 86700 - DNA, 20 bp, synthetic construct
  source 1..20: mol_type = other DNA
aacatctctgaatgacacag

SEQ ID NO: 86701 - DNA, 20 bp, synthetic construct
  source 1..20: mol_type = other DNA
caacatctctgaatgacaca

SEQ ID NO: 86702 - DNA, 20 bp, synthetic construct
  source 1..20: mol_type = other DNA
tcaacatctctgaatgacac

SEQ ID NO: 86703 - DNA, 20 bp, synthetic construct
  source 1..20: mol_type = other DNA
ttcaacatctctgaatgaca

SEQ ID NO: 86704 - DNA, 20 bp, synthetic construct
  source 1..20: mol_type = other DNA
attcaacatctctgaatgac

SEQ ID NO: 86705 - DNA, 20 bp, synthetic construct
  source 1..20: mol_type = other DNA
tattcaacatctctgaatga

SEQ ID NO: 86706 - DNA, 20 bp, synthetic construct
  source 1..20: mol_type = other DNA
atattcaacatctctgaatg

SEQ ID NO: 86707 - DNA, 20 bp, synthetic construct
  source 1..20: mol_type = other DNA
aatattcaacatctctgaat

SEQ ID NO: 86708 - DNA, 20 bp, synthetic construct
  source 1..20: mol_type = other DNA
aaatattcaacatctctgaa

SEQ ID NO: 86709 - DNA, 20 bp, synthetic construct
  source 1..20: mol_type = other DNA
gaaatattcaacatctctga

SEQ ID NO: 86710 - DNA, 20 bp, synthetic construct
  source 1..20: mol_type = other DNA
ggaaatattcaacatctctg

SEQ ID NO: 86711 - DNA, 20 bp, synthetic construct
  source 1..20: mol_type = other DNA
tggaaatattcaacatctct

SEQ ID NO: 86712 - DNA, 20 bp, synthetic construct
  source 1..20: mol_type = other DNA
atggaaatattcaacatctc

SEQ ID NO: 86713 - DNA, 20 bp, synthetic construct
  source 1..20: mol_type = other DNA
aatggaaatattcaacatct

SEQ ID NO: 86714 - DNA, 20 bp, synthetic construct
  source 1..20: mol_type = other DNA
aaatggaaatattcaacatc

SEQ ID NO: 86715 - DNA, 20 bp, synthetic construct
  source 1..20: mol_type = other DNA
caaatggaaatattcaacat

SEQ ID NO: 86716 - DNA, 20 bp, synthetic construct
  source 1..20: mol_type = other DNA
tcaaatggaaatattcaaca

SEQ ID NO: 86717 - DNA, 20 bp, synthetic construct
  source 1..20: mol_type = other DNA
ttcaaatggaaatattcaac

SEQ ID NO: 86718 - DNA, 20 bp, synthetic construct
  source 1..20: mol_type = other DNA
tttcaaatggaaatattcaa

SEQ ID NO: 86719 - DNA, 20 bp, synthetic construct
  source 1..20: mol_type = other DNA
ttttcaaatggaaatattca

SEQ ID NO: 86720 - DNA, 20 bp, synthetic construct
  source 1..20: mol_type = other DNA
attttcaaatggaaatattc

SEQ ID NO: 86721 - DNA, 20 bp, synthetic construct
  source 1..20: mol_type = other DNA
aattttcaaatggaaatatt

SEQ ID NO: 86722 - DNA, 20 bp, synthetic construct
  source 1..20: mol_type = other DNA
taattttcaaatggaaatat

SEQ ID NO: 86723 - DNA, 20 bp, synthetic construct
  source 1..20: mol_type = other DNA
ataattttcaaatggaaata

SEQ ID NO: 86724 - DNA, 20 bp, synthetic construct
  source 1..20: mol_type = other DNA
tataattttcaaatggaaat

SEQ ID NO: 86725 - DNA, 20 bp, synthetic construct
  source 1..20: mol_type = other DNA
ctataattttcaaatggaaa

SEQ ID NO: 86726 - DNA, 20 bp, synthetic construct
  source 1..20: mol_type = other DNA
actataattttcaaatggaa

SEQ ID NO: 86727 - DNA, 20 bp, synthetic construct
  source 1..20: mol_type = other DNA
cactataattttcaaatgga

SEQ ID NO: 86728 - DNA, 20 bp, synthetic construct
  source 1..20: mol_type = other DNA
acactataattttcaaatgg

SEQ ID NO: 86729 - DNA, 20 bp, synthetic construct
  source 1..20: mol_type = other DNA
tacactataattttcaaatg

SEQ ID NO: 86730 - DNA, 20 bp, synthetic construct
  source 1..20: mol_type = other DNA
atacactataattttcaaat

SEQ ID NO: 86731 - DNA, 20 bp, synthetic construct
  source 1..20: mol_type = other DNA
tatacactataattttcaaa

SEQ ID NO: 86732 - DNA, 20 bp, synthetic construct
  source 1..20: mol_type = other DNA
ttatacactataattttcaa

SEQ ID NO: 86733 - DNA, 20 bp, synthetic construct
  source 1..20: mol_type = other DNA
gttatacactataattttca

SEQ ID NO: 86734 - DNA, 20 bp, synthetic construct
  source 1..20: mol_type = other DNA
tgttatacactataattttc

SEQ ID NO: 86735 - DNA, 20 bp, synthetic construct
  source 1..20: mol_type = other DNA
atgttatacactataatttt

SEQ ID NO: 86736 - DNA, 20 bp, synthetic construct
  source 1..20: mol_type = other DNA
aatgttatacactataattt

SEQ ID NO: 86737 - DNA, 20 bp, synthetic construct
  source 1..20: mol_type = other DNA
taatgttatacactataatt

SEQ ID NO: 86738 - DNA, 20 bp, synthetic construct
  source 1..20: mol_type = other DNA
ctaatgttatacactataat

SEQ ID NO: 86739 - DNA, 20 bp, synthetic construct
  source 1..20: mol_type = other DNA
gctaatgttatacactataa

SEQ ID NO: 86740 - DNA, 20 bp, synthetic construct
  source 1..20: mol_type = other DNA
tgctaatgttatacactata

SEQ ID NO: 86741 - DNA, 20 bp, synthetic construct
  source 1..20: mol_type = other DNA
atgctaatgttatacactat

SEQ ID NO: 86742 - DNA, 20 bp, synthetic construct
  source 1..20: mol_type = other DNA
aatgctaatgttatacacta

SEQ ID NO: 86743 - DNA, 20 bp, synthetic construct
  source 1..20: mol_type = other DNA
gaatgctaatgttatacact

SEQ ID NO: 86744 - DNA, 20 bp, synthetic construct
  source 1..20: mol_type = other DNA
agaatgctaatgttatacac

SEQ ID NO: 86745 - DNA, 20 bp, synthetic construct
  source 1..20: mol_type = other DNA
aagaatgctaatgttataca

SEQ ID NO: 86746 - DNA, 20 bp, synthetic construct
  source 1..20: mol_type = other DNA
gaagaatgctaatgttatac

SEQ ID NO: 86747 - DNA, 20 bp, synthetic construct
  source 1..20: mol_type = other DNA
agaagaatgctaatgttata

SEQ ID NO: 86748 - DNA, 20 bp, synthetic construct
  source 1..20: mol_type = other DNA
tagaagaatgctaatgttat

SEQ ID NO: 86749 - DNA, 20 bp, synthetic construct
  source 1..20: mol_type = other DNA
ttagaagaatgctaatgtta

SEQ ID NO: 86750 - DNA, 20 bp, synthetic construct
  source 1..20: mol_type = other DNA
tttagaagaatgctaatgtt

SEQ ID NO: 86751 - DNA, 20 bp, synthetic construct
  source 1..20: mol_type = other DNA
ctttagaagaatgctaatgt

SEQ ID NO: 86752 - DNA, 20 bp, synthetic construct
  source 1..20: mol_type = other DNA
tctttagaagaatgctaatg

SEQ ID NO: 86753 - DNA, 20 bp, synthetic construct
  source 1..20: mol_type = other DNA
atctttagaagaatgctaat

SEQ ID NO: 86754 - DNA, 20 bp, synthetic construct
  source 1..20: mol_type = other DNA
gatctttagaagaatgctaa

SEQ ID NO: 86755 - DNA, 20 bp, synthetic construct
  source 1..20: mol_type = other DNA
tgatctttagaagaatgcta

SEQ ID NO: 86756 - DNA, 20 bp, synthetic construct
  source 1..20: mol_type = other DNA
atgatctttagaagaatgct

SEQ ID NO: 86757 - DNA, 20 bp, synthetic construct
  source 1..20: mol_type = other DNA
catgatctttagaagaatgc

SEQ ID NO: 86758 - DNA, 20 bp, synthetic construct
  source 1..20: mol_type = other DNA
acatgatctttagaagaatg

SEQ ID NO: 86759 - DNA, 20 bp, synthetic construct
  source 1..20: mol_type = other DNA
aacatgatctttagaagaat

SEQ ID NO: 86760 - DNA, 20 bp, synthetic construct
  source 1..20: mol_type = other DNA
gaacatgatctttagaagaa

SEQ ID NO: 86761 - DNA, 20 bp, synthetic construct
  source 1..20: mol_type = other DNA
cgaacatgatctttagaaga

SEQ ID NO: 86762 - DNA, 20 bp, synthetic construct
  source 1..20: mol_type = other DNA
acgaacatgatctttagaag

SEQ ID NO: 86763 - DNA, 20 bp, synthetic construct
  source 1..20: mol_type = other DNA
cacgaacatgatctttagaa

SEQ ID NO: 86764 - DNA, 20 bp, synthetic construct
  source 1..20: mol_type = other DNA
acacgaacatgatctttaga

SEQ ID NO: 86765 - DNA, 20 bp, synthetic construct
  source 1..20: mol_type = other DNA
aacacgaacatgatctttag

SEQ ID NO: 86766 - DNA, 20 bp, synthetic construct
  source 1..20: mol_type = other DNA
aaacacgaacatgatcttta

SEQ ID NO: 86767 - DNA, 20 bp, synthetic construct
  source 1..20: mol_type = other DNA
taaacacgaacatgatcttt

SEQ ID NO: 86768 - DNA, 20 bp, synthetic construct
  source 1..20: mol_type = other DNA
ttaaacacgaacatgatctt

SEQ ID NO: 86769 - DNA, 20 bp, synthetic construct
  source 1..20: mol_type = other DNA
tttaaacacgaacatgatct

SEQ ID NO: 86770 - DNA, 20 bp, synthetic construct
  source 1..20: mol_type = other DNA
atttaaacacgaacatgatc

SEQ ID NO: 86771 - DNA, 20 bp, synthetic construct
  source 1..20: mol_type = other DNA
aatttaaacacgaacatgat

SEQ ID NO: 86772 - DNA, 20 bp, synthetic construct
  source 1..20: mol_type = other DNA
gaatttaaacacgaacatga

SEQ ID NO: 86773 - DNA, 20 bp, synthetic construct
  source 1..20: mol_type = other DNA
ggaatttaaacacgaacatg

SEQ ID NO: 86774 - DNA, 20 bp, synthetic construct
  source 1..20: mol_type = other DNA
aggaatttaaacacgaacat

SEQ ID NO: 86775 - DNA, 20 bp, synthetic construct
  source 1..20: mol_type = other DNA
caggaatttaaacacgaaca

SEQ ID NO: 86776 - DNA, 20 bp, synthetic construct
  source 1..20: mol_type = other DNA
acaggaatttaaacacgaac

SEQ ID NO: 86777 - DNA, 20 bp, synthetic construct
  source 1..20: mol_type = other DNA
aacaggaatttaaacacgaa

SEQ ID NO: 86778 - DNA, 20 bp, synthetic construct
  source 1..20: mol_type = other DNA
caacaggaatttaaacacga

SEQ ID NO: 86779 - DNA, 20 bp, synthetic construct
  source 1..20: mol_type = other DNA
ccaacaggaatttaaacacg

SEQ ID NO: 86780 - DNA, 20 bp, synthetic construct
  source 1..20: mol_type = other DNA
tccaacaggaatttaaacac

SEQ ID NO: 86781 - DNA, 20 bp, synthetic construct
  source 1..20: mol_type = other DNA
ttccaacaggaatttaaaca

SEQ ID NO: 86782 - DNA, 20 bp, synthetic construct
  source 1..20: mol_type = other DNA
cttccaacaggaatttaaac

SEQ ID NO: 86783 - DNA, 20 bp, synthetic construct
  source 1..20: mol_type = other DNA
gcttccaacaggaatttaaa

SEQ ID NO: 86784 - DNA, 20 bp, synthetic construct
  source 1..20: mol_type = other DNA
ggcttccaacaggaatttaa

SEQ ID NO: 86785 - DNA, 20 bp, synthetic construct
  source 1..20: mol_type = other DNA
tggcttccaacaggaattta

SEQ ID NO: 86786 - DNA, 20 bp, synthetic construct
  source 1..20: mol_type = other DNA
ctggcttccaacaggaattt

SEQ ID NO: 86787 - DNA, 20 bp, synthetic construct
  source 1..20: mol_type = other DNA
cctggcttccaacaggaatt

SEQ ID NO: 86788 - DNA, 20 bp, synthetic construct
  source 1..20: mol_type = other DNA
gcctggcttccaacaggaat

SEQ ID NO: 86789 - DNA, 20 bp, synthetic construct
  source 1..20: mol_type = other DNA
tgcctggcttccaacaggaa

SEQ ID NO: 86790 - DNA, 20 bp, synthetic construct
  source 1..20: mol_type = other DNA
atgcctggcttccaacagga

SEQ ID NO: 86791 - DNA, 20 bp, synthetic construct
  source 1..20: mol_type = other DNA
catgcctggcttccaacagg

SEQ ID NO: 86792 - DNA, 20 bp, synthetic construct
  source 1..20: mol_type = other DNA
ccatgcctggcttccaacag

SEQ ID NO: 86793 - DNA, 20 bp, synthetic construct
  source 1..20: mol_type = other DNA
accatgcctggcttccaaca

SEQ ID NO: 86794 - DNA, 20 bp, synthetic construct
  source 1..20: mol_type = other DNA
caccatgcctggcttccaac

SEQ ID NO: 86795 - DNA, 20 bp, synthetic construct
  source 1..20: mol_type = other DNA
ccaccatgcctggcttccaa

SEQ ID NO: 86796 - DNA, 20 bp, synthetic construct
  source 1..20: mol_type = other DNA
gccaccatgcctggcttcca

SEQ ID NO: 86797 - DNA, 20 bp, synthetic construct
  source 1..20: mol_type = other DNA
agccaccatgcctggcttcc

SEQ ID NO: 86798 - DNA, 20 bp, synthetic construct
  source 1..20: mol_type = other DNA
tagccaccatgcctggcttc

SEQ ID NO: 86799 - DNA, 20 bp, synthetic construct
  source 1..20: mol_type = other DNA
ttagccaccatgcctggctt

SEQ ID NO: 86800 - DNA, 20 bp, synthetic construct
  source 1..20: mol_type = other DNA
gttagccaccatgcctggct

SEQ ID NO: 86801 - DNA, 20 bp, synthetic construct
  source 1..20: mol_type = other DNA
cgttagccaccatgcctggc

SEQ ID NO: 86802 - DNA, 20 bp, synthetic construct
  source 1..20: mol_type = other DNA
gcgttagccaccatgcctgg

SEQ ID NO: 86803 - DNA, 20 bp, synthetic construct
  source 1..20: mol_type = other DNA
ggcgttagccaccatgcctg

SEQ ID NO: 86804 - DNA, 20 bp, synthetic construct
  source 1..20: mol_type = other DNA
aggcgttagccaccatgcct

SEQ ID NO: 86805 - DNA, 20 bp, synthetic construct
  source 1..20: mol_type = other DNA
caggcgttagccaccatgcc

SEQ ID NO: 86806 - DNA, 20 bp, synthetic construct
  source 1..20: mol_type = other DNA
acaggcgttagccaccatgc

SEQ ID NO: 86807 - DNA, 20 bp, synthetic construct
  source 1..20: mol_type = other DNA
tacaggcgttagccaccatg

SEQ ID NO: 86808 - DNA, 20 bp, synthetic construct
  source 1..20: mol_type = other DNA
ttacaggcgttagccaccat

SEQ ID NO: 86809 - DNA, 20 bp, synthetic construct
  source 1..20: mol_type = other DNA
attacaggcgttagccacca

SEQ ID NO: 86810 - DNA, 20 bp, synthetic construct
  source 1..20: mol_type = other DNA
gattacaggcgttagccacc

SEQ ID NO: 86811 - DNA, 20 bp, synthetic construct
  source 1..20: mol_type = other DNA
agattacaggcgttagccac

SEQ ID NO: 86812 - DNA, 20 bp, synthetic construct
  source 1..20: mol_type = other DNA
gagattacaggcgttagcca

SEQ ID NO: 86813 - DNA, 20 bp, synthetic construct
  source 1..20: mol_type = other DNA
tgagattacaggcgttagcc

SEQ ID NO: 86814 - DNA, 20 bp, synthetic construct
  source 1..20: mol_type = other DNA
ctgagattacaggcgttagc

SEQ ID NO: 86815 - DNA, 20 bp, synthetic construct
  source 1..20: mol_type = other DNA
gctgagattacaggcgttag

SEQ ID NO: 86816 - DNA, 20 bp, synthetic construct
  source 1..20: mol_type = other DNA
tgctgagattacaggcgtta

SEQ ID NO: 86817 - DNA, 20 bp, synthetic construct
  source 1..20: mol_type = other DNA
gtgctgagattacaggcgtt

SEQ ID NO: 86818 - DNA, 20 bp, synthetic construct
  source 1..20: mol_type = other DNA
agtgctgagattacaggcgt

SEQ ID NO: 86819 - DNA, 20 bp, synthetic construct
  source 1..20: mol_type = other DNA
aagtgctgagattacaggcg

SEQ ID NO: 86820 - DNA, 20 bp, synthetic construct
  source 1..20: mol_type = other DNA
aaagtgctgagattacaggc

SEQ ID NO: 86821 - DNA, 20 bp, synthetic construct
  source 1..20: mol_type = other DNA
caaagtgctgagattacagg

SEQ ID NO: 86822 - DNA, 20 bp, synthetic construct
  source 1..20: mol_type = other DNA
ccaaagtgctgagattacag

SEQ ID NO: 86823 - DNA, 20 bp, synthetic construct
  source 1..20: mol_type = other DNA
cccaaagtgctgagattaca

SEQ ID NO: 86824 - DNA, 20 bp, synthetic construct
  source 1..20: mol_type = other DNA
tcccaaagtgctgagattac

SEQ ID NO: 86825 - DNA, 20 bp, synthetic construct
  source 1..20: mol_type = other DNA
ctcccaaagtgctgagatta

SEQ ID NO: 86826 - DNA, 20 bp, synthetic construct
  source 1..20: mol_type = other DNA
cctcccaaagtgctgagatt

SEQ ID NO: 86827 - DNA, 20 bp, synthetic construct
  source 1..20: mol_type = other DNA
gcctcccaaagtgctgagat

SEQ ID NO: 86828 - DNA, 20 bp, synthetic construct
  source 1..20: mol_type = other DNA
agcctcccaaagtgctgaga

SEQ ID NO: 86829 - DNA, 20 bp, synthetic construct
  source 1..20: mol_type = other DNA
cagcctcccaaagtgctgag

SEQ ID NO: 86830 - DNA, 20 bp, synthetic construct
  source 1..20: mol_type = other DNA
tcagcctcccaaagtgctga

SEQ ID NO: 86831 - DNA, 20 bp, synthetic construct
  source 1..20: mol_type = other DNA
ctcagcctcccaaagtgctg

SEQ ID NO: 86832 - DNA, 20 bp, synthetic construct
  source 1..20: mol_type = other DNA
cctcagcctcccaaagtgct

SEQ ID NO: 86833 - DNA, 20 bp, synthetic construct
  source 1..20: mol_type = other DNA
gcctcagcctcccaaagtgc

SEQ ID NO: 86834 - DNA, 20 bp, synthetic construct
  source 1..20: mol_type = other DNA
tgcctcagcctcccaaagtg

SEQ ID NO: 86835 - DNA, 20 bp, synthetic construct
  source 1..20: mol_type = other DNA
ctgcctcagcctcccaaagt

SEQ ID NO: 86836 - DNA, 20 bp, synthetic construct
  source 1..20: mol_type = other DNA
cctgcctcagcctcccaaag

SEQ ID NO: 86837 - DNA, 20 bp, synthetic construct
  source 1..20: mol_type = other DNA
acctgcctcagcctcccaaa

SEQ ID NO: 86838 - DNA, 20 bp, synthetic construct
  source 1..20: mol_type = other DNA
cacctgcctcagcctcccaa

SEQ ID NO: 86839 - DNA, 20 bp, synthetic construct
  source 1..20: mol_type = other DNA
ccacctgcctcagcctccca

SEQ ID NO: 86840 - DNA, 20 bp, synthetic construct
  source 1..20: mol_type = other DNA
tccacctgcctcagcctccc

SEQ ID NO: 86841 - DNA, 20 bp, synthetic construct
  source 1..20: mol_type = other DNA
atccacctgcctcagcctcc

SEQ ID NO: 86842 - DNA, 20 bp, synthetic construct
  source 1..20: mol_type = other DNA
gatccacctgcctcagcctc

SEQ ID NO: 86843 - DNA, 20 bp, synthetic construct
  source 1..20: mol_type = other DNA
tgatccacctgcctcagcct

SEQ ID NO: 86844 - DNA, 20 bp, synthetic construct
  source 1..20: mol_type = other DNA
gtgatccacctgcctcagcc

SEQ ID NO: 86845 - DNA, 20 bp, synthetic construct
  source 1..20: mol_type = other DNA
agtgatccacctgcctcagc

SEQ ID NO: 86846 - DNA, 20 bp, synthetic construct
  source 1..20: mol_type = other DNA
aagtgatccacctgcctcag

SEQ ID NO: 86847 - DNA, 20 bp, synthetic construct
  source 1..20: mol_type = other DNA
caagtgatccacctgcctca

SEQ ID NO: 86848 - DNA, 20 bp, synthetic construct
  source 1..20: mol_type = other DNA
tcaagtgatccacctgcctc

SEQ ID NO: 86849 - DNA, 20 bp, synthetic construct
  source 1..20: mol_type = other DNA
ctcaagtgatccacctgcct

SEQ ID NO: 86850 - DNA, 20 bp, synthetic construct
  source 1..20: mol_type = other DNA
cctcaagtgatccacctgcc

SEQ ID NO: 86851 - DNA, 20 bp, synthetic construct
  source 1..20: mol_type = other DNA
acctcaagtgatccacctgc

SEQ ID NO: 86852 - DNA, 20 bp, synthetic construct
  source 1..20: mol_type = other DNA
gacctcaagtgatccacctg

SEQ ID NO: 86853 - DNA, 20 bp, synthetic construct
  source 1..20: mol_type = other DNA
tgacctcaagtgatccacct

SEQ ID NO: 86854 - DNA, 20 bp, synthetic construct
  source 1..20: mol_type = other DNA
ctgacctcaagtgatccacc

SEQ ID NO: 86855 - DNA, 20 bp, synthetic construct
  source 1..20: mol_type = other DNA
cctgacctcaagtgatccac

SEQ ID NO: 86856 - DNA, 20 bp, synthetic construct
  source 1..20: mol_type = other DNA
tcctgacctcaagtgatcca

SEQ ID NO: 86857 - DNA, 20 bp, synthetic construct
  source 1..20: mol_type = other DNA
ctcctgacctcaagtgatcc

SEQ ID NO: 86858 - DNA, 20 bp, synthetic construct
  source 1..20: mol_type = other DNA
actcctgacctcaagtgatc

SEQ ID NO: 86859 - DNA, 20 bp, synthetic construct
  source 1..20: mol_type = other DNA
aactcctgacctcaagtgat

SEQ ID NO: 86860 - DNA, 20 bp, synthetic construct
  source 1..20: mol_type = other DNA
aaactcctgacctcaagtga

SEQ ID NO: 86861 - DNA, 20 bp, synthetic construct
  source 1..20: mol_type = other DNA
caaactcctgacctcaagtg

SEQ ID NO: 86862 - DNA, 20 bp, synthetic construct
  source 1..20: mol_type = other DNA
tcaaactcctgacctcaagt

SEQ ID NO: 86863 - DNA, 20 bp, synthetic construct
  source 1..20: mol_type = other DNA
ctcaaactcctgacctcaag

SEQ ID NO: 86864 - DNA, 20 bp, synthetic construct
  source 1..20: mol_type = other DNA
tctcaaactcctgacctcaa

SEQ ID NO: 86865 - DNA, 20 bp, synthetic construct
  source 1..20: mol_type = other DNA
gtctcaaactcctgacctca

SEQ ID NO: 86866 - DNA, 20 bp, synthetic construct
  source 1..20: mol_type = other DNA
ggtctcaaactcctgacctc

SEQ ID NO: 86867 - DNA, 20 bp, synthetic construct
  source 1..20: mol_type = other DNA
tggtctcaaactcctgacct

SEQ ID NO: 86868 - DNA, 20 bp, synthetic construct
  source 1..20: mol_type = other DNA
ctggtctcaaactcctgacc

SEQ ID NO: 86869 - DNA, 20 bp, synthetic construct
  source 1..20: mol_type = other DNA
gctggtctcaaactcctgac

SEQ ID NO: 86870 - DNA, 20 bp, synthetic construct
  source 1..20: mol_type = other DNA
ggctggtctcaaactcctga

SEQ ID NO: 86871 - DNA, 20 bp, synthetic construct
  source 1..20: mol_type = other DNA
aggctggtctcaaactcctg

SEQ ID NO: 86872 - DNA, 20 bp, synthetic construct
  source 1..20: mol_type = other DNA
caggctggtctcaaactcct

SEQ ID NO: 86873 - DNA, 20 bp, synthetic construct
  source 1..20: mol_type = other DNA
ccaggctggtctcaaactcc

SEQ ID NO: 86874 - DNA, 20 bp, synthetic construct
  source 1..20: mol_type = other DNA
gccaggctggtctcaaactc

SEQ ID NO: 86875 - DNA, 20 bp, synthetic construct
  source 1..20: mol_type = other DNA
ggccaggctggtctcaaact

SEQ ID NO: 86876 - DNA, 20 bp, synthetic construct
  source 1..20: mol_type = other DNA
tggccaggctggtctcaaac

SEQ ID NO: 86877 - DNA, 20 bp, synthetic construct
  source 1..20: mol_type = other DNA
ttggccaggctggtctcaaa

SEQ ID NO: 86878 - DNA, 20 bp, synthetic construct
  source 1..20: mol_type = other DNA
gttggccaggctggtctcaa

SEQ ID NO: 86879 - DNA, 20 bp, synthetic construct
  source 1..20: mol_type = other DNA
tgttggccaggctggtctca

SEQ ID NO: 86880 - DNA, 20 bp, synthetic construct
  source 1..20: mol_type = other DNA
atgttggccaggctggtctc

SEQ ID NO: 86881 - DNA, 20 bp, synthetic construct
  source 1..20: mol_type = other DNA
catgttggccaggctggtct

SEQ ID NO: 86882 - DNA, 20 bp, synthetic construct
  source 1..20: mol_type = other DNA
ccatgttggccaggctggtc

SEQ ID NO: 86883 - DNA, 20 bp, synthetic construct
  source 1..20: mol_type = other DNA
accatgttggccaggctggt

SEQ ID NO: 86884 - DNA, 20 bp, synthetic construct
  source 1..20: mol_type = other DNA
caccatgttggccaggctgg

SEQ ID NO: 86885 - DNA, 20 bp, synthetic construct
  source 1..20: mol_type = other DNA
tcaccatgttggccaggctg

SEQ ID NO: 86886 - DNA, 20 bp, synthetic construct
  source 1..20: mol_type = other DNA
ttcaccatgttggccaggct

SEQ ID NO: 86887 - DNA, 20 bp, synthetic construct
  source 1..20: mol_type = other DNA
tttcaccatgttggccaggc

SEQ ID NO: 86888 - DNA, 20 bp, synthetic construct
  source 1..20: mol_type = other DNA
gtttcaccatgttggccagg

SEQ ID NO: 86889 - DNA, 20 bp, synthetic construct
  source 1..20: mol_type = other DNA
ggtttcaccatgttggccag

SEQ ID NO: 86890 - DNA, 20 bp, synthetic construct
  source 1..20: mol_type = other DNA
aggtttcaccatgttggcca

SEQ ID NO: 86891 - DNA, 20 bp, synthetic construct
  source 1..20: mol_type = other DNA
gaggtttcaccatgttggcc

SEQ ID NO: 86892 - DNA, 20 bp, synthetic construct
  source 1..20: mol_type = other DNA
cgaggtttcaccatgttggc

SEQ ID NO: 86893 - DNA, 20 bp, synthetic construct
  source 1..20: mol_type = other DNA
acgaggtttcaccatgttgg

SEQ ID NO: 86894 - DNA, 20 bp, synthetic construct
  source 1..20: mol_type = other DNA
gacgaggtttcaccatgttg

SEQ ID NO: 86895 - DNA, 20 bp, synthetic construct
  source 1..20: mol_type = other DNA
agacgaggtttcaccatgtt

SEQ ID NO: 86896 - DNA, 20 bp, synthetic construct
  source 1..20: mol_type = other DNA
gagacgaggtttcaccatgt

SEQ ID NO: 86897 - DNA, 20 bp, synthetic construct
  source 1..20: mol_type = other DNA
agagacgaggtttcaccatg

SEQ ID NO: 86898 - DNA, 20 bp, synthetic construct
  source 1..20: mol_type = other DNA
tagagacgaggtttcaccat

SEQ ID NO: 86899 - DNA, 20 bp, synthetic construct
  source 1..20: mol_type = other DNA
gtagagacgaggtttcacca

SEQ ID NO: 86900 - DNA, 20 bp, synthetic construct
  source 1..20: mol_type = other DNA
agtagagacgaggtttcacc

SEQ ID NO: 86901 - DNA, 20 bp, synthetic construct
  source 1..20: mol_type = other DNA
tagtagagacgaggtttcac

SEQ ID NO: 86902 - DNA, 20 bp, synthetic construct
  source 1..20: mol_type = other DNA
ttagtagagacgaggtttca

SEQ ID NO: 86903 - DNA, 20 bp, synthetic construct
  source 1..20: mol_type = other DNA
tttagtagagacgaggtttc

SEQ ID NO: 86904 - DNA, 20 bp, synthetic construct
  source 1..20: mol_type = other DNA
ttttagtagagacgaggttt

SEQ ID NO: 86905 - DNA, 20 bp, synthetic construct
  source 1..20: mol_type = other DNA
tttttagtagagacgaggtt

SEQ ID NO: 86906 - DNA, 20 bp, synthetic construct
  source 1..20: mol_type = other DNA
atttttagtagagacgaggt

SEQ ID NO: 86907 - DNA, 20 bp, synthetic construct
  source 1..20: mol_type = other DNA
tatttttagtagagacgagg

SEQ ID NO: 86908 - DNA, 20 bp, synthetic construct
  source 1..20: mol_type = other DNA
gtatttttagtagagacgag

SEQ ID NO: 86909 - DNA, 20 bp, synthetic construct
  source 1..20: mol_type = other DNA
ggtatttttagtagagacga

SEQ ID NO: 86910 - DNA, 20 bp, synthetic construct
  source 1..20: mol_type = other DNA
gggtatttttagtagagacg

SEQ ID NO: 86911 - DNA, 20 bp, synthetic construct
  source 1..20: mol_type = other DNA
tgggtatttttagtagagac

SEQ ID NO: 86912 - DNA, 20 bp, synthetic construct
  source 1..20: mol_type = other DNA
ctgggtatttttagtagaga

SEQ ID NO: 86913 - DNA, 20 bp, synthetic construct
  source 1..20: mol_type = other DNA
gctgggtatttttagtagag

SEQ ID NO: 86914 - DNA, 20 bp, synthetic construct
  source 1..20: mol_type = other DNA
agctgggtatttttagtaga

SEQ ID NO: 86915 - DNA, 20 bp, synthetic construct
  source 1..20: mol_type = other DNA
tagctgggtatttttagtag

SEQ ID NO: 86916 - DNA, 20 bp, synthetic construct
  source 1..20: mol_type = other DNA
gtagctgggtatttttagta

SEQ ID NO: 86917 - DNA, 20 bp, synthetic construct
  source 1..20: mol_type = other DNA
agtagctgggtatttttagt

SEQ ID NO: 86918 - DNA, 20 bp, synthetic construct
  source 1..20: mol_type = other DNA
aagtagctgggtatttttag

SEQ ID NO: 86919 - DNA, 20 bp, synthetic construct
  source 1..20: mol_type = other DNA
caagtagctgggtattttta

SEQ ID NO: 86920 - DNA, 20 bp, synthetic construct
  source 1..20: mol_type = other DNA
ccaagtagctgggtattttt

SEQ ID NO: 86921 - DNA, 20 bp, synthetic construct
  source 1..20: mol_type = other DNA
cccaagtagctgggtatttt

SEQ ID NO: 86922 - DNA, 20 bp, synthetic construct
  source 1..20: mol_type = other DNA
tcccaagtagctgggtattt

SEQ ID NO: 86923 - DNA, 20 bp, synthetic construct
  source 1..20: mol_type = other DNA
ctcccaagtagctgggtatt

SEQ ID NO: 86924 - DNA, 20 bp, synthetic construct
  source 1..20: mol_type = other DNA
cctcccaagtagctgggtat

SEQ ID NO: 86925 - DNA, 20 bp, synthetic construct
  source 1..20: mol_type = other DNA
gcctcccaagtagctgggta

SEQ ID NO: 86926 - DNA, 20 bp, synthetic construct
  source 1..20: mol_type = other DNA
agcctcccaagtagctgggt

SEQ ID NO: 86927 - DNA, 20 bp, synthetic construct
  source 1..20: mol_type = other DNA
cagcctcccaagtagctggg

SEQ ID NO: 86928 - DNA, 20 bp, synthetic construct
  source 1..20: mol_type = other DNA
tcagcctcccaagtagctgg

SEQ ID NO: 86929 - DNA, 20 bp, synthetic construct
  source 1..20: mol_type = other DNA
ctcagcctcccaagtagctg

SEQ ID NO: 86930 - DNA, 20 bp, synthetic construct
  source 1..20: mol_type = other DNA
cctcagcctcccaagtagct

SEQ ID NO: 86931 - DNA, 20 bp, synthetic construct
  source 1..20: mol_type = other DNA
gcctcagcctcccaagtagc

SEQ ID NO: 86932 - DNA, 20 bp, synthetic construct
  source 1..20: mol_type = other DNA
tgcctcagcctcccaagtag

SEQ ID NO: 86933 - DNA, 20 bp, synthetic construct
  source 1..20: mol_type = other DNA
ctgcctcagcctcccaagta

SEQ ID NO: 86934 - DNA, 20 bp, synthetic construct
  source 1..20: mol_type = other DNA
cctgcctcagcctcccaagt

SEQ ID NO: 86935 - DNA, 20 bp, synthetic construct
  source 1..20: mol_type = other DNA
tcctgcctcagcctcccaag

SEQ ID NO: 86936 - DNA, 20 bp, synthetic construct
  source 1..20: mol_type = other DNA
ctcctgcctcagcctcccaa

SEQ ID NO: 86937 - DNA, 20 bp, synthetic construct
  source 1..20: mol_type = other DNA
tctcctgcctcagcctccca

SEQ ID NO: 86938 - DNA, 20 bp, synthetic construct
  source 1..20: mol_type = other DNA
ttctcctgcctcagcctccc

SEQ ID NO: 86939 - DNA, 20 bp, synthetic construct
  source 1..20: mol_type = other DNA
attctcctgcctcagcctcc

SEQ ID NO: 86940 - DNA, 20 bp, synthetic construct
  source 1..20: mol_type = other DNA
gattctcctgcctcagcctc

SEQ ID NO: 86941 - DNA, 20 bp, synthetic construct
  source 1..20: mol_type = other DNA
tgattctcctgcctcagcct

SEQ ID NO: 86942 - DNA, 20 bp, synthetic construct
  source 1..20: mol_type = other DNA
gtgattctcctgcctcagcc

SEQ ID NO: 86943 - DNA, 20 bp, synthetic construct
  source 1..20: mol_type = other DNA
agtgattctcctgcctcagc

SEQ ID NO: 86944 - DNA, 20 bp, synthetic construct
  source 1..20: mol_type = other DNA
aagtgattctcctgcctcag

SEQ ID NO: 86945 - DNA, 20 bp, synthetic construct
  source 1..20: mol_type = other DNA
caagtgattctcctgcctca

SEQ ID NO: 86946 - DNA, 20 bp, synthetic construct
  source 1..20: mol_type = other DNA
tcaagtgattctcctgcctc

SEQ ID NO: 86947 - DNA, 20 bp, synthetic construct
  source 1..20: mol_type = other DNA
ttcaagtgattctcctgcct

SEQ ID NO: 86948 - DNA, 20 bp, synthetic construct
  source 1..20: mol_type = other DNA
gttcaagtgattctcctgcc

SEQ ID NO: 86949 - DNA, 20 bp, synthetic construct
  source 1..20: mol_type = other DNA
ggttcaagtgattctcctgc

SEQ ID NO: 86950 - DNA, 20 bp, synthetic construct
  source 1..20: mol_type = other DNA
aggttcaagtgattctcctg

SEQ ID NO: 86951 - DNA, 20 bp, synthetic construct
  source 1..20: mol_type = other DNA
caggttcaagtgattctcct

SEQ ID NO: 86952 - DNA, 20 bp, synthetic construct
  source 1..20: mol_type = other DNA
ccaggttcaagtgattctcc

SEQ ID NO: 86953 - DNA, 20 bp, synthetic construct
  source 1..20: mol_type = other DNA
cccaggttcaagtgattctc

SEQ ID NO: 86954 - DNA, 20 bp, synthetic construct
  source 1..20: mol_type = other DNA
tcccaggttcaagtgattct

SEQ ID NO: 86955 - DNA, 20 bp, synthetic construct
  source 1..20: mol_type = other DNA
ctcccaggttcaagtgattc

SEQ ID NO: 86956 - DNA, 20 bp, synthetic construct
  source 1..20: mol_type = other DNA
cctcccaggttcaagtgatt

SEQ ID NO: 86957 - DNA, 20 bp, synthetic construct
  source 1..20: mol_type = other DNA
gcctcccaggttcaagtgat

SEQ ID NO: 86958 - DNA, 20 bp, synthetic construct
  source 1..20: mol_type = other DNA
tgcctcccaggttcaagtga

SEQ ID NO: 86959 - DNA, 20 bp, synthetic construct
  source 1..20: mol_type = other DNA
ctgcctcccaggttcaagtg

SEQ ID NO: 86960 - DNA, 20 bp, synthetic construct
  source 1..20: mol_type = other DNA
tctgcctcccaggttcaagt

SEQ ID NO: 86961 - DNA, 20 bp, synthetic construct
  source 1..20: mol_type = other DNA
ctctgcctcccaggttcaag

SEQ ID NO: 86962 - DNA, 20 bp, synthetic construct
  source 1..20: mol_type = other DNA
cctctgcctcccaggttcaa

SEQ ID NO: 86963 - DNA, 20 bp, synthetic construct
  source 1..20: mol_type = other DNA
acctctgcctcccaggttca

SEQ ID NO: 86964 - DNA, 20 bp, synthetic construct
  source 1..20: mol_type = other DNA
aacctctgcctcccaggttc

SEQ ID NO: 86965 - DNA, 20 bp, synthetic construct
  source 1..20: mol_type = other DNA
caacctctgcctcccaggtt

SEQ ID NO: 86966 - DNA, 20 bp, synthetic construct
  source 1..20: mol_type = other DNA
gcaacctctgcctcccaggt

SEQ ID NO: 86967 - DNA, 20 bp, synthetic construct
  source 1..20: mol_type = other DNA
tgcaacctctgcctcccagg

SEQ ID NO: 86968 - DNA, 20 bp, synthetic construct
  source 1..20: mol_type = other DNA
ctgcaacctctgcctcccag

SEQ ID NO: 86969 - DNA, 20 bp, synthetic construct
  source 1..20: mol_type = other DNA
actgcaacctctgcctccca

SEQ ID NO: 86970 - DNA, 20 bp, synthetic construct
  source 1..20: mol_type = other DNA
cactgcaacctctgcctccc

SEQ ID NO: 86971 - DNA, 20 bp, synthetic construct
  source 1..20: mol_type = other DNA
tcactgcaacctctgcctcc

SEQ ID NO: 86972 - DNA, 20 bp, synthetic construct
  source 1..20: mol_type = other DNA
ctcactgcaacctctgcctc

SEQ ID NO: 86973 - DNA, 20 bp, synthetic construct
  source 1..20: mol_type = other DNA
actcactgcaacctctgcct

SEQ ID NO: 86974 - DNA, 20 bp, synthetic construct
  source 1..20: mol_type = other DNA
aactcactgcaacctctgcc

SEQ ID NO: 86975 - DNA, 20 bp, synthetic construct
  source 1..20: mol_type = other DNA
caactcactgcaacctctgc

SEQ ID NO: 86976 - DNA, 20 bp, synthetic construct
  source 1..20: mol_type = other DNA
tcaactcactgcaacctctg

SEQ ID NO: 86977 - DNA, 20 bp, synthetic construct
  source 1..20: mol_type = other DNA
ctcaactcactgcaacctct

SEQ ID NO: 86978 - DNA, 20 bp, synthetic construct
  source 1..20: mol_type = other DNA
tctcaactcactgcaacctc

SEQ ID NO: 86979 - DNA, 20 bp, synthetic construct
  source 1..20: mol_type = other DNA
atctcaactcactgcaacct

SEQ ID NO: 86980 - DNA, 20 bp, synthetic construct
  source 1..20: mol_type = other DNA
gatctcaactcactgcaacc

SEQ ID NO: 86981 - DNA, 20 bp, synthetic construct
  source 1..20: mol_type = other DNA
cgatctcaactcactgcaac

SEQ ID NO: 86982 - DNA, 20 bp, synthetic construct
  source 1..20: mol_type = other DNA
acgatctcaactcactgcaa

SEQ ID NO: 86983 - DNA, 20 bp, synthetic construct
  source 1..20: mol_type = other DNA
tacgatctcaactcactgca

SEQ ID NO: 86984 - DNA, 20 bp, synthetic construct
  source 1..20: mol_type = other DNA
gtacgatctcaactcactgc

SEQ ID NO: 86985 - DNA, 20 bp, synthetic construct
  source 1..20: mol_type = other DNA
ggtacgatctcaactcactg

SEQ ID NO: 86986 - DNA, 20 bp, synthetic construct
  source 1..20: mol_type = other DNA
tggtacgatctcaactcact

SEQ ID NO: 86987 - DNA, 20 bp, synthetic construct
  source 1..20: mol_type = other DNA
gtggtacgatctcaactcac

SEQ ID NO: 86988 - DNA, 20 bp, synthetic construct
  source 1..20: mol_type = other DNA
agtggtacgatctcaactca

SEQ ID NO: 86989 - DNA, 20 bp, synthetic construct
  source 1..20: mol_type = other DNA
cagtggtacgatctcaactc

SEQ ID NO: 86990 - DNA, 20 bp, synthetic construct
  source 1..20: mol_type = other DNA
gcagtggtacgatctcaact

SEQ ID NO: 86991 - DNA, 20 bp, synthetic construct
  source 1..20: mol_type = other DNA
tgcagtggtacgatctcaac

SEQ ID NO: 86992 - DNA, 20 bp, synthetic construct
  source 1..20: mol_type = other DNA
gtgcagtggtacgatctcaa

SEQ ID NO: 86993 - DNA, 20 bp, synthetic construct
  source 1..20: mol_type = other DNA
agtgcagtggtacgatctca

SEQ ID NO: 86994 - DNA, 20 bp, synthetic construct
  source 1..20: mol_type = other DNA
gagtgcagtggtacgatctc

SEQ ID NO: 86995 - DNA, 20 bp, synthetic construct
  source 1..20: mol_type = other DNA
ggagtgcagtggtacgatct

SEQ ID NO: 86996 - DNA, 20 bp, synthetic construct
  source 1..20: mol_type = other DNA
tggagtgcagtggtacgatc

SEQ ID NO: 86997 - DNA, 20 bp, synthetic construct
  source 1..20: mol_type = other DNA
ctggagtgcagtggtacgat

SEQ ID NO: 86998 - DNA, 20 bp, synthetic construct
  source 1..20: mol_type = other DNA
gctggagtgcagtggtacga

SEQ ID NO: 86999 - DNA, 20 bp, synthetic construct
  source 1..20: mol_type = other DNA
ggctggagtgcagtggtacg

SEQ ID NO: 87000 - DNA, 20 bp, synthetic construct
  source 1..20: mol_type = other DNA
aggctggagtgcagtggtac

SEQ ID NO: 87001 - DNA, 20 bp, synthetic construct
  source 1..20: mol_type = other DNA
caggctggagtgcagtggta

SEQ ID NO: 87002 - DNA, 20 bp, synthetic construct
  source 1..20: mol_type = other DNA
ccaggctggagtgcagtggt

SEQ ID NO: 87003 - DNA, 20 bp, synthetic construct
  source 1..20: mol_type = other DNA
cccaggctggagtgcagtgg

SEQ ID NO: 87004 - DNA, 20 bp, synthetic construct
  source 1..20: mol_type = other DNA
gcccaggctggagtgcagtg

SEQ ID NO: 87005 - DNA, 20 bp, synthetic construct
  source 1..20: mol_type = other DNA
cgcccaggctggagtgcagt

SEQ ID NO: 87006 - DNA, 20 bp, synthetic construct
  source 1..20: mol_type = other DNA
tcgcccaggctggagtgcag

SEQ ID NO: 87007 - DNA, 20 bp, synthetic construct
  source 1..20: mol_type = other DNA
gtcgcccaggctggagtgca

SEQ ID NO: 87008 - DNA, 20 bp, synthetic construct
  source 1..20: mol_type = other DNA
tgtcgcccaggctggagtgc

SEQ ID NO: 87009 - DNA, 20 bp, synthetic construct
  source 1..20: mol_type = other DNA
ctgtcgcccaggctggagtg

SEQ ID NO: 87010 - DNA, 20 bp, synthetic construct
  source 1..20: mol_type = other DNA
tctgtcgcccaggctggagt

SEQ ID NO: 87011 - DNA, 20 bp, synthetic construct
  source 1..20: mol_type = other DNA
ctctgtcgcccaggctggag

SEQ ID NO: 87012 - DNA, 20 bp, synthetic construct
  source 1..20: mol_type = other DNA
tctctgtcgcccaggctgga

SEQ ID NO: 87013 - DNA, 20 bp, synthetic construct
  source 1..20: mol_type = other DNA
gtctctgtcgcccaggctgg

SEQ ID NO: 87014 - DNA, 20 bp, synthetic construct
  source 1..20: mol_type = other DNA
tgtctctgtcgcccaggctg

SEQ ID NO: 87015 - DNA, 20 bp, synthetic construct
  source 1..20: mol_type = other DNA
ctgtctctgtcgcccaggct

SEQ ID NO: 87016 - DNA, 20 bp, synthetic construct
  source 1..20: mol_type = other DNA
tctgtctctgtcgcccaggc

SEQ ID NO: 87017 - DNA, 20 bp, synthetic construct
  source 1..20: mol_type = other DNA
gtctgtctctgtcgcccagg

SEQ ID NO: 87018 - DNA, 20 bp, synthetic construct
  source 1..20: mol_type = other DNA
agtctgtctctgtcgcccag

SEQ ID NO: 87019 - DNA, 20 bp, synthetic construct
  source 1..20: mol_type = other DNA
gagtctgtctctgtcgccca

SEQ ID NO: 87020 - DNA, 20 bp, synthetic construct
  source 1..20: mol_type = other DNA
agagtctgtctctgtcgccc

SEQ ID NO: 87021 - DNA, 20 bp, synthetic construct
  source 1..20: mol_type = other DNA
cagagtctgtctctgtcgcc

SEQ ID NO: 87022 - DNA, 20 bp, synthetic construct
  source 1..20: mol_type = other DNA
acagagtctgtctctgtcgc

SEQ ID NO: 87023 - DNA, 20 bp, synthetic construct
  source 1..20: mol_type = other DNA
gacagagtctgtctctgtcg

SEQ ID NO: 87024 - DNA, 20 bp, synthetic construct
  source 1..20: mol_type = other DNA
agacagagtctgtctctgtc

SEQ ID NO: 87025 - DNA, 20 bp, synthetic construct
  source 1..20: mol_type = other DNA
aagacagagtctgtctctgt

SEQ ID NO: 87026 - DNA, 20 bp, synthetic construct
  source 1..20: mol_type = other DNA
taagacagagtctgtctctg

SEQ ID NO: 87027 - DNA, 20 bp, synthetic construct
  source 1..20: mol_type = other DNA
ataagacagagtctgtctct

SEQ ID NO: 87028 - DNA, 20 bp, synthetic construct
  source 1..20: mol_type = other DNA
tataagacagagtctgtctc

SEQ ID NO: 87029 - DNA, 20 bp, synthetic construct
  source 1..20: mol_type = other DNA
ttataagacagagtctgtct

SEQ ID NO: 87030 - DNA, 20 bp, synthetic construct
  source 1..20: mol_type = other DNA
tttataagacagagtctgtc

SEQ ID NO: 87031 - DNA, 20 bp, synthetic construct
  source 1..20: mol_type = other DNA
ttttataagacagagtctgt

SEQ ID NO: 87032 - DNA, 20 bp, synthetic construct
  source 1..20: mol_type = other DNA
tttttataagacagagtctg

SEQ ID NO: 87033 - DNA, 20 bp, synthetic construct
  source 1..20: mol_type = other DNA
atttttataagacagagtct

SEQ ID NO: 87034 - DNA, 20 bp, synthetic construct
  source 1..20: mol_type = other DNA
tatttttataagacagagtc

SEQ ID NO: 87035 - DNA, 20 bp, synthetic construct
  source 1..20: mol_type = other DNA
ttatttttataagacagagt

SEQ ID NO: 87036 - DNA, 20 bp, synthetic construct
  source 1..20: mol_type = other DNA
tttatttttataagacagag

SEQ ID NO: 87037 - DNA, 20 bp, synthetic construct
  source 1..20: mol_type = other DNA
ttttatttttataagacaga

SEQ ID NO: 87038 - DNA, 20 bp, synthetic construct
  source 1..20: mol_type = other DNA
tttttatttttataagacag

SEQ ID NO: 87039 - DNA, 20 bp, synthetic construct
  source 1..20: mol_type = other DNA
atttttatttttataagaca

SEQ ID NO: 87040 - DNA, 20 bp, synthetic construct
  source 1..20: mol_type = other DNA
tatttttatttttataagac

SEQ ID NO: 87041 - DNA, 20 bp, synthetic construct
  source 1..20: mol_type = other DNA
ttatttttatttttataaga

SEQ ID NO: 87042 - DNA, 20 bp, synthetic construct
  source 1..20: mol_type = other DNA
tttatttttatttttataag

SEQ ID NO: 87043 - DNA, 20 bp, synthetic construct
  source 1..20: mol_type = other DNA
ttttatttttatttttataa

SEQ ID NO: 87044 - DNA, 20 bp, synthetic construct
  source 1..20: mol_type = other DNA
attttatttttatttttata

SEQ ID NO: 87045 - DNA, 20 bp, synthetic construct
  source 1..20: mol_type = other DNA
tattttatttttatttttat

SEQ ID NO: 87046 - DNA, 20 bp, synthetic construct
  source 1..20: mol_type = other DNA
ttattttatttttattttta

SEQ ID NO: 87047 - DNA, 20 bp, synthetic construct
  source 1..20: mol_type = other DNA
attattttatttttattttt

SEQ ID NO: 87048 - DNA, 20 bp, synthetic construct
  source 1..20: mol_type = other DNA
tattattttatttttatttt

SEQ ID NO: 87049 - DNA, 20 bp, synthetic construct
  source 1..20: mol_type = other DNA
ttattattttatttttattt

SEQ ID NO: 87050 - DNA, 20 bp, synthetic construct
  source 1..20: mol_type = other DNA
attattattttatttttatt

SEQ ID NO: 87051 - DNA, 20 bp, synthetic construct
  source 1..20: mol_type = other DNA
aattattattttatttttat

SEQ ID NO: 87052 - DNA, 20 bp, synthetic construct
  source 1..20: mol_type = other DNA
gaattattattttattttta

SEQ ID NO: 87053 - DNA, 20 bp, synthetic construct
  source 1..20: mol_type = other DNA
agaattattattttattttt

SEQ ID NO: 87054 - DNA, 20 bp, synthetic construct
  source 1..20: mol_type = other DNA
tagaattattattttatttt

SEQ ID NO: 87055 - DNA, 20 bp, synthetic construct
  source 1..20: mol_type = other DNA
atagaattattattttattt

SEQ ID NO: 87056 - DNA, 20 bp, synthetic construct
  source 1..20: mol_type = other DNA
aatagaattattattttatt

SEQ ID NO: 87057 - DNA, 20 bp, synthetic construct
  source 1..20: mol_type = other DNA
caatagaattattattttat

SEQ ID NO: 87058 - DNA, 20 bp, synthetic construct
  source 1..20: mol_type = other DNA
ccaatagaattattatttta

SEQ ID NO: 87059 - DNA, 20 bp, synthetic construct
  source 1..20: mol_type = other DNA
gccaatagaattattatttt

SEQ ID NO: 87060 - DNA, 20 bp, synthetic construct
  source 1..20: mol_type = other DNA
tgccaatagaattattattt

SEQ ID NO: 87061 - DNA, 20 bp, synthetic construct
  source 1..20: mol_type = other DNA
ttgccaatagaattattatt

SEQ ID NO: 87062 - DNA, 20 bp, synthetic construct
  source 1..20: mol_type = other DNA
gttgccaatagaattattat

SEQ ID NO: 87063 - DNA, 20 bp, synthetic construct
  source 1..20: mol_type = other DNA
tgttgccaatagaattatta

SEQ ID NO: 87064 - DNA, 20 bp, synthetic construct
  source 1..20: mol_type = other DNA
atgttgccaatagaattatt

SEQ ID NO: 87065 - DNA, 20 bp, synthetic construct
  source 1..20: mol_type = other DNA
tatgttgccaatagaattat

SEQ ID NO: 87066 - DNA, 20 bp, synthetic construct
  source 1..20: mol_type = other DNA
atatgttgccaatagaatta

SEQ ID NO: 87067 - DNA, 20 bp, synthetic construct
  source 1..20: mol_type = other DNA
tatatgttgccaatagaatt

SEQ ID NO: 87068 - DNA, 20 bp, synthetic construct
  source 1..20: mol_type = other DNA
atatatgttgccaatagaat

SEQ ID NO: 87069 - DNA, 20 bp, synthetic construct
  source 1..20: mol_type = other DNA
aatatatgttgccaatagaa

SEQ ID NO: 87070 - DNA, 20 bp, synthetic construct
  source 1..20: mol_type = other DNA
taatatatgttgccaataga

SEQ ID NO: 87071 - DNA, 20 bp, synthetic construct
  source 1..20: mol_type = other DNA
ttaatatatgttgccaatag

SEQ ID NO: 87072 - DNA, 20 bp, synthetic construct
  source 1..20: mol_type = other DNA
attaatatatgttgccaata

SEQ ID NO: 87073 - DNA, 20 bp, synthetic construct
  source 1..20: mol_type = other DNA
aattaatatatgttgccaat

SEQ ID NO: 87074 - DNA, 20 bp, synthetic construct
  source 1..20: mol_type = other DNA
aaattaatatatgttgccaa

SEQ ID NO: 87075 - DNA, 20 bp, synthetic construct
  source 1..20: mol_type = other DNA
caaattaatatatgttgcca

SEQ ID NO: 87076 - DNA, 20 bp, synthetic construct
  source 1..20: mol_type = other DNA
tcaaattaatatatgttgcc

SEQ ID NO: 87077 - DNA, 20 bp, synthetic construct
  source 1..20: mol_type = other DNA
ttcaaattaatatatgttgc

SEQ ID NO: 87078 - DNA, 20 bp, synthetic construct
  source 1..20: mol_type = other DNA
cttcaaattaatatatgttg

SEQ ID NO: 87079 - DNA, 20 bp, synthetic construct
  source 1..20: mol_type = other DNA
acttcaaattaatatatgtt

SEQ ID NO: 87080 - DNA, 20 bp, synthetic construct
  source 1..20: mol_type = other DNA
aacttcaaattaatatatgt

SEQ ID NO: 87081 - DNA, 20 bp, synthetic construct
  source 1..20: mol_type = other DNA
gaacttcaaattaatatatg

SEQ ID NO: 87082 - DNA, 20 bp, synthetic construct
  source 1..20: mol_type = other DNA
agaacttcaaattaatatat

SEQ ID NO: 87083 - DNA, 20 bp, synthetic construct
  source 1..20: mol_type = other DNA
tagaacttcaaattaatata

SEQ ID NO: 87084 - DNA, 20 bp, synthetic construct
  source 1..20: mol_type = other DNA
ttagaacttcaaattaatat

SEQ ID NO: 87085 - DNA, 20 bp, synthetic construct
  source 1..20: mol_type = other DNA
tttagaacttcaaattaata

SEQ ID NO: 87086 - DNA, 20 bp, synthetic construct
  source 1..20: mol_type = other DNA
ctttagaacttcaaattaat

SEQ ID NO: 87087 - DNA, 20 bp, synthetic construct
  source 1..20: mol_type = other DNA
tctttagaacttcaaattaa

SEQ ID NO: 87088 - DNA, 20 bp, synthetic construct
  source 1..20: mol_type = other DNA
ctctttagaacttcaaatta

SEQ ID NO: 87089 - DNA, 20 bp, synthetic construct
  source 1..20: mol_type = other DNA
actctttagaacttcaaatt

SEQ ID NO: 87090 - DNA, 20 bp, synthetic construct
  source 1..20: mol_type = other DNA
aactctttagaacttcaaat

SEQ ID NO: 87091 - DNA, 20 bp, synthetic construct
  source 1..20: mol_type = other DNA
aaactctttagaacttcaaa

SEQ ID NO: 87092 - DNA, 20 bp, synthetic construct
  source 1..20: mol_type = other DNA
caaactctttagaacttcaa

SEQ ID NO: 87093 - DNA, 20 bp, synthetic construct
  source 1..20: mol_type = other DNA
ccaaactctttagaacttca

SEQ ID NO: 87094 - DNA, 20 bp, synthetic construct
  source 1..20: mol_type = other DNA
gccaaactctttagaacttc

SEQ ID NO: 87095 - DNA, 20 bp, synthetic construct
  source 1..20: mol_type = other DNA
tgccaaactctttagaactt

SEQ ID NO: 87096 - DNA, 20 bp, synthetic construct
  source 1..20: mol_type = other DNA
ctgccaaactctttagaact

SEQ ID NO: 87097 - DNA, 20 bp, synthetic construct
  source 1..20: mol_type = other DNA
gctgccaaactctttagaac

SEQ ID NO: 87098 - DNA, 20 bp, synthetic construct
  source 1..20: mol_type = other DNA
ggctgccaaactctttagaa

SEQ ID NO: 87099 - DNA, 20 bp, synthetic construct
  source 1..20: mol_type = other DNA
cggctgccaaactctttaga

SEQ ID NO: 87100 - DNA, 20 bp, synthetic construct
  source 1..20: mol_type = other DNA
ccggctgccaaactctttag

SEQ ID NO: 87101 - DNA, 20 bp, synthetic construct
  source 1..20: mol_type = other DNA
cccggctgccaaactcttta

SEQ ID NO: 87102 - DNA, 20 bp, synthetic construct
  source 1..20: mol_type = other DNA
acccggctgccaaactcttt

SEQ ID NO: 87103 - DNA, 20 bp, synthetic construct
  source 1..20: mol_type = other DNA
cacccggctgccaaactctt

SEQ ID NO: 87104 - DNA, 20 bp, synthetic construct
  source 1..20: mol_type = other DNA
tcacccggctgccaaactct

SEQ ID NO: 87105 - DNA, 20 bp, synthetic construct
  source 1..20: mol_type = other DNA
ctcacccggctgccaaactc

SEQ ID NO: 87106 - DNA, 20 bp, synthetic construct
  source 1..20: mol_type = other DNA
tctcacccggctgccaaact

SEQ ID NO: 87107 - DNA, 20 bp, synthetic construct
  source 1..20: mol_type = other DNA
ctctcacccggctgccaaac

SEQ ID NO: 87108 - DNA, 20 bp, synthetic construct
  source 1..20: mol_type = other DNA
tctctcacccggctgccaaa

SEQ ID NO: 87109 - DNA, 20 bp, synthetic construct
  source 1..20: mol_type = other DNA
ctctctcacccggctgccaa

SEQ ID NO: 87110 - DNA, 20 bp, synthetic construct
  source 1..20: mol_type = other DNA
actctctcacccggctgcca

SEQ ID NO: 87111 - DNA, 20 bp, synthetic construct
  source 1..20: mol_type = other DNA
cactctctcacccggctgcc

SEQ ID NO: 87112 - DNA, 20 bp, synthetic construct
  source 1..20: mol_type = other DNA
tcactctctcacccggctgc

SEQ ID NO: 87113 - DNA, 20 bp, synthetic construct
  source 1..20: mol_type = other DNA
ctcactctctcacccggctg

SEQ ID NO: 87114 - DNA, 20 bp, synthetic construct
  source 1..20: mol_type = other DNA
cctcactctctcacccggct

SEQ ID NO: 87115 - DNA, 20 bp, synthetic construct
  source 1..20: mol_type = other DNA
tcctcactctctcacccggc

SEQ ID NO: 87116 - DNA, 20 bp, synthetic construct
  source 1..20: mol_type = other DNA
ctcctcactctctcacccgg

SEQ ID NO: 87117 - DNA, 20 bp, synthetic construct
  source 1..20: mol_type = other DNA
tctcctcactctctcacccg

SEQ ID NO: 87118 - DNA, 20 bp, synthetic construct
  source 1..20: mol_type = other DNA
atctcctcactctctcaccc

SEQ ID NO: 87119 - DNA, 20 bp, synthetic construct
  source 1..20: mol_type = other DNA
aatctcctcactctctcacc

SEQ ID NO: 87120 - DNA, 20 bp, synthetic construct
  source 1..20: mol_type = other DNA
aaatctcctcactctctcac

SEQ ID NO: 87121 - DNA, 20 bp, synthetic construct
  source 1..20: mol_type = other DNA
caaatctcctcactctctca

SEQ ID NO: 87122 - DNA, 20 bp, synthetic construct
  source 1..20: mol_type = other DNA
ccaaatctcctcactctctc

SEQ ID NO: 87123 - DNA, 20 bp, synthetic construct
  source 1..20: mol_type = other DNA
gccaaatctcctcactctct

SEQ ID NO: 87124 - DNA, 20 bp, synthetic construct
  source 1..20: mol_type = other DNA
agccaaatctcctcactctc

SEQ ID NO: 87125 - DNA, 20 bp, synthetic construct
  source 1..20: mol_type = other DNA
aagccaaatctcctcactct

SEQ ID NO: 87126 - DNA, 20 bp, synthetic construct
  source 1..20: mol_type = other DNA
aaagccaaatctcctcactc

SEQ ID NO: 87127 - DNA, 20 bp, synthetic construct
  source 1..20: mol_type = other DNA
caaagccaaatctcctcact

SEQ ID NO: 87128 - DNA, 20 bp, synthetic construct
  source 1..20: mol_type = other DNA
tcaaagccaaatctcctcac

SEQ ID NO: 87129 - DNA, 20 bp, synthetic construct
  source 1..20: mol_type = other DNA
gtcaaagccaaatctcctca

SEQ ID NO: 87130 - DNA, 20 bp, synthetic construct
  source 1..20: mol_type = other DNA
tgtcaaagccaaatctcctc

SEQ ID NO: 87131 - DNA, 20 bp, synthetic construct
  source 1..20: mol_type = other DNA
atgtcaaagccaaatctcct

SEQ ID NO: 87132 - DNA, 20 bp, synthetic construct
  source 1..20: mol_type = other DNA
aatgtcaaagccaaatctcc

SEQ ID NO: 87133 - DNA, 20 bp, synthetic construct
  source 1..20: mol_type = other DNA
taatgtcaaagccaaatctc

SEQ ID NO: 87134 - DNA, 20 bp, synthetic construct
  source 1..20: mol_type = other DNA
ctaatgtcaaagccaaatct

SEQ ID NO: 87135 - DNA, 20 bp, synthetic construct
  source 1..20: mol_type = other DNA
cctaatgtcaaagccaaatc

SEQ ID NO: 87136 - DNA, 20 bp, synthetic construct
  source 1..20: mol_type = other DNA
ccctaatgtcaaagccaaat

SEQ ID NO: 87137 - DNA, 20 bp, synthetic construct
  source 1..20: mol_type = other DNA
tccctaatgtcaaagccaaa

SEQ ID NO: 87138 - DNA, 20 bp, synthetic construct
  source 1..20: mol_type = other DNA
ttccctaatgtcaaagccaa

SEQ ID NO: 87139 - DNA, 20 bp, synthetic construct
  source 1..20: mol_type = other DNA
cttccctaatgtcaaagcca

SEQ ID NO: 87140 - DNA, 20 bp, synthetic construct
  source 1..20: mol_type = other DNA
acttccctaatgtcaaagcc

SEQ ID NO: 87141 - DNA, 20 bp, synthetic construct
  source 1..20: mol_type = other DNA
aacttccctaatgtcaaagc

SEQ ID NO: 87142 - DNA, 20 bp, synthetic construct
  source 1..20: mol_type = other DNA
aaacttccctaatgtcaaag

SEQ ID NO: 87143 - DNA, 20 bp, synthetic construct
  source 1..20: mol_type = other DNA
aaaacttccctaatgtcaaa

SEQ ID NO: 87144 - DNA, 20 bp, synthetic construct
  source 1..20: mol_type = other DNA
gaaaacttccctaatgtcaa

SEQ ID NO: 87145 - DNA, 20 bp, synthetic construct
  source 1..20: mol_type = other DNA
cgaaaacttccctaatgtca

SEQ ID NO: 87146 - DNA, 20 bp, synthetic construct
  source 1..20: mol_type = other DNA
gcgaaaacttccctaatgtc

SEQ ID NO: 87147 - DNA, 20 bp, synthetic construct
  source 1..20: mol_type = other DNA
agcgaaaacttccctaatgt

SEQ ID NO: 87148 - DNA, 20 bp, synthetic construct
  source 1..20: mol_type = other DNA
aagcgaaaacttccctaatg

SEQ ID NO: 87149 - DNA, 20 bp, synthetic construct
  source 1..20: mol_type = other DNA
caagcgaaaacttccctaat

SEQ ID NO: 87150 - DNA, 20 bp, synthetic construct
  source 1..20: mol_type = other DNA
ccaagcgaaaacttccctaa

SEQ ID NO: 87151 - DNA, 20 bp, synthetic construct
  source 1..20: mol_type = other DNA
accaagcgaaaacttcccta

SEQ ID NO: 87152 - DNA, 20 bp, synthetic construct
  source 1..20: mol_type = other DNA
caccaagcgaaaacttccct

SEQ ID NO: 87153 - DNA, 20 bp, synthetic construct
  source 1..20: mol_type = other DNA
acaccaagcgaaaacttccc

SEQ ID NO: 87154 - DNA, 20 bp, synthetic construct
  source 1..20: mol_type = other DNA
aacaccaagcgaaaacttcc

SEQ ID NO: 87155 - DNA, 20 bp, synthetic construct
  source 1..20: mol_type = other DNA
taacaccaagcgaaaacttc

SEQ ID NO: 87156 - DNA, 20 bp, synthetic construct
  source 1..20: mol_type = other DNA
ttaacaccaagcgaaaactt

SEQ ID NO: 87157 - DNA, 20 bp, synthetic construct
  source 1..20: mol_type = other DNA
gttaacaccaagcgaaaact

SEQ ID NO: 87158 - DNA, 20 bp, synthetic construct
  source 1..20: mol_type = other DNA
tgttaacaccaagcgaaaac

SEQ ID NO: 87159 - DNA, 20 bp, synthetic construct
  source 1..20: mol_type = other DNA
gtgttaacaccaagcgaaaa

SEQ ID NO: 87160 - DNA, 20 bp, synthetic construct
  source 1..20: mol_type = other DNA
ggtgttaacaccaagcgaaa

SEQ ID NO: 87161 - DNA, 20 bp, synthetic construct
  source 1..20: mol_type = other DNA
tggtgttaacaccaagcgaa

SEQ ID NO: 87162 - DNA, 20 bp, synthetic construct
  source 1..20: mol_type = other DNA
ctggtgttaacaccaagcga

SEQ ID NO: 87163 - DNA, 20 bp, synthetic construct
  source 1..20: mol_type = other DNA
actggtgttaacaccaagcg

SEQ ID NO: 87164 - DNA, 20 bp, synthetic construct
  source 1..20: mol_type = other DNA
tactggtgttaacaccaagc

SEQ ID NO: 87165 - DNA, 20 bp, synthetic construct
  source 1..20: mol_type = other DNA
ctactggtgttaacaccaag

SEQ ID NO: 87166 - DNA, 20 bp, synthetic construct
  source 1..20: mol_type = other DNA
cctactggtgttaacaccaa

SEQ ID NO: 87167 - DNA, 20 bp, synthetic construct
  source 1..20: mol_type = other DNA
gcctactggtgttaacacca

SEQ ID NO: 87168 - DNA, 20 bp, synthetic construct
  source 1..20: mol_type = other DNA
agcctactggtgttaacacc

SEQ ID NO: 87169 - DNA, 20 bp, synthetic construct
  source 1..20: mol_type = other DNA
aagcctactggtgttaacac

SEQ ID NO: 87170 - DNA, 20 bp, synthetic construct
  source 1..20: mol_type = other DNA
gaagcctactggtgttaaca

SEQ ID NO: 87171 - DNA, 20 bp, synthetic construct
  source 1..20: mol_type = other DNA
agaagcctactggtgttaac

SEQ ID NO: 87172 - DNA, 20 bp, synthetic construct
  source 1..20: mol_type = other DNA
gagaagcctactggtgttaa

SEQ ID NO: 87173 - DNA, 20 bp, synthetic construct
  source 1..20: mol_type = other DNA
agagaagcctactggtgtta

SEQ ID NO: 87174 - DNA, 20 bp, synthetic construct
  source 1..20: mol_type = other DNA
cagagaagcctactggtgtt

SEQ ID NO: 87175 - DNA, 20 bp, synthetic construct
  source 1..20: mol_type = other DNA
tcagagaagcctactggtgt

SEQ ID NO: 87176 - DNA, 20 bp, synthetic construct
  source 1..20: mol_type = other DNA
atcagagaagcctactggtg

SEQ ID NO: 87177 - DNA, 20 bp, synthetic construct
  source 1..20: mol_type = other DNA
catcagagaagcctactggt

SEQ ID NO: 87178 - DNA, 20 bp, synthetic construct
  source 1..20: mol_type = other DNA
tcatcagagaagcctactgg

SEQ ID NO: 87179 - DNA, 20 bp, synthetic construct
  source 1..20: mol_type = other DNA
ctcatcagagaagcctactg

SEQ ID NO: 87180 - DNA, 20 bp, synthetic construct
  source 1..20: mol_type = other DNA
cctcatcagagaagcctact

SEQ ID NO: 87181 - DNA, 20 bp, synthetic construct
  source 1..20: mol_type = other DNA
ccctcatcagagaagcctac

SEQ ID NO: 87182 - DNA, 20 bp, synthetic construct
  source 1..20: mol_type = other DNA
gccctcatcagagaagccta

SEQ ID NO: 87183 - DNA, 20 bp, synthetic construct
  source 1..20: mol_type = other DNA
ggccctcatcagagaagcct

SEQ ID NO: 87184 - DNA, 20 bp, synthetic construct
  source 1..20: mol_type = other DNA
tggccctcatcagagaagcc

SEQ ID NO: 87185 - DNA, 20 bp, synthetic construct
  source 1..20: mol_type = other DNA
atggccctcatcagagaagc

SEQ ID NO: 87186 - DNA, 20 bp, synthetic construct
  source 1..20: mol_type = other DNA
aatggccctcatcagagaag

SEQ ID NO: 87187 - DNA, 20 bp, synthetic construct
  source 1..20: mol_type = other DNA
gaatggccctcatcagagaa

SEQ ID NO: 87188 - DNA, 20 bp, synthetic construct
  source 1..20: mol_type = other DNA
agaatggccctcatcagaga

SEQ ID NO: 87189 - DNA, 20 bp, synthetic construct
  source 1..20: mol_type = other DNA
cagaatggccctcatcagag

SEQ ID NO: 87190 - DNA, 20 bp, synthetic construct
  source 1..20: mol_type = other DNA
acagaatggccctcatcaga

SEQ ID NO: 87191 - DNA, 20 bp, synthetic construct
  source 1..20: mol_type = other DNA
gacagaatggccctcatcag

SEQ ID NO: 87192 - DNA, 20 bp, synthetic construct
  source 1..20: mol_type = other DNA
ggacagaatggccctcatca

SEQ ID NO: 87193 - DNA, 20 bp, synthetic construct
  source 1..20: mol_type = other DNA
tggacagaatggccctcatc

SEQ ID NO: 87194 - DNA, 20 bp, synthetic construct
  source 1..20: mol_type = other DNA
gtggacagaatggccctcat

SEQ ID NO: 87195 - DNA, 20 bp, synthetic construct
  source 1..20: mol_type = other DNA
agtggacagaatggccctca

SEQ ID NO: 87196 - DNA, 20 bp, synthetic construct
  source 1..20: mol_type = other DNA
gagtggacagaatggccctc

SEQ ID NO: 87197 - DNA, 20 bp, synthetic construct
  source 1..20: mol_type = other DNA
agagtggacagaatggccct

SEQ ID NO: 87198 - DNA, 20 bp, synthetic construct
  source 1..20: mol_type = other DNA
aagagtggacagaatggccc

SEQ ID NO: 87199 - DNA, 20 bp, synthetic construct
  source 1..20: mol_type = other DNA
aaagagtggacagaatggcc

SEQ ID NO: 87200 - DNA, 20 bp, synthetic construct
  source 1..20: mol_type = other DNA
aaaagagtggacagaatggc

SEQ ID NO: 87201 - DNA, 20 bp, synthetic construct
  source 1..20: mol_type = other DNA
taaaagagtggacagaatgg

SEQ ID NO: 87202 - DNA, 20 bp, synthetic construct
  source 1..20: mol_type = other DNA
gtaaaagagtggacagaatg

SEQ ID NO: 87203 - DNA, 20 bp, synthetic construct
  source 1..20: mol_type = other DNA
ggtaaaagagtggacagaat

SEQ ID NO: 87204 - DNA, 20 bp, synthetic construct
  source 1..20: mol_type = other DNA
aggtaaaagagtggacagaa

SEQ ID NO: 87205 - DNA, 20 bp, synthetic construct
  source 1..20: mol_type = other DNA
caggtaaaagagtggacaga

SEQ ID NO: 87206 - DNA, 20 bp, synthetic construct
  source 1..20: mol_type = other DNA
tcaggtaaaagagtggacag

SEQ ID NO: 87207 - DNA, 20 bp, synthetic construct
  source 1..20: mol_type = other DNA
atcaggtaaaagagtggaca

SEQ ID NO: 87208 - DNA, 20 bp, synthetic construct
  source 1..20: mol_type = other DNA
tatcaggtaaaagagtggac

SEQ ID NO: 87209 - DNA, 20 bp, synthetic construct
  source 1..20: mol_type = other DNA
ctatcaggtaaaagagtgga

SEQ ID NO: 87210 - DNA, 20 bp, synthetic construct
  source 1..20: mol_type = other DNA
tctatcaggtaaaagagtgg

SEQ ID NO: 87211 - DNA, 20 bp, synthetic construct
  source 1..20: mol_type = other DNA
atctatcaggtaaaagagtg

SEQ ID NO: 87212 - DNA, 20 bp, synthetic construct
  source 1..20: mol_type = other DNA
aatctatcaggtaaaagagt

SEQ ID NO: 87213 - DNA, 20 bp, synthetic construct
  source 1..20: mol_type = other DNA
caatctatcaggtaaaagag

SEQ ID NO: 87214 - DNA, 20 bp, synthetic construct
  source 1..20: mol_type = other DNA
ccaatctatcaggtaaaaga

SEQ ID NO: 87215 - DNA, 20 bp, synthetic construct
  source 1..20: mol_type = other DNA
accaatctatcaggtaaaag

SEQ ID NO: 87216 - DNA, 20 bp, synthetic construct
  source 1..20: mol_type = other DNA
gaccaatctatcaggtaaaa

SEQ ID NO: 87217 - DNA, 20 bp, synthetic construct
  source 1..20: mol_type = other DNA
agaccaatctatcaggtaaa

SEQ ID NO: 87218 - DNA, 20 bp, synthetic construct
  source 1..20: mol_type = other DNA
tagaccaatctatcaggtaa

SEQ ID NO: 87219 - DNA, 20 bp, synthetic construct
  source 1..20: mol_type = other DNA
ttagaccaatctatcaggta

SEQ ID NO: 87220 - DNA, 20 bp, synthetic construct
  source 1..20: mol_type = other DNA
attagaccaatctatcaggt

SEQ ID NO: 87221 - DNA, 20 bp, synthetic construct
  source 1..20: mol_type = other DNA
cattagaccaatctatcagg

SEQ ID NO: 87222 - DNA, 20 bp, synthetic construct
  source 1..20: mol_type = other DNA
gcattagaccaatctatcag

SEQ ID NO: 87223 - DNA, 20 bp, synthetic construct
  source 1..20: mol_type = other DNA
tgcattagaccaatctatca

SEQ ID NO: 87224 - DNA, 20 bp, synthetic construct
  source 1..20: mol_type = other DNA
gtgcattagaccaatctatc

SEQ ID NO: 87225 - DNA, 20 bp, synthetic construct
  source 1..20: mol_type = other DNA
tgtgcattagaccaatctat

SEQ ID NO: 87226 - DNA, 20 bp, synthetic construct
  source 1..20: mol_type = other DNA
ctgtgcattagaccaatcta

SEQ ID NO: 87227 - DNA, 20 bp, synthetic construct
  source 1..20: mol_type = other DNA
actgtgcattagaccaatct

SEQ ID NO: 87228 - DNA, 20 bp, synthetic construct
  source 1..20: mol_type = other DNA
tactgtgcattagaccaatc

SEQ ID NO: 87229 - DNA, 20 bp, synthetic construct
  source 1..20: mol_type = other DNA
ctactgtgcattagaccaat

SEQ ID NO: 87230 - DNA, 20 bp, synthetic construct
  source 1..20: mol_type = other DNA
tctactgtgcattagaccaa

SEQ ID NO: 87231 - DNA, 20 bp, synthetic construct
  source 1..20: mol_type = other DNA
gtctactgtgcattagacca

SEQ ID NO: 87232 - DNA, 20 bp, synthetic construct
  source 1..20: mol_type = other DNA
agtctactgtgcattagacc

SEQ ID NO: 87233 - DNA, 20 bp, synthetic construct
  source 1..20: mol_type = other DNA
cagtctactgtgcattagac

SEQ ID NO: 87234 - DNA, 20 bp, synthetic construct
  source 1..20: mol_type = other DNA
tcagtctactgtgcattaga

SEQ ID NO: 87235 - DNA, 20 bp, synthetic construct
  source 1..20: mol_type = other DNA
atcagtctactgtgcattag

SEQ ID NO: 87236 - DNA, 20 bp, synthetic construct
  source 1..20: mol_type = other DNA
aatcagtctactgtgcatta

SEQ ID NO: 87237 - DNA, 20 bp, synthetic construct
  source 1..20: mol_type = other DNA
aaatcagtctactgtgcatt

SEQ ID NO: 87238 - DNA, 20 bp, synthetic construct
  source 1..20: mol_type = other DNA
taaatcagtctactgtgcat

SEQ ID NO: 87239 - DNA, 20 bp, synthetic construct
  source 1..20: mol_type = other DNA
ctaaatcagtctactgtgca

SEQ ID NO: 87240 - DNA, 20 bp, synthetic construct
  source 1..20: mol_type = other DNA
tctaaatcagtctactgtgc

SEQ ID NO: 87241 - DNA, 20 bp, synthetic construct
  source 1..20: mol_type = other DNA
ttctaaatcagtctactgtg

SEQ ID NO: 87242 - DNA, 20 bp, synthetic construct
  source 1..20: mol_type = other DNA
tttctaaatcagtctactgt

SEQ ID NO: 87243 - DNA, 20 bp, synthetic construct
  source 1..20: mol_type = other DNA
ctttctaaatcagtctactg

SEQ ID NO: 87244 - DNA, 20 bp, synthetic construct
  source 1..20: mol_type = other DNA
tctttctaaatcagtctact

SEQ ID NO: 87245 - DNA, 20 bp, synthetic construct
  source 1..20: mol_type = other DNA
ctctttctaaatcagtctac

SEQ ID NO: 87246 - DNA, 20 bp, synthetic construct
  source 1..20: mol_type = other DNA
actctttctaaatcagtcta

SEQ ID NO: 87247 - DNA, 20 bp, synthetic construct
  source 1..20: mol_type = other DNA
tactctttctaaatcagtct

SEQ ID NO: 87248 - DNA, 20 bp, synthetic construct
  source 1..20: mol_type = other DNA
ctactctttctaaatcagtc

SEQ ID NO: 87249 - DNA, 20 bp, synthetic construct
  source 1..20: mol_type = other DNA
actactctttctaaatcagt

SEQ ID NO: 87250 - DNA, 20 bp, synthetic construct
  source 1..20: mol_type = other DNA
gactactctttctaaatcag

SEQ ID NO: 87251 - DNA, 20 bp, synthetic construct
  source 1..20: mol_type = other DNA
tgactactctttctaaatca

SEQ ID NO: 87252 - DNA, 20 bp, synthetic construct
  source 1..20: mol_type = other DNA
gtgactactctttctaaatc

SEQ ID NO: 87253 - DNA, 20 bp, synthetic construct
  source 1..20: mol_type = other DNA
agtgactactctttctaaat

SEQ ID NO: 87254 - DNA, 20 bp, synthetic construct
  source 1..20: mol_type = other DNA
tagtgactactctttctaaa

SEQ ID NO: 87255 - DNA, 20 bp, synthetic construct
  source 1..20: mol_type = other DNA
ctagtgactactctttctaa

SEQ ID NO: 87256 - DNA, 20 bp, synthetic construct
  source 1..20: mol_type = other DNA
actagtgactactctttcta

SEQ ID NO: 87257 - DNA, 20 bp, synthetic construct
  source 1..20: mol_type = other DNA
cactagtgactactctttct

SEQ ID NO: 87258 - DNA, 20 bp, synthetic construct
  source 1..20: mol_type = other DNA
ccactagtgactactctttc

SEQ ID NO: 87259 - DNA, 20 bp, synthetic construct
  source 1..20: mol_type = other DNA
gccactagtgactactcttt

SEQ ID NO: 87260 - DNA, 20 bp, synthetic construct
  source 1..20: mol_type = other DNA
tgccactagtgactactctt

SEQ ID NO: 87261 - DNA, 20 bp, synthetic construct
  source 1..20: mol_type = other DNA
atgccactagtgactactct

SEQ ID NO: 87262 - DNA, 20 bp, synthetic construct
  source 1..20: mol_type = other DNA
catgccactagtgactactc

SEQ ID NO: 87263 - DNA, 20 bp, synthetic construct
  source 1..20: mol_type = other DNA
ccatgccactagtgactact

SEQ ID NO: 87264 - DNA, 20 bp, synthetic construct
  source 1..20: mol_type = other DNA
gccatgccactagtgactac

SEQ ID NO: 87265 - DNA, 20 bp, synthetic construct
  source 1..20: mol_type = other DNA
tgccatgccactagtgacta

SEQ ID NO: 87266 - DNA, 20 bp, synthetic construct
  source 1..20: mol_type = other DNA
ctgccatgccactagtgact

SEQ ID NO: 87267 - DNA, 20 bp, synthetic construct
  source 1..20: mol_type = other DNA
tctgccatgccactagtgac

SEQ ID NO: 87268 - DNA, 20 bp, synthetic construct
  source 1..20: mol_type = other DNA
ttctgccatgccactagtga

SEQ ID NO: 87269 - DNA, 20 bp, synthetic construct
  source 1..20: mol_type = other DNA
attctgccatgccactagtg

SEQ ID NO: 87270 - DNA, 20 bp, synthetic construct
  source 1..20: mol_type = other DNA
gattctgccatgccactagt

SEQ ID NO: 87271 - DNA, 20 bp, synthetic construct
  source 1..20: mol_type = other DNA
tgattctgccatgccactag

SEQ ID NO: 87272 - DNA, 20 bp, synthetic construct
  source 1..20: mol_type = other DNA
ttgattctgccatgccacta

SEQ ID NO: 87273 - DNA, 20 bp, synthetic construct
  source 1..20: mol_type = other DNA
attgattctgccatgccact

SEQ ID NO: 87274 - DNA, 20 bp, synthetic construct
  source 1..20: mol_type = other DNA
tattgattctgccatgccac

SEQ ID NO: 87275 - DNA, 20 bp, synthetic construct
  source 1..20: mol_type = other DNA
ttattgattctgccatgcca

SEQ ID NO: 87276 - DNA, 20 bp, synthetic construct
  source 1..20: mol_type = other DNA
attattgattctgccatgcc

SEQ ID NO: 87277 - DNA, 20 bp, synthetic construct
  source 1..20: mol_type = other DNA
cattattgattctgccatgc

SEQ ID NO: 87278 - DNA, 20 bp, synthetic construct
  source 1..20: mol_type = other DNA
acattattgattctgccatg

SEQ ID NO: 87279 - DNA, 20 bp, synthetic construct
  source 1..20: mol_type = other DNA
tacattattgattctgccat

SEQ ID NO: 87280 - DNA, 20 bp, synthetic construct
  source 1..20: mol_type = other DNA
ctacattattgattctgcca

SEQ ID NO: 87281 - DNA, 20 bp, synthetic construct
  source 1..20: mol_type = other DNA
tctacattattgattctgcc

SEQ ID NO: 87282 - DNA, 20 bp, synthetic construct
  source 1..20: mol_type = other DNA
ttctacattattgattctgc

SEQ ID NO: 87283 - DNA, 20 bp, synthetic construct
  source 1..20: mol_type = other DNA
attctacattattgattctg

SEQ ID NO: 87284 - DNA, 20 bp, synthetic construct
  source 1..20: mol_type = other DNA
aattctacattattgattct

SEQ ID NO: 87285 - DNA, 20 bp, synthetic construct
  source 1..20: mol_type = other DNA
aaattctacattattgattc

SEQ ID NO: 87286 - DNA, 20 bp, synthetic construct
  source 1..20: mol_type = other DNA
aaaattctacattattgatt

SEQ ID NO: 87287 - DNA, 20 bp, synthetic construct
  source 1..20: mol_type = other DNA
caaaattctacattattgat

SEQ ID NO: 87288 - DNA, 20 bp, synthetic construct
  source 1..20: mol_type = other DNA
tcaaaattctacattattga

SEQ ID NO: 87289 - DNA, 20 bp, synthetic construct
  source 1..20: mol_type = other DNA
gtcaaaattctacattattg

SEQ ID NO: 87290 - DNA, 20 bp, synthetic construct
  source 1..20: mol_type = other DNA
tgtcaaaattctacattatt

SEQ ID NO: 87291 - DNA, 20 bp, synthetic construct
  source 1..20: mol_type = other DNA
ttgtcaaaattctacattat

SEQ ID NO: 87292 - DNA, 20 bp, synthetic construct
  source 1..20: mol_type = other DNA
attgtcaaaattctacatta

SEQ ID NO: 87293 - DNA, 20 bp, synthetic construct
  source 1..20: mol_type = other DNA
aattgtcaaaattctacatt

SEQ ID NO: 87294 - DNA, 20 bp, synthetic construct
  source 1..20: mol_type = other DNA
gaattgtcaaaattctacat

SEQ ID NO: 87295 - DNA, 20 bp, synthetic construct
  source 1..20: mol_type = other DNA
tgaattgtcaaaattctaca

SEQ ID NO: 87296 - DNA, 20 bp, synthetic construct
  source 1..20: mol_type = other DNA
atgaattgtcaaaattctac

SEQ ID NO: 87297 - DNA, 20 bp, synthetic construct
  source 1..20: mol_type = other DNA
tatgaattgtcaaaattcta

SEQ ID NO: 87298 - DNA, 20 bp, synthetic construct
  source 1..20: mol_type = other DNA
atatgaattgtcaaaattct

SEQ ID NO: 87299 - DNA, 20 bp, synthetic construct
  source 1..20: mol_type = other DNA
tatatgaattgtcaaaattc

SEQ ID NO: 87300 - DNA, 20 bp, synthetic construct
  source 1..20: mol_type = other DNA
ctatatgaattgtcaaaatt

SEQ ID NO: 87301 - DNA, 20 bp, synthetic construct
  source 1..20: mol_type = other DNA
actatatgaattgtcaaaat

SEQ ID NO: 87302 - DNA, 20 bp, synthetic construct
  source 1..20: mol_type = other DNA
cactatatgaattgtcaaaa

SEQ ID NO: 87303 - DNA, 20 bp, synthetic construct
  source 1..20: mol_type = other DNA
gcactatatgaattgtcaaa

SEQ ID NO: 87304 - DNA, 20 bp, synthetic construct
  source 1..20: mol_type = other DNA
agcactatatgaattgtcaa

SEQ ID NO: 87305 - DNA, 20 bp, synthetic construct
  source 1..20: mol_type = other DNA
cagcactatatgaattgtca

SEQ ID NO: 87306 - DNA, 20 bp, synthetic construct
  source 1..20: mol_type = other DNA
tcagcactatatgaattgtc

SEQ ID NO: 87307 - DNA, 20 bp, synthetic construct
  source 1..20: mol_type = other DNA
atcagcactatatgaattgt

SEQ ID NO: 87308 - DNA, 20 bp, synthetic construct
  source 1..20: mol_type = other DNA
aatcagcactatatgaattg

SEQ ID NO: 87309 - DNA, 20 bp, synthetic construct
  source 1..20: mol_type = other DNA
aaatcagcactatatgaatt

SEQ ID NO: 87310 - DNA, 20 bp, synthetic construct
  source 1..20: mol_type = other DNA
gaaatcagcactatatgaat

SEQ ID NO: 87311 - DNA, 20 bp, synthetic construct
  source 1..20: mol_type = other DNA
agaaatcagcactatatgaa

SEQ ID NO: 87312 - DNA, 20 bp, synthetic construct
  source 1..20: mol_type = other DNA
gagaaatcagcactatatga

SEQ ID NO: 87313 - DNA, 20 bp, synthetic construct
  source 1..20: mol_type = other DNA
ggagaaatcagcactatatg

SEQ ID NO: 87314 - DNA, 20 bp, synthetic construct
  source 1..20: mol_type = other DNA
gggagaaatcagcactatat

SEQ ID NO: 87315 - DNA, 20 bp, synthetic construct
  source 1..20: mol_type = other DNA
ggggagaaatcagcactata

SEQ ID NO: 87316 - DNA, 20 bp, synthetic construct
  source 1..20: mol_type = other DNA
gggggagaaatcagcactat

SEQ ID NO: 87317 - DNA, 20 bp, synthetic construct
  source 1..20: mol_type = other DNA
tgggggagaaatcagcacta

SEQ ID NO: 87318 - DNA, 20 bp, synthetic construct
  source 1..20: mol_type = other DNA
ttgggggagaaatcagcact

SEQ ID NO: 87319 - DNA, 20 bp, synthetic construct
  source 1..20: mol_type = other DNA
tttgggggagaaatcagcac

SEQ ID NO: 87320 - DNA, 20 bp, synthetic construct
  source 1..20: mol_type = other DNA
atttgggggagaaatcagca

SEQ ID NO: 87321 - DNA, 20 bp, synthetic construct
  source 1..20: mol_type = other DNA
catttgggggagaaatcagc

SEQ ID NO: 87322 - DNA, 20 bp, synthetic construct
  source 1..20: mol_type = other DNA
acatttgggggagaaatcag

SEQ ID NO: 87323 - DNA, 20 bp, synthetic construct
  source 1..20: mol_type = other DNA
gacatttgggggagaaatca

SEQ ID NO: 87324 - DNA, 20 bp, synthetic construct
  source 1..20: mol_type = other DNA
tgacatttgggggagaaatc

SEQ ID NO: 87325 - DNA, 20 bp, synthetic construct
  source 1..20: mol_type = other DNA
ctgacatttgggggagaaat

SEQ ID NO: 87326 - DNA, 20 bp, synthetic construct
  source 1..20: mol_type = other DNA
actgacatttgggggagaaa

SEQ ID NO: 87327 - DNA, 20 bp, synthetic construct
  source 1..20: mol_type = other DNA
aactgacatttgggggagaa

SEQ ID NO: 87328 - DNA, 20 bp, synthetic construct
  source 1..20: mol_type = other DNA
taactgacatttgggggaga

SEQ ID NO: 87329 - DNA, 20 bp, synthetic construct
  source 1..20: mol_type = other DNA
ataactgacatttgggggag

SEQ ID NO: 87330 - DNA, 20 bp, synthetic construct
  source 1..20: mol_type = other DNA
aataactgacatttggggga

SEQ ID NO: 87331 - DNA, 20 bp, synthetic construct
  source 1..20: mol_type = other DNA
aaataactgacatttggggg

SEQ ID NO: 87332 - DNA, 20 bp, synthetic construct
  source 1..20: mol_type = other DNA
aaaataactgacatttgggg

SEQ ID NO: 87333 - DNA, 20 bp, synthetic construct
  source 1..20: mol_type = other DNA
caaaataactgacatttggg

SEQ ID NO: 87334 - DNA, 20 bp, synthetic construct
  source 1..20: mol_type = other DNA
ccaaaataactgacatttgg

SEQ ID NO: 87335 - DNA, 20 bp, synthetic construct
  source 1..20: mol_type = other DNA
accaaaataactgacatttg

SEQ ID NO: 87336 - DNA, 20 bp, synthetic construct
  source 1..20: mol_type = other DNA
gaccaaaataactgacattt

SEQ ID NO: 87337 - DNA, 20 bp, synthetic construct
  source 1..20: mol_type = other DNA
tgaccaaaataactgacatt

SEQ ID NO: 87338 - DNA, 20 bp, synthetic construct
  source 1..20: mol_type = other DNA
atgaccaaaataactgacat

SEQ ID NO: 87339 - DNA, 20 bp, synthetic construct
  source 1..20: mol_type = other DNA
gatgaccaaaataactgaca

SEQ ID NO: 87340 - DNA, 20 bp, synthetic construct
  source 1..20: mol_type = other DNA
agatgaccaaaataactgac

SEQ ID NO: 87341 - DNA, 20 bp, synthetic construct
  source 1..20: mol_type = other DNA
tagatgaccaaaataactga

SEQ ID NO: 87342 - DNA, 20 bp, synthetic construct
  source 1..20: mol_type = other DNA
atagatgaccaaaataactg

SEQ ID NO: 87343 - DNA, 20 bp, synthetic construct
  source 1..20: mol_type = other DNA
aatagatgaccaaaataact

SEQ ID NO: 87344 - DNA, 20 bp, synthetic construct
  source 1..20: mol_type = other DNA
taatagatgaccaaaataac

SEQ ID NO: 87345 - DNA, 20 bp, synthetic construct
  source 1..20: mol_type = other DNA
ttaatagatgaccaaaataa

SEQ ID NO: 87346 - DNA, 20 bp, synthetic construct
  source 1..20: mol_type = other DNA
attaatagatgaccaaaata

SEQ ID NO: 87347 - DNA, 20 bp, synthetic construct
  source 1..20: mol_type = other DNA
tattaatagatgaccaaaat

SEQ ID NO: 87348 - DNA, 20 bp, synthetic construct
  source 1..20: mol_type = other DNA
ctattaatagatgaccaaaa

SEQ ID NO: 87349 - DNA, 20 bp, synthetic construct
  source 1..20: mol_type = other DNA
tctattaatagatgaccaaa

SEQ ID NO: 87350 - DNA, 20 bp, synthetic construct
  source 1..20: mol_type = other DNA
gtctattaatagatgaccaa

SEQ ID NO: 87351 - DNA, 20 bp, synthetic construct
  source 1..20: mol_type = other DNA
agtctattaatagatgacca

SEQ ID NO: 87352 - DNA, 20 bp, synthetic construct
  source 1..20: mol_type = other DNA
tagtctattaatagatgacc

SEQ ID NO: 87353 - DNA, 20 bp, synthetic construct
  source 1..20: mol_type = other DNA
ttagtctattaatagatgac

SEQ ID NO: 87354 - DNA, 20 bp, synthetic construct
  source 1..20: mol_type = other DNA
attagtctattaatagatga

SEQ ID NO: 87355 - DNA, 20 bp, synthetic construct
  source 1..20: mol_type = other DNA
tattagtctattaatagatg

SEQ ID NO: 87356 - DNA, 20 bp, synthetic construct
  source 1..20: mol_type = other DNA
gtattagtctattaatagat

SEQ ID NO: 87357 - DNA, 20 bp, synthetic construct
  source 1..20: mol_type = other DNA
tgtattagtctattaataga

SEQ ID NO: 87358 - DNA, 20 bp, synthetic construct
  source 1..20: mol_type = other DNA
ttgtattagtctattaatag

SEQ ID NO: 87359 - DNA, 20 bp, synthetic construct
  source 1..20: mol_type = other DNA
cttgtattagtctattaata

SEQ ID NO: 87360 - DNA, 20 bp, synthetic construct
  source 1..20: mol_type = other DNA
acttgtattagtctattaat

SEQ ID NO: 87361 - DNA, 20 bp, synthetic construct
  source 1..20: mol_type = other DNA
gacttgtattagtctattaa

SEQ ID NO: 87362 - DNA, 20 bp, synthetic construct
  source 1..20: mol_type = other DNA
tgacttgtattagtctatta

SEQ ID NO: 87363 - DNA, 20 bp, synthetic construct
  source 1..20: mol_type = other DNA
atgacttgtattagtctatt

SEQ ID NO: 87364 - DNA, 20 bp, synthetic construct
  source 1..20: mol_type = other DNA
gatgacttgtattagtctat

SEQ ID NO: 87365 - DNA, 20 bp, synthetic construct
  source 1..20: mol_type = other DNA
ggatgacttgtattagtcta

SEQ ID NO: 87366 - DNA, 20 bp, synthetic construct
  source 1..20: mol_type = other DNA
gggatgacttgtattagtct

SEQ ID NO: 87367 - DNA, 20 bp, synthetic construct
  source 1..20: mol_type = other DNA
agggatgacttgtattagtc

SEQ ID NO: 87368 - DNA, 20 bp, synthetic construct
  source 1..20: mol_type = other DNA
aagggatgacttgtattagt

SEQ ID NO: 87369 - DNA, 20 bp, synthetic construct
  source 1..20: mol_type = other DNA
aaagggatgacttgtattag

SEQ ID NO: 87370 - DNA, 20 bp, synthetic construct
  source 1..20: mol_type = other DNA
taaagggatgacttgtatta

SEQ ID NO: 87371 - DNA, 20 bp, synthetic construct
  source 1..20: mol_type = other DNA
ttaaagggatgacttgtatt

SEQ ID NO: 87372 - DNA, 20 bp, synthetic construct
  source 1..20: mol_type = other DNA
attaaagggatgacttgtat

SEQ ID NO: 87373 - DNA, 20 bp, synthetic construct
  source 1..20: mol_type = other DNA
tattaaagggatgacttgta

SEQ ID NO: 87374 - DNA, 20 bp, synthetic construct
  source 1..20: mol_type = other DNA
ctattaaagggatgacttgt

SEQ ID NO: 87375 - DNA, 20 bp, synthetic construct
  source 1..20: mol_type = other DNA
tctattaaagggatgacttg

SEQ ID NO: 87376 - DNA, 20 bp, synthetic construct
  source 1..20: mol_type = other DNA
ttctattaaagggatgactt

SEQ ID NO: 87377 - DNA, 20 bp, synthetic construct
  source 1..20: mol_type = other DNA
attctattaaagggatgact

SEQ ID NO: 87378 - DNA, 20 bp, synthetic construct
  source 1..20: mol_type = other DNA
aattctattaaagggatgac

SEQ ID NO: 87379 - DNA, 20 bp, synthetic construct
  source 1..20: mol_type = other DNA
aaattctattaaagggatga

SEQ ID NO: 87380 - DNA, 20 bp, synthetic construct
  source 1..20: mol_type = other DNA
aaaattctattaaagggatg

SEQ ID NO: 87381 - DNA, 20 bp, synthetic construct
  source 1..20: mol_type = other DNA
gaaaattctattaaagggat

SEQ ID NO: 87382 - DNA, 20 bp, synthetic construct
  source 1..20: mol_type = other DNA
tgaaaattctattaaaggga

SEQ ID NO: 87383 - DNA, 20 bp, synthetic construct
  source 1..20: mol_type = other DNA
ctgaaaattctattaaaggg

SEQ ID NO: 87384 - DNA, 20 bp, synthetic construct
  source 1..20: mol_type = other DNA
gctgaaaattctattaaagg

SEQ ID NO: 87385 - DNA, 20 bp, synthetic construct
  source 1..20: mol_type = other DNA
agctgaaaattctattaaag

SEQ ID NO: 87386 - DNA, 20 bp, synthetic construct
  source 1..20: mol_type = other DNA
gagctgaaaattctattaaa

SEQ ID NO: 87387 - DNA, 20 bp, synthetic construct
  source 1..20: mol_type = other DNA
tgagctgaaaattctattaa

SEQ ID NO: 87388 - DNA, 20 bp, synthetic construct
  source 1..20: mol_type = other DNA
gtgagctgaaaattctatta

SEQ ID NO: 87389 - DNA, 20 bp, synthetic construct
  source 1..20: mol_type = other DNA
tgtgagctgaaaattctatt

SEQ ID NO: 87390 - DNA, 20 bp, synthetic construct
  source 1..20: mol_type = other DNA
ctgtgagctgaaaattctat

SEQ ID NO: 87391 - DNA, 20 bp, synthetic construct
  source 1..20: mol_type = other DNA
gctgtgagctgaaaattcta

SEQ ID NO: 87392 - DNA, 20 bp, synthetic construct
  source 1..20: mol_type = other DNA
ggctgtgagctgaaaattct

SEQ ID NO: 87393 - DNA, 20 bp, synthetic construct
  source 1..20: mol_type = other DNA
aggctgtgagctgaaaattc

SEQ ID NO: 87394 - DNA, 20 bp, synthetic construct
  source 1..20: mol_type = other DNA
caggctgtgagctgaaaatt

SEQ ID NO: 87395 - DNA, 20 bp, synthetic construct
  source 1..20: mol_type = other DNA
gcaggctgtgagctgaaaat

SEQ ID NO: 87396 - DNA, 20 bp, synthetic construct
  source 1..20: mol_type = other DNA
agcaggctgtgagctgaaaa

SEQ ID NO: 87397 - DNA, 20 bp, synthetic construct
  source 1..20: mol_type = other DNA
tagcaggctgtgagctgaaa

SEQ ID NO: 87398 - DNA, 20 bp, synthetic construct
  source 1..20: mol_type = other DNA
ttagcaggctgtgagctgaa

SEQ ID NO: 87399 - DNA, 20 bp, synthetic construct
  source 1..20: mol_type = other DNA
cttagcaggctgtgagctga

SEQ ID NO: 87400 - DNA, 20 bp, synthetic construct
  source 1..20: mol_type = other DNA
gcttagcaggctgtgagctg

SEQ ID NO: 87401 - DNA, 20 bp, synthetic construct
  source 1..20: mol_type = other DNA
ggcttagcaggctgtgagct

SEQ ID NO: 87402 - DNA, 20 bp, synthetic construct
  source 1..20: mol_type = other DNA
aggcttagcaggctgtgagc

SEQ ID NO: 87403 - DNA, 20 bp, synthetic construct
  source 1..20: mol_type = other DNA
taggcttagcaggctgtgag

SEQ ID NO: 87404 - DNA, 20 bp, synthetic construct
  source 1..20: mol_type = other DNA
ttaggcttagcaggctgtga

SEQ ID NO: 87405 - DNA, 20 bp, synthetic construct
  source 1..20: mol_type = other DNA
cttaggcttagcaggctgtg

SEQ ID NO: 87406 - DNA, 20 bp, synthetic construct
  source 1..20: mol_type = other DNA
tcttaggcttagcaggctgt

SEQ ID NO: 87407 - DNA, 20 bp, synthetic construct
  source 1..20: mol_type = other DNA
ttcttaggcttagcaggctg

SEQ ID NO: 87408 - DNA, 20 bp, synthetic construct
  source 1..20: mol_type = other DNA
tttcttaggcttagcaggct

SEQ ID NO: 87409 - DNA, 20 bp, synthetic construct
  source 1..20: mol_type = other DNA
gtttcttaggcttagcaggc

SEQ ID NO: 87410 - DNA, 20 bp, synthetic construct
  source 1..20: mol_type = other DNA
agtttcttaggcttagcagg

SEQ ID NO: 87411 - DNA, 20 bp, synthetic construct
  source 1..20: mol_type = other DNA
cagtttcttaggcttagcag

SEQ ID NO: 87412 - DNA, 20 bp, synthetic construct
  source 1..20: mol_type = other DNA
gcagtttcttaggcttagca

SEQ ID NO: 87413 - DNA, 20 bp, synthetic construct
  source 1..20: mol_type = other DNA
agcagtttcttaggcttagc

SEQ ID NO: 87414 - DNA, 20 bp, synthetic construct
  source 1..20: mol_type = other DNA
aagcagtttcttaggcttag

SEQ ID NO: 87415 - DNA, 20 bp, synthetic construct
  source 1..20: mol_type = other DNA
taagcagtttcttaggctta

SEQ ID NO: 87416 - DNA, 20 bp, synthetic construct
  source 1..20: mol_type = other DNA
gtaagcagtttcttaggctt

SEQ ID NO: 87417 - DNA, 20 bp, synthetic construct
  source 1..20: mol_type = other DNA
tgtaagcagtttcttaggct

SEQ ID NO: 87418 - DNA, 20 bp, synthetic construct
  source 1..20: mol_type = other DNA
ctgtaagcagtttcttaggc

SEQ ID NO: 87419 - DNA, 20 bp, synthetic construct
  source 1..20: mol_type = other DNA
cctgtaagcagtttcttagg

SEQ ID NO: 87420 - DNA, 20 bp, synthetic construct
  source 1..20: mol_type = other DNA
acctgtaagcagtttcttag

SEQ ID NO: 87421 - DNA, 20 bp, synthetic construct
  source 1..20: mol_type = other DNA
aacctgtaagcagtttctta

SEQ ID NO: 87422 - DNA, 20 bp, synthetic construct
  source 1..20: mol_type = other DNA
taacctgtaagcagtttctt

SEQ ID NO: 87423 - DNA, 20 bp, synthetic construct
  source 1..20: mol_type = other DNA
gtaacctgtaagcagtttct

SEQ ID NO: 87424 - DNA, 20 bp, synthetic construct
  source 1..20: mol_type = other DNA
agtaacctgtaagcagtttc

SEQ ID NO: 87425 - DNA, 20 bp, synthetic construct
  source 1..20: mol_type = other DNA
cagtaacctgtaagcagttt

SEQ ID NO: 87426 - DNA, 20 bp, synthetic construct
  source 1..20: mol_type = other DNA
gcagtaacctgtaagcagtt

SEQ ID NO: 87427 - DNA, 20 bp, synthetic construct
  source 1..20: mol_type = other DNA
agcagtaacctgtaagcagt

SEQ ID NO: 87428 - DNA, 20 bp, synthetic construct
  source 1..20: mol_type = other DNA
aagcagtaacctgtaagcag

SEQ ID NO: 87429 - DNA, 20 bp, synthetic construct
  source 1..20: mol_type = other DNA
taagcagtaacctgtaagca

SEQ ID NO: 87430 - DNA, 20 bp, synthetic construct
  source 1..20: mol_type = other DNA
gtaagcagtaacctgtaagc

SEQ ID NO: 87431 - DNA, 20 bp, synthetic construct
  source 1..20: mol_type = other DNA
agtaagcagtaacctgtaag

SEQ ID NO: 87432 - DNA, 20 bp, synthetic construct
  source 1..20: mol_type = other DNA
cagtaagcagtaacctgtaa

SEQ ID NO: 87433 - DNA, 20 bp, synthetic construct
  source 1..20: mol_type = other DNA
acagtaagcagtaacctgta

SEQ ID NO: 87434 - DNA, 20 bp, synthetic construct
  source 1..20: mol_type = other DNA
aacagtaagcagtaacctgt

SEQ ID NO: 87435 - DNA, 20 bp, synthetic construct
  source 1..20: mol_type = other DNA
aaacagtaagcagtaacctg

SEQ ID NO: 87436 - DNA, 20 bp, synthetic construct
  source 1..20: mol_type = other DNA
aaaacagtaagcagtaacct

SEQ ID NO: 87437 - DNA, 20 bp, synthetic construct
  source 1..20: mol_type = other DNA
taaaacagtaagcagtaacc

SEQ ID NO: 87438 - DNA, 20 bp, synthetic construct
  source 1..20: mol_type = other DNA
ttaaaacagtaagcagtaac

SEQ ID NO: 87439 - DNA, 20 bp, synthetic construct
  source 1..20: mol_type = other DNA
cttaaaacagtaagcagtaa

SEQ ID NO: 87440 - DNA, 20 bp, synthetic construct
  source 1..20: mol_type = other DNA
gcttaaaacagtaagcagta

SEQ ID NO: 87441 - DNA, 20 bp, synthetic construct
  source 1..20: mol_type = other DNA
ggcttaaaacagtaagcagt

SEQ ID NO: 87442 - DNA, 20 bp, synthetic construct
  source 1..20: mol_type = other DNA
cggcttaaaacagtaagcag

SEQ ID NO: 87443 - DNA, 20 bp, synthetic construct
  source 1..20: mol_type = other DNA
tcggcttaaaacagtaagca

SEQ ID NO: 87444 - DNA, 20 bp, synthetic construct
  source 1..20: mol_type = other DNA
ctcggcttaaaacagtaagc

SEQ ID NO: 87445 - DNA, 20 bp, synthetic construct
  source 1..20: mol_type = other DNA
actcggcttaaaacagtaag

SEQ ID NO: 87446 - DNA, 20 bp, synthetic construct
  source 1..20: mol_type = other DNA
aactcggcttaaaacagtaa

SEQ ID NO: 87447 - DNA, 20 bp, synthetic construct
  source 1..20: mol_type = other DNA
aaactcggcttaaaacagta

SEQ ID NO: 87448 - DNA, 20 bp, synthetic construct
  source 1..20: mol_type = other DNA
aaaactcggcttaaaacagt

SEQ ID NO: 87449 - DNA, 20 bp, synthetic construct
  source 1..20: mol_type = other DNA
taaaactcggcttaaaacag

SEQ ID NO: 87450 - DNA, 20 bp, synthetic construct
  source 1..20: mol_type = other DNA
ttaaaactcggcttaaaaca

SEQ ID NO: 87451 - DNA, 20 bp, synthetic construct
  source 1..20: mol_type = other DNA
tttaaaactcggcttaaaac

SEQ ID NO: 87452 - DNA, 20 bp, synthetic construct
  source 1..20: mol_type = other DNA
ttttaaaactcggcttaaaa

SEQ ID NO: 87453 - DNA, 20 bp, synthetic construct
  source 1..20: mol_type = other DNA
attttaaaactcggcttaaa

SEQ ID NO: 87454 - DNA, 20 bp, synthetic construct
  source 1..20: mol_type = other DNA
aattttaaaactcggcttaa

SEQ ID NO: 87455 - DNA, 20 bp, synthetic construct
  source 1..20: mol_type = other DNA
caattttaaaactcggctta

SEQ ID NO: 87456 - DNA, 20 bp, synthetic construct
  source 1..20: mol_type = other DNA
tcaattttaaaactcggctt

SEQ ID NO: 87457 - DNA, 20 bp, synthetic construct
  source 1..20: mol_type = other DNA
atcaattttaaaactcggct

SEQ ID NO: 87458 - DNA, 20 bp, synthetic construct
  source 1..20: mol_type = other DNA
catcaattttaaaactcggc

SEQ ID NO: 87459 - DNA, 20 bp, synthetic construct
  source 1..20: mol_type = other DNA
tcatcaattttaaaactcgg

SEQ ID NO: 87460 - DNA, 20 bp, synthetic construct
  source 1..20: mol_type = other DNA
atcatcaattttaaaactcg

SEQ ID NO: 87461 - DNA, 20 bp, synthetic construct
  source 1..20: mol_type = other DNA
gatcatcaattttaaaactc

SEQ ID NO: 87462 - DNA, 20 bp, synthetic construct
  source 1..20: mol_type = other DNA
tgatcatcaattttaaaact

SEQ ID NO: 87463 - DNA, 20 bp, synthetic construct
  source 1..20: mol_type = other DNA
atgatcatcaattttaaaac

SEQ ID NO: 87464 - DNA, 20 bp, synthetic construct
  source 1..20: mol_type = other DNA
catgatcatcaattttaaaa

SEQ ID NO: 87465 - DNA, 20 bp, synthetic construct
  source 1..20: mol_type = other DNA
tcatgatcatcaattttaaa

SEQ ID NO: 87466 - DNA, 20 bp, synthetic construct
  source 1..20: mol_type = other DNA
atcatgatcatcaattttaa

SEQ ID NO: 87467 - DNA, 20 bp, synthetic construct
  source 1..20: mol_type = other DNA
tatcatgatcatcaatttta

SEQ ID NO: 87468 - DNA, 20 bp, synthetic construct
  source 1..20: mol_type = other DNA
ctatcatgatcatcaatttt

SEQ ID NO: 87469 - DNA, 20 bp, synthetic construct
  source 1..20: mol_type = other DNA
tctatcatgatcatcaattt

SEQ ID NO: 87470 - DNA, 20 bp, synthetic construct
  source 1..20: mol_type = other DNA
ttctatcatgatcatcaatt

SEQ ID NO: 87471 - DNA, 20 bp, synthetic construct
  source 1..20: mol_type = other DNA
cttctatcatgatcatcaat

SEQ ID NO: 87472 - DNA, 20 bp, synthetic construct
  source 1..20: mol_type = other DNA
tcttctatcatgatcatcaa

SEQ ID NO: 87473 - DNA, 20 bp, synthetic construct
  source 1..20: mol_type = other DNA
ctcttctatcatgatcatca

SEQ ID NO: 87474 - DNA, 20 bp, synthetic construct
  source 1..20: mol_type = other DNA
tctcttctatcatgatcatc

SEQ ID NO: 87475 - DNA, 20 bp, synthetic construct
  source 1..20: mol_type = other DNA
atctcttctatcatgatcat

SEQ ID NO: 87476 - DNA, 20 bp, synthetic construct
  source 1..20: mol_type = other DNA
tatctcttctatcatgatca

SEQ ID NO: 87477 - DNA, 20 bp, synthetic construct
  source 1..20: mol_type = other DNA
ttatctcttctatcatgatc

SEQ ID NO: 87478 - DNA, 20 bp, synthetic construct
  source 1..20: mol_type = other DNA
tttatctcttctatcatgat

SEQ ID NO: 87479 - DNA, 20 bp, synthetic construct
  source 1..20: mol_type = other DNA
atttatctcttctatcatga

SEQ ID NO: 87480 - DNA, 20 bp, synthetic construct
  source 1..20: mol_type = other DNA
tatttatctcttctatcatg

SEQ ID NO: 87481 - DNA, 20 bp, synthetic construct
  source 1..20: mol_type = other DNA
ttatttatctcttctatcat

SEQ ID NO: 87482 - DNA, 20 bp, synthetic construct
  source 1..20: mol_type = other DNA
tttatttatctcttctatca

SEQ ID NO: 87483 - DNA, 20 bp, synthetic construct
  source 1..20: mol_type = other DNA
gtttatttatctcttctatc

SEQ ID NO: 87484 - DNA, 20 bp, synthetic construct
  source 1..20: mol_type = other DNA
agtttatttatctcttctat

SEQ ID NO: 87485 - DNA, 20 bp, synthetic construct
  source 1..20: mol_type = other DNA
tagtttatttatctcttcta

SEQ ID NO: 87486 - DNA, 20 bp, synthetic construct
  source 1..20: mol_type = other DNA
ttagtttatttatctcttct

SEQ ID NO: 87487 - DNA, 20 bp, synthetic construct
  source 1..20: mol_type = other DNA
tttagtttatttatctcttc

SEQ ID NO: 87488 - DNA, 20 bp, synthetic construct
  source 1..20: mol_type = other DNA
ttttagtttatttatctctt

SEQ ID NO: 87489 - DNA, 20 bp, synthetic construct
  source 1..20: mol_type = other DNA
attttagtttatttatctct

SEQ ID NO: 87490 - DNA, 20 bp, synthetic construct
  source 1..20: mol_type = other DNA
aattttagtttatttatctc

SEQ ID NO: 87491 - DNA, 20 bp, synthetic construct
  source 1..20: mol_type = other DNA
aaattttagtttatttatct

SEQ ID NO: 87492 - DNA, 20 bp, synthetic construct
  source 1..20: mol_type = other DNA
aaaattttagtttatttatc

SEQ ID NO: 87493 - DNA, 20 bp, synthetic construct
  source 1..20: mol_type = other DNA
taaaattttagtttatttat

SEQ ID NO: 87494 - DNA, 20 bp, synthetic construct
  source 1..20: mol_type = other DNA
ctaaaattttagtttattta

SEQ ID NO: 87495 - DNA, 20 bp, synthetic construct
  source 1..20: mol_type = other DNA
tctaaaattttagtttattt

SEQ ID NO: 87496 - DNA, 20 bp, synthetic construct
  source 1..20: mol_type = other DNA
ctctaaaattttagtttatt

SEQ ID NO: 87497 - DNA, 20 bp, synthetic construct
  source 1..20: mol_type = other DNA
tctctaaaattttagtttat

SEQ ID NO: 87498 - DNA, 20 bp, synthetic construct
  source 1..20: mol_type = other DNA
ttctctaaaattttagttta

SEQ ID NO: 87499 - DNA, 20 bp, synthetic construct
  source 1..20: mol_type = other DNA
tttctctaaaattttagttt

SEQ ID NO: 87500 - DNA, 20 bp, synthetic construct
  source 1..20: mol_type = other DNA
atttctctaaaattttagtt

SEQ ID NO: 87501 - DNA, 20 bp, synthetic construct
  source 1..20: mol_type = other DNA
aatttctctaaaattttagt

SEQ ID NO: 87502 - DNA, 20 bp, synthetic construct
  source 1..20: mol_type = other DNA
aaatttctctaaaattttag

SEQ ID NO: 87503 - DNA, 20 bp, synthetic construct
  source 1..20: mol_type = other DNA
taaatttctctaaaatttta

SEQ ID NO: 87504 - DNA, 20 bp, synthetic construct
  source 1..20: mol_type = other DNA
ttaaatttctctaaaatttt

SEQ ID NO: 87505 - DNA, 20 bp, synthetic construct
  source 1..20: mol_type = other DNA
cttaaatttctctaaaattt

SEQ ID NO: 87506 - DNA, 20 bp, synthetic construct
  source 1..20: mol_type = other DNA
tcttaaatttctctaaaatt

SEQ ID NO: 87507 - DNA, 20 bp, synthetic construct
  source 1..20: mol_type = other DNA
ttcttaaatttctctaaaat

SEQ ID NO: 87508 - DNA, 20 bp, synthetic construct
  source 1..20: mol_type = other DNA
cttcttaaatttctctaaaa

SEQ ID NO: 87509 - DNA, 20 bp, synthetic construct
  source 1..20: mol_type = other DNA
ccttcttaaatttctctaaa

SEQ ID NO: 87510 - DNA, 20 bp, synthetic construct
  source 1..20: mol_type = other DNA
cccttcttaaatttctctaa

SEQ ID NO: 87511 - DNA, 20 bp, synthetic construct
  source 1..20: mol_type = other DNA
acccttcttaaatttctcta

SEQ ID NO: 87512 - DNA, 20 bp, synthetic construct
  source 1..20: mol_type = other DNA
tacccttcttaaatttctct

SEQ ID NO: 87513 - DNA, 20 bp, synthetic construct
  source 1..20: mol_type = other DNA
atacccttcttaaatttctc

SEQ ID NO: 87514 - DNA, 20 bp, synthetic construct
  source 1..20: mol_type = other DNA
catacccttcttaaatttct

SEQ ID NO: 87515 - DNA, 20 bp, synthetic construct
  source 1..20: mol_type = other DNA
acatacccttcttaaatttc

SEQ ID NO: 87516 - DNA, 20 bp, synthetic construct
  source 1..20: mol_type = other DNA
tacatacccttcttaaattt

SEQ ID NO: 87517 - DNA, 20 bp, synthetic construct
  source 1..20: mol_type = other DNA
gtacatacccttcttaaatt

SEQ ID NO: 87518 - DNA, 20 bp, synthetic construct
  source 1..20: mol_type = other DNA
tgtacatacccttcttaaat

SEQ ID NO: 87519 - DNA, 20 bp, synthetic construct
  source 1..20: mol_type = other DNA
atgtacatacccttcttaaa

SEQ ID NO: 87520 - DNA, 20 bp, synthetic construct
  source 1..20: mol_type = other DNA
tatgtacatacccttcttaa

SEQ ID NO: 87521 - DNA, 20 bp, synthetic construct
  source 1..20: mol_type = other DNA
atatgtacatacccttctta

SEQ ID NO: 87522 - DNA, 20 bp, synthetic construct
  source 1..20: mol_type = other DNA
catatgtacatacccttctt

SEQ ID NO: 87523 - DNA, 20 bp, synthetic construct
  source 1..20: mol_type = other DNA
acatatgtacatacccttct

SEQ ID NO: 87524 - DNA, 20 bp, synthetic construct
  source 1..20: mol_type = other DNA
aacatatgtacatacccttc

SEQ ID NO: 87525 - DNA, 20 bp, synthetic construct
  source 1..20: mol_type = other DNA
aaacatatgtacataccctt

SEQ ID NO: 87526 - DNA, 20 bp, synthetic construct
  source 1..20: mol_type = other DNA
aaaacatatgtacataccct

SEQ ID NO: 87527 - DNA, 20 bp, synthetic construct
  source 1..20: mol_type = other DNA
taaaacatatgtacataccc

SEQ ID NO: 87528 - DNA, 20 bp, synthetic construct
  source 1..20: mol_type = other DNA
ctaaaacatatgtacatacc

SEQ ID NO: 87529 - DNA, 20 bp, synthetic construct
  source 1..20: mol_type = other DNA
actaaaacatatgtacatac

SEQ ID NO: 87530 - DNA, 20 bp, synthetic construct
  source 1..20: mol_type = other DNA
cactaaaacatatgtacata

SEQ ID NO: 87531 - DNA, 20 bp, synthetic construct
  source 1..20: mol_type = other DNA
ccactaaaacatatgtacat

SEQ ID NO: 87532 - DNA, 20 bp, synthetic construct
  source 1..20: mol_type = other DNA
accactaaaacatatgtaca

SEQ ID NO: 87533 - DNA, 20 bp, synthetic construct
  source 1..20: mol_type = other DNA
taccactaaaacatatgtac

SEQ ID NO: 87534 - DNA, 20 bp, synthetic construct
  source 1..20: mol_type = other DNA
ataccactaaaacatatgta

SEQ ID NO: 87535 - DNA, 20 bp, synthetic construct
  source 1..20: mol_type = other DNA
gataccactaaaacatatgt

SEQ ID NO: 87536 - DNA, 20 bp, synthetic construct
  source 1..20: mol_type = other DNA
cgataccactaaaacatatg

SEQ ID NO: 87537 - DNA, 20 bp, synthetic construct
  source 1..20: mol_type = other DNA
ccgataccactaaaacatat

SEQ ID NO: 87538 - DNA, 20 bp, synthetic construct
  source 1..20: mol_type = other DNA
cccgataccactaaaacata

SEQ ID NO: 87539 - DNA, 20 bp, synthetic construct
  source 1..20: mol_type = other DNA
ccccgataccactaaaacat

SEQ ID NO: 87540 - DNA, 20 bp, synthetic construct
  source 1..20: mol_type = other DNA
accccgataccactaaaaca

SEQ ID NO: 87541 - DNA, 20 bp, synthetic construct
  source 1..20: mol_type = other DNA
caccccgataccactaaaac

SEQ ID NO: 87542 - DNA, 20 bp, synthetic construct
  source 1..20: mol_type = other DNA
acaccccgataccactaaaa

SEQ ID NO: 87543 - DNA, 20 bp, synthetic construct
  source 1..20: mol_type = other DNA
tacaccccgataccactaaa

SEQ ID NO: 87544 - DNA, 20 bp, synthetic construct
  source 1..20: mol_type = other DNA
atacaccccgataccactaa

SEQ ID NO: 87545 - DNA, 20 bp, synthetic construct
  source 1..20: mol_type = other DNA
tatacaccccgataccacta

SEQ ID NO: 87546 - DNA, 20 bp, synthetic construct
  source 1..20: mol_type = other DNA
ctatacaccccgataccact

SEQ ID NO: 87547 - DNA, 20 bp, synthetic construct
  source 1..20: mol_type = other DNA
cctatacaccccgataccac

SEQ ID NO: 87548 - DNA, 20 bp, synthetic construct
  source 1..20: mol_type = other DNA
ccctatacaccccgatacca

SEQ ID NO: 87549 - DNA, 20 bp, synthetic construct
  source 1..20: mol_type = other DNA
tccctatacaccccgatacc

SEQ ID NO: 87550 - DNA, 20 bp, synthetic construct
  source 1..20: mol_type = other DNA
atccctatacaccccgatac

SEQ ID NO: 87551 - DNA, 20 bp, synthetic construct
  source 1..20: mol_type = other DNA
aatccctatacaccccgata

SEQ ID NO: 87552 - DNA, 20 bp, synthetic construct
  source 1..20: mol_type = other DNA
taatccctatacaccccgat

SEQ ID NO: 87553 - DNA, 20 bp, synthetic construct
  source 1..20: mol_type = other DNA
ttaatccctatacaccccga

SEQ ID NO: 87554 - DNA, 20 bp, synthetic construct
  source 1..20: mol_type = other DNA
attaatccctatacaccccg

SEQ ID NO: 87555 - DNA, 20 bp, synthetic construct
  source 1..20: mol_type = other DNA
tattaatccctatacacccc

SEQ ID NO: 87556 - DNA, 20 bp, synthetic construct
  source 1..20: mol_type = other DNA
ctattaatccctatacaccc

SEQ ID NO: 87557 - DNA, 20 bp, synthetic construct
  source 1..20: mol_type = other DNA
actattaatccctatacacc

SEQ ID NO: 87558 - DNA, 20 bp, synthetic construct
  source 1..20: mol_type = other DNA
gactattaatccctatacac

SEQ ID NO: 87559 - DNA, 20 bp, synthetic construct
  source 1..20: mol_type = other DNA
agactattaatccctataca

SEQ ID NO: 87560 - DNA, 20 bp, synthetic construct
  source 1..20: mol_type = other DNA
aagactattaatccctatac

SEQ ID NO: 87561 - DNA, 20 bp, synthetic construct
  source 1..20: mol_type = other DNA
gaagactattaatccctata

SEQ ID NO: 87562 - DNA, 20 bp, synthetic construct
  source 1..20: mol_type = other DNA
agaagactattaatccctat

SEQ ID NO: 87563 - DNA, 20 bp, synthetic construct
  source 1..20: mol_type = other DNA
cagaagactattaatcccta

SEQ ID NO: 87564 - DNA, 20 bp, synthetic construct
  source 1..20: mol_type = other DNA
acagaagactattaatccct

SEQ ID NO: 87565 - DNA, 20 bp, synthetic construct
  source 1..20: mol_type = other DNA
aacagaagactattaatccc

SEQ ID NO: 87566 - DNA, 20 bp, synthetic construct
  source 1..20: mol_type = other DNA
aaacagaagactattaatcc

SEQ ID NO: 87567 - DNA, 20 bp, synthetic construct
  source 1..20: mol_type = other DNA
taaacagaagactattaatc

SEQ ID NO: 87568 - DNA, 20 bp, synthetic construct
  source 1..20: mol_type = other DNA
ttaaacagaagactattaat

SEQ ID NO: 87569 - DNA, 20 bp, synthetic construct
  source 1..20: mol_type = other DNA
tttaaacagaagactattaa

SEQ ID NO: 87570 - DNA, 20 bp, synthetic construct
  source 1..20: mol_type = other DNA
atttaaacagaagactatta

SEQ ID NO: 87571 - DNA, 20 bp, synthetic construct
  source 1..20: mol_type = other DNA
aatttaaacagaagactatt

SEQ ID NO: 87572 - DNA, 20 bp, synthetic construct
  source 1..20: mol_type = other DNA
aaatttaaacagaagactat

SEQ ID NO: 87573 - DNA, 20 bp, synthetic construct
  source 1..20: mol_type = other DNA
aaaatttaaacagaagacta

SEQ ID NO: 87574 - DNA, 20 bp, synthetic construct
  source 1..20: mol_type = other DNA
aaaaatttaaacagaagact

SEQ ID NO: 87575 - DNA, 20 bp, synthetic construct
  source 1..20: mol_type = other DNA
aaaaaatttaaacagaagac

SEQ ID NO: 87576 - DNA, 20 bp, synthetic construct
  source 1..20: mol_type = other DNA
aaaaaaatttaaacagaaga

SEQ ID NO: 87577 - DNA, 20 bp, synthetic construct
  source 1..20: mol_type = other DNA
aaaaaaaatttaaacagaag

SEQ ID NO: 87578 - DNA, 20 bp, synthetic construct
  source 1..20: mol_type = other DNA
aaaaaaaaatttaaacagaa

SEQ ID NO: 87579 - DNA, 20 bp, synthetic construct
  source 1..20: mol_type = other DNA
aaaaaaaaaatttaaacaga

SEQ ID NO: 87580 - DNA, 20 bp, synthetic construct
  source 1..20: mol_type = other DNA
gaaaaaaaaaatttaaacag

SEQ ID NO: 87581 - DNA, 20 bp, synthetic construct
  source 1..20: mol_type = other DNA
agaaaaaaaaaatttaaaca

SEQ ID NO: 87582 - DNA, 20 bp, synthetic construct
  source 1..20: mol_type = other DNA
tagaaaaaaaaaatttaaac

SEQ ID NO: 87583 - DNA, 20 bp, synthetic construct
  source 1..20: mol_type = other DNA
ttagaaaaaaaaaatttaaa

SEQ ID NO: 87584 - DNA, 20 bp, synthetic construct
  source 1..20: mol_type = other DNA
attagaaaaaaaaaatttaa

SEQ ID NO: 87585 - DNA, 20 bp, synthetic construct
  source 1..20: mol_type = other DNA
aattagaaaaaaaaaattta

SEQ ID NO: 87586 - DNA, 20 bp, synthetic construct
  source 1..20: mol_type = other DNA
aaattagaaaaaaaaaattt

SEQ ID NO: 87587 - DNA, 20 bp, synthetic construct
  source 1..20: mol_type = other DNA
aaaattagaaaaaaaaaatt

SEQ ID NO: 87588 - DNA, 20 bp, synthetic construct
  source 1..20: mol_type = other DNA
taaaattagaaaaaaaaaat

SEQ ID NO: 87589 - DNA, 20 bp, synthetic construct
  source 1..20: mol_type = other DNA
ctaaaattagaaaaaaaaaa

SEQ ID NO: 87590 - DNA, 20 bp, synthetic construct
  source 1..20: mol_type = other DNA
tctaaaattagaaaaaaaaa

SEQ ID NO: 87591 - DNA, 20 bp, synthetic construct
  source 1..20: mol_type = other DNA
ttctaaaattagaaaaaaaa

SEQ ID NO: 87592 - DNA, 20 bp, synthetic construct
  source 1..20: mol_type = other DNA
cttctaaaattagaaaaaaa

SEQ ID NO: 87593 - DNA, 20 bp, synthetic construct
  source 1..20: mol_type = other DNA
acttctaaaattagaaaaaa

SEQ ID NO: 87594 - DNA, 20 bp, synthetic construct
  source 1..20: mol_type = other DNA
tacttctaaaattagaaaaa

SEQ ID NO: 87595 - DNA, 20 bp, synthetic construct
  source 1..20: mol_type = other DNA
ttacttctaaaattagaaaa

SEQ ID NO: 87596 - DNA, 20 bp, synthetic construct
  source 1..20: mol_type = other DNA
attacttctaaaattagaaa

SEQ ID NO: 87597 - DNA, 20 bp, synthetic construct
  source 1..20: mol_type = other DNA
cattacttctaaaattagaa

SEQ ID NO: 87598 - DNA, 20 bp, synthetic construct
  source 1..20: mol_type = other DNA
acattacttctaaaattaga

SEQ ID NO: 87599 - DNA, 20 bp, synthetic construct
  source 1..20: mol_type = other DNA
tacattacttctaaaattag

SEQ ID NO: 87600 - DNA, 20 bp, synthetic construct
  source 1..20: mol_type = other DNA
ctacattacttctaaaatta

SEQ ID NO: 87601 - DNA, 20 bp, synthetic construct
  source 1..20: mol_type = other DNA
tctacattacttctaaaatt

SEQ ID NO: 87602 - DNA, 20 bp, synthetic construct
  source 1..20: mol_type = other DNA
ttctacattacttctaaaat

SEQ ID NO: 87603 - DNA, 20 bp, synthetic construct
  source 1..20: mol_type = other DNA
tttctacattacttctaaaa

SEQ ID NO: 87604 - DNA, 20 bp, synthetic construct
  source 1..20: mol_type = other DNA
ttttctacattacttctaaa

SEQ ID NO: 87605 - DNA, 20 bp, synthetic construct
  source 1..20: mol_type = other DNA
attttctacattacttctaa

SEQ ID NO: 87606 - DNA, 20 bp, synthetic construct
  source 1..20: mol_type = other DNA
aattttctacattacttcta

SEQ ID NO: 87607 - DNA, 20 bp, synthetic construct
  source 1..20: mol_type = other DNA
gaattttctacattacttct

SEQ ID NO: 87608 - DNA, 20 bp, synthetic construct
  source 1..20: mol_type = other DNA
cgaattttctacattacttc

SEQ ID NO: 87609 - DNA, 20 bp, synthetic construct
  source 1..20: mol_type = other DNA
ccgaattttctacattactt

SEQ ID NO: 87610 - DNA, 20 bp, synthetic construct
  source 1..20: mol_type = other DNA
cccgaattttctacattact

SEQ ID NO: 87611 - DNA, 20 bp, synthetic construct
  source 1..20: mol_type = other DNA
acccgaattttctacattac

SEQ ID NO: 87612 - DNA, 20 bp, synthetic construct
  source 1..20: mol_type = other DNA
gacccgaattttctacatta

SEQ ID NO: 87613 - DNA, 20 bp, synthetic construct
  source 1..20: mol_type = other DNA
tgacccgaattttctacatt

SEQ ID NO: 87614 - DNA, 20 bp, synthetic construct
  source 1..20: mol_type = other DNA
ctgacccgaattttctacat

SEQ ID NO: 87615 - DNA, 20 bp, synthetic construct
  source 1..20: mol_type = other DNA
cctgacccgaattttctaca

SEQ ID NO: 87616 - DNA, 20 bp, synthetic construct
  source 1..20: mol_type = other DNA
ccctgacccgaattttctac

SEQ ID NO: 87617 - DNA, 20 bp, synthetic construct
  source 1..20: mol_type = other DNA
tccctgacccgaattttcta

SEQ ID NO: 87618 - DNA, 20 bp, synthetic construct
  source 1..20: mol_type = other DNA
ttccctgacccgaattttct

SEQ ID NO: 87619 - DNA, 20 bp, synthetic construct
  source 1..20: mol_type = other DNA
tttccctgacccgaattttc

SEQ ID NO: 87620 - DNA, 20 bp, synthetic construct
  source 1..20: mol_type = other DNA
ctttccctgacccgaatttt

SEQ ID NO: 87621 - DNA, 20 bp, synthetic construct
  source 1..20: mol_type = other DNA
cctttccctgacccgaattt

SEQ ID NO: 87622 - DNA, 20 bp, synthetic construct
  source 1..20: mol_type = other DNA
acctttccctgacccgaatt

SEQ ID NO: 87623 - DNA, 20 bp, synthetic construct
  source 1..20: mol_type = other DNA
tacctttccctgacccgaat

SEQ ID NO: 87624 - DNA, 20 bp, synthetic construct
  source 1..20: mol_type = other DNA
ttacctttccctgacccgaa

SEQ ID NO: 87625 - DNA, 20 bp, synthetic construct
  source 1..20: mol_type = other DNA
tttacctttccctgacccga

SEQ ID NO: 87626 - DNA, 20 bp, synthetic construct
  source 1..20: mol_type = other DNA
ttttacctttccctgacccg

SEQ ID NO: 87627 - DNA, 20 bp, synthetic construct
  source 1..20: mol_type = other DNA
attttacctttccctgaccc

SEQ ID NO: 87628 - DNA, 20 bp, synthetic construct
  source 1..20: mol_type = other DNA
tattttacctttccctgacc

SEQ ID NO: 87629 - DNA, 20 bp, synthetic construct
  source 1..20: mol_type = other DNA
atattttacctttccctgac

SEQ ID NO: 87630 - DNA, 20 bp, synthetic construct
  source 1..20: mol_type = other DNA
tatattttacctttccctga

SEQ ID NO: 87631 - DNA, 20 bp, synthetic construct
  source 1..20: mol_type = other DNA
atatattttacctttccctg

SEQ ID NO: 87632 - DNA, 20 bp, synthetic construct
  source 1..20: mol_type = other DNA
catatattttacctttccct

SEQ ID NO: 87633 - DNA, 20 bp, synthetic construct
  source 1..20: mol_type = other DNA
ccatatattttacctttccc

SEQ ID NO: 87634 - DNA, 20 bp, synthetic construct
  source 1..20: mol_type = other DNA
tccatatattttacctttcc

SEQ ID NO: 87635 - DNA, 20 bp, synthetic construct
  source 1..20: mol_type = other DNA
ttccatatattttacctttc

SEQ ID NO: 87636 - DNA, 20 bp, synthetic construct
  source 1..20: mol_type = other DNA
tttccatatattttaccttt

SEQ ID NO: 87637 - DNA, 20 bp, synthetic construct
  source 1..20: mol_type = other DNA
ctttccatatattttacctt

SEQ ID NO: 87638 - DNA, 20 bp, synthetic construct
  source 1..20: mol_type = other DNA
actttccatatattttacct

SEQ ID NO: 87639 - DNA, 20 bp, synthetic construct
  source 1..20: mol_type = other DNA
aactttccatatattttacc

SEQ ID NO: 87640 - DNA, 20 bp, synthetic construct
  source 1..20: mol_type = other DNA
taactttccatatattttac

SEQ ID NO: 87641 - DNA, 20 bp, synthetic construct
  source 1..20: mol_type = other DNA
ttaactttccatatatttta

SEQ ID NO: 87642 - DNA, 20 bp, synthetic construct
  source 1..20: mol_type = other DNA
tttaactttccatatatttt

SEQ ID NO: 87643 - DNA, 20 bp, synthetic construct
  source 1..20: mol_type = other DNA
ttttaactttccatatattt

SEQ ID NO: 87644 - DNA, 20 bp, synthetic construct
  source 1..20: mol_type = other DNA
tttttaactttccatatatt

SEQ ID NO: 87645 - DNA, 20 bp, synthetic construct
  source 1..20: mol_type = other DNA
atttttaactttccatatat

SEQ ID NO: 87646 - DNA, 20 bp, synthetic construct
  source 1..20: mol_type = other DNA
tatttttaactttccatata

SEQ ID NO: 87647 - DNA, 20 bp, synthetic construct
  source 1..20: mol_type = other DNA
atatttttaactttccatat

SEQ ID NO: 87648 - DNA, 20 bp, synthetic construct
  source 1..20: mol_type = other DNA
aatatttttaactttccata

SEQ ID NO: 87649 - DNA, 20 bp, synthetic construct
  source 1..20: mol_type = other DNA
aaatatttttaactttccat

SEQ ID NO: 87650 - DNA, 20 bp, synthetic construct
  source 1..20: mol_type = other DNA
aaaatatttttaactttcca

SEQ ID NO: 87651 - DNA, 20 bp, synthetic construct
  source 1..20: mol_type = other DNA
taaaatatttttaactttcc

SEQ ID NO: 87652 - DNA, 20 bp, synthetic construct
  source 1..20: mol_type = other DNA
ataaaatatttttaactttc

SEQ ID NO: 87653 - DNA, 20 bp, synthetic construct
  source 1..20: mol_type = other DNA
gataaaatatttttaacttt

SEQ ID NO: 87654 - DNA, 20 bp, synthetic construct
  source 1..20: mol_type = other DNA
tgataaaatatttttaactt

SEQ ID NO: 87655 - DNA, 20 bp, synthetic construct
  source 1..20: mol_type = other DNA
atgataaaatatttttaact

SEQ ID NO: 87656 - DNA, 20 bp, synthetic construct
  source 1..20: mol_type = other DNA
catgataaaatatttttaac

SEQ ID NO: 87657 - DNA, 20 bp, synthetic construct
  source 1..20: mol_type = other DNA
acatgataaaatatttttaa

SEQ ID NO: 87658 - DNA, 20 bp, synthetic construct
  source 1..20: mol_type = other DNA
tacatgataaaatattttta

SEQ ID NO: 87659 - DNA, 20 bp, synthetic construct
  source 1..20: mol_type = other DNA
ctacatgataaaatattttt

SEQ ID NO: 87660 - DNA, 20 bp, synthetic construct
  source 1..20: mol_type = other DNA
actacatgataaaatatttt

SEQ ID NO: 87661 - DNA, 20 bp, synthetic construct
  source 1..20: mol_type = other DNA
gactacatgataaaatattt

SEQ ID NO: 87662 - DNA, 20 bp, synthetic construct
  source 1..20: mol_type = other DNA
tgactacatgataaaatatt

SEQ ID NO: 87663 - DNA, 20 bp, synthetic construct
  source 1..20: mol_type = other DNA
atgactacatgataaaatat

SEQ ID NO: 87664 - DNA, 20 bp, synthetic construct
  source 1..20: mol_type = other DNA
tatgactacatgataaaata

SEQ ID NO: 87665 - DNA, 20 bp, synthetic construct
  source 1..20: mol_type = other DNA
ttatgactacatgataaaat

SEQ ID NO: 87666 - DNA, 20 bp, synthetic construct
  source 1..20: mol_type = other DNA
attatgactacatgataaaa

SEQ ID NO: 87667 - DNA, 20 bp, synthetic construct
  source 1..20: mol_type = other DNA
aattatgactacatgataaa

SEQ ID NO: 87668 - DNA, 20 bp, synthetic construct
  source 1..20: mol_type = other DNA
aaattatgactacatgataa

SEQ ID NO: 87669 - DNA, 20 bp, synthetic construct
  source 1..20: mol_type = other DNA
gaaattatgactacatgata

SEQ ID NO: 87670 - DNA, 20 bp, synthetic construct
  source 1..20: mol_type = other DNA
agaaattatgactacatgat

SEQ ID NO: 87671 - DNA, 20 bp, synthetic construct
  source 1..20: mol_type = other DNA
tagaaattatgactacatga

SEQ ID NO: 87672 - DNA, 20 bp, synthetic construct
  source 1..20: mol_type = other DNA
ctagaaattatgactacatg

SEQ ID NO: 87673 - DNA, 20 bp, synthetic construct
  source 1..20: mol_type = other DNA
actagaaattatgactacat

SEQ ID NO: 87674 - DNA, 20 bp, synthetic construct
  source 1..20: mol_type = other DNA
tactagaaattatgactaca

SEQ ID NO: 87675 - DNA, 20 bp, synthetic construct
  source 1..20: mol_type = other DNA
ttactagaaattatgactac

SEQ ID NO: 87676 - DNA, 20 bp, synthetic construct
  source 1..20: mol_type = other DNA
gttactagaaattatgacta

SEQ ID NO: 87677 - DNA, 20 bp, synthetic construct
  source 1..20: mol_type = other DNA
tgttactagaaattatgact

SEQ ID NO: 87678 - DNA, 20 bp, synthetic construct
  source 1..20: mol_type = other DNA
atgttactagaaattatgac

SEQ ID NO: 87679 - DNA, 20 bp, synthetic construct
  source 1..20: mol_type = other DNA
tatgttactagaaattatga

SEQ ID NO: 87680 - DNA, 20 bp, synthetic construct
  source 1..20: mol_type = other DNA
atatgttactagaaattatg

SEQ ID NO: 87681 - DNA, 20 bp, synthetic construct
  source 1..20: mol_type = other DNA
aatatgttactagaaattat

SEQ ID NO: 87682 - DNA, 20 bp, synthetic construct
  source 1..20: mol_type = other DNA
aaatatgttactagaaatta

SEQ ID NO: 87683 - DNA, 20 bp, synthetic construct
  source 1..20: mol_type = other DNA
gaaatatgttactagaaatt

SEQ ID NO: 87684 - DNA, 20 bp, synthetic construct
  source 1..20: mol_type = other DNA
agaaatatgttactagaaat

SEQ ID NO: 87685 - DNA, 20 bp, synthetic construct
  source 1..20: mol_type = other DNA
aagaaatatgttactagaaa

SEQ ID NO: 87686 - DNA, 20 bp, synthetic construct
  source 1..20: mol_type = other DNA
aaagaaatatgttactagaa

SEQ ID NO: 87687 - DNA, 20 bp, synthetic construct
  source 1..20: mol_type = other DNA
taaagaaatatgttactaga

SEQ ID NO: 87688 - DNA, 20 bp, synthetic construct
  source 1..20: mol_type = other DNA
gtaaagaaatatgttactag

SEQ ID NO: 87689 - DNA, 20 bp, synthetic construct
  source 1..20: mol_type = other DNA
tgtaaagaaatatgttacta

SEQ ID NO: 87690 - DNA, 20 bp, synthetic construct
  source 1..20: mol_type = other DNA
ttgtaaagaaatatgttact

SEQ ID NO: 87691 - DNA, 20 bp, synthetic construct
  source 1..20: mol_type = other DNA
tttgtaaagaaatatgttac

SEQ ID NO: 87692 - DNA, 20 bp, synthetic construct
  source 1..20: mol_type = other DNA
atttgtaaagaaatatgtta

SEQ ID NO: 87693 - DNA, 20 bp, synthetic construct
  source 1..20: mol_type = other DNA
tatttgtaaagaaatatgtt

SEQ ID NO: 87694 - DNA, 20 bp, synthetic construct
  source 1..20: mol_type = other DNA
ttatttgtaaagaaatatgt

SEQ ID NO: 87695 - DNA, 20 bp, synthetic construct
  source 1..20: mol_type = other DNA
cttatttgtaaagaaatatg

SEQ ID NO: 87696 - DNA, 20 bp, synthetic construct
  source 1..20: mol_type = other DNA
tcttatttgtaaagaaatat

SEQ ID NO: 87697 - DNA, 20 bp, synthetic construct
  source 1..20: mol_type = other DNA
gtcttatttgtaaagaaata

SEQ ID NO: 87698 - DNA, 20 bp, synthetic construct
  source 1..20: mol_type = other DNA
tgtcttatttgtaaagaaat

SEQ ID NO: 87699 - DNA, 20 bp, synthetic construct
  source 1..20: mol_type = other DNA
atgtcttatttgtaaagaaa

SEQ ID NO: 87700 - DNA, 20 bp, synthetic construct
  source 1..20: mol_type = other DNA
tatgtcttatttgtaaagaa

SEQ ID NO: 87701 - DNA, 20 bp, synthetic construct
  source 1..20: mol_type = other DNA
ctatgtcttatttgtaaaga

SEQ ID NO: 87702 - DNA, 20 bp, synthetic construct
  source 1..20: mol_type = other DNA
actatgtcttatttgtaaag

SEQ ID NO: 87703 - DNA, 20 bp, synthetic construct
  source 1..20: mol_type = other DNA
aactatgtcttatttgtaaa

SEQ ID NO: 87704 - DNA, 20 bp, synthetic construct
  source 1..20: mol_type = other DNA
caactatgtcttatttgtaa

SEQ ID NO: 87705 - DNA, 20 bp, synthetic construct
  source 1..20: mol_type = other DNA
tcaactatgtcttatttgta

SEQ ID NO: 87706 - DNA, 20 bp, synthetic construct
  source 1..20: mol_type = other DNA
ttcaactatgtcttatttgt

SEQ ID NO: 87707 - DNA, 20 bp, synthetic construct
  source 1..20: mol_type = other DNA
tttcaactatgtcttatttg

SEQ ID NO: 87708 - DNA, 20 bp, synthetic construct
  source 1..20: mol_type = other DNA
gtttcaactatgtcttattt

SEQ ID NO: 87709 - DNA, 20 bp, synthetic construct
  source 1..20: mol_type = other DNA
tgtttcaactatgtcttatt

SEQ ID NO: 87710 - DNA, 20 bp, synthetic construct
  source 1..20: mol_type = other DNA
ctgtttcaactatgtcttat

SEQ ID NO: 87711 - DNA, 20 bp, synthetic construct
  source 1..20: mol_type = other DNA
tctgtttcaactatgtctta

SEQ ID NO: 87712 - DNA, 20 bp, synthetic construct
  source 1..20: mol_type = other DNA
atctgtttcaactatgtctt

SEQ ID NO: 87713 - DNA, 20 bp, synthetic construct
  source 1..20: mol_type = other DNA
aatctgtttcaactatgtct

SEQ ID NO: 87714 - DNA, 20 bp, synthetic construct
  source 1..20: mol_type = other DNA
caatctgtttcaactatgtc

SEQ ID NO: 87715 - DNA, 20 bp, synthetic construct
  source 1..20: mol_type = other DNA
gcaatctgtttcaactatgt

SEQ ID NO: 87716 - DNA, 20 bp, synthetic construct
  source 1..20: mol_type = other DNA
agcaatctgtttcaactatg

SEQ ID NO: 87717 - DNA, 20 bp, synthetic construct
  source 1..20: mol_type = other DNA
tagcaatctgtttcaactat

SEQ ID NO: 87718 - DNA, 20 bp, synthetic construct
  source 1..20: mol_type = other DNA
gtagcaatctgtttcaacta

SEQ ID NO: 87719 - DNA, 20 bp, synthetic construct
  source 1..20: mol_type = other DNA
tgtagcaatctgtttcaact

SEQ ID NO: 87720 - DNA, 20 bp, synthetic construct
  source 1..20: mol_type = other DNA
ctgtagcaatctgtttcaac

SEQ ID NO: 87721 - DNA, 20 bp, synthetic construct
  source 1..20: mol_type = other DNA
actgtagcaatctgtttcaa

SEQ ID NO: 87722 - DNA, 20 bp, synthetic construct
  source 1..20: mol_type = other DNA
aactgtagcaatctgtttca

SEQ ID NO: 87723 - DNA, 20 bp, synthetic construct
  source 1..20: mol_type = other DNA
gaactgtagcaatctgtttc

SEQ ID NO: 87724 - DNA, 20 bp, synthetic construct
  source 1..20: mol_type = other DNA
agaactgtagcaatctgttt

SEQ ID NO: 87725 - DNA, 20 bp, synthetic construct
  source 1..20: mol_type = other DNA
aagaactgtagcaatctgtt

SEQ ID NO: 87726 - DNA, 20 bp, synthetic construct
  source 1..20: mol_type = other DNA
aaagaactgtagcaatctgt

SEQ ID NO: 87727 - DNA, 20 bp, synthetic construct
  source 1..20: mol_type = other DNA
aaaagaactgtagcaatctg

SEQ ID NO: 87728 - DNA, 20 bp, synthetic construct
  source 1..20: mol_type = other DNA
taaaagaactgtagcaatct

SEQ ID NO: 87729 - DNA, 20 bp, synthetic construct
  source 1..20: mol_type = other DNA
ttaaaagaactgtagcaatc

SEQ ID NO: 87730 - DNA, 20 bp, synthetic construct
  source 1..20: mol_type = other DNA
cttaaaagaactgtagcaat

SEQ ID NO: 87731 - DNA, 20 bp, synthetic construct
  source 1..20: mol_type = other DNA
tcttaaaagaactgtagcaa

SEQ ID NO: 87732 - DNA, 20 bp, synthetic construct
  source 1..20: mol_type = other DNA
ctcttaaaagaactgtagca

SEQ ID NO: 87733 - DNA, 20 bp, synthetic construct
  source 1..20: mol_type = other DNA
actcttaaaagaactgtagc

SEQ ID NO: 87734 - DNA, 20 bp, synthetic construct
  source 1..20: mol_type = other DNA
aactcttaaaagaactgtag

SEQ ID NO: 87735 - DNA, 20 bp, synthetic construct
  source 1..20: mol_type = other DNA
caactcttaaaagaactgta

SEQ ID NO: 87736 - DNA, 20 bp, synthetic construct
  source 1..20: mol_type = other DNA
tcaactcttaaaagaactgt

SEQ ID NO: 87737 - DNA, 20 bp, synthetic construct
  source 1..20: mol_type = other DNA
gtcaactcttaaaagaactg

SEQ ID NO: 87738 - DNA, 20 bp, synthetic construct
  source 1..20: mol_type = other DNA
tgtcaactcttaaaagaact

SEQ ID NO: 87739 - DNA, 20 bp, synthetic construct
  source 1..20: mol_type = other DNA
atgtcaactcttaaaagaac

SEQ ID NO: 87740 - DNA, 20 bp, synthetic construct
  source 1..20: mol_type = other DNA
gatgtcaactcttaaaagaa

SEQ ID NO: 87741 - DNA, 20 bp, synthetic construct
  source 1..20: mol_type = other DNA
agatgtcaactcttaaaaga

SEQ ID NO: 87742 - DNA, 20 bp, synthetic construct
  source 1..20: mol_type = other DNA
aagatgtcaactcttaaaag

SEQ ID NO: 87743 - DNA, 20 bp, synthetic construct
  source 1..20: mol_type = other DNA
taagatgtcaactcttaaaa

SEQ ID NO: 87744 - DNA, 20 bp, synthetic construct
  source 1..20: mol_type = other DNA
ataagatgtcaactcttaaa

SEQ ID NO: 87745 - DNA, 20 bp, synthetic construct
  source 1..20: mol_type = other DNA
aataagatgtcaactcttaa

SEQ ID NO: 87746 - DNA, 20 bp, synthetic construct
  source 1..20: mol_type = other DNA
caataagatgtcaactctta

SEQ ID NO: 87747 - DNA, 20 bp, synthetic construct
  source 1..20: mol_type = other DNA
acaataagatgtcaactctt

SEQ ID NO: 87748 - DNA, 20 bp, synthetic construct
  source 1..20: mol_type = other DNA
aacaataagatgtcaactct

SEQ ID NO: 87749 - DNA, 20 bp, synthetic construct
  source 1..20: mol_type = other DNA
caacaataagatgtcaactc

SEQ ID NO: 87750 - DNA, 20 bp, synthetic construct
  source 1..20: mol_type = other DNA
tcaacaataagatgtcaact

SEQ ID NO: 87751 - DNA, 20 bp, synthetic construct
  source 1..20: mol_type = other DNA
atcaacaataagatgtcaac

SEQ ID NO: 87752 - DNA, 20 bp, synthetic construct
  source 1..20: mol_type = other DNA
aatcaacaataagatgtcaa

SEQ ID NO: 87753 - DNA, 20 bp, synthetic construct
  source 1..20: mol_type = other DNA
aaatcaacaataagatgtca

SEQ ID NO: 87754 - DNA, 20 bp, synthetic construct
  source 1..20: mol_type = other DNA
gaaatcaacaataagatgtc

SEQ ID NO: 87755 - DNA, 20 bp, synthetic construct
  source 1..20: mol_type = other DNA
agaaatcaacaataagatgt

SEQ ID NO: 87756 - DNA, 20 bp, synthetic construct
  source 1..20: mol_type = other DNA
aagaaatcaacaataagatg

SEQ ID NO: 87757 - DNA, 20 bp, synthetic construct
  source 1..20: mol_type = other DNA
taagaaatcaacaataagat

SEQ ID NO: 87758 - DNA, 20 bp, synthetic construct
  source 1..20: mol_type = other DNA
gtaagaaatcaacaataaga

SEQ ID NO: 87759 - DNA, 20 bp, synthetic construct
  source 1..20: mol_type = other DNA
ggtaagaaatcaacaataag

SEQ ID NO: 87760 - DNA, 20 bp, synthetic construct
  source 1..20: mol_type = other DNA
tggtaagaaatcaacaataa

SEQ ID NO: 87761 - DNA, 20 bp, synthetic construct
  source 1..20: mol_type = other DNA
gtggtaagaaatcaacaata

SEQ ID NO: 87762 - DNA, 20 bp, synthetic construct
  source 1..20: mol_type = other DNA
ggtggtaagaaatcaacaat

SEQ ID NO: 87763 - DNA, 20 bp, synthetic construct
  source 1..20: mol_type = other DNA
tggtggtaagaaatcaacaa

SEQ ID NO: 87764 - DNA, 20 bp, synthetic construct
  source 1..20: mol_type = other DNA
ttggtggtaagaaatcaaca

SEQ ID NO: 87765 - DNA, 20 bp, synthetic construct
  source 1..20: mol_type = other DNA
gttggtggtaagaaatcaac

SEQ ID NO: 87766 - DNA, 20 bp, synthetic construct
  source 1..20: mol_type = other DNA
agttggtggtaagaaatcaa

SEQ ID NO: 87767 - DNA, 20 bp, synthetic construct
  source 1..20: mol_type = other DNA
aagttggtggtaagaaatca

SEQ ID NO: 87768 - DNA, 20 bp, synthetic construct
  source 1..20: mol_type = other DNA
gaagttggtggtaagaaatc

SEQ ID NO: 87769 - DNA, 20 bp, synthetic construct
  source 1..20: mol_type = other DNA
tgaagttggtggtaagaaat

SEQ ID NO: 87770 - DNA, 20 bp, synthetic construct
  source 1..20: mol_type = other DNA
atgaagttggtggtaagaaa

SEQ ID NO: 87771 - DNA, 20 bp, synthetic construct
  source 1..20: mol_type = other DNA
gatgaagttggtggtaagaa

SEQ ID NO: 87772 - DNA, 20 bp, synthetic construct
  source 1..20: mol_type = other DNA
ggatgaagttggtggtaaga

SEQ ID NO: 87773 - DNA, 20 bp, synthetic construct
  source 1..20: mol_type = other DNA
gggatgaagttggtggtaag

SEQ ID NO: 87774 - DNA, 20 bp, synthetic construct
  source 1..20: mol_type = other DNA
agggatgaagttggtggtaa

SEQ ID NO: 87775 - DNA, 20 bp, synthetic construct
  source 1..20: mol_type = other DNA
gagggatgaagttggtggta

SEQ ID NO: 87776 - DNA, 20 bp, synthetic construct
  source 1..20: mol_type = other DNA
ggagggatgaagttggtggt

SEQ ID NO: 87777 - DNA, 20 bp, synthetic construct
  source 1..20: mol_type = other DNA
gggagggatgaagttggtgg

SEQ ID NO: 87778 - DNA, 20 bp, synthetic construct
  source 1..20: mol_type = other DNA
agggagggatgaagttggtg

SEQ ID NO: 87779 - DNA, 20 bp, synthetic construct
  source 1..20: mol_type = other DNA
aagggagggatgaagttggt

SEQ ID NO: 87780 - DNA, 20 bp, synthetic construct
  source 1..20: mol_type = other DNA
aaagggagggatgaagttgg

SEQ ID NO: 87781 - DNA, 20 bp, synthetic construct
  source 1..20: mol_type = other DNA
gaaagggagggatgaagttg

SEQ ID NO: 87782 - DNA, 20 bp, synthetic construct
  source 1..20: mol_type = other DNA
agaaagggagggatgaagtt

SEQ ID NO: 87783 - DNA, 20 bp, synthetic construct
  source 1..20: mol_type = other DNA
aagaaagggagggatgaagt

SEQ ID NO: 87784 - DNA, 20 bp, synthetic construct
  source 1..20: mol_type = other DNA
aaagaaagggagggatgaag

SEQ ID NO: 87785 - DNA, 20 bp, synthetic construct
  source 1..20: mol_type = other DNA
taaagaaagggagggatgaa

SEQ ID NO: 87786 - DNA, 20 bp, synthetic construct
  source 1..20: mol_type = other DNA
ttaaagaaagggagggatga

SEQ ID NO: 87787 - DNA, 20 bp, synthetic construct
  source 1..20: mol_type = other DNA
tttaaagaaagggagggatg

SEQ ID NO: 87788 - DNA, 20 bp, synthetic construct
  source 1..20: mol_type = other DNA
ttttaaagaaagggagggat

SEQ ID NO: 87789 - DNA, 20 bp, synthetic construct
  source 1..20: mol_type = other DNA
tttttaaagaaagggaggga

SEQ ID NO: 87790 - DNA, 20 bp, synthetic construct
  source 1..20: mol_type = other DNA
atttttaaagaaagggaggg

SEQ ID NO: 87791 - DNA, 20 bp, synthetic construct
  source 1..20: mol_type = other DNA
tatttttaaagaaagggagg

SEQ ID NO: 87792 - DNA, 20 bp, synthetic construct
  source 1..20: mol_type = other DNA
ttatttttaaagaaagggag

SEQ ID NO: 87793 - DNA, 20 bp, synthetic construct
  source 1..20: mol_type = other DNA
tttatttttaaagaaaggga

SEQ ID NO: 87794 - DNA, 20 bp, synthetic construct
  source 1..20: mol_type = other DNA
ctttatttttaaagaaaggg

SEQ ID NO: 87795 - DNA, 20 bp, synthetic construct
  source 1..20: mol_type = other DNA
cctttatttttaaagaaagg

SEQ ID NO: 87796 - DNA, 20 bp, synthetic construct
  source 1..20: mol_type = other DNA
ccctttatttttaaagaaag

SEQ ID NO: 87797 - DNA, 20 bp, synthetic construct
  source 1..20: mol_type = other DNA
tccctttatttttaaagaaa

SEQ ID NO: 87798 - DNA, 20 bp, synthetic construct
  source 1..20: mol_type = other DNA
ttccctttatttttaaagaa

SEQ ID NO: 87799 - DNA, 20 bp, synthetic construct
  source 1..20: mol_type = other DNA
tttccctttatttttaaaga

SEQ ID NO: 87800 - DNA, 20 bp, synthetic construct
  source 1..20: mol_type = other DNA
atttccctttatttttaaag

SEQ ID NO: 87801 - DNA, 20 bp, synthetic construct
  source 1..20: mol_type = other DNA
tatttccctttatttttaaa

SEQ ID NO: 87802 - DNA, 20 bp, synthetic construct
  source 1..20: mol_type = other DNA
ttatttccctttatttttaa

SEQ ID NO: 87803 - DNA, 20 bp, synthetic construct
  source 1..20: mol_type = other DNA
attatttccctttattttta

SEQ ID NO: 87804 - DNA, 20 bp, synthetic construct
  source 1..20: mol_type = other DNA
tattatttccctttattttt

SEQ ID NO: 87805 - DNA, 20 bp, synthetic construct
  source 1..20: mol_type = other DNA
ttattatttccctttatttt

SEQ ID NO: 87806 - DNA, 20 bp, synthetic construct
  source 1..20: mol_type = other DNA
tttattatttccctttattt

SEQ ID NO: 87807 - DNA, 20 bp, synthetic construct
  source 1..20: mol_type = other DNA
ttttattatttccctttatt

SEQ ID NO: 87808 - DNA, 20 bp, synthetic construct
  source 1..20: mol_type = other DNA
attttattatttccctttat

SEQ ID NO: 87809 - DNA, 20 bp, synthetic construct
  source 1..20: mol_type = other DNA
aattttattatttcccttta

SEQ ID NO: 87810 - DNA, 20 bp, synthetic construct
  source 1..20: mol_type = other DNA
aaattttattatttcccttt

SEQ ID NO: 87811 - DNA, 20 bp, synthetic construct
  source 1..20: mol_type = other DNA
taaattttattatttccctt

SEQ ID NO: 87812 - DNA, 20 bp, synthetic construct
  source 1..20: mol_type = other DNA
ataaattttattatttccct

SEQ ID NO: 87813 - DNA, 20 bp, synthetic construct
  source 1..20: mol_type = other DNA
aataaattttattatttccc

SEQ ID NO: 87814 - DNA, 20 bp, synthetic construct
  source 1..20: mol_type = other DNA
aaataaattttattatttcc

SEQ ID NO: 87815 - DNA, 20 bp, synthetic construct
  source 1..20: mol_type = other DNA
taaataaattttattatttc

SEQ ID NO: 87816 - DNA, 20 bp, synthetic construct
  source 1..20: mol_type = other DNA
ataaataaattttattattt

SEQ ID NO: 87817 - DNA, 20 bp, synthetic construct
  source 1..20: mol_type = other DNA
tataaataaattttattatt

SEQ ID NO: 87818 - DNA, 20 bp, synthetic construct
  source 1..20: mol_type = other DNA
ttataaataaattttattat

SEQ ID NO: 87819 - DNA, 20 bp, synthetic construct
  source 1..20: mol_type = other DNA
tttataaataaattttatta

SEQ ID NO: 87820 - DNA, 20 bp, synthetic construct
  source 1..20: mol_type = other DNA
ttttataaataaattttatt

SEQ ID NO: 87821 - DNA, 20 bp, synthetic construct
  source 1..20: mol_type = other DNA
gttttataaataaattttat

SEQ ID NO: 87822 - DNA, 20 bp, synthetic construct
  source 1..20: mol_type = other DNA
agttttataaataaatttta

SEQ ID NO: 87823 - DNA, 20 bp, synthetic construct
  source 1..20: mol_type = other DNA
aagttttataaataaatttt

SEQ ID NO: 87824 - DNA, 20 bp, synthetic construct
  source 1..20: mol_type = other DNA
aaagttttataaataaattt

SEQ ID NO: 87825 - DNA, 20 bp, synthetic construct
  source 1..20: mol_type = other DNA
caaagttttataaataaatt

SEQ ID NO: 87826 - DNA, 20 bp, synthetic construct
  source 1..20: mol_type = other DNA
acaaagttttataaataaat

SEQ ID NO: 87827 - DNA, 20 bp, synthetic construct
  source 1..20: mol_type = other DNA
cacaaagttttataaataaa

SEQ ID NO: 87828 - DNA, 20 bp, synthetic construct
  source 1..20: mol_type = other DNA
ccacaaagttttataaataa

SEQ ID NO: 87829 - DNA, 20 bp, synthetic construct
  source 1..20: mol_type = other DNA
gccacaaagttttataaata

SEQ ID NO: 87830 - DNA, 20 bp, synthetic construct
  source 1..20: mol_type = other DNA
tgccacaaagttttataaat

SEQ ID NO: 87831 - DNA, 20 bp, synthetic construct
  source 1..20: mol_type = other DNA
atgccacaaagttttataaa

SEQ ID NO: 87832 - DNA, 20 bp, synthetic construct
  source 1..20: mol_type = other DNA
aatgccacaaagttttataa

SEQ ID NO: 87833 - DNA, 20 bp, synthetic construct
  source 1..20: mol_type = other DNA
gaatgccacaaagttttata

SEQ ID NO: 87834 - DNA, 20 bp, synthetic construct
  source 1..20: mol_type = other DNA
ggaatgccacaaagttttat

SEQ ID NO: 87835 - DNA, 20 bp, synthetic construct
  source 1..20: mol_type = other DNA
tggaatgccacaaagtttta

SEQ ID NO: 87836 - DNA, 20 bp, synthetic construct
  source 1..20: mol_type = other DNA
gtggaatgccacaaagtttt

SEQ ID NO: 87837 - DNA, 20 bp, synthetic construct
  source 1..20: mol_type = other DNA
tgtggaatgccacaaagttt

SEQ ID NO: 87838 - DNA, 20 bp, synthetic construct
  source 1..20: mol_type = other DNA
ttgtggaatgccacaaagtt

SEQ ID NO: 87839 - DNA, 20 bp, synthetic construct
  source 1..20: mol_type = other DNA
tttgtggaatgccacaaagt

SEQ ID NO: 87840 - DNA, 20 bp, synthetic construct
  source 1..20: mol_type = other DNA
ttttgtggaatgccacaaag

SEQ ID NO: 87841 - DNA, 20 bp, synthetic construct
  source 1..20: mol_type = other DNA
attttgtggaatgccacaaa

SEQ ID NO: 87842 - DNA, 20 bp, synthetic construct
  source 1..20: mol_type = other DNA
tattttgtggaatgccacaa

SEQ ID NO: 87843 - DNA, 20 bp, synthetic construct
  source 1..20: mol_type = other DNA
ttattttgtggaatgccaca

SEQ ID NO: 87844 - DNA, 20 bp, synthetic construct
  source 1..20: mol_type = other DNA
attattttgtggaatgccac

SEQ ID NO: 87845 - DNA, 20 bp, synthetic construct
  source 1..20: mol_type = other DNA
aattattttgtggaatgcca

SEQ ID NO: 87846 - DNA, 20 bp, synthetic construct
  source 1..20: mol_type = other DNA
gaattattttgtggaatgcc

SEQ ID NO: 87847 - DNA, 20 bp, synthetic construct
  source 1..20: mol_type = other DNA
agaattattttgtggaatgc

SEQ ID NO: 87848 - DNA, 20 bp, synthetic construct
  source 1..20: mol_type = other DNA
cagaattattttgtggaatg

SEQ ID NO: 87849 - DNA, 20 bp, synthetic construct
  source 1..20: mol_type = other DNA
tcagaattattttgtggaat

SEQ ID NO: 87850 - DNA, 20 bp, synthetic construct
  source 1..20: mol_type = other DNA
ttcagaattattttgtggaa

SEQ ID NO: 87851 - DNA, 20 bp, synthetic construct
  source 1..20: mol_type = other DNA
tttcagaattattttgtgga

SEQ ID NO: 87852 - DNA, 20 bp, synthetic construct
  source 1..20: mol_type = other DNA
ctttcagaattattttgtgg

SEQ ID NO: 87853 - DNA, 20 bp, synthetic construct
  source 1..20: mol_type = other DNA
tctttcagaattattttgtg

SEQ ID NO: 87854 - DNA, 20 bp, synthetic construct
  source 1..20: mol_type = other DNA
ttctttcagaattattttgt

SEQ ID NO: 87855 - DNA, 20 bp, synthetic construct
  source 1..20: mol_type = other DNA
attctttcagaattattttg

SEQ ID NO: 87856 - DNA, 20 bp, synthetic construct
  source 1..20: mol_type = other DNA
aattctttcagaattatttt

SEQ ID NO: 87857 - DNA, 20 bp, synthetic construct
  source 1..20: mol_type = other DNA
taattctttcagaattattt

SEQ ID NO: 87858 - DNA, 20 bp, synthetic construct
  source 1..20: mol_type = other DNA
ctaattctttcagaattatt

SEQ ID NO: 87859 - DNA, 20 bp, synthetic construct
  source 1..20: mol_type = other DNA
actaattctttcagaattat

SEQ ID NO: 87860 - DNA, 20 bp, synthetic construct
  source 1..20: mol_type = other DNA
tactaattctttcagaatta

SEQ ID NO: 87861 - DNA, 20 bp, synthetic construct
  source 1..20: mol_type = other DNA
atactaattctttcagaatt

SEQ ID NO: 87862 - DNA, 20 bp, synthetic construct
  source 1..20: mol_type = other DNA
catactaattctttcagaat

SEQ ID NO: 87863 - DNA, 20 bp, synthetic construct
  source 1..20: mol_type = other DNA
ccatactaattctttcagaa

SEQ ID NO: 87864 - DNA, 20 bp, synthetic construct
  source 1..20: mol_type = other DNA
gccatactaattctttcaga

SEQ ID NO: 87865 - DNA, 20 bp, synthetic construct
  source 1..20: mol_type = other DNA
ggccatactaattctttcag

SEQ ID NO: 87866 - DNA, 20 bp, synthetic construct
  source 1..20: mol_type = other DNA
tggccatactaattctttca

SEQ ID NO: 87867 - DNA, 20 bp, synthetic construct
  source 1..20: mol_type = other DNA
ttggccatactaattctttc

SEQ ID NO: 87868 - DNA, 20 bp, synthetic construct
  source 1..20: mol_type = other DNA
tttggccatactaattcttt

SEQ ID NO: 87869 - DNA, 20 bp, synthetic construct
  source 1..20: mol_type = other DNA
ttttggccatactaattctt

SEQ ID NO: 87870 - DNA, 20 bp, synthetic construct
  source 1..20: mol_type = other DNA
tttttggccatactaattct

SEQ ID NO: 87871 - DNA, 20 bp, synthetic construct
  source 1..20: mol_type = other DNA
ttttttggccatactaattc

SEQ ID NO: 87872 - DNA, 20 bp, synthetic construct
  source 1..20: mol_type = other DNA
tttttttggccatactaatt

SEQ ID NO: 87873 - DNA, 20 bp, synthetic construct
  source 1..20: mol_type = other DNA
atttttttggccatactaat

SEQ ID NO: 87874 - DNA, 20 bp, synthetic construct
  source 1..20: mol_type = other DNA
tatttttttggccatactaa

SEQ ID NO: 87875 - DNA, 20 bp, synthetic construct
  source 1..20: mol_type = other DNA
atatttttttggccatacta

SEQ ID NO: 87876 - DNA, 20 bp, synthetic construct
  source 1..20: mol_type = other DNA
catatttttttggccatact

SEQ ID NO: 87877 - DNA, 20 bp, synthetic construct
  source 1..20: mol_type = other DNA
acatatttttttggccatac

SEQ ID NO: 87878 - DNA, 20 bp, synthetic construct
  source 1..20: mol_type = other DNA
tacatatttttttggccata

SEQ ID NO: 87879 - DNA, 20 bp, synthetic construct
  source 1..20: mol_type = other DNA
atacatatttttttggccat

SEQ ID NO: 87880 - DNA, 20 bp, synthetic construct
  source 1..20: mol_type = other DNA
catacatatttttttggcca

SEQ ID NO: 87881 - DNA, 20 bp, synthetic construct
  source 1..20: mol_type = other DNA
ccatacatatttttttggcc

SEQ ID NO: 87882 - DNA, 20 bp, synthetic construct
  source 1..20: mol_type = other DNA
accatacatatttttttggc

SEQ ID NO: 87883 - DNA, 20 bp, synthetic construct
  source 1..20: mol_type = other DNA
caccatacatatttttttgg

SEQ ID NO: 87884 - DNA, 20 bp, synthetic construct
  source 1..20: mol_type = other DNA
acaccatacatatttttttg

SEQ ID NO: 87885 - DNA, 20 bp, synthetic construct
  source 1..20: mol_type = other DNA
aacaccatacatattttttt

SEQ ID NO: 87886 - DNA, 20 bp, synthetic construct
  source 1..20: mol_type = other DNA
aaacaccatacatatttttt

SEQ ID NO: 87887 - DNA, 20 bp, synthetic construct
  source 1..20: mol_type = other DNA
aaaacaccatacatattttt

SEQ ID NO: 87888 - DNA, 20 bp, synthetic construct
  source 1..20: mol_type = other DNA
aaaaacaccatacatatttt

SEQ ID NO: 87889 - DNA, 20 bp, synthetic construct
  source 1..20: mol_type = other DNA
aaaaaacaccatacatattt

SEQ ID NO: 87890 - DNA, 20 bp, synthetic construct
  source 1..20: mol_type = other DNA
aaaaaaacaccatacatatt

SEQ ID NO: 87891 - DNA, 20 bp, synthetic construct
  source 1..20: mol_type = other DNA
aaaaaaaacaccatacatat

SEQ ID NO: 87892 - DNA, 20 bp, synthetic construct
  source 1..20: mol_type = other DNA
aaaaaaaaacaccatacata

SEQ ID NO: 87893 - DNA, 20 bp, synthetic construct
  source 1..20: mol_type = other DNA
aaaaaaaaaacaccatacat

SEQ ID NO: 87894 - DNA, 20 bp, synthetic construct
  source 1..20: mol_type = other DNA
aaaaaaaaaaacaccataca

SEQ ID NO: 87895 - DNA, 20 bp, synthetic construct
  source 1..20: mol_type = other DNA
aaaaaaaaaaaacaccatac

SEQ ID NO: 87896 - DNA, 20 bp, synthetic construct
  source 1..20: mol_type = other DNA
gaaaaaaaaaaaacaccata

SEQ ID NO: 87897 - DNA, 20 bp, synthetic construct
  source 1..20: mol_type = other DNA
agaaaaaaaaaaaacaccat

SEQ ID NO: 87898 - DNA, 20 bp, synthetic construct
  source 1..20: mol_type = other DNA
tagaaaaaaaaaaaacacca

SEQ ID NO: 87899 - DNA, 20 bp, synthetic construct
  source 1..20: mol_type = other DNA
atagaaaaaaaaaaaacacc

SEQ ID NO: 87900 - DNA, 20 bp, synthetic construct
  source 1..20: mol_type = other DNA
aatagaaaaaaaaaaaacac

SEQ ID NO: 87901 - DNA, 20 bp, synthetic construct
  source 1..20: mol_type = other DNA
aaatagaaaaaaaaaaaaca

SEQ ID NO: 87902 - DNA, 20 bp, synthetic construct
  source 1..20: mol_type = other DNA
aaaatagaaaaaaaaaaaac

SEQ ID NO: 87903 - DNA, 20 bp, synthetic construct
  source 1..20: mol_type = other DNA
aaaaatagaaaaaaaaaaaa

SEQ ID NO: 87904 - DNA, 20 bp, synthetic construct
  source 1..20: mol_type = other DNA
taaaaatagaaaaaaaaaaa

SEQ ID NO: 87905 - DNA, 20 bp, synthetic construct
  source 1..20: mol_type = other DNA
ttaaaaatagaaaaaaaaaa

SEQ ID NO: 87906 - DNA, 20 bp, synthetic construct
  source 1..20: mol_type = other DNA
gttaaaaatagaaaaaaaaa

SEQ ID NO: 87907 - DNA, 20 bp, synthetic construct
  source 1..20: mol_type = other DNA
ggttaaaaatagaaaaaaaa

SEQ ID NO: 87908 - DNA, 20 bp, synthetic construct
  source 1..20: mol_type = other DNA
tggttaaaaatagaaaaaaa

SEQ ID NO: 87909 - DNA, 20 bp, synthetic construct
  source 1..20: mol_type = other DNA
ttggttaaaaatagaaaaaa

SEQ ID NO: 87910 - DNA, 20 bp, synthetic construct
  source 1..20: mol_type = other DNA
cttggttaaaaatagaaaaa

SEQ ID NO: 87911 - DNA, 20 bp, synthetic construct
  source 1..20: mol_type = other DNA
ccttggttaaaaatagaaaa

SEQ ID NO: 87912 - DNA, 20 bp, synthetic construct
  source 1..20: mol_type = other DNA
tccttggttaaaaatagaaa

SEQ ID NO: 87913 - DNA, 20 bp, synthetic construct
  source 1..20: mol_type = other DNA
ttccttggttaaaaatagaa

SEQ ID NO: 87914 - DNA, 20 bp, synthetic construct
  source 1..20: mol_type = other DNA
tttccttggttaaaaataga

SEQ ID NO: 87915 - DNA, 20 bp, synthetic construct
  source 1..20: mol_type = other DNA
ttttccttggttaaaaatag

SEQ ID NO: 87916 - DNA, 20 bp, synthetic construct
  source 1..20: mol_type = other DNA
tttttccttggttaaaaata

SEQ ID NO: 87917 - DNA, 20 bp, synthetic construct
  source 1..20: mol_type = other DNA
gtttttccttggttaaaaat

SEQ ID NO: 87918 - DNA, 20 bp, synthetic construct
  source 1..20: mol_type = other DNA
agtttttccttggttaaaaa

SEQ ID NO: 87919 - DNA, 20 bp, synthetic construct
  source 1..20: mol_type = other DNA
cagtttttccttggttaaaa

SEQ ID NO: 87920 - DNA, 20 bp, synthetic construct
  source 1..20: mol_type = other DNA
acagtttttccttggttaaa

SEQ ID NO: 87921 - DNA, 20 bp, synthetic construct
  source 1..20: mol_type = other DNA
tacagtttttccttggttaa

SEQ ID NO: 87922 - DNA, 20 bp, synthetic construct
  source 1..20: mol_type = other DNA
ctacagtttttccttggtta

SEQ ID NO: 87923 - DNA, 20 bp, synthetic construct
  source 1..20: mol_type = other DNA
tctacagtttttccttggtt

SEQ ID NO: 87924 - DNA, 20 bp, synthetic construct
  source 1..20: mol_type = other DNA
ctctacagtttttccttggt

SEQ ID NO: 87925 - DNA, 20 bp, synthetic construct
  source 1..20: mol_type = other DNA
actctacagtttttccttgg

SEQ ID NO: 87926 - DNA, 20 bp, synthetic construct
  source 1..20: mol_type = other DNA
cactctacagtttttccttg

SEQ ID NO: 87927 - DNA, 20 bp, synthetic construct
  source 1..20: mol_type = other DNA
tcactctacagtttttcctt

SEQ ID NO: 87928 - DNA, 20 bp, synthetic construct
  source 1..20: mol_type = other DNA
ctcactctacagtttttcct

SEQ ID NO: 87929 - DNA, 20 bp, synthetic construct
  source 1..20: mol_type = other DNA
actcactctacagtttttcc

SEQ ID NO: 87930 - DNA, 20 bp, synthetic construct
  source 1..20: mol_type = other DNA
cactcactctacagtttttc

SEQ ID NO: 87931 - DNA, 20 bp, synthetic construct
  source 1..20: mol_type = other DNA
tcactcactctacagttttt

SEQ ID NO: 87932 - DNA, 20 bp, synthetic construct
  source 1..20: mol_type = other DNA
ctcactcactctacagtttt

SEQ ID NO: 87933 - DNA, 20 bp, synthetic construct
  source 1..20: mol_type = other DNA
actcactcactctacagttt

SEQ ID NO: 87934 - DNA, 20 bp, synthetic construct
  source 1..20: mol_type = other DNA
cactcactcactctacagtt

SEQ ID NO: 87935 - DNA, 20 bp, synthetic construct
  source 1..20: mol_type = other DNA
acactcactcactctacagt

SEQ ID NO: 87936 - DNA, 20 bp, synthetic construct
  source 1..20: mol_type = other DNA
cacactcactcactctacag

SEQ ID NO: 87937 - DNA, 20 bp, synthetic construct
  source 1..20: mol_type = other DNA
acacactcactcactctaca

SEQ ID NO: 87938 - DNA, 20 bp, synthetic construct
  source 1..20: mol_type = other DNA
cacacactcactcactctac

SEQ ID NO: 87939 - DNA, 20 bp, synthetic construct
  source 1..20: mol_type = other DNA
acacacactcactcactcta

SEQ ID NO: 87940 - DNA, 20 bp, synthetic construct
  source 1..20: mol_type = other DNA
cacacacactcactcactct

SEQ ID NO: 87941 - DNA, 20 bp, synthetic construct
  source 1..20: mol_type = other DNA
gcacacacactcactcactc

SEQ ID NO: 87942 - DNA, 20 bp, synthetic construct
  source 1..20: mol_type = other DNA
tgcacacacactcactcact

SEQ ID NO: 87943 - DNA, 20 bp, synthetic construct
  source 1..20: mol_type = other DNA
atgcacacacactcactcac

SEQ ID NO: 87944 - DNA, 20 bp, synthetic construct
  source 1..20: mol_type = other DNA
catgcacacacactcactca

SEQ ID NO: 87945 - DNA, 20 bp, synthetic construct
  source 1..20: mol_type = other DNA
acatgcacacacactcactc

SEQ ID NO: 87946 - DNA, 20 bp, synthetic construct
  source 1..20: mol_type = other DNA
cacatgcacacacactcact

SEQ ID NO: 87947 - DNA, 20 bp, synthetic construct
  source 1..20: mol_type = other DNA
acacatgcacacacactcac

SEQ ID NO: 87948 - DNA, 20 bp, synthetic construct
  source 1..20: mol_type = other DNA
cacacatgcacacacactca

SEQ ID NO: 87949 - DNA, 20 bp, synthetic construct
  source 1..20: mol_type = other DNA
acacacatgcacacacactc

SEQ ID NO: 87950 - DNA, 20 bp, synthetic construct
  source 1..20: mol_type = other DNA
cacacacatgcacacacact

SEQ ID NO: 87951 - DNA, 20 bp, synthetic construct
  source 1..20: mol_type = other DNA
acacacacatgcacacacac

SEQ ID NO: 87952 - DNA, 20 bp, synthetic construct
  source 1..20: mol_type = other DNA
cacacacacatgcacacaca

SEQ ID NO: 87953 - DNA, 20 bp, synthetic construct
  source 1..20: mol_type = other DNA
tcacacacacatgcacacac

SEQ ID NO: 87954 - DNA, 20 bp, synthetic construct
  source 1..20: mol_type = other DNA
ttcacacacacatgcacaca

SEQ ID NO: 87955 - DNA, 20 bp, synthetic construct
  source 1..20: mol_type = other DNA
attcacacacacatgcacac

SEQ ID NO: 87956 - DNA, 20 bp, synthetic construct
  source 1..20: mol_type = other DNA
cattcacacacacatgcaca

SEQ ID NO: 87957 - DNA, 20 bp, synthetic construct
  source 1..20: mol_type = other DNA
ccattcacacacacatgcac

SEQ ID NO: 87958 - DNA, 20 bp, synthetic construct
  source 1..20: mol_type = other DNA
cccattcacacacacatgca

SEQ ID NO: 87959 - DNA, 20 bp, synthetic construct
  source 1..20: mol_type = other DNA
acccattcacacacacatgc

SEQ ID NO: 87960 - DNA, 20 bp, synthetic construct
  source 1..20: mol_type = other DNA
cacccattcacacacacatg

SEQ ID NO: 87961 - DNA, 20 bp, synthetic construct
  source 1..20: mol_type = other DNA
acacccattcacacacacat

SEQ ID NO: 87962 - DNA, 20 bp, synthetic construct
  source 1..20: mol_type = other DNA
tacacccattcacacacaca

SEQ ID NO: 87963 - DNA, 20 bp, synthetic construct
  source 1..20: mol_type = other DNA
atacacccattcacacacac

SEQ ID NO: 87964 - DNA, 20 bp, synthetic construct
  source 1..20: mol_type = other DNA
aatacacccattcacacaca

SEQ ID NO: 87965 - DNA, 20 bp, synthetic construct
  source 1..20: mol_type = other DNA
aaatacacccattcacacac

SEQ ID NO: 87966 - DNA, 20 bp, synthetic construct
  source 1..20: mol_type = other DNA
taaatacacccattcacaca

SEQ ID NO: 87967 - DNA, 20 bp, synthetic construct
  source 1..20: mol_type = other DNA
ctaaatacacccattcacac

SEQ ID NO: 87968 - DNA, 20 bp, synthetic construct
  source 1..20: mol_type = other DNA
gctaaatacacccattcaca

SEQ ID NO: 87969 - DNA, 20 bp, synthetic construct
  source 1..20: mol_type = other DNA
tgctaaatacacccattcac

SEQ ID NO: 87970 - DNA, 20 bp, synthetic construct
  source 1..20: mol_type = other DNA
ctgctaaatacacccattca

SEQ ID NO: 87971 - DNA, 20 bp, synthetic construct
  source 1..20: mol_type = other DNA
tctgctaaatacacccattc

SEQ ID NO: 87972 - DNA, 20 bp, synthetic construct
  source 1..20: mol_type = other DNA
ttctgctaaatacacccatt

SEQ ID NO: 87973 - DNA, 20 bp, synthetic construct
  source 1..20: mol_type = other DNA
tttctgctaaatacacccat

SEQ ID NO: 87974 - DNA, 20 bp, synthetic construct
  source 1..20: mol_type = other DNA
ttttctgctaaatacaccca

SEQ ID NO: 87975 - DNA, 20 bp, synthetic construct
  source 1..20: mol_type = other DNA
cttttctgctaaatacaccc

SEQ ID NO: 87976 - DNA, 20 bp, synthetic construct
  source 1..20: mol_type = other DNA
acttttctgctaaatacacc

SEQ ID NO: 87977 - DNA, 20 bp, synthetic construct
  source 1..20: mol_type = other DNA
tacttttctgctaaatacac

SEQ ID NO: 87978 - DNA, 20 bp, synthetic construct
  source 1..20: mol_type = other DNA
ctacttttctgctaaataca

SEQ ID NO: 87979 - DNA, 20 bp, synthetic construct
  source 1..20: mol_type = other DNA
actacttttctgctaaatac

SEQ ID NO: 87980 - DNA, 20 bp, synthetic construct
  source 1..20: mol_type = other DNA
tactacttttctgctaaata

SEQ ID NO: 87981 - DNA, 20 bp, synthetic construct
  source 1..20: mol_type = other DNA
gtactacttttctgctaaat

SEQ ID NO: 87982 - DNA, 20 bp, synthetic construct
  source 1..20: mol_type = other DNA
agtactacttttctgctaaa

SEQ ID NO: 87983 - DNA, 20 bp, synthetic construct
  source 1..20: mol_type = other DNA
cagtactacttttctgctaa

SEQ ID NO: 87984 - DNA, 20 bp, synthetic construct
  source 1..20: mol_type = other DNA
tcagtactacttttctgcta

SEQ ID NO: 87985 - DNA, 20 bp, synthetic construct
  source 1..20: mol_type = other DNA
atcagtactacttttctgct

SEQ ID NO: 87986 - DNA, 20 bp, synthetic construct
  source 1..20: mol_type = other DNA
catcagtactacttttctgc

SEQ ID NO: 87987 - DNA, 20 bp, synthetic construct
  source 1..20: mol_type = other DNA
tcatcagtactacttttctg

SEQ ID NO: 87988 - DNA, 20 bp, synthetic construct
  source 1..20: mol_type = other DNA
ttcatcagtactacttttct

SEQ ID NO: 87989 - DNA, 20 bp, synthetic construct
  source 1..20: mol_type = other DNA
attcatcagtactacttttc

SEQ ID NO: 87990 - DNA, 20 bp, synthetic construct
  source 1..20: mol_type = other DNA
tattcatcagtactactttt

SEQ ID NO: 87991 - DNA, 20 bp, synthetic construct
  source 1..20: mol_type = other DNA
atattcatcagtactacttt

SEQ ID NO: 87992 - DNA, 20 bp, synthetic construct
  source 1..20: mol_type = other DNA
gatattcatcagtactactt

SEQ ID NO: 87993 - DNA, 20 bp, synthetic construct
  source 1..20: mol_type = other DNA
tgatattcatcagtactact

SEQ ID NO: 87994 - DNA, 20 bp, synthetic construct
  source 1..20: mol_type = other DNA
atgatattcatcagtactac

SEQ ID NO: 87995 - DNA, 20 bp, synthetic construct
  source 1..20: mol_type = other DNA
catgatattcatcagtacta

SEQ ID NO: 87996 - DNA, 20 bp, synthetic construct
  source 1..20: mol_type = other DNA
ccatgatattcatcagtact

SEQ ID NO: 87997 - DNA, 20 bp, synthetic construct
  source 1..20: mol_type = other DNA
tccatgatattcatcagtac

SEQ ID NO: 87998 - DNA, 20 bp, synthetic construct
  source 1..20: mol_type = other DNA
ttccatgatattcatcagta

SEQ ID NO: 87999 - DNA, 20 bp, synthetic construct
  source 1..20: mol_type = other DNA
attccatgatattcatcagt

SEQ ID NO: 88000 - DNA, 20 bp, synthetic construct
  source 1..20: mol_type = other DNA
aattccatgatattcatcag

SEQ ID NO: 88001 - DNA, 20 bp, synthetic construct
  source 1..20: mol_type = other DNA
aaattccatgatattcatca

SEQ ID NO: 88002 - DNA, 20 bp, synthetic construct
  source 1..20: mol_type = other DNA
taaattccatgatattcatc

SEQ ID NO: 88003 - DNA, 20 bp, synthetic construct
  source 1..20: mol_type = other DNA
ataaattccatgatattcat

SEQ ID NO: 88004 - DNA, 20 bp, synthetic construct
  source 1..20: mol_type = other DNA
cataaattccatgatattca

SEQ ID NO: 88005 - DNA, 20 bp, synthetic construct
  source 1..20: mol_type = other DNA
acataaattccatgatattc

SEQ ID NO: 88006 - DNA, 20 bp, synthetic construct
  source 1..20: mol_type = other DNA
cacataaattccatgatatt

SEQ ID NO: 88007 - DNA, 20 bp, synthetic construct
  source 1..20: mol_type = other DNA
tcacataaattccatgatat

SEQ ID NO: 88008 - DNA, 20 bp, synthetic construct
  source 1..20: mol_type = other DNA
atcacataaattccatgata

SEQ ID NO: 88009 - DNA, 20 bp, synthetic construct
  source 1..20: mol_type = other DNA
catcacataaattccatgat

SEQ ID NO: 88010 - DNA, 20 bp, synthetic construct
  source 1..20: mol_type = other DNA
acatcacataaattccatga

SEQ ID NO: 88011 - DNA, 20 bp, synthetic construct
  source 1..20: mol_type = other DNA
aacatcacataaattccatg

SEQ ID NO: 88012 - DNA, 20 bp, synthetic construct
  source 1..20: mol_type = other DNA
gaacatcacataaattccat

SEQ ID NO: 88013 - DNA, 20 bp, synthetic construct
  source 1..20: mol_type = other DNA
tgaacatcacataaattcca

SEQ ID NO: 88014 - DNA, 20 bp, synthetic construct
  source 1..20: mol_type = other DNA
gtgaacatcacataaattcc

SEQ ID NO: 88015 - DNA, 20 bp, synthetic construct
  source 1..20: mol_type = other DNA
agtgaacatcacataaattc

SEQ ID NO: 88016 - DNA, 20 bp, synthetic construct
  source 1..20: mol_type = other DNA
cagtgaacatcacataaatt

SEQ ID NO: 88017 - DNA, 20 bp, synthetic construct
  source 1..20: mol_type = other DNA
acagtgaacatcacataaat

SEQ ID NO: 88018 - DNA, 20 bp, synthetic construct
  source 1..20: mol_type = other DNA
aacagtgaacatcacataaa

SEQ ID NO: 88019 - DNA, 20 bp, synthetic construct
  source 1..20: mol_type = other DNA
aaacagtgaacatcacataa

SEQ ID NO: 88020 - DNA, 20 bp, synthetic construct
  source 1..20: mol_type = other DNA
gaaacagtgaacatcacata

SEQ ID NO: 88021 - DNA, 20 bp, synthetic construct
  source 1..20: mol_type = other DNA
agaaacagtgaacatcacat

SEQ ID NO: 88022 - DNA, 20 bp, synthetic construct
  source 1..20: mol_type = other DNA
aagaaacagtgaacatcaca

SEQ ID NO: 88023 - DNA, 20 bp, synthetic construct
  source 1..20: mol_type = other DNA
gaagaaacagtgaacatcac

SEQ ID NO: 88024 - DNA, 20 bp, synthetic construct
  source 1..20: mol_type = other DNA
ggaagaaacagtgaacatca

SEQ ID NO: 88025 - DNA, 20 bp, synthetic construct
  source 1..20: mol_type = other DNA
aggaagaaacagtgaacatc

SEQ ID NO: 88026 - DNA, 20 bp, synthetic construct
  source 1..20: mol_type = other DNA
aaggaagaaacagtgaacat

SEQ ID NO: 88027 - DNA, 20 bp, synthetic construct
  source 1..20: mol_type = other DNA
taaggaagaaacagtgaaca

SEQ ID NO: 88028 - DNA, 20 bp, synthetic construct
  source 1..20: mol_type = other DNA
ctaaggaagaaacagtgaac

SEQ ID NO: 88029 - DNA, 20 bp, synthetic construct
  source 1..20: mol_type = other DNA
cctaaggaagaaacagtgaa

SEQ ID NO: 88030 - DNA, 20 bp, synthetic construct
  source 1..20: mol_type = other DNA
ccctaaggaagaaacagtga

SEQ ID NO: 88031 - DNA, 20 bp, synthetic construct
  source 1..20: mol_type = other DNA
gccctaaggaagaaacagtg

SEQ ID NO: 88032 - DNA, 20 bp, synthetic construct
  source 1..20: mol_type = other DNA
ggccctaaggaagaaacagt

SEQ ID NO: 88033 - DNA, 20 bp, synthetic construct
  source 1..20: mol_type = other DNA
aggccctaaggaagaaacag

SEQ ID NO: 88034 - DNA, 20 bp, synthetic construct
  source 1..20: mol_type = other DNA
gaggccctaaggaagaaaca

SEQ ID NO: 88035 - DNA, 20 bp, synthetic construct
  source 1..20: mol_type = other DNA
ggaggccctaaggaagaaac

SEQ ID NO: 88036 - DNA, 20 bp, synthetic construct
  source 1..20: mol_type = other DNA
tggaggccctaaggaagaaa

SEQ ID NO: 88037 - DNA, 20 bp, synthetic construct
  source 1..20: mol_type = other DNA
ttggaggccctaaggaagaa

SEQ ID NO: 88038 - DNA, 20 bp, synthetic construct
  source 1..20: mol_type = other DNA
cttggaggccctaaggaaga

SEQ ID NO: 88039 - DNA, 20 bp, synthetic construct
  source 1..20: mol_type = other DNA
ccttggaggccctaaggaag

SEQ ID NO: 88040 - DNA, 20 bp, synthetic construct
  source 1..20: mol_type = other DNA
tccttggaggccctaaggaa

SEQ ID NO: 88041 - DNA, 20 bp, synthetic construct
  source 1..20: mol_type = other DNA
atccttggaggccctaagga

SEQ ID NO: 88042 - DNA, 20 bp, synthetic construct
  source 1..20: mol_type = other DNA
catccttggaggccctaagg

SEQ ID NO: 88043 - DNA, 20 bp, synthetic construct
  source 1..20: mol_type = other DNA
acatccttggaggccctaag

SEQ ID NO: 88044 - DNA, 20 bp, synthetic construct
  source 1..20: mol_type = other DNA
gacatccttggaggccctaa

SEQ ID NO: 88045 - DNA, 20 bp, synthetic construct
  source 1..20: mol_type = other DNA
ggacatccttggaggcccta

SEQ ID NO: 88046 - DNA, 20 bp, synthetic construct
  source 1..20: mol_type = other DNA
gggacatccttggaggccct

SEQ ID NO: 88047 - DNA, 20 bp, synthetic construct
  source 1..20: mol_type = other DNA
ggggacatccttggaggccc

SEQ ID NO: 88048 - DNA, 20 bp, synthetic construct
  source 1..20: mol_type = other DNA
tggggacatccttggaggcc

SEQ ID NO: 88049 - DNA, 20 bp, synthetic construct
  source 1..20: mol_type = other DNA
ttggggacatccttggaggc

SEQ ID NO: 88050 - DNA, 20 bp, synthetic construct
  source 1..20: mol_type = other DNA
tttggggacatccttggagg

SEQ ID NO: 88051 - DNA, 20 bp, synthetic construct
  source 1..20: mol_type = other DNA
ctttggggacatccttggag

SEQ ID NO: 88052 - DNA, 20 bp, synthetic construct
  source 1..20: mol_type = other DNA
cctttggggacatccttgga

SEQ ID NO: 88053 - DNA, 20 bp, synthetic construct
  source 1..20: mol_type = other DNA
gcctttggggacatccttgg

SEQ ID NO: 88054 - DNA, 20 bp, synthetic construct
  source 1..20: mol_type = other DNA
ggcctttggggacatccttg

SEQ ID NO: 88055 - DNA, 20 bp, synthetic construct
  source 1..20: mol_type = other DNA
gggcctttggggacatcctt

SEQ ID NO: 88056 - DNA, 20 bp, synthetic construct
  source 1..20: mol_type = other DNA
tgggcctttggggacatcct

SEQ ID NO: 88057 - DNA, 20 bp, synthetic construct
  source 1..20: mol_type = other DNA
ctgggcctttggggacatcc

SEQ ID NO: 88058 - DNA, 20 bp, synthetic construct
  source 1..20: mol_type = other DNA
gctgggcctttggggacatc

SEQ ID NO: 88059 - DNA, 20 bp, synthetic construct
  source 1..20: mol_type = other DNA
cgctgggcctttggggacat

SEQ ID NO: 88060 - DNA, 20 bp, synthetic construct
  source 1..20: mol_type = other DNA
tcgctgggcctttggggaca

SEQ ID NO: 88061 - DNA, 20 bp, synthetic construct
  source 1..20: mol_type = other DNA
gtcgctgggcctttggggac

SEQ ID NO: 88062 - DNA, 20 bp, synthetic construct
  source 1..20: mol_type = other DNA
tgtcgctgggcctttgggga

SEQ ID NO: 88063 - DNA, 20 bp, synthetic construct
  source 1..20: mol_type = other DNA
atgtcgctgggcctttgggg

SEQ ID NO: 88064 - DNA, 20 bp, synthetic construct
  source 1..20: mol_type = other DNA
gatgtcgctgggcctttggg

SEQ ID NO: 88065 - DNA, 20 bp, synthetic construct
  source 1..20: mol_type = other DNA
ggatgtcgctgggcctttgg

SEQ ID NO: 88066 - DNA, 20 bp, synthetic construct
  source 1..20: mol_type = other DNA
aggatgtcgctgggcctttg

SEQ ID NO: 88067 - DNA, 20 bp, synthetic construct
  source 1..20: mol_type = other DNA
gaggatgtcgctgggccttt

SEQ ID NO: 88068 - DNA, 20 bp, synthetic construct
  source 1..20: mol_type = other DNA
cgaggatgtcgctgggcctt

SEQ ID NO: 88069 - DNA, 20 bp, synthetic construct
  source 1..20: mol_type = other DNA
tcgaggatgtcgctgggcct

SEQ ID NO: 88070 - DNA, 20 bp, synthetic construct
  source 1..20: mol_type = other DNA
ttcgaggatgtcgctgggcc

SEQ ID NO: 88071 - DNA, 20 bp, synthetic construct
  source 1..20: mol_type = other DNA
tttcgaggatgtcgctgggc

SEQ ID NO: 88072 - DNA, 20 bp, synthetic construct
  source 1..20: mol_type = other DNA
atttcgaggatgtcgctggg

SEQ ID NO: 88073 - DNA, 20 bp, synthetic construct
  source 1..20: mol_type = other DNA
gatttcgaggatgtcgctgg

SEQ ID NO: 88074 - DNA, 20 bp, synthetic construct
  source 1..20: mol_type = other DNA
tgatttcgaggatgtcgctg

SEQ ID NO: 88075 - DNA, 20 bp, synthetic construct
  source 1..20: mol_type = other DNA
gtgatttcgaggatgtcgct

SEQ ID NO: 88076 - DNA, 20 bp, synthetic construct
  source 1..20: mol_type = other DNA
tgtgatttcgaggatgtcgc

SEQ ID NO: 88077 - DNA, 20 bp, synthetic construct
  source 1..20: mol_type = other DNA
ctgtgatttcgaggatgtcg

SEQ ID NO: 88078 - DNA, 20 bp, synthetic construct
  source 1..20: mol_type = other DNA
tctgtgatttcgaggatgtc

SEQ ID NO: 88079 - DNA, 20 bp, synthetic construct
  source 1..20: mol_type = other DNA
ctctgtgatttcgaggatgt

SEQ ID NO: 88080 - DNA, 20 bp, synthetic construct
  source 1..20: mol_type = other DNA
actctgtgatttcgaggatg

SEQ ID NO: 88081 - DNA, 20 bp, synthetic construct
  source 1..20: mol_type = other DNA
aactctgtgatttcgaggat

SEQ ID NO: 88082 - DNA, 20 bp, synthetic construct
  source 1..20: mol_type = other DNA
aaactctgtgatttcgagga

SEQ ID NO: 88083 - DNA, 20 bp, synthetic construct
  source 1..20: mol_type = other DNA
gaaactctgtgatttcgagg

SEQ ID NO: 88084 - DNA, 20 bp, synthetic construct
  source 1..20: mol_type = other DNA
agaaactctgtgatttcgag

SEQ ID NO: 88085 - DNA, 20 bp, synthetic construct
  source 1..20: mol_type = other DNA
cagaaactctgtgatttcga

SEQ ID NO: 88086 - DNA, 20 bp, synthetic construct
  source 1..20: mol_type = other DNA
gcagaaactctgtgatttcg

SEQ ID NO: 88087 - DNA, 20 bp, synthetic construct
  source 1..20: mol_type = other DNA
agcagaaactctgtgatttc

SEQ ID NO: 88088 - DNA, 20 bp, synthetic construct
  source 1..20: mol_type = other DNA
cagcagaaactctgtgattt

SEQ ID NO: 88089 - DNA, 20 bp, synthetic construct
  source 1..20: mol_type = other DNA
ccagcagaaactctgtgatt

SEQ ID NO: 88090 - DNA, 20 bp, synthetic construct
  source 1..20: mol_type = other DNA
cccagcagaaactctgtgat

SEQ ID NO: 88091 - DNA, 20 bp, synthetic construct
  source 1..20: mol_type = other DNA
tcccagcagaaactctgtga

SEQ ID NO: 88092 - DNA, 20 bp, synthetic construct
  source 1..20: mol_type = other DNA
ctcccagcagaaactctgtg

SEQ ID NO: 88093 - DNA, 20 bp, synthetic construct
  source 1..20: mol_type = other DNA
cctcccagcagaaactctgt

SEQ ID NO: 88094 - DNA, 20 bp, synthetic construct
  source 1..20: mol_type = other DNA
ccctcccagcagaaactctg

SEQ ID NO: 88095 - DNA, 20 bp, synthetic construct
  source 1..20: mol_type = other DNA
cccctcccagcagaaactct

SEQ ID NO: 88096 - DNA, 20 bp, synthetic construct
  source 1..20: mol_type = other DNA
acccctcccagcagaaactc

SEQ ID NO: 88097 - DNA, 20 bp, synthetic construct
  source 1..20: mol_type = other DNA
aacccctcccagcagaaact

SEQ ID NO: 88098 - DNA, 20 bp, synthetic construct
  source 1..20: mol_type = other DNA
gaacccctcccagcagaaac

SEQ ID NO: 88099 - DNA, 20 bp, synthetic construct
  source 1..20: mol_type = other DNA
ggaacccctcccagcagaaa

SEQ ID NO: 88100 - DNA, 20 bp, synthetic construct
  source 1..20: mol_type = other DNA
tggaacccctcccagcagaa

SEQ ID NO: 88101 - DNA, 20 bp, synthetic construct
  source 1..20: mol_type = other DNA
atggaacccctcccagcaga

SEQ ID NO: 88102 - DNA, 20 bp, synthetic construct
  source 1..20: mol_type = other DNA
tatggaacccctcccagcag

SEQ ID NO: 88103 - DNA, 20 bp, synthetic construct
  source 1..20: mol_type = other DNA
atatggaacccctcccagca

SEQ ID NO: 88104 - DNA, 20 bp, synthetic construct
  source 1..20: mol_type = other DNA
gatatggaacccctcccagc

SEQ ID NO: 88105 - DNA, 20 bp, synthetic construct
  source 1..20: mol_type = other DNA
ggatatggaacccctcccag

SEQ ID NO: 88106 - DNA, 20 bp, synthetic construct
  source 1..20: mol_type = other DNA
tggatatggaacccctccca

SEQ ID NO: 88107 - DNA, 20 bp, synthetic construct
  source 1..20: mol_type = other DNA
ctggatatggaacccctccc

SEQ ID NO: 88108 - DNA, 20 bp, synthetic construct
  source 1..20: mol_type = other DNA
actggatatggaacccctcc

SEQ ID NO: 88109 - DNA, 20 bp, synthetic construct
  source 1..20: mol_type = other DNA
cactggatatggaacccctc

SEQ ID NO: 88110 - DNA, 20 bp, synthetic construct
  source 1..20: mol_type = other DNA
ccactggatatggaacccct

SEQ ID NO: 88111 - DNA, 20 bp, synthetic construct
  source 1..20: mol_type = other DNA
gccactggatatggaacccc

SEQ ID NO: 88112 - DNA, 20 bp, synthetic construct
  source 1..20: mol_type = other DNA
ggccactggatatggaaccc

SEQ ID NO: 88113 - DNA, 20 bp, synthetic construct
  source 1..20: mol_type = other DNA
aggccactggatatggaacc

SEQ ID NO: 88114 - DNA, 20 bp, synthetic construct
  source 1..20: mol_type = other DNA
taggccactggatatggaac

SEQ ID NO: 88115 - DNA, 20 bp, synthetic construct
  source 1..20: mol_type = other DNA
ctaggccactggatatggaa

SEQ ID NO: 88116 - DNA, 20 bp, synthetic construct
  source 1..20: mol_type = other DNA
tctaggccactggatatgga

SEQ ID NO: 88117 - DNA, 20 bp, synthetic construct
  source 1..20: mol_type = other DNA
ttctaggccactggatatgg

SEQ ID NO: 88118 - DNA, 20 bp, synthetic construct
  source 1..20: mol_type = other DNA
attctaggccactggatatg

SEQ ID NO: 88119 - DNA, 20 bp, synthetic construct
  source 1..20: mol_type = other DNA
aattctaggccactggatat

SEQ ID NO: 88120 - DNA, 20 bp, synthetic construct
  source 1..20: mol_type = other DNA
aaattctaggccactggata

SEQ ID NO: 88121 - DNA, 20 bp, synthetic construct
  source 1..20: mol_type = other DNA
caaattctaggccactggat

SEQ ID NO: 88122 - DNA, 20 bp, synthetic construct
  source 1..20: mol_type = other DNA
acaaattctaggccactgga

SEQ ID NO: 88123 - DNA, 20 bp, synthetic construct
  source 1..20: mol_type = other DNA
tacaaattctaggccactgg

SEQ ID NO: 88124 - DNA, 20 bp, synthetic construct
  source 1..20: mol_type = other DNA
atacaaattctaggccactg

SEQ ID NO: 88125 - DNA, 20 bp, synthetic construct
  source 1..20: mol_type = other DNA
gatacaaattctaggccact

SEQ ID NO: 88126 - DNA, 20 bp, synthetic construct
  source 1..20: mol_type = other DNA
ggatacaaattctaggccac

SEQ ID NO: 88127 - DNA, 20 bp, synthetic construct
  source 1..20: mol_type = other DNA
gggatacaaattctaggcca

SEQ ID NO: 88128 - DNA, 20 bp, synthetic construct
  source 1..20: mol_type = other DNA
tgggatacaaattctaggcc

SEQ ID NO: 88129 - DNA, 20 bp, synthetic construct
  source 1..20: mol_type = other DNA
gtgggatacaaattctaggc

SEQ ID NO: 88130 - DNA, 20 bp, synthetic construct
  source 1..20: mol_type = other DNA
tgtgggatacaaattctagg

SEQ ID NO: 88131 - DNA, 20 bp, synthetic construct
  source 1..20: mol_type = other DNA
ttgtgggatacaaattctag

SEQ ID NO: 88132 - DNA, 20 bp, synthetic construct
  source 1..20: mol_type = other DNA
gttgtgggatacaaattcta

SEQ ID NO: 88133 - DNA, 20 bp, synthetic construct
  source 1..20: mol_type = other DNA
ggttgtgggatacaaattct

SEQ ID NO: 88134 - DNA, 20 bp, synthetic construct
  source 1..20: mol_type = other DNA
gggttgtgggatacaaattc

SEQ ID NO: 88135 - DNA, 20 bp, synthetic construct
  source 1..20: mol_type = other DNA
tgggttgtgggatacaaatt

SEQ ID NO: 88136 - DNA, 20 bp, synthetic construct
  source 1..20: mol_type = other DNA
gtgggttgtgggatacaaat

SEQ ID NO: 88137 - DNA, 20 bp, synthetic construct
  source 1..20: mol_type = other DNA
ggtgggttgtgggatacaaa

SEQ ID NO: 88138 - DNA, 20 bp, synthetic construct
  source 1..20: mol_type = other DNA
gggtgggttgtgggatacaa

SEQ ID NO: 88139 - DNA, 20 bp, synthetic construct
  source 1..20: mol_type = other DNA
tgggtgggttgtgggataca

SEQ ID NO: 88140 - DNA, 20 bp, synthetic construct
  source 1..20: mol_type = other DNA
ctgggtgggttgtgggatac

SEQ ID NO: 88141 - DNA, 20 bp, synthetic construct
  source 1..20: mol_type = other DNA
actgggtgggttgtgggata

SEQ ID NO: 88142 - DNA, 20 bp, synthetic construct
  source 1..20: mol_type = other DNA
cactgggtgggttgtgggat

SEQ ID NO: 88143 - DNA, 20 bp, synthetic construct
  source 1..20: mol_type = other DNA
tcactgggtgggttgtggga

SEQ ID NO: 88144 - DNA, 20 bp, synthetic construct
  source 1..20: mol_type = other DNA
ttcactgggtgggttgtggg

SEQ ID NO: 88145 - DNA, 20 bp, synthetic construct
  source 1..20: mol_type = other DNA
cttcactgggtgggttgtgg

SEQ ID NO: 88146 - DNA, 20 bp, synthetic construct
  source 1..20: mol_type = other DNA
gcttcactgggtgggttgtg

SEQ ID NO: 88147 - DNA, 20 bp, synthetic construct
  source 1..20: mol_type = other DNA
tgcttcactgggtgggttgt

SEQ ID NO: 88148 - DNA, 20 bp, synthetic construct
  source 1..20: mol_type = other DNA
ctgcttcactgggtgggttg

SEQ ID NO: 88149 - DNA, 20 bp, synthetic construct
  source 1..20: mol_type = other DNA
gctgcttcactgggtgggtt

SEQ ID NO: 88150 - DNA, 20 bp, synthetic construct
  source 1..20: mol_type = other DNA
agctgcttcactgggtgggt

SEQ ID NO: 88151 - DNA, 20 bp, synthetic construct
  source 1..20: mol_type = other DNA
tagctgcttcactgggtggg

SEQ ID NO: 88152 - DNA, 20 bp, synthetic construct
  source 1..20: mol_type = other DNA
gtagctgcttcactgggtgg

SEQ ID NO: 88153 - DNA, 20 bp, synthetic construct
  source 1..20: mol_type = other DNA
agtagctgcttcactgggtg

SEQ ID NO: 88154 - DNA, 20 bp, synthetic construct
  source 1..20: mol_type = other DNA
gagtagctgcttcactgggt

SEQ ID NO: 88155 - DNA, 20 bp, synthetic construct
  source 1..20: mol_type = other DNA
ggagtagctgcttcactggg

SEQ ID NO: 88156 - DNA, 20 bp, synthetic construct
  source 1..20: mol_type = other DNA
aggagtagctgcttcactgg

SEQ ID NO: 88157 - DNA, 20 bp, synthetic construct
  source 1..20: mol_type = other DNA
gaggagtagctgcttcactg

SEQ ID NO: 88158 - DNA, 20 bp, synthetic construct
  source 1..20: mol_type = other DNA
ggaggagtagctgcttcact

SEQ ID NO: 88159 - DNA, 20 bp, synthetic construct
  source 1..20: mol_type = other DNA
tggaggagtagctgcttcac

SEQ ID NO: 88160 - DNA, 20 bp, synthetic construct
  source 1..20: mol_type = other DNA
ctggaggagtagctgcttca

SEQ ID NO: 88161 - DNA, 20 bp, synthetic construct
  source 1..20: mol_type = other DNA
actggaggagtagctgcttc

SEQ ID NO: 88162 - DNA, 20 bp, synthetic construct
  source 1..20: mol_type = other DNA
tactggaggagtagctgctt

SEQ ID NO: 88163 - DNA, 20 bp, synthetic construct
  source 1..20: mol_type = other DNA
ctactggaggagtagctgct

SEQ ID NO: 88164 - DNA, 20 bp, synthetic construct
  source 1..20: mol_type = other DNA
gctactggaggagtagctgc

SEQ ID NO: 88165 - DNA, 20 bp, synthetic construct
  source 1..20: mol_type = other DNA
tgctactggaggagtagctg

SEQ ID NO: 88166 - DNA, 20 bp, synthetic construct
  source 1..20: mol_type = other DNA
ttgctactggaggagtagct

SEQ ID NO: 88167 - DNA, 20 bp, synthetic construct
  source 1..20: mol_type = other DNA
cttgctactggaggagtagc

SEQ ID NO: 88168 - DNA, 20 bp, synthetic construct
  source 1..20: mol_type = other DNA
ccttgctactggaggagtag

SEQ ID NO: 88169 - DNA, 20 bp, synthetic construct
  source 1..20: mol_type = other DNA
tccttgctactggaggagta

SEQ ID NO: 88170 - DNA, 20 bp, synthetic construct
  source 1..20: mol_type = other DNA
gtccttgctactggaggagt

SEQ ID NO: 88171 - DNA, 20 bp, synthetic construct
  source 1..20: mol_type = other DNA
ggtccttgctactggaggag

SEQ ID NO: 88172 - DNA, 20 bp, synthetic construct
  source 1..20: mol_type = other DNA
tggtccttgctactggagga

SEQ ID NO: 88173 - DNA, 20 bp, synthetic construct
  source 1..20: mol_type = other DNA
ctggtccttgctactggagg

SEQ ID NO: 88174 - DNA, 20 bp, synthetic construct
  source 1..20: mol_type = other DNA
actggtccttgctactggag

SEQ ID NO: 88175 - DNA, 20 bp, synthetic construct
  source 1..20: mol_type = other DNA
gactggtccttgctactgga

SEQ ID NO: 88176 - DNA, 20 bp, synthetic construct
  source 1..20: mol_type = other DNA
ggactggtccttgctactgg

SEQ ID NO: 88177 - DNA, 20 bp, synthetic construct
  source 1..20: mol_type = other DNA
gggactggtccttgctactg

SEQ ID NO: 88178 - DNA, 20 bp, synthetic construct
  source 1..20: mol_type = other DNA
agggactggtccttgctact

SEQ ID NO: 88179 - DNA, 20 bp, synthetic construct
  source 1..20: mol_type = other DNA
gagggactggtccttgctac

SEQ ID NO: 88180 - DNA, 20 bp, synthetic construct
  source 1..20: mol_type = other DNA
cgagggactggtccttgcta

SEQ ID NO: 88181 - DNA, 20 bp, synthetic construct
  source 1..20: mol_type = other DNA
ccgagggactggtccttgct

SEQ ID NO: 88182 - DNA, 20 bp, synthetic construct
  source 1..20: mol_type = other DNA
cccgagggactggtccttgc

SEQ ID NO: 88183 - DNA, 20 bp, synthetic construct
  source 1..20: mol_type = other DNA
ccccgagggactggtccttg

SEQ ID NO: 88184 - DNA, 20 bp, synthetic construct
  source 1..20: mol_type = other DNA
cccccgagggactggtcctt

SEQ ID NO: 88185 - DNA, 20 bp, synthetic construct
  source 1..20: mol_type = other DNA
ccccccgagggactggtcct

SEQ ID NO: 88186 - DNA, 20 bp, synthetic construct
  source 1..20: mol_type = other DNA
tccccccgagggactggtcc

SEQ ID NO: 88187 - DNA, 20 bp, synthetic construct
  source 1..20: mol_type = other DNA
ttccccccgagggactggtc

SEQ ID NO: 88188 - DNA, 20 bp, synthetic construct
  source 1..20: mol_type = other DNA
gttccccccgagggactggt

SEQ ID NO: 88189 - DNA, 20 bp, synthetic construct
  source 1..20: mol_type = other DNA
cgttccccccgagggactgg

SEQ ID NO: 88190 - DNA, 20 bp, synthetic construct
  source 1..20: mol_type = other DNA
acgttccccccgagggactg

SEQ ID NO: 88191 - DNA, 20 bp, synthetic construct
  source 1..20: mol_type = other DNA
cacgttccccccgagggact

SEQ ID NO: 88192 - DNA, 20 bp, synthetic construct
  source 1..20: mol_type = other DNA
ccacgttccccccgagggac

SEQ ID NO: 88193 - DNA, 20 bp, synthetic construct
  source 1..20: mol_type = other DNA
accacgttccccccgaggga

SEQ ID NO: 88194 - DNA, 20 bp, synthetic construct
  source 1..20: mol_type = other DNA
gaccacgttccccccgaggg

SEQ ID NO: 88195 - DNA, 20 bp, synthetic construct
  source 1..20: mol_type = other DNA
tgaccacgttccccccgagg

SEQ ID NO: 88196 - DNA, 20 bp, synthetic construct
  source 1..20: mol_type = other DNA
atgaccacgttccccccgag

SEQ ID NO: 88197 - DNA, 20 bp, synthetic construct
  source 1..20: mol_type = other DNA
gatgaccacgttccccccga

SEQ ID NO: 88198 - DNA, 20 bp, synthetic construct
  source 1..20: mol_type = other DNA
tgatgaccacgttccccccg

SEQ ID NO: 88199 - DNA, 20 bp, synthetic construct
  source 1..20: mol_type = other DNA
ctgatgaccacgttcccccc

SEQ ID NO: 88200 - DNA, 20 bp, synthetic construct
  source 1..20: mol_type = other DNA
actgatgaccacgttccccc

SEQ ID NO: 88201 - DNA, 20 bp, synthetic construct
  source 1..20: mol_type = other DNA
cactgatgaccacgttcccc

SEQ ID NO: 88202 - DNA, 20 bp, synthetic construct
  source 1..20: mol_type = other DNA
ccactgatgaccacgttccc

SEQ ID NO: 88203 - DNA, 20 bp, synthetic construct
  source 1..20: mol_type = other DNA
accactgatgaccacgttcc

SEQ ID NO: 88204 - DNA, 20 bp, synthetic construct
  source 1..20: mol_type = other DNA
gaccactgatgaccacgttc

SEQ ID NO: 88205 - DNA, 20 bp, synthetic construct
  source 1..20: mol_type = other DNA
tgaccactgatgaccacgtt

SEQ ID NO: 88206 - DNA, 20 bp, synthetic construct
  source 1..20: mol_type = other DNA
ctgaccactgatgaccacgt

SEQ ID NO: 88207 - DNA, 20 bp, synthetic construct
  source 1..20: mol_type = other DNA
actgaccactgatgaccacg

SEQ ID NO: 88208 - DNA, 20 bp, synthetic construct
  source 1..20: mol_type = other DNA
cactgaccactgatgaccac

SEQ ID NO: 88209 - DNA, 20 bp, synthetic construct
  source 1..20: mol_type = other DNA
ccactgaccactgatgacca

SEQ ID NO: 88210 - DNA, 20 bp, synthetic construct
  source 1..20: mol_type = other DNA
cccactgaccactgatgacc

SEQ ID NO: 88211 - DNA, 20 bp, synthetic construct
  source 1..20: mol_type = other DNA
ccccactgaccactgatgac

SEQ ID NO: 88212 - DNA, 20 bp, synthetic construct
  source 1..20: mol_type = other DNA
cccccactgaccactgatga

SEQ ID NO: 88213 - DNA, 20 bp, synthetic construct
  source 1..20: mol_type = other DNA
acccccactgaccactgatg

SEQ ID NO: 88214 - DNA, 20 bp, synthetic construct
  source 1..20: mol_type = other DNA
tacccccactgaccactgat

SEQ ID NO: 88215 - DNA, 20 bp, synthetic construct
  source 1..20: mol_type = other DNA
ctacccccactgaccactga

SEQ ID NO: 88216 - DNA, 20 bp, synthetic construct
  source 1..20: mol_type = other DNA
cctacccccactgaccactg

SEQ ID NO: 88217 - DNA, 20 bp, synthetic construct
  source 1..20: mol_type = other DNA
acctacccccactgaccact

SEQ ID NO: 88218 - DNA, 20 bp, synthetic construct
  source 1..20: mol_type = other DNA
tacctacccccactgaccac

SEQ ID NO: 88219 - DNA, 20 bp, synthetic construct
  source 1..20: mol_type = other DNA
ttacctacccccactgacca

SEQ ID NO: 88220 - DNA, 20 bp, synthetic construct
  source 1..20: mol_type = other DNA
gttacctacccccactgacc

SEQ ID NO: 88221 - DNA, 20 bp, synthetic construct
  source 1..20: mol_type = other DNA
tgttacctacccccactgac

SEQ ID NO: 88222 - DNA, 20 bp, synthetic construct
  source 1..20: mol_type = other DNA
gtgttacctacccccactga

SEQ ID NO: 88223 - DNA, 20 bp, synthetic construct
  source 1..20: mol_type = other DNA
agtgttacctacccccactg

SEQ ID NO: 88224 - DNA, 20 bp, synthetic construct
  source 1..20: mol_type = other DNA
aagtgttacctacccccact

SEQ ID NO: 88225 - DNA, 20 bp, synthetic construct
  source 1..20: mol_type = other DNA
caagtgttacctacccccac

SEQ ID NO: 88226 - DNA, 20 bp, synthetic construct
  source 1..20: mol_type = other DNA
ccaagtgttacctaccccca

SEQ ID NO: 88227 - DNA, 20 bp, synthetic construct
  source 1..20: mol_type = other DNA
cccaagtgttacctaccccc

SEQ ID NO: 88228 - DNA, 20 bp, synthetic construct
  source 1..20: mol_type = other DNA
gcccaagtgttacctacccc

SEQ ID NO: 88229 - DNA, 20 bp, synthetic construct
  source 1..20: mol_type = other DNA
tgcccaagtgttacctaccc

SEQ ID NO: 88230 - DNA, 20 bp, synthetic construct
  source 1..20: mol_type = other DNA
atgcccaagtgttacctacc

SEQ ID NO: 88231 - DNA, 20 bp, synthetic construct
  source 1..20: mol_type = other DNA
tatgcccaagtgttacctac

SEQ ID NO: 88232 - DNA, 20 bp, synthetic construct
  source 1..20: mol_type = other DNA
ttatgcccaagtgttaccta

SEQ ID NO: 88233 - DNA, 20 bp, synthetic construct
  source 1..20: mol_type = other DNA
attatgcccaagtgttacct

SEQ ID NO: 88234 - DNA, 20 bp, synthetic construct
  source 1..20: mol_type = other DNA
cattatgcccaagtgttacc

SEQ ID NO: 88235 - DNA, 20 bp, synthetic construct
  source 1..20: mol_type = other DNA
tcattatgcccaagtgttac

SEQ ID NO: 88236 - DNA, 20 bp, synthetic construct
  source 1..20: mol_type = other DNA
atcattatgcccaagtgtta

SEQ ID NO: 88237 - DNA, 20 bp, synthetic construct
  source 1..20: mol_type = other DNA
catcattatgcccaagtgtt

SEQ ID NO: 88238 - DNA, 20 bp, synthetic construct
  source 1..20: mol_type = other DNA
ccatcattatgcccaagtgt

SEQ ID NO: 88239 - DNA, 20 bp, synthetic construct
  source 1..20: mol_type = other DNA
accatcattatgcccaagtg

SEQ ID NO: 88240 - DNA, 20 bp, synthetic construct
  source 1..20: mol_type = other DNA
taccatcattatgcccaagt

SEQ ID NO: 88241 - DNA, 20 bp, synthetic construct
  source 1..20: mol_type = other DNA
gtaccatcattatgcccaag

SEQ ID NO: 88242 - DNA, 20 bp, synthetic construct
  source 1..20: mol_type = other DNA
agtaccatcattatgcccaa

SEQ ID NO: 88243 - DNA, 20 bp, synthetic construct
  source 1..20: mol_type = other DNA
gagtaccatcattatgccca

SEQ ID NO: 88244 - DNA, 20 bp, synthetic construct
  source 1..20: mol_type = other DNA
tgagtaccatcattatgccc

SEQ ID NO: 88245 - DNA, 20 bp, synthetic construct
  source 1..20: mol_type = other DNA
atgagtaccatcattatgcc

SEQ ID NO: 88246 - DNA, 20 bp, synthetic construct
  source 1..20: mol_type = other DNA
aatgagtaccatcattatgc

SEQ ID NO: 88247 - DNA, 20 bp, synthetic construct
  source 1..20: mol_type = other DNA
aaatgagtaccatcattatg

SEQ ID NO: 88248 - DNA, 20 bp, synthetic construct
  source 1..20: mol_type = other DNA
aaaatgagtaccatcattat

SEQ ID NO: 88249 - DNA, 20 bp, synthetic construct
  source 1..20: mol_type = other DNA
caaaatgagtaccatcatta

SEQ ID NO: 88250 - DNA, 20 bp, synthetic construct
  source 1..20: mol_type = other DNA
acaaaatgagtaccatcatt

SEQ ID NO: 88251 - DNA, 20 bp, synthetic construct
  source 1..20: mol_type = other DNA
gacaaaatgagtaccatcat

SEQ ID NO: 88252 - DNA, 20 bp, synthetic construct
  source 1..20: mol_type = other DNA
tgacaaaatgagtaccatca

SEQ ID NO: 88253 - DNA, 20 bp, synthetic construct
  source 1..20: mol_type = other DNA
atgacaaaatgagtaccatc

SEQ ID NO: 88254 - DNA, 20 bp, synthetic construct
  source 1..20: mol_type = other DNA
aatgacaaaatgagtaccat

SEQ ID NO: 88255 - DNA, 20 bp, synthetic construct
  source 1..20: mol_type = other DNA
taatgacaaaatgagtacca

SEQ ID NO: 88256 - DNA, 20 bp, synthetic construct
  source 1..20: mol_type = other DNA
gtaatgacaaaatgagtacc

SEQ ID NO: 88257 - DNA, 20 bp, synthetic construct
  source 1..20: mol_type = other DNA
tgtaatgacaaaatgagtac

SEQ ID NO: 88258 - DNA, 20 bp, synthetic construct
  source 1..20: mol_type = other DNA
gtgtaatgacaaaatgagta

SEQ ID NO: 88259 - DNA, 20 bp, synthetic construct
  source 1..20: mol_type = other DNA
agtgtaatgacaaaatgagt

SEQ ID NO: 88260 - DNA, 20 bp, synthetic construct
  source 1..20: mol_type = other DNA
tagtgtaatgacaaaatgag

SEQ ID NO: 88261 - DNA, 20 bp, synthetic construct
  source 1..20: mol_type = other DNA
ctagtgtaatgacaaaatga

SEQ ID NO: 88262 - DNA, 20 bp, synthetic construct
  source 1..20: mol_type = other DNA
tctagtgtaatgacaaaatg

SEQ ID NO: 88263 - DNA, 20 bp, synthetic construct
  source 1..20: mol_type = other DNA
atctagtgtaatgacaaaat

SEQ ID NO: 88264 - DNA, 20 bp, synthetic construct
  source 1..20: mol_type = other DNA
tatctagtgtaatgacaaaa

SEQ ID NO: 88265 - DNA, 20 bp, synthetic construct
  source 1..20: mol_type = other DNA
atatctagtgtaatgacaaa

SEQ ID NO: 88266 - DNA, 20 bp, synthetic construct
  source 1..20: mol_type = other DNA
tatatctagtgtaatgacaa

SEQ ID NO: 88267 - DNA, 20 bp, synthetic construct
  source 1..20: mol_type = other DNA
ttatatctagtgtaatgaca

SEQ ID NO: 88268 - DNA, 20 bp, synthetic construct
  source 1..20: mol_type = other DNA
tttatatctagtgtaatgac

SEQ ID NO: 88269 - DNA, 20 bp, synthetic construct
  source 1..20: mol_type = other DNA
ctttatatctagtgtaatga

SEQ ID NO: 88270 - DNA, 20 bp, synthetic construct
  source 1..20: mol_type = other DNA
tctttatatctagtgtaatg

SEQ ID NO: 88271 - DNA, 20 bp, synthetic construct
  source 1..20: mol_type = other DNA
ctctttatatctagtgtaat

SEQ ID NO: 88272 - DNA, 20 bp, synthetic construct
  source 1..20: mol_type = other DNA
cctctttatatctagtgtaa

SEQ ID NO: 88273 - DNA, 20 bp, synthetic construct
  source 1..20: mol_type = other DNA
ccctctttatatctagtgta

SEQ ID NO: 88274 - DNA, 20 bp, synthetic construct
  source 1..20: mol_type = other DNA
gccctctttatatctagtgt

SEQ ID NO: 88275 - DNA, 20 bp, synthetic construct
  source 1..20: mol_type = other DNA
agccctctttatatctagtg

SEQ ID NO: 88276 - DNA, 20 bp, synthetic construct
  source 1..20: mol_type = other DNA
cagccctctttatatctagt

SEQ ID NO: 88277 - DNA, 20 bp, synthetic construct
  source 1..20: mol_type = other DNA
tcagccctctttatatctag

SEQ ID NO: 88278 - DNA, 20 bp, synthetic construct
  source 1..20: mol_type = other DNA
ctcagccctctttatatcta

SEQ ID NO: 88279 - DNA, 20 bp, synthetic construct
  source 1..20: mol_type = other DNA
gctcagccctctttatatct

SEQ ID NO: 88280 - DNA, 20 bp, synthetic construct
  source 1..20: mol_type = other DNA
agctcagccctctttatatc

SEQ ID NO: 88281 - DNA, 20 bp, synthetic construct
  source 1..20: mol_type = other DNA
tagctcagccctctttatat

SEQ ID NO: 88282 - DNA, 20 bp, synthetic construct
  source 1..20: mol_type = other DNA
gtagctcagccctctttata

SEQ ID NO: 88283 - DNA, 20 bp, synthetic construct
  source 1..20: mol_type = other DNA
tgtagctcagccctctttat

SEQ ID NO: 88284 - DNA, 20 bp, synthetic construct
  source 1..20: mol_type = other DNA
ttgtagctcagccctcttta

SEQ ID NO: 88285 - DNA, 20 bp, synthetic construct
  source 1..20: mol_type = other DNA
gttgtagctcagccctcttt

SEQ ID NO: 88286 - DNA, 20 bp, synthetic construct
  source 1..20: mol_type = other DNA
agttgtagctcagccctctt

SEQ ID NO: 88287 - DNA, 20 bp, synthetic construct
  source 1..20: mol_type = other DNA
gagttgtagctcagccctct

SEQ ID NO: 88288 - DNA, 20 bp, synthetic construct
  source 1..20: mol_type = other DNA
agagttgtagctcagccctc

SEQ ID NO: 88289 - DNA, 20 bp, synthetic construct
  source 1..20: mol_type = other DNA
cagagttgtagctcagccct

SEQ ID NO: 88290 - DNA, 20 bp, synthetic construct
  source 1..20: mol_type = other DNA
acagagttgtagctcagccc

SEQ ID NO: 88291 - DNA, 20 bp, synthetic construct
  source 1..20: mol_type = other DNA
aacagagttgtagctcagcc

SEQ ID NO: 88292 - DNA, 20 bp, synthetic construct
  source 1..20: mol_type = other DNA
aaacagagttgtagctcagc

SEQ ID NO: 88293 - DNA, 20 bp, synthetic construct
  source 1..20: mol_type = other DNA
caaacagagttgtagctcag

SEQ ID NO: 88294 - DNA, 20 bp, synthetic construct
  source 1..20: mol_type = other DNA
tcaaacagagttgtagctca

SEQ ID NO: 88295 - DNA, 20 bp, synthetic construct
  source 1..20: mol_type = other DNA
ctcaaacagagttgtagctc

SEQ ID NO: 88296 - DNA, 20 bp, synthetic construct
  source 1..20: mol_type = other DNA
cctcaaacagagttgtagct

SEQ ID NO: 88297 - DNA, 20 bp, synthetic construct
  source 1..20: mol_type = other DNA
tcctcaaacagagttgtagc

SEQ ID NO: 88298 - DNA, 20 bp, synthetic construct
  source 1..20: mol_type = other DNA
ttcctcaaacagagttgtag

SEQ ID NO: 88299 - DNA, 20 bp, synthetic construct
  source 1..20: mol_type = other DNA
cttcctcaaacagagttgta

SEQ ID NO: 88300 - DNA, 20 bp, synthetic construct
  source 1..20: mol_type = other DNA
acttcctcaaacagagttgt

SEQ ID NO: 88301 - DNA, 20 bp, synthetic construct
  source 1..20: mol_type = other DNA
cacttcctcaaacagagttg

SEQ ID NO: 88302 - DNA, 20 bp, synthetic construct
  source 1..20: mol_type = other DNA
acacttcctcaaacagagtt

SEQ ID NO: 88303 - DNA, 20 bp, synthetic construct
  source 1..20: mol_type = other DNA
tacacttcctcaaacagagt

SEQ ID NO: 88304 - DNA, 20 bp, synthetic construct
  source 1..20: mol_type = other DNA
ttacacttcctcaaacagag

SEQ ID NO: 88305 - DNA, 20 bp, synthetic construct
  source 1..20: mol_type = other DNA
cttacacttcctcaaacaga

SEQ ID NO: 88306 - DNA, 20 bp, synthetic construct
  source 1..20: mol_type = other DNA
acttacacttcctcaaacag

SEQ ID NO: 88307 - DNA, 20 bp, synthetic construct
  source 1..20: mol_type = other DNA
tacttacacttcctcaaaca

SEQ ID NO: 88308 - DNA, 20 bp, synthetic construct
  source 1..20: mol_type = other DNA
atacttacacttcctcaaac

SEQ ID NO: 88309 - DNA, 20 bp, synthetic construct
  source 1..20: mol_type = other DNA
catacttacacttcctcaaa

SEQ ID NO: 88310 - DNA, 20 bp, synthetic construct
  source 1..20: mol_type = other DNA
acatacttacacttcctcaa

SEQ ID NO: 88311 - DNA, 20 bp, synthetic construct
  source 1..20: mol_type = other DNA
tacatacttacacttcctca

SEQ ID NO: 88312 - DNA, 20 bp, synthetic construct
  source 1..20: mol_type = other DNA
atacatacttacacttcctc

SEQ ID NO: 88313 - DNA, 20 bp, synthetic construct
  source 1..20: mol_type = other DNA
tatacatacttacacttcct

SEQ ID NO: 88314 - DNA, 20 bp, synthetic construct
  source 1..20: mol_type = other DNA
atatacatacttacacttcc

SEQ ID NO: 88315 - DNA, 20 bp, synthetic construct
  source 1..20: mol_type = other DNA
catatacatacttacacttc

SEQ ID NO: 88316 - DNA, 20 bp, synthetic construct
  source 1..20: mol_type = other DNA
acatatacatacttacactt

SEQ ID NO: 88317 - DNA, 20 bp, synthetic construct
  source 1..20: mol_type = other DNA
aacatatacatacttacact

SEQ ID NO: 88318 - DNA, 20 bp, synthetic construct
  source 1..20: mol_type = other DNA
taacatatacatacttacac

SEQ ID NO: 88319 - DNA, 20 bp, synthetic construct
  source 1..20: mol_type = other DNA
ttaacatatacatacttaca

SEQ ID NO: 88320 - DNA, 20 bp, synthetic construct
  source 1..20: mol_type = other DNA
tttaacatatacatacttac

SEQ ID NO: 88321 - DNA, 20 bp, synthetic construct
  source 1..20: mol_type = other DNA
ttttaacatatacatactta

SEQ ID NO: 88322 - DNA, 20 bp, synthetic construct
  source 1..20: mol_type = other DNA
tttttaacatatacatactt

SEQ ID NO: 88323 - DNA, 20 bp, synthetic construct
  source 1..20: mol_type = other DNA
atttttaacatatacatact

SEQ ID NO: 88324 - DNA, 20 bp, synthetic construct
  source 1..20: mol_type = other DNA
tatttttaacatatacatac

SEQ ID NO: 88325 - DNA, 20 bp, synthetic construct
  source 1..20: mol_type = other DNA
ctatttttaacatatacata

SEQ ID NO: 88326 - DNA, 20 bp, synthetic construct
  source 1..20: mol_type = other DNA
actatttttaacatatacat

SEQ ID NO: 88327 - DNA, 20 bp, synthetic construct
  source 1..20: mol_type = other DNA
tactatttttaacatataca

SEQ ID NO: 88328 - DNA, 20 bp, synthetic construct
  source 1..20: mol_type = other DNA
ctactatttttaacatatac

SEQ ID NO: 88329 - DNA, 20 bp, synthetic construct
  source 1..20: mol_type = other DNA
tctactatttttaacatata

SEQ ID NO: 88330 - DNA, 20 bp, synthetic construct
  source 1..20: mol_type = other DNA
ttctactatttttaacatat

SEQ ID NO: 88331 - DNA, 20 bp, synthetic construct
  source 1..20: mol_type = other DNA
attctactatttttaacata

SEQ ID NO: 88332 - DNA, 20 bp, synthetic construct
  source 1..20: mol_type = other DNA
gattctactatttttaacat

SEQ ID NO: 88333 - DNA, 20 bp, synthetic construct
  source 1..20: mol_type = other DNA
tgattctactatttttaaca

SEQ ID NO: 88334 - DNA, 20 bp, synthetic construct
  source 1..20: mol_type = other DNA
gtgattctactatttttaac

SEQ ID NO: 88335 - DNA, 20 bp, synthetic construct
  source 1..20: mol_type = other DNA
ggtgattctactatttttaa

SEQ ID NO: 88336 - DNA, 20 bp, synthetic construct
  source 1..20: mol_type = other DNA
tggtgattctactattttta

SEQ ID NO: 88337 - DNA, 20 bp, synthetic construct
  source 1..20: mol_type = other DNA
ctggtgattctactattttt

SEQ ID NO: 88338 - DNA, 20 bp, synthetic construct
  source 1..20: mol_type = other DNA
cctggtgattctactatttt

SEQ ID NO: 88339 - DNA, 20 bp, synthetic construct
  source 1..20: mol_type = other DNA
tcctggtgattctactattt

SEQ ID NO: 88340 - DNA, 20 bp, synthetic construct
  source 1..20: mol_type = other DNA
ttcctggtgattctactatt

SEQ ID NO: 88341 - DNA, 20 bp, synthetic construct
  source 1..20: mol_type = other DNA
attcctggtgattctactat

SEQ ID NO: 88342 - DNA, 20 bp, synthetic construct
  source 1..20: mol_type = other DNA
aattcctggtgattctacta

SEQ ID NO: 88343 - DNA, 20 bp, synthetic construct
  source 1..20: mol_type = other DNA
caattcctggtgattctact

SEQ ID NO: 88344 - DNA, 20 bp, synthetic construct
  source 1..20: mol_type = other DNA
ccaattcctggtgattctac

SEQ ID NO: 88345 - DNA, 20 bp, synthetic construct
  source 1..20: mol_type = other DNA
cccaattcctggtgattcta

SEQ ID NO: 88346 - DNA, 20 bp, synthetic construct
  source 1..20: mol_type = other DNA
tcccaattcctggtgattct

SEQ ID NO: 88347 - DNA, 20 bp, synthetic construct
  source 1..20: mol_type = other DNA
ttcccaattcctggtgattc

SEQ ID NO: 88348 - DNA, 20 bp, synthetic construct
  source 1..20: mol_type = other DNA
tttcccaattcctggtgatt

SEQ ID NO: 88349 - DNA, 20 bp, synthetic construct
  source 1..20: mol_type = other DNA
gtttcccaattcctggtgat

SEQ ID NO: 88350 - DNA, 20 bp, synthetic construct
  source 1..20: mol_type = other DNA
ggtttcccaattcctggtga

SEQ ID NO: 88351 - DNA, 20 bp, synthetic construct
  source 1..20: mol_type = other DNA
gggtttcccaattcctggtg

SEQ ID NO: 88352 - DNA, 20 bp, synthetic construct
  source 1..20: mol_type = other DNA
tgggtttcccaattcctggt

SEQ ID NO: 88353 - DNA, 20 bp, synthetic construct
  source 1..20: mol_type = other DNA
atgggtttcccaattcctgg

SEQ ID NO: 88354 - DNA, 20 bp, synthetic construct
  source 1..20: mol_type = other DNA
tatgggtttcccaattcctg

SEQ ID NO: 88355 - DNA, 20 bp, synthetic construct
  source 1..20: mol_type = other DNA
atatgggtttcccaattcct

SEQ ID NO: 88356 - DNA, 20 bp, synthetic construct
  source 1..20: mol_type = other DNA
aatatgggtttcccaattcc

SEQ ID NO: 88357 - DNA, 20 bp, synthetic construct
  source 1..20: mol_type = other DNA
aaatatgggtttcccaattc

SEQ ID NO: 88358 - DNA, 20 bp, synthetic construct
  source 1..20: mol_type = other DNA
aaaatatgggtttcccaatt

SEQ ID NO: 88359 - DNA, 20 bp, synthetic construct
  source 1..20: mol_type = other DNA
aaaaatatgggtttcccaat

SEQ ID NO: 88360 - DNA, 20 bp, synthetic construct
  source 1..20: mol_type = other DNA
taaaaatatgggtttcccaa

SEQ ID NO: 88361 - DNA, 20 bp, synthetic construct
  source 1..20: mol_type = other DNA
ataaaaatatgggtttccca

SEQ ID NO: 88362 - DNA, 20 bp, synthetic construct
  source 1..20: mol_type = other DNA
aataaaaatatgggtttccc

SEQ ID NO: 88363 - DNA, 20 bp, synthetic construct
  source 1..20: mol_type = other DNA
gaataaaaatatgggtttcc

SEQ ID NO: 88364 - DNA, 20 bp, synthetic construct
  source 1..20: mol_type = other DNA
agaataaaaatatgggtttc

SEQ ID NO: 88365 - DNA, 20 bp, synthetic construct
  source 1..20: mol_type = other DNA
cagaataaaaatatgggttt

SEQ ID NO: 88366 - DNA, 20 bp, synthetic construct
  source 1..20: mol_type = other DNA
ccagaataaaaatatgggtt

SEQ ID NO: 88367 - DNA, 20 bp, synthetic construct
  source 1..20: mol_type = other DNA
cccagaataaaaatatgggt

SEQ ID NO: 88368 - DNA, 20 bp, synthetic construct
  source 1..20: mol_type = other DNA
gcccagaataaaaatatggg

SEQ ID NO: 88369 - DNA, 20 bp, synthetic construct
  source 1..20: mol_type = other DNA
agcccagaataaaaatatgg

SEQ ID NO: 88370 - DNA, 20 bp, synthetic construct
  source 1..20: mol_type = other DNA
gagcccagaataaaaatatg

SEQ ID NO: 88371 - DNA, 20 bp, synthetic construct
  source 1..20: mol_type = other DNA
agagcccagaataaaaatat

SEQ ID NO: 88372 - DNA, 20 bp, synthetic construct
  source 1..20: mol_type = other DNA
tagagcccagaataaaaata

SEQ ID NO: 88373 - DNA, 20 bp, synthetic construct
  source 1..20: mol_type = other DNA
gtagagcccagaataaaaat

SEQ ID NO: 88374 - DNA, 20 bp, synthetic construct
  source 1..20: mol_type = other DNA
ggtagagcccagaataaaaa

SEQ ID NO: 88375 - DNA, 20 bp, synthetic construct
  source 1..20: mol_type = other DNA
tggtagagcccagaataaaa

SEQ ID NO: 88376 - DNA, 20 bp, synthetic construct
  source 1..20: mol_type = other DNA
gtggtagagcccagaataaa

SEQ ID NO: 88377 - DNA, 20 bp, synthetic construct
  source 1..20: mol_type = other DNA
agtggtagagcccagaataa

SEQ ID NO: 88378 - DNA, 20 bp, synthetic construct
  source 1..20: mol_type = other DNA
aagtggtagagcccagaata

SEQ ID NO: 88379 - DNA, 20 bp, synthetic construct
  source 1..20: mol_type = other DNA
taagtggtagagcccagaat

SEQ ID NO: 88380 - DNA, 20 bp, synthetic construct
  source 1..20: mol_type = other DNA
ataagtggtagagcccagaa

SEQ ID NO: 88381 - DNA, 20 bp, synthetic construct
  source 1..20: mol_type = other DNA
aataagtggtagagcccaga

SEQ ID NO: 88382 - DNA, 20 bp, synthetic construct
  source 1..20: mol_type = other DNA
gaataagtggtagagcccag

SEQ ID NO: 88383 - DNA, 20 bp, synthetic construct
  source 1..20: mol_type = other DNA
tgaataagtggtagagccca

SEQ ID NO: 88384 - DNA, 20 bp, synthetic construct
  source 1..20: mol_type = other DNA
atgaataagtggtagagccc

SEQ ID NO: 88385 - DNA, 20 bp, synthetic construct
  source 1..20: mol_type = other DNA
gatgaataagtggtagagcc

SEQ ID NO: 88386 - DNA, 20 bp, synthetic construct
  source 1..20: mol_type = other DNA
tgatgaataagtggtagagc

SEQ ID NO: 88387 - DNA, 20 bp, synthetic construct
  source 1..20: mol_type = other DNA
atgatgaataagtggtagag

SEQ ID NO: 88388 - DNA, 20 bp, synthetic construct
  source 1..20: mol_type = other DNA
tatgatgaataagtggtaga

SEQ ID NO: 88389 - DNA, 20 bp, synthetic construct
  source 1..20: mol_type = other DNA
atatgatgaataagtggtag

SEQ ID NO: 88390 - DNA, 20 bp, synthetic construct
  source 1..20: mol_type = other DNA
tatatgatgaataagtggta

SEQ ID NO: 88391 - DNA, 20 bp, synthetic construct
  source 1..20: mol_type = other DNA
atatatgatgaataagtggt

SEQ ID NO: 88392 - DNA, 20 bp, synthetic construct
  source 1..20: mol_type = other DNA
aatatatgatgaataagtgg

SEQ ID NO: 88393 - DNA, 20 bp, synthetic construct
  source 1..20: mol_type = other DNA
taatatatgatgaataagtg

SEQ ID NO: 88394 - DNA, 20 bp, synthetic construct
  source 1..20: mol_type = other DNA
ttaatatatgatgaataagt

SEQ ID NO: 88395 - DNA, 20 bp, synthetic construct
  source 1..20: mol_type = other DNA
tttaatatatgatgaataag

SEQ ID NO: 88396 - DNA, 20 bp, synthetic construct
  source 1..20: mol_type = other DNA
ctttaatatatgatgaataa

SEQ ID NO: 88397 - DNA, 20 bp, synthetic construct
  source 1..20: mol_type = other DNA
gctttaatatatgatgaata

SEQ ID NO: 88398 - DNA, 20 bp, synthetic construct
  source 1..20: mol_type = other DNA
tgctttaatatatgatgaat

SEQ ID NO: 88399 - DNA, 20 bp, synthetic construct
  source 1..20: mol_type = other DNA
ttgctttaatatatgatgaa

SEQ ID NO: 88400 - DNA, 20 bp, synthetic construct
  source 1..20: mol_type = other DNA
cttgctttaatatatgatga

SEQ ID NO: 88401 - DNA, 20 bp, synthetic construct
  source 1..20: mol_type = other DNA
acttgctttaatatatgatg

SEQ ID NO: 88402 - DNA, 20 bp, synthetic construct
  source 1..20: mol_type = other DNA
gacttgctttaatatatgat

SEQ ID NO: 88403 - DNA, 20 bp, synthetic construct
  source 1..20: mol_type = other DNA
tgacttgctttaatatatga

SEQ ID NO: 88404 - DNA, 20 bp, synthetic construct
  source 1..20: mol_type = other DNA
ctgacttgctttaatatatg

SEQ ID NO: 88405 - DNA, 20 bp, synthetic construct
  source 1..20: mol_type = other DNA
tctgacttgctttaatatat

SEQ ID NO: 88406 - DNA, 20 bp, synthetic construct
  source 1..20: mol_type = other DNA
gtctgacttgctttaatata

SEQ ID NO: 88407 - DNA, 20 bp, synthetic construct
  source 1..20: mol_type = other DNA
tgtctgacttgctttaatat

SEQ ID NO: 88408 - DNA, 20 bp, synthetic construct
  source 1..20: mol_type = other DNA
gtgtctgacttgctttaata

SEQ ID NO: 88409 - DNA, 20 bp, synthetic construct
  source 1..20: mol_type = other DNA
agtgtctgacttgctttaat

SEQ ID NO: 88410 - DNA, 20 bp, synthetic construct
  source 1..20: mol_type = other DNA
gagtgtctgacttgctttaa

SEQ ID NO: 88411 - DNA, 20 bp, synthetic construct
  source 1..20: mol_type = other DNA
tgagtgtctgacttgcttta

SEQ ID NO: 88412 - DNA, 20 bp, synthetic construct
  source 1..20: mol_type = other DNA
atgagtgtctgacttgcttt

SEQ ID NO: 88413 - DNA, 20 bp, synthetic construct
  source 1..20: mol_type = other DNA
aatgagtgtctgacttgctt

SEQ ID NO: 88414 - DNA, 20 bp, synthetic construct
  source 1..20: mol_type = other DNA
gaatgagtgtctgacttgct

SEQ ID NO: 88415 - DNA, 20 bp, synthetic construct
  source 1..20: mol_type = other DNA
agaatgagtgtctgacttgc

SEQ ID NO: 88416 - DNA, 20 bp, synthetic construct
  source 1..20: mol_type = other DNA
cagaatgagtgtctgacttg

SEQ ID NO: 88417 - DNA, 20 bp, synthetic construct
  source 1..20: mol_type = other DNA
tcagaatgagtgtctgactt

SEQ ID NO: 88418 - DNA, 20 bp, synthetic construct
  source 1..20: mol_type = other DNA
ttcagaatgagtgtctgact

SEQ ID NO: 88419 - DNA, 20 bp, synthetic construct
  source 1..20: mol_type = other DNA
cttcagaatgagtgtctgac

SEQ ID NO: 88420 - DNA, 20 bp, synthetic construct
  source 1..20: mol_type = other DNA
acttcagaatgagtgtctga

SEQ ID NO: 88421 - DNA, 20 bp, synthetic construct
  source 1..20: mol_type = other DNA
aacttcagaatgagtgtctg

SEQ ID NO: 88422 - DNA, 20 bp, synthetic construct
  source 1..20: mol_type = other DNA
caacttcagaatgagtgtct

SEQ ID NO: 88423 - DNA, 20 bp, synthetic construct
  source 1..20: mol_type = other DNA
tcaacttcagaatgagtgtc

SEQ ID NO: 88424 - DNA, 20 bp, synthetic construct
  source 1..20: mol_type = other DNA
ctcaacttcagaatgagtgt

SEQ ID NO: 88425 - DNA, 20 bp, synthetic construct
  source 1..20: mol_type = other DNA
tctcaacttcagaatgagtg

SEQ ID NO: 88426 - DNA, 20 bp, synthetic construct
  source 1..20: mol_type = other DNA
atctcaacttcagaatgagt

SEQ ID NO: 88427 - DNA, 20 bp, synthetic construct
  source 1..20: mol_type = other DNA
aatctcaacttcagaatgag

SEQ ID NO: 88428 - DNA, 20 bp, synthetic construct
  source 1..20: mol_type = other DNA
aaatctcaacttcagaatga

SEQ ID NO: 88429 - DNA, 20 bp, synthetic construct
  source 1..20: mol_type = other DNA
gaaatctcaacttcagaatg

SEQ ID NO: 88430 - DNA, 20 bp, synthetic construct
  source 1..20: mol_type = other DNA
cgaaatctcaacttcagaat

SEQ ID NO: 88431 - DNA, 20 bp, synthetic construct
  source 1..20: mol_type = other DNA
gcgaaatctcaacttcagaa

SEQ ID NO: 88432 - DNA, 20 bp, synthetic construct
  source 1..20: mol_type = other DNA
tgcgaaatctcaacttcaga

SEQ ID NO: 88433 - DNA, 20 bp, synthetic construct
  source 1..20: mol_type = other DNA
ctgcgaaatctcaacttcag

SEQ ID NO: 88434 - DNA, 20 bp, synthetic construct
  source 1..20: mol_type = other DNA
actgcgaaatctcaacttca

SEQ ID NO: 88435 - DNA, 20 bp, synthetic construct
  source 1..20: mol_type = other DNA
cactgcgaaatctcaacttc

SEQ ID NO: 88436 - DNA, 20 bp, synthetic construct
  source 1..20: mol_type = other DNA
tcactgcgaaatctcaactt

SEQ ID NO: 88437 - DNA, 20 bp, synthetic construct
  source 1..20: mol_type = other DNA
ctcactgcgaaatctcaact

SEQ ID NO: 88438 - DNA, 20 bp, synthetic construct
  source 1..20: mol_type = other DNA
actcactgcgaaatctcaac

SEQ ID NO: 88439 - DNA, 20 bp, synthetic construct
  source 1..20: mol_type = other DNA
tactcactgcgaaatctcaa

SEQ ID NO: 88440 - DNA, 20 bp, synthetic construct
  source 1..20: mol_type = other DNA
ttactcactgcgaaatctca

SEQ ID NO: 88441 - DNA, 20 bp, synthetic construct
  source 1..20: mol_type = other DNA
tttactcactgcgaaatctc

SEQ ID NO: 88442 - DNA, 20 bp, synthetic construct
  source 1..20: mol_type = other DNA
ctttactcactgcgaaatct

SEQ ID NO: 88443 - DNA, 20 bp, synthetic construct
  source 1..20: mol_type = other DNA
actttactcactgcgaaatc

SEQ ID NO: 88444 - DNA, 20 bp, synthetic construct
  source 1..20: mol_type = other DNA
cactttactcactgcgaaat

SEQ ID NO: 88445 - DNA, 20 bp, synthetic construct
  source 1..20: mol_type = other DNA
acactttactcactgcgaaa

SEQ ID NO: 88446 - DNA, 20 bp, synthetic construct
  source 1..20: mol_type = other DNA
aacactttactcactgcgaa

SEQ ID NO: 88447 - DNA, 20 bp, synthetic construct
  source 1..20: mol_type = other DNA
taacactttactcactgcga

SEQ ID NO: 88448 - DNA, 20 bp, synthetic construct
  source 1..20: mol_type = other DNA
ttaacactttactcactgcg

SEQ ID NO: 88449 - DNA, 20 bp, synthetic construct
  source 1..20: mol_type = other DNA
attaacactttactcactgc

SEQ ID NO: 88450 - DNA, 20 bp, synthetic construct
  source 1..20: mol_type = other DNA
tattaacactttactcactg

SEQ ID NO: 88451 - DNA, 20 bp, synthetic construct
  source 1..20: mol_type = other DNA
ttattaacactttactcact

SEQ ID NO: 88452 - DNA, 20 bp, synthetic construct
  source 1..20: mol_type = other DNA
attattaacactttactcac

SEQ ID NO: 88453 - DNA, 20 bp, synthetic construct
  source 1..20: mol_type = other DNA
aattattaacactttactca

SEQ ID NO: 88454 - DNA, 20 bp, synthetic construct
  source 1..20: mol_type = other DNA
gaattattaacactttactc

SEQ ID NO: 88455 - DNA, 20 bp, synthetic construct
  source 1..20: mol_type = other DNA
agaattattaacactttact

SEQ ID NO: 88456 - DNA, 20 bp, synthetic construct
  source 1..20: mol_type = other DNA
aagaattattaacactttac

SEQ ID NO: 88457 - DNA, 20 bp, synthetic construct
  source 1..20: mol_type = other DNA
caagaattattaacacttta

SEQ ID NO: 88458 - DNA, 20 bp, synthetic construct
  source 1..20: mol_type = other DNA
gcaagaattattaacacttt

SEQ ID NO: 88459 - DNA, 20 bp, synthetic construct
  source 1..20: mol_type = other DNA
ggcaagaattattaacactt

SEQ ID NO: 88460 - DNA, 20 bp, synthetic construct
  source 1..20: mol_type = other DNA
aggcaagaattattaacact

SEQ ID NO: 88461 - DNA, 20 bp, synthetic construct
  source 1..20: mol_type = other DNA
taggcaagaattattaacac

SEQ ID NO: 88462 - DNA, 20 bp, synthetic construct
  source 1..20: mol_type = other DNA
ctaggcaagaattattaaca

SEQ ID NO: 88463 - DNA, 20 bp, synthetic construct
  source 1..20: mol_type = other DNA
actaggcaagaattattaac

SEQ ID NO: 88464 - DNA, 20 bp, synthetic construct
  source 1..20: mol_type = other DNA
gactaggcaagaattattaa

SEQ ID NO: 88465 - DNA, 20 bp, synthetic construct
  source 1..20: mol_type = other DNA
agactaggcaagaattatta

SEQ ID NO: 88466 - DNA, 20 bp, synthetic construct
  source 1..20: mol_type = other DNA
tagactaggcaagaattatt

SEQ ID NO: 88467 - DNA, 20 bp, synthetic construct
  source 1..20: mol_type = other DNA
gtagactaggcaagaattat

SEQ ID NO: 88468 - DNA, 20 bp, synthetic construct
  source 1..20: mol_type = other DNA
tgtagactaggcaagaatta

SEQ ID NO: 88469 - DNA, 20 bp, synthetic construct
  source 1..20: mol_type = other DNA
atgtagactaggcaagaatt

SEQ ID NO: 88470 - DNA, 20 bp, synthetic construct
  source 1..20: mol_type = other DNA
aatgtagactaggcaagaat

SEQ ID NO: 88471 - DNA, 20 bp, synthetic construct
  source 1..20: mol_type = other DNA
taatgtagactaggcaagaa

SEQ ID NO: 88472 - DNA, 20 bp, synthetic construct
  source 1..20: mol_type = other DNA
ataatgtagactaggcaaga

SEQ ID NO: 88473 - DNA, 20 bp, synthetic construct
  source 1..20: mol_type = other DNA
cataatgtagactaggcaag

SEQ ID NO: 88474 - DNA, 20 bp, synthetic construct
  source 1..20: mol_type = other DNA
ccataatgtagactaggcaa

SEQ ID NO: 88475 - DNA, 20 bp, synthetic construct
  source 1..20: mol_type = other DNA
cccataatgtagactaggca

SEQ ID NO: 88476 - DNA, 20 bp, synthetic construct
  source 1..20: mol_type = other DNA
tcccataatgtagactaggc

SEQ ID NO: 88477 - DNA, 20 bp, synthetic construct
  source 1..20: mol_type = other DNA
atcccataatgtagactagg

SEQ ID NO: 88478 - DNA, 20 bp, synthetic construct
  source 1..20: mol_type = other DNA
aatcccataatgtagactag

SEQ ID NO: 88479 - DNA, 20 bp, synthetic construct
  source 1..20: mol_type = other DNA
caatcccataatgtagacta

SEQ ID NO: 88480 - DNA, 20 bp, synthetic construct
  source 1..20: mol_type = other DNA
acaatcccataatgtagact

SEQ ID NO: 88481 - DNA, 20 bp, synthetic construct
  source 1..20: mol_type = other DNA
cacaatcccataatgtagac

SEQ ID NO: 88482 - DNA, 20 bp, synthetic construct
  source 1..20: mol_type = other DNA
tcacaatcccataatgtaga

SEQ ID NO: 88483 - DNA, 20 bp, synthetic construct
  source 1..20: mol_type = other DNA
atcacaatcccataatgtag

SEQ ID NO: 88484 - DNA, 20 bp, synthetic construct
  source 1..20: mol_type = other DNA
catcacaatcccataatgta

SEQ ID NO: 88485 - DNA, 20 bp, synthetic construct
  source 1..20: mol_type = other DNA
tcatcacaatcccataatgt

SEQ ID NO: 88486 - DNA, 20 bp, synthetic construct
  source 1..20: mol_type = other DNA
ctcatcacaatcccataatg

SEQ ID NO: 88487 - DNA, 20 bp, synthetic construct
  source 1..20: mol_type = other DNA
tctcatcacaatcccataat

SEQ ID NO: 88488 - DNA, 20 bp, synthetic construct
  source 1..20: mol_type = other DNA
atctcatcacaatcccataa

SEQ ID NO: 88489 - DNA, 20 bp, synthetic construct
  source 1..20: mol_type = other DNA
aatctcatcacaatcccata

SEQ ID NO: 88490 - DNA, 20 bp, synthetic construct
  source 1..20: mol_type = other DNA
gaatctcatcacaatcccat

SEQ ID NO: 88491 - DNA, 20 bp, synthetic construct
  source 1..20: mol_type = other DNA
ggaatctcatcacaatccca

SEQ ID NO: 88492 - DNA, 20 bp, synthetic construct
  source 1..20: mol_type = other DNA
aggaatctcatcacaatccc

SEQ ID NO: 88493 - DNA, 20 bp, synthetic construct
  source 1..20: mol_type = other DNA
taggaatctcatcacaatcc

SEQ ID NO: 88494 - DNA, 20 bp, synthetic construct
  source 1..20: mol_type = other DNA
ataggaatctcatcacaatc

SEQ ID NO: 88495 - DNA, 20 bp, synthetic construct
  source 1..20: mol_type = other DNA
tataggaatctcatcacaat

SEQ ID NO: 88496 - DNA, 20 bp, synthetic construct
  source 1..20: mol_type = other DNA
ttataggaatctcatcacaa

SEQ ID NO: 88497 - DNA, 20 bp, synthetic construct
  source 1..20: mol_type = other DNA
cttataggaatctcatcaca

SEQ ID NO: 88498 - DNA, 20 bp, synthetic construct
  source 1..20: mol_type = other DNA
ccttataggaatctcatcac

SEQ ID NO: 88499 - DNA, 20 bp, synthetic construct
  source 1..20: mol_type = other DNA
accttataggaatctcatca

SEQ ID NO: 88500 - DNA, 20 bp, synthetic construct
  source 1..20: mol_type = other DNA
aaccttataggaatctcatc

SEQ ID NO: 88501 - DNA, 20 bp, synthetic construct
  source 1..20: mol_type = other DNA
gaaccttataggaatctcat

SEQ ID NO: 88502 - DNA, 20 bp, synthetic construct
  source 1..20: mol_type = other DNA
tgaaccttataggaatctca

SEQ ID NO: 88503 - DNA, 20 bp, synthetic construct
  source 1..20: mol_type = other DNA
atgaaccttataggaatctc

SEQ ID NO: 88504 - DNA, 20 bp, synthetic construct
  source 1..20: mol_type = other DNA
tatgaaccttataggaatct

SEQ ID NO: 88505 - DNA, 20 bp, synthetic construct
  source 1..20: mol_type = other DNA
ttatgaaccttataggaatc

SEQ ID NO: 88506 - DNA, 20 bp, synthetic construct
  source 1..20: mol_type = other DNA
tttatgaaccttataggaat

SEQ ID NO: 88507 - DNA, 20 bp, synthetic construct
  source 1..20: mol_type = other DNA
atttatgaaccttataggaa

SEQ ID NO: 88508 - DNA, 20 bp, synthetic construct
  source 1..20: mol_type = other DNA
tatttatgaaccttatagga

SEQ ID NO: 88509 - DNA, 20 bp, synthetic construct
  source 1..20: mol_type = other DNA
gtatttatgaaccttatagg

SEQ ID NO: 88510 - DNA, 20 bp, synthetic construct
  source 1..20: mol_type = other DNA
tgtatttatgaaccttatag

SEQ ID NO: 88511 - DNA, 20 bp, synthetic construct
  source 1..20: mol_type = other DNA
ctgtatttatgaaccttata

SEQ ID NO: 88512 - DNA, 20 bp, synthetic construct
  source 1..20: mol_type = other DNA
tctgtatttatgaaccttat

SEQ ID NO: 88513 - DNA, 20 bp, synthetic construct
  source 1..20: mol_type = other DNA
atctgtatttatgaacctta

SEQ ID NO: 88514 - DNA, 20 bp, synthetic construct
  source 1..20: mol_type = other DNA
tatctgtatttatgaacctt

SEQ ID NO: 88515 - DNA, 20 bp, synthetic construct
  source 1..20: mol_type = other DNA
atatctgtatttatgaacct

SEQ ID NO: 88516 - DNA, 20 bp, synthetic construct
  source 1..20: mol_type = other DNA
tatatctgtatttatgaacc

SEQ ID NO: 88517 - DNA, 20 bp, synthetic construct
  source 1..20: mol_type = other DNA
atatatctgtatttatgaac

SEQ ID NO: 88518 - DNA, 20 bp, synthetic construct
  source 1..20: mol_type = other DNA
aatatatctgtatttatgaa

SEQ ID NO: 88519 - DNA, 20 bp, synthetic construct
  source 1..20: mol_type = other DNA
caatatatctgtatttatga

SEQ ID NO: 88520 - DNA, 20 bp, synthetic construct
  source 1..20: mol_type = other DNA
acaatatatctgtatttatg

SEQ ID NO: 88521 - DNA, 20 bp, synthetic construct
  source 1..20: mol_type = other DNA
tacaatatatctgtatttat

SEQ ID NO: 88522 - DNA, 20 bp, synthetic construct
  source 1..20: mol_type = other DNA
ttacaatatatctgtattta

SEQ ID NO: 88523 - DNA, 20 bp, synthetic construct
  source 1..20: mol_type = other DNA
tttacaatatatctgtattt

SEQ ID NO: 88524 - DNA, 20 bp, synthetic construct
  source 1..20: mol_type = other DNA
ttttacaatatatctgtatt

SEQ ID NO: 88525 - DNA, 20 bp, synthetic construct
  source 1..20: mol_type = other DNA
gttttacaatatatctgtat

SEQ ID NO: 88526 - DNA, 20 bp, synthetic construct
  source 1..20: mol_type = other DNA
agttttacaatatatctgta

SEQ ID NO: 88527 - DNA, 20 bp, synthetic construct
  source 1..20: mol_type = other DNA
tagttttacaatatatctgt

SEQ ID NO: 88528 - DNA, 20 bp, synthetic construct
  source 1..20: mol_type = other DNA
atagttttacaatatatctg

SEQ ID NO: 88529 - DNA, 20 bp, synthetic construct
  source 1..20: mol_type = other DNA
tatagttttacaatatatct

SEQ ID NO: 88530 - DNA, 20 bp, synthetic construct
  source 1..20: mol_type = other DNA
ttatagttttacaatatatc

SEQ ID NO: 88531 - DNA, 20 bp, synthetic construct
  source 1..20: mol_type = other DNA
tttatagttttacaatatat

SEQ ID NO: 88532 - DNA, 20 bp, synthetic construct
  source 1..20: mol_type = other DNA
ctttatagttttacaatata

SEQ ID NO: 88533 - DNA, 20 bp, synthetic construct
  source 1..20: mol_type = other DNA
actttatagttttacaatat

SEQ ID NO: 88534 - DNA, 20 bp, synthetic construct
  source 1..20: mol_type = other DNA
aactttatagttttacaata

SEQ ID NO: 88535 - DNA, 20 bp, synthetic construct
  source 1..20: mol_type = other DNA
aaactttatagttttacaat

SEQ ID NO: 88536 - DNA, 20 bp, synthetic construct
  source 1..20: mol_type = other DNA
aaaactttatagttttacaa

SEQ ID NO: 88537 - DNA, 20 bp, synthetic construct
  source 1..20: mol_type = other DNA
caaaactttatagttttaca

SEQ ID NO: 88538 - DNA, 20 bp, synthetic construct
  source 1..20: mol_type = other DNA
acaaaactttatagttttac

SEQ ID NO: 88539 - DNA, 20 bp, synthetic construct
  source 1..20: mol_type = other DNA
tacaaaactttatagtttta

SEQ ID NO: 88540 - DNA, 20 bp, synthetic construct
  source 1..20: mol_type = other DNA
ttacaaaactttatagtttt

SEQ ID NO: 88541 - DNA, 20 bp, synthetic construct
  source 1..20: mol_type = other DNA
tttacaaaactttatagttt

SEQ ID NO: 88542 - DNA, 20 bp, synthetic construct
  source 1..20: mol_type = other DNA
ctttacaaaactttatagtt

SEQ ID NO: 88543 - DNA, 20 bp, synthetic construct
  source 1..20: mol_type = other DNA
actttacaaaactttatagt

SEQ ID NO: 88544 - DNA, 20 bp, synthetic construct
  source 1..20: mol_type = other DNA
tactttacaaaactttatag

SEQ ID NO: 88545 - DNA, 20 bp, synthetic construct
  source 1..20: mol_type = other DNA
gtactttacaaaactttata

SEQ ID NO: 88546 - DNA, 20 bp, synthetic construct
  source 1..20: mol_type = other DNA
ggtactttacaaaactttat

SEQ ID NO: 88547 - DNA, 20 bp, synthetic construct
  source 1..20: mol_type = other DNA
aggtactttacaaaacttta

SEQ ID NO: 88548 - DNA, 20 bp, synthetic construct
  source 1..20: mol_type = other DNA
gaggtactttacaaaacttt

SEQ ID NO: 88549 - DNA, 20 bp, synthetic construct
  source 1..20: mol_type = other DNA
agaggtactttacaaaactt

SEQ ID NO: 88550 - DNA, 20 bp, synthetic construct
  source 1..20: mol_type = other DNA
gagaggtactttacaaaact

SEQ ID NO: 88551 - DNA, 20 bp, synthetic construct
  source 1..20: mol_type = other DNA
agagaggtactttacaaaac

SEQ ID NO: 88552 - DNA, 20 bp, synthetic construct
  source 1..20: mol_type = other DNA
tagagaggtactttacaaaa

SEQ ID NO: 88553 - DNA, 20 bp, synthetic construct
  source 1..20: mol_type = other DNA
ttagagaggtactttacaaa

SEQ ID NO: 88554 - DNA, 20 bp, synthetic construct
  source 1..20: mol_type = other DNA
attagagaggtactttacaa

SEQ ID NO: 88555 - DNA, 20 bp, synthetic construct
  source 1..20: mol_type = other DNA
tattagagaggtactttaca

SEQ ID NO: 88556 - DNA, 20 bp, synthetic construct
  source 1..20: mol_type = other DNA
atattagagaggtactttac

SEQ ID NO: 88557 - DNA, 20 bp, synthetic construct
  source 1..20: mol_type = other DNA
catattagagaggtacttta

SEQ ID NO: 88558 - DNA, 20 bp, synthetic construct
  source 1..20: mol_type = other DNA
tcatattagagaggtacttt

SEQ ID NO: 88559 - DNA, 20 bp, synthetic construct
  source 1..20: mol_type = other DNA
ctcatattagagaggtactt

SEQ ID NO: 88560 - DNA, 20 bp, synthetic construct
  source 1..20: mol_type = other DNA
cctcatattagagaggtact

SEQ ID NO: 88561 - DNA, 20 bp, synthetic construct
  source 1..20: mol_type = other DNA
gcctcatattagagaggtac

SEQ ID NO: 88562 - DNA, 20 bp, synthetic construct
  source 1..20: mol_type = other DNA
tgcctcatattagagaggta

SEQ ID NO: 88563 - DNA, 20 bp, synthetic construct
  source 1..20: mol_type = other DNA
ttgcctcatattagagaggt

SEQ ID NO: 88564 - DNA, 20 bp, synthetic construct
  source 1..20: mol_type = other DNA
tttgcctcatattagagagg

SEQ ID NO: 88565 - DNA, 20 bp, synthetic construct
  source 1..20: mol_type = other DNA
gtttgcctcatattagagag

SEQ ID NO: 88566 - DNA, 20 bp, synthetic construct
  source 1..20: mol_type = other DNA
tgtttgcctcatattagaga

SEQ ID NO: 88567 - DNA, 20 bp, synthetic construct
  source 1..20: mol_type = other DNA
gtgtttgcctcatattagag

SEQ ID NO: 88568 - DNA, 20 bp, synthetic construct
  source 1..20: mol_type = other DNA
tgtgtttgcctcatattaga

SEQ ID NO: 88569 - DNA, 20 bp, synthetic construct
  source 1..20: mol_type = other DNA
ctgtgtttgcctcatattag

SEQ ID NO: 88570 - DNA, 20 bp, synthetic construct
  source 1..20: mol_type = other DNA
actgtgtttgcctcatatta

SEQ ID NO: 88571 - DNA, 20 bp, synthetic construct
  source 1..20: mol_type = other DNA
tactgtgtttgcctcatatt

SEQ ID NO: 88572 - DNA, 20 bp, synthetic construct
  source 1..20: mol_type = other DNA
atactgtgtttgcctcatat

SEQ ID NO: 88573 - DNA, 20 bp, synthetic construct
  source 1..20: mol_type = other DNA
catactgtgtttgcctcata

SEQ ID NO: 88574 - DNA, 20 bp, synthetic construct
  source 1..20: mol_type = other DNA
acatactgtgtttgcctcat

SEQ ID NO: 88575 - DNA, 20 bp, synthetic construct
  source 1..20: mol_type = other DNA
tacatactgtgtttgcctca

SEQ ID NO: 88576 - DNA, 20 bp, synthetic construct
  source 1..20: mol_type = other DNA
ttacatactgtgtttgcctc

SEQ ID NO: 88577 - DNA, 20 bp, synthetic construct
  source 1..20: mol_type = other DNA
gttacatactgtgtttgcct

SEQ ID NO: 88578 - DNA, 20 bp, synthetic construct
  source 1..20: mol_type = other DNA
tgttacatactgtgtttgcc

SEQ ID NO: 88579 - DNA, 20 bp, synthetic construct
  source 1..20: mol_type = other DNA
gtgttacatactgtgtttgc

SEQ ID NO: 88580 - DNA, 20 bp, synthetic construct
  source 1..20: mol_type = other DNA
agtgttacatactgtgtttg

SEQ ID NO: 88581 - DNA, 20 bp, synthetic construct
  source 1..20: mol_type = other DNA
tagtgttacatactgtgttt

SEQ ID NO: 88582 - DNA, 20 bp, synthetic construct
  source 1..20: mol_type = other DNA
atagtgttacatactgtgtt

SEQ ID NO: 88583 - DNA, 20 bp, synthetic construct
  source 1..20: mol_type = other DNA
aatagtgttacatactgtgt

SEQ ID NO: 88584 - DNA, 20 bp, synthetic construct
  source 1..20: mol_type = other DNA
aaatagtgttacatactgtg

SEQ ID NO: 88585 - DNA, 20 bp, synthetic construct
  source 1..20: mol_type = other DNA
caaatagtgttacatactgt

SEQ ID NO: 88586 - DNA, 20 bp, synthetic construct
  source 1..20: mol_type = other DNA
ccaaatagtgttacatactg

SEQ ID NO: 88587 - DNA, 20 bp, synthetic construct
  source 1..20: mol_type = other DNA
tccaaatagtgttacatact

SEQ ID NO: 88588 - DNA, 20 bp, synthetic construct
  source 1..20: mol_type = other DNA
ctccaaatagtgttacatac

SEQ ID NO: 88589 - DNA, 20 bp, synthetic construct
  source 1..20: mol_type = other DNA
cctccaaatagtgttacata

SEQ ID NO: 88590 - DNA, 20 bp, synthetic construct
  source 1..20: mol_type = other DNA
ccctccaaatagtgttacat

SEQ ID NO: 88591 - DNA, 20 bp, synthetic construct
  source 1..20: mol_type = other DNA
tccctccaaatagtgttaca

SEQ ID NO: 88592 - DNA, 20 bp, synthetic construct
  source 1..20: mol_type = other DNA
gtccctccaaatagtgttac

SEQ ID NO: 88593 - DNA, 20 bp, synthetic construct
  source 1..20: mol_type = other DNA
ggtccctccaaatagtgtta

SEQ ID NO: 88594 - DNA, 20 bp, synthetic construct
  source 1..20: mol_type = other DNA
cggtccctccaaatagtgtt

SEQ ID NO: 88595 - DNA, 20 bp, synthetic construct
  source 1..20: mol_type = other DNA
acggtccctccaaatagtgt

SEQ ID NO: 88596 - DNA, 20 bp, synthetic construct
  source 1..20: mol_type = other DNA
tacggtccctccaaatagtg

SEQ ID NO: 88597 - DNA, 20 bp, synthetic construct
  source 1..20: mol_type = other DNA
atacggtccctccaaatagt

SEQ ID NO: 88598 - DNA, 20 bp, synthetic construct
  source 1..20: mol_type = other DNA
aatacggtccctccaaatag

SEQ ID NO: 88599 - DNA, 20 bp, synthetic construct
  source 1..20: mol_type = other DNA
aaatacggtccctccaaata

SEQ ID NO: 88600 - DNA, 20 bp, synthetic construct
  source 1..20: mol_type = other DNA
gaaatacggtccctccaaat

SEQ ID NO: 88601 - DNA, 20 bp, synthetic construct
  source 1..20: mol_type = other DNA
ggaaatacggtccctccaaa

SEQ ID NO: 88602 - DNA, 20 bp, synthetic construct
  source 1..20: mol_type = other DNA
aggaaatacggtccctccaa

SEQ ID NO: 88603 - DNA, 20 bp, synthetic construct
  source 1..20: mol_type = other DNA
aaggaaatacggtccctcca

SEQ ID NO: 88604 - DNA, 20 bp, synthetic construct
  source 1..20: mol_type = other DNA
taaggaaatacggtccctcc

SEQ ID NO: 88605 - DNA, 20 bp, synthetic construct
  source 1..20: mol_type = other DNA
ataaggaaatacggtccctc

SEQ ID NO: 88606 - DNA, 20 bp, synthetic construct
  source 1..20: mol_type = other DNA
gataaggaaatacggtccct

SEQ ID NO: 88607 - DNA, 20 bp, synthetic construct
  source 1..20: mol_type = other DNA
agataaggaaatacggtccc

SEQ ID NO: 88608 - DNA, 20 bp, synthetic construct
  source 1..20: mol_type = other DNA
aagataaggaaatacggtcc

SEQ ID NO: 88609 - DNA, 20 bp, synthetic construct
  source 1..20: mol_type = other DNA
aaagataaggaaatacggtc

SEQ ID NO: 88610 - DNA, 20 bp, synthetic construct
  source 1..20: mol_type = other DNA
aaaagataaggaaatacggt

SEQ ID NO: 88611 - DNA, 20 bp, synthetic construct
  source 1..20: mol_type = other DNA
aaaaagataaggaaatacgg

SEQ ID NO: 88612 - DNA, 20 bp, synthetic construct
  source 1..20: mol_type = other DNA
taaaaagataaggaaatacg

SEQ ID NO: 88613 - DNA, 20 bp, synthetic construct
  source 1..20: mol_type = other DNA
ctaaaaagataaggaaatac

SEQ ID NO: 88614 - DNA, 20 bp, synthetic construct
  source 1..20: mol_type = other DNA
gctaaaaagataaggaaata

SEQ ID NO: 88615 - DNA, 20 bp, synthetic construct
  source 1..20: mol_type = other DNA
tgctaaaaagataaggaaat

SEQ ID NO: 88616 - DNA, 20 bp, synthetic construct
  source 1..20: mol_type = other DNA
ctgctaaaaagataaggaaa

SEQ ID NO: 88617 - DNA, 20 bp, synthetic construct
  source 1..20: mol_type = other DNA
gctgctaaaaagataaggaa

SEQ ID NO: 88618 - DNA, 20 bp, synthetic construct
  source 1..20: mol_type = other DNA
agctgctaaaaagataagga

SEQ ID NO: 88619 - DNA, 20 bp, synthetic construct
  source 1..20: mol_type = other DNA
aagctgctaaaaagataagg

SEQ ID NO: 88620 - DNA, 20 bp, synthetic construct
  source 1..20: mol_type = other DNA
aaagctgctaaaaagataag

SEQ ID NO: 88621 - DNA, 20 bp, synthetic construct
  source 1..20: mol_type = other DNA
caaagctgctaaaaagataa

SEQ ID NO: 88622 - DNA, 20 bp, synthetic construct
  source 1..20: mol_type = other DNA
acaaagctgctaaaaagata

SEQ ID NO: 88623 - DNA, 20 bp, synthetic construct
  source 1..20: mol_type = other DNA
aacaaagctgctaaaaagat

SEQ ID NO: 88624 - DNA, 20 bp, synthetic construct
  source 1..20: mol_type = other DNA
aaacaaagctgctaaaaaga

SEQ ID NO: 88625 - DNA, 20 bp, synthetic construct
  source 1..20: mol_type = other DNA
taaacaaagctgctaaaaag

SEQ ID NO: 88626 - DNA, 20 bp, synthetic construct
  source 1..20: mol_type = other DNA
ataaacaaagctgctaaaaa

SEQ ID NO: 88627 - DNA, 20 bp, synthetic construct
  source 1..20: mol_type = other DNA
gataaacaaagctgctaaaa

SEQ ID NO: 88628 - DNA, 20 bp, synthetic construct
  source 1..20: mol_type = other DNA
tgataaacaaagctgctaaa

SEQ ID NO: 88629 - DNA, 20 bp, synthetic construct
  source 1..20: mol_type = other DNA
ctgataaacaaagctgctaa

SEQ ID NO: 88630 - DNA, 20 bp, synthetic construct
  source 1..20: mol_type = other DNA
actgataaacaaagctgcta

SEQ ID NO: 88631 - DNA, 20 bp, synthetic construct
  source 1..20: mol_type = other DNA
tactgataaacaaagctgct

SEQ ID NO: 88632 - DNA, 20 bp, synthetic construct
  source 1..20: mol_type = other DNA
gtactgataaacaaagctgc

SEQ ID NO: 88633 - DNA, 20 bp, synthetic construct
  source 1..20: mol_type = other DNA
tgtactgataaacaaagctg

SEQ ID NO: 88634 - DNA, 20 bp, synthetic construct
  source 1..20: mol_type = other DNA
atgtactgataaacaaagct

SEQ ID NO: 88635 - DNA, 20 bp, synthetic construct
  source 1..20: mol_type = other DNA
aatgtactgataaacaaagc

SEQ ID NO: 88636 - DNA, 20 bp, synthetic construct
  source 1..20: mol_type = other DNA
gaatgtactgataaacaaag

SEQ ID NO: 88637 - DNA, 20 bp, synthetic construct
  source 1..20: mol_type = other DNA
agaatgtactgataaacaaa

SEQ ID NO: 88638 - DNA, 20 bp, synthetic construct
  source 1..20: mol_type = other DNA
tagaatgtactgataaacaa

SEQ ID NO: 88639 - DNA, 20 bp, synthetic construct
  source 1..20: mol_type = other DNA
atagaatgtactgataaaca

SEQ ID NO: 88640 - DNA, 20 bp, synthetic construct
  source 1..20: mol_type = other DNA
tatagaatgtactgataaac

SEQ ID NO: 88641 - DNA, 20 bp, synthetic construct
  source 1..20: mol_type = other DNA
ttatagaatgtactgataaa

SEQ ID NO: 88642 - DNA, 20 bp, synthetic construct
  source 1..20: mol_type = other DNA
tttatagaatgtactgataa

SEQ ID NO: 88643 - DNA, 20 bp, synthetic construct
  source 1..20: mol_type = other DNA
gtttatagaatgtactgata

SEQ ID NO: 88644 - DNA, 20 bp, synthetic construct
  source 1..20: mol_type = other DNA
tgtttatagaatgtactgat

SEQ ID NO: 88645 - DNA, 20 bp, synthetic construct
  source 1..20: mol_type = other DNA
atgtttatagaatgtactga

SEQ ID NO: 88646 - DNA, 20 bp, synthetic construct
  source 1..20: mol_type = other DNA
aatgtttatagaatgtactg

SEQ ID NO: 88647 - DNA, 20 bp, synthetic construct
  source 1..20: mol_type = other DNA
aaatgtttatagaatgtact

SEQ ID NO: 88648 - DNA, 20 bp, synthetic construct
  source 1..20: mol_type = other DNA
taaatgtttatagaatgtac

SEQ ID NO: 88649 - DNA, 20 bp, synthetic construct
  source 1..20: mol_type = other DNA
ataaatgtttatagaatgta

SEQ ID NO: 88650 - DNA, 20 bp, synthetic construct
  source 1..20: mol_type = other DNA
aataaatgtttatagaatgt

SEQ ID NO: 88651 - DNA, 20 bp, synthetic construct
  source 1..20: mol_type = other DNA
aaataaatgtttatagaatg

SEQ ID NO: 88652 - DNA, 20 bp, synthetic construct
  source 1..20: mol_type = other DNA
aaaataaatgtttatagaat

SEQ ID NO: 88653 - DNA, 20 bp, synthetic construct
  source 1..20: mol_type = other DNA
aaaaataaatgtttatagaa

SEQ ID NO: 88654 - DNA, 20 bp, synthetic construct
  source 1..20: mol_type = other DNA
caaaaataaatgtttataga

SEQ ID NO: 88655 - DNA, 20 bp, synthetic construct
  source 1..20: mol_type = other DNA
ccaaaaataaatgtttatag

SEQ ID NO: 88656 - DNA, 20 bp, synthetic construct
  source 1..20: mol_type = other DNA
gccaaaaataaatgtttata

SEQ ID NO: 88657 - DNA, 20 bp, synthetic construct
  source 1..20: mol_type = other DNA
agccaaaaataaatgtttat

SEQ ID NO: 88658 - DNA, 20 bp, synthetic construct
  source 1..20: mol_type = other DNA
aagccaaaaataaatgttta

SEQ ID NO: 88659 - DNA, 20 bp, synthetic construct
  source 1..20: mol_type = other DNA
taagccaaaaataaatgttt

SEQ ID NO: 88660 - DNA, 20 bp, synthetic construct
  source 1..20: mol_type = other DNA
gtaagccaaaaataaatgtt

SEQ ID NO: 88661 - DNA, 20 bp, synthetic construct
  source 1..20: mol_type = other DNA
tgtaagccaaaaataaatgt

SEQ ID NO: 88662 - DNA, 20 bp, synthetic construct
  source 1..20: mol_type = other DNA
atgtaagccaaaaataaatg

SEQ ID NO: 88663 - DNA, 20 bp, synthetic construct
  source 1..20: mol_type = other DNA
aatgtaagccaaaaataaat

SEQ ID NO: 88664 - DNA, 20 bp, synthetic construct
  source 1..20: mol_type = other DNA
caatgtaagccaaaaataaa

SEQ ID NO: 88665 - DNA, 20 bp, synthetic construct
  source 1..20: mol_type = other DNA
acaatgtaagccaaaaataa

SEQ ID NO: 88666 - DNA, 20 bp, synthetic construct
  source 1..20: mol_type = other DNA
tacaatgtaagccaaaaata

SEQ ID NO: 88667 - DNA, 20 bp, synthetic construct
  source 1..20: mol_type = other DNA
ctacaatgtaagccaaaaat

SEQ ID NO: 88668 - DNA, 20 bp, synthetic construct
  source 1..20: mol_type = other DNA
actacaatgtaagccaaaaa

SEQ ID NO: 88669 - DNA, 20 bp, synthetic construct
  source 1..20: mol_type = other DNA
cactacaatgtaagccaaaa

SEQ ID NO: 88670 - DNA, 20 bp, synthetic construct
  source 1..20: mol_type = other DNA
acactacaatgtaagccaaa

SEQ ID NO: 88671 - DNA, 20 bp, synthetic construct
  source 1..20: mol_type = other DNA
cacactacaatgtaagccaa

SEQ ID NO: 88672 - DNA, 20 bp, synthetic construct
  source 1..20: mol_type = other DNA
acacactacaatgtaagcca

SEQ ID NO: 88673 - DNA, 20 bp, synthetic construct
  source 1..20: mol_type = other DNA
aacacactacaatgtaagcc

SEQ ID NO: 88674 - DNA, 20 bp, synthetic construct
  source 1..20: mol_type = other DNA
aaacacactacaatgtaagc

SEQ ID NO: 88675 - DNA, 20 bp, synthetic construct
  source 1..20: mol_type = other DNA
gaaacacactacaatgtaag

SEQ ID NO: 88676 - DNA, 20 bp, synthetic construct
  source 1..20: mol_type = other DNA
agaaacacactacaatgtaa

SEQ ID NO: 88677 - DNA, 20 bp, synthetic construct
  source 1..20: mol_type = other DNA
tagaaacacactacaatgta

SEQ ID NO: 88678 - DNA, 20 bp, synthetic construct
  source 1..20: mol_type = other DNA
atagaaacacactacaatgt

SEQ ID NO: 88679 - DNA, 20 bp, synthetic construct
  source 1..20: mol_type = other DNA
tatagaaacacactacaatg

SEQ ID NO: 88680 - DNA, 20 bp, synthetic construct
  source 1..20: mol_type = other DNA
ctatagaaacacactacaat

SEQ ID NO: 88681 - DNA, 20 bp, synthetic construct
  source 1..20: mol_type = other DNA
gctatagaaacacactacaa

SEQ ID NO: 88682 - DNA, 20 bp, synthetic construct
  source 1..20: mol_type = other DNA
tgctatagaaacacactaca

SEQ ID NO: 88683 - DNA, 20 bp, synthetic construct
  source 1..20: mol_type = other DNA
atgctatagaaacacactac

SEQ ID NO: 88684 - DNA, 20 bp, synthetic construct
  source 1..20: mol_type = other DNA
gatgctatagaaacacacta

SEQ ID NO: 88685 - DNA, 20 bp, synthetic construct
  source 1..20: mol_type = other DNA
agatgctatagaaacacact

SEQ ID NO: 88686 - DNA, 20 bp, synthetic construct
  source 1..20: mol_type = other DNA
cagatgctatagaaacacac

SEQ ID NO: 88687 - DNA, 20 bp, synthetic construct
  source 1..20: mol_type = other DNA
acagatgctatagaaacaca

SEQ ID NO: 88688 - DNA, 20 bp, synthetic construct
  source 1..20: mol_type = other DNA
tacagatgctatagaaacac

SEQ ID NO: 88689 - DNA, 20 bp, synthetic construct
  source 1..20: mol_type = other DNA
atacagatgctatagaaaca

SEQ ID NO: 88690 - DNA, 20 bp, synthetic construct
  source 1..20: mol_type = other DNA
tatacagatgctatagaaac

SEQ ID NO: 88691 - DNA, 20 bp, synthetic construct
  source 1..20: mol_type = other DNA
atatacagatgctatagaaa

SEQ ID NO: 88692 - DNA, 20 bp, synthetic construct
  source 1..20: mol_type = other DNA
catatacagatgctatagaa

SEQ ID NO: 88693 - DNA, 20 bp, synthetic construct
  source 1..20: mol_type = other DNA
ccatatacagatgctataga

SEQ ID NO: 88694 - DNA, 20 bp, synthetic construct
  source 1..20: mol_type = other DNA
gccatatacagatgctatag

SEQ ID NO: 88695 - DNA, 20 bp, synthetic construct
  source 1..20: mol_type = other DNA
tgccatatacagatgctata

SEQ ID NO: 88696 - DNA, 20 bp, synthetic construct
  source 1..20: mol_type = other DNA
gtgccatatacagatgctat

SEQ ID NO: 88697 - DNA, 20 bp, synthetic construct
  source 1..20: mol_type = other DNA
agtgccatatacagatgcta

SEQ ID NO: 88698 - DNA, 20 bp, synthetic construct
  source 1..20: mol_type = other DNA
tagtgccatatacagatgct

SEQ ID NO: 88699 - DNA, 20 bp, synthetic construct
  source 1..20: mol_type = other DNA
ttagtgccatatacagatgc

SEQ ID NO: 88700 - DNA, 20 bp, synthetic construct
  source 1..20: mol_type = other DNA
attagtgccatatacagatg

SEQ ID NO: 88701 - DNA, 20 bp, synthetic construct
  source 1..20: mol_type = other DNA
aattagtgccatatacagat

SEQ ID NO: 88702 - DNA, 20 bp, synthetic construct
  source 1..20: mol_type = other DNA
gaattagtgccatatacaga

SEQ ID NO: 88703 - DNA, 20 bp, synthetic construct
  source 1..20: mol_type = other DNA
ggaattagtgccatatacag

SEQ ID NO: 88704 - DNA, 20 bp, synthetic construct
  source 1..20: mol_type = other DNA
gggaattagtgccatataca

SEQ ID NO: 88705 - DNA, 20 bp, synthetic construct
  source 1..20: mol_type = other DNA
tgggaattagtgccatatac

SEQ ID NO: 88706 - DNA, 20 bp, synthetic construct
  source 1..20: mol_type = other DNA
ttgggaattagtgccatata

SEQ ID NO: 88707 - DNA, 20 bp, synthetic construct
  source 1..20: mol_type = other DNA
gttgggaattagtgccatat

SEQ ID NO: 88708 - DNA, 20 bp, synthetic construct
  source 1..20: mol_type = other DNA
agttgggaattagtgccata

SEQ ID NO: 88709 - DNA, 20 bp, synthetic construct
  source 1..20: mol_type = other DNA
tagttgggaattagtgccat

SEQ ID NO: 88710 - DNA, 20 bp, synthetic construct
  source 1..20: mol_type = other DNA
atagttgggaattagtgcca

SEQ ID NO: 88711 - DNA, 20 bp, synthetic construct
  source 1..20: mol_type = other DNA
tatagttgggaattagtgcc

SEQ ID NO: 88712 - DNA, 20 bp, synthetic construct
  source 1..20: mol_type = other DNA
atatagttgggaattagtgc

SEQ ID NO: 88713 - DNA, 20 bp, synthetic construct
  source 1..20: mol_type = other DNA
aatatagttgggaattagtg

SEQ ID NO: 88714 - DNA, 20 bp, synthetic construct
  source 1..20: mol_type = other DNA
aaatatagttgggaattagt

SEQ ID NO: 88715 - DNA, 20 bp, synthetic construct
  source 1..20: mol_type = other DNA
gaaatatagttgggaattag

SEQ ID NO: 88716 - DNA, 20 bp, synthetic construct
  source 1..20: mol_type = other DNA
ggaaatatagttgggaatta

SEQ ID NO: 88717 - DNA, 20 bp, synthetic construct
  source 1..20: mol_type = other DNA
tggaaatatagttgggaatt

SEQ ID NO: 88718 - DNA, 20 bp, synthetic construct
  source 1..20: mol_type = other DNA
atggaaatatagttgggaat

SEQ ID NO: 88719 - DNA, 20 bp, synthetic construct
  source 1..20: mol_type = other DNA
tatggaaatatagttgggaa

SEQ ID NO: 88720 - DNA, 20 bp, synthetic construct
  source 1..20: mol_type = other DNA
ttatggaaatatagttggga

SEQ ID NO: 88721 - DNA, 20 bp, synthetic construct
  source 1..20: mol_type = other DNA
attatggaaatatagttggg

SEQ ID NO: 88722 - DNA, 20 bp, synthetic construct
  source 1..20: mol_type = other DNA
tattatggaaatatagttgg

SEQ ID NO: 88723 - DNA, 20 bp, synthetic construct
  source 1..20: mol_type = other DNA
ttattatggaaatatagttg

SEQ ID NO: 88724 - DNA, 20 bp, synthetic construct
  source 1..20: mol_type = other DNA
cttattatggaaatatagtt

SEQ ID NO: 88725 - DNA, 20 bp, synthetic construct
  source 1..20: mol_type = other DNA
ccttattatggaaatatagt

SEQ ID NO: 88726 - DNA, 20 bp, synthetic construct
  source 1..20: mol_type = other DNA
tccttattatggaaatatag

SEQ ID NO: 88727 - DNA, 20 bp, synthetic construct
  source 1..20: mol_type = other DNA
ttccttattatggaaatata

SEQ ID NO: 88728 - DNA, 20 bp, synthetic construct
  source 1..20: mol_type = other DNA
attccttattatggaaatat

SEQ ID NO: 88729 - DNA, 20 bp, synthetic construct
  source 1..20: mol_type = other DNA
tattccttattatggaaata

SEQ ID NO: 88730 - DNA, 20 bp, synthetic construct
  source 1..20: mol_type = other DNA
atattccttattatggaaat

SEQ ID NO: 88731 - DNA, 20 bp, synthetic construct
  source 1..20: mol_type = other DNA
gatattccttattatggaaa

SEQ ID NO: 88732 - DNA, 20 bp, synthetic construct
  source 1..20: mol_type = other DNA
tgatattccttattatggaa

SEQ ID NO: 88733 - DNA, 20 bp, synthetic construct
  source 1..20: mol_type = other DNA
ttgatattccttattatgga

SEQ ID NO: 88734 - DNA, 20 bp, synthetic construct
  source 1..20: mol_type = other DNA
tttgatattccttattatgg

SEQ ID NO: 88735 - DNA, 20 bp, synthetic construct
  source 1..20: mol_type = other DNA
atttgatattccttattatg

SEQ ID NO: 88736 - DNA, 20 bp, synthetic construct
  source 1..20: mol_type = other DNA
tatttgatattccttattat

SEQ ID NO: 88737 - DNA, 20 bp, synthetic construct
  source 1..20: mol_type = other DNA
gtatttgatattccttatta

SEQ ID NO: 88738 - DNA, 20 bp, synthetic construct
  source 1..20: mol_type = other DNA
tgtatttgatattccttatt

SEQ ID NO: 88739 - DNA, 20 bp, synthetic construct
  source 1..20: mol_type = other DNA
ttgtatttgatattccttat

SEQ ID NO: 88740 - DNA, 20 bp, synthetic construct
  source 1..20: mol_type = other DNA
tttgtatttgatattcctta

SEQ ID NO: 88741 - DNA, 20 bp, synthetic construct
  source 1..20: mol_type = other DNA
atttgtatttgatattcctt

SEQ ID NO: 88742 - DNA, 20 bp, synthetic construct
  source 1..20: mol_type = other DNA
tatttgtatttgatattcct

SEQ ID NO: 88743 - DNA, 20 bp, synthetic construct
  source 1..20: mol_type = other DNA
ttatttgtatttgatattcc

SEQ ID NO: 88744 - DNA, 20 bp, synthetic construct
  source 1..20: mol_type = other DNA
tttatttgtatttgatattc

SEQ ID NO: 88745 - DNA, 20 bp, synthetic construct
  source 1..20: mol_type = other DNA
ctttatttgtatttgatatt

SEQ ID NO: 88746 - DNA, 20 bp, synthetic construct
  source 1..20: mol_type = other DNA
cctttatttgtatttgatat

SEQ ID NO: 88747 - DNA, 20 bp, synthetic construct
  source 1..20: mol_type = other DNA
ccctttatttgtatttgata

SEQ ID NO: 88748 - DNA, 20 bp, synthetic construct
  source 1..20: mol_type = other DNA
accctttatttgtatttgat

SEQ ID NO: 88749 - DNA, 20 bp, synthetic construct
  source 1..20: mol_type = other DNA
gaccctttatttgtatttga

SEQ ID NO: 88750 - DNA, 20 bp, synthetic construct
  source 1..20: mol_type = other DNA
ggaccctttatttgtatttg

SEQ ID NO: 88751 - DNA, 20 bp, synthetic construct
  source 1..20: mol_type = other DNA
tggaccctttatttgtattt

SEQ ID NO: 88752 - DNA, 20 bp, synthetic construct
  source 1..20: mol_type = other DNA
ttggaccctttatttgtatt

SEQ ID NO: 88753 - DNA, 20 bp, synthetic construct
  source 1..20: mol_type = other DNA
cttggaccctttatttgtat

SEQ ID NO: 88754 - DNA, 20 bp, synthetic construct
  source 1..20: mol_type = other DNA
acttggaccctttatttgta

SEQ ID NO: 88755 - DNA, 20 bp, synthetic construct
  source 1..20: mol_type = other DNA
aacttggaccctttatttgt

SEQ ID NO: 88756 - DNA, 20 bp, synthetic construct
  source 1..20: mol_type = other DNA
aaacttggaccctttatttg

SEQ ID NO: 88757 - DNA, 20 bp, synthetic construct
  source 1..20: mol_type = other DNA
aaaacttggaccctttattt

SEQ ID NO: 88758 - DNA, 20 bp, synthetic construct
  source 1..20: mol_type = other DNA
taaaacttggaccctttatt

SEQ ID NO: 88759 - DNA, 20 bp, synthetic construct
  source 1..20: mol_type = other DNA
ataaaacttggaccctttat

SEQ ID NO: 88760 - DNA, 20 bp, synthetic construct
  source 1..20: mol_type = other DNA
aataaaacttggacccttta

SEQ ID NO: 88761 - DNA, 20 bp, synthetic construct
  source 1..20: mol_type = other DNA
aaataaaacttggacccttt

SEQ ID NO: 88762 - DNA, 20 bp, synthetic construct
  source 1..20: mol_type = other DNA
caaataaaacttggaccctt

SEQ ID NO: 88763 - DNA, 20 bp, synthetic construct
  source 1..20: mol_type = other DNA
acaaataaaacttggaccct

SEQ ID NO: 88764 - DNA, 20 bp, synthetic construct
  source 1..20: mol_type = other DNA
cacaaataaaacttggaccc

SEQ ID NO: 88765 - DNA, 20 bp, synthetic construct
  source 1..20: mol_type = other DNA
tcacaaataaaacttggacc

SEQ ID NO: 88766 - DNA, 20 bp, synthetic construct
  source 1..20: mol_type = other DNA
atcacaaataaaacttggac

SEQ ID NO: 88767 - DNA, 20 bp, synthetic construct
  source 1..20: mol_type = other DNA
aatcacaaataaaacttgga

SEQ ID NO: 88768 - DNA, 20 bp, synthetic construct
  source 1..20: mol_type = other DNA
taatcacaaataaaacttgg

SEQ ID NO: 88769 - DNA, 20 bp, synthetic construct
  source 1..20: mol_type = other DNA
ctaatcacaaataaaacttg

SEQ ID NO: 88770 - DNA, 20 bp, synthetic construct
  source 1..20: mol_type = other DNA
gctaatcacaaataaaactt

SEQ ID NO: 88771 - DNA, 20 bp, synthetic construct
  source 1..20: mol_type = other DNA
tgctaatcacaaataaaact

SEQ ID NO: 88772 - DNA, 20 bp, synthetic construct
  source 1..20: mol_type = other DNA
atgctaatcacaaataaaac

SEQ ID NO: 88773 - DNA, 20 bp, synthetic construct
  source 1..20: mol_type = other DNA
tatgctaatcacaaataaaa

SEQ ID NO: 88774 - DNA, 20 bp, synthetic construct
  source 1..20: mol_type = other DNA
ttatgctaatcacaaataaa

SEQ ID NO: 88775 - DNA, 20 bp, synthetic construct
  source 1..20: mol_type = other DNA
cttatgctaatcacaaataa

SEQ ID NO: 88776 - DNA, 20 bp, synthetic construct
  source 1..20: mol_type = other DNA
ccttatgctaatcacaaata

SEQ ID NO: 88777 - DNA, 20 bp, synthetic construct
  source 1..20: mol_type = other DNA
tccttatgctaatcacaaat

SEQ ID NO: 88778 - DNA, 20 bp, synthetic construct
  source 1..20: mol_type = other DNA
ttccttatgctaatcacaaa

SEQ ID NO: 88779 - DNA, 20 bp, synthetic construct
  source 1..20: mol_type = other DNA
attccttatgctaatcacaa

SEQ ID NO: 88780 - DNA, 20 bp, synthetic construct
  source 1..20: mol_type = other DNA
tattccttatgctaatcaca

SEQ ID NO: 88781 - DNA, 20 bp, synthetic construct
  source 1..20: mol_type = other DNA
atattccttatgctaatcac

SEQ ID NO: 88782 - DNA, 20 bp, synthetic construct
  source 1..20: mol_type = other DNA
catattccttatgctaatca

SEQ ID NO: 88783 - DNA, 20 bp, synthetic construct
  source 1..20: mol_type = other DNA
gcatattccttatgctaatc

SEQ ID NO: 88784 - DNA, 20 bp, synthetic construct
  source 1..20: mol_type = other DNA
agcatattccttatgctaat

SEQ ID NO: 88785 - DNA, 20 bp, synthetic construct
  source 1..20: mol_type = other DNA
cagcatattccttatgctaa

SEQ ID NO: 88786 - DNA, 20 bp, synthetic construct
  source 1..20: mol_type = other DNA
tcagcatattccttatgcta

SEQ ID NO: 88787 - DNA, 20 bp, synthetic construct
  source 1..20: mol_type = other DNA
gtcagcatattccttatgct

SEQ ID NO: 88788 - DNA, 20 bp, synthetic construct
  source 1..20: mol_type = other DNA
tgtcagcatattccttatgc

SEQ ID NO: 88789 - DNA, 20 bp, synthetic construct
  source 1..20: mol_type = other DNA
ctgtcagcatattccttatg

SEQ ID NO: 88790 - DNA, 20 bp, synthetic construct
  source 1..20: mol_type = other DNA
gctgtcagcatattccttat

SEQ ID NO: 88791 - DNA, 20 bp, synthetic construct
  source 1..20: mol_type = other DNA
tgctgtcagcatattcctta

SEQ ID NO: 88792 - DNA, 20 bp, synthetic construct
  source 1..20: mol_type = other DNA
ctgctgtcagcatattcctt

SEQ ID NO: 88793 - DNA, 20 bp, synthetic construct
  source 1..20: mol_type = other DNA
gctgctgtcagcatattcct

SEQ ID NO: 88794 - DNA, 20 bp, synthetic construct
  source 1..20: mol_type = other DNA
agctgctgtcagcatattcc

SEQ ID NO: 88795 - DNA, 20 bp, synthetic construct
  source 1..20: mol_type = other DNA
tagctgctgtcagcatattc

SEQ ID NO: 88796 - DNA, 20 bp, synthetic construct
  source 1..20: mol_type = other DNA
atagctgctgtcagcatatt

SEQ ID NO: 88797 - DNA, 20 bp, synthetic construct
  source 1..20: mol_type = other DNA
tatagctgctgtcagcatat

SEQ ID NO: 88798 - DNA, 20 bp, synthetic construct
  source 1..20: mol_type = other DNA
ttatagctgctgtcagcata

SEQ ID NO: 88799 - DNA, 20 bp, synthetic construct
  source 1..20: mol_type = other DNA
tttatagctgctgtcagcat

SEQ ID NO: 88800 - DNA, 20 bp, synthetic construct
  source 1..20: mol_type = other DNA
ttttatagctgctgtcagca

SEQ ID NO: 88801 - DNA, 20 bp, synthetic construct
  source 1..20: mol_type = other DNA
cttttatagctgctgtcagc

SEQ ID NO: 88802 - DNA, 20 bp, synthetic construct
  source 1..20: mol_type = other DNA
acttttatagctgctgtcag

SEQ ID NO: 88803 - DNA, 20 bp, synthetic construct
  source 1..20: mol_type = other DNA
tacttttatagctgctgtca

SEQ ID NO: 88804 - DNA, 20 bp, synthetic construct
  source 1..20: mol_type = other DNA
atacttttatagctgctgtc

SEQ ID NO: 88805 - DNA, 20 bp, synthetic construct
  source 1..20: mol_type = other DNA
tatacttttatagctgctgt

SEQ ID NO: 88806 - DNA, 20 bp, synthetic construct
  source 1..20: mol_type = other DNA
ttatacttttatagctgctg

SEQ ID NO: 88807 - DNA, 20 bp, synthetic construct
  source 1..20: mol_type = other DNA
tttatacttttatagctgct

SEQ ID NO: 88808 - DNA, 20 bp, synthetic construct
  source 1..20: mol_type = other DNA
ttttatacttttatagctgc

SEQ ID NO: 88809 - DNA, 20 bp, synthetic construct
  source 1..20: mol_type = other DNA
tttttatacttttatagctg

SEQ ID NO: 88810 - DNA, 20 bp, synthetic construct
  source 1..20: mol_type = other DNA
atttttatacttttatagct

SEQ ID NO: 88811 - DNA, 20 bp, synthetic construct
  source 1..20: mol_type = other DNA
aatttttatacttttatagc

SEQ ID NO: 88812 - DNA, 20 bp, synthetic construct
  source 1..20: mol_type = other DNA
taatttttatacttttatag

SEQ ID NO: 88813 - DNA, 20 bp, synthetic construct
  source 1..20: mol_type = other DNA
ctaatttttatacttttata

SEQ ID NO: 88814 - DNA, 20 bp, synthetic construct
  source 1..20: mol_type = other DNA
cctaatttttatacttttat

SEQ ID NO: 88815 - DNA, 20 bp, synthetic construct
  source 1..20: mol_type = other DNA
gcctaatttttatactttta

SEQ ID NO: 88816 - DNA, 20 bp, synthetic construct
  source 1..20: mol_type = other DNA
agcctaatttttatactttt

SEQ ID NO: 88817 - DNA, 20 bp, synthetic construct
  source 1..20: mol_type = other DNA
cagcctaatttttatacttt

SEQ ID NO: 88818 - DNA, 20 bp, synthetic construct
  source 1..20: mol_type = other DNA
ccagcctaatttttatactt

SEQ ID NO: 88819 - DNA, 20 bp, synthetic construct
  source 1..20: mol_type = other DNA
cccagcctaatttttatact

SEQ ID NO: 88820 - DNA, 20 bp, synthetic construct
  source 1..20: mol_type = other DNA
acccagcctaatttttatac

SEQ ID NO: 88821 - DNA, 20 bp, synthetic construct
  source 1..20: mol_type = other DNA
cacccagcctaatttttata

SEQ ID NO: 88822 - DNA, 20 bp, synthetic construct
  source 1..20: mol_type = other DNA
acacccagcctaatttttat

SEQ ID NO: 88823 - DNA, 20 bp, synthetic construct
  source 1..20: mol_type = other DNA
cacacccagcctaattttta

SEQ ID NO: 88824 - DNA, 20 bp, synthetic construct
  source 1..20: mol_type = other DNA
ccacacccagcctaattttt

SEQ ID NO: 88825 - DNA, 20 bp, synthetic construct
  source 1..20: mol_type = other DNA
accacacccagcctaatttt

SEQ ID NO: 88826 - DNA, 20 bp, synthetic construct
  source 1..20: mol_type = other DNA
caccacacccagcctaattt

SEQ ID NO: 88827 - DNA, 20 bp, synthetic construct
  source 1..20: mol_type = other DNA
ccaccacacccagcctaatt

SEQ ID NO: 88828 - DNA, 20 bp, synthetic construct
  source 1..20: mol_type = other DNA
gccaccacacccagcctaat

SEQ ID NO: 88829 - DNA, 20 bp, synthetic construct
  source 1..20: mol_type = other DNA
agccaccacacccagcctaa

SEQ ID NO: 88830 - DNA, 20 bp, synthetic construct
  source 1..20: mol_type = other DNA
gagccaccacacccagccta

SEQ ID NO: 88831 - DNA, 20 bp, synthetic construct
  source 1..20: mol_type = other DNA
tgagccaccacacccagcct

SEQ ID NO: 88832 - DNA, 20 bp, synthetic construct
  source 1..20: mol_type = other DNA
gtgagccaccacacccagcc

SEQ ID NO: 88833 - DNA, 20 bp, synthetic construct
  source 1..20: mol_type = other DNA
cgtgagccaccacacccagc

SEQ ID NO: 88834 - DNA, 20 bp, synthetic construct
  source 1..20: mol_type = other DNA
gcgtgagccaccacacccag

SEQ ID NO: 88835 - DNA, 20 bp, synthetic construct
  source 1..20: mol_type = other DNA
ggcgtgagccaccacaccca

SEQ ID NO: 88836 - DNA, 20 bp, synthetic construct
  source 1..20: mol_type = other DNA
aggcgtgagccaccacaccc

SEQ ID NO: 88837 - DNA, 20 bp, synthetic construct
  source 1..20: mol_type = other DNA
caggcgtgagccaccacacc

SEQ ID NO: 88838 - DNA, 20 bp, synthetic construct
  source 1..20: mol_type = other DNA
acaggcgtgagccaccacac

SEQ ID NO: 88839 - DNA, 20 bp, synthetic construct
  source 1..20: mol_type = other DNA
tacaggcgtgagccaccaca

SEQ ID NO: 88840 - DNA, 20 bp, synthetic construct
  source 1..20: mol_type = other DNA
ttacaggcgtgagccaccac

SEQ ID NO: 88841 - DNA, 20 bp, synthetic construct
  source 1..20: mol_type = other DNA
attacaggcgtgagccacca

SEQ ID NO: 88842 - DNA, 20 bp, synthetic construct
  source 1..20: mol_type = other DNA
gattacaggcgtgagccacc

SEQ ID NO: 88843 - DNA, 20 bp, synthetic construct
  source 1..20: mol_type = other DNA
ggattacaggcgtgagccac

SEQ ID NO: 88844 - DNA, 20 bp, synthetic construct
  source 1..20: mol_type = other DNA
gggattacaggcgtgagcca

SEQ ID NO: 88845 - DNA, 20 bp, synthetic construct
  source 1..20: mol_type = other DNA
tgggattacaggcgtgagcc

SEQ ID NO: 88846 - DNA, 20 bp, synthetic construct
  source 1..20: mol_type = other DNA
ctgggattacaggcgtgagc

SEQ ID NO: 88847 - DNA, 20 bp, synthetic construct
  source 1..20: mol_type = other DNA
gctgggattacaggcgtgag

SEQ ID NO: 88848 - DNA, 20 bp, synthetic construct
  source 1..20: mol_type = other DNA
tgctgggattacaggcgtga

SEQ ID NO: 88849 - DNA, 20 bp, synthetic construct
  source 1..20: mol_type = other DNA
gtgctgggattacaggcgtg

SEQ ID NO: 88850 - DNA, 20 bp, synthetic construct
  source 1..20: mol_type = other DNA
agtgctgggattacaggcgt

SEQ ID NO: 88851 - DNA, 20 bp, synthetic construct
  source 1..20: mol_type = other DNA
aagtgctgggattacaggcg

SEQ ID NO: 88852 - DNA, 20 bp, synthetic construct
  source 1..20: mol_type = other DNA
aaagtgctgggattacaggc

SEQ ID NO: 88853 - DNA, 20 bp, synthetic construct
  source 1..20: mol_type = other DNA
caaagtgctgggattacagg

SEQ ID NO: 88854 - DNA, 20 bp, synthetic construct
  source 1..20: mol_type = other DNA
ccaaagtgctgggattacag

SEQ ID NO: 88855 - DNA, 20 bp, synthetic construct
  source 1..20: mol_type = other DNA
cccaaagtgctgggattaca

SEQ ID NO: 88856 - DNA, 20 bp, synthetic construct
  source 1..20: mol_type = other DNA
tcccaaagtgctgggattac

SEQ ID NO: 88857 - DNA, 20 bp, synthetic construct
  source 1..20: mol_type = other DNA
ctcccaaagtgctgggatta

SEQ ID NO: 88858 - DNA, 20 bp, synthetic construct
  source 1..20: mol_type = other DNA
cctcccaaagtgctgggatt

SEQ ID NO: 88859 - DNA, 20 bp, synthetic construct
  source 1..20: mol_type = other DNA
gcctcccaaagtgctgggat

SEQ ID NO: 88860 - DNA, 20 bp, synthetic construct
  source 1..20: mol_type = other DNA
agcctcccaaagtgctggga

SEQ ID NO: 88861 - DNA, 20 bp, synthetic construct
  source 1..20: mol_type = other DNA
cagcctcccaaagtgctggg

SEQ ID NO: 88862 - DNA, 20 bp, synthetic construct
  source 1..20: mol_type = other DNA
tcagcctcccaaagtgctgg

SEQ ID NO: 88863 - DNA, 20 bp, synthetic construct
  source 1..20: mol_type = other DNA
ctcagcctcccaaagtgctg

SEQ ID NO: 88864 - DNA, 20 bp, synthetic construct
  source 1..20: mol_type = other DNA
cctcagcctcccaaagtgct

SEQ ID NO: 88865 - DNA, 20 bp, synthetic construct
  source 1..20: mol_type = other DNA
acctcagcctcccaaagtgc

SEQ ID NO: 88866 - DNA, 20 bp, synthetic construct
  source 1..20: mol_type = other DNA
cacctcagcctcccaaagtg

SEQ ID NO: 88867 - DNA, 20 bp, synthetic construct
  source 1..20: mol_type = other DNA
ccacctcagcctcccaaagt

SEQ ID NO: 88868 - DNA, 20 bp, synthetic construct
  source 1..20: mol_type = other DNA
cccacctcagcctcccaaag

SEQ ID NO: 88869 - DNA, 20 bp, synthetic construct
  source 1..20: mol_type = other DNA
gcccacctcagcctcccaaa

SEQ ID NO: 88870 - DNA, 20 bp, synthetic construct
  source 1..20: mol_type = other DNA
cgcccacctcagcctcccaa

SEQ ID NO: 88871 - DNA, 20 bp, synthetic construct
  source 1..20: mol_type = other DNA
ccgcccacctcagcctccca

SEQ ID NO: 88872 - DNA, 20 bp, synthetic construct
  source 1..20: mol_type = other DNA
tccgcccacctcagcctccc

SEQ ID NO: 88873 - DNA, 20 bp, synthetic construct
  source 1..20: mol_type = other DNA
atccgcccacctcagcctcc

SEQ ID NO: 88874 - DNA, 20 bp, synthetic construct
  source 1..20: mol_type = other DNA
gatccgcccacctcagcctc

SEQ ID NO: 88875 - DNA, 20 bp, synthetic construct
  source 1..20: mol_type = other DNA
tgatccgcccacctcagcct

SEQ ID NO: 88876 - DNA, 20 bp, synthetic construct
  source 1..20: mol_type = other DNA
gtgatccgcccacctcagcc

SEQ ID NO: 88877 - DNA, 20 bp, synthetic construct
  source 1..20: mol_type = other DNA
tgtgatccgcccacctcagc

SEQ ID NO: 88878 - DNA, 20 bp, synthetic construct
  source 1..20: mol_type = other DNA
ttgtgatccgcccacctcag

SEQ ID NO: 88879 - DNA, 20 bp, synthetic construct
  source 1..20: mol_type = other DNA
cttgtgatccgcccacctca

SEQ ID NO: 88880 - DNA, 20 bp, synthetic construct
  source 1..20: mol_type = other DNA
ccttgtgatccgcccacctc

SEQ ID NO: 88881 - DNA, 20 bp, synthetic construct
  source 1..20: mol_type = other DNA
accttgtgatccgcccacct

SEQ ID NO: 88882 - DNA, 20 bp, synthetic construct
  source 1..20: mol_type = other DNA
gaccttgtgatccgcccacc

SEQ ID NO: 88883 - DNA, 20 bp, synthetic construct
  source 1..20: mol_type = other DNA
tgaccttgtgatccgcccac

SEQ ID NO: 88884 - DNA, 20 bp, synthetic construct
  source 1..20: mol_type = other DNA
ctgaccttgtgatccgccca

SEQ ID NO: 88885 - DNA, 20 bp, synthetic construct
  source 1..20: mol_type = other DNA
cctgaccttgtgatccgccc

SEQ ID NO: 88886 - DNA, 20 bp, synthetic construct
  source 1..20: mol_type = other DNA
tcctgaccttgtgatccgcc

SEQ ID NO: 88887 - DNA, 20 bp, synthetic construct
  source 1..20: mol_type = other DNA
ctcctgaccttgtgatccgc

SEQ ID NO: 88888 - DNA, 20 bp, synthetic construct
  source 1..20: mol_type = other DNA
tctcctgaccttgtgatccg

SEQ ID NO: 88889 - DNA, 20 bp, synthetic construct
  source 1..20: mol_type = other DNA
atctcctgaccttgtgatcc

SEQ ID NO: 88890 - DNA, 20 bp, synthetic construct
  source 1..20: mol_type = other DNA
gatctcctgaccttgtgatc

SEQ ID NO: 88891 - DNA, 20 bp, synthetic construct
  source 1..20: mol_type = other DNA
cgatctcctgaccttgtgat

SEQ ID NO: 88892 - DNA, 20 bp, synthetic construct
  source 1..20: mol_type = other DNA
tcgatctcctgaccttgtga

SEQ ID NO: 88893 - DNA, 20 bp, synthetic construct
  source 1..20: mol_type = other DNA
ctcgatctcctgaccttgtg

SEQ ID NO: 88894 - DNA, 20 bp, synthetic construct
  source 1..20: mol_type = other DNA
tctcgatctcctgaccttgt

SEQ ID NO: 88895 - DNA, 20 bp, synthetic construct
  source 1..20: mol_type = other DNA
gtctcgatctcctgaccttg

SEQ ID NO: 88896 - DNA, 20 bp, synthetic construct
  source 1..20: mol_type = other DNA
ggtctcgatctcctgacctt

SEQ ID NO: 88897 - DNA, 20 bp, synthetic construct
  source 1..20: mol_type = other DNA
tggtctcgatctcctgacct

SEQ ID NO: 88898 - DNA, 20 bp, synthetic construct
  source 1..20: mol_type = other DNA
atggtctcgatctcctgacc

SEQ ID NO: 88899 - DNA, 20 bp, synthetic construct
  source 1..20: mol_type = other DNA
gatggtctcgatctcctgac

SEQ ID NO: 88900 - DNA, 20 bp, synthetic construct
  source 1..20: mol_type = other DNA
ggatggtctcgatctcctga

SEQ ID NO: 88901 - DNA, 20 bp, synthetic construct
  source 1..20: mol_type = other DNA
aggatggtctcgatctcctg

SEQ ID NO: 88902 - DNA, 20 bp, synthetic construct
  source 1..20: mol_type = other DNA
caggatggtctcgatctcct

SEQ ID NO: 88903 - DNA, 20 bp, synthetic construct
  source 1..20: mol_type = other DNA
ccaggatggtctcgatctcc

SEQ ID NO: 88904 - DNA, 20 bp, synthetic construct
  source 1..20: mol_type = other DNA
gccaggatggtctcgatctc

SEQ ID NO: 88905 - DNA, 20 bp, synthetic construct
  source 1..20: mol_type = other DNA
agccaggatggtctcgatct

SEQ ID NO: 88906 - DNA, 20 bp, synthetic construct
  source 1..20: mol_type = other DNA
tagccaggatggtctcgatc

SEQ ID NO: 88907 - DNA, 20 bp, synthetic construct
  source 1..20: mol_type = other DNA
ttagccaggatggtctcgat

SEQ ID NO: 88908 - DNA, 20 bp, synthetic construct
  source 1..20: mol_type = other DNA
gttagccaggatggtctcga

SEQ ID NO: 88909 - DNA, 20 bp, synthetic construct
  source 1..20: mol_type = other DNA
tgttagccaggatggtctcg

SEQ ID NO: 88910 - DNA, 20 bp, synthetic construct
  source 1..20: mol_type = other DNA
gtgttagccaggatggtctc

SEQ ID NO: 88911 - DNA, 20 bp, synthetic construct
  source 1..20: mol_type = other DNA
cgtgttagccaggatggtct

SEQ ID NO: 88912 - DNA, 20 bp, synthetic construct
  source 1..20: mol_type = other DNA
ccgtgttagccaggatggtc

SEQ ID NO: 88913 - DNA, 20 bp, synthetic construct
  source 1..20: mol_type = other DNA
accgtgttagccaggatggt

SEQ ID NO: 88914 - DNA, 20 bp, synthetic construct
  source 1..20: mol_type = other DNA
caccgtgttagccaggatgg

SEQ ID NO: 88915 - DNA, 20 bp, synthetic construct
  source 1..20: mol_type = other DNA
tcaccgtgttagccaggatg

SEQ ID NO: 88916 - DNA, 20 bp, synthetic construct
  source 1..20: mol_type = other DNA
ttcaccgtgttagccaggat

SEQ ID NO: 88917 - DNA, 20 bp, synthetic construct
  source 1..20: mol_type = other DNA
tttcaccgtgttagccagga

SEQ ID NO: 88918 - DNA, 20 bp, synthetic construct
  source 1..20: mol_type = other DNA
gtttcaccgtgttagccagg

SEQ ID NO: 88919 - DNA, 20 bp, synthetic construct
  source 1..20: mol_type = other DNA
ggtttcaccgtgttagccag

SEQ ID NO: 88920 - DNA, 20 bp, synthetic construct
  source 1..20: mol_type = other DNA
gggtttcaccgtgttagcca

SEQ ID NO: 88921 - DNA, 20 bp, synthetic construct
  source 1..20: mol_type = other DNA
ggggtttcaccgtgttagcc

SEQ ID NO: 88922 - DNA, 20 bp, synthetic construct
  source 1..20: mol_type = other DNA
cggggtttcaccgtgttagc

SEQ ID NO: 88923 - DNA, 20 bp, synthetic construct
  source 1..20: mol_type = other DNA
acggggtttcaccgtgttag

SEQ ID NO: 88924 - DNA, 20 bp, synthetic construct
  source 1..20: mol_type = other DNA
gacggggtttcaccgtgtta

SEQ ID NO: 88925 - DNA, 20 bp, synthetic construct
  source 1..20: mol_type = other DNA
ggacggggtttcaccgtgtt

SEQ ID NO: 88926 - DNA, 20 bp, synthetic construct
  source 1..20: mol_type = other DNA
gggacggggtttcaccgtgt

SEQ ID NO: 88927 - DNA, 20 bp, synthetic construct
  source 1..20: mol_type = other DNA
agggacggggtttcaccgtg

SEQ ID NO: 88928 - DNA, 20 bp, synthetic construct
  source 1..20: mol_type = other DNA
tagggacggggtttcaccgt

SEQ ID NO: 88929 - DNA, 20 bp, synthetic construct
  source 1..20: mol_type = other DNA
gtagggacggggtttcaccg

SEQ ID NO: 88930 - DNA, 20 bp, synthetic construct
  source 1..20: mol_type = other DNA
agtagggacggggtttcacc

SEQ ID NO: 88931 - DNA, 20 bp, synthetic construct
  source 1..20: mol_type = other DNA
tagtagggacggggtttcac

SEQ ID NO: 88932 - DNA, 20 bp, synthetic construct
  source 1..20: mol_type = other DNA
ttagtagggacggggtttca

SEQ ID NO: 88933 - DNA, 20 bp, synthetic construct
  source 1..20: mol_type = other DNA
tttagtagggacggggtttc

SEQ ID NO: 88934 - DNA, 20 bp, synthetic construct
  source 1..20: mol_type = other DNA
ttttagtagggacggggttt

SEQ ID NO: 88935 - DNA, 20 bp, synthetic construct
  source 1..20: mol_type = other DNA
cttttagtagggacggggtt

SEQ ID NO: 88936 - DNA, 20 bp, synthetic construct
  source 1..20: mol_type = other DNA
acttttagtagggacggggt

SEQ ID NO: 88937 - DNA, 20 bp, synthetic construct
  source 1..20: mol_type = other DNA
tacttttagtagggacgggg

SEQ ID NO: 88938 - DNA, 20 bp, synthetic construct
  source 1..20: mol_type = other DNA
gtacttttagtagggacggg

SEQ ID NO: 88939 - DNA, 20 bp, synthetic construct
  source 1..20: mol_type = other DNA
tgtacttttagtagggacgg

SEQ ID NO: 88940 - DNA, 20 bp, synthetic construct
  source 1..20: mol_type = other DNA
ttgtacttttagtagggacg

SEQ ID NO: 88941 - DNA, 20 bp, synthetic construct
  source 1..20: mol_type = other DNA
tttgtacttttagtagggac

SEQ ID NO: 88942 - DNA, 20 bp, synthetic construct
  source 1..20: mol_type = other DNA
ttttgtacttttagtaggga

SEQ ID NO: 88943 - DNA, 20 bp, synthetic construct
  source 1..20: mol_type = other DNA
tttttgtacttttagtaggg

SEQ ID NO: 88944 - DNA, 20 bp, synthetic construct
  source 1..20: mol_type = other DNA
ttttttgtacttttagtagg

SEQ ID NO: 88945 - DNA, 20 bp, synthetic construct
  source 1..20: mol_type = other DNA
tttttttgtacttttagtag

SEQ ID NO: 88946 - DNA, 20 bp, synthetic construct
  source 1..20: mol_type = other DNA
ttttttttgtacttttagta

SEQ ID NO: 88947 - DNA, 20 bp, synthetic construct
  source 1..20: mol_type = other DNA
attttttttgtacttttagt

SEQ ID NO: 88948 - DNA, 20 bp, synthetic construct
  source 1..20: mol_type = other DNA
aattttttttgtacttttag

SEQ ID NO: 88949 - DNA, 20 bp, synthetic construct
  source 1..20: mol_type = other DNA
taattttttttgtactttta

SEQ ID NO: 88950 - DNA, 20 bp, synthetic construct
  source 1..20: mol_type = other DNA
ctaattttttttgtactttt

SEQ ID NO: 88951 - DNA, 20 bp, synthetic construct
  source 1..20: mol_type = other DNA
gctaattttttttgtacttt

SEQ ID NO: 88952 - DNA, 20 bp, synthetic construct
  source 1..20: mol_type = other DNA
ggctaattttttttgtactt

SEQ ID NO: 88953 - DNA, 20 bp, synthetic construct
  source 1..20: mol_type = other DNA
cggctaattttttttgtact

SEQ ID NO: 88954 - DNA, 20 bp, synthetic construct
  source 1..20: mol_type = other DNA
ccggctaattttttttgtac

SEQ ID NO: 88955 - DNA, 20 bp, synthetic construct
  source 1..20: mol_type = other DNA
cccggctaattttttttgta

SEQ ID NO: 88956 - DNA, 20 bp, synthetic construct
  source 1..20: mol_type = other DNA
gcccggctaattttttttgt

SEQ ID NO: 88957 - DNA, 20 bp, synthetic construct
  source 1..20: mol_type = other DNA
tgcccggctaattttttttg

SEQ ID NO: 88958 - DNA, 20 bp, synthetic construct
  source 1..20: mol_type = other DNA
atgcccggctaatttttttt

SEQ ID NO: 88959 - DNA, 20 bp, synthetic construct
  source 1..20: mol_type = other DNA
catgcccggctaattttttt

SEQ ID NO: 88960 - DNA, 20 bp, synthetic construct
  source 1..20: mol_type = other DNA
ccatgcccggctaatttttt

SEQ ID NO: 88961 - DNA, 20 bp, synthetic construct
  source 1..20: mol_type = other DNA
accatgcccggctaattttt

SEQ ID NO: 88962 - DNA, 20 bp, synthetic construct
  source 1..20: mol_type = other DNA
caccatgcccggctaatttt

SEQ ID NO: 88963 - DNA, 20 bp, synthetic construct
  source 1..20: mol_type = other DNA
ccaccatgcccggctaattt

SEQ ID NO: 88964 - DNA, 20 bp, synthetic construct
  source 1..20: mol_type = other DNA
gccaccatgcccggctaatt

SEQ ID NO: 88965 - DNA, 20 bp, synthetic construct
  source 1..20: mol_type = other DNA
cgccaccatgcccggctaat

SEQ ID NO: 88966 - DNA, 20 bp, synthetic construct
  source 1..20: mol_type = other DNA
ccgccaccatgcccggctaa

SEQ ID NO: 88967 - DNA, 20 bp, synthetic construct
  source 1..20: mol_type = other DNA
cccgccaccatgcccggcta

SEQ ID NO: 88968 - DNA, 20 bp, synthetic construct
  source 1..20: mol_type = other DNA
acccgccaccatgcccggct

SEQ ID NO: 88969 - DNA, 20 bp, synthetic construct
  source 1..20: mol_type = other DNA
cacccgccaccatgcccggc

SEQ ID NO: 88970 - DNA, 20 bp, synthetic construct
  source 1..20: mol_type = other DNA
gcacccgccaccatgcccgg

SEQ ID NO: 88971 - DNA, 20 bp, synthetic construct
  source 1..20: mol_type = other DNA
ggcacccgccaccatgcccg

SEQ ID NO: 88972 - DNA, 20 bp, synthetic construct
  source 1..20: mol_type = other DNA
aggcacccgccaccatgccc

SEQ ID NO: 88973 - DNA, 20 bp, synthetic construct
  source 1..20: mol_type = other DNA
caggcacccgccaccatgcc

SEQ ID NO: 88974 - DNA, 20 bp, synthetic construct
  source 1..20: mol_type = other DNA
acaggcacccgccaccatgc

SEQ ID NO: 88975 - DNA, 20 bp, synthetic construct
  source 1..20: mol_type = other DNA
tacaggcacccgccaccatg

SEQ ID NO: 88976 - DNA, 20 bp, synthetic construct
  source 1..20: mol_type = other DNA
ctacaggcacccgccaccat

SEQ ID NO: 88977 - DNA, 20 bp, synthetic construct
  source 1..20: mol_type = other DNA
actacaggcacccgccacca

SEQ ID NO: 88978 - DNA, 20 bp, synthetic construct
  source 1..20: mol_type = other DNA
gactacaggcacccgccacc

SEQ ID NO: 88979 - DNA, 20 bp, synthetic construct
  source 1..20: mol_type = other DNA
ggactacaggcacccgccac

SEQ ID NO: 88980 - DNA, 20 bp, synthetic construct
  source 1..20: mol_type = other DNA
gggactacaggcacccgcca

SEQ ID NO: 88981 - DNA, 20 bp, synthetic construct
  source 1..20: mol_type = other DNA
tgggactacaggcacccgcc

SEQ ID NO: 88982 - DNA, 20 bp, synthetic construct
  source 1..20: mol_type = other DNA
ctgggactacaggcacccgc

SEQ ID NO: 88983 - DNA, 20 bp, synthetic construct
  source 1..20: mol_type = other DNA
gctgggactacaggcacccg

SEQ ID NO: 88984 - DNA, 20 bp, synthetic construct
  source 1..20: mol_type = other DNA
agctgggactacaggcaccc

SEQ ID NO: 88985 - DNA, 20 bp, synthetic construct
  source 1..20: mol_type = other DNA
tagctgggactacaggcacc

SEQ ID NO: 88986 - DNA, 20 bp, synthetic construct
  source 1..20: mol_type = other DNA
gtagctgggactacaggcac

SEQ ID NO: 88987 - DNA, 20 bp, synthetic construct
  source 1..20: mol_type = other DNA
agtagctgggactacaggca

SEQ ID NO: 88988 - DNA, 20 bp, synthetic construct
  source 1..20: mol_type = other DNA
aagtagctgggactacaggc

SEQ ID NO: 88989 - DNA, 20 bp, synthetic construct
  source 1..20: mol_type = other DNA
caagtagctgggactacagg

SEQ ID NO: 88990 - DNA, 20 bp, synthetic construct
  source 1..20: mol_type = other DNA
ccaagtagctgggactacag

SEQ ID NO: 88991 - DNA, 20 bp, synthetic construct
  source 1..20: mol_type = other DNA
cccaagtagctgggactaca

SEQ ID NO: 88992 - DNA, 20 bp, synthetic construct
  source 1..20: mol_type = other DNA
tcccaagtagctgggactac

SEQ ID NO: 88993 - DNA, 20 bp, synthetic construct
  source 1..20: mol_type = other DNA
ctcccaagtagctgggacta

SEQ ID NO: 88994 - DNA, 20 bp, synthetic construct
  source 1..20: mol_type = other DNA
cctcccaagtagctgggact

SEQ ID NO: 88995 - DNA, 20 bp, synthetic construct
  source 1..20: mol_type = other DNA
gcctcccaagtagctgggac

SEQ ID NO: 88996 - DNA, 20 bp, synthetic construct
  source 1..20: mol_type = other DNA
agcctcccaagtagctggga

SEQ ID NO: 88997 - DNA, 20 bp, synthetic construct
  source 1..20: mol_type = other DNA
cagcctcccaagtagctggg

SEQ ID NO: 88998 - DNA, 20 bp, synthetic construct
  source 1..20: mol_type = other DNA
tcagcctcccaagtagctgg

SEQ ID NO: 88999 - DNA, 20 bp, synthetic construct
  source 1..20: mol_type = other DNA
ctcagcctcccaagtagctg

SEQ ID NO: 89000 - DNA, 20 bp, synthetic construct
  source 1..20: mol_type = other DNA
cctcagcctcccaagtagct

SEQ ID NO: 89001 - DNA, 20 bp, synthetic construct
  source 1..20: mol_type = other DNA
gcctcagcctcccaagtagc

SEQ ID NO: 89002 - DNA, 20 bp, synthetic construct
  source 1..20: mol_type = other DNA
tgcctcagcctcccaagtag

SEQ ID NO: 89003 - DNA, 20 bp, synthetic construct
  source 1..20: mol_type = other DNA
ctgcctcagcctcccaagta

SEQ ID NO: 89004 - DNA, 20 bp, synthetic construct
  source 1..20: mol_type = other DNA
cctgcctcagcctcccaagt

SEQ ID NO: 89005 - DNA, 20 bp, synthetic construct
  source 1..20: mol_type = other DNA
tcctgcctcagcctcccaag

SEQ ID NO: 89006 - DNA, 20 bp, synthetic construct
  source 1..20: mol_type = other DNA
ctcctgcctcagcctcccaa

SEQ ID NO: 89007 - DNA, 20 bp, synthetic construct
  source 1..20: mol_type = other DNA
tctcctgcctcagcctccca

SEQ ID NO: 89008 - DNA, 20 bp, synthetic construct
  source 1..20: mol_type = other DNA
ttctcctgcctcagcctccc

SEQ ID NO: 89009 - DNA, 20 bp, synthetic construct
  source 1..20: mol_type = other DNA
attctcctgcctcagcctcc

SEQ ID NO: 89010 - DNA, 20 bp, synthetic construct
  source 1..20: mol_type = other DNA
cattctcctgcctcagcctc

SEQ ID NO: 89011 - DNA, 20 bp, synthetic construct
  source 1..20: mol_type = other DNA
ccattctcctgcctcagcct

SEQ ID NO: 89012 - DNA, 20 bp, synthetic construct
  source 1..20: mol_type = other DNA
gccattctcctgcctcagcc

SEQ ID NO: 89013 - DNA, 20 bp, synthetic construct
  source 1..20: mol_type = other DNA
tgccattctcctgcctcagc

SEQ ID NO: 89014 - DNA, 20 bp, synthetic construct
  source 1..20: mol_type = other DNA
atgccattctcctgcctcag

SEQ ID NO: 89015 - DNA, 20 bp, synthetic construct
  source 1..20: mol_type = other DNA
catgccattctcctgcctca

SEQ ID NO: 89016 - DNA, 20 bp, synthetic construct
  source 1..20: mol_type = other DNA
tcatgccattctcctgcctc

SEQ ID NO: 89017 - DNA, 20 bp, synthetic construct
  source 1..20: mol_type = other DNA
ttcatgccattctcctgcct

SEQ ID NO: 89018 - DNA, 20 bp, synthetic construct
  source 1..20: mol_type = other DNA
gttcatgccattctcctgcc

SEQ ID NO: 89019 - DNA, 20 bp, synthetic construct
  source 1..20: mol_type = other DNA
agttcatgccattctcctgc

SEQ ID NO: 89020 - DNA, 20 bp, synthetic construct
  source 1..20: mol_type = other DNA
gagttcatgccattctcctg

SEQ ID NO: 89021 - DNA, 20 bp, synthetic construct
  source 1..20: mol_type = other DNA
cgagttcatgccattctcct

SEQ ID NO: 89022 - DNA, 20 bp, synthetic construct
  source 1..20: mol_type = other DNA
ccgagttcatgccattctcc

SEQ ID NO: 89023 - DNA, 20 bp, synthetic construct
  source 1..20: mol_type = other DNA
cccgagttcatgccattctc

SEQ ID NO: 89024 - DNA, 20 bp, synthetic construct
  source 1..20: mol_type = other DNA
tcccgagttcatgccattct

SEQ ID NO: 89025 - DNA, 20 bp, synthetic construct
  source 1..20: mol_type = other DNA
ttcccgagttcatgccattc

SEQ ID NO: 89026 - DNA, 20 bp, synthetic construct
  source 1..20: mol_type = other DNA
cttcccgagttcatgccatt

SEQ ID NO: 89027 - DNA, 20 bp, synthetic construct
  source 1..20: mol_type = other DNA
gcttcccgagttcatgccat

SEQ ID NO: 89028 - DNA, 20 bp, synthetic construct
  source 1..20: mol_type = other DNA
cgcttcccgagttcatgcca

SEQ ID NO: 89029 - DNA, 20 bp, synthetic construct
  source 1..20: mol_type = other DNA
ccgcttcccgagttcatgcc

SEQ ID NO: 89030 - DNA, 20 bp, synthetic construct
  source 1..20: mol_type = other DNA
tccgcttcccgagttcatgc

SEQ ID NO: 89031 - DNA, 20 bp, synthetic construct
  source 1..20: mol_type = other DNA
ctccgcttcccgagttcatg

SEQ ID NO: 89032 - DNA, 20 bp, synthetic construct
  source 1..20: mol_type = other DNA
gctccgcttcccgagttcat

SEQ ID NO: 89033 - DNA, 20 bp, synthetic construct
  source 1..20: mol_type = other DNA
agctccgcttcccgagttca

SEQ ID NO: 89034 - DNA, 20 bp, synthetic construct
  source 1..20: mol_type = other DNA
aagctccgcttcccgagttc

SEQ ID NO: 89035 - DNA, 20 bp, synthetic construct
  source 1..20: mol_type = other DNA
caagctccgcttcccgagtt

SEQ ID NO: 89036 - DNA, 20 bp, synthetic construct
  source 1..20: mol_type = other DNA
gcaagctccgcttcccgagt

SEQ ID NO: 89037 - DNA, 20 bp, synthetic construct
  source 1..20: mol_type = other DNA
tgcaagctccgcttcccgag

SEQ ID NO: 89038 - DNA, 20 bp, synthetic construct
  source 1..20: mol_type = other DNA
ctgcaagctccgcttcccga

SEQ ID NO: 89039 - DNA, 20 bp, synthetic construct
  source 1..20: mol_type = other DNA
actgcaagctccgcttcccg

SEQ ID NO: 89040 - DNA, 20 bp, synthetic construct
  source 1..20: mol_type = other DNA
aactgcaagctccgcttccc

SEQ ID NO: 89041 - DNA, 20 bp, synthetic construct
  source 1..20: mol_type = other DNA
taactgcaagctccgcttcc

SEQ ID NO: 89042 - DNA, 20 bp, synthetic construct
  source 1..20: mol_type = other DNA
ctaactgcaagctccgcttc

SEQ ID NO: 89043 - DNA, 20 bp, synthetic construct
  source 1..20: mol_type = other DNA
gctaactgcaagctccgctt

SEQ ID NO: 89044 - DNA, 20 bp, synthetic construct
  source 1..20: mol_type = other DNA
agctaactgcaagctccgct

SEQ ID NO: 89045 - DNA, 20 bp, synthetic construct
  source 1..20: mol_type = other DNA
cagctaactgcaagctccgc

SEQ ID NO: 89046 - DNA, 20 bp, synthetic construct
  source 1..20: mol_type = other DNA
tcagctaactgcaagctccg

SEQ ID NO: 89047 - DNA, 20 bp, synthetic construct
  source 1..20: mol_type = other DNA
ctcagctaactgcaagctcc

SEQ ID NO: 89048 - DNA, 20 bp, synthetic construct
  source 1..20: mol_type = other DNA
tctcagctaactgcaagctc

SEQ ID NO: 89049 - DNA, 20 bp, synthetic construct
  source 1..20: mol_type = other DNA
atctcagctaactgcaagct

SEQ ID NO: 89050 - DNA, 20 bp, synthetic construct
  source 1..20: mol_type = other DNA
gatctcagctaactgcaagc

SEQ ID NO: 89051 - DNA, 20 bp, synthetic construct
  source 1..20: mol_type = other DNA
tgatctcagctaactgcaag

SEQ ID NO: 89052 - DNA, 20 bp, synthetic construct
  source 1..20: mol_type = other DNA
gtgatctcagctaactgcaa

SEQ ID NO: 89053 - DNA, 20 bp, synthetic construct
  source 1..20: mol_type = other DNA
cgtgatctcagctaactgca

SEQ ID NO: 89054 - DNA, 20 bp, synthetic construct
  source 1..20: mol_type = other DNA
gcgtgatctcagctaactgc

SEQ ID NO: 89055 - DNA, 20 bp, synthetic construct
  source 1..20: mol_type = other DNA
ggcgtgatctcagctaactg

SEQ ID NO: 89056 - DNA, 20 bp, synthetic construct
  source 1..20: mol_type = other DNA
tggcgtgatctcagctaact

SEQ ID NO: 89057 - DNA, 20 bp, synthetic construct
  source 1..20: mol_type = other DNA
atggcgtgatctcagctaac

SEQ ID NO: 89058 - DNA, 20 bp, synthetic construct
  source 1..20: mol_type = other DNA
aatggcgtgatctcagctaa

SEQ ID NO: 89059 - DNA, 20 bp, synthetic construct
  source 1..20: mol_type = other DNA
caatggcgtgatctcagcta

SEQ ID NO: 89060 - DNA, 20 bp, synthetic construct
  source 1..20: mol_type = other DNA
gcaatggcgtgatctcagct

SEQ ID NO: 89061 - DNA, 20 bp, synthetic construct
  source 1..20: mol_type = other DNA
tgcaatggcgtgatctcagc

SEQ ID NO: 89062 - DNA, 20 bp, synthetic construct
  source 1..20: mol_type = other DNA
gtgcaatggcgtgatctcag

SEQ ID NO: 89063 - DNA, 20 bp, synthetic construct
  source 1..20: mol_type = other DNA
agtgcaatggcgtgatctca

SEQ ID NO: 89064 - DNA, 20 bp, synthetic construct
  source 1..20: mol_type = other DNA
gagtgcaatggcgtgatctc

SEQ ID NO: 89065 - DNA, 20 bp, synthetic construct
  source 1..20: mol_type = other DNA
ggagtgcaatggcgtgatct

SEQ ID NO: 89066 - DNA, 20 bp, synthetic construct
  source 1..20: mol_type = other DNA
tggagtgcaatggcgtgatc

SEQ ID NO: 89067 - DNA, 20 bp, synthetic construct
  source 1..20: mol_type = other DNA
ctggagtgcaatggcgtgat

SEQ ID NO: 89068 - DNA, 20 bp, synthetic construct
  source 1..20: mol_type = other DNA
gctggagtgcaatggcgtga

SEQ ID NO: 89069 - DNA, 20 bp, synthetic construct
  source 1..20: mol_type = other DNA
tgctggagtgcaatggcgtg

SEQ ID NO: 89070 - DNA, 20 bp, synthetic construct
  source 1..20: mol_type = other DNA
atgctggagtgcaatggcgt

SEQ ID NO: 89071 - DNA, 20 bp, synthetic construct
  source 1..20: mol_type = other DNA
catgctggagtgcaatggcg

SEQ ID NO: 89072 - DNA, 20 bp, synthetic construct
  source 1..20: mol_type = other DNA
ccatgctggagtgcaatggc

SEQ ID NO: 89073 - DNA, 20 bp, synthetic construct
  source 1..20: mol_type = other DNA
cccatgctggagtgcaatgg

SEQ ID NO: 89074 - DNA, 20 bp, synthetic construct
  source 1..20: mol_type = other DNA
gcccatgctggagtgcaatg

SEQ ID NO: 89075 - DNA, 20 bp, synthetic construct
  source 1..20: mol_type = other DNA
tgcccatgctggagtgcaat

SEQ ID NO: 89076 - DNA, 20 bp, synthetic construct
  source 1..20: mol_type = other DNA
ttgcccatgctggagtgcaa

SEQ ID NO: 89077 - DNA, 20 bp, synthetic construct
  source 1..20: mol_type = other DNA
gttgcccatgctggagtgca

SEQ ID NO: 89078 - DNA, 20 bp, synthetic construct
  source 1..20: mol_type = other DNA
tgttgcccatgctggagtgc

SEQ ID NO: 89079 - DNA, 20 bp, synthetic construct
  source 1..20: mol_type = other DNA
ctgttgcccatgctggagtg

SEQ ID NO: 89080 - DNA, 20 bp, synthetic construct
  source 1..20: mol_type = other DNA
tctgttgcccatgctggagt

SEQ ID NO: 89081 - DNA, 20 bp, synthetic construct
  source 1..20: mol_type = other DNA
ctctgttgcccatgctggag

SEQ ID NO: 89082 - DNA, 20 bp, synthetic construct
  source 1..20: mol_type = other DNA
gctctgttgcccatgctgga

SEQ ID NO: 89083 - DNA, 20 bp, synthetic construct
  source 1..20: mol_type = other DNA
tgctctgttgcccatgctgg

SEQ ID NO: 89084 - DNA, 20 bp, synthetic construct
  source 1..20: mol_type = other DNA
ttgctctgttgcccatgctg

SEQ ID NO: 89085 - DNA, 20 bp, synthetic construct
  source 1..20: mol_type = other DNA
cttgctctgttgcccatgct

SEQ ID NO: 89086 - DNA, 20 bp, synthetic construct
  source 1..20: mol_type = other DNA
tcttgctctgttgcccatgc

SEQ ID NO: 89087 - DNA, 20 bp, synthetic construct
  source 1..20: mol_type = other DNA
gtcttgctctgttgcccatg

SEQ ID NO: 89088 - DNA, 20 bp, synthetic construct
  source 1..20: mol_type = other DNA
agtcttgctctgttgcccat

SEQ ID NO: 89089 - DNA, 20 bp, synthetic construct
  source 1..20: mol_type = other DNA
gagtcttgctctgttgccca

SEQ ID NO: 89090 - DNA, 20 bp, synthetic construct
  source 1..20: mol_type = other DNA
agagtcttgctctgttgccc

SEQ ID NO: 89091 - DNA, 20 bp, synthetic construct
  source 1..20: mol_type = other DNA
cagagtcttgctctgttgcc

SEQ ID NO: 89092 - DNA, 20 bp, synthetic construct
  source 1..20: mol_type = other DNA
acagagtcttgctctgttgc

SEQ ID NO: 89093 - DNA, 20 bp, synthetic construct
  source 1..20: mol_type = other DNA
gacagagtcttgctctgttg

SEQ ID NO: 89094 - DNA, 20 bp, synthetic construct
  source 1..20: mol_type = other DNA
agacagagtcttgctctgtt

SEQ ID NO: 89095 - DNA, 20 bp, synthetic construct
  source 1..20: mol_type = other DNA
gagacagagtcttgctctgt

SEQ ID NO: 89096 - DNA, 20 bp, synthetic construct
  source 1..20: mol_type = other DNA
tgagacagagtcttgctctg

SEQ ID NO: 89097 - DNA, 20 bp, synthetic construct
  source 1..20: mol_type = other DNA
ttgagacagagtcttgctct

SEQ ID NO: 89098 - DNA, 20 bp, synthetic construct
  source 1..20: mol_type = other DNA
tttgagacagagtcttgctc

SEQ ID NO: 89099 - DNA, 20 bp, synthetic construct
  source 1..20: mol_type = other DNA
ttttgagacagagtcttgct

SEQ ID NO: 89100 - DNA, 20 bp, synthetic construct
  source 1..20: mol_type = other DNA
tttttgagacagagtcttgc

SEQ ID NO: 89101 - DNA, 20 bp, synthetic construct
  source 1..20: mol_type = other DNA
ttttttgagacagagtcttg

SEQ ID NO: 89102 - DNA, 20 bp, synthetic construct
  source 1..20: mol_type = other DNA
tttttttgagacagagtctt

SEQ ID NO: 89103 - DNA, 20 bp, synthetic construct
  source 1..20: mol_type = other DNA
ttttttttgagacagagtct

SEQ ID NO: 89104 - DNA, 20 bp, synthetic construct
  source 1..20: mol_type = other DNA
tttttttttgagacagagtc

SEQ ID NO: 89105 - DNA, 20 bp, synthetic construct
  source 1..20: mol_type = other DNA
ttttttttttgagacagagt

SEQ ID NO: 89106 - DNA, 20 bp, synthetic construct
  source 1..20: mol_type = other DNA
tttttttttttgagacagag

SEQ ID NO: 89107 - DNA, 20 bp, synthetic construct
  source 1..20: mol_type = other DNA
ttttttttttttgagacaga

SEQ ID NO: 89108 - DNA, 20 bp, synthetic construct
  source 1..20: mol_type = other DNA
tttttttttttttgagacag

SEQ ID NO: 89109 - DNA, 20 bp, synthetic construct
  source 1..20: mol_type = other DNA
ttttttttttttttgagaca

SEQ ID NO: 89110 - DNA, 20 bp, synthetic construct
  source 1..20: mol_type = other DNA
tttttttttttttttgagac

SEQ ID NO: 89111 - DNA, 20 bp, synthetic construct
  source 1..20: mol_type = other DNA
ttttttttttttttttgaga

SEQ ID NO: 89112 - DNA, 20 bp, synthetic construct
  source 1..20: mol_type = other DNA
tttttttttttttttttgag

SEQ ID NO: 89113 - DNA, 20 bp, synthetic construct
  source 1..20: mol_type = other DNA
ttttttttttttttttttga

SEQ ID NO: 89114 - DNA, 20 bp, synthetic construct
  source 1..20: mol_type = other DNA
tttttttttttttttttttg

SEQ ID NO: 89115 - DNA, 20 bp, synthetic construct
  source 1..20: mol_type = other DNA
tttttttttttttttttttt

SEQ ID NO: 89116 - DNA, 20 bp, synthetic construct
  source 1..20: mol_type = other DNA
tttttttttttttttttttt

SEQ ID NO: 89117 - DNA, 20 bp, synthetic construct
  source 1..20: mol_type = other DNA
cttttttttttttttttttt

SEQ ID NO: 89118 - DNA, 20 bp, synthetic construct
  source 1..20: mol_type = other DNA
actttttttttttttttttt

SEQ ID NO: 89119 - DNA, 20 bp, synthetic construct
  source 1..20: mol_type = other DNA
aacttttttttttttttttt

SEQ ID NO: 89120 - DNA, 20 bp, synthetic construct
  source 1..20: mol_type = other DNA
aaactttttttttttttttt

SEQ ID NO: 89121 - DNA, 20 bp, synthetic construct
  source 1..20: mol_type = other DNA
taaacttttttttttttttt

SEQ ID NO: 89122 - DNA, 20 bp, synthetic construct
  source 1..20: mol_type = other DNA
ttaaactttttttttttttt

SEQ ID NO: 89123 - DNA, 20 bp, synthetic construct
  source 1..20: mol_type = other DNA
tttaaacttttttttttttt

SEQ ID NO: 89124 - DNA, 20 bp, synthetic construct
  source 1..20: mol_type = other DNA
ttttaaactttttttttttt

SEQ ID NO: 89125 - DNA, 20 bp, synthetic construct
  source 1..20: mol_type = other DNA
tttttaaacttttttttttt

SEQ ID NO: 89126 - DNA, 20 bp, synthetic construct
  source 1..20: mol_type = other DNA
gtttttaaactttttttttt

SEQ ID NO: 89127 - DNA, 20 bp, synthetic construct
  source 1..20: mol_type = other DNA
agtttttaaacttttttttt

SEQ ID NO: 89128 - DNA, 20 bp, synthetic construct
  source 1..20: mol_type = other DNA
tagtttttaaactttttttt

SEQ ID NO: 89129 - DNA, 20 bp, synthetic construct
  source 1..20: mol_type = other DNA
ctagtttttaaacttttttt

SEQ ID NO: 89130 - DNA, 20 bp, synthetic construct
  source 1..20: mol_type = other DNA
tctagtttttaaactttttt

SEQ ID NO: 89131 - DNA, 20 bp, synthetic construct
  source 1..20: mol_type = other DNA
gtctagtttttaaacttttt

SEQ ID NO: 89132 - DNA, 20 bp, synthetic construct
  source 1..20: mol_type = other DNA
cgtctagtttttaaactttt

SEQ ID NO: 89133 - DNA, 20 bp, synthetic construct
  source 1..20: mol_type = other DNA
acgtctagtttttaaacttt

SEQ ID NO: 89134 - DNA, 20 bp, synthetic construct
  source 1..20: mol_type = other DNA
aacgtctagtttttaaactt

SEQ ID NO: 89135 - DNA, 20 bp, synthetic construct
  source 1..20: mol_type = other DNA
caacgtctagtttttaaact

SEQ ID NO: 89136 - DNA, 20 bp, synthetic construct
  source 1..20: mol_type = other DNA
tcaacgtctagtttttaaac

SEQ ID NO: 89137 - DNA, 20 bp, synthetic construct
  source 1..20: mol_type = other DNA
gtcaacgtctagtttttaaa

SEQ ID NO: 89138 - DNA, 20 bp, synthetic construct
  source 1..20: mol_type = other DNA
tgtcaacgtctagtttttaa

SEQ ID NO: 89139 - DNA, 20 bp, synthetic construct
  source 1..20: mol_type = other DNA
atgtcaacgtctagttttta

SEQ ID NO: 89140 - DNA, 20 bp, synthetic construct
  source 1..20: mol_type = other DNA
catgtcaacgtctagttttt

SEQ ID NO: 89141 - DNA, 20 bp, synthetic construct
  source 1..20: mol_type = other DNA
tcatgtcaacgtctagtttt

SEQ ID NO: 89142 - DNA, 20 bp, synthetic construct
  source 1..20: mol_type = other DNA
atcatgtcaacgtctagttt

SEQ ID NO: 89143 - DNA, 20 bp, synthetic construct
  source 1..20: mol_type = other DNA
aatcatgtcaacgtctagtt

SEQ ID NO: 89144 - DNA, 20 bp, synthetic construct
  source 1..20: mol_type = other DNA
aaatcatgtcaacgtctagt

SEQ ID NO: 89145 - DNA, 20 bp, synthetic construct
  source 1..20: mol_type = other DNA
aaaatcatgtcaacgtctag

SEQ ID NO: 89146 - DNA, 20 bp, synthetic construct
  source 1..20: mol_type = other DNA
taaaatcatgtcaacgtcta

SEQ ID NO: 89147 - DNA, 20 bp, synthetic construct
  source 1..20: mol_type = other DNA
gtaaaatcatgtcaacgtct

SEQ ID NO: 89148 - DNA, 20 bp, synthetic construct
  source 1..20: mol_type = other DNA
tgtaaaatcatgtcaacgtc

SEQ ID NO: 89149 - DNA, 20 bp, synthetic construct
  source 1..20: mol_type = other DNA
ttgtaaaatcatgtcaacgt

SEQ ID NO: 89150 - DNA, 20 bp, synthetic construct
  source 1..20: mol_type = other DNA
attgtaaaatcatgtcaacg

SEQ ID NO: 89151 - DNA, 20 bp, synthetic construct
  source 1..20: mol_type = other DNA
tattgtaaaatcatgtcaac

SEQ ID NO: 89152 - DNA, 20 bp, synthetic construct
  source 1..20: mol_type = other DNA
ttattgtaaaatcatgtcaa

SEQ ID NO: 89153 - DNA, 20 bp, synthetic construct
  source 1..20: mol_type = other DNA
cttattgtaaaatcatgtca

SEQ ID NO: 89154 - DNA, 20 bp, synthetic construct
  source 1..20: mol_type = other DNA
ccttattgtaaaatcatgtc

SEQ ID NO: 89155 - DNA, 20 bp, synthetic construct
  source 1..20: mol_type = other DNA
gccttattgtaaaatcatgt

SEQ ID NO: 89156 - DNA, 20 bp, synthetic construct
  source 1..20: mol_type = other DNA
agccttattgtaaaatcatg

SEQ ID NO: 89157 - DNA, 20 bp, synthetic construct
  source 1..20: mol_type = other DNA
cagccttattgtaaaatcat

SEQ ID NO: 89158 - DNA, 20 bp, synthetic construct
  source 1..20: mol_type = other DNA
tcagccttattgtaaaatca

SEQ ID NO: 89159 - DNA, 20 bp, synthetic construct
  source 1..20: mol_type = other DNA
gtcagccttattgtaaaatc

SEQ ID NO: 89160 - DNA, 20 bp, synthetic construct
  source 1..20: mol_type = other DNA
agtcagccttattgtaaaat

SEQ ID NO: 89161 - DNA, 20 bp, synthetic construct
  source 1..20: mol_type = other DNA
cagtcagccttattgtaaaa

SEQ ID NO: 89162 - DNA, 20 bp, synthetic construct
  source 1..20: mol_type = other DNA
gcagtcagccttattgtaaa

SEQ ID NO: 89163 - DNA, 20 bp, synthetic construct
  source 1..20: mol_type = other DNA
agcagtcagccttattgtaa

SEQ ID NO: 89164 - DNA, 20 bp, synthetic construct
  source 1..20: mol_type = other DNA
aagcagtcagccttattgta

SEQ ID NO: 89165 - DNA, 20 bp, synthetic construct
  source 1..20: mol_type = other DNA
aaagcagtcagccttattgt

SEQ ID NO: 89166 - DNA, 20 bp, synthetic construct
  source 1..20: mol_type = other DNA
aaaagcagtcagccttattg

SEQ ID NO: 89167 - DNA, 20 bp, synthetic construct
  source 1..20: mol_type = other DNA
caaaagcagtcagccttatt

SEQ ID NO: 89168 - DNA, 20 bp, synthetic construct
  source 1..20: mol_type = other DNA
gcaaaagcagtcagccttat

SEQ ID NO: 89169 - DNA, 20 bp, synthetic construct
  source 1..20: mol_type = other DNA
agcaaaagcagtcagcctta

SEQ ID NO: 89170 - DNA, 20 bp, synthetic construct
  source 1..20: mol_type = other DNA
tagcaaaagcagtcagcctt

SEQ ID NO: 89171 - DNA, 20 bp, synthetic construct
  source 1..20: mol_type = other DNA
gtagcaaaagcagtcagcct

SEQ ID NO: 89172 - DNA, 20 bp, synthetic construct
  source 1..20: mol_type = other DNA
agtagcaaaagcagtcagcc

SEQ ID NO: 89173 - DNA, 20 bp, synthetic construct
  source 1..20: mol_type = other DNA
aagtagcaaaagcagtcagc

SEQ ID NO: 89174 - DNA, 20 bp, synthetic construct
  source 1..20: mol_type = other DNA
aaagtagcaaaagcagtcag

SEQ ID NO: 89175 - DNA, 20 bp, synthetic construct
  source 1..20: mol_type = other DNA
caaagtagcaaaagcagtca

SEQ ID NO: 89176 - DNA, 20 bp, synthetic construct
  source 1..20: mol_type = other DNA
gcaaagtagcaaaagcagtc

SEQ ID NO: 89177 - DNA, 20 bp, synthetic construct
  source 1..20: mol_type = other DNA
ggcaaagtagcaaaagcagt

SEQ ID NO: 89178 - DNA, 20 bp, synthetic construct
  source 1..20: mol_type = other DNA
tggcaaagtagcaaaagcag

SEQ ID NO: 89179 - DNA, 20 bp, synthetic construct
  source 1..20: mol_type = other DNA
ttggcaaagtagcaaaagca

SEQ ID NO: 89180 - DNA, 20 bp, synthetic construct
  source 1..20: mol_type = other DNA
attggcaaagtagcaaaagc

SEQ ID NO: 89181 - DNA, 20 bp, synthetic construct
  source 1..20: mol_type = other DNA
gattggcaaagtagcaaaag

SEQ ID NO: 89182 - DNA, 20 bp, synthetic construct
  source 1..20: mol_type = other DNA
tgattggcaaagtagcaaaa

SEQ ID NO: 89183 - DNA, 20 bp, synthetic construct
  source 1..20: mol_type = other DNA
ctgattggcaaagtagcaaa

SEQ ID NO: 89184 - DNA, 20 bp, synthetic construct
  source 1..20: mol_type = other DNA
actgattggcaaagtagcaa

SEQ ID NO: 89185 - DNA, 20 bp, synthetic construct
  source 1..20: mol_type = other DNA
gactgattggcaaagtagca

SEQ ID NO: 89186 - DNA, 20 bp, synthetic construct
  source 1..20: mol_type = other DNA
ggactgattggcaaagtagc

SEQ ID NO: 89187 - DNA, 20 bp, synthetic construct
  source 1..20: mol_type = other DNA
aggactgattggcaaagtag

SEQ ID NO: 89188 - DNA, 20 bp, synthetic construct
  source 1..20: mol_type = other DNA
aaggactgattggcaaagta

SEQ ID NO: 89189 - DNA, 20 bp, synthetic construct
  source 1..20: mol_type = other DNA
taaggactgattggcaaagt

SEQ ID NO: 89190 - DNA, 20 bp, synthetic construct
  source 1..20: mol_type = other DNA
ctaaggactgattggcaaag

SEQ ID NO: 89191 - DNA, 20 bp, synthetic construct
  source 1..20: mol_type = other DNA
actaaggactgattggcaaa

SEQ ID NO: 89192 - DNA, 20 bp, synthetic construct
  source 1..20: mol_type = other DNA
cactaaggactgattggcaa

SEQ ID NO: 89193 - DNA, 20 bp, synthetic construct
  source 1..20: mol_type = other DNA
gcactaaggactgattggca

SEQ ID NO: 89194 - DNA, 20 bp, synthetic construct
  source 1..20: mol_type = other DNA
agcactaaggactgattggc

SEQ ID NO: 89195 - DNA, 20 bp, synthetic construct
  source 1..20: mol_type = other DNA
aagcactaaggactgattgg

SEQ ID NO: 89196 - DNA, 20 bp, synthetic construct
  source 1..20: mol_type = other DNA
aaagcactaaggactgattg

SEQ ID NO: 89197 - DNA, 20 bp, synthetic construct
  source 1..20: mol_type = other DNA
caaagcactaaggactgatt

SEQ ID NO: 89198 - DNA, 20 bp, synthetic construct
  source 1..20: mol_type = other DNA
acaaagcactaaggactgat

SEQ ID NO: 89199 - DNA, 20 bp, synthetic construct
  source 1..20: mol_type = other DNA
aacaaagcactaaggactga

SEQ ID NO: 89200 - DNA, 20 bp, synthetic construct
  source 1..20: mol_type = other DNA
gaacaaagcactaaggactg

SEQ ID NO: 89201 - DNA, 20 bp, synthetic construct
  source 1..20: mol_type = other DNA
ggaacaaagcactaaggact

SEQ ID NO: 89202 - DNA, 20 bp, synthetic construct
  source 1..20: mol_type = other DNA
gggaacaaagcactaaggac

SEQ ID NO: 89203 - DNA, 20 bp, synthetic construct
  source 1..20: mol_type = other DNA
tgggaacaaagcactaagga

SEQ ID NO: 89204 - DNA, 20 bp, synthetic construct
  source 1..20: mol_type = other DNA
atgggaacaaagcactaagg

SEQ ID NO: 89205 - DNA, 20 bp, synthetic construct
  source 1..20: mol_type = other DNA
tatgggaacaaagcactaag

SEQ ID NO: 89206 - DNA, 20 bp, synthetic construct
  source 1..20: mol_type = other DNA
ttatgggaacaaagcactaa

SEQ ID NO: 89207 - DNA, 20 bp, synthetic construct
  source 1..20: mol_type = other DNA
gttatgggaacaaagcacta

SEQ ID NO: 89208 - DNA, 20 bp, synthetic construct
  source 1..20: mol_type = other DNA
agttatgggaacaaagcact

SEQ ID NO: 89209 - DNA, 20 bp, synthetic construct
  source 1..20: mol_type = other DNA
cagttatgggaacaaagcac

SEQ ID NO: 89210 - DNA, 20 bp, synthetic construct
  source 1..20: mol_type = other DNA
acagttatgggaacaaagca

SEQ ID NO: 89211 - DNA, 20 bp, synthetic construct
  source 1..20: mol_type = other DNA
cacagttatgggaacaaagc

SEQ ID NO: 89212 - DNA, 20 bp, synthetic construct
  source 1..20: mol_type = other DNA
ccacagttatgggaacaaag

SEQ ID NO: 89213 - DNA, 20 bp, synthetic construct
  source 1..20: mol_type = other DNA
accacagttatgggaacaaa

SEQ ID NO: 89214 - DNA, 20 bp, synthetic construct
  source 1..20: mol_type = other DNA
taccacagttatgggaacaa

SEQ ID NO: 89215 - DNA, 20 bp, synthetic construct
  source 1..20: mol_type = other DNA
ttaccacagttatgggaaca

SEQ ID NO: 89216 - DNA, 20 bp, synthetic construct
  source 1..20: mol_type = other DNA
cttaccacagttatgggaac

SEQ ID NO: 89217 - DNA, 20 bp, synthetic construct
  source 1..20: mol_type = other DNA
gcttaccacagttatgggaa

SEQ ID NO: 89218 - DNA, 20 bp, synthetic construct
  source 1..20: mol_type = other DNA
tgcttaccacagttatggga

SEQ ID NO: 89219 - DNA, 20 bp, synthetic construct
  source 1..20: mol_type = other DNA
ttgcttaccacagttatggg

SEQ ID NO: 89220 - DNA, 20 bp, synthetic construct
  source 1..20: mol_type = other DNA
cttgcttaccacagttatgg

SEQ ID NO: 89221 - DNA, 20 bp, synthetic construct
  source 1..20: mol_type = other DNA
tcttgcttaccacagttatg

SEQ ID NO: 89222 - DNA, 20 bp, synthetic construct
  source 1..20: mol_type = other DNA
ctcttgcttaccacagttat

SEQ ID NO: 89223 - DNA, 20 bp, synthetic construct
  source 1..20: mol_type = other DNA
gctcttgcttaccacagtta

SEQ ID NO: 89224 - DNA, 20 bp, synthetic construct
  source 1..20: mol_type = other DNA
agctcttgcttaccacagtt

SEQ ID NO: 89225 - DNA, 20 bp, synthetic construct
  source 1..20: mol_type = other DNA
aagctcttgcttaccacagt

SEQ ID NO: 89226 - DNA, 20 bp, synthetic construct
  source 1..20: mol_type = other DNA
taagctcttgcttaccacag

SEQ ID NO: 89227 - DNA, 20 bp, synthetic construct
  source 1..20: mol_type = other DNA
gtaagctcttgcttaccaca

SEQ ID NO: 89228 - DNA, 20 bp, synthetic construct
  source 1..20: mol_type = other DNA
tgtaagctcttgcttaccac

SEQ ID NO: 89229 - DNA, 20 bp, synthetic construct
  source 1..20: mol_type = other DNA
ttgtaagctcttgcttacca

SEQ ID NO: 89230 - DNA, 20 bp, synthetic construct
  source 1..20: mol_type = other DNA
tttgtaagctcttgcttacc

SEQ ID NO: 89231 - DNA, 20 bp, synthetic construct
  source 1..20: mol_type = other DNA
ctttgtaagctcttgcttac

SEQ ID NO: 89232 - DNA, 20 bp, synthetic construct
  source 1..20: mol_type = other DNA
tctttgtaagctcttgctta

SEQ ID NO: 89233 - DNA, 20 bp, synthetic construct
  source 1..20: mol_type = other DNA
ttctttgtaagctcttgctt

SEQ ID NO: 89234 - DNA, 20 bp, synthetic construct
  source 1..20: mol_type = other DNA
attctttgtaagctcttgct

SEQ ID NO: 89235 - DNA, 20 bp, synthetic construct
  source 1..20: mol_type = other DNA
tattctttgtaagctcttgc

SEQ ID NO: 89236 - DNA, 20 bp, synthetic construct
  source 1..20: mol_type = other DNA
gtattctttgtaagctcttg

SEQ ID NO: 89237 - DNA, 20 bp, synthetic construct
  source 1..20: mol_type = other DNA
agtattctttgtaagctctt

SEQ ID NO: 89238 - DNA, 20 bp, synthetic construct
  source 1..20: mol_type = other DNA
aagtattctttgtaagctct

SEQ ID NO: 89239 - DNA, 20 bp, synthetic construct
  source 1..20: mol_type = other DNA
taagtattctttgtaagctc

SEQ ID NO: 89240 - DNA, 20 bp, synthetic construct
  source 1..20: mol_type = other DNA
ttaagtattctttgtaagct

SEQ ID NO: 89241 - DNA, 20 bp, synthetic construct
  source 1..20: mol_type = other DNA
tttaagtattctttgtaagc

SEQ ID NO: 89242 - DNA, 20 bp, synthetic construct
  source 1..20: mol_type = other DNA
ttttaagtattctttgtaag

SEQ ID NO: 89243 - DNA, 20 bp, synthetic construct
  source 1..20: mol_type = other DNA
gttttaagtattctttgtaa

SEQ ID NO: 89244 - DNA, 20 bp, synthetic construct
  source 1..20: mol_type = other DNA
tgttttaagtattctttgta

SEQ ID NO: 89245 - DNA, 20 bp, synthetic construct
  source 1..20: mol_type = other DNA
ttgttttaagtattctttgt

SEQ ID NO: 89246 - DNA, 20 bp, synthetic construct
  source 1..20: mol_type = other DNA
tttgttttaagtattctttg

SEQ ID NO: 89247 - DNA, 20 bp, synthetic construct
  source 1..20: mol_type = other DNA
gtttgttttaagtattcttt

SEQ ID NO: 89248 - DNA, 20 bp, synthetic construct
  source 1..20: mol_type = other DNA
tgtttgttttaagtattctt

SEQ ID NO: 89249 - DNA, 20 bp, synthetic construct
  source 1..20: mol_type = other DNA
ttgtttgttttaagtattct

SEQ ID NO: 89250 - DNA, 20 bp, synthetic construct
  source 1..20: mol_type = other DNA
tttgtttgttttaagtattc

SEQ ID NO: 89251 - DNA, 20 bp, synthetic construct
  source 1..20: mol_type = other DNA
gtttgtttgttttaagtatt

SEQ ID NO: 89252 - DNA, 20 bp, synthetic construct
  source 1..20: mol_type = other DNA
tgtttgtttgttttaagtat

SEQ ID NO: 89253 - DNA, 20 bp, synthetic construct
  source 1..20: mol_type = other DNA
ttgtttgtttgttttaagta

SEQ ID NO: 89254 - DNA, 20 bp, synthetic construct
  source 1..20: mol_type = other DNA
tttgtttgtttgttttaagt

SEQ ID NO: 89255 - DNA, 20 bp, synthetic construct
  source 1..20: mol_type = other DNA
gtttgtttgtttgttttaag

SEQ ID NO: 89256 - DNA, 20 bp, synthetic construct
  source 1..20: mol_type = other DNA
tgtttgtttgtttgttttaa

SEQ ID NO: 89257 - DNA, 20 bp, synthetic construct
  source 1..20: mol_type = other DNA
ttgtttgtttgtttgtttta

SEQ ID NO: 89258 - DNA, 20 bp, synthetic construct
  source 1..20: mol_type = other DNA
tttgtttgtttgtttgtttt

SEQ ID NO: 89259 - DNA, 20 bp, synthetic construct
  source 1..20: mol_type = other DNA
gtttgtttgtttgtttgttt

SEQ ID NO: 89260 - DNA, 20 bp, synthetic construct
  source 1..20: mol_type = other DNA
tgtttgtttgtttgtttgtt

SEQ ID NO: 89261 - DNA, 20 bp, synthetic construct
  source 1..20: mol_type = other DNA
ttgtttgtttgtttgtttgt

SEQ ID NO: 89262 - DNA, 20 bp, synthetic construct
  source 1..20: mol_type = other DNA
tttgtttgtttgtttgtttg

SEQ ID NO: 89263 - DNA, 20 bp, synthetic construct
  source 1..20: mol_type = other DNA
ttttgtttgtttgtttgttt

SEQ ID NO: 89264 - DNA, 20 bp, synthetic construct
  source 1..20: mol_type = other DNA
tttttgtttgtttgtttgtt

SEQ ID NO: 89265 - DNA, 20 bp, synthetic construct
  source 1..20: mol_type = other DNA
ttttttgtttgtttgtttgt

SEQ ID NO: 89266 - DNA, 20 bp, synthetic construct
  source 1..20: mol_type = other DNA
tttttttgtttgtttgtttg

SEQ ID NO: 89267 - DNA, 20 bp, synthetic construct
  source 1..20: mol_type = other DNA
ttttttttgtttgtttgttt

SEQ ID NO: 89268 - DNA, 20 bp, synthetic construct
  source 1..20: mol_type = other DNA
gttttttttgtttgtttgtt

SEQ ID NO: 89269 - DNA, 20 bp, synthetic construct
  source 1..20: mol_type = other DNA
tgttttttttgtttgtttgt

SEQ ID NO: 89270 - DNA, 20 bp, synthetic construct
  source 1..20: mol_type = other DNA
gtgttttttttgtttgtttg

SEQ ID NO: 89271 - DNA, 20 bp, synthetic construct
  source 1..20: mol_type = other DNA
agtgttttttttgtttgttt

SEQ ID NO: 89272 - DNA, 20 bp, synthetic construct
  source 1..20: mol_type = other DNA
aagtgttttttttgtttgtt

SEQ ID NO: 89273 - DNA, 20 bp, synthetic construct
  source 1..20: mol_type = other DNA
aaagtgttttttttgtttgt

SEQ ID NO: 89274 - DNA, 20 bp, synthetic construct
  source 1..20: mol_type = other DNA
aaaagtgttttttttgtttg

SEQ ID NO: 89275 - DNA, 20 bp, synthetic construct
  source 1..20: mol_type = other DNA
aaaaagtgttttttttgttt

SEQ ID NO: 89276 - DNA, 20 bp, synthetic construct
  source 1..20: mol_type = other DNA
gaaaaagtgttttttttgtt

SEQ ID NO: 89277 - DNA, 20 bp, synthetic construct
  source 1..20: mol_type = other DNA
agaaaaagtgttttttttgt

SEQ ID NO: 89278 - DNA, 20 bp, synthetic construct
  source 1..20: mol_type = other DNA
gagaaaaagtgttttttttg

SEQ ID NO: 89279 - DNA, 20 bp, synthetic construct
  source 1..20: mol_type = other DNA
agagaaaaagtgtttttttt

SEQ ID NO: 89280 - DNA, 20 bp, synthetic construct
  source 1..20: mol_type = other DNA
aagagaaaaagtgttttttt

SEQ ID NO: 89281 - DNA, 20 bp, synthetic construct
  source 1..20: mol_type = other DNA
aaagagaaaaagtgtttttt

SEQ ID NO: 89282 - DNA, 20 bp, synthetic construct
  source 1..20: mol_type = other DNA
aaaagagaaaaagtgttttt

SEQ ID NO: 89283 - DNA, 20 bp, synthetic construct
  source 1..20: mol_type = other DNA
taaaagagaaaaagtgtttt

SEQ ID NO: 89284 - DNA, 20 bp, synthetic construct
  source 1..20: mol_type = other DNA
ttaaaagagaaaaagtgttt

SEQ ID NO: 89285 - DNA, 20 bp, synthetic construct
  source 1..20: mol_type = other DNA
attaaaagagaaaaagtgtt

SEQ ID NO: 89286 - DNA, 20 bp, synthetic construct
  source 1..20: mol_type = other DNA
gattaaaagagaaaaagtgt

SEQ ID NO: 89287 - DNA, 20 bp, synthetic construct
  source 1..20: mol_type = other DNA
tgattaaaagagaaaaagtg

SEQ ID NO: 89288 - DNA, 20 bp, synthetic construct
  source 1..20: mol_type = other DNA
ctgattaaaagagaaaaagt

SEQ ID NO: 89289 - DNA, 20 bp, synthetic construct
  source 1..20: mol_type = other DNA
actgattaaaagagaaaaag

SEQ ID NO: 89290 - DNA, 20 bp, synthetic construct
  source 1..20: mol_type = other DNA
gactgattaaaagagaaaaa

SEQ ID NO: 89291 - DNA, 20 bp, synthetic construct
  source 1..20: mol_type = other DNA
ggactgattaaaagagaaaa

SEQ ID NO: 89292 - DNA, 20 bp, synthetic construct
  source 1..20: mol_type = other DNA
tggactgattaaaagagaaa

SEQ ID NO: 89293 - DNA, 20 bp, synthetic construct
  source 1..20: mol_type = other DNA
ctggactgattaaaagagaa

SEQ ID NO: 89294 - DNA, 20 bp, synthetic construct
  source 1..20: mol_type = other DNA
tctggactgattaaaagaga

SEQ ID NO: 89295 - DNA, 20 bp, synthetic construct
  source 1..20: mol_type = other DNA
ctctggactgattaaaagag

SEQ ID NO: 89296 - DNA, 20 bp, synthetic construct
  source 1..20: mol_type = other DNA
tctctggactgattaaaaga

SEQ ID NO: 89297 - DNA, 20 bp, synthetic construct
  source 1..20: mol_type = other DNA
ttctctggactgattaaaag

SEQ ID NO: 89298 - DNA, 20 bp, synthetic construct
  source 1..20: mol_type = other DNA
gttctctggactgattaaaa

SEQ ID NO: 89299 - DNA, 20 bp, synthetic construct
  source 1..20: mol_type = other DNA
ggttctctggactgattaaa

SEQ ID NO: 89300 - DNA, 20 bp, synthetic construct
  source 1..20: mol_type = other DNA
aggttctctggactgattaa

SEQ ID NO: 89301 - DNA, 20 bp, synthetic construct
  source 1..20: mol_type = other DNA
aaggttctctggactgatta

SEQ ID NO: 89302 - DNA, 20 bp, synthetic construct
  source 1..20: mol_type = other DNA
aaaggttctctggactgatt

SEQ ID NO: 89303 - DNA, 20 bp, synthetic construct
  source 1..20: mol_type = other DNA
taaaggttctctggactgat

SEQ ID NO: 89304 - DNA, 20 bp, synthetic construct
  source 1..20: mol_type = other DNA
ttaaaggttctctggactga

SEQ ID NO: 89305 - DNA, 20 bp, synthetic construct
  source 1..20: mol_type = other DNA
tttaaaggttctctggactg

SEQ ID NO: 89306 - DNA, 20 bp, synthetic construct
  source 1..20: mol_type = other DNA
ttttaaaggttctctggact

SEQ ID NO: 89307 - DNA, 20 bp, synthetic construct
  source 1..20: mol_type = other DNA
cttttaaaggttctctggac

SEQ ID NO: 89308 - DNA, 20 bp, synthetic construct
  source 1..20: mol_type = other DNA
tcttttaaaggttctctgga

SEQ ID NO: 89309 - DNA, 20 bp, synthetic construct
  source 1..20: mol_type = other DNA
ttcttttaaaggttctctgg

SEQ ID NO: 89310 - DNA, 20 bp, synthetic construct
  source 1..20: mol_type = other DNA
tttcttttaaaggttctctg

SEQ ID NO: 89311 - DNA, 20 bp, synthetic construct
  source 1..20: mol_type = other DNA
gtttcttttaaaggttctct

SEQ ID NO: 89312 - DNA, 20 bp, synthetic construct
  source 1..20: mol_type = other DNA
tgtttcttttaaaggttctc

SEQ ID NO: 89313 - DNA, 20 bp, synthetic construct
  source 1..20: mol_type = other DNA
ttgtttcttttaaaggttct

SEQ ID NO: 89314 - DNA, 20 bp, synthetic construct
  source 1..20: mol_type = other DNA
cttgtttcttttaaaggttc

SEQ ID NO: 89315 - DNA, 20 bp, synthetic construct
  source 1..20: mol_type = other DNA
tcttgtttcttttaaaggtt

SEQ ID NO: 89316 - DNA, 20 bp, synthetic construct
  source 1..20: mol_type = other DNA
atcttgtttcttttaaaggt

SEQ ID NO: 89317 - DNA, 20 bp, synthetic construct
  source 1..20: mol_type = other DNA
gatcttgtttcttttaaagg

SEQ ID NO: 89318 - DNA, 20 bp, synthetic construct
  source 1..20: mol_type = other DNA
cgatcttgtttcttttaaag

SEQ ID NO: 89319 - DNA, 20 bp, synthetic construct
  source 1..20: mol_type = other DNA
ccgatcttgtttcttttaaa

SEQ ID NO: 89320 - DNA, 20 bp, synthetic construct
  source 1..20: mol_type = other DNA
gccgatcttgtttcttttaa

SEQ ID NO: 89321 - DNA, 20 bp, synthetic construct
  source 1..20: mol_type = other DNA
ggccgatcttgtttctttta

SEQ ID NO: 89322 - DNA, 20 bp, synthetic construct
  source 1..20: mol_type = other DNA
tggccgatcttgtttctttt

SEQ ID NO: 89323 - DNA, 20 bp, synthetic construct
  source 1..20: mol_type = other DNA
ctggccgatcttgtttcttt

SEQ ID NO: 89324 - DNA, 20 bp, synthetic construct
  source 1..20: mol_type = other DNA
actggccgatcttgtttctt

SEQ ID NO: 89325 - DNA, 20 bp, synthetic construct
  source 1..20: mol_type = other DNA
aactggccgatcttgtttct

SEQ ID NO: 89326 - DNA, 20 bp, synthetic construct
  source 1..20: mol_type = other DNA
caactggccgatcttgtttc

SEQ ID NO: 89327 - DNA, 20 bp, synthetic construct
  source 1..20: mol_type = other DNA
gcaactggccgatcttgttt

SEQ ID NO: 89328 - DNA, 20 bp, synthetic construct
  source 1..20: mol_type = other DNA
agcaactggccgatcttgtt

SEQ ID NO: 89329 - DNA, 20 bp, synthetic construct
  source 1..20: mol_type = other DNA
cagcaactggccgatcttgt

SEQ ID NO: 89330 - DNA, 20 bp, synthetic construct
  source 1..20: mol_type = other DNA
acagcaactggccgatcttg

SEQ ID NO: 89331 - DNA, 20 bp, synthetic construct
  source 1..20: mol_type = other DNA
cacagcaactggccgatctt

SEQ ID NO: 89332 - DNA, 20 bp, synthetic construct
  source 1..20: mol_type = other DNA
ccacagcaactggccgatct

SEQ ID NO: 89333 - DNA, 20 bp, synthetic construct
  source 1..20: mol_type = other DNA
gccacagcaactggccgatc

SEQ ID NO: 89334 - DNA, 20 bp, synthetic construct
  source 1..20: mol_type = other DNA
agccacagcaactggccgat

SEQ ID NO: 89335 - DNA, 20 bp, synthetic construct
  source 1..20: mol_type = other DNA
gagccacagcaactggccga

SEQ ID NO: 89336 - DNA, 20 bp, synthetic construct
  source 1..20: mol_type = other DNA
tgagccacagcaactggccg

SEQ ID NO: 89337 - DNA, 20 bp, synthetic construct
  source 1..20: mol_type = other DNA
atgagccacagcaactggcc

SEQ ID NO: 89338 - DNA, 20 bp, synthetic construct
  source 1..20: mol_type = other DNA
catgagccacagcaactggc

SEQ ID NO: 89339 - DNA, 20 bp, synthetic construct
  source 1..20: mol_type = other DNA
gcatgagccacagcaactgg

SEQ ID NO: 89340 - DNA, 20 bp, synthetic construct
  source 1..20: mol_type = other DNA
ggcatgagccacagcaactg

SEQ ID NO: 89341 - DNA, 20 bp, synthetic construct
  source 1..20: mol_type = other DNA
aggcatgagccacagcaact

SEQ ID NO: 89342 - DNA, 20 bp, synthetic construct
  source 1..20: mol_type = other DNA
caggcatgagccacagcaac

SEQ ID NO: 89343 - DNA, 20 bp, synthetic construct
  source 1..20: mol_type = other DNA
acaggcatgagccacagcaa

SEQ ID NO: 89344 - DNA, 20 bp, synthetic construct
  source 1..20: mol_type = other DNA
tacaggcatgagccacagca

SEQ ID NO: 89345 - DNA, 20 bp, synthetic construct
  source 1..20: mol_type = other DNA
ttacaggcatgagccacagc

SEQ ID NO: 89346 - DNA, 20 bp, synthetic construct
  source 1..20: mol_type = other DNA
attacaggcatgagccacag

SEQ ID NO: 89347 - DNA, 20 bp, synthetic construct
  source 1..20: mol_type = other DNA
gattacaggcatgagccaca

SEQ ID NO: 89348 - DNA, 20 bp, synthetic construct
  source 1..20: mol_type = other DNA
ggattacaggcatgagccac

SEQ ID NO: 89349 - DNA, 20 bp, synthetic construct
  source 1..20: mol_type = other DNA
gggattacaggcatgagcca

SEQ ID NO: 89350 - DNA, 20 bp, synthetic construct
  source 1..20: mol_type = other DNA
tgggattacaggcatgagcc

SEQ ID NO: 89351 - DNA, 20 bp, synthetic construct
  source 1..20: mol_type = other DNA
ctgggattacaggcatgagc

SEQ ID NO: 89352 - DNA, 20 bp, synthetic construct
  source 1..20: mol_type = other DNA
gctgggattacaggcatgag

SEQ ID NO: 89353 - DNA, 20 bp, synthetic construct
  source 1..20: mol_type = other DNA
tgctgggattacaggcatga

SEQ ID NO: 89354 - DNA, 20 bp, synthetic construct
  source 1..20: mol_type = other DNA
gtgctgggattacaggcatg

SEQ ID NO: 89355 - DNA, 20 bp, synthetic construct
  source 1..20: mol_type = other DNA
agtgctgggattacaggcat

SEQ ID NO: 89356 - DNA, 20 bp, synthetic construct
  source 1..20: mol_type = other DNA
aagtgctgggattacaggca

SEQ ID NO: 89357 - DNA, 20 bp, synthetic construct
  source 1..20: mol_type = other DNA
aaagtgctgggattacaggc

SEQ ID NO: 89358 - DNA, 20 bp, synthetic construct
  source 1..20: mol_type = other DNA
caaagtgctgggattacagg

SEQ ID NO: 89359 - DNA, 20 bp, synthetic construct
  source 1..20: mol_type = other DNA
ccaaagtgctgggattacag

SEQ ID NO: 89360 - DNA, 20 bp, synthetic construct
  source 1..20: mol_type = other DNA
cccaaagtgctgggattaca

SEQ ID NO: 89361 - DNA, 20 bp, synthetic construct
  source 1..20: mol_type = other DNA
tcccaaagtgctgggattac

SEQ ID NO: 89362 - DNA, 20 bp, synthetic construct
  source 1..20: mol_type = other DNA
ctcccaaagtgctgggatta

SEQ ID NO: 89363 - DNA, 20 bp, synthetic construct
  source 1..20: mol_type = other DNA
cctcccaaagtgctgggatt

SEQ ID NO: 89364 - DNA, 20 bp, synthetic construct
  source 1..20: mol_type = other DNA
gcctcccaaagtgctgggat

SEQ ID NO: 89365 - DNA, 20 bp, synthetic construct
  source 1..20: mol_type = other DNA
agcctcccaaagtgctggga

SEQ ID NO: 89366 - DNA, 20 bp, synthetic construct
  source 1..20: mol_type = other DNA
cagcctcccaaagtgctggg

SEQ ID NO: 89367 - DNA, 20 bp, synthetic construct
  source 1..20: mol_type = other DNA
tcagcctcccaaagtgctgg

SEQ ID NO: 89368 - DNA, 20 bp, synthetic construct
  source 1..20: mol_type = other DNA
ctcagcctcccaaagtgctg

SEQ ID NO: 89369 - DNA, 20 bp, synthetic construct
  source 1..20: mol_type = other DNA
cctcagcctcccaaagtgct

SEQ ID NO: 89370 - DNA, 20 bp, synthetic construct
  source 1..20: mol_type = other DNA
acctcagcctcccaaagtgc

SEQ ID NO: 89371 - DNA, 20 bp, synthetic construct
  source 1..20: mol_type = other DNA
cacctcagcctcccaaagtg

SEQ ID NO: 89372 - DNA, 20 bp, synthetic construct
  source 1..20: mol_type = other DNA
ccacctcagcctcccaaagt

SEQ ID NO: 89373 - DNA, 20 bp, synthetic construct
  source 1..20: mol_type = other DNA
cccacctcagcctcccaaag

SEQ ID NO: 89374 - DNA, 20 bp, synthetic construct
  source 1..20: mol_type = other DNA
acccacctcagcctcccaaa

SEQ ID NO: 89375 - DNA, 20 bp, synthetic construct
  source 1..20: mol_type = other DNA
cacccacctcagcctcccaa

SEQ ID NO: 89376 - DNA, 20 bp, synthetic construct
  source 1..20: mol_type = other DNA
ccacccacctcagcctccca

SEQ ID NO: 89377 - DNA, 20 bp, synthetic construct
  source 1..20: mol_type = other DNA
tccacccacctcagcctccc

SEQ ID NO: 89378 - DNA, 20 bp, synthetic construct
  source 1..20: mol_type = other DNA
atccacccacctcagcctcc

SEQ ID NO: 89379 - DNA, 20 bp, synthetic construct
  source 1..20: mol_type = other DNA
gatccacccacctcagcctc

SEQ ID NO: 89380 - DNA, 20 bp, synthetic construct
  source 1..20: mol_type = other DNA
tgatccacccacctcagcct

SEQ ID NO: 89381 - DNA, 20 bp, synthetic construct
  source 1..20: mol_type = other DNA
gtgatccacccacctcagcc

SEQ ID NO: 89382 - DNA, 20 bp, synthetic construct
  source 1..20: mol_type = other DNA
agtgatccacccacctcagc

SEQ ID NO: 89383 - DNA, 20 bp, synthetic construct
  source 1..20: mol_type = other DNA
aagtgatccacccacctcag

SEQ ID NO: 89384 - DNA, 20 bp, synthetic construct
  source 1..20: mol_type = other DNA
caagtgatccacccacctca

SEQ ID NO: 89385 - DNA, 20 bp, synthetic construct
  source 1..20: mol_type = other DNA
tcaagtgatccacccacctc

SEQ ID NO: 89386 - DNA, 20 bp, synthetic construct
  source 1..20: mol_type = other DNA
ctcaagtgatccacccacct

SEQ ID NO: 89387 - DNA, 20 bp, synthetic construct
  source 1..20: mol_type = other DNA
cctcaagtgatccacccacc

SEQ ID NO: 89388 - DNA, 20 bp, synthetic construct
  source 1..20: mol_type = other DNA
acctcaagtgatccacccac

SEQ ID NO: 89389 - DNA, 20 bp, synthetic construct
  source 1..20: mol_type = other DNA
gacctcaagtgatccaccca

SEQ ID NO: 89390 - DNA, 20 bp, synthetic construct
  source 1..20: mol_type = other DNA
tgacctcaagtgatccaccc

SEQ ID NO: 89391 - DNA, 20 bp, synthetic construct
  source 1..20: mol_type = other DNA
ctgacctcaagtgatccacc

SEQ ID NO: 89392 - DNA, 20 bp, synthetic construct
  source 1..20: mol_type = other DNA
cctgacctcaagtgatccac

SEQ ID NO: 89393 - DNA, 20 bp, synthetic construct
  source 1..20: mol_type = other DNA
tcctgacctcaagtgatcca

SEQ ID NO: 89394 - DNA, 20 bp, synthetic construct
  source 1..20: mol_type = other DNA
ctcctgacctcaagtgatcc

SEQ ID NO: 89395 - DNA, 20 bp, synthetic construct
  source 1..20: mol_type = other DNA
actcctgacctcaagtgatc

SEQ ID NO: 89396 - DNA, 20 bp, synthetic construct
  source 1..20: mol_type = other DNA
aactcctgacctcaagtgat

SEQ ID NO: 89397 - DNA, 20 bp, synthetic construct
  source 1..20: mol_type = other DNA
gaactcctgacctcaagtga

SEQ ID NO: 89398 - DNA, 20 bp, synthetic construct
  source 1..20: mol_type = other DNA
tgaactcctgacctcaagtg

SEQ ID NO: 89399 - DNA, 20 bp, synthetic construct
  source 1..20: mol_type = other DNA
ttgaactcctgacctcaagt

SEQ ID NO: 89400 - DNA, 20 bp, synthetic construct
  source 1..20: mol_type = other DNA
cttgaactcctgacctcaag

SEQ ID NO: 89401 - DNA, 20 bp, synthetic construct
  source 1..20: mol_type = other DNA
tcttgaactcctgacctcaa

SEQ ID NO: 89402 - DNA, 20 bp, synthetic construct
  source 1..20: mol_type = other DNA
gtcttgaactcctgacctca

SEQ ID NO: 89403 - DNA, 20 bp, synthetic construct
  source 1..20: mol_type = other DNA
agtcttgaactcctgacctc

SEQ ID NO: 89404 - DNA, 20 bp, synthetic construct
  source 1..20: mol_type = other DNA
cagtcttgaactcctgacct

SEQ ID NO: 89405 - DNA, 20 bp, synthetic construct
  source 1..20: mol_type = other DNA
ccagtcttgaactcctgacc

SEQ ID NO: 89406 - DNA, 20 bp, synthetic construct
  source 1..20: mol_type = other DNA
gccagtcttgaactcctgac

SEQ ID NO: 89407 - DNA, 20 bp, synthetic construct
  source 1..20: mol_type = other DNA
ggccagtcttgaactcctga

SEQ ID NO: 89408 - DNA, 20 bp, synthetic construct
  source 1..20: mol_type = other DNA
aggccagtcttgaactcctg

SEQ ID NO: 89409 - DNA, 20 bp, synthetic construct
  source 1..20: mol_type = other DNA
caggccagtcttgaactcct

SEQ ID NO: 89410 - DNA, 20 bp, synthetic construct
  source 1..20: mol_type = other DNA
tcaggccagtcttgaactcc

SEQ ID NO: 89411 - DNA, 20 bp, synthetic construct
  source 1..20: mol_type = other DNA
gtcaggccagtcttgaactc

SEQ ID NO: 89412 - DNA, 20 bp, synthetic construct
  source 1..20: mol_type = other DNA
ggtcaggccagtcttgaact

SEQ ID NO: 89413 - DNA, 20 bp, synthetic construct
  source 1..20: mol_type = other DNA
tggtcaggccagtcttgaac

SEQ ID NO: 89414 - DNA, 20 bp, synthetic construct
  source 1..20: mol_type = other DNA
ttggtcaggccagtcttgaa

SEQ ID NO: 89415 - DNA, 20 bp, synthetic construct
  source 1..20: mol_type = other DNA
gttggtcaggccagtcttga

SEQ ID NO: 89416 - DNA, 20 bp, synthetic construct
  source 1..20: mol_type = other DNA
tgttggtcaggccagtcttg

SEQ ID NO: 89417 - DNA, 20 bp, synthetic construct
  source 1..20: mol_type = other DNA
atgttggtcaggccagtctt

SEQ ID NO: 89418 - DNA, 20 bp, synthetic construct
  source 1..20: mol_type = other DNA
catgttggtcaggccagtct

SEQ ID NO: 89419 - DNA, 20 bp, synthetic construct
  source 1..20: mol_type = other DNA
tcatgttggtcaggccagtc

SEQ ID NO: 89420 - DNA, 20 bp, synthetic construct
  source 1..20: mol_type = other DNA
atcatgttggtcaggccagt

SEQ ID NO: 89421 - DNA, 20 bp, synthetic construct
  source 1..20: mol_type = other DNA
catcatgttggtcaggccag

SEQ ID NO: 89422 - DNA, 20 bp, synthetic construct
  source 1..20: mol_type = other DNA
tcatcatgttggtcaggcca

SEQ ID NO: 89423 - DNA, 20 bp, synthetic construct
  source 1..20: mol_type = other DNA
ttcatcatgttggtcaggcc

SEQ ID NO: 89424 - DNA, 20 bp, synthetic construct
  source 1..20: mol_type = other DNA
tttcatcatgttggtcaggc

SEQ ID NO: 89425 - DNA, 20 bp, synthetic construct
  source 1..20: mol_type = other DNA
gtttcatcatgttggtcagg

SEQ ID NO: 89426 - DNA, 20 bp, synthetic construct
  source 1..20: mol_type = other DNA
ggtttcatcatgttggtcag

SEQ ID NO: 89427 - DNA, 20 bp, synthetic construct
  source 1..20: mol_type = other DNA
gggtttcatcatgttggtca

SEQ ID NO: 89428 - DNA, 20 bp, synthetic construct
  source 1..20: mol_type = other DNA
ggggtttcatcatgttggtc

SEQ ID NO: 89429 - DNA, 20 bp, synthetic construct
  source 1..20: mol_type = other DNA
tggggtttcatcatgttggt

SEQ ID NO: 89430 - DNA, 20 bp, synthetic construct
  source 1..20: mol_type = other DNA
atggggtttcatcatgttgg

SEQ ID NO: 89431 - DNA, 20 bp, synthetic construct
  source 1..20: mol_type = other DNA
gatggggtttcatcatgttg

SEQ ID NO: 89432 - DNA, 20 bp, synthetic construct
  source 1..20: mol_type = other DNA
agatggggtttcatcatgtt

SEQ ID NO: 89433 - DNA, 20 bp, synthetic construct
  source 1..20: mol_type = other DNA
gagatggggtttcatcatgt

SEQ ID NO: 89434 - DNA, 20 bp, synthetic construct
  source 1..20: mol_type = other DNA
agagatggggtttcatcatg

SEQ ID NO: 89435 - DNA, 20 bp, synthetic construct
  source 1..20: mol_type = other DNA
tagagatggggtttcatcat

SEQ ID NO: 89436 - DNA, 20 bp, synthetic construct
  source 1..20: mol_type = other DNA
gtagagatggggtttcatca

SEQ ID NO: 89437 - DNA, 20 bp, synthetic construct
  source 1..20: mol_type = other DNA
agtagagatggggtttcatc

SEQ ID NO: 89438 - DNA, 20 bp, synthetic construct
  source 1..20: mol_type = other DNA
tagtagagatggggtttcat

SEQ ID NO: 89439 - DNA, 20 bp, synthetic construct
  source 1..20: mol_type = other DNA
ttagtagagatggggtttca

SEQ ID NO: 89440 - DNA, 20 bp, synthetic construct
  source 1..20: mol_type = other DNA
tttagtagagatggggtttc

SEQ ID NO: 89441 - DNA, 20 bp, synthetic construct
  source 1..20: mol_type = other DNA
ttttagtagagatggggttt

SEQ ID NO: 89442 - DNA, 20 bp, synthetic construct
  source 1..20: mol_type = other DNA
tttttagtagagatggggtt

SEQ ID NO: 89443 - DNA, 20 bp, synthetic construct
  source 1..20: mol_type = other DNA
atttttagtagagatggggt

SEQ ID NO: 89444 - DNA, 20 bp, synthetic construct
  source 1..20: mol_type = other DNA
tatttttagtagagatgggg

SEQ ID NO: 89445 - DNA, 20 bp, synthetic construct
  source 1..20: mol_type = other DNA
gtatttttagtagagatggg

SEQ ID NO: 89446 - DNA, 20 bp, synthetic construct
  source 1..20: mol_type = other DNA
tgtatttttagtagagatgg

SEQ ID NO: 89447 - DNA, 20 bp, synthetic construct
  source 1..20: mol_type = other DNA
ttgtatttttagtagagatg

SEQ ID NO: 89448 - DNA, 20 bp, synthetic construct
  source 1..20: mol_type = other DNA
tttgtatttttagtagagat

SEQ ID NO: 89449 - DNA, 20 bp, synthetic construct
  source 1..20: mol_type = other DNA
ttttgtatttttagtagaga

SEQ ID NO: 89450 - DNA, 20 bp, synthetic construct
  source 1..20: mol_type = other DNA
attttgtatttttagtagag

SEQ ID NO: 89451 - DNA, 20 bp, synthetic construct
  source 1..20: mol_type = other DNA
aattttgtatttttagtaga

SEQ ID NO: 89452 - DNA, 20 bp, synthetic construct
  source 1..20: mol_type = other DNA
taattttgtatttttagtag

SEQ ID NO: 89453 - DNA, 20 bp, synthetic construct
  source 1..20: mol_type = other DNA
ctaattttgtatttttagta

SEQ ID NO: 89454 - DNA, 20 bp, synthetic construct
  source 1..20: mol_type = other DNA
gctaattttgtatttttagt

SEQ ID NO: 89455 - DNA, 20 bp, synthetic construct
  source 1..20: mol_type = other DNA
agctaattttgtatttttag

SEQ ID NO: 89456 - DNA, 20 bp, synthetic construct
  source 1..20: mol_type = other DNA
cagctaattttgtattttta

SEQ ID NO: 89457 - DNA, 20 bp, synthetic construct
  source 1..20: mol_type = other DNA
tcagctaattttgtattttt

SEQ ID NO: 89458 - DNA, 20 bp, synthetic construct
  source 1..20: mol_type = other DNA
ctcagctaattttgtatttt

SEQ ID NO: 89459 - DNA, 20 bp, synthetic construct
  source 1..20: mol_type = other DNA
actcagctaattttgtattt

SEQ ID NO: 89460 - DNA, 20 bp, synthetic construct
  source 1..20: mol_type = other DNA
cactcagctaattttgtatt

SEQ ID NO: 89461 - DNA, 20 bp, synthetic construct
  source 1..20: mol_type = other DNA
acactcagctaattttgtat

SEQ ID NO: 89462 - DNA, 20 bp, synthetic construct
  source 1..20: mol_type = other DNA
cacactcagctaattttgta

SEQ ID NO: 89463 - DNA, 20 bp, synthetic construct
  source 1..20: mol_type = other DNA
ccacactcagctaattttgt

SEQ ID NO: 89464 - DNA, 20 bp, synthetic construct
  source 1..20: mol_type = other DNA
accacactcagctaattttg

SEQ ID NO: 89465 - DNA, 20 bp, synthetic construct
  source 1..20: mol_type = other DNA
caccacactcagctaatttt

SEQ ID NO: 89466 - DNA, 20 bp, synthetic construct
  source 1..20: mol_type = other DNA
ccaccacactcagctaattt

SEQ ID NO: 89467 - DNA, 20 bp, synthetic construct
  source 1..20: mol_type = other DNA
gccaccacactcagctaatt

SEQ ID NO: 89468 - DNA, 20 bp, synthetic construct
  source 1..20: mol_type = other DNA
agccaccacactcagctaat

SEQ ID NO: 89469 - DNA, 20 bp, synthetic construct
  source 1..20: mol_type = other DNA
tagccaccacactcagctaa

SEQ ID NO: 89470 - DNA, 20 bp, synthetic construct
  source 1..20: mol_type = other DNA
atagccaccacactcagcta

SEQ ID NO: 89471 - DNA, 20 bp, synthetic construct
  source 1..20: mol_type = other DNA
aatagccaccacactcagct

SEQ ID NO: 89472 - DNA, 20 bp, synthetic construct
  source 1..20: mol_type = other DNA
aaatagccaccacactcagc

SEQ ID NO: 89473 - DNA, 20 bp, synthetic construct
  source 1..20: mol_type = other DNA
caaatagccaccacactcag

SEQ ID NO: 89474 - DNA, 20 bp, synthetic construct
  source 1..20: mol_type = other DNA
tcaaatagccaccacactca

SEQ ID NO: 89475 - DNA, 20 bp, synthetic construct
  source 1..20: mol_type = other DNA
ctcaaatagccaccacactc

SEQ ID NO: 89476 - DNA, 20 bp, synthetic construct
  source 1..20: mol_type = other DNA
tctcaaatagccaccacact

SEQ ID NO: 89477 - DNA, 20 bp, synthetic construct
  source 1..20: mol_type = other DNA
ctctcaaatagccaccacac

SEQ ID NO: 89478 - DNA, 20 bp, synthetic construct
  source 1..20: mol_type = other DNA
cctctcaaatagccaccaca

SEQ ID NO: 89479 - DNA, 20 bp, synthetic construct
  source 1..20: mol_type = other DNA
gcctctcaaatagccaccac

SEQ ID NO: 89480 - DNA, 20 bp, synthetic construct
  source 1..20: mol_type = other DNA
agcctctcaaatagccacca

SEQ ID NO: 89481 - DNA, 20 bp, synthetic construct
  source 1..20: mol_type = other DNA
cagcctctcaaatagccacc

SEQ ID NO: 89482 - DNA, 20 bp, synthetic construct
  source 1..20: mol_type = other DNA
tcagcctctcaaatagccac

SEQ ID NO: 89483 - DNA, 20 bp, synthetic construct
  source 1..20: mol_type = other DNA
ctcagcctctcaaatagcca

SEQ ID NO: 89484 - DNA, 20 bp, synthetic construct
  source 1..20: mol_type = other DNA
cctcagcctctcaaatagcc

SEQ ID NO: 89485 - DNA, 20 bp, synthetic construct
  source 1..20: mol_type = other DNA
gcctcagcctctcaaatagc

SEQ ID NO: 89486 - DNA, 20 bp, synthetic construct
  source 1..20: mol_type = other DNA
tgcctcagcctctcaaatag

SEQ ID NO: 89487 - DNA, 20 bp, synthetic construct
  source 1..20: mol_type = other DNA
ctgcctcagcctctcaaata

SEQ ID NO: 89488 - DNA, 20 bp, synthetic construct
  source 1..20: mol_type = other DNA
cctgcctcagcctctcaaat

SEQ ID NO: 89489 - DNA, 20 bp, synthetic construct
  source 1..20: mol_type = other DNA
tcctgcctcagcctctcaaa

SEQ ID NO: 89490 - DNA, 20 bp, synthetic construct
  source 1..20: mol_type = other DNA
ctcctgcctcagcctctcaa

SEQ ID NO: 89491 - DNA, 20 bp, synthetic construct
  source 1..20: mol_type = other DNA
tctcctgcctcagcctctca

SEQ ID NO: 89492 - DNA, 20 bp, synthetic construct
  source 1..20: mol_type = other DNA
ttctcctgcctcagcctctc

SEQ ID NO: 89493 - DNA, 20 bp, synthetic construct
  source 1..20: mol_type = other DNA
attctcctgcctcagcctct

SEQ ID NO: 89494 - DNA, 20 bp, synthetic construct
  source 1..20: mol_type = other DNA
gattctcctgcctcagcctc

SEQ ID NO: 89495 - DNA, 20 bp, synthetic construct
  source 1..20: mol_type = other DNA
tgattctcctgcctcagcct

SEQ ID NO: 89496 - DNA, 20 bp, synthetic construct
  source 1..20: mol_type = other DNA
atgattctcctgcctcagcc

SEQ ID NO: 89497 - DNA, 20 bp, synthetic construct
  source 1..20: mol_type = other DNA
aatgattctcctgcctcagc

SEQ ID NO: 89498 - DNA, 20 bp, synthetic construct
  source 1..20: mol_type = other DNA
aaatgattctcctgcctcag

SEQ ID NO: 89499 - DNA, 20 bp, synthetic construct
  source 1..20: mol_type = other DNA
caaatgattctcctgcctca

SEQ ID NO: 89500 - DNA, 20 bp, synthetic construct
  source 1..20: mol_type = other DNA
tcaaatgattctcctgcctc

SEQ ID NO: 89501 - DNA, 20 bp, synthetic construct
  source 1..20: mol_type = other DNA
ttcaaatgattctcctgcct

SEQ ID NO: 89502 - DNA, 20 bp, synthetic construct
  source 1..20: mol_type = other DNA
gttcaaatgattctcctgcc

SEQ ID NO: 89503 - DNA, 20 bp, synthetic construct
  source 1..20: mol_type = other DNA
ggttcaaatgattctcctgc

SEQ ID NO: 89504 - DNA, 20 bp, synthetic construct
  source 1..20: mol_type = other DNA
gggttcaaatgattctcctg

SEQ ID NO: 89505 - DNA, 20 bp, synthetic construct
  source 1..20: mol_type = other DNA
tgggttcaaatgattctcct

SEQ ID NO: 89506 - DNA, 20 bp, synthetic construct
  source 1..20: mol_type = other DNA
ctgggttcaaatgattctcc

SEQ ID NO: 89507 - DNA, 20 bp, synthetic construct
  source 1..20: mol_type = other DNA
cctgggttcaaatgattctc

SEQ ID NO: 89508 - DNA, 20 bp, synthetic construct
  source 1..20: mol_type = other DNA
tcctgggttcaaatgattct

SEQ ID NO: 89509 - DNA, 20 bp, synthetic construct
  source 1..20: mol_type = other DNA
ctcctgggttcaaatgattc

SEQ ID NO: 89510 - DNA, 20 bp, synthetic construct
  source 1..20: mol_type = other DNA
cctcctgggttcaaatgatt

SEQ ID NO: 89511 - DNA, 20 bp, synthetic construct
  source 1..20: mol_type = other DNA
acctcctgggttcaaatgat

SEQ ID NO: 89512 - DNA, 20 bp, synthetic construct
  source 1..20: mol_type = other DNA
cacctcctgggttcaaatga

SEQ ID NO: 89513 - DNA, 20 bp, synthetic construct
  source 1..20: mol_type = other DNA
tcacctcctgggttcaaatg

SEQ ID NO: 89514 - DNA, 20 bp, synthetic construct
  source 1..20: mol_type = other DNA
ttcacctcctgggttcaaat

SEQ ID NO: 89515 - DNA, 20 bp, synthetic construct
  source 1..20: mol_type = other DNA
cttcacctcctgggttcaaa

SEQ ID NO: 89516 - DNA, 20 bp, synthetic construct
  source 1..20: mol_type = other DNA
ccttcacctcctgggttcaa

SEQ ID NO: 89517 - DNA, 20 bp, synthetic construct
  source 1..20: mol_type = other DNA
accttcacctcctgggttca

SEQ ID NO: 89518 - DNA, 20 bp, synthetic construct
  source 1..20: mol_type = other DNA
aaccttcacctcctgggttc

SEQ ID NO: 89519 - DNA, 20 bp, synthetic construct
  source 1..20: mol_type = other DNA
caaccttcacctcctgggtt

SEQ ID NO: 89520 - DNA, 20 bp, synthetic construct
  source 1..20: mol_type = other DNA
gcaaccttcacctcctgggt

SEQ ID NO: 89521 - DNA, 20 bp, synthetic construct
  source 1..20: mol_type = other DNA
tgcaaccttcacctcctggg

SEQ ID NO: 89522 - DNA, 20 bp, synthetic construct
  source 1..20: mol_type = other DNA
ctgcaaccttcacctcctgg

SEQ ID NO: 89523 - DNA, 20 bp, synthetic construct
  source 1..20: mol_type = other DNA
actgcaaccttcacctcctg

SEQ ID NO: 89524 - DNA, 20 bp, synthetic construct
  source 1..20: mol_type = other DNA
cactgcaaccttcacctcct

SEQ ID NO: 89525 - DNA, 20 bp, synthetic construct
  source 1..20: mol_type = other DNA
tcactgcaaccttcacctcc

SEQ ID NO: 89526 - DNA, 20 bp, synthetic construct
  source 1..20: mol_type = other DNA
ctcactgcaaccttcacctc

SEQ ID NO: 89527 - DNA, 20 bp, synthetic construct
  source 1..20: mol_type = other DNA
gctcactgcaaccttcacct

SEQ ID NO: 89528 - DNA, 20 bp, synthetic construct
  source 1..20: mol_type = other DNA
ggctcactgcaaccttcacc

SEQ ID NO: 89529 - DNA, 20 bp, synthetic construct
  source 1..20: mol_type = other DNA
tggctcactgcaaccttcac

SEQ ID NO: 89530 - DNA, 20 bp, synthetic construct
  source 1..20: mol_type = other DNA
ttggctcactgcaaccttca

SEQ ID NO: 89531 - DNA, 20 bp, synthetic construct
  source 1..20: mol_type = other DNA
cttggctcactgcaaccttc

SEQ ID NO: 89532 - DNA, 20 bp, synthetic construct
  source 1..20: mol_type = other DNA
tcttggctcactgcaacctt

SEQ ID NO: 89533 - DNA, 20 bp, synthetic construct
  source 1..20: mol_type = other DNA
atcttggctcactgcaacct

SEQ ID NO: 89534 - DNA, 20 bp, synthetic construct
  source 1..20: mol_type = other DNA
gatcttggctcactgcaacc

SEQ ID NO: 89535 - DNA, 20 bp, synthetic construct
  source 1..20: mol_type = other DNA
tgatcttggctcactgcaac

SEQ ID NO: 89536 - DNA, 20 bp, synthetic construct
  source 1..20: mol_type = other DNA
gtgatcttggctcactgcaa

SEQ ID NO: 89537 - DNA, 20 bp, synthetic construct
  source 1..20: mol_type = other DNA
tgtgatcttggctcactgca

SEQ ID NO: 89538 - DNA, 20 bp, synthetic construct
  source 1..20: mol_type = other DNA
gtgtgatcttggctcactgc

SEQ ID NO: 89539 - DNA, 20 bp, synthetic construct
  source 1..20: mol_type = other DNA
ggtgtgatcttggctcactg

SEQ ID NO: 89540 - DNA, 20 bp, synthetic construct
  source 1..20: mol_type = other DNA
tggtgtgatcttggctcact

SEQ ID NO: 89541 - DNA, 20 bp, synthetic construct
  source 1..20: mol_type = other DNA
atggtgtgatcttggctcac

SEQ ID NO: 89542 - DNA, 20 bp, synthetic construct
  source 1..20: mol_type = other DNA
aatggtgtgatcttggctca

SEQ ID NO: 89543 - DNA, 20 bp, synthetic construct
  source 1..20: mol_type = other DNA
caatggtgtgatcttggctc

SEQ ID NO: 89544 - DNA, 20 bp, synthetic construct
  source 1..20: mol_type = other DNA
gcaatggtgtgatcttggct

SEQ ID NO: 89545 - DNA, 20 bp, synthetic construct
  source 1..20: mol_type = other DNA
tgcaatggtgtgatcttggc

SEQ ID NO: 89546 - DNA, 20 bp, synthetic construct
  source 1..20: mol_type = other DNA
gtgcaatggtgtgatcttgg

SEQ ID NO: 89547 - DNA, 20 bp, synthetic construct
  source 1..20: mol_type = other DNA
agtgcaatggtgtgatcttg

SEQ ID NO: 89548 - DNA, 20 bp, synthetic construct
  source 1..20: mol_type = other DNA
gagtgcaatggtgtgatctt

SEQ ID NO: 89549 - DNA, 20 bp, synthetic construct
  source 1..20: mol_type = other DNA
ggagtgcaatggtgtgatct

SEQ ID NO: 89550 - DNA, 20 bp, synthetic construct
  source 1..20: mol_type = other DNA
tggagtgcaatggtgtgatc

SEQ ID NO: 89551 - DNA, 20 bp, synthetic construct
  source 1..20: mol_type = other DNA
ctggagtgcaatggtgtgat

SEQ ID NO: 89552 - DNA, 20 bp, synthetic construct
  source 1..20: mol_type = other DNA
actggagtgcaatggtgtga

SEQ ID NO: 89553 - DNA, 20 bp, synthetic construct
  source 1..20: mol_type = other DNA
gactggagtgcaatggtgtg

SEQ ID NO: 89554 - DNA, 20 bp, synthetic construct
  source 1..20: mol_type = other DNA
agactggagtgcaatggtgt

SEQ ID NO: 89555 - DNA, 20 bp, synthetic construct
  source 1..20: mol_type = other DNA
cagactggagtgcaatggtg

SEQ ID NO: 89556 - DNA, 20 bp, synthetic construct
  source 1..20: mol_type = other DNA
ccagactggagtgcaatggt

SEQ ID NO: 89557 - DNA, 20 bp, synthetic construct
  source 1..20: mol_type = other DNA
cccagactggagtgcaatgg

SEQ ID NO: 89558 - DNA, 20 bp, synthetic construct
  source 1..20: mol_type = other DNA
acccagactggagtgcaatg

SEQ ID NO: 89559 - DNA, 20 bp, synthetic construct
  source 1..20: mol_type = other DNA
cacccagactggagtgcaat

SEQ ID NO: 89560 - DNA, 20 bp, synthetic construct
  source 1..20: mol_type = other DNA
tcacccagactggagtgcaa

SEQ ID NO: 89561 - DNA, 20 bp, synthetic construct
  source 1..20: mol_type = other DNA
gtcacccagactggagtgca

SEQ ID NO: 89562 - DNA, 20 bp, synthetic construct
  source 1..20: mol_type = other DNA
tgtcacccagactggagtgc

SEQ ID NO: 89563 - DNA, 20 bp, synthetic construct
  source 1..20: mol_type = other DNA
ttgtcacccagactggagtg

SEQ ID NO: 89564 - DNA, 20 bp, synthetic construct
  source 1..20: mol_type = other DNA
cttgtcacccagactggagt

SEQ ID NO: 89565 - DNA, 20 bp, synthetic construct
  source 1..20: mol_type = other DNA
tcttgtcacccagactggag

SEQ ID NO: 89566 - DNA, 20 bp, synthetic construct
  source 1..20: mol_type = other DNA
ctcttgtcacccagactgga

SEQ ID NO: 89567 - DNA, 20 bp, synthetic construct
  source 1..20: mol_type = other DNA
gctcttgtcacccagactgg

SEQ ID NO: 89568 - DNA, 20 bp, synthetic construct
  source 1..20: mol_type = other DNA
cgctcttgtcacccagactg

SEQ ID NO: 89569 - DNA, 20 bp, synthetic construct
  source 1..20: mol_type = other DNA
tcgctcttgtcacccagact

SEQ ID NO: 89570 - DNA, 20 bp, synthetic construct
  source 1..20: mol_type = other DNA
ttcgctcttgtcacccagac

SEQ ID NO: 89571 - DNA, 20 bp, synthetic construct
  source 1..20: mol_type = other DNA
tttcgctcttgtcacccaga

SEQ ID NO: 89572 - DNA, 20 bp, synthetic construct
  source 1..20: mol_type = other DNA
gtttcgctcttgtcacccag

SEQ ID NO: 89573 - DNA, 20 bp, synthetic construct
  source 1..20: mol_type = other DNA
agtttcgctcttgtcaccca

SEQ ID NO: 89574 - DNA, 20 bp, synthetic construct
  source 1..20: mol_type = other DNA
gagtttcgctcttgtcaccc

SEQ ID NO: 89575 - DNA, 20 bp, synthetic construct
  source 1..20: mol_type = other DNA
agagtttcgctcttgtcacc

SEQ ID NO: 89576 - DNA, 20 bp, synthetic construct
  source 1..20: mol_type = other DNA
tagagtttcgctcttgtcac

SEQ ID NO: 89577 - DNA, 20 bp, synthetic construct
  source 1..20: mol_type = other DNA
atagagtttcgctcttgtca

SEQ ID NO: 89578 - DNA, 20 bp, synthetic construct
  source 1..20: mol_type = other DNA
gatagagtttcgctcttgtc

SEQ ID NO: 89579 - DNA, 20 bp, synthetic construct
  source 1..20: mol_type = other DNA
agatagagtttcgctcttgt

SEQ ID NO: 89580 - DNA, 20 bp, synthetic construct
  source 1..20: mol_type = other DNA
gagatagagtttcgctcttg

SEQ ID NO: 89581 - DNA, 20 bp, synthetic construct
  source 1..20: mol_type = other DNA
tgagatagagtttcgctctt

SEQ ID NO: 89582 - DNA, 20 bp, synthetic construct
  source 1..20: mol_type = other DNA
ttgagatagagtttcgctct

SEQ ID NO: 89583 - DNA, 20 bp, synthetic construct
  source 1..20: mol_type = other DNA
tttgagatagagtttcgctc

SEQ ID NO: 89584 - DNA, 20 bp, synthetic construct
  source 1..20: mol_type = other DNA
ttttgagatagagtttcgct

SEQ ID NO: 89585 - DNA, 20 bp, synthetic construct
  source 1..20: mol_type = other DNA
tttttgagatagagtttcgc

SEQ ID NO: 89586 - DNA, 20 bp, synthetic construct
  source 1..20: mol_type = other DNA
ttttttgagatagagtttcg

SEQ ID NO: 89587 - DNA, 20 bp, synthetic construct
  source 1..20: mol_type = other DNA
tttttttgagatagagtttc

SEQ ID NO: 89588 - DNA, 20 bp, synthetic construct
  source 1..20: mol_type = other DNA
ttttttttgagatagagttt

SEQ ID NO: 89589 - DNA, 20 bp, synthetic construct
  source 1..20: mol_type = other DNA
cttttttttgagatagagtt

SEQ ID NO: 89590 - DNA, 20 bp, synthetic construct
  source 1..20: mol_type = other DNA
tcttttttttgagatagagt

SEQ ID NO: 89591 - DNA, 20 bp, synthetic construct
  source 1..20: mol_type = other DNA
ttcttttttttgagatagag

SEQ ID NO: 89592 - DNA, 20 bp, synthetic construct
  source 1..20: mol_type = other DNA
tttcttttttttgagataga

SEQ ID NO: 89593 - DNA, 20 bp, synthetic construct
  source 1..20: mol_type = other DNA
ttttcttttttttgagatag

SEQ ID NO: 89594 - DNA, 20 bp, synthetic construct
  source 1..20: mol_type = other DNA
tttttcttttttttgagata

SEQ ID NO: 89595 - DNA, 20 bp, synthetic construct
  source 1..20: mol_type = other DNA
ttttttcttttttttgagat

SEQ ID NO: 89596 - DNA, 20 bp, synthetic construct
  source 1..20: mol_type = other DNA
cttttttcttttttttgaga

SEQ ID NO: 89597 - DNA, 20 bp, synthetic construct
  source 1..20: mol_type = other DNA
tcttttttcttttttttgag

SEQ ID NO: 89598 - DNA, 20 bp, synthetic construct
  source 1..20: mol_type = other DNA
ttcttttttcttttttttga

SEQ ID NO: 89599 - DNA, 20 bp, synthetic construct
  source 1..20: mol_type = other DNA
tttcttttttcttttttttg

SEQ ID NO: 89600 - DNA, 20 bp, synthetic construct
  source 1..20: mol_type = other DNA
gtttcttttttctttttttt

SEQ ID NO: 89601 - DNA, 20 bp, synthetic construct
  source 1..20: mol_type = other DNA
tgtttcttttttcttttttt

SEQ ID NO: 89602 - DNA, 20 bp, synthetic construct
  source 1..20: mol_type = other DNA
ttgtttcttttttctttttt

SEQ ID NO: 89603 - DNA, 20 bp, synthetic construct
  source 1..20: mol_type = other DNA
cttgtttcttttttcttttt

SEQ ID NO: 89604 - DNA, 20 bp, synthetic construct
  source 1..20: mol_type = other DNA
tcttgtttcttttttctttt

SEQ ID NO: 89605 - DNA, 20 bp, synthetic construct
  source 1..20: mol_type = other DNA
atcttgtttcttttttcttt

SEQ ID NO: 89606 - DNA, 20 bp, synthetic construct
  source 1..20: mol_type = other DNA
gatcttgtttcttttttctt

SEQ ID NO: 89607 - DNA, 20 bp, synthetic construct
  source 1..20: mol_type = other DNA
agatcttgtttcttttttct

SEQ ID NO: 89608 - DNA, 20 bp, synthetic construct
  source 1..20: mol_type = other DNA
aagatcttgtttcttttttc

SEQ ID NO: 89609 - DNA, 20 bp, synthetic construct
  source 1..20: mol_type = other DNA
gaagatcttgtttctttttt

SEQ ID NO: 89610 - DNA, 20 bp, synthetic construct
  source 1..20: mol_type = other DNA
tgaagatcttgtttcttttt

SEQ ID NO: 89611 - DNA, 20 bp, synthetic construct
  source 1..20: mol_type = other DNA
ttgaagatcttgtttctttt

SEQ ID NO: 89612 - DNA, 20 bp, synthetic construct
  source 1..20: mol_type = other DNA
cttgaagatcttgtttcttt

SEQ ID NO: 89613 - DNA, 20 bp, synthetic construct
  source 1..20: mol_type = other DNA
gcttgaagatcttgtttctt

SEQ ID NO: 89614 - DNA, 20 bp, synthetic construct
  source 1..20: mol_type = other DNA
agcttgaagatcttgtttct

SEQ ID NO: 89615 - DNA, 20 bp, synthetic construct
  source 1..20: mol_type = other DNA
aagcttgaagatcttgtttc

SEQ ID NO: 89616 - DNA, 20 bp, synthetic construct
  source 1..20: mol_type = other DNA
taagcttgaagatcttgttt

SEQ ID NO: 89617 - DNA, 20 bp, synthetic construct
  source 1..20: mol_type = other DNA
ttaagcttgaagatcttgtt

SEQ ID NO: 89618 - DNA, 20 bp, synthetic construct
  source 1..20: mol_type = other DNA
cttaagcttgaagatcttgt

SEQ ID NO: 89619 - DNA, 20 bp, synthetic construct
  source 1..20: mol_type = other DNA
ccttaagcttgaagatcttg

SEQ ID NO: 89620 - DNA, 20 bp, synthetic construct
  source 1..20: mol_type = other DNA
tccttaagcttgaagatctt

SEQ ID NO: 89621 - DNA, 20 bp, synthetic construct
  source 1..20: mol_type = other DNA
ttccttaagcttgaagatct

SEQ ID NO: 89622 - DNA, 20 bp, synthetic construct
  source 1..20: mol_type = other DNA
tttccttaagcttgaagatc

SEQ ID NO: 89623 - DNA, 20 bp, synthetic construct
  source 1..20: mol_type = other DNA
gtttccttaagcttgaagat

SEQ ID NO: 89624 - DNA, 20 bp, synthetic construct
  source 1..20: mol_type = other DNA
tgtttccttaagcttgaaga

SEQ ID NO: 89625 - DNA, 20 bp, synthetic construct
  source 1..20: mol_type = other DNA
ttgtttccttaagcttgaag

SEQ ID NO: 89626 - DNA, 20 bp, synthetic construct
  source 1..20: mol_type = other DNA
tttgtttccttaagcttgaa

SEQ ID NO: 89627 - DNA, 20 bp, synthetic construct
  source 1..20: mol_type = other DNA
ttttgtttccttaagcttga

SEQ ID NO: 89628 - DNA, 20 bp, synthetic construct
  source 1..20: mol_type = other DNA
tttttgtttccttaagcttg

SEQ ID NO: 89629 - DNA, 20 bp, synthetic construct
  source 1..20: mol_type = other DNA
gtttttgtttccttaagctt

SEQ ID NO: 89630 - DNA, 20 bp, synthetic construct
  source 1..20: mol_type = other DNA
tgtttttgtttccttaagct

SEQ ID NO: 89631 - DNA, 20 bp, synthetic construct
  source 1..20: mol_type = other DNA
ttgtttttgtttccttaagc

SEQ ID NO: 89632 - DNA, 20 bp, synthetic construct
  source 1..20: mol_type = other DNA
tttgtttttgtttccttaag

SEQ ID NO: 89633 - DNA, 20 bp, synthetic construct
  source 1..20: mol_type = other DNA
ttttgtttttgtttccttaa

SEQ ID NO: 89634 - DNA, 20 bp, synthetic construct
  source 1..20: mol_type = other DNA
gttttgtttttgtttcctta

SEQ ID NO: 89635 - DNA, 20 bp, synthetic construct
  source 1..20: mol_type = other DNA
agttttgtttttgtttcctt

SEQ ID NO: 89636 - DNA, 20 bp, synthetic construct
  source 1..20: mol_type = other DNA
gagttttgtttttgtttcct

SEQ ID NO: 89637 - DNA, 20 bp, synthetic construct
  source 1..20: mol_type = other DNA
tgagttttgtttttgtttcc

SEQ ID NO: 89638 - DNA, 20 bp, synthetic construct
  source 1..20: mol_type = other DNA
ctgagttttgtttttgtttc

SEQ ID NO: 89639 - DNA, 20 bp, synthetic construct
  source 1..20: mol_type = other DNA
gctgagttttgtttttgttt

SEQ ID NO: 89640 - DNA, 20 bp, synthetic construct
  source 1..20: mol_type = other DNA
agctgagttttgtttttgtt

SEQ ID NO: 89641 - DNA, 20 bp, synthetic construct
  source 1..20: mol_type = other DNA
cagctgagttttgtttttgt

SEQ ID NO: 89642 - DNA, 20 bp, synthetic construct
  source 1..20: mol_type = other DNA
acagctgagttttgtttttg

SEQ ID NO: 89643 - DNA, 20 bp, synthetic construct
  source 1..20: mol_type = other DNA
cacagctgagttttgttttt

SEQ ID NO: 89644 - DNA, 20 bp, synthetic construct
  source 1..20: mol_type = other DNA
acacagctgagttttgtttt

SEQ ID NO: 89645 - DNA, 20 bp, synthetic construct
  source 1..20: mol_type = other DNA
aacacagctgagttttgttt

SEQ ID NO: 89646 - DNA, 20 bp, synthetic construct
  source 1..20: mol_type = other DNA
taacacagctgagttttgtt

SEQ ID NO: 89647 - DNA, 20 bp, synthetic construct
  source 1..20: mol_type = other DNA
ttaacacagctgagttttgt

SEQ ID NO: 89648 - DNA, 20 bp, synthetic construct
  source 1..20: mol_type = other DNA
tttaacacagctgagttttg

SEQ ID NO: 89649 - DNA, 20 bp, synthetic construct
  source 1..20: mol_type = other DNA
atttaacacagctgagtttt

SEQ ID NO: 89650 - DNA, 20 bp, synthetic construct
  source 1..20: mol_type = other DNA
gatttaacacagctgagttt

SEQ ID NO: 89651 - DNA, 20 bp, synthetic construct
  source 1..20: mol_type = other DNA
agatttaacacagctgagtt

SEQ ID NO: 89652 - DNA, 20 bp, synthetic construct
  source 1..20: mol_type = other DNA
cagatttaacacagctgagt

SEQ ID NO: 89653 - DNA, 20 bp, synthetic construct
  source 1..20: mol_type = other DNA
acagatttaacacagctgag

SEQ ID NO: 89654 - DNA, 20 bp, synthetic construct
  source 1..20: mol_type = other DNA
aacagatttaacacagctga

SEQ ID NO: 89655 - DNA, 20 bp, synthetic construct
  source 1..20: mol_type = other DNA
aaacagatttaacacagctg

SEQ ID NO: 89656 - DNA, 20 bp, synthetic construct
  source 1..20: mol_type = other DNA
aaaacagatttaacacagct

SEQ ID NO: 89657 - DNA, 20 bp, synthetic construct
  source 1..20: mol_type = other DNA
aaaaacagatttaacacagc

SEQ ID NO: 89658 - DNA, 20 bp, synthetic construct
  source 1..20: mol_type = other DNA
taaaaacagatttaacacag

SEQ ID NO: 89659 - DNA, 20 bp, synthetic construct
  source 1..20: mol_type = other DNA
ctaaaaacagatttaacaca

SEQ ID NO: 89660 - DNA, 20 bp, synthetic construct
  source 1..20: mol_type = other DNA
actaaaaacagatttaacac

SEQ ID NO: 89661 - DNA, 20 bp, synthetic construct
  source 1..20: mol_type = other DNA
aactaaaaacagatttaaca

SEQ ID NO: 89662 - DNA, 20 bp, synthetic construct
  source 1..20: mol_type = other DNA
caactaaaaacagatttaac

SEQ ID NO: 89663 - DNA, 20 bp, synthetic construct
  source 1..20: mol_type = other DNA
gcaactaaaaacagatttaa

SEQ ID NO: 89664 - DNA, 20 bp, synthetic construct
  source 1..20: mol_type = other DNA
agcaactaaaaacagattta

SEQ ID NO: 89665 - DNA, 20 bp, synthetic construct
  source 1..20: mol_type = other DNA
tagcaactaaaaacagattt

SEQ ID NO: 89666 - DNA, 20 bp, synthetic construct
  source 1..20: mol_type = other DNA
atagcaactaaaaacagatt

SEQ ID NO: 89667 - DNA, 20 bp, synthetic construct
  source 1..20: mol_type = other DNA
tatagcaactaaaaacagat

SEQ ID NO: 89668 - DNA, 20 bp, synthetic construct
  source 1..20: mol_type = other DNA
gtatagcaactaaaaacaga

SEQ ID NO: 89669 - DNA, 20 bp, synthetic construct
  source 1..20: mol_type = other DNA
tgtatagcaactaaaaacag

SEQ ID NO: 89670 - DNA, 20 bp, synthetic construct
  source 1..20: mol_type = other DNA
atgtatagcaactaaaaaca

SEQ ID NO: 89671 - DNA, 20 bp, synthetic construct
  source 1..20: mol_type = other DNA
aatgtatagcaactaaaaac

SEQ ID NO: 89672 - DNA, 20 bp, synthetic construct
  source 1..20: mol_type = other DNA
aaatgtatagcaactaaaaa

SEQ ID NO: 89673 - DNA, 20 bp, synthetic construct
  source 1..20: mol_type = other DNA
gaaatgtatagcaactaaaa

SEQ ID NO: 89674 - DNA, 20 bp, synthetic construct
  source 1..20: mol_type = other DNA
agaaatgtatagcaactaaa

SEQ ID NO: 89675 - DNA, 20 bp, synthetic construct
  source 1..20: mol_type = other DNA
cagaaatgtatagcaactaa

SEQ ID NO: 89676 - DNA, 20 bp, synthetic construct
  source 1..20: mol_type = other DNA
gcagaaatgtatagcaacta

SEQ ID NO: 89677 - DNA, 20 bp, synthetic construct
  source 1..20: mol_type = other DNA
agcagaaatgtatagcaact

SEQ ID NO: 89678 - DNA, 20 bp, synthetic construct
  source 1..20: mol_type = other DNA
gagcagaaatgtatagcaac

SEQ ID NO: 89679 - DNA, 20 bp, synthetic construct
  source 1..20: mol_type = other DNA
tgagcagaaatgtatagcaa

SEQ ID NO: 89680 - DNA, 20 bp, synthetic construct
  source 1..20: mol_type = other DNA
ctgagcagaaatgtatagca

SEQ ID NO: 89681 - DNA, 20 bp, synthetic construct
  source 1..20: mol_type = other DNA
gctgagcagaaatgtatagc

SEQ ID NO: 89682 - DNA, 20 bp, synthetic construct
  source 1..20: mol_type = other DNA
agctgagcagaaatgtatag

SEQ ID NO: 89683 - DNA, 20 bp, synthetic construct
  source 1..20: mol_type = other DNA
aagctgagcagaaatgtata

SEQ ID NO: 89684 - DNA, 20 bp, synthetic construct
  source 1..20: mol_type = other DNA
gaagctgagcagaaatgtat

SEQ ID NO: 89685 - DNA, 20 bp, synthetic construct
  source 1..20: mol_type = other DNA
tgaagctgagcagaaatgta

SEQ ID NO: 89686 - DNA, 20 bp, synthetic construct
  source 1..20: mol_type = other DNA
atgaagctgagcagaaatgt

SEQ ID NO: 89687 - DNA, 20 bp, synthetic construct
  source 1..20: mol_type = other DNA
catgaagctgagcagaaatg

SEQ ID NO: 89688 - DNA, 20 bp, synthetic construct
  source 1..20: mol_type = other DNA
acatgaagctgagcagaaat

SEQ ID NO: 89689 - DNA, 20 bp, synthetic construct
  source 1..20: mol_type = other DNA
cacatgaagctgagcagaaa

SEQ ID NO: 89690 - DNA, 20 bp, synthetic construct
  source 1..20: mol_type = other DNA
tcacatgaagctgagcagaa

SEQ ID NO: 89691 - DNA, 20 bp, synthetic construct
  source 1..20: mol_type = other DNA
atcacatgaagctgagcaga

SEQ ID NO: 89692 - DNA, 20 bp, synthetic construct
  source 1..20: mol_type = other DNA
catcacatgaagctgagcag

SEQ ID NO: 89693 - DNA, 20 bp, synthetic construct
  source 1..20: mol_type = other DNA
gcatcacatgaagctgagca

SEQ ID NO: 89694 - DNA, 20 bp, synthetic construct
  source 1..20: mol_type = other DNA
tgcatcacatgaagctgagc

SEQ ID NO: 89695 - DNA, 20 bp, synthetic construct
  source 1..20: mol_type = other DNA
gtgcatcacatgaagctgag

SEQ ID NO: 89696 - DNA, 20 bp, synthetic construct
  source 1..20: mol_type = other DNA
tgtgcatcacatgaagctga

SEQ ID NO: 89697 - DNA, 20 bp, synthetic construct
  source 1..20: mol_type = other DNA
atgtgcatcacatgaagctg

SEQ ID NO: 89698 - DNA, 20 bp, synthetic construct
  source 1..20: mol_type = other DNA
aatgtgcatcacatgaagct

SEQ ID NO: 89699 - DNA, 20 bp, synthetic construct
  source 1..20: mol_type = other DNA
gaatgtgcatcacatgaagc

SEQ ID NO: 89700 - DNA, 20 bp, synthetic construct
  source 1..20: mol_type = other DNA
tgaatgtgcatcacatgaag

SEQ ID NO: 89701 - DNA, 20 bp, synthetic construct
  source 1..20: mol_type = other DNA
atgaatgtgcatcacatgaa

SEQ ID NO: 89702 - DNA, 20 bp, synthetic construct
  source 1..20: mol_type = other DNA
catgaatgtgcatcacatga

SEQ ID NO: 89703 - DNA, 20 bp, synthetic construct
  source 1..20: mol_type = other DNA
acatgaatgtgcatcacatg

SEQ ID NO: 89704 - DNA, 20 bp, synthetic construct
  source 1..20: mol_type = other DNA
tacatgaatgtgcatcacat

SEQ ID NO: 89705 - DNA, 20 bp, synthetic construct
  source 1..20: mol_type = other DNA
ttacatgaatgtgcatcaca

SEQ ID NO: 89706 - DNA, 20 bp, synthetic construct
  source 1..20: mol_type = other DNA
attacatgaatgtgcatcac

SEQ ID NO: 89707 - DNA, 20 bp, synthetic construct
  source 1..20: mol_type = other DNA
aattacatgaatgtgcatca

SEQ ID NO: 89708 - DNA, 20 bp, synthetic construct
  source 1..20: mol_type = other DNA
caattacatgaatgtgcatc

SEQ ID NO: 89709 - DNA, 20 bp, synthetic construct
  source 1..20: mol_type = other DNA
acaattacatgaatgtgcat

SEQ ID NO: 89710 - DNA, 20 bp, synthetic construct
  source 1..20: mol_type = other DNA
tacaattacatgaatgtgca

SEQ ID NO: 89711 - DNA, 20 bp, synthetic construct
  source 1..20: mol_type = other DNA
atacaattacatgaatgtgc

SEQ ID NO: 89712 - DNA, 20 bp, synthetic construct
  source 1..20: mol_type = other DNA
gatacaattacatgaatgtg

SEQ ID NO: 89713 - DNA, 20 bp, synthetic construct
  source 1..20: mol_type = other DNA
ggatacaattacatgaatgt

SEQ ID NO: 89714 - DNA, 20 bp, synthetic construct
  source 1..20: mol_type = other DNA
aggatacaattacatgaatg

SEQ ID NO: 89715 - DNA, 20 bp, synthetic construct
  source 1..20: mol_type = other DNA
taggatacaattacatgaat

SEQ ID NO: 89716 - DNA, 20 bp, synthetic construct
  source 1..20: mol_type = other DNA
ttaggatacaattacatgaa

SEQ ID NO: 89717 - DNA, 20 bp, synthetic construct
  source 1..20: mol_type = other DNA
tttaggatacaattacatga

SEQ ID NO: 89718 - DNA, 20 bp, synthetic construct
  source 1..20: mol_type = other DNA
atttaggatacaattacatg

SEQ ID NO: 89719 - DNA, 20 bp, synthetic construct
  source 1..20: mol_type = other DNA
aatttaggatacaattacat

SEQ ID NO: 89720 - DNA, 20 bp, synthetic construct
  source 1..20: mol_type = other DNA
gaatttaggatacaattaca

SEQ ID NO: 89721 - DNA, 20 bp, synthetic construct
  source 1..20: mol_type = other DNA
ggaatttaggatacaattac

SEQ ID NO: 89722 - DNA, 20 bp, synthetic construct
  source 1..20: mol_type = other DNA
aggaatttaggatacaatta

SEQ ID NO: 89723 - DNA, 20 bp, synthetic construct
  source 1..20: mol_type = other DNA
aaggaatttaggatacaatt

SEQ ID NO: 89724 - DNA, 20 bp, synthetic construct
  source 1..20: mol_type = other DNA
aaaggaatttaggatacaat

SEQ ID NO: 89725 - DNA, 20 bp, synthetic construct
  source 1..20: mol_type = other DNA
caaaggaatttaggatacaa

SEQ ID NO: 89726 - DNA, 20 bp, synthetic construct
  source 1..20: mol_type = other DNA
acaaaggaatttaggataca

SEQ ID NO: 89727 - DNA, 20 bp, synthetic construct
  source 1..20: mol_type = other DNA
tacaaaggaatttaggatac

SEQ ID NO: 89728 - DNA, 20 bp, synthetic construct
  source 1..20: mol_type = other DNA
gtacaaaggaatttaggata

SEQ ID NO: 89729 - DNA, 20 bp, synthetic construct
  source 1..20: mol_type = other DNA
agtacaaaggaatttaggat

SEQ ID NO: 89730 - DNA, 20 bp, synthetic construct
  source 1..20: mol_type = other DNA
aagtacaaaggaatttagga

SEQ ID NO: 89731 - DNA, 20 bp, synthetic construct
  source 1..20: mol_type = other DNA
aaagtacaaaggaatttagg

SEQ ID NO: 89732 - DNA, 20 bp, synthetic construct
  source 1..20: mol_type = other DNA
aaaagtacaaaggaatttag

SEQ ID NO: 89733 - DNA, 20 bp, synthetic construct
  source 1..20: mol_type = other DNA
aaaaagtacaaaggaattta

SEQ ID NO: 89734 - DNA, 20 bp, synthetic construct
  source 1..20: mol_type = other DNA
taaaaagtacaaaggaattt

SEQ ID NO: 89735 - DNA, 20 bp, synthetic construct
  source 1..20: mol_type = other DNA
ataaaaagtacaaaggaatt

SEQ ID NO: 89736 - DNA, 20 bp, synthetic construct
  source 1..20: mol_type = other DNA
aataaaaagtacaaaggaat

SEQ ID NO: 89737 - DNA, 20 bp, synthetic construct
  source 1..20: mol_type = other DNA
aaataaaaagtacaaaggaa

SEQ ID NO: 89738 - DNA, 20 bp, synthetic construct
  source 1..20: mol_type = other DNA
aaaataaaaagtacaaagga

SEQ ID NO: 89739 - DNA, 20 bp, synthetic construct
  source 1..20: mol_type = other DNA
gaaaataaaaagtacaaagg

SEQ ID NO: 89740 - DNA, 20 bp, synthetic construct
  source 1..20: mol_type = other DNA
agaaaataaaaagtacaaag

SEQ ID NO: 89741 - DNA, 20 bp, synthetic construct
  source 1..20: mol_type = other DNA
aagaaaataaaaagtacaaa

SEQ ID NO: 89742 - DNA, 20 bp, synthetic construct
  source 1..20: mol_type = other DNA
gaagaaaataaaaagtacaa

SEQ ID NO: 89743 - DNA, 20 bp, synthetic construct
  source 1..20: mol_type = other DNA
ggaagaaaataaaaagtaca

SEQ ID NO: 89744 - DNA, 20 bp, synthetic construct
  source 1..20: mol_type = other DNA
aggaagaaaataaaaagtac

SEQ ID NO: 89745 - DNA, 20 bp, synthetic construct
  source 1..20: mol_type = other DNA
aaggaagaaaataaaaagta

SEQ ID NO: 89746 - DNA, 20 bp, synthetic construct
  source 1..20: mol_type = other DNA
caaggaagaaaataaaaagt

SEQ ID NO: 89747 - DNA, 20 bp, synthetic construct
  source 1..20: mol_type = other DNA
ccaaggaagaaaataaaaag

SEQ ID NO: 89748 - DNA, 20 bp, synthetic construct
  source 1..20: mol_type = other DNA
accaaggaagaaaataaaaa

SEQ ID NO: 89749 - DNA, 20 bp, synthetic construct
  source 1..20: mol_type = other DNA
gaccaaggaagaaaataaaa

SEQ ID NO: 89750 - DNA, 20 bp, synthetic construct
  source 1..20: mol_type = other DNA
agaccaaggaagaaaataaa

SEQ ID NO: 89751 - DNA, 20 bp, synthetic construct
  source 1..20: mol_type = other DNA
aagaccaaggaagaaaataa

SEQ ID NO: 89752 - DNA, 20 bp, synthetic construct
  source 1..20: mol_type = other DNA
gaagaccaaggaagaaaata

SEQ ID NO: 89753 - DNA, 20 bp, synthetic construct
  source 1..20: mol_type = other DNA
tgaagaccaaggaagaaaat

SEQ ID NO: 89754 - DNA, 20 bp, synthetic construct
  source 1..20: mol_type = other DNA
ttgaagaccaaggaagaaaa

SEQ ID NO: 89755 - DNA, 20 bp, synthetic construct
  source 1..20: mol_type = other DNA
attgaagaccaaggaagaaa

SEQ ID NO: 89756 - DNA, 20 bp, synthetic construct
  source 1..20: mol_type = other DNA
aattgaagaccaaggaagaa

SEQ ID NO: 89757 - DNA, 20 bp, synthetic construct
  source 1..20: mol_type = other DNA
taattgaagaccaaggaaga

SEQ ID NO: 89758 - DNA, 20 bp, synthetic construct
  source 1..20: mol_type = other DNA
ataattgaagaccaaggaag

SEQ ID NO: 89759 - DNA, 20 bp, synthetic construct
  source 1..20: mol_type = other DNA
gataattgaagaccaaggaa

SEQ ID NO: 89760 - DNA, 20 bp, synthetic construct
  source 1..20: mol_type = other DNA
agataattgaagaccaagga

SEQ ID NO: 89761 - DNA, 20 bp, synthetic construct
  source 1..20: mol_type = other DNA
aagataattgaagaccaagg

SEQ ID NO: 89762 - DNA, 20 bp, synthetic construct
  source 1..20: mol_type = other DNA
taagataattgaagaccaag

SEQ ID NO: 89763 - DNA, 20 bp, synthetic construct
  source 1..20: mol_type = other DNA
ttaagataattgaagaccaa

SEQ ID NO: 89764 - DNA, 20 bp, synthetic construct
  source 1..20: mol_type = other DNA
cttaagataattgaagacca

SEQ ID NO: 89765 - DNA, 20 bp, synthetic construct
  source 1..20: mol_type = other DNA
tcttaagataattgaagacc

SEQ ID NO: 89766 - DNA, 20 bp, synthetic construct
  source 1..20: mol_type = other DNA
gtcttaagataattgaagac

SEQ ID NO: 89767 - DNA, 20 bp, synthetic construct
  source 1..20: mol_type = other DNA
agtcttaagataattgaaga

SEQ ID NO: 89768 - DNA, 20 bp, synthetic construct
  source 1..20: mol_type = other DNA
tagtcttaagataattgaag

SEQ ID NO: 89769 - DNA, 20 bp, synthetic construct
  source 1..20: mol_type = other DNA
gtagtcttaagataattgaa

SEQ ID NO: 89770 - DNA, 20 bp, synthetic construct
  source 1..20: mol_type = other DNA
ggtagtcttaagataattga

SEQ ID NO: 89771 - DNA, 20 bp, synthetic construct
  source 1..20: mol_type = other DNA
tggtagtcttaagataattg

SEQ ID NO: 89772 - DNA, 20 bp, synthetic construct
  source 1..20: mol_type = other DNA
ttggtagtcttaagataatt

SEQ ID NO: 89773 - DNA, 20 bp, synthetic construct
  source 1..20: mol_type = other DNA
cttggtagtcttaagataat

SEQ ID NO: 89774 - DNA, 20 bp, synthetic construct
  source 1..20: mol_type = other DNA
tcttggtagtcttaagataa

SEQ ID NO: 89775 - DNA, 20 bp, synthetic construct
  source 1..20: mol_type = other DNA
ttcttggtagtcttaagata

SEQ ID NO: 89776 - DNA, 20 bp, synthetic construct
  source 1..20: mol_type = other DNA
tttcttggtagtcttaagat

SEQ ID NO: 89777 - DNA, 20 bp, synthetic construct
  source 1..20: mol_type = other DNA
ttttcttggtagtcttaaga

SEQ ID NO: 89778 - DNA, 20 bp, synthetic construct
  source 1..20: mol_type = other DNA
gttttcttggtagtcttaag

SEQ ID NO: 89779 - DNA, 20 bp, synthetic construct
  source 1..20: mol_type = other DNA
tgttttcttggtagtcttaa

SEQ ID NO: 89780 - DNA, 20 bp, synthetic construct
  source 1..20: mol_type = other DNA
ttgttttcttggtagtctta

SEQ ID NO: 89781 - DNA, 20 bp, synthetic construct
  source 1..20: mol_type = other DNA
tttgttttcttggtagtctt

SEQ ID NO: 89782 - DNA, 20 bp, synthetic construct
  source 1..20: mol_type = other DNA
ttttgttttcttggtagtct

SEQ ID NO: 89783 - DNA, 20 bp, synthetic construct
  source 1..20: mol_type = other DNA
tttttgttttcttggtagtc

SEQ ID NO: 89784 - DNA, 20 bp, synthetic construct
  source 1..20: mol_type = other DNA
atttttgttttcttggtagt

SEQ ID NO: 89785 - DNA, 20 bp, synthetic construct
  source 1..20: mol_type = other DNA
aatttttgttttcttggtag

SEQ ID NO: 89786 - DNA, 20 bp, synthetic construct
  source 1..20: mol_type = other DNA
aaatttttgttttcttggta

SEQ ID NO: 89787 - DNA, 20 bp, synthetic construct
  source 1..20: mol_type = other DNA
aaaatttttgttttcttggt

SEQ ID NO: 89788 - DNA, 20 bp, synthetic construct
  source 1..20: mol_type = other DNA
taaaatttttgttttcttgg

SEQ ID NO: 89789 - DNA, 20 bp, synthetic construct
  source 1..20: mol_type = other DNA
ttaaaatttttgttttcttg

SEQ ID NO: 89790 - DNA, 20 bp, synthetic construct
  source 1..20: mol_type = other DNA
tttaaaatttttgttttctt

SEQ ID NO: 89791 - DNA, 20 bp, synthetic construct
  source 1..20: mol_type = other DNA
ttttaaaatttttgttttct

SEQ ID NO: 89792 - DNA, 20 bp, synthetic construct
  source 1..20: mol_type = other DNA
tttttaaaatttttgttttc

SEQ ID NO: 89793 - DNA, 20 bp, synthetic construct
  source 1..20: mol_type = other DNA
atttttaaaatttttgtttt

SEQ ID NO: 89794 - DNA, 20 bp, synthetic construct
  source 1..20: mol_type = other DNA
gatttttaaaatttttgttt

SEQ ID NO: 89795 - DNA, 20 bp, synthetic construct
  source 1..20: mol_type = other DNA
agatttttaaaatttttgtt

SEQ ID NO: 89796 - DNA, 20 bp, synthetic construct
  source 1..20: mol_type = other DNA
aagatttttaaaatttttgt

SEQ ID NO: 89797 - DNA, 20 bp, synthetic construct
  source 1..20: mol_type = other DNA
gaagatttttaaaatttttg

SEQ ID NO: 89798 - DNA, 20 bp, synthetic construct
  source 1..20: mol_type = other DNA
agaagatttttaaaattttt

SEQ ID NO: 89799 - DNA, 20 bp, synthetic construct
  source 1..20: mol_type = other DNA
aagaagatttttaaaatttt

SEQ ID NO: 89800 - DNA, 20 bp, synthetic construct
  source 1..20: mol_type = other DNA
gaagaagatttttaaaattt

SEQ ID NO: 89801 - DNA, 20 bp, synthetic construct
  source 1..20: mol_type = other DNA
tgaagaagatttttaaaatt

SEQ ID NO: 89802 - DNA, 20 bp, synthetic construct
  source 1..20: mol_type = other DNA
ctgaagaagatttttaaaat

SEQ ID NO: 89803 - DNA, 20 bp, synthetic construct
  source 1..20: mol_type = other DNA
gctgaagaagatttttaaaa

SEQ ID NO: 89804 - DNA, 20 bp, synthetic construct
  source 1..20: mol_type = other DNA
ggctgaagaagatttttaaa

SEQ ID NO: 89805 - DNA, 20 bp, synthetic construct
  source 1..20: mol_type = other DNA
cggctgaagaagatttttaa

SEQ ID NO: 89806 - DNA, 20 bp, synthetic construct
  source 1..20: mol_type = other DNA
ccggctgaagaagattttta

SEQ ID NO: 89807 - DNA, 20 bp, synthetic construct
  source 1..20: mol_type = other DNA
accggctgaagaagattttt

SEQ ID NO: 89808 - DNA, 20 bp, synthetic construct
  source 1..20: mol_type = other DNA
gaccggctgaagaagatttt

SEQ ID NO: 89809 - DNA, 20 bp, synthetic construct
  source 1..20: mol_type = other DNA
tgaccggctgaagaagattt

SEQ ID NO: 89810 - DNA, 20 bp, synthetic construct
  source 1..20: mol_type = other DNA
ctgaccggctgaagaagatt

SEQ ID NO: 89811 - DNA, 20 bp, synthetic construct
  source 1..20: mol_type = other DNA
cctgaccggctgaagaagat

SEQ ID NO: 89812 - DNA, 20 bp, synthetic construct
  source 1..20: mol_type = other DNA
gcctgaccggctgaagaaga

SEQ ID NO: 89813 - DNA, 20 bp, synthetic construct
  source 1..20: mol_type = other DNA
cgcctgaccggctgaagaag

SEQ ID NO: 89814 - DNA, 20 bp, synthetic construct
  source 1..20: mol_type = other DNA
gcgcctgaccggctgaagaa

SEQ ID NO: 89815 - DNA, 20 bp, synthetic construct
  source 1..20: mol_type = other DNA
tgcgcctgaccggctgaaga

SEQ ID NO: 89816 - DNA, 20 bp, synthetic construct
  source 1..20: mol_type = other DNA
ctgcgcctgaccggctgaag

SEQ ID NO: 89817 - DNA, 20 bp, synthetic construct
  source 1..20: mol_type = other DNA
actgcgcctgaccggctgaa

SEQ ID NO: 89818 - DNA, 20 bp, synthetic construct
  source 1..20: mol_type = other DNA
cactgcgcctgaccggctga

SEQ ID NO: 89819 - DNA, 20 bp, synthetic construct
  source 1..20: mol_type = other DNA
ccactgcgcctgaccggctg

SEQ ID NO: 89820 - DNA, 20 bp, synthetic construct
  source 1..20: mol_type = other DNA
gccactgcgcctgaccggct

SEQ ID NO: 89821 - DNA, 20 bp, synthetic construct
  source 1..20: mol_type = other DNA
agccactgcgcctgaccggc

SEQ ID NO: 89822 - DNA, 20 bp, synthetic construct
  source 1..20: mol_type = other DNA
gagccactgcgcctgaccgg

SEQ ID NO: 89823 - DNA, 20 bp, synthetic construct
  source 1..20: mol_type = other DNA
tgagccactgcgcctgaccg

SEQ ID NO: 89824 - DNA, 20 bp, synthetic construct
  source 1..20: mol_type = other DNA
gtgagccactgcgcctgacc

SEQ ID NO: 89825 - DNA, 20 bp, synthetic construct
  source 1..20: mol_type = other DNA
cgtgagccactgcgcctgac

SEQ ID NO: 89826 - DNA, 20 bp, synthetic construct
  source 1..20: mol_type = other DNA
ccgtgagccactgcgcctga

SEQ ID NO: 89827 - DNA, 20 bp, synthetic construct
  source 1..20: mol_type = other DNA
gccgtgagccactgcgcctg

SEQ ID NO: 89828 - DNA, 20 bp, synthetic construct
  source 1..20: mol_type = other DNA
agccgtgagccactgcgcct

SEQ ID NO: 89829 - DNA, 20 bp, synthetic construct
  source 1..20: mol_type = other DNA
cagccgtgagccactgcgcc

SEQ ID NO: 89830 - DNA, 20 bp, synthetic construct
  source 1..20: mol_type = other DNA
acagccgtgagccactgcgc

SEQ ID NO: 89831 - DNA, 20 bp, synthetic construct
  source 1..20: mol_type = other DNA
tacagccgtgagccactgcg

SEQ ID NO: 89832 - DNA, 20 bp, synthetic construct
  source 1..20: mol_type = other DNA
ttacagccgtgagccactgc

SEQ ID NO: 89833 - DNA, 20 bp, synthetic construct
  source 1..20: mol_type = other DNA
attacagccgtgagccactg

SEQ ID NO: 89834 - DNA, 20 bp, synthetic construct
  source 1..20: mol_type = other DNA
gattacagccgtgagccact

SEQ ID NO: 89835 - DNA, 20 bp, synthetic construct
  source 1..20: mol_type = other DNA
ggattacagccgtgagccac

SEQ ID NO: 89836 - DNA, 20 bp, synthetic construct
  source 1..20: mol_type = other DNA
gggattacagccgtgagcca

SEQ ID NO: 89837 - DNA, 20 bp, synthetic construct
  source 1..20: mol_type = other DNA
tgggattacagccgtgagcc

SEQ ID NO: 89838 - DNA, 20 bp, synthetic construct
  source 1..20: mol_type = other DNA
ctgggattacagccgtgagc

SEQ ID NO: 89839 - DNA, 20 bp, synthetic construct
  source 1..20: mol_type = other DNA
gctgggattacagccgtgag

SEQ ID NO: 89840 - DNA, 20 bp, synthetic construct
  source 1..20: mol_type = other DNA
tgctgggattacagccgtga

SEQ ID NO: 89841 - DNA, 20 bp, synthetic construct
  source 1..20: mol_type = other DNA
gtgctgggattacagccgtg

SEQ ID NO: 89842 - DNA, 20 bp, synthetic construct
  source 1..20: mol_type = other DNA
agtgctgggattacagccgt

SEQ ID NO: 89843 - DNA, 20 bp, synthetic construct
  source 1..20: mol_type = other DNA
aagtgctgggattacagccg

SEQ ID NO: 89844 - DNA, 20 bp, synthetic construct
  source 1..20: mol_type = other DNA
caagtgctgggattacagcc

SEQ ID NO: 89845 - DNA, 20 bp, synthetic construct
  source 1..20: mol_type = other DNA
ccaagtgctgggattacagc

SEQ ID NO: 89846 - DNA, 20 bp, synthetic construct
  source 1..20: mol_type = other DNA
cccaagtgctgggattacag

SEQ ID NO: 89847 - DNA, 20 bp, synthetic construct
  source 1..20: mol_type = other DNA
ccccaagtgctgggattaca

SEQ ID NO: 89848 - DNA, 20 bp, synthetic construct
  source 1..20: mol_type = other DNA
tccccaagtgctgggattac

SEQ ID NO: 89849 - DNA, 20 bp, synthetic construct
  source 1..20: mol_type = other DNA
ctccccaagtgctgggatta

SEQ ID NO: 89850 - DNA, 20 bp, synthetic construct
  source 1..20: mol_type = other DNA
cctccccaagtgctgggatt

SEQ ID NO: 89851 - DNA, 20 bp, synthetic construct
  source 1..20: mol_type = other DNA
gcctccccaagtgctgggat

SEQ ID NO: 89852 - DNA, 20 bp, synthetic construct
  source 1..20: mol_type = other DNA
agcctccccaagtgctggga

SEQ ID NO: 89853 - DNA, 20 bp, synthetic construct
  source 1..20: mol_type = other DNA
cagcctccccaagtgctggg

SEQ ID NO: 89854 - DNA, 20 bp, synthetic construct
  source 1..20: mol_type = other DNA
tcagcctccccaagtgctgg

SEQ ID NO: 89855 - DNA, 20 bp, synthetic construct
  source 1..20: mol_type = other DNA
ctcagcctccccaagtgctg

SEQ ID NO: 89856 - DNA, 20 bp, synthetic construct
  source 1..20: mol_type = other DNA
cctcagcctccccaagtgct

SEQ ID NO: 89857 - DNA, 20 bp, synthetic construct
  source 1..20: mol_type = other DNA
gcctcagcctccccaagtgc

SEQ ID NO: 89858 - DNA, 20 bp, synthetic construct
  source 1..20: mol_type = other DNA
cgcctcagcctccccaagtg

SEQ ID NO: 89859 - DNA, 20 bp, synthetic construct
  source 1..20: mol_type = other DNA
ccgcctcagcctccccaagt

SEQ ID NO: 89860 - DNA, 20 bp, synthetic construct
  source 1..20: mol_type = other DNA
cccgcctcagcctccccaag

SEQ ID NO: 89861 - DNA, 20 bp, synthetic construct
  source 1..20: mol_type = other DNA
acccgcctcagcctccccaa

SEQ ID NO: 89862 - DNA, 20 bp, synthetic construct
  source 1..20: mol_type = other DNA
cacccgcctcagcctcccca

SEQ ID NO: 89863 - DNA, 20 bp, synthetic construct
  source 1..20: mol_type = other DNA
ccacccgcctcagcctcccc

SEQ ID NO: 89864 - DNA, 20 bp, synthetic construct
  source 1..20: mol_type = other DNA
tccacccgcctcagcctccc

SEQ ID NO: 89865 - DNA, 20 bp, synthetic construct
  source 1..20: mol_type = other DNA
atccacccgcctcagcctcc

SEQ ID NO: 89866 - DNA, 20 bp, synthetic construct
  source 1..20: mol_type = other DNA
gatccacccgcctcagcctc

SEQ ID NO: 89867 - DNA, 20 bp, synthetic construct
  source 1..20: mol_type = other DNA
tgatccacccgcctcagcct

SEQ ID NO: 89868 - DNA, 20 bp, synthetic construct
  source 1..20: mol_type = other DNA
gtgatccacccgcctcagcc

SEQ ID NO: 89869 - DNA, 20 bp, synthetic construct
  source 1..20: mol_type = other DNA
cgtgatccacccgcctcagc

SEQ ID NO: 89870 - DNA, 20 bp, synthetic construct
  source 1..20: mol_type = other DNA
tcgtgatccacccgcctcag

SEQ ID NO: 89871 - DNA, 20 bp, synthetic construct
  source 1..20: mol_type = other DNA
ctcgtgatccacccgcctca

SEQ ID NO: 89872 - DNA, 20 bp, synthetic construct
  source 1..20: mol_type = other DNA
cctcgtgatccacccgcctc

SEQ ID NO: 89873 - DNA, 20 bp, synthetic construct
  source 1..20: mol_type = other DNA
acctcgtgatccacccgcct

SEQ ID NO: 89874 - DNA, 20 bp, synthetic construct
  source 1..20: mol_type = other DNA
gacctcgtgatccacccgcc

SEQ ID NO: 89875 - DNA, 20 bp, synthetic construct
  source 1..20: mol_type = other DNA
tgacctcgtgatccacccgc

SEQ ID NO: 89876 - DNA, 20 bp, synthetic construct
  source 1..20: mol_type = other DNA
ctgacctcgtgatccacccg

SEQ ID NO: 89877 - DNA, 20 bp, synthetic construct
  source 1..20: mol_type = other DNA
cctgacctcgtgatccaccc

SEQ ID NO: 89878 - DNA, 20 bp, synthetic construct
  source 1..20: mol_type = other DNA
tcctgacctcgtgatccacc

SEQ ID NO: 89879 - DNA, 20 bp, synthetic construct
  source 1..20: mol_type = other DNA
ctcctgacctcgtgatccac

SEQ ID NO: 89880 - DNA, 20 bp, synthetic construct
  source 1..20: mol_type = other DNA
actcctgacctcgtgatcca

SEQ ID NO: 89881 - DNA, 20 bp, synthetic construct
  source 1..20: mol_type = other DNA
aactcctgacctcgtgatcc

SEQ ID NO: 89882 - DNA, 20 bp, synthetic construct
  source 1..20: mol_type = other DNA
gaactcctgacctcgtgatc

SEQ ID NO: 89883 - DNA, 20 bp, synthetic construct
  source 1..20: mol_type = other DNA
tgaactcctgacctcgtgat

SEQ ID NO: 89884 - DNA, 20 bp, synthetic construct
  source 1..20: mol_type = other DNA
ttgaactcctgacctcgtga

SEQ ID NO: 89885 - DNA, 20 bp, synthetic construct
  source 1..20: mol_type = other DNA
gttgaactcctgacctcgtg

SEQ ID NO: 89886 - DNA, 20 bp, synthetic construct
  source 1..20: mol_type = other DNA
tgttgaactcctgacctcgt

SEQ ID NO: 89887 - DNA, 20 bp, synthetic construct
  source 1..20: mol_type = other DNA
gtgttgaactcctgacctcg

SEQ ID NO: 89888 - DNA, 20 bp, synthetic construct
  source 1..20: mol_type = other DNA
ggtgttgaactcctgacctc

SEQ ID NO: 89889 - DNA, 20 bp, synthetic construct
  source 1..20: mol_type = other DNA
tggtgttgaactcctgacct

SEQ ID NO: 89890 - DNA, 20 bp, synthetic construct
  source 1..20: mol_type = other DNA
ctggtgttgaactcctgacc

SEQ ID NO: 89891 - DNA, 20 bp, synthetic construct
  source 1..20: mol_type = other DNA
gctggtgttgaactcctgac

SEQ ID NO: 89892 - DNA, 20 bp, synthetic construct
  source 1..20: mol_type = other DNA
ggctggtgttgaactcctga

SEQ ID NO: 89893 - DNA, 20 bp, synthetic construct
  source 1..20: mol_type = other DNA
aggctggtgttgaactcctg

SEQ ID NO: 89894 - DNA, 20 bp, synthetic construct
  source 1..20: mol_type = other DNA
caggctggtgttgaactcct

SEQ ID NO: 89895 - DNA, 20 bp, synthetic construct
  source 1..20: mol_type = other DNA
ccaggctggtgttgaactcc

SEQ ID NO: 89896 - DNA, 20 bp, synthetic construct
  source 1..20: mol_type = other DNA
gccaggctggtgttgaactc

SEQ ID NO: 89897 - DNA, 20 bp, synthetic construct
  source 1..20: mol_type = other DNA
ggccaggctggtgttgaact

SEQ ID NO: 89898 - DNA, 20 bp, synthetic construct
  source 1..20: mol_type = other DNA
tggccaggctggtgttgaac

SEQ ID NO: 89899 - DNA, 20 bp, synthetic construct
  source 1..20: mol_type = other DNA
ttggccaggctggtgttgaa

SEQ ID NO: 89900 - DNA, 20 bp, synthetic construct
  source 1..20: mol_type = other DNA
gttggccaggctggtgttga

SEQ ID NO: 89901 - DNA, 20 bp, synthetic construct
  source 1..20: mol_type = other DNA
tgttggccaggctggtgttg

SEQ ID NO: 89902 - DNA, 20 bp, synthetic construct
  source 1..20: mol_type = other DNA
atgttggccaggctggtgtt

SEQ ID NO: 89903 - DNA, 20 bp, synthetic construct
  source 1..20: mol_type = other DNA
catgttggccaggctggtgt

SEQ ID NO: 89904 - DNA, 20 bp, synthetic construct
  source 1..20: mol_type = other DNA
ccatgttggccaggctggtg

SEQ ID NO: 89905 - DNA, 20 bp, synthetic construct
  source 1..20: mol_type = other DNA
accatgttggccaggctggt

SEQ ID NO: 89906 - DNA, 20 bp, synthetic construct
  source 1..20: mol_type = other DNA
caccatgttggccaggctgg

SEQ ID NO: 89907 - DNA, 20 bp, synthetic construct
  source 1..20: mol_type = other DNA
tcaccatgttggccaggctg

SEQ ID NO: 89908 - DNA, 20 bp, synthetic construct
  source 1..20: mol_type = other DNA
ttcaccatgttggccaggct

SEQ ID NO: 89909 - DNA, 20 bp, synthetic construct
  source 1..20: mol_type = other DNA
tttcaccatgttggccaggc

SEQ ID NO: 89910 - DNA, 20 bp, synthetic construct
  source 1..20: mol_type = other DNA
gtttcaccatgttggccagg

SEQ ID NO: 89911 - DNA, 20 bp, synthetic construct
  source 1..20: mol_type = other DNA
cgtttcaccatgttggccag

SEQ ID NO: 89912 - DNA, 20 bp, synthetic construct
  source 1..20: mol_type = other DNA
acgtttcaccatgttggcca

SEQ ID NO: 89913 - DNA, 20 bp, synthetic construct
  source 1..20: mol_type = other DNA
gacgtttcaccatgttggcc

SEQ ID NO: 89914 - DNA, 20 bp, synthetic construct
  source 1..20: mol_type = other DNA
cgacgtttcaccatgttggc

SEQ ID NO: 89915 - DNA, 20 bp, synthetic construct
  source 1..20: mol_type = other DNA
acgacgtttcaccatgttgg

SEQ ID NO: 89916 - DNA, 20 bp, synthetic construct
  source 1..20: mol_type = other DNA
gacgacgtttcaccatgttg

SEQ ID NO: 89917 - DNA, 20 bp, synthetic construct
  source 1..20: mol_type = other DNA
agacgacgtttcaccatgtt

SEQ ID NO: 89918 - DNA, 20 bp, synthetic construct
  source 1..20: mol_type = other DNA
gagacgacgtttcaccatgt

SEQ ID NO: 89919 - DNA, 20 bp, synthetic construct
  source 1..20: mol_type = other DNA
agagacgacgtttcaccatg

SEQ ID NO: 89920 - DNA, 20 bp, synthetic construct
  source 1..20: mol_type = other DNA
tagagacgacgtttcaccat

SEQ ID NO: 89921 - DNA, 20 bp, synthetic construct
  source 1..20: mol_type = other DNA
gtagagacgacgtttcacca

SEQ ID NO: 89922 - DNA, 20 bp, synthetic construct
  source 1..20: mol_type = other DNA
agtagagacgacgtttcacc

SEQ ID NO: 89923 - DNA, 20 bp, synthetic construct
  source 1..20: mol_type = other DNA
tagtagagacgacgtttcac

SEQ ID NO: 89924 - DNA, 20 bp, synthetic construct
  source 1..20: mol_type = other DNA
ttagtagagacgacgtttca

SEQ ID NO: 89925 - DNA, 20 bp, synthetic construct
  source 1..20: mol_type = other DNA
tttagtagagacgacgtttc

SEQ ID NO: 89926 - DNA, 20 bp, synthetic construct
  source 1..20: mol_type = other DNA
ttttagtagagacgacgttt

SEQ ID NO: 89927 - DNA, 20 bp, synthetic construct
  source 1..20: mol_type = other DNA
tttttagtagagacgacgtt

SEQ ID NO: 89928 - DNA, 20 bp, synthetic construct
  source 1..20: mol_type = other DNA
atttttagtagagacgacgt

SEQ ID NO: 89929 - DNA, 20 bp, synthetic construct
  source 1..20: mol_type = other DNA
tatttttagtagagacgacg

SEQ ID NO: 89930 - DNA, 20 bp, synthetic construct
  source 1..20: mol_type = other DNA
gtatttttagtagagacgac

SEQ ID NO: 89931 - DNA, 20 bp, synthetic construct
  source 1..20: mol_type = other DNA
tgtatttttagtagagacga

SEQ ID NO: 89932 - DNA, 20 bp, synthetic construct
  source 1..20: mol_type = other DNA
ttgtatttttagtagagacg

SEQ ID NO: 89933 - DNA, 20 bp, synthetic construct
  source 1..20: mol_type = other DNA
tttgtatttttagtagagac

SEQ ID NO: 89934 - DNA, 20 bp, synthetic construct
  source 1..20: mol_type = other DNA
ttttgtatttttagtagaga

SEQ ID NO: 89935 - DNA, 20 bp, synthetic construct
  source 1..20: mol_type = other DNA
tttttgtatttttagtagag

SEQ ID NO: 89936 - DNA, 20 bp, synthetic construct
  source 1..20: mol_type = other DNA
atttttgtatttttagtaga

SEQ ID NO: 89937 - DNA, 20 bp, synthetic construct
  source 1..20: mol_type = other DNA
aatttttgtatttttagtag

SEQ ID NO: 89938 - DNA, 20 bp, synthetic construct
  source 1..20: mol_type = other DNA
taatttttgtatttttagta

SEQ ID NO: 89939 - DNA, 20 bp, synthetic construct
  source 1..20: mol_type = other DNA
ctaatttttgtatttttagt

SEQ ID NO: 89940 - DNA, 20 bp, synthetic construct
  source 1..20: mol_type = other DNA
gctaatttttgtatttttag

SEQ ID NO: 89941 - DNA, 20 bp, synthetic construct
  source 1..20: mol_type = other DNA
agctaatttttgtattttta

SEQ ID NO: 89942 - DNA, 20 bp, synthetic construct
  source 1..20: mol_type = other DNA
cagctaatttttgtattttt

SEQ ID NO: 89943 - DNA, 20 bp, synthetic construct
  source 1..20: mol_type = other DNA
ccagctaatttttgtatttt

SEQ ID NO: 89944 - DNA, 20 bp, synthetic construct
  source 1..20: mol_type = other DNA
cccagctaatttttgtattt

SEQ ID NO: 89945 - DNA, 20 bp, synthetic construct
  source 1..20: mol_type = other DNA
gcccagctaatttttgtatt

SEQ ID NO: 89946 - DNA, 20 bp, synthetic construct
  source 1..20: mol_type = other DNA
tgcccagctaatttttgtat

SEQ ID NO: 89947 - DNA, 20 bp, synthetic construct
  source 1..20: mol_type = other DNA
atgcccagctaatttttgta

SEQ ID NO: 89948 - DNA, 20 bp, synthetic construct
  source 1..20: mol_type = other DNA
aatgcccagctaatttttgt

SEQ ID NO: 89949 - DNA, 20 bp, synthetic construct
  source 1..20: mol_type = other DNA
caatgcccagctaatttttg

SEQ ID NO: 89950 - DNA, 20 bp, synthetic construct
  source 1..20: mol_type = other DNA
acaatgcccagctaattttt

SEQ ID NO: 89951 - DNA, 20 bp, synthetic construct
  source 1..20: mol_type = other DNA
cacaatgcccagctaatttt

SEQ ID NO: 89952 - DNA, 20 bp, synthetic construct
  source 1..20: mol_type = other DNA
ccacaatgcccagctaattt

SEQ ID NO: 89953 - DNA, 20 bp, synthetic construct
  source 1..20: mol_type = other DNA
gccacaatgcccagctaatt

SEQ ID NO: 89954 - DNA, 20 bp, synthetic construct
  source 1..20: mol_type = other DNA
cgccacaatgcccagctaat

SEQ ID NO: 89955 - DNA, 20 bp, synthetic construct
  source 1..20: mol_type = other DNA
gcgccacaatgcccagctaa

SEQ ID NO: 89956 - DNA, 20 bp, synthetic construct
  source 1..20: mol_type = other DNA
cgcgccacaatgcccagcta

SEQ ID NO: 89957 - DNA, 20 bp, synthetic construct
  source 1..20: mol_type = other DNA
acgcgccacaatgcccagct

SEQ ID NO: 89958 - DNA, 20 bp, synthetic construct
  source 1..20: mol_type = other DNA
aacgcgccacaatgcccagc

SEQ ID NO: 89959 - DNA, 20 bp, synthetic construct
  source 1..20: mol_type = other DNA
gaacgcgccacaatgcccag

SEQ ID NO: 89960 - DNA, 20 bp, synthetic construct
  source 1..20: mol_type = other DNA
agaacgcgccacaatgccca

SEQ ID NO: 89961 - DNA, 20 bp, synthetic construct
  source 1..20: mol_type = other DNA
aagaacgcgccacaatgccc

SEQ ID NO: 89962 - DNA, 20 bp, synthetic construct
  source 1..20: mol_type = other DNA
caagaacgcgccacaatgcc

SEQ ID NO: 89963 - DNA, 20 bp, synthetic construct
  source 1..20: mol_type = other DNA
acaagaacgcgccacaatgc

SEQ ID NO: 89964 - DNA, 20 bp, synthetic construct
  source 1..20: mol_type = other DNA
tacaagaacgcgccacaatg

SEQ ID NO: 89965 - DNA, 20 bp, synthetic construct
  source 1..20: mol_type = other DNA
ttacaagaacgcgccacaat

SEQ ID NO: 89966 - DNA, 20 bp, synthetic construct
  source 1..20: mol_type = other DNA
attacaagaacgcgccacaa

SEQ ID NO: 89967 - DNA, 20 bp, synthetic construct
  source 1..20: mol_type = other DNA
gattacaagaacgcgccaca

SEQ ID NO: 89968 - DNA, 20 bp, synthetic construct
  source 1..20: mol_type = other DNA
ggattacaagaacgcgccac

SEQ ID NO: 89969 - DNA, 20 bp, synthetic construct
  source 1..20: mol_type = other DNA
gggattacaagaacgcgcca

SEQ ID NO: 89970 - DNA, 20 bp, synthetic construct
  source 1..20: mol_type = other DNA
tgggattacaagaacgcgcc

SEQ ID NO: 89971 - DNA, 20 bp, synthetic construct
  source 1..20: mol_type = other DNA
ctgggattacaagaacgcgc

SEQ ID NO: 89972 - DNA, 20 bp, synthetic construct
  source 1..20: mol_type = other DNA
gctgggattacaagaacgcg

SEQ ID NO: 89973 - DNA, 20 bp, synthetic construct
  source 1..20: mol_type = other DNA
agctgggattacaagaacgc

SEQ ID NO: 89974 - DNA, 20 bp, synthetic construct
  source 1..20: mol_type = other DNA
cagctgggattacaagaacg

SEQ ID NO: 89975 - DNA, 20 bp, synthetic construct
  source 1..20: mol_type = other DNA
gcagctgggattacaagaac

SEQ ID NO: 89976 - DNA, 20 bp, synthetic construct
  source 1..20: mol_type = other DNA
agcagctgggattacaagaa

SEQ ID NO: 89977 - DNA, 20 bp, synthetic construct
  source 1..20: mol_type = other DNA
gagcagctgggattacaaga

SEQ ID NO: 89978 - DNA, 20 bp, synthetic construct
  source 1..20: mol_type = other DNA
tgagcagctgggattacaag

SEQ ID NO: 89979 - DNA, 20 bp, synthetic construct
  source 1..20: mol_type = other DNA
ctgagcagctgggattacaa

SEQ ID NO: 89980 - DNA, 20 bp, synthetic construct
  source 1..20: mol_type = other DNA
cctgagcagctgggattaca

SEQ ID NO: 89981 - DNA, 20 bp, synthetic construct
  source 1..20: mol_type = other DNA
tcctgagcagctgggattac

SEQ ID NO: 89982 - DNA, 20 bp, synthetic construct
  source 1..20: mol_type = other DNA
ctcctgagcagctgggatta

SEQ ID NO: 89983 - DNA, 20 bp, synthetic construct
  source 1..20: mol_type = other DNA
cctcctgagcagctgggatt

SEQ ID NO: 89984 - DNA, 20 bp, synthetic construct
  source 1..20: mol_type = other DNA
gcctcctgagcagctgggat

SEQ ID NO: 89985 - DNA, 20 bp, synthetic construct
  source 1..20: mol_type = other DNA
agcctcctgagcagctggga

SEQ ID NO: 89986 - DNA, 20 bp, synthetic construct
  source 1..20: mol_type = other DNA
cagcctcctgagcagctggg

SEQ ID NO: 89987 - DNA, 20 bp, synthetic construct
  source 1..20: mol_type = other DNA
tcagcctcctgagcagctgg

SEQ ID NO: 89988 - DNA, 20 bp, synthetic construct
  source 1..20: mol_type = other DNA
ctcagcctcctgagcagctg

SEQ ID NO: 89989 - DNA, 20 bp, synthetic construct
  source 1..20: mol_type = other DNA
cctcagcctcctgagcagct

SEQ ID NO: 89990 - DNA, 20 bp, synthetic construct
  source 1..20: mol_type = other DNA
gcctcagcctcctgagcagc

SEQ ID NO: 89991 - DNA, 20 bp, synthetic construct
  source 1..20: mol_type = other DNA
tgcctcagcctcctgagcag

SEQ ID NO: 89992 - DNA, 20 bp, synthetic construct
  source 1..20: mol_type = other DNA
ctgcctcagcctcctgagca

SEQ ID NO: 89993 - DNA, 20 bp, synthetic construct
  source 1..20: mol_type = other DNA
cctgcctcagcctcctgagc

SEQ ID NO: 89994 - DNA, 20 bp, synthetic construct
  source 1..20: mol_type = other DNA
tcctgcctcagcctcctgag

SEQ ID NO: 89995 - DNA, 20 bp, synthetic construct
  source 1..20: mol_type = other DNA
ctcctgcctcagcctcctga

SEQ ID NO: 89996 - DNA, 20 bp, synthetic construct
  source 1..20: mol_type = other DNA
tctcctgcctcagcctcctg

SEQ ID NO: 89997 - DNA, 20 bp, synthetic construct
  source 1..20: mol_type = other DNA
ttctcctgcctcagcctcct

SEQ ID NO: 89998 - DNA, 20 bp, synthetic construct
  source 1..20: mol_type = other DNA
attctcctgcctcagcctcc

SEQ ID NO: 89999 - DNA, 20 bp, synthetic construct
  source 1..20: mol_type = other DNA
aattctcctgcctcagcctc

SEQ ID NO: 90000 - DNA, 20 bp, synthetic construct
  source 1..20: mol_type = other DNA
caattctcctgcctcagcct

SEQ ID NO: 90001 - DNA, 20 bp, synthetic construct
  source 1..20: mol_type = other DNA
gcaattctcctgcctcagcc

SEQ ID NO: 90002 - DNA, 20 bp, synthetic construct
  source 1..20: mol_type = other DNA
agcaattctcctgcctcagc

SEQ ID NO: 90003 - DNA, 20 bp, synthetic construct
  source 1..20: mol_type = other DNA
aagcaattctcctgcctcag

SEQ ID NO: 90004 - DNA, 20 bp, synthetic construct
  source 1..20: mol_type = other DNA
caagcaattctcctgcctca

SEQ ID NO: 90005 - DNA, 20 bp, synthetic construct
  source 1..20: mol_type = other DNA
tcaagcaattctcctgcctc

SEQ ID NO: 90006 - DNA, 20 bp, synthetic construct
  source 1..20: mol_type = other DNA
ttcaagcaattctcctgcct

SEQ ID NO: 90007 - DNA, 20 bp, synthetic construct
  source 1..20: mol_type = other DNA
gttcaagcaattctcctgcc

SEQ ID NO: 90008 - DNA, 20 bp, synthetic construct
  source 1..20: mol_type = other DNA
ggttcaagcaattctcctgc

SEQ ID NO: 90009 - DNA, 20 bp, synthetic construct
  source 1..20: mol_type = other DNA
tggttcaagcaattctcctg

SEQ ID NO: 90010 - DNA, 20 bp, synthetic construct
  source 1..20: mol_type = other DNA
ctggttcaagcaattctcct

SEQ ID NO: 90011 - DNA, 20 bp, synthetic construct
  source 1..20: mol_type = other DNA
cctggttcaagcaattctcc

SEQ ID NO: 90012 - DNA, 20 bp, synthetic construct
  source 1..20: mol_type = other DNA
tcctggttcaagcaattctc

SEQ ID NO: 90013 - DNA, 20 bp, synthetic construct
  source 1..20: mol_type = other DNA
gtcctggttcaagcaattct

SEQ ID NO: 90014 - DNA, 20 bp, synthetic construct
  source 1..20: mol_type = other DNA
ggtcctggttcaagcaattc

SEQ ID NO: 90015 - DNA, 20 bp, synthetic construct
  source 1..20: mol_type = other DNA
gggtcctggttcaagcaatt

SEQ ID NO: 90016 - DNA, 20 bp, synthetic construct
  source 1..20: mol_type = other DNA
cgggtcctggttcaagcaat

SEQ ID NO: 90017 - DNA, 20 bp, synthetic construct
  source 1..20: mol_type = other DNA
ccgggtcctggttcaagcaa

SEQ ID NO: 90018 - DNA, 20 bp, synthetic construct
  source 1..20: mol_type = other DNA
cccgggtcctggttcaagca

SEQ ID NO: 90019 - DNA, 20 bp, synthetic construct
  source 1..20: mol_type = other DNA
tcccgggtcctggttcaagc

SEQ ID NO: 90020 - DNA, 20 bp, synthetic construct
  source 1..20: mol_type = other DNA
ctcccgggtcctggttcaag

SEQ ID NO: 90021 - DNA, 20 bp, synthetic construct
  source 1..20: mol_type = other DNA
cctcccgggtcctggttcaa

SEQ ID NO: 90022 - DNA, 20 bp, synthetic construct
  source 1..20: mol_type = other DNA
acctcccgggtcctggttca

SEQ ID NO: 90023 - DNA, 20 bp, synthetic construct
  source 1..20: mol_type = other DNA
cacctcccgggtcctggttc

SEQ ID NO: 90024 - DNA, 20 bp, synthetic construct
  source 1..20: mol_type = other DNA
acacctcccgggtcctggtt

SEQ ID NO: 90025 - DNA, 20 bp, synthetic construct
  source 1..20: mol_type = other DNA
tacacctcccgggtcctggt

SEQ ID NO: 90026 - DNA, 20 bp, synthetic construct
  source 1..20: mol_type = other DNA
ctacacctcccgggtcctgg

SEQ ID NO: 90027 - DNA, 20 bp, synthetic construct
  source 1..20: mol_type = other DNA
cctacacctcccgggtcctg

SEQ ID NO: 90028 - DNA, 20 bp, synthetic construct
  source 1..20: mol_type = other DNA
acctacacctcccgggtcct

SEQ ID NO: 90029 - DNA, 20 bp, synthetic construct
  source 1..20: mol_type = other DNA
aacctacacctcccgggtcc

SEQ ID NO: 90030 - DNA, 20 bp, synthetic construct
  source 1..20: mol_type = other DNA
caacctacacctcccgggtc

SEQ ID NO: 90031 - DNA, 20 bp, synthetic construct
  source 1..20: mol_type = other DNA
gcaacctacacctcccgggt

SEQ ID NO: 90032 - DNA, 20 bp, synthetic construct
  source 1..20: mol_type = other DNA
cgcaacctacacctcccggg

SEQ ID NO: 90033 - DNA, 20 bp, synthetic construct
  source 1..20: mol_type = other DNA
ccgcaacctacacctcccgg

SEQ ID NO: 90034 - DNA, 20 bp, synthetic construct
  source 1..20: mol_type = other DNA
accgcaacctacacctcccg

SEQ ID NO: 90035 - DNA, 20 bp, synthetic construct
  source 1..20: mol_type = other DNA
caccgcaacctacacctccc

SEQ ID NO: 90036 - DNA, 20 bp, synthetic construct
  source 1..20: mol_type = other DNA
tcaccgcaacctacacctcc

SEQ ID NO: 90037 - DNA, 20 bp, synthetic construct
  source 1..20: mol_type = other DNA
ctcaccgcaacctacacctc

SEQ ID NO: 90038 - DNA, 20 bp, synthetic construct
  source 1..20: mol_type = other DNA
gctcaccgcaacctacacct

SEQ ID NO: 90039 - DNA, 20 bp, synthetic construct
  source 1..20: mol_type = other DNA
cgctcaccgcaacctacacc

SEQ ID NO: 90040 - DNA, 20 bp, synthetic construct
  source 1..20: mol_type = other DNA
ccgctcaccgcaacctacac

SEQ ID NO: 90041 - DNA, 20 bp, synthetic construct
  source 1..20: mol_type = other DNA
tccgctcaccgcaacctaca

SEQ ID NO: 90042 - DNA, 20 bp, synthetic construct
  source 1..20: mol_type = other DNA
ctccgctcaccgcaacctac

SEQ ID NO: 90043 - DNA, 20 bp, synthetic construct
  source 1..20: mol_type = other DNA
tctccgctcaccgcaaccta

SEQ ID NO: 90044 - DNA, 20 bp, synthetic construct
  source 1..20: mol_type = other DNA
atctccgctcaccgcaacct

SEQ ID NO: 90045 - DNA, 20 bp, synthetic construct
  source 1..20: mol_type = other DNA
gatctccgctcaccgcaacc

SEQ ID NO: 90046 - DNA, 20 bp, synthetic construct
  source 1..20: mol_type = other DNA
cgatctccgctcaccgcaac

SEQ ID NO: 90047 - DNA, 20 bp, synthetic construct
  source 1..20: mol_type = other DNA
gcgatctccgctcaccgcaa

SEQ ID NO: 90048 - DNA, 20 bp, synthetic construct
  source 1..20: mol_type = other DNA
cgcgatctccgctcaccgca

SEQ ID NO: 90049 - DNA, 20 bp, synthetic construct
  source 1..20: mol_type = other DNA
gcgcgatctccgctcaccgc

SEQ ID NO: 90050 - DNA, 20 bp, synthetic construct
  source 1..20: mol_type = other DNA
ggcgcgatctccgctcaccg

SEQ ID NO: 90051 - DNA, 20 bp, synthetic construct
  source 1..20: mol_type = other DNA
tggcgcgatctccgctcacc

SEQ ID NO: 90052 - DNA, 20 bp, synthetic construct
  source 1..20: mol_type = other DNA
gtggcgcgatctccgctcac

SEQ ID NO: 90053 - DNA, 20 bp, synthetic construct
  source 1..20: mol_type = other DNA
agtggcgcgatctccgctca

SEQ ID NO: 90054 - DNA, 20 bp, synthetic construct
  source 1..20: mol_type = other DNA
cagtggcgcgatctccgctc

SEQ ID NO: 90055 - DNA, 20 bp, synthetic construct
  source 1..20: mol_type = other DNA
gcagtggcgcgatctccgct

SEQ ID NO: 90056 - DNA, 20 bp, synthetic construct
  source 1..20: mol_type = other DNA
tgcagtggcgcgatctccgc

SEQ ID NO: 90057 - DNA, 20 bp, synthetic construct
  source 1..20: mol_type = other DNA
gtgcagtggcgcgatctccg

SEQ ID NO: 90058 - DNA, 20 bp, synthetic construct
  source 1..20: mol_type = other DNA
agtgcagtggcgcgatctcc

SEQ ID NO: 90059 - DNA, 20 bp, synthetic construct
  source 1..20: mol_type = other DNA
gagtgcagtggcgcgatctc

SEQ ID NO: 90060 - DNA, 20 bp, synthetic construct
  source 1..20: mol_type = other DNA
ggagtgcagtggcgcgatct

SEQ ID NO: 90061 - DNA, 20 bp, synthetic construct
  source 1..20: mol_type = other DNA
tggagtgcagtggcgcgatc

SEQ ID NO: 90062 - DNA, 20 bp, synthetic construct
  source 1..20: mol_type = other DNA
ctggagtgcagtggcgcgat

SEQ ID NO: 90063 - DNA, 20 bp, synthetic construct
  source 1..20: mol_type = other DNA
gctggagtgcagtggcgcga

SEQ ID NO: 90064 - DNA, 20 bp, synthetic construct
  source 1..20: mol_type = other DNA
ggctggagtgcagtggcgcg

SEQ ID NO: 90065 - DNA, 20 bp, synthetic construct
  source 1..20: mol_type = other DNA
aggctggagtgcagtggcgc

SEQ ID NO: 90066 - DNA, 20 bp, synthetic construct
  source 1..20: mol_type = other DNA
caggctggagtgcagtggcg

SEQ ID NO: 90067 - DNA, 20 bp, synthetic construct
  source 1..20: mol_type = other DNA
ccaggctggagtgcagtggc

SEQ ID NO: 90068 - DNA, 20 bp, synthetic construct
  source 1..20: mol_type = other DNA
cccaggctggagtgcagtgg

SEQ ID NO: 90069 - DNA, 20 bp, synthetic construct
  source 1..20: mol_type = other DNA
gcccaggctggagtgcagtg

SEQ ID NO: 90070 - DNA, 20 bp, synthetic construct
  source 1..20: mol_type = other DNA
agcccaggctggagtgcagt

SEQ ID NO: 90071 - DNA, 20 bp, synthetic construct
  source 1..20: mol_type = other DNA
tagcccaggctggagtgcag

SEQ ID NO: 90072 - DNA, 20 bp, synthetic construct
  source 1..20: mol_type = other DNA
atagcccaggctggagtgca

SEQ ID NO: 90073 - DNA, 20 bp, synthetic construct
  source 1..20: mol_type = other DNA
tatagcccaggctggagtgc

SEQ ID NO: 90074 - DNA, 20 bp, synthetic construct
  source 1..20: mol_type = other DNA
ctatagcccaggctggagtg

SEQ ID NO: 90075 - DNA, 20 bp, synthetic construct
  source 1..20: mol_type = other DNA
tctatagcccaggctggagt

SEQ ID NO: 90076 - DNA, 20 bp, synthetic construct
  source 1..20: mol_type = other DNA
ctctatagcccaggctggag

SEQ ID NO: 90077 - DNA, 20 bp, synthetic construct
  source 1..20: mol_type = other DNA
actctatagcccaggctgga

SEQ ID NO: 90078 - DNA, 20 bp, synthetic construct
  source 1..20: mol_type = other DNA
cactctatagcccaggctgg

SEQ ID NO: 90079 - DNA, 20 bp, synthetic construct
  source 1..20: mol_type = other DNA
tcactctatagcccaggctg

SEQ ID NO: 90080 - DNA, 20 bp, synthetic construct
  source 1..20: mol_type = other DNA
ctcactctatagcccaggct

SEQ ID NO: 90081 - DNA, 20 bp, synthetic construct
  source 1..20: mol_type = other DNA
tctcactctatagcccaggc

SEQ ID NO: 90082 - DNA, 20 bp, synthetic construct
  source 1..20: mol_type = other DNA
gtctcactctatagcccagg

SEQ ID NO: 90083 - DNA, 20 bp, synthetic construct
  source 1..20: mol_type = other DNA
agtctcactctatagcccag

SEQ ID NO: 90084 - DNA, 20 bp, synthetic construct
  source 1..20: mol_type = other DNA
gagtctcactctatagccca

SEQ ID NO: 90085 - DNA, 20 bp, synthetic construct
  source 1..20: mol_type = other DNA
ggagtctcactctatagccc

SEQ ID NO: 90086 - DNA, 20 bp, synthetic construct
  source 1..20: mol_type = other DNA
tggagtctcactctatagcc

SEQ ID NO: 90087 - DNA, 20 bp, synthetic construct
  source 1..20: mol_type = other DNA
atggagtctcactctatagc

SEQ ID NO: 90088 - DNA, 20 bp, synthetic construct
  source 1..20: mol_type = other DNA
aatggagtctcactctatag

SEQ ID NO: 90089 - DNA, 20 bp, synthetic construct
  source 1..20: mol_type = other DNA
aaatggagtctcactctata

SEQ ID NO: 90090 - DNA, 20 bp, synthetic construct
  source 1..20: mol_type = other DNA
gaaatggagtctcactctat

SEQ ID NO: 90091 - DNA, 20 bp, synthetic construct
  source 1..20: mol_type = other DNA
tgaaatggagtctcactcta

SEQ ID NO: 90092 - DNA, 20 bp, synthetic construct
  source 1..20: mol_type = other DNA
ttgaaatggagtctcactct

SEQ ID NO: 90093 - DNA, 20 bp, synthetic construct
  source 1..20: mol_type = other DNA
tttgaaatggagtctcactc

SEQ ID NO: 90094 - DNA, 20 bp, synthetic construct
  source 1..20: mol_type = other DNA
ttttgaaatggagtctcact

SEQ ID NO: 90095 - DNA, 20 bp, synthetic construct
  source 1..20: mol_type = other DNA
tttttgaaatggagtctcac

SEQ ID NO: 90096 - DNA, 20 bp, synthetic construct
  source 1..20: mol_type = other DNA
ttttttgaaatggagtctca

SEQ ID NO: 90097 - DNA, 20 bp, synthetic construct
  source 1..20: mol_type = other DNA
tttttttgaaatggagtctc

SEQ ID NO: 90098 - DNA, 20 bp, synthetic construct
  source 1..20: mol_type = other DNA
ttttttttgaaatggagtct

SEQ ID NO: 90099 - DNA, 20 bp, synthetic construct
  source 1..20: mol_type = other DNA
tttttttttgaaatggagtc

SEQ ID NO: 90100 - DNA, 20 bp, synthetic construct
  source 1..20: mol_type = other DNA
ttttttttttgaaatggagt

SEQ ID NO: 90101 - DNA, 20 bp, synthetic construct
  source 1..20: mol_type = other DNA
tttttttttttgaaatggag

SEQ ID NO: 90102 - DNA, 20 bp, synthetic construct
  source 1..20: mol_type = other DNA
ttttttttttttgaaatgga

SEQ ID NO: 90103 - DNA, 20 bp, synthetic construct
  source 1..20: mol_type = other DNA
tttttttttttttgaaatgg

SEQ ID NO: 90104 - DNA, 20 bp, synthetic construct
  source 1..20: mol_type = other DNA
ttttttttttttttgaaatg

SEQ ID NO: 90105 - DNA, 20 bp, synthetic construct
  source 1..20: mol_type = other DNA
tttttttttttttttgaaat

SEQ ID NO: 90106 - DNA, 20 bp, synthetic construct
  source 1..20: mol_type = other DNA
ttttttttttttttttgaaa

SEQ ID NO: 90107 - DNA, 20 bp, synthetic construct
  source 1..20: mol_type = other DNA
tttttttttttttttttgaa

SEQ ID NO: 90108 - DNA, 20 bp, synthetic construct
  source 1..20: mol_type = other DNA
atttttttttttttttttga

SEQ ID NO: 90109 - DNA, 20 bp, synthetic construct
  source 1..20: mol_type = other DNA
gatttttttttttttttttg

SEQ ID NO: 90110 - DNA, 20 bp, synthetic construct
  source 1..20: mol_type = other DNA
agattttttttttttttttt

SEQ ID NO: 90111 - DNA, 20 bp, synthetic construct
  source 1..20: mol_type = other DNA
cagatttttttttttttttt

SEQ ID NO: 90112 - DNA, 20 bp, synthetic construct
  source 1..20: mol_type = other DNA
gcagattttttttttttttt

SEQ ID NO: 90113 - DNA, 20 bp, synthetic construct
  source 1..20: mol_type = other DNA
agcagatttttttttttttt

SEQ ID NO: 90114 - DNA, 20 bp, synthetic construct
  source 1..20: mol_type = other DNA
aagcagattttttttttttt

SEQ ID NO: 90115 - DNA, 20 bp, synthetic construct
  source 1..20: mol_type = other DNA
gaagcagatttttttttttt

SEQ ID NO: 90116 - DNA, 20 bp, synthetic construct
  source 1..20: mol_type = other DNA
tgaagcagattttttttttt

SEQ ID NO: 90117 - DNA, 20 bp, synthetic construct
  source 1..20: mol_type = other DNA
ctgaagcagatttttttttt

SEQ ID NO: 90118 - DNA, 20 bp, synthetic construct
  source 1..20: mol_type = other DNA
gctgaagcagattttttttt

SEQ ID NO: 90119 - DNA, 20 bp, synthetic construct
  source 1..20: mol_type = other DNA
agctgaagcagatttttttt

SEQ ID NO: 90120 - DNA, 20 bp, synthetic construct
  source 1..20: mol_type = other DNA
tagctgaagcagattttttt

SEQ ID NO: 90121 - DNA, 20 bp, synthetic construct
  source 1..20: mol_type = other DNA
atagctgaagcagatttttt

SEQ ID NO: 90122 - DNA, 20 bp, synthetic construct
  source 1..20: mol_type = other DNA
aatagctgaagcagattttt

SEQ ID NO: 90123 - DNA, 20 bp, synthetic construct
  source 1..20: mol_type = other DNA
gaatagctgaagcagatttt

SEQ ID NO: 90124 - DNA, 20 bp, synthetic construct
  source 1..20: mol_type = other DNA
agaatagctgaagcagattt

SEQ ID NO: 90125 - DNA, 20 bp, synthetic construct
  source 1..20: mol_type = other DNA
cagaatagctgaagcagatt

SEQ ID NO: 90126 - DNA, 20 bp, synthetic construct
  source 1..20: mol_type = other DNA
acagaatagctgaagcagat

SEQ ID NO: 90127 - DNA, 20 bp, synthetic construct
  source 1..20: mol_type = other DNA
aacagaatagctgaagcaga

SEQ ID NO: 90128 - DNA, 20 bp, synthetic construct
  source 1..20: mol_type = other DNA
taacagaatagctgaagcag

SEQ ID NO: 90129 - DNA, 20 bp, synthetic construct
  source 1..20: mol_type = other DNA
ttaacagaatagctgaagca

SEQ ID NO: 90130 - DNA, 20 bp, synthetic construct
  source 1..20: mol_type = other DNA
attaacagaatagctgaagc

SEQ ID NO: 90131 - DNA, 20 bp, synthetic construct
  source 1..20: mol_type = other DNA
gattaacagaatagctgaag

SEQ ID NO: 90132 - DNA, 20 bp, synthetic construct
  source 1..20: mol_type = other DNA
agattaacagaatagctgaa

SEQ ID NO: 90133 - DNA, 20 bp, synthetic construct
  source 1..20: mol_type = other DNA
aagattaacagaatagctga

SEQ ID NO: 90134 - DNA, 20 bp, synthetic construct
  source 1..20: mol_type = other DNA
aaagattaacagaatagctg

SEQ ID NO: 90135 - DNA, 20 bp, synthetic construct
  source 1..20: mol_type = other DNA
aaaagattaacagaatagct

SEQ ID NO: 90136 - DNA, 20 bp, synthetic construct
  source 1..20: mol_type = other DNA
caaaagattaacagaatagc

SEQ ID NO: 90137 - DNA, 20 bp, synthetic construct
  source 1..20: mol_type = other DNA
tcaaaagattaacagaatag

SEQ ID NO: 90138 - DNA, 20 bp, synthetic construct
  source 1..20: mol_type = other DNA
gtcaaaagattaacagaata

SEQ ID NO: 90139 - DNA, 20 bp, synthetic construct
  source 1..20: mol_type = other DNA
tgtcaaaagattaacagaat

SEQ ID NO: 90140 - DNA, 20 bp, synthetic construct
  source 1..20: mol_type = other DNA
atgtcaaaagattaacagaa

SEQ ID NO: 90141 - DNA, 20 bp, synthetic construct
  source 1..20: mol_type = other DNA
aatgtcaaaagattaacaga

SEQ ID NO: 90142 - DNA, 20 bp, synthetic construct
  source 1..20: mol_type = other DNA
taatgtcaaaagattaacag

SEQ ID NO: 90143 - DNA, 20 bp, synthetic construct
  source 1..20: mol_type = other DNA
gtaatgtcaaaagattaaca

SEQ ID NO: 90144 - DNA, 20 bp, synthetic construct
  source 1..20: mol_type = other DNA
agtaatgtcaaaagattaac

SEQ ID NO: 90145 - DNA, 20 bp, synthetic construct
  source 1..20: mol_type = other DNA
aagtaatgtcaaaagattaa

SEQ ID NO: 90146 - DNA, 20 bp, synthetic construct
  source 1..20: mol_type = other DNA
taagtaatgtcaaaagatta

SEQ ID NO: 90147 - DNA, 20 bp, synthetic construct
  source 1..20: mol_type = other DNA
ctaagtaatgtcaaaagatt

SEQ ID NO: 90148 - DNA, 20 bp, synthetic construct
  source 1..20: mol_type = other DNA
tctaagtaatgtcaaaagat

SEQ ID NO: 90149 - DNA, 20 bp, synthetic construct
  source 1..20: mol_type = other DNA
atctaagtaatgtcaaaaga

SEQ ID NO: 90150 - DNA, 20 bp, synthetic construct
  source 1..20: mol_type = other DNA
catctaagtaatgtcaaaag

SEQ ID NO: 90151 - DNA, 20 bp, synthetic construct
  source 1..20: mol_type = other DNA
ccatctaagtaatgtcaaaa

SEQ ID NO: 90152 - DNA, 20 bp, synthetic construct
  source 1..20: mol_type = other DNA
accatctaagtaatgtcaaa

SEQ ID NO: 90153 - DNA, 20 bp, synthetic construct
  source 1..20: mol_type = other DNA
gaccatctaagtaatgtcaa

SEQ ID NO: 90154 - DNA, 20 bp, synthetic construct
  source 1..20: mol_type = other DNA
agaccatctaagtaatgtca

SEQ ID NO: 90155 - DNA, 20 bp, synthetic construct
  source 1..20: mol_type = other DNA
cagaccatctaagtaatgtc

SEQ ID NO: 90156 - DNA, 20 bp, synthetic construct
  source 1..20: mol_type = other DNA
ccagaccatctaagtaatgt

SEQ ID NO: 90157 - DNA, 20 bp, synthetic construct
  source 1..20: mol_type = other DNA
tccagaccatctaagtaatg

SEQ ID NO: 90158 - DNA, 20 bp, synthetic construct
  source 1..20: mol_type = other DNA
ttccagaccatctaagtaat

SEQ ID NO: 90159 - DNA, 20 bp, synthetic construct
  source 1..20: mol_type = other DNA
tttccagaccatctaagtaa

SEQ ID NO: 90160 - DNA, 20 bp, synthetic construct
  source 1..20: mol_type = other DNA
atttccagaccatctaagta

SEQ ID NO: 90161 - DNA, 20 bp, synthetic construct
  source 1..20: mol_type = other DNA
tatttccagaccatctaagt

SEQ ID NO: 90162 - DNA, 20 bp, synthetic construct
  source 1..20: mol_type = other DNA
ttatttccagaccatctaag

SEQ ID NO: 90163 - DNA, 20 bp, synthetic construct
  source 1..20: mol_type = other DNA
tttatttccagaccatctaa

SEQ ID NO: 90164 - DNA, 20 bp, synthetic construct
  source 1..20: mol_type = other DNA
atttatttccagaccatcta

SEQ ID NO: 90165 - DNA, 20 bp, synthetic construct
  source 1..20: mol_type = other DNA
aatttatttccagaccatct

SEQ ID NO: 90166 - DNA, 20 bp, synthetic construct
  source 1..20: mol_type = other DNA
aaatttatttccagaccatc

SEQ ID NO: 90167 - DNA, 20 bp, synthetic construct
  source 1..20: mol_type = other DNA
aaaatttatttccagaccat

SEQ ID NO: 90168 - DNA, 20 bp, synthetic construct
  source 1..20: mol_type = other DNA
caaaatttatttccagacca

SEQ ID NO: 90169 - DNA, 20 bp, synthetic construct
  source 1..20: mol_type = other DNA
tcaaaatttatttccagacc

SEQ ID NO: 90170 - DNA, 20 bp, synthetic construct
  source 1..20: mol_type = other DNA
ctcaaaatttatttccagac

SEQ ID NO: 90171 - DNA, 20 bp, synthetic construct
  source 1..20: mol_type = other DNA
tctcaaaatttatttccaga

SEQ ID NO: 90172 - DNA, 20 bp, synthetic construct
  source 1..20: mol_type = other DNA
ttctcaaaatttatttccag

SEQ ID NO: 90173 - DNA, 20 bp, synthetic construct
  source 1..20: mol_type = other DNA
attctcaaaatttatttcca

SEQ ID NO: 90174 - DNA, 20 bp, synthetic construct
  source 1..20: mol_type = other DNA
tattctcaaaatttatttcc

SEQ ID NO: 90175 - DNA, 20 bp, synthetic construct
  source 1..20: mol_type = other DNA
ttattctcaaaatttatttc

SEQ ID NO: 90176 - DNA, 20 bp, synthetic construct
  source 1..20: mol_type = other DNA
gttattctcaaaatttattt

SEQ ID NO: 90177 - DNA, 20 bp, synthetic construct
  source 1..20: mol_type = other DNA
tgttattctcaaaatttatt

SEQ ID NO: 90178 - DNA, 20 bp, synthetic construct
  source 1..20: mol_type = other DNA
atgttattctcaaaatttat

SEQ ID NO: 90179 - DNA, 20 bp, synthetic construct
  source 1..20: mol_type = other DNA
catgttattctcaaaattta

SEQ ID NO: 90180 - DNA, 20 bp, synthetic construct
  source 1..20: mol_type = other DNA
tcatgttattctcaaaattt

SEQ ID NO: 90181 - DNA, 20 bp, synthetic construct
  source 1..20: mol_type = other DNA
atcatgttattctcaaaatt

SEQ ID NO: 90182 - DNA, 20 bp, synthetic construct
  source 1..20: mol_type = other DNA
aatcatgttattctcaaaat

SEQ ID NO: 90183 - DNA, 20 bp, synthetic construct
  source 1..20: mol_type = other DNA
taatcatgttattctcaaaa

SEQ ID NO: 90184 - DNA, 20 bp, synthetic construct
  source 1..20: mol_type = other DNA
ctaatcatgttattctcaaa

SEQ ID NO: 90185 - DNA, 20 bp, synthetic construct
  source 1..20: mol_type = other DNA
tctaatcatgttattctcaa

SEQ ID NO: 90186 - DNA, 20 bp, synthetic construct
  source 1..20: mol_type = other DNA
ttctaatcatgttattctca

SEQ ID NO: 90187 - DNA, 20 bp, synthetic construct
  source 1..20: mol_type = other DNA
cttctaatcatgttattctc

SEQ ID NO: 90188 - DNA, 20 bp, synthetic construct
  source 1..20: mol_type = other DNA
acttctaatcatgttattct

SEQ ID NO: 90189 - DNA, 20 bp, synthetic construct
  source 1..20: mol_type = other DNA
cacttctaatcatgttattc

SEQ ID NO: 90190 - DNA, 20 bp, synthetic construct
  source 1..20: mol_type = other DNA
tcacttctaatcatgttatt

SEQ ID NO: 90191 - DNA, 20 bp, synthetic construct
  source 1..20: mol_type = other DNA
ctcacttctaatcatgttat

SEQ ID NO: 90192 - DNA, 20 bp, synthetic construct
  source 1..20: mol_type = other DNA
tctcacttctaatcatgtta

SEQ ID NO: 90193 - DNA, 20 bp, synthetic construct
  source 1..20: mol_type = other DNA
ctctcacttctaatcatgtt

SEQ ID NO: 90194 - DNA, 20 bp, synthetic construct
  source 1..20: mol_type = other DNA
tctctcacttctaatcatgt

SEQ ID NO: 90195 - DNA, 20 bp, synthetic construct
  source 1..20: mol_type = other DNA
ctctctcacttctaatcatg

SEQ ID NO: 90196 - DNA, 20 bp, synthetic construct
  source 1..20: mol_type = other DNA
actctctcacttctaatcat

SEQ ID NO: 90197 - DNA, 20 bp, synthetic construct
  source 1..20: mol_type = other DNA
tactctctcacttctaatca

SEQ ID NO: 90198 - DNA, 20 bp, synthetic construct
  source 1..20: mol_type = other DNA
atactctctcacttctaatc

SEQ ID NO: 90199 - DNA, 20 bp, synthetic construct
  source 1..20: mol_type = other DNA
tatactctctcacttctaat

SEQ ID NO: 90200 - DNA, 20 bp, synthetic construct
  source 1..20: mol_type = other DNA
ttatactctctcacttctaa

SEQ ID NO: 90201 - DNA, 20 bp, synthetic construct
  source 1..20: mol_type = other DNA
cttatactctctcacttcta

SEQ ID NO: 90202 - DNA, 20 bp, synthetic construct
  source 1..20: mol_type = other DNA
gcttatactctctcacttct

SEQ ID NO: 90203 - DNA, 20 bp, synthetic construct
  source 1..20: mol_type = other DNA
tgcttatactctctcacttc

SEQ ID NO: 90204 - DNA, 20 bp, synthetic construct
  source 1..20: mol_type = other DNA
atgcttatactctctcactt

SEQ ID NO: 90205 - DNA, 20 bp, synthetic construct
  source 1..20: mol_type = other DNA
tatgcttatactctctcact

SEQ ID NO: 90206 - DNA, 20 bp, synthetic construct
  source 1..20: mol_type = other DNA
ctatgcttatactctctcac

SEQ ID NO: 90207 - DNA, 20 bp, synthetic construct
  source 1..20: mol_type = other DNA
actatgcttatactctctca

SEQ ID NO: 90208 - DNA, 20 bp, synthetic construct
  source 1..20: mol_type = other DNA
aactatgcttatactctctc

SEQ ID NO: 90209 - DNA, 20 bp, synthetic construct
  source 1..20: mol_type = other DNA
aaactatgcttatactctct

SEQ ID NO: 90210 - DNA, 20 bp, synthetic construct
  source 1..20: mol_type = other DNA
aaaactatgcttatactctc

SEQ ID NO: 90211 - DNA, 20 bp, synthetic construct
  source 1..20: mol_type = other DNA
caaaactatgcttatactct

SEQ ID NO: 90212 - DNA, 20 bp, synthetic construct
  source 1..20: mol_type = other DNA
ccaaaactatgcttatactc

SEQ ID NO: 90213 - DNA, 20 bp, synthetic construct
  source 1..20: mol_type = other DNA
tccaaaactatgcttatact

SEQ ID NO: 90214 - DNA, 20 bp, synthetic construct
  source 1..20: mol_type = other DNA
ctccaaaactatgcttatac

SEQ ID NO: 90215 - DNA, 20 bp, synthetic construct
  source 1..20: mol_type = other DNA
tctccaaaactatgcttata

SEQ ID NO: 90216 - DNA, 20 bp, synthetic construct
  source 1..20: mol_type = other DNA
atctccaaaactatgcttat

SEQ ID NO: 90217 - DNA, 20 bp, synthetic construct
  source 1..20: mol_type = other DNA
tatctccaaaactatgctta

SEQ ID NO: 90218 - DNA, 20 bp, synthetic construct
  source 1..20: mol_type = other DNA
gtatctccaaaactatgctt

SEQ ID NO: 90219 - DNA, 20 bp, synthetic construct
  source 1..20: mol_type = other DNA
tgtatctccaaaactatgct

SEQ ID NO: 90220 - DNA, 20 bp, synthetic construct
  source 1..20: mol_type = other DNA
gtgtatctccaaaactatgc

SEQ ID NO: 90221 - DNA, 20 bp, synthetic construct
  source 1..20: mol_type = other DNA
agtgtatctccaaaactatg

SEQ ID NO: 90222 - DNA, 20 bp, synthetic construct
  source 1..20: mol_type = other DNA
gagtgtatctccaaaactat

SEQ ID NO: 90223 - DNA, 20 bp, synthetic construct
  source 1..20: mol_type = other DNA
tgagtgtatctccaaaacta

SEQ ID NO: 90224 - DNA, 20 bp, synthetic construct
  source 1..20: mol_type = other DNA
ctgagtgtatctccaaaact

SEQ ID NO: 90225 - DNA, 20 bp, synthetic construct
  source 1..20: mol_type = other DNA
tctgagtgtatctccaaaac

SEQ ID NO: 90226 - DNA, 20 bp, synthetic construct
  source 1..20: mol_type = other DNA
ttctgagtgtatctccaaaa

SEQ ID NO: 90227 - DNA, 20 bp, synthetic construct
  source 1..20: mol_type = other DNA
attctgagtgtatctccaaa

SEQ ID NO: 90228 - DNA, 20 bp, synthetic construct
  source 1..20: mol_type = other DNA
tattctgagtgtatctccaa

SEQ ID NO: 90229 - DNA, 20 bp, synthetic construct
  source 1..20: mol_type = other DNA
ctattctgagtgtatctcca

SEQ ID NO: 90230 - DNA, 20 bp, synthetic construct
  source 1..20: mol_type = other DNA
gctattctgagtgtatctcc

SEQ ID NO: 90231 - DNA, 20 bp, synthetic construct
  source 1..20: mol_type = other DNA
tgctattctgagtgtatctc

SEQ ID NO: 90232 - DNA, 20 bp, synthetic construct
  source 1..20: mol_type = other DNA
atgctattctgagtgtatct

SEQ ID NO: 90233 - DNA, 20 bp, synthetic construct
  source 1..20: mol_type = other DNA
aatgctattctgagtgtatc

SEQ ID NO: 90234 - DNA, 20 bp, synthetic construct
  source 1..20: mol_type = other DNA
taatgctattctgagtgtat

SEQ ID NO: 90235 - DNA, 20 bp, synthetic construct
  source 1..20: mol_type = other DNA
ataatgctattctgagtgta

SEQ ID NO: 90236 - DNA, 20 bp, synthetic construct
  source 1..20: mol_type = other DNA
tataatgctattctgagtgt

SEQ ID NO: 90237 - DNA, 20 bp, synthetic construct
  source 1..20: mol_type = other DNA
ctataatgctattctgagtg

SEQ ID NO: 90238 - DNA, 20 bp, synthetic construct
  source 1..20: mol_type = other DNA
tctataatgctattctgagt

SEQ ID NO: 90239 - DNA, 20 bp, synthetic construct
  source 1..20: mol_type = other DNA
atctataatgctattctgag

SEQ ID NO: 90240 - DNA, 20 bp, synthetic construct
  source 1..20: mol_type = other DNA
aatctataatgctattctga

SEQ ID NO: 90241 - DNA, 20 bp, synthetic construct
  source 1..20: mol_type = other DNA
aaatctataatgctattctg

SEQ ID NO: 90242 - DNA, 20 bp, synthetic construct
  source 1..20: mol_type = other DNA
aaaatctataatgctattct

SEQ ID NO: 90243 - DNA, 20 bp, synthetic construct
  source 1..20: mol_type = other DNA
gaaaatctataatgctattc

SEQ ID NO: 90244 - DNA, 20 bp, synthetic construct
  source 1..20: mol_type = other DNA
agaaaatctataatgctatt

SEQ ID NO: 90245 - DNA, 20 bp, synthetic construct
  source 1..20: mol_type = other DNA
gagaaaatctataatgctat

SEQ ID NO: 90246 - DNA, 20 bp, synthetic construct
  source 1..20: mol_type = other DNA
agagaaaatctataatgcta

SEQ ID NO: 90247 - DNA, 20 bp, synthetic construct
  source 1..20: mol_type = other DNA
aagagaaaatctataatgct

SEQ ID NO: 90248 - DNA, 20 bp, synthetic construct
  source 1..20: mol_type = other DNA
aaagagaaaatctataatgc

SEQ ID NO: 90249 - DNA, 20 bp, synthetic construct
  source 1..20: mol_type = other DNA
aaaagagaaaatctataatg

SEQ ID NO: 90250 - DNA, 20 bp, synthetic construct
  source 1..20: mol_type = other DNA
aaaaagagaaaatctataat

SEQ ID NO: 90251 - DNA, 20 bp, synthetic construct
  source 1..20: mol_type = other DNA
taaaaagagaaaatctataa

SEQ ID NO: 90252 - DNA, 20 bp, synthetic construct
  source 1..20: mol_type = other DNA
gtaaaaagagaaaatctata

SEQ ID NO: 90253 - DNA, 20 bp, synthetic construct
  source 1..20: mol_type = other DNA
agtaaaaagagaaaatctat

SEQ ID NO: 90254 - DNA, 20 bp, synthetic construct
  source 1..20: mol_type = other DNA
tagtaaaaagagaaaatcta

SEQ ID NO: 90255 - DNA, 20 bp, synthetic construct
  source 1..20: mol_type = other DNA
ttagtaaaaagagaaaatct

SEQ ID NO: 90256 - DNA, 20 bp, synthetic construct
  source 1..20: mol_type = other DNA
attagtaaaaagagaaaatc

SEQ ID NO: 90257 - DNA, 20 bp, synthetic construct
  source 1..20: mol_type = other DNA
aattagtaaaaagagaaaat

SEQ ID NO: 90258 - DNA, 20 bp, synthetic construct
  source 1..20: mol_type = other DNA
caattagtaaaaagagaaaa

SEQ ID NO: 90259 - DNA, 20 bp, synthetic construct
  source 1..20: mol_type = other DNA
ccaattagtaaaaagagaaa

SEQ ID NO: 90260 - DNA, 20 bp, synthetic construct
  source 1..20: mol_type = other DNA
tccaattagtaaaaagagaa

SEQ ID NO: 90261 - DNA, 20 bp, synthetic construct
  source 1..20: mol_type = other DNA
ttccaattagtaaaaagaga

SEQ ID NO: 90262 - DNA, 20 bp, synthetic construct
  source 1..20: mol_type = other DNA
tttccaattagtaaaaagag

SEQ ID NO: 90263 - DNA, 20 bp, synthetic construct
  source 1..20: mol_type = other DNA
ttttccaattagtaaaaaga

SEQ ID NO: 90264 - DNA, 20 bp, synthetic construct
  source 1..20: mol_type = other DNA
tttttccaattagtaaaaag

SEQ ID NO: 90265 - DNA, 20 bp, synthetic construct
  source 1..20: mol_type = other DNA
atttttccaattagtaaaaa

SEQ ID NO: 90266 - DNA, 20 bp, synthetic construct
  source 1..20: mol_type = other DNA
catttttccaattagtaaaa

SEQ ID NO: 90267 - DNA, 20 bp, synthetic construct
  source 1..20: mol_type = other DNA
ccatttttccaattagtaaa

SEQ ID NO: 90268 - DNA, 20 bp, synthetic construct
  source 1..20: mol_type = other DNA
gccatttttccaattagtaa

SEQ ID NO: 90269 - DNA, 20 bp, synthetic construct
  source 1..20: mol_type = other DNA
tgccatttttccaattagta

SEQ ID NO: 90270 - DNA, 20 bp, synthetic construct
  source 1..20: mol_type = other DNA
ctgccatttttccaattagt

SEQ ID NO: 90271 - DNA, 20 bp, synthetic construct
  source 1..20: mol_type = other DNA
actgccatttttccaattag

SEQ ID NO: 90272 - DNA, 20 bp, synthetic construct
  source 1..20: mol_type = other DNA
aactgccatttttccaatta

SEQ ID NO: 90273 - DNA, 20 bp, synthetic construct
  source 1..20: mol_type = other DNA
caactgccatttttccaatt

SEQ ID NO: 90274 - DNA, 20 bp, synthetic construct
  source 1..20: mol_type = other DNA
acaactgccatttttccaat

SEQ ID NO: 90275 - DNA, 20 bp, synthetic construct
  source 1..20: mol_type = other DNA
aacaactgccatttttccaa

SEQ ID NO: 90276 - DNA, 20 bp, synthetic construct
  source 1..20: mol_type = other DNA
caacaactgccatttttcca

SEQ ID NO: 90277 - DNA, 20 bp, synthetic construct
  source 1..20: mol_type = other DNA
tcaacaactgccatttttcc

SEQ ID NO: 90278 - DNA, 20 bp, synthetic construct
  source 1..20: mol_type = other DNA
ttcaacaactgccatttttc

SEQ ID NO: 90279 - DNA, 20 bp, synthetic construct
  source 1..20: mol_type = other DNA
attcaacaactgccattttt

SEQ ID NO: 90280 - DNA, 20 bp, synthetic construct
  source 1..20: mol_type = other DNA
tattcaacaactgccatttt

SEQ ID NO: 90281 - DNA, 20 bp, synthetic construct
  source 1..20: mol_type = other DNA
ttattcaacaactgccattt

SEQ ID NO: 90282 - DNA, 20 bp, synthetic construct
  source 1..20: mol_type = other DNA
attattcaacaactgccatt

SEQ ID NO: 90283 - DNA, 20 bp, synthetic construct
  source 1..20: mol_type = other DNA
tattattcaacaactgccat

SEQ ID NO: 90284 - DNA, 20 bp, synthetic construct
  source 1..20: mol_type = other DNA
ctattattcaacaactgcca

SEQ ID NO: 90285 - DNA, 20 bp, synthetic construct
  source 1..20: mol_type = other DNA
actattattcaacaactgcc

SEQ ID NO: 90286 - DNA, 20 bp, synthetic construct
  source 1..20: mol_type = other DNA
aactattattcaacaactgc

SEQ ID NO: 90287 - DNA, 20 bp, synthetic construct
  source 1..20: mol_type = other DNA
aaactattattcaacaactg

SEQ ID NO: 90288 - DNA, 20 bp, synthetic construct
  source 1..20: mol_type = other DNA
aaaactattattcaacaact

SEQ ID NO: 90289 - DNA, 20 bp, synthetic construct
  source 1..20: mol_type = other DNA
gaaaactattattcaacaac

SEQ ID NO: 90290 - DNA, 20 bp, synthetic construct
  source 1..20: mol_type = other DNA
agaaaactattattcaacaa

SEQ ID NO: 90291 - DNA, 20 bp, synthetic construct
  source 1..20: mol_type = other DNA
aagaaaactattattcaaca

SEQ ID NO: 90292 - DNA, 20 bp, synthetic construct
  source 1..20: mol_type = other DNA
gaagaaaactattattcaac

SEQ ID NO: 90293 - DNA, 20 bp, synthetic construct
  source 1..20: mol_type = other DNA
ggaagaaaactattattcaa

SEQ ID NO: 90294 - DNA, 20 bp, synthetic construct
  source 1..20: mol_type = other DNA
cggaagaaaactattattca

SEQ ID NO: 90295 - DNA, 20 bp, synthetic construct
  source 1..20: mol_type = other DNA
acggaagaaaactattattc

SEQ ID NO: 90296 - DNA, 20 bp, synthetic construct
  source 1..20: mol_type = other DNA
cacggaagaaaactattatt

SEQ ID NO: 90297 - DNA, 20 bp, synthetic construct
  source 1..20: mol_type = other DNA
tcacggaagaaaactattat

SEQ ID NO: 90298 - DNA, 20 bp, synthetic construct
  source 1..20: mol_type = other DNA
gtcacggaagaaaactatta

SEQ ID NO: 90299 - DNA, 20 bp, synthetic construct
  source 1..20: mol_type = other DNA
ggtcacggaagaaaactatt

SEQ ID NO: 90300 - DNA, 20 bp, synthetic construct
  source 1..20: mol_type = other DNA
gggtcacggaagaaaactat

SEQ ID NO: 90301 - DNA, 20 bp, synthetic construct
  source 1..20: mol_type = other DNA
agggtcacggaagaaaacta

SEQ ID NO: 90302 - DNA, 20 bp, synthetic construct
  source 1..20: mol_type = other DNA
aagggtcacggaagaaaact

SEQ ID NO: 90303 - DNA, 20 bp, synthetic construct
  source 1..20: mol_type = other DNA
caagggtcacggaagaaaac

SEQ ID NO: 90304 - DNA, 20 bp, synthetic construct
  source 1..20: mol_type = other DNA
acaagggtcacggaagaaaa

SEQ ID NO: 90305 - DNA, 20 bp, synthetic construct
  source 1..20: mol_type = other DNA
cacaagggtcacggaagaaa

SEQ ID NO: 90306 - DNA, 20 bp, synthetic construct
  source 1..20: mol_type = other DNA
tcacaagggtcacggaagaa

SEQ ID NO: 90307 - DNA, 20 bp, synthetic construct
  source 1..20: mol_type = other DNA
gtcacaagggtcacggaaga

SEQ ID NO: 90308 - DNA, 20 bp, synthetic construct
  source 1..20: mol_type = other DNA
agtcacaagggtcacggaag

SEQ ID NO: 90309 - DNA, 20 bp, synthetic construct
  source 1..20: mol_type = other DNA
aagtcacaagggtcacggaa

SEQ ID NO: 90310 - DNA, 20 bp, synthetic construct
  source 1..20: mol_type = other DNA
taagtcacaagggtcacgga

SEQ ID NO: 90311 - DNA, 20 bp, synthetic construct
  source 1..20: mol_type = other DNA
ttaagtcacaagggtcacgg

SEQ ID NO: 90312 - DNA, 20 bp, synthetic construct
  source 1..20: mol_type = other DNA
tttaagtcacaagggtcacg

SEQ ID NO: 90313 - DNA, 20 bp, synthetic construct
  source 1..20: mol_type = other DNA
ttttaagtcacaagggtcac

SEQ ID NO: 90314 - DNA, 20 bp, synthetic construct
  source 1..20: mol_type = other DNA
tttttaagtcacaagggtca

SEQ ID NO: 90315 - DNA, 20 bp, synthetic construct
  source 1..20: mol_type = other DNA
ttttttaagtcacaagggtc

SEQ ID NO: 90316 - DNA, 20 bp, synthetic construct
  source 1..20: mol_type = other DNA
tttttttaagtcacaagggt

SEQ ID NO: 90317 - DNA, 20 bp, synthetic construct
  source 1..20: mol_type = other DNA
ttttttttaagtcacaaggg

SEQ ID NO: 90318 - DNA, 20 bp, synthetic construct
  source 1..20: mol_type = other DNA
tttttttttaagtcacaagg

SEQ ID NO: 90319 - DNA, 20 bp, synthetic construct
  source 1..20: mol_type = other DNA
ttttttttttaagtcacaag

SEQ ID NO: 90320 - DNA, 20 bp, synthetic construct
  source 1..20: mol_type = other DNA
tttttttttttaagtcacaa

SEQ ID NO: 90321 - DNA, 20 bp, synthetic construct
  source 1..20: mol_type = other DNA
ttttttttttttaagtcaca

SEQ ID NO: 90322 - DNA, 20 bp, synthetic construct
  source 1..20: mol_type = other DNA
tttttttttttttaagtcac

SEQ ID NO: 90323 - DNA, 20 bp, synthetic construct
  source 1..20: mol_type = other DNA
gtttttttttttttaagtca

SEQ ID NO: 90324 - DNA, 20 bp, synthetic construct
  source 1..20: mol_type = other DNA
tgtttttttttttttaagtc

SEQ ID NO: 90325 - DNA, 20 bp, synthetic construct
  source 1..20: mol_type = other DNA
gtgtttttttttttttaagt

SEQ ID NO: 90326 - DNA, 20 bp, synthetic construct
  source 1..20: mol_type = other DNA
agtgtttttttttttttaag

SEQ ID NO: 90327 - DNA, 20 bp, synthetic construct
  source 1..20: mol_type = other DNA
cagtgtttttttttttttaa

SEQ ID NO: 90328 - DNA, 20 bp, synthetic construct
  source 1..20: mol_type = other DNA
tcagtgttttttttttttta

SEQ ID NO: 90329 - DNA, 20 bp, synthetic construct
  source 1..20: mol_type = other DNA
ttcagtgttttttttttttt

SEQ ID NO: 90330 - DNA, 20 bp, synthetic construct
  source 1..20: mol_type = other DNA
tttcagtgtttttttttttt

SEQ ID NO: 90331 - DNA, 20 bp, synthetic construct
  source 1..20: mol_type = other DNA
atttcagtgttttttttttt

SEQ ID NO: 90332 - DNA, 20 bp, synthetic construct
  source 1..20: mol_type = other DNA
catttcagtgtttttttttt

SEQ ID NO: 90333 - DNA, 20 bp, synthetic construct
  source 1..20: mol_type = other DNA
tcatttcagtgttttttttt

SEQ ID NO: 90334 - DNA, 20 bp, synthetic construct
  source 1..20: mol_type = other DNA
ttcatttcagtgtttttttt

SEQ ID NO: 90335 - DNA, 20 bp, synthetic construct
  source 1..20: mol_type = other DNA
tttcatttcagtgttttttt

SEQ ID NO: 90336 - DNA, 20 bp, synthetic construct
  source 1..20: mol_type = other DNA
atttcatttcagtgtttttt

SEQ ID NO: 90337 - DNA, 20 bp, synthetic construct
  source 1..20: mol_type = other DNA
tatttcatttcagtgttttt

SEQ ID NO: 90338 - DNA, 20 bp, synthetic construct
  source 1..20: mol_type = other DNA
ttatttcatttcagtgtttt

SEQ ID NO: 90339 - DNA, 20 bp, synthetic construct
  source 1..20: mol_type = other DNA
attatttcatttcagtgttt

SEQ ID NO: 90340 - DNA, 20 bp, synthetic construct
  source 1..20: mol_type = other DNA
gattatttcatttcagtgtt

SEQ ID NO: 90341 - DNA, 20 bp, synthetic construct
  source 1..20: mol_type = other DNA
cgattatttcatttcagtgt

SEQ ID NO: 90342 - DNA, 20 bp, synthetic construct
  source 1..20: mol_type = other DNA
tcgattatttcatttcagtg

SEQ ID NO: 90343 - DNA, 20 bp, synthetic construct
  source 1..20: mol_type = other DNA
ttcgattatttcatttcagt

SEQ ID NO: 90344 - DNA, 20 bp, synthetic construct
  source 1..20: mol_type = other DNA
gttcgattatttcatttcag

SEQ ID NO: 90345 - DNA, 20 bp, synthetic construct
  source 1..20: mol_type = other DNA
ggttcgattatttcatttca

SEQ ID NO: 90346 - DNA, 20 bp, synthetic construct
  source 1..20: mol_type = other DNA
tggttcgattatttcatttc

SEQ ID NO: 90347 - DNA, 20 bp, synthetic construct
  source 1..20: mol_type = other DNA
atggttcgattatttcattt

SEQ ID NO: 90348 - DNA, 20 bp, synthetic construct
  source 1..20: mol_type = other DNA
aatggttcgattatttcatt

SEQ ID NO: 90349 - DNA, 20 bp, synthetic construct
  source 1..20: mol_type = other DNA
aaatggttcgattatttcat

SEQ ID NO: 90350 - DNA, 20 bp, synthetic construct
  source 1..20: mol_type = other DNA
aaaatggttcgattatttca

SEQ ID NO: 90351 - DNA, 20 bp, synthetic construct
  source 1..20: mol_type = other DNA
gaaaatggttcgattatttc

SEQ ID NO: 90352 - DNA, 20 bp, synthetic construct
  source 1..20: mol_type = other DNA
agaaaatggttcgattattt

SEQ ID NO: 90353 - DNA, 20 bp, synthetic construct
  source 1..20: mol_type = other DNA
gagaaaatggttcgattatt

SEQ ID NO: 90354 - DNA, 20 bp, synthetic construct
  source 1..20: mol_type = other DNA
agagaaaatggttcgattat

SEQ ID NO: 90355 - DNA, 20 bp, synthetic construct
  source 1..20: mol_type = other DNA
tagagaaaatggttcgatta

SEQ ID NO: 90356 - DNA, 20 bp, synthetic construct
  source 1..20: mol_type = other DNA
ttagagaaaatggttcgatt

SEQ ID NO: 90357 - DNA, 20 bp, synthetic construct
  source 1..20: mol_type = other DNA
tttagagaaaatggttcgat

SEQ ID NO: 90358 - DNA, 20 bp, synthetic construct
  source 1..20: mol_type = other DNA
gtttagagaaaatggttcga

SEQ ID NO: 90359 - DNA, 20 bp, synthetic construct
  source 1..20: mol_type = other DNA
ggtttagagaaaatggttcg

SEQ ID NO: 90360 - DNA, 20 bp, synthetic construct
  source 1..20: mol_type = other DNA
aggtttagagaaaatggttc

SEQ ID NO: 90361 - DNA, 20 bp, synthetic construct
  source 1..20: mol_type = other DNA
aaggtttagagaaaatggtt

SEQ ID NO: 90362 - DNA, 20 bp, synthetic construct
  source 1..20: mol_type = other DNA
aaaggtttagagaaaatggt

SEQ ID NO: 90363 - DNA, 20 bp, synthetic construct
  source 1..20: mol_type = other DNA
caaaggtttagagaaaatgg

SEQ ID NO: 90364 - DNA, 20 bp, synthetic construct
  source 1..20: mol_type = other DNA
tcaaaggtttagagaaaatg

SEQ ID NO: 90365 - DNA, 20 bp, synthetic construct
  source 1..20: mol_type = other DNA
ttcaaaggtttagagaaaat

SEQ ID NO: 90366 - DNA, 20 bp, synthetic construct
  source 1..20: mol_type = other DNA
attcaaaggtttagagaaaa

SEQ ID NO: 90367 - DNA, 20 bp, synthetic construct
  source 1..20: mol_type = other DNA
gattcaaaggtttagagaaa

SEQ ID NO: 90368 - DNA, 20 bp, synthetic construct
  source 1..20: mol_type = other DNA
agattcaaaggtttagagaa

SEQ ID NO: 90369 - DNA, 20 bp, synthetic construct
  source 1..20: mol_type = other DNA
cagattcaaaggtttagaga

SEQ ID NO: 90370 - DNA, 20 bp, synthetic construct
  source 1..20: mol_type = other DNA
tcagattcaaaggtttagag

SEQ ID NO: 90371 - DNA, 20 bp, synthetic construct
  source 1..20: mol_type = other DNA
ctcagattcaaaggtttaga

SEQ ID NO: 90372 - DNA, 20 bp, synthetic construct
  source 1..20: mol_type = other DNA
gctcagattcaaaggtttag

SEQ ID NO: 90373 - DNA, 20 bp, synthetic construct
  source 1..20: mol_type = other DNA
agctcagattcaaaggttta

SEQ ID NO: 90374 - DNA, 20 bp, synthetic construct
  source 1..20: mol_type = other DNA
gagctcagattcaaaggttt

SEQ ID NO: 90375 - DNA, 20 bp, synthetic construct
  source 1..20: mol_type = other DNA
agagctcagattcaaaggtt

SEQ ID NO: 90376 - DNA, 20 bp, synthetic construct
  source 1..20: mol_type = other DNA
cagagctcagattcaaaggt

SEQ ID NO: 90377 - DNA, 20 bp, synthetic construct
  source 1..20: mol_type = other DNA
gcagagctcagattcaaagg

SEQ ID NO: 90378 - DNA, 20 bp, synthetic construct
  source 1..20: mol_type = other DNA
tgcagagctcagattcaaag

SEQ ID NO: 90379 - DNA, 20 bp, synthetic construct
  source 1..20: mol_type = other DNA
ctgcagagctcagattcaaa

SEQ ID NO: 90380 - DNA, 20 bp, synthetic construct
  source 1..20: mol_type = other DNA
actgcagagctcagattcaa

SEQ ID NO: 90381 - DNA, 20 bp, synthetic construct
  source 1..20: mol_type = other DNA
aactgcagagctcagattca

SEQ ID NO: 90382 - DNA, 20 bp, synthetic construct
  source 1..20: mol_type = other DNA
taactgcagagctcagattc

SEQ ID NO: 90383 - DNA, 20 bp, synthetic construct
  source 1..20: mol_type = other DNA
ctaactgcagagctcagatt

SEQ ID NO: 90384 - DNA, 20 bp, synthetic construct
  source 1..20: mol_type = other DNA
cctaactgcagagctcagat

SEQ ID NO: 90385 - DNA, 20 bp, synthetic construct
  source 1..20: mol_type = other DNA
acctaactgcagagctcaga

SEQ ID NO: 90386 - DNA, 20 bp, synthetic construct
  source 1..20: mol_type = other DNA
aacctaactgcagagctcag

SEQ ID NO: 90387 - DNA, 20 bp, synthetic construct
  source 1..20: mol_type = other DNA
aaacctaactgcagagctca

SEQ ID NO: 90388 - DNA, 20 bp, synthetic construct
  source 1..20: mol_type = other DNA
taaacctaactgcagagctc

SEQ ID NO: 90389 - DNA, 20 bp, synthetic construct
  source 1..20: mol_type = other DNA
ataaacctaactgcagagct

SEQ ID NO: 90390 - DNA, 20 bp, synthetic construct
  source 1..20: mol_type = other DNA
tataaacctaactgcagagc

SEQ ID NO: 90391 - DNA, 20 bp, synthetic construct
  source 1..20: mol_type = other DNA
ttataaacctaactgcagag

SEQ ID NO: 90392 - DNA, 20 bp, synthetic construct
  source 1..20: mol_type = other DNA
attataaacctaactgcaga

SEQ ID NO: 90393 - DNA, 20 bp, synthetic construct
  source 1..20: mol_type = other DNA
cattataaacctaactgcag

SEQ ID NO: 90394 - DNA, 20 bp, synthetic construct
  source 1..20: mol_type = other DNA
ccattataaacctaactgca

SEQ ID NO: 90395 - DNA, 20 bp, synthetic construct
  source 1..20: mol_type = other DNA
accattataaacctaactgc

SEQ ID NO: 90396 - DNA, 20 bp, synthetic construct
  source 1..20: mol_type = other DNA
taccattataaacctaactg

SEQ ID NO: 90397 - DNA, 20 bp, synthetic construct
  source 1..20: mol_type = other DNA
ataccattataaacctaact

SEQ ID NO: 90398 - DNA, 20 bp, synthetic construct
  source 1..20: mol_type = other DNA
tataccattataaacctaac

SEQ ID NO: 90399 - DNA, 20 bp, synthetic construct
  source 1..20: mol_type = other DNA
atataccattataaacctaa

SEQ ID NO: 90400 - DNA, 20 bp, synthetic construct
  source 1..20: mol_type = other DNA
catataccattataaaccta

SEQ ID NO: 90401 - DNA, 20 bp, synthetic construct
  source 1..20: mol_type = other DNA
tcatataccattataaacct

SEQ ID NO: 90402 - DNA, 20 bp, synthetic construct
  source 1..20: mol_type = other DNA
ttcatataccattataaacc

SEQ ID NO: 90403 - DNA, 20 bp, synthetic construct
  source 1..20: mol_type = other DNA
tttcatataccattataaac

SEQ ID NO: 90404 - DNA, 20 bp, synthetic construct
  source 1..20: mol_type = other DNA
gtttcatataccattataaa

SEQ ID NO: 90405 - DNA, 20 bp, synthetic construct
  source 1..20: mol_type = other DNA
ggtttcatataccattataa

SEQ ID NO: 90406 - DNA, 20 bp, synthetic construct
  source 1..20: mol_type = other DNA
aggtttcatataccattata

SEQ ID NO: 90407 - DNA, 20 bp, synthetic construct
  source 1..20: mol_type = other DNA
taggtttcatataccattat

SEQ ID NO: 90408 - DNA, 20 bp, synthetic construct
  source 1..20: mol_type = other DNA
ataggtttcatataccatta

SEQ ID NO: 90409 - DNA, 20 bp, synthetic construct
  source 1..20: mol_type = other DNA
aataggtttcatataccatt

SEQ ID NO: 90410 - DNA, 20 bp, synthetic construct
  source 1..20: mol_type = other DNA
taataggtttcatataccat

SEQ ID NO: 90411 - DNA, 20 bp, synthetic construct
  source 1..20: mol_type = other DNA
ctaataggtttcatatacca

SEQ ID NO: 90412 - DNA, 20 bp, synthetic construct
  source 1..20: mol_type = other DNA
tctaataggtttcatatacc

SEQ ID NO: 90413 - DNA, 20 bp, synthetic construct
  source 1..20: mol_type = other DNA
atctaataggtttcatatac

SEQ ID NO: 90414 - DNA, 20 bp, synthetic construct
  source 1..20: mol_type = other DNA
tatctaataggtttcatata

SEQ ID NO: 90415 - DNA, 20 bp, synthetic construct
  source 1..20: mol_type = other DNA
atatctaataggtttcatat

SEQ ID NO: 90416 - DNA, 20 bp, synthetic construct
  source 1..20: mol_type = other DNA
tatatctaataggtttcata

SEQ ID NO: 90417 - DNA, 20 bp, synthetic construct
  source 1..20: mol_type = other DNA
atatatctaataggtttcat

SEQ ID NO: 90418 - DNA, 20 bp, synthetic construct
  source 1..20: mol_type = other DNA
tatatatctaataggtttca

SEQ ID NO: 90419 - DNA, 20 bp, synthetic construct
  source 1..20: mol_type = other DNA
gtatatatctaataggtttc

SEQ ID NO: 90420 - DNA, 20 bp, synthetic construct
  source 1..20: mol_type = other DNA
agtatatatctaataggttt

SEQ ID NO: 90421 - DNA, 20 bp, synthetic construct
  source 1..20: mol_type = other DNA
aagtatatatctaataggtt

SEQ ID NO: 90422 - DNA, 20 bp, synthetic construct
  source 1..20: mol_type = other DNA
caagtatatatctaataggt

SEQ ID NO: 90423 - DNA, 20 bp, synthetic construct
  source 1..20: mol_type = other DNA
ccaagtatatatctaatagg

SEQ ID NO: 90424 - DNA, 20 bp, synthetic construct
  source 1..20: mol_type = other DNA
tccaagtatatatctaatag

SEQ ID NO: 90425 - DNA, 20 bp, synthetic construct
  source 1..20: mol_type = other DNA
ttccaagtatatatctaata

SEQ ID NO: 90426 - DNA, 20 bp, synthetic construct
  source 1..20: mol_type = other DNA
cttccaagtatatatctaat

SEQ ID NO: 90427 - DNA, 20 bp, synthetic construct
  source 1..20: mol_type = other DNA
acttccaagtatatatctaa

SEQ ID NO: 90428 - DNA, 20 bp, synthetic construct
  source 1..20: mol_type = other DNA
gacttccaagtatatatcta

SEQ ID NO: 90429 - DNA, 20 bp, synthetic construct
  source 1..20: mol_type = other DNA
tgacttccaagtatatatct

SEQ ID NO: 90430 - DNA, 20 bp, synthetic construct
  source 1..20: mol_type = other DNA
atgacttccaagtatatatc

SEQ ID NO: 90431 - DNA, 20 bp, synthetic construct
  source 1..20: mol_type = other DNA
tatgacttccaagtatatat

SEQ ID NO: 90432 - DNA, 20 bp, synthetic construct
  source 1..20: mol_type = other DNA
atatgacttccaagtatata

SEQ ID NO: 90433 - DNA, 20 bp, synthetic construct
  source 1..20: mol_type = other DNA
catatgacttccaagtatat

SEQ ID NO: 90434 - DNA, 20 bp, synthetic construct
  source 1..20: mol_type = other DNA
ccatatgacttccaagtata

SEQ ID NO: 90435 - DNA, 20 bp, synthetic construct
  source 1..20: mol_type = other DNA
cccatatgacttccaagtat

SEQ ID NO: 90436 - DNA, 20 bp, synthetic construct
  source 1..20: mol_type = other DNA
tcccatatgacttccaagta

SEQ ID NO: 90437 - DNA, 20 bp, synthetic construct
  source 1..20: mol_type = other DNA
atcccatatgacttccaagt

SEQ ID NO: 90438 - DNA, 20 bp, synthetic construct
  source 1..20: mol_type = other DNA
tatcccatatgacttccaag

SEQ ID NO: 90439 - DNA, 20 bp, synthetic construct
  source 1..20: mol_type = other DNA
gtatcccatatgacttccaa

SEQ ID NO: 90440 - DNA, 20 bp, synthetic construct
  source 1..20: mol_type = other DNA
tgtatcccatatgacttcca

SEQ ID NO: 90441 - DNA, 20 bp, synthetic construct
  source 1..20: mol_type = other DNA
ttgtatcccatatgacttcc

SEQ ID NO: 90442 - DNA, 20 bp, synthetic construct
  source 1..20: mol_type = other DNA
tttgtatcccatatgacttc

SEQ ID NO: 90443 - DNA, 20 bp, synthetic construct
  source 1..20: mol_type = other DNA
gtttgtatcccatatgactt

SEQ ID NO: 90444 - DNA, 20 bp, synthetic construct
  source 1..20: mol_type = other DNA
ggtttgtatcccatatgact

SEQ ID NO: 90445 - DNA, 20 bp, synthetic construct
  source 1..20: mol_type = other DNA
gggtttgtatcccatatgac

SEQ ID NO: 90446 - DNA, 20 bp, synthetic construct
  source 1..20: mol_type = other DNA
agggtttgtatcccatatga

SEQ ID NO: 90447 - DNA, 20 bp, synthetic construct
  source 1..20: mol_type = other DNA
cagggtttgtatcccatatg

SEQ ID NO: 90448 - DNA, 20 bp, synthetic construct
  source 1..20: mol_type = other DNA
gcagggtttgtatcccatat

SEQ ID NO: 90449 - DNA, 20 bp, synthetic construct
  source 1..20: mol_type = other DNA
agcagggtttgtatcccata

SEQ ID NO: 90450 - DNA, 20 bp, synthetic construct
  source 1..20: mol_type = other DNA
aagcagggtttgtatcccat

SEQ ID NO: 90451 - DNA, 20 bp, synthetic construct
  source 1..20: mol_type = other DNA
aaagcagggtttgtatccca

SEQ ID NO: 90452 - DNA, 20 bp, synthetic construct
  source 1..20: mol_type = other DNA
aaaagcagggtttgtatccc

SEQ ID NO: 90453 - DNA, 20 bp, synthetic construct
  source 1..20: mol_type = other DNA
taaaagcagggtttgtatcc

SEQ ID NO: 90454 - DNA, 20 bp, synthetic construct
  source 1..20: mol_type = other DNA
ataaaagcagggtttgtatc

SEQ ID NO: 90455 - DNA, 20 bp, synthetic construct
  source 1..20: mol_type = other DNA
aataaaagcagggtttgtat

SEQ ID NO: 90456 - DNA, 20 bp, synthetic construct
  source 1..20: mol_type = other DNA
taataaaagcagggtttgta

SEQ ID NO: 90457 - DNA, 20 bp, synthetic construct
  source 1..20: mol_type = other DNA
ataataaaagcagggtttgt

SEQ ID NO: 90458 - DNA, 20 bp, synthetic construct
  source 1..20: mol_type = other DNA
gataataaaagcagggtttg

SEQ ID NO: 90459 - DNA, 20 bp, synthetic construct
  source 1..20: mol_type = other DNA
agataataaaagcagggttt

SEQ ID NO: 90460 - DNA, 20 bp, synthetic construct
  source 1..20: mol_type = other DNA
aagataataaaagcagggtt

SEQ ID NO: 90461 - DNA, 20 bp, synthetic construct
  source 1..20: mol_type = other DNA
gaagataataaaagcagggt

SEQ ID NO: 90462 - DNA, 20 bp, synthetic construct
  source 1..20: mol_type = other DNA
ggaagataataaaagcaggg

SEQ ID NO: 90463 - DNA, 20 bp, synthetic construct
  source 1..20: mol_type = other DNA
gggaagataataaaagcagg

SEQ ID NO: 90464 - DNA, 20 bp, synthetic construct
  source 1..20: mol_type = other DNA
ggggaagataataaaagcag

SEQ ID NO: 90465 - DNA, 20 bp, synthetic construct
  source 1..20: mol_type = other DNA
aggggaagataataaaagca

SEQ ID NO: 90466 - DNA, 20 bp, synthetic construct
  source 1..20: mol_type = other DNA
aaggggaagataataaaagc

SEQ ID NO: 90467 - DNA, 20 bp, synthetic construct
  source 1..20: mol_type = other DNA
aaaggggaagataataaaag

SEQ ID NO: 90468 - DNA, 20 bp, synthetic construct
  source 1..20: mol_type = other DNA
aaaaggggaagataataaaa

SEQ ID NO: 90469 - DNA, 20 bp, synthetic construct
  source 1..20: mol_type = other DNA
caaaaggggaagataataaa

SEQ ID NO: 90470 - DNA, 20 bp, synthetic construct
  source 1..20: mol_type = other DNA
tcaaaaggggaagataataa

SEQ ID NO: 90471 - DNA, 20 bp, synthetic construct
  source 1..20: mol_type = other DNA
gtcaaaaggggaagataata

SEQ ID NO: 90472 - DNA, 20 bp, synthetic construct
  source 1..20: mol_type = other DNA
agtcaaaaggggaagataat

SEQ ID NO: 90473 - DNA, 20 bp, synthetic construct
  source 1..20: mol_type = other DNA
tagtcaaaaggggaagataa

SEQ ID NO: 90474 - DNA, 20 bp, synthetic construct
  source 1..20: mol_type = other DNA
ttagtcaaaaggggaagata

SEQ ID NO: 90475 - DNA, 20 bp, synthetic construct
  source 1..20: mol_type = other DNA
gttagtcaaaaggggaagat

SEQ ID NO: 90476 - DNA, 20 bp, synthetic construct
  source 1..20: mol_type = other DNA
agttagtcaaaaggggaaga

SEQ ID NO: 90477 - DNA, 20 bp, synthetic construct
  source 1..20: mol_type = other DNA
aagttagtcaaaaggggaag

SEQ ID NO: 90478 - DNA, 20 bp, synthetic construct
  source 1..20: mol_type = other DNA
caagttagtcaaaaggggaa

SEQ ID NO: 90479 - DNA, 20 bp, synthetic construct
  source 1..20: mol_type = other DNA
ccaagttagtcaaaagggga

SEQ ID NO: 90480 - DNA, 20 bp, synthetic construct
  source 1..20: mol_type = other DNA
cccaagttagtcaaaagggg

SEQ ID NO: 90481 - DNA, 20 bp, synthetic construct
  source 1..20: mol_type = other DNA
acccaagttagtcaaaaggg

SEQ ID NO: 90482 - DNA, 20 bp, synthetic construct
  source 1..20: mol_type = other DNA
gacccaagttagtcaaaagg

SEQ ID NO: 90483 - DNA, 20 bp, synthetic construct
  source 1..20: mol_type = other DNA
agacccaagttagtcaaaag

SEQ ID NO: 90484 - DNA, 20 bp, synthetic construct
  source 1..20: mol_type = other DNA
gagacccaagttagtcaaaa

SEQ ID NO: 90485 - DNA, 20 bp, synthetic construct
  source 1..20: mol_type = other DNA
tgagacccaagttagtcaaa

SEQ ID NO: 90486 - DNA, 20 bp, synthetic construct
  source 1..20: mol_type = other DNA
ttgagacccaagttagtcaa

SEQ ID NO: 90487 - DNA, 20 bp, synthetic construct
  source 1..20: mol_type = other DNA
cttgagacccaagttagtca

SEQ ID NO: 90488 - DNA, 20 bp, synthetic construct
  source 1..20: mol_type = other DNA
acttgagacccaagttagtc

SEQ ID NO: 90489 - DNA, 20 bp, synthetic construct
  source 1..20: mol_type = other DNA
aacttgagacccaagttagt

SEQ ID NO: 90490 - DNA, 20 bp, synthetic construct
  source 1..20: mol_type = other DNA
aaacttgagacccaagttag

SEQ ID NO: 90491 - DNA, 20 bp, synthetic construct
  source 1..20: mol_type = other DNA
gaaacttgagacccaagtta

SEQ ID NO: 90492 - DNA, 20 bp, synthetic construct
  source 1..20: mol_type = other DNA
ggaaacttgagacccaagtt

SEQ ID NO: 90493 - DNA, 20 bp, synthetic construct
  source 1..20: mol_type = other DNA
aggaaacttgagacccaagt

SEQ ID NO: 90494 - DNA, 20 bp, synthetic construct
  source 1..20: mol_type = other DNA
aaggaaacttgagacccaag

SEQ ID NO: 90495 - DNA, 20 bp, synthetic construct
  source 1..20: mol_type = other DNA
taaggaaacttgagacccaa

SEQ ID NO: 90496 - DNA, 20 bp, synthetic construct
  source 1..20: mol_type = other DNA
ttaaggaaacttgagaccca

SEQ ID NO: 90497 - DNA, 20 bp, synthetic construct
  source 1..20: mol_type = other DNA
attaaggaaacttgagaccc

SEQ ID NO: 90498 - DNA, 20 bp, synthetic construct
  source 1..20: mol_type = other DNA
aattaaggaaacttgagacc

SEQ ID NO: 90499 - DNA, 20 bp, synthetic construct
  source 1..20: mol_type = other DNA
taattaaggaaacttgagac

SEQ ID NO: 90500 - DNA, 20 bp, synthetic construct
  source 1..20: mol_type = other DNA
gtaattaaggaaacttgaga

SEQ ID NO: 90501 - DNA, 20 bp, synthetic construct
  source 1..20: mol_type = other DNA
agtaattaaggaaacttgag

SEQ ID NO: 90502 - DNA, 20 bp, synthetic construct
  source 1..20: mol_type = other DNA
cagtaattaaggaaacttga

SEQ ID NO: 90503 - DNA, 20 bp, synthetic construct
  source 1..20: mol_type = other DNA
gcagtaattaaggaaacttg

SEQ ID NO: 90504 - DNA, 20 bp, synthetic construct
  source 1..20: mol_type = other DNA
tgcagtaattaaggaaactt

SEQ ID NO: 90505 - DNA, 20 bp, synthetic construct
  source 1..20: mol_type = other DNA
gtgcagtaattaaggaaact

SEQ ID NO: 90506 - DNA, 20 bp, synthetic construct
  source 1..20: mol_type = other DNA
tgtgcagtaattaaggaaac

SEQ ID NO: 90507 - DNA, 20 bp, synthetic construct
  source 1..20: mol_type = other DNA
ctgtgcagtaattaaggaaa

SEQ ID NO: 90508 - DNA, 20 bp, synthetic construct
  source 1..20: mol_type = other DNA
actgtgcagtaattaaggaa

SEQ ID NO: 90509 - DNA, 20 bp, synthetic construct
  source 1..20: mol_type = other DNA
cactgtgcagtaattaagga

SEQ ID NO: 90510 - DNA, 20 bp, synthetic construct
  source 1..20: mol_type = other DNA
ccactgtgcagtaattaagg

SEQ ID NO: 90511 - DNA, 20 bp, synthetic construct
  source 1..20: mol_type = other DNA
tccactgtgcagtaattaag

SEQ ID NO: 90512 - DNA, 20 bp, synthetic construct
  source 1..20: mol_type = other DNA
gtccactgtgcagtaattaa

SEQ ID NO: 90513 - DNA, 20 bp, synthetic construct
  source 1..20: mol_type = other DNA
ggtccactgtgcagtaatta

SEQ ID NO: 90514 - DNA, 20 bp, synthetic construct
  source 1..20: mol_type = other DNA
aggtccactgtgcagtaatt

SEQ ID NO: 90515 - DNA, 20 bp, synthetic construct
  source 1..20: mol_type = other DNA
aaggtccactgtgcagtaat

SEQ ID NO: 90516 - DNA, 20 bp, synthetic construct
  source 1..20: mol_type = other DNA
caaggtccactgtgcagtaa

SEQ ID NO: 90517 - DNA, 20 bp, synthetic construct
  source 1..20: mol_type = other DNA
tcaaggtccactgtgcagta

SEQ ID NO: 90518 - DNA, 20 bp, synthetic construct
  source 1..20: mol_type = other DNA
atcaaggtccactgtgcagt

SEQ ID NO: 90519 - DNA, 20 bp, synthetic construct
  source 1..20: mol_type = other DNA
catcaaggtccactgtgcag

SEQ ID NO: 90520 - DNA, 20 bp, synthetic construct
  source 1..20: mol_type = other DNA
acatcaaggtccactgtgca

SEQ ID NO: 90521 - DNA, 20 bp, synthetic construct
  source 1..20: mol_type = other DNA
aacatcaaggtccactgtgc

SEQ ID NO: 90522 - DNA, 20 bp, synthetic construct
  source 1..20: mol_type = other DNA
caacatcaaggtccactgtg

SEQ ID NO: 90523 - DNA, 20 bp, synthetic construct
  source 1..20: mol_type = other DNA
gcaacatcaaggtccactgt

SEQ ID NO: 90524 - DNA, 20 bp, synthetic construct
  source 1..20: mol_type = other DNA
agcaacatcaaggtccactg

SEQ ID NO: 90525 - DNA, 20 bp, synthetic construct
  source 1..20: mol_type = other DNA
tagcaacatcaaggtccact

SEQ ID NO: 90526 - DNA, 20 bp, synthetic construct
  source 1..20: mol_type = other DNA
atagcaacatcaaggtccac

SEQ ID NO: 90527 - DNA, 20 bp, synthetic construct
  source 1..20: mol_type = other DNA
tatagcaacatcaaggtcca

SEQ ID NO: 90528 - DNA, 20 bp, synthetic construct
  source 1..20: mol_type = other DNA
ttatagcaacatcaaggtcc

SEQ ID NO: 90529 - DNA, 20 bp, synthetic construct
  source 1..20: mol_type = other DNA
tttatagcaacatcaaggtc

SEQ ID NO: 90530 - DNA, 20 bp, synthetic construct
  source 1..20: mol_type = other DNA
ctttatagcaacatcaaggt

SEQ ID NO: 90531 - DNA, 20 bp, synthetic construct
  source 1..20: mol_type = other DNA
tctttatagcaacatcaagg

SEQ ID NO: 90532 - DNA, 20 bp, synthetic construct
  source 1..20: mol_type = other DNA
ttctttatagcaacatcaag

SEQ ID NO: 90533 - DNA, 20 bp, synthetic construct
  source 1..20: mol_type = other DNA
attctttatagcaacatcaa

SEQ ID NO: 90534 - DNA, 20 bp, synthetic construct
  source 1..20: mol_type = other DNA
cattctttatagcaacatca

SEQ ID NO: 90535 - DNA, 20 bp, synthetic construct
  source 1..20: mol_type = other DNA
acattctttatagcaacatc

SEQ ID NO: 90536 - DNA, 20 bp, synthetic construct
  source 1..20: mol_type = other DNA
cacattctttatagcaacat

SEQ ID NO: 90537 - DNA, 20 bp, synthetic construct
  source 1..20: mol_type = other DNA
acacattctttatagcaaca

SEQ ID NO: 90538 - DNA, 20 bp, synthetic construct
  source 1..20: mol_type = other DNA
tacacattctttatagcaac

SEQ ID NO: 90539 - DNA, 20 bp, synthetic construct
  source 1..20: mol_type = other DNA
ctacacattctttatagcaa

SEQ ID NO: 90540 - DNA, 20 bp, synthetic construct
  source 1..20: mol_type = other DNA
cctacacattctttatagca

SEQ ID NO: 90541 - DNA, 20 bp, synthetic construct
  source 1..20: mol_type = other DNA
ccctacacattctttatagc

SEQ ID NO: 90542 - DNA, 20 bp, synthetic construct
  source 1..20: mol_type = other DNA
gccctacacattctttatag

SEQ ID NO: 90543 - DNA, 20 bp, synthetic construct
  source 1..20: mol_type = other DNA
agccctacacattctttata

SEQ ID NO: 90544 - DNA, 20 bp, synthetic construct
  source 1..20: mol_type = other DNA
cagccctacacattctttat

SEQ ID NO: 90545 - DNA, 20 bp, synthetic construct
  source 1..20: mol_type = other DNA
ccagccctacacattcttta

SEQ ID NO: 90546 - DNA, 20 bp, synthetic construct
  source 1..20: mol_type = other DNA
cccagccctacacattcttt

SEQ ID NO: 90547 - DNA, 20 bp, synthetic construct
  source 1..20: mol_type = other DNA
gcccagccctacacattctt

SEQ ID NO: 90548 - DNA, 20 bp, synthetic construct
  source 1..20: mol_type = other DNA
tgcccagccctacacattct

SEQ ID NO: 90549 - DNA, 20 bp, synthetic construct
  source 1..20: mol_type = other DNA
atgcccagccctacacattc

SEQ ID NO: 90550 - DNA, 20 bp, synthetic construct
  source 1..20: mol_type = other DNA
catgcccagccctacacatt

SEQ ID NO: 90551 - DNA, 20 bp, synthetic construct
  source 1..20: mol_type = other DNA
ccatgcccagccctacacat

SEQ ID NO: 90552 - DNA, 20 bp, synthetic construct
  source 1..20: mol_type = other DNA
accatgcccagccctacaca

SEQ ID NO: 90553 - DNA, 20 bp, synthetic construct
  source 1..20: mol_type = other DNA
caccatgcccagccctacac

SEQ ID NO: 90554 - DNA, 20 bp, synthetic construct
  source 1..20: mol_type = other DNA
ccaccatgcccagccctaca

SEQ ID NO: 90555 - DNA, 20 bp, synthetic construct
  source 1..20: mol_type = other DNA
gccaccatgcccagccctac

SEQ ID NO: 90556 - DNA, 20 bp, synthetic construct
  source 1..20: mol_type = other DNA
agccaccatgcccagcccta

SEQ ID NO: 90557 - DNA, 20 bp, synthetic construct
  source 1..20: mol_type = other DNA
gagccaccatgcccagccct

SEQ ID NO: 90558 - DNA, 20 bp, synthetic construct
  source 1..20: mol_type = other DNA
tgagccaccatgcccagccc

SEQ ID NO: 90559 - DNA, 20 bp, synthetic construct
  source 1..20: mol_type = other DNA
atgagccaccatgcccagcc

SEQ ID NO: 90560 - DNA, 20 bp, synthetic construct
  source 1..20: mol_type = other DNA
catgagccaccatgcccagc

SEQ ID NO: 90561 - DNA, 20 bp, synthetic construct
  source 1..20: mol_type = other DNA
gcatgagccaccatgcccag

SEQ ID NO: 90562 - DNA, 20 bp, synthetic construct
  source 1..20: mol_type = other DNA
ggcatgagccaccatgccca

SEQ ID NO: 90563 - DNA, 20 bp, synthetic construct
  source 1..20: mol_type = other DNA
aggcatgagccaccatgccc

SEQ ID NO: 90564 - DNA, 20 bp, synthetic construct
  source 1..20: mol_type = other DNA
caggcatgagccaccatgcc

SEQ ID NO: 90565 - DNA, 20 bp, synthetic construct
  source 1..20: mol_type = other DNA
acaggcatgagccaccatgc

SEQ ID NO: 90566 - DNA, 20 bp, synthetic construct
  source 1..20: mol_type = other DNA
tacaggcatgagccaccatg

SEQ ID NO: 90567 - DNA, 20 bp, synthetic construct
  source 1..20: mol_type = other DNA
ttacaggcatgagccaccat

SEQ ID NO: 90568 - DNA, 20 bp, synthetic construct
  source 1..20: mol_type = other DNA
attacaggcatgagccacca

SEQ ID NO: 90569 - DNA, 20 bp, synthetic construct
  source 1..20: mol_type = other DNA
gattacaggcatgagccacc

SEQ ID NO: 90570 - DNA, 20 bp, synthetic construct
  source 1..20: mol_type = other DNA
ggattacaggcatgagccac

SEQ ID NO: 90571 - DNA, 20 bp, synthetic construct
  source 1..20: mol_type = other DNA
gggattacaggcatgagcca

SEQ ID NO: 90572 - DNA, 20 bp, synthetic construct
  source 1..20: mol_type = other DNA
tgggattacaggcatgagcc

SEQ ID NO: 90573 - DNA, 20 bp, synthetic construct
  source 1..20: mol_type = other DNA
ctgggattacaggcatgagc

SEQ ID NO: 90574 - DNA, 20 bp, synthetic construct
  source 1..20: mol_type = other DNA
gctgggattacaggcatgag

SEQ ID NO: 90575 - DNA, 20 bp, synthetic construct
  source 1..20: mol_type = other DNA
tgctgggattacaggcatga

SEQ ID NO: 90576 - DNA, 20 bp, synthetic construct
  source 1..20: mol_type = other DNA
gtgctgggattacaggcatg

SEQ ID NO: 90577 - DNA, 20 bp, synthetic construct
  source 1..20: mol_type = other DNA
agtgctgggattacaggcat

SEQ ID NO: 90578 - DNA, 20 bp, synthetic construct
  source 1..20: mol_type = other DNA
aagtgctgggattacaggca

SEQ ID NO: 90579 - DNA, 20 bp, synthetic construct
  source 1..20: mol_type = other DNA
aaagtgctgggattacaggc

SEQ ID NO: 90580 - DNA, 20 bp, synthetic construct
  source 1..20: mol_type = other DNA
caaagtgctgggattacagg

SEQ ID NO: 90581 - DNA, 20 bp, synthetic construct
  source 1..20: mol_type = other DNA
ccaaagtgctgggattacag

SEQ ID NO: 90582 - DNA, 20 bp, synthetic construct
  source 1..20: mol_type = other DNA
cccaaagtgctgggattaca

SEQ ID NO: 90583 - DNA, 20 bp, synthetic construct
  source 1..20: mol_type = other DNA
tcccaaagtgctgggattac

SEQ ID NO: 90584 - DNA, 20 bp, synthetic construct
  source 1..20: mol_type = other DNA
ctcccaaagtgctgggatta

SEQ ID NO: 90585 - DNA, 20 bp, synthetic construct
  source 1..20: mol_type = other DNA
cctcccaaagtgctgggatt

SEQ ID NO: 90586 - DNA, 20 bp, synthetic construct
  source 1..20: mol_type = other DNA
gcctcccaaagtgctgggat

SEQ ID NO: 90587 - DNA, 20 bp, synthetic construct
  source 1..20: mol_type = other DNA
ggcctcccaaagtgctggga

SEQ ID NO: 90588 - DNA, 20 bp, synthetic construct
  source 1..20: mol_type = other DNA
tggcctcccaaagtgctggg

SEQ ID NO: 90589 - DNA, 20 bp, synthetic construct
  source 1..20: mol_type = other DNA
ttggcctcccaaagtgctgg

SEQ ID NO: 90590 - DNA, 20 bp, synthetic construct
  source 1..20: mol_type = other DNA
cttggcctcccaaagtgctg

SEQ ID NO: 90591 - DNA, 20 bp, synthetic construct
  source 1..20: mol_type = other DNA
ccttggcctcccaaagtgct

SEQ ID NO: 90592 - DNA, 20 bp, synthetic construct
  source 1..20: mol_type = other DNA
accttggcctcccaaagtgc

SEQ ID NO: 90593 - DNA, 20 bp, synthetic construct
  source 1..20: mol_type = other DNA
taccttggcctcccaaagtg

SEQ ID NO: 90594 - DNA, 20 bp, synthetic construct
  source 1..20: mol_type = other DNA
ctaccttggcctcccaaagt

SEQ ID NO: 90595 - DNA, 20 bp, synthetic construct
  source 1..20: mol_type = other DNA
cctaccttggcctcccaaag

SEQ ID NO: 90596 - DNA, 20 bp, synthetic construct
  source 1..20: mol_type = other DNA
gcctaccttggcctcccaaa

SEQ ID NO: 90597 - DNA, 20 bp, synthetic construct
  source 1..20: mol_type = other DNA
tgcctaccttggcctcccaa

SEQ ID NO: 90598 - DNA, 20 bp, synthetic construct
  source 1..20: mol_type = other DNA
ctgcctaccttggcctccca

SEQ ID NO: 90599 - DNA, 20 bp, synthetic construct
  source 1..20: mol_type = other DNA
tctgcctaccttggcctccc

SEQ ID NO: 90600 - DNA, 20 bp, synthetic construct
  source 1..20: mol_type = other DNA
atctgcctaccttggcctcc

SEQ ID NO: 90601 - DNA, 20 bp, synthetic construct
  source 1..20: mol_type = other DNA
gatctgcctaccttggcctc

SEQ ID NO: 90602 - DNA, 20 bp, synthetic construct
  source 1..20: mol_type = other DNA
tgatctgcctaccttggcct

SEQ ID NO: 90603 - DNA, 20 bp, synthetic construct
  source 1..20: mol_type = other DNA
gtgatctgcctaccttggcc

SEQ ID NO: 90604 - DNA, 20 bp, synthetic construct
  source 1..20: mol_type = other DNA
ggtgatctgcctaccttggc

SEQ ID NO: 90605 - DNA, 20 bp, synthetic construct
  source 1..20: mol_type = other DNA
aggtgatctgcctaccttgg

SEQ ID NO: 90606 - DNA, 20 bp, synthetic construct
  source 1..20: mol_type = other DNA
caggtgatctgcctaccttg

SEQ ID NO: 90607 - DNA, 20 bp, synthetic construct
  source 1..20: mol_type = other DNA
tcaggtgatctgcctacctt

SEQ ID NO: 90608 - DNA, 20 bp, synthetic construct
  source 1..20: mol_type = other DNA
ctcaggtgatctgcctacct

SEQ ID NO: 90609 - DNA, 20 bp, synthetic construct
  source 1..20: mol_type = other DNA
cctcaggtgatctgcctacc

SEQ ID NO: 90610 - DNA, 20 bp, synthetic construct
  source 1..20: mol_type = other DNA
acctcaggtgatctgcctac

SEQ ID NO: 90611 - DNA, 20 bp, synthetic construct
  source 1..20: mol_type = other DNA
gacctcaggtgatctgccta

SEQ ID NO: 90612 - DNA, 20 bp, synthetic construct
  source 1..20: mol_type = other DNA
tgacctcaggtgatctgcct

SEQ ID NO: 90613 - DNA, 20 bp, synthetic construct
  source 1..20: mol_type = other DNA
ctgacctcaggtgatctgcc

SEQ ID NO: 90614 - DNA, 20 bp, synthetic construct
  source 1..20: mol_type = other DNA
cctgacctcaggtgatctgc

SEQ ID NO: 90615 - DNA, 20 bp, synthetic construct
  source 1..20: mol_type = other DNA
tcctgacctcaggtgatctg

SEQ ID NO: 90616 - DNA, 20 bp, synthetic construct
  source 1..20: mol_type = other DNA
ctcctgacctcaggtgatct

SEQ ID NO: 90617 - DNA, 20 bp, synthetic construct
  source 1..20: mol_type = other DNA
actcctgacctcaggtgatc

SEQ ID NO: 90618 - DNA, 20 bp, synthetic construct
  source 1..20: mol_type = other DNA
aactcctgacctcaggtgat

SEQ ID NO: 90619 - DNA, 20 bp, synthetic construct
  source 1..20: mol_type = other DNA
aaactcctgacctcaggtga

SEQ ID NO: 90620 - DNA, 20 bp, synthetic construct
  source 1..20: mol_type = other DNA
caaactcctgacctcaggtg

SEQ ID NO: 90621 - DNA, 20 bp, synthetic construct
  source 1..20: mol_type = other DNA
tcaaactcctgacctcaggt

SEQ ID NO: 90622 - DNA, 20 bp, synthetic construct
  source 1..20: mol_type = other DNA
ctcaaactcctgacctcagg

SEQ ID NO: 90623 - DNA, 20 bp, synthetic construct
  source 1..20: mol_type = other DNA
tctcaaactcctgacctcag

SEQ ID NO: 90624 - DNA, 20 bp, synthetic construct
  source 1..20: mol_type = other DNA
gtctcaaactcctgacctca

SEQ ID NO: 90625 - DNA, 20 bp, synthetic construct
  source 1..20: mol_type = other DNA
ggtctcaaactcctgacctc

SEQ ID NO: 90626 - DNA, 20 bp, synthetic construct
  source 1..20: mol_type = other DNA
tggtctcaaactcctgacct

SEQ ID NO: 90627 - DNA, 20 bp, synthetic construct
  source 1..20: mol_type = other DNA
ctggtctcaaactcctgacc

SEQ ID NO: 90628 - DNA, 20 bp, synthetic construct
  source 1..20: mol_type = other DNA
gctggtctcaaactcctgac

SEQ ID NO: 90629 - DNA, 20 bp, synthetic construct
  source 1..20: mol_type = other DNA
ggctggtctcaaactcctga

SEQ ID NO: 90630 - DNA, 20 bp, synthetic construct
  source 1..20: mol_type = other DNA
aggctggtctcaaactcctg

SEQ ID NO: 90631 - DNA, 20 bp, synthetic construct
  source 1..20: mol_type = other DNA
caggctggtctcaaactcct

SEQ ID NO: 90632 - DNA, 20 bp, synthetic construct
  source 1..20: mol_type = other DNA
ccaggctggtctcaaactcc

SEQ ID NO: 90633 - DNA, 20 bp, synthetic construct
  source 1..20: mol_type = other DNA
gccaggctggtctcaaactc

SEQ ID NO: 90634 - DNA, 20 bp, synthetic construct
  source 1..20: mol_type = other DNA
ggccaggctggtctcaaact

SEQ ID NO: 90635 - DNA, 20 bp, synthetic construct
  source 1..20: mol_type = other DNA
tggccaggctggtctcaaac

SEQ ID NO: 90636 - DNA, 20 bp, synthetic construct
  source 1..20: mol_type = other DNA
ctggccaggctggtctcaaa

SEQ ID NO: 90637 - DNA, 20 bp, synthetic construct
  source 1..20: mol_type = other DNA
gctggccaggctggtctcaa

SEQ ID NO: 90638 - DNA, 20 bp, synthetic construct
  source 1..20: mol_type = other DNA
tgctggccaggctggtctca

SEQ ID NO: 90639 - DNA, 20 bp, synthetic construct
  source 1..20: mol_type = other DNA
atgctggccaggctggtctc

SEQ ID NO: 90640 - DNA, 20 bp, synthetic construct
  source 1..20: mol_type = other DNA
catgctggccaggctggtct

SEQ ID NO: 90641 - DNA, 20 bp, synthetic construct
  source 1..20: mol_type = other DNA
ccatgctggccaggctggtc

SEQ ID NO: 90642 - DNA, 20 bp, synthetic construct
  source 1..20: mol_type = other DNA
accatgctggccaggctggt

SEQ ID NO: 90643 - DNA, 20 bp, synthetic construct
  source 1..20: mol_type = other DNA
caccatgctggccaggctgg

SEQ ID NO: 90644 - DNA, 20 bp, synthetic construct
  source 1..20: mol_type = other DNA
tcaccatgctggccaggctg

SEQ ID NO: 90645 - DNA, 20 bp, synthetic construct
  source 1..20: mol_type = other DNA
ttcaccatgctggccaggct

SEQ ID NO: 90646 - DNA, 20 bp, synthetic construct
  source 1..20: mol_type = other DNA
tttcaccatgctggccaggc

SEQ ID NO: 90647 - DNA, 20 bp, synthetic construct
  source 1..20: mol_type = other DNA
gtttcaccatgctggccagg

SEQ ID NO: 90648 - DNA, 20 bp, synthetic construct
  source 1..20: mol_type = other DNA
ggtttcaccatgctggccag

SEQ ID NO: 90649 - DNA, 20 bp, synthetic construct
  source 1..20: mol_type = other DNA
gggtttcaccatgctggcca

SEQ ID NO: 90650 - DNA, 20 bp, synthetic construct
  source 1..20: mol_type = other DNA
ggggtttcaccatgctggcc

SEQ ID NO: 90651 - DNA, 20 bp, synthetic construct
  source 1..20: mol_type = other DNA
cggggtttcaccatgctggc

SEQ ID NO: 90652 - DNA, 20 bp, synthetic construct
  source 1..20: mol_type = other DNA
acggggtttcaccatgctgg

SEQ ID NO: 90653 - DNA, 20 bp, synthetic construct
  source 1..20: mol_type = other DNA
gacggggtttcaccatgctg

SEQ ID NO: 90654 - DNA, 20 bp, synthetic construct
  source 1..20: mol_type = other DNA
agacggggtttcaccatgct

SEQ ID NO: 90655 - DNA, 20 bp, synthetic construct
  source 1..20: mol_type = other DNA
gagacggggtttcaccatgc

SEQ ID NO: 90656 - DNA, 20 bp, synthetic construct
  source 1..20: mol_type = other DNA
agagacggggtttcaccatg

SEQ ID NO: 90657 - DNA, 20 bp, synthetic construct
  source 1..20: mol_type = other DNA
tagagacggggtttcaccat

SEQ ID NO: 90658 - DNA, 20 bp, synthetic construct
  source 1..20: mol_type = other DNA
gtagagacggggtttcacca

SEQ ID NO: 90659 - DNA, 20 bp, synthetic construct
  source 1..20: mol_type = other DNA
agtagagacggggtttcacc

SEQ ID NO: 90660 - DNA, 20 bp, synthetic construct
  source 1..20: mol_type = other DNA
tagtagagacggggtttcac

SEQ ID NO: 90661 - DNA, 20 bp, synthetic construct
  source 1..20: mol_type = other DNA
ttagtagagacggggtttca

SEQ ID NO: 90662 - DNA, 20 bp, synthetic construct
  source 1..20: mol_type = other DNA
tttagtagagacggggtttc

SEQ ID NO: 90663 - DNA, 20 bp, synthetic construct
  source 1..20: mol_type = other DNA
ttttagtagagacggggttt

SEQ ID NO: 90664 - DNA, 20 bp, synthetic construct
  source 1..20: mol_type = other DNA
tttttagtagagacggggtt

SEQ ID NO: 90665 - DNA, 20 bp, synthetic construct
  source 1..20: mol_type = other DNA
atttttagtagagacggggt

SEQ ID NO: 90666 - DNA, 20 bp, synthetic construct
  source 1..20: mol_type = other DNA
tatttttagtagagacgggg

SEQ ID NO: 90667 - DNA, 20 bp, synthetic construct
  source 1..20: mol_type = other DNA
gtatttttagtagagacggg

SEQ ID NO: 90668 - DNA, 20 bp, synthetic construct
  source 1..20: mol_type = other DNA
tgtatttttagtagagacgg

SEQ ID NO: 90669 - DNA, 20 bp, synthetic construct
  source 1..20: mol_type = other DNA
ttgtatttttagtagagacg

SEQ ID NO: 90670 - DNA, 20 bp, synthetic construct
  source 1..20: mol_type = other DNA
tttgtatttttagtagagac

SEQ ID NO: 90671 - DNA, 20 bp, synthetic construct
  source 1..20: mol_type = other DNA
ttttgtatttttagtagaga

SEQ ID NO: 90672 - DNA, 20 bp, synthetic construct
  source 1..20: mol_type = other DNA
tttttgtatttttagtagag

SEQ ID NO: 90673 - DNA, 20 bp, synthetic construct
  source 1..20: mol_type = other DNA
ttttttgtatttttagtaga

SEQ ID NO: 90674 - DNA, 20 bp, synthetic construct
  source 1..20: mol_type = other DNA
tttttttgtatttttagtag

SEQ ID NO: 90675 - DNA, 20 bp, synthetic construct
  source 1..20: mol_type = other DNA
atttttttgtatttttagta

SEQ ID NO: 90676 - DNA, 20 bp, synthetic construct
  source 1..20: mol_type = other DNA
aatttttttgtatttttagt

SEQ ID NO: 90677 - DNA, 20 bp, synthetic construct
  source 1..20: mol_type = other DNA
taatttttttgtatttttag

SEQ ID NO: 90678 - DNA, 20 bp, synthetic construct
  source 1..20: mol_type = other DNA
ctaatttttttgtattttta

SEQ ID NO: 90679 - DNA, 20 bp, synthetic construct
  source 1..20: mol_type = other DNA
gctaatttttttgtattttt

SEQ ID NO: 90680 - DNA, 20 bp, synthetic construct
  source 1..20: mol_type = other DNA
agctaatttttttgtatttt

SEQ ID NO: 90681 - DNA, 20 bp, synthetic construct
  source 1..20: mol_type = other DNA
cagctaatttttttgtattt

SEQ ID NO: 90682 - DNA, 20 bp, synthetic construct
  source 1..20: mol_type = other DNA
ccagctaatttttttgtatt

SEQ ID NO: 90683 - DNA, 20 bp, synthetic construct
  source 1..20: mol_type = other DNA
accagctaatttttttgtat

SEQ ID NO: 90684 - DNA, 20 bp, synthetic construct
  source 1..20: mol_type = other DNA
aaccagctaatttttttgta

SEQ ID NO: 90685 - DNA, 20 bp, synthetic construct
  source 1..20: mol_type = other DNA
caaccagctaatttttttgt

SEQ ID NO: 90686 - DNA, 20 bp, synthetic construct
  source 1..20: mol_type = other DNA
acaaccagctaatttttttg

SEQ ID NO: 90687 - DNA, 20 bp, synthetic construct
  source 1..20: mol_type = other DNA
cacaaccagctaattttttt

SEQ ID NO: 90688 - DNA, 20 bp, synthetic construct
  source 1..20: mol_type = other DNA
ccacaaccagctaatttttt

SEQ ID NO: 90689 - DNA, 20 bp, synthetic construct
  source 1..20: mol_type = other DNA
accacaaccagctaattttt

SEQ ID NO: 90690 - DNA, 20 bp, synthetic construct
  source 1..20: mol_type = other DNA
caccacaaccagctaatttt

SEQ ID NO: 90691 - DNA, 20 bp, synthetic construct
  source 1..20: mol_type = other DNA
ccaccacaaccagctaattt

SEQ ID NO: 90692 - DNA, 20 bp, synthetic construct
  source 1..20: mol_type = other DNA
gccaccacaaccagctaatt

SEQ ID NO: 90693 - DNA, 20 bp, synthetic construct
  source 1..20: mol_type = other DNA
cgccaccacaaccagctaat

SEQ ID NO: 90694 - DNA, 20 bp, synthetic construct
  source 1..20: mol_type = other DNA
tcgccaccacaaccagctaa

SEQ ID NO: 90695 - DNA, 20 bp, synthetic construct
  source 1..20: mol_type = other DNA
ctcgccaccacaaccagcta

SEQ ID NO: 90696 - DNA, 20 bp, synthetic construct
  source 1..20: mol_type = other DNA
actcgccaccacaaccagct

SEQ ID NO: 90697 - DNA, 20 bp, synthetic construct
  source 1..20: mol_type = other DNA
cactcgccaccacaaccagc

SEQ ID NO: 90698 - DNA, 20 bp, synthetic construct
  source 1..20: mol_type = other DNA
gcactcgccaccacaaccag

SEQ ID NO: 90699 - DNA, 20 bp, synthetic construct
  source 1..20: mol_type = other DNA
ggcactcgccaccacaacca

SEQ ID NO: 90700 - DNA, 20 bp, synthetic construct
  source 1..20: mol_type = other DNA
aggcactcgccaccacaacc

SEQ ID NO: 90701 - DNA, 20 bp, synthetic construct
  source 1..20: mol_type = other DNA
aaggcactcgccaccacaac

SEQ ID NO: 90702 - DNA, 20 bp, synthetic construct
  source 1..20: mol_type = other DNA
aaaggcactcgccaccacaa

SEQ ID NO: 90703 - DNA, 20 bp, synthetic construct
  source 1..20: mol_type = other DNA
taaaggcactcgccaccaca

SEQ ID NO: 90704 - DNA, 20 bp, synthetic construct
  source 1..20: mol_type = other DNA
ttaaaggcactcgccaccac

SEQ ID NO: 90705 - DNA, 20 bp, synthetic construct
  source 1..20: mol_type = other DNA
attaaaggcactcgccacca

SEQ ID NO: 90706 - DNA, 20 bp, synthetic construct
  source 1..20: mol_type = other DNA
gattaaaggcactcgccacc

SEQ ID NO: 90707 - DNA, 20 bp, synthetic construct
  source 1..20: mol_type = other DNA
ggattaaaggcactcgccac

SEQ ID NO: 90708 - DNA, 20 bp, synthetic construct
  source 1..20: mol_type = other DNA
gggattaaaggcactcgcca

SEQ ID NO: 90709 - DNA, 20 bp, synthetic construct
  source 1..20: mol_type = other DNA
tgggattaaaggcactcgcc

SEQ ID NO: 90710 - DNA, 20 bp, synthetic construct
  source 1..20: mol_type = other DNA
ctgggattaaaggcactcgc

SEQ ID NO: 90711 - DNA, 20 bp, synthetic construct
  source 1..20: mol_type = other DNA
gctgggattaaaggcactcg

SEQ ID NO: 90712 - DNA, 20 bp, synthetic construct
  source 1..20: mol_type = other DNA
agctgggattaaaggcactc

SEQ ID NO: 90713 - DNA, 20 bp, synthetic construct
  source 1..20: mol_type = other DNA
tagctgggattaaaggcact

SEQ ID NO: 90714 - DNA, 20 bp, synthetic construct
  source 1..20: mol_type = other DNA
gtagctgggattaaaggcac

SEQ ID NO: 90715 - DNA, 20 bp, synthetic construct
  source 1..20: mol_type = other DNA
agtagctgggattaaaggca

SEQ ID NO: 90716 - DNA, 20 bp, synthetic construct
  source 1..20: mol_type = other DNA
gagtagctgggattaaaggc

SEQ ID NO: 90717 - DNA, 20 bp, synthetic construct
  source 1..20: mol_type = other DNA
ggagtagctgggattaaagg

SEQ ID NO: 90718 - DNA, 20 bp, synthetic construct
  source 1..20: mol_type = other DNA
tggagtagctgggattaaag

SEQ ID NO: 90719 - DNA, 20 bp, synthetic construct
  source 1..20: mol_type = other DNA
ctggagtagctgggattaaa

SEQ ID NO: 90720 - DNA, 20 bp, synthetic construct
  source 1..20: mol_type = other DNA
tctggagtagctgggattaa

SEQ ID NO: 90721 - DNA, 20 bp, synthetic construct
  source 1..20: mol_type = other DNA
ctctggagtagctgggatta

SEQ ID NO: 90722 - DNA, 20 bp, synthetic construct
  source 1..20: mol_type = other DNA
cctctggagtagctgggatt

SEQ ID NO: 90723 - DNA, 20 bp, synthetic construct
  source 1..20: mol_type = other DNA
gcctctggagtagctgggat

SEQ ID NO: 90724 - DNA, 20 bp, synthetic construct
  source 1..20: mol_type = other DNA
agcctctggagtagctggga

SEQ ID NO: 90725 - DNA, 20 bp, synthetic construct
  source 1..20: mol_type = other DNA
cagcctctggagtagctggg

SEQ ID NO: 90726 - DNA, 20 bp, synthetic construct
  source 1..20: mol_type = other DNA
tcagcctctggagtagctgg

SEQ ID NO: 90727 - DNA, 20 bp, synthetic construct
  source 1..20: mol_type = other DNA
ctcagcctctggagtagctg

SEQ ID NO: 90728 - DNA, 20 bp, synthetic construct
  source 1..20: mol_type = other DNA
cctcagcctctggagtagct

SEQ ID NO: 90729 - DNA, 20 bp, synthetic construct
  source 1..20: mol_type = other DNA
gcctcagcctctggagtagc

SEQ ID NO: 90730 - DNA, 20 bp, synthetic construct
  source 1..20: mol_type = other DNA
tgcctcagcctctggagtag

SEQ ID NO: 90731 - DNA, 20 bp, synthetic construct
  source 1..20: mol_type = other DNA
ctgcctcagcctctggagta

SEQ ID NO: 90732 - DNA, 20 bp, synthetic construct
  source 1..20: mol_type = other DNA
cctgcctcagcctctggagt

SEQ ID NO: 90733 - DNA, 20 bp, synthetic construct
  source 1..20: mol_type = other DNA
tcctgcctcagcctctggag

SEQ ID NO: 90734 - DNA, 20 bp, synthetic construct
  source 1..20: mol_type = other DNA
ctcctgcctcagcctctgga

SEQ ID NO: 90735 - DNA, 20 bp, synthetic construct
  source 1..20: mol_type = other DNA
tctcctgcctcagcctctgg

SEQ ID NO: 90736 - DNA, 20 bp, synthetic construct
  source 1..20: mol_type = other DNA
ttctcctgcctcagcctctg

SEQ ID NO: 90737 - DNA, 20 bp, synthetic construct
  source 1..20: mol_type = other DNA
attctcctgcctcagcctct

SEQ ID NO: 90738 - DNA, 20 bp, synthetic construct
  source 1..20: mol_type = other DNA
gattctcctgcctcagcctc

SEQ ID NO: 90739 - DNA, 20 bp, synthetic construct
  source 1..20: mol_type = other DNA
tgattctcctgcctcagcct

SEQ ID NO: 90740 - DNA, 20 bp, synthetic construct
  source 1..20: mol_type = other DNA
gtgattctcctgcctcagcc

SEQ ID NO: 90741 - DNA, 20 bp, synthetic construct
  source 1..20: mol_type = other DNA
agtgattctcctgcctcagc

SEQ ID NO: 90742 - DNA, 20 bp, synthetic construct
  source 1..20: mol_type = other DNA
aagtgattctcctgcctcag

SEQ ID NO: 90743 - DNA, 20 bp, synthetic construct
  source 1..20: mol_type = other DNA
caagtgattctcctgcctca

SEQ ID NO: 90744 - DNA, 20 bp, synthetic construct
  source 1..20: mol_type = other DNA
tcaagtgattctcctgcctc

SEQ ID NO: 90745 - DNA, 20 bp, synthetic construct
  source 1..20: mol_type = other DNA
atcaagtgattctcctgcct

SEQ ID NO: 90746 - DNA, 20 bp, synthetic construct
  source 1..20: mol_type = other DNA
tatcaagtgattctcctgcc

SEQ ID NO: 90747 - DNA, 20 bp, synthetic construct
  source 1..20: mol_type = other DNA
gtatcaagtgattctcctgc

SEQ ID NO: 90748 - DNA, 20 bp, synthetic construct
  source 1..20: mol_type = other DNA
tgtatcaagtgattctcctg

SEQ ID NO: 90749 - DNA, 20 bp, synthetic construct
  source 1..20: mol_type = other DNA
atgtatcaagtgattctcct

SEQ ID NO: 90750 - DNA, 20 bp, synthetic construct
  source 1..20: mol_type = other DNA
aatgtatcaagtgattctcc

SEQ ID NO: 90751 - DNA, 20 bp, synthetic construct
  source 1..20: mol_type = other DNA
aaatgtatcaagtgattctc

SEQ ID NO: 90752 - DNA, 20 bp, synthetic construct
  source 1..20: mol_type = other DNA
taaatgtatcaagtgattct

SEQ ID NO: 90753 - DNA, 20 bp, synthetic construct
  source 1..20: mol_type = other DNA
ctaaatgtatcaagtgattc

SEQ ID NO: 90754 - DNA, 20 bp, synthetic construct
  source 1..20: mol_type = other DNA
actaaatgtatcaagtgatt

SEQ ID NO: 90755 - DNA, 20 bp, synthetic construct
  source 1..20: mol_type = other DNA
aactaaatgtatcaagtgat

SEQ ID NO: 90756 - DNA, 20 bp, synthetic construct
  source 1..20: mol_type = other DNA
taactaaatgtatcaagtga

SEQ ID NO: 90757 - DNA, 20 bp, synthetic construct
  source 1..20: mol_type = other DNA
ctaactaaatgtatcaagtg

SEQ ID NO: 90758 - DNA, 20 bp, synthetic construct
  source 1..20: mol_type = other DNA
cctaactaaatgtatcaagt

SEQ ID NO: 90759 - DNA, 20 bp, synthetic construct
  source 1..20: mol_type = other DNA
tcctaactaaatgtatcaag

SEQ ID NO: 90760 - DNA, 20 bp, synthetic construct
  source 1..20: mol_type = other DNA
ctcctaactaaatgtatcaa

SEQ ID NO: 90761 - DNA, 20 bp, synthetic construct
  source 1..20: mol_type = other DNA
tctcctaactaaatgtatca

SEQ ID NO: 90762 - DNA, 20 bp, synthetic construct
  source 1..20: mol_type = other DNA
ctctcctaactaaatgtatc

SEQ ID NO: 90763 - DNA, 20 bp, synthetic construct
  source 1..20: mol_type = other DNA
tctctcctaactaaatgtat

SEQ ID NO: 90764 - DNA, 20 bp, synthetic construct
  source 1..20: mol_type = other DNA
ttctctcctaactaaatgta

SEQ ID NO: 90765 - DNA, 20 bp, synthetic construct
  source 1..20: mol_type = other DNA
tttctctcctaactaaatgt

SEQ ID NO: 90766 - DNA, 20 bp, synthetic construct
  source 1..20: mol_type = other DNA
ttttctctcctaactaaatg

SEQ ID NO: 90767 - DNA, 20 bp, synthetic construct
  source 1..20: mol_type = other DNA
attttctctcctaactaaat

SEQ ID NO: 90768 - DNA, 20 bp, synthetic construct
  source 1..20: mol_type = other DNA
gattttctctcctaactaaa

SEQ ID NO: 90769 - DNA, 20 bp, synthetic construct
  source 1..20: mol_type = other DNA
tgattttctctcctaactaa

SEQ ID NO: 90770 - DNA, 20 bp, synthetic construct
  source 1..20: mol_type = other DNA
atgattttctctcctaacta

SEQ ID NO: 90771 - DNA, 20 bp, synthetic construct
  source 1..20: mol_type = other DNA
tatgattttctctcctaact

SEQ ID NO: 90772 - DNA, 20 bp, synthetic construct
  source 1..20: mol_type = other DNA
gtatgattttctctcctaac

SEQ ID NO: 90773 - DNA, 20 bp, synthetic construct
  source 1..20: mol_type = other DNA
agtatgattttctctcctaa

SEQ ID NO: 90774 - DNA, 20 bp, synthetic construct
  source 1..20: mol_type = other DNA
aagtatgattttctctccta

SEQ ID NO: 90775 - DNA, 20 bp, synthetic construct
  source 1..20: mol_type = other DNA
taagtatgattttctctcct

SEQ ID NO: 90776 - DNA, 20 bp, synthetic construct
  source 1..20: mol_type = other DNA
ataagtatgattttctctcc

SEQ ID NO: 90777 - DNA, 20 bp, synthetic construct
  source 1..20: mol_type = other DNA
cataagtatgattttctctc

SEQ ID NO: 90778 - DNA, 20 bp, synthetic construct
  source 1..20: mol_type = other DNA
acataagtatgattttctct

SEQ ID NO: 90779 - DNA, 20 bp, synthetic construct
  source 1..20: mol_type = other DNA
aacataagtatgattttctc

SEQ ID NO: 90780 - DNA, 20 bp, synthetic construct
  source 1..20: mol_type = other DNA
taacataagtatgattttct

SEQ ID NO: 90781 - DNA, 20 bp, synthetic construct
  source 1..20: mol_type = other DNA
ctaacataagtatgattttc

SEQ ID NO: 90782 - DNA, 20 bp, synthetic construct
  source 1..20: mol_type = other DNA
actaacataagtatgatttt

SEQ ID NO: 90783 - DNA, 20 bp, synthetic construct
  source 1..20: mol_type = other DNA
tactaacataagtatgattt

SEQ ID NO: 90784 - DNA, 20 bp, synthetic construct
  source 1..20: mol_type = other DNA
ttactaacataagtatgatt

SEQ ID NO: 90785 - DNA, 20 bp, synthetic construct
  source 1..20: mol_type = other DNA
attactaacataagtatgat

SEQ ID NO: 90786 - DNA, 20 bp, synthetic construct
  source 1..20: mol_type = other DNA
aattactaacataagtatga

SEQ ID NO: 90787 - DNA, 20 bp, synthetic construct
  source 1..20: mol_type = other DNA
caattactaacataagtatg

SEQ ID NO: 90788 - DNA, 20 bp, synthetic construct
  source 1..20: mol_type = other DNA
gcaattactaacataagtat

SEQ ID NO: 90789 - DNA, 20 bp, synthetic construct
  source 1..20: mol_type = other DNA
agcaattactaacataagta

SEQ ID NO: 90790 - DNA, 20 bp, synthetic construct
  source 1..20: mol_type = other DNA
cagcaattactaacataagt

SEQ ID NO: 90791 - DNA, 20 bp, synthetic construct
  source 1..20: mol_type = other DNA
gcagcaattactaacataag

SEQ ID NO: 90792 - DNA, 20 bp, synthetic construct
  source 1..20: mol_type = other DNA
agcagcaattactaacataa

SEQ ID NO: 90793 - DNA, 20 bp, synthetic construct
  source 1..20: mol_type = other DNA
cagcagcaattactaacata

SEQ ID NO: 90794 - DNA, 20 bp, synthetic construct
  source 1..20: mol_type = other DNA
acagcagcaattactaacat

SEQ ID NO: 90795 - DNA, 20 bp, synthetic construct
  source 1..20: mol_type = other DNA
aacagcagcaattactaaca

SEQ ID NO: 90796 - DNA, 20 bp, synthetic construct
  source 1..20: mol_type = other DNA
gaacagcagcaattactaac

SEQ ID NO: 90797 - DNA, 20 bp, synthetic construct
  source 1..20: mol_type = other DNA
agaacagcagcaattactaa

SEQ ID NO: 90798 - DNA, 20 bp, synthetic construct
  source 1..20: mol_type = other DNA
aagaacagcagcaattacta

SEQ ID NO: 90799 - DNA, 20 bp, synthetic construct
  source 1..20: mol_type = other DNA
gaagaacagcagcaattact

SEQ ID NO: 90800 - DNA, 20 bp, synthetic construct
  source 1..20: mol_type = other DNA
tgaagaacagcagcaattac

SEQ ID NO: 90801 - DNA, 20 bp, synthetic construct
  source 1..20: mol_type = other DNA
atgaagaacagcagcaatta

SEQ ID NO: 90802 - DNA, 20 bp, synthetic construct
  source 1..20: mol_type = other DNA
tatgaagaacagcagcaatt

SEQ ID NO: 90803 - DNA, 20 bp, synthetic construct
  source 1..20: mol_type = other DNA
atatgaagaacagcagcaat

SEQ ID NO: 90804 - DNA, 20 bp, synthetic construct
  source 1..20: mol_type = other DNA
tatatgaagaacagcagcaa

SEQ ID NO: 90805 - DNA, 20 bp, synthetic construct
  source 1..20: mol_type = other DNA
gtatatgaagaacagcagca

SEQ ID NO: 90806 - DNA, 20 bp, synthetic construct
  source 1..20: mol_type = other DNA
agtatatgaagaacagcagc

SEQ ID NO: 90807 - DNA, 20 bp, synthetic construct
  source 1..20: mol_type = other DNA
aagtatatgaagaacagcag

SEQ ID NO: 90808 - DNA, 20 bp, synthetic construct
  source 1..20: mol_type = other DNA
caagtatatgaagaacagca

SEQ ID NO: 90809 - DNA, 20 bp, synthetic construct
  source 1..20: mol_type = other DNA
acaagtatatgaagaacagc

SEQ ID NO: 90810 - DNA, 20 bp, synthetic construct
  source 1..20: mol_type = other DNA
cacaagtatatgaagaacag

SEQ ID NO: 90811 - DNA, 20 bp, synthetic construct
  source 1..20: mol_type = other DNA
ccacaagtatatgaagaaca

SEQ ID NO: 90812 - DNA, 20 bp, synthetic construct
  source 1..20: mol_type = other DNA
accacaagtatatgaagaac

SEQ ID NO: 90813 - DNA, 20 bp, synthetic construct
  source 1..20: mol_type = other DNA
aaccacaagtatatgaagaa

SEQ ID NO: 90814 - DNA, 20 bp, synthetic construct
  source 1..20: mol_type = other DNA
aaaccacaagtatatgaaga

SEQ ID NO: 90815 - DNA, 20 bp, synthetic construct
  source 1..20: mol_type = other DNA
aaaaccacaagtatatgaag

SEQ ID NO: 90816 - DNA, 20 bp, synthetic construct
  source 1..20: mol_type = other DNA
caaaaccacaagtatatgaa

SEQ ID NO: 90817 - DNA, 20 bp, synthetic construct
  source 1..20: mol_type = other DNA
tcaaaaccacaagtatatga

SEQ ID NO: 90818 - DNA, 20 bp, synthetic construct
  source 1..20: mol_type = other DNA
atcaaaaccacaagtatatg

SEQ ID NO: 90819 - DNA, 20 bp, synthetic construct
  source 1..20: mol_type = other DNA
aatcaaaaccacaagtatat

SEQ ID NO: 90820 - DNA, 20 bp, synthetic construct
  source 1..20: mol_type = other DNA
caatcaaaaccacaagtata

SEQ ID NO: 90821 - DNA, 20 bp, synthetic construct
  source 1..20: mol_type = other DNA
gcaatcaaaaccacaagtat

SEQ ID NO: 90822 - DNA, 20 bp, synthetic construct
  source 1..20: mol_type = other DNA
ggcaatcaaaaccacaagta

SEQ ID NO: 90823 - DNA, 20 bp, synthetic construct
  source 1..20: mol_type = other DNA
tggcaatcaaaaccacaagt

SEQ ID NO: 90824 - DNA, 20 bp, synthetic construct
  source 1..20: mol_type = other DNA
ctggcaatcaaaaccacaag

SEQ ID NO: 90825 - DNA, 20 bp, synthetic construct
  source 1..20: mol_type = other DNA
gctggcaatcaaaaccacaa

SEQ ID NO: 90826 - DNA, 20 bp, synthetic construct
  source 1..20: mol_type = other DNA
tgctggcaatcaaaaccaca

SEQ ID NO: 90827 - DNA, 20 bp, synthetic construct
  source 1..20: mol_type = other DNA
ttgctggcaatcaaaaccac

SEQ ID NO: 90828 - DNA, 20 bp, synthetic construct
  source 1..20: mol_type = other DNA
tttgctggcaatcaaaacca

SEQ ID NO: 90829 - DNA, 20 bp, synthetic construct
  source 1..20: mol_type = other DNA
atttgctggcaatcaaaacc

SEQ ID NO: 90830 - DNA, 20 bp, synthetic construct
  source 1..20: mol_type = other DNA
aatttgctggcaatcaaaac

SEQ ID NO: 90831 - DNA, 20 bp, synthetic construct
  source 1..20: mol_type = other DNA
gaatttgctggcaatcaaaa

SEQ ID NO: 90832 - DNA, 20 bp, synthetic construct
  source 1..20: mol_type = other DNA
ggaatttgctggcaatcaaa

SEQ ID NO: 90833 - DNA, 20 bp, synthetic construct
  source 1..20: mol_type = other DNA
aggaatttgctggcaatcaa

SEQ ID NO: 90834 - DNA, 20 bp, synthetic construct
  source 1..20: mol_type = other DNA
taggaatttgctggcaatca

SEQ ID NO: 90835 - DNA, 20 bp, synthetic construct
  source 1..20: mol_type = other DNA
ttaggaatttgctggcaatc

SEQ ID NO: 90836 - DNA, 20 bp, synthetic construct
  source 1..20: mol_type = other DNA
gttaggaatttgctggcaat

SEQ ID NO: 90837 - DNA, 20 bp, synthetic construct
  source 1..20: mol_type = other DNA
tgttaggaatttgctggcaa

SEQ ID NO: 90838 - DNA, 20 bp, synthetic construct
  source 1..20: mol_type = other DNA
atgttaggaatttgctggca

SEQ ID NO: 90839 - DNA, 20 bp, synthetic construct
  source 1..20: mol_type = other DNA
aatgttaggaatttgctggc

SEQ ID NO: 90840 - DNA, 20 bp, synthetic construct
  source 1..20: mol_type = other DNA
aaatgttaggaatttgctgg

SEQ ID NO: 90841 - DNA, 20 bp, synthetic construct
  source 1..20: mol_type = other DNA
aaaatgttaggaatttgctg

SEQ ID NO: 90842 - DNA, 20 bp, synthetic construct
  source 1..20: mol_type = other DNA
caaaatgttaggaatttgct

SEQ ID NO: 90843 - DNA, 20 bp, synthetic construct
  source 1..20: mol_type = other DNA
ccaaaatgttaggaatttgc

SEQ ID NO: 90844 - DNA, 20 bp, synthetic construct
  source 1..20: mol_type = other DNA
tccaaaatgttaggaatttg

SEQ ID NO: 90845 - DNA, 20 bp, synthetic construct
  source 1..20: mol_type = other DNA
ttccaaaatgttaggaattt

SEQ ID NO: 90846 - DNA, 20 bp, synthetic construct
  source 1..20: mol_type = other DNA
tttccaaaatgttaggaatt

SEQ ID NO: 90847 - DNA, 20 bp, synthetic construct
  source 1..20: mol_type = other DNA
ttttccaaaatgttaggaat

SEQ ID NO: 90848 - DNA, 20 bp, synthetic construct
  source 1..20: mol_type = other DNA
cttttccaaaatgttaggaa

SEQ ID NO: 90849 - DNA, 20 bp, synthetic construct
  source 1..20: mol_type = other DNA
tcttttccaaaatgttagga

SEQ ID NO: 90850 - DNA, 20 bp, synthetic construct
  source 1..20: mol_type = other DNA
ttcttttccaaaatgttagg

SEQ ID NO: 90851 - DNA, 20 bp, synthetic construct
  source 1..20: mol_type = other DNA
tttcttttccaaaatgttag

SEQ ID NO: 90852 - DNA, 20 bp, synthetic construct
  source 1..20: mol_type = other DNA
ttttcttttccaaaatgtta

SEQ ID NO: 90853 - DNA, 20 bp, synthetic construct
  source 1..20: mol_type = other DNA
gttttcttttccaaaatgtt

SEQ ID NO: 90854 - DNA, 20 bp, synthetic construct
  source 1..20: mol_type = other DNA
tgttttcttttccaaaatgt

SEQ ID NO: 90855 - DNA, 20 bp, synthetic construct
  source 1..20: mol_type = other DNA
ctgttttcttttccaaaatg

SEQ ID NO: 90856 - DNA, 20 bp, synthetic construct
  source 1..20: mol_type = other DNA
actgttttcttttccaaaat

SEQ ID NO: 90857 - DNA, 20 bp, synthetic construct
  source 1..20: mol_type = other DNA
tactgttttcttttccaaaa

SEQ ID NO: 90858 - DNA, 20 bp, synthetic construct
  source 1..20: mol_type = other DNA
ttactgttttcttttccaaa

SEQ ID NO: 90859 - DNA, 20 bp, synthetic construct
  source 1..20: mol_type = other DNA
attactgttttcttttccaa

SEQ ID NO: 90860 - DNA, 20 bp, synthetic construct
  source 1..20: mol_type = other DNA
cattactgttttcttttcca

SEQ ID NO: 90861 - DNA, 20 bp, synthetic construct
  source 1..20: mol_type = other DNA
ccattactgttttcttttcc

SEQ ID NO: 90862 - DNA, 20 bp, synthetic construct
  source 1..20: mol_type = other DNA
cccattactgttttcttttc

SEQ ID NO: 90863 - DNA, 20 bp, synthetic construct
  source 1..20: mol_type = other DNA
tcccattactgttttctttt

SEQ ID NO: 90864 - DNA, 20 bp, synthetic construct
  source 1..20: mol_type = other DNA
atcccattactgttttcttt

SEQ ID NO: 90865 - DNA, 20 bp, synthetic construct
  source 1..20: mol_type = other DNA
tatcccattactgttttctt

SEQ ID NO: 90866 - DNA, 20 bp, synthetic construct
  source 1..20: mol_type = other DNA
ttatcccattactgttttct

SEQ ID NO: 90867 - DNA, 20 bp, synthetic construct
  source 1..20: mol_type = other DNA
tttatcccattactgttttc

SEQ ID NO: 90868 - DNA, 20 bp, synthetic construct
  source 1..20: mol_type = other DNA
ctttatcccattactgtttt

SEQ ID NO: 90869 - DNA, 20 bp, synthetic construct
  source 1..20: mol_type = other DNA
cctttatcccattactgttt

SEQ ID NO: 90870 - DNA, 20 bp, synthetic construct
  source 1..20: mol_type = other DNA
ccctttatcccattactgtt

SEQ ID NO: 90871 - DNA, 20 bp, synthetic construct
  source 1..20: mol_type = other DNA
accctttatcccattactgt

SEQ ID NO: 90872 - DNA, 20 bp, synthetic construct
  source 1..20: mol_type = other DNA
taccctttatcccattactg

SEQ ID NO: 90873 - DNA, 20 bp, synthetic construct
  source 1..20: mol_type = other DNA
ttaccctttatcccattact

SEQ ID NO: 90874 - DNA, 20 bp, synthetic construct
  source 1..20: mol_type = other DNA
cttaccctttatcccattac

SEQ ID NO: 90875 - DNA, 20 bp, synthetic construct
  source 1..20: mol_type = other DNA
ccttaccctttatcccatta

SEQ ID NO: 90876 - DNA, 20 bp, synthetic construct
  source 1..20: mol_type = other DNA
cccttaccctttatcccatt

SEQ ID NO: 90877 - DNA, 20 bp, synthetic construct
  source 1..20: mol_type = other DNA
gcccttaccctttatcccat

SEQ ID NO: 90878 - DNA, 20 bp, synthetic construct
  source 1..20: mol_type = other DNA
agcccttaccctttatccca

SEQ ID NO: 90879 - DNA, 20 bp, synthetic construct
  source 1..20: mol_type = other DNA
tagcccttaccctttatccc

SEQ ID NO: 90880 - DNA, 20 bp, synthetic construct
  source 1..20: mol_type = other DNA
ctagcccttaccctttatcc

SEQ ID NO: 90881 - DNA, 20 bp, synthetic construct
  source 1..20: mol_type = other DNA
tctagcccttaccctttatc

SEQ ID NO: 90882 - DNA, 20 bp, synthetic construct
  source 1..20: mol_type = other DNA
ctctagcccttaccctttat

SEQ ID NO: 90883 - DNA, 20 bp, synthetic construct
  source 1..20: mol_type = other DNA
tctctagcccttacccttta

SEQ ID NO: 90884 - DNA, 20 bp, synthetic construct
  source 1..20: mol_type = other DNA
ctctctagcccttacccttt

SEQ ID NO: 90885 - DNA, 20 bp, synthetic construct
  source 1..20: mol_type = other DNA
cctctctagcccttaccctt

SEQ ID NO: 90886 - DNA, 20 bp, synthetic construct
  source 1..20: mol_type = other DNA
tcctctctagcccttaccct

SEQ ID NO: 90887 - DNA, 20 bp, synthetic construct
  source 1..20: mol_type = other DNA
gtcctctctagcccttaccc

SEQ ID NO: 90888 - DNA, 20 bp, synthetic construct
  source 1..20: mol_type = other DNA
tgtcctctctagcccttacc

SEQ ID NO: 90889 - DNA, 20 bp, synthetic construct
  source 1..20: mol_type = other DNA
ctgtcctctctagcccttac

SEQ ID NO: 90890 - DNA, 20 bp, synthetic construct
  source 1..20: mol_type = other DNA
actgtcctctctagccctta

SEQ ID NO: 90891 - DNA, 20 bp, synthetic construct
  source 1..20: mol_type = other DNA
aactgtcctctctagccctt

SEQ ID NO: 90892 - DNA, 20 bp, synthetic construct
  source 1..20: mol_type = other DNA
aaactgtcctctctagccct

SEQ ID NO: 90893 - DNA, 20 bp, synthetic construct
  source 1..20: mol_type = other DNA
aaaactgtcctctctagccc

SEQ ID NO: 90894 - DNA, 20 bp, synthetic construct
  source 1..20: mol_type = other DNA
taaaactgtcctctctagcc

SEQ ID NO: 90895 - DNA, 20 bp, synthetic construct
  source 1..20: mol_type = other DNA
ataaaactgtcctctctagc

SEQ ID NO: 90896 - DNA, 20 bp, synthetic construct
  source 1..20: mol_type = other DNA
aataaaactgtcctctctag

SEQ ID NO: 90897 - DNA, 20 bp, synthetic construct
  source 1..20: mol_type = other DNA
aaataaaactgtcctctcta

SEQ ID NO: 90898 - DNA, 20 bp, synthetic construct
  source 1..20: mol_type = other DNA
taaataaaactgtcctctct

SEQ ID NO: 90899 - DNA, 20 bp, synthetic construct
  source 1..20: mol_type = other DNA
gtaaataaaactgtcctctc

SEQ ID NO: 90900 - DNA, 20 bp, synthetic construct
  source 1..20: mol_type = other DNA
ggtaaataaaactgtcctct

SEQ ID NO: 90901 - DNA, 20 bp, synthetic construct
  source 1..20: mol_type = other DNA
aggtaaataaaactgtcctc

SEQ ID NO: 90902 - DNA, 20 bp, synthetic construct
  source 1..20: mol_type = other DNA
taggtaaataaaactgtcct

SEQ ID NO: 90903 - DNA, 20 bp, synthetic construct
  source 1..20: mol_type = other DNA
ctaggtaaataaaactgtcc

SEQ ID NO: 90904 - DNA, 20 bp, synthetic construct
  source 1..20: mol_type = other DNA
tctaggtaaataaaactgtc

SEQ ID NO: 90905 - DNA, 20 bp, synthetic construct
  source 1..20: mol_type = other DNA
atctaggtaaataaaactgt

SEQ ID NO: 90906 - DNA, 20 bp, synthetic construct
  source 1..20: mol_type = other DNA
gatctaggtaaataaaactg

SEQ ID NO: 90907 - DNA, 20 bp, synthetic construct
  source 1..20: mol_type = other DNA
agatctaggtaaataaaact

SEQ ID NO: 90908 - DNA, 20 bp, synthetic construct
  source 1..20: mol_type = other DNA
aagatctaggtaaataaaac

SEQ ID NO: 90909 - DNA, 20 bp, synthetic construct
  source 1..20: mol_type = other DNA
gaagatctaggtaaataaaa

SEQ ID NO: 90910 - DNA, 20 bp, synthetic construct
  source 1..20: mol_type = other DNA
tgaagatctaggtaaataaa

SEQ ID NO: 90911 - DNA, 20 bp, synthetic construct
  source 1..20: mol_type = other DNA
ctgaagatctaggtaaataa

SEQ ID NO: 90912 - DNA, 20 bp, synthetic construct
  source 1..20: mol_type = other DNA
tctgaagatctaggtaaata

SEQ ID NO: 90913 - DNA, 20 bp, synthetic construct
  source 1..20: mol_type = other DNA
ctctgaagatctaggtaaat

SEQ ID NO: 90914 - DNA, 20 bp, synthetic construct
  source 1..20: mol_type = other DNA
tctctgaagatctaggtaaa

SEQ ID NO: 90915 - DNA, 20 bp, synthetic construct
  source 1..20: mol_type = other DNA
ttctctgaagatctaggtaa

SEQ ID NO: 90916 - DNA, 20 bp, synthetic construct
  source 1..20: mol_type = other DNA
cttctctgaagatctaggta

SEQ ID NO: 90917 - DNA, 20 bp, synthetic construct
  source 1..20: mol_type = other DNA
gcttctctgaagatctaggt

SEQ ID NO: 90918 - DNA, 20 bp, synthetic construct
  source 1..20: mol_type = other DNA
ggcttctctgaagatctagg

SEQ ID NO: 90919 - DNA, 20 bp, synthetic construct
  source 1..20: mol_type = other DNA
aggcttctctgaagatctag

SEQ ID NO: 90920 - DNA, 20 bp, synthetic construct
  source 1..20: mol_type = other DNA
caggcttctctgaagatcta

SEQ ID NO: 90921 - DNA, 20 bp, synthetic construct
  source 1..20: mol_type = other DNA
tcaggcttctctgaagatct

SEQ ID NO: 90922 - DNA, 20 bp, synthetic construct
  source 1..20: mol_type = other DNA
ttcaggcttctctgaagatc

SEQ ID NO: 90923 - DNA, 20 bp, synthetic construct
  source 1..20: mol_type = other DNA
cttcaggcttctctgaagat

SEQ ID NO: 90924 - DNA, 20 bp, synthetic construct
  source 1..20: mol_type = other DNA
gcttcaggcttctctgaaga

SEQ ID NO: 90925 - DNA, 20 bp, synthetic construct
  source 1..20: mol_type = other DNA
ggcttcaggcttctctgaag

SEQ ID NO: 90926 - DNA, 20 bp, synthetic construct
  source 1..20: mol_type = other DNA
aggcttcaggcttctctgaa

SEQ ID NO: 90927 - DNA, 20 bp, synthetic construct
  source 1..20: mol_type = other DNA
gaggcttcaggcttctctga

SEQ ID NO: 90928 - DNA, 20 bp, synthetic construct
  source 1..20: mol_type = other DNA
agaggcttcaggcttctctg

SEQ ID NO: 90929 - DNA, 20 bp, synthetic construct
  source 1..20: mol_type = other DNA
aagaggcttcaggcttctct

SEQ ID NO: 90930 - DNA, 20 bp, synthetic construct
  source 1..20: mol_type = other DNA
aaagaggcttcaggcttctc

SEQ ID NO: 90931 - DNA, 20 bp, synthetic construct
  source 1..20: mol_type = other DNA
aaaagaggcttcaggcttct

SEQ ID NO: 90932 - DNA, 20 bp, synthetic construct
  source 1..20: mol_type = other DNA
taaaagaggcttcaggcttc

SEQ ID NO: 90933 - DNA, 20 bp, synthetic construct
  source 1..20: mol_type = other DNA
ctaaaagaggcttcaggctt

SEQ ID NO: 90934 - DNA, 20 bp, synthetic construct
  source 1..20: mol_type = other DNA
cctaaaagaggcttcaggct

SEQ ID NO: 90935 - DNA, 20 bp, synthetic construct
  source 1..20: mol_type = other DNA
tcctaaaagaggcttcaggc

SEQ ID NO: 90936 - DNA, 20 bp, synthetic construct
  source 1..20: mol_type = other DNA
ttcctaaaagaggcttcagg

SEQ ID NO: 90937 - DNA, 20 bp, synthetic construct
  source 1..20: mol_type = other DNA
cttcctaaaagaggcttcag

SEQ ID NO: 90938 - DNA, 20 bp, synthetic construct
  source 1..20: mol_type = other DNA
acttcctaaaagaggcttca

SEQ ID NO: 90939 - DNA, 20 bp, synthetic construct
  source 1..20: mol_type = other DNA
tacttcctaaaagaggcttc

SEQ ID NO: 90940 - DNA, 20 bp, synthetic construct
  source 1..20: mol_type = other DNA
ttacttcctaaaagaggctt

SEQ ID NO: 90941 - DNA, 20 bp, synthetic construct
  source 1..20: mol_type = other DNA
gttacttcctaaaagaggct

SEQ ID NO: 90942 - DNA, 20 bp, synthetic construct
  source 1..20: mol_type = other DNA
tgttacttcctaaaagaggc

SEQ ID NO: 90943 - DNA, 20 bp, synthetic construct
  source 1..20: mol_type = other DNA
atgttacttcctaaaagagg

SEQ ID NO: 90944 - DNA, 20 bp, synthetic construct
  source 1..20: mol_type = other DNA
aatgttacttcctaaaagag

SEQ ID NO: 90945 - DNA, 20 bp, synthetic construct
  source 1..20: mol_type = other DNA
aaatgttacttcctaaaaga

SEQ ID NO: 90946 - DNA, 20 bp, synthetic construct
  source 1..20: mol_type = other DNA
caaatgttacttcctaaaag

SEQ ID NO: 90947 - DNA, 20 bp, synthetic construct
  source 1..20: mol_type = other DNA
tcaaatgttacttcctaaaa

SEQ ID NO: 90948 - DNA, 20 bp, synthetic construct
  source 1..20: mol_type = other DNA
ttcaaatgttacttcctaaa

SEQ ID NO: 90949 - DNA, 20 bp, synthetic construct
  source 1..20: mol_type = other DNA
gttcaaatgttacttcctaa

SEQ ID NO: 90950 - DNA, 20 bp, synthetic construct
  source 1..20: mol_type = other DNA
agttcaaatgttacttccta

SEQ ID NO: 90951 - DNA, 20 bp, synthetic construct
  source 1..20: mol_type = other DNA
cagttcaaatgttacttcct

SEQ ID NO: 90952 - DNA, 20 bp, synthetic construct
  source 1..20: mol_type = other DNA
tcagttcaaatgttacttcc

SEQ ID NO: 90953 - DNA, 20 bp, synthetic construct
  source 1..20: mol_type = other DNA
ctcagttcaaatgttacttc

SEQ ID NO: 90954 - DNA, 20 bp, synthetic construct
  source 1..20: mol_type = other DNA
tctcagttcaaatgttactt

SEQ ID NO: 90955 - DNA, 20 bp, synthetic construct
  source 1..20: mol_type = other DNA
ttctcagttcaaatgttact

SEQ ID NO: 90956 - DNA, 20 bp, synthetic construct
  source 1..20: mol_type = other DNA
attctcagttcaaatgttac

SEQ ID NO: 90957 - DNA, 20 bp, synthetic construct
  source 1..20: mol_type = other DNA
cattctcagttcaaatgtta

SEQ ID NO: 90958 - DNA, 20 bp, synthetic construct
  source 1..20: mol_type = other DNA
acattctcagttcaaatgtt

SEQ ID NO: 90959 - DNA, 20 bp, synthetic construct
  source 1..20: mol_type = other DNA
tacattctcagttcaaatgt

SEQ ID NO: 90960 - DNA, 20 bp, synthetic construct
  source 1..20: mol_type = other DNA
ttacattctcagttcaaatg

SEQ ID NO: 90961 - DNA, 20 bp, synthetic construct
  source 1..20: mol_type = other DNA
attacattctcagttcaaat

SEQ ID NO: 90962 - DNA, 20 bp, synthetic construct
  source 1..20: mol_type = other DNA
tattacattctcagttcaaa

SEQ ID NO: 90963 - DNA, 20 bp, synthetic construct
  source 1..20: mol_type = other DNA
ttattacattctcagttcaa

SEQ ID NO: 90964 - DNA, 20 bp, synthetic construct
  source 1..20: mol_type = other DNA
tttattacattctcagttca

SEQ ID NO: 90965 - DNA, 20 bp, synthetic construct
  source 1..20: mol_type = other DNA
atttattacattctcagttc

SEQ ID NO: 90966 - DNA, 20 bp, synthetic construct
  source 1..20: mol_type = other DNA
tatttattacattctcagtt

SEQ ID NO: 90967 - DNA, 20 bp, synthetic construct
  source 1..20: mol_type = other DNA
gtatttattacattctcagt

SEQ ID NO: 90968 - DNA, 20 bp, synthetic construct
  source 1..20: mol_type = other DNA
tgtatttattacattctcag

SEQ ID NO: 90969 - DNA, 20 bp, synthetic construct
  source 1..20: mol_type = other DNA
atgtatttattacattctca

SEQ ID NO: 90970 - DNA, 20 bp, synthetic construct
  source 1..20: mol_type = other DNA
aatgtatttattacattctc

SEQ ID NO: 90971 - DNA, 20 bp, synthetic construct
  source 1..20: mol_type = other DNA
aaatgtatttattacattct

SEQ ID NO: 90972 - DNA, 20 bp, synthetic construct
  source 1..20: mol_type = other DNA
aaaatgtatttattacattc

SEQ ID NO: 90973 - DNA, 20 bp, synthetic construct
  source 1..20: mol_type = other DNA
gaaaatgtatttattacatt

SEQ ID NO: 90974 - DNA, 20 bp, synthetic construct
  source 1..20: mol_type = other DNA
ggaaaatgtatttattacat

SEQ ID NO: 90975 - DNA, 20 bp, synthetic construct
  source 1..20: mol_type = other DNA
gggaaaatgtatttattaca

SEQ ID NO: 90976 - DNA, 20 bp, synthetic construct
  source 1..20: mol_type = other DNA
agggaaaatgtatttattac

SEQ ID NO: 90977 - DNA, 20 bp, synthetic construct
  source 1..20: mol_type = other DNA
aagggaaaatgtatttatta

SEQ ID NO: 90978 - DNA, 20 bp, synthetic construct
  source 1..20: mol_type = other DNA
aaagggaaaatgtatttatt

SEQ ID NO: 90979 - DNA, 20 bp, synthetic construct
  source 1..20: mol_type = other DNA
gaaagggaaaatgtatttat

SEQ ID NO: 90980 - DNA, 20 bp, synthetic construct
  source 1..20: mol_type = other DNA
agaaagggaaaatgtattta

SEQ ID NO: 90981 - DNA, 20 bp, synthetic construct
  source 1..20: mol_type = other DNA
aagaaagggaaaatgtattt

SEQ ID NO: 90982 - DNA, 20 bp, synthetic construct
  source 1..20: mol_type = other DNA
gaagaaagggaaaatgtatt

SEQ ID NO: 90983 - DNA, 20 bp, synthetic construct
  source 1..20: mol_type = other DNA
agaagaaagggaaaatgtat

SEQ ID NO: 90984 - DNA, 20 bp, synthetic construct
  source 1..20: mol_type = other DNA
tagaagaaagggaaaatgta

SEQ ID NO: 90985 - DNA, 20 bp, synthetic construct
  source 1..20: mol_type = other DNA
ctagaagaaagggaaaatgt

SEQ ID NO: 90986 - DNA, 20 bp, synthetic construct
  source 1..20: mol_type = other DNA
actagaagaaagggaaaatg

SEQ ID NO: 90987 - DNA, 20 bp, synthetic construct
  source 1..20: mol_type = other DNA
aactagaagaaagggaaaat

SEQ ID NO: 90988 - DNA, 20 bp, synthetic construct
  source 1..20: mol_type = other DNA
gaactagaagaaagggaaaa

SEQ ID NO: 90989 - DNA, 20 bp, synthetic construct
  source 1..20: mol_type = other DNA
ggaactagaagaaagggaaa

SEQ ID NO: 90990 - DNA, 20 bp, synthetic construct
  source 1..20: mol_type = other DNA
tggaactagaagaaagggaa

SEQ ID NO: 90991 - DNA, 20 bp, synthetic construct
  source 1..20: mol_type = other DNA
ttggaactagaagaaaggga

SEQ ID NO: 90992 - DNA, 20 bp, synthetic construct
  source 1..20: mol_type = other DNA
cttggaactagaagaaaggg

SEQ ID NO: 90993 - DNA, 20 bp, synthetic construct
  source 1..20: mol_type = other DNA
tcttggaactagaagaaagg

SEQ ID NO: 90994 - DNA, 20 bp, synthetic construct
  source 1..20: mol_type = other DNA
atcttggaactagaagaaag

SEQ ID NO: 90995 - DNA, 20 bp, synthetic construct
  source 1..20: mol_type = other DNA
aatcttggaactagaagaaa

SEQ ID NO: 90996 - DNA, 20 bp, synthetic construct
  source 1..20: mol_type = other DNA
taatcttggaactagaagaa

SEQ ID NO: 90997 - DNA, 20 bp, synthetic construct
  source 1..20: mol_type = other DNA
ataatcttggaactagaaga

SEQ ID NO: 90998 - DNA, 20 bp, synthetic construct
  source 1..20: mol_type = other DNA
gataatcttggaactagaag

SEQ ID NO: 90999 - DNA, 20 bp, synthetic construct
  source 1..20: mol_type = other DNA
ggataatcttggaactagaa

SEQ ID NO: 91000 - DNA, 20 bp, synthetic construct
  source 1..20: mol_type = other DNA
gggataatcttggaactaga

SEQ ID NO: 91001 - DNA, 20 bp, synthetic construct
  source 1..20: mol_type = other DNA
ggggataatcttggaactag

SEQ ID NO: 91002 - DNA, 20 bp, synthetic construct
  source 1..20: mol_type = other DNA
aggggataatcttggaacta

SEQ ID NO: 91003 - DNA, 20 bp, synthetic construct
  source 1..20: mol_type = other DNA
taggggataatcttggaact

SEQ ID NO: 91004 - DNA, 20 bp, synthetic construct
  source 1..20: mol_type = other DNA
ttaggggataatcttggaac

SEQ ID NO: 91005 - DNA, 20 bp, synthetic construct
  source 1..20: mol_type = other DNA
tttaggggataatcttggaa

SEQ ID NO: 91006 - DNA, 20 bp, synthetic construct
  source 1..20: mol_type = other DNA
ttttaggggataatcttgga

SEQ ID NO: 91007 - DNA, 20 bp, synthetic construct
  source 1..20: mol_type = other DNA
gttttaggggataatcttgg

SEQ ID NO: 91008 - DNA, 20 bp, synthetic construct
  source 1..20: mol_type = other DNA
agttttaggggataatcttg

SEQ ID NO: 91009 - DNA, 20 bp, synthetic construct
  source 1..20: mol_type = other DNA
gagttttaggggataatctt

SEQ ID NO: 91010 - DNA, 20 bp, synthetic construct
  source 1..20: mol_type = other DNA
tgagttttaggggataatct

SEQ ID NO: 91011 - DNA, 20 bp, synthetic construct
  source 1..20: mol_type = other DNA
atgagttttaggggataatc

SEQ ID NO: 91012 - DNA, 20 bp, synthetic construct
  source 1..20: mol_type = other DNA
tatgagttttaggggataat

SEQ ID NO: 91013 - DNA, 20 bp, synthetic construct
  source 1..20: mol_type = other DNA
ctatgagttttaggggataa

SEQ ID NO: 91014 - DNA, 20 bp, synthetic construct
  source 1..20: mol_type = other DNA
tctatgagttttaggggata

SEQ ID NO: 91015 - DNA, 20 bp, synthetic construct
  source 1..20: mol_type = other DNA
gtctatgagttttaggggat

SEQ ID NO: 91016 - DNA, 20 bp, synthetic construct
  source 1..20: mol_type = other DNA
ggtctatgagttttagggga

SEQ ID NO: 91017 - DNA, 20 bp, synthetic construct
  source 1..20: mol_type = other DNA
gggtctatgagttttagggg

SEQ ID NO: 91018 - DNA, 20 bp, synthetic construct
  source 1..20: mol_type = other DNA
tgggtctatgagttttaggg

SEQ ID NO: 91019 - DNA, 20 bp, synthetic construct
  source 1..20: mol_type = other DNA
ctgggtctatgagttttagg

SEQ ID NO: 91020 - DNA, 20 bp, synthetic construct
  source 1..20: mol_type = other DNA
cctgggtctatgagttttag

SEQ ID NO: 91021 - DNA, 20 bp, synthetic construct
  source 1..20: mol_type = other DNA
acctgggtctatgagtttta

SEQ ID NO: 91022 - DNA, 20 bp, synthetic construct
  source 1..20: mol_type = other DNA
gacctgggtctatgagtttt

SEQ ID NO: 91023 - DNA, 20 bp, synthetic construct
  source 1..20: mol_type = other DNA
agacctgggtctatgagttt

SEQ ID NO: 91024 - DNA, 20 bp, synthetic construct
  source 1..20: mol_type = other DNA
gagacctgggtctatgagtt

SEQ ID NO: 91025 - DNA, 20 bp, synthetic construct
  source 1..20: mol_type = other DNA
ggagacctgggtctatgagt

SEQ ID NO: 91026 - DNA, 20 bp, synthetic construct
  source 1..20: mol_type = other DNA
gggagacctgggtctatgag

SEQ ID NO: 91027 - DNA, 20 bp, synthetic construct
  source 1..20: mol_type = other DNA
tgggagacctgggtctatga

SEQ ID NO: 91028 - DNA, 20 bp, synthetic construct
  source 1..20: mol_type = other DNA
ctgggagacctgggtctatg

SEQ ID NO: 91029 - DNA, 20 bp, synthetic construct
  source 1..20: mol_type = other DNA
tctgggagacctgggtctat

SEQ ID NO: 91030 - DNA, 20 bp, synthetic construct
  source 1..20: mol_type = other DNA
gtctgggagacctgggtcta

SEQ ID NO: 91031 - DNA, 20 bp, synthetic construct
  source 1..20: mol_type = other DNA
tgtctgggagacctgggtct

SEQ ID NO: 91032 - DNA, 20 bp, synthetic construct
  source 1..20: mol_type = other DNA
ctgtctgggagacctgggtc

SEQ ID NO: 91033 - DNA, 20 bp, synthetic construct
  source 1..20: mol_type = other DNA
tctgtctgggagacctgggt

SEQ ID NO: 91034 - DNA, 20 bp, synthetic construct
  source 1..20: mol_type = other DNA
ttctgtctgggagacctggg

SEQ ID NO: 91035 - DNA, 20 bp, synthetic construct
  source 1..20: mol_type = other DNA
gttctgtctgggagacctgg

SEQ ID NO: 91036 - DNA, 20 bp, synthetic construct
  source 1..20: mol_type = other DNA
tgttctgtctgggagacctg

SEQ ID NO: 91037 - DNA, 20 bp, synthetic construct
  source 1..20: mol_type = other DNA
ctgttctgtctgggagacct

SEQ ID NO: 91038 - DNA, 20 bp, synthetic construct
  source 1..20: mol_type = other DNA
actgttctgtctgggagacc

SEQ ID NO: 91039 - DNA, 20 bp, synthetic construct
  source 1..20: mol_type = other DNA
tactgttctgtctgggagac

SEQ ID NO: 91040 - DNA, 20 bp, synthetic construct
  source 1..20: mol_type = other DNA
atactgttctgtctgggaga

SEQ ID NO: 91041 - DNA, 20 bp, synthetic construct
  source 1..20: mol_type = other DNA
aatactgttctgtctgggag

SEQ ID NO: 91042 - DNA, 20 bp, synthetic construct
  source 1..20: mol_type = other DNA
caatactgttctgtctggga

SEQ ID NO: 91043 - DNA, 20 bp, synthetic construct
  source 1..20: mol_type = other DNA
ccaatactgttctgtctggg

SEQ ID NO: 91044 - DNA, 20 bp, synthetic construct
  source 1..20: mol_type = other DNA
tccaatactgttctgtctgg

SEQ ID NO: 91045 - DNA, 20 bp, synthetic construct
  source 1..20: mol_type = other DNA
ttccaatactgttctgtctg

SEQ ID NO: 91046 - DNA, 20 bp, synthetic construct
  source 1..20: mol_type = other DNA
tttccaatactgttctgtct

SEQ ID NO: 91047 - DNA, 20 bp, synthetic construct
  source 1..20: mol_type = other DNA
atttccaatactgttctgtc

SEQ ID NO: 91048 - DNA, 20 bp, synthetic construct
  source 1..20: mol_type = other DNA
tatttccaatactgttctgt

SEQ ID NO: 91049 - DNA, 20 bp, synthetic construct
  source 1..20: mol_type = other DNA
gtatttccaatactgttctg

SEQ ID NO: 91050 - DNA, 20 bp, synthetic construct
  source 1..20: mol_type = other DNA
ggtatttccaatactgttct

SEQ ID NO: 91051 - DNA, 20 bp, synthetic construct
  source 1..20: mol_type = other DNA
gggtatttccaatactgttc

SEQ ID NO: 91052 - DNA, 20 bp, synthetic construct
  source 1..20: mol_type = other DNA
ggggtatttccaatactgtt

SEQ ID NO: 91053 - DNA, 20 bp, synthetic construct
  source 1..20: mol_type = other DNA
gggggtatttccaatactgt

SEQ ID NO: 91054 - DNA, 20 bp, synthetic construct
  source 1..20: mol_type = other DNA
tgggggtatttccaatactg

SEQ ID NO: 91055 - DNA, 20 bp, synthetic construct
  source 1..20: mol_type = other DNA
ctgggggtatttccaatact

SEQ ID NO: 91056 - DNA, 20 bp, synthetic construct
  source 1..20: mol_type = other DNA
actgggggtatttccaatac

SEQ ID NO: 91057 - DNA, 20 bp, synthetic construct
  source 1..20: mol_type = other DNA
cactgggggtatttccaata

SEQ ID NO: 91058 - DNA, 20 bp, synthetic construct
  source 1..20: mol_type = other DNA
ccactgggggtatttccaat

SEQ ID NO: 91059 - DNA, 20 bp, synthetic construct
  source 1..20: mol_type = other DNA
cccactgggggtatttccaa

SEQ ID NO: 91060 - DNA, 20 bp, synthetic construct
  source 1..20: mol_type = other DNA
gcccactgggggtatttcca

SEQ ID NO: 91061 - DNA, 20 bp, synthetic construct
  source 1..20: mol_type = other DNA
ggcccactgggggtatttcc

SEQ ID NO: 91062 - DNA, 20 bp, synthetic construct
  source 1..20: mol_type = other DNA
tggcccactgggggtatttc

SEQ ID NO: 91063 - DNA, 20 bp, synthetic construct
  source 1..20: mol_type = other DNA
ctggcccactgggggtattt

SEQ ID NO: 91064 - DNA, 20 bp, synthetic construct
  source 1..20: mol_type = other DNA
actggcccactgggggtatt

SEQ ID NO: 91065 - DNA, 20 bp, synthetic construct
  source 1..20: mol_type = other DNA
aactggcccactgggggtat

SEQ ID NO: 91066 - DNA, 20 bp, synthetic construct
  source 1..20: mol_type = other DNA
gaactggcccactgggggta

SEQ ID NO: 91067 - DNA, 20 bp, synthetic construct
  source 1..20: mol_type = other DNA
agaactggcccactgggggt

SEQ ID NO: 91068 - DNA, 20 bp, synthetic construct
  source 1..20: mol_type = other DNA
aagaactggcccactggggg

SEQ ID NO: 91069 - DNA, 20 bp, synthetic construct
  source 1..20: mol_type = other DNA
caagaactggcccactgggg

SEQ ID NO: 91070 - DNA, 20 bp, synthetic construct
  source 1..20: mol_type = other DNA
gcaagaactggcccactggg

SEQ ID NO: 91071 - DNA, 20 bp, synthetic construct
  source 1..20: mol_type = other DNA
agcaagaactggcccactgg

SEQ ID NO: 91072 - DNA, 20 bp, synthetic construct
  source 1..20: mol_type = other DNA
aagcaagaactggcccactg

SEQ ID NO: 91073 - DNA, 20 bp, synthetic construct
  source 1..20: mol_type = other DNA
gaagcaagaactggcccact

SEQ ID NO: 91074 - DNA, 20 bp, synthetic construct
  source 1..20: mol_type = other DNA
agaagcaagaactggcccac

SEQ ID NO: 91075 - DNA, 20 bp, synthetic construct
  source 1..20: mol_type = other DNA
gagaagcaagaactggccca

SEQ ID NO: 91076 - DNA, 20 bp, synthetic construct
  source 1..20: mol_type = other DNA
ggagaagcaagaactggccc

SEQ ID NO: 91077 - DNA, 20 bp, synthetic construct
  source 1..20: mol_type = other DNA
gggagaagcaagaactggcc

SEQ ID NO: 91078 - DNA, 20 bp, synthetic construct
  source 1..20: mol_type = other DNA
ggggagaagcaagaactggc

SEQ ID NO: 91079 - DNA, 20 bp, synthetic construct
  source 1..20: mol_type = other DNA
tggggagaagcaagaactgg

SEQ ID NO: 91080 - DNA, 20 bp, synthetic construct
  source 1..20: mol_type = other DNA
ttggggagaagcaagaactg

SEQ ID NO: 91081 - DNA, 20 bp, synthetic construct
  source 1..20: mol_type = other DNA
cttggggagaagcaagaact

SEQ ID NO: 91082 - DNA, 20 bp, synthetic construct
  source 1..20: mol_type = other DNA
gcttggggagaagcaagaac

SEQ ID NO: 91083 - DNA, 20 bp, synthetic construct
  source 1..20: mol_type = other DNA
agcttggggagaagcaagaa

SEQ ID NO: 91084 - DNA, 20 bp, synthetic construct
  source 1..20: mol_type = other DNA
cagcttggggagaagcaaga

SEQ ID NO: 91085 - DNA, 20 bp, synthetic construct
  source 1..20: mol_type = other DNA
ccagcttggggagaagcaag

SEQ ID NO: 91086 - DNA, 20 bp, synthetic construct
  source 1..20: mol_type = other DNA
accagcttggggagaagcaa

SEQ ID NO: 91087 - DNA, 20 bp, synthetic construct
  source 1..20: mol_type = other DNA
taccagcttggggagaagca

SEQ ID NO: 91088 - DNA, 20 bp, synthetic construct
  source 1..20: mol_type = other DNA
ataccagcttggggagaagc

SEQ ID NO: 91089 - DNA, 20 bp, synthetic construct
  source 1..20: mol_type = other DNA
aataccagcttggggagaag

SEQ ID NO: 91090 - DNA, 20 bp, synthetic construct
  source 1..20: mol_type = other DNA
taataccagcttggggagaa

SEQ ID NO: 91091 - DNA, 20 bp, synthetic construct
  source 1..20: mol_type = other DNA
ataataccagcttggggaga

SEQ ID NO: 91092 - DNA, 20 bp, synthetic construct
  source 1..20: mol_type = other DNA
aataataccagcttggggag

SEQ ID NO: 91093 - DNA, 20 bp, synthetic construct
  source 1..20: mol_type = other DNA
gaataataccagcttgggga

SEQ ID NO: 91094 - DNA, 20 bp, synthetic construct
  source 1..20: mol_type = other DNA
ggaataataccagcttgggg

SEQ ID NO: 91095 - DNA, 20 bp, synthetic construct
  source 1..20: mol_type = other DNA
tggaataataccagcttggg

SEQ ID NO: 91096 - DNA, 20 bp, synthetic construct
  source 1..20: mol_type = other DNA
ttggaataataccagcttgg

SEQ ID NO: 91097 - DNA, 20 bp, synthetic construct
  source 1..20: mol_type = other DNA
gttggaataataccagcttg

SEQ ID NO: 91098 - DNA, 20 bp, synthetic construct
  source 1..20: mol_type = other DNA
agttggaataataccagctt

SEQ ID NO: 91099 - DNA, 20 bp, synthetic construct
  source 1..20: mol_type = other DNA
cagttggaataataccagct

SEQ ID NO: 91100 - DNA, 20 bp, synthetic construct
  source 1..20: mol_type = other DNA
tcagttggaataataccagc

SEQ ID NO: 91101 - DNA, 20 bp, synthetic construct
  source 1..20: mol_type = other DNA
ttcagttggaataataccag

SEQ ID NO: 91102 - DNA, 20 bp, synthetic construct
  source 1..20: mol_type = other DNA
cttcagttggaataatacca

SEQ ID NO: 91103 - DNA, 20 bp, synthetic construct
  source 1..20: mol_type = other DNA
gcttcagttggaataatacc

SEQ ID NO: 91104 - DNA, 20 bp, synthetic construct
  source 1..20: mol_type = other DNA
agcttcagttggaataatac

SEQ ID NO: 91105 - DNA, 20 bp, synthetic construct
  source 1..20: mol_type = other DNA
cagcttcagttggaataata

SEQ ID NO: 91106 - DNA, 20 bp, synthetic construct
  source 1..20: mol_type = other DNA
acagcttcagttggaataat

SEQ ID NO: 91107 - DNA, 20 bp, synthetic construct
  source 1..20: mol_type = other DNA
aacagcttcagttggaataa

SEQ ID NO: 91108 - DNA, 20 bp, synthetic construct
  source 1..20: mol_type = other DNA
caacagcttcagttggaata

SEQ ID NO: 91109 - DNA, 20 bp, synthetic construct
  source 1..20: mol_type = other DNA
gcaacagcttcagttggaat

SEQ ID NO: 91110 - DNA, 20 bp, synthetic construct
  source 1..20: mol_type = other DNA
ggcaacagcttcagttggaa

SEQ ID NO: 91111 - DNA, 20 bp, synthetic construct
  source 1..20: mol_type = other DNA
tggcaacagcttcagttgga

SEQ ID NO: 91112 - DNA, 20 bp, synthetic construct
  source 1..20: mol_type = other DNA
atggcaacagcttcagttgg

SEQ ID NO: 91113 - DNA, 20 bp, synthetic construct
  source 1..20: mol_type = other DNA
catggcaacagcttcagttg

SEQ ID NO: 91114 - DNA, 20 bp, synthetic construct
  source 1..20: mol_type = other DNA
gcatggcaacagcttcagtt

SEQ ID NO: 91115 - DNA, 20 bp, synthetic construct
  source 1..20: mol_type = other DNA
ggcatggcaacagcttcagt

SEQ ID NO: 91116 - DNA, 20 bp, synthetic construct
  source 1..20: mol_type = other DNA
aggcatggcaacagcttcag

SEQ ID NO: 91117 - DNA, 20 bp, synthetic construct
  source 1..20: mol_type = other DNA
taggcatggcaacagcttca

SEQ ID NO: 91118 - DNA, 20 bp, synthetic construct
  source 1..20: mol_type = other DNA
ataggcatggcaacagcttc

SEQ ID NO: 91119 - DNA, 20 bp, synthetic construct
  source 1..20: mol_type = other DNA
aataggcatggcaacagctt

SEQ ID NO: 91120 - DNA, 20 bp, synthetic construct
  source 1..20: mol_type = other DNA
gaataggcatggcaacagct

SEQ ID NO: 91121 - DNA, 20 bp, synthetic construct
  source 1..20: mol_type = other DNA
ggaataggcatggcaacagc

SEQ ID NO: 91122 - DNA, 20 bp, synthetic construct
  source 1..20: mol_type = other DNA
tggaataggcatggcaacag

SEQ ID NO: 91123 - DNA, 20 bp, synthetic construct
  source 1..20: mol_type = other DNA
ctggaataggcatggcaaca

SEQ ID NO: 91124 - DNA, 20 bp, synthetic construct
  source 1..20: mol_type = other DNA
gctggaataggcatggcaac

SEQ ID NO: 91125 - DNA, 20 bp, synthetic construct
  source 1..20: mol_type = other DNA
agctggaataggcatggcaa

SEQ ID NO: 91126 - DNA, 20 bp, synthetic construct
  source 1..20: mol_type = other DNA
cagctggaataggcatggca

SEQ ID NO: 91127 - DNA, 20 bp, synthetic construct
  source 1..20: mol_type = other DNA
gcagctggaataggcatggc

SEQ ID NO: 91128 - DNA, 20 bp, synthetic construct
  source 1..20: mol_type = other DNA
tgcagctggaataggcatgg

SEQ ID NO: 91129 - DNA, 20 bp, synthetic construct
  source 1..20: mol_type = other DNA
atgcagctggaataggcatg

SEQ ID NO: 91130 - DNA, 20 bp, synthetic construct
  source 1..20: mol_type = other DNA
gatgcagctggaataggcat

SEQ ID NO: 91131 - DNA, 20 bp, synthetic construct
  source 1..20: mol_type = other DNA
agatgcagctggaataggca

SEQ ID NO: 91132 - DNA, 20 bp, synthetic construct
  source 1..20: mol_type = other DNA
gagatgcagctggaataggc

SEQ ID NO: 91133 - DNA, 20 bp, synthetic construct
  source 1..20: mol_type = other DNA
ggagatgcagctggaatagg

SEQ ID NO: 91134 - DNA, 20 bp, synthetic construct
  source 1..20: mol_type = other DNA
aggagatgcagctggaatag

SEQ ID NO: 91135 - DNA, 20 bp, synthetic construct
  source 1..20: mol_type = other DNA
taggagatgcagctggaata

SEQ ID NO: 91136 - DNA, 20 bp, synthetic construct
  source 1..20: mol_type = other DNA
gtaggagatgcagctggaat

SEQ ID NO: 91137 - DNA, 20 bp, synthetic construct
  source 1..20: mol_type = other DNA
cgtaggagatgcagctggaa

SEQ ID NO: 91138 - DNA, 20 bp, synthetic construct
  source 1..20: mol_type = other DNA
gcgtaggagatgcagctgga

SEQ ID NO: 91139 - DNA, 20 bp, synthetic construct
  source 1..20: mol_type = other DNA
ggcgtaggagatgcagctgg

SEQ ID NO: 91140 - DNA, 20 bp, synthetic construct
  source 1..20: mol_type = other DNA
aggcgtaggagatgcagctg

SEQ ID NO: 91141 - DNA, 20 bp, synthetic construct
  source 1..20: mol_type = other DNA
caggcgtaggagatgcagct

SEQ ID NO: 91142 - DNA, 20 bp, synthetic construct
  source 1..20: mol_type = other DNA
gcaggcgtaggagatgcagc

SEQ ID NO: 91143 - DNA, 20 bp, synthetic construct
  source 1..20: mol_type = other DNA
agcaggcgtaggagatgcag

SEQ ID NO: 91144 - DNA, 20 bp, synthetic construct
  source 1..20: mol_type = other DNA
tagcaggcgtaggagatgca

SEQ ID NO: 91145 - DNA, 20 bp, synthetic construct
  source 1..20: mol_type = other DNA
ctagcaggcgtaggagatgc

SEQ ID NO: 91146 - DNA, 20 bp, synthetic construct
  source 1..20: mol_type = other DNA
actagcaggcgtaggagatg

SEQ ID NO: 91147 - DNA, 20 bp, synthetic construct
  source 1..20: mol_type = other DNA
gactagcaggcgtaggagat

SEQ ID NO: 91148 - DNA, 20 bp, synthetic construct
  source 1..20: mol_type = other DNA
ggactagcaggcgtaggaga

SEQ ID NO: 91149 - DNA, 20 bp, synthetic construct
  source 1..20: mol_type = other DNA
aggactagcaggcgtaggag

SEQ ID NO: 91150 - DNA, 20 bp, synthetic construct
  source 1..20: mol_type = other DNA
caggactagcaggcgtagga

SEQ ID NO: 91151 - DNA, 20 bp, synthetic construct
  source 1..20: mol_type = other DNA
gcaggactagcaggcgtagg

SEQ ID NO: 91152 - DNA, 20 bp, synthetic construct
  source 1..20: mol_type = other DNA
tgcaggactagcaggcgtag

SEQ ID NO: 91153 - DNA, 20 bp, synthetic construct
  source 1..20: mol_type = other DNA
atgcaggactagcaggcgta

SEQ ID NO: 91154 - DNA, 20 bp, synthetic construct
  source 1..20: mol_type = other DNA
gatgcaggactagcaggcgt

SEQ ID NO: 91155 - DNA, 20 bp, synthetic construct
  source 1..20: mol_type = other DNA
cgatgcaggactagcaggcg

SEQ ID NO: 91156 - DNA, 20 bp, synthetic construct
  source 1..20: mol_type = other DNA
tcgatgcaggactagcaggc

SEQ ID NO: 91157 - DNA, 20 bp, synthetic construct
  source 1..20: mol_type = other DNA
ttcgatgcaggactagcagg

SEQ ID NO: 91158 - DNA, 20 bp, synthetic construct
  source 1..20: mol_type = other DNA
gttcgatgcaggactagcag

SEQ ID NO: 91159 - DNA, 20 bp, synthetic construct
  source 1..20: mol_type = other DNA
tgttcgatgcaggactagca

SEQ ID NO: 91160 - DNA, 20 bp, synthetic construct
  source 1..20: mol_type = other DNA
ctgttcgatgcaggactagc

SEQ ID NO: 91161 - DNA, 20 bp, synthetic construct
  source 1..20: mol_type = other DNA
tctgttcgatgcaggactag

SEQ ID NO: 91162 - DNA, 20 bp, synthetic construct
  source 1..20: mol_type = other DNA
ctctgttcgatgcaggacta

SEQ ID NO: 91163 - DNA, 20 bp, synthetic construct
  source 1..20: mol_type = other DNA
gctctgttcgatgcaggact

SEQ ID NO: 91164 - DNA, 20 bp, synthetic construct
  source 1..20: mol_type = other DNA
agctctgttcgatgcaggac

SEQ ID NO: 91165 - DNA, 20 bp, synthetic construct
  source 1..20: mol_type = other DNA
cagctctgttcgatgcagga

SEQ ID NO: 91166 - DNA, 20 bp, synthetic construct
  source 1..20: mol_type = other DNA
acagctctgttcgatgcagg

SEQ ID NO: 91167 - DNA, 20 bp, synthetic construct
  source 1..20: mol_type = other DNA
aacagctctgttcgatgcag

SEQ ID NO: 91168 - DNA, 20 bp, synthetic construct
  source 1..20: mol_type = other DNA
taacagctctgttcgatgca

SEQ ID NO: 91169 - DNA, 20 bp, synthetic construct
  source 1..20: mol_type = other DNA
gtaacagctctgttcgatgc

SEQ ID NO: 91170 - DNA, 20 bp, synthetic construct
  source 1..20: mol_type = other DNA
ggtaacagctctgttcgatg

SEQ ID NO: 91171 - DNA, 20 bp, synthetic construct
  source 1..20: mol_type = other DNA
gggtaacagctctgttcgat

SEQ ID NO: 91172 - DNA, 20 bp, synthetic construct
  source 1..20: mol_type = other DNA
ggggtaacagctctgttcga

SEQ ID NO: 91173 - DNA, 20 bp, synthetic construct
  source 1..20: mol_type = other DNA
aggggtaacagctctgttcg

SEQ ID NO: 91174 - DNA, 20 bp, synthetic construct
  source 1..20: mol_type = other DNA
aaggggtaacagctctgttc

SEQ ID NO: 91175 - DNA, 20 bp, synthetic construct
  source 1..20: mol_type = other DNA
gaaggggtaacagctctgtt

SEQ ID NO: 91176 - DNA, 20 bp, synthetic construct
  source 1..20: mol_type = other DNA
agaaggggtaacagctctgt

SEQ ID NO: 91177 - DNA, 20 bp, synthetic construct
  source 1..20: mol_type = other DNA
tagaaggggtaacagctctg

SEQ ID NO: 91178 - DNA, 20 bp, synthetic construct
  source 1..20: mol_type = other DNA
ctagaaggggtaacagctct

SEQ ID NO: 91179 - DNA, 20 bp, synthetic construct
  source 1..20: mol_type = other DNA
actagaaggggtaacagctc

SEQ ID NO: 91180 - DNA, 20 bp, synthetic construct
  source 1..20: mol_type = other DNA
cactagaaggggtaacagct

SEQ ID NO: 91181 - DNA, 20 bp, synthetic construct
  source 1..20: mol_type = other DNA
tcactagaaggggtaacagc

SEQ ID NO: 91182 - DNA, 20 bp, synthetic construct
  source 1..20: mol_type = other DNA
ctcactagaaggggtaacag

SEQ ID NO: 91183 - DNA, 20 bp, synthetic construct
  source 1..20: mol_type = other DNA
cctcactagaaggggtaaca

SEQ ID NO: 91184 - DNA, 20 bp, synthetic construct
  source 1..20: mol_type = other DNA
ccctcactagaaggggtaac

SEQ ID NO: 91185 - DNA, 20 bp, synthetic construct
  source 1..20: mol_type = other DNA
accctcactagaaggggtaa

SEQ ID NO: 91186 - DNA, 20 bp, synthetic construct
  source 1..20: mol_type = other DNA
taccctcactagaaggggta

SEQ ID NO: 91187 - DNA, 20 bp, synthetic construct
  source 1..20: mol_type = other DNA
ataccctcactagaaggggt

SEQ ID NO: 91188 - DNA, 20 bp, synthetic construct
  source 1..20: mol_type = other DNA
cataccctcactagaagggg

SEQ ID NO: 91189 - DNA, 20 bp, synthetic construct
  source 1..20: mol_type = other DNA
acataccctcactagaaggg

SEQ ID NO: 91190 - DNA, 20 bp, synthetic construct
  source 1..20: mol_type = other DNA
tacataccctcactagaagg

SEQ ID NO: 91191 - DNA, 20 bp, synthetic construct
  source 1..20: mol_type = other DNA
ttacataccctcactagaag

SEQ ID NO: 91192 - DNA, 20 bp, synthetic construct
  source 1..20: mol_type = other DNA
gttacataccctcactagaa

SEQ ID NO: 91193 - DNA, 20 bp, synthetic construct
  source 1..20: mol_type = other DNA
tgttacataccctcactaga

SEQ ID NO: 91194 - DNA, 20 bp, synthetic construct
  source 1..20: mol_type = other DNA
ttgttacataccctcactag

SEQ ID NO: 91195 - DNA, 20 bp, synthetic construct
  source 1..20: mol_type = other DNA
tttgttacataccctcacta

SEQ ID NO: 91196 - DNA, 20 bp, synthetic construct
  source 1..20: mol_type = other DNA
ctttgttacataccctcact

SEQ ID NO: 91197 - DNA, 20 bp, synthetic construct
  source 1..20: mol_type = other DNA
cctttgttacataccctcac

SEQ ID NO: 91198 - DNA, 20 bp, synthetic construct
  source 1..20: mol_type = other DNA
ccctttgttacataccctca

SEQ ID NO: 91199 - DNA, 20 bp, synthetic construct
  source 1..20: mol_type = other DNA
gccctttgttacataccctc

SEQ ID NO: 91200 - DNA, 20 bp, synthetic construct
  source 1..20: mol_type = other DNA
agccctttgttacataccct

SEQ ID NO: 91201 - DNA, 20 bp, synthetic construct
  source 1..20: mol_type = other DNA
aagccctttgttacataccc

SEQ ID NO: 91202 - DNA, 20 bp, synthetic construct
  source 1..20: mol_type = other DNA
gaagccctttgttacatacc

SEQ ID NO: 91203 - DNA, 20 bp, synthetic construct
  source 1..20: mol_type = other DNA
agaagccctttgttacatac

SEQ ID NO: 91204 - DNA, 20 bp, synthetic construct
  source 1..20: mol_type = other DNA
cagaagccctttgttacata

SEQ ID NO: 91205 - DNA, 20 bp, synthetic construct
  source 1..20: mol_type = other DNA
ccagaagccctttgttacat

SEQ ID NO: 91206 - DNA, 20 bp, synthetic construct
  source 1..20: mol_type = other DNA
tccagaagccctttgttaca

SEQ ID NO: 91207 - DNA, 20 bp, synthetic construct
  source 1..20: mol_type = other DNA
atccagaagccctttgttac

SEQ ID NO: 91208 - DNA, 20 bp, synthetic construct
  source 1..20: mol_type = other DNA
gatccagaagccctttgtta

SEQ ID NO: 91209 - DNA, 20 bp, synthetic construct
  source 1..20: mol_type = other DNA
ggatccagaagccctttgtt

SEQ ID NO: 91210 - DNA, 20 bp, synthetic construct
  source 1..20: mol_type = other DNA
tggatccagaagccctttgt

SEQ ID NO: 91211 - DNA, 20 bp, synthetic construct
  source 1..20: mol_type = other DNA
atggatccagaagccctttg

SEQ ID NO: 91212 - DNA, 20 bp, synthetic construct
  source 1..20: mol_type = other DNA
tatggatccagaagcccttt

SEQ ID NO: 91213 - DNA, 20 bp, synthetic construct
  source 1..20: mol_type = other DNA
ttatggatccagaagccctt

SEQ ID NO: 91214 - DNA, 20 bp, synthetic construct
  source 1..20: mol_type = other DNA
attatggatccagaagccct

SEQ ID NO: 91215 - DNA, 20 bp, synthetic construct
  source 1..20: mol_type = other DNA
gattatggatccagaagccc

SEQ ID NO: 91216 - DNA, 20 bp, synthetic construct
  source 1..20: mol_type = other DNA
agattatggatccagaagcc

SEQ ID NO: 91217 - DNA, 20 bp, synthetic construct
  source 1..20: mol_type = other DNA
gagattatggatccagaagc

SEQ ID NO: 91218 - DNA, 20 bp, synthetic construct
  source 1..20: mol_type = other DNA
tgagattatggatccagaag

SEQ ID NO: 91219 - DNA, 20 bp, synthetic construct
  source 1..20: mol_type = other DNA
ctgagattatggatccagaa

SEQ ID NO: 91220 - DNA, 20 bp, synthetic construct
  source 1..20: mol_type = other DNA
gctgagattatggatccaga

SEQ ID NO: 91221 - DNA, 20 bp, synthetic construct
  source 1..20: mol_type = other DNA
agctgagattatggatccag

SEQ ID NO: 91222 - DNA, 20 bp, synthetic construct
  source 1..20: mol_type = other DNA
cagctgagattatggatcca

SEQ ID NO: 91223 - DNA, 20 bp, synthetic construct
  source 1..20: mol_type = other DNA
acagctgagattatggatcc

SEQ ID NO: 91224 - DNA, 20 bp, synthetic construct
  source 1..20: mol_type = other DNA
cacagctgagattatggatc

SEQ ID NO: 91225 - DNA, 20 bp, synthetic construct
  source 1..20: mol_type = other DNA
tcacagctgagattatggat

SEQ ID NO: 91226 - DNA, 20 bp, synthetic construct
  source 1..20: mol_type = other DNA
ttcacagctgagattatgga

SEQ ID NO: 91227 - DNA, 20 bp, synthetic construct
  source 1..20: mol_type = other DNA
tttcacagctgagattatgg

SEQ ID NO: 91228 - DNA, 20 bp, synthetic construct
  source 1..20: mol_type = other DNA
atttcacagctgagattatg

SEQ ID NO: 91229 - DNA, 20 bp, synthetic construct
  source 1..20: mol_type = other DNA
aatttcacagctgagattat

SEQ ID NO: 91230 - DNA, 20 bp, synthetic construct
  source 1..20: mol_type = other DNA
caatttcacagctgagatta

SEQ ID NO: 91231 - DNA, 20 bp, synthetic construct
  source 1..20: mol_type = other DNA
tcaatttcacagctgagatt

SEQ ID NO: 91232 - DNA, 20 bp, synthetic construct
  source 1..20: mol_type = other DNA
ttcaatttcacagctgagat

SEQ ID NO: 91233 - DNA, 20 bp, synthetic construct
  source 1..20: mol_type = other DNA
attcaatttcacagctgaga

SEQ ID NO: 91234 - DNA, 20 bp, synthetic construct
  source 1..20: mol_type = other DNA
cattcaatttcacagctgag

SEQ ID NO: 91235 - DNA, 20 bp, synthetic construct
  source 1..20: mol_type = other DNA
acattcaatttcacagctga

SEQ ID NO: 91236 - DNA, 20 bp, synthetic construct
  source 1..20: mol_type = other DNA
aacattcaatttcacagctg

SEQ ID NO: 91237 - DNA, 20 bp, synthetic construct
  source 1..20: mol_type = other DNA
taacattcaatttcacagct

SEQ ID NO: 91238 - DNA, 20 bp, synthetic construct
  source 1..20: mol_type = other DNA
ctaacattcaatttcacagc

SEQ ID NO: 91239 - DNA, 20 bp, synthetic construct
  source 1..20: mol_type = other DNA
tctaacattcaatttcacag

SEQ ID NO: 91240 - DNA, 20 bp, synthetic construct
  source 1..20: mol_type = other DNA
ctctaacattcaatttcaca

SEQ ID NO: 91241 - DNA, 20 bp, synthetic construct
  source 1..20: mol_type = other DNA
cctctaacattcaatttcac

SEQ ID NO: 91242 - DNA, 20 bp, synthetic construct
  source 1..20: mol_type = other DNA
ccctctaacattcaatttca

SEQ ID NO: 91243 - DNA, 20 bp, synthetic construct
  source 1..20: mol_type = other DNA
accctctaacattcaatttc

SEQ ID NO: 91244 - DNA, 20 bp, synthetic construct
  source 1..20: mol_type = other DNA
caccctctaacattcaattt

SEQ ID NO: 91245 - DNA, 20 bp, synthetic construct
  source 1..20: mol_type = other DNA
tcaccctctaacattcaatt

SEQ ID NO: 91246 - DNA, 20 bp, synthetic construct
  source 1..20: mol_type = other DNA
atcaccctctaacattcaat

SEQ ID NO: 91247 - DNA, 20 bp, synthetic construct
  source 1..20: mol_type = other DNA
tatcaccctctaacattcaa

SEQ ID NO: 91248 - DNA, 20 bp, synthetic construct
  source 1..20: mol_type = other DNA
atatcaccctctaacattca

SEQ ID NO: 91249 - DNA, 20 bp, synthetic construct
  source 1..20: mol_type = other DNA
aatatcaccctctaacattc

SEQ ID NO: 91250 - DNA, 20 bp, synthetic construct
  source 1..20: mol_type = other DNA
taatatcaccctctaacatt

SEQ ID NO: 91251 - DNA, 20 bp, synthetic construct
  source 1..20: mol_type = other DNA
ataatatcaccctctaacat

SEQ ID NO: 91252 - DNA, 20 bp, synthetic construct
  source 1..20: mol_type = other DNA
tataatatcaccctctaaca

SEQ ID NO: 91253 - DNA, 20 bp, synthetic construct
  source 1..20: mol_type = other DNA
atataatatcaccctctaac

SEQ ID NO: 91254 - DNA, 20 bp, synthetic construct
  source 1..20: mol_type = other DNA
catataatatcaccctctaa

SEQ ID NO: 91255 - DNA, 20 bp, synthetic construct
  source 1..20: mol_type = other DNA
tcatataatatcaccctcta

SEQ ID NO: 91256 - DNA, 20 bp, synthetic construct
  source 1..20: mol_type = other DNA
ttcatataatatcaccctct

SEQ ID NO: 91257 - DNA, 20 bp, synthetic construct
  source 1..20: mol_type = other DNA
tttcatataatatcaccctc

SEQ ID NO: 91258 - DNA, 20 bp, synthetic construct
  source 1..20: mol_type = other DNA
ttttcatataatatcaccct

SEQ ID NO: 91259 - DNA, 20 bp, synthetic construct
  source 1..20: mol_type = other DNA
tttttcatataatatcaccc

SEQ ID NO: 91260 - DNA, 20 bp, synthetic construct
  source 1..20: mol_type = other DNA
ttttttcatataatatcacc

SEQ ID NO: 91261 - DNA, 20 bp, synthetic construct
  source 1..20: mol_type = other DNA
attttttcatataatatcac

SEQ ID NO: 91262 - DNA, 20 bp, synthetic construct
  source 1..20: mol_type = other DNA
aattttttcatataatatca

SEQ ID NO: 91263 - DNA, 20 bp, synthetic construct
  source 1..20: mol_type = other DNA
gaattttttcatataatatc

SEQ ID NO: 91264 - DNA, 20 bp, synthetic construct
  source 1..20: mol_type = other DNA
agaattttttcatataatat

SEQ ID NO: 91265 - DNA, 20 bp, synthetic construct
  source 1..20: mol_type = other DNA
tagaattttttcatataata

SEQ ID NO: 91266 - DNA, 20 bp, synthetic construct
  source 1..20: mol_type = other DNA
ctagaattttttcatataat

SEQ ID NO: 91267 - DNA, 20 bp, synthetic construct
  source 1..20: mol_type = other DNA
cctagaattttttcatataa

SEQ ID NO: 91268 - DNA, 20 bp, synthetic construct
  source 1..20: mol_type = other DNA
acctagaattttttcatata

SEQ ID NO: 91269 - DNA, 20 bp, synthetic construct
  source 1..20: mol_type = other DNA
aacctagaattttttcatat

SEQ ID NO: 91270 - DNA, 20 bp, synthetic construct
  source 1..20: mol_type = other DNA
taacctagaattttttcata

SEQ ID NO: 91271 - DNA, 20 bp, synthetic construct
  source 1..20: mol_type = other DNA
ataacctagaattttttcat

SEQ ID NO: 91272 - DNA, 20 bp, synthetic construct
  source 1..20: mol_type = other DNA
aataacctagaattttttca

SEQ ID NO: 91273 - DNA, 20 bp, synthetic construct
  source 1..20: mol_type = other DNA
aaataacctagaattttttc

SEQ ID NO: 91274 - DNA, 20 bp, synthetic construct
  source 1..20: mol_type = other DNA
aaaataacctagaatttttt

SEQ ID NO: 91275 - DNA, 20 bp, synthetic construct
  source 1..20: mol_type = other DNA
aaaaataacctagaattttt

SEQ ID NO: 91276 - DNA, 20 bp, synthetic construct
  source 1..20: mol_type = other DNA
taaaaataacctagaatttt

SEQ ID NO: 91277 - DNA, 20 bp, synthetic construct
  source 1..20: mol_type = other DNA
ataaaaataacctagaattt

SEQ ID NO: 91278 - DNA, 20 bp, synthetic construct
  source 1..20: mol_type = other DNA
aataaaaataacctagaatt

SEQ ID NO: 91279 - DNA, 20 bp, synthetic construct
  source 1..20: mol_type = other DNA
gaataaaaataacctagaat

SEQ ID NO: 91280 - DNA, 20 bp, synthetic construct
  source 1..20: mol_type = other DNA
tgaataaaaataacctagaa

SEQ ID NO: 91281 - DNA, 20 bp, synthetic construct
  source 1..20: mol_type = other DNA
atgaataaaaataacctaga

SEQ ID NO: 91282 - DNA, 20 bp, synthetic construct
  source 1..20: mol_type = other DNA
tatgaataaaaataacctag

SEQ ID NO: 91283 - DNA, 20 bp, synthetic construct
  source 1..20: mol_type = other DNA
ctatgaataaaaataaccta

SEQ ID NO: 91284 - DNA, 20 bp, synthetic construct
  source 1..20: mol_type = other DNA
tctatgaataaaaataacct

SEQ ID NO: 91285 - DNA, 20 bp, synthetic construct
  source 1..20: mol_type = other DNA
gtctatgaataaaaataacc

SEQ ID NO: 91286 - DNA, 20 bp, synthetic construct
  source 1..20: mol_type = other DNA
tgtctatgaataaaaataac

SEQ ID NO: 91287 - DNA, 20 bp, synthetic construct
  source 1..20: mol_type = other DNA
ttgtctatgaataaaaataa

SEQ ID NO: 91288 - DNA, 20 bp, synthetic construct
  source 1..20: mol_type = other DNA
cttgtctatgaataaaaata

SEQ ID NO: 91289 - DNA, 20 bp, synthetic construct
  source 1..20: mol_type = other DNA
acttgtctatgaataaaaat

SEQ ID NO: 91290 - DNA, 20 bp, synthetic construct
  source 1..20: mol_type = other DNA
tacttgtctatgaataaaaa

SEQ ID NO: 91291 - DNA, 20 bp, synthetic construct
  source 1..20: mol_type = other DNA
atacttgtctatgaataaaa

SEQ ID NO: 91292 - DNA, 20 bp, synthetic construct
  source 1..20: mol_type = other DNA
aatacttgtctatgaataaa

SEQ ID NO: 91293 - DNA, 20 bp, synthetic construct
  source 1..20: mol_type = other DNA
aaatacttgtctatgaataa

SEQ ID NO: 91294 - DNA, 20 bp, synthetic construct
  source 1..20: mol_type = other DNA
aaaatacttgtctatgaata

SEQ ID NO: 91295 - DNA, 20 bp, synthetic construct
  source 1..20: mol_type = other DNA
aaaaatacttgtctatgaat

SEQ ID NO: 91296 - DNA, 20 bp, synthetic construct
  source 1..20: mol_type = other DNA
taaaaatacttgtctatgaa

SEQ ID NO: 91297 - DNA, 20 bp, synthetic construct
  source 1..20: mol_type = other DNA
ctaaaaatacttgtctatga

SEQ ID NO: 91298 - DNA, 20 bp, synthetic construct
  source 1..20: mol_type = other DNA
actaaaaatacttgtctatg

SEQ ID NO: 91299 - DNA, 20 bp, synthetic construct
  source 1..20: mol_type = other DNA
cactaaaaatacttgtctat

SEQ ID NO: 91300 - DNA, 20 bp, synthetic construct
  source 1..20: mol_type = other DNA
gcactaaaaatacttgtcta

SEQ ID NO: 91301 - DNA, 20 bp, synthetic construct
  source 1..20: mol_type = other DNA
tgcactaaaaatacttgtct

SEQ ID NO: 91302 - DNA, 20 bp, synthetic construct
  source 1..20: mol_type = other DNA
gtgcactaaaaatacttgtc

SEQ ID NO: 91303 - DNA, 20 bp, synthetic construct
  source 1..20: mol_type = other DNA
tgtgcactaaaaatacttgt

SEQ ID NO: 91304 - DNA, 20 bp, synthetic construct
  source 1..20: mol_type = other DNA
atgtgcactaaaaatacttg

SEQ ID NO: 91305 - DNA, 20 bp, synthetic construct
  source 1..20: mol_type = other DNA
aatgtgcactaaaaatactt

SEQ ID NO: 91306 - DNA, 20 bp, synthetic construct
  source 1..20: mol_type = other DNA
aaatgtgcactaaaaatact

SEQ ID NO: 91307 - DNA, 20 bp, synthetic construct
  source 1..20: mol_type = other DNA
taaatgtgcactaaaaatac

SEQ ID NO: 91308 - DNA, 20 bp, synthetic construct
  source 1..20: mol_type = other DNA
ttaaatgtgcactaaaaata

SEQ ID NO: 91309 - DNA, 20 bp, synthetic construct
  source 1..20: mol_type = other DNA
tttaaatgtgcactaaaaat

SEQ ID NO: 91310 - DNA, 20 bp, synthetic construct
  source 1..20: mol_type = other DNA
ttttaaatgtgcactaaaaa

SEQ ID NO: 91311 - DNA, 20 bp, synthetic construct
  source 1..20: mol_type = other DNA
cttttaaatgtgcactaaaa

SEQ ID NO: 91312 - DNA, 20 bp, synthetic construct
  source 1..20: mol_type = other DNA
acttttaaatgtgcactaaa

SEQ ID NO: 91313 - DNA, 20 bp, synthetic construct
  source 1..20: mol_type = other DNA
aacttttaaatgtgcactaa

SEQ ID NO: 91314 - DNA, 20 bp, synthetic construct
  source 1..20: mol_type = other DNA
aaacttttaaatgtgcacta

SEQ ID NO: 91315 - DNA, 20 bp, synthetic construct
  source 1..20: mol_type = other DNA
taaacttttaaatgtgcact

SEQ ID NO: 91316 - DNA, 20 bp, synthetic construct
  source 1..20: mol_type = other DNA
ataaacttttaaatgtgcac

SEQ ID NO: 91317 - DNA, 20 bp, synthetic construct
  source 1..20: mol_type = other DNA
cataaacttttaaatgtgca

SEQ ID NO: 91318 - DNA, 20 bp, synthetic construct
  source 1..20: mol_type = other DNA
acataaacttttaaatgtgc

SEQ ID NO: 91319 - DNA, 20 bp, synthetic construct
  source 1..20: mol_type = other DNA
tacataaacttttaaatgtg

SEQ ID NO: 91320 - DNA, 20 bp, synthetic construct
  source 1..20: mol_type = other DNA
ttacataaacttttaaatgt

SEQ ID NO: 91321 - DNA, 20 bp, synthetic construct
  source 1..20: mol_type = other DNA
tttacataaacttttaaatg

SEQ ID NO: 91322 - DNA, 20 bp, synthetic construct
  source 1..20: mol_type = other DNA
atttacataaacttttaaat

SEQ ID NO: 91323 - DNA, 20 bp, synthetic construct
  source 1..20: mol_type = other DNA
aatttacataaacttttaaa

SEQ ID NO: 91324 - DNA, 20 bp, synthetic construct
  source 1..20: mol_type = other DNA
aaatttacataaacttttaa

SEQ ID NO: 91325 - DNA, 20 bp, synthetic construct
  source 1..20: mol_type = other DNA
aaaatttacataaactttta

SEQ ID NO: 91326 - DNA, 20 bp, synthetic construct
  source 1..20: mol_type = other DNA
caaaatttacataaactttt

SEQ ID NO: 91327 - DNA, 20 bp, synthetic construct
  source 1..20: mol_type = other DNA
tcaaaatttacataaacttt

SEQ ID NO: 91328 - DNA, 20 bp, synthetic construct
  source 1..20: mol_type = other DNA
atcaaaatttacataaactt

SEQ ID NO: 91329 - DNA, 20 bp, synthetic construct
  source 1..20: mol_type = other DNA
catcaaaatttacataaact

SEQ ID NO: 91330 - DNA, 20 bp, synthetic construct
  source 1..20: mol_type = other DNA
acatcaaaatttacataaac

SEQ ID NO: 91331 - DNA, 20 bp, synthetic construct
  source 1..20: mol_type = other DNA
aacatcaaaatttacataaa

SEQ ID NO: 91332 - DNA, 20 bp, synthetic construct
  source 1..20: mol_type = other DNA
caacatcaaaatttacataa

SEQ ID NO: 91333 - DNA, 20 bp, synthetic construct
  source 1..20: mol_type = other DNA
acaacatcaaaatttacata

SEQ ID NO: 91334 - DNA, 20 bp, synthetic construct
  source 1..20: mol_type = other DNA
aacaacatcaaaatttacat

SEQ ID NO: 91335 - DNA, 20 bp, synthetic construct
  source 1..20: mol_type = other DNA
aaacaacatcaaaatttaca

SEQ ID NO: 91336 - DNA, 20 bp, synthetic construct
  source 1..20: mol_type = other DNA
taaacaacatcaaaatttac

SEQ ID NO: 91337 - DNA, 20 bp, synthetic construct
  source 1..20: mol_type = other DNA
ttaaacaacatcaaaattta

SEQ ID NO: 91338 - DNA, 20 bp, synthetic construct
  source 1..20: mol_type = other DNA
attaaacaacatcaaaattt

SEQ ID NO: 91339 - DNA, 20 bp, synthetic construct
  source 1..20: mol_type = other DNA
tattaaacaacatcaaaatt

SEQ ID NO: 91340 - DNA, 20 bp, synthetic construct
  source 1..20: mol_type = other DNA
gtattaaacaacatcaaaat

SEQ ID NO: 91341 - DNA, 20 bp, synthetic construct
  source 1..20: mol_type = other DNA
agtattaaacaacatcaaaa

SEQ ID NO: 91342 - DNA, 20 bp, synthetic construct
  source 1..20: mol_type = other DNA
tagtattaaacaacatcaaa

SEQ ID NO: 91343 - DNA, 20 bp, synthetic construct
  source 1..20: mol_type = other DNA
gtagtattaaacaacatcaa

SEQ ID NO: 91344 - DNA, 20 bp, synthetic construct
  source 1..20: mol_type = other DNA
agtagtattaaacaacatca

SEQ ID NO: 91345 - DNA, 20 bp, synthetic construct
  source 1..20: mol_type = other DNA
tagtagtattaaacaacatc

SEQ ID NO: 91346 - DNA, 20 bp, synthetic construct
  source 1..20: mol_type = other DNA
ttagtagtattaaacaacat

SEQ ID NO: 91347 - DNA, 20 bp, synthetic construct
  source 1..20: mol_type = other DNA
attagtagtattaaacaaca

SEQ ID NO: 91348 - DNA, 20 bp, synthetic construct
  source 1..20: mol_type = other DNA
aattagtagtattaaacaac

SEQ ID NO: 91349 - DNA, 20 bp, synthetic construct
  source 1..20: mol_type = other DNA
aaattagtagtattaaacaa

SEQ ID NO: 91350 - DNA, 20 bp, synthetic construct
  source 1..20: mol_type = other DNA
taaattagtagtattaaaca

SEQ ID NO: 91351 - DNA, 20 bp, synthetic construct
  source 1..20: mol_type = other DNA
ttaaattagtagtattaaac

SEQ ID NO: 91352 - DNA, 20 bp, synthetic construct
  source 1..20: mol_type = other DNA
attaaattagtagtattaaa

SEQ ID NO: 91353 - DNA, 20 bp, synthetic construct
  source 1..20: mol_type = other DNA
tattaaattagtagtattaa

SEQ ID NO: 91354 - DNA, 20 bp, synthetic construct
  source 1..20: mol_type = other DNA
atattaaattagtagtatta

SEQ ID NO: 91355 - DNA, 20 bp, synthetic construct
  source 1..20: mol_type = other DNA
tatattaaattagtagtatt

SEQ ID NO: 91356 - DNA, 20 bp, synthetic construct
  source 1..20: mol_type = other DNA
ctatattaaattagtagtat

SEQ ID NO: 91357 - DNA, 20 bp, synthetic construct
  source 1..20: mol_type = other DNA
actatattaaattagtagta

SEQ ID NO: 91358 - DNA, 20 bp, synthetic construct
  source 1..20: mol_type = other DNA
cactatattaaattagtagt

SEQ ID NO: 91359 - DNA, 20 bp, synthetic construct
  source 1..20: mol_type = other DNA
acactatattaaattagtag

SEQ ID NO: 91360 - DNA, 20 bp, synthetic construct
  source 1..20: mol_type = other DNA
gacactatattaaattagta

SEQ ID NO: 91361 - DNA, 20 bp, synthetic construct
  source 1..20: mol_type = other DNA
agacactatattaaattagt

SEQ ID NO: 91362 - DNA, 20 bp, synthetic construct
  source 1..20: mol_type = other DNA
cagacactatattaaattag

SEQ ID NO: 91363 - DNA, 20 bp, synthetic construct
  source 1..20: mol_type = other DNA
acagacactatattaaatta

SEQ ID NO: 91364 - DNA, 20 bp, synthetic construct
  source 1..20: mol_type = other DNA
cacagacactatattaaatt

SEQ ID NO: 91365 - DNA, 20 bp, synthetic construct
  source 1..20: mol_type = other DNA
acacagacactatattaaat

SEQ ID NO: 91366 - DNA, 20 bp, synthetic construct
  source 1..20: mol_type = other DNA
aacacagacactatattaaa

SEQ ID NO: 91367 - DNA, 20 bp, synthetic construct
  source 1..20: mol_type = other DNA
taacacagacactatattaa

SEQ ID NO: 91368 - DNA, 20 bp, synthetic construct
  source 1..20: mol_type = other DNA
gtaacacagacactatatta

SEQ ID NO: 91369 - DNA, 20 bp, synthetic construct
  source 1..20: mol_type = other DNA
tgtaacacagacactatatt

SEQ ID NO: 91370 - DNA, 20 bp, synthetic construct
  source 1..20: mol_type = other DNA
ttgtaacacagacactatat

SEQ ID NO: 91371 - DNA, 20 bp, synthetic construct
  source 1..20: mol_type = other DNA
tttgtaacacagacactata

SEQ ID NO: 91372 - DNA, 20 bp, synthetic construct
  source 1..20: mol_type = other DNA
ctttgtaacacagacactat

SEQ ID NO: 91373 - DNA, 20 bp, synthetic construct
  source 1..20: mol_type = other DNA
cctttgtaacacagacacta

SEQ ID NO: 91374 - DNA, 20 bp, synthetic construct
  source 1..20: mol_type = other DNA
acctttgtaacacagacact

SEQ ID NO: 91375 - DNA, 20 bp, synthetic construct
  source 1..20: mol_type = other DNA
aacctttgtaacacagacac

SEQ ID NO: 91376 - DNA, 20 bp, synthetic construct
  source 1..20: mol_type = other DNA
taacctttgtaacacagaca

SEQ ID NO: 91377 - DNA, 20 bp, synthetic construct
  source 1..20: mol_type = other DNA
ttaacctttgtaacacagac

SEQ ID NO: 91378 - DNA, 20 bp, synthetic construct
  source 1..20: mol_type = other DNA
gttaacctttgtaacacaga

SEQ ID NO: 91379 - DNA, 20 bp, synthetic construct
  source 1..20: mol_type = other DNA
tgttaacctttgtaacacag

SEQ ID NO: 91380 - DNA, 20 bp, synthetic construct
  source 1..20: mol_type = other DNA
atgttaacctttgtaacaca

SEQ ID NO: 91381 - DNA, 20 bp, synthetic construct
  source 1..20: mol_type = other DNA
aatgttaacctttgtaacac

SEQ ID NO: 91382 - DNA, 20 bp, synthetic construct
  source 1..20: mol_type = other DNA
gaatgttaacctttgtaaca

SEQ ID NO: 91383 - DNA, 20 bp, synthetic construct
  source 1..20: mol_type = other DNA
ggaatgttaacctttgtaac

SEQ ID NO: 91384 - DNA, 20 bp, synthetic construct
  source 1..20: mol_type = other DNA
aggaatgttaacctttgtaa

SEQ ID NO: 91385 - DNA, 20 bp, synthetic construct
  source 1..20: mol_type = other DNA
caggaatgttaacctttgta

SEQ ID NO: 91386 - DNA, 20 bp, synthetic construct
  source 1..20: mol_type = other DNA
ccaggaatgttaacctttgt

SEQ ID NO: 91387 - DNA, 20 bp, synthetic construct
  source 1..20: mol_type = other DNA
cccaggaatgttaacctttg

SEQ ID NO: 91388 - DNA, 20 bp, synthetic construct
  source 1..20: mol_type = other DNA
acccaggaatgttaaccttt

SEQ ID NO: 91389 - DNA, 20 bp, synthetic construct
  source 1..20: mol_type = other DNA
cacccaggaatgttaacctt

SEQ ID NO: 91390 - DNA, 20 bp, synthetic construct
  source 1..20: mol_type = other DNA
acacccaggaatgttaacct

SEQ ID NO: 91391 - DNA, 20 bp, synthetic construct
  source 1..20: mol_type = other DNA
gacacccaggaatgttaacc

SEQ ID NO: 91392 - DNA, 20 bp, synthetic construct
  source 1..20: mol_type = other DNA
tgacacccaggaatgttaac

SEQ ID NO: 91393 - DNA, 20 bp, synthetic construct
  source 1..20: mol_type = other DNA
ttgacacccaggaatgttaa

SEQ ID NO: 91394 - DNA, 20 bp, synthetic construct
  source 1..20: mol_type = other DNA
tttgacacccaggaatgtta

SEQ ID NO: 91395 - DNA, 20 bp, synthetic construct
  source 1..20: mol_type = other DNA
atttgacacccaggaatgtt

SEQ ID NO: 91396 - DNA, 20 bp, synthetic construct
  source 1..20: mol_type = other DNA
tatttgacacccaggaatgt

SEQ ID NO: 91397 - DNA, 20 bp, synthetic construct
  source 1..20: mol_type = other DNA
gtatttgacacccaggaatg

SEQ ID NO: 91398 - DNA, 20 bp, synthetic construct
  source 1..20: mol_type = other DNA
ggtatttgacacccaggaat

SEQ ID NO: 91399 - DNA, 20 bp, synthetic construct
  source 1..20: mol_type = other DNA
aggtatttgacacccaggaa

SEQ ID NO: 91400 - DNA, 20 bp, synthetic construct
  source 1..20: mol_type = other DNA
taggtatttgacacccagga

SEQ ID NO: 91401 - DNA, 20 bp, synthetic construct
  source 1..20: mol_type = other DNA
gtaggtatttgacacccagg

SEQ ID NO: 91402 - DNA, 20 bp, synthetic construct
  source 1..20: mol_type = other DNA
tgtaggtatttgacacccag

SEQ ID NO: 91403 - DNA, 20 bp, synthetic construct
  source 1..20: mol_type = other DNA
atgtaggtatttgacaccca

SEQ ID NO: 91404 - DNA, 20 bp, synthetic construct
  source 1..20: mol_type = other DNA
tatgtaggtatttgacaccc

SEQ ID NO: 91405 - DNA, 20 bp, synthetic construct
  source 1..20: mol_type = other DNA
ttatgtaggtatttgacacc

SEQ ID NO: 91406 - DNA, 20 bp, synthetic construct
  source 1..20: mol_type = other DNA
tttatgtaggtatttgacac

SEQ ID NO: 91407 - DNA, 20 bp, synthetic construct
  source 1..20: mol_type = other DNA
atttatgtaggtatttgaca

SEQ ID NO: 91408 - DNA, 20 bp, synthetic construct
  source 1..20: mol_type = other DNA
tatttatgtaggtatttgac

SEQ ID NO: 91409 - DNA, 20 bp, synthetic construct
  source 1..20: mol_type = other DNA
ttatttatgtaggtatttga

SEQ ID NO: 91410 - DNA, 20 bp, synthetic construct
  source 1..20: mol_type = other DNA
tttatttatgtaggtatttg

SEQ ID NO: 91411 - DNA, 20 bp, synthetic construct
  source 1..20: mol_type = other DNA
ttttatttatgtaggtattt

SEQ ID NO: 91412 - DNA, 20 bp, synthetic construct
  source 1..20: mol_type = other DNA
attttatttatgtaggtatt

SEQ ID NO: 91413 - DNA, 20 bp, synthetic construct
  source 1..20: mol_type = other DNA
aattttatttatgtaggtat

SEQ ID NO: 91414 - DNA, 20 bp, synthetic construct
  source 1..20: mol_type = other DNA
taattttatttatgtaggta

SEQ ID NO: 91415 - DNA, 20 bp, synthetic construct
  source 1..20: mol_type = other DNA
ataattttatttatgtaggt

SEQ ID NO: 91416 - DNA, 20 bp, synthetic construct
  source 1..20: mol_type = other DNA
aataattttatttatgtagg

SEQ ID NO: 91417 - DNA, 20 bp, synthetic construct
  source 1..20: mol_type = other DNA
caataattttatttatgtag

SEQ ID NO: 91418 - DNA, 20 bp, synthetic construct
  source 1..20: mol_type = other DNA
ccaataattttatttatgta

SEQ ID NO: 91419 - DNA, 20 bp, synthetic construct
  source 1..20: mol_type = other DNA
accaataattttatttatgt

SEQ ID NO: 91420 - DNA, 20 bp, synthetic construct
  source 1..20: mol_type = other DNA
caccaataattttatttatg

SEQ ID NO: 91421 - DNA, 20 bp, synthetic construct
  source 1..20: mol_type = other DNA
acaccaataattttatttat

SEQ ID NO: 91422 - DNA, 20 bp, synthetic construct
  source 1..20: mol_type = other DNA
aacaccaataattttattta

SEQ ID NO: 91423 - DNA, 20 bp, synthetic construct
  source 1..20: mol_type = other DNA
aaacaccaataattttattt

SEQ ID NO: 91424 - DNA, 20 bp, synthetic construct
  source 1..20: mol_type = other DNA
gaaacaccaataattttatt

SEQ ID NO: 91425 - DNA, 20 bp, synthetic construct
  source 1..20: mol_type = other DNA
tgaaacaccaataattttat

SEQ ID NO: 91426 - DNA, 20 bp, synthetic construct
  source 1..20: mol_type = other DNA
atgaaacaccaataatttta

SEQ ID NO: 91427 - DNA, 20 bp, synthetic construct
  source 1..20: mol_type = other DNA
tatgaaacaccaataatttt

SEQ ID NO: 91428 - DNA, 20 bp, synthetic construct
  source 1..20: mol_type = other DNA
atatgaaacaccaataattt

SEQ ID NO: 91429 - DNA, 20 bp, synthetic construct
  source 1..20: mol_type = other DNA
catatgaaacaccaataatt

SEQ ID NO: 91430 - DNA, 20 bp, synthetic construct
  source 1..20: mol_type = other DNA
tcatatgaaacaccaataat

SEQ ID NO: 91431 - DNA, 20 bp, synthetic construct
  source 1..20: mol_type = other DNA
gtcatatgaaacaccaataa

SEQ ID NO: 91432 - DNA, 20 bp, synthetic construct
  source 1..20: mol_type = other DNA
tgtcatatgaaacaccaata

SEQ ID NO: 91433 - DNA, 20 bp, synthetic construct
  source 1..20: mol_type = other DNA
atgtcatatgaaacaccaat

SEQ ID NO: 91434 - DNA, 20 bp, synthetic construct
  source 1..20: mol_type = other DNA
gatgtcatatgaaacaccaa

SEQ ID NO: 91435 - DNA, 20 bp, synthetic construct
  source 1..20: mol_type = other DNA
agatgtcatatgaaacacca

SEQ ID NO: 91436 - DNA, 20 bp, synthetic construct
  source 1..20: mol_type = other DNA
cagatgtcatatgaaacacc

SEQ ID NO: 91437 - DNA, 20 bp, synthetic construct
  source 1..20: mol_type = other DNA
gcagatgtcatatgaaacac

SEQ ID NO: 91438 - DNA, 20 bp, synthetic construct
  source 1..20: mol_type = other DNA
tgcagatgtcatatgaaaca

SEQ ID NO: 91439 - DNA, 20 bp, synthetic construct
  source 1..20: mol_type = other DNA
ttgcagatgtcatatgaaac

SEQ ID NO: 91440 - DNA, 20 bp, synthetic construct
  source 1..20: mol_type = other DNA
tttgcagatgtcatatgaaa

SEQ ID NO: 91441 - DNA, 20 bp, synthetic construct
  source 1..20: mol_type = other DNA
ctttgcagatgtcatatgaa

SEQ ID NO: 91442 - DNA, 20 bp, synthetic construct
  source 1..20: mol_type = other DNA
cctttgcagatgtcatatga

SEQ ID NO: 91443 - DNA, 20 bp, synthetic construct
  source 1..20: mol_type = other DNA
tcctttgcagatgtcatatg

SEQ ID NO: 91444 - DNA, 20 bp, synthetic construct
  source 1..20: mol_type = other DNA
ttcctttgcagatgtcatat

SEQ ID NO: 91445 - DNA, 20 bp, synthetic construct
  source 1..20: mol_type = other DNA
tttcctttgcagatgtcata

SEQ ID NO: 91446 - DNA, 20 bp, synthetic construct
  source 1..20: mol_type = other DNA
ttttcctttgcagatgtcat

SEQ ID NO: 91447 - DNA, 20 bp, synthetic construct
  source 1..20: mol_type = other DNA
tttttcctttgcagatgtca

SEQ ID NO: 91448 - DNA, 20 bp, synthetic construct
  source 1..20: mol_type = other DNA
ttttttcctttgcagatgtc

SEQ ID NO: 91449 - DNA, 20 bp, synthetic construct
  source 1..20: mol_type = other DNA
tttttttcctttgcagatgt

SEQ ID NO: 91450 - DNA, 20 bp, synthetic construct
  source 1..20: mol_type = other DNA
ctttttttcctttgcagatg

SEQ ID NO: 91451 - DNA, 20 bp, synthetic construct
  source 1..20: mol_type = other DNA
gctttttttcctttgcagat

SEQ ID NO: 91452 - DNA, 20 bp, synthetic construct
  source 1..20: mol_type = other DNA
ggctttttttcctttgcaga

SEQ ID NO: 91453 - DNA, 20 bp, synthetic construct
  source 1..20: mol_type = other DNA
aggctttttttcctttgcag

SEQ ID NO: 91454 - DNA, 20 bp, synthetic construct
  source 1..20: mol_type = other DNA
gaggctttttttcctttgca

SEQ ID NO: 91455 - DNA, 20 bp, synthetic construct
  source 1..20: mol_type = other DNA
agaggctttttttcctttgc

SEQ ID NO: 91456 - DNA, 20 bp, synthetic construct
  source 1..20: mol_type = other DNA
cagaggctttttttcctttg

SEQ ID NO: 91457 - DNA, 20 bp, synthetic construct
  source 1..20: mol_type = other DNA
acagaggctttttttccttt

SEQ ID NO: 91458 - DNA, 20 bp, synthetic construct
  source 1..20: mol_type = other DNA
aacagaggctttttttcctt

SEQ ID NO: 91459 - DNA, 20 bp, synthetic construct
  source 1..20: mol_type = other DNA
aaacagaggctttttttcct

SEQ ID NO: 91460 - DNA, 20 bp, synthetic construct
  source 1..20: mol_type = other DNA
taaacagaggctttttttcc

SEQ ID NO: 91461 - DNA, 20 bp, synthetic construct
  source 1..20: mol_type = other DNA
ttaaacagaggctttttttc

SEQ ID NO: 91462 - DNA, 20 bp, synthetic construct
  source 1..20: mol_type = other DNA
tttaaacagaggcttttttt

SEQ ID NO: 91463 - DNA, 20 bp, synthetic construct
  source 1..20: mol_type = other DNA
atttaaacagaggctttttt

SEQ ID NO: 91464 - DNA, 20 bp, synthetic construct
  source 1..20: mol_type = other DNA
catttaaacagaggcttttt

SEQ ID NO: 91465 - DNA, 20 bp, synthetic construct
  source 1..20: mol_type = other DNA
tcatttaaacagaggctttt

SEQ ID NO: 91466 - DNA, 20 bp, synthetic construct
  source 1..20: mol_type = other DNA
ttcatttaaacagaggcttt

SEQ ID NO: 91467 - DNA, 20 bp, synthetic construct
  source 1..20: mol_type = other DNA
tttcatttaaacagaggctt

SEQ ID NO: 91468 - DNA, 20 bp, synthetic construct
  source 1..20: mol_type = other DNA
ctttcatttaaacagaggct

SEQ ID NO: 91469 - DNA, 20 bp, synthetic construct
  source 1..20: mol_type = other DNA
gctttcatttaaacagaggc

SEQ ID NO: 91470 - DNA, 20 bp, synthetic construct
  source 1..20: mol_type = other DNA
tgctttcatttaaacagagg

SEQ ID NO: 91471 - DNA, 20 bp, synthetic construct
  source 1..20: mol_type = other DNA
atgctttcatttaaacagag

SEQ ID NO: 91472 - DNA, 20 bp, synthetic construct
  source 1..20: mol_type = other DNA
aatgctttcatttaaacaga

SEQ ID NO: 91473 - DNA, 20 bp, synthetic construct
  source 1..20: mol_type = other DNA
taatgctttcatttaaacag

SEQ ID NO: 91474 - DNA, 20 bp, synthetic construct
  source 1..20: mol_type = other DNA
ataatgctttcatttaaaca

SEQ ID NO: 91475 - DNA, 20 bp, synthetic construct
  source 1..20: mol_type = other DNA
aataatgctttcatttaaac

SEQ ID NO: 91476 - DNA, 20 bp, synthetic construct
  source 1..20: mol_type = other DNA
aaataatgctttcatttaaa

SEQ ID NO: 91477 - DNA, 20 bp, synthetic construct
  source 1..20: mol_type = other DNA
aaaataatgctttcatttaa

SEQ ID NO: 91478 - DNA, 20 bp, synthetic construct
  source 1..20: mol_type = other DNA
gaaaataatgctttcattta

SEQ ID NO: 91479 - DNA, 20 bp, synthetic construct
  source 1..20: mol_type = other DNA
ggaaaataatgctttcattt

SEQ ID NO: 91480 - DNA, 20 bp, synthetic construct
  source 1..20: mol_type = other DNA
tggaaaataatgctttcatt

SEQ ID NO: 91481 - DNA, 20 bp, synthetic construct
  source 1..20: mol_type = other DNA
ttggaaaataatgctttcat

SEQ ID NO: 91482 - DNA, 20 bp, synthetic construct
  source 1..20: mol_type = other DNA
tttggaaaataatgctttca

SEQ ID NO: 91483 - DNA, 20 bp, synthetic construct
  source 1..20: mol_type = other DNA
ttttggaaaataatgctttc

SEQ ID NO: 91484 - DNA, 20 bp, synthetic construct
  source 1..20: mol_type = other DNA
tttttggaaaataatgcttt

SEQ ID NO: 91485 - DNA, 20 bp, synthetic construct
  source 1..20: mol_type = other DNA
gtttttggaaaataatgctt

SEQ ID NO: 91486 - DNA, 20 bp, synthetic construct
  source 1..20: mol_type = other DNA
tgtttttggaaaataatgct

SEQ ID NO: 91487 - DNA, 20 bp, synthetic construct
  source 1..20: mol_type = other DNA
atgtttttggaaaataatgc

SEQ ID NO: 91488 - DNA, 20 bp, synthetic construct
  source 1..20: mol_type = other DNA
tatgtttttggaaaataatg

SEQ ID NO: 91489 - DNA, 20 bp, synthetic construct
  source 1..20: mol_type = other DNA
ctatgtttttggaaaataat

SEQ ID NO: 91490 - DNA, 20 bp, synthetic construct
  source 1..20: mol_type = other DNA
cctatgtttttggaaaataa

SEQ ID NO: 91491 - DNA, 20 bp, synthetic construct
  source 1..20: mol_type = other DNA
tcctatgtttttggaaaata

SEQ ID NO: 91492 - DNA, 20 bp, synthetic construct
  source 1..20: mol_type = other DNA
ttcctatgtttttggaaaat

SEQ ID NO: 91493 - DNA, 20 bp, synthetic construct
  source 1..20: mol_type = other DNA
tttcctatgtttttggaaaa

SEQ ID NO: 91494 - DNA, 20 bp, synthetic construct
  source 1..20: mol_type = other DNA
atttcctatgtttttggaaa

SEQ ID NO: 91495 - DNA, 20 bp, synthetic construct
  source 1..20: mol_type = other DNA
gatttcctatgtttttggaa

SEQ ID NO: 91496 - DNA, 20 bp, synthetic construct
  source 1..20: mol_type = other DNA
tgatttcctatgtttttgga

SEQ ID NO: 91497 - DNA, 20 bp, synthetic construct
  source 1..20: mol_type = other DNA
ttgatttcctatgtttttgg

SEQ ID NO: 91498 - DNA, 20 bp, synthetic construct
  source 1..20: mol_type = other DNA
tttgatttcctatgtttttg

SEQ ID NO: 91499 - DNA, 20 bp, synthetic construct
  source 1..20: mol_type = other DNA
ttttgatttcctatgttttt

SEQ ID NO: 91500 - DNA, 20 bp, synthetic construct
  source 1..20: mol_type = other DNA
attttgatttcctatgtttt

SEQ ID NO: 91501 - DNA, 20 bp, synthetic construct
  source 1..20: mol_type = other DNA
aattttgatttcctatgttt

SEQ ID NO: 91502 - DNA, 20 bp, synthetic construct
  source 1..20: mol_type = other DNA
taattttgatttcctatgtt

SEQ ID NO: 91503 - DNA, 20 bp, synthetic construct
  source 1..20: mol_type = other DNA
ataattttgatttcctatgt

SEQ ID NO: 91504 - DNA, 20 bp, synthetic construct
  source 1..20: mol_type = other DNA
aataattttgatttcctatg

SEQ ID NO: 91505 - DNA, 20 bp, synthetic construct
  source 1..20: mol_type = other DNA
caataattttgatttcctat

SEQ ID NO: 91506 - DNA, 20 bp, synthetic construct
  source 1..20: mol_type = other DNA
acaataattttgatttccta

SEQ ID NO: 91507 - DNA, 20 bp, synthetic construct
  source 1..20: mol_type = other DNA
aacaataattttgatttcct

SEQ ID NO: 91508 - DNA, 20 bp, synthetic construct
  source 1..20: mol_type = other DNA
gaacaataattttgatttcc

SEQ ID NO: 91509 - DNA, 20 bp, synthetic construct
  source 1..20: mol_type = other DNA
tgaacaataattttgatttc

SEQ ID NO: 91510 - DNA, 20 bp, synthetic construct
  source 1..20: mol_type = other DNA
ctgaacaataattttgattt

SEQ ID NO: 91511 - DNA, 20 bp, synthetic construct
  source 1..20: mol_type = other DNA
actgaacaataattttgatt

SEQ ID NO: 91512 - DNA, 20 bp, synthetic construct
  source 1..20: mol_type = other DNA
cactgaacaataattttgat

SEQ ID NO: 91513 - DNA, 20 bp, synthetic construct
  source 1..20: mol_type = other DNA
acactgaacaataattttga

SEQ ID NO: 91514 - DNA, 20 bp, synthetic construct
  source 1..20: mol_type = other DNA
aacactgaacaataattttg

SEQ ID NO: 91515 - DNA, 20 bp, synthetic construct
  source 1..20: mol_type = other DNA
aaacactgaacaataatttt

SEQ ID NO: 91516 - DNA, 20 bp, synthetic construct
  source 1..20: mol_type = other DNA
aaaacactgaacaataattt

SEQ ID NO: 91517 - DNA, 20 bp, synthetic construct
  source 1..20: mol_type = other DNA
gaaaacactgaacaataatt

SEQ ID NO: 91518 - DNA, 20 bp, synthetic construct
  source 1..20: mol_type = other DNA
agaaaacactgaacaataat

SEQ ID NO: 91519 - DNA, 20 bp, synthetic construct
  source 1..20: mol_type = other DNA
aagaaaacactgaacaataa

SEQ ID NO: 91520 - DNA, 20 bp, synthetic construct
  source 1..20: mol_type = other DNA
caagaaaacactgaacaata

SEQ ID NO: 91521 - DNA, 20 bp, synthetic construct
  source 1..20: mol_type = other DNA
acaagaaaacactgaacaat

SEQ ID NO: 91522 - DNA, 20 bp, synthetic construct
  source 1..20: mol_type = other DNA
aacaagaaaacactgaacaa

SEQ ID NO: 91523 - DNA, 20 bp, synthetic construct
  source 1..20: mol_type = other DNA
aaacaagaaaacactgaaca

SEQ ID NO: 91524 - DNA, 20 bp, synthetic construct
  source 1..20: mol_type = other DNA
aaaacaagaaaacactgaac

SEQ ID NO: 91525 - DNA, 20 bp, synthetic construct
  source 1..20: mol_type = other DNA
caaaacaagaaaacactgaa

SEQ ID NO: 91526 - DNA, 20 bp, synthetic construct
  source 1..20: mol_type = other DNA
gcaaaacaagaaaacactga

SEQ ID NO: 91527 - DNA, 20 bp, synthetic construct
  source 1..20: mol_type = other DNA
agcaaaacaagaaaacactg

SEQ ID NO: 91528 - DNA, 20 bp, synthetic construct
  source 1..20: mol_type = other DNA
aagcaaaacaagaaaacact

SEQ ID NO: 91529 - DNA, 20 bp, synthetic construct
  source 1..20: mol_type = other DNA
aaagcaaaacaagaaaacac

SEQ ID NO: 91530 - DNA, 20 bp, synthetic construct
  source 1..20: mol_type = other DNA
aaaagcaaaacaagaaaaca

SEQ ID NO: 91531 - DNA, 20 bp, synthetic construct
  source 1..20: mol_type = other DNA
gaaaagcaaaacaagaaaac

SEQ ID NO: 91532 - DNA, 20 bp, synthetic construct
  source 1..20: mol_type = other DNA
agaaaagcaaaacaagaaaa

SEQ ID NO: 91533 - DNA, 20 bp, synthetic construct
  source 1..20: mol_type = other DNA
tagaaaagcaaaacaagaaa

SEQ ID NO: 91534 - DNA, 20 bp, synthetic construct
  source 1..20: mol_type = other DNA
ttagaaaagcaaaacaagaa

SEQ ID NO: 91535 - DNA, 20 bp, synthetic construct
  source 1..20: mol_type = other DNA
gttagaaaagcaaaacaaga

SEQ ID NO: 91536 - DNA, 20 bp, synthetic construct
  source 1..20: mol_type = other DNA
agttagaaaagcaaaacaag

SEQ ID NO: 91537 - DNA, 20 bp, synthetic construct
  source 1..20: mol_type = other DNA
aagttagaaaagcaaaacaa

SEQ ID NO: 91538 - DNA, 20 bp, synthetic construct
  source 1..20: mol_type = other DNA
taagttagaaaagcaaaaca

SEQ ID NO: 91539 - DNA, 20 bp, synthetic construct
  source 1..20: mol_type = other DNA
ataagttagaaaagcaaaac

SEQ ID NO: 91540 - DNA, 20 bp, synthetic construct
  source 1..20: mol_type = other DNA
gataagttagaaaagcaaaa

SEQ ID NO: 91541 - DNA, 20 bp, synthetic construct
  source 1..20: mol_type = other DNA
agataagttagaaaagcaaa

SEQ ID NO: 91542 - DNA, 20 bp, synthetic construct
  source 1..20: mol_type = other DNA
cagataagttagaaaagcaa

SEQ ID NO: 91543 - DNA, 20 bp, synthetic construct
  source 1..20: mol_type = other DNA
tcagataagttagaaaagca

SEQ ID NO: 91544 - DNA, 20 bp, synthetic construct
  source 1..20: mol_type = other DNA
ttcagataagttagaaaagc

SEQ ID NO: 91545 - DNA, 20 bp, synthetic construct
  source 1..20: mol_type = other DNA
attcagataagttagaaaag

SEQ ID NO: 91546 - DNA, 20 bp, synthetic construct
  source 1..20: mol_type = other DNA
aattcagataagttagaaaa

SEQ ID NO: 91547 - DNA, 20 bp, synthetic construct
  source 1..20: mol_type = other DNA
aaattcagataagttagaaa

SEQ ID NO: 91548 - DNA, 20 bp, synthetic construct
  source 1..20: mol_type = other DNA
aaaattcagataagttagaa

SEQ ID NO: 91549 - DNA, 20 bp, synthetic construct
  source 1..20: mol_type = other DNA
aaaaattcagataagttaga

SEQ ID NO: 91550 - DNA, 20 bp, synthetic construct
  source 1..20: mol_type = other DNA
aaaaaattcagataagttag

SEQ ID NO: 91551 - DNA, 20 bp, synthetic construct
  source 1..20: mol_type = other DNA
aaaaaaattcagataagtta

SEQ ID NO: 91552 - DNA, 20 bp, synthetic construct
  source 1..20: mol_type = other DNA
aaaaaaaattcagataagtt

SEQ ID NO: 91553 - DNA, 20 bp, synthetic construct
  source 1..20: mol_type = other DNA
taaaaaaaattcagataagt

SEQ ID NO: 91554 - DNA, 20 bp, synthetic construct
  source 1..20: mol_type = other DNA
ttaaaaaaaattcagataag

SEQ ID NO: 91555 - DNA, 20 bp, synthetic construct
  source 1..20: mol_type = other DNA
tttaaaaaaaattcagataa

SEQ ID NO: 91556 - DNA, 20 bp, synthetic construct
  source 1..20: mol_type = other DNA
ttttaaaaaaaattcagata

SEQ ID NO: 91557 - DNA, 20 bp, synthetic construct
  source 1..20: mol_type = other DNA
tttttaaaaaaaattcagat

SEQ ID NO: 91558 - DNA, 20 bp, synthetic construct
  source 1..20: mol_type = other DNA
ttttttaaaaaaaattcaga

SEQ ID NO: 91559 - DNA, 20 bp, synthetic construct
  source 1..20: mol_type = other DNA
attttttaaaaaaaattcag

SEQ ID NO: 91560 - DNA, 20 bp, synthetic construct
  source 1..20: mol_type = other DNA
aattttttaaaaaaaattca

SEQ ID NO: 91561 - DNA, 20 bp, synthetic construct
  source 1..20: mol_type = other DNA
caattttttaaaaaaaattc

SEQ ID NO: 91562 - DNA, 20 bp, synthetic construct
  source 1..20: mol_type = other DNA
acaattttttaaaaaaaatt

SEQ ID NO: 91563 - DNA, 20 bp, synthetic construct
  source 1..20: mol_type = other DNA
aacaattttttaaaaaaaat

SEQ ID NO: 91564 - DNA, 20 bp, synthetic construct
  source 1..20: mol_type = other DNA
aaacaattttttaaaaaaaa

SEQ ID NO: 91565 - DNA, 20 bp, synthetic construct
  source 1..20: mol_type = other DNA
aaaacaattttttaaaaaaa

SEQ ID NO: 91566 - DNA, 20 bp, synthetic construct
  source 1..20: mol_type = other DNA
gaaaacaattttttaaaaaa

SEQ ID NO: 91567 - DNA, 20 bp, synthetic construct
  source 1..20: mol_type = other DNA
agaaaacaattttttaaaaa

SEQ ID NO: 91568 - DNA, 20 bp, synthetic construct
  source 1..20: mol_type = other DNA
tagaaaacaattttttaaaa

SEQ ID NO: 91569 - DNA, 20 bp, synthetic construct
  source 1..20: mol_type = other DNA
ctagaaaacaattttttaaa

SEQ ID NO: 91570 - DNA, 20 bp, synthetic construct
  source 1..20: mol_type = other DNA
gctagaaaacaattttttaa

SEQ ID NO: 91571 - DNA, 20 bp, synthetic construct
  source 1..20: mol_type = other DNA
agctagaaaacaatttttta

SEQ ID NO: 91572 - DNA, 20 bp, synthetic construct
  source 1..20: mol_type = other DNA
tagctagaaaacaatttttt

SEQ ID NO: 91573 - DNA, 20 bp, synthetic construct
  source 1..20: mol_type = other DNA
ttagctagaaaacaattttt

SEQ ID NO: 91574 - DNA, 20 bp, synthetic construct
  source 1..20: mol_type = other DNA
tttagctagaaaacaatttt

SEQ ID NO: 91575 - DNA, 20 bp, synthetic construct
  source 1..20: mol_type = other DNA
ctttagctagaaaacaattt

SEQ ID NO: 91576 - DNA, 20 bp, synthetic construct
  source 1..20: mol_type = other DNA
tctttagctagaaaacaatt

SEQ ID NO: 91577 - DNA, 20 bp, synthetic construct
  source 1..20: mol_type = other DNA
atctttagctagaaaacaat

SEQ ID NO: 91578 - DNA, 20 bp, synthetic construct
  source 1..20: mol_type = other DNA
aatctttagctagaaaacaa

SEQ ID NO: 91579 - DNA, 20 bp, synthetic construct
  source 1..20: mol_type = other DNA
gaatctttagctagaaaaca

SEQ ID NO: 91580 - DNA, 20 bp, synthetic construct
  source 1..20: mol_type = other DNA
ggaatctttagctagaaaac

SEQ ID NO: 91581 - DNA, 20 bp, synthetic construct
  source 1..20: mol_type = other DNA
tggaatctttagctagaaaa

SEQ ID NO: 91582 - DNA, 20 bp, synthetic construct
  source 1..20: mol_type = other DNA
ctggaatctttagctagaaa

SEQ ID NO: 91583 - DNA, 20 bp, synthetic construct
  source 1..20: mol_type = other DNA
cctggaatctttagctagaa

SEQ ID NO: 91584 - DNA, 20 bp, synthetic construct
  source 1..20: mol_type = other DNA
gcctggaatctttagctaga

SEQ ID NO: 91585 - DNA, 20 bp, synthetic construct
  source 1..20: mol_type = other DNA
agcctggaatctttagctag

SEQ ID NO: 91586 - DNA, 20 bp, synthetic construct
  source 1..20: mol_type = other DNA
aagcctggaatctttagcta

SEQ ID NO: 91587 - DNA, 20 bp, synthetic construct
  source 1..20: mol_type = other DNA
gaagcctggaatctttagct

SEQ ID NO: 91588 - DNA, 20 bp, synthetic construct
  source 1..20: mol_type = other DNA
tgaagcctggaatctttagc

SEQ ID NO: 91589 - DNA, 20 bp, synthetic construct
  source 1..20: mol_type = other DNA
ttgaagcctggaatctttag

SEQ ID NO: 91590 - DNA, 20 bp, synthetic construct
  source 1..20: mol_type = other DNA
cttgaagcctggaatcttta

SEQ ID NO: 91591 - DNA, 20 bp, synthetic construct
  source 1..20: mol_type = other DNA
tcttgaagcctggaatcttt

SEQ ID NO: 91592 - DNA, 20 bp, synthetic construct
  source 1..20: mol_type = other DNA
atcttgaagcctggaatctt

SEQ ID NO: 91593 - DNA, 20 bp, synthetic construct
  source 1..20: mol_type = other DNA
gatcttgaagcctggaatct

SEQ ID NO: 91594 - DNA, 20 bp, synthetic construct
  source 1..20: mol_type = other DNA
tgatcttgaagcctggaatc

SEQ ID NO: 91595 - DNA, 20 bp, synthetic construct
  source 1..20: mol_type = other DNA
ctgatcttgaagcctggaat

SEQ ID NO: 91596 - DNA, 20 bp, synthetic construct
  source 1..20: mol_type = other DNA
tctgatcttgaagcctggaa

SEQ ID NO: 91597 - DNA, 20 bp, synthetic construct
  source 1..20: mol_type = other DNA
ctctgatcttgaagcctgga

SEQ ID NO: 91598 - DNA, 20 bp, synthetic construct
  source 1..20: mol_type = other DNA
cctctgatcttgaagcctgg

SEQ ID NO: 91599 - DNA, 20 bp, synthetic construct
  source 1..20: mol_type = other DNA
gcctctgatcttgaagcctg

SEQ ID NO: 91600 - DNA, 20 bp, synthetic construct
  source 1..20: mol_type = other DNA
tgcctctgatcttgaagcct

SEQ ID NO: 91601 - DNA, 20 bp, synthetic construct
  source 1..20: mol_type = other DNA
ctgcctctgatcttgaagcc

SEQ ID NO: 91602 - DNA, 20 bp, synthetic construct
  source 1..20: mol_type = other DNA
tctgcctctgatcttgaagc

SEQ ID NO: 91603 - DNA, 20 bp, synthetic construct
  source 1..20: mol_type = other DNA
ttctgcctctgatcttgaag

SEQ ID NO: 91604 - DNA, 20 bp, synthetic construct
  source 1..20: mol_type = other DNA
gttctgcctctgatcttgaa

SEQ ID NO: 91605 - DNA, 20 bp, synthetic construct
  source 1..20: mol_type = other DNA
agttctgcctctgatcttga

SEQ ID NO: 91606 - DNA, 20 bp, synthetic construct
  source 1..20: mol_type = other DNA
gagttctgcctctgatcttg

SEQ ID NO: 91607 - DNA, 20 bp, synthetic construct
  source 1..20: mol_type = other DNA
agagttctgcctctgatctt

SEQ ID NO: 91608 - DNA, 20 bp, synthetic construct
  source 1..20: mol_type = other DNA
gagagttctgcctctgatct

SEQ ID NO: 91609 - DNA, 20 bp, synthetic construct
  source 1..20: mol_type = other DNA
ggagagttctgcctctgatc

SEQ ID NO: 91610 - DNA, 20 bp, synthetic construct
  source 1..20: mol_type = other DNA
aggagagttctgcctctgat

SEQ ID NO: 91611 - DNA, 20 bp, synthetic construct
  source 1..20: mol_type = other DNA
caggagagttctgcctctga

SEQ ID NO: 91612 - DNA, 20 bp, synthetic construct
  source 1..20: mol_type = other DNA
gcaggagagttctgcctctg

SEQ ID NO: 91613 - DNA, 20 bp, synthetic construct
  source 1..20: mol_type = other DNA
tgcaggagagttctgcctct

SEQ ID NO: 91614 - DNA, 20 bp, synthetic construct
  source 1..20: mol_type = other DNA
ctgcaggagagttctgcctc

SEQ ID NO: 91615 - DNA, 20 bp, synthetic construct
  source 1..20: mol_type = other DNA
cctgcaggagagttctgcct

SEQ ID NO: 91616 - DNA, 20 bp, synthetic construct
  source 1..20: mol_type = other DNA
ccctgcaggagagttctgcc

SEQ ID NO: 91617 - DNA, 20 bp, synthetic construct
  source 1..20: mol_type = other DNA
tccctgcaggagagttctgc

SEQ ID NO: 91618 - DNA, 20 bp, synthetic construct
  source 1..20: mol_type = other DNA
ttccctgcaggagagttctg

SEQ ID NO: 91619 - DNA, 20 bp, synthetic construct
  source 1..20: mol_type = other DNA
attccctgcaggagagttct

SEQ ID NO: 91620 - DNA, 20 bp, synthetic construct
  source 1..20: mol_type = other DNA
tattccctgcaggagagttc

SEQ ID NO: 91621 - DNA, 20 bp, synthetic construct
  source 1..20: mol_type = other DNA
ttattccctgcaggagagtt

SEQ ID NO: 91622 - DNA, 20 bp, synthetic construct
  source 1..20: mol_type = other DNA
tttattccctgcaggagagt

SEQ ID NO: 91623 - DNA, 20 bp, synthetic construct
  source 1..20: mol_type = other DNA
ctttattccctgcaggagag

SEQ ID NO: 91624 - DNA, 20 bp, synthetic construct
  source 1..20: mol_type = other DNA
tctttattccctgcaggaga

SEQ ID NO: 91625 - DNA, 20 bp, synthetic construct
  source 1..20: mol_type = other DNA
ttctttattccctgcaggag

SEQ ID NO: 91626 - DNA, 20 bp, synthetic construct
  source 1..20: mol_type = other DNA
tttctttattccctgcagga

SEQ ID NO: 91627 - DNA, 20 bp, synthetic construct
  source 1..20: mol_type = other DNA
ttttctttattccctgcagg

SEQ ID NO: 91628 - DNA, 20 bp, synthetic construct
  source 1..20: mol_type = other DNA
attttctttattccctgcag

SEQ ID NO: 91629 - DNA, 20 bp, synthetic construct
  source 1..20: mol_type = other DNA
tattttctttattccctgca

SEQ ID NO: 91630 - DNA, 20 bp, synthetic construct
  source 1..20: mol_type = other DNA
atattttctttattccctgc

SEQ ID NO: 91631 - DNA, 20 bp, synthetic construct
  source 1..20: mol_type = other DNA
aatattttctttattccctg

SEQ ID NO: 91632 - DNA, 20 bp, synthetic construct
  source 1..20: mol_type = other DNA
taatattttctttattccct

SEQ ID NO: 91633 - DNA, 20 bp, synthetic construct
  source 1..20: mol_type = other DNA
ttaatattttctttattccc

SEQ ID NO: 91634 - DNA, 20 bp, synthetic construct
  source 1..20: mol_type = other DNA
tttaatattttctttattcc

SEQ ID NO: 91635 - DNA, 20 bp, synthetic construct
  source 1..20: mol_type = other DNA
gtttaatattttctttattc

SEQ ID NO: 91636 - DNA, 20 bp, synthetic construct
  source 1..20: mol_type = other DNA
ggtttaatattttctttatt

SEQ ID NO: 91637 - DNA, 20 bp, synthetic construct
  source 1..20: mol_type = other DNA
gggtttaatattttctttat

SEQ ID NO: 91638 - DNA, 20 bp, synthetic construct
  source 1..20: mol_type = other DNA
tgggtttaatattttcttta

SEQ ID NO: 91639 - DNA, 20 bp, synthetic construct
  source 1..20: mol_type = other DNA
ttgggtttaatattttcttt

SEQ ID NO: 91640 - DNA, 20 bp, synthetic construct
  source 1..20: mol_type = other DNA
attgggtttaatattttctt

SEQ ID NO: 91641 - DNA, 20 bp, synthetic construct
  source 1..20: mol_type = other DNA
cattgggtttaatattttct

SEQ ID NO: 91642 - DNA, 20 bp, synthetic construct
  source 1..20: mol_type = other DNA
tcattgggtttaatattttc

SEQ ID NO: 91643 - DNA, 20 bp, synthetic construct
  source 1..20: mol_type = other DNA
ttcattgggtttaatatttt

SEQ ID NO: 91644 - DNA, 20 bp, synthetic construct
  source 1..20: mol_type = other DNA
tttcattgggtttaatattt

SEQ ID NO: 91645 - DNA, 20 bp, synthetic construct
  source 1..20: mol_type = other DNA
gtttcattgggtttaatatt

SEQ ID NO: 91646 - DNA, 20 bp, synthetic construct
  source 1..20: mol_type = other DNA
tgtttcattgggtttaatat

SEQ ID NO: 91647 - DNA, 20 bp, synthetic construct
  source 1..20: mol_type = other DNA
atgtttcattgggtttaata

SEQ ID NO: 91648 - DNA, 20 bp, synthetic construct
  source 1..20: mol_type = other DNA
gatgtttcattgggtttaat

SEQ ID NO: 91649 - DNA, 20 bp, synthetic construct
  source 1..20: mol_type = other DNA
tgatgtttcattgggtttaa

SEQ ID NO: 91650 - DNA, 20 bp, synthetic construct
  source 1..20: mol_type = other DNA
gtgatgtttcattgggttta

SEQ ID NO: 91651 - DNA, 20 bp, synthetic construct
  source 1..20: mol_type = other DNA
ggtgatgtttcattgggttt

SEQ ID NO: 91652 - DNA, 20 bp, synthetic construct
  source 1..20: mol_type = other DNA
aggtgatgtttcattgggtt

SEQ ID NO: 91653 - DNA, 20 bp, synthetic construct
  source 1..20: mol_type = other DNA
taggtgatgtttcattgggt

SEQ ID NO: 91654 - DNA, 20 bp, synthetic construct
  source 1..20: mol_type = other DNA
ctaggtgatgtttcattggg

SEQ ID NO: 91655 - DNA, 20 bp, synthetic construct
  source 1..20: mol_type = other DNA
gctaggtgatgtttcattgg

SEQ ID NO: 91656 - DNA, 20 bp, synthetic construct
  source 1..20: mol_type = other DNA
agctaggtgatgtttcattg

SEQ ID NO: 91657 - DNA, 20 bp, synthetic construct
  source 1..20: mol_type = other DNA
aagctaggtgatgtttcatt

SEQ ID NO: 91658 - DNA, 20 bp, synthetic construct
  source 1..20: mol_type = other DNA
gaagctaggtgatgtttcat

SEQ ID NO: 91659 - DNA, 20 bp, synthetic construct
  source 1..20: mol_type = other DNA
agaagctaggtgatgtttca

SEQ ID NO: 91660 - DNA, 20 bp, synthetic construct
  source 1..20: mol_type = other DNA
gagaagctaggtgatgtttc

SEQ ID NO: 91661 - DNA, 20 bp, synthetic construct
  source 1..20: mol_type = other DNA
tgagaagctaggtgatgttt

SEQ ID NO: 91662 - DNA, 20 bp, synthetic construct
  source 1..20: mol_type = other DNA
ttgagaagctaggtgatgtt

SEQ ID NO: 91663 - DNA, 20 bp, synthetic construct
  source 1..20: mol_type = other DNA
tttgagaagctaggtgatgt

SEQ ID NO: 91664 - DNA, 20 bp, synthetic construct
  source 1..20: mol_type = other DNA
ttttgagaagctaggtgatg

SEQ ID NO: 91665 - DNA, 20 bp, synthetic construct
  source 1..20: mol_type = other DNA
cttttgagaagctaggtgat

SEQ ID NO: 91666 - DNA, 20 bp, synthetic construct
  source 1..20: mol_type = other DNA
gcttttgagaagctaggtga

SEQ ID NO: 91667 - DNA, 20 bp, synthetic construct
  source 1..20: mol_type = other DNA
agcttttgagaagctaggtg

SEQ ID NO: 91668 - DNA, 20 bp, synthetic construct
  source 1..20: mol_type = other DNA
cagcttttgagaagctaggt

SEQ ID NO: 91669 - DNA, 20 bp, synthetic construct
  source 1..20: mol_type = other DNA
tcagcttttgagaagctagg

SEQ ID NO: 91670 - DNA, 20 bp, synthetic construct
  source 1..20: mol_type = other DNA
ttcagcttttgagaagctag

SEQ ID NO: 91671 - DNA, 20 bp, synthetic construct
  source 1..20: mol_type = other DNA
tttcagcttttgagaagcta

SEQ ID NO: 91672 - DNA, 20 bp, synthetic construct
  source 1..20: mol_type = other DNA
ttttcagcttttgagaagct

SEQ ID NO: 91673 - DNA, 20 bp, synthetic construct
  source 1..20: mol_type = other DNA
gttttcagcttttgagaagc

SEQ ID NO: 91674 - DNA, 20 bp, synthetic construct
  source 1..20: mol_type = other DNA
tgttttcagcttttgagaag

SEQ ID NO: 91675 - DNA, 20 bp, synthetic construct
  source 1..20: mol_type = other DNA
ttgttttcagcttttgagaa

SEQ ID NO: 91676 - DNA, 20 bp, synthetic construct
  source 1..20: mol_type = other DNA
tttgttttcagcttttgaga

SEQ ID NO: 91677 - DNA, 20 bp, synthetic construct
  source 1..20: mol_type = other DNA
ctttgttttcagcttttgag

SEQ ID NO: 91678 - DNA, 20 bp, synthetic construct
  source 1..20: mol_type = other DNA
cctttgttttcagcttttga

SEQ ID NO: 91679 - DNA, 20 bp, synthetic construct
  source 1..20: mol_type = other DNA
acctttgttttcagcttttg

SEQ ID NO: 91680 - DNA, 20 bp, synthetic construct
  source 1..20: mol_type = other DNA
aacctttgttttcagctttt

SEQ ID NO: 91681 - DNA, 20 bp, synthetic construct
  source 1..20: mol_type = other DNA
taacctttgttttcagcttt

SEQ ID NO: 91682 - DNA, 20 bp, synthetic construct
  source 1..20: mol_type = other DNA
ctaacctttgttttcagctt

SEQ ID NO: 91683 - DNA, 20 bp, synthetic construct
  source 1..20: mol_type = other DNA
tctaacctttgttttcagct

SEQ ID NO: 91684 - DNA, 20 bp, synthetic construct
  source 1..20: mol_type = other DNA
ctctaacctttgttttcagc

SEQ ID NO: 91685 - DNA, 20 bp, synthetic construct
  source 1..20: mol_type = other DNA
actctaacctttgttttcag

SEQ ID NO: 91686 - DNA, 20 bp, synthetic construct
  source 1..20: mol_type = other DNA
aactctaacctttgttttca

SEQ ID NO: 91687 - DNA, 20 bp, synthetic construct
  source 1..20: mol_type = other DNA
aaactctaacctttgttttc

SEQ ID NO: 91688 - DNA, 20 bp, synthetic construct
  source 1..20: mol_type = other DNA
taaactctaacctttgtttt

SEQ ID NO: 91689 - DNA, 20 bp, synthetic construct
  source 1..20: mol_type = other DNA
ttaaactctaacctttgttt

SEQ ID NO: 91690 - DNA, 20 bp, synthetic construct
  source 1..20: mol_type = other DNA
tttaaactctaacctttgtt

SEQ ID NO: 91691 - DNA, 20 bp, synthetic construct
  source 1..20: mol_type = other DNA
ctttaaactctaacctttgt

SEQ ID NO: 91692 - DNA, 20 bp, synthetic construct
  source 1..20: mol_type = other DNA
tctttaaactctaacctttg

SEQ ID NO: 91693 - DNA, 20 bp, synthetic construct
  source 1..20: mol_type = other DNA
ctctttaaactctaaccttt

SEQ ID NO: 91694 - DNA, 20 bp, synthetic construct
  source 1..20: mol_type = other DNA
actctttaaactctaacctt

SEQ ID NO: 91695 - DNA, 20 bp, synthetic construct
  source 1..20: mol_type = other DNA
gactctttaaactctaacct

SEQ ID NO: 91696 - DNA, 20 bp, synthetic construct
  source 1..20: mol_type = other DNA
tgactctttaaactctaacc

SEQ ID NO: 91697 - DNA, 20 bp, synthetic construct
  source 1..20: mol_type = other DNA
atgactctttaaactctaac

SEQ ID NO: 91698 - DNA, 20 bp, synthetic construct
  source 1..20: mol_type = other DNA
aatgactctttaaactctaa

SEQ ID NO: 91699 - DNA, 20 bp, synthetic construct
  source 1..20: mol_type = other DNA
taatgactctttaaactcta

SEQ ID NO: 91700 - DNA, 20 bp, synthetic construct
  source 1..20: mol_type = other DNA
ttaatgactctttaaactct

SEQ ID NO: 91701 - DNA, 20 bp, synthetic construct
  source 1..20: mol_type = other DNA
cttaatgactctttaaactc

SEQ ID NO: 91702 - DNA, 20 bp, synthetic construct
  source 1..20: mol_type = other DNA
gcttaatgactctttaaact

SEQ ID NO: 91703 - DNA, 20 bp, synthetic construct
  source 1..20: mol_type = other DNA
agcttaatgactctttaaac

SEQ ID NO: 91704 - DNA, 20 bp, synthetic construct
  source 1..20: mol_type = other DNA
aagcttaatgactctttaaa

SEQ ID NO: 91705 - DNA, 20 bp, synthetic construct
  source 1..20: mol_type = other DNA
taagcttaatgactctttaa

SEQ ID NO: 91706 - DNA, 20 bp, synthetic construct
  source 1..20: mol_type = other DNA
ttaagcttaatgactcttta

SEQ ID NO: 91707 - DNA, 20 bp, synthetic construct
  source 1..20: mol_type = other DNA
gttaagcttaatgactcttt

SEQ ID NO: 91708 - DNA, 20 bp, synthetic construct
  source 1..20: mol_type = other DNA
agttaagcttaatgactctt

SEQ ID NO: 91709 - DNA, 20 bp, synthetic construct
  source 1..20: mol_type = other DNA
cagttaagcttaatgactct

SEQ ID NO: 91710 - DNA, 20 bp, synthetic construct
  source 1..20: mol_type = other DNA
acagttaagcttaatgactc

SEQ ID NO: 91711 - DNA, 20 bp, synthetic construct
  source 1..20: mol_type = other DNA
tacagttaagcttaatgact

SEQ ID NO: 91712 - DNA, 20 bp, synthetic construct
  source 1..20: mol_type = other DNA
ctacagttaagcttaatgac

SEQ ID NO: 91713 - DNA, 20 bp, synthetic construct
  source 1..20: mol_type = other DNA
cctacagttaagcttaatga

SEQ ID NO: 91714 - DNA, 20 bp, synthetic construct
  source 1..20: mol_type = other DNA
tcctacagttaagcttaatg

SEQ ID NO: 91715 - DNA, 20 bp, synthetic construct
  source 1..20: mol_type = other DNA
ttcctacagttaagcttaat

SEQ ID NO: 91716 - DNA, 20 bp, synthetic construct
  source 1..20: mol_type = other DNA
attcctacagttaagcttaa

SEQ ID NO: 91717 - DNA, 20 bp, synthetic construct
  source 1..20: mol_type = other DNA
tattcctacagttaagctta

SEQ ID NO: 91718 - DNA, 20 bp, synthetic construct
  source 1..20: mol_type = other DNA
ctattcctacagttaagctt

SEQ ID NO: 91719 - DNA, 20 bp, synthetic construct
  source 1..20: mol_type = other DNA
cctattcctacagttaagct

SEQ ID NO: 91720 - DNA, 20 bp, synthetic construct
  source 1..20: mol_type = other DNA
tcctattcctacagttaagc

SEQ ID NO: 91721 - DNA, 20 bp, synthetic construct
  source 1..20: mol_type = other DNA
ttcctattcctacagttaag

SEQ ID NO: 91722 - DNA, 20 bp, synthetic construct
  source 1..20: mol_type = other DNA
cttcctattcctacagttaa

SEQ ID NO: 91723 - DNA, 20 bp, synthetic construct
  source 1..20: mol_type = other DNA
tcttcctattcctacagtta

SEQ ID NO: 91724 - DNA, 20 bp, synthetic construct
  source 1..20: mol_type = other DNA
ttcttcctattcctacagtt

SEQ ID NO: 91725 - DNA, 20 bp, synthetic construct
  source 1..20: mol_type = other DNA
cttcttcctattcctacagt

SEQ ID NO: 91726 - DNA, 20 bp, synthetic construct
  source 1..20: mol_type = other DNA
acttcttcctattcctacag

SEQ ID NO: 91727 - DNA, 20 bp, synthetic construct
  source 1..20: mol_type = other DNA
tacttcttcctattcctaca

SEQ ID NO: 91728 - DNA, 20 bp, synthetic construct
  source 1..20: mol_type = other DNA
atacttcttcctattcctac

SEQ ID NO: 91729 - DNA, 20 bp, synthetic construct
  source 1..20: mol_type = other DNA
catacttcttcctattccta

SEQ ID NO: 91730 - DNA, 20 bp, synthetic construct
  source 1..20: mol_type = other DNA
acatacttcttcctattcct

SEQ ID NO: 91731 - DNA, 20 bp, synthetic construct
  source 1..20: mol_type = other DNA
gacatacttcttcctattcc

SEQ ID NO: 91732 - DNA, 20 bp, synthetic construct
  source 1..20: mol_type = other DNA
agacatacttcttcctattc

SEQ ID NO: 91733 - DNA, 20 bp, synthetic construct
  source 1..20: mol_type = other DNA
tagacatacttcttcctatt

SEQ ID NO: 91734 - DNA, 20 bp, synthetic construct
  source 1..20: mol_type = other DNA
ttagacatacttcttcctat

SEQ ID NO: 91735 - DNA, 20 bp, synthetic construct
  source 1..20: mol_type = other DNA
attagacatacttcttccta

SEQ ID NO: 91736 - DNA, 20 bp, synthetic construct
  source 1..20: mol_type = other DNA
aattagacatacttcttcct

SEQ ID NO: 91737 - DNA, 20 bp, synthetic construct
  source 1..20: mol_type = other DNA
aaattagacatacttcttcc

SEQ ID NO: 91738 - DNA, 20 bp, synthetic construct
  source 1..20: mol_type = other DNA
gaaattagacatacttcttc

SEQ ID NO: 91739 - DNA, 20 bp, synthetic construct
  source 1..20: mol_type = other DNA
tgaaattagacatacttctt

SEQ ID NO: 91740 - DNA, 20 bp, synthetic construct
  source 1..20: mol_type = other DNA
atgaaattagacatacttct

SEQ ID NO: 91741 - DNA, 20 bp, synthetic construct
  source 1..20: mol_type = other DNA
catgaaattagacatacttc

SEQ ID NO: 91742 - DNA, 20 bp, synthetic construct
  source 1..20: mol_type = other DNA
gcatgaaattagacatactt

SEQ ID NO: 91743 - DNA, 20 bp, synthetic construct
  source 1..20: mol_type = other DNA
ggcatgaaattagacatact

SEQ ID NO: 91744 - DNA, 20 bp, synthetic construct
  source 1..20: mol_type = other DNA
gggcatgaaattagacatac

SEQ ID NO: 91745 - DNA, 20 bp, synthetic construct
  source 1..20: mol_type = other DNA
tgggcatgaaattagacata

SEQ ID NO: 91746 - DNA, 20 bp, synthetic construct
  source 1..20: mol_type = other DNA
atgggcatgaaattagacat

SEQ ID NO: 91747 - DNA, 20 bp, synthetic construct
  source 1..20: mol_type = other DNA
tatgggcatgaaattagaca

SEQ ID NO: 91748 - DNA, 20 bp, synthetic construct
  source 1..20: mol_type = other DNA
gtatgggcatgaaattagac

SEQ ID NO: 91749 - DNA, 20 bp, synthetic construct
  source 1..20: mol_type = other DNA
tgtatgggcatgaaattaga

SEQ ID NO: 91750 - DNA, 20 bp, synthetic construct
  source 1..20: mol_type = other DNA
ctgtatgggcatgaaattag

SEQ ID NO: 91751 - DNA, 20 bp, synthetic construct
  source 1..20: mol_type = other DNA
tctgtatgggcatgaaatta

SEQ ID NO: 91752 - DNA, 20 bp, synthetic construct
  source 1..20: mol_type = other DNA
ttctgtatgggcatgaaatt

SEQ ID NO: 91753 - DNA, 20 bp, synthetic construct
  source 1..20: mol_type = other DNA
attctgtatgggcatgaaat

SEQ ID NO: 91754 - DNA, 20 bp, synthetic construct
  source 1..20: mol_type = other DNA
tattctgtatgggcatgaaa

SEQ ID NO: 91755 - DNA, 20 bp, synthetic construct
  source 1..20: mol_type = other DNA
atattctgtatgggcatgaa

SEQ ID NO: 91756 - DNA, 20 bp, synthetic construct
  source 1..20: mol_type = other DNA
aatattctgtatgggcatga

SEQ ID NO: 91757 - DNA, 20 bp, synthetic construct
  source 1..20: mol_type = other DNA
aaatattctgtatgggcatg

SEQ ID NO: 91758 - DNA, 20 bp, synthetic construct
  source 1..20: mol_type = other DNA
aaaatattctgtatgggcat

SEQ ID NO: 91759 - DNA, 20 bp, synthetic construct
  source 1..20: mol_type = other DNA
aaaaatattctgtatgggca

SEQ ID NO: 91760 - DNA, 20 bp, synthetic construct
  source 1..20: mol_type = other DNA
caaaaatattctgtatgggc

SEQ ID NO: 91761 - DNA, 20 bp, synthetic construct
  source 1..20: mol_type = other DNA
acaaaaatattctgtatggg

SEQ ID NO: 91762 - DNA, 20 bp, synthetic construct
  source 1..20: mol_type = other DNA
aacaaaaatattctgtatgg

SEQ ID NO: 91763 - DNA, 20 bp, synthetic construct
  source 1..20: mol_type = other DNA
gaacaaaaatattctgtatg

SEQ ID NO: 91764 - DNA, 20 bp, synthetic construct
  source 1..20: mol_type = other DNA
tgaacaaaaatattctgtat

SEQ ID NO: 91765 - DNA, 20 bp, synthetic construct
  source 1..20: mol_type = other DNA
ttgaacaaaaatattctgta

SEQ ID NO: 91766 - DNA, 20 bp, synthetic construct
  source 1..20: mol_type = other DNA
gttgaacaaaaatattctgt

SEQ ID NO: 91767 - DNA, 20 bp, synthetic construct
  source 1..20: mol_type = other DNA
tgttgaacaaaaatattctg

SEQ ID NO: 91768 - DNA, 20 bp, synthetic construct
  source 1..20: mol_type = other DNA
atgttgaacaaaaatattct

SEQ ID NO: 91769 - DNA, 20 bp, synthetic construct
  source 1..20: mol_type = other DNA
aatgttgaacaaaaatattc

SEQ ID NO: 91770 - DNA, 20 bp, synthetic construct
  source 1..20: mol_type = other DNA
aaatgttgaacaaaaatatt

SEQ ID NO: 91771 - DNA, 20 bp, synthetic construct
  source 1..20: mol_type = other DNA
gaaatgttgaacaaaaatat

SEQ ID NO: 91772 - DNA, 20 bp, synthetic construct
  source 1..20: mol_type = other DNA
agaaatgttgaacaaaaata

SEQ ID NO: 91773 - DNA, 20 bp, synthetic construct
  source 1..20: mol_type = other DNA
aagaaatgttgaacaaaaat

SEQ ID NO: 91774 - DNA, 20 bp, synthetic construct
  source 1..20: mol_type = other DNA
gaagaaatgttgaacaaaaa

SEQ ID NO: 91775 - DNA, 20 bp, synthetic construct
  source 1..20: mol_type = other DNA
agaagaaatgttgaacaaaa

SEQ ID NO: 91776 - DNA, 20 bp, synthetic construct
  source 1..20: mol_type = other DNA
aagaagaaatgttgaacaaa

SEQ ID NO: 91777 - DNA, 20 bp, synthetic construct
  source 1..20: mol_type = other DNA
taagaagaaatgttgaacaa

SEQ ID NO: 91778 - DNA, 20 bp, synthetic construct
  source 1..20: mol_type = other DNA
gtaagaagaaatgttgaaca

SEQ ID NO: 91779 - DNA, 20 bp, synthetic construct
  source 1..20: mol_type = other DNA
agtaagaagaaatgttgaac

SEQ ID NO: 91780 - DNA, 20 bp, synthetic construct
  source 1..20: mol_type = other DNA
tagtaagaagaaatgttgaa

SEQ ID NO: 91781 - DNA, 20 bp, synthetic construct
  source 1..20: mol_type = other DNA
atagtaagaagaaatgttga

SEQ ID NO: 91782 - DNA, 20 bp, synthetic construct
  source 1..20: mol_type = other DNA
aatagtaagaagaaatgttg

SEQ ID NO: 91783 - DNA, 20 bp, synthetic construct
  source 1..20: mol_type = other DNA
caatagtaagaagaaatgtt

SEQ ID NO: 91784 - DNA, 20 bp, synthetic construct
  source 1..20: mol_type = other DNA
acaatagtaagaagaaatgt

SEQ ID NO: 91785 - DNA, 20 bp, synthetic construct
  source 1..20: mol_type = other DNA
cacaatagtaagaagaaatg

SEQ ID NO: 91786 - DNA, 20 bp, synthetic construct
  source 1..20: mol_type = other DNA
tcacaatagtaagaagaaat

SEQ ID NO: 91787 - DNA, 20 bp, synthetic construct
  source 1..20: mol_type = other DNA
atcacaatagtaagaagaaa

SEQ ID NO: 91788 - DNA, 20 bp, synthetic construct
  source 1..20: mol_type = other DNA
tatcacaatagtaagaagaa

SEQ ID NO: 91789 - DNA, 20 bp, synthetic construct
  source 1..20: mol_type = other DNA
ctatcacaatagtaagaaga

SEQ ID NO: 91790 - DNA, 20 bp, synthetic construct
  source 1..20: mol_type = other DNA
tctatcacaatagtaagaag

SEQ ID NO: 91791 - DNA, 20 bp, synthetic construct
  source 1..20: mol_type = other DNA
atctatcacaatagtaagaa

SEQ ID NO: 91792 - DNA, 20 bp, synthetic construct
  source 1..20: mol_type = other DNA
tatctatcacaatagtaaga

SEQ ID NO: 91793 - DNA, 20 bp, synthetic construct
  source 1..20: mol_type = other DNA
ttatctatcacaatagtaag

SEQ ID NO: 91794 - DNA, 20 bp, synthetic construct
  source 1..20: mol_type = other DNA
tttatctatcacaatagtaa

SEQ ID NO: 91795 - DNA, 20 bp, synthetic construct
  source 1..20: mol_type = other DNA
atttatctatcacaatagta

SEQ ID NO: 91796 - DNA, 20 bp, synthetic construct
  source 1..20: mol_type = other DNA
catttatctatcacaatagt

SEQ ID NO: 91797 - DNA, 20 bp, synthetic construct
  source 1..20: mol_type = other DNA
acatttatctatcacaatag

SEQ ID NO: 91798 - DNA, 20 bp, synthetic construct
  source 1..20: mol_type = other DNA
tacatttatctatcacaata

SEQ ID NO: 91799 - DNA, 20 bp, synthetic construct
  source 1..20: mol_type = other DNA
atacatttatctatcacaat

SEQ ID NO: 91800 - DNA, 20 bp, synthetic construct
  source 1..20: mol_type = other DNA
aatacatttatctatcacaa

SEQ ID NO: 91801 - DNA, 20 bp, synthetic construct
  source 1..20: mol_type = other DNA
caatacatttatctatcaca

SEQ ID NO: 91802 - DNA, 20 bp, synthetic construct
  source 1..20: mol_type = other DNA
gcaatacatttatctatcac

SEQ ID NO: 91803 - DNA, 20 bp, synthetic construct
  source 1..20: mol_type = other DNA
agcaatacatttatctatca

SEQ ID NO: 91804 - DNA, 20 bp, synthetic construct
  source 1..20: mol_type = other DNA
aagcaatacatttatctatc

SEQ ID NO: 91805 - DNA, 20 bp, synthetic construct
  source 1..20: mol_type = other DNA
caagcaatacatttatctat

SEQ ID NO: 91806 - DNA, 20 bp, synthetic construct
  source 1..20: mol_type = other DNA
tcaagcaatacatttatcta

SEQ ID NO: 91807 - DNA, 20 bp, synthetic construct
  source 1..20: mol_type = other DNA
gtcaagcaatacatttatct

SEQ ID NO: 91808 - DNA, 20 bp, synthetic construct
  source 1..20: mol_type = other DNA
tgtcaagcaatacatttatc

SEQ ID NO: 91809 - DNA, 20 bp, synthetic construct
  source 1..20: mol_type = other DNA
ttgtcaagcaatacatttat

SEQ ID NO: 91810 - DNA, 20 bp, synthetic construct
  source 1..20: mol_type = other DNA
tttgtcaagcaatacattta

SEQ ID NO: 91811 - DNA, 20 bp, synthetic construct
  source 1..20: mol_type = other DNA
atttgtcaagcaatacattt

SEQ ID NO: 91812 - DNA, 20 bp, synthetic construct
  source 1..20: mol_type = other DNA
aatttgtcaagcaatacatt

SEQ ID NO: 91813 - DNA, 20 bp, synthetic construct
  source 1..20: mol_type = other DNA
gaatttgtcaagcaatacat

SEQ ID NO: 91814 - DNA, 20 bp, synthetic construct
  source 1..20: mol_type = other DNA
ggaatttgtcaagcaataca

SEQ ID NO: 91815 - DNA, 20 bp, synthetic construct
  source 1..20: mol_type = other DNA
tggaatttgtcaagcaatac

SEQ ID NO: 91816 - DNA, 20 bp, synthetic construct
  source 1..20: mol_type = other DNA
ttggaatttgtcaagcaata

SEQ ID NO: 91817 - DNA, 20 bp, synthetic construct
  source 1..20: mol_type = other DNA
tttggaatttgtcaagcaat

SEQ ID NO: 91818 - DNA, 20 bp, synthetic construct
  source 1..20: mol_type = other DNA
ttttggaatttgtcaagcaa

SEQ ID NO: 91819 - DNA, 20 bp, synthetic construct
  source 1..20: mol_type = other DNA
attttggaatttgtcaagca

SEQ ID NO: 91820 - DNA, 20 bp, synthetic construct
  source 1..20: mol_type = other DNA
gattttggaatttgtcaagc

SEQ ID NO: 91821 - DNA, 20 bp, synthetic construct
  source 1..20: mol_type = other DNA
ggattttggaatttgtcaag

SEQ ID NO: 91822 - DNA, 20 bp, synthetic construct
  source 1..20: mol_type = other DNA
tggattttggaatttgtcaa

SEQ ID NO: 91823 - DNA, 20 bp, synthetic construct
  source 1..20: mol_type = other DNA
ttggattttggaatttgtca

SEQ ID NO: 91824 - DNA, 20 bp, synthetic construct
  source 1..20: mol_type = other DNA
tttggattttggaatttgtc

SEQ ID NO: 91825 - DNA, 20 bp, synthetic construct
  source 1..20: mol_type = other DNA
atttggattttggaatttgt

SEQ ID NO: 91826 - DNA, 20 bp, synthetic construct
  source 1..20: mol_type = other DNA
aatttggattttggaatttg

SEQ ID NO: 91827 - DNA, 20 bp, synthetic construct
  source 1..20: mol_type = other DNA
aaatttggattttggaattt

SEQ ID NO: 91828 - DNA, 20 bp, synthetic construct
  source 1..20: mol_type = other DNA
taaatttggattttggaatt

SEQ ID NO: 91829 - DNA, 20 bp, synthetic construct
  source 1..20: mol_type = other DNA
ttaaatttggattttggaat

SEQ ID NO: 91830 - DNA, 20 bp, synthetic construct
  source 1..20: mol_type = other DNA
attaaatttggattttggaa

SEQ ID NO: 91831 - DNA, 20 bp, synthetic construct
  source 1..20: mol_type = other DNA
tattaaatttggattttgga

SEQ ID NO: 91832 - DNA, 20 bp, synthetic construct
  source 1..20: mol_type = other DNA
atattaaatttggattttgg

SEQ ID NO: 91833 - DNA, 20 bp, synthetic construct
  source 1..20: mol_type = other DNA
aatattaaatttggattttg

SEQ ID NO: 91834 - DNA, 20 bp, synthetic construct
  source 1..20: mol_type = other DNA
aaatattaaatttggatttt

SEQ ID NO: 91835 - DNA, 20 bp, synthetic construct
  source 1..20: mol_type = other DNA
caaatattaaatttggattt

SEQ ID NO: 91836 - DNA, 20 bp, synthetic construct
  source 1..20: mol_type = other DNA
tcaaatattaaatttggatt

SEQ ID NO: 91837 - DNA, 20 bp, synthetic construct
  source 1..20: mol_type = other DNA
ttcaaatattaaatttggat

SEQ ID NO: 91838 - DNA, 20 bp, synthetic construct
  source 1..20: mol_type = other DNA
tttcaaatattaaatttgga

SEQ ID NO: 91839 - DNA, 20 bp, synthetic construct
  source 1..20: mol_type = other DNA
atttcaaatattaaatttgg

SEQ ID NO: 91840 - DNA, 20 bp, synthetic construct
  source 1..20: mol_type = other DNA
aatttcaaatattaaatttg

SEQ ID NO: 91841 - DNA, 20 bp, synthetic construct
  source 1..20: mol_type = other DNA
taatttcaaatattaaattt

SEQ ID NO: 91842 - DNA, 20 bp, synthetic construct
  source 1..20: mol_type = other DNA
ataatttcaaatattaaatt

SEQ ID NO: 91843 - DNA, 20 bp, synthetic construct
  source 1..20: mol_type = other DNA
aataatttcaaatattaaat

SEQ ID NO: 91844 - DNA, 20 bp, synthetic construct
  source 1..20: mol_type = other DNA
aaataatttcaaatattaaa

SEQ ID NO: 91845 - DNA, 20 bp, synthetic construct
  source 1..20: mol_type = other DNA
aaaataatttcaaatattaa

SEQ ID NO: 91846 - DNA, 20 bp, synthetic construct
  source 1..20: mol_type = other DNA
gaaaataatttcaaatatta

SEQ ID NO: 91847 - DNA, 20 bp, synthetic construct
  source 1..20: mol_type = other DNA
agaaaataatttcaaatatt

SEQ ID NO: 91848 - DNA, 20 bp, synthetic construct
  source 1..20: mol_type = other DNA
cagaaaataatttcaaatat

SEQ ID NO: 91849 - DNA, 20 bp, synthetic construct
  source 1..20: mol_type = other DNA
tcagaaaataatttcaaata

SEQ ID NO: 91850 - DNA, 20 bp, synthetic construct
  source 1..20: mol_type = other DNA
atcagaaaataatttcaaat

SEQ ID NO: 91851 - DNA, 20 bp, synthetic construct
  source 1..20: mol_type = other DNA
gatcagaaaataatttcaaa

SEQ ID NO: 91852 - DNA, 20 bp, synthetic construct
  source 1..20: mol_type = other DNA
agatcagaaaataatttcaa

SEQ ID NO: 91853 - DNA, 20 bp, synthetic construct
  source 1..20: mol_type = other DNA
aagatcagaaaataatttca

SEQ ID NO: 91854 - DNA, 20 bp, synthetic construct
  source 1..20: mol_type = other DNA
taagatcagaaaataatttc

SEQ ID NO: 91855 - DNA, 20 bp, synthetic construct
  source 1..20: mol_type = other DNA
ataagatcagaaaataattt

SEQ ID NO: 91856 - DNA, 20 bp, synthetic construct
  source 1..20: mol_type = other DNA
tataagatcagaaaataatt

SEQ ID NO: 91857 - DNA, 20 bp, synthetic construct
  source 1..20: mol_type = other DNA
atataagatcagaaaataat

SEQ ID NO: 91858 - DNA, 20 bp, synthetic construct
  source 1..20: mol_type = other DNA
gatataagatcagaaaataa

SEQ ID NO: 91859 - DNA, 20 bp, synthetic construct
  source 1..20: mol_type = other DNA
agatataagatcagaaaata

SEQ ID NO: 91860 - DNA, 20 bp, synthetic construct
  source 1..20: mol_type = other DNA
aagatataagatcagaaaat

SEQ ID NO: 91861 - DNA, 20 bp, synthetic construct
  source 1..20: mol_type = other DNA
taagatataagatcagaaaa

SEQ ID NO: 91862 - DNA, 20 bp, synthetic construct
  source 1..20: mol_type = other DNA
ataagatataagatcagaaa

SEQ ID NO: 91863 - DNA, 20 bp, synthetic construct
  source 1..20: mol_type = other DNA
aataagatataagatcagaa

SEQ ID NO: 91864 - DNA, 20 bp, synthetic construct
  source 1..20: mol_type = other DNA
gaataagatataagatcaga

SEQ ID NO: 91865 - DNA, 20 bp, synthetic construct
  source 1..20: mol_type = other DNA
agaataagatataagatcag

SEQ ID NO: 91866 - DNA, 20 bp, synthetic construct
  source 1..20: mol_type = other DNA
tagaataagatataagatca

SEQ ID NO: 91867 - DNA, 20 bp, synthetic construct
  source 1..20: mol_type = other DNA
ttagaataagatataagatc

SEQ ID NO: 91868 - DNA, 20 bp, synthetic construct
  source 1..20: mol_type = other DNA
attagaataagatataagat

SEQ ID NO: 91869 - DNA, 20 bp, synthetic construct
  source 1..20: mol_type = other DNA
aattagaataagatataaga

SEQ ID NO: 91870 - DNA, 20 bp, synthetic construct
  source 1..20: mol_type = other DNA
aaattagaataagatataag

SEQ ID NO: 91871 - DNA, 20 bp, synthetic construct
  source 1..20: mol_type = other DNA
gaaattagaataagatataa

SEQ ID NO: 91872 - DNA, 20 bp, synthetic construct
  source 1..20: mol_type = other DNA
agaaattagaataagatata

SEQ ID NO: 91873 - DNA, 20 bp, synthetic construct
  source 1..20: mol_type = other DNA
tagaaattagaataagatat

SEQ ID NO: 91874 - DNA, 20 bp, synthetic construct
  source 1..20: mol_type = other DNA
atagaaattagaataagata

SEQ ID NO: 91875 - DNA, 20 bp, synthetic construct
  source 1..20: mol_type = other DNA
gatagaaattagaataagat

SEQ ID NO: 91876 - DNA, 20 bp, synthetic construct
  source 1..20: mol_type = other DNA
tgatagaaattagaataaga

SEQ ID NO: 91877 - DNA, 20 bp, synthetic construct
  source 1..20: mol_type = other DNA
atgatagaaattagaataag

SEQ ID NO: 91878 - DNA, 20 bp, synthetic construct
  source 1..20: mol_type = other DNA
gatgatagaaattagaataa

SEQ ID NO: 91879 - DNA, 20 bp, synthetic construct
  source 1..20: mol_type = other DNA
agatgatagaaattagaata

SEQ ID NO: 91880 - DNA, 20 bp, synthetic construct
  source 1..20: mol_type = other DNA
gagatgatagaaattagaat

SEQ ID NO: 91881 - DNA, 20 bp, synthetic construct
  source 1..20: mol_type = other DNA
tgagatgatagaaattagaa

SEQ ID NO: 91882 - DNA, 20 bp, synthetic construct
  source 1..20: mol_type = other DNA
atgagatgatagaaattaga

SEQ ID NO: 91883 - DNA, 20 bp, synthetic construct
  source 1..20: mol_type = other DNA
tatgagatgatagaaattag

SEQ ID NO: 91884 - DNA, 20 bp, synthetic construct
  source 1..20: mol_type = other DNA
gtatgagatgatagaaatta

SEQ ID NO: 91885 - DNA, 20 bp, synthetic construct
  source 1..20: mol_type = other DNA
agtatgagatgatagaaatt

SEQ ID NO: 91886 - DNA, 20 bp, synthetic construct
  source 1..20: mol_type = other DNA
tagtatgagatgatagaaat

SEQ ID NO: 91887 - DNA, 20 bp, synthetic construct
  source 1..20: mol_type = other DNA
ttagtatgagatgatagaaa

SEQ ID NO: 91888 - DNA, 20 bp, synthetic construct
  source 1..20: mol_type = other DNA
tttagtatgagatgatagaa

SEQ ID NO: 91889 - DNA, 20 bp, synthetic construct
  source 1..20: mol_type = other DNA
ttttagtatgagatgataga

SEQ ID NO: 91890 - DNA, 20 bp, synthetic construct
  source 1..20: mol_type = other DNA
tttttagtatgagatgatag

SEQ ID NO: 91891 - DNA, 20 bp, synthetic construct
  source 1..20: mol_type = other DNA
ctttttagtatgagatgata

SEQ ID NO: 91892 - DNA, 20 bp, synthetic construct
  source 1..20: mol_type = other DNA
tctttttagtatgagatgat

SEQ ID NO: 91893 - DNA, 20 bp, synthetic construct
  source 1..20: mol_type = other DNA
ttctttttagtatgagatga

SEQ ID NO: 91894 - DNA, 20 bp, synthetic construct
  source 1..20: mol_type = other DNA
attctttttagtatgagatg

SEQ ID NO: 91895 - DNA, 20 bp, synthetic construct
  source 1..20: mol_type = other DNA
cattctttttagtatgagat

SEQ ID NO: 91896 - DNA, 20 bp, synthetic construct
  source 1..20: mol_type = other DNA
acattctttttagtatgaga

SEQ ID NO: 91897 - DNA, 20 bp, synthetic construct
  source 1..20: mol_type = other DNA
cacattctttttagtatgag

SEQ ID NO: 91898 - DNA, 20 bp, synthetic construct
  source 1..20: mol_type = other DNA
tcacattctttttagtatga

SEQ ID NO: 91899 - DNA, 20 bp, synthetic construct
  source 1..20: mol_type = other DNA
atcacattctttttagtatg

SEQ ID NO: 91900 - DNA, 20 bp, synthetic construct
  source 1..20: mol_type = other DNA
catcacattctttttagtat

SEQ ID NO: 91901 - DNA, 20 bp, synthetic construct
  source 1..20: mol_type = other DNA
acatcacattctttttagta

SEQ ID NO: 91902 - DNA, 20 bp, synthetic construct
  source 1..20: mol_type = other DNA
aacatcacattctttttagt

SEQ ID NO: 91903 - DNA, 20 bp, synthetic construct
  source 1..20: mol_type = other DNA
taacatcacattctttttag

SEQ ID NO: 91904 - DNA, 20 bp, synthetic construct
  source 1..20: mol_type = other DNA
ttaacatcacattcttttta

SEQ ID NO: 91905 - DNA, 20 bp, synthetic construct
  source 1..20: mol_type = other DNA
tttaacatcacattcttttt

SEQ ID NO: 91906 - DNA, 20 bp, synthetic construct
  source 1..20: mol_type = other DNA
ctttaacatcacattctttt

SEQ ID NO: 91907 - DNA, 20 bp, synthetic construct
  source 1..20: mol_type = other DNA
actttaacatcacattcttt

SEQ ID NO: 91908 - DNA, 20 bp, synthetic construct
  source 1..20: mol_type = other DNA
aactttaacatcacattctt

SEQ ID NO: 91909 - DNA, 20 bp, synthetic construct
  source 1..20: mol_type = other DNA
aaactttaacatcacattct

SEQ ID NO: 91910 - DNA, 20 bp, synthetic construct
  source 1..20: mol_type = other DNA
taaactttaacatcacattc

SEQ ID NO: 91911 - DNA, 20 bp, synthetic construct
  source 1..20: mol_type = other DNA
ttaaactttaacatcacatt

SEQ ID NO: 91912 - DNA, 20 bp, synthetic construct
  source 1..20: mol_type = other DNA
tttaaactttaacatcacat

SEQ ID NO: 91913 - DNA, 20 bp, synthetic construct
  source 1..20: mol_type = other DNA
ttttaaactttaacatcaca

SEQ ID NO: 91914 - DNA, 20 bp, synthetic construct
  source 1..20: mol_type = other DNA
tttttaaactttaacatcac

SEQ ID NO: 91915 - DNA, 20 bp, synthetic construct
  source 1..20: mol_type = other DNA
atttttaaactttaacatca

SEQ ID NO: 91916 - DNA, 20 bp, synthetic construct
  source 1..20: mol_type = other DNA
tatttttaaactttaacatc

SEQ ID NO: 91917 - DNA, 20 bp, synthetic construct
  source 1..20: mol_type = other DNA
ttatttttaaactttaacat

SEQ ID NO: 91918 - DNA, 20 bp, synthetic construct
  source 1..20: mol_type = other DNA
tttatttttaaactttaaca

SEQ ID NO: 91919 - DNA, 20 bp, synthetic construct
  source 1..20: mol_type = other DNA
gtttatttttaaactttaac

SEQ ID NO: 91920 - DNA, 20 bp, synthetic construct
  source 1..20: mol_type = other DNA
ggtttatttttaaactttaa

SEQ ID NO: 91921 - DNA, 20 bp, synthetic construct
  source 1..20: mol_type = other DNA
aggtttatttttaaacttta

SEQ ID NO: 91922 - DNA, 20 bp, synthetic construct
  source 1..20: mol_type = other DNA
caggtttatttttaaacttt

SEQ ID NO: 91923 - DNA, 20 bp, synthetic construct
  source 1..20: mol_type = other DNA
acaggtttatttttaaactt

SEQ ID NO: 91924 - DNA, 20 bp, synthetic construct
  source 1..20: mol_type = other DNA
cacaggtttatttttaaact

SEQ ID NO: 91925 - DNA, 20 bp, synthetic construct
  source 1..20: mol_type = other DNA
acacaggtttatttttaaac

SEQ ID NO: 91926 - DNA, 20 bp, synthetic construct
  source 1..20: mol_type = other DNA
gacacaggtttatttttaaa

SEQ ID NO: 91927 - DNA, 20 bp, synthetic construct
  source 1..20: mol_type = other DNA
agacacaggtttatttttaa

SEQ ID NO: 91928 - DNA, 20 bp, synthetic construct
  source 1..20: mol_type = other DNA
aagacacaggtttattttta

SEQ ID NO: 91929 - DNA, 20 bp, synthetic construct
  source 1..20: mol_type = other DNA
taagacacaggtttattttt

SEQ ID NO: 91930 - DNA, 20 bp, synthetic construct
  source 1..20: mol_type = other DNA
ttaagacacaggtttatttt

SEQ ID NO: 91931 - DNA, 20 bp, synthetic construct
  source 1..20: mol_type = other DNA
gttaagacacaggtttattt

SEQ ID NO: 91932 - DNA, 20 bp, synthetic construct
  source 1..20: mol_type = other DNA
tgttaagacacaggtttatt

SEQ ID NO: 91933 - DNA, 20 bp, synthetic construct
  source 1..20: mol_type = other DNA
ctgttaagacacaggtttat

SEQ ID NO: 91934 - DNA, 20 bp, synthetic construct
  source 1..20: mol_type = other DNA
actgttaagacacaggttta

SEQ ID NO: 91935 - DNA, 20 bp, synthetic construct
  source 1..20: mol_type = other DNA
aactgttaagacacaggttt

SEQ ID NO: 91936 - DNA, 20 bp, synthetic construct
  source 1..20: mol_type = other DNA
gaactgttaagacacaggtt

SEQ ID NO: 91937 - DNA, 20 bp, synthetic construct
  source 1..20: mol_type = other DNA
agaactgttaagacacaggt

SEQ ID NO: 91938 - DNA, 20 bp, synthetic construct
  source 1..20: mol_type = other DNA
aagaactgttaagacacagg

SEQ ID NO: 91939 - DNA, 20 bp, synthetic construct
  source 1..20: mol_type = other DNA
taagaactgttaagacacag

SEQ ID NO: 91940 - DNA, 20 bp, synthetic construct
  source 1..20: mol_type = other DNA
ttaagaactgttaagacaca

SEQ ID NO: 91941 - DNA, 20 bp, synthetic construct
  source 1..20: mol_type = other DNA
attaagaactgttaagacac

SEQ ID NO: 91942 - DNA, 20 bp, synthetic construct
  source 1..20: mol_type = other DNA
aattaagaactgttaagaca

SEQ ID NO: 91943 - DNA, 20 bp, synthetic construct
  source 1..20: mol_type = other DNA
aaattaagaactgttaagac

SEQ ID NO: 91944 - DNA, 20 bp, synthetic construct
  source 1..20: mol_type = other DNA
aaaattaagaactgttaaga

SEQ ID NO: 91945 - DNA, 20 bp, synthetic construct
  source 1..20: mol_type = other DNA
taaaattaagaactgttaag

SEQ ID NO: 91946 - DNA, 20 bp, synthetic construct
  source 1..20: mol_type = other DNA
gtaaaattaagaactgttaa

SEQ ID NO: 91947 - DNA, 20 bp, synthetic construct
  source 1..20: mol_type = other DNA
tgtaaaattaagaactgtta

SEQ ID NO: 91948 - DNA, 20 bp, synthetic construct
  source 1..20: mol_type = other DNA
ctgtaaaattaagaactgtt

SEQ ID NO: 91949 - DNA, 20 bp, synthetic construct
  source 1..20: mol_type = other DNA
cctgtaaaattaagaactgt

SEQ ID NO: 91950 - DNA, 20 bp, synthetic construct
  source 1..20: mol_type = other DNA
acctgtaaaattaagaactg

SEQ ID NO: 91951 - DNA, 20 bp, synthetic construct
  source 1..20: mol_type = other DNA
tacctgtaaaattaagaact

SEQ ID NO: 91952 - DNA, 20 bp, synthetic construct
  source 1..20: mol_type = other DNA
atacctgtaaaattaagaac

SEQ ID NO: 91953 - DNA, 20 bp, synthetic construct
  source 1..20: mol_type = other DNA
tatacctgtaaaattaagaa

SEQ ID NO: 91954 - DNA, 20 bp, synthetic construct
  source 1..20: mol_type = other DNA
atatacctgtaaaattaaga

SEQ ID NO: 91955 - DNA, 20 bp, synthetic construct
  source 1..20: mol_type = other DNA
gatatacctgtaaaattaag

SEQ ID NO: 91956 - DNA, 20 bp, synthetic construct
  source 1..20: mol_type = other DNA
tgatatacctgtaaaattaa

SEQ ID NO: 91957 - DNA, 20 bp, synthetic construct
  source 1..20: mol_type = other DNA
gtgatatacctgtaaaatta

SEQ ID NO: 91958 - DNA, 20 bp, synthetic construct
  source 1..20: mol_type = other DNA
ggtgatatacctgtaaaatt

SEQ ID NO: 91959 - DNA, 20 bp, synthetic construct
  source 1..20: mol_type = other DNA
tggtgatatacctgtaaaat

SEQ ID NO: 91960 - DNA, 20 bp, synthetic construct
  source 1..20: mol_type = other DNA
ctggtgatatacctgtaaaa

SEQ ID NO: 91961 - DNA, 20 bp, synthetic construct
  source 1..20: mol_type = other DNA
actggtgatatacctgtaaa

SEQ ID NO: 91962 - DNA, 20 bp, synthetic construct
  source 1..20: mol_type = other DNA
aactggtgatatacctgtaa

SEQ ID NO: 91963 - DNA, 20 bp, synthetic construct
  source 1..20: mol_type = other DNA
caactggtgatatacctgta

SEQ ID NO: 91964 - DNA, 20 bp, synthetic construct
  source 1..20: mol_type = other DNA
acaactggtgatatacctgt

SEQ ID NO: 91965 - DNA, 20 bp, synthetic construct
  source 1..20: mol_type = other DNA
aacaactggtgatatacctg

SEQ ID NO: 91966 - DNA, 20 bp, synthetic construct
  source 1..20: mol_type = other DNA
aaacaactggtgatatacct

SEQ ID NO: 91967 - DNA, 20 bp, synthetic construct
  source 1..20: mol_type = other DNA
gaaacaactggtgatatacc

SEQ ID NO: 91968 - DNA, 20 bp, synthetic construct
  source 1..20: mol_type = other DNA
agaaacaactggtgatatac

SEQ ID NO: 91969 - DNA, 20 bp, synthetic construct
  source 1..20: mol_type = other DNA
cagaaacaactggtgatata

SEQ ID NO: 91970 - DNA, 20 bp, synthetic construct
  source 1..20: mol_type = other DNA
tcagaaacaactggtgatat

SEQ ID NO: 91971 - DNA, 20 bp, synthetic construct
  source 1..20: mol_type = other DNA
ttcagaaacaactggtgata

SEQ ID NO: 91972 - DNA, 20 bp, synthetic construct
  source 1..20: mol_type = other DNA
gttcagaaacaactggtgat

SEQ ID NO: 91973 - DNA, 20 bp, synthetic construct
  source 1..20: mol_type = other DNA
tgttcagaaacaactggtga

SEQ ID NO: 91974 - DNA, 20 bp, synthetic construct
  source 1..20: mol_type = other DNA
atgttcagaaacaactggtg

SEQ ID NO: 91975 - DNA, 20 bp, synthetic construct
  source 1..20: mol_type = other DNA
tatgttcagaaacaactggt

SEQ ID NO: 91976 - DNA, 20 bp, synthetic construct
  source 1..20: mol_type = other DNA
ctatgttcagaaacaactgg

SEQ ID NO: 91977 - DNA, 20 bp, synthetic construct
  source 1..20: mol_type = other DNA
tctatgttcagaaacaactg

SEQ ID NO: 91978 - DNA, 20 bp, synthetic construct
  source 1..20: mol_type = other DNA
ttctatgttcagaaacaact

SEQ ID NO: 91979 - DNA, 20 bp, synthetic construct
  source 1..20: mol_type = other DNA
tttctatgttcagaaacaac

SEQ ID NO: 91980 - DNA, 20 bp, synthetic construct
  source 1..20: mol_type = other DNA
ttttctatgttcagaaacaa

SEQ ID NO: 91981 - DNA, 20 bp, synthetic construct
  source 1..20: mol_type = other DNA
gttttctatgttcagaaaca

SEQ ID NO: 91982 - DNA, 20 bp, synthetic construct
  source 1..20: mol_type = other DNA
tgttttctatgttcagaaac

SEQ ID NO: 91983 - DNA, 20 bp, synthetic construct
  source 1..20: mol_type = other DNA
ctgttttctatgttcagaaa

SEQ ID NO: 91984 - DNA, 20 bp, synthetic construct
  source 1..20: mol_type = other DNA
tctgttttctatgttcagaa

SEQ ID NO: 91985 - DNA, 20 bp, synthetic construct
  source 1..20: mol_type = other DNA
atctgttttctatgttcaga

SEQ ID NO: 91986 - DNA, 20 bp, synthetic construct
  source 1..20: mol_type = other DNA
aatctgttttctatgttcag

SEQ ID NO: 91987 - DNA, 20 bp, synthetic construct
  source 1..20: mol_type = other DNA
caatctgttttctatgttca

SEQ ID NO: 91988 - DNA, 20 bp, synthetic construct
  source 1..20: mol_type = other DNA
tcaatctgttttctatgttc

SEQ ID NO: 91989 - DNA, 20 bp, synthetic construct
  source 1..20: mol_type = other DNA
atcaatctgttttctatgtt

SEQ ID NO: 91990 - DNA, 20 bp, synthetic construct
  source 1..20: mol_type = other DNA
catcaatctgttttctatgt

SEQ ID NO: 91991 - DNA, 20 bp, synthetic construct
  source 1..20: mol_type = other DNA
tcatcaatctgttttctatg

SEQ ID NO: 91992 - DNA, 20 bp, synthetic construct
  source 1..20: mol_type = other DNA
atcatcaatctgttttctat

SEQ ID NO: 91993 - DNA, 20 bp, synthetic construct
  source 1..20: mol_type = other DNA
aatcatcaatctgttttcta

SEQ ID NO: 91994 - DNA, 20 bp, synthetic construct
  source 1..20: mol_type = other DNA
aaatcatcaatctgttttct

SEQ ID NO: 91995 - DNA, 20 bp, synthetic construct
  source 1..20: mol_type = other DNA
taaatcatcaatctgttttc

SEQ ID NO: 91996 - DNA, 20 bp, synthetic construct
  source 1..20: mol_type = other DNA
ttaaatcatcaatctgtttt

SEQ ID NO: 91997 - DNA, 20 bp, synthetic construct
  source 1..20: mol_type = other DNA
tttaaatcatcaatctgttt

SEQ ID NO: 91998 - DNA, 20 bp, synthetic construct
  source 1..20: mol_type = other DNA
ctttaaatcatcaatctgtt

SEQ ID NO: 91999 - DNA, 20 bp, synthetic construct
  source 1..20: mol_type = other DNA
tctttaaatcatcaatctgt

SEQ ID NO: 92000 - DNA, 20 bp, synthetic construct
  source 1..20: mol_type = other DNA
ttctttaaatcatcaatctg

SEQ ID NO: 92001 - DNA, 20 bp, synthetic construct
  source 1..20: mol_type = other DNA
tttctttaaatcatcaatct

SEQ ID NO: 92002 - DNA, 20 bp, synthetic construct
  source 1..20: mol_type = other DNA
atttctttaaatcatcaatc

SEQ ID NO: 92003 - DNA, 20 bp, synthetic construct
  source 1..20: mol_type = other DNA
aatttctttaaatcatcaat

SEQ ID NO: 92004 - DNA, 20 bp, synthetic construct
  source 1..20: mol_type = other DNA
aaatttctttaaatcatcaa

SEQ ID NO: 92005 - DNA, 20 bp, synthetic construct
  source 1..20: mol_type = other DNA
taaatttctttaaatcatca

SEQ ID NO: 92006 - DNA, 20 bp, synthetic construct
  source 1..20: mol_type = other DNA
ttaaatttctttaaatcatc

SEQ ID NO: 92007 - DNA, 20 bp, synthetic construct
  source 1..20: mol_type = other DNA
cttaaatttctttaaatcat

SEQ ID NO: 92008 - DNA, 20 bp, synthetic construct
  source 1..20: mol_type = other DNA
tcttaaatttctttaaatca

SEQ ID NO: 92009 - DNA, 20 bp, synthetic construct
  source 1..20: mol_type = other DNA
ttcttaaatttctttaaatc

SEQ ID NO: 92010 - DNA, 20 bp, synthetic construct
  source 1..20: mol_type = other DNA
attcttaaatttctttaaat

SEQ ID NO: 92011 - DNA, 20 bp, synthetic construct
  source 1..20: mol_type = other DNA
cattcttaaatttctttaaa

SEQ ID NO: 92012 - DNA, 20 bp, synthetic construct
  source 1..20: mol_type = other DNA
tcattcttaaatttctttaa

SEQ ID NO: 92013 - DNA, 20 bp, synthetic construct
  source 1..20: mol_type = other DNA
atcattcttaaatttcttta

SEQ ID NO: 92014 - DNA, 20 bp, synthetic construct
  source 1..20: mol_type = other DNA
aatcattcttaaatttcttt

SEQ ID NO: 92015 - DNA, 20 bp, synthetic construct
  source 1..20: mol_type = other DNA
aaatcattcttaaatttctt

SEQ ID NO: 92016 - DNA, 20 bp, synthetic construct
  source 1..20: mol_type = other DNA
aaaatcattcttaaatttct

SEQ ID NO: 92017 - DNA, 20 bp, synthetic construct
  source 1..20: mol_type = other DNA
taaaatcattcttaaatttc

SEQ ID NO: 92018 - DNA, 20 bp, synthetic construct
  source 1..20: mol_type = other DNA
ctaaaatcattcttaaattt

SEQ ID NO: 92019 - DNA, 20 bp, synthetic construct
  source 1..20: mol_type = other DNA
cctaaaatcattcttaaatt

SEQ ID NO: 92020 - DNA, 20 bp, synthetic construct
  source 1..20: mol_type = other DNA
ccctaaaatcattcttaaat

SEQ ID NO: 92021 - DNA, 20 bp, synthetic construct
  source 1..20: mol_type = other DNA
accctaaaatcattcttaaa

SEQ ID NO: 92022 - DNA, 20 bp, synthetic construct
  source 1..20: mol_type = other DNA
taccctaaaatcattcttaa

SEQ ID NO: 92023 - DNA, 20 bp, synthetic construct
  source 1..20: mol_type = other DNA
ttaccctaaaatcattctta

SEQ ID NO: 92024 - DNA, 20 bp, synthetic construct
  source 1..20: mol_type = other DNA
cttaccctaaaatcattctt

SEQ ID NO: 92025 - DNA, 20 bp, synthetic construct
  source 1..20: mol_type = other DNA
acttaccctaaaatcattct

SEQ ID NO: 92026 - DNA, 20 bp, synthetic construct
  source 1..20: mol_type = other DNA
tacttaccctaaaatcattc

SEQ ID NO: 92027 - DNA, 20 bp, synthetic construct
  source 1..20: mol_type = other DNA
atacttaccctaaaatcatt

SEQ ID NO: 92028 - DNA, 20 bp, synthetic construct
  source 1..20: mol_type = other DNA
aatacttaccctaaaatcat

SEQ ID NO: 92029 - DNA, 20 bp, synthetic construct
  source 1..20: mol_type = other DNA
caatacttaccctaaaatca

SEQ ID NO: 92030 - DNA, 20 bp, synthetic construct
  source 1..20: mol_type = other DNA
acaatacttaccctaaaatc

SEQ ID NO: 92031 - DNA, 20 bp, synthetic construct
  source 1..20: mol_type = other DNA
tacaatacttaccctaaaat

SEQ ID NO: 92032 - DNA, 20 bp, synthetic construct
  source 1..20: mol_type = other DNA
gtacaatacttaccctaaaa

SEQ ID NO: 92033 - DNA, 20 bp, synthetic construct
  source 1..20: mol_type = other DNA
agtacaatacttaccctaaa

SEQ ID NO: 92034 - DNA, 20 bp, synthetic construct
  source 1..20: mol_type = other DNA
tagtacaatacttaccctaa

SEQ ID NO: 92035 - DNA, 20 bp, synthetic construct
  source 1..20: mol_type = other DNA
ttagtacaatacttacccta

SEQ ID NO: 92036 - DNA, 20 bp, synthetic construct
  source 1..20: mol_type = other DNA
gttagtacaatacttaccct

SEQ ID NO: 92037 - DNA, 20 bp, synthetic construct
  source 1..20: mol_type = other DNA
agttagtacaatacttaccc

SEQ ID NO: 92038 - DNA, 20 bp, synthetic construct
  source 1..20: mol_type = other DNA
cagttagtacaatacttacc

SEQ ID NO: 92039 - DNA, 20 bp, synthetic construct
  source 1..20: mol_type = other DNA
tcagttagtacaatacttac

SEQ ID NO: 92040 - DNA, 20 bp, synthetic construct
  source 1..20: mol_type = other DNA
atcagttagtacaatactta

SEQ ID NO: 92041 - DNA, 20 bp, synthetic construct
  source 1..20: mol_type = other DNA
catcagttagtacaatactt

SEQ ID NO: 92042 - DNA, 20 bp, synthetic construct
  source 1..20: mol_type = other DNA
tcatcagttagtacaatact

SEQ ID NO: 92043 - DNA, 20 bp, synthetic construct
  source 1..20: mol_type = other DNA
ttcatcagttagtacaatac

SEQ ID NO: 92044 - DNA, 20 bp, synthetic construct
  source 1..20: mol_type = other DNA
attcatcagttagtacaata

SEQ ID NO: 92045 - DNA, 20 bp, synthetic construct
  source 1..20: mol_type = other DNA
aattcatcagttagtacaat

SEQ ID NO: 92046 - DNA, 20 bp, synthetic construct
  source 1..20: mol_type = other DNA
aaattcatcagttagtacaa

SEQ ID NO: 92047 - DNA, 20 bp, synthetic construct
  source 1..20: mol_type = other DNA
caaattcatcagttagtaca

SEQ ID NO: 92048 - DNA, 20 bp, synthetic construct
  source 1..20: mol_type = other DNA
tcaaattcatcagttagtac

SEQ ID NO: 92049 - DNA, 20 bp, synthetic construct
  source 1..20: mol_type = other DNA
ctcaaattcatcagttagta

SEQ ID NO: 92050 - DNA, 20 bp, synthetic construct
  source 1..20: mol_type = other DNA
actcaaattcatcagttagt

SEQ ID NO: 92051 - DNA, 20 bp, synthetic construct
  source 1..20: mol_type = other DNA
aactcaaattcatcagttag

SEQ ID NO: 92052 - DNA, 20 bp, synthetic construct
  source 1..20: mol_type = other DNA
aaactcaaattcatcagtta

SEQ ID NO: 92053 - DNA, 20 bp, synthetic construct
  source 1..20: mol_type = other DNA
aaaactcaaattcatcagtt

SEQ ID NO: 92054 - DNA, 20 bp, synthetic construct
  source 1..20: mol_type = other DNA
taaaactcaaattcatcagt

SEQ ID NO: 92055 - DNA, 20 bp, synthetic construct
  source 1..20: mol_type = other DNA
ctaaaactcaaattcatcag

SEQ ID NO: 92056 - DNA, 20 bp, synthetic construct
  source 1..20: mol_type = other DNA
tctaaaactcaaattcatca

SEQ ID NO: 92057 - DNA, 20 bp, synthetic construct
  source 1..20: mol_type = other DNA
ttctaaaactcaaattcatc

SEQ ID NO: 92058 - DNA, 20 bp, synthetic construct
  source 1..20: mol_type = other DNA
tttctaaaactcaaattcat

SEQ ID NO: 92059 - DNA, 20 bp, synthetic construct
  source 1..20: mol_type = other DNA
ttttctaaaactcaaattca

SEQ ID NO: 92060 - DNA, 20 bp, synthetic construct
  source 1..20: mol_type = other DNA
attttctaaaactcaaattc

SEQ ID NO: 92061 - DNA, 20 bp, synthetic construct
  source 1..20: mol_type = other DNA
tattttctaaaactcaaatt

SEQ ID NO: 92062 - DNA, 20 bp, synthetic construct
  source 1..20: mol_type = other DNA
ttattttctaaaactcaaat

SEQ ID NO: 92063 - DNA, 20 bp, synthetic construct
  source 1..20: mol_type = other DNA
cttattttctaaaactcaaa

SEQ ID NO: 92064 - DNA, 20 bp, synthetic construct
  source 1..20: mol_type = other DNA
gcttattttctaaaactcaa

SEQ ID NO: 92065 - DNA, 20 bp, synthetic construct
  source 1..20: mol_type = other DNA
tgcttattttctaaaactca

SEQ ID NO: 92066 - DNA, 20 bp, synthetic construct
  source 1..20: mol_type = other DNA
atgcttattttctaaaactc

SEQ ID NO: 92067 - DNA, 20 bp, synthetic construct
  source 1..20: mol_type = other DNA
aatgcttattttctaaaact

SEQ ID NO: 92068 - DNA, 20 bp, synthetic construct
  source 1..20: mol_type = other DNA
taatgcttattttctaaaac

SEQ ID NO: 92069 - DNA, 20 bp, synthetic construct
  source 1..20: mol_type = other DNA
gtaatgcttattttctaaaa

SEQ ID NO: 92070 - DNA, 20 bp, synthetic construct
  source 1..20: mol_type = other DNA
agtaatgcttattttctaaa

SEQ ID NO: 92071 - DNA, 20 bp, synthetic construct
  source 1..20: mol_type = other DNA
tagtaatgcttattttctaa

SEQ ID NO: 92072 - DNA, 20 bp, synthetic construct
  source 1..20: mol_type = other DNA
ttagtaatgcttattttcta

SEQ ID NO: 92073 - DNA, 20 bp, synthetic construct
  source 1..20: mol_type = other DNA
tttagtaatgcttattttct

SEQ ID NO: 92074 - DNA, 20 bp, synthetic construct
  source 1..20: mol_type = other DNA
ctttagtaatgcttattttc

SEQ ID NO: 92075 - DNA, 20 bp, synthetic construct
  source 1..20: mol_type = other DNA
tctttagtaatgcttatttt

SEQ ID NO: 92076 - DNA, 20 bp, synthetic construct
  source 1..20: mol_type = other DNA
atctttagtaatgcttattt

SEQ ID NO: 92077 - DNA, 20 bp, synthetic construct
  source 1..20: mol_type = other DNA
aatctttagtaatgcttatt

SEQ ID NO: 92078 - DNA, 20 bp, synthetic construct
  source 1..20: mol_type = other DNA
aaatctttagtaatgcttat

SEQ ID NO: 92079 - DNA, 20 bp, synthetic construct
  source 1..20: mol_type = other DNA
taaatctttagtaatgctta

SEQ ID NO: 92080 - DNA, 20 bp, synthetic construct
  source 1..20: mol_type = other DNA
ataaatctttagtaatgctt

SEQ ID NO: 92081 - DNA, 20 bp, synthetic construct
  source 1..20: mol_type = other DNA
gataaatctttagtaatgct

SEQ ID NO: 92082 - DNA, 20 bp, synthetic construct
  source 1..20: mol_type = other DNA
agataaatctttagtaatgc

SEQ ID NO: 92083 - DNA, 20 bp, synthetic construct
  source 1..20: mol_type = other DNA
tagataaatctttagtaatg

SEQ ID NO: 92084 - DNA, 20 bp, synthetic construct
  source 1..20: mol_type = other DNA
atagataaatctttagtaat

SEQ ID NO: 92085 - DNA, 20 bp, synthetic construct
  source 1..20: mol_type = other DNA
aatagataaatctttagtaa

SEQ ID NO: 92086 - DNA, 20 bp, synthetic construct
  source 1..20: mol_type = other DNA
aaatagataaatctttagta

SEQ ID NO: 92087 - DNA, 20 bp, synthetic construct
  source 1..20: mol_type = other DNA
taaatagataaatctttagt

SEQ ID NO: 92088 - DNA, 20 bp, synthetic construct
  source 1..20: mol_type = other DNA
ataaatagataaatctttag

SEQ ID NO: 92089 - DNA, 20 bp, synthetic construct
  source 1..20: mol_type = other DNA
tataaatagataaatcttta

SEQ ID NO: 92090 - DNA, 20 bp, synthetic construct
  source 1..20: mol_type = other DNA
ttataaatagataaatcttt

SEQ ID NO: 92091 - DNA, 20 bp, synthetic construct
  source 1..20: mol_type = other DNA
tttataaatagataaatctt

SEQ ID NO: 92092 - DNA, 20 bp, synthetic construct
  source 1..20: mol_type = other DNA
ttttataaatagataaatct

SEQ ID NO: 92093 - DNA, 20 bp, synthetic construct
  source 1..20: mol_type = other DNA
tttttataaatagataaatc

SEQ ID NO: 92094 - DNA, 20 bp, synthetic construct
  source 1..20: mol_type = other DNA
atttttataaatagataaat

SEQ ID NO: 92095 - DNA, 20 bp, synthetic construct
  source 1..20: mol_type = other DNA
catttttataaatagataaa

SEQ ID NO: 92096 - DNA, 20 bp, synthetic construct
  source 1..20: mol_type = other DNA
gcatttttataaatagataa

SEQ ID NO: 92097 - DNA, 20 bp, synthetic construct
  source 1..20: mol_type = other DNA
cgcatttttataaatagata

SEQ ID NO: 92098 - DNA, 20 bp, synthetic construct
  source 1..20: mol_type = other DNA
acgcatttttataaatagat

SEQ ID NO: 92099 - DNA, 20 bp, synthetic construct
  source 1..20: mol_type = other DNA
aacgcatttttataaataga

SEQ ID NO: 92100 - DNA, 20 bp, synthetic construct
  source 1..20: mol_type = other DNA
taacgcatttttataaatag

SEQ ID NO: 92101 - DNA, 20 bp, synthetic construct
  source 1..20: mol_type = other DNA
ataacgcatttttataaata

SEQ ID NO: 92102 - DNA, 20 bp, synthetic construct
  source 1..20: mol_type = other DNA
cataacgcatttttataaat

SEQ ID NO: 92103 - DNA, 20 bp, synthetic construct
  source 1..20: mol_type = other DNA
acataacgcatttttataaa

SEQ ID NO: 92104 - DNA, 20 bp, synthetic construct
  source 1..20: mol_type = other DNA
tacataacgcatttttataa

SEQ ID NO: 92105 - DNA, 20 bp, synthetic construct
  source 1..20: mol_type = other DNA
atacataacgcatttttata

SEQ ID NO: 92106 - DNA, 20 bp, synthetic construct
  source 1..20: mol_type = other DNA
tatacataacgcatttttat

SEQ ID NO: 92107 - DNA, 20 bp, synthetic construct
  source 1..20: mol_type = other DNA
gtatacataacgcattttta

SEQ ID NO: 92108 - DNA, 20 bp, synthetic construct
  source 1..20: mol_type = other DNA
tgtatacataacgcattttt

SEQ ID NO: 92109 - DNA, 20 bp, synthetic construct
  source 1..20: mol_type = other DNA
ctgtatacataacgcatttt

SEQ ID NO: 92110 - DNA, 20 bp, synthetic construct
  source 1..20: mol_type = other DNA
actgtatacataacgcattt

SEQ ID NO: 92111 - DNA, 20 bp, synthetic construct
  source 1..20: mol_type = other DNA
gactgtatacataacgcatt

SEQ ID NO: 92112 - DNA, 20 bp, synthetic construct
  source 1..20: mol_type = other DNA
tgactgtatacataacgcat

SEQ ID NO: 92113 - DNA, 20 bp, synthetic construct
  source 1..20: mol_type = other DNA
ctgactgtatacataacgca

SEQ ID NO: 92114 - DNA, 20 bp, synthetic construct
  source 1..20: mol_type = other DNA
tctgactgtatacataacgc

SEQ ID NO: 92115 - DNA, 20 bp, synthetic construct
  source 1..20: mol_type = other DNA
ttctgactgtatacataacg

SEQ ID NO: 92116 - DNA, 20 bp, synthetic construct
  source 1..20: mol_type = other DNA
tttctgactgtatacataac

SEQ ID NO: 92117 - DNA, 20 bp, synthetic construct
  source 1..20: mol_type = other DNA
gtttctgactgtatacataa

SEQ ID NO: 92118 - DNA, 20 bp, synthetic construct
  source 1..20: mol_type = other DNA
tgtttctgactgtatacata

SEQ ID NO: 92119 - DNA, 20 bp, synthetic construct
  source 1..20: mol_type = other DNA
atgtttctgactgtatacat

SEQ ID NO: 92120 - DNA, 20 bp, synthetic construct
  source 1..20: mol_type = other DNA
gatgtttctgactgtataca

SEQ ID NO: 92121 - DNA, 20 bp, synthetic construct
  source 1..20: mol_type = other DNA
tgatgtttctgactgtatac

SEQ ID NO: 92122 - DNA, 20 bp, synthetic construct
  source 1..20: mol_type = other DNA
ttgatgtttctgactgtata

SEQ ID NO: 92123 - DNA, 20 bp, synthetic construct
  source 1..20: mol_type = other DNA
tttgatgtttctgactgtat

SEQ ID NO: 92124 - DNA, 20 bp, synthetic construct
  source 1..20: mol_type = other DNA
gtttgatgtttctgactgta

SEQ ID NO: 92125 - DNA, 20 bp, synthetic construct
  source 1..20: mol_type = other DNA
ggtttgatgtttctgactgt

SEQ ID NO: 92126 - DNA, 20 bp, synthetic construct
  source 1..20: mol_type = other DNA
tggtttgatgtttctgactg

SEQ ID NO: 92127 - DNA, 20 bp, synthetic construct
  source 1..20: mol_type = other DNA
atggtttgatgtttctgact

SEQ ID NO: 92128 - DNA, 20 bp, synthetic construct
  source 1..20: mol_type = other DNA
tatggtttgatgtttctgac

SEQ ID NO: 92129 - DNA, 20 bp, synthetic construct
  source 1..20: mol_type = other DNA
atatggtttgatgtttctga

SEQ ID NO: 92130 - DNA, 20 bp, synthetic construct
  source 1..20: mol_type = other DNA
tatatggtttgatgtttctg

SEQ ID NO: 92131 - DNA, 20 bp, synthetic construct
  source 1..20: mol_type = other DNA
atatatggtttgatgtttct

SEQ ID NO: 92132 - DNA, 20 bp, synthetic construct
  source 1..20: mol_type = other DNA
catatatggtttgatgtttc

SEQ ID NO: 92133 - DNA, 20 bp, synthetic construct
  source 1..20: mol_type = other DNA
acatatatggtttgatgttt

SEQ ID NO: 92134 - DNA, 20 bp, synthetic construct
  source 1..20: mol_type = other DNA
tacatatatggtttgatgtt

SEQ ID NO: 92135 - DNA, 20 bp, synthetic construct
  source 1..20: mol_type = other DNA
ctacatatatggtttgatgt

SEQ ID NO: 92136 - DNA, 20 bp, synthetic construct
  source 1..20: mol_type = other DNA
tctacatatatggtttgatg

SEQ ID NO: 92137 - DNA, 20 bp, synthetic construct
  source 1..20: mol_type = other DNA
ttctacatatatggtttgat

SEQ ID NO: 92138 - DNA, 20 bp, synthetic construct
  source 1..20: mol_type = other DNA
tttctacatatatggtttga

SEQ ID NO: 92139 - DNA, 20 bp, synthetic construct
  source 1..20: mol_type = other DNA
ctttctacatatatggtttg

SEQ ID NO: 92140 - DNA, 20 bp, synthetic construct
  source 1..20: mol_type = other DNA
gctttctacatatatggttt

SEQ ID NO: 92141 - DNA, 20 bp, synthetic construct
  source 1..20: mol_type = other DNA
tgctttctacatatatggtt

SEQ ID NO: 92142 - DNA, 20 bp, synthetic construct
  source 1..20: mol_type = other DNA
ctgctttctacatatatggt

SEQ ID NO: 92143 - DNA, 20 bp, synthetic construct
  source 1..20: mol_type = other DNA
tctgctttctacatatatgg

SEQ ID NO: 92144 - DNA, 20 bp, synthetic construct
  source 1..20: mol_type = other DNA
ttctgctttctacatatatg

SEQ ID NO: 92145 - DNA, 20 bp, synthetic construct
  source 1..20: mol_type = other DNA
gttctgctttctacatatat

SEQ ID NO: 92146 - DNA, 20 bp, synthetic construct
  source 1..20: mol_type = other DNA
tgttctgctttctacatata

SEQ ID NO: 92147 - DNA, 20 bp, synthetic construct
  source 1..20: mol_type = other DNA
atgttctgctttctacatat

SEQ ID NO: 92148 - DNA, 20 bp, synthetic construct
  source 1..20: mol_type = other DNA
aatgttctgctttctacata

SEQ ID NO: 92149 - DNA, 20 bp, synthetic construct
  source 1..20: mol_type = other DNA
aaatgttctgctttctacat

SEQ ID NO: 92150 - DNA, 20 bp, synthetic construct
  source 1..20: mol_type = other DNA
aaaatgttctgctttctaca

SEQ ID NO: 92151 - DNA, 20 bp, synthetic construct
  source 1..20: mol_type = other DNA
aaaaatgttctgctttctac

SEQ ID NO: 92152 - DNA, 20 bp, synthetic construct
  source 1..20: mol_type = other DNA
taaaaatgttctgctttcta

SEQ ID NO: 92153 - DNA, 20 bp, synthetic construct
  source 1..20: mol_type = other DNA
ttaaaaatgttctgctttct

SEQ ID NO: 92154 - DNA, 20 bp, synthetic construct
  source 1..20: mol_type = other DNA
tttaaaaatgttctgctttc

SEQ ID NO: 92155 - DNA, 20 bp, synthetic construct
  source 1..20: mol_type = other DNA
ctttaaaaatgttctgcttt

SEQ ID NO: 92156 - DNA, 20 bp, synthetic construct
  source 1..20: mol_type = other DNA
actttaaaaatgttctgctt

SEQ ID NO: 92157 - DNA, 20 bp, synthetic construct
  source 1..20: mol_type = other DNA
cactttaaaaatgttctgct

SEQ ID NO: 92158 - DNA, 20 bp, synthetic construct
  source 1..20: mol_type = other DNA
ccactttaaaaatgttctgc

SEQ ID NO: 92159 - DNA, 20 bp, synthetic construct
  source 1..20: mol_type = other DNA
accactttaaaaatgttctg

SEQ ID NO: 92160 - DNA, 20 bp, synthetic construct
  source 1..20: mol_type = other DNA
gaccactttaaaaatgttct

SEQ ID NO: 92161 - DNA, 20 bp, synthetic construct
  source 1..20: mol_type = other DNA
agaccactttaaaaatgttc

SEQ ID NO: 92162 - DNA, 20 bp, synthetic construct
  source 1..20: mol_type = other DNA
aagaccactttaaaaatgtt

SEQ ID NO: 92163 - DNA, 20 bp, synthetic construct
  source 1..20: mol_type = other DNA
aaagaccactttaaaaatgt

SEQ ID NO: 92164 - DNA, 20 bp, synthetic construct
  source 1..20: mol_type = other DNA
caaagaccactttaaaaatg

SEQ ID NO: 92165 - DNA, 20 bp, synthetic construct
  source 1..20: mol_type = other DNA
gcaaagaccactttaaaaat

SEQ ID NO: 92166 - DNA, 20 bp, synthetic construct
  source 1..20: mol_type = other DNA
ggcaaagaccactttaaaaa

SEQ ID NO: 92167 - DNA, 20 bp, synthetic construct
  source 1..20: mol_type = other DNA
aggcaaagaccactttaaaa

SEQ ID NO: 92168 - DNA, 20 bp, synthetic construct
  source 1..20: mol_type = other DNA
taggcaaagaccactttaaa

SEQ ID NO: 92169 - DNA, 20 bp, synthetic construct
  source 1..20: mol_type = other DNA
ataggcaaagaccactttaa

SEQ ID NO: 92170 - DNA, 20 bp, synthetic construct
  source 1..20: mol_type = other DNA
gataggcaaagaccacttta

SEQ ID NO: 92171 - DNA, 20 bp, synthetic construct
  source 1..20: mol_type = other DNA
ggataggcaaagaccacttt

SEQ ID NO: 92172 - DNA, 20 bp, synthetic construct
  source 1..20: mol_type = other DNA
aggataggcaaagaccactt

SEQ ID NO: 92173 - DNA, 20 bp, synthetic construct
  source 1..20: mol_type = other DNA
aaggataggcaaagaccact

SEQ ID NO: 92174 - DNA, 20 bp, synthetic construct
  source 1..20: mol_type = other DNA
aaaggataggcaaagaccac

SEQ ID NO: 92175 - DNA, 20 bp, synthetic construct
  source 1..20: mol_type = other DNA
taaaggataggcaaagacca

SEQ ID NO: 92176 - DNA, 20 bp, synthetic construct
  source 1..20: mol_type = other DNA
ttaaaggataggcaaagacc

SEQ ID NO: 92177 - DNA, 20 bp, synthetic construct
  source 1..20: mol_type = other DNA
cttaaaggataggcaaagac

SEQ ID NO: 92178 - DNA, 20 bp, synthetic construct
  source 1..20: mol_type = other DNA
acttaaaggataggcaaaga

SEQ ID NO: 92179 - DNA, 20 bp, synthetic construct
  source 1..20: mol_type = other DNA
cacttaaaggataggcaaag

SEQ ID NO: 92180 - DNA, 20 bp, synthetic construct
  source 1..20: mol_type = other DNA
ccacttaaaggataggcaaa

SEQ ID NO: 92181 - DNA, 20 bp, synthetic construct
  source 1..20: mol_type = other DNA
cccacttaaaggataggcaa

SEQ ID NO: 92182 - DNA, 20 bp, synthetic construct
  source 1..20: mol_type = other DNA
tcccacttaaaggataggca

SEQ ID NO: 92183 - DNA, 20 bp, synthetic construct
  source 1..20: mol_type = other DNA
atcccacttaaaggataggc

SEQ ID NO: 92184 - DNA, 20 bp, synthetic construct
  source 1..20: mol_type = other DNA
tatcccacttaaaggatagg

SEQ ID NO: 92185 - DNA, 20 bp, synthetic construct
  source 1..20: mol_type = other DNA
ttatcccacttaaaggatag

SEQ ID NO: 92186 - DNA, 20 bp, synthetic construct
  source 1..20: mol_type = other DNA
gttatcccacttaaaggata

SEQ ID NO: 92187 - DNA, 20 bp, synthetic construct
  source 1..20: mol_type = other DNA
agttatcccacttaaaggat

SEQ ID NO: 92188 - DNA, 20 bp, synthetic construct
  source 1..20: mol_type = other DNA
tagttatcccacttaaagga

SEQ ID NO: 92189 - DNA, 20 bp, synthetic construct
  source 1..20: mol_type = other DNA
ttagttatcccacttaaagg

SEQ ID NO: 92190 - DNA, 20 bp, synthetic construct
  source 1..20: mol_type = other DNA
tttagttatcccacttaaag

SEQ ID NO: 92191 - DNA, 20 bp, synthetic construct
  source 1..20: mol_type = other DNA
ttttagttatcccacttaaa

SEQ ID NO: 92192 - DNA, 20 bp, synthetic construct
  source 1..20: mol_type = other DNA
attttagttatcccacttaa

SEQ ID NO: 92193 - DNA, 20 bp, synthetic construct
  source 1..20: mol_type = other DNA
gattttagttatcccactta

SEQ ID NO: 92194 - DNA, 20 bp, synthetic construct
  source 1..20: mol_type = other DNA
tgattttagttatcccactt

SEQ ID NO: 92195 - DNA, 20 bp, synthetic construct
  source 1..20: mol_type = other DNA
atgattttagttatcccact

SEQ ID NO: 92196 - DNA, 20 bp, synthetic construct
  source 1..20: mol_type = other DNA
catgattttagttatcccac

SEQ ID NO: 92197 - DNA, 20 bp, synthetic construct
  source 1..20: mol_type = other DNA
tcatgattttagttatccca

SEQ ID NO: 92198 - DNA, 20 bp, synthetic construct
  source 1..20: mol_type = other DNA
ctcatgattttagttatccc

SEQ ID NO: 92199 - DNA, 20 bp, synthetic construct
  source 1..20: mol_type = other DNA
tctcatgattttagttatcc

SEQ ID NO: 92200 - DNA, 20 bp, synthetic construct
  source 1..20: mol_type = other DNA
atctcatgattttagttatc

SEQ ID NO: 92201 - DNA, 20 bp, synthetic construct
  source 1..20: mol_type = other DNA
aatctcatgattttagttat

SEQ ID NO: 92202 - DNA, 20 bp, synthetic construct
  source 1..20: mol_type = other DNA
aaatctcatgattttagtta

SEQ ID NO: 92203 - DNA, 20 bp, synthetic construct
  source 1..20: mol_type = other DNA
caaatctcatgattttagtt

SEQ ID NO: 92204 - DNA, 20 bp, synthetic construct
  source 1..20: mol_type = other DNA
ccaaatctcatgattttagt

SEQ ID NO: 92205 - DNA, 20 bp, synthetic construct
  source 1..20: mol_type = other DNA
accaaatctcatgattttag

SEQ ID NO: 92206 - DNA, 20 bp, synthetic construct
  source 1..20: mol_type = other DNA
taccaaatctcatgatttta

SEQ ID NO: 92207 - DNA, 20 bp, synthetic construct
  source 1..20: mol_type = other DNA
ttaccaaatctcatgatttt

SEQ ID NO: 92208 - DNA, 20 bp, synthetic construct
  source 1..20: mol_type = other DNA
gttaccaaatctcatgattt

SEQ ID NO: 92209 - DNA, 20 bp, synthetic construct
  source 1..20: mol_type = other DNA
tgttaccaaatctcatgatt

SEQ ID NO: 92210 - DNA, 20 bp, synthetic construct
  source 1..20: mol_type = other DNA
ttgttaccaaatctcatgat

SEQ ID NO: 92211 - DNA, 20 bp, synthetic construct
  source 1..20: mol_type = other DNA
gttgttaccaaatctcatga

SEQ ID NO: 92212 - DNA, 20 bp, synthetic construct
  source 1..20: mol_type = other DNA
tgttgttaccaaatctcatg

SEQ ID NO: 92213 - DNA, 20 bp, synthetic construct
  source 1..20: mol_type = other DNA
ttgttgttaccaaatctcat

SEQ ID NO: 92214 - DNA, 20 bp, synthetic construct
  source 1..20: mol_type = other DNA
attgttgttaccaaatctca

SEQ ID NO: 92215 - DNA, 20 bp, synthetic construct
  source 1..20: mol_type = other DNA
tattgttgttaccaaatctc

SEQ ID NO: 92216 - DNA, 20 bp, synthetic construct
  source 1..20: mol_type = other DNA
atattgttgttaccaaatct

SEQ ID NO: 92217 - DNA, 20 bp, synthetic construct
  source 1..20: mol_type = other DNA
catattgttgttaccaaatc

SEQ ID NO: 92218 - DNA, 20 bp, synthetic construct
  source 1..20: mol_type = other DNA
acatattgttgttaccaaat

SEQ ID NO: 92219 - DNA, 20 bp, synthetic construct
  source 1..20: mol_type = other DNA
tacatattgttgttaccaaa

SEQ ID NO: 92220 - DNA, 20 bp, synthetic construct
  source 1..20: mol_type = other DNA
ctacatattgttgttaccaa

SEQ ID NO: 92221 - DNA, 20 bp, synthetic construct
  source 1..20: mol_type = other DNA
cctacatattgttgttacca

SEQ ID NO: 92222 - DNA, 20 bp, synthetic construct
  source 1..20: mol_type = other DNA
acctacatattgttgttacc

SEQ ID NO: 92223 - DNA, 20 bp, synthetic construct
  source 1..20: mol_type = other DNA
tacctacatattgttgttac

SEQ ID NO: 92224 - DNA, 20 bp, synthetic construct
  source 1..20: mol_type = other DNA
atacctacatattgttgtta

SEQ ID NO: 92225 - DNA, 20 bp, synthetic construct
  source 1..20: mol_type = other DNA
gatacctacatattgttgtt

SEQ ID NO: 92226 - DNA, 20 bp, synthetic construct
  source 1..20: mol_type = other DNA
tgatacctacatattgttgt

SEQ ID NO: 92227 - DNA, 20 bp, synthetic construct
  source 1..20: mol_type = other DNA
ttgatacctacatattgttg

SEQ ID NO: 92228 - DNA, 20 bp, synthetic construct
  source 1..20: mol_type = other DNA
tttgatacctacatattgtt

SEQ ID NO: 92229 - DNA, 20 bp, synthetic construct
  source 1..20: mol_type = other DNA
atttgatacctacatattgt

SEQ ID NO: 92230 - DNA, 20 bp, synthetic construct
  source 1..20: mol_type = other DNA
catttgatacctacatattg

SEQ ID NO: 92231 - DNA, 20 bp, synthetic construct
  source 1..20: mol_type = other DNA
tcatttgatacctacatatt

SEQ ID NO: 92232 - DNA, 20 bp, synthetic construct
  source 1..20: mol_type = other DNA
ctcatttgatacctacatat

SEQ ID NO: 92233 - DNA, 20 bp, synthetic construct
  source 1..20: mol_type = other DNA
tctcatttgatacctacata

SEQ ID NO: 92234 - DNA, 20 bp, synthetic construct
  source 1..20: mol_type = other DNA
ctctcatttgatacctacat

SEQ ID NO: 92235 - DNA, 20 bp, synthetic construct
  source 1..20: mol_type = other DNA
actctcatttgatacctaca

SEQ ID NO: 92236 - DNA, 20 bp, synthetic construct
  source 1..20: mol_type = other DNA
tactctcatttgatacctac

SEQ ID NO: 92237 - DNA, 20 bp, synthetic construct
  source 1..20: mol_type = other DNA
atactctcatttgataccta

SEQ ID NO: 92238 - DNA, 20 bp, synthetic construct
  source 1..20: mol_type = other DNA
tatactctcatttgatacct

SEQ ID NO: 92239 - DNA, 20 bp, synthetic construct
  source 1..20: mol_type = other DNA
ctatactctcatttgatacc

SEQ ID NO: 92240 - DNA, 20 bp, synthetic construct
  source 1..20: mol_type = other DNA
gctatactctcatttgatac

SEQ ID NO: 92241 - DNA, 20 bp, synthetic construct
  source 1..20: mol_type = other DNA
ggctatactctcatttgata

SEQ ID NO: 92242 - DNA, 20 bp, synthetic construct
  source 1..20: mol_type = other DNA
gggctatactctcatttgat

SEQ ID NO: 92243 - DNA, 20 bp, synthetic construct
  source 1..20: mol_type = other DNA
agggctatactctcatttga

SEQ ID NO: 92244 - DNA, 20 bp, synthetic construct
  source 1..20: mol_type = other DNA
cagggctatactctcatttg

SEQ ID NO: 92245 - DNA, 20 bp, synthetic construct
  source 1..20: mol_type = other DNA
tcagggctatactctcattt

SEQ ID NO: 92246 - DNA, 20 bp, synthetic construct
  source 1..20: mol_type = other DNA
gtcagggctatactctcatt

SEQ ID NO: 92247 - DNA, 20 bp, synthetic construct
  source 1..20: mol_type = other DNA
tgtcagggctatactctcat

SEQ ID NO: 92248 - DNA, 20 bp, synthetic construct
  source 1..20: mol_type = other DNA
atgtcagggctatactctca

SEQ ID NO: 92249 - DNA, 20 bp, synthetic construct
  source 1..20: mol_type = other DNA
aatgtcagggctatactctc

SEQ ID NO: 92250 - DNA, 20 bp, synthetic construct
  source 1..20: mol_type = other DNA
aaatgtcagggctatactct

SEQ ID NO: 92251 - DNA, 20 bp, synthetic construct
  source 1..20: mol_type = other DNA
caaatgtcagggctatactc

SEQ ID NO: 92252 - DNA, 20 bp, synthetic construct
  source 1..20: mol_type = other DNA
tcaaatgtcagggctatact

SEQ ID NO: 92253 - DNA, 20 bp, synthetic construct
  source 1..20: mol_type = other DNA
ttcaaatgtcagggctatac

SEQ ID NO: 92254 - DNA, 20 bp, synthetic construct
  source 1..20: mol_type = other DNA
tttcaaatgtcagggctata

SEQ ID NO: 92255 - DNA, 20 bp, synthetic construct
  source 1..20: mol_type = other DNA
gtttcaaatgtcagggctat

SEQ ID NO: 92256 - DNA, 20 bp, synthetic construct
  source 1..20: mol_type = other DNA
ggtttcaaatgtcagggcta

SEQ ID NO: 92257 - DNA, 20 bp, synthetic construct
  source 1..20: mol_type = other DNA
tggtttcaaatgtcagggct

SEQ ID NO: 92258 - DNA, 20 bp, synthetic construct
  source 1..20: mol_type = other DNA
gtggtttcaaatgtcagggc

SEQ ID NO: 92259 - DNA, 20 bp, synthetic construct
  source 1..20: mol_type = other DNA
ggtggtttcaaatgtcaggg

SEQ ID NO: 92260 - DNA, 20 bp, synthetic construct
  source 1..20: mol_type = other DNA
tggtggtttcaaatgtcagg

SEQ ID NO: 92261 - DNA, 20 bp, synthetic construct
  source 1..20: mol_type = other DNA
atggtggtttcaaatgtcag

SEQ ID NO: 92262 - DNA, 20 bp, synthetic construct
  source 1..20: mol_type = other DNA
tatggtggtttcaaatgtca

SEQ ID NO: 92263 - DNA, 20 bp, synthetic construct
  source 1..20: mol_type = other DNA
ctatggtggtttcaaatgtc

SEQ ID NO: 92264 - DNA, 20 bp, synthetic construct
  source 1..20: mol_type = other DNA
gctatggtggtttcaaatgt

SEQ ID NO: 92265 - DNA, 20 bp, synthetic construct
  source 1..20: mol_type = other DNA
tgctatggtggtttcaaatg

SEQ ID NO: 92266 - DNA, 20 bp, synthetic construct
  source 1..20: mol_type = other DNA
gtgctatggtggtttcaaat

SEQ ID NO: 92267 - DNA, 20 bp, synthetic construct
  source 1..20: mol_type = other DNA
tgtgctatggtggtttcaaa

SEQ ID NO: 92268 - DNA, 20 bp, synthetic construct
  source 1..20: mol_type = other DNA
ctgtgctatggtggtttcaa

SEQ ID NO: 92269 - DNA, 20 bp, synthetic construct
  source 1..20: mol_type = other DNA
gctgtgctatggtggtttca

SEQ ID NO: 92270 - DNA, 20 bp, synthetic construct
  source 1..20: mol_type = other DNA
agctgtgctatggtggtttc

SEQ ID NO: 92271 - DNA, 20 bp, synthetic construct
  source 1..20: mol_type = other DNA
aagctgtgctatggtggttt

SEQ ID NO: 92272 - DNA, 20 bp, synthetic construct
  source 1..20: mol_type = other DNA
taagctgtgctatggtggtt

SEQ ID NO: 92273 - DNA, 20 bp, synthetic construct
  source 1..20: mol_type = other DNA
gtaagctgtgctatggtggt

SEQ ID NO: 92274 - DNA, 20 bp, synthetic construct
  source 1..20: mol_type = other DNA
agtaagctgtgctatggtgg

SEQ ID NO: 92275 - DNA, 20 bp, synthetic construct
  source 1..20: mol_type = other DNA
tagtaagctgtgctatggtg

SEQ ID NO: 92276 - DNA, 20 bp, synthetic construct
  source 1..20: mol_type = other DNA
atagtaagctgtgctatggt

SEQ ID NO: 92277 - DNA, 20 bp, synthetic construct
  source 1..20: mol_type = other DNA
aatagtaagctgtgctatgg

SEQ ID NO: 92278 - DNA, 20 bp, synthetic construct
  source 1..20: mol_type = other DNA
aaatagtaagctgtgctatg

SEQ ID NO: 92279 - DNA, 20 bp, synthetic construct
  source 1..20: mol_type = other DNA
caaatagtaagctgtgctat

SEQ ID NO: 92280 - DNA, 20 bp, synthetic construct
  source 1..20: mol_type = other DNA
tcaaatagtaagctgtgcta

SEQ ID NO: 92281 - DNA, 20 bp, synthetic construct
  source 1..20: mol_type = other DNA
atcaaatagtaagctgtgct

SEQ ID NO: 92282 - DNA, 20 bp, synthetic construct
  source 1..20: mol_type = other DNA
catcaaatagtaagctgtgc

SEQ ID NO: 92283 - DNA, 20 bp, synthetic construct
  source 1..20: mol_type = other DNA
ccatcaaatagtaagctgtg

SEQ ID NO: 92284 - DNA, 20 bp, synthetic construct
  source 1..20: mol_type = other DNA
accatcaaatagtaagctgt

SEQ ID NO: 92285 - DNA, 20 bp, synthetic construct
  source 1..20: mol_type = other DNA
gaccatcaaatagtaagctg

SEQ ID NO: 92286 - DNA, 20 bp, synthetic construct
  source 1..20: mol_type = other DNA
tgaccatcaaatagtaagct

SEQ ID NO: 92287 - DNA, 20 bp, synthetic construct
  source 1..20: mol_type = other DNA
atgaccatcaaatagtaagc

SEQ ID NO: 92288 - DNA, 20 bp, synthetic construct
  source 1..20: mol_type = other DNA
aatgaccatcaaatagtaag

SEQ ID NO: 92289 - DNA, 20 bp, synthetic construct
  source 1..20: mol_type = other DNA
aaatgaccatcaaatagtaa

SEQ ID NO: 92290 - DNA, 20 bp, synthetic construct
  source 1..20: mol_type = other DNA
caaatgaccatcaaatagta

SEQ ID NO: 92291 - DNA, 20 bp, synthetic construct
  source 1..20: mol_type = other DNA
acaaatgaccatcaaatagt

SEQ ID NO: 92292 - DNA, 20 bp, synthetic construct
  source 1..20: mol_type = other DNA
tacaaatgaccatcaaatag

SEQ ID NO: 92293 - DNA, 20 bp, synthetic construct
  source 1..20: mol_type = other DNA
gtacaaatgaccatcaaata

SEQ ID NO: 92294 - DNA, 20 bp, synthetic construct
  source 1..20: mol_type = other DNA
agtacaaatgaccatcaaat

SEQ ID NO: 92295 - DNA, 20 bp, synthetic construct
  source 1..20: mol_type = other DNA
aagtacaaatgaccatcaaa

SEQ ID NO: 92296 - DNA, 20 bp, synthetic construct
  source 1..20: mol_type = other DNA
aaagtacaaatgaccatcaa

SEQ ID NO: 92297 - DNA, 20 bp, synthetic construct
  source 1..20: mol_type = other DNA
caaagtacaaatgaccatca

SEQ ID NO: 92298 - DNA, 20 bp, synthetic construct
  source 1..20: mol_type = other DNA
acaaagtacaaatgaccatc

SEQ ID NO: 92299 - DNA, 20 bp, synthetic construct
  source 1..20: mol_type = other DNA
aacaaagtacaaatgaccat

SEQ ID NO: 92300 - DNA, 20 bp, synthetic construct
  source 1..20: mol_type = other DNA
gaacaaagtacaaatgacca

SEQ ID NO: 92301 - DNA, 20 bp, synthetic construct
  source 1..20: mol_type = other DNA
tgaacaaagtacaaatgacc

SEQ ID NO: 92302 - DNA, 20 bp, synthetic construct
  source 1..20: mol_type = other DNA
ctgaacaaagtacaaatgac

SEQ ID NO: 92303 - DNA, 20 bp, synthetic construct
  source 1..20: mol_type = other DNA
actgaacaaagtacaaatga

SEQ ID NO: 92304 - DNA, 20 bp, synthetic construct
  source 1..20: mol_type = other DNA
cactgaacaaagtacaaatg

SEQ ID NO: 92305 - DNA, 20 bp, synthetic construct
  source 1..20: mol_type = other DNA
tcactgaacaaagtacaaat

SEQ ID NO: 92306 - DNA, 20 bp, synthetic construct
  source 1..20: mol_type = other DNA
ttcactgaacaaagtacaaa

SEQ ID NO: 92307 - DNA, 20 bp, synthetic construct
  source 1..20: mol_type = other DNA
cttcactgaacaaagtacaa

SEQ ID NO: 92308 - DNA, 20 bp, synthetic construct
  source 1..20: mol_type = other DNA
gcttcactgaacaaagtaca

SEQ ID NO: 92309 - DNA, 20 bp, synthetic construct
  source 1..20: mol_type = other DNA
agcttcactgaacaaagtac

SEQ ID NO: 92310 - DNA, 20 bp, synthetic construct
  source 1..20: mol_type = other DNA
tagcttcactgaacaaagta

SEQ ID NO: 92311 - DNA, 20 bp, synthetic construct
  source 1..20: mol_type = other DNA
ctagcttcactgaacaaagt

SEQ ID NO: 92312 - DNA, 20 bp, synthetic construct
  source 1..20: mol_type = other DNA
tctagcttcactgaacaaag

SEQ ID NO: 92313 - DNA, 20 bp, synthetic construct
  source 1..20: mol_type = other DNA
atctagcttcactgaacaaa

SEQ ID NO: 92314 - DNA, 20 bp, synthetic construct
  source 1..20: mol_type = other DNA
tatctagcttcactgaacaa

SEQ ID NO: 92315 - DNA, 20 bp, synthetic construct
  source 1..20: mol_type = other DNA
atatctagcttcactgaaca

SEQ ID NO: 92316 - DNA, 20 bp, synthetic construct
  source 1..20: mol_type = other DNA
aatatctagcttcactgaac

SEQ ID NO: 92317 - DNA, 20 bp, synthetic construct
  source 1..20: mol_type = other DNA
taatatctagcttcactgaa

SEQ ID NO: 92318 - DNA, 20 bp, synthetic construct
  source 1..20: mol_type = other DNA
ctaatatctagcttcactga

SEQ ID NO: 92319 - DNA, 20 bp, synthetic construct
  source 1..20: mol_type = other DNA
actaatatctagcttcactg

SEQ ID NO: 92320 - DNA, 20 bp, synthetic construct
  source 1..20: mol_type = other DNA
tactaatatctagcttcact

SEQ ID NO: 92321 - DNA, 20 bp, synthetic construct
  source 1..20: mol_type = other DNA
ctactaatatctagcttcac

SEQ ID NO: 92322 - DNA, 20 bp, synthetic construct
  source 1..20: mol_type = other DNA
tctactaatatctagcttca

SEQ ID NO: 92323 - DNA, 20 bp, synthetic construct
  source 1..20: mol_type = other DNA
ctctactaatatctagcttc

SEQ ID NO: 92324 - DNA, 20 bp, synthetic construct
  source 1..20: mol_type = other DNA
gctctactaatatctagctt

SEQ ID NO: 92325 - DNA, 20 bp, synthetic construct
  source 1..20: mol_type = other DNA
tgctctactaatatctagct

SEQ ID NO: 92326 - DNA, 20 bp, synthetic construct
  source 1..20: mol_type = other DNA
ttgctctactaatatctagc

SEQ ID NO: 92327 - DNA, 20 bp, synthetic construct
  source 1..20: mol_type = other DNA
cttgctctactaatatctag

SEQ ID NO: 92328 - DNA, 20 bp, synthetic construct
  source 1..20: mol_type = other DNA
ccttgctctactaatatcta

SEQ ID NO: 92329 - DNA, 20 bp, synthetic construct
  source 1..20: mol_type = other DNA
gccttgctctactaatatct

SEQ ID NO: 92330 - DNA, 20 bp, synthetic construct
  source 1..20: mol_type = other DNA
ggccttgctctactaatatc

SEQ ID NO: 92331 - DNA, 20 bp, synthetic construct
  source 1..20: mol_type = other DNA
tggccttgctctactaatat

SEQ ID NO: 92332 - DNA, 20 bp, synthetic construct
  source 1..20: mol_type = other DNA
ttggccttgctctactaata

SEQ ID NO: 92333 - DNA, 20 bp, synthetic construct
  source 1..20: mol_type = other DNA
cttggccttgctctactaat

SEQ ID NO: 92334 - DNA, 20 bp, synthetic construct
  source 1..20: mol_type = other DNA
acttggccttgctctactaa

SEQ ID NO: 92335 - DNA, 20 bp, synthetic construct
  source 1..20: mol_type = other DNA
gacttggccttgctctacta

SEQ ID NO: 92336 - DNA, 20 bp, synthetic construct
  source 1..20: mol_type = other DNA
tgacttggccttgctctact

SEQ ID NO: 92337 - DNA, 20 bp, synthetic construct
  source 1..20: mol_type = other DNA
atgacttggccttgctctac

SEQ ID NO: 92338 - DNA, 20 bp, synthetic construct
  source 1..20: mol_type = other DNA
aatgacttggccttgctcta

SEQ ID NO: 92339 - DNA, 20 bp, synthetic construct
  source 1..20: mol_type = other DNA
taatgacttggccttgctct

SEQ ID NO: 92340 - DNA, 20 bp, synthetic construct
  source 1..20: mol_type = other DNA
ttaatgacttggccttgctc

SEQ ID NO: 92341 - DNA, 20 bp, synthetic construct
  source 1..20: mol_type = other DNA
attaatgacttggccttgct

SEQ ID NO: 92342 - DNA, 20 bp, synthetic construct
  source 1..20: mol_type = other DNA
tattaatgacttggccttgc

SEQ ID NO: 92343 - DNA, 20 bp, synthetic construct
  source 1..20: mol_type = other DNA
ttattaatgacttggccttg

SEQ ID NO: 92344 - DNA, 20 bp, synthetic construct
  source 1..20: mol_type = other DNA
attattaatgacttggcctt

SEQ ID NO: 92345 - DNA, 20 bp, synthetic construct
  source 1..20: mol_type = other DNA
gattattaatgacttggcct

SEQ ID NO: 92346 - DNA, 20 bp, synthetic construct
  source 1..20: mol_type = other DNA
agattattaatgacttggcc

SEQ ID NO: 92347 - DNA, 20 bp, synthetic construct
  source 1..20: mol_type = other DNA
tagattattaatgacttggc

SEQ ID NO: 92348 - DNA, 20 bp, synthetic construct
  source 1..20: mol_type = other DNA
ctagattattaatgacttgg

SEQ ID NO: 92349 - DNA, 20 bp, synthetic construct
  source 1..20: mol_type = other DNA
actagattattaatgacttg

SEQ ID NO: 92350 - DNA, 20 bp, synthetic construct
  source 1..20: mol_type = other DNA
cactagattattaatgactt

SEQ ID NO: 92351 - DNA, 20 bp, synthetic construct
  source 1..20: mol_type = other DNA
acactagattattaatgact

SEQ ID NO: 92352 - DNA, 20 bp, synthetic construct
  source 1..20: mol_type = other DNA
cacactagattattaatgac

SEQ ID NO: 92353 - DNA, 20 bp, synthetic construct
  source 1..20: mol_type = other DNA
ccacactagattattaatga

SEQ ID NO: 92354 - DNA, 20 bp, synthetic construct
  source 1..20: mol_type = other DNA
gccacactagattattaatg

SEQ ID NO: 92355 - DNA, 20 bp, synthetic construct
  source 1..20: mol_type = other DNA
tgccacactagattattaat

SEQ ID NO: 92356 - DNA, 20 bp, synthetic construct
  source 1..20: mol_type = other DNA
ttgccacactagattattaa

SEQ ID NO: 92357 - DNA, 20 bp, synthetic construct
  source 1..20: mol_type = other DNA
tttgccacactagattatta

SEQ ID NO: 92358 - DNA, 20 bp, synthetic construct
  source 1..20: mol_type = other DNA
atttgccacactagattatt

SEQ ID NO: 92359 - DNA, 20 bp, synthetic construct
  source 1..20: mol_type = other DNA
catttgccacactagattat

SEQ ID NO: 92360 - DNA, 20 bp, synthetic construct
  source 1..20: mol_type = other DNA
ccatttgccacactagatta

SEQ ID NO: 92361 - DNA, 20 bp, synthetic construct
  source 1..20: mol_type = other DNA
tccatttgccacactagatt

SEQ ID NO: 92362 - DNA, 20 bp, synthetic construct
  source 1..20: mol_type = other DNA
ttccatttgccacactagat

SEQ ID NO: 92363 - DNA, 20 bp, synthetic construct
  source 1..20: mol_type = other DNA
cttccatttgccacactaga

SEQ ID NO: 92364 - DNA, 20 bp, synthetic construct
  source 1..20: mol_type = other DNA
tcttccatttgccacactag

SEQ ID NO: 92365 - DNA, 20 bp, synthetic construct
  source 1..20: mol_type = other DNA
atcttccatttgccacacta

SEQ ID NO: 92366 - DNA, 20 bp, synthetic construct
  source 1..20: mol_type = other DNA
catcttccatttgccacact

SEQ ID NO: 92367 - DNA, 20 bp, synthetic construct
  source 1..20: mol_type = other DNA
acatcttccatttgccacac

SEQ ID NO: 92368 - DNA, 20 bp, synthetic construct
  source 1..20: mol_type = other DNA
tacatcttccatttgccaca

SEQ ID NO: 92369 - DNA, 20 bp, synthetic construct
  source 1..20: mol_type = other DNA
gtacatcttccatttgccac

SEQ ID NO: 92370 - DNA, 20 bp, synthetic construct
  source 1..20: mol_type = other DNA
agtacatcttccatttgcca

SEQ ID NO: 92371 - DNA, 20 bp, synthetic construct
  source 1..20: mol_type = other DNA
cagtacatcttccatttgcc

SEQ ID NO: 92372 - DNA, 20 bp, synthetic construct
  source 1..20: mol_type = other DNA
ccagtacatcttccatttgc

SEQ ID NO: 92373 - DNA, 20 bp, synthetic construct
  source 1..20: mol_type = other DNA
tccagtacatcttccatttg

SEQ ID NO: 92374 - DNA, 20 bp, synthetic construct
  source 1..20: mol_type = other DNA
gtccagtacatcttccattt

SEQ ID NO: 92375 - DNA, 20 bp, synthetic construct
  source 1..20: mol_type = other DNA
agtccagtacatcttccatt

SEQ ID NO: 92376 - DNA, 20 bp, synthetic construct
  source 1..20: mol_type = other DNA
gagtccagtacatcttccat

SEQ ID NO: 92377 - DNA, 20 bp, synthetic construct
  source 1..20: mol_type = other DNA
agagtccagtacatcttcca

SEQ ID NO: 92378 - DNA, 20 bp, synthetic construct
  source 1..20: mol_type = other DNA
cagagtccagtacatcttcc

SEQ ID NO: 92379 - DNA, 20 bp, synthetic construct
  source 1..20: mol_type = other DNA
ccagagtccagtacatcttc

SEQ ID NO: 92380 - DNA, 20 bp, synthetic construct
  source 1..20: mol_type = other DNA
accagagtccagtacatctt

SEQ ID NO: 92381 - DNA, 20 bp, synthetic construct
  source 1..20: mol_type = other DNA
caccagagtccagtacatct

SEQ ID NO: 92382 - DNA, 20 bp, synthetic construct
  source 1..20: mol_type = other DNA
acaccagagtccagtacatc

SEQ ID NO: 92383 - DNA, 20 bp, synthetic construct
  source 1..20: mol_type = other DNA
aacaccagagtccagtacat

SEQ ID NO: 92384 - DNA, 20 bp, synthetic construct
  source 1..20: mol_type = other DNA
gaacaccagagtccagtaca

SEQ ID NO: 92385 - DNA, 20 bp, synthetic construct
  source 1..20: mol_type = other DNA
agaacaccagagtccagtac

SEQ ID NO: 92386 - DNA, 20 bp, synthetic construct
  source 1..20: mol_type = other DNA
cagaacaccagagtccagta

SEQ ID NO: 92387 - DNA, 20 bp, synthetic construct
  source 1..20: mol_type = other DNA
tcagaacaccagagtccagt

SEQ ID NO: 92388 - DNA, 20 bp, synthetic construct
  source 1..20: mol_type = other DNA
ctcagaacaccagagtccag

SEQ ID NO: 92389 - DNA, 20 bp, synthetic construct
  source 1..20: mol_type = other DNA
cctcagaacaccagagtcca

SEQ ID NO: 92390 - DNA, 20 bp, synthetic construct
  source 1..20: mol_type = other DNA
acctcagaacaccagagtcc

SEQ ID NO: 92391 - DNA, 20 bp, synthetic construct
  source 1..20: mol_type = other DNA
tacctcagaacaccagagtc

SEQ ID NO: 92392 - DNA, 20 bp, synthetic construct
  source 1..20: mol_type = other DNA
ctacctcagaacaccagagt

SEQ ID NO: 92393 - DNA, 20 bp, synthetic construct
  source 1..20: mol_type = other DNA
actacctcagaacaccagag

SEQ ID NO: 92394 - DNA, 20 bp, synthetic construct
  source 1..20: mol_type = other DNA
aactacctcagaacaccaga

SEQ ID NO: 92395 - DNA, 20 bp, synthetic construct
  source 1..20: mol_type = other DNA
caactacctcagaacaccag

SEQ ID NO: 92396 - DNA, 20 bp, synthetic construct
  source 1..20: mol_type = other DNA
ccaactacctcagaacacca

SEQ ID NO: 92397 - DNA, 20 bp, synthetic construct
  source 1..20: mol_type = other DNA
tccaactacctcagaacacc

SEQ ID NO: 92398 - DNA, 20 bp, synthetic construct
  source 1..20: mol_type = other DNA
ctccaactacctcagaacac

SEQ ID NO: 92399 - DNA, 20 bp, synthetic construct
  source 1..20: mol_type = other DNA
tctccaactacctcagaaca

SEQ ID NO: 92400 - DNA, 20 bp, synthetic construct
  source 1..20: mol_type = other DNA
atctccaactacctcagaac

SEQ ID NO: 92401 - DNA, 20 bp, synthetic construct
  source 1..20: mol_type = other DNA
aatctccaactacctcagaa

SEQ ID NO: 92402 - DNA, 20 bp, synthetic construct
  source 1..20: mol_type = other DNA
aaatctccaactacctcaga

SEQ ID NO: 92403 - DNA, 20 bp, synthetic construct
  source 1..20: mol_type = other DNA
taaatctccaactacctcag

SEQ ID NO: 92404 - DNA, 20 bp, synthetic construct
  source 1..20: mol_type = other DNA
ataaatctccaactacctca

SEQ ID NO: 92405 - DNA, 20 bp, synthetic construct
  source 1..20: mol_type = other DNA
tataaatctccaactacctc

SEQ ID NO: 92406 - DNA, 20 bp, synthetic construct
  source 1..20: mol_type = other DNA
gtataaatctccaactacct

SEQ ID NO: 92407 - DNA, 20 bp, synthetic construct
  source 1..20: mol_type = other DNA
agtataaatctccaactacc

SEQ ID NO: 92408 - DNA, 20 bp, synthetic construct
  source 1..20: mol_type = other DNA
aagtataaatctccaactac

SEQ ID NO: 92409 - DNA, 20 bp, synthetic construct
  source 1..20: mol_type = other DNA
aaagtataaatctccaacta

SEQ ID NO: 92410 - DNA, 20 bp, synthetic construct
  source 1..20: mol_type = other DNA
caaagtataaatctccaact

SEQ ID NO: 92411 - DNA, 20 bp, synthetic construct
  source 1..20: mol_type = other DNA
acaaagtataaatctccaac

SEQ ID NO: 92412 - DNA, 20 bp, synthetic construct
  source 1..20: mol_type = other DNA
tacaaagtataaatctccaa

SEQ ID NO: 92413 - DNA, 20 bp, synthetic construct
  source 1..20: mol_type = other DNA
gtacaaagtataaatctcca

SEQ ID NO: 92414 - DNA, 20 bp, synthetic construct
  source 1..20: mol_type = other DNA
tgtacaaagtataaatctcc

SEQ ID NO: 92415 - DNA, 20 bp, synthetic construct
  source 1..20: mol_type = other DNA
gtgtacaaagtataaatctc

SEQ ID NO: 92416 - DNA, 20 bp, synthetic construct
  source 1..20: mol_type = other DNA
tgtgtacaaagtataaatct

SEQ ID NO: 92417 - DNA, 20 bp, synthetic construct
  source 1..20: mol_type = other DNA
ttgtgtacaaagtataaatc

SEQ ID NO: 92418 - DNA, 20 bp, synthetic construct
  source 1..20: mol_type = other DNA
tttgtgtacaaagtataaat

SEQ ID NO: 92419 - DNA, 20 bp, synthetic construct
  source 1..20: mol_type = other DNA
atttgtgtacaaagtataaa

SEQ ID NO: 92420 - DNA, 20 bp, synthetic construct
  source 1..20: mol_type = other DNA
tatttgtgtacaaagtataa

SEQ ID NO: 92421 - DNA, 20 bp, synthetic construct
  source 1..20: mol_type = other DNA
atatttgtgtacaaagtata

SEQ ID NO: 92422 - DNA, 20 bp, synthetic construct
  source 1..20: mol_type = other DNA
tatatttgtgtacaaagtat

SEQ ID NO: 92423 - DNA, 20 bp, synthetic construct
  source 1..20: mol_type = other DNA
atatatttgtgtacaaagta

SEQ ID NO: 92424 - DNA, 20 bp, synthetic construct
  source 1..20: mol_type = other DNA
aatatatttgtgtacaaagt

SEQ ID NO: 92425 - DNA, 20 bp, synthetic construct
  source 1..20: mol_type = other DNA
caatatatttgtgtacaaag

SEQ ID NO: 92426 - DNA, 20 bp, synthetic construct
  source 1..20: mol_type = other DNA
acaatatatttgtgtacaaa

SEQ ID NO: 92427 - DNA, 20 bp, synthetic construct
  source 1..20: mol_type = other DNA
cacaatatatttgtgtacaa

SEQ ID NO: 92428 - DNA, 20 bp, synthetic construct
  source 1..20: mol_type = other DNA
ccacaatatatttgtgtaca

SEQ ID NO: 92429 - DNA, 20 bp, synthetic construct
  source 1..20: mol_type = other DNA
accacaatatatttgtgtac

SEQ ID NO: 92430 - DNA, 20 bp, synthetic construct
  source 1..20: mol_type = other DNA
gaccacaatatatttgtgta

SEQ ID NO: 92431 - DNA, 20 bp, synthetic construct
  source 1..20: mol_type = other DNA
tgaccacaatatatttgtgt

SEQ ID NO: 92432 - DNA, 20 bp, synthetic construct
  source 1..20: mol_type = other DNA
ttgaccacaatatatttgtg

SEQ ID NO: 92433 - DNA, 20 bp, synthetic construct
  source 1..20: mol_type = other DNA
tttgaccacaatatatttgt

SEQ ID NO: 92434 - DNA, 20 bp, synthetic construct
  source 1..20: mol_type = other DNA
ttttgaccacaatatatttg

SEQ ID NO: 92435 - DNA, 20 bp, synthetic construct
  source 1..20: mol_type = other DNA
attttgaccacaatatattt

SEQ ID NO: 92436 - DNA, 20 bp, synthetic construct
  source 1..20: mol_type = other DNA
gattttgaccacaatatatt

SEQ ID NO: 92437 - DNA, 20 bp, synthetic construct
  source 1..20: mol_type = other DNA
agattttgaccacaatatat

SEQ ID NO: 92438 - DNA, 20 bp, synthetic construct
  source 1..20: mol_type = other DNA
aagattttgaccacaatata

SEQ ID NO: 92439 - DNA, 20 bp, synthetic construct
  source 1..20: mol_type = other DNA
aaagattttgaccacaatat

SEQ ID NO: 92440 - DNA, 20 bp, synthetic construct
  source 1..20: mol_type = other DNA
gaaagattttgaccacaata

SEQ ID NO: 92441 - DNA, 20 bp, synthetic construct
  source 1..20: mol_type = other DNA
agaaagattttgaccacaat

SEQ ID NO: 92442 - DNA, 20 bp, synthetic construct
  source 1..20: mol_type = other DNA
cagaaagattttgaccacaa

SEQ ID NO: 92443 - DNA, 20 bp, synthetic construct
  source 1..20: mol_type = other DNA
acagaaagattttgaccaca

SEQ ID NO: 92444 - DNA, 20 bp, synthetic construct
  source 1..20: mol_type = other DNA
tacagaaagattttgaccac

SEQ ID NO: 92445 - DNA, 20 bp, synthetic construct
  source 1..20: mol_type = other DNA
ttacagaaagattttgacca

SEQ ID NO: 92446 - DNA, 20 bp, synthetic construct
  source 1..20: mol_type = other DNA
gttacagaaagattttgacc

SEQ ID NO: 92447 - DNA, 20 bp, synthetic construct
  source 1..20: mol_type = other DNA
tgttacagaaagattttgac

SEQ ID NO: 92448 - DNA, 20 bp, synthetic construct
  source 1..20: mol_type = other DNA
atgttacagaaagattttga

SEQ ID NO: 92449 - DNA, 20 bp, synthetic construct
  source 1..20: mol_type = other DNA
aatgttacagaaagattttg

SEQ ID NO: 92450 - DNA, 20 bp, synthetic construct
  source 1..20: mol_type = other DNA
taatgttacagaaagatttt

SEQ ID NO: 92451 - DNA, 20 bp, synthetic construct
  source 1..20: mol_type = other DNA
ataatgttacagaaagattt

SEQ ID NO: 92452 - DNA, 20 bp, synthetic construct
  source 1..20: mol_type = other DNA
aataatgttacagaaagatt

SEQ ID NO: 92453 - DNA, 20 bp, synthetic construct
  source 1..20: mol_type = other DNA
aaataatgttacagaaagat

SEQ ID NO: 92454 - DNA, 20 bp, synthetic construct
  source 1..20: mol_type = other DNA
gaaataatgttacagaaaga

SEQ ID NO: 92455 - DNA, 20 bp, synthetic construct
  source 1..20: mol_type = other DNA
agaaataatgttacagaaag

SEQ ID NO: 92456 - DNA, 20 bp, synthetic construct
  source 1..20: mol_type = other DNA
gagaaataatgttacagaaa

SEQ ID NO: 92457 - DNA, 20 bp, synthetic construct
  source 1..20: mol_type = other DNA
agagaaataatgttacagaa

SEQ ID NO: 92458 - DNA, 20 bp, synthetic construct
  source 1..20: mol_type = other DNA
cagagaaataatgttacaga

SEQ ID NO: 92459 - DNA, 20 bp, synthetic construct
  source 1..20: mol_type = other DNA
acagagaaataatgttacag

SEQ ID NO: 92460 - DNA, 20 bp, synthetic construct
  source 1..20: mol_type = other DNA
gacagagaaataatgttaca

SEQ ID NO: 92461 - DNA, 20 bp, synthetic construct
  source 1..20: mol_type = other DNA
agacagagaaataatgttac

SEQ ID NO: 92462 - DNA, 20 bp, synthetic construct
  source 1..20: mol_type = other DNA
aagacagagaaataatgtta

SEQ ID NO: 92463 - DNA, 20 bp, synthetic construct
  source 1..20: mol_type = other DNA
taagacagagaaataatgtt

SEQ ID NO: 92464 - DNA, 20 bp, synthetic construct
  source 1..20: mol_type = other DNA
ctaagacagagaaataatgt

SEQ ID NO: 92465 - DNA, 20 bp, synthetic construct
  source 1..20: mol_type = other DNA
gctaagacagagaaataatg

SEQ ID NO: 92466 - DNA, 20 bp, synthetic construct
  source 1..20: mol_type = other DNA
tgctaagacagagaaataat

SEQ ID NO: 92467 - DNA, 20 bp, synthetic construct
  source 1..20: mol_type = other DNA
gtgctaagacagagaaataa

SEQ ID NO: 92468 - DNA, 20 bp, synthetic construct
  source 1..20: mol_type = other DNA
tgtgctaagacagagaaata

SEQ ID NO: 92469 - DNA, 20 bp, synthetic construct
  source 1..20: mol_type = other DNA
ctgtgctaagacagagaaat

SEQ ID NO: 92470 - DNA, 20 bp, synthetic construct
  source 1..20: mol_type = other DNA
cctgtgctaagacagagaaa

SEQ ID NO: 92471 - DNA, 20 bp, synthetic construct
  source 1..20: mol_type = other DNA
gcctgtgctaagacagagaa

SEQ ID NO: 92472 - DNA, 20 bp, synthetic construct
  source 1..20: mol_type = other DNA
agcctgtgctaagacagaga

SEQ ID NO: 92473 - DNA, 20 bp, synthetic construct
  source 1..20: mol_type = other DNA
aagcctgtgctaagacagag

SEQ ID NO: 92474 - DNA, 20 bp, synthetic construct
  source 1..20: mol_type = other DNA
aaagcctgtgctaagacaga

SEQ ID NO: 92475 - DNA, 20 bp, synthetic construct
  source 1..20: mol_type = other DNA
taaagcctgtgctaagacag

SEQ ID NO: 92476 - DNA, 20 bp, synthetic construct
  source 1..20: mol_type = other DNA
gtaaagcctgtgctaagaca

SEQ ID NO: 92477 - DNA, 20 bp, synthetic construct
  source 1..20: mol_type = other DNA
agtaaagcctgtgctaagac

SEQ ID NO: 92478 - DNA, 20 bp, synthetic construct
  source 1..20: mol_type = other DNA
aagtaaagcctgtgctaaga

SEQ ID NO: 92479 - DNA, 20 bp, synthetic construct
  source 1..20: mol_type = other DNA
taagtaaagcctgtgctaag

SEQ ID NO: 92480 - DNA, 20 bp, synthetic construct
  source 1..20: mol_type = other DNA
ttaagtaaagcctgtgctaa

SEQ ID NO: 92481 - DNA, 20 bp, synthetic construct
  source 1..20: mol_type = other DNA
gttaagtaaagcctgtgcta

SEQ ID NO: 92482 - DNA, 20 bp, synthetic construct
  source 1..20: mol_type = other DNA
tgttaagtaaagcctgtgct

SEQ ID NO: 92483 - DNA, 20 bp, synthetic construct
  source 1..20: mol_type = other DNA
atgttaagtaaagcctgtgc

SEQ ID NO: 92484 - DNA, 20 bp, synthetic construct
  source 1..20: mol_type = other DNA
gatgttaagtaaagcctgtg

SEQ ID NO: 92485 - DNA, 20 bp, synthetic construct
  source 1..20: mol_type = other DNA
agatgttaagtaaagcctgt

SEQ ID NO: 92486 - DNA, 20 bp, synthetic construct
  source 1..20: mol_type = other DNA
gagatgttaagtaaagcctg

SEQ ID NO: 92487 - DNA, 20 bp, synthetic construct
  source 1..20: mol_type = other DNA
agagatgttaagtaaagcct

SEQ ID NO: 92488 - DNA, 20 bp, synthetic construct
  source 1..20: mol_type = other DNA
gagagatgttaagtaaagcc

SEQ ID NO: 92489 - DNA, 20 bp, synthetic construct
  source 1..20: mol_type = other DNA
ggagagatgttaagtaaagc

SEQ ID NO: 92490 - DNA, 20 bp, synthetic construct
  source 1..20: mol_type = other DNA
aggagagatgttaagtaaag

SEQ ID NO: 92491 - DNA, 20 bp, synthetic construct
  source 1..20: mol_type = other DNA
aaggagagatgttaagtaaa

SEQ ID NO: 92492 - DNA, 20 bp, synthetic construct
  source 1..20: mol_type = other DNA
caaggagagatgttaagtaa

SEQ ID NO: 92493 - DNA, 20 bp, synthetic construct
  source 1..20: mol_type = other DNA
tcaaggagagatgttaagta

SEQ ID NO: 92494 - DNA, 20 bp, synthetic construct
  source 1..20: mol_type = other DNA
atcaaggagagatgttaagt

SEQ ID NO: 92495 - DNA, 20 bp, synthetic construct
  source 1..20: mol_type = other DNA
aatcaaggagagatgttaag

SEQ ID NO: 92496 - DNA, 20 bp, synthetic construct
  source 1..20: mol_type = other DNA
caatcaaggagagatgttaa

SEQ ID NO: 92497 - DNA, 20 bp, synthetic construct
  source 1..20: mol_type = other DNA
acaatcaaggagagatgtta

SEQ ID NO: 92498 - DNA, 20 bp, synthetic construct
  source 1..20: mol_type = other DNA
gacaatcaaggagagatgtt

SEQ ID NO: 92499 - DNA, 20 bp, synthetic construct
  source 1..20: mol_type = other DNA
tgacaatcaaggagagatgt

SEQ ID NO: 92500 - DNA, 20 bp, synthetic construct
  source 1..20: mol_type = other DNA
atgacaatcaaggagagatg

SEQ ID NO: 92501 - DNA, 20 bp, synthetic construct
  source 1..20: mol_type = other DNA
aatgacaatcaaggagagat

SEQ ID NO: 92502 - DNA, 20 bp, synthetic construct
  source 1..20: mol_type = other DNA
aaatgacaatcaaggagaga

SEQ ID NO: 92503 - DNA, 20 bp, synthetic construct
  source 1..20: mol_type = other DNA
gaaatgacaatcaaggagag

SEQ ID NO: 92504 - DNA, 20 bp, synthetic construct
  source 1..20: mol_type = other DNA
tgaaatgacaatcaaggaga

SEQ ID NO: 92505 - DNA, 20 bp, synthetic construct
  source 1..20: mol_type = other DNA
atgaaatgacaatcaaggag

SEQ ID NO: 92506 - DNA, 20 bp, synthetic construct
  source 1..20: mol_type = other DNA
aatgaaatgacaatcaagga

SEQ ID NO: 92507 - DNA, 20 bp, synthetic construct
  source 1..20: mol_type = other DNA
gaatgaaatgacaatcaagg

SEQ ID NO: 92508 - DNA, 20 bp, synthetic construct
  source 1..20: mol_type = other DNA
agaatgaaatgacaatcaag

SEQ ID NO: 92509 - DNA, 20 bp, synthetic construct
  source 1..20: mol_type = other DNA
aagaatgaaatgacaatcaa

SEQ ID NO: 92510 - DNA, 20 bp, synthetic construct
  source 1..20: mol_type = other DNA
aaagaatgaaatgacaatca

SEQ ID NO: 92511 - DNA, 20 bp, synthetic construct
  source 1..20: mol_type = other DNA
aaaagaatgaaatgacaatc

SEQ ID NO: 92512 - DNA, 20 bp, synthetic construct
  source 1..20: mol_type = other DNA
caaaagaatgaaatgacaat

SEQ ID NO: 92513 - DNA, 20 bp, synthetic construct
  source 1..20: mol_type = other DNA
gcaaaagaatgaaatgacaa

SEQ ID NO: 92514 - DNA, 20 bp, synthetic construct
  source 1..20: mol_type = other DNA
tgcaaaagaatgaaatgaca

SEQ ID NO: 92515 - DNA, 20 bp, synthetic construct
  source 1..20: mol_type = other DNA
atgcaaaagaatgaaatgac

SEQ ID NO: 92516 - DNA, 20 bp, synthetic construct
  source 1..20: mol_type = other DNA
catgcaaaagaatgaaatga

SEQ ID NO: 92517 - DNA, 20 bp, synthetic construct
  source 1..20: mol_type = other DNA
acatgcaaaagaatgaaatg

SEQ ID NO: 92518 - DNA, 20 bp, synthetic construct
  source 1..20: mol_type = other DNA
aacatgcaaaagaatgaaat

SEQ ID NO: 92519 - DNA, 20 bp, synthetic construct
  source 1..20: mol_type = other DNA
taacatgcaaaagaatgaaa

SEQ ID NO: 92520 - DNA, 20 bp, synthetic construct
  source 1..20: mol_type = other DNA
ataacatgcaaaagaatgaa

SEQ ID NO: 92521 - DNA, 20 bp, synthetic construct
  source 1..20: mol_type = other DNA
aataacatgcaaaagaatga

SEQ ID NO: 92522 - DNA, 20 bp, synthetic construct
  source 1..20: mol_type = other DNA
aaataacatgcaaaagaatg

SEQ ID NO: 92523 - DNA, 20 bp, synthetic construct
  source 1..20: mol_type = other DNA
taaataacatgcaaaagaat

SEQ ID NO: 92524 - DNA, 20 bp, synthetic construct
  source 1..20: mol_type = other DNA
gtaaataacatgcaaaagaa

SEQ ID NO: 92525 - DNA, 20 bp, synthetic construct
  source 1..20: mol_type = other DNA
agtaaataacatgcaaaaga
